(19) United States
(12) Patent Application Publication
(10) Pub. No.: US 2024/0229078 A1
(43) Pub. Date: Jul. 11, 2024

(54) MATERIALS AND METHODS FOR TREATMENT OF GLYCOGEN STORAGE DISEASE TYPE 1A

(71) Applicant: CRISPR THERAPEUTICS AG, Zug (CH)

(72) Inventors: Chad Albert COWAN, South Boston, MA (US); Roman Lvovitch BOGORAD, South Boston, MA (US); Ante Sven LUNDBERG, South Boston, MA (US); KIRSTEN Leah BEAUDRY, South Boston, MA (US)

(21) Appl. No.: 18/406,577

(22) Filed: Jan. 8, 2024

Related U.S. Application Data
(63) Continuation of application No. 15/759,202, filed on Mar. 9, 2018, now Pat. No. 11,866,727.
(60) Provisional application No. 62/252,208, filed on Nov. 6, 2015.
(60) Provisional application No. 62/265,678, filed on Dec. 10, 2015.
(60) Provisional application No. 62/324,113, filed on Apr. 18, 2016.

(51) Int. Cl. C12N 15/90; A61K 38/00; C12N 9/16; C12N 9/22; C12N 15/11

(52) U.S. Cl. CPC C12N 15/907; C12N 9/16; C12N 9/22; C12N 15/11; C12Y 301/03009; A61K 38/00; C12N 2310/20; C12N 2800/80

(57) ABSTRACT

The present application provides materials and methods for treating a patient with Glycogen Storage Disease type 1a (GSD1a) both ex vivo and in vivo. In addition, the present application provides materials and methods for modulating the expression, function, and/or activity of the glucose-6-phosphatase, catalytic (G6PC) and/or the glucose-6-phosphatase (G6Pase) protein in a cell by genome editing.

### RELATED APPLICATIONS

[0001] This application is a continuation application of U.S. application Ser. No. 15/759,202, filed Mar. 9, 2018, which is a national phase filing under 35 USC § 371 of International Application No. PCT/IB2016/001709, filed Nov. 7, 2016, which claims the benefit of U.S. Provisional Application No. 62/252,208, filed Nov. 6, 2015; U.S. Provisional Application No. 62/265,678, filed Dec. 10, 2015; and U.S. Provisional Application No. 62/324,113, filed Apr. 18, 2016; the contents of each of which are incorporated herein by reference in their entirety.

### FIELD OF THE INVENTION

[0002] The present application provides materials and methods for treating a patient with Glycogen Storage Disease type 1a (GSD1a) both ex vivo and in vivo. In addition, the present application provides materials and methods for modulating the expression, function, and/or activity of the glucose-6-phosphatase, catalytic (G6PC) gene and/or the glucose-6-phosphatase (G6Pase) protein in a cell by genome editing.

### INCORPORATION BY REFERENCE OF SEQUENCE LISTING

[0003] This application contains a Sequence Listing in computer readable form (filename: 80EM-341765-US2_SequenceListing.xml; 80,838 KB in size, created Jan. 29, 2024), which is incorporated herein by reference in its entirety and forms part of the disclosure.

### BACKGROUND OF THE INVENTION

[0004] Glycogen storage disease type 1 (GSD1) is a group of diseases resulting from defects of proteins involved in the removal of phosphates from glucose-6-phosphate, which, as the final step in both gluconeogenesis and glycogenolysis, is crucial for the maintenance of blood glucose levels (Arion, W. J., & Canfield, W. K. (1993). Glucose-6-phosphatase and type 1 glycogen storage disease: some critical considerations. Eur J Pediatr, 152(S1), S7-S13; Froissart, R., et al. (2011). Glucose-6-phosphatase deficiency. Orphanet Journal Of Rare Diseases, 6(27); van Schaftingen, E., & Gerin, I. (2002). The glucose-6-phosphatase system. Biochem J, 362 (Pt 3), 513-532). GSD1 is clinically recognized by hepatomegaly (enlargement of the liver due to accumulation of glycogen) and hypoglycemia, and is usually diagnosed between 6 and 8 months of age (Koeberl, et al. (2007). Glycogen storage disease types I and II: treatment updates. J Inherit Metab Dis, 30(2), 159-164. doi: 10.1007/s10545-007-0519-9; Rake, J. P. (2002). Glycogen storage disease type I: diagnosis, management, clinical course and outcome. Results of the European Study on Glycogen Storage Disease Type I (ESGSDI). Eur J Pediatr, 161, S20-S34).

[0005] The most common form of GSD1 (about 80% of all cases) is GSD1a, which is caused by inactivating mutations to the glucose-6-phosphatase catalytic unit. In addition to the genetic association in patients, the mechanism of the disease was confirmed by association in both mouse and dog disease models (Froissart, R., et al. Orphanet Journal Of Rare Diseases, 2011; Kishnani, P. S., et al. (2001). Canine model and genomic structural organization of glycogen storage disease type Ia (GSD Ia). Vet Pathol, 38(1), 83-91; Mutel, E., et al. (2011). Targeted deletion of liver glucose-6 phosphatase mimics glycogen storage disease type 1a including development of multiple adenomas. J Hepatol, 54(3), 529-537. doi:10.1016/j.jhep.2010.08.014). Without the ability to dephosphorylate glucose for release into the blood, the breakdown of glycogen in liver cells is affected, along with the maintenance of normal blood glucose. This inability to release glucose underlies the symptoms of GSD1, as the body must then rely on alternative fuel sources, which can lead to lactic acidemia and hyperlipidemia (van Schaftingen, E., & Gerin, I. Biochem J, 2002).

[0006] GSD1a is a recessively inherited genetic disorder associated with various mutations to the G6PC gene that render it unable to dephosphorylate glucose (Chou, J. Y., & Mansfield, B. C. (2008). Mutations in the Glucose-6-Phosphatase-alpha (G6PC) Gene that Cause Type 1a Glycogen Storage Disease. Hum Mutat, 29(7), 921-930). Preclinical mouse models demonstrate that restoration of 20% of normal glucose-6-phosphatase activity using adeno-associated virus (AAV) gene delivery can normalize blood glucose, triglycerides and uric acid, as well as reduce hepatomegaly and renomegaly (Zingone, A., et al. (2000). Correction of glycogen storage disease type 1a in a mouse model by gene therapy. J Biol Chem, 275(2), 828-832). Another estimate based on human studies places the therapeutic threshold at 10% of normal glucose-6-phosphatase activity (Koeberl, et al. J Inherit Metab Dis, 2007). Both estimates indicate a reasonable and likely achievable goal for gene editing efficacy, suggesting that the G6PC gene may be a good target.

[0007] The other aspect of GSD1a that makes it a good candidate for gene therapy is the lack of satisfactory treatments. Current treatments are primarily limited to nutritional supplementation in an effort to maintain normal blood glucose and prevent seizures caused by hypoglycemia (Koeberl, D. D., et al. (2009). Emerging therapies for glycogen storage disease type I. Trends Endocrinol Metab, 20(5), 252-258. doi: 10.1016/j.tem.2009.02.003). The primary nutritional therapies are continuous naso-gastric infusion of glucose and frequent administration of uncooked cornstarch (Lee, P. J., et al. (1996). Uncooked cornstarch—efficacy in type I glycogenosis. Arch Dis Child, 74(6), 546-547). While these therapies can help to maintain normoglycemia and aid with amelioration of growth retardation, they do not address renomegaly or hepatomegaly. Though liver transplantation can cure the hepatic manifestations (hepatomegaly, hepatic adenomas) of GSD1, as well as aiding in maintaining normoglycemia, it cannot address all the issues caused by GSD1 (Selby, R., et al. (1993). Liver transplantation for type I and type IV glycogen storage disease. Eur J Pediatr, 152 Suppl 1, S71-76). Hepatocyte transplantation has also been investigated as a possible treatment option, however, long-term engraftment was not achieved and the therapy ultimately failed (Koeberl, et al. Trends Endocrinol Metab, 2009).

[0008] To address incomplete and unsatisfactory treatment options, several groups have been working on gene therapy in animal models of the disease, including mice and dogs. Most of these studies have used an AAV vector to convey a corrected version of the gene into hepatocytes, although one used a lentiviral vector (Clar, J., et al. (2015). Hepatic lentiviral gene transfer prevents the long-term onset of hepatic tumours of glycogen storage disease type 1a in mice. Hum Mol Genet, 24(8), 2287-2296. doi: 10.1093/hmg/ddu746; Koeberl, et al. Trends Endocrinol Metab, 2009). There have been some successes with this approach, with some studies achieving a temporary or longer term reversal of some disease symptoms with less than 20% restoration of glucose-6-phosphatase activity (Clar, J., et al. Hum Mol Genet, 2015; Lee, Y. M., et al. (2012). Prevention of hepatocellular adenoma and correction of metabolic abnormalities in murine glycogen storage disease type Ia by gene therapy. Hepatology, 56(5), 1719-1729. doi: 10.1002/hep.25717; Zingone, A., et al. J Biol Chem, 2000). There is also some evidence in dogs that AAV vector gene therapy can temporarily reduce symptoms of the disease (reviewed in Koeberl, et al. J Inherit Metab Dis, 2007). One mouse study also demonstrated that AAV mediated expression of glucose-6-phosphatase in the liver of as little as 3% normal glucose-6-phosphatase expression could ameliorate GSD1 symptoms and prevent formation of hepatic adenomas. They also demonstrated that even distribution of glucose-6-phosphatase activity is not necessary to observe a phenotypic change, instead noting foci of higher glucose-6-phosphatase activity 9 Clar, J., et al. Hum Mol Genet, 2015; Lee, Y. M., et al. Hepatology, 2012). Overall, the limited-term success of the AAV therapies combined with the lack of adequate available therapies and the reasonable estimates for therapeutic threshold make this disease a good candidate for gene editing therapy based on endonucleases

[0009] Genome engineering refers to the strategies and techniques for the targeted, specific modification of the genetic information (genome) of living organisms. Genome engineering is a very active field of research because of the wide range of possible applications, particularly in the areas of human health; the correction of a gene carrying a harmful mutation, for example, or to explore the function of a gene. Early technologies developed to insert a gene into a living cell, such as transgenesis, were often limited by the random nature of the insertion of the new sequence into the genome. The new gene was usually positioned blindly, and may have inactivated or disturbed the functioning of other genes, or even caused severe unwanted effects. Furthermore, these technologies generally offered no degree of reproducibility, as there was no guarantee that the new sequence would be inserted at the same place in two different cells. More recent genome engineering strategies, such as ZFNs, TALENs, HEs and MegaTALs, enable a specific area of the DNA to be modified, thereby increasing the precision of the correction or insertion compared to early technologies, and offering some degree of reproducibility. Despite this, such recent genome engineering strategies have limitations.

[0010] Despite efforts from researchers and medical professionals worldwide who have been trying to address GSD1a, and despite the promise of genome engineering approaches, there still remains a critical need for developing safe and effective treatments for GSD1a.

[0011] Prior approaches addressing GSD1a have severe limitations, such as limited success and lack of adequate available therapies. The present invention solves these problems by using genome engineering tools to create permanent changes to the genome that can restore the glucose-6-phosphatase (G6Pase) protein activity with a single treatment. Thus, the present invention corrects the underlying genetic defect causing the disease.

### SUMMARY OF THE INVENTION

[0012] Provided herein are cellular, ex vivo and in vivo methods for creating permanent changes to the genome by inserting, correcting, or modulating the expression or function of one or more exons within or near the glucose-6-phosphatase, catalytic (G6PC) gene or other DNA sequences that encode regulatory elements of the G6PC gene by genome editing and restoring glucose-6-phosphatase (G6Pase) protein activity, which can be used to treat Glycogen Storage Disease type 1a (GSD1a). Also provided herein are components, kits and compositions for performing such methods. Also provided are cells produced by such methods.

[0013] Provided herein is a method for editing a G6PC gene in a human cell by genome editing, the method comprising the step of introducing into the human cell one or more deoxyribonucleic acid (DNA) endonucleases to effect one or more single-strand breaks (SSBs) or one or more double-strand breaks (DSBs) within or near the G6PC gene or other DNA sequences that encode regulatory elements of the G6PC gene that results in at least one of a permanent insertion, correction, or modulation of expression or function of one or more exons within or near or affecting the expression or function of the G6PC gene or within or near a safe harbor locus that results in a permanent insertion of the G6PC gene and results in restoration of G6Pase protein activity. The human cell can be a liver cell.

[0014] Also provided herein is a method for inserting a G6PC gene in a human cell by genome editing, the method comprising the step of: introducing into the human cell one or more deoxyribonucleic acid (DNA) endonucleases to effect one or more single-strand breaks (SSBs) or double-strand breaks (DSBs) within or near a safe harbor locus that results in a permanent insertion of the G6PC gene, and results in restoration of G6Pase protein activity.

[0015] In one aspect, provided herein is a method for inserting the glucose-6-phosphatase, catalytic (G6PC) gene in a human cell by genome editing comprising introducing into the human cell one or more deoxyribonucleic acid (DNA) endonucleases to effect one or more single-strand breaks (SSBs) or double-strand breaks (DSBs) within or near the G6PC gene that results in a permanent insertion or correction of one or more mutations within the G6PC gene and restoration of G6Pase protein activity.

[0016] In another aspect, provided herein is an ex vivo method for treating a patient with Glycogen Storage Disease type 1a (GSD1a) comprising the steps of: creating a patient specific induced pluripotent stem cell (iPSC); editing within or near the glucose-6-phosphatase, catalytic (G6PC) gene or other DNA sequences that encode regulatory elements of the G6PC gene of the iPSC or editing within or near a safe harbor locus of the iPSC; or editing within or near a locus in the first exon of the HGD gene of the iPSC; differentiating the genome edited iPSC into a hepatocyte; and implanting the hepatocyte into the patient.

[0017] In some embodiments, the step of creating a patient specific iPSC comprises: isolating a somatic cell from the patient; and introducing a set of pluripotency-associated genes into the somatic cell to induce the cell to become a pluripotent stem cell. In some embodiments, the somatic cell is a fibroblast. In some embodiments, the set of pluripotency-associated genes is one or more of the genes selected from the group consisting of OCT4, SOX2, KLF4, Lin28, NANOG and cMYC.

[0018] The step of editing within or near a G6PC gene or other DNA sequences that encode regulatory elements of the G6PC gene of the iPSC or editing within or near a safe harbor locus of the G6PC gene of the iPSC or editing within or near a locus of the first exon of the HGD gene of the iPSC can comprise introducing into the iPSC one or more deoxyribonucleic acid (DNA) endonucleases to effect one or more single-strand breaks (SSBs) or double-strand breaks (DSBs) within or near the G6PC gene or other DNA sequences that encode regulatory elements of the G6PC gene that results in a permanent insertion, correction, or modulation of expression or function of one or more exons within or near or affecting the expression or function of the G6PC gene or within or near a safe harbor locus that results in a permanent insertion of the G6PC gene or within or near a locus in the first exon of HGD that results in a permanent insertion of the G6PC gene and results in restoration of G6Pase protein activity. The safe harbor locus can be selected from the group consisting of: AAVS1 (PPP1R12C), ALB, Angptl3, ApoC3, ASGR2, CCR5, FIX (F9), Gys2, HGD, Lp(a), Pcsk9, Serpina1, TF, and TTR. The safe harbor locus can be selected from the group consisting of: exon 1-2 of AAVS1 (PPP1R12C), exon 1-2 of ALB, exon 1-2 of Angptl3, exon 1-2 of ApoC3, exon 1-2 of ASGR2, exon 1-2 of CCR5, exon 1-2 of FIX (F9), exon 1-2 of Gys2, exon 1-2 of HGD, exon 1-2 of Lp(a), exon 1-2 of Pcsk9, exon 1-2 of Serpina1, exon 1-2 of TF, and exon 1-2 of TTR.

[0019] In some embodiments, the step of editing the G6PC gene of the iPSC comprises introducing into the iPSC one or more deoxyribonucleic acid (DNA) endonucleases to effect one or more double-strand breaks (DSBs) within the G6PC gene that results in permanent correction of one or more mutations within the G6PC gene and restoration of G6Pase protein activity.

[0020] In some embodiments, the step of differentiating the genome edited iPSC into a liver progenitor cell or a hepatocyte comprises one or more of the following: contacting the genome edited iPSC with one or more of activin, B27 supplement, FGF4, HGF, BMP2, BMP4, Oncostatin M, or Dexametason.

[0021] In some embodiments, the step of implanting the hepatocyte into the patient comprises implanting the hepatocyte into the patient by transplantation, local injection, or systemic infusion, or combinations thereof.

[0022] In yet another aspect, provided herein is an ex vivo method for treating a patient with Glycogen Storage Disease type 1a (GSD1a) comprising the steps of: performing a biopsy of the patient's liver; isolating a liver specific progenitor cell or primary hepatocyte; editing within or near the glucose-6-phosphatase, catalytic (G6PC) gene or other DNA sequences that encode regulatory elements of the G6PC gene of the progenitor cell or primary hepatocyte or editing within or near a safe harbor locus of the progenitor cell or primary hepatocyte; and implanting the genome-edited progenitor cell or primary hepatocyte into the patient.

[0023] In some embodiments, the step of isolating a liver specific progenitor cell or primary hepatocyte from the patient comprises: perfusion of fresh liver tissues with digestion enzymes, cell differential centrifugation, cell culturing, or combinations thereof.

[0024] In some embodiments, the step of editing within or near the G6PC gene or other DNA sequences that encode regulatory elements of the G6PC gene of the progenitor cell or primary hepatocyte or editing within or near a safe harbor locus of the white blood cell of the progenitor cell or primary hepatocyte comprises introducing into the progenitor cell or primary hepatocyte one or more deoxyribonucleic acid (DNA) endonucleases to effect one or more single-strand breaks (SSBs) or double-strand breaks (DSBs) within or near the G6PC gene or other DNA sequences that encode regulatory elements of the G6PC gene that results in permanent insertion, correction, or modulation of expression or function of one or more exons within or near or affecting the expression or function of the G6PC gene or within or near a safe harbor locus that results in a permanent insertion or correction of one or more mutations within the G6PC gene and restoration of G6Pase protein activity. The safe harbor locus can be selected from the group consisting of: AAVS1 (PPP1R12C), ALB, Angptl3, ApoC3, ASGR2, CCR5, FIX (F9), Gys2, HGD, Lp(a), Pcsk9, Serpina1, TF, and TTR. The safe harbor locus can be selected from the group consisting of: exon 1-2 of AAVS1 (PPP1R12C), exon 1-2 of ALB, exon 1-2 of Angptl3, exon 1-2 of ApoC3, exon 1-2 of ASGR2, exon 1-2 of CCR5, exon 1-2 of FIX (F9), exon 1-2 of Gys2, exon 1-2 of HGD, exon 1-2 of Lp(a), exon 1-2 of Pcsk9, exon 1-2 of Serpina1, exon 1-2 of TF, and exon 1-2 of TTR.

[0025] In some embodiments, the step of implanting the genome-edited liver-specific progenitor cell or primary hepatocyte into the patient comprises implanting the genome-edited liver-specific progenitor cell or primary hepatocyte into the patient by transplantation, local injection, or systemic infusion, or combinations thereof.

[0026] Also provided herein is an ex vivo method for treating a patient (e.g., a human) with Glycogen Storage Disease type 1a (GSD1a), the method comprising the steps of: i) isolating a mesenchymal stem cell from the patient; ii) editing within or near a G6PC gene or other DNA sequences that encode regulatory elements of the G6PC gene of the mesenchymal stem cell or editing within or near a safe harbor locus of the G6PC gene of the mesenchymal cell; iii) differentiating the genome-edited mesenchymal stem cell into a hepatocyte; and iv) implanting the hepatocyte into the patient.

[0027] In another aspect, provided herein is an ex vivo method for treating a patient with Glycogen Storage Disease type 1a (GSD1a) comprising the steps of: performing a biopsy of the patient's bone marrow; isolating a mesenchymal stem cell; editing the glucose-6-phosphatase, catalytic (G6PC) gene of the stem cell; differentiating the stem cell into a hepatocyte; and implanting the hepatocyte into the patient.

[0028] The mesenchymal stem cell can be isolated from the patient's bone marrow by performing a biopsy of the patient's bone marrow or the mesenchymal stem cell can be isolated from peripheral blood.

[0029] In some embodiments, the step of isolating a mesenchymal stem cell comprises: aspiration of bone marrow and isolation of mesenchymal cells by density centrifugation using Percoll™.

[0030] In some embodiments, the step of editing within or near the G6PC gene or other DNA sequences that encode regulatory elements of the G6PC gene of the mesenchymal stem cell comprises introducing into the mesenchymal stem cell one or more deoxyribonucleic acid (DNA) endonucleases to effect single-strand breaks (SSBs) or one or more double-strand breaks (DSBs) within or near the G6PC gene or other DNA sequences that encode regulatory elements of the G6PC gene or editing within or near a safe harbor locus of the G6PC gene that results in permanent correction or modulation of expression or function of one or more exons within or near or affecting the expression or function of the G6PC gene or within or near a safe harbor locus that results of one or more mutations within the G6PC gene and restoration of G6Pase protein activity. The safe harbor locus can be selected from the group consisting of: AAVS1 (PPP1R12C), ALB, Angptl3, ApoC3, ASGR2, CCR5, FIX (F9), Gys2, HGD, Lp(a), Pcsk9, Serpina1, TF, and TTR. The safe harbor locus can be selected from the group consisting of: exon 1-2 of AAVS1 (PPP1R12C), exon 1-2 of ALB, exon 1-2 of Angptl3, exon 1-2 of ApoC3, exon 1-2 of ASGR2, exon 1-2 of CCR5, exon 1-2 of FIX (F9), exon 1-2 of Gys2, exon 1-2 of HGD, exon 1-2 of Lp(a), exon 1-2 of Pcsk9, exon 1-2 of Serpina1, exon 1-2 of TF, and exon 1-2 of TTR.

[0031] In some embodiments, the step of differentiating the genome-edited mesenchymal stem cell into a hepatocyte comprises one or more of the following: contacting the genome edited mesenchymal stem cell with one or more of insulin, transferrin, FGF4, HGF, or bile acids.

[0032] In some embodiments, the step of implanting the hepatocyte into the patient comprises implanting the hepatocyte into the patient by transplantation, local injection, or systemic infusion, or combinations thereof.

[0033] In a further aspect, provided herein is an in vivo method for treating a patient with Glycogen Storage Disease type 1a (GSD1a) comprising the step of editing the glucose-6-phosphatase, catalytic (G6PC) gene in a cell of the patient, or other DNA sequences that encode regulatory elements of the G6PC gene, or editing within or near a safe harbor locus in a cell of the patient. The cell can be a liver cell.

[0034] In some embodiments, the step of editing the G6PC gene in a cell of the patient comprises introducing into the cell one or more deoxyribonucleic acid (DNA) endonucleases to effect one or more double-strand breaks (DSBs) within the G6PC gene that results in permanent correction of one or more mutations within the G6PC gene and restoration of G6Pase protein activity.

[0035] In some embodiments, the step of editing a G6PC gene in a cell of the patient comprises introducing into the cell one or more deoxyribonucleic acid (DNA) endonucleases to effect one or more single-strand breaks (SSBs) or double-strand breaks (DSBs) within or near the G6PC gene or other DNA sequences that encode regulatory elements of the G6PC gene or editing within or near a safe harbor locus of the G6PC gene that results in a permanent insertion, correction, or modulation of expression or function of one or more exons within or near or affecting the expression or function of the G6PC gene and restoration of G6Pase protein activity. The cell can be a hepatocyte, a liver progenitor cell, or combinations thereof.

[0036] In some embodiments, the one or more DNA endonucleases is a Cas1, Cas1B, Cas2, Cas3, Cas4, Cas5, Cas6, Cas7, Cas8, Cas9 (also known as Csn1 and Csx12), Cas100, Csy1, Csy2, Csy3, Cse1, Cse2, Csc1, Csc2, Csa5, Csn2, Csm2, Csm3, Csm4, Csm5, Csm6, Cmr1, Cmr3, Cmr4, Cmr5, Cmr6, Csb1, Csb2, Csb3, Csx17, Csx14, Csx10, Csx16, CsaX, Csx3, Csx1, Csx15, Csf1, Csf2, Csf3, Csf4, or Cpf1 endonuclease; a homolog thereof, recombination of the naturally occurring molecule, codon-optimized, or modified version thereof, and combinations of any of the foregoing.

[0037] In some embodiments, the method comprises introducing into the cell one or more polynucleotides encoding the DNA endonuclease. In some embodiments, the method comprises introducing into the cell one or more ribonucleic acids (RNAs) encoding the DNA endonuclease. In some embodiments, the one or more polynucleotides or one or more RNAs is one or more modified polynucleotides or one or more modified RNAs. In some embodiments, the method comprises introducing into the cell one or more DNA endonucleases wherein the endonuclease is a protein or polypeptide.

[0038] In some embodiments, the method further comprises introducing into the cell one or more guide ribonucleic acids (gRNAs). In some embodiments, the one or more gRNAs are single-molecule guide RNA (sgRNAs). In some embodiments, the one or more gRNAs or one or more sgRNAs is one or more modified gRNAs, one or more modified sgRNAs, or combinations thereof.

[0039] In some embodiments, the one or more DNA endonucleases is pre-complexed with one or more gRNAs, one or more sgRNAs, or combinations thereof.

[0040] In some embodiments, the method further comprises introducing into the cell a polynucleotide donor template comprising at least a portion of the wild-type G6PC gene, DNA sequences that encode wild-type regulatory elements of the G6PC gene, and/or cDNA. The at least a portion of the wild-type G6PC gene or cDNA can be exon 1, exon 2, exon 3, exon 4, exon 5, intronic regions, fragments or combinations thereof, or the entire G6PC gene or cDNA. The donor template can be either a single or double stranded polynucleotide. The donor template can have homologous arms to the 17q21 region.

[0041] In some embodiments, the method further comprises introducing into the cell one guide ribonucleic acid (gRNA) and a polynucleotide donor template comprising at least a portion of the wild-type G6PC gene. In some embodiments, the method further comprises introducing into the cell one guide ribonucleic acid (gRNA) and a polynucleotide donor template comprising at least a portion of a codon optimized or modified G6PC gene. The one or more DNA endonucleases is one or more Cas9 or Cpf1 endonucleases that effect single-strand break (SSB) or one double-strand break (DSB) at a DSB locus within or near the G6PC gene (or codon optimized or modified G6PC gene) or other DNA sequences that encode regulatory elements of the G6PC gene, or within or near a safe harbor locus, that facilitates insertion of a new sequence from the polynucleotide donor template into the chromosomal DNA at the locus or safe harbor locus that results in a permanent correction of a part of the chromosomal DNA of the G6PC gene or other DNA sequences that encode regulator elements of the G6PC gene proximal to the locus or safe harbor locus and restoration of G6Pase protein activity. In some embodiments, the gRNA comprises a spacer sequence that is complementary to a segment of the locus or safe harbor locus. In some embodiments, proximal means nucleotides both upstream and downstream of the locus or safe harbor locus.

[0042] In some embodiments, the method further comprises introducing into the cell two guide ribonucleic acid (gRNAs) and a polynucleotide donor template comprising at least a portion of the wild-type G6PC gene, and wherein the one or more DNA endonucleases is two or more Cas9 or Cpf1 endonucleases that effect or create at least two (e.g., a pair) single-strand breaks (SSBs) and/or a pair of double-strand breaks (DSBs), the first at a 5′ DSB locus and the second at a 3′ DSB locus, within the G6PC gene or other DNA sequences that encode regulatory elements of the G6PC gene or within or near a safe harbor locus, that facilitates insertion of a new sequence from the polynucleotide donor template into the chromosomal DNA between the 5′ DSB locus and the 3′ DSB locus that results in permanent correction of the chromosomal DNA between the 5′ DSB locus and the 3′ DSB locus within the G6PC gene or other DNA sequences that encode regulatory elements of the G6PC gene or within or near a safe harbor locus and restoration of G6Pase protein activity, and wherein the first guide RNA comprises a spacer sequence that is complementary to a segment of the 5′ DSB locus and the second guide RNA comprises a spacer sequence that is complementary to a segment of the 3′ DSB locus.

[0043] In some embodiments, the one or more gRNAs are single-molecule guide RNA (sgRNAs). In some embodiments, the one or more gRNAs or one or more sgRNAs is a modified gRNAs or one or more modified sgRNAs.

[0044] In some embodiments, the one or more DNA endonucleases is pre-complexed with one or more gRNAs or one or more sgRNAs.

[0045] In some embodiments, the part of the wild-type G6PC gene or cDNA is the entire G6PC gene or cDNA.

[0046] In some embodiments, the DSB, or 5′ DSB and 3′ DSB are in the first exon, first intron, or both the first exon and first intron of the G6PC gene.

[0047] In some embodiments, the gRNA or sgRNA is directed to one or more of the following pathological variants: rs80356479, rs80356486, rs606231368, rs80356488, rs587776757, rs104894565, rs104894566, rs1801175, rs1801176, rs104894567, rs104894571, rs80356482, rs80356483, rs104894563, rs367727229, rs387906505, rs104894568, rs104894569, rs80356487, rs764920787, rs80356485, rs780226142, rs80356484.

[0048] The at least a portion of the wild-type G6PC gene or cDNA can be exon 1, exon 2, exon 3, exon 4, exon 5, intronic regions, fragments or combinations thereof, or the entire G6PC gene or cDNA.

[0049] The donor template can be either a single or double stranded polynucleotide. The donor template can have homologous arms to the 17q21 region.

[0050] The SSB, DSB, 5′ DSB, and/or 3′ DSB can be in the first, second, third, fourth, or fifth exon or introns of the G6PC gene.

[0051] In some embodiments, the correction is by homology directed repair (HDR).

[0052] In some embodiments, the Cas9 or Cpf1 mRNA, gRNA, and donor template are either each formulated separately into lipid nanoparticles or all co-formulated into a lipid nanoparticle.

[0053] In some embodiments, the Cas9 or Cpf1 mRNA, gRNA, and donor template are formulated into separate exosomes or are co-formulated into an exosome.

[0054] In some embodiments, the Cas9 or Cpf1 mRNA is formulated into a lipid nanoparticle, and both the gRNA and donor template are delivered to the cell by a viral vector. In some embodiments, the viral vector is an adeno-associated virus (AAV). In some embodiments, the AAV vector is an AAV6 vector.

[0055] The Cas9 or Cpf1 mRNA can be formulated into a lipid nanoparticle, and the gRNA can be delivered to the cell by electroporation and donor template can be delivered to the cell by a viral vector. In some embodiments, the viral vector is an adeno-associated virus (AAV) vector. In some embodiments, the AAV vector is an AAV6 vector.

[0056] In some embodiments, the G6PC gene is located on Chromosome 17: 42,900,796-42,914,432 (Genome Reference Consortium—GRCh38/hg38).

[0057] The restoration of G6Pase protein activity can be compared to wild-type or normal G6Pase protein activity.

[0058] In another aspect, provided herein is one or more guide ribonucleic acids (gRNAs) comprising a spacer sequence selected from the group consisting of the sequences in FIGS. 1-90 for editing the glucose-6-phosphatase, catalytic gene in a cell from a patient with Glycogen Storage Disease type 1a. In some embodiments, the one or more gRNAs are single-molecule guide RNAs (sgRNAs). In some embodiments, the one or more gRNAs or one or more sgRNAs is one or more modified gRNAs or one or more modified sgRNAs.

[0059] In another aspect, provided herein are cells that have been modified by the preceding methods to permanently correct one or more mutations within the glucose-6-phosphatase, catalytic (G6PC) gene and restore G6Pase protein activity. Further provided herein are methods for ameliorating Glycogen Storage Disease type 1a (GSD1a) by the administration of cells that have been modified by the preceding methods to a GSD1a patient.

[0060] In some embodiments, the methods and compositions of the disclosure comprise one or more modified guide ribonucleic acids (gRNAs). Non-limiting examples of modifications can comprise one or more nucleotides modified at the 2′ position of the sugar, in some embodiments a 2′-O-alkyl, 2′-O-alkyl-O-alkyl, or 2′-fluoro-modified nucleotide. In some embodiments, RNA modifications include 2′-fluoro, 2′-amino or 2′ O-methyl modifications on the ribose of pyrimidines, abasic residues, desoxy nucleotides, or an inverted base at the 3′ end of the RNA.

[0061] In some embodiments, the one or more modified guide ribonucleic acids (gRNAs) comprise a modification that makes the modified gRNA more resistant to nuclease digestion than the native oligonucleotide. Non-limiting examples of such modifications include those comprising modified backbones, for example, phosphorothioates, phosphorothyos, phosphotriesters, methyl phosphonates, short chain alkyl or cycloalkyl intersugar linkages or short chain heteroatomic or heterocyclic intersugar linkages.

[0062] Various other aspects are described and exemplified herein.

### BRIEF DESCRIPTION OF THE DRAWINGS

[0063] Various aspects of materials and methods for treatment of Glycogen Storage Disease type 1a (GSD1a) disclosed and described in this specification can be better understood by reference to the accompanying figures, in which:

[0064] FIG. 1 is a list of gRNA 20 bp spacer sequences, associated PAM, chromosomal and gene location of the target sequence, cut site, and strand for targeting exons 1-2 of an AAVS1 (PPP1R12C) gene with a S. pyogenes Cas9 endonuclease.

[0065] FIG. 2 is a list of gRNA 20 bp spacer sequences, associated PAM, chromosomal and gene location of the target sequence, cut site, and strand for targeting exons 1-2 of an AAVS1 (PPP1R12C) gene with a S. aureus Cas9 endonuclease.

[0066] FIG. 3 is a list of gRNA 20 bp spacer sequences, associated PAM, chromosomal and gene location of the target, cut site, and strand for targeting exons 1-2 of an AAVS1 (PPP1R12C) gene with a S. thermophilus Cas9 endonuclease.

[0067] FIG. 4 is a list of gRNA 20 bp spacer sequences, associated PAM, chromosomal and gene location of the target, cut site, and strand for targeting exons 1-2 of an AAVS1 (PPP1R12C) gene with a T. denticola Cas9 endonuclease.

[0068] FIG. 5 is a list of gRNA 20 bp spacer sequences, associated PAM, chromosomal and gene location of the target, cut site, and strand for targeting exons 1-2 of an AAVS1 (PPP1R12C) gene with a N. meningitides Cas9 endonuclease.

[0069] FIG. 6 is a list of gRNA 22 bp spacer sequences, associated PAM, chromosomal and gene location of the target, two cut sites, and strand for targeting exons 1-2 of an AAVS1 (PPP1R12C) gene with an Acidominococcus, Lachnospiraceae, and Francisella novicida Cpf1 endonuclease.

[0070] FIG. 7 is a list of gRNA 20 bp spacer sequences, associated PAM, chromosomal and gene location of the target sequence, cut site, and strand for targeting exons 1-2 of an Alb gene with a S. pyogenes Cas9 endonuclease.

[0071] FIG. 8 is a list of gRNA 20 bp spacer sequences, associated PAM, chromosomal and gene location of the target sequence, cut site, and strand for targeting exons 1-2 of an Alb gene with a S. aureus Cas9 endonuclease.

[0072] FIG. 9 is a list of gRNA 20 bp spacer sequences, associated PAM, chromosomal and gene location of the target, cut site, and strand for targeting exons 1-2 of an Alb gene with a S. thermophilus Cas9 endonuclease.

[0073] FIG. 10 is a list of gRNA 20 bp spacer sequences, associated PAM, chromosomal and gene location of the target, cut site, and strand for targeting exons 1-2 of an Alb gene with a T. denticola Cas9 endonuclease.

[0074] FIG. 11 is a list of gRNA 20 bp spacer sequences, associated PAM, chromosomal and gene location of the target, cut site, and strand for targeting exons 1-2 of an Alb gene with a N. meningitides Cas9 endonuclease.

[0075] FIG. 12 is a list of gRNA 22 bp spacer sequences, associated PAM, chromosomal and gene location of the target, two cut sites, and strand for targeting exons 1-2 of an Alb gene with an Acidominococcus, Lachnospiraceae, and Francisella novicida Cpf1 endonuclease.

[0076] FIG. 13 is a list of gRNA 20 bp spacer sequences, associated PAM, chromosomal and gene location of the target sequence, cut site, and strand for targeting exons 1-2 of an Angpt13 gene with a S. pyogenes Cas9 endonuclease.

[0077] FIG. 14 is a list of gRNA 20 bp spacer sequences, associated PAM, chromosomal and gene location of the target sequence, cut site, and strand for targeting exons 1-2 of an Angpt13 gene with a S. aureus Cas9 endonuclease.

[0078] FIG. 15 is a list of gRNA 20 bp spacer sequences, associated PAM, chromosomal and gene location of the target, cut site, and strand for targeting exons 1-2 of an Angpt13 gene with a S. thermophilus Cas9 endonuclease.

[0079] FIG. 16 is a list of gRNA 20 bp spacer sequences, associated PAM, chromosomal and gene location of the target, cut site, and strand for targeting exons 1-2 of an Angpt13 gene with a T. denticola Cas9 endonuclease.

[0080] FIG. 17 is a list of gRNA 20 bp spacer sequences, associated PAM, chromosomal and gene location of the target, cut site, and strand for targeting exons 1-2 of an Angpt13 gene with a N. meningitides Cas9 endonuclease.

[0081] FIG. 18 is a list of gRNA 22 bp spacer sequences, associated PAM, chromosomal and gene location of the target, two cut sites, and strand for targeting exons 1-2 of an Angpt13 gene with an Acidominococcus, Lachnospiraceae, and Francisella novicida Cpf1 endonuclease.

[0082] FIG. 19 is a list of gRNA 20 bp spacer sequences, associated PAM, chromosomal and gene location of the target sequence, cut site, and strand for targeting exons 1-2 of an ApoC3 gene with a S. pyogenes Cas9 endonuclease.

[0083] FIG. 20 is a list of gRNA 20 bp spacer sequences, associated PAM, chromosomal and gene location of the target sequence, cut site, and strand for targeting exons 1-2 of an ApoC3 gene with a S. aureus Cas9 endonuclease.

[0084] FIG. 21 is a list of gRNA 20 bp spacer sequences, associated PAM, chromosomal and gene location of the target, cut site, and strand for targeting exons 1-2 of an ApoC3 gene with a S. thermophilus Cas9 endonuclease.

[0085] FIG. 22 is a list of gRNA 20 bp spacer sequences, associated PAM, chromosomal and gene location of the target, cut site, and strand for targeting exons 1-2 of an ApoC3 gene with a T. denticola Cas9 endonuclease.

[0086] FIG. 23 is a list of gRNA 20 bp spacer sequences, associated PAM, chromosomal and gene location of the target, cut site, and strand for targeting exons 1-2 of an ApoC3 gene with a N. meningitides Cas9 endonuclease.

[0087] FIG. 24 is a list of gRNA 22 bp spacer sequences, associated PAM, chromosomal and gene location of the target, two cut sites, and strand for targeting exons 1-2 of an ApoC3 gene with an Acidominococcus, Lachnospiraceae, and Francisella novicida Cpf1 endonuclease.

[0088] FIG. 25 is a list of gRNA 20 bp spacer sequences, associated PAM, chromosomal and gene location of the target sequence, cut site, and strand for targeting exons 1-2 of an ASGR2 gene with a S. pyogenes Cas9 endonuclease.

[0089] FIG. 26 is a list of gRNA 20 bp spacer sequences, associated PAM, chromosomal and gene location of the target sequence, cut site, and strand for targeting exons 1-2 of an ASGR2 gene with a S. aureus Cas9 endonuclease.

[0090] FIG. 27 is a list of gRNA 20 bp spacer sequences, associated PAM, chromosomal and gene location of the target, cut site, and strand for targeting exons 1-2 of an ASGR2 gene with a S. thermophilus Cas9 endonuclease.

[0091] FIG. 28 is a list of gRNA 20 bp spacer sequences, associated PAM, chromosomal and gene location of the target, cut site, and strand for targeting exons 1-2 of an ASGR2 gene with a T. denticola Cas9 endonuclease.

[0092] FIG. 29 is a list of gRNA 20 bp spacer sequences, associated PAM, chromosomal and gene location of the target, cut site, and strand for targeting exons 1-2 of an ASGR2 gene with a N. meningitides Cas9 endonuclease.

[0093] FIG. 30 is a list of gRNA 22 bp spacer sequences, associated PAM, chromosomal and gene location of the target, two cut sites, and strand for targeting exons 1-2 of an ASGR2 gene with an Acidominococcus, Lachnospiraceae, and Francisella novicida Cpf1 endonuclease.

[0094] FIG. 31 is a list of gRNA 20 bp spacer sequences, associated PAM, chromosomal and gene location of the target sequence, cut site, and strand for targeting exons 1-2 of a CCR5 gene with a S. pyogenes Cas9 endonuclease.

[0095] FIG. 32 is a list of gRNA 20 bp spacer sequences, associated PAM, chromosomal and gene location of the target sequence, cut site, and strand for targeting exons 1-2 of a CCR5 gene with a S. aureus Cas9 endonuclease.

[0096] FIG. 33 is a list of gRNA 20 bp spacer sequences, associated PAM, chromosomal and gene location of the target, cut site, and strand for targeting exons 1-2 of a CCR5 gene with a S. thermophilus Cas9 endonuclease.

[0097] FIG. 34 is a list of gRNA 20 bp spacer sequences, associated PAM, chromosomal and gene location of the target, cut site, and strand for targeting exons 1-2 of a CCR5 gene with a T. denticola Cas9 endonuclease.

[0098] FIG. 35 is a list of gRNA 20 bp spacer sequences, associated PAM, chromosomal and gene location of the target, cut site, and strand for targeting exons 1-2 of a CCR5 gene with a N. meningitides Cas9 endonuclease.

[0099] FIG. 36 is a list of gRNA 22 bp spacer sequences, associated PAM, chromosomal and gene location of the target, two cut sites, and strand for targeting exons 1-2 of a CCR5 gene with an Acidominococcus, Lachnospiraceae, and Francisella novicida Cpf1 endonuclease.

[0100] FIG. 37 is a list of gRNA 20 bp spacer sequences, associated PAM, chromosomal and gene location of the target sequence, cut site, and strand for targeting exons 1-2 of an F9 gene with a S. pyogenes Cas9 endonuclease.

[0101] FIG. 38 is a list of gRNA 20 bp spacer sequences, associated PAM, chromosomal and gene location of the target sequence, cut site, and strand for targeting exons 1-2 of an F9 gene with a S. aureus Cas9 endonuclease.

[0102] FIG. 39 is a list of gRNA 20 bp spacer sequences, associated PAM, chromosomal and gene location of the target, cut site, and strand for targeting exons 1-2 of an F9 gene with a S. thermophilus Cas9 endonuclease.

[0103] FIG. 40 is a list of gRNA 20 bp spacer sequences, associated PAM, chromosomal and gene location of the target, cut site, and strand for targeting exons 1-2 of an F9 gene with a T. denticola Cas9 endonuclease.

[0104] FIG. 41 is a list of gRNA 20 bp spacer sequences, associated PAM, chromosomal and gene location of the target, cut site, and strand for targeting exons 1-2 of an F9 gene with a N. meningitides Cas9 endonuclease.

[0105] FIG. 42 is a list of gRNA 22 bp spacer sequences, associated PAM, chromosomal and gene location of the target, two cut sites, and strand for targeting exons 1-2 of an F9 gene with an Acidominococcus, Lachnospiraceae, and Francisella novicida Cpf1 endonuclease.

[0106] FIG. 43 is a list of gRNA 20 bp spacer sequences, associated PAM, chromosomal and gene location of the target sequence, cut site, and strand for targeting exons 1-2 of a Gys2 gene with a S. pyogenes Cas9 endonuclease.

[0107] FIG. 44 is a list of gRNA 20 bp spacer sequences, associated PAM, chromosomal and gene location of the target sequence, cut site, and strand for targeting exons 1-2 of a Gys2 gene with a S. aureus Cas9 endonuclease.

[0108] FIG. 45 is a list of gRNA 20 bp spacer sequences, associated PAM, chromosomal and gene location of the target, cut site, and strand for targeting exons 1-2 of a Gys2 gene with a S. thermophilus Cas9 endonuclease.

[0109] FIG. 46 is a list of gRNA 20 bp spacer sequences, associated PAM, chromosomal and gene location of the target, cut site, and strand for targeting exons 1-2 of a Gys2 gene with a T. denticola Cas9 endonuclease.

[0110] FIG. 47 is a list of gRNA 20 bp spacer sequences, associated PAM, chromosomal and gene location of the target, cut site, and strand for targeting exons 1-2 of a Gys2 gene with a N. meningitides Cas9 endonuclease.

[0111] FIG. 48 is a list of gRNA 22 bp spacer sequences, associated PAM, chromosomal and gene location of the target, two cut sites, and strand for targeting exons 1-2 of a Gys2 gene with an Acidominococcus, Lachnospiraceae, and Francisella novicida Cpf1 endonuclease.

[0112] FIG. 49 is a list of gRNA 20 bp spacer sequences, associated PAM, chromosomal and gene location of the target sequence, cut site, and strand for targeting exons 1-2 of an HGD gene with a S. pyogenes Cas9 endonuclease.

[0113] FIG. 50 is a list of gRNA 20 bp spacer sequences, associated PAM, chromosomal and gene location of the target sequence, cut site, and strand for targeting exons 1-2 of an HGD gene with a S. aureus Cas9 endonuclease.

[0114] FIG. 51 is a list of gRNA 20 bp spacer sequences, associated PAM, chromosomal and gene location of the target, cut site, and strand for targeting exons 1-2 of an HGD gene with a S. thermophilus Cas9 endonuclease.

[0115] FIG. 52 is a list of gRNA 20 bp spacer sequences, associated PAM, chromosomal and gene location of the target, cut site, and strand for targeting exons 1-2 of an HGD gene with a T. denticola Cas9 endonuclease.

[0116] FIG. 53 is a list of gRNA 20 bp spacer sequences, associated PAM, chromosomal and gene location of the target, cut site, and strand for targeting exons 1-2 of an HGD gene with a N. meningitides Cas9 endonuclease.

[0117] FIG. 54 is a list of gRNA 22 bp spacer sequences, associated PAM, chromosomal and gene location of the target, two cut sites, and strand for targeting exons 1-2 of an HGD gene with an Acidominococcus, Lachnospiraceae, and Francisella novicida Cpf1 endonuclease.

[0118] FIG. 55 is a list of gRNA 20 bp spacer sequences, associated PAM, chromosomal and gene location of the target sequence, cut site, and strand for targeting exons 1-2 of an Lp(a) gene with a S. pyogenes Cas9 endonuclease.

[0119] FIG. 56 is a list of gRNA 20 bp spacer sequences, associated PAM, chromosomal and gene location of the target sequence, cut site, and strand for targeting exons 1-2 of an Lp(a) gene with a S. aureus Cas9 endonuclease.

[0120] FIG. 57 is a list of gRNA 20 bp spacer sequences, associated PAM, chromosomal and gene location of the target, cut site, and strand for targeting exons 1-2 of an Lp(a) gene with a S. thermophilus Cas9 endonuclease.

[0121] FIG. 58 is a list of gRNA 20 bp spacer sequences, associated PAM, chromosomal and gene location of the target, cut site, and strand for targeting exons 1-2 of an Lp(a) gene with a T. denticola Cas9 endonuclease.

[0122] FIG. 59 is a list of gRNA 20 bp spacer sequences, associated PAM, chromosomal and gene location of the target, cut site, and strand for targeting exons 1-2 of an Lp(a) gene with a N. meningitides Cas9 endonuclease.

[0123] FIG. 60 is a list of gRNA 22 bp spacer sequences, associated PAM, chromosomal and gene location of the target, two cut sites, and strand for targeting exons 1-2 of an Lp(a) gene with an Acidominococcus, Lachnospiraceae, and Francisella novicida Cpf1 endonuclease.

[0124] FIG. 61 is a list of gRNA 20 bp spacer sequences, associated PAM, chromosomal and gene location of the target sequence, cut site, and strand for targeting exons 1-2 of a PCSK9 gene with a S. pyogenes Cas9 endonuclease.

[0125] FIG. 62 is a list of gRNA 20 bp spacer sequences, associated PAM, chromosomal and gene location of the target sequence, cut site, and strand for targeting exons 1-2 of a PCSK9 gene with a S. aureus Cas9 endonuclease.

[0126] FIG. 63 is a list of gRNA 20 bp spacer sequences, associated PAM, chromosomal and gene location of the target, cut site, and strand for targeting exons 1-2 of a PCSK9 gene with a S. thermophilus Cas9 endonuclease.

[0127] FIG. 64 is a list of gRNA 20 bp spacer sequences, associated PAM, chromosomal and gene location of the target, cut site, and strand for targeting exons 1-2 of a PCSK9 gene with a T. denticola Cas9 endonuclease.

[0128] FIG. 65 is a list of gRNA 20 bp spacer sequences, associated PAM, chromosomal and gene location of the target, cut site, and strand for targeting exons 1-2 of a PCSK9 gene with a N. meningitides Cas9 endonuclease.

[0129] FIG. 66 is a list of gRNA 22 bp spacer sequences, associated PAM, chromosomal and gene location of the target, two cut sites, and strand for targeting exons 1-2 of a PCSK9 gene with an Acidominococcus, Lachnospiraceae, and Francisella novicida Cpf1 endonuclease.

[0130] FIG. 67 is a list of gRNA 20 bp spacer sequences, associated PAM, chromosomal and gene location of the target sequence, cut site, and strand for targeting exons 1-2 of a Serpina1 gene with a S. pyogenes Cas9 endonuclease.

[0131] FIG. 68 is a list of gRNA 20 bp spacer sequences, associated PAM, chromosomal and gene location of the target sequence, cut site, and strand for targeting exons 1-2 of a Serpina1 gene with a S. aureus Cas9 endonuclease.

[0132] FIG. 69 is a list of gRNA 20 bp spacer sequences, associated PAM, chromosomal and gene location of the target, cut site, and strand for targeting exons 1-2 of a Serpina1 gene with a S. thermophilus Cas9 endonuclease.

[0133] FIG. 70 is a list of gRNA 20 bp spacer sequences, associated PAM, chromosomal and gene location of the target, cut site, and strand for targeting exons 1-2 of a Serpina1 gene with a T. denticola Cas9 endonuclease.

[0134] FIG. 71 is a list of gRNA 20 bp spacer sequences, associated PAM, chromosomal and gene location of the target, cut site, and strand for targeting exons 1-2 of a Serpina1 gene with a N. meningitides Cas9 endonuclease.

[0135] FIG. 72 is a list of gRNA 22 bp spacer sequences, associated PAM, chromosomal and gene location of the target, two cut sites, and strand for targeting exons 1-2 of a Serpina1 gene with an Acidominococcus, Lachnospiraceae, and Francisella novicida Cpf1 endonuclease.

[0136] FIG. 73 is a list of gRNA 20 bp spacer sequences, associated PAM, chromosomal and gene location of the target sequence, cut site, and strand for targeting exons 1-2 of a TF gene with a S. pyogenes Cas9 endonuclease.

[0137] FIG. 74 is a list of gRNA 20 bp spacer sequences, associated PAM, chromosomal and gene location of the target sequence, cut site, and strand for targeting exons 1-2 of a TF gene with a S. aureus Cas9 endonuclease.

[0138] FIG. 75 is a list of gRNA 20 bp spacer sequences, associated PAM, chromosomal and gene location of the target, cut site, and strand for targeting exons 1-2 of a TF gene with a S. thermophilus Cas9 endonuclease.

[0139] FIG. 76 is a list of gRNA 20 bp spacer sequences, associated PAM, chromosomal and gene location of the target, cut site, and strand for targeting exons 1-2 of a TF gene with a T. denticola Cas9 endonuclease.

[0140] FIG. 77 is a list of gRNA 20 bp spacer sequences, associated PAM, chromosomal and gene location of the target, cut site, and strand for targeting exons 1-2 of a TF gene with a N. meningitides Cas9 endonuclease.

[0141] FIG. 78 is a list of gRNA 22 bp spacer sequences, associated PAM, chromosomal and gene location of the target, two cut sites, and strand for targeting exons 1-2 of a TF gene with an Acidominococcus, Lachnospiraceae, and Francisella novicida Cpf1 endonuclease.

[0142] FIG. 79 is a list of gRNA 20 bp spacer sequences, associated PAM, chromosomal and gene location of the target sequence, cut site, and strand for targeting exons 1-2 of a TTR gene with a S. pyogenes Cas9 endonuclease.

[0143] FIG. 80 is a list of gRNA 20 bp spacer sequences, associated PAM, chromosomal and gene location of the target sequence, cut site, and strand for targeting exons 1-2 of a TTR gene with a S. aureus Cas9 endonuclease.

[0144] FIG. 81 is a list of gRNA 20 bp spacer sequences, associated PAM, chromosomal and gene location of the target, cut site, and strand for targeting exons 1-2 of a TTR gene with a S. thermophilus Cas9 endonuclease.

[0145] FIG. 82 is a list of gRNA 20 bp spacer sequences, associated PAM, chromosomal and gene location of the target, cut site, and strand for targeting exons 1-2 of a TTR gene with a T. denticola Cas9 endonuclease.

[0146] FIG. 83 is a list of gRNA 20 bp spacer sequences, associated PAM, chromosomal and gene location of the target, cut site, and strand for targeting exons 1-2 of a TTR gene with a N. meningitides Cas9 endonuclease.

[0147] FIG. 84 is a list of gRNA 22 bp spacer sequences, associated PAM, chromosomal and gene location of the target, two cut sites, and strand for targeting exons 1-2 of a TTR gene with an Acidominococcus, Lachnospiraceae, and Francisella novicida Cpf1 endonuclease.

[0148] FIG. 85 is a list of gRNA 20 bp spacer sequences, associated PAM, chromosomal and gene location of the target sequence, cut site, and strand for targeting the G6PC gene with a S. pyogenes Cas9 endonuclease.

[0149] FIG. 86 is a list of gRNA 20 bp spacer sequences, associated PAM, chromosomal and gene location of the target sequence, cut site, and strand for targeting the G6PC gene with a S. aureus Cas9 endonuclease.

[0150] FIG. 87 is a list of gRNA 20 bp spacer sequences, associated PAM, chromosomal and gene location of the target, cut site, and strand for targeting the G6PC gene with a S. thermophilus Cas9 endonuclease.

[0151] FIG. 88 is a list of gRNA 20 bp spacer sequences, associated PAM, chromosomal and gene location of the target, cut site, and strand for targeting the G6PC gene with a T. denticola Cas9 endonuclease.

[0152] FIG. 89 is a list of gRNA 20 bp spacer sequences, associated PAM, chromosomal and gene location of the target, cut site, and strand for targeting the G6PC gene with a N. meningitides Cas9 endonuclease.

[0153] FIG. 90 is a list of gRNA 22 bp spacer sequences, associated PAM, chromosomal and gene location of the target, two cut sites, and strand for targeting the G6PC gene with an Acidominococcus, Lachnospiraceae, and Francisella novicida Cpf1 endonuclease.

[0154] FIG. 91A is a list of pathological variants of the G6PC gene, the start and stop locations of the variants on the chromosome, the type of variant, and the HGVS_g.

[0155] FIG. 91B is a list of pathological variants of the G6PC gene, the molecular consequences of the variant, the variant allele, the transcript change, and the protein change.

[0156] FIG. 92A is an illustration of a plasmid (referred to herein as “CTx-1”) comprising a codon optimized gene for S. pyogenes Cas9 endonuclease. The CTx-1 plasmid also comprises a gRNA scaffold sequence, which includes a 20 bp spacer sequence from the sequences listed in FIGS. 1, 7, 13, 19, 25, 31, 37, 43, 49, 55, 61, 67, 73, 79, 85, and 91.

[0157] FIG. 92B is an illustration of a plasmid (referred to herein as “CTx-2”) comprising a different codon optimized gene for S. pyogenes Cas9 endonuclease. The CTx-2 plasmid also comprises a gRNA scaffold sequence, which includes a 20 bp spacer sequence from the sequences listed in FIGS. 1, 7, 13, 19, 25, 31, 37, 43, 49, 55, 61, 67, 73, 79, 85, and 91.

[0158] FIG. 92C is an illustration of a plasmid (referred to herein as “CTx-3”) comprising yet another different codon optimized gene for S. pyogenes Cas9 endonuclease. The CTx-3 plasmid also comprises a gRNA scaffold sequence, which includes a 20 bp spacer sequence from the sequences listed in FIGS. 1, 7, 13, 19, 25, 31, 37, 43, 49, 55, 61, 67, 73, 79, 85, and 91.

[0159] FIG. 93A is an illustration depicting the type II CRISPR/Cas system.

[0160] FIG. 93B is another illustration depicting the type II CRISPR/Cas system.

[0161] FIG. 94A is an illustration depicting detection of Cas9 mRNA in different cells with constitutive expression (HEK293T, Hela, Huh7) or transient expression (HEK293T) of Cas9. pg2, pg20—2nd and 20th passages are presented for Huh7 cells.

[0162] FIG. 94B is an illustration depicting Cas9 expression in HepG2 transfected with mRNA.

[0163] FIG. 94C is an illustration depicting Cas9 expression in human primary hepatocytes transfected with Cas9 mRNA.

[0164] FIGS. 95A and 95B are a series of graphs depicting activity of gRNA CH31, comparison of split gRNA (crRNA+tracerRNA) and single stranded gRNA with various chemical modifications.

[0165] FIG. 96 is an illustration depicting a comparison of the single stranded donor oligonucleotide and wt allele, where mismatches are highlighted.

[0166] FIG. 97A is a graph depicting efficiency of Cas9/gRNA promoted HDR (− minus strand donor, + plus strand donor, no donor) using NextGen sequencing analysis of different gRNAs.

[0167] FIG. 97B is a graph depicting efficiency of Cas9/gRNA promoted HDR (− minus strand donor, + plus strand donor, no donor) using Sanger sequencing analysis (200 individual sequences) of the HDR gRNA3 (+ donor).

[0168] FIG. 97C is a graph depicting efficiency of Cas9/gRNA promoted HDR (− minus strand donor, + plus strand donor, no donor) using representative sequence with correct recombination vs wt allele.

[0169] FIG. 98 is a graph depicting specific G6PC activity measured in HEK293 cells transfected with plasmids encoding G6PC protein: wildtype and mutant forms.

[0170] FIGS. 99A-99C are a series of illustrations depicting a schematic representation of the donors for knock-in strategies described herein.

### BRIEF DESCRIPTION OF THE SEQUENCE LISTING

[0171] SEQ ID NOs: 1-2,032 are 20 bp spacer sequences for targeting exons 1-2 of an AAVS1 (PPP1R12C) gene with a S. pyogenes Cas9 endonuclease.

[0172] SEQ ID NOs: 2,033-2,203 are 20 bp spacer sequences for targeting exons 1-2 of an AAVS1 (PPP1R12C) gene with a S. aureus Cas9 endonuclease.

[0173] SEQ ID NOs: 2,204-2,221 are 20 bp spacer sequences for targeting exons 1-2 of an AAVS1 (PPP1R12C) gene with a S. thermophilus Cas9 endonuclease.

[0174] SEQ ID NOs: 2,222-2,230 are 20 bp spacer sequences for targeting exons 1-2 of an AAVS1 (PPP1R12C) gene with a T. denticola Cas9 endonuclease.

[0175] SEQ ID NOs: 2,231-2,305 are 20 bp spacer sequences for targeting exons 1-2 of an AAVS1 (PPP1R12C) gene with a N. meningitides Cas9 endonuclease.

[0176] SEQ ID NOs: 2,306-3,481 are 22 bp spacer sequences for targeting exons 1-2 of an AAVS1 (PPP1R12C) gene with an Acidominococcus, Lachnospiraceae, and Francisella novicida Cpf1 endonuclease.

[0177] SEQ ID NOs: 3,482-3,649 are 20 bp spacer sequences for targeting exons 1-2 of an Alb gene with a S. pyogenes Cas9 endonuclease.

[0178] SEQ ID NOs: 3,650-3,677 are 20 bp spacer sequences for targeting exons 1-2 of an Alb gene with a S. aureus Cas9 endonuclease.

[0179] SEQ ID NOs: 3,678-3,695 are 20 bp spacer sequences for targeting exons 1-2 of an Alb gene with a S. thermophilus Cas9 endonuclease.

[0180] SEQ ID NOs: 3,696-3,700 are 20 bp spacer sequences for targeting exons 1-2 of an Alb gene with a T. denticola Cas9 endonuclease.

[0181] SEQ ID NOs: 3,701-3,724 are 20 bp spacer sequences for targeting exons 1-2 of an Alb gene with a N. meningitides Cas9 endonuclease.

[0182] SEQ ID NOs: 3,725-4,103 are 22 bp spacer sequences for targeting exons 1-2 of an Alb gene with an Acidominococcus, Lachnospiraceae, and Francisella novicida Cpf1 endonuclease.

[0183] SEQ ID NOs: 4,104-4,448 are 20 bp spacer sequences for targeting exons 1-2 of an Angpt13 gene with a S. pyogenes Cas9 endonuclease.

[0184] SEQ ID NOs: 4,449-4,484 are 20 bp spacer sequences for targeting exons 1-2 of an Angpt13 gene with a S. aureus Cas9 endonuclease.

[0185] SEQ ID NOs: 4,485-4,507 are 20 bp spacer sequences for targeting exons 1-2 of an Angpt13 gene with a S. thermophilus Cas9 endonuclease.

[0186] SEQ ID NOs: 4,508-4,520 are 20 bp spacer sequences for targeting exons 1-2 of an Angpt13 gene with a T. denticola Cas9 endonuclease.

[0187] SEQ ID NOs: 4,521-4,583 are 20 bp spacer sequences for targeting exons 1-2 of an Angpt13 gene with a N. meningitides Cas9 endonuclease.

[0188] SEQ ID NOs: 4,584-5,431 are 22 bp spacer sequences for targeting exons 1-2 of an Angpt13 gene with an Acidominococcus, Lachnospiraceae, and Francisella novicida Cpf1 endonuclease.

[0189] SEQ ID NOs: 5,432-5,834 are 20 bp spacer sequences for targeting exons 1-2 of an ApoC3 gene with a S. pyogenes Cas9 endonuclease.

[0190] SEQ ID NOs: 5,835-5,859 are 20 bp spacer sequences for targeting exons 1-2 of an ApoC3 gene with a S. aureus Cas9 endonuclease.

[0191] SEQ ID NOs: 5,860-5,862 are 20 bp spacer sequences for targeting exons 1-2 of an ApoC3 gene with a S. thermophilus Cas9 endonuclease.

[0192] SEQ ID NOs: 5,863-5,864 are 20 bp spacer sequences for targeting exons 1-2 of an ApoC3 gene with a T. denticola Cas9 endonuclease.

[0193] SEQ ID NOs: 5,865-5,876 are 20 bp spacer sequences for targeting exons 1-2 of an ApoC3 gene with a N. meningitides Cas9 endonuclease.

[0194] SEQ ID NOs: 5,877-6, 108 are 22 bp spacer sequences for targeting exons 1-2 of an ApoC3 gene with an Acidominococcus, Lachnospiraceae, and Francisella novicida Cpf1 endonuclease.

[0195] SEQ ID NOs: 6, 109-7,876 are 20 bp spacer sequences for targeting exons 1-2 of an ASGR2 gene with a S. pyogenes Cas9 endonuclease.

[0196] SEQ ID NOs: 7,877-8,082 are 20 bp spacer sequences for targeting exons 1-2 of an ASGR2 gene with a S. aureus Cas9 endonuclease.

[0197] SEQ ID NOs: 8,083-8, 106 are 20 bp spacer sequences for targeting exons 1-2 of an ASGR2 gene with a S. thermophilus Cas9 endonuclease.

[0198] SEQ ID NOs: 8,107-8,118 are 20 bp spacer sequences for targeting exons 1-2 of an ASGR2 gene with a T. denticola Cas9 endonuclease.

[0199] SEQ ID NOs: 8, 119-8,201 are 20 bp spacer sequences for targeting exons 1-2 of an ASGR2 gene with a N. meningitides Cas9 endonuclease.

[0200] SEQ ID NOs: 8,202-9,641 are 22 bp spacer sequences for targeting exons 1-2 of an ASGR2 gene with an Acidominococcus, Lachnospiraceae, and Francisella novicida Cpf1 endonuclease.

[0201] SEQ ID NOs: 9,642-9,844 are 20 bp spacer sequences for targeting exons 1-2 of a CCR5 gene with a S. pyogenes Cas9 endonuclease.

[0202] SEQ ID NOs: 9,845-9,876 are 20 bp spacer sequences for targeting exons 1-2 of a CCR5 gene with a S. aureus Cas9 endonuclease.

[0203] SEQ ID NOs: 9,877-9,890 are 20 bp spacer sequences for targeting exons 1-2 of a CCR5 gene with a S. thermophilus Cas9 endonuclease.

[0204] SEQ ID NOs: 9,891-9,892 are 20 bp spacer sequences for targeting exons 1-2 of a CCR5 gene with a T. denticola Cas9 endonuclease.

[0205] SEQ ID NOs: 9,893-9,920 are 20 bp spacer sequences for targeting exons 1-2 of a CCR5 gene with a N. meningitides Cas9 endonuclease.

[0206] SEQ ID NOs: 9,921-10,220 are 22 bp spacer sequences for targeting exons 1-2 of a CCR5 gene with an Acidominococcus, Lachnospiraceae, and Francisella novicida Cpf1 endonuclease.

[0207] SEQ ID NOs: 10,221-11,686 are 20 bp spacer sequences for targeting exons 1-2 of an F9 gene with a S. pyogenes Cas9 endonuclease.

[0208] SEQ ID NOs: 11,687-11,849 are 20 bp spacer sequences for targeting exons 1-2 of an F9 gene with a S. aureus Cas9 endonuclease.

[0209] SEQ ID NOs: 11,850-11,910 are 20 bp spacer sequences for targeting exons 1-2 of an F9 gene with a S. thermophilus Cas9 endonuclease.

[0210] SEQ ID NOs: 11,911-11,935 are 20 bp spacer sequences for targeting exons 1-2 of an F9 gene with a T. denticola Cas9 endonuclease.

[0211] SEQ ID NOs: 11,936-12,088 are 20 bp spacer sequences for targeting exons 1-2 of an F9 gene with a N. meningitides Cas9 endonuclease.

[0212] SEQ ID NOs: 12,089-14,229 are 22 bp spacer sequences for targeting exons 1-2 of an F9 gene with an Acidominococcus, Lachnospiraceae, and Francisella novicida Cpf1 endonuclease.

[0213] SEQ ID NOs: 14,230-19,722 are 20 bp spacer sequences for targeting exons 1-2 of an Gys2 gene with a S. pyogenes Cas9 endonuclease.

[0214] SEQ ID NOs: 19,723-20,398 are gRNA 20 bp spacer sequences for targeting exons 1-2 of an Gys2 gene with a S. aureus Cas9 endonuclease.

[0215] SEQ ID NOs: 20,399-20,676 are gRNA 20 bp spacer sequences for targeting exons 1-2 of an Gys2 gene with a S. thermophilus Cas9 endonuclease.

[0216] SEQ ID NOs: 20,677-20,790 are gRNA 20 bp spacer sequences for targeting exons 1-2 of an Gys2 gene with a T. denticola Cas9 endonuclease.

[0217] SEQ ID NOs: 20,791-21,470 are gRNA 20 bp spacer sequences for targeting exons 1-2 of an Gys2 gene with a N. meningitides Cas9 endonuclease.

[0218] SEQ ID NOs: 21,471-29,902 are gRNA 22 bp spacer sequences for targeting exons 1-2 of an Gys2 gene with an Acidominococcus, Lachnospiraceae, and Francisella novicida Cpf1 endonuclease.

[0219] SEQ ID NOs: 29,903-31,595 are gRNA 20 bp spacer sequences for targeting exons 1-2 of an HGD gene with a S. pyogenes Cas9 endonuclease.

[0220] SEQ ID NOs: 31,596-31,809 are gRNA 20 bp spacer sequences for targeting exons 1-2 of an HGD gene with a S. aureus Cas9 endonuclease.

[0221] SEQ ID NOs: 31,810-31,892 are gRNA 20 bp spacer sequences for targeting exons 1-2 of an HGD gene with a S. thermophilus Cas9 endonuclease.

[0222] SEQ ID NOs: 31,893-31,911 are gRNA 20 bp spacer sequences for targeting exons 1-2 of an HGD gene with a T. denticola Cas9 endonuclease.

[0223] SEQ ID NOs: 31,912-32,112 are gRNA 20 bp spacer sequences for targeting exons 1-2 of an HGD gene with a N. meningitides Cas9 endonuclease.

[0224] SEQ ID NOs: 32, 113-34,437 are gRNA 22 bp spacer sequences for targeting exons 1-2 of an HGD gene with an Acidominococcus, Lachnospiraceae, and Francisella novicida Cpf1 endonuclease.

[0225] SEQ ID NOs: 34,438-38,232 are gRNA 20 bp spacer sequences for targeting exons 1-2 of an Lp(a) gene with a S. pyogenes Cas9 endonuclease.

[0226] SEQ ID NOs: 38,233-38,642 are gRNA 20 bp spacer sequences for exons 1-2 of targeting the Lp(a) gene with a S. aureus Cas9 endonuclease.

[0227] SEQ ID NOs: 38,643-38,778 are gRNA 20 bp spacer sequences for targeting the exons 1-2 of Lp(a) gene with a S. thermophilus Cas9 endonuclease.

[0228] SEQ ID NOs: 38,779-38,813 are gRNA 20 bp spacer sequences for targeting exons 1-2 of an Lp(a) gene with a T. denticola Cas9 endonuclease.

[0229] SEQ ID NOs: 38,814-39, 181 are gRNA 20 bp spacer sequences for targeting exons 1-2 of an Lp(a) gene with a N. meningitides Cas9 endonuclease.

[0230] SEQ ID NOs: 39,182-43,802 are gRNA 22 bp spacer sequences for targeting exons 1-2 of an Lp(a) gene with an Acidominococcus, Lachnospiraceae, and Francisella novicida Cpf1 endonuclease.

[0231] SEQ ID NOs: 43,803-45,822 are gRNA 20 bp spacer sequences for targeting exons 1-2 of an PCSK9 gene with a S. pyogenes Cas9 endonuclease.

[0232] SEQ ID NOs: 45,823-46,009 are gRNA 20 bp spacer sequences for targeting exons 1-2 of an PCSK9 gene with a S. aureus Cas9 endonuclease.

[0233] SEQ ID NOs: 46,010-46,045 are gRNA 20 bp spacer sequences, for targeting exons 1-2 of an PCSK9 gene with a S. thermophilus Cas9 endonuclease.

[0234] SEQ ID NOs: 46,046-46,059 are gRNA 20 bp spacer sequences for targeting exons 1-2 of an PCSK9 gene with a T. denticola Cas9 endonuclease.

[0235] SEQ ID NOs: 46,060-46,199 are gRNA 20 bp spacer sequences for targeting exons 1-2 of an PCSK9 gene with a N. meningitides Cas9 endonuclease.

[0236] SEQ ID NOs: 46,200-47,993 are gRNA 22 bp spacer sequences for targeting exons 1-2 of an PCSK9 gene with an Acidominococcus, Lachnospiraceae, and Francisella novicida Cpf1 endonuclease.

[0237] SEQ ID NOs: 47,994-49, 131 are gRNA 20 bp spacer sequences for targeting exons 1-2 of an Serpina1 gene with a S. pyogenes Cas9 endonuclease.

[0238] SEQ ID NOs: 49,132-49,224 are gRNA 20 bp spacer sequences for targeting exons 1-2 of an Serpina1 gene with a S. aureus Cas9 endonuclease.

[0239] SEQ ID NOs: 49,225-49,236 are gRNA 20 bp spacer sequences for targeting exons 1-2 of an Serpina1 gene with a S. thermophilus Cas9 endonuclease.

[0240] SEQ ID NOs: 49,237-49,239 are gRNA 20 bp spacer sequences for targeting exons 1-2 of an Serpina1 gene with a T. denticola Cas9 endonuclease.

[0241] SEQ ID NOs: 49,240-49,290 are gRNA 20 bp spacer sequences for targeting exons 1-2 of an Serpina1 gene with a N. meningitides Cas9 endonuclease.

[0242] SEQ ID NOs: 49,291-50,094 are gRNA 22 bp spacer sequences for targeting exons 1-2 of an Serpina1 gene with an Acidominococcus, Lachnospiraceae, and Francisella novicida Cpf1 endonuclease.

[0243] SEQ ID NOs: 50,095-50,926 are gRNA 20 bp spacer sequences for targeting exons 1-2 of an TF gene with a S. pyogenes Cas9 endonuclease.

[0244] SEQ ID NOs: 50,927-51,012 are gRNA 20 bp spacer sequences for targeting exons 1-2 of an TF gene with a S. aureus Cas9 endonuclease.

[0245] SEQ ID NOs: 51,013-51,024 are gRNA 20 bp spacer sequences for targeting exons 1-2 of an TF gene with a S. thermophilus Cas9 endonuclease.

[0246] SEQ ID NOs: 51,025-51,031 are gRNA 20 bp spacer sequences for targeting exons 1-2 of an TF gene with a T. denticola Cas9 endonuclease.

[0247] SEQ ID NOs: 51,032-51,075 are gRNA 20 bp spacer sequences for targeting exons 1-2 of an TF gene with a N. meningitides Cas9 endonuclease.

[0248] SEQ ID NOs: 51,076-51,711 are gRNA 22 bp spacer sequences targeting exons 1-2 of an TF gene with an Acidominococcus, Lachnospiraceae, and Francisella novicida Cpf1 endonuclease.

[0249] SEQ ID NOs: 51,712-52,011 are gRNA 20 bp spacer sequences for targeting exons 1-2 of an TTR gene with a S. pyogenes Cas9 endonuclease.

[0250] SEQ ID NOs: 52,012-52,052 are gRNA 20 bp spacer sequences for targeting exons 1-2 of an TTR gene with a S. aureus Cas9 endonuclease.

[0251] SEQ ID NOs: 52,053-52,069 are gRNA 20 bp spacer sequences for targeting exons 1-2 of an TTR gene with a S. thermophilus Cas9 endonuclease.

[0252] SEQ ID NOs: 52,070-52,071 are gRNA 20 bp spacer sequences for targeting exons 1-2 of an TTR gene with a T. denticola Cas9 endonuclease.

[0253] SEQ ID NOs: 52,072-52,106 are gRNA 20 bp spacer sequences for targeting exons 1-2 of an TTR gene with a N. meningitides Cas9 endonuclease.

[0254] SEQ ID NOs: 52, 107-52,508 are gRNA 22 bp spacer sequences for targeting exons 1-2 of an TTR gene with an Acidominococcus, Lachnospiraceae, and Francisella novicida Cpf1 endonuclease.

[0255] SEQ ID NOs: 52,509-57,754 are gRNA 20 bp spacer sequences for targeting the G6PC gene with a S. pyogenes Cas9 endonuclease.

[0256] SEQ ID NOs: 57,755-58,367 are gRNA 20 bp spacer sequences for targeting the G6PC gene with a S. aureus Cas9 endonuclease.

[0257] SEQ ID NOs: 58,368-58,512 are gRNA 20 bp spacer sequences for targeting the G6PC gene with a S. thermophilus Cas9 endonuclease.

[0258] SEQ ID NOs: 58,513-58,583 are gRNA 20 bp spacer sequences for targeting the G6PC gene with a T. denticola Cas9 endonuclease.

[0259] SEQ ID NOs: 58,584-59,035 are gRNA 20 bp spacer sequences for targeting the G6PC gene with a N. meningitides Cas9 endonuclease.

[0260] SEQ ID NOs: 59,036-64,789 are gRNA 22 bp spacer sequences for targeting the G6PC gene with an Acidominococcus, Lachnospiraceae, and Francisella novicida Cpf1 endonuclease.

### DETAILED DESCRIPTION

### Glycogen Storage Disease Type 1a (GSD1a)

[0261] GSD1a is caused by a homozygous or compound heterozygous mutation that inactivates both copies of the glucose-6-phosphatase, catalytic (G6PC) gene. This gene is located at 17q21 and consists of five exons (OMIM #23220). Glucose-6-Phosphatase (G6Pase) is an endoplasmic reticulum membrane-bound enzyme that catalyzes the removal of phosphate from Glucose-6-Phosphate (van Schaftingen, E., & Gerin, I. Biochem J, 2002). The glucose-6-phosphatase system. Biochem J, 362 (Pt 3), 513-532). This is the final step in both gluconeogenesis and glycogenolysis, making G6Pase very important for glucose homeostasis (van Schaftingen, E., & Gerin, I. Biochem J, 2002).

[0262] A G6PC knockout mouse model has been generated that demonstrates many of the same disease symptoms, including hyperlipidemia, lactic acidosis, hypoglycemia and hepatomegaly (Mutel, E., et al. J Hepatol, 2011). Not only do G6Pase deficient mice exhibit symptoms similar to those of human GSD1a patients, when these mice are given adenoviral based gene therapy with G6PC, many of the phenotypes associated with GSD1a are reversed (Lee, Y. M., et al. Hepatology, 2012; Zingone, A., et al. J Biol Chem, 2000). These combined studies, as well as results obtained from dogs with a mutation to this gene, indicate that G6PC is the underlying cause of GSD1a (Kishnani, P. S., et al. Vet Pathol, 2001).

[0263] There are various mutations associated with GSD1a, which are a combination of missense, nonsense, frameshift and other mutations, with the common effect of inactivating G6Pase (van Schaftingen, E., & Gerin, I. Biochem J, 2002). The various mutations are distributed across the five exons of the gene and appear to be roughly distributed in incidence based on heritage (e.g.: 50% of Caucasians have 130X, while 91% of Japanese patients and carriers have a G>T at base 727) (Kajihara, S., et al. (1995). Exon Redefinition by a Point Mutation within Exon 5 of the Glucose-6-Phosphatase Gene Is the Major Cause of Glycogen Storage Disease type Ia in Japan. Am. J. Hum. Genet., 57, 549-555; Lei, K. J., et al. (1995). Genetic Basis of Glycogen Storage Disease type 1a: Prevalent Mutations at the Glucose-6-Phosphatase Locus. Am. J. Hum. Genet., 57, 766-771). Overall, the most prevalent mutations were at codon 83, with a change from arginine to cysteine or histidine; and at codon 347, with a premature stop (Lei, K. J., et al. Am. J. Hum. Genet., 1995). Codon site 83 resides in the active site of the enzyme, and its charge is critical to its functionality, thus the amino acid change abolishes the action of the enzyme (Chou, J. Y., & Mansfield, B. C. Hum Mutat, 2008). Though the incidence of the various mutations that cause GSD1a seem to vary based upon population, the overall incidence of the disease is 1/100,000, with a carrier frequency of 1/150 (Koeberl, et al. Trends Endocrinol Metab, 2009). There is also an increased prevalence in Ashkenazi Jews, with an incidence of 1/20,000 (Ekstein, J., et al. (2004). Mutation frequencies for glycogen storage disease Ia in the Ashkenazi Jewish population. Am J Med Genet A, 129A(2), 162-164. doi:10.1002/ajmg.a.30232).

### Therapeutic Approach

[0264] As the known forms of GSD1a are monogenic disorders with recessive inheritance, it is likely that correcting one of the mutant alleles per cell will be sufficient for correction and restoration or partial restoration of GSD1a function. The correction of one allele can coincide with one copy that remains with the original mutation, or a copy that was cleaved and repaired by non-homologous end joining (NHEJ) and therefore was not properly corrected. Bi-allelic correction can also occur. Various editing strategies that can be employed for specific mutations are discussed below.

[0265] Correction of one or possibly both of the mutant alleles provides an important improvement over existing or potential therapies, such as introduction of G6PC expression cassettes through lentivirus delivery and integration. Gene editing has the advantage of precise genome modification and lower adverse effects, for example, the mutation can be corrected by the insertions or deletions that arise due to the NHEJ repair pathway. If the patient's G6PC gene has an inserted or deleted base, a targeted cleavage can result in a NHEJ-mediated insertion or deletion that restores the frame. Missense mutations can also be corrected through NHEJ-mediated correction using one or more guide RNA. The ability or likelihood of the cut(s) to correct the mutation can be designed or evaluated based on the local sequence and micro-homologies. NHEJ can also be used to delete segments of the gene, either directly or by altering splice donor or acceptor sites through cleavage by one gRNA targeting several locations, or several gRNAs. This may be useful if an amino acid, domain or exon contains the mutations and can be removed or inverted, or if the deletion otherwise restored function to the protein. Pairs of guide strands have been used for deletions and corrections of inversions.

[0266] Alternatively, the donor for correction by HDR contains the corrected sequence with small or large flanking homology arms to allow for annealing. HDR is essentially an error-free mechanism that uses a supplied homologous DNA sequence as a template during DSB repair. The rate of HDR is a function of the distance between the mutation and the cut site so choosing overlapping or nearby target sites is important. Templates can include extra sequences flanked by the homologous regions or can contain a sequence that differs from the genomic sequence, thus allowing sequence editing.

[0267] In addition to correcting mutations by NHEJ or HDR, a range of other options are possible. If there are small or large deletions or multiple mutations, a cDNA can be knocked in that contains the exons affected. A full length cDNA can be knocked into any “safe harbor”—i.e., non-deleterious insertion point that is not the G6PC gene itself—, with or without suitable regulatory sequences. If this construct is knocked-in near the G6PC regulatory elements, it should have physiological control, similar to the normal gene. Two or more (e.g., a pair) nucleases can be used to delete mutated gene regions, though a donor would usually have to be provided to restore function. In this case two gRNA and one donor sequence would be supplied.

[0268] Provided herein are methods to correct the specific mutation in the gene by inducing a double stranded break with Cas9 and a sgRNA or a pair of double stranded breaks around the mutation using two appropriate sgRNAs, and to provide a donor DNA template to induce Homology-Directed Repair (HDR). In some embodiments, the donor DNA template can be a short single stranded oligonucleotide, a short double stranded oligonucleotide, a long single or double stranded DNA molecule. These methods use gRNAs and donor DNA molecules for each of the variants of G6PC.

[0269] Provided herein are methods to knock-in G6PC cDNA or a minigene (comprised of one or more exons and introns or natural or synthetic introns) into the locus of the corresponding gene. These methods use a pair of sgRNA targeting the first exon and/or the first intron of the G6PC gene. In some embodiments, the donor DNA is single or double stranded DNA having homologous arms to the 17q21 region.

[0270] Provided herein are methods to knock-in G6PC cDNA or a minigene (comprised of one or more exons and introns or natural or synthetic introns) into the locus of the hot-spot, e.g. ALB gene. These methods use a pair of sgRNA targeting the first exon and/or the first intron of the gene located in the liver hotspot. In some embodiments, the donor DNA is single or double stranded DNA having homologous arms to the corresponding region.

[0271] Provided herein are cellular, ex vivo and in vivo methods for using genome engineering tools to create permanent changes to the genome by: 1) correcting, by insertions or deletions that arise due to the imprecise NHEJ pathway, one or more mutations within or near the G6PC gene, 2) correcting, by HDR, one or more mutations within or near the G6PC gene, or 3) deletion of the mutant region and knocking-in G6PC cDNA or a minigene (comprised of one or more exons and introns or natural or synthetic introns) into the gene locus or a safe harbor locus in the glucose-6-phosphatase, catalytic (G6PC) gene and restoring G6Pase protein activity. Such methods use endonucleases, such as CRISPR-associated (CRISPR/Cas9, Cpf1 and the like) nucleases, to permanently delete, insert, edit, correct, or replace one or more exons (i.e., mutations within or near the coding and/or splicing sequences) in the genomic locus of the G6PC gene or other DNA sequences that encode regulatory elements of the G6PC gene. In this way, examples set forth in the present disclosure can help to restore the reading frame or the wild-type sequence of, or otherwise correct, the gene with a single treatment (rather than deliver potential therapies for the lifetime of the patient). G6PC gene.

[0272] Provided herein are methods for treating a patient with GSD1a. An embodiment of such method is an ex vivo cell based therapy. For example, a patient specific induced pluripotent stem cell (iPSC) is created. Then, the chromosomal DNA of these iPS cells is edited using the materials and methods described herein. Next, the genome-edited iPSCs are differentiated into hepatocytes. Finally, the hepatocytes are implanted into the patient.

[0273] Another embodiment of such method is an ex vivo cell based therapy. For example, a biopsy of the patient's liver is performed. Then, a liver specific progenitor cell or primary hepatocyte is isolated from the patient, e.g., by a biopsy. Next, the chromosomal DNA of these progenitor cells or primary hepatocytes is edited using the materials and methods described herein. Finally, the genome-edited progenitor cells or primary hepatocytes are implanted into the patient.

[0274] Yet another embodiment of such method is an ex vivo cell based therapy. For example, a biopsy of the patient's bone marrow is performed. Then, a mesenchymal stem cell is isolated from the patient, which can be isolated from the patient's bone marrow, e.g., by biopsy, or peripheral blood. Next, the chromosomal DNA of these mesenchymal stem cells is edited using the materials and methods described herein. Next, the genome-edited mesenchymal stem cells are differentiated into hepatocytes. Finally, these hepatocytes are implanted into the patient.

[0275] One advantage of an ex vivo cell therapy approach is the ability to conduct a comprehensive analysis of the therapeutic prior to administration. All nuclease based therapeutics have some level of off-target effects. Performing gene correction ex vivo allows one to fully characterize the corrected cell population prior to implantation. Aspects of the invention include sequencing the entire genome of the corrected cells to ensure that the off-target cuts, if any, are in genomic locations associated with minimal risk to the patient. Furthermore, populations of specific cells, including clonal populations, can be isolated prior to implantation.

[0276] Another advantage of ex vivo cell therapy relates to genetic correction in iPSCs compared to other primary cell sources. iPSCs are prolific, making it easy to obtain the large number of cells that will be required for a cell based therapy. Furthermore, iPSCs are an ideal cell type for performing clonal isolations. This allows screening for the correct genomic correction, without risking a decrease in viability. In contrast, other potential cell types, such as primary hepatocytes, are viable for only a few passages and difficult to clonally expand. Thus, manipulation of GSD1a iPSCs will be much easier, and will shorten the amount of time needed to make the desired genetic correction.

[0277] Another embodiment of such method is an in vivo based therapy. In this method, the chromosomal DNA of the cells in the patient is corrected using the materials and methods described herein.

[0278] An advantage of in vivo gene therapy is the ease of therapeutic production and administration. The same therapeutic approach and therapy will have the potential to be used to treat more than one patient, for example a number of patients who share the same or similar genotype or allele. In contrast, ex vivo cell therapy typically requires using a patient's own cells, which are isolated, manipulated and returned to the same patient.

[0279] Also provided herein is a cellular method for editing the glucose-6-phosphatase, catalytic (G6PC) gene in a cell by genome editing. For example, a cell is isolated from a patient or animal. Then, the chromosomal DNA of the cell is edited using the materials and methods described herein.

[0280] The methods of the invention, regardless of whether a cellular or ex vivo or in vivo method, can involve one or a combination of the following: 1) correcting, by insertions or deletions that arise due to the imprecise NHEJ pathway, one or more mutations within or near the G6PC gene or other DNA sequences that encode regulatory elements of the G6PC gene, 2) correcting, by HDR, one or more mutations within or near the G6PC gene or other DNA sequences that encode regulatory elements of the G6PC gene, 3) deletion of the mutant region and knocking-in G6PC cDNA or a minigene (comprised of one or more exons and introns or natural or synthetic introns) into the gene locus or at a heterologous location in the genome (such as a safe harbor locus, such as, e.g., targeting exon 1-2 of, an albumin gene, an AAVS1 (PPP1R12C) gene, an ALB gene, an Angptl3 gene, an ApoC3 gene, an ASGR2 gene, a CCR5 gene, a FIX (F9) gene, a Gys2 gene, an HGD gene, an Lp(a) gene, a Pcsk9 gene, a Serpina1 gene, a TF gene, and/or a TTR gene, or 4) deletion of the mutant region and knocking-in G6PC cDNA or a minigene (comprised of one or more exons and introns or natural or synthetic introns) into the first exon of HGD, leading to disruption of HGD expression. HGD−/− hepatocytes have proliferation advantage when FAH activity is absent or reduced. Inhibition of FAH can be achieved by treatment with shRNA (AAV) targeting FAH, or siRNA (LNP formulated, or conjugate with GalNAc, or with cholesterol) or treatment with CEHPOBA (see e.g., Paulk et al. “In vivo selection of transplanted hepatocytes by pharmacological inhibition of fumarylacetoacetate hydrolase in wild-type mice.” Mol Ther 2012, 20(10): 1981-1987). Assessment of efficiency of HDR mediated knock-in of cDNA into the first exon can utilize cDNA knock-in into “safe harbor” sites such as: single-stranded or double-stranded DNA having homologous arms to one of the following regions, for example: ApoC3 (chr11:116829908-116833071), Angptl3 (chr1:62,597,487-62,606,305), Serpina1 (chr14:94376747-94390692), Lp(a) (chr6:160531483-160664259), Pcsk9 (chr1:55,039,475-55,064,852), FIX (chrX:139,530,736-139,563,458), ALB (chr4:73,404,254-73,421,411), TTR (chr18:31,591,766-31,599,023), TF (chr3:133,661,997-133,779,005), Gys2 (chr12:21,536, 188-21,604,857), AAVS1(PPP1R12C) (chr19:55,090,912-55,117,599), HGD (chr3:120,628,167-120,682,570), CCR5 (chr3:46,370,854-46,376,206), ASGR2 (chr17:7,101,322-7,114,310), 5′UTR correspondent to ASS1 or alternative 5′ UTR, complete CDS of G6PC and 3′ UTR of G6PC or modified 3′ UTR and at least 80 nt of the first intron, alternatively same DNA template sequence will be delivered by AAV. Both the HDR and knock-in strategies utilize a donor DNA template in Homology-Directed Repair (HDR). HDR in either strategy may be accomplished by making one or more single-stranded breaks (SSBs) or one or more double-stranded breaks (DSBs) at specific sites in the genome by using one or more endonucleases.

[0281] For example, the NHEJ correction strategy can involve restoring the reading frame in the G6PC gene by inducing one single stranded break or double stranded break in the gene of interest with one or more CRISPR endonucleases and a gRNA (e.g., crRNA+tracrRNA, or sgRNA), or two or more single stranded breaks or double stranded breaks in the gene of interest with two or more CRISPR endonucleases and two or more sgRNAs. This approach can require development and optimization of sgRNAs for the G6PC gene.

[0282] For example, the HDR correction strategy involves restoring the reading frame in the G6PC gene by inducing one single stranded break or double stranded break in the gene of interest one or more CRISPR endonucleases and gRNA (e.g., crRNA+tracrRNA, or sgRNA), or two or more single stranded breaks or double stranded breaks in the gene of interest with one or more CRISPR endonucleases and two or more appropriate gRNAs, in the presence of a donor DNA template introduced exogenously to direct the cellular DSB response to Homology-Directed Repair (the donor DNA template can be a short single stranded oligonucleotide, a short double stranded oligonucleotide, a long single or double stranded DNA molecule). This approach requires development and optimization of gRNAS and donor DNA molecules for all major variants of the G6PC gene.

[0283] For example, the knock-in strategy involves knocking-in G6PC cDNA or a minigene (comprised of one or more exons and introns or natural or synthetic introns) into the locus of the gene using a gRNA (e.g., crRNA+tracrRNA, or sgRNA) or a pair of gRNAs targeting upstream of or in the first or other exon and/or intron of the G6PC gene, or in a safe harbor site (such as, e.g., exon 1-2 of, AAVS1 (PPP1R12C), ALB, Angpt13, ApoC3, ASGR2, CCR5, FIX (F9), Gys2, HGD, Lp(a), Pcsk9, Serpina1, TF, and/or TTR). The donor DNA will be single or double stranded DNA having homologous arms to the 17q21 region.

[0284] The advantages for both strategies (correction and knock-in) are similar, including in principle both short and long term beneficial clinical and laboratory effects. In addition, it may be that only a low percentage of G6Pase activity is required to provide therapeutic benefit. Another advantage for both strategies is that most patients have low-level gene and protein activity, therefore suggesting that additional protein expression, for example following gene correction, should not necessarily lead to an immune response against the target gene product. The knock-in approach does provide one advantage over the correction approach—the ability to treat all patients versus only a subset of patients. While there is a common mutation in this gene (at codon 83), there are also many other possible mutations, and using the knock-in method could treat all of them. The other issue with gene editing in this manner is the need for a DNA donor for HDR.

[0285] In addition to the above genome editing strategies, another strategy involves modulating expression, function, or activity of G6PC by editing in the regulatory sequence.

[0286] In addition to the editing options listed above, Cas9 or similar proteins can be used to target effector domains to the same target sites that can be identified for editing, or additional target sites within range of the effector domain. A range of chromatin modifying enzymes, methylases or demethlyases can be used to alter expression of the target gene. One possibility is increasing the expression of the G6Pase protein if the mutation leads to lower activity. These types of epigenetic regulation have some advantages, particularly as they are limited in possible off-target effects.

[0287] A number of types of genomic target sites are present in addition to mutations in the coding and splicing sequences.

[0288] The regulation of transcription and translation implicates a number of different classes of sites that interact with cellular proteins or nucleotides. Often the DNA binding sites of transcription factors or other proteins can be targeted for mutation or deletion to study the role of the site, though they can also be targeted to change gene expression. Sites can be added through non-homologous end joining (NHEJ) or direct genome editing by homology directed repair (HDR). Increased use of genome sequencing, RNA expression and genome-wide studies of transcription factor binding have increased the ability to identify how the sites lead to developmental or temporal gene regulation. These control systems may be direct or may involve extensive cooperative regulation that can require the integration of activities from multiple enhancers. Transcription factors typically bind 6-12 bp-long degenerate DNA sequences. The low level of specificity provided by individual sites suggests that complex interactions and rules are involved in binding and the functional outcome. Binding sites with less degeneracy may provide simpler means of regulation. Artificial transcription factors can be designed to specify longer sequences that have less similar sequences in the genome and have lower potential for off-target cleavage. Any of these types of binding sites can be mutated, deleted or even created to enable changes in gene regulation or expression (Canver, M. C. et al., Nature (2015)).

[0289] Another class of gene regulatory regions having these features is microRNA (miRNA) binding sites. miRNAs are non-coding RNAs that play key roles in posttranscriptional gene regulation. miRNA may regulate the expression of 30% of all mammalian protein-encoding genes. Specific and potent gene silencing by double stranded RNA (RNAi) was discovered, plus additional small noncoding RNA (Canver, M. C. et al., Nature (2015)). The largest class of noncoding RNAs important for gene silencing are miRNAs. In mammals, miRNAs are first transcribed as a long RNA transcripts, which can be separate transcriptional units, part of protein introns, or other transcripts. The long transcripts are called primary miRNA (pri-miRNA) that include imperfectly base-paired hairpin structures. These pri-miRNA are cleaved into one or more shorter precursor miRNAs (pre-miRNAs) by Microprocessor, a protein complex in the nucleus, involving Drosha.

[0290] Pre-miRNAs are short stem loops ˜70 nucleotides in length with a 2-nucleotide 3′-overhang that are exported, into the mature 19-25 nucleotide miRNA:miRNA* duplexes. The miRNA strand with lower base pairing stability (the guide strand) is loaded onto the RNA-induced silencing complex (RISC). The passenger guide strand (marked with *), may be functional, but is usually degraded. The mature miRNA tethers RISC to partly complementary sequence motifs in target mRNAs predominantly found within the 3′ untranslated regions (UTRs) and induces posttranscriptional gene silencing (Bartel, D. P. Cell 136, 215-233 (2009); Saj, A. & Lai, E. C. Curr Opin Genet Dev 21, 504-510 (2011)).

[0291] miRNAs are important in development, differentiation, cell cycle and growth control, and in virtually all biological pathways in mammals and other multicellular organisms. miRNAs are also involved in cell cycle control, apoptosis and stem cell differentiation, hematopoiesis, hypoxia, muscle development, neurogenesis, insulin secretion, cholesterol metabolism, aging, viral replication and immune responses.

[0292] A single miRNA can target hundreds of different mRNA transcripts, while an individual transcript can be targeted by many different miRNAs. More than 28645 microRNAs have been annotated in the latest release of miRBase (v. 21). Some miRNAs are encoded by multiple loci, some of which are expressed from tandemly co-transcribed clusters. The features allow for complex regulatory networks with multiple pathways and feedback controls. miRNAs are integral parts of these feedback and regulatory circuits and can help regulate gene expression by keeping protein production within limits (Herranz, H. & Cohen, S. M. Genes Dev 24, 1339-1344 (2010); Posadas, D. M. & Carthew, R. W. Curr Opin Genet Dev 27, 1-6 (2014)).

[0293] miRNA are also important in a large number of human diseases that are associated with abnormal miRNA expression. This association underscores the importance of the miRNA regulatory pathway. Recent miRNA deletion studies have linked miRNA with regulation of the immune responses (Stern-Ginossar, N. et al., Science 317, 376-381 (2007)).

[0294] miRNA also have a strong link to cancer and may play a role in different types of cancer. miRNAs have been found to be downregulated in a number of tumors. miRNA are important in the regulation of key cancer-related pathways, such as cell cycle control and the DNA damage response, and are therefore used in diagnosis and are being targeted clinically. MicroRNAs delicately regulate the balance of angiogenesis, such that experiments depleting all microRNAs suppresses tumor angiogenesis (Chen, S. et al., Genes Dev 28, 1054-1067 (2014)).

[0295] As has been shown for protein coding genes, miRNA genes are also subject to epigenetic changes occurring with cancer. Many miRNA loci are associated with CpG islands increasing their opportunity for regulation by DNA methylation (Weber, B., Stresemann, C., Brueckner, B. & Lyko, F. Cell Cycle 6, 1001-1005 (2007)). The majority of studies have used treatment with chromatin remodeling drugs to reveal epigenetically silenced miRNAs.

[0296] In addition to their role in DNA silencing, miRNA can also activate translation (Posadas, D. M. & Carthew, R. W. Curr Opin Genet Dev 27, 1-6 (2014)). Knocking out these sites may lead to decreased expression of the targeted gene, while introducing these sites may increase expression.

[0297] Individual miRNA can be knocked out most effectively by mutating the seed sequence (bases 2-8 of the microRNA), which is important for binding specificity. Cleavage in this region, followed by mis-repair by NHEJ can effectively abolish miRNA function by blocking binding to target sites. miRNA could also be inhibited by specific targeting of the special loop region adjacent to the palindromic sequence. Catalytically inactive Cas9 can also be used to inhibit shRNA expression (Zhao, Y. et al., Sci Rep 4, 3943 (2014)). In addition to targeting the miRNA, the binding sites can also be targeted and mutated to prevent the silencing by miRNA.

### Human Cells

[0298] For ameliorating GSD1a, as described and illustrated herein, the principal targets for gene editing are human cells. For example, in the ex vivo methods, the human cells are somatic cells, which after being modified using the techniques as described, can give rise to hepatocytes or progenitor cells. For example, in the in vivo methods, the human cells are hepatocytes, renal cells or cells from other affected organs.

[0299] By performing gene editing in autologous cells that are derived from and therefore already completely matched with the patient in need, it is possible to generate cells that can be safely re-introduced into the patient, and effectively give rise to a population of cells that will be effective in ameliorating one or more clinical conditions associated with the patient's disease.

[0300] Progenitor cells (also referred to as stem cells herein) are capable of both proliferation and giving rise to more progenitor cells, these in turn having the ability to generate a large number of mother cells that can in turn give rise to differentiated or differentiable daughter cells. The daughter cells themselves can be induced to proliferate and produce progeny that subsequently differentiate into one or more mature cell types, while also retaining one or more cells with parental developmental potential. The term “stem cell” refers then, to a cell with the capacity or potential, under particular circumstances, to differentiate to a more specialized or differentiated phenotype, and which retains the capacity, under certain circumstances, to proliferate without substantially differentiating. In one embodiment, the term progenitor or stem cell refers to a generalized mother cell whose descendants (progeny) specialize, often in different directions, by differentiation, e.g., by acquiring completely individual characters, as occurs in progressive diversification of embryonic cells and tissues. Cellular differentiation is a complex process typically occurring through many cell divisions. A differentiated cell may derive from a multipotent cell that itself is derived from a multipotent cell, and so on. While each of these multipotent cells may be considered stem cells, the range of cell types that each can give rise to may vary considerably. Some differentiated cells also have the capacity to give rise to cells of greater developmental potential. Such capacity may be natural or may be induced artificially upon treatment with various factors. In many biological instances, stem cells are also “multipotent” because they can produce progeny of more than one distinct cell type, but this is not required for “stem-ness.”

[0301] Self-renewal is another important aspect of the stem cell. In theory, self-renewal can occur by either of two major mechanisms. Stem cells may divide asymmetrically, with one daughter retaining the stem state and the other daughter expressing some distinct other specific function and phenotype. Alternatively, some of the stem cells in a population can divide symmetrically into two stems, thus maintaining some stem cells in the population as a whole, while other cells in the population give rise to differentiated progeny only. Generally, “progenitor cells” have a cellular phenotype that is more primitive (i.e., is at an earlier step along a developmental pathway or progression than is a fully differentiated cell). Often, progenitor cells also have significant or very high proliferative potential. Progenitor cells can give rise to multiple distinct differentiated cell types or to a single differentiated cell type, depending on the developmental pathway and on the environment in which the cells develop and differentiate.

[0302] In the context of cell ontogeny, the adjective “differentiated,” or “differentiating” is a relative term. A “differentiated cell” is a cell that has progressed further down the developmental pathway than the cell to which it is being compared. Thus, stem cells can differentiate into lineage-restricted precursor cells (such as a myocyte progenitor cell), which in turn can differentiate into other types of precursor cells further down the pathway (such as a myocyte precursor), and then to an end-stage differentiated cell, such as a myocyte, which plays a characteristic role in a certain tissue type, and may or may not retain the capacity to proliferate further.

### Induced Pluripotent Stem Cells

[0303] In some embodiments, the genetically engineered human cells described herein are induced pluripotent stem cells (iPSCs). An advantage of using iPSCs is that the cells can be derived from the same subject to which the progenitor cells are to be administered. That is, a somatic cell can be obtained from a subject, reprogrammed to an induced pluripotent stem cell, and then re-differentiated into a progenitor cell to be administered to the subject (e.g., autologous cells). Because the progenitors are essentially derived from an autologous source, the risk of engraftment rejection or allergic response is reduced compared to the use of cells from another subject or group of subjects. In addition, the use of iPSCs negates the need for cells obtained from an embryonic source. Thus, in one embodiment, the stem cells used in the disclosed methods are not embryonic stem cells.

[0304] Although differentiation is generally irreversible under physiological contexts, several methods have been recently developed to reprogram somatic cells to iPSCs. Exemplary methods are known to those of skill in the art and are described briefly herein below.

[0305] The term “reprogramming” refers to a process that alters or reverses the differentiation state of a differentiated cell (e.g., a somatic cell). Stated another way, reprogramming refers to a process of driving the differentiation of a cell backwards to a more undifferentiated or more primitive type of cell. It should be noted that placing many primary cells in culture can lead to some loss of fully differentiated characteristics. Thus, simply culturing such cells included in the term differentiated cells does not render these cells non-differentiated cells (e.g., undifferentiated cells) or pluripotent cells. The transition of a differentiated cell to pluripotency requires a reprogramming stimulus beyond the stimuli that lead to partial loss of differentiated character in culture. Reprogrammed cells also have the characteristic of the capacity of extended passaging without loss of growth potential, relative to primary cell parents, which generally have capacity for only a limited number of divisions in culture.

[0306] The cell to be reprogrammed can be either partially or terminally differentiated prior to reprogramming. In some embodiments, reprogramming encompasses complete reversion of the differentiation state of a differentiated cell (e.g., a somatic cell) to a pluripotent state or a multipotent state. In some embodiments, reprogramming encompasses complete or partial reversion of the differentiation state of a differentiated cell (e.g., a somatic cell) to an undifferentiated cell (e.g., an embryonic-like cell). Reprogramming can result in expression of particular genes by the cells, the expression of which further contributes to reprogramming. In certain embodiments described herein, reprogramming of a differentiated cell (e.g., a somatic cell) causes the differentiated cell to assume an undifferentiated state (e.g., is an undifferentiated cell). The resulting cells are referred to as “reprogrammed cells,” or “induced pluripotent stem cells (iPSCs or iPS cells).”

[0307] Reprogramming can involve alteration, e.g., reversal, of at least some of the heritable patterns of nucleic acid modification (e.g., methylation), chromatin condensation, epigenetic changes, genomic imprinting, etc., that occur during cellular differentiation. Reprogramming is distinct from simply maintaining the existing undifferentiated state of a cell that is already pluripotent or maintaining the existing less than fully differentiated state of a cell that is already a multipotent cell (e.g., a myogenic stem cell). Reprogramming is also distinct from promoting the self-renewal or proliferation of cells that are already pluripotent or multipotent, although the compositions and methods described herein can also be of use for such purposes, in some embodiments.

[0308] Many methods are known in the art that can be used to generate pluripotent stem cells from somatic cells. Any such method that reprograms a somatic cell to the pluripotent phenotype would be appropriate for use in the methods described herein.

[0309] Reprogramming methodologies for generating pluripotent cells using defined combinations of transcription factors have been described. Mouse somatic cells can be converted to ES cell-like cells with expanded developmental potential by the direct transduction of Oct4, Sox2, Klf4, and c-Myc; see, e.g., Takahashi and Yamanaka, Cell 126(4): 663-76 (2006). iPSCs resemble ES cells, as they restore the pluripotency-associated transcriptional circuitry and much of the epigenetic landscape. In addition, mouse iPSCs satisfy all the standard assays for pluripotency: specifically, in vitro differentiation into cell types of the three germ layers, teratoma formation, contribution to chimeras, germline transmission [see, e.g., Maherali and Hochedlinger, Cell Stem Cell. 3(6): 595-605 (2008)], and tetraploid complementation.

[0310] Human iPSCs can be obtained using similar transduction methods, and the transcription factor trio, OCT4, SOX2, and NANOG, has been established as the core set of transcription factors that govern pluripotency; see, e.g., Budniatzky and Gepstein, Stem Cells Transl Med. 3(4):448-57 (2014); Barrett et al., Stem Cells Trans Med 3:1-6 sctm.2014-0121 (2014); Focosi et al., Blood Cancer Journal 4: e211 (2014); and references cited therein. The production of iPSCs can be achieved by the introduction of nucleic acid sequences encoding stem cell-associated genes into an adult, somatic cell, historically using viral vectors.

[0311] iPSCs can be generated or derived from terminally differentiated somatic cells, as well as from adult stem cells, or somatic stem cells. That is, a non-pluripotent progenitor cell can be rendered pluripotent or multipotent by reprogramming. In such instances, it may not be necessary to include as many reprogramming factors as required to reprogram a terminally differentiated cell. Further, reprogramming can be induced by the non-viral introduction of reprogramming factors, e.g., by introducing the proteins themselves, or by introducing nucleic acids that encode the reprogramming factors, or by introducing messenger RNAs that upon translation produce the reprogramming factors (see e.g., Warren et al., Cell Stem Cell, 7(5):618-30 (2010). Reprogramming can be achieved by introducing a combination of nucleic acids encoding stem cell-associated genes, including, for example, Oct-4 (also known as Oct-3/4 or Pouf51), SoxI, Sox2, Sox3, Sox 15, Sox 18, NANOG, KIfI, KIf2, KIf4, KIf5, NR5A2, c-Myc, 1-Myc, n-Myc, Rem2, Tert, and LIN28. In one embodiment, reprogramming using the methods and compositions described herein can further comprise introducing one or more of Oct-3/4, a member of the Sox family, a member of the Klf family, and a member of the Myc family to a somatic cell. In one embodiment, the methods and compositions described herein further comprise introducing one or more of each of Oct-4, Sox2, Nanog, c-MYC and Klf4 for reprogramming. As noted above, the exact method used for reprogramming is not necessarily critical to the methods and compositions described herein. However, where cells differentiated from the reprogrammed cells are to be used in, e.g., human therapy, in one embodiment the reprogramming is not effected by a method that alters the genome. Thus, in such embodiments, reprogramming is achieved, e.g., without the use of viral or plasmid vectors.

[0312] The efficiency of reprogramming (i.e., the number of reprogrammed cells) derived from a population of starting cells can be enhanced by the addition of various agents, e.g., small molecules, as shown by Shi et al., Cell-Stem Cell 2:525-528 (2008); Huangfu et al., Nature Biotechnology 26(7): 795-797 (2008) and Marson et al., Cell-Stem Cell 3: 132-135 (2008). Thus, an agent or combination of agents that enhance the efficiency or rate of induced pluripotent stem cell production can be used in the production of patient-specific or disease-specific iPSCs. Some non-limiting examples of agents that enhance reprogramming efficiency include soluble Wnt, Wnt conditioned media, BIX-01294 (a G9a histone methyltransferase), PD0325901 (a MEK inhibitor), DNA methyltransferase inhibitors, histone deacetylase (HDAC) inhibitors, valproic acid, 5′-azacytidine, dexamethasone, suberoylanilide, hydroxamic acid (SAHA), vitamin C, and trichostatin (TSA), among others.

[0313] Other non-limiting examples of reprogramming enhancing agents include: Suberoylanilide Hydroxamic Acid (SAHA (e.g., MK0683, vorinostat) and other hydroxamic acids), BML-210, Depudecin (e.g., (−)-Depudecin), HC Toxin, Nullscript (4-(1,3-Dioxo-IH, 3H-benzo[de]isoquinolin-2-yl)-N-hydroxybutanamide), Phenylbutyrate (e.g., sodium phenylbutyrate) and Valproic Acid ((VP A) and other short chain fatty acids), Scriptaid, Suramin Sodium, Trichostatin A (TSA), APHA Compound 8, Apicidin, Sodium Butyrate, pivaloyloxymethyl butyrate (Pivanex, AN-9), Trapoxin B, Chlamydocin, Depsipeptide (also known as FR901228 or FK228), benzamides (e.g., CI-994 (e.g., N-acetyl dinaline) and MS-27-275), MGCD0103, NVP-LAQ-824, CBHA (m-carboxycinnaminic acid bishydroxamic acid), JNJ16241199, Tubacin, A-161906, proxamide, oxamflatin, 3-CI-UCHA (e.g., 6-(3-chlorophenylureido)caproic hydroxamic acid), AOE (2-amino-8-oxo-9, 10-epoxydecanoic acid), CHAP31 and CHAP 50. Other reprogramming enhancing agents include, for example, dominant negative forms of the HDACs (e.g., catalytically inactive forms), siRNA inhibitors of the HDACs, and antibodies that specifically bind to the HDACs. Such inhibitors are available, e.g., from BIOMOL International, Fukasawa, Merck Biosciences, Novartis, Gloucester Pharmaceuticals, Titan Pharmaceuticals, MethylGene, and Sigma Aldrich.

[0314] To confirm the induction of pluripotent stem cells for use with the methods described herein, isolated clones can be tested for the expression of a stem cell marker. Such expression in a cell derived from a somatic cell identifies the cells as induced pluripotent stem cells. Stem cell markers are selected from the non-limiting group including SSEA3, SSEA4, CD9, Nanog, Fbxl5, Ecatl, Esgl, Eras, Gdf3, Fgf4, Cripto, DaxI, Zpf296, Slc2a3, RexI, UtfI, and NatI. In one embodiment, a cell that expresses Oct4 or Nanog is identified as pluripotent. Methods for detecting the expression of such markers can include, for example, RT-PCR and immunological methods that detect the presence of the encoded polypeptides, such as Western blots or flow cytometric analyses. In some embodiments, detection involves not only RT-PCR, but also includes detection of protein markers. Intracellular markers may be best identified via RT-PCR, or protein detection methods such as immunocytochemistry, while cell surface markers are readily identified, e.g., by immunocytochemistry.

[0315] The pluripotent stem cell character of isolated cells can be confirmed by tests evaluating the ability of the iPSCs to differentiate into cells of each of the three germ layers. As one example, teratoma formation in nude mice can be used to evaluate the pluripotent character of the isolated clones. The cells are introduced into nude mice and histology and/or immunohistochemistry is performed on a tumor arising from the cells. The growth of a tumor comprising cells from all three germ layers, for example, further indicates that the cells are pluripotent stem cells.

### Hepatocytes

[0316] In some embodiments, the genetically engineered human cells described herein are hepatocytes. A hepatocyte is a cell of the main parenchymal tissue of the liver. Hepatocytes make up 70-85% of the liver's mass. These cells are involved in: protein synthesis; protein storage; transformation of carbohydrates; synthesis of cholesterol, bile salts and phospholipids; detoxification, modification, and excretion of exogenous and endogenous substances; and initiation of formation and secretion of bile.

[0317] G6PC is primarily expressed in hepatocytes (parenchymal liver cells) with secondary expression in the cells of the kidney, intestine and salivary glands. Therefore, the correction of G6PC is primarily targeted at hepatocytes and the liver, as well as the secondary sites of expression that are associated with clinical manifestation, for example the kidney.

Creating Patient Specific iPSCs

[0318] One step of the ex vivo methods of the invention involves creating a patient specific iPS cell, patient specific iPS cells, or a patient specific iPS cell line. There are many established methods in the art for creating patient specific iPS cells, as described in Takahashi and Yamanaka 2006; Takahashi, Tanabe et al. 2007. For example, the creating step comprises: a) isolating a somatic cell, such as a skin cell or fibroblast from the patient; and b) introducing a set of pluripotency-associated genes into the somatic cell in order to induce the cell to become a pluripotent stem cell. In some embodiments, the set of pluripotency-associated genes is one or more of the genes selected from the group consisting of OCT4, SOX2, KLF4, Lin28, NANOG, and cMYC.

### Performing a Biopsy or Aspirate of the Patient's Liver or Bone Marrow

[0319] A biopsy or aspirate is a sample of tissue or fluid taken from the body. There are many different kinds of biopsies or aspirates. Nearly all of them involve using a sharp tool to remove a small amount of tissue. If the biopsy will be on the skin or other sensitive area, numbing medicine is applied first. A biopsy or aspirate may be performed according to any of the known methods in the art. For example, in a liver biopsy, a needle is injected into the liver through the skin of the belly, capturing the liver tissue. For example, in a bone marrow aspirate, a large needle is used to enter the pelvis bone to collect bone marrow.

### Isolating a Liver Specific Progenitor Cell or Primary Hepatocyte

[0320] Liver specific progenitor cells and primary hepatocytes may be isolated according to any method known in the art. For example, human hepatocytes are isolated from fresh surgical specimens (e.g., an autologous sample). Healthy liver tissue is used to isolate hepatocytes by collagenase digestion. The obtained cell suspension is filtered through a 100-mm nylon mesh and sedimented by centrifugation at 50 g for 5 minutes, resuspended, and washed two to three times in cold wash medium. Human liver stem cells are obtained by culturing under stringent conditions of hepatocytes obtained from fresh liver preparations. Hepatocytes seeded on collagen-coated plates are cultured for 2 weeks. After 2 weeks, surviving cells are removed, and characterized for expression of stem cells markers (Herrera et al, STEM CELLS 2006; 24: 2840-2850).

### Isolating a Mesenchymal Stem Cell

[0321] Mesenchymal stem cells may be isolated according to any method known in the art, such as from a patient's bone marrow or peripheral blood. For example, marrow aspirate is collected into a syringe with heparin. Cells are washed and centrifuged on a Percoll™. Cells, such as blood cells, liver cells, interstitial cells, macrophages, mast cells, and thymocytes, are separated using Percoll™. The cells are cultured in Dulbecco's modified Eagle's medium (DMEM) (low glucose) containing 10% fetal bovine serum (FBS) (Pittinger M F, Mackay A M, Beck S C et al., Science 1999; 284:143-147).

### Genome Editing

[0322] Genome editing generally refers to the process of modifying the nucleotide sequence of a genome, preferably in a precise or pre-determined manner. Examples of methods of genome editing described herein include methods of using site-directed nucleases to cut deoxyribonucleic acid (DNA) at precise target locations in the genome, thereby creating double-strand or single-strand DNA breaks at particular locations within the genome. Such breaks can be and regularly are repaired by natural, endogenous cellular processes, such as homology-directed repair (HDR) and non-homologous end-joining (NHEJ), as recently reviewed in Cox et al., Nature Medicine 21(2), 121-31 (2015). These two main DNA repair processes consist of a family of alternative pathways. NHEJ directly joins the DNA ends resulting from a double-strand break, sometimes with the loss or addition of nucleotide sequence, which may disrupt or enhance gene expression. HDR utilizes a homologous sequence, or donor sequence, as a template for inserting a defined DNA sequence at the break point. The homologous sequence may be in the endogenous genome, such as a sister chromatid. Alternatively, the donor may be an exogenous nucleic acid, such as a plasmid, a single-strand oligonucleotide, a double-stranded oligonucleotide, a duplex oligonucleotide or a virus, that has regions of high homology with the nuclease-cleaved locus, but which may also contain additional sequence or sequence changes including deletions that can be incorporated into the cleaved target locus. A third repair mechanism is microhomology-mediated end joining (MMEJ), also referred to as “Alternative NHEJ”, in which the genetic outcome is similar to NHEJ in that small deletions and insertions can occur at the cleavage site. MMEJ makes use of homologous sequences of a few basepairs flanking the DNA break site to drive a more favored DNA end joining repair outcome, and recent reports have further elucidated the molecular mechanism of this process; see, e.g., Cho and Greenberg, Nature 518, 174-76 (2015); Kent et al., Nature Structural and Molecular Biology, Adv. Online doi: 10.1038/nsmb.2961(2015); Mateos-Gomez et al., Nature 518, 254-57 (2015); Ceccaldi et al., Nature 528, 258-62 (2015). In some instances it may be possible to predict likely repair outcomes based on analysis of potential microhomologies at the site of the DNA break.

[0323] Each of these genome editing mechanisms can be used to create desired genomic alterations. A step in the genome editing process is to create one or two DNA breaks, the latter as double-strand breaks or as two single-stranded breaks, in the target locus as close as possible to the site of intended mutation. This can be achieved via the use of site-directed polypeptides, as described and illustrated herein.

[0324] Site-directed polypeptides, such as a DNA endonuclease, can introduce double-strand breaks or single-strand breaks in nucleic acids, e.g., genomic DNA. The double-strand break can stimulate a cell's endogenous DNA-repair pathways (e.g., homology-dependent repair or non-homologous end joining or alternative non-homologous end joining (A-NHEJ) or microhomology-mediated end joining). NHEJ can repair cleaved target nucleic acid without the need for a homologous template. This can sometimes result in small deletions or insertions (indels) in the target nucleic acid at the site of cleavage, and can lead to disruption or alteration of gene expression. HDR can occur when a homologous repair template, or donor, is available. The homologous donor template comprises sequences that are homologous to sequences flanking the target nucleic acid cleavage site. The sister chromatid is generally used by the cell as the repair template. However, for the purposes of genome editing, the repair template is often supplied as an exogenous nucleic acid, such as a plasmid, duplex oligonucleotide, single-strand oligonucleotide, double-stranded oligonucleotide, or viral nucleic acid. With exogenous donor templates, it is common to introduce an additional nucleic acid sequence (such as a transgene) or modification (such as a single or multiple base change or a deletion) between the flanking regions of homology so that the additional or altered nucleic acid sequence also becomes incorporated into the target locus. MMEJ results in a genetic outcome that is similar to NHEJ in that small deletions and insertions can occur at the cleavage site. MMEJ makes use of homologous sequences of a few basepairs flanking the cleavage site to drive a favored end-joining DNA repair outcome. In some instances it may be possible to predict likely repair outcomes based on analysis of potential microhomologies in the nuclease target regions.

[0325] Thus, in some cases, homologous recombination is used to insert an exogenous polynucleotide sequence into the target nucleic acid cleavage site. An exogenous polynucleotide sequence is termed a donor polynucleotide (or donor or donor sequence or polynucleotide donor template) herein. In some embodiments, the donor polynucleotide, a portion of the donor polynucleotide, a copy of the donor polynucleotide, or a portion of a copy of the donor polynucleotide is inserted into the target nucleic acid cleavage site. In some embodiments, the donor polynucleotide is an exogenous polynucleotide sequence, i.e., a sequence that does not naturally occur at the target nucleic acid cleavage site.

[0326] The modifications of the target DNA due to NHEJ and/or HDR can lead to, for example, mutations, deletions, alterations, integrations, gene correction, gene replacement, gene tagging, transgene insertion, nucleotide deletion, gene disruption, translocations and/or gene mutation. The processes of deleting genomic DNA and integrating non-native nucleic acid into genomic DNA are examples of genome editing.

### CRISPR Endonuclease System

[0327] A CRISPR (Clustered Regularly Interspaced Short Palindromic Repeats) genomic locus can be found in the genomes of many prokaryotes (e.g., bacteria and archaea). In prokaryotes, the CRISPR locus encodes products that function as a type of immune system to help defend the prokaryotes against foreign invaders, such as virus and phage. There are three stages of CRISPR locus function: integration of new sequences into the CRISPR locus, expression of CRISPR RNA (crRNA), and silencing of foreign invader nucleic acid. Five types of CRISPR systems (e.g., Type I, Type II, Type III, Type U, and Type V) have been identified.

[0328] A CRISPR locus includes a number of short repeating sequences referred to as “repeats.” When expressed, the repeats can form secondary hairpin structures (e.g., hairpins) and/or comprise unstructured single-stranded sequences. The repeats usually occur in clusters and frequently diverge between species. The repeats are regularly interspaced with unique intervening sequences referred to as “spacers,” resulting in a repeat-spacer-repeat locus architecture. The spacers are identical to or have high homology with known foreign invader sequences. A spacer-repeat unit encodes a crisprRNA (crRNA), which is processed into a mature form of the spacer-repeat unit. A crRNA comprises a “seed” or spacer sequence that is involved in targeting a target nucleic acid (in the naturally occurring form in prokaryotes, the spacer sequence targets the foreign invader nucleic acid). A spacer sequence is located at the 5′ or 3′ end of the crRNA.

[0329] A CRISPR locus also comprises polynucleotide sequences encoding CRISPR Associated (Cas) genes. Cas genes encode endonucleases involved in the biogenesis and the interference stages of crRNA function in prokaryotes. Some Cas genes comprise homologous secondary and/or tertiary structures.

### Type II CRISPR Systems

[0330] crRNA biogenesis in a Type II CRISPR system in nature requires a trans-activating CRISPR RNA (tracrRNA). The tracrRNA is modified by endogenous RNaseIII, and then hybridizes to a crRNA repeat in the pre-crRNA array. Endogenous RNaseIII is recruited to cleave the pre-crRNA. Cleaved crRNAs are subjected to exoribonuclease trimming to produce the mature crRNA form (e.g., 5′ trimming). The tracrRNA remains hybridized to the crRNA, and the tracrRNA and the crRNA associate with a site-directed polypeptide (e.g., Cas9). The crRNA of the crRNA-tracrRNA-Cas9 complex guides the complex to a target nucleic acid to which the crRNA can hybridize. Hybridization of the crRNA to the target nucleic acid activates Cas9 for targeted nucleic acid cleavage. The target nucleic acid in a Type II CRISPR system is referred to as a protospacer adjacent motif (PAM). In nature, the PAM is essential to facilitate binding of a site-directed polypeptide (e.g., Cas9) to the target nucleic acid. Type II systems (also referred to as Nmeni or CASS4) are further subdivided into Type II-A (CASS4) and II-B (CASS4a). Jinek et al., Science, 337(6096):816-821 (2012) showed that the CRISPR/Cas9 system is useful for RNA-programmable genome editing, and international patent application publication number WO2013/176772 provides numerous examples and applications of the CRISPR/Cas endonuclease system for site-specific gene editing.

### Type V CRISPR Systems

[0331] Type V CRISPR systems have several important differences from Type II systems. For example, Cpf1 is a single RNA-guided endonuclease that, in contrast to Type II systems, lacks tracrRNA. In fact, Cpf1-associated CRISPR arrays are processed into mature crRNAS without the requirement of an additional trans-activating tracrRNA. The Type V CRISPR array is processed into short mature crRNAs of 42-44 nucleotides in length, with each mature crRNA beginning with 19 nucleotides of direct repeat followed by 23-25 nucleotides of spacer sequence. In contrast, mature crRNAs in Type II systems start with 20-24 nucleotides of spacer sequence followed by about 22 nucleotides of direct repeat. Also, Cpf1 utilizes a T-rich protospacer-adjacent motif such that Cpf1-crRNA complexes efficiently cleave target DNA preceded by a short T-rich PAM, which is in contrast to the G-rich PAM following the target DNA for Type II systems. Thus, Type V systems cleave at a point that is distant from the PAM, while Type II systems cleave at a point that is adjacent to the PAM. In addition, in contrast to Type II systems, Cpf1 cleaves DNA via a staggered DNA double-stranded break with a 4 or 5 nucleotide 5′ overhang. Type II systems cleave via a blunt double-stranded break. Similar to Type II systems, Cpf1 contains a predicted RuvC-like endonuclease domain, but lacks a second HNH endonuclease domain, which is in contrast to Type II systems.

### Cas Genes/Polypeptides and Protospacer Adjacent Motifs

[0332] Exemplary CRISPR/Cas polypeptides include the Cas9 polypeptides in FIG. 1 of Fonfara et al., Nucleic Acids Research, 42: 2577-2590 (2014). The CRISPR/Cas gene naming system has undergone extensive rewriting since the Cas genes were discovered. FIG. 5 of Fonfara, supra, provides PAM sequences for the Cas9 polypeptides from various species.

### Site-Directed Polypeptides

[0333] A site-directed polypeptide is a nuclease used in genome editing to cleave DNA. The site-directed may be administered to a cell or a patient as either: one or more polypeptides, or one or more mRNAs encoding the polypeptide.

[0334] In the context of a CRISPR/Cas or CRISPR/Cpf1 system, the site-directed polypeptide can bind to a guide RNA that, in turn, specifies the site in the target DNA to which the polypeptide is directed. In embodiments of CRISPR/Cas or CRISPR/Cpf1 systems herein, the site-directed polypeptide is an endonuclease, such as a DNA endonuclease.

[0335] In some embodiments, a site-directed polypeptide comprises a plurality of nucleic acid-cleaving (i.e., nuclease) domains. Two or more nucleic acid-cleaving domains can be linked together via a linker. In some embodiments, the linker comprises a flexible linker. Linkers may comprise 1, 2, 3, 4, 5, 6, 7, 8, 9, 10, 11, 12, 13, 14, 15, 16, 17, 18, 19, 20, 21, 22, 23, 24, 25, 30, 35, 40 or more amino acids in length.

[0336] Naturally-occurring wild-type Cas9 enzymes comprise two nuclease domains, a HNH nuclease domain and a RuvC domain. Herein, the “Cas9” refers to both naturally-occurring and recombinant Cas9s. Cas9 enzymes contemplated herein comprise a HNH or HNH-like nuclease domain, and/or a RuvC or RuvC-like nuclease domain.

[0337] HNH or HNH-like domains comprise a McrA-like fold. HNH or HNH-like domains comprises two antiparallel β-strands and an α-helix. HNH or HNH-like domains comprises a metal binding site (e.g., a divalent cation binding site). HNH or HNH-like domains can cleave one strand of a target nucleic acid (e.g., the complementary strand of the crRNA targeted strand).

[0338] RuvC or RuvC-like domains comprise an RNaseH or RNaseH-like fold. RuvC/RNaseH domains are involved in a diverse set of nucleic acid-based functions including acting on both RNA and DNA. The RNaseH domain comprises 5 β-strands surrounded by a plurality of α-helices. RuvC/RNaseH or RuvC/RNaseH-like domains comprise a metal binding site (e.g., a divalent cation binding site). RuvC/RNaseH or RuvC/RNaseH-like domains can cleave one strand of a target nucleic acid (e.g., the non-complementary strand of a double-stranded target DNA).

[0339] Site-directed polypeptides can introduce double-strand breaks or single-strand breaks in nucleic acids, e.g., genomic DNA. The double-strand break can stimulate a cell's endogenous DNA-repair pathways (e.g., homology-dependent repair (HDR) or non-homologous end joining (NHEJ) or alternative non-homologous end joining (A-NHEJ) or microhomology-mediated end joining (MMEJ)). NHEJ can repair cleaved target nucleic acid without the need for a homologous template. This can sometimes result in small deletions or insertions (indels) in the target nucleic acid at the site of cleavage, and can lead to disruption or alteration of gene expression. HDR can occur when a homologous repair template, or donor, is available. The homologous donor template comprises sequences that are homologous to sequences flanking the target nucleic acid cleavage site. The sister chromatid is generally used by the cell as the repair template. However, for the purposes of genome editing, the repair template is often supplied as an exogenous nucleic acid, such as a plasmid, duplex oligonucleotide, single-strand oligonucleotide or viral nucleic acid. With exogenous donor templates, it is common to introduce an additional nucleic acid sequence (such as a transgene) or modification (such as a single or multiple base change or a deletion) between the flanking regions of homology so that the additional or altered nucleic acid sequence also becomes incorporated into the target locus. MMEJ results in a genetic outcome that is similar to NHEJ in that small deletions and insertions can occur at the cleavage site. MMEJ makes use of homologous sequences of a few basepairs flanking the cleavage site to drive a favored end-joining DNA repair outcome. In some instances it may be possible to predict likely repair outcomes based on analysis of potential microhomologies in the nuclease target regions.

[0340] Thus, in some cases, homologous recombination is used to insert an exogenous polynucleotide sequence into the target nucleic acid cleavage site. An exogenous polynucleotide sequence is termed a donor polynucleotide (or donor or donor sequence) herein. In some embodiments, the donor polynucleotide, a portion of the donor polynucleotide, a copy of the donor polynucleotide, or a portion of a copy of the donor polynucleotide is inserted into the target nucleic acid cleavage site. In some embodiments, the donor polynucleotide is an exogenous polynucleotide sequence, i.e., a sequence that does not naturally occur at the target nucleic acid cleavage site.

[0341] The modifications of the target DNA due to NHEJ and/or HDR can lead to, for example, mutations, deletions, alterations, integrations, gene correction, gene replacement, gene tagging, transgene insertion, nucleotide deletion, gene disruption, translocations and/or gene mutation. The processes of deleting genomic DNA and integrating non-native nucleic acid into genomic DNA are examples of genome editing.

[0342] In some embodiments, the site-directed polypeptide comprises an amino acid sequence having at least 10%, at least 15%, at least 20%, at least 30%, at least 40%, at least 50%, at least 60%, at least 70%, at least 75%, at least 80%, at least 85%, at least 90%, at least 95%, at least 99%, or 100% amino acid sequence identity to a wild-type exemplary site-directed polypeptide [e.g., Cas9 from S. pyogenes, US2014/0068797 Sequence ID No. 8 or Sapranauskas et al., Nucleic Acids Res, 39(21): 9275-9282 (2011)], and various other site-directed polypeptides).

[0343] In some embodiments, the site-directed polypeptide comprises an amino acid sequence having at least 10%, at least 15%, at least 20%, at least 30%, at least 40%, at least 50%, at least 60%, at least 70%, at least 75%, at least 80%, at least 85%, at least 90%, at least 95%, at least 99%, or 100% amino acid sequence identity to the nuclease domain of a wild-type exemplary site-directed polypeptide (e.g., Cas9 from S. pyogenes, supra).

[0344] In some embodiments, a site-directed polypeptide comprises at least 70, 75, 80, 85, 90, 95, 97, 99, or 100% identity to a wild-type site-directed polypeptide (e.g., Cas9 from S. pyogenes, supra) over 10 contiguous amino acids. In some embodiments, a site-directed polypeptide comprises at most: 70, 75, 80, 85, 90, 95, 97, 99, or 100% identity to a wild-type site-directed polypeptide (e.g., Cas9 from S. pyogenes, supra) over 10 contiguous amino acids. In some embodiments, a site-directed polypeptide comprises at least: 70, 75, 80, 85, 90, 95, 97, 99, or 100% identity to a wild-type site-directed polypeptide (e.g., Cas9 from S. pyogenes, supra) over 10 contiguous amino acids in a HNH nuclease domain of the site-directed polypeptide. In some embodiments, a site-directed polypeptide comprises at most: 70, 75, 80, 85, 90, 95, 97, 99, or 100% identity to a wild-type site-directed polypeptide (e.g., Cas9 from S. pyogenes, supra) over 10 contiguous amino acids in a HNH nuclease domain of the site-directed polypeptide. In some embodiments, a site-directed polypeptide comprises at least: 70, 75, 80, 85, 90, 95, 97, 99, or 100% identity to a wild-type site-directed polypeptide (e.g., Cas9 from S. pyogenes, supra) over 10 contiguous amino acids in a RuvC nuclease domain of the site-directed polypeptide. In some embodiments, a site-directed polypeptide comprises at most: 70, 75, 80, 85, 90, 95, 97, 99, or 100% identity to a wild-type site-directed polypeptide (e.g., Cas9 from S. pyogenes, supra) over 10 contiguous amino acids in a RuvC nuclease domain of the site-directed polypeptide.

[0345] In some embodiments, the site-directed polypeptide comprises a modified form of a wild-type exemplary site-directed polypeptide. The modified form of the wild-type exemplary site-directed polypeptide comprises a mutation that reduces the nucleic acid-cleaving activity of the site-directed polypeptide. In some embodiments, the modified form of the wild-type exemplary site-directed polypeptide has less than 90%, less than 80%, less than 70%, less than 60%, less than 50%, less than 40%, less than 30%, less than 20%, less than 10%, less than 5%, or less than 1% of the nucleic acid-cleaving activity of the wild-type exemplary site-directed polypeptide (e.g., Cas9 from S. pyogenes, supra). The modified form of the site-directed polypeptide can have no substantial nucleic acid-cleaving activity. When a site-directed polypeptide is a modified form that has no substantial nucleic acid-cleaving activity, it is referred to herein as “enzymatically inactive.”

[0346] In some embodiments, the modified form of the site-directed polypeptide comprises a mutation such that it can induce a single-strand break (SSB) on a target nucleic acid (e.g., by cutting only one of the sugar-phosphate backbones of a double-strand target nucleic acid). In some embodiments, the mutation results in less than 90%, less than 80%, less than 70%, less than 60%, less than 50%, less than 40%, less than 30%, less than 20%, less than 10%, less than 5%, or less than 1% of the nucleic acid-cleaving activity in one or more of the plurality of nucleic acid-cleaving domains of the wild-type site directed polypeptide (e.g., Cas9 from S. pyogenes, supra). In some embodiments, the mutation results in one or more of the plurality of nucleic acid-cleaving domains retaining the ability to cleave the complementary strand of the target nucleic acid, but reducing its ability to cleave the non-complementary strand of the target nucleic acid. In some embodiments, the mutation results in one or more of the plurality of nucleic acid-cleaving domains retaining the ability to cleave the non-complementary strand of the target nucleic acid, but reducing its ability to cleave the complementary strand of the target nucleic acid. For example, residues in the wild-type exemplary S. pyogenes Cas9 polypeptide, such as Asp10, His840, Asn854 and Asn856, are mutated to inactivate one or more of the plurality of nucleic acid-cleaving domains (e.g., nuclease domains). In some embodiments, the residues to be mutated correspond to residues Asp10, His840, Asn854 and Asn856 in the wild-type exemplary S. pyogenes Cas9 polypeptide (e.g., as determined by sequence and/or structural alignment). Non-limiting examples of mutations include D10A, H840A, N854A or N856A. One skilled in the art will recognize that mutations other than alanine substitutions are suitable.

[0347] In some embodiments, a D10A mutation is combined with one or more of H840A, N854A, or N856A mutations to produce a site-directed polypeptide substantially lacking DNA cleavage activity. In some embodiments, a H840A mutation is combined with one or more of D10A, N854A, or N856A mutations to produce a site-directed polypeptide substantially lacking DNA cleavage activity. In some embodiments, a N854A mutation is combined with one or more of H840A, D10A, or N856A mutations to produce a site-directed polypeptide substantially lacking DNA cleavage activity. In some embodiments, a N856A mutation is combined with one or more of H840A, N854A, or D10A mutations to produce a site-directed polypeptide substantially lacking DNA cleavage activity. Site-directed polypeptides that comprise one substantially inactive nuclease domain are referred to as “nickases”.

[0348] Nickase variants of RNA-guided endonucleases, for example Cas9, can be used to increase the specificity of CRISPR-mediated genome editing. Wild type Cas9 is typically guided by a single guide RNA designed to hybridize with a specified ˜20 nucleotide sequence in the target sequence (such as an endogenous genomic locus). However, several mismatches can be tolerated between the guide RNA and the target locus, effectively reducing the length of required homology in the target site to, for example, as little as 13 nt of homology, and thereby resulting in elevated potential for binding and double-strand nucleic acid cleavage by the CRISPR/Cas9 complex elsewhere in the target genome—also known as off-target cleavage. Because nickase variants of Cas9 each only cut one strand, in order to create a double-strand break it is necessary for a pair of nickases to bind in close proximity and on opposite strands of the target nucleic acid, thereby creating a pair of nicks, which is the equivalent of a double-strand break. This requires that two separate guide RNAs—one for each nickase—must bind in close proximity and on opposite strands of the target nucleic acid. This requirement essentially doubles the minimum length of homology needed for the double-strand break to occur, thereby reducing the likelihood that a double-strand cleavage event will occur elsewhere in the genome, where the two guide RNA sites—if they exist—are unlikely to be sufficiently close to each other to enable the double-strand break to form. As described in the art, nickases can also be used to promote HDR versus NHEJ. HDR can be used to introduce selected changes into target sites in the genome through the use of specific donor sequences that effectively mediate the desired changes. Descriptions of various CRISPR/Cas systems for use in gene editing can be found, e.g., in international patent application publication number WO2013/176772, and in Nature Biotechnology 32, 347-355 (2014), and references cited therein.

[0349] Mutations contemplated include substitutions, additions, and deletions, or any combination thereof. In some embodiments, the mutation converts the mutated amino acid to alanine. In some embodiments, the mutation converts the mutated amino acid to another amino acid (e.g., glycine, serine, threonine, cysteine, valine, leucine, isoleucine, methionine, proline, phenylalanine, tyrosine, tryptophan, aspartic acid, glutamic acid, asparagines, glutamine, histidine, lysine, or arginine). In some embodiments, the mutation converts the mutated amino acid to a non-natural amino acid (e.g., selenomethionine). In some embodiments, the mutation converts the mutated amino acid to amino acid mimics (e.g., phosphomimics). In some embodiments, the mutation is a conservative mutation. For example, the mutation can convert the mutated amino acid to amino acids that resemble the size, shape, charge, polarity, conformation, and/or rotamers of the mutated amino acids (e.g., cysteine/serine mutation, lysine/asparagine mutation, histidine/phenylalanine mutation). In some embodiments, the mutation causes a shift in reading frame and/or the creation of a premature stop codon. In some embodiments, mutations cause changes to regulatory regions of genes or loci that affect expression of one or more genes.

[0350] In some embodiments, the site-directed polypeptide (e.g., variant, mutated, enzymatically inactive and/or conditionally enzymatically inactive site-directed polypeptide) targets nucleic acid. In some embodiments, the site-directed polypeptide (e.g., variant, mutated, enzymatically inactive and/or conditionally enzymatically inactive endoribonuclease) targets DNA. In some embodiments, the site-directed polypeptide (e.g., variant, mutated, enzymatically inactive and/or conditionally enzymatically inactive endoribonuclease) targets RNA.

[0351] In some embodiments, the site-directed polypeptide comprises one or more non-native sequences (e.g., the site-directed polypeptide is a fusion protein).

[0352] In some embodiments, the site-directed polypeptide comprises an amino acid sequence comprising at least 15% amino acid identity to a Cas9 from a bacterium (e.g., S. pyogenes), a nucleic acid binding domain, and two nucleic acid cleaving domains (i.e., a HNH domain and a RuvC domain).

[0353] In some embodiments, the site-directed polypeptide comprises an amino acid sequence comprising at least 15% amino acid identity to a Cas9 from a bacterium (e.g., S. pyogenes), and two nucleic acid cleaving domains (i.e., a HNH domain and a RuvC domain).

[0354] In some embodiments, the site-directed polypeptide comprises an amino acid sequence comprising at least 15% amino acid identity to a Cas9 from a bacterium (e.g., S. pyogenes), and two nucleic acid cleaving domains, wherein one or both of the nucleic acid cleaving domains comprise at least 50% amino acid identity to a nuclease domain from Cas9 from a bacterium (e.g., S. pyogenes).

[0355] In some embodiments, the site-directed polypeptide comprises an amino acid sequence comprising at least 15% amino acid identity to a Cas9 from a bacterium (e.g., S. pyogenes), two nucleic acid cleaving domains (i.e., a HNH domain and a RuvC domain), and non-native sequence (for example, a nuclear localization signal) or a linker linking the site-directed polypeptide to a non-native sequence.

[0356] In some embodiments, the site-directed polypeptide comprises an amino acid sequence comprising at least 15% amino acid identity to a Cas9 from a bacterium (e.g., S. pyogenes), two nucleic acid cleaving domains (i.e., a HNH domain and a RuvC domain), wherein the site-directed polypeptide comprises a mutation in one or both of the nucleic acid cleaving domains that reduces the cleaving activity of the nuclease domains by at least 50%.

[0357] In some embodiments, the site-directed polypeptide comprises an amino acid sequence comprising at least 15% amino acid identity to a Cas9 from a bacterium (e.g., S. pyogenes), and two nucleic acid cleaving domains (i.e., a HNH domain and a RuvC domain), wherein one of the nuclease domains comprises mutation of aspartic acid 10, and/or wherein one of the nuclease domains comprises mutation of histidine 840, and wherein the mutation reduces the cleaving activity of the nuclease domain(s) by at least 50%.

[0358] In some embodiments of the invention, the one or more site-directed polypeptides, e.g. DNA endonucleases, include two nickases that together effect one double-strand break at a specific locus in the genome, or four nickases that together effect two double-strand breaks at specific loci in the genome. Alternatively, one site-directed polypeptide, e.g. DNA endonuclease, effects one double-strand break at a specific locus in the genome.

### Genome-Targeting Nucleic Acid

[0359] The present disclosure provides a genome-targeting nucleic acid that can direct the activities of an associated polypeptide (e.g., a site-directed polypeptide) to a specific target sequence within a target nucleic acid. In some embodiments, the genome-targeting nucleic acid is an RNA. A genome-targeting RNA is referred to as a “guide RNA” or “gRNA” herein. A guide RNA comprises at least a spacer sequence that hybridizes to a target nucleic acid sequence of interest, and a CRISPR repeat sequence. In Type II systems, the gRNA also comprises a second RNA called the tracrRNA sequence. In the Type II guide RNA (gRNA), the CRISPR repeat sequence and tracrRNA sequence hybridize to each other to form a duplex. In the Type V guide RNA (gRNA), the crRNA forms a duplex. In both systems, the duplex binds a site-directed polypeptide, such that the guide RNA and site-direct polypeptide form a complex. The genome-targeting nucleic acid provides target specificity to the complex by virtue of its association with the site-directed polypeptide. The genome-targeting nucleic acid thus directs the activity of the site-directed polypeptide.

[0360] Exemplary guide RNAs include the spacer sequences in FIGS. 1-90, shown with the genome location of their target sequence and the associated Cas9 or Cpf1 cut site, wherein the genome location is based on the GRCh38/hg38 human genome assembly. As is understood by the person of ordinary skill in the art, each guide RNA is designed to include a spacer sequence complementary to its genomic target sequence. For example, each of the spacer sequences in FIGS. 1-90 may be put into a single RNA chimera or a crRNA (along with a corresponding tracrRNA). See Jinek et al., Science, 337, 816-821 (2012) and Deltcheva et al., Nature, 471, 602-607 (2011).

[0361] In some embodiments, the genome-targeting nucleic acid is a double-molecule guide RNA. In some embodiments, the genome-targeting nucleic acid is a single-molecule guide RNA.

[0362] A double-molecule guide RNA comprises two strands of RNA. The first strand comprises in the 5′ to 3′ direction, an optional spacer extension sequence, a spacer sequence and a minimum CRISPR repeat sequence. The second strand comprises a minimum tracrRNA sequence (complementary to the minimum CRISPR repeat sequence), a 3′ tracrRNA sequence and an optional tracrRNA extension sequence.

[0363] A single-molecule guide RNA (sgRNA) in a Type II system comprises, in the 5′ to 3′ direction, an optional spacer extension sequence, a spacer sequence, a minimum CRISPR repeat sequence, a single-molecule guide linker, a minimum tracrRNA sequence, a 3′ tracrRNA sequence and an optional tracrRNA extension sequence. The optional tracrRNA extension may comprise elements that contribute additional functionality (e.g., stability) to the guide RNA. The single-molecule guide linker links the minimum CRISPR repeat and the minimum tracrRNA sequence to form a hairpin structure. The optional tracrRNA extension comprises one or more hairpins.

[0364] A single-molecule guide RNA (sgRNA) in a Type V system comprises, in the 5′ to 3′ direction, a minimum CRISPR repeat sequence and a spacer sequence.

[0365] By way of illustration, guide RNAs used in the CRISPR/Cas system, or other smaller RNAs can be readily synthesized by chemical means, as illustrated below and described in the art. While chemical synthetic procedures are continually expanding, purifications of such RNAs by procedures such as high performance liquid chromatography (HPLC, which avoids the use of gels such as PAGE) tends to become more challenging as polynucleotide lengths increase significantly beyond a hundred or so nucleotides. One approach used for generating RNAs of greater length is to produce two or more molecules that are ligated together. Much longer RNAs, such as those encoding a Cas9 or Cpf1 endonuclease, are more readily generated enzymatically. Various types of RNA modifications can be introduced during or after chemical synthesis and/or enzymatic generation of RNAs, e.g., modifications that enhance stability, reduce the likelihood or degree of innate immune response, and/or enhance other attributes, as described in the art.

### Spacer Extension Sequence

[0366] In some embodiments of genome-targeting nucleic acids, a spacer extension sequence can provide stability and/or provide a location for modifications of a genome-targeting nucleic acid. A spacer extension sequence can modify on- or off-target activity or specificity. In some embodiments, a spacer extension sequence is provided. A spacer extension sequence may have a length of more than 1, 5, 10, 15, 20, 25, 30, 35, 40, 45, 50, 60, 70, 80, 90, 100, 120, 140, 160, 180, 200, 220, 240, 260, 280, 300, 320, 340, 360, 380, 400, 1000, 2000, 3000, 4000, 5000, 6000, or 7000 or more nucleotides. A spacer extension sequence may have a length of less than 1, 5, 10, 15, 20, 25, 30, 35, 40, 45, 50, 60, 70, 80, 90, 100, 120, 140, 160, 180, 200, 220, 240, 260, 280, 300, 320, 340, 360, 380, 400, 1000, 2000, 3000, 4000, 5000, 6000, 7000 or more nucleotides. In some embodiments, a spacer extension sequence is less than 10 nucleotides in length. In some embodiments, a spacer extension sequence is between 10-30 nucleotides in length. In some embodiments, a spacer extension sequence is between 30-70 nucleotides in length.

[0367] In some embodiments, the spacer extension sequence comprises another moiety (e.g., a stability control sequence, an endoribonuclease binding sequence, a ribozyme). In some embodiments, the moiety decreases or increases the stability of a nucleic acid targeting nucleic acid. In some embodiments, the moiety is a transcriptional terminator segment (i.e., a transcription termination sequence). In some embodiments, the moiety functions in a eukaryotic cell. In some embodiments, the moiety functions in a prokaryotic cell. In some embodiments, the moiety functions in both eukaryotic and prokaryotic cells. Non-limiting examples of suitable moieties include: a 5′ cap (e.g., a 7-methylguanylate cap (m7 G)), a riboswitch sequence (e.g., to allow for regulated stability and/or regulated accessibility by proteins and protein complexes), a sequence that forms a dsRNA duplex (i.e., a hairpin), a sequence that targets the RNA to a subcellular location (e.g., nucleus, mitochondria, chloroplasts, and the like), a modification or sequence that provides for tracking (e.g., direct conjugation to a fluorescent molecule, conjugation to a moiety that facilitates fluorescent detection, a sequence that allows for fluorescent detection, etc.), and/or a modification or sequence that provides a binding site for proteins (e.g., proteins that act on DNA, including transcriptional activators, transcriptional repressors, DNA methyltransferases, DNA demethylases, histone acetyltransferases, histone deacetylases, and the like).

### Spacer Sequence

[0368] The spacer sequence hybridizes to a sequence in a target nucleic acid of interest. The spacer of a genome-targeting nucleic acid interacts with a target nucleic acid in a sequence-specific manner via hybridization (i.e., base pairing). The nucleotide sequence of the spacer thus varies depending on the sequence of the target nucleic acid of interest.

[0369] In a CRISPR/Cas system herein, the spacer sequence is designed to hybridize to a target nucleic acid that is located 5′ of a PAM of the Cas9 enzyme used in the system. The spacer may perfectly match the target sequence or may have mismatches. Each Cas9 enzyme has a particular PAM sequence that it recognizes in a target DNA. For example, S. pyogenes recognizes in a target nucleic acid a PAM that comprises the sequence 5′-NRG-3′, where R comprises either A or G, where N is any nucleotide and N is immediately 3′ of the target nucleic acid sequence targeted by the spacer sequence.

[0370] In some embodiments, the target nucleic acid sequence comprises 20 nucleotides. In some embodiments, the target nucleic acid comprises less than 20 nucleotides. In some embodiments, the target nucleic acid comprises more than 20 nucleotides. In some embodiments, the target nucleic acid comprises at least: 5, 10, 15, 16, 17, 18, 19, 20, 21, 22, 23, 24, 25, 30 or more nucleotides. In some embodiments, the target nucleic acid comprises at most: 5, 10, 15, 16, 17, 18, 19, 20, 21, 22, 23, 24, 25, 30 or more nucleotides. In some embodiments, the target nucleic acid sequence comprises 20 bases immediately 5′ of the first nucleotide of the PAM. For example, in a sequence comprising 5′-NNNNNNNNNNNNNNNNNNNNNRG-3′ (SEQ ID NO: 64,790), the target nucleic acid comprises the sequence that corresponds to the Ns, wherein N is any nucleotide, and the underlined NRG sequence is the S. pyogenes PAM.

[0371] In some embodiments, the spacer sequence that hybridizes to the target nucleic acid has a length of at least about 6 nucleotides (nt). The spacer sequence can be at least about 6 nt, at least about 10 nt, at least about 15 nt, at least about 18 nt, at least about 19 nt, at least about 20 nt, at least about 25 nt, at least about 30 nt, at least about 35 nt or at least about 40 nt, from about 6 nt to about 80 nt, from about 6 nt to about 50 nt, from about 6 nt to about 45 nt, from about 6 nt to about 40 nt, from about 6 nt to about 35 nt, from about 6 nt to about 30 nt, from about 6 nt to about 25 nt, from about 6 nt to about 20 nt, from about 6 nt to about 19 nt, from about 10 nt to about 50 nt, from about 10 nt to about 45 nt, from about 10 nt to about 40 nt, from about 10 nt to about 35 nt, from about 10 nt to about 30 nt, from about 10 nt to about 25 nt, from about 10 nt to about 20 nt, from about 10 nt to about 19 nt, from about 19 nt to about 25 nt, from about 19 nt to about 30 nt, from about 19 nt to about 35 nt, from about 19 nt to about 40 nt, from about 19 nt to about 45 nt, from about 19 nt to about 50 nt, from about 19 nt to about 60 nt, from about 20 nt to about 25 nt, from about 20 nt to about 30 nt, from about 20 nt to about 35 nt, from about 20 nt to about 40 nt, from about 20 nt to about 45 nt, from about 20 nt to about 50 nt, or from about 20 nt to about 60 nt. In some embodiments, the spacer sequence comprises 20 nucleotides. In some embodiments, the spacer comprises 19 nucleotides.

[0372] In some embodiments, the percent complementarity between the spacer sequence and the target nucleic acid is at least about 30%, at least about 40%, at least about 50%, at least about 60%, at least about 65%, at least about 70%, at least about 75%, at least about 80%, at least about 85%, at least about 90%, at least about 95%, at least about 97%, at least about 98%, at least about 99%, or 100%. In some embodiments, the percent complementarity between the spacer sequence and the target nucleic acid is at most about 30%, at most about 40%, at most about 50%, at most about 60%, at most about 65%, at most about 70%, at most about 75%, at most about 80%, at most about 85%, at most about 90%, at most about 95%, at most about 97%, at most about 98%, at most about 99%, or 100%. In some embodiments, the percent complementarity between the spacer sequence and the target nucleic acid is 100% over the six contiguous 5′-most nucleotides of the target sequence of the complementary strand of the target nucleic acid. In some embodiments, the percent complementarity between the spacer sequence and the target nucleic acid is at least 60% over about 20 contiguous nucleotides. The length of the spacer sequence and the target nucleic acid can differ by 1 to 6 nucleotides, which may be thought of as a bulge or bulges.

[0373] In some embodiments, a spacer sequence is designed or chosen using a computer program. The computer program can use variables, such as predicted melting temperature, secondary structure formation, predicted annealing temperature, sequence identity, genomic context, chromatin accessibility, % GC, frequency of genomic occurrence (e.g., of sequences that are identical or are similar but vary in one or more spots as a result of mismatch, insertion or deletion), methylation status, presence of SNPs, and the like.

### Minimum CRISPR Repeat Sequence

[0374] In some embodiments, a minimum CRISPR repeat sequence is a sequence with at least about 30%, about 40%, about 50%, about 60%, about 65%, about 70%, about 75%, about 80%, about 85%, about 90%, about 95%, or 100% sequence identity to a reference CRISPR repeat sequence (e.g., crRNA from S. pyogenes).

[0375] A minimum CRISPR repeat sequence comprises nucleotides that can hybridize to a minimum tracrRNA sequence in a cell. The minimum CRISPR repeat sequence and a minimum tracrRNA sequence form a duplex, i.e. a base-paired double-stranded structure. Together, the minimum CRISPR repeat sequence and the minimum tracrRNA sequence bind to the site-directed polypeptide. At least a part of the minimum CRISPR repeat sequence hybridizes to the minimum tracrRNA sequence. In some embodiments, at least a part of the minimum CRISPR repeat sequence comprises at least about 30%, about 40%, about 50%, about 60%, about 65%, about 70%, about 75%, about 80%, about 85%, about 90%, about 95%, or 100% complementary to the minimum tracrRNA sequence. In some embodiments, at least a part of the minimum CRISPR repeat sequence comprises at most about 30%, about 40%, about 50%, about 60%, about 65%, about 70%, about 75%, about 80%, about 85%, about 90%, about 95%, or 100% complementary to the minimum tracrRNA sequence.

[0376] The minimum CRISPR repeat sequence can have a length from about 7 nucleotides to about 100 nucleotides. For example, the length of the minimum CRISPR repeat sequence is from about 7 nucleotides (nt) to about 50 nt, from about 7 nt to about 40 nt, from about 7 nt to about 30 nt, from about 7 nt to about 25 nt, from about 7 nt to about 20 nt, from about 7 nt to about 15 nt, from about 8 nt to about 40 nt, from about 8 nt to about 30 nt, from about 8 nt to about 25 nt, from about 8 nt to about 20 nt, from about 8 nt to about 15 nt, from about 15 nt to about 100 nt, from about 15 nt to about 80 nt, from about 15 nt to about 50 nt, from about 15 nt to about 40 nt, from about 15 nt to about 30 nt, or from about 15 nt to about 25 nt. In some embodiments, the minimum CRISPR repeat sequence is approximately 9 nucleotides in length. In some embodiments, the minimum CRISPR repeat sequence is approximately 12 nucleotides in length.

[0377] In some embodiments, the minimum CRISPR repeat sequence is at least about 60% identical to a reference minimum CRISPR repeat sequence (e.g., wild-type crRNA from S. pyogenes) over a stretch of at least 6, 7, or 8 contiguous nucleotides. For example, the minimum CRISPR repeat sequence is at least about 65% identical, at least about 70% identical, at least about 75% identical, at least about 80% identical, at least about 85% identical, at least about 90% identical, at least about 95% identical, at least about 98% identical, at least about 99% identical or 100% identical to a reference minimum CRISPR repeat sequence over a stretch of at least 6, 7, or 8 contiguous nucleotides.

Minimum tracrRNA Sequence

[0378] In some embodiments, a minimum tracrRNA sequence is a sequence with at least about 30%, about 40%, about 50%, about 60%, about 65%, about 70%, about 75%, about 80%, about 85%, about 90%, about 95%, or 100% sequence identity to a reference tracrRNA sequence (e.g., wild type tracrRNA from S. pyogenes).

[0379] A minimum tracrRNA sequence comprises nucleotides that hybridize to a minimum CRISPR repeat sequence in a cell. A minimum tracrRNA sequence and a minimum CRISPR repeat sequence form a duplex, i.e. a base-paired double-stranded structure. Together, the minimum tracrRNA sequence and the minimum CRISPR repeat bind to a site-directed polypeptide. At least a part of the minimum tracrRNA sequence can hybridize to the minimum CRISPR repeat sequence. In some embodiments, the minimum tracrRNA sequence is at least about 30%, about 40%, about 50%, about 60%, about 65%, about 70%, about 75%, about 80%, about 85%, about 90%, about 95%, or 100% complementary to the minimum CRISPR repeat sequence.

[0380] The minimum tracrRNA sequence can have a length from about 7 nucleotides to about 100 nucleotides. For example, the minimum tracrRNA sequence can be from about 7 nucleotides (nt) to about 50 nt, from about 7 nt to about 40 nt, from about 7 nt to about 30 nt, from about 7 nt to about 25 nt, from about 7 nt to about 20 nt, from about 7 nt to about 15 nt, from about 8 nt to about 40 nt, from about 8 nt to about 30 nt, from about 8 nt to about 25 nt, from about 8 nt to about 20 nt, from about 8 nt to about 15 nt, from about 15 nt to about 100 nt, from about 15 nt to about 80 nt, from about 15 nt to about 50 nt, from about 15 nt to about 40 nt, from about 15 nt to about 30 nt or from about 15 nt to about 25 nt long. In some embodiments, the minimum tracrRNA sequence is approximately 9 nucleotides in length. In some embodiments, the minimum tracrRNA sequence is approximately 12 nucleotides. In some embodiments, the minimum tracrRNA consists of tracrRNA nt 23-48 described in Jinek et al., supra.

[0381] In some embodiments, the minimum tracrRNA sequence is at least about 60% identical to a reference minimum tracrRNA (e.g., wild type, tracrRNA from S. pyogenes) sequence over a stretch of at least 6, 7, or 8 contiguous nucleotides. For example, the minimum tracrRNA sequence is at least about 65% identical, about 70% identical, about 75% identical, about 80% identical, about 85% identical, about 90% identical, about 95% identical, about 98% identical, about 99% identical or 100% identical to a reference minimum tracrRNA sequence over a stretch of at least 6, 7, or 8 contiguous nucleotides.

[0382] In some embodiments, the duplex between the minimum CRISPR RNA and the minimum tracrRNA comprises a double helix. In some embodiments, the duplex between the minimum CRISPR RNA and the minimum tracrRNA comprises at least about 1, 2, 3, 4, 5, 6, 7, 8, 9, or 10 or more nucleotides. In some embodiments, the duplex between the minimum CRISPR RNA and the minimum tracrRNA comprises at most about 1, 2, 3, 4, 5, 6, 7, 8, 9, or 10 or more nucleotides.

[0383] In some embodiments, the duplex comprises a mismatch (i.e., the two strands of the duplex are not 100% complementary). In some embodiments, the duplex comprises at least about 1, 2, 3, 4, or 5 or mismatches. In some embodiments, the duplex comprises at most about 1, 2, 3, 4, or 5 or mismatches. In some embodiments, the duplex comprises no more than 2 mismatches.

### Bulges

[0384] In some embodiments, there is a “bulge” in the duplex between the minimum CRISPR RNA and the minimum tracrRNA. The bulge is an unpaired region of nucleotides within the duplex. In some embodiments, the bulge contributes to the binding of the duplex to the site-directed polypeptide. A bulge comprises, on one side of the duplex, an unpaired 5′-XXXY-3′ where X is any purine and Y comprises a nucleotide that can form a wobble pair with a nucleotide on the opposite strand, and an unpaired nucleotide region on the other side of the duplex. The number of unpaired nucleotides on the two sides of the duplex can be different.

[0385] In one example, the bulge comprises an unpaired purine (e.g., adenine) on the minimum CRISPR repeat strand of the bulge. In some embodiments, a bulge comprises an unpaired 5′-AAGY-3′ of the minimum tracrRNA sequence strand of the bulge, where Y comprises a nucleotide that can form a wobble pairing with a nucleotide on the minimum CRISPR repeat strand.

[0386] In some embodiments, a bulge on the minimum CRISPR repeat side of the duplex comprises at least 1, 2, 3, 4, or 5 or more unpaired nucleotides. In some embodiments, a bulge on the minimum CRISPR repeat side of the duplex comprises at most 1, 2, 3, 4, or 5 or more unpaired nucleotides. In some embodiments, a bulge on the minimum CRISPR repeat side of the duplex comprises 1 unpaired nucleotide.

[0387] In some embodiments, a bulge on the minimum tracrRNA sequence side of the duplex comprises at least 1, 2, 3, 4, 5, 6, 7, 8, 9, or 10 or more unpaired nucleotides. In some embodiments, a bulge on the minimum tracrRNA sequence side of the duplex comprises at most 1, 2, 3, 4, 5, 6, 7, 8, 9, or 10 or more unpaired nucleotides. In some embodiments, a bulge on a second side of the duplex (e.g., the minimum tracrRNA sequence side of the duplex) comprises 4 unpaired nucleotides.

[0388] In some embodiments, a bulge comprises at least one wobble pairing. In some embodiments, a bulge comprises at most one wobble pairing. In some embodiments, a bulge comprises at least one purine nucleotide. In some embodiments, a bulge comprises at least 3 purine nucleotides. In some embodiments, a bulge sequence comprises at least 5 purine nucleotides. In some embodiments, a bulge sequence comprises at least one guanine nucleotide. In some embodiments, a bulge sequence comprises at least one adenine nucleotide.

### Hairpins

[0389] In various embodiments, one or more hairpins are located 3′ to the minimum tracrRNA in the 3′ tracrRNA sequence.

[0390] In some embodiments, the hairpin starts at least about 1, 2, 3, 4, 5, 6, 7, 8, 9, 10, 15, or 20 or more nucleotides 3′ from the last paired nucleotide in the minimum CRISPR repeat and minimum tracrRNA sequence duplex. In some embodiments, the hairpin can start at most about 1, 2, 3, 4, 5, 6, 7, 8, 9 or 10 or more nucleotides 3′ of the last paired nucleotide in the minimum CRISPR repeat and minimum tracrRNA sequence duplex.

[0391] In some embodiments, a hairpin comprises at least about 1, 2, 3, 4, 5, 6, 7, 8, 9, 10, 15, or 20 or more consecutive nucleotides. In some embodiments, a hairpin comprises at most about 1, 2, 3, 4, 5, 6, 7, 8, 9, 10, 15, or more consecutive nucleotides.

[0392] In some embodiments, a hairpin comprises a CC dinucleotide (i.e., two consecutive cytosine nucleotides).

[0393] In some embodiments, a hairpin comprises duplexed nucleotides (e.g., nucleotides in a hairpin, hybridized together). For example, a hairpin comprises a CC dinucleotide that is hybridized to a GG dinucleotide in a hairpin duplex of the 3′ tracrRNA sequence.

[0394] One or more of the hairpins can interact with guide RNA-interacting regions of a site-directed polypeptide.

[0395] In some embodiments, there are two or more hairpins, and in some embodiments there are three or more hairpins.

3′ tracrRNA Sequence

[0396] In some embodiments, a 3′ tracrRNA sequence comprises a sequence with at least about 30%, about 40%, about 50%, about 60%, about 65%, about 70%, about 75%, about 80%, about 85%, about 90%, about 95%, or 100% sequence identity to a reference tracrRNA sequence (e.g., a tracrRNA from S. pyogenes).

[0397] In some embodiments, the 3′ tracrRNA sequence has a length from about 6 nucleotides to about 100 nucleotides. For example, the 3′ tracrRNA sequence can have a length from about 6 nucleotides (nt) to about 50 nt, from about 6 nt to about 40 nt, from about 6 nt to about 30 nt, from about 6 nt to about 25 nt, from about 6 nt to about 20 nt, from about 6 nt to about 15 nt, from about 8 nt to about 40 nt, from about 8 nt to about 30 nt, from about 8 nt to about 25 nt, from about 8 nt to about 20 nt, from about 8 nt to about 15 nt, from about 15 nt to about 100 nt, from about 15 nt to about 80 nt, from about 15 nt to about 50 nt, from about 15 nt to about 40 nt, from about 15 nt to about 30 nt, or from about 15 nt to about 25 nt. In some embodiments, the 3′ tracrRNA sequence has a length of approximately 14 nucleotides.

[0398] In some embodiments, the 3′ tracrRNA sequence is at least about 60% identical to a reference 3′ tracrRNA sequence (e.g., wild type 3′ tracrRNA sequence from S. pyogenes) over a stretch of at least 6, 7, or 8 contiguous nucleotides. For example, the 3′ tracrRNA sequence is at least about 60% identical, about 65% identical, about 70% identical, about 75% identical, about 80% identical, about 85% identical, about 90% identical, about 95% identical, about 98% identical, about 99% identical, or 100% identical, to a reference 3′ tracrRNA sequence (e.g., wild type 3′ tracrRNA sequence from S. pyogenes) over a stretch of at least 6, 7, or 8 contiguous nucleotides.

[0399] In some embodiments, a 3′ tracrRNA sequence comprises more than one duplexed region (e.g., hairpin, hybridized region). In some embodiments, a 3′ tracrRNA sequence comprises two duplexed regions.

[0400] In some embodiments, the 3′ tracrRNA sequence comprises a stem loop structure. In some embodiments, a stem loop structure in the 3′ tracrRNA comprises at least 1, 2, 3, 4, 5, 6, 7, 8, 9, 10, 15 or 20 or more nucleotides. In some embodiments, the stem loop structure in the 3′ tracrRNA comprises at most 1, 2, 3, 4, 5, 6, 7, 8, 9 or 10 or more nucleotides. In some embodiments, the stem loop structure comprises a functional moiety. For example, the stem loop structure may comprise an aptamer, a ribozyme, a protein-interacting hairpin, a CRISPR array, an intron, or an exon. In some embodiments, the stem loop structure comprises at least about 1, 2, 3, 4, or 5 or more functional moieties. In some embodiments, the stem loop structure comprises at most about 1, 2, 3, 4, or 5 or more functional moieties.

[0401] In some embodiments, the hairpin in the 3′ tracrRNA sequence comprises a P-domain. In some embodiments, the P-domain comprises a double-stranded region in the hairpin.

tracrRNA Extension Sequence

[0402] A tracrRNA extension sequence may be provided whether the tracrRNA is in the context of single-molecule guides or double-molecule guides. In some embodiments, a tracrRNA extension sequence has a length from about 1 nucleotide to about 400 nucleotides. In some embodiments, a tracrRNA extension sequence has a length of more than 1, 5, 10, 15, 20, 25, 30, 35, 40, 45, 50, 60, 70, 80, 90, 100, 120, 140, 160, 180, 200, 220, 240, 260, 280, 300, 320, 340, 360, 380, or 400 nucleotides. In some embodiments, a tracrRNA extension sequence has a length from about 20 to about 5000 or more nucleotides. In some embodiments, a tracrRNA extension sequence has a length of more than 1000 nucleotides. In some embodiments, a tracrRNA extension sequence has a length of less than 1, 5, 10, 15, 20, 25, 30, 35, 40, 45, 50, 60, 70, 80, 90, 100, 120, 140, 160, 180, 200, 220, 240, 260, 280, 300, 320, 340, 360, 380, 400 or more nucleotides. In some embodiments, a tracrRNA extension sequence can have a length of less than 1000 nucleotides. In some embodiments, a tracrRNA extension sequence comprises less than 10 nucleotides in length. In some embodiments, a tracrRNA extension sequence is 10-30 nucleotides in length. In some embodiments, tracrRNA extension sequence is 30-70 nucleotides in length.

[0403] In some embodiments, the tracrRNA extension sequence comprises a functional moiety (e.g., a stability control sequence, ribozyme, endoribonuclease binding sequence). In some embodiments, the functional moiety comprises a transcriptional terminator segment (i.e., a transcription termination sequence). In some embodiments, the functional moiety has a total length from about 10 nucleotides (nt) to about 100 nucleotides, from about 10 nt to about 20 nt, from about 20 nt to about 30 nt, from about 30 nt to about 40 nt, from about 40 nt to about 50 nt, from about 50 nt to about 60 nt, from about 60 nt to about 70 nt, from about 70 nt to about 80 nt, from about 80 nt to about 90 nt, or from about 90 nt to about 100 nt, from about 15 nt to about 80 nt, from about 15 nt to about 50 nt, from about 15 nt to about 40 nt, from about 15 nt to about 30 nt, or from about 15 nt to about 25 nt. In some embodiments, the functional moiety functions in a eukaryotic cell. In some embodiments, the functional moiety functions in a prokaryotic cell. In some embodiments, the functional moiety functions in both eukaryotic and prokaryotic cells.

[0404] Non-limiting examples of suitable tracrRNA extension functional moieties include a 3′ poly-adenylated tail, a riboswitch sequence (e.g., to allow for regulated stability and/or regulated accessibility by proteins and protein complexes), a sequence that forms a dsRNA duplex (i.e., a hairpin), a sequence that targets the RNA to a subcellular location (e.g., nucleus, mitochondria, chloroplasts, and the like), a modification or sequence that provides for tracking (e.g., direct conjugation to a fluorescent molecule, conjugation to a moiety that facilitates fluorescent detection, a sequence that allows for fluorescent detection, etc.), and/or a modification or sequence that provides a binding site for proteins (e.g., proteins that act on DNA, including transcriptional activators, transcriptional repressors, DNA methyltransferases, DNA demethylases, histone acetyltransferases, histone deacetylases, and the like). In some embodiments, a tracrRNA extension sequence comprises a primer binding site or a molecular index (e.g., barcode sequence). In some embodiments, the tracrRNA extension sequence comprises one or more affinity tags.

### Single-Molecule Guide Linker Sequence

[0405] In some embodiments, the linker sequence of a single-molecule guide nucleic acid has a length from about 3 nucleotides to about 100 nucleotides. In Jinek et al., supra, for example, a simple 4 nucleotide “tetraloop” (-GAAA-) was used, Science, 337(6096): 816-821 (2012). An illustrative linker has a length from about 3 nucleotides (nt) to about 90 nt, from about 3 nt to about 80 nt, from about 3 nt to about 70 nt, from about 3 nt to about 60 nt, from about 3 nt to about 50 nt, from about 3 nt to about 40 nt, from about 3 nt to about 30 nt, from about 3 nt to about 20 nt, from about 3 nt to about 10 nt. For example, the linker can have a length from about 3 nt to about 5 nt, from about 5 nt to about 10 nt, from about 10 nt to about 15 nt, from about 15 nt to about 20 nt, from about 20 nt to about 25 nt, from about 25 nt to about 30 nt, from about 30 nt to about 35 nt, from about 35 nt to about 40 nt, from about 40 nt to about 50 nt, from about 50 nt to about 60 nt, from about 60 nt to about 70 nt, from about 70 nt to about 80 nt, from about 80 nt to about 90 nt, or from about 90 nt to about 100 nt. In some embodiments, the linker of a single-molecule guide nucleic acid is between 4 and 40 nucleotides. In some embodiments, a linker is at least about 100, 500, 1000, 1500, 2000, 2500, 3000, 3500, 4000, 4500, 5000, 5500, 6000, 6500, or 7000 or more nucleotides. In some embodiments, a linker is at most about 100, 500, 1000, 1500, 2000, 2500, 3000, 3500, 4000, 4500, 5000, 5500, 6000, 6500, or 7000 or more nucleotides.

[0406] Linkers can comprise any of a variety of sequences, although preferably the linker will not comprise sequences that have extensive regions of homology with other portions of the guide RNA, which might cause intramolecular binding that could interfere with other functional regions of the guide. In Jinek et al., supra, a simple 4 nucleotide sequence -GAAA- was used, Science, 337(6096): 816-821 (2012), but numerous other sequences, including longer sequences can likewise be used.

[0407] In some embodiments, the linker sequence comprises a functional moiety. For example, the linker sequence may comprise one or more features, including an aptamer, a ribozyme, a protein-interacting hairpin, a protein binding site, a CRISPR array, an intron, or an exon. In some embodiments, the linker sequence comprises at least about 1, 2, 3, 4, or 5 or more functional moieties. In some embodiments, the linker sequence comprises at most about 1, 2, 3, 4, or 5 or more functional moieties.

Genome Engineering Strategies to Correct Cells by Insertion, Correction or Replacement of One or More Mutations within or Near the Gene or by Knocking-in G6PC cDNA or a Minigene into the Locus of the Corresponding Gene or Safe Harbor Site

[0408] The methods of the present disclosure can involve correction of one or both of the mutant alleles. Gene editing to correct the mutation has the advantage of restoration of correct expression levels and temporal control. Sequencing the patient's G6PC alleles allows for design of the gene editing strategy to best correct the identified mutation(s).

[0409] A step of the ex vivo methods of the invention involves editing/correcting the patient specific iPS cells using genome engineering. Alternatively, a step of the ex vivo methods of the invention involves editing/correcting the progenitor cell, primary hepatocyte, or mesenchymal stem cell, or a liver progenitor cell. Likewise, a step of the in vivo methods of the invention involves editing/correcting the cells in a GSD1a patient using genome engineering. Similarly, a step in the cellular methods of the invention involves editing/correcting the G6PC gene in a human cell by genome engineering.

[0410] GSD1a patients exhibit one or more mutations in the G6PC gene. Therefore, different patients will generally require different correction strategies. Any CRISPR endonuclease may be used in the methods of the invention, each CRISPR endonuclease having its own associated PAM, which may or may not be disease specific. For example, gRNA spacer sequences for targeting the G6PC gene with a CRISPR/Cas9 endonuclease from S. pyogenes have been identified in FIG. 85. gRNA spacer sequences for targeting the G6PC gene with a CRISPR/Cas9 endonuclease from S. aureus have been identified in FIG. 86. gRNA spacer sequences for targeting the G6PC gene with a CRISPR/Cas9 endonuclease from S. thermophilus have been identified in FIG. 87. gRNA spacer sequences for targeting the G6PC gene with a CRISPR/Cas9 endonuclease from T. denticola have been identified in FIG. 88. gRNA spacer sequences for targeting the G6PC gene with a CRISPR/Cas9 endonuclease from N. meningitides have been identified in FIG. 89. gRNA spacer sequences for targeting the G6PC gene with a CRISPR/Cpf1 endonuclease from Acidominococcus, Lachnospiracea, and Francisella novicida have been identified in FIG. 90. gRNA spacer sequences for targeting, e.g., targeting exon 1-2 of, AAVS1 (PPP1R12C), ALB, Angptl3, ApoC3, ASGR2, CCR5, FIX (F9), Gys2, HGD, Lp(a), Pcsk9, Serpina1, TF, and TTR with a CRISPR/Cas9 endonuclease from S. pyogenes have been identified in FIGS. 1, 7, 13, 19, 25, 31, 37, 43, 49, 55, 61, 67, 73, and 79 respectively. gRNA spacer sequences for targeting, e.g., targeting exon 1-2 of, AAVS1 (PPP1R12C), ALB, Angptl3, ApoC3, ASGR2, CCR5, FIX (F9), Gys2, HGD, Lp(a), Pcsk9, Serpina1, TF, and TTR with a CRISPR/Cas9 endonuclease from S. aureus have been identified in FIGS. 8, 14, 20, 26, 32, 38, 44, 50, 56, 62, 68, 74, and 80, respectively. gRNA spacer sequences for targeting, e.g., targeting exon 1-2 of, AAVS1 (PPP1R12C), ALB, Angptl3, ApoC3, ASGR2, CCR5, FIX (F9), Gys2, HGD, Lp(a), Pcsk9, Serpina1, TF, and TTR with a CRISPR/Cas9 endonuclease from S. thermophilus have been identified in FIGS. 9, 15, 21, 27, 33, 39, 45, 51, 57,63, 69, 75, and 81, respectively. gRNA spacer sequences for targeting, e.g., targeting exon 1-2 of, AAVS1 (PPP1R12C), ALB, Angptl3, ApoC3, ASGR2, CCR5, FIX (F9), Gys2, HGD, Lp(a), Pcsk9, Serpina1, TF, and TTR with a CRISPR/Cas9 endonuclease from T. denticola have been identified in FIGS. 10, 16, 22, 28, 34, 40, 46, 52, 58, 64, 70, 76, and 82, respectively. gRNA spacer sequences for targeting, e.g., targeting exon 1-2 of, AAVS1 (PPP1R12C), ALB, Angptl3, ApoC3, ASGR2, CCR5, FIX (F9), Gys2, HGD, Lp(a), Pcsk9, Serpina1, TF, and TTR with a CRISPR/Cas9 endonuclease from N. meningitides have been identified in FIGS. 11, 17, 23, 29, 35, 41, 47, 53, 59, 65, 71, 77, and 83, respectively. gRNA spacer sequences for targeting, e.g., targeting exon 1-2 of, AAVS1 (PPP1R12C), ALB, Angptl3, ApoC3, ASGR2, CCR5, FIX (F9), Gys2, HGD, Lp(a), Pcsk9, Serpina1, TF, and TTR with a CRISPR/Cas9 endonuclease from Acidominococcus, Lachnospiraceae, and Francisella novicida have been identified in FIGS. 12, 18, 24, 30, 36, 42, 48, 54, 60, 66, 72, 78, and 84, respectively.

[0411] For example, the mutation can be corrected by the insertions or deletions that arise due to the imprecise NHEJ repair pathway. If the patient's G6PC gene has an inserted or deleted base, a targeted cleavage can result in a NHEJ-mediated insertion or deletion that restores the frame. Missense mutations can also be corrected through NHEJ-mediated correction using one or more guide RNA. The ability or likelihood of the cut(s) to correct the mutation can be designed or evaluated based on the local sequence and micro-homologies. NHEJ can also be used to delete segments of the gene, either directly or by altering splice donor or acceptor sites through cleavage by one gRNA targeting several locations, or several gRNAs. This may be useful if an amino acid, domain or exon contains the mutations and can be removed or inverted, or if the deletion otherwise restored function to the protein. Pairs of guide strands have been used for deletions and corrections of inversions.

[0412] Alternatively, the donor for correction by HDR contains the corrected sequence with small or large flanking homology arms to allow for annealing. HDR is essentially an error-free mechanism that uses a supplied homologous DNA sequence as a template during DSB repair. The rate of homology directed repair (HDR) is a function of the distance between the mutation and the cut site so choosing overlapping or nearest target sites is important. Templates can include extra sequences flanked by the homologous regions or can contain a sequence that differs from the genomic sequence, thus allowing sequence editing.

[0413] In addition to correcting mutations by NHEJ or HDR, a range of other options are possible. If there are small or large deletions or multiple mutations, a cDNA can be knocked in that contains the exons affected. A full length cDNA can be knocked into any “safe harbor”, but must use a supplied or other promoter. If this construct is knocked into the correct location, it will have physiological control, similar to the normal gene. Pairs of nucleases can be used to delete mutated gene regions, though a donor would usually have to be provided to restore function. In this case two gRNA would be supplied and one donor sequence.

[0414] Some genome engineering strategies involve correction of one or more mutations in or near the gene, or deleting the mutant G6PC DNA and knocking-in G6PC cDNA or a minigene (comprised of one or more exons and introns or natural or synthetic introns) into the locus of the corresponding gene or a safe harbor locus by homology directed repair (HDR), which is also known as homologous recombination (HR). Homology directed repair is one strategy for treating patients that have inactivating mutations in or near the glucose-6-phosphatase catalytic unit. These strategies will restore the glucose-6-phosphatase catalytic unit and completely reverse, treat, and/or mitigate the diseased state. This strategy will require a more custom approach based on the location of the patient's inactivating mutation(s). Donor nucleotides for correcting mutations are small (<300 bp). This is advantageous, as HDR efficiencies may be inversely related to the size of the donor molecule. Also, it is expected that the donor templates can fit into size constrained viral vector molecules, e.g., adeno-associated virus (AAV) molecules, which have been shown to be an effective means of donor template delivery. Also, it is expected that the donor templates can fit into other size constrained molecules, including, by way of non-limiting example, platelets and/or exosomes or other microvesicles.

[0415] Homology direct repair is a cellular mechanism for repairing double-stranded breaks (DSBs). The most common form is homologous recombination. There are additional pathways for HDR, including single-strand annealing and alternative-HDR. Genome engineering tools allow researchers to manipulate the cellular homologous recombination pathways to create site-specific modifications to the genome. It has been found that cells can repair a double-stranded break using a synthetic donor molecule provided in trans. Therefore, by introducing a double-stranded break near a specific mutation and providing a suitable donor, targeted changes can be made in the genome. Specific cleavage increases the rate of HDR more than 1,000 fold above the rate of 1 in 10⁶ cells receiving a homologous donor alone. The rate of homology directed repair (HDR) at a particular nucleotide is a function of the distance to the cut site, so choosing overlapping or nearest target sites is important. Gene editing offers the advantage over gene addition, as correcting in situ leaves the rest of the genome unperturbed.

[0416] Supplied donors for editing by HDR vary markedly but generally contain the intended sequence with small or large flanking homology arms to allow annealing to the genomic DNA. The homology regions flanking the introduced genetic changes can be 30 bp or smaller, or as large as a multi-kilobase cassette that can contain promoters, CDNAs, etc. Both single-stranded and double-stranded oligonucleotide donors have been used. These oligonucleotides range in size from less than 100 nt to over many kb, though longer ssDNA can also be generated and used. Double-stranded donors are often used, including PCR amplicons, plasmids, and mini-circles. In general, it has been found that an AAV vector is a very effective means of delivery of a donor template, though the packaging limits for individual donors is <5 kb. Active transcription of the donor increased HDR three-fold, indicating the inclusion of promoter may increase conversion. Conversely, CpG methylation of the donor decreased gene expression and HDR.

[0417] In addition to wildtype endonucleases, such as Cas9, nickase variants exist that have one or the other nuclease domain inactivated resulting in cutting of only one DNA strand. HDR can be directed from individual Cas nickases or using pairs of nickases that flank the target area. Donors can be single-stranded, nicked, or dsDNA.

[0418] The donor DNA can be supplied with the nuclease or independently by a variety of different methods, for example by transfection, nano-particle, micro-injection, or viral transduction. A range of tethering options has been proposed to increase the availability of the donors for HDR. Examples include attaching the donor to the nuclease, attaching to DNA binding proteins that bind nearby, or attaching to proteins that are involved in DNA end binding or repair.

[0419] The repair pathway choice can be guided by a number of culture conditions, such as those that influence cell cycling, or by targeting of DNA repair and associated proteins. For example, to increase HDR, key NHEJ molecules can be suppressed, such as KU70, KU80 or DNA ligase IV.

[0420] Without a donor present, the ends from a DNA break or ends from different breaks can be joined using the several nonhomologous repair pathways in which the DNA ends are joined with little or no base-pairing at the junction. In addition to canonical NHEJ, there are similar repair mechanisms, such as alt-NHEJ. If there are two breaks, the intervening segment can be deleted or inverted. NHEJ repair pathways can lead to insertions, deletions or mutations at the joints.

[0421] NHEJ was used to insert a 15-kb inducible gene expression cassette into a defined locus in human cell lines after nuclease cleavage. Maresca, M., Lin, V. G., Guo, N. & Yang, Y., Genome Res 23, 539-546 (2013).

[0422] In addition to genome editing by NHEJ or HDR, site-specific gene insertions have been conducted that use both the NHEJ pathway and HR. A combination approach may be applicable in certain settings, possibly including intron/exon borders. NHEJ may prove effective for ligation in the intron, while the error-free HDR may be better suited in the coding region.

[0423] As stated previously, the G6PC gene contains 5 exons. Any one or more of the 5 exons or nearby introns may be repaired in order to correct a mutation and restore the inactive G6Pase catalytic unit. Alternatively, there are various mutations associated with GSD1a, which are a combination of insertions, deletions, missense, nonsense, frameshift and other mutations, with the common effect of inactivating G6Pase. Any one or more of the mutations may be repaired in order to restore the inactive G6Pase catalytic unit. For example, one or more of the following pathological variants may be corrected: rs80356479, rs80356486, rs606231368, rs80356488, rs587776757, rs104894565, rs104894566, rs1801175, rs1801176, rs104894567, rs104894571, rs80356482, rs80356483, rs104894563, rs367727229, rs387906505, rs104894568, rs104894569, rs80356487, rs764920787, rs80356485, rs780226142, rs80356484 (see FIGS. 91A and 91B). These variants include deletions, insertions and single nucleotide polymorphisms. As a further alternative, G6PC cDNA or a minigene (comprised of one or more exons and introns or natural or synthetic introns) may be knocked-in to the locus of the corresponding gene or knocked-in to a safe harbor site, such as AAVS1 (PPP1R12C), ALB, Angptl3, ApoC3, ASGR2, CCR5, FIX (F9), Gys2, HGD, Lp(a), Pcsk9, Serpina1, TF, and/or TTR. The safe harbor locus can be selected from the group consisting of: exon 1-2 of AAVS1 (PPP1R12C), exon 1-2 of ALB, exon 1-2 of Angptl3, exon 1-2 of ApoC3, exon 1-2 of ASGR2, exon 1-2 of CCR5, exon 1-2 of FIX (F9), exon 1-2 of Gys2, exon 1-2 of HGD, exon 1-2 of Lp(a), exon 1-2 of Pcsk9, exon 1-2 of Serpina1, exon 1-2 of TF, and exon 1-2 of TTR. In some embodiments, the methods provide one gRNA or a pair of gRNAs that can be used to facilitate incorporation of a new sequence from a polynucleotide donor template to correct one or more mutations or to knock-in a part of or the entire G6PC gene or cDNA.

[0424] Some embodiments of the methods provide gRNA pairs that make a deletion by cutting the gene twice, one gRNA cutting at the 5′ end of one or more mutations and the other gRNA cutting at the 3′ end of one or more mutations that facilitates insertion of a new sequence from a polynucleotide donor template to replace the one or more mutations, or deletion may exclude mutant amino acids or amino acids adjacent to it (e.g., premature stop codon) and lead to expression of a functional protein, or restore an open reading frame. The cutting may be accomplished by a pair of DNA endonucleases that each makes a DSB in the genome, or by multiple nickases that together make a DSB in the genome.

[0425] Alternatively, some embodiments of the methods provide one gRNA to make one double-strand cut around one or more mutations that facilitates insertion of a new sequence from a polynucleotide donor template to replace the one or more mutations. The double-strand cut may be made by a single DNA endonuclease or multiple nickases that together make a DSB in the genome, or single gRNA may lead to deletion (MMEJ), which may exclude mutant amino acid (e.g., premature stop codon) and lead to expression of a functional protein, or restore an open reading frame.

[0426] Illustrative modifications within the G6PC gene include replacements within or near (proximal) to the mutations referred to above, such as within the region of less than 3 kb, less than 2 kb, less than 1 kb, less than 0.5 kb upstream or downstream of the specific mutation. Given the relatively wide variations of mutations in the G6PC gene, it will be appreciated that numerous variations of the replacements referenced above (including without limitation larger as well as smaller deletions), would be expected to result in restoration of G6Pase protein activity.

[0427] Such variants include replacements that are larger in the 5′ and/or 3′ direction than the specific mutation in question, or smaller in either direction. Accordingly, by “near” or “proximal” with respect to specific replacements, it is intended that the SSB or DSB locus associated with a desired replacement boundary (also referred to herein as an endpoint) may be within a region that is less than about 3 kb from the reference locus noted. In some embodiments, the DSB locus is more proximal and within 2 kb, within 1 kb, within 0.5 kb, or within 0.1 kb. In the case of small replacement, the desired endpoint is at or “adjacent to” the reference locus, by which it is intended that the endpoint is within 100 bp, within 50 bp, within 25 bp, or less than about 10 bp to 5 bp from the reference locus.

[0428] Embodiments comprising larger or smaller replacements are expected to provide the same benefit, as long as the G6Pase catalytic unit is restored. It is thus expected that many variations of the replacements described and illustrated herein will be effective for ameliorating GSD1a.

[0429] Another genome engineering strategy involves exon deletion. Targeted deletion of specific exons can be an attractive strategy for treating a large subset of patients with a single therapeutic cocktail. Deletions can either be single exon deletions or multi-exon deletions. While multi-exon deletions can reach a larger number of patients, for larger deletions the efficiency of deletion greatly decreases with increased size. Therefore, deletions range can be from 40 to 10,000 base pairs (bp) in size. For example, deletions can range from 40-100; 100-300; 300-500; 500-1,000; 1,000-2,000; 2,000-3,000; 3,000-5,000; or 5,000-10,000 base pairs in size.

[0430] Deletions can occur in enhancer, promoter, 1st intron, and/or 3′UTR leading to upregulation of the gene expression, and/or through deletion of the regulatory elements.

[0431] In order to ensure that the pre-mRNA is properly processed following deletion, the surrounding splicing signals can be deleted. Splicing donor and acceptors are generally within 100 base pairs of the neighboring intron. Therefore, in some examples, methods can provide all gRNAs that cut approximately +/−100-3100 bp with respect to each exon/intron junction of interest.

[0432] For any of the genome editing strategies, gene editing can be confirmed by sequencing or PCR analysis.

### Target Sequence Selection

[0433] Shifts in the location of the 5′ boundary and/or the 3′ boundary relative to particular reference loci are used to facilitate or enhance particular applications of gene editing, which depend in part on the endonuclease system selected for the editing, as further described and illustrated herein.

[0434] In a first, non-limiting example of such target sequence selection, many endonuclease systems have rules or criteria that guide the initial selection of potential target sites for cleavage, such as the requirement of a PAM sequence motif in a particular position adjacent to the DNA cleavage sites in the case of CRISPR Type II or Type V endonucleases.

[0435] In another non-limiting example of target sequence selection or optimization, the frequency of “off-target” activity for a particular combination of target sequence and gene editing endonuclease (i.e. the frequency of DSBs occurring at sites other than the selected target sequence) is assessed relative to the frequency of on-target activity. In some cases, cells that have been correctly edited at the desired locus may have a selective advantage relative to other cells. Illustrative, but nonlimiting, examples of a selective advantage include the acquisition of attributes such as enhanced rates of replication, persistence, resistance to certain conditions, enhanced rates of successful engraftment or persistence in vivo following introduction into a patient, and other attributes associated with the maintenance or increased numbers or viability of such cells. In other cases, cells that have been correctly edited at the desired locus may be positively selected for by one or more screening methods used to identify, sort or otherwise select for cells that have been correctly edited. Both selective advantage and directed selection methods may take advantage of the phenotype associated with the correction. In some embodiments, cells may be edited two or more times in order to create a second modification that creates a new phenotype that is used to select or purify the intended population of cells. Such a second modification could be created by adding a second gRNA for a selectable or screenable marker. In some cases, cells can be correctly edited at the desired locus using a DNA fragment that contains the cDNA and also a selectable marker.

[0436] Whether any selective advantage is applicable or any directed selection is to be applied in a particular case, target sequence selection is also guided by consideration of off-target frequencies in order to enhance the effectiveness of the application and/or reduce the potential for undesired alterations at sites other than the desired target. As described further and illustrated herein and in the art, the occurrence of off-target activity is influenced by a number of factors including similarities and dissimilarities between the target site and various off target sites, as well as the particular endonuclease used. Bioinformatics tools are available that assist in the prediction of off-target activity, and frequently such tools can also be used to identify the most likely sites of off-target activity, which can then be assessed in experimental settings to evaluate relative frequencies of off-target to on-target activity, thereby allowing the selection of sequences that have higher relative on-target activities. Illustrative examples of such techniques are provided herein, and others are known in the art.

[0437] Another aspect of target sequence selection relates to homologous recombination events. Sequences sharing regions of homology can serve as focal points for homologous recombination events that result in deletion of intervening sequences. Such recombination events occur during the normal course of replication of chromosomes and other DNA sequences, and also at other times when DNA sequences are being synthesized, such as in the case of repairs of double-strand breaks (DSBs), which occur on a regular basis during the normal cell replication cycle but may also be enhanced by the occurrence of various events (such as UV light and other inducers of DNA breakage) or the presence of certain agents (such as various chemical inducers). Many such inducers cause DSBs to occur indiscriminately in the genome, and DSBs are regularly being induced and repaired in normal cells. During repair, the original sequence may be reconstructed with complete fidelity, however, in some cases, small insertions or deletions (referred to as “indels”) are introduced at the DSB site.

[0438] DSBs may also be specifically induced at particular locations, as in the case of the endonucleases systems described herein, which can be used to cause directed or preferential gene modification events at selected chromosomal locations. The tendency for homologous sequences to be subject to recombination in the context of DNA repair (as well as replication) can be taken advantage of in a number of circumstances, and is the basis for one application of gene editing systems, such as CRISPR, in which homology directed repair is used to insert a sequence of interest, provided through use of a “donor” polynucleotide, into a desired chromosomal location.

[0439] Regions of homology between particular sequences, which can be small regions of “microhomology” that may comprise as few as ten basepairs or less, can also be used to bring about desired deletions. For example, a single DSB is introduced at a site that exhibits microhomology with a nearby sequence. During the normal course of repair of such DSB, a result that occurs with high frequency is the deletion of the intervening sequence as a result of recombination being facilitated by the DSB and concomitant cellular repair process.

[0440] In some circumstances, however, selecting target sequences within regions of homology can also give rise to much larger deletions, including gene fusions (when the deletions are in coding regions), which may or may not be desired given the particular circumstances.

[0441] The examples provided herein further illustrate the selection of various target regions for the creation of DSBs designed to induce replacements that result in restoration of G6Pase activity, as well as the selection of specific target sequences within such regions that are designed to minimize off-target events relative to on-target events.

### Nucleic Acid Modifications

[0442] In some embodiments, polynucleotides introduced into cells comprise one or more modifications that can be used individually or in combination, for example, to enhance activity, stability or specificity, alter delivery, reduce innate immune responses in host cells, or for other enhancements, as further described herein and known in the art.

[0443] In certain embodiments, modified polynucleotides are used in the CRISPR/Cas9/CPf1 system, in which case the guide RNAs (either single-molecule guides or double-molecule guides) and/or a DNA or an RNA encoding a Cas or Cpf1 endonuclease introduced into a cell can be modified, as described and illustrated below. Such modified polynucleotides can be used in the CRISPR/Cas9/CPf1 system to edit any one or more genomic loci.

[0444] Using the CRISPR/Cas9/CPf1 system for purposes of nonlimiting illustrations of such uses, modifications of guide RNAs can be used to enhance the formation or stability of the CRISPR/Cas9/CPf1 genome editing complex comprising guide RNAs, which may be single-molecule guides or double-molecule, and a Cas or Cpf1 endonuclease. Modifications of guide RNAs can also or alternatively be used to enhance the initiation, stability or kinetics of interactions between the genome editing complex with the target sequence in the genome, which can be used, for example, to enhance on-target activity. Modifications of guide RNAs can also or alternatively be used to enhance specificity, e.g., the relative rates of genome editing at the on-target site as compared to effects at other (off-target) sites.

[0445] Modifications can also or alternatively be used to increase the stability of a guide RNA, e.g., by increasing its resistance to degradation by ribonucleases (RNases) present in a cell, thereby causing its half-life in the cell to be increased. Modifications enhancing guide RNA half-life can be particularly useful in embodiments in which a Cas or Cpf1 endonuclease is introduced into the cell to be edited via an RNA that needs to be translated in order to generate endonuclease, because increasing the half-life of guide RNAs introduced at the same time as the RNA encoding the endonuclease can be used to increase the time that the guide RNAs and the encoded Cas or Cpf1 endonuclease co-exist in the cell.

[0446] Modifications can also or alternatively be used to decrease the likelihood or degree to which RNAs introduced into cells elicit innate immune responses. Such responses, which have been well characterized in the context of RNA interference (RNAi), including small-interfering RNAs (siRNAs), as described below and in the art, tend to be associated with reduced half-life of the RNA and/or the elicitation of cytokines or other factors associated with immune responses.

[0447] One or more types of modifications can also be made to RNAs encoding an endonuclease that are introduced into a cell, including, without limitation, modifications that enhance the stability of the RNA (such as by increasing its degradation by RNAses present in the cell), modifications that enhance translation of the resulting product (i.e. the endonuclease), and/or modifications that decrease the likelihood or degree to which the RNAs introduced into cells elicit innate immune responses.

[0448] Combinations of modifications, such as the foregoing and others, can likewise be used. In the case of CRISPR/Cas9/CPf1, for example, one or more types of modifications can be made to guide RNAs (including those exemplified above), and/or one or more types of modifications can be made to RNAs encoding Cas endonuclease (including those exemplified above).

[0449] By way of illustration, guide RNAs used in the CRISPR/Cas9/CPf1 system, or other smaller RNAs can be readily synthesized by chemical means, enabling a number of modifications to be readily incorporated, as illustrated below and described in the art. While chemical synthetic procedures are continually expanding, purifications of such RNAs by procedures such as high performance liquid chromatography (HPLC, which avoids the use of gels such as PAGE) tends to become more challenging as polynucleotide lengths increase significantly beyond a hundred or so nucleotides. One approach used for generating chemically-modified RNAs of greater length is to produce two or more molecules that are ligated together. Much longer RNAs, such as those encoding a Cas9 endonuclease, are more readily generated enzymatically. While fewer types of modifications are generally available for use in enzymatically produced RNAs, there are still modifications that can be used to, e.g., enhance stability, reduce the likelihood or degree of innate immune response, and/or enhance other attributes, as described further below and in the art; and new types of modifications are regularly being developed.

[0450] By way of illustration of various types of modifications, especially those used frequently with smaller chemically synthesized RNAs, modifications can comprise one or more nucleotides modified at the 2′ position of the sugar, in some embodiments a 2′-O-alkyl, 2′-O-alkyl-O-alkyl, or 2′-fluoro-modified nucleotide. In some embodiments, RNA modifications include 2′-fluoro, 2′-amino or 2′ O-methyl modifications on the ribose of pyrimidines, abasic residues, or an inverted base at the 3′ end of the RNA. Such modifications are routinely incorporated into oligonucleotides and these oligonucleotides have been shown to have a higher Tm (i.e., higher target binding affinity) than 2′-deoxyoligonucleotides against a given target.

[0451] A number of nucleotide and nucleoside modifications have been shown to make the oligonucleotide into which they are incorporated more resistant to nuclease digestion than the native oligonucleotide; these modified oligos survive intact for a longer time than unmodified oligonucleotides. Specific examples of modified oligonucleotides include those comprising modified backbones, for example, phosphorothioates, phosphotriesters, methyl phosphonates, short chain alkyl or cycloalkyl intersugar linkages or short chain heteroatomic or heterocyclic intersugar linkages. Some oligonucleotides are oligonucleotides with phosphorothioate backbones and those with heteroatom backbones, particularly CH2-NH—O—CH2, CH, ˜N(CH3)˜O˜CH2 (known as a methylene(methylimino) or MMI backbone), CH2-O—N (CH3)-CH2, CH2-N(CH3)-N(CH3)-CH2 and O—N(CH3)-CH2-CH2 backbones, wherein the native phosphodiester backbone is represented as O—P—O—CH); amide backbones [see De Mesmaeker et al., Ace. Chem. Res., 28:366-374 (1995)]; morpholino backbone structures (see Summerton and Weller, U.S. Pat. No. 5,034,506); peptide nucleic acid (PNA) backbone (wherein the phosphodiester backbone of the oligonucleotide is replaced with a polyamide backbone, the nucleotides being bound directly or indirectly to the aza nitrogen atoms of the polyamide backbone, see Nielsen et al., Science 1991, 254, 1497). Phosphorus-containing linkages include, but are not limited to, phosphorothioates, chiral phosphorothioates, phosphorodithioates, phosphotriesters, aminoalkylphosphotriesters, methyl and other alkyl phosphonates comprising 3′alkylene phosphonates and chiral phosphonates, phosphinates, phosphoramidates comprising 3′-amino phosphoramidate and aminoalkylphosphoramidates, thionophosphoramidates, thionoalkylphosphonates, thionoalkylphosphotriesters, and boranophosphates having normal 3′-5′ linkages, 2′-5′ linked analogs of these, and those having inverted polarity wherein the adjacent pairs of nucleoside units are linked 3′-5′ to 5′-3′ or 2′-5′ to 5′-2′; see U.S. Pat. Nos. 3,687,808; 4,469,863; 4,476,301; 5,023,243; 5,177,196; 5,188,897; 5,264,423; 5,276,019; 5,278,302; 5,286,717; 5,321,131; 5,399,676; 5,405,939; 5,453,496; 5,455,233; 5,466,677; 5,476,925; 5,519,126; 5,536,821; 5,541,306; 5,550,111; 5,563,253; 5,571,799; 5,587,361; and 5,625,050.

[0452] Morpholino-based oligomeric compounds are described in Braasch and David Corey, Biochemistry, 41(14): 4503-4510 (2002); Genesis, Volume 30, Issue 3, (2001); Heasman, Dev. Biol., 243: 209-214 (2002); Nasevicius et al., Nat. Genet., 26:216-220 (2000); Lacerra et al., Proc. Natl. Acad. Sci., 97: 9591-9596 (2000); and U.S. Pat. No. 5,034,506, issued Jul. 23, 1991.

[0453] Cyclohexenyl nucleic acid oligonucleotide mimetics are described in Wang et al., J. Am. Chem. Soc., 122: 8595-8602 (2000).

[0454] Modified oligonucleotide backbones that do not include a phosphorus atom therein have backbones that are formed by short chain alkyl or cycloalkyl internucleoside linkages, mixed heteroatom and alkyl or cycloalkyl internucleoside linkages, or one or more short chain heteroatomic or heterocyclic internucleoside linkages. These comprise those having morpholino linkages (formed in part from the sugar portion of a nucleoside); siloxane backbones; sulfide, sulfoxide and sulfone backbones; formacetyl and thioformacetyl backbones; methylene formacetyl and thioformacetyl backbones; alkene containing backbones; sulfamate backbones; methyleneimino and methylenehydrazino backbones; sulfonate and sulfonamide backbones; amide backbones; and others having mixed N, O, S, and CH2 component parts; see U.S. Pat. Nos. 5,034,506; 5,166,315; 5,185,444; 5,214,134; 5,216,141; 5,235,033; 5,264,562; 5,264,564; 5,405,938; 5,434,257; 5,466,677; 5,470,967; 5,489,677; 5,541,307; 5,561,225; 5,596,086; 5,602,240; 5,610,289; 5,602,240; 5,608,046; 5,610,289; 5,618,704; 5,623,070; 5,663,312; 5,633,360; 5,677,437; and 5,677,439, each of which is herein incorporated by reference.

[0455] One or more substituted sugar moieties can also be included, e.g., one of the following at the 2′ position: OH, SH, SCH3, F, OCN, OCH3 OCH3, OCH3 O(CH2)n CH3, O(CH2)n NH2, or O(CH2)n CH3, where n is from 1 to about 10; C1 to C10 lower alkyl, alkoxyalkoxy, substituted lower alkyl, alkaryl or aralkyl; Cl; Br; CN; CF3; OCF3; O-, S-, or N-alkyl; O-, S-, or N-alkenyl; SOCH3; SO2 CH3; ONO2; NO2; N3; NH2; heterocycloalkyl; heterocycloalkaryl; aminoalkylamino; polyalkylamino; substituted silyl; an RNA cleaving group; a reporter group; an intercalator; a group for improving the pharmacokinetic properties of an oligonucleotide; or a group for improving the pharmacodynamic properties of an oligonucleotide and other substituents having similar properties. In some embodiments, a modification includes 2′-methoxyethoxy (2′-0-CH2CH2OCH3, also known as 2′-O-(2-methoxyethyl)) (Martin et al, Helv. Chim. Acta, 1995, 78, 486). Other modifications include 2′-methoxy (2′-O—CH3), 2′-propoxy (2′-OCH2CH2CH3) and 2′-fluoro (2′-F). Similar modifications may also be made at other positions on the oligonucleotide, particularly the 3′ position of the sugar on the 3′ terminal nucleotide and the 5′ position of 5′ terminal nucleotide. Oligonucleotides may also have sugar mimetics, such as cyclobutyls in place of the pentofuranosyl group.

[0456] In some embodiments, both a sugar and an internucleoside linkage, i.e., the backbone, of the nucleotide units are replaced with novel groups. The base units are maintained for hybridization with an appropriate nucleic acid target compound. One such oligomeric compound, an oligonucleotide mimetic that has been shown to have excellent hybridization properties, is referred to as a peptide nucleic acid (PNA). In PNA compounds, the sugar-backbone of an oligonucleotide is replaced with an amide containing backbone, for example, an aminoethylglycine backbone. The nucleobases are retained and are bound directly or indirectly to aza nitrogen atoms of the amide portion of the backbone. Representative United States patents that teach the preparation of PNA compounds comprise, but are not limited to, U.S. Pat. Nos. 5,539,082; 5,714,331; and 5,719,262. Further teaching of PNA compounds can be found in Nielsen et al, Science, 254: 1497-1500 (1991).

[0457] Guide RNAs can also include, additionally or alternatively, nucleobase (often referred to in the art simply as “base”) modifications or substitutions. As used herein, “unmodified” or “natural” nucleobases include adenine (A), guanine (G), thymine (T), cytosine (C), and uracil (U). Modified nucleobases include nucleobases found only infrequently or transiently in natural nucleic acids, e.g., hypoxanthine, 6-methyladenine, 5-Me pyrimidines, particularly 5-methylcytosine (also referred to as 5-methyl-2′ deoxycytosine and often referred to in the art as 5-Me-C), 5-hydroxymethylcytosine (HMC), glycosyl HMC and gentobiosyl HMC, as well as synthetic nucleobases, e.g., 2-aminoadenine, 2-(methylamino)adenine, 2-(imidazolylalkyl)adenine, 2-(aminoalklyamino)adenine or other heterosubstituted alkyladenines, 2-thiouracil, 2-thiothymine, 5-bromouracil, 5-hydroxymethyluracil, 8-azaguanine, 7-deazaguanine, N6 (6-aminohexyl)adenine, and 2,6-diaminopurine. Kornberg, A., DNA Replication, W. H. Freeman & Co., San Francisco, pp 75-77 (1980); Gebeyehu et al., Nucl. Acids Res. 15:4513 (1997). A “universal” base known in the art, e.g., inosine, can also be included. 5-Me-C substitutions have been shown to increase nucleic acid duplex stability by 0.6-1.2° C. (Sanghvi, Y. S., in Crooke, S. T. and Lebleu, B., eds., Antisense Research and Applications, CRC Press, Boca Raton, 1993, pp. 276-278) and are embodiments of base substitutions.

[0458] Modified nucleobases comprise other synthetic and natural nucleobases, such as 5-methylcytosine (5-me-C), 5-hydroxymethyl cytosine, xanthine, hypoxanthine, 2-aminoadenine, 6-methyl and other alkyl derivatives of adenine and guanine, 2-propyl and other alkyl derivatives of adenine and guanine, 2-thiouracil, 2-thiothymine and 2-thiocytosine, 5-halouracil and cytosine, 5-propynyl uracil and cytosine, 6-azo uracil, cytosine and thymine, 5-uracil (pseudo-uracil), 4-thiouracil, 8-halo, 8-amino, 8-thiol, 8-thioalkyl, 8-hydroxyl and other 8-substituted adenines and guanines, 5-halo particularly 5-bromo, 5-trifluoromethyl and other 5-substituted uracils and cytosines, 7-methylquanine and 7-methyladenine, 8-azaguanine and 8-azaadenine, 7-deazaguanine and 7-deazaadenine, and 3-deazaguanine and 3-deazaadenine.

[0459] Further, nucleobases comprise those disclosed in U.S. Pat. No. 3,687,808, those disclosed in ‘The Concise Encyclopedia of Polymer Science And Engineering’, pages 858-859, Kroschwitz, J. I., ed. John Wiley & Sons, 1990, those disclosed by Englisch et al., Angewandle Chemie, International Edition’, 1991, 30, page 613, and those disclosed by Sanghvi, Y. S., Chapter 15, Antisense Research and Applications’, pages 289-302, Crooke, S. T. and Lebleu, B. ea., CRC Press, 1993. Certain of these nucleobases are particularly useful for increasing the binding affinity of the oligomeric compounds of the invention. These include 5-substituted pyrimidines, 6-azapyrimidines and N-2, N-6 and 0-6 substituted purines, comprising 2-aminopropyladenine, 5-propynyluracil and 5-propynylcytosine. 5-methylcytosine substitutions have been shown to increase nucleic acid duplex stability by 0.6-1.2° C. (Sanghvi, Y. S., Crooke, S. T. and Lebleu, B., eds, ‘Antisense Research and Applications’, CRC Press, Boca Raton, 1993, pp. 276-278) and are embodiments of base substitutions, even more particularly when combined with 2′-O-methoxyethyl sugar modifications. Modified nucleobases are described in U.S. Pat. No. 3,687,808, as well as U.S. Pat. Nos. 4,845,205; 5,130,302; 5,134,066; 5,175,273; 5,367,066; 5,432,272; 5,457,187; 5,459,255; 5,484,908; 5,502,177; 5,525,711; 5,552,540; 5,587,469; 5,596,091; 5,614,617; 5,681,941; 5,750,692; 5,763,588; 5,830,653; 6,005,096; and U.S. Patent Application Publication 2003/0158403.

[0460] Thus, the term “modified” refers to a non-natural sugar, phosphate, or base that is incorporated into a guide RNA, an endonuclease, or both a guide RNA and an endonuclease. It is not necessary for all positions in a given oligonucleotide to be uniformly modified, and in fact more than one of the aforementioned modifications may be incorporated in a single oligonucleotide, or even in a single nucleoside within an oligonucleotide.

[0461] In some embodiments, the guide RNAs and/or mRNA (or DNA) encoding an endonuclease are chemically linked to one or more moieties or conjugates that enhance the activity, cellular distribution, or cellular uptake of the oligonucleotide. Such moieties comprise, but are not limited to, lipid moieties such as a cholesterol moiety [Letsinger et al., Proc. Natl. Acad. Sci. USA, 86: 6553-6556 (1989)]; cholic acid [Manoharan et al., Bioorg. Med. Chem. Let., 4: 1053-1060 (1994)]; a thioether, e.g., hexyl-S-tritylthiol [Manoharan et al, Ann. N. Y. Acad. Sci., 660: 306-309 (1992) and Manoharan et al., Bioorg. Med. Chem. Let., 3: 2765-2770 (1993)]; a thiocholesterol [Oberhauser et al., Nucl. Acids Res., 20: 533-538 (1992)]; an aliphatic chain, e.g., dodecandiol or undecyl residues [Kabanov et al., FEBS Lett., 259: 327-330 (1990) and Svinarchuk et al., Biochimie, 75: 49-54 (1993)]; a phospholipid, e.g., di-hexadecyl-rac-glycerol or triethylammonium 1,2-di-O-hexadecyl-rac-glycero-3-H-phosphonate [Manoharan et al., Tetrahedron Lett., 36: 3651-3654 (1995) and Shea et al., Nucl. Acids Res., 18: 3777-3783 (1990)]; a polyamine or a polyethylene glycol chain [Mancharan et al., Nucleosides & Nucleotides, 14: 969-973 (1995)]; adamantane acetic acid [Manoharan et al., Tetrahedron Lett., 36: 3651-3654 (1995)]; a palmityl moiety [(Mishra et al., Biochim. Biophys. Acta, 1264: 229-237 (1995)]; or an octadecylamine or hexylamino-carbonyl-t oxycholesterol moiety [Crooke et al., J. Pharmacol. Exp. Ther., 277: 923-937 (1996)]. See also U.S. Pat. Nos. 4,828,979; 4,948,882; 5,218,105; 5,525,465; 5,541,313; 5,545,730; 5,552,538; 5,578,717, 5,580,731; 5,580,731; 5,591,584; 5,109,124; 5,118,802; 5,138,045; 5,414,077; 5,486,603; 5,512,439; 5,578,718; 5,608,046; 4,587,044; 4,605,735; 4,667,025; 4,762,779; 4,789,737; 4,824,941; 4,835,263; 4,876,335; 4,904,582; 4,958,013; 5,082,830; 5,112,963; 5,214, 136; 5,082,830; 5,112,963; 5,214,136; 5,245,022; 5,254,469; 5,258,506; 5,262,536; 5,272,250; 5,292,873; 5,317,098; 5,371,241, 5,391,723; 5,416,203, 5,451,463; 5,510,475; 5,512,667; 5,514,785; 5,565,552; 5,567,810; 5,574,142; 5,585,481; 5,587,371; 5,595,726; 5,597,696; 5,599,923; 5,599, 928 and 5,688,941.

[0462] Sugars and other moieties can be used to target proteins and complexes comprising nucleotides, such as cationic polysomes and liposomes, to particular sites. For example, hepatic cell directed transfer can be mediated via asialoglycoprotein receptors (ASGPRs); see, e.g., Hu, et al., Protein Pept Lett. 21(10): 1025-30 (2014). Other systems known in the art and regularly developed can be used to target biomolecules of use in the present case and/or complexes thereof to particular target cells of interest.

[0463] These targeting moieties or conjugates can include conjugate groups covalently bound to functional groups, such as primary or secondary hydroxyl groups. Conjugate groups of the invention include intercalators, reporter molecules, polyamines, polyamides, polyethylene glycols, polyethers, groups that enhance the pharmacodynamic properties of oligomers, and groups that enhance the pharmacokinetic properties of oligomers. Typical conjugate groups include cholesterols, lipids, phospholipids, biotin, phenazine, folate, phenanthridine, anthraquinone, acridine, fluoresceins, rhodamines, coumarins, and dyes. Groups that enhance the pharmacodynamic properties, in the context of this invention, include groups that improve uptake, enhance resistance to degradation, and/or strengthen sequence-specific hybridization with the target nucleic acid. Groups that enhance the pharmacokinetic properties, in the context of this invention, include groups that improve uptake, distribution, metabolism or excretion of the compounds of the present invention. Representative conjugate groups are disclosed in International Patent Application No. PCT/US92/09196, filed Oct. 23, 1992, and U.S. Pat. No. 6,287,860, which are incorporated herein by reference. Conjugate moieties include, but are not limited to, lipid moieties such as a cholesterol moiety, cholic acid, a thioether, e.g., hexyl-5-tritylthiol, a thiocholesterol, an aliphatic chain, e.g., dodecandiol or undecyl residues, a phospholipid, e.g., di-hexadecyl-rac-glycerol or triethylammonium 1,2-di-O-hexadecyl-rac-glycero-3-H-phosphonate, a polyamine or a polyethylene glycol chain, or adamantane acetic acid, a palmityl moiety, or an octadecylamine or hexylamino-carbonyl-oxy cholesterol moiety. See, e.g., U.S. Pat. Nos. 4,828,979; 4,948,882; 5,218,105; 5,525,465; 5,541,313; 5,545,730; 5,552,538; 5,578,717, 5,580,731; 5,580,731; 5,591,584; 5,109,124; 5,118,802; 5,138,045; 5,414,077; 5,486,603; 5,512,439; 5,578,718; 5,608,046; 4,587,044; 4,605,735; 4,667,025; 4,762,779; 4,789,737; 4,824,941; 4,835,263; 4,876,335; 4,904,582; 4,958,013; 5,082,830; 5,112,963; 5,214,136; 5,082,830; 5,112,963; 5,214,136; 5,245,022; 5,254,469; 5,258,506; 5,262,536; 5,272,250; 5,292,873; 5,317,098; 5,371,241, 5,391,723; 5,416,203, 5,451,463; 5,510,475; 5,512,667; 5,514,785; 5,565,552; 5,567,810; 5,574,142; 5,585,481; 5,587,371; 5,595,726; 5,597,696; 5,599,923; 5,599,928 and 5,688,941.

[0464] Longer polynucleotides that are less amenable to chemical synthesis and are typically produced by enzymatic synthesis can also be modified by various means. Such modifications can include, for example, the introduction of certain nucleotide analogs, the incorporation of particular sequences or other moieties at the 5′ or 3′ ends of molecules, and other modifications. By way of illustration, the mRNA encoding Cas9 is approximately 4 kb in length and can be synthesized by in vitro transcription. Modifications to the mRNA can be applied to, e.g., increase its translation or stability (such as by increasing its resistance to degradation with a cell), or to reduce the tendency of the RNA to elicit an innate immune response that is often observed in cells following introduction of exogenous RNAs, particularly longer RNAs such as that encoding Cas9.

[0465] Numerous such modifications have been described in the art, such as polyA tails, 5′ cap analogs (e.g., Anti Reverse Cap Analog (ARCA) or m7G(5′)ppp(5′)G (mCAP)), modified 5′ or 3′ untranslated regions (UTRs), use of modified bases (such as Pseudo-UTP, 2-Thio-UTP, 5-Methylcytidine-5′-Triphosphate (5-Methyl-CTP) or N6-Methyl-ATP), or treatment with phosphatase to remove 5′ terminal phosphates. These and other modifications are known in the art, and new modifications of RNAs are regularly being developed.

[0466] There are numerous commercial suppliers of modified RNAs, including for example, TriLink Biotech, AxoLabs, Bio-Synthesis Inc., Dharmacon and many others. As described by TriLink, for example, 5-Methyl-CTP can be used to impart desirable characteristics, such as increased nuclease stability, increased translation or reduced interaction of innate immune receptors with in vitro transcribed RNA. 5-Methylcytidine-5′-Triphosphate (5-Methyl-CTP), N6-Methyl-ATP, as well as Pseudo-UTP and 2-Thio-UTP, have also been shown to reduce innate immune stimulation in culture and in vivo while enhancing translation, as illustrated in publications by Kormann et al. and Warren et al. referred to below.

[0467] It has been shown that chemically modified mRNA delivered in vivo can be used to achieve improved therapeutic effects; see, e.g., Kormann et al., Nature Biotechnology 29, 154-157 (2011). Such modifications can be used, for example, to increase the stability of the RNA molecule and/or reduce its immunogenicity. Using chemical modifications such as Pseudo-U, N6-Methyl-A, 2-Thio-U and 5-Methyl-C, it was found that substituting just one quarter of the uridine and cytidine residues with 2-Thio-U and 5-Methyl-C respectively resulted in a significant decrease in toll-like receptor (TLR) mediated recognition of the mRNA in mice. By reducing the activation of the innate immune system, these modifications can be used to effectively increase the stability and longevity of the mRNA in vivo; see, e.g., Kormann et al., supra.

[0468] It has also been shown that repeated administration of synthetic messenger RNAs incorporating modifications designed to bypass innate anti-viral responses can reprogram differentiated human cells to pluripotency. See, e.g., Warren, et al., Cell Stem Cell, 7(5):618-30 (2010). Such modified mRNAs that act as primary reprogramming proteins can be an efficient means of reprogramming multiple human cell types. Such cells are referred to as induced pluripotency stem cells (iPSCs), and it was found that enzymatically synthesized RNA incorporating 5-Methyl-CTP, Pseudo-UTP and an Anti Reverse Cap Analog (ARCA) could be used to effectively evade the cell's antiviral response; see, e.g., Warren et al., supra.

[0469] Other modifications of polynucleotides described in the art include, for example, the use of polyA tails, the addition of 5′ cap analogs (such as m7G(5′)ppp(5′)G (mCAP)), modifications of 5′ or 3′ untranslated regions (UTRs), or treatment with phosphatase to remove 5′ terminal phosphates—and new approaches are regularly being developed.

[0470] A number of compositions and techniques applicable to the generation of modified RNAs for use herein have been developed in connection with the modification of RNA interference (RNAi), including small-interfering RNAs (siRNAs). siRNAs present particular challenges in vivo because their effects on gene silencing via mRNA interference are generally transient, which can require repeat administration. In addition, siRNAs are double-stranded RNAs (dsRNA) and mammalian cells have immune responses that have evolved to detect and neutralize dsRNA, which is often a by-product of viral infection. Thus, there are mammalian enzymes such as PKR (dsRNA-responsive kinase), and potentially retinoic acid-inducible gene I (RIG-I), that can mediate cellular responses to dsRNA, as well as Toll-like receptors (such as TLR3, TLR7 and TLR8) that can trigger the induction of cytokines in response to such molecules; see, e.g., the reviews by Angart et al., Pharmaceuticals (Basel) 6(4): 440-468 (2013); Kanasty et al., Molecular Therapy 20(3): 513-524 (2012); Burnett et al., Biotechnol J. 6(9): 1130-46 (2011); Judge and MacLachlan, Hum Gene Ther 19(2):111-24 (2008); and references cited therein.

[0471] A large variety of modifications have been developed and applied to enhance RNA stability, reduce innate immune responses, and/or achieve other benefits that can be useful in connection with the introduction of polynucleotides into human cells, as described herein; see, e.g., the reviews by Whitehead K A et al., Annual Review of Chemical and Biomolecular Engineering, 2: 77-96 (2011); Gaglione and Messere, Mini Rev Med Chem, 10(7):578-95 (2010); Chernolovskaya et al, Curr Opin Mol Ther., 12(2): 158-67 (2010); Deleavey et al., Curr Protoc Nucleic Acid Chem Chapter 16: Unit 16.3 (2009); Behlke, Oligonucleotides 18(4):305-19 (2008); Fucini et al., Nucleic Acid Ther 22(3): 205-210 (2012); Bremsen et al., Front Genet 3:154 (2012).

[0472] As noted above, there are a number of commercial suppliers of modified RNAs, many of which have specialized in modifications designed to improve the effectiveness of siRNAs. A variety of approaches are offered based on various findings reported in the literature. For example, Dharmacon notes that replacement of a non-bridging oxygen with sulfur (phosphorothioate, PS) has been extensively used to improve nuclease resistance of siRNAs, as reported by Kole, Nature Reviews Drug Discovery 11:125-140 (2012). Modifications of the 2′-position of the ribose have been reported to improve nuclease resistance of the internucleotide phosphate bond while increasing duplex stability (Tm), which has also been shown to provide protection from immune activation. A combination of moderate PS backbone modifications with small, well-tolerated 2′-substitutions (2′-O-Methyl, 2′-Fluoro, 2′-Hydro) have been associated with highly stable siRNAs for applications in vivo, as reported by Soutschek et al. Nature 432:173-178 (2004); and 2′-O-Methyl modifications have been reported to be effective in improving stability as reported by Volkov, Oligonucleotides 19:191-202 (2009). With respect to decreasing the induction of innate immune responses, modifying specific sequences with 2′-O-Methyl, 2′-Fluoro, 2′-Hydro have been reported to reduce TLR7/TLR8 interaction while generally preserving silencing activity; see, e.g., Judge et al., Mol. Ther. 13:494-505 (2006); and Cekaite et al., J. Mol. Biol. 365:90-108 (2007). Additional modifications, such as 2-thiouracil, pseudouracil, 5-methylcytosine, 5-methyluracil, and N6-methyladenosine have also been shown to minimize the immune effects mediated by TLR3, TLR7, and TLR8; see, e.g., Kariko, K. et al., Immunity 23:165-175 (2005).

[0473] As is also known in the art, and commercially available, a number of conjugates can be applied to polynucleotides, such as RNAs, for use herein that can enhance their delivery and/or uptake by cells, including for example, cholesterol, tocopherol and folic acid, lipids, peptides, polymers, linkers and aptamers; see, e.g., the review by Winkler, Ther. Deliv. 4:791-809 (2013), and references cited therein.

### Codon-Optimization

[0474] In some embodiments, a polynucleotide encoding a site-directed polypeptide is codon-optimized according to methods standard in the art for expression in the cell containing the target DNA of interest. For example, if the intended target nucleic acid is in a human cell, a human codon-optimized polynucleotide encoding Cas9 is contemplated for use for producing the Cas9 polypeptide.

[0475] Complexes of a Genome-Targeting Nucleic Acid and a Site-Directed Polypeptide

[0476] A genome-targeting nucleic acid interacts with a site-directed polypeptide (e.g., a nucleic acid-guided nuclease such as Cas9), thereby forming a complex. The genome-targeting nucleic acid guides the site-directed polypeptide to a target nucleic acid.

### RNPs

[0477] As stated previously, the site-directed polypeptide and genome-targeting nucleic acid may each be administered separately to a cell or a patient. On the other hand, the site-directed polypeptide may be pre-complexed with one or more guide RNAs, or one or more crRNA together with a tracrRNA. The pre-complexed material may then be administered to a cell or a patient. Such pre-complexed material is known as a ribonucleoprotein particle (RNP).

### Nucleic Acids Encoding System Components

[0478] In another aspect, the present disclosure provides a nucleic acid comprising a nucleotide sequence encoding a genome-targeting nucleic acid of the disclosure, a site-directed polypeptide of the disclosure, and/or any nucleic acid or proteinaceous molecule necessary to carry out the embodiments of the methods of the disclosure.

[0479] In some embodiments, the nucleic acid encoding a genome-targeting nucleic acid of the disclosure, a site-directed polypeptide of the disclosure, and/or any nucleic acid or proteinaceous molecule necessary to carry out the embodiments of the methods of the disclosure comprises a vector (e.g., a recombinant expression vector).

[0480] The term “vector” refers to a nucleic acid molecule capable of transporting another nucleic acid to which it has been linked. One type of vector is a “plasmid”, which refers to a circular double-stranded DNA loop into which additional nucleic acid segments can be ligated. Another type of vector is a viral vector, wherein additional nucleic acid segments can be ligated into the viral genome. Certain vectors are capable of autonomous replication in a host cell into which they are introduced (e.g., bacterial vectors having a bacterial origin of replication and episomal mammalian vectors). Other vectors (e.g., non-episomal mammalian vectors) are integrated into the genome of a host cell upon introduction into the host cell, and thereby are replicated along with the host genome.

[0481] In some embodiments, vectors are capable of directing the expression of nucleic acids to which they are operatively linked. Such vectors are referred to herein as “recombinant expression vectors”, or more simply “expression vectors”, which serve equivalent functions.

[0482] The term “operably linked” means that the nucleotide sequence of interest is linked to regulatory sequence(s) in a manner that allows for expression of the nucleotide sequence. The term “regulatory sequence” is intended to include, for example, promoters, enhancers and other expression control elements (e.g., polyadenylation signals). Such regulatory sequences are well known in the art and are described, for example, in Goeddel; Gene Expression Technology: Methods in Enzymology 185, Academic Press, San Diego, CA (1990). Regulatory sequences include those that direct constitutive expression of a nucleotide sequence in many types of host cells, and those that direct expression of the nucleotide sequence only in certain host cells (e.g., tissue-specific regulatory sequences). It will be appreciated by those skilled in the art that the design of the expression vector can depend on such factors as the choice of the target cell, the level of expression desired, and the like.

[0483] Expression vectors contemplated include, but are not limited to, viral vectors based on vaccinia virus, poliovirus, adenovirus, adeno-associated virus, SV40, herpes simplex virus, human immunodeficiency virus, retrovirus (e.g., Murine Leukemia Virus, spleen necrosis virus, and vectors derived from retroviruses such as Rous Sarcoma Virus, Harvey Sarcoma Virus, avian leukosis virus, a lentivirus, human immunodeficiency virus, myeloproliferative sarcoma virus, and mammary tumor virus) and other recombinant vectors. Other vectors contemplated for eukaryotic target cells include, but are not limited to, the vectors pXT1, pSG5, pSVK3, pBPV, pMSG, and pSVLSV40 (Pharmacia). Additional vectors contemplated for eukaryotic target cells include, but are not limited to, the vectors pCTx-1, pCTx-2, and pCTx-3, which are described in FIGS. 92A to 92C. Other vectors may be used so long as they are compatible with the host cell.

[0484] In some embodiments, a vector comprises one or more transcription and/or translation control elements. Depending on the host/vector system utilized, any of a number of suitable transcription and translation control elements, including constitutive and inducible promoters, transcription enhancer elements, transcription terminators, etc. may be used in the expression vector. In some embodiments, the vector is a self-inactivating vector that either inactivates the viral sequences or the components of the CRISPR machinery or other elements.

[0485] Non-limiting examples of suitable eukaryotic promoters (i.e., promoters functional in a eukaryotic cell) include those from cytomegalovirus (CMV) immediate early, herpes simplex virus (HSV) thymidine kinase, early and late SV40, long terminal repeats (LTRs) from retrovirus, human elongation factor-1 promoter (EF1), a hybrid construct comprising the cytomegalovirus (CMV) enhancer fused to the chicken beta-actin promoter (CAG), murine stem cell virus promoter (MSCV), phosphoglycerate kinase-1 locus promoter (PGK), and mouse metallothionein-I.

[0486] For expressing small RNAs, including guide RNAs used in connection with Cas endonuclease, various promoters such as RNA polymerase III promoters, including for example U6 and H1, can be advantageous. Descriptions of and parameters for enhancing the use of such promoters are known in art, and additional information and approaches are regularly being described; see, e.g., Ma, H. et al., Molecular Therapy—Nucleic Acids 3, e161 (2014) doi: 10.1038/mtna.2014.12.

[0487] The expression vector may also contain a ribosome binding site for translation initiation and a transcription terminator. The expression vector may also include appropriate sequences for amplifying expression. The expression vector may also include nucleotide sequences encoding non-native tags (e.g., histidine tag, hemagglutinin tag, green fluorescent protein, etc.) that are fused to the site-directed polypeptide, thus resulting in a fusion protein.

[0488] In some embodiments, a promoter is an inducible promoter (e.g., a heat shock promoter, tetracycline-regulated promoter, steroid-regulated promoter, metal-regulated promoter, estrogen receptor-regulated promoter, etc.). In some embodiments, a promoter is a constitutive promoter (e.g., CMV promoter, UBC promoter). In some embodiments, the promoter is a spatially restricted and/or temporally restricted promoter (e.g., a tissue specific promoter, a cell type specific promoter, etc.).

[0489] In some embodiments, the nucleic acid encoding a genome-targeting nucleic acid of the disclosure and/or a site-directed polypeptide are packaged into or on the surface of delivery vehicles for delivery to cells. Delivery vehicles contemplated include, but are not limited to, nanospheres, liposomes, quantum dots, nanoparticles, polyethylene glycol particles, hydrogels, and micelles. As described in the art, a variety of targeting moieties can be used to enhance the preferential interaction of such vehicles with desired cell types or locations.

[0490] Introduction of the complexes, polypeptides, and nucleic acids of the disclosure into cells can occur by viral or bacteriophage infection, transfection, conjugation, protoplast fusion, lipofection, electroporation, nucleofection, calcium phosphate precipitation, polyethyleneimine (PEI)-mediated transfection, DEAE-dextran mediated transfection, liposome-mediated transfection, particle gun technology, calcium phosphate precipitation, direct micro-injection, nanoparticle-mediated nucleic acid delivery, and the like.

### Delivery

[0491] Guide RNA polynucleotides (RNA or DNA) and/or endonuclease polynucleotide(s) (RNA or DNA) can be delivered by viral or non-viral delivery vehicles known in the art. Alternatively, endonuclease polypeptide(s) may be delivered by non-viral delivery vehicles known in the art, such as electroporation or lipid nanoparticles. In some embodiments, the DNA endonuclease may be delivered as one or more polypeptides, either alone or pre-complexed with one or more guide RNAs, or one or more crRNA together with a tracrRNA.

[0492] Polynucleotides may be delivered by non-viral delivery vehicles including, but not limited to, nanoparticles, liposomes, ribonucleoproteins, positively charged peptides, small molecule RNA-conjugates, aptamer-RNA chimeras, and RNA-fusion protein complexes. Some exemplary non-viral delivery vehicles are described in Peer and Lieberman, Gene Therapy, 18: 1127-1133 (2011) (which focuses on non-viral delivery vehicles for siRNA that are also useful for delivery of other polynucleotides).

[0493] Polynucleotides, such as guide RNA, sgRNA, and mRNA encoding an endonuclease, may be delivered to a cell or a patient by a lipid nanoparticle (LNP).

[0494] A LNP refers to any particle having a diameter of less than 1000 nm, 500 nm, 250 nm, 200 nm, 150 nm, 100 nm, 75 nm, 50 nm, or 25 nm. Alternatively, a nanoparticle may range in size from 1-1000 nm, 1-500 nm, 1-250 nm, 25-200 nm, 25-100 nm, 35-75 nm, or 25-60 nm.

[0495] LNPs may be made from cationic, anionic, or neutral lipids. Neutral lipids, such as the fusogenic phospholipid DOPE or the membrane component cholesterol, may be included in LNPs as ‘helper lipids’ to enhance transfection activity and nanoparticle stability. Limitations of cationic lipids include low efficacy owing to poor stability and rapid clearance, as well as the generation of inflammatory or anti-inflammatory responses.

[0496] LNPs may also be comprised of hydrophobic lipids, hydrophilic lipids, or both hydrophobic and hydrophilic lipids.

[0497] Any lipid or combination of lipids that are known in the art may be used to produce a LNP. Examples of lipids used to produce LNPs are: DOTMA, DOSPA, DOTAP, DMRIE, DC-cholesterol, DOTAP-cholesterol, GAP-DMORIE-DPyPE, and GL67A-DOPE-DMPE-polyethylene glycol (PEG). Examples of cationic lipids are: 98N12-5, C12-200, DLin-KC2-DMA (KC2), DLin-MC3-DMA (MC3), XTC, MD1, and 7C1. Examples of neutral lipids are: DPSC, DPPC, POPC, DOPE, and SM. Examples of PEG-modified lipids are: PEG-DMG, PEG-CerC14, and PEG-CerC20.

[0498] The lipids may be combined in any number of molar ratios to produce a LNP. In addition, the polynucleotide(s) may be combined with lipid(s) in a wide range of molar ratios to produce a LNP.

[0499] As stated previously, the site-directed polypeptide and genome-targeting nucleic acid may each be administered separately to a cell or a patient. On the other hand, the site-directed polypeptide may be pre-complexed with one or more guide RNAs, or one or more crRNA together with a tracrRNA. The pre-complexed material may then be administered to a cell or a patient. Such pre-complexed material is known as a ribonucleoprotein particle (RNP).

[0500] RNA is capable of forming specific interactions with RNA or DNA. While this property is exploited in many biological processes, it also comes with the risk of promiscuous interactions in a nucleic acid-rich cellular environment. One solution to this problem is the formation of ribonucleoprotein particles (RNPs), in which the RNA is pre-complexed with an endonuclease. Another benefit of the RNP is protection of the RNA from degradation.

[0501] The endonuclease in the RNP may be modified or unmodified. Likewise, the gRNA, crRNA, tracrRNA, or sgRNA may be modified or unmodified. Numerous modifications are known in the art and may be used.

[0502] The endonuclease and sgRNA are generally combined in a 1:1 molar ratio. Alternatively, the endonuclease, crRNA and tracrRNA are generally combined in a 1:1:1 molar ratio. However, a wide range of molar ratios may be used to produce a RNP.

[0503] A recombinant adeno-associated virus (AAV) vector may be used for delivery. Techniques to produce rAAV particles, in which an AAV genome to be packaged that includes the polynucleotide to be delivered, rep and cap genes, and helper virus functions are provided to a cell are standard in the art. Production of rAAV requires that the following components are present within a single cell (denoted herein as a packaging cell): a rAAV genome, AAV rep and cap genes separate from (i.e., not in) the rAAV genome, and helper virus functions. The AAV rep and cap genes may be from any AAV serotype for which recombinant virus can be derived, and may be from a different AAV serotype than the rAAV genome ITRs, including, but not limited to, AAV serotypes AAV-1, AAV-2, AAV-3, AAV-4, AAV-5, AAV-6, AAV-7, AAV-8, AAV-9, AAV-10, AAV-11, AAV-12, AAV-13 and AAV rh.74. Production of pseudotyped rAAV is disclosed in, for example, international patent application publication number WO 01/83692. See Table 1.

TABLE 1

| AAV Serotype | Genbank Accession No. |
|---|---|
| AAV-1 | NC_002077.1 |
| AAV-2 | NC_001401.2 |
| AAV-3 | NC_001729.1 |
| AAV-3B | AF028705.1 |
| AAV-4 | NC_001829.1 |
| AAV-5 | NC_006152.1 |
| AAV-6 | AF028704.1 |
| AAV-7 | NC_006260.1 |
| AAV-8 | NC 006261.1 |
| AAV-9 | AX753250.1 |
| AAV-10 | AY631965.1 |
| AAV-11 | AY631966.1 |
| AAV-12 | DQ813647.1 |
| AAV-13 | EU285562.1 |

[0504] A method of generating a packaging cell involves creating a cell line that stably expresses all of the necessary components for AAV particle production. For example, a plasmid (or multiple plasmids) comprising a rAAV genome lacking AAV rep and cap genes, AAV rep and cap genes separate from the rAAV genome, and a selectable marker, such as a neomycin resistance gene, are integrated into the genome of a cell. AAV genomes have been introduced into bacterial plasmids by procedures such as GC tailing (Samulski et al., 1982, Proc. Natl. Acad. S6. USA, 79:2077-2081), addition of synthetic linkers containing restriction endonuclease cleavage sites (Laughlin et al., 1983, Gene, 23:65-73) or by direct, blunt-end ligation (Senapathy & Carter, 1984, J. Biol. Chem., 259:4661-4666). The packaging cell line is then infected with a helper virus, such as adenovirus. The advantages of this method are that the cells are selectable and are suitable for large-scale production of rAAV. Other examples of suitable methods employ adenovirus or baculovirus, rather than plasmids, to introduce rAAV genomes and/or rep and cap genes into packaging cells.

[0505] General principles of rAAV production are reviewed in, for example, Carter, 1992, Current Opinions in Biotechnology, 1533-539; and Muzyczka, 1992, Curr. Topics in Microbial. and Immunol., 158:97-129). Various approaches are described in Ratschin et al., Mol. Cell. Biol. 4:2072 (1984); Hermonat et al., Proc. Natl. Acad. Sci. USA, 81:6466 (1984); Tratschin et al., Mo1. Cell. Biol. 5:3251 (1985); Mclaughlin et al., J. Virol., 62:1963 (1988); and Lebkowski et al., 1988 Mol. Cell. Biol., 7:349 (1988). Samulski et al. (1989, J. Virol., 63:3822-3828); U.S. Pat. No. 5,173,414; WO 95/13365 and corresponding U.S. Pat. No. 5,658,776; WO 95/13392; WO 96/17947; PCT/US98/18600; WO 97/09441 (PCT/US96/14423); WO 97/08298 (PCT/US96/13872); WO 97/21825 (PCT/US96/20777); WO 97/06243 (PCT/FR96/01064); WO 99/11764; Perrin et al. (1995) Vaccine 13:1244-1250; Paul et al. (1993) Human Gene Therapy 4:609-615; Clark et al. (1996) Gene Therapy 3:1124-1132; U.S. Pat. Nos. 5,786,211; 5,871,982; and 6,258,595.

[0506] AAV vector serotypes can be matched to target cell types. For example, the following exemplary cell types may be transduced by the indicated AAV serotypes among others. See Table 2.

TABLE 2

| Tissue/Cell Type | Serotype |
|---|---|
| Liver | AAV3, AAV5, AAV8, AAV9 |
| Skeletal muscle | AAV1, AAV7, AAV6, AAV8, AAV9 |
| Central nervous system | AAV5, AAV1, AAV4 |
| RPE | AAV5, AAV4 |
| Photoreceptor cells | AAV5 |
| Lung | AAV9 |
| Heart | AAV8 |
| Pancreas | AAV8 |
| Kidney | AAV2, AAV8 |

[0507] In addition to adeno-associated viral vectors, other viral vectors can be used. Such viral vectors include, but are not limited to, lentivirus, alphavirus, enterovirus, pestivirus, baculovirus, herpesvirus, Epstein Barr virus, papovavirusr, poxvirus, vaccinia virus, and herpes simplex virus.

[0508] In some embodiments, Cas9 mRNA, sgRNA targeting one or two loci in G6PC genes, and donor DNA are each separately formulated into lipid nanoparticles, or are all co-formulated into one lipid nanoparticle, or co-formulated into two or more lipid nanoparticles.

[0509] In some embodiments, Cas9 mRNA is formulated in a lipid nanoparticle, while sgRNA and donor DNA are delivered in an AAV vector. In some embodiments, Cas9 mRNA and sgRNA are co-formulated in a lipid nanoparticle, while donor DNA is delivered in an AAV vector.

[0510] Options are available to deliver the Cas9 nuclease as a DNA plasmid, as mRNA or as a protein. The guide RNA can be expressed from the same DNA, or can also be delivered as an RNA. The RNA can be chemically modified to alter or improve its half-life, or decrease the likelihood or degree of immune response. The endonuclease protein can be complexed with the gRNA prior to delivery. Viral vectors allow efficient delivery; split versions of Cas9 and smaller orthologs of Cas9 can be packaged in AAV, as can donors for HDR. A range of non-viral delivery methods also exist that can deliver each of these components, or non-viral and viral methods can be employed in tandem. For example, nano-particles can be used to deliver the protein and guide RNA, while AAV can be used to deliver a donor DNA.

### Exosomes

[0511] Exosomes, a type of microvesicle bound by phospholipid bilayer, can be used to deliver nucleic acids to specific tissue. Many different types of cells within the body naturally secrete exosomes. Exosomes form within the cytoplasm when endosomes invaginate and form multivesicular-endosomes (MVE). When the MVE fuses with the cellular membrane, the exosomes are secreted in the extracellular space. Ranging between 30-120 nm in diameter, exosomes can shuttle various molecules from one cell to another in a form of cell-to-cell communication. Cells that naturally produce exosomes, such as mast cells, can be genetically altered to produce exosomes with surface proteins that target specific tissues, alternatively exosomes can be isolated from the bloodstream. Specific nucleic acids can be placed within the engineered exosomes with electroporation. When introduced systemically, the exosomes can deliver the nucleic acids to the specific target tissue.

### Genetically Modified Cells

[0512] The term “genetically modified cell” refers to a cell that comprises at least one genetic modification introduced by genome editing (e.g., using the CRISPR/Cas system). In some ex vivo embodiments herein, the genetically modified cell is a genetically modified progenitor cell. In some in vivo embodiments herein, the genetically modified cell is a genetically modified liver cell. A genetically modified cell comprising an exogenous genome-targeting nucleic acid and/or an exogenous nucleic acid encoding a genome-targeting nucleic acid is contemplated herein.

[0513] The term “control treated population” describes a population of cells that has been treated with identical media, viral induction, nucleic acid sequences, temperature, confluency, flask size, pH, etc., with the exception of the addition of the genome editing components. Any method known in the art can be used to measure restoration of G6Pase gene or protein expression or activity, for example, Western Blot analysis of the G6Pase protein or quantifying G6PC mRNA.

[0514] The term “isolated cell” refers to a cell that has been removed from an organism in which it was originally found, or a descendant of such a cell. Optionally, the cell has been cultured in vitro, e.g., under defined conditions or in the presence of other cells. Optionally, the cell is later introduced into a second organism or re-introduced into the organism from which it (or the cell from which it is descended) was isolated.

[0515] The term “isolated population” with respect to an isolated population of cells refers to a population of cells that has been removed and separated from a mixed or heterogeneous population of cells. In some embodiments, an isolated population is a substantially pure population of cells, as compared to the heterogeneous population from which the cells were isolated or enriched. In some embodiments, the isolated population is an isolated population of human progenitor cells, e.g., a substantially pure population of human progenitor cells, as compared to a heterogeneous population of cells comprising human progenitor cells and cells from which the human progenitor cells were derived.

[0516] The term “substantially enhanced,” with respect to a particular cell population, refers to a population of cells in which the occurrence of a particular type of cell is increased relative to pre-existing or reference levels, by at least 2-fold, at least 3-, at least 4-, at least 5-, at least 6-, at least 7-, at least 8-, at least 9, at least 10-, at least 20-, at least 50-, at least 100-, at least 400-, at least 1000-, at least 5000-, at least 20000-, at least 100000- or more fold depending, e.g., on the desired levels of such cells for ameliorating GSD1a.

[0517] The term “substantially enriched” with respect to a particular cell population, refers to a population of cells that is at least about 10%, about 20%, about 30%, about 40%, about 50%, about 60%, about 70% or more with respect to the cells making up a total cell population.

[0518] The terms “substantially enriched” or “substantially pure” with respect to a particular cell population, refers to a population of cells that is at least about 75%, at least about 85%, at least about 90%, or at least about 95% pure, with respect to the cells making up a total cell population. That is, the terms “substantially pure” or “essentially purified,” with regard to a population of progenitor cells, refers to a population of cells that contain fewer than about 20%, about 15%, about 10%, about 9%, about 8%, about 7%, about 6%, about 5%, about 4%, about 3%, about 2%, about 1%, or less than 1%, of cells that are not progenitor cells as defined by the terms herein.

Differentiation of Genome Edited iPSCs into Hepatocytes

[0519] Another step of the ex vivo methods of the invention involves differentiating the genome edited iPSCs into hepatocytes. The differentiating step may be performed according to any method known in the art. For example, hiPSC are differentiated into definitive endoderm using various treatments, including activin and B27 supplement (Life Technology). The definitive endoderm is further differentiated into hepatocyte, the treatment includes: FGF4, HGF, BMP2, BMP4, Oncostatin M, Dexametasonatc. (Duan et al, STEM CELLS; 2010; 28:674-686, Ma et al, STEM CELLS TRANSLATIONAL MEDICINE 2013; 2:409-419).

Differentiation of Genome Edited Mesenchymal Stem Cells into Hepatocytes

[0520] Another step of the ex vivo methods of the invention involves differentiating the genome edited mesenchymal stem cells into hepatocytes. The differentiating step may be performed according to any method known in the art. For example, hMSC are treated with various factors and hormones, including insulin, transferrin, FGF4, HGF, bile acids (Sawitza I et al, Sci Rep. 2015; 5: 13320).

Implanting Cells into Patients

[0521] Another step of the ex vivo methods of the invention involves implanting the hepatocytes into patients. This implanting step may be accomplished using any method of implantation known in the art. For example, the genetically modified cells may be injected directly in the patient's liver or otherwise administered to the patient.

[0522] Another step of the ex vivo methods of the invention involves implanting the progenitor cells or primary hepatocytes into patients. This implanting step may be accomplished using any method of implantation known in the art. For example, the genetically modified cells may be injected directly in the patient's liver or otherwise administered to the patient. The genetically modified cells may be purified ex vivo using a selected marker.

### Pharmaceutically Acceptable Carriers

[0523] The ex vivo methods of administering progenitor cells to a subject contemplated herein involve the use of therapeutic compositions comprising progenitor cells.

[0524] Therapeutic compositions contain a physiologically tolerable carrier together with the cell composition, and optionally at least one additional bioactive agent as described herein, dissolved or dispersed therein as an active ingredient. In some embodiments, the therapeutic composition is not substantially immunogenic when administered to a mammal or human patient for therapeutic purposes, unless so desired.

[0525] In general, the progenitor cells described herein are administered as a suspension with a pharmaceutically acceptable carrier. One of skill in the art will recognize that a pharmaceutically acceptable carrier to be used in a cell composition will not include buffers, compounds, cryopreservation agents, preservatives, or other agents in amounts that substantially interfere with the viability of the cells to be delivered to the subject. A formulation comprising cells can include e.g., osmotic buffers that permit cell membrane integrity to be maintained, and optionally, nutrients to maintain cell viability or enhance engraftment upon administration. Such formulations and suspensions are known to those of skill in the art and/or can be adapted for use with the progenitor cells, as described herein, using routine experimentation.

[0526] A cell composition can also be emulsified or presented as a liposome composition, provided that the emulsification procedure does not adversely affect cell viability. The cells and any other active ingredient can be mixed with excipients that are pharmaceutically acceptable and compatible with the active ingredient, and in amounts suitable for use in the therapeutic methods described herein.

[0527] Additional agents included in a cell composition can include pharmaceutically acceptable salts of the components therein. Pharmaceutically acceptable salts include the acid addition salts (formed with the free amino groups of the polypeptide) that are formed with inorganic acids, such as, for example, hydrochloric or phosphoric acids, or such organic acids as acetic, tartaric, mandelic and the like. Salts formed with the free carboxyl groups can also be derived from inorganic bases, such as, for example, sodium, potassium, ammonium, calcium or ferric hydroxides, and such organic bases as isopropylamine, trimethylamine, 2-ethylamino ethanol, histidine, procaine and the like.

[0528] Physiologically tolerable carriers are well known in the art. Exemplary liquid carriers are sterile aqueous solutions that contain no materials in addition to the active ingredients and water, or contain a buffer such as sodium phosphate at physiological pH value, physiological saline or both, such as phosphate-buffered saline. Still further, aqueous carriers can contain more than one buffer salt, as well as salts such as sodium and potassium chlorides, dextrose, polyethylene glycol and other solutes. Liquid compositions can also contain liquid phases in addition to and to the exclusion of water. Exemplary of such additional liquid phases are glycerin, vegetable oils such as cottonseed oil, and water-oil emulsions. The amount of an active compound used in the cell compositions that is effective in the treatment of a particular disorder or condition will depend on the nature of the disorder or condition, and can be determined by standard clinical techniques.

### Administration & Efficacy

[0529] The terms “administering,” “introducing” and “transplanting” are used interchangeably in the context of the placement of cells, e.g., progenitor cells, into a subject, by a method or route that results in at least partial localization of the introduced cells at a desired site, such as a site of injury or repair, such that a desired effect(s) is produced. The cells e.g., progenitor cells, or their differentiated progeny can be administered by any appropriate route that results in delivery to a desired location in the subject where at least a portion of the implanted cells or components of the cells remain viable. The period of viability of the cells after administration to a subject can be as short as a few hours, e.g., twenty-four hours, to a few days, to as long as several years, or even the life time of the patient, i.e., long-term engraftment. For example, in some embodiments described herein, an effective amount of myogenic progenitor cells is administered via a systemic route of administration, such as an intraperitoneal or intravenous route.

[0530] The terms “individual”, “subject,” “host” and “patient” are used interchangeably herein and refer to any subject for whom diagnosis, treatment or therapy is desired. In some embodiments, the subject is a mammal. In some embodiments, the subject is a human being.

[0531] When provided prophylactically, progenitor cells described herein can be administered to a subject in advance of any symptom of GSD1a, e.g., prior to the development of seizures caused by hypoglycemia. Accordingly, the prophylactic administration of a liver progenitor cell population serves to prevent GSD1a.

[0532] When provided therapeutically, liver progenitor cells are provided at (or after) the onset of a symptom or indication of GSD1a, e.g., upon the onset of abnormal glucose metabolism.

[0533] In some embodiments described herein, the liver progenitor cell population being administered according to the methods described herein comprises allogeneic liver progenitor cells obtained from one or more donors. “Allogeneic” refers to a liver progenitor cell or biological samples comprising liver progenitor cells or biological samples obtained from one or more different donors of the same species, where the genes at one or more loci are not identical. For example, a liver progenitor cell population being administered to a subject can be derived from one more unrelated donor subjects, or from one or more non-identical siblings. In some embodiments, syngeneic liver progenitor cell populations can be used, such as those obtained from genetically identical animals, or from identical twins. In other embodiments, the liver progenitor cells are autologous cells; that is, the liver progenitor cells are obtained or isolated from a subject and administered to the same subject, i.e., the donor and recipient are the same.

[0534] In one embodiment, the term “effective amount” refers to the amount of a population of progenitor cells or their progeny needed to prevent or alleviate at least one or more signs or symptoms of GSD1a, and relates to a sufficient amount of a composition to provide the desired effect, e.g., to treat a subject having GSD1a. The term “therapeutically effective amount” therefore refers to an amount of progenitor cells or a composition comprising progenitor cells that is sufficient to promote a particular effect when administered to a typical subject, such as one who has or is at risk for GSD1a. An effective amount would also include an amount sufficient to prevent or delay the development of a symptom of the disease, alter the course of a symptom of the disease (for example but not limited to, slow the progression of a symptom of the disease), or reverse a symptom of the disease. It is understood that for any given case, an appropriate “effective amount” can be determined by one of ordinary skill in the art using routine experimentation.

[0535] For use in the various embodiments described herein, an effective amount of progenitor cells comprises at least 10² progenitor cells, at least 5×10² progenitor cells, at least 10³ progenitor cells, at least 5×10³ progenitor cells, at least 10⁴ progenitor cells, at least 5×10⁴ progenitor cells, at least 10⁵ progenitor cells, at least 2×10⁵ progenitor cells, at least 3×10⁵ progenitor cells, at least 4×10⁵ progenitor cells, at least 5×10⁵ progenitor cells, at least 6×10⁵ progenitor cells, at least 7×10⁵ progenitor cells, at least 8×10⁵ progenitor cells, at least 9×10⁵ progenitor cells, at least 1×10⁶ progenitor cells, at least 2×10⁶ progenitor cells, at least 3× 10⁶ progenitor cells, at least 4×10⁶ progenitor cells, at least 5×10⁶ progenitor cells, at least 6×10⁶ progenitor cells, at least 7×10⁶ progenitor cells, at least 8×10⁶ progenitor cells, at least 9×10⁶ progenitor cells, or multiples thereof. The progenitor cells are derived from one or more donors, or are obtained from an autologous source. In some embodiments described herein, the progenitor cells are expanded in culture prior to administration to a subject in need thereof.

[0536] Modest and incremental increases in the levels of functional G6Pase expressed in cells of patients having GSD1a can be beneficial for ameliorating one or more symptoms of the disease, for increasing long-term survival, and/or for reducing side effects associated with other treatments. Upon administration of such cells to human patients, the presence of liver progenitors that are producing increased levels of functional G6Pase is beneficial. In some embodiments, effective treatment of a subject gives rise to at least about 3%, 5% or 7% functional G6Pase relative to total G6Pase in the treated subject. In some embodiments, functional G6Pase will be at least about 10% of total G6Pase. In some embodiments, functional G6Pase will be at least about 20% to 30% of total G6Pase. Similarly, the introduction of even relatively limited subpopulations of cells having significantly elevated levels of functional G6Pase can be beneficial in various patients because in some situations normalized cells will have a selective advantage relative to diseased cells. However, even modest levels of liver progenitors with elevated levels of functional G6Pase can be beneficial for ameliorating one or more aspects of GSD1a in patients. In some embodiments, about 10%, about 20%, about 30%, about 40%, about 50%, about 60%, about 70%, about 80%, about 90% or more of the liver progenitors in patients to whom such cells are administered are producing increased levels of functional G6Pase.

[0537] “Administered” refers to the delivery of a progenitor cell composition into a subject by a method or route that results in at least partial localization of the cell composition at a desired site. A cell composition can be administered by any appropriate route that results in effective treatment in the subject, i.e. administration results in delivery to a desired location in the subject where at least a portion of the composition delivered, i.e. at least 1×10⁴ cells are delivered to the desired site for a period of time. Modes of administration include injection, infusion, instillation, or ingestion. “Injection” includes, without limitation, intravenous, intramuscular, intra-arterial, intrathecal, intraventricular, intracapsular, intraorbital, intracardiac, intradermal, intraperitoneal, transtracheal, subcutaneous, subcuticular, intraarticular, sub capsular, subarachnoid, intraspinal, intracerebro spinal, and intrasternal injection and infusion. In some embodiments, the route is intravenous. For the delivery of cells, administration by injection or infusion can be made.

[0538] In one embodiment, the cells are administered systemically. The phrases “systemic administration,” “administered systemically”, “peripheral administration” and “administered peripherally” refer to the administration of a population of progenitor cells other than directly into a target site, tissue, or organ, such that it enters, instead, the subject's circulatory system and, thus, is subject to metabolism and other like processes.

[0539] The efficacy of a treatment comprising a composition for the treatment of GSD1a can be determined by the skilled clinician. However, a treatment is considered “effective treatment,” if any one or all of the signs or symptoms of, as but one example, levels of functional G6Pase are altered in a beneficial manner (e.g., increased by at least 10%), or other clinically accepted symptoms or markers of disease are improved or ameliorated. Efficacy can also be measured by failure of an individual to worsen as assessed by hospitalization or need for medical interventions (e.g., normal glucose metabolism, or progression of the disease is halted or at least slowed). Methods of measuring these indicators are known to those of skill in the art and/or described herein. Treatment includes any treatment of a disease in an individual or an animal (some non-limiting examples include a human, or a mammal) and includes: (1) inhibiting the disease, e.g., arresting, or slowing the progression of symptoms; or (2) relieving the disease, e.g., causing regression of symptoms; and (3) preventing or reducing the likelihood of the development of symptoms.

[0540] The treatment according to the present invention ameliorates one or more symptoms associated with GSD1a by increasing the amount of functional G6Pase in the individual. Early signs typically associated with GSD1a, include for example, seizures due to hypoglycemia.

### Kits

[0541] The present disclosure provides kits for carrying out the methods of the invention. A kit can include one or more of a genome-targeting nucleic acid, a polynucleotide encoding a genome-targeting nucleic acid, a site-directed polypeptide, a polynucleotide encoding a site-directed polypeptide, and/or any nucleic acid or proteinaceous molecule necessary to carry out the embodiments of the methods of the invention, or any combination thereof.

[0542] In some embodiments, a kit comprises: (1) a vector comprising a nucleotide sequence encoding a genome-targeting nucleic acid, and (2) the site-directed polypeptide or a vector comprising a nucleotide sequence encoding the site-directed polypeptide and (3) a reagent for reconstitution and/or dilution of the vector(s) and or polypeptide.

[0543] In some embodiments, a kit comprises: (1) a vector comprising (i) a nucleotide sequence encoding a genome-targeting nucleic acid, and (ii) a nucleotide sequence encoding the site-directed polypeptide and (2) a reagent for reconstitution and/or dilution of the vector.

[0544] In some embodiments of any of the above kits, the kit comprises a single-molecule guide genome-targeting nucleic acid. In some embodiments of any of the above kits, the kit comprises a double-molecule genome-targeting nucleic acid. In some embodiments of any of the above kits, the kit comprises two or more double-molecule guides or single-molecule guides. In some embodiments, the kits comprise a vector that encodes the nucleic acid targeting nucleic acid.

[0545] In some embodiments of any of the above kits, the kit can further comprise a polynucleotide to be inserted to effect the desired genetic modification.

[0546] Components of a kit may be in separate containers, or combined in a single container.

[0547] In some embodiments, a kit described above further comprises one or more additional reagents, where such additional reagents are selected from a buffer, a buffer for introducing a polypeptide or polynucleotide into a cell, a wash buffer, a control reagent, a control vector, a control RNA polynucleotide, a reagent for in vitro production of the polypeptide from DNA, adaptors for sequencing and the like. A buffer can be a stabilization buffer, a reconstituting buffer, a diluting buffer, or the like. In some embodiments, a kit can also include one or more components that may be used to facilitate or enhance the on-target binding or the cleavage of DNA by the endonuclease, or improve the specificity of targeting.

[0548] In addition to the above-mentioned components, a kit can further include instructions for using the components of the kit to practice the methods. The instructions for practicing the methods are generally recorded on a suitable recording medium. For example, the instructions may be printed on a substrate, such as paper or plastic, etc. The instructions may be present in the kits as a package insert, in the labeling of the container of the kit or components thereof (i.e., associated with the packaging or subpackaging), etc. The instructions can be present as an electronic storage data file present on a suitable computer readable storage medium, e.g. CD-ROM, diskette, flash drive, etc. In some instances, the actual instructions are not present in the kit, but means for obtaining the instructions from a remote source (e.g. via the Internet), can be provided. An example of this embodiment is a kit that includes a web address where the instructions can be viewed and/or from which the instructions can be downloaded. As with the instructions, this means for obtaining the instructions can be recorded on a suitable substrate.

### Guide RNA Formulation

[0549] Guide RNAs of the invention are formulated with pharmaceutically acceptable excipients such as carriers, solvents, stabilizers, adjuvants, diluents, etc., depending upon the particular mode of administration and dosage form. Guide RNA compositions are generally formulated to achieve a physiologically compatible pH, and range from a pH of about 3 to a pH of about 11, about pH 3 to about pH 7, depending on the formulation and route of administration. In some embodiments, the pH is adjusted to a range from about pH 5.0 to about pH 8. In some embodiments, the compositions comprise a therapeutically effective amount of at least one compound as described herein, together with one or more pharmaceutically acceptable excipients. Optionally, the compositions comprise a combination of the compounds described herein, or may include a second active ingredient useful in the treatment or prevention of bacterial growth (for example and without limitation, anti-bacterial or anti-microbial agents), or may include a combination of reagents of the invention.

[0550] Suitable excipients include, for example, carrier molecules that include large, slowly metabolized macromolecules such as proteins, polysaccharides, polylactic acids, polyglycolic acids, polymeric amino acids, amino acid copolymers, and inactive virus particles. Other exemplary excipients include antioxidants (for example and without limitation, ascorbic acid), chelating agents (for example and without limitation, EDTA), carbohydrates (for example and without limitation, dextrin, hydroxyalkylcellulose, and hydroxyalkylmethylcellulose), stearic acid, liquids (for example and without limitation, oils, water, saline, glycerol and ethanol), wetting or emulsifying agents, pH buffering substances, and the like.

### Other Possible Therapeutic Approaches

[0551] Gene editing can be conducted using nucleases engineered to target specific sequences. To date there are four major types of nucleases: meganucleases and their derivatives, zinc finger nucleases (ZFNs), transcription activator like effector nucleases (TALENs), and CRISPR-Cas9 nuclease systems. The nuclease platforms vary in difficulty of design, targeting density and mode of action, particularly as the specificity of ZFNs and TALENs is through protein-DNA interactions, while RNA-DNA interactions primarily guide Cas9. Cas9 cleavage also requires an adjacent motif, the PAM, which differs between different CRISPR systems. Cas9 from Streptococcus pyogenes cleaves using a NRG PAM, CRISPR from Neisseria meningitidis can cleave at sites with PAMs including NNNNGATT, NNNNNGTTT and NNNNGCTT. A number of other Cas9 orthologs target protospacer adjacent to alternative PAMs.

[0552] CRISPR endonucleases, such as Cas9 can be used in the methods of the invention. However, the teachings described herein, such as therapeutic target sites, could be applied to other forms of endonucleases, such as ZFNs, TALENs, HEs, or MegaTALs, or using combinations of nucleases. However, in order to apply the teachings of the present invention to such endonucleases, one would need to, among other things, engineer proteins directed to the specific target sites.

[0553] Additional binding domains can be fused to the Cas9 protein to increase specificity. The target sites of these constructs would map to the identified gRNA specified site, but would require additional binding motifs, such as for a zinc finger domain. In the case of Mega-TAL, a meganuclease can be fused to a TALE DNA-binding domain. The meganuclease domain can increase specificity and provide the cleavage. Similarly, inactivated or dead Cas9 (dCas9) can be fused to a cleavage domain and require the sgRNA/Cas9 target site and adjacent binding site for the fused DNA-binding domain. This likely would require some protein engineering of the dCas9, in addition to the catalytic inactivation, to decrease binding without the additional binding site.

### Zinc Finger Nucleases

[0554] Zinc finger nucleases (ZFNs) are modular proteins comprised of an engineered zinc finger DNA binding domain linked to the catalytic domain of the type II endonuclease FokI. Because FokI functions only as a dimer, a pair of ZFNs must be engineered to bind to cognate target “half-site” sequences on opposite DNA strands and with precise spacing between them to enable the catalytically active FokI dimer to form. Upon dimerization of the FokI domain, which itself has no sequence specificity per se, a DNA double-strand break is generated between the ZFN half-sites as the initiating step in genome editing.

[0555] The DNA binding domain of each ZFN is typically comprised of 3-6 zinc fingers of the abundant Cys2-His2 architecture, with each finger primarily recognizing a triplet of nucleotides on one strand of the target DNA sequence, although cross-strand interaction with a fourth nucleotide also can be important. Alteration of the amino acids of a finger in positions that make key contacts with the DNA alters the sequence specificity of a given finger. Thus, a four-finger zinc finger protein will selectively recognize a 12 bp target sequence, where the target sequence is a composite of the triplet preferences contributed by each finger, although triplet preference can be influenced to varying degrees by neighboring fingers. An important aspect of ZFNs is that they can be readily re-targeted to almost any genomic address simply by modifying individual fingers, although considerable expertise is required to do this well. In most applications of ZFNs, proteins of 4-6 fingers are used, recognizing 12-18 bp respectively. Hence, a pair of ZFNs will typically recognize a combined target sequence of 24-36 bp, not including the 5-7 bp spacer between half-sites. The binding sites can be separated further with larger spacers, including 15-17 bp. A target sequence of this length is likely to be unique in the human genome, assuming repetitive sequences or gene homologs are excluded during the design process. Nevertheless, the ZFN protein-DNA interactions are not absolute in their specificity so off-target binding and cleavage events do occur, either as a heterodimer between the two ZFNs, or as a homodimer of one or the other of the ZFNs. The latter possibility has been effectively eliminated by engineering the dimerization interface of the FokI domain to create “plus” and “minus” variants, also known as obligate heterodimer variants, which can only dimerize with each other, and not with themselves. Forcing the obligate heterodimer prevents formation of the homodimer. This has greatly enhanced specificity of ZFNs, as well as any other nuclease that adopts these FokI variants.

[0556] A variety of ZFN-based systems have been described in the art, modifications thereof are regularly reported, and numerous references describe rules and parameters that are used to guide the design of ZFNs; see, e.g., Segal et al., Proc Natl Acad Sci USA 96(6):2758-63 (1999); Dreier B et al., J Mol Biol. 303(4):489-502 (2000); Liu Q et al., J Biol Chem. 277(6):3850-6 (2002); Dreier et al., J Biol Chem 280(42):35588-97 (2005); and Dreier et al., J Biol Chem. 276(31):29466-78 (2001).

### Transcription Activator-Like Effector Nucleases (TALENs)

[0557] TALENs represent another format of modular nucleases whereby, as with ZFNs, an engineered DNA binding domain is linked to the FokI nuclease domain, and a pair of TALENs operate in tandem to achieve targeted DNA cleavage. The major difference from ZFNs is the nature of the DNA binding domain and the associated target DNA sequence recognition properties. The TALEN DNA binding domain derives from TALE proteins, which were originally described in the plant bacterial pathogen Xanthomonas sp. TALEs are comprised of tandem arrays of 33-35 amino acid repeats, with each repeat recognizing a single basepair in the target DNA sequence that is typically up to 20 bp in length, giving a total target sequence length of up to 40 bp. Nucleotide specificity of each repeat is determined by the repeat variable diresidue (RVD), which includes just two amino acids at positions 12 and 13. The bases guanine, adenine, cytosine and thymine are predominantly recognized by the four RVDs: Asn-Asn, Asn-Ile, His-Asp and Asn-Gly, respectively. This constitutes a much simpler recognition code than for zinc fingers, and thus represents an advantage over the latter for nuclease design. Nevertheless, as with ZFNs, the protein-DNA interactions of TALENs are not absolute in their specificity, and TALENs have also benefitted from the use of obligate heterodimer variants of the FokI domain to reduce off-target activity.

[0558] Additional variants of the FokI domain have been created that are deactivated in their catalytic function. If one half of either a TALEN or a ZFN pair contains an inactive FokI domain, then only single-strand DNA cleavage (nicking) will occur at the target site, rather than a DSB. The outcome is comparable to the use of CRISPR/Cas9 “nickase” mutants in which one of the Cas9 cleavage domains has been deactivated. DNA nicks can be used to drive genome editing by HDR, but at lower efficiency than with a DSB. The main benefit is that off-target nicks are quickly and accurately repaired, unlike the DSB, which is prone to NHEJ-mediated mis-repair.

[0559] A variety of TALEN-based systems have been described in the art, and modifications thereof are regularly reported; see, e.g., Boch, Science 326(5959): 1509-12 (2009); Mak et al., Science 335(6069):716-9 (2012); and Moscou et al., Science 326(5959): 1501 (2009). The use of TALENs based on the “Golden Gate” platform, or cloning scheme, has been described by multiple groups; see, e.g., Cermak et al., Nucleic Acids Res. 39(12): e82 (2011); Li et al., Nucleic Acids Res. 39(14):6315-25(2011); Weber et al., PLOS One. 6(2):e16765 (2011); Wang et al., J Genet Genomics 41(6):339-47, Epub 2014 May 17 (2014); and Cermak T et al., Methods Mol Biol. 1239:133-59 (2015).

### Homing Endonucleases

[0560] Homing endonucleases (HEs) are sequence-specific endonucleases that have long recognition sequences (14-44 base pairs) and cleave DNA with high specificity—often at sites unique in the genome. There are at least six known families of HEs as classified by their structure, including LAGLIDADG (SEQ ID NO: 64,791), GIY-YIG, His-Cis box, H-N-H, PD-(D/E)xK, and Vsr-like that are derived from a broad range of hosts, including eukarya, protists, bacteria, archaea, cyanobacteria and phage. As with ZFNs and TALENs, HEs can be used to create a DSB at a target locus as the initial step in genome editing. In addition, some natural and engineered HEs cut only a single strand of DNA, thereby functioning as site-specific nickases. The large target sequence of HEs and the specificity that they offer have made them attractive candidates to create site-specific DSBs.

[0561] A variety of HE-based systems have been described in the art, and modifications thereof are regularly reported; see, e.g., the reviews by Steentoft et al., Glycobiology 24(8):663-80 (2014); Belfort and Bonocora, Methods Mol Biol. 1123:1-26 (2014); Hafez and Hausner, Genome 55(8):553-69 (2012); and references cited therein.

### MegaTAL/Tev-mTALEN/MegaTev

[0562] As further examples of hybrid nucleases, the MegaTAL platform and Tev-mTALEN platform use a fusion of TALE DNA binding domains and catalytically active HEs, taking advantage of both the tunable DNA binding and specificity of the TALE, as well as the cleavage sequence specificity of the HE; see, e.g., Boissel et al., NAR 42: 2591-2601 (2014); Kleinstiver et al., G3 4:1155-65 (2014); and Boissel and Scharenberg, Methods Mol. Biol. 1239: 171-96 (2015).

[0563] In a further variation, the MegaTev architecture is the fusion of a meganuclease (Mega) with the nuclease domain derived from the GIY-YIG homing endonuclease I-TevI (Tev). The two active sites are positioned ˜30 bp apart on a DNA substrate and generate two DSBs with non-compatible cohesive ends; see, e.g., Wolfs et al., NAR 42, 8816-29 (2014). It is anticipated that other combinations of existing nuclease-based approaches will evolve and be useful in achieving the targeted genome modifications described herein.

dCas9-FokI and Other Nucleases

[0564] Combining the structural and functional properties of the nuclease platforms described above offers a further approach to genome editing that can potentially overcome some of the inherent deficiencies. As an example, the CRISPR genome editing system typically uses a single Cas9 endonuclease to create a DSB. The specificity of targeting is driven by a 20 or 24 nucleotide sequence in the guide RNA that undergoes Watson-Crick base-pairing with the target DNA (plus an additional 2 bases in the adjacent NAG or NGG PAM sequence in the case of Cas9 or Cpf1 from S. pyogenes). Such a sequence is long enough to be unique in the human genome, however, the specificity of the RNA/DNA interaction is not absolute, with significant promiscuity sometimes tolerated, particularly in the 5′ half of the target sequence, effectively reducing the number of bases that drive specificity. One solution to this has been to completely deactivate the Cas9 catalytic function—retaining only the RNA-guided DNA binding function—and instead fusing a FokI domain to the deactivated Cas9; see, e.g., Tsai et al., Nature Biotech 32: 569-76 (2014); and Guilinger et al., Nature Biotech. 32: 577-82 (2014). Because FokI must dimerize to become catalytically active, two guide RNAs are required to tether two FokI fusions in close proximity to form the dimer and cleave DNA. This essentially doubles the number of bases in the combined target sites, thereby increasing the stringency of targeting by CRISPR-based systems.

[0565] As further example, fusion of the TALE DNA binding domain to a catalytically active HE, such as I-TevI, takes advantage of both the tunable DNA binding and specificity of the TALE, as well as the cleavage sequence specificity of I-TevI, with the expectation that off-target cleavage may be further reduced.

### Methods and Compositions of the Invention

[0566] Accordingly, the present disclosure relates in particular to the following non-limiting inventions: In a first method, Method 1, the present disclosure provides a I method for editing the glucose-6-phosphatase, catalytic (G6PC) gene in a human cell by genome editing, the method comprising the step of: introducing into the human cell one or more deoxyribonucleic acid (DNA) endonucleases to effect one or more single-strand breaks (SSBs) or double-strand breaks (DSBs) within or near the G6PC gene or other DNA sequences that encode regulatory elements of the G6PC gene that results in a permanent insertion, correction, or modulation of expression of function of one or more exons within or near or affecting the expression or function of the G6PC gene and results in restoration of glucose-6-phosphatase (G6Pase) protein activity.

[0567] In another method, Method 2, the present disclosure provides a method for inserting a G6PC gene in a human cell by genome editing, the method comprising introducing into the human cell one or more deoxyribonucleic acid (DNA) endonucleases to effect one or more single-strand breaks (SSBs) or double-strand breaks (DSBs) within or near a safe harbor locus that results in a permanent insertion of the G6PC gene, and results in restoration of G6Pase protein activity.

[0568] In another method, Method 3, the present disclosure provides an ex vivo method for treating a patient with Glycogen Storage Disease type 1a (GSD1a), the method comprising the steps of: i) creating a patient specific induced pluripotent stem cell (iPSC), or editing within or near a safe harbor locus of the iPSC; ii) editing within or near a glucose-6-phosphatase, catalytic (G6PC) gene or other DNA sequences that encode regulatory elements of the G6PC gene of the iPSC; iii) differentiating the genome edited iPSC into a hepatocyte; and iv) implanting the hepatocyte into the patient.

[0569] In another method, Method 4, the present disclosure provides the method of Method 3, wherein the creating step comprises: a) isolating a somatic cell from the patient; and b) introducing a set of pluripotency-associated genes into the somatic cell to induce the somatic cell to become a pluripotent stem cell.

[0570] In another method, Method 5, the present disclosure provides the method of Method 4, wherein the somatic cell is a fibroblast.

[0571] In another method, Method 6, the present disclosure provides the method of Method 4, wherein the set of pluripotency-associated genes is one or more of the genes selected from the group consisting of OCT4, SOX2, KLF4, Lin28, NANOG and cMYC.

[0572] In another method, Method 7, the present disclosure provides the method of any one of Methods 3-6, wherein the editing step comprises introducing into the iPSC one or more deoxyribonucleic acid (DNA) endonucleases to effect one or more single-strand breaks (SSBs) or double-strand breaks (DSBs) within or near the G6PC gene or other DNA sequences that encode regulatory elements of the G6PC gene that results in a permanent insertion, correction or modulation of expression or function of one or more exons within or near or affecting the expression or function of the G6PC gene or within or near a safe harbor locus and results in restoration of glucose-6-phosphatase (G6Pase) protein activity.

[0573] In another method, Method 8, the present disclosure provides the method of Method 7, wherein the safe harbor locus is selected from the group consisting of AAVS1 (PPP1R12C), ALB, Angptl3, ApoC3, ASGR2, CCR5, FIX (F9), Gys2, HGD, Lp(a), Pcsk9, Serpina1, TF, and TTR. The safe harbor locus can be selected from the group consisting of: exon 1-2 of AAVS1 (PPP1R12C), exon 1-2 of ALB, exon 1-2 of Angptl3, exon 1-2 of ApoC3, exon 1-2 of ASGR2, exon 1-2 of CCR5, exon 1-2 of FIX (F9), exon 1-2 of Gys2, exon 1-2 of HGD, exon 1-2 of Lp(a), exon 1-2 of Pcsk9, exon 1-2 of Serpina1, exon 1-2 of TF, and exon 1-2 of TTR.

[0574] In another method, Method 9, the present disclosure provides the method of any one of Methods 3-8, wherein the differentiating step comprises one or more of the following to differentiate the genome edited iPSC into a hepatocyte: contacting the genome edited iPSC with one or more of activin, B27 supplement, FGF4, HGF, BMP2, BMP4, Oncostatin M, Dexametason

[0575] In another method, Method 10, the present disclosure provides the method of any one of Methods 3-9, wherein the implanting step comprises implanting the hepatocyte into the patient by transplantation, local injection, or systemic infusion, or combinations thereof.

[0576] In another method, Method 11, the present disclosure provides an ex vivo method for treating a patient with Glycogen Storage Disease type 1a (GSD1a), the method comprising the steps of: i) performing a biopsy of the patient's liver; ii) isolating a liver specific progenitor cell or primary hepatocyte; iii) editing within or near the glucose-6-phosphatase, catalytic (G6PC) gene or other DNA sequences that encode regulatory elements of the G6PC gene of the progenitor cell or primary hepatocyte or editing within or near a safe harbor locus of the progenitor cell or primary hepatocyte; and iv) implanting the genome-edited progenitor cell or primary hepatocyte into the patient.

[0577] In another method, Method 12, the present disclosure provides the method of Method 11, wherein the isolating step comprises: perfusion of fresh liver tissues with digestion enzymes, cell differential centrifugation, cell culturing, or combinations thereof.

[0578] In another method, Method 13, the present disclosure provides the method of any one of Methods 11-12, wherein the editing step comprises introducing into the progenitor cell or primary hepatocyte one or more deoxyribonucleic acid (DNA) endonucleases to effect one or more single-strand breaks (SSBs) or double-strand breaks (DSBs) within or near the G6PC gene or other DNA sequences that encode regulatory elements of the G6PC gene or within or near a safe harbor that results in a permanent insertion, correction, or modulation of expression or function of one or more exons within or near or affecting the expression or function of the G6PC gene or within or near a safe harbor locus and restoration of glucose-6-phosphatase (G6Pase) protein activity.

[0579] In another method, Method 14, the present disclosure provides the method of Method 13, wherein the safe harbor locus is selected from the group consisting of AAVS1 (PPP1R12C), ALB, Angptl3, ApoC3, ASGR2, CCR5, FIX (F9), Gys2, HGD, Lp(a), Pcsk9, Serpina1, TF, and TTR. The safe harbor locus can be selected from the group consisting of: exon 1-2 of AAVS1 (PPP1R12C), exon 1-2 of ALB, exon 1-2 of Angptl3, exon 1-2 of ApoC3, exon 1-2 of ASGR2, exon 1-2 of CCR5, exon 1-2 of FIX (F9), exon 1-2 of Gys2, exon 1-2 of HGD, exon 1-2 of Lp(a), exon 1-2 of Pcsk9, exon 1-2 of Serpina1, exon 1-2 of TF, and exon 1-2 of TTR.

[0580] In another method, Method 15, the present disclosure provides the method of any one of Methods 11-14, wherein the implanting step comprises implanting the genome-edited progenitor cell or primary hepatocyte into the patient by transplantation, local injection, or systemic infusion, or combinations thereof.

[0581] In another method, Method 16, the present disclosure provides an ex vivo method for treating a patient with Glycogen Storage Disease type 1a (GSD1a), the method comprising the steps of: i) performing a biopsy of the patient's bone marrow; ii) isolating a mesenchymal stem cell from the patient; iii) editing within or near the glucose-6-phosphatase, catalytic (G6PC) gene or other DNA sequences that encode regulatory elements of the G6PC gene of the mesenchymal stem cell or editing within or near a safe harbor locus of the mesenchymal stem cell; iv) differentiating the genome-edited mesenchymal stem cell into a hepatocyte; and v) implanting the hepatocyte into the patient.

[0582] In another method, Method 17, the present disclosure provides the method of Method 16, wherein the mesenchymal stem cell is isolated from the patient's bone marrow or peripheral blood.

[0583] In another method, Method 18, the present disclosure provides the method of Method 16, wherein the isolating step comprises: aspiration of bone marrow and isolation of mesenchymal cells by density centrifugation using Percoll™.

[0584] In another method, Method 19, the present disclosure provides the method of any one of Methods 16-18, wherein the editing step comprises introducing into the mesenchymal stem cell one or more deoxyribonucleic acid (DNA) endonucleases to effect one or more single-strand breaks (SSBs) or double-strand breaks (DSBs) within or near the G6PC gene or other DNA sequences that encode regulatory elements of the G6PC gene that results in a permanent insertion, correction, or modulation of expression or function of one or more exons within or near or affecting the expression or function of the G6PC gene or within or near a safe harbor locus and restoration of glucose-6-phosphatase (G6Pase) protein activity.

[0585] In another method, Method 20, the present disclosure provides the method of Method 19, wherein the safe harbor locus is selected from the group consisting of AAVS1 (PPP1R12C), ALB, Angptl3, ApoC3, ASGR2, CCR5, FIX (F9), Gys2, HGD, Lp(a), Pcsk9, Serpina1, TF, and TTR. The safe harbor locus can be selected from the group consisting of: exon 1-2 of AAVS1 (PPP1R12C), exon 1-2 of ALB, exon 1-2 of Angptl3, exon 1-2 of ApoC3, exon 1-2 of ASGR2, exon 1-2 of CCR5, exon 1-2 of FIX (F9), exon 1-2 of Gys2, exon 1-2 of HGD, exon 1-2 of Lp(a), exon 1-2 of Pcsk9, exon 1-2 of Serpina1, exon 1-2 of TF, and exon 1-2 of TTR.

[0586] In another method, Method 21, the present disclosure provides the method of any one of Methods 16-19, wherein the differentiating step comprises one or more of the following to differentiate the genome edited mesenchymal stem cell into a hepatocyte: contacting the genome edited stem cell with one or more of insulin, transferrin, FGF4, HGF, or bile acids.

[0587] In another method, Method 22, the present disclosure provides the method of any one of Methods 16-21, wherein the implanting step comprises implanting the hepatocyte into the patient by transplantation, local injection, or systemic infusion, or combinations thereof.

[0588] In another method, Method 23, the present disclosure provides an in vivo method for treating a patient with Glycogen Storage Disease type 1a (GSD1a), the method comprising the step of editing the glucose-6-phosphatase, catalytic (G6PC) gene in a cell of the patient, or other DNA sequences that encode regulatory elements of the G6PC gene, or editing within or near a safe harbor locus in a cell of the patient.

[0589] In another method, Method 24, the present disclosure provides the method of Method 23, wherein the editing step comprises introducing into the cell one or more deoxyribonucleic acid (DNA) endonucleases to effect one or more single-strand breaks (SSBs) or double-strand breaks (DSBs) within or near the G6PC gene other DNA sequences that encode regulatory elements of the G6PC gene that results in a permanent insertion, correction, or modulation of expression or function of one or more exons within or near or affecting the expression or function of the G6PC gene or within or near a safe harbor locus that results in a permanent insertion of the G6PC gene and restoration of glucose-6-phosphatase (G6Pase) protein activity.

[0590] In another method, Method 25, the present disclosure provides the method of any one of Methods 1, 2, 7, 13, 19, or 24, wherein the one or more DNA endonucleases is a Cas1, Cas1B, Cas2, Cas3, Cas4, Cas5, Cas6, Cas7, Cas8, Cas9 (also known as Csn1 and Csx12), Cas100, Csy1, Csy2, Csy3, Cse1, Cse2, Csc1, Csc2, Csa5, Csn2, Csm2, Csm3, Csm4, Csm5, Csm6, Cmr1, Cmr3, Cmr4, Cmr5, Cmr6, Csb1, Csb2, Csb3, Csx17, Csx14, Csx10, Csx16, CsaX, Csx3, Csx1, Csx15, Csf1, Csf2, Csf3, Csf4, or Cpf1 endonuclease; or a homolog thereof, recombination of the naturally occurring molecule, codon-optimized, or modified version thereof, and combinations thereof.

[0591] In another method, Method 26, the present disclosure provides the method of Method 25, wherein the method comprises introducing into the cell one or more polynucleotides encoding the one or more DNA endonucleases.

[0592] In another method, Method 27, the present disclosure provides the method of Method 25, wherein the method comprises introducing into the cell one or more ribonucleic acids (RNAs) encoding the one or more DNA endonucleases.

[0593] In another method, Method 28, the present disclosure provides the method of any one of Methods 26 or 27, wherein the one or more polynucleotides or one or more RNAs is one or more modified polynucleotides or one or more modified RNAs.

[0594] In another method, Method 29, the present disclosure provides the method of Method 26, wherein the DNA endonuclease is a protein or polypeptide.

[0595] In another method, Method 30, the present disclosure provides the method of any one of the preceding Methods, wherein the method further comprises introducing into the cell one or more guide ribonucleic acids (gRNAs).

[0596] In another method, Method 31, the present disclosure provides the method of Method 30, wherein the one or more gRNAs are single-molecule guide RNA (sgRNAs).

[0597] In another method, Method 32, the present disclosure provides the method of any one of Methods 30-31, wherein the one or more gRNAs or one or more sgRNAs is one or more modified gRNAs or one or more modified sgRNAs.

[0598] In another method, Method 33, the present disclosure provides the method of any one of Methods 30-32, wherein the one or more DNA endonucleases is pre-complexed with one or more gRNAs or one or more sgRNAs.

[0599] In another method, Method 34, the present disclosure provides the method of any one of the preceding Methods, wherein the method further comprises introducing into the cell a polynucleotide donor template comprising at least a portion of the wild-type G6PC gene or cDNA.

[0600] In another method, Method 35, the present disclosure provides the method of Method 34, wherein the at least a portion of the wild-type G6PC gene or cDNA is exon 1, exon 2, exon 3, exon 4, exon 5, intronic regions, fragments or combinations thereof, the entire G6PC gene, DNA sequences that encode wild-type regulatory elements of the G6PC gene, or cDNA.

[0601] In another method, Method 36, the present disclosure provides the method of any one of Methods 34-35, wherein the donor template is either a single or double stranded polynucleotide.

[0602] In another method, Method 37, the present disclosure provides the method of any one of Methods 34-36, wherein the donor template has homologous arms to the 17q21 region.

[0603] In another method, Method 38, the present disclosure provides the method of any one of Methods 1, 2, 7, 13, 19, or 24, wherein the method further comprises introducing into the cell one guide ribonucleic acid (gRNA) and a polynucleotide donor template comprising at least a portion of the wild-type G6PC gene, and wherein the one or more DNA endonucleases is one or more Cas9 endonucleases that effect one single-strand break (SSB) or double-strand break (DSB) at a DSB locus within or near the G6PC gene or other DNA sequences that encode regulatory elements of the G6PC gene or within or near a safe harbor locus that facilitates insertion of a new sequence from the polynucleotide donor template into the chromosomal DNA at the locus or safe harbor locus that results in a permanent insertion or correction of a part of the chromosomal DNA of the G6PC gene or other DNA sequences that encode regulatory elements of the G6PC gene proximal to the locus or safe harbor locus and restoration of G6Pase protein activity, and wherein the gRNA comprises a spacer sequence that is complementary to a segment of the locus or safe harbor locus.

[0604] In another method, Method 39, the present disclosure provides the method of Method 38, wherein proximal means nucleotides both upstream and downstream of the locus or safe harbor locus.

[0605] In another method, Method 40, the present disclosure provides the method of any one of Methods 1, 2, 7, 13, 19, or 24, wherein the method further comprises introducing into the cell two guide ribonucleic acid (gRNAs) and a polynucleotide donor template comprising at least a portion of the wild-type G6PC gene, and wherein the one or more DNA endonucleases is two or more Cas9 or Cpf1 endonucleases that effect a pair of single-strand breaks (SSBs) or double-strand breaks (DSBs), the first at a 5′ locus and the second at a 3′ locus, within the G6PC gene or other DNA sequences that encode regulatory elements of the G6PC gene or within or near a safe harbor locus that facilitates insertion of a new sequence from the polynucleotide donor template into the chromosomal DNA between the 5′ locus and the 3′ locus that results in permanent correction of the chromosomal DNA between the 5′ locus and the 3′ locus within the G6PC gene or other DNA sequences that encode regulatory elements of the G6PC gene or within or near a safe harbor locus and restoration of G6Pase protein activity, and wherein the first guide RNA comprises a spacer sequence that is complementary to a segment of the 5′ locus and the second guide RNA comprises a spacer sequence that is complementary to a segment of the 3′ locus.

[0606] In another method, Method 41, the present disclosure provides the method of any one of Methods 38-40, wherein the one or two gRNAs are one or two single-molecule guide RNA (sgRNAs).

[0607] In another method, Method 42, the present disclosure provides the method of any one of Methods 38-41, wherein the one or two gRNAs or one or two sgRNAs is one or two modified gRNA or one or two modified sgRNA.

[0608] In another method, Method 43, the present disclosure provides the method of any one of Methods 38-42, wherein the one or more DNA endonucleases is pre-complexed with one or two gRNAs or one or two sgRNAs.

[0609] In another method, Method 44, the present disclosure provides the method of any one of Methods 38-43, wherein the at least a portion of the wild-type G6PC gene or cDNA is exon 1, exon 2, exon 3, exon 4, exon 5, intronic regions, fragments or combinations thereof, the entire G6PC gene, DNA sequences that encode wild-type regulatory elements of the G6PC gene, or cDNA.

[0610] In another method, Method 45, the present disclosure provides the method of any one of Methods 38-44, wherein the donor template is either a single or double stranded polynucleotide.

[0611] In another method, Method 46, the present disclosure provides the method of any one of Methods 38-45, wherein the donor template has homologous arms to the 17q21 region.

[0612] In another method, Method 47, the present disclosure provides the method of Method 3644, wherein the SSB, DSB, or 5′ DSB and 3′ DSB are in the first, second, third, fourth, fifth exon or intron of the G6PC gene.

[0613] In another method, Method 48, the present disclosure provides the method of any one of Methods 1, 2, 7, 13, 19, 24, 30-33, or 38-41, wherein the gRNA or sgRNA is directed to one or more of the following pathological variants: rs80356479, rs80356486, rs606231368, rs80356488, rs587776757, rs104894565, rs104894566, rs1801175, rs1801176, rs104894567, rs104894571, rs80356482, rs80356483, rs104894563, rs367727229, rs387906505, rs104894568, rs104894569, rs80356487, rs764920787, rs80356485, rs780226142, rs80356484.

[0614] In another method, Method 49, the present disclosure provides the method of any one of Methods 1, 2, 7, 13, 19 or 24-48, wherein the insertion or correction is by homology directed repair (HDR).

[0615] In another method, Method 50, the present disclosure provides the method of any one of Methods 1, 2, 7, 13, 19 or 24-49, wherein the Cas9 mRNA, gRNA, and donor template are either each formulated into separate lipid nanoparticles or all co-formulated into a lipid nanoparticle.

[0616] In another method, Method 51, the present disclosure provides the method of any one of Methods 1, 2, 7, 13, 19 or 24-49, wherein the Cas9 or Cpf1 mRNA is formulated into a lipid nanoparticle, and both the gRNA and donor template are delivered to the cell by a viral vector.

[0617] In another method, Method 52, the present disclosure provides the method of Method 51, wherein the viral vector is an adeno-associated virus (AAV).

[0618] In another method, Method 53, the present disclosure provides the method of Method 52, wherein the AAV vector is an AAV6 vector.

[0619] In another method, Method 54, the present disclosure provides the method of any one of Methods 1, 2, 7, 13, 19 or 24-49, wherein the Cas9 or Cpf1 mRNA, gRNA and a donor template are either each formulated into separate exosomes or all co-formulated into an exosome.

[0620] 5 In another method, Method 55, the present disclosure provides the method of any one of Methods 1, 2, 7, 13, 19 or 24-49, wherein the Cas9 or Cpf1 mRNA is formulated into a lipid nanoparticle, and the gRNA is delivered to the cell by electroporation and donor template is delivered to the cell by a viral vector.

[0621] In another method, Method 56, the present disclosure provides the method of Method 55, wherein the viral vector is an adeno-associated virus (AAV) vector.

[0622] In another method, Method 57, the present disclosure provides the method of Method 56, wherein the AAV vector is an AAV6 vector.

[0623] In another method, Method 58, the present disclosure provides the method of any one of the preceding Methods, wherein the G6PC gene is located on Chromosome 17: 42,900,796-42,914,432 (Genome Reference Consortium—GRCh38/hg38).

[0624] In another method, Method 59, the present disclosure provides the method of any one of Methods 1, 2, 7, 13, 19 or 24-49, wherein the restoration of G6Pase protein activity is compared to wild-type or normal G6Pase protein activity.

[0625] In another method, Method 60, the present disclosure provides the method of Method 1, wherein the human cell is a liver cell.

[0626] In another method, Method 61, the present disclosure provides the method of Method 23, wherein the cell is a liver cell.

[0627] In another method, Method 62, the present disclosure provides the method of any one of Methods 1, 2, 7, 13, 19 or 24-49, wherein the G6PC gene is operably linked to an exogenous promoter that drives expression of the G6PC gene.

[0628] In another method, Method 63, the present disclosure provides the method of any one of Methods 1, 2, 7, 13, 19 or 24-49, wherein the one or more SSBs or DSBs occurs at a location immediately 3′ to an endogenous promoter locus.

[0629] The present disclosure also provides a composition, Composition 1, comprising one or more guide ribonucleic acids (gRNAs) or editing a G6PC gene in a cell from a patient with Glycogen Storage Disease type 1a (GSD1a), the one or more gRNAs comprising a spacer sequence selected from the group consisting of the nucleic acid sequences in FIGS. 1-90 for editing the glucose-6-phosphatase, catalytic gene in a cell from a patient with Glycogen Storage Disease type 1a.

[0630] In another composition, Composition 2, the present disclosure provides the one or more gRNAs of Composition 1, wherein the one or more gRNAs are one or more single-molecule guide RNAs (sgRNAs).

[0631] In another composition, Composition 3, the present disclosure provides the one or more gRNAs or sgRNAs of Composition 1 or 2, wherein the one or more gRNAs or one or more sgRNAs is one or more modified gRNA or one or more modified sgRNA.

[0632] In another composition, Composition 4, the present disclosure provides the one or more gRNAs or sgRNAs of Compositions 63-65, wherein the cell is a liver cell.

### Definitions

[0633] The term “comprising” or “comprises” is used in reference to compositions, methods, and respective component(s) thereof, that are essential to the invention, yet open to the inclusion of unspecified elements, whether essential or not.

[0634] The term “consisting essentially of” refers to those elements required for a given embodiment. The term permits the presence of additional elements that do not materially affect the basic and novel or functional characteristic(s) of that embodiment of the invention.

[0635] The term “consisting of” refers to compositions, methods, and respective components thereof as described herein, which are exclusive of any element not recited in that description of the embodiment.

[0636] The singular forms “a,” “an,” and “the” include plural references, unless the context clearly dictates otherwise.

[0637] Certain numerical values presented herein are preceded by the term “about.” The term “about” is used to provide literal support for the numerical value the term “about” precedes, as well as a numerical value that is approximately the numerical value, that is the approximating unrecited numerical value may be a number which, in the context it is presented, is the substantial equivalent of the specifically recited numerical value. The term “about” means numerical values within +10% of the recited numerical value.

[0638] When a range of numerical values is presented herein, it is contemplated that each intervening value between the lower and upper limit of the range, the values that are the upper and lower limits of the range, and all stated values with the range are encompassed within the disclosure. All the possible sub-ranges within the lower and upper limits of the range are also contemplated by the disclosure.

### EXAMPLES

[0639] The invention will be more fully understood by reference to the following examples, which provide illustrative non-limiting embodiments of the invention.

[0640] The examples describe the use of the CRISPR system as an illustrative genome editing technique to create defined therapeutic genomic replacements, termed “genomic modifications” herein, in the G6PC gene that lead to permanent correction of mutations in the genomic locus, or expression at a heterologous locus, that restore G6Pase activity. Introduction of the defined therapeutic modifications represents a novel therapeutic strategy for the potential amelioration of GSD1a, as described and illustrated herein.

### Example 1—CRISPR/SpCas9 Target Sites for the AAVS1 (PPP1R12C) Gene

[0641] Exons 1-2 of the AAVS1 (PPP1R12C) gene were scanned for target sites. Each area was scanned for a protospacer adjacent motif (PAM) having the sequence NRG. gRNA 20 bp spacer sequences corresponding to the PAM were identified, as shown in FIG. 1.

### Example 2—CRISPR/SaCas9 Target Sites for the AAVS1 (PPP1R12C) Gene

[0642] Exons 1-2 of the AAVS1 (PPP1R12C) gene were scanned for target sites. Each area was scanned for a protospacer adjacent motif (PAM) having the sequence NNGRRT. gRNA 20 bp spacer sequences corresponding to the PAM were identified, as shown in FIG. 2.

### Example 3—CRISPR/StCas9 Target Sites for the AAVS1 (PPP1R12C) Gene

[0643] Exons 1-2 of the AAVS1 (PPP1R12C) gene were scanned for target sites. Each area was scanned for a protospacer adjacent motif (PAM) having the sequence NNAGAAW. gRNA 20 bp spacer sequences corresponding to the PAM were identified, as shown in FIG. 3.

### Example 4—CRISPR/TdCas9 Target Sites for the AAVS1 (PPP1R12C) Gene

[0644] Exons 1-2 of the AAVS1 (PPP1R12C) gene were scanned for target sites. Each area was scanned for a protospacer adjacent motif (PAM) having the sequence NAAAAC. gRNA 20 bp spacer sequences corresponding to the PAM were identified, as shown in FIG. 4.

### Example 5—CRISPR/NmCas9 Target Sites for the AAVS1 (PPP1R12C) Gene

[0645] Exons 1-2 of the AAVS1 (PPP1R12C) gene were scanned for target sites. Each area was scanned for a protospacer adjacent motif (PAM) having the sequence NNNNGHTT. gRNA 20 bp spacer sequences corresponding to the PAM were identified, as shown in FIG. 5.

### Example 6—CRISPR/Cpf1 Target Sites for the AAVS1 (PPP1R12C) Gene

[0646] Exons 1-2 of the AAVS1 (PPP1R12C) gene were scanned for target sites. Each area was scanned for a protospacer adjacent motif (PAM) having the sequence YTN. gRNA 22 bp spacer sequences corresponding to the PAM were identified, as shown in FIG. 6.

### Example 7—CRISPR/SpCas9 Target Sites for the ALB Gene

[0647] Exons 1-2 of the ALB gene were scanned for target sites. Each area was scanned for a protospacer adjacent motif (PAM) having the sequence NRG. gRNA 20 bp spacer sequences corresponding to the PAM were identified, as shown in FIG. 7.

### Example 8—CRISPR/SaCas9 Target Sites for the ALB Gene

[0648] Exons 1-2 of the ALB gene were scanned for target sites. Each area was scanned for a protospacer adjacent motif (PAM) having the sequence NNGRRT. gRNA 20 bp spacer sequences corresponding to the PAM were identified, as shown in FIG. 8.

### Example 9—CRISPR/StCas9 Target Sites for the ALB Gene

[0649] Exons 1-2 of the ALB gene were scanned for target sites. Each area was scanned for a protospacer adjacent motif (PAM) having the sequence NNAGAAW. gRNA 20 bp spacer sequences corresponding to the PAM were identified, as shown in FIG. 9.

### Example 10—CRISPR/TdCas9 Target Sites for the ALB Gene

[0650] Exons 1-2 of the ALB gene were scanned for target sites. Each area was scanned for a protospacer adjacent motif (PAM) having the sequence NAAAAC. gRNA 20 bp spacer sequences corresponding to the PAM were identified, as shown in FIG. 10.

### Example 11—CRISPR/NmCas9 Target Sites for the ALB Gene

[0651] Exons 1-2 of the ALB gene were scanned for target sites. Each area was scanned for a protospacer adjacent motif (PAM) having the sequence NNNNGHTT. gRNA 20 bp spacer sequences corresponding to the PAM were identified, as shown in FIG. 11.

### Example 12—CRISPR/Cpf1 Target Sites for the ALB Gene

[0652] Exons 1-2 of the ALB gene were scanned for target sites. Each area was scanned for a protospacer adjacent motif (PAM) having the sequence YTN. gRNA 22 bp spacer sequences corresponding to the PAM were identified, as shown in FIG. 12.

### Example 13—CRISPR/SpCas9 Target Sites for the Angptl3 Gene

[0653] Exons 1-2 of the Angptl3 gene were scanned for target sites. Each area was scanned for a protospacer adjacent motif (PAM) having the sequence NRG. gRNA 20 bp spacer sequences corresponding to the PAM were identified, as shown in FIG. 13.

### Example 14—CRISPR/SaCas9 Target Sites for the Angptl3 Gene

[0654] Exons 1-2 of the Angptl3 gene were scanned for target sites. Each area was scanned for a protospacer adjacent motif (PAM) having the sequence NNGRRT. gRNA 20 bp spacer sequences corresponding to the PAM were identified, as shown in FIG. 14.

### Example 15—CRISPR/StCas9 Target Sites for the Angptl3 Gene

[0655] Exons 1-2 of the Angptl3 gene were scanned for target sites. Each area was scanned for a protospacer adjacent motif (PAM) having the sequence NNAGAAW. gRNA 20 bp spacer sequences corresponding to the PAM were identified, as shown in FIG. 15.

### Example 16—CRISPR/TdCas9 Target Sites for the Angptl3 Gene

[0656] Exons 1-2 of the Angptl3 gene were scanned for target sites. Each area was scanned for a protospacer adjacent motif (PAM) having the sequence NAAAAC. gRNA 20 bp spacer sequences corresponding to the PAM were identified, as shown in FIG. 16.

### Example 17—CRISPR/NmCas9 Target Sites for the Angptl3 Gene

[0657] Exons 1-2 of the Angptl3 gene were scanned for target sites. Each area was scanned for a protospacer adjacent motif (PAM) having the sequence NNNNGHTT. gRNA 20 bp spacer sequences corresponding to the PAM were identified, as shown in FIG. 17.

### Example 18—CRISPR/Cpf1 Target Sites for the Angptl3 Gene

[0658] Exons 1-2 of the Angptl3 gene were scanned for target sites. Each area was scanned for a protospacer adjacent motif (PAM) having the sequence YTN. gRNA 22 bp spacer sequences corresponding to the PAM were identified, as shown in FIG. 18.

### Example 19—CRISPR/SpCas9 Target Sites for the ApoC3 Gene

[0659] Exons 1-2 of the ApoC3 gene were scanned for target sites. Each area was scanned for a protospacer adjacent motif (PAM) having the sequence NRG. gRNA 20 bp spacer sequences corresponding to the PAM were identified, as shown in FIG. 19.

### Example 20—CRISPR/SaCas9 Target Sites for the ApoC3 Gene

[0660] Exons 1-2 of the ApoC3 gene were scanned for target sites. Each area was scanned for a protospacer adjacent motif (PAM) having the sequence NNGRRT. gRNA 20 bp spacer sequences corresponding to the PAM were identified, as shown in FIG. 20.

### Example 21—CRISPR/StCas9 Target Sites for the ApoC3 Gene

[0661] Exons 1-2 of the ApoC3 gene were scanned for target sites. Each area was scanned for a protospacer adjacent motif (PAM) having the sequence NNAGAAW. gRNA 20 bp spacer sequences corresponding to the PAM were identified, as shown in FIG. 21.

### Example 22—CRISPR/TdCas9 Target Sites for the ApoC3 Gene

[0662] Exons 1-2 of the ApoC3 gene were scanned for target sites. Each area was scanned for a protospacer adjacent motif (PAM) having the sequence NAAAAC. gRNA 20 bp spacer sequences corresponding to the PAM were identified, as shown in FIG. 22.

### Example 23—CRISPR/NmCas9 Target Sites for the ApoC3 Gene

[0663] Exons 1-2 of the ApoC3 gene were scanned for target sites. Each area was scanned for a protospacer adjacent motif (PAM) having the sequence NNNNGHTT. gRNA 20 bp spacer sequences corresponding to the PAM were identified, as shown in FIG. 23.

### Example 24—CRISPR/Cpf1 Target Sites for the ApoC3 Gene

[0664] Exons 1-2 of the ApoC3 gene were scanned for target sites. Each area was scanned for a protospacer adjacent motif (PAM) having the sequence YTN. gRNA 22 bp spacer sequences corresponding to the PAM were identified, as shown in FIG. 24.

### Example 25—CRISPR/SpCas9 Target Sites for the ASGR2 Gene

[0665] Exons 1-2 of the ASGR2 gene were scanned for target sites. Each area was scanned for a protospacer adjacent motif (PAM) having the sequence NRG. gRNA 20 bp spacer sequences corresponding to the PAM were identified, as shown in FIG. 25.

### Example 26—CRISPR/SaCas9 Target Sites for the ASGR2 Gene

[0666] Exons 1-2 of the ASGR2 gene were scanned for target sites. Each area was scanned for a protospacer adjacent motif (PAM) having the sequence NNGRRT. gRNA 20 bp spacer sequences corresponding to the PAM were identified, as shown in FIG. 26.

### Example 27—CRISPR/StCas9 Target Sites for the ASGR2 Gene

[0667] Exons 1-2 of the ASGR2 gene were scanned for target sites. Each area was scanned for a protospacer adjacent motif (PAM) having the sequence NNAGAAW. gRNA 20 bp spacer sequences corresponding to the PAM were identified, as shown in FIG. 27.

### Example 28—CRISPR/TdCas9 Target Sites for the ASGR2 Gene

[0668] Exons 1-2 of the ASGR2 gene were scanned for target sites. Each area was scanned for a protospacer adjacent motif (PAM) having the sequence NAAAAC. gRNA 20 bp spacer sequences corresponding to the PAM were identified, as shown in FIG. 28.

### Example 29—CRISPR/NmCas9 Target Sites for the ASGR2 Gene

[0669] Exons 1-2 of the ASGR2 gene were scanned for target sites. Each area was scanned for a protospacer adjacent motif (PAM) having the sequence NNNNGHTT. gRNA 20 bp spacer sequences corresponding to the PAM were identified, as shown in FIG. 29.

### Example 30—CRISPR/Cpf1 Target Sites for the ASGR2 Gene

[0670] Exons 1-2 of the ASGR2 gene were scanned for target sites. Each area was scanned for a protospacer adjacent motif (PAM) having the sequence YTN. gRNA 22 bp spacer sequences corresponding to the PAM were identified, as shown in FIG. 30.

### Example 31—CRISPR/SpCas9 Target Sites for the CCR5 Gene

[0671] Exons 1-2 of the CCR5 gene were scanned for target sites. Each area was scanned for a protospacer adjacent motif (PAM) having the sequence NRG. gRNA 20 bp spacer sequences corresponding to the PAM were identified, as shown in FIG. 31.

### Example 32—CRISPR/SaCas9 Target Sites for the CCR5 Gene

[0672] Exons 1-2 of the CCR5 gene were scanned for target sites. Each area was scanned for a protospacer adjacent motif (PAM) having the sequence NNGRRT. gRNA 20 bp spacer sequences corresponding to the PAM were identified, as shown in FIG. 32.

### Example 33—CRISPR/StCas9 Target Sites for the CCR5 Gene

[0673] Exons 1-2 of the CCR5 gene were scanned for target sites. Each area was scanned for a protospacer adjacent motif (PAM) having the sequence NNAGAAW. gRNA 20 bp spacer sequences corresponding to the PAM were identified, as shown in FIG. 33.

### Example 34—CRISPR/TdCas9 Target Sites for the CCR5 Gene

[0674] Exons 1-2 of the CCR5 gene were scanned for target sites. Each area was scanned for a protospacer adjacent motif (PAM) having the sequence NAAAAC. gRNA 20 bp spacer sequences corresponding to the PAM were identified, as shown in FIG. 34.

### Example 35—CRISPR/NmCas9 Target Sites for the CCR5 Gene

[0675] Exons 1-2 of the CCR5 gene were scanned for target sites. Each area was scanned for a protospacer adjacent motif (PAM) having the sequence NNNNGHTT. gRNA 20 bp spacer sequences corresponding to the PAM were identified, as shown in FIG. 35.

### Example 36—CRISPR/Cpf1 Target Sites for the CCR5 Gene

[0676] Exons 1-2 of the CCR5 gene were scanned for target sites. Each area was scanned for a protospacer adjacent motif (PAM) having the sequence YTN. gRNA 22 bp spacer sequences corresponding to the PAM were identified, as shown in FIG. 36.

### Example 37—CRISPR/SpCas9 Target Sites for the FIX (F9) Gene

[0677] Exons 1-2 of the FIX (F9) gene were scanned for target sites. Each area was scanned for a protospacer adjacent motif (PAM) having the sequence NRG. gRNA 20 bp spacer sequences corresponding to the PAM were identified, as shown in FIG. 37.

### Example 38—CRISPR/SaCas9 Target Sites for the FIX (F9) Gene

[0678] Exons 1-2 of the FIX (F9) gene were scanned for target sites. Each area was scanned for a protospacer adjacent motif (PAM) having the sequence NNGRRT. gRNA 20 bp spacer sequences corresponding to the PAM were identified, as shown in FIG. 38.

### Example 39—CRISPR/StCas9 Target Sites for the FIX (F9) Gene

[0679] Exons 1-2 of the FIX (F9) gene were scanned for target sites. Each area was scanned for a protospacer adjacent motif (PAM) having the sequence NNAGAAW. gRNA 20 bp spacer sequences corresponding to the PAM were identified, as shown in FIG. 39.

### Example 40—CRISPR/TdCas9 Target Sites for the FIX (F9) Gene

[0680] Exons 1-2 of the FIX (F9) gene were scanned for target sites. Each area was scanned for a protospacer adjacent motif (PAM) having the sequence NAAAAC. gRNA 20 bp spacer sequences corresponding to the PAM were identified, as shown in FIG. 40.

### Example 41—CRISPR/NmCas9 Target Sites for the FIX (F9) Gene

[0681] Exons 1-2 of the FIX (F9) gene were scanned for target sites. Each area was scanned for a protospacer adjacent motif (PAM) having the sequence NNNNGHTT. gRNA 20 bp spacer sequences corresponding to the PAM were identified, as shown in FIG. 41.

### Example 42—CRISPR/Cpf1 Target Sites for the FIX (F9) Gene

[0682] Exons 1-2 of the FIX (F9) gene were scanned for target sites. Each area was scanned for a protospacer adjacent motif (PAM) having the sequence YTN. gRNA 22 bp spacer sequences corresponding to the PAM were identified, as shown in FIG. 42.

### Example 43—CRISPR/SpCas9 Target Sites for the Gys2 Gene

[0683] Exons 1-2 of the Gys2 gene were scanned for target sites. Each area was scanned for a protospacer adjacent motif (PAM) having the sequence NRG. gRNA 20 bp spacer sequences corresponding to the PAM were identified, as shown in FIG. 43

### Example 44—CRISPR/SaCas9 Target Sites for the Gys2 Gene

[0684] Exons 1-2 of the Gys2 gene were scanned for target sites. Each area was scanned for a protospacer adjacent motif (PAM) having the sequence NNGRRT. gRNA 20 bp spacer sequences corresponding to the PAM were identified, as shown in FIG. 44.

### Example 45—CRISPR/StCas9 Target Sites for the Gys2 Gene

[0685] Exons 1-2 of the Gys2 gene were scanned for target sites. Each area was scanned for a protospacer adjacent motif (PAM) having the sequence NNAGAAW. gRNA 20 bp spacer sequences corresponding to the PAM were identified, as shown in FIG. 45.

### Example 46—CRISPR/TdCas9 Target Sites for the Gys2 Gene

[0686] Exons 1-2 of the Gys2 gene were scanned for target sites. Each area was scanned for a protospacer adjacent motif (PAM) having the sequence NAAAAC. gRNA 20 bp spacer sequences corresponding to the PAM were identified, as shown in FIG. 46.

### Example 47—CRISPR/NmCas9 Target Sites for the Gys2 Gene

[0687] Exons 1-2 of the Gys2 gene were scanned for target sites. Each area was scanned for a protospacer adjacent motif (PAM) having the sequence NNNNGHTT. gRNA 20 bp spacer sequences corresponding to the PAM were identified, as shown in FIG. 47.

### Example 48—CRISPR/Cpf1 Target Sites for the Gys2 Gene

[0688] Exons 1-2 of the Gys2 gene were scanned for target sites. Each area was scanned for a protospacer adjacent motif (PAM) having the sequence YTN. gRNA 22 bp spacer sequences corresponding to the PAM were identified, as shown in FIG. 48.

### Example 49—CRISPR/SpCas9 Target Sites for the HGD Gene

[0689] Exons 1-2 of the HGD gene were scanned for target sites. Each area was scanned for a protospacer adjacent motif (PAM) having the sequence NRG. gRNA 20 bp spacer sequences corresponding to the PAM were identified, as shown in FIG. 49.

### Example 50—CRISPR/SaCas9 Target Sites for the HGD Gene

[0690] Exons 1-2 of the HGD gene were scanned for target sites. Each area was scanned for a protospacer adjacent motif (PAM) having the sequence NNGRRT. gRNA 20 bp spacer sequences corresponding to the PAM were identified, as shown in FIG. 50.

### Example 51—CRISPR/StCas9 Target Sites for the HGD Gene

[0691] Exons 1-2 of the HGD gene were scanned for target sites. Each area was scanned for a protospacer adjacent motif (PAM) having the sequence NNAGAAW. gRNA 20 bp spacer sequences corresponding to the PAM were identified, as shown in FIG. 51.

### Example 52—CRISPR/TdCas9 Target Sites for the HGD Gene

[0692] Exons 1-2 of the HGD gene were scanned for target sites. Each area was scanned for a protospacer adjacent motif (PAM) having the sequence NAAAAC. gRNA 20 bp spacer sequences corresponding to the PAM were identified, as shown in FIG. 52.

### Example 53—CRISPR/NmCas9 Target Sites for the HGD Gene

[0693] Exons 1-2 of the HGD gene were scanned for target sites. Each area was scanned for a protospacer adjacent motif (PAM) having the sequence NNNNGHTT. gRNA 20 bp spacer sequences corresponding to the PAM were identified, as shown in FIG. 53.

### Example 54—CRISPR/Cpf1 Target Sites for the HGD Gene

[0694] Exons 1-2 of the HGD gene were scanned for target sites. Each area was scanned for a protospacer adjacent motif (PAM) having the sequence YTN. gRNA 22 bp spacer sequences corresponding to the PAM were identified, as shown in FIG. 54.

### Example 55—CRISPR/SpCas9 Target Sites for the Lp(a) Gene

[0695] Exons 1-2 of the Lp(a) gene were scanned for target sites. Each area was scanned for a protospacer adjacent motif (PAM) having the sequence NRG. gRNA 20 bp spacer sequences corresponding to the PAM were identified, as shown in FIG. 55.

### Example 56—CRISPR/SaCas9 Target Sites for the Lp(a) Gene

[0696] Exons 1-2 of the Lp(a) gene were scanned for target sites. Each area was scanned for a protospacer adjacent motif (PAM) having the sequence NNGRRT. gRNA 20 bp spacer sequences corresponding to the PAM were identified, as shown in FIG. 56.

### Example 57—CRISPR/StCas9 Target Sites for the Lp(a) Gene

[0697] Exons 1-2 of the Lp(a) gene were scanned for target sites. Each area was scanned for a protospacer adjacent motif (PAM) having the sequence NNAGAAW. gRNA 20 bp spacer sequences corresponding to the PAM were identified, as shown in FIG. 57.

### Example 58—CRISPR/TdCas9 Target Sites for the Lp(a) Gene

[0698] Exons 1-2 of the Lp(a) gene were scanned for target sites. Each area was scanned for a protospacer adjacent motif (PAM) having the sequence NAAAAC. gRNA 20 bp spacer sequences corresponding to the PAM were identified, as shown in FIG. 58.

### Example 59—CRISPR/NmCas9 Target Sites for the Lp(a) Gene

[0699] Exons 1-2 of the Lp(a) gene were scanned for target sites. Each area was scanned for a protospacer adjacent motif (PAM) having the sequence NNNNGHTT. gRNA 20 bp spacer sequences corresponding to the PAM were identified, as shown in FIG. 59.

### Example 60—CRISPR/Cpf1 Target Sites for the Lp(a) Gene

[0700] Exons 1-2 of the Lp(a) gene were scanned for target sites. Each area was scanned for a protospacer adjacent motif (PAM) having the sequence YTN. gRNA 22 bp spacer sequences corresponding to the PAM were identified, as shown in FIG. 60.

### Example 61—CRISPR/SpCas9 Target Sites for the PCSK9 Gene

[0701] Exons 1-2 of the PCSK9 gene were scanned for target sites. Each area was scanned for a protospacer adjacent motif (PAM) having the sequence NRG. gRNA 20 bp spacer sequences corresponding to the PAM were identified, as shown in FIG. 61.

### Example 62—CRISPR/SaCas9 Target Sites for the PCSK9 Gene

[0702] Exons 1-2 of the PCSK9 gene were scanned for target sites. Each area was scanned for a protospacer adjacent motif (PAM) having the sequence NNGRRT. gRNA 20 bp spacer sequences corresponding to the PAM were identified, as shown in FIG. 62.

### Example 63—CRISPR/StCas9 Target Sites for the PCSK9 Gene

[0703] Exons 1-2 of the PCSK9 gene were scanned for target sites. Each area was scanned for a protospacer adjacent motif (PAM) having the sequence NNAGAAW. gRNA 20 bp spacer sequences corresponding to the PAM were identified, as shown in FIG. 63.

### Example 64—CRISPR/TdCas9 Target Sites for the PCSK9 Gene

[0704] Exons 1-2 of the PCSK9 gene were scanned for target sites. Each area was scanned for a protospacer adjacent motif (PAM) having the sequence NAAAAC. gRNA 20 bp spacer sequences corresponding to the PAM were identified, as shown in FIG. 64.

### Example 65—CRISPR/NmCas9 Target Sites for the PCSK9 Gene

[0705] Exons 1-2 of the PCSK9 gene were scanned for target sites. Each area was scanned for a protospacer adjacent motif (PAM) having the sequence NNNNGHTT. gRNA 20 bp spacer sequences corresponding to the PAM were identified, as shown in FIG. 65.

### Example 66—CRISPR/Cpf1 Target Sites for the PCSK9 Gene

[0706] Exons 1-2 of the PCSK9 gene were scanned for target sites. Each area was scanned for a protospacer adjacent motif (PAM) having the sequence YTN. gRNA 22 bp spacer sequences corresponding to the PAM were identified, as shown in FIG. 66.

### Example 67—CRISPR/SpCas9 Target Sites for the Serpina1 Gene

[0707] Exons 1-2 of the Serpina1 gene were scanned for target sites. Each area was scanned for a protospacer adjacent motif (PAM) having the sequence NRG. gRNA 20 bp spacer sequences corresponding to the PAM were identified, as shown in FIG. 67.

### Example 68—CRISPR/SaCas9 Target Sites for the Serpina1 Gene

[0708] Exons 1-2 of the Serpina1 gene were scanned for target sites. Each area was scanned for a protospacer adjacent motif (PAM) having the sequence NNGRRT. gRNA 20 bp spacer sequences corresponding to the PAM were identified, as shown in FIG. 68.

### Example 69—CRISPR/StCas9 Target Sites for the Serpina1 Gene

[0709] Exons 1-2 of the Serpina1 gene were scanned for target sites. Each area was scanned for a protospacer adjacent motif (PAM) having the sequence NNAGAAW. gRNA 20 bp spacer sequences corresponding to the PAM were identified, as shown in FIG. 69.

### Example 70—CRISPR/TdCas9 Target Sites for the Serpina1 Gene

[0710] Exons 1-2 of the Serpina1 gene were scanned for target sites. Each area was scanned for a protospacer adjacent motif (PAM) having the sequence NAAAAC. gRNA 20 bp spacer sequences corresponding to the PAM were identified, as shown in FIG. 70.

### Example 71—CRISPR/NmCas9 Target Sites for the Serpina1 Gene

[0711] Exons 1-2 of the Serpina1 gene were scanned for target sites. Each area was scanned for a protospacer adjacent motif (PAM) having the sequence NNNNGHTT. gRNA 20 bp spacer sequences corresponding to the PAM were identified, as shown in FIG. 71.

### Example 72—CRISPR/Cpf1 Target Sites for the Serpina1 Gene

[0712] Exons 1-2 of the Serpina1 gene were scanned for target sites. Each area was scanned for a protospacer adjacent motif (PAM) having the sequence YTN. gRNA 22 bp spacer sequences corresponding to the PAM were identified, as shown in FIG. 72.

### Example 73—CRISPR/SpCas9 Target Sites for the TF Gene

[0713] Exons 1-2 of the TF gene were scanned for target sites. Each area was scanned for a protospacer adjacent motif (PAM) having the sequence NRG. gRNA 20 bp spacer sequences corresponding to the PAM were identified, as shown in FIG. 73.

### Example 74—CRISPR/SaCas9 Target Sites for the TF Gene

[0714] Exons 1-2 of the TF gene were scanned for target sites. Each area was scanned for a protospacer adjacent motif (PAM) having the sequence NNGRRT. gRNA 20 bp spacer sequences corresponding to the PAM were identified, as shown in FIG. 74.

### Example 75—CRISPR/StCas9 Target Sites for the TF Gene

[0715] Exons 1-2 of the TF gene were scanned for target sites. Each area was scanned for a protospacer adjacent motif (PAM) having the sequence NNAGAAW. gRNA 20 bp spacer sequences corresponding to the PAM were identified, as shown in FIG. 75.

### Example 76—CRISPR/TdCas9 Target Sites for the TF Gene

[0716] Exons 1-2 of the TF gene were scanned for target sites. Each area was scanned for a protospacer adjacent motif (PAM) having the sequence NAAAAC. gRNA 20 bp spacer sequences corresponding to the PAM were identified, as shown in FIG. 76.

### Example 77—CRISPR/NmCas9 Target Sites for the TF Gene

[0717] Exons 1-2 of the TF gene were scanned for target sites. Each area was scanned for a protospacer adjacent motif (PAM) having the sequence NNNNGHTT. gRNA 20 bp spacer sequences corresponding to the PAM were identified, as shown in FIG. 77.

### Example 78—CRISPR/Cpf1 Target Sites for the TF Gene

[0718] Exons 1-2 of the TF gene were scanned for target sites. Each area was scanned for a protospacer adjacent motif (PAM) having the sequence YTN. gRNA 22 bp spacer sequences corresponding to the PAM were identified, as shown in FIG. 78.

### Example 79—CRISPR/SpCas9 Target Sites for the TTR Gene

[0719] Exons 1-2 of the TTR gene were scanned for target sites. Each area was scanned for a protospacer adjacent motif (PAM) having the sequence NRG. gRNA 20 bp spacer sequences corresponding to the PAM were identified, as shown in FIG. 79.

### Example 80—CRISPR/SaCas9 Target Sites for the TTR Gene

[0720] Exons 1-2 of the TTR gene were scanned for target sites. Each area was scanned for a protospacer adjacent motif (PAM) having the sequence NNGRRT. gRNA 20 bp spacer sequences corresponding to the PAM were identified, as shown in FIG. 80.

### Example 81—CRISPR/StCas9 Target Sites for the TTR Gene

[0721] Exons 1-2 of the TTR gene were scanned for target sites. Each area was scanned for a protospacer adjacent motif (PAM) having the sequence NNAGAAW. gRNA 20 bp spacer sequences corresponding to the PAM were identified, as shown in FIG. 81.

### Example 82—CRISPR/TdCas9 Target Sites for the TTR Gene

[0722] Exons 1-2 of the TTR gene were scanned for target sites. Each area was scanned for a protospacer adjacent motif (PAM) having the sequence NAAAAC. gRNA 20 bp spacer sequences corresponding to the PAM were identified, as shown in FIG. 82.

### Example 83—CRISPR/NmCas9 Target Sites for the TTR Gene

[0723] Exons 1-2 of the TTR gene were scanned for target sites. Each area was scanned for a protospacer adjacent motif (PAM) having the sequence NNNNGHTT. gRNA 20 bp spacer sequences corresponding to the PAM were identified, as shown in FIG. 83.

### Example 84—CRISPR/Cpf1 Target Sites for the TTR Gene

[0724] Exons 1-2 of the TTR gene were scanned for target sites. Each area was scanned for a protospacer adjacent motif (PAM) having the sequence YTN. gRNA 22 bp spacer sequences corresponding to the PAM were identified, as shown in FIG. 84.

### Example 85—CRISPR/SpCas9 Target Sites for the G6PC Gene

[0725] Regions of the G6PC gene were scanned for target sites. Each area was scanned for a protospacer adjacent motif (PAM) having the sequence NRG. gRNA 20 bp spacer sequences corresponding to the PAM were identified, as shown in FIG. 85.

### Example 86—CRISPR/SaCas9 Target Sites for the G6PC Gene

[0726] Regions of the G6PC gene were scanned for target sites. Each area was scanned for a protospacer adjacent motif (PAM) having the sequence NNGRRT. gRNA 20 bp spacer sequences corresponding to the PAM were identified, as shown in FIG. 86.

### Example 87—CRISPR/StCas9 Target Sites for the G6PC Gene

[0727] Regions of the G6PC gene were scanned for target sites. Each area was scanned for a protospacer adjacent motif (PAM) having the sequence NNAGAAW. gRNA 20 bp spacer sequences corresponding to the PAM were identified, as shown in FIG. 87.

### Example 88—CRISPR/TdCas9 Target Sites for the G6PC Gene

[0728] Regions of the G6PC gene were scanned for target sites. Each area was scanned for a protospacer adjacent motif (PAM) having the sequence NAAAAC. gRNA 20 bp spacer sequences corresponding to the PAM were identified, as shown in FIG. 88.

### Example 89—CRISPR/NmCas9 Target Sites for the G6PC Gene

[0729] Regions of the G6PC gene were scanned for target sites. Each area was scanned for a protospacer adjacent motif (PAM) having the sequence NNNNGHTT. gRNA 20 bp spacer sequences corresponding to the PAM were identified, as shown in FIG. 89.

### Example 90—CRISPR/Cpf1 Target Sites for the G6PC Gene

[0730] Regions of the G6PC gene were scanned for target sites. Each area was scanned for a protospacer adjacent motif (PAM) having the sequence YTN. gRNA 22 bp spacer sequences corresponding to the PAM were identified, as shown in FIG. 90.

### Example 91—Bioinformatics Analysis of the Guide Strands

[0731] Candidate guides will be screened and selected in a multi-step process that involves both theoretical binding and experimentally assessed activity. By way of illustration, candidate guides having sequences that match a particular on-target site, such as a site within the G6PC gene, with adjacent PAM can be assessed for their potential to cleave at off-target sites having similar sequences, using one or more of a variety of bioinformatics tools available for assessing off-target binding, as described and illustrated in more detail below, in order to assess the likelihood of effects at chromosomal positions other than those intended. Candidates predicted to have relatively lower potential for off-target activity can then be assessed experimentally to measure their on-target activity, and then off-target activities at various sites. Preferred guides have sufficiently high on-target activity to achieve desired levels of gene editing at the selected locus, and relatively lower off-target activity to reduce the likelihood of alterations at other chromosomal loci. The ratio of on-target to off-target activity is often referred to as the “specificity” of a guide.

[0732] For initial screening of predicted off-target activities, there are a number of bioinformatics tools known and publicly available that can be used to predict the most likely off-target sites; and since binding to target sites in the CRISPR/Cas9/Cpf1 nuclease system is driven by Watson-Crick base pairing between complementary sequences, the degree of dissimilarity (and therefore reduced potential for off-target binding) is essentially related to primary sequence differences: mismatches and bulges, i.e. bases that are changed to a non-complementary base, and insertions or deletions of bases in the potential off-target site relative to the target site. An exemplary bioinformatics tool called COSMID (CRISPR Off-target Sites with Mismatches, Insertions and Deletions) (available on the web at crispr.bme.gatech.edu) compiles such similarities. Other bioinformatics tools include, but are not limited to, GUIDO, autoCOSMID, and CCtop.

[0733] Bioinformatics were used to minimize off-target cleavage in order to reduce the detrimental effects of mutations and chromosomal rearrangements. Studies on CRISPR/Cas9 systems suggested the possibility of high off-target activity due to nonspecific hybridization of the guide strand to DNA sequences with base pair mismatches and/or bulges, particularly at positions distal from the PAM region. Therefore, it is important to have a bioinformatics tool that can identify potential off-target sites that have insertions and/or deletions between the RNA guide strand and genomic sequences, in addition to base-pair mismatches. The bioinformatics-based tool, COSMID (CRISPR Off-target Sites with Mismatches, Insertions and Deletions) was therefore used to search genomes for potential CRISPR off-target sites (available on the web at crispr.bme.gatech.edu). COSMID output ranked lists of the potential off-target sites based on the number and location of mismatches, allowing more informed choice of target sites, and avoiding the use of sites with more likely off-target cleavage.

[0734] Additional bioinformatics pipelines were employed that weigh the estimated on- and/or off-target activity of gRNA targeting sites in a region. Other features that may be used to predict activity include information about the cell type in question, DNA accessibility, chromatin state, transcription factor binding sites, transcription factor binding data, and other CHIP-seq data. Additional factors are weighed that predict editing efficiency, such as relative positions and directions of pairs of gRNAs, local sequence features and micro-homologies.

### Example 92—Testing of Preferred Guides in Cells for On-Target Activity

[0735] The gRNAs predicted to have the lowest off target activity will then be tested for on-target activity in a model cell line, such as Huh-7 cells and evaluated for indel frequency using TIDE or next generation sequencing. TIDE is a web tool to rapidly assess genome editing by CRISPR-Cas9 of a target locus determined by a guide RNA (gRNA or sgRNA). Based on the quantitative sequence trace data from two standard capillary sequencing reactions, the TIDE software quantifies the editing efficacy and identifies the predominant types of insertions and deletions (indels) in the DNA of a targeted cell pool. See Brinkman et al, Nucl. Acids Res. (2014) for a detailed explanation and examples. Next-generation sequencing (NGS), also known as high-throughput sequencing, is the catch-all term used to describe a number of different modern sequencing technologies including: Illumina (Solexa) sequencing, Roche 454 sequencing, Ion torrent: Proton/PGM sequencing, and SOLID sequencing. These recent technologies allow one to sequence DNA and RNA much more quickly and cheaply than the previously used Sanger sequencing, and as such have revolutionized the study of genomics and molecular biology.

[0736] Transfection of tissue culture cells, allows screening of different constructs and a robust means of testing activity and specificity. Tissue culture cell lines, such as Huh-7 cells, are easily transfected and result in high activity. These or other cell lines will be evaluated to determine the cell lines that provide the best surrogate. These cells will then be used for many early stage tests. For example, individual gRNAs for S. pyogenes Cas9 will be transfected into the cells using plasmids, such as, for example, CTx-1, CTx-2, or CTx-3 described in FIG. 92A-92C, which are suitable for expression in human cells. Several days later, the genomic DNA is harvested and the target site amplified by PCR. The cutting activity can be measured by the rate of insertions, deletions and mutations introduced by NHEJ repair of the free DNA ends. Although this method cannot differentiate correctly repaired sequences from uncleaved DNA, the level of cutting can be gauged by the amount of mis-repair. Off-target activity can be observed by amplifying identified putative off-target sites and using similar methods to detect cleavage. Translocation can also be assayed using primers flanking cut sites, to determine if specific cutting and translocations happen. Un-guided assays have been developed allowing complementary testing of off-target cleavage including guide-seq. The gRNA or pairs of gRNA with significant activity can then be followed up in cultured cells to measure correction of G6PC mutation. Off-target events can be followed again. These experiments allow optimization of nuclease and donor design and delivery.

### Example 93—Testing of Preferred Guides in Cells for Off-Target Activity

[0737] The gRNAs having the best on-target activity from the TIDE and next generation sequencing studies in the above example will then be tested for off-target activity using whole genome sequencing.

### Example 94—Testing Different Approaches for HDR Gene Editing

[0738] After testing the gRNAs for both on-target activity and off-target activity, the mutation correction and knock-in strategies will be tested for HDR gene editing.

[0739] For the mutation correction approach, the donor DNA template will be provided as a short single-stranded oligonucleotide, a short double-stranded oligonucleotide (PAM sequence intact/PAM sequence mutated), a long single-stranded DNA molecule (PAM sequence intact/PAM sequence mutated) or a long double-stranded DNA molecule (PAM sequence intact/PAM sequence mutated). In addition, the donor DNA template will be delivered by AAV.

[0740] For the cDNA knock-in approach, a single-stranded or double-stranded DNA having homologous arms to the 17q21 region may include more than 40 nt of the first exon (the first coding exon) of the G6PC gene, the complete CDS of the G6PC gene and 3′UTR of the G6PC gene, and at least 40 nt of the following intron. The single-stranded or double-stranded DNA having homologous arms to the 17q21 region, which includes more than 80 nt of the first exon of the G6PC gene, the complete CDS of the G6PC gene and 3′UTR of the G6PC gene, and at least 80 nt of the following intron. The single-stranded or double-stranded DNA having homologous arms to the 17q21 region may include more than 100 nt of the first exon of the G6PC gene, the complete CDS of the G6PC gene and 3′UTR of the G6PC gene, and at least 100 nt of the following intron. The single-stranded or double-stranded DNA having homologous arms to the 17q21 region may include more than 150 nt of the first exon of the G6PC gene, the complete CDS of the G6PC gene and 3′UTR of the G6PC gene, and at least 150 nt of the following intron. The single-stranded or double-stranded DNA having homologous arms to the 17q21 region may include more than 300 nt of the first exon of the G6PC gene, the complete CDS of the G6PC gene and 3′UTR of the G6PC gene, and at least 300 nt of the following intron. The single-stranded or double-stranded DNA having homologous arms to the 17q21 region may include more than 400 nt of the first exon of the G6PC gene, the complete CDS of the G6PC gene and 3′UTR of the G6PC gene, and at least 400 nt of the following the first intron. Alternatively, the DNA template will be delivered by AAV.

[0741] Next, the efficiency of HDR mediated correction of the common mutation of G6PC R83 and knock-in of cDNA into the 1st exon will be assessed.

### Example 95—Re-Assessment of Lead CRISPR-Cas9/DNA Donor Combinations

[0742] After testing the different strategies for HDR gene editing, the lead CRISPR-Cas9/DNA donor combinations will be re-assessed in primary human hepatocytes for efficiency of deletion, recombination, and off-target specificity. Cas9 mRNA or RNP will be formulated into lipid nanoparticles for delivery, sgRNAs will be formulated into nanoparticles or delivered as AAV, and donor DNA will be formulated into nanoparticles or delivered as AAV.

### Example 96—In Vivo Testing in Relevant Mouse Model

[0743] After the CRISPR-Cas9/DNA donor combinations have been re-assessed, the lead formulations will be tested in vivo in an animal model. Suitable animal models include, by way of non-limiting example a FGR mouse model with the livers repopulated with human hepatocytes or iPSC derived hepatocytes (normal or G6PC deficient).

[0744] Culture in human cells allows direct testing on the human target and the background human genome, as described above.

[0745] Preclinical efficacy and safety evaluations can be observed through engraftment of modified mouse or human hepatocytes in FGR mice. The modified cells can be observed in the months after engraftment.

### Example 97—Screening of gRNAs

[0746] The G6PC region (chr17:42,897,797-42,917,433) was used to design 20-nt recognition sites using the CCTOP protocol (Stemmer, M., Thumberger, T., del Sol Keyer, M., Wittbrodt, J. and Mateo, J. L. CCTop: an intuitive, flexible and reliable CRISPR/Cas9 target prediction tool. PLOS ONE (2015). doi: 10.1371/journal.pone.0124633) to design gRNA targeting various regions of the gene. The gRNAs with lowest off-target scores targeting Exon 1, Exon 2 and 5′end of Exon 5 were purchased from Integrated DNA Technologies in the format of Alt-R™ CRISPR crRNA. crRNAs were annealed with tracerRNA in the equimolar ratio (incubation at 70° C., 2 min, and 20° C. for 20 min, and keep at 4° C.). The activity of the gRNAs was tested in HuH7 cells constitutively expressing the Cas9 (transduced by lentivirus), FIGS. 94A-94C. 10K cells per well (96-well plate) were plated, and transfected in 16-18 h after plating, briefly, gRNAs were incubated with lipofectamine RNAiMAX according to the manufacturer's protocol, final concentration 25 nM. Cells were incubated with gRNA-lipofectamine complexes for 16-96 h in the complete media comprising DMEM, supplemented by 10% FBS. Cells were lysed in prepGEM (ZyGem) according to the manufacture protocol.

[0747] Efficiency of the gRNA was analyzed by Tracking of Indels by Decomposition(TIDE) analysis (Brinkman E K, Chen T, Amendola M, van Steensel B. Easy quantitative assessment of genome editing by sequence trace decomposition. Nucleic Acids Res. 2014 Dec. 16; 42(22):e168. doi: 10.1093/nar/gku936), briefly, genomic DNA was used as a template for PCR using KAPA HiFi PCR Kit using the following primers (Table 3).

TABLE 3
gRNA sequences and activity in Huh7-Cas9

| Exon | guide | gRNA sequence | Forward | Reverse | Sequencing | | |
|---|---|---|---|---|---|---|---|
| # | ID | (SEQ ID NO) | TIDE primer | TIDE primer | Primer | Eff. | SD |
| 1 | CH01 | TGTCCGTGAT | ATTGGCCCTG | ATAGCCTGGG | ATAGCCTGGG | 6.1 | 2.5 |
| | | CGCAGACCTC | CTGAGTACAT | GAAAGCAACT | GAAAGCAACT | | |
| | | (52,943) | (64,792) | (64,795) | (64,795) | | |
| 1 | CH02 | AGAGCCCTTG | ATTGGCCCTG | ATAGCCTGGG | ATAGCCTGGG | 32.9 | 2.7 |
| | | CAGTTATTCC | CTGAGTACAT | GAAAGCAACT | GAAAGCAACT | | |
| | | (57,319) | (64,792) | (64,795) | (64,795) | | |
| 1 | CH03 | CCTGGAGGTA | ATTGGCCCTG | ATAGCCTGGG | ATAGCCTGGG | 44.8 | 0.0 |
| | | ATGTGTTGAC | CTGAGTACAT | GAAAGCAACT | GAAAGCAACT | | |
| | | (57,306) | (64,792) | (64,795) | (64,795) | | |
| 1 | CH04 | CCAGTCAACA | ATTGGCCCTG | ATAGCCTGGG | ATAGCCTGGG | 68.2 | 2.2 |
| | | CATTACCTCC | CTGAGTACAT | GAAAGCAACT | GAAAGCAACT | | |
| | | (52,935) | (64,792) | (64,795) | (64,795) | | |
| 1 | CH05 | AGTCTTGGTA | ATTGGCCCTG | ATAGCCTGGG | ATAGCCTGGG | 52.2 | 4.4 |
| | | ATTCACCTGG | CTGAGTACAT | GAAAGCAACT | GAAAGCAACT | | |
| | | (57,305) | (64,792) | (64,795) | (64,795) | | |
| 1 | CH06 | GGGAGTCTTG | ATTGGCCCTG | ATAGCCTGGG | ATAGCCTGGG | 6.2 | 0.6 |
| | | GTAATTCACC | CTGAGTACAT | GAAAGCAACT | GAAAGCAACT | | |
| | | (57,303) | (64,792) | (64,795) | (64,795) | | |
| 1 | CH07 | GGTGAATTAC | ATTGGCCCTG | ATAGCCTGGG | ATAGCCTGGG | 45.0 | 7.2 |
| | | CAAGACTCCC | CTGAGTACAT | GAAAGCAACT | GAAAGCAACT | | |
| | | (52,938) | (64,792) | (64,795) | (64,795) | | |
| 1 | CH08 | CTCCCAGGAC | ATTGGCCCTG | ATAGCCTGGG | ATAGCCTGGG | 55.5 | 1.1 |
| | | TGGTTCATCT | CTGAGTACAT | GAAAGCAACT | GAAAGCAACT | | |
| | | (52,940) | (64,792) | (64,795) | (64,795) | | |
| 1 | CH09 | CACCAAGATG | ATTGGCCCTG | ATAGCCTGGG | ATAGCCTGGG | 10.7 | 1.6 |
| | | AACCAGTCCT | CTGAGTACAT | GAAAGCAACT | GAAAGCAACT | | |
| | | (57,300) | (64,792) | (64,795) | (64,795) | | |
| 1 | CH10 | ATTCCTGAGG | ATTGGCCCTG | ATAGCCTGGG | ATAGCCTGGG | 34.9 | 2.3 |
| | | TCTGCGATCA | CTGAGTACAT | GAAAGCAACT | GAAAGCAACT | | |
| | | (57,296) | (64,792) | (64,795) | (64,795) | | |
| 1 | CH11 | TGTGGGCATT | ATTGGCCCTG | ATAGCCTGGG | ATAGCCTGGG | 66.3 | 0.0 |
| | | AAACTCCTTT | CTGAGTACAT | GAAAGCAACT | GAAAGCAACT | | |
| | | (52,951) | (64,792) | (64,795) | (64,795) | | |
| 1 | CH12 | GGGCATATAA | ATTGGCCCTG | ATAGCCTGGG | ATAGCCTGGG | 20.9 | 1.5 |
| | | AACAGGGGCA | CTGAGTACAT | GAAAGCAACT | GAAAGCAACT | | |
| | | (52,910) | (64,792) | (64,795) | (64,795) | | |
| 1 | CH13 | TGCAGTTATT | ATTGGCCCTG | ATAGCCTGGG | ATAGCCTGGG | 29.7 | 11.8 |
| | | CCAGGCTTGG | CTGAGTACAT | GAAAGCAACT | GAAAGCAACT | | |
| | | (57,321) | (64,792) | (64,795) | (64,795) | | |
| 1 | CH14 | CCAAGCCTGG | ATTGGCCCTG | ATAGCCTGGG | ATAGCCTGGG | 68.7 | 0.0 |
| | | AATAACTGCA | CTGAGTACAT | GAAAGCAACT | GAAAGCAACT | | |
| | | (52,918) | (64,792) | (64,795) | (64,795) | | |
| 1 | CH15 | CCTTGCAGTT | ATTGGCCCTG | ATAGCCTGGG | ATAGCCTGGG | 34.0 | 0.0 |
| | | ATTCCAGGCT | CTGAGTACAT | GAAAGCAACT | GAAAGCAACT | | |
| | | (57,320) | (64,792) | (64,795) | (64,795) | | |
| 1 | CH16 | CAAGCCTGGA | ATTGGCCCTG | ATAGCCTGGG | ATAGCCTGGG | 60.2 | 1.5 |
| | | ATAACTGCAA | CTGAGTACAT | GAAAGCAACT | GAAAGCAACT | | |
| | | (52,919) | (64,792) | (64,795) | (64,795) | | |
| 1 | CH17 | GACATCTTCC | ATTGGCCCTG | ATAGCCTGGG | ATAGCCTGGG | 35.5 | 2.7 |
| | | TGAGGTGCCA | CTGAGTACAT | GAAAGCAACT | GAAAGCAACT | | |
| | | (52,923) | (64,792) | (64,795) | (64,795) | | |
| 1 | CH18 | CCTCATTTCC | ATTGGCCCTG | ATAGCCTGGG | ATAGCCTGGG | 24.8 | 1.0 |
| | | TTGGCACCTC | CTGAGTACAT | GAAAGCAACT | GAAAGCAACT | | |
| | | (57,312) | (64,792) | (64,795) | (64,795) | | |
| 1 | CH19 | TTGACTGGAT | ATTGGCCCTG | ATAGCCTGGG | ATAGCCTGGG | 43.7 | 0.0 |
| | | CCCAAAGTCA | CTGAGTACAT | GAAAGCAACT | GAAAGCAACT | | |
| | | (57,308) | (64,792) | (64,795) | (64,795) | | |
| 1 | CH20 | ATTACCAAGA | ATTGGCCCTG | ATAGCCTGGG | ATAGCCTGGG | 28.7 | 4.0 |
| | | CTCCCAGGAC | CTGAGTACAT | GAAAGCAACT | GAAAGCAACT | | |
| | | (52,939) | (64,792) | (64,795) | (64,795) | | |
| 1 | CH21 | TGAACCAGTC | ATTGGCCCTG | ATAGCCTGGG | ATAGCCTGGG | 9.2 | 2.7 |
| | | CTGGGAGTCT | CTGAGTACAT | GAAAGCAACT | GAAAGCAACT | | |
| | | (57,302) | (64,792) | (64,795) | (64,795) | | |
| 1 | CH22 | ACACCAAGAT | ATTGGCCCTG | ATAGCCTGGG | ATAGCCTGGG | 20.0 | 5.5 |
| | | GAACCAGTCC | CTGAGTACAT | GAAAGCAACT | GAAAGCAACT | | |
| | | (57,299) | (64,792) | (64,795) | (64,795) | | |
| 1 | CH23 | GGACGTAGAA | ATTGGCCCTG | ATAGCCTGGG | ATAGCCTGGG | 55.9 | 0.4 |
| | | GGCATTCCTG | CTGAGTACAT | GAAAGCAACT | GAAAGCAACT | | |
| | | (57,295) | (64,792) | (64,795) | (64,795) | | |
| 1 | CH24 | TCTACGTCCT | ATTGGCCCTG | ATAGCCTGGG | ATAGCCTGGG | 16.6 | 5.6 |
| | | CTTCCCCATC | CTGAGTACAT | GAAAGCAACT | GAAAGCAACT | | |
| | | (52,944) | (64,792) | (64,795) | (64,795) | | |
| 1 | CH25 | GGCTCAACCT | ATTGGCCCTG | ATAGCCTGGG | ATAGCCTGGG | 13.9 | 6.5 |
| | | CGTCTTTAAG | CTGAGTACAT | GAAAGCAACT | GAAAGCAACT | | |
| | | (52,957) | (64,792) | (64,795) | (64,795) | | |
| 1 | CH26 | GTTCTTACCA | ATTGGCCCTG | ATAGCCTGGG | ATAGCCTGGG | 19.3 | 2.1 |
| | | CTTAAAGACG | CTGAGTACAT | GAAAGCAACT | GAAAGCAACT | | |
| | | (57,274) | (64,792) | (64,795) | (64,795) | | |
| 1 | CH27 | GTGGTAAGAA | ATTGGCCCTG | ATAGCCTGGG | ATAGCCTGGG | 57.4 | 3.6 |
| | | CCATATAGAG | CTGAGTACAT | GAAAGCAACT | GAAAGCAACT | | |
| | | (52,962) | (64,792) | (64,795) | (64,795) | | |
| 2 | CH28 | T̅C̅A̅G̅G̅C̅T̅A̅C̅A̅ | cccaggaggtag | agagagggcaa | agagagggcaa | 34.3 | 9.2 |
| | | C̅T̅C̅T̅T̅C̅T̅T̅G̅A̅ | aggtcacaatga | gggattggacg | gggattggacg | | |
| | | (53,360) | (64,793) | (64,835) | (64,835) | | |
| 2 | CH29 | TACACTCTTC | cccaggaggtag | agagagggcaa | agagagggcaa | 35.7 | 20.9 |
| | | TTGAAGGTGT | aggtcacaatga | gggattggacg | gggattggacg | | |
| | | (53,362) | (64,793) | (64,835) | (64,835) | | |
| 2 | CH30 | TTCTTGAAGG | cccaggaggtag | agagagggcaa | agagagggcaa | 11.3 | 1.5 |
| | | TGTAGGCTTT | aggtcacaatga | gggattggacg | gggattggacg | | |
| | | (53,364) | (64,793) | (64,835) | (64,835) | | |
| 2 | CH31 | GCTGTCCAAA | cccaggaggtag | agagagggcaa | agagagggcaa | 56.2 | 14.4 |
| | | GAGAATCCTA | aggtcacaatga | gggattggacg | gggattggacg | | |
| | | (56,893) | (64,793) | (64,835) | (64,835) | | |
| 2 | CH32 | TCTTTGGACA | cccaggaggtag | agagagggcaa | agagagggcaa | 46.0 | 36.6 |
| | | GCGTCCATAC | aggtcacaatga | gggattggacg | gggattggacg | | |
| | | (53,372) | (64,793) | (64,835) | (64,835) | | |
| 2 | CH33 | TTGGACAGCG | cccaggaggtag | agagagggcaa | agagagggcaa | 29.7 | 26.5 |
| | | TCCATACTGG | aggtcacaatga | gggattggacg | gggattggacg | | |
| | | (53,373) | (64,793) | (64,835) | (64,835) | | |
| 2 | CH34 | TGGACAGCGT | cccaggaggtag | agagagggcaa | agagagggcaa | 63.6 | 14.0 |
| | | CCATACTGGT | aggtcacaatga | gggattggacg | gggattggacg | | |
| | | (53,374) | (64,793) | (64,835) | (64,835) | | |
| 2 | CH35 | GCGTCCATAC | cccaggaggtag | agagagggcaa | agagagggcaa | 16.5 | 14.5 |
| | | TGGTGGGTTT | aggtcacaatga | gggattggacg | gggattggacg | | |
| | | (53,375) | (64,793) | (64,835) | (64,835) | | |
| 2 | CH36 | GTATCCAAAA | cccaggaggtag | agagagggcaa | agagagggcaa | 63.6 | 11.3 |
| | | CCCACCAGTA | aggtcacaatga | gggattggacg | gggattggacg | | |
| | | (56,890) | (64,793) | (64,835) | (64,835) | | |
| 2 | CH37 | GAACTGCTTT | cccaggaggtag | agagagggcaa | agagagggcaa | 9.7 | 5.6 |
| | | ATCAGGGGCA | aggtcacaatga | gggattggacg | gggattggacg | | |
| | | (56,884) | (64,793) | (64,835) | (64,835) | | |
| 2 | CH38 | ACAGGGAACT | cccaggaggtag | agagagggcaa | agagagggcaa | 75.5 | 7.3 |
| | | GCTTTATCAG | aggtcacaatga | gggattggacg | gggattggacg | | |
| | | (56,883) | (64,793) | (64,835) | (64,835) | | |
| 2 | CH39 | TACAGGGAAC | cccaggaggtag | agagagggcaa | agagagggcaa | 23.0 | 11.2 |
| | | TGCTTTATCA | aggtcacaatga | gggattggacg | gggattggacg | | |
| | | (56,882) | (64,793) | (64,835) | (64,835) | | |
| 2 | CH40 | TTACAGGGAA | cccaggaggtag | agagagggcaa | agagagggcaa | 36.3 | 16.8 |
| | | CTGCTTTATC | aggtcacaatga | gggattggacg | gggattggacg | | |
| | | (56,881) | (64,793) | (64,835) | (64,835) | | |
| 2 | CH41 | TTCCCTGTAA | cccaggaggtag | agagagggcaa | agagagggcaa | 42.9 | 26.4 |
| | | CCTGTGAGAC | aggtcacaatga | gggattggacg | gggattggacg | | |
| | | (53,380) | (64,793) | (64,835) | (64,835) | | |
| 2 | CH42 | GTCCAGTCTC | cccaggaggtag | agagagggcaa | agagagggcaa | 73.9 | 16.1 |
| | | ACAGGTTACA | aggtcacaatga | gggattggacg | gggattggacg | | |
| | | (56,879) | (64,793) | (64,835) | (64,835) | | |
| 2 | CH43 | GGTCCAGTCT | cccaggaggtag | agagagggcaa | agagagggcaa | 54.3 | 19.1 |
| | | CACAGGTTAC | aggtcacaatga | gggattggacg | gggattggacg | | |
| | | (56,878) | (64,793) | (64,835) | (64,835) | | |
| 2 | CH44 | GTAACCTGTG | cccaggaggtag | agagagggcaa | agagagggcaa | 49.3 | 5.7 |
| | | AGACTGGACC | aggtcacaatga | gggattggacg | gggattggacg | | |
| | | (53,382) | (64,793) | (64,835) | (64,835) | | |
| 2 | CH45 | CTTACCTGGT | cccaggaggtag | agagagggcaa | agagagggcaa | 60.9 | 14.3 |
| | | CCAGTCTCAC | aggtcacaatga | gggattggacg | gggattggacg | | |
| | | (56,876) | (64,793) | (64,835) | (64,835) | | |
| 2 | CH46 | CAGGGGCTGG | cccaggaggtag | agagagggcaa | agagagggcaa | 29.2 | 23.5 |
| | | GACGCTTACC | aggtcacaatga | gggattggacg | gggattggacg | | |
| | | (56,873) | (64,793) | (64,835) | (64,835) | | |
| 2 | CH47 | TGGACCTCGT | cccaggaggtag | agagagggcaa | agagagggcaa | 38.9 | 26.3 |
| | | TTACCTGTTA | aggtcacaatga | gggattggacg | gggattggacg | | |
| | | (59,984) | (64,793) | (64,835) | (64,835) | | |
| 2 | CH48 | TCATCCATAA | cccaggaggtag | agagagggcaa | agagagggcaa | 44.1 | 12.3 |
| | | CAGGTAAACG | aggtcacaatga | gggattggacg | gggattggacg | | |
| | | (56,865) | (64,793) | (64,835) | (64,835) | | |
| 2 | CH49 | AGGTCAGTTT | cccaggaggtag | agagagggcaa | agagagggcaa | 39.5 | 18.2 |
| | | CATCCATAAC | aggtcacaatga | gggattggacg | gggattggacg | | |
| | | (56,863) | (64,793) | (64,835) | (64,835) | | |
| 2 | CH50 | TATGGATGAA | cccaggaggtag | agagagggcaa | agagagggcaa | 24.9 | 16.7 |
| | | ACTGACCTTG | aggtcacaatga | gggattggacg | gggattggacg | | |
| | | (53,392) | (64,793) | (64,835) | (64,835) | | |
| 2 | CH51 | CCTGAATAGC | cccaggaggtag | agagagggcaa | agagagggcaa | 21.8 | 12.9 |
| | | ACAGTAGTAT | aggtcacaatga | gggattggacg | gggattggacg | | |
| | | (53,403) | (64,793) | (64,835) | (64,835) | | |
| 2 | CH79 | TTTCACATGT | cccaggaggtag | agagagggcaa | agagagggcaa | 60.1 | 4.1 |
| | | TGCCTCTAGA | aggtcacaatga | gggattggacg | gggattggacg | | |
| | | (56,909) | (64,793) | (64,835) | (64,835) | | |
| 2 | CH80 | CAACATGTGA | cccaggaggtag | agagagggcaa | agagagggcaa | 65.1 | 4.1 |
| | | AATCCTTCTC | aggtcacaatga | gggattggacg | gggattggacg | | |
| | | (53,358) | (64,793) | (64,835) | (64,835) | | |
| 2 | CH81 | AAGAAGAGTG | cccaggaggtag | agagagggcaa | agagagggcaa | 5.7 | 0.7 |
| | | TAGCCTGAGA | aggtcacaatga | gggattggacg | gggattggacg | | |
| | | (56,906) | (64,793) | (64,835) | (64,835) | | |
| 2 | CH82 | CTTCTTGAAG | cccaggaggtag | agagagggcaa | agagagggcaa | 16.5 | 3.1 |
| | | GTGTAGGCTT | aggtcacaatga | gggattggacg | gggattggacg | | |
| | | (53,363) | (64,793) | (64,835) | (64,835) | | |
| 2 | CH83 | AAAAACAGAA | cccaggaggtag | agagagggcaa | agagagggcaa | 57.4 | 3.6 |
| | | CAAGTTTCTG | aggtcacaatga | gggattggacg | gggattggacg | | |
| | | (56,898) | (64,793) | (64,835) | (64,835) | | |
| 2 | CH84 | GAAAAACAGA | cccaggaggtag | agagagggcaa | agagagggcaa | 7.2 | 1.0 |
| | | ACAAGTTTCT | aggtcacaatga | gggattggacg | gggattggacg | | |
| | | (56,897) | (64,793) | (64,835) | (64,835) | | |
| 2 | CH85 | AACTTGTTCT | cccaggaggtag | agagagggcaa | agagagggcaa | 42.3 | 3.8 |
| | | GTTTTTCCAT | aggtcacaatga | gggattggacg | gggattggacg | | |
| | | (53,369) | (64,793) | (64,835) | (64,835) | | |
| 2 | CH86 | TTTTTCCATA | cccaggaggtag | agagagggcaa | agagagggcaa | 51.7 | 1.6 |
| | | GGATTCTCTT | aggtcacaatga | gggattggacg | gggattggacg | | |
| | | (53,370) | (64,793) | (64,835) | (64,835) | | |
| 2 | CH87 | GCTCTCCTCA | cccaggaggtag | agagagggcaa | agagagggcaa | 36.0 | 3.2 |
| | | TGTCCCCTCA | aggtcacaatga | gggattggacg | gggattggacg | | |
| | | (56,860) | (64,793) | (64,835) | (64,835) | | |
| 5 | CH52 | ACTTCTTGTG | AACCTGGGC | AGAGGACCAC | TGTAAAAGAGG | 5.1 | 3.0 |
| | | CGGCTGGCCC | ACGCTCTTT | CTGAGCTGAC | ACCACCTGAGC | | |
| | | (55,848) | (64,794) | (64,796) | (64,797) | | |
| 5 | CH53 | ACAACGACTT | AACCTGGGC | AGAGGACCAC | TGTAAAAGAGG | 2.4 | 0.9 |
| | | CTTGTGCGGC | ACGCTCTTT | CTGAGCTGAC | ACCACCTGAGC | | |
| | | (55,846) | (64,794) | (64,796) | (64,797) | | |
| 5 | CH54 | TCTTACAACG | AACCTGGGC | AGAGGACCAC | TGTAAAAGAGG | 44.3 | 15.8 |
| | | ACTTCTTGTG | ACGCTCTTT | CTGAGCTGAC | ACCACCTGAGC | | |
| | | (55,845) | (64,794) | (64,796) | (64,797) | | |
| 5 | KB55 | ACCCCCATCC | AACCTGGGC | AGAGGACCAC | TGTAAAAGAGG | 13.1 | 0.7 |
| | | CAAGTCGAGC | ACGCTCTTT | CTGAGCTGAC | ACCACCTGAGC | | |
| | | (54,506) | (64,794) | (64,796) | (64,797) | | |
| 5 | KB56 | ACCAGCTCGA | AACCTGGGC | AGAGGACCAC | TGTAAAAGAGG | 17.2 | 2.8 |
| | | CTTGGGATGG | ACGCTCTTT | CTGAGCTGAC | ACCACCTGAGC | | |
| | | (55,875) | (64,794) | (64,796) | (64,797) | | |
| 5 | KB57 | GACCAGCTCG | AACCTGGGC | AGAGGACCAC | TGTAAAAGAGG | 13.4 | 4.8 |
| | | ACTTGGGATG | ACGCTCTTT | CTGAGCTGAC | ACCACCTGAGC | | |
| | | (55,874) | (64,794) | (64,796) | (64,797) | | |
| 5 | KB58 | AGACCAGCTC | AACCTGGGC | AGAGGACCAC | TGTAAAAGAGG | 11.4 | 3.7 |
| | | GACTTGGGAT | ACGCTCTTT | CTGAGCTGAC | ACCACCTGAGC | | |
| | | (55,873) | (64,794) | (64,796) | (64,797) | | |
| 5 | KB59 | AAGACCAGCT | AACCTGGGC | AGAGGACCAC | TGTAAAAGAGG | 11.1 | 3.0 |
| | | CGACTTGGGA | ACGCTCTTT | CTGAGCTGAC | ACCACCTGAGC | | |
| | | (55,872) | (64,794) | (64,796) | (64,797) | | |
| 5 | KB60 | GTAGAAGACC | AACCTGGGC | AGAGGACCAC | TGTAAAAGAGG | 3.5 | 1.7 |
| | | AGCTCGACTT | ACGCTCTTT | CTGAGCTGAC | ACCACCTGAGC | | |
| | | (55,871) | (64,794) | (64,796) | (64,797) | | |
| 5 | KB61 | CGTAGAAGAC | AACCTGGGC | AGAGGACCAC | TGTAAAAGAGG | 2.2 | 0.8 |
| | | CAGCTCGACT | ACGCTCTTT | CTGAGCTGAC | ACCACCTGAGC | | |
| | | (55,870) | (64,794) | (64,796) | (64,797) | | |
| 5 | KB62 | CACTACCGCA | AACCTGGGC | AGAGGACCAC | TGTAAAAGAGG | 3.7 | 1.4 |
| | | CTCTTGCAGA | ACGCTCTTT | CTGAGCTGAC | ACCACCTGAGC | | |
| | | (55,865) | (64,794) | (64,796) | (64,797) | | |
| 5 | KB63 | CAAGAGTGCG | AACCTGGGC | AGAGGACCAC | TGTAAAAGAGG | 14.8 | 0.2 |
| | | GTAGTGCCCC | ACGCTCTTT | CTGAGCTGAC | ACCACCTGAGC | | |
| | | (54,511) | (64,794) | (64,796) | (64,797) | | |
| 5 | KB64 | GATGACACTG | AACCTGGGC | AGAGGACCAC | TGTAAAAGAGG | 20.5 | 4.3 |
| | | ACGGATGCCA | ACGCTCTTT | CTGAGCTGAC | ACCACCTGAGC | | |
| | | (55,861) | (64,794) | (64,796) | (64,797) | | |
| 5 | KB65 | GGATGACACT | AACCTGGGC | AGAGGACCAC | TGTAAAAGAGG | 2.2 | 1.1 |
| | | GACGGATGCC | ACGCTCTTT | CTGAGCTGAC | ACCACCTGAGC | | |
| | | (55,860) | (64,794) | (64,796) | (64,797) | | |
| 5 | KB66 | TAGTAGTCCT | AACCTGGGC | AGAGGACCAC | TGTAAAAGAGG | 50.1 | 2.1 |
| | | CCTCAATCCC | ACGCTCTTT | CTGAGCTGAC | ACCACCTGAGC | | |
| | | (55,842) | (64,794) | (64,796) | (64,797) | | |
| 5 | KB67 | TGCCATCCAT | AACCTGGGC | AGAGGACCAC | TGTAAAAGAGG | 4.0 | 1.0 |
| | | TCTGCCGTCG | ACGCTCTTT | CTGAGCTGAC | ACCACCTGAGC | | |
| | | (54,540) | (64,794) | (64,796) | (64,797) | | |
| 5 | KB68 | TTCCACGACG | AACCTGGGC | AGAGGACCAC | TGTAAAAGAGG | 41.6 | 0.2 |
| | | GCAGAATGGA | ACGCTCTTT | CTGAGCTGAC | ACCACCTGAGC | | |
| | | (55,838) | (64,794) | (64,796) | (64,797) | | |
| 5 | KB69 | TTAATTCCAC | AACCTGGGC | AGAGGACCAC | TGTAAAAGAGG | 24.4 | 4.1 |
| | | GACGGCAGAA | ACGCTCTTT | CTGAGCTGAC | ACCACCTGAGC | | |
| | | (55,837) | (64,794) | (64,796) | (64,797) | | |
| 5 | KB70 | GCCGTCGTGG | AACCTGGGC | AGAGGACCAC | TGTAAAAGAGG | 50.5 | 2.8 |
| | | AATTAAATCA | ACGCTCTTT | CTGAGCTGAC | ACCACCTGAGC | | |
| | | (54,541) | (64,794) | (64,796) | (64,797) | | |
| 5 | KB71 | TCCGTGATTT | AACCTGGGC | AGAGGACCAC | TGTAAAAGAGG | 2.8 | 1.0 |
| | | AATTCCACGA | ACGCTCTTT | CTGAGCTGAC | ACCACCTGAGC | | |
| | | (55,835) | (64,794) | (64,796) | (64,797) | | |
| 5 | KB72 | TCGTGGAATT | AACCTGGGC | AGAGGACCAC | TGTAAAAGAGG | 12.3 | 5.2 |
| | | AAATCACGGA | ACGCTCTTT | CTGAGCTGAC | ACCACCTGAGC | | |
| | | (54,542) | (64,794) | (64,796) | (64,797) | | |
| 5 | KB73 | TTAAATCACG | AACCTGGGC | AGAGGACCAC | TGTAAAAGAGG | 17.5 | 1.6 |
| | | GATGGCAGAT | ACGCTCTTT | CTGAGCTGAC | ACCACCTGAGC | | |
| | | (54,544) | (64,794) | (64,796) | (64,797) | | |
| 5 | KB74 | TGGCAGATTG | AACCTGGGC | AGAGGACCAC | TGTAAAAGAGG | 4.4 | 0.5 |
| | | GAGGGTCGCC | ACGCTCTTT | CTGAGCTGAC | ACCACCTGAGC | | |
| | | (54,548) | (64,794) | (64,796) | (64,797) | | |
| 5 | KB75 | TGCATATGGT | AACCTGGGC | AGAGGACCAC | TGTAAAAGAGG | 35.6 | 4.1 |
| | | GTACGTGATA | ACGCTCTTT | CTGAGCTGAC | ACCACCTGAGC | | |
| | | (55,820) | (64,794) | (64,796) | (64,797) | | |
| 5 | KB76 | CCATATGCAA | AACCTGGGC | AGAGGACCAC | TGTAAAAGAGG | 19.0 | 0.9 |
| | | GTTTCCCGCC | ACGCTCTTT | CTGAGCTGAC | ACCACCTGAGC | | |
| | | (54,558) | (64,794) | (64,796) | (64,797) | | |
| 5 | KB77 | CCTGGCGGGA | AACCTGGGC | AGAGGACCAC | TGTAAAAGAGG | 1.6 | 0.8 |
| | | AACTTGCATA | ACGCTCTTT | CTGAGCTGAC | ACCACCTGAGC | | |
| | | (55,819) | (64,794) | (64,796) | (64,797) | | |
| 5 | KB78 | TATGCAAGTT | AACCTGGGC | AGAGGACCAC | TGTAAAAGAGG | 41.4 | 2.5 |
| | | TCCCGCCAGG | ACGCTCTTT | CTGAGCTGAC | ACCACCTGAGC | | |
| | | (54,560) | (64,794) | (64,796) | (64,797) | | |

exon 1 15 27
exon 2 22 33
exon 3 6 27
*Eff. = efficiency (% indels)

[0748] PCR amplicons were purified using the AxyPrep Mag PCR clean-up kit (Axygen). Amplicons were sequenced using the primers listed below and analyzed using decomposition algorithm. gRNA activity was measured as a ratio of alleles with various indels (insertions of 1 to 50 nt, or deletions of 1 to 50 nt) adjacent to predicted cut site of the S.py. Cas9 (i.e., between nucleotides −4 and −3 upstream of PAM (NRG) on a non-target strand and between 3 and 4 nucleotides downstream of PAM complementary sequence (CCN) on a target strand. The activity of the gRNA is listed in Table 3.

[0749] These studies demonstrate that 15 out of 27 gRNAs targeting exon 1, 22 out of 33 targeting exon 2 and 6 out of exon 27 targeting exon 5 had in vitro indel efficiency higher than 30%.

### Example 98—Activity of the gRNA Targeting Mutant Allele in HuH7 Cells (Wildtype Alleles)

[0750] To assess the activity of the gRNAs preferentially targeting mutant alleles, gRNA overlapping with two the most prevalent mutations of G6PC R83C (rs1801175) and Q347X (rs80356487) were designed, with perfect match with mutant sequence (Table 4). As a surrogate of the activity of the mutant gRNAs, their activity in Huh7-Cas9 cells has been assessed as shown below in Table 4.

TABLE 4
gRNA sequences and activity in Huh7-Cas9

| Exon | guide | | Forward | Reverse | Sequencing | | |
|---|---|---|---|---|---|---|---|
| # | ID | gRNA sequence | TIDE primer | TIDE primer | Primer | Eff. | SD |
| 2 | CH31 | GCTGTCCAAA | cccaggaggtag | agagagggcaa | agagagggcaa | 59.65 | 7 |
| | | GAGAATCCTA | aggtcacaatga | gggattggacg | gggattggacg | | |
| | | (56,893) | (64,793) | (64,835) | (64,835) | | |
| 2 | CH31 | ACTGTCCAAA | cccaggaggtag | agagagggcaa | agagagggcaa | 43.65 | 7.4 |
| | mutant | GAGAATCCTA | aggtcacaatga | gggattggacg | gggattggacg | | |
| | | (64,798) | (64,793) | (64,835) | (64,835) | | |
| 2 | CH32 | TCTTTGGACA | cccaggaggtag | agagagggcaa | agagagggcaa | 44.25 | 6.2 |
| | | GCGTCCATAC | aggtcacaatga | gggattggacg | gggattggacg | | |
| | | (53,372) | (64,793) | (64,835) | (64,835) | | |
| 2 | CH32 | TCTTTGGACA | cccaggaggtag | agagagggcaa | agagagggcaa | 22.65 | 0.7 |
| | mutant | GTGTCCATAC | aggtcacaatga | gggattggacg | gggattggacg | | |
| | | (64,799) | (64,793) | (64,835) | (64,835) | | |
| 2 | CH33 | TTGGACAGCG | cccaggaggtag | agagagggcaa | agagagggcaa | 13.95 | 0.8 |
| | | TCCATACTGG | aggtcacaatga | gggattggacg | gggattggacg | | |
| | | (53,373) | (64,793) | (64,835) | (64,835) | | |
| 2 | CH33 | TTGGACAGTG | cccaggaggtag | agagagggcaa | agagagggcaa | 6.75 | 2 |
| | mutant | TCCATACTGG | aggtcacaatga | gggattggacg | gggattggacg | | |
| | | (64,800) | (64,793) | (64,835) | (64,835) | | |
| 2 | CH34 | TGGACAGCGT | cccaggaggtag | agagagggcaa | agagagggcaa | 51.6 | 6 |
| | | CCATACTGGT | aggtcacaatga | gggattggacg | gggattggacg | | |
| | | (53,374) | (64,793) | (64,835) | (64,835) | | |
| 2 | CH34 | TGGACAGTGT | cccaggaggtag | agagagggcaa | agagagggcaa | 38 | 4.2 |
| | mutant | CCATACTGGT | aggtcacaatga | gggattggacg | gggattggacg | | |
| | | (64,801) | (64,793) | (64,835) | (64,835) | | |
| 5 | ex5-d1 | CTACTGCCTC | AACCTGGGC | AGAGGACCAC | TGTAAAAGAGG | | |
| | | GCCTAGGTCC | ACGCTCTTT | CTGAGCTGAC | ACCACCTGAGC | | |
| | | (64,802) | (64,794) | (64,796) | (64,797) | | |
| 5 | ex5-d2 | CATCCCCTAC | AACCTGGGC | AGAGGACCAC | TGTAAAAGAGG | | |
| | | TGCCTCGCCT | ACGCTCTTT | CTGAGCTGAC | ACCACCTGAGC | | |
| | | (64,803) | (64,794) | (64,796) | (64,797) | | |
| 5 | ex5-d3 | TACTGCCTCG | AACCTGGGC | AGAGGACCAC | TGTAAAAGAGG | | |
| | | CCTAGGTCCT | ACGCTCTTT | CTGAGCTGAC | ACCACCTGAGC | | |
| | | (64,804) | (64,794) | (64,796) | (64,797) | | |
| 5 | ex5-d4 | AGGACCTAGG | AACCTGGGC | AGAGGACCAC | TGTAAAAGAGG | | |
| | | CGAGGCAGTA | ACGCTCTTT | CTGAGCTGAC | ACCACCTGAGC | | |
| | | (64,805) | (64,794) | (64,796) | (64,797) | | |
| 5 | ex5-d5 | GCTGGCCCAG | AACCTGGGC | AGAGGACCAC | TGTAAAAGAGG | | |
| | | GACCTAGGCG | ACGCTCTTT | CTGAGCTGAC | ACCACCTGAGC | | |
| | | (64,806) | (64,794) | (64,796) | (64,797) | | |
| 5 | ex5-d6 | CAGGACCTAG | AACCTGGGC | AGAGGACCAC | TGTAAAAGAGG | | |
| | | GCGAGGCAGT | ACGCTCTTT | CTGAGCTGAC | ACCACCTGAGC | | |
| | | (64,807) | (64,794) | (64,796) | (64,797) | | |

*Eff. = efficiency (% indels)

[0751] These studies demonstrate that gRNAs targeting mutant allele and having one mismatch comparing to wildtype sequence retained 50-74% of the wild type analogues.

### Example 99—Activity of 19-mer, 18-mer, 17-mer gRNA

[0752] To analyze whether gRNA with recognition part shorter than 20-mer have some activity, Alt-R gRNA activity in Huh7-Cas9 cells was analyzed, and whether the substitution of Gs to one or two 5′ nucleotides would affect the gRNA activity was also analyzed, as shown below in Table 5. These modified lengths and or sequences of gRNA may modify kinetics of double stranded cutting and/or its specificity.

TABLE 5
gRNA sequences and activity in Huh7-Cas9

| gRNA ID | Sequence (SEQ ID NO) | Efficiency | SD |
|---|---|---|---|
| CH31_N20 | GCTGTCCAAAGAGAATCCTA | 29.83 | 3.21 |
| | (56,893) | | |
| CH31_GGN18 | GGTGTCCAAAGAGAATCCTA | 23.97 | 2.72 |
| | (64,808) | | |
| CH31_N19 | CTGTCCAAAGAGAATCCTA | 22.67 | 2.41 |
| | (64,809) | | |
| CH31_GN18 | GTGTCCAAAGAGAATCCTA | 19.77 | 3.32 |
| | (64,810) | | |
| CH31_N18 | TGTCCAAAGAGAATCCTA | 21.10 | 4.45 |
| | (64,811) | | |
| CH31_GN17 | GGTCCAAAGAGAATCCTA | 20.37 | 5.68 |
| | (64,812) | | |
| CH31_N17 | GTCCAAAGAGAATCCTA | 21.20 | 4.60 |
| | (64,813) | | |
| CH32_N20 | TCTTTGGACAGCGTCCATAC | 14.87 | 1.18 |
| | (53,372) | | |
| CH32_GN19 | GCTTTGGACAGCGTCCATAC | 9.17 | 0.62 |
| | (64,814) | | |
| CH32_GGN18 | GGTTTGGACAGCGTCCATAC | 3.07 | 0.61 |
| | (64,815) | | |
| CH32_N19 | CTTTGGACAGCGTCCATAC | 13.13 | 0.65 |
| | (64,816) | | |
| CH32_GN18 | GTTTGGACAGCGTCCATAC | 1.27 | 0.05 |
| | (64,817) | | |
| CH32_N18 | TTTGGACAGCGTCCATAC | 4.37 | 0.45 |
| | (64,818) | | |
| CH32_GN17 | GTTGGACAGCGTCCATAC | 3.30 | 1.36 |
| | (64,819) | | |
| CH32_N17 | TTGGACAGCGTCCATAC | 6.87 | 1.69 |
| | (64,820) | | |

[0753] These studies demonstrate that all shorter analogues of the gRNA CH31 retained more than 66% of indel activity. Only 19-mer analogues of the gRNA CH32 retained activity >60% of the full gRNA.

### Example 100—Format of gRNAs

[0754] Selected gRNAs were tested in a form of single-stranded gRNA with various chemical modifications, and double-stranded gRNA conjugated by click chemistry with various chemical modifications as shown below in Table 6. Transfection of the gRNAs was performed as described above and their activities at various concentrations (3 nM-25 nM) are presented in FIGS. 95A-95B.

TABLE 6
Examples of the chemical modifications of gRNA

| | Chemical | |
|---|---|---|
| gRNA | modification | |
| name | scheme | Sequence 5′ to 3′ |
| CH31 | CTX0 | gscsusGUCCAAAGAGAAUCCUAGUUUU |
| | | AGAGCUAGAAAUAGCAAGUUAAAAUAAG |
| | | GCUAGUCCGUUAUCAACUUGAAAAAGUG |
| | | GCACCGAGUCGGUGCusususU |
| | | (SEQ ID NO: 64,821) |
| CH31 | CTX0split | gscsusGUCCAAAGAGAAUCCUAGUUUU |
| | | AGAgcuaGAAA (SEQ ID NO: |
| | | 64,822)-(ABA)(COM)uagcAAGUUA |
| | | AAAUAAGGCUAGUCCGUUAUCaacuuGA |
| | | AAaaguggcaccgagucggugcusususU |
| | | (SEQ ID NO: 64,836) |
| CH31 | CTX1 | gscsusGUCCAAAGAGAAUCCUAGUUUU |
| | | AGAGCUAGAAAUAGCAAGUUAAAAUAAG |
| | | GCUAGUCCGUUAUCAACUUGAAAAAGUG |
| | | GCACCGAGUCGGUGCusususU |
| | | (SEQ ID NO: 64,821) |
| CH31 | CTX1split | gscsusGUCCAAAGAGAAUCCUAguuuu |
| | | agagcuagaaa (SEQ ID NO: |
| | | 64,823)-(NHC6)(ABA)(COM)-uag |
| | | cAAGUUAAAAUAAGGCUAGUCCGUUAUC |
| | | aacuuGAAAaaguggcaccgagucggug |
| | | cusususU (SEQ ID NO: 64,836) |
| CH31 | CTX2split | gscsusGUCCAAAGAGAAUCCUAGUUUU |
| | | AGAGCUAUGCU (SEQ ID NO: |
| | | 64,824)-(NHC6)(ABA)(COM)-AGC |
| | | AUAGCAAGUUAAAAUAAGGCUAGUCCGU |
| | | UAUCaacuuGAAAaaguggcaccgaguc |
| | | ggugcusususU (SEQ ID NO: |
| | | 64,837) |

a, c, g, u: 2′-O-methyl residues
s: phosphorothioate
A, C, G, U: RNA residues

[0755] These studies demonstrate that single stranded gRNA or click-conjugated split gRNAs had superior activity than split gRNAs, especially at lower concentrations.

### Example 101—gRNA Activity in Primary Human Hepatocytes and HepG2

[0756] Selected gRNAs were tested in a form of single-stranded gRNA with various chemical modifications (see Table 6 above). Transfection of the gRNAs was performed using Lipofectamine MessengerMax according to the manufacture protocol. The gRNAs activities at 12.5 nM are presented below in Table 7.

TABLE 7
gRNA activity in HepG2 and PHH transfected with Cas9
mRNA and gRNA

| gRNA | Activity, In-del % | SD | Cell type |
|---|---|---|---|
| CH31-CTX0 | 43.96805556 | 17.657448 | HepG2 |
| CH31-CTX1 | 41.12261905 | 20.441894 | HepG2 |
| CH32-AltR | 13.89166667 | 13.517525 | HepG2 |
| CH31-CTX2 | 20.36944444 | 8.9200085 | PHH |

[0757] These studies demonstrate that single stranded gRNAs transfected with Cas9 mRNA were active in both HepG2 cells and primary human hepatocytes.

### Example 102—Analysis of the Off-Target Activity of Selected gRNAs

[0758] Off-targets (loci in the genome targeted by the CRISPR endonuclease beyond the locus of interest) were predicted by two algorithms, CCTOP (see Example 97) and COSMID (COSMID: A Web-based Tool for Identifying and Validating CRISPR/Cas Off-target Sites. T J Cradick, P Qiu, C M Lee, E J Fine, G Bao. Molecular Therapy—Nucleic Acids 3 (12), e214).

[0759] Selected gRNAs were transfected into Huh-7 cells as described above in 24 well format. gDNA was isolated using DNAeasy isolation kit (Qiagen). Off-target activities for the selected gRNAs were measured by two methods:
[0760] TIDE analysis for the top 5-6 off-targets (similar to on target activity), see Table 8B for the example (3-5% of indel is considered as background).
[0761] HiSeq of 200-500 off-target sites. DNA correspondent to off-target sites was enriched by TargetGxOne™ enrichment library preparation and analyzed by 2×125 bp paired end (PE) sequencing on Illumina HiSeq2500 in High Output mode (V4 Chemistry). Off-target activity is defined as the ratio of reads with indels adjacent to the predicted off-target locus to the total number of reads correspondent to the locus, see Table 8A for the example.

TABLE 8A
Examples of analysis of off-target activity by Capture-Seq, in del
frequency

| | CH31 | Control | Comment |
|---|---|---|---|
| chr12:98076278-98076300 (−) | 0.1% | 0.0% | |
| chr13:84282989-84283011 (+) | 0.3% | 0.0% | |
| chr17:10714406-10714427 (−) | 0.4% | 0.0% | |
| chr17:42903925-42903947 (−) | 58.6% | 2.0% | On-Target |
| chr2:158676009-158676031 (+) | 0.5% | 0.0% | |
| chr2:208579757-208579779 (−) | 1.7% | 0.0% | |
| chr3:56776643-56776665 (+) | 0.4% | 0.0% | |
| chr3:142796927-142796949 (+) | 0.3% | 0.0% | |
| chr4:32556942-32556964 (−) | 3.0% | 0.0% | |
| chr6:45288091-45288113 (+) | 0.2% | 0.0% | |
| chr6:167947988-167948010 (−) | 0.1% | 0.0% | |
| chr7:20703389-20703411 (−) | 0.3% | 0.0% | |

TABLE 8B
Examples of analysis of off-target activity by TIDE analysis

| | CH32 | |
|---|---|---|
| ch17:42903936-42903958 (+) | ~90% | On-Target |
| Ch19: 53480959-53480938 (−) | ~5% | |
| Chr2: 64486187-64486165 (−) | ~5% | |

[0762] These studies demonstrate that although constitutive expression of Cas9 increases off-targeting potential, the indels in predicted off-target sites for the identified gRNAs were either non-detected or lower than 5% of on-target activity of the correspondent gRNA.

### Example 103—Correction of Mutations (Missense, Nonsense) by HDR

[0763] gRNA targeting DNA in the proximity of the mutation of interest (e.g. R83C (rs1801175) and donor DNA was provided as single stranded (+ or − strands) or double stranded DNA oligo nucleotides (+ strand is presented in FIG. 96). The donor DNA had several sense mismatches (therapeutic donor will have wildtype sequence or sequence with homology to wt >90%).

[0764] gRNA and oligonucleotide were co-transfected into Huh-7 cells expressing Cas9 and genomic DNAs were harvested 48-96 hours post transfection. The locus of interest was amplified using primers 5′-cccaggaggtagaggtcacaatga-3′ (SEQ ID NO: 64,793) and 5′-agagagggcaagggattggacg-3′ (SEQ ID NO: 64,795), and the amplicons were cloned into TOPO-blunt vector and sequenced by Sanger Sequencing. Efficiency of the gene editing as well as an example of the mutated sequence are presented in FIGS. 99A-99C.

[0765] NextGen Sequencing, briefly, primers (5′-cccaggaggtagaggtcacaatga-3′ (SEQ ID NO: 64,793) and 5′-agagagggcaagggattggacg-3′ (SEQ ID NO: 64,795)) were used to generate amplicons, amplicons were used for nested PCR using following primers (NextGen_G6PC_R83_rev GTCTCGTGGGCTCGGAGATGTGTATAAGAGACAGGGCACGGAAGTGTTGCTGTA GT (SEQ ID NO: 64,825) and NextGen_G6PC_R83_for TCGTCGGCAGCGTCAGATGTGTATAAGAGACAGCCCTTCTAGAGGCAACATGTGA A (SEQ ID NO: 64,826) and finally the library was generated using the barcoding primers. The efficiencies of HDR with the above mentioned donor and several gRNAs are presented in the FIGS. 97A-97C.

[0766] These studies demonstrate that the in vitro assay provided comparison of the efficiency of different gRNAs to promote HDR around position of interest. This in vitro assay also highlighted the importance of the proximity of the cut site to the mutation.

### Example 104—Restoration of the G6PC Activity by Small Deletion Around Mutation

[0767] One or two gRNAs targeting DNA in the proximity of the mutation of interest (e.g. Q347X (rs80356487). The DNA cutting will lead to small deletion or insertion around the premature stop codon and may lead to modified amino acid sequence. Examples are shown below:

G6PC Q347X
(SEQ ID NO: 64,827)
MEEGMNVLHDFGIQSTHYLQVNYQDSQDWFILVSVIADLRNAFYVLFPIW
FHLQEAVGIKLLWVAVIGDWLNLVFKWILFGQRPYWWVLDTDYYSNTSVP
LIKQFPVTCETGPGSPSGHAMGTAGVYYVMVTSTLSIFQGKIKPTYRFRC
LNVILWLGFWAVQLNVCLSRIYLAAHFPHQVVAGVLSGIAVAETFSHIHS
IYNASLKKYFLITFFLFSFAIGFYLLLKGLGVDLLWTLEKAQRWCEQPEW
VHIDTTPFASLLKNLGTLFGLGLALNSSMYRESCKGKLSKWLPFRLSSIV
ASLVLLHVFDSLKPPSQVELVFYVLSFCKSAVVNPLASVSVIPYCLAXVL
GQPHKKSL
G6PC Δ346-347
(SEQ ID NO: 64,828)
MEEGMNVLHDFGIQSTHYLQVNYQDSQDWFILVSVIADLRNAFYVLFPIW
FHLQEAVGIKLLWVAVIGDWLNLVFKWILFGQRPYWWVLDTDYYSNTSVP
LIKQFPVTCETGPGSPSGHAMGTAGVYYVMVTSTLSIFQGKIKPTYRFRC
LNVILWLGFWAVQLNVCLSRIYLAAHFPHQVVAGVLSGIAVAETFSHIHS
IYNASLKKYFLITFFLFSFAIGFYLLLKGLGVDLLWTLEKAQRWCEQPEW
VHIDTTPFASLLKNLGTLFGLGLALNSSMYRESCKGKLSKWLPFRLSSIV
ASLVLLHVFDSLKPPSQVELVFYVLSFCKSAVVNPLASVSVIPYCLVLGQ
PHKKSL
G6PC Δ 347-348
(SEQ ID NO: 64,829)
MEEGMNVLHDFGIQSTHYLQVNYQDSQDWFILVSVIADLRNAFYVLFPIW
FHLQEAVGIKLLWVAVIGDWLNLVFKWILFGQRPYWWVLDTDYYSNTSVP
LIKQFPVTCETGPGSPSGHAMGTAGVYYVMVTSTLSIFQGKIKPTYRFRC
LNVILWLGFWAVQLNVCLSRIYLAAHFPHQVVAGVLSGIAVAETFSHIHS
IYNASLKKYFLITFFLFSFAIGFYLLLKGLGVDLLWTLEKAQRWCEQPEW
VHIDTTPFASLLKNLGTLFGLGLALNSSMYRESCKGKLSKWLPFRLSSIV
ASLVLLHVFDSLKPPSQVELVFYVLSFCKSAVVPLASVSVIPYCLALGQP
HKKSL

[0768] The cDNA encoding the above listed proteins were cloned into expression cassette and transfected into HEK293T cells; FIG. 98 demonstrates that while Q347X variant of the enzyme has virtually no activity, A346-347 and A347-348 variants may have residual phosphatase activity about 10% of the wildtype protein.

[0769] These studies demonstrate that G6PC protein with a deletion of the amino acids (346-347 or 347-348) had 10% of wildtype activity (i.e. higher than nonsense mutation Q347X).

### Example 105—Restoration of the G6PC Activity by Knock-In of cDNA or Minigene

[0770] G6PC can be knocked-in in one of the following loci: ApoC3 chr11:116829908-116833071; Angptl3 chr1:62,597,487-62,606,305; Serpina1 chr14:94376747-94390692; Lp(a) chr6:160531483-160664259; Pcsk9 chr1:55,039,475-55,064,852; FIX chrX:139,530,736-139,563,458; ALB chr4:73,404,254-73,421,411; TTR chr18:31,591,766-31,599,023; TF chr3:133,661,997-133,779,005; Gys2 chr12:21,536, 188-21,604,857; AAVS1(PPP1R12C) chr19:55,090,912-55, 117,599; HGD chr3:120,628, 167-120,682,570; CCR5 chr3:46,370,854-46,376,206; ASGR2 chr17:7, 101,322-7,114,310; G6PC 17:42,900,796-42,914,432. Briefly, one or two gRNAs targeting one of these loci, more specifically exon 1 or exon 2 or intron 1.

[0771] The DNA donors are schematically represented in FIGS. 99A-99C, where examples of 3′UTR and polyadenylation signal are listed below:

>mouse a-Globin 3′UTR
(SEQ ID NO: 64,830)
AGCTGCCTTCTGCGGGGCTTGCCTTCTGGCCATGCCCTTCTTCTCTCCCT
TGCACCTGTACCTCTTGGTCTTTGAATAAAGCCTGAGTAGGAAG
>human a-Globin 3′UTR
(SEQ ID NO: 64,831)
GCTGGAGCCTCGGTGGCCATGCTTCTTGCCCCTTGGGCCTCCCCCCAGCC
CCTCCTCCCCTTCCTGCACCCGTACCCCCGTGGTCTTTGAATAAAGTCTG
AGTGGGCGGC
>human G6PC 3′UTR (synthetic short)
(SEQ ID NO: 64,832)
GAGATGTGGAGTCTTCGGTGTTTAAAGTCAACAACCATGCCAGGGATTGA
GGAGGACTACTATTTGAAGCAATGGGCACCAAGTGAAATAAAGTCTTGTT
AATTACTATATTTTAGATGCA
>polyadenylation signal b-Globin
(SEQ ID NO: 64,833)
AATAAAGGAAATTTATTTTCATTGCAATAGTGTGTTGGAATTTTTTGTGT
CTCTCA
>polyadenylation signal SV40
(SEQ ID NO: 64,834)
TTGTTTATTGCAGCTTATAATGGTTACAAATAAAGCAATAGCATCACAAA
TTTCACAAATAAAGCATTTTTTTCACTGCATTCTAGTTGTGGTTTGTCCA
AACTCATCAATGTATCTTAT

[0772] These studies demonstrate that left homology arm and right homology arm will be specific for each locus, including G6PC. One or two gRNAs targeting the above mentioned loci will be co-delivered with donor encoded by AAV.

### Note Regarding Illustrative Embodiments

[0773] While the present disclosure provides descriptions of various specific embodiments for the purpose of illustrating various aspects of the present invention and/or its potential applications, it is understood that variations and modifications will occur to those skilled in the art. Accordingly, the invention or inventions described herein should be understood to be at least as broad as they are claimed, and not as more narrowly defined by particular illustrative embodiments provided herein.

[0774] Any patent, publication, or other disclosure material identified herein is incorporated by reference into this specification in its entirety unless otherwise indicated, but only to the extent that the incorporated material does not conflict with existing descriptions, definitions, statements, or other disclosure material expressly set forth in this specification. As such, and to the extent necessary, the express disclosure as set forth in this specification supersedes any conflicting material incorporated by reference. Any material, or portion thereof, that is said to be incorporated by reference into this specification, but which conflicts with existing definitions, statements, or other disclosure material set forth herein, is only incorporated to the extent that no conflict arises between that incorporated material and the existing disclosure material. Applicants reserve the right to amend this specification to expressly recite any subject matter, or portion thereof, incorporated by reference herein.

The application's sequence listing, which the Patent Office published only in electronic form, follows.

SEQUENCE LISTING (64837 sequences)

SEQ ID NO: 1 - DNA, 20 bp, synthetic construct
  misc_feature 1..20: note = chemically synthesized
  source 1..20: mol_type = other DNA
tggcgatatctaggtagcca

SEQ ID NO: 2 - DNA, 20 bp, synthetic construct
  misc_feature 1..20: note = chemically synthesized
  source 1..20: mol_type = other DNA
ggcgatatctaggtagccac

SEQ ID NO: 3 - DNA, 20 bp, synthetic construct
  misc_feature 1..20: note = chemically synthesized
  source 1..20: mol_type = other DNA
cgatatctaggtagccacag

SEQ ID NO: 4 - DNA, 20 bp, synthetic construct
  misc_feature 1..20: note = chemically synthesized
  source 1..20: mol_type = other DNA
gatatctaggtagccacagg

SEQ ID NO: 5 - DNA, 20 bp, synthetic construct
  misc_feature 1..20: note = chemically synthesized
  source 1..20: mol_type = other DNA
atctaggtagccacaggagg

SEQ ID NO: 6 - DNA, 20 bp, synthetic construct
  misc_feature 1..20: note = chemically synthesized
  source 1..20: mol_type = other DNA
ccacaggaggcggccacgtg

SEQ ID NO: 7 - DNA, 20 bp, synthetic construct
  misc_feature 1..20: note = chemically synthesized
  source 1..20: mol_type = other DNA
caggaggcggccacgtgcag

SEQ ID NO: 8 - DNA, 20 bp, synthetic construct
  misc_feature 1..20: note = chemically synthesized
  source 1..20: mol_type = other DNA
cggccacgtgcagtggcgtc

SEQ ID NO: 9 - DNA, 20 bp, synthetic construct
  misc_feature 1..20: note = chemically synthesized
  source 1..20: mol_type = other DNA
tccagccctcgttgtctgcc

SEQ ID NO: 10 - DNA, 20 bp, synthetic construct
  misc_feature 1..20: note = chemically synthesized
  source 1..20: mol_type = other DNA
ctcgttgtctgcctggttca

SEQ ID NO: 11 - DNA, 20 bp, synthetic construct
  misc_feature 1..20: note = chemically synthesized
  source 1..20: mol_type = other DNA
gttgtctgcctggttcacag

SEQ ID NO: 12 - DNA, 20 bp, synthetic construct
  misc_feature 1..20: note = chemically synthesized
  source 1..20: mol_type = other DNA
cagtggcgccctgctccacc

SEQ ID NO: 13 - DNA, 20 bp, synthetic construct
  misc_feature 1..20: note = chemically synthesized
  source 1..20: mol_type = other DNA
tggcgccctgctccaccaag

SEQ ID NO: 14 - DNA, 20 bp, synthetic construct
  misc_feature 1..20: note = chemically synthesized
  source 1..20: mol_type = other DNA
accaagaagcgcaccacctc

SEQ ID NO: 15 - DNA, 20 bp, synthetic construct
  misc_feature 1..20: note = chemically synthesized
  source 1..20: mol_type = other DNA
ccaagaagcgcaccacctcc

SEQ ID NO: 16 - DNA, 20 bp, synthetic construct
  misc_feature 1..20: note = chemically synthesized
  source 1..20: mol_type = other DNA
cctccaggttctcatcaatg

SEQ ID NO: 17 - DNA, 20 bp, synthetic construct
  misc_feature 1..20: note = chemically synthesized
  source 1..20: mol_type = other DNA
ctccaggttctcatcaatgc

SEQ ID NO: 18 - DNA, 20 bp, synthetic construct
  misc_feature 1..20: note = chemically synthesized
  source 1..20: mol_type = other DNA
ggttctcatcaatgcaggcc

SEQ ID NO: 19 - DNA, 20 bp, synthetic construct
  misc_feature 1..20: note = chemically synthesized
  source 1..20: mol_type = other DNA
gttctcatcaatgcaggcct

SEQ ID NO: 20 - DNA, 20 bp, synthetic construct
  misc_feature 1..20: note = chemically synthesized
  source 1..20: mol_type = other DNA
ttctcatcaatgcaggcctg

SEQ ID NO: 21 - DNA, 20 bp, synthetic construct
  misc_feature 1..20: note = chemically synthesized
  source 1..20: mol_type = other DNA
tctcatcaatgcaggcctgg

SEQ ID NO: 22 - DNA, 20 bp, synthetic construct
  misc_feature 1..20: note = chemically synthesized
  source 1..20: mol_type = other DNA
catcaatgcaggcctggggg

SEQ ID NO: 23 - DNA, 20 bp, synthetic construct
  misc_feature 1..20: note = chemically synthesized
  source 1..20: mol_type = other DNA
atcaatgcaggcctgggggt

SEQ ID NO: 24 - DNA, 20 bp, synthetic construct
  misc_feature 1..20: note = chemically synthesized
  source 1..20: mol_type = other DNA
gcaggcctgggggtgggaaa

SEQ ID NO: 25 - DNA, 20 bp, synthetic construct
  misc_feature 1..20: note = chemically synthesized
  source 1..20: mol_type = other DNA
tgggggtgggaaacagccgt

SEQ ID NO: 26 - DNA, 20 bp, synthetic construct
  misc_feature 1..20: note = chemically synthesized
  source 1..20: mol_type = other DNA
gccgtcagccgcacctaccc

SEQ ID NO: 27 - DNA, 20 bp, synthetic construct
  misc_feature 1..20: note = chemically synthesized
  source 1..20: mol_type = other DNA
agccgcacctaccccagcca

SEQ ID NO: 28 - DNA, 20 bp, synthetic construct
  misc_feature 1..20: note = chemically synthesized
  source 1..20: mol_type = other DNA
ctaccccagccacggtgtcc

SEQ ID NO: 29 - DNA, 20 bp, synthetic construct
  misc_feature 1..20: note = chemically synthesized
  source 1..20: mol_type = other DNA
cccagccacggtgtcccagc

SEQ ID NO: 30 - DNA, 20 bp, synthetic construct
  misc_feature 1..20: note = chemically synthesized
  source 1..20: mol_type = other DNA
gccacggtgtcccagcaagt

SEQ ID NO: 31 - DNA, 20 bp, synthetic construct
  misc_feature 1..20: note = chemically synthesized
  source 1..20: mol_type = other DNA
ccacggtgtcccagcaagtc

SEQ ID NO: 32 - DNA, 20 bp, synthetic construct
  misc_feature 1..20: note = chemically synthesized
  source 1..20: mol_type = other DNA
gtcccagcaagtcgggactc

SEQ ID NO: 33 - DNA, 20 bp, synthetic construct
  misc_feature 1..20: note = chemically synthesized
  source 1..20: mol_type = other DNA
cccagcaagtcgggactcca

SEQ ID NO: 34 - DNA, 20 bp, synthetic construct
  misc_feature 1..20: note = chemically synthesized
  source 1..20: mol_type = other DNA
ccagcaagtcgggactccag

SEQ ID NO: 35 - DNA, 20 bp, synthetic construct
  misc_feature 1..20: note = chemically synthesized
  source 1..20: mol_type = other DNA
cagcaagtcgggactccaga

SEQ ID NO: 36 - DNA, 20 bp, synthetic construct
  misc_feature 1..20: note = chemically synthesized
  source 1..20: mol_type = other DNA
gcaagtcgggactccagagg

SEQ ID NO: 37 - DNA, 20 bp, synthetic construct
  misc_feature 1..20: note = chemically synthesized
  source 1..20: mol_type = other DNA
tccagagggagccacgaaaa

SEQ ID NO: 38 - DNA, 20 bp, synthetic construct
  misc_feature 1..20: note = chemically synthesized
  source 1..20: mol_type = other DNA
gggagccacgaaaacagatc

SEQ ID NO: 39 - DNA, 20 bp, synthetic construct
  misc_feature 1..20: note = chemically synthesized
  source 1..20: mol_type = other DNA
ggagccacgaaaacagatcc

SEQ ID NO: 40 - DNA, 20 bp, synthetic construct
  misc_feature 1..20: note = chemically synthesized
  source 1..20: mol_type = other DNA
gagccacgaaaacagatcca

SEQ ID NO: 41 - DNA, 20 bp, synthetic construct
  misc_feature 1..20: note = chemically synthesized
  source 1..20: mol_type = other DNA
cgaaaacagatccagggaca

SEQ ID NO: 42 - DNA, 20 bp, synthetic construct
  misc_feature 1..20: note = chemically synthesized
  source 1..20: mol_type = other DNA
cagatccagggacacggtgc

SEQ ID NO: 43 - DNA, 20 bp, synthetic construct
  misc_feature 1..20: note = chemically synthesized
  source 1..20: mol_type = other DNA
agatccagggacacggtgct

SEQ ID NO: 44 - DNA, 20 bp, synthetic construct
  misc_feature 1..20: note = chemically synthesized
  source 1..20: mol_type = other DNA
ccagggacacggtgctagga

SEQ ID NO: 45 - DNA, 20 bp, synthetic construct
  misc_feature 1..20: note = chemically synthesized
  source 1..20: mol_type = other DNA
gggacacggtgctaggacag

SEQ ID NO: 46 - DNA, 20 bp, synthetic construct
  misc_feature 1..20: note = chemically synthesized
  source 1..20: mol_type = other DNA
ggacacggtgctaggacagt

SEQ ID NO: 47 - DNA, 20 bp, synthetic construct
  misc_feature 1..20: note = chemically synthesized
  source 1..20: mol_type = other DNA
gacacggtgctaggacagtg

SEQ ID NO: 48 - DNA, 20 bp, synthetic construct
  misc_feature 1..20: note = chemically synthesized
  source 1..20: mol_type = other DNA
cagtggggaaaatgacccaa

SEQ ID NO: 49 - DNA, 20 bp, synthetic construct
  misc_feature 1..20: note = chemically synthesized
  source 1..20: mol_type = other DNA
gaaaatgacccaacagcctc

SEQ ID NO: 50 - DNA, 20 bp, synthetic construct
  misc_feature 1..20: note = chemically synthesized
  source 1..20: mol_type = other DNA
acccaacagcctctggccac

SEQ ID NO: 51 - DNA, 20 bp, synthetic construct
  misc_feature 1..20: note = chemically synthesized
  source 1..20: mol_type = other DNA
cctctggccactggctgttt

SEQ ID NO: 52 - DNA, 20 bp, synthetic construct
  misc_feature 1..20: note = chemically synthesized
  source 1..20: mol_type = other DNA
ctggctgtttaagatacgcc

SEQ ID NO: 53 - DNA, 20 bp, synthetic construct
  misc_feature 1..20: note = chemically synthesized
  source 1..20: mol_type = other DNA
ttaagatacgcctggttgcc

SEQ ID NO: 54 - DNA, 20 bp, synthetic construct
  misc_feature 1..20: note = chemically synthesized
  source 1..20: mol_type = other DNA
agatacgcctggttgcccag

SEQ ID NO: 55 - DNA, 20 bp, synthetic construct
  misc_feature 1..20: note = chemically synthesized
  source 1..20: mol_type = other DNA
acgcctggttgcccagtggt

SEQ ID NO: 56 - DNA, 20 bp, synthetic construct
  misc_feature 1..20: note = chemically synthesized
  source 1..20: mol_type = other DNA
cgcctggttgcccagtggtc

SEQ ID NO: 57 - DNA, 20 bp, synthetic construct
  misc_feature 1..20: note = chemically synthesized
  source 1..20: mol_type = other DNA
tggttgcccagtggtcaggc

SEQ ID NO: 58 - DNA, 20 bp, synthetic construct
  misc_feature 1..20: note = chemically synthesized
  source 1..20: mol_type = other DNA
tgcccagtggtcaggccggc

SEQ ID NO: 59 - DNA, 20 bp, synthetic construct
  misc_feature 1..20: note = chemically synthesized
  source 1..20: mol_type = other DNA
gcccagtggtcaggccggcc

SEQ ID NO: 60 - DNA, 20 bp, synthetic construct
  misc_feature 1..20: note = chemically synthesized
  source 1..20: mol_type = other DNA
ggtcaggccggccaggcctt

SEQ ID NO: 61 - DNA, 20 bp, synthetic construct
  misc_feature 1..20: note = chemically synthesized
  source 1..20: mol_type = other DNA
ccggccaggccttcagtgct

SEQ ID NO: 62 - DNA, 20 bp, synthetic construct
  misc_feature 1..20: note = chemically synthesized
  source 1..20: mol_type = other DNA
gccaggccttcagtgctcag

SEQ ID NO: 63 - DNA, 20 bp, synthetic construct
  misc_feature 1..20: note = chemically synthesized
  source 1..20: mol_type = other DNA
gtgctcagtggaaaccacga

SEQ ID NO: 64 - DNA, 20 bp, synthetic construct
  misc_feature 1..20: note = chemically synthesized
  source 1..20: mol_type = other DNA
tgctcagtggaaaccacgaa

SEQ ID NO: 65 - DNA, 20 bp, synthetic construct
  misc_feature 1..20: note = chemically synthesized
  source 1..20: mol_type = other DNA
ggaaaccacgaaaggactcc

SEQ ID NO: 66 - DNA, 20 bp, synthetic construct
  misc_feature 1..20: note = chemically synthesized
  source 1..20: mol_type = other DNA
gactcctggctatctgcaaa

SEQ ID NO: 67 - DNA, 20 bp, synthetic construct
  misc_feature 1..20: note = chemically synthesized
  source 1..20: mol_type = other DNA
actcctggctatctgcaaac

SEQ ID NO: 68 - DNA, 20 bp, synthetic construct
  misc_feature 1..20: note = chemically synthesized
  source 1..20: mol_type = other DNA
cctggctatctgcaaacagg

SEQ ID NO: 69 - DNA, 20 bp, synthetic construct
  misc_feature 1..20: note = chemically synthesized
  source 1..20: mol_type = other DNA
atctgcaaacaggaagtgaa

SEQ ID NO: 70 - DNA, 20 bp, synthetic construct
  misc_feature 1..20: note = chemically synthesized
  source 1..20: mol_type = other DNA
tctgcaaacaggaagtgaac

SEQ ID NO: 71 - DNA, 20 bp, synthetic construct
  misc_feature 1..20: note = chemically synthesized
  source 1..20: mol_type = other DNA
ctgcaaacaggaagtgaacg

SEQ ID NO: 72 - DNA, 20 bp, synthetic construct
  misc_feature 1..20: note = chemically synthesized
  source 1..20: mol_type = other DNA
caaacaggaagtgaacgggg

SEQ ID NO: 73 - DNA, 20 bp, synthetic construct
  misc_feature 1..20: note = chemically synthesized
  source 1..20: mol_type = other DNA
aaacaggaagtgaacgggga

SEQ ID NO: 74 - DNA, 20 bp, synthetic construct
  misc_feature 1..20: note = chemically synthesized
  source 1..20: mol_type = other DNA
aacaggaagtgaacggggaa

SEQ ID NO: 75 - DNA, 20 bp, synthetic construct
  misc_feature 1..20: note = chemically synthesized
  source 1..20: mol_type = other DNA
caggaagtgaacggggaagg

SEQ ID NO: 76 - DNA, 20 bp, synthetic construct
  misc_feature 1..20: note = chemically synthesized
  source 1..20: mol_type = other DNA
aggaagtgaacggggaaggg

SEQ ID NO: 77 - DNA, 20 bp, synthetic construct
  misc_feature 1..20: note = chemically synthesized
  source 1..20: mol_type = other DNA
ggaagtgaacggggaaggga

SEQ ID NO: 78 - DNA, 20 bp, synthetic construct
  misc_feature 1..20: note = chemically synthesized
  source 1..20: mol_type = other DNA
gaagtgaacggggaagggag

SEQ ID NO: 79 - DNA, 20 bp, synthetic construct
  misc_feature 1..20: note = chemically synthesized
  source 1..20: mol_type = other DNA
aagtgaacggggaagggagg

SEQ ID NO: 80 - DNA, 20 bp, synthetic construct
  misc_feature 1..20: note = chemically synthesized
  source 1..20: mol_type = other DNA
aagggagggggcttctcatc

SEQ ID NO: 81 - DNA, 20 bp, synthetic construct
  misc_feature 1..20: note = chemically synthesized
  source 1..20: mol_type = other DNA
agggagggggcttctcatct

SEQ ID NO: 82 - DNA, 20 bp, synthetic construct
  misc_feature 1..20: note = chemically synthesized
  source 1..20: mol_type = other DNA
gggggcttctcatctgggtg

SEQ ID NO: 83 - DNA, 20 bp, synthetic construct
  misc_feature 1..20: note = chemically synthesized
  source 1..20: mol_type = other DNA
ggggcttctcatctgggtgc

SEQ ID NO: 84 - DNA, 20 bp, synthetic construct
  misc_feature 1..20: note = chemically synthesized
  source 1..20: mol_type = other DNA
ctgggtgcgggaaccccaca

SEQ ID NO: 85 - DNA, 20 bp, synthetic construct
  misc_feature 1..20: note = chemically synthesized
  source 1..20: mol_type = other DNA
gaaccccacatggtacctgt

SEQ ID NO: 86 - DNA, 20 bp, synthetic construct
  misc_feature 1..20: note = chemically synthesized
  source 1..20: mol_type = other DNA
cacatggtacctgttagaca

SEQ ID NO: 87 - DNA, 20 bp, synthetic construct
  misc_feature 1..20: note = chemically synthesized
  source 1..20: mol_type = other DNA
aaaacccccgtcaccaccca

SEQ ID NO: 88 - DNA, 20 bp, synthetic construct
  misc_feature 1..20: note = chemically synthesized
  source 1..20: mol_type = other DNA
aaacccccgtcaccacccac

SEQ ID NO: 89 - DNA, 20 bp, synthetic construct
  misc_feature 1..20: note = chemically synthesized
  source 1..20: mol_type = other DNA
cccccgtcaccacccacagg

SEQ ID NO: 90 - DNA, 20 bp, synthetic construct
  misc_feature 1..20: note = chemically synthesized
  source 1..20: mol_type = other DNA
ccacccacaggtggcgcttc

SEQ ID NO: 91 - DNA, 20 bp, synthetic construct
  misc_feature 1..20: note = chemically synthesized
  source 1..20: mol_type = other DNA
caggtggcgcttccagtgct

SEQ ID NO: 92 - DNA, 20 bp, synthetic construct
  misc_feature 1..20: note = chemically synthesized
  source 1..20: mol_type = other DNA
ggcgcttccagtgctcagac

SEQ ID NO: 93 - DNA, 20 bp, synthetic construct
  misc_feature 1..20: note = chemically synthesized
  source 1..20: mol_type = other DNA
gcgcttccagtgctcagact

SEQ ID NO: 94 - DNA, 20 bp, synthetic construct
  misc_feature 1..20: note = chemically synthesized
  source 1..20: mol_type = other DNA
cgcttccagtgctcagacta

SEQ ID NO: 95 - DNA, 20 bp, synthetic construct
  misc_feature 1..20: note = chemically synthesized
  source 1..20: mol_type = other DNA
ttccagtgctcagactaggg

SEQ ID NO: 96 - DNA, 20 bp, synthetic construct
  misc_feature 1..20: note = chemically synthesized
  source 1..20: mol_type = other DNA
ccagtgctcagactagggaa

SEQ ID NO: 97 - DNA, 20 bp, synthetic construct
  misc_feature 1..20: note = chemically synthesized
  source 1..20: mol_type = other DNA
cagtgctcagactagggaag

SEQ ID NO: 98 - DNA, 20 bp, synthetic construct
  misc_feature 1..20: note = chemically synthesized
  source 1..20: mol_type = other DNA
tcagactagggaagaggttc

SEQ ID NO: 99 - DNA, 20 bp, synthetic construct
  misc_feature 1..20: note = chemically synthesized
  source 1..20: mol_type = other DNA
ggttccagcccctcctcctt

SEQ ID NO: 100 - DNA, 20 bp, synthetic construct
  misc_feature 1..20: note = chemically synthesized
  source 1..20: mol_type = other DNA
ttccagcccctcctccttca

SEQ ID NO: 101 - DNA, 20 bp, synthetic construct
  misc_feature 1..20: note = chemically synthesized
  source 1..20: mol_type = other DNA
agcccctcctccttcagagc

SEQ ID NO: 102 - DNA, 20 bp, synthetic construct
  misc_feature 1..20: note = chemically synthesized
  source 1..20: mol_type = other DNA
gcccctcctccttcagagcc

SEQ ID NO: 103 - DNA, 20 bp, synthetic construct
  misc_feature 1..20: note = chemically synthesized
  source 1..20: mol_type = other DNA
ccctcctccttcagagccag

SEQ ID NO: 104 - DNA, 20 bp, synthetic construct
  misc_feature 1..20: note = chemically synthesized
  source 1..20: mol_type = other DNA
tccttcagagccaggagtcc

SEQ ID NO: 105 - DNA, 20 bp, synthetic construct
  misc_feature 1..20: note = chemically synthesized
  source 1..20: mol_type = other DNA
gagccaggagtcctggcccc

SEQ ID NO: 106 - DNA, 20 bp, synthetic construct
  misc_feature 1..20: note = chemically synthesized
  source 1..20: mol_type = other DNA
agcccctcctgccttaaacc

SEQ ID NO: 107 - DNA, 20 bp, synthetic construct
  misc_feature 1..20: note = chemically synthesized
  source 1..20: mol_type = other DNA
cctcctgccttaaacccagc

SEQ ID NO: 108 - DNA, 20 bp, synthetic construct
  misc_feature 1..20: note = chemically synthesized
  source 1..20: mol_type = other DNA
ctcctgccttaaacccagcc

SEQ ID NO: 109 - DNA, 20 bp, synthetic construct
  misc_feature 1..20: note = chemically synthesized
  source 1..20: mol_type = other DNA
aaacccagccaggtccttcc

SEQ ID NO: 110 - DNA, 20 bp, synthetic construct
  misc_feature 1..20: note = chemically synthesized
  source 1..20: mol_type = other DNA
aacccagccaggtccttcca

SEQ ID NO: 111 - DNA, 20 bp, synthetic construct
  misc_feature 1..20: note = chemically synthesized
  source 1..20: mol_type = other DNA
acccagccaggtccttccaa

SEQ ID NO: 112 - DNA, 20 bp, synthetic construct
  misc_feature 1..20: note = chemically synthesized
  source 1..20: mol_type = other DNA
gccaggtccttccaagggtc

SEQ ID NO: 113 - DNA, 20 bp, synthetic construct
  misc_feature 1..20: note = chemically synthesized
  source 1..20: mol_type = other DNA
gtccttccaagggtcaagct

SEQ ID NO: 114 - DNA, 20 bp, synthetic construct
  misc_feature 1..20: note = chemically synthesized
  source 1..20: mol_type = other DNA
gtcaagctcggaaaccaccc

SEQ ID NO: 115 - DNA, 20 bp, synthetic construct
  misc_feature 1..20: note = chemically synthesized
  source 1..20: mol_type = other DNA
aagctcggaaaccaccccag

SEQ ID NO: 116 - DNA, 20 bp, synthetic construct
  misc_feature 1..20: note = chemically synthesized
  source 1..20: mol_type = other DNA
ccaccccagcagatactctg

SEQ ID NO: 117 - DNA, 20 bp, synthetic construct
  misc_feature 1..20: note = chemically synthesized
  source 1..20: mol_type = other DNA
caccccagcagatactctgc

SEQ ID NO: 118 - DNA, 20 bp, synthetic construct
  misc_feature 1..20: note = chemically synthesized
  source 1..20: mol_type = other DNA
gcagatactctgcaggaacg

SEQ ID NO: 119 - DNA, 20 bp, synthetic construct
  misc_feature 1..20: note = chemically synthesized
  source 1..20: mol_type = other DNA
actctgcaggaacgaagccg

SEQ ID NO: 120 - DNA, 20 bp, synthetic construct
  misc_feature 1..20: note = chemically synthesized
  source 1..20: mol_type = other DNA
ctctgcaggaacgaagccgt

SEQ ID NO: 121 - DNA, 20 bp, synthetic construct
  misc_feature 1..20: note = chemically synthesized
  source 1..20: mol_type = other DNA
caggaacgaagccgtgggcc

SEQ ID NO: 122 - DNA, 20 bp, synthetic construct
  misc_feature 1..20: note = chemically synthesized
  source 1..20: mol_type = other DNA
aggaacgaagccgtgggccc

SEQ ID NO: 123 - DNA, 20 bp, synthetic construct
  misc_feature 1..20: note = chemically synthesized
  source 1..20: mol_type = other DNA
ggaacgaagccgtgggccca

SEQ ID NO: 124 - DNA, 20 bp, synthetic construct
  misc_feature 1..20: note = chemically synthesized
  source 1..20: mol_type = other DNA
gccgtgggcccagggctatg

SEQ ID NO: 125 - DNA, 20 bp, synthetic construct
  misc_feature 1..20: note = chemically synthesized
  source 1..20: mol_type = other DNA
ccgtgggcccagggctatgc

SEQ ID NO: 126 - DNA, 20 bp, synthetic construct
  misc_feature 1..20: note = chemically synthesized
  source 1..20: mol_type = other DNA
cgtgggcccagggctatgca

SEQ ID NO: 127 - DNA, 20 bp, synthetic construct
  misc_feature 1..20: note = chemically synthesized
  source 1..20: mol_type = other DNA
gggcccagggctatgcaggg

SEQ ID NO: 128 - DNA, 20 bp, synthetic construct
  misc_feature 1..20: note = chemically synthesized
  source 1..20: mol_type = other DNA
gcccagggctatgcagggtg

SEQ ID NO: 129 - DNA, 20 bp, synthetic construct
  misc_feature 1..20: note = chemically synthesized
  source 1..20: mol_type = other DNA
cccagggctatgcagggtgg

SEQ ID NO: 130 - DNA, 20 bp, synthetic construct
  misc_feature 1..20: note = chemically synthesized
  source 1..20: mol_type = other DNA
agggctatgcagggtggagg

SEQ ID NO: 131 - DNA, 20 bp, synthetic construct
  misc_feature 1..20: note = chemically synthesized
  source 1..20: mol_type = other DNA
gggctatgcagggtggagga

SEQ ID NO: 132 - DNA, 20 bp, synthetic construct
  misc_feature 1..20: note = chemically synthesized
  source 1..20: mol_type = other DNA
ggaggaaggccaccctgtgc

SEQ ID NO: 133 - DNA, 20 bp, synthetic construct
  misc_feature 1..20: note = chemically synthesized
  source 1..20: mol_type = other DNA
gaggaaggccaccctgtgct

SEQ ID NO: 134 - DNA, 20 bp, synthetic construct
  misc_feature 1..20: note = chemically synthesized
  source 1..20: mol_type = other DNA
aaggccaccctgtgctggga

SEQ ID NO: 135 - DNA, 20 bp, synthetic construct
  misc_feature 1..20: note = chemically synthesized
  source 1..20: mol_type = other DNA
accctgtgctgggacagact

SEQ ID NO: 136 - DNA, 20 bp, synthetic construct
  misc_feature 1..20: note = chemically synthesized
  source 1..20: mol_type = other DNA
ccctgtgctgggacagactc

SEQ ID NO: 137 - DNA, 20 bp, synthetic construct
  misc_feature 1..20: note = chemically synthesized
  source 1..20: mol_type = other DNA
cctgtgctgggacagactca

SEQ ID NO: 138 - DNA, 20 bp, synthetic construct
  misc_feature 1..20: note = chemically synthesized
  source 1..20: mol_type = other DNA
ctgtgctgggacagactcag

SEQ ID NO: 139 - DNA, 20 bp, synthetic construct
  misc_feature 1..20: note = chemically synthesized
  source 1..20: mol_type = other DNA
ctgggacagactcaggggcc

SEQ ID NO: 140 - DNA, 20 bp, synthetic construct
  misc_feature 1..20: note = chemically synthesized
  source 1..20: mol_type = other DNA
tgggacagactcaggggcct

SEQ ID NO: 141 - DNA, 20 bp, synthetic construct
  misc_feature 1..20: note = chemically synthesized
  source 1..20: mol_type = other DNA
gacagactcaggggcctggg

SEQ ID NO: 142 - DNA, 20 bp, synthetic construct
  misc_feature 1..20: note = chemically synthesized
  source 1..20: mol_type = other DNA
acagactcaggggcctgggc

SEQ ID NO: 143 - DNA, 20 bp, synthetic construct
  misc_feature 1..20: note = chemically synthesized
  source 1..20: mol_type = other DNA
aggggcctgggcgggactcc

SEQ ID NO: 144 - DNA, 20 bp, synthetic construct
  misc_feature 1..20: note = chemically synthesized
  source 1..20: mol_type = other DNA
gggcctgggcgggactccca

SEQ ID NO: 145 - DNA, 20 bp, synthetic construct
  misc_feature 1..20: note = chemically synthesized
  source 1..20: mol_type = other DNA
ggcctgggcgggactcccag

SEQ ID NO: 146 - DNA, 20 bp, synthetic construct
  misc_feature 1..20: note = chemically synthesized
  source 1..20: mol_type = other DNA
gcctgggcgggactcccaga

SEQ ID NO: 147 - DNA, 20 bp, synthetic construct
  misc_feature 1..20: note = chemically synthesized
  source 1..20: mol_type = other DNA
cctgggcgggactcccagag

SEQ ID NO: 148 - DNA, 20 bp, synthetic construct
  misc_feature 1..20: note = chemically synthesized
  source 1..20: mol_type = other DNA
ggcgggactcccagaggggt

SEQ ID NO: 149 - DNA, 20 bp, synthetic construct
  misc_feature 1..20: note = chemically synthesized
  source 1..20: mol_type = other DNA
ggactcccagaggggtgaga

SEQ ID NO: 150 - DNA, 20 bp, synthetic construct
  misc_feature 1..20: note = chemically synthesized
  source 1..20: mol_type = other DNA
cagctgcacacctgtgtgcc

SEQ ID NO: 151 - DNA, 20 bp, synthetic construct
  misc_feature 1..20: note = chemically synthesized
  source 1..20: mol_type = other DNA
agctgcacacctgtgtgcct

SEQ ID NO: 152 - DNA, 20 bp, synthetic construct
  misc_feature 1..20: note = chemically synthesized
  source 1..20: mol_type = other DNA
acacctgtgtgcctgggccc

SEQ ID NO: 153 - DNA, 20 bp, synthetic construct
  misc_feature 1..20: note = chemically synthesized
  source 1..20: mol_type = other DNA
cacctgtgtgcctgggcccc

SEQ ID NO: 154 - DNA, 20 bp, synthetic construct
  misc_feature 1..20: note = chemically synthesized
  source 1..20: mol_type = other DNA
ggccccaggctgtcacactc

SEQ ID NO: 155 - DNA, 20 bp, synthetic construct
  misc_feature 1..20: note = chemically synthesized
  source 1..20: mol_type = other DNA
ctgtcacactccagttcact

SEQ ID NO: 156 - DNA, 20 bp, synthetic construct
  misc_feature 1..20: note = chemically synthesized
  source 1..20: mol_type = other DNA
tgtcacactccagttcactg

SEQ ID NO: 157 - DNA, 20 bp, synthetic construct
  misc_feature 1..20: note = chemically synthesized
  source 1..20: mol_type = other DNA
tcactgaggccccctctgca

SEQ ID NO: 158 - DNA, 20 bp, synthetic construct
  misc_feature 1..20: note = chemically synthesized
  source 1..20: mol_type = other DNA
cactgaggccccctctgcac

SEQ ID NO: 159 - DNA, 20 bp, synthetic construct
  misc_feature 1..20: note = chemically synthesized
  source 1..20: mol_type = other DNA
actgaggccccctctgcacg

SEQ ID NO: 160 - DNA, 20 bp, synthetic construct
  misc_feature 1..20: note = chemically synthesized
  source 1..20: mol_type = other DNA
cccctctgcacggggccctg

SEQ ID NO: 161 - DNA, 20 bp, synthetic construct
  misc_feature 1..20: note = chemically synthesized
  source 1..20: mol_type = other DNA
tctgcacggggccctgcagc

SEQ ID NO: 162 - DNA, 20 bp, synthetic construct
  misc_feature 1..20: note = chemically synthesized
  source 1..20: mol_type = other DNA
ctgcacggggccctgcagcc

SEQ ID NO: 163 - DNA, 20 bp, synthetic construct
  misc_feature 1..20: note = chemically synthesized
  source 1..20: mol_type = other DNA
tgcacggggccctgcagcca

SEQ ID NO: 164 - DNA, 20 bp, synthetic construct
  misc_feature 1..20: note = chemically synthesized
  source 1..20: mol_type = other DNA
gcacggggccctgcagccag

SEQ ID NO: 165 - DNA, 20 bp, synthetic construct
  misc_feature 1..20: note = chemically synthesized
  source 1..20: mol_type = other DNA
cctgcagccaggggctgaca

SEQ ID NO: 166 - DNA, 20 bp, synthetic construct
  misc_feature 1..20: note = chemically synthesized
  source 1..20: mol_type = other DNA
ctgcagccaggggctgacac

SEQ ID NO: 167 - DNA, 20 bp, synthetic construct
  misc_feature 1..20: note = chemically synthesized
  source 1..20: mol_type = other DNA
accgtttctcattcttccct

SEQ ID NO: 168 - DNA, 20 bp, synthetic construct
  misc_feature 1..20: note = chemically synthesized
  source 1..20: mol_type = other DNA
ccgtttctcattcttccctt

SEQ ID NO: 169 - DNA, 20 bp, synthetic construct
  misc_feature 1..20: note = chemically synthesized
  source 1..20: mol_type = other DNA
cgtttctcattcttccctta

SEQ ID NO: 170 - DNA, 20 bp, synthetic construct
  misc_feature 1..20: note = chemically synthesized
  source 1..20: mol_type = other DNA
gtttctcattcttcccttag

SEQ ID NO: 171 - DNA, 20 bp, synthetic construct
  misc_feature 1..20: note = chemically synthesized
  source 1..20: mol_type = other DNA
tcccttaggggtccaaaact

SEQ ID NO: 172 - DNA, 20 bp, synthetic construct
  misc_feature 1..20: note = chemically synthesized
  source 1..20: mol_type = other DNA
cccttaggggtccaaaactt

SEQ ID NO: 173 - DNA, 20 bp, synthetic construct
  misc_feature 1..20: note = chemically synthesized
  source 1..20: mol_type = other DNA
ccttaggggtccaaaacttg

SEQ ID NO: 174 - DNA, 20 bp, synthetic construct
  misc_feature 1..20: note = chemically synthesized
  source 1..20: mol_type = other DNA
cttaggggtccaaaacttgg

SEQ ID NO: 175 - DNA, 20 bp, synthetic construct
  misc_feature 1..20: note = chemically synthesized
  source 1..20: mol_type = other DNA
ttaggggtccaaaacttggg

SEQ ID NO: 176 - DNA, 20 bp, synthetic construct
  misc_feature 1..20: note = chemically synthesized
  source 1..20: mol_type = other DNA
tccaaaacttggggggacaa

SEQ ID NO: 177 - DNA, 20 bp, synthetic construct
  misc_feature 1..20: note = chemically synthesized
  source 1..20: mol_type = other DNA
acttggggggacaaaagccg

SEQ ID NO: 178 - DNA, 20 bp, synthetic construct
  misc_feature 1..20: note = chemically synthesized
  source 1..20: mol_type = other DNA
gggggacaaaagccgaagtc

SEQ ID NO: 179 - DNA, 20 bp, synthetic construct
  misc_feature 1..20: note = chemically synthesized
  source 1..20: mol_type = other DNA
ggggacaaaagccgaagtcc

SEQ ID NO: 180 - DNA, 20 bp, synthetic construct
  misc_feature 1..20: note = chemically synthesized
  source 1..20: mol_type = other DNA
gggacaaaagccgaagtcca

SEQ ID NO: 181 - DNA, 20 bp, synthetic construct
  misc_feature 1..20: note = chemically synthesized
  source 1..20: mol_type = other DNA
ggacaaaagccgaagtccag

SEQ ID NO: 182 - DNA, 20 bp, synthetic construct
  misc_feature 1..20: note = chemically synthesized
  source 1..20: mol_type = other DNA
gacaaaagccgaagtccagg

SEQ ID NO: 183 - DNA, 20 bp, synthetic construct
  misc_feature 1..20: note = chemically synthesized
  source 1..20: mol_type = other DNA
aaagccgaagtccagggggt

SEQ ID NO: 184 - DNA, 20 bp, synthetic construct
  misc_feature 1..20: note = chemically synthesized
  source 1..20: mol_type = other DNA
agccgaagtccagggggtcg

SEQ ID NO: 185 - DNA, 20 bp, synthetic construct
  misc_feature 1..20: note = chemically synthesized
  source 1..20: mol_type = other DNA
gccgaagtccagggggtcgg

SEQ ID NO: 186 - DNA, 20 bp, synthetic construct
  misc_feature 1..20: note = chemically synthesized
  source 1..20: mol_type = other DNA
cgaagtccagggggtcggag

SEQ ID NO: 187 - DNA, 20 bp, synthetic construct
  misc_feature 1..20: note = chemically synthesized
  source 1..20: mol_type = other DNA
gaagtccagggggtcggagg

SEQ ID NO: 188 - DNA, 20 bp, synthetic construct
  misc_feature 1..20: note = chemically synthesized
  source 1..20: mol_type = other DNA
aagtccagggggtcggagga

SEQ ID NO: 189 - DNA, 20 bp, synthetic construct
  misc_feature 1..20: note = chemically synthesized
  source 1..20: mol_type = other DNA
gtcggaggagggacttgccc

SEQ ID NO: 190 - DNA, 20 bp, synthetic construct
  misc_feature 1..20: note = chemically synthesized
  source 1..20: mol_type = other DNA
tcggaggagggacttgcccc

SEQ ID NO: 191 - DNA, 20 bp, synthetic construct
  misc_feature 1..20: note = chemically synthesized
  source 1..20: mol_type = other DNA
gggacttgccccaggccttg

SEQ ID NO: 192 - DNA, 20 bp, synthetic construct
  misc_feature 1..20: note = chemically synthesized
  source 1..20: mol_type = other DNA
gccccaggccttgtggacac

SEQ ID NO: 193 - DNA, 20 bp, synthetic construct
  misc_feature 1..20: note = chemically synthesized
  source 1..20: mol_type = other DNA
ccccaggccttgtggacact

SEQ ID NO: 194 - DNA, 20 bp, synthetic construct
  misc_feature 1..20: note = chemically synthesized
  source 1..20: mol_type = other DNA
caggccttgtggacactggg

SEQ ID NO: 195 - DNA, 20 bp, synthetic construct
  misc_feature 1..20: note = chemically synthesized
  source 1..20: mol_type = other DNA
aggccttgtggacactgggt

SEQ ID NO: 196 - DNA, 20 bp, synthetic construct
  misc_feature 1..20: note = chemically synthesized
  source 1..20: mol_type = other DNA
tgtggacactgggtgggctc

SEQ ID NO: 197 - DNA, 20 bp, synthetic construct
  misc_feature 1..20: note = chemically synthesized
  source 1..20: mol_type = other DNA
gtggacactgggtgggctcc

SEQ ID NO: 198 - DNA, 20 bp, synthetic construct
  misc_feature 1..20: note = chemically synthesized
  source 1..20: mol_type = other DNA
gtgggctccgggacctgaac

SEQ ID NO: 199 - DNA, 20 bp, synthetic construct
  misc_feature 1..20: note = chemically synthesized
  source 1..20: mol_type = other DNA
gggctccgggacctgaactg

SEQ ID NO: 200 - DNA, 20 bp, synthetic construct
  misc_feature 1..20: note = chemically synthesized
  source 1..20: mol_type = other DNA
ccgggacctgaactggagct

SEQ ID NO: 201 - DNA, 20 bp, synthetic construct
  misc_feature 1..20: note = chemically synthesized
  source 1..20: mol_type = other DNA
cgggacctgaactggagctg

SEQ ID NO: 202 - DNA, 20 bp, synthetic construct
  misc_feature 1..20: note = chemically synthesized
  source 1..20: mol_type = other DNA
gacctgaactggagctgagg

SEQ ID NO: 203 - DNA, 20 bp, synthetic construct
  misc_feature 1..20: note = chemically synthesized
  source 1..20: mol_type = other DNA
acctgaactggagctgagga

SEQ ID NO: 204 - DNA, 20 bp, synthetic construct
  misc_feature 1..20: note = chemically synthesized
  source 1..20: mol_type = other DNA
ctgaactggagctgaggaag

SEQ ID NO: 205 - DNA, 20 bp, synthetic construct
  misc_feature 1..20: note = chemically synthesized
  source 1..20: mol_type = other DNA
ctggagctgaggaaggagtg

SEQ ID NO: 206 - DNA, 20 bp, synthetic construct
  misc_feature 1..20: note = chemically synthesized
  source 1..20: mol_type = other DNA
aaggagtgaagctaaactcc

SEQ ID NO: 207 - DNA, 20 bp, synthetic construct
  misc_feature 1..20: note = chemically synthesized
  source 1..20: mol_type = other DNA
aagctaaactcctagatcca

SEQ ID NO: 208 - DNA, 20 bp, synthetic construct
  misc_feature 1..20: note = chemically synthesized
  source 1..20: mol_type = other DNA
agctaaactcctagatccac

SEQ ID NO: 209 - DNA, 20 bp, synthetic construct
  misc_feature 1..20: note = chemically synthesized
  source 1..20: mol_type = other DNA
cacgggataaattacccccc

SEQ ID NO: 210 - DNA, 20 bp, synthetic construct
  misc_feature 1..20: note = chemically synthesized
  source 1..20: mol_type = other DNA
ccaagtccctcacctctcca

SEQ ID NO: 211 - DNA, 20 bp, synthetic construct
  misc_feature 1..20: note = chemically synthesized
  source 1..20: mol_type = other DNA
cctctccaaagctgcccatc

SEQ ID NO: 212 - DNA, 20 bp, synthetic construct
  misc_feature 1..20: note = chemically synthesized
  source 1..20: mol_type = other DNA
tctccaaagctgcccatctg

SEQ ID NO: 213 - DNA, 20 bp, synthetic construct
  misc_feature 1..20: note = chemically synthesized
  source 1..20: mol_type = other DNA
ctccaaagctgcccatctgg

SEQ ID NO: 214 - DNA, 20 bp, synthetic construct
  misc_feature 1..20: note = chemically synthesized
  source 1..20: mol_type = other DNA
ccaaagctgcccatctggag

SEQ ID NO: 215 - DNA, 20 bp, synthetic construct
  misc_feature 1..20: note = chemically synthesized
  source 1..20: mol_type = other DNA
caaagctgcccatctggagg

SEQ ID NO: 216 - DNA, 20 bp, synthetic construct
  misc_feature 1..20: note = chemically synthesized
  source 1..20: mol_type = other DNA
agctgcccatctggaggagg

SEQ ID NO: 217 - DNA, 20 bp, synthetic construct
  misc_feature 1..20: note = chemically synthesized
  source 1..20: mol_type = other DNA
gctgcccatctggaggaggc

SEQ ID NO: 218 - DNA, 20 bp, synthetic construct
  misc_feature 1..20: note = chemically synthesized
  source 1..20: mol_type = other DNA
tgcccatctggaggaggcgg

SEQ ID NO: 219 - DNA, 20 bp, synthetic construct
  misc_feature 1..20: note = chemically synthesized
  source 1..20: mol_type = other DNA
gcccatctggaggaggcggg

SEQ ID NO: 220 - DNA, 20 bp, synthetic construct
  misc_feature 1..20: note = chemically synthesized
  source 1..20: mol_type = other DNA
cccatctggaggaggcggga

SEQ ID NO: 221 - DNA, 20 bp, synthetic construct
  misc_feature 1..20: note = chemically synthesized
  source 1..20: mol_type = other DNA
catctggaggaggcgggagg

SEQ ID NO: 222 - DNA, 20 bp, synthetic construct
  misc_feature 1..20: note = chemically synthesized
  source 1..20: mol_type = other DNA
aggaggcgggagggagctac

SEQ ID NO: 223 - DNA, 20 bp, synthetic construct
  misc_feature 1..20: note = chemically synthesized
  source 1..20: mol_type = other DNA
ggaggcgggagggagctacg

SEQ ID NO: 224 - DNA, 20 bp, synthetic construct
  misc_feature 1..20: note = chemically synthesized
  source 1..20: mol_type = other DNA
gaggcgggagggagctacga

SEQ ID NO: 225 - DNA, 20 bp, synthetic construct
  misc_feature 1..20: note = chemically synthesized
  source 1..20: mol_type = other DNA
gggagggagctacgagggcc

SEQ ID NO: 226 - DNA, 20 bp, synthetic construct
  misc_feature 1..20: note = chemically synthesized
  source 1..20: mol_type = other DNA
gagggagctacgagggccaa

SEQ ID NO: 227 - DNA, 20 bp, synthetic construct
  misc_feature 1..20: note = chemically synthesized
  source 1..20: mol_type = other DNA
gctacgagggccaagagcat

SEQ ID NO: 228 - DNA, 20 bp, synthetic construct
  misc_feature 1..20: note = chemically synthesized
  source 1..20: mol_type = other DNA
ctacgagggccaagagcatg

SEQ ID NO: 229 - DNA, 20 bp, synthetic construct
  misc_feature 1..20: note = chemically synthesized
  source 1..20: mol_type = other DNA
gggccaagagcatgaggtca

SEQ ID NO: 230 - DNA, 20 bp, synthetic construct
  misc_feature 1..20: note = chemically synthesized
  source 1..20: mol_type = other DNA
agcatgaggtcatggaaact

SEQ ID NO: 231 - DNA, 20 bp, synthetic construct
  misc_feature 1..20: note = chemically synthesized
  source 1..20: mol_type = other DNA
gcatgaggtcatggaaactc

SEQ ID NO: 232 - DNA, 20 bp, synthetic construct
  misc_feature 1..20: note = chemically synthesized
  source 1..20: mol_type = other DNA
tcatggaaactcgggctgtg

SEQ ID NO: 233 - DNA, 20 bp, synthetic construct
  misc_feature 1..20: note = chemically synthesized
  source 1..20: mol_type = other DNA
catggaaactcgggctgtga

SEQ ID NO: 234 - DNA, 20 bp, synthetic construct
  misc_feature 1..20: note = chemically synthesized
  source 1..20: mol_type = other DNA
atggaaactcgggctgtgaa

SEQ ID NO: 235 - DNA, 20 bp, synthetic construct
  misc_feature 1..20: note = chemically synthesized
  source 1..20: mol_type = other DNA
tggaaactcgggctgtgaag

SEQ ID NO: 236 - DNA, 20 bp, synthetic construct
  misc_feature 1..20: note = chemically synthesized
  source 1..20: mol_type = other DNA
tgaaggggccgcacgtgccc

SEQ ID NO: 237 - DNA, 20 bp, synthetic construct
  misc_feature 1..20: note = chemically synthesized
  source 1..20: mol_type = other DNA
gaaggggccgcacgtgccct

SEQ ID NO: 238 - DNA, 20 bp, synthetic construct
  misc_feature 1..20: note = chemically synthesized
  source 1..20: mol_type = other DNA
ggccgcacgtgccctgggaa

SEQ ID NO: 239 - DNA, 20 bp, synthetic construct
  misc_feature 1..20: note = chemically synthesized
  source 1..20: mol_type = other DNA
gccgcacgtgccctgggaac

SEQ ID NO: 240 - DNA, 20 bp, synthetic construct
  misc_feature 1..20: note = chemically synthesized
  source 1..20: mol_type = other DNA
ccctgggaacgggatgaact

SEQ ID NO: 241 - DNA, 20 bp, synthetic construct
  misc_feature 1..20: note = chemically synthesized
  source 1..20: mol_type = other DNA
tcggctcgtttatttccacc

SEQ ID NO: 242 - DNA, 20 bp, synthetic construct
  misc_feature 1..20: note = chemically synthesized
  source 1..20: mol_type = other DNA
ttatttccacccagttgtca

SEQ ID NO: 243 - DNA, 20 bp, synthetic construct
  misc_feature 1..20: note = chemically synthesized
  source 1..20: mol_type = other DNA
ccacccagttgtcatggcga

SEQ ID NO: 244 - DNA, 20 bp, synthetic construct
  misc_feature 1..20: note = chemically synthesized
  source 1..20: mol_type = other DNA
cacccagttgtcatggcgat

SEQ ID NO: 245 - DNA, 20 bp, synthetic construct
  misc_feature 1..20: note = chemically synthesized
  source 1..20: mol_type = other DNA
acccagttgtcatggcgata

SEQ ID NO: 246 - DNA, 20 bp, synthetic construct
  misc_feature 1..20: note = chemically synthesized
  source 1..20: mol_type = other DNA
cccagttgtcatggcgatag

SEQ ID NO: 247 - DNA, 20 bp, synthetic construct
  misc_feature 1..20: note = chemically synthesized
  source 1..20: mol_type = other DNA
cagttgtcatggcgataggg

SEQ ID NO: 248 - DNA, 20 bp, synthetic construct
  misc_feature 1..20: note = chemically synthesized
  source 1..20: mol_type = other DNA
agttgtcatggcgatagggg

SEQ ID NO: 249 - DNA, 20 bp, synthetic construct
  misc_feature 1..20: note = chemically synthesized
  source 1..20: mol_type = other DNA
gttgtcatggcgatagggga

SEQ ID NO: 250 - DNA, 20 bp, synthetic construct
  misc_feature 1..20: note = chemically synthesized
  source 1..20: mol_type = other DNA
ttgtcatggcgataggggag

SEQ ID NO: 251 - DNA, 20 bp, synthetic construct
  misc_feature 1..20: note = chemically synthesized
  source 1..20: mol_type = other DNA
tgtcatggcgataggggagg

SEQ ID NO: 252 - DNA, 20 bp, synthetic construct
  misc_feature 1..20: note = chemically synthesized
  source 1..20: mol_type = other DNA
gtcatggcgataggggaggg

SEQ ID NO: 253 - DNA, 20 bp, synthetic construct
  misc_feature 1..20: note = chemically synthesized
  source 1..20: mol_type = other DNA
tggcgataggggaggggggc

SEQ ID NO: 254 - DNA, 20 bp, synthetic construct
  misc_feature 1..20: note = chemically synthesized
  source 1..20: mol_type = other DNA
ggcgataggggaggggggca

SEQ ID NO: 255 - DNA, 20 bp, synthetic construct
  misc_feature 1..20: note = chemically synthesized
  source 1..20: mol_type = other DNA
cgataggggaggggggcaag

SEQ ID NO: 256 - DNA, 20 bp, synthetic construct
  misc_feature 1..20: note = chemically synthesized
  source 1..20: mol_type = other DNA
ataggggaggggggcaagga

SEQ ID NO: 257 - DNA, 20 bp, synthetic construct
  misc_feature 1..20: note = chemically synthesized
  source 1..20: mol_type = other DNA
gaggggggcaaggagagcaa

SEQ ID NO: 258 - DNA, 20 bp, synthetic construct
  misc_feature 1..20: note = chemically synthesized
  source 1..20: mol_type = other DNA
aggggggcaaggagagcaat

SEQ ID NO: 259 - DNA, 20 bp, synthetic construct
  misc_feature 1..20: note = chemically synthesized
  source 1..20: mol_type = other DNA
gcaatgggcctttccctttc

SEQ ID NO: 260 - DNA, 20 bp, synthetic construct
  misc_feature 1..20: note = chemically synthesized
  source 1..20: mol_type = other DNA
caatgggcctttccctttca

SEQ ID NO: 261 - DNA, 20 bp, synthetic construct
  misc_feature 1..20: note = chemically synthesized
  source 1..20: mol_type = other DNA
ttccctttcaaggacctgcc

SEQ ID NO: 262 - DNA, 20 bp, synthetic construct
  misc_feature 1..20: note = chemically synthesized
  source 1..20: mol_type = other DNA
tttcaaggacctgcccagta

SEQ ID NO: 263 - DNA, 20 bp, synthetic construct
  misc_feature 1..20: note = chemically synthesized
  source 1..20: mol_type = other DNA
ttcaaggacctgcccagtac

SEQ ID NO: 264 - DNA, 20 bp, synthetic construct
  misc_feature 1..20: note = chemically synthesized
  source 1..20: mol_type = other DNA
cagtacaggcatccctgtga

SEQ ID NO: 265 - DNA, 20 bp, synthetic construct
  misc_feature 1..20: note = chemically synthesized
  source 1..20: mol_type = other DNA
catccctgtgaaagatgcct

SEQ ID NO: 266 - DNA, 20 bp, synthetic construct
  misc_feature 1..20: note = chemically synthesized
  source 1..20: mol_type = other DNA
atccctgtgaaagatgcctg

SEQ ID NO: 267 - DNA, 20 bp, synthetic construct
  misc_feature 1..20: note = chemically synthesized
  source 1..20: mol_type = other DNA
tgtgaaagatgcctgaggcc

SEQ ID NO: 268 - DNA, 20 bp, synthetic construct
  misc_feature 1..20: note = chemically synthesized
  source 1..20: mol_type = other DNA
gtgaaagatgcctgaggcct

SEQ ID NO: 269 - DNA, 20 bp, synthetic construct
  misc_feature 1..20: note = chemically synthesized
  source 1..20: mol_type = other DNA
gatgcctgaggcctgggcac

SEQ ID NO: 270 - DNA, 20 bp, synthetic construct
  misc_feature 1..20: note = chemically synthesized
  source 1..20: mol_type = other DNA
atgcctgaggcctgggcacc

SEQ ID NO: 271 - DNA, 20 bp, synthetic construct
  misc_feature 1..20: note = chemically synthesized
  source 1..20: mol_type = other DNA
tgcctgaggcctgggcacca

SEQ ID NO: 272 - DNA, 20 bp, synthetic construct
  misc_feature 1..20: note = chemically synthesized
  source 1..20: mol_type = other DNA
ggcctgggcaccagggactc

SEQ ID NO: 273 - DNA, 20 bp, synthetic construct
  misc_feature 1..20: note = chemically synthesized
  source 1..20: mol_type = other DNA
cctgggcaccagggactcca

SEQ ID NO: 274 - DNA, 20 bp, synthetic construct
  misc_feature 1..20: note = chemically synthesized
  source 1..20: mol_type = other DNA
gcaccagggactccagagtc

SEQ ID NO: 275 - DNA, 20 bp, synthetic construct
  misc_feature 1..20: note = chemically synthesized
  source 1..20: mol_type = other DNA
caccagggactccagagtcc

SEQ ID NO: 276 - DNA, 20 bp, synthetic construct
  misc_feature 1..20: note = chemically synthesized
  source 1..20: mol_type = other DNA
caacccctccccattcaacc

SEQ ID NO: 277 - DNA, 20 bp, synthetic construct
  misc_feature 1..20: note = chemically synthesized
  source 1..20: mol_type = other DNA
aacccctccccattcaaccc

SEQ ID NO: 278 - DNA, 20 bp, synthetic construct
  misc_feature 1..20: note = chemically synthesized
  source 1..20: mol_type = other DNA
cccctccccattcaacccag

SEQ ID NO: 279 - DNA, 20 bp, synthetic construct
  misc_feature 1..20: note = chemically synthesized
  source 1..20: mol_type = other DNA
ccctccccattcaacccagg

SEQ ID NO: 280 - DNA, 20 bp, synthetic construct
  misc_feature 1..20: note = chemically synthesized
  source 1..20: mol_type = other DNA
ccccattcaacccaggaggc

SEQ ID NO: 281 - DNA, 20 bp, synthetic construct
  misc_feature 1..20: note = chemically synthesized
  source 1..20: mol_type = other DNA
cccattcaacccaggaggcc

SEQ ID NO: 282 - DNA, 20 bp, synthetic construct
  misc_feature 1..20: note = chemically synthesized
  source 1..20: mol_type = other DNA
caacccaggaggccaggccc

SEQ ID NO: 283 - DNA, 20 bp, synthetic construct
  misc_feature 1..20: note = chemically synthesized
  source 1..20: mol_type = other DNA
ggccccagcccttccgccct

SEQ ID NO: 284 - DNA, 20 bp, synthetic construct
  misc_feature 1..20: note = chemically synthesized
  source 1..20: mol_type = other DNA
agcccttccgccctcagatg

SEQ ID NO: 285 - DNA, 20 bp, synthetic construct
  misc_feature 1..20: note = chemically synthesized
  source 1..20: mol_type = other DNA
gcccttccgccctcagatga

SEQ ID NO: 286 - DNA, 20 bp, synthetic construct
  misc_feature 1..20: note = chemically synthesized
  source 1..20: mol_type = other DNA
ccttccgccctcagatgaag

SEQ ID NO: 287 - DNA, 20 bp, synthetic construct
  misc_feature 1..20: note = chemically synthesized
  source 1..20: mol_type = other DNA
cgccctcagatgaaggagtc

SEQ ID NO: 288 - DNA, 20 bp, synthetic construct
  misc_feature 1..20: note = chemically synthesized
  source 1..20: mol_type = other DNA
gccctcagatgaaggagtcc

SEQ ID NO: 289 - DNA, 20 bp, synthetic construct
  misc_feature 1..20: note = chemically synthesized
  source 1..20: mol_type = other DNA
gatgaaggagtccaggcccc

SEQ ID NO: 290 - DNA, 20 bp, synthetic construct
  misc_feature 1..20: note = chemically synthesized
  source 1..20: mol_type = other DNA
gcccccagcctctccccatt

SEQ ID NO: 291 - DNA, 20 bp, synthetic construct
  misc_feature 1..20: note = chemically synthesized
  source 1..20: mol_type = other DNA
agcctctccccattcagacc

SEQ ID NO: 292 - DNA, 20 bp, synthetic construct
  misc_feature 1..20: note = chemically synthesized
  source 1..20: mol_type = other DNA
gcctctccccattcagaccc

SEQ ID NO: 293 - DNA, 20 bp, synthetic construct
  misc_feature 1..20: note = chemically synthesized
  source 1..20: mol_type = other DNA
cctctccccattcagaccca

SEQ ID NO: 294 - DNA, 20 bp, synthetic construct
  misc_feature 1..20: note = chemically synthesized
  source 1..20: mol_type = other DNA
ctctccccattcagacccag

SEQ ID NO: 295 - DNA, 20 bp, synthetic construct
  misc_feature 1..20: note = chemically synthesized
  source 1..20: mol_type = other DNA
cccattcagacccaggggtc

SEQ ID NO: 296 - DNA, 20 bp, synthetic construct
  misc_feature 1..20: note = chemically synthesized
  source 1..20: mol_type = other DNA
ccattcagacccaggggtcc

SEQ ID NO: 297 - DNA, 20 bp, synthetic construct
  misc_feature 1..20: note = chemically synthesized
  source 1..20: mol_type = other DNA
cagacccaggggtccaggcc

SEQ ID NO: 298 - DNA, 20 bp, synthetic construct
  misc_feature 1..20: note = chemically synthesized
  source 1..20: mol_type = other DNA
aggcccagccccgcctccct

SEQ ID NO: 299 - DNA, 20 bp, synthetic construct
  misc_feature 1..20: note = chemically synthesized
  source 1..20: mol_type = other DNA
agccccgcctccctaagacc

SEQ ID NO: 300 - DNA, 20 bp, synthetic construct
  misc_feature 1..20: note = chemically synthesized
  source 1..20: mol_type = other DNA
cccgcctccctaagacccag

SEQ ID NO: 301 - DNA, 20 bp, synthetic construct
  misc_feature 1..20: note = chemically synthesized
  source 1..20: mol_type = other DNA
ctccctaagacccagaagtc

SEQ ID NO: 302 - DNA, 20 bp, synthetic construct
  misc_feature 1..20: note = chemically synthesized
  source 1..20: mol_type = other DNA
tccctaagacccagaagtcc

SEQ ID NO: 303 - DNA, 20 bp, synthetic construct
  misc_feature 1..20: note = chemically synthesized
  source 1..20: mol_type = other DNA
gacccagaagtccaggcccc

SEQ ID NO: 304 - DNA, 20 bp, synthetic construct
  misc_feature 1..20: note = chemically synthesized
  source 1..20: mol_type = other DNA
gcccccagcccctcctccct

SEQ ID NO: 305 - DNA, 20 bp, synthetic construct
  misc_feature 1..20: note = chemically synthesized
  source 1..20: mol_type = other DNA
ccctcctccctcagacccac

SEQ ID NO: 306 - DNA, 20 bp, synthetic construct
  misc_feature 1..20: note = chemically synthesized
  source 1..20: mol_type = other DNA
ctccctcagacccacgagtc

SEQ ID NO: 307 - DNA, 20 bp, synthetic construct
  misc_feature 1..20: note = chemically synthesized
  source 1..20: mol_type = other DNA
tccctcagacccacgagtcc

SEQ ID NO: 308 - DNA, 20 bp, synthetic construct
  misc_feature 1..20: note = chemically synthesized
  source 1..20: mol_type = other DNA
agacccacgagtccaggccc

SEQ ID NO: 309 - DNA, 20 bp, synthetic construct
  misc_feature 1..20: note = chemically synthesized
  source 1..20: mol_type = other DNA
ggccccagcccctcctccct

SEQ ID NO: 310 - DNA, 20 bp, synthetic construct
  misc_feature 1..20: note = chemically synthesized
  source 1..20: mol_type = other DNA
agcccctcctccctcggacc

SEQ ID NO: 311 - DNA, 20 bp, synthetic construct
  misc_feature 1..20: note = chemically synthesized
  source 1..20: mol_type = other DNA
gcccctcctccctcggaccc

SEQ ID NO: 312 - DNA, 20 bp, synthetic construct
  misc_feature 1..20: note = chemically synthesized
  source 1..20: mol_type = other DNA
ccctcctccctcggacccag

SEQ ID NO: 313 - DNA, 20 bp, synthetic construct
  misc_feature 1..20: note = chemically synthesized
  source 1..20: mol_type = other DNA
ctccctcggacccaggagtc

SEQ ID NO: 314 - DNA, 20 bp, synthetic construct
  misc_feature 1..20: note = chemically synthesized
  source 1..20: mol_type = other DNA
tccctcggacccaggagtcc

SEQ ID NO: 315 - DNA, 20 bp, synthetic construct
  misc_feature 1..20: note = chemically synthesized
  source 1..20: mol_type = other DNA
gacccaggagtccaggcccc

SEQ ID NO: 316 - DNA, 20 bp, synthetic construct
  misc_feature 1..20: note = chemically synthesized
  source 1..20: mol_type = other DNA
gcccccagtccctccaccct

SEQ ID NO: 317 - DNA, 20 bp, synthetic construct
  misc_feature 1..20: note = chemically synthesized
  source 1..20: mol_type = other DNA
agtccctccaccctcagacc

SEQ ID NO: 318 - DNA, 20 bp, synthetic construct
  misc_feature 1..20: note = chemically synthesized
  source 1..20: mol_type = other DNA
gtccctccaccctcagaccc

SEQ ID NO: 319 - DNA, 20 bp, synthetic construct
  misc_feature 1..20: note = chemically synthesized
  source 1..20: mol_type = other DNA
ccctccaccctcagacccag

SEQ ID NO: 320 - DNA, 20 bp, synthetic construct
  misc_feature 1..20: note = chemically synthesized
  source 1..20: mol_type = other DNA
caccctcagacccaggagtc

SEQ ID NO: 321 - DNA, 20 bp, synthetic construct
  misc_feature 1..20: note = chemically synthesized
  source 1..20: mol_type = other DNA
accctcagacccaggagtcc

SEQ ID NO: 322 - DNA, 20 bp, synthetic construct
  misc_feature 1..20: note = chemically synthesized
  source 1..20: mol_type = other DNA
agacccaggagtccaggccc

SEQ ID NO: 323 - DNA, 20 bp, synthetic construct
  misc_feature 1..20: note = chemically synthesized
  source 1..20: mol_type = other DNA
ggccccagcccctcctccct

SEQ ID NO: 324 - DNA, 20 bp, synthetic construct
  misc_feature 1..20: note = chemically synthesized
  source 1..20: mol_type = other DNA
agcccctcctccctcggacc

SEQ ID NO: 325 - DNA, 20 bp, synthetic construct
  misc_feature 1..20: note = chemically synthesized
  source 1..20: mol_type = other DNA
gcccctcctccctcggaccc

SEQ ID NO: 326 - DNA, 20 bp, synthetic construct
  misc_feature 1..20: note = chemically synthesized
  source 1..20: mol_type = other DNA
ccctcctccctcggacccag

SEQ ID NO: 327 - DNA, 20 bp, synthetic construct
  misc_feature 1..20: note = chemically synthesized
  source 1..20: mol_type = other DNA
ctccctcggacccaggagtc

SEQ ID NO: 328 - DNA, 20 bp, synthetic construct
  misc_feature 1..20: note = chemically synthesized
  source 1..20: mol_type = other DNA
tccctcggacccaggagtcc

SEQ ID NO: 329 - DNA, 20 bp, synthetic construct
  misc_feature 1..20: note = chemically synthesized
  source 1..20: mol_type = other DNA
ggacccaggagtccaggccc

SEQ ID NO: 330 - DNA, 20 bp, synthetic construct
  misc_feature 1..20: note = chemically synthesized
  source 1..20: mol_type = other DNA
agcccctcctctctcaaacc

SEQ ID NO: 331 - DNA, 20 bp, synthetic construct
  misc_feature 1..20: note = chemically synthesized
  source 1..20: mol_type = other DNA
gcccctcctctctcaaaccc

SEQ ID NO: 332 - DNA, 20 bp, synthetic construct
  misc_feature 1..20: note = chemically synthesized
  source 1..20: mol_type = other DNA
ccctcctctctcaaacccag

SEQ ID NO: 333 - DNA, 20 bp, synthetic construct
  misc_feature 1..20: note = chemically synthesized
  source 1..20: mol_type = other DNA
ctctctcaaacccaggagcc

SEQ ID NO: 334 - DNA, 20 bp, synthetic construct
  misc_feature 1..20: note = chemically synthesized
  source 1..20: mol_type = other DNA
tctctcaaacccaggagccc

SEQ ID NO: 335 - DNA, 20 bp, synthetic construct
  misc_feature 1..20: note = chemically synthesized
  source 1..20: mol_type = other DNA
aacccaggagcccaggcccc

SEQ ID NO: 336 - DNA, 20 bp, synthetic construct
  misc_feature 1..20: note = chemically synthesized
  source 1..20: mol_type = other DNA
gcccccagctcttctctgtt

SEQ ID NO: 337 - DNA, 20 bp, synthetic construct
  misc_feature 1..20: note = chemically synthesized
  source 1..20: mol_type = other DNA
gctcttctctgttcagccct

SEQ ID NO: 338 - DNA, 20 bp, synthetic construct
  misc_feature 1..20: note = chemically synthesized
  source 1..20: mol_type = other DNA
ctgttcagccctaagaatcc

SEQ ID NO: 339 - DNA, 20 bp, synthetic construct
  misc_feature 1..20: note = chemically synthesized
  source 1..20: mol_type = other DNA
agccctaagaatcctggctc

SEQ ID NO: 340 - DNA, 20 bp, synthetic construct
  misc_feature 1..20: note = chemically synthesized
  source 1..20: mol_type = other DNA
ggctccagcccctcctactc

SEQ ID NO: 341 - DNA, 20 bp, synthetic construct
  misc_feature 1..20: note = chemically synthesized
  source 1..20: mol_type = other DNA
tactctagcccccaaccccc

SEQ ID NO: 342 - DNA, 20 bp, synthetic construct
  misc_feature 1..20: note = chemically synthesized
  source 1..20: mol_type = other DNA
cccccaaccccctagccact

SEQ ID NO: 343 - DNA, 20 bp, synthetic construct
  misc_feature 1..20: note = chemically synthesized
  source 1..20: mol_type = other DNA
ccccaaccccctagccacta

SEQ ID NO: 344 - DNA, 20 bp, synthetic construct
  misc_feature 1..20: note = chemically synthesized
  source 1..20: mol_type = other DNA
cccctagccactaaggcaat

SEQ ID NO: 345 - DNA, 20 bp, synthetic construct
  misc_feature 1..20: note = chemically synthesized
  source 1..20: mol_type = other DNA
ccctagccactaaggcaatt

SEQ ID NO: 346 - DNA, 20 bp, synthetic construct
  misc_feature 1..20: note = chemically synthesized
  source 1..20: mol_type = other DNA
cctagccactaaggcaattg

SEQ ID NO: 347 - DNA, 20 bp, synthetic construct
  misc_feature 1..20: note = chemically synthesized
  source 1..20: mol_type = other DNA
ccactaaggcaattggggtg

SEQ ID NO: 348 - DNA, 20 bp, synthetic construct
  misc_feature 1..20: note = chemically synthesized
  source 1..20: mol_type = other DNA
cactaaggcaattggggtgc

SEQ ID NO: 349 - DNA, 20 bp, synthetic construct
  misc_feature 1..20: note = chemically synthesized
  source 1..20: mol_type = other DNA
aggcaattggggtgcaggaa

SEQ ID NO: 350 - DNA, 20 bp, synthetic construct
  misc_feature 1..20: note = chemically synthesized
  source 1..20: mol_type = other DNA
ggcaattggggtgcaggaat

SEQ ID NO: 351 - DNA, 20 bp, synthetic construct
  misc_feature 1..20: note = chemically synthesized
  source 1..20: mol_type = other DNA
gcaattggggtgcaggaatg

SEQ ID NO: 352 - DNA, 20 bp, synthetic construct
  misc_feature 1..20: note = chemically synthesized
  source 1..20: mol_type = other DNA
caattggggtgcaggaatgg

SEQ ID NO: 353 - DNA, 20 bp, synthetic construct
  misc_feature 1..20: note = chemically synthesized
  source 1..20: mol_type = other DNA
ttggggtgcaggaatggggg

SEQ ID NO: 354 - DNA, 20 bp, synthetic construct
  misc_feature 1..20: note = chemically synthesized
  source 1..20: mol_type = other DNA
tggggtgcaggaatgggggc

SEQ ID NO: 355 - DNA, 20 bp, synthetic construct
  misc_feature 1..20: note = chemically synthesized
  source 1..20: mol_type = other DNA
ggggtgcaggaatgggggca

SEQ ID NO: 356 - DNA, 20 bp, synthetic construct
  misc_feature 1..20: note = chemically synthesized
  source 1..20: mol_type = other DNA
caggaatgggggcagggtac

SEQ ID NO: 357 - DNA, 20 bp, synthetic construct
  misc_feature 1..20: note = chemically synthesized
  source 1..20: mol_type = other DNA
ggcagggtaccagcctcacc

SEQ ID NO: 358 - DNA, 20 bp, synthetic construct
  misc_feature 1..20: note = chemically synthesized
  source 1..20: mol_type = other DNA
agggtaccagcctcaccaag

SEQ ID NO: 359 - DNA, 20 bp, synthetic construct
  misc_feature 1..20: note = chemically synthesized
  source 1..20: mol_type = other DNA
aagtggttgataaacccacg

SEQ ID NO: 360 - DNA, 20 bp, synthetic construct
  misc_feature 1..20: note = chemically synthesized
  source 1..20: mol_type = other DNA
agtggttgataaacccacgt

SEQ ID NO: 361 - DNA, 20 bp, synthetic construct
  misc_feature 1..20: note = chemically synthesized
  source 1..20: mol_type = other DNA
gtggttgataaacccacgtg

SEQ ID NO: 362 - DNA, 20 bp, synthetic construct
  misc_feature 1..20: note = chemically synthesized
  source 1..20: mol_type = other DNA
aaacccacgtggggtaccct

SEQ ID NO: 363 - DNA, 20 bp, synthetic construct
  misc_feature 1..20: note = chemically synthesized
  source 1..20: mol_type = other DNA
cgtggggtaccctaagaact

SEQ ID NO: 364 - DNA, 20 bp, synthetic construct
  misc_feature 1..20: note = chemically synthesized
  source 1..20: mol_type = other DNA
gtggggtaccctaagaactt

SEQ ID NO: 365 - DNA, 20 bp, synthetic construct
  misc_feature 1..20: note = chemically synthesized
  source 1..20: mol_type = other DNA
gtaccctaagaacttgggaa

SEQ ID NO: 366 - DNA, 20 bp, synthetic construct
  misc_feature 1..20: note = chemically synthesized
  source 1..20: mol_type = other DNA
taagaacttgggaacagcca

SEQ ID NO: 367 - DNA, 20 bp, synthetic construct
  misc_feature 1..20: note = chemically synthesized
  source 1..20: mol_type = other DNA
gaacttgggaacagccacag

SEQ ID NO: 368 - DNA, 20 bp, synthetic construct
  misc_feature 1..20: note = chemically synthesized
  source 1..20: mol_type = other DNA
aacttgggaacagccacagc

SEQ ID NO: 369 - DNA, 20 bp, synthetic construct
  misc_feature 1..20: note = chemically synthesized
  source 1..20: mol_type = other DNA
acttgggaacagccacagca

SEQ ID NO: 370 - DNA, 20 bp, synthetic construct
  misc_feature 1..20: note = chemically synthesized
  source 1..20: mol_type = other DNA
cttgggaacagccacagcag

SEQ ID NO: 371 - DNA, 20 bp, synthetic construct
  misc_feature 1..20: note = chemically synthesized
  source 1..20: mol_type = other DNA
ttgggaacagccacagcagg

SEQ ID NO: 372 - DNA, 20 bp, synthetic construct
  misc_feature 1..20: note = chemically synthesized
  source 1..20: mol_type = other DNA
tgggaacagccacagcaggg

SEQ ID NO: 373 - DNA, 20 bp, synthetic construct
  misc_feature 1..20: note = chemically synthesized
  source 1..20: mol_type = other DNA
cacagcaggggggcgatgct

SEQ ID NO: 374 - DNA, 20 bp, synthetic construct
  misc_feature 1..20: note = chemically synthesized
  source 1..20: mol_type = other DNA
acagcaggggggcgatgctt

SEQ ID NO: 375 - DNA, 20 bp, synthetic construct
  misc_feature 1..20: note = chemically synthesized
  source 1..20: mol_type = other DNA
cagcaggggggcgatgcttg

SEQ ID NO: 376 - DNA, 20 bp, synthetic construct
  misc_feature 1..20: note = chemically synthesized
  source 1..20: mol_type = other DNA
gcgatgcttggggacctgcc

SEQ ID NO: 377 - DNA, 20 bp, synthetic construct
  misc_feature 1..20: note = chemically synthesized
  source 1..20: mol_type = other DNA
gatgcttggggacctgcctg

SEQ ID NO: 378 - DNA, 20 bp, synthetic construct
  misc_feature 1..20: note = chemically synthesized
  source 1..20: mol_type = other DNA
gcttggggacctgcctggag

SEQ ID NO: 379 - DNA, 20 bp, synthetic construct
  misc_feature 1..20: note = chemically synthesized
  source 1..20: mol_type = other DNA
cttggggacctgcctggaga

SEQ ID NO: 380 - DNA, 20 bp, synthetic construct
  misc_feature 1..20: note = chemically synthesized
  source 1..20: mol_type = other DNA
gacctgcctggagaaggatg

SEQ ID NO: 381 - DNA, 20 bp, synthetic construct
  misc_feature 1..20: note = chemically synthesized
  source 1..20: mol_type = other DNA
acctgcctggagaaggatgc

SEQ ID NO: 382 - DNA, 20 bp, synthetic construct
  misc_feature 1..20: note = chemically synthesized
  source 1..20: mol_type = other DNA
cctggagaaggatgcaggac

SEQ ID NO: 383 - DNA, 20 bp, synthetic construct
  misc_feature 1..20: note = chemically synthesized
  source 1..20: mol_type = other DNA
aggatgcaggacgagaaaca

SEQ ID NO: 384 - DNA, 20 bp, synthetic construct
  misc_feature 1..20: note = chemically synthesized
  source 1..20: mol_type = other DNA
caggacgagaaacacagccc

SEQ ID NO: 385 - DNA, 20 bp, synthetic construct
  misc_feature 1..20: note = chemically synthesized
  source 1..20: mol_type = other DNA
aggacgagaaacacagcccc

SEQ ID NO: 386 - DNA, 20 bp, synthetic construct
  misc_feature 1..20: note = chemically synthesized
  source 1..20: mol_type = other DNA
acgagaaacacagccccagg

SEQ ID NO: 387 - DNA, 20 bp, synthetic construct
  misc_feature 1..20: note = chemically synthesized
  source 1..20: mol_type = other DNA
gagaaacacagccccaggtg

SEQ ID NO: 388 - DNA, 20 bp, synthetic construct
  misc_feature 1..20: note = chemically synthesized
  source 1..20: mol_type = other DNA
acagccccaggtggagaaac

SEQ ID NO: 389 - DNA, 20 bp, synthetic construct
  misc_feature 1..20: note = chemically synthesized
  source 1..20: mol_type = other DNA
ccccaggtggagaaactggc

SEQ ID NO: 390 - DNA, 20 bp, synthetic construct
  misc_feature 1..20: note = chemically synthesized
  source 1..20: mol_type = other DNA
cccaggtggagaaactggcc

SEQ ID NO: 391 - DNA, 20 bp, synthetic construct
  misc_feature 1..20: note = chemically synthesized
  source 1..20: mol_type = other DNA
ggagaaactggccgggaatc

SEQ ID NO: 392 - DNA, 20 bp, synthetic construct
  misc_feature 1..20: note = chemically synthesized
  source 1..20: mol_type = other DNA
agaaactggccgggaatcaa

SEQ ID NO: 393 - DNA, 20 bp, synthetic construct
  misc_feature 1..20: note = chemically synthesized
  source 1..20: mol_type = other DNA
gccgggaatcaagagtcacc

SEQ ID NO: 394 - DNA, 20 bp, synthetic construct
  misc_feature 1..20: note = chemically synthesized
  source 1..20: mol_type = other DNA
cgggaatcaagagtcaccca

SEQ ID NO: 395 - DNA, 20 bp, synthetic construct
  misc_feature 1..20: note = chemically synthesized
  source 1..20: mol_type = other DNA
aatcaagagtcacccagaga

SEQ ID NO: 396 - DNA, 20 bp, synthetic construct
  misc_feature 1..20: note = chemically synthesized
  source 1..20: mol_type = other DNA
accaaccatccctgttttcc

SEQ ID NO: 397 - DNA, 20 bp, synthetic construct
  misc_feature 1..20: note = chemically synthesized
  source 1..20: mol_type = other DNA
ccaaccatccctgttttcct

SEQ ID NO: 398 - DNA, 20 bp, synthetic construct
  misc_feature 1..20: note = chemically synthesized
  source 1..20: mol_type = other DNA
atccctgttttcctaggact

SEQ ID NO: 399 - DNA, 20 bp, synthetic construct
  misc_feature 1..20: note = chemically synthesized
  source 1..20: mol_type = other DNA
tccctgttttcctaggactg

SEQ ID NO: 400 - DNA, 20 bp, synthetic construct
  misc_feature 1..20: note = chemically synthesized
  source 1..20: mol_type = other DNA
ccctgttttcctaggactga

SEQ ID NO: 401 - DNA, 20 bp, synthetic construct
  misc_feature 1..20: note = chemically synthesized
  source 1..20: mol_type = other DNA
tttcctaggactgagggttt

SEQ ID NO: 402 - DNA, 20 bp, synthetic construct
  misc_feature 1..20: note = chemically synthesized
  source 1..20: mol_type = other DNA
gagggtttcagtgctaaaac

SEQ ID NO: 403 - DNA, 20 bp, synthetic construct
  misc_feature 1..20: note = chemically synthesized
  source 1..20: mol_type = other DNA
agggtttcagtgctaaaact

SEQ ID NO: 404 - DNA, 20 bp, synthetic construct
  misc_feature 1..20: note = chemically synthesized
  source 1..20: mol_type = other DNA
gtgctaaaactaggctgtcc

SEQ ID NO: 405 - DNA, 20 bp, synthetic construct
  misc_feature 1..20: note = chemically synthesized
  source 1..20: mol_type = other DNA
tgctaaaactaggctgtcct

SEQ ID NO: 406 - DNA, 20 bp, synthetic construct
  misc_feature 1..20: note = chemically synthesized
  source 1..20: mol_type = other DNA
actaggctgtcctgggcaaa

SEQ ID NO: 407 - DNA, 20 bp, synthetic construct
  misc_feature 1..20: note = chemically synthesized
  source 1..20: mol_type = other DNA
ctgtcctgggcaaacagcat

SEQ ID NO: 408 - DNA, 20 bp, synthetic construct
  misc_feature 1..20: note = chemically synthesized
  source 1..20: mol_type = other DNA
cctgggcaaacagcataagc

SEQ ID NO: 409 - DNA, 20 bp, synthetic construct
  misc_feature 1..20: note = chemically synthesized
  source 1..20: mol_type = other DNA
taagctggtcaccccacacc

SEQ ID NO: 410 - DNA, 20 bp, synthetic construct
  misc_feature 1..20: note = chemically synthesized
  source 1..20: mol_type = other DNA
acccagacctgacccaaacc

SEQ ID NO: 411 - DNA, 20 bp, synthetic construct
  misc_feature 1..20: note = chemically synthesized
  source 1..20: mol_type = other DNA
aacccagctcccctgcttct

SEQ ID NO: 412 - DNA, 20 bp, synthetic construct
  misc_feature 1..20: note = chemically synthesized
  source 1..20: mol_type = other DNA
gcttcttggccacgtaacct

SEQ ID NO: 413 - DNA, 20 bp, synthetic construct
  misc_feature 1..20: note = chemically synthesized
  source 1..20: mol_type = other DNA
tcttggccacgtaacctgag

SEQ ID NO: 414 - DNA, 20 bp, synthetic construct
  misc_feature 1..20: note = chemically synthesized
  source 1..20: mol_type = other DNA
cttggccacgtaacctgaga

SEQ ID NO: 415 - DNA, 20 bp, synthetic construct
  misc_feature 1..20: note = chemically synthesized
  source 1..20: mol_type = other DNA
ttggccacgtaacctgagaa

SEQ ID NO: 416 - DNA, 20 bp, synthetic construct
  misc_feature 1..20: note = chemically synthesized
  source 1..20: mol_type = other DNA
aatccctcctctctgaaccc

SEQ ID NO: 417 - DNA, 20 bp, synthetic construct
  misc_feature 1..20: note = chemically synthesized
  source 1..20: mol_type = other DNA
cccagcccaccccaatgctc

SEQ ID NO: 418 - DNA, 20 bp, synthetic construct
  misc_feature 1..20: note = chemically synthesized
  source 1..20: mol_type = other DNA
ccagcccaccccaatgctcc

SEQ ID NO: 419 - DNA, 20 bp, synthetic construct
  misc_feature 1..20: note = chemically synthesized
  source 1..20: mol_type = other DNA
ccccaatgctccaggcctcc

SEQ ID NO: 420 - DNA, 20 bp, synthetic construct
  misc_feature 1..20: note = chemically synthesized
  source 1..20: mol_type = other DNA
cccaatgctccaggcctcct

SEQ ID NO: 421 - DNA, 20 bp, synthetic construct
  misc_feature 1..20: note = chemically synthesized
  source 1..20: mol_type = other DNA
aggcctcctgggataccccg

SEQ ID NO: 422 - DNA, 20 bp, synthetic construct
  misc_feature 1..20: note = chemically synthesized
  source 1..20: mol_type = other DNA
gcctcctgggataccccgaa

SEQ ID NO: 423 - DNA, 20 bp, synthetic construct
  misc_feature 1..20: note = chemically synthesized
  source 1..20: mol_type = other DNA
cctgggataccccgaagagt

SEQ ID NO: 424 - DNA, 20 bp, synthetic construct
  misc_feature 1..20: note = chemically synthesized
  source 1..20: mol_type = other DNA
ccccgaagagtgagtttgcc

SEQ ID NO: 425 - DNA, 20 bp, synthetic construct
  misc_feature 1..20: note = chemically synthesized
  source 1..20: mol_type = other DNA
cgaagagtgagtttgccaag

SEQ ID NO: 426 - DNA, 20 bp, synthetic construct
  misc_feature 1..20: note = chemically synthesized
  source 1..20: mol_type = other DNA
tttgccaagcagtcacccca

SEQ ID NO: 427 - DNA, 20 bp, synthetic construct
  misc_feature 1..20: note = chemically synthesized
  source 1..20: mol_type = other DNA
ccaagcagtcaccccacagt

SEQ ID NO: 428 - DNA, 20 bp, synthetic construct
  misc_feature 1..20: note = chemically synthesized
  source 1..20: mol_type = other DNA
aagcagtcaccccacagttg

SEQ ID NO: 429 - DNA, 20 bp, synthetic construct
  misc_feature 1..20: note = chemically synthesized
  source 1..20: mol_type = other DNA
agcagtcaccccacagttgg

SEQ ID NO: 430 - DNA, 20 bp, synthetic construct
  misc_feature 1..20: note = chemically synthesized
  source 1..20: mol_type = other DNA
cagtcaccccacagttggag

SEQ ID NO: 431 - DNA, 20 bp, synthetic construct
  misc_feature 1..20: note = chemically synthesized
  source 1..20: mol_type = other DNA
ttggaggagaatccacccaa

SEQ ID NO: 432 - DNA, 20 bp, synthetic construct
  misc_feature 1..20: note = chemically synthesized
  source 1..20: mol_type = other DNA
tggaggagaatccacccaaa

SEQ ID NO: 433 - DNA, 20 bp, synthetic construct
  misc_feature 1..20: note = chemically synthesized
  source 1..20: mol_type = other DNA
aggagaatccacccaaaagg

SEQ ID NO: 434 - DNA, 20 bp, synthetic construct
  misc_feature 1..20: note = chemically synthesized
  source 1..20: mol_type = other DNA
aatccacccaaaaggcagcc

SEQ ID NO: 435 - DNA, 20 bp, synthetic construct
  misc_feature 1..20: note = chemically synthesized
  source 1..20: mol_type = other DNA
ccacccaaaaggcagcctgg

SEQ ID NO: 436 - DNA, 20 bp, synthetic construct
  misc_feature 1..20: note = chemically synthesized
  source 1..20: mol_type = other DNA
ccaaaaggcagcctggtaga

SEQ ID NO: 437 - DNA, 20 bp, synthetic construct
  misc_feature 1..20: note = chemically synthesized
  source 1..20: mol_type = other DNA
caaaaggcagcctggtagac

SEQ ID NO: 438 - DNA, 20 bp, synthetic construct
  misc_feature 1..20: note = chemically synthesized
  source 1..20: mol_type = other DNA
aaaaggcagcctggtagaca

SEQ ID NO: 439 - DNA, 20 bp, synthetic construct
  misc_feature 1..20: note = chemically synthesized
  source 1..20: mol_type = other DNA
ggcagcctggtagacagggc

SEQ ID NO: 440 - DNA, 20 bp, synthetic construct
  misc_feature 1..20: note = chemically synthesized
  source 1..20: mol_type = other DNA
gcagcctggtagacagggct

SEQ ID NO: 441 - DNA, 20 bp, synthetic construct
  misc_feature 1..20: note = chemically synthesized
  source 1..20: mol_type = other DNA
cagcctggtagacagggctg

SEQ ID NO: 442 - DNA, 20 bp, synthetic construct
  misc_feature 1..20: note = chemically synthesized
  source 1..20: mol_type = other DNA
cctggtagacagggctgggg

SEQ ID NO: 443 - DNA, 20 bp, synthetic construct
  misc_feature 1..20: note = chemically synthesized
  source 1..20: mol_type = other DNA
agggctggggtggcctctcg

SEQ ID NO: 444 - DNA, 20 bp, synthetic construct
  misc_feature 1..20: note = chemically synthesized
  source 1..20: mol_type = other DNA
gggctggggtggcctctcgt

SEQ ID NO: 445 - DNA, 20 bp, synthetic construct
  misc_feature 1..20: note = chemically synthesized
  source 1..20: mol_type = other DNA
ggctggggtggcctctcgtg

SEQ ID NO: 446 - DNA, 20 bp, synthetic construct
  misc_feature 1..20: note = chemically synthesized
  source 1..20: mol_type = other DNA
gggtggcctctcgtggggtc

SEQ ID NO: 447 - DNA, 20 bp, synthetic construct
  misc_feature 1..20: note = chemically synthesized
  source 1..20: mol_type = other DNA
ggtggcctctcgtggggtcc

SEQ ID NO: 448 - DNA, 20 bp, synthetic construct
  misc_feature 1..20: note = chemically synthesized
  source 1..20: mol_type = other DNA
cctctcgtggggtccaggcc

SEQ ID NO: 449 - DNA, 20 bp, synthetic construct
  misc_feature 1..20: note = chemically synthesized
  source 1..20: mol_type = other DNA
ctcgtggggtccaggccaag

SEQ ID NO: 450 - DNA, 20 bp, synthetic construct
  misc_feature 1..20: note = chemically synthesized
  source 1..20: mol_type = other DNA
tcgtggggtccaggccaagt

SEQ ID NO: 451 - DNA, 20 bp, synthetic construct
  misc_feature 1..20: note = chemically synthesized
  source 1..20: mol_type = other DNA
tggggtccaggccaagtagg

SEQ ID NO: 452 - DNA, 20 bp, synthetic construct
  misc_feature 1..20: note = chemically synthesized
  source 1..20: mol_type = other DNA
tccaggccaagtaggtggcc

SEQ ID NO: 453 - DNA, 20 bp, synthetic construct
  misc_feature 1..20: note = chemically synthesized
  source 1..20: mol_type = other DNA
ccaggccaagtaggtggcct

SEQ ID NO: 454 - DNA, 20 bp, synthetic construct
  misc_feature 1..20: note = chemically synthesized
  source 1..20: mol_type = other DNA
caggccaagtaggtggcctg

SEQ ID NO: 455 - DNA, 20 bp, synthetic construct
  misc_feature 1..20: note = chemically synthesized
  source 1..20: mol_type = other DNA
agtaggtggcctggggcctc

SEQ ID NO: 456 - DNA, 20 bp, synthetic construct
  misc_feature 1..20: note = chemically synthesized
  source 1..20: mol_type = other DNA
gtaggtggcctggggcctct

SEQ ID NO: 457 - DNA, 20 bp, synthetic construct
  misc_feature 1..20: note = chemically synthesized
  source 1..20: mol_type = other DNA
taggtggcctggggcctctg

SEQ ID NO: 458 - DNA, 20 bp, synthetic construct
  misc_feature 1..20: note = chemically synthesized
  source 1..20: mol_type = other DNA
aggtggcctggggcctctgg

SEQ ID NO: 459 - DNA, 20 bp, synthetic construct
  misc_feature 1..20: note = chemically synthesized
  source 1..20: mol_type = other DNA
cctggggcctctgggggatg

SEQ ID NO: 460 - DNA, 20 bp, synthetic construct
  misc_feature 1..20: note = chemically synthesized
  source 1..20: mol_type = other DNA
ctggggcctctgggggatgc

SEQ ID NO: 461 - DNA, 20 bp, synthetic construct
  misc_feature 1..20: note = chemically synthesized
  source 1..20: mol_type = other DNA
tggggcctctgggggatgca

SEQ ID NO: 462 - DNA, 20 bp, synthetic construct
  misc_feature 1..20: note = chemically synthesized
  source 1..20: mol_type = other DNA
ggggcctctgggggatgcag

SEQ ID NO: 463 - DNA, 20 bp, synthetic construct
  misc_feature 1..20: note = chemically synthesized
  source 1..20: mol_type = other DNA
gcctctgggggatgcagggg

SEQ ID NO: 464 - DNA, 20 bp, synthetic construct
  misc_feature 1..20: note = chemically synthesized
  source 1..20: mol_type = other DNA
cctctgggggatgcagggga

SEQ ID NO: 465 - DNA, 20 bp, synthetic construct
  misc_feature 1..20: note = chemically synthesized
  source 1..20: mol_type = other DNA
ctctgggggatgcaggggaa

SEQ ID NO: 466 - DNA, 20 bp, synthetic construct
  misc_feature 1..20: note = chemically synthesized
  source 1..20: mol_type = other DNA
tctgggggatgcaggggaag

SEQ ID NO: 467 - DNA, 20 bp, synthetic construct
  misc_feature 1..20: note = chemically synthesized
  source 1..20: mol_type = other DNA
ctgggggatgcaggggaagg

SEQ ID NO: 468 - DNA, 20 bp, synthetic construct
  misc_feature 1..20: note = chemically synthesized
  source 1..20: mol_type = other DNA
gatgcaggggaagggggatg

SEQ ID NO: 469 - DNA, 20 bp, synthetic construct
  misc_feature 1..20: note = chemically synthesized
  source 1..20: mol_type = other DNA
atgcaggggaagggggatgc

SEQ ID NO: 470 - DNA, 20 bp, synthetic construct
  misc_feature 1..20: note = chemically synthesized
  source 1..20: mol_type = other DNA
tgcaggggaagggggatgca

SEQ ID NO: 471 - DNA, 20 bp, synthetic construct
  misc_feature 1..20: note = chemically synthesized
  source 1..20: mol_type = other DNA
gcaggggaagggggatgcag

SEQ ID NO: 472 - DNA, 20 bp, synthetic construct
  misc_feature 1..20: note = chemically synthesized
  source 1..20: mol_type = other DNA
ggaagggggatgcaggggaa

SEQ ID NO: 473 - DNA, 20 bp, synthetic construct
  misc_feature 1..20: note = chemically synthesized
  source 1..20: mol_type = other DNA
gaagggggatgcaggggaac

SEQ ID NO: 474 - DNA, 20 bp, synthetic construct
  misc_feature 1..20: note = chemically synthesized
  source 1..20: mol_type = other DNA
aagggggatgcaggggaacg

SEQ ID NO: 475 - DNA, 20 bp, synthetic construct
  misc_feature 1..20: note = chemically synthesized
  source 1..20: mol_type = other DNA
gatgcaggggaacggggatg

SEQ ID NO: 476 - DNA, 20 bp, synthetic construct
  misc_feature 1..20: note = chemically synthesized
  source 1..20: mol_type = other DNA
atgcaggggaacggggatgc

SEQ ID NO: 477 - DNA, 20 bp, synthetic construct
  misc_feature 1..20: note = chemically synthesized
  source 1..20: mol_type = other DNA
tgcaggggaacggggatgca

SEQ ID NO: 478 - DNA, 20 bp, synthetic construct
  misc_feature 1..20: note = chemically synthesized
  source 1..20: mol_type = other DNA
gcaggggaacggggatgcag

SEQ ID NO: 479 - DNA, 20 bp, synthetic construct
  misc_feature 1..20: note = chemically synthesized
  source 1..20: mol_type = other DNA
ggaacggggatgcaggggaa

SEQ ID NO: 480 - DNA, 20 bp, synthetic construct
  misc_feature 1..20: note = chemically synthesized
  source 1..20: mol_type = other DNA
gaacggggatgcaggggaac

SEQ ID NO: 481 - DNA, 20 bp, synthetic construct
  misc_feature 1..20: note = chemically synthesized
  source 1..20: mol_type = other DNA
aacggggatgcaggggaacg

SEQ ID NO: 482 - DNA, 20 bp, synthetic construct
  misc_feature 1..20: note = chemically synthesized
  source 1..20: mol_type = other DNA
ggatgcaggggaacggggct

SEQ ID NO: 483 - DNA, 20 bp, synthetic construct
  misc_feature 1..20: note = chemically synthesized
  source 1..20: mol_type = other DNA
ggggaacggggctcagtctg

SEQ ID NO: 484 - DNA, 20 bp, synthetic construct
  misc_feature 1..20: note = chemically synthesized
  source 1..20: mol_type = other DNA
ggaacggggctcagtctgaa

SEQ ID NO: 485 - DNA, 20 bp, synthetic construct
  misc_feature 1..20: note = chemically synthesized
  source 1..20: mol_type = other DNA
acggggctcagtctgaagag

SEQ ID NO: 486 - DNA, 20 bp, synthetic construct
  misc_feature 1..20: note = chemically synthesized
  source 1..20: mol_type = other DNA
ggggctcagtctgaagagca

SEQ ID NO: 487 - DNA, 20 bp, synthetic construct
  misc_feature 1..20: note = chemically synthesized
  source 1..20: mol_type = other DNA
ctcagtctgaagagcagagc

SEQ ID NO: 488 - DNA, 20 bp, synthetic construct
  misc_feature 1..20: note = chemically synthesized
  source 1..20: mol_type = other DNA
tcagtctgaagagcagagcc

SEQ ID NO: 489 - DNA, 20 bp, synthetic construct
  misc_feature 1..20: note = chemically synthesized
  source 1..20: mol_type = other DNA
agcagagccaggaacccctg

SEQ ID NO: 490 - DNA, 20 bp, synthetic construct
  misc_feature 1..20: note = chemically synthesized
  source 1..20: mol_type = other DNA
gcagagccaggaacccctgt

SEQ ID NO: 491 - DNA, 20 bp, synthetic construct
  misc_feature 1..20: note = chemically synthesized
  source 1..20: mol_type = other DNA
cagagccaggaacccctgta

SEQ ID NO: 492 - DNA, 20 bp, synthetic construct
  misc_feature 1..20: note = chemically synthesized
  source 1..20: mol_type = other DNA
agccaggaacccctgtaggg

SEQ ID NO: 493 - DNA, 20 bp, synthetic construct
  misc_feature 1..20: note = chemically synthesized
  source 1..20: mol_type = other DNA
gccaggaacccctgtaggga

SEQ ID NO: 494 - DNA, 20 bp, synthetic construct
  misc_feature 1..20: note = chemically synthesized
  source 1..20: mol_type = other DNA
ccaggaacccctgtagggaa

SEQ ID NO: 495 - DNA, 20 bp, synthetic construct
  misc_feature 1..20: note = chemically synthesized
  source 1..20: mol_type = other DNA
caggaacccctgtagggaag

SEQ ID NO: 496 - DNA, 20 bp, synthetic construct
  misc_feature 1..20: note = chemically synthesized
  source 1..20: mol_type = other DNA
gaacccctgtagggaagggg

SEQ ID NO: 497 - DNA, 20 bp, synthetic construct
  misc_feature 1..20: note = chemically synthesized
  source 1..20: mol_type = other DNA
aacccctgtagggaaggggc

SEQ ID NO: 498 - DNA, 20 bp, synthetic construct
  misc_feature 1..20: note = chemically synthesized
  source 1..20: mol_type = other DNA
cccctgtagggaaggggcag

SEQ ID NO: 499 - DNA, 20 bp, synthetic construct
  misc_feature 1..20: note = chemically synthesized
  source 1..20: mol_type = other DNA
cctgtagggaaggggcagga

SEQ ID NO: 500 - DNA, 20 bp, synthetic construct
  misc_feature 1..20: note = chemically synthesized
  source 1..20: mol_type = other DNA
tagggaaggggcaggagagc

SEQ ID NO: 501 - DNA, 20 bp, synthetic construct
  misc_feature 1..20: note = chemically synthesized
  source 1..20: mol_type = other DNA
agggaaggggcaggagagcc

SEQ ID NO: 502 - DNA, 20 bp, synthetic construct
  misc_feature 1..20: note = chemically synthesized
  source 1..20: mol_type = other DNA
gggaaggggcaggagagcca

SEQ ID NO: 503 - DNA, 20 bp, synthetic construct
  misc_feature 1..20: note = chemically synthesized
  source 1..20: mol_type = other DNA
ggaaggggcaggagagccag

SEQ ID NO: 504 - DNA, 20 bp, synthetic construct
  misc_feature 1..20: note = chemically synthesized
  source 1..20: mol_type = other DNA
ggcaggagagccaggggcat

SEQ ID NO: 505 - DNA, 20 bp, synthetic construct
  misc_feature 1..20: note = chemically synthesized
  source 1..20: mol_type = other DNA
ggagagccaggggcatgaga

SEQ ID NO: 506 - DNA, 20 bp, synthetic construct
  misc_feature 1..20: note = chemically synthesized
  source 1..20: mol_type = other DNA
gagccaggggcatgagatgg

SEQ ID NO: 507 - DNA, 20 bp, synthetic construct
  misc_feature 1..20: note = chemically synthesized
  source 1..20: mol_type = other DNA
aggggcatgagatggtggac

SEQ ID NO: 508 - DNA, 20 bp, synthetic construct
  misc_feature 1..20: note = chemically synthesized
  source 1..20: mol_type = other DNA
ggggcatgagatggtggacg

SEQ ID NO: 509 - DNA, 20 bp, synthetic construct
  misc_feature 1..20: note = chemically synthesized
  source 1..20: mol_type = other DNA
gcatgagatggtggacgagg

SEQ ID NO: 510 - DNA, 20 bp, synthetic construct
  misc_feature 1..20: note = chemically synthesized
  source 1..20: mol_type = other DNA
catgagatggtggacgagga

SEQ ID NO: 511 - DNA, 20 bp, synthetic construct
  misc_feature 1..20: note = chemically synthesized
  source 1..20: mol_type = other DNA
atgagatggtggacgaggaa

SEQ ID NO: 512 - DNA, 20 bp, synthetic construct
  misc_feature 1..20: note = chemically synthesized
  source 1..20: mol_type = other DNA
tgagatggtggacgaggaag

SEQ ID NO: 513 - DNA, 20 bp, synthetic construct
  misc_feature 1..20: note = chemically synthesized
  source 1..20: mol_type = other DNA
gagatggtggacgaggaagg

SEQ ID NO: 514 - DNA, 20 bp, synthetic construct
  misc_feature 1..20: note = chemically synthesized
  source 1..20: mol_type = other DNA
tggtggacgaggaaggggga

SEQ ID NO: 515 - DNA, 20 bp, synthetic construct
  misc_feature 1..20: note = chemically synthesized
  source 1..20: mol_type = other DNA
ggtggacgaggaagggggac

SEQ ID NO: 516 - DNA, 20 bp, synthetic construct
  misc_feature 1..20: note = chemically synthesized
  source 1..20: mol_type = other DNA
gtggacgaggaagggggaca

SEQ ID NO: 517 - DNA, 20 bp, synthetic construct
  misc_feature 1..20: note = chemically synthesized
  source 1..20: mol_type = other DNA
gacgaggaagggggacaggg

SEQ ID NO: 518 - DNA, 20 bp, synthetic construct
  misc_feature 1..20: note = chemically synthesized
  source 1..20: mol_type = other DNA
gaagggggacagggaagcct

SEQ ID NO: 519 - DNA, 20 bp, synthetic construct
  misc_feature 1..20: note = chemically synthesized
  source 1..20: mol_type = other DNA
ggaagcctgagcgcctctcc

SEQ ID NO: 520 - DNA, 20 bp, synthetic construct
  misc_feature 1..20: note = chemically synthesized
  source 1..20: mol_type = other DNA
gaagcctgagcgcctctcct

SEQ ID NO: 521 - DNA, 20 bp, synthetic construct
  misc_feature 1..20: note = chemically synthesized
  source 1..20: mol_type = other DNA
gcgcctctcctgggcttgcc

SEQ ID NO: 522 - DNA, 20 bp, synthetic construct
  misc_feature 1..20: note = chemically synthesized
  source 1..20: mol_type = other DNA
cgcctctcctgggcttgcca

SEQ ID NO: 523 - DNA, 20 bp, synthetic construct
  misc_feature 1..20: note = chemically synthesized
  source 1..20: mol_type = other DNA
gcttgccaaggactcaaacc

SEQ ID NO: 524 - DNA, 20 bp, synthetic construct
  misc_feature 1..20: note = chemically synthesized
  source 1..20: mol_type = other DNA
tgccaaggactcaaacccag

SEQ ID NO: 525 - DNA, 20 bp, synthetic construct
  misc_feature 1..20: note = chemically synthesized
  source 1..20: mol_type = other DNA
aggactcaaacccagaagcc

SEQ ID NO: 526 - DNA, 20 bp, synthetic construct
  misc_feature 1..20: note = chemically synthesized
  source 1..20: mol_type = other DNA
gactcaaacccagaagccca

SEQ ID NO: 527 - DNA, 20 bp, synthetic construct
  misc_feature 1..20: note = chemically synthesized
  source 1..20: mol_type = other DNA
tcaaacccagaagcccagag

SEQ ID NO: 528 - DNA, 20 bp, synthetic construct
  misc_feature 1..20: note = chemically synthesized
  source 1..20: mol_type = other DNA
caaacccagaagcccagagc

SEQ ID NO: 529 - DNA, 20 bp, synthetic construct
  misc_feature 1..20: note = chemically synthesized
  source 1..20: mol_type = other DNA
aaacccagaagcccagagca

SEQ ID NO: 530 - DNA, 20 bp, synthetic construct
  misc_feature 1..20: note = chemically synthesized
  source 1..20: mol_type = other DNA
agaagcccagagcagggcct

SEQ ID NO: 531 - DNA, 20 bp, synthetic construct
  misc_feature 1..20: note = chemically synthesized
  source 1..20: mol_type = other DNA
gaagcccagagcagggcctt

SEQ ID NO: 532 - DNA, 20 bp, synthetic construct
  misc_feature 1..20: note = chemically synthesized
  source 1..20: mol_type = other DNA
aagcccagagcagggcctta

SEQ ID NO: 533 - DNA, 20 bp, synthetic construct
  misc_feature 1..20: note = chemically synthesized
  source 1..20: mol_type = other DNA
cccagagcagggccttaggg

SEQ ID NO: 534 - DNA, 20 bp, synthetic construct
  misc_feature 1..20: note = chemically synthesized
  source 1..20: mol_type = other DNA
agagcagggccttagggaag

SEQ ID NO: 535 - DNA, 20 bp, synthetic construct
  misc_feature 1..20: note = chemically synthesized
  source 1..20: mol_type = other DNA
gagcagggccttagggaagc

SEQ ID NO: 536 - DNA, 20 bp, synthetic construct
  misc_feature 1..20: note = chemically synthesized
  source 1..20: mol_type = other DNA
agggaagcgggaccctgctc

SEQ ID NO: 537 - DNA, 20 bp, synthetic construct
  misc_feature 1..20: note = chemically synthesized
  source 1..20: mol_type = other DNA
gggaagcgggaccctgctct

SEQ ID NO: 538 - DNA, 20 bp, synthetic construct
  misc_feature 1..20: note = chemically synthesized
  source 1..20: mol_type = other DNA
aagcgggaccctgctctggg

SEQ ID NO: 539 - DNA, 20 bp, synthetic construct
  misc_feature 1..20: note = chemically synthesized
  source 1..20: mol_type = other DNA
gcgggaccctgctctgggcg

SEQ ID NO: 540 - DNA, 20 bp, synthetic construct
  misc_feature 1..20: note = chemically synthesized
  source 1..20: mol_type = other DNA
cgggaccctgctctgggcgg

SEQ ID NO: 541 - DNA, 20 bp, synthetic construct
  misc_feature 1..20: note = chemically synthesized
  source 1..20: mol_type = other DNA
ctgggcggaggaatatgtcc

SEQ ID NO: 542 - DNA, 20 bp, synthetic construct
  misc_feature 1..20: note = chemically synthesized
  source 1..20: mol_type = other DNA
gcggaggaatatgtcccaga

SEQ ID NO: 543 - DNA, 20 bp, synthetic construct
  misc_feature 1..20: note = chemically synthesized
  source 1..20: mol_type = other DNA
gaatatgtcccagatagcac

SEQ ID NO: 544 - DNA, 20 bp, synthetic construct
  misc_feature 1..20: note = chemically synthesized
  source 1..20: mol_type = other DNA
aatatgtcccagatagcact

SEQ ID NO: 545 - DNA, 20 bp, synthetic construct
  misc_feature 1..20: note = chemically synthesized
  source 1..20: mol_type = other DNA
atatgtcccagatagcactg

SEQ ID NO: 546 - DNA, 20 bp, synthetic construct
  misc_feature 1..20: note = chemically synthesized
  source 1..20: mol_type = other DNA
gatagcactggggactcttt

SEQ ID NO: 547 - DNA, 20 bp, synthetic construct
  misc_feature 1..20: note = chemically synthesized
  source 1..20: mol_type = other DNA
atagcactggggactcttta

SEQ ID NO: 548 - DNA, 20 bp, synthetic construct
  misc_feature 1..20: note = chemically synthesized
  source 1..20: mol_type = other DNA
cactggggactctttaagga

SEQ ID NO: 549 - DNA, 20 bp, synthetic construct
  misc_feature 1..20: note = chemically synthesized
  source 1..20: mol_type = other DNA
tggggactctttaaggaaag

SEQ ID NO: 550 - DNA, 20 bp, synthetic construct
  misc_feature 1..20: note = chemically synthesized
  source 1..20: mol_type = other DNA
ggggactctttaaggaaaga

SEQ ID NO: 551 - DNA, 20 bp, synthetic construct
  misc_feature 1..20: note = chemically synthesized
  source 1..20: mol_type = other DNA
actctttaaggaaagaagga

SEQ ID NO: 552 - DNA, 20 bp, synthetic construct
  misc_feature 1..20: note = chemically synthesized
  source 1..20: mol_type = other DNA
tctttaaggaaagaaggatg

SEQ ID NO: 553 - DNA, 20 bp, synthetic construct
  misc_feature 1..20: note = chemically synthesized
  source 1..20: mol_type = other DNA
taaggaaagaaggatggaga

SEQ ID NO: 554 - DNA, 20 bp, synthetic construct
  misc_feature 1..20: note = chemically synthesized
  source 1..20: mol_type = other DNA
aggaaagaaggatggagaaa

SEQ ID NO: 555 - DNA, 20 bp, synthetic construct
  misc_feature 1..20: note = chemically synthesized
  source 1..20: mol_type = other DNA
aagaaggatggagaaagaga

SEQ ID NO: 556 - DNA, 20 bp, synthetic construct
  misc_feature 1..20: note = chemically synthesized
  source 1..20: mol_type = other DNA
agaaggatggagaaagagaa

SEQ ID NO: 557 - DNA, 20 bp, synthetic construct
  misc_feature 1..20: note = chemically synthesized
  source 1..20: mol_type = other DNA
gaaggatggagaaagagaaa

SEQ ID NO: 558 - DNA, 20 bp, synthetic construct
  misc_feature 1..20: note = chemically synthesized
  source 1..20: mol_type = other DNA
aggatggagaaagagaaagg

SEQ ID NO: 559 - DNA, 20 bp, synthetic construct
  misc_feature 1..20: note = chemically synthesized
  source 1..20: mol_type = other DNA
atggagaaagagaaagggag

SEQ ID NO: 560 - DNA, 20 bp, synthetic construct
  misc_feature 1..20: note = chemically synthesized
  source 1..20: mol_type = other DNA
ggagaaagagaaagggagta

SEQ ID NO: 561 - DNA, 20 bp, synthetic construct
  misc_feature 1..20: note = chemically synthesized
  source 1..20: mol_type = other DNA
gagaaagagaaagggagtag

SEQ ID NO: 562 - DNA, 20 bp, synthetic construct
  misc_feature 1..20: note = chemically synthesized
  source 1..20: mol_type = other DNA
aaagagaaagggagtagagg

SEQ ID NO: 563 - DNA, 20 bp, synthetic construct
  misc_feature 1..20: note = chemically synthesized
  source 1..20: mol_type = other DNA
gagtagaggcggccacgacc

SEQ ID NO: 564 - DNA, 20 bp, synthetic construct
  misc_feature 1..20: note = chemically synthesized
  source 1..20: mol_type = other DNA
gccacgacctggtgaacacc

SEQ ID NO: 565 - DNA, 20 bp, synthetic construct
  misc_feature 1..20: note = chemically synthesized
  source 1..20: mol_type = other DNA
ccacgacctggtgaacacct

SEQ ID NO: 566 - DNA, 20 bp, synthetic construct
  misc_feature 1..20: note = chemically synthesized
  source 1..20: mol_type = other DNA
taggacgcaccattctcaca

SEQ ID NO: 567 - DNA, 20 bp, synthetic construct
  misc_feature 1..20: note = chemically synthesized
  source 1..20: mol_type = other DNA
aggacgcaccattctcacaa

SEQ ID NO: 568 - DNA, 20 bp, synthetic construct
  misc_feature 1..20: note = chemically synthesized
  source 1..20: mol_type = other DNA
ggacgcaccattctcacaaa

SEQ ID NO: 569 - DNA, 20 bp, synthetic construct
  misc_feature 1..20: note = chemically synthesized
  source 1..20: mol_type = other DNA
acgcaccattctcacaaagg

SEQ ID NO: 570 - DNA, 20 bp, synthetic construct
  misc_feature 1..20: note = chemically synthesized
  source 1..20: mol_type = other DNA
cacaaagggagttttccaca

SEQ ID NO: 571 - DNA, 20 bp, synthetic construct
  misc_feature 1..20: note = chemically synthesized
  source 1..20: mol_type = other DNA
ggacacccccctcctcacca

SEQ ID NO: 572 - DNA, 20 bp, synthetic construct
  misc_feature 1..20: note = chemically synthesized
  source 1..20: mol_type = other DNA
cctcctcaccacagccctgc

SEQ ID NO: 573 - DNA, 20 bp, synthetic construct
  misc_feature 1..20: note = chemically synthesized
  source 1..20: mol_type = other DNA
ctcctcaccacagccctgcc

SEQ ID NO: 574 - DNA, 20 bp, synthetic construct
  misc_feature 1..20: note = chemically synthesized
  source 1..20: mol_type = other DNA
tcaccacagccctgccagga

SEQ ID NO: 575 - DNA, 20 bp, synthetic construct
  misc_feature 1..20: note = chemically synthesized
  source 1..20: mol_type = other DNA
caccacagccctgccaggac

SEQ ID NO: 576 - DNA, 20 bp, synthetic construct
  misc_feature 1..20: note = chemically synthesized
  source 1..20: mol_type = other DNA
accacagccctgccaggacg

SEQ ID NO: 577 - DNA, 20 bp, synthetic construct
  misc_feature 1..20: note = chemically synthesized
  source 1..20: mol_type = other DNA
cagccctgccaggacggggc

SEQ ID NO: 578 - DNA, 20 bp, synthetic construct
  misc_feature 1..20: note = chemically synthesized
  source 1..20: mol_type = other DNA
gccaggacggggctggctac

SEQ ID NO: 579 - DNA, 20 bp, synthetic construct
  misc_feature 1..20: note = chemically synthesized
  source 1..20: mol_type = other DNA
tggctactggccttatctca

SEQ ID NO: 580 - DNA, 20 bp, synthetic construct
  misc_feature 1..20: note = chemically synthesized
  source 1..20: mol_type = other DNA
ggctactggccttatctcac

SEQ ID NO: 581 - DNA, 20 bp, synthetic construct
  misc_feature 1..20: note = chemically synthesized
  source 1..20: mol_type = other DNA
tcacaggtaaaactgacgca

SEQ ID NO: 582 - DNA, 20 bp, synthetic construct
  misc_feature 1..20: note = chemically synthesized
  source 1..20: mol_type = other DNA
acaggtaaaactgacgcacg

SEQ ID NO: 583 - DNA, 20 bp, synthetic construct
  misc_feature 1..20: note = chemically synthesized
  source 1..20: mol_type = other DNA
caggtaaaactgacgcacgg

SEQ ID NO: 584 - DNA, 20 bp, synthetic construct
  misc_feature 1..20: note = chemically synthesized
  source 1..20: mol_type = other DNA
cacggaggaacaatataaat

SEQ ID NO: 585 - DNA, 20 bp, synthetic construct
  misc_feature 1..20: note = chemically synthesized
  source 1..20: mol_type = other DNA
acggaggaacaatataaatt

SEQ ID NO: 586 - DNA, 20 bp, synthetic construct
  misc_feature 1..20: note = chemically synthesized
  source 1..20: mol_type = other DNA
cggaggaacaatataaattg

SEQ ID NO: 587 - DNA, 20 bp, synthetic construct
  misc_feature 1..20: note = chemically synthesized
  source 1..20: mol_type = other DNA
gaacaatataaattggggac

SEQ ID NO: 588 - DNA, 20 bp, synthetic construct
  misc_feature 1..20: note = chemically synthesized
  source 1..20: mol_type = other DNA
aatataaattggggactaga

SEQ ID NO: 589 - DNA, 20 bp, synthetic construct
  misc_feature 1..20: note = chemically synthesized
  source 1..20: mol_type = other DNA
atataaattggggactagaa

SEQ ID NO: 590 - DNA, 20 bp, synthetic construct
  misc_feature 1..20: note = chemically synthesized
  source 1..20: mol_type = other DNA
aattggggactagaaaggtg

SEQ ID NO: 591 - DNA, 20 bp, synthetic construct
  misc_feature 1..20: note = chemically synthesized
  source 1..20: mol_type = other DNA
ttggggactagaaaggtgaa

SEQ ID NO: 592 - DNA, 20 bp, synthetic construct
  misc_feature 1..20: note = chemically synthesized
  source 1..20: mol_type = other DNA
actagaaaggtgaagagcca

SEQ ID NO: 593 - DNA, 20 bp, synthetic construct
  misc_feature 1..20: note = chemically synthesized
  source 1..20: mol_type = other DNA
gaaaggtgaagagccaaagt

SEQ ID NO: 594 - DNA, 20 bp, synthetic construct
  misc_feature 1..20: note = chemically synthesized
  source 1..20: mol_type = other DNA
gaagagccaaagttagaact

SEQ ID NO: 595 - DNA, 20 bp, synthetic construct
  misc_feature 1..20: note = chemically synthesized
  source 1..20: mol_type = other DNA
aagagccaaagttagaactc

SEQ ID NO: 596 - DNA, 20 bp, synthetic construct
  misc_feature 1..20: note = chemically synthesized
  source 1..20: mol_type = other DNA
ttccaaactgcttctcctct

SEQ ID NO: 597 - DNA, 20 bp, synthetic construct
  misc_feature 1..20: note = chemically synthesized
  source 1..20: mol_type = other DNA
tccaaactgcttctcctctt

SEQ ID NO: 598 - DNA, 20 bp, synthetic construct
  misc_feature 1..20: note = chemically synthesized
  source 1..20: mol_type = other DNA
aaactgcttctcctcttggg

SEQ ID NO: 599 - DNA, 20 bp, synthetic construct
  misc_feature 1..20: note = chemically synthesized
  source 1..20: mol_type = other DNA
cttctcctcttgggaagtgt

SEQ ID NO: 600 - DNA, 20 bp, synthetic construct
  misc_feature 1..20: note = chemically synthesized
  source 1..20: mol_type = other DNA
ttctcctcttgggaagtgta

SEQ ID NO: 601 - DNA, 20 bp, synthetic construct
  misc_feature 1..20: note = chemically synthesized
  source 1..20: mol_type = other DNA
tcctcttgggaagtgtaagg

SEQ ID NO: 602 - DNA, 20 bp, synthetic construct
  misc_feature 1..20: note = chemically synthesized
  source 1..20: mol_type = other DNA
tgggaagtgtaaggaagctg

SEQ ID NO: 603 - DNA, 20 bp, synthetic construct
  misc_feature 1..20: note = chemically synthesized
  source 1..20: mol_type = other DNA
gtgtaaggaagctgcagcac

SEQ ID NO: 604 - DNA, 20 bp, synthetic construct
  misc_feature 1..20: note = chemically synthesized
  source 1..20: mol_type = other DNA
tgtaaggaagctgcagcacc

SEQ ID NO: 605 - DNA, 20 bp, synthetic construct
  misc_feature 1..20: note = chemically synthesized
  source 1..20: mol_type = other DNA
ggaagctgcagcaccaggat

SEQ ID NO: 606 - DNA, 20 bp, synthetic construct
  misc_feature 1..20: note = chemically synthesized
  source 1..20: mol_type = other DNA
ccaggatcagtgaaacgcac

SEQ ID NO: 607 - DNA, 20 bp, synthetic construct
  misc_feature 1..20: note = chemically synthesized
  source 1..20: mol_type = other DNA
gatcagtgaaacgcaccaga

SEQ ID NO: 608 - DNA, 20 bp, synthetic construct
  misc_feature 1..20: note = chemically synthesized
  source 1..20: mol_type = other DNA
aacgcaccagacggccgcgt

SEQ ID NO: 609 - DNA, 20 bp, synthetic construct
  misc_feature 1..20: note = chemically synthesized
  source 1..20: mol_type = other DNA
cgcaccagacggccgcgtca

SEQ ID NO: 610 - DNA, 20 bp, synthetic construct
  misc_feature 1..20: note = chemically synthesized
  source 1..20: mol_type = other DNA
accagacggccgcgtcagag

SEQ ID NO: 611 - DNA, 20 bp, synthetic construct
  misc_feature 1..20: note = chemically synthesized
  source 1..20: mol_type = other DNA
acggccgcgtcagagcagct

SEQ ID NO: 612 - DNA, 20 bp, synthetic construct
  misc_feature 1..20: note = chemically synthesized
  source 1..20: mol_type = other DNA
cggccgcgtcagagcagctc

SEQ ID NO: 613 - DNA, 20 bp, synthetic construct
  misc_feature 1..20: note = chemically synthesized
  source 1..20: mol_type = other DNA
cgtcagagcagctcaggttc

SEQ ID NO: 614 - DNA, 20 bp, synthetic construct
  misc_feature 1..20: note = chemically synthesized
  source 1..20: mol_type = other DNA
gtcagagcagctcaggttct

SEQ ID NO: 615 - DNA, 20 bp, synthetic construct
  misc_feature 1..20: note = chemically synthesized
  source 1..20: mol_type = other DNA
cagagcagctcaggttctgg

SEQ ID NO: 616 - DNA, 20 bp, synthetic construct
  misc_feature 1..20: note = chemically synthesized
  source 1..20: mol_type = other DNA
gagcagctcaggttctggga

SEQ ID NO: 617 - DNA, 20 bp, synthetic construct
  misc_feature 1..20: note = chemically synthesized
  source 1..20: mol_type = other DNA
agcagctcaggttctgggag

SEQ ID NO: 618 - DNA, 20 bp, synthetic construct
  misc_feature 1..20: note = chemically synthesized
  source 1..20: mol_type = other DNA
gcagctcaggttctgggaga

SEQ ID NO: 619 - DNA, 20 bp, synthetic construct
  misc_feature 1..20: note = chemically synthesized
  source 1..20: mol_type = other DNA
gctcaggttctgggagaggg

SEQ ID NO: 620 - DNA, 20 bp, synthetic construct
  misc_feature 1..20: note = chemically synthesized
  source 1..20: mol_type = other DNA
ggttctgggagagggtagcg

SEQ ID NO: 621 - DNA, 20 bp, synthetic construct
  misc_feature 1..20: note = chemically synthesized
  source 1..20: mol_type = other DNA
gttctgggagagggtagcgc

SEQ ID NO: 622 - DNA, 20 bp, synthetic construct
  misc_feature 1..20: note = chemically synthesized
  source 1..20: mol_type = other DNA
ttctgggagagggtagcgca

SEQ ID NO: 623 - DNA, 20 bp, synthetic construct
  misc_feature 1..20: note = chemically synthesized
  source 1..20: mol_type = other DNA
tgggagagggtagcgcaggg

SEQ ID NO: 624 - DNA, 20 bp, synthetic construct
  misc_feature 1..20: note = chemically synthesized
  source 1..20: mol_type = other DNA
ggtagcgcagggtggccact

SEQ ID NO: 625 - DNA, 20 bp, synthetic construct
  misc_feature 1..20: note = chemically synthesized
  source 1..20: mol_type = other DNA
gcagggtggccactgagaac

SEQ ID NO: 626 - DNA, 20 bp, synthetic construct
  misc_feature 1..20: note = chemically synthesized
  source 1..20: mol_type = other DNA
cagggtggccactgagaacc

SEQ ID NO: 627 - DNA, 20 bp, synthetic construct
  misc_feature 1..20: note = chemically synthesized
  source 1..20: mol_type = other DNA
ggtggccactgagaaccggg

SEQ ID NO: 628 - DNA, 20 bp, synthetic construct
  misc_feature 1..20: note = chemically synthesized
  source 1..20: mol_type = other DNA
gtggccactgagaaccgggc

SEQ ID NO: 629 - DNA, 20 bp, synthetic construct
  misc_feature 1..20: note = chemically synthesized
  source 1..20: mol_type = other DNA
cttccctcccaccccctgcc

SEQ ID NO: 630 - DNA, 20 bp, synthetic construct
  misc_feature 1..20: note = chemically synthesized
  source 1..20: mol_type = other DNA
ccctgccaagctctccctcc

SEQ ID NO: 631 - DNA, 20 bp, synthetic construct
  misc_feature 1..20: note = chemically synthesized
  source 1..20: mol_type = other DNA
cctgccaagctctccctccc

SEQ ID NO: 632 - DNA, 20 bp, synthetic construct
  misc_feature 1..20: note = chemically synthesized
  source 1..20: mol_type = other DNA
ctccctcccaggatcctctc

SEQ ID NO: 633 - DNA, 20 bp, synthetic construct
  misc_feature 1..20: note = chemically synthesized
  source 1..20: mol_type = other DNA
atcctctctggctccatcgt

SEQ ID NO: 634 - DNA, 20 bp, synthetic construct
  misc_feature 1..20: note = chemically synthesized
  source 1..20: mol_type = other DNA
gctccatcgtaagcaaacct

SEQ ID NO: 635 - DNA, 20 bp, synthetic construct
  misc_feature 1..20: note = chemically synthesized
  source 1..20: mol_type = other DNA
tccatcgtaagcaaacctta

SEQ ID NO: 636 - DNA, 20 bp, synthetic construct
  misc_feature 1..20: note = chemically synthesized
  source 1..20: mol_type = other DNA
ccatcgtaagcaaaccttag

SEQ ID NO: 637 - DNA, 20 bp, synthetic construct
  misc_feature 1..20: note = chemically synthesized
  source 1..20: mol_type = other DNA
taagcaaaccttagaggttc

SEQ ID NO: 638 - DNA, 20 bp, synthetic construct
  misc_feature 1..20: note = chemically synthesized
  source 1..20: mol_type = other DNA
caaaccttagaggttctggc

SEQ ID NO: 639 - DNA, 20 bp, synthetic construct
  misc_feature 1..20: note = chemically synthesized
  source 1..20: mol_type = other DNA
aaaccttagaggttctggca

SEQ ID NO: 640 - DNA, 20 bp, synthetic construct
  misc_feature 1..20: note = chemically synthesized
  source 1..20: mol_type = other DNA
accttagaggttctggcaag

SEQ ID NO: 641 - DNA, 20 bp, synthetic construct
  misc_feature 1..20: note = chemically synthesized
  source 1..20: mol_type = other DNA
cttagaggttctggcaagga

SEQ ID NO: 642 - DNA, 20 bp, synthetic construct
  misc_feature 1..20: note = chemically synthesized
  source 1..20: mol_type = other DNA
tagaggttctggcaaggaga

SEQ ID NO: 643 - DNA, 20 bp, synthetic construct
  misc_feature 1..20: note = chemically synthesized
  source 1..20: mol_type = other DNA
ggttctggcaaggagagaga

SEQ ID NO: 644 - DNA, 20 bp, synthetic construct
  misc_feature 1..20: note = chemically synthesized
  source 1..20: mol_type = other DNA
ggcaaggagagagatggctc

SEQ ID NO: 645 - DNA, 20 bp, synthetic construct
  misc_feature 1..20: note = chemically synthesized
  source 1..20: mol_type = other DNA
gcaaggagagagatggctcc

SEQ ID NO: 646 - DNA, 20 bp, synthetic construct
  misc_feature 1..20: note = chemically synthesized
  source 1..20: mol_type = other DNA
agagagatggctccaggaaa

SEQ ID NO: 647 - DNA, 20 bp, synthetic construct
  misc_feature 1..20: note = chemically synthesized
  source 1..20: mol_type = other DNA
gagagatggctccaggaaat

SEQ ID NO: 648 - DNA, 20 bp, synthetic construct
  misc_feature 1..20: note = chemically synthesized
  source 1..20: mol_type = other DNA
agagatggctccaggaaatg

SEQ ID NO: 649 - DNA, 20 bp, synthetic construct
  misc_feature 1..20: note = chemically synthesized
  source 1..20: mol_type = other DNA
gagatggctccaggaaatgg

SEQ ID NO: 650 - DNA, 20 bp, synthetic construct
  misc_feature 1..20: note = chemically synthesized
  source 1..20: mol_type = other DNA
aggaaatgggggtgtgtcac

SEQ ID NO: 651 - DNA, 20 bp, synthetic construct
  misc_feature 1..20: note = chemically synthesized
  source 1..20: mol_type = other DNA
atgggggtgtgtcaccagat

SEQ ID NO: 652 - DNA, 20 bp, synthetic construct
  misc_feature 1..20: note = chemically synthesized
  source 1..20: mol_type = other DNA
tgggggtgtgtcaccagata

SEQ ID NO: 653 - DNA, 20 bp, synthetic construct
  misc_feature 1..20: note = chemically synthesized
  source 1..20: mol_type = other DNA
cagataaggaatctgcctaa

SEQ ID NO: 654 - DNA, 20 bp, synthetic construct
  misc_feature 1..20: note = chemically synthesized
  source 1..20: mol_type = other DNA
agataaggaatctgcctaac

SEQ ID NO: 655 - DNA, 20 bp, synthetic construct
  misc_feature 1..20: note = chemically synthesized
  source 1..20: mol_type = other DNA
ataaggaatctgcctaacag

SEQ ID NO: 656 - DNA, 20 bp, synthetic construct
  misc_feature 1..20: note = chemically synthesized
  source 1..20: mol_type = other DNA
taaggaatctgcctaacagg

SEQ ID NO: 657 - DNA, 20 bp, synthetic construct
  misc_feature 1..20: note = chemically synthesized
  source 1..20: mol_type = other DNA
ggaatctgcctaacaggagg

SEQ ID NO: 658 - DNA, 20 bp, synthetic construct
  misc_feature 1..20: note = chemically synthesized
  source 1..20: mol_type = other DNA
gaatctgcctaacaggaggt

SEQ ID NO: 659 - DNA, 20 bp, synthetic construct
  misc_feature 1..20: note = chemically synthesized
  source 1..20: mol_type = other DNA
aatctgcctaacaggaggtg

SEQ ID NO: 660 - DNA, 20 bp, synthetic construct
  misc_feature 1..20: note = chemically synthesized
  source 1..20: mol_type = other DNA
atctgcctaacaggaggtgg

SEQ ID NO: 661 - DNA, 20 bp, synthetic construct
  misc_feature 1..20: note = chemically synthesized
  source 1..20: mol_type = other DNA
gcctaacaggaggtgggggt

SEQ ID NO: 662 - DNA, 20 bp, synthetic construct
  misc_feature 1..20: note = chemically synthesized
  source 1..20: mol_type = other DNA
gtgggggttagacccaatat

SEQ ID NO: 663 - DNA, 20 bp, synthetic construct
  misc_feature 1..20: note = chemically synthesized
  source 1..20: mol_type = other DNA
tgggggttagacccaatatc

SEQ ID NO: 664 - DNA, 20 bp, synthetic construct
  misc_feature 1..20: note = chemically synthesized
  source 1..20: mol_type = other DNA
ggggttagacccaatatcag

SEQ ID NO: 665 - DNA, 20 bp, synthetic construct
  misc_feature 1..20: note = chemically synthesized
  source 1..20: mol_type = other DNA
tagacccaatatcaggagac

SEQ ID NO: 666 - DNA, 20 bp, synthetic construct
  misc_feature 1..20: note = chemically synthesized
  source 1..20: mol_type = other DNA
agacccaatatcaggagact

SEQ ID NO: 667 - DNA, 20 bp, synthetic construct
  misc_feature 1..20: note = chemically synthesized
  source 1..20: mol_type = other DNA
cccaatatcaggagactagg

SEQ ID NO: 668 - DNA, 20 bp, synthetic construct
  misc_feature 1..20: note = chemically synthesized
  source 1..20: mol_type = other DNA
ccaatatcaggagactagga

SEQ ID NO: 669 - DNA, 20 bp, synthetic construct
  misc_feature 1..20: note = chemically synthesized
  source 1..20: mol_type = other DNA
aatatcaggagactaggaag

SEQ ID NO: 670 - DNA, 20 bp, synthetic construct
  misc_feature 1..20: note = chemically synthesized
  source 1..20: mol_type = other DNA
atatcaggagactaggaagg

SEQ ID NO: 671 - DNA, 20 bp, synthetic construct
  misc_feature 1..20: note = chemically synthesized
  source 1..20: mol_type = other DNA
atcaggagactaggaaggag

SEQ ID NO: 672 - DNA, 20 bp, synthetic construct
  misc_feature 1..20: note = chemically synthesized
  source 1..20: mol_type = other DNA
tcaggagactaggaaggagg

SEQ ID NO: 673 - DNA, 20 bp, synthetic construct
  misc_feature 1..20: note = chemically synthesized
  source 1..20: mol_type = other DNA
gactaggaaggaggaggcct

SEQ ID NO: 674 - DNA, 20 bp, synthetic construct
  misc_feature 1..20: note = chemically synthesized
  source 1..20: mol_type = other DNA
actaggaaggaggaggccta

SEQ ID NO: 675 - DNA, 20 bp, synthetic construct
  misc_feature 1..20: note = chemically synthesized
  source 1..20: mol_type = other DNA
ggaaggaggaggcctaagga

SEQ ID NO: 676 - DNA, 20 bp, synthetic construct
  misc_feature 1..20: note = chemically synthesized
  source 1..20: mol_type = other DNA
gaaggaggaggcctaaggat

SEQ ID NO: 677 - DNA, 20 bp, synthetic construct
  misc_feature 1..20: note = chemically synthesized
  source 1..20: mol_type = other DNA
aaggaggaggcctaaggatg

SEQ ID NO: 678 - DNA, 20 bp, synthetic construct
  misc_feature 1..20: note = chemically synthesized
  source 1..20: mol_type = other DNA
tctgtcaccaatcctgtccc

SEQ ID NO: 679 - DNA, 20 bp, synthetic construct
  misc_feature 1..20: note = chemically synthesized
  source 1..20: mol_type = other DNA
gtcaccaatcctgtccctag

SEQ ID NO: 680 - DNA, 20 bp, synthetic construct
  misc_feature 1..20: note = chemically synthesized
  source 1..20: mol_type = other DNA
tgtccctagtggccccactg

SEQ ID NO: 681 - DNA, 20 bp, synthetic construct
  misc_feature 1..20: note = chemically synthesized
  source 1..20: mol_type = other DNA
gtccctagtggccccactgt

SEQ ID NO: 682 - DNA, 20 bp, synthetic construct
  misc_feature 1..20: note = chemically synthesized
  source 1..20: mol_type = other DNA
tccctagtggccccactgtg

SEQ ID NO: 683 - DNA, 20 bp, synthetic construct
  misc_feature 1..20: note = chemically synthesized
  source 1..20: mol_type = other DNA
ctagtggccccactgtgggg

SEQ ID NO: 684 - DNA, 20 bp, synthetic construct
  misc_feature 1..20: note = chemically synthesized
  source 1..20: mol_type = other DNA
agtggccccactgtggggtg

SEQ ID NO: 685 - DNA, 20 bp, synthetic construct
  misc_feature 1..20: note = chemically synthesized
  source 1..20: mol_type = other DNA
gtggccccactgtggggtgg

SEQ ID NO: 686 - DNA, 20 bp, synthetic construct
  misc_feature 1..20: note = chemically synthesized
  source 1..20: mol_type = other DNA
tggccccactgtggggtgga

SEQ ID NO: 687 - DNA, 20 bp, synthetic construct
  misc_feature 1..20: note = chemically synthesized
  source 1..20: mol_type = other DNA
ggccccactgtggggtggag

SEQ ID NO: 688 - DNA, 20 bp, synthetic construct
  misc_feature 1..20: note = chemically synthesized
  source 1..20: mol_type = other DNA
ccactgtggggtggagggga

SEQ ID NO: 689 - DNA, 20 bp, synthetic construct
  misc_feature 1..20: note = chemically synthesized
  source 1..20: mol_type = other DNA
ggggtggaggggacagataa

SEQ ID NO: 690 - DNA, 20 bp, synthetic construct
  misc_feature 1..20: note = chemically synthesized
  source 1..20: mol_type = other DNA
aggggacagataaaagtacc

SEQ ID NO: 691 - DNA, 20 bp, synthetic construct
  misc_feature 1..20: note = chemically synthesized
  source 1..20: mol_type = other DNA
cagataaaagtacccagaac

SEQ ID NO: 692 - DNA, 20 bp, synthetic construct
  misc_feature 1..20: note = chemically synthesized
  source 1..20: mol_type = other DNA
gataaaagtacccagaacca

SEQ ID NO: 693 - DNA, 20 bp, synthetic construct
  misc_feature 1..20: note = chemically synthesized
  source 1..20: mol_type = other DNA
agaaccagagccacattaac

SEQ ID NO: 694 - DNA, 20 bp, synthetic construct
  misc_feature 1..20: note = chemically synthesized
  source 1..20: mol_type = other DNA
agagccacattaaccggccc

SEQ ID NO: 695 - DNA, 20 bp, synthetic construct
  misc_feature 1..20: note = chemically synthesized
  source 1..20: mol_type = other DNA
gagccacattaaccggccct

SEQ ID NO: 696 - DNA, 20 bp, synthetic construct
  misc_feature 1..20: note = chemically synthesized
  source 1..20: mol_type = other DNA
ttaaccggccctgggaatat

SEQ ID NO: 697 - DNA, 20 bp, synthetic construct
  misc_feature 1..20: note = chemically synthesized
  source 1..20: mol_type = other DNA
taaccggccctgggaatata

SEQ ID NO: 698 - DNA, 20 bp, synthetic construct
  misc_feature 1..20: note = chemically synthesized
  source 1..20: mol_type = other DNA
ccggccctgggaatataagg

SEQ ID NO: 699 - DNA, 20 bp, synthetic construct
  misc_feature 1..20: note = chemically synthesized
  source 1..20: mol_type = other DNA
ctgggaatataaggtggtcc

SEQ ID NO: 700 - DNA, 20 bp, synthetic construct
  misc_feature 1..20: note = chemically synthesized
  source 1..20: mol_type = other DNA
aatataaggtggtcccagct

SEQ ID NO: 701 - DNA, 20 bp, synthetic construct
  misc_feature 1..20: note = chemically synthesized
  source 1..20: mol_type = other DNA
atataaggtggtcccagctc

SEQ ID NO: 702 - DNA, 20 bp, synthetic construct
  misc_feature 1..20: note = chemically synthesized
  source 1..20: mol_type = other DNA
tataaggtggtcccagctcg

SEQ ID NO: 703 - DNA, 20 bp, synthetic construct
  misc_feature 1..20: note = chemically synthesized
  source 1..20: mol_type = other DNA
gtggtcccagctcggggaca

SEQ ID NO: 704 - DNA, 20 bp, synthetic construct
  misc_feature 1..20: note = chemically synthesized
  source 1..20: mol_type = other DNA
tggtcccagctcggggacac

SEQ ID NO: 705 - DNA, 20 bp, synthetic construct
  misc_feature 1..20: note = chemically synthesized
  source 1..20: mol_type = other DNA
gctcggggacacaggatccc

SEQ ID NO: 706 - DNA, 20 bp, synthetic construct
  misc_feature 1..20: note = chemically synthesized
  source 1..20: mol_type = other DNA
tcggggacacaggatccctg

SEQ ID NO: 707 - DNA, 20 bp, synthetic construct
  misc_feature 1..20: note = chemically synthesized
  source 1..20: mol_type = other DNA
cggggacacaggatccctgg

SEQ ID NO: 708 - DNA, 20 bp, synthetic construct
  misc_feature 1..20: note = chemically synthesized
  source 1..20: mol_type = other DNA
ggacacaggatccctggagg

SEQ ID NO: 709 - DNA, 20 bp, synthetic construct
  misc_feature 1..20: note = chemically synthesized
  source 1..20: mol_type = other DNA
gcagcaaacatgctgtcctg

SEQ ID NO: 710 - DNA, 20 bp, synthetic construct
  misc_feature 1..20: note = chemically synthesized
  source 1..20: mol_type = other DNA
gcaaacatgctgtcctgaag

SEQ ID NO: 711 - DNA, 20 bp, synthetic construct
  misc_feature 1..20: note = chemically synthesized
  source 1..20: mol_type = other DNA
atgctgtcctgaagtggaca

SEQ ID NO: 712 - DNA, 20 bp, synthetic construct
  misc_feature 1..20: note = chemically synthesized
  source 1..20: mol_type = other DNA
tgctgtcctgaagtggacat

SEQ ID NO: 713 - DNA, 20 bp, synthetic construct
  misc_feature 1..20: note = chemically synthesized
  source 1..20: mol_type = other DNA
gctgtcctgaagtggacata

SEQ ID NO: 714 - DNA, 20 bp, synthetic construct
  misc_feature 1..20: note = chemically synthesized
  source 1..20: mol_type = other DNA
ctgtcctgaagtggacatag

SEQ ID NO: 715 - DNA, 20 bp, synthetic construct
  misc_feature 1..20: note = chemically synthesized
  source 1..20: mol_type = other DNA
ctgaagtggacataggggcc

SEQ ID NO: 716 - DNA, 20 bp, synthetic construct
  misc_feature 1..20: note = chemically synthesized
  source 1..20: mol_type = other DNA
tgaagtggacataggggccc

SEQ ID NO: 717 - DNA, 20 bp, synthetic construct
  misc_feature 1..20: note = chemically synthesized
  source 1..20: mol_type = other DNA
gtggacataggggcccgggt

SEQ ID NO: 718 - DNA, 20 bp, synthetic construct
  misc_feature 1..20: note = chemically synthesized
  source 1..20: mol_type = other DNA
ggacataggggcccgggttg

SEQ ID NO: 719 - DNA, 20 bp, synthetic construct
  misc_feature 1..20: note = chemically synthesized
  source 1..20: mol_type = other DNA
gacataggggcccgggttgg

SEQ ID NO: 720 - DNA, 20 bp, synthetic construct
  misc_feature 1..20: note = chemically synthesized
  source 1..20: mol_type = other DNA
ataggggcccgggttggagg

SEQ ID NO: 721 - DNA, 20 bp, synthetic construct
  misc_feature 1..20: note = chemically synthesized
  source 1..20: mol_type = other DNA
ggggcccgggttggaggaag

SEQ ID NO: 722 - DNA, 20 bp, synthetic construct
  misc_feature 1..20: note = chemically synthesized
  source 1..20: mol_type = other DNA
ccgggttggaggaagaagac

SEQ ID NO: 723 - DNA, 20 bp, synthetic construct
  misc_feature 1..20: note = chemically synthesized
  source 1..20: mol_type = other DNA
ttggaggaagaagactagct

SEQ ID NO: 724 - DNA, 20 bp, synthetic construct
  misc_feature 1..20: note = chemically synthesized
  source 1..20: mol_type = other DNA
aagaagactagctgagctct

SEQ ID NO: 725 - DNA, 20 bp, synthetic construct
  misc_feature 1..20: note = chemically synthesized
  source 1..20: mol_type = other DNA
tagctgagctctcggacccc

SEQ ID NO: 726 - DNA, 20 bp, synthetic construct
  misc_feature 1..20: note = chemically synthesized
  source 1..20: mol_type = other DNA
ctgagctctcggacccctgg

SEQ ID NO: 727 - DNA, 20 bp, synthetic construct
  misc_feature 1..20: note = chemically synthesized
  source 1..20: mol_type = other DNA
acccctggaagatgccatga

SEQ ID NO: 728 - DNA, 20 bp, synthetic construct
  misc_feature 1..20: note = chemically synthesized
  source 1..20: mol_type = other DNA
cccctggaagatgccatgac

SEQ ID NO: 729 - DNA, 20 bp, synthetic construct
  misc_feature 1..20: note = chemically synthesized
  source 1..20: mol_type = other DNA
ccctggaagatgccatgaca

SEQ ID NO: 730 - DNA, 20 bp, synthetic construct
  misc_feature 1..20: note = chemically synthesized
  source 1..20: mol_type = other DNA
cctggaagatgccatgacag

SEQ ID NO: 731 - DNA, 20 bp, synthetic construct
  misc_feature 1..20: note = chemically synthesized
  source 1..20: mol_type = other DNA
ctggaagatgccatgacagg

SEQ ID NO: 732 - DNA, 20 bp, synthetic construct
  misc_feature 1..20: note = chemically synthesized
  source 1..20: mol_type = other DNA
aagatgccatgacagggggc

SEQ ID NO: 733 - DNA, 20 bp, synthetic construct
  misc_feature 1..20: note = chemically synthesized
  source 1..20: mol_type = other DNA
atgccatgacagggggctgg

SEQ ID NO: 734 - DNA, 20 bp, synthetic construct
  misc_feature 1..20: note = chemically synthesized
  source 1..20: mol_type = other DNA
gccatgacagggggctggaa

SEQ ID NO: 735 - DNA, 20 bp, synthetic construct
  misc_feature 1..20: note = chemically synthesized
  source 1..20: mol_type = other DNA
tgacagggggctggaagagc

SEQ ID NO: 736 - DNA, 20 bp, synthetic construct
  misc_feature 1..20: note = chemically synthesized
  source 1..20: mol_type = other DNA
gggggctggaagagctagca

SEQ ID NO: 737 - DNA, 20 bp, synthetic construct
  misc_feature 1..20: note = chemically synthesized
  source 1..20: mol_type = other DNA
ctggaagagctagcacagac

SEQ ID NO: 738 - DNA, 20 bp, synthetic construct
  misc_feature 1..20: note = chemically synthesized
  source 1..20: mol_type = other DNA
ggaagagctagcacagacta

SEQ ID NO: 739 - DNA, 20 bp, synthetic construct
  misc_feature 1..20: note = chemically synthesized
  source 1..20: mol_type = other DNA
aagagctagcacagactaga

SEQ ID NO: 740 - DNA, 20 bp, synthetic construct
  misc_feature 1..20: note = chemically synthesized
  source 1..20: mol_type = other DNA
agagctagcacagactagag

SEQ ID NO: 741 - DNA, 20 bp, synthetic construct
  misc_feature 1..20: note = chemically synthesized
  source 1..20: mol_type = other DNA
ctagcacagactagagaggt

SEQ ID NO: 742 - DNA, 20 bp, synthetic construct
  misc_feature 1..20: note = chemically synthesized
  source 1..20: mol_type = other DNA
tagcacagactagagaggta

SEQ ID NO: 743 - DNA, 20 bp, synthetic construct
  misc_feature 1..20: note = chemically synthesized
  source 1..20: mol_type = other DNA
agcacagactagagaggtaa

SEQ ID NO: 744 - DNA, 20 bp, synthetic construct
  misc_feature 1..20: note = chemically synthesized
  source 1..20: mol_type = other DNA
gcacagactagagaggtaag

SEQ ID NO: 745 - DNA, 20 bp, synthetic construct
  misc_feature 1..20: note = chemically synthesized
  source 1..20: mol_type = other DNA
cacagactagagaggtaagg

SEQ ID NO: 746 - DNA, 20 bp, synthetic construct
  misc_feature 1..20: note = chemically synthesized
  source 1..20: mol_type = other DNA
acagactagagaggtaaggg

SEQ ID NO: 747 - DNA, 20 bp, synthetic construct
  misc_feature 1..20: note = chemically synthesized
  source 1..20: mol_type = other DNA
gactagagaggtaagggggg

SEQ ID NO: 748 - DNA, 20 bp, synthetic construct
  misc_feature 1..20: note = chemically synthesized
  source 1..20: mol_type = other DNA
actagagaggtaaggggggt

SEQ ID NO: 749 - DNA, 20 bp, synthetic construct
  misc_feature 1..20: note = chemically synthesized
  source 1..20: mol_type = other DNA
ctagagaggtaaggggggta

SEQ ID NO: 750 - DNA, 20 bp, synthetic construct
  misc_feature 1..20: note = chemically synthesized
  source 1..20: mol_type = other DNA
tagagaggtaaggggggtag

SEQ ID NO: 751 - DNA, 20 bp, synthetic construct
  misc_feature 1..20: note = chemically synthesized
  source 1..20: mol_type = other DNA
gagaggtaaggggggtaggg

SEQ ID NO: 752 - DNA, 20 bp, synthetic construct
  misc_feature 1..20: note = chemically synthesized
  source 1..20: mol_type = other DNA
taggggagctgcccaaatga

SEQ ID NO: 753 - DNA, 20 bp, synthetic construct
  misc_feature 1..20: note = chemically synthesized
  source 1..20: mol_type = other DNA
aggggagctgcccaaatgaa

SEQ ID NO: 754 - DNA, 20 bp, synthetic construct
  misc_feature 1..20: note = chemically synthesized
  source 1..20: mol_type = other DNA
gggagctgcccaaatgaaag

SEQ ID NO: 755 - DNA, 20 bp, synthetic construct
  misc_feature 1..20: note = chemically synthesized
  source 1..20: mol_type = other DNA
gctgcccaaatgaaaggagt

SEQ ID NO: 756 - DNA, 20 bp, synthetic construct
  misc_feature 1..20: note = chemically synthesized
  source 1..20: mol_type = other DNA
tgcccaaatgaaaggagtga

SEQ ID NO: 757 - DNA, 20 bp, synthetic construct
  misc_feature 1..20: note = chemically synthesized
  source 1..20: mol_type = other DNA
gcccaaatgaaaggagtgag

SEQ ID NO: 758 - DNA, 20 bp, synthetic construct
  misc_feature 1..20: note = chemically synthesized
  source 1..20: mol_type = other DNA
tgagaggtgacccgaatcca

SEQ ID NO: 759 - DNA, 20 bp, synthetic construct
  misc_feature 1..20: note = chemically synthesized
  source 1..20: mol_type = other DNA
gagaggtgacccgaatccac

SEQ ID NO: 760 - DNA, 20 bp, synthetic construct
  misc_feature 1..20: note = chemically synthesized
  source 1..20: mol_type = other DNA
gaggtgacccgaatccacag

SEQ ID NO: 761 - DNA, 20 bp, synthetic construct
  misc_feature 1..20: note = chemically synthesized
  source 1..20: mol_type = other DNA
gacccgaatccacaggagaa

SEQ ID NO: 762 - DNA, 20 bp, synthetic construct
  misc_feature 1..20: note = chemically synthesized
  source 1..20: mol_type = other DNA
acccgaatccacaggagaac

SEQ ID NO: 763 - DNA, 20 bp, synthetic construct
  misc_feature 1..20: note = chemically synthesized
  source 1..20: mol_type = other DNA
cccgaatccacaggagaacg

SEQ ID NO: 764 - DNA, 20 bp, synthetic construct
  misc_feature 1..20: note = chemically synthesized
  source 1..20: mol_type = other DNA
ccacaggagaacggggtgtc

SEQ ID NO: 765 - DNA, 20 bp, synthetic construct
  misc_feature 1..20: note = chemically synthesized
  source 1..20: mol_type = other DNA
cacaggagaacggggtgtcc

SEQ ID NO: 766 - DNA, 20 bp, synthetic construct
  misc_feature 1..20: note = chemically synthesized
  source 1..20: mol_type = other DNA
gagaacggggtgtccaggca

SEQ ID NO: 767 - DNA, 20 bp, synthetic construct
  misc_feature 1..20: note = chemically synthesized
  source 1..20: mol_type = other DNA
acggggtgtccaggcaaaga

SEQ ID NO: 768 - DNA, 20 bp, synthetic construct
  misc_feature 1..20: note = chemically synthesized
  source 1..20: mol_type = other DNA
ggtgtccaggcaaagaaagc

SEQ ID NO: 769 - DNA, 20 bp, synthetic construct
  misc_feature 1..20: note = chemically synthesized
  source 1..20: mol_type = other DNA
tgtccaggcaaagaaagcaa

SEQ ID NO: 770 - DNA, 20 bp, synthetic construct
  misc_feature 1..20: note = chemically synthesized
  source 1..20: mol_type = other DNA
gtccaggcaaagaaagcaag

SEQ ID NO: 771 - DNA, 20 bp, synthetic construct
  misc_feature 1..20: note = chemically synthesized
  source 1..20: mol_type = other DNA
aggcaaagaaagcaagagga

SEQ ID NO: 772 - DNA, 20 bp, synthetic construct
  misc_feature 1..20: note = chemically synthesized
  source 1..20: mol_type = other DNA
gcaaagaaagcaagaggatg

SEQ ID NO: 773 - DNA, 20 bp, synthetic construct
  misc_feature 1..20: note = chemically synthesized
  source 1..20: mol_type = other DNA
aaagaaagcaagaggatgga

SEQ ID NO: 774 - DNA, 20 bp, synthetic construct
  misc_feature 1..20: note = chemically synthesized
  source 1..20: mol_type = other DNA
aagaaagcaagaggatggag

SEQ ID NO: 775 - DNA, 20 bp, synthetic construct
  misc_feature 1..20: note = chemically synthesized
  source 1..20: mol_type = other DNA
aaagcaagaggatggagagg

SEQ ID NO: 776 - DNA, 20 bp, synthetic construct
  misc_feature 1..20: note = chemically synthesized
  source 1..20: mol_type = other DNA
agaggatggagaggtggcta

SEQ ID NO: 777 - DNA, 20 bp, synthetic construct
  misc_feature 1..20: note = chemically synthesized
  source 1..20: mol_type = other DNA
gatggagaggtggctaaagc

SEQ ID NO: 778 - DNA, 20 bp, synthetic construct
  misc_feature 1..20: note = chemically synthesized
  source 1..20: mol_type = other DNA
atggagaggtggctaaagcc

SEQ ID NO: 779 - DNA, 20 bp, synthetic construct
  misc_feature 1..20: note = chemically synthesized
  source 1..20: mol_type = other DNA
tggagaggtggctaaagcca

SEQ ID NO: 780 - DNA, 20 bp, synthetic construct
  misc_feature 1..20: note = chemically synthesized
  source 1..20: mol_type = other DNA
gagaggtggctaaagccagg

SEQ ID NO: 781 - DNA, 20 bp, synthetic construct
  misc_feature 1..20: note = chemically synthesized
  source 1..20: mol_type = other DNA
ggtggctaaagccagggaga

SEQ ID NO: 782 - DNA, 20 bp, synthetic construct
  misc_feature 1..20: note = chemically synthesized
  source 1..20: mol_type = other DNA
gtggctaaagccagggagac

SEQ ID NO: 783 - DNA, 20 bp, synthetic construct
  misc_feature 1..20: note = chemically synthesized
  source 1..20: mol_type = other DNA
tggctaaagccagggagacg

SEQ ID NO: 784 - DNA, 20 bp, synthetic construct
  misc_feature 1..20: note = chemically synthesized
  source 1..20: mol_type = other DNA
gccagggagacggggtactt

SEQ ID NO: 785 - DNA, 20 bp, synthetic construct
  misc_feature 1..20: note = chemically synthesized
  source 1..20: mol_type = other DNA
ccagggagacggggtacttt

SEQ ID NO: 786 - DNA, 20 bp, synthetic construct
  misc_feature 1..20: note = chemically synthesized
  source 1..20: mol_type = other DNA
cagggagacggggtactttg

SEQ ID NO: 787 - DNA, 20 bp, synthetic construct
  misc_feature 1..20: note = chemically synthesized
  source 1..20: mol_type = other DNA
cggggtactttggggttgtc

SEQ ID NO: 788 - DNA, 20 bp, synthetic construct
  misc_feature 1..20: note = chemically synthesized
  source 1..20: mol_type = other DNA
tttggggttgtccagaaaaa

SEQ ID NO: 789 - DNA, 20 bp, synthetic construct
  misc_feature 1..20: note = chemically synthesized
  source 1..20: mol_type = other DNA
ccagaaaaacggtgatgatg

SEQ ID NO: 790 - DNA, 20 bp, synthetic construct
  misc_feature 1..20: note = chemically synthesized
  source 1..20: mol_type = other DNA
cagaaaaacggtgatgatgc

SEQ ID NO: 791 - DNA, 20 bp, synthetic construct
  misc_feature 1..20: note = chemically synthesized
  source 1..20: mol_type = other DNA
cggtgatgatgcaggcctac

SEQ ID NO: 792 - DNA, 20 bp, synthetic construct
  misc_feature 1..20: note = chemically synthesized
  source 1..20: mol_type = other DNA
tgatgatgcaggcctacaag

SEQ ID NO: 793 - DNA, 20 bp, synthetic construct
  misc_feature 1..20: note = chemically synthesized
  source 1..20: mol_type = other DNA
gatgatgcaggcctacaaga

SEQ ID NO: 794 - DNA, 20 bp, synthetic construct
  misc_feature 1..20: note = chemically synthesized
  source 1..20: mol_type = other DNA
atgatgcaggcctacaagaa

SEQ ID NO: 795 - DNA, 20 bp, synthetic construct
  misc_feature 1..20: note = chemically synthesized
  source 1..20: mol_type = other DNA
tgatgcaggcctacaagaag

SEQ ID NO: 796 - DNA, 20 bp, synthetic construct
  misc_feature 1..20: note = chemically synthesized
  source 1..20: mol_type = other DNA
atgcaggcctacaagaaggg

SEQ ID NO: 797 - DNA, 20 bp, synthetic construct
  misc_feature 1..20: note = chemically synthesized
  source 1..20: mol_type = other DNA
tgcaggcctacaagaagggg

SEQ ID NO: 798 - DNA, 20 bp, synthetic construct
  misc_feature 1..20: note = chemically synthesized
  source 1..20: mol_type = other DNA
aggcctacaagaaggggagg

SEQ ID NO: 799 - DNA, 20 bp, synthetic construct
  misc_feature 1..20: note = chemically synthesized
  source 1..20: mol_type = other DNA
ggcctacaagaaggggaggc

SEQ ID NO: 800 - DNA, 20 bp, synthetic construct
  misc_feature 1..20: note = chemically synthesized
  source 1..20: mol_type = other DNA
aagaaggggaggcgggacgc

SEQ ID NO: 801 - DNA, 20 bp, synthetic construct
  misc_feature 1..20: note = chemically synthesized
  source 1..20: mol_type = other DNA
agaaggggaggcgggacgca

SEQ ID NO: 802 - DNA, 20 bp, synthetic construct
  misc_feature 1..20: note = chemically synthesized
  source 1..20: mol_type = other DNA
gaaggggaggcgggacgcaa

SEQ ID NO: 803 - DNA, 20 bp, synthetic construct
  misc_feature 1..20: note = chemically synthesized
  source 1..20: mol_type = other DNA
aggggaggcgggacgcaagg

SEQ ID NO: 804 - DNA, 20 bp, synthetic construct
  misc_feature 1..20: note = chemically synthesized
  source 1..20: mol_type = other DNA
gacgcaagggagacatccgt

SEQ ID NO: 805 - DNA, 20 bp, synthetic construct
  misc_feature 1..20: note = chemically synthesized
  source 1..20: mol_type = other DNA
cgcaagggagacatccgtcg

SEQ ID NO: 806 - DNA, 20 bp, synthetic construct
  misc_feature 1..20: note = chemically synthesized
  source 1..20: mol_type = other DNA
aagggagacatccgtcggag

SEQ ID NO: 807 - DNA, 20 bp, synthetic construct
  misc_feature 1..20: note = chemically synthesized
  source 1..20: mol_type = other DNA
agggagacatccgtcggaga

SEQ ID NO: 808 - DNA, 20 bp, synthetic construct
  misc_feature 1..20: note = chemically synthesized
  source 1..20: mol_type = other DNA
ccgtcggagaaggccatcct

SEQ ID NO: 809 - DNA, 20 bp, synthetic construct
  misc_feature 1..20: note = chemically synthesized
  source 1..20: mol_type = other DNA
agaaggccatcctaagaaac

SEQ ID NO: 810 - DNA, 20 bp, synthetic construct
  misc_feature 1..20: note = chemically synthesized
  source 1..20: mol_type = other DNA
aaggccatcctaagaaacga

SEQ ID NO: 811 - DNA, 20 bp, synthetic construct
  misc_feature 1..20: note = chemically synthesized
  source 1..20: mol_type = other DNA
ccatcctaagaaacgagaga

SEQ ID NO: 812 - DNA, 20 bp, synthetic construct
  misc_feature 1..20: note = chemically synthesized
  source 1..20: mol_type = other DNA
ctaagaaacgagagatggca

SEQ ID NO: 813 - DNA, 20 bp, synthetic construct
  misc_feature 1..20: note = chemically synthesized
  source 1..20: mol_type = other DNA
taagaaacgagagatggcac

SEQ ID NO: 814 - DNA, 20 bp, synthetic construct
  misc_feature 1..20: note = chemically synthesized
  source 1..20: mol_type = other DNA
acgagagatggcacaggccc

SEQ ID NO: 815 - DNA, 20 bp, synthetic construct
  misc_feature 1..20: note = chemically synthesized
  source 1..20: mol_type = other DNA
agagatggcacaggccccag

SEQ ID NO: 816 - DNA, 20 bp, synthetic construct
  misc_feature 1..20: note = chemically synthesized
  source 1..20: mol_type = other DNA
gagatggcacaggccccaga

SEQ ID NO: 817 - DNA, 20 bp, synthetic construct
  misc_feature 1..20: note = chemically synthesized
  source 1..20: mol_type = other DNA
gatggcacaggccccagaag

SEQ ID NO: 818 - DNA, 20 bp, synthetic construct
  misc_feature 1..20: note = chemically synthesized
  source 1..20: mol_type = other DNA
ggcacaggccccagaaggag

SEQ ID NO: 819 - DNA, 20 bp, synthetic construct
  misc_feature 1..20: note = chemically synthesized
  source 1..20: mol_type = other DNA
gcacaggccccagaaggaga

SEQ ID NO: 820 - DNA, 20 bp, synthetic construct
  misc_feature 1..20: note = chemically synthesized
  source 1..20: mol_type = other DNA
ggccccagaaggagaaggaa

SEQ ID NO: 821 - DNA, 20 bp, synthetic construct
  misc_feature 1..20: note = chemically synthesized
  source 1..20: mol_type = other DNA
gccccagaaggagaaggaaa

SEQ ID NO: 822 - DNA, 20 bp, synthetic construct
  misc_feature 1..20: note = chemically synthesized
  source 1..20: mol_type = other DNA
ccccagaaggagaaggaaaa

SEQ ID NO: 823 - DNA, 20 bp, synthetic construct
  misc_feature 1..20: note = chemically synthesized
  source 1..20: mol_type = other DNA
aggagaaggaaaagggaacc

SEQ ID NO: 824 - DNA, 20 bp, synthetic construct
  misc_feature 1..20: note = chemically synthesized
  source 1..20: mol_type = other DNA
gaaggaaaagggaacccagc

SEQ ID NO: 825 - DNA, 20 bp, synthetic construct
  misc_feature 1..20: note = chemically synthesized
  source 1..20: mol_type = other DNA
aaaagggaacccagcgagtg

SEQ ID NO: 826 - DNA, 20 bp, synthetic construct
  misc_feature 1..20: note = chemically synthesized
  source 1..20: mol_type = other DNA
gggaacccagcgagtgaaga

SEQ ID NO: 827 - DNA, 20 bp, synthetic construct
  misc_feature 1..20: note = chemically synthesized
  source 1..20: mol_type = other DNA
cccagcgagtgaagacggca

SEQ ID NO: 828 - DNA, 20 bp, synthetic construct
  misc_feature 1..20: note = chemically synthesized
  source 1..20: mol_type = other DNA
ccagcgagtgaagacggcat

SEQ ID NO: 829 - DNA, 20 bp, synthetic construct
  misc_feature 1..20: note = chemically synthesized
  source 1..20: mol_type = other DNA
cagcgagtgaagacggcatg

SEQ ID NO: 830 - DNA, 20 bp, synthetic construct
  misc_feature 1..20: note = chemically synthesized
  source 1..20: mol_type = other DNA
gagtgaagacggcatggggt

SEQ ID NO: 831 - DNA, 20 bp, synthetic construct
  misc_feature 1..20: note = chemically synthesized
  source 1..20: mol_type = other DNA
agtgaagacggcatggggtt

SEQ ID NO: 832 - DNA, 20 bp, synthetic construct
  misc_feature 1..20: note = chemically synthesized
  source 1..20: mol_type = other DNA
aagacggcatggggttgggt

SEQ ID NO: 833 - DNA, 20 bp, synthetic construct
  misc_feature 1..20: note = chemically synthesized
  source 1..20: mol_type = other DNA
agacggcatggggttgggtg

SEQ ID NO: 834 - DNA, 20 bp, synthetic construct
  misc_feature 1..20: note = chemically synthesized
  source 1..20: mol_type = other DNA
gacggcatggggttgggtga

SEQ ID NO: 835 - DNA, 20 bp, synthetic construct
  misc_feature 1..20: note = chemically synthesized
  source 1..20: mol_type = other DNA
cggcatggggttgggtgagg

SEQ ID NO: 836 - DNA, 20 bp, synthetic construct
  misc_feature 1..20: note = chemically synthesized
  source 1..20: mol_type = other DNA
ggcatggggttgggtgaggg

SEQ ID NO: 837 - DNA, 20 bp, synthetic construct
  misc_feature 1..20: note = chemically synthesized
  source 1..20: mol_type = other DNA
catggggttgggtgagggag

SEQ ID NO: 838 - DNA, 20 bp, synthetic construct
  misc_feature 1..20: note = chemically synthesized
  source 1..20: mol_type = other DNA
tggggttgggtgagggagga

SEQ ID NO: 839 - DNA, 20 bp, synthetic construct
  misc_feature 1..20: note = chemically synthesized
  source 1..20: mol_type = other DNA
ggtgagggaggagagatgcc

SEQ ID NO: 840 - DNA, 20 bp, synthetic construct
  misc_feature 1..20: note = chemically synthesized
  source 1..20: mol_type = other DNA
tgagggaggagagatgcccg

SEQ ID NO: 841 - DNA, 20 bp, synthetic construct
  misc_feature 1..20: note = chemically synthesized
  source 1..20: mol_type = other DNA
agggaggagagatgcccgga

SEQ ID NO: 842 - DNA, 20 bp, synthetic construct
  misc_feature 1..20: note = chemically synthesized
  source 1..20: mol_type = other DNA
gggaggagagatgcccggag

SEQ ID NO: 843 - DNA, 20 bp, synthetic construct
  misc_feature 1..20: note = chemically synthesized
  source 1..20: mol_type = other DNA
agagatgcccggagaggacc

SEQ ID NO: 844 - DNA, 20 bp, synthetic construct
  misc_feature 1..20: note = chemically synthesized
  source 1..20: mol_type = other DNA
gcccggagaggacccagaca

SEQ ID NO: 845 - DNA, 20 bp, synthetic construct
  misc_feature 1..20: note = chemically synthesized
  source 1..20: mol_type = other DNA
cccggagaggacccagacac

SEQ ID NO: 846 - DNA, 20 bp, synthetic construct
  misc_feature 1..20: note = chemically synthesized
  source 1..20: mol_type = other DNA
ccggagaggacccagacacg

SEQ ID NO: 847 - DNA, 20 bp, synthetic construct
  misc_feature 1..20: note = chemically synthesized
  source 1..20: mol_type = other DNA
ggagaggacccagacacggg

SEQ ID NO: 848 - DNA, 20 bp, synthetic construct
  misc_feature 1..20: note = chemically synthesized
  source 1..20: mol_type = other DNA
gagaggacccagacacgggg

SEQ ID NO: 849 - DNA, 20 bp, synthetic construct
  misc_feature 1..20: note = chemically synthesized
  source 1..20: mol_type = other DNA
agacacggggaggatccgct

SEQ ID NO: 850 - DNA, 20 bp, synthetic construct
  misc_feature 1..20: note = chemically synthesized
  source 1..20: mol_type = other DNA
acacggggaggatccgctca

SEQ ID NO: 851 - DNA, 20 bp, synthetic construct
  misc_feature 1..20: note = chemically synthesized
  source 1..20: mol_type = other DNA
cacggggaggatccgctcag

SEQ ID NO: 852 - DNA, 20 bp, synthetic construct
  misc_feature 1..20: note = chemically synthesized
  source 1..20: mol_type = other DNA
tccgctcagaggacatcacg

SEQ ID NO: 853 - DNA, 20 bp, synthetic construct
  misc_feature 1..20: note = chemically synthesized
  source 1..20: mol_type = other DNA
tcagaggacatcacgtggtg

SEQ ID NO: 854 - DNA, 20 bp, synthetic construct
  misc_feature 1..20: note = chemically synthesized
  source 1..20: mol_type = other DNA
acatcacgtggtgcagcgcc

SEQ ID NO: 855 - DNA, 20 bp, synthetic construct
  misc_feature 1..20: note = chemically synthesized
  source 1..20: mol_type = other DNA
tcacgtggtgcagcgccgag

SEQ ID NO: 856 - DNA, 20 bp, synthetic construct
  misc_feature 1..20: note = chemically synthesized
  source 1..20: mol_type = other DNA
cacgtggtgcagcgccgaga

SEQ ID NO: 857 - DNA, 20 bp, synthetic construct
  misc_feature 1..20: note = chemically synthesized
  source 1..20: mol_type = other DNA
gtggtgcagcgccgagaagg

SEQ ID NO: 858 - DNA, 20 bp, synthetic construct
  misc_feature 1..20: note = chemically synthesized
  source 1..20: mol_type = other DNA
gcgccgagaaggaagtgctc

SEQ ID NO: 859 - DNA, 20 bp, synthetic construct
  misc_feature 1..20: note = chemically synthesized
  source 1..20: mol_type = other DNA
cgagaaggaagtgctccgga

SEQ ID NO: 860 - DNA, 20 bp, synthetic construct
  misc_feature 1..20: note = chemically synthesized
  source 1..20: mol_type = other DNA
agaaggaagtgctccggaaa

SEQ ID NO: 861 - DNA, 20 bp, synthetic construct
  misc_feature 1..20: note = chemically synthesized
  source 1..20: mol_type = other DNA
tgctccggaaagagcatcct

SEQ ID NO: 862 - DNA, 20 bp, synthetic construct
  misc_feature 1..20: note = chemically synthesized
  source 1..20: mol_type = other DNA
gctccggaaagagcatcctt

SEQ ID NO: 863 - DNA, 20 bp, synthetic construct
  misc_feature 1..20: note = chemically synthesized
  source 1..20: mol_type = other DNA
ccggaaagagcatccttggg

SEQ ID NO: 864 - DNA, 20 bp, synthetic construct
  misc_feature 1..20: note = chemically synthesized
  source 1..20: mol_type = other DNA
agcatccttgggcagcaaca

SEQ ID NO: 865 - DNA, 20 bp, synthetic construct
  misc_feature 1..20: note = chemically synthesized
  source 1..20: mol_type = other DNA
atccttgggcagcaacacag

SEQ ID NO: 866 - DNA, 20 bp, synthetic construct
  misc_feature 1..20: note = chemically synthesized
  source 1..20: mol_type = other DNA
ccttgggcagcaacacagca

SEQ ID NO: 867 - DNA, 20 bp, synthetic construct
  misc_feature 1..20: note = chemically synthesized
  source 1..20: mol_type = other DNA
ttgggcagcaacacagcaga

SEQ ID NO: 868 - DNA, 20 bp, synthetic construct
  misc_feature 1..20: note = chemically synthesized
  source 1..20: mol_type = other DNA
gcagcaacacagcagagagc

SEQ ID NO: 869 - DNA, 20 bp, synthetic construct
  misc_feature 1..20: note = chemically synthesized
  source 1..20: mol_type = other DNA
cagcaacacagcagagagca

SEQ ID NO: 870 - DNA, 20 bp, synthetic construct
  misc_feature 1..20: note = chemically synthesized
  source 1..20: mol_type = other DNA
agcaacacagcagagagcaa

SEQ ID NO: 871 - DNA, 20 bp, synthetic construct
  misc_feature 1..20: note = chemically synthesized
  source 1..20: mol_type = other DNA
gcaacacagcagagagcaag

SEQ ID NO: 872 - DNA, 20 bp, synthetic construct
  misc_feature 1..20: note = chemically synthesized
  source 1..20: mol_type = other DNA
acacagcagagagcaagggg

SEQ ID NO: 873 - DNA, 20 bp, synthetic construct
  misc_feature 1..20: note = chemically synthesized
  source 1..20: mol_type = other DNA
acagcagagagcaaggggaa

SEQ ID NO: 874 - DNA, 20 bp, synthetic construct
  misc_feature 1..20: note = chemically synthesized
  source 1..20: mol_type = other DNA
cagcagagagcaaggggaag

SEQ ID NO: 875 - DNA, 20 bp, synthetic construct
  misc_feature 1..20: note = chemically synthesized
  source 1..20: mol_type = other DNA
agcagagagcaaggggaaga

SEQ ID NO: 876 - DNA, 20 bp, synthetic construct
  misc_feature 1..20: note = chemically synthesized
  source 1..20: mol_type = other DNA
cagagagcaaggggaagagg

SEQ ID NO: 877 - DNA, 20 bp, synthetic construct
  misc_feature 1..20: note = chemically synthesized
  source 1..20: mol_type = other DNA
agagcaaggggaagagggag

SEQ ID NO: 878 - DNA, 20 bp, synthetic construct
  misc_feature 1..20: note = chemically synthesized
  source 1..20: mol_type = other DNA
agcaaggggaagagggagtg

SEQ ID NO: 879 - DNA, 20 bp, synthetic construct
  misc_feature 1..20: note = chemically synthesized
  source 1..20: mol_type = other DNA
gcaaggggaagagggagtgg

SEQ ID NO: 880 - DNA, 20 bp, synthetic construct
  misc_feature 1..20: note = chemically synthesized
  source 1..20: mol_type = other DNA
aggggaagagggagtggagg

SEQ ID NO: 881 - DNA, 20 bp, synthetic construct
  misc_feature 1..20: note = chemically synthesized
  source 1..20: mol_type = other DNA
gaagagggagtggaggaaga

SEQ ID NO: 882 - DNA, 20 bp, synthetic construct
  misc_feature 1..20: note = chemically synthesized
  source 1..20: mol_type = other DNA
gtggaggaagacggaacctg

SEQ ID NO: 883 - DNA, 20 bp, synthetic construct
  misc_feature 1..20: note = chemically synthesized
  source 1..20: mol_type = other DNA
tggaggaagacggaacctga

SEQ ID NO: 884 - DNA, 20 bp, synthetic construct
  misc_feature 1..20: note = chemically synthesized
  source 1..20: mol_type = other DNA
gaggaagacggaacctgaag

SEQ ID NO: 885 - DNA, 20 bp, synthetic construct
  misc_feature 1..20: note = chemically synthesized
  source 1..20: mol_type = other DNA
aggaagacggaacctgaagg

SEQ ID NO: 886 - DNA, 20 bp, synthetic construct
  misc_feature 1..20: note = chemically synthesized
  source 1..20: mol_type = other DNA
aagacggaacctgaaggagg

SEQ ID NO: 887 - DNA, 20 bp, synthetic construct
  misc_feature 1..20: note = chemically synthesized
  source 1..20: mol_type = other DNA
acggaacctgaaggaggcgg

SEQ ID NO: 888 - DNA, 20 bp, synthetic construct
  misc_feature 1..20: note = chemically synthesized
  source 1..20: mol_type = other DNA
cggaacctgaaggaggcggc

SEQ ID NO: 889 - DNA, 20 bp, synthetic construct
  misc_feature 1..20: note = chemically synthesized
  source 1..20: mol_type = other DNA
ggaacctgaaggaggcggca

SEQ ID NO: 890 - DNA, 20 bp, synthetic construct
  misc_feature 1..20: note = chemically synthesized
  source 1..20: mol_type = other DNA
acctgaaggaggcggcaggg

SEQ ID NO: 891 - DNA, 20 bp, synthetic construct
  misc_feature 1..20: note = chemically synthesized
  source 1..20: mol_type = other DNA
cctgaaggaggcggcaggga

SEQ ID NO: 892 - DNA, 20 bp, synthetic construct
  misc_feature 1..20: note = chemically synthesized
  source 1..20: mol_type = other DNA
ggaggcggcagggaaggatc

SEQ ID NO: 893 - DNA, 20 bp, synthetic construct
  misc_feature 1..20: note = chemically synthesized
  source 1..20: mol_type = other DNA
gaggcggcagggaaggatct

SEQ ID NO: 894 - DNA, 20 bp, synthetic construct
  misc_feature 1..20: note = chemically synthesized
  source 1..20: mol_type = other DNA
cggcagggaaggatctgggc

SEQ ID NO: 895 - DNA, 20 bp, synthetic construct
  misc_feature 1..20: note = chemically synthesized
  source 1..20: mol_type = other DNA
ggaaggatctgggccagccg

SEQ ID NO: 896 - DNA, 20 bp, synthetic construct
  misc_feature 1..20: note = chemically synthesized
  source 1..20: mol_type = other DNA
aaggatctgggccagccgta

SEQ ID NO: 897 - DNA, 20 bp, synthetic construct
  misc_feature 1..20: note = chemically synthesized
  source 1..20: mol_type = other DNA
aggatctgggccagccgtag

SEQ ID NO: 898 - DNA, 20 bp, synthetic construct
  misc_feature 1..20: note = chemically synthesized
  source 1..20: mol_type = other DNA
ggccagccgtagaggtgacc

SEQ ID NO: 899 - DNA, 20 bp, synthetic construct
  misc_feature 1..20: note = chemically synthesized
  source 1..20: mol_type = other DNA
gccagccgtagaggtgaccc

SEQ ID NO: 900 - DNA, 20 bp, synthetic construct
  misc_feature 1..20: note = chemically synthesized
  source 1..20: mol_type = other DNA
gtagaggtgacccaggccac

SEQ ID NO: 901 - DNA, 20 bp, synthetic construct
  misc_feature 1..20: note = chemically synthesized
  source 1..20: mol_type = other DNA
gtgacccaggccacaagctg

SEQ ID NO: 902 - DNA, 20 bp, synthetic construct
  misc_feature 1..20: note = chemically synthesized
  source 1..20: mol_type = other DNA
cccaggccacaagctgcaga

SEQ ID NO: 903 - DNA, 20 bp, synthetic construct
  misc_feature 1..20: note = chemically synthesized
  source 1..20: mol_type = other DNA
ggccacaagctgcagacaga

SEQ ID NO: 904 - DNA, 20 bp, synthetic construct
  misc_feature 1..20: note = chemically synthesized
  source 1..20: mol_type = other DNA
cacaagctgcagacagaaag

SEQ ID NO: 905 - DNA, 20 bp, synthetic construct
  misc_feature 1..20: note = chemically synthesized
  source 1..20: mol_type = other DNA
gctgcagacagaaagcggca

SEQ ID NO: 906 - DNA, 20 bp, synthetic construct
  misc_feature 1..20: note = chemically synthesized
  source 1..20: mol_type = other DNA
ctgcagacagaaagcggcac

SEQ ID NO: 907 - DNA, 20 bp, synthetic construct
  misc_feature 1..20: note = chemically synthesized
  source 1..20: mol_type = other DNA
gacagaaagcggcacaggcc

SEQ ID NO: 908 - DNA, 20 bp, synthetic construct
  misc_feature 1..20: note = chemically synthesized
  source 1..20: mol_type = other DNA
acagaaagcggcacaggccc

SEQ ID NO: 909 - DNA, 20 bp, synthetic construct
  misc_feature 1..20: note = chemically synthesized
  source 1..20: mol_type = other DNA
cagaaagcggcacaggccca

SEQ ID NO: 910 - DNA, 20 bp, synthetic construct
  misc_feature 1..20: note = chemically synthesized
  source 1..20: mol_type = other DNA
agaaagcggcacaggcccag

SEQ ID NO: 911 - DNA, 20 bp, synthetic construct
  misc_feature 1..20: note = chemically synthesized
  source 1..20: mol_type = other DNA
aaagcggcacaggcccaggg

SEQ ID NO: 912 - DNA, 20 bp, synthetic construct
  misc_feature 1..20: note = chemically synthesized
  source 1..20: mol_type = other DNA
agcggcacaggcccagggga

SEQ ID NO: 913 - DNA, 20 bp, synthetic construct
  misc_feature 1..20: note = chemically synthesized
  source 1..20: mol_type = other DNA
caggcccaggggagagaatg

SEQ ID NO: 914 - DNA, 20 bp, synthetic construct
  misc_feature 1..20: note = chemically synthesized
  source 1..20: mol_type = other DNA
aggcccaggggagagaatgc

SEQ ID NO: 915 - DNA, 20 bp, synthetic construct
  misc_feature 1..20: note = chemically synthesized
  source 1..20: mol_type = other DNA
ccaggggagagaatgcaggt

SEQ ID NO: 916 - DNA, 20 bp, synthetic construct
  misc_feature 1..20: note = chemically synthesized
  source 1..20: mol_type = other DNA
aggggagagaatgcaggtca

SEQ ID NO: 917 - DNA, 20 bp, synthetic construct
  misc_feature 1..20: note = chemically synthesized
  source 1..20: mol_type = other DNA
gagagaatgcaggtcagaga

SEQ ID NO: 918 - DNA, 20 bp, synthetic construct
  misc_feature 1..20: note = chemically synthesized
  source 1..20: mol_type = other DNA
agaatgcaggtcagagaaag

SEQ ID NO: 919 - DNA, 20 bp, synthetic construct
  misc_feature 1..20: note = chemically synthesized
  source 1..20: mol_type = other DNA
gaatgcaggtcagagaaagc

SEQ ID NO: 920 - DNA, 20 bp, synthetic construct
  misc_feature 1..20: note = chemically synthesized
  source 1..20: mol_type = other DNA
cagagaaagcaggacctgcc

SEQ ID NO: 921 - DNA, 20 bp, synthetic construct
  misc_feature 1..20: note = chemically synthesized
  source 1..20: mol_type = other DNA
agagaaagcaggacctgcct

SEQ ID NO: 922 - DNA, 20 bp, synthetic construct
  misc_feature 1..20: note = chemically synthesized
  source 1..20: mol_type = other DNA
gaaagcaggacctgcctggg

SEQ ID NO: 923 - DNA, 20 bp, synthetic construct
  misc_feature 1..20: note = chemically synthesized
  source 1..20: mol_type = other DNA
aaagcaggacctgcctggga

SEQ ID NO: 924 - DNA, 20 bp, synthetic construct
  misc_feature 1..20: note = chemically synthesized
  source 1..20: mol_type = other DNA
aagcaggacctgcctgggaa

SEQ ID NO: 925 - DNA, 20 bp, synthetic construct
  misc_feature 1..20: note = chemically synthesized
  source 1..20: mol_type = other DNA
agcaggacctgcctgggaag

SEQ ID NO: 926 - DNA, 20 bp, synthetic construct
  misc_feature 1..20: note = chemically synthesized
  source 1..20: mol_type = other DNA
acctgcctgggaaggggaaa

SEQ ID NO: 927 - DNA, 20 bp, synthetic construct
  misc_feature 1..20: note = chemically synthesized
  source 1..20: mol_type = other DNA
tgcctgggaaggggaaacag

SEQ ID NO: 928 - DNA, 20 bp, synthetic construct
  misc_feature 1..20: note = chemically synthesized
  source 1..20: mol_type = other DNA
gcctgggaaggggaaacagt

SEQ ID NO: 929 - DNA, 20 bp, synthetic construct
  misc_feature 1..20: note = chemically synthesized
  source 1..20: mol_type = other DNA
gggaaggggaaacagtgggc

SEQ ID NO: 930 - DNA, 20 bp, synthetic construct
  misc_feature 1..20: note = chemically synthesized
  source 1..20: mol_type = other DNA
gaaggggaaacagtgggcca

SEQ ID NO: 931 - DNA, 20 bp, synthetic construct
  misc_feature 1..20: note = chemically synthesized
  source 1..20: mol_type = other DNA
aaggggaaacagtgggccag

SEQ ID NO: 932 - DNA, 20 bp, synthetic construct
  misc_feature 1..20: note = chemically synthesized
  source 1..20: mol_type = other DNA
gggaaacagtgggccagagg

SEQ ID NO: 933 - DNA, 20 bp, synthetic construct
  misc_feature 1..20: note = chemically synthesized
  source 1..20: mol_type = other DNA
acagtgggccagaggcggcg

SEQ ID NO: 934 - DNA, 20 bp, synthetic construct
  misc_feature 1..20: note = chemically synthesized
  source 1..20: mol_type = other DNA
gtgggccagaggcggcgcag

SEQ ID NO: 935 - DNA, 20 bp, synthetic construct
  misc_feature 1..20: note = chemically synthesized
  source 1..20: mol_type = other DNA
gccagaggcggcgcagaagc

SEQ ID NO: 936 - DNA, 20 bp, synthetic construct
  misc_feature 1..20: note = chemically synthesized
  source 1..20: mol_type = other DNA
agaggcggcgcagaagccag

SEQ ID NO: 937 - DNA, 20 bp, synthetic construct
  misc_feature 1..20: note = chemically synthesized
  source 1..20: mol_type = other DNA
aggcggcgcagaagccagta

SEQ ID NO: 938 - DNA, 20 bp, synthetic construct
  misc_feature 1..20: note = chemically synthesized
  source 1..20: mol_type = other DNA
gcagaagccagtagagctca

SEQ ID NO: 939 - DNA, 20 bp, synthetic construct
  misc_feature 1..20: note = chemically synthesized
  source 1..20: mol_type = other DNA
gaagccagtagagctcaaag

SEQ ID NO: 940 - DNA, 20 bp, synthetic construct
  misc_feature 1..20: note = chemically synthesized
  source 1..20: mol_type = other DNA
cagtagagctcaaagtggtc

SEQ ID NO: 941 - DNA, 20 bp, synthetic construct
  misc_feature 1..20: note = chemically synthesized
  source 1..20: mol_type = other DNA
agctcaaagtggtccggact

SEQ ID NO: 942 - DNA, 20 bp, synthetic construct
  misc_feature 1..20: note = chemically synthesized
  source 1..20: mol_type = other DNA
gctcaaagtggtccggactc

SEQ ID NO: 943 - DNA, 20 bp, synthetic construct
  misc_feature 1..20: note = chemically synthesized
  source 1..20: mol_type = other DNA
tcaaagtggtccggactcag

SEQ ID NO: 944 - DNA, 20 bp, synthetic construct
  misc_feature 1..20: note = chemically synthesized
  source 1..20: mol_type = other DNA
aaagtggtccggactcagga

SEQ ID NO: 945 - DNA, 20 bp, synthetic construct
  misc_feature 1..20: note = chemically synthesized
  source 1..20: mol_type = other DNA
agtggtccggactcaggaga

SEQ ID NO: 946 - DNA, 20 bp, synthetic construct
  misc_feature 1..20: note = chemically synthesized
  source 1..20: mol_type = other DNA
gtccggactcaggagagaga

SEQ ID NO: 947 - DNA, 20 bp, synthetic construct
  misc_feature 1..20: note = chemically synthesized
  source 1..20: mol_type = other DNA
cggactcaggagagagacgg

SEQ ID NO: 948 - DNA, 20 bp, synthetic construct
  misc_feature 1..20: note = chemically synthesized
  source 1..20: mol_type = other DNA
caggagagagacggcagcgt

SEQ ID NO: 949 - DNA, 20 bp, synthetic construct
  misc_feature 1..20: note = chemically synthesized
  source 1..20: mol_type = other DNA
ggagagagacggcagcgtta

SEQ ID NO: 950 - DNA, 20 bp, synthetic construct
  misc_feature 1..20: note = chemically synthesized
  source 1..20: mol_type = other DNA
gagagagacggcagcgttag

SEQ ID NO: 951 - DNA, 20 bp, synthetic construct
  misc_feature 1..20: note = chemically synthesized
  source 1..20: mol_type = other DNA
agagagacggcagcgttaga

SEQ ID NO: 952 - DNA, 20 bp, synthetic construct
  misc_feature 1..20: note = chemically synthesized
  source 1..20: mol_type = other DNA
gagacggcagcgttagaggg

SEQ ID NO: 953 - DNA, 20 bp, synthetic construct
  misc_feature 1..20: note = chemically synthesized
  source 1..20: mol_type = other DNA
gacggcagcgttagagggca

SEQ ID NO: 954 - DNA, 20 bp, synthetic construct
  misc_feature 1..20: note = chemically synthesized
  source 1..20: mol_type = other DNA
agcgttagagggcagagttc

SEQ ID NO: 955 - DNA, 20 bp, synthetic construct
  misc_feature 1..20: note = chemically synthesized
  source 1..20: mol_type = other DNA
gttagagggcagagttccgg

SEQ ID NO: 956 - DNA, 20 bp, synthetic construct
  misc_feature 1..20: note = chemically synthesized
  source 1..20: mol_type = other DNA
agggcagagttccggcggca

SEQ ID NO: 957 - DNA, 20 bp, synthetic construct
  misc_feature 1..20: note = chemically synthesized
  source 1..20: mol_type = other DNA
cagagttccggcggcacagc

SEQ ID NO: 958 - DNA, 20 bp, synthetic construct
  misc_feature 1..20: note = chemically synthesized
  source 1..20: mol_type = other DNA
agagttccggcggcacagca

SEQ ID NO: 959 - DNA, 20 bp, synthetic construct
  misc_feature 1..20: note = chemically synthesized
  source 1..20: mol_type = other DNA
gagttccggcggcacagcaa

SEQ ID NO: 960 - DNA, 20 bp, synthetic construct
  misc_feature 1..20: note = chemically synthesized
  source 1..20: mol_type = other DNA
ggcggcacagcaagggcact

SEQ ID NO: 961 - DNA, 20 bp, synthetic construct
  misc_feature 1..20: note = chemically synthesized
  source 1..20: mol_type = other DNA
gcggcacagcaagggcactc

SEQ ID NO: 962 - DNA, 20 bp, synthetic construct
  misc_feature 1..20: note = chemically synthesized
  source 1..20: mol_type = other DNA
cggcacagcaagggcactcg

SEQ ID NO: 963 - DNA, 20 bp, synthetic construct
  misc_feature 1..20: note = chemically synthesized
  source 1..20: mol_type = other DNA
ggcacagcaagggcactcgg

SEQ ID NO: 964 - DNA, 20 bp, synthetic construct
  misc_feature 1..20: note = chemically synthesized
  source 1..20: mol_type = other DNA
cagcaagggcactcgggggc

SEQ ID NO: 965 - DNA, 20 bp, synthetic construct
  misc_feature 1..20: note = chemically synthesized
  source 1..20: mol_type = other DNA
gcaagggcactcgggggcga

SEQ ID NO: 966 - DNA, 20 bp, synthetic construct
  misc_feature 1..20: note = chemically synthesized
  source 1..20: mol_type = other DNA
caagggcactcgggggcgag

SEQ ID NO: 967 - DNA, 20 bp, synthetic construct
  misc_feature 1..20: note = chemically synthesized
  source 1..20: mol_type = other DNA
agggcactcgggggcgagag

SEQ ID NO: 968 - DNA, 20 bp, synthetic construct
  misc_feature 1..20: note = chemically synthesized
  source 1..20: mol_type = other DNA
gggcactcgggggcgagagg

SEQ ID NO: 969 - DNA, 20 bp, synthetic construct
  misc_feature 1..20: note = chemically synthesized
  source 1..20: mol_type = other DNA
ggcactcgggggcgagagga

SEQ ID NO: 970 - DNA, 20 bp, synthetic construct
  misc_feature 1..20: note = chemically synthesized
  source 1..20: mol_type = other DNA
actcgggggcgagaggaggg

SEQ ID NO: 971 - DNA, 20 bp, synthetic construct
  misc_feature 1..20: note = chemically synthesized
  source 1..20: mol_type = other DNA
ggcgagaggagggcagcgca

SEQ ID NO: 972 - DNA, 20 bp, synthetic construct
  misc_feature 1..20: note = chemically synthesized
  source 1..20: mol_type = other DNA
agggcagcgcaaagtgacaa

SEQ ID NO: 973 - DNA, 20 bp, synthetic construct
  misc_feature 1..20: note = chemically synthesized
  source 1..20: mol_type = other DNA
cagcgcaaagtgacaatggc

SEQ ID NO: 974 - DNA, 20 bp, synthetic construct
  misc_feature 1..20: note = chemically synthesized
  source 1..20: mol_type = other DNA
agcgcaaagtgacaatggcc

SEQ ID NO: 975 - DNA, 20 bp, synthetic construct
  misc_feature 1..20: note = chemically synthesized
  source 1..20: mol_type = other DNA
gcgcaaagtgacaatggcca

SEQ ID NO: 976 - DNA, 20 bp, synthetic construct
  misc_feature 1..20: note = chemically synthesized
  source 1..20: mol_type = other DNA
aaagtgacaatggccagggc

SEQ ID NO: 977 - DNA, 20 bp, synthetic construct
  misc_feature 1..20: note = chemically synthesized
  source 1..20: mol_type = other DNA
aagtgacaatggccagggcc

SEQ ID NO: 978 - DNA, 20 bp, synthetic construct
  misc_feature 1..20: note = chemically synthesized
  source 1..20: mol_type = other DNA
tgacaatggccagggccagg

SEQ ID NO: 979 - DNA, 20 bp, synthetic construct
  misc_feature 1..20: note = chemically synthesized
  source 1..20: mol_type = other DNA
aatggccagggccaggcaga

SEQ ID NO: 980 - DNA, 20 bp, synthetic construct
  misc_feature 1..20: note = chemically synthesized
  source 1..20: mol_type = other DNA
ccagggccaggcagatagac

SEQ ID NO: 981 - DNA, 20 bp, synthetic construct
  misc_feature 1..20: note = chemically synthesized
  source 1..20: mol_type = other DNA
ccaggcagatagaccagact

SEQ ID NO: 982 - DNA, 20 bp, synthetic construct
  misc_feature 1..20: note = chemically synthesized
  source 1..20: mol_type = other DNA
agatagaccagactgagcta

SEQ ID NO: 983 - DNA, 20 bp, synthetic construct
  misc_feature 1..20: note = chemically synthesized
  source 1..20: mol_type = other DNA
gatagaccagactgagctat

SEQ ID NO: 984 - DNA, 20 bp, synthetic construct
  misc_feature 1..20: note = chemically synthesized
  source 1..20: mol_type = other DNA
tagaccagactgagctatgg

SEQ ID NO: 985 - DNA, 20 bp, synthetic construct
  misc_feature 1..20: note = chemically synthesized
  source 1..20: mol_type = other DNA
ccagactgagctatgggagc

SEQ ID NO: 986 - DNA, 20 bp, synthetic construct
  misc_feature 1..20: note = chemically synthesized
  source 1..20: mol_type = other DNA
ctgagctatgggagctggct

SEQ ID NO: 987 - DNA, 20 bp, synthetic construct
  misc_feature 1..20: note = chemically synthesized
  source 1..20: mol_type = other DNA
tgagctatgggagctggctc

SEQ ID NO: 988 - DNA, 20 bp, synthetic construct
  misc_feature 1..20: note = chemically synthesized
  source 1..20: mol_type = other DNA
tatgggagctggctcaggtt

SEQ ID NO: 989 - DNA, 20 bp, synthetic construct
  misc_feature 1..20: note = chemically synthesized
  source 1..20: mol_type = other DNA
atgggagctggctcaggttc

SEQ ID NO: 990 - DNA, 20 bp, synthetic construct
  misc_feature 1..20: note = chemically synthesized
  source 1..20: mol_type = other DNA
gggagctggctcaggttcag

SEQ ID NO: 991 - DNA, 20 bp, synthetic construct
  misc_feature 1..20: note = chemically synthesized
  source 1..20: mol_type = other DNA
gagctggctcaggttcagga

SEQ ID NO: 992 - DNA, 20 bp, synthetic construct
  misc_feature 1..20: note = chemically synthesized
  source 1..20: mol_type = other DNA
agctggctcaggttcaggag

SEQ ID NO: 993 - DNA, 20 bp, synthetic construct
  misc_feature 1..20: note = chemically synthesized
  source 1..20: mol_type = other DNA
gctggctcaggttcaggaga

SEQ ID NO: 994 - DNA, 20 bp, synthetic construct
  misc_feature 1..20: note = chemically synthesized
  source 1..20: mol_type = other DNA
ggctcaggttcaggagaggg

SEQ ID NO: 995 - DNA, 20 bp, synthetic construct
  misc_feature 1..20: note = chemically synthesized
  source 1..20: mol_type = other DNA
gctcaggttcaggagagggc

SEQ ID NO: 996 - DNA, 20 bp, synthetic construct
  misc_feature 1..20: note = chemically synthesized
  source 1..20: mol_type = other DNA
ctcaggttcaggagagggca

SEQ ID NO: 997 - DNA, 20 bp, synthetic construct
  misc_feature 1..20: note = chemically synthesized
  source 1..20: mol_type = other DNA
aggttcaggagagggcaggg

SEQ ID NO: 998 - DNA, 20 bp, synthetic construct
  misc_feature 1..20: note = chemically synthesized
  source 1..20: mol_type = other DNA
ggttcaggagagggcagggc

SEQ ID NO: 999 - DNA, 20 bp, synthetic construct
  misc_feature 1..20: note = chemically synthesized
  source 1..20: mol_type = other DNA
gttcaggagagggcagggca

SEQ ID NO: 1000 - DNA, 20 bp, synthetic construct
  misc_feature 1..20: note = chemically synthesized
  source 1..20: mol_type = other DNA
caggagagggcagggcaggg

SEQ ID NO: 1001 - DNA, 20 bp, synthetic construct
  misc_feature 1..20: note = chemically synthesized
  source 1..20: mol_type = other DNA
aggagagggcagggcaggga

SEQ ID NO: 1002 - DNA, 20 bp, synthetic construct
  misc_feature 1..20: note = chemically synthesized
  source 1..20: mol_type = other DNA
gagagggcagggcagggaag

SEQ ID NO: 1003 - DNA, 20 bp, synthetic construct
  misc_feature 1..20: note = chemically synthesized
  source 1..20: mol_type = other DNA
gcagggcagggaaggagaca

SEQ ID NO: 1004 - DNA, 20 bp, synthetic construct
  misc_feature 1..20: note = chemically synthesized
  source 1..20: mol_type = other DNA
gcagggaaggagacaaagtc

SEQ ID NO: 1005 - DNA, 20 bp, synthetic construct
  misc_feature 1..20: note = chemically synthesized
  source 1..20: mol_type = other DNA
cagggaaggagacaaagtcc

SEQ ID NO: 1006 - DNA, 20 bp, synthetic construct
  misc_feature 1..20: note = chemically synthesized
  source 1..20: mol_type = other DNA
aaggagacaaagtccaggac

SEQ ID NO: 1007 - DNA, 20 bp, synthetic construct
  misc_feature 1..20: note = chemically synthesized
  source 1..20: mol_type = other DNA
agacaaagtccaggaccggc

SEQ ID NO: 1008 - DNA, 20 bp, synthetic construct
  misc_feature 1..20: note = chemically synthesized
  source 1..20: mol_type = other DNA
acaaagtccaggaccggctg

SEQ ID NO: 1009 - DNA, 20 bp, synthetic construct
  misc_feature 1..20: note = chemically synthesized
  source 1..20: mol_type = other DNA
caaagtccaggaccggctgg

SEQ ID NO: 1010 - DNA, 20 bp, synthetic construct
  misc_feature 1..20: note = chemically synthesized
  source 1..20: mol_type = other DNA
aaagtccaggaccggctgga

SEQ ID NO: 1011 - DNA, 20 bp, synthetic construct
  misc_feature 1..20: note = chemically synthesized
  source 1..20: mol_type = other DNA
aagtccaggaccggctggag

SEQ ID NO: 1012 - DNA, 20 bp, synthetic construct
  misc_feature 1..20: note = chemically synthesized
  source 1..20: mol_type = other DNA
cggctggaggggctcaacat

SEQ ID NO: 1013 - DNA, 20 bp, synthetic construct
  misc_feature 1..20: note = chemically synthesized
  source 1..20: mol_type = other DNA
ctggaggggctcaacatcgg

SEQ ID NO: 1014 - DNA, 20 bp, synthetic construct
  misc_feature 1..20: note = chemically synthesized
  source 1..20: mol_type = other DNA
ggaggggctcaacatcggaa

SEQ ID NO: 1015 - DNA, 20 bp, synthetic construct
  misc_feature 1..20: note = chemically synthesized
  source 1..20: mol_type = other DNA
gaggggctcaacatcggaag

SEQ ID NO: 1016 - DNA, 20 bp, synthetic construct
  misc_feature 1..20: note = chemically synthesized
  source 1..20: mol_type = other DNA
aggggctcaacatcggaaga

SEQ ID NO: 1017 - DNA, 20 bp, synthetic construct
  misc_feature 1..20: note = chemically synthesized
  source 1..20: mol_type = other DNA
ggggctcaacatcggaagag

SEQ ID NO: 1018 - DNA, 20 bp, synthetic construct
  misc_feature 1..20: note = chemically synthesized
  source 1..20: mol_type = other DNA
gctcaacatcggaagagggg

SEQ ID NO: 1019 - DNA, 20 bp, synthetic construct
  misc_feature 1..20: note = chemically synthesized
  source 1..20: mol_type = other DNA
acatcggaagaggggaagtc

SEQ ID NO: 1020 - DNA, 20 bp, synthetic construct
  misc_feature 1..20: note = chemically synthesized
  source 1..20: mol_type = other DNA
catcggaagaggggaagtcg

SEQ ID NO: 1021 - DNA, 20 bp, synthetic construct
  misc_feature 1..20: note = chemically synthesized
  source 1..20: mol_type = other DNA
atcggaagaggggaagtcga

SEQ ID NO: 1022 - DNA, 20 bp, synthetic construct
  misc_feature 1..20: note = chemically synthesized
  source 1..20: mol_type = other DNA
cggaagaggggaagtcgagg

SEQ ID NO: 1023 - DNA, 20 bp, synthetic construct
  misc_feature 1..20: note = chemically synthesized
  source 1..20: mol_type = other DNA
ggaagaggggaagtcgaggg

SEQ ID NO: 1024 - DNA, 20 bp, synthetic construct
  misc_feature 1..20: note = chemically synthesized
  source 1..20: mol_type = other DNA
gaagaggggaagtcgaggga

SEQ ID NO: 1025 - DNA, 20 bp, synthetic construct
  misc_feature 1..20: note = chemically synthesized
  source 1..20: mol_type = other DNA
aggggaagtcgagggaggga

SEQ ID NO: 1026 - DNA, 20 bp, synthetic construct
  misc_feature 1..20: note = chemically synthesized
  source 1..20: mol_type = other DNA
gaagtcgagggagggatggt

SEQ ID NO: 1027 - DNA, 20 bp, synthetic construct
  misc_feature 1..20: note = chemically synthesized
  source 1..20: mol_type = other DNA
aagtcgagggagggatggta

SEQ ID NO: 1028 - DNA, 20 bp, synthetic construct
  misc_feature 1..20: note = chemically synthesized
  source 1..20: mol_type = other DNA
gtcgagggagggatggtaag

SEQ ID NO: 1029 - DNA, 20 bp, synthetic construct
  misc_feature 1..20: note = chemically synthesized
  source 1..20: mol_type = other DNA
tcgagggagggatggtaagg

SEQ ID NO: 1030 - DNA, 20 bp, synthetic construct
  misc_feature 1..20: note = chemically synthesized
  source 1..20: mol_type = other DNA
ggatggtaaggaggactgca

SEQ ID NO: 1031 - DNA, 20 bp, synthetic construct
  misc_feature 1..20: note = chemically synthesized
  source 1..20: mol_type = other DNA
gatggtaaggaggactgcat

SEQ ID NO: 1032 - DNA, 20 bp, synthetic construct
  misc_feature 1..20: note = chemically synthesized
  source 1..20: mol_type = other DNA
gtaaggaggactgcatgggt

SEQ ID NO: 1033 - DNA, 20 bp, synthetic construct
  misc_feature 1..20: note = chemically synthesized
  source 1..20: mol_type = other DNA
gaggactgcatgggtcagca

SEQ ID NO: 1034 - DNA, 20 bp, synthetic construct
  misc_feature 1..20: note = chemically synthesized
  source 1..20: mol_type = other DNA
aggactgcatgggtcagcac

SEQ ID NO: 1035 - DNA, 20 bp, synthetic construct
  misc_feature 1..20: note = chemically synthesized
  source 1..20: mol_type = other DNA
tgggtcagcacaggctgcca

SEQ ID NO: 1036 - DNA, 20 bp, synthetic construct
  misc_feature 1..20: note = chemically synthesized
  source 1..20: mol_type = other DNA
tcagcacaggctgccaaagc

SEQ ID NO: 1037 - DNA, 20 bp, synthetic construct
  misc_feature 1..20: note = chemically synthesized
  source 1..20: mol_type = other DNA
cagcacaggctgccaaagcc

SEQ ID NO: 1038 - DNA, 20 bp, synthetic construct
  misc_feature 1..20: note = chemically synthesized
  source 1..20: mol_type = other DNA
agcacaggctgccaaagcca

SEQ ID NO: 1039 - DNA, 20 bp, synthetic construct
  misc_feature 1..20: note = chemically synthesized
  source 1..20: mol_type = other DNA
caggctgccaaagccagggc

SEQ ID NO: 1040 - DNA, 20 bp, synthetic construct
  misc_feature 1..20: note = chemically synthesized
  source 1..20: mol_type = other DNA
gccaaagccagggccagtta

SEQ ID NO: 1041 - DNA, 20 bp, synthetic construct
  misc_feature 1..20: note = chemically synthesized
  source 1..20: mol_type = other DNA
cagttaaagcgactccaatg

SEQ ID NO: 1042 - DNA, 20 bp, synthetic construct
  misc_feature 1..20: note = chemically synthesized
  source 1..20: mol_type = other DNA
ttaaagcgactccaatgcgg

SEQ ID NO: 1043 - DNA, 20 bp, synthetic construct
  misc_feature 1..20: note = chemically synthesized
  source 1..20: mol_type = other DNA
aaagcgactccaatgcggaa

SEQ ID NO: 1044 - DNA, 20 bp, synthetic construct
  misc_feature 1..20: note = chemically synthesized
  source 1..20: mol_type = other DNA
agcgactccaatgcggaaga

SEQ ID NO: 1045 - DNA, 20 bp, synthetic construct
  misc_feature 1..20: note = chemically synthesized
  source 1..20: mol_type = other DNA
gactccaatgcggaagagag

SEQ ID NO: 1046 - DNA, 20 bp, synthetic construct
  misc_feature 1..20: note = chemically synthesized
  source 1..20: mol_type = other DNA
actccaatgcggaagagagt

SEQ ID NO: 1047 - DNA, 20 bp, synthetic construct
  misc_feature 1..20: note = chemically synthesized
  source 1..20: mol_type = other DNA
atgcggaagagagtaggtcg

SEQ ID NO: 1048 - DNA, 20 bp, synthetic construct
  misc_feature 1..20: note = chemically synthesized
  source 1..20: mol_type = other DNA
tgcggaagagagtaggtcga

SEQ ID NO: 1049 - DNA, 20 bp, synthetic construct
  misc_feature 1..20: note = chemically synthesized
  source 1..20: mol_type = other DNA
gcggaagagagtaggtcgaa

SEQ ID NO: 1050 - DNA, 20 bp, synthetic construct
  misc_feature 1..20: note = chemically synthesized
  source 1..20: mol_type = other DNA
cggaagagagtaggtcgaag

SEQ ID NO: 1051 - DNA, 20 bp, synthetic construct
  misc_feature 1..20: note = chemically synthesized
  source 1..20: mol_type = other DNA
gagagtaggtcgaaggggaa

SEQ ID NO: 1052 - DNA, 20 bp, synthetic construct
  misc_feature 1..20: note = chemically synthesized
  source 1..20: mol_type = other DNA
gtaggtcgaaggggaatggt

SEQ ID NO: 1053 - DNA, 20 bp, synthetic construct
  misc_feature 1..20: note = chemically synthesized
  source 1..20: mol_type = other DNA
taggtcgaaggggaatggta

SEQ ID NO: 1054 - DNA, 20 bp, synthetic construct
  misc_feature 1..20: note = chemically synthesized
  source 1..20: mol_type = other DNA
ggtcgaaggggaatggtaag

SEQ ID NO: 1055 - DNA, 20 bp, synthetic construct
  misc_feature 1..20: note = chemically synthesized
  source 1..20: mol_type = other DNA
gtcgaaggggaatggtaagg

SEQ ID NO: 1056 - DNA, 20 bp, synthetic construct
  misc_feature 1..20: note = chemically synthesized
  source 1..20: mol_type = other DNA
aggggaatggtaaggaggcc

SEQ ID NO: 1057 - DNA, 20 bp, synthetic construct
  misc_feature 1..20: note = chemically synthesized
  source 1..20: mol_type = other DNA
ggggaatggtaaggaggcct

SEQ ID NO: 1058 - DNA, 20 bp, synthetic construct
  misc_feature 1..20: note = chemically synthesized
  source 1..20: mol_type = other DNA
gggaatggtaaggaggcctg

SEQ ID NO: 1059 - DNA, 20 bp, synthetic construct
  misc_feature 1..20: note = chemically synthesized
  source 1..20: mol_type = other DNA
aatggtaaggaggcctgggg

SEQ ID NO: 1060 - DNA, 20 bp, synthetic construct
  misc_feature 1..20: note = chemically synthesized
  source 1..20: mol_type = other DNA
tggtaaggaggcctggggca

SEQ ID NO: 1061 - DNA, 20 bp, synthetic construct
  misc_feature 1..20: note = chemically synthesized
  source 1..20: mol_type = other DNA
taaggaggcctggggcagag

SEQ ID NO: 1062 - DNA, 20 bp, synthetic construct
  misc_feature 1..20: note = chemically synthesized
  source 1..20: mol_type = other DNA
gaggcctggggcagagtggt

SEQ ID NO: 1063 - DNA, 20 bp, synthetic construct
  misc_feature 1..20: note = chemically synthesized
  source 1..20: mol_type = other DNA
ctggggcagagtggtcagca

SEQ ID NO: 1064 - DNA, 20 bp, synthetic construct
  misc_feature 1..20: note = chemically synthesized
  source 1..20: mol_type = other DNA
ggggcagagtggtcagcaca

SEQ ID NO: 1065 - DNA, 20 bp, synthetic construct
  misc_feature 1..20: note = chemically synthesized
  source 1..20: mol_type = other DNA
gcagagtggtcagcacagag

SEQ ID NO: 1066 - DNA, 20 bp, synthetic construct
  misc_feature 1..20: note = chemically synthesized
  source 1..20: mol_type = other DNA
gtggtcagcacagagtggct

SEQ ID NO: 1067 - DNA, 20 bp, synthetic construct
  misc_feature 1..20: note = chemically synthesized
  source 1..20: mol_type = other DNA
cagcacagagtggctaagcc

SEQ ID NO: 1068 - DNA, 20 bp, synthetic construct
  misc_feature 1..20: note = chemically synthesized
  source 1..20: mol_type = other DNA
agcacagagtggctaagccc

SEQ ID NO: 1069 - DNA, 20 bp, synthetic construct
  misc_feature 1..20: note = chemically synthesized
  source 1..20: mol_type = other DNA
gcacagagtggctaagccca

SEQ ID NO: 1070 - DNA, 20 bp, synthetic construct
  misc_feature 1..20: note = chemically synthesized
  source 1..20: mol_type = other DNA
agagtggctaagcccagggc

SEQ ID NO: 1071 - DNA, 20 bp, synthetic construct
  misc_feature 1..20: note = chemically synthesized
  source 1..20: mol_type = other DNA
gctaagcccagggccagttg

SEQ ID NO: 1072 - DNA, 20 bp, synthetic construct
  misc_feature 1..20: note = chemically synthesized
  source 1..20: mol_type = other DNA
aagcccagggccagttgaag

SEQ ID NO: 1073 - DNA, 20 bp, synthetic construct
  misc_feature 1..20: note = chemically synthesized
  source 1..20: mol_type = other DNA
cagttgaagcggctccaatt

SEQ ID NO: 1074 - DNA, 20 bp, synthetic construct
  misc_feature 1..20: note = chemically synthesized
  source 1..20: mol_type = other DNA
ttgaagcggctccaattcgg

SEQ ID NO: 1075 - DNA, 20 bp, synthetic construct
  misc_feature 1..20: note = chemically synthesized
  source 1..20: mol_type = other DNA
aagcggctccaattcggaag

SEQ ID NO: 1076 - DNA, 20 bp, synthetic construct
  misc_feature 1..20: note = chemically synthesized
  source 1..20: mol_type = other DNA
agcggctccaattcggaagt

SEQ ID NO: 1077 - DNA, 20 bp, synthetic construct
  misc_feature 1..20: note = chemically synthesized
  source 1..20: mol_type = other DNA
gcggctccaattcggaagtg

SEQ ID NO: 1078 - DNA, 20 bp, synthetic construct
  misc_feature 1..20: note = chemically synthesized
  source 1..20: mol_type = other DNA
gctccaattcggaagtgggg

SEQ ID NO: 1079 - DNA, 20 bp, synthetic construct
  misc_feature 1..20: note = chemically synthesized
  source 1..20: mol_type = other DNA
attcggaagtggggtggtcg

SEQ ID NO: 1080 - DNA, 20 bp, synthetic construct
  misc_feature 1..20: note = chemically synthesized
  source 1..20: mol_type = other DNA
ttcggaagtggggtggtcga

SEQ ID NO: 1081 - DNA, 20 bp, synthetic construct
  misc_feature 1..20: note = chemically synthesized
  source 1..20: mol_type = other DNA
tcggaagtggggtggtcgaa

SEQ ID NO: 1082 - DNA, 20 bp, synthetic construct
  misc_feature 1..20: note = chemically synthesized
  source 1..20: mol_type = other DNA
cggaagtggggtggtcgaag

SEQ ID NO: 1083 - DNA, 20 bp, synthetic construct
  misc_feature 1..20: note = chemically synthesized
  source 1..20: mol_type = other DNA
gtggggtggtcgaaggggaa

SEQ ID NO: 1084 - DNA, 20 bp, synthetic construct
  misc_feature 1..20: note = chemically synthesized
  source 1..20: mol_type = other DNA
ggtggtcgaaggggaatggt

SEQ ID NO: 1085 - DNA, 20 bp, synthetic construct
  misc_feature 1..20: note = chemically synthesized
  source 1..20: mol_type = other DNA
gtggtcgaaggggaatggta

SEQ ID NO: 1086 - DNA, 20 bp, synthetic construct
  misc_feature 1..20: note = chemically synthesized
  source 1..20: mol_type = other DNA
tggtcgaaggggaatggtaa

SEQ ID NO: 1087 - DNA, 20 bp, synthetic construct
  misc_feature 1..20: note = chemically synthesized
  source 1..20: mol_type = other DNA
ggtcgaaggggaatggtaag

SEQ ID NO: 1088 - DNA, 20 bp, synthetic construct
  misc_feature 1..20: note = chemically synthesized
  source 1..20: mol_type = other DNA
gtcgaaggggaatggtaagg

SEQ ID NO: 1089 - DNA, 20 bp, synthetic construct
  misc_feature 1..20: note = chemically synthesized
  source 1..20: mol_type = other DNA
aggggaatggtaagggggac

SEQ ID NO: 1090 - DNA, 20 bp, synthetic construct
  misc_feature 1..20: note = chemically synthesized
  source 1..20: mol_type = other DNA
ggggaatggtaagggggact

SEQ ID NO: 1091 - DNA, 20 bp, synthetic construct
  misc_feature 1..20: note = chemically synthesized
  source 1..20: mol_type = other DNA
aatggtaagggggactggga

SEQ ID NO: 1092 - DNA, 20 bp, synthetic construct
  misc_feature 1..20: note = chemically synthesized
  source 1..20: mol_type = other DNA
atggtaagggggactgggac

SEQ ID NO: 1093 - DNA, 20 bp, synthetic construct
  misc_feature 1..20: note = chemically synthesized
  source 1..20: mol_type = other DNA
tggtaagggggactgggacg

SEQ ID NO: 1094 - DNA, 20 bp, synthetic construct
  misc_feature 1..20: note = chemically synthesized
  source 1..20: mol_type = other DNA
gggggactgggacggggtgt

SEQ ID NO: 1095 - DNA, 20 bp, synthetic construct
  misc_feature 1..20: note = chemically synthesized
  source 1..20: mol_type = other DNA
actgggacggggtgtcagca

SEQ ID NO: 1096 - DNA, 20 bp, synthetic construct
  misc_feature 1..20: note = chemically synthesized
  source 1..20: mol_type = other DNA
ctgggacggggtgtcagcat

SEQ ID NO: 1097 - DNA, 20 bp, synthetic construct
  misc_feature 1..20: note = chemically synthesized
  source 1..20: mol_type = other DNA
tgggacggggtgtcagcata

SEQ ID NO: 1098 - DNA, 20 bp, synthetic construct
  misc_feature 1..20: note = chemically synthesized
  source 1..20: mol_type = other DNA
gacggggtgtcagcataggg

SEQ ID NO: 1099 - DNA, 20 bp, synthetic construct
  misc_feature 1..20: note = chemically synthesized
  source 1..20: mol_type = other DNA
ggtgtcagcatagggtggca

SEQ ID NO: 1100 - DNA, 20 bp, synthetic construct
  misc_feature 1..20: note = chemically synthesized
  source 1..20: mol_type = other DNA
cagcatagggtggcaaagcc

SEQ ID NO: 1101 - DNA, 20 bp, synthetic construct
  misc_feature 1..20: note = chemically synthesized
  source 1..20: mol_type = other DNA
agcatagggtggcaaagccc

SEQ ID NO: 1102 - DNA, 20 bp, synthetic construct
  misc_feature 1..20: note = chemically synthesized
  source 1..20: mol_type = other DNA
gcatagggtggcaaagccca

SEQ ID NO: 1103 - DNA, 20 bp, synthetic construct
  misc_feature 1..20: note = chemically synthesized
  source 1..20: mol_type = other DNA
agggtggcaaagcccagggc

SEQ ID NO: 1104 - DNA, 20 bp, synthetic construct
  misc_feature 1..20: note = chemically synthesized
  source 1..20: mol_type = other DNA
gggtggcaaagcccagggcc

SEQ ID NO: 1105 - DNA, 20 bp, synthetic construct
  misc_feature 1..20: note = chemically synthesized
  source 1..20: mol_type = other DNA
aagcccagggccaggaacga

SEQ ID NO: 1106 - DNA, 20 bp, synthetic construct
  misc_feature 1..20: note = chemically synthesized
  source 1..20: mol_type = other DNA
agcccagggccaggaacgac

SEQ ID NO: 1107 - DNA, 20 bp, synthetic construct
  misc_feature 1..20: note = chemically synthesized
  source 1..20: mol_type = other DNA
gcccagggccaggaacgacg

SEQ ID NO: 1108 - DNA, 20 bp, synthetic construct
  misc_feature 1..20: note = chemically synthesized
  source 1..20: mol_type = other DNA
cagggccaggaacgacgggg

SEQ ID NO: 1109 - DNA, 20 bp, synthetic construct
  misc_feature 1..20: note = chemically synthesized
  source 1..20: mol_type = other DNA
caggaacgacggggcggatc

SEQ ID NO: 1110 - DNA, 20 bp, synthetic construct
  misc_feature 1..20: note = chemically synthesized
  source 1..20: mol_type = other DNA
acgacggggcggatcgagac

SEQ ID NO: 1111 - DNA, 20 bp, synthetic construct
  misc_feature 1..20: note = chemically synthesized
  source 1..20: mol_type = other DNA
gggcggatcgagactggcaa

SEQ ID NO: 1112 - DNA, 20 bp, synthetic construct
  misc_feature 1..20: note = chemically synthesized
  source 1..20: mol_type = other DNA
ggcggatcgagactggcaac

SEQ ID NO: 1113 - DNA, 20 bp, synthetic construct
  misc_feature 1..20: note = chemically synthesized
  source 1..20: mol_type = other DNA
gcggatcgagactggcaacg

SEQ ID NO: 1114 - DNA, 20 bp, synthetic construct
  misc_feature 1..20: note = chemically synthesized
  source 1..20: mol_type = other DNA
gatcgagactggcaacgggg

SEQ ID NO: 1115 - DNA, 20 bp, synthetic construct
  misc_feature 1..20: note = chemically synthesized
  source 1..20: mol_type = other DNA
atcgagactggcaacgggga

SEQ ID NO: 1116 - DNA, 20 bp, synthetic construct
  misc_feature 1..20: note = chemically synthesized
  source 1..20: mol_type = other DNA
cgagactggcaacggggaag

SEQ ID NO: 1117 - DNA, 20 bp, synthetic construct
  misc_feature 1..20: note = chemically synthesized
  source 1..20: mol_type = other DNA
gagactggcaacggggaagg

SEQ ID NO: 1118 - DNA, 20 bp, synthetic construct
  misc_feature 1..20: note = chemically synthesized
  source 1..20: mol_type = other DNA
aacggggaaggaggatgccc

SEQ ID NO: 1119 - DNA, 20 bp, synthetic construct
  misc_feature 1..20: note = chemically synthesized
  source 1..20: mol_type = other DNA
acggggaaggaggatgcccc

SEQ ID NO: 1120 - DNA, 20 bp, synthetic construct
  misc_feature 1..20: note = chemically synthesized
  source 1..20: mol_type = other DNA
gggaaggaggatgccccagg

SEQ ID NO: 1121 - DNA, 20 bp, synthetic construct
  misc_feature 1..20: note = chemically synthesized
  source 1..20: mol_type = other DNA
ggaggatgccccaggtggcg

SEQ ID NO: 1122 - DNA, 20 bp, synthetic construct
  misc_feature 1..20: note = chemically synthesized
  source 1..20: mol_type = other DNA
ggatgccccaggtggcgcag

SEQ ID NO: 1123 - DNA, 20 bp, synthetic construct
  misc_feature 1..20: note = chemically synthesized
  source 1..20: mol_type = other DNA
atgccccaggtggcgcagca

SEQ ID NO: 1124 - DNA, 20 bp, synthetic construct
  misc_feature 1..20: note = chemically synthesized
  source 1..20: mol_type = other DNA
tgccccaggtggcgcagcag

SEQ ID NO: 1125 - DNA, 20 bp, synthetic construct
  misc_feature 1..20: note = chemically synthesized
  source 1..20: mol_type = other DNA
gccccaggtggcgcagcaga

SEQ ID NO: 1126 - DNA, 20 bp, synthetic construct
  misc_feature 1..20: note = chemically synthesized
  source 1..20: mol_type = other DNA
ccaggtggcgcagcagaggg

SEQ ID NO: 1127 - DNA, 20 bp, synthetic construct
  misc_feature 1..20: note = chemically synthesized
  source 1..20: mol_type = other DNA
ggcgcagcagagggtggacc

SEQ ID NO: 1128 - DNA, 20 bp, synthetic construct
  misc_feature 1..20: note = chemically synthesized
  source 1..20: mol_type = other DNA
gcagagggtggacctggccc

SEQ ID NO: 1129 - DNA, 20 bp, synthetic construct
  misc_feature 1..20: note = chemically synthesized
  source 1..20: mol_type = other DNA
cagagggtggacctggcccc

SEQ ID NO: 1130 - DNA, 20 bp, synthetic construct
  misc_feature 1..20: note = chemically synthesized
  source 1..20: mol_type = other DNA
gagggtggacctggccccgg

SEQ ID NO: 1131 - DNA, 20 bp, synthetic construct
  misc_feature 1..20: note = chemically synthesized
  source 1..20: mol_type = other DNA
gacctggccccgggagacgc

SEQ ID NO: 1132 - DNA, 20 bp, synthetic construct
  misc_feature 1..20: note = chemically synthesized
  source 1..20: mol_type = other DNA
acctggccccgggagacgcc

SEQ ID NO: 1133 - DNA, 20 bp, synthetic construct
  misc_feature 1..20: note = chemically synthesized
  source 1..20: mol_type = other DNA
tggccccgggagacgccggg

SEQ ID NO: 1134 - DNA, 20 bp, synthetic construct
  misc_feature 1..20: note = chemically synthesized
  source 1..20: mol_type = other DNA
ggccccgggagacgccgggc

SEQ ID NO: 1135 - DNA, 20 bp, synthetic construct
  misc_feature 1..20: note = chemically synthesized
  source 1..20: mol_type = other DNA
gccccgggagacgccgggcg

SEQ ID NO: 1136 - DNA, 20 bp, synthetic construct
  misc_feature 1..20: note = chemically synthesized
  source 1..20: mol_type = other DNA
ccccgggagacgccgggcgg

SEQ ID NO: 1137 - DNA, 20 bp, synthetic construct
  misc_feature 1..20: note = chemically synthesized
  source 1..20: mol_type = other DNA
cccgggagacgccgggcggg

SEQ ID NO: 1138 - DNA, 20 bp, synthetic construct
  misc_feature 1..20: note = chemically synthesized
  source 1..20: mol_type = other DNA
ccgggcggggggcgctgacc

SEQ ID NO: 1139 - DNA, 20 bp, synthetic construct
  misc_feature 1..20: note = chemically synthesized
  source 1..20: mol_type = other DNA
cggggggcgctgacctggtg

SEQ ID NO: 1140 - DNA, 20 bp, synthetic construct
  misc_feature 1..20: note = chemically synthesized
  source 1..20: mol_type = other DNA
ggggggcgctgacctggtgc

SEQ ID NO: 1141 - DNA, 20 bp, synthetic construct
  misc_feature 1..20: note = chemically synthesized
  source 1..20: mol_type = other DNA
gggggcgctgacctggtgca

SEQ ID NO: 1142 - DNA, 20 bp, synthetic construct
  misc_feature 1..20: note = chemically synthesized
  source 1..20: mol_type = other DNA
gtgcagggcgctgataccgt

SEQ ID NO: 1143 - DNA, 20 bp, synthetic construct
  misc_feature 1..20: note = chemically synthesized
  source 1..20: mol_type = other DNA
ggcgctgataccgtcggcgt

SEQ ID NO: 1144 - DNA, 20 bp, synthetic construct
  misc_feature 1..20: note = chemically synthesized
  source 1..20: mol_type = other DNA
gctgataccgtcggcgttgg

SEQ ID NO: 1145 - DNA, 20 bp, synthetic construct
  misc_feature 1..20: note = chemically synthesized
  source 1..20: mol_type = other DNA
tgataccgtcggcgttggtg

SEQ ID NO: 1146 - DNA, 20 bp, synthetic construct
  misc_feature 1..20: note = chemically synthesized
  source 1..20: mol_type = other DNA
ccgtcggcgttggtggagtc

SEQ ID NO: 1147 - DNA, 20 bp, synthetic construct
  misc_feature 1..20: note = chemically synthesized
  source 1..20: mol_type = other DNA
ggcgttggtggagtccagca

SEQ ID NO: 1148 - DNA, 20 bp, synthetic construct
  misc_feature 1..20: note = chemically synthesized
  source 1..20: mol_type = other DNA
tggtggagtccagcacggcg

SEQ ID NO: 1149 - DNA, 20 bp, synthetic construct
  misc_feature 1..20: note = chemically synthesized
  source 1..20: mol_type = other DNA
ggtggagtccagcacggcgc

SEQ ID NO: 1150 - DNA, 20 bp, synthetic construct
  misc_feature 1..20: note = chemically synthesized
  source 1..20: mol_type = other DNA
ggagtccagcacggcgcggg

SEQ ID NO: 1151 - DNA, 20 bp, synthetic construct
  misc_feature 1..20: note = chemically synthesized
  source 1..20: mol_type = other DNA
gagtccagcacggcgcgggc

SEQ ID NO: 1152 - DNA, 20 bp, synthetic construct
  misc_feature 1..20: note = chemically synthesized
  source 1..20: mol_type = other DNA
tccagcacggcgcgggcggg

SEQ ID NO: 1153 - DNA, 20 bp, synthetic construct
  misc_feature 1..20: note = chemically synthesized
  source 1..20: mol_type = other DNA
agcacggcgcgggcgggcgg

SEQ ID NO: 1154 - DNA, 20 bp, synthetic construct
  misc_feature 1..20: note = chemically synthesized
  source 1..20: mol_type = other DNA
ggcgcgggcgggcggcggcg

SEQ ID NO: 1155 - DNA, 20 bp, synthetic construct
  misc_feature 1..20: note = chemically synthesized
  source 1..20: mol_type = other DNA
gcgggcgggcggcggcgcgg

SEQ ID NO: 1156 - DNA, 20 bp, synthetic construct
  misc_feature 1..20: note = chemically synthesized
  source 1..20: mol_type = other DNA
cgggcgggcggcggcgcggc

SEQ ID NO: 1157 - DNA, 20 bp, synthetic construct
  misc_feature 1..20: note = chemically synthesized
  source 1..20: mol_type = other DNA
gggcgggcggcggcgcggcg

SEQ ID NO: 1158 - DNA, 20 bp, synthetic construct
  misc_feature 1..20: note = chemically synthesized
  source 1..20: mol_type = other DNA
ggcggcggcgcggcggggtc

SEQ ID NO: 1159 - DNA, 20 bp, synthetic construct
  misc_feature 1..20: note = chemically synthesized
  source 1..20: mol_type = other DNA
cggcgcggcggggtcgagct

SEQ ID NO: 1160 - DNA, 20 bp, synthetic construct
  misc_feature 1..20: note = chemically synthesized
  source 1..20: mol_type = other DNA
ggcggggtcgagctcggcgc

SEQ ID NO: 1161 - DNA, 20 bp, synthetic construct
  misc_feature 1..20: note = chemically synthesized
  source 1..20: mol_type = other DNA
gcggggtcgagctcggcgcc

SEQ ID NO: 1162 - DNA, 20 bp, synthetic construct
  misc_feature 1..20: note = chemically synthesized
  source 1..20: mol_type = other DNA
cggggtcgagctcggcgccg

SEQ ID NO: 1163 - DNA, 20 bp, synthetic construct
  misc_feature 1..20: note = chemically synthesized
  source 1..20: mol_type = other DNA
gtcgagctcggcgccggggc

SEQ ID NO: 1164 - DNA, 20 bp, synthetic construct
  misc_feature 1..20: note = chemically synthesized
  source 1..20: mol_type = other DNA
tcgagctcggcgccggggcc

SEQ ID NO: 1165 - DNA, 20 bp, synthetic construct
  misc_feature 1..20: note = chemically synthesized
  source 1..20: mol_type = other DNA
cgagctcggcgccggggcca

SEQ ID NO: 1166 - DNA, 20 bp, synthetic construct
  misc_feature 1..20: note = chemically synthesized
  source 1..20: mol_type = other DNA
ctcggcgccggggccagggt

SEQ ID NO: 1167 - DNA, 20 bp, synthetic construct
  misc_feature 1..20: note = chemically synthesized
  source 1..20: mol_type = other DNA
ggcgccggggccagggtcgg

SEQ ID NO: 1168 - DNA, 20 bp, synthetic construct
  misc_feature 1..20: note = chemically synthesized
  source 1..20: mol_type = other DNA
gggccagggtcggcggcgcg

SEQ ID NO: 1169 - DNA, 20 bp, synthetic construct
  misc_feature 1..20: note = chemically synthesized
  source 1..20: mol_type = other DNA
gggtcggcggcgcgcagcat

SEQ ID NO: 1170 - DNA, 20 bp, synthetic construct
  misc_feature 1..20: note = chemically synthesized
  source 1..20: mol_type = other DNA
agcatcagacgcgcctcgtc

SEQ ID NO: 1171 - DNA, 20 bp, synthetic construct
  misc_feature 1..20: note = chemically synthesized
  source 1..20: mol_type = other DNA
gcatcagacgcgcctcgtcc

SEQ ID NO: 1172 - DNA, 20 bp, synthetic construct
  misc_feature 1..20: note = chemically synthesized
  source 1..20: mol_type = other DNA
cgtccaggtcgccgcccgca

SEQ ID NO: 1173 - DNA, 20 bp, synthetic construct
  misc_feature 1..20: note = chemically synthesized
  source 1..20: mol_type = other DNA
gtccaggtcgccgcccgcac

SEQ ID NO: 1174 - DNA, 20 bp, synthetic construct
  misc_feature 1..20: note = chemically synthesized
  source 1..20: mol_type = other DNA
tcgccgcccgcacaggccgc

SEQ ID NO: 1175 - DNA, 20 bp, synthetic construct
  misc_feature 1..20: note = chemically synthesized
  source 1..20: mol_type = other DNA
cgccgcccgcacaggccgcc

SEQ ID NO: 1176 - DNA, 20 bp, synthetic construct
  misc_feature 1..20: note = chemically synthesized
  source 1..20: mol_type = other DNA
cgcacaggccgccaggaact

SEQ ID NO: 1177 - DNA, 20 bp, synthetic construct
  misc_feature 1..20: note = chemically synthesized
  source 1..20: mol_type = other DNA
acaggccgccaggaactcgg

SEQ ID NO: 1178 - DNA, 20 bp, synthetic construct
  misc_feature 1..20: note = chemically synthesized
  source 1..20: mol_type = other DNA
ggaactcggcggcgcgctcg

SEQ ID NO: 1179 - DNA, 20 bp, synthetic construct
  misc_feature 1..20: note = chemically synthesized
  source 1..20: mol_type = other DNA
actcggcggcgcgctcgaag

SEQ ID NO: 1180 - DNA, 20 bp, synthetic construct
  misc_feature 1..20: note = chemically synthesized
  source 1..20: mol_type = other DNA
ggcggcgcgctcgaagcgga

SEQ ID NO: 1181 - DNA, 20 bp, synthetic construct
  misc_feature 1..20: note = chemically synthesized
  source 1..20: mol_type = other DNA
cgcgctcgaagcggacggtg

SEQ ID NO: 1182 - DNA, 20 bp, synthetic construct
  misc_feature 1..20: note = chemically synthesized
  source 1..20: mol_type = other DNA
gcgctcgaagcggacggtgc

SEQ ID NO: 1183 - DNA, 20 bp, synthetic construct
  misc_feature 1..20: note = chemically synthesized
  source 1..20: mol_type = other DNA
cgaagcggacggtgcgggcg

SEQ ID NO: 1184 - DNA, 20 bp, synthetic construct
  misc_feature 1..20: note = chemically synthesized
  source 1..20: mol_type = other DNA
ggtgcgggcgcggcgctctc

SEQ ID NO: 1185 - DNA, 20 bp, synthetic construct
  misc_feature 1..20: note = chemically synthesized
  source 1..20: mol_type = other DNA
gtgcgggcgcggcgctctcc

SEQ ID NO: 1186 - DNA, 20 bp, synthetic construct
  misc_feature 1..20: note = chemically synthesized
  source 1..20: mol_type = other DNA
tgcgggcgcggcgctctccg

SEQ ID NO: 1187 - DNA, 20 bp, synthetic construct
  misc_feature 1..20: note = chemically synthesized
  source 1..20: mol_type = other DNA
ggcgcggcgctctccggggc

SEQ ID NO: 1188 - DNA, 20 bp, synthetic construct
  misc_feature 1..20: note = chemically synthesized
  source 1..20: mol_type = other DNA
gcgcggcgctctccggggcc

SEQ ID NO: 1189 - DNA, 20 bp, synthetic construct
  misc_feature 1..20: note = chemically synthesized
  source 1..20: mol_type = other DNA
gcgctctccggggccaggct

SEQ ID NO: 1190 - DNA, 20 bp, synthetic construct
  misc_feature 1..20: note = chemically synthesized
  source 1..20: mol_type = other DNA
gcccgcgccccccactgccg

SEQ ID NO: 1191 - DNA, 20 bp, synthetic construct
  misc_feature 1..20: note = chemically synthesized
  source 1..20: mol_type = other DNA
gctgctcccgtcgccgctcc

SEQ ID NO: 1192 - DNA, 20 bp, synthetic construct
  misc_feature 1..20: note = chemically synthesized
  source 1..20: mol_type = other DNA
ctgctcccgtcgccgctccc

SEQ ID NO: 1193 - DNA, 20 bp, synthetic construct
  misc_feature 1..20: note = chemically synthesized
  source 1..20: mol_type = other DNA
ctcccgtcgccgctcccggg

SEQ ID NO: 1194 - DNA, 20 bp, synthetic construct
  misc_feature 1..20: note = chemically synthesized
  source 1..20: mol_type = other DNA
gcagccgccgccgccgcccc

SEQ ID NO: 1195 - DNA, 20 bp, synthetic construct
  misc_feature 1..20: note = chemically synthesized
  source 1..20: mol_type = other DNA
cagccgccgccgccgccccc

SEQ ID NO: 1196 - DNA, 20 bp, synthetic construct
  misc_feature 1..20: note = chemically synthesized
  source 1..20: mol_type = other DNA
cgccgccgccgcccccgggc

SEQ ID NO: 1197 - DNA, 20 bp, synthetic construct
  misc_feature 1..20: note = chemically synthesized
  source 1..20: mol_type = other DNA
gccgcccccgggccagccgc

SEQ ID NO: 1198 - DNA, 20 bp, synthetic construct
  misc_feature 1..20: note = chemically synthesized
  source 1..20: mol_type = other DNA
ccgcccccgggccagccgcc

SEQ ID NO: 1199 - DNA, 20 bp, synthetic construct
  misc_feature 1..20: note = chemically synthesized
  source 1..20: mol_type = other DNA
agccgccgggccatcctctc

SEQ ID NO: 1200 - DNA, 20 bp, synthetic construct
  misc_feature 1..20: note = chemically synthesized
  source 1..20: mol_type = other DNA
catcgcaccgcccgcccgcc

SEQ ID NO: 1201 - DNA, 20 bp, synthetic construct
  misc_feature 1..20: note = chemically synthesized
  source 1..20: mol_type = other DNA
gcaccgcccgcccgcccagc

SEQ ID NO: 1202 - DNA, 20 bp, synthetic construct
  misc_feature 1..20: note = chemically synthesized
  source 1..20: mol_type = other DNA
cgcccgcccgcccagcgagc

SEQ ID NO: 1203 - DNA, 20 bp, synthetic construct
  misc_feature 1..20: note = chemically synthesized
  source 1..20: mol_type = other DNA
cgcccgcccagcgagcgagc

SEQ ID NO: 1204 - DNA, 20 bp, synthetic construct
  misc_feature 1..20: note = chemically synthesized
  source 1..20: mol_type = other DNA
ccagcgagcgagcgagcgcc

SEQ ID NO: 1205 - DNA, 20 bp, synthetic construct
  misc_feature 1..20: note = chemically synthesized
  source 1..20: mol_type = other DNA
tggtggcggcggttggggct

SEQ ID NO: 1206 - DNA, 20 bp, synthetic construct
  misc_feature 1..20: note = chemically synthesized
  source 1..20: mol_type = other DNA
ctcggcgctcgctcgctcgc

SEQ ID NO: 1207 - DNA, 20 bp, synthetic construct
  misc_feature 1..20: note = chemically synthesized
  source 1..20: mol_type = other DNA
tcggcgctcgctcgctcgct

SEQ ID NO: 1208 - DNA, 20 bp, synthetic construct
  misc_feature 1..20: note = chemically synthesized
  source 1..20: mol_type = other DNA
gcgctcgctcgctcgctggg

SEQ ID NO: 1209 - DNA, 20 bp, synthetic construct
  misc_feature 1..20: note = chemically synthesized
  source 1..20: mol_type = other DNA
cgctcgctcgctcgctgggc

SEQ ID NO: 1210 - DNA, 20 bp, synthetic construct
  misc_feature 1..20: note = chemically synthesized
  source 1..20: mol_type = other DNA
tcgctcgctcgctgggcggg

SEQ ID NO: 1211 - DNA, 20 bp, synthetic construct
  misc_feature 1..20: note = chemically synthesized
  source 1..20: mol_type = other DNA
cgctcgctcgctgggcgggc

SEQ ID NO: 1212 - DNA, 20 bp, synthetic construct
  misc_feature 1..20: note = chemically synthesized
  source 1..20: mol_type = other DNA
tcgctcgctgggcgggcggg

SEQ ID NO: 1213 - DNA, 20 bp, synthetic construct
  misc_feature 1..20: note = chemically synthesized
  source 1..20: mol_type = other DNA
cgggcgggcggtgcgatgtc

SEQ ID NO: 1214 - DNA, 20 bp, synthetic construct
  misc_feature 1..20: note = chemically synthesized
  source 1..20: mol_type = other DNA
ggcgggcggtgcgatgtccg

SEQ ID NO: 1215 - DNA, 20 bp, synthetic construct
  misc_feature 1..20: note = chemically synthesized
  source 1..20: mol_type = other DNA
cgggcggtgcgatgtccgga

SEQ ID NO: 1216 - DNA, 20 bp, synthetic construct
  misc_feature 1..20: note = chemically synthesized
  source 1..20: mol_type = other DNA
gggcggtgcgatgtccggag

SEQ ID NO: 1217 - DNA, 20 bp, synthetic construct
  misc_feature 1..20: note = chemically synthesized
  source 1..20: mol_type = other DNA
ggtgcgatgtccggagagga

SEQ ID NO: 1218 - DNA, 20 bp, synthetic construct
  misc_feature 1..20: note = chemically synthesized
  source 1..20: mol_type = other DNA
gatgtccggagaggatggcc

SEQ ID NO: 1219 - DNA, 20 bp, synthetic construct
  misc_feature 1..20: note = chemically synthesized
  source 1..20: mol_type = other DNA
gtccggagaggatggcccgg

SEQ ID NO: 1220 - DNA, 20 bp, synthetic construct
  misc_feature 1..20: note = chemically synthesized
  source 1..20: mol_type = other DNA
ggagaggatggcccggcggc

SEQ ID NO: 1221 - DNA, 20 bp, synthetic construct
  misc_feature 1..20: note = chemically synthesized
  source 1..20: mol_type = other DNA
ggatggcccggcggctggcc

SEQ ID NO: 1222 - DNA, 20 bp, synthetic construct
  misc_feature 1..20: note = chemically synthesized
  source 1..20: mol_type = other DNA
gatggcccggcggctggccc

SEQ ID NO: 1223 - DNA, 20 bp, synthetic construct
  misc_feature 1..20: note = chemically synthesized
  source 1..20: mol_type = other DNA
atggcccggcggctggcccg

SEQ ID NO: 1224 - DNA, 20 bp, synthetic construct
  misc_feature 1..20: note = chemically synthesized
  source 1..20: mol_type = other DNA
tggcccggcggctggcccgg

SEQ ID NO: 1225 - DNA, 20 bp, synthetic construct
  misc_feature 1..20: note = chemically synthesized
  source 1..20: mol_type = other DNA
cccggcggctggcccggggg

SEQ ID NO: 1226 - DNA, 20 bp, synthetic construct
  misc_feature 1..20: note = chemically synthesized
  source 1..20: mol_type = other DNA
ggcggctggcccgggggcgg

SEQ ID NO: 1227 - DNA, 20 bp, synthetic construct
  misc_feature 1..20: note = chemically synthesized
  source 1..20: mol_type = other DNA
ggctggcccgggggcggcgg

SEQ ID NO: 1228 - DNA, 20 bp, synthetic construct
  misc_feature 1..20: note = chemically synthesized
  source 1..20: mol_type = other DNA
tggcccgggggcggcggcgg

SEQ ID NO: 1229 - DNA, 20 bp, synthetic construct
  misc_feature 1..20: note = chemically synthesized
  source 1..20: mol_type = other DNA
gggcggcggcggcggctgcc

SEQ ID NO: 1230 - DNA, 20 bp, synthetic construct
  misc_feature 1..20: note = chemically synthesized
  source 1..20: mol_type = other DNA
ggcggcggcggcggctgccc

SEQ ID NO: 1231 - DNA, 20 bp, synthetic construct
  misc_feature 1..20: note = chemically synthesized
  source 1..20: mol_type = other DNA
cggcggcggcggctgcccgg

SEQ ID NO: 1232 - DNA, 20 bp, synthetic construct
  misc_feature 1..20: note = chemically synthesized
  source 1..20: mol_type = other DNA
cggcggcggctgcccgggag

SEQ ID NO: 1233 - DNA, 20 bp, synthetic construct
  misc_feature 1..20: note = chemically synthesized
  source 1..20: mol_type = other DNA
cggctgcccgggagcggcga

SEQ ID NO: 1234 - DNA, 20 bp, synthetic construct
  misc_feature 1..20: note = chemically synthesized
  source 1..20: mol_type = other DNA
ggctgcccgggagcggcgac

SEQ ID NO: 1235 - DNA, 20 bp, synthetic construct
  misc_feature 1..20: note = chemically synthesized
  source 1..20: mol_type = other DNA
ctgcccgggagcggcgacgg

SEQ ID NO: 1236 - DNA, 20 bp, synthetic construct
  misc_feature 1..20: note = chemically synthesized
  source 1..20: mol_type = other DNA
cccgggagcggcgacgggag

SEQ ID NO: 1237 - DNA, 20 bp, synthetic construct
  misc_feature 1..20: note = chemically synthesized
  source 1..20: mol_type = other DNA
agcggcgacgggagcagctg

SEQ ID NO: 1238 - DNA, 20 bp, synthetic construct
  misc_feature 1..20: note = chemically synthesized
  source 1..20: mol_type = other DNA
ggcgacgggagcagctgcgg

SEQ ID NO: 1239 - DNA, 20 bp, synthetic construct
  misc_feature 1..20: note = chemically synthesized
  source 1..20: mol_type = other DNA
gacgggagcagctgcggcag

SEQ ID NO: 1240 - DNA, 20 bp, synthetic construct
  misc_feature 1..20: note = chemically synthesized
  source 1..20: mol_type = other DNA
acgggagcagctgcggcagt

SEQ ID NO: 1241 - DNA, 20 bp, synthetic construct
  misc_feature 1..20: note = chemically synthesized
  source 1..20: mol_type = other DNA
cgggagcagctgcggcagtg

SEQ ID NO: 1242 - DNA, 20 bp, synthetic construct
  misc_feature 1..20: note = chemically synthesized
  source 1..20: mol_type = other DNA
gggagcagctgcggcagtgg

SEQ ID NO: 1243 - DNA, 20 bp, synthetic construct
  misc_feature 1..20: note = chemically synthesized
  source 1..20: mol_type = other DNA
ggagcagctgcggcagtggg

SEQ ID NO: 1244 - DNA, 20 bp, synthetic construct
  misc_feature 1..20: note = chemically synthesized
  source 1..20: mol_type = other DNA
agctgcggcagtggggggcg

SEQ ID NO: 1245 - DNA, 20 bp, synthetic construct
  misc_feature 1..20: note = chemically synthesized
  source 1..20: mol_type = other DNA
gctgcggcagtggggggcgc

SEQ ID NO: 1246 - DNA, 20 bp, synthetic construct
  misc_feature 1..20: note = chemically synthesized
  source 1..20: mol_type = other DNA
gcggcagtggggggcgcggg

SEQ ID NO: 1247 - DNA, 20 bp, synthetic construct
  misc_feature 1..20: note = chemically synthesized
  source 1..20: mol_type = other DNA
cggcagtggggggcgcgggc

SEQ ID NO: 1248 - DNA, 20 bp, synthetic construct
  misc_feature 1..20: note = chemically synthesized
  source 1..20: mol_type = other DNA
ggggggcgcgggcgggcgcc

SEQ ID NO: 1249 - DNA, 20 bp, synthetic construct
  misc_feature 1..20: note = chemically synthesized
  source 1..20: mol_type = other DNA
gcgcgggcgggcgccgagcc

SEQ ID NO: 1250 - DNA, 20 bp, synthetic construct
  misc_feature 1..20: note = chemically synthesized
  source 1..20: mol_type = other DNA
gcgggcgccgagcctggccc

SEQ ID NO: 1251 - DNA, 20 bp, synthetic construct
  misc_feature 1..20: note = chemically synthesized
  source 1..20: mol_type = other DNA
gggcgccgagcctggccccg

SEQ ID NO: 1252 - DNA, 20 bp, synthetic construct
  misc_feature 1..20: note = chemically synthesized
  source 1..20: mol_type = other DNA
gcgccgagcctggccccgga

SEQ ID NO: 1253 - DNA, 20 bp, synthetic construct
  misc_feature 1..20: note = chemically synthesized
  source 1..20: mol_type = other DNA
gcgcccgcaccgtccgcttc

SEQ ID NO: 1254 - DNA, 20 bp, synthetic construct
  misc_feature 1..20: note = chemically synthesized
  source 1..20: mol_type = other DNA
tccgcttcgagcgcgccgcc

SEQ ID NO: 1255 - DNA, 20 bp, synthetic construct
  misc_feature 1..20: note = chemically synthesized
  source 1..20: mol_type = other DNA
cgagcgcgccgccgagttcc

SEQ ID NO: 1256 - DNA, 20 bp, synthetic construct
  misc_feature 1..20: note = chemically synthesized
  source 1..20: mol_type = other DNA
gcgcgccgccgagttcctgg

SEQ ID NO: 1257 - DNA, 20 bp, synthetic construct
  misc_feature 1..20: note = chemically synthesized
  source 1..20: mol_type = other DNA
cgagttcctggcggcctgtg

SEQ ID NO: 1258 - DNA, 20 bp, synthetic construct
  misc_feature 1..20: note = chemically synthesized
  source 1..20: mol_type = other DNA
gagttcctggcggcctgtgc

SEQ ID NO: 1259 - DNA, 20 bp, synthetic construct
  misc_feature 1..20: note = chemically synthesized
  source 1..20: mol_type = other DNA
ttcctggcggcctgtgcggg

SEQ ID NO: 1260 - DNA, 20 bp, synthetic construct
  misc_feature 1..20: note = chemically synthesized
  source 1..20: mol_type = other DNA
ggcctgtgcgggcggcgacc

SEQ ID NO: 1261 - DNA, 20 bp, synthetic construct
  misc_feature 1..20: note = chemically synthesized
  source 1..20: mol_type = other DNA
gtgcgggcggcgacctggac

SEQ ID NO: 1262 - DNA, 20 bp, synthetic construct
  misc_feature 1..20: note = chemically synthesized
  source 1..20: mol_type = other DNA
tgcgggcggcgacctggacg

SEQ ID NO: 1263 - DNA, 20 bp, synthetic construct
  misc_feature 1..20: note = chemically synthesized
  source 1..20: mol_type = other DNA
atgctgcgcgccgccgaccc

SEQ ID NO: 1264 - DNA, 20 bp, synthetic construct
  misc_feature 1..20: note = chemically synthesized
  source 1..20: mol_type = other DNA
cgcgccgccgaccctggccc

SEQ ID NO: 1265 - DNA, 20 bp, synthetic construct
  misc_feature 1..20: note = chemically synthesized
  source 1..20: mol_type = other DNA
ccgaccctggccccggcgcc

SEQ ID NO: 1266 - DNA, 20 bp, synthetic construct
  misc_feature 1..20: note = chemically synthesized
  source 1..20: mol_type = other DNA
gccgcccgcccgcgccgtgc

SEQ ID NO: 1267 - DNA, 20 bp, synthetic construct
  misc_feature 1..20: note = chemically synthesized
  source 1..20: mol_type = other DNA
ctggactccaccaacgccga

SEQ ID NO: 1268 - DNA, 20 bp, synthetic construct
  misc_feature 1..20: note = chemically synthesized
  source 1..20: mol_type = other DNA
tccaccaacgccgacggtat

SEQ ID NO: 1269 - DNA, 20 bp, synthetic construct
  misc_feature 1..20: note = chemically synthesized
  source 1..20: mol_type = other DNA
acggtatcagcgccctgcac

SEQ ID NO: 1270 - DNA, 20 bp, synthetic construct
  misc_feature 1..20: note = chemically synthesized
  source 1..20: mol_type = other DNA
cggtatcagcgccctgcacc

SEQ ID NO: 1271 - DNA, 20 bp, synthetic construct
  misc_feature 1..20: note = chemically synthesized
  source 1..20: mol_type = other DNA
atcagcgccctgcaccaggt

SEQ ID NO: 1272 - DNA, 20 bp, synthetic construct
  misc_feature 1..20: note = chemically synthesized
  source 1..20: mol_type = other DNA
ccaggtcagcgccccccgcc

SEQ ID NO: 1273 - DNA, 20 bp, synthetic construct
  misc_feature 1..20: note = chemically synthesized
  source 1..20: mol_type = other DNA
gccccccgcccggcgtctcc

SEQ ID NO: 1274 - DNA, 20 bp, synthetic construct
  misc_feature 1..20: note = chemically synthesized
  source 1..20: mol_type = other DNA
ccccccgcccggcgtctccc

SEQ ID NO: 1275 - DNA, 20 bp, synthetic construct
  misc_feature 1..20: note = chemically synthesized
  source 1..20: mol_type = other DNA
cccccgcccggcgtctcccg

SEQ ID NO: 1276 - DNA, 20 bp, synthetic construct
  misc_feature 1..20: note = chemically synthesized
  source 1..20: mol_type = other DNA
cgcccggcgtctcccggggc

SEQ ID NO: 1277 - DNA, 20 bp, synthetic construct
  misc_feature 1..20: note = chemically synthesized
  source 1..20: mol_type = other DNA
gcccggcgtctcccggggcc

SEQ ID NO: 1278 - DNA, 20 bp, synthetic construct
  misc_feature 1..20: note = chemically synthesized
  source 1..20: mol_type = other DNA
ccaccctctgctgcgccacc

SEQ ID NO: 1279 - DNA, 20 bp, synthetic construct
  misc_feature 1..20: note = chemically synthesized
  source 1..20: mol_type = other DNA
caccctctgctgcgccacct

SEQ ID NO: 1280 - DNA, 20 bp, synthetic construct
  misc_feature 1..20: note = chemically synthesized
  source 1..20: mol_type = other DNA
accctctgctgcgccacctg

SEQ ID NO: 1281 - DNA, 20 bp, synthetic construct
  misc_feature 1..20: note = chemically synthesized
  source 1..20: mol_type = other DNA
gcatcctccttccccgttgc

SEQ ID NO: 1282 - DNA, 20 bp, synthetic construct
  misc_feature 1..20: note = chemically synthesized
  source 1..20: mol_type = other DNA
tcgatccgccccgtcgttcc

SEQ ID NO: 1283 - DNA, 20 bp, synthetic construct
  misc_feature 1..20: note = chemically synthesized
  source 1..20: mol_type = other DNA
cgccccgtcgttcctggccc

SEQ ID NO: 1284 - DNA, 20 bp, synthetic construct
  misc_feature 1..20: note = chemically synthesized
  source 1..20: mol_type = other DNA
gccccgtcgttcctggccct

SEQ ID NO: 1285 - DNA, 20 bp, synthetic construct
  misc_feature 1..20: note = chemically synthesized
  source 1..20: mol_type = other DNA
cctatgctgacaccccgtcc

SEQ ID NO: 1286 - DNA, 20 bp, synthetic construct
  misc_feature 1..20: note = chemically synthesized
  source 1..20: mol_type = other DNA
cgaccaccccacttccgaat

SEQ ID NO: 1287 - DNA, 20 bp, synthetic construct
  misc_feature 1..20: note = chemically synthesized
  source 1..20: mol_type = other DNA
accaccccacttccgaattg

SEQ ID NO: 1288 - DNA, 20 bp, synthetic construct
  misc_feature 1..20: note = chemically synthesized
  source 1..20: mol_type = other DNA
cgaattggagccgcttcaac

SEQ ID NO: 1289 - DNA, 20 bp, synthetic construct
  misc_feature 1..20: note = chemically synthesized
  source 1..20: mol_type = other DNA
ggagccgcttcaactggccc

SEQ ID NO: 1290 - DNA, 20 bp, synthetic construct
  misc_feature 1..20: note = chemically synthesized
  source 1..20: mol_type = other DNA
gagccgcttcaactggccct

SEQ ID NO: 1291 - DNA, 20 bp, synthetic construct
  misc_feature 1..20: note = chemically synthesized
  source 1..20: mol_type = other DNA
gcttcaactggccctgggct

SEQ ID NO: 1292 - DNA, 20 bp, synthetic construct
  misc_feature 1..20: note = chemically synthesized
  source 1..20: mol_type = other DNA
ctgtgctgaccactctgccc

SEQ ID NO: 1293 - DNA, 20 bp, synthetic construct
  misc_feature 1..20: note = chemically synthesized
  source 1..20: mol_type = other DNA
tgtgctgaccactctgcccc

SEQ ID NO: 1294 - DNA, 20 bp, synthetic construct
  misc_feature 1..20: note = chemically synthesized
  source 1..20: mol_type = other DNA
cgacctactctcttccgcat

SEQ ID NO: 1295 - DNA, 20 bp, synthetic construct
  misc_feature 1..20: note = chemically synthesized
  source 1..20: mol_type = other DNA
acctactctcttccgcattg

SEQ ID NO: 1296 - DNA, 20 bp, synthetic construct
  misc_feature 1..20: note = chemically synthesized
  source 1..20: mol_type = other DNA
cgcattggagtcgctttaac

SEQ ID NO: 1297 - DNA, 20 bp, synthetic construct
  misc_feature 1..20: note = chemically synthesized
  source 1..20: mol_type = other DNA
ggagtcgctttaactggccc

SEQ ID NO: 1298 - DNA, 20 bp, synthetic construct
  misc_feature 1..20: note = chemically synthesized
  source 1..20: mol_type = other DNA
gctttaactggccctggctt

SEQ ID NO: 1299 - DNA, 20 bp, synthetic construct
  misc_feature 1..20: note = chemically synthesized
  source 1..20: mol_type = other DNA
ttaactggccctggctttgg

SEQ ID NO: 1300 - DNA, 20 bp, synthetic construct
  misc_feature 1..20: note = chemically synthesized
  source 1..20: mol_type = other DNA
gcagcctgtgctgacccatg

SEQ ID NO: 1301 - DNA, 20 bp, synthetic construct
  misc_feature 1..20: note = chemically synthesized
  source 1..20: mol_type = other DNA
acttcccctcttccgatgtt

SEQ ID NO: 1302 - DNA, 20 bp, synthetic construct
  misc_feature 1..20: note = chemically synthesized
  source 1..20: mol_type = other DNA
cttccgatgttgagcccctc

SEQ ID NO: 1303 - DNA, 20 bp, synthetic construct
  misc_feature 1..20: note = chemically synthesized
  source 1..20: mol_type = other DNA
cgatgttgagcccctccagc

SEQ ID NO: 1304 - DNA, 20 bp, synthetic construct
  misc_feature 1..20: note = chemically synthesized
  source 1..20: mol_type = other DNA
tgagcccctccagccggtcc

SEQ ID NO: 1305 - DNA, 20 bp, synthetic construct
  misc_feature 1..20: note = chemically synthesized
  source 1..20: mol_type = other DNA
ccctgccctctcctgaacct

SEQ ID NO: 1306 - DNA, 20 bp, synthetic construct
  misc_feature 1..20: note = chemically synthesized
  source 1..20: mol_type = other DNA
gccctctcctgaacctgagc

SEQ ID NO: 1307 - DNA, 20 bp, synthetic construct
  misc_feature 1..20: note = chemically synthesized
  source 1..20: mol_type = other DNA
tgaacctgagccagctccca

SEQ ID NO: 1308 - DNA, 20 bp, synthetic construct
  misc_feature 1..20: note = chemically synthesized
  source 1..20: mol_type = other DNA
ctgagccagctcccatagct

SEQ ID NO: 1309 - DNA, 20 bp, synthetic construct
  misc_feature 1..20: note = chemically synthesized
  source 1..20: mol_type = other DNA
ccagctcccatagctcagtc

SEQ ID NO: 1310 - DNA, 20 bp, synthetic construct
  misc_feature 1..20: note = chemically synthesized
  source 1..20: mol_type = other DNA
ctcagtctggtctatctgcc

SEQ ID NO: 1311 - DNA, 20 bp, synthetic construct
  misc_feature 1..20: note = chemically synthesized
  source 1..20: mol_type = other DNA
ctggtctatctgcctggccc

SEQ ID NO: 1312 - DNA, 20 bp, synthetic construct
  misc_feature 1..20: note = chemically synthesized
  source 1..20: mol_type = other DNA
gctgccctcctctcgccccc

SEQ ID NO: 1313 - DNA, 20 bp, synthetic construct
  misc_feature 1..20: note = chemically synthesized
  source 1..20: mol_type = other DNA
gagtgcccttgctgtgccgc

SEQ ID NO: 1314 - DNA, 20 bp, synthetic construct
  misc_feature 1..20: note = chemically synthesized
  source 1..20: mol_type = other DNA
aacgctgccgtctctctcct

SEQ ID NO: 1315 - DNA, 20 bp, synthetic construct
  misc_feature 1..20: note = chemically synthesized
  source 1..20: mol_type = other DNA
tgccgtctctctcctgagtc

SEQ ID NO: 1316 - DNA, 20 bp, synthetic construct
  misc_feature 1..20: note = chemically synthesized
  source 1..20: mol_type = other DNA
tcctgagtccggaccacttt

SEQ ID NO: 1317 - DNA, 20 bp, synthetic construct
  misc_feature 1..20: note = chemically synthesized
  source 1..20: mol_type = other DNA
cggaccactttgagctctac

SEQ ID NO: 1318 - DNA, 20 bp, synthetic construct
  misc_feature 1..20: note = chemically synthesized
  source 1..20: mol_type = other DNA
actggcttctgcgccgcctc

SEQ ID NO: 1319 - DNA, 20 bp, synthetic construct
  misc_feature 1..20: note = chemically synthesized
  source 1..20: mol_type = other DNA
ggcccactgtttccccttcc

SEQ ID NO: 1320 - DNA, 20 bp, synthetic construct
  misc_feature 1..20: note = chemically synthesized
  source 1..20: mol_type = other DNA
gcccactgtttccccttccc

SEQ ID NO: 1321 - DNA, 20 bp, synthetic construct
  misc_feature 1..20: note = chemically synthesized
  source 1..20: mol_type = other DNA
cactgtttccccttcccagg

SEQ ID NO: 1322 - DNA, 20 bp, synthetic construct
  misc_feature 1..20: note = chemically synthesized
  source 1..20: mol_type = other DNA
actgtttccccttcccaggc

SEQ ID NO: 1323 - DNA, 20 bp, synthetic construct
  misc_feature 1..20: note = chemically synthesized
  source 1..20: mol_type = other DNA
ctgacctgcattctctcccc

SEQ ID NO: 1324 - DNA, 20 bp, synthetic construct
  misc_feature 1..20: note = chemically synthesized
  source 1..20: mol_type = other DNA
tgacctgcattctctcccct

SEQ ID NO: 1325 - DNA, 20 bp, synthetic construct
  misc_feature 1..20: note = chemically synthesized
  source 1..20: mol_type = other DNA
cctgtgccgctttctgtctg

SEQ ID NO: 1326 - DNA, 20 bp, synthetic construct
  misc_feature 1..20: note = chemically synthesized
  source 1..20: mol_type = other DNA
cgctttctgtctgcagcttg

SEQ ID NO: 1327 - DNA, 20 bp, synthetic construct
  misc_feature 1..20: note = chemically synthesized
  source 1..20: mol_type = other DNA
tctgtctgcagcttgtggcc

SEQ ID NO: 1328 - DNA, 20 bp, synthetic construct
  misc_feature 1..20: note = chemically synthesized
  source 1..20: mol_type = other DNA
ctgtctgcagcttgtggcct

SEQ ID NO: 1329 - DNA, 20 bp, synthetic construct
  misc_feature 1..20: note = chemically synthesized
  source 1..20: mol_type = other DNA
tgtggcctgggtcacctcta

SEQ ID NO: 1330 - DNA, 20 bp, synthetic construct
  misc_feature 1..20: note = chemically synthesized
  source 1..20: mol_type = other DNA
gcctgggtcacctctacggc

SEQ ID NO: 1331 - DNA, 20 bp, synthetic construct
  misc_feature 1..20: note = chemically synthesized
  source 1..20: mol_type = other DNA
ggtcacctctacggctggcc

SEQ ID NO: 1332 - DNA, 20 bp, synthetic construct
  misc_feature 1..20: note = chemically synthesized
  source 1..20: mol_type = other DNA
tccttccctgccgcctcctt

SEQ ID NO: 1333 - DNA, 20 bp, synthetic construct
  misc_feature 1..20: note = chemically synthesized
  source 1..20: mol_type = other DNA
ccttccctgccgcctccttc

SEQ ID NO: 1334 - DNA, 20 bp, synthetic construct
  misc_feature 1..20: note = chemically synthesized
  source 1..20: mol_type = other DNA
tctctgctgtgttgctgccc

SEQ ID NO: 1335 - DNA, 20 bp, synthetic construct
  misc_feature 1..20: note = chemically synthesized
  source 1..20: mol_type = other DNA
ctctgctgtgttgctgccca

SEQ ID NO: 1336 - DNA, 20 bp, synthetic construct
  misc_feature 1..20: note = chemically synthesized
  source 1..20: mol_type = other DNA
ctgcccaaggatgctctttc

SEQ ID NO: 1337 - DNA, 20 bp, synthetic construct
  misc_feature 1..20: note = chemically synthesized
  source 1..20: mol_type = other DNA
gcccaaggatgctctttccg

SEQ ID NO: 1338 - DNA, 20 bp, synthetic construct
  misc_feature 1..20: note = chemically synthesized
  source 1..20: mol_type = other DNA
tttccggagcacttccttct

SEQ ID NO: 1339 - DNA, 20 bp, synthetic construct
  misc_feature 1..20: note = chemically synthesized
  source 1..20: mol_type = other DNA
tgcaccacgtgatgtcctct

SEQ ID NO: 1340 - DNA, 20 bp, synthetic construct
  misc_feature 1..20: note = chemically synthesized
  source 1..20: mol_type = other DNA
accacgtgatgtcctctgag

SEQ ID NO: 1341 - DNA, 20 bp, synthetic construct
  misc_feature 1..20: note = chemically synthesized
  source 1..20: mol_type = other DNA
gagcggatcctccccgtgtc

SEQ ID NO: 1342 - DNA, 20 bp, synthetic construct
  misc_feature 1..20: note = chemically synthesized
  source 1..20: mol_type = other DNA
agcggatcctccccgtgtct

SEQ ID NO: 1343 - DNA, 20 bp, synthetic construct
  misc_feature 1..20: note = chemically synthesized
  source 1..20: mol_type = other DNA
ccccgtgtctgggtcctctc

SEQ ID NO: 1344 - DNA, 20 bp, synthetic construct
  misc_feature 1..20: note = chemically synthesized
  source 1..20: mol_type = other DNA
cccgtgtctgggtcctctcc

SEQ ID NO: 1345 - DNA, 20 bp, synthetic construct
  misc_feature 1..20: note = chemically synthesized
  source 1..20: mol_type = other DNA
cccatgccgtcttcactcgc

SEQ ID NO: 1346 - DNA, 20 bp, synthetic construct
  misc_feature 1..20: note = chemically synthesized
  source 1..20: mol_type = other DNA
ccatgccgtcttcactcgct

SEQ ID NO: 1347 - DNA, 20 bp, synthetic construct
  misc_feature 1..20: note = chemically synthesized
  source 1..20: mol_type = other DNA
ttcccttttccttctccttc

SEQ ID NO: 1348 - DNA, 20 bp, synthetic construct
  misc_feature 1..20: note = chemically synthesized
  source 1..20: mol_type = other DNA
tcccttttccttctccttct

SEQ ID NO: 1349 - DNA, 20 bp, synthetic construct
  misc_feature 1..20: note = chemically synthesized
  source 1..20: mol_type = other DNA
cccttttccttctccttctg

SEQ ID NO: 1350 - DNA, 20 bp, synthetic construct
  misc_feature 1..20: note = chemically synthesized
  source 1..20: mol_type = other DNA
ctgtgccatctctcgtttct

SEQ ID NO: 1351 - DNA, 20 bp, synthetic construct
  misc_feature 1..20: note = chemically synthesized
  source 1..20: mol_type = other DNA
tgtgccatctctcgtttctt

SEQ ID NO: 1352 - DNA, 20 bp, synthetic construct
  misc_feature 1..20: note = chemically synthesized
  source 1..20: mol_type = other DNA
ccatctctcgtttcttagga

SEQ ID NO: 1353 - DNA, 20 bp, synthetic construct
  misc_feature 1..20: note = chemically synthesized
  source 1..20: mol_type = other DNA
cttaggatggccttctccga

SEQ ID NO: 1354 - DNA, 20 bp, synthetic construct
  misc_feature 1..20: note = chemically synthesized
  source 1..20: mol_type = other DNA
cgtcccgcctccccttcttg

SEQ ID NO: 1355 - DNA, 20 bp, synthetic construct
  misc_feature 1..20: note = chemically synthesized
  source 1..20: mol_type = other DNA
gtcccgcctccccttcttgt

SEQ ID NO: 1356 - DNA, 20 bp, synthetic construct
  misc_feature 1..20: note = chemically synthesized
  source 1..20: mol_type = other DNA
ctgcatcatcaccgtttttc

SEQ ID NO: 1357 - DNA, 20 bp, synthetic construct
  misc_feature 1..20: note = chemically synthesized
  source 1..20: mol_type = other DNA
cgtttttctggacaacccca

SEQ ID NO: 1358 - DNA, 20 bp, synthetic construct
  misc_feature 1..20: note = chemically synthesized
  source 1..20: mol_type = other DNA
cccaaagtaccccgtctccc

SEQ ID NO: 1359 - DNA, 20 bp, synthetic construct
  misc_feature 1..20: note = chemically synthesized
  source 1..20: mol_type = other DNA
gtaccccgtctccctggctt

SEQ ID NO: 1360 - DNA, 20 bp, synthetic construct
  misc_feature 1..20: note = chemically synthesized
  source 1..20: mol_type = other DNA
atcctcttgctttctttgcc

SEQ ID NO: 1361 - DNA, 20 bp, synthetic construct
  misc_feature 1..20: note = chemically synthesized
  source 1..20: mol_type = other DNA
ctggacaccccgttctcctg

SEQ ID NO: 1362 - DNA, 20 bp, synthetic construct
  misc_feature 1..20: note = chemically synthesized
  source 1..20: mol_type = other DNA
accccgttctcctgtggatt

SEQ ID NO: 1363 - DNA, 20 bp, synthetic construct
  misc_feature 1..20: note = chemically synthesized
  source 1..20: mol_type = other DNA
ccccgttctcctgtggattc

SEQ ID NO: 1364 - DNA, 20 bp, synthetic construct
  misc_feature 1..20: note = chemically synthesized
  source 1..20: mol_type = other DNA
cacctctcactcctttcatt

SEQ ID NO: 1365 - DNA, 20 bp, synthetic construct
  misc_feature 1..20: note = chemically synthesized
  source 1..20: mol_type = other DNA
acctctcactcctttcattt

SEQ ID NO: 1366 - DNA, 20 bp, synthetic construct
  misc_feature 1..20: note = chemically synthesized
  source 1..20: mol_type = other DNA
tctcactcctttcatttggg

SEQ ID NO: 1367 - DNA, 20 bp, synthetic construct
  misc_feature 1..20: note = chemically synthesized
  source 1..20: mol_type = other DNA
ccctaccccccttacctctc

SEQ ID NO: 1368 - DNA, 20 bp, synthetic construct
  misc_feature 1..20: note = chemically synthesized
  source 1..20: mol_type = other DNA
cttacctctctagtctgtgc

SEQ ID NO: 1369 - DNA, 20 bp, synthetic construct
  misc_feature 1..20: note = chemically synthesized
  source 1..20: mol_type = other DNA
ctagtctgtgctagctcttc

SEQ ID NO: 1370 - DNA, 20 bp, synthetic construct
  misc_feature 1..20: note = chemically synthesized
  source 1..20: mol_type = other DNA
gctcttccagccccctgtca

SEQ ID NO: 1371 - DNA, 20 bp, synthetic construct
  misc_feature 1..20: note = chemically synthesized
  source 1..20: mol_type = other DNA
ccccctgtcatggcatcttc

SEQ ID NO: 1372 - DNA, 20 bp, synthetic construct
  misc_feature 1..20: note = chemically synthesized
  source 1..20: mol_type = other DNA
cccctgtcatggcatcttcc

SEQ ID NO: 1373 - DNA, 20 bp, synthetic construct
  misc_feature 1..20: note = chemically synthesized
  source 1..20: mol_type = other DNA
ccctgtcatggcatcttcca

SEQ ID NO: 1374 - DNA, 20 bp, synthetic construct
  misc_feature 1..20: note = chemically synthesized
  source 1..20: mol_type = other DNA
cctgtcatggcatcttccag

SEQ ID NO: 1375 - DNA, 20 bp, synthetic construct
  misc_feature 1..20: note = chemically synthesized
  source 1..20: mol_type = other DNA
atggcatcttccaggggtcc

SEQ ID NO: 1376 - DNA, 20 bp, synthetic construct
  misc_feature 1..20: note = chemically synthesized
  source 1..20: mol_type = other DNA
ggcatcttccaggggtccga

SEQ ID NO: 1377 - DNA, 20 bp, synthetic construct
  misc_feature 1..20: note = chemically synthesized
  source 1..20: mol_type = other DNA
cttccaggggtccgagagct

SEQ ID NO: 1378 - DNA, 20 bp, synthetic construct
  misc_feature 1..20: note = chemically synthesized
  source 1..20: mol_type = other DNA
caggggtccgagagctcagc

SEQ ID NO: 1379 - DNA, 20 bp, synthetic construct
  misc_feature 1..20: note = chemically synthesized
  source 1..20: mol_type = other DNA
ctagtcttcttcctccaacc

SEQ ID NO: 1380 - DNA, 20 bp, synthetic construct
  misc_feature 1..20: note = chemically synthesized
  source 1..20: mol_type = other DNA
tagtcttcttcctccaaccc

SEQ ID NO: 1381 - DNA, 20 bp, synthetic construct
  misc_feature 1..20: note = chemically synthesized
  source 1..20: mol_type = other DNA
ccgggcccctatgtccactt

SEQ ID NO: 1382 - DNA, 20 bp, synthetic construct
  misc_feature 1..20: note = chemically synthesized
  source 1..20: mol_type = other DNA
cgggcccctatgtccacttc

SEQ ID NO: 1383 - DNA, 20 bp, synthetic construct
  misc_feature 1..20: note = chemically synthesized
  source 1..20: mol_type = other DNA
cccctatgtccacttcagga

SEQ ID NO: 1384 - DNA, 20 bp, synthetic construct
  misc_feature 1..20: note = chemically synthesized
  source 1..20: mol_type = other DNA
gacagcatgtttgctgcctc

SEQ ID NO: 1385 - DNA, 20 bp, synthetic construct
  misc_feature 1..20: note = chemically synthesized
  source 1..20: mol_type = other DNA
acagcatgtttgctgcctcc

SEQ ID NO: 1386 - DNA, 20 bp, synthetic construct
  misc_feature 1..20: note = chemically synthesized
  source 1..20: mol_type = other DNA
cagcatgtttgctgcctcca

SEQ ID NO: 1387 - DNA, 20 bp, synthetic construct
  misc_feature 1..20: note = chemically synthesized
  source 1..20: mol_type = other DNA
tccagggatcctgtgtcccc

SEQ ID NO: 1388 - DNA, 20 bp, synthetic construct
  misc_feature 1..20: note = chemically synthesized
  source 1..20: mol_type = other DNA
gggatcctgtgtccccgagc

SEQ ID NO: 1389 - DNA, 20 bp, synthetic construct
  misc_feature 1..20: note = chemically synthesized
  source 1..20: mol_type = other DNA
ggatcctgtgtccccgagct

SEQ ID NO: 1390 - DNA, 20 bp, synthetic construct
  misc_feature 1..20: note = chemically synthesized
  source 1..20: mol_type = other DNA
ctgggaccaccttatattcc

SEQ ID NO: 1391 - DNA, 20 bp, synthetic construct
  misc_feature 1..20: note = chemically synthesized
  source 1..20: mol_type = other DNA
tgggaccaccttatattccc

SEQ ID NO: 1392 - DNA, 20 bp, synthetic construct
  misc_feature 1..20: note = chemically synthesized
  source 1..20: mol_type = other DNA
gggaccaccttatattccca

SEQ ID NO: 1393 - DNA, 20 bp, synthetic construct
  misc_feature 1..20: note = chemically synthesized
  source 1..20: mol_type = other DNA
ccaccttatattcccagggc

SEQ ID NO: 1394 - DNA, 20 bp, synthetic construct
  misc_feature 1..20: note = chemically synthesized
  source 1..20: mol_type = other DNA
attcccagggccggttaatg

SEQ ID NO: 1395 - DNA, 20 bp, synthetic construct
  misc_feature 1..20: note = chemically synthesized
  source 1..20: mol_type = other DNA
agggccggttaatgtggctc

SEQ ID NO: 1396 - DNA, 20 bp, synthetic construct
  misc_feature 1..20: note = chemically synthesized
  source 1..20: mol_type = other DNA
ggttaatgtggctctggttc

SEQ ID NO: 1397 - DNA, 20 bp, synthetic construct
  misc_feature 1..20: note = chemically synthesized
  source 1..20: mol_type = other DNA
gttaatgtggctctggttct

SEQ ID NO: 1398 - DNA, 20 bp, synthetic construct
  misc_feature 1..20: note = chemically synthesized
  source 1..20: mol_type = other DNA
tatctgtcccctccacccca

SEQ ID NO: 1399 - DNA, 20 bp, synthetic construct
  misc_feature 1..20: note = chemically synthesized
  source 1..20: mol_type = other DNA
ctgtcccctccaccccacag

SEQ ID NO: 1400 - DNA, 20 bp, synthetic construct
  misc_feature 1..20: note = chemically synthesized
  source 1..20: mol_type = other DNA
tgtcccctccaccccacagt

SEQ ID NO: 1401 - DNA, 20 bp, synthetic construct
  misc_feature 1..20: note = chemically synthesized
  source 1..20: mol_type = other DNA
gtcccctccaccccacagtg

SEQ ID NO: 1402 - DNA, 20 bp, synthetic construct
  misc_feature 1..20: note = chemically synthesized
  source 1..20: mol_type = other DNA
ccaccccacagtggggccac

SEQ ID NO: 1403 - DNA, 20 bp, synthetic construct
  misc_feature 1..20: note = chemically synthesized
  source 1..20: mol_type = other DNA
caccccacagtggggccact

SEQ ID NO: 1404 - DNA, 20 bp, synthetic construct
  misc_feature 1..20: note = chemically synthesized
  source 1..20: mol_type = other DNA
accccacagtggggccacta

SEQ ID NO: 1405 - DNA, 20 bp, synthetic construct
  misc_feature 1..20: note = chemically synthesized
  source 1..20: mol_type = other DNA
cacagtggggccactaggga

SEQ ID NO: 1406 - DNA, 20 bp, synthetic construct
  misc_feature 1..20: note = chemically synthesized
  source 1..20: mol_type = other DNA
acagtggggccactagggac

SEQ ID NO: 1407 - DNA, 20 bp, synthetic construct
  misc_feature 1..20: note = chemically synthesized
  source 1..20: mol_type = other DNA
ggggccactagggacaggat

SEQ ID NO: 1408 - DNA, 20 bp, synthetic construct
  misc_feature 1..20: note = chemically synthesized
  source 1..20: mol_type = other DNA
actagggacaggattggtga

SEQ ID NO: 1409 - DNA, 20 bp, synthetic construct
  misc_feature 1..20: note = chemically synthesized
  source 1..20: mol_type = other DNA
ggacaggattggtgacagaa

SEQ ID NO: 1410 - DNA, 20 bp, synthetic construct
  misc_feature 1..20: note = chemically synthesized
  source 1..20: mol_type = other DNA
tgacagaaaagccccatcct

SEQ ID NO: 1411 - DNA, 20 bp, synthetic construct
  misc_feature 1..20: note = chemically synthesized
  source 1..20: mol_type = other DNA
gacagaaaagccccatcctt

SEQ ID NO: 1412 - DNA, 20 bp, synthetic construct
  misc_feature 1..20: note = chemically synthesized
  source 1..20: mol_type = other DNA
tccttaggcctcctccttcc

SEQ ID NO: 1413 - DNA, 20 bp, synthetic construct
  misc_feature 1..20: note = chemically synthesized
  source 1..20: mol_type = other DNA
ccttcctagtctcctgatat

SEQ ID NO: 1414 - DNA, 20 bp, synthetic construct
  misc_feature 1..20: note = chemically synthesized
  source 1..20: mol_type = other DNA
cttcctagtctcctgatatt

SEQ ID NO: 1415 - DNA, 20 bp, synthetic construct
  misc_feature 1..20: note = chemically synthesized
  source 1..20: mol_type = other DNA
gtctaacccccacctcctgt

SEQ ID NO: 1416 - DNA, 20 bp, synthetic construct
  misc_feature 1..20: note = chemically synthesized
  source 1..20: mol_type = other DNA
tctaacccccacctcctgtt

SEQ ID NO: 1417 - DNA, 20 bp, synthetic construct
  misc_feature 1..20: note = chemically synthesized
  source 1..20: mol_type = other DNA
aacccccacctcctgttagg

SEQ ID NO: 1418 - DNA, 20 bp, synthetic construct
  misc_feature 1..20: note = chemically synthesized
  source 1..20: mol_type = other DNA
tgttaggcagattccttatc

SEQ ID NO: 1419 - DNA, 20 bp, synthetic construct
  misc_feature 1..20: note = chemically synthesized
  source 1..20: mol_type = other DNA
ggtgacacacccccatttcc

SEQ ID NO: 1420 - DNA, 20 bp, synthetic construct
  misc_feature 1..20: note = chemically synthesized
  source 1..20: mol_type = other DNA
tgacacacccccatttcctg

SEQ ID NO: 1421 - DNA, 20 bp, synthetic construct
  misc_feature 1..20: note = chemically synthesized
  source 1..20: mol_type = other DNA
ggagccatctctctccttgc

SEQ ID NO: 1422 - DNA, 20 bp, synthetic construct
  misc_feature 1..20: note = chemically synthesized
  source 1..20: mol_type = other DNA
ctctccttgccagaacctct

SEQ ID NO: 1423 - DNA, 20 bp, synthetic construct
  misc_feature 1..20: note = chemically synthesized
  source 1..20: mol_type = other DNA
tctccttgccagaacctcta

SEQ ID NO: 1424 - DNA, 20 bp, synthetic construct
  misc_feature 1..20: note = chemically synthesized
  source 1..20: mol_type = other DNA
cctctaaggtttgcttacga

SEQ ID NO: 1425 - DNA, 20 bp, synthetic construct
  misc_feature 1..20: note = chemically synthesized
  source 1..20: mol_type = other DNA
tctaaggtttgcttacgatg

SEQ ID NO: 1426 - DNA, 20 bp, synthetic construct
  misc_feature 1..20: note = chemically synthesized
  source 1..20: mol_type = other DNA
aggtttgcttacgatggagc

SEQ ID NO: 1427 - DNA, 20 bp, synthetic construct
  misc_feature 1..20: note = chemically synthesized
  source 1..20: mol_type = other DNA
gtttgcttacgatggagcca

SEQ ID NO: 1428 - DNA, 20 bp, synthetic construct
  misc_feature 1..20: note = chemically synthesized
  source 1..20: mol_type = other DNA
ttgcttacgatggagccaga

SEQ ID NO: 1429 - DNA, 20 bp, synthetic construct
  misc_feature 1..20: note = chemically synthesized
  source 1..20: mol_type = other DNA
tgcttacgatggagccagag

SEQ ID NO: 1430 - DNA, 20 bp, synthetic construct
  misc_feature 1..20: note = chemically synthesized
  source 1..20: mol_type = other DNA
gatggagccagagaggatcc

SEQ ID NO: 1431 - DNA, 20 bp, synthetic construct
  misc_feature 1..20: note = chemically synthesized
  source 1..20: mol_type = other DNA
atggagccagagaggatcct

SEQ ID NO: 1432 - DNA, 20 bp, synthetic construct
  misc_feature 1..20: note = chemically synthesized
  source 1..20: mol_type = other DNA
ggagccagagaggatcctgg

SEQ ID NO: 1433 - DNA, 20 bp, synthetic construct
  misc_feature 1..20: note = chemically synthesized
  source 1..20: mol_type = other DNA
gagccagagaggatcctggg

SEQ ID NO: 1434 - DNA, 20 bp, synthetic construct
  misc_feature 1..20: note = chemically synthesized
  source 1..20: mol_type = other DNA
agccagagaggatcctggga

SEQ ID NO: 1435 - DNA, 20 bp, synthetic construct
  misc_feature 1..20: note = chemically synthesized
  source 1..20: mol_type = other DNA
ccagagaggatcctgggagg

SEQ ID NO: 1436 - DNA, 20 bp, synthetic construct
  misc_feature 1..20: note = chemically synthesized
  source 1..20: mol_type = other DNA
agagaggatcctgggaggga

SEQ ID NO: 1437 - DNA, 20 bp, synthetic construct
  misc_feature 1..20: note = chemically synthesized
  source 1..20: mol_type = other DNA
ggatcctgggagggagagct

SEQ ID NO: 1438 - DNA, 20 bp, synthetic construct
  misc_feature 1..20: note = chemically synthesized
  source 1..20: mol_type = other DNA
tcctgggagggagagcttgg

SEQ ID NO: 1439 - DNA, 20 bp, synthetic construct
  misc_feature 1..20: note = chemically synthesized
  source 1..20: mol_type = other DNA
cctgggagggagagcttggc

SEQ ID NO: 1440 - DNA, 20 bp, synthetic construct
  misc_feature 1..20: note = chemically synthesized
  source 1..20: mol_type = other DNA
ctgggagggagagcttggca

SEQ ID NO: 1441 - DNA, 20 bp, synthetic construct
  misc_feature 1..20: note = chemically synthesized
  source 1..20: mol_type = other DNA
tgggagggagagcttggcag

SEQ ID NO: 1442 - DNA, 20 bp, synthetic construct
  misc_feature 1..20: note = chemically synthesized
  source 1..20: mol_type = other DNA
gggagggagagcttggcagg

SEQ ID NO: 1443 - DNA, 20 bp, synthetic construct
  misc_feature 1..20: note = chemically synthesized
  source 1..20: mol_type = other DNA
agggagagcttggcaggggg

SEQ ID NO: 1444 - DNA, 20 bp, synthetic construct
  misc_feature 1..20: note = chemically synthesized
  source 1..20: mol_type = other DNA
gggagagcttggcagggggt

SEQ ID NO: 1445 - DNA, 20 bp, synthetic construct
  misc_feature 1..20: note = chemically synthesized
  source 1..20: mol_type = other DNA
gagagcttggcagggggtgg

SEQ ID NO: 1446 - DNA, 20 bp, synthetic construct
  misc_feature 1..20: note = chemically synthesized
  source 1..20: mol_type = other DNA
agagcttggcagggggtggg

SEQ ID NO: 1447 - DNA, 20 bp, synthetic construct
  misc_feature 1..20: note = chemically synthesized
  source 1..20: mol_type = other DNA
gagcttggcagggggtggga

SEQ ID NO: 1448 - DNA, 20 bp, synthetic construct
  misc_feature 1..20: note = chemically synthesized
  source 1..20: mol_type = other DNA
cttggcagggggtgggaggg

SEQ ID NO: 1449 - DNA, 20 bp, synthetic construct
  misc_feature 1..20: note = chemically synthesized
  source 1..20: mol_type = other DNA
ttggcagggggtgggaggga

SEQ ID NO: 1450 - DNA, 20 bp, synthetic construct
  misc_feature 1..20: note = chemically synthesized
  source 1..20: mol_type = other DNA
tggcagggggtgggagggaa

SEQ ID NO: 1451 - DNA, 20 bp, synthetic construct
  misc_feature 1..20: note = chemically synthesized
  source 1..20: mol_type = other DNA
ggcagggggtgggagggaag

SEQ ID NO: 1452 - DNA, 20 bp, synthetic construct
  misc_feature 1..20: note = chemically synthesized
  source 1..20: mol_type = other DNA
gcagggggtgggagggaagg

SEQ ID NO: 1453 - DNA, 20 bp, synthetic construct
  misc_feature 1..20: note = chemically synthesized
  source 1..20: mol_type = other DNA
cagggggtgggagggaaggg

SEQ ID NO: 1454 - DNA, 20 bp, synthetic construct
  misc_feature 1..20: note = chemically synthesized
  source 1..20: mol_type = other DNA
agggggtgggagggaagggg

SEQ ID NO: 1455 - DNA, 20 bp, synthetic construct
  misc_feature 1..20: note = chemically synthesized
  source 1..20: mol_type = other DNA
ggggggatgcgtgacctgcc

SEQ ID NO: 1456 - DNA, 20 bp, synthetic construct
  misc_feature 1..20: note = chemically synthesized
  source 1..20: mol_type = other DNA
tgcgtgacctgcccggttct

SEQ ID NO: 1457 - DNA, 20 bp, synthetic construct
  misc_feature 1..20: note = chemically synthesized
  source 1..20: mol_type = other DNA
gtgacctgcccggttctcag

SEQ ID NO: 1458 - DNA, 20 bp, synthetic construct
  misc_feature 1..20: note = chemically synthesized
  source 1..20: mol_type = other DNA
caccctgcgctaccctctcc

SEQ ID NO: 1459 - DNA, 20 bp, synthetic construct
  misc_feature 1..20: note = chemically synthesized
  source 1..20: mol_type = other DNA
gctaccctctcccagaacct

SEQ ID NO: 1460 - DNA, 20 bp, synthetic construct
  misc_feature 1..20: note = chemically synthesized
  source 1..20: mol_type = other DNA
gaacctgagctgctctgacg

SEQ ID NO: 1461 - DNA, 20 bp, synthetic construct
  misc_feature 1..20: note = chemically synthesized
  source 1..20: mol_type = other DNA
gctgctctgacgcggccgtc

SEQ ID NO: 1462 - DNA, 20 bp, synthetic construct
  misc_feature 1..20: note = chemically synthesized
  source 1..20: mol_type = other DNA
ctggtgcgtttcactgatcc

SEQ ID NO: 1463 - DNA, 20 bp, synthetic construct
  misc_feature 1..20: note = chemically synthesized
  source 1..20: mol_type = other DNA
tttcactgatcctggtgctg

SEQ ID NO: 1464 - DNA, 20 bp, synthetic construct
  misc_feature 1..20: note = chemically synthesized
  source 1..20: mol_type = other DNA
gcagcttccttacacttccc

SEQ ID NO: 1465 - DNA, 20 bp, synthetic construct
  misc_feature 1..20: note = chemically synthesized
  source 1..20: mol_type = other DNA
agcttccttacacttcccaa

SEQ ID NO: 1466 - DNA, 20 bp, synthetic construct
  misc_feature 1..20: note = chemically synthesized
  source 1..20: mol_type = other DNA
gcttccttacacttcccaag

SEQ ID NO: 1467 - DNA, 20 bp, synthetic construct
  misc_feature 1..20: note = chemically synthesized
  source 1..20: mol_type = other DNA
ttccttacacttcccaagag

SEQ ID NO: 1468 - DNA, 20 bp, synthetic construct
  misc_feature 1..20: note = chemically synthesized
  source 1..20: mol_type = other DNA
cttacacttcccaagaggag

SEQ ID NO: 1469 - DNA, 20 bp, synthetic construct
  misc_feature 1..20: note = chemically synthesized
  source 1..20: mol_type = other DNA
acacttcccaagaggagaag

SEQ ID NO: 1470 - DNA, 20 bp, synthetic construct
  misc_feature 1..20: note = chemically synthesized
  source 1..20: mol_type = other DNA
tcccaagaggagaagcagtt

SEQ ID NO: 1471 - DNA, 20 bp, synthetic construct
  misc_feature 1..20: note = chemically synthesized
  source 1..20: mol_type = other DNA
gcagtttggaaaaacaaaat

SEQ ID NO: 1472 - DNA, 20 bp, synthetic construct
  misc_feature 1..20: note = chemically synthesized
  source 1..20: mol_type = other DNA
tggaaaaacaaaatcagaat

SEQ ID NO: 1473 - DNA, 20 bp, synthetic construct
  misc_feature 1..20: note = chemically synthesized
  source 1..20: mol_type = other DNA
aaaacaaaatcagaataagt

SEQ ID NO: 1474 - DNA, 20 bp, synthetic construct
  misc_feature 1..20: note = chemically synthesized
  source 1..20: mol_type = other DNA
aatcagaataagttggtcct

SEQ ID NO: 1475 - DNA, 20 bp, synthetic construct
  misc_feature 1..20: note = chemically synthesized
  source 1..20: mol_type = other DNA
ttggtcctgagttctaactt

SEQ ID NO: 1476 - DNA, 20 bp, synthetic construct
  misc_feature 1..20: note = chemically synthesized
  source 1..20: mol_type = other DNA
actttggctcttcacctttc

SEQ ID NO: 1477 - DNA, 20 bp, synthetic construct
  misc_feature 1..20: note = chemically synthesized
  source 1..20: mol_type = other DNA
tatattgttcctccgtgcgt

SEQ ID NO: 1478 - DNA, 20 bp, synthetic construct
  misc_feature 1..20: note = chemically synthesized
  source 1..20: mol_type = other DNA
cgtgcgtcagttttacctgt

SEQ ID NO: 1479 - DNA, 20 bp, synthetic construct
  misc_feature 1..20: note = chemically synthesized
  source 1..20: mol_type = other DNA
gtcagttttacctgtgagat

SEQ ID NO: 1480 - DNA, 20 bp, synthetic construct
  misc_feature 1..20: note = chemically synthesized
  source 1..20: mol_type = other DNA
tcagttttacctgtgagata

SEQ ID NO: 1481 - DNA, 20 bp, synthetic construct
  misc_feature 1..20: note = chemically synthesized
  source 1..20: mol_type = other DNA
ttttacctgtgagataaggc

SEQ ID NO: 1482 - DNA, 20 bp, synthetic construct
  misc_feature 1..20: note = chemically synthesized
  source 1..20: mol_type = other DNA
tacctgtgagataaggccag

SEQ ID NO: 1483 - DNA, 20 bp, synthetic construct
  misc_feature 1..20: note = chemically synthesized
  source 1..20: mol_type = other DNA
tgtgagataaggccagtagc

SEQ ID NO: 1484 - DNA, 20 bp, synthetic construct
  misc_feature 1..20: note = chemically synthesized
  source 1..20: mol_type = other DNA
gccagtagccagccccgtcc

SEQ ID NO: 1485 - DNA, 20 bp, synthetic construct
  misc_feature 1..20: note = chemically synthesized
  source 1..20: mol_type = other DNA
agtagccagccccgtcctgg

SEQ ID NO: 1486 - DNA, 20 bp, synthetic construct
  misc_feature 1..20: note = chemically synthesized
  source 1..20: mol_type = other DNA
gtagccagccccgtcctggc

SEQ ID NO: 1487 - DNA, 20 bp, synthetic construct
  misc_feature 1..20: note = chemically synthesized
  source 1..20: mol_type = other DNA
tagccagccccgtcctggca

SEQ ID NO: 1488 - DNA, 20 bp, synthetic construct
  misc_feature 1..20: note = chemically synthesized
  source 1..20: mol_type = other DNA
gccccgtcctggcagggctg

SEQ ID NO: 1489 - DNA, 20 bp, synthetic construct
  misc_feature 1..20: note = chemically synthesized
  source 1..20: mol_type = other DNA
cgtcctggcagggctgtggt

SEQ ID NO: 1490 - DNA, 20 bp, synthetic construct
  misc_feature 1..20: note = chemically synthesized
  source 1..20: mol_type = other DNA
gtcctggcagggctgtggtg

SEQ ID NO: 1491 - DNA, 20 bp, synthetic construct
  misc_feature 1..20: note = chemically synthesized
  source 1..20: mol_type = other DNA
cctggcagggctgtggtgag

SEQ ID NO: 1492 - DNA, 20 bp, synthetic construct
  misc_feature 1..20: note = chemically synthesized
  source 1..20: mol_type = other DNA
ctggcagggctgtggtgagg

SEQ ID NO: 1493 - DNA, 20 bp, synthetic construct
  misc_feature 1..20: note = chemically synthesized
  source 1..20: mol_type = other DNA
tggcagggctgtggtgagga

SEQ ID NO: 1494 - DNA, 20 bp, synthetic construct
  misc_feature 1..20: note = chemically synthesized
  source 1..20: mol_type = other DNA
ggcagggctgtggtgaggag

SEQ ID NO: 1495 - DNA, 20 bp, synthetic construct
  misc_feature 1..20: note = chemically synthesized
  source 1..20: mol_type = other DNA
gcagggctgtggtgaggagg

SEQ ID NO: 1496 - DNA, 20 bp, synthetic construct
  misc_feature 1..20: note = chemically synthesized
  source 1..20: mol_type = other DNA
cagggctgtggtgaggaggg

SEQ ID NO: 1497 - DNA, 20 bp, synthetic construct
  misc_feature 1..20: note = chemically synthesized
  source 1..20: mol_type = other DNA
tgaggaggggggtgtccgtg

SEQ ID NO: 1498 - DNA, 20 bp, synthetic construct
  misc_feature 1..20: note = chemically synthesized
  source 1..20: mol_type = other DNA
gtgtggaaaactccctttgt

SEQ ID NO: 1499 - DNA, 20 bp, synthetic construct
  misc_feature 1..20: note = chemically synthesized
  source 1..20: mol_type = other DNA
gaaaactccctttgtgagaa

SEQ ID NO: 1500 - DNA, 20 bp, synthetic construct
  misc_feature 1..20: note = chemically synthesized
  source 1..20: mol_type = other DNA
tttgtgagaatggtgcgtcc

SEQ ID NO: 1501 - DNA, 20 bp, synthetic construct
  misc_feature 1..20: note = chemically synthesized
  source 1..20: mol_type = other DNA
ttgtgagaatggtgcgtcct

SEQ ID NO: 1502 - DNA, 20 bp, synthetic construct
  misc_feature 1..20: note = chemically synthesized
  source 1..20: mol_type = other DNA
ggtgcgtcctaggtgttcac

SEQ ID NO: 1503 - DNA, 20 bp, synthetic construct
  misc_feature 1..20: note = chemically synthesized
  source 1..20: mol_type = other DNA
gtgcgtcctaggtgttcacc

SEQ ID NO: 1504 - DNA, 20 bp, synthetic construct
  misc_feature 1..20: note = chemically synthesized
  source 1..20: mol_type = other DNA
cctaggtgttcaccaggtcg

SEQ ID NO: 1505 - DNA, 20 bp, synthetic construct
  misc_feature 1..20: note = chemically synthesized
  source 1..20: mol_type = other DNA
tctccatccttctttcctta

SEQ ID NO: 1506 - DNA, 20 bp, synthetic construct
  misc_feature 1..20: note = chemically synthesized
  source 1..20: mol_type = other DNA
tccatccttctttccttaaa

SEQ ID NO: 1507 - DNA, 20 bp, synthetic construct
  misc_feature 1..20: note = chemically synthesized
  source 1..20: mol_type = other DNA
ttctttccttaaagagtccc

SEQ ID NO: 1508 - DNA, 20 bp, synthetic construct
  misc_feature 1..20: note = chemically synthesized
  source 1..20: mol_type = other DNA
aaagagtccccagtgctatc

SEQ ID NO: 1509 - DNA, 20 bp, synthetic construct
  misc_feature 1..20: note = chemically synthesized
  source 1..20: mol_type = other DNA
aagagtccccagtgctatct

SEQ ID NO: 1510 - DNA, 20 bp, synthetic construct
  misc_feature 1..20: note = chemically synthesized
  source 1..20: mol_type = other DNA
ctgggacatattcctccgcc

SEQ ID NO: 1511 - DNA, 20 bp, synthetic construct
  misc_feature 1..20: note = chemically synthesized
  source 1..20: mol_type = other DNA
gggacatattcctccgccca

SEQ ID NO: 1512 - DNA, 20 bp, synthetic construct
  misc_feature 1..20: note = chemically synthesized
  source 1..20: mol_type = other DNA
acatattcctccgcccagag

SEQ ID NO: 1513 - DNA, 20 bp, synthetic construct
  misc_feature 1..20: note = chemically synthesized
  source 1..20: mol_type = other DNA
catattcctccgcccagagc

SEQ ID NO: 1514 - DNA, 20 bp, synthetic construct
  misc_feature 1..20: note = chemically synthesized
  source 1..20: mol_type = other DNA
atattcctccgcccagagca

SEQ ID NO: 1515 - DNA, 20 bp, synthetic construct
  misc_feature 1..20: note = chemically synthesized
  source 1..20: mol_type = other DNA
gagcagggtcccgcttccct

SEQ ID NO: 1516 - DNA, 20 bp, synthetic construct
  misc_feature 1..20: note = chemically synthesized
  source 1..20: mol_type = other DNA
agcagggtcccgcttcccta

SEQ ID NO: 1517 - DNA, 20 bp, synthetic construct
  misc_feature 1..20: note = chemically synthesized
  source 1..20: mol_type = other DNA
gcttccctaaggccctgctc

SEQ ID NO: 1518 - DNA, 20 bp, synthetic construct
  misc_feature 1..20: note = chemically synthesized
  source 1..20: mol_type = other DNA
cttccctaaggccctgctct

SEQ ID NO: 1519 - DNA, 20 bp, synthetic construct
  misc_feature 1..20: note = chemically synthesized
  source 1..20: mol_type = other DNA
aaggccctgctctgggcttc

SEQ ID NO: 1520 - DNA, 20 bp, synthetic construct
  misc_feature 1..20: note = chemically synthesized
  source 1..20: mol_type = other DNA
aggccctgctctgggcttct

SEQ ID NO: 1521 - DNA, 20 bp, synthetic construct
  misc_feature 1..20: note = chemically synthesized
  source 1..20: mol_type = other DNA
tgctctgggcttctgggttt

SEQ ID NO: 1522 - DNA, 20 bp, synthetic construct
  misc_feature 1..20: note = chemically synthesized
  source 1..20: mol_type = other DNA
ggcttctgggtttgagtcct

SEQ ID NO: 1523 - DNA, 20 bp, synthetic construct
  misc_feature 1..20: note = chemically synthesized
  source 1..20: mol_type = other DNA
tctgggtttgagtccttggc

SEQ ID NO: 1524 - DNA, 20 bp, synthetic construct
  misc_feature 1..20: note = chemically synthesized
  source 1..20: mol_type = other DNA
gtttgagtccttggcaagcc

SEQ ID NO: 1525 - DNA, 20 bp, synthetic construct
  misc_feature 1..20: note = chemically synthesized
  source 1..20: mol_type = other DNA
tttgagtccttggcaagccc

SEQ ID NO: 1526 - DNA, 20 bp, synthetic construct
  misc_feature 1..20: note = chemically synthesized
  source 1..20: mol_type = other DNA
tgagtccttggcaagcccag

SEQ ID NO: 1527 - DNA, 20 bp, synthetic construct
  misc_feature 1..20: note = chemically synthesized
  source 1..20: mol_type = other DNA
agtccttggcaagcccagga

SEQ ID NO: 1528 - DNA, 20 bp, synthetic construct
  misc_feature 1..20: note = chemically synthesized
  source 1..20: mol_type = other DNA
gtccttggcaagcccaggag

SEQ ID NO: 1529 - DNA, 20 bp, synthetic construct
  misc_feature 1..20: note = chemically synthesized
  source 1..20: mol_type = other DNA
gcaagcccaggagaggcgct

SEQ ID NO: 1530 - DNA, 20 bp, synthetic construct
  misc_feature 1..20: note = chemically synthesized
  source 1..20: mol_type = other DNA
caagcccaggagaggcgctc

SEQ ID NO: 1531 - DNA, 20 bp, synthetic construct
  misc_feature 1..20: note = chemically synthesized
  source 1..20: mol_type = other DNA
cgtccaccatctcatgcccc

SEQ ID NO: 1532 - DNA, 20 bp, synthetic construct
  misc_feature 1..20: note = chemically synthesized
  source 1..20: mol_type = other DNA
gctctcctgccccttcccta

SEQ ID NO: 1533 - DNA, 20 bp, synthetic construct
  misc_feature 1..20: note = chemically synthesized
  source 1..20: mol_type = other DNA
ctctcctgccccttccctac

SEQ ID NO: 1534 - DNA, 20 bp, synthetic construct
  misc_feature 1..20: note = chemically synthesized
  source 1..20: mol_type = other DNA
tctcctgccccttccctaca

SEQ ID NO: 1535 - DNA, 20 bp, synthetic construct
  misc_feature 1..20: note = chemically synthesized
  source 1..20: mol_type = other DNA
ctcctgccccttccctacag

SEQ ID NO: 1536 - DNA, 20 bp, synthetic construct
  misc_feature 1..20: note = chemically synthesized
  source 1..20: mol_type = other DNA
cccttccctacaggggttcc

SEQ ID NO: 1537 - DNA, 20 bp, synthetic construct
  misc_feature 1..20: note = chemically synthesized
  source 1..20: mol_type = other DNA
gggttcctggctctgctctt

SEQ ID NO: 1538 - DNA, 20 bp, synthetic construct
  misc_feature 1..20: note = chemically synthesized
  source 1..20: mol_type = other DNA
ctggctctgctcttcagact

SEQ ID NO: 1539 - DNA, 20 bp, synthetic construct
  misc_feature 1..20: note = chemically synthesized
  source 1..20: mol_type = other DNA
cccccttcccctgcatcccc

SEQ ID NO: 1540 - DNA, 20 bp, synthetic construct
  misc_feature 1..20: note = chemically synthesized
  source 1..20: mol_type = other DNA
cccttcccctgcatccccca

SEQ ID NO: 1541 - DNA, 20 bp, synthetic construct
  misc_feature 1..20: note = chemically synthesized
  source 1..20: mol_type = other DNA
ccttcccctgcatcccccag

SEQ ID NO: 1542 - DNA, 20 bp, synthetic construct
  misc_feature 1..20: note = chemically synthesized
  source 1..20: mol_type = other DNA
cctgcatcccccagaggccc

SEQ ID NO: 1543 - DNA, 20 bp, synthetic construct
  misc_feature 1..20: note = chemically synthesized
  source 1..20: mol_type = other DNA
ctgcatcccccagaggcccc

SEQ ID NO: 1544 - DNA, 20 bp, synthetic construct
  misc_feature 1..20: note = chemically synthesized
  source 1..20: mol_type = other DNA
gaggccccaggccacctact

SEQ ID NO: 1545 - DNA, 20 bp, synthetic construct
  misc_feature 1..20: note = chemically synthesized
  source 1..20: mol_type = other DNA
cccaggccacctacttggcc

SEQ ID NO: 1546 - DNA, 20 bp, synthetic construct
  misc_feature 1..20: note = chemically synthesized
  source 1..20: mol_type = other DNA
ctacttggcctggaccccac

SEQ ID NO: 1547 - DNA, 20 bp, synthetic construct
  misc_feature 1..20: note = chemically synthesized
  source 1..20: mol_type = other DNA
acttggcctggaccccacga

SEQ ID NO: 1548 - DNA, 20 bp, synthetic construct
  misc_feature 1..20: note = chemically synthesized
  source 1..20: mol_type = other DNA
cttggcctggaccccacgag

SEQ ID NO: 1549 - DNA, 20 bp, synthetic construct
  misc_feature 1..20: note = chemically synthesized
  source 1..20: mol_type = other DNA
gaccccacgagaggccaccc

SEQ ID NO: 1550 - DNA, 20 bp, synthetic construct
  misc_feature 1..20: note = chemically synthesized
  source 1..20: mol_type = other DNA
gccaccccagccctgtctac

SEQ ID NO: 1551 - DNA, 20 bp, synthetic construct
  misc_feature 1..20: note = chemically synthesized
  source 1..20: mol_type = other DNA
ccaccccagccctgtctacc

SEQ ID NO: 1552 - DNA, 20 bp, synthetic construct
  misc_feature 1..20: note = chemically synthesized
  source 1..20: mol_type = other DNA
ctgtctaccaggctgccttt

SEQ ID NO: 1553 - DNA, 20 bp, synthetic construct
  misc_feature 1..20: note = chemically synthesized
  source 1..20: mol_type = other DNA
tgtctaccaggctgcctttt

SEQ ID NO: 1554 - DNA, 20 bp, synthetic construct
  misc_feature 1..20: note = chemically synthesized
  source 1..20: mol_type = other DNA
ctaccaggctgccttttggg

SEQ ID NO: 1555 - DNA, 20 bp, synthetic construct
  misc_feature 1..20: note = chemically synthesized
  source 1..20: mol_type = other DNA
ggtggattctcctccaactg

SEQ ID NO: 1556 - DNA, 20 bp, synthetic construct
  misc_feature 1..20: note = chemically synthesized
  source 1..20: mol_type = other DNA
gtggattctcctccaactgt

SEQ ID NO: 1557 - DNA, 20 bp, synthetic construct
  misc_feature 1..20: note = chemically synthesized
  source 1..20: mol_type = other DNA
tggattctcctccaactgtg

SEQ ID NO: 1558 - DNA, 20 bp, synthetic construct
  misc_feature 1..20: note = chemically synthesized
  source 1..20: mol_type = other DNA
ccaactgtggggtgactgct

SEQ ID NO: 1559 - DNA, 20 bp, synthetic construct
  misc_feature 1..20: note = chemically synthesized
  source 1..20: mol_type = other DNA
tgcttggcaaactcactctt

SEQ ID NO: 1560 - DNA, 20 bp, synthetic construct
  misc_feature 1..20: note = chemically synthesized
  source 1..20: mol_type = other DNA
gcttggcaaactcactcttc

SEQ ID NO: 1561 - DNA, 20 bp, synthetic construct
  misc_feature 1..20: note = chemically synthesized
  source 1..20: mol_type = other DNA
cttggcaaactcactcttcg

SEQ ID NO: 1562 - DNA, 20 bp, synthetic construct
  misc_feature 1..20: note = chemically synthesized
  source 1..20: mol_type = other DNA
actcactcttcggggtatcc

SEQ ID NO: 1563 - DNA, 20 bp, synthetic construct
  misc_feature 1..20: note = chemically synthesized
  source 1..20: mol_type = other DNA
ctcactcttcggggtatccc

SEQ ID NO: 1564 - DNA, 20 bp, synthetic construct
  misc_feature 1..20: note = chemically synthesized
  source 1..20: mol_type = other DNA
cactcttcggggtatcccag

SEQ ID NO: 1565 - DNA, 20 bp, synthetic construct
  misc_feature 1..20: note = chemically synthesized
  source 1..20: mol_type = other DNA
actcttcggggtatcccagg

SEQ ID NO: 1566 - DNA, 20 bp, synthetic construct
  misc_feature 1..20: note = chemically synthesized
  source 1..20: mol_type = other DNA
tcggggtatcccaggaggcc

SEQ ID NO: 1567 - DNA, 20 bp, synthetic construct
  misc_feature 1..20: note = chemically synthesized
  source 1..20: mol_type = other DNA
ggggtatcccaggaggcctg

SEQ ID NO: 1568 - DNA, 20 bp, synthetic construct
  misc_feature 1..20: note = chemically synthesized
  source 1..20: mol_type = other DNA
tcccaggaggcctggagcat

SEQ ID NO: 1569 - DNA, 20 bp, synthetic construct
  misc_feature 1..20: note = chemically synthesized
  source 1..20: mol_type = other DNA
cccaggaggcctggagcatt

SEQ ID NO: 1570 - DNA, 20 bp, synthetic construct
  misc_feature 1..20: note = chemically synthesized
  source 1..20: mol_type = other DNA
ccaggaggcctggagcattg

SEQ ID NO: 1571 - DNA, 20 bp, synthetic construct
  misc_feature 1..20: note = chemically synthesized
  source 1..20: mol_type = other DNA
ggaggcctggagcattgggg

SEQ ID NO: 1572 - DNA, 20 bp, synthetic construct
  misc_feature 1..20: note = chemically synthesized
  source 1..20: mol_type = other DNA
gaggcctggagcattggggt

SEQ ID NO: 1573 - DNA, 20 bp, synthetic construct
  misc_feature 1..20: note = chemically synthesized
  source 1..20: mol_type = other DNA
cctggagcattggggtgggc

SEQ ID NO: 1574 - DNA, 20 bp, synthetic construct
  misc_feature 1..20: note = chemically synthesized
  source 1..20: mol_type = other DNA
ctggagcattggggtgggct

SEQ ID NO: 1575 - DNA, 20 bp, synthetic construct
  misc_feature 1..20: note = chemically synthesized
  source 1..20: mol_type = other DNA
tggagcattggggtgggctg

SEQ ID NO: 1576 - DNA, 20 bp, synthetic construct
  misc_feature 1..20: note = chemically synthesized
  source 1..20: mol_type = other DNA
cattggggtgggctggggtt

SEQ ID NO: 1577 - DNA, 20 bp, synthetic construct
  misc_feature 1..20: note = chemically synthesized
  source 1..20: mol_type = other DNA
ttggggtgggctggggttca

SEQ ID NO: 1578 - DNA, 20 bp, synthetic construct
  misc_feature 1..20: note = chemically synthesized
  source 1..20: mol_type = other DNA
ggggtgggctggggttcaga

SEQ ID NO: 1579 - DNA, 20 bp, synthetic construct
  misc_feature 1..20: note = chemically synthesized
  source 1..20: mol_type = other DNA
gggtgggctggggttcagag

SEQ ID NO: 1580 - DNA, 20 bp, synthetic construct
  misc_feature 1..20: note = chemically synthesized
  source 1..20: mol_type = other DNA
gtgggctggggttcagagag

SEQ ID NO: 1581 - DNA, 20 bp, synthetic construct
  misc_feature 1..20: note = chemically synthesized
  source 1..20: mol_type = other DNA
tgggctggggttcagagagg

SEQ ID NO: 1582 - DNA, 20 bp, synthetic construct
  misc_feature 1..20: note = chemically synthesized
  source 1..20: mol_type = other DNA
gggctggggttcagagagga

SEQ ID NO: 1583 - DNA, 20 bp, synthetic construct
  misc_feature 1..20: note = chemically synthesized
  source 1..20: mol_type = other DNA
gagaggagggattcccttct

SEQ ID NO: 1584 - DNA, 20 bp, synthetic construct
  misc_feature 1..20: note = chemically synthesized
  source 1..20: mol_type = other DNA
agaggagggattcccttctc

SEQ ID NO: 1585 - DNA, 20 bp, synthetic construct
  misc_feature 1..20: note = chemically synthesized
  source 1..20: mol_type = other DNA
gattcccttctcaggttacg

SEQ ID NO: 1586 - DNA, 20 bp, synthetic construct
  misc_feature 1..20: note = chemically synthesized
  source 1..20: mol_type = other DNA
ccttctcaggttacgtggcc

SEQ ID NO: 1587 - DNA, 20 bp, synthetic construct
  misc_feature 1..20: note = chemically synthesized
  source 1..20: mol_type = other DNA
tctcaggttacgtggccaag

SEQ ID NO: 1588 - DNA, 20 bp, synthetic construct
  misc_feature 1..20: note = chemically synthesized
  source 1..20: mol_type = other DNA
caggttacgtggccaagaag

SEQ ID NO: 1589 - DNA, 20 bp, synthetic construct
  misc_feature 1..20: note = chemically synthesized
  source 1..20: mol_type = other DNA
aggttacgtggccaagaagc

SEQ ID NO: 1590 - DNA, 20 bp, synthetic construct
  misc_feature 1..20: note = chemically synthesized
  source 1..20: mol_type = other DNA
ggttacgtggccaagaagca

SEQ ID NO: 1591 - DNA, 20 bp, synthetic construct
  misc_feature 1..20: note = chemically synthesized
  source 1..20: mol_type = other DNA
gttacgtggccaagaagcag

SEQ ID NO: 1592 - DNA, 20 bp, synthetic construct
  misc_feature 1..20: note = chemically synthesized
  source 1..20: mol_type = other DNA
tacgtggccaagaagcaggg

SEQ ID NO: 1593 - DNA, 20 bp, synthetic construct
  misc_feature 1..20: note = chemically synthesized
  source 1..20: mol_type = other DNA
tggccaagaagcaggggagc

SEQ ID NO: 1594 - DNA, 20 bp, synthetic construct
  misc_feature 1..20: note = chemically synthesized
  source 1..20: mol_type = other DNA
ggccaagaagcaggggagct

SEQ ID NO: 1595 - DNA, 20 bp, synthetic construct
  misc_feature 1..20: note = chemically synthesized
  source 1..20: mol_type = other DNA
agaagcaggggagctgggtt

SEQ ID NO: 1596 - DNA, 20 bp, synthetic construct
  misc_feature 1..20: note = chemically synthesized
  source 1..20: mol_type = other DNA
gaagcaggggagctgggttt

SEQ ID NO: 1597 - DNA, 20 bp, synthetic construct
  misc_feature 1..20: note = chemically synthesized
  source 1..20: mol_type = other DNA
caggggagctgggtttgggt

SEQ ID NO: 1598 - DNA, 20 bp, synthetic construct
  misc_feature 1..20: note = chemically synthesized
  source 1..20: mol_type = other DNA
aggggagctgggtttgggtc

SEQ ID NO: 1599 - DNA, 20 bp, synthetic construct
  misc_feature 1..20: note = chemically synthesized
  source 1..20: mol_type = other DNA
agctgggtttgggtcaggtc

SEQ ID NO: 1600 - DNA, 20 bp, synthetic construct
  misc_feature 1..20: note = chemically synthesized
  source 1..20: mol_type = other DNA
gctgggtttgggtcaggtct

SEQ ID NO: 1601 - DNA, 20 bp, synthetic construct
  misc_feature 1..20: note = chemically synthesized
  source 1..20: mol_type = other DNA
gtttgggtcaggtctgggtg

SEQ ID NO: 1602 - DNA, 20 bp, synthetic construct
  misc_feature 1..20: note = chemically synthesized
  source 1..20: mol_type = other DNA
tttgggtcaggtctgggtgt

SEQ ID NO: 1603 - DNA, 20 bp, synthetic construct
  misc_feature 1..20: note = chemically synthesized
  source 1..20: mol_type = other DNA
ttgggtcaggtctgggtgtg

SEQ ID NO: 1604 - DNA, 20 bp, synthetic construct
  misc_feature 1..20: note = chemically synthesized
  source 1..20: mol_type = other DNA
aggtctgggtgtggggtgac

SEQ ID NO: 1605 - DNA, 20 bp, synthetic construct
  misc_feature 1..20: note = chemically synthesized
  source 1..20: mol_type = other DNA
accagcttatgctgtttgcc

SEQ ID NO: 1606 - DNA, 20 bp, synthetic construct
  misc_feature 1..20: note = chemically synthesized
  source 1..20: mol_type = other DNA
ccagcttatgctgtttgccc

SEQ ID NO: 1607 - DNA, 20 bp, synthetic construct
  misc_feature 1..20: note = chemically synthesized
  source 1..20: mol_type = other DNA
cttatgctgtttgcccagga

SEQ ID NO: 1608 - DNA, 20 bp, synthetic construct
  misc_feature 1..20: note = chemically synthesized
  source 1..20: mol_type = other DNA
gctgtttgcccaggacagcc

SEQ ID NO: 1609 - DNA, 20 bp, synthetic construct
  misc_feature 1..20: note = chemically synthesized
  source 1..20: mol_type = other DNA
tgcccaggacagcctagttt

SEQ ID NO: 1610 - DNA, 20 bp, synthetic construct
  misc_feature 1..20: note = chemically synthesized
  source 1..20: mol_type = other DNA
agttttagcactgaaaccct

SEQ ID NO: 1611 - DNA, 20 bp, synthetic construct
  misc_feature 1..20: note = chemically synthesized
  source 1..20: mol_type = other DNA
agcactgaaaccctcagtcc

SEQ ID NO: 1612 - DNA, 20 bp, synthetic construct
  misc_feature 1..20: note = chemically synthesized
  source 1..20: mol_type = other DNA
gcactgaaaccctcagtcct

SEQ ID NO: 1613 - DNA, 20 bp, synthetic construct
  misc_feature 1..20: note = chemically synthesized
  source 1..20: mol_type = other DNA
aaccctcagtcctaggaaaa

SEQ ID NO: 1614 - DNA, 20 bp, synthetic construct
  misc_feature 1..20: note = chemically synthesized
  source 1..20: mol_type = other DNA
accctcagtcctaggaaaac

SEQ ID NO: 1615 - DNA, 20 bp, synthetic construct
  misc_feature 1..20: note = chemically synthesized
  source 1..20: mol_type = other DNA
ccctcagtcctaggaaaaca

SEQ ID NO: 1616 - DNA, 20 bp, synthetic construct
  misc_feature 1..20: note = chemically synthesized
  source 1..20: mol_type = other DNA
cagtcctaggaaaacaggga

SEQ ID NO: 1617 - DNA, 20 bp, synthetic construct
  misc_feature 1..20: note = chemically synthesized
  source 1..20: mol_type = other DNA
cctaggaaaacagggatggt

SEQ ID NO: 1618 - DNA, 20 bp, synthetic construct
  misc_feature 1..20: note = chemically synthesized
  source 1..20: mol_type = other DNA
ggatggttggtcactgtctc

SEQ ID NO: 1619 - DNA, 20 bp, synthetic construct
  misc_feature 1..20: note = chemically synthesized
  source 1..20: mol_type = other DNA
gatggttggtcactgtctct

SEQ ID NO: 1620 - DNA, 20 bp, synthetic construct
  misc_feature 1..20: note = chemically synthesized
  source 1..20: mol_type = other DNA
tctgggtgactcttgattcc

SEQ ID NO: 1621 - DNA, 20 bp, synthetic construct
  misc_feature 1..20: note = chemically synthesized
  source 1..20: mol_type = other DNA
ggtgactcttgattcccggc

SEQ ID NO: 1622 - DNA, 20 bp, synthetic construct
  misc_feature 1..20: note = chemically synthesized
  source 1..20: mol_type = other DNA
tcccggccagtttctccacc

SEQ ID NO: 1623 - DNA, 20 bp, synthetic construct
  misc_feature 1..20: note = chemically synthesized
  source 1..20: mol_type = other DNA
cccggccagtttctccacct

SEQ ID NO: 1624 - DNA, 20 bp, synthetic construct
  misc_feature 1..20: note = chemically synthesized
  source 1..20: mol_type = other DNA
ccggccagtttctccacctg

SEQ ID NO: 1625 - DNA, 20 bp, synthetic construct
  misc_feature 1..20: note = chemically synthesized
  source 1..20: mol_type = other DNA
tctcgtcctgcatccttctc

SEQ ID NO: 1626 - DNA, 20 bp, synthetic construct
  misc_feature 1..20: note = chemically synthesized
  source 1..20: mol_type = other DNA
ctcgtcctgcatccttctcc

SEQ ID NO: 1627 - DNA, 20 bp, synthetic construct
  misc_feature 1..20: note = chemically synthesized
  source 1..20: mol_type = other DNA
gtcctgcatccttctccagg

SEQ ID NO: 1628 - DNA, 20 bp, synthetic construct
  misc_feature 1..20: note = chemically synthesized
  source 1..20: mol_type = other DNA
tcctgcatccttctccaggc

SEQ ID NO: 1629 - DNA, 20 bp, synthetic construct
  misc_feature 1..20: note = chemically synthesized
  source 1..20: mol_type = other DNA
ccttctccaggcaggtcccc

SEQ ID NO: 1630 - DNA, 20 bp, synthetic construct
  misc_feature 1..20: note = chemically synthesized
  source 1..20: mol_type = other DNA
caagcatcgcccccctgctg

SEQ ID NO: 1631 - DNA, 20 bp, synthetic construct
  misc_feature 1..20: note = chemically synthesized
  source 1..20: mol_type = other DNA
cccctgctgtggctgttccc

SEQ ID NO: 1632 - DNA, 20 bp, synthetic construct
  misc_feature 1..20: note = chemically synthesized
  source 1..20: mol_type = other DNA
tgtggctgttcccaagttct

SEQ ID NO: 1633 - DNA, 20 bp, synthetic construct
  misc_feature 1..20: note = chemically synthesized
  source 1..20: mol_type = other DNA
gtggctgttcccaagttctt

SEQ ID NO: 1634 - DNA, 20 bp, synthetic construct
  misc_feature 1..20: note = chemically synthesized
  source 1..20: mol_type = other DNA
tggctgttcccaagttctta

SEQ ID NO: 1635 - DNA, 20 bp, synthetic construct
  misc_feature 1..20: note = chemically synthesized
  source 1..20: mol_type = other DNA
agttcttagggtaccccacg

SEQ ID NO: 1636 - DNA, 20 bp, synthetic construct
  misc_feature 1..20: note = chemically synthesized
  source 1..20: mol_type = other DNA
gttcttagggtaccccacgt

SEQ ID NO: 1637 - DNA, 20 bp, synthetic construct
  misc_feature 1..20: note = chemically synthesized
  source 1..20: mol_type = other DNA
acgtgggtttatcaaccact

SEQ ID NO: 1638 - DNA, 20 bp, synthetic construct
  misc_feature 1..20: note = chemically synthesized
  source 1..20: mol_type = other DNA
gggtttatcaaccacttggt

SEQ ID NO: 1639 - DNA, 20 bp, synthetic construct
  misc_feature 1..20: note = chemically synthesized
  source 1..20: mol_type = other DNA
ggtttatcaaccacttggtg

SEQ ID NO: 1640 - DNA, 20 bp, synthetic construct
  misc_feature 1..20: note = chemically synthesized
  source 1..20: mol_type = other DNA
tatcaaccacttggtgaggc

SEQ ID NO: 1641 - DNA, 20 bp, synthetic construct
  misc_feature 1..20: note = chemically synthesized
  source 1..20: mol_type = other DNA
ttcctgcaccccaattgcct

SEQ ID NO: 1642 - DNA, 20 bp, synthetic construct
  misc_feature 1..20: note = chemically synthesized
  source 1..20: mol_type = other DNA
ctgcaccccaattgccttag

SEQ ID NO: 1643 - DNA, 20 bp, synthetic construct
  misc_feature 1..20: note = chemically synthesized
  source 1..20: mol_type = other DNA
accccaattgccttagtggc

SEQ ID NO: 1644 - DNA, 20 bp, synthetic construct
  misc_feature 1..20: note = chemically synthesized
  source 1..20: mol_type = other DNA
ccccaattgccttagtggct

SEQ ID NO: 1645 - DNA, 20 bp, synthetic construct
  misc_feature 1..20: note = chemically synthesized
  source 1..20: mol_type = other DNA
cccaattgccttagtggcta

SEQ ID NO: 1646 - DNA, 20 bp, synthetic construct
  misc_feature 1..20: note = chemically synthesized
  source 1..20: mol_type = other DNA
ccaattgccttagtggctag

SEQ ID NO: 1647 - DNA, 20 bp, synthetic construct
  misc_feature 1..20: note = chemically synthesized
  source 1..20: mol_type = other DNA
caattgccttagtggctagg

SEQ ID NO: 1648 - DNA, 20 bp, synthetic construct
  misc_feature 1..20: note = chemically synthesized
  source 1..20: mol_type = other DNA
tgccttagtggctagggggt

SEQ ID NO: 1649 - DNA, 20 bp, synthetic construct
  misc_feature 1..20: note = chemically synthesized
  source 1..20: mol_type = other DNA
gccttagtggctagggggtt

SEQ ID NO: 1650 - DNA, 20 bp, synthetic construct
  misc_feature 1..20: note = chemically synthesized
  source 1..20: mol_type = other DNA
ccttagtggctagggggttg

SEQ ID NO: 1651 - DNA, 20 bp, synthetic construct
  misc_feature 1..20: note = chemically synthesized
  source 1..20: mol_type = other DNA
cttagtggctagggggttgg

SEQ ID NO: 1652 - DNA, 20 bp, synthetic construct
  misc_feature 1..20: note = chemically synthesized
  source 1..20: mol_type = other DNA
gtggctagggggttgggggc

SEQ ID NO: 1653 - DNA, 20 bp, synthetic construct
  misc_feature 1..20: note = chemically synthesized
  source 1..20: mol_type = other DNA
ggctagggggttgggggcta

SEQ ID NO: 1654 - DNA, 20 bp, synthetic construct
  misc_feature 1..20: note = chemically synthesized
  source 1..20: mol_type = other DNA
tagggggttgggggctagag

SEQ ID NO: 1655 - DNA, 20 bp, synthetic construct
  misc_feature 1..20: note = chemically synthesized
  source 1..20: mol_type = other DNA
agggggttgggggctagagt

SEQ ID NO: 1656 - DNA, 20 bp, synthetic construct
  misc_feature 1..20: note = chemically synthesized
  source 1..20: mol_type = other DNA
ggggttgggggctagagtag

SEQ ID NO: 1657 - DNA, 20 bp, synthetic construct
  misc_feature 1..20: note = chemically synthesized
  source 1..20: mol_type = other DNA
gggttgggggctagagtagg

SEQ ID NO: 1658 - DNA, 20 bp, synthetic construct
  misc_feature 1..20: note = chemically synthesized
  source 1..20: mol_type = other DNA
ggttgggggctagagtagga

SEQ ID NO: 1659 - DNA, 20 bp, synthetic construct
  misc_feature 1..20: note = chemically synthesized
  source 1..20: mol_type = other DNA
gttgggggctagagtaggag

SEQ ID NO: 1660 - DNA, 20 bp, synthetic construct
  misc_feature 1..20: note = chemically synthesized
  source 1..20: mol_type = other DNA
ggggctagagtaggaggggc

SEQ ID NO: 1661 - DNA, 20 bp, synthetic construct
  misc_feature 1..20: note = chemically synthesized
  source 1..20: mol_type = other DNA
ggctagagtaggaggggctg

SEQ ID NO: 1662 - DNA, 20 bp, synthetic construct
  misc_feature 1..20: note = chemically synthesized
  source 1..20: mol_type = other DNA
agagtaggaggggctggagc

SEQ ID NO: 1663 - DNA, 20 bp, synthetic construct
  misc_feature 1..20: note = chemically synthesized
  source 1..20: mol_type = other DNA
gagtaggaggggctggagcc

SEQ ID NO: 1664 - DNA, 20 bp, synthetic construct
  misc_feature 1..20: note = chemically synthesized
  source 1..20: mol_type = other DNA
ggggctggagccaggattct

SEQ ID NO: 1665 - DNA, 20 bp, synthetic construct
  misc_feature 1..20: note = chemically synthesized
  source 1..20: mol_type = other DNA
gggctggagccaggattctt

SEQ ID NO: 1666 - DNA, 20 bp, synthetic construct
  misc_feature 1..20: note = chemically synthesized
  source 1..20: mol_type = other DNA
ggctggagccaggattctta

SEQ ID NO: 1667 - DNA, 20 bp, synthetic construct
  misc_feature 1..20: note = chemically synthesized
  source 1..20: mol_type = other DNA
ccaggattcttagggctgaa

SEQ ID NO: 1668 - DNA, 20 bp, synthetic construct
  misc_feature 1..20: note = chemically synthesized
  source 1..20: mol_type = other DNA
aggattcttagggctgaaca

SEQ ID NO: 1669 - DNA, 20 bp, synthetic construct
  misc_feature 1..20: note = chemically synthesized
  source 1..20: mol_type = other DNA
attcttagggctgaacagag

SEQ ID NO: 1670 - DNA, 20 bp, synthetic construct
  misc_feature 1..20: note = chemically synthesized
  source 1..20: mol_type = other DNA
tcttagggctgaacagagaa

SEQ ID NO: 1671 - DNA, 20 bp, synthetic construct
  misc_feature 1..20: note = chemically synthesized
  source 1..20: mol_type = other DNA
agggctgaacagagaagagc

SEQ ID NO: 1672 - DNA, 20 bp, synthetic construct
  misc_feature 1..20: note = chemically synthesized
  source 1..20: mol_type = other DNA
gggctgaacagagaagagct

SEQ ID NO: 1673 - DNA, 20 bp, synthetic construct
  misc_feature 1..20: note = chemically synthesized
  source 1..20: mol_type = other DNA
ggctgaacagagaagagctg

SEQ ID NO: 1674 - DNA, 20 bp, synthetic construct
  misc_feature 1..20: note = chemically synthesized
  source 1..20: mol_type = other DNA
gctgaacagagaagagctgg

SEQ ID NO: 1675 - DNA, 20 bp, synthetic construct
  misc_feature 1..20: note = chemically synthesized
  source 1..20: mol_type = other DNA
acagagaagagctgggggcc

SEQ ID NO: 1676 - DNA, 20 bp, synthetic construct
  misc_feature 1..20: note = chemically synthesized
  source 1..20: mol_type = other DNA
cagagaagagctgggggcct

SEQ ID NO: 1677 - DNA, 20 bp, synthetic construct
  misc_feature 1..20: note = chemically synthesized
  source 1..20: mol_type = other DNA
gagctgggggcctgggctcc

SEQ ID NO: 1678 - DNA, 20 bp, synthetic construct
  misc_feature 1..20: note = chemically synthesized
  source 1..20: mol_type = other DNA
agctgggggcctgggctcct

SEQ ID NO: 1679 - DNA, 20 bp, synthetic construct
  misc_feature 1..20: note = chemically synthesized
  source 1..20: mol_type = other DNA
gggcctgggctcctgggttt

SEQ ID NO: 1680 - DNA, 20 bp, synthetic construct
  misc_feature 1..20: note = chemically synthesized
  source 1..20: mol_type = other DNA
gcctgggctcctgggtttga

SEQ ID NO: 1681 - DNA, 20 bp, synthetic construct
  misc_feature 1..20: note = chemically synthesized
  source 1..20: mol_type = other DNA
ctgggctcctgggtttgaga

SEQ ID NO: 1682 - DNA, 20 bp, synthetic construct
  misc_feature 1..20: note = chemically synthesized
  source 1..20: mol_type = other DNA
tgggctcctgggtttgagag

SEQ ID NO: 1683 - DNA, 20 bp, synthetic construct
  misc_feature 1..20: note = chemically synthesized
  source 1..20: mol_type = other DNA
ggctcctgggtttgagagag

SEQ ID NO: 1684 - DNA, 20 bp, synthetic construct
  misc_feature 1..20: note = chemically synthesized
  source 1..20: mol_type = other DNA
gctcctgggtttgagagagg

SEQ ID NO: 1685 - DNA, 20 bp, synthetic construct
  misc_feature 1..20: note = chemically synthesized
  source 1..20: mol_type = other DNA
ctcctgggtttgagagagga

SEQ ID NO: 1686 - DNA, 20 bp, synthetic construct
  misc_feature 1..20: note = chemically synthesized
  source 1..20: mol_type = other DNA
tcctgggtttgagagaggag

SEQ ID NO: 1687 - DNA, 20 bp, synthetic construct
  misc_feature 1..20: note = chemically synthesized
  source 1..20: mol_type = other DNA
gggtttgagagaggaggggc

SEQ ID NO: 1688 - DNA, 20 bp, synthetic construct
  misc_feature 1..20: note = chemically synthesized
  source 1..20: mol_type = other DNA
ggtttgagagaggaggggct

SEQ ID NO: 1689 - DNA, 20 bp, synthetic construct
  misc_feature 1..20: note = chemically synthesized
  source 1..20: mol_type = other DNA
gtttgagagaggaggggctg

SEQ ID NO: 1690 - DNA, 20 bp, synthetic construct
  misc_feature 1..20: note = chemically synthesized
  source 1..20: mol_type = other DNA
agagaggaggggctggggcc

SEQ ID NO: 1691 - DNA, 20 bp, synthetic construct
  misc_feature 1..20: note = chemically synthesized
  source 1..20: mol_type = other DNA
ggggctggggcctggactcc

SEQ ID NO: 1692 - DNA, 20 bp, synthetic construct
  misc_feature 1..20: note = chemically synthesized
  source 1..20: mol_type = other DNA
gggctggggcctggactcct

SEQ ID NO: 1693 - DNA, 20 bp, synthetic construct
  misc_feature 1..20: note = chemically synthesized
  source 1..20: mol_type = other DNA
gggcctggactcctgggtcc

SEQ ID NO: 1694 - DNA, 20 bp, synthetic construct
  misc_feature 1..20: note = chemically synthesized
  source 1..20: mol_type = other DNA
ggcctggactcctgggtccg

SEQ ID NO: 1695 - DNA, 20 bp, synthetic construct
  misc_feature 1..20: note = chemically synthesized
  source 1..20: mol_type = other DNA
gcctggactcctgggtccga

SEQ ID NO: 1696 - DNA, 20 bp, synthetic construct
  misc_feature 1..20: note = chemically synthesized
  source 1..20: mol_type = other DNA
ctggactcctgggtccgagg

SEQ ID NO: 1697 - DNA, 20 bp, synthetic construct
  misc_feature 1..20: note = chemically synthesized
  source 1..20: mol_type = other DNA
tggactcctgggtccgaggg

SEQ ID NO: 1698 - DNA, 20 bp, synthetic construct
  misc_feature 1..20: note = chemically synthesized
  source 1..20: mol_type = other DNA
gactcctgggtccgagggag

SEQ ID NO: 1699 - DNA, 20 bp, synthetic construct
  misc_feature 1..20: note = chemically synthesized
  source 1..20: mol_type = other DNA
actcctgggtccgagggagg

SEQ ID NO: 1700 - DNA, 20 bp, synthetic construct
  misc_feature 1..20: note = chemically synthesized
  source 1..20: mol_type = other DNA
ctcctgggtccgagggagga

SEQ ID NO: 1701 - DNA, 20 bp, synthetic construct
  misc_feature 1..20: note = chemically synthesized
  source 1..20: mol_type = other DNA
tcctgggtccgagggaggag

SEQ ID NO: 1702 - DNA, 20 bp, synthetic construct
  misc_feature 1..20: note = chemically synthesized
  source 1..20: mol_type = other DNA
gggtccgagggaggaggggc

SEQ ID NO: 1703 - DNA, 20 bp, synthetic construct
  misc_feature 1..20: note = chemically synthesized
  source 1..20: mol_type = other DNA
ggtccgagggaggaggggct

SEQ ID NO: 1704 - DNA, 20 bp, synthetic construct
  misc_feature 1..20: note = chemically synthesized
  source 1..20: mol_type = other DNA
gtccgagggaggaggggctg

SEQ ID NO: 1705 - DNA, 20 bp, synthetic construct
  misc_feature 1..20: note = chemically synthesized
  source 1..20: mol_type = other DNA
agggaggaggggctggggcc

SEQ ID NO: 1706 - DNA, 20 bp, synthetic construct
  misc_feature 1..20: note = chemically synthesized
  source 1..20: mol_type = other DNA
ggggctggggcctggactcc

SEQ ID NO: 1707 - DNA, 20 bp, synthetic construct
  misc_feature 1..20: note = chemically synthesized
  source 1..20: mol_type = other DNA
gggctggggcctggactcct

SEQ ID NO: 1708 - DNA, 20 bp, synthetic construct
  misc_feature 1..20: note = chemically synthesized
  source 1..20: mol_type = other DNA
gggcctggactcctgggtct

SEQ ID NO: 1709 - DNA, 20 bp, synthetic construct
  misc_feature 1..20: note = chemically synthesized
  source 1..20: mol_type = other DNA
ggcctggactcctgggtctg

SEQ ID NO: 1710 - DNA, 20 bp, synthetic construct
  misc_feature 1..20: note = chemically synthesized
  source 1..20: mol_type = other DNA
gcctggactcctgggtctga

SEQ ID NO: 1711 - DNA, 20 bp, synthetic construct
  misc_feature 1..20: note = chemically synthesized
  source 1..20: mol_type = other DNA
tggactcctgggtctgaggg

SEQ ID NO: 1712 - DNA, 20 bp, synthetic construct
  misc_feature 1..20: note = chemically synthesized
  source 1..20: mol_type = other DNA
gactcctgggtctgagggtg

SEQ ID NO: 1713 - DNA, 20 bp, synthetic construct
  misc_feature 1..20: note = chemically synthesized
  source 1..20: mol_type = other DNA
actcctgggtctgagggtgg

SEQ ID NO: 1714 - DNA, 20 bp, synthetic construct
  misc_feature 1..20: note = chemically synthesized
  source 1..20: mol_type = other DNA
ctcctgggtctgagggtgga

SEQ ID NO: 1715 - DNA, 20 bp, synthetic construct
  misc_feature 1..20: note = chemically synthesized
  source 1..20: mol_type = other DNA
gggtctgagggtggagggac

SEQ ID NO: 1716 - DNA, 20 bp, synthetic construct
  misc_feature 1..20: note = chemically synthesized
  source 1..20: mol_type = other DNA
ggtctgagggtggagggact

SEQ ID NO: 1717 - DNA, 20 bp, synthetic construct
  misc_feature 1..20: note = chemically synthesized
  source 1..20: mol_type = other DNA
gtctgagggtggagggactg

SEQ ID NO: 1718 - DNA, 20 bp, synthetic construct
  misc_feature 1..20: note = chemically synthesized
  source 1..20: mol_type = other DNA
tctgagggtggagggactgg

SEQ ID NO: 1719 - DNA, 20 bp, synthetic construct
  misc_feature 1..20: note = chemically synthesized
  source 1..20: mol_type = other DNA
gggtggagggactgggggcc

SEQ ID NO: 1720 - DNA, 20 bp, synthetic construct
  misc_feature 1..20: note = chemically synthesized
  source 1..20: mol_type = other DNA
ggactgggggcctggactcc

SEQ ID NO: 1721 - DNA, 20 bp, synthetic construct
  misc_feature 1..20: note = chemically synthesized
  source 1..20: mol_type = other DNA
gactgggggcctggactcct

SEQ ID NO: 1722 - DNA, 20 bp, synthetic construct
  misc_feature 1..20: note = chemically synthesized
  source 1..20: mol_type = other DNA
gggcctggactcctgggtcc

SEQ ID NO: 1723 - DNA, 20 bp, synthetic construct
  misc_feature 1..20: note = chemically synthesized
  source 1..20: mol_type = other DNA
ggcctggactcctgggtccg

SEQ ID NO: 1724 - DNA, 20 bp, synthetic construct
  misc_feature 1..20: note = chemically synthesized
  source 1..20: mol_type = other DNA
gcctggactcctgggtccga

SEQ ID NO: 1725 - DNA, 20 bp, synthetic construct
  misc_feature 1..20: note = chemically synthesized
  source 1..20: mol_type = other DNA
ctggactcctgggtccgagg

SEQ ID NO: 1726 - DNA, 20 bp, synthetic construct
  misc_feature 1..20: note = chemically synthesized
  source 1..20: mol_type = other DNA
tggactcctgggtccgaggg

SEQ ID NO: 1727 - DNA, 20 bp, synthetic construct
  misc_feature 1..20: note = chemically synthesized
  source 1..20: mol_type = other DNA
gactcctgggtccgagggag

SEQ ID NO: 1728 - DNA, 20 bp, synthetic construct
  misc_feature 1..20: note = chemically synthesized
  source 1..20: mol_type = other DNA
actcctgggtccgagggagg

SEQ ID NO: 1729 - DNA, 20 bp, synthetic construct
  misc_feature 1..20: note = chemically synthesized
  source 1..20: mol_type = other DNA
ctcctgggtccgagggagga

SEQ ID NO: 1730 - DNA, 20 bp, synthetic construct
  misc_feature 1..20: note = chemically synthesized
  source 1..20: mol_type = other DNA
tcctgggtccgagggaggag

SEQ ID NO: 1731 - DNA, 20 bp, synthetic construct
  misc_feature 1..20: note = chemically synthesized
  source 1..20: mol_type = other DNA
gggtccgagggaggaggggc

SEQ ID NO: 1732 - DNA, 20 bp, synthetic construct
  misc_feature 1..20: note = chemically synthesized
  source 1..20: mol_type = other DNA
ggtccgagggaggaggggct

SEQ ID NO: 1733 - DNA, 20 bp, synthetic construct
  misc_feature 1..20: note = chemically synthesized
  source 1..20: mol_type = other DNA
gtccgagggaggaggggctg

SEQ ID NO: 1734 - DNA, 20 bp, synthetic construct
  misc_feature 1..20: note = chemically synthesized
  source 1..20: mol_type = other DNA
agggaggaggggctggggcc

SEQ ID NO: 1735 - DNA, 20 bp, synthetic construct
  misc_feature 1..20: note = chemically synthesized
  source 1..20: mol_type = other DNA
ggggctggggcctggactcg

SEQ ID NO: 1736 - DNA, 20 bp, synthetic construct
  misc_feature 1..20: note = chemically synthesized
  source 1..20: mol_type = other DNA
gggctggggcctggactcgt

SEQ ID NO: 1737 - DNA, 20 bp, synthetic construct
  misc_feature 1..20: note = chemically synthesized
  source 1..20: mol_type = other DNA
gggcctggactcgtgggtct

SEQ ID NO: 1738 - DNA, 20 bp, synthetic construct
  misc_feature 1..20: note = chemically synthesized
  source 1..20: mol_type = other DNA
ggcctggactcgtgggtctg

SEQ ID NO: 1739 - DNA, 20 bp, synthetic construct
  misc_feature 1..20: note = chemically synthesized
  source 1..20: mol_type = other DNA
gcctggactcgtgggtctga

SEQ ID NO: 1740 - DNA, 20 bp, synthetic construct
  misc_feature 1..20: note = chemically synthesized
  source 1..20: mol_type = other DNA
ctggactcgtgggtctgagg

SEQ ID NO: 1741 - DNA, 20 bp, synthetic construct
  misc_feature 1..20: note = chemically synthesized
  source 1..20: mol_type = other DNA
tggactcgtgggtctgaggg

SEQ ID NO: 1742 - DNA, 20 bp, synthetic construct
  misc_feature 1..20: note = chemically synthesized
  source 1..20: mol_type = other DNA
gactcgtgggtctgagggag

SEQ ID NO: 1743 - DNA, 20 bp, synthetic construct
  misc_feature 1..20: note = chemically synthesized
  source 1..20: mol_type = other DNA
actcgtgggtctgagggagg

SEQ ID NO: 1744 - DNA, 20 bp, synthetic construct
  misc_feature 1..20: note = chemically synthesized
  source 1..20: mol_type = other DNA
ctcgtgggtctgagggagga

SEQ ID NO: 1745 - DNA, 20 bp, synthetic construct
  misc_feature 1..20: note = chemically synthesized
  source 1..20: mol_type = other DNA
tcgtgggtctgagggaggag

SEQ ID NO: 1746 - DNA, 20 bp, synthetic construct
  misc_feature 1..20: note = chemically synthesized
  source 1..20: mol_type = other DNA
gggtctgagggaggaggggc

SEQ ID NO: 1747 - DNA, 20 bp, synthetic construct
  misc_feature 1..20: note = chemically synthesized
  source 1..20: mol_type = other DNA
ggtctgagggaggaggggct

SEQ ID NO: 1748 - DNA, 20 bp, synthetic construct
  misc_feature 1..20: note = chemically synthesized
  source 1..20: mol_type = other DNA
gtctgagggaggaggggctg

SEQ ID NO: 1749 - DNA, 20 bp, synthetic construct
  misc_feature 1..20: note = chemically synthesized
  source 1..20: mol_type = other DNA
tctgagggaggaggggctgg

SEQ ID NO: 1750 - DNA, 20 bp, synthetic construct
  misc_feature 1..20: note = chemically synthesized
  source 1..20: mol_type = other DNA
gggaggaggggctgggggcc

SEQ ID NO: 1751 - DNA, 20 bp, synthetic construct
  misc_feature 1..20: note = chemically synthesized
  source 1..20: mol_type = other DNA
gggctgggggcctggacttc

SEQ ID NO: 1752 - DNA, 20 bp, synthetic construct
  misc_feature 1..20: note = chemically synthesized
  source 1..20: mol_type = other DNA
ggctgggggcctggacttct

SEQ ID NO: 1753 - DNA, 20 bp, synthetic construct
  misc_feature 1..20: note = chemically synthesized
  source 1..20: mol_type = other DNA
gggcctggacttctgggtct

SEQ ID NO: 1754 - DNA, 20 bp, synthetic construct
  misc_feature 1..20: note = chemically synthesized
  source 1..20: mol_type = other DNA
ggcctggacttctgggtctt

SEQ ID NO: 1755 - DNA, 20 bp, synthetic construct
  misc_feature 1..20: note = chemically synthesized
  source 1..20: mol_type = other DNA
gcctggacttctgggtctta

SEQ ID NO: 1756 - DNA, 20 bp, synthetic construct
  misc_feature 1..20: note = chemically synthesized
  source 1..20: mol_type = other DNA
ctggacttctgggtcttagg

SEQ ID NO: 1757 - DNA, 20 bp, synthetic construct
  misc_feature 1..20: note = chemically synthesized
  source 1..20: mol_type = other DNA
tggacttctgggtcttaggg

SEQ ID NO: 1758 - DNA, 20 bp, synthetic construct
  misc_feature 1..20: note = chemically synthesized
  source 1..20: mol_type = other DNA
acttctgggtcttagggagg

SEQ ID NO: 1759 - DNA, 20 bp, synthetic construct
  misc_feature 1..20: note = chemically synthesized
  source 1..20: mol_type = other DNA
cttctgggtcttagggaggc

SEQ ID NO: 1760 - DNA, 20 bp, synthetic construct
  misc_feature 1..20: note = chemically synthesized
  source 1..20: mol_type = other DNA
ttctgggtcttagggaggcg

SEQ ID NO: 1761 - DNA, 20 bp, synthetic construct
  misc_feature 1..20: note = chemically synthesized
  source 1..20: mol_type = other DNA
gggtcttagggaggcggggc

SEQ ID NO: 1762 - DNA, 20 bp, synthetic construct
  misc_feature 1..20: note = chemically synthesized
  source 1..20: mol_type = other DNA
ggtcttagggaggcggggct

SEQ ID NO: 1763 - DNA, 20 bp, synthetic construct
  misc_feature 1..20: note = chemically synthesized
  source 1..20: mol_type = other DNA
tagggaggcggggctgggcc

SEQ ID NO: 1764 - DNA, 20 bp, synthetic construct
  misc_feature 1..20: note = chemically synthesized
  source 1..20: mol_type = other DNA
cggggctgggcctggacccc

SEQ ID NO: 1765 - DNA, 20 bp, synthetic construct
  misc_feature 1..20: note = chemically synthesized
  source 1..20: mol_type = other DNA
ggggctgggcctggacccct

SEQ ID NO: 1766 - DNA, 20 bp, synthetic construct
  misc_feature 1..20: note = chemically synthesized
  source 1..20: mol_type = other DNA
cctggacccctgggtctgaa

SEQ ID NO: 1767 - DNA, 20 bp, synthetic construct
  misc_feature 1..20: note = chemically synthesized
  source 1..20: mol_type = other DNA
ctggacccctgggtctgaat

SEQ ID NO: 1768 - DNA, 20 bp, synthetic construct
  misc_feature 1..20: note = chemically synthesized
  source 1..20: mol_type = other DNA
tggacccctgggtctgaatg

SEQ ID NO: 1769 - DNA, 20 bp, synthetic construct
  misc_feature 1..20: note = chemically synthesized
  source 1..20: mol_type = other DNA
gacccctgggtctgaatggg

SEQ ID NO: 1770 - DNA, 20 bp, synthetic construct
  misc_feature 1..20: note = chemically synthesized
  source 1..20: mol_type = other DNA
cccctgggtctgaatgggga

SEQ ID NO: 1771 - DNA, 20 bp, synthetic construct
  misc_feature 1..20: note = chemically synthesized
  source 1..20: mol_type = other DNA
ccctgggtctgaatggggag

SEQ ID NO: 1772 - DNA, 20 bp, synthetic construct
  misc_feature 1..20: note = chemically synthesized
  source 1..20: mol_type = other DNA
gggtctgaatggggagaggc

SEQ ID NO: 1773 - DNA, 20 bp, synthetic construct
  misc_feature 1..20: note = chemically synthesized
  source 1..20: mol_type = other DNA
ggtctgaatggggagaggct

SEQ ID NO: 1774 - DNA, 20 bp, synthetic construct
  misc_feature 1..20: note = chemically synthesized
  source 1..20: mol_type = other DNA
gtctgaatggggagaggctg

SEQ ID NO: 1775 - DNA, 20 bp, synthetic construct
  misc_feature 1..20: note = chemically synthesized
  source 1..20: mol_type = other DNA
tctgaatggggagaggctgg

SEQ ID NO: 1776 - DNA, 20 bp, synthetic construct
  misc_feature 1..20: note = chemically synthesized
  source 1..20: mol_type = other DNA
atggggagaggctgggggcc

SEQ ID NO: 1777 - DNA, 20 bp, synthetic construct
  misc_feature 1..20: note = chemically synthesized
  source 1..20: mol_type = other DNA
gggcctggactccttcatct

SEQ ID NO: 1778 - DNA, 20 bp, synthetic construct
  misc_feature 1..20: note = chemically synthesized
  source 1..20: mol_type = other DNA
ggcctggactccttcatctg

SEQ ID NO: 1779 - DNA, 20 bp, synthetic construct
  misc_feature 1..20: note = chemically synthesized
  source 1..20: mol_type = other DNA
gcctggactccttcatctga

SEQ ID NO: 1780 - DNA, 20 bp, synthetic construct
  misc_feature 1..20: note = chemically synthesized
  source 1..20: mol_type = other DNA
tggactccttcatctgaggg

SEQ ID NO: 1781 - DNA, 20 bp, synthetic construct
  misc_feature 1..20: note = chemically synthesized
  source 1..20: mol_type = other DNA
actccttcatctgagggcgg

SEQ ID NO: 1782 - DNA, 20 bp, synthetic construct
  misc_feature 1..20: note = chemically synthesized
  source 1..20: mol_type = other DNA
ctccttcatctgagggcgga

SEQ ID NO: 1783 - DNA, 20 bp, synthetic construct
  misc_feature 1..20: note = chemically synthesized
  source 1..20: mol_type = other DNA
tccttcatctgagggcggaa

SEQ ID NO: 1784 - DNA, 20 bp, synthetic construct
  misc_feature 1..20: note = chemically synthesized
  source 1..20: mol_type = other DNA
tcatctgagggcggaagggc

SEQ ID NO: 1785 - DNA, 20 bp, synthetic construct
  misc_feature 1..20: note = chemically synthesized
  source 1..20: mol_type = other DNA
catctgagggcggaagggct

SEQ ID NO: 1786 - DNA, 20 bp, synthetic construct
  misc_feature 1..20: note = chemically synthesized
  source 1..20: mol_type = other DNA
atctgagggcggaagggctg

SEQ ID NO: 1787 - DNA, 20 bp, synthetic construct
  misc_feature 1..20: note = chemically synthesized
  source 1..20: mol_type = other DNA
agggcggaagggctggggcc

SEQ ID NO: 1788 - DNA, 20 bp, synthetic construct
  misc_feature 1..20: note = chemically synthesized
  source 1..20: mol_type = other DNA
agggctggggcctggcctcc

SEQ ID NO: 1789 - DNA, 20 bp, synthetic construct
  misc_feature 1..20: note = chemically synthesized
  source 1..20: mol_type = other DNA
gggctggggcctggcctcct

SEQ ID NO: 1790 - DNA, 20 bp, synthetic construct
  misc_feature 1..20: note = chemically synthesized
  source 1..20: mol_type = other DNA
gcctggcctcctgggttgaa

SEQ ID NO: 1791 - DNA, 20 bp, synthetic construct
  misc_feature 1..20: note = chemically synthesized
  source 1..20: mol_type = other DNA
cctggcctcctgggttgaat

SEQ ID NO: 1792 - DNA, 20 bp, synthetic construct
  misc_feature 1..20: note = chemically synthesized
  source 1..20: mol_type = other DNA
ctggcctcctgggttgaatg

SEQ ID NO: 1793 - DNA, 20 bp, synthetic construct
  misc_feature 1..20: note = chemically synthesized
  source 1..20: mol_type = other DNA
ggcctcctgggttgaatggg

SEQ ID NO: 1794 - DNA, 20 bp, synthetic construct
  misc_feature 1..20: note = chemically synthesized
  source 1..20: mol_type = other DNA
gcctcctgggttgaatgggg

SEQ ID NO: 1795 - DNA, 20 bp, synthetic construct
  misc_feature 1..20: note = chemically synthesized
  source 1..20: mol_type = other DNA
cctcctgggttgaatgggga

SEQ ID NO: 1796 - DNA, 20 bp, synthetic construct
  misc_feature 1..20: note = chemically synthesized
  source 1..20: mol_type = other DNA
ctcctgggttgaatggggag

SEQ ID NO: 1797 - DNA, 20 bp, synthetic construct
  misc_feature 1..20: note = chemically synthesized
  source 1..20: mol_type = other DNA
tgggttgaatggggaggggt

SEQ ID NO: 1798 - DNA, 20 bp, synthetic construct
  misc_feature 1..20: note = chemically synthesized
  source 1..20: mol_type = other DNA
gggttgaatggggaggggtt

SEQ ID NO: 1799 - DNA, 20 bp, synthetic construct
  misc_feature 1..20: note = chemically synthesized
  source 1..20: mol_type = other DNA
gaatggggaggggttgggcc

SEQ ID NO: 1800 - DNA, 20 bp, synthetic construct
  misc_feature 1..20: note = chemically synthesized
  source 1..20: mol_type = other DNA
gaggggttgggcctggactc

SEQ ID NO: 1801 - DNA, 20 bp, synthetic construct
  misc_feature 1..20: note = chemically synthesized
  source 1..20: mol_type = other DNA
ggggttgggcctggactctg

SEQ ID NO: 1802 - DNA, 20 bp, synthetic construct
  misc_feature 1..20: note = chemically synthesized
  source 1..20: mol_type = other DNA
ggcctggactctggagtccc

SEQ ID NO: 1803 - DNA, 20 bp, synthetic construct
  misc_feature 1..20: note = chemically synthesized
  source 1..20: mol_type = other DNA
actctggagtccctggtgcc

SEQ ID NO: 1804 - DNA, 20 bp, synthetic construct
  misc_feature 1..20: note = chemically synthesized
  source 1..20: mol_type = other DNA
ctctggagtccctggtgccc

SEQ ID NO: 1805 - DNA, 20 bp, synthetic construct
  misc_feature 1..20: note = chemically synthesized
  source 1..20: mol_type = other DNA
agtccctggtgcccaggcct

SEQ ID NO: 1806 - DNA, 20 bp, synthetic construct
  misc_feature 1..20: note = chemically synthesized
  source 1..20: mol_type = other DNA
gtccctggtgcccaggcctc

SEQ ID NO: 1807 - DNA, 20 bp, synthetic construct
  misc_feature 1..20: note = chemically synthesized
  source 1..20: mol_type = other DNA
caggcctcaggcatctttca

SEQ ID NO: 1808 - DNA, 20 bp, synthetic construct
  misc_feature 1..20: note = chemically synthesized
  source 1..20: mol_type = other DNA
aggcctcaggcatctttcac

SEQ ID NO: 1809 - DNA, 20 bp, synthetic construct
  misc_feature 1..20: note = chemically synthesized
  source 1..20: mol_type = other DNA
ggcctcaggcatctttcaca

SEQ ID NO: 1810 - DNA, 20 bp, synthetic construct
  misc_feature 1..20: note = chemically synthesized
  source 1..20: mol_type = other DNA
tttcacagggatgcctgtac

SEQ ID NO: 1811 - DNA, 20 bp, synthetic construct
  misc_feature 1..20: note = chemically synthesized
  source 1..20: mol_type = other DNA
ttcacagggatgcctgtact

SEQ ID NO: 1812 - DNA, 20 bp, synthetic construct
  misc_feature 1..20: note = chemically synthesized
  source 1..20: mol_type = other DNA
acagggatgcctgtactggg

SEQ ID NO: 1813 - DNA, 20 bp, synthetic construct
  misc_feature 1..20: note = chemically synthesized
  source 1..20: mol_type = other DNA
cagggatgcctgtactgggc

SEQ ID NO: 1814 - DNA, 20 bp, synthetic construct
  misc_feature 1..20: note = chemically synthesized
  source 1..20: mol_type = other DNA
tgtactgggcaggtccttga

SEQ ID NO: 1815 - DNA, 20 bp, synthetic construct
  misc_feature 1..20: note = chemically synthesized
  source 1..20: mol_type = other DNA
gtactgggcaggtccttgaa

SEQ ID NO: 1816 - DNA, 20 bp, synthetic construct
  misc_feature 1..20: note = chemically synthesized
  source 1..20: mol_type = other DNA
tactgggcaggtccttgaaa

SEQ ID NO: 1817 - DNA, 20 bp, synthetic construct
  misc_feature 1..20: note = chemically synthesized
  source 1..20: mol_type = other DNA
gggcaggtccttgaaaggga

SEQ ID NO: 1818 - DNA, 20 bp, synthetic construct
  misc_feature 1..20: note = chemically synthesized
  source 1..20: mol_type = other DNA
ggcaggtccttgaaagggaa

SEQ ID NO: 1819 - DNA, 20 bp, synthetic construct
  misc_feature 1..20: note = chemically synthesized
  source 1..20: mol_type = other DNA
tcccctatcgccatgacaac

SEQ ID NO: 1820 - DNA, 20 bp, synthetic construct
  misc_feature 1..20: note = chemically synthesized
  source 1..20: mol_type = other DNA
cccctatcgccatgacaact

SEQ ID NO: 1821 - DNA, 20 bp, synthetic construct
  misc_feature 1..20: note = chemically synthesized
  source 1..20: mol_type = other DNA
ctatcgccatgacaactggg

SEQ ID NO: 1822 - DNA, 20 bp, synthetic construct
  misc_feature 1..20: note = chemically synthesized
  source 1..20: mol_type = other DNA
acaactgggtggaaataaac

SEQ ID NO: 1823 - DNA, 20 bp, synthetic construct
  misc_feature 1..20: note = chemically synthesized
  source 1..20: mol_type = other DNA
tgggtggaaataaacgagcc

SEQ ID NO: 1824 - DNA, 20 bp, synthetic construct
  misc_feature 1..20: note = chemically synthesized
  source 1..20: mol_type = other DNA
agccgagttcatcccgttcc

SEQ ID NO: 1825 - DNA, 20 bp, synthetic construct
  misc_feature 1..20: note = chemically synthesized
  source 1..20: mol_type = other DNA
gccgagttcatcccgttccc

SEQ ID NO: 1826 - DNA, 20 bp, synthetic construct
  misc_feature 1..20: note = chemically synthesized
  source 1..20: mol_type = other DNA
ccgagttcatcccgttccca

SEQ ID NO: 1827 - DNA, 20 bp, synthetic construct
  misc_feature 1..20: note = chemically synthesized
  source 1..20: mol_type = other DNA
tcccgttcccagggcacgtg

SEQ ID NO: 1828 - DNA, 20 bp, synthetic construct
  misc_feature 1..20: note = chemically synthesized
  source 1..20: mol_type = other DNA
gggcacgtgcggccccttca

SEQ ID NO: 1829 - DNA, 20 bp, synthetic construct
  misc_feature 1..20: note = chemically synthesized
  source 1..20: mol_type = other DNA
gtgcggccccttcacagccc

SEQ ID NO: 1830 - DNA, 20 bp, synthetic construct
  misc_feature 1..20: note = chemically synthesized
  source 1..20: mol_type = other DNA
tttccatgacctcatgctct

SEQ ID NO: 1831 - DNA, 20 bp, synthetic construct
  misc_feature 1..20: note = chemically synthesized
  source 1..20: mol_type = other DNA
cctcatgctcttggccctcg

SEQ ID NO: 1832 - DNA, 20 bp, synthetic construct
  misc_feature 1..20: note = chemically synthesized
  source 1..20: mol_type = other DNA
tagctccctcccgcctcctc

SEQ ID NO: 1833 - DNA, 20 bp, synthetic construct
  misc_feature 1..20: note = chemically synthesized
  source 1..20: mol_type = other DNA
tccctcccgcctcctccaga

SEQ ID NO: 1834 - DNA, 20 bp, synthetic construct
  misc_feature 1..20: note = chemically synthesized
  source 1..20: mol_type = other DNA
ccctcccgcctcctccagat

SEQ ID NO: 1835 - DNA, 20 bp, synthetic construct
  misc_feature 1..20: note = chemically synthesized
  source 1..20: mol_type = other DNA
tcccgcctcctccagatggg

SEQ ID NO: 1836 - DNA, 20 bp, synthetic construct
  misc_feature 1..20: note = chemically synthesized
  source 1..20: mol_type = other DNA
ctcctccagatgggcagctt

SEQ ID NO: 1837 - DNA, 20 bp, synthetic construct
  misc_feature 1..20: note = chemically synthesized
  source 1..20: mol_type = other DNA
cctccagatgggcagctttg

SEQ ID NO: 1838 - DNA, 20 bp, synthetic construct
  misc_feature 1..20: note = chemically synthesized
  source 1..20: mol_type = other DNA
tccagatgggcagctttgga

SEQ ID NO: 1839 - DNA, 20 bp, synthetic construct
  misc_feature 1..20: note = chemically synthesized
  source 1..20: mol_type = other DNA
ccagatgggcagctttggag

SEQ ID NO: 1840 - DNA, 20 bp, synthetic construct
  misc_feature 1..20: note = chemically synthesized
  source 1..20: mol_type = other DNA
atgggcagctttggagaggt

SEQ ID NO: 1841 - DNA, 20 bp, synthetic construct
  misc_feature 1..20: note = chemically synthesized
  source 1..20: mol_type = other DNA
tgggcagctttggagaggtg

SEQ ID NO: 1842 - DNA, 20 bp, synthetic construct
  misc_feature 1..20: note = chemically synthesized
  source 1..20: mol_type = other DNA
gggcagctttggagaggtga

SEQ ID NO: 1843 - DNA, 20 bp, synthetic construct
  misc_feature 1..20: note = chemically synthesized
  source 1..20: mol_type = other DNA
ctttggagaggtgagggact

SEQ ID NO: 1844 - DNA, 20 bp, synthetic construct
  misc_feature 1..20: note = chemically synthesized
  source 1..20: mol_type = other DNA
tttggagaggtgagggactt

SEQ ID NO: 1845 - DNA, 20 bp, synthetic construct
  misc_feature 1..20: note = chemically synthesized
  source 1..20: mol_type = other DNA
ttggagaggtgagggacttg

SEQ ID NO: 1846 - DNA, 20 bp, synthetic construct
  misc_feature 1..20: note = chemically synthesized
  source 1..20: mol_type = other DNA
tggagaggtgagggacttgg

SEQ ID NO: 1847 - DNA, 20 bp, synthetic construct
  misc_feature 1..20: note = chemically synthesized
  source 1..20: mol_type = other DNA
ggagaggtgagggacttggg

SEQ ID NO: 1848 - DNA, 20 bp, synthetic construct
  misc_feature 1..20: note = chemically synthesized
  source 1..20: mol_type = other DNA
ttggggggtaatttatcccg

SEQ ID NO: 1849 - DNA, 20 bp, synthetic construct
  misc_feature 1..20: note = chemically synthesized
  source 1..20: mol_type = other DNA
ggtaatttatcccgtggatc

SEQ ID NO: 1850 - DNA, 20 bp, synthetic construct
  misc_feature 1..20: note = chemically synthesized
  source 1..20: mol_type = other DNA
gtaatttatcccgtggatct

SEQ ID NO: 1851 - DNA, 20 bp, synthetic construct
  misc_feature 1..20: note = chemically synthesized
  source 1..20: mol_type = other DNA
aatttatcccgtggatctag

SEQ ID NO: 1852 - DNA, 20 bp, synthetic construct
  misc_feature 1..20: note = chemically synthesized
  source 1..20: mol_type = other DNA
atcccgtggatctaggagtt

SEQ ID NO: 1853 - DNA, 20 bp, synthetic construct
  misc_feature 1..20: note = chemically synthesized
  source 1..20: mol_type = other DNA
gtttagcttcactccttcct

SEQ ID NO: 1854 - DNA, 20 bp, synthetic construct
  misc_feature 1..20: note = chemically synthesized
  source 1..20: mol_type = other DNA
cttcactccttcctcagctc

SEQ ID NO: 1855 - DNA, 20 bp, synthetic construct
  misc_feature 1..20: note = chemically synthesized
  source 1..20: mol_type = other DNA
ctccttcctcagctccagtt

SEQ ID NO: 1856 - DNA, 20 bp, synthetic construct
  misc_feature 1..20: note = chemically synthesized
  source 1..20: mol_type = other DNA
tccttcctcagctccagttc

SEQ ID NO: 1857 - DNA, 20 bp, synthetic construct
  misc_feature 1..20: note = chemically synthesized
  source 1..20: mol_type = other DNA
ctcagctccagttcaggtcc

SEQ ID NO: 1858 - DNA, 20 bp, synthetic construct
  misc_feature 1..20: note = chemically synthesized
  source 1..20: mol_type = other DNA
cagctccagttcaggtcccg

SEQ ID NO: 1859 - DNA, 20 bp, synthetic construct
  misc_feature 1..20: note = chemically synthesized
  source 1..20: mol_type = other DNA
ttcaggtcccggagcccacc

SEQ ID NO: 1860 - DNA, 20 bp, synthetic construct
  misc_feature 1..20: note = chemically synthesized
  source 1..20: mol_type = other DNA
ggagcccacccagtgtccac

SEQ ID NO: 1861 - DNA, 20 bp, synthetic construct
  misc_feature 1..20: note = chemically synthesized
  source 1..20: mol_type = other DNA
gagcccacccagtgtccaca

SEQ ID NO: 1862 - DNA, 20 bp, synthetic construct
  misc_feature 1..20: note = chemically synthesized
  source 1..20: mol_type = other DNA
cacccagtgtccacaaggcc

SEQ ID NO: 1863 - DNA, 20 bp, synthetic construct
  misc_feature 1..20: note = chemically synthesized
  source 1..20: mol_type = other DNA
acccagtgtccacaaggcct

SEQ ID NO: 1864 - DNA, 20 bp, synthetic construct
  misc_feature 1..20: note = chemically synthesized
  source 1..20: mol_type = other DNA
cccagtgtccacaaggcctg

SEQ ID NO: 1865 - DNA, 20 bp, synthetic construct
  misc_feature 1..20: note = chemically synthesized
  source 1..20: mol_type = other DNA
gtgtccacaaggcctggggc

SEQ ID NO: 1866 - DNA, 20 bp, synthetic construct
  misc_feature 1..20: note = chemically synthesized
  source 1..20: mol_type = other DNA
aagtccctcctccgaccccc

SEQ ID NO: 1867 - DNA, 20 bp, synthetic construct
  misc_feature 1..20: note = chemically synthesized
  source 1..20: mol_type = other DNA
tcctccgaccccctggactt

SEQ ID NO: 1868 - DNA, 20 bp, synthetic construct
  misc_feature 1..20: note = chemically synthesized
  source 1..20: mol_type = other DNA
acttcggcttttgtcccccc

SEQ ID NO: 1869 - DNA, 20 bp, synthetic construct
  misc_feature 1..20: note = chemically synthesized
  source 1..20: mol_type = other DNA
gcttttgtccccccaagttt

SEQ ID NO: 1870 - DNA, 20 bp, synthetic construct
  misc_feature 1..20: note = chemically synthesized
  source 1..20: mol_type = other DNA
cccccaagttttggacccct

SEQ ID NO: 1871 - DNA, 20 bp, synthetic construct
  misc_feature 1..20: note = chemically synthesized
  source 1..20: mol_type = other DNA
ccccaagttttggaccccta

SEQ ID NO: 1872 - DNA, 20 bp, synthetic construct
  misc_feature 1..20: note = chemically synthesized
  source 1..20: mol_type = other DNA
cccaagttttggacccctaa

SEQ ID NO: 1873 - DNA, 20 bp, synthetic construct
  misc_feature 1..20: note = chemically synthesized
  source 1..20: mol_type = other DNA
aagttttggacccctaaggg

SEQ ID NO: 1874 - DNA, 20 bp, synthetic construct
  misc_feature 1..20: note = chemically synthesized
  source 1..20: mol_type = other DNA
tggacccctaagggaagaat

SEQ ID NO: 1875 - DNA, 20 bp, synthetic construct
  misc_feature 1..20: note = chemically synthesized
  source 1..20: mol_type = other DNA
cctaagggaagaatgagaaa

SEQ ID NO: 1876 - DNA, 20 bp, synthetic construct
  misc_feature 1..20: note = chemically synthesized
  source 1..20: mol_type = other DNA
aagggaagaatgagaaacgg

SEQ ID NO: 1877 - DNA, 20 bp, synthetic construct
  misc_feature 1..20: note = chemically synthesized
  source 1..20: mol_type = other DNA
tgagaaacggtggcccgtgt

SEQ ID NO: 1878 - DNA, 20 bp, synthetic construct
  misc_feature 1..20: note = chemically synthesized
  source 1..20: mol_type = other DNA
cggtggcccgtgtcagcccc

SEQ ID NO: 1879 - DNA, 20 bp, synthetic construct
  misc_feature 1..20: note = chemically synthesized
  source 1..20: mol_type = other DNA
cccgtgtcagcccctggctg

SEQ ID NO: 1880 - DNA, 20 bp, synthetic construct
  misc_feature 1..20: note = chemically synthesized
  source 1..20: mol_type = other DNA
ccgtgtcagcccctggctgc

SEQ ID NO: 1881 - DNA, 20 bp, synthetic construct
  misc_feature 1..20: note = chemically synthesized
  source 1..20: mol_type = other DNA
cgtgtcagcccctggctgca

SEQ ID NO: 1882 - DNA, 20 bp, synthetic construct
  misc_feature 1..20: note = chemically synthesized
  source 1..20: mol_type = other DNA
cctggctgcagggccccgtg

SEQ ID NO: 1883 - DNA, 20 bp, synthetic construct
  misc_feature 1..20: note = chemically synthesized
  source 1..20: mol_type = other DNA
tggctgcagggccccgtgca

SEQ ID NO: 1884 - DNA, 20 bp, synthetic construct
  misc_feature 1..20: note = chemically synthesized
  source 1..20: mol_type = other DNA
ggctgcagggccccgtgcag

SEQ ID NO: 1885 - DNA, 20 bp, synthetic construct
  misc_feature 1..20: note = chemically synthesized
  source 1..20: mol_type = other DNA
gctgcagggccccgtgcaga

SEQ ID NO: 1886 - DNA, 20 bp, synthetic construct
  misc_feature 1..20: note = chemically synthesized
  source 1..20: mol_type = other DNA
ctgcagggccccgtgcagag

SEQ ID NO: 1887 - DNA, 20 bp, synthetic construct
  misc_feature 1..20: note = chemically synthesized
  source 1..20: mol_type = other DNA
tgcagggccccgtgcagagg

SEQ ID NO: 1888 - DNA, 20 bp, synthetic construct
  misc_feature 1..20: note = chemically synthesized
  source 1..20: mol_type = other DNA
gccccgtgcagagggggcct

SEQ ID NO: 1889 - DNA, 20 bp, synthetic construct
  misc_feature 1..20: note = chemically synthesized
  source 1..20: mol_type = other DNA
cagagggggcctcagtgaac

SEQ ID NO: 1890 - DNA, 20 bp, synthetic construct
  misc_feature 1..20: note = chemically synthesized
  source 1..20: mol_type = other DNA
gagggggcctcagtgaactg

SEQ ID NO: 1891 - DNA, 20 bp, synthetic construct
  misc_feature 1..20: note = chemically synthesized
  source 1..20: mol_type = other DNA
ctcagtgaactggagtgtga

SEQ ID NO: 1892 - DNA, 20 bp, synthetic construct
  misc_feature 1..20: note = chemically synthesized
  source 1..20: mol_type = other DNA
tgaactggagtgtgacagcc

SEQ ID NO: 1893 - DNA, 20 bp, synthetic construct
  misc_feature 1..20: note = chemically synthesized
  source 1..20: mol_type = other DNA
gaactggagtgtgacagcct

SEQ ID NO: 1894 - DNA, 20 bp, synthetic construct
  misc_feature 1..20: note = chemically synthesized
  source 1..20: mol_type = other DNA
aactggagtgtgacagcctg

SEQ ID NO: 1895 - DNA, 20 bp, synthetic construct
  misc_feature 1..20: note = chemically synthesized
  source 1..20: mol_type = other DNA
gagtgtgacagcctggggcc

SEQ ID NO: 1896 - DNA, 20 bp, synthetic construct
  misc_feature 1..20: note = chemically synthesized
  source 1..20: mol_type = other DNA
agtgtgacagcctggggccc

SEQ ID NO: 1897 - DNA, 20 bp, synthetic construct
  misc_feature 1..20: note = chemically synthesized
  source 1..20: mol_type = other DNA
cagcctggggcccaggcaca

SEQ ID NO: 1898 - DNA, 20 bp, synthetic construct
  misc_feature 1..20: note = chemically synthesized
  source 1..20: mol_type = other DNA
agcctggggcccaggcacac

SEQ ID NO: 1899 - DNA, 20 bp, synthetic construct
  misc_feature 1..20: note = chemically synthesized
  source 1..20: mol_type = other DNA
ggcccaggcacacaggtgtg

SEQ ID NO: 1900 - DNA, 20 bp, synthetic construct
  misc_feature 1..20: note = chemically synthesized
  source 1..20: mol_type = other DNA
gtgcagctgtctcacccctc

SEQ ID NO: 1901 - DNA, 20 bp, synthetic construct
  misc_feature 1..20: note = chemically synthesized
  source 1..20: mol_type = other DNA
tgcagctgtctcacccctct

SEQ ID NO: 1902 - DNA, 20 bp, synthetic construct
  misc_feature 1..20: note = chemically synthesized
  source 1..20: mol_type = other DNA
cagctgtctcacccctctgg

SEQ ID NO: 1903 - DNA, 20 bp, synthetic construct
  misc_feature 1..20: note = chemically synthesized
  source 1..20: mol_type = other DNA
acccctctgggagtcccgcc

SEQ ID NO: 1904 - DNA, 20 bp, synthetic construct
  misc_feature 1..20: note = chemically synthesized
  source 1..20: mol_type = other DNA
cccctctgggagtcccgccc

SEQ ID NO: 1905 - DNA, 20 bp, synthetic construct
  misc_feature 1..20: note = chemically synthesized
  source 1..20: mol_type = other DNA
ggagtcccgcccaggcccct

SEQ ID NO: 1906 - DNA, 20 bp, synthetic construct
  misc_feature 1..20: note = chemically synthesized
  source 1..20: mol_type = other DNA
ccaggcccctgagtctgtcc

SEQ ID NO: 1907 - DNA, 20 bp, synthetic construct
  misc_feature 1..20: note = chemically synthesized
  source 1..20: mol_type = other DNA
cccctgagtctgtcccagca

SEQ ID NO: 1908 - DNA, 20 bp, synthetic construct
  misc_feature 1..20: note = chemically synthesized
  source 1..20: mol_type = other DNA
ccctgagtctgtcccagcac

SEQ ID NO: 1909 - DNA, 20 bp, synthetic construct
  misc_feature 1..20: note = chemically synthesized
  source 1..20: mol_type = other DNA
cctgagtctgtcccagcaca

SEQ ID NO: 1910 - DNA, 20 bp, synthetic construct
  misc_feature 1..20: note = chemically synthesized
  source 1..20: mol_type = other DNA
gagtctgtcccagcacaggg

SEQ ID NO: 1911 - DNA, 20 bp, synthetic construct
  misc_feature 1..20: note = chemically synthesized
  source 1..20: mol_type = other DNA
tggccttcctccaccctgca

SEQ ID NO: 1912 - DNA, 20 bp, synthetic construct
  misc_feature 1..20: note = chemically synthesized
  source 1..20: mol_type = other DNA
tcctccaccctgcatagccc

SEQ ID NO: 1913 - DNA, 20 bp, synthetic construct
  misc_feature 1..20: note = chemically synthesized
  source 1..20: mol_type = other DNA
cctccaccctgcatagccct

SEQ ID NO: 1914 - DNA, 20 bp, synthetic construct
  misc_feature 1..20: note = chemically synthesized
  source 1..20: mol_type = other DNA
cctgcatagccctgggccca

SEQ ID NO: 1915 - DNA, 20 bp, synthetic construct
  misc_feature 1..20: note = chemically synthesized
  source 1..20: mol_type = other DNA
ggcccacggcttcgttcctg

SEQ ID NO: 1916 - DNA, 20 bp, synthetic construct
  misc_feature 1..20: note = chemically synthesized
  source 1..20: mol_type = other DNA
cccacggcttcgttcctgca

SEQ ID NO: 1917 - DNA, 20 bp, synthetic construct
  misc_feature 1..20: note = chemically synthesized
  source 1..20: mol_type = other DNA
cgttcctgcagagtatctgc

SEQ ID NO: 1918 - DNA, 20 bp, synthetic construct
  misc_feature 1..20: note = chemically synthesized
  source 1..20: mol_type = other DNA
gttcctgcagagtatctgct

SEQ ID NO: 1919 - DNA, 20 bp, synthetic construct
  misc_feature 1..20: note = chemically synthesized
  source 1..20: mol_type = other DNA
ttcctgcagagtatctgctg

SEQ ID NO: 1920 - DNA, 20 bp, synthetic construct
  misc_feature 1..20: note = chemically synthesized
  source 1..20: mol_type = other DNA
ctgcagagtatctgctgggg

SEQ ID NO: 1921 - DNA, 20 bp, synthetic construct
  misc_feature 1..20: note = chemically synthesized
  source 1..20: mol_type = other DNA
tatctgctggggtggtttcc

SEQ ID NO: 1922 - DNA, 20 bp, synthetic construct
  misc_feature 1..20: note = chemically synthesized
  source 1..20: mol_type = other DNA
tggtttccgagcttgaccct

SEQ ID NO: 1923 - DNA, 20 bp, synthetic construct
  misc_feature 1..20: note = chemically synthesized
  source 1..20: mol_type = other DNA
tttccgagcttgacccttgg

SEQ ID NO: 1924 - DNA, 20 bp, synthetic construct
  misc_feature 1..20: note = chemically synthesized
  source 1..20: mol_type = other DNA
ttccgagcttgacccttgga

SEQ ID NO: 1925 - DNA, 20 bp, synthetic construct
  misc_feature 1..20: note = chemically synthesized
  source 1..20: mol_type = other DNA
gcttgacccttggaaggacc

SEQ ID NO: 1926 - DNA, 20 bp, synthetic construct
  misc_feature 1..20: note = chemically synthesized
  source 1..20: mol_type = other DNA
gacccttggaaggacctggc

SEQ ID NO: 1927 - DNA, 20 bp, synthetic construct
  misc_feature 1..20: note = chemically synthesized
  source 1..20: mol_type = other DNA
acccttggaaggacctggct

SEQ ID NO: 1928 - DNA, 20 bp, synthetic construct
  misc_feature 1..20: note = chemically synthesized
  source 1..20: mol_type = other DNA
ggaaggacctggctgggttt

SEQ ID NO: 1929 - DNA, 20 bp, synthetic construct
  misc_feature 1..20: note = chemically synthesized
  source 1..20: mol_type = other DNA
gaaggacctggctgggttta

SEQ ID NO: 1930 - DNA, 20 bp, synthetic construct
  misc_feature 1..20: note = chemically synthesized
  source 1..20: mol_type = other DNA
ggacctggctgggtttaagg

SEQ ID NO: 1931 - DNA, 20 bp, synthetic construct
  misc_feature 1..20: note = chemically synthesized
  source 1..20: mol_type = other DNA
gacctggctgggtttaaggc

SEQ ID NO: 1932 - DNA, 20 bp, synthetic construct
  misc_feature 1..20: note = chemically synthesized
  source 1..20: mol_type = other DNA
cctggctgggtttaaggcag

SEQ ID NO: 1933 - DNA, 20 bp, synthetic construct
  misc_feature 1..20: note = chemically synthesized
  source 1..20: mol_type = other DNA
ctggctgggtttaaggcagg

SEQ ID NO: 1934 - DNA, 20 bp, synthetic construct
  misc_feature 1..20: note = chemically synthesized
  source 1..20: mol_type = other DNA
tggctgggtttaaggcagga

SEQ ID NO: 1935 - DNA, 20 bp, synthetic construct
  misc_feature 1..20: note = chemically synthesized
  source 1..20: mol_type = other DNA
ggctgggtttaaggcaggag

SEQ ID NO: 1936 - DNA, 20 bp, synthetic construct
  misc_feature 1..20: note = chemically synthesized
  source 1..20: mol_type = other DNA
gggtttaaggcaggaggggc

SEQ ID NO: 1937 - DNA, 20 bp, synthetic construct
  misc_feature 1..20: note = chemically synthesized
  source 1..20: mol_type = other DNA
ggtttaaggcaggaggggct

SEQ ID NO: 1938 - DNA, 20 bp, synthetic construct
  misc_feature 1..20: note = chemically synthesized
  source 1..20: mol_type = other DNA
gtttaaggcaggaggggctg

SEQ ID NO: 1939 - DNA, 20 bp, synthetic construct
  misc_feature 1..20: note = chemically synthesized
  source 1..20: mol_type = other DNA
tttaaggcaggaggggctgg

SEQ ID NO: 1940 - DNA, 20 bp, synthetic construct
  misc_feature 1..20: note = chemically synthesized
  source 1..20: mol_type = other DNA
aggcaggaggggctgggggc

SEQ ID NO: 1941 - DNA, 20 bp, synthetic construct
  misc_feature 1..20: note = chemically synthesized
  source 1..20: mol_type = other DNA
ggcaggaggggctgggggcc

SEQ ID NO: 1942 - DNA, 20 bp, synthetic construct
  misc_feature 1..20: note = chemically synthesized
  source 1..20: mol_type = other DNA
gggctgggggccaggactcc

SEQ ID NO: 1943 - DNA, 20 bp, synthetic construct
  misc_feature 1..20: note = chemically synthesized
  source 1..20: mol_type = other DNA
ggccaggactcctggctctg

SEQ ID NO: 1944 - DNA, 20 bp, synthetic construct
  misc_feature 1..20: note = chemically synthesized
  source 1..20: mol_type = other DNA
gccaggactcctggctctga

SEQ ID NO: 1945 - DNA, 20 bp, synthetic construct
  misc_feature 1..20: note = chemically synthesized
  source 1..20: mol_type = other DNA
caggactcctggctctgaag

SEQ ID NO: 1946 - DNA, 20 bp, synthetic construct
  misc_feature 1..20: note = chemically synthesized
  source 1..20: mol_type = other DNA
aggactcctggctctgaagg

SEQ ID NO: 1947 - DNA, 20 bp, synthetic construct
  misc_feature 1..20: note = chemically synthesized
  source 1..20: mol_type = other DNA
gactcctggctctgaaggag

SEQ ID NO: 1948 - DNA, 20 bp, synthetic construct
  misc_feature 1..20: note = chemically synthesized
  source 1..20: mol_type = other DNA
actcctggctctgaaggagg

SEQ ID NO: 1949 - DNA, 20 bp, synthetic construct
  misc_feature 1..20: note = chemically synthesized
  source 1..20: mol_type = other DNA
ctcctggctctgaaggagga

SEQ ID NO: 1950 - DNA, 20 bp, synthetic construct
  misc_feature 1..20: note = chemically synthesized
  source 1..20: mol_type = other DNA
tcctggctctgaaggaggag

SEQ ID NO: 1951 - DNA, 20 bp, synthetic construct
  misc_feature 1..20: note = chemically synthesized
  source 1..20: mol_type = other DNA
ggctctgaaggaggaggggc

SEQ ID NO: 1952 - DNA, 20 bp, synthetic construct
  misc_feature 1..20: note = chemically synthesized
  source 1..20: mol_type = other DNA
aggggctggaacctcttccc

SEQ ID NO: 1953 - DNA, 20 bp, synthetic construct
  misc_feature 1..20: note = chemically synthesized
  source 1..20: mol_type = other DNA
tggaacctcttccctagtct

SEQ ID NO: 1954 - DNA, 20 bp, synthetic construct
  misc_feature 1..20: note = chemically synthesized
  source 1..20: mol_type = other DNA
ctcttccctagtctgagcac

SEQ ID NO: 1955 - DNA, 20 bp, synthetic construct
  misc_feature 1..20: note = chemically synthesized
  source 1..20: mol_type = other DNA
ttccctagtctgagcactgg

SEQ ID NO: 1956 - DNA, 20 bp, synthetic construct
  misc_feature 1..20: note = chemically synthesized
  source 1..20: mol_type = other DNA
agcactggaagcgccacctg

SEQ ID NO: 1957 - DNA, 20 bp, synthetic construct
  misc_feature 1..20: note = chemically synthesized
  source 1..20: mol_type = other DNA
gcactggaagcgccacctgt

SEQ ID NO: 1958 - DNA, 20 bp, synthetic construct
  misc_feature 1..20: note = chemically synthesized
  source 1..20: mol_type = other DNA
ctggaagcgccacctgtggg

SEQ ID NO: 1959 - DNA, 20 bp, synthetic construct
  misc_feature 1..20: note = chemically synthesized
  source 1..20: mol_type = other DNA
gcgccacctgtgggtggtga

SEQ ID NO: 1960 - DNA, 20 bp, synthetic construct
  misc_feature 1..20: note = chemically synthesized
  source 1..20: mol_type = other DNA
cgccacctgtgggtggtgac

SEQ ID NO: 1961 - DNA, 20 bp, synthetic construct
  misc_feature 1..20: note = chemically synthesized
  source 1..20: mol_type = other DNA
gccacctgtgggtggtgacg

SEQ ID NO: 1962 - DNA, 20 bp, synthetic construct
  misc_feature 1..20: note = chemically synthesized
  source 1..20: mol_type = other DNA
ccacctgtgggtggtgacgg

SEQ ID NO: 1963 - DNA, 20 bp, synthetic construct
  misc_feature 1..20: note = chemically synthesized
  source 1..20: mol_type = other DNA
gggggttttgccgtgtctaa

SEQ ID NO: 1964 - DNA, 20 bp, synthetic construct
  misc_feature 1..20: note = chemically synthesized
  source 1..20: mol_type = other DNA
ggggttttgccgtgtctaac

SEQ ID NO: 1965 - DNA, 20 bp, synthetic construct
  misc_feature 1..20: note = chemically synthesized
  source 1..20: mol_type = other DNA
cgtgtctaacaggtaccatg

SEQ ID NO: 1966 - DNA, 20 bp, synthetic construct
  misc_feature 1..20: note = chemically synthesized
  source 1..20: mol_type = other DNA
gtgtctaacaggtaccatgt

SEQ ID NO: 1967 - DNA, 20 bp, synthetic construct
  misc_feature 1..20: note = chemically synthesized
  source 1..20: mol_type = other DNA
tgtctaacaggtaccatgtg

SEQ ID NO: 1968 - DNA, 20 bp, synthetic construct
  misc_feature 1..20: note = chemically synthesized
  source 1..20: mol_type = other DNA
ccatgtggggttcccgcacc

SEQ ID NO: 1969 - DNA, 20 bp, synthetic construct
  misc_feature 1..20: note = chemically synthesized
  source 1..20: mol_type = other DNA
tggggttcccgcacccagat

SEQ ID NO: 1970 - DNA, 20 bp, synthetic construct
  misc_feature 1..20: note = chemically synthesized
  source 1..20: mol_type = other DNA
ggttcccgcacccagatgag

SEQ ID NO: 1971 - DNA, 20 bp, synthetic construct
  misc_feature 1..20: note = chemically synthesized
  source 1..20: mol_type = other DNA
ccccgttcacttcctgtttg

SEQ ID NO: 1972 - DNA, 20 bp, synthetic construct
  misc_feature 1..20: note = chemically synthesized
  source 1..20: mol_type = other DNA
gttcacttcctgtttgcaga

SEQ ID NO: 1973 - DNA, 20 bp, synthetic construct
  misc_feature 1..20: note = chemically synthesized
  source 1..20: mol_type = other DNA
acttcctgtttgcagatagc

SEQ ID NO: 1974 - DNA, 20 bp, synthetic construct
  misc_feature 1..20: note = chemically synthesized
  source 1..20: mol_type = other DNA
cttcctgtttgcagatagcc

SEQ ID NO: 1975 - DNA, 20 bp, synthetic construct
  misc_feature 1..20: note = chemically synthesized
  source 1..20: mol_type = other DNA
tcctgtttgcagatagccag

SEQ ID NO: 1976 - DNA, 20 bp, synthetic construct
  misc_feature 1..20: note = chemically synthesized
  source 1..20: mol_type = other DNA
gatagccaggagtcctttcg

SEQ ID NO: 1977 - DNA, 20 bp, synthetic construct
  misc_feature 1..20: note = chemically synthesized
  source 1..20: mol_type = other DNA
gtcctttcgtggtttccact

SEQ ID NO: 1978 - DNA, 20 bp, synthetic construct
  misc_feature 1..20: note = chemically synthesized
  source 1..20: mol_type = other DNA
gtggtttccactgagcactg

SEQ ID NO: 1979 - DNA, 20 bp, synthetic construct
  misc_feature 1..20: note = chemically synthesized
  source 1..20: mol_type = other DNA
tggtttccactgagcactga

SEQ ID NO: 1980 - DNA, 20 bp, synthetic construct
  misc_feature 1..20: note = chemically synthesized
  source 1..20: mol_type = other DNA
tccactgagcactgaaggcc

SEQ ID NO: 1981 - DNA, 20 bp, synthetic construct
  misc_feature 1..20: note = chemically synthesized
  source 1..20: mol_type = other DNA
ctgagcactgaaggcctggc

SEQ ID NO: 1982 - DNA, 20 bp, synthetic construct
  misc_feature 1..20: note = chemically synthesized
  source 1..20: mol_type = other DNA
ggcctggccggcctgaccac

SEQ ID NO: 1983 - DNA, 20 bp, synthetic construct
  misc_feature 1..20: note = chemically synthesized
  source 1..20: mol_type = other DNA
gcctggccggcctgaccact

SEQ ID NO: 1984 - DNA, 20 bp, synthetic construct
  misc_feature 1..20: note = chemically synthesized
  source 1..20: mol_type = other DNA
cggcctgaccactgggcaac

SEQ ID NO: 1985 - DNA, 20 bp, synthetic construct
  misc_feature 1..20: note = chemically synthesized
  source 1..20: mol_type = other DNA
ggcctgaccactgggcaacc

SEQ ID NO: 1986 - DNA, 20 bp, synthetic construct
  misc_feature 1..20: note = chemically synthesized
  source 1..20: mol_type = other DNA
gcaaccaggcgtatcttaaa

SEQ ID NO: 1987 - DNA, 20 bp, synthetic construct
  misc_feature 1..20: note = chemically synthesized
  source 1..20: mol_type = other DNA
ccaggcgtatcttaaacagc

SEQ ID NO: 1988 - DNA, 20 bp, synthetic construct
  misc_feature 1..20: note = chemically synthesized
  source 1..20: mol_type = other DNA
ggcgtatcttaaacagccag

SEQ ID NO: 1989 - DNA, 20 bp, synthetic construct
  misc_feature 1..20: note = chemically synthesized
  source 1..20: mol_type = other DNA
tatcttaaacagccagtggc

SEQ ID NO: 1990 - DNA, 20 bp, synthetic construct
  misc_feature 1..20: note = chemically synthesized
  source 1..20: mol_type = other DNA
tcttaaacagccagtggcca

SEQ ID NO: 1991 - DNA, 20 bp, synthetic construct
  misc_feature 1..20: note = chemically synthesized
  source 1..20: mol_type = other DNA
cttaaacagccagtggccag

SEQ ID NO: 1992 - DNA, 20 bp, synthetic construct
  misc_feature 1..20: note = chemically synthesized
  source 1..20: mol_type = other DNA
agccagtggccagaggctgt

SEQ ID NO: 1993 - DNA, 20 bp, synthetic construct
  misc_feature 1..20: note = chemically synthesized
  source 1..20: mol_type = other DNA
gccagtggccagaggctgtt

SEQ ID NO: 1994 - DNA, 20 bp, synthetic construct
  misc_feature 1..20: note = chemically synthesized
  source 1..20: mol_type = other DNA
ggtcattttccccactgtcc

SEQ ID NO: 1995 - DNA, 20 bp, synthetic construct
  misc_feature 1..20: note = chemically synthesized
  source 1..20: mol_type = other DNA
ctgtcctagcaccgtgtccc

SEQ ID NO: 1996 - DNA, 20 bp, synthetic construct
  misc_feature 1..20: note = chemically synthesized
  source 1..20: mol_type = other DNA
tgtccctggatctgttttcg

SEQ ID NO: 1997 - DNA, 20 bp, synthetic construct
  misc_feature 1..20: note = chemically synthesized
  source 1..20: mol_type = other DNA
tctgttttcgtggctccctc

SEQ ID NO: 1998 - DNA, 20 bp, synthetic construct
  misc_feature 1..20: note = chemically synthesized
  source 1..20: mol_type = other DNA
tgttttcgtggctccctctg

SEQ ID NO: 1999 - DNA, 20 bp, synthetic construct
  misc_feature 1..20: note = chemically synthesized
  source 1..20: mol_type = other DNA
cctctggagtcccgacttgc

SEQ ID NO: 2000 - DNA, 20 bp, synthetic construct
  misc_feature 1..20: note = chemically synthesized
  source 1..20: mol_type = other DNA
ctctggagtcccgacttgct

SEQ ID NO: 2001 - DNA, 20 bp, synthetic construct
  misc_feature 1..20: note = chemically synthesized
  source 1..20: mol_type = other DNA
cccgacttgctgggacaccg

SEQ ID NO: 2002 - DNA, 20 bp, synthetic construct
  misc_feature 1..20: note = chemically synthesized
  source 1..20: mol_type = other DNA
acttgctgggacaccgtggc

SEQ ID NO: 2003 - DNA, 20 bp, synthetic construct
  misc_feature 1..20: note = chemically synthesized
  source 1..20: mol_type = other DNA
cttgctgggacaccgtggct

SEQ ID NO: 2004 - DNA, 20 bp, synthetic construct
  misc_feature 1..20: note = chemically synthesized
  source 1..20: mol_type = other DNA
ttgctgggacaccgtggctg

SEQ ID NO: 2005 - DNA, 20 bp, synthetic construct
  misc_feature 1..20: note = chemically synthesized
  source 1..20: mol_type = other DNA
ctgggacaccgtggctgggg

SEQ ID NO: 2006 - DNA, 20 bp, synthetic construct
  misc_feature 1..20: note = chemically synthesized
  source 1..20: mol_type = other DNA
tgggacaccgtggctggggt

SEQ ID NO: 2007 - DNA, 20 bp, synthetic construct
  misc_feature 1..20: note = chemically synthesized
  source 1..20: mol_type = other DNA
caccgtggctggggtaggtg

SEQ ID NO: 2008 - DNA, 20 bp, synthetic construct
  misc_feature 1..20: note = chemically synthesized
  source 1..20: mol_type = other DNA
gctggggtaggtgcggctga

SEQ ID NO: 2009 - DNA, 20 bp, synthetic construct
  misc_feature 1..20: note = chemically synthesized
  source 1..20: mol_type = other DNA
tgacggctgtttcccacccc

SEQ ID NO: 2010 - DNA, 20 bp, synthetic construct
  misc_feature 1..20: note = chemically synthesized
  source 1..20: mol_type = other DNA
gacggctgtttcccaccccc

SEQ ID NO: 2011 - DNA, 20 bp, synthetic construct
  misc_feature 1..20: note = chemically synthesized
  source 1..20: mol_type = other DNA
acccccaggcctgcattgat

SEQ ID NO: 2012 - DNA, 20 bp, synthetic construct
  misc_feature 1..20: note = chemically synthesized
  source 1..20: mol_type = other DNA
ggcctgcattgatgagaacc

SEQ ID NO: 2013 - DNA, 20 bp, synthetic construct
  misc_feature 1..20: note = chemically synthesized
  source 1..20: mol_type = other DNA
cctgcattgatgagaacctg

SEQ ID NO: 2014 - DNA, 20 bp, synthetic construct
  misc_feature 1..20: note = chemically synthesized
  source 1..20: mol_type = other DNA
ctgcattgatgagaacctgg

SEQ ID NO: 2015 - DNA, 20 bp, synthetic construct
  misc_feature 1..20: note = chemically synthesized
  source 1..20: mol_type = other DNA
cattgatgagaacctggagg

SEQ ID NO: 2016 - DNA, 20 bp, synthetic construct
  misc_feature 1..20: note = chemically synthesized
  source 1..20: mol_type = other DNA
cctggaggtggtgcgcttct

SEQ ID NO: 2017 - DNA, 20 bp, synthetic construct
  misc_feature 1..20: note = chemically synthesized
  source 1..20: mol_type = other DNA
ggaggtggtgcgcttcttgg

SEQ ID NO: 2018 - DNA, 20 bp, synthetic construct
  misc_feature 1..20: note = chemically synthesized
  source 1..20: mol_type = other DNA
aggtggtgcgcttcttggtg

SEQ ID NO: 2019 - DNA, 20 bp, synthetic construct
  misc_feature 1..20: note = chemically synthesized
  source 1..20: mol_type = other DNA
tggtgcgcttcttggtggag

SEQ ID NO: 2020 - DNA, 20 bp, synthetic construct
  misc_feature 1..20: note = chemically synthesized
  source 1..20: mol_type = other DNA
ggtgcgcttcttggtggagc

SEQ ID NO: 2021 - DNA, 20 bp, synthetic construct
  misc_feature 1..20: note = chemically synthesized
  source 1..20: mol_type = other DNA
gtgcgcttcttggtggagca

SEQ ID NO: 2022 - DNA, 20 bp, synthetic construct
  misc_feature 1..20: note = chemically synthesized
  source 1..20: mol_type = other DNA
agcagggcgccactgtgaac

SEQ ID NO: 2023 - DNA, 20 bp, synthetic construct
  misc_feature 1..20: note = chemically synthesized
  source 1..20: mol_type = other DNA
gcagggcgccactgtgaacc

SEQ ID NO: 2024 - DNA, 20 bp, synthetic construct
  misc_feature 1..20: note = chemically synthesized
  source 1..20: mol_type = other DNA
gggcgccactgtgaaccagg

SEQ ID NO: 2025 - DNA, 20 bp, synthetic construct
  misc_feature 1..20: note = chemically synthesized
  source 1..20: mol_type = other DNA
ctgtgaaccaggcagacaac

SEQ ID NO: 2026 - DNA, 20 bp, synthetic construct
  misc_feature 1..20: note = chemically synthesized
  source 1..20: mol_type = other DNA
tgtgaaccaggcagacaacg

SEQ ID NO: 2027 - DNA, 20 bp, synthetic construct
  misc_feature 1..20: note = chemically synthesized
  source 1..20: mol_type = other DNA
gtgaaccaggcagacaacga

SEQ ID NO: 2028 - DNA, 20 bp, synthetic construct
  misc_feature 1..20: note = chemically synthesized
  source 1..20: mol_type = other DNA
accaggcagacaacgagggc

SEQ ID NO: 2029 - DNA, 20 bp, synthetic construct
  misc_feature 1..20: note = chemically synthesized
  source 1..20: mol_type = other DNA
gggctggacgccactgcacg

SEQ ID NO: 2030 - DNA, 20 bp, synthetic construct
  misc_feature 1..20: note = chemically synthesized
  source 1..20: mol_type = other DNA
ctgcacgtggccgcctcctg

SEQ ID NO: 2031 - DNA, 20 bp, synthetic construct
  misc_feature 1..20: note = chemically synthesized
  source 1..20: mol_type = other DNA
ggccgcctcctgtggctacc

SEQ ID NO: 2032 - DNA, 20 bp, synthetic construct
  misc_feature 1..20: note = chemically synthesized
  source 1..20: mol_type = other DNA
tgtggctacctagatatcgc

SEQ ID NO: 2033 - DNA, 20 bp, synthetic construct
  misc_feature 1..20: note = chemically synthesized
  source 1..20: mol_type = other DNA
gttctcatcaatgcaggcct

SEQ ID NO: 2034 - DNA, 20 bp, synthetic construct
  misc_feature 1..20: note = chemically synthesized
  source 1..20: mol_type = other DNA
gaagggagggggcttctcat

SEQ ID NO: 2035 - DNA, 20 bp, synthetic construct
  misc_feature 1..20: note = chemically synthesized
  source 1..20: mol_type = other DNA
gcccctcctccttcagagcc

SEQ ID NO: 2036 - DNA, 20 bp, synthetic construct
  misc_feature 1..20: note = chemically synthesized
  source 1..20: mol_type = other DNA
aaacccagccaggtccttcc

SEQ ID NO: 2037 - DNA, 20 bp, synthetic construct
  misc_feature 1..20: note = chemically synthesized
  source 1..20: mol_type = other DNA
gccgtgggcccagggctatg

SEQ ID NO: 2038 - DNA, 20 bp, synthetic construct
  misc_feature 1..20: note = chemically synthesized
  source 1..20: mol_type = other DNA
ggcctgggcgggactcccag

SEQ ID NO: 2039 - DNA, 20 bp, synthetic construct
  misc_feature 1..20: note = chemically synthesized
  source 1..20: mol_type = other DNA
ccgtttctcattcttccctt

SEQ ID NO: 2040 - DNA, 20 bp, synthetic construct
  misc_feature 1..20: note = chemically synthesized
  source 1..20: mol_type = other DNA
gggacaaaagccgaagtcca

SEQ ID NO: 2041 - DNA, 20 bp, synthetic construct
  misc_feature 1..20: note = chemically synthesized
  source 1..20: mol_type = other DNA
tgccccaggccttgtggaca

SEQ ID NO: 2042 - DNA, 20 bp, synthetic construct
  misc_feature 1..20: note = chemically synthesized
  source 1..20: mol_type = other DNA
acctgaactggagctgagga

SEQ ID NO: 2043 - DNA, 20 bp, synthetic construct
  misc_feature 1..20: note = chemically synthesized
  source 1..20: mol_type = other DNA
aagctaaactcctagatcca

SEQ ID NO: 2044 - DNA, 20 bp, synthetic construct
  misc_feature 1..20: note = chemically synthesized
  source 1..20: mol_type = other DNA
ggccgcacgtgccctgggaa

SEQ ID NO: 2045 - DNA, 20 bp, synthetic construct
  misc_feature 1..20: note = chemically synthesized
  source 1..20: mol_type = other DNA
ggcctgggcaccagggactc

SEQ ID NO: 2046 - DNA, 20 bp, synthetic construct
  misc_feature 1..20: note = chemically synthesized
  source 1..20: mol_type = other DNA
gcccttccgccctcagatga

SEQ ID NO: 2047 - DNA, 20 bp, synthetic construct
  misc_feature 1..20: note = chemically synthesized
  source 1..20: mol_type = other DNA
gcctctccccattcagaccc

SEQ ID NO: 2048 - DNA, 20 bp, synthetic construct
  misc_feature 1..20: note = chemically synthesized
  source 1..20: mol_type = other DNA
gcccctcctccctcagaccc

SEQ ID NO: 2049 - DNA, 20 bp, synthetic construct
  misc_feature 1..20: note = chemically synthesized
  source 1..20: mol_type = other DNA
gcccctcctccctcggaccc

SEQ ID NO: 2050 - DNA, 20 bp, synthetic construct
  misc_feature 1..20: note = chemically synthesized
  source 1..20: mol_type = other DNA
gtccctccaccctcagaccc

SEQ ID NO: 2051 - DNA, 20 bp, synthetic construct
  misc_feature 1..20: note = chemically synthesized
  source 1..20: mol_type = other DNA
gcccctcctccctcggaccc

SEQ ID NO: 2052 - DNA, 20 bp, synthetic construct
  misc_feature 1..20: note = chemically synthesized
  source 1..20: mol_type = other DNA
gctcttctctgttcagccct

SEQ ID NO: 2053 - DNA, 20 bp, synthetic construct
  misc_feature 1..20: note = chemically synthesized
  source 1..20: mol_type = other DNA
cccctagccactaaggcaat

SEQ ID NO: 2054 - DNA, 20 bp, synthetic construct
  misc_feature 1..20: note = chemically synthesized
  source 1..20: mol_type = other DNA
cactaaggcaattggggtgc

SEQ ID NO: 2055 - DNA, 20 bp, synthetic construct
  misc_feature 1..20: note = chemically synthesized
  source 1..20: mol_type = other DNA
ttggggtgcaggaatggggg

SEQ ID NO: 2056 - DNA, 20 bp, synthetic construct
  misc_feature 1..20: note = chemically synthesized
  source 1..20: mol_type = other DNA
aagtggttgataaacccacg

SEQ ID NO: 2057 - DNA, 20 bp, synthetic construct
  misc_feature 1..20: note = chemically synthesized
  source 1..20: mol_type = other DNA
gcttggggacctgcctggag

SEQ ID NO: 2058 - DNA, 20 bp, synthetic construct
  misc_feature 1..20: note = chemically synthesized
  source 1..20: mol_type = other DNA
cccaggtggagaaactggcc

SEQ ID NO: 2059 - DNA, 20 bp, synthetic construct
  misc_feature 1..20: note = chemically synthesized
  source 1..20: mol_type = other DNA
ggagaaactggccgggaatc

SEQ ID NO: 2060 - DNA, 20 bp, synthetic construct
  misc_feature 1..20: note = chemically synthesized
  source 1..20: mol_type = other DNA
atccctgttttcctaggact

SEQ ID NO: 2061 - DNA, 20 bp, synthetic construct
  misc_feature 1..20: note = chemically synthesized
  source 1..20: mol_type = other DNA
ttggccacgtaacctgagaa

SEQ ID NO: 2062 - DNA, 20 bp, synthetic construct
  misc_feature 1..20: note = chemically synthesized
  source 1..20: mol_type = other DNA
ccccaatgctccaggcctcc

SEQ ID NO: 2063 - DNA, 20 bp, synthetic construct
  misc_feature 1..20: note = chemically synthesized
  source 1..20: mol_type = other DNA
aggcctcctgggataccccg

SEQ ID NO: 2064 - DNA, 20 bp, synthetic construct
  misc_feature 1..20: note = chemically synthesized
  source 1..20: mol_type = other DNA
ctcctgggataccccgaaga

SEQ ID NO: 2065 - DNA, 20 bp, synthetic construct
  misc_feature 1..20: note = chemically synthesized
  source 1..20: mol_type = other DNA
cagtcaccccacagttggag

SEQ ID NO: 2066 - DNA, 20 bp, synthetic construct
  misc_feature 1..20: note = chemically synthesized
  source 1..20: mol_type = other DNA
ggcagcctggtagacagggc

SEQ ID NO: 2067 - DNA, 20 bp, synthetic construct
  misc_feature 1..20: note = chemically synthesized
  source 1..20: mol_type = other DNA
agggctggggtggcctctcg

SEQ ID NO: 2068 - DNA, 20 bp, synthetic construct
  misc_feature 1..20: note = chemically synthesized
  source 1..20: mol_type = other DNA
taggtggcctggggcctctg

SEQ ID NO: 2069 - DNA, 20 bp, synthetic construct
  misc_feature 1..20: note = chemically synthesized
  source 1..20: mol_type = other DNA
tctgggggatgcaggggaag

SEQ ID NO: 2070 - DNA, 20 bp, synthetic construct
  misc_feature 1..20: note = chemically synthesized
  source 1..20: mol_type = other DNA
gaagggggatgcaggggaac

SEQ ID NO: 2071 - DNA, 20 bp, synthetic construct
  misc_feature 1..20: note = chemically synthesized
  source 1..20: mol_type = other DNA
cgggaccctgctctgggcgg

SEQ ID NO: 2072 - DNA, 20 bp, synthetic construct
  misc_feature 1..20: note = chemically synthesized
  source 1..20: mol_type = other DNA
tggggactctttaaggaaag

SEQ ID NO: 2073 - DNA, 20 bp, synthetic construct
  misc_feature 1..20: note = chemically synthesized
  source 1..20: mol_type = other DNA
gaaggatggagaaagagaaa

SEQ ID NO: 2074 - DNA, 20 bp, synthetic construct
  misc_feature 1..20: note = chemically synthesized
  source 1..20: mol_type = other DNA
ggacgcaccattctcacaaa

SEQ ID NO: 2075 - DNA, 20 bp, synthetic construct
  misc_feature 1..20: note = chemically synthesized
  source 1..20: mol_type = other DNA
gtgtaaggaagctgcagcac

SEQ ID NO: 2076 - DNA, 20 bp, synthetic construct
  misc_feature 1..20: note = chemically synthesized
  source 1..20: mol_type = other DNA
gagcagctcaggttctggga

SEQ ID NO: 2077 - DNA, 20 bp, synthetic construct
  misc_feature 1..20: note = chemically synthesized
  source 1..20: mol_type = other DNA
ggttctgggagagggtagcg

SEQ ID NO: 2078 - DNA, 20 bp, synthetic construct
  misc_feature 1..20: note = chemically synthesized
  source 1..20: mol_type = other DNA
ccctgccaagctctccctcc

SEQ ID NO: 2079 - DNA, 20 bp, synthetic construct
  misc_feature 1..20: note = chemically synthesized
  source 1..20: mol_type = other DNA
gagagatggctccaggaaat

SEQ ID NO: 2080 - DNA, 20 bp, synthetic construct
  misc_feature 1..20: note = chemically synthesized
  source 1..20: mol_type = other DNA
tgggggtgtgtcaccagata

SEQ ID NO: 2081 - DNA, 20 bp, synthetic construct
  misc_feature 1..20: note = chemically synthesized
  source 1..20: mol_type = other DNA
gaatctgcctaacaggaggt

SEQ ID NO: 2082 - DNA, 20 bp, synthetic construct
  misc_feature 1..20: note = chemically synthesized
  source 1..20: mol_type = other DNA
gactaggaaggaggaggcct

SEQ ID NO: 2083 - DNA, 20 bp, synthetic construct
  misc_feature 1..20: note = chemically synthesized
  source 1..20: mol_type = other DNA
tgtccctagtggccccactg

SEQ ID NO: 2084 - DNA, 20 bp, synthetic construct
  misc_feature 1..20: note = chemically synthesized
  source 1..20: mol_type = other DNA
gagccacattaaccggccct

SEQ ID NO: 2085 - DNA, 20 bp, synthetic construct
  misc_feature 1..20: note = chemically synthesized
  source 1..20: mol_type = other DNA
gtggtcccagctcggggaca

SEQ ID NO: 2086 - DNA, 20 bp, synthetic construct
  misc_feature 1..20: note = chemically synthesized
  source 1..20: mol_type = other DNA
cctgaagtggacataggggc

SEQ ID NO: 2087 - DNA, 20 bp, synthetic construct
  misc_feature 1..20: note = chemically synthesized
  source 1..20: mol_type = other DNA
gcacagactagagaggtaag

SEQ ID NO: 2088 - DNA, 20 bp, synthetic construct
  misc_feature 1..20: note = chemically synthesized
  source 1..20: mol_type = other DNA
aggggagctgcccaaatgaa

SEQ ID NO: 2089 - DNA, 20 bp, synthetic construct
  misc_feature 1..20: note = chemically synthesized
  source 1..20: mol_type = other DNA
tgaaaggagtgagaggtgac

SEQ ID NO: 2090 - DNA, 20 bp, synthetic construct
  misc_feature 1..20: note = chemically synthesized
  source 1..20: mol_type = other DNA
gacccgaatccacaggagaa

SEQ ID NO: 2091 - DNA, 20 bp, synthetic construct
  misc_feature 1..20: note = chemically synthesized
  source 1..20: mol_type = other DNA
tgtccaggcaaagaaagcaa

SEQ ID NO: 2092 - DNA, 20 bp, synthetic construct
  misc_feature 1..20: note = chemically synthesized
  source 1..20: mol_type = other DNA
ggtggctaaagccagggaga

SEQ ID NO: 2093 - DNA, 20 bp, synthetic construct
  misc_feature 1..20: note = chemically synthesized
  source 1..20: mol_type = other DNA
gccagggagacggggtactt

SEQ ID NO: 2094 - DNA, 20 bp, synthetic construct
  misc_feature 1..20: note = chemically synthesized
  source 1..20: mol_type = other DNA
gagaaggaaaagggaaccca

SEQ ID NO: 2095 - DNA, 20 bp, synthetic construct
  misc_feature 1..20: note = chemically synthesized
  source 1..20: mol_type = other DNA
cccagcgagtgaagacggca

SEQ ID NO: 2096 - DNA, 20 bp, synthetic construct
  misc_feature 1..20: note = chemically synthesized
  source 1..20: mol_type = other DNA
cgagtgaagacggcatgggg

SEQ ID NO: 2097 - DNA, 20 bp, synthetic construct
  misc_feature 1..20: note = chemically synthesized
  source 1..20: mol_type = other DNA
ggagaggacccagacacggg

SEQ ID NO: 2098 - DNA, 20 bp, synthetic construct
  misc_feature 1..20: note = chemically synthesized
  source 1..20: mol_type = other DNA
agcagagagcaaggggaaga

SEQ ID NO: 2099 - DNA, 20 bp, synthetic construct
  misc_feature 1..20: note = chemically synthesized
  source 1..20: mol_type = other DNA
acctgaaggaggcggcaggg

SEQ ID NO: 2100 - DNA, 20 bp, synthetic construct
  misc_feature 1..20: note = chemically synthesized
  source 1..20: mol_type = other DNA
agcggcacaggcccagggga

SEQ ID NO: 2101 - DNA, 20 bp, synthetic construct
  misc_feature 1..20: note = chemically synthesized
  source 1..20: mol_type = other DNA
gagacggcagcgttagaggg

SEQ ID NO: 2102 - DNA, 20 bp, synthetic construct
  misc_feature 1..20: note = chemically synthesized
  source 1..20: mol_type = other DNA
ggaagaggggaagtcgaggg

SEQ ID NO: 2103 - DNA, 20 bp, synthetic construct
  misc_feature 1..20: note = chemically synthesized
  source 1..20: mol_type = other DNA
gggatggtaaggaggactgc

SEQ ID NO: 2104 - DNA, 20 bp, synthetic construct
  misc_feature 1..20: note = chemically synthesized
  source 1..20: mol_type = other DNA
aaagcgactccaatgcggaa

SEQ ID NO: 2105 - DNA, 20 bp, synthetic construct
  misc_feature 1..20: note = chemically synthesized
  source 1..20: mol_type = other DNA
cggaagagagtaggtcgaag

SEQ ID NO: 2106 - DNA, 20 bp, synthetic construct
  misc_feature 1..20: note = chemically synthesized
  source 1..20: mol_type = other DNA
aatggtaaggaggcctgggg

SEQ ID NO: 2107 - DNA, 20 bp, synthetic construct
  misc_feature 1..20: note = chemically synthesized
  source 1..20: mol_type = other DNA
ctggggcagagtggtcagca

SEQ ID NO: 2108 - DNA, 20 bp, synthetic construct
  misc_feature 1..20: note = chemically synthesized
  source 1..20: mol_type = other DNA
aagcggctccaattcggaag

SEQ ID NO: 2109 - DNA, 20 bp, synthetic construct
  misc_feature 1..20: note = chemically synthesized
  source 1..20: mol_type = other DNA
cggaagtggggtggtcgaag

SEQ ID NO: 2110 - DNA, 20 bp, synthetic construct
  misc_feature 1..20: note = chemically synthesized
  source 1..20: mol_type = other DNA
aatggtaagggggactggga

SEQ ID NO: 2111 - DNA, 20 bp, synthetic construct
  misc_feature 1..20: note = chemically synthesized
  source 1..20: mol_type = other DNA
actgggacggggtgtcagca

SEQ ID NO: 2112 - DNA, 20 bp, synthetic construct
  misc_feature 1..20: note = chemically synthesized
  source 1..20: mol_type = other DNA
ccagggccaggaacgacggg

SEQ ID NO: 2113 - DNA, 20 bp, synthetic construct
  misc_feature 1..20: note = chemically synthesized
  source 1..20: mol_type = other DNA
cgagactggcaacggggaag

SEQ ID NO: 2114 - DNA, 20 bp, synthetic construct
  misc_feature 1..20: note = chemically synthesized
  source 1..20: mol_type = other DNA
atgccccaggtggcgcagca

SEQ ID NO: 2115 - DNA, 20 bp, synthetic construct
  misc_feature 1..20: note = chemically synthesized
  source 1..20: mol_type = other DNA
gctgataccgtcggcgttgg

SEQ ID NO: 2116 - DNA, 20 bp, synthetic construct
  misc_feature 1..20: note = chemically synthesized
  source 1..20: mol_type = other DNA
gcgggcgggcggcggcgcgg

SEQ ID NO: 2117 - DNA, 20 bp, synthetic construct
  misc_feature 1..20: note = chemically synthesized
  source 1..20: mol_type = other DNA
gtcgagctcggcgccggggc

SEQ ID NO: 2118 - DNA, 20 bp, synthetic construct
  misc_feature 1..20: note = chemically synthesized
  source 1..20: mol_type = other DNA
cgggcggtgcgatgtccgga

SEQ ID NO: 2119 - DNA, 20 bp, synthetic construct
  misc_feature 1..20: note = chemically synthesized
  source 1..20: mol_type = other DNA
cgtccgcttcgagcgcgccg

SEQ ID NO: 2120 - DNA, 20 bp, synthetic construct
  misc_feature 1..20: note = chemically synthesized
  source 1..20: mol_type = other DNA
ccccttcgaccaccccactt

SEQ ID NO: 2121 - DNA, 20 bp, synthetic construct
  misc_feature 1..20: note = chemically synthesized
  source 1..20: mol_type = other DNA
cgacctactctcttccgcat

SEQ ID NO: 2122 - DNA, 20 bp, synthetic construct
  misc_feature 1..20: note = chemically synthesized
  source 1..20: mol_type = other DNA
gcgctgccctcctctcgccc

SEQ ID NO: 2123 - DNA, 20 bp, synthetic construct
  misc_feature 1..20: note = chemically synthesized
  source 1..20: mol_type = other DNA
ctaacgctgccgtctctctc

SEQ ID NO: 2124 - DNA, 20 bp, synthetic construct
  misc_feature 1..20: note = chemically synthesized
  source 1..20: mol_type = other DNA
ttctgtctgcagcttgtggc

SEQ ID NO: 2125 - DNA, 20 bp, synthetic construct
  misc_feature 1..20: note = chemically synthesized
  source 1..20: mol_type = other DNA
tctctgctgtgttgctgccc

SEQ ID NO: 2126 - DNA, 20 bp, synthetic construct
  misc_feature 1..20: note = chemically synthesized
  source 1..20: mol_type = other DNA
caccacgtgatgtcctctga

SEQ ID NO: 2127 - DNA, 20 bp, synthetic construct
  misc_feature 1..20: note = chemically synthesized
  source 1..20: mol_type = other DNA
tgagcggatcctccccgtgt

SEQ ID NO: 2128 - DNA, 20 bp, synthetic construct
  misc_feature 1..20: note = chemically synthesized
  source 1..20: mol_type = other DNA
ccccatgccgtcttcactcg

SEQ ID NO: 2129 - DNA, 20 bp, synthetic construct
  misc_feature 1..20: note = chemically synthesized
  source 1..20: mol_type = other DNA
ctgtgccatctctcgtttct

SEQ ID NO: 2130 - DNA, 20 bp, synthetic construct
  misc_feature 1..20: note = chemically synthesized
  source 1..20: mol_type = other DNA
tcttaggatggccttctccg

SEQ ID NO: 2131 - DNA, 20 bp, synthetic construct
  misc_feature 1..20: note = chemically synthesized
  source 1..20: mol_type = other DNA
cctggacaccccgttctcct

SEQ ID NO: 2132 - DNA, 20 bp, synthetic construct
  misc_feature 1..20: note = chemically synthesized
  source 1..20: mol_type = other DNA
caccccgttctcctgtggat

SEQ ID NO: 2133 - DNA, 20 bp, synthetic construct
  misc_feature 1..20: note = chemically synthesized
  source 1..20: mol_type = other DNA
cccctgtcatggcatcttcc

SEQ ID NO: 2134 - DNA, 20 bp, synthetic construct
  misc_feature 1..20: note = chemically synthesized
  source 1..20: mol_type = other DNA
acagcatgtttgctgcctcc

SEQ ID NO: 2135 - DNA, 20 bp, synthetic construct
  misc_feature 1..20: note = chemically synthesized
  source 1..20: mol_type = other DNA
cggttaatgtggctctggtt

SEQ ID NO: 2136 - DNA, 20 bp, synthetic construct
  misc_feature 1..20: note = chemically synthesized
  source 1..20: mol_type = other DNA
cacagtggggccactaggga

SEQ ID NO: 2137 - DNA, 20 bp, synthetic construct
  misc_feature 1..20: note = chemically synthesized
  source 1..20: mol_type = other DNA
tccttcctagtctcctgata

SEQ ID NO: 2138 - DNA, 20 bp, synthetic construct
  misc_feature 1..20: note = chemically synthesized
  source 1..20: mol_type = other DNA
ttgcttacgatggagccaga

SEQ ID NO: 2139 - DNA, 20 bp, synthetic construct
  misc_feature 1..20: note = chemically synthesized
  source 1..20: mol_type = other DNA
ctgggagggagagcttggca

SEQ ID NO: 2140 - DNA, 20 bp, synthetic construct
  misc_feature 1..20: note = chemically synthesized
  source 1..20: mol_type = other DNA
cagggggtgggagggaaggg

SEQ ID NO: 2141 - DNA, 20 bp, synthetic construct
  misc_feature 1..20: note = chemically synthesized
  source 1..20: mol_type = other DNA
gcagtttggaaaaacaaaat

SEQ ID NO: 2142 - DNA, 20 bp, synthetic construct
  misc_feature 1..20: note = chemically synthesized
  source 1..20: mol_type = other DNA
aaaatcagaataagttggtc

SEQ ID NO: 2143 - DNA, 20 bp, synthetic construct
  misc_feature 1..20: note = chemically synthesized
  source 1..20: mol_type = other DNA
ggcagggctgtggtgaggag

SEQ ID NO: 2144 - DNA, 20 bp, synthetic construct
  misc_feature 1..20: note = chemically synthesized
  source 1..20: mol_type = other DNA
gtgtggaaaactccctttgt

SEQ ID NO: 2145 - DNA, 20 bp, synthetic construct
  misc_feature 1..20: note = chemically synthesized
  source 1..20: mol_type = other DNA
tctccatccttctttcctta

SEQ ID NO: 2146 - DNA, 20 bp, synthetic construct
  misc_feature 1..20: note = chemically synthesized
  source 1..20: mol_type = other DNA
acatattcctccgcccagag

SEQ ID NO: 2147 - DNA, 20 bp, synthetic construct
  misc_feature 1..20: note = chemically synthesized
  source 1..20: mol_type = other DNA
taaggccctgctctgggctt

SEQ ID NO: 2148 - DNA, 20 bp, synthetic construct
  misc_feature 1..20: note = chemically synthesized
  source 1..20: mol_type = other DNA
cctgctctgggcttctgggt

SEQ ID NO: 2149 - DNA, 20 bp, synthetic construct
  misc_feature 1..20: note = chemically synthesized
  source 1..20: mol_type = other DNA
ctctcctgccccttccctac

SEQ ID NO: 2150 - DNA, 20 bp, synthetic construct
  misc_feature 1..20: note = chemically synthesized
  source 1..20: mol_type = other DNA
cctgtctaccaggctgcctt

SEQ ID NO: 2151 - DNA, 20 bp, synthetic construct
  misc_feature 1..20: note = chemically synthesized
  source 1..20: mol_type = other DNA
tctaccaggctgccttttgg

SEQ ID NO: 2152 - DNA, 20 bp, synthetic construct
  misc_feature 1..20: note = chemically synthesized
  source 1..20: mol_type = other DNA
ggtggattctcctccaactg

SEQ ID NO: 2153 - DNA, 20 bp, synthetic construct
  misc_feature 1..20: note = chemically synthesized
  source 1..20: mol_type = other DNA
tgcttggcaaactcactctt

SEQ ID NO: 2154 - DNA, 20 bp, synthetic construct
  misc_feature 1..20: note = chemically synthesized
  source 1..20: mol_type = other DNA
tcccaggaggcctggagcat

SEQ ID NO: 2155 - DNA, 20 bp, synthetic construct
  misc_feature 1..20: note = chemically synthesized
  source 1..20: mol_type = other DNA
cctggagcattggggtgggc

SEQ ID NO: 2156 - DNA, 20 bp, synthetic construct
  misc_feature 1..20: note = chemically synthesized
  source 1..20: mol_type = other DNA
tgggctggggttcagagagg

SEQ ID NO: 2157 - DNA, 20 bp, synthetic construct
  misc_feature 1..20: note = chemically synthesized
  source 1..20: mol_type = other DNA
gtggccaagaagcaggggag

SEQ ID NO: 2158 - DNA, 20 bp, synthetic construct
  misc_feature 1..20: note = chemically synthesized
  source 1..20: mol_type = other DNA
aagaagcaggggagctgggt

SEQ ID NO: 2159 - DNA, 20 bp, synthetic construct
  misc_feature 1..20: note = chemically synthesized
  source 1..20: mol_type = other DNA
gagctgggtttgggtcaggt

SEQ ID NO: 2160 - DNA, 20 bp, synthetic construct
  misc_feature 1..20: note = chemically synthesized
  source 1..20: mol_type = other DNA
gtttgggtcaggtctgggtg

SEQ ID NO: 2161 - DNA, 20 bp, synthetic construct
  misc_feature 1..20: note = chemically synthesized
  source 1..20: mol_type = other DNA
accctcagtcctaggaaaac

SEQ ID NO: 2162 - DNA, 20 bp, synthetic construct
  misc_feature 1..20: note = chemically synthesized
  source 1..20: mol_type = other DNA
gggatggttggtcactgtct

SEQ ID NO: 2163 - DNA, 20 bp, synthetic construct
  misc_feature 1..20: note = chemically synthesized
  source 1..20: mol_type = other DNA
tgtggctgttcccaagttct

SEQ ID NO: 2164 - DNA, 20 bp, synthetic construct
  misc_feature 1..20: note = chemically synthesized
  source 1..20: mol_type = other DNA
aagttcttagggtaccccac

SEQ ID NO: 2165 - DNA, 20 bp, synthetic construct
  misc_feature 1..20: note = chemically synthesized
  source 1..20: mol_type = other DNA
cccaattgccttagtggcta

SEQ ID NO: 2166 - DNA, 20 bp, synthetic construct
  misc_feature 1..20: note = chemically synthesized
  source 1..20: mol_type = other DNA
gtggctagggggttgggggc

SEQ ID NO: 2167 - DNA, 20 bp, synthetic construct
  misc_feature 1..20: note = chemically synthesized
  source 1..20: mol_type = other DNA
agagtaggaggggctggagc

SEQ ID NO: 2168 - DNA, 20 bp, synthetic construct
  misc_feature 1..20: note = chemically synthesized
  source 1..20: mol_type = other DNA
agagctgggggcctgggctc

SEQ ID NO: 2169 - DNA, 20 bp, synthetic construct
  misc_feature 1..20: note = chemically synthesized
  source 1..20: mol_type = other DNA
aggggctggggcctggactc

SEQ ID NO: 2170 - DNA, 20 bp, synthetic construct
  misc_feature 1..20: note = chemically synthesized
  source 1..20: mol_type = other DNA
aggggctggggcctggactc

SEQ ID NO: 2171 - DNA, 20 bp, synthetic construct
  misc_feature 1..20: note = chemically synthesized
  source 1..20: mol_type = other DNA
gggcctggactcctgggtct

SEQ ID NO: 2172 - DNA, 20 bp, synthetic construct
  misc_feature 1..20: note = chemically synthesized
  source 1..20: mol_type = other DNA
gggactgggggcctggactc

SEQ ID NO: 2173 - DNA, 20 bp, synthetic construct
  misc_feature 1..20: note = chemically synthesized
  source 1..20: mol_type = other DNA
aggggctggggcctggactc

SEQ ID NO: 2174 - DNA, 20 bp, synthetic construct
  misc_feature 1..20: note = chemically synthesized
  source 1..20: mol_type = other DNA
ggggctgggggcctggactt

SEQ ID NO: 2175 - DNA, 20 bp, synthetic construct
  misc_feature 1..20: note = chemically synthesized
  source 1..20: mol_type = other DNA
gcggggctgggcctggaccc

SEQ ID NO: 2176 - DNA, 20 bp, synthetic construct
  misc_feature 1..20: note = chemically synthesized
  source 1..20: mol_type = other DNA
ctgggcctggacccctgggt

SEQ ID NO: 2177 - DNA, 20 bp, synthetic construct
  misc_feature 1..20: note = chemically synthesized
  source 1..20: mol_type = other DNA
aagggctggggcctggcctc

SEQ ID NO: 2178 - DNA, 20 bp, synthetic construct
  misc_feature 1..20: note = chemically synthesized
  source 1..20: mol_type = other DNA
ctggggcctggcctcctggg

SEQ ID NO: 2179 - DNA, 20 bp, synthetic construct
  misc_feature 1..20: note = chemically synthesized
  source 1..20: mol_type = other DNA
gcctcctgggttgaatgggg

SEQ ID NO: 2180 - DNA, 20 bp, synthetic construct
  misc_feature 1..20: note = chemically synthesized
  source 1..20: mol_type = other DNA
gaggggttgggcctggactc

SEQ ID NO: 2181 - DNA, 20 bp, synthetic construct
  misc_feature 1..20: note = chemically synthesized
  source 1..20: mol_type = other DNA
aggcctcaggcatctttcac

SEQ ID NO: 2182 - DNA, 20 bp, synthetic construct
  misc_feature 1..20: note = chemically synthesized
  source 1..20: mol_type = other DNA
ctcccctatcgccatgacaa

SEQ ID NO: 2183 - DNA, 20 bp, synthetic construct
  misc_feature 1..20: note = chemically synthesized
  source 1..20: mol_type = other DNA
actgggtggaaataaacgag

SEQ ID NO: 2184 - DNA, 20 bp, synthetic construct
  misc_feature 1..20: note = chemically synthesized
  source 1..20: mol_type = other DNA
acgtgcggccccttcacagc

SEQ ID NO: 2185 - DNA, 20 bp, synthetic construct
  misc_feature 1..20: note = chemically synthesized
  source 1..20: mol_type = other DNA
ttggagaggtgagggacttg

SEQ ID NO: 2186 - DNA, 20 bp, synthetic construct
  misc_feature 1..20: note = chemically synthesized
  source 1..20: mol_type = other DNA
cttggggggtaatttatccc

SEQ ID NO: 2187 - DNA, 20 bp, synthetic construct
  misc_feature 1..20: note = chemically synthesized
  source 1..20: mol_type = other DNA
gtaatttatcccgtggatct

SEQ ID NO: 2188 - DNA, 20 bp, synthetic construct
  misc_feature 1..20: note = chemically synthesized
  source 1..20: mol_type = other DNA
aagttttggacccctaaggg

SEQ ID NO: 2189 - DNA, 20 bp, synthetic construct
  misc_feature 1..20: note = chemically synthesized
  source 1..20: mol_type = other DNA
cagagggggcctcagtgaac

SEQ ID NO: 2190 - DNA, 20 bp, synthetic construct
  misc_feature 1..20: note = chemically synthesized
  source 1..20: mol_type = other DNA
tgcagctgtctcacccctct

SEQ ID NO: 2191 - DNA, 20 bp, synthetic construct
  misc_feature 1..20: note = chemically synthesized
  source 1..20: mol_type = other DNA
tgggagtcccgcccaggccc

SEQ ID NO: 2192 - DNA, 20 bp, synthetic construct
  misc_feature 1..20: note = chemically synthesized
  source 1..20: mol_type = other DNA
cccctgagtctgtcccagca

SEQ ID NO: 2193 - DNA, 20 bp, synthetic construct
  misc_feature 1..20: note = chemically synthesized
  source 1..20: mol_type = other DNA
ggcccacggcttcgttcctg

SEQ ID NO: 2194 - DNA, 20 bp, synthetic construct
  misc_feature 1..20: note = chemically synthesized
  source 1..20: mol_type = other DNA
cgttcctgcagagtatctgc

SEQ ID NO: 2195 - DNA, 20 bp, synthetic construct
  misc_feature 1..20: note = chemically synthesized
  source 1..20: mol_type = other DNA
tgacccttggaaggacctgg

SEQ ID NO: 2196 - DNA, 20 bp, synthetic construct
  misc_feature 1..20: note = chemically synthesized
  source 1..20: mol_type = other DNA
gagcactggaagcgccacct

SEQ ID NO: 2197 - DNA, 20 bp, synthetic construct
  misc_feature 1..20: note = chemically synthesized
  source 1..20: mol_type = other DNA
cgccacctgtgggtggtgac

SEQ ID NO: 2198 - DNA, 20 bp, synthetic construct
  misc_feature 1..20: note = chemically synthesized
  source 1..20: mol_type = other DNA
cgtgtctaacaggtaccatg

SEQ ID NO: 2199 - DNA, 20 bp, synthetic construct
  misc_feature 1..20: note = chemically synthesized
  source 1..20: mol_type = other DNA
cttcctgtttgcagatagcc

SEQ ID NO: 2200 - DNA, 20 bp, synthetic construct
  misc_feature 1..20: note = chemically synthesized
  source 1..20: mol_type = other DNA
cagccagtggccagaggctg

SEQ ID NO: 2201 - DNA, 20 bp, synthetic construct
  misc_feature 1..20: note = chemically synthesized
  source 1..20: mol_type = other DNA
actgtcctagcaccgtgtcc

SEQ ID NO: 2202 - DNA, 20 bp, synthetic construct
  misc_feature 1..20: note = chemically synthesized
  source 1..20: mol_type = other DNA
tctgttttcgtggctccctc

SEQ ID NO: 2203 - DNA, 20 bp, synthetic construct
  misc_feature 1..20: note = chemically synthesized
  source 1..20: mol_type = other DNA
acttgctgggacaccgtggc

SEQ ID NO: 2204 - DNA, 20 bp, synthetic construct
  misc_feature 1..20: note = chemically synthesized
  source 1..20: mol_type = other DNA
agctcttctctgttcagccc

SEQ ID NO: 2205 - DNA, 20 bp, synthetic construct
  misc_feature 1..20: note = chemically synthesized
  source 1..20: mol_type = other DNA
gcctggagaaggatgcagga

SEQ ID NO: 2206 - DNA, 20 bp, synthetic construct
  misc_feature 1..20: note = chemically synthesized
  source 1..20: mol_type = other DNA
cgagaaacacagccccaggt

SEQ ID NO: 2207 - DNA, 20 bp, synthetic construct
  misc_feature 1..20: note = chemically synthesized
  source 1..20: mol_type = other DNA
gcagtcaccccacagttgga

SEQ ID NO: 2208 - DNA, 20 bp, synthetic construct
  misc_feature 1..20: note = chemically synthesized
  source 1..20: mol_type = other DNA
ctctttaaggaaagaaggat

SEQ ID NO: 2209 - DNA, 20 bp, synthetic construct
  misc_feature 1..20: note = chemically synthesized
  source 1..20: mol_type = other DNA
aaggaaagaaggatggagaa

SEQ ID NO: 2210 - DNA, 20 bp, synthetic construct
  misc_feature 1..20: note = chemically synthesized
  source 1..20: mol_type = other DNA
ggaacaatataaattgggga

SEQ ID NO: 2211 - DNA, 20 bp, synthetic construct
  misc_feature 1..20: note = chemically synthesized
  source 1..20: mol_type = other DNA
ggagaacggggtgtccaggc

SEQ ID NO: 2212 - DNA, 20 bp, synthetic construct
  misc_feature 1..20: note = chemically synthesized
  source 1..20: mol_type = other DNA
acggggtactttggggttgt

SEQ ID NO: 2213 - DNA, 20 bp, synthetic construct
  misc_feature 1..20: note = chemically synthesized
  source 1..20: mol_type = other DNA
tccgtcggagaaggccatcc

SEQ ID NO: 2214 - DNA, 20 bp, synthetic construct
  misc_feature 1..20: note = chemically synthesized
  source 1..20: mol_type = other DNA
acccaggccacaagctgcag

SEQ ID NO: 2215 - DNA, 20 bp, synthetic construct
  misc_feature 1..20: note = chemically synthesized
  source 1..20: mol_type = other DNA
aagcggcacaggcccagggg

SEQ ID NO: 2216 - DNA, 20 bp, synthetic construct
  misc_feature 1..20: note = chemically synthesized
  source 1..20: mol_type = other DNA
caggggagagaatgcaggtc

SEQ ID NO: 2217 - DNA, 20 bp, synthetic construct
  misc_feature 1..20: note = chemically synthesized
  source 1..20: mol_type = other DNA
cactagggacaggattggtg

SEQ ID NO: 2218 - DNA, 20 bp, synthetic construct
  misc_feature 1..20: note = chemically synthesized
  source 1..20: mol_type = other DNA
agcagtttggaaaaacaaaa

SEQ ID NO: 2219 - DNA, 20 bp, synthetic construct
  misc_feature 1..20: note = chemically synthesized
  source 1..20: mol_type = other DNA
cgtgtggaaaactccctttg

SEQ ID NO: 2220 - DNA, 20 bp, synthetic construct
  misc_feature 1..20: note = chemically synthesized
  source 1..20: mol_type = other DNA
caagttttggacccctaagg

SEQ ID NO: 2221 - DNA, 20 bp, synthetic construct
  misc_feature 1..20: note = chemically synthesized
  source 1..20: mol_type = other DNA
ttggacccctaagggaagaa

SEQ ID NO: 2222 - DNA, 20 bp, synthetic construct
  misc_feature 1..20: note = chemically synthesized
  source 1..20: mol_type = other DNA
gggactccagagggagccac

SEQ ID NO: 2223 - DNA, 20 bp, synthetic construct
  misc_feature 1..20: note = chemically synthesized
  source 1..20: mol_type = other DNA
atggtacctgttagacacgg

SEQ ID NO: 2224 - DNA, 20 bp, synthetic construct
  misc_feature 1..20: note = chemically synthesized
  source 1..20: mol_type = other DNA
tcattcttcccttaggggtc

SEQ ID NO: 2225 - DNA, 20 bp, synthetic construct
  misc_feature 1..20: note = chemically synthesized
  source 1..20: mol_type = other DNA
aggactgagggtttcagtgc

SEQ ID NO: 2226 - DNA, 20 bp, synthetic construct
  misc_feature 1..20: note = chemically synthesized
  source 1..20: mol_type = other DNA
tactggccttatctcacagg

SEQ ID NO: 2227 - DNA, 20 bp, synthetic construct
  misc_feature 1..20: note = chemically synthesized
  source 1..20: mol_type = other DNA
ggtactttggggttgtccag

SEQ ID NO: 2228 - DNA, 20 bp, synthetic construct
  misc_feature 1..20: note = chemically synthesized
  source 1..20: mol_type = other DNA
caagaggagaagcagtttgg

SEQ ID NO: 2229 - DNA, 20 bp, synthetic construct
  misc_feature 1..20: note = chemically synthesized
  source 1..20: mol_type = other DNA
aggaggggggtgtccgtgtg

SEQ ID NO: 2230 - DNA, 20 bp, synthetic construct
  misc_feature 1..20: note = chemically synthesized
  source 1..20: mol_type = other DNA
actgaaaccctcagtcctag

SEQ ID NO: 2231 - DNA, 20 bp, synthetic construct
  misc_feature 1..20: note = chemically synthesized
  source 1..20: mol_type = other DNA
cccaacagcctctggccact

SEQ ID NO: 2232 - DNA, 20 bp, synthetic construct
  misc_feature 1..20: note = chemically synthesized
  source 1..20: mol_type = other DNA
ggaagtgaacggggaaggga

SEQ ID NO: 2233 - DNA, 20 bp, synthetic construct
  misc_feature 1..20: note = chemically synthesized
  source 1..20: mol_type = other DNA
cccccgtcaccacccacagg

SEQ ID NO: 2234 - DNA, 20 bp, synthetic construct
  misc_feature 1..20: note = chemically synthesized
  source 1..20: mol_type = other DNA
agccaggggctgacacgggc

SEQ ID NO: 2235 - DNA, 20 bp, synthetic construct
  misc_feature 1..20: note = chemically synthesized
  source 1..20: mol_type = other DNA
ctgggaacgggatgaactcg

SEQ ID NO: 2236 - DNA, 20 bp, synthetic construct
  misc_feature 1..20: note = chemically synthesized
  source 1..20: mol_type = other DNA
gaacagccacagcagggggg

SEQ ID NO: 2237 - DNA, 20 bp, synthetic construct
  misc_feature 1..20: note = chemically synthesized
  source 1..20: mol_type = other DNA
cagagacagtgaccaaccat

SEQ ID NO: 2238 - DNA, 20 bp, synthetic construct
  misc_feature 1..20: note = chemically synthesized
  source 1..20: mol_type = other DNA
atccctgttttcctaggact

SEQ ID NO: 2239 - DNA, 20 bp, synthetic construct
  misc_feature 1..20: note = chemically synthesized
  source 1..20: mol_type = other DNA
acctgacccaaacccagctc

SEQ ID NO: 2240 - DNA, 20 bp, synthetic construct
  misc_feature 1..20: note = chemically synthesized
  source 1..20: mol_type = other DNA
ctcctgggataccccgaaga

SEQ ID NO: 2241 - DNA, 20 bp, synthetic construct
  misc_feature 1..20: note = chemically synthesized
  source 1..20: mol_type = other DNA
gggaagcctgagcgcctctc

SEQ ID NO: 2242 - DNA, 20 bp, synthetic construct
  misc_feature 1..20: note = chemically synthesized
  source 1..20: mol_type = other DNA
ggacgcaccattctcacaaa

SEQ ID NO: 2243 - DNA, 20 bp, synthetic construct
  misc_feature 1..20: note = chemically synthesized
  source 1..20: mol_type = other DNA
tagaactcaggaccaactta

SEQ ID NO: 2244 - DNA, 20 bp, synthetic construct
  misc_feature 1..20: note = chemically synthesized
  source 1..20: mol_type = other DNA
tcaggaccaacttattctga

SEQ ID NO: 2245 - DNA, 20 bp, synthetic construct
  misc_feature 1..20: note = chemically synthesized
  source 1..20: mol_type = other DNA
attctgattttgtttttcca

SEQ ID NO: 2246 - DNA, 20 bp, synthetic construct
  misc_feature 1..20: note = chemically synthesized
  source 1..20: mol_type = other DNA
ggaaggaggaggcctaagga

SEQ ID NO: 2247 - DNA, 20 bp, synthetic construct
  misc_feature 1..20: note = chemically synthesized
  source 1..20: mol_type = other DNA
gagagcgccgcgcccgcacc

SEQ ID NO: 2248 - DNA, 20 bp, synthetic construct
  misc_feature 1..20: note = chemically synthesized
  source 1..20: mol_type = other DNA
ccgccccgtcgttcctggcc

SEQ ID NO: 2249 - DNA, 20 bp, synthetic construct
  misc_feature 1..20: note = chemically synthesized
  source 1..20: mol_type = other DNA
ccaccccacttccgaattgg

SEQ ID NO: 2250 - DNA, 20 bp, synthetic construct
  misc_feature 1..20: note = chemically synthesized
  source 1..20: mol_type = other DNA
tggagccgcttcaactggcc

SEQ ID NO: 2251 - DNA, 20 bp, synthetic construct
  misc_feature 1..20: note = chemically synthesized
  source 1..20: mol_type = other DNA
cctactctcttccgcattgg

SEQ ID NO: 2252 - DNA, 20 bp, synthetic construct
  misc_feature 1..20: note = chemically synthesized
  source 1..20: mol_type = other DNA
ttggagtcgctttaactggc

SEQ ID NO: 2253 - DNA, 20 bp, synthetic construct
  misc_feature 1..20: note = chemically synthesized
  source 1..20: mol_type = other DNA
tccggaccactttgagctct

SEQ ID NO: 2254 - DNA, 20 bp, synthetic construct
  misc_feature 1..20: note = chemically synthesized
  source 1..20: mol_type = other DNA
cttctgcgccgcctctggcc

SEQ ID NO: 2255 - DNA, 20 bp, synthetic construct
  misc_feature 1..20: note = chemically synthesized
  source 1..20: mol_type = other DNA
gtttccccttcccaggcagg

SEQ ID NO: 2256 - DNA, 20 bp, synthetic construct
  misc_feature 1..20: note = chemically synthesized
  source 1..20: mol_type = other DNA
cattctctcccctgggcctg

SEQ ID NO: 2257 - DNA, 20 bp, synthetic construct
  misc_feature 1..20: note = chemically synthesized
  source 1..20: mol_type = other DNA
ggcctgtgccgctttctgtc

SEQ ID NO: 2258 - DNA, 20 bp, synthetic construct
  misc_feature 1..20: note = chemically synthesized
  source 1..20: mol_type = other DNA
cttctggggcctgtgccatc

SEQ ID NO: 2259 - DNA, 20 bp, synthetic construct
  misc_feature 1..20: note = chemically synthesized
  source 1..20: mol_type = other DNA
ttcttgtaggcctgcatcat

SEQ ID NO: 2260 - DNA, 20 bp, synthetic construct
  misc_feature 1..20: note = chemically synthesized
  source 1..20: mol_type = other DNA
accccaaagtaccccgtctc

SEQ ID NO: 2261 - DNA, 20 bp, synthetic construct
  misc_feature 1..20: note = chemically synthesized
  source 1..20: mol_type = other DNA
ctttagccacctctccatcc

SEQ ID NO: 2262 - DNA, 20 bp, synthetic construct
  misc_feature 1..20: note = chemically synthesized
  source 1..20: mol_type = other DNA
gcctggacaccccgttctcc

SEQ ID NO: 2263 - DNA, 20 bp, synthetic construct
  misc_feature 1..20: note = chemically synthesized
  source 1..20: mol_type = other DNA
cctatgtccacttcaggaca

SEQ ID NO: 2264 - DNA, 20 bp, synthetic construct
  misc_feature 1..20: note = chemically synthesized
  source 1..20: mol_type = other DNA
ccacagtggggccactaggg

SEQ ID NO: 2265 - DNA, 20 bp, synthetic construct
  misc_feature 1..20: note = chemically synthesized
  source 1..20: mol_type = other DNA
ctaacccccacctcctgtta

SEQ ID NO: 2266 - DNA, 20 bp, synthetic construct
  misc_feature 1..20: note = chemically synthesized
  source 1..20: mol_type = other DNA
tctctccttgccagaacctc

SEQ ID NO: 2267 - DNA, 20 bp, synthetic construct
  misc_feature 1..20: note = chemically synthesized
  source 1..20: mol_type = other DNA
tccttgccagaacctctaag

SEQ ID NO: 2268 - DNA, 20 bp, synthetic construct
  misc_feature 1..20: note = chemically synthesized
  source 1..20: mol_type = other DNA
ccagagaggatcctgggagg

SEQ ID NO: 2269 - DNA, 20 bp, synthetic construct
  misc_feature 1..20: note = chemically synthesized
  source 1..20: mol_type = other DNA
tgctctgacgcggccgtctg

SEQ ID NO: 2270 - DNA, 20 bp, synthetic construct
  misc_feature 1..20: note = chemically synthesized
  source 1..20: mol_type = other DNA
cgtttcactgatcctggtgc

SEQ ID NO: 2271 - DNA, 20 bp, synthetic construct
  misc_feature 1..20: note = chemically synthesized
  source 1..20: mol_type = other DNA
ttacacttcccaagaggaga

SEQ ID NO: 2272 - DNA, 20 bp, synthetic construct
  misc_feature 1..20: note = chemically synthesized
  source 1..20: mol_type = other DNA
tttatattgttcctccgtgc

SEQ ID NO: 2273 - DNA, 20 bp, synthetic construct
  misc_feature 1..20: note = chemically synthesized
  source 1..20: mol_type = other DNA
ttcctccgcccagagcaggg

SEQ ID NO: 2274 - DNA, 20 bp, synthetic construct
  misc_feature 1..20: note = chemically synthesized
  source 1..20: mol_type = other DNA
cgcttccctaaggccctgct

SEQ ID NO: 2275 - DNA, 20 bp, synthetic construct
  misc_feature 1..20: note = chemically synthesized
  source 1..20: mol_type = other DNA
taaggccctgctctgggctt

SEQ ID NO: 2276 - DNA, 20 bp, synthetic construct
  misc_feature 1..20: note = chemically synthesized
  source 1..20: mol_type = other DNA
ggcaagcccaggagaggcgc

SEQ ID NO: 2277 - DNA, 20 bp, synthetic construct
  misc_feature 1..20: note = chemically synthesized
  source 1..20: mol_type = other DNA
gtctaccaggctgccttttg

SEQ ID NO: 2278 - DNA, 20 bp, synthetic construct
  misc_feature 1..20: note = chemically synthesized
  source 1..20: mol_type = other DNA
ttctcctccaactgtggggt

SEQ ID NO: 2279 - DNA, 20 bp, synthetic construct
  misc_feature 1..20: note = chemically synthesized
  source 1..20: mol_type = other DNA
gtgggctggggttcagagag

SEQ ID NO: 2280 - DNA, 20 bp, synthetic construct
  misc_feature 1..20: note = chemically synthesized
  source 1..20: mol_type = other DNA
gtggccaagaagcaggggag

SEQ ID NO: 2281 - DNA, 20 bp, synthetic construct
  misc_feature 1..20: note = chemically synthesized
  source 1..20: mol_type = other DNA
tcaggtctgggtgtggggtg

SEQ ID NO: 2282 - DNA, 20 bp, synthetic construct
  misc_feature 1..20: note = chemically synthesized
  source 1..20: mol_type = other DNA
ggtgtggggtgaccagctta

SEQ ID NO: 2283 - DNA, 20 bp, synthetic construct
  misc_feature 1..20: note = chemically synthesized
  source 1..20: mol_type = other DNA
atgctgtttgcccaggacag

SEQ ID NO: 2284 - DNA, 20 bp, synthetic construct
  misc_feature 1..20: note = chemically synthesized
  source 1..20: mol_type = other DNA
ggtcactgtctctgggtgac

SEQ ID NO: 2285 - DNA, 20 bp, synthetic construct
  misc_feature 1..20: note = chemically synthesized
  source 1..20: mol_type = other DNA
tgggtgactcttgattcccg

SEQ ID NO: 2286 - DNA, 20 bp, synthetic construct
  misc_feature 1..20: note = chemically synthesized
  source 1..20: mol_type = other DNA
gccagtttctccacctgggg

SEQ ID NO: 2287 - DNA, 20 bp, synthetic construct
  misc_feature 1..20: note = chemically synthesized
  source 1..20: mol_type = other DNA
aagttcttagggtaccccac

SEQ ID NO: 2288 - DNA, 20 bp, synthetic construct
  misc_feature 1..20: note = chemically synthesized
  source 1..20: mol_type = other DNA
tagagtaggaggggctggag

SEQ ID NO: 2289 - DNA, 20 bp, synthetic construct
  misc_feature 1..20: note = chemically synthesized
  source 1..20: mol_type = other DNA
agagctgggggcctgggctc

SEQ ID NO: 2290 - DNA, 20 bp, synthetic construct
  misc_feature 1..20: note = chemically synthesized
  source 1..20: mol_type = other DNA
acgtgcggccccttcacagc

SEQ ID NO: 2291 - DNA, 20 bp, synthetic construct
  misc_feature 1..20: note = chemically synthesized
  source 1..20: mol_type = other DNA
cctcccgcctcctccagatg

SEQ ID NO: 2292 - DNA, 20 bp, synthetic construct
  misc_feature 1..20: note = chemically synthesized
  source 1..20: mol_type = other DNA
gtaatttatcccgtggatct

SEQ ID NO: 2293 - DNA, 20 bp, synthetic construct
  misc_feature 1..20: note = chemically synthesized
  source 1..20: mol_type = other DNA
ttatcccgtggatctaggag

SEQ ID NO: 2294 - DNA, 20 bp, synthetic construct
  misc_feature 1..20: note = chemically synthesized
  source 1..20: mol_type = other DNA
cctcctccgaccccctggac

SEQ ID NO: 2295 - DNA, 20 bp, synthetic construct
  misc_feature 1..20: note = chemically synthesized
  source 1..20: mol_type = other DNA
ggacttcggcttttgtcccc

SEQ ID NO: 2296 - DNA, 20 bp, synthetic construct
  misc_feature 1..20: note = chemically synthesized
  source 1..20: mol_type = other DNA
accctgcatagccctgggcc

SEQ ID NO: 2297 - DNA, 20 bp, synthetic construct
  misc_feature 1..20: note = chemically synthesized
  source 1..20: mol_type = other DNA
tcctgcagagtatctgctgg

SEQ ID NO: 2298 - DNA, 20 bp, synthetic construct
  misc_feature 1..20: note = chemically synthesized
  source 1..20: mol_type = other DNA
agtatctgctggggtggttt

SEQ ID NO: 2299 - DNA, 20 bp, synthetic construct
  misc_feature 1..20: note = chemically synthesized
  source 1..20: mol_type = other DNA
tgacccttggaaggacctgg

SEQ ID NO: 2300 - DNA, 20 bp, synthetic construct
  misc_feature 1..20: note = chemically synthesized
  source 1..20: mol_type = other DNA
cgccacctgtgggtggtgac

SEQ ID NO: 2301 - DNA, 20 bp, synthetic construct
  misc_feature 1..20: note = chemically synthesized
  source 1..20: mol_type = other DNA
ccctcccttccccgttcact

SEQ ID NO: 2302 - DNA, 20 bp, synthetic construct
  misc_feature 1..20: note = chemically synthesized
  source 1..20: mol_type = other DNA
cagatagccaggagtccttt

SEQ ID NO: 2303 - DNA, 20 bp, synthetic construct
  misc_feature 1..20: note = chemically synthesized
  source 1..20: mol_type = other DNA
tcctagcaccgtgtccctgg

SEQ ID NO: 2304 - DNA, 20 bp, synthetic construct
  misc_feature 1..20: note = chemically synthesized
  source 1..20: mol_type = other DNA
ctggggtaggtgcggctgac

SEQ ID NO: 2305 - DNA, 20 bp, synthetic construct
  misc_feature 1..20: note = chemically synthesized
  source 1..20: mol_type = other DNA
ttgatgagaacctggaggtg

SEQ ID NO: 2306 - DNA, 22 bp, synthetic construct
  misc_feature 1..22: note = chemically synthesized
  source 1..22: mol_type = other DNA
gcgatatctaggtagccacagg

SEQ ID NO: 2307 - DNA, 22 bp, synthetic construct
  misc_feature 1..22: note = chemically synthesized
  source 1..22: mol_type = other DNA
ggtagccacaggaggcggccac

SEQ ID NO: 2308 - DNA, 22 bp, synthetic construct
  misc_feature 1..22: note = chemically synthesized
  source 1..22: mol_type = other DNA
gttgtctgcctggttcacagtg

SEQ ID NO: 2309 - DNA, 22 bp, synthetic construct
  misc_feature 1..22: note = chemically synthesized
  source 1..22: mol_type = other DNA
tctgcctggttcacagtggcgc

SEQ ID NO: 2310 - DNA, 22 bp, synthetic construct
  misc_feature 1..22: note = chemically synthesized
  source 1..22: mol_type = other DNA
cctggttcacagtggcgccctg

SEQ ID NO: 2311 - DNA, 22 bp, synthetic construct
  misc_feature 1..22: note = chemically synthesized
  source 1..22: mol_type = other DNA
gttcacagtggcgccctgctcc

SEQ ID NO: 2312 - DNA, 22 bp, synthetic construct
  misc_feature 1..22: note = chemically synthesized
  source 1..22: mol_type = other DNA
acagtggcgccctgctccacca

SEQ ID NO: 2313 - DNA, 22 bp, synthetic construct
  misc_feature 1..22: note = chemically synthesized
  source 1..22: mol_type = other DNA
ctccaccaagaagcgcaccacc

SEQ ID NO: 2314 - DNA, 22 bp, synthetic construct
  misc_feature 1..22: note = chemically synthesized
  source 1..22: mol_type = other DNA
caccaagaagcgcaccacctcc

SEQ ID NO: 2315 - DNA, 22 bp, synthetic construct
  misc_feature 1..22: note = chemically synthesized
  source 1..22: mol_type = other DNA
caggttctcatcaatgcaggcc

SEQ ID NO: 2316 - DNA, 22 bp, synthetic construct
  misc_feature 1..22: note = chemically synthesized
  source 1..22: mol_type = other DNA
tcatcaatgcaggcctgggggt

SEQ ID NO: 2317 - DNA, 22 bp, synthetic construct
  misc_feature 1..22: note = chemically synthesized
  source 1..22: mol_type = other DNA
atcaatgcaggcctgggggtgg

SEQ ID NO: 2318 - DNA, 22 bp, synthetic construct
  misc_feature 1..22: note = chemically synthesized
  source 1..22: mol_type = other DNA
ggggtgggaaacagccgtcagc

SEQ ID NO: 2319 - DNA, 22 bp, synthetic construct
  misc_feature 1..22: note = chemically synthesized
  source 1..22: mol_type = other DNA
ccccagccacggtgtcccagca

SEQ ID NO: 2320 - DNA, 22 bp, synthetic construct
  misc_feature 1..22: note = chemically synthesized
  source 1..22: mol_type = other DNA
cagagggagccacgaaaacaga

SEQ ID NO: 2321 - DNA, 22 bp, synthetic construct
  misc_feature 1..22: note = chemically synthesized
  source 1..22: mol_type = other DNA
ggacagtggggaaaatgaccca

SEQ ID NO: 2322 - DNA, 22 bp, synthetic construct
  misc_feature 1..22: note = chemically synthesized
  source 1..22: mol_type = other DNA
tggccactggctgtttaagata

SEQ ID NO: 2323 - DNA, 22 bp, synthetic construct
  misc_feature 1..22: note = chemically synthesized
  source 1..22: mol_type = other DNA
gccactggctgtttaagatacg

SEQ ID NO: 2324 - DNA, 22 bp, synthetic construct
  misc_feature 1..22: note = chemically synthesized
  source 1..22: mol_type = other DNA
gctgtttaagatacgcctggtt

SEQ ID NO: 2325 - DNA, 22 bp, synthetic construct
  misc_feature 1..22: note = chemically synthesized
  source 1..22: mol_type = other DNA
tttaagatacgcctggttgccc

SEQ ID NO: 2326 - DNA, 22 bp, synthetic construct
  misc_feature 1..22: note = chemically synthesized
  source 1..22: mol_type = other DNA
aagatacgcctggttgcccagt

SEQ ID NO: 2327 - DNA, 22 bp, synthetic construct
  misc_feature 1..22: note = chemically synthesized
  source 1..22: mol_type = other DNA
agatacgcctggttgcccagtg

SEQ ID NO: 2328 - DNA, 22 bp, synthetic construct
  misc_feature 1..22: note = chemically synthesized
  source 1..22: mol_type = other DNA
gttgcccagtggtcaggccggc

SEQ ID NO: 2329 - DNA, 22 bp, synthetic construct
  misc_feature 1..22: note = chemically synthesized
  source 1..22: mol_type = other DNA
cccagtggtcaggccggccagg

SEQ ID NO: 2330 - DNA, 22 bp, synthetic construct
  misc_feature 1..22: note = chemically synthesized
  source 1..22: mol_type = other DNA
cagtgctcagtggaaaccacga

SEQ ID NO: 2331 - DNA, 22 bp, synthetic construct
  misc_feature 1..22: note = chemically synthesized
  source 1..22: mol_type = other DNA
agtgctcagtggaaaccacgaa

SEQ ID NO: 2332 - DNA, 22 bp, synthetic construct
  misc_feature 1..22: note = chemically synthesized
  source 1..22: mol_type = other DNA
agtggaaaccacgaaaggactc

SEQ ID NO: 2333 - DNA, 22 bp, synthetic construct
  misc_feature 1..22: note = chemically synthesized
  source 1..22: mol_type = other DNA
ctggctatctgcaaacaggaag

SEQ ID NO: 2334 - DNA, 22 bp, synthetic construct
  misc_feature 1..22: note = chemically synthesized
  source 1..22: mol_type = other DNA
gctatctgcaaacaggaagtga

SEQ ID NO: 2335 - DNA, 22 bp, synthetic construct
  misc_feature 1..22: note = chemically synthesized
  source 1..22: mol_type = other DNA
tctgcaaacaggaagtgaacgg

SEQ ID NO: 2336 - DNA, 22 bp, synthetic construct
  misc_feature 1..22: note = chemically synthesized
  source 1..22: mol_type = other DNA
caaacaggaagtgaacggggaa

SEQ ID NO: 2337 - DNA, 22 bp, synthetic construct
  misc_feature 1..22: note = chemically synthesized
  source 1..22: mol_type = other DNA
ctcatctgggtgcgggaacccc

SEQ ID NO: 2338 - DNA, 22 bp, synthetic construct
  misc_feature 1..22: note = chemically synthesized
  source 1..22: mol_type = other DNA
tcatctgggtgcgggaacccca

SEQ ID NO: 2339 - DNA, 22 bp, synthetic construct
  misc_feature 1..22: note = chemically synthesized
  source 1..22: mol_type = other DNA
atctgggtgcgggaaccccaca

SEQ ID NO: 2340 - DNA, 22 bp, synthetic construct
  misc_feature 1..22: note = chemically synthesized
  source 1..22: mol_type = other DNA
ggtgcgggaaccccacatggta

SEQ ID NO: 2341 - DNA, 22 bp, synthetic construct
  misc_feature 1..22: note = chemically synthesized
  source 1..22: mol_type = other DNA
ttagacacggcaaaacccccgt

SEQ ID NO: 2342 - DNA, 22 bp, synthetic construct
  misc_feature 1..22: note = chemically synthesized
  source 1..22: mol_type = other DNA
gacacggcaaaacccccgtcac

SEQ ID NO: 2343 - DNA, 22 bp, synthetic construct
  misc_feature 1..22: note = chemically synthesized
  source 1..22: mol_type = other DNA
ccagtgctcagactagggaaga

SEQ ID NO: 2344 - DNA, 22 bp, synthetic construct
  misc_feature 1..22: note = chemically synthesized
  source 1..22: mol_type = other DNA
cagtgctcagactagggaagag

SEQ ID NO: 2345 - DNA, 22 bp, synthetic construct
  misc_feature 1..22: note = chemically synthesized
  source 1..22: mol_type = other DNA
agactagggaagaggttccagc

SEQ ID NO: 2346 - DNA, 22 bp, synthetic construct
  misc_feature 1..22: note = chemically synthesized
  source 1..22: mol_type = other DNA
gggaagaggttccagcccctcc

SEQ ID NO: 2347 - DNA, 22 bp, synthetic construct
  misc_feature 1..22: note = chemically synthesized
  source 1..22: mol_type = other DNA
cagcccctcctccttcagagcc

SEQ ID NO: 2348 - DNA, 22 bp, synthetic construct
  misc_feature 1..22: note = chemically synthesized
  source 1..22: mol_type = other DNA
ctccttcagagccaggagtcct

SEQ ID NO: 2349 - DNA, 22 bp, synthetic construct
  misc_feature 1..22: note = chemically synthesized
  source 1..22: mol_type = other DNA
cttcagagccaggagtcctggc

SEQ ID NO: 2350 - DNA, 22 bp, synthetic construct
  misc_feature 1..22: note = chemically synthesized
  source 1..22: mol_type = other DNA
cagagccaggagtcctggcccc

SEQ ID NO: 2351 - DNA, 22 bp, synthetic construct
  misc_feature 1..22: note = chemically synthesized
  source 1..22: mol_type = other DNA
agagccaggagtcctggccccc

SEQ ID NO: 2352 - DNA, 22 bp, synthetic construct
  misc_feature 1..22: note = chemically synthesized
  source 1..22: mol_type = other DNA
gcccccagcccctcctgcctta

SEQ ID NO: 2353 - DNA, 22 bp, synthetic construct
  misc_feature 1..22: note = chemically synthesized
  source 1..22: mol_type = other DNA
ctgccttaaacccagccaggtc

SEQ ID NO: 2354 - DNA, 22 bp, synthetic construct
  misc_feature 1..22: note = chemically synthesized
  source 1..22: mol_type = other DNA
ccttaaacccagccaggtcctt

SEQ ID NO: 2355 - DNA, 22 bp, synthetic construct
  misc_feature 1..22: note = chemically synthesized
  source 1..22: mol_type = other DNA
aaacccagccaggtccttccaa

SEQ ID NO: 2356 - DNA, 22 bp, synthetic construct
  misc_feature 1..22: note = chemically synthesized
  source 1..22: mol_type = other DNA
aacccagccaggtccttccaag

SEQ ID NO: 2357 - DNA, 22 bp, synthetic construct
  misc_feature 1..22: note = chemically synthesized
  source 1..22: mol_type = other DNA
ccaagggtcaagctcggaaacc

SEQ ID NO: 2358 - DNA, 22 bp, synthetic construct
  misc_feature 1..22: note = chemically synthesized
  source 1..22: mol_type = other DNA
caagggtcaagctcggaaacca

SEQ ID NO: 2359 - DNA, 22 bp, synthetic construct
  misc_feature 1..22: note = chemically synthesized
  source 1..22: mol_type = other DNA
ggaaaccaccccagcagatact

SEQ ID NO: 2360 - DNA, 22 bp, synthetic construct
  misc_feature 1..22: note = chemically synthesized
  source 1..22: mol_type = other DNA
tgcaggaacgaagccgtgggcc

SEQ ID NO: 2361 - DNA, 22 bp, synthetic construct
  misc_feature 1..22: note = chemically synthesized
  source 1..22: mol_type = other DNA
caggaacgaagccgtgggccca

SEQ ID NO: 2362 - DNA, 22 bp, synthetic construct
  misc_feature 1..22: note = chemically synthesized
  source 1..22: mol_type = other DNA
tgcagggtggaggaaggccacc

SEQ ID NO: 2363 - DNA, 22 bp, synthetic construct
  misc_feature 1..22: note = chemically synthesized
  source 1..22: mol_type = other DNA
tgctgggacagactcaggggcc

SEQ ID NO: 2364 - DNA, 22 bp, synthetic construct
  misc_feature 1..22: note = chemically synthesized
  source 1..22: mol_type = other DNA
ggacagactcaggggcctgggc

SEQ ID NO: 2365 - DNA, 22 bp, synthetic construct
  misc_feature 1..22: note = chemically synthesized
  source 1..22: mol_type = other DNA
aggggcctgggcgggactccca

SEQ ID NO: 2366 - DNA, 22 bp, synthetic construct
  misc_feature 1..22: note = chemically synthesized
  source 1..22: mol_type = other DNA
ggcgggactcccagaggggtga

SEQ ID NO: 2367 - DNA, 22 bp, synthetic construct
  misc_feature 1..22: note = chemically synthesized
  source 1..22: mol_type = other DNA
ccagaggggtgagacagctgca

SEQ ID NO: 2368 - DNA, 22 bp, synthetic construct
  misc_feature 1..22: note = chemically synthesized
  source 1..22: mol_type = other DNA
cacacctgtgtgcctgggcccc

SEQ ID NO: 2369 - DNA, 22 bp, synthetic construct
  misc_feature 1..22: note = chemically synthesized
  source 1..22: mol_type = other DNA
tgtgcctgggccccaggctgtc

SEQ ID NO: 2370 - DNA, 22 bp, synthetic construct
  misc_feature 1..22: note = chemically synthesized
  source 1..22: mol_type = other DNA
ggccccaggctgtcacactcca

SEQ ID NO: 2371 - DNA, 22 bp, synthetic construct
  misc_feature 1..22: note = chemically synthesized
  source 1..22: mol_type = other DNA
tcacactccagttcactgaggc

SEQ ID NO: 2372 - DNA, 22 bp, synthetic construct
  misc_feature 1..22: note = chemically synthesized
  source 1..22: mol_type = other DNA
cagttcactgaggccccctctg

SEQ ID NO: 2373 - DNA, 22 bp, synthetic construct
  misc_feature 1..22: note = chemically synthesized
  source 1..22: mol_type = other DNA
actgaggccccctctgcacggg

SEQ ID NO: 2374 - DNA, 22 bp, synthetic construct
  misc_feature 1..22: note = chemically synthesized
  source 1..22: mol_type = other DNA
aggccccctctgcacggggccc

SEQ ID NO: 2375 - DNA, 22 bp, synthetic construct
  misc_feature 1..22: note = chemically synthesized
  source 1..22: mol_type = other DNA
tgcacggggccctgcagccagg

SEQ ID NO: 2376 - DNA, 22 bp, synthetic construct
  misc_feature 1..22: note = chemically synthesized
  source 1..22: mol_type = other DNA
cacggggccctgcagccagggg

SEQ ID NO: 2377 - DNA, 22 bp, synthetic construct
  misc_feature 1..22: note = chemically synthesized
  source 1..22: mol_type = other DNA
cagccaggggctgacacgggcc

SEQ ID NO: 2378 - DNA, 22 bp, synthetic construct
  misc_feature 1..22: note = chemically synthesized
  source 1..22: mol_type = other DNA
acacgggccaccgtttctcatt

SEQ ID NO: 2379 - DNA, 22 bp, synthetic construct
  misc_feature 1..22: note = chemically synthesized
  source 1..22: mol_type = other DNA
ctcattcttcccttaggggtcc

SEQ ID NO: 2380 - DNA, 22 bp, synthetic construct
  misc_feature 1..22: note = chemically synthesized
  source 1..22: mol_type = other DNA
tcattcttcccttaggggtcca

SEQ ID NO: 2381 - DNA, 22 bp, synthetic construct
  misc_feature 1..22: note = chemically synthesized
  source 1..22: mol_type = other DNA
attcttcccttaggggtccaaa

SEQ ID NO: 2382 - DNA, 22 bp, synthetic construct
  misc_feature 1..22: note = chemically synthesized
  source 1..22: mol_type = other DNA
ttcccttaggggtccaaaactt

SEQ ID NO: 2383 - DNA, 22 bp, synthetic construct
  misc_feature 1..22: note = chemically synthesized
  source 1..22: mol_type = other DNA
cccttaggggtccaaaacttgg

SEQ ID NO: 2384 - DNA, 22 bp, synthetic construct
  misc_feature 1..22: note = chemically synthesized
  source 1..22: mol_type = other DNA
ccttaggggtccaaaacttggg

SEQ ID NO: 2385 - DNA, 22 bp, synthetic construct
  misc_feature 1..22: note = chemically synthesized
  source 1..22: mol_type = other DNA
aggggtccaaaacttgggggga

SEQ ID NO: 2386 - DNA, 22 bp, synthetic construct
  misc_feature 1..22: note = chemically synthesized
  source 1..22: mol_type = other DNA
ggggtccaaaacttggggggac

SEQ ID NO: 2387 - DNA, 22 bp, synthetic construct
  misc_feature 1..22: note = chemically synthesized
  source 1..22: mol_type = other DNA
ggggggacaaaagccgaagtcc

SEQ ID NO: 2388 - DNA, 22 bp, synthetic construct
  misc_feature 1..22: note = chemically synthesized
  source 1..22: mol_type = other DNA
gggggacaaaagccgaagtcca

SEQ ID NO: 2389 - DNA, 22 bp, synthetic construct
  misc_feature 1..22: note = chemically synthesized
  source 1..22: mol_type = other DNA
gccccaggccttgtggacactg

SEQ ID NO: 2390 - DNA, 22 bp, synthetic construct
  misc_feature 1..22: note = chemically synthesized
  source 1..22: mol_type = other DNA
ccccaggccttgtggacactgg

SEQ ID NO: 2391 - DNA, 22 bp, synthetic construct
  misc_feature 1..22: note = chemically synthesized
  source 1..22: mol_type = other DNA
gtggacactgggtgggctccgg

SEQ ID NO: 2392 - DNA, 22 bp, synthetic construct
  misc_feature 1..22: note = chemically synthesized
  source 1..22: mol_type = other DNA
tggacactgggtgggctccggg

SEQ ID NO: 2393 - DNA, 22 bp, synthetic construct
  misc_feature 1..22: note = chemically synthesized
  source 1..22: mol_type = other DNA
ggtgggctccgggacctgaact

SEQ ID NO: 2394 - DNA, 22 bp, synthetic construct
  misc_feature 1..22: note = chemically synthesized
  source 1..22: mol_type = other DNA
cgggacctgaactggagctgag

SEQ ID NO: 2395 - DNA, 22 bp, synthetic construct
  misc_feature 1..22: note = chemically synthesized
  source 1..22: mol_type = other DNA
aactggagctgaggaaggagtg

SEQ ID NO: 2396 - DNA, 22 bp, synthetic construct
  misc_feature 1..22: note = chemically synthesized
  source 1..22: mol_type = other DNA
gagctgaggaaggagtgaagct

SEQ ID NO: 2397 - DNA, 22 bp, synthetic construct
  misc_feature 1..22: note = chemically synthesized
  source 1..22: mol_type = other DNA
aggaaggagtgaagctaaactc

SEQ ID NO: 2398 - DNA, 22 bp, synthetic construct
  misc_feature 1..22: note = chemically synthesized
  source 1..22: mol_type = other DNA
aactcctagatccacgggataa

SEQ ID NO: 2399 - DNA, 22 bp, synthetic construct
  misc_feature 1..22: note = chemically synthesized
  source 1..22: mol_type = other DNA
ctagatccacgggataaattac

SEQ ID NO: 2400 - DNA, 22 bp, synthetic construct
  misc_feature 1..22: note = chemically synthesized
  source 1..22: mol_type = other DNA
gatccacgggataaattacccc

SEQ ID NO: 2401 - DNA, 22 bp, synthetic construct
  misc_feature 1..22: note = chemically synthesized
  source 1..22: mol_type = other DNA
ccccccaagtccctcacctctc

SEQ ID NO: 2402 - DNA, 22 bp, synthetic construct
  misc_feature 1..22: note = chemically synthesized
  source 1..22: mol_type = other DNA
acctctccaaagctgcccatct

SEQ ID NO: 2403 - DNA, 22 bp, synthetic construct
  misc_feature 1..22: note = chemically synthesized
  source 1..22: mol_type = other DNA
tccaaagctgcccatctggagg

SEQ ID NO: 2404 - DNA, 22 bp, synthetic construct
  misc_feature 1..22: note = chemically synthesized
  source 1..22: mol_type = other DNA
caaagctgcccatctggaggag

SEQ ID NO: 2405 - DNA, 22 bp, synthetic construct
  misc_feature 1..22: note = chemically synthesized
  source 1..22: mol_type = other DNA
cccatctggaggaggcgggagg

SEQ ID NO: 2406 - DNA, 22 bp, synthetic construct
  misc_feature 1..22: note = chemically synthesized
  source 1..22: mol_type = other DNA
gaggaggcgggagggagctacg

SEQ ID NO: 2407 - DNA, 22 bp, synthetic construct
  misc_feature 1..22: note = chemically synthesized
  source 1..22: mol_type = other DNA
cgagggccaagagcatgaggtc

SEQ ID NO: 2408 - DNA, 22 bp, synthetic construct
  misc_feature 1..22: note = chemically synthesized
  source 1..22: mol_type = other DNA
gggctgtgaaggggccgcacgt

SEQ ID NO: 2409 - DNA, 22 bp, synthetic construct
  misc_feature 1..22: note = chemically synthesized
  source 1..22: mol_type = other DNA
tgaaggggccgcacgtgccctg

SEQ ID NO: 2410 - DNA, 22 bp, synthetic construct
  misc_feature 1..22: note = chemically synthesized
  source 1..22: mol_type = other DNA
ggaacgggatgaactcggctcg

SEQ ID NO: 2411 - DNA, 22 bp, synthetic construct
  misc_feature 1..22: note = chemically synthesized
  source 1..22: mol_type = other DNA
ggctcgtttatttccacccagt

SEQ ID NO: 2412 - DNA, 22 bp, synthetic construct
  misc_feature 1..22: note = chemically synthesized
  source 1..22: mol_type = other DNA
gtttatttccacccagttgtca

SEQ ID NO: 2413 - DNA, 22 bp, synthetic construct
  misc_feature 1..22: note = chemically synthesized
  source 1..22: mol_type = other DNA
atttccacccagttgtcatggc

SEQ ID NO: 2414 - DNA, 22 bp, synthetic construct
  misc_feature 1..22: note = chemically synthesized
  source 1..22: mol_type = other DNA
tttccacccagttgtcatggcg

SEQ ID NO: 2415 - DNA, 22 bp, synthetic construct
  misc_feature 1..22: note = chemically synthesized
  source 1..22: mol_type = other DNA
ccacccagttgtcatggcgata

SEQ ID NO: 2416 - DNA, 22 bp, synthetic construct
  misc_feature 1..22: note = chemically synthesized
  source 1..22: mol_type = other DNA
cacccagttgtcatggcgatag

SEQ ID NO: 2417 - DNA, 22 bp, synthetic construct
  misc_feature 1..22: note = chemically synthesized
  source 1..22: mol_type = other DNA
tcatggcgataggggagggggg

SEQ ID NO: 2418 - DNA, 22 bp, synthetic construct
  misc_feature 1..22: note = chemically synthesized
  source 1..22: mol_type = other DNA
tccctttcaaggacctgcccag

SEQ ID NO: 2419 - DNA, 22 bp, synthetic construct
  misc_feature 1..22: note = chemically synthesized
  source 1..22: mol_type = other DNA
ccctttcaaggacctgcccagt

SEQ ID NO: 2420 - DNA, 22 bp, synthetic construct
  misc_feature 1..22: note = chemically synthesized
  source 1..22: mol_type = other DNA
cctttcaaggacctgcccagta

SEQ ID NO: 2421 - DNA, 22 bp, synthetic construct
  misc_feature 1..22: note = chemically synthesized
  source 1..22: mol_type = other DNA
tcaaggacctgcccagtacagg

SEQ ID NO: 2422 - DNA, 22 bp, synthetic construct
  misc_feature 1..22: note = chemically synthesized
  source 1..22: mol_type = other DNA
caaggacctgcccagtacaggc

SEQ ID NO: 2423 - DNA, 22 bp, synthetic construct
  misc_feature 1..22: note = chemically synthesized
  source 1..22: mol_type = other DNA
aaggacctgcccagtacaggca

SEQ ID NO: 2424 - DNA, 22 bp, synthetic construct
  misc_feature 1..22: note = chemically synthesized
  source 1..22: mol_type = other DNA
cccagtacaggcatccctgtga

SEQ ID NO: 2425 - DNA, 22 bp, synthetic construct
  misc_feature 1..22: note = chemically synthesized
  source 1..22: mol_type = other DNA
tgaaagatgcctgaggcctggg

SEQ ID NO: 2426 - DNA, 22 bp, synthetic construct
  misc_feature 1..22: note = chemically synthesized
  source 1..22: mol_type = other DNA
aggcctgggcaccagggactcc

SEQ ID NO: 2427 - DNA, 22 bp, synthetic construct
  misc_feature 1..22: note = chemically synthesized
  source 1..22: mol_type = other DNA
ggcaccagggactccagagtcc

SEQ ID NO: 2428 - DNA, 22 bp, synthetic construct
  misc_feature 1..22: note = chemically synthesized
  source 1..22: mol_type = other DNA
cagagtccaggcccaacccctc

SEQ ID NO: 2429 - DNA, 22 bp, synthetic construct
  misc_feature 1..22: note = chemically synthesized
  source 1..22: mol_type = other DNA
cccattcaacccaggaggccag

SEQ ID NO: 2430 - DNA, 22 bp, synthetic construct
  misc_feature 1..22: note = chemically synthesized
  source 1..22: mol_type = other DNA
aacccaggaggccaggccccag

SEQ ID NO: 2431 - DNA, 22 bp, synthetic construct
  misc_feature 1..22: note = chemically synthesized
  source 1..22: mol_type = other DNA
ccgccctcagatgaaggagtcc

SEQ ID NO: 2432 - DNA, 22 bp, synthetic construct
  misc_feature 1..22: note = chemically synthesized
  source 1..22: mol_type = other DNA
cgccctcagatgaaggagtcca

SEQ ID NO: 2433 - DNA, 22 bp, synthetic construct
  misc_feature 1..22: note = chemically synthesized
  source 1..22: mol_type = other DNA
agatgaaggagtccaggccccc

SEQ ID NO: 2434 - DNA, 22 bp, synthetic construct
  misc_feature 1..22: note = chemically synthesized
  source 1..22: mol_type = other DNA
tccccattcagacccaggggtc

SEQ ID NO: 2435 - DNA, 22 bp, synthetic construct
  misc_feature 1..22: note = chemically synthesized
  source 1..22: mol_type = other DNA
cccattcagacccaggggtcca

SEQ ID NO: 2436 - DNA, 22 bp, synthetic construct
  misc_feature 1..22: note = chemically synthesized
  source 1..22: mol_type = other DNA
agacccaggggtccaggcccag

SEQ ID NO: 2437 - DNA, 22 bp, synthetic construct
  misc_feature 1..22: note = chemically synthesized
  source 1..22: mol_type = other DNA
cctaagacccagaagtccaggc

SEQ ID NO: 2438 - DNA, 22 bp, synthetic construct
  misc_feature 1..22: note = chemically synthesized
  source 1..22: mol_type = other DNA
agacccagaagtccaggccccc

SEQ ID NO: 2439 - DNA, 22 bp, synthetic construct
  misc_feature 1..22: note = chemically synthesized
  source 1..22: mol_type = other DNA
ctccctcagacccacgagtcca

SEQ ID NO: 2440 - DNA, 22 bp, synthetic construct
  misc_feature 1..22: note = chemically synthesized
  source 1..22: mol_type = other DNA
cctcagacccacgagtccaggc

SEQ ID NO: 2441 - DNA, 22 bp, synthetic construct
  misc_feature 1..22: note = chemically synthesized
  source 1..22: mol_type = other DNA
agacccacgagtccaggcccca

SEQ ID NO: 2442 - DNA, 22 bp, synthetic construct
  misc_feature 1..22: note = chemically synthesized
  source 1..22: mol_type = other DNA
ctccctcggacccaggagtcca

SEQ ID NO: 2443 - DNA, 22 bp, synthetic construct
  misc_feature 1..22: note = chemically synthesized
  source 1..22: mol_type = other DNA
cctcggacccaggagtccaggc

SEQ ID NO: 2444 - DNA, 22 bp, synthetic construct
  misc_feature 1..22: note = chemically synthesized
  source 1..22: mol_type = other DNA
ggacccaggagtccaggccccc

SEQ ID NO: 2445 - DNA, 22 bp, synthetic construct
  misc_feature 1..22: note = chemically synthesized
  source 1..22: mol_type = other DNA
caccctcagacccaggagtcca

SEQ ID NO: 2446 - DNA, 22 bp, synthetic construct
  misc_feature 1..22: note = chemically synthesized
  source 1..22: mol_type = other DNA
agacccaggagtccaggcccca

SEQ ID NO: 2447 - DNA, 22 bp, synthetic construct
  misc_feature 1..22: note = chemically synthesized
  source 1..22: mol_type = other DNA
ctccctcggacccaggagtcca

SEQ ID NO: 2448 - DNA, 22 bp, synthetic construct
  misc_feature 1..22: note = chemically synthesized
  source 1..22: mol_type = other DNA
cctcggacccaggagtccaggc

SEQ ID NO: 2449 - DNA, 22 bp, synthetic construct
  misc_feature 1..22: note = chemically synthesized
  source 1..22: mol_type = other DNA
ggacccaggagtccaggcccca

SEQ ID NO: 2450 - DNA, 22 bp, synthetic construct
  misc_feature 1..22: note = chemically synthesized
  source 1..22: mol_type = other DNA
ctctctcaaacccaggagccca

SEQ ID NO: 2451 - DNA, 22 bp, synthetic construct
  misc_feature 1..22: note = chemically synthesized
  source 1..22: mol_type = other DNA
tctcaaacccaggagcccaggc

SEQ ID NO: 2452 - DNA, 22 bp, synthetic construct
  misc_feature 1..22: note = chemically synthesized
  source 1..22: mol_type = other DNA
tcaaacccaggagcccaggccc

SEQ ID NO: 2453 - DNA, 22 bp, synthetic construct
  misc_feature 1..22: note = chemically synthesized
  source 1..22: mol_type = other DNA
aaacccaggagcccaggccccc

SEQ ID NO: 2454 - DNA, 22 bp, synthetic construct
  misc_feature 1..22: note = chemically synthesized
  source 1..22: mol_type = other DNA
ttctctgttcagccctaagaat

SEQ ID NO: 2455 - DNA, 22 bp, synthetic construct
  misc_feature 1..22: note = chemically synthesized
  source 1..22: mol_type = other DNA
ctctgttcagccctaagaatcc

SEQ ID NO: 2456 - DNA, 22 bp, synthetic construct
  misc_feature 1..22: note = chemically synthesized
  source 1..22: mol_type = other DNA
tctgttcagccctaagaatcct

SEQ ID NO: 2457 - DNA, 22 bp, synthetic construct
  misc_feature 1..22: note = chemically synthesized
  source 1..22: mol_type = other DNA
tgttcagccctaagaatcctgg

SEQ ID NO: 2458 - DNA, 22 bp, synthetic construct
  misc_feature 1..22: note = chemically synthesized
  source 1..22: mol_type = other DNA
ttcagccctaagaatcctggct

SEQ ID NO: 2459 - DNA, 22 bp, synthetic construct
  misc_feature 1..22: note = chemically synthesized
  source 1..22: mol_type = other DNA
agccctaagaatcctggctcca

SEQ ID NO: 2460 - DNA, 22 bp, synthetic construct
  misc_feature 1..22: note = chemically synthesized
  source 1..22: mol_type = other DNA
agaatcctggctccagcccctc

SEQ ID NO: 2461 - DNA, 22 bp, synthetic construct
  misc_feature 1..22: note = chemically synthesized
  source 1..22: mol_type = other DNA
gctccagcccctcctactctag

SEQ ID NO: 2462 - DNA, 22 bp, synthetic construct
  misc_feature 1..22: note = chemically synthesized
  source 1..22: mol_type = other DNA
cagcccctcctactctagcccc

SEQ ID NO: 2463 - DNA, 22 bp, synthetic construct
  misc_feature 1..22: note = chemically synthesized
  source 1..22: mol_type = other DNA
ctactctagcccccaaccccct

SEQ ID NO: 2464 - DNA, 22 bp, synthetic construct
  misc_feature 1..22: note = chemically synthesized
  source 1..22: mol_type = other DNA
ctctagcccccaaccccctagc

SEQ ID NO: 2465 - DNA, 22 bp, synthetic construct
  misc_feature 1..22: note = chemically synthesized
  source 1..22: mol_type = other DNA
tagcccccaaccccctagccac

SEQ ID NO: 2466 - DNA, 22 bp, synthetic construct
  misc_feature 1..22: note = chemically synthesized
  source 1..22: mol_type = other DNA
gcccccaaccccctagccacta

SEQ ID NO: 2467 - DNA, 22 bp, synthetic construct
  misc_feature 1..22: note = chemically synthesized
  source 1..22: mol_type = other DNA
gccactaaggcaattggggtgc

SEQ ID NO: 2468 - DNA, 22 bp, synthetic construct
  misc_feature 1..22: note = chemically synthesized
  source 1..22: mol_type = other DNA
aggcaattggggtgcaggaatg

SEQ ID NO: 2469 - DNA, 22 bp, synthetic construct
  misc_feature 1..22: note = chemically synthesized
  source 1..22: mol_type = other DNA
gggtgcaggaatgggggcaggg

SEQ ID NO: 2470 - DNA, 22 bp, synthetic construct
  misc_feature 1..22: note = chemically synthesized
  source 1..22: mol_type = other DNA
accaagtggttgataaacccac

SEQ ID NO: 2471 - DNA, 22 bp, synthetic construct
  misc_feature 1..22: note = chemically synthesized
  source 1..22: mol_type = other DNA
ataaacccacgtggggtaccct

SEQ ID NO: 2472 - DNA, 22 bp, synthetic construct
  misc_feature 1..22: note = chemically synthesized
  source 1..22: mol_type = other DNA
agaacttgggaacagccacagc

SEQ ID NO: 2473 - DNA, 22 bp, synthetic construct
  misc_feature 1..22: note = chemically synthesized
  source 1..22: mol_type = other DNA
gggaacagccacagcagggggg

SEQ ID NO: 2474 - DNA, 22 bp, synthetic construct
  misc_feature 1..22: note = chemically synthesized
  source 1..22: mol_type = other DNA
ggaacagccacagcaggggggc

SEQ ID NO: 2475 - DNA, 22 bp, synthetic construct
  misc_feature 1..22: note = chemically synthesized
  source 1..22: mol_type = other DNA
ggggacctgcctggagaaggat

SEQ ID NO: 2476 - DNA, 22 bp, synthetic construct
  misc_feature 1..22: note = chemically synthesized
  source 1..22: mol_type = other DNA
gggacctgcctggagaaggatg

SEQ ID NO: 2477 - DNA, 22 bp, synthetic construct
  misc_feature 1..22: note = chemically synthesized
  source 1..22: mol_type = other DNA
cctggagaaggatgcaggacga

SEQ ID NO: 2478 - DNA, 22 bp, synthetic construct
  misc_feature 1..22: note = chemically synthesized
  source 1..22: mol_type = other DNA
gagaaggatgcaggacgagaaa

SEQ ID NO: 2479 - DNA, 22 bp, synthetic construct
  misc_feature 1..22: note = chemically synthesized
  source 1..22: mol_type = other DNA
gccgggaatcaagagtcaccca

SEQ ID NO: 2480 - DNA, 22 bp, synthetic construct
  misc_feature 1..22: note = chemically synthesized
  source 1..22: mol_type = other DNA
ttttcctaggactgagggtttc

SEQ ID NO: 2481 - DNA, 22 bp, synthetic construct
  misc_feature 1..22: note = chemically synthesized
  source 1..22: mol_type = other DNA
tcctaggactgagggtttcagt

SEQ ID NO: 2482 - DNA, 22 bp, synthetic construct
  misc_feature 1..22: note = chemically synthesized
  source 1..22: mol_type = other DNA
cctaggactgagggtttcagtg

SEQ ID NO: 2483 - DNA, 22 bp, synthetic construct
  misc_feature 1..22: note = chemically synthesized
  source 1..22: mol_type = other DNA
ctaggactgagggtttcagtgc

SEQ ID NO: 2484 - DNA, 22 bp, synthetic construct
  misc_feature 1..22: note = chemically synthesized
  source 1..22: mol_type = other DNA
ggactgagggtttcagtgctaa

SEQ ID NO: 2485 - DNA, 22 bp, synthetic construct
  misc_feature 1..22: note = chemically synthesized
  source 1..22: mol_type = other DNA
agggtttcagtgctaaaactag

SEQ ID NO: 2486 - DNA, 22 bp, synthetic construct
  misc_feature 1..22: note = chemically synthesized
  source 1..22: mol_type = other DNA
cagtgctaaaactaggctgtcc

SEQ ID NO: 2487 - DNA, 22 bp, synthetic construct
  misc_feature 1..22: note = chemically synthesized
  source 1..22: mol_type = other DNA
agtgctaaaactaggctgtcct

SEQ ID NO: 2488 - DNA, 22 bp, synthetic construct
  misc_feature 1..22: note = chemically synthesized
  source 1..22: mol_type = other DNA
aaactaggctgtcctgggcaaa

SEQ ID NO: 2489 - DNA, 22 bp, synthetic construct
  misc_feature 1..22: note = chemically synthesized
  source 1..22: mol_type = other DNA
ggctgtcctgggcaaacagcat

SEQ ID NO: 2490 - DNA, 22 bp, synthetic construct
  misc_feature 1..22: note = chemically synthesized
  source 1..22: mol_type = other DNA
tcctgggcaaacagcataagct

SEQ ID NO: 2491 - DNA, 22 bp, synthetic construct
  misc_feature 1..22: note = chemically synthesized
  source 1..22: mol_type = other DNA
ggcaaacagcataagctggtca

SEQ ID NO: 2492 - DNA, 22 bp, synthetic construct
  misc_feature 1..22: note = chemically synthesized
  source 1..22: mol_type = other DNA
gtcaccccacacccagacctga

SEQ ID NO: 2493 - DNA, 22 bp, synthetic construct
  misc_feature 1..22: note = chemically synthesized
  source 1..22: mol_type = other DNA
acccaaacccagctcccctgct

SEQ ID NO: 2494 - DNA, 22 bp, synthetic construct
  misc_feature 1..22: note = chemically synthesized
  source 1..22: mol_type = other DNA
ccctgcttcttggccacgtaac

SEQ ID NO: 2495 - DNA, 22 bp, synthetic construct
  misc_feature 1..22: note = chemically synthesized
  source 1..22: mol_type = other DNA
cttcttggccacgtaacctgag

SEQ ID NO: 2496 - DNA, 22 bp, synthetic construct
  misc_feature 1..22: note = chemically synthesized
  source 1..22: mol_type = other DNA
cttggccacgtaacctgagaag

SEQ ID NO: 2497 - DNA, 22 bp, synthetic construct
  misc_feature 1..22: note = chemically synthesized
  source 1..22: mol_type = other DNA
ttggccacgtaacctgagaagg

SEQ ID NO: 2498 - DNA, 22 bp, synthetic construct
  misc_feature 1..22: note = chemically synthesized
  source 1..22: mol_type = other DNA
ggccacgtaacctgagaaggga

SEQ ID NO: 2499 - DNA, 22 bp, synthetic construct
  misc_feature 1..22: note = chemically synthesized
  source 1..22: mol_type = other DNA
gccacgtaacctgagaagggaa

SEQ ID NO: 2500 - DNA, 22 bp, synthetic construct
  misc_feature 1..22: note = chemically synthesized
  source 1..22: mol_type = other DNA
agaagggaatccctcctctctg

SEQ ID NO: 2501 - DNA, 22 bp, synthetic construct
  misc_feature 1..22: note = chemically synthesized
  source 1..22: mol_type = other DNA
ctctctgaaccccagcccaccc

SEQ ID NO: 2502 - DNA, 22 bp, synthetic construct
  misc_feature 1..22: note = chemically synthesized
  source 1..22: mol_type = other DNA
tctgaaccccagcccaccccaa

SEQ ID NO: 2503 - DNA, 22 bp, synthetic construct
  misc_feature 1..22: note = chemically synthesized
  source 1..22: mol_type = other DNA
tgaaccccagcccaccccaatg

SEQ ID NO: 2504 - DNA, 22 bp, synthetic construct
  misc_feature 1..22: note = chemically synthesized
  source 1..22: mol_type = other DNA
aaccccagcccaccccaatgct

SEQ ID NO: 2505 - DNA, 22 bp, synthetic construct
  misc_feature 1..22: note = chemically synthesized
  source 1..22: mol_type = other DNA
caggcctcctgggataccccga

SEQ ID NO: 2506 - DNA, 22 bp, synthetic construct
  misc_feature 1..22: note = chemically synthesized
  source 1..22: mol_type = other DNA
ctgggataccccgaagagtgag

SEQ ID NO: 2507 - DNA, 22 bp, synthetic construct
  misc_feature 1..22: note = chemically synthesized
  source 1..22: mol_type = other DNA
ggataccccgaagagtgagttt

SEQ ID NO: 2508 - DNA, 22 bp, synthetic construct
  misc_feature 1..22: note = chemically synthesized
  source 1..22: mol_type = other DNA
gccaagcagtcaccccacagtt

SEQ ID NO: 2509 - DNA, 22 bp, synthetic construct
  misc_feature 1..22: note = chemically synthesized
  source 1..22: mol_type = other DNA
ccaagcagtcaccccacagttg

SEQ ID NO: 2510 - DNA, 22 bp, synthetic construct
  misc_feature 1..22: note = chemically synthesized
  source 1..22: mol_type = other DNA
gaggagaatccacccaaaaggc

SEQ ID NO: 2511 - DNA, 22 bp, synthetic construct
  misc_feature 1..22: note = chemically synthesized
  source 1..22: mol_type = other DNA
gtagacagggctggggtggcct

SEQ ID NO: 2512 - DNA, 22 bp, synthetic construct
  misc_feature 1..22: note = chemically synthesized
  source 1..22: mol_type = other DNA
gggtggcctctcgtggggtcca

SEQ ID NO: 2513 - DNA, 22 bp, synthetic construct
  misc_feature 1..22: note = chemically synthesized
  source 1..22: mol_type = other DNA
tcgtggggtccaggccaagtag

SEQ ID NO: 2514 - DNA, 22 bp, synthetic construct
  misc_feature 1..22: note = chemically synthesized
  source 1..22: mol_type = other DNA
gtggggtccaggccaagtaggt

SEQ ID NO: 2515 - DNA, 22 bp, synthetic construct
  misc_feature 1..22: note = chemically synthesized
  source 1..22: mol_type = other DNA
gggcctctgggggatgcagggg

SEQ ID NO: 2516 - DNA, 22 bp, synthetic construct
  misc_feature 1..22: note = chemically synthesized
  source 1..22: mol_type = other DNA
tgggggatgcaggggaaggggg

SEQ ID NO: 2517 - DNA, 22 bp, synthetic construct
  misc_feature 1..22: note = chemically synthesized
  source 1..22: mol_type = other DNA
ggggatgcaggggaagggggat

SEQ ID NO: 2518 - DNA, 22 bp, synthetic construct
  misc_feature 1..22: note = chemically synthesized
  source 1..22: mol_type = other DNA
agtctgaagagcagagccagga

SEQ ID NO: 2519 - DNA, 22 bp, synthetic construct
  misc_feature 1..22: note = chemically synthesized
  source 1..22: mol_type = other DNA
aagagcagagccaggaacccct

SEQ ID NO: 2520 - DNA, 22 bp, synthetic construct
  misc_feature 1..22: note = chemically synthesized
  source 1..22: mol_type = other DNA
tagggaaggggcaggagagcca

SEQ ID NO: 2521 - DNA, 22 bp, synthetic construct
  misc_feature 1..22: note = chemically synthesized
  source 1..22: mol_type = other DNA
agcgcctctcctgggcttgcca

SEQ ID NO: 2522 - DNA, 22 bp, synthetic construct
  misc_feature 1..22: note = chemically synthesized
  source 1..22: mol_type = other DNA
tcctgggcttgccaaggactca

SEQ ID NO: 2523 - DNA, 22 bp, synthetic construct
  misc_feature 1..22: note = chemically synthesized
  source 1..22: mol_type = other DNA
ctgggcttgccaaggactcaaa

SEQ ID NO: 2524 - DNA, 22 bp, synthetic construct
  misc_feature 1..22: note = chemically synthesized
  source 1..22: mol_type = other DNA
ggcttgccaaggactcaaaccc

SEQ ID NO: 2525 - DNA, 22 bp, synthetic construct
  misc_feature 1..22: note = chemically synthesized
  source 1..22: mol_type = other DNA
gccaaggactcaaacccagaag

SEQ ID NO: 2526 - DNA, 22 bp, synthetic construct
  misc_feature 1..22: note = chemically synthesized
  source 1..22: mol_type = other DNA
ccaaggactcaaacccagaagc

SEQ ID NO: 2527 - DNA, 22 bp, synthetic construct
  misc_feature 1..22: note = chemically synthesized
  source 1..22: mol_type = other DNA
aaacccagaagcccagagcagg

SEQ ID NO: 2528 - DNA, 22 bp, synthetic construct
  misc_feature 1..22: note = chemically synthesized
  source 1..22: mol_type = other DNA
agggaagcgggaccctgctctg

SEQ ID NO: 2529 - DNA, 22 bp, synthetic construct
  misc_feature 1..22: note = chemically synthesized
  source 1..22: mol_type = other DNA
gggaagcgggaccctgctctgg

SEQ ID NO: 2530 - DNA, 22 bp, synthetic construct
  misc_feature 1..22: note = chemically synthesized
  source 1..22: mol_type = other DNA
ctctgggcggaggaatatgtcc

SEQ ID NO: 2531 - DNA, 22 bp, synthetic construct
  misc_feature 1..22: note = chemically synthesized
  source 1..22: mol_type = other DNA
tgggcggaggaatatgtcccag

SEQ ID NO: 2532 - DNA, 22 bp, synthetic construct
  misc_feature 1..22: note = chemically synthesized
  source 1..22: mol_type = other DNA
ggcggaggaatatgtcccagat

SEQ ID NO: 2533 - DNA, 22 bp, synthetic construct
  misc_feature 1..22: note = chemically synthesized
  source 1..22: mol_type = other DNA
gggactctttaaggaaagaagg

SEQ ID NO: 2534 - DNA, 22 bp, synthetic construct
  misc_feature 1..22: note = chemically synthesized
  source 1..22: mol_type = other DNA
tttaaggaaagaaggatggaga

SEQ ID NO: 2535 - DNA, 22 bp, synthetic construct
  misc_feature 1..22: note = chemically synthesized
  source 1..22: mol_type = other DNA
taaggaaagaaggatggagaaa

SEQ ID NO: 2536 - DNA, 22 bp, synthetic construct
  misc_feature 1..22: note = chemically synthesized
  source 1..22: mol_type = other DNA
aaggaaagaaggatggagaaag

SEQ ID NO: 2537 - DNA, 22 bp, synthetic construct
  misc_feature 1..22: note = chemically synthesized
  source 1..22: mol_type = other DNA
aggaaagaaggatggagaaaga

SEQ ID NO: 2538 - DNA, 22 bp, synthetic construct
  misc_feature 1..22: note = chemically synthesized
  source 1..22: mol_type = other DNA
gtgaacacctaggacgcaccat

SEQ ID NO: 2539 - DNA, 22 bp, synthetic construct
  misc_feature 1..22: note = chemically synthesized
  source 1..22: mol_type = other DNA
ggacgcaccattctcacaaagg

SEQ ID NO: 2540 - DNA, 22 bp, synthetic construct
  misc_feature 1..22: note = chemically synthesized
  source 1..22: mol_type = other DNA
tcacaaagggagttttccacac

SEQ ID NO: 2541 - DNA, 22 bp, synthetic construct
  misc_feature 1..22: note = chemically synthesized
  source 1..22: mol_type = other DNA
acaaagggagttttccacacgg

SEQ ID NO: 2542 - DNA, 22 bp, synthetic construct
  misc_feature 1..22: note = chemically synthesized
  source 1..22: mol_type = other DNA
tccacacggacacccccctcct

SEQ ID NO: 2543 - DNA, 22 bp, synthetic construct
  misc_feature 1..22: note = chemically synthesized
  source 1..22: mol_type = other DNA
ccacacggacacccccctcctc

SEQ ID NO: 2544 - DNA, 22 bp, synthetic construct
  misc_feature 1..22: note = chemically synthesized
  source 1..22: mol_type = other DNA
cacacggacacccccctcctca

SEQ ID NO: 2545 - DNA, 22 bp, synthetic construct
  misc_feature 1..22: note = chemically synthesized
  source 1..22: mol_type = other DNA
ctcaccacagccctgccaggac

SEQ ID NO: 2546 - DNA, 22 bp, synthetic construct
  misc_feature 1..22: note = chemically synthesized
  source 1..22: mol_type = other DNA
accacagccctgccaggacggg

SEQ ID NO: 2547 - DNA, 22 bp, synthetic construct
  misc_feature 1..22: note = chemically synthesized
  source 1..22: mol_type = other DNA
ccaggacggggctggctactgg

SEQ ID NO: 2548 - DNA, 22 bp, synthetic construct
  misc_feature 1..22: note = chemically synthesized
  source 1..22: mol_type = other DNA
gctactggccttatctcacagg

SEQ ID NO: 2549 - DNA, 22 bp, synthetic construct
  misc_feature 1..22: note = chemically synthesized
  source 1..22: mol_type = other DNA
ctggccttatctcacaggtaaa

SEQ ID NO: 2550 - DNA, 22 bp, synthetic construct
  misc_feature 1..22: note = chemically synthesized
  source 1..22: mol_type = other DNA
gccttatctcacaggtaaaact

SEQ ID NO: 2551 - DNA, 22 bp, synthetic construct
  misc_feature 1..22: note = chemically synthesized
  source 1..22: mol_type = other DNA
atctcacaggtaaaactgacgc

SEQ ID NO: 2552 - DNA, 22 bp, synthetic construct
  misc_feature 1..22: note = chemically synthesized
  source 1..22: mol_type = other DNA
tctcacaggtaaaactgacgca

SEQ ID NO: 2553 - DNA, 22 bp, synthetic construct
  misc_feature 1..22: note = chemically synthesized
  source 1..22: mol_type = other DNA
acaggtaaaactgacgcacgga

SEQ ID NO: 2554 - DNA, 22 bp, synthetic construct
  misc_feature 1..22: note = chemically synthesized
  source 1..22: mol_type = other DNA
acgcacggaggaacaatataaa

SEQ ID NO: 2555 - DNA, 22 bp, synthetic construct
  misc_feature 1..22: note = chemically synthesized
  source 1..22: mol_type = other DNA
gggactagaaaggtgaagagcc

SEQ ID NO: 2556 - DNA, 22 bp, synthetic construct
  misc_feature 1..22: note = chemically synthesized
  source 1..22: mol_type = other DNA
gaaaggtgaagagccaaagtta

SEQ ID NO: 2557 - DNA, 22 bp, synthetic construct
  misc_feature 1..22: note = chemically synthesized
  source 1..22: mol_type = other DNA
gaactcaggaccaacttattct

SEQ ID NO: 2558 - DNA, 22 bp, synthetic construct
  misc_feature 1..22: note = chemically synthesized
  source 1..22: mol_type = other DNA
aggaccaacttattctgatttt

SEQ ID NO: 2559 - DNA, 22 bp, synthetic construct
  misc_feature 1..22: note = chemically synthesized
  source 1..22: mol_type = other DNA
attctgattttgtttttccaaa

SEQ ID NO: 2560 - DNA, 22 bp, synthetic construct
  misc_feature 1..22: note = chemically synthesized
  source 1..22: mol_type = other DNA
ttctgattttgtttttccaaac

SEQ ID NO: 2561 - DNA, 22 bp, synthetic construct
  misc_feature 1..22: note = chemically synthesized
  source 1..22: mol_type = other DNA
tgattttgtttttccaaactgc

SEQ ID NO: 2562 - DNA, 22 bp, synthetic construct
  misc_feature 1..22: note = chemically synthesized
  source 1..22: mol_type = other DNA
attttgtttttccaaactgctt

SEQ ID NO: 2563 - DNA, 22 bp, synthetic construct
  misc_feature 1..22: note = chemically synthesized
  source 1..22: mol_type = other DNA
tgtttttccaaactgcttctcc

SEQ ID NO: 2564 - DNA, 22 bp, synthetic construct
  misc_feature 1..22: note = chemically synthesized
  source 1..22: mol_type = other DNA
gtttttccaaactgcttctcct

SEQ ID NO: 2565 - DNA, 22 bp, synthetic construct
  misc_feature 1..22: note = chemically synthesized
  source 1..22: mol_type = other DNA
tttttccaaactgcttctcctc

SEQ ID NO: 2566 - DNA, 22 bp, synthetic construct
  misc_feature 1..22: note = chemically synthesized
  source 1..22: mol_type = other DNA
ttccaaactgcttctcctcttg

SEQ ID NO: 2567 - DNA, 22 bp, synthetic construct
  misc_feature 1..22: note = chemically synthesized
  source 1..22: mol_type = other DNA
tccaaactgcttctcctcttgg

SEQ ID NO: 2568 - DNA, 22 bp, synthetic construct
  misc_feature 1..22: note = chemically synthesized
  source 1..22: mol_type = other DNA
ccaaactgcttctcctcttggg

SEQ ID NO: 2569 - DNA, 22 bp, synthetic construct
  misc_feature 1..22: note = chemically synthesized
  source 1..22: mol_type = other DNA
caaactgcttctcctcttggga

SEQ ID NO: 2570 - DNA, 22 bp, synthetic construct
  misc_feature 1..22: note = chemically synthesized
  source 1..22: mol_type = other DNA
cttctcctcttgggaagtgtaa

SEQ ID NO: 2571 - DNA, 22 bp, synthetic construct
  misc_feature 1..22: note = chemically synthesized
  source 1..22: mol_type = other DNA
ctcctcttgggaagtgtaagga

SEQ ID NO: 2572 - DNA, 22 bp, synthetic construct
  misc_feature 1..22: note = chemically synthesized
  source 1..22: mol_type = other DNA
tcctcttgggaagtgtaaggaa

SEQ ID NO: 2573 - DNA, 22 bp, synthetic construct
  misc_feature 1..22: note = chemically synthesized
  source 1..22: mol_type = other DNA
ctcttgggaagtgtaaggaagc

SEQ ID NO: 2574 - DNA, 22 bp, synthetic construct
  misc_feature 1..22: note = chemically synthesized
  source 1..22: mol_type = other DNA
ttgggaagtgtaaggaagctgc

SEQ ID NO: 2575 - DNA, 22 bp, synthetic construct
  misc_feature 1..22: note = chemically synthesized
  source 1..22: mol_type = other DNA
gggaagtgtaaggaagctgcag

SEQ ID NO: 2576 - DNA, 22 bp, synthetic construct
  misc_feature 1..22: note = chemically synthesized
  source 1..22: mol_type = other DNA
ggaagtgtaaggaagctgcagc

SEQ ID NO: 2577 - DNA, 22 bp, synthetic construct
  misc_feature 1..22: note = chemically synthesized
  source 1..22: mol_type = other DNA
cagcaccaggatcagtgaaacg

SEQ ID NO: 2578 - DNA, 22 bp, synthetic construct
  misc_feature 1..22: note = chemically synthesized
  source 1..22: mol_type = other DNA
aggttctgggagagggtagcgc

SEQ ID NO: 2579 - DNA, 22 bp, synthetic construct
  misc_feature 1..22: note = chemically synthesized
  source 1..22: mol_type = other DNA
tgggagagggtagcgcagggtg

SEQ ID NO: 2580 - DNA, 22 bp, synthetic construct
  misc_feature 1..22: note = chemically synthesized
  source 1..22: mol_type = other DNA
ggagagggtagcgcagggtggc

SEQ ID NO: 2581 - DNA, 22 bp, synthetic construct
  misc_feature 1..22: note = chemically synthesized
  source 1..22: mol_type = other DNA
agaaccgggcaggtcacgcatc

SEQ ID NO: 2582 - DNA, 22 bp, synthetic construct
  misc_feature 1..22: note = chemically synthesized
  source 1..22: mol_type = other DNA
ccctcccaccccctgccaagct

SEQ ID NO: 2583 - DNA, 22 bp, synthetic construct
  misc_feature 1..22: note = chemically synthesized
  source 1..22: mol_type = other DNA
cctcccaccccctgccaagctc

SEQ ID NO: 2584 - DNA, 22 bp, synthetic construct
  misc_feature 1..22: note = chemically synthesized
  source 1..22: mol_type = other DNA
ccaccccctgccaagctctccc

SEQ ID NO: 2585 - DNA, 22 bp, synthetic construct
  misc_feature 1..22: note = chemically synthesized
  source 1..22: mol_type = other DNA
ccaagctctccctcccaggatc

SEQ ID NO: 2586 - DNA, 22 bp, synthetic construct
  misc_feature 1..22: note = chemically synthesized
  source 1..22: mol_type = other DNA
tccctcccaggatcctctctgg

SEQ ID NO: 2587 - DNA, 22 bp, synthetic construct
  misc_feature 1..22: note = chemically synthesized
  source 1..22: mol_type = other DNA
cctcccaggatcctctctggct

SEQ ID NO: 2588 - DNA, 22 bp, synthetic construct
  misc_feature 1..22: note = chemically synthesized
  source 1..22: mol_type = other DNA
ccaggatcctctctggctccat

SEQ ID NO: 2589 - DNA, 22 bp, synthetic construct
  misc_feature 1..22: note = chemically synthesized
  source 1..22: mol_type = other DNA
tctggctccatcgtaagcaaac

SEQ ID NO: 2590 - DNA, 22 bp, synthetic construct
  misc_feature 1..22: note = chemically synthesized
  source 1..22: mol_type = other DNA
tggctccatcgtaagcaaacct

SEQ ID NO: 2591 - DNA, 22 bp, synthetic construct
  misc_feature 1..22: note = chemically synthesized
  source 1..22: mol_type = other DNA
gctccatcgtaagcaaacctta

SEQ ID NO: 2592 - DNA, 22 bp, synthetic construct
  misc_feature 1..22: note = chemically synthesized
  source 1..22: mol_type = other DNA
catcgtaagcaaaccttagagg

SEQ ID NO: 2593 - DNA, 22 bp, synthetic construct
  misc_feature 1..22: note = chemically synthesized
  source 1..22: mol_type = other DNA
agaggttctggcaaggagagag

SEQ ID NO: 2594 - DNA, 22 bp, synthetic construct
  misc_feature 1..22: note = chemically synthesized
  source 1..22: mol_type = other DNA
gaggttctggcaaggagagaga

SEQ ID NO: 2595 - DNA, 22 bp, synthetic construct
  misc_feature 1..22: note = chemically synthesized
  source 1..22: mol_type = other DNA
tggcaaggagagagatggctcc

SEQ ID NO: 2596 - DNA, 22 bp, synthetic construct
  misc_feature 1..22: note = chemically synthesized
  source 1..22: mol_type = other DNA
gcaaggagagagatggctccag

SEQ ID NO: 2597 - DNA, 22 bp, synthetic construct
  misc_feature 1..22: note = chemically synthesized
  source 1..22: mol_type = other DNA
caggaaatgggggtgtgtcacc

SEQ ID NO: 2598 - DNA, 22 bp, synthetic construct
  misc_feature 1..22: note = chemically synthesized
  source 1..22: mol_type = other DNA
cctaacaggaggtgggggttag

SEQ ID NO: 2599 - DNA, 22 bp, synthetic construct
  misc_feature 1..22: note = chemically synthesized
  source 1..22: mol_type = other DNA
acaggaggtgggggttagaccc

SEQ ID NO: 2600 - DNA, 22 bp, synthetic construct
  misc_feature 1..22: note = chemically synthesized
  source 1..22: mol_type = other DNA
gacccaatatcaggagactagg

SEQ ID NO: 2601 - DNA, 22 bp, synthetic construct
  misc_feature 1..22: note = chemically synthesized
  source 1..22: mol_type = other DNA
ggaaggaggaggcctaaggatg

SEQ ID NO: 2602 - DNA, 22 bp, synthetic construct
  misc_feature 1..22: note = chemically synthesized
  source 1..22: mol_type = other DNA
aggatggggcttttctgtcacc

SEQ ID NO: 2603 - DNA, 22 bp, synthetic construct
  misc_feature 1..22: note = chemically synthesized
  source 1..22: mol_type = other DNA
ttctgtcaccaatcctgtccct

SEQ ID NO: 2604 - DNA, 22 bp, synthetic construct
  misc_feature 1..22: note = chemically synthesized
  source 1..22: mol_type = other DNA
tctgtcaccaatcctgtcccta

SEQ ID NO: 2605 - DNA, 22 bp, synthetic construct
  misc_feature 1..22: note = chemically synthesized
  source 1..22: mol_type = other DNA
ctgtcaccaatcctgtccctag

SEQ ID NO: 2606 - DNA, 22 bp, synthetic construct
  misc_feature 1..22: note = chemically synthesized
  source 1..22: mol_type = other DNA
tgtcaccaatcctgtccctagt

SEQ ID NO: 2607 - DNA, 22 bp, synthetic construct
  misc_feature 1..22: note = chemically synthesized
  source 1..22: mol_type = other DNA
tcaccaatcctgtccctagtgg

SEQ ID NO: 2608 - DNA, 22 bp, synthetic construct
  misc_feature 1..22: note = chemically synthesized
  source 1..22: mol_type = other DNA
tccctagtggccccactgtggg

SEQ ID NO: 2609 - DNA, 22 bp, synthetic construct
  misc_feature 1..22: note = chemically synthesized
  source 1..22: mol_type = other DNA
gtggccccactgtggggtggag

SEQ ID NO: 2610 - DNA, 22 bp, synthetic construct
  misc_feature 1..22: note = chemically synthesized
  source 1..22: mol_type = other DNA
tggggtggaggggacagataaa

SEQ ID NO: 2611 - DNA, 22 bp, synthetic construct
  misc_feature 1..22: note = chemically synthesized
  source 1..22: mol_type = other DNA
accggccctgggaatataaggt

SEQ ID NO: 2612 - DNA, 22 bp, synthetic construct
  misc_feature 1..22: note = chemically synthesized
  source 1..22: mol_type = other DNA
ggaatataaggtggtcccagct

SEQ ID NO: 2613 - DNA, 22 bp, synthetic construct
  misc_feature 1..22: note = chemically synthesized
  source 1..22: mol_type = other DNA
ggggacacaggatccctggagg

SEQ ID NO: 2614 - DNA, 22 bp, synthetic construct
  misc_feature 1..22: note = chemically synthesized
  source 1..22: mol_type = other DNA
gaggcagcaaacatgctgtcct

SEQ ID NO: 2615 - DNA, 22 bp, synthetic construct
  misc_feature 1..22: note = chemically synthesized
  source 1..22: mol_type = other DNA
tcctgaagtggacataggggcc

SEQ ID NO: 2616 - DNA, 22 bp, synthetic construct
  misc_feature 1..22: note = chemically synthesized
  source 1..22: mol_type = other DNA
aagtggacataggggcccgggt

SEQ ID NO: 2617 - DNA, 22 bp, synthetic construct
  misc_feature 1..22: note = chemically synthesized
  source 1..22: mol_type = other DNA
gaggaagaagactagctgagct

SEQ ID NO: 2618 - DNA, 22 bp, synthetic construct
  misc_feature 1..22: note = chemically synthesized
  source 1..22: mol_type = other DNA
gctgagctctcggacccctgga

SEQ ID NO: 2619 - DNA, 22 bp, synthetic construct
  misc_feature 1..22: note = chemically synthesized
  source 1..22: mol_type = other DNA
agctctcggacccctggaagat

SEQ ID NO: 2620 - DNA, 22 bp, synthetic construct
  misc_feature 1..22: note = chemically synthesized
  source 1..22: mol_type = other DNA
tcggacccctggaagatgccat

SEQ ID NO: 2621 - DNA, 22 bp, synthetic construct
  misc_feature 1..22: note = chemically synthesized
  source 1..22: mol_type = other DNA
ggacccctggaagatgccatga

SEQ ID NO: 2622 - DNA, 22 bp, synthetic construct
  misc_feature 1..22: note = chemically synthesized
  source 1..22: mol_type = other DNA
gaagatgccatgacagggggct

SEQ ID NO: 2623 - DNA, 22 bp, synthetic construct
  misc_feature 1..22: note = chemically synthesized
  source 1..22: mol_type = other DNA
gaagagctagcacagactagag

SEQ ID NO: 2624 - DNA, 22 bp, synthetic construct
  misc_feature 1..22: note = chemically synthesized
  source 1..22: mol_type = other DNA
gcacagactagagaggtaaggg

SEQ ID NO: 2625 - DNA, 22 bp, synthetic construct
  misc_feature 1..22: note = chemically synthesized
  source 1..22: mol_type = other DNA
gagaggtaaggggggtagggga

SEQ ID NO: 2626 - DNA, 22 bp, synthetic construct
  misc_feature 1..22: note = chemically synthesized
  source 1..22: mol_type = other DNA
cccaaatgaaaggagtgagagg

SEQ ID NO: 2627 - DNA, 22 bp, synthetic construct
  misc_feature 1..22: note = chemically synthesized
  source 1..22: mol_type = other DNA
aagccagggagacggggtactt

SEQ ID NO: 2628 - DNA, 22 bp, synthetic construct
  misc_feature 1..22: note = chemically synthesized
  source 1..22: mol_type = other DNA
tggggttgtccagaaaaacggt

SEQ ID NO: 2629 - DNA, 22 bp, synthetic construct
  misc_feature 1..22: note = chemically synthesized
  source 1..22: mol_type = other DNA
ggggttgtccagaaaaacggtg

SEQ ID NO: 2630 - DNA, 22 bp, synthetic construct
  misc_feature 1..22: note = chemically synthesized
  source 1..22: mol_type = other DNA
gggttgtccagaaaaacggtga

SEQ ID NO: 2631 - DNA, 22 bp, synthetic construct
  misc_feature 1..22: note = chemically synthesized
  source 1..22: mol_type = other DNA
tccagaaaaacggtgatgatgc

SEQ ID NO: 2632 - DNA, 22 bp, synthetic construct
  misc_feature 1..22: note = chemically synthesized
  source 1..22: mol_type = other DNA
caagaaggggaggcgggacgca

SEQ ID NO: 2633 - DNA, 22 bp, synthetic construct
  misc_feature 1..22: note = chemically synthesized
  source 1..22: mol_type = other DNA
agaaacgagagatggcacaggc

SEQ ID NO: 2634 - DNA, 22 bp, synthetic construct
  misc_feature 1..22: note = chemically synthesized
  source 1..22: mol_type = other DNA
ggtgagggaggagagatgcccg

SEQ ID NO: 2635 - DNA, 22 bp, synthetic construct
  misc_feature 1..22: note = chemically synthesized
  source 1..22: mol_type = other DNA
agaggacatcacgtggtgcagc

SEQ ID NO: 2636 - DNA, 22 bp, synthetic construct
  misc_feature 1..22: note = chemically synthesized
  source 1..22: mol_type = other DNA
cggaaagagcatccttgggcag

SEQ ID NO: 2637 - DNA, 22 bp, synthetic construct
  misc_feature 1..22: note = chemically synthesized
  source 1..22: mol_type = other DNA
gggcagcaacacagcagagagc

SEQ ID NO: 2638 - DNA, 22 bp, synthetic construct
  misc_feature 1..22: note = chemically synthesized
  source 1..22: mol_type = other DNA
ggcagcaacacagcagagagca

SEQ ID NO: 2639 - DNA, 22 bp, synthetic construct
  misc_feature 1..22: note = chemically synthesized
  source 1..22: mol_type = other DNA
aaggaggcggcagggaaggatc

SEQ ID NO: 2640 - DNA, 22 bp, synthetic construct
  misc_feature 1..22: note = chemically synthesized
  source 1..22: mol_type = other DNA
ggccagccgtagaggtgaccca

SEQ ID NO: 2641 - DNA, 22 bp, synthetic construct
  misc_feature 1..22: note = chemically synthesized
  source 1..22: mol_type = other DNA
cagacagaaagcggcacaggcc

SEQ ID NO: 2642 - DNA, 22 bp, synthetic construct
  misc_feature 1..22: note = chemically synthesized
  source 1..22: mol_type = other DNA
cctgggaaggggaaacagtggg

SEQ ID NO: 2643 - DNA, 22 bp, synthetic construct
  misc_feature 1..22: note = chemically synthesized
  source 1..22: mol_type = other DNA
ggaaggggaaacagtgggccag

SEQ ID NO: 2644 - DNA, 22 bp, synthetic construct
  misc_feature 1..22: note = chemically synthesized
  source 1..22: mol_type = other DNA
aaagtggtccggactcaggaga

SEQ ID NO: 2645 - DNA, 22 bp, synthetic construct
  misc_feature 1..22: note = chemically synthesized
  source 1..22: mol_type = other DNA
aggagagagacggcagcgttag

SEQ ID NO: 2646 - DNA, 22 bp, synthetic construct
  misc_feature 1..22: note = chemically synthesized
  source 1..22: mol_type = other DNA
gagggcagagttccggcggcac

SEQ ID NO: 2647 - DNA, 22 bp, synthetic construct
  misc_feature 1..22: note = chemically synthesized
  source 1..22: mol_type = other DNA
cggcggcacagcaagggcactc

SEQ ID NO: 2648 - DNA, 22 bp, synthetic construct
  misc_feature 1..22: note = chemically synthesized
  source 1..22: mol_type = other DNA
gggggcgagaggagggcagcgc

SEQ ID NO: 2649 - DNA, 22 bp, synthetic construct
  misc_feature 1..22: note = chemically synthesized
  source 1..22: mol_type = other DNA
agctatgggagctggctcaggt

SEQ ID NO: 2650 - DNA, 22 bp, synthetic construct
  misc_feature 1..22: note = chemically synthesized
  source 1..22: mol_type = other DNA
tgggagctggctcaggttcagg

SEQ ID NO: 2651 - DNA, 22 bp, synthetic construct
  misc_feature 1..22: note = chemically synthesized
  source 1..22: mol_type = other DNA
gctcaggttcaggagagggcag

SEQ ID NO: 2652 - DNA, 22 bp, synthetic construct
  misc_feature 1..22: note = chemically synthesized
  source 1..22: mol_type = other DNA
aggttcaggagagggcagggca

SEQ ID NO: 2653 - DNA, 22 bp, synthetic construct
  misc_feature 1..22: note = chemically synthesized
  source 1..22: mol_type = other DNA
aggagagggcagggcagggaag

SEQ ID NO: 2654 - DNA, 22 bp, synthetic construct
  misc_feature 1..22: note = chemically synthesized
  source 1..22: mol_type = other DNA
gaggggctcaacatcggaagag

SEQ ID NO: 2655 - DNA, 22 bp, synthetic construct
  misc_feature 1..22: note = chemically synthesized
  source 1..22: mol_type = other DNA
aacatcggaagaggggaagtcg

SEQ ID NO: 2656 - DNA, 22 bp, synthetic construct
  misc_feature 1..22: note = chemically synthesized
  source 1..22: mol_type = other DNA
catgggtcagcacaggctgcca

SEQ ID NO: 2657 - DNA, 22 bp, synthetic construct
  misc_feature 1..22: note = chemically synthesized
  source 1..22: mol_type = other DNA
ccaaagccagggccagttaaag

SEQ ID NO: 2658 - DNA, 22 bp, synthetic construct
  misc_feature 1..22: note = chemically synthesized
  source 1..22: mol_type = other DNA
aagcgactccaatgcggaagag

SEQ ID NO: 2659 - DNA, 22 bp, synthetic construct
  misc_feature 1..22: note = chemically synthesized
  source 1..22: mol_type = other DNA
caatgcggaagagagtaggtcg

SEQ ID NO: 2660 - DNA, 22 bp, synthetic construct
  misc_feature 1..22: note = chemically synthesized
  source 1..22: mol_type = other DNA
gggcagagtggtcagcacagag

SEQ ID NO: 2661 - DNA, 22 bp, synthetic construct
  misc_feature 1..22: note = chemically synthesized
  source 1..22: mol_type = other DNA
agcccagggccagttgaagcgg

SEQ ID NO: 2662 - DNA, 22 bp, synthetic construct
  misc_feature 1..22: note = chemically synthesized
  source 1..22: mol_type = other DNA
aagcggctccaattcggaagtg

SEQ ID NO: 2663 - DNA, 22 bp, synthetic construct
  misc_feature 1..22: note = chemically synthesized
  source 1..22: mol_type = other DNA
caattcggaagtggggtggtcg

SEQ ID NO: 2664 - DNA, 22 bp, synthetic construct
  misc_feature 1..22: note = chemically synthesized
  source 1..22: mol_type = other DNA
ggaagtggggtggtcgaagggg

SEQ ID NO: 2665 - DNA, 22 bp, synthetic construct
  misc_feature 1..22: note = chemically synthesized
  source 1..22: mol_type = other DNA
ggacggggtgtcagcatagggt

SEQ ID NO: 2666 - DNA, 22 bp, synthetic construct
  misc_feature 1..22: note = chemically synthesized
  source 1..22: mol_type = other DNA
gcaacggggaaggaggatgccc

SEQ ID NO: 2667 - DNA, 22 bp, synthetic construct
  misc_feature 1..22: note = chemically synthesized
  source 1..22: mol_type = other DNA
gccccgggagacgccgggcggg

SEQ ID NO: 2668 - DNA, 22 bp, synthetic construct
  misc_feature 1..22: note = chemically synthesized
  source 1..22: mol_type = other DNA
acctggtgcagggcgctgatac

SEQ ID NO: 2669 - DNA, 22 bp, synthetic construct
  misc_feature 1..22: note = chemically synthesized
  source 1..22: mol_type = other DNA
gtgcagggcgctgataccgtcg

SEQ ID NO: 2670 - DNA, 22 bp, synthetic construct
  misc_feature 1..22: note = chemically synthesized
  source 1..22: mol_type = other DNA
ataccgtcggcgttggtggagt

SEQ ID NO: 2671 - DNA, 22 bp, synthetic construct
  misc_feature 1..22: note = chemically synthesized
  source 1..22: mol_type = other DNA
gtggagtccagcacggcgcggg

SEQ ID NO: 2672 - DNA, 22 bp, synthetic construct
  misc_feature 1..22: note = chemically synthesized
  source 1..22: mol_type = other DNA
ggcgccggggccagggtcggcg

SEQ ID NO: 2673 - DNA, 22 bp, synthetic construct
  misc_feature 1..22: note = chemically synthesized
  source 1..22: mol_type = other DNA
gtccaggtcgccgcccgcacag

SEQ ID NO: 2674 - DNA, 22 bp, synthetic construct
  misc_feature 1..22: note = chemically synthesized
  source 1..22: mol_type = other DNA
ggcggcgcgctcgaagcggacg

SEQ ID NO: 2675 - DNA, 22 bp, synthetic construct
  misc_feature 1..22: note = chemically synthesized
  source 1..22: mol_type = other DNA
gaagcggacggtgcgggcgcgg

SEQ ID NO: 2676 - DNA, 22 bp, synthetic construct
  misc_feature 1..22: note = chemically synthesized
  source 1..22: mol_type = other DNA
tccggggccaggctcggcgccc

SEQ ID NO: 2677 - DNA, 22 bp, synthetic construct
  misc_feature 1..22: note = chemically synthesized
  source 1..22: mol_type = other DNA
cggggccaggctcggcgcccgc

SEQ ID NO: 2678 - DNA, 22 bp, synthetic construct
  misc_feature 1..22: note = chemically synthesized
  source 1..22: mol_type = other DNA
ggcgcccgcccgcgccccccac

SEQ ID NO: 2679 - DNA, 22 bp, synthetic construct
  misc_feature 1..22: note = chemically synthesized
  source 1..22: mol_type = other DNA
ccgcagctgctcccgtcgccgc

SEQ ID NO: 2680 - DNA, 22 bp, synthetic construct
  misc_feature 1..22: note = chemically synthesized
  source 1..22: mol_type = other DNA
ctcccgtcgccgctcccgggca

SEQ ID NO: 2681 - DNA, 22 bp, synthetic construct
  misc_feature 1..22: note = chemically synthesized
  source 1..22: mol_type = other DNA
ccgtcgccgctcccgggcagcc

SEQ ID NO: 2682 - DNA, 22 bp, synthetic construct
  misc_feature 1..22: note = chemically synthesized
  source 1..22: mol_type = other DNA
ccgggcagccgccgccgccgcc

SEQ ID NO: 2683 - DNA, 22 bp, synthetic construct
  misc_feature 1..22: note = chemically synthesized
  source 1..22: mol_type = other DNA
tccggacatcgcaccgcccgcc

SEQ ID NO: 2684 - DNA, 22 bp, synthetic construct
  misc_feature 1..22: note = chemically synthesized
  source 1..22: mol_type = other DNA
cggacatcgcaccgcccgcccg

SEQ ID NO: 2685 - DNA, 22 bp, synthetic construct
  misc_feature 1..22: note = chemically synthesized
  source 1..22: mol_type = other DNA
gggctcggcgctcgctcgctcg

SEQ ID NO: 2686 - DNA, 22 bp, synthetic construct
  misc_feature 1..22: note = chemically synthesized
  source 1..22: mol_type = other DNA
ggcgctcgctcgctcgctgggc

SEQ ID NO: 2687 - DNA, 22 bp, synthetic construct
  misc_feature 1..22: note = chemically synthesized
  source 1..22: mol_type = other DNA
gctcgctcgctgggcgggcggg

SEQ ID NO: 2688 - DNA, 22 bp, synthetic construct
  misc_feature 1..22: note = chemically synthesized
  source 1..22: mol_type = other DNA
gctcgctgggcgggcgggcggt

SEQ ID NO: 2689 - DNA, 22 bp, synthetic construct
  misc_feature 1..22: note = chemically synthesized
  source 1..22: mol_type = other DNA
gctgggcgggcgggcggtgcga

SEQ ID NO: 2690 - DNA, 22 bp, synthetic construct
  misc_feature 1..22: note = chemically synthesized
  source 1..22: mol_type = other DNA
ggcgggcgggcggtgcgatgtc

SEQ ID NO: 2691 - DNA, 22 bp, synthetic construct
  misc_feature 1..22: note = chemically synthesized
  source 1..22: mol_type = other DNA
gcccgggggcggcggcggcggc

SEQ ID NO: 2692 - DNA, 22 bp, synthetic construct
  misc_feature 1..22: note = chemically synthesized
  source 1..22: mol_type = other DNA
cccgggagcggcgacgggagca

SEQ ID NO: 2693 - DNA, 22 bp, synthetic construct
  misc_feature 1..22: note = chemically synthesized
  source 1..22: mol_type = other DNA
cggcagtggggggcgcgggcgg

SEQ ID NO: 2694 - DNA, 22 bp, synthetic construct
  misc_feature 1..22: note = chemically synthesized
  source 1..22: mol_type = other DNA
gccccggagagcgccgcgcccg

SEQ ID NO: 2695 - DNA, 22 bp, synthetic construct
  misc_feature 1..22: note = chemically synthesized
  source 1..22: mol_type = other DNA
cgagcgcgccgccgagttcctg

SEQ ID NO: 2696 - DNA, 22 bp, synthetic construct
  misc_feature 1..22: note = chemically synthesized
  source 1..22: mol_type = other DNA
gagcgcgccgccgagttcctgg

SEQ ID NO: 2697 - DNA, 22 bp, synthetic construct
  misc_feature 1..22: note = chemically synthesized
  source 1..22: mol_type = other DNA
ctggcggcctgtgcgggcggcg

SEQ ID NO: 2698 - DNA, 22 bp, synthetic construct
  misc_feature 1..22: note = chemically synthesized
  source 1..22: mol_type = other DNA
gcggcctgtgcgggcggcgacc

SEQ ID NO: 2699 - DNA, 22 bp, synthetic construct
  misc_feature 1..22: note = chemically synthesized
  source 1..22: mol_type = other DNA
tgcgggcggcgacctggacgag

SEQ ID NO: 2700 - DNA, 22 bp, synthetic construct
  misc_feature 1..22: note = chemically synthesized
  source 1..22: mol_type = other DNA
gacgaggcgcgtctgatgctgc

SEQ ID NO: 2701 - DNA, 22 bp, synthetic construct
  misc_feature 1..22: note = chemically synthesized
  source 1..22: mol_type = other DNA
atgctgcgcgccgccgaccctg

SEQ ID NO: 2702 - DNA, 22 bp, synthetic construct
  misc_feature 1..22: note = chemically synthesized
  source 1..22: mol_type = other DNA
cgcgccgccgaccctggccccg

SEQ ID NO: 2703 - DNA, 22 bp, synthetic construct
  misc_feature 1..22: note = chemically synthesized
  source 1..22: mol_type = other DNA
gccccggcgccgagctcgaccc

SEQ ID NO: 2704 - DNA, 22 bp, synthetic construct
  misc_feature 1..22: note = chemically synthesized
  source 1..22: mol_type = other DNA
gaccccgccgcgccgccgcccg

SEQ ID NO: 2705 - DNA, 22 bp, synthetic construct
  misc_feature 1..22: note = chemically synthesized
  source 1..22: mol_type = other DNA
gactccaccaacgccgacggta

SEQ ID NO: 2706 - DNA, 22 bp, synthetic construct
  misc_feature 1..22: note = chemically synthesized
  source 1..22: mol_type = other DNA
caccaacgccgacggtatcagc

SEQ ID NO: 2707 - DNA, 22 bp, synthetic construct
  misc_feature 1..22: note = chemically synthesized
  source 1..22: mol_type = other DNA
caccaggtcagcgccccccgcc

SEQ ID NO: 2708 - DNA, 22 bp, synthetic construct
  misc_feature 1..22: note = chemically synthesized
  source 1..22: mol_type = other DNA
ccggggccaggtccaccctctg

SEQ ID NO: 2709 - DNA, 22 bp, synthetic construct
  misc_feature 1..22: note = chemically synthesized
  source 1..22: mol_type = other DNA
tgctgcgccacctggggcatcc

SEQ ID NO: 2710 - DNA, 22 bp, synthetic construct
  misc_feature 1..22: note = chemically synthesized
  source 1..22: mol_type = other DNA
ctgcgccacctggggcatcctc

SEQ ID NO: 2711 - DNA, 22 bp, synthetic construct
  misc_feature 1..22: note = chemically synthesized
  source 1..22: mol_type = other DNA
cgccacctggggcatcctcctt

SEQ ID NO: 2712 - DNA, 22 bp, synthetic construct
  misc_feature 1..22: note = chemically synthesized
  source 1..22: mol_type = other DNA
gggcatcctccttccccgttgc

SEQ ID NO: 2713 - DNA, 22 bp, synthetic construct
  misc_feature 1..22: note = chemically synthesized
  source 1..22: mol_type = other DNA
cttccccgttgccagtctcgat

SEQ ID NO: 2714 - DNA, 22 bp, synthetic construct
  misc_feature 1..22: note = chemically synthesized
  source 1..22: mol_type = other DNA
ccccgttgccagtctcgatccg

SEQ ID NO: 2715 - DNA, 22 bp, synthetic construct
  misc_feature 1..22: note = chemically synthesized
  source 1..22: mol_type = other DNA
cccgttgccagtctcgatccgc

SEQ ID NO: 2716 - DNA, 22 bp, synthetic construct
  misc_feature 1..22: note = chemically synthesized
  source 1..22: mol_type = other DNA
ccagtctcgatccgccccgtcg

SEQ ID NO: 2717 - DNA, 22 bp, synthetic construct
  misc_feature 1..22: note = chemically synthesized
  source 1..22: mol_type = other DNA
gatccgccccgtcgttcctggc

SEQ ID NO: 2718 - DNA, 22 bp, synthetic construct
  misc_feature 1..22: note = chemically synthesized
  source 1..22: mol_type = other DNA
ctggccctgggctttgccaccc

SEQ ID NO: 2719 - DNA, 22 bp, synthetic construct
  misc_feature 1..22: note = chemically synthesized
  source 1..22: mol_type = other DNA
gccctgggctttgccaccctat

SEQ ID NO: 2720 - DNA, 22 bp, synthetic construct
  misc_feature 1..22: note = chemically synthesized
  source 1..22: mol_type = other DNA
ggctttgccaccctatgctgac

SEQ ID NO: 2721 - DNA, 22 bp, synthetic construct
  misc_feature 1..22: note = chemically synthesized
  source 1..22: mol_type = other DNA
tgccaccctatgctgacacccc

SEQ ID NO: 2722 - DNA, 22 bp, synthetic construct
  misc_feature 1..22: note = chemically synthesized
  source 1..22: mol_type = other DNA
gccaccctatgctgacaccccg

SEQ ID NO: 2723 - DNA, 22 bp, synthetic construct
  misc_feature 1..22: note = chemically synthesized
  source 1..22: mol_type = other DNA
ccaccctatgctgacaccccgt

SEQ ID NO: 2724 - DNA, 22 bp, synthetic construct
  misc_feature 1..22: note = chemically synthesized
  source 1..22: mol_type = other DNA
tgctgacaccccgtcccagtcc

SEQ ID NO: 2725 - DNA, 22 bp, synthetic construct
  misc_feature 1..22: note = chemically synthesized
  source 1..22: mol_type = other DNA
acaccccgtcccagtccccctt

SEQ ID NO: 2726 - DNA, 22 bp, synthetic construct
  misc_feature 1..22: note = chemically synthesized
  source 1..22: mol_type = other DNA
accattccccttcgaccacccc

SEQ ID NO: 2727 - DNA, 22 bp, synthetic construct
  misc_feature 1..22: note = chemically synthesized
  source 1..22: mol_type = other DNA
ccattccccttcgaccacccca

SEQ ID NO: 2728 - DNA, 22 bp, synthetic construct
  misc_feature 1..22: note = chemically synthesized
  source 1..22: mol_type = other DNA
cccttcgaccaccccacttccg

SEQ ID NO: 2729 - DNA, 22 bp, synthetic construct
  misc_feature 1..22: note = chemically synthesized
  source 1..22: mol_type = other DNA
cgaccaccccacttccgaattg

SEQ ID NO: 2730 - DNA, 22 bp, synthetic construct
  misc_feature 1..22: note = chemically synthesized
  source 1..22: mol_type = other DNA
gaccaccccacttccgaattgg

SEQ ID NO: 2731 - DNA, 22 bp, synthetic construct
  misc_feature 1..22: note = chemically synthesized
  source 1..22: mol_type = other DNA
ccgaattggagccgcttcaact

SEQ ID NO: 2732 - DNA, 22 bp, synthetic construct
  misc_feature 1..22: note = chemically synthesized
  source 1..22: mol_type = other DNA
cgaattggagccgcttcaactg

SEQ ID NO: 2733 - DNA, 22 bp, synthetic construct
  misc_feature 1..22: note = chemically synthesized
  source 1..22: mol_type = other DNA
gagccgcttcaactggccctgg

SEQ ID NO: 2734 - DNA, 22 bp, synthetic construct
  misc_feature 1..22: note = chemically synthesized
  source 1..22: mol_type = other DNA
caactggccctgggcttagcca

SEQ ID NO: 2735 - DNA, 22 bp, synthetic construct
  misc_feature 1..22: note = chemically synthesized
  source 1..22: mol_type = other DNA
aactggccctgggcttagccac

SEQ ID NO: 2736 - DNA, 22 bp, synthetic construct
  misc_feature 1..22: note = chemically synthesized
  source 1..22: mol_type = other DNA
gccctgggcttagccactctgt

SEQ ID NO: 2737 - DNA, 22 bp, synthetic construct
  misc_feature 1..22: note = chemically synthesized
  source 1..22: mol_type = other DNA
ggcttagccactctgtgctgac

SEQ ID NO: 2738 - DNA, 22 bp, synthetic construct
  misc_feature 1..22: note = chemically synthesized
  source 1..22: mol_type = other DNA
agccactctgtgctgaccactc

SEQ ID NO: 2739 - DNA, 22 bp, synthetic construct
  misc_feature 1..22: note = chemically synthesized
  source 1..22: mol_type = other DNA
gccactctgtgctgaccactct

SEQ ID NO: 2740 - DNA, 22 bp, synthetic construct
  misc_feature 1..22: note = chemically synthesized
  source 1..22: mol_type = other DNA
tgtgctgaccactctgccccag

SEQ ID NO: 2741 - DNA, 22 bp, synthetic construct
  misc_feature 1..22: note = chemically synthesized
  source 1..22: mol_type = other DNA
tgctgaccactctgccccaggc

SEQ ID NO: 2742 - DNA, 22 bp, synthetic construct
  misc_feature 1..22: note = chemically synthesized
  source 1..22: mol_type = other DNA
accactctgccccaggcctcct

SEQ ID NO: 2743 - DNA, 22 bp, synthetic construct
  misc_feature 1..22: note = chemically synthesized
  source 1..22: mol_type = other DNA
tgccccaggcctccttaccatt

SEQ ID NO: 2744 - DNA, 22 bp, synthetic construct
  misc_feature 1..22: note = chemically synthesized
  source 1..22: mol_type = other DNA
ccccaggcctccttaccattcc

SEQ ID NO: 2745 - DNA, 22 bp, synthetic construct
  misc_feature 1..22: note = chemically synthesized
  source 1..22: mol_type = other DNA
cttaccattccccttcgaccta

SEQ ID NO: 2746 - DNA, 22 bp, synthetic construct
  misc_feature 1..22: note = chemically synthesized
  source 1..22: mol_type = other DNA
accattccccttcgacctactc

SEQ ID NO: 2747 - DNA, 22 bp, synthetic construct
  misc_feature 1..22: note = chemically synthesized
  source 1..22: mol_type = other DNA
ccattccccttcgacctactct

SEQ ID NO: 2748 - DNA, 22 bp, synthetic construct
  misc_feature 1..22: note = chemically synthesized
  source 1..22: mol_type = other DNA
cccttcgacctactctcttccg

SEQ ID NO: 2749 - DNA, 22 bp, synthetic construct
  misc_feature 1..22: note = chemically synthesized
  source 1..22: mol_type = other DNA
cgacctactctcttccgcattg

SEQ ID NO: 2750 - DNA, 22 bp, synthetic construct
  misc_feature 1..22: note = chemically synthesized
  source 1..22: mol_type = other DNA
gacctactctcttccgcattgg

SEQ ID NO: 2751 - DNA, 22 bp, synthetic construct
  misc_feature 1..22: note = chemically synthesized
  source 1..22: mol_type = other DNA
ctctcttccgcattggagtcgc

SEQ ID NO: 2752 - DNA, 22 bp, synthetic construct
  misc_feature 1..22: note = chemically synthesized
  source 1..22: mol_type = other DNA
tcttccgcattggagtcgcttt

SEQ ID NO: 2753 - DNA, 22 bp, synthetic construct
  misc_feature 1..22: note = chemically synthesized
  source 1..22: mol_type = other DNA
ttccgcattggagtcgctttaa

SEQ ID NO: 2754 - DNA, 22 bp, synthetic construct
  misc_feature 1..22: note = chemically synthesized
  source 1..22: mol_type = other DNA
ccgcattggagtcgctttaact

SEQ ID NO: 2755 - DNA, 22 bp, synthetic construct
  misc_feature 1..22: note = chemically synthesized
  source 1..22: mol_type = other DNA
cgcattggagtcgctttaactg

SEQ ID NO: 2756 - DNA, 22 bp, synthetic construct
  misc_feature 1..22: note = chemically synthesized
  source 1..22: mol_type = other DNA
gagtcgctttaactggccctgg

SEQ ID NO: 2757 - DNA, 22 bp, synthetic construct
  misc_feature 1..22: note = chemically synthesized
  source 1..22: mol_type = other DNA
taactggccctggctttggcag

SEQ ID NO: 2758 - DNA, 22 bp, synthetic construct
  misc_feature 1..22: note = chemically synthesized
  source 1..22: mol_type = other DNA
aactggccctggctttggcagc

SEQ ID NO: 2759 - DNA, 22 bp, synthetic construct
  misc_feature 1..22: note = chemically synthesized
  source 1..22: mol_type = other DNA
actggccctggctttggcagcc

SEQ ID NO: 2760 - DNA, 22 bp, synthetic construct
  misc_feature 1..22: note = chemically synthesized
  source 1..22: mol_type = other DNA
gccctggctttggcagcctgtg

SEQ ID NO: 2761 - DNA, 22 bp, synthetic construct
  misc_feature 1..22: note = chemically synthesized
  source 1..22: mol_type = other DNA
gctttggcagcctgtgctgacc

SEQ ID NO: 2762 - DNA, 22 bp, synthetic construct
  misc_feature 1..22: note = chemically synthesized
  source 1..22: mol_type = other DNA
tggcagcctgtgctgacccatg

SEQ ID NO: 2763 - DNA, 22 bp, synthetic construct
  misc_feature 1..22: note = chemically synthesized
  source 1..22: mol_type = other DNA
ggcagcctgtgctgacccatgc

SEQ ID NO: 2764 - DNA, 22 bp, synthetic construct
  misc_feature 1..22: note = chemically synthesized
  source 1..22: mol_type = other DNA
gcagcctgtgctgacccatgca

SEQ ID NO: 2765 - DNA, 22 bp, synthetic construct
  misc_feature 1..22: note = chemically synthesized
  source 1..22: mol_type = other DNA
tgctgacccatgcagtcctcct

SEQ ID NO: 2766 - DNA, 22 bp, synthetic construct
  misc_feature 1..22: note = chemically synthesized
  source 1..22: mol_type = other DNA
acccatgcagtcctccttacca

SEQ ID NO: 2767 - DNA, 22 bp, synthetic construct
  misc_feature 1..22: note = chemically synthesized
  source 1..22: mol_type = other DNA
cttaccatccctccctcgactt

SEQ ID NO: 2768 - DNA, 22 bp, synthetic construct
  misc_feature 1..22: note = chemically synthesized
  source 1..22: mol_type = other DNA
accatccctccctcgacttccc

SEQ ID NO: 2769 - DNA, 22 bp, synthetic construct
  misc_feature 1..22: note = chemically synthesized
  source 1..22: mol_type = other DNA
ccatccctccctcgacttcccc

SEQ ID NO: 2770 - DNA, 22 bp, synthetic construct
  misc_feature 1..22: note = chemically synthesized
  source 1..22: mol_type = other DNA
cctcgacttcccctcttccgat

SEQ ID NO: 2771 - DNA, 22 bp, synthetic construct
  misc_feature 1..22: note = chemically synthesized
  source 1..22: mol_type = other DNA
gacttcccctcttccgatgttg

SEQ ID NO: 2772 - DNA, 22 bp, synthetic construct
  misc_feature 1..22: note = chemically synthesized
  source 1..22: mol_type = other DNA
cccctcttccgatgttgagccc

SEQ ID NO: 2773 - DNA, 22 bp, synthetic construct
  misc_feature 1..22: note = chemically synthesized
  source 1..22: mol_type = other DNA
ccctcttccgatgttgagcccc

SEQ ID NO: 2774 - DNA, 22 bp, synthetic construct
  misc_feature 1..22: note = chemically synthesized
  source 1..22: mol_type = other DNA
ttccgatgttgagcccctccag

SEQ ID NO: 2775 - DNA, 22 bp, synthetic construct
  misc_feature 1..22: note = chemically synthesized
  source 1..22: mol_type = other DNA
ccgatgttgagcccctccagcc

SEQ ID NO: 2776 - DNA, 22 bp, synthetic construct
  misc_feature 1..22: note = chemically synthesized
  source 1..22: mol_type = other DNA
cgatgttgagcccctccagccg

SEQ ID NO: 2777 - DNA, 22 bp, synthetic construct
  misc_feature 1..22: note = chemically synthesized
  source 1..22: mol_type = other DNA
agcccctccagccggtcctgga

SEQ ID NO: 2778 - DNA, 22 bp, synthetic construct
  misc_feature 1..22: note = chemically synthesized
  source 1..22: mol_type = other DNA
cagccggtcctggactttgtct

SEQ ID NO: 2779 - DNA, 22 bp, synthetic construct
  misc_feature 1..22: note = chemically synthesized
  source 1..22: mol_type = other DNA
gactttgtctccttccctgccc

SEQ ID NO: 2780 - DNA, 22 bp, synthetic construct
  misc_feature 1..22: note = chemically synthesized
  source 1..22: mol_type = other DNA
tgtctccttccctgccctgccc

SEQ ID NO: 2781 - DNA, 22 bp, synthetic construct
  misc_feature 1..22: note = chemically synthesized
  source 1..22: mol_type = other DNA
gtctccttccctgccctgccct

SEQ ID NO: 2782 - DNA, 22 bp, synthetic construct
  misc_feature 1..22: note = chemically synthesized
  source 1..22: mol_type = other DNA
tctccttccctgccctgccctc

SEQ ID NO: 2783 - DNA, 22 bp, synthetic construct
  misc_feature 1..22: note = chemically synthesized
  source 1..22: mol_type = other DNA
cttccctgccctgccctctcct

SEQ ID NO: 2784 - DNA, 22 bp, synthetic construct
  misc_feature 1..22: note = chemically synthesized
  source 1..22: mol_type = other DNA
ccctgccctgccctctcctgaa

SEQ ID NO: 2785 - DNA, 22 bp, synthetic construct
  misc_feature 1..22: note = chemically synthesized
  source 1..22: mol_type = other DNA
cctgccctgccctctcctgaac

SEQ ID NO: 2786 - DNA, 22 bp, synthetic construct
  misc_feature 1..22: note = chemically synthesized
  source 1..22: mol_type = other DNA
ccctgccctctcctgaacctga

SEQ ID NO: 2787 - DNA, 22 bp, synthetic construct
  misc_feature 1..22: note = chemically synthesized
  source 1..22: mol_type = other DNA
ccctctcctgaacctgagccag

SEQ ID NO: 2788 - DNA, 22 bp, synthetic construct
  misc_feature 1..22: note = chemically synthesized
  source 1..22: mol_type = other DNA
tcctgaacctgagccagctccc

SEQ ID NO: 2789 - DNA, 22 bp, synthetic construct
  misc_feature 1..22: note = chemically synthesized
  source 1..22: mol_type = other DNA
ctgaacctgagccagctcccat

SEQ ID NO: 2790 - DNA, 22 bp, synthetic construct
  misc_feature 1..22: note = chemically synthesized
  source 1..22: mol_type = other DNA
aacctgagccagctcccatagc

SEQ ID NO: 2791 - DNA, 22 bp, synthetic construct
  misc_feature 1..22: note = chemically synthesized
  source 1..22: mol_type = other DNA
agccagctcccatagctcagtc

SEQ ID NO: 2792 - DNA, 22 bp, synthetic construct
  misc_feature 1..22: note = chemically synthesized
  source 1..22: mol_type = other DNA
ccatagctcagtctggtctatc

SEQ ID NO: 2793 - DNA, 22 bp, synthetic construct
  misc_feature 1..22: note = chemically synthesized
  source 1..22: mol_type = other DNA
agtctggtctatctgcctggcc

SEQ ID NO: 2794 - DNA, 22 bp, synthetic construct
  misc_feature 1..22: note = chemically synthesized
  source 1..22: mol_type = other DNA
gtctatctgcctggccctggcc

SEQ ID NO: 2795 - DNA, 22 bp, synthetic construct
  misc_feature 1..22: note = chemically synthesized
  source 1..22: mol_type = other DNA
tctgcctggccctggccattgt

SEQ ID NO: 2796 - DNA, 22 bp, synthetic construct
  misc_feature 1..22: note = chemically synthesized
  source 1..22: mol_type = other DNA
cctggccctggccattgtcact

SEQ ID NO: 2797 - DNA, 22 bp, synthetic construct
  misc_feature 1..22: note = chemically synthesized
  source 1..22: mol_type = other DNA
gccctggccattgtcactttgc

SEQ ID NO: 2798 - DNA, 22 bp, synthetic construct
  misc_feature 1..22: note = chemically synthesized
  source 1..22: mol_type = other DNA
gccattgtcactttgcgctgcc

SEQ ID NO: 2799 - DNA, 22 bp, synthetic construct
  misc_feature 1..22: note = chemically synthesized
  source 1..22: mol_type = other DNA
tcactttgcgctgccctcctct

SEQ ID NO: 2800 - DNA, 22 bp, synthetic construct
  misc_feature 1..22: note = chemically synthesized
  source 1..22: mol_type = other DNA
tgcgctgccctcctctcgcccc

SEQ ID NO: 2801 - DNA, 22 bp, synthetic construct
  misc_feature 1..22: note = chemically synthesized
  source 1..22: mol_type = other DNA
gcgctgccctcctctcgccccc

SEQ ID NO: 2802 - DNA, 22 bp, synthetic construct
  misc_feature 1..22: note = chemically synthesized
  source 1..22: mol_type = other DNA
cgctgccctcctctcgcccccg

SEQ ID NO: 2803 - DNA, 22 bp, synthetic construct
  misc_feature 1..22: note = chemically synthesized
  source 1..22: mol_type = other DNA
ccctcctctcgcccccgagtgc

SEQ ID NO: 2804 - DNA, 22 bp, synthetic construct
  misc_feature 1..22: note = chemically synthesized
  source 1..22: mol_type = other DNA
ctctcgcccccgagtgcccttg

SEQ ID NO: 2805 - DNA, 22 bp, synthetic construct
  misc_feature 1..22: note = chemically synthesized
  source 1..22: mol_type = other DNA
tcgcccccgagtgcccttgctg

SEQ ID NO: 2806 - DNA, 22 bp, synthetic construct
  misc_feature 1..22: note = chemically synthesized
  source 1..22: mol_type = other DNA
gcccccgagtgcccttgctgtg

SEQ ID NO: 2807 - DNA, 22 bp, synthetic construct
  misc_feature 1..22: note = chemically synthesized
  source 1..22: mol_type = other DNA
gctgtgccgccggaactctgcc

SEQ ID NO: 2808 - DNA, 22 bp, synthetic construct
  misc_feature 1..22: note = chemically synthesized
  source 1..22: mol_type = other DNA
ctgtgccgccggaactctgccc

SEQ ID NO: 2809 - DNA, 22 bp, synthetic construct
  misc_feature 1..22: note = chemically synthesized
  source 1..22: mol_type = other DNA
tgccgccggaactctgccctct

SEQ ID NO: 2810 - DNA, 22 bp, synthetic construct
  misc_feature 1..22: note = chemically synthesized
  source 1..22: mol_type = other DNA
tgccctctaacgctgccgtctc

SEQ ID NO: 2811 - DNA, 22 bp, synthetic construct
  misc_feature 1..22: note = chemically synthesized
  source 1..22: mol_type = other DNA
ccctctaacgctgccgtctctc

SEQ ID NO: 2812 - DNA, 22 bp, synthetic construct
  misc_feature 1..22: note = chemically synthesized
  source 1..22: mol_type = other DNA
taacgctgccgtctctctcctg

SEQ ID NO: 2813 - DNA, 22 bp, synthetic construct
  misc_feature 1..22: note = chemically synthesized
  source 1..22: mol_type = other DNA
acgctgccgtctctctcctgag

SEQ ID NO: 2814 - DNA, 22 bp, synthetic construct
  misc_feature 1..22: note = chemically synthesized
  source 1..22: mol_type = other DNA
ccgtctctctcctgagtccgga

SEQ ID NO: 2815 - DNA, 22 bp, synthetic construct
  misc_feature 1..22: note = chemically synthesized
  source 1..22: mol_type = other DNA
tctcctgagtccggaccacttt

SEQ ID NO: 2816 - DNA, 22 bp, synthetic construct
  misc_feature 1..22: note = chemically synthesized
  source 1..22: mol_type = other DNA
tcctgagtccggaccactttga

SEQ ID NO: 2817 - DNA, 22 bp, synthetic construct
  misc_feature 1..22: note = chemically synthesized
  source 1..22: mol_type = other DNA
ctgagtccggaccactttgagc

SEQ ID NO: 2818 - DNA, 22 bp, synthetic construct
  misc_feature 1..22: note = chemically synthesized
  source 1..22: mol_type = other DNA
agtccggaccactttgagctct

SEQ ID NO: 2819 - DNA, 22 bp, synthetic construct
  misc_feature 1..22: note = chemically synthesized
  source 1..22: mol_type = other DNA
tgagctctactggcttctgcgc

SEQ ID NO: 2820 - DNA, 22 bp, synthetic construct
  misc_feature 1..22: note = chemically synthesized
  source 1..22: mol_type = other DNA
gagctctactggcttctgcgcc

SEQ ID NO: 2821 - DNA, 22 bp, synthetic construct
  misc_feature 1..22: note = chemically synthesized
  source 1..22: mol_type = other DNA
agctctactggcttctgcgccg

SEQ ID NO: 2822 - DNA, 22 bp, synthetic construct
  misc_feature 1..22: note = chemically synthesized
  source 1..22: mol_type = other DNA
tactggcttctgcgccgcctct

SEQ ID NO: 2823 - DNA, 22 bp, synthetic construct
  misc_feature 1..22: note = chemically synthesized
  source 1..22: mol_type = other DNA
ctggcttctgcgccgcctctgg

SEQ ID NO: 2824 - DNA, 22 bp, synthetic construct
  misc_feature 1..22: note = chemically synthesized
  source 1..22: mol_type = other DNA
gcttctgcgccgcctctggccc

SEQ ID NO: 2825 - DNA, 22 bp, synthetic construct
  misc_feature 1..22: note = chemically synthesized
  source 1..22: mol_type = other DNA
ctgcgccgcctctggcccactg

SEQ ID NO: 2826 - DNA, 22 bp, synthetic construct
  misc_feature 1..22: note = chemically synthesized
  source 1..22: mol_type = other DNA
tgcgccgcctctggcccactgt

SEQ ID NO: 2827 - DNA, 22 bp, synthetic construct
  misc_feature 1..22: note = chemically synthesized
  source 1..22: mol_type = other DNA
cgccgcctctggcccactgttt

SEQ ID NO: 2828 - DNA, 22 bp, synthetic construct
  misc_feature 1..22: note = chemically synthesized
  source 1..22: mol_type = other DNA
tggcccactgtttccccttccc

SEQ ID NO: 2829 - DNA, 22 bp, synthetic construct
  misc_feature 1..22: note = chemically synthesized
  source 1..22: mol_type = other DNA
gcccactgtttccccttcccag

SEQ ID NO: 2830 - DNA, 22 bp, synthetic construct
  misc_feature 1..22: note = chemically synthesized
  source 1..22: mol_type = other DNA
tttccccttcccaggcaggtcc

SEQ ID NO: 2831 - DNA, 22 bp, synthetic construct
  misc_feature 1..22: note = chemically synthesized
  source 1..22: mol_type = other DNA
ccccttcccaggcaggtcctgc

SEQ ID NO: 2832 - DNA, 22 bp, synthetic construct
  misc_feature 1..22: note = chemically synthesized
  source 1..22: mol_type = other DNA
cccttcccaggcaggtcctgct

SEQ ID NO: 2833 - DNA, 22 bp, synthetic construct
  misc_feature 1..22: note = chemically synthesized
  source 1..22: mol_type = other DNA
cccaggcaggtcctgctttctc

SEQ ID NO: 2834 - DNA, 22 bp, synthetic construct
  misc_feature 1..22: note = chemically synthesized
  source 1..22: mol_type = other DNA
ccaggcaggtcctgctttctct

SEQ ID NO: 2835 - DNA, 22 bp, synthetic construct
  misc_feature 1..22: note = chemically synthesized
  source 1..22: mol_type = other DNA
ctttctctgacctgcattctct

SEQ ID NO: 2836 - DNA, 22 bp, synthetic construct
  misc_feature 1..22: note = chemically synthesized
  source 1..22: mol_type = other DNA
tctctgacctgcattctctccc

SEQ ID NO: 2837 - DNA, 22 bp, synthetic construct
  misc_feature 1..22: note = chemically synthesized
  source 1..22: mol_type = other DNA
ctctgacctgcattctctcccc

SEQ ID NO: 2838 - DNA, 22 bp, synthetic construct
  misc_feature 1..22: note = chemically synthesized
  source 1..22: mol_type = other DNA
tctgacctgcattctctcccct

SEQ ID NO: 2839 - DNA, 22 bp, synthetic construct
  misc_feature 1..22: note = chemically synthesized
  source 1..22: mol_type = other DNA
tgacctgcattctctcccctgg

SEQ ID NO: 2840 - DNA, 22 bp, synthetic construct
  misc_feature 1..22: note = chemically synthesized
  source 1..22: mol_type = other DNA
acctgcattctctcccctgggc

SEQ ID NO: 2841 - DNA, 22 bp, synthetic construct
  misc_feature 1..22: note = chemically synthesized
  source 1..22: mol_type = other DNA
cattctctcccctgggcctgtg

SEQ ID NO: 2842 - DNA, 22 bp, synthetic construct
  misc_feature 1..22: note = chemically synthesized
  source 1..22: mol_type = other DNA
tctcccctgggcctgtgccgct

SEQ ID NO: 2843 - DNA, 22 bp, synthetic construct
  misc_feature 1..22: note = chemically synthesized
  source 1..22: mol_type = other DNA
tcccctgggcctgtgccgcttt

SEQ ID NO: 2844 - DNA, 22 bp, synthetic construct
  misc_feature 1..22: note = chemically synthesized
  source 1..22: mol_type = other DNA
ccctgggcctgtgccgctttct

SEQ ID NO: 2845 - DNA, 22 bp, synthetic construct
  misc_feature 1..22: note = chemically synthesized
  source 1..22: mol_type = other DNA
ggcctgtgccgctttctgtctg

SEQ ID NO: 2846 - DNA, 22 bp, synthetic construct
  misc_feature 1..22: note = chemically synthesized
  source 1..22: mol_type = other DNA
tgccgctttctgtctgcagctt

SEQ ID NO: 2847 - DNA, 22 bp, synthetic construct
  misc_feature 1..22: note = chemically synthesized
  source 1..22: mol_type = other DNA
tctgtctgcagcttgtggcctg

SEQ ID NO: 2848 - DNA, 22 bp, synthetic construct
  misc_feature 1..22: note = chemically synthesized
  source 1..22: mol_type = other DNA
ctgtctgcagcttgtggcctgg

SEQ ID NO: 2849 - DNA, 22 bp, synthetic construct
  misc_feature 1..22: note = chemically synthesized
  source 1..22: mol_type = other DNA
tgtctgcagcttgtggcctggg

SEQ ID NO: 2850 - DNA, 22 bp, synthetic construct
  misc_feature 1..22: note = chemically synthesized
  source 1..22: mol_type = other DNA
tctgcagcttgtggcctgggtc

SEQ ID NO: 2851 - DNA, 22 bp, synthetic construct
  misc_feature 1..22: note = chemically synthesized
  source 1..22: mol_type = other DNA
cagcttgtggcctgggtcacct

SEQ ID NO: 2852 - DNA, 22 bp, synthetic construct
  misc_feature 1..22: note = chemically synthesized
  source 1..22: mol_type = other DNA
gtggcctgggtcacctctacgg

SEQ ID NO: 2853 - DNA, 22 bp, synthetic construct
  misc_feature 1..22: note = chemically synthesized
  source 1..22: mol_type = other DNA
tggcctgggtcacctctacggc

SEQ ID NO: 2854 - DNA, 22 bp, synthetic construct
  misc_feature 1..22: note = chemically synthesized
  source 1..22: mol_type = other DNA
ggtcacctctacggctggccca

SEQ ID NO: 2855 - DNA, 22 bp, synthetic construct
  misc_feature 1..22: note = chemically synthesized
  source 1..22: mol_type = other DNA
tacggctggcccagatccttcc

SEQ ID NO: 2856 - DNA, 22 bp, synthetic construct
  misc_feature 1..22: note = chemically synthesized
  source 1..22: mol_type = other DNA
cggctggcccagatccttccct

SEQ ID NO: 2857 - DNA, 22 bp, synthetic construct
  misc_feature 1..22: note = chemically synthesized
  source 1..22: mol_type = other DNA
gcccagatccttccctgccgcc

SEQ ID NO: 2858 - DNA, 22 bp, synthetic construct
  misc_feature 1..22: note = chemically synthesized
  source 1..22: mol_type = other DNA
ccctgccgcctccttcaggttc

SEQ ID NO: 2859 - DNA, 22 bp, synthetic construct
  misc_feature 1..22: note = chemically synthesized
  source 1..22: mol_type = other DNA
cctgccgcctccttcaggttcc

SEQ ID NO: 2860 - DNA, 22 bp, synthetic construct
  misc_feature 1..22: note = chemically synthesized
  source 1..22: mol_type = other DNA
ccgcctccttcaggttccgtct

SEQ ID NO: 2861 - DNA, 22 bp, synthetic construct
  misc_feature 1..22: note = chemically synthesized
  source 1..22: mol_type = other DNA
cttcaggttccgtcttcctcca

SEQ ID NO: 2862 - DNA, 22 bp, synthetic construct
  misc_feature 1..22: note = chemically synthesized
  source 1..22: mol_type = other DNA
caggttccgtcttcctccactc

SEQ ID NO: 2863 - DNA, 22 bp, synthetic construct
  misc_feature 1..22: note = chemically synthesized
  source 1..22: mol_type = other DNA
aggttccgtcttcctccactcc

SEQ ID NO: 2864 - DNA, 22 bp, synthetic construct
  misc_feature 1..22: note = chemically synthesized
  source 1..22: mol_type = other DNA
cgtcttcctccactccctcttc

SEQ ID NO: 2865 - DNA, 22 bp, synthetic construct
  misc_feature 1..22: note = chemically synthesized
  source 1..22: mol_type = other DNA
cctccactccctcttccccttg

SEQ ID NO: 2866 - DNA, 22 bp, synthetic construct
  misc_feature 1..22: note = chemically synthesized
  source 1..22: mol_type = other DNA
ctccactccctcttccccttgc

SEQ ID NO: 2867 - DNA, 22 bp, synthetic construct
  misc_feature 1..22: note = chemically synthesized
  source 1..22: mol_type = other DNA
cactccctcttccccttgctct

SEQ ID NO: 2868 - DNA, 22 bp, synthetic construct
  misc_feature 1..22: note = chemically synthesized
  source 1..22: mol_type = other DNA
cctcttccccttgctctctgct

SEQ ID NO: 2869 - DNA, 22 bp, synthetic construct
  misc_feature 1..22: note = chemically synthesized
  source 1..22: mol_type = other DNA
ttccccttgctctctgctgtgt

SEQ ID NO: 2870 - DNA, 22 bp, synthetic construct
  misc_feature 1..22: note = chemically synthesized
  source 1..22: mol_type = other DNA
ccccttgctctctgctgtgttg

SEQ ID NO: 2871 - DNA, 22 bp, synthetic construct
  misc_feature 1..22: note = chemically synthesized
  source 1..22: mol_type = other DNA
cccttgctctctgctgtgttgc

SEQ ID NO: 2872 - DNA, 22 bp, synthetic construct
  misc_feature 1..22: note = chemically synthesized
  source 1..22: mol_type = other DNA
gctctctgctgtgttgctgccc

SEQ ID NO: 2873 - DNA, 22 bp, synthetic construct
  misc_feature 1..22: note = chemically synthesized
  source 1..22: mol_type = other DNA
ctctctgctgtgttgctgccca

SEQ ID NO: 2874 - DNA, 22 bp, synthetic construct
  misc_feature 1..22: note = chemically synthesized
  source 1..22: mol_type = other DNA
tctgctgtgttgctgcccaagg

SEQ ID NO: 2875 - DNA, 22 bp, synthetic construct
  misc_feature 1..22: note = chemically synthesized
  source 1..22: mol_type = other DNA
tgctgtgttgctgcccaaggat

SEQ ID NO: 2876 - DNA, 22 bp, synthetic construct
  misc_feature 1..22: note = chemically synthesized
  source 1..22: mol_type = other DNA
ctgtgttgctgcccaaggatgc

SEQ ID NO: 2877 - DNA, 22 bp, synthetic construct
  misc_feature 1..22: note = chemically synthesized
  source 1..22: mol_type = other DNA
tgttgctgcccaaggatgctct

SEQ ID NO: 2878 - DNA, 22 bp, synthetic construct
  misc_feature 1..22: note = chemically synthesized
  source 1..22: mol_type = other DNA
ctgcccaaggatgctctttccg

SEQ ID NO: 2879 - DNA, 22 bp, synthetic construct
  misc_feature 1..22: note = chemically synthesized
  source 1..22: mol_type = other DNA
cccaaggatgctctttccggag

SEQ ID NO: 2880 - DNA, 22 bp, synthetic construct
  misc_feature 1..22: note = chemically synthesized
  source 1..22: mol_type = other DNA
tttccggagcacttccttctcg

SEQ ID NO: 2881 - DNA, 22 bp, synthetic construct
  misc_feature 1..22: note = chemically synthesized
  source 1..22: mol_type = other DNA
tccggagcacttccttctcggc

SEQ ID NO: 2882 - DNA, 22 bp, synthetic construct
  misc_feature 1..22: note = chemically synthesized
  source 1..22: mol_type = other DNA
ccggagcacttccttctcggcg

SEQ ID NO: 2883 - DNA, 22 bp, synthetic construct
  misc_feature 1..22: note = chemically synthesized
  source 1..22: mol_type = other DNA
cggagcacttccttctcggcgc

SEQ ID NO: 2884 - DNA, 22 bp, synthetic construct
  misc_feature 1..22: note = chemically synthesized
  source 1..22: mol_type = other DNA
ccttctcggcgctgcaccacgt

SEQ ID NO: 2885 - DNA, 22 bp, synthetic construct
  misc_feature 1..22: note = chemically synthesized
  source 1..22: mol_type = other DNA
cttctcggcgctgcaccacgtg

SEQ ID NO: 2886 - DNA, 22 bp, synthetic construct
  misc_feature 1..22: note = chemically synthesized
  source 1..22: mol_type = other DNA
ctcggcgctgcaccacgtgatg

SEQ ID NO: 2887 - DNA, 22 bp, synthetic construct
  misc_feature 1..22: note = chemically synthesized
  source 1..22: mol_type = other DNA
tcggcgctgcaccacgtgatgt

SEQ ID NO: 2888 - DNA, 22 bp, synthetic construct
  misc_feature 1..22: note = chemically synthesized
  source 1..22: mol_type = other DNA
ggcgctgcaccacgtgatgtcc

SEQ ID NO: 2889 - DNA, 22 bp, synthetic construct
  misc_feature 1..22: note = chemically synthesized
  source 1..22: mol_type = other DNA
caccacgtgatgtcctctgagc

SEQ ID NO: 2890 - DNA, 22 bp, synthetic construct
  misc_feature 1..22: note = chemically synthesized
  source 1..22: mol_type = other DNA
tgagcggatcctccccgtgtct

SEQ ID NO: 2891 - DNA, 22 bp, synthetic construct
  misc_feature 1..22: note = chemically synthesized
  source 1..22: mol_type = other DNA
agcggatcctccccgtgtctgg

SEQ ID NO: 2892 - DNA, 22 bp, synthetic construct
  misc_feature 1..22: note = chemically synthesized
  source 1..22: mol_type = other DNA
cccgtgtctgggtcctctccgg

SEQ ID NO: 2893 - DNA, 22 bp, synthetic construct
  misc_feature 1..22: note = chemically synthesized
  source 1..22: mol_type = other DNA
ggtcctctccgggcatctctcc

SEQ ID NO: 2894 - DNA, 22 bp, synthetic construct
  misc_feature 1..22: note = chemically synthesized
  source 1..22: mol_type = other DNA
tccgggcatctctcctccctca

SEQ ID NO: 2895 - DNA, 22 bp, synthetic construct
  misc_feature 1..22: note = chemically synthesized
  source 1..22: mol_type = other DNA
cgggcatctctcctccctcacc

SEQ ID NO: 2896 - DNA, 22 bp, synthetic construct
  misc_feature 1..22: note = chemically synthesized
  source 1..22: mol_type = other DNA
tcctccctcacccaaccccatg

SEQ ID NO: 2897 - DNA, 22 bp, synthetic construct
  misc_feature 1..22: note = chemically synthesized
  source 1..22: mol_type = other DNA
ctccctcacccaaccccatgcc

SEQ ID NO: 2898 - DNA, 22 bp, synthetic construct
  misc_feature 1..22: note = chemically synthesized
  source 1..22: mol_type = other DNA
cctcacccaaccccatgccgtc

SEQ ID NO: 2899 - DNA, 22 bp, synthetic construct
  misc_feature 1..22: note = chemically synthesized
  source 1..22: mol_type = other DNA
acccaaccccatgccgtcttca

SEQ ID NO: 2900 - DNA, 22 bp, synthetic construct
  misc_feature 1..22: note = chemically synthesized
  source 1..22: mol_type = other DNA
cactcgctgggttcccttttcc

SEQ ID NO: 2901 - DNA, 22 bp, synthetic construct
  misc_feature 1..22: note = chemically synthesized
  source 1..22: mol_type = other DNA
actcgctgggttcccttttcct

SEQ ID NO: 2902 - DNA, 22 bp, synthetic construct
  misc_feature 1..22: note = chemically synthesized
  source 1..22: mol_type = other DNA
gctgggttcccttttccttctc

SEQ ID NO: 2903 - DNA, 22 bp, synthetic construct
  misc_feature 1..22: note = chemically synthesized
  source 1..22: mol_type = other DNA
ggttcccttttccttctccttc

SEQ ID NO: 2904 - DNA, 22 bp, synthetic construct
  misc_feature 1..22: note = chemically synthesized
  source 1..22: mol_type = other DNA
ccttttccttctccttctgggg

SEQ ID NO: 2905 - DNA, 22 bp, synthetic construct
  misc_feature 1..22: note = chemically synthesized
  source 1..22: mol_type = other DNA
ttccttctccttctggggcctg

SEQ ID NO: 2906 - DNA, 22 bp, synthetic construct
  misc_feature 1..22: note = chemically synthesized
  source 1..22: mol_type = other DNA
tccttctccttctggggcctgt

SEQ ID NO: 2907 - DNA, 22 bp, synthetic construct
  misc_feature 1..22: note = chemically synthesized
  source 1..22: mol_type = other DNA
ccttctccttctggggcctgtg

SEQ ID NO: 2908 - DNA, 22 bp, synthetic construct
  misc_feature 1..22: note = chemically synthesized
  source 1..22: mol_type = other DNA
cttctccttctggggcctgtgc

SEQ ID NO: 2909 - DNA, 22 bp, synthetic construct
  misc_feature 1..22: note = chemically synthesized
  source 1..22: mol_type = other DNA
ctccttctggggcctgtgccat

SEQ ID NO: 2910 - DNA, 22 bp, synthetic construct
  misc_feature 1..22: note = chemically synthesized
  source 1..22: mol_type = other DNA
tccttctggggcctgtgccatc

SEQ ID NO: 2911 - DNA, 22 bp, synthetic construct
  misc_feature 1..22: note = chemically synthesized
  source 1..22: mol_type = other DNA
cttctggggcctgtgccatctc

SEQ ID NO: 2912 - DNA, 22 bp, synthetic construct
  misc_feature 1..22: note = chemically synthesized
  source 1..22: mol_type = other DNA
ctggggcctgtgccatctctcg

SEQ ID NO: 2913 - DNA, 22 bp, synthetic construct
  misc_feature 1..22: note = chemically synthesized
  source 1..22: mol_type = other DNA
tggggcctgtgccatctctcgt

SEQ ID NO: 2914 - DNA, 22 bp, synthetic construct
  misc_feature 1..22: note = chemically synthesized
  source 1..22: mol_type = other DNA
gggcctgtgccatctctcgttt

SEQ ID NO: 2915 - DNA, 22 bp, synthetic construct
  misc_feature 1..22: note = chemically synthesized
  source 1..22: mol_type = other DNA
tgccatctctcgtttcttagga

SEQ ID NO: 2916 - DNA, 22 bp, synthetic construct
  misc_feature 1..22: note = chemically synthesized
  source 1..22: mol_type = other DNA
tcgtttcttaggatggccttct

SEQ ID NO: 2917 - DNA, 22 bp, synthetic construct
  misc_feature 1..22: note = chemically synthesized
  source 1..22: mol_type = other DNA
gtttcttaggatggccttctcc

SEQ ID NO: 2918 - DNA, 22 bp, synthetic construct
  misc_feature 1..22: note = chemically synthesized
  source 1..22: mol_type = other DNA
cttaggatggccttctccgacg

SEQ ID NO: 2919 - DNA, 22 bp, synthetic construct
  misc_feature 1..22: note = chemically synthesized
  source 1..22: mol_type = other DNA
ttaggatggccttctccgacgg

SEQ ID NO: 2920 - DNA, 22 bp, synthetic construct
  misc_feature 1..22: note = chemically synthesized
  source 1..22: mol_type = other DNA
aggatggccttctccgacggat

SEQ ID NO: 2921 - DNA, 22 bp, synthetic construct
  misc_feature 1..22: note = chemically synthesized
  source 1..22: mol_type = other DNA
ggatggccttctccgacggatg

SEQ ID NO: 2922 - DNA, 22 bp, synthetic construct
  misc_feature 1..22: note = chemically synthesized
  source 1..22: mol_type = other DNA
ctccgacggatgtctcccttgc

SEQ ID NO: 2923 - DNA, 22 bp, synthetic construct
  misc_feature 1..22: note = chemically synthesized
  source 1..22: mol_type = other DNA
tccgacggatgtctcccttgcg

SEQ ID NO: 2924 - DNA, 22 bp, synthetic construct
  misc_feature 1..22: note = chemically synthesized
  source 1..22: mol_type = other DNA
cgacggatgtctcccttgcgtc

SEQ ID NO: 2925 - DNA, 22 bp, synthetic construct
  misc_feature 1..22: note = chemically synthesized
  source 1..22: mol_type = other DNA
ccttgcgtcccgcctccccttc

SEQ ID NO: 2926 - DNA, 22 bp, synthetic construct
  misc_feature 1..22: note = chemically synthesized
  source 1..22: mol_type = other DNA
gcgtcccgcctccccttcttgt

SEQ ID NO: 2927 - DNA, 22 bp, synthetic construct
  misc_feature 1..22: note = chemically synthesized
  source 1..22: mol_type = other DNA
cgtcccgcctccccttcttgta

SEQ ID NO: 2928 - DNA, 22 bp, synthetic construct
  misc_feature 1..22: note = chemically synthesized
  source 1..22: mol_type = other DNA
cccttcttgtaggcctgcatca

SEQ ID NO: 2929 - DNA, 22 bp, synthetic construct
  misc_feature 1..22: note = chemically synthesized
  source 1..22: mol_type = other DNA
cttgtaggcctgcatcatcacc

SEQ ID NO: 2930 - DNA, 22 bp, synthetic construct
  misc_feature 1..22: note = chemically synthesized
  source 1..22: mol_type = other DNA
ttgtaggcctgcatcatcaccg

SEQ ID NO: 2931 - DNA, 22 bp, synthetic construct
  misc_feature 1..22: note = chemically synthesized
  source 1..22: mol_type = other DNA
gtaggcctgcatcatcaccgtt

SEQ ID NO: 2932 - DNA, 22 bp, synthetic construct
  misc_feature 1..22: note = chemically synthesized
  source 1..22: mol_type = other DNA
taggcctgcatcatcaccgttt

SEQ ID NO: 2933 - DNA, 22 bp, synthetic construct
  misc_feature 1..22: note = chemically synthesized
  source 1..22: mol_type = other DNA
catcatcaccgtttttctggac

SEQ ID NO: 2934 - DNA, 22 bp, synthetic construct
  misc_feature 1..22: note = chemically synthesized
  source 1..22: mol_type = other DNA
ttctggacaaccccaaagtacc

SEQ ID NO: 2935 - DNA, 22 bp, synthetic construct
  misc_feature 1..22: note = chemically synthesized
  source 1..22: mol_type = other DNA
tctggacaaccccaaagtaccc

SEQ ID NO: 2936 - DNA, 22 bp, synthetic construct
  misc_feature 1..22: note = chemically synthesized
  source 1..22: mol_type = other DNA
ctggacaaccccaaagtacccc

SEQ ID NO: 2937 - DNA, 22 bp, synthetic construct
  misc_feature 1..22: note = chemically synthesized
  source 1..22: mol_type = other DNA
tggacaaccccaaagtaccccg

SEQ ID NO: 2938 - DNA, 22 bp, synthetic construct
  misc_feature 1..22: note = chemically synthesized
  source 1..22: mol_type = other DNA
gacaaccccaaagtaccccgtc

SEQ ID NO: 2939 - DNA, 22 bp, synthetic construct
  misc_feature 1..22: note = chemically synthesized
  source 1..22: mol_type = other DNA
cctggctttagccacctctcca

SEQ ID NO: 2940 - DNA, 22 bp, synthetic construct
  misc_feature 1..22: note = chemically synthesized
  source 1..22: mol_type = other DNA
gctttagccacctctccatcct

SEQ ID NO: 2941 - DNA, 22 bp, synthetic construct
  misc_feature 1..22: note = chemically synthesized
  source 1..22: mol_type = other DNA
tagccacctctccatcctcttg

SEQ ID NO: 2942 - DNA, 22 bp, synthetic construct
  misc_feature 1..22: note = chemically synthesized
  source 1..22: mol_type = other DNA
agccacctctccatcctcttgc

SEQ ID NO: 2943 - DNA, 22 bp, synthetic construct
  misc_feature 1..22: note = chemically synthesized
  source 1..22: mol_type = other DNA
gccacctctccatcctcttgct

SEQ ID NO: 2944 - DNA, 22 bp, synthetic construct
  misc_feature 1..22: note = chemically synthesized
  source 1..22: mol_type = other DNA
tccatcctcttgctttctttgc

SEQ ID NO: 2945 - DNA, 22 bp, synthetic construct
  misc_feature 1..22: note = chemically synthesized
  source 1..22: mol_type = other DNA
catcctcttgctttctttgcct

SEQ ID NO: 2946 - DNA, 22 bp, synthetic construct
  misc_feature 1..22: note = chemically synthesized
  source 1..22: mol_type = other DNA
ttgctttctttgcctggacacc

SEQ ID NO: 2947 - DNA, 22 bp, synthetic construct
  misc_feature 1..22: note = chemically synthesized
  source 1..22: mol_type = other DNA
gctttctttgcctggacacccc

SEQ ID NO: 2948 - DNA, 22 bp, synthetic construct
  misc_feature 1..22: note = chemically synthesized
  source 1..22: mol_type = other DNA
ctttctttgcctggacaccccg

SEQ ID NO: 2949 - DNA, 22 bp, synthetic construct
  misc_feature 1..22: note = chemically synthesized
  source 1..22: mol_type = other DNA
tctttgcctggacaccccgttc

SEQ ID NO: 2950 - DNA, 22 bp, synthetic construct
  misc_feature 1..22: note = chemically synthesized
  source 1..22: mol_type = other DNA
ctttgcctggacaccccgttct

SEQ ID NO: 2951 - DNA, 22 bp, synthetic construct
  misc_feature 1..22: note = chemically synthesized
  source 1..22: mol_type = other DNA
tttgcctggacaccccgttctc

SEQ ID NO: 2952 - DNA, 22 bp, synthetic construct
  misc_feature 1..22: note = chemically synthesized
  source 1..22: mol_type = other DNA
tgcctggacaccccgttctcct

SEQ ID NO: 2953 - DNA, 22 bp, synthetic construct
  misc_feature 1..22: note = chemically synthesized
  source 1..22: mol_type = other DNA
gcctggacaccccgttctcctg

SEQ ID NO: 2954 - DNA, 22 bp, synthetic construct
  misc_feature 1..22: note = chemically synthesized
  source 1..22: mol_type = other DNA
cctggacaccccgttctcctgt

SEQ ID NO: 2955 - DNA, 22 bp, synthetic construct
  misc_feature 1..22: note = chemically synthesized
  source 1..22: mol_type = other DNA
gacaccccgttctcctgtggat

SEQ ID NO: 2956 - DNA, 22 bp, synthetic construct
  misc_feature 1..22: note = chemically synthesized
  source 1..22: mol_type = other DNA
tcctgtggattcgggtcacctc

SEQ ID NO: 2957 - DNA, 22 bp, synthetic construct
  misc_feature 1..22: note = chemically synthesized
  source 1..22: mol_type = other DNA
ctgtggattcgggtcacctctc

SEQ ID NO: 2958 - DNA, 22 bp, synthetic construct
  misc_feature 1..22: note = chemically synthesized
  source 1..22: mol_type = other DNA
tggattcgggtcacctctcact

SEQ ID NO: 2959 - DNA, 22 bp, synthetic construct
  misc_feature 1..22: note = chemically synthesized
  source 1..22: mol_type = other DNA
gggtcacctctcactcctttca

SEQ ID NO: 2960 - DNA, 22 bp, synthetic construct
  misc_feature 1..22: note = chemically synthesized
  source 1..22: mol_type = other DNA
tcactcctttcatttgggcagc

SEQ ID NO: 2961 - DNA, 22 bp, synthetic construct
  misc_feature 1..22: note = chemically synthesized
  source 1..22: mol_type = other DNA
actcctttcatttgggcagctc

SEQ ID NO: 2962 - DNA, 22 bp, synthetic construct
  misc_feature 1..22: note = chemically synthesized
  source 1..22: mol_type = other DNA
ctttcatttgggcagctcccct

SEQ ID NO: 2963 - DNA, 22 bp, synthetic construct
  misc_feature 1..22: note = chemically synthesized
  source 1..22: mol_type = other DNA
tcatttgggcagctcccctacc

SEQ ID NO: 2964 - DNA, 22 bp, synthetic construct
  misc_feature 1..22: note = chemically synthesized
  source 1..22: mol_type = other DNA
catttgggcagctcccctaccc

SEQ ID NO: 2965 - DNA, 22 bp, synthetic construct
  misc_feature 1..22: note = chemically synthesized
  source 1..22: mol_type = other DNA
atttgggcagctcccctacccc

SEQ ID NO: 2966 - DNA, 22 bp, synthetic construct
  misc_feature 1..22: note = chemically synthesized
  source 1..22: mol_type = other DNA
gggcagctcccctacccccctt

SEQ ID NO: 2967 - DNA, 22 bp, synthetic construct
  misc_feature 1..22: note = chemically synthesized
  source 1..22: mol_type = other DNA
ggcagctcccctacccccctta

SEQ ID NO: 2968 - DNA, 22 bp, synthetic construct
  misc_feature 1..22: note = chemically synthesized
  source 1..22: mol_type = other DNA
ccctaccccccttacctctcta

SEQ ID NO: 2969 - DNA, 22 bp, synthetic construct
  misc_feature 1..22: note = chemically synthesized
  source 1..22: mol_type = other DNA
ccccccttacctctctagtctg

SEQ ID NO: 2970 - DNA, 22 bp, synthetic construct
  misc_feature 1..22: note = chemically synthesized
  source 1..22: mol_type = other DNA
acctctctagtctgtgctagct

SEQ ID NO: 2971 - DNA, 22 bp, synthetic construct
  misc_feature 1..22: note = chemically synthesized
  source 1..22: mol_type = other DNA
cctctctagtctgtgctagctc

SEQ ID NO: 2972 - DNA, 22 bp, synthetic construct
  misc_feature 1..22: note = chemically synthesized
  source 1..22: mol_type = other DNA
tctagtctgtgctagctcttcc

SEQ ID NO: 2973 - DNA, 22 bp, synthetic construct
  misc_feature 1..22: note = chemically synthesized
  source 1..22: mol_type = other DNA
tagtctgtgctagctcttccag

SEQ ID NO: 2974 - DNA, 22 bp, synthetic construct
  misc_feature 1..22: note = chemically synthesized
  source 1..22: mol_type = other DNA
gtctgtgctagctcttccagcc

SEQ ID NO: 2975 - DNA, 22 bp, synthetic construct
  misc_feature 1..22: note = chemically synthesized
  source 1..22: mol_type = other DNA
tgctagctcttccagccccctg

SEQ ID NO: 2976 - DNA, 22 bp, synthetic construct
  misc_feature 1..22: note = chemically synthesized
  source 1..22: mol_type = other DNA
gctcttccagccccctgtcatg

SEQ ID NO: 2977 - DNA, 22 bp, synthetic construct
  misc_feature 1..22: note = chemically synthesized
  source 1..22: mol_type = other DNA
ttccagccccctgtcatggcat

SEQ ID NO: 2978 - DNA, 22 bp, synthetic construct
  misc_feature 1..22: note = chemically synthesized
  source 1..22: mol_type = other DNA
ccagccccctgtcatggcatct

SEQ ID NO: 2979 - DNA, 22 bp, synthetic construct
  misc_feature 1..22: note = chemically synthesized
  source 1..22: mol_type = other DNA
cagccccctgtcatggcatctt

SEQ ID NO: 2980 - DNA, 22 bp, synthetic construct
  misc_feature 1..22: note = chemically synthesized
  source 1..22: mol_type = other DNA
tcatggcatcttccaggggtcc

SEQ ID NO: 2981 - DNA, 22 bp, synthetic construct
  misc_feature 1..22: note = chemically synthesized
  source 1..22: mol_type = other DNA
ccaggggtccgagagctcagct

SEQ ID NO: 2982 - DNA, 22 bp, synthetic construct
  misc_feature 1..22: note = chemically synthesized
  source 1..22: mol_type = other DNA
caggggtccgagagctcagcta

SEQ ID NO: 2983 - DNA, 22 bp, synthetic construct
  misc_feature 1..22: note = chemically synthesized
  source 1..22: mol_type = other DNA
agctagtcttcttcctccaacc

SEQ ID NO: 2984 - DNA, 22 bp, synthetic construct
  misc_feature 1..22: note = chemically synthesized
  source 1..22: mol_type = other DNA
gtcttcttcctccaacccgggc

SEQ ID NO: 2985 - DNA, 22 bp, synthetic construct
  misc_feature 1..22: note = chemically synthesized
  source 1..22: mol_type = other DNA
cttcctccaacccgggccccta

SEQ ID NO: 2986 - DNA, 22 bp, synthetic construct
  misc_feature 1..22: note = chemically synthesized
  source 1..22: mol_type = other DNA
ttcctccaacccgggcccctat

SEQ ID NO: 2987 - DNA, 22 bp, synthetic construct
  misc_feature 1..22: note = chemically synthesized
  source 1..22: mol_type = other DNA
cctccaacccgggcccctatgt

SEQ ID NO: 2988 - DNA, 22 bp, synthetic construct
  misc_feature 1..22: note = chemically synthesized
  source 1..22: mol_type = other DNA
ctccaacccgggcccctatgtc

SEQ ID NO: 2989 - DNA, 22 bp, synthetic construct
  misc_feature 1..22: note = chemically synthesized
  source 1..22: mol_type = other DNA
caacccgggcccctatgtccac

SEQ ID NO: 2990 - DNA, 22 bp, synthetic construct
  misc_feature 1..22: note = chemically synthesized
  source 1..22: mol_type = other DNA
tgtccacttcaggacagcatgt

SEQ ID NO: 2991 - DNA, 22 bp, synthetic construct
  misc_feature 1..22: note = chemically synthesized
  source 1..22: mol_type = other DNA
caggacagcatgtttgctgcct

SEQ ID NO: 2992 - DNA, 22 bp, synthetic construct
  misc_feature 1..22: note = chemically synthesized
  source 1..22: mol_type = other DNA
aggacagcatgtttgctgcctc

SEQ ID NO: 2993 - DNA, 22 bp, synthetic construct
  misc_feature 1..22: note = chemically synthesized
  source 1..22: mol_type = other DNA
gctgcctccagggatcctgtgt

SEQ ID NO: 2994 - DNA, 22 bp, synthetic construct
  misc_feature 1..22: note = chemically synthesized
  source 1..22: mol_type = other DNA
ctgcctccagggatcctgtgtc

SEQ ID NO: 2995 - DNA, 22 bp, synthetic construct
  misc_feature 1..22: note = chemically synthesized
  source 1..22: mol_type = other DNA
cctccagggatcctgtgtcccc

SEQ ID NO: 2996 - DNA, 22 bp, synthetic construct
  misc_feature 1..22: note = chemically synthesized
  source 1..22: mol_type = other DNA
cagggatcctgtgtccccgagc

SEQ ID NO: 2997 - DNA, 22 bp, synthetic construct
  misc_feature 1..22: note = chemically synthesized
  source 1..22: mol_type = other DNA
tgtccccgagctgggaccacct

SEQ ID NO: 2998 - DNA, 22 bp, synthetic construct
  misc_feature 1..22: note = chemically synthesized
  source 1..22: mol_type = other DNA
ggaccaccttatattcccaggg

SEQ ID NO: 2999 - DNA, 22 bp, synthetic construct
  misc_feature 1..22: note = chemically synthesized
  source 1..22: mol_type = other DNA
atattcccagggccggttaatg

SEQ ID NO: 3000 - DNA, 22 bp, synthetic construct
  misc_feature 1..22: note = chemically synthesized
  source 1..22: mol_type = other DNA
tattcccagggccggttaatgt

SEQ ID NO: 3001 - DNA, 22 bp, synthetic construct
  misc_feature 1..22: note = chemically synthesized
  source 1..22: mol_type = other DNA
ccagggccggttaatgtggctc

SEQ ID NO: 3002 - DNA, 22 bp, synthetic construct
  misc_feature 1..22: note = chemically synthesized
  source 1..22: mol_type = other DNA
atgtggctctggttctgggtac

SEQ ID NO: 3003 - DNA, 22 bp, synthetic construct
  misc_feature 1..22: note = chemically synthesized
  source 1..22: mol_type = other DNA
tggttctgggtacttttatctg

SEQ ID NO: 3004 - DNA, 22 bp, synthetic construct
  misc_feature 1..22: note = chemically synthesized
  source 1..22: mol_type = other DNA
gttctgggtacttttatctgtc

SEQ ID NO: 3005 - DNA, 22 bp, synthetic construct
  misc_feature 1..22: note = chemically synthesized
  source 1..22: mol_type = other DNA
tgggtacttttatctgtcccct

SEQ ID NO: 3006 - DNA, 22 bp, synthetic construct
  misc_feature 1..22: note = chemically synthesized
  source 1..22: mol_type = other DNA
ggtacttttatctgtcccctcc

SEQ ID NO: 3007 - DNA, 22 bp, synthetic construct
  misc_feature 1..22: note = chemically synthesized
  source 1..22: mol_type = other DNA
ttatctgtcccctccaccccac

SEQ ID NO: 3008 - DNA, 22 bp, synthetic construct
  misc_feature 1..22: note = chemically synthesized
  source 1..22: mol_type = other DNA
tatctgtcccctccaccccaca

SEQ ID NO: 3009 - DNA, 22 bp, synthetic construct
  misc_feature 1..22: note = chemically synthesized
  source 1..22: mol_type = other DNA
atctgtcccctccaccccacag

SEQ ID NO: 3010 - DNA, 22 bp, synthetic construct
  misc_feature 1..22: note = chemically synthesized
  source 1..22: mol_type = other DNA
tctgtcccctccaccccacagt

SEQ ID NO: 3011 - DNA, 22 bp, synthetic construct
  misc_feature 1..22: note = chemically synthesized
  source 1..22: mol_type = other DNA
tcccctccaccccacagtgggg

SEQ ID NO: 3012 - DNA, 22 bp, synthetic construct
  misc_feature 1..22: note = chemically synthesized
  source 1..22: mol_type = other DNA
caccccacagtggggccactag

SEQ ID NO: 3013 - DNA, 22 bp, synthetic construct
  misc_feature 1..22: note = chemically synthesized
  source 1..22: mol_type = other DNA
gggacaggattggtgacagaaa

SEQ ID NO: 3014 - DNA, 22 bp, synthetic construct
  misc_feature 1..22: note = chemically synthesized
  source 1..22: mol_type = other DNA
gtgacagaaaagccccatcctt

SEQ ID NO: 3015 - DNA, 22 bp, synthetic construct
  misc_feature 1..22: note = chemically synthesized
  source 1..22: mol_type = other DNA
aggcctcctccttcctagtctc

SEQ ID NO: 3016 - DNA, 22 bp, synthetic construct
  misc_feature 1..22: note = chemically synthesized
  source 1..22: mol_type = other DNA
ggcctcctccttcctagtctcc

SEQ ID NO: 3017 - DNA, 22 bp, synthetic construct
  misc_feature 1..22: note = chemically synthesized
  source 1..22: mol_type = other DNA
ctccttcctagtctcctgatat

SEQ ID NO: 3018 - DNA, 22 bp, synthetic construct
  misc_feature 1..22: note = chemically synthesized
  source 1..22: mol_type = other DNA
cttcctagtctcctgatattgg

SEQ ID NO: 3019 - DNA, 22 bp, synthetic construct
  misc_feature 1..22: note = chemically synthesized
  source 1..22: mol_type = other DNA
cctagtctcctgatattgggtc

SEQ ID NO: 3020 - DNA, 22 bp, synthetic construct
  misc_feature 1..22: note = chemically synthesized
  source 1..22: mol_type = other DNA
ctagtctcctgatattgggtct

SEQ ID NO: 3021 - DNA, 22 bp, synthetic construct
  misc_feature 1..22: note = chemically synthesized
  source 1..22: mol_type = other DNA
gtctcctgatattgggtctaac

SEQ ID NO: 3022 - DNA, 22 bp, synthetic construct
  misc_feature 1..22: note = chemically synthesized
  source 1..22: mol_type = other DNA
ctgatattgggtctaaccccca

SEQ ID NO: 3023 - DNA, 22 bp, synthetic construct
  misc_feature 1..22: note = chemically synthesized
  source 1..22: mol_type = other DNA
atattgggtctaacccccacct

SEQ ID NO: 3024 - DNA, 22 bp, synthetic construct
  misc_feature 1..22: note = chemically synthesized
  source 1..22: mol_type = other DNA
ggtctaacccccacctcctgtt

SEQ ID NO: 3025 - DNA, 22 bp, synthetic construct
  misc_feature 1..22: note = chemically synthesized
  source 1..22: mol_type = other DNA
acccccacctcctgttaggcag

SEQ ID NO: 3026 - DNA, 22 bp, synthetic construct
  misc_feature 1..22: note = chemically synthesized
  source 1..22: mol_type = other DNA
ctgttaggcagattccttatct

SEQ ID NO: 3027 - DNA, 22 bp, synthetic construct
  misc_feature 1..22: note = chemically synthesized
  source 1..22: mol_type = other DNA
ttaggcagattccttatctggt

SEQ ID NO: 3028 - DNA, 22 bp, synthetic construct
  misc_feature 1..22: note = chemically synthesized
  source 1..22: mol_type = other DNA
ggcagattccttatctggtgac

SEQ ID NO: 3029 - DNA, 22 bp, synthetic construct
  misc_feature 1..22: note = chemically synthesized
  source 1..22: mol_type = other DNA
cttatctggtgacacaccccca

SEQ ID NO: 3030 - DNA, 22 bp, synthetic construct
  misc_feature 1..22: note = chemically synthesized
  source 1..22: mol_type = other DNA
atctggtgacacacccccattt

SEQ ID NO: 3031 - DNA, 22 bp, synthetic construct
  misc_feature 1..22: note = chemically synthesized
  source 1..22: mol_type = other DNA
tctggtgacacacccccatttc

SEQ ID NO: 3032 - DNA, 22 bp, synthetic construct
  misc_feature 1..22: note = chemically synthesized
  source 1..22: mol_type = other DNA
gtgacacacccccatttcctgg

SEQ ID NO: 3033 - DNA, 22 bp, synthetic construct
  misc_feature 1..22: note = chemically synthesized
  source 1..22: mol_type = other DNA
cctggagccatctctctccttg

SEQ ID NO: 3034 - DNA, 22 bp, synthetic construct
  misc_feature 1..22: note = chemically synthesized
  source 1..22: mol_type = other DNA
ctggagccatctctctccttgc

SEQ ID NO: 3035 - DNA, 22 bp, synthetic construct
  misc_feature 1..22: note = chemically synthesized
  source 1..22: mol_type = other DNA
gagccatctctctccttgccag

SEQ ID NO: 3036 - DNA, 22 bp, synthetic construct
  misc_feature 1..22: note = chemically synthesized
  source 1..22: mol_type = other DNA
tctccttgccagaacctctaag

SEQ ID NO: 3037 - DNA, 22 bp, synthetic construct
  misc_feature 1..22: note = chemically synthesized
  source 1..22: mol_type = other DNA
tccttgccagaacctctaaggt

SEQ ID NO: 3038 - DNA, 22 bp, synthetic construct
  misc_feature 1..22: note = chemically synthesized
  source 1..22: mol_type = other DNA
cttgccagaacctctaaggttt

SEQ ID NO: 3039 - DNA, 22 bp, synthetic construct
  misc_feature 1..22: note = chemically synthesized
  source 1..22: mol_type = other DNA
gccagaacctctaaggtttgct

SEQ ID NO: 3040 - DNA, 22 bp, synthetic construct
  misc_feature 1..22: note = chemically synthesized
  source 1..22: mol_type = other DNA
ccagaacctctaaggtttgctt

SEQ ID NO: 3041 - DNA, 22 bp, synthetic construct
  misc_feature 1..22: note = chemically synthesized
  source 1..22: mol_type = other DNA
taaggtttgcttacgatggagc

SEQ ID NO: 3042 - DNA, 22 bp, synthetic construct
  misc_feature 1..22: note = chemically synthesized
  source 1..22: mol_type = other DNA
aggtttgcttacgatggagcca

SEQ ID NO: 3043 - DNA, 22 bp, synthetic construct
  misc_feature 1..22: note = chemically synthesized
  source 1..22: mol_type = other DNA
gcttacgatggagccagagagg

SEQ ID NO: 3044 - DNA, 22 bp, synthetic construct
  misc_feature 1..22: note = chemically synthesized
  source 1..22: mol_type = other DNA
cttacgatggagccagagagga

SEQ ID NO: 3045 - DNA, 22 bp, synthetic construct
  misc_feature 1..22: note = chemically synthesized
  source 1..22: mol_type = other DNA
acgatggagccagagaggatcc

SEQ ID NO: 3046 - DNA, 22 bp, synthetic construct
  misc_feature 1..22: note = chemically synthesized
  source 1..22: mol_type = other DNA
cgatggagccagagaggatcct

SEQ ID NO: 3047 - DNA, 22 bp, synthetic construct
  misc_feature 1..22: note = chemically synthesized
  source 1..22: mol_type = other DNA
ggagggagagcttggcaggggg

SEQ ID NO: 3048 - DNA, 22 bp, synthetic construct
  misc_feature 1..22: note = chemically synthesized
  source 1..22: mol_type = other DNA
ggcagggggtgggagggaaggg

SEQ ID NO: 3049 - DNA, 22 bp, synthetic construct
  misc_feature 1..22: note = chemically synthesized
  source 1..22: mol_type = other DNA
gcagggggtgggagggaagggg

SEQ ID NO: 3050 - DNA, 22 bp, synthetic construct
  misc_feature 1..22: note = chemically synthesized
  source 1..22: mol_type = other DNA
cccggttctcagtggccaccct

SEQ ID NO: 3051 - DNA, 22 bp, synthetic construct
  misc_feature 1..22: note = chemically synthesized
  source 1..22: mol_type = other DNA
tcagtggccaccctgcgctacc

SEQ ID NO: 3052 - DNA, 22 bp, synthetic construct
  misc_feature 1..22: note = chemically synthesized
  source 1..22: mol_type = other DNA
agtggccaccctgcgctaccct

SEQ ID NO: 3053 - DNA, 22 bp, synthetic construct
  misc_feature 1..22: note = chemically synthesized
  source 1..22: mol_type = other DNA
cgctaccctctcccagaacctg

SEQ ID NO: 3054 - DNA, 22 bp, synthetic construct
  misc_feature 1..22: note = chemically synthesized
  source 1..22: mol_type = other DNA
ccctctcccagaacctgagctg

SEQ ID NO: 3055 - DNA, 22 bp, synthetic construct
  misc_feature 1..22: note = chemically synthesized
  source 1..22: mol_type = other DNA
tcccagaacctgagctgctctg

SEQ ID NO: 3056 - DNA, 22 bp, synthetic construct
  misc_feature 1..22: note = chemically synthesized
  source 1..22: mol_type = other DNA
ccagaacctgagctgctctgac

SEQ ID NO: 3057 - DNA, 22 bp, synthetic construct
  misc_feature 1..22: note = chemically synthesized
  source 1..22: mol_type = other DNA
agctgctctgacgcggccgtct

SEQ ID NO: 3058 - DNA, 22 bp, synthetic construct
  misc_feature 1..22: note = chemically synthesized
  source 1..22: mol_type = other DNA
ctctgacgcggccgtctggtgc

SEQ ID NO: 3059 - DNA, 22 bp, synthetic construct
  misc_feature 1..22: note = chemically synthesized
  source 1..22: mol_type = other DNA
tgacgcggccgtctggtgcgtt

SEQ ID NO: 3060 - DNA, 22 bp, synthetic construct
  misc_feature 1..22: note = chemically synthesized
  source 1..22: mol_type = other DNA
acgcggccgtctggtgcgtttc

SEQ ID NO: 3061 - DNA, 22 bp, synthetic construct
  misc_feature 1..22: note = chemically synthesized
  source 1..22: mol_type = other DNA
gtgcgtttcactgatcctggtg

SEQ ID NO: 3062 - DNA, 22 bp, synthetic construct
  misc_feature 1..22: note = chemically synthesized
  source 1..22: mol_type = other DNA
cactgatcctggtgctgcagct

SEQ ID NO: 3063 - DNA, 22 bp, synthetic construct
  misc_feature 1..22: note = chemically synthesized
  source 1..22: mol_type = other DNA
actgatcctggtgctgcagctt

SEQ ID NO: 3064 - DNA, 22 bp, synthetic construct
  misc_feature 1..22: note = chemically synthesized
  source 1..22: mol_type = other DNA
atcctggtgctgcagcttcctt

SEQ ID NO: 3065 - DNA, 22 bp, synthetic construct
  misc_feature 1..22: note = chemically synthesized
  source 1..22: mol_type = other DNA
gtgctgcagcttccttacactt

SEQ ID NO: 3066 - DNA, 22 bp, synthetic construct
  misc_feature 1..22: note = chemically synthesized
  source 1..22: mol_type = other DNA
cagcttccttacacttcccaag

SEQ ID NO: 3067 - DNA, 22 bp, synthetic construct
  misc_feature 1..22: note = chemically synthesized
  source 1..22: mol_type = other DNA
ccttacacttcccaagaggaga

SEQ ID NO: 3068 - DNA, 22 bp, synthetic construct
  misc_feature 1..22: note = chemically synthesized
  source 1..22: mol_type = other DNA
cttacacttcccaagaggagaa

SEQ ID NO: 3069 - DNA, 22 bp, synthetic construct
  misc_feature 1..22: note = chemically synthesized
  source 1..22: mol_type = other DNA
acacttcccaagaggagaagca

SEQ ID NO: 3070 - DNA, 22 bp, synthetic construct
  misc_feature 1..22: note = chemically synthesized
  source 1..22: mol_type = other DNA
cacttcccaagaggagaagcag

SEQ ID NO: 3071 - DNA, 22 bp, synthetic construct
  misc_feature 1..22: note = chemically synthesized
  source 1..22: mol_type = other DNA
cccaagaggagaagcagtttgg

SEQ ID NO: 3072 - DNA, 22 bp, synthetic construct
  misc_feature 1..22: note = chemically synthesized
  source 1..22: mol_type = other DNA
ccaagaggagaagcagtttgga

SEQ ID NO: 3073 - DNA, 22 bp, synthetic construct
  misc_feature 1..22: note = chemically synthesized
  source 1..22: mol_type = other DNA
ggaaaaacaaaatcagaataag

SEQ ID NO: 3074 - DNA, 22 bp, synthetic construct
  misc_feature 1..22: note = chemically synthesized
  source 1..22: mol_type = other DNA
gaaaaacaaaatcagaataagt

SEQ ID NO: 3075 - DNA, 22 bp, synthetic construct
  misc_feature 1..22: note = chemically synthesized
  source 1..22: mol_type = other DNA
gtcctgagttctaactttggct

SEQ ID NO: 3076 - DNA, 22 bp, synthetic construct
  misc_feature 1..22: note = chemically synthesized
  source 1..22: mol_type = other DNA
agttctaactttggctcttcac

SEQ ID NO: 3077 - DNA, 22 bp, synthetic construct
  misc_feature 1..22: note = chemically synthesized
  source 1..22: mol_type = other DNA
taactttggctcttcacctttc

SEQ ID NO: 3078 - DNA, 22 bp, synthetic construct
  misc_feature 1..22: note = chemically synthesized
  source 1..22: mol_type = other DNA
actttggctcttcacctttcta

SEQ ID NO: 3079 - DNA, 22 bp, synthetic construct
  misc_feature 1..22: note = chemically synthesized
  source 1..22: mol_type = other DNA
tggctcttcacctttctagtcc

SEQ ID NO: 3080 - DNA, 22 bp, synthetic construct
  misc_feature 1..22: note = chemically synthesized
  source 1..22: mol_type = other DNA
ggctcttcacctttctagtccc

SEQ ID NO: 3081 - DNA, 22 bp, synthetic construct
  misc_feature 1..22: note = chemically synthesized
  source 1..22: mol_type = other DNA
gctcttcacctttctagtcccc

SEQ ID NO: 3082 - DNA, 22 bp, synthetic construct
  misc_feature 1..22: note = chemically synthesized
  source 1..22: mol_type = other DNA
ttcacctttctagtccccaatt

SEQ ID NO: 3083 - DNA, 22 bp, synthetic construct
  misc_feature 1..22: note = chemically synthesized
  source 1..22: mol_type = other DNA
cacctttctagtccccaattta

SEQ ID NO: 3084 - DNA, 22 bp, synthetic construct
  misc_feature 1..22: note = chemically synthesized
  source 1..22: mol_type = other DNA
acctttctagtccccaatttat

SEQ ID NO: 3085 - DNA, 22 bp, synthetic construct
  misc_feature 1..22: note = chemically synthesized
  source 1..22: mol_type = other DNA
tctagtccccaatttatattgt

SEQ ID NO: 3086 - DNA, 22 bp, synthetic construct
  misc_feature 1..22: note = chemically synthesized
  source 1..22: mol_type = other DNA
ctagtccccaatttatattgtt

SEQ ID NO: 3087 - DNA, 22 bp, synthetic construct
  misc_feature 1..22: note = chemically synthesized
  source 1..22: mol_type = other DNA
tagtccccaatttatattgttc

SEQ ID NO: 3088 - DNA, 22 bp, synthetic construct
  misc_feature 1..22: note = chemically synthesized
  source 1..22: mol_type = other DNA
gtccccaatttatattgttcct

SEQ ID NO: 3089 - DNA, 22 bp, synthetic construct
  misc_feature 1..22: note = chemically synthesized
  source 1..22: mol_type = other DNA
atattgttcctccgtgcgtcag

SEQ ID NO: 3090 - DNA, 22 bp, synthetic construct
  misc_feature 1..22: note = chemically synthesized
  source 1..22: mol_type = other DNA
tattgttcctccgtgcgtcagt

SEQ ID NO: 3091 - DNA, 22 bp, synthetic construct
  misc_feature 1..22: note = chemically synthesized
  source 1..22: mol_type = other DNA
ttcctccgtgcgtcagttttac

SEQ ID NO: 3092 - DNA, 22 bp, synthetic construct
  misc_feature 1..22: note = chemically synthesized
  source 1..22: mol_type = other DNA
ctccgtgcgtcagttttacctg

SEQ ID NO: 3093 - DNA, 22 bp, synthetic construct
  misc_feature 1..22: note = chemically synthesized
  source 1..22: mol_type = other DNA
cgtgcgtcagttttacctgtga

SEQ ID NO: 3094 - DNA, 22 bp, synthetic construct
  misc_feature 1..22: note = chemically synthesized
  source 1..22: mol_type = other DNA
tacctgtgagataaggccagta

SEQ ID NO: 3095 - DNA, 22 bp, synthetic construct
  misc_feature 1..22: note = chemically synthesized
  source 1..22: mol_type = other DNA
acctgtgagataaggccagtag

SEQ ID NO: 3096 - DNA, 22 bp, synthetic construct
  misc_feature 1..22: note = chemically synthesized
  source 1..22: mol_type = other DNA
cctgtgagataaggccagtagc

SEQ ID NO: 3097 - DNA, 22 bp, synthetic construct
  misc_feature 1..22: note = chemically synthesized
  source 1..22: mol_type = other DNA
tgagataaggccagtagccagc

SEQ ID NO: 3098 - DNA, 22 bp, synthetic construct
  misc_feature 1..22: note = chemically synthesized
  source 1..22: mol_type = other DNA
gcagggctgtggtgaggagggg

SEQ ID NO: 3099 - DNA, 22 bp, synthetic construct
  misc_feature 1..22: note = chemically synthesized
  source 1..22: mol_type = other DNA
tggtgaggaggggggtgtccgt

SEQ ID NO: 3100 - DNA, 22 bp, synthetic construct
  misc_feature 1..22: note = chemically synthesized
  source 1..22: mol_type = other DNA
cctttgtgagaatggtgcgtcc

SEQ ID NO: 3101 - DNA, 22 bp, synthetic construct
  misc_feature 1..22: note = chemically synthesized
  source 1..22: mol_type = other DNA
tgtgagaatggtgcgtcctagg

SEQ ID NO: 3102 - DNA, 22 bp, synthetic construct
  misc_feature 1..22: note = chemically synthesized
  source 1..22: mol_type = other DNA
gtgagaatggtgcgtcctaggt

SEQ ID NO: 3103 - DNA, 22 bp, synthetic construct
  misc_feature 1..22: note = chemically synthesized
  source 1..22: mol_type = other DNA
tgagaatggtgcgtcctaggtg

SEQ ID NO: 3104 - DNA, 22 bp, synthetic construct
  misc_feature 1..22: note = chemically synthesized
  source 1..22: mol_type = other DNA
ggtgttcaccaggtcgtggccg

SEQ ID NO: 3105 - DNA, 22 bp, synthetic construct
  misc_feature 1..22: note = chemically synthesized
  source 1..22: mol_type = other DNA
accaggtcgtggccgcctctac

SEQ ID NO: 3106 - DNA, 22 bp, synthetic construct
  misc_feature 1..22: note = chemically synthesized
  source 1..22: mol_type = other DNA
tactccctttctctttctccat

SEQ ID NO: 3107 - DNA, 22 bp, synthetic construct
  misc_feature 1..22: note = chemically synthesized
  source 1..22: mol_type = other DNA
ctccctttctctttctccatcc

SEQ ID NO: 3108 - DNA, 22 bp, synthetic construct
  misc_feature 1..22: note = chemically synthesized
  source 1..22: mol_type = other DNA
cctttctctttctccatccttc

SEQ ID NO: 3109 - DNA, 22 bp, synthetic construct
  misc_feature 1..22: note = chemically synthesized
  source 1..22: mol_type = other DNA
tctctttctccatccttctttc

SEQ ID NO: 3110 - DNA, 22 bp, synthetic construct
  misc_feature 1..22: note = chemically synthesized
  source 1..22: mol_type = other DNA
ctctttctccatccttctttcc

SEQ ID NO: 3111 - DNA, 22 bp, synthetic construct
  misc_feature 1..22: note = chemically synthesized
  source 1..22: mol_type = other DNA
tctttctccatccttctttcct

SEQ ID NO: 3112 - DNA, 22 bp, synthetic construct
  misc_feature 1..22: note = chemically synthesized
  source 1..22: mol_type = other DNA
tttctccatccttctttcctta

SEQ ID NO: 3113 - DNA, 22 bp, synthetic construct
  misc_feature 1..22: note = chemically synthesized
  source 1..22: mol_type = other DNA
tctccatccttctttccttaaa

SEQ ID NO: 3114 - DNA, 22 bp, synthetic construct
  misc_feature 1..22: note = chemically synthesized
  source 1..22: mol_type = other DNA
ctccatccttctttccttaaag

SEQ ID NO: 3115 - DNA, 22 bp, synthetic construct
  misc_feature 1..22: note = chemically synthesized
  source 1..22: mol_type = other DNA
tccatccttctttccttaaaga

SEQ ID NO: 3116 - DNA, 22 bp, synthetic construct
  misc_feature 1..22: note = chemically synthesized
  source 1..22: mol_type = other DNA
catccttctttccttaaagagt

SEQ ID NO: 3117 - DNA, 22 bp, synthetic construct
  misc_feature 1..22: note = chemically synthesized
  source 1..22: mol_type = other DNA
ctttccttaaagagtccccagt

SEQ ID NO: 3118 - DNA, 22 bp, synthetic construct
  misc_feature 1..22: note = chemically synthesized
  source 1..22: mol_type = other DNA
tttccttaaagagtccccagtg

SEQ ID NO: 3119 - DNA, 22 bp, synthetic construct
  misc_feature 1..22: note = chemically synthesized
  source 1..22: mol_type = other DNA
tccttaaagagtccccagtgct

SEQ ID NO: 3120 - DNA, 22 bp, synthetic construct
  misc_feature 1..22: note = chemically synthesized
  source 1..22: mol_type = other DNA
ccttaaagagtccccagtgcta

SEQ ID NO: 3121 - DNA, 22 bp, synthetic construct
  misc_feature 1..22: note = chemically synthesized
  source 1..22: mol_type = other DNA
cttaaagagtccccagtgctat

SEQ ID NO: 3122 - DNA, 22 bp, synthetic construct
  misc_feature 1..22: note = chemically synthesized
  source 1..22: mol_type = other DNA
aaagagtccccagtgctatctg

SEQ ID NO: 3123 - DNA, 22 bp, synthetic construct
  misc_feature 1..22: note = chemically synthesized
  source 1..22: mol_type = other DNA
aagagtccccagtgctatctgg

SEQ ID NO: 3124 - DNA, 22 bp, synthetic construct
  misc_feature 1..22: note = chemically synthesized
  source 1..22: mol_type = other DNA
tctgggacatattcctccgccc

SEQ ID NO: 3125 - DNA, 22 bp, synthetic construct
  misc_feature 1..22: note = chemically synthesized
  source 1..22: mol_type = other DNA
ggacatattcctccgcccagag

SEQ ID NO: 3126 - DNA, 22 bp, synthetic construct
  misc_feature 1..22: note = chemically synthesized
  source 1..22: mol_type = other DNA
ctccgcccagagcagggtcccg

SEQ ID NO: 3127 - DNA, 22 bp, synthetic construct
  misc_feature 1..22: note = chemically synthesized
  source 1..22: mol_type = other DNA
cgcccagagcagggtcccgctt

SEQ ID NO: 3128 - DNA, 22 bp, synthetic construct
  misc_feature 1..22: note = chemically synthesized
  source 1..22: mol_type = other DNA
ccctaaggccctgctctgggct

SEQ ID NO: 3129 - DNA, 22 bp, synthetic construct
  misc_feature 1..22: note = chemically synthesized
  source 1..22: mol_type = other DNA
cctaaggccctgctctgggctt

SEQ ID NO: 3130 - DNA, 22 bp, synthetic construct
  misc_feature 1..22: note = chemically synthesized
  source 1..22: mol_type = other DNA
aggccctgctctgggcttctgg

SEQ ID NO: 3131 - DNA, 22 bp, synthetic construct
  misc_feature 1..22: note = chemically synthesized
  source 1..22: mol_type = other DNA
ctctgggcttctgggtttgagt

SEQ ID NO: 3132 - DNA, 22 bp, synthetic construct
  misc_feature 1..22: note = chemically synthesized
  source 1..22: mol_type = other DNA
tgggcttctgggtttgagtcct

SEQ ID NO: 3133 - DNA, 22 bp, synthetic construct
  misc_feature 1..22: note = chemically synthesized
  source 1..22: mol_type = other DNA
ggcttctgggtttgagtccttg

SEQ ID NO: 3134 - DNA, 22 bp, synthetic construct
  misc_feature 1..22: note = chemically synthesized
  source 1..22: mol_type = other DNA
ctgggtttgagtccttggcaag

SEQ ID NO: 3135 - DNA, 22 bp, synthetic construct
  misc_feature 1..22: note = chemically synthesized
  source 1..22: mol_type = other DNA
tgggtttgagtccttggcaagc

SEQ ID NO: 3136 - DNA, 22 bp, synthetic construct
  misc_feature 1..22: note = chemically synthesized
  source 1..22: mol_type = other DNA
ggtttgagtccttggcaagccc

SEQ ID NO: 3137 - DNA, 22 bp, synthetic construct
  misc_feature 1..22: note = chemically synthesized
  source 1..22: mol_type = other DNA
gagtccttggcaagcccaggag

SEQ ID NO: 3138 - DNA, 22 bp, synthetic construct
  misc_feature 1..22: note = chemically synthesized
  source 1..22: mol_type = other DNA
agtccttggcaagcccaggaga

SEQ ID NO: 3139 - DNA, 22 bp, synthetic construct
  misc_feature 1..22: note = chemically synthesized
  source 1..22: mol_type = other DNA
ggcaagcccaggagaggcgctc

SEQ ID NO: 3140 - DNA, 22 bp, synthetic construct
  misc_feature 1..22: note = chemically synthesized
  source 1..22: mol_type = other DNA
gcaagcccaggagaggcgctca

SEQ ID NO: 3141 - DNA, 22 bp, synthetic construct
  misc_feature 1..22: note = chemically synthesized
  source 1..22: mol_type = other DNA
aggcttccctgtcccccttcct

SEQ ID NO: 3142 - DNA, 22 bp, synthetic construct
  misc_feature 1..22: note = chemically synthesized
  source 1..22: mol_type = other DNA
ccctgtcccccttcctcgtcca

SEQ ID NO: 3143 - DNA, 22 bp, synthetic construct
  misc_feature 1..22: note = chemically synthesized
  source 1..22: mol_type = other DNA
cctgtcccccttcctcgtccac

SEQ ID NO: 3144 - DNA, 22 bp, synthetic construct
  misc_feature 1..22: note = chemically synthesized
  source 1..22: mol_type = other DNA
tcccccttcctcgtccaccatc

SEQ ID NO: 3145 - DNA, 22 bp, synthetic construct
  misc_feature 1..22: note = chemically synthesized
  source 1..22: mol_type = other DNA
cctcgtccaccatctcatgccc

SEQ ID NO: 3146 - DNA, 22 bp, synthetic construct
  misc_feature 1..22: note = chemically synthesized
  source 1..22: mol_type = other DNA
ctcgtccaccatctcatgcccc

SEQ ID NO: 3147 - DNA, 22 bp, synthetic construct
  misc_feature 1..22: note = chemically synthesized
  source 1..22: mol_type = other DNA
gtccaccatctcatgcccctgg

SEQ ID NO: 3148 - DNA, 22 bp, synthetic construct
  misc_feature 1..22: note = chemically synthesized
  source 1..22: mol_type = other DNA
atgcccctggctctcctgcccc

SEQ ID NO: 3149 - DNA, 22 bp, synthetic construct
  misc_feature 1..22: note = chemically synthesized
  source 1..22: mol_type = other DNA
gctctcctgccccttccctaca

SEQ ID NO: 3150 - DNA, 22 bp, synthetic construct
  misc_feature 1..22: note = chemically synthesized
  source 1..22: mol_type = other DNA
tcctgccccttccctacagggg

SEQ ID NO: 3151 - DNA, 22 bp, synthetic construct
  misc_feature 1..22: note = chemically synthesized
  source 1..22: mol_type = other DNA
ctgccccttccctacaggggtt

SEQ ID NO: 3152 - DNA, 22 bp, synthetic construct
  misc_feature 1..22: note = chemically synthesized
  source 1..22: mol_type = other DNA
ccccttccctacaggggttcct

SEQ ID NO: 3153 - DNA, 22 bp, synthetic construct
  misc_feature 1..22: note = chemically synthesized
  source 1..22: mol_type = other DNA
ccctacaggggttcctggctct

SEQ ID NO: 3154 - DNA, 22 bp, synthetic construct
  misc_feature 1..22: note = chemically synthesized
  source 1..22: mol_type = other DNA
cctacaggggttcctggctctg

SEQ ID NO: 3155 - DNA, 22 bp, synthetic construct
  misc_feature 1..22: note = chemically synthesized
  source 1..22: mol_type = other DNA
caggggttcctggctctgctct

SEQ ID NO: 3156 - DNA, 22 bp, synthetic construct
  misc_feature 1..22: note = chemically synthesized
  source 1..22: mol_type = other DNA
ctggctctgctcttcagactga

SEQ ID NO: 3157 - DNA, 22 bp, synthetic construct
  misc_feature 1..22: note = chemically synthesized
  source 1..22: mol_type = other DNA
gctctgctcttcagactgagcc

SEQ ID NO: 3158 - DNA, 22 bp, synthetic construct
  misc_feature 1..22: note = chemically synthesized
  source 1..22: mol_type = other DNA
tgctcttcagactgagccccgt

SEQ ID NO: 3159 - DNA, 22 bp, synthetic construct
  misc_feature 1..22: note = chemically synthesized
  source 1..22: mol_type = other DNA
ctcttcagactgagccccgttc

SEQ ID NO: 3160 - DNA, 22 bp, synthetic construct
  misc_feature 1..22: note = chemically synthesized
  source 1..22: mol_type = other DNA
ttcagactgagccccgttcccc

SEQ ID NO: 3161 - DNA, 22 bp, synthetic construct
  misc_feature 1..22: note = chemically synthesized
  source 1..22: mol_type = other DNA
cagactgagccccgttcccctg

SEQ ID NO: 3162 - DNA, 22 bp, synthetic construct
  misc_feature 1..22: note = chemically synthesized
  source 1..22: mol_type = other DNA
agactgagccccgttcccctgc

SEQ ID NO: 3163 - DNA, 22 bp, synthetic construct
  misc_feature 1..22: note = chemically synthesized
  source 1..22: mol_type = other DNA
agccccgttcccctgcatcccc

SEQ ID NO: 3164 - DNA, 22 bp, synthetic construct
  misc_feature 1..22: note = chemically synthesized
  source 1..22: mol_type = other DNA
ccctgcatccccgttcccctgc

SEQ ID NO: 3165 - DNA, 22 bp, synthetic construct
  misc_feature 1..22: note = chemically synthesized
  source 1..22: mol_type = other DNA
catccccgttcccctgcatccc

SEQ ID NO: 3166 - DNA, 22 bp, synthetic construct
  misc_feature 1..22: note = chemically synthesized
  source 1..22: mol_type = other DNA
ccctgcatcccccttcccctgc

SEQ ID NO: 3167 - DNA, 22 bp, synthetic construct
  misc_feature 1..22: note = chemically synthesized
  source 1..22: mol_type = other DNA
catcccccttcccctgcatccc

SEQ ID NO: 3168 - DNA, 22 bp, synthetic construct
  misc_feature 1..22: note = chemically synthesized
  source 1..22: mol_type = other DNA
cccctgcatcccccagaggccc

SEQ ID NO: 3169 - DNA, 22 bp, synthetic construct
  misc_feature 1..22: note = chemically synthesized
  source 1..22: mol_type = other DNA
ccctgcatcccccagaggcccc

SEQ ID NO: 3170 - DNA, 22 bp, synthetic construct
  misc_feature 1..22: note = chemically synthesized
  source 1..22: mol_type = other DNA
catcccccagaggccccaggcc

SEQ ID NO: 3171 - DNA, 22 bp, synthetic construct
  misc_feature 1..22: note = chemically synthesized
  source 1..22: mol_type = other DNA
cttggcctggaccccacgagag

SEQ ID NO: 3172 - DNA, 22 bp, synthetic construct
  misc_feature 1..22: note = chemically synthesized
  source 1..22: mol_type = other DNA
ggcctggaccccacgagaggcc

SEQ ID NO: 3173 - DNA, 22 bp, synthetic construct
  misc_feature 1..22: note = chemically synthesized
  source 1..22: mol_type = other DNA
gcctggaccccacgagaggcca

SEQ ID NO: 3174 - DNA, 22 bp, synthetic construct
  misc_feature 1..22: note = chemically synthesized
  source 1..22: mol_type = other DNA
gaccccacgagaggccacccca

SEQ ID NO: 3175 - DNA, 22 bp, synthetic construct
  misc_feature 1..22: note = chemically synthesized
  source 1..22: mol_type = other DNA
tctaccaggctgccttttgggt

SEQ ID NO: 3176 - DNA, 22 bp, synthetic construct
  misc_feature 1..22: note = chemically synthesized
  source 1..22: mol_type = other DNA
ccaggctgccttttgggtggat

SEQ ID NO: 3177 - DNA, 22 bp, synthetic construct
  misc_feature 1..22: note = chemically synthesized
  source 1..22: mol_type = other DNA
ccttttgggtggattctcctcc

SEQ ID NO: 3178 - DNA, 22 bp, synthetic construct
  misc_feature 1..22: note = chemically synthesized
  source 1..22: mol_type = other DNA
ttgggtggattctcctccaact

SEQ ID NO: 3179 - DNA, 22 bp, synthetic construct
  misc_feature 1..22: note = chemically synthesized
  source 1..22: mol_type = other DNA
tgggtggattctcctccaactg

SEQ ID NO: 3180 - DNA, 22 bp, synthetic construct
  misc_feature 1..22: note = chemically synthesized
  source 1..22: mol_type = other DNA
gggtggattctcctccaactgt

SEQ ID NO: 3181 - DNA, 22 bp, synthetic construct
  misc_feature 1..22: note = chemically synthesized
  source 1..22: mol_type = other DNA
ggtggattctcctccaactgtg

SEQ ID NO: 3182 - DNA, 22 bp, synthetic construct
  misc_feature 1..22: note = chemically synthesized
  source 1..22: mol_type = other DNA
tcctccaactgtggggtgactg

SEQ ID NO: 3183 - DNA, 22 bp, synthetic construct
  misc_feature 1..22: note = chemically synthesized
  source 1..22: mol_type = other DNA
ctccaactgtggggtgactgct

SEQ ID NO: 3184 - DNA, 22 bp, synthetic construct
  misc_feature 1..22: note = chemically synthesized
  source 1..22: mol_type = other DNA
caactgtggggtgactgcttgg

SEQ ID NO: 3185 - DNA, 22 bp, synthetic construct
  misc_feature 1..22: note = chemically synthesized
  source 1..22: mol_type = other DNA
tggggtgactgcttggcaaact

SEQ ID NO: 3186 - DNA, 22 bp, synthetic construct
  misc_feature 1..22: note = chemically synthesized
  source 1..22: mol_type = other DNA
cttggcaaactcactcttcggg

SEQ ID NO: 3187 - DNA, 22 bp, synthetic construct
  misc_feature 1..22: note = chemically synthesized
  source 1..22: mol_type = other DNA
ggcaaactcactcttcggggta

SEQ ID NO: 3188 - DNA, 22 bp, synthetic construct
  misc_feature 1..22: note = chemically synthesized
  source 1..22: mol_type = other DNA
gcaaactcactcttcggggtat

SEQ ID NO: 3189 - DNA, 22 bp, synthetic construct
  misc_feature 1..22: note = chemically synthesized
  source 1..22: mol_type = other DNA
actcttcggggtatcccaggag

SEQ ID NO: 3190 - DNA, 22 bp, synthetic construct
  misc_feature 1..22: note = chemically synthesized
  source 1..22: mol_type = other DNA
ttcggggtatcccaggaggcct

SEQ ID NO: 3191 - DNA, 22 bp, synthetic construct
  misc_feature 1..22: note = chemically synthesized
  source 1..22: mol_type = other DNA
cggggtatcccaggaggcctgg

SEQ ID NO: 3192 - DNA, 22 bp, synthetic construct
  misc_feature 1..22: note = chemically synthesized
  source 1..22: mol_type = other DNA
ggggtatcccaggaggcctgga

SEQ ID NO: 3193 - DNA, 22 bp, synthetic construct
  misc_feature 1..22: note = chemically synthesized
  source 1..22: mol_type = other DNA
gagcattggggtgggctggggt

SEQ ID NO: 3194 - DNA, 22 bp, synthetic construct
  misc_feature 1..22: note = chemically synthesized
  source 1..22: mol_type = other DNA
gggtgggctggggttcagagag

SEQ ID NO: 3195 - DNA, 22 bp, synthetic construct
  misc_feature 1..22: note = chemically synthesized
  source 1..22: mol_type = other DNA
gggttcagagaggagggattcc

SEQ ID NO: 3196 - DNA, 22 bp, synthetic construct
  misc_feature 1..22: note = chemically synthesized
  source 1..22: mol_type = other DNA
agagaggagggattcccttctc

SEQ ID NO: 3197 - DNA, 22 bp, synthetic construct
  misc_feature 1..22: note = chemically synthesized
  source 1..22: mol_type = other DNA
ccttctcaggttacgtggccaa

SEQ ID NO: 3198 - DNA, 22 bp, synthetic construct
  misc_feature 1..22: note = chemically synthesized
  source 1..22: mol_type = other DNA
ctcaggttacgtggccaagaag

SEQ ID NO: 3199 - DNA, 22 bp, synthetic construct
  misc_feature 1..22: note = chemically synthesized
  source 1..22: mol_type = other DNA
tcaggttacgtggccaagaagc

SEQ ID NO: 3200 - DNA, 22 bp, synthetic construct
  misc_feature 1..22: note = chemically synthesized
  source 1..22: mol_type = other DNA
aggttacgtggccaagaagcag

SEQ ID NO: 3201 - DNA, 22 bp, synthetic construct
  misc_feature 1..22: note = chemically synthesized
  source 1..22: mol_type = other DNA
cgtggccaagaagcaggggagc

SEQ ID NO: 3202 - DNA, 22 bp, synthetic construct
  misc_feature 1..22: note = chemically synthesized
  source 1..22: mol_type = other DNA
ggtttgggtcaggtctgggtgt

SEQ ID NO: 3203 - DNA, 22 bp, synthetic construct
  misc_feature 1..22: note = chemically synthesized
  source 1..22: mol_type = other DNA
gggtcaggtctgggtgtggggt

SEQ ID NO: 3204 - DNA, 22 bp, synthetic construct
  misc_feature 1..22: note = chemically synthesized
  source 1..22: mol_type = other DNA
ggtcaggtctgggtgtggggtg

SEQ ID NO: 3205 - DNA, 22 bp, synthetic construct
  misc_feature 1..22: note = chemically synthesized
  source 1..22: mol_type = other DNA
ggtgtggggtgaccagcttatg

SEQ ID NO: 3206 - DNA, 22 bp, synthetic construct
  misc_feature 1..22: note = chemically synthesized
  source 1..22: mol_type = other DNA
atgctgtttgcccaggacagcc

SEQ ID NO: 3207 - DNA, 22 bp, synthetic construct
  misc_feature 1..22: note = chemically synthesized
  source 1..22: mol_type = other DNA
tgctgtttgcccaggacagcct

SEQ ID NO: 3208 - DNA, 22 bp, synthetic construct
  misc_feature 1..22: note = chemically synthesized
  source 1..22: mol_type = other DNA
tttgcccaggacagcctagttt

SEQ ID NO: 3209 - DNA, 22 bp, synthetic construct
  misc_feature 1..22: note = chemically synthesized
  source 1..22: mol_type = other DNA
gcccaggacagcctagttttag

SEQ ID NO: 3210 - DNA, 22 bp, synthetic construct
  misc_feature 1..22: note = chemically synthesized
  source 1..22: mol_type = other DNA
cccaggacagcctagttttagc

SEQ ID NO: 3211 - DNA, 22 bp, synthetic construct
  misc_feature 1..22: note = chemically synthesized
  source 1..22: mol_type = other DNA
gttttagcactgaaaccctcag

SEQ ID NO: 3212 - DNA, 22 bp, synthetic construct
  misc_feature 1..22: note = chemically synthesized
  source 1..22: mol_type = other DNA
tagcactgaaaccctcagtcct

SEQ ID NO: 3213 - DNA, 22 bp, synthetic construct
  misc_feature 1..22: note = chemically synthesized
  source 1..22: mol_type = other DNA
agcactgaaaccctcagtccta

SEQ ID NO: 3214 - DNA, 22 bp, synthetic construct
  misc_feature 1..22: note = chemically synthesized
  source 1..22: mol_type = other DNA
gcactgaaaccctcagtcctag

SEQ ID NO: 3215 - DNA, 22 bp, synthetic construct
  misc_feature 1..22: note = chemically synthesized
  source 1..22: mol_type = other DNA
aaaccctcagtcctaggaaaac

SEQ ID NO: 3216 - DNA, 22 bp, synthetic construct
  misc_feature 1..22: note = chemically synthesized
  source 1..22: mol_type = other DNA
agtcctaggaaaacagggatgg

SEQ ID NO: 3217 - DNA, 22 bp, synthetic construct
  misc_feature 1..22: note = chemically synthesized
  source 1..22: mol_type = other DNA
ggaaaacagggatggttggtca

SEQ ID NO: 3218 - DNA, 22 bp, synthetic construct
  misc_feature 1..22: note = chemically synthesized
  source 1..22: mol_type = other DNA
gtcactgtctctgggtgactct

SEQ ID NO: 3219 - DNA, 22 bp, synthetic construct
  misc_feature 1..22: note = chemically synthesized
  source 1..22: mol_type = other DNA
tctctgggtgactcttgattcc

SEQ ID NO: 3220 - DNA, 22 bp, synthetic construct
  misc_feature 1..22: note = chemically synthesized
  source 1..22: mol_type = other DNA
tgggtgactcttgattcccggc

SEQ ID NO: 3221 - DNA, 22 bp, synthetic construct
  misc_feature 1..22: note = chemically synthesized
  source 1..22: mol_type = other DNA
ggtgactcttgattcccggcca

SEQ ID NO: 3222 - DNA, 22 bp, synthetic construct
  misc_feature 1..22: note = chemically synthesized
  source 1..22: mol_type = other DNA
ttgattcccggccagtttctcc

SEQ ID NO: 3223 - DNA, 22 bp, synthetic construct
  misc_feature 1..22: note = chemically synthesized
  source 1..22: mol_type = other DNA
gattcccggccagtttctccac

SEQ ID NO: 3224 - DNA, 22 bp, synthetic construct
  misc_feature 1..22: note = chemically synthesized
  source 1..22: mol_type = other DNA
attcccggccagtttctccacc

SEQ ID NO: 3225 - DNA, 22 bp, synthetic construct
  misc_feature 1..22: note = chemically synthesized
  source 1..22: mol_type = other DNA
ccggccagtttctccacctggg

SEQ ID NO: 3226 - DNA, 22 bp, synthetic construct
  misc_feature 1..22: note = chemically synthesized
  source 1..22: mol_type = other DNA
ctccacctggggctgtgtttct

SEQ ID NO: 3227 - DNA, 22 bp, synthetic construct
  misc_feature 1..22: note = chemically synthesized
  source 1..22: mol_type = other DNA
tccacctggggctgtgtttctc

SEQ ID NO: 3228 - DNA, 22 bp, synthetic construct
  misc_feature 1..22: note = chemically synthesized
  source 1..22: mol_type = other DNA
cacctggggctgtgtttctcgt

SEQ ID NO: 3229 - DNA, 22 bp, synthetic construct
  misc_feature 1..22: note = chemically synthesized
  source 1..22: mol_type = other DNA
gggctgtgtttctcgtcctgca

SEQ ID NO: 3230 - DNA, 22 bp, synthetic construct
  misc_feature 1..22: note = chemically synthesized
  source 1..22: mol_type = other DNA
tgtttctcgtcctgcatccttc

SEQ ID NO: 3231 - DNA, 22 bp, synthetic construct
  misc_feature 1..22: note = chemically synthesized
  source 1..22: mol_type = other DNA
ctcgtcctgcatccttctccag

SEQ ID NO: 3232 - DNA, 22 bp, synthetic construct
  misc_feature 1..22: note = chemically synthesized
  source 1..22: mol_type = other DNA
tcgtcctgcatccttctccagg

SEQ ID NO: 3233 - DNA, 22 bp, synthetic construct
  misc_feature 1..22: note = chemically synthesized
  source 1..22: mol_type = other DNA
gtcctgcatccttctccaggca

SEQ ID NO: 3234 - DNA, 22 bp, synthetic construct
  misc_feature 1..22: note = chemically synthesized
  source 1..22: mol_type = other DNA
catccttctccaggcaggtccc

SEQ ID NO: 3235 - DNA, 22 bp, synthetic construct
  misc_feature 1..22: note = chemically synthesized
  source 1..22: mol_type = other DNA
ctccaggcaggtccccaagcat

SEQ ID NO: 3236 - DNA, 22 bp, synthetic construct
  misc_feature 1..22: note = chemically synthesized
  source 1..22: mol_type = other DNA
tccaggcaggtccccaagcatc

SEQ ID NO: 3237 - DNA, 22 bp, synthetic construct
  misc_feature 1..22: note = chemically synthesized
  source 1..22: mol_type = other DNA
caggcaggtccccaagcatcgc

SEQ ID NO: 3238 - DNA, 22 bp, synthetic construct
  misc_feature 1..22: note = chemically synthesized
  source 1..22: mol_type = other DNA
ctgtggctgttcccaagttctt

SEQ ID NO: 3239 - DNA, 22 bp, synthetic construct
  misc_feature 1..22: note = chemically synthesized
  source 1..22: mol_type = other DNA
tggctgttcccaagttcttagg

SEQ ID NO: 3240 - DNA, 22 bp, synthetic construct
  misc_feature 1..22: note = chemically synthesized
  source 1..22: mol_type = other DNA
ttcccaagttcttagggtaccc

SEQ ID NO: 3241 - DNA, 22 bp, synthetic construct
  misc_feature 1..22: note = chemically synthesized
  source 1..22: mol_type = other DNA
ccaagttcttagggtaccccac

SEQ ID NO: 3242 - DNA, 22 bp, synthetic construct
  misc_feature 1..22: note = chemically synthesized
  source 1..22: mol_type = other DNA
ttagggtaccccacgtgggttt

SEQ ID NO: 3243 - DNA, 22 bp, synthetic construct
  misc_feature 1..22: note = chemically synthesized
  source 1..22: mol_type = other DNA
agggtaccccacgtgggtttat

SEQ ID NO: 3244 - DNA, 22 bp, synthetic construct
  misc_feature 1..22: note = chemically synthesized
  source 1..22: mol_type = other DNA
gggtaccccacgtgggtttatc

SEQ ID NO: 3245 - DNA, 22 bp, synthetic construct
  misc_feature 1..22: note = chemically synthesized
  source 1..22: mol_type = other DNA
atcaaccacttggtgaggctgg

SEQ ID NO: 3246 - DNA, 22 bp, synthetic construct
  misc_feature 1..22: note = chemically synthesized
  source 1..22: mol_type = other DNA
tcaaccacttggtgaggctggt

SEQ ID NO: 3247 - DNA, 22 bp, synthetic construct
  misc_feature 1..22: note = chemically synthesized
  source 1..22: mol_type = other DNA
ggtgaggctggtaccctgcccc

SEQ ID NO: 3248 - DNA, 22 bp, synthetic construct
  misc_feature 1..22: note = chemically synthesized
  source 1..22: mol_type = other DNA
gtgaggctggtaccctgccccc

SEQ ID NO: 3249 - DNA, 22 bp, synthetic construct
  misc_feature 1..22: note = chemically synthesized
  source 1..22: mol_type = other DNA
gtaccctgcccccattcctgca

SEQ ID NO: 3250 - DNA, 22 bp, synthetic construct
  misc_feature 1..22: note = chemically synthesized
  source 1..22: mol_type = other DNA
cccccattcctgcaccccaatt

SEQ ID NO: 3251 - DNA, 22 bp, synthetic construct
  misc_feature 1..22: note = chemically synthesized
  source 1..22: mol_type = other DNA
ctgcaccccaattgccttagtg

SEQ ID NO: 3252 - DNA, 22 bp, synthetic construct
  misc_feature 1..22: note = chemically synthesized
  source 1..22: mol_type = other DNA
caccccaattgccttagtggct

SEQ ID NO: 3253 - DNA, 22 bp, synthetic construct
  misc_feature 1..22: note = chemically synthesized
  source 1..22: mol_type = other DNA
ccttagtggctagggggttggg

SEQ ID NO: 3254 - DNA, 22 bp, synthetic construct
  misc_feature 1..22: note = chemically synthesized
  source 1..22: mol_type = other DNA
agtggctagggggttgggggct

SEQ ID NO: 3255 - DNA, 22 bp, synthetic construct
  misc_feature 1..22: note = chemically synthesized
  source 1..22: mol_type = other DNA
gtggctagggggttgggggcta

SEQ ID NO: 3256 - DNA, 22 bp, synthetic construct
  misc_feature 1..22: note = chemically synthesized
  source 1..22: mol_type = other DNA
gggggttgggggctagagtagg

SEQ ID NO: 3257 - DNA, 22 bp, synthetic construct
  misc_feature 1..22: note = chemically synthesized
  source 1..22: mol_type = other DNA
ggggctagagtaggaggggctg

SEQ ID NO: 3258 - DNA, 22 bp, synthetic construct
  misc_feature 1..22: note = chemically synthesized
  source 1..22: mol_type = other DNA
gagtaggaggggctggagccag

SEQ ID NO: 3259 - DNA, 22 bp, synthetic construct
  misc_feature 1..22: note = chemically synthesized
  source 1..22: mol_type = other DNA
gagccaggattcttagggctga

SEQ ID NO: 3260 - DNA, 22 bp, synthetic construct
  misc_feature 1..22: note = chemically synthesized
  source 1..22: mol_type = other DNA
ttagggctgaacagagaagagc

SEQ ID NO: 3261 - DNA, 22 bp, synthetic construct
  misc_feature 1..22: note = chemically synthesized
  source 1..22: mol_type = other DNA
agggctgaacagagaagagctg

SEQ ID NO: 3262 - DNA, 22 bp, synthetic construct
  misc_feature 1..22: note = chemically synthesized
  source 1..22: mol_type = other DNA
gggctgaacagagaagagctgg

SEQ ID NO: 3263 - DNA, 22 bp, synthetic construct
  misc_feature 1..22: note = chemically synthesized
  source 1..22: mol_type = other DNA
aacagagaagagctgggggcct

SEQ ID NO: 3264 - DNA, 22 bp, synthetic construct
  misc_feature 1..22: note = chemically synthesized
  source 1..22: mol_type = other DNA
ggggcctgggctcctgggtttg

SEQ ID NO: 3265 - DNA, 22 bp, synthetic construct
  misc_feature 1..22: note = chemically synthesized
  source 1..22: mol_type = other DNA
ggctcctgggtttgagagagga

SEQ ID NO: 3266 - DNA, 22 bp, synthetic construct
  misc_feature 1..22: note = chemically synthesized
  source 1..22: mol_type = other DNA
ctgggtttgagagaggaggggc

SEQ ID NO: 3267 - DNA, 22 bp, synthetic construct
  misc_feature 1..22: note = chemically synthesized
  source 1..22: mol_type = other DNA
ggtttgagagaggaggggctgg

SEQ ID NO: 3268 - DNA, 22 bp, synthetic construct
  misc_feature 1..22: note = chemically synthesized
  source 1..22: mol_type = other DNA
gagagaggaggggctggggcct

SEQ ID NO: 3269 - DNA, 22 bp, synthetic construct
  misc_feature 1..22: note = chemically synthesized
  source 1..22: mol_type = other DNA
agagaggaggggctggggcctg

SEQ ID NO: 3270 - DNA, 22 bp, synthetic construct
  misc_feature 1..22: note = chemically synthesized
  source 1..22: mol_type = other DNA
gggcctggactcctgggtccga

SEQ ID NO: 3271 - DNA, 22 bp, synthetic construct
  misc_feature 1..22: note = chemically synthesized
  source 1..22: mol_type = other DNA
gactcctgggtccgagggagga

SEQ ID NO: 3272 - DNA, 22 bp, synthetic construct
  misc_feature 1..22: note = chemically synthesized
  source 1..22: mol_type = other DNA
ctgggtccgagggaggaggggc

SEQ ID NO: 3273 - DNA, 22 bp, synthetic construct
  misc_feature 1..22: note = chemically synthesized
  source 1..22: mol_type = other DNA
ggtccgagggaggaggggctgg

SEQ ID NO: 3274 - DNA, 22 bp, synthetic construct
  misc_feature 1..22: note = chemically synthesized
  source 1..22: mol_type = other DNA
gggcctggactcctgggtctga

SEQ ID NO: 3275 - DNA, 22 bp, synthetic construct
  misc_feature 1..22: note = chemically synthesized
  source 1..22: mol_type = other DNA
gactcctgggtctgagggtgga

SEQ ID NO: 3276 - DNA, 22 bp, synthetic construct
  misc_feature 1..22: note = chemically synthesized
  source 1..22: mol_type = other DNA
ctgggtctgagggtggagggac

SEQ ID NO: 3277 - DNA, 22 bp, synthetic construct
  misc_feature 1..22: note = chemically synthesized
  source 1..22: mol_type = other DNA
ggtctgagggtggagggactgg

SEQ ID NO: 3278 - DNA, 22 bp, synthetic construct
  misc_feature 1..22: note = chemically synthesized
  source 1..22: mol_type = other DNA
agggtggagggactgggggcct

SEQ ID NO: 3279 - DNA, 22 bp, synthetic construct
  misc_feature 1..22: note = chemically synthesized
  source 1..22: mol_type = other DNA
ggggcctggactcctgggtccg

SEQ ID NO: 3280 - DNA, 22 bp, synthetic construct
  misc_feature 1..22: note = chemically synthesized
  source 1..22: mol_type = other DNA
gactcctgggtccgagggagga

SEQ ID NO: 3281 - DNA, 22 bp, synthetic construct
  misc_feature 1..22: note = chemically synthesized
  source 1..22: mol_type = other DNA
ctgggtccgagggaggaggggc

SEQ ID NO: 3282 - DNA, 22 bp, synthetic construct
  misc_feature 1..22: note = chemically synthesized
  source 1..22: mol_type = other DNA
ggtccgagggaggaggggctgg

SEQ ID NO: 3283 - DNA, 22 bp, synthetic construct
  misc_feature 1..22: note = chemically synthesized
  source 1..22: mol_type = other DNA
gggcctggactcgtgggtctga

SEQ ID NO: 3284 - DNA, 22 bp, synthetic construct
  misc_feature 1..22: note = chemically synthesized
  source 1..22: mol_type = other DNA
gactcgtgggtctgagggagga

SEQ ID NO: 3285 - DNA, 22 bp, synthetic construct
  misc_feature 1..22: note = chemically synthesized
  source 1..22: mol_type = other DNA
gtgggtctgagggaggaggggc

SEQ ID NO: 3286 - DNA, 22 bp, synthetic construct
  misc_feature 1..22: note = chemically synthesized
  source 1..22: mol_type = other DNA
agggaggaggggctgggggcct

SEQ ID NO: 3287 - DNA, 22 bp, synthetic construct
  misc_feature 1..22: note = chemically synthesized
  source 1..22: mol_type = other DNA
ggggcctggacttctgggtctt

SEQ ID NO: 3288 - DNA, 22 bp, synthetic construct
  misc_feature 1..22: note = chemically synthesized
  source 1..22: mol_type = other DNA
gacttctgggtcttagggaggc

SEQ ID NO: 3289 - DNA, 22 bp, synthetic construct
  misc_feature 1..22: note = chemically synthesized
  source 1..22: mol_type = other DNA
ctgggtcttagggaggcggggc

SEQ ID NO: 3290 - DNA, 22 bp, synthetic construct
  misc_feature 1..22: note = chemically synthesized
  source 1..22: mol_type = other DNA
tgggtcttagggaggcggggct

SEQ ID NO: 3291 - DNA, 22 bp, synthetic construct
  misc_feature 1..22: note = chemically synthesized
  source 1..22: mol_type = other DNA
ggtcttagggaggcggggctgg

SEQ ID NO: 3292 - DNA, 22 bp, synthetic construct
  misc_feature 1..22: note = chemically synthesized
  source 1..22: mol_type = other DNA
agggaggcggggctgggcctgg

SEQ ID NO: 3293 - DNA, 22 bp, synthetic construct
  misc_feature 1..22: note = chemically synthesized
  source 1..22: mol_type = other DNA
gggaggcggggctgggcctgga

SEQ ID NO: 3294 - DNA, 22 bp, synthetic construct
  misc_feature 1..22: note = chemically synthesized
  source 1..22: mol_type = other DNA
ggcctggacccctgggtctgaa

SEQ ID NO: 3295 - DNA, 22 bp, synthetic construct
  misc_feature 1..22: note = chemically synthesized
  source 1..22: mol_type = other DNA
gacccctgggtctgaatgggga

SEQ ID NO: 3296 - DNA, 22 bp, synthetic construct
  misc_feature 1..22: note = chemically synthesized
  source 1..22: mol_type = other DNA
ggtctgaatggggagaggctgg

SEQ ID NO: 3297 - DNA, 22 bp, synthetic construct
  misc_feature 1..22: note = chemically synthesized
  source 1..22: mol_type = other DNA
aatggggagaggctgggggcct

SEQ ID NO: 3298 - DNA, 22 bp, synthetic construct
  misc_feature 1..22: note = chemically synthesized
  source 1..22: mol_type = other DNA
ggggcctggactccttcatctg

SEQ ID NO: 3299 - DNA, 22 bp, synthetic construct
  misc_feature 1..22: note = chemically synthesized
  source 1..22: mol_type = other DNA
gactccttcatctgagggcgga

SEQ ID NO: 3300 - DNA, 22 bp, synthetic construct
  misc_feature 1..22: note = chemically synthesized
  source 1..22: mol_type = other DNA
cttcatctgagggcggaagggc

SEQ ID NO: 3301 - DNA, 22 bp, synthetic construct
  misc_feature 1..22: note = chemically synthesized
  source 1..22: mol_type = other DNA
catctgagggcggaagggctgg

SEQ ID NO: 3302 - DNA, 22 bp, synthetic construct
  misc_feature 1..22: note = chemically synthesized
  source 1..22: mol_type = other DNA
atctgagggcggaagggctggg

SEQ ID NO: 3303 - DNA, 22 bp, synthetic construct
  misc_feature 1..22: note = chemically synthesized
  source 1..22: mol_type = other DNA
agggcggaagggctggggcctg

SEQ ID NO: 3304 - DNA, 22 bp, synthetic construct
  misc_feature 1..22: note = chemically synthesized
  source 1..22: mol_type = other DNA
gggcctggcctcctgggttgaa

SEQ ID NO: 3305 - DNA, 22 bp, synthetic construct
  misc_feature 1..22: note = chemically synthesized
  source 1..22: mol_type = other DNA
gcctcctgggttgaatggggag

SEQ ID NO: 3306 - DNA, 22 bp, synthetic construct
  misc_feature 1..22: note = chemically synthesized
  source 1..22: mol_type = other DNA
ctgggttgaatggggaggggtt

SEQ ID NO: 3307 - DNA, 22 bp, synthetic construct
  misc_feature 1..22: note = chemically synthesized
  source 1..22: mol_type = other DNA
ggttgaatggggaggggttggg

SEQ ID NO: 3308 - DNA, 22 bp, synthetic construct
  misc_feature 1..22: note = chemically synthesized
  source 1..22: mol_type = other DNA
aatggggaggggttgggcctgg

SEQ ID NO: 3309 - DNA, 22 bp, synthetic construct
  misc_feature 1..22: note = chemically synthesized
  source 1..22: mol_type = other DNA
ggcctggactctggagtccctg

SEQ ID NO: 3310 - DNA, 22 bp, synthetic construct
  misc_feature 1..22: note = chemically synthesized
  source 1..22: mol_type = other DNA
gactctggagtccctggtgccc

SEQ ID NO: 3311 - DNA, 22 bp, synthetic construct
  misc_feature 1..22: note = chemically synthesized
  source 1..22: mol_type = other DNA
tggagtccctggtgcccaggcc

SEQ ID NO: 3312 - DNA, 22 bp, synthetic construct
  misc_feature 1..22: note = chemically synthesized
  source 1..22: mol_type = other DNA
gagtccctggtgcccaggcctc

SEQ ID NO: 3313 - DNA, 22 bp, synthetic construct
  misc_feature 1..22: note = chemically synthesized
  source 1..22: mol_type = other DNA
gtgcccaggcctcaggcatctt

SEQ ID NO: 3314 - DNA, 22 bp, synthetic construct
  misc_feature 1..22: note = chemically synthesized
  source 1..22: mol_type = other DNA
aggcatctttcacagggatgcc

SEQ ID NO: 3315 - DNA, 22 bp, synthetic construct
  misc_feature 1..22: note = chemically synthesized
  source 1..22: mol_type = other DNA
tcacagggatgcctgtactggg

SEQ ID NO: 3316 - DNA, 22 bp, synthetic construct
  misc_feature 1..22: note = chemically synthesized
  source 1..22: mol_type = other DNA
cacagggatgcctgtactgggc

SEQ ID NO: 3317 - DNA, 22 bp, synthetic construct
  misc_feature 1..22: note = chemically synthesized
  source 1..22: mol_type = other DNA
acagggatgcctgtactgggca

SEQ ID NO: 3318 - DNA, 22 bp, synthetic construct
  misc_feature 1..22: note = chemically synthesized
  source 1..22: mol_type = other DNA
tactgggcaggtccttgaaagg

SEQ ID NO: 3319 - DNA, 22 bp, synthetic construct
  misc_feature 1..22: note = chemically synthesized
  source 1..22: mol_type = other DNA
ggcaggtccttgaaagggaaag

SEQ ID NO: 3320 - DNA, 22 bp, synthetic construct
  misc_feature 1..22: note = chemically synthesized
  source 1..22: mol_type = other DNA
gaaagggaaaggcccattgctc

SEQ ID NO: 3321 - DNA, 22 bp, synthetic construct
  misc_feature 1..22: note = chemically synthesized
  source 1..22: mol_type = other DNA
aaagggaaaggcccattgctct

SEQ ID NO: 3322 - DNA, 22 bp, synthetic construct
  misc_feature 1..22: note = chemically synthesized
  source 1..22: mol_type = other DNA
ctctccttgcccccctccccta

SEQ ID NO: 3323 - DNA, 22 bp, synthetic construct
  misc_feature 1..22: note = chemically synthesized
  source 1..22: mol_type = other DNA
tccttgcccccctcccctatcg

SEQ ID NO: 3324 - DNA, 22 bp, synthetic construct
  misc_feature 1..22: note = chemically synthesized
  source 1..22: mol_type = other DNA
cttgcccccctcccctatcgcc

SEQ ID NO: 3325 - DNA, 22 bp, synthetic construct
  misc_feature 1..22: note = chemically synthesized
  source 1..22: mol_type = other DNA
gcccccctcccctatcgccatg

SEQ ID NO: 3326 - DNA, 22 bp, synthetic construct
  misc_feature 1..22: note = chemically synthesized
  source 1..22: mol_type = other DNA
cccccctcccctatcgccatga

SEQ ID NO: 3327 - DNA, 22 bp, synthetic construct
  misc_feature 1..22: note = chemically synthesized
  source 1..22: mol_type = other DNA
ccctatcgccatgacaactggg

SEQ ID NO: 3328 - DNA, 22 bp, synthetic construct
  misc_feature 1..22: note = chemically synthesized
  source 1..22: mol_type = other DNA
tcgccatgacaactgggtggaa

SEQ ID NO: 3329 - DNA, 22 bp, synthetic construct
  misc_feature 1..22: note = chemically synthesized
  source 1..22: mol_type = other DNA
ggtggaaataaacgagccgagt

SEQ ID NO: 3330 - DNA, 22 bp, synthetic construct
  misc_feature 1..22: note = chemically synthesized
  source 1..22: mol_type = other DNA
atcccgttcccagggcacgtgc

SEQ ID NO: 3331 - DNA, 22 bp, synthetic construct
  misc_feature 1..22: note = chemically synthesized
  source 1..22: mol_type = other DNA
ccagggcacgtgcggccccttc

SEQ ID NO: 3332 - DNA, 22 bp, synthetic construct
  misc_feature 1..22: note = chemically synthesized
  source 1..22: mol_type = other DNA
cacagcccgagtttccatgacc

SEQ ID NO: 3333 - DNA, 22 bp, synthetic construct
  misc_feature 1..22: note = chemically synthesized
  source 1..22: mol_type = other DNA
acagcccgagtttccatgacct

SEQ ID NO: 3334 - DNA, 22 bp, synthetic construct
  misc_feature 1..22: note = chemically synthesized
  source 1..22: mol_type = other DNA
ccatgacctcatgctcttggcc

SEQ ID NO: 3335 - DNA, 22 bp, synthetic construct
  misc_feature 1..22: note = chemically synthesized
  source 1..22: mol_type = other DNA
catgacctcatgctcttggccc

SEQ ID NO: 3336 - DNA, 22 bp, synthetic construct
  misc_feature 1..22: note = chemically synthesized
  source 1..22: mol_type = other DNA
atgctcttggccctcgtagctc

SEQ ID NO: 3337 - DNA, 22 bp, synthetic construct
  misc_feature 1..22: note = chemically synthesized
  source 1..22: mol_type = other DNA
ttggccctcgtagctccctccc

SEQ ID NO: 3338 - DNA, 22 bp, synthetic construct
  misc_feature 1..22: note = chemically synthesized
  source 1..22: mol_type = other DNA
ggccctcgtagctccctcccgc

SEQ ID NO: 3339 - DNA, 22 bp, synthetic construct
  misc_feature 1..22: note = chemically synthesized
  source 1..22: mol_type = other DNA
gccctcgtagctccctcccgcc

SEQ ID NO: 3340 - DNA, 22 bp, synthetic construct
  misc_feature 1..22: note = chemically synthesized
  source 1..22: mol_type = other DNA
gtagctccctcccgcctcctcc

SEQ ID NO: 3341 - DNA, 22 bp, synthetic construct
  misc_feature 1..22: note = chemically synthesized
  source 1..22: mol_type = other DNA
cctcccgcctcctccagatggg

SEQ ID NO: 3342 - DNA, 22 bp, synthetic construct
  misc_feature 1..22: note = chemically synthesized
  source 1..22: mol_type = other DNA
ccgcctcctccagatgggcagc

SEQ ID NO: 3343 - DNA, 22 bp, synthetic construct
  misc_feature 1..22: note = chemically synthesized
  source 1..22: mol_type = other DNA
ctccagatgggcagctttggag

SEQ ID NO: 3344 - DNA, 22 bp, synthetic construct
  misc_feature 1..22: note = chemically synthesized
  source 1..22: mol_type = other DNA
cagatgggcagctttggagagg

SEQ ID NO: 3345 - DNA, 22 bp, synthetic construct
  misc_feature 1..22: note = chemically synthesized
  source 1..22: mol_type = other DNA
tggagaggtgagggacttgggg

SEQ ID NO: 3346 - DNA, 22 bp, synthetic construct
  misc_feature 1..22: note = chemically synthesized
  source 1..22: mol_type = other DNA
ggagaggtgagggacttggggg

SEQ ID NO: 3347 - DNA, 22 bp, synthetic construct
  misc_feature 1..22: note = chemically synthesized
  source 1..22: mol_type = other DNA
gagaggtgagggacttgggggg

SEQ ID NO: 3348 - DNA, 22 bp, synthetic construct
  misc_feature 1..22: note = chemically synthesized
  source 1..22: mol_type = other DNA
ggggggtaatttatcccgtgga

SEQ ID NO: 3349 - DNA, 22 bp, synthetic construct
  misc_feature 1..22: note = chemically synthesized
  source 1..22: mol_type = other DNA
gggggtaatttatcccgtggat

SEQ ID NO: 3350 - DNA, 22 bp, synthetic construct
  misc_feature 1..22: note = chemically synthesized
  source 1..22: mol_type = other DNA
atcccgtggatctaggagttta

SEQ ID NO: 3351 - DNA, 22 bp, synthetic construct
  misc_feature 1..22: note = chemically synthesized
  source 1..22: mol_type = other DNA
tcccgtggatctaggagtttag

SEQ ID NO: 3352 - DNA, 22 bp, synthetic construct
  misc_feature 1..22: note = chemically synthesized
  source 1..22: mol_type = other DNA
ggagtttagcttcactccttcc

SEQ ID NO: 3353 - DNA, 22 bp, synthetic construct
  misc_feature 1..22: note = chemically synthesized
  source 1..22: mol_type = other DNA
agcttcactccttcctcagctc

SEQ ID NO: 3354 - DNA, 22 bp, synthetic construct
  misc_feature 1..22: note = chemically synthesized
  source 1..22: mol_type = other DNA
gcttcactccttcctcagctcc

SEQ ID NO: 3355 - DNA, 22 bp, synthetic construct
  misc_feature 1..22: note = chemically synthesized
  source 1..22: mol_type = other DNA
cactccttcctcagctccagtt

SEQ ID NO: 3356 - DNA, 22 bp, synthetic construct
  misc_feature 1..22: note = chemically synthesized
  source 1..22: mol_type = other DNA
actccttcctcagctccagttc

SEQ ID NO: 3357 - DNA, 22 bp, synthetic construct
  misc_feature 1..22: note = chemically synthesized
  source 1..22: mol_type = other DNA
cttcctcagctccagttcaggt

SEQ ID NO: 3358 - DNA, 22 bp, synthetic construct
  misc_feature 1..22: note = chemically synthesized
  source 1..22: mol_type = other DNA
cctcagctccagttcaggtccc

SEQ ID NO: 3359 - DNA, 22 bp, synthetic construct
  misc_feature 1..22: note = chemically synthesized
  source 1..22: mol_type = other DNA
ctcagctccagttcaggtcccg

SEQ ID NO: 3360 - DNA, 22 bp, synthetic construct
  misc_feature 1..22: note = chemically synthesized
  source 1..22: mol_type = other DNA
agctccagttcaggtcccggag

SEQ ID NO: 3361 - DNA, 22 bp, synthetic construct
  misc_feature 1..22: note = chemically synthesized
  source 1..22: mol_type = other DNA
cagttcaggtcccggagcccac

SEQ ID NO: 3362 - DNA, 22 bp, synthetic construct
  misc_feature 1..22: note = chemically synthesized
  source 1..22: mol_type = other DNA
aggtcccggagcccacccagtg

SEQ ID NO: 3363 - DNA, 22 bp, synthetic construct
  misc_feature 1..22: note = chemically synthesized
  source 1..22: mol_type = other DNA
gggcaagtccctcctccgaccc

SEQ ID NO: 3364 - DNA, 22 bp, synthetic construct
  misc_feature 1..22: note = chemically synthesized
  source 1..22: mol_type = other DNA
ctccgaccccctggacttcggc

SEQ ID NO: 3365 - DNA, 22 bp, synthetic construct
  misc_feature 1..22: note = chemically synthesized
  source 1..22: mol_type = other DNA
cgaccccctggacttcggcttt

SEQ ID NO: 3366 - DNA, 22 bp, synthetic construct
  misc_feature 1..22: note = chemically synthesized
  source 1..22: mol_type = other DNA
gacttcggcttttgtcccccca

SEQ ID NO: 3367 - DNA, 22 bp, synthetic construct
  misc_feature 1..22: note = chemically synthesized
  source 1..22: mol_type = other DNA
cggcttttgtccccccaagttt

SEQ ID NO: 3368 - DNA, 22 bp, synthetic construct
  misc_feature 1..22: note = chemically synthesized
  source 1..22: mol_type = other DNA
ggcttttgtccccccaagtttt

SEQ ID NO: 3369 - DNA, 22 bp, synthetic construct
  misc_feature 1..22: note = chemically synthesized
  source 1..22: mol_type = other DNA
ttgtccccccaagttttggacc

SEQ ID NO: 3370 - DNA, 22 bp, synthetic construct
  misc_feature 1..22: note = chemically synthesized
  source 1..22: mol_type = other DNA
tgtccccccaagttttggaccc

SEQ ID NO: 3371 - DNA, 22 bp, synthetic construct
  misc_feature 1..22: note = chemically synthesized
  source 1..22: mol_type = other DNA
gtccccccaagttttggacccc

SEQ ID NO: 3372 - DNA, 22 bp, synthetic construct
  misc_feature 1..22: note = chemically synthesized
  source 1..22: mol_type = other DNA
tccccccaagttttggacccct

SEQ ID NO: 3373 - DNA, 22 bp, synthetic construct
  misc_feature 1..22: note = chemically synthesized
  source 1..22: mol_type = other DNA
tggacccctaagggaagaatga

SEQ ID NO: 3374 - DNA, 22 bp, synthetic construct
  misc_feature 1..22: note = chemically synthesized
  source 1..22: mol_type = other DNA
ggacccctaagggaagaatgag

SEQ ID NO: 3375 - DNA, 22 bp, synthetic construct
  misc_feature 1..22: note = chemically synthesized
  source 1..22: mol_type = other DNA
gacccctaagggaagaatgaga

SEQ ID NO: 3376 - DNA, 22 bp, synthetic construct
  misc_feature 1..22: note = chemically synthesized
  source 1..22: mol_type = other DNA
agggaagaatgagaaacggtgg

SEQ ID NO: 3377 - DNA, 22 bp, synthetic construct
  misc_feature 1..22: note = chemically synthesized
  source 1..22: mol_type = other DNA
gctgcagggccccgtgcagagg

SEQ ID NO: 3378 - DNA, 22 bp, synthetic construct
  misc_feature 1..22: note = chemically synthesized
  source 1..22: mol_type = other DNA
cagggccccgtgcagagggggc

SEQ ID NO: 3379 - DNA, 22 bp, synthetic construct
  misc_feature 1..22: note = chemically synthesized
  source 1..22: mol_type = other DNA
agtgaactggagtgtgacagcc

SEQ ID NO: 3380 - DNA, 22 bp, synthetic construct
  misc_feature 1..22: note = chemically synthesized
  source 1..22: mol_type = other DNA
gagtgtgacagcctggggccca

SEQ ID NO: 3381 - DNA, 22 bp, synthetic construct
  misc_feature 1..22: note = chemically synthesized
  source 1..22: mol_type = other DNA
gggcccaggcacacaggtgtgc

SEQ ID NO: 3382 - DNA, 22 bp, synthetic construct
  misc_feature 1..22: note = chemically synthesized
  source 1..22: mol_type = other DNA
tctcacccctctgggagtcccg

SEQ ID NO: 3383 - DNA, 22 bp, synthetic construct
  misc_feature 1..22: note = chemically synthesized
  source 1..22: mol_type = other DNA
acccctctgggagtcccgccca

SEQ ID NO: 3384 - DNA, 22 bp, synthetic construct
  misc_feature 1..22: note = chemically synthesized
  source 1..22: mol_type = other DNA
tgggagtcccgcccaggcccct

SEQ ID NO: 3385 - DNA, 22 bp, synthetic construct
  misc_feature 1..22: note = chemically synthesized
  source 1..22: mol_type = other DNA
ggagtcccgcccaggcccctga

SEQ ID NO: 3386 - DNA, 22 bp, synthetic construct
  misc_feature 1..22: note = chemically synthesized
  source 1..22: mol_type = other DNA
agtctgtcccagcacagggtgg

SEQ ID NO: 3387 - DNA, 22 bp, synthetic construct
  misc_feature 1..22: note = chemically synthesized
  source 1..22: mol_type = other DNA
tcccagcacagggtggccttcc

SEQ ID NO: 3388 - DNA, 22 bp, synthetic construct
  misc_feature 1..22: note = chemically synthesized
  source 1..22: mol_type = other DNA
cctccaccctgcatagccctgg

SEQ ID NO: 3389 - DNA, 22 bp, synthetic construct
  misc_feature 1..22: note = chemically synthesized
  source 1..22: mol_type = other DNA
ctccaccctgcatagccctggg

SEQ ID NO: 3390 - DNA, 22 bp, synthetic construct
  misc_feature 1..22: note = chemically synthesized
  source 1..22: mol_type = other DNA
caccctgcatagccctgggccc

SEQ ID NO: 3391 - DNA, 22 bp, synthetic construct
  misc_feature 1..22: note = chemically synthesized
  source 1..22: mol_type = other DNA
catagccctgggcccacggctt

SEQ ID NO: 3392 - DNA, 22 bp, synthetic construct
  misc_feature 1..22: note = chemically synthesized
  source 1..22: mol_type = other DNA
ggcccacggcttcgttcctgca

SEQ ID NO: 3393 - DNA, 22 bp, synthetic construct
  misc_feature 1..22: note = chemically synthesized
  source 1..22: mol_type = other DNA
cgttcctgcagagtatctgctg

SEQ ID NO: 3394 - DNA, 22 bp, synthetic construct
  misc_feature 1..22: note = chemically synthesized
  source 1..22: mol_type = other DNA
gttcctgcagagtatctgctgg

SEQ ID NO: 3395 - DNA, 22 bp, synthetic construct
  misc_feature 1..22: note = chemically synthesized
  source 1..22: mol_type = other DNA
ctgcagagtatctgctggggtg

SEQ ID NO: 3396 - DNA, 22 bp, synthetic construct
  misc_feature 1..22: note = chemically synthesized
  source 1..22: mol_type = other DNA
cagagtatctgctggggtggtt

SEQ ID NO: 3397 - DNA, 22 bp, synthetic construct
  misc_feature 1..22: note = chemically synthesized
  source 1..22: mol_type = other DNA
ctggggtggtttccgagcttga

SEQ ID NO: 3398 - DNA, 22 bp, synthetic construct
  misc_feature 1..22: note = chemically synthesized
  source 1..22: mol_type = other DNA
gggtggtttccgagcttgaccc

SEQ ID NO: 3399 - DNA, 22 bp, synthetic construct
  misc_feature 1..22: note = chemically synthesized
  source 1..22: mol_type = other DNA
ccgagcttgacccttggaagga

SEQ ID NO: 3400 - DNA, 22 bp, synthetic construct
  misc_feature 1..22: note = chemically synthesized
  source 1..22: mol_type = other DNA
cgagcttgacccttggaaggac

SEQ ID NO: 3401 - DNA, 22 bp, synthetic construct
  misc_feature 1..22: note = chemically synthesized
  source 1..22: mol_type = other DNA
gacccttggaaggacctggctg

SEQ ID NO: 3402 - DNA, 22 bp, synthetic construct
  misc_feature 1..22: note = chemically synthesized
  source 1..22: mol_type = other DNA
acccttggaaggacctggctgg

SEQ ID NO: 3403 - DNA, 22 bp, synthetic construct
  misc_feature 1..22: note = chemically synthesized
  source 1..22: mol_type = other DNA
ggaaggacctggctgggtttaa

SEQ ID NO: 3404 - DNA, 22 bp, synthetic construct
  misc_feature 1..22: note = chemically synthesized
  source 1..22: mol_type = other DNA
gaaggacctggctgggtttaag

SEQ ID NO: 3405 - DNA, 22 bp, synthetic construct
  misc_feature 1..22: note = chemically synthesized
  source 1..22: mol_type = other DNA
gctgggtttaaggcaggagggg

SEQ ID NO: 3406 - DNA, 22 bp, synthetic construct
  misc_feature 1..22: note = chemically synthesized
  source 1..22: mol_type = other DNA
ggtttaaggcaggaggggctgg

SEQ ID NO: 3407 - DNA, 22 bp, synthetic construct
  misc_feature 1..22: note = chemically synthesized
  source 1..22: mol_type = other DNA
aaggcaggaggggctgggggcc

SEQ ID NO: 3408 - DNA, 22 bp, synthetic construct
  misc_feature 1..22: note = chemically synthesized
  source 1..22: mol_type = other DNA
aggcaggaggggctgggggcca

SEQ ID NO: 3409 - DNA, 22 bp, synthetic construct
  misc_feature 1..22: note = chemically synthesized
  source 1..22: mol_type = other DNA
ggggccaggactcctggctctg

SEQ ID NO: 3410 - DNA, 22 bp, synthetic construct
  misc_feature 1..22: note = chemically synthesized
  source 1..22: mol_type = other DNA
ctggctctgaaggaggaggggc

SEQ ID NO: 3411 - DNA, 22 bp, synthetic construct
  misc_feature 1..22: note = chemically synthesized
  source 1..22: mol_type = other DNA
gctctgaaggaggaggggctgg

SEQ ID NO: 3412 - DNA, 22 bp, synthetic construct
  misc_feature 1..22: note = chemically synthesized
  source 1..22: mol_type = other DNA
tgaaggaggaggggctggaacc

SEQ ID NO: 3413 - DNA, 22 bp, synthetic construct
  misc_feature 1..22: note = chemically synthesized
  source 1..22: mol_type = other DNA
aaggaggaggggctggaacctc

SEQ ID NO: 3414 - DNA, 22 bp, synthetic construct
  misc_feature 1..22: note = chemically synthesized
  source 1..22: mol_type = other DNA
gaacctcttccctagtctgagc

SEQ ID NO: 3415 - DNA, 22 bp, synthetic construct
  misc_feature 1..22: note = chemically synthesized
  source 1..22: mol_type = other DNA
ttccctagtctgagcactggaa

SEQ ID NO: 3416 - DNA, 22 bp, synthetic construct
  misc_feature 1..22: note = chemically synthesized
  source 1..22: mol_type = other DNA
ccctagtctgagcactggaagc

SEQ ID NO: 3417 - DNA, 22 bp, synthetic construct
  misc_feature 1..22: note = chemically synthesized
  source 1..22: mol_type = other DNA
cctagtctgagcactggaagcg

SEQ ID NO: 3418 - DNA, 22 bp, synthetic construct
  misc_feature 1..22: note = chemically synthesized
  source 1..22: mol_type = other DNA
gtctgagcactggaagcgccac

SEQ ID NO: 3419 - DNA, 22 bp, synthetic construct
  misc_feature 1..22: note = chemically synthesized
  source 1..22: mol_type = other DNA
agcactggaagcgccacctgtg

SEQ ID NO: 3420 - DNA, 22 bp, synthetic construct
  misc_feature 1..22: note = chemically synthesized
  source 1..22: mol_type = other DNA
gaagcgccacctgtgggtggtg

SEQ ID NO: 3421 - DNA, 22 bp, synthetic construct
  misc_feature 1..22: note = chemically synthesized
  source 1..22: mol_type = other DNA
tgggtggtgacgggggttttgc

SEQ ID NO: 3422 - DNA, 22 bp, synthetic construct
  misc_feature 1..22: note = chemically synthesized
  source 1..22: mol_type = other DNA
tgccgtgtctaacaggtaccat

SEQ ID NO: 3423 - DNA, 22 bp, synthetic construct
  misc_feature 1..22: note = chemically synthesized
  source 1..22: mol_type = other DNA
gccgtgtctaacaggtaccatg

SEQ ID NO: 3424 - DNA, 22 bp, synthetic construct
  misc_feature 1..22: note = chemically synthesized
  source 1..22: mol_type = other DNA
ccgtgtctaacaggtaccatgt

SEQ ID NO: 3425 - DNA, 22 bp, synthetic construct
  misc_feature 1..22: note = chemically synthesized
  source 1..22: mol_type = other DNA
acaggtaccatgtggggttccc

SEQ ID NO: 3426 - DNA, 22 bp, synthetic construct
  misc_feature 1..22: note = chemically synthesized
  source 1..22: mol_type = other DNA
ccgcacccagatgagaagcccc

SEQ ID NO: 3427 - DNA, 22 bp, synthetic construct
  misc_feature 1..22: note = chemically synthesized
  source 1..22: mol_type = other DNA
ccttccccgttcacttcctgtt

SEQ ID NO: 3428 - DNA, 22 bp, synthetic construct
  misc_feature 1..22: note = chemically synthesized
  source 1..22: mol_type = other DNA
ccccgttcacttcctgtttgca

SEQ ID NO: 3429 - DNA, 22 bp, synthetic construct
  misc_feature 1..22: note = chemically synthesized
  source 1..22: mol_type = other DNA
cccgttcacttcctgtttgcag

SEQ ID NO: 3430 - DNA, 22 bp, synthetic construct
  misc_feature 1..22: note = chemically synthesized
  source 1..22: mol_type = other DNA
acttcctgtttgcagatagcca

SEQ ID NO: 3431 - DNA, 22 bp, synthetic construct
  misc_feature 1..22: note = chemically synthesized
  source 1..22: mol_type = other DNA
cctgtttgcagatagccaggag

SEQ ID NO: 3432 - DNA, 22 bp, synthetic construct
  misc_feature 1..22: note = chemically synthesized
  source 1..22: mol_type = other DNA
ctgtttgcagatagccaggagt

SEQ ID NO: 3433 - DNA, 22 bp, synthetic construct
  misc_feature 1..22: note = chemically synthesized
  source 1..22: mol_type = other DNA
tttgcagatagccaggagtcct

SEQ ID NO: 3434 - DNA, 22 bp, synthetic construct
  misc_feature 1..22: note = chemically synthesized
  source 1..22: mol_type = other DNA
gcagatagccaggagtcctttc

SEQ ID NO: 3435 - DNA, 22 bp, synthetic construct
  misc_feature 1..22: note = chemically synthesized
  source 1..22: mol_type = other DNA
cagatagccaggagtcctttcg

SEQ ID NO: 3436 - DNA, 22 bp, synthetic construct
  misc_feature 1..22: note = chemically synthesized
  source 1..22: mol_type = other DNA
tcgtggtttccactgagcactg

SEQ ID NO: 3437 - DNA, 22 bp, synthetic construct
  misc_feature 1..22: note = chemically synthesized
  source 1..22: mol_type = other DNA
cgtggtttccactgagcactga

SEQ ID NO: 3438 - DNA, 22 bp, synthetic construct
  misc_feature 1..22: note = chemically synthesized
  source 1..22: mol_type = other DNA
gtggtttccactgagcactgaa

SEQ ID NO: 3439 - DNA, 22 bp, synthetic construct
  misc_feature 1..22: note = chemically synthesized
  source 1..22: mol_type = other DNA
ccactgagcactgaaggcctgg

SEQ ID NO: 3440 - DNA, 22 bp, synthetic construct
  misc_feature 1..22: note = chemically synthesized
  source 1..22: mol_type = other DNA
cactgagcactgaaggcctggc

SEQ ID NO: 3441 - DNA, 22 bp, synthetic construct
  misc_feature 1..22: note = chemically synthesized
  source 1..22: mol_type = other DNA
agcactgaaggcctggccggcc

SEQ ID NO: 3442 - DNA, 22 bp, synthetic construct
  misc_feature 1..22: note = chemically synthesized
  source 1..22: mol_type = other DNA
aaggcctggccggcctgaccac

SEQ ID NO: 3443 - DNA, 22 bp, synthetic construct
  misc_feature 1..22: note = chemically synthesized
  source 1..22: mol_type = other DNA
gccggcctgaccactgggcaac

SEQ ID NO: 3444 - DNA, 22 bp, synthetic construct
  misc_feature 1..22: note = chemically synthesized
  source 1..22: mol_type = other DNA
accactgggcaaccaggcgtat

SEQ ID NO: 3445 - DNA, 22 bp, synthetic construct
  misc_feature 1..22: note = chemically synthesized
  source 1..22: mol_type = other DNA
ggcaaccaggcgtatcttaaac

SEQ ID NO: 3446 - DNA, 22 bp, synthetic construct
  misc_feature 1..22: note = chemically synthesized
  source 1..22: mol_type = other DNA
aaacagccagtggccagaggct

SEQ ID NO: 3447 - DNA, 22 bp, synthetic construct
  misc_feature 1..22: note = chemically synthesized
  source 1..22: mol_type = other DNA
aacagccagtggccagaggctg

SEQ ID NO: 3448 - DNA, 22 bp, synthetic construct
  misc_feature 1..22: note = chemically synthesized
  source 1..22: mol_type = other DNA
ttgggtcattttccccactgtc

SEQ ID NO: 3449 - DNA, 22 bp, synthetic construct
  misc_feature 1..22: note = chemically synthesized
  source 1..22: mol_type = other DNA
ggtcattttccccactgtccta

SEQ ID NO: 3450 - DNA, 22 bp, synthetic construct
  misc_feature 1..22: note = chemically synthesized
  source 1..22: mol_type = other DNA
tccccactgtcctagcaccgtg

SEQ ID NO: 3451 - DNA, 22 bp, synthetic construct
  misc_feature 1..22: note = chemically synthesized
  source 1..22: mol_type = other DNA
ccccactgtcctagcaccgtgt

SEQ ID NO: 3452 - DNA, 22 bp, synthetic construct
  misc_feature 1..22: note = chemically synthesized
  source 1..22: mol_type = other DNA
cccactgtcctagcaccgtgtc

SEQ ID NO: 3453 - DNA, 22 bp, synthetic construct
  misc_feature 1..22: note = chemically synthesized
  source 1..22: mol_type = other DNA
tcctagcaccgtgtccctggat

SEQ ID NO: 3454 - DNA, 22 bp, synthetic construct
  misc_feature 1..22: note = chemically synthesized
  source 1..22: mol_type = other DNA
gcaccgtgtccctggatctgtt

SEQ ID NO: 3455 - DNA, 22 bp, synthetic construct
  misc_feature 1..22: note = chemically synthesized
  source 1..22: mol_type = other DNA
gatctgttttcgtggctccctc

SEQ ID NO: 3456 - DNA, 22 bp, synthetic construct
  misc_feature 1..22: note = chemically synthesized
  source 1..22: mol_type = other DNA
ttttcgtggctccctctggagt

SEQ ID NO: 3457 - DNA, 22 bp, synthetic construct
  misc_feature 1..22: note = chemically synthesized
  source 1..22: mol_type = other DNA
tcgtggctccctctggagtccc

SEQ ID NO: 3458 - DNA, 22 bp, synthetic construct
  misc_feature 1..22: note = chemically synthesized
  source 1..22: mol_type = other DNA
cgtggctccctctggagtcccg

SEQ ID NO: 3459 - DNA, 22 bp, synthetic construct
  misc_feature 1..22: note = chemically synthesized
  source 1..22: mol_type = other DNA
gtggctccctctggagtcccga

SEQ ID NO: 3460 - DNA, 22 bp, synthetic construct
  misc_feature 1..22: note = chemically synthesized
  source 1..22: mol_type = other DNA
cctctggagtcccgacttgctg

SEQ ID NO: 3461 - DNA, 22 bp, synthetic construct
  misc_feature 1..22: note = chemically synthesized
  source 1..22: mol_type = other DNA
tggagtcccgacttgctgggac

SEQ ID NO: 3462 - DNA, 22 bp, synthetic construct
  misc_feature 1..22: note = chemically synthesized
  source 1..22: mol_type = other DNA
gagtcccgacttgctgggacac

SEQ ID NO: 3463 - DNA, 22 bp, synthetic construct
  misc_feature 1..22: note = chemically synthesized
  source 1..22: mol_type = other DNA
gctgggacaccgtggctggggt

SEQ ID NO: 3464 - DNA, 22 bp, synthetic construct
  misc_feature 1..22: note = chemically synthesized
  source 1..22: mol_type = other DNA
ctgggacaccgtggctggggta

SEQ ID NO: 3465 - DNA, 22 bp, synthetic construct
  misc_feature 1..22: note = chemically synthesized
  source 1..22: mol_type = other DNA
ggacaccgtggctggggtaggt

SEQ ID NO: 3466 - DNA, 22 bp, synthetic construct
  misc_feature 1..22: note = chemically synthesized
  source 1..22: mol_type = other DNA
gggtaggtgcggctgacggctg

SEQ ID NO: 3467 - DNA, 22 bp, synthetic construct
  misc_feature 1..22: note = chemically synthesized
  source 1..22: mol_type = other DNA
acggctgtttcccacccccagg

SEQ ID NO: 3468 - DNA, 22 bp, synthetic construct
  misc_feature 1..22: note = chemically synthesized
  source 1..22: mol_type = other DNA
tttcccacccccaggcctgcat

SEQ ID NO: 3469 - DNA, 22 bp, synthetic construct
  misc_feature 1..22: note = chemically synthesized
  source 1..22: mol_type = other DNA
cccacccccaggcctgcattga

SEQ ID NO: 3470 - DNA, 22 bp, synthetic construct
  misc_feature 1..22: note = chemically synthesized
  source 1..22: mol_type = other DNA
ccacccccaggcctgcattgat

SEQ ID NO: 3471 - DNA, 22 bp, synthetic construct
  misc_feature 1..22: note = chemically synthesized
  source 1..22: mol_type = other DNA
cattgatgagaacctggaggtg

SEQ ID NO: 3472 - DNA, 22 bp, synthetic construct
  misc_feature 1..22: note = chemically synthesized
  source 1..22: mol_type = other DNA
atgagaacctggaggtggtgcg

SEQ ID NO: 3473 - DNA, 22 bp, synthetic construct
  misc_feature 1..22: note = chemically synthesized
  source 1..22: mol_type = other DNA
gaggtggtgcgcttcttggtgg

SEQ ID NO: 3474 - DNA, 22 bp, synthetic construct
  misc_feature 1..22: note = chemically synthesized
  source 1..22: mol_type = other DNA
cttggtggagcagggcgccact

SEQ ID NO: 3475 - DNA, 22 bp, synthetic construct
  misc_feature 1..22: note = chemically synthesized
  source 1..22: mol_type = other DNA
ttggtggagcagggcgccactg

SEQ ID NO: 3476 - DNA, 22 bp, synthetic construct
  misc_feature 1..22: note = chemically synthesized
  source 1..22: mol_type = other DNA
ggtggagcagggcgccactgtg

SEQ ID NO: 3477 - DNA, 22 bp, synthetic construct
  misc_feature 1..22: note = chemically synthesized
  source 1..22: mol_type = other DNA
gtggagcagggcgccactgtga

SEQ ID NO: 3478 - DNA, 22 bp, synthetic construct
  misc_feature 1..22: note = chemically synthesized
  source 1..22: mol_type = other DNA
tgaaccaggcagacaacgaggg

SEQ ID NO: 3479 - DNA, 22 bp, synthetic construct
  misc_feature 1..22: note = chemically synthesized
  source 1..22: mol_type = other DNA
gacgccactgcacgtggccgcc

SEQ ID NO: 3480 - DNA, 22 bp, synthetic construct
  misc_feature 1..22: note = chemically synthesized
  source 1..22: mol_type = other DNA
cacgtggccgcctcctgtggct

SEQ ID NO: 3481 - DNA, 22 bp, synthetic construct
  misc_feature 1..22: note = chemically synthesized
  source 1..22: mol_type = other DNA
ctgtggctacctagatatcgcc

SEQ ID NO: 3482 - DNA, 20 bp, synthetic construct
  misc_feature 1..20: note = chemically synthesized
  source 1..20: mol_type = other DNA
taatttccctccgtttgtcc

SEQ ID NO: 3483 - DNA, 20 bp, synthetic construct
  misc_feature 1..20: note = chemically synthesized
  source 1..20: mol_type = other DNA
ctgtcaaccccacacgcctt

SEQ ID NO: 3484 - DNA, 20 bp, synthetic construct
  misc_feature 1..20: note = chemically synthesized
  source 1..20: mol_type = other DNA
cacacgcctttggcacaatg

SEQ ID NO: 3485 - DNA, 20 bp, synthetic construct
  misc_feature 1..20: note = chemically synthesized
  source 1..20: mol_type = other DNA
acgcctttggcacaatgaag

SEQ ID NO: 3486 - DNA, 20 bp, synthetic construct
  misc_feature 1..20: note = chemically synthesized
  source 1..20: mol_type = other DNA
cgcctttggcacaatgaagt

SEQ ID NO: 3487 - DNA, 20 bp, synthetic construct
  misc_feature 1..20: note = chemically synthesized
  source 1..20: mol_type = other DNA
atttcccttctttttctctt

SEQ ID NO: 3488 - DNA, 20 bp, synthetic construct
  misc_feature 1..20: note = chemically synthesized
  source 1..20: mol_type = other DNA
ccttctttttctctttagct

SEQ ID NO: 3489 - DNA, 20 bp, synthetic construct
  misc_feature 1..20: note = chemically synthesized
  source 1..20: mol_type = other DNA
ctctttagctcggcttattc

SEQ ID NO: 3490 - DNA, 20 bp, synthetic construct
  misc_feature 1..20: note = chemically synthesized
  source 1..20: mol_type = other DNA
tctttagctcggcttattcc

SEQ ID NO: 3491 - DNA, 20 bp, synthetic construct
  misc_feature 1..20: note = chemically synthesized
  source 1..20: mol_type = other DNA
ctttagctcggcttattcca

SEQ ID NO: 3492 - DNA, 20 bp, synthetic construct
  misc_feature 1..20: note = chemically synthesized
  source 1..20: mol_type = other DNA
tttagctcggcttattccag

SEQ ID NO: 3493 - DNA, 20 bp, synthetic construct
  misc_feature 1..20: note = chemically synthesized
  source 1..20: mol_type = other DNA
ttccaggggtgtgtttcgtc

SEQ ID NO: 3494 - DNA, 20 bp, synthetic construct
  misc_feature 1..20: note = chemically synthesized
  source 1..20: mol_type = other DNA
tgtttcgtcgagatgcacgt

SEQ ID NO: 3495 - DNA, 20 bp, synthetic construct
  misc_feature 1..20: note = chemically synthesized
  source 1..20: mol_type = other DNA
caacttttattctattttcc

SEQ ID NO: 3496 - DNA, 20 bp, synthetic construct
  misc_feature 1..20: note = chemically synthesized
  source 1..20: mol_type = other DNA
tctattttcccagtaaaata

SEQ ID NO: 3497 - DNA, 20 bp, synthetic construct
  misc_feature 1..20: note = chemically synthesized
  source 1..20: mol_type = other DNA
ttcccagtaaaataaagttt

SEQ ID NO: 3498 - DNA, 20 bp, synthetic construct
  misc_feature 1..20: note = chemically synthesized
  source 1..20: mol_type = other DNA
tagtaaactctgcatcttta

SEQ ID NO: 3499 - DNA, 20 bp, synthetic construct
  misc_feature 1..20: note = chemically synthesized
  source 1..20: mol_type = other DNA
gcatctttaaagaattattt

SEQ ID NO: 3500 - DNA, 20 bp, synthetic construct
  misc_feature 1..20: note = chemically synthesized
  source 1..20: mol_type = other DNA
tttggcatttatttctaaaa

SEQ ID NO: 3501 - DNA, 20 bp, synthetic construct
  misc_feature 1..20: note = chemically synthesized
  source 1..20: mol_type = other DNA
catttatttctaaaatggca

SEQ ID NO: 3502 - DNA, 20 bp, synthetic construct
  misc_feature 1..20: note = chemically synthesized
  source 1..20: mol_type = other DNA
catagtattttgtatttgtg

SEQ ID NO: 3503 - DNA, 20 bp, synthetic construct
  misc_feature 1..20: note = chemically synthesized
  source 1..20: mol_type = other DNA
ttgtatttgtgaagtcttac

SEQ ID NO: 3504 - DNA, 20 bp, synthetic construct
  misc_feature 1..20: note = chemically synthesized
  source 1..20: mol_type = other DNA
tgtatttgtgaagtcttaca

SEQ ID NO: 3505 - DNA, 20 bp, synthetic construct
  misc_feature 1..20: note = chemically synthesized
  source 1..20: mol_type = other DNA
ttaataaaattcaaacatcc

SEQ ID NO: 3506 - DNA, 20 bp, synthetic construct
  misc_feature 1..20: note = chemically synthesized
  source 1..20: mol_type = other DNA
taataaaattcaaacatcct

SEQ ID NO: 3507 - DNA, 20 bp, synthetic construct
  misc_feature 1..20: note = chemically synthesized
  source 1..20: mol_type = other DNA
atcctaggtaaaaaaaaaaa

SEQ ID NO: 3508 - DNA, 20 bp, synthetic construct
  misc_feature 1..20: note = chemically synthesized
  source 1..20: mol_type = other DNA
tcctaggtaaaaaaaaaaaa

SEQ ID NO: 3509 - DNA, 20 bp, synthetic construct
  misc_feature 1..20: note = chemically synthesized
  source 1..20: mol_type = other DNA
aggtaaaaaaaaaaaaaggt

SEQ ID NO: 3510 - DNA, 20 bp, synthetic construct
  misc_feature 1..20: note = chemically synthesized
  source 1..20: mol_type = other DNA
aaaaaaaggtcagaattgtt

SEQ ID NO: 3511 - DNA, 20 bp, synthetic construct
  misc_feature 1..20: note = chemically synthesized
  source 1..20: mol_type = other DNA
gtaattttcttttgcgcact

SEQ ID NO: 3512 - DNA, 20 bp, synthetic construct
  misc_feature 1..20: note = chemically synthesized
  source 1..20: mol_type = other DNA
taattttcttttgcgcacta

SEQ ID NO: 3513 - DNA, 20 bp, synthetic construct
  misc_feature 1..20: note = chemically synthesized
  source 1..20: mol_type = other DNA
tttcttttgcgcactaagga

SEQ ID NO: 3514 - DNA, 20 bp, synthetic construct
  misc_feature 1..20: note = chemically synthesized
  source 1..20: mol_type = other DNA
tgcgcactaaggaaagtgca

SEQ ID NO: 3515 - DNA, 20 bp, synthetic construct
  misc_feature 1..20: note = chemically synthesized
  source 1..20: mol_type = other DNA
aaggaaagtgcaaagtaact

SEQ ID NO: 3516 - DNA, 20 bp, synthetic construct
  misc_feature 1..20: note = chemically synthesized
  source 1..20: mol_type = other DNA
ggaaagtgcaaagtaactta

SEQ ID NO: 3517 - DNA, 20 bp, synthetic construct
  misc_feature 1..20: note = chemically synthesized
  source 1..20: mol_type = other DNA
ttagagtgactgaaacttca

SEQ ID NO: 3518 - DNA, 20 bp, synthetic construct
  misc_feature 1..20: note = chemically synthesized
  source 1..20: mol_type = other DNA
gtgactgaaacttcacagaa

SEQ ID NO: 3519 - DNA, 20 bp, synthetic construct
  misc_feature 1..20: note = chemically synthesized
  source 1..20: mol_type = other DNA
tgactgaaacttcacagaat

SEQ ID NO: 3520 - DNA, 20 bp, synthetic construct
  misc_feature 1..20: note = chemically synthesized
  source 1..20: mol_type = other DNA
gactgaaacttcacagaata

SEQ ID NO: 3521 - DNA, 20 bp, synthetic construct
  misc_feature 1..20: note = chemically synthesized
  source 1..20: mol_type = other DNA
aacttcacagaatagggttg

SEQ ID NO: 3522 - DNA, 20 bp, synthetic construct
  misc_feature 1..20: note = chemically synthesized
  source 1..20: mol_type = other DNA
ttgaattcataactatccca

SEQ ID NO: 3523 - DNA, 20 bp, synthetic construct
  misc_feature 1..20: note = chemically synthesized
  source 1..20: mol_type = other DNA
tgtgctgttgatctcataaa

SEQ ID NO: 3524 - DNA, 20 bp, synthetic construct
  misc_feature 1..20: note = chemically synthesized
  source 1..20: mol_type = other DNA
atttatatttattttcattt

SEQ ID NO: 3525 - DNA, 20 bp, synthetic construct
  misc_feature 1..20: note = chemically synthesized
  source 1..20: mol_type = other DNA
ttcattttagtctgtcttct

SEQ ID NO: 3526 - DNA, 20 bp, synthetic construct
  misc_feature 1..20: note = chemically synthesized
  source 1..20: mol_type = other DNA
gtcttcttggttgctgttga

SEQ ID NO: 3527 - DNA, 20 bp, synthetic construct
  misc_feature 1..20: note = chemically synthesized
  source 1..20: mol_type = other DNA
ttgctgttgatagacactaa

SEQ ID NO: 3528 - DNA, 20 bp, synthetic construct
  misc_feature 1..20: note = chemically synthesized
  source 1..20: mol_type = other DNA
gctgttgatagacactaaaa

SEQ ID NO: 3529 - DNA, 20 bp, synthetic construct
  misc_feature 1..20: note = chemically synthesized
  source 1..20: mol_type = other DNA
gatagacactaaaagagtat

SEQ ID NO: 3530 - DNA, 20 bp, synthetic construct
  misc_feature 1..20: note = chemically synthesized
  source 1..20: mol_type = other DNA
aagagtattagatattatct

SEQ ID NO: 3531 - DNA, 20 bp, synthetic construct
  misc_feature 1..20: note = chemically synthesized
  source 1..20: mol_type = other DNA
tattatctaagtttgaatat

SEQ ID NO: 3532 - DNA, 20 bp, synthetic construct
  misc_feature 1..20: note = chemically synthesized
  source 1..20: mol_type = other DNA
attatctaagtttgaatata

SEQ ID NO: 3533 - DNA, 20 bp, synthetic construct
  misc_feature 1..20: note = chemically synthesized
  source 1..20: mol_type = other DNA
atatttaataatttttaaaa

SEQ ID NO: 3534 - DNA, 20 bp, synthetic construct
  misc_feature 1..20: note = chemically synthesized
  source 1..20: mol_type = other DNA
aatttttaaaatagtattct

SEQ ID NO: 3535 - DNA, 20 bp, synthetic construct
  misc_feature 1..20: note = chemically synthesized
  source 1..20: mol_type = other DNA
ttgaattattcttctgttta

SEQ ID NO: 3536 - DNA, 20 bp, synthetic construct
  misc_feature 1..20: note = chemically synthesized
  source 1..20: mol_type = other DNA
tgaattattcttctgtttaa

SEQ ID NO: 3537 - DNA, 20 bp, synthetic construct
  misc_feature 1..20: note = chemically synthesized
  source 1..20: mol_type = other DNA
attattcttctgtttaaagg

SEQ ID NO: 3538 - DNA, 20 bp, synthetic construct
  misc_feature 1..20: note = chemically synthesized
  source 1..20: mol_type = other DNA
attcttctgtttaaaggcag

SEQ ID NO: 3539 - DNA, 20 bp, synthetic construct
  misc_feature 1..20: note = chemically synthesized
  source 1..20: mol_type = other DNA
aaataattgaacatcatcct

SEQ ID NO: 3540 - DNA, 20 bp, synthetic construct
  misc_feature 1..20: note = chemically synthesized
  source 1..20: mol_type = other DNA
catcatcctgagtttttctg

SEQ ID NO: 3541 - DNA, 20 bp, synthetic construct
  misc_feature 1..20: note = chemically synthesized
  source 1..20: mol_type = other DNA
atcatcctgagtttttctgt

SEQ ID NO: 3542 - DNA, 20 bp, synthetic construct
  misc_feature 1..20: note = chemically synthesized
  source 1..20: mol_type = other DNA
ctgagtttttctgtaggaat

SEQ ID NO: 3543 - DNA, 20 bp, synthetic construct
  misc_feature 1..20: note = chemically synthesized
  source 1..20: mol_type = other DNA
gagtttttctgtaggaatca

SEQ ID NO: 3544 - DNA, 20 bp, synthetic construct
  misc_feature 1..20: note = chemically synthesized
  source 1..20: mol_type = other DNA
ttgaaacaaatgcataatct

SEQ ID NO: 3545 - DNA, 20 bp, synthetic construct
  misc_feature 1..20: note = chemically synthesized
  source 1..20: mol_type = other DNA
aatgcataatctaagtcaaa

SEQ ID NO: 3546 - DNA, 20 bp, synthetic construct
  misc_feature 1..20: note = chemically synthesized
  source 1..20: mol_type = other DNA
cataatctaagtcaaatgga

SEQ ID NO: 3547 - DNA, 20 bp, synthetic construct
  misc_feature 1..20: note = chemically synthesized
  source 1..20: mol_type = other DNA
caaatggaaagaaatataaa

SEQ ID NO: 3548 - DNA, 20 bp, synthetic construct
  misc_feature 1..20: note = chemically synthesized
  source 1..20: mol_type = other DNA
ttattacttcttgttttctt

SEQ ID NO: 3549 - DNA, 20 bp, synthetic construct
  misc_feature 1..20: note = chemically synthesized
  source 1..20: mol_type = other DNA
cttttttttcttcccttgcc

SEQ ID NO: 3550 - DNA, 20 bp, synthetic construct
  misc_feature 1..20: note = chemically synthesized
  source 1..20: mol_type = other DNA
ttttcttcccttgcccagac

SEQ ID NO: 3551 - DNA, 20 bp, synthetic construct
  misc_feature 1..20: note = chemically synthesized
  source 1..20: mol_type = other DNA
ttcttcccttgcccagacaa

SEQ ID NO: 3552 - DNA, 20 bp, synthetic construct
  misc_feature 1..20: note = chemically synthesized
  source 1..20: mol_type = other DNA
tcccttgcccagacaagagt

SEQ ID NO: 3553 - DNA, 20 bp, synthetic construct
  misc_feature 1..20: note = chemically synthesized
  source 1..20: mol_type = other DNA
cccttgcccagacaagagtg

SEQ ID NO: 3554 - DNA, 20 bp, synthetic construct
  misc_feature 1..20: note = chemically synthesized
  source 1..20: mol_type = other DNA
acaagagtgaggttgctcat

SEQ ID NO: 3555 - DNA, 20 bp, synthetic construct
  misc_feature 1..20: note = chemically synthesized
  source 1..20: mol_type = other DNA
tgaggttgctcatcggttta

SEQ ID NO: 3556 - DNA, 20 bp, synthetic construct
  misc_feature 1..20: note = chemically synthesized
  source 1..20: mol_type = other DNA
tgctcatcggtttaaagatt

SEQ ID NO: 3557 - DNA, 20 bp, synthetic construct
  misc_feature 1..20: note = chemically synthesized
  source 1..20: mol_type = other DNA
gctcatcggtttaaagattt

SEQ ID NO: 3558 - DNA, 20 bp, synthetic construct
  misc_feature 1..20: note = chemically synthesized
  source 1..20: mol_type = other DNA
tcatcggtttaaagatttgg

SEQ ID NO: 3559 - DNA, 20 bp, synthetic construct
  misc_feature 1..20: note = chemically synthesized
  source 1..20: mol_type = other DNA
tcggtttaaagatttgggag

SEQ ID NO: 3560 - DNA, 20 bp, synthetic construct
  misc_feature 1..20: note = chemically synthesized
  source 1..20: mol_type = other DNA
tttgggagaagaaaatttca

SEQ ID NO: 3561 - DNA, 20 bp, synthetic construct
  misc_feature 1..20: note = chemically synthesized
  source 1..20: mol_type = other DNA
tcccaaatctttaaaccgat

SEQ ID NO: 3562 - DNA, 20 bp, synthetic construct
  misc_feature 1..20: note = chemically synthesized
  source 1..20: mol_type = other DNA
tgagcaacctcactcttgtc

SEQ ID NO: 3563 - DNA, 20 bp, synthetic construct
  misc_feature 1..20: note = chemically synthesized
  source 1..20: mol_type = other DNA
gagcaacctcactcttgtct

SEQ ID NO: 3564 - DNA, 20 bp, synthetic construct
  misc_feature 1..20: note = chemically synthesized
  source 1..20: mol_type = other DNA
aacctcactcttgtctgggc

SEQ ID NO: 3565 - DNA, 20 bp, synthetic construct
  misc_feature 1..20: note = chemically synthesized
  source 1..20: mol_type = other DNA
acctcactcttgtctgggca

SEQ ID NO: 3566 - DNA, 20 bp, synthetic construct
  misc_feature 1..20: note = chemically synthesized
  source 1..20: mol_type = other DNA
cctcactcttgtctgggcaa

SEQ ID NO: 3567 - DNA, 20 bp, synthetic construct
  misc_feature 1..20: note = chemically synthesized
  source 1..20: mol_type = other DNA
cactcttgtctgggcaaggg

SEQ ID NO: 3568 - DNA, 20 bp, synthetic construct
  misc_feature 1..20: note = chemically synthesized
  source 1..20: mol_type = other DNA
ctgggcaagggaagaaaaaa

SEQ ID NO: 3569 - DNA, 20 bp, synthetic construct
  misc_feature 1..20: note = chemically synthesized
  source 1..20: mol_type = other DNA
tgggcaagggaagaaaaaaa

SEQ ID NO: 3570 - DNA, 20 bp, synthetic construct
  misc_feature 1..20: note = chemically synthesized
  source 1..20: mol_type = other DNA
aaaaggattgttaaatactg

SEQ ID NO: 3571 - DNA, 20 bp, synthetic construct
  misc_feature 1..20: note = chemically synthesized
  source 1..20: mol_type = other DNA
tgttaaatactgaagaaaac

SEQ ID NO: 3572 - DNA, 20 bp, synthetic construct
  misc_feature 1..20: note = chemically synthesized
  source 1..20: mol_type = other DNA
taaatactgaagaaaacaag

SEQ ID NO: 3573 - DNA, 20 bp, synthetic construct
  misc_feature 1..20: note = chemically synthesized
  source 1..20: mol_type = other DNA
atatttctttccatttgact

SEQ ID NO: 3574 - DNA, 20 bp, synthetic construct
  misc_feature 1..20: note = chemically synthesized
  source 1..20: mol_type = other DNA
atgcatttgtttcaaaatat

SEQ ID NO: 3575 - DNA, 20 bp, synthetic construct
  misc_feature 1..20: note = chemically synthesized
  source 1..20: mol_type = other DNA
tgcatttgtttcaaaatatt

SEQ ID NO: 3576 - DNA, 20 bp, synthetic construct
  misc_feature 1..20: note = chemically synthesized
  source 1..20: mol_type = other DNA
atattgggctctgattccta

SEQ ID NO: 3577 - DNA, 20 bp, synthetic construct
  misc_feature 1..20: note = chemically synthesized
  source 1..20: mol_type = other DNA
ctgattcctacagaaaaact

SEQ ID NO: 3578 - DNA, 20 bp, synthetic construct
  misc_feature 1..20: note = chemically synthesized
  source 1..20: mol_type = other DNA
tgattcctacagaaaaactc

SEQ ID NO: 3579 - DNA, 20 bp, synthetic construct
  misc_feature 1..20: note = chemically synthesized
  source 1..20: mol_type = other DNA
ttatttcttctgcctttaaa

SEQ ID NO: 3580 - DNA, 20 bp, synthetic construct
  misc_feature 1..20: note = chemically synthesized
  source 1..20: mol_type = other DNA
tttcttctgcctttaaacag

SEQ ID NO: 3581 - DNA, 20 bp, synthetic construct
  misc_feature 1..20: note = chemically synthesized
  source 1..20: mol_type = other DNA
agaagaataattcaattacc

SEQ ID NO: 3582 - DNA, 20 bp, synthetic construct
  misc_feature 1..20: note = chemically synthesized
  source 1..20: mol_type = other DNA
taaaaattattaaatattta

SEQ ID NO: 3583 - DNA, 20 bp, synthetic construct
  misc_feature 1..20: note = chemically synthesized
  source 1..20: mol_type = other DNA
tatagccttatattcaaact

SEQ ID NO: 3584 - DNA, 20 bp, synthetic construct
  misc_feature 1..20: note = chemically synthesized
  source 1..20: mol_type = other DNA
gataatatctaatactcttt

SEQ ID NO: 3585 - DNA, 20 bp, synthetic construct
  misc_feature 1..20: note = chemically synthesized
  source 1..20: mol_type = other DNA
actcttttagtgtctatcaa

SEQ ID NO: 3586 - DNA, 20 bp, synthetic construct
  misc_feature 1..20: note = chemically synthesized
  source 1..20: mol_type = other DNA
agtgtctatcaacagcaacc

SEQ ID NO: 3587 - DNA, 20 bp, synthetic construct
  misc_feature 1..20: note = chemically synthesized
  source 1..20: mol_type = other DNA
gtctatcaacagcaaccaag

SEQ ID NO: 3588 - DNA, 20 bp, synthetic construct
  misc_feature 1..20: note = chemically synthesized
  source 1..20: mol_type = other DNA
atcaacagcaaccaagaaga

SEQ ID NO: 3589 - DNA, 20 bp, synthetic construct
  misc_feature 1..20: note = chemically synthesized
  source 1..20: mol_type = other DNA
atgaaaataaatataaatac

SEQ ID NO: 3590 - DNA, 20 bp, synthetic construct
  misc_feature 1..20: note = chemically synthesized
  source 1..20: mol_type = other DNA
taaatacaagttctatttat

SEQ ID NO: 3591 - DNA, 20 bp, synthetic construct
  misc_feature 1..20: note = chemically synthesized
  source 1..20: mol_type = other DNA
agttctatttatgagatcaa

SEQ ID NO: 3592 - DNA, 20 bp, synthetic construct
  misc_feature 1..20: note = chemically synthesized
  source 1..20: mol_type = other DNA
tatttatgagatcaacagca

SEQ ID NO: 3593 - DNA, 20 bp, synthetic construct
  misc_feature 1..20: note = chemically synthesized
  source 1..20: mol_type = other DNA
atttatgagatcaacagcac

SEQ ID NO: 3594 - DNA, 20 bp, synthetic construct
  misc_feature 1..20: note = chemically synthesized
  source 1..20: mol_type = other DNA
gatcaacagcacaggttttg

SEQ ID NO: 3595 - DNA, 20 bp, synthetic construct
  misc_feature 1..20: note = chemically synthesized
  source 1..20: mol_type = other DNA
ggttttgtggtttttaaata

SEQ ID NO: 3596 - DNA, 20 bp, synthetic construct
  misc_feature 1..20: note = chemically synthesized
  source 1..20: mol_type = other DNA
tgtggtttttaaataaagca

SEQ ID NO: 3597 - DNA, 20 bp, synthetic construct
  misc_feature 1..20: note = chemically synthesized
  source 1..20: mol_type = other DNA
ttaaataaagcatagtgcaa

SEQ ID NO: 3598 - DNA, 20 bp, synthetic construct
  misc_feature 1..20: note = chemically synthesized
  source 1..20: mol_type = other DNA
ataaagcatagtgcaatgga

SEQ ID NO: 3599 - DNA, 20 bp, synthetic construct
  misc_feature 1..20: note = chemically synthesized
  source 1..20: mol_type = other DNA
taaagcatagtgcaatggat

SEQ ID NO: 3600 - DNA, 20 bp, synthetic construct
  misc_feature 1..20: note = chemically synthesized
  source 1..20: mol_type = other DNA
tagtgcaatggataggtctt

SEQ ID NO: 3601 - DNA, 20 bp, synthetic construct
  misc_feature 1..20: note = chemically synthesized
  source 1..20: mol_type = other DNA
agtgcaatggataggtcttt

SEQ ID NO: 3602 - DNA, 20 bp, synthetic construct
  misc_feature 1..20: note = chemically synthesized
  source 1..20: mol_type = other DNA
caatggataggtctttggga

SEQ ID NO: 3603 - DNA, 20 bp, synthetic construct
  misc_feature 1..20: note = chemically synthesized
  source 1..20: mol_type = other DNA
atcttcaaccctattctgtg

SEQ ID NO: 3604 - DNA, 20 bp, synthetic construct
  misc_feature 1..20: note = chemically synthesized
  source 1..20: mol_type = other DNA
aaccctattctgtgaagttt

SEQ ID NO: 3605 - DNA, 20 bp, synthetic construct
  misc_feature 1..20: note = chemically synthesized
  source 1..20: mol_type = other DNA
tgtgaagtttcagtcactct

SEQ ID NO: 3606 - DNA, 20 bp, synthetic construct
  misc_feature 1..20: note = chemically synthesized
  source 1..20: mol_type = other DNA
aagttactttgcactttcct

SEQ ID NO: 3607 - DNA, 20 bp, synthetic construct
  misc_feature 1..20: note = chemically synthesized
  source 1..20: mol_type = other DNA
gcactttccttagtgcgcaa

SEQ ID NO: 3608 - DNA, 20 bp, synthetic construct
  misc_feature 1..20: note = chemically synthesized
  source 1..20: mol_type = other DNA
tagtgcgcaaaagaaaatta

SEQ ID NO: 3609 - DNA, 20 bp, synthetic construct
  misc_feature 1..20: note = chemically synthesized
  source 1..20: mol_type = other DNA
gacctttttttttttttacc

SEQ ID NO: 3610 - DNA, 20 bp, synthetic construct
  misc_feature 1..20: note = chemically synthesized
  source 1..20: mol_type = other DNA
acctttttttttttttacct

SEQ ID NO: 3611 - DNA, 20 bp, synthetic construct
  misc_feature 1..20: note = chemically synthesized
  source 1..20: mol_type = other DNA
gatgtttgaattttattaat

SEQ ID NO: 3612 - DNA, 20 bp, synthetic construct
  misc_feature 1..20: note = chemically synthesized
  source 1..20: mol_type = other DNA
tattaataagataaccttgt

SEQ ID NO: 3613 - DNA, 20 bp, synthetic construct
  misc_feature 1..20: note = chemically synthesized
  source 1..20: mol_type = other DNA
tacaaaatactatgccattt

SEQ ID NO: 3614 - DNA, 20 bp, synthetic construct
  misc_feature 1..20: note = chemically synthesized
  source 1..20: mol_type = other DNA
aatgccaaaataattcttta

SEQ ID NO: 3615 - DNA, 20 bp, synthetic construct
  misc_feature 1..20: note = chemically synthesized
  source 1..20: mol_type = other DNA
aaaataattctttaaagatg

SEQ ID NO: 3616 - DNA, 20 bp, synthetic construct
  misc_feature 1..20: note = chemically synthesized
  source 1..20: mol_type = other DNA
aataattctttaaagatgca

SEQ ID NO: 3617 - DNA, 20 bp, synthetic construct
  misc_feature 1..20: note = chemically synthesized
  source 1..20: mol_type = other DNA
ttactaaaactttattttac

SEQ ID NO: 3618 - DNA, 20 bp, synthetic construct
  misc_feature 1..20: note = chemically synthesized
  source 1..20: mol_type = other DNA
tactaaaactttattttact

SEQ ID NO: 3619 - DNA, 20 bp, synthetic construct
  misc_feature 1..20: note = chemically synthesized
  source 1..20: mol_type = other DNA
actttattttactgggaaaa

SEQ ID NO: 3620 - DNA, 20 bp, synthetic construct
  misc_feature 1..20: note = chemically synthesized
  source 1..20: mol_type = other DNA
ttactgggaaaatagaataa

SEQ ID NO: 3621 - DNA, 20 bp, synthetic construct
  misc_feature 1..20: note = chemically synthesized
  source 1..20: mol_type = other DNA
atagaataaaagttgaacaa

SEQ ID NO: 3622 - DNA, 20 bp, synthetic construct
  misc_feature 1..20: note = chemically synthesized
  source 1..20: mol_type = other DNA
aaagttgaacaatagaaaaa

SEQ ID NO: 3623 - DNA, 20 bp, synthetic construct
  misc_feature 1..20: note = chemically synthesized
  source 1..20: mol_type = other DNA
atctcgacgaaacacacccc

SEQ ID NO: 3624 - DNA, 20 bp, synthetic construct
  misc_feature 1..20: note = chemically synthesized
  source 1..20: mol_type = other DNA
acgaaacacacccctggaat

SEQ ID NO: 3625 - DNA, 20 bp, synthetic construct
  misc_feature 1..20: note = chemically synthesized
  source 1..20: mol_type = other DNA
acacacccctggaataagcc

SEQ ID NO: 3626 - DNA, 20 bp, synthetic construct
  misc_feature 1..20: note = chemically synthesized
  source 1..20: mol_type = other DNA
ccctggaataagccgagcta

SEQ ID NO: 3627 - DNA, 20 bp, synthetic construct
  misc_feature 1..20: note = chemically synthesized
  source 1..20: mol_type = other DNA
ctggaataagccgagctaaa

SEQ ID NO: 3628 - DNA, 20 bp, synthetic construct
  misc_feature 1..20: note = chemically synthesized
  source 1..20: mol_type = other DNA
taagccgagctaaagagaaa

SEQ ID NO: 3629 - DNA, 20 bp, synthetic construct
  misc_feature 1..20: note = chemically synthesized
  source 1..20: mol_type = other DNA
gccgagctaaagagaaaaag

SEQ ID NO: 3630 - DNA, 20 bp, synthetic construct
  misc_feature 1..20: note = chemically synthesized
  source 1..20: mol_type = other DNA
ccgagctaaagagaaaaaga

SEQ ID NO: 3631 - DNA, 20 bp, synthetic construct
  misc_feature 1..20: note = chemically synthesized
  source 1..20: mol_type = other DNA
cgagctaaagagaaaaagaa

SEQ ID NO: 3632 - DNA, 20 bp, synthetic construct
  misc_feature 1..20: note = chemically synthesized
  source 1..20: mol_type = other DNA
agagaaaaagaagggaaata

SEQ ID NO: 3633 - DNA, 20 bp, synthetic construct
  misc_feature 1..20: note = chemically synthesized
  source 1..20: mol_type = other DNA
gagaaaaagaagggaaataa

SEQ ID NO: 3634 - DNA, 20 bp, synthetic construct
  misc_feature 1..20: note = chemically synthesized
  source 1..20: mol_type = other DNA
ttacccacttcattgtgcca

SEQ ID NO: 3635 - DNA, 20 bp, synthetic construct
  misc_feature 1..20: note = chemically synthesized
  source 1..20: mol_type = other DNA
tacccacttcattgtgccaa

SEQ ID NO: 3636 - DNA, 20 bp, synthetic construct
  misc_feature 1..20: note = chemically synthesized
  source 1..20: mol_type = other DNA
ttcattgtgccaaaggcgtg

SEQ ID NO: 3637 - DNA, 20 bp, synthetic construct
  misc_feature 1..20: note = chemically synthesized
  source 1..20: mol_type = other DNA
tcattgtgccaaaggcgtgt

SEQ ID NO: 3638 - DNA, 20 bp, synthetic construct
  misc_feature 1..20: note = chemically synthesized
  source 1..20: mol_type = other DNA
cattgtgccaaaggcgtgtg

SEQ ID NO: 3639 - DNA, 20 bp, synthetic construct
  misc_feature 1..20: note = chemically synthesized
  source 1..20: mol_type = other DNA
ccaaaggcgtgtggggttga

SEQ ID NO: 3640 - DNA, 20 bp, synthetic construct
  misc_feature 1..20: note = chemically synthesized
  source 1..20: mol_type = other DNA
aaggcgtgtggggttgacag

SEQ ID NO: 3641 - DNA, 20 bp, synthetic construct
  misc_feature 1..20: note = chemically synthesized
  source 1..20: mol_type = other DNA
ggcgtgtggggttgacagaa

SEQ ID NO: 3642 - DNA, 20 bp, synthetic construct
  misc_feature 1..20: note = chemically synthesized
  source 1..20: mol_type = other DNA
gtggggttgacagaagagaa

SEQ ID NO: 3643 - DNA, 20 bp, synthetic construct
  misc_feature 1..20: note = chemically synthesized
  source 1..20: mol_type = other DNA
ggttgacagaagagaaaagc

SEQ ID NO: 3644 - DNA, 20 bp, synthetic construct
  misc_feature 1..20: note = chemically synthesized
  source 1..20: mol_type = other DNA
gttgacagaagagaaaagct

SEQ ID NO: 3645 - DNA, 20 bp, synthetic construct
  misc_feature 1..20: note = chemically synthesized
  source 1..20: mol_type = other DNA
aagagaaaagctaggacaaa

SEQ ID NO: 3646 - DNA, 20 bp, synthetic construct
  misc_feature 1..20: note = chemically synthesized
  source 1..20: mol_type = other DNA
gagaaaagctaggacaaacg

SEQ ID NO: 3647 - DNA, 20 bp, synthetic construct
  misc_feature 1..20: note = chemically synthesized
  source 1..20: mol_type = other DNA
agaaaagctaggacaaacgg

SEQ ID NO: 3648 - DNA, 20 bp, synthetic construct
  misc_feature 1..20: note = chemically synthesized
  source 1..20: mol_type = other DNA
gaaaagctaggacaaacgga

SEQ ID NO: 3649 - DNA, 20 bp, synthetic construct
  misc_feature 1..20: note = chemically synthesized
  source 1..20: mol_type = other DNA
taggacaaacggagggaaat

SEQ ID NO: 3650 - DNA, 20 bp, synthetic construct
  misc_feature 1..20: note = chemically synthesized
  source 1..20: mol_type = other DNA
cacgcctttggcacaatgaa

SEQ ID NO: 3651 - DNA, 20 bp, synthetic construct
  misc_feature 1..20: note = chemically synthesized
  source 1..20: mol_type = other DNA
tctttagctcggcttattcc

SEQ ID NO: 3652 - DNA, 20 bp, synthetic construct
  misc_feature 1..20: note = chemically synthesized
  source 1..20: mol_type = other DNA
tagtaaactctgcatcttta

SEQ ID NO: 3653 - DNA, 20 bp, synthetic construct
  misc_feature 1..20: note = chemically synthesized
  source 1..20: mol_type = other DNA
aggtaaaaaaaaaaaaaggt

SEQ ID NO: 3654 - DNA, 20 bp, synthetic construct
  misc_feature 1..20: note = chemically synthesized
  source 1..20: mol_type = other DNA
aaggaaagtgcaaagtaact

SEQ ID NO: 3655 - DNA, 20 bp, synthetic construct
  misc_feature 1..20: note = chemically synthesized
  source 1..20: mol_type = other DNA
ttagagtgactgaaacttca

SEQ ID NO: 3656 - DNA, 20 bp, synthetic construct
  misc_feature 1..20: note = chemically synthesized
  source 1..20: mol_type = other DNA
gtgactgaaacttcacagaa

SEQ ID NO: 3657 - DNA, 20 bp, synthetic construct
  misc_feature 1..20: note = chemically synthesized
  source 1..20: mol_type = other DNA
tcacagaatagggttgaaga

SEQ ID NO: 3658 - DNA, 20 bp, synthetic construct
  misc_feature 1..20: note = chemically synthesized
  source 1..20: mol_type = other DNA
ttgctgttgatagacactaa

SEQ ID NO: 3659 - DNA, 20 bp, synthetic construct
  misc_feature 1..20: note = chemically synthesized
  source 1..20: mol_type = other DNA
gtattagatattatctaagt

SEQ ID NO: 3660 - DNA, 20 bp, synthetic construct
  misc_feature 1..20: note = chemically synthesized
  source 1..20: mol_type = other DNA
taaaatagtattcttggtaa

SEQ ID NO: 3661 - DNA, 20 bp, synthetic construct
  misc_feature 1..20: note = chemically synthesized
  source 1..20: mol_type = other DNA
agaaataattgaacatcatc

SEQ ID NO: 3662 - DNA, 20 bp, synthetic construct
  misc_feature 1..20: note = chemically synthesized
  source 1..20: mol_type = other DNA
atcatcctgagtttttctgt

SEQ ID NO: 3663 - DNA, 20 bp, synthetic construct
  misc_feature 1..20: note = chemically synthesized
  source 1..20: mol_type = other DNA
ttttcttcccttgcccagac

SEQ ID NO: 3664 - DNA, 20 bp, synthetic construct
  misc_feature 1..20: note = chemically synthesized
  source 1..20: mol_type = other DNA
ctgggcaagggaagaaaaaa

SEQ ID NO: 3665 - DNA, 20 bp, synthetic construct
  misc_feature 1..20: note = chemically synthesized
  source 1..20: mol_type = other DNA
ctgattcctacagaaaaact

SEQ ID NO: 3666 - DNA, 20 bp, synthetic construct
  misc_feature 1..20: note = chemically synthesized
  source 1..20: mol_type = other DNA
tttcttctgcctttaaacag

SEQ ID NO: 3667 - DNA, 20 bp, synthetic construct
  misc_feature 1..20: note = chemically synthesized
  source 1..20: mol_type = other DNA
agaagaataattcaattacc

SEQ ID NO: 3668 - DNA, 20 bp, synthetic construct
  misc_feature 1..20: note = chemically synthesized
  source 1..20: mol_type = other DNA
tttaaataaagcatagtgca

SEQ ID NO: 3669 - DNA, 20 bp, synthetic construct
  misc_feature 1..20: note = chemically synthesized
  source 1..20: mol_type = other DNA
tagtgcaatggataggtctt

SEQ ID NO: 3670 - DNA, 20 bp, synthetic construct
  misc_feature 1..20: note = chemically synthesized
  source 1..20: mol_type = other DNA
gataggtctttgggatagtt

SEQ ID NO: 3671 - DNA, 20 bp, synthetic construct
  misc_feature 1..20: note = chemically synthesized
  source 1..20: mol_type = other DNA
gacctttttttttttttacc

SEQ ID NO: 3672 - DNA, 20 bp, synthetic construct
  misc_feature 1..20: note = chemically synthesized
  source 1..20: mol_type = other DNA
tttttttttacctaggatgt

SEQ ID NO: 3673 - DNA, 20 bp, synthetic construct
  misc_feature 1..20: note = chemically synthesized
  source 1..20: mol_type = other DNA
aaaataattctttaaagatg

SEQ ID NO: 3674 - DNA, 20 bp, synthetic construct
  misc_feature 1..20: note = chemically synthesized
  source 1..20: mol_type = other DNA
actttattttactgggaaaa

SEQ ID NO: 3675 - DNA, 20 bp, synthetic construct
  misc_feature 1..20: note = chemically synthesized
  source 1..20: mol_type = other DNA
aaaagttgaacaatagaaaa

SEQ ID NO: 3676 - DNA, 20 bp, synthetic construct
  misc_feature 1..20: note = chemically synthesized
  source 1..20: mol_type = other DNA
atctcgacgaaacacacccc

SEQ ID NO: 3677 - DNA, 20 bp, synthetic construct
  misc_feature 1..20: note = chemically synthesized
  source 1..20: mol_type = other DNA
ttcattgtgccaaaggcgtg

SEQ ID NO: 3678 - DNA, 20 bp, synthetic construct
  misc_feature 1..20: note = chemically synthesized
  source 1..20: mol_type = other DNA
gtgtttcgtcgagatgcacg

SEQ ID NO: 3679 - DNA, 20 bp, synthetic construct
  misc_feature 1..20: note = chemically synthesized
  source 1..20: mol_type = other DNA
ttagtaaactctgcatcttt

SEQ ID NO: 3680 - DNA, 20 bp, synthetic construct
  misc_feature 1..20: note = chemically synthesized
  source 1..20: mol_type = other DNA
taggtaaaaaaaaaaaaagg

SEQ ID NO: 3681 - DNA, 20 bp, synthetic construct
  misc_feature 1..20: note = chemically synthesized
  source 1..20: mol_type = other DNA
cttagagtgactgaaacttc

SEQ ID NO: 3682 - DNA, 20 bp, synthetic construct
  misc_feature 1..20: note = chemically synthesized
  source 1..20: mol_type = other DNA
tattcttctgtttaaaggca

SEQ ID NO: 3683 - DNA, 20 bp, synthetic construct
  misc_feature 1..20: note = chemically synthesized
  source 1..20: mol_type = other DNA
gcataatctaagtcaaatgg

SEQ ID NO: 3684 - DNA, 20 bp, synthetic construct
  misc_feature 1..20: note = chemically synthesized
  source 1..20: mol_type = other DNA
atcggtttaaagatttggga

SEQ ID NO: 3685 - DNA, 20 bp, synthetic construct
  misc_feature 1..20: note = chemically synthesized
  source 1..20: mol_type = other DNA
tcactcttgtctgggcaagg

SEQ ID NO: 3686 - DNA, 20 bp, synthetic construct
  misc_feature 1..20: note = chemically synthesized
  source 1..20: mol_type = other DNA
aaaaaggattgttaaatact

SEQ ID NO: 3687 - DNA, 20 bp, synthetic construct
  misc_feature 1..20: note = chemically synthesized
  source 1..20: mol_type = other DNA
aatattgggctctgattcct

SEQ ID NO: 3688 - DNA, 20 bp, synthetic construct
  misc_feature 1..20: note = chemically synthesized
  source 1..20: mol_type = other DNA
atttcttctgcctttaaaca

SEQ ID NO: 3689 - DNA, 20 bp, synthetic construct
  misc_feature 1..20: note = chemically synthesized
  source 1..20: mol_type = other DNA
cagaagaataattcaattac

SEQ ID NO: 3690 - DNA, 20 bp, synthetic construct
  misc_feature 1..20: note = chemically synthesized
  source 1..20: mol_type = other DNA
tgcactttccttagtgcgca

SEQ ID NO: 3691 - DNA, 20 bp, synthetic construct
  misc_feature 1..20: note = chemically synthesized
  source 1..20: mol_type = other DNA
atacaaaatactatgccatt

SEQ ID NO: 3692 - DNA, 20 bp, synthetic construct
  misc_feature 1..20: note = chemically synthesized
  source 1..20: mol_type = other DNA
aactttattttactgggaaa

SEQ ID NO: 3693 - DNA, 20 bp, synthetic construct
  misc_feature 1..20: note = chemically synthesized
  source 1..20: mol_type = other DNA
aatagaataaaagttgaaca

SEQ ID NO: 3694 - DNA, 20 bp, synthetic construct
  misc_feature 1..20: note = chemically synthesized
  source 1..20: mol_type = other DNA
cctggaataagccgagctaa

SEQ ID NO: 3695 - DNA, 20 bp, synthetic construct
  misc_feature 1..20: note = chemically synthesized
  source 1..20: mol_type = other DNA
aggcgtgtggggttgacaga

SEQ ID NO: 3696 - DNA, 20 bp, synthetic construct
  misc_feature 1..20: note = chemically synthesized
  source 1..20: mol_type = other DNA
cattgcactatgctttattt

SEQ ID NO: 3697 - DNA, 20 bp, synthetic construct
  misc_feature 1..20: note = chemically synthesized
  source 1..20: mol_type = other DNA
tatgctttatttaaaaacca

SEQ ID NO: 3698 - DNA, 20 bp, synthetic construct
  misc_feature 1..20: note = chemically synthesized
  source 1..20: mol_type = other DNA
aaggattgttaaatactgaa

SEQ ID NO: 3699 - DNA, 20 bp, synthetic construct
  misc_feature 1..20: note = chemically synthesized
  source 1..20: mol_type = other DNA
ttgggctctgattcctacag

SEQ ID NO: 3700 - DNA, 20 bp, synthetic construct
  misc_feature 1..20: note = chemically synthesized
  source 1..20: mol_type = other DNA
tttaaagatgcagagtttac

SEQ ID NO: 3701 - DNA, 20 bp, synthetic construct
  misc_feature 1..20: note = chemically synthesized
  source 1..20: mol_type = other DNA
gtatattagtgctaatttcc

SEQ ID NO: 3702 - DNA, 20 bp, synthetic construct
  misc_feature 1..20: note = chemically synthesized
  source 1..20: mol_type = other DNA
gctaatttccctccgtttgt

SEQ ID NO: 3703 - DNA, 20 bp, synthetic construct
  misc_feature 1..20: note = chemically synthesized
  source 1..20: mol_type = other DNA
tcccttctttttctctttag

SEQ ID NO: 3704 - DNA, 20 bp, synthetic construct
  misc_feature 1..20: note = chemically synthesized
  source 1..20: mol_type = other DNA
tagctcggcttattccaggg

SEQ ID NO: 3705 - DNA, 20 bp, synthetic construct
  misc_feature 1..20: note = chemically synthesized
  source 1..20: mol_type = other DNA
attctattttcccagtaaaa

SEQ ID NO: 3706 - DNA, 20 bp, synthetic construct
  misc_feature 1..20: note = chemically synthesized
  source 1..20: mol_type = other DNA
taaaaaaaaaaaaaggtcag

SEQ ID NO: 3707 - DNA, 20 bp, synthetic construct
  misc_feature 1..20: note = chemically synthesized
  source 1..20: mol_type = other DNA
gaaacttcacagaatagggt

SEQ ID NO: 3708 - DNA, 20 bp, synthetic construct
  misc_feature 1..20: note = chemically synthesized
  source 1..20: mol_type = other DNA
ccaaagacctatccattgca

SEQ ID NO: 3709 - DNA, 20 bp, synthetic construct
  misc_feature 1..20: note = chemically synthesized
  source 1..20: mol_type = other DNA
aaaagagtattagatattat

SEQ ID NO: 3710 - DNA, 20 bp, synthetic construct
  misc_feature 1..20: note = chemically synthesized
  source 1..20: mol_type = other DNA
tcttggtaattgaattattc

SEQ ID NO: 3711 - DNA, 20 bp, synthetic construct
  misc_feature 1..20: note = chemically synthesized
  source 1..20: mol_type = other DNA
agaaataattgaacatcatc

SEQ ID NO: 3712 - DNA, 20 bp, synthetic construct
  misc_feature 1..20: note = chemically synthesized
  source 1..20: mol_type = other DNA
taaaaagtaacattattact

SEQ ID NO: 3713 - DNA, 20 bp, synthetic construct
  misc_feature 1..20: note = chemically synthesized
  source 1..20: mol_type = other DNA
agacaagagtgaggttgctc

SEQ ID NO: 3714 - DNA, 20 bp, synthetic construct
  misc_feature 1..20: note = chemically synthesized
  source 1..20: mol_type = other DNA
agtgaggttgctcatcggtt

SEQ ID NO: 3715 - DNA, 20 bp, synthetic construct
  misc_feature 1..20: note = chemically synthesized
  source 1..20: mol_type = other DNA
tctgggcaagggaagaaaaa

SEQ ID NO: 3716 - DNA, 20 bp, synthetic construct
  misc_feature 1..20: note = chemically synthesized
  source 1..20: mol_type = other DNA
ttatatttctttccatttga

SEQ ID NO: 3717 - DNA, 20 bp, synthetic construct
  misc_feature 1..20: note = chemically synthesized
  source 1..20: mol_type = other DNA
ccatttgacttagattatgc

SEQ ID NO: 3718 - DNA, 20 bp, synthetic construct
  misc_feature 1..20: note = chemically synthesized
  source 1..20: mol_type = other DNA
atttgtttcaaaatattggg

SEQ ID NO: 3719 - DNA, 20 bp, synthetic construct
  misc_feature 1..20: note = chemically synthesized
  source 1..20: mol_type = other DNA
ctatttatgagatcaacagc

SEQ ID NO: 3720 - DNA, 20 bp, synthetic construct
  misc_feature 1..20: note = chemically synthesized
  source 1..20: mol_type = other DNA
gagatcaacagcacaggttt

SEQ ID NO: 3721 - DNA, 20 bp, synthetic construct
  misc_feature 1..20: note = chemically synthesized
  source 1..20: mol_type = other DNA
caatcttcaaccctattctg

SEQ ID NO: 3722 - DNA, 20 bp, synthetic construct
  misc_feature 1..20: note = chemically synthesized
  source 1..20: mol_type = other DNA
cctttttttttttttaccta

SEQ ID NO: 3723 - DNA, 20 bp, synthetic construct
  misc_feature 1..20: note = chemically synthesized
  source 1..20: mol_type = other DNA
aaaataattctttaaagatg

SEQ ID NO: 3724 - DNA, 20 bp, synthetic construct
  misc_feature 1..20: note = chemically synthesized
  source 1..20: mol_type = other DNA
taaaagttgaacaatagaaa

SEQ ID NO: 3725 - DNA, 22 bp, synthetic construct
  misc_feature 1..22: note = chemically synthesized
  source 1..22: mol_type = other DNA
gtgctaatttccctccgtttgt

SEQ ID NO: 3726 - DNA, 22 bp, synthetic construct
  misc_feature 1..22: note = chemically synthesized
  source 1..22: mol_type = other DNA
atttccctccgtttgtcctagc

SEQ ID NO: 3727 - DNA, 22 bp, synthetic construct
  misc_feature 1..22: note = chemically synthesized
  source 1..22: mol_type = other DNA
ccctccgtttgtcctagctttt

SEQ ID NO: 3728 - DNA, 22 bp, synthetic construct
  misc_feature 1..22: note = chemically synthesized
  source 1..22: mol_type = other DNA
cctccgtttgtcctagcttttc

SEQ ID NO: 3729 - DNA, 22 bp, synthetic construct
  misc_feature 1..22: note = chemically synthesized
  source 1..22: mol_type = other DNA
cgtttgtcctagcttttctctt

SEQ ID NO: 3730 - DNA, 22 bp, synthetic construct
  misc_feature 1..22: note = chemically synthesized
  source 1..22: mol_type = other DNA
gtcctagcttttctcttctgtc

SEQ ID NO: 3731 - DNA, 22 bp, synthetic construct
  misc_feature 1..22: note = chemically synthesized
  source 1..22: mol_type = other DNA
tcctagcttttctcttctgtca

SEQ ID NO: 3732 - DNA, 22 bp, synthetic construct
  misc_feature 1..22: note = chemically synthesized
  source 1..22: mol_type = other DNA
gcttttctcttctgtcaacccc

SEQ ID NO: 3733 - DNA, 22 bp, synthetic construct
  misc_feature 1..22: note = chemically synthesized
  source 1..22: mol_type = other DNA
ttctcttctgtcaaccccacac

SEQ ID NO: 3734 - DNA, 22 bp, synthetic construct
  misc_feature 1..22: note = chemically synthesized
  source 1..22: mol_type = other DNA
tctcttctgtcaaccccacacg

SEQ ID NO: 3735 - DNA, 22 bp, synthetic construct
  misc_feature 1..22: note = chemically synthesized
  source 1..22: mol_type = other DNA
ctcttctgtcaaccccacacgc

SEQ ID NO: 3736 - DNA, 22 bp, synthetic construct
  misc_feature 1..22: note = chemically synthesized
  source 1..22: mol_type = other DNA
tcttctgtcaaccccacacgcc

SEQ ID NO: 3737 - DNA, 22 bp, synthetic construct
  misc_feature 1..22: note = chemically synthesized
  source 1..22: mol_type = other DNA
ttctgtcaaccccacacgcctt

SEQ ID NO: 3738 - DNA, 22 bp, synthetic construct
  misc_feature 1..22: note = chemically synthesized
  source 1..22: mol_type = other DNA
ctgtcaaccccacacgcctttg

SEQ ID NO: 3739 - DNA, 22 bp, synthetic construct
  misc_feature 1..22: note = chemically synthesized
  source 1..22: mol_type = other DNA
tgtcaaccccacacgcctttgg

SEQ ID NO: 3740 - DNA, 22 bp, synthetic construct
  misc_feature 1..22: note = chemically synthesized
  source 1..22: mol_type = other DNA
tcaaccccacacgcctttggca

SEQ ID NO: 3741 - DNA, 22 bp, synthetic construct
  misc_feature 1..22: note = chemically synthesized
  source 1..22: mol_type = other DNA
tggcacaatgaagtgggtaacc

SEQ ID NO: 3742 - DNA, 22 bp, synthetic construct
  misc_feature 1..22: note = chemically synthesized
  source 1..22: mol_type = other DNA
ggcacaatgaagtgggtaacct

SEQ ID NO: 3743 - DNA, 22 bp, synthetic construct
  misc_feature 1..22: note = chemically synthesized
  source 1..22: mol_type = other DNA
gcacaatgaagtgggtaacctt

SEQ ID NO: 3744 - DNA, 22 bp, synthetic construct
  misc_feature 1..22: note = chemically synthesized
  source 1..22: mol_type = other DNA
tatttcccttctttttctcttt

SEQ ID NO: 3745 - DNA, 22 bp, synthetic construct
  misc_feature 1..22: note = chemically synthesized
  source 1..22: mol_type = other DNA
atttcccttctttttctcttta

SEQ ID NO: 3746 - DNA, 22 bp, synthetic construct
  misc_feature 1..22: note = chemically synthesized
  source 1..22: mol_type = other DNA
tttcccttctttttctctttag

SEQ ID NO: 3747 - DNA, 22 bp, synthetic construct
  misc_feature 1..22: note = chemically synthesized
  source 1..22: mol_type = other DNA
cccttctttttctctttagctc

SEQ ID NO: 3748 - DNA, 22 bp, synthetic construct
  misc_feature 1..22: note = chemically synthesized
  source 1..22: mol_type = other DNA
ccttctttttctctttagctcg

SEQ ID NO: 3749 - DNA, 22 bp, synthetic construct
  misc_feature 1..22: note = chemically synthesized
  source 1..22: mol_type = other DNA
ctttttctctttagctcggctt

SEQ ID NO: 3750 - DNA, 22 bp, synthetic construct
  misc_feature 1..22: note = chemically synthesized
  source 1..22: mol_type = other DNA
tttttctctttagctcggctta

SEQ ID NO: 3751 - DNA, 22 bp, synthetic construct
  misc_feature 1..22: note = chemically synthesized
  source 1..22: mol_type = other DNA
tttctctttagctcggcttatt

SEQ ID NO: 3752 - DNA, 22 bp, synthetic construct
  misc_feature 1..22: note = chemically synthesized
  source 1..22: mol_type = other DNA
ttctctttagctcggcttattc

SEQ ID NO: 3753 - DNA, 22 bp, synthetic construct
  misc_feature 1..22: note = chemically synthesized
  source 1..22: mol_type = other DNA
tctctttagctcggcttattcc

SEQ ID NO: 3754 - DNA, 22 bp, synthetic construct
  misc_feature 1..22: note = chemically synthesized
  source 1..22: mol_type = other DNA
ctctttagctcggcttattcca

SEQ ID NO: 3755 - DNA, 22 bp, synthetic construct
  misc_feature 1..22: note = chemically synthesized
  source 1..22: mol_type = other DNA
tctttagctcggcttattccag

SEQ ID NO: 3756 - DNA, 22 bp, synthetic construct
  misc_feature 1..22: note = chemically synthesized
  source 1..22: mol_type = other DNA
tttagctcggcttattccaggg

SEQ ID NO: 3757 - DNA, 22 bp, synthetic construct
  misc_feature 1..22: note = chemically synthesized
  source 1..22: mol_type = other DNA
tagctcggcttattccaggggt

SEQ ID NO: 3758 - DNA, 22 bp, synthetic construct
  misc_feature 1..22: note = chemically synthesized
  source 1..22: mol_type = other DNA
agctcggcttattccaggggtg

SEQ ID NO: 3759 - DNA, 22 bp, synthetic construct
  misc_feature 1..22: note = chemically synthesized
  source 1..22: mol_type = other DNA
gctcggcttattccaggggtgt

SEQ ID NO: 3760 - DNA, 22 bp, synthetic construct
  misc_feature 1..22: note = chemically synthesized
  source 1..22: mol_type = other DNA
ggcttattccaggggtgtgttt

SEQ ID NO: 3761 - DNA, 22 bp, synthetic construct
  misc_feature 1..22: note = chemically synthesized
  source 1..22: mol_type = other DNA
attccaggggtgtgtttcgtcg

SEQ ID NO: 3762 - DNA, 22 bp, synthetic construct
  misc_feature 1..22: note = chemically synthesized
  source 1..22: mol_type = other DNA
ttccaggggtgtgtttcgtcga

SEQ ID NO: 3763 - DNA, 22 bp, synthetic construct
  misc_feature 1..22: note = chemically synthesized
  source 1..22: mol_type = other DNA
caggggtgtgtttcgtcgagat

SEQ ID NO: 3764 - DNA, 22 bp, synthetic construct
  misc_feature 1..22: note = chemically synthesized
  source 1..22: mol_type = other DNA
cgtcgagatgcacgtaagaaat

SEQ ID NO: 3765 - DNA, 22 bp, synthetic construct
  misc_feature 1..22: note = chemically synthesized
  source 1..22: mol_type = other DNA
gtcgagatgcacgtaagaaatc

SEQ ID NO: 3766 - DNA, 22 bp, synthetic construct
  misc_feature 1..22: note = chemically synthesized
  source 1..22: mol_type = other DNA
ttctattgttcaacttttattc

SEQ ID NO: 3767 - DNA, 22 bp, synthetic construct
  misc_feature 1..22: note = chemically synthesized
  source 1..22: mol_type = other DNA
tctattgttcaacttttattct

SEQ ID NO: 3768 - DNA, 22 bp, synthetic construct
  misc_feature 1..22: note = chemically synthesized
  source 1..22: mol_type = other DNA
ctattgttcaacttttattcta

SEQ ID NO: 3769 - DNA, 22 bp, synthetic construct
  misc_feature 1..22: note = chemically synthesized
  source 1..22: mol_type = other DNA
tattgttcaacttttattctat

SEQ ID NO: 3770 - DNA, 22 bp, synthetic construct
  misc_feature 1..22: note = chemically synthesized
  source 1..22: mol_type = other DNA
ttgttcaacttttattctattt

SEQ ID NO: 3771 - DNA, 22 bp, synthetic construct
  misc_feature 1..22: note = chemically synthesized
  source 1..22: mol_type = other DNA
ttcaacttttattctattttcc

SEQ ID NO: 3772 - DNA, 22 bp, synthetic construct
  misc_feature 1..22: note = chemically synthesized
  source 1..22: mol_type = other DNA
aacttttattctattttcccag

SEQ ID NO: 3773 - DNA, 22 bp, synthetic construct
  misc_feature 1..22: note = chemically synthesized
  source 1..22: mol_type = other DNA
ttattctattttcccagtaaaa

SEQ ID NO: 3774 - DNA, 22 bp, synthetic construct
  misc_feature 1..22: note = chemically synthesized
  source 1..22: mol_type = other DNA
tattctattttcccagtaaaat

SEQ ID NO: 3775 - DNA, 22 bp, synthetic construct
  misc_feature 1..22: note = chemically synthesized
  source 1..22: mol_type = other DNA
attctattttcccagtaaaata

SEQ ID NO: 3776 - DNA, 22 bp, synthetic construct
  misc_feature 1..22: note = chemically synthesized
  source 1..22: mol_type = other DNA
ttctattttcccagtaaaataa

SEQ ID NO: 3777 - DNA, 22 bp, synthetic construct
  misc_feature 1..22: note = chemically synthesized
  source 1..22: mol_type = other DNA
tattttcccagtaaaataaagt

SEQ ID NO: 3778 - DNA, 22 bp, synthetic construct
  misc_feature 1..22: note = chemically synthesized
  source 1..22: mol_type = other DNA
ttttcccagtaaaataaagttt

SEQ ID NO: 3779 - DNA, 22 bp, synthetic construct
  misc_feature 1..22: note = chemically synthesized
  source 1..22: mol_type = other DNA
tcccagtaaaataaagttttag

SEQ ID NO: 3780 - DNA, 22 bp, synthetic construct
  misc_feature 1..22: note = chemically synthesized
  source 1..22: mol_type = other DNA
cccagtaaaataaagttttagt

SEQ ID NO: 3781 - DNA, 22 bp, synthetic construct
  misc_feature 1..22: note = chemically synthesized
  source 1..22: mol_type = other DNA
ccagtaaaataaagttttagta

SEQ ID NO: 3782 - DNA, 22 bp, synthetic construct
  misc_feature 1..22: note = chemically synthesized
  source 1..22: mol_type = other DNA
tagtaaactctgcatctttaaa

SEQ ID NO: 3783 - DNA, 22 bp, synthetic construct
  misc_feature 1..22: note = chemically synthesized
  source 1..22: mol_type = other DNA
agtaaactctgcatctttaaag

SEQ ID NO: 3784 - DNA, 22 bp, synthetic construct
  misc_feature 1..22: note = chemically synthesized
  source 1..22: mol_type = other DNA
gtaaactctgcatctttaaaga

SEQ ID NO: 3785 - DNA, 22 bp, synthetic construct
  misc_feature 1..22: note = chemically synthesized
  source 1..22: mol_type = other DNA
tgcatctttaaagaattatttt

SEQ ID NO: 3786 - DNA, 22 bp, synthetic construct
  misc_feature 1..22: note = chemically synthesized
  source 1..22: mol_type = other DNA
catctttaaagaattattttgg

SEQ ID NO: 3787 - DNA, 22 bp, synthetic construct
  misc_feature 1..22: note = chemically synthesized
  source 1..22: mol_type = other DNA
taaagaattattttggcattta

SEQ ID NO: 3788 - DNA, 22 bp, synthetic construct
  misc_feature 1..22: note = chemically synthesized
  source 1..22: mol_type = other DNA
aaagaattattttggcatttat

SEQ ID NO: 3789 - DNA, 22 bp, synthetic construct
  misc_feature 1..22: note = chemically synthesized
  source 1..22: mol_type = other DNA
aagaattattttggcatttatt

SEQ ID NO: 3790 - DNA, 22 bp, synthetic construct
  misc_feature 1..22: note = chemically synthesized
  source 1..22: mol_type = other DNA
ttttggcatttatttctaaaat

SEQ ID NO: 3791 - DNA, 22 bp, synthetic construct
  misc_feature 1..22: note = chemically synthesized
  source 1..22: mol_type = other DNA
tggcatttatttctaaaatggc

SEQ ID NO: 3792 - DNA, 22 bp, synthetic construct
  misc_feature 1..22: note = chemically synthesized
  source 1..22: mol_type = other DNA
ggcatttatttctaaaatggca

SEQ ID NO: 3793 - DNA, 22 bp, synthetic construct
  misc_feature 1..22: note = chemically synthesized
  source 1..22: mol_type = other DNA
gcatttatttctaaaatggcat

SEQ ID NO: 3794 - DNA, 22 bp, synthetic construct
  misc_feature 1..22: note = chemically synthesized
  source 1..22: mol_type = other DNA
atttctaaaatggcatagtatt

SEQ ID NO: 3795 - DNA, 22 bp, synthetic construct
  misc_feature 1..22: note = chemically synthesized
  source 1..22: mol_type = other DNA
tttctaaaatggcatagtattt

SEQ ID NO: 3796 - DNA, 22 bp, synthetic construct
  misc_feature 1..22: note = chemically synthesized
  source 1..22: mol_type = other DNA
ctaaaatggcatagtattttgt

SEQ ID NO: 3797 - DNA, 22 bp, synthetic construct
  misc_feature 1..22: note = chemically synthesized
  source 1..22: mol_type = other DNA
taaaatggcatagtattttgta

SEQ ID NO: 3798 - DNA, 22 bp, synthetic construct
  misc_feature 1..22: note = chemically synthesized
  source 1..22: mol_type = other DNA
aaatggcatagtattttgtatt

SEQ ID NO: 3799 - DNA, 22 bp, synthetic construct
  misc_feature 1..22: note = chemically synthesized
  source 1..22: mol_type = other DNA
tgtatttgtgaagtcttacaag

SEQ ID NO: 3800 - DNA, 22 bp, synthetic construct
  misc_feature 1..22: note = chemically synthesized
  source 1..22: mol_type = other DNA
gtatttgtgaagtcttacaagg

SEQ ID NO: 3801 - DNA, 22 bp, synthetic construct
  misc_feature 1..22: note = chemically synthesized
  source 1..22: mol_type = other DNA
tatttgtgaagtcttacaaggt

SEQ ID NO: 3802 - DNA, 22 bp, synthetic construct
  misc_feature 1..22: note = chemically synthesized
  source 1..22: mol_type = other DNA
gtgaagtcttacaaggttatct

SEQ ID NO: 3803 - DNA, 22 bp, synthetic construct
  misc_feature 1..22: note = chemically synthesized
  source 1..22: mol_type = other DNA
tgaagtcttacaaggttatctt

SEQ ID NO: 3804 - DNA, 22 bp, synthetic construct
  misc_feature 1..22: note = chemically synthesized
  source 1..22: mol_type = other DNA
acaaggttatcttattaataaa

SEQ ID NO: 3805 - DNA, 22 bp, synthetic construct
  misc_feature 1..22: note = chemically synthesized
  source 1..22: mol_type = other DNA
caaggttatcttattaataaaa

SEQ ID NO: 3806 - DNA, 22 bp, synthetic construct
  misc_feature 1..22: note = chemically synthesized
  source 1..22: mol_type = other DNA
tcttattaataaaattcaaaca

SEQ ID NO: 3807 - DNA, 22 bp, synthetic construct
  misc_feature 1..22: note = chemically synthesized
  source 1..22: mol_type = other DNA
attaataaaattcaaacatcct

SEQ ID NO: 3808 - DNA, 22 bp, synthetic construct
  misc_feature 1..22: note = chemically synthesized
  source 1..22: mol_type = other DNA
ttaataaaattcaaacatccta

SEQ ID NO: 3809 - DNA, 22 bp, synthetic construct
  misc_feature 1..22: note = chemically synthesized
  source 1..22: mol_type = other DNA
ataaaattcaaacatcctaggt

SEQ ID NO: 3810 - DNA, 22 bp, synthetic construct
  misc_feature 1..22: note = chemically synthesized
  source 1..22: mol_type = other DNA
aaacatcctaggtaaaaaaaaa

SEQ ID NO: 3811 - DNA, 22 bp, synthetic construct
  misc_feature 1..22: note = chemically synthesized
  source 1..22: mol_type = other DNA
ggtaaaaaaaaaaaaaggtcag

SEQ ID NO: 3812 - DNA, 22 bp, synthetic construct
  misc_feature 1..22: note = chemically synthesized
  source 1..22: mol_type = other DNA
tttagtgactgtaattttcttt

SEQ ID NO: 3813 - DNA, 22 bp, synthetic construct
  misc_feature 1..22: note = chemically synthesized
  source 1..22: mol_type = other DNA
agtgactgtaattttcttttgc

SEQ ID NO: 3814 - DNA, 22 bp, synthetic construct
  misc_feature 1..22: note = chemically synthesized
  source 1..22: mol_type = other DNA
gtgactgtaattttcttttgcg

SEQ ID NO: 3815 - DNA, 22 bp, synthetic construct
  misc_feature 1..22: note = chemically synthesized
  source 1..22: mol_type = other DNA
taattttcttttgcgcactaag

SEQ ID NO: 3816 - DNA, 22 bp, synthetic construct
  misc_feature 1..22: note = chemically synthesized
  source 1..22: mol_type = other DNA
tcttttgcgcactaaggaaagt

SEQ ID NO: 3817 - DNA, 22 bp, synthetic construct
  misc_feature 1..22: note = chemically synthesized
  source 1..22: mol_type = other DNA
cttttgcgcactaaggaaagtg

SEQ ID NO: 3818 - DNA, 22 bp, synthetic construct
  misc_feature 1..22: note = chemically synthesized
  source 1..22: mol_type = other DNA
ttttgcgcactaaggaaagtgc

SEQ ID NO: 3819 - DNA, 22 bp, synthetic construct
  misc_feature 1..22: note = chemically synthesized
  source 1..22: mol_type = other DNA
ttgcgcactaaggaaagtgcaa

SEQ ID NO: 3820 - DNA, 22 bp, synthetic construct
  misc_feature 1..22: note = chemically synthesized
  source 1..22: mol_type = other DNA
tgcgcactaaggaaagtgcaaa

SEQ ID NO: 3821 - DNA, 22 bp, synthetic construct
  misc_feature 1..22: note = chemically synthesized
  source 1..22: mol_type = other DNA
gcgcactaaggaaagtgcaaag

SEQ ID NO: 3822 - DNA, 22 bp, synthetic construct
  misc_feature 1..22: note = chemically synthesized
  source 1..22: mol_type = other DNA
cgcactaaggaaagtgcaaagt

SEQ ID NO: 3823 - DNA, 22 bp, synthetic construct
  misc_feature 1..22: note = chemically synthesized
  source 1..22: mol_type = other DNA
aggaaagtgcaaagtaacttag

SEQ ID NO: 3824 - DNA, 22 bp, synthetic construct
  misc_feature 1..22: note = chemically synthesized
  source 1..22: mol_type = other DNA
agagtgactgaaacttcacaga

SEQ ID NO: 3825 - DNA, 22 bp, synthetic construct
  misc_feature 1..22: note = chemically synthesized
  source 1..22: mol_type = other DNA
gagtgactgaaacttcacagaa

SEQ ID NO: 3826 - DNA, 22 bp, synthetic construct
  misc_feature 1..22: note = chemically synthesized
  source 1..22: mol_type = other DNA
aaacttcacagaatagggttga

SEQ ID NO: 3827 - DNA, 22 bp, synthetic construct
  misc_feature 1..22: note = chemically synthesized
  source 1..22: mol_type = other DNA
cacagaatagggttgaagattg

SEQ ID NO: 3828 - DNA, 22 bp, synthetic construct
  misc_feature 1..22: note = chemically synthesized
  source 1..22: mol_type = other DNA
acagaatagggttgaagattga

SEQ ID NO: 3829 - DNA, 22 bp, synthetic construct
  misc_feature 1..22: note = chemically synthesized
  source 1..22: mol_type = other DNA
aagattgaattcataactatcc

SEQ ID NO: 3830 - DNA, 22 bp, synthetic construct
  misc_feature 1..22: note = chemically synthesized
  source 1..22: mol_type = other DNA
aattcataactatcccaaagac

SEQ ID NO: 3831 - DNA, 22 bp, synthetic construct
  misc_feature 1..22: note = chemically synthesized
  source 1..22: mol_type = other DNA
ataactatcccaaagacctatc

SEQ ID NO: 3832 - DNA, 22 bp, synthetic construct
  misc_feature 1..22: note = chemically synthesized
  source 1..22: mol_type = other DNA
tcccaaagacctatccattgca

SEQ ID NO: 3833 - DNA, 22 bp, synthetic construct
  misc_feature 1..22: note = chemically synthesized
  source 1..22: mol_type = other DNA
tccattgcactatgctttattt

SEQ ID NO: 3834 - DNA, 22 bp, synthetic construct
  misc_feature 1..22: note = chemically synthesized
  source 1..22: mol_type = other DNA
cactatgctttatttaaaaacc

SEQ ID NO: 3835 - DNA, 22 bp, synthetic construct
  misc_feature 1..22: note = chemically synthesized
  source 1..22: mol_type = other DNA
tgctttatttaaaaaccacaaa

SEQ ID NO: 3836 - DNA, 22 bp, synthetic construct
  misc_feature 1..22: note = chemically synthesized
  source 1..22: mol_type = other DNA
tatttaaaaaccacaaaacctg

SEQ ID NO: 3837 - DNA, 22 bp, synthetic construct
  misc_feature 1..22: note = chemically synthesized
  source 1..22: mol_type = other DNA
atttaaaaaccacaaaacctgt

SEQ ID NO: 3838 - DNA, 22 bp, synthetic construct
  misc_feature 1..22: note = chemically synthesized
  source 1..22: mol_type = other DNA
tttaaaaaccacaaaacctgtg

SEQ ID NO: 3839 - DNA, 22 bp, synthetic construct
  misc_feature 1..22: note = chemically synthesized
  source 1..22: mol_type = other DNA
aaaaaccacaaaacctgtgctg

SEQ ID NO: 3840 - DNA, 22 bp, synthetic construct
  misc_feature 1..22: note = chemically synthesized
  source 1..22: mol_type = other DNA
aaaaccacaaaacctgtgctgt

SEQ ID NO: 3841 - DNA, 22 bp, synthetic construct
  misc_feature 1..22: note = chemically synthesized
  source 1..22: mol_type = other DNA
tgctgttgatctcataaataga

SEQ ID NO: 3842 - DNA, 22 bp, synthetic construct
  misc_feature 1..22: note = chemically synthesized
  source 1..22: mol_type = other DNA
ttgatctcataaatagaacttg

SEQ ID NO: 3843 - DNA, 22 bp, synthetic construct
  misc_feature 1..22: note = chemically synthesized
  source 1..22: mol_type = other DNA
atctcataaatagaacttgtat

SEQ ID NO: 3844 - DNA, 22 bp, synthetic construct
  misc_feature 1..22: note = chemically synthesized
  source 1..22: mol_type = other DNA
ataaatagaacttgtatttata

SEQ ID NO: 3845 - DNA, 22 bp, synthetic construct
  misc_feature 1..22: note = chemically synthesized
  source 1..22: mol_type = other DNA
gtatttatatttattttcattt

SEQ ID NO: 3846 - DNA, 22 bp, synthetic construct
  misc_feature 1..22: note = chemically synthesized
  source 1..22: mol_type = other DNA
tatttatatttattttcatttt

SEQ ID NO: 3847 - DNA, 22 bp, synthetic construct
  misc_feature 1..22: note = chemically synthesized
  source 1..22: mol_type = other DNA
atatttattttcattttagtct

SEQ ID NO: 3848 - DNA, 22 bp, synthetic construct
  misc_feature 1..22: note = chemically synthesized
  source 1..22: mol_type = other DNA
tatttattttcattttagtctg

SEQ ID NO: 3849 - DNA, 22 bp, synthetic construct
  misc_feature 1..22: note = chemically synthesized
  source 1..22: mol_type = other DNA
attttcattttagtctgtcttc

SEQ ID NO: 3850 - DNA, 22 bp, synthetic construct
  misc_feature 1..22: note = chemically synthesized
  source 1..22: mol_type = other DNA
ttttcattttagtctgtcttct

SEQ ID NO: 3851 - DNA, 22 bp, synthetic construct
  misc_feature 1..22: note = chemically synthesized
  source 1..22: mol_type = other DNA
tcattttagtctgtcttcttgg

SEQ ID NO: 3852 - DNA, 22 bp, synthetic construct
  misc_feature 1..22: note = chemically synthesized
  source 1..22: mol_type = other DNA
cattttagtctgtcttcttggt

SEQ ID NO: 3853 - DNA, 22 bp, synthetic construct
  misc_feature 1..22: note = chemically synthesized
  source 1..22: mol_type = other DNA
attttagtctgtcttcttggtt

SEQ ID NO: 3854 - DNA, 22 bp, synthetic construct
  misc_feature 1..22: note = chemically synthesized
  source 1..22: mol_type = other DNA
tagtctgtcttcttggttgctg

SEQ ID NO: 3855 - DNA, 22 bp, synthetic construct
  misc_feature 1..22: note = chemically synthesized
  source 1..22: mol_type = other DNA
agtctgtcttcttggttgctgt

SEQ ID NO: 3856 - DNA, 22 bp, synthetic construct
  misc_feature 1..22: note = chemically synthesized
  source 1..22: mol_type = other DNA
gtctgtcttcttggttgctgtt

SEQ ID NO: 3857 - DNA, 22 bp, synthetic construct
  misc_feature 1..22: note = chemically synthesized
  source 1..22: mol_type = other DNA
tcttcttggttgctgttgatag

SEQ ID NO: 3858 - DNA, 22 bp, synthetic construct
  misc_feature 1..22: note = chemically synthesized
  source 1..22: mol_type = other DNA
cttggttgctgttgatagacac

SEQ ID NO: 3859 - DNA, 22 bp, synthetic construct
  misc_feature 1..22: note = chemically synthesized
  source 1..22: mol_type = other DNA
ttggttgctgttgatagacact

SEQ ID NO: 3860 - DNA, 22 bp, synthetic construct
  misc_feature 1..22: note = chemically synthesized
  source 1..22: mol_type = other DNA
ggttgctgttgatagacactaa

SEQ ID NO: 3861 - DNA, 22 bp, synthetic construct
  misc_feature 1..22: note = chemically synthesized
  source 1..22: mol_type = other DNA
gttgctgttgatagacactaaa

SEQ ID NO: 3862 - DNA, 22 bp, synthetic construct
  misc_feature 1..22: note = chemically synthesized
  source 1..22: mol_type = other DNA
ctgttgatagacactaaaagag

SEQ ID NO: 3863 - DNA, 22 bp, synthetic construct
  misc_feature 1..22: note = chemically synthesized
  source 1..22: mol_type = other DNA
ttgatagacactaaaagagtat

SEQ ID NO: 3864 - DNA, 22 bp, synthetic construct
  misc_feature 1..22: note = chemically synthesized
  source 1..22: mol_type = other DNA
atagacactaaaagagtattag

SEQ ID NO: 3865 - DNA, 22 bp, synthetic construct
  misc_feature 1..22: note = chemically synthesized
  source 1..22: mol_type = other DNA
aaagagtattagatattatcta

SEQ ID NO: 3866 - DNA, 22 bp, synthetic construct
  misc_feature 1..22: note = chemically synthesized
  source 1..22: mol_type = other DNA
gatattatctaagtttgaatat

SEQ ID NO: 3867 - DNA, 22 bp, synthetic construct
  misc_feature 1..22: note = chemically synthesized
  source 1..22: mol_type = other DNA
tctaagtttgaatataaggcta

SEQ ID NO: 3868 - DNA, 22 bp, synthetic construct
  misc_feature 1..22: note = chemically synthesized
  source 1..22: mol_type = other DNA
agtttgaatataaggctataaa

SEQ ID NO: 3869 - DNA, 22 bp, synthetic construct
  misc_feature 1..22: note = chemically synthesized
  source 1..22: mol_type = other DNA
gaatataaggctataaatattt

SEQ ID NO: 3870 - DNA, 22 bp, synthetic construct
  misc_feature 1..22: note = chemically synthesized
  source 1..22: mol_type = other DNA
aatataaggctataaatattta

SEQ ID NO: 3871 - DNA, 22 bp, synthetic construct
  misc_feature 1..22: note = chemically synthesized
  source 1..22: mol_type = other DNA
taaatatttaataatttttaaa

SEQ ID NO: 3872 - DNA, 22 bp, synthetic construct
  misc_feature 1..22: note = chemically synthesized
  source 1..22: mol_type = other DNA
aataatttttaaaatagtattc

SEQ ID NO: 3873 - DNA, 22 bp, synthetic construct
  misc_feature 1..22: note = chemically synthesized
  source 1..22: mol_type = other DNA
ataatttttaaaatagtattct

SEQ ID NO: 3874 - DNA, 22 bp, synthetic construct
  misc_feature 1..22: note = chemically synthesized
  source 1..22: mol_type = other DNA
ttaaaatagtattcttggtaat

SEQ ID NO: 3875 - DNA, 22 bp, synthetic construct
  misc_feature 1..22: note = chemically synthesized
  source 1..22: mol_type = other DNA
taaaatagtattcttggtaatt

SEQ ID NO: 3876 - DNA, 22 bp, synthetic construct
  misc_feature 1..22: note = chemically synthesized
  source 1..22: mol_type = other DNA
aaaatagtattcttggtaattg

SEQ ID NO: 3877 - DNA, 22 bp, synthetic construct
  misc_feature 1..22: note = chemically synthesized
  source 1..22: mol_type = other DNA
aaatagtattcttggtaattga

SEQ ID NO: 3878 - DNA, 22 bp, synthetic construct
  misc_feature 1..22: note = chemically synthesized
  source 1..22: mol_type = other DNA
ttggtaattgaattattcttct

SEQ ID NO: 3879 - DNA, 22 bp, synthetic construct
  misc_feature 1..22: note = chemically synthesized
  source 1..22: mol_type = other DNA
ggtaattgaattattcttctgt

SEQ ID NO: 3880 - DNA, 22 bp, synthetic construct
  misc_feature 1..22: note = chemically synthesized
  source 1..22: mol_type = other DNA
gtaattgaattattcttctgtt

SEQ ID NO: 3881 - DNA, 22 bp, synthetic construct
  misc_feature 1..22: note = chemically synthesized
  source 1..22: mol_type = other DNA
aattattcttctgtttaaaggc

SEQ ID NO: 3882 - DNA, 22 bp, synthetic construct
  misc_feature 1..22: note = chemically synthesized
  source 1..22: mol_type = other DNA
ttcttctgtttaaaggcagaag

SEQ ID NO: 3883 - DNA, 22 bp, synthetic construct
  misc_feature 1..22: note = chemically synthesized
  source 1..22: mol_type = other DNA
ttctgtttaaaggcagaagaaa

SEQ ID NO: 3884 - DNA, 22 bp, synthetic construct
  misc_feature 1..22: note = chemically synthesized
  source 1..22: mol_type = other DNA
ctgtttaaaggcagaagaaata

SEQ ID NO: 3885 - DNA, 22 bp, synthetic construct
  misc_feature 1..22: note = chemically synthesized
  source 1..22: mol_type = other DNA
tgtttaaaggcagaagaaataa

SEQ ID NO: 3886 - DNA, 22 bp, synthetic construct
  misc_feature 1..22: note = chemically synthesized
  source 1..22: mol_type = other DNA
tttaaaggcagaagaaataatt

SEQ ID NO: 3887 - DNA, 22 bp, synthetic construct
  misc_feature 1..22: note = chemically synthesized
  source 1..22: mol_type = other DNA
aaaggcagaagaaataattgaa

SEQ ID NO: 3888 - DNA, 22 bp, synthetic construct
  misc_feature 1..22: note = chemically synthesized
  source 1..22: mol_type = other DNA
aaggcagaagaaataattgaac

SEQ ID NO: 3889 - DNA, 22 bp, synthetic construct
  misc_feature 1..22: note = chemically synthesized
  source 1..22: mol_type = other DNA
aacatcatcctgagtttttctg

SEQ ID NO: 3890 - DNA, 22 bp, synthetic construct
  misc_feature 1..22: note = chemically synthesized
  source 1..22: mol_type = other DNA
agtttttctgtaggaatcagag

SEQ ID NO: 3891 - DNA, 22 bp, synthetic construct
  misc_feature 1..22: note = chemically synthesized
  source 1..22: mol_type = other DNA
ttctgtaggaatcagagcccaa

SEQ ID NO: 3892 - DNA, 22 bp, synthetic construct
  misc_feature 1..22: note = chemically synthesized
  source 1..22: mol_type = other DNA
tctgtaggaatcagagcccaat

SEQ ID NO: 3893 - DNA, 22 bp, synthetic construct
  misc_feature 1..22: note = chemically synthesized
  source 1..22: mol_type = other DNA
ctgtaggaatcagagcccaata

SEQ ID NO: 3894 - DNA, 22 bp, synthetic construct
  misc_feature 1..22: note = chemically synthesized
  source 1..22: mol_type = other DNA
tgtaggaatcagagcccaatat

SEQ ID NO: 3895 - DNA, 22 bp, synthetic construct
  misc_feature 1..22: note = chemically synthesized
  source 1..22: mol_type = other DNA
taggaatcagagcccaatattt

SEQ ID NO: 3896 - DNA, 22 bp, synthetic construct
  misc_feature 1..22: note = chemically synthesized
  source 1..22: mol_type = other DNA
tgaaacaaatgcataatctaag

SEQ ID NO: 3897 - DNA, 22 bp, synthetic construct
  misc_feature 1..22: note = chemically synthesized
  source 1..22: mol_type = other DNA
gaaacaaatgcataatctaagt

SEQ ID NO: 3898 - DNA, 22 bp, synthetic construct
  misc_feature 1..22: note = chemically synthesized
  source 1..22: mol_type = other DNA
aaacaaatgcataatctaagtc

SEQ ID NO: 3899 - DNA, 22 bp, synthetic construct
  misc_feature 1..22: note = chemically synthesized
  source 1..22: mol_type = other DNA
agtcaaatggaaagaaatataa

SEQ ID NO: 3900 - DNA, 22 bp, synthetic construct
  misc_feature 1..22: note = chemically synthesized
  source 1..22: mol_type = other DNA
ttacttcttgttttcttcagta

SEQ ID NO: 3901 - DNA, 22 bp, synthetic construct
  misc_feature 1..22: note = chemically synthesized
  source 1..22: mol_type = other DNA
cttcttgttttcttcagtattt

SEQ ID NO: 3902 - DNA, 22 bp, synthetic construct
  misc_feature 1..22: note = chemically synthesized
  source 1..22: mol_type = other DNA
cttgttttcttcagtatttaac

SEQ ID NO: 3903 - DNA, 22 bp, synthetic construct
  misc_feature 1..22: note = chemically synthesized
  source 1..22: mol_type = other DNA
ttgttttcttcagtatttaaca

SEQ ID NO: 3904 - DNA, 22 bp, synthetic construct
  misc_feature 1..22: note = chemically synthesized
  source 1..22: mol_type = other DNA
gttttcttcagtatttaacaat

SEQ ID NO: 3905 - DNA, 22 bp, synthetic construct
  misc_feature 1..22: note = chemically synthesized
  source 1..22: mol_type = other DNA
ttttcttcagtatttaacaatc

SEQ ID NO: 3906 - DNA, 22 bp, synthetic construct
  misc_feature 1..22: note = chemically synthesized
  source 1..22: mol_type = other DNA
tcttcagtatttaacaatcctt

SEQ ID NO: 3907 - DNA, 22 bp, synthetic construct
  misc_feature 1..22: note = chemically synthesized
  source 1..22: mol_type = other DNA
cttcagtatttaacaatccttt

SEQ ID NO: 3908 - DNA, 22 bp, synthetic construct
  misc_feature 1..22: note = chemically synthesized
  source 1..22: mol_type = other DNA
ttcagtatttaacaatcctttt

SEQ ID NO: 3909 - DNA, 22 bp, synthetic construct
  misc_feature 1..22: note = chemically synthesized
  source 1..22: mol_type = other DNA
cagtatttaacaatcctttttt

SEQ ID NO: 3910 - DNA, 22 bp, synthetic construct
  misc_feature 1..22: note = chemically synthesized
  source 1..22: mol_type = other DNA
agtatttaacaatccttttttt

SEQ ID NO: 3911 - DNA, 22 bp, synthetic construct
  misc_feature 1..22: note = chemically synthesized
  source 1..22: mol_type = other DNA
aacaatccttttttttcttccc

SEQ ID NO: 3912 - DNA, 22 bp, synthetic construct
  misc_feature 1..22: note = chemically synthesized
  source 1..22: mol_type = other DNA
acaatccttttttttcttccct

SEQ ID NO: 3913 - DNA, 22 bp, synthetic construct
  misc_feature 1..22: note = chemically synthesized
  source 1..22: mol_type = other DNA
ttttttcttcccttgcccagac

SEQ ID NO: 3914 - DNA, 22 bp, synthetic construct
  misc_feature 1..22: note = chemically synthesized
  source 1..22: mol_type = other DNA
tttttcttcccttgcccagaca

SEQ ID NO: 3915 - DNA, 22 bp, synthetic construct
  misc_feature 1..22: note = chemically synthesized
  source 1..22: mol_type = other DNA
ttttcttcccttgcccagacaa

SEQ ID NO: 3916 - DNA, 22 bp, synthetic construct
  misc_feature 1..22: note = chemically synthesized
  source 1..22: mol_type = other DNA
tttcttcccttgcccagacaag

SEQ ID NO: 3917 - DNA, 22 bp, synthetic construct
  misc_feature 1..22: note = chemically synthesized
  source 1..22: mol_type = other DNA
ttcttcccttgcccagacaaga

SEQ ID NO: 3918 - DNA, 22 bp, synthetic construct
  misc_feature 1..22: note = chemically synthesized
  source 1..22: mol_type = other DNA
tcttcccttgcccagacaagag

SEQ ID NO: 3919 - DNA, 22 bp, synthetic construct
  misc_feature 1..22: note = chemically synthesized
  source 1..22: mol_type = other DNA
cttcccttgcccagacaagagt

SEQ ID NO: 3920 - DNA, 22 bp, synthetic construct
  misc_feature 1..22: note = chemically synthesized
  source 1..22: mol_type = other DNA
ttcccttgcccagacaagagtg

SEQ ID NO: 3921 - DNA, 22 bp, synthetic construct
  misc_feature 1..22: note = chemically synthesized
  source 1..22: mol_type = other DNA
cccttgcccagacaagagtgag

SEQ ID NO: 3922 - DNA, 22 bp, synthetic construct
  misc_feature 1..22: note = chemically synthesized
  source 1..22: mol_type = other DNA
ccttgcccagacaagagtgagg

SEQ ID NO: 3923 - DNA, 22 bp, synthetic construct
  misc_feature 1..22: note = chemically synthesized
  source 1..22: mol_type = other DNA
gcccagacaagagtgaggttgc

SEQ ID NO: 3924 - DNA, 22 bp, synthetic construct
  misc_feature 1..22: note = chemically synthesized
  source 1..22: mol_type = other DNA
cccagacaagagtgaggttgct

SEQ ID NO: 3925 - DNA, 22 bp, synthetic construct
  misc_feature 1..22: note = chemically synthesized
  source 1..22: mol_type = other DNA
ctcatcggtttaaagatttggg

SEQ ID NO: 3926 - DNA, 22 bp, synthetic construct
  misc_feature 1..22: note = chemically synthesized
  source 1..22: mol_type = other DNA
atcggtttaaagatttgggaga

SEQ ID NO: 3927 - DNA, 22 bp, synthetic construct
  misc_feature 1..22: note = chemically synthesized
  source 1..22: mol_type = other DNA
aaagatttgggagaagaaaatt

SEQ ID NO: 3928 - DNA, 22 bp, synthetic construct
  misc_feature 1..22: note = chemically synthesized
  source 1..22: mol_type = other DNA
aagatttgggagaagaaaattt

SEQ ID NO: 3929 - DNA, 22 bp, synthetic construct
  misc_feature 1..22: note = chemically synthesized
  source 1..22: mol_type = other DNA
gggagaagaaaatttcaaagcc

SEQ ID NO: 3930 - DNA, 22 bp, synthetic construct
  misc_feature 1..22: note = chemically synthesized
  source 1..22: mol_type = other DNA
ggagaagaaaatttcaaagcct

SEQ ID NO: 3931 - DNA, 22 bp, synthetic construct
  misc_feature 1..22: note = chemically synthesized
  source 1..22: mol_type = other DNA
tgaaattttcttctcccaaatc

SEQ ID NO: 3932 - DNA, 22 bp, synthetic construct
  misc_feature 1..22: note = chemically synthesized
  source 1..22: mol_type = other DNA
gaaattttcttctcccaaatct

SEQ ID NO: 3933 - DNA, 22 bp, synthetic construct
  misc_feature 1..22: note = chemically synthesized
  source 1..22: mol_type = other DNA
aaattttcttctcccaaatctt

SEQ ID NO: 3934 - DNA, 22 bp, synthetic construct
  misc_feature 1..22: note = chemically synthesized
  source 1..22: mol_type = other DNA
tcttctcccaaatctttaaacc

SEQ ID NO: 3935 - DNA, 22 bp, synthetic construct
  misc_feature 1..22: note = chemically synthesized
  source 1..22: mol_type = other DNA
cttctcccaaatctttaaaccg

SEQ ID NO: 3936 - DNA, 22 bp, synthetic construct
  misc_feature 1..22: note = chemically synthesized
  source 1..22: mol_type = other DNA
ttctcccaaatctttaaaccga

SEQ ID NO: 3937 - DNA, 22 bp, synthetic construct
  misc_feature 1..22: note = chemically synthesized
  source 1..22: mol_type = other DNA
ctcccaaatctttaaaccgatg

SEQ ID NO: 3938 - DNA, 22 bp, synthetic construct
  misc_feature 1..22: note = chemically synthesized
  source 1..22: mol_type = other DNA
tcccaaatctttaaaccgatga

SEQ ID NO: 3939 - DNA, 22 bp, synthetic construct
  misc_feature 1..22: note = chemically synthesized
  source 1..22: mol_type = other DNA
ccaaatctttaaaccgatgagc

SEQ ID NO: 3940 - DNA, 22 bp, synthetic construct
  misc_feature 1..22: note = chemically synthesized
  source 1..22: mol_type = other DNA
taaaccgatgagcaacctcact

SEQ ID NO: 3941 - DNA, 22 bp, synthetic construct
  misc_feature 1..22: note = chemically synthesized
  source 1..22: mol_type = other DNA
aaaccgatgagcaacctcactc

SEQ ID NO: 3942 - DNA, 22 bp, synthetic construct
  misc_feature 1..22: note = chemically synthesized
  source 1..22: mol_type = other DNA
aaccgatgagcaacctcactct

SEQ ID NO: 3943 - DNA, 22 bp, synthetic construct
  misc_feature 1..22: note = chemically synthesized
  source 1..22: mol_type = other DNA
actcttgtctgggcaagggaag

SEQ ID NO: 3944 - DNA, 22 bp, synthetic construct
  misc_feature 1..22: note = chemically synthesized
  source 1..22: mol_type = other DNA
ttgtctgggcaagggaagaaaa

SEQ ID NO: 3945 - DNA, 22 bp, synthetic construct
  misc_feature 1..22: note = chemically synthesized
  source 1..22: mol_type = other DNA
gtctgggcaagggaagaaaaaa

SEQ ID NO: 3946 - DNA, 22 bp, synthetic construct
  misc_feature 1..22: note = chemically synthesized
  source 1..22: mol_type = other DNA
tctgggcaagggaagaaaaaaa

SEQ ID NO: 3947 - DNA, 22 bp, synthetic construct
  misc_feature 1..22: note = chemically synthesized
  source 1..22: mol_type = other DNA
ggcaagggaagaaaaaaaagga

SEQ ID NO: 3948 - DNA, 22 bp, synthetic construct
  misc_feature 1..22: note = chemically synthesized
  source 1..22: mol_type = other DNA
ttaaatactgaagaaaacaaga

SEQ ID NO: 3949 - DNA, 22 bp, synthetic construct
  misc_feature 1..22: note = chemically synthesized
  source 1..22: mol_type = other DNA
aatactgaagaaaacaagaagt

SEQ ID NO: 3950 - DNA, 22 bp, synthetic construct
  misc_feature 1..22: note = chemically synthesized
  source 1..22: mol_type = other DNA
aagaaaacaagaagtaataatg

SEQ ID NO: 3951 - DNA, 22 bp, synthetic construct
  misc_feature 1..22: note = chemically synthesized
  source 1..22: mol_type = other DNA
ctttttatatttctttccattt

SEQ ID NO: 3952 - DNA, 22 bp, synthetic construct
  misc_feature 1..22: note = chemically synthesized
  source 1..22: mol_type = other DNA
tttatatttctttccatttgac

SEQ ID NO: 3953 - DNA, 22 bp, synthetic construct
  misc_feature 1..22: note = chemically synthesized
  source 1..22: mol_type = other DNA
ttatatttctttccatttgact

SEQ ID NO: 3954 - DNA, 22 bp, synthetic construct
  misc_feature 1..22: note = chemically synthesized
  source 1..22: mol_type = other DNA
tatatttctttccatttgactt

SEQ ID NO: 3955 - DNA, 22 bp, synthetic construct
  misc_feature 1..22: note = chemically synthesized
  source 1..22: mol_type = other DNA
atatttctttccatttgactta

SEQ ID NO: 3956 - DNA, 22 bp, synthetic construct
  misc_feature 1..22: note = chemically synthesized
  source 1..22: mol_type = other DNA
tatttctttccatttgacttag

SEQ ID NO: 3957 - DNA, 22 bp, synthetic construct
  misc_feature 1..22: note = chemically synthesized
  source 1..22: mol_type = other DNA
ctttccatttgacttagattat

SEQ ID NO: 3958 - DNA, 22 bp, synthetic construct
  misc_feature 1..22: note = chemically synthesized
  source 1..22: mol_type = other DNA
tttccatttgacttagattatg

SEQ ID NO: 3959 - DNA, 22 bp, synthetic construct
  misc_feature 1..22: note = chemically synthesized
  source 1..22: mol_type = other DNA
tccatttgacttagattatgca

SEQ ID NO: 3960 - DNA, 22 bp, synthetic construct
  misc_feature 1..22: note = chemically synthesized
  source 1..22: mol_type = other DNA
ccatttgacttagattatgcat

SEQ ID NO: 3961 - DNA, 22 bp, synthetic construct
  misc_feature 1..22: note = chemically synthesized
  source 1..22: mol_type = other DNA
catttgacttagattatgcatt

SEQ ID NO: 3962 - DNA, 22 bp, synthetic construct
  misc_feature 1..22: note = chemically synthesized
  source 1..22: mol_type = other DNA
gacttagattatgcatttgttt

SEQ ID NO: 3963 - DNA, 22 bp, synthetic construct
  misc_feature 1..22: note = chemically synthesized
  source 1..22: mol_type = other DNA
acttagattatgcatttgtttc

SEQ ID NO: 3964 - DNA, 22 bp, synthetic construct
  misc_feature 1..22: note = chemically synthesized
  source 1..22: mol_type = other DNA
agattatgcatttgtttcaaaa

SEQ ID NO: 3965 - DNA, 22 bp, synthetic construct
  misc_feature 1..22: note = chemically synthesized
  source 1..22: mol_type = other DNA
gattatgcatttgtttcaaaat

SEQ ID NO: 3966 - DNA, 22 bp, synthetic construct
  misc_feature 1..22: note = chemically synthesized
  source 1..22: mol_type = other DNA
tgcatttgtttcaaaatattgg

SEQ ID NO: 3967 - DNA, 22 bp, synthetic construct
  misc_feature 1..22: note = chemically synthesized
  source 1..22: mol_type = other DNA
gtttcaaaatattgggctctga

SEQ ID NO: 3968 - DNA, 22 bp, synthetic construct
  misc_feature 1..22: note = chemically synthesized
  source 1..22: mol_type = other DNA
tttcaaaatattgggctctgat

SEQ ID NO: 3969 - DNA, 22 bp, synthetic construct
  misc_feature 1..22: note = chemically synthesized
  source 1..22: mol_type = other DNA
caaaatattgggctctgattcc

SEQ ID NO: 3970 - DNA, 22 bp, synthetic construct
  misc_feature 1..22: note = chemically synthesized
  source 1..22: mol_type = other DNA
aaaatattgggctctgattcct

SEQ ID NO: 3971 - DNA, 22 bp, synthetic construct
  misc_feature 1..22: note = chemically synthesized
  source 1..22: mol_type = other DNA
ggctctgattcctacagaaaaa

SEQ ID NO: 3972 - DNA, 22 bp, synthetic construct
  misc_feature 1..22: note = chemically synthesized
  source 1..22: mol_type = other DNA
tgattcctacagaaaaactcag

SEQ ID NO: 3973 - DNA, 22 bp, synthetic construct
  misc_feature 1..22: note = chemically synthesized
  source 1..22: mol_type = other DNA
attcctacagaaaaactcagga

SEQ ID NO: 3974 - DNA, 22 bp, synthetic construct
  misc_feature 1..22: note = chemically synthesized
  source 1..22: mol_type = other DNA
ctacagaaaaactcaggatgat

SEQ ID NO: 3975 - DNA, 22 bp, synthetic construct
  misc_feature 1..22: note = chemically synthesized
  source 1..22: mol_type = other DNA
cagaaaaactcaggatgatgtt

SEQ ID NO: 3976 - DNA, 22 bp, synthetic construct
  misc_feature 1..22: note = chemically synthesized
  source 1..22: mol_type = other DNA
aggatgatgttcaattatttct

SEQ ID NO: 3977 - DNA, 22 bp, synthetic construct
  misc_feature 1..22: note = chemically synthesized
  source 1..22: mol_type = other DNA
aattatttcttctgcctttaaa

SEQ ID NO: 3978 - DNA, 22 bp, synthetic construct
  misc_feature 1..22: note = chemically synthesized
  source 1..22: mol_type = other DNA
tttcttctgcctttaaacagaa

SEQ ID NO: 3979 - DNA, 22 bp, synthetic construct
  misc_feature 1..22: note = chemically synthesized
  source 1..22: mol_type = other DNA
cttctgcctttaaacagaagaa

SEQ ID NO: 3980 - DNA, 22 bp, synthetic construct
  misc_feature 1..22: note = chemically synthesized
  source 1..22: mol_type = other DNA
ttctgcctttaaacagaagaat

SEQ ID NO: 3981 - DNA, 22 bp, synthetic construct
  misc_feature 1..22: note = chemically synthesized
  source 1..22: mol_type = other DNA
ctgcctttaaacagaagaataa

SEQ ID NO: 3982 - DNA, 22 bp, synthetic construct
  misc_feature 1..22: note = chemically synthesized
  source 1..22: mol_type = other DNA
tgcctttaaacagaagaataat

SEQ ID NO: 3983 - DNA, 22 bp, synthetic construct
  misc_feature 1..22: note = chemically synthesized
  source 1..22: mol_type = other DNA
cctttaaacagaagaataattc

SEQ ID NO: 3984 - DNA, 22 bp, synthetic construct
  misc_feature 1..22: note = chemically synthesized
  source 1..22: mol_type = other DNA
taaacagaagaataattcaatt

SEQ ID NO: 3985 - DNA, 22 bp, synthetic construct
  misc_feature 1..22: note = chemically synthesized
  source 1..22: mol_type = other DNA
aaacagaagaataattcaatta

SEQ ID NO: 3986 - DNA, 22 bp, synthetic construct
  misc_feature 1..22: note = chemically synthesized
  source 1..22: mol_type = other DNA
aacagaagaataattcaattac

SEQ ID NO: 3987 - DNA, 22 bp, synthetic construct
  misc_feature 1..22: note = chemically synthesized
  source 1..22: mol_type = other DNA
aattaccaagaatactatttta

SEQ ID NO: 3988 - DNA, 22 bp, synthetic construct
  misc_feature 1..22: note = chemically synthesized
  source 1..22: mol_type = other DNA
ccaagaatactattttaaaaat

SEQ ID NO: 3989 - DNA, 22 bp, synthetic construct
  misc_feature 1..22: note = chemically synthesized
  source 1..22: mol_type = other DNA
ttttaaaaattattaaatattt

SEQ ID NO: 3990 - DNA, 22 bp, synthetic construct
  misc_feature 1..22: note = chemically synthesized
  source 1..22: mol_type = other DNA
taaaaattattaaatatttata

SEQ ID NO: 3991 - DNA, 22 bp, synthetic construct
  misc_feature 1..22: note = chemically synthesized
  source 1..22: mol_type = other DNA
aaaaattattaaatatttatag

SEQ ID NO: 3992 - DNA, 22 bp, synthetic construct
  misc_feature 1..22: note = chemically synthesized
  source 1..22: mol_type = other DNA
aaaattattaaatatttatagc

SEQ ID NO: 3993 - DNA, 22 bp, synthetic construct
  misc_feature 1..22: note = chemically synthesized
  source 1..22: mol_type = other DNA
ttaaatatttatagccttatat

SEQ ID NO: 3994 - DNA, 22 bp, synthetic construct
  misc_feature 1..22: note = chemically synthesized
  source 1..22: mol_type = other DNA
aatatttatagccttatattca

SEQ ID NO: 3995 - DNA, 22 bp, synthetic construct
  misc_feature 1..22: note = chemically synthesized
  source 1..22: mol_type = other DNA
atagccttatattcaaacttag

SEQ ID NO: 3996 - DNA, 22 bp, synthetic construct
  misc_feature 1..22: note = chemically synthesized
  source 1..22: mol_type = other DNA
tagccttatattcaaacttaga

SEQ ID NO: 3997 - DNA, 22 bp, synthetic construct
  misc_feature 1..22: note = chemically synthesized
  source 1..22: mol_type = other DNA
atattcaaacttagataatatc

SEQ ID NO: 3998 - DNA, 22 bp, synthetic construct
  misc_feature 1..22: note = chemically synthesized
  source 1..22: mol_type = other DNA
tattcaaacttagataatatct

SEQ ID NO: 3999 - DNA, 22 bp, synthetic construct
  misc_feature 1..22: note = chemically synthesized
  source 1..22: mol_type = other DNA
aaacttagataatatctaatac

SEQ ID NO: 4000 - DNA, 22 bp, synthetic construct
  misc_feature 1..22: note = chemically synthesized
  source 1..22: mol_type = other DNA
agataatatctaatactctttt

SEQ ID NO: 4001 - DNA, 22 bp, synthetic construct
  misc_feature 1..22: note = chemically synthesized
  source 1..22: mol_type = other DNA
gataatatctaatactctttta

SEQ ID NO: 4002 - DNA, 22 bp, synthetic construct
  misc_feature 1..22: note = chemically synthesized
  source 1..22: mol_type = other DNA
atactcttttagtgtctatcaa

SEQ ID NO: 4003 - DNA, 22 bp, synthetic construct
  misc_feature 1..22: note = chemically synthesized
  source 1..22: mol_type = other DNA
ttttagtgtctatcaacagcaa

SEQ ID NO: 4004 - DNA, 22 bp, synthetic construct
  misc_feature 1..22: note = chemically synthesized
  source 1..22: mol_type = other DNA
ttagtgtctatcaacagcaacc

SEQ ID NO: 4005 - DNA, 22 bp, synthetic construct
  misc_feature 1..22: note = chemically synthesized
  source 1..22: mol_type = other DNA
tagtgtctatcaacagcaacca

SEQ ID NO: 4006 - DNA, 22 bp, synthetic construct
  misc_feature 1..22: note = chemically synthesized
  source 1..22: mol_type = other DNA
agtgtctatcaacagcaaccaa

SEQ ID NO: 4007 - DNA, 22 bp, synthetic construct
  misc_feature 1..22: note = chemically synthesized
  source 1..22: mol_type = other DNA
gtgtctatcaacagcaaccaag

SEQ ID NO: 4008 - DNA, 22 bp, synthetic construct
  misc_feature 1..22: note = chemically synthesized
  source 1..22: mol_type = other DNA
tcaacagcaaccaagaagacag

SEQ ID NO: 4009 - DNA, 22 bp, synthetic construct
  misc_feature 1..22: note = chemically synthesized
  source 1..22: mol_type = other DNA
aaatgaaaataaatataaatac

SEQ ID NO: 4010 - DNA, 22 bp, synthetic construct
  misc_feature 1..22: note = chemically synthesized
  source 1..22: mol_type = other DNA
tatttatgagatcaacagcaca

SEQ ID NO: 4011 - DNA, 22 bp, synthetic construct
  misc_feature 1..22: note = chemically synthesized
  source 1..22: mol_type = other DNA
tttatgagatcaacagcacagg

SEQ ID NO: 4012 - DNA, 22 bp, synthetic construct
  misc_feature 1..22: note = chemically synthesized
  source 1..22: mol_type = other DNA
atgagatcaacagcacaggttt

SEQ ID NO: 4013 - DNA, 22 bp, synthetic construct
  misc_feature 1..22: note = chemically synthesized
  source 1..22: mol_type = other DNA
tgagatcaacagcacaggtttt

SEQ ID NO: 4014 - DNA, 22 bp, synthetic construct
  misc_feature 1..22: note = chemically synthesized
  source 1..22: mol_type = other DNA
tgtggtttttaaataaagcata

SEQ ID NO: 4015 - DNA, 22 bp, synthetic construct
  misc_feature 1..22: note = chemically synthesized
  source 1..22: mol_type = other DNA
gtggtttttaaataaagcatag

SEQ ID NO: 4016 - DNA, 22 bp, synthetic construct
  misc_feature 1..22: note = chemically synthesized
  source 1..22: mol_type = other DNA
tggtttttaaataaagcatagt

SEQ ID NO: 4017 - DNA, 22 bp, synthetic construct
  misc_feature 1..22: note = chemically synthesized
  source 1..22: mol_type = other DNA
ttaaataaagcatagtgcaatg

SEQ ID NO: 4018 - DNA, 22 bp, synthetic construct
  misc_feature 1..22: note = chemically synthesized
  source 1..22: mol_type = other DNA
taaataaagcatagtgcaatgg

SEQ ID NO: 4019 - DNA, 22 bp, synthetic construct
  misc_feature 1..22: note = chemically synthesized
  source 1..22: mol_type = other DNA
aaataaagcatagtgcaatgga

SEQ ID NO: 4020 - DNA, 22 bp, synthetic construct
  misc_feature 1..22: note = chemically synthesized
  source 1..22: mol_type = other DNA
aataaagcatagtgcaatggat

SEQ ID NO: 4021 - DNA, 22 bp, synthetic construct
  misc_feature 1..22: note = chemically synthesized
  source 1..22: mol_type = other DNA
tgggatagttatgaattcaatc

SEQ ID NO: 4022 - DNA, 22 bp, synthetic construct
  misc_feature 1..22: note = chemically synthesized
  source 1..22: mol_type = other DNA
gggatagttatgaattcaatct

SEQ ID NO: 4023 - DNA, 22 bp, synthetic construct
  misc_feature 1..22: note = chemically synthesized
  source 1..22: mol_type = other DNA
ggatagttatgaattcaatctt

SEQ ID NO: 4024 - DNA, 22 bp, synthetic construct
  misc_feature 1..22: note = chemically synthesized
  source 1..22: mol_type = other DNA
tgaattcaatcttcaaccctat

SEQ ID NO: 4025 - DNA, 22 bp, synthetic construct
  misc_feature 1..22: note = chemically synthesized
  source 1..22: mol_type = other DNA
aatcttcaaccctattctgtga

SEQ ID NO: 4026 - DNA, 22 bp, synthetic construct
  misc_feature 1..22: note = chemically synthesized
  source 1..22: mol_type = other DNA
caaccctattctgtgaagtttc

SEQ ID NO: 4027 - DNA, 22 bp, synthetic construct
  misc_feature 1..22: note = chemically synthesized
  source 1..22: mol_type = other DNA
aaccctattctgtgaagtttca

SEQ ID NO: 4028 - DNA, 22 bp, synthetic construct
  misc_feature 1..22: note = chemically synthesized
  source 1..22: mol_type = other DNA
ttctgtgaagtttcagtcactc

SEQ ID NO: 4029 - DNA, 22 bp, synthetic construct
  misc_feature 1..22: note = chemically synthesized
  source 1..22: mol_type = other DNA
tgtgaagtttcagtcactctaa

SEQ ID NO: 4030 - DNA, 22 bp, synthetic construct
  misc_feature 1..22: note = chemically synthesized
  source 1..22: mol_type = other DNA
tgaagtttcagtcactctaagt

SEQ ID NO: 4031 - DNA, 22 bp, synthetic construct
  misc_feature 1..22: note = chemically synthesized
  source 1..22: mol_type = other DNA
cagtcactctaagttactttgc

SEQ ID NO: 4032 - DNA, 22 bp, synthetic construct
  misc_feature 1..22: note = chemically synthesized
  source 1..22: mol_type = other DNA
agtcactctaagttactttgca

SEQ ID NO: 4033 - DNA, 22 bp, synthetic construct
  misc_feature 1..22: note = chemically synthesized
  source 1..22: mol_type = other DNA
taagttactttgcactttcctt

SEQ ID NO: 4034 - DNA, 22 bp, synthetic construct
  misc_feature 1..22: note = chemically synthesized
  source 1..22: mol_type = other DNA
agttactttgcactttccttag

SEQ ID NO: 4035 - DNA, 22 bp, synthetic construct
  misc_feature 1..22: note = chemically synthesized
  source 1..22: mol_type = other DNA
ctttgcactttccttagtgcgc

SEQ ID NO: 4036 - DNA, 22 bp, synthetic construct
  misc_feature 1..22: note = chemically synthesized
  source 1..22: mol_type = other DNA
tgcactttccttagtgcgcaaa

SEQ ID NO: 4037 - DNA, 22 bp, synthetic construct
  misc_feature 1..22: note = chemically synthesized
  source 1..22: mol_type = other DNA
gcactttccttagtgcgcaaaa

SEQ ID NO: 4038 - DNA, 22 bp, synthetic construct
  misc_feature 1..22: note = chemically synthesized
  source 1..22: mol_type = other DNA
cactttccttagtgcgcaaaag

SEQ ID NO: 4039 - DNA, 22 bp, synthetic construct
  misc_feature 1..22: note = chemically synthesized
  source 1..22: mol_type = other DNA
tccttagtgcgcaaaagaaaat

SEQ ID NO: 4040 - DNA, 22 bp, synthetic construct
  misc_feature 1..22: note = chemically synthesized
  source 1..22: mol_type = other DNA
ccttagtgcgcaaaagaaaatt

SEQ ID NO: 4041 - DNA, 22 bp, synthetic construct
  misc_feature 1..22: note = chemically synthesized
  source 1..22: mol_type = other DNA
cttagtgcgcaaaagaaaatta

SEQ ID NO: 4042 - DNA, 22 bp, synthetic construct
  misc_feature 1..22: note = chemically synthesized
  source 1..22: mol_type = other DNA
agtgcgcaaaagaaaattacag

SEQ ID NO: 4043 - DNA, 22 bp, synthetic construct
  misc_feature 1..22: note = chemically synthesized
  source 1..22: mol_type = other DNA
gtgcgcaaaagaaaattacagt

SEQ ID NO: 4044 - DNA, 22 bp, synthetic construct
  misc_feature 1..22: note = chemically synthesized
  source 1..22: mol_type = other DNA
cagtcactaaacaattctgacc

SEQ ID NO: 4045 - DNA, 22 bp, synthetic construct
  misc_feature 1..22: note = chemically synthesized
  source 1..22: mol_type = other DNA
aacaattctgaccttttttttt

SEQ ID NO: 4046 - DNA, 22 bp, synthetic construct
  misc_feature 1..22: note = chemically synthesized
  source 1..22: mol_type = other DNA
tgacctttttttttttttacct

SEQ ID NO: 4047 - DNA, 22 bp, synthetic construct
  misc_feature 1..22: note = chemically synthesized
  source 1..22: mol_type = other DNA
acctttttttttttttacctag

SEQ ID NO: 4048 - DNA, 22 bp, synthetic construct
  misc_feature 1..22: note = chemically synthesized
  source 1..22: mol_type = other DNA
tttttttttttacctaggatgt

SEQ ID NO: 4049 - DNA, 22 bp, synthetic construct
  misc_feature 1..22: note = chemically synthesized
  source 1..22: mol_type = other DNA
ttttttttttacctaggatgtt

SEQ ID NO: 4050 - DNA, 22 bp, synthetic construct
  misc_feature 1..22: note = chemically synthesized
  source 1..22: mol_type = other DNA
tttttttttacctaggatgttt

SEQ ID NO: 4051 - DNA, 22 bp, synthetic construct
  misc_feature 1..22: note = chemically synthesized
  source 1..22: mol_type = other DNA
ttttttttacctaggatgtttg

SEQ ID NO: 4052 - DNA, 22 bp, synthetic construct
  misc_feature 1..22: note = chemically synthesized
  source 1..22: mol_type = other DNA
tttttttacctaggatgtttga

SEQ ID NO: 4053 - DNA, 22 bp, synthetic construct
  misc_feature 1..22: note = chemically synthesized
  source 1..22: mol_type = other DNA
ttttttacctaggatgtttgaa

SEQ ID NO: 4054 - DNA, 22 bp, synthetic construct
  misc_feature 1..22: note = chemically synthesized
  source 1..22: mol_type = other DNA
tttttacctaggatgtttgaat

SEQ ID NO: 4055 - DNA, 22 bp, synthetic construct
  misc_feature 1..22: note = chemically synthesized
  source 1..22: mol_type = other DNA
ttttacctaggatgtttgaatt

SEQ ID NO: 4056 - DNA, 22 bp, synthetic construct
  misc_feature 1..22: note = chemically synthesized
  source 1..22: mol_type = other DNA
tttacctaggatgtttgaattt

SEQ ID NO: 4057 - DNA, 22 bp, synthetic construct
  misc_feature 1..22: note = chemically synthesized
  source 1..22: mol_type = other DNA
ttacctaggatgtttgaatttt

SEQ ID NO: 4058 - DNA, 22 bp, synthetic construct
  misc_feature 1..22: note = chemically synthesized
  source 1..22: mol_type = other DNA
tacctaggatgtttgaatttta

SEQ ID NO: 4059 - DNA, 22 bp, synthetic construct
  misc_feature 1..22: note = chemically synthesized
  source 1..22: mol_type = other DNA
acctaggatgtttgaattttat

SEQ ID NO: 4060 - DNA, 22 bp, synthetic construct
  misc_feature 1..22: note = chemically synthesized
  source 1..22: mol_type = other DNA
cctaggatgtttgaattttatt

SEQ ID NO: 4061 - DNA, 22 bp, synthetic construct
  misc_feature 1..22: note = chemically synthesized
  source 1..22: mol_type = other DNA
ggatgtttgaattttattaata

SEQ ID NO: 4062 - DNA, 22 bp, synthetic construct
  misc_feature 1..22: note = chemically synthesized
  source 1..22: mol_type = other DNA
gaattttattaataagataacc

SEQ ID NO: 4063 - DNA, 22 bp, synthetic construct
  misc_feature 1..22: note = chemically synthesized
  source 1..22: mol_type = other DNA
aattttattaataagataacct

SEQ ID NO: 4064 - DNA, 22 bp, synthetic construct
  misc_feature 1..22: note = chemically synthesized
  source 1..22: mol_type = other DNA
tattaataagataaccttgtaa

SEQ ID NO: 4065 - DNA, 22 bp, synthetic construct
  misc_feature 1..22: note = chemically synthesized
  source 1..22: mol_type = other DNA
attaataagataaccttgtaag

SEQ ID NO: 4066 - DNA, 22 bp, synthetic construct
  misc_feature 1..22: note = chemically synthesized
  source 1..22: mol_type = other DNA
ttaataagataaccttgtaaga

SEQ ID NO: 4067 - DNA, 22 bp, synthetic construct
  misc_feature 1..22: note = chemically synthesized
  source 1..22: mol_type = other DNA
ataagataaccttgtaagactt

SEQ ID NO: 4068 - DNA, 22 bp, synthetic construct
  misc_feature 1..22: note = chemically synthesized
  source 1..22: mol_type = other DNA
gtaagacttcacaaatacaaaa

SEQ ID NO: 4069 - DNA, 22 bp, synthetic construct
  misc_feature 1..22: note = chemically synthesized
  source 1..22: mol_type = other DNA
taagacttcacaaatacaaaat

SEQ ID NO: 4070 - DNA, 22 bp, synthetic construct
  misc_feature 1..22: note = chemically synthesized
  source 1..22: mol_type = other DNA
cacaaatacaaaatactatgcc

SEQ ID NO: 4071 - DNA, 22 bp, synthetic construct
  misc_feature 1..22: note = chemically synthesized
  source 1..22: mol_type = other DNA
acaaatacaaaatactatgcca

SEQ ID NO: 4072 - DNA, 22 bp, synthetic construct
  misc_feature 1..22: note = chemically synthesized
  source 1..22: mol_type = other DNA
tgccattttagaaataaatgcc

SEQ ID NO: 4073 - DNA, 22 bp, synthetic construct
  misc_feature 1..22: note = chemically synthesized
  source 1..22: mol_type = other DNA
tagaaataaatgccaaaataat

SEQ ID NO: 4074 - DNA, 22 bp, synthetic construct
  misc_feature 1..22: note = chemically synthesized
  source 1..22: mol_type = other DNA
agaaataaatgccaaaataatt

SEQ ID NO: 4075 - DNA, 22 bp, synthetic construct
  misc_feature 1..22: note = chemically synthesized
  source 1..22: mol_type = other DNA
gaaataaatgccaaaataattc

SEQ ID NO: 4076 - DNA, 22 bp, synthetic construct
  misc_feature 1..22: note = chemically synthesized
  source 1..22: mol_type = other DNA
tttaaagatgcagagtttacta

SEQ ID NO: 4077 - DNA, 22 bp, synthetic construct
  misc_feature 1..22: note = chemically synthesized
  source 1..22: mol_type = other DNA
taaagatgcagagtttactaaa

SEQ ID NO: 4078 - DNA, 22 bp, synthetic construct
  misc_feature 1..22: note = chemically synthesized
  source 1..22: mol_type = other DNA
aaagatgcagagtttactaaaa

SEQ ID NO: 4079 - DNA, 22 bp, synthetic construct
  misc_feature 1..22: note = chemically synthesized
  source 1..22: mol_type = other DNA
aagatgcagagtttactaaaac

SEQ ID NO: 4080 - DNA, 22 bp, synthetic construct
  misc_feature 1..22: note = chemically synthesized
  source 1..22: mol_type = other DNA
actaaaactttattttactggg

SEQ ID NO: 4081 - DNA, 22 bp, synthetic construct
  misc_feature 1..22: note = chemically synthesized
  source 1..22: mol_type = other DNA
ctaaaactttattttactggga

SEQ ID NO: 4082 - DNA, 22 bp, synthetic construct
  misc_feature 1..22: note = chemically synthesized
  source 1..22: mol_type = other DNA
aaactttattttactgggaaaa

SEQ ID NO: 4083 - DNA, 22 bp, synthetic construct
  misc_feature 1..22: note = chemically synthesized
  source 1..22: mol_type = other DNA
tattttactgggaaaatagaat

SEQ ID NO: 4084 - DNA, 22 bp, synthetic construct
  misc_feature 1..22: note = chemically synthesized
  source 1..22: mol_type = other DNA
attttactgggaaaatagaata

SEQ ID NO: 4085 - DNA, 22 bp, synthetic construct
  misc_feature 1..22: note = chemically synthesized
  source 1..22: mol_type = other DNA
ttttactgggaaaatagaataa

SEQ ID NO: 4086 - DNA, 22 bp, synthetic construct
  misc_feature 1..22: note = chemically synthesized
  source 1..22: mol_type = other DNA
tactgggaaaatagaataaaag

SEQ ID NO: 4087 - DNA, 22 bp, synthetic construct
  misc_feature 1..22: note = chemically synthesized
  source 1..22: mol_type = other DNA
actgggaaaatagaataaaagt

SEQ ID NO: 4088 - DNA, 22 bp, synthetic construct
  misc_feature 1..22: note = chemically synthesized
  source 1..22: mol_type = other DNA
ctgggaaaatagaataaaagtt

SEQ ID NO: 4089 - DNA, 22 bp, synthetic construct
  misc_feature 1..22: note = chemically synthesized
  source 1..22: mol_type = other DNA
ggaaaatagaataaaagttgaa

SEQ ID NO: 4090 - DNA, 22 bp, synthetic construct
  misc_feature 1..22: note = chemically synthesized
  source 1..22: mol_type = other DNA
aacaatagaaaaatggatttct

SEQ ID NO: 4091 - DNA, 22 bp, synthetic construct
  misc_feature 1..22: note = chemically synthesized
  source 1..22: mol_type = other DNA
cttacgtgcatctcgacgaaac

SEQ ID NO: 4092 - DNA, 22 bp, synthetic construct
  misc_feature 1..22: note = chemically synthesized
  source 1..22: mol_type = other DNA
ttacgtgcatctcgacgaaaca

SEQ ID NO: 4093 - DNA, 22 bp, synthetic construct
  misc_feature 1..22: note = chemically synthesized
  source 1..22: mol_type = other DNA
acgtgcatctcgacgaaacaca

SEQ ID NO: 4094 - DNA, 22 bp, synthetic construct
  misc_feature 1..22: note = chemically synthesized
  source 1..22: mol_type = other DNA
cgtgcatctcgacgaaacacac

SEQ ID NO: 4095 - DNA, 22 bp, synthetic construct
  misc_feature 1..22: note = chemically synthesized
  source 1..22: mol_type = other DNA
gacgaaacacacccctggaata

SEQ ID NO: 4096 - DNA, 22 bp, synthetic construct
  misc_feature 1..22: note = chemically synthesized
  source 1..22: mol_type = other DNA
gaataagccgagctaaagagaa

SEQ ID NO: 4097 - DNA, 22 bp, synthetic construct
  misc_feature 1..22: note = chemically synthesized
  source 1..22: mol_type = other DNA
aagagaaaaagaagggaaataa

SEQ ID NO: 4098 - DNA, 22 bp, synthetic construct
  misc_feature 1..22: note = chemically synthesized
  source 1..22: mol_type = other DNA
cccacttcattgtgccaaaggc

SEQ ID NO: 4099 - DNA, 22 bp, synthetic construct
  misc_feature 1..22: note = chemically synthesized
  source 1..22: mol_type = other DNA
cattgtgccaaaggcgtgtggg

SEQ ID NO: 4100 - DNA, 22 bp, synthetic construct
  misc_feature 1..22: note = chemically synthesized
  source 1..22: mol_type = other DNA
attgtgccaaaggcgtgtgggg

SEQ ID NO: 4101 - DNA, 22 bp, synthetic construct
  misc_feature 1..22: note = chemically synthesized
  source 1..22: mol_type = other DNA
tgccaaaggcgtgtggggttga

SEQ ID NO: 4102 - DNA, 22 bp, synthetic construct
  misc_feature 1..22: note = chemically synthesized
  source 1..22: mol_type = other DNA
acagaagagaaaagctaggaca

SEQ ID NO: 4103 - DNA, 22 bp, synthetic construct
  misc_feature 1..22: note = chemically synthesized
  source 1..22: mol_type = other DNA
ggacaaacggagggaaattagc

SEQ ID NO: 4104 - DNA, 20 bp, synthetic construct
  misc_feature 1..20: note = chemically synthesized
  source 1..20: mol_type = other DNA
aataaatttacccaacaaaa

SEQ ID NO: 4105 - DNA, 20 bp, synthetic construct
  misc_feature 1..20: note = chemically synthesized
  source 1..20: mol_type = other DNA
aatctcttaaaatcataaaa

SEQ ID NO: 4106 - DNA, 20 bp, synthetic construct
  misc_feature 1..20: note = chemically synthesized
  source 1..20: mol_type = other DNA
aaatcataaaaaagtaaaat

SEQ ID NO: 4107 - DNA, 20 bp, synthetic construct
  misc_feature 1..20: note = chemically synthesized
  source 1..20: mol_type = other DNA
gtaaaattagcttttaaaaa

SEQ ID NO: 4108 - DNA, 20 bp, synthetic construct
  misc_feature 1..20: note = chemically synthesized
  source 1..20: mol_type = other DNA
taaaattagcttttaaaaac

SEQ ID NO: 4109 - DNA, 20 bp, synthetic construct
  misc_feature 1..20: note = chemically synthesized
  source 1..20: mol_type = other DNA
aattagcttttaaaaacagg

SEQ ID NO: 4110 - DNA, 20 bp, synthetic construct
  misc_feature 1..20: note = chemically synthesized
  source 1..20: mol_type = other DNA
ttaaaaacaggtagtcacca

SEQ ID NO: 4111 - DNA, 20 bp, synthetic construct
  misc_feature 1..20: note = chemically synthesized
  source 1..20: mol_type = other DNA
tcaccatagcattgaatgtg

SEQ ID NO: 4112 - DNA, 20 bp, synthetic construct
  misc_feature 1..20: note = chemically synthesized
  source 1..20: mol_type = other DNA
tgaatgtgtagtttataata

SEQ ID NO: 4113 - DNA, 20 bp, synthetic construct
  misc_feature 1..20: note = chemically synthesized
  source 1..20: mol_type = other DNA
gtgtagtttataatacagca

SEQ ID NO: 4114 - DNA, 20 bp, synthetic construct
  misc_feature 1..20: note = chemically synthesized
  source 1..20: mol_type = other DNA
acaatttcaaattacctatt

SEQ ID NO: 4115 - DNA, 20 bp, synthetic construct
  misc_feature 1..20: note = chemically synthesized
  source 1..20: mol_type = other DNA
tttcaaattacctattaagt

SEQ ID NO: 4116 - DNA, 20 bp, synthetic construct
  misc_feature 1..20: note = chemically synthesized
  source 1..20: mol_type = other DNA
ctcatttctttgatttcatt

SEQ ID NO: 4117 - DNA, 20 bp, synthetic construct
  misc_feature 1..20: note = chemically synthesized
  source 1..20: mol_type = other DNA
agcattgatctaactcaatg

SEQ ID NO: 4118 - DNA, 20 bp, synthetic construct
  misc_feature 1..20: note = chemically synthesized
  source 1..20: mol_type = other DNA
attgatctaactcaatgtgg

SEQ ID NO: 4119 - DNA, 20 bp, synthetic construct
  misc_feature 1..20: note = chemically synthesized
  source 1..20: mol_type = other DNA
gatctaactcaatgtggaag

SEQ ID NO: 4120 - DNA, 20 bp, synthetic construct
  misc_feature 1..20: note = chemically synthesized
  source 1..20: mol_type = other DNA
atctaactcaatgtggaaga

SEQ ID NO: 4121 - DNA, 20 bp, synthetic construct
  misc_feature 1..20: note = chemically synthesized
  source 1..20: mol_type = other DNA
gaagaaggttacattcgtgc

SEQ ID NO: 4122 - DNA, 20 bp, synthetic construct
  misc_feature 1..20: note = chemically synthesized
  source 1..20: mol_type = other DNA
tacattcgtgcaagttaaca

SEQ ID NO: 4123 - DNA, 20 bp, synthetic construct
  misc_feature 1..20: note = chemically synthesized
  source 1..20: mol_type = other DNA
cctaccaaccttaccttttc

SEQ ID NO: 4124 - DNA, 20 bp, synthetic construct
  misc_feature 1..20: note = chemically synthesized
  source 1..20: mol_type = other DNA
ctaccaaccttaccttttct

SEQ ID NO: 4125 - DNA, 20 bp, synthetic construct
  misc_feature 1..20: note = chemically synthesized
  source 1..20: mol_type = other DNA
taccttttctgggcaaatat

SEQ ID NO: 4126 - DNA, 20 bp, synthetic construct
  misc_feature 1..20: note = chemically synthesized
  source 1..20: mol_type = other DNA
tgggcaaatattggtatata

SEQ ID NO: 4127 - DNA, 20 bp, synthetic construct
  misc_feature 1..20: note = chemically synthesized
  source 1..20: mol_type = other DNA
ggcaaatattggtatatata

SEQ ID NO: 4128 - DNA, 20 bp, synthetic construct
  misc_feature 1..20: note = chemically synthesized
  source 1..20: mol_type = other DNA
atattggtatatatagagtt

SEQ ID NO: 4129 - DNA, 20 bp, synthetic construct
  misc_feature 1..20: note = chemically synthesized
  source 1..20: mol_type = other DNA
ttggtatatatagagttaag

SEQ ID NO: 4130 - DNA, 20 bp, synthetic construct
  misc_feature 1..20: note = chemically synthesized
  source 1..20: mol_type = other DNA
atatatagagttaagaagtc

SEQ ID NO: 4131 - DNA, 20 bp, synthetic construct
  misc_feature 1..20: note = chemically synthesized
  source 1..20: mol_type = other DNA
tatatagagttaagaagtct

SEQ ID NO: 4132 - DNA, 20 bp, synthetic construct
  misc_feature 1..20: note = chemically synthesized
  source 1..20: mol_type = other DNA
aagaagtctaggtctgcttc

SEQ ID NO: 4133 - DNA, 20 bp, synthetic construct
  misc_feature 1..20: note = chemically synthesized
  source 1..20: mol_type = other DNA
aagtctaggtctgcttccag

SEQ ID NO: 4134 - DNA, 20 bp, synthetic construct
  misc_feature 1..20: note = chemically synthesized
  source 1..20: mol_type = other DNA
ggtctgcttccagaagaaaa

SEQ ID NO: 4135 - DNA, 20 bp, synthetic construct
  misc_feature 1..20: note = chemically synthesized
  source 1..20: mol_type = other DNA
gttgcttgaaattgaaaatc

SEQ ID NO: 4136 - DNA, 20 bp, synthetic construct
  misc_feature 1..20: note = chemically synthesized
  source 1..20: mol_type = other DNA
agataaaaatgttcacaatt

SEQ ID NO: 4137 - DNA, 20 bp, synthetic construct
  misc_feature 1..20: note = chemically synthesized
  source 1..20: mol_type = other DNA
ccttctttttattgttcctc

SEQ ID NO: 4138 - DNA, 20 bp, synthetic construct
  misc_feature 1..20: note = chemically synthesized
  source 1..20: mol_type = other DNA
gttcctctagttatttcctc

SEQ ID NO: 4139 - DNA, 20 bp, synthetic construct
  misc_feature 1..20: note = chemically synthesized
  source 1..20: mol_type = other DNA
tatttcctccagaattgatc

SEQ ID NO: 4140 - DNA, 20 bp, synthetic construct
  misc_feature 1..20: note = chemically synthesized
  source 1..20: mol_type = other DNA
atcatttgattctctatctc

SEQ ID NO: 4141 - DNA, 20 bp, synthetic construct
  misc_feature 1..20: note = chemically synthesized
  source 1..20: mol_type = other DNA
catttgattctctatctcca

SEQ ID NO: 4142 - DNA, 20 bp, synthetic construct
  misc_feature 1..20: note = chemically synthesized
  source 1..20: mol_type = other DNA
ctatctccagagccaaaatc

SEQ ID NO: 4143 - DNA, 20 bp, synthetic construct
  misc_feature 1..20: note = chemically synthesized
  source 1..20: mol_type = other DNA
aaaatcaagatttgctatgt

SEQ ID NO: 4144 - DNA, 20 bp, synthetic construct
  misc_feature 1..20: note = chemically synthesized
  source 1..20: mol_type = other DNA
gttagacgatgtaaaaattt

SEQ ID NO: 4145 - DNA, 20 bp, synthetic construct
  misc_feature 1..20: note = chemically synthesized
  source 1..20: mol_type = other DNA
gatgtaaaaattttagccaa

SEQ ID NO: 4146 - DNA, 20 bp, synthetic construct
  misc_feature 1..20: note = chemically synthesized
  source 1..20: mol_type = other DNA
ttttagccaatggcctcctt

SEQ ID NO: 4147 - DNA, 20 bp, synthetic construct
  misc_feature 1..20: note = chemically synthesized
  source 1..20: mol_type = other DNA
agccaatggcctccttcagt

SEQ ID NO: 4148 - DNA, 20 bp, synthetic construct
  misc_feature 1..20: note = chemically synthesized
  source 1..20: mol_type = other DNA
gccaatggcctccttcagtt

SEQ ID NO: 4149 - DNA, 20 bp, synthetic construct
  misc_feature 1..20: note = chemically synthesized
  source 1..20: mol_type = other DNA
ggcctccttcagttgggaca

SEQ ID NO: 4150 - DNA, 20 bp, synthetic construct
  misc_feature 1..20: note = chemically synthesized
  source 1..20: mol_type = other DNA
tcagttgggacatggtctta

SEQ ID NO: 4151 - DNA, 20 bp, synthetic construct
  misc_feature 1..20: note = chemically synthesized
  source 1..20: mol_type = other DNA
gtcttaaagactttgtccat

SEQ ID NO: 4152 - DNA, 20 bp, synthetic construct
  misc_feature 1..20: note = chemically synthesized
  source 1..20: mol_type = other DNA
aagactttgtccataagacg

SEQ ID NO: 4153 - DNA, 20 bp, synthetic construct
  misc_feature 1..20: note = chemically synthesized
  source 1..20: mol_type = other DNA
agactttgtccataagacga

SEQ ID NO: 4154 - DNA, 20 bp, synthetic construct
  misc_feature 1..20: note = chemically synthesized
  source 1..20: mol_type = other DNA
gactttgtccataagacgaa

SEQ ID NO: 4155 - DNA, 20 bp, synthetic construct
  misc_feature 1..20: note = chemically synthesized
  source 1..20: mol_type = other DNA
aaaaactcaacatatttgat

SEQ ID NO: 4156 - DNA, 20 bp, synthetic construct
  misc_feature 1..20: note = chemically synthesized
  source 1..20: mol_type = other DNA
tatgatctatcgctgcaaac

SEQ ID NO: 4157 - DNA, 20 bp, synthetic construct
  misc_feature 1..20: note = chemically synthesized
  source 1..20: mol_type = other DNA
gctgcaaaccagtgaaatca

SEQ ID NO: 4158 - DNA, 20 bp, synthetic construct
  misc_feature 1..20: note = chemically synthesized
  source 1..20: mol_type = other DNA
gcaaaccagtgaaatcaaag

SEQ ID NO: 4159 - DNA, 20 bp, synthetic construct
  misc_feature 1..20: note = chemically synthesized
  source 1..20: mol_type = other DNA
aaccagtgaaatcaaagaag

SEQ ID NO: 4160 - DNA, 20 bp, synthetic construct
  misc_feature 1..20: note = chemically synthesized
  source 1..20: mol_type = other DNA
gtgaaatcaaagaagaagaa

SEQ ID NO: 4161 - DNA, 20 bp, synthetic construct
  misc_feature 1..20: note = chemically synthesized
  source 1..20: mol_type = other DNA
tgaaatcaaagaagaagaaa

SEQ ID NO: 4162 - DNA, 20 bp, synthetic construct
  misc_feature 1..20: note = chemically synthesized
  source 1..20: mol_type = other DNA
aaagaagaagaaaaggaact

SEQ ID NO: 4163 - DNA, 20 bp, synthetic construct
  misc_feature 1..20: note = chemically synthesized
  source 1..20: mol_type = other DNA
gaagaagaaaaggaactgag

SEQ ID NO: 4164 - DNA, 20 bp, synthetic construct
  misc_feature 1..20: note = chemically synthesized
  source 1..20: mol_type = other DNA
aagaactacatataaactac

SEQ ID NO: 4165 - DNA, 20 bp, synthetic construct
  misc_feature 1..20: note = chemically synthesized
  source 1..20: mol_type = other DNA
taaactacaagtcaaaaatg

SEQ ID NO: 4166 - DNA, 20 bp, synthetic construct
  misc_feature 1..20: note = chemically synthesized
  source 1..20: mol_type = other DNA
aactacaagtcaaaaatgaa

SEQ ID NO: 4167 - DNA, 20 bp, synthetic construct
  misc_feature 1..20: note = chemically synthesized
  source 1..20: mol_type = other DNA
actacaagtcaaaaatgaag

SEQ ID NO: 4168 - DNA, 20 bp, synthetic construct
  misc_feature 1..20: note = chemically synthesized
  source 1..20: mol_type = other DNA
aagtcaaaaatgaagaggta

SEQ ID NO: 4169 - DNA, 20 bp, synthetic construct
  misc_feature 1..20: note = chemically synthesized
  source 1..20: mol_type = other DNA
gaactcaactcaaaacttga

SEQ ID NO: 4170 - DNA, 20 bp, synthetic construct
  misc_feature 1..20: note = chemically synthesized
  source 1..20: mol_type = other DNA
ctcaaaacttgaaagcctcc

SEQ ID NO: 4171 - DNA, 20 bp, synthetic construct
  misc_feature 1..20: note = chemically synthesized
  source 1..20: mol_type = other DNA
aaaacttgaaagcctcctag

SEQ ID NO: 4172 - DNA, 20 bp, synthetic construct
  misc_feature 1..20: note = chemically synthesized
  source 1..20: mol_type = other DNA
aaaaattctacttcaacaaa

SEQ ID NO: 4173 - DNA, 20 bp, synthetic construct
  misc_feature 1..20: note = chemically synthesized
  source 1..20: mol_type = other DNA
tcaacaaaaagtgaaatatt

SEQ ID NO: 4174 - DNA, 20 bp, synthetic construct
  misc_feature 1..20: note = chemically synthesized
  source 1..20: mol_type = other DNA
acaaaaagtgaaatatttag

SEQ ID NO: 4175 - DNA, 20 bp, synthetic construct
  misc_feature 1..20: note = chemically synthesized
  source 1..20: mol_type = other DNA
aaaaagtgaaatatttagaa

SEQ ID NO: 4176 - DNA, 20 bp, synthetic construct
  misc_feature 1..20: note = chemically synthesized
  source 1..20: mol_type = other DNA
tcaaaatcaacctgaaactc

SEQ ID NO: 4177 - DNA, 20 bp, synthetic construct
  misc_feature 1..20: note = chemically synthesized
  source 1..20: mol_type = other DNA
acctgaaactccagaacacc

SEQ ID NO: 4178 - DNA, 20 bp, synthetic construct
  misc_feature 1..20: note = chemically synthesized
  source 1..20: mol_type = other DNA
tgaaactccagaacacccag

SEQ ID NO: 4179 - DNA, 20 bp, synthetic construct
  misc_feature 1..20: note = chemically synthesized
  source 1..20: mol_type = other DNA
cccagaagtaacttcactta

SEQ ID NO: 4180 - DNA, 20 bp, synthetic construct
  misc_feature 1..20: note = chemically synthesized
  source 1..20: mol_type = other DNA
gaagtaacttcacttaaagt

SEQ ID NO: 4181 - DNA, 20 bp, synthetic construct
  misc_feature 1..20: note = chemically synthesized
  source 1..20: mol_type = other DNA
gtaacttcacttaaagtaag

SEQ ID NO: 4182 - DNA, 20 bp, synthetic construct
  misc_feature 1..20: note = chemically synthesized
  source 1..20: mol_type = other DNA
cttaaagtaagtagaaaata

SEQ ID NO: 4183 - DNA, 20 bp, synthetic construct
  misc_feature 1..20: note = chemically synthesized
  source 1..20: mol_type = other DNA
taaagtaagtagaaaataaa

SEQ ID NO: 4184 - DNA, 20 bp, synthetic construct
  misc_feature 1..20: note = chemically synthesized
  source 1..20: mol_type = other DNA
aaagtaagtagaaaataaag

SEQ ID NO: 4185 - DNA, 20 bp, synthetic construct
  misc_feature 1..20: note = chemically synthesized
  source 1..20: mol_type = other DNA
aagtaagtagaaaataaaga

SEQ ID NO: 4186 - DNA, 20 bp, synthetic construct
  misc_feature 1..20: note = chemically synthesized
  source 1..20: mol_type = other DNA
tcatgtttatgttttcaatg

SEQ ID NO: 4187 - DNA, 20 bp, synthetic construct
  misc_feature 1..20: note = chemically synthesized
  source 1..20: mol_type = other DNA
cttttaaaaaaaatatttct

SEQ ID NO: 4188 - DNA, 20 bp, synthetic construct
  misc_feature 1..20: note = chemically synthesized
  source 1..20: mol_type = other DNA
ttttaaaaaaaatatttcta

SEQ ID NO: 4189 - DNA, 20 bp, synthetic construct
  misc_feature 1..20: note = chemically synthesized
  source 1..20: mol_type = other DNA
gttgaaatacttttttttcc

SEQ ID NO: 4190 - DNA, 20 bp, synthetic construct
  misc_feature 1..20: note = chemically synthesized
  source 1..20: mol_type = other DNA
tttccaagaaaaataatctc

SEQ ID NO: 4191 - DNA, 20 bp, synthetic construct
  misc_feature 1..20: note = chemically synthesized
  source 1..20: mol_type = other DNA
aaatttcctattataatttc

SEQ ID NO: 4192 - DNA, 20 bp, synthetic construct
  misc_feature 1..20: note = chemically synthesized
  source 1..20: mol_type = other DNA
ttcctattataatttcaagt

SEQ ID NO: 4193 - DNA, 20 bp, synthetic construct
  misc_feature 1..20: note = chemically synthesized
  source 1..20: mol_type = other DNA
tttatatgaaaattacaaat

SEQ ID NO: 4194 - DNA, 20 bp, synthetic construct
  misc_feature 1..20: note = chemically synthesized
  source 1..20: mol_type = other DNA
atcggttaaattatacaatc

SEQ ID NO: 4195 - DNA, 20 bp, synthetic construct
  misc_feature 1..20: note = chemically synthesized
  source 1..20: mol_type = other DNA
tacactattgtaaattactg

SEQ ID NO: 4196 - DNA, 20 bp, synthetic construct
  misc_feature 1..20: note = chemically synthesized
  source 1..20: mol_type = other DNA
acactattgtaaattactga

SEQ ID NO: 4197 - DNA, 20 bp, synthetic construct
  misc_feature 1..20: note = chemically synthesized
  source 1..20: mol_type = other DNA
tattgtaaattactgaaggt

SEQ ID NO: 4198 - DNA, 20 bp, synthetic construct
  misc_feature 1..20: note = chemically synthesized
  source 1..20: mol_type = other DNA
aattactgaaggtaagtaaa

SEQ ID NO: 4199 - DNA, 20 bp, synthetic construct
  misc_feature 1..20: note = chemically synthesized
  source 1..20: mol_type = other DNA
aaaaatttaaaactattctc

SEQ ID NO: 4200 - DNA, 20 bp, synthetic construct
  misc_feature 1..20: note = chemically synthesized
  source 1..20: mol_type = other DNA
ctattctccagtgtttaaaa

SEQ ID NO: 4201 - DNA, 20 bp, synthetic construct
  misc_feature 1..20: note = chemically synthesized
  source 1..20: mol_type = other DNA
ttaaaacagattaaataata

SEQ ID NO: 4202 - DNA, 20 bp, synthetic construct
  misc_feature 1..20: note = chemically synthesized
  source 1..20: mol_type = other DNA
agattaaataatacagtaaa

SEQ ID NO: 4203 - DNA, 20 bp, synthetic construct
  misc_feature 1..20: note = chemically synthesized
  source 1..20: mol_type = other DNA
aaataatacagtaaatggaa

SEQ ID NO: 4204 - DNA, 20 bp, synthetic construct
  misc_feature 1..20: note = chemically synthesized
  source 1..20: mol_type = other DNA
ttattcatatgaaaatatgc

SEQ ID NO: 4205 - DNA, 20 bp, synthetic construct
  misc_feature 1..20: note = chemically synthesized
  source 1..20: mol_type = other DNA
tattcatatgaaaatatgct

SEQ ID NO: 4206 - DNA, 20 bp, synthetic construct
  misc_feature 1..20: note = chemically synthesized
  source 1..20: mol_type = other DNA
tgggctttttcttttaattg

SEQ ID NO: 4207 - DNA, 20 bp, synthetic construct
  misc_feature 1..20: note = chemically synthesized
  source 1..20: mol_type = other DNA
tttttcttttaattgaagtt

SEQ ID NO: 4208 - DNA, 20 bp, synthetic construct
  misc_feature 1..20: note = chemically synthesized
  source 1..20: mol_type = other DNA
aagttcagaaaatcaaattt

SEQ ID NO: 4209 - DNA, 20 bp, synthetic construct
  misc_feature 1..20: note = chemically synthesized
  source 1..20: mol_type = other DNA
gttcagaaaatcaaatttta

SEQ ID NO: 4210 - DNA, 20 bp, synthetic construct
  misc_feature 1..20: note = chemically synthesized
  source 1..20: mol_type = other DNA
agaaaatcaaattttagaga

SEQ ID NO: 4211 - DNA, 20 bp, synthetic construct
  misc_feature 1..20: note = chemically synthesized
  source 1..20: mol_type = other DNA
tacaatttaaataaaatgtt

SEQ ID NO: 4212 - DNA, 20 bp, synthetic construct
  misc_feature 1..20: note = chemically synthesized
  source 1..20: mol_type = other DNA
acaatttaaataaaatgtta

SEQ ID NO: 4213 - DNA, 20 bp, synthetic construct
  misc_feature 1..20: note = chemically synthesized
  source 1..20: mol_type = other DNA
caaaaatatgtgctatttga

SEQ ID NO: 4214 - DNA, 20 bp, synthetic construct
  misc_feature 1..20: note = chemically synthesized
  source 1..20: mol_type = other DNA
aaatatgtgctatttgaaag

SEQ ID NO: 4215 - DNA, 20 bp, synthetic construct
  misc_feature 1..20: note = chemically synthesized
  source 1..20: mol_type = other DNA
gctatttgaaagaagcatac

SEQ ID NO: 4216 - DNA, 20 bp, synthetic construct
  misc_feature 1..20: note = chemically synthesized
  source 1..20: mol_type = other DNA
ctatttgaaagaagcataca

SEQ ID NO: 4217 - DNA, 20 bp, synthetic construct
  misc_feature 1..20: note = chemically synthesized
  source 1..20: mol_type = other DNA
tatttgaaagaagcatacaa

SEQ ID NO: 4218 - DNA, 20 bp, synthetic construct
  misc_feature 1..20: note = chemically synthesized
  source 1..20: mol_type = other DNA
atttgaaagaagcatacaag

SEQ ID NO: 4219 - DNA, 20 bp, synthetic construct
  misc_feature 1..20: note = chemically synthesized
  source 1..20: mol_type = other DNA
tgaaagaagcatacaagggg

SEQ ID NO: 4220 - DNA, 20 bp, synthetic construct
  misc_feature 1..20: note = chemically synthesized
  source 1..20: mol_type = other DNA
gaaagaagcatacaagggga

SEQ ID NO: 4221 - DNA, 20 bp, synthetic construct
  misc_feature 1..20: note = chemically synthesized
  source 1..20: mol_type = other DNA
tcatttttcaaatccattat

SEQ ID NO: 4222 - DNA, 20 bp, synthetic construct
  misc_feature 1..20: note = chemically synthesized
  source 1..20: mol_type = other DNA
ccattattagtttaaaaatt

SEQ ID NO: 4223 - DNA, 20 bp, synthetic construct
  misc_feature 1..20: note = chemically synthesized
  source 1..20: mol_type = other DNA
tttaaaaatttagattatga

SEQ ID NO: 4224 - DNA, 20 bp, synthetic construct
  misc_feature 1..20: note = chemically synthesized
  source 1..20: mol_type = other DNA
tttagattatgatagtgtta

SEQ ID NO: 4225 - DNA, 20 bp, synthetic construct
  misc_feature 1..20: note = chemically synthesized
  source 1..20: mol_type = other DNA
ttagattatgatagtgttac

SEQ ID NO: 4226 - DNA, 20 bp, synthetic construct
  misc_feature 1..20: note = chemically synthesized
  source 1..20: mol_type = other DNA
atagtgttacaggaaattaa

SEQ ID NO: 4227 - DNA, 20 bp, synthetic construct
  misc_feature 1..20: note = chemically synthesized
  source 1..20: mol_type = other DNA
gttacaggaaattaatagaa

SEQ ID NO: 4228 - DNA, 20 bp, synthetic construct
  misc_feature 1..20: note = chemically synthesized
  source 1..20: mol_type = other DNA
caggaaattaatagaaaaga

SEQ ID NO: 4229 - DNA, 20 bp, synthetic construct
  misc_feature 1..20: note = chemically synthesized
  source 1..20: mol_type = other DNA
ggaaattaatagaaaagaaa

SEQ ID NO: 4230 - DNA, 20 bp, synthetic construct
  misc_feature 1..20: note = chemically synthesized
  source 1..20: mol_type = other DNA
gaaattaatagaaaagaaag

SEQ ID NO: 4231 - DNA, 20 bp, synthetic construct
  misc_feature 1..20: note = chemically synthesized
  source 1..20: mol_type = other DNA
ttaatagaaaagaaagagga

SEQ ID NO: 4232 - DNA, 20 bp, synthetic construct
  misc_feature 1..20: note = chemically synthesized
  source 1..20: mol_type = other DNA
accaacctactctctatatc

SEQ ID NO: 4233 - DNA, 20 bp, synthetic construct
  misc_feature 1..20: note = chemically synthesized
  source 1..20: mol_type = other DNA
tctctatatccagacttttg

SEQ ID NO: 4234 - DNA, 20 bp, synthetic construct
  misc_feature 1..20: note = chemically synthesized
  source 1..20: mol_type = other DNA
ccagacttttgtagaaaaac

SEQ ID NO: 4235 - DNA, 20 bp, synthetic construct
  misc_feature 1..20: note = chemically synthesized
  source 1..20: mol_type = other DNA
tttgtagaaaaacaagataa

SEQ ID NO: 4236 - DNA, 20 bp, synthetic construct
  misc_feature 1..20: note = chemically synthesized
  source 1..20: mol_type = other DNA
aaaacaagataatagcatca

SEQ ID NO: 4237 - DNA, 20 bp, synthetic construct
  misc_feature 1..20: note = chemically synthesized
  source 1..20: mol_type = other DNA
atagcatcaaagaccttctc

SEQ ID NO: 4238 - DNA, 20 bp, synthetic construct
  misc_feature 1..20: note = chemically synthesized
  source 1..20: mol_type = other DNA
caaagaccttctccagaccg

SEQ ID NO: 4239 - DNA, 20 bp, synthetic construct
  misc_feature 1..20: note = chemically synthesized
  source 1..20: mol_type = other DNA
agaccttctccagaccgtgg

SEQ ID NO: 4240 - DNA, 20 bp, synthetic construct
  misc_feature 1..20: note = chemically synthesized
  source 1..20: mol_type = other DNA
aatataaacaattaaaccaa

SEQ ID NO: 4241 - DNA, 20 bp, synthetic construct
  misc_feature 1..20: note = chemically synthesized
  source 1..20: mol_type = other DNA
aaacaattaaaccaacagca

SEQ ID NO: 4242 - DNA, 20 bp, synthetic construct
  misc_feature 1..20: note = chemically synthesized
  source 1..20: mol_type = other DNA
ccaacagcatagtcaaataa

SEQ ID NO: 4243 - DNA, 20 bp, synthetic construct
  misc_feature 1..20: note = chemically synthesized
  source 1..20: mol_type = other DNA
gcatagtcaaataaaagaaa

SEQ ID NO: 4244 - DNA, 20 bp, synthetic construct
  misc_feature 1..20: note = chemically synthesized
  source 1..20: mol_type = other DNA
aaataaaagaaatagaaaat

SEQ ID NO: 4245 - DNA, 20 bp, synthetic construct
  misc_feature 1..20: note = chemically synthesized
  source 1..20: mol_type = other DNA
aataaaagaaatagaaaatc

SEQ ID NO: 4246 - DNA, 20 bp, synthetic construct
  misc_feature 1..20: note = chemically synthesized
  source 1..20: mol_type = other DNA
aaagaaatagaaaatcaggt

SEQ ID NO: 4247 - DNA, 20 bp, synthetic construct
  misc_feature 1..20: note = chemically synthesized
  source 1..20: mol_type = other DNA
aaatagaaaatcaggtaagt

SEQ ID NO: 4248 - DNA, 20 bp, synthetic construct
  misc_feature 1..20: note = chemically synthesized
  source 1..20: mol_type = other DNA
caggtaagtcagtattttaa

SEQ ID NO: 4249 - DNA, 20 bp, synthetic construct
  misc_feature 1..20: note = chemically synthesized
  source 1..20: mol_type = other DNA
ggtatgtcccatctttcaca

SEQ ID NO: 4250 - DNA, 20 bp, synthetic construct
  misc_feature 1..20: note = chemically synthesized
  source 1..20: mol_type = other DNA
gtatgtcccatctttcacac

SEQ ID NO: 4251 - DNA, 20 bp, synthetic construct
  misc_feature 1..20: note = chemically synthesized
  source 1..20: mol_type = other DNA
tgaatcctaaaattatttac

SEQ ID NO: 4252 - DNA, 20 bp, synthetic construct
  misc_feature 1..20: note = chemically synthesized
  source 1..20: mol_type = other DNA
aattatttacaagctttaac

SEQ ID NO: 4253 - DNA, 20 bp, synthetic construct
  misc_feature 1..20: note = chemically synthesized
  source 1..20: mol_type = other DNA
acaagctttaactggatcat

SEQ ID NO: 4254 - DNA, 20 bp, synthetic construct
  misc_feature 1..20: note = chemically synthesized
  source 1..20: mol_type = other DNA
catgagtaaaattatcacat

SEQ ID NO: 4255 - DNA, 20 bp, synthetic construct
  misc_feature 1..20: note = chemically synthesized
  source 1..20: mol_type = other DNA
cagcataactgttaaaattg

SEQ ID NO: 4256 - DNA, 20 bp, synthetic construct
  misc_feature 1..20: note = chemically synthesized
  source 1..20: mol_type = other DNA
agcataactgttaaaattgc

SEQ ID NO: 4257 - DNA, 20 bp, synthetic construct
  misc_feature 1..20: note = chemically synthesized
  source 1..20: mol_type = other DNA
tgttaaaattgcaggctctg

SEQ ID NO: 4258 - DNA, 20 bp, synthetic construct
  misc_feature 1..20: note = chemically synthesized
  source 1..20: mol_type = other DNA
aactacctgcatttaaacca

SEQ ID NO: 4259 - DNA, 20 bp, synthetic construct
  misc_feature 1..20: note = chemically synthesized
  source 1..20: mol_type = other DNA
tacttcacccctttatctct

SEQ ID NO: 4260 - DNA, 20 bp, synthetic construct
  misc_feature 1..20: note = chemically synthesized
  source 1..20: mol_type = other DNA
gtttcctcacatatactaca

SEQ ID NO: 4261 - DNA, 20 bp, synthetic construct
  misc_feature 1..20: note = chemically synthesized
  source 1..20: mol_type = other DNA
atatactacaaagataataa

SEQ ID NO: 4262 - DNA, 20 bp, synthetic construct
  misc_feature 1..20: note = chemically synthesized
  source 1..20: mol_type = other DNA
aaagataataacagaactta

SEQ ID NO: 4263 - DNA, 20 bp, synthetic construct
  misc_feature 1..20: note = chemically synthesized
  source 1..20: mol_type = other DNA
aagataataacagaacttat

SEQ ID NO: 4264 - DNA, 20 bp, synthetic construct
  misc_feature 1..20: note = chemically synthesized
  source 1..20: mol_type = other DNA
agaacttataggattattgt

SEQ ID NO: 4265 - DNA, 20 bp, synthetic construct
  misc_feature 1..20: note = chemically synthesized
  source 1..20: mol_type = other DNA
taagaaaaaaaattaattca

SEQ ID NO: 4266 - DNA, 20 bp, synthetic construct
  misc_feature 1..20: note = chemically synthesized
  source 1..20: mol_type = other DNA
gaaaaaaaattaattcatag

SEQ ID NO: 4267 - DNA, 20 bp, synthetic construct
  misc_feature 1..20: note = chemically synthesized
  source 1..20: mol_type = other DNA
catcttactaaaattcaaat

SEQ ID NO: 4268 - DNA, 20 bp, synthetic construct
  misc_feature 1..20: note = chemically synthesized
  source 1..20: mol_type = other DNA
ctttgctcaaaaccacacaa

SEQ ID NO: 4269 - DNA, 20 bp, synthetic construct
  misc_feature 1..20: note = chemically synthesized
  source 1..20: mol_type = other DNA
gctttccatttcactcatat

SEQ ID NO: 4270 - DNA, 20 bp, synthetic construct
  misc_feature 1..20: note = chemically synthesized
  source 1..20: mol_type = other DNA
tttcactcatattggctctt

SEQ ID NO: 4271 - DNA, 20 bp, synthetic construct
  misc_feature 1..20: note = chemically synthesized
  source 1..20: mol_type = other DNA
tcatattggctctttagacc

SEQ ID NO: 4272 - DNA, 20 bp, synthetic construct
  misc_feature 1..20: note = chemically synthesized
  source 1..20: mol_type = other DNA
ttgggtaatcttggtctaaa

SEQ ID NO: 4273 - DNA, 20 bp, synthetic construct
  misc_feature 1..20: note = chemically synthesized
  source 1..20: mol_type = other DNA
ttggtctaaagagccaatat

SEQ ID NO: 4274 - DNA, 20 bp, synthetic construct
  misc_feature 1..20: note = chemically synthesized
  source 1..20: mol_type = other DNA
aagagccaatatgagtgaaa

SEQ ID NO: 4275 - DNA, 20 bp, synthetic construct
  misc_feature 1..20: note = chemically synthesized
  source 1..20: mol_type = other DNA
gccaatatgagtgaaatgga

SEQ ID NO: 4276 - DNA, 20 bp, synthetic construct
  misc_feature 1..20: note = chemically synthesized
  source 1..20: mol_type = other DNA
tgaaatggaaagctattgtg

SEQ ID NO: 4277 - DNA, 20 bp, synthetic construct
  misc_feature 1..20: note = chemically synthesized
  source 1..20: mol_type = other DNA
gaaagctattgtgtggtttt

SEQ ID NO: 4278 - DNA, 20 bp, synthetic construct
  misc_feature 1..20: note = chemically synthesized
  source 1..20: mol_type = other DNA
ctattgtgtggttttgagca

SEQ ID NO: 4279 - DNA, 20 bp, synthetic construct
  misc_feature 1..20: note = chemically synthesized
  source 1..20: mol_type = other DNA
attgtgtggttttgagcaaa

SEQ ID NO: 4280 - DNA, 20 bp, synthetic construct
  misc_feature 1..20: note = chemically synthesized
  source 1..20: mol_type = other DNA
acatgatctaatttgaattt

SEQ ID NO: 4281 - DNA, 20 bp, synthetic construct
  misc_feature 1..20: note = chemically synthesized
  source 1..20: mol_type = other DNA
gatctaatttgaattttagt

SEQ ID NO: 4282 - DNA, 20 bp, synthetic construct
  misc_feature 1..20: note = chemically synthesized
  source 1..20: mol_type = other DNA
gaattttagtaagatgacat

SEQ ID NO: 4283 - DNA, 20 bp, synthetic construct
  misc_feature 1..20: note = chemically synthesized
  source 1..20: mol_type = other DNA
ttttcttacaataatcctat

SEQ ID NO: 4284 - DNA, 20 bp, synthetic construct
  misc_feature 1..20: note = chemically synthesized
  source 1..20: mol_type = other DNA
aagttctgttattatctttg

SEQ ID NO: 4285 - DNA, 20 bp, synthetic construct
  misc_feature 1..20: note = chemically synthesized
  source 1..20: mol_type = other DNA
attatctttgtagtatatgt

SEQ ID NO: 4286 - DNA, 20 bp, synthetic construct
  misc_feature 1..20: note = chemically synthesized
  source 1..20: mol_type = other DNA
ttatctttgtagtatatgtg

SEQ ID NO: 4287 - DNA, 20 bp, synthetic construct
  misc_feature 1..20: note = chemically synthesized
  source 1..20: mol_type = other DNA
gtagtatatgtgaggaaact

SEQ ID NO: 4288 - DNA, 20 bp, synthetic construct
  misc_feature 1..20: note = chemically synthesized
  source 1..20: mol_type = other DNA
agtatatgtgaggaaactga

SEQ ID NO: 4289 - DNA, 20 bp, synthetic construct
  misc_feature 1..20: note = chemically synthesized
  source 1..20: mol_type = other DNA
tgtgaggaaactgagagata

SEQ ID NO: 4290 - DNA, 20 bp, synthetic construct
  misc_feature 1..20: note = chemically synthesized
  source 1..20: mol_type = other DNA
gtgaggaaactgagagataa

SEQ ID NO: 4291 - DNA, 20 bp, synthetic construct
  misc_feature 1..20: note = chemically synthesized
  source 1..20: mol_type = other DNA
tgaggaaactgagagataaa

SEQ ID NO: 4292 - DNA, 20 bp, synthetic construct
  misc_feature 1..20: note = chemically synthesized
  source 1..20: mol_type = other DNA
gaggaaactgagagataaag

SEQ ID NO: 4293 - DNA, 20 bp, synthetic construct
  misc_feature 1..20: note = chemically synthesized
  source 1..20: mol_type = other DNA
aactgagagataaaggggtg

SEQ ID NO: 4294 - DNA, 20 bp, synthetic construct
  misc_feature 1..20: note = chemically synthesized
  source 1..20: mol_type = other DNA
aggggtgaagtaatttattc

SEQ ID NO: 4295 - DNA, 20 bp, synthetic construct
  misc_feature 1..20: note = chemically synthesized
  source 1..20: mol_type = other DNA
ggggtgaagtaatttattca

SEQ ID NO: 4296 - DNA, 20 bp, synthetic construct
  misc_feature 1..20: note = chemically synthesized
  source 1..20: mol_type = other DNA
aatttattcaaggtcacaca

SEQ ID NO: 4297 - DNA, 20 bp, synthetic construct
  misc_feature 1..20: note = chemically synthesized
  source 1..20: mol_type = other DNA
ttcaaggtcacacaaagttt

SEQ ID NO: 4298 - DNA, 20 bp, synthetic construct
  misc_feature 1..20: note = chemically synthesized
  source 1..20: mol_type = other DNA
caaggtcacacaaagtttta

SEQ ID NO: 4299 - DNA, 20 bp, synthetic construct
  misc_feature 1..20: note = chemically synthesized
  source 1..20: mol_type = other DNA
cacacaaagttttagagcca

SEQ ID NO: 4300 - DNA, 20 bp, synthetic construct
  misc_feature 1..20: note = chemically synthesized
  source 1..20: mol_type = other DNA
ttagagccatggtttaaatg

SEQ ID NO: 4301 - DNA, 20 bp, synthetic construct
  misc_feature 1..20: note = chemically synthesized
  source 1..20: mol_type = other DNA
tagagccatggtttaaatgc

SEQ ID NO: 4302 - DNA, 20 bp, synthetic construct
  misc_feature 1..20: note = chemically synthesized
  source 1..20: mol_type = other DNA
agccatggtttaaatgcagg

SEQ ID NO: 4303 - DNA, 20 bp, synthetic construct
  misc_feature 1..20: note = chemically synthesized
  source 1..20: mol_type = other DNA
tttaaatgcaggtagtttat

SEQ ID NO: 4304 - DNA, 20 bp, synthetic construct
  misc_feature 1..20: note = chemically synthesized
  source 1..20: mol_type = other DNA
tgcaggtagtttattagctt

SEQ ID NO: 4305 - DNA, 20 bp, synthetic construct
  misc_feature 1..20: note = chemically synthesized
  source 1..20: mol_type = other DNA
caggtagtttattagcttca

SEQ ID NO: 4306 - DNA, 20 bp, synthetic construct
  misc_feature 1..20: note = chemically synthesized
  source 1..20: mol_type = other DNA
ttcagagcctgcaattttaa

SEQ ID NO: 4307 - DNA, 20 bp, synthetic construct
  misc_feature 1..20: note = chemically synthesized
  source 1..20: mol_type = other DNA
tgataattttactcatgatc

SEQ ID NO: 4308 - DNA, 20 bp, synthetic construct
  misc_feature 1..20: note = chemically synthesized
  source 1..20: mol_type = other DNA
ttttactcatgatccagtta

SEQ ID NO: 4309 - DNA, 20 bp, synthetic construct
  misc_feature 1..20: note = chemically synthesized
  source 1..20: mol_type = other DNA
ttaaagcttgtaaataattt

SEQ ID NO: 4310 - DNA, 20 bp, synthetic construct
  misc_feature 1..20: note = chemically synthesized
  source 1..20: mol_type = other DNA
taaagcttgtaaataatttt

SEQ ID NO: 4311 - DNA, 20 bp, synthetic construct
  misc_feature 1..20: note = chemically synthesized
  source 1..20: mol_type = other DNA
ttgtaaataattttaggatt

SEQ ID NO: 4312 - DNA, 20 bp, synthetic construct
  misc_feature 1..20: note = chemically synthesized
  source 1..20: mol_type = other DNA
tttaggattcagtgttttta

SEQ ID NO: 4313 - DNA, 20 bp, synthetic construct
  misc_feature 1..20: note = chemically synthesized
  source 1..20: mol_type = other DNA
gtttttacagacctgtgtga

SEQ ID NO: 4314 - DNA, 20 bp, synthetic construct
  misc_feature 1..20: note = chemically synthesized
  source 1..20: mol_type = other DNA
ttacagacctgtgtgaaaga

SEQ ID NO: 4315 - DNA, 20 bp, synthetic construct
  misc_feature 1..20: note = chemically synthesized
  source 1..20: mol_type = other DNA
tacagacctgtgtgaaagat

SEQ ID NO: 4316 - DNA, 20 bp, synthetic construct
  misc_feature 1..20: note = chemically synthesized
  source 1..20: mol_type = other DNA
cttttatttgactatgctgt

SEQ ID NO: 4317 - DNA, 20 bp, synthetic construct
  misc_feature 1..20: note = chemically synthesized
  source 1..20: mol_type = other DNA
gttggtttaattgtttatat

SEQ ID NO: 4318 - DNA, 20 bp, synthetic construct
  misc_feature 1..20: note = chemically synthesized
  source 1..20: mol_type = other DNA
ttgtttatattggtcttcca

SEQ ID NO: 4319 - DNA, 20 bp, synthetic construct
  misc_feature 1..20: note = chemically synthesized
  source 1..20: mol_type = other DNA
tatattggtcttccacggtc

SEQ ID NO: 4320 - DNA, 20 bp, synthetic construct
  misc_feature 1..20: note = chemically synthesized
  source 1..20: mol_type = other DNA
tattggtcttccacggtctg

SEQ ID NO: 4321 - DNA, 20 bp, synthetic construct
  misc_feature 1..20: note = chemically synthesized
  source 1..20: mol_type = other DNA
tggtcttccacggtctggag

SEQ ID NO: 4322 - DNA, 20 bp, synthetic construct
  misc_feature 1..20: note = chemically synthesized
  source 1..20: mol_type = other DNA
ggtcttccacggtctggaga

SEQ ID NO: 4323 - DNA, 20 bp, synthetic construct
  misc_feature 1..20: note = chemically synthesized
  source 1..20: mol_type = other DNA
attatcttgtttttctacaa

SEQ ID NO: 4324 - DNA, 20 bp, synthetic construct
  misc_feature 1..20: note = chemically synthesized
  source 1..20: mol_type = other DNA
cttgtttttctacaaaagtc

SEQ ID NO: 4325 - DNA, 20 bp, synthetic construct
  misc_feature 1..20: note = chemically synthesized
  source 1..20: mol_type = other DNA
tttctacaaaagtctggata

SEQ ID NO: 4326 - DNA, 20 bp, synthetic construct
  misc_feature 1..20: note = chemically synthesized
  source 1..20: mol_type = other DNA
tctacaaaagtctggatata

SEQ ID NO: 4327 - DNA, 20 bp, synthetic construct
  misc_feature 1..20: note = chemically synthesized
  source 1..20: mol_type = other DNA
tacaaaagtctggatataga

SEQ ID NO: 4328 - DNA, 20 bp, synthetic construct
  misc_feature 1..20: note = chemically synthesized
  source 1..20: mol_type = other DNA
aaaagtctggatatagagag

SEQ ID NO: 4329 - DNA, 20 bp, synthetic construct
  misc_feature 1..20: note = chemically synthesized
  source 1..20: mol_type = other DNA
aaagtctggatatagagagt

SEQ ID NO: 4330 - DNA, 20 bp, synthetic construct
  misc_feature 1..20: note = chemically synthesized
  source 1..20: mol_type = other DNA
tctggatatagagagtaggt

SEQ ID NO: 4331 - DNA, 20 bp, synthetic construct
  misc_feature 1..20: note = chemically synthesized
  source 1..20: mol_type = other DNA
atagagagtaggttggttat

SEQ ID NO: 4332 - DNA, 20 bp, synthetic construct
  misc_feature 1..20: note = chemically synthesized
  source 1..20: mol_type = other DNA
ctaaatttttaaactaataa

SEQ ID NO: 4333 - DNA, 20 bp, synthetic construct
  misc_feature 1..20: note = chemically synthesized
  source 1..20: mol_type = other DNA
tggatttgaaaaatgaatat

SEQ ID NO: 4334 - DNA, 20 bp, synthetic construct
  misc_feature 1..20: note = chemically synthesized
  source 1..20: mol_type = other DNA
ccttgtatgcttctttcaaa

SEQ ID NO: 4335 - DNA, 20 bp, synthetic construct
  misc_feature 1..20: note = chemically synthesized
  source 1..20: mol_type = other DNA
attttctgaacttcaattaa

SEQ ID NO: 4336 - DNA, 20 bp, synthetic construct
  misc_feature 1..20: note = chemically synthesized
  source 1..20: mol_type = other DNA
tgaacttcaattaaaagaaa

SEQ ID NO: 4337 - DNA, 20 bp, synthetic construct
  misc_feature 1..20: note = chemically synthesized
  source 1..20: mol_type = other DNA
ttcaattaaaagaaaaagcc

SEQ ID NO: 4338 - DNA, 20 bp, synthetic construct
  misc_feature 1..20: note = chemically synthesized
  source 1..20: mol_type = other DNA
atttaatctgttttaaacac

SEQ ID NO: 4339 - DNA, 20 bp, synthetic construct
  misc_feature 1..20: note = chemically synthesized
  source 1..20: mol_type = other DNA
ttaatctgttttaaacactg

SEQ ID NO: 4340 - DNA, 20 bp, synthetic construct
  misc_feature 1..20: note = chemically synthesized
  source 1..20: mol_type = other DNA
ctgttttaaacactggagaa

SEQ ID NO: 4341 - DNA, 20 bp, synthetic construct
  misc_feature 1..20: note = chemically synthesized
  source 1..20: mol_type = other DNA
tttaactttttacttacctt

SEQ ID NO: 4342 - DNA, 20 bp, synthetic construct
  misc_feature 1..20: note = chemically synthesized
  source 1..20: mol_type = other DNA
ttaccttcagtaatttacaa

SEQ ID NO: 4343 - DNA, 20 bp, synthetic construct
  misc_feature 1..20: note = chemically synthesized
  source 1..20: mol_type = other DNA
tttacaatagtgtaatgaca

SEQ ID NO: 4344 - DNA, 20 bp, synthetic construct
  misc_feature 1..20: note = chemically synthesized
  source 1..20: mol_type = other DNA
agtgtaatgacatagtgttc

SEQ ID NO: 4345 - DNA, 20 bp, synthetic construct
  misc_feature 1..20: note = chemically synthesized
  source 1..20: mol_type = other DNA
tcatataaaatgcaaatttt

SEQ ID NO: 4346 - DNA, 20 bp, synthetic construct
  misc_feature 1..20: note = chemically synthesized
  source 1..20: mol_type = other DNA
agtgttttcatatataacat

SEQ ID NO: 4347 - DNA, 20 bp, synthetic construct
  misc_feature 1..20: note = chemically synthesized
  source 1..20: mol_type = other DNA
gtgttttcatatataacatt

SEQ ID NO: 4348 - DNA, 20 bp, synthetic construct
  misc_feature 1..20: note = chemically synthesized
  source 1..20: mol_type = other DNA
tgttttcatatataacatta

SEQ ID NO: 4349 - DNA, 20 bp, synthetic construct
  misc_feature 1..20: note = chemically synthesized
  source 1..20: mol_type = other DNA
aaactaacttgaaattataa

SEQ ID NO: 4350 - DNA, 20 bp, synthetic construct
  misc_feature 1..20: note = chemically synthesized
  source 1..20: mol_type = other DNA
aactaacttgaaattataat

SEQ ID NO: 4351 - DNA, 20 bp, synthetic construct
  misc_feature 1..20: note = chemically synthesized
  source 1..20: mol_type = other DNA
taataggaaattttattttc

SEQ ID NO: 4352 - DNA, 20 bp, synthetic construct
  misc_feature 1..20: note = chemically synthesized
  source 1..20: mol_type = other DNA
ataggaaattttattttctg

SEQ ID NO: 4353 - DNA, 20 bp, synthetic construct
  misc_feature 1..20: note = chemically synthesized
  source 1..20: mol_type = other DNA
tttctggagattatttttct

SEQ ID NO: 4354 - DNA, 20 bp, synthetic construct
  misc_feature 1..20: note = chemically synthesized
  source 1..20: mol_type = other DNA
attatttttcttggaaaaaa

SEQ ID NO: 4355 - DNA, 20 bp, synthetic construct
  misc_feature 1..20: note = chemically synthesized
  source 1..20: mol_type = other DNA
agtatttcaacaatgcaaca

SEQ ID NO: 4356 - DNA, 20 bp, synthetic construct
  misc_feature 1..20: note = chemically synthesized
  source 1..20: mol_type = other DNA
atgcaacaaagtatttcaaa

SEQ ID NO: 4357 - DNA, 20 bp, synthetic construct
  misc_feature 1..20: note = chemically synthesized
  source 1..20: mol_type = other DNA
gtatttcaaatggcatgcct

SEQ ID NO: 4358 - DNA, 20 bp, synthetic construct
  misc_feature 1..20: note = chemically synthesized
  source 1..20: mol_type = other DNA
cttagaaatattttttttaa

SEQ ID NO: 4359 - DNA, 20 bp, synthetic construct
  misc_feature 1..20: note = chemically synthesized
  source 1..20: mol_type = other DNA
ctttattttctacttacttt

SEQ ID NO: 4360 - DNA, 20 bp, synthetic construct
  misc_feature 1..20: note = chemically synthesized
  source 1..20: mol_type = other DNA
ttttctacttactttaagtg

SEQ ID NO: 4361 - DNA, 20 bp, synthetic construct
  misc_feature 1..20: note = chemically synthesized
  source 1..20: mol_type = other DNA
actttaagtgaagttacttc

SEQ ID NO: 4362 - DNA, 20 bp, synthetic construct
  misc_feature 1..20: note = chemically synthesized
  source 1..20: mol_type = other DNA
ctttaagtgaagttacttct

SEQ ID NO: 4363 - DNA, 20 bp, synthetic construct
  misc_feature 1..20: note = chemically synthesized
  source 1..20: mol_type = other DNA
gaagttacttctgggtgttc

SEQ ID NO: 4364 - DNA, 20 bp, synthetic construct
  misc_feature 1..20: note = chemically synthesized
  source 1..20: mol_type = other DNA
agttacttctgggtgttctg

SEQ ID NO: 4365 - DNA, 20 bp, synthetic construct
  misc_feature 1..20: note = chemically synthesized
  source 1..20: mol_type = other DNA
ttctgggtgttctggagttt

SEQ ID NO: 4366 - DNA, 20 bp, synthetic construct
  misc_feature 1..20: note = chemically synthesized
  source 1..20: mol_type = other DNA
tctgggtgttctggagtttc

SEQ ID NO: 4367 - DNA, 20 bp, synthetic construct
  misc_feature 1..20: note = chemically synthesized
  source 1..20: mol_type = other DNA
tttcaggttgattttgaatt

SEQ ID NO: 4368 - DNA, 20 bp, synthetic construct
  misc_feature 1..20: note = chemically synthesized
  source 1..20: mol_type = other DNA
aggttgattttgaattaagt

SEQ ID NO: 4369 - DNA, 20 bp, synthetic construct
  misc_feature 1..20: note = chemically synthesized
  source 1..20: mol_type = other DNA
tgattttgaattaagttagt

SEQ ID NO: 4370 - DNA, 20 bp, synthetic construct
  misc_feature 1..20: note = chemically synthesized
  source 1..20: mol_type = other DNA
aaatatttcactttttgttg

SEQ ID NO: 4371 - DNA, 20 bp, synthetic construct
  misc_feature 1..20: note = chemically synthesized
  source 1..20: mol_type = other DNA
tatttcactttttgttgaag

SEQ ID NO: 4372 - DNA, 20 bp, synthetic construct
  misc_feature 1..20: note = chemically synthesized
  source 1..20: mol_type = other DNA
tgaagtagaattttttcttc

SEQ ID NO: 4373 - DNA, 20 bp, synthetic construct
  misc_feature 1..20: note = chemically synthesized
  source 1..20: mol_type = other DNA
gaagtagaattttttcttct

SEQ ID NO: 4374 - DNA, 20 bp, synthetic construct
  misc_feature 1..20: note = chemically synthesized
  source 1..20: mol_type = other DNA
agtagaattttttcttctag

SEQ ID NO: 4375 - DNA, 20 bp, synthetic construct
  misc_feature 1..20: note = chemically synthesized
  source 1..20: mol_type = other DNA
gtagaattttttcttctagg

SEQ ID NO: 4376 - DNA, 20 bp, synthetic construct
  misc_feature 1..20: note = chemically synthesized
  source 1..20: mol_type = other DNA
ttttcttctaggaggctttc

SEQ ID NO: 4377 - DNA, 20 bp, synthetic construct
  misc_feature 1..20: note = chemically synthesized
  source 1..20: mol_type = other DNA
ctaggaggctttcaagtttt

SEQ ID NO: 4378 - DNA, 20 bp, synthetic construct
  misc_feature 1..20: note = chemically synthesized
  source 1..20: mol_type = other DNA
aggctttcaagttttgagtt

SEQ ID NO: 4379 - DNA, 20 bp, synthetic construct
  misc_feature 1..20: note = chemically synthesized
  source 1..20: mol_type = other DNA
tcaagttttgagttgagttc

SEQ ID NO: 4380 - DNA, 20 bp, synthetic construct
  misc_feature 1..20: note = chemically synthesized
  source 1..20: mol_type = other DNA
acctcttcatttttgacttg

SEQ ID NO: 4381 - DNA, 20 bp, synthetic construct
  misc_feature 1..20: note = chemically synthesized
  source 1..20: mol_type = other DNA
tttgacttgtagtttatatg

SEQ ID NO: 4382 - DNA, 20 bp, synthetic construct
  misc_feature 1..20: note = chemically synthesized
  source 1..20: mol_type = other DNA
agtttatatgtagttcttct

SEQ ID NO: 4383 - DNA, 20 bp, synthetic construct
  misc_feature 1..20: note = chemically synthesized
  source 1..20: mol_type = other DNA
ttcttcttctttgatttcac

SEQ ID NO: 4384 - DNA, 20 bp, synthetic construct
  misc_feature 1..20: note = chemically synthesized
  source 1..20: mol_type = other DNA
tctttgatttcactggtttg

SEQ ID NO: 4385 - DNA, 20 bp, synthetic construct
  misc_feature 1..20: note = chemically synthesized
  source 1..20: mol_type = other DNA
atttcactggtttgcagcga

SEQ ID NO: 4386 - DNA, 20 bp, synthetic construct
  misc_feature 1..20: note = chemically synthesized
  source 1..20: mol_type = other DNA
ttgcagcgatagatcataaa

SEQ ID NO: 4387 - DNA, 20 bp, synthetic construct
  misc_feature 1..20: note = chemically synthesized
  source 1..20: mol_type = other DNA
aaagactgatcaaatatgtt

SEQ ID NO: 4388 - DNA, 20 bp, synthetic construct
  misc_feature 1..20: note = chemically synthesized
  source 1..20: mol_type = other DNA
tttgaaatatgtcattaatt

SEQ ID NO: 4389 - DNA, 20 bp, synthetic construct
  misc_feature 1..20: note = chemically synthesized
  source 1..20: mol_type = other DNA
taatttggcccttcgtctta

SEQ ID NO: 4390 - DNA, 20 bp, synthetic construct
  misc_feature 1..20: note = chemically synthesized
  source 1..20: mol_type = other DNA
ggcccttcgtcttatggaca

SEQ ID NO: 4391 - DNA, 20 bp, synthetic construct
  misc_feature 1..20: note = chemically synthesized
  source 1..20: mol_type = other DNA
gtcttatggacaaagtcttt

SEQ ID NO: 4392 - DNA, 20 bp, synthetic construct
  misc_feature 1..20: note = chemically synthesized
  source 1..20: mol_type = other DNA
ttaagaccatgtcccaactg

SEQ ID NO: 4393 - DNA, 20 bp, synthetic construct
  misc_feature 1..20: note = chemically synthesized
  source 1..20: mol_type = other DNA
taagaccatgtcccaactga

SEQ ID NO: 4394 - DNA, 20 bp, synthetic construct
  misc_feature 1..20: note = chemically synthesized
  source 1..20: mol_type = other DNA
agaccatgtcccaactgaag

SEQ ID NO: 4395 - DNA, 20 bp, synthetic construct
  misc_feature 1..20: note = chemically synthesized
  source 1..20: mol_type = other DNA
gaccatgtcccaactgaagg

SEQ ID NO: 4396 - DNA, 20 bp, synthetic construct
  misc_feature 1..20: note = chemically synthesized
  source 1..20: mol_type = other DNA
tcccaactgaaggaggccat

SEQ ID NO: 4397 - DNA, 20 bp, synthetic construct
  misc_feature 1..20: note = chemically synthesized
  source 1..20: mol_type = other DNA
aatttttacatcgtctaaca

SEQ ID NO: 4398 - DNA, 20 bp, synthetic construct
  misc_feature 1..20: note = chemically synthesized
  source 1..20: mol_type = other DNA
aacatagcaaatcttgattt

SEQ ID NO: 4399 - DNA, 20 bp, synthetic construct
  misc_feature 1..20: note = chemically synthesized
  source 1..20: mol_type = other DNA
gcaaatcttgattttggctc

SEQ ID NO: 4400 - DNA, 20 bp, synthetic construct
  misc_feature 1..20: note = chemically synthesized
  source 1..20: mol_type = other DNA
aaatcttgattttggctctg

SEQ ID NO: 4401 - DNA, 20 bp, synthetic construct
  misc_feature 1..20: note = chemically synthesized
  source 1..20: mol_type = other DNA
cttgattttggctctggaga

SEQ ID NO: 4402 - DNA, 20 bp, synthetic construct
  misc_feature 1..20: note = chemically synthesized
  source 1..20: mol_type = other DNA
tgattttggctctggagata

SEQ ID NO: 4403 - DNA, 20 bp, synthetic construct
  misc_feature 1..20: note = chemically synthesized
  source 1..20: mol_type = other DNA
tgaattgtcttgatcaattc

SEQ ID NO: 4404 - DNA, 20 bp, synthetic construct
  misc_feature 1..20: note = chemically synthesized
  source 1..20: mol_type = other DNA
aattgtcttgatcaattctg

SEQ ID NO: 4405 - DNA, 20 bp, synthetic construct
  misc_feature 1..20: note = chemically synthesized
  source 1..20: mol_type = other DNA
attgtcttgatcaattctgg

SEQ ID NO: 4406 - DNA, 20 bp, synthetic construct
  misc_feature 1..20: note = chemically synthesized
  source 1..20: mol_type = other DNA
tcaattctggaggaaataac

SEQ ID NO: 4407 - DNA, 20 bp, synthetic construct
  misc_feature 1..20: note = chemically synthesized
  source 1..20: mol_type = other DNA
aattctggaggaaataacta

SEQ ID NO: 4408 - DNA, 20 bp, synthetic construct
  misc_feature 1..20: note = chemically synthesized
  source 1..20: mol_type = other DNA
attctggaggaaataactag

SEQ ID NO: 4409 - DNA, 20 bp, synthetic construct
  misc_feature 1..20: note = chemically synthesized
  source 1..20: mol_type = other DNA
ataactagaggaacaataaa

SEQ ID NO: 4410 - DNA, 20 bp, synthetic construct
  misc_feature 1..20: note = chemically synthesized
  source 1..20: mol_type = other DNA
actagaggaacaataaaaag

SEQ ID NO: 4411 - DNA, 20 bp, synthetic construct
  misc_feature 1..20: note = chemically synthesized
  source 1..20: mol_type = other DNA
ctagaggaacaataaaaaga

SEQ ID NO: 4412 - DNA, 20 bp, synthetic construct
  misc_feature 1..20: note = chemically synthesized
  source 1..20: mol_type = other DNA
agaggaacaataaaaagaag

SEQ ID NO: 4413 - DNA, 20 bp, synthetic construct
  misc_feature 1..20: note = chemically synthesized
  source 1..20: mol_type = other DNA
ttatcttgattttcaatttc

SEQ ID NO: 4414 - DNA, 20 bp, synthetic construct
  misc_feature 1..20: note = chemically synthesized
  source 1..20: mol_type = other DNA
attttcaatttcaagcaacg

SEQ ID NO: 4415 - DNA, 20 bp, synthetic construct
  misc_feature 1..20: note = chemically synthesized
  source 1..20: mol_type = other DNA
aacgtggaactgttttcttc

SEQ ID NO: 4416 - DNA, 20 bp, synthetic construct
  misc_feature 1..20: note = chemically synthesized
  source 1..20: mol_type = other DNA
gtggaactgttttcttctgg

SEQ ID NO: 4417 - DNA, 20 bp, synthetic construct
  misc_feature 1..20: note = chemically synthesized
  source 1..20: mol_type = other DNA
gaactgttttcttctggaag

SEQ ID NO: 4418 - DNA, 20 bp, synthetic construct
  misc_feature 1..20: note = chemically synthesized
  source 1..20: mol_type = other DNA
ttttcttctggaagcagacc

SEQ ID NO: 4419 - DNA, 20 bp, synthetic construct
  misc_feature 1..20: note = chemically synthesized
  source 1..20: mol_type = other DNA
tatatataccaatatttgcc

SEQ ID NO: 4420 - DNA, 20 bp, synthetic construct
  misc_feature 1..20: note = chemically synthesized
  source 1..20: mol_type = other DNA
ataccaatatttgcccagaa

SEQ ID NO: 4421 - DNA, 20 bp, synthetic construct
  misc_feature 1..20: note = chemically synthesized
  source 1..20: mol_type = other DNA
taccaatatttgcccagaaa

SEQ ID NO: 4422 - DNA, 20 bp, synthetic construct
  misc_feature 1..20: note = chemically synthesized
  source 1..20: mol_type = other DNA
aatatttgcccagaaaaggt

SEQ ID NO: 4423 - DNA, 20 bp, synthetic construct
  misc_feature 1..20: note = chemically synthesized
  source 1..20: mol_type = other DNA
atatttgcccagaaaaggta

SEQ ID NO: 4424 - DNA, 20 bp, synthetic construct
  misc_feature 1..20: note = chemically synthesized
  source 1..20: mol_type = other DNA
ttgcccagaaaaggtaaggt

SEQ ID NO: 4425 - DNA, 20 bp, synthetic construct
  misc_feature 1..20: note = chemically synthesized
  source 1..20: mol_type = other DNA
cccagaaaaggtaaggttgg

SEQ ID NO: 4426 - DNA, 20 bp, synthetic construct
  misc_feature 1..20: note = chemically synthesized
  source 1..20: mol_type = other DNA
ccagaaaaggtaaggttggt

SEQ ID NO: 4427 - DNA, 20 bp, synthetic construct
  misc_feature 1..20: note = chemically synthesized
  source 1..20: mol_type = other DNA
gtaaggttggtaggtgaaca

SEQ ID NO: 4428 - DNA, 20 bp, synthetic construct
  misc_feature 1..20: note = chemically synthesized
  source 1..20: mol_type = other DNA
ggtgaacatagttaatcatt

SEQ ID NO: 4429 - DNA, 20 bp, synthetic construct
  misc_feature 1..20: note = chemically synthesized
  source 1..20: mol_type = other DNA
atgtaaccttcttccacatt

SEQ ID NO: 4430 - DNA, 20 bp, synthetic construct
  misc_feature 1..20: note = chemically synthesized
  source 1..20: mol_type = other DNA
aaccttcttccacattgagt

SEQ ID NO: 4431 - DNA, 20 bp, synthetic construct
  misc_feature 1..20: note = chemically synthesized
  source 1..20: mol_type = other DNA
atcaatgctaaatgaaatca

SEQ ID NO: 4432 - DNA, 20 bp, synthetic construct
  misc_feature 1..20: note = chemically synthesized
  source 1..20: mol_type = other DNA
ctaaatgaaatcaaagaaat

SEQ ID NO: 4433 - DNA, 20 bp, synthetic construct
  misc_feature 1..20: note = chemically synthesized
  source 1..20: mol_type = other DNA
gaaatgagcaactaacttaa

SEQ ID NO: 4434 - DNA, 20 bp, synthetic construct
  misc_feature 1..20: note = chemically synthesized
  source 1..20: mol_type = other DNA
aaatgagcaactaacttaat

SEQ ID NO: 4435 - DNA, 20 bp, synthetic construct
  misc_feature 1..20: note = chemically synthesized
  source 1..20: mol_type = other DNA
aaactacacattcaatgcta

SEQ ID NO: 4436 - DNA, 20 bp, synthetic construct
  misc_feature 1..20: note = chemically synthesized
  source 1..20: mol_type = other DNA
tggtgactacctgtttttaa

SEQ ID NO: 4437 - DNA, 20 bp, synthetic construct
  misc_feature 1..20: note = chemically synthesized
  source 1..20: mol_type = other DNA
ttttacttttttatgatttt

SEQ ID NO: 4438 - DNA, 20 bp, synthetic construct
  misc_feature 1..20: note = chemically synthesized
  source 1..20: mol_type = other DNA
ttacttttttatgattttaa

SEQ ID NO: 4439 - DNA, 20 bp, synthetic construct
  misc_feature 1..20: note = chemically synthesized
  source 1..20: mol_type = other DNA
tatgattttaagagatttac

SEQ ID NO: 4440 - DNA, 20 bp, synthetic construct
  misc_feature 1..20: note = chemically synthesized
  source 1..20: mol_type = other DNA
tcaaaaataaacttttttgt

SEQ ID NO: 4441 - DNA, 20 bp, synthetic construct
  misc_feature 1..20: note = chemically synthesized
  source 1..20: mol_type = other DNA
caaaaataaacttttttgtt

SEQ ID NO: 4442 - DNA, 20 bp, synthetic construct
  misc_feature 1..20: note = chemically synthesized
  source 1..20: mol_type = other DNA
gttgggtaaatttattatta

SEQ ID NO: 4443 - DNA, 20 bp, synthetic construct
  misc_feature 1..20: note = chemically synthesized
  source 1..20: mol_type = other DNA
gtaaatttattattaaagtt

SEQ ID NO: 4444 - DNA, 20 bp, synthetic construct
  misc_feature 1..20: note = chemically synthesized
  source 1..20: mol_type = other DNA
taaatttattattaaagttg

SEQ ID NO: 4445 - DNA, 20 bp, synthetic construct
  misc_feature 1..20: note = chemically synthesized
  source 1..20: mol_type = other DNA
aaatttattattaaagttga

SEQ ID NO: 4446 - DNA, 20 bp, synthetic construct
  misc_feature 1..20: note = chemically synthesized
  source 1..20: mol_type = other DNA
aatttattattaaagttgag

SEQ ID NO: 4447 - DNA, 20 bp, synthetic construct
  misc_feature 1..20: note = chemically synthesized
  source 1..20: mol_type = other DNA
tattaaagttgaggggaaaa

SEQ ID NO: 4448 - DNA, 20 bp, synthetic construct
  misc_feature 1..20: note = chemically synthesized
  source 1..20: mol_type = other DNA
ggggaaaaaagtaatgaatt

SEQ ID NO: 4449 - DNA, 20 bp, synthetic construct
  misc_feature 1..20: note = chemically synthesized
  source 1..20: mol_type = other DNA
aacaggtagtcaccatagca

SEQ ID NO: 4450 - DNA, 20 bp, synthetic construct
  misc_feature 1..20: note = chemically synthesized
  source 1..20: mol_type = other DNA
tgggcaaatattggtatata

SEQ ID NO: 4451 - DNA, 20 bp, synthetic construct
  misc_feature 1..20: note = chemically synthesized
  source 1..20: mol_type = other DNA
gttcctctagttatttcctc

SEQ ID NO: 4452 - DNA, 20 bp, synthetic construct
  misc_feature 1..20: note = chemically synthesized
  source 1..20: mol_type = other DNA
aagtcaaaaatgaagaggta

SEQ ID NO: 4453 - DNA, 20 bp, synthetic construct
  misc_feature 1..20: note = chemically synthesized
  source 1..20: mol_type = other DNA
taaagtaagtagaaaataaa

SEQ ID NO: 4454 - DNA, 20 bp, synthetic construct
  misc_feature 1..20: note = chemically synthesized
  source 1..20: mol_type = other DNA
ttcatgtttatgttttcaat

SEQ ID NO: 4455 - DNA, 20 bp, synthetic construct
  misc_feature 1..20: note = chemically synthesized
  source 1..20: mol_type = other DNA
gaaagaagcatacaagggga

SEQ ID NO: 4456 - DNA, 20 bp, synthetic construct
  misc_feature 1..20: note = chemically synthesized
  source 1..20: mol_type = other DNA
cacacaggtctgtaaaaaca

SEQ ID NO: 4457 - DNA, 20 bp, synthetic construct
  misc_feature 1..20: note = chemically synthesized
  source 1..20: mol_type = other DNA
aaattatttacaagctttaa

SEQ ID NO: 4458 - DNA, 20 bp, synthetic construct
  misc_feature 1..20: note = chemically synthesized
  source 1..20: mol_type = other DNA
ttacaagctttaactggatc

SEQ ID NO: 4459 - DNA, 20 bp, synthetic construct
  misc_feature 1..20: note = chemically synthesized
  source 1..20: mol_type = other DNA
ctctaaaactttgtgtgacc

SEQ ID NO: 4460 - DNA, 20 bp, synthetic construct
  misc_feature 1..20: note = chemically synthesized
  source 1..20: mol_type = other DNA
aaagataataacagaactta

SEQ ID NO: 4461 - DNA, 20 bp, synthetic construct
  misc_feature 1..20: note = chemically synthesized
  source 1..20: mol_type = other DNA
tcttggtctaaagagccaat

SEQ ID NO: 4462 - DNA, 20 bp, synthetic construct
  misc_feature 1..20: note = chemically synthesized
  source 1..20: mol_type = other DNA
aaagagaaacatgatctaat

SEQ ID NO: 4463 - DNA, 20 bp, synthetic construct
  misc_feature 1..20: note = chemically synthesized
  source 1..20: mol_type = other DNA
gtaagatgacattggctgct

SEQ ID NO: 4464 - DNA, 20 bp, synthetic construct
  misc_feature 1..20: note = chemically synthesized
  source 1..20: mol_type = other DNA
gtgaggaaactgagagataa

SEQ ID NO: 4465 - DNA, 20 bp, synthetic construct
  misc_feature 1..20: note = chemically synthesized
  source 1..20: mol_type = other DNA
ttaaagcttgtaaataattt

SEQ ID NO: 4466 - DNA, 20 bp, synthetic construct
  misc_feature 1..20: note = chemically synthesized
  source 1..20: mol_type = other DNA
tcttgtttttctacaaaagt

SEQ ID NO: 4467 - DNA, 20 bp, synthetic construct
  misc_feature 1..20: note = chemically synthesized
  source 1..20: mol_type = other DNA
tctacaaaagtctggatata

SEQ ID NO: 4468 - DNA, 20 bp, synthetic construct
  misc_feature 1..20: note = chemically synthesized
  source 1..20: mol_type = other DNA
tctaaatttttaaactaata

SEQ ID NO: 4469 - DNA, 20 bp, synthetic construct
  misc_feature 1..20: note = chemically synthesized
  source 1..20: mol_type = other DNA
actaataatggatttgaaaa

SEQ ID NO: 4470 - DNA, 20 bp, synthetic construct
  misc_feature 1..20: note = chemically synthesized
  source 1..20: mol_type = other DNA
aaagcccagcatattttcat

SEQ ID NO: 4471 - DNA, 20 bp, synthetic construct
  misc_feature 1..20: note = chemically synthesized
  source 1..20: mol_type = other DNA
ttaatctgttttaaacactg

SEQ ID NO: 4472 - DNA, 20 bp, synthetic construct
  misc_feature 1..20: note = chemically synthesized
  source 1..20: mol_type = other DNA
tactttaagtgaagttactt

SEQ ID NO: 4473 - DNA, 20 bp, synthetic construct
  misc_feature 1..20: note = chemically synthesized
  source 1..20: mol_type = other DNA
gaagttacttctgggtgttc

SEQ ID NO: 4474 - DNA, 20 bp, synthetic construct
  misc_feature 1..20: note = chemically synthesized
  source 1..20: mol_type = other DNA
tctggagtttcaggttgatt

SEQ ID NO: 4475 - DNA, 20 bp, synthetic construct
  misc_feature 1..20: note = chemically synthesized
  source 1..20: mol_type = other DNA
tatttcactttttgttgaag

SEQ ID NO: 4476 - DNA, 20 bp, synthetic construct
  misc_feature 1..20: note = chemically synthesized
  source 1..20: mol_type = other DNA
ttctaggaggctttcaagtt

SEQ ID NO: 4477 - DNA, 20 bp, synthetic construct
  misc_feature 1..20: note = chemically synthesized
  source 1..20: mol_type = other DNA
ggaggctttcaagttttgag

SEQ ID NO: 4478 - DNA, 20 bp, synthetic construct
  misc_feature 1..20: note = chemically synthesized
  source 1..20: mol_type = other DNA
aaaaagactgatcaaatatg

SEQ ID NO: 4479 - DNA, 20 bp, synthetic construct
  misc_feature 1..20: note = chemically synthesized
  source 1..20: mol_type = other DNA
tgattttggctctggagata

SEQ ID NO: 4480 - DNA, 20 bp, synthetic construct
  misc_feature 1..20: note = chemically synthesized
  source 1..20: mol_type = other DNA
tggagatagagaatcaaatg

SEQ ID NO: 4481 - DNA, 20 bp, synthetic construct
  misc_feature 1..20: note = chemically synthesized
  source 1..20: mol_type = other DNA
attaagccgtgttaacttgc

SEQ ID NO: 4482 - DNA, 20 bp, synthetic construct
  misc_feature 1..20: note = chemically synthesized
  source 1..20: mol_type = other DNA
gaatgtaaccttcttccaca

SEQ ID NO: 4483 - DNA, 20 bp, synthetic construct
  misc_feature 1..20: note = chemically synthesized
  source 1..20: mol_type = other DNA
gtcaaaaataaacttttttg

SEQ ID NO: 4484 - DNA, 20 bp, synthetic construct
  misc_feature 1..20: note = chemically synthesized
  source 1..20: mol_type = other DNA
aagttgaggggaaaaaagta

SEQ ID NO: 4485 - DNA, 20 bp, synthetic construct
  misc_feature 1..20: note = chemically synthesized
  source 1..20: mol_type = other DNA
gaagtctaggtctgcttcca

SEQ ID NO: 4486 - DNA, 20 bp, synthetic construct
  misc_feature 1..20: note = chemically synthesized
  source 1..20: mol_type = other DNA
tgttcctctagttatttcct

SEQ ID NO: 4487 - DNA, 20 bp, synthetic construct
  misc_feature 1..20: note = chemically synthesized
  source 1..20: mol_type = other DNA
aaaccagtgaaatcaaagaa

SEQ ID NO: 4488 - DNA, 20 bp, synthetic construct
  misc_feature 1..20: note = chemically synthesized
  source 1..20: mol_type = other DNA
caagtcaaaaatgaagaggt

SEQ ID NO: 4489 - DNA, 20 bp, synthetic construct
  misc_feature 1..20: note = chemically synthesized
  source 1..20: mol_type = other DNA
caaaacttgaaagcctccta

SEQ ID NO: 4490 - DNA, 20 bp, synthetic construct
  misc_feature 1..20: note = chemically synthesized
  source 1..20: mol_type = other DNA
agtaacttcacttaaagtaa

SEQ ID NO: 4491 - DNA, 20 bp, synthetic construct
  misc_feature 1..20: note = chemically synthesized
  source 1..20: mol_type = other DNA
tgttgaaatacttttttttc

SEQ ID NO: 4492 - DNA, 20 bp, synthetic construct
  misc_feature 1..20: note = chemically synthesized
  source 1..20: mol_type = other DNA
ttttccaagaaaaataatct

SEQ ID NO: 4493 - DNA, 20 bp, synthetic construct
  misc_feature 1..20: note = chemically synthesized
  source 1..20: mol_type = other DNA
ctttttcttttaattgaagt

SEQ ID NO: 4494 - DNA, 20 bp, synthetic construct
  misc_feature 1..20: note = chemically synthesized
  source 1..20: mol_type = other DNA
gatagtgttacaggaaatta

SEQ ID NO: 4495 - DNA, 20 bp, synthetic construct
  misc_feature 1..20: note = chemically synthesized
  source 1..20: mol_type = other DNA
tgttacaggaaattaataga

SEQ ID NO: 4496 - DNA, 20 bp, synthetic construct
  misc_feature 1..20: note = chemically synthesized
  source 1..20: mol_type = other DNA
ctctctatatccagactttt

SEQ ID NO: 4497 - DNA, 20 bp, synthetic construct
  misc_feature 1..20: note = chemically synthesized
  source 1..20: mol_type = other DNA
accaacagcatagtcaaata

SEQ ID NO: 4498 - DNA, 20 bp, synthetic construct
  misc_feature 1..20: note = chemically synthesized
  source 1..20: mol_type = other DNA
agcatagtcaaataaaagaa

SEQ ID NO: 4499 - DNA, 20 bp, synthetic construct
  misc_feature 1..20: note = chemically synthesized
  source 1..20: mol_type = other DNA
cagaacttataggattattg

SEQ ID NO: 4500 - DNA, 20 bp, synthetic construct
  misc_feature 1..20: note = chemically synthesized
  source 1..20: mol_type = other DNA
tattgtgtggttttgagcaa

SEQ ID NO: 4501 - DNA, 20 bp, synthetic construct
  misc_feature 1..20: note = chemically synthesized
  source 1..20: mol_type = other DNA
gattttctgaacttcaatta

SEQ ID NO: 4502 - DNA, 20 bp, synthetic construct
  misc_feature 1..20: note = chemically synthesized
  source 1..20: mol_type = other DNA
tttaatctgttttaaacact

SEQ ID NO: 4503 - DNA, 20 bp, synthetic construct
  misc_feature 1..20: note = chemically synthesized
  source 1..20: mol_type = other DNA
agtatttcaaatggcatgcc

SEQ ID NO: 4504 - DNA, 20 bp, synthetic construct
  misc_feature 1..20: note = chemically synthesized
  source 1..20: mol_type = other DNA
atatttcactttttgttgaa

SEQ ID NO: 4505 - DNA, 20 bp, synthetic construct
  misc_feature 1..20: note = chemically synthesized
  source 1..20: mol_type = other DNA
ttgattttggctctggagat

SEQ ID NO: 4506 - DNA, 20 bp, synthetic construct
  misc_feature 1..20: note = chemically synthesized
  source 1..20: mol_type = other DNA
ctatatataccaatatttgc

SEQ ID NO: 4507 - DNA, 20 bp, synthetic construct
  misc_feature 1..20: note = chemically synthesized
  source 1..20: mol_type = other DNA
gatcaatgctaaatgaaatc

SEQ ID NO: 4508 - DNA, 20 bp, synthetic construct
  misc_feature 1..20: note = chemically synthesized
  source 1..20: mol_type = other DNA
aaaaagtaaaattagctttt

SEQ ID NO: 4509 - DNA, 20 bp, synthetic construct
  misc_feature 1..20: note = chemically synthesized
  source 1..20: mol_type = other DNA
gtctaggtctgcttccagaa

SEQ ID NO: 4510 - DNA, 20 bp, synthetic construct
  misc_feature 1..20: note = chemically synthesized
  source 1..20: mol_type = other DNA
ccaaattaatgacatatttc

SEQ ID NO: 4511 - DNA, 20 bp, synthetic construct
  misc_feature 1..20: note = chemically synthesized
  source 1..20: mol_type = other DNA
tatgtcacttgaactcaact

SEQ ID NO: 4512 - DNA, 20 bp, synthetic construct
  misc_feature 1..20: note = chemically synthesized
  source 1..20: mol_type = other DNA
gtttccctaatgttatatat

SEQ ID NO: 4513 - DNA, 20 bp, synthetic construct
  misc_feature 1..20: note = chemically synthesized
  source 1..20: mol_type = other DNA
gtaaaaagttaaaaaaaatt

SEQ ID NO: 4514 - DNA, 20 bp, synthetic construct
  misc_feature 1..20: note = chemically synthesized
  source 1..20: mol_type = other DNA
taaaactattctccagtgtt

SEQ ID NO: 4515 - DNA, 20 bp, synthetic construct
  misc_feature 1..20: note = chemically synthesized
  source 1..20: mol_type = other DNA
ctatatccagacttttgtag

SEQ ID NO: 4516 - DNA, 20 bp, synthetic construct
  misc_feature 1..20: note = chemically synthesized
  source 1..20: mol_type = other DNA
catctttcacacaggtctgt

SEQ ID NO: 4517 - DNA, 20 bp, synthetic construct
  misc_feature 1..20: note = chemically synthesized
  source 1..20: mol_type = other DNA
ctgcatttaaaccatggctc

SEQ ID NO: 4518 - DNA, 20 bp, synthetic construct
  misc_feature 1..20: note = chemically synthesized
  source 1..20: mol_type = other DNA
agatcatgtttctctttgct

SEQ ID NO: 4519 - DNA, 20 bp, synthetic construct
  misc_feature 1..20: note = chemically synthesized
  source 1..20: mol_type = other DNA
tatataacattagggaaaca

SEQ ID NO: 4520 - DNA, 20 bp, synthetic construct
  misc_feature 1..20: note = chemically synthesized
  source 1..20: mol_type = other DNA
ttttttaaaagatccacatt

SEQ ID NO: 4521 - DNA, 20 bp, synthetic construct
  misc_feature 1..20: note = chemically synthesized
  source 1..20: mol_type = other DNA
ataataaatttacccaacaa

SEQ ID NO: 4522 - DNA, 20 bp, synthetic construct
  misc_feature 1..20: note = chemically synthesized
  source 1..20: mol_type = other DNA
taaaatcataaaaaagtaaa

SEQ ID NO: 4523 - DNA, 20 bp, synthetic construct
  misc_feature 1..20: note = chemically synthesized
  source 1..20: mol_type = other DNA
agtcaccatagcattgaatg

SEQ ID NO: 4524 - DNA, 20 bp, synthetic construct
  misc_feature 1..20: note = chemically synthesized
  source 1..20: mol_type = other DNA
attaagttagttgctcattt

SEQ ID NO: 4525 - DNA, 20 bp, synthetic construct
  misc_feature 1..20: note = chemically synthesized
  source 1..20: mol_type = other DNA
gttacattcgtgcaagttaa

SEQ ID NO: 4526 - DNA, 20 bp, synthetic construct
  misc_feature 1..20: note = chemically synthesized
  source 1..20: mol_type = other DNA
tcgtgcaagttaacacggct

SEQ ID NO: 4527 - DNA, 20 bp, synthetic construct
  misc_feature 1..20: note = chemically synthesized
  source 1..20: mol_type = other DNA
tatagagttaagaagtctag

SEQ ID NO: 4528 - DNA, 20 bp, synthetic construct
  misc_feature 1..20: note = chemically synthesized
  source 1..20: mol_type = other DNA
tccagaagaaaacagttcca

SEQ ID NO: 4529 - DNA, 20 bp, synthetic construct
  misc_feature 1..20: note = chemically synthesized
  source 1..20: mol_type = other DNA
attgatcaagacaattcatc

SEQ ID NO: 4530 - DNA, 20 bp, synthetic construct
  misc_feature 1..20: note = chemically synthesized
  source 1..20: mol_type = other DNA
ctctatctccagagccaaaa

SEQ ID NO: 4531 - DNA, 20 bp, synthetic construct
  misc_feature 1..20: note = chemically synthesized
  source 1..20: mol_type = other DNA
aagtagaaaataaagagggt

SEQ ID NO: 4532 - DNA, 20 bp, synthetic construct
  misc_feature 1..20: note = chemically synthesized
  source 1..20: mol_type = other DNA
aaaataaagagggttcatgt

SEQ ID NO: 4533 - DNA, 20 bp, synthetic construct
  misc_feature 1..20: note = chemically synthesized
  source 1..20: mol_type = other DNA
atttcctattataatttcaa

SEQ ID NO: 4534 - DNA, 20 bp, synthetic construct
  misc_feature 1..20: note = chemically synthesized
  source 1..20: mol_type = other DNA
attataatttcaagttagtt

SEQ ID NO: 4535 - DNA, 20 bp, synthetic construct
  misc_feature 1..20: note = chemically synthesized
  source 1..20: mol_type = other DNA
aaaaatttaaaactattctc

SEQ ID NO: 4536 - DNA, 20 bp, synthetic construct
  misc_feature 1..20: note = chemically synthesized
  source 1..20: mol_type = other DNA
aactattctccagtgtttaa

SEQ ID NO: 4537 - DNA, 20 bp, synthetic construct
  misc_feature 1..20: note = chemically synthesized
  source 1..20: mol_type = other DNA
ttaaataatacagtaaatgg

SEQ ID NO: 4538 - DNA, 20 bp, synthetic construct
  misc_feature 1..20: note = chemically synthesized
  source 1..20: mol_type = other DNA
tttattcatatgaaaatatg

SEQ ID NO: 4539 - DNA, 20 bp, synthetic construct
  misc_feature 1..20: note = chemically synthesized
  source 1..20: mol_type = other DNA
attcatttttcaaatccatt

SEQ ID NO: 4540 - DNA, 20 bp, synthetic construct
  misc_feature 1..20: note = chemically synthesized
  source 1..20: mol_type = other DNA
atccattattagtttaaaaa

SEQ ID NO: 4541 - DNA, 20 bp, synthetic construct
  misc_feature 1..20: note = chemically synthesized
  source 1..20: mol_type = other DNA
actgaatcctaaaattattt

SEQ ID NO: 4542 - DNA, 20 bp, synthetic construct
  misc_feature 1..20: note = chemically synthesized
  source 1..20: mol_type = other DNA
attacttcacccctttatct

SEQ ID NO: 4543 - DNA, 20 bp, synthetic construct
  misc_feature 1..20: note = chemically synthesized
  source 1..20: mol_type = other DNA
caaagataataacagaactt

SEQ ID NO: 4544 - DNA, 20 bp, synthetic construct
  misc_feature 1..20: note = chemically synthesized
  source 1..20: mol_type = other DNA
ttactaaaattcaaattaga

SEQ ID NO: 4545 - DNA, 20 bp, synthetic construct
  misc_feature 1..20: note = chemically synthesized
  source 1..20: mol_type = other DNA
ctctttgctcaaaaccacac

SEQ ID NO: 4546 - DNA, 20 bp, synthetic construct
  misc_feature 1..20: note = chemically synthesized
  source 1..20: mol_type = other DNA
actcatattggctctttaga

SEQ ID NO: 4547 - DNA, 20 bp, synthetic construct
  misc_feature 1..20: note = chemically synthesized
  source 1..20: mol_type = other DNA
agtgaaatggaaagctattg

SEQ ID NO: 4548 - DNA, 20 bp, synthetic construct
  misc_feature 1..20: note = chemically synthesized
  source 1..20: mol_type = other DNA
gtaatttattcaaggtcaca

SEQ ID NO: 4549 - DNA, 20 bp, synthetic construct
  misc_feature 1..20: note = chemically synthesized
  source 1..20: mol_type = other DNA
gtcacacaaagttttagagc

SEQ ID NO: 4550 - DNA, 20 bp, synthetic construct
  misc_feature 1..20: note = chemically synthesized
  source 1..20: mol_type = other DNA
agagccatggtttaaatgca

SEQ ID NO: 4551 - DNA, 20 bp, synthetic construct
  misc_feature 1..20: note = chemically synthesized
  source 1..20: mol_type = other DNA
ggtttaaatgcaggtagttt

SEQ ID NO: 4552 - DNA, 20 bp, synthetic construct
  misc_feature 1..20: note = chemically synthesized
  source 1..20: mol_type = other DNA
aattttactcatgatccagt

SEQ ID NO: 4553 - DNA, 20 bp, synthetic construct
  misc_feature 1..20: note = chemically synthesized
  source 1..20: mol_type = other DNA
gttaaagcttgtaaataatt

SEQ ID NO: 4554 - DNA, 20 bp, synthetic construct
  misc_feature 1..20: note = chemically synthesized
  source 1..20: mol_type = other DNA
ttgtaaataattttaggatt

SEQ ID NO: 4555 - DNA, 20 bp, synthetic construct
  misc_feature 1..20: note = chemically synthesized
  source 1..20: mol_type = other DNA
taccattaaaatactgactt

SEQ ID NO: 4556 - DNA, 20 bp, synthetic construct
  misc_feature 1..20: note = chemically synthesized
  source 1..20: mol_type = other DNA
ttcttttatttgactatgct

SEQ ID NO: 4557 - DNA, 20 bp, synthetic construct
  misc_feature 1..20: note = chemically synthesized
  source 1..20: mol_type = other DNA
tttgactatgctgttggttt

SEQ ID NO: 4558 - DNA, 20 bp, synthetic construct
  misc_feature 1..20: note = chemically synthesized
  source 1..20: mol_type = other DNA
gaaggtctttgatgctatta

SEQ ID NO: 4559 - DNA, 20 bp, synthetic construct
  misc_feature 1..20: note = chemically synthesized
  source 1..20: mol_type = other DNA
tagagagtaggttggttata

SEQ ID NO: 4560 - DNA, 20 bp, synthetic construct
  misc_feature 1..20: note = chemically synthesized
  source 1..20: mol_type = other DNA
atctaaatttttaaactaat

SEQ ID NO: 4561 - DNA, 20 bp, synthetic construct
  misc_feature 1..20: note = chemically synthesized
  source 1..20: mol_type = other DNA
attggcaattccttcccctt

SEQ ID NO: 4562 - DNA, 20 bp, synthetic construct
  misc_feature 1..20: note = chemically synthesized
  source 1..20: mol_type = other DNA
taaattgtactatctctaaa

SEQ ID NO: 4563 - DNA, 20 bp, synthetic construct
  misc_feature 1..20: note = chemically synthesized
  source 1..20: mol_type = other DNA
tccatttactgtattattta

SEQ ID NO: 4564 - DNA, 20 bp, synthetic construct
  misc_feature 1..20: note = chemically synthesized
  source 1..20: mol_type = other DNA
atctgttttaaacactggag

SEQ ID NO: 4565 - DNA, 20 bp, synthetic construct
  misc_feature 1..20: note = chemically synthesized
  source 1..20: mol_type = other DNA
atagtgtaatgacatagtgt

SEQ ID NO: 4566 - DNA, 20 bp, synthetic construct
  misc_feature 1..20: note = chemically synthesized
  source 1..20: mol_type = other DNA
tgttctagattgtataattt

SEQ ID NO: 4567 - DNA, 20 bp, synthetic construct
  misc_feature 1..20: note = chemically synthesized
  source 1..20: mol_type = other DNA
tcatataaaatgcaaatttt

SEQ ID NO: 4568 - DNA, 20 bp, synthetic construct
  misc_feature 1..20: note = chemically synthesized
  source 1..20: mol_type = other DNA
taataggaaattttattttc

SEQ ID NO: 4569 - DNA, 20 bp, synthetic construct
  misc_feature 1..20: note = chemically synthesized
  source 1..20: mol_type = other DNA
gaagttacttctgggtgttc

SEQ ID NO: 4570 - DNA, 20 bp, synthetic construct
  misc_feature 1..20: note = chemically synthesized
  source 1..20: mol_type = other DNA
ctgggtgttctggagtttca

SEQ ID NO: 4571 - DNA, 20 bp, synthetic construct
  misc_feature 1..20: note = chemically synthesized
  source 1..20: mol_type = other DNA
aagtagaattttttcttcta

SEQ ID NO: 4572 - DNA, 20 bp, synthetic construct
  misc_feature 1..20: note = chemically synthesized
  source 1..20: mol_type = other DNA
ttttttcttctaggaggctt

SEQ ID NO: 4573 - DNA, 20 bp, synthetic construct
  misc_feature 1..20: note = chemically synthesized
  source 1..20: mol_type = other DNA
ttacctcttcatttttgact

SEQ ID NO: 4574 - DNA, 20 bp, synthetic construct
  misc_feature 1..20: note = chemically synthesized
  source 1..20: mol_type = other DNA
tctcagttccttttcttctt

SEQ ID NO: 4575 - DNA, 20 bp, synthetic construct
  misc_feature 1..20: note = chemically synthesized
  source 1..20: mol_type = other DNA
ttttcttcttctttgatttc

SEQ ID NO: 4576 - DNA, 20 bp, synthetic construct
  misc_feature 1..20: note = chemically synthesized
  source 1..20: mol_type = other DNA
aaaaagactgatcaaatatg

SEQ ID NO: 4577 - DNA, 20 bp, synthetic construct
  misc_feature 1..20: note = chemically synthesized
  source 1..20: mol_type = other DNA
acatcgtctaacatagcaaa

SEQ ID NO: 4578 - DNA, 20 bp, synthetic construct
  misc_feature 1..20: note = chemically synthesized
  source 1..20: mol_type = other DNA
ctagaggaacaataaaaaga

SEQ ID NO: 4579 - DNA, 20 bp, synthetic construct
  misc_feature 1..20: note = chemically synthesized
  source 1..20: mol_type = other DNA
cttaattgtgaacattttta

SEQ ID NO: 4580 - DNA, 20 bp, synthetic construct
  misc_feature 1..20: note = chemically synthesized
  source 1..20: mol_type = other DNA
ttcaatttcaagcaacgtgg

SEQ ID NO: 4581 - DNA, 20 bp, synthetic construct
  misc_feature 1..20: note = chemically synthesized
  source 1..20: mol_type = other DNA
cattcaatgctatggtgact

SEQ ID NO: 4582 - DNA, 20 bp, synthetic construct
  misc_feature 1..20: note = chemically synthesized
  source 1..20: mol_type = other DNA
taaaagctaattttactttt

SEQ ID NO: 4583 - DNA, 20 bp, synthetic construct
  misc_feature 1..20: note = chemically synthesized
  source 1..20: mol_type = other DNA
ttttacttttttatgatttt

SEQ ID NO: 4584 - DNA, 22 bp, synthetic construct
  misc_feature 1..22: note = chemically synthesized
  source 1..22: mol_type = other DNA
aattcattacttttttcccctc

SEQ ID NO: 4585 - DNA, 22 bp, synthetic construct
  misc_feature 1..22: note = chemically synthesized
  source 1..22: mol_type = other DNA
attcattacttttttcccctca

SEQ ID NO: 4586 - DNA, 22 bp, synthetic construct
  misc_feature 1..22: note = chemically synthesized
  source 1..22: mol_type = other DNA
attacttttttcccctcaactt

SEQ ID NO: 4587 - DNA, 22 bp, synthetic construct
  misc_feature 1..22: note = chemically synthesized
  source 1..22: mol_type = other DNA
cttttttcccctcaactttaat

SEQ ID NO: 4588 - DNA, 22 bp, synthetic construct
  misc_feature 1..22: note = chemically synthesized
  source 1..22: mol_type = other DNA
ttttcccctcaactttaataat

SEQ ID NO: 4589 - DNA, 22 bp, synthetic construct
  misc_feature 1..22: note = chemically synthesized
  source 1..22: mol_type = other DNA
tttcccctcaactttaataata

SEQ ID NO: 4590 - DNA, 22 bp, synthetic construct
  misc_feature 1..22: note = chemically synthesized
  source 1..22: mol_type = other DNA
ttcccctcaactttaataataa

SEQ ID NO: 4591 - DNA, 22 bp, synthetic construct
  misc_feature 1..22: note = chemically synthesized
  source 1..22: mol_type = other DNA
tcccctcaactttaataataaa

SEQ ID NO: 4592 - DNA, 22 bp, synthetic construct
  misc_feature 1..22: note = chemically synthesized
  source 1..22: mol_type = other DNA
cccctcaactttaataataaat

SEQ ID NO: 4593 - DNA, 22 bp, synthetic construct
  misc_feature 1..22: note = chemically synthesized
  source 1..22: mol_type = other DNA
ccctcaactttaataataaatt

SEQ ID NO: 4594 - DNA, 22 bp, synthetic construct
  misc_feature 1..22: note = chemically synthesized
  source 1..22: mol_type = other DNA
aactttaataataaatttaccc

SEQ ID NO: 4595 - DNA, 22 bp, synthetic construct
  misc_feature 1..22: note = chemically synthesized
  source 1..22: mol_type = other DNA
taataataaatttacccaacaa

SEQ ID NO: 4596 - DNA, 22 bp, synthetic construct
  misc_feature 1..22: note = chemically synthesized
  source 1..22: mol_type = other DNA
aataataaatttacccaacaaa

SEQ ID NO: 4597 - DNA, 22 bp, synthetic construct
  misc_feature 1..22: note = chemically synthesized
  source 1..22: mol_type = other DNA
ataataaatttacccaacaaaa

SEQ ID NO: 4598 - DNA, 22 bp, synthetic construct
  misc_feature 1..22: note = chemically synthesized
  source 1..22: mol_type = other DNA
acccaacaaaaaagtttatttt

SEQ ID NO: 4599 - DNA, 22 bp, synthetic construct
  misc_feature 1..22: note = chemically synthesized
  source 1..22: mol_type = other DNA
cccaacaaaaaagtttattttt

SEQ ID NO: 4600 - DNA, 22 bp, synthetic construct
  misc_feature 1..22: note = chemically synthesized
  source 1..22: mol_type = other DNA
atttttgacttgtaaatctctt

SEQ ID NO: 4601 - DNA, 22 bp, synthetic construct
  misc_feature 1..22: note = chemically synthesized
  source 1..22: mol_type = other DNA
tttttgacttgtaaatctctta

SEQ ID NO: 4602 - DNA, 22 bp, synthetic construct
  misc_feature 1..22: note = chemically synthesized
  source 1..22: mol_type = other DNA
ttgacttgtaaatctcttaaaa

SEQ ID NO: 4603 - DNA, 22 bp, synthetic construct
  misc_feature 1..22: note = chemically synthesized
  source 1..22: mol_type = other DNA
tgacttgtaaatctcttaaaat

SEQ ID NO: 4604 - DNA, 22 bp, synthetic construct
  misc_feature 1..22: note = chemically synthesized
  source 1..22: mol_type = other DNA
gacttgtaaatctcttaaaatc

SEQ ID NO: 4605 - DNA, 22 bp, synthetic construct
  misc_feature 1..22: note = chemically synthesized
  source 1..22: mol_type = other DNA
acttgtaaatctcttaaaatca

SEQ ID NO: 4606 - DNA, 22 bp, synthetic construct
  misc_feature 1..22: note = chemically synthesized
  source 1..22: mol_type = other DNA
gtaaatctcttaaaatcataaa

SEQ ID NO: 4607 - DNA, 22 bp, synthetic construct
  misc_feature 1..22: note = chemically synthesized
  source 1..22: mol_type = other DNA
taaatctcttaaaatcataaaa

SEQ ID NO: 4608 - DNA, 22 bp, synthetic construct
  misc_feature 1..22: note = chemically synthesized
  source 1..22: mol_type = other DNA
ttaaaatcataaaaaagtaaaa

SEQ ID NO: 4609 - DNA, 22 bp, synthetic construct
  misc_feature 1..22: note = chemically synthesized
  source 1..22: mol_type = other DNA
aaaatcataaaaaagtaaaatt

SEQ ID NO: 4610 - DNA, 22 bp, synthetic construct
  misc_feature 1..22: note = chemically synthesized
  source 1..22: mol_type = other DNA
aaatcataaaaaagtaaaatta

SEQ ID NO: 4611 - DNA, 22 bp, synthetic construct
  misc_feature 1..22: note = chemically synthesized
  source 1..22: mol_type = other DNA
gcttttaaaaacaggtagtcac

SEQ ID NO: 4612 - DNA, 22 bp, synthetic construct
  misc_feature 1..22: note = chemically synthesized
  source 1..22: mol_type = other DNA
ttaaaaacaggtagtcaccata

SEQ ID NO: 4613 - DNA, 22 bp, synthetic construct
  misc_feature 1..22: note = chemically synthesized
  source 1..22: mol_type = other DNA
taaaaacaggtagtcaccatag

SEQ ID NO: 4614 - DNA, 22 bp, synthetic construct
  misc_feature 1..22: note = chemically synthesized
  source 1..22: mol_type = other DNA
aaaaacaggtagtcaccatagc

SEQ ID NO: 4615 - DNA, 22 bp, synthetic construct
  misc_feature 1..22: note = chemically synthesized
  source 1..22: mol_type = other DNA
aaaacaggtagtcaccatagca

SEQ ID NO: 4616 - DNA, 22 bp, synthetic construct
  misc_feature 1..22: note = chemically synthesized
  source 1..22: mol_type = other DNA
aatgtgtagtttataatacagc

SEQ ID NO: 4617 - DNA, 22 bp, synthetic construct
  misc_feature 1..22: note = chemically synthesized
  source 1..22: mol_type = other DNA
ataatacagcaaagttaaatac

SEQ ID NO: 4618 - DNA, 22 bp, synthetic construct
  misc_feature 1..22: note = chemically synthesized
  source 1..22: mol_type = other DNA
taatacagcaaagttaaataca

SEQ ID NO: 4619 - DNA, 22 bp, synthetic construct
  misc_feature 1..22: note = chemically synthesized
  source 1..22: mol_type = other DNA
aatacaatttcaaattacctat

SEQ ID NO: 4620 - DNA, 22 bp, synthetic construct
  misc_feature 1..22: note = chemically synthesized
  source 1..22: mol_type = other DNA
caaattacctattaagttagtt

SEQ ID NO: 4621 - DNA, 22 bp, synthetic construct
  misc_feature 1..22: note = chemically synthesized
  source 1..22: mol_type = other DNA
aaattacctattaagttagttg

SEQ ID NO: 4622 - DNA, 22 bp, synthetic construct
  misc_feature 1..22: note = chemically synthesized
  source 1..22: mol_type = other DNA
cctattaagttagttgctcatt

SEQ ID NO: 4623 - DNA, 22 bp, synthetic construct
  misc_feature 1..22: note = chemically synthesized
  source 1..22: mol_type = other DNA
ttaagttagttgctcatttctt

SEQ ID NO: 4624 - DNA, 22 bp, synthetic construct
  misc_feature 1..22: note = chemically synthesized
  source 1..22: mol_type = other DNA
agttagttgctcatttctttga

SEQ ID NO: 4625 - DNA, 22 bp, synthetic construct
  misc_feature 1..22: note = chemically synthesized
  source 1..22: mol_type = other DNA
gttgctcatttctttgatttca

SEQ ID NO: 4626 - DNA, 22 bp, synthetic construct
  misc_feature 1..22: note = chemically synthesized
  source 1..22: mol_type = other DNA
ctcatttctttgatttcattta

SEQ ID NO: 4627 - DNA, 22 bp, synthetic construct
  misc_feature 1..22: note = chemically synthesized
  source 1..22: mol_type = other DNA
atttctttgatttcatttagca

SEQ ID NO: 4628 - DNA, 22 bp, synthetic construct
  misc_feature 1..22: note = chemically synthesized
  source 1..22: mol_type = other DNA
ctttgatttcatttagcattga

SEQ ID NO: 4629 - DNA, 22 bp, synthetic construct
  misc_feature 1..22: note = chemically synthesized
  source 1..22: mol_type = other DNA
tttgatttcatttagcattgat

SEQ ID NO: 4630 - DNA, 22 bp, synthetic construct
  misc_feature 1..22: note = chemically synthesized
  source 1..22: mol_type = other DNA
tgatttcatttagcattgatct

SEQ ID NO: 4631 - DNA, 22 bp, synthetic construct
  misc_feature 1..22: note = chemically synthesized
  source 1..22: mol_type = other DNA
gatttcatttagcattgatcta

SEQ ID NO: 4632 - DNA, 22 bp, synthetic construct
  misc_feature 1..22: note = chemically synthesized
  source 1..22: mol_type = other DNA
atttcatttagcattgatctaa

SEQ ID NO: 4633 - DNA, 22 bp, synthetic construct
  misc_feature 1..22: note = chemically synthesized
  source 1..22: mol_type = other DNA
catttagcattgatctaactca

SEQ ID NO: 4634 - DNA, 22 bp, synthetic construct
  misc_feature 1..22: note = chemically synthesized
  source 1..22: mol_type = other DNA
atttagcattgatctaactcaa

SEQ ID NO: 4635 - DNA, 22 bp, synthetic construct
  misc_feature 1..22: note = chemically synthesized
  source 1..22: mol_type = other DNA
agcattgatctaactcaatgtg

SEQ ID NO: 4636 - DNA, 22 bp, synthetic construct
  misc_feature 1..22: note = chemically synthesized
  source 1..22: mol_type = other DNA
gcattgatctaactcaatgtgg

SEQ ID NO: 4637 - DNA, 22 bp, synthetic construct
  misc_feature 1..22: note = chemically synthesized
  source 1..22: mol_type = other DNA
atctaactcaatgtggaagaag

SEQ ID NO: 4638 - DNA, 22 bp, synthetic construct
  misc_feature 1..22: note = chemically synthesized
  source 1..22: mol_type = other DNA
actcaatgtggaagaaggttac

SEQ ID NO: 4639 - DNA, 22 bp, synthetic construct
  misc_feature 1..22: note = chemically synthesized
  source 1..22: mol_type = other DNA
aatgtggaagaaggttacattc

SEQ ID NO: 4640 - DNA, 22 bp, synthetic construct
  misc_feature 1..22: note = chemically synthesized
  source 1..22: mol_type = other DNA
cattcgtgcaagttaacacggc

SEQ ID NO: 4641 - DNA, 22 bp, synthetic construct
  misc_feature 1..22: note = chemically synthesized
  source 1..22: mol_type = other DNA
gtgcaagttaacacggcttaat

SEQ ID NO: 4642 - DNA, 22 bp, synthetic construct
  misc_feature 1..22: note = chemically synthesized
  source 1..22: mol_type = other DNA
acacggcttaatgattaactat

SEQ ID NO: 4643 - DNA, 22 bp, synthetic construct
  misc_feature 1..22: note = chemically synthesized
  source 1..22: mol_type = other DNA
aatgattaactatgttcaccta

SEQ ID NO: 4644 - DNA, 22 bp, synthetic construct
  misc_feature 1..22: note = chemically synthesized
  source 1..22: mol_type = other DNA
atgattaactatgttcacctac

SEQ ID NO: 4645 - DNA, 22 bp, synthetic construct
  misc_feature 1..22: note = chemically synthesized
  source 1..22: mol_type = other DNA
actatgttcacctaccaacctt

SEQ ID NO: 4646 - DNA, 22 bp, synthetic construct
  misc_feature 1..22: note = chemically synthesized
  source 1..22: mol_type = other DNA
tgttcacctaccaaccttacct

SEQ ID NO: 4647 - DNA, 22 bp, synthetic construct
  misc_feature 1..22: note = chemically synthesized
  source 1..22: mol_type = other DNA
acctaccaaccttaccttttct

SEQ ID NO: 4648 - DNA, 22 bp, synthetic construct
  misc_feature 1..22: note = chemically synthesized
  source 1..22: mol_type = other DNA
ccaaccttaccttttctgggca

SEQ ID NO: 4649 - DNA, 22 bp, synthetic construct
  misc_feature 1..22: note = chemically synthesized
  source 1..22: mol_type = other DNA
accttttctgggcaaatattgg

SEQ ID NO: 4650 - DNA, 22 bp, synthetic construct
  misc_feature 1..22: note = chemically synthesized
  source 1..22: mol_type = other DNA
ccttttctgggcaaatattggt

SEQ ID NO: 4651 - DNA, 22 bp, synthetic construct
  misc_feature 1..22: note = chemically synthesized
  source 1..22: mol_type = other DNA
ttctgggcaaatattggtatat

SEQ ID NO: 4652 - DNA, 22 bp, synthetic construct
  misc_feature 1..22: note = chemically synthesized
  source 1..22: mol_type = other DNA
tctgggcaaatattggtatata

SEQ ID NO: 4653 - DNA, 22 bp, synthetic construct
  misc_feature 1..22: note = chemically synthesized
  source 1..22: mol_type = other DNA
ctgggcaaatattggtatatat

SEQ ID NO: 4654 - DNA, 22 bp, synthetic construct
  misc_feature 1..22: note = chemically synthesized
  source 1..22: mol_type = other DNA
tgggcaaatattggtatatata

SEQ ID NO: 4655 - DNA, 22 bp, synthetic construct
  misc_feature 1..22: note = chemically synthesized
  source 1..22: mol_type = other DNA
ggcaaatattggtatatataga

SEQ ID NO: 4656 - DNA, 22 bp, synthetic construct
  misc_feature 1..22: note = chemically synthesized
  source 1..22: mol_type = other DNA
gtatatatagagttaagaagtc

SEQ ID NO: 4657 - DNA, 22 bp, synthetic construct
  misc_feature 1..22: note = chemically synthesized
  source 1..22: mol_type = other DNA
agaagtctaggtctgcttccag

SEQ ID NO: 4658 - DNA, 22 bp, synthetic construct
  misc_feature 1..22: note = chemically synthesized
  source 1..22: mol_type = other DNA
ggtctgcttccagaagaaaaca

SEQ ID NO: 4659 - DNA, 22 bp, synthetic construct
  misc_feature 1..22: note = chemically synthesized
  source 1..22: mol_type = other DNA
cttccagaagaaaacagttcca

SEQ ID NO: 4660 - DNA, 22 bp, synthetic construct
  misc_feature 1..22: note = chemically synthesized
  source 1..22: mol_type = other DNA
ccagaagaaaacagttccacgt

SEQ ID NO: 4661 - DNA, 22 bp, synthetic construct
  misc_feature 1..22: note = chemically synthesized
  source 1..22: mol_type = other DNA
cagaagaaaacagttccacgtt

SEQ ID NO: 4662 - DNA, 22 bp, synthetic construct
  misc_feature 1..22: note = chemically synthesized
  source 1..22: mol_type = other DNA
cacgttgcttgaaattgaaaat

SEQ ID NO: 4663 - DNA, 22 bp, synthetic construct
  misc_feature 1..22: note = chemically synthesized
  source 1..22: mol_type = other DNA
cttgaaattgaaaatcaagata

SEQ ID NO: 4664 - DNA, 22 bp, synthetic construct
  misc_feature 1..22: note = chemically synthesized
  source 1..22: mol_type = other DNA
gaaattgaaaatcaagataaaa

SEQ ID NO: 4665 - DNA, 22 bp, synthetic construct
  misc_feature 1..22: note = chemically synthesized
  source 1..22: mol_type = other DNA
aaattgaaaatcaagataaaaa

SEQ ID NO: 4666 - DNA, 22 bp, synthetic construct
  misc_feature 1..22: note = chemically synthesized
  source 1..22: mol_type = other DNA
aaaatcaagataaaaatgttca

SEQ ID NO: 4667 - DNA, 22 bp, synthetic construct
  misc_feature 1..22: note = chemically synthesized
  source 1..22: mol_type = other DNA
acaattaagctccttcttttta

SEQ ID NO: 4668 - DNA, 22 bp, synthetic construct
  misc_feature 1..22: note = chemically synthesized
  source 1..22: mol_type = other DNA
agctccttctttttattgttcc

SEQ ID NO: 4669 - DNA, 22 bp, synthetic construct
  misc_feature 1..22: note = chemically synthesized
  source 1..22: mol_type = other DNA
cttctttttattgttcctctag

SEQ ID NO: 4670 - DNA, 22 bp, synthetic construct
  misc_feature 1..22: note = chemically synthesized
  source 1..22: mol_type = other DNA
ctttttattgttcctctagtta

SEQ ID NO: 4671 - DNA, 22 bp, synthetic construct
  misc_feature 1..22: note = chemically synthesized
  source 1..22: mol_type = other DNA
tttttattgttcctctagttat

SEQ ID NO: 4672 - DNA, 22 bp, synthetic construct
  misc_feature 1..22: note = chemically synthesized
  source 1..22: mol_type = other DNA
tttattgttcctctagttattt

SEQ ID NO: 4673 - DNA, 22 bp, synthetic construct
  misc_feature 1..22: note = chemically synthesized
  source 1..22: mol_type = other DNA
ttattgttcctctagttatttc

SEQ ID NO: 4674 - DNA, 22 bp, synthetic construct
  misc_feature 1..22: note = chemically synthesized
  source 1..22: mol_type = other DNA
tattgttcctctagttatttcc

SEQ ID NO: 4675 - DNA, 22 bp, synthetic construct
  misc_feature 1..22: note = chemically synthesized
  source 1..22: mol_type = other DNA
attgttcctctagttatttcct

SEQ ID NO: 4676 - DNA, 22 bp, synthetic construct
  misc_feature 1..22: note = chemically synthesized
  source 1..22: mol_type = other DNA
ttgttcctctagttatttcctc

SEQ ID NO: 4677 - DNA, 22 bp, synthetic construct
  misc_feature 1..22: note = chemically synthesized
  source 1..22: mol_type = other DNA
ttcctctagttatttcctccag

SEQ ID NO: 4678 - DNA, 22 bp, synthetic construct
  misc_feature 1..22: note = chemically synthesized
  source 1..22: mol_type = other DNA
ctctagttatttcctccagaat

SEQ ID NO: 4679 - DNA, 22 bp, synthetic construct
  misc_feature 1..22: note = chemically synthesized
  source 1..22: mol_type = other DNA
tagttatttcctccagaattga

SEQ ID NO: 4680 - DNA, 22 bp, synthetic construct
  misc_feature 1..22: note = chemically synthesized
  source 1..22: mol_type = other DNA
gttatttcctccagaattgatc

SEQ ID NO: 4681 - DNA, 22 bp, synthetic construct
  misc_feature 1..22: note = chemically synthesized
  source 1..22: mol_type = other DNA
tttcctccagaattgatcaaga

SEQ ID NO: 4682 - DNA, 22 bp, synthetic construct
  misc_feature 1..22: note = chemically synthesized
  source 1..22: mol_type = other DNA
cctccagaattgatcaagacaa

SEQ ID NO: 4683 - DNA, 22 bp, synthetic construct
  misc_feature 1..22: note = chemically synthesized
  source 1..22: mol_type = other DNA
ctccagaattgatcaagacaat

SEQ ID NO: 4684 - DNA, 22 bp, synthetic construct
  misc_feature 1..22: note = chemically synthesized
  source 1..22: mol_type = other DNA
cagaattgatcaagacaattca

SEQ ID NO: 4685 - DNA, 22 bp, synthetic construct
  misc_feature 1..22: note = chemically synthesized
  source 1..22: mol_type = other DNA
atcaagacaattcatcatttga

SEQ ID NO: 4686 - DNA, 22 bp, synthetic construct
  misc_feature 1..22: note = chemically synthesized
  source 1..22: mol_type = other DNA
atcatttgattctctatctcca

SEQ ID NO: 4687 - DNA, 22 bp, synthetic construct
  misc_feature 1..22: note = chemically synthesized
  source 1..22: mol_type = other DNA
gattctctatctccagagccaa

SEQ ID NO: 4688 - DNA, 22 bp, synthetic construct
  misc_feature 1..22: note = chemically synthesized
  source 1..22: mol_type = other DNA
attctctatctccagagccaaa

SEQ ID NO: 4689 - DNA, 22 bp, synthetic construct
  misc_feature 1..22: note = chemically synthesized
  source 1..22: mol_type = other DNA
tctatctccagagccaaaatca

SEQ ID NO: 4690 - DNA, 22 bp, synthetic construct
  misc_feature 1..22: note = chemically synthesized
  source 1..22: mol_type = other DNA
tatctccagagccaaaatcaag

SEQ ID NO: 4691 - DNA, 22 bp, synthetic construct
  misc_feature 1..22: note = chemically synthesized
  source 1..22: mol_type = other DNA
tctccagagccaaaatcaagat

SEQ ID NO: 4692 - DNA, 22 bp, synthetic construct
  misc_feature 1..22: note = chemically synthesized
  source 1..22: mol_type = other DNA
cagagccaaaatcaagatttgc

SEQ ID NO: 4693 - DNA, 22 bp, synthetic construct
  misc_feature 1..22: note = chemically synthesized
  source 1..22: mol_type = other DNA
gctatgttagacgatgtaaaaa

SEQ ID NO: 4694 - DNA, 22 bp, synthetic construct
  misc_feature 1..22: note = chemically synthesized
  source 1..22: mol_type = other DNA
ctatgttagacgatgtaaaaat

SEQ ID NO: 4695 - DNA, 22 bp, synthetic construct
  misc_feature 1..22: note = chemically synthesized
  source 1..22: mol_type = other DNA
tgttagacgatgtaaaaatttt

SEQ ID NO: 4696 - DNA, 22 bp, synthetic construct
  misc_feature 1..22: note = chemically synthesized
  source 1..22: mol_type = other DNA
gacgatgtaaaaattttagcca

SEQ ID NO: 4697 - DNA, 22 bp, synthetic construct
  misc_feature 1..22: note = chemically synthesized
  source 1..22: mol_type = other DNA
tagccaatggcctccttcagtt

SEQ ID NO: 4698 - DNA, 22 bp, synthetic construct
  misc_feature 1..22: note = chemically synthesized
  source 1..22: mol_type = other DNA
agccaatggcctccttcagttg

SEQ ID NO: 4699 - DNA, 22 bp, synthetic construct
  misc_feature 1..22: note = chemically synthesized
  source 1..22: mol_type = other DNA
gccaatggcctccttcagttgg

SEQ ID NO: 4700 - DNA, 22 bp, synthetic construct
  misc_feature 1..22: note = chemically synthesized
  source 1..22: mol_type = other DNA
cttcagttgggacatggtctta

SEQ ID NO: 4701 - DNA, 22 bp, synthetic construct
  misc_feature 1..22: note = chemically synthesized
  source 1..22: mol_type = other DNA
cagttgggacatggtcttaaag

SEQ ID NO: 4702 - DNA, 22 bp, synthetic construct
  misc_feature 1..22: note = chemically synthesized
  source 1..22: mol_type = other DNA
agttgggacatggtcttaaaga

SEQ ID NO: 4703 - DNA, 22 bp, synthetic construct
  misc_feature 1..22: note = chemically synthesized
  source 1..22: mol_type = other DNA
ggacatggtcttaaagactttg

SEQ ID NO: 4704 - DNA, 22 bp, synthetic construct
  misc_feature 1..22: note = chemically synthesized
  source 1..22: mol_type = other DNA
aaagactttgtccataagacga

SEQ ID NO: 4705 - DNA, 22 bp, synthetic construct
  misc_feature 1..22: note = chemically synthesized
  source 1..22: mol_type = other DNA
aagactttgtccataagacgaa

SEQ ID NO: 4706 - DNA, 22 bp, synthetic construct
  misc_feature 1..22: note = chemically synthesized
  source 1..22: mol_type = other DNA
tgtccataagacgaagggccaa

SEQ ID NO: 4707 - DNA, 22 bp, synthetic construct
  misc_feature 1..22: note = chemically synthesized
  source 1..22: mol_type = other DNA
gtccataagacgaagggccaaa

SEQ ID NO: 4708 - DNA, 22 bp, synthetic construct
  misc_feature 1..22: note = chemically synthesized
  source 1..22: mol_type = other DNA
tccataagacgaagggccaaat

SEQ ID NO: 4709 - DNA, 22 bp, synthetic construct
  misc_feature 1..22: note = chemically synthesized
  source 1..22: mol_type = other DNA
atgacatatttcaaaaactcaa

SEQ ID NO: 4710 - DNA, 22 bp, synthetic construct
  misc_feature 1..22: note = chemically synthesized
  source 1..22: mol_type = other DNA
caaaaactcaacatatttgatc

SEQ ID NO: 4711 - DNA, 22 bp, synthetic construct
  misc_feature 1..22: note = chemically synthesized
  source 1..22: mol_type = other DNA
aaaaactcaacatatttgatca

SEQ ID NO: 4712 - DNA, 22 bp, synthetic construct
  misc_feature 1..22: note = chemically synthesized
  source 1..22: mol_type = other DNA
aacatatttgatcagtcttttt

SEQ ID NO: 4713 - DNA, 22 bp, synthetic construct
  misc_feature 1..22: note = chemically synthesized
  source 1..22: mol_type = other DNA
gatcagtctttttatgatctat

SEQ ID NO: 4714 - DNA, 22 bp, synthetic construct
  misc_feature 1..22: note = chemically synthesized
  source 1..22: mol_type = other DNA
atcagtctttttatgatctatc

SEQ ID NO: 4715 - DNA, 22 bp, synthetic construct
  misc_feature 1..22: note = chemically synthesized
  source 1..22: mol_type = other DNA
tttatgatctatcgctgcaaac

SEQ ID NO: 4716 - DNA, 22 bp, synthetic construct
  misc_feature 1..22: note = chemically synthesized
  source 1..22: mol_type = other DNA
ttatgatctatcgctgcaaacc

SEQ ID NO: 4717 - DNA, 22 bp, synthetic construct
  misc_feature 1..22: note = chemically synthesized
  source 1..22: mol_type = other DNA
tatgatctatcgctgcaaacca

SEQ ID NO: 4718 - DNA, 22 bp, synthetic construct
  misc_feature 1..22: note = chemically synthesized
  source 1..22: mol_type = other DNA
atgatctatcgctgcaaaccag

SEQ ID NO: 4719 - DNA, 22 bp, synthetic construct
  misc_feature 1..22: note = chemically synthesized
  source 1..22: mol_type = other DNA
tgatctatcgctgcaaaccagt

SEQ ID NO: 4720 - DNA, 22 bp, synthetic construct
  misc_feature 1..22: note = chemically synthesized
  source 1..22: mol_type = other DNA
tcgctgcaaaccagtgaaatca

SEQ ID NO: 4721 - DNA, 22 bp, synthetic construct
  misc_feature 1..22: note = chemically synthesized
  source 1..22: mol_type = other DNA
caaaccagtgaaatcaaagaag

SEQ ID NO: 4722 - DNA, 22 bp, synthetic construct
  misc_feature 1..22: note = chemically synthesized
  source 1..22: mol_type = other DNA
agaagaactacatataaactac

SEQ ID NO: 4723 - DNA, 22 bp, synthetic construct
  misc_feature 1..22: note = chemically synthesized
  source 1..22: mol_type = other DNA
catataaactacaagtcaaaaa

SEQ ID NO: 4724 - DNA, 22 bp, synthetic construct
  misc_feature 1..22: note = chemically synthesized
  source 1..22: mol_type = other DNA
caagtcaaaaatgaagaggtaa

SEQ ID NO: 4725 - DNA, 22 bp, synthetic construct
  misc_feature 1..22: note = chemically synthesized
  source 1..22: mol_type = other DNA
gaactcaactcaaaacttgaaa

SEQ ID NO: 4726 - DNA, 22 bp, synthetic construct
  misc_feature 1..22: note = chemically synthesized
  source 1..22: mol_type = other DNA
aactcaactcaaaacttgaaag

SEQ ID NO: 4727 - DNA, 22 bp, synthetic construct
  misc_feature 1..22: note = chemically synthesized
  source 1..22: mol_type = other DNA
aactcaaaacttgaaagcctcc

SEQ ID NO: 4728 - DNA, 22 bp, synthetic construct
  misc_feature 1..22: note = chemically synthesized
  source 1..22: mol_type = other DNA
aaaacttgaaagcctcctagaa

SEQ ID NO: 4729 - DNA, 22 bp, synthetic construct
  misc_feature 1..22: note = chemically synthesized
  source 1..22: mol_type = other DNA
gaaagcctcctagaagaaaaaa

SEQ ID NO: 4730 - DNA, 22 bp, synthetic construct
  misc_feature 1..22: note = chemically synthesized
  source 1..22: mol_type = other DNA
aaagcctcctagaagaaaaaat

SEQ ID NO: 4731 - DNA, 22 bp, synthetic construct
  misc_feature 1..22: note = chemically synthesized
  source 1..22: mol_type = other DNA
ctagaagaaaaaattctacttc

SEQ ID NO: 4732 - DNA, 22 bp, synthetic construct
  misc_feature 1..22: note = chemically synthesized
  source 1..22: mol_type = other DNA
gaagaaaaaattctacttcaac

SEQ ID NO: 4733 - DNA, 22 bp, synthetic construct
  misc_feature 1..22: note = chemically synthesized
  source 1..22: mol_type = other DNA
tacttcaacaaaaagtgaaata

SEQ ID NO: 4734 - DNA, 22 bp, synthetic construct
  misc_feature 1..22: note = chemically synthesized
  source 1..22: mol_type = other DNA
cttcaacaaaaagtgaaatatt

SEQ ID NO: 4735 - DNA, 22 bp, synthetic construct
  misc_feature 1..22: note = chemically synthesized
  source 1..22: mol_type = other DNA
caacaaaaagtgaaatatttag

SEQ ID NO: 4736 - DNA, 22 bp, synthetic construct
  misc_feature 1..22: note = chemically synthesized
  source 1..22: mol_type = other DNA
aacaaaaagtgaaatatttaga

SEQ ID NO: 4737 - DNA, 22 bp, synthetic construct
  misc_feature 1..22: note = chemically synthesized
  source 1..22: mol_type = other DNA
agaagagcaactaactaactta

SEQ ID NO: 4738 - DNA, 22 bp, synthetic construct
  misc_feature 1..22: note = chemically synthesized
  source 1..22: mol_type = other DNA
gaagagcaactaactaacttaa

SEQ ID NO: 4739 - DNA, 22 bp, synthetic construct
  misc_feature 1..22: note = chemically synthesized
  source 1..22: mol_type = other DNA
actaacttaattcaaaatcaac

SEQ ID NO: 4740 - DNA, 22 bp, synthetic construct
  misc_feature 1..22: note = chemically synthesized
  source 1..22: mol_type = other DNA
acttaattcaaaatcaacctga

SEQ ID NO: 4741 - DNA, 22 bp, synthetic construct
  misc_feature 1..22: note = chemically synthesized
  source 1..22: mol_type = other DNA
aattcaaaatcaacctgaaact

SEQ ID NO: 4742 - DNA, 22 bp, synthetic construct
  misc_feature 1..22: note = chemically synthesized
  source 1..22: mol_type = other DNA
attcaaaatcaacctgaaactc

SEQ ID NO: 4743 - DNA, 22 bp, synthetic construct
  misc_feature 1..22: note = chemically synthesized
  source 1..22: mol_type = other DNA
aaaatcaacctgaaactccaga

SEQ ID NO: 4744 - DNA, 22 bp, synthetic construct
  misc_feature 1..22: note = chemically synthesized
  source 1..22: mol_type = other DNA
aaactccagaacacccagaagt

SEQ ID NO: 4745 - DNA, 22 bp, synthetic construct
  misc_feature 1..22: note = chemically synthesized
  source 1..22: mol_type = other DNA
cagaacacccagaagtaacttc

SEQ ID NO: 4746 - DNA, 22 bp, synthetic construct
  misc_feature 1..22: note = chemically synthesized
  source 1..22: mol_type = other DNA
cacttaaagtaagtagaaaata

SEQ ID NO: 4747 - DNA, 22 bp, synthetic construct
  misc_feature 1..22: note = chemically synthesized
  source 1..22: mol_type = other DNA
acttaaagtaagtagaaaataa

SEQ ID NO: 4748 - DNA, 22 bp, synthetic construct
  misc_feature 1..22: note = chemically synthesized
  source 1..22: mol_type = other DNA
aaagtaagtagaaaataaagag

SEQ ID NO: 4749 - DNA, 22 bp, synthetic construct
  misc_feature 1..22: note = chemically synthesized
  source 1..22: mol_type = other DNA
aagtaagtagaaaataaagagg

SEQ ID NO: 4750 - DNA, 22 bp, synthetic construct
  misc_feature 1..22: note = chemically synthesized
  source 1..22: mol_type = other DNA
atgtttatgttttcaatgtgga

SEQ ID NO: 4751 - DNA, 22 bp, synthetic construct
  misc_feature 1..22: note = chemically synthesized
  source 1..22: mol_type = other DNA
atgttttcaatgtggatctttt

SEQ ID NO: 4752 - DNA, 22 bp, synthetic construct
  misc_feature 1..22: note = chemically synthesized
  source 1..22: mol_type = other DNA
tgttttcaatgtggatctttta

SEQ ID NO: 4753 - DNA, 22 bp, synthetic construct
  misc_feature 1..22: note = chemically synthesized
  source 1..22: mol_type = other DNA
tcaatgtggatcttttaaaaaa

SEQ ID NO: 4754 - DNA, 22 bp, synthetic construct
  misc_feature 1..22: note = chemically synthesized
  source 1..22: mol_type = other DNA
caatgtggatcttttaaaaaaa

SEQ ID NO: 4755 - DNA, 22 bp, synthetic construct
  misc_feature 1..22: note = chemically synthesized
  source 1..22: mol_type = other DNA
aatgtggatcttttaaaaaaaa

SEQ ID NO: 4756 - DNA, 22 bp, synthetic construct
  misc_feature 1..22: note = chemically synthesized
  source 1..22: mol_type = other DNA
ttaaaaaaaatatttctaaggc

SEQ ID NO: 4757 - DNA, 22 bp, synthetic construct
  misc_feature 1..22: note = chemically synthesized
  source 1..22: mol_type = other DNA
taaaaaaaatatttctaaggca

SEQ ID NO: 4758 - DNA, 22 bp, synthetic construct
  misc_feature 1..22: note = chemically synthesized
  source 1..22: mol_type = other DNA
aaaaaaaatatttctaaggcat

SEQ ID NO: 4759 - DNA, 22 bp, synthetic construct
  misc_feature 1..22: note = chemically synthesized
  source 1..22: mol_type = other DNA
aaaaaaatatttctaaggcatg

SEQ ID NO: 4760 - DNA, 22 bp, synthetic construct
  misc_feature 1..22: note = chemically synthesized
  source 1..22: mol_type = other DNA
ctaaggcatgccatttgaaata

SEQ ID NO: 4761 - DNA, 22 bp, synthetic construct
  misc_feature 1..22: note = chemically synthesized
  source 1..22: mol_type = other DNA
taaggcatgccatttgaaatac

SEQ ID NO: 4762 - DNA, 22 bp, synthetic construct
  misc_feature 1..22: note = chemically synthesized
  source 1..22: mol_type = other DNA
aggcatgccatttgaaatactt

SEQ ID NO: 4763 - DNA, 22 bp, synthetic construct
  misc_feature 1..22: note = chemically synthesized
  source 1..22: mol_type = other DNA
gaaatactttgttgcattgttg

SEQ ID NO: 4764 - DNA, 22 bp, synthetic construct
  misc_feature 1..22: note = chemically synthesized
  source 1..22: mol_type = other DNA
aaatactttgttgcattgttga

SEQ ID NO: 4765 - DNA, 22 bp, synthetic construct
  misc_feature 1..22: note = chemically synthesized
  source 1..22: mol_type = other DNA
tgttgcattgttgaaatacttt

SEQ ID NO: 4766 - DNA, 22 bp, synthetic construct
  misc_feature 1..22: note = chemically synthesized
  source 1..22: mol_type = other DNA
gttgcattgttgaaatactttt

SEQ ID NO: 4767 - DNA, 22 bp, synthetic construct
  misc_feature 1..22: note = chemically synthesized
  source 1..22: mol_type = other DNA
ttgcattgttgaaatacttttt

SEQ ID NO: 4768 - DNA, 22 bp, synthetic construct
  misc_feature 1..22: note = chemically synthesized
  source 1..22: mol_type = other DNA
cattgttgaaatactttttttt

SEQ ID NO: 4769 - DNA, 22 bp, synthetic construct
  misc_feature 1..22: note = chemically synthesized
  source 1..22: mol_type = other DNA
ttgaaatacttttttttccaag

SEQ ID NO: 4770 - DNA, 22 bp, synthetic construct
  misc_feature 1..22: note = chemically synthesized
  source 1..22: mol_type = other DNA
aaatacttttttttccaagaaa

SEQ ID NO: 4771 - DNA, 22 bp, synthetic construct
  misc_feature 1..22: note = chemically synthesized
  source 1..22: mol_type = other DNA
ttttttccaagaaaaataatct

SEQ ID NO: 4772 - DNA, 22 bp, synthetic construct
  misc_feature 1..22: note = chemically synthesized
  source 1..22: mol_type = other DNA
tttttccaagaaaaataatctc

SEQ ID NO: 4773 - DNA, 22 bp, synthetic construct
  misc_feature 1..22: note = chemically synthesized
  source 1..22: mol_type = other DNA
ttttccaagaaaaataatctcc

SEQ ID NO: 4774 - DNA, 22 bp, synthetic construct
  misc_feature 1..22: note = chemically synthesized
  source 1..22: mol_type = other DNA
tttccaagaaaaataatctcca

SEQ ID NO: 4775 - DNA, 22 bp, synthetic construct
  misc_feature 1..22: note = chemically synthesized
  source 1..22: mol_type = other DNA
ttccaagaaaaataatctccag

SEQ ID NO: 4776 - DNA, 22 bp, synthetic construct
  misc_feature 1..22: note = chemically synthesized
  source 1..22: mol_type = other DNA
tccaagaaaaataatctccaga

SEQ ID NO: 4777 - DNA, 22 bp, synthetic construct
  misc_feature 1..22: note = chemically synthesized
  source 1..22: mol_type = other DNA
ccaagaaaaataatctccagaa

SEQ ID NO: 4778 - DNA, 22 bp, synthetic construct
  misc_feature 1..22: note = chemically synthesized
  source 1..22: mol_type = other DNA
caagaaaaataatctccagaaa

SEQ ID NO: 4779 - DNA, 22 bp, synthetic construct
  misc_feature 1..22: note = chemically synthesized
  source 1..22: mol_type = other DNA
cagaaaataaaatttcctatta

SEQ ID NO: 4780 - DNA, 22 bp, synthetic construct
  misc_feature 1..22: note = chemically synthesized
  source 1..22: mol_type = other DNA
cctattataatttcaagttagt

SEQ ID NO: 4781 - DNA, 22 bp, synthetic construct
  misc_feature 1..22: note = chemically synthesized
  source 1..22: mol_type = other DNA
ctattataatttcaagttagtt

SEQ ID NO: 4782 - DNA, 22 bp, synthetic construct
  misc_feature 1..22: note = chemically synthesized
  source 1..22: mol_type = other DNA
ttataatttcaagttagttttt

SEQ ID NO: 4783 - DNA, 22 bp, synthetic construct
  misc_feature 1..22: note = chemically synthesized
  source 1..22: mol_type = other DNA
taatttcaagttagttttttgt

SEQ ID NO: 4784 - DNA, 22 bp, synthetic construct
  misc_feature 1..22: note = chemically synthesized
  source 1..22: mol_type = other DNA
caagttagttttttgtttccct

SEQ ID NO: 4785 - DNA, 22 bp, synthetic construct
  misc_feature 1..22: note = chemically synthesized
  source 1..22: mol_type = other DNA
aagttagttttttgtttcccta

SEQ ID NO: 4786 - DNA, 22 bp, synthetic construct
  misc_feature 1..22: note = chemically synthesized
  source 1..22: mol_type = other DNA
gttttttgtttccctaatgtta

SEQ ID NO: 4787 - DNA, 22 bp, synthetic construct
  misc_feature 1..22: note = chemically synthesized
  source 1..22: mol_type = other DNA
tttgtttccctaatgttatata

SEQ ID NO: 4788 - DNA, 22 bp, synthetic construct
  misc_feature 1..22: note = chemically synthesized
  source 1..22: mol_type = other DNA
ttgtttccctaatgttatatat

SEQ ID NO: 4789 - DNA, 22 bp, synthetic construct
  misc_feature 1..22: note = chemically synthesized
  source 1..22: mol_type = other DNA
tgtttccctaatgttatatatg

SEQ ID NO: 4790 - DNA, 22 bp, synthetic construct
  misc_feature 1..22: note = chemically synthesized
  source 1..22: mol_type = other DNA
gtttccctaatgttatatatga

SEQ ID NO: 4791 - DNA, 22 bp, synthetic construct
  misc_feature 1..22: note = chemically synthesized
  source 1..22: mol_type = other DNA
tttccctaatgttatatatgaa

SEQ ID NO: 4792 - DNA, 22 bp, synthetic construct
  misc_feature 1..22: note = chemically synthesized
  source 1..22: mol_type = other DNA
ccctaatgttatatatgaaaac

SEQ ID NO: 4793 - DNA, 22 bp, synthetic construct
  misc_feature 1..22: note = chemically synthesized
  source 1..22: mol_type = other DNA
cctaatgttatatatgaaaaca

SEQ ID NO: 4794 - DNA, 22 bp, synthetic construct
  misc_feature 1..22: note = chemically synthesized
  source 1..22: mol_type = other DNA
atgttatatatgaaaacactga

SEQ ID NO: 4795 - DNA, 22 bp, synthetic construct
  misc_feature 1..22: note = chemically synthesized
  source 1..22: mol_type = other DNA
tatatgaaaacactgaaaattt

SEQ ID NO: 4796 - DNA, 22 bp, synthetic construct
  misc_feature 1..22: note = chemically synthesized
  source 1..22: mol_type = other DNA
aaaatttgcattttatatgaaa

SEQ ID NO: 4797 - DNA, 22 bp, synthetic construct
  misc_feature 1..22: note = chemically synthesized
  source 1..22: mol_type = other DNA
gcattttatatgaaaattacaa

SEQ ID NO: 4798 - DNA, 22 bp, synthetic construct
  misc_feature 1..22: note = chemically synthesized
  source 1..22: mol_type = other DNA
cattttatatgaaaattacaaa

SEQ ID NO: 4799 - DNA, 22 bp, synthetic construct
  misc_feature 1..22: note = chemically synthesized
  source 1..22: mol_type = other DNA
tatatgaaaattacaaatcggt

SEQ ID NO: 4800 - DNA, 22 bp, synthetic construct
  misc_feature 1..22: note = chemically synthesized
  source 1..22: mol_type = other DNA
atatgaaaattacaaatcggtt

SEQ ID NO: 4801 - DNA, 22 bp, synthetic construct
  misc_feature 1..22: note = chemically synthesized
  source 1..22: mol_type = other DNA
tatgaaaattacaaatcggtta

SEQ ID NO: 4802 - DNA, 22 bp, synthetic construct
  misc_feature 1..22: note = chemically synthesized
  source 1..22: mol_type = other DNA
caaatcggttaaattatacaat

SEQ ID NO: 4803 - DNA, 22 bp, synthetic construct
  misc_feature 1..22: note = chemically synthesized
  source 1..22: mol_type = other DNA
aattatacaatctagaacacta

SEQ ID NO: 4804 - DNA, 22 bp, synthetic construct
  misc_feature 1..22: note = chemically synthesized
  source 1..22: mol_type = other DNA
tacaatctagaacactatgtca

SEQ ID NO: 4805 - DNA, 22 bp, synthetic construct
  misc_feature 1..22: note = chemically synthesized
  source 1..22: mol_type = other DNA
gaacactatgtcattacactat

SEQ ID NO: 4806 - DNA, 22 bp, synthetic construct
  misc_feature 1..22: note = chemically synthesized
  source 1..22: mol_type = other DNA
tgtcattacactattgtaaatt

SEQ ID NO: 4807 - DNA, 22 bp, synthetic construct
  misc_feature 1..22: note = chemically synthesized
  source 1..22: mol_type = other DNA
cactattgtaaattactgaagg

SEQ ID NO: 4808 - DNA, 22 bp, synthetic construct
  misc_feature 1..22: note = chemically synthesized
  source 1..22: mol_type = other DNA
ttgtaaattactgaaggtaagt

SEQ ID NO: 4809 - DNA, 22 bp, synthetic construct
  misc_feature 1..22: note = chemically synthesized
  source 1..22: mol_type = other DNA
taaattactgaaggtaagtaaa

SEQ ID NO: 4810 - DNA, 22 bp, synthetic construct
  misc_feature 1..22: note = chemically synthesized
  source 1..22: mol_type = other DNA
ctgaaggtaagtaaaaagttaa

SEQ ID NO: 4811 - DNA, 22 bp, synthetic construct
  misc_feature 1..22: note = chemically synthesized
  source 1..22: mol_type = other DNA
aaggtaagtaaaaagttaaaaa

SEQ ID NO: 4812 - DNA, 22 bp, synthetic construct
  misc_feature 1..22: note = chemically synthesized
  source 1..22: mol_type = other DNA
aaaaaaatttaaaactattctc

SEQ ID NO: 4813 - DNA, 22 bp, synthetic construct
  misc_feature 1..22: note = chemically synthesized
  source 1..22: mol_type = other DNA
aaaactattctccagtgtttaa

SEQ ID NO: 4814 - DNA, 22 bp, synthetic construct
  misc_feature 1..22: note = chemically synthesized
  source 1..22: mol_type = other DNA
aaactattctccagtgtttaaa

SEQ ID NO: 4815 - DNA, 22 bp, synthetic construct
  misc_feature 1..22: note = chemically synthesized
  source 1..22: mol_type = other DNA
ttctccagtgtttaaaacagat

SEQ ID NO: 4816 - DNA, 22 bp, synthetic construct
  misc_feature 1..22: note = chemically synthesized
  source 1..22: mol_type = other DNA
tccagtgtttaaaacagattaa

SEQ ID NO: 4817 - DNA, 22 bp, synthetic construct
  misc_feature 1..22: note = chemically synthesized
  source 1..22: mol_type = other DNA
cagtgtttaaaacagattaaat

SEQ ID NO: 4818 - DNA, 22 bp, synthetic construct
  misc_feature 1..22: note = chemically synthesized
  source 1..22: mol_type = other DNA
aaaacagattaaataatacagt

SEQ ID NO: 4819 - DNA, 22 bp, synthetic construct
  misc_feature 1..22: note = chemically synthesized
  source 1..22: mol_type = other DNA
aaacagattaaataatacagta

SEQ ID NO: 4820 - DNA, 22 bp, synthetic construct
  misc_feature 1..22: note = chemically synthesized
  source 1..22: mol_type = other DNA
aataatacagtaaatggaaaag

SEQ ID NO: 4821 - DNA, 22 bp, synthetic construct
  misc_feature 1..22: note = chemically synthesized
  source 1..22: mol_type = other DNA
attcatatgaaaatatgctggg

SEQ ID NO: 4822 - DNA, 22 bp, synthetic construct
  misc_feature 1..22: note = chemically synthesized
  source 1..22: mol_type = other DNA
ttcatatgaaaatatgctgggc

SEQ ID NO: 4823 - DNA, 22 bp, synthetic construct
  misc_feature 1..22: note = chemically synthesized
  source 1..22: mol_type = other DNA
atatgaaaatatgctgggcttt

SEQ ID NO: 4824 - DNA, 22 bp, synthetic construct
  misc_feature 1..22: note = chemically synthesized
  source 1..22: mol_type = other DNA
ggctttttcttttaattgaagt

SEQ ID NO: 4825 - DNA, 22 bp, synthetic construct
  misc_feature 1..22: note = chemically synthesized
  source 1..22: mol_type = other DNA
tttcttttaattgaagttcaga

SEQ ID NO: 4826 - DNA, 22 bp, synthetic construct
  misc_feature 1..22: note = chemically synthesized
  source 1..22: mol_type = other DNA
ttcttttaattgaagttcagaa

SEQ ID NO: 4827 - DNA, 22 bp, synthetic construct
  misc_feature 1..22: note = chemically synthesized
  source 1..22: mol_type = other DNA
tcttttaattgaagttcagaaa

SEQ ID NO: 4828 - DNA, 22 bp, synthetic construct
  misc_feature 1..22: note = chemically synthesized
  source 1..22: mol_type = other DNA
cttttaattgaagttcagaaaa

SEQ ID NO: 4829 - DNA, 22 bp, synthetic construct
  misc_feature 1..22: note = chemically synthesized
  source 1..22: mol_type = other DNA
ttttaattgaagttcagaaaat

SEQ ID NO: 4830 - DNA, 22 bp, synthetic construct
  misc_feature 1..22: note = chemically synthesized
  source 1..22: mol_type = other DNA
ttaattgaagttcagaaaatca

SEQ ID NO: 4831 - DNA, 22 bp, synthetic construct
  misc_feature 1..22: note = chemically synthesized
  source 1..22: mol_type = other DNA
taattgaagttcagaaaatcaa

SEQ ID NO: 4832 - DNA, 22 bp, synthetic construct
  misc_feature 1..22: note = chemically synthesized
  source 1..22: mol_type = other DNA
aattgaagttcagaaaatcaaa

SEQ ID NO: 4833 - DNA, 22 bp, synthetic construct
  misc_feature 1..22: note = chemically synthesized
  source 1..22: mol_type = other DNA
attgaagttcagaaaatcaaat

SEQ ID NO: 4834 - DNA, 22 bp, synthetic construct
  misc_feature 1..22: note = chemically synthesized
  source 1..22: mol_type = other DNA
aagttcagaaaatcaaatttta

SEQ ID NO: 4835 - DNA, 22 bp, synthetic construct
  misc_feature 1..22: note = chemically synthesized
  source 1..22: mol_type = other DNA
agaaaatcaaattttagagata

SEQ ID NO: 4836 - DNA, 22 bp, synthetic construct
  misc_feature 1..22: note = chemically synthesized
  source 1..22: mol_type = other DNA
tagagatagtacaatttaaata

SEQ ID NO: 4837 - DNA, 22 bp, synthetic construct
  misc_feature 1..22: note = chemically synthesized
  source 1..22: mol_type = other DNA
agagatagtacaatttaaataa

SEQ ID NO: 4838 - DNA, 22 bp, synthetic construct
  misc_feature 1..22: note = chemically synthesized
  source 1..22: mol_type = other DNA
gagatagtacaatttaaataaa

SEQ ID NO: 4839 - DNA, 22 bp, synthetic construct
  misc_feature 1..22: note = chemically synthesized
  source 1..22: mol_type = other DNA
aaataaaatgttaaggacaaaa

SEQ ID NO: 4840 - DNA, 22 bp, synthetic construct
  misc_feature 1..22: note = chemically synthesized
  source 1..22: mol_type = other DNA
aataaaatgttaaggacaaaaa

SEQ ID NO: 4841 - DNA, 22 bp, synthetic construct
  misc_feature 1..22: note = chemically synthesized
  source 1..22: mol_type = other DNA
aggacaaaaatatgtgctattt

SEQ ID NO: 4842 - DNA, 22 bp, synthetic construct
  misc_feature 1..22: note = chemically synthesized
  source 1..22: mol_type = other DNA
tttgaaagaagcatacaagggg

SEQ ID NO: 4843 - DNA, 22 bp, synthetic construct
  misc_feature 1..22: note = chemically synthesized
  source 1..22: mol_type = other DNA
gaaagaagcatacaaggggaag

SEQ ID NO: 4844 - DNA, 22 bp, synthetic construct
  misc_feature 1..22: note = chemically synthesized
  source 1..22: mol_type = other DNA
aaagaagcatacaaggggaagg

SEQ ID NO: 4845 - DNA, 22 bp, synthetic construct
  misc_feature 1..22: note = chemically synthesized
  source 1..22: mol_type = other DNA
ccaatattcatttttcaaatcc

SEQ ID NO: 4846 - DNA, 22 bp, synthetic construct
  misc_feature 1..22: note = chemically synthesized
  source 1..22: mol_type = other DNA
atttttcaaatccattattagt

SEQ ID NO: 4847 - DNA, 22 bp, synthetic construct
  misc_feature 1..22: note = chemically synthesized
  source 1..22: mol_type = other DNA
ttcaaatccattattagtttaa

SEQ ID NO: 4848 - DNA, 22 bp, synthetic construct
  misc_feature 1..22: note = chemically synthesized
  source 1..22: mol_type = other DNA
tcaaatccattattagtttaaa

SEQ ID NO: 4849 - DNA, 22 bp, synthetic construct
  misc_feature 1..22: note = chemically synthesized
  source 1..22: mol_type = other DNA
caaatccattattagtttaaaa

SEQ ID NO: 4850 - DNA, 22 bp, synthetic construct
  misc_feature 1..22: note = chemically synthesized
  source 1..22: mol_type = other DNA
aaatccattattagtttaaaaa

SEQ ID NO: 4851 - DNA, 22 bp, synthetic construct
  misc_feature 1..22: note = chemically synthesized
  source 1..22: mol_type = other DNA
ttagtttaaaaatttagattat

SEQ ID NO: 4852 - DNA, 22 bp, synthetic construct
  misc_feature 1..22: note = chemically synthesized
  source 1..22: mol_type = other DNA
gtttaaaaatttagattatgat

SEQ ID NO: 4853 - DNA, 22 bp, synthetic construct
  misc_feature 1..22: note = chemically synthesized
  source 1..22: mol_type = other DNA
aaaaatttagattatgatagtg

SEQ ID NO: 4854 - DNA, 22 bp, synthetic construct
  misc_feature 1..22: note = chemically synthesized
  source 1..22: mol_type = other DNA
aaaatttagattatgatagtgt

SEQ ID NO: 4855 - DNA, 22 bp, synthetic construct
  misc_feature 1..22: note = chemically synthesized
  source 1..22: mol_type = other DNA
agattatgatagtgttacagga

SEQ ID NO: 4856 - DNA, 22 bp, synthetic construct
  misc_feature 1..22: note = chemically synthesized
  source 1..22: mol_type = other DNA
gattatgatagtgttacaggaa

SEQ ID NO: 4857 - DNA, 22 bp, synthetic construct
  misc_feature 1..22: note = chemically synthesized
  source 1..22: mol_type = other DNA
tgatagtgttacaggaaattaa

SEQ ID NO: 4858 - DNA, 22 bp, synthetic construct
  misc_feature 1..22: note = chemically synthesized
  source 1..22: mol_type = other DNA
caggaaattaatagaaaagaaa

SEQ ID NO: 4859 - DNA, 22 bp, synthetic construct
  misc_feature 1..22: note = chemically synthesized
  source 1..22: mol_type = other DNA
atagaaaagaaagaggaaagca

SEQ ID NO: 4860 - DNA, 22 bp, synthetic construct
  misc_feature 1..22: note = chemically synthesized
  source 1..22: mol_type = other DNA
ataaccaacctactctctatat

SEQ ID NO: 4861 - DNA, 22 bp, synthetic construct
  misc_feature 1..22: note = chemically synthesized
  source 1..22: mol_type = other DNA
taaccaacctactctctatatc

SEQ ID NO: 4862 - DNA, 22 bp, synthetic construct
  misc_feature 1..22: note = chemically synthesized
  source 1..22: mol_type = other DNA
ctctctatatccagacttttgt

SEQ ID NO: 4863 - DNA, 22 bp, synthetic construct
  misc_feature 1..22: note = chemically synthesized
  source 1..22: mol_type = other DNA
tctatatccagacttttgtaga

SEQ ID NO: 4864 - DNA, 22 bp, synthetic construct
  misc_feature 1..22: note = chemically synthesized
  source 1..22: mol_type = other DNA
tatatccagacttttgtagaaa

SEQ ID NO: 4865 - DNA, 22 bp, synthetic construct
  misc_feature 1..22: note = chemically synthesized
  source 1..22: mol_type = other DNA
tatccagacttttgtagaaaaa

SEQ ID NO: 4866 - DNA, 22 bp, synthetic construct
  misc_feature 1..22: note = chemically synthesized
  source 1..22: mol_type = other DNA
ttgtagaaaaacaagataatag

SEQ ID NO: 4867 - DNA, 22 bp, synthetic construct
  misc_feature 1..22: note = chemically synthesized
  source 1..22: mol_type = other DNA
tgtagaaaaacaagataatagc

SEQ ID NO: 4868 - DNA, 22 bp, synthetic construct
  misc_feature 1..22: note = chemically synthesized
  source 1..22: mol_type = other DNA
gtagaaaaacaagataatagca

SEQ ID NO: 4869 - DNA, 22 bp, synthetic construct
  misc_feature 1..22: note = chemically synthesized
  source 1..22: mol_type = other DNA
tagaaaaacaagataatagcat

SEQ ID NO: 4870 - DNA, 22 bp, synthetic construct
  misc_feature 1..22: note = chemically synthesized
  source 1..22: mol_type = other DNA
ctccagaccgtggaagaccaat

SEQ ID NO: 4871 - DNA, 22 bp, synthetic construct
  misc_feature 1..22: note = chemically synthesized
  source 1..22: mol_type = other DNA
tccagaccgtggaagaccaata

SEQ ID NO: 4872 - DNA, 22 bp, synthetic construct
  misc_feature 1..22: note = chemically synthesized
  source 1..22: mol_type = other DNA
cagaccgtggaagaccaatata

SEQ ID NO: 4873 - DNA, 22 bp, synthetic construct
  misc_feature 1..22: note = chemically synthesized
  source 1..22: mol_type = other DNA
aaccaacagcatagtcaaataa

SEQ ID NO: 4874 - DNA, 22 bp, synthetic construct
  misc_feature 1..22: note = chemically synthesized
  source 1..22: mol_type = other DNA
taatggtatgtcccatctttca

SEQ ID NO: 4875 - DNA, 22 bp, synthetic construct
  misc_feature 1..22: note = chemically synthesized
  source 1..22: mol_type = other DNA
aatggtatgtcccatctttcac

SEQ ID NO: 4876 - DNA, 22 bp, synthetic construct
  misc_feature 1..22: note = chemically synthesized
  source 1..22: mol_type = other DNA
atggtatgtcccatctttcaca

SEQ ID NO: 4877 - DNA, 22 bp, synthetic construct
  misc_feature 1..22: note = chemically synthesized
  source 1..22: mol_type = other DNA
tcacacaggtctgtaaaaacac

SEQ ID NO: 4878 - DNA, 22 bp, synthetic construct
  misc_feature 1..22: note = chemically synthesized
  source 1..22: mol_type = other DNA
cacacaggtctgtaaaaacact

SEQ ID NO: 4879 - DNA, 22 bp, synthetic construct
  misc_feature 1..22: note = chemically synthesized
  source 1..22: mol_type = other DNA
acacaggtctgtaaaaacactg

SEQ ID NO: 4880 - DNA, 22 bp, synthetic construct
  misc_feature 1..22: note = chemically synthesized
  source 1..22: mol_type = other DNA
taaaaacactgaatcctaaaat

SEQ ID NO: 4881 - DNA, 22 bp, synthetic construct
  misc_feature 1..22: note = chemically synthesized
  source 1..22: mol_type = other DNA
aatcctaaaattatttacaagc

SEQ ID NO: 4882 - DNA, 22 bp, synthetic construct
  misc_feature 1..22: note = chemically synthesized
  source 1..22: mol_type = other DNA
aaattatttacaagctttaact

SEQ ID NO: 4883 - DNA, 22 bp, synthetic construct
  misc_feature 1..22: note = chemically synthesized
  source 1..22: mol_type = other DNA
tttacaagctttaactggatca

SEQ ID NO: 4884 - DNA, 22 bp, synthetic construct
  misc_feature 1..22: note = chemically synthesized
  source 1..22: mol_type = other DNA
acaagctttaactggatcatga

SEQ ID NO: 4885 - DNA, 22 bp, synthetic construct
  misc_feature 1..22: note = chemically synthesized
  source 1..22: mol_type = other DNA
caagctttaactggatcatgag

SEQ ID NO: 4886 - DNA, 22 bp, synthetic construct
  misc_feature 1..22: note = chemically synthesized
  source 1..22: mol_type = other DNA
taactggatcatgagtaaaatt

SEQ ID NO: 4887 - DNA, 22 bp, synthetic construct
  misc_feature 1..22: note = chemically synthesized
  source 1..22: mol_type = other DNA
aactggatcatgagtaaaatta

SEQ ID NO: 4888 - DNA, 22 bp, synthetic construct
  misc_feature 1..22: note = chemically synthesized
  source 1..22: mol_type = other DNA
actggatcatgagtaaaattat

SEQ ID NO: 4889 - DNA, 22 bp, synthetic construct
  misc_feature 1..22: note = chemically synthesized
  source 1..22: mol_type = other DNA
gatcatgagtaaaattatcaca

SEQ ID NO: 4890 - DNA, 22 bp, synthetic construct
  misc_feature 1..22: note = chemically synthesized
  source 1..22: mol_type = other DNA
tcacatcagcataactgttaaa

SEQ ID NO: 4891 - DNA, 22 bp, synthetic construct
  misc_feature 1..22: note = chemically synthesized
  source 1..22: mol_type = other DNA
ttaaaattgcaggctctgaagc

SEQ ID NO: 4892 - DNA, 22 bp, synthetic construct
  misc_feature 1..22: note = chemically synthesized
  source 1..22: mol_type = other DNA
aaattgcaggctctgaagctaa

SEQ ID NO: 4893 - DNA, 22 bp, synthetic construct
  misc_feature 1..22: note = chemically synthesized
  source 1..22: mol_type = other DNA
caggctctgaagctaataaact

SEQ ID NO: 4894 - DNA, 22 bp, synthetic construct
  misc_feature 1..22: note = chemically synthesized
  source 1..22: mol_type = other DNA
tgaagctaataaactacctgca

SEQ ID NO: 4895 - DNA, 22 bp, synthetic construct
  misc_feature 1..22: note = chemically synthesized
  source 1..22: mol_type = other DNA
aagctaataaactacctgcatt

SEQ ID NO: 4896 - DNA, 22 bp, synthetic construct
  misc_feature 1..22: note = chemically synthesized
  source 1..22: mol_type = other DNA
ataaactacctgcatttaaacc

SEQ ID NO: 4897 - DNA, 22 bp, synthetic construct
  misc_feature 1..22: note = chemically synthesized
  source 1..22: mol_type = other DNA
cctgcatttaaaccatggctct

SEQ ID NO: 4898 - DNA, 22 bp, synthetic construct
  misc_feature 1..22: note = chemically synthesized
  source 1..22: mol_type = other DNA
catttaaaccatggctctaaaa

SEQ ID NO: 4899 - DNA, 22 bp, synthetic construct
  misc_feature 1..22: note = chemically synthesized
  source 1..22: mol_type = other DNA
aaaccatggctctaaaactttg

SEQ ID NO: 4900 - DNA, 22 bp, synthetic construct
  misc_feature 1..22: note = chemically synthesized
  source 1..22: mol_type = other DNA
aaccatggctctaaaactttgt

SEQ ID NO: 4901 - DNA, 22 bp, synthetic construct
  misc_feature 1..22: note = chemically synthesized
  source 1..22: mol_type = other DNA
taaaactttgtgtgaccttgaa

SEQ ID NO: 4902 - DNA, 22 bp, synthetic construct
  misc_feature 1..22: note = chemically synthesized
  source 1..22: mol_type = other DNA
aaactttgtgtgaccttgaata

SEQ ID NO: 4903 - DNA, 22 bp, synthetic construct
  misc_feature 1..22: note = chemically synthesized
  source 1..22: mol_type = other DNA
tgtgtgaccttgaataaattac

SEQ ID NO: 4904 - DNA, 22 bp, synthetic construct
  misc_feature 1..22: note = chemically synthesized
  source 1..22: mol_type = other DNA
gtgtgaccttgaataaattact

SEQ ID NO: 4905 - DNA, 22 bp, synthetic construct
  misc_feature 1..22: note = chemically synthesized
  source 1..22: mol_type = other DNA
tgtgaccttgaataaattactt

SEQ ID NO: 4906 - DNA, 22 bp, synthetic construct
  misc_feature 1..22: note = chemically synthesized
  source 1..22: mol_type = other DNA
gaataaattacttcaccccttt

SEQ ID NO: 4907 - DNA, 22 bp, synthetic construct
  misc_feature 1..22: note = chemically synthesized
  source 1..22: mol_type = other DNA
aataaattacttcaccccttta

SEQ ID NO: 4908 - DNA, 22 bp, synthetic construct
  misc_feature 1..22: note = chemically synthesized
  source 1..22: mol_type = other DNA
cttcacccctttatctctcagt

SEQ ID NO: 4909 - DNA, 22 bp, synthetic construct
  misc_feature 1..22: note = chemically synthesized
  source 1..22: mol_type = other DNA
cacccctttatctctcagtttc

SEQ ID NO: 4910 - DNA, 22 bp, synthetic construct
  misc_feature 1..22: note = chemically synthesized
  source 1..22: mol_type = other DNA
acccctttatctctcagtttcc

SEQ ID NO: 4911 - DNA, 22 bp, synthetic construct
  misc_feature 1..22: note = chemically synthesized
  source 1..22: mol_type = other DNA
tatctctcagtttcctcacata

SEQ ID NO: 4912 - DNA, 22 bp, synthetic construct
  misc_feature 1..22: note = chemically synthesized
  source 1..22: mol_type = other DNA
atctctcagtttcctcacatat

SEQ ID NO: 4913 - DNA, 22 bp, synthetic construct
  misc_feature 1..22: note = chemically synthesized
  source 1..22: mol_type = other DNA
tctctcagtttcctcacatata

SEQ ID NO: 4914 - DNA, 22 bp, synthetic construct
  misc_feature 1..22: note = chemically synthesized
  source 1..22: mol_type = other DNA
tcagtttcctcacatatactac

SEQ ID NO: 4915 - DNA, 22 bp, synthetic construct
  misc_feature 1..22: note = chemically synthesized
  source 1..22: mol_type = other DNA
agtttcctcacatatactacaa

SEQ ID NO: 4916 - DNA, 22 bp, synthetic construct
  misc_feature 1..22: note = chemically synthesized
  source 1..22: mol_type = other DNA
cctcacatatactacaaagata

SEQ ID NO: 4917 - DNA, 22 bp, synthetic construct
  misc_feature 1..22: note = chemically synthesized
  source 1..22: mol_type = other DNA
ctcacatatactacaaagataa

SEQ ID NO: 4918 - DNA, 22 bp, synthetic construct
  misc_feature 1..22: note = chemically synthesized
  source 1..22: mol_type = other DNA
acatatactacaaagataataa

SEQ ID NO: 4919 - DNA, 22 bp, synthetic construct
  misc_feature 1..22: note = chemically synthesized
  source 1..22: mol_type = other DNA
caaagataataacagaacttat

SEQ ID NO: 4920 - DNA, 22 bp, synthetic construct
  misc_feature 1..22: note = chemically synthesized
  source 1..22: mol_type = other DNA
ataggattattgtaagaaaaaa

SEQ ID NO: 4921 - DNA, 22 bp, synthetic construct
  misc_feature 1..22: note = chemically synthesized
  source 1..22: mol_type = other DNA
taggattattgtaagaaaaaaa

SEQ ID NO: 4922 - DNA, 22 bp, synthetic construct
  misc_feature 1..22: note = chemically synthesized
  source 1..22: mol_type = other DNA
ttgtaagaaaaaaaattaattc

SEQ ID NO: 4923 - DNA, 22 bp, synthetic construct
  misc_feature 1..22: note = chemically synthesized
  source 1..22: mol_type = other DNA
taagaaaaaaaattaattcata

SEQ ID NO: 4924 - DNA, 22 bp, synthetic construct
  misc_feature 1..22: note = chemically synthesized
  source 1..22: mol_type = other DNA
attcatagcagccaatgtcatc

SEQ ID NO: 4925 - DNA, 22 bp, synthetic construct
  misc_feature 1..22: note = chemically synthesized
  source 1..22: mol_type = other DNA
atagcagccaatgtcatcttac

SEQ ID NO: 4926 - DNA, 22 bp, synthetic construct
  misc_feature 1..22: note = chemically synthesized
  source 1..22: mol_type = other DNA
actaaaattcaaattagatcat

SEQ ID NO: 4927 - DNA, 22 bp, synthetic construct
  misc_feature 1..22: note = chemically synthesized
  source 1..22: mol_type = other DNA
ctaaaattcaaattagatcatg

SEQ ID NO: 4928 - DNA, 22 bp, synthetic construct
  misc_feature 1..22: note = chemically synthesized
  source 1..22: mol_type = other DNA
aaattcaaattagatcatgttt

SEQ ID NO: 4929 - DNA, 22 bp, synthetic construct
  misc_feature 1..22: note = chemically synthesized
  source 1..22: mol_type = other DNA
aaattagatcatgtttctcttt

SEQ ID NO: 4930 - DNA, 22 bp, synthetic construct
  misc_feature 1..22: note = chemically synthesized
  source 1..22: mol_type = other DNA
gatcatgtttctctttgctcaa

SEQ ID NO: 4931 - DNA, 22 bp, synthetic construct
  misc_feature 1..22: note = chemically synthesized
  source 1..22: mol_type = other DNA
ctctttgctcaaaaccacacaa

SEQ ID NO: 4932 - DNA, 22 bp, synthetic construct
  misc_feature 1..22: note = chemically synthesized
  source 1..22: mol_type = other DNA
tctttgctcaaaaccacacaat

SEQ ID NO: 4933 - DNA, 22 bp, synthetic construct
  misc_feature 1..22: note = chemically synthesized
  source 1..22: mol_type = other DNA
tttgctcaaaaccacacaatag

SEQ ID NO: 4934 - DNA, 22 bp, synthetic construct
  misc_feature 1..22: note = chemically synthesized
  source 1..22: mol_type = other DNA
tgctcaaaaccacacaatagct

SEQ ID NO: 4935 - DNA, 22 bp, synthetic construct
  misc_feature 1..22: note = chemically synthesized
  source 1..22: mol_type = other DNA
gctcaaaaccacacaatagctt

SEQ ID NO: 4936 - DNA, 22 bp, synthetic construct
  misc_feature 1..22: note = chemically synthesized
  source 1..22: mol_type = other DNA
ctcaaaaccacacaatagcttt

SEQ ID NO: 4937 - DNA, 22 bp, synthetic construct
  misc_feature 1..22: note = chemically synthesized
  source 1..22: mol_type = other DNA
aaaaccacacaatagctttcca

SEQ ID NO: 4938 - DNA, 22 bp, synthetic construct
  misc_feature 1..22: note = chemically synthesized
  source 1..22: mol_type = other DNA
tccatttcactcatattggctc

SEQ ID NO: 4939 - DNA, 22 bp, synthetic construct
  misc_feature 1..22: note = chemically synthesized
  source 1..22: mol_type = other DNA
ccatttcactcatattggctct

SEQ ID NO: 4940 - DNA, 22 bp, synthetic construct
  misc_feature 1..22: note = chemically synthesized
  source 1..22: mol_type = other DNA
catttcactcatattggctctt

SEQ ID NO: 4941 - DNA, 22 bp, synthetic construct
  misc_feature 1..22: note = chemically synthesized
  source 1..22: mol_type = other DNA
cactcatattggctctttagac

SEQ ID NO: 4942 - DNA, 22 bp, synthetic construct
  misc_feature 1..22: note = chemically synthesized
  source 1..22: mol_type = other DNA
actcatattggctctttagacc

SEQ ID NO: 4943 - DNA, 22 bp, synthetic construct
  misc_feature 1..22: note = chemically synthesized
  source 1..22: mol_type = other DNA
atattggctctttagaccaaga

SEQ ID NO: 4944 - DNA, 22 bp, synthetic construct
  misc_feature 1..22: note = chemically synthesized
  source 1..22: mol_type = other DNA
gctctttagaccaagattaccc

SEQ ID NO: 4945 - DNA, 22 bp, synthetic construct
  misc_feature 1..22: note = chemically synthesized
  source 1..22: mol_type = other DNA
ggtaatcttggtctaaagagcc

SEQ ID NO: 4946 - DNA, 22 bp, synthetic construct
  misc_feature 1..22: note = chemically synthesized
  source 1..22: mol_type = other DNA
ggtctaaagagccaatatgagt

SEQ ID NO: 4947 - DNA, 22 bp, synthetic construct
  misc_feature 1..22: note = chemically synthesized
  source 1..22: mol_type = other DNA
gtctaaagagccaatatgagtg

SEQ ID NO: 4948 - DNA, 22 bp, synthetic construct
  misc_feature 1..22: note = chemically synthesized
  source 1..22: mol_type = other DNA
aagagccaatatgagtgaaatg

SEQ ID NO: 4949 - DNA, 22 bp, synthetic construct
  misc_feature 1..22: note = chemically synthesized
  source 1..22: mol_type = other DNA
ttgtgtggttttgagcaaagag

SEQ ID NO: 4950 - DNA, 22 bp, synthetic construct
  misc_feature 1..22: note = chemically synthesized
  source 1..22: mol_type = other DNA
tgtggttttgagcaaagagaaa

SEQ ID NO: 4951 - DNA, 22 bp, synthetic construct
  misc_feature 1..22: note = chemically synthesized
  source 1..22: mol_type = other DNA
tgagcaaagagaaacatgatct

SEQ ID NO: 4952 - DNA, 22 bp, synthetic construct
  misc_feature 1..22: note = chemically synthesized
  source 1..22: mol_type = other DNA
gagcaaagagaaacatgatcta

SEQ ID NO: 4953 - DNA, 22 bp, synthetic construct
  misc_feature 1..22: note = chemically synthesized
  source 1..22: mol_type = other DNA
agcaaagagaaacatgatctaa

SEQ ID NO: 4954 - DNA, 22 bp, synthetic construct
  misc_feature 1..22: note = chemically synthesized
  source 1..22: mol_type = other DNA
atttgaattttagtaagatgac

SEQ ID NO: 4955 - DNA, 22 bp, synthetic construct
  misc_feature 1..22: note = chemically synthesized
  source 1..22: mol_type = other DNA
gaattttagtaagatgacattg

SEQ ID NO: 4956 - DNA, 22 bp, synthetic construct
  misc_feature 1..22: note = chemically synthesized
  source 1..22: mol_type = other DNA
aattttagtaagatgacattgg

SEQ ID NO: 4957 - DNA, 22 bp, synthetic construct
  misc_feature 1..22: note = chemically synthesized
  source 1..22: mol_type = other DNA
tagtaagatgacattggctgct

SEQ ID NO: 4958 - DNA, 22 bp, synthetic construct
  misc_feature 1..22: note = chemically synthesized
  source 1..22: mol_type = other DNA
agtaagatgacattggctgcta

SEQ ID NO: 4959 - DNA, 22 bp, synthetic construct
  misc_feature 1..22: note = chemically synthesized
  source 1..22: mol_type = other DNA
gtaagatgacattggctgctat

SEQ ID NO: 4960 - DNA, 22 bp, synthetic construct
  misc_feature 1..22: note = chemically synthesized
  source 1..22: mol_type = other DNA
gctgctatgaattaattttttt

SEQ ID NO: 4961 - DNA, 22 bp, synthetic construct
  misc_feature 1..22: note = chemically synthesized
  source 1..22: mol_type = other DNA
ctatgaattaattttttttctt

SEQ ID NO: 4962 - DNA, 22 bp, synthetic construct
  misc_feature 1..22: note = chemically synthesized
  source 1..22: mol_type = other DNA
tgaattaattttttttcttaca

SEQ ID NO: 4963 - DNA, 22 bp, synthetic construct
  misc_feature 1..22: note = chemically synthesized
  source 1..22: mol_type = other DNA
attttttttcttacaataatcc

SEQ ID NO: 4964 - DNA, 22 bp, synthetic construct
  misc_feature 1..22: note = chemically synthesized
  source 1..22: mol_type = other DNA
tttttcttacaataatcctata

SEQ ID NO: 4965 - DNA, 22 bp, synthetic construct
  misc_feature 1..22: note = chemically synthesized
  source 1..22: mol_type = other DNA
ttttcttacaataatcctataa

SEQ ID NO: 4966 - DNA, 22 bp, synthetic construct
  misc_feature 1..22: note = chemically synthesized
  source 1..22: mol_type = other DNA
tttcttacaataatcctataag

SEQ ID NO: 4967 - DNA, 22 bp, synthetic construct
  misc_feature 1..22: note = chemically synthesized
  source 1..22: mol_type = other DNA
ttcttacaataatcctataagt

SEQ ID NO: 4968 - DNA, 22 bp, synthetic construct
  misc_feature 1..22: note = chemically synthesized
  source 1..22: mol_type = other DNA
tcttacaataatcctataagtt

SEQ ID NO: 4969 - DNA, 22 bp, synthetic construct
  misc_feature 1..22: note = chemically synthesized
  source 1..22: mol_type = other DNA
cttacaataatcctataagttc

SEQ ID NO: 4970 - DNA, 22 bp, synthetic construct
  misc_feature 1..22: note = chemically synthesized
  source 1..22: mol_type = other DNA
ttacaataatcctataagttct

SEQ ID NO: 4971 - DNA, 22 bp, synthetic construct
  misc_feature 1..22: note = chemically synthesized
  source 1..22: mol_type = other DNA
acaataatcctataagttctgt

SEQ ID NO: 4972 - DNA, 22 bp, synthetic construct
  misc_feature 1..22: note = chemically synthesized
  source 1..22: mol_type = other DNA
caataatcctataagttctgtt

SEQ ID NO: 4973 - DNA, 22 bp, synthetic construct
  misc_feature 1..22: note = chemically synthesized
  source 1..22: mol_type = other DNA
taagttctgttattatctttgt

SEQ ID NO: 4974 - DNA, 22 bp, synthetic construct
  misc_feature 1..22: note = chemically synthesized
  source 1..22: mol_type = other DNA
tgttattatctttgtagtatat

SEQ ID NO: 4975 - DNA, 22 bp, synthetic construct
  misc_feature 1..22: note = chemically synthesized
  source 1..22: mol_type = other DNA
ttattatctttgtagtatatgt

SEQ ID NO: 4976 - DNA, 22 bp, synthetic construct
  misc_feature 1..22: note = chemically synthesized
  source 1..22: mol_type = other DNA
ttatctttgtagtatatgtgag

SEQ ID NO: 4977 - DNA, 22 bp, synthetic construct
  misc_feature 1..22: note = chemically synthesized
  source 1..22: mol_type = other DNA
tctttgtagtatatgtgaggaa

SEQ ID NO: 4978 - DNA, 22 bp, synthetic construct
  misc_feature 1..22: note = chemically synthesized
  source 1..22: mol_type = other DNA
tgtagtatatgtgaggaaactg

SEQ ID NO: 4979 - DNA, 22 bp, synthetic construct
  misc_feature 1..22: note = chemically synthesized
  source 1..22: mol_type = other DNA
gtagtatatgtgaggaaactga

SEQ ID NO: 4980 - DNA, 22 bp, synthetic construct
  misc_feature 1..22: note = chemically synthesized
  source 1..22: mol_type = other DNA
tagtatatgtgaggaaactgag

SEQ ID NO: 4981 - DNA, 22 bp, synthetic construct
  misc_feature 1..22: note = chemically synthesized
  source 1..22: mol_type = other DNA
agagataaaggggtgaagtaat

SEQ ID NO: 4982 - DNA, 22 bp, synthetic construct
  misc_feature 1..22: note = chemically synthesized
  source 1..22: mol_type = other DNA
attcaaggtcacacaaagtttt

SEQ ID NO: 4983 - DNA, 22 bp, synthetic construct
  misc_feature 1..22: note = chemically synthesized
  source 1..22: mol_type = other DNA
ttcaaggtcacacaaagtttta

SEQ ID NO: 4984 - DNA, 22 bp, synthetic construct
  misc_feature 1..22: note = chemically synthesized
  source 1..22: mol_type = other DNA
aaggtcacacaaagttttagag

SEQ ID NO: 4985 - DNA, 22 bp, synthetic construct
  misc_feature 1..22: note = chemically synthesized
  source 1..22: mol_type = other DNA
tagagccatggtttaaatgcag

SEQ ID NO: 4986 - DNA, 22 bp, synthetic construct
  misc_feature 1..22: note = chemically synthesized
  source 1..22: mol_type = other DNA
agagccatggtttaaatgcagg

SEQ ID NO: 4987 - DNA, 22 bp, synthetic construct
  misc_feature 1..22: note = chemically synthesized
  source 1..22: mol_type = other DNA
gagccatggtttaaatgcaggt

SEQ ID NO: 4988 - DNA, 22 bp, synthetic construct
  misc_feature 1..22: note = chemically synthesized
  source 1..22: mol_type = other DNA
aaatgcaggtagtttattagct

SEQ ID NO: 4989 - DNA, 22 bp, synthetic construct
  misc_feature 1..22: note = chemically synthesized
  source 1..22: mol_type = other DNA
aatgcaggtagtttattagctt

SEQ ID NO: 4990 - DNA, 22 bp, synthetic construct
  misc_feature 1..22: note = chemically synthesized
  source 1..22: mol_type = other DNA
attagcttcagagcctgcaatt

SEQ ID NO: 4991 - DNA, 22 bp, synthetic construct
  misc_feature 1..22: note = chemically synthesized
  source 1..22: mol_type = other DNA
ttagcttcagagcctgcaattt

SEQ ID NO: 4992 - DNA, 22 bp, synthetic construct
  misc_feature 1..22: note = chemically synthesized
  source 1..22: mol_type = other DNA
gcttcagagcctgcaattttaa

SEQ ID NO: 4993 - DNA, 22 bp, synthetic construct
  misc_feature 1..22: note = chemically synthesized
  source 1..22: mol_type = other DNA
cagagcctgcaattttaacagt

SEQ ID NO: 4994 - DNA, 22 bp, synthetic construct
  misc_feature 1..22: note = chemically synthesized
  source 1..22: mol_type = other DNA
agagcctgcaattttaacagtt

SEQ ID NO: 4995 - DNA, 22 bp, synthetic construct
  misc_feature 1..22: note = chemically synthesized
  source 1..22: mol_type = other DNA
caattttaacagttatgctgat

SEQ ID NO: 4996 - DNA, 22 bp, synthetic construct
  misc_feature 1..22: note = chemically synthesized
  source 1..22: mol_type = other DNA
taacagttatgctgatgtgata

SEQ ID NO: 4997 - DNA, 22 bp, synthetic construct
  misc_feature 1..22: note = chemically synthesized
  source 1..22: mol_type = other DNA
aacagttatgctgatgtgataa

SEQ ID NO: 4998 - DNA, 22 bp, synthetic construct
  misc_feature 1..22: note = chemically synthesized
  source 1..22: mol_type = other DNA
acagttatgctgatgtgataat

SEQ ID NO: 4999 - DNA, 22 bp, synthetic construct
  misc_feature 1..22: note = chemically synthesized
  source 1..22: mol_type = other DNA
tgctgatgtgataattttactc

SEQ ID NO: 5000 - DNA, 22 bp, synthetic construct
  misc_feature 1..22: note = chemically synthesized
  source 1..22: mol_type = other DNA
atgtgataattttactcatgat

SEQ ID NO: 5001 - DNA, 22 bp, synthetic construct
  misc_feature 1..22: note = chemically synthesized
  source 1..22: mol_type = other DNA
tactcatgatccagttaaagct

SEQ ID NO: 5002 - DNA, 22 bp, synthetic construct
  misc_feature 1..22: note = chemically synthesized
  source 1..22: mol_type = other DNA
actcatgatccagttaaagctt

SEQ ID NO: 5003 - DNA, 22 bp, synthetic construct
  misc_feature 1..22: note = chemically synthesized
  source 1..22: mol_type = other DNA
ctcatgatccagttaaagcttg

SEQ ID NO: 5004 - DNA, 22 bp, synthetic construct
  misc_feature 1..22: note = chemically synthesized
  source 1..22: mol_type = other DNA
atgatccagttaaagcttgtaa

SEQ ID NO: 5005 - DNA, 22 bp, synthetic construct
  misc_feature 1..22: note = chemically synthesized
  source 1..22: mol_type = other DNA
aagcttgtaaataattttagga

SEQ ID NO: 5006 - DNA, 22 bp, synthetic construct
  misc_feature 1..22: note = chemically synthesized
  source 1..22: mol_type = other DNA
gtaaataattttaggattcagt

SEQ ID NO: 5007 - DNA, 22 bp, synthetic construct
  misc_feature 1..22: note = chemically synthesized
  source 1..22: mol_type = other DNA
taaataattttaggattcagtg

SEQ ID NO: 5008 - DNA, 22 bp, synthetic construct
  misc_feature 1..22: note = chemically synthesized
  source 1..22: mol_type = other DNA
taggattcagtgtttttacaga

SEQ ID NO: 5009 - DNA, 22 bp, synthetic construct
  misc_feature 1..22: note = chemically synthesized
  source 1..22: mol_type = other DNA
aggattcagtgtttttacagac

SEQ ID NO: 5010 - DNA, 22 bp, synthetic construct
  misc_feature 1..22: note = chemically synthesized
  source 1..22: mol_type = other DNA
ggattcagtgtttttacagacc

SEQ ID NO: 5011 - DNA, 22 bp, synthetic construct
  misc_feature 1..22: note = chemically synthesized
  source 1..22: mol_type = other DNA
agtgtttttacagacctgtgtg

SEQ ID NO: 5012 - DNA, 22 bp, synthetic construct
  misc_feature 1..22: note = chemically synthesized
  source 1..22: mol_type = other DNA
ttacagacctgtgtgaaagatg

SEQ ID NO: 5013 - DNA, 22 bp, synthetic construct
  misc_feature 1..22: note = chemically synthesized
  source 1..22: mol_type = other DNA
tacagacctgtgtgaaagatgg

SEQ ID NO: 5014 - DNA, 22 bp, synthetic construct
  misc_feature 1..22: note = chemically synthesized
  source 1..22: mol_type = other DNA
acagacctgtgtgaaagatggg

SEQ ID NO: 5015 - DNA, 22 bp, synthetic construct
  misc_feature 1..22: note = chemically synthesized
  source 1..22: mol_type = other DNA
cagacctgtgtgaaagatggga

SEQ ID NO: 5016 - DNA, 22 bp, synthetic construct
  misc_feature 1..22: note = chemically synthesized
  source 1..22: mol_type = other DNA
tgtgaaagatgggacataccat

SEQ ID NO: 5017 - DNA, 22 bp, synthetic construct
  misc_feature 1..22: note = chemically synthesized
  source 1..22: mol_type = other DNA
aaatactgacttacctgatttt

SEQ ID NO: 5018 - DNA, 22 bp, synthetic construct
  misc_feature 1..22: note = chemically synthesized
  source 1..22: mol_type = other DNA
acttacctgattttctatttct

SEQ ID NO: 5019 - DNA, 22 bp, synthetic construct
  misc_feature 1..22: note = chemically synthesized
  source 1..22: mol_type = other DNA
acctgattttctatttctttta

SEQ ID NO: 5020 - DNA, 22 bp, synthetic construct
  misc_feature 1..22: note = chemically synthesized
  source 1..22: mol_type = other DNA
cctgattttctatttcttttat

SEQ ID NO: 5021 - DNA, 22 bp, synthetic construct
  misc_feature 1..22: note = chemically synthesized
  source 1..22: mol_type = other DNA
attttctatttcttttatttga

SEQ ID NO: 5022 - DNA, 22 bp, synthetic construct
  misc_feature 1..22: note = chemically synthesized
  source 1..22: mol_type = other DNA
tctatttcttttatttgactat

SEQ ID NO: 5023 - DNA, 22 bp, synthetic construct
  misc_feature 1..22: note = chemically synthesized
  source 1..22: mol_type = other DNA
ctatttcttttatttgactatg

SEQ ID NO: 5024 - DNA, 22 bp, synthetic construct
  misc_feature 1..22: note = chemically synthesized
  source 1..22: mol_type = other DNA
tatttcttttatttgactatgc

SEQ ID NO: 5025 - DNA, 22 bp, synthetic construct
  misc_feature 1..22: note = chemically synthesized
  source 1..22: mol_type = other DNA
tttcttttatttgactatgctg

SEQ ID NO: 5026 - DNA, 22 bp, synthetic construct
  misc_feature 1..22: note = chemically synthesized
  source 1..22: mol_type = other DNA
cttttatttgactatgctgttg

SEQ ID NO: 5027 - DNA, 22 bp, synthetic construct
  misc_feature 1..22: note = chemically synthesized
  source 1..22: mol_type = other DNA
ttttatttgactatgctgttgg

SEQ ID NO: 5028 - DNA, 22 bp, synthetic construct
  misc_feature 1..22: note = chemically synthesized
  source 1..22: mol_type = other DNA
ttatttgactatgctgttggtt

SEQ ID NO: 5029 - DNA, 22 bp, synthetic construct
  misc_feature 1..22: note = chemically synthesized
  source 1..22: mol_type = other DNA
tatttgactatgctgttggttt

SEQ ID NO: 5030 - DNA, 22 bp, synthetic construct
  misc_feature 1..22: note = chemically synthesized
  source 1..22: mol_type = other DNA
atttgactatgctgttggttta

SEQ ID NO: 5031 - DNA, 22 bp, synthetic construct
  misc_feature 1..22: note = chemically synthesized
  source 1..22: mol_type = other DNA
tttgactatgctgttggtttaa

SEQ ID NO: 5032 - DNA, 22 bp, synthetic construct
  misc_feature 1..22: note = chemically synthesized
  source 1..22: mol_type = other DNA
gactatgctgttggtttaattg

SEQ ID NO: 5033 - DNA, 22 bp, synthetic construct
  misc_feature 1..22: note = chemically synthesized
  source 1..22: mol_type = other DNA
actatgctgttggtttaattgt

SEQ ID NO: 5034 - DNA, 22 bp, synthetic construct
  misc_feature 1..22: note = chemically synthesized
  source 1..22: mol_type = other DNA
tgctgttggtttaattgtttat

SEQ ID NO: 5035 - DNA, 22 bp, synthetic construct
  misc_feature 1..22: note = chemically synthesized
  source 1..22: mol_type = other DNA
ttggtttaattgtttatattgg

SEQ ID NO: 5036 - DNA, 22 bp, synthetic construct
  misc_feature 1..22: note = chemically synthesized
  source 1..22: mol_type = other DNA
gtttaattgtttatattggtct

SEQ ID NO: 5037 - DNA, 22 bp, synthetic construct
  misc_feature 1..22: note = chemically synthesized
  source 1..22: mol_type = other DNA
aattgtttatattggtcttcca

SEQ ID NO: 5038 - DNA, 22 bp, synthetic construct
  misc_feature 1..22: note = chemically synthesized
  source 1..22: mol_type = other DNA
attgtttatattggtcttccac

SEQ ID NO: 5039 - DNA, 22 bp, synthetic construct
  misc_feature 1..22: note = chemically synthesized
  source 1..22: mol_type = other DNA
tttatattggtcttccacggtc

SEQ ID NO: 5040 - DNA, 22 bp, synthetic construct
  misc_feature 1..22: note = chemically synthesized
  source 1..22: mol_type = other DNA
atattggtcttccacggtctgg

SEQ ID NO: 5041 - DNA, 22 bp, synthetic construct
  misc_feature 1..22: note = chemically synthesized
  source 1..22: mol_type = other DNA
tattggtcttccacggtctgga

SEQ ID NO: 5042 - DNA, 22 bp, synthetic construct
  misc_feature 1..22: note = chemically synthesized
  source 1..22: mol_type = other DNA
gtcttccacggtctggagaagg

SEQ ID NO: 5043 - DNA, 22 bp, synthetic construct
  misc_feature 1..22: note = chemically synthesized
  source 1..22: mol_type = other DNA
ccacggtctggagaaggtcttt

SEQ ID NO: 5044 - DNA, 22 bp, synthetic construct
  misc_feature 1..22: note = chemically synthesized
  source 1..22: mol_type = other DNA
cacggtctggagaaggtctttg

SEQ ID NO: 5045 - DNA, 22 bp, synthetic construct
  misc_feature 1..22: note = chemically synthesized
  source 1..22: mol_type = other DNA
gagaaggtctttgatgctatta

SEQ ID NO: 5046 - DNA, 22 bp, synthetic construct
  misc_feature 1..22: note = chemically synthesized
  source 1..22: mol_type = other DNA
tgatgctattatcttgtttttc

SEQ ID NO: 5047 - DNA, 22 bp, synthetic construct
  misc_feature 1..22: note = chemically synthesized
  source 1..22: mol_type = other DNA
gatgctattatcttgtttttct

SEQ ID NO: 5048 - DNA, 22 bp, synthetic construct
  misc_feature 1..22: note = chemically synthesized
  source 1..22: mol_type = other DNA
atgctattatcttgtttttcta

SEQ ID NO: 5049 - DNA, 22 bp, synthetic construct
  misc_feature 1..22: note = chemically synthesized
  source 1..22: mol_type = other DNA
ttatcttgtttttctacaaaag

SEQ ID NO: 5050 - DNA, 22 bp, synthetic construct
  misc_feature 1..22: note = chemically synthesized
  source 1..22: mol_type = other DNA
tcttgtttttctacaaaagtct

SEQ ID NO: 5051 - DNA, 22 bp, synthetic construct
  misc_feature 1..22: note = chemically synthesized
  source 1..22: mol_type = other DNA
gtttttctacaaaagtctggat

SEQ ID NO: 5052 - DNA, 22 bp, synthetic construct
  misc_feature 1..22: note = chemically synthesized
  source 1..22: mol_type = other DNA
tttttctacaaaagtctggata

SEQ ID NO: 5053 - DNA, 22 bp, synthetic construct
  misc_feature 1..22: note = chemically synthesized
  source 1..22: mol_type = other DNA
ttctacaaaagtctggatatag

SEQ ID NO: 5054 - DNA, 22 bp, synthetic construct
  misc_feature 1..22: note = chemically synthesized
  source 1..22: mol_type = other DNA
tctacaaaagtctggatataga

SEQ ID NO: 5055 - DNA, 22 bp, synthetic construct
  misc_feature 1..22: note = chemically synthesized
  source 1..22: mol_type = other DNA
ctacaaaagtctggatatagag

SEQ ID NO: 5056 - DNA, 22 bp, synthetic construct
  misc_feature 1..22: note = chemically synthesized
  source 1..22: mol_type = other DNA
tacaaaagtctggatatagaga

SEQ ID NO: 5057 - DNA, 22 bp, synthetic construct
  misc_feature 1..22: note = chemically synthesized
  source 1..22: mol_type = other DNA
caaaagtctggatatagagagt

SEQ ID NO: 5058 - DNA, 22 bp, synthetic construct
  misc_feature 1..22: note = chemically synthesized
  source 1..22: mol_type = other DNA
gatatagagagtaggttggtta

SEQ ID NO: 5059 - DNA, 22 bp, synthetic construct
  misc_feature 1..22: note = chemically synthesized
  source 1..22: mol_type = other DNA
gttataagttgctttcctcttt

SEQ ID NO: 5060 - DNA, 22 bp, synthetic construct
  misc_feature 1..22: note = chemically synthesized
  source 1..22: mol_type = other DNA
taagttgctttcctctttcttt

SEQ ID NO: 5061 - DNA, 22 bp, synthetic construct
  misc_feature 1..22: note = chemically synthesized
  source 1..22: mol_type = other DNA
ctttcctctttcttttctatta

SEQ ID NO: 5062 - DNA, 22 bp, synthetic construct
  misc_feature 1..22: note = chemically synthesized
  source 1..22: mol_type = other DNA
tcctctttcttttctattaatt

SEQ ID NO: 5063 - DNA, 22 bp, synthetic construct
  misc_feature 1..22: note = chemically synthesized
  source 1..22: mol_type = other DNA
cctctttcttttctattaattt

SEQ ID NO: 5064 - DNA, 22 bp, synthetic construct
  misc_feature 1..22: note = chemically synthesized
  source 1..22: mol_type = other DNA
ctctttcttttctattaatttc

SEQ ID NO: 5065 - DNA, 22 bp, synthetic construct
  misc_feature 1..22: note = chemically synthesized
  source 1..22: mol_type = other DNA
tttcttttctattaatttcctg

SEQ ID NO: 5066 - DNA, 22 bp, synthetic construct
  misc_feature 1..22: note = chemically synthesized
  source 1..22: mol_type = other DNA
tcttttctattaatttcctgta

SEQ ID NO: 5067 - DNA, 22 bp, synthetic construct
  misc_feature 1..22: note = chemically synthesized
  source 1..22: mol_type = other DNA
cttttctattaatttcctgtaa

SEQ ID NO: 5068 - DNA, 22 bp, synthetic construct
  misc_feature 1..22: note = chemically synthesized
  source 1..22: mol_type = other DNA
ttttctattaatttcctgtaac

SEQ ID NO: 5069 - DNA, 22 bp, synthetic construct
  misc_feature 1..22: note = chemically synthesized
  source 1..22: mol_type = other DNA
ttctattaatttcctgtaacac

SEQ ID NO: 5070 - DNA, 22 bp, synthetic construct
  misc_feature 1..22: note = chemically synthesized
  source 1..22: mol_type = other DNA
tctattaatttcctgtaacact

SEQ ID NO: 5071 - DNA, 22 bp, synthetic construct
  misc_feature 1..22: note = chemically synthesized
  source 1..22: mol_type = other DNA
ctattaatttcctgtaacacta

SEQ ID NO: 5072 - DNA, 22 bp, synthetic construct
  misc_feature 1..22: note = chemically synthesized
  source 1..22: mol_type = other DNA
tattaatttcctgtaacactat

SEQ ID NO: 5073 - DNA, 22 bp, synthetic construct
  misc_feature 1..22: note = chemically synthesized
  source 1..22: mol_type = other DNA
ttaatttcctgtaacactatca

SEQ ID NO: 5074 - DNA, 22 bp, synthetic construct
  misc_feature 1..22: note = chemically synthesized
  source 1..22: mol_type = other DNA
atttcctgtaacactatcataa

SEQ ID NO: 5075 - DNA, 22 bp, synthetic construct
  misc_feature 1..22: note = chemically synthesized
  source 1..22: mol_type = other DNA
cctgtaacactatcataatcta

SEQ ID NO: 5076 - DNA, 22 bp, synthetic construct
  misc_feature 1..22: note = chemically synthesized
  source 1..22: mol_type = other DNA
ctgtaacactatcataatctaa

SEQ ID NO: 5077 - DNA, 22 bp, synthetic construct
  misc_feature 1..22: note = chemically synthesized
  source 1..22: mol_type = other DNA
taacactatcataatctaaatt

SEQ ID NO: 5078 - DNA, 22 bp, synthetic construct
  misc_feature 1..22: note = chemically synthesized
  source 1..22: mol_type = other DNA
tcataatctaaatttttaaact

SEQ ID NO: 5079 - DNA, 22 bp, synthetic construct
  misc_feature 1..22: note = chemically synthesized
  source 1..22: mol_type = other DNA
aatttttaaactaataatggat

SEQ ID NO: 5080 - DNA, 22 bp, synthetic construct
  misc_feature 1..22: note = chemically synthesized
  source 1..22: mol_type = other DNA
ttaaactaataatggatttgaa

SEQ ID NO: 5081 - DNA, 22 bp, synthetic construct
  misc_feature 1..22: note = chemically synthesized
  source 1..22: mol_type = other DNA
taaactaataatggatttgaaa

SEQ ID NO: 5082 - DNA, 22 bp, synthetic construct
  misc_feature 1..22: note = chemically synthesized
  source 1..22: mol_type = other DNA
aaactaataatggatttgaaaa

SEQ ID NO: 5083 - DNA, 22 bp, synthetic construct
  misc_feature 1..22: note = chemically synthesized
  source 1..22: mol_type = other DNA
aactaataatggatttgaaaaa

SEQ ID NO: 5084 - DNA, 22 bp, synthetic construct
  misc_feature 1..22: note = chemically synthesized
  source 1..22: mol_type = other DNA
ataatggatttgaaaaatgaat

SEQ ID NO: 5085 - DNA, 22 bp, synthetic construct
  misc_feature 1..22: note = chemically synthesized
  source 1..22: mol_type = other DNA
gaaaaatgaatattggcaattc

SEQ ID NO: 5086 - DNA, 22 bp, synthetic construct
  misc_feature 1..22: note = chemically synthesized
  source 1..22: mol_type = other DNA
aaaaatgaatattggcaattcc

SEQ ID NO: 5087 - DNA, 22 bp, synthetic construct
  misc_feature 1..22: note = chemically synthesized
  source 1..22: mol_type = other DNA
gcaattccttccccttgtatgc

SEQ ID NO: 5088 - DNA, 22 bp, synthetic construct
  misc_feature 1..22: note = chemically synthesized
  source 1..22: mol_type = other DNA
cttccccttgtatgcttctttc

SEQ ID NO: 5089 - DNA, 22 bp, synthetic construct
  misc_feature 1..22: note = chemically synthesized
  source 1..22: mol_type = other DNA
ccccttgtatgcttctttcaaa

SEQ ID NO: 5090 - DNA, 22 bp, synthetic construct
  misc_feature 1..22: note = chemically synthesized
  source 1..22: mol_type = other DNA
cccttgtatgcttctttcaaat

SEQ ID NO: 5091 - DNA, 22 bp, synthetic construct
  misc_feature 1..22: note = chemically synthesized
  source 1..22: mol_type = other DNA
gtatgcttctttcaaatagcac

SEQ ID NO: 5092 - DNA, 22 bp, synthetic construct
  misc_feature 1..22: note = chemically synthesized
  source 1..22: mol_type = other DNA
tatgcttctttcaaatagcaca

SEQ ID NO: 5093 - DNA, 22 bp, synthetic construct
  misc_feature 1..22: note = chemically synthesized
  source 1..22: mol_type = other DNA
ctttcaaatagcacatattttt

SEQ ID NO: 5094 - DNA, 22 bp, synthetic construct
  misc_feature 1..22: note = chemically synthesized
  source 1..22: mol_type = other DNA
tttcaaatagcacatatttttg

SEQ ID NO: 5095 - DNA, 22 bp, synthetic construct
  misc_feature 1..22: note = chemically synthesized
  source 1..22: mol_type = other DNA
tcaaatagcacatatttttgtc

SEQ ID NO: 5096 - DNA, 22 bp, synthetic construct
  misc_feature 1..22: note = chemically synthesized
  source 1..22: mol_type = other DNA
caaatagcacatatttttgtcc

SEQ ID NO: 5097 - DNA, 22 bp, synthetic construct
  misc_feature 1..22: note = chemically synthesized
  source 1..22: mol_type = other DNA
aaatagcacatatttttgtcct

SEQ ID NO: 5098 - DNA, 22 bp, synthetic construct
  misc_feature 1..22: note = chemically synthesized
  source 1..22: mol_type = other DNA
ttgtccttaacattttatttaa

SEQ ID NO: 5099 - DNA, 22 bp, synthetic construct
  misc_feature 1..22: note = chemically synthesized
  source 1..22: mol_type = other DNA
tgtccttaacattttatttaaa

SEQ ID NO: 5100 - DNA, 22 bp, synthetic construct
  misc_feature 1..22: note = chemically synthesized
  source 1..22: mol_type = other DNA
gtccttaacattttatttaaat

SEQ ID NO: 5101 - DNA, 22 bp, synthetic construct
  misc_feature 1..22: note = chemically synthesized
  source 1..22: mol_type = other DNA
tccttaacattttatttaaatt

SEQ ID NO: 5102 - DNA, 22 bp, synthetic construct
  misc_feature 1..22: note = chemically synthesized
  source 1..22: mol_type = other DNA
aacattttatttaaattgtact

SEQ ID NO: 5103 - DNA, 22 bp, synthetic construct
  misc_feature 1..22: note = chemically synthesized
  source 1..22: mol_type = other DNA
acattttatttaaattgtacta

SEQ ID NO: 5104 - DNA, 22 bp, synthetic construct
  misc_feature 1..22: note = chemically synthesized
  source 1..22: mol_type = other DNA
tatttaaattgtactatctcta

SEQ ID NO: 5105 - DNA, 22 bp, synthetic construct
  misc_feature 1..22: note = chemically synthesized
  source 1..22: mol_type = other DNA
atttaaattgtactatctctaa

SEQ ID NO: 5106 - DNA, 22 bp, synthetic construct
  misc_feature 1..22: note = chemically synthesized
  source 1..22: mol_type = other DNA
tttaaattgtactatctctaaa

SEQ ID NO: 5107 - DNA, 22 bp, synthetic construct
  misc_feature 1..22: note = chemically synthesized
  source 1..22: mol_type = other DNA
aaattgtactatctctaaaatt

SEQ ID NO: 5108 - DNA, 22 bp, synthetic construct
  misc_feature 1..22: note = chemically synthesized
  source 1..22: mol_type = other DNA
aattgtactatctctaaaattt

SEQ ID NO: 5109 - DNA, 22 bp, synthetic construct
  misc_feature 1..22: note = chemically synthesized
  source 1..22: mol_type = other DNA
tactatctctaaaatttgattt

SEQ ID NO: 5110 - DNA, 22 bp, synthetic construct
  misc_feature 1..22: note = chemically synthesized
  source 1..22: mol_type = other DNA
tctctaaaatttgattttctga

SEQ ID NO: 5111 - DNA, 22 bp, synthetic construct
  misc_feature 1..22: note = chemically synthesized
  source 1..22: mol_type = other DNA
taaaatttgattttctgaactt

SEQ ID NO: 5112 - DNA, 22 bp, synthetic construct
  misc_feature 1..22: note = chemically synthesized
  source 1..22: mol_type = other DNA
aaatttgattttctgaacttca

SEQ ID NO: 5113 - DNA, 22 bp, synthetic construct
  misc_feature 1..22: note = chemically synthesized
  source 1..22: mol_type = other DNA
gattttctgaacttcaattaaa

SEQ ID NO: 5114 - DNA, 22 bp, synthetic construct
  misc_feature 1..22: note = chemically synthesized
  source 1..22: mol_type = other DNA
attttctgaacttcaattaaaa

SEQ ID NO: 5115 - DNA, 22 bp, synthetic construct
  misc_feature 1..22: note = chemically synthesized
  source 1..22: mol_type = other DNA
tctgaacttcaattaaaagaaa

SEQ ID NO: 5116 - DNA, 22 bp, synthetic construct
  misc_feature 1..22: note = chemically synthesized
  source 1..22: mol_type = other DNA
ctgaacttcaattaaaagaaaa

SEQ ID NO: 5117 - DNA, 22 bp, synthetic construct
  misc_feature 1..22: note = chemically synthesized
  source 1..22: mol_type = other DNA
tgaacttcaattaaaagaaaaa

SEQ ID NO: 5118 - DNA, 22 bp, synthetic construct
  misc_feature 1..22: note = chemically synthesized
  source 1..22: mol_type = other DNA
aacttcaattaaaagaaaaagc

SEQ ID NO: 5119 - DNA, 22 bp, synthetic construct
  misc_feature 1..22: note = chemically synthesized
  source 1..22: mol_type = other DNA
caattaaaagaaaaagcccagc

SEQ ID NO: 5120 - DNA, 22 bp, synthetic construct
  misc_feature 1..22: note = chemically synthesized
  source 1..22: mol_type = other DNA
aattaaaagaaaaagcccagca

SEQ ID NO: 5121 - DNA, 22 bp, synthetic construct
  misc_feature 1..22: note = chemically synthesized
  source 1..22: mol_type = other DNA
aaagaaaaagcccagcatattt

SEQ ID NO: 5122 - DNA, 22 bp, synthetic construct
  misc_feature 1..22: note = chemically synthesized
  source 1..22: mol_type = other DNA
tcatatgaataaatcttttcca

SEQ ID NO: 5123 - DNA, 22 bp, synthetic construct
  misc_feature 1..22: note = chemically synthesized
  source 1..22: mol_type = other DNA
catatgaataaatcttttccat

SEQ ID NO: 5124 - DNA, 22 bp, synthetic construct
  misc_feature 1..22: note = chemically synthesized
  source 1..22: mol_type = other DNA
atatgaataaatcttttccatt

SEQ ID NO: 5125 - DNA, 22 bp, synthetic construct
  misc_feature 1..22: note = chemically synthesized
  source 1..22: mol_type = other DNA
ttccatttactgtattatttaa

SEQ ID NO: 5126 - DNA, 22 bp, synthetic construct
  misc_feature 1..22: note = chemically synthesized
  source 1..22: mol_type = other DNA
tccatttactgtattatttaat

SEQ ID NO: 5127 - DNA, 22 bp, synthetic construct
  misc_feature 1..22: note = chemically synthesized
  source 1..22: mol_type = other DNA
ccatttactgtattatttaatc

SEQ ID NO: 5128 - DNA, 22 bp, synthetic construct
  misc_feature 1..22: note = chemically synthesized
  source 1..22: mol_type = other DNA
catttactgtattatttaatct

SEQ ID NO: 5129 - DNA, 22 bp, synthetic construct
  misc_feature 1..22: note = chemically synthesized
  source 1..22: mol_type = other DNA
actgtattatttaatctgtttt

SEQ ID NO: 5130 - DNA, 22 bp, synthetic construct
  misc_feature 1..22: note = chemically synthesized
  source 1..22: mol_type = other DNA
ctgtattatttaatctgtttta

SEQ ID NO: 5131 - DNA, 22 bp, synthetic construct
  misc_feature 1..22: note = chemically synthesized
  source 1..22: mol_type = other DNA
tattatttaatctgttttaaac

SEQ ID NO: 5132 - DNA, 22 bp, synthetic construct
  misc_feature 1..22: note = chemically synthesized
  source 1..22: mol_type = other DNA
tttaatctgttttaaacactgg

SEQ ID NO: 5133 - DNA, 22 bp, synthetic construct
  misc_feature 1..22: note = chemically synthesized
  source 1..22: mol_type = other DNA
aatctgttttaaacactggaga

SEQ ID NO: 5134 - DNA, 22 bp, synthetic construct
  misc_feature 1..22: note = chemically synthesized
  source 1..22: mol_type = other DNA
atctgttttaaacactggagaa

SEQ ID NO: 5135 - DNA, 22 bp, synthetic construct
  misc_feature 1..22: note = chemically synthesized
  source 1..22: mol_type = other DNA
ttttaaacactggagaatagtt

SEQ ID NO: 5136 - DNA, 22 bp, synthetic construct
  misc_feature 1..22: note = chemically synthesized
  source 1..22: mol_type = other DNA
taaacactggagaatagtttta

SEQ ID NO: 5137 - DNA, 22 bp, synthetic construct
  misc_feature 1..22: note = chemically synthesized
  source 1..22: mol_type = other DNA
aaacactggagaatagttttaa

SEQ ID NO: 5138 - DNA, 22 bp, synthetic construct
  misc_feature 1..22: note = chemically synthesized
  source 1..22: mol_type = other DNA
aacactggagaatagttttaaa

SEQ ID NO: 5139 - DNA, 22 bp, synthetic construct
  misc_feature 1..22: note = chemically synthesized
  source 1..22: mol_type = other DNA
gagaatagttttaaattttttt

SEQ ID NO: 5140 - DNA, 22 bp, synthetic construct
  misc_feature 1..22: note = chemically synthesized
  source 1..22: mol_type = other DNA
taaattttttttaactttttac

SEQ ID NO: 5141 - DNA, 22 bp, synthetic construct
  misc_feature 1..22: note = chemically synthesized
  source 1..22: mol_type = other DNA
aaattttttttaactttttact

SEQ ID NO: 5142 - DNA, 22 bp, synthetic construct
  misc_feature 1..22: note = chemically synthesized
  source 1..22: mol_type = other DNA
aattttttttaactttttactt

SEQ ID NO: 5143 - DNA, 22 bp, synthetic construct
  misc_feature 1..22: note = chemically synthesized
  source 1..22: mol_type = other DNA
tttttaactttttacttacctt

SEQ ID NO: 5144 - DNA, 22 bp, synthetic construct
  misc_feature 1..22: note = chemically synthesized
  source 1..22: mol_type = other DNA
ttttaactttttacttaccttc

SEQ ID NO: 5145 - DNA, 22 bp, synthetic construct
  misc_feature 1..22: note = chemically synthesized
  source 1..22: mol_type = other DNA
tttaactttttacttaccttca

SEQ ID NO: 5146 - DNA, 22 bp, synthetic construct
  misc_feature 1..22: note = chemically synthesized
  source 1..22: mol_type = other DNA
ttaactttttacttaccttcag

SEQ ID NO: 5147 - DNA, 22 bp, synthetic construct
  misc_feature 1..22: note = chemically synthesized
  source 1..22: mol_type = other DNA
taactttttacttaccttcagt

SEQ ID NO: 5148 - DNA, 22 bp, synthetic construct
  misc_feature 1..22: note = chemically synthesized
  source 1..22: mol_type = other DNA
aactttttacttaccttcagta

SEQ ID NO: 5149 - DNA, 22 bp, synthetic construct
  misc_feature 1..22: note = chemically synthesized
  source 1..22: mol_type = other DNA
actttttacttaccttcagtaa

SEQ ID NO: 5150 - DNA, 22 bp, synthetic construct
  misc_feature 1..22: note = chemically synthesized
  source 1..22: mol_type = other DNA
tttacttaccttcagtaattta

SEQ ID NO: 5151 - DNA, 22 bp, synthetic construct
  misc_feature 1..22: note = chemically synthesized
  source 1..22: mol_type = other DNA
ttacttaccttcagtaatttac

SEQ ID NO: 5152 - DNA, 22 bp, synthetic construct
  misc_feature 1..22: note = chemically synthesized
  source 1..22: mol_type = other DNA
tacttaccttcagtaatttaca

SEQ ID NO: 5153 - DNA, 22 bp, synthetic construct
  misc_feature 1..22: note = chemically synthesized
  source 1..22: mol_type = other DNA
acttaccttcagtaatttacaa

SEQ ID NO: 5154 - DNA, 22 bp, synthetic construct
  misc_feature 1..22: note = chemically synthesized
  source 1..22: mol_type = other DNA
cttaccttcagtaatttacaat

SEQ ID NO: 5155 - DNA, 22 bp, synthetic construct
  misc_feature 1..22: note = chemically synthesized
  source 1..22: mol_type = other DNA
accttcagtaatttacaatagt

SEQ ID NO: 5156 - DNA, 22 bp, synthetic construct
  misc_feature 1..22: note = chemically synthesized
  source 1..22: mol_type = other DNA
ccttcagtaatttacaatagtg

SEQ ID NO: 5157 - DNA, 22 bp, synthetic construct
  misc_feature 1..22: note = chemically synthesized
  source 1..22: mol_type = other DNA
cagtaatttacaatagtgtaat

SEQ ID NO: 5158 - DNA, 22 bp, synthetic construct
  misc_feature 1..22: note = chemically synthesized
  source 1..22: mol_type = other DNA
agtaatttacaatagtgtaatg

SEQ ID NO: 5159 - DNA, 22 bp, synthetic construct
  misc_feature 1..22: note = chemically synthesized
  source 1..22: mol_type = other DNA
acaatagtgtaatgacatagtg

SEQ ID NO: 5160 - DNA, 22 bp, synthetic construct
  misc_feature 1..22: note = chemically synthesized
  source 1..22: mol_type = other DNA
caatagtgtaatgacatagtgt

SEQ ID NO: 5161 - DNA, 22 bp, synthetic construct
  misc_feature 1..22: note = chemically synthesized
  source 1..22: mol_type = other DNA
tagattgtataatttaaccgat

SEQ ID NO: 5162 - DNA, 22 bp, synthetic construct
  misc_feature 1..22: note = chemically synthesized
  source 1..22: mol_type = other DNA
gattgtataatttaaccgattt

SEQ ID NO: 5163 - DNA, 22 bp, synthetic construct
  misc_feature 1..22: note = chemically synthesized
  source 1..22: mol_type = other DNA
tataatttaaccgatttgtaat

SEQ ID NO: 5164 - DNA, 22 bp, synthetic construct
  misc_feature 1..22: note = chemically synthesized
  source 1..22: mol_type = other DNA
aaccgatttgtaattttcatat

SEQ ID NO: 5165 - DNA, 22 bp, synthetic construct
  misc_feature 1..22: note = chemically synthesized
  source 1..22: mol_type = other DNA
accgatttgtaattttcatata

SEQ ID NO: 5166 - DNA, 22 bp, synthetic construct
  misc_feature 1..22: note = chemically synthesized
  source 1..22: mol_type = other DNA
gtaattttcatataaaatgcaa

SEQ ID NO: 5167 - DNA, 22 bp, synthetic construct
  misc_feature 1..22: note = chemically synthesized
  source 1..22: mol_type = other DNA
taattttcatataaaatgcaaa

SEQ ID NO: 5168 - DNA, 22 bp, synthetic construct
  misc_feature 1..22: note = chemically synthesized
  source 1..22: mol_type = other DNA
tcatataaaatgcaaattttca

SEQ ID NO: 5169 - DNA, 22 bp, synthetic construct
  misc_feature 1..22: note = chemically synthesized
  source 1..22: mol_type = other DNA
catataaaatgcaaattttcag

SEQ ID NO: 5170 - DNA, 22 bp, synthetic construct
  misc_feature 1..22: note = chemically synthesized
  source 1..22: mol_type = other DNA
atataaaatgcaaattttcagt

SEQ ID NO: 5171 - DNA, 22 bp, synthetic construct
  misc_feature 1..22: note = chemically synthesized
  source 1..22: mol_type = other DNA
tcagtgttttcatatataacat

SEQ ID NO: 5172 - DNA, 22 bp, synthetic construct
  misc_feature 1..22: note = chemically synthesized
  source 1..22: mol_type = other DNA
cagtgttttcatatataacatt

SEQ ID NO: 5173 - DNA, 22 bp, synthetic construct
  misc_feature 1..22: note = chemically synthesized
  source 1..22: mol_type = other DNA
agtgttttcatatataacatta

SEQ ID NO: 5174 - DNA, 22 bp, synthetic construct
  misc_feature 1..22: note = chemically synthesized
  source 1..22: mol_type = other DNA
tcatatataacattagggaaac

SEQ ID NO: 5175 - DNA, 22 bp, synthetic construct
  misc_feature 1..22: note = chemically synthesized
  source 1..22: mol_type = other DNA
catatataacattagggaaaca

SEQ ID NO: 5176 - DNA, 22 bp, synthetic construct
  misc_feature 1..22: note = chemically synthesized
  source 1..22: mol_type = other DNA
atatataacattagggaaacaa

SEQ ID NO: 5177 - DNA, 22 bp, synthetic construct
  misc_feature 1..22: note = chemically synthesized
  source 1..22: mol_type = other DNA
gggaaacaaaaaactaacttga

SEQ ID NO: 5178 - DNA, 22 bp, synthetic construct
  misc_feature 1..22: note = chemically synthesized
  source 1..22: mol_type = other DNA
acttgaaattataataggaaat

SEQ ID NO: 5179 - DNA, 22 bp, synthetic construct
  misc_feature 1..22: note = chemically synthesized
  source 1..22: mol_type = other DNA
gaaattataataggaaatttta

SEQ ID NO: 5180 - DNA, 22 bp, synthetic construct
  misc_feature 1..22: note = chemically synthesized
  source 1..22: mol_type = other DNA
aaattataataggaaattttat

SEQ ID NO: 5181 - DNA, 22 bp, synthetic construct
  misc_feature 1..22: note = chemically synthesized
  source 1..22: mol_type = other DNA
taataggaaattttattttctg

SEQ ID NO: 5182 - DNA, 22 bp, synthetic construct
  misc_feature 1..22: note = chemically synthesized
  source 1..22: mol_type = other DNA
tattttctggagattatttttc

SEQ ID NO: 5183 - DNA, 22 bp, synthetic construct
  misc_feature 1..22: note = chemically synthesized
  source 1..22: mol_type = other DNA
attttctggagattatttttct

SEQ ID NO: 5184 - DNA, 22 bp, synthetic construct
  misc_feature 1..22: note = chemically synthesized
  source 1..22: mol_type = other DNA
ttttctggagattatttttctt

SEQ ID NO: 5185 - DNA, 22 bp, synthetic construct
  misc_feature 1..22: note = chemically synthesized
  source 1..22: mol_type = other DNA
tctggagattatttttcttgga

SEQ ID NO: 5186 - DNA, 22 bp, synthetic construct
  misc_feature 1..22: note = chemically synthesized
  source 1..22: mol_type = other DNA
ctggagattatttttcttggaa

SEQ ID NO: 5187 - DNA, 22 bp, synthetic construct
  misc_feature 1..22: note = chemically synthesized
  source 1..22: mol_type = other DNA
tggagattatttttcttggaaa

SEQ ID NO: 5188 - DNA, 22 bp, synthetic construct
  misc_feature 1..22: note = chemically synthesized
  source 1..22: mol_type = other DNA
gagattatttttcttggaaaaa

SEQ ID NO: 5189 - DNA, 22 bp, synthetic construct
  misc_feature 1..22: note = chemically synthesized
  source 1..22: mol_type = other DNA
tttttcttggaaaaaaaagtat

SEQ ID NO: 5190 - DNA, 22 bp, synthetic construct
  misc_feature 1..22: note = chemically synthesized
  source 1..22: mol_type = other DNA
ttcttggaaaaaaaagtatttc

SEQ ID NO: 5191 - DNA, 22 bp, synthetic construct
  misc_feature 1..22: note = chemically synthesized
  source 1..22: mol_type = other DNA
tcttggaaaaaaaagtatttca

SEQ ID NO: 5192 - DNA, 22 bp, synthetic construct
  misc_feature 1..22: note = chemically synthesized
  source 1..22: mol_type = other DNA
cttggaaaaaaaagtatttcaa

SEQ ID NO: 5193 - DNA, 22 bp, synthetic construct
  misc_feature 1..22: note = chemically synthesized
  source 1..22: mol_type = other DNA
ttggaaaaaaaagtatttcaac

SEQ ID NO: 5194 - DNA, 22 bp, synthetic construct
  misc_feature 1..22: note = chemically synthesized
  source 1..22: mol_type = other DNA
ggaaaaaaaagtatttcaacaa

SEQ ID NO: 5195 - DNA, 22 bp, synthetic construct
  misc_feature 1..22: note = chemically synthesized
  source 1..22: mol_type = other DNA
gaaaaaaaagtatttcaacaat

SEQ ID NO: 5196 - DNA, 22 bp, synthetic construct
  misc_feature 1..22: note = chemically synthesized
  source 1..22: mol_type = other DNA
caacaatgcaacaaagtatttc

SEQ ID NO: 5197 - DNA, 22 bp, synthetic construct
  misc_feature 1..22: note = chemically synthesized
  source 1..22: mol_type = other DNA
aacaatgcaacaaagtatttca

SEQ ID NO: 5198 - DNA, 22 bp, synthetic construct
  misc_feature 1..22: note = chemically synthesized
  source 1..22: mol_type = other DNA
caaatggcatgccttagaaata

SEQ ID NO: 5199 - DNA, 22 bp, synthetic construct
  misc_feature 1..22: note = chemically synthesized
  source 1..22: mol_type = other DNA
aaatggcatgccttagaaatat

SEQ ID NO: 5200 - DNA, 22 bp, synthetic construct
  misc_feature 1..22: note = chemically synthesized
  source 1..22: mol_type = other DNA
agaaatattttttttaaaagat

SEQ ID NO: 5201 - DNA, 22 bp, synthetic construct
  misc_feature 1..22: note = chemically synthesized
  source 1..22: mol_type = other DNA
gaaatattttttttaaaagatc

SEQ ID NO: 5202 - DNA, 22 bp, synthetic construct
  misc_feature 1..22: note = chemically synthesized
  source 1..22: mol_type = other DNA
tttttaaaagatccacattgaa

SEQ ID NO: 5203 - DNA, 22 bp, synthetic construct
  misc_feature 1..22: note = chemically synthesized
  source 1..22: mol_type = other DNA
ttttaaaagatccacattgaaa

SEQ ID NO: 5204 - DNA, 22 bp, synthetic construct
  misc_feature 1..22: note = chemically synthesized
  source 1..22: mol_type = other DNA
tttaaaagatccacattgaaaa

SEQ ID NO: 5205 - DNA, 22 bp, synthetic construct
  misc_feature 1..22: note = chemically synthesized
  source 1..22: mol_type = other DNA
ttaaaagatccacattgaaaac

SEQ ID NO: 5206 - DNA, 22 bp, synthetic construct
  misc_feature 1..22: note = chemically synthesized
  source 1..22: mol_type = other DNA
taaaagatccacattgaaaaca

SEQ ID NO: 5207 - DNA, 22 bp, synthetic construct
  misc_feature 1..22: note = chemically synthesized
  source 1..22: mol_type = other DNA
aaaagatccacattgaaaacat

SEQ ID NO: 5208 - DNA, 22 bp, synthetic construct
  misc_feature 1..22: note = chemically synthesized
  source 1..22: mol_type = other DNA
aaagatccacattgaaaacata

SEQ ID NO: 5209 - DNA, 22 bp, synthetic construct
  misc_feature 1..22: note = chemically synthesized
  source 1..22: mol_type = other DNA
aaaacataaacatgaaccctct

SEQ ID NO: 5210 - DNA, 22 bp, synthetic construct
  misc_feature 1..22: note = chemically synthesized
  source 1..22: mol_type = other DNA
tttattttctacttactttaag

SEQ ID NO: 5211 - DNA, 22 bp, synthetic construct
  misc_feature 1..22: note = chemically synthesized
  source 1..22: mol_type = other DNA
tattttctacttactttaagtg

SEQ ID NO: 5212 - DNA, 22 bp, synthetic construct
  misc_feature 1..22: note = chemically synthesized
  source 1..22: mol_type = other DNA
attttctacttactttaagtga

SEQ ID NO: 5213 - DNA, 22 bp, synthetic construct
  misc_feature 1..22: note = chemically synthesized
  source 1..22: mol_type = other DNA
ttttctacttactttaagtgaa

SEQ ID NO: 5214 - DNA, 22 bp, synthetic construct
  misc_feature 1..22: note = chemically synthesized
  source 1..22: mol_type = other DNA
tctacttactttaagtgaagtt

SEQ ID NO: 5215 - DNA, 22 bp, synthetic construct
  misc_feature 1..22: note = chemically synthesized
  source 1..22: mol_type = other DNA
ctacttactttaagtgaagtta

SEQ ID NO: 5216 - DNA, 22 bp, synthetic construct
  misc_feature 1..22: note = chemically synthesized
  source 1..22: mol_type = other DNA
tacttactttaagtgaagttac

SEQ ID NO: 5217 - DNA, 22 bp, synthetic construct
  misc_feature 1..22: note = chemically synthesized
  source 1..22: mol_type = other DNA
cttactttaagtgaagttactt

SEQ ID NO: 5218 - DNA, 22 bp, synthetic construct
  misc_feature 1..22: note = chemically synthesized
  source 1..22: mol_type = other DNA
actttaagtgaagttacttctg

SEQ ID NO: 5219 - DNA, 22 bp, synthetic construct
  misc_feature 1..22: note = chemically synthesized
  source 1..22: mol_type = other DNA
ctttaagtgaagttacttctgg

SEQ ID NO: 5220 - DNA, 22 bp, synthetic construct
  misc_feature 1..22: note = chemically synthesized
  source 1..22: mol_type = other DNA
taagtgaagttacttctgggtg

SEQ ID NO: 5221 - DNA, 22 bp, synthetic construct
  misc_feature 1..22: note = chemically synthesized
  source 1..22: mol_type = other DNA
aagtgaagttacttctgggtgt

SEQ ID NO: 5222 - DNA, 22 bp, synthetic construct
  misc_feature 1..22: note = chemically synthesized
  source 1..22: mol_type = other DNA
agtgaagttacttctgggtgtt

SEQ ID NO: 5223 - DNA, 22 bp, synthetic construct
  misc_feature 1..22: note = chemically synthesized
  source 1..22: mol_type = other DNA
cttctgggtgttctggagtttc

SEQ ID NO: 5224 - DNA, 22 bp, synthetic construct
  misc_feature 1..22: note = chemically synthesized
  source 1..22: mol_type = other DNA
ctgggtgttctggagtttcagg

SEQ ID NO: 5225 - DNA, 22 bp, synthetic construct
  misc_feature 1..22: note = chemically synthesized
  source 1..22: mol_type = other DNA
tgggtgttctggagtttcaggt

SEQ ID NO: 5226 - DNA, 22 bp, synthetic construct
  misc_feature 1..22: note = chemically synthesized
  source 1..22: mol_type = other DNA
ggtgttctggagtttcaggttg

SEQ ID NO: 5227 - DNA, 22 bp, synthetic construct
  misc_feature 1..22: note = chemically synthesized
  source 1..22: mol_type = other DNA
tggagtttcaggttgattttga

SEQ ID NO: 5228 - DNA, 22 bp, synthetic construct
  misc_feature 1..22: note = chemically synthesized
  source 1..22: mol_type = other DNA
gagtttcaggttgattttgaat

SEQ ID NO: 5229 - DNA, 22 bp, synthetic construct
  misc_feature 1..22: note = chemically synthesized
  source 1..22: mol_type = other DNA
caggttgattttgaattaagtt

SEQ ID NO: 5230 - DNA, 22 bp, synthetic construct
  misc_feature 1..22: note = chemically synthesized
  source 1..22: mol_type = other DNA
aggttgattttgaattaagtta

SEQ ID NO: 5231 - DNA, 22 bp, synthetic construct
  misc_feature 1..22: note = chemically synthesized
  source 1..22: mol_type = other DNA
attttgaattaagttagttagt

SEQ ID NO: 5232 - DNA, 22 bp, synthetic construct
  misc_feature 1..22: note = chemically synthesized
  source 1..22: mol_type = other DNA
tgaattaagttagttagttgct

SEQ ID NO: 5233 - DNA, 22 bp, synthetic construct
  misc_feature 1..22: note = chemically synthesized
  source 1..22: mol_type = other DNA
gaattaagttagttagttgctc

SEQ ID NO: 5234 - DNA, 22 bp, synthetic construct
  misc_feature 1..22: note = chemically synthesized
  source 1..22: mol_type = other DNA
aattaagttagttagttgctct

SEQ ID NO: 5235 - DNA, 22 bp, synthetic construct
  misc_feature 1..22: note = chemically synthesized
  source 1..22: mol_type = other DNA
agttagttagttgctcttctaa

SEQ ID NO: 5236 - DNA, 22 bp, synthetic construct
  misc_feature 1..22: note = chemically synthesized
  source 1..22: mol_type = other DNA
gttagttgctcttctaaatatt

SEQ ID NO: 5237 - DNA, 22 bp, synthetic construct
  misc_feature 1..22: note = chemically synthesized
  source 1..22: mol_type = other DNA
gttgctcttctaaatatttcac

SEQ ID NO: 5238 - DNA, 22 bp, synthetic construct
  misc_feature 1..22: note = chemically synthesized
  source 1..22: mol_type = other DNA
ctcttctaaatatttcactttt

SEQ ID NO: 5239 - DNA, 22 bp, synthetic construct
  misc_feature 1..22: note = chemically synthesized
  source 1..22: mol_type = other DNA
ttctaaatatttcactttttgt

SEQ ID NO: 5240 - DNA, 22 bp, synthetic construct
  misc_feature 1..22: note = chemically synthesized
  source 1..22: mol_type = other DNA
ctaaatatttcactttttgttg

SEQ ID NO: 5241 - DNA, 22 bp, synthetic construct
  misc_feature 1..22: note = chemically synthesized
  source 1..22: mol_type = other DNA
taaatatttcactttttgttga

SEQ ID NO: 5242 - DNA, 22 bp, synthetic construct
  misc_feature 1..22: note = chemically synthesized
  source 1..22: mol_type = other DNA
aatatttcactttttgttgaag

SEQ ID NO: 5243 - DNA, 22 bp, synthetic construct
  misc_feature 1..22: note = chemically synthesized
  source 1..22: mol_type = other DNA
cactttttgttgaagtagaatt

SEQ ID NO: 5244 - DNA, 22 bp, synthetic construct
  misc_feature 1..22: note = chemically synthesized
  source 1..22: mol_type = other DNA
actttttgttgaagtagaattt

SEQ ID NO: 5245 - DNA, 22 bp, synthetic construct
  misc_feature 1..22: note = chemically synthesized
  source 1..22: mol_type = other DNA
tttgttgaagtagaattttttc

SEQ ID NO: 5246 - DNA, 22 bp, synthetic construct
  misc_feature 1..22: note = chemically synthesized
  source 1..22: mol_type = other DNA
ttgttgaagtagaattttttct

SEQ ID NO: 5247 - DNA, 22 bp, synthetic construct
  misc_feature 1..22: note = chemically synthesized
  source 1..22: mol_type = other DNA
tgttgaagtagaattttttctt

SEQ ID NO: 5248 - DNA, 22 bp, synthetic construct
  misc_feature 1..22: note = chemically synthesized
  source 1..22: mol_type = other DNA
gttgaagtagaattttttcttc

SEQ ID NO: 5249 - DNA, 22 bp, synthetic construct
  misc_feature 1..22: note = chemically synthesized
  source 1..22: mol_type = other DNA
ttgaagtagaattttttcttct

SEQ ID NO: 5250 - DNA, 22 bp, synthetic construct
  misc_feature 1..22: note = chemically synthesized
  source 1..22: mol_type = other DNA
aagtagaattttttcttctagg

SEQ ID NO: 5251 - DNA, 22 bp, synthetic construct
  misc_feature 1..22: note = chemically synthesized
  source 1..22: mol_type = other DNA
tttcttctaggaggctttcaag

SEQ ID NO: 5252 - DNA, 22 bp, synthetic construct
  misc_feature 1..22: note = chemically synthesized
  source 1..22: mol_type = other DNA
ttcttctaggaggctttcaagt

SEQ ID NO: 5253 - DNA, 22 bp, synthetic construct
  misc_feature 1..22: note = chemically synthesized
  source 1..22: mol_type = other DNA
tcttctaggaggctttcaagtt

SEQ ID NO: 5254 - DNA, 22 bp, synthetic construct
  misc_feature 1..22: note = chemically synthesized
  source 1..22: mol_type = other DNA
cttctaggaggctttcaagttt

SEQ ID NO: 5255 - DNA, 22 bp, synthetic construct
  misc_feature 1..22: note = chemically synthesized
  source 1..22: mol_type = other DNA
ttctaggaggctttcaagtttt

SEQ ID NO: 5256 - DNA, 22 bp, synthetic construct
  misc_feature 1..22: note = chemically synthesized
  source 1..22: mol_type = other DNA
ctaggaggctttcaagttttga

SEQ ID NO: 5257 - DNA, 22 bp, synthetic construct
  misc_feature 1..22: note = chemically synthesized
  source 1..22: mol_type = other DNA
taggaggctttcaagttttgag

SEQ ID NO: 5258 - DNA, 22 bp, synthetic construct
  misc_feature 1..22: note = chemically synthesized
  source 1..22: mol_type = other DNA
ggaggctttcaagttttgagtt

SEQ ID NO: 5259 - DNA, 22 bp, synthetic construct
  misc_feature 1..22: note = chemically synthesized
  source 1..22: mol_type = other DNA
tcaagttttgagttgagttcaa

SEQ ID NO: 5260 - DNA, 22 bp, synthetic construct
  misc_feature 1..22: note = chemically synthesized
  source 1..22: mol_type = other DNA
caagttttgagttgagttcaag

SEQ ID NO: 5261 - DNA, 22 bp, synthetic construct
  misc_feature 1..22: note = chemically synthesized
  source 1..22: mol_type = other DNA
aagttttgagttgagttcaagt

SEQ ID NO: 5262 - DNA, 22 bp, synthetic construct
  misc_feature 1..22: note = chemically synthesized
  source 1..22: mol_type = other DNA
tgagttgagttcaagtgacata

SEQ ID NO: 5263 - DNA, 22 bp, synthetic construct
  misc_feature 1..22: note = chemically synthesized
  source 1..22: mol_type = other DNA
gagttgagttcaagtgacatat

SEQ ID NO: 5264 - DNA, 22 bp, synthetic construct
  misc_feature 1..22: note = chemically synthesized
  source 1..22: mol_type = other DNA
agttgagttcaagtgacatatt

SEQ ID NO: 5265 - DNA, 22 bp, synthetic construct
  misc_feature 1..22: note = chemically synthesized
  source 1..22: mol_type = other DNA
agttcaagtgacatattcttta

SEQ ID NO: 5266 - DNA, 22 bp, synthetic construct
  misc_feature 1..22: note = chemically synthesized
  source 1..22: mol_type = other DNA
aagtgacatattctttacctct

SEQ ID NO: 5267 - DNA, 22 bp, synthetic construct
  misc_feature 1..22: note = chemically synthesized
  source 1..22: mol_type = other DNA
tttacctcttcatttttgactt

SEQ ID NO: 5268 - DNA, 22 bp, synthetic construct
  misc_feature 1..22: note = chemically synthesized
  source 1..22: mol_type = other DNA
tacctcttcatttttgacttgt

SEQ ID NO: 5269 - DNA, 22 bp, synthetic construct
  misc_feature 1..22: note = chemically synthesized
  source 1..22: mol_type = other DNA
acctcttcatttttgacttgta

SEQ ID NO: 5270 - DNA, 22 bp, synthetic construct
  misc_feature 1..22: note = chemically synthesized
  source 1..22: mol_type = other DNA
cctcttcatttttgacttgtag

SEQ ID NO: 5271 - DNA, 22 bp, synthetic construct
  misc_feature 1..22: note = chemically synthesized
  source 1..22: mol_type = other DNA
ttcatttttgacttgtagttta

SEQ ID NO: 5272 - DNA, 22 bp, synthetic construct
  misc_feature 1..22: note = chemically synthesized
  source 1..22: mol_type = other DNA
catttttgacttgtagtttata

SEQ ID NO: 5273 - DNA, 22 bp, synthetic construct
  misc_feature 1..22: note = chemically synthesized
  source 1..22: mol_type = other DNA
atttttgacttgtagtttatat

SEQ ID NO: 5274 - DNA, 22 bp, synthetic construct
  misc_feature 1..22: note = chemically synthesized
  source 1..22: mol_type = other DNA
ttgacttgtagtttatatgtag

SEQ ID NO: 5275 - DNA, 22 bp, synthetic construct
  misc_feature 1..22: note = chemically synthesized
  source 1..22: mol_type = other DNA
tgacttgtagtttatatgtagt

SEQ ID NO: 5276 - DNA, 22 bp, synthetic construct
  misc_feature 1..22: note = chemically synthesized
  source 1..22: mol_type = other DNA
gacttgtagtttatatgtagtt

SEQ ID NO: 5277 - DNA, 22 bp, synthetic construct
  misc_feature 1..22: note = chemically synthesized
  source 1..22: mol_type = other DNA
acttgtagtttatatgtagttc

SEQ ID NO: 5278 - DNA, 22 bp, synthetic construct
  misc_feature 1..22: note = chemically synthesized
  source 1..22: mol_type = other DNA
gtagtttatatgtagttcttct

SEQ ID NO: 5279 - DNA, 22 bp, synthetic construct
  misc_feature 1..22: note = chemically synthesized
  source 1..22: mol_type = other DNA
tagtttatatgtagttcttctc

SEQ ID NO: 5280 - DNA, 22 bp, synthetic construct
  misc_feature 1..22: note = chemically synthesized
  source 1..22: mol_type = other DNA
atatgtagttcttctcagttcc

SEQ ID NO: 5281 - DNA, 22 bp, synthetic construct
  misc_feature 1..22: note = chemically synthesized
  source 1..22: mol_type = other DNA
tatgtagttcttctcagttcct

SEQ ID NO: 5282 - DNA, 22 bp, synthetic construct
  misc_feature 1..22: note = chemically synthesized
  source 1..22: mol_type = other DNA
ttctcagttccttttcttcttc

SEQ ID NO: 5283 - DNA, 22 bp, synthetic construct
  misc_feature 1..22: note = chemically synthesized
  source 1..22: mol_type = other DNA
ctcagttccttttcttcttctt

SEQ ID NO: 5284 - DNA, 22 bp, synthetic construct
  misc_feature 1..22: note = chemically synthesized
  source 1..22: mol_type = other DNA
tcagttccttttcttcttcttt

SEQ ID NO: 5285 - DNA, 22 bp, synthetic construct
  misc_feature 1..22: note = chemically synthesized
  source 1..22: mol_type = other DNA
agttccttttcttcttctttga

SEQ ID NO: 5286 - DNA, 22 bp, synthetic construct
  misc_feature 1..22: note = chemically synthesized
  source 1..22: mol_type = other DNA
cttttcttcttctttgatttca

SEQ ID NO: 5287 - DNA, 22 bp, synthetic construct
  misc_feature 1..22: note = chemically synthesized
  source 1..22: mol_type = other DNA
ttcttcttctttgatttcactg

SEQ ID NO: 5288 - DNA, 22 bp, synthetic construct
  misc_feature 1..22: note = chemically synthesized
  source 1..22: mol_type = other DNA
tcttcttctttgatttcactgg

SEQ ID NO: 5289 - DNA, 22 bp, synthetic construct
  misc_feature 1..22: note = chemically synthesized
  source 1..22: mol_type = other DNA
cttcttctttgatttcactggt

SEQ ID NO: 5290 - DNA, 22 bp, synthetic construct
  misc_feature 1..22: note = chemically synthesized
  source 1..22: mol_type = other DNA
ttcttctttgatttcactggtt

SEQ ID NO: 5291 - DNA, 22 bp, synthetic construct
  misc_feature 1..22: note = chemically synthesized
  source 1..22: mol_type = other DNA
cttctttgatttcactggtttg

SEQ ID NO: 5292 - DNA, 22 bp, synthetic construct
  misc_feature 1..22: note = chemically synthesized
  source 1..22: mol_type = other DNA
ttctttgatttcactggtttgc

SEQ ID NO: 5293 - DNA, 22 bp, synthetic construct
  misc_feature 1..22: note = chemically synthesized
  source 1..22: mol_type = other DNA
ctttgatttcactggtttgcag

SEQ ID NO: 5294 - DNA, 22 bp, synthetic construct
  misc_feature 1..22: note = chemically synthesized
  source 1..22: mol_type = other DNA
tttgatttcactggtttgcagc

SEQ ID NO: 5295 - DNA, 22 bp, synthetic construct
  misc_feature 1..22: note = chemically synthesized
  source 1..22: mol_type = other DNA
tgatttcactggtttgcagcga

SEQ ID NO: 5296 - DNA, 22 bp, synthetic construct
  misc_feature 1..22: note = chemically synthesized
  source 1..22: mol_type = other DNA
gatttcactggtttgcagcgat

SEQ ID NO: 5297 - DNA, 22 bp, synthetic construct
  misc_feature 1..22: note = chemically synthesized
  source 1..22: mol_type = other DNA
atttcactggtttgcagcgata

SEQ ID NO: 5298 - DNA, 22 bp, synthetic construct
  misc_feature 1..22: note = chemically synthesized
  source 1..22: mol_type = other DNA
cactggtttgcagcgatagatc

SEQ ID NO: 5299 - DNA, 22 bp, synthetic construct
  misc_feature 1..22: note = chemically synthesized
  source 1..22: mol_type = other DNA
actggtttgcagcgatagatca

SEQ ID NO: 5300 - DNA, 22 bp, synthetic construct
  misc_feature 1..22: note = chemically synthesized
  source 1..22: mol_type = other DNA
gtttgcagcgatagatcataaa

SEQ ID NO: 5301 - DNA, 22 bp, synthetic construct
  misc_feature 1..22: note = chemically synthesized
  source 1..22: mol_type = other DNA
gcagcgatagatcataaaaaga

SEQ ID NO: 5302 - DNA, 22 bp, synthetic construct
  misc_feature 1..22: note = chemically synthesized
  source 1..22: mol_type = other DNA
cagcgatagatcataaaaagac

SEQ ID NO: 5303 - DNA, 22 bp, synthetic construct
  misc_feature 1..22: note = chemically synthesized
  source 1..22: mol_type = other DNA
atcaaatatgttgagtttttga

SEQ ID NO: 5304 - DNA, 22 bp, synthetic construct
  misc_feature 1..22: note = chemically synthesized
  source 1..22: mol_type = other DNA
agtttttgaaatatgtcattaa

SEQ ID NO: 5305 - DNA, 22 bp, synthetic construct
  misc_feature 1..22: note = chemically synthesized
  source 1..22: mol_type = other DNA
ttgaaatatgtcattaatttgg

SEQ ID NO: 5306 - DNA, 22 bp, synthetic construct
  misc_feature 1..22: note = chemically synthesized
  source 1..22: mol_type = other DNA
tgaaatatgtcattaatttggc

SEQ ID NO: 5307 - DNA, 22 bp, synthetic construct
  misc_feature 1..22: note = chemically synthesized
  source 1..22: mol_type = other DNA
gaaatatgtcattaatttggcc

SEQ ID NO: 5308 - DNA, 22 bp, synthetic construct
  misc_feature 1..22: note = chemically synthesized
  source 1..22: mol_type = other DNA
aaatatgtcattaatttggccc

SEQ ID NO: 5309 - DNA, 22 bp, synthetic construct
  misc_feature 1..22: note = chemically synthesized
  source 1..22: mol_type = other DNA
atttggcccttcgtcttatgga

SEQ ID NO: 5310 - DNA, 22 bp, synthetic construct
  misc_feature 1..22: note = chemically synthesized
  source 1..22: mol_type = other DNA
ggcccttcgtcttatggacaaa

SEQ ID NO: 5311 - DNA, 22 bp, synthetic construct
  misc_feature 1..22: note = chemically synthesized
  source 1..22: mol_type = other DNA
gcccttcgtcttatggacaaag

SEQ ID NO: 5312 - DNA, 22 bp, synthetic construct
  misc_feature 1..22: note = chemically synthesized
  source 1..22: mol_type = other DNA
cgtcttatggacaaagtcttta

SEQ ID NO: 5313 - DNA, 22 bp, synthetic construct
  misc_feature 1..22: note = chemically synthesized
  source 1..22: mol_type = other DNA
gtcttatggacaaagtctttaa

SEQ ID NO: 5314 - DNA, 22 bp, synthetic construct
  misc_feature 1..22: note = chemically synthesized
  source 1..22: mol_type = other DNA
atggacaaagtctttaagacca

SEQ ID NO: 5315 - DNA, 22 bp, synthetic construct
  misc_feature 1..22: note = chemically synthesized
  source 1..22: mol_type = other DNA
tggacaaagtctttaagaccat

SEQ ID NO: 5316 - DNA, 22 bp, synthetic construct
  misc_feature 1..22: note = chemically synthesized
  source 1..22: mol_type = other DNA
taagaccatgtcccaactgaag

SEQ ID NO: 5317 - DNA, 22 bp, synthetic construct
  misc_feature 1..22: note = chemically synthesized
  source 1..22: mol_type = other DNA
aagaccatgtcccaactgaagg

SEQ ID NO: 5318 - DNA, 22 bp, synthetic construct
  misc_feature 1..22: note = chemically synthesized
  source 1..22: mol_type = other DNA
agaccatgtcccaactgaagga

SEQ ID NO: 5319 - DNA, 22 bp, synthetic construct
  misc_feature 1..22: note = chemically synthesized
  source 1..22: mol_type = other DNA
aaggaggccattggctaaaatt

SEQ ID NO: 5320 - DNA, 22 bp, synthetic construct
  misc_feature 1..22: note = chemically synthesized
  source 1..22: mol_type = other DNA
gctaaaatttttacatcgtcta

SEQ ID NO: 5321 - DNA, 22 bp, synthetic construct
  misc_feature 1..22: note = chemically synthesized
  source 1..22: mol_type = other DNA
aaatttttacatcgtctaacat

SEQ ID NO: 5322 - DNA, 22 bp, synthetic construct
  misc_feature 1..22: note = chemically synthesized
  source 1..22: mol_type = other DNA
ttacatcgtctaacatagcaaa

SEQ ID NO: 5323 - DNA, 22 bp, synthetic construct
  misc_feature 1..22: note = chemically synthesized
  source 1..22: mol_type = other DNA
tacatcgtctaacatagcaaat

SEQ ID NO: 5324 - DNA, 22 bp, synthetic construct
  misc_feature 1..22: note = chemically synthesized
  source 1..22: mol_type = other DNA
acatcgtctaacatagcaaatc

SEQ ID NO: 5325 - DNA, 22 bp, synthetic construct
  misc_feature 1..22: note = chemically synthesized
  source 1..22: mol_type = other DNA
catcgtctaacatagcaaatct

SEQ ID NO: 5326 - DNA, 22 bp, synthetic construct
  misc_feature 1..22: note = chemically synthesized
  source 1..22: mol_type = other DNA
acatagcaaatcttgattttgg

SEQ ID NO: 5327 - DNA, 22 bp, synthetic construct
  misc_feature 1..22: note = chemically synthesized
  source 1..22: mol_type = other DNA
gattttggctctggagatagag

SEQ ID NO: 5328 - DNA, 22 bp, synthetic construct
  misc_feature 1..22: note = chemically synthesized
  source 1..22: mol_type = other DNA
attttggctctggagatagaga

SEQ ID NO: 5329 - DNA, 22 bp, synthetic construct
  misc_feature 1..22: note = chemically synthesized
  source 1..22: mol_type = other DNA
tggctctggagatagagaatca

SEQ ID NO: 5330 - DNA, 22 bp, synthetic construct
  misc_feature 1..22: note = chemically synthesized
  source 1..22: mol_type = other DNA
ggctctggagatagagaatcaa

SEQ ID NO: 5331 - DNA, 22 bp, synthetic construct
  misc_feature 1..22: note = chemically synthesized
  source 1..22: mol_type = other DNA
gctctggagatagagaatcaaa

SEQ ID NO: 5332 - DNA, 22 bp, synthetic construct
  misc_feature 1..22: note = chemically synthesized
  source 1..22: mol_type = other DNA
tggagatagagaatcaaatgat

SEQ ID NO: 5333 - DNA, 22 bp, synthetic construct
  misc_feature 1..22: note = chemically synthesized
  source 1..22: mol_type = other DNA
gagatagagaatcaaatgatga

SEQ ID NO: 5334 - DNA, 22 bp, synthetic construct
  misc_feature 1..22: note = chemically synthesized
  source 1..22: mol_type = other DNA
tcttgatcaattctggaggaaa

SEQ ID NO: 5335 - DNA, 22 bp, synthetic construct
  misc_feature 1..22: note = chemically synthesized
  source 1..22: mol_type = other DNA
gatcaattctggaggaaataac

SEQ ID NO: 5336 - DNA, 22 bp, synthetic construct
  misc_feature 1..22: note = chemically synthesized
  source 1..22: mol_type = other DNA
atcaattctggaggaaataact

SEQ ID NO: 5337 - DNA, 22 bp, synthetic construct
  misc_feature 1..22: note = chemically synthesized
  source 1..22: mol_type = other DNA
tggaggaaataactagaggaac

SEQ ID NO: 5338 - DNA, 22 bp, synthetic construct
  misc_feature 1..22: note = chemically synthesized
  source 1..22: mol_type = other DNA
gaggaaataactagaggaacaa

SEQ ID NO: 5339 - DNA, 22 bp, synthetic construct
  misc_feature 1..22: note = chemically synthesized
  source 1..22: mol_type = other DNA
gaggaacaataaaaagaaggag

SEQ ID NO: 5340 - DNA, 22 bp, synthetic construct
  misc_feature 1..22: note = chemically synthesized
  source 1..22: mol_type = other DNA
aattgtgaacatttttatcttg

SEQ ID NO: 5341 - DNA, 22 bp, synthetic construct
  misc_feature 1..22: note = chemically synthesized
  source 1..22: mol_type = other DNA
attgtgaacatttttatcttga

SEQ ID NO: 5342 - DNA, 22 bp, synthetic construct
  misc_feature 1..22: note = chemically synthesized
  source 1..22: mol_type = other DNA
tgaacatttttatcttgatttt

SEQ ID NO: 5343 - DNA, 22 bp, synthetic construct
  misc_feature 1..22: note = chemically synthesized
  source 1..22: mol_type = other DNA
ttatcttgattttcaatttcaa

SEQ ID NO: 5344 - DNA, 22 bp, synthetic construct
  misc_feature 1..22: note = chemically synthesized
  source 1..22: mol_type = other DNA
tatcttgattttcaatttcaag

SEQ ID NO: 5345 - DNA, 22 bp, synthetic construct
  misc_feature 1..22: note = chemically synthesized
  source 1..22: mol_type = other DNA
atcttgattttcaatttcaagc

SEQ ID NO: 5346 - DNA, 22 bp, synthetic construct
  misc_feature 1..22: note = chemically synthesized
  source 1..22: mol_type = other DNA
tcttgattttcaatttcaagca

SEQ ID NO: 5347 - DNA, 22 bp, synthetic construct
  misc_feature 1..22: note = chemically synthesized
  source 1..22: mol_type = other DNA
gattttcaatttcaagcaacgt

SEQ ID NO: 5348 - DNA, 22 bp, synthetic construct
  misc_feature 1..22: note = chemically synthesized
  source 1..22: mol_type = other DNA
attttcaatttcaagcaacgtg

SEQ ID NO: 5349 - DNA, 22 bp, synthetic construct
  misc_feature 1..22: note = chemically synthesized
  source 1..22: mol_type = other DNA
tcaatttcaagcaacgtggaac

SEQ ID NO: 5350 - DNA, 22 bp, synthetic construct
  misc_feature 1..22: note = chemically synthesized
  source 1..22: mol_type = other DNA
caatttcaagcaacgtggaact

SEQ ID NO: 5351 - DNA, 22 bp, synthetic construct
  misc_feature 1..22: note = chemically synthesized
  source 1..22: mol_type = other DNA
aatttcaagcaacgtggaactg

SEQ ID NO: 5352 - DNA, 22 bp, synthetic construct
  misc_feature 1..22: note = chemically synthesized
  source 1..22: mol_type = other DNA
caagcaacgtggaactgttttc

SEQ ID NO: 5353 - DNA, 22 bp, synthetic construct
  misc_feature 1..22: note = chemically synthesized
  source 1..22: mol_type = other DNA
aagcaacgtggaactgttttct

SEQ ID NO: 5354 - DNA, 22 bp, synthetic construct
  misc_feature 1..22: note = chemically synthesized
  source 1..22: mol_type = other DNA
ttttcttctggaagcagaccta

SEQ ID NO: 5355 - DNA, 22 bp, synthetic construct
  misc_feature 1..22: note = chemically synthesized
  source 1..22: mol_type = other DNA
tcttctggaagcagacctagac

SEQ ID NO: 5356 - DNA, 22 bp, synthetic construct
  misc_feature 1..22: note = chemically synthesized
  source 1..22: mol_type = other DNA
cttctggaagcagacctagact

SEQ ID NO: 5357 - DNA, 22 bp, synthetic construct
  misc_feature 1..22: note = chemically synthesized
  source 1..22: mol_type = other DNA
ttctggaagcagacctagactt

SEQ ID NO: 5358 - DNA, 22 bp, synthetic construct
  misc_feature 1..22: note = chemically synthesized
  source 1..22: mol_type = other DNA
ctggaagcagacctagacttct

SEQ ID NO: 5359 - DNA, 22 bp, synthetic construct
  misc_feature 1..22: note = chemically synthesized
  source 1..22: mol_type = other DNA
tggaagcagacctagacttctt

SEQ ID NO: 5360 - DNA, 22 bp, synthetic construct
  misc_feature 1..22: note = chemically synthesized
  source 1..22: mol_type = other DNA
gaagcagacctagacttcttaa

SEQ ID NO: 5361 - DNA, 22 bp, synthetic construct
  misc_feature 1..22: note = chemically synthesized
  source 1..22: mol_type = other DNA
gacttcttaactctatatatac

SEQ ID NO: 5362 - DNA, 22 bp, synthetic construct
  misc_feature 1..22: note = chemically synthesized
  source 1..22: mol_type = other DNA
cttaactctatatataccaata

SEQ ID NO: 5363 - DNA, 22 bp, synthetic construct
  misc_feature 1..22: note = chemically synthesized
  source 1..22: mol_type = other DNA
ttaactctatatataccaatat

SEQ ID NO: 5364 - DNA, 22 bp, synthetic construct
  misc_feature 1..22: note = chemically synthesized
  source 1..22: mol_type = other DNA
aactctatatataccaatattt

SEQ ID NO: 5365 - DNA, 22 bp, synthetic construct
  misc_feature 1..22: note = chemically synthesized
  source 1..22: mol_type = other DNA
actctatatataccaatatttg

SEQ ID NO: 5366 - DNA, 22 bp, synthetic construct
  misc_feature 1..22: note = chemically synthesized
  source 1..22: mol_type = other DNA
tatatataccaatatttgccca

SEQ ID NO: 5367 - DNA, 22 bp, synthetic construct
  misc_feature 1..22: note = chemically synthesized
  source 1..22: mol_type = other DNA
tatataccaatatttgcccaga

SEQ ID NO: 5368 - DNA, 22 bp, synthetic construct
  misc_feature 1..22: note = chemically synthesized
  source 1..22: mol_type = other DNA
gcccagaaaaggtaaggttggt

SEQ ID NO: 5369 - DNA, 22 bp, synthetic construct
  misc_feature 1..22: note = chemically synthesized
  source 1..22: mol_type = other DNA
cccagaaaaggtaaggttggta

SEQ ID NO: 5370 - DNA, 22 bp, synthetic construct
  misc_feature 1..22: note = chemically synthesized
  source 1..22: mol_type = other DNA
gtaggtgaacatagttaatcat

SEQ ID NO: 5371 - DNA, 22 bp, synthetic construct
  misc_feature 1..22: note = chemically synthesized
  source 1..22: mol_type = other DNA
atcattaagccgtgttaacttg

SEQ ID NO: 5372 - DNA, 22 bp, synthetic construct
  misc_feature 1..22: note = chemically synthesized
  source 1..22: mol_type = other DNA
agccgtgttaacttgcacgaat

SEQ ID NO: 5373 - DNA, 22 bp, synthetic construct
  misc_feature 1..22: note = chemically synthesized
  source 1..22: mol_type = other DNA
acttgcacgaatgtaaccttct

SEQ ID NO: 5374 - DNA, 22 bp, synthetic construct
  misc_feature 1..22: note = chemically synthesized
  source 1..22: mol_type = other DNA
gcacgaatgtaaccttcttcca

SEQ ID NO: 5375 - DNA, 22 bp, synthetic construct
  misc_feature 1..22: note = chemically synthesized
  source 1..22: mol_type = other DNA
cacgaatgtaaccttcttccac

SEQ ID NO: 5376 - DNA, 22 bp, synthetic construct
  misc_feature 1..22: note = chemically synthesized
  source 1..22: mol_type = other DNA
cttccacattgagttagatcaa

SEQ ID NO: 5377 - DNA, 22 bp, synthetic construct
  misc_feature 1..22: note = chemically synthesized
  source 1..22: mol_type = other DNA
ttccacattgagttagatcaat

SEQ ID NO: 5378 - DNA, 22 bp, synthetic construct
  misc_feature 1..22: note = chemically synthesized
  source 1..22: mol_type = other DNA
ccacattgagttagatcaatgc

SEQ ID NO: 5379 - DNA, 22 bp, synthetic construct
  misc_feature 1..22: note = chemically synthesized
  source 1..22: mol_type = other DNA
cacattgagttagatcaatgct

SEQ ID NO: 5380 - DNA, 22 bp, synthetic construct
  misc_feature 1..22: note = chemically synthesized
  source 1..22: mol_type = other DNA
agttagatcaatgctaaatgaa

SEQ ID NO: 5381 - DNA, 22 bp, synthetic construct
  misc_feature 1..22: note = chemically synthesized
  source 1..22: mol_type = other DNA
gatcaatgctaaatgaaatcaa

SEQ ID NO: 5382 - DNA, 22 bp, synthetic construct
  misc_feature 1..22: note = chemically synthesized
  source 1..22: mol_type = other DNA
aatgaaatcaaagaaatgagca

SEQ ID NO: 5383 - DNA, 22 bp, synthetic construct
  misc_feature 1..22: note = chemically synthesized
  source 1..22: mol_type = other DNA
acttaataggtaatttgaaatt

SEQ ID NO: 5384 - DNA, 22 bp, synthetic construct
  misc_feature 1..22: note = chemically synthesized
  source 1..22: mol_type = other DNA
aataggtaatttgaaattgtat

SEQ ID NO: 5385 - DNA, 22 bp, synthetic construct
  misc_feature 1..22: note = chemically synthesized
  source 1..22: mol_type = other DNA
ataggtaatttgaaattgtatt

SEQ ID NO: 5386 - DNA, 22 bp, synthetic construct
  misc_feature 1..22: note = chemically synthesized
  source 1..22: mol_type = other DNA
gaaattgtatttaactttgctg

SEQ ID NO: 5387 - DNA, 22 bp, synthetic construct
  misc_feature 1..22: note = chemically synthesized
  source 1..22: mol_type = other DNA
aaattgtatttaactttgctgt

SEQ ID NO: 5388 - DNA, 22 bp, synthetic construct
  misc_feature 1..22: note = chemically synthesized
  source 1..22: mol_type = other DNA
tatttaactttgctgtattata

SEQ ID NO: 5389 - DNA, 22 bp, synthetic construct
  misc_feature 1..22: note = chemically synthesized
  source 1..22: mol_type = other DNA
aactttgctgtattataaacta

SEQ ID NO: 5390 - DNA, 22 bp, synthetic construct
  misc_feature 1..22: note = chemically synthesized
  source 1..22: mol_type = other DNA
actttgctgtattataaactac

SEQ ID NO: 5391 - DNA, 22 bp, synthetic construct
  misc_feature 1..22: note = chemically synthesized
  source 1..22: mol_type = other DNA
tgctgtattataaactacacat

SEQ ID NO: 5392 - DNA, 22 bp, synthetic construct
  misc_feature 1..22: note = chemically synthesized
  source 1..22: mol_type = other DNA
gctgtattataaactacacatt

SEQ ID NO: 5393 - DNA, 22 bp, synthetic construct
  misc_feature 1..22: note = chemically synthesized
  source 1..22: mol_type = other DNA
ctgtattataaactacacattc

SEQ ID NO: 5394 - DNA, 22 bp, synthetic construct
  misc_feature 1..22: note = chemically synthesized
  source 1..22: mol_type = other DNA
tattataaactacacattcaat

SEQ ID NO: 5395 - DNA, 22 bp, synthetic construct
  misc_feature 1..22: note = chemically synthesized
  source 1..22: mol_type = other DNA
taaactacacattcaatgctat

SEQ ID NO: 5396 - DNA, 22 bp, synthetic construct
  misc_feature 1..22: note = chemically synthesized
  source 1..22: mol_type = other DNA
cacattcaatgctatggtgact

SEQ ID NO: 5397 - DNA, 22 bp, synthetic construct
  misc_feature 1..22: note = chemically synthesized
  source 1..22: mol_type = other DNA
aatgctatggtgactacctgtt

SEQ ID NO: 5398 - DNA, 22 bp, synthetic construct
  misc_feature 1..22: note = chemically synthesized
  source 1..22: mol_type = other DNA
tggtgactacctgtttttaaaa

SEQ ID NO: 5399 - DNA, 22 bp, synthetic construct
  misc_feature 1..22: note = chemically synthesized
  source 1..22: mol_type = other DNA
cctgtttttaaaagctaatttt

SEQ ID NO: 5400 - DNA, 22 bp, synthetic construct
  misc_feature 1..22: note = chemically synthesized
  source 1..22: mol_type = other DNA
tttttaaaagctaattttactt

SEQ ID NO: 5401 - DNA, 22 bp, synthetic construct
  misc_feature 1..22: note = chemically synthesized
  source 1..22: mol_type = other DNA
ttaaaagctaattttacttttt

SEQ ID NO: 5402 - DNA, 22 bp, synthetic construct
  misc_feature 1..22: note = chemically synthesized
  source 1..22: mol_type = other DNA
taaaagctaattttactttttt

SEQ ID NO: 5403 - DNA, 22 bp, synthetic construct
  misc_feature 1..22: note = chemically synthesized
  source 1..22: mol_type = other DNA
aaaagctaattttactttttta

SEQ ID NO: 5404 - DNA, 22 bp, synthetic construct
  misc_feature 1..22: note = chemically synthesized
  source 1..22: mol_type = other DNA
aaagctaattttacttttttat

SEQ ID NO: 5405 - DNA, 22 bp, synthetic construct
  misc_feature 1..22: note = chemically synthesized
  source 1..22: mol_type = other DNA
attttacttttttatgatttta

SEQ ID NO: 5406 - DNA, 22 bp, synthetic construct
  misc_feature 1..22: note = chemically synthesized
  source 1..22: mol_type = other DNA
tacttttttatgattttaagag

SEQ ID NO: 5407 - DNA, 22 bp, synthetic construct
  misc_feature 1..22: note = chemically synthesized
  source 1..22: mol_type = other DNA
acttttttatgattttaagaga

SEQ ID NO: 5408 - DNA, 22 bp, synthetic construct
  misc_feature 1..22: note = chemically synthesized
  source 1..22: mol_type = other DNA
cttttttatgattttaagagat

SEQ ID NO: 5409 - DNA, 22 bp, synthetic construct
  misc_feature 1..22: note = chemically synthesized
  source 1..22: mol_type = other DNA
ttttatgattttaagagattta

SEQ ID NO: 5410 - DNA, 22 bp, synthetic construct
  misc_feature 1..22: note = chemically synthesized
  source 1..22: mol_type = other DNA
tttatgattttaagagatttac

SEQ ID NO: 5411 - DNA, 22 bp, synthetic construct
  misc_feature 1..22: note = chemically synthesized
  source 1..22: mol_type = other DNA
ttatgattttaagagatttaca

SEQ ID NO: 5412 - DNA, 22 bp, synthetic construct
  misc_feature 1..22: note = chemically synthesized
  source 1..22: mol_type = other DNA
tatgattttaagagatttacaa

SEQ ID NO: 5413 - DNA, 22 bp, synthetic construct
  misc_feature 1..22: note = chemically synthesized
  source 1..22: mol_type = other DNA
atgattttaagagatttacaag

SEQ ID NO: 5414 - DNA, 22 bp, synthetic construct
  misc_feature 1..22: note = chemically synthesized
  source 1..22: mol_type = other DNA
tgattttaagagatttacaagt

SEQ ID NO: 5415 - DNA, 22 bp, synthetic construct
  misc_feature 1..22: note = chemically synthesized
  source 1..22: mol_type = other DNA
taagagatttacaagtcaaaaa

SEQ ID NO: 5416 - DNA, 22 bp, synthetic construct
  misc_feature 1..22: note = chemically synthesized
  source 1..22: mol_type = other DNA
aagagatttacaagtcaaaaat

SEQ ID NO: 5417 - DNA, 22 bp, synthetic construct
  misc_feature 1..22: note = chemically synthesized
  source 1..22: mol_type = other DNA
agagatttacaagtcaaaaata

SEQ ID NO: 5418 - DNA, 22 bp, synthetic construct
  misc_feature 1..22: note = chemically synthesized
  source 1..22: mol_type = other DNA
acaagtcaaaaataaacttttt

SEQ ID NO: 5419 - DNA, 22 bp, synthetic construct
  misc_feature 1..22: note = chemically synthesized
  source 1..22: mol_type = other DNA
caagtcaaaaataaactttttt

SEQ ID NO: 5420 - DNA, 22 bp, synthetic construct
  misc_feature 1..22: note = chemically synthesized
  source 1..22: mol_type = other DNA
ttttgttgggtaaatttattat

SEQ ID NO: 5421 - DNA, 22 bp, synthetic construct
  misc_feature 1..22: note = chemically synthesized
  source 1..22: mol_type = other DNA
tttgttgggtaaatttattatt

SEQ ID NO: 5422 - DNA, 22 bp, synthetic construct
  misc_feature 1..22: note = chemically synthesized
  source 1..22: mol_type = other DNA
ttgttgggtaaatttattatta

SEQ ID NO: 5423 - DNA, 22 bp, synthetic construct
  misc_feature 1..22: note = chemically synthesized
  source 1..22: mol_type = other DNA
tgttgggtaaatttattattaa

SEQ ID NO: 5424 - DNA, 22 bp, synthetic construct
  misc_feature 1..22: note = chemically synthesized
  source 1..22: mol_type = other DNA
gttgggtaaatttattattaaa

SEQ ID NO: 5425 - DNA, 22 bp, synthetic construct
  misc_feature 1..22: note = chemically synthesized
  source 1..22: mol_type = other DNA
ttgggtaaatttattattaaag

SEQ ID NO: 5426 - DNA, 22 bp, synthetic construct
  misc_feature 1..22: note = chemically synthesized
  source 1..22: mol_type = other DNA
ggtaaatttattattaaagttg

SEQ ID NO: 5427 - DNA, 22 bp, synthetic construct
  misc_feature 1..22: note = chemically synthesized
  source 1..22: mol_type = other DNA
attattaaagttgaggggaaaa

SEQ ID NO: 5428 - DNA, 22 bp, synthetic construct
  misc_feature 1..22: note = chemically synthesized
  source 1..22: mol_type = other DNA
ttattaaagttgaggggaaaaa

SEQ ID NO: 5429 - DNA, 22 bp, synthetic construct
  misc_feature 1..22: note = chemically synthesized
  source 1..22: mol_type = other DNA
ttaaagttgaggggaaaaaagt

SEQ ID NO: 5430 - DNA, 22 bp, synthetic construct
  misc_feature 1..22: note = chemically synthesized
  source 1..22: mol_type = other DNA
aagttgaggggaaaaaagtaat

SEQ ID NO: 5431 - DNA, 22 bp, synthetic construct
  misc_feature 1..22: note = chemically synthesized
  source 1..22: mol_type = other DNA
aggggaaaaaagtaatgaatta

SEQ ID NO: 5432 - DNA, 20 bp, synthetic construct
  misc_feature 1..20: note = chemically synthesized
  source 1..20: mol_type = other DNA
tcccgcccgcttgctgcatc

SEQ ID NO: 5433 - DNA, 20 bp, synthetic construct
  misc_feature 1..20: note = chemically synthesized
  source 1..20: mol_type = other DNA
tgcatctggacaccctgcct

SEQ ID NO: 5434 - DNA, 20 bp, synthetic construct
  misc_feature 1..20: note = chemically synthesized
  source 1..20: mol_type = other DNA
gcatctggacaccctgcctc

SEQ ID NO: 5435 - DNA, 20 bp, synthetic construct
  misc_feature 1..20: note = chemically synthesized
  source 1..20: mol_type = other DNA
cctcaggccctcatctccac

SEQ ID NO: 5436 - DNA, 20 bp, synthetic construct
  misc_feature 1..20: note = chemically synthesized
  source 1..20: mol_type = other DNA
aggccctcatctccactggt

SEQ ID NO: 5437 - DNA, 20 bp, synthetic construct
  misc_feature 1..20: note = chemically synthesized
  source 1..20: mol_type = other DNA
ccctcatctccactggtcag

SEQ ID NO: 5438 - DNA, 20 bp, synthetic construct
  misc_feature 1..20: note = chemically synthesized
  source 1..20: mol_type = other DNA
cctcatctccactggtcagc

SEQ ID NO: 5439 - DNA, 20 bp, synthetic construct
  misc_feature 1..20: note = chemically synthesized
  source 1..20: mol_type = other DNA
gtcagcaggtgacctttgcc

SEQ ID NO: 5440 - DNA, 20 bp, synthetic construct
  misc_feature 1..20: note = chemically synthesized
  source 1..20: mol_type = other DNA
gtgacctttgcccagcgccc

SEQ ID NO: 5441 - DNA, 20 bp, synthetic construct
  misc_feature 1..20: note = chemically synthesized
  source 1..20: mol_type = other DNA
tgacctttgcccagcgccct

SEQ ID NO: 5442 - DNA, 20 bp, synthetic construct
  misc_feature 1..20: note = chemically synthesized
  source 1..20: mol_type = other DNA
tgcccagcgccctgggtcct

SEQ ID NO: 5443 - DNA, 20 bp, synthetic construct
  misc_feature 1..20: note = chemically synthesized
  source 1..20: mol_type = other DNA
gtcctcagtgcctgctgccc

SEQ ID NO: 5444 - DNA, 20 bp, synthetic construct
  misc_feature 1..20: note = chemically synthesized
  source 1..20: mol_type = other DNA
cctcagtgcctgctgccctg

SEQ ID NO: 5445 - DNA, 20 bp, synthetic construct
  misc_feature 1..20: note = chemically synthesized
  source 1..20: mol_type = other DNA
gccctggagatgatataaaa

SEQ ID NO: 5446 - DNA, 20 bp, synthetic construct
  misc_feature 1..20: note = chemically synthesized
  source 1..20: mol_type = other DNA
ccctggagatgatataaaac

SEQ ID NO: 5447 - DNA, 20 bp, synthetic construct
  misc_feature 1..20: note = chemically synthesized
  source 1..20: mol_type = other DNA
ggagatgatataaaacaggt

SEQ ID NO: 5448 - DNA, 20 bp, synthetic construct
  misc_feature 1..20: note = chemically synthesized
  source 1..20: mol_type = other DNA
aaccctcctgcctgtctgct

SEQ ID NO: 5449 - DNA, 20 bp, synthetic construct
  misc_feature 1..20: note = chemically synthesized
  source 1..20: mol_type = other DNA
ctgtctgctcagttcatccc

SEQ ID NO: 5450 - DNA, 20 bp, synthetic construct
  misc_feature 1..20: note = chemically synthesized
  source 1..20: mol_type = other DNA
gtctgctcagttcatcccta

SEQ ID NO: 5451 - DNA, 20 bp, synthetic construct
  misc_feature 1..20: note = chemically synthesized
  source 1..20: mol_type = other DNA
tctgctcagttcatccctag

SEQ ID NO: 5452 - DNA, 20 bp, synthetic construct
  misc_feature 1..20: note = chemically synthesized
  source 1..20: mol_type = other DNA
gctcagttcatccctagagg

SEQ ID NO: 5453 - DNA, 20 bp, synthetic construct
  misc_feature 1..20: note = chemically synthesized
  source 1..20: mol_type = other DNA
atccctagaggcagctgctc

SEQ ID NO: 5454 - DNA, 20 bp, synthetic construct
  misc_feature 1..20: note = chemically synthesized
  source 1..20: mol_type = other DNA
tccctagaggcagctgctcc

SEQ ID NO: 5455 - DNA, 20 bp, synthetic construct
  misc_feature 1..20: note = chemically synthesized
  source 1..20: mol_type = other DNA
ctgctccaggtaatgccctc

SEQ ID NO: 5456 - DNA, 20 bp, synthetic construct
  misc_feature 1..20: note = chemically synthesized
  source 1..20: mol_type = other DNA
tgctccaggtaatgccctct

SEQ ID NO: 5457 - DNA, 20 bp, synthetic construct
  misc_feature 1..20: note = chemically synthesized
  source 1..20: mol_type = other DNA
gctccaggtaatgccctctg

SEQ ID NO: 5458 - DNA, 20 bp, synthetic construct
  misc_feature 1..20: note = chemically synthesized
  source 1..20: mol_type = other DNA
tccaggtaatgccctctggg

SEQ ID NO: 5459 - DNA, 20 bp, synthetic construct
  misc_feature 1..20: note = chemically synthesized
  source 1..20: mol_type = other DNA
ccaggtaatgccctctgggg

SEQ ID NO: 5460 - DNA, 20 bp, synthetic construct
  misc_feature 1..20: note = chemically synthesized
  source 1..20: mol_type = other DNA
caggtaatgccctctgggga

SEQ ID NO: 5461 - DNA, 20 bp, synthetic construct
  misc_feature 1..20: note = chemically synthesized
  source 1..20: mol_type = other DNA
aggtaatgccctctggggag

SEQ ID NO: 5462 - DNA, 20 bp, synthetic construct
  misc_feature 1..20: note = chemically synthesized
  source 1..20: mol_type = other DNA
aatgccctctggggagggga

SEQ ID NO: 5463 - DNA, 20 bp, synthetic construct
  misc_feature 1..20: note = chemically synthesized
  source 1..20: mol_type = other DNA
tgccctctggggaggggaaa

SEQ ID NO: 5464 - DNA, 20 bp, synthetic construct
  misc_feature 1..20: note = chemically synthesized
  source 1..20: mol_type = other DNA
gccctctggggaggggaaag

SEQ ID NO: 5465 - DNA, 20 bp, synthetic construct
  misc_feature 1..20: note = chemically synthesized
  source 1..20: mol_type = other DNA
cctctggggaggggaaagag

SEQ ID NO: 5466 - DNA, 20 bp, synthetic construct
  misc_feature 1..20: note = chemically synthesized
  source 1..20: mol_type = other DNA
ctctggggaggggaaagagg

SEQ ID NO: 5467 - DNA, 20 bp, synthetic construct
  misc_feature 1..20: note = chemically synthesized
  source 1..20: mol_type = other DNA
tctggggaggggaaagagga

SEQ ID NO: 5468 - DNA, 20 bp, synthetic construct
  misc_feature 1..20: note = chemically synthesized
  source 1..20: mol_type = other DNA
ctggggaggggaaagaggag

SEQ ID NO: 5469 - DNA, 20 bp, synthetic construct
  misc_feature 1..20: note = chemically synthesized
  source 1..20: mol_type = other DNA
ggggaggggaaagaggaggg

SEQ ID NO: 5470 - DNA, 20 bp, synthetic construct
  misc_feature 1..20: note = chemically synthesized
  source 1..20: mol_type = other DNA
gggaggggaaagaggagggg

SEQ ID NO: 5471 - DNA, 20 bp, synthetic construct
  misc_feature 1..20: note = chemically synthesized
  source 1..20: mol_type = other DNA
gaggggaaagaggaggggag

SEQ ID NO: 5472 - DNA, 20 bp, synthetic construct
  misc_feature 1..20: note = chemically synthesized
  source 1..20: mol_type = other DNA
aggggaaagaggaggggagg

SEQ ID NO: 5473 - DNA, 20 bp, synthetic construct
  misc_feature 1..20: note = chemically synthesized
  source 1..20: mol_type = other DNA
aagaggaggggaggaggatg

SEQ ID NO: 5474 - DNA, 20 bp, synthetic construct
  misc_feature 1..20: note = chemically synthesized
  source 1..20: mol_type = other DNA
gaggaggggaggaggatgaa

SEQ ID NO: 5475 - DNA, 20 bp, synthetic construct
  misc_feature 1..20: note = chemically synthesized
  source 1..20: mol_type = other DNA
aggaggggaggaggatgaag

SEQ ID NO: 5476 - DNA, 20 bp, synthetic construct
  misc_feature 1..20: note = chemically synthesized
  source 1..20: mol_type = other DNA
ggaggggaggaggatgaaga

SEQ ID NO: 5477 - DNA, 20 bp, synthetic construct
  misc_feature 1..20: note = chemically synthesized
  source 1..20: mol_type = other DNA
gaggggaggaggatgaagag

SEQ ID NO: 5478 - DNA, 20 bp, synthetic construct
  misc_feature 1..20: note = chemically synthesized
  source 1..20: mol_type = other DNA
ggaggaggatgaagaggggc

SEQ ID NO: 5479 - DNA, 20 bp, synthetic construct
  misc_feature 1..20: note = chemically synthesized
  source 1..20: mol_type = other DNA
aggaggatgaagaggggcaa

SEQ ID NO: 5480 - DNA, 20 bp, synthetic construct
  misc_feature 1..20: note = chemically synthesized
  source 1..20: mol_type = other DNA
ggaggatgaagaggggcaag

SEQ ID NO: 5481 - DNA, 20 bp, synthetic construct
  misc_feature 1..20: note = chemically synthesized
  source 1..20: mol_type = other DNA
aggatgaagaggggcaagag

SEQ ID NO: 5482 - DNA, 20 bp, synthetic construct
  misc_feature 1..20: note = chemically synthesized
  source 1..20: mol_type = other DNA
ggcaagaggagctccctgcc

SEQ ID NO: 5483 - DNA, 20 bp, synthetic construct
  misc_feature 1..20: note = chemically synthesized
  source 1..20: mol_type = other DNA
gaggagctccctgcccagcc

SEQ ID NO: 5484 - DNA, 20 bp, synthetic construct
  misc_feature 1..20: note = chemically synthesized
  source 1..20: mol_type = other DNA
agctccctgcccagcccagc

SEQ ID NO: 5485 - DNA, 20 bp, synthetic construct
  misc_feature 1..20: note = chemically synthesized
  source 1..20: mol_type = other DNA
ccctgcccagcccagccagc

SEQ ID NO: 5486 - DNA, 20 bp, synthetic construct
  misc_feature 1..20: note = chemically synthesized
  source 1..20: mol_type = other DNA
cccagcccagccagcaagcc

SEQ ID NO: 5487 - DNA, 20 bp, synthetic construct
  misc_feature 1..20: note = chemically synthesized
  source 1..20: mol_type = other DNA
cagcccagccagcaagcctg

SEQ ID NO: 5488 - DNA, 20 bp, synthetic construct
  misc_feature 1..20: note = chemically synthesized
  source 1..20: mol_type = other DNA
cccagccagcaagcctggag

SEQ ID NO: 5489 - DNA, 20 bp, synthetic construct
  misc_feature 1..20: note = chemically synthesized
  source 1..20: mol_type = other DNA
aagcctggagaagcacttgc

SEQ ID NO: 5490 - DNA, 20 bp, synthetic construct
  misc_feature 1..20: note = chemically synthesized
  source 1..20: mol_type = other DNA
gcctggagaagcacttgcta

SEQ ID NO: 5491 - DNA, 20 bp, synthetic construct
  misc_feature 1..20: note = chemically synthesized
  source 1..20: mol_type = other DNA
gagaagcacttgctagagct

SEQ ID NO: 5492 - DNA, 20 bp, synthetic construct
  misc_feature 1..20: note = chemically synthesized
  source 1..20: mol_type = other DNA
agaagcacttgctagagcta

SEQ ID NO: 5493 - DNA, 20 bp, synthetic construct
  misc_feature 1..20: note = chemically synthesized
  source 1..20: mol_type = other DNA
agcacttgctagagctaagg

SEQ ID NO: 5494 - DNA, 20 bp, synthetic construct
  misc_feature 1..20: note = chemically synthesized
  source 1..20: mol_type = other DNA
tgctagagctaaggaagcct

SEQ ID NO: 5495 - DNA, 20 bp, synthetic construct
  misc_feature 1..20: note = chemically synthesized
  source 1..20: mol_type = other DNA
ctagagctaaggaagcctcg

SEQ ID NO: 5496 - DNA, 20 bp, synthetic construct
  misc_feature 1..20: note = chemically synthesized
  source 1..20: mol_type = other DNA
agctaaggaagcctcggagc

SEQ ID NO: 5497 - DNA, 20 bp, synthetic construct
  misc_feature 1..20: note = chemically synthesized
  source 1..20: mol_type = other DNA
aaggaagcctcggagctgga

SEQ ID NO: 5498 - DNA, 20 bp, synthetic construct
  misc_feature 1..20: note = chemically synthesized
  source 1..20: mol_type = other DNA
aggaagcctcggagctggac

SEQ ID NO: 5499 - DNA, 20 bp, synthetic construct
  misc_feature 1..20: note = chemically synthesized
  source 1..20: mol_type = other DNA
ccacccctcatcataacctg

SEQ ID NO: 5500 - DNA, 20 bp, synthetic construct
  misc_feature 1..20: note = chemically synthesized
  source 1..20: mol_type = other DNA
tcatcataacctgaagaaca

SEQ ID NO: 5501 - DNA, 20 bp, synthetic construct
  misc_feature 1..20: note = chemically synthesized
  source 1..20: mol_type = other DNA
atcataacctgaagaacatg

SEQ ID NO: 5502 - DNA, 20 bp, synthetic construct
  misc_feature 1..20: note = chemically synthesized
  source 1..20: mol_type = other DNA
tcataacctgaagaacatgg

SEQ ID NO: 5503 - DNA, 20 bp, synthetic construct
  misc_feature 1..20: note = chemically synthesized
  source 1..20: mol_type = other DNA
acctgaagaacatggaggcc

SEQ ID NO: 5504 - DNA, 20 bp, synthetic construct
  misc_feature 1..20: note = chemically synthesized
  source 1..20: mol_type = other DNA
cctgaagaacatggaggccc

SEQ ID NO: 5505 - DNA, 20 bp, synthetic construct
  misc_feature 1..20: note = chemically synthesized
  source 1..20: mol_type = other DNA
tgaagaacatggaggcccgg

SEQ ID NO: 5506 - DNA, 20 bp, synthetic construct
  misc_feature 1..20: note = chemically synthesized
  source 1..20: mol_type = other DNA
gaagaacatggaggcccggg

SEQ ID NO: 5507 - DNA, 20 bp, synthetic construct
  misc_feature 1..20: note = chemically synthesized
  source 1..20: mol_type = other DNA
aagaacatggaggcccggga

SEQ ID NO: 5508 - DNA, 20 bp, synthetic construct
  misc_feature 1..20: note = chemically synthesized
  source 1..20: mol_type = other DNA
agaacatggaggcccgggag

SEQ ID NO: 5509 - DNA, 20 bp, synthetic construct
  misc_feature 1..20: note = chemically synthesized
  source 1..20: mol_type = other DNA
ggaggggtgtcacttgccca

SEQ ID NO: 5510 - DNA, 20 bp, synthetic construct
  misc_feature 1..20: note = chemically synthesized
  source 1..20: mol_type = other DNA
gtcacttgcccaaagctaca

SEQ ID NO: 5511 - DNA, 20 bp, synthetic construct
  misc_feature 1..20: note = chemically synthesized
  source 1..20: mol_type = other DNA
tcacttgcccaaagctacac

SEQ ID NO: 5512 - DNA, 20 bp, synthetic construct
  misc_feature 1..20: note = chemically synthesized
  source 1..20: mol_type = other DNA
cacttgcccaaagctacaca

SEQ ID NO: 5513 - DNA, 20 bp, synthetic construct
  misc_feature 1..20: note = chemically synthesized
  source 1..20: mol_type = other DNA
acttgcccaaagctacacag

SEQ ID NO: 5514 - DNA, 20 bp, synthetic construct
  misc_feature 1..20: note = chemically synthesized
  source 1..20: mol_type = other DNA
cttgcccaaagctacacagg

SEQ ID NO: 5515 - DNA, 20 bp, synthetic construct
  misc_feature 1..20: note = chemically synthesized
  source 1..20: mol_type = other DNA
gcccaaagctacacaggggg

SEQ ID NO: 5516 - DNA, 20 bp, synthetic construct
  misc_feature 1..20: note = chemically synthesized
  source 1..20: mol_type = other DNA
cccaaagctacacagggggt

SEQ ID NO: 5517 - DNA, 20 bp, synthetic construct
  misc_feature 1..20: note = chemically synthesized
  source 1..20: mol_type = other DNA
ccaaagctacacagggggtg

SEQ ID NO: 5518 - DNA, 20 bp, synthetic construct
  misc_feature 1..20: note = chemically synthesized
  source 1..20: mol_type = other DNA
agctacacagggggtggggc

SEQ ID NO: 5519 - DNA, 20 bp, synthetic construct
  misc_feature 1..20: note = chemically synthesized
  source 1..20: mol_type = other DNA
tacacagggggtggggctgg

SEQ ID NO: 5520 - DNA, 20 bp, synthetic construct
  misc_feature 1..20: note = chemically synthesized
  source 1..20: mol_type = other DNA
acagggggtggggctggaag

SEQ ID NO: 5521 - DNA, 20 bp, synthetic construct
  misc_feature 1..20: note = chemically synthesized
  source 1..20: mol_type = other DNA
gtggggctggaagtggctcc

SEQ ID NO: 5522 - DNA, 20 bp, synthetic construct
  misc_feature 1..20: note = chemically synthesized
  source 1..20: mol_type = other DNA
gctggaagtggctccaagtg

SEQ ID NO: 5523 - DNA, 20 bp, synthetic construct
  misc_feature 1..20: note = chemically synthesized
  source 1..20: mol_type = other DNA
ctggaagtggctccaagtgc

SEQ ID NO: 5524 - DNA, 20 bp, synthetic construct
  misc_feature 1..20: note = chemically synthesized
  source 1..20: mol_type = other DNA
caggttcccccctcattctt

SEQ ID NO: 5525 - DNA, 20 bp, synthetic construct
  misc_feature 1..20: note = chemically synthesized
  source 1..20: mol_type = other DNA
aggttcccccctcattcttc

SEQ ID NO: 5526 - DNA, 20 bp, synthetic construct
  misc_feature 1..20: note = chemically synthesized
  source 1..20: mol_type = other DNA
cccccctcattcttcaggct

SEQ ID NO: 5527 - DNA, 20 bp, synthetic construct
  misc_feature 1..20: note = chemically synthesized
  source 1..20: mol_type = other DNA
ccccctcattcttcaggctt

SEQ ID NO: 5528 - DNA, 20 bp, synthetic construct
  misc_feature 1..20: note = chemically synthesized
  source 1..20: mol_type = other DNA
cccctcattcttcaggctta

SEQ ID NO: 5529 - DNA, 20 bp, synthetic construct
  misc_feature 1..20: note = chemically synthesized
  source 1..20: mol_type = other DNA
tcattcttcaggcttagggc

SEQ ID NO: 5530 - DNA, 20 bp, synthetic construct
  misc_feature 1..20: note = chemically synthesized
  source 1..20: mol_type = other DNA
attcttcaggcttagggctg

SEQ ID NO: 5531 - DNA, 20 bp, synthetic construct
  misc_feature 1..20: note = chemically synthesized
  source 1..20: mol_type = other DNA
ttcttcaggcttagggctgg

SEQ ID NO: 5532 - DNA, 20 bp, synthetic construct
  misc_feature 1..20: note = chemically synthesized
  source 1..20: mol_type = other DNA
ttcaggcttagggctggagg

SEQ ID NO: 5533 - DNA, 20 bp, synthetic construct
  misc_feature 1..20: note = chemically synthesized
  source 1..20: mol_type = other DNA
cttagggctggaggaagcct

SEQ ID NO: 5534 - DNA, 20 bp, synthetic construct
  misc_feature 1..20: note = chemically synthesized
  source 1..20: mol_type = other DNA
gggctggaggaagccttaga

SEQ ID NO: 5535 - DNA, 20 bp, synthetic construct
  misc_feature 1..20: note = chemically synthesized
  source 1..20: mol_type = other DNA
ggaggaagccttagacagcc

SEQ ID NO: 5536 - DNA, 20 bp, synthetic construct
  misc_feature 1..20: note = chemically synthesized
  source 1..20: mol_type = other DNA
tagacagcccagtcctaccc

SEQ ID NO: 5537 - DNA, 20 bp, synthetic construct
  misc_feature 1..20: note = chemically synthesized
  source 1..20: mol_type = other DNA
cagcccagtcctaccccaga

SEQ ID NO: 5538 - DNA, 20 bp, synthetic construct
  misc_feature 1..20: note = chemically synthesized
  source 1..20: mol_type = other DNA
agcccagtcctaccccagac

SEQ ID NO: 5539 - DNA, 20 bp, synthetic construct
  misc_feature 1..20: note = chemically synthesized
  source 1..20: mol_type = other DNA
gcccagtcctaccccagaca

SEQ ID NO: 5540 - DNA, 20 bp, synthetic construct
  misc_feature 1..20: note = chemically synthesized
  source 1..20: mol_type = other DNA
ctaccccagacagggaaact

SEQ ID NO: 5541 - DNA, 20 bp, synthetic construct
  misc_feature 1..20: note = chemically synthesized
  source 1..20: mol_type = other DNA
taccccagacagggaaactg

SEQ ID NO: 5542 - DNA, 20 bp, synthetic construct
  misc_feature 1..20: note = chemically synthesized
  source 1..20: mol_type = other DNA
cagacagggaaactgaggcc

SEQ ID NO: 5543 - DNA, 20 bp, synthetic construct
  misc_feature 1..20: note = chemically synthesized
  source 1..20: mol_type = other DNA
gacagggaaactgaggcctg

SEQ ID NO: 5544 - DNA, 20 bp, synthetic construct
  misc_feature 1..20: note = chemically synthesized
  source 1..20: mol_type = other DNA
cagggaaactgaggcctgga

SEQ ID NO: 5545 - DNA, 20 bp, synthetic construct
  misc_feature 1..20: note = chemically synthesized
  source 1..20: mol_type = other DNA
agggaaactgaggcctggag

SEQ ID NO: 5546 - DNA, 20 bp, synthetic construct
  misc_feature 1..20: note = chemically synthesized
  source 1..20: mol_type = other DNA
gggaaactgaggcctggaga

SEQ ID NO: 5547 - DNA, 20 bp, synthetic construct
  misc_feature 1..20: note = chemically synthesized
  source 1..20: mol_type = other DNA
aactgaggcctggagagggc

SEQ ID NO: 5548 - DNA, 20 bp, synthetic construct
  misc_feature 1..20: note = chemically synthesized
  source 1..20: mol_type = other DNA
agagggccagaaatcaccca

SEQ ID NO: 5549 - DNA, 20 bp, synthetic construct
  misc_feature 1..20: note = chemically synthesized
  source 1..20: mol_type = other DNA
agaaatcacccaaagacaca

SEQ ID NO: 5550 - DNA, 20 bp, synthetic construct
  misc_feature 1..20: note = chemically synthesized
  source 1..20: mol_type = other DNA
cccaaagacacacagcatgt

SEQ ID NO: 5551 - DNA, 20 bp, synthetic construct
  misc_feature 1..20: note = chemically synthesized
  source 1..20: mol_type = other DNA
aagacacacagcatgttggc

SEQ ID NO: 5552 - DNA, 20 bp, synthetic construct
  misc_feature 1..20: note = chemically synthesized
  source 1..20: mol_type = other DNA
acacagcatgttggctggac

SEQ ID NO: 5553 - DNA, 20 bp, synthetic construct
  misc_feature 1..20: note = chemically synthesized
  source 1..20: mol_type = other DNA
agcatgttggctggactgga

SEQ ID NO: 5554 - DNA, 20 bp, synthetic construct
  misc_feature 1..20: note = chemically synthesized
  source 1..20: mol_type = other DNA
catgttggctggactggacg

SEQ ID NO: 5555 - DNA, 20 bp, synthetic construct
  misc_feature 1..20: note = chemically synthesized
  source 1..20: mol_type = other DNA
tggctggactggacggagat

SEQ ID NO: 5556 - DNA, 20 bp, synthetic construct
  misc_feature 1..20: note = chemically synthesized
  source 1..20: mol_type = other DNA
ggactggacggagatcagtc

SEQ ID NO: 5557 - DNA, 20 bp, synthetic construct
  misc_feature 1..20: note = chemically synthesized
  source 1..20: mol_type = other DNA
acggagatcagtccagaccg

SEQ ID NO: 5558 - DNA, 20 bp, synthetic construct
  misc_feature 1..20: note = chemically synthesized
  source 1..20: mol_type = other DNA
cggagatcagtccagaccgc

SEQ ID NO: 5559 - DNA, 20 bp, synthetic construct
  misc_feature 1..20: note = chemically synthesized
  source 1..20: mol_type = other DNA
accgcaggtgccttgatgtt

SEQ ID NO: 5560 - DNA, 20 bp, synthetic construct
  misc_feature 1..20: note = chemically synthesized
  source 1..20: mol_type = other DNA
aggtgccttgatgttcagtc

SEQ ID NO: 5561 - DNA, 20 bp, synthetic construct
  misc_feature 1..20: note = chemically synthesized
  source 1..20: mol_type = other DNA
tgccttgatgttcagtctgg

SEQ ID NO: 5562 - DNA, 20 bp, synthetic construct
  misc_feature 1..20: note = chemically synthesized
  source 1..20: mol_type = other DNA
gccttgatgttcagtctggt

SEQ ID NO: 5563 - DNA, 20 bp, synthetic construct
  misc_feature 1..20: note = chemically synthesized
  source 1..20: mol_type = other DNA
ccatcccacccacctccctt

SEQ ID NO: 5564 - DNA, 20 bp, synthetic construct
  misc_feature 1..20: note = chemically synthesized
  source 1..20: mol_type = other DNA
catcccacccacctcccttt

SEQ ID NO: 5565 - DNA, 20 bp, synthetic construct
  misc_feature 1..20: note = chemically synthesized
  source 1..20: mol_type = other DNA
ctcgatccctcgcccctcac

SEQ ID NO: 5566 - DNA, 20 bp, synthetic construct
  misc_feature 1..20: note = chemically synthesized
  source 1..20: mol_type = other DNA
ccctcaccagtcccccttct

SEQ ID NO: 5567 - DNA, 20 bp, synthetic construct
  misc_feature 1..20: note = chemically synthesized
  source 1..20: mol_type = other DNA
ctcaccagtcccccttctga

SEQ ID NO: 5568 - DNA, 20 bp, synthetic construct
  misc_feature 1..20: note = chemically synthesized
  source 1..20: mol_type = other DNA
ccccttctgagagcccgtat

SEQ ID NO: 5569 - DNA, 20 bp, synthetic construct
  misc_feature 1..20: note = chemically synthesized
  source 1..20: mol_type = other DNA
cttctgagagcccgtattag

SEQ ID NO: 5570 - DNA, 20 bp, synthetic construct
  misc_feature 1..20: note = chemically synthesized
  source 1..20: mol_type = other DNA
ttctgagagcccgtattagc

SEQ ID NO: 5571 - DNA, 20 bp, synthetic construct
  misc_feature 1..20: note = chemically synthesized
  source 1..20: mol_type = other DNA
tctgagagcccgtattagca

SEQ ID NO: 5572 - DNA, 20 bp, synthetic construct
  misc_feature 1..20: note = chemically synthesized
  source 1..20: mol_type = other DNA
tgagagcccgtattagcagg

SEQ ID NO: 5573 - DNA, 20 bp, synthetic construct
  misc_feature 1..20: note = chemically synthesized
  source 1..20: mol_type = other DNA
agcccgtattagcagggagc

SEQ ID NO: 5574 - DNA, 20 bp, synthetic construct
  misc_feature 1..20: note = chemically synthesized
  source 1..20: mol_type = other DNA
gagccggcccctactccttc

SEQ ID NO: 5575 - DNA, 20 bp, synthetic construct
  misc_feature 1..20: note = chemically synthesized
  source 1..20: mol_type = other DNA
ccggcccctactccttctgg

SEQ ID NO: 5576 - DNA, 20 bp, synthetic construct
  misc_feature 1..20: note = chemically synthesized
  source 1..20: mol_type = other DNA
cctactccttctggcagacc

SEQ ID NO: 5577 - DNA, 20 bp, synthetic construct
  misc_feature 1..20: note = chemically synthesized
  source 1..20: mol_type = other DNA
tccttctggcagacccagct

SEQ ID NO: 5578 - DNA, 20 bp, synthetic construct
  misc_feature 1..20: note = chemically synthesized
  source 1..20: mol_type = other DNA
ccttctggcagacccagcta

SEQ ID NO: 5579 - DNA, 20 bp, synthetic construct
  misc_feature 1..20: note = chemically synthesized
  source 1..20: mol_type = other DNA
acccagctaaggttctacct

SEQ ID NO: 5580 - DNA, 20 bp, synthetic construct
  misc_feature 1..20: note = chemically synthesized
  source 1..20: mol_type = other DNA
cccagctaaggttctacctt

SEQ ID NO: 5581 - DNA, 20 bp, synthetic construct
  misc_feature 1..20: note = chemically synthesized
  source 1..20: mol_type = other DNA
ccagctaaggttctacctta

SEQ ID NO: 5582 - DNA, 20 bp, synthetic construct
  misc_feature 1..20: note = chemically synthesized
  source 1..20: mol_type = other DNA
cagctaaggttctaccttag

SEQ ID NO: 5583 - DNA, 20 bp, synthetic construct
  misc_feature 1..20: note = chemically synthesized
  source 1..20: mol_type = other DNA
taggggccacgccacctccc

SEQ ID NO: 5584 - DNA, 20 bp, synthetic construct
  misc_feature 1..20: note = chemically synthesized
  source 1..20: mol_type = other DNA
aggggccacgccacctcccc

SEQ ID NO: 5585 - DNA, 20 bp, synthetic construct
  misc_feature 1..20: note = chemically synthesized
  source 1..20: mol_type = other DNA
ggggccacgccacctcccca

SEQ ID NO: 5586 - DNA, 20 bp, synthetic construct
  misc_feature 1..20: note = chemically synthesized
  source 1..20: mol_type = other DNA
ggccacgccacctccccagg

SEQ ID NO: 5587 - DNA, 20 bp, synthetic construct
  misc_feature 1..20: note = chemically synthesized
  source 1..20: mol_type = other DNA
gccacgccacctccccaggg

SEQ ID NO: 5588 - DNA, 20 bp, synthetic construct
  misc_feature 1..20: note = chemically synthesized
  source 1..20: mol_type = other DNA
ccacgccacctccccaggga

SEQ ID NO: 5589 - DNA, 20 bp, synthetic construct
  misc_feature 1..20: note = chemically synthesized
  source 1..20: mol_type = other DNA
cacgccacctccccagggag

SEQ ID NO: 5590 - DNA, 20 bp, synthetic construct
  misc_feature 1..20: note = chemically synthesized
  source 1..20: mol_type = other DNA
cacctccccagggaggggtc

SEQ ID NO: 5591 - DNA, 20 bp, synthetic construct
  misc_feature 1..20: note = chemically synthesized
  source 1..20: mol_type = other DNA
cctccccagggaggggtcca

SEQ ID NO: 5592 - DNA, 20 bp, synthetic construct
  misc_feature 1..20: note = chemically synthesized
  source 1..20: mol_type = other DNA
ctccccagggaggggtccag

SEQ ID NO: 5593 - DNA, 20 bp, synthetic construct
  misc_feature 1..20: note = chemically synthesized
  source 1..20: mol_type = other DNA
cagggaggggtccagaggca

SEQ ID NO: 5594 - DNA, 20 bp, synthetic construct
  misc_feature 1..20: note = chemically synthesized
  source 1..20: mol_type = other DNA
agggaggggtccagaggcat

SEQ ID NO: 5595 - DNA, 20 bp, synthetic construct
  misc_feature 1..20: note = chemically synthesized
  source 1..20: mol_type = other DNA
gggaggggtccagaggcatg

SEQ ID NO: 5596 - DNA, 20 bp, synthetic construct
  misc_feature 1..20: note = chemically synthesized
  source 1..20: mol_type = other DNA
ggtccagaggcatggggacc

SEQ ID NO: 5597 - DNA, 20 bp, synthetic construct
  misc_feature 1..20: note = chemically synthesized
  source 1..20: mol_type = other DNA
gtccagaggcatggggacct

SEQ ID NO: 5598 - DNA, 20 bp, synthetic construct
  misc_feature 1..20: note = chemically synthesized
  source 1..20: mol_type = other DNA
tccagaggcatggggacctg

SEQ ID NO: 5599 - DNA, 20 bp, synthetic construct
  misc_feature 1..20: note = chemically synthesized
  source 1..20: mol_type = other DNA
gggacctggggtgcccctca

SEQ ID NO: 5600 - DNA, 20 bp, synthetic construct
  misc_feature 1..20: note = chemically synthesized
  source 1..20: mol_type = other DNA
ggacctggggtgcccctcac

SEQ ID NO: 5601 - DNA, 20 bp, synthetic construct
  misc_feature 1..20: note = chemically synthesized
  source 1..20: mol_type = other DNA
cctcacaggacacttccttg

SEQ ID NO: 5602 - DNA, 20 bp, synthetic construct
  misc_feature 1..20: note = chemically synthesized
  source 1..20: mol_type = other DNA
ctcacaggacacttccttgc

SEQ ID NO: 5603 - DNA, 20 bp, synthetic construct
  misc_feature 1..20: note = chemically synthesized
  source 1..20: mol_type = other DNA
aggacacttccttgcaggaa

SEQ ID NO: 5604 - DNA, 20 bp, synthetic construct
  misc_feature 1..20: note = chemically synthesized
  source 1..20: mol_type = other DNA
gacacttccttgcaggaaca

SEQ ID NO: 5605 - DNA, 20 bp, synthetic construct
  misc_feature 1..20: note = chemically synthesized
  source 1..20: mol_type = other DNA
acacttccttgcaggaacag

SEQ ID NO: 5606 - DNA, 20 bp, synthetic construct
  misc_feature 1..20: note = chemically synthesized
  source 1..20: mol_type = other DNA
gcaggaacagaggtgccatg

SEQ ID NO: 5607 - DNA, 20 bp, synthetic construct
  misc_feature 1..20: note = chemically synthesized
  source 1..20: mol_type = other DNA
acagaggtgccatgcagccc

SEQ ID NO: 5608 - DNA, 20 bp, synthetic construct
  misc_feature 1..20: note = chemically synthesized
  source 1..20: mol_type = other DNA
cagaggtgccatgcagcccc

SEQ ID NO: 5609 - DNA, 20 bp, synthetic construct
  misc_feature 1..20: note = chemically synthesized
  source 1..20: mol_type = other DNA
actccttgttgttgccctcc

SEQ ID NO: 5610 - DNA, 20 bp, synthetic construct
  misc_feature 1..20: note = chemically synthesized
  source 1..20: mol_type = other DNA
tgttgccctcctggcgctcc

SEQ ID NO: 5611 - DNA, 20 bp, synthetic construct
  misc_feature 1..20: note = chemically synthesized
  source 1..20: mol_type = other DNA
cgctcctggcctctgcccgt

SEQ ID NO: 5612 - DNA, 20 bp, synthetic construct
  misc_feature 1..20: note = chemically synthesized
  source 1..20: mol_type = other DNA
ggcctctgcccgtaagcact

SEQ ID NO: 5613 - DNA, 20 bp, synthetic construct
  misc_feature 1..20: note = chemically synthesized
  source 1..20: mol_type = other DNA
ctctgcccgtaagcacttgg

SEQ ID NO: 5614 - DNA, 20 bp, synthetic construct
  misc_feature 1..20: note = chemically synthesized
  source 1..20: mol_type = other DNA
tctgcccgtaagcacttggt

SEQ ID NO: 5615 - DNA, 20 bp, synthetic construct
  misc_feature 1..20: note = chemically synthesized
  source 1..20: mol_type = other DNA
ccgtaagcacttggtgggac

SEQ ID NO: 5616 - DNA, 20 bp, synthetic construct
  misc_feature 1..20: note = chemically synthesized
  source 1..20: mol_type = other DNA
cgtaagcacttggtgggact

SEQ ID NO: 5617 - DNA, 20 bp, synthetic construct
  misc_feature 1..20: note = chemically synthesized
  source 1..20: mol_type = other DNA
agcacttggtgggactgggc

SEQ ID NO: 5618 - DNA, 20 bp, synthetic construct
  misc_feature 1..20: note = chemically synthesized
  source 1..20: mol_type = other DNA
gcacttggtgggactgggct

SEQ ID NO: 5619 - DNA, 20 bp, synthetic construct
  misc_feature 1..20: note = chemically synthesized
  source 1..20: mol_type = other DNA
cacttggtgggactgggctg

SEQ ID NO: 5620 - DNA, 20 bp, synthetic construct
  misc_feature 1..20: note = chemically synthesized
  source 1..20: mol_type = other DNA
acttggtgggactgggctgg

SEQ ID NO: 5621 - DNA, 20 bp, synthetic construct
  misc_feature 1..20: note = chemically synthesized
  source 1..20: mol_type = other DNA
tggtgggactgggctggggg

SEQ ID NO: 5622 - DNA, 20 bp, synthetic construct
  misc_feature 1..20: note = chemically synthesized
  source 1..20: mol_type = other DNA
ggtgggactgggctgggggc

SEQ ID NO: 5623 - DNA, 20 bp, synthetic construct
  misc_feature 1..20: note = chemically synthesized
  source 1..20: mol_type = other DNA
gtgggactgggctgggggca

SEQ ID NO: 5624 - DNA, 20 bp, synthetic construct
  misc_feature 1..20: note = chemically synthesized
  source 1..20: mol_type = other DNA
gcccccagcccagtcccacc

SEQ ID NO: 5625 - DNA, 20 bp, synthetic construct
  misc_feature 1..20: note = chemically synthesized
  source 1..20: mol_type = other DNA
ccagtcccaccaagtgctta

SEQ ID NO: 5626 - DNA, 20 bp, synthetic construct
  misc_feature 1..20: note = chemically synthesized
  source 1..20: mol_type = other DNA
cagtcccaccaagtgcttac

SEQ ID NO: 5627 - DNA, 20 bp, synthetic construct
  misc_feature 1..20: note = chemically synthesized
  source 1..20: mol_type = other DNA
tcccaccaagtgcttacggg

SEQ ID NO: 5628 - DNA, 20 bp, synthetic construct
  misc_feature 1..20: note = chemically synthesized
  source 1..20: mol_type = other DNA
ccaccaagtgcttacgggca

SEQ ID NO: 5629 - DNA, 20 bp, synthetic construct
  misc_feature 1..20: note = chemically synthesized
  source 1..20: mol_type = other DNA
caccaagtgcttacgggcag

SEQ ID NO: 5630 - DNA, 20 bp, synthetic construct
  misc_feature 1..20: note = chemically synthesized
  source 1..20: mol_type = other DNA
aagtgcttacgggcagaggc

SEQ ID NO: 5631 - DNA, 20 bp, synthetic construct
  misc_feature 1..20: note = chemically synthesized
  source 1..20: mol_type = other DNA
agtgcttacgggcagaggcc

SEQ ID NO: 5632 - DNA, 20 bp, synthetic construct
  misc_feature 1..20: note = chemically synthesized
  source 1..20: mol_type = other DNA
tgcttacgggcagaggccag

SEQ ID NO: 5633 - DNA, 20 bp, synthetic construct
  misc_feature 1..20: note = chemically synthesized
  source 1..20: mol_type = other DNA
cgggcagaggccaggagcgc

SEQ ID NO: 5634 - DNA, 20 bp, synthetic construct
  misc_feature 1..20: note = chemically synthesized
  source 1..20: mol_type = other DNA
gggcagaggccaggagcgcc

SEQ ID NO: 5635 - DNA, 20 bp, synthetic construct
  misc_feature 1..20: note = chemically synthesized
  source 1..20: mol_type = other DNA
gcagaggccaggagcgccag

SEQ ID NO: 5636 - DNA, 20 bp, synthetic construct
  misc_feature 1..20: note = chemically synthesized
  source 1..20: mol_type = other DNA
cagaggccaggagcgccagg

SEQ ID NO: 5637 - DNA, 20 bp, synthetic construct
  misc_feature 1..20: note = chemically synthesized
  source 1..20: mol_type = other DNA
agaggccaggagcgccagga

SEQ ID NO: 5638 - DNA, 20 bp, synthetic construct
  misc_feature 1..20: note = chemically synthesized
  source 1..20: mol_type = other DNA
agcgccaggagggcaacaac

SEQ ID NO: 5639 - DNA, 20 bp, synthetic construct
  misc_feature 1..20: note = chemically synthesized
  source 1..20: mol_type = other DNA
gcgccaggagggcaacaaca

SEQ ID NO: 5640 - DNA, 20 bp, synthetic construct
  misc_feature 1..20: note = chemically synthesized
  source 1..20: mol_type = other DNA
gccaggagggcaacaacaag

SEQ ID NO: 5641 - DNA, 20 bp, synthetic construct
  misc_feature 1..20: note = chemically synthesized
  source 1..20: mol_type = other DNA
gggcaacaacaaggagtacc

SEQ ID NO: 5642 - DNA, 20 bp, synthetic construct
  misc_feature 1..20: note = chemically synthesized
  source 1..20: mol_type = other DNA
ggcaacaacaaggagtaccc

SEQ ID NO: 5643 - DNA, 20 bp, synthetic construct
  misc_feature 1..20: note = chemically synthesized
  source 1..20: mol_type = other DNA
gcaacaacaaggagtacccg

SEQ ID NO: 5644 - DNA, 20 bp, synthetic construct
  misc_feature 1..20: note = chemically synthesized
  source 1..20: mol_type = other DNA
aaggagtacccggggctgca

SEQ ID NO: 5645 - DNA, 20 bp, synthetic construct
  misc_feature 1..20: note = chemically synthesized
  source 1..20: mol_type = other DNA
catggcacctctgttcctgc

SEQ ID NO: 5646 - DNA, 20 bp, synthetic construct
  misc_feature 1..20: note = chemically synthesized
  source 1..20: mol_type = other DNA
atggcacctctgttcctgca

SEQ ID NO: 5647 - DNA, 20 bp, synthetic construct
  misc_feature 1..20: note = chemically synthesized
  source 1..20: mol_type = other DNA
gcacctctgttcctgcaagg

SEQ ID NO: 5648 - DNA, 20 bp, synthetic construct
  misc_feature 1..20: note = chemically synthesized
  source 1..20: mol_type = other DNA
cctgcaaggaagtgtcctgt

SEQ ID NO: 5649 - DNA, 20 bp, synthetic construct
  misc_feature 1..20: note = chemically synthesized
  source 1..20: mol_type = other DNA
ctgcaaggaagtgtcctgtg

SEQ ID NO: 5650 - DNA, 20 bp, synthetic construct
  misc_feature 1..20: note = chemically synthesized
  source 1..20: mol_type = other DNA
tgcaaggaagtgtcctgtga

SEQ ID NO: 5651 - DNA, 20 bp, synthetic construct
  misc_feature 1..20: note = chemically synthesized
  source 1..20: mol_type = other DNA
gcaaggaagtgtcctgtgag

SEQ ID NO: 5652 - DNA, 20 bp, synthetic construct
  misc_feature 1..20: note = chemically synthesized
  source 1..20: mol_type = other DNA
gtgtcctgtgaggggcaccc

SEQ ID NO: 5653 - DNA, 20 bp, synthetic construct
  misc_feature 1..20: note = chemically synthesized
  source 1..20: mol_type = other DNA
tgtcctgtgaggggcacccc

SEQ ID NO: 5654 - DNA, 20 bp, synthetic construct
  misc_feature 1..20: note = chemically synthesized
  source 1..20: mol_type = other DNA
accccaggtccccatgcctc

SEQ ID NO: 5655 - DNA, 20 bp, synthetic construct
  misc_feature 1..20: note = chemically synthesized
  source 1..20: mol_type = other DNA
catgcctctggacccctccc

SEQ ID NO: 5656 - DNA, 20 bp, synthetic construct
  misc_feature 1..20: note = chemically synthesized
  source 1..20: mol_type = other DNA
atgcctctggacccctccct

SEQ ID NO: 5657 - DNA, 20 bp, synthetic construct
  misc_feature 1..20: note = chemically synthesized
  source 1..20: mol_type = other DNA
tgcctctggacccctccctg

SEQ ID NO: 5658 - DNA, 20 bp, synthetic construct
  misc_feature 1..20: note = chemically synthesized
  source 1..20: mol_type = other DNA
cctctggacccctccctggg

SEQ ID NO: 5659 - DNA, 20 bp, synthetic construct
  misc_feature 1..20: note = chemically synthesized
  source 1..20: mol_type = other DNA
ctctggacccctccctgggg

SEQ ID NO: 5660 - DNA, 20 bp, synthetic construct
  misc_feature 1..20: note = chemically synthesized
  source 1..20: mol_type = other DNA
tggacccctccctggggagg

SEQ ID NO: 5661 - DNA, 20 bp, synthetic construct
  misc_feature 1..20: note = chemically synthesized
  source 1..20: mol_type = other DNA
ccctccctggggaggtggcg

SEQ ID NO: 5662 - DNA, 20 bp, synthetic construct
  misc_feature 1..20: note = chemically synthesized
  source 1..20: mol_type = other DNA
ggggaggtggcgtggcccct

SEQ ID NO: 5663 - DNA, 20 bp, synthetic construct
  misc_feature 1..20: note = chemically synthesized
  source 1..20: mol_type = other DNA
gggaggtggcgtggccccta

SEQ ID NO: 5664 - DNA, 20 bp, synthetic construct
  misc_feature 1..20: note = chemically synthesized
  source 1..20: mol_type = other DNA
aggtggcgtggcccctaagg

SEQ ID NO: 5665 - DNA, 20 bp, synthetic construct
  misc_feature 1..20: note = chemically synthesized
  source 1..20: mol_type = other DNA
tggcccctaaggtagaacct

SEQ ID NO: 5666 - DNA, 20 bp, synthetic construct
  misc_feature 1..20: note = chemically synthesized
  source 1..20: mol_type = other DNA
ccctaaggtagaaccttagc

SEQ ID NO: 5667 - DNA, 20 bp, synthetic construct
  misc_feature 1..20: note = chemically synthesized
  source 1..20: mol_type = other DNA
cctaaggtagaaccttagct

SEQ ID NO: 5668 - DNA, 20 bp, synthetic construct
  misc_feature 1..20: note = chemically synthesized
  source 1..20: mol_type = other DNA
agaaccttagctgggtctgc

SEQ ID NO: 5669 - DNA, 20 bp, synthetic construct
  misc_feature 1..20: note = chemically synthesized
  source 1..20: mol_type = other DNA
accttagctgggtctgccag

SEQ ID NO: 5670 - DNA, 20 bp, synthetic construct
  misc_feature 1..20: note = chemically synthesized
  source 1..20: mol_type = other DNA
ccttagctgggtctgccaga

SEQ ID NO: 5671 - DNA, 20 bp, synthetic construct
  misc_feature 1..20: note = chemically synthesized
  source 1..20: mol_type = other DNA
ttagctgggtctgccagaag

SEQ ID NO: 5672 - DNA, 20 bp, synthetic construct
  misc_feature 1..20: note = chemically synthesized
  source 1..20: mol_type = other DNA
gctgggtctgccagaaggag

SEQ ID NO: 5673 - DNA, 20 bp, synthetic construct
  misc_feature 1..20: note = chemically synthesized
  source 1..20: mol_type = other DNA
ctgggtctgccagaaggagt

SEQ ID NO: 5674 - DNA, 20 bp, synthetic construct
  misc_feature 1..20: note = chemically synthesized
  source 1..20: mol_type = other DNA
tgggtctgccagaaggagta

SEQ ID NO: 5675 - DNA, 20 bp, synthetic construct
  misc_feature 1..20: note = chemically synthesized
  source 1..20: mol_type = other DNA
gggtctgccagaaggagtag

SEQ ID NO: 5676 - DNA, 20 bp, synthetic construct
  misc_feature 1..20: note = chemically synthesized
  source 1..20: mol_type = other DNA
ctgccagaaggagtaggggc

SEQ ID NO: 5677 - DNA, 20 bp, synthetic construct
  misc_feature 1..20: note = chemically synthesized
  source 1..20: mol_type = other DNA
gggccggctccctgctaata

SEQ ID NO: 5678 - DNA, 20 bp, synthetic construct
  misc_feature 1..20: note = chemically synthesized
  source 1..20: mol_type = other DNA
ggccggctccctgctaatac

SEQ ID NO: 5679 - DNA, 20 bp, synthetic construct
  misc_feature 1..20: note = chemically synthesized
  source 1..20: mol_type = other DNA
tccctgctaatacgggctct

SEQ ID NO: 5680 - DNA, 20 bp, synthetic construct
  misc_feature 1..20: note = chemically synthesized
  source 1..20: mol_type = other DNA
ctgctaatacgggctctcag

SEQ ID NO: 5681 - DNA, 20 bp, synthetic construct
  misc_feature 1..20: note = chemically synthesized
  source 1..20: mol_type = other DNA
tgctaatacgggctctcaga

SEQ ID NO: 5682 - DNA, 20 bp, synthetic construct
  misc_feature 1..20: note = chemically synthesized
  source 1..20: mol_type = other DNA
gctaatacgggctctcagaa

SEQ ID NO: 5683 - DNA, 20 bp, synthetic construct
  misc_feature 1..20: note = chemically synthesized
  source 1..20: mol_type = other DNA
ctaatacgggctctcagaag

SEQ ID NO: 5684 - DNA, 20 bp, synthetic construct
  misc_feature 1..20: note = chemically synthesized
  source 1..20: mol_type = other DNA
taatacgggctctcagaagg

SEQ ID NO: 5685 - DNA, 20 bp, synthetic construct
  misc_feature 1..20: note = chemically synthesized
  source 1..20: mol_type = other DNA
cgggctctcagaagggggac

SEQ ID NO: 5686 - DNA, 20 bp, synthetic construct
  misc_feature 1..20: note = chemically synthesized
  source 1..20: mol_type = other DNA
ctctcagaagggggactggt

SEQ ID NO: 5687 - DNA, 20 bp, synthetic construct
  misc_feature 1..20: note = chemically synthesized
  source 1..20: mol_type = other DNA
tctcagaagggggactggtg

SEQ ID NO: 5688 - DNA, 20 bp, synthetic construct
  misc_feature 1..20: note = chemically synthesized
  source 1..20: mol_type = other DNA
ctcagaagggggactggtga

SEQ ID NO: 5689 - DNA, 20 bp, synthetic construct
  misc_feature 1..20: note = chemically synthesized
  source 1..20: mol_type = other DNA
tcagaagggggactggtgag

SEQ ID NO: 5690 - DNA, 20 bp, synthetic construct
  misc_feature 1..20: note = chemically synthesized
  source 1..20: mol_type = other DNA
aagggggactggtgaggggc

SEQ ID NO: 5691 - DNA, 20 bp, synthetic construct
  misc_feature 1..20: note = chemically synthesized
  source 1..20: mol_type = other DNA
agggggactggtgaggggcg

SEQ ID NO: 5692 - DNA, 20 bp, synthetic construct
  misc_feature 1..20: note = chemically synthesized
  source 1..20: mol_type = other DNA
gggggactggtgaggggcga

SEQ ID NO: 5693 - DNA, 20 bp, synthetic construct
  misc_feature 1..20: note = chemically synthesized
  source 1..20: mol_type = other DNA
ctggtgaggggcgagggatc

SEQ ID NO: 5694 - DNA, 20 bp, synthetic construct
  misc_feature 1..20: note = chemically synthesized
  source 1..20: mol_type = other DNA
tggtgaggggcgagggatcg

SEQ ID NO: 5695 - DNA, 20 bp, synthetic construct
  misc_feature 1..20: note = chemically synthesized
  source 1..20: mol_type = other DNA
gggcgagggatcgaggccca

SEQ ID NO: 5696 - DNA, 20 bp, synthetic construct
  misc_feature 1..20: note = chemically synthesized
  source 1..20: mol_type = other DNA
ggcgagggatcgaggcccaa

SEQ ID NO: 5697 - DNA, 20 bp, synthetic construct
  misc_feature 1..20: note = chemically synthesized
  source 1..20: mol_type = other DNA
gcgagggatcgaggcccaaa

SEQ ID NO: 5698 - DNA, 20 bp, synthetic construct
  misc_feature 1..20: note = chemically synthesized
  source 1..20: mol_type = other DNA
gagggatcgaggcccaaagg

SEQ ID NO: 5699 - DNA, 20 bp, synthetic construct
  misc_feature 1..20: note = chemically synthesized
  source 1..20: mol_type = other DNA
agggatcgaggcccaaaggg

SEQ ID NO: 5700 - DNA, 20 bp, synthetic construct
  misc_feature 1..20: note = chemically synthesized
  source 1..20: mol_type = other DNA
gatcgaggcccaaagggagg

SEQ ID NO: 5701 - DNA, 20 bp, synthetic construct
  misc_feature 1..20: note = chemically synthesized
  source 1..20: mol_type = other DNA
atcgaggcccaaagggaggt

SEQ ID NO: 5702 - DNA, 20 bp, synthetic construct
  misc_feature 1..20: note = chemically synthesized
  source 1..20: mol_type = other DNA
gaggcccaaagggaggtggg

SEQ ID NO: 5703 - DNA, 20 bp, synthetic construct
  misc_feature 1..20: note = chemically synthesized
  source 1..20: mol_type = other DNA
aggcccaaagggaggtgggt

SEQ ID NO: 5704 - DNA, 20 bp, synthetic construct
  misc_feature 1..20: note = chemically synthesized
  source 1..20: mol_type = other DNA
ccaaagggaggtgggtggga

SEQ ID NO: 5705 - DNA, 20 bp, synthetic construct
  misc_feature 1..20: note = chemically synthesized
  source 1..20: mol_type = other DNA
aaagggaggtgggtgggatg

SEQ ID NO: 5706 - DNA, 20 bp, synthetic construct
  misc_feature 1..20: note = chemically synthesized
  source 1..20: mol_type = other DNA
gggaggtgggtgggatggag

SEQ ID NO: 5707 - DNA, 20 bp, synthetic construct
  misc_feature 1..20: note = chemically synthesized
  source 1..20: mol_type = other DNA
ggatggagcagaaaacccac

SEQ ID NO: 5708 - DNA, 20 bp, synthetic construct
  misc_feature 1..20: note = chemically synthesized
  source 1..20: mol_type = other DNA
aacccaccagactgaacatc

SEQ ID NO: 5709 - DNA, 20 bp, synthetic construct
  misc_feature 1..20: note = chemically synthesized
  source 1..20: mol_type = other DNA
acccaccagactgaacatca

SEQ ID NO: 5710 - DNA, 20 bp, synthetic construct
  misc_feature 1..20: note = chemically synthesized
  source 1..20: mol_type = other DNA
actgaacatcaaggcacctg

SEQ ID NO: 5711 - DNA, 20 bp, synthetic construct
  misc_feature 1..20: note = chemically synthesized
  source 1..20: mol_type = other DNA
acatcaaggcacctgcggtc

SEQ ID NO: 5712 - DNA, 20 bp, synthetic construct
  misc_feature 1..20: note = chemically synthesized
  source 1..20: mol_type = other DNA
ggtctggactgatctccgtc

SEQ ID NO: 5713 - DNA, 20 bp, synthetic construct
  misc_feature 1..20: note = chemically synthesized
  source 1..20: mol_type = other DNA
ggactgatctccgtccagtc

SEQ ID NO: 5714 - DNA, 20 bp, synthetic construct
  misc_feature 1..20: note = chemically synthesized
  source 1..20: mol_type = other DNA
gccaacatgctgtgtgtctt

SEQ ID NO: 5715 - DNA, 20 bp, synthetic construct
  misc_feature 1..20: note = chemically synthesized
  source 1..20: mol_type = other DNA
ccaacatgctgtgtgtcttt

SEQ ID NO: 5716 - DNA, 20 bp, synthetic construct
  misc_feature 1..20: note = chemically synthesized
  source 1..20: mol_type = other DNA
gtgtgtctttgggtgatttc

SEQ ID NO: 5717 - DNA, 20 bp, synthetic construct
  misc_feature 1..20: note = chemically synthesized
  source 1..20: mol_type = other DNA
gggtgatttctggccctctc

SEQ ID NO: 5718 - DNA, 20 bp, synthetic construct
  misc_feature 1..20: note = chemically synthesized
  source 1..20: mol_type = other DNA
ggtgatttctggccctctcc

SEQ ID NO: 5719 - DNA, 20 bp, synthetic construct
  misc_feature 1..20: note = chemically synthesized
  source 1..20: mol_type = other DNA
ttctggccctctccaggcct

SEQ ID NO: 5720 - DNA, 20 bp, synthetic construct
  misc_feature 1..20: note = chemically synthesized
  source 1..20: mol_type = other DNA
caggcctcagtttccctgtc

SEQ ID NO: 5721 - DNA, 20 bp, synthetic construct
  misc_feature 1..20: note = chemically synthesized
  source 1..20: mol_type = other DNA
aggcctcagtttccctgtct

SEQ ID NO: 5722 - DNA, 20 bp, synthetic construct
  misc_feature 1..20: note = chemically synthesized
  source 1..20: mol_type = other DNA
ggcctcagtttccctgtctg

SEQ ID NO: 5723 - DNA, 20 bp, synthetic construct
  misc_feature 1..20: note = chemically synthesized
  source 1..20: mol_type = other DNA
ctcagtttccctgtctgggg

SEQ ID NO: 5724 - DNA, 20 bp, synthetic construct
  misc_feature 1..20: note = chemically synthesized
  source 1..20: mol_type = other DNA
tcagtttccctgtctggggt

SEQ ID NO: 5725 - DNA, 20 bp, synthetic construct
  misc_feature 1..20: note = chemically synthesized
  source 1..20: mol_type = other DNA
ttccctgtctggggtaggac

SEQ ID NO: 5726 - DNA, 20 bp, synthetic construct
  misc_feature 1..20: note = chemically synthesized
  source 1..20: mol_type = other DNA
tccctgtctggggtaggact

SEQ ID NO: 5727 - DNA, 20 bp, synthetic construct
  misc_feature 1..20: note = chemically synthesized
  source 1..20: mol_type = other DNA
ggggtaggactgggctgtct

SEQ ID NO: 5728 - DNA, 20 bp, synthetic construct
  misc_feature 1..20: note = chemically synthesized
  source 1..20: mol_type = other DNA
gggtaggactgggctgtcta

SEQ ID NO: 5729 - DNA, 20 bp, synthetic construct
  misc_feature 1..20: note = chemically synthesized
  source 1..20: mol_type = other DNA
gggctgtctaaggcttcctc

SEQ ID NO: 5730 - DNA, 20 bp, synthetic construct
  misc_feature 1..20: note = chemically synthesized
  source 1..20: mol_type = other DNA
ctaaggcttcctccagccct

SEQ ID NO: 5731 - DNA, 20 bp, synthetic construct
  misc_feature 1..20: note = chemically synthesized
  source 1..20: mol_type = other DNA
ttcctccagccctaagcctg

SEQ ID NO: 5732 - DNA, 20 bp, synthetic construct
  misc_feature 1..20: note = chemically synthesized
  source 1..20: mol_type = other DNA
cagccctaagcctgaagaat

SEQ ID NO: 5733 - DNA, 20 bp, synthetic construct
  misc_feature 1..20: note = chemically synthesized
  source 1..20: mol_type = other DNA
agccctaagcctgaagaatg

SEQ ID NO: 5734 - DNA, 20 bp, synthetic construct
  misc_feature 1..20: note = chemically synthesized
  source 1..20: mol_type = other DNA
gccctaagcctgaagaatga

SEQ ID NO: 5735 - DNA, 20 bp, synthetic construct
  misc_feature 1..20: note = chemically synthesized
  source 1..20: mol_type = other DNA
ccctaagcctgaagaatgag

SEQ ID NO: 5736 - DNA, 20 bp, synthetic construct
  misc_feature 1..20: note = chemically synthesized
  source 1..20: mol_type = other DNA
cctaagcctgaagaatgagg

SEQ ID NO: 5737 - DNA, 20 bp, synthetic construct
  misc_feature 1..20: note = chemically synthesized
  source 1..20: mol_type = other DNA
ctaagcctgaagaatgaggg

SEQ ID NO: 5738 - DNA, 20 bp, synthetic construct
  misc_feature 1..20: note = chemically synthesized
  source 1..20: mol_type = other DNA
atgaggggggaacctgcact

SEQ ID NO: 5739 - DNA, 20 bp, synthetic construct
  misc_feature 1..20: note = chemically synthesized
  source 1..20: mol_type = other DNA
gaggggggaacctgcacttg

SEQ ID NO: 5740 - DNA, 20 bp, synthetic construct
  misc_feature 1..20: note = chemically synthesized
  source 1..20: mol_type = other DNA
cctgcacttggagccacttc

SEQ ID NO: 5741 - DNA, 20 bp, synthetic construct
  misc_feature 1..20: note = chemically synthesized
  source 1..20: mol_type = other DNA
ttccagccccaccccctgtg

SEQ ID NO: 5742 - DNA, 20 bp, synthetic construct
  misc_feature 1..20: note = chemically synthesized
  source 1..20: mol_type = other DNA
ccccaccccctgtgtagctt

SEQ ID NO: 5743 - DNA, 20 bp, synthetic construct
  misc_feature 1..20: note = chemically synthesized
  source 1..20: mol_type = other DNA
cccaccccctgtgtagcttt

SEQ ID NO: 5744 - DNA, 20 bp, synthetic construct
  misc_feature 1..20: note = chemically synthesized
  source 1..20: mol_type = other DNA
ccccctgtgtagctttgggc

SEQ ID NO: 5745 - DNA, 20 bp, synthetic construct
  misc_feature 1..20: note = chemically synthesized
  source 1..20: mol_type = other DNA
tgggcaagtgacacccctcc

SEQ ID NO: 5746 - DNA, 20 bp, synthetic construct
  misc_feature 1..20: note = chemically synthesized
  source 1..20: mol_type = other DNA
gggcaagtgacacccctccc

SEQ ID NO: 5747 - DNA, 20 bp, synthetic construct
  misc_feature 1..20: note = chemically synthesized
  source 1..20: mol_type = other DNA
tcccgggcctccatgttctt

SEQ ID NO: 5748 - DNA, 20 bp, synthetic construct
  misc_feature 1..20: note = chemically synthesized
  source 1..20: mol_type = other DNA
cccgggcctccatgttcttc

SEQ ID NO: 5749 - DNA, 20 bp, synthetic construct
  misc_feature 1..20: note = chemically synthesized
  source 1..20: mol_type = other DNA
catgttcttcaggttatgat

SEQ ID NO: 5750 - DNA, 20 bp, synthetic construct
  misc_feature 1..20: note = chemically synthesized
  source 1..20: mol_type = other DNA
atgttcttcaggttatgatg

SEQ ID NO: 5751 - DNA, 20 bp, synthetic construct
  misc_feature 1..20: note = chemically synthesized
  source 1..20: mol_type = other DNA
tgttcttcaggttatgatga

SEQ ID NO: 5752 - DNA, 20 bp, synthetic construct
  misc_feature 1..20: note = chemically synthesized
  source 1..20: mol_type = other DNA
gttcttcaggttatgatgag

SEQ ID NO: 5753 - DNA, 20 bp, synthetic construct
  misc_feature 1..20: note = chemically synthesized
  source 1..20: mol_type = other DNA
cttcaggttatgatgagggg

SEQ ID NO: 5754 - DNA, 20 bp, synthetic construct
  misc_feature 1..20: note = chemically synthesized
  source 1..20: mol_type = other DNA
ttcaggttatgatgaggggt

SEQ ID NO: 5755 - DNA, 20 bp, synthetic construct
  misc_feature 1..20: note = chemically synthesized
  source 1..20: mol_type = other DNA
tcaggttatgatgaggggtg

SEQ ID NO: 5756 - DNA, 20 bp, synthetic construct
  misc_feature 1..20: note = chemically synthesized
  source 1..20: mol_type = other DNA
caggttatgatgaggggtgg

SEQ ID NO: 5757 - DNA, 20 bp, synthetic construct
  misc_feature 1..20: note = chemically synthesized
  source 1..20: mol_type = other DNA
aggttatgatgaggggtggg

SEQ ID NO: 5758 - DNA, 20 bp, synthetic construct
  misc_feature 1..20: note = chemically synthesized
  source 1..20: mol_type = other DNA
aggggtggggggcacccgtc

SEQ ID NO: 5759 - DNA, 20 bp, synthetic construct
  misc_feature 1..20: note = chemically synthesized
  source 1..20: mol_type = other DNA
gggggcacccgtccagctcc

SEQ ID NO: 5760 - DNA, 20 bp, synthetic construct
  misc_feature 1..20: note = chemically synthesized
  source 1..20: mol_type = other DNA
ggggcacccgtccagctccg

SEQ ID NO: 5761 - DNA, 20 bp, synthetic construct
  misc_feature 1..20: note = chemically synthesized
  source 1..20: mol_type = other DNA
gtccagctccgaggcttcct

SEQ ID NO: 5762 - DNA, 20 bp, synthetic construct
  misc_feature 1..20: note = chemically synthesized
  source 1..20: mol_type = other DNA
ctccgaggcttccttagctc

SEQ ID NO: 5763 - DNA, 20 bp, synthetic construct
  misc_feature 1..20: note = chemically synthesized
  source 1..20: mol_type = other DNA
gaggcttccttagctctagc

SEQ ID NO: 5764 - DNA, 20 bp, synthetic construct
  misc_feature 1..20: note = chemically synthesized
  source 1..20: mol_type = other DNA
agctctagcaagtgcttctc

SEQ ID NO: 5765 - DNA, 20 bp, synthetic construct
  misc_feature 1..20: note = chemically synthesized
  source 1..20: mol_type = other DNA
gctctagcaagtgcttctcc

SEQ ID NO: 5766 - DNA, 20 bp, synthetic construct
  misc_feature 1..20: note = chemically synthesized
  source 1..20: mol_type = other DNA
aagtgcttctccaggcttgc

SEQ ID NO: 5767 - DNA, 20 bp, synthetic construct
  misc_feature 1..20: note = chemically synthesized
  source 1..20: mol_type = other DNA
gcttctccaggcttgctggc

SEQ ID NO: 5768 - DNA, 20 bp, synthetic construct
  misc_feature 1..20: note = chemically synthesized
  source 1..20: mol_type = other DNA
cttctccaggcttgctggct

SEQ ID NO: 5769 - DNA, 20 bp, synthetic construct
  misc_feature 1..20: note = chemically synthesized
  source 1..20: mol_type = other DNA
tccaggcttgctggctgggc

SEQ ID NO: 5770 - DNA, 20 bp, synthetic construct
  misc_feature 1..20: note = chemically synthesized
  source 1..20: mol_type = other DNA
ccaggcttgctggctgggct

SEQ ID NO: 5771 - DNA, 20 bp, synthetic construct
  misc_feature 1..20: note = chemically synthesized
  source 1..20: mol_type = other DNA
ggcttgctggctgggctggg

SEQ ID NO: 5772 - DNA, 20 bp, synthetic construct
  misc_feature 1..20: note = chemically synthesized
  source 1..20: mol_type = other DNA
gcttgctggctgggctgggc

SEQ ID NO: 5773 - DNA, 20 bp, synthetic construct
  misc_feature 1..20: note = chemically synthesized
  source 1..20: mol_type = other DNA
cttgctggctgggctgggca

SEQ ID NO: 5774 - DNA, 20 bp, synthetic construct
  misc_feature 1..20: note = chemically synthesized
  source 1..20: mol_type = other DNA
tgctggctgggctgggcagg

SEQ ID NO: 5775 - DNA, 20 bp, synthetic construct
  misc_feature 1..20: note = chemically synthesized
  source 1..20: mol_type = other DNA
cccctcctctttcccctccc

SEQ ID NO: 5776 - DNA, 20 bp, synthetic construct
  misc_feature 1..20: note = chemically synthesized
  source 1..20: mol_type = other DNA
cctcctctttcccctcccca

SEQ ID NO: 5777 - DNA, 20 bp, synthetic construct
  misc_feature 1..20: note = chemically synthesized
  source 1..20: mol_type = other DNA
ctcctctttcccctccccag

SEQ ID NO: 5778 - DNA, 20 bp, synthetic construct
  misc_feature 1..20: note = chemically synthesized
  source 1..20: mol_type = other DNA
tcctctttcccctccccaga

SEQ ID NO: 5779 - DNA, 20 bp, synthetic construct
  misc_feature 1..20: note = chemically synthesized
  source 1..20: mol_type = other DNA
cctccccagagggcattacc

SEQ ID NO: 5780 - DNA, 20 bp, synthetic construct
  misc_feature 1..20: note = chemically synthesized
  source 1..20: mol_type = other DNA
tccccagagggcattacctg

SEQ ID NO: 5781 - DNA, 20 bp, synthetic construct
  misc_feature 1..20: note = chemically synthesized
  source 1..20: mol_type = other DNA
ccagagggcattacctggag

SEQ ID NO: 5782 - DNA, 20 bp, synthetic construct
  misc_feature 1..20: note = chemically synthesized
  source 1..20: mol_type = other DNA
ttacctggagcagctgcctc

SEQ ID NO: 5783 - DNA, 20 bp, synthetic construct
  misc_feature 1..20: note = chemically synthesized
  source 1..20: mol_type = other DNA
tacctggagcagctgcctct

SEQ ID NO: 5784 - DNA, 20 bp, synthetic construct
  misc_feature 1..20: note = chemically synthesized
  source 1..20: mol_type = other DNA
acctggagcagctgcctcta

SEQ ID NO: 5785 - DNA, 20 bp, synthetic construct
  misc_feature 1..20: note = chemically synthesized
  source 1..20: mol_type = other DNA
gctgcctctagggatgaact

SEQ ID NO: 5786 - DNA, 20 bp, synthetic construct
  misc_feature 1..20: note = chemically synthesized
  source 1..20: mol_type = other DNA
gcctctagggatgaactgag

SEQ ID NO: 5787 - DNA, 20 bp, synthetic construct
  misc_feature 1..20: note = chemically synthesized
  source 1..20: mol_type = other DNA
ctagggatgaactgagcaga

SEQ ID NO: 5788 - DNA, 20 bp, synthetic construct
  misc_feature 1..20: note = chemically synthesized
  source 1..20: mol_type = other DNA
tagggatgaactgagcagac

SEQ ID NO: 5789 - DNA, 20 bp, synthetic construct
  misc_feature 1..20: note = chemically synthesized
  source 1..20: mol_type = other DNA
ggatgaactgagcagacagg

SEQ ID NO: 5790 - DNA, 20 bp, synthetic construct
  misc_feature 1..20: note = chemically synthesized
  source 1..20: mol_type = other DNA
gatgaactgagcagacaggc

SEQ ID NO: 5791 - DNA, 20 bp, synthetic construct
  misc_feature 1..20: note = chemically synthesized
  source 1..20: mol_type = other DNA
tgaactgagcagacaggcag

SEQ ID NO: 5792 - DNA, 20 bp, synthetic construct
  misc_feature 1..20: note = chemically synthesized
  source 1..20: mol_type = other DNA
gaactgagcagacaggcagg

SEQ ID NO: 5793 - DNA, 20 bp, synthetic construct
  misc_feature 1..20: note = chemically synthesized
  source 1..20: mol_type = other DNA
aactgagcagacaggcagga

SEQ ID NO: 5794 - DNA, 20 bp, synthetic construct
  misc_feature 1..20: note = chemically synthesized
  source 1..20: mol_type = other DNA
gacctgttttatatcatctc

SEQ ID NO: 5795 - DNA, 20 bp, synthetic construct
  misc_feature 1..20: note = chemically synthesized
  source 1..20: mol_type = other DNA
acctgttttatatcatctcc

SEQ ID NO: 5796 - DNA, 20 bp, synthetic construct
  misc_feature 1..20: note = chemically synthesized
  source 1..20: mol_type = other DNA
cctgttttatatcatctcca

SEQ ID NO: 5797 - DNA, 20 bp, synthetic construct
  misc_feature 1..20: note = chemically synthesized
  source 1..20: mol_type = other DNA
gttttatatcatctccaggg

SEQ ID NO: 5798 - DNA, 20 bp, synthetic construct
  misc_feature 1..20: note = chemically synthesized
  source 1..20: mol_type = other DNA
ttatatcatctccagggcag

SEQ ID NO: 5799 - DNA, 20 bp, synthetic construct
  misc_feature 1..20: note = chemically synthesized
  source 1..20: mol_type = other DNA
tatatcatctccagggcagc

SEQ ID NO: 5800 - DNA, 20 bp, synthetic construct
  misc_feature 1..20: note = chemically synthesized
  source 1..20: mol_type = other DNA
tctccagggcagcaggcact

SEQ ID NO: 5801 - DNA, 20 bp, synthetic construct
  misc_feature 1..20: note = chemically synthesized
  source 1..20: mol_type = other DNA
ctccagggcagcaggcactg

SEQ ID NO: 5802 - DNA, 20 bp, synthetic construct
  misc_feature 1..20: note = chemically synthesized
  source 1..20: mol_type = other DNA
ggcagcaggcactgaggacc

SEQ ID NO: 5803 - DNA, 20 bp, synthetic construct
  misc_feature 1..20: note = chemically synthesized
  source 1..20: mol_type = other DNA
gcagcaggcactgaggaccc

SEQ ID NO: 5804 - DNA, 20 bp, synthetic construct
  misc_feature 1..20: note = chemically synthesized
  source 1..20: mol_type = other DNA
cagcaggcactgaggaccca

SEQ ID NO: 5805 - DNA, 20 bp, synthetic construct
  misc_feature 1..20: note = chemically synthesized
  source 1..20: mol_type = other DNA
gcactgaggacccagggcgc

SEQ ID NO: 5806 - DNA, 20 bp, synthetic construct
  misc_feature 1..20: note = chemically synthesized
  source 1..20: mol_type = other DNA
cactgaggacccagggcgct

SEQ ID NO: 5807 - DNA, 20 bp, synthetic construct
  misc_feature 1..20: note = chemically synthesized
  source 1..20: mol_type = other DNA
aggacccagggcgctgggca

SEQ ID NO: 5808 - DNA, 20 bp, synthetic construct
  misc_feature 1..20: note = chemically synthesized
  source 1..20: mol_type = other DNA
ggacccagggcgctgggcaa

SEQ ID NO: 5809 - DNA, 20 bp, synthetic construct
  misc_feature 1..20: note = chemically synthesized
  source 1..20: mol_type = other DNA
ggcaaaggtcacctgctgac

SEQ ID NO: 5810 - DNA, 20 bp, synthetic construct
  misc_feature 1..20: note = chemically synthesized
  source 1..20: mol_type = other DNA
aaaggtcacctgctgaccag

SEQ ID NO: 5811 - DNA, 20 bp, synthetic construct
  misc_feature 1..20: note = chemically synthesized
  source 1..20: mol_type = other DNA
aggtcacctgctgaccagtg

SEQ ID NO: 5812 - DNA, 20 bp, synthetic construct
  misc_feature 1..20: note = chemically synthesized
  source 1..20: mol_type = other DNA
acctgctgaccagtggagat

SEQ ID NO: 5813 - DNA, 20 bp, synthetic construct
  misc_feature 1..20: note = chemically synthesized
  source 1..20: mol_type = other DNA
cctgctgaccagtggagatg

SEQ ID NO: 5814 - DNA, 20 bp, synthetic construct
  misc_feature 1..20: note = chemically synthesized
  source 1..20: mol_type = other DNA
ctgctgaccagtggagatga

SEQ ID NO: 5815 - DNA, 20 bp, synthetic construct
  misc_feature 1..20: note = chemically synthesized
  source 1..20: mol_type = other DNA
accagtggagatgagggcct

SEQ ID NO: 5816 - DNA, 20 bp, synthetic construct
  misc_feature 1..20: note = chemically synthesized
  source 1..20: mol_type = other DNA
ccagtggagatgagggcctg

SEQ ID NO: 5817 - DNA, 20 bp, synthetic construct
  misc_feature 1..20: note = chemically synthesized
  source 1..20: mol_type = other DNA
gtggagatgagggcctgagg

SEQ ID NO: 5818 - DNA, 20 bp, synthetic construct
  misc_feature 1..20: note = chemically synthesized
  source 1..20: mol_type = other DNA
tggagatgagggcctgaggc

SEQ ID NO: 5819 - DNA, 20 bp, synthetic construct
  misc_feature 1..20: note = chemically synthesized
  source 1..20: mol_type = other DNA
ggagatgagggcctgaggca

SEQ ID NO: 5820 - DNA, 20 bp, synthetic construct
  misc_feature 1..20: note = chemically synthesized
  source 1..20: mol_type = other DNA
agggcctgaggcagggtgtc

SEQ ID NO: 5821 - DNA, 20 bp, synthetic construct
  misc_feature 1..20: note = chemically synthesized
  source 1..20: mol_type = other DNA
tgaggcagggtgtccagatg

SEQ ID NO: 5822 - DNA, 20 bp, synthetic construct
  misc_feature 1..20: note = chemically synthesized
  source 1..20: mol_type = other DNA
gcagggtgtccagatgcagc

SEQ ID NO: 5823 - DNA, 20 bp, synthetic construct
  misc_feature 1..20: note = chemically synthesized
  source 1..20: mol_type = other DNA
gggtgtccagatgcagcaag

SEQ ID NO: 5824 - DNA, 20 bp, synthetic construct
  misc_feature 1..20: note = chemically synthesized
  source 1..20: mol_type = other DNA
ggtgtccagatgcagcaagc

SEQ ID NO: 5825 - DNA, 20 bp, synthetic construct
  misc_feature 1..20: note = chemically synthesized
  source 1..20: mol_type = other DNA
gtccagatgcagcaagcggg

SEQ ID NO: 5826 - DNA, 20 bp, synthetic construct
  misc_feature 1..20: note = chemically synthesized
  source 1..20: mol_type = other DNA
tccagatgcagcaagcgggc

SEQ ID NO: 5827 - DNA, 20 bp, synthetic construct
  misc_feature 1..20: note = chemically synthesized
  source 1..20: mol_type = other DNA
cagatgcagcaagcgggcgg

SEQ ID NO: 5828 - DNA, 20 bp, synthetic construct
  misc_feature 1..20: note = chemically synthesized
  source 1..20: mol_type = other DNA
gatgcagcaagcgggcggga

SEQ ID NO: 5829 - DNA, 20 bp, synthetic construct
  misc_feature 1..20: note = chemically synthesized
  source 1..20: mol_type = other DNA
cagcaagcgggcgggagagt

SEQ ID NO: 5830 - DNA, 20 bp, synthetic construct
  misc_feature 1..20: note = chemically synthesized
  source 1..20: mol_type = other DNA
agcaagcgggcgggagagtt

SEQ ID NO: 5831 - DNA, 20 bp, synthetic construct
  misc_feature 1..20: note = chemically synthesized
  source 1..20: mol_type = other DNA
cgggagagttgggaaatccc

SEQ ID NO: 5832 - DNA, 20 bp, synthetic construct
  misc_feature 1..20: note = chemically synthesized
  source 1..20: mol_type = other DNA
gggagagttgggaaatccct

SEQ ID NO: 5833 - DNA, 20 bp, synthetic construct
  misc_feature 1..20: note = chemically synthesized
  source 1..20: mol_type = other DNA
gagagttgggaaatccctag

SEQ ID NO: 5834 - DNA, 20 bp, synthetic construct
  misc_feature 1..20: note = chemically synthesized
  source 1..20: mol_type = other DNA
tgggaaatccctaggagact

SEQ ID NO: 5835 - DNA, 20 bp, synthetic construct
  misc_feature 1..20: note = chemically synthesized
  source 1..20: mol_type = other DNA
ggtgacctttgcccagcgcc

SEQ ID NO: 5836 - DNA, 20 bp, synthetic construct
  misc_feature 1..20: note = chemically synthesized
  source 1..20: mol_type = other DNA
gaggggaaagaggaggggag

SEQ ID NO: 5837 - DNA, 20 bp, synthetic construct
  misc_feature 1..20: note = chemically synthesized
  source 1..20: mol_type = other DNA
taaggaagcctcggagctgg

SEQ ID NO: 5838 - DNA, 20 bp, synthetic construct
  misc_feature 1..20: note = chemically synthesized
  source 1..20: mol_type = other DNA
gaagaacatggaggcccggg

SEQ ID NO: 5839 - DNA, 20 bp, synthetic construct
  misc_feature 1..20: note = chemically synthesized
  source 1..20: mol_type = other DNA
cacttgcccaaagctacaca

SEQ ID NO: 5840 - DNA, 20 bp, synthetic construct
  misc_feature 1..20: note = chemically synthesized
  source 1..20: mol_type = other DNA
gtgccttgatgttcagtctg

SEQ ID NO: 5841 - DNA, 20 bp, synthetic construct
  misc_feature 1..20: note = chemically synthesized
  source 1..20: mol_type = other DNA
gccacgccacctccccaggg

SEQ ID NO: 5842 - DNA, 20 bp, synthetic construct
  misc_feature 1..20: note = chemically synthesized
  source 1..20: mol_type = other DNA
ggtccagaggcatggggacc

SEQ ID NO: 5843 - DNA, 20 bp, synthetic construct
  misc_feature 1..20: note = chemically synthesized
  source 1..20: mol_type = other DNA
aacagaggtgccatgcagcc

SEQ ID NO: 5844 - DNA, 20 bp, synthetic construct
  misc_feature 1..20: note = chemically synthesized
  source 1..20: mol_type = other DNA
tggtgggactgggctggggg

SEQ ID NO: 5845 - DNA, 20 bp, synthetic construct
  misc_feature 1..20: note = chemically synthesized
  source 1..20: mol_type = other DNA
gcgccaggagggcaacaaca

SEQ ID NO: 5846 - DNA, 20 bp, synthetic construct
  misc_feature 1..20: note = chemically synthesized
  source 1..20: mol_type = other DNA
cccctaaggtagaaccttag

SEQ ID NO: 5847 - DNA, 20 bp, synthetic construct
  misc_feature 1..20: note = chemically synthesized
  source 1..20: mol_type = other DNA
ccttagctgggtctgccaga

SEQ ID NO: 5848 - DNA, 20 bp, synthetic construct
  misc_feature 1..20: note = chemically synthesized
  source 1..20: mol_type = other DNA
agggggactggtgaggggcg

SEQ ID NO: 5849 - DNA, 20 bp, synthetic construct
  misc_feature 1..20: note = chemically synthesized
  source 1..20: mol_type = other DNA
ggatcgaggcccaaagggag

SEQ ID NO: 5850 - DNA, 20 bp, synthetic construct
  misc_feature 1..20: note = chemically synthesized
  source 1..20: mol_type = other DNA
gaggcccaaagggaggtggg

SEQ ID NO: 5851 - DNA, 20 bp, synthetic construct
  misc_feature 1..20: note = chemically synthesized
  source 1..20: mol_type = other DNA
agccaacatgctgtgtgtct

SEQ ID NO: 5852 - DNA, 20 bp, synthetic construct
  misc_feature 1..20: note = chemically synthesized
  source 1..20: mol_type = other DNA
caggcctcagtttccctgtc

SEQ ID NO: 5853 - DNA, 20 bp, synthetic construct
  misc_feature 1..20: note = chemically synthesized
  source 1..20: mol_type = other DNA
ttcctccagccctaagcctg

SEQ ID NO: 5854 - DNA, 20 bp, synthetic construct
  misc_feature 1..20: note = chemically synthesized
  source 1..20: mol_type = other DNA
atgttcttcaggttatgatg

SEQ ID NO: 5855 - DNA, 20 bp, synthetic construct
  misc_feature 1..20: note = chemically synthesized
  source 1..20: mol_type = other DNA
tacctggagcagctgcctct

SEQ ID NO: 5856 - DNA, 20 bp, synthetic construct
  misc_feature 1..20: note = chemically synthesized
  source 1..20: mol_type = other DNA
tgaactgagcagacaggcag

SEQ ID NO: 5857 - DNA, 20 bp, synthetic construct
  misc_feature 1..20: note = chemically synthesized
  source 1..20: mol_type = other DNA
gtggagatgagggcctgagg

SEQ ID NO: 5858 - DNA, 20 bp, synthetic construct
  misc_feature 1..20: note = chemically synthesized
  source 1..20: mol_type = other DNA
cagatgcagcaagcgggcgg

SEQ ID NO: 5859 - DNA, 20 bp, synthetic construct
  misc_feature 1..20: note = chemically synthesized
  source 1..20: mol_type = other DNA
gttgggaaatccctaggaga

SEQ ID NO: 5860 - DNA, 20 bp, synthetic construct
  misc_feature 1..20: note = chemically synthesized
  source 1..20: mol_type = other DNA
aaactgaggcctggagaggg

SEQ ID NO: 5861 - DNA, 20 bp, synthetic construct
  misc_feature 1..20: note = chemically synthesized
  source 1..20: mol_type = other DNA
agggaggtgggtgggatgga

SEQ ID NO: 5862 - DNA, 20 bp, synthetic construct
  misc_feature 1..20: note = chemically synthesized
  source 1..20: mol_type = other DNA
cttcctccagccctaagcct

SEQ ID NO: 5863 - DNA, 20 bp, synthetic construct
  misc_feature 1..20: note = chemically synthesized
  source 1..20: mol_type = other DNA
ctgctgccctggagatgata

SEQ ID NO: 5864 - DNA, 20 bp, synthetic construct
  misc_feature 1..20: note = chemically synthesized
  source 1..20: mol_type = other DNA
gaggtgggtgggatggagca

SEQ ID NO: 5865 - DNA, 20 bp, synthetic construct
  misc_feature 1..20: note = chemically synthesized
  source 1..20: mol_type = other DNA
agggatttcccaactctccc

SEQ ID NO: 5866 - DNA, 20 bp, synthetic construct
  misc_feature 1..20: note = chemically synthesized
  source 1..20: mol_type = other DNA
gcaggttcccccctcattct

SEQ ID NO: 5867 - DNA, 20 bp, synthetic construct
  misc_feature 1..20: note = chemically synthesized
  source 1..20: mol_type = other DNA
gtgccttgatgttcagtctg

SEQ ID NO: 5868 - DNA, 20 bp, synthetic construct
  misc_feature 1..20: note = chemically synthesized
  source 1..20: mol_type = other DNA
gcccccagcccagtcccacc

SEQ ID NO: 5869 - DNA, 20 bp, synthetic construct
  misc_feature 1..20: note = chemically synthesized
  source 1..20: mol_type = other DNA
ccaacatgctgtgtgtcttt

SEQ ID NO: 5870 - DNA, 20 bp, synthetic construct
  misc_feature 1..20: note = chemically synthesized
  source 1..20: mol_type = other DNA
atttctggccctctccaggc

SEQ ID NO: 5871 - DNA, 20 bp, synthetic construct
  misc_feature 1..20: note = chemically synthesized
  source 1..20: mol_type = other DNA
tggggtaggactgggctgtc

SEQ ID NO: 5872 - DNA, 20 bp, synthetic construct
  misc_feature 1..20: note = chemically synthesized
  source 1..20: mol_type = other DNA
acttccagccccaccccctg

SEQ ID NO: 5873 - DNA, 20 bp, synthetic construct
  misc_feature 1..20: note = chemically synthesized
  source 1..20: mol_type = other DNA
ggggggcacccgtccagctc

SEQ ID NO: 5874 - DNA, 20 bp, synthetic construct
  misc_feature 1..20: note = chemically synthesized
  source 1..20: mol_type = other DNA
gaggcttccttagctctagc

SEQ ID NO: 5875 - DNA, 20 bp, synthetic construct
  misc_feature 1..20: note = chemically synthesized
  source 1..20: mol_type = other DNA
tagctctagcaagtgcttct

SEQ ID NO: 5876 - DNA, 20 bp, synthetic construct
  misc_feature 1..20: note = chemically synthesized
  source 1..20: mol_type = other DNA
agacaggcaggagggttctg

SEQ ID NO: 5877 - DNA, 22 bp, synthetic construct
  misc_feature 1..22: note = chemically synthesized
  source 1..22: mol_type = other DNA
agtctcctagggatttcccaac

SEQ ID NO: 5878 - DNA, 22 bp, synthetic construct
  misc_feature 1..22: note = chemically synthesized
  source 1..22: mol_type = other DNA
ctagggatttcccaactctccc

SEQ ID NO: 5879 - DNA, 22 bp, synthetic construct
  misc_feature 1..22: note = chemically synthesized
  source 1..22: mol_type = other DNA
gggatttcccaactctcccgcc

SEQ ID NO: 5880 - DNA, 22 bp, synthetic construct
  misc_feature 1..22: note = chemically synthesized
  source 1..22: mol_type = other DNA
cccaactctcccgcccgcttgc

SEQ ID NO: 5881 - DNA, 22 bp, synthetic construct
  misc_feature 1..22: note = chemically synthesized
  source 1..22: mol_type = other DNA
ccaactctcccgcccgcttgct

SEQ ID NO: 5882 - DNA, 22 bp, synthetic construct
  misc_feature 1..22: note = chemically synthesized
  source 1..22: mol_type = other DNA
tcccgcccgcttgctgcatctg

SEQ ID NO: 5883 - DNA, 22 bp, synthetic construct
  misc_feature 1..22: note = chemically synthesized
  source 1..22: mol_type = other DNA
ccgcccgcttgctgcatctgga

SEQ ID NO: 5884 - DNA, 22 bp, synthetic construct
  misc_feature 1..22: note = chemically synthesized
  source 1..22: mol_type = other DNA
gctgcatctggacaccctgcct

SEQ ID NO: 5885 - DNA, 22 bp, synthetic construct
  misc_feature 1..22: note = chemically synthesized
  source 1..22: mol_type = other DNA
ctgcatctggacaccctgcctc

SEQ ID NO: 5886 - DNA, 22 bp, synthetic construct
  misc_feature 1..22: note = chemically synthesized
  source 1..22: mol_type = other DNA
catctggacaccctgcctcagg

SEQ ID NO: 5887 - DNA, 22 bp, synthetic construct
  misc_feature 1..22: note = chemically synthesized
  source 1..22: mol_type = other DNA
gacaccctgcctcaggccctca

SEQ ID NO: 5888 - DNA, 22 bp, synthetic construct
  misc_feature 1..22: note = chemically synthesized
  source 1..22: mol_type = other DNA
cctcaggccctcatctccactg

SEQ ID NO: 5889 - DNA, 22 bp, synthetic construct
  misc_feature 1..22: note = chemically synthesized
  source 1..22: mol_type = other DNA
aggccctcatctccactggtca

SEQ ID NO: 5890 - DNA, 22 bp, synthetic construct
  misc_feature 1..22: note = chemically synthesized
  source 1..22: mol_type = other DNA
atctccactggtcagcaggtga

SEQ ID NO: 5891 - DNA, 22 bp, synthetic construct
  misc_feature 1..22: note = chemically synthesized
  source 1..22: mol_type = other DNA
cactggtcagcaggtgaccttt

SEQ ID NO: 5892 - DNA, 22 bp, synthetic construct
  misc_feature 1..22: note = chemically synthesized
  source 1..22: mol_type = other DNA
gtcagcaggtgacctttgccca

SEQ ID NO: 5893 - DNA, 22 bp, synthetic construct
  misc_feature 1..22: note = chemically synthesized
  source 1..22: mol_type = other DNA
tgcccagcgccctgggtcctca

SEQ ID NO: 5894 - DNA, 22 bp, synthetic construct
  misc_feature 1..22: note = chemically synthesized
  source 1..22: mol_type = other DNA
gcccagcgccctgggtcctcag

SEQ ID NO: 5895 - DNA, 22 bp, synthetic construct
  misc_feature 1..22: note = chemically synthesized
  source 1..22: mol_type = other DNA
cccagcgccctgggtcctcagt

SEQ ID NO: 5896 - DNA, 22 bp, synthetic construct
  misc_feature 1..22: note = chemically synthesized
  source 1..22: mol_type = other DNA
ggtcctcagtgcctgctgccct

SEQ ID NO: 5897 - DNA, 22 bp, synthetic construct
  misc_feature 1..22: note = chemically synthesized
  source 1..22: mol_type = other DNA
agtgcctgctgccctggagatg

SEQ ID NO: 5898 - DNA, 22 bp, synthetic construct
  misc_feature 1..22: note = chemically synthesized
  source 1..22: mol_type = other DNA
ctgccctggagatgatataaaa

SEQ ID NO: 5899 - DNA, 22 bp, synthetic construct
  misc_feature 1..22: note = chemically synthesized
  source 1..22: mol_type = other DNA
ccctggagatgatataaaacag

SEQ ID NO: 5900 - DNA, 22 bp, synthetic construct
  misc_feature 1..22: note = chemically synthesized
  source 1..22: mol_type = other DNA
gagatgatataaaacaggtcag

SEQ ID NO: 5901 - DNA, 22 bp, synthetic construct
  misc_feature 1..22: note = chemically synthesized
  source 1..22: mol_type = other DNA
ctgcctgtctgctcagttcatc

SEQ ID NO: 5902 - DNA, 22 bp, synthetic construct
  misc_feature 1..22: note = chemically synthesized
  source 1..22: mol_type = other DNA
cctgtctgctcagttcatccct

SEQ ID NO: 5903 - DNA, 22 bp, synthetic construct
  misc_feature 1..22: note = chemically synthesized
  source 1..22: mol_type = other DNA
tctgctcagttcatccctagag

SEQ ID NO: 5904 - DNA, 22 bp, synthetic construct
  misc_feature 1..22: note = chemically synthesized
  source 1..22: mol_type = other DNA
ctcagttcatccctagaggcag

SEQ ID NO: 5905 - DNA, 22 bp, synthetic construct
  misc_feature 1..22: note = chemically synthesized
  source 1..22: mol_type = other DNA
agttcatccctagaggcagctg

SEQ ID NO: 5906 - DNA, 22 bp, synthetic construct
  misc_feature 1..22: note = chemically synthesized
  source 1..22: mol_type = other DNA
atccctagaggcagctgctcca

SEQ ID NO: 5907 - DNA, 22 bp, synthetic construct
  misc_feature 1..22: note = chemically synthesized
  source 1..22: mol_type = other DNA
gaggcagctgctccaggtaatg

SEQ ID NO: 5908 - DNA, 22 bp, synthetic construct
  misc_feature 1..22: note = chemically synthesized
  source 1..22: mol_type = other DNA
ctccaggtaatgccctctgggg

SEQ ID NO: 5909 - DNA, 22 bp, synthetic construct
  misc_feature 1..22: note = chemically synthesized
  source 1..22: mol_type = other DNA
caggtaatgccctctggggagg

SEQ ID NO: 5910 - DNA, 22 bp, synthetic construct
  misc_feature 1..22: note = chemically synthesized
  source 1..22: mol_type = other DNA
tggggaggggaaagaggagggg

SEQ ID NO: 5911 - DNA, 22 bp, synthetic construct
  misc_feature 1..22: note = chemically synthesized
  source 1..22: mol_type = other DNA
gggaggggaaagaggaggggag

SEQ ID NO: 5912 - DNA, 22 bp, synthetic construct
  misc_feature 1..22: note = chemically synthesized
  source 1..22: mol_type = other DNA
cctgcccagcccagccagcaag

SEQ ID NO: 5913 - DNA, 22 bp, synthetic construct
  misc_feature 1..22: note = chemically synthesized
  source 1..22: mol_type = other DNA
cccagcccagccagcaagcctg

SEQ ID NO: 5914 - DNA, 22 bp, synthetic construct
  misc_feature 1..22: note = chemically synthesized
  source 1..22: mol_type = other DNA
gagaagcacttgctagagctaa

SEQ ID NO: 5915 - DNA, 22 bp, synthetic construct
  misc_feature 1..22: note = chemically synthesized
  source 1..22: mol_type = other DNA
gctagagctaaggaagcctcgg

SEQ ID NO: 5916 - DNA, 22 bp, synthetic construct
  misc_feature 1..22: note = chemically synthesized
  source 1..22: mol_type = other DNA
ctagagctaaggaagcctcgga

SEQ ID NO: 5917 - DNA, 22 bp, synthetic construct
  misc_feature 1..22: note = chemically synthesized
  source 1..22: mol_type = other DNA
gagctaaggaagcctcggagct

SEQ ID NO: 5918 - DNA, 22 bp, synthetic construct
  misc_feature 1..22: note = chemically synthesized
  source 1..22: mol_type = other DNA
aggaagcctcggagctggacgg

SEQ ID NO: 5919 - DNA, 22 bp, synthetic construct
  misc_feature 1..22: note = chemically synthesized
  source 1..22: mol_type = other DNA
ggagctggacgggtgcccccca

SEQ ID NO: 5920 - DNA, 22 bp, synthetic construct
  misc_feature 1..22: note = chemically synthesized
  source 1..22: mol_type = other DNA
gacgggtgccccccacccctca

SEQ ID NO: 5921 - DNA, 22 bp, synthetic construct
  misc_feature 1..22: note = chemically synthesized
  source 1..22: mol_type = other DNA
atcataacctgaagaacatgga

SEQ ID NO: 5922 - DNA, 22 bp, synthetic construct
  misc_feature 1..22: note = chemically synthesized
  source 1..22: mol_type = other DNA
aagaacatggaggcccgggagg

SEQ ID NO: 5923 - DNA, 22 bp, synthetic construct
  misc_feature 1..22: note = chemically synthesized
  source 1..22: mol_type = other DNA
gcccaaagctacacagggggtg

SEQ ID NO: 5924 - DNA, 22 bp, synthetic construct
  misc_feature 1..22: note = chemically synthesized
  source 1..22: mol_type = other DNA
cccaaagctacacagggggtgg

SEQ ID NO: 5925 - DNA, 22 bp, synthetic construct
  misc_feature 1..22: note = chemically synthesized
  source 1..22: mol_type = other DNA
cacagggggtggggctggaagt

SEQ ID NO: 5926 - DNA, 22 bp, synthetic construct
  misc_feature 1..22: note = chemically synthesized
  source 1..22: mol_type = other DNA
gaagtggctccaagtgcaggtt

SEQ ID NO: 5927 - DNA, 22 bp, synthetic construct
  misc_feature 1..22: note = chemically synthesized
  source 1..22: mol_type = other DNA
caagtgcaggttcccccctcat

SEQ ID NO: 5928 - DNA, 22 bp, synthetic construct
  misc_feature 1..22: note = chemically synthesized
  source 1..22: mol_type = other DNA
ccccctcattcttcaggcttag

SEQ ID NO: 5929 - DNA, 22 bp, synthetic construct
  misc_feature 1..22: note = chemically synthesized
  source 1..22: mol_type = other DNA
attcttcaggcttagggctgga

SEQ ID NO: 5930 - DNA, 22 bp, synthetic construct
  misc_feature 1..22: note = chemically synthesized
  source 1..22: mol_type = other DNA
ttcaggcttagggctggaggaa

SEQ ID NO: 5931 - DNA, 22 bp, synthetic construct
  misc_feature 1..22: note = chemically synthesized
  source 1..22: mol_type = other DNA
caggcttagggctggaggaagc

SEQ ID NO: 5932 - DNA, 22 bp, synthetic construct
  misc_feature 1..22: note = chemically synthesized
  source 1..22: mol_type = other DNA
aggcttagggctggaggaagcc

SEQ ID NO: 5933 - DNA, 22 bp, synthetic construct
  misc_feature 1..22: note = chemically synthesized
  source 1..22: mol_type = other DNA
agggctggaggaagccttagac

SEQ ID NO: 5934 - DNA, 22 bp, synthetic construct
  misc_feature 1..22: note = chemically synthesized
  source 1..22: mol_type = other DNA
gggctggaggaagccttagaca

SEQ ID NO: 5935 - DNA, 22 bp, synthetic construct
  misc_feature 1..22: note = chemically synthesized
  source 1..22: mol_type = other DNA
gaggaagccttagacagcccag

SEQ ID NO: 5936 - DNA, 22 bp, synthetic construct
  misc_feature 1..22: note = chemically synthesized
  source 1..22: mol_type = other DNA
agacagcccagtcctaccccag

SEQ ID NO: 5937 - DNA, 22 bp, synthetic construct
  misc_feature 1..22: note = chemically synthesized
  source 1..22: mol_type = other DNA
gacagcccagtcctaccccaga

SEQ ID NO: 5938 - DNA, 22 bp, synthetic construct
  misc_feature 1..22: note = chemically synthesized
  source 1..22: mol_type = other DNA
ccccagacagggaaactgaggc

SEQ ID NO: 5939 - DNA, 22 bp, synthetic construct
  misc_feature 1..22: note = chemically synthesized
  source 1..22: mol_type = other DNA
aggcctggagagggccagaaat

SEQ ID NO: 5940 - DNA, 22 bp, synthetic construct
  misc_feature 1..22: note = chemically synthesized
  source 1..22: mol_type = other DNA
gagagggccagaaatcacccaa

SEQ ID NO: 5941 - DNA, 22 bp, synthetic construct
  misc_feature 1..22: note = chemically synthesized
  source 1..22: mol_type = other DNA
gctggactggacggagatcagt

SEQ ID NO: 5942 - DNA, 22 bp, synthetic construct
  misc_feature 1..22: note = chemically synthesized
  source 1..22: mol_type = other DNA
gactggacggagatcagtccag

SEQ ID NO: 5943 - DNA, 22 bp, synthetic construct
  misc_feature 1..22: note = chemically synthesized
  source 1..22: mol_type = other DNA
gacggagatcagtccagaccgc

SEQ ID NO: 5944 - DNA, 22 bp, synthetic construct
  misc_feature 1..22: note = chemically synthesized
  source 1..22: mol_type = other DNA
gatgttcagtctggtgggtttt

SEQ ID NO: 5945 - DNA, 22 bp, synthetic construct
  misc_feature 1..22: note = chemically synthesized
  source 1..22: mol_type = other DNA
atgttcagtctggtgggttttc

SEQ ID NO: 5946 - DNA, 22 bp, synthetic construct
  misc_feature 1..22: note = chemically synthesized
  source 1..22: mol_type = other DNA
agtctggtgggttttctgctcc

SEQ ID NO: 5947 - DNA, 22 bp, synthetic construct
  misc_feature 1..22: note = chemically synthesized
  source 1..22: mol_type = other DNA
gtgggttttctgctccatccca

SEQ ID NO: 5948 - DNA, 22 bp, synthetic construct
  misc_feature 1..22: note = chemically synthesized
  source 1..22: mol_type = other DNA
tctgctccatcccacccacctc

SEQ ID NO: 5949 - DNA, 22 bp, synthetic construct
  misc_feature 1..22: note = chemically synthesized
  source 1..22: mol_type = other DNA
ctgctccatcccacccacctcc

SEQ ID NO: 5950 - DNA, 22 bp, synthetic construct
  misc_feature 1..22: note = chemically synthesized
  source 1..22: mol_type = other DNA
tgctccatcccacccacctccc

SEQ ID NO: 5951 - DNA, 22 bp, synthetic construct
  misc_feature 1..22: note = chemically synthesized
  source 1..22: mol_type = other DNA
ctccatcccacccacctccctt

SEQ ID NO: 5952 - DNA, 22 bp, synthetic construct
  misc_feature 1..22: note = chemically synthesized
  source 1..22: mol_type = other DNA
catcccacccacctccctttgg

SEQ ID NO: 5953 - DNA, 22 bp, synthetic construct
  misc_feature 1..22: note = chemically synthesized
  source 1..22: mol_type = other DNA
cctttgggcctcgatccctcgc

SEQ ID NO: 5954 - DNA, 22 bp, synthetic construct
  misc_feature 1..22: note = chemically synthesized
  source 1..22: mol_type = other DNA
tgggcctcgatccctcgcccct

SEQ ID NO: 5955 - DNA, 22 bp, synthetic construct
  misc_feature 1..22: note = chemically synthesized
  source 1..22: mol_type = other DNA
gggcctcgatccctcgcccctc

SEQ ID NO: 5956 - DNA, 22 bp, synthetic construct
  misc_feature 1..22: note = chemically synthesized
  source 1..22: mol_type = other DNA
ggcctcgatccctcgcccctca

SEQ ID NO: 5957 - DNA, 22 bp, synthetic construct
  misc_feature 1..22: note = chemically synthesized
  source 1..22: mol_type = other DNA
gatccctcgcccctcaccagtc

SEQ ID NO: 5958 - DNA, 22 bp, synthetic construct
  misc_feature 1..22: note = chemically synthesized
  source 1..22: mol_type = other DNA
gcccctcaccagtcccccttct

SEQ ID NO: 5959 - DNA, 22 bp, synthetic construct
  misc_feature 1..22: note = chemically synthesized
  source 1..22: mol_type = other DNA
accagtcccccttctgagagcc

SEQ ID NO: 5960 - DNA, 22 bp, synthetic construct
  misc_feature 1..22: note = chemically synthesized
  source 1..22: mol_type = other DNA
ctgagagcccgtattagcaggg

SEQ ID NO: 5961 - DNA, 22 bp, synthetic construct
  misc_feature 1..22: note = chemically synthesized
  source 1..22: mol_type = other DNA
tgagagcccgtattagcaggga

SEQ ID NO: 5962 - DNA, 22 bp, synthetic construct
  misc_feature 1..22: note = chemically synthesized
  source 1..22: mol_type = other DNA
agagcccgtattagcagggagc

SEQ ID NO: 5963 - DNA, 22 bp, synthetic construct
  misc_feature 1..22: note = chemically synthesized
  source 1..22: mol_type = other DNA
gcagggagccggcccctactcc

SEQ ID NO: 5964 - DNA, 22 bp, synthetic construct
  misc_feature 1..22: note = chemically synthesized
  source 1..22: mol_type = other DNA
ctccttctggcagacccagcta

SEQ ID NO: 5965 - DNA, 22 bp, synthetic construct
  misc_feature 1..22: note = chemically synthesized
  source 1..22: mol_type = other DNA
cttctggcagacccagctaagg

SEQ ID NO: 5966 - DNA, 22 bp, synthetic construct
  misc_feature 1..22: note = chemically synthesized
  source 1..22: mol_type = other DNA
ctggcagacccagctaaggttc

SEQ ID NO: 5967 - DNA, 22 bp, synthetic construct
  misc_feature 1..22: note = chemically synthesized
  source 1..22: mol_type = other DNA
tggcagacccagctaaggttct

SEQ ID NO: 5968 - DNA, 22 bp, synthetic construct
  misc_feature 1..22: note = chemically synthesized
  source 1..22: mol_type = other DNA
gcagacccagctaaggttctac

SEQ ID NO: 5969 - DNA, 22 bp, synthetic construct
  misc_feature 1..22: note = chemically synthesized
  source 1..22: mol_type = other DNA
aggttctaccttaggggccacg

SEQ ID NO: 5970 - DNA, 22 bp, synthetic construct
  misc_feature 1..22: note = chemically synthesized
  source 1..22: mol_type = other DNA
taccttaggggccacgccacct

SEQ ID NO: 5971 - DNA, 22 bp, synthetic construct
  misc_feature 1..22: note = chemically synthesized
  source 1..22: mol_type = other DNA
ccttaggggccacgccacctcc

SEQ ID NO: 5972 - DNA, 22 bp, synthetic construct
  misc_feature 1..22: note = chemically synthesized
  source 1..22: mol_type = other DNA
aggggccacgccacctccccag

SEQ ID NO: 5973 - DNA, 22 bp, synthetic construct
  misc_feature 1..22: note = chemically synthesized
  source 1..22: mol_type = other DNA
ggggccacgccacctccccagg

SEQ ID NO: 5974 - DNA, 22 bp, synthetic construct
  misc_feature 1..22: note = chemically synthesized
  source 1..22: mol_type = other DNA
cccagggaggggtccagaggca

SEQ ID NO: 5975 - DNA, 22 bp, synthetic construct
  misc_feature 1..22: note = chemically synthesized
  source 1..22: mol_type = other DNA
gggtgcccctcacaggacactt

SEQ ID NO: 5976 - DNA, 22 bp, synthetic construct
  misc_feature 1..22: note = chemically synthesized
  source 1..22: mol_type = other DNA
acaggacacttccttgcaggaa

SEQ ID NO: 5977 - DNA, 22 bp, synthetic construct
  misc_feature 1..22: note = chemically synthesized
  source 1..22: mol_type = other DNA
ccttgcaggaacagaggtgcca

SEQ ID NO: 5978 - DNA, 22 bp, synthetic construct
  misc_feature 1..22: note = chemically synthesized
  source 1..22: mol_type = other DNA
cttgcaggaacagaggtgccat

SEQ ID NO: 5979 - DNA, 22 bp, synthetic construct
  misc_feature 1..22: note = chemically synthesized
  source 1..22: mol_type = other DNA
gcaggaacagaggtgccatgca

SEQ ID NO: 5980 - DNA, 22 bp, synthetic construct
  misc_feature 1..22: note = chemically synthesized
  source 1..22: mol_type = other DNA
caggaacagaggtgccatgcag

SEQ ID NO: 5981 - DNA, 22 bp, synthetic construct
  misc_feature 1..22: note = chemically synthesized
  source 1..22: mol_type = other DNA
cttgttgttgccctcctggcgc

SEQ ID NO: 5982 - DNA, 22 bp, synthetic construct
  misc_feature 1..22: note = chemically synthesized
  source 1..22: mol_type = other DNA
gttgttgccctcctggcgctcc

SEQ ID NO: 5983 - DNA, 22 bp, synthetic construct
  misc_feature 1..22: note = chemically synthesized
  source 1..22: mol_type = other DNA
ttgttgccctcctggcgctcct

SEQ ID NO: 5984 - DNA, 22 bp, synthetic construct
  misc_feature 1..22: note = chemically synthesized
  source 1..22: mol_type = other DNA
ttgccctcctggcgctcctggc

SEQ ID NO: 5985 - DNA, 22 bp, synthetic construct
  misc_feature 1..22: note = chemically synthesized
  source 1..22: mol_type = other DNA
ccctcctggcgctcctggcctc

SEQ ID NO: 5986 - DNA, 22 bp, synthetic construct
  misc_feature 1..22: note = chemically synthesized
  source 1..22: mol_type = other DNA
ctggcgctcctggcctctgccc

SEQ ID NO: 5987 - DNA, 22 bp, synthetic construct
  misc_feature 1..22: note = chemically synthesized
  source 1..22: mol_type = other DNA
gcgctcctggcctctgcccgta

SEQ ID NO: 5988 - DNA, 22 bp, synthetic construct
  misc_feature 1..22: note = chemically synthesized
  source 1..22: mol_type = other DNA
ctggcctctgcccgtaagcact

SEQ ID NO: 5989 - DNA, 22 bp, synthetic construct
  misc_feature 1..22: note = chemically synthesized
  source 1..22: mol_type = other DNA
gcctctgcccgtaagcacttgg

SEQ ID NO: 5990 - DNA, 22 bp, synthetic construct
  misc_feature 1..22: note = chemically synthesized
  source 1..22: mol_type = other DNA
tgcccgtaagcacttggtggga

SEQ ID NO: 5991 - DNA, 22 bp, synthetic construct
  misc_feature 1..22: note = chemically synthesized
  source 1..22: mol_type = other DNA
cccgtaagcacttggtgggact

SEQ ID NO: 5992 - DNA, 22 bp, synthetic construct
  misc_feature 1..22: note = chemically synthesized
  source 1..22: mol_type = other DNA
ggtgggactgggctgggggcag

SEQ ID NO: 5993 - DNA, 22 bp, synthetic construct
  misc_feature 1..22: note = chemically synthesized
  source 1..22: mol_type = other DNA
gtgggactgggctgggggcagg

SEQ ID NO: 5994 - DNA, 22 bp, synthetic construct
  misc_feature 1..22: note = chemically synthesized
  source 1..22: mol_type = other DNA
cccccagcccagtcccaccaag

SEQ ID NO: 5995 - DNA, 22 bp, synthetic construct
  misc_feature 1..22: note = chemically synthesized
  source 1..22: mol_type = other DNA
acgggcagaggccaggagcgcc

SEQ ID NO: 5996 - DNA, 22 bp, synthetic construct
  misc_feature 1..22: note = chemically synthesized
  source 1..22: mol_type = other DNA
cgggcagaggccaggagcgcca

SEQ ID NO: 5997 - DNA, 22 bp, synthetic construct
  misc_feature 1..22: note = chemically synthesized
  source 1..22: mol_type = other DNA
catggcacctctgttcctgcaa

SEQ ID NO: 5998 - DNA, 22 bp, synthetic construct
  misc_feature 1..22: note = chemically synthesized
  source 1..22: mol_type = other DNA
tgttcctgcaaggaagtgtcct

SEQ ID NO: 5999 - DNA, 22 bp, synthetic construct
  misc_feature 1..22: note = chemically synthesized
  source 1..22: mol_type = other DNA
ttcctgcaaggaagtgtcctgt

SEQ ID NO: 6000 - DNA, 22 bp, synthetic construct
  misc_feature 1..22: note = chemically synthesized
  source 1..22: mol_type = other DNA
ctgcaaggaagtgtcctgtgag

SEQ ID NO: 6001 - DNA, 22 bp, synthetic construct
  misc_feature 1..22: note = chemically synthesized
  source 1..22: mol_type = other DNA
caaggaagtgtcctgtgagggg

SEQ ID NO: 6002 - DNA, 22 bp, synthetic construct
  misc_feature 1..22: note = chemically synthesized
  source 1..22: mol_type = other DNA
tgaggggcaccccaggtcccca

SEQ ID NO: 6003 - DNA, 22 bp, synthetic construct
  misc_feature 1..22: note = chemically synthesized
  source 1..22: mol_type = other DNA
tggacccctccctggggaggtg

SEQ ID NO: 6004 - DNA, 22 bp, synthetic construct
  misc_feature 1..22: note = chemically synthesized
  source 1..22: mol_type = other DNA
gacccctccctggggaggtggc

SEQ ID NO: 6005 - DNA, 22 bp, synthetic construct
  misc_feature 1..22: note = chemically synthesized
  source 1..22: mol_type = other DNA
cctggggaggtggcgtggcccc

SEQ ID NO: 6006 - DNA, 22 bp, synthetic construct
  misc_feature 1..22: note = chemically synthesized
  source 1..22: mol_type = other DNA
gggaggtggcgtggcccctaag

SEQ ID NO: 6007 - DNA, 22 bp, synthetic construct
  misc_feature 1..22: note = chemically synthesized
  source 1..22: mol_type = other DNA
aggtagaaccttagctgggtct

SEQ ID NO: 6008 - DNA, 22 bp, synthetic construct
  misc_feature 1..22: note = chemically synthesized
  source 1..22: mol_type = other DNA
agctgggtctgccagaaggagt

SEQ ID NO: 6009 - DNA, 22 bp, synthetic construct
  misc_feature 1..22: note = chemically synthesized
  source 1..22: mol_type = other DNA
gctgggtctgccagaaggagta

SEQ ID NO: 6010 - DNA, 22 bp, synthetic construct
  misc_feature 1..22: note = chemically synthesized
  source 1..22: mol_type = other DNA
ggtctgccagaaggagtagggg

SEQ ID NO: 6011 - DNA, 22 bp, synthetic construct
  misc_feature 1..22: note = chemically synthesized
  source 1..22: mol_type = other DNA
ccagaaggagtaggggccggct

SEQ ID NO: 6012 - DNA, 22 bp, synthetic construct
  misc_feature 1..22: note = chemically synthesized
  source 1..22: mol_type = other DNA
cctgctaatacgggctctcaga

SEQ ID NO: 6013 - DNA, 22 bp, synthetic construct
  misc_feature 1..22: note = chemically synthesized
  source 1..22: mol_type = other DNA
ctaatacgggctctcagaaggg

SEQ ID NO: 6014 - DNA, 22 bp, synthetic construct
  misc_feature 1..22: note = chemically synthesized
  source 1..22: mol_type = other DNA
atacgggctctcagaaggggga

SEQ ID NO: 6015 - DNA, 22 bp, synthetic construct
  misc_feature 1..22: note = chemically synthesized
  source 1..22: mol_type = other DNA
tcagaagggggactggtgaggg

SEQ ID NO: 6016 - DNA, 22 bp, synthetic construct
  misc_feature 1..22: note = chemically synthesized
  source 1..22: mol_type = other DNA
agaagggggactggtgaggggc

SEQ ID NO: 6017 - DNA, 22 bp, synthetic construct
  misc_feature 1..22: note = chemically synthesized
  source 1..22: mol_type = other DNA
gtgaggggcgagggatcgaggc

SEQ ID NO: 6018 - DNA, 22 bp, synthetic construct
  misc_feature 1..22: note = chemically synthesized
  source 1..22: mol_type = other DNA
aacatcaaggcacctgcggtct

SEQ ID NO: 6019 - DNA, 22 bp, synthetic construct
  misc_feature 1..22: note = chemically synthesized
  source 1..22: mol_type = other DNA
cggtctggactgatctccgtcc

SEQ ID NO: 6020 - DNA, 22 bp, synthetic construct
  misc_feature 1..22: note = chemically synthesized
  source 1..22: mol_type = other DNA
gactgatctccgtccagtccag

SEQ ID NO: 6021 - DNA, 22 bp, synthetic construct
  misc_feature 1..22: note = chemically synthesized
  source 1..22: mol_type = other DNA
atctccgtccagtccagccaac

SEQ ID NO: 6022 - DNA, 22 bp, synthetic construct
  misc_feature 1..22: note = chemically synthesized
  source 1..22: mol_type = other DNA
cgtccagtccagccaacatgct

SEQ ID NO: 6023 - DNA, 22 bp, synthetic construct
  misc_feature 1..22: note = chemically synthesized
  source 1..22: mol_type = other DNA
tgtgtctttgggtgatttctgg

SEQ ID NO: 6024 - DNA, 22 bp, synthetic construct
  misc_feature 1..22: note = chemically synthesized
  source 1..22: mol_type = other DNA
tgggtgatttctggccctctcc

SEQ ID NO: 6025 - DNA, 22 bp, synthetic construct
  misc_feature 1..22: note = chemically synthesized
  source 1..22: mol_type = other DNA
gggtgatttctggccctctcca

SEQ ID NO: 6026 - DNA, 22 bp, synthetic construct
  misc_feature 1..22: note = chemically synthesized
  source 1..22: mol_type = other DNA
ggtgatttctggccctctccag

SEQ ID NO: 6027 - DNA, 22 bp, synthetic construct
  misc_feature 1..22: note = chemically synthesized
  source 1..22: mol_type = other DNA
ctggccctctccaggcctcagt

SEQ ID NO: 6028 - DNA, 22 bp, synthetic construct
  misc_feature 1..22: note = chemically synthesized
  source 1..22: mol_type = other DNA
tggccctctccaggcctcagtt

SEQ ID NO: 6029 - DNA, 22 bp, synthetic construct
  misc_feature 1..22: note = chemically synthesized
  source 1..22: mol_type = other DNA
gccctctccaggcctcagtttc

SEQ ID NO: 6030 - DNA, 22 bp, synthetic construct
  misc_feature 1..22: note = chemically synthesized
  source 1..22: mol_type = other DNA
tccaggcctcagtttccctgtc

SEQ ID NO: 6031 - DNA, 22 bp, synthetic construct
  misc_feature 1..22: note = chemically synthesized
  source 1..22: mol_type = other DNA
caggcctcagtttccctgtctg

SEQ ID NO: 6032 - DNA, 22 bp, synthetic construct
  misc_feature 1..22: note = chemically synthesized
  source 1..22: mol_type = other DNA
agtttccctgtctggggtagga

SEQ ID NO: 6033 - DNA, 22 bp, synthetic construct
  misc_feature 1..22: note = chemically synthesized
  source 1..22: mol_type = other DNA
ccctgtctggggtaggactggg

SEQ ID NO: 6034 - DNA, 22 bp, synthetic construct
  misc_feature 1..22: note = chemically synthesized
  source 1..22: mol_type = other DNA
cctgtctggggtaggactgggc

SEQ ID NO: 6035 - DNA, 22 bp, synthetic construct
  misc_feature 1..22: note = chemically synthesized
  source 1..22: mol_type = other DNA
tctggggtaggactgggctgtc

SEQ ID NO: 6036 - DNA, 22 bp, synthetic construct
  misc_feature 1..22: note = chemically synthesized
  source 1..22: mol_type = other DNA
gggtaggactgggctgtctaag

SEQ ID NO: 6037 - DNA, 22 bp, synthetic construct
  misc_feature 1..22: note = chemically synthesized
  source 1..22: mol_type = other DNA
ggctgtctaaggcttcctccag

SEQ ID NO: 6038 - DNA, 22 bp, synthetic construct
  misc_feature 1..22: note = chemically synthesized
  source 1..22: mol_type = other DNA
tctaaggcttcctccagcccta

SEQ ID NO: 6039 - DNA, 22 bp, synthetic construct
  misc_feature 1..22: note = chemically synthesized
  source 1..22: mol_type = other DNA
aggcttcctccagccctaagcc

SEQ ID NO: 6040 - DNA, 22 bp, synthetic construct
  misc_feature 1..22: note = chemically synthesized
  source 1..22: mol_type = other DNA
cctccagccctaagcctgaaga

SEQ ID NO: 6041 - DNA, 22 bp, synthetic construct
  misc_feature 1..22: note = chemically synthesized
  source 1..22: mol_type = other DNA
ctccagccctaagcctgaagaa

SEQ ID NO: 6042 - DNA, 22 bp, synthetic construct
  misc_feature 1..22: note = chemically synthesized
  source 1..22: mol_type = other DNA
cagccctaagcctgaagaatga

SEQ ID NO: 6043 - DNA, 22 bp, synthetic construct
  misc_feature 1..22: note = chemically synthesized
  source 1..22: mol_type = other DNA
agcctgaagaatgaggggggaa

SEQ ID NO: 6044 - DNA, 22 bp, synthetic construct
  misc_feature 1..22: note = chemically synthesized
  source 1..22: mol_type = other DNA
aagaatgaggggggaacctgca

SEQ ID NO: 6045 - DNA, 22 bp, synthetic construct
  misc_feature 1..22: note = chemically synthesized
  source 1..22: mol_type = other DNA
cacttggagccacttccagccc

SEQ ID NO: 6046 - DNA, 22 bp, synthetic construct
  misc_feature 1..22: note = chemically synthesized
  source 1..22: mol_type = other DNA
ggagccacttccagccccaccc

SEQ ID NO: 6047 - DNA, 22 bp, synthetic construct
  misc_feature 1..22: note = chemically synthesized
  source 1..22: mol_type = other DNA
gagccacttccagccccacccc

SEQ ID NO: 6048 - DNA, 22 bp, synthetic construct
  misc_feature 1..22: note = chemically synthesized
  source 1..22: mol_type = other DNA
ccagccccaccccctgtgtagc

SEQ ID NO: 6049 - DNA, 22 bp, synthetic construct
  misc_feature 1..22: note = chemically synthesized
  source 1..22: mol_type = other DNA
cagccccaccccctgtgtagct

SEQ ID NO: 6050 - DNA, 22 bp, synthetic construct
  misc_feature 1..22: note = chemically synthesized
  source 1..22: mol_type = other DNA
tgtagctttgggcaagtgacac

SEQ ID NO: 6051 - DNA, 22 bp, synthetic construct
  misc_feature 1..22: note = chemically synthesized
  source 1..22: mol_type = other DNA
tgggcaagtgacacccctcccg

SEQ ID NO: 6052 - DNA, 22 bp, synthetic construct
  misc_feature 1..22: note = chemically synthesized
  source 1..22: mol_type = other DNA
gggcaagtgacacccctcccgg

SEQ ID NO: 6053 - DNA, 22 bp, synthetic construct
  misc_feature 1..22: note = chemically synthesized
  source 1..22: mol_type = other DNA
ggcaagtgacacccctcccggg

SEQ ID NO: 6054 - DNA, 22 bp, synthetic construct
  misc_feature 1..22: note = chemically synthesized
  source 1..22: mol_type = other DNA
ccgggcctccatgttcttcagg

SEQ ID NO: 6055 - DNA, 22 bp, synthetic construct
  misc_feature 1..22: note = chemically synthesized
  source 1..22: mol_type = other DNA
catgttcttcaggttatgatga

SEQ ID NO: 6056 - DNA, 22 bp, synthetic construct
  misc_feature 1..22: note = chemically synthesized
  source 1..22: mol_type = other DNA
ttcaggttatgatgaggggtgg

SEQ ID NO: 6057 - DNA, 22 bp, synthetic construct
  misc_feature 1..22: note = chemically synthesized
  source 1..22: mol_type = other DNA
caggttatgatgaggggtgggg

SEQ ID NO: 6058 - DNA, 22 bp, synthetic construct
  misc_feature 1..22: note = chemically synthesized
  source 1..22: mol_type = other DNA
aggttatgatgaggggtggggg

SEQ ID NO: 6059 - DNA, 22 bp, synthetic construct
  misc_feature 1..22: note = chemically synthesized
  source 1..22: mol_type = other DNA
tgatgaggggtggggggcaccc

SEQ ID NO: 6060 - DNA, 22 bp, synthetic construct
  misc_feature 1..22: note = chemically synthesized
  source 1..22: mol_type = other DNA
cgaggcttccttagctctagca

SEQ ID NO: 6061 - DNA, 22 bp, synthetic construct
  misc_feature 1..22: note = chemically synthesized
  source 1..22: mol_type = other DNA
ccttagctctagcaagtgcttc

SEQ ID NO: 6062 - DNA, 22 bp, synthetic construct
  misc_feature 1..22: note = chemically synthesized
  source 1..22: mol_type = other DNA
cttagctctagcaagtgcttct

SEQ ID NO: 6063 - DNA, 22 bp, synthetic construct
  misc_feature 1..22: note = chemically synthesized
  source 1..22: mol_type = other DNA
agctctagcaagtgcttctcca

SEQ ID NO: 6064 - DNA, 22 bp, synthetic construct
  misc_feature 1..22: note = chemically synthesized
  source 1..22: mol_type = other DNA
gctctagcaagtgcttctccag

SEQ ID NO: 6065 - DNA, 22 bp, synthetic construct
  misc_feature 1..22: note = chemically synthesized
  source 1..22: mol_type = other DNA
tagcaagtgcttctccaggctt

SEQ ID NO: 6066 - DNA, 22 bp, synthetic construct
  misc_feature 1..22: note = chemically synthesized
  source 1..22: mol_type = other DNA
gcaagtgcttctccaggcttgc

SEQ ID NO: 6067 - DNA, 22 bp, synthetic construct
  misc_feature 1..22: note = chemically synthesized
  source 1..22: mol_type = other DNA
ctccaggcttgctggctgggct

SEQ ID NO: 6068 - DNA, 22 bp, synthetic construct
  misc_feature 1..22: note = chemically synthesized
  source 1..22: mol_type = other DNA
tccaggcttgctggctgggctg

SEQ ID NO: 6069 - DNA, 22 bp, synthetic construct
  misc_feature 1..22: note = chemically synthesized
  source 1..22: mol_type = other DNA
caggcttgctggctgggctggg

SEQ ID NO: 6070 - DNA, 22 bp, synthetic construct
  misc_feature 1..22: note = chemically synthesized
  source 1..22: mol_type = other DNA
gctggctgggctgggcagggag

SEQ ID NO: 6071 - DNA, 22 bp, synthetic construct
  misc_feature 1..22: note = chemically synthesized
  source 1..22: mol_type = other DNA
ctggctgggctgggcagggagc

SEQ ID NO: 6072 - DNA, 22 bp, synthetic construct
  misc_feature 1..22: note = chemically synthesized
  source 1..22: mol_type = other DNA
gctgggctgggcagggagctcc

SEQ ID NO: 6073 - DNA, 22 bp, synthetic construct
  misc_feature 1..22: note = chemically synthesized
  source 1..22: mol_type = other DNA
ggctgggcagggagctcctctt

SEQ ID NO: 6074 - DNA, 22 bp, synthetic construct
  misc_feature 1..22: note = chemically synthesized
  source 1..22: mol_type = other DNA
ggcagggagctcctcttgcccc

SEQ ID NO: 6075 - DNA, 22 bp, synthetic construct
  misc_feature 1..22: note = chemically synthesized
  source 1..22: mol_type = other DNA
ctcttgcccctcttcatcctcc

SEQ ID NO: 6076 - DNA, 22 bp, synthetic construct
  misc_feature 1..22: note = chemically synthesized
  source 1..22: mol_type = other DNA
ttgcccctcttcatcctcctcc

SEQ ID NO: 6077 - DNA, 22 bp, synthetic construct
  misc_feature 1..22: note = chemically synthesized
  source 1..22: mol_type = other DNA
gcccctcttcatcctcctcccc

SEQ ID NO: 6078 - DNA, 22 bp, synthetic construct
  misc_feature 1..22: note = chemically synthesized
  source 1..22: mol_type = other DNA
cccctcttcatcctcctcccct

SEQ ID NO: 6079 - DNA, 22 bp, synthetic construct
  misc_feature 1..22: note = chemically synthesized
  source 1..22: mol_type = other DNA
ttcatcctcctcccctcctctt

SEQ ID NO: 6080 - DNA, 22 bp, synthetic construct
  misc_feature 1..22: note = chemically synthesized
  source 1..22: mol_type = other DNA
catcctcctcccctcctctttc

SEQ ID NO: 6081 - DNA, 22 bp, synthetic construct
  misc_feature 1..22: note = chemically synthesized
  source 1..22: mol_type = other DNA
atcctcctcccctcctctttcc

SEQ ID NO: 6082 - DNA, 22 bp, synthetic construct
  misc_feature 1..22: note = chemically synthesized
  source 1..22: mol_type = other DNA
ctcccctcctctttcccctccc

SEQ ID NO: 6083 - DNA, 22 bp, synthetic construct
  misc_feature 1..22: note = chemically synthesized
  source 1..22: mol_type = other DNA
ccctcctctttcccctccccag

SEQ ID NO: 6084 - DNA, 22 bp, synthetic construct
  misc_feature 1..22: note = chemically synthesized
  source 1..22: mol_type = other DNA
ctctttcccctccccagagggc

SEQ ID NO: 6085 - DNA, 22 bp, synthetic construct
  misc_feature 1..22: note = chemically synthesized
  source 1..22: mol_type = other DNA
tttcccctccccagagggcatt

SEQ ID NO: 6086 - DNA, 22 bp, synthetic construct
  misc_feature 1..22: note = chemically synthesized
  source 1..22: mol_type = other DNA
tcccctccccagagggcattac

SEQ ID NO: 6087 - DNA, 22 bp, synthetic construct
  misc_feature 1..22: note = chemically synthesized
  source 1..22: mol_type = other DNA
cccctccccagagggcattacc

SEQ ID NO: 6088 - DNA, 22 bp, synthetic construct
  misc_feature 1..22: note = chemically synthesized
  source 1..22: mol_type = other DNA
ccctccccagagggcattacct

SEQ ID NO: 6089 - DNA, 22 bp, synthetic construct
  misc_feature 1..22: note = chemically synthesized
  source 1..22: mol_type = other DNA
cccagagggcattacctggagc

SEQ ID NO: 6090 - DNA, 22 bp, synthetic construct
  misc_feature 1..22: note = chemically synthesized
  source 1..22: mol_type = other DNA
cctggagcagctgcctctaggg

SEQ ID NO: 6091 - DNA, 22 bp, synthetic construct
  misc_feature 1..22: note = chemically synthesized
  source 1..22: mol_type = other DNA
gagcagctgcctctagggatga

SEQ ID NO: 6092 - DNA, 22 bp, synthetic construct
  misc_feature 1..22: note = chemically synthesized
  source 1..22: mol_type = other DNA
cctctagggatgaactgagcag

SEQ ID NO: 6093 - DNA, 22 bp, synthetic construct
  misc_feature 1..22: note = chemically synthesized
  source 1..22: mol_type = other DNA
tagggatgaactgagcagacag

SEQ ID NO: 6094 - DNA, 22 bp, synthetic construct
  misc_feature 1..22: note = chemically synthesized
  source 1..22: mol_type = other DNA
gggatgaactgagcagacaggc

SEQ ID NO: 6095 - DNA, 22 bp, synthetic construct
  misc_feature 1..22: note = chemically synthesized
  source 1..22: mol_type = other DNA
agcagacaggcaggagggttct

SEQ ID NO: 6096 - DNA, 22 bp, synthetic construct
  misc_feature 1..22: note = chemically synthesized
  source 1..22: mol_type = other DNA
tgacctgttttatatcatctcc

SEQ ID NO: 6097 - DNA, 22 bp, synthetic construct
  misc_feature 1..22: note = chemically synthesized
  source 1..22: mol_type = other DNA
acctgttttatatcatctccag

SEQ ID NO: 6098 - DNA, 22 bp, synthetic construct
  misc_feature 1..22: note = chemically synthesized
  source 1..22: mol_type = other DNA
ttttatatcatctccagggcag

SEQ ID NO: 6099 - DNA, 22 bp, synthetic construct
  misc_feature 1..22: note = chemically synthesized
  source 1..22: mol_type = other DNA
tatatcatctccagggcagcag

SEQ ID NO: 6100 - DNA, 22 bp, synthetic construct
  misc_feature 1..22: note = chemically synthesized
  source 1..22: mol_type = other DNA
atatcatctccagggcagcagg

SEQ ID NO: 6101 - DNA, 22 bp, synthetic construct
  misc_feature 1..22: note = chemically synthesized
  source 1..22: mol_type = other DNA
tatcatctccagggcagcaggc

SEQ ID NO: 6102 - DNA, 22 bp, synthetic construct
  misc_feature 1..22: note = chemically synthesized
  source 1..22: mol_type = other DNA
cagggcagcaggcactgaggac

SEQ ID NO: 6103 - DNA, 22 bp, synthetic construct
  misc_feature 1..22: note = chemically synthesized
  source 1..22: mol_type = other DNA
aggacccagggcgctgggcaaa

SEQ ID NO: 6104 - DNA, 22 bp, synthetic construct
  misc_feature 1..22: note = chemically synthesized
  source 1..22: mol_type = other DNA
ggcaaaggtcacctgctgacca

SEQ ID NO: 6105 - DNA, 22 bp, synthetic construct
  misc_feature 1..22: note = chemically synthesized
  source 1..22: mol_type = other DNA
ctgaccagtggagatgagggcc

SEQ ID NO: 6106 - DNA, 22 bp, synthetic construct
  misc_feature 1..22: note = chemically synthesized
  source 1..22: mol_type = other DNA
accagtggagatgagggcctga

SEQ ID NO: 6107 - DNA, 22 bp, synthetic construct
  misc_feature 1..22: note = chemically synthesized
  source 1..22: mol_type = other DNA
aggcagggtgtccagatgcagc

SEQ ID NO: 6108 - DNA, 22 bp, synthetic construct
  misc_feature 1..22: note = chemically synthesized
  source 1..22: mol_type = other DNA
ggaaatccctaggagactgagt

SEQ ID NO: 6109 - DNA, 20 bp, synthetic construct
  misc_feature 1..20: note = chemically synthesized
  source 1..20: mol_type = other DNA
taccccttgcccatccctgc

SEQ ID NO: 6110 - DNA, 20 bp, synthetic construct
  misc_feature 1..20: note = chemically synthesized
  source 1..20: mol_type = other DNA
ggcccccgtgaccctcactt

SEQ ID NO: 6111 - DNA, 20 bp, synthetic construct
  misc_feature 1..20: note = chemically synthesized
  source 1..20: mol_type = other DNA
gcccccgtgaccctcacttt

SEQ ID NO: 6112 - DNA, 20 bp, synthetic construct
  misc_feature 1..20: note = chemically synthesized
  source 1..20: mol_type = other DNA
gtgaccctcactttgggacc

SEQ ID NO: 6113 - DNA, 20 bp, synthetic construct
  misc_feature 1..20: note = chemically synthesized
  source 1..20: mol_type = other DNA
cactttgggacccagtcaca

SEQ ID NO: 6114 - DNA, 20 bp, synthetic construct
  misc_feature 1..20: note = chemically synthesized
  source 1..20: mol_type = other DNA
ccagtcacacagatgaccac

SEQ ID NO: 6115 - DNA, 20 bp, synthetic construct
  misc_feature 1..20: note = chemically synthesized
  source 1..20: mol_type = other DNA
gtcacacagatgaccaccag

SEQ ID NO: 6116 - DNA, 20 bp, synthetic construct
  misc_feature 1..20: note = chemically synthesized
  source 1..20: mol_type = other DNA
acacagatgaccaccagcag

SEQ ID NO: 6117 - DNA, 20 bp, synthetic construct
  misc_feature 1..20: note = chemically synthesized
  source 1..20: mol_type = other DNA
cacagatgaccaccagcagc

SEQ ID NO: 6118 - DNA, 20 bp, synthetic construct
  misc_feature 1..20: note = chemically synthesized
  source 1..20: mol_type = other DNA
ccaccagcagcaggatgttg

SEQ ID NO: 6119 - DNA, 20 bp, synthetic construct
  misc_feature 1..20: note = chemically synthesized
  source 1..20: mol_type = other DNA
agcagcaggatgttgaagct

SEQ ID NO: 6120 - DNA, 20 bp, synthetic construct
  misc_feature 1..20: note = chemically synthesized
  source 1..20: mol_type = other DNA
gcagcaggatgttgaagctc

SEQ ID NO: 6121 - DNA, 20 bp, synthetic construct
  misc_feature 1..20: note = chemically synthesized
  source 1..20: mol_type = other DNA
cagcaggatgttgaagctca

SEQ ID NO: 6122 - DNA, 20 bp, synthetic construct
  misc_feature 1..20: note = chemically synthesized
  source 1..20: mol_type = other DNA
aggatgttgaagctcagggc

SEQ ID NO: 6123 - DNA, 20 bp, synthetic construct
  misc_feature 1..20: note = chemically synthesized
  source 1..20: mol_type = other DNA
atgttgaagctcagggcaag

SEQ ID NO: 6124 - DNA, 20 bp, synthetic construct
  misc_feature 1..20: note = chemically synthesized
  source 1..20: mol_type = other DNA
agctcagggcaagcagactg

SEQ ID NO: 6125 - DNA, 20 bp, synthetic construct
  misc_feature 1..20: note = chemically synthesized
  source 1..20: mol_type = other DNA
tcagggcaagcagactgaag

SEQ ID NO: 6126 - DNA, 20 bp, synthetic construct
  misc_feature 1..20: note = chemically synthesized
  source 1..20: mol_type = other DNA
aagcagactgaagcagacca

SEQ ID NO: 6127 - DNA, 20 bp, synthetic construct
  misc_feature 1..20: note = chemically synthesized
  source 1..20: mol_type = other DNA
gcagactgaagcagaccatg

SEQ ID NO: 6128 - DNA, 20 bp, synthetic construct
  misc_feature 1..20: note = chemically synthesized
  source 1..20: mol_type = other DNA
gactgaagcagaccatggag

SEQ ID NO: 6129 - DNA, 20 bp, synthetic construct
  misc_feature 1..20: note = chemically synthesized
  source 1..20: mol_type = other DNA
ctgaagcagaccatggagca

SEQ ID NO: 6130 - DNA, 20 bp, synthetic construct
  misc_feature 1..20: note = chemically synthesized
  source 1..20: mol_type = other DNA
atggagcagagacgctgtgc

SEQ ID NO: 6131 - DNA, 20 bp, synthetic construct
  misc_feature 1..20: note = chemically synthesized
  source 1..20: mol_type = other DNA
tggagcagagacgctgtgcc

SEQ ID NO: 6132 - DNA, 20 bp, synthetic construct
  misc_feature 1..20: note = chemically synthesized
  source 1..20: mol_type = other DNA
ggagcagagacgctgtgcca

SEQ ID NO: 6133 - DNA, 20 bp, synthetic construct
  misc_feature 1..20: note = chemically synthesized
  source 1..20: mol_type = other DNA
gagcagagacgctgtgccag

SEQ ID NO: 6134 - DNA, 20 bp, synthetic construct
  misc_feature 1..20: note = chemically synthesized
  source 1..20: mol_type = other DNA
agagacgctgtgccaggggc

SEQ ID NO: 6135 - DNA, 20 bp, synthetic construct
  misc_feature 1..20: note = chemically synthesized
  source 1..20: mol_type = other DNA
gagacgctgtgccaggggct

SEQ ID NO: 6136 - DNA, 20 bp, synthetic construct
  misc_feature 1..20: note = chemically synthesized
  source 1..20: mol_type = other DNA
acgctgtgccaggggctggg

SEQ ID NO: 6137 - DNA, 20 bp, synthetic construct
  misc_feature 1..20: note = chemically synthesized
  source 1..20: mol_type = other DNA
cgctgtgccaggggctgggc

SEQ ID NO: 6138 - DNA, 20 bp, synthetic construct
  misc_feature 1..20: note = chemically synthesized
  source 1..20: mol_type = other DNA
ctgtgccaggggctgggcag

SEQ ID NO: 6139 - DNA, 20 bp, synthetic construct
  misc_feature 1..20: note = chemically synthesized
  source 1..20: mol_type = other DNA
tgtgccaggggctgggcagg

SEQ ID NO: 6140 - DNA, 20 bp, synthetic construct
  misc_feature 1..20: note = chemically synthesized
  source 1..20: mol_type = other DNA
gccaggggctgggcaggagg

SEQ ID NO: 6141 - DNA, 20 bp, synthetic construct
  misc_feature 1..20: note = chemically synthesized
  source 1..20: mol_type = other DNA
ctgggcaggaggtggccctg

SEQ ID NO: 6142 - DNA, 20 bp, synthetic construct
  misc_feature 1..20: note = chemically synthesized
  source 1..20: mol_type = other DNA
tgggcaggaggtggccctgt

SEQ ID NO: 6143 - DNA, 20 bp, synthetic construct
  misc_feature 1..20: note = chemically synthesized
  source 1..20: mol_type = other DNA
ggcaggaggtggccctgtgg

SEQ ID NO: 6144 - DNA, 20 bp, synthetic construct
  misc_feature 1..20: note = chemically synthesized
  source 1..20: mol_type = other DNA
caggaggtggccctgtggga

SEQ ID NO: 6145 - DNA, 20 bp, synthetic construct
  misc_feature 1..20: note = chemically synthesized
  source 1..20: mol_type = other DNA
aggaggtggccctgtgggag

SEQ ID NO: 6146 - DNA, 20 bp, synthetic construct
  misc_feature 1..20: note = chemically synthesized
  source 1..20: mol_type = other DNA
ggaggtggccctgtgggaga

SEQ ID NO: 6147 - DNA, 20 bp, synthetic construct
  misc_feature 1..20: note = chemically synthesized
  source 1..20: mol_type = other DNA
gaggtggccctgtgggagag

SEQ ID NO: 6148 - DNA, 20 bp, synthetic construct
  misc_feature 1..20: note = chemically synthesized
  source 1..20: mol_type = other DNA
gccctgtgggagaggggcat

SEQ ID NO: 6149 - DNA, 20 bp, synthetic construct
  misc_feature 1..20: note = chemically synthesized
  source 1..20: mol_type = other DNA
ccctgtgggagaggggcatc

SEQ ID NO: 6150 - DNA, 20 bp, synthetic construct
  misc_feature 1..20: note = chemically synthesized
  source 1..20: mol_type = other DNA
ctgtgggagaggggcatcag

SEQ ID NO: 6151 - DNA, 20 bp, synthetic construct
  misc_feature 1..20: note = chemically synthesized
  source 1..20: mol_type = other DNA
gggagaggggcatcaggagc

SEQ ID NO: 6152 - DNA, 20 bp, synthetic construct
  misc_feature 1..20: note = chemically synthesized
  source 1..20: mol_type = other DNA
agaggggcatcaggagccgg

SEQ ID NO: 6153 - DNA, 20 bp, synthetic construct
  misc_feature 1..20: note = chemically synthesized
  source 1..20: mol_type = other DNA
ggcatcaggagccggcagcc

SEQ ID NO: 6154 - DNA, 20 bp, synthetic construct
  misc_feature 1..20: note = chemically synthesized
  source 1..20: mol_type = other DNA
gcatcaggagccggcagcct

SEQ ID NO: 6155 - DNA, 20 bp, synthetic construct
  misc_feature 1..20: note = chemically synthesized
  source 1..20: mol_type = other DNA
aggagccggcagcctgggtg

SEQ ID NO: 6156 - DNA, 20 bp, synthetic construct
  misc_feature 1..20: note = chemically synthesized
  source 1..20: mol_type = other DNA
ggagccggcagcctgggtgt

SEQ ID NO: 6157 - DNA, 20 bp, synthetic construct
  misc_feature 1..20: note = chemically synthesized
  source 1..20: mol_type = other DNA
gagccggcagcctgggtgtg

SEQ ID NO: 6158 - DNA, 20 bp, synthetic construct
  misc_feature 1..20: note = chemically synthesized
  source 1..20: mol_type = other DNA
gccggcagcctgggtgtggg

SEQ ID NO: 6159 - DNA, 20 bp, synthetic construct
  misc_feature 1..20: note = chemically synthesized
  source 1..20: mol_type = other DNA
gcagcctgggtgtggggagc

SEQ ID NO: 6160 - DNA, 20 bp, synthetic construct
  misc_feature 1..20: note = chemically synthesized
  source 1..20: mol_type = other DNA
agcctgggtgtggggagccg

SEQ ID NO: 6161 - DNA, 20 bp, synthetic construct
  misc_feature 1..20: note = chemically synthesized
  source 1..20: mol_type = other DNA
gcctgggtgtggggagccgg

SEQ ID NO: 6162 - DNA, 20 bp, synthetic construct
  misc_feature 1..20: note = chemically synthesized
  source 1..20: mol_type = other DNA
cctgggtgtggggagccgga

SEQ ID NO: 6163 - DNA, 20 bp, synthetic construct
  misc_feature 1..20: note = chemically synthesized
  source 1..20: mol_type = other DNA
gtgtggggagccggagggta

SEQ ID NO: 6164 - DNA, 20 bp, synthetic construct
  misc_feature 1..20: note = chemically synthesized
  source 1..20: mol_type = other DNA
ggggagccggagggtaaaga

SEQ ID NO: 6165 - DNA, 20 bp, synthetic construct
  misc_feature 1..20: note = chemically synthesized
  source 1..20: mol_type = other DNA
gggagccggagggtaaagac

SEQ ID NO: 6166 - DNA, 20 bp, synthetic construct
  misc_feature 1..20: note = chemically synthesized
  source 1..20: mol_type = other DNA
ggagccggagggtaaagaca

SEQ ID NO: 6167 - DNA, 20 bp, synthetic construct
  misc_feature 1..20: note = chemically synthesized
  source 1..20: mol_type = other DNA
agggtaaagacagggcaccg

SEQ ID NO: 6168 - DNA, 20 bp, synthetic construct
  misc_feature 1..20: note = chemically synthesized
  source 1..20: mol_type = other DNA
aagacagggcaccgaagcct

SEQ ID NO: 6169 - DNA, 20 bp, synthetic construct
  misc_feature 1..20: note = chemically synthesized
  source 1..20: mol_type = other DNA
agacagggcaccgaagcctg

SEQ ID NO: 6170 - DNA, 20 bp, synthetic construct
  misc_feature 1..20: note = chemically synthesized
  source 1..20: mol_type = other DNA
acagggcaccgaagcctgag

SEQ ID NO: 6171 - DNA, 20 bp, synthetic construct
  misc_feature 1..20: note = chemically synthesized
  source 1..20: mol_type = other DNA
cagggcaccgaagcctgagg

SEQ ID NO: 6172 - DNA, 20 bp, synthetic construct
  misc_feature 1..20: note = chemically synthesized
  source 1..20: mol_type = other DNA
aagcctgaggaggcataacc

SEQ ID NO: 6173 - DNA, 20 bp, synthetic construct
  misc_feature 1..20: note = chemically synthesized
  source 1..20: mol_type = other DNA
agcctgaggaggcataacct

SEQ ID NO: 6174 - DNA, 20 bp, synthetic construct
  misc_feature 1..20: note = chemically synthesized
  source 1..20: mol_type = other DNA
ctgaggaggcataacctggg

SEQ ID NO: 6175 - DNA, 20 bp, synthetic construct
  misc_feature 1..20: note = chemically synthesized
  source 1..20: mol_type = other DNA
tgaggaggcataacctgggc

SEQ ID NO: 6176 - DNA, 20 bp, synthetic construct
  misc_feature 1..20: note = chemically synthesized
  source 1..20: mol_type = other DNA
gaggaggcataacctgggcg

SEQ ID NO: 6177 - DNA, 20 bp, synthetic construct
  misc_feature 1..20: note = chemically synthesized
  source 1..20: mol_type = other DNA
aggaggcataacctgggcgg

SEQ ID NO: 6178 - DNA, 20 bp, synthetic construct
  misc_feature 1..20: note = chemically synthesized
  source 1..20: mol_type = other DNA
ggaggcataacctgggcggg

SEQ ID NO: 6179 - DNA, 20 bp, synthetic construct
  misc_feature 1..20: note = chemically synthesized
  source 1..20: mol_type = other DNA
cataacctgggcggggggat

SEQ ID NO: 6180 - DNA, 20 bp, synthetic construct
  misc_feature 1..20: note = chemically synthesized
  source 1..20: mol_type = other DNA
acctgggcggggggattggt

SEQ ID NO: 6181 - DNA, 20 bp, synthetic construct
  misc_feature 1..20: note = chemically synthesized
  source 1..20: mol_type = other DNA
cctgggcggggggattggtt

SEQ ID NO: 6182 - DNA, 20 bp, synthetic construct
  misc_feature 1..20: note = chemically synthesized
  source 1..20: mol_type = other DNA
ctgggcggggggattggttg

SEQ ID NO: 6183 - DNA, 20 bp, synthetic construct
  misc_feature 1..20: note = chemically synthesized
  source 1..20: mol_type = other DNA
ggggggattggttggggcca

SEQ ID NO: 6184 - DNA, 20 bp, synthetic construct
  misc_feature 1..20: note = chemically synthesized
  source 1..20: mol_type = other DNA
gggggattggttggggccat

SEQ ID NO: 6185 - DNA, 20 bp, synthetic construct
  misc_feature 1..20: note = chemically synthesized
  source 1..20: mol_type = other DNA
ggggattggttggggccatg

SEQ ID NO: 6186 - DNA, 20 bp, synthetic construct
  misc_feature 1..20: note = chemically synthesized
  source 1..20: mol_type = other DNA
gggattggttggggccatgg

SEQ ID NO: 6187 - DNA, 20 bp, synthetic construct
  misc_feature 1..20: note = chemically synthesized
  source 1..20: mol_type = other DNA
ggattggttggggccatggg

SEQ ID NO: 6188 - DNA, 20 bp, synthetic construct
  misc_feature 1..20: note = chemically synthesized
  source 1..20: mol_type = other DNA
gattggttggggccatgggg

SEQ ID NO: 6189 - DNA, 20 bp, synthetic construct
  misc_feature 1..20: note = chemically synthesized
  source 1..20: mol_type = other DNA
attggttggggccatggggg

SEQ ID NO: 6190 - DNA, 20 bp, synthetic construct
  misc_feature 1..20: note = chemically synthesized
  source 1..20: mol_type = other DNA
ttggttggggccatgggggg

SEQ ID NO: 6191 - DNA, 20 bp, synthetic construct
  misc_feature 1..20: note = chemically synthesized
  source 1..20: mol_type = other DNA
gccatgggggggggtcatca

SEQ ID NO: 6192 - DNA, 20 bp, synthetic construct
  misc_feature 1..20: note = chemically synthesized
  source 1..20: mol_type = other DNA
ccatgggggggggtcatcat

SEQ ID NO: 6193 - DNA, 20 bp, synthetic construct
  misc_feature 1..20: note = chemically synthesized
  source 1..20: mol_type = other DNA
gtcatcataggctttgaccc

SEQ ID NO: 6194 - DNA, 20 bp, synthetic construct
  misc_feature 1..20: note = chemically synthesized
  source 1..20: mol_type = other DNA
aggctttgaccccagcattt

SEQ ID NO: 6195 - DNA, 20 bp, synthetic construct
  misc_feature 1..20: note = chemically synthesized
  source 1..20: mol_type = other DNA
catgtataaatatacacacg

SEQ ID NO: 6196 - DNA, 20 bp, synthetic construct
  misc_feature 1..20: note = chemically synthesized
  source 1..20: mol_type = other DNA
atatacacacgcagctaatc

SEQ ID NO: 6197 - DNA, 20 bp, synthetic construct
  misc_feature 1..20: note = chemically synthesized
  source 1..20: mol_type = other DNA
acacacccatgcacacgact

SEQ ID NO: 6198 - DNA, 20 bp, synthetic construct
  misc_feature 1..20: note = chemically synthesized
  source 1..20: mol_type = other DNA
cacacccatgcacacgactc

SEQ ID NO: 6199 - DNA, 20 bp, synthetic construct
  misc_feature 1..20: note = chemically synthesized
  source 1..20: mol_type = other DNA
acgactcaggatattcacat

SEQ ID NO: 6200 - DNA, 20 bp, synthetic construct
  misc_feature 1..20: note = chemically synthesized
  source 1..20: mol_type = other DNA
attcacatcagctgtgtgca

SEQ ID NO: 6201 - DNA, 20 bp, synthetic construct
  misc_feature 1..20: note = chemically synthesized
  source 1..20: mol_type = other DNA
catcagctgtgtgcaaagcc

SEQ ID NO: 6202 - DNA, 20 bp, synthetic construct
  misc_feature 1..20: note = chemically synthesized
  source 1..20: mol_type = other DNA
tgtgtgcaaagcccggatcc

SEQ ID NO: 6203 - DNA, 20 bp, synthetic construct
  misc_feature 1..20: note = chemically synthesized
  source 1..20: mol_type = other DNA
tgtgcaaagcccggatcctg

SEQ ID NO: 6204 - DNA, 20 bp, synthetic construct
  misc_feature 1..20: note = chemically synthesized
  source 1..20: mol_type = other DNA
caaagcccggatcctggagc

SEQ ID NO: 6205 - DNA, 20 bp, synthetic construct
  misc_feature 1..20: note = chemically synthesized
  source 1..20: mol_type = other DNA
aaagcccggatcctggagct

SEQ ID NO: 6206 - DNA, 20 bp, synthetic construct
  misc_feature 1..20: note = chemically synthesized
  source 1..20: mol_type = other DNA
aagcccggatcctggagctg

SEQ ID NO: 6207 - DNA, 20 bp, synthetic construct
  misc_feature 1..20: note = chemically synthesized
  source 1..20: mol_type = other DNA
agcccggatcctggagctgg

SEQ ID NO: 6208 - DNA, 20 bp, synthetic construct
  misc_feature 1..20: note = chemically synthesized
  source 1..20: mol_type = other DNA
ggatcctggagctgggggac

SEQ ID NO: 6209 - DNA, 20 bp, synthetic construct
  misc_feature 1..20: note = chemically synthesized
  source 1..20: mol_type = other DNA
gatcctggagctgggggact

SEQ ID NO: 6210 - DNA, 20 bp, synthetic construct
  misc_feature 1..20: note = chemically synthesized
  source 1..20: mol_type = other DNA
tcctggagctgggggactgg

SEQ ID NO: 6211 - DNA, 20 bp, synthetic construct
  misc_feature 1..20: note = chemically synthesized
  source 1..20: mol_type = other DNA
ctgggggactgggagacgca

SEQ ID NO: 6212 - DNA, 20 bp, synthetic construct
  misc_feature 1..20: note = chemically synthesized
  source 1..20: mol_type = other DNA
tgggggactgggagacgcac

SEQ ID NO: 6213 - DNA, 20 bp, synthetic construct
  misc_feature 1..20: note = chemically synthesized
  source 1..20: mol_type = other DNA
gggggactgggagacgcaca

SEQ ID NO: 6214 - DNA, 20 bp, synthetic construct
  misc_feature 1..20: note = chemically synthesized
  source 1..20: mol_type = other DNA
ggggactgggagacgcacag

SEQ ID NO: 6215 - DNA, 20 bp, synthetic construct
  misc_feature 1..20: note = chemically synthesized
  source 1..20: mol_type = other DNA
gggactgggagacgcacagg

SEQ ID NO: 6216 - DNA, 20 bp, synthetic construct
  misc_feature 1..20: note = chemically synthesized
  source 1..20: mol_type = other DNA
actgggagacgcacaggggg

SEQ ID NO: 6217 - DNA, 20 bp, synthetic construct
  misc_feature 1..20: note = chemically synthesized
  source 1..20: mol_type = other DNA
ctgggagacgcacagggggc

SEQ ID NO: 6218 - DNA, 20 bp, synthetic construct
  misc_feature 1..20: note = chemically synthesized
  source 1..20: mol_type = other DNA
tgggagacgcacagggggcg

SEQ ID NO: 6219 - DNA, 20 bp, synthetic construct
  misc_feature 1..20: note = chemically synthesized
  source 1..20: mol_type = other DNA
gggagacgcacagggggcgg

SEQ ID NO: 6220 - DNA, 20 bp, synthetic construct
  misc_feature 1..20: note = chemically synthesized
  source 1..20: mol_type = other DNA
ggagacgcacagggggcggg

SEQ ID NO: 6221 - DNA, 20 bp, synthetic construct
  misc_feature 1..20: note = chemically synthesized
  source 1..20: mol_type = other DNA
gagacgcacagggggcgggg

SEQ ID NO: 6222 - DNA, 20 bp, synthetic construct
  misc_feature 1..20: note = chemically synthesized
  source 1..20: mol_type = other DNA
acgcacagggggcggggggg

SEQ ID NO: 6223 - DNA, 20 bp, synthetic construct
  misc_feature 1..20: note = chemically synthesized
  source 1..20: mol_type = other DNA
agggggcgggggggcagacc

SEQ ID NO: 6224 - DNA, 20 bp, synthetic construct
  misc_feature 1..20: note = chemically synthesized
  source 1..20: mol_type = other DNA
ggggcagacccggccctgcc

SEQ ID NO: 6225 - DNA, 20 bp, synthetic construct
  misc_feature 1..20: note = chemically synthesized
  source 1..20: mol_type = other DNA
gggcagacccggccctgcct

SEQ ID NO: 6226 - DNA, 20 bp, synthetic construct
  misc_feature 1..20: note = chemically synthesized
  source 1..20: mol_type = other DNA
cctgcctaggcacacatcct

SEQ ID NO: 6227 - DNA, 20 bp, synthetic construct
  misc_feature 1..20: note = chemically synthesized
  source 1..20: mol_type = other DNA
gcctaggcacacatcctgag

SEQ ID NO: 6228 - DNA, 20 bp, synthetic construct
  misc_feature 1..20: note = chemically synthesized
  source 1..20: mol_type = other DNA
cctaggcacacatcctgaga

SEQ ID NO: 6229 - DNA, 20 bp, synthetic construct
  misc_feature 1..20: note = chemically synthesized
  source 1..20: mol_type = other DNA
ctaggcacacatcctgagaa

SEQ ID NO: 6230 - DNA, 20 bp, synthetic construct
  misc_feature 1..20: note = chemically synthesized
  source 1..20: mol_type = other DNA
taggcacacatcctgagaag

SEQ ID NO: 6231 - DNA, 20 bp, synthetic construct
  misc_feature 1..20: note = chemically synthesized
  source 1..20: mol_type = other DNA
aggcacacatcctgagaagg

SEQ ID NO: 6232 - DNA, 20 bp, synthetic construct
  misc_feature 1..20: note = chemically synthesized
  source 1..20: mol_type = other DNA
tgagaagggggatctgtgaa

SEQ ID NO: 6233 - DNA, 20 bp, synthetic construct
  misc_feature 1..20: note = chemically synthesized
  source 1..20: mol_type = other DNA
tgaatggttttcctcccatc

SEQ ID NO: 6234 - DNA, 20 bp, synthetic construct
  misc_feature 1..20: note = chemically synthesized
  source 1..20: mol_type = other DNA
tggttttcctcccatccagc

SEQ ID NO: 6235 - DNA, 20 bp, synthetic construct
  misc_feature 1..20: note = chemically synthesized
  source 1..20: mol_type = other DNA
ttttcctcccatccagccag

SEQ ID NO: 6236 - DNA, 20 bp, synthetic construct
  misc_feature 1..20: note = chemically synthesized
  source 1..20: mol_type = other DNA
tcctcccatccagccagtgg

SEQ ID NO: 6237 - DNA, 20 bp, synthetic construct
  misc_feature 1..20: note = chemically synthesized
  source 1..20: mol_type = other DNA
ctcccatccagccagtggca

SEQ ID NO: 6238 - DNA, 20 bp, synthetic construct
  misc_feature 1..20: note = chemically synthesized
  source 1..20: mol_type = other DNA
tcccatccagccagtggcag

SEQ ID NO: 6239 - DNA, 20 bp, synthetic construct
  misc_feature 1..20: note = chemically synthesized
  source 1..20: mol_type = other DNA
cagccagtggcagaggcctc

SEQ ID NO: 6240 - DNA, 20 bp, synthetic construct
  misc_feature 1..20: note = chemically synthesized
  source 1..20: mol_type = other DNA
cagaggcctccagatcacct

SEQ ID NO: 6241 - DNA, 20 bp, synthetic construct
  misc_feature 1..20: note = chemically synthesized
  source 1..20: mol_type = other DNA
agaggcctccagatcacctc

SEQ ID NO: 6242 - DNA, 20 bp, synthetic construct
  misc_feature 1..20: note = chemically synthesized
  source 1..20: mol_type = other DNA
ctccagatcacctcgggcct

SEQ ID NO: 6243 - DNA, 20 bp, synthetic construct
  misc_feature 1..20: note = chemically synthesized
  source 1..20: mol_type = other DNA
atcacctcgggccttagtct

SEQ ID NO: 6244 - DNA, 20 bp, synthetic construct
  misc_feature 1..20: note = chemically synthesized
  source 1..20: mol_type = other DNA
gccttagtctcagctcttct

SEQ ID NO: 6245 - DNA, 20 bp, synthetic construct
  misc_feature 1..20: note = chemically synthesized
  source 1..20: mol_type = other DNA
ccttagtctcagctcttcta

SEQ ID NO: 6246 - DNA, 20 bp, synthetic construct
  misc_feature 1..20: note = chemically synthesized
  source 1..20: mol_type = other DNA
ttctaaggctcctgtcccct

SEQ ID NO: 6247 - DNA, 20 bp, synthetic construct
  misc_feature 1..20: note = chemically synthesized
  source 1..20: mol_type = other DNA
aggctcctgtcccctcagat

SEQ ID NO: 6248 - DNA, 20 bp, synthetic construct
  misc_feature 1..20: note = chemically synthesized
  source 1..20: mol_type = other DNA
gctcctgtcccctcagattg

SEQ ID NO: 6249 - DNA, 20 bp, synthetic construct
  misc_feature 1..20: note = chemically synthesized
  source 1..20: mol_type = other DNA
tcccctcagattggagactc

SEQ ID NO: 6250 - DNA, 20 bp, synthetic construct
  misc_feature 1..20: note = chemically synthesized
  source 1..20: mol_type = other DNA
cctcagattggagactccag

SEQ ID NO: 6251 - DNA, 20 bp, synthetic construct
  misc_feature 1..20: note = chemically synthesized
  source 1..20: mol_type = other DNA
agattggagactccagaagc

SEQ ID NO: 6252 - DNA, 20 bp, synthetic construct
  misc_feature 1..20: note = chemically synthesized
  source 1..20: mol_type = other DNA
gattggagactccagaagct

SEQ ID NO: 6253 - DNA, 20 bp, synthetic construct
  misc_feature 1..20: note = chemically synthesized
  source 1..20: mol_type = other DNA
gttcttcctaaaatccatac

SEQ ID NO: 6254 - DNA, 20 bp, synthetic construct
  misc_feature 1..20: note = chemically synthesized
  source 1..20: mol_type = other DNA
tcctaaaatccatactggaa

SEQ ID NO: 6255 - DNA, 20 bp, synthetic construct
  misc_feature 1..20: note = chemically synthesized
  source 1..20: mol_type = other DNA
tcccctgccaaaattccatt

SEQ ID NO: 6256 - DNA, 20 bp, synthetic construct
  misc_feature 1..20: note = chemically synthesized
  source 1..20: mol_type = other DNA
tccattgagatccttaaatc

SEQ ID NO: 6257 - DNA, 20 bp, synthetic construct
  misc_feature 1..20: note = chemically synthesized
  source 1..20: mol_type = other DNA
ccattgagatccttaaatct

SEQ ID NO: 6258 - DNA, 20 bp, synthetic construct
  misc_feature 1..20: note = chemically synthesized
  source 1..20: mol_type = other DNA
aaatctgggtcattccacca

SEQ ID NO: 6259 - DNA, 20 bp, synthetic construct
  misc_feature 1..20: note = chemically synthesized
  source 1..20: mol_type = other DNA
tccaccatagcccactctcc

SEQ ID NO: 6260 - DNA, 20 bp, synthetic construct
  misc_feature 1..20: note = chemically synthesized
  source 1..20: mol_type = other DNA
actctccaagcacaaccctc

SEQ ID NO: 6261 - DNA, 20 bp, synthetic construct
  misc_feature 1..20: note = chemically synthesized
  source 1..20: mol_type = other DNA
ctctccaagcacaaccctcc

SEQ ID NO: 6262 - DNA, 20 bp, synthetic construct
  misc_feature 1..20: note = chemically synthesized
  source 1..20: mol_type = other DNA
gtcctcatcccccaccacgc

SEQ ID NO: 6263 - DNA, 20 bp, synthetic construct
  misc_feature 1..20: note = chemically synthesized
  source 1..20: mol_type = other DNA
tcctcatcccccaccacgca

SEQ ID NO: 6264 - DNA, 20 bp, synthetic construct
  misc_feature 1..20: note = chemically synthesized
  source 1..20: mol_type = other DNA
accacgcaaggcctcctccc

SEQ ID NO: 6265 - DNA, 20 bp, synthetic construct
  misc_feature 1..20: note = chemically synthesized
  source 1..20: mol_type = other DNA
gccctttgccctcgcttccc

SEQ ID NO: 6266 - DNA, 20 bp, synthetic construct
  misc_feature 1..20: note = chemically synthesized
  source 1..20: mol_type = other DNA
cacactaaatttgctcccct

SEQ ID NO: 6267 - DNA, 20 bp, synthetic construct
  misc_feature 1..20: note = chemically synthesized
  source 1..20: mol_type = other DNA
aaatttgctcccctcagccc

SEQ ID NO: 6268 - DNA, 20 bp, synthetic construct
  misc_feature 1..20: note = chemically synthesized
  source 1..20: mol_type = other DNA
aatttgctcccctcagcccg

SEQ ID NO: 6269 - DNA, 20 bp, synthetic construct
  misc_feature 1..20: note = chemically synthesized
  source 1..20: mol_type = other DNA
ctcagcccgaggtcatctca

SEQ ID NO: 6270 - DNA, 20 bp, synthetic construct
  misc_feature 1..20: note = chemically synthesized
  source 1..20: mol_type = other DNA
tcagcccgaggtcatctcac

SEQ ID NO: 6271 - DNA, 20 bp, synthetic construct
  misc_feature 1..20: note = chemically synthesized
  source 1..20: mol_type = other DNA
ttgatccatctgcaccctga

SEQ ID NO: 6272 - DNA, 20 bp, synthetic construct
  misc_feature 1..20: note = chemically synthesized
  source 1..20: mol_type = other DNA
cacccacgtcttcctgcaca

SEQ ID NO: 6273 - DNA, 20 bp, synthetic construct
  misc_feature 1..20: note = chemically synthesized
  source 1..20: mol_type = other DNA
cccacgtcttcctgcacaca

SEQ ID NO: 6274 - DNA, 20 bp, synthetic construct
  misc_feature 1..20: note = chemically synthesized
  source 1..20: mol_type = other DNA
cgtcttcctgcacacagagc

SEQ ID NO: 6275 - DNA, 20 bp, synthetic construct
  misc_feature 1..20: note = chemically synthesized
  source 1..20: mol_type = other DNA
gtcttcctgcacacagagct

SEQ ID NO: 6276 - DNA, 20 bp, synthetic construct
  misc_feature 1..20: note = chemically synthesized
  source 1..20: mol_type = other DNA
ggctccctctctgctgcctc

SEQ ID NO: 6277 - DNA, 20 bp, synthetic construct
  misc_feature 1..20: note = chemically synthesized
  source 1..20: mol_type = other DNA
ctctctgctgcctccagacc

SEQ ID NO: 6278 - DNA, 20 bp, synthetic construct
  misc_feature 1..20: note = chemically synthesized
  source 1..20: mol_type = other DNA
ctctgctgcctccagaccca

SEQ ID NO: 6279 - DNA, 20 bp, synthetic construct
  misc_feature 1..20: note = chemically synthesized
  source 1..20: mol_type = other DNA
tgctgcctccagacccagag

SEQ ID NO: 6280 - DNA, 20 bp, synthetic construct
  misc_feature 1..20: note = chemically synthesized
  source 1..20: mol_type = other DNA
ctccagacccagagcagctc

SEQ ID NO: 6281 - DNA, 20 bp, synthetic construct
  misc_feature 1..20: note = chemically synthesized
  source 1..20: mol_type = other DNA
cagagcagctccagttgtcc

SEQ ID NO: 6282 - DNA, 20 bp, synthetic construct
  misc_feature 1..20: note = chemically synthesized
  source 1..20: mol_type = other DNA
gctccagttgtcccagccct

SEQ ID NO: 6283 - DNA, 20 bp, synthetic construct
  misc_feature 1..20: note = chemically synthesized
  source 1..20: mol_type = other DNA
gccctgagctcctctctttg

SEQ ID NO: 6284 - DNA, 20 bp, synthetic construct
  misc_feature 1..20: note = chemically synthesized
  source 1..20: mol_type = other DNA
ttgcagcatccacctgcaaa

SEQ ID NO: 6285 - DNA, 20 bp, synthetic construct
  misc_feature 1..20: note = chemically synthesized
  source 1..20: mol_type = other DNA
cctgcaaacagaacaccttc

SEQ ID NO: 6286 - DNA, 20 bp, synthetic construct
  misc_feature 1..20: note = chemically synthesized
  source 1..20: mol_type = other DNA
ctgcaaacagaacaccttct

SEQ ID NO: 6287 - DNA, 20 bp, synthetic construct
  misc_feature 1..20: note = chemically synthesized
  source 1..20: mol_type = other DNA
acagaacaccttctaggcct

SEQ ID NO: 6288 - DNA, 20 bp, synthetic construct
  misc_feature 1..20: note = chemically synthesized
  source 1..20: mol_type = other DNA
ggccttggaccctgactctg

SEQ ID NO: 6289 - DNA, 20 bp, synthetic construct
  misc_feature 1..20: note = chemically synthesized
  source 1..20: mol_type = other DNA
attcctatcaccccccgacc

SEQ ID NO: 6290 - DNA, 20 bp, synthetic construct
  misc_feature 1..20: note = chemically synthesized
  source 1..20: mol_type = other DNA
cctatcaccccccgacccag

SEQ ID NO: 6291 - DNA, 20 bp, synthetic construct
  misc_feature 1..20: note = chemically synthesized
  source 1..20: mol_type = other DNA
ctatcaccccccgacccagc

SEQ ID NO: 6292 - DNA, 20 bp, synthetic construct
  misc_feature 1..20: note = chemically synthesized
  source 1..20: mol_type = other DNA
gacccagcaggaccacatcc

SEQ ID NO: 6293 - DNA, 20 bp, synthetic construct
  misc_feature 1..20: note = chemically synthesized
  source 1..20: mol_type = other DNA
acccagcaggaccacatcct

SEQ ID NO: 6294 - DNA, 20 bp, synthetic construct
  misc_feature 1..20: note = chemically synthesized
  source 1..20: mol_type = other DNA
cccagcaggaccacatcctg

SEQ ID NO: 6295 - DNA, 20 bp, synthetic construct
  misc_feature 1..20: note = chemically synthesized
  source 1..20: mol_type = other DNA
cagcaggaccacatcctggg

SEQ ID NO: 6296 - DNA, 20 bp, synthetic construct
  misc_feature 1..20: note = chemically synthesized
  source 1..20: mol_type = other DNA
agcaggaccacatcctgggg

SEQ ID NO: 6297 - DNA, 20 bp, synthetic construct
  misc_feature 1..20: note = chemically synthesized
  source 1..20: mol_type = other DNA
gaccacatcctggggaggct

SEQ ID NO: 6298 - DNA, 20 bp, synthetic construct
  misc_feature 1..20: note = chemically synthesized
  source 1..20: mol_type = other DNA
acatcctggggaggctcagt

SEQ ID NO: 6299 - DNA, 20 bp, synthetic construct
  misc_feature 1..20: note = chemically synthesized
  source 1..20: mol_type = other DNA
catcctggggaggctcagtc

SEQ ID NO: 6300 - DNA, 20 bp, synthetic construct
  misc_feature 1..20: note = chemically synthesized
  source 1..20: mol_type = other DNA
atcctggggaggctcagtca

SEQ ID NO: 6301 - DNA, 20 bp, synthetic construct
  misc_feature 1..20: note = chemically synthesized
  source 1..20: mol_type = other DNA
tcctggggaggctcagtcag

SEQ ID NO: 6302 - DNA, 20 bp, synthetic construct
  misc_feature 1..20: note = chemically synthesized
  source 1..20: mol_type = other DNA
gggaggctcagtcaggggcc

SEQ ID NO: 6303 - DNA, 20 bp, synthetic construct
  misc_feature 1..20: note = chemically synthesized
  source 1..20: mol_type = other DNA
gggcccagaatcttcctccc

SEQ ID NO: 6304 - DNA, 20 bp, synthetic construct
  misc_feature 1..20: note = chemically synthesized
  source 1..20: mol_type = other DNA
ggcccagaatcttcctcccc

SEQ ID NO: 6305 - DNA, 20 bp, synthetic construct
  misc_feature 1..20: note = chemically synthesized
  source 1..20: mol_type = other DNA
tcacttcctgccactgtcct

SEQ ID NO: 6306 - DNA, 20 bp, synthetic construct
  misc_feature 1..20: note = chemically synthesized
  source 1..20: mol_type = other DNA
ttcctgccactgtcctgagt

SEQ ID NO: 6307 - DNA, 20 bp, synthetic construct
  misc_feature 1..20: note = chemically synthesized
  source 1..20: mol_type = other DNA
gagtcagacactgcccctgt

SEQ ID NO: 6308 - DNA, 20 bp, synthetic construct
  misc_feature 1..20: note = chemically synthesized
  source 1..20: mol_type = other DNA
actcttcatctttttcacac

SEQ ID NO: 6309 - DNA, 20 bp, synthetic construct
  misc_feature 1..20: note = chemically synthesized
  source 1..20: mol_type = other DNA
gacttccaccttccccactg

SEQ ID NO: 6310 - DNA, 20 bp, synthetic construct
  misc_feature 1..20: note = chemically synthesized
  source 1..20: mol_type = other DNA
ttccccactgcagccacact

SEQ ID NO: 6311 - DNA, 20 bp, synthetic construct
  misc_feature 1..20: note = chemically synthesized
  source 1..20: mol_type = other DNA
tccccactgcagccacactc

SEQ ID NO: 6312 - DNA, 20 bp, synthetic construct
  misc_feature 1..20: note = chemically synthesized
  source 1..20: mol_type = other DNA
actcaggaccccatttgacc

SEQ ID NO: 6313 - DNA, 20 bp, synthetic construct
  misc_feature 1..20: note = chemically synthesized
  source 1..20: mol_type = other DNA
ctcaggaccccatttgaccc

SEQ ID NO: 6314 - DNA, 20 bp, synthetic construct
  misc_feature 1..20: note = chemically synthesized
  source 1..20: mol_type = other DNA
tcaggaccccatttgaccca

SEQ ID NO: 6315 - DNA, 20 bp, synthetic construct
  misc_feature 1..20: note = chemically synthesized
  source 1..20: mol_type = other DNA
aggaccccatttgacccagg

SEQ ID NO: 6316 - DNA, 20 bp, synthetic construct
  misc_feature 1..20: note = chemically synthesized
  source 1..20: mol_type = other DNA
ggaccccatttgacccaggg

SEQ ID NO: 6317 - DNA, 20 bp, synthetic construct
  misc_feature 1..20: note = chemically synthesized
  source 1..20: mol_type = other DNA
ccactgcccactcccgctct

SEQ ID NO: 6318 - DNA, 20 bp, synthetic construct
  misc_feature 1..20: note = chemically synthesized
  source 1..20: mol_type = other DNA
gcccactcccgctctgagca

SEQ ID NO: 6319 - DNA, 20 bp, synthetic construct
  misc_feature 1..20: note = chemically synthesized
  source 1..20: mol_type = other DNA
ctgcccccaccccttcctcc

SEQ ID NO: 6320 - DNA, 20 bp, synthetic construct
  misc_feature 1..20: note = chemically synthesized
  source 1..20: mol_type = other DNA
tgcccccaccccttcctcca

SEQ ID NO: 6321 - DNA, 20 bp, synthetic construct
  misc_feature 1..20: note = chemically synthesized
  source 1..20: mol_type = other DNA
cctttgcattcctctccatc

SEQ ID NO: 6322 - DNA, 20 bp, synthetic construct
  misc_feature 1..20: note = chemically synthesized
  source 1..20: mol_type = other DNA
ttgcattcctctccatccag

SEQ ID NO: 6323 - DNA, 20 bp, synthetic construct
  misc_feature 1..20: note = chemically synthesized
  source 1..20: mol_type = other DNA
ccagaagcgctccatgacca

SEQ ID NO: 6324 - DNA, 20 bp, synthetic construct
  misc_feature 1..20: note = chemically synthesized
  source 1..20: mol_type = other DNA
tgaccacggtgttccccacc

SEQ ID NO: 6325 - DNA, 20 bp, synthetic construct
  misc_feature 1..20: note = chemically synthesized
  source 1..20: mol_type = other DNA
cacggtgttccccaccaagc

SEQ ID NO: 6326 - DNA, 20 bp, synthetic construct
  misc_feature 1..20: note = chemically synthesized
  source 1..20: mol_type = other DNA
cccaccaagctggccctcca

SEQ ID NO: 6327 - DNA, 20 bp, synthetic construct
  misc_feature 1..20: note = chemically synthesized
  source 1..20: mol_type = other DNA
caagctggccctccatggct

SEQ ID NO: 6328 - DNA, 20 bp, synthetic construct
  misc_feature 1..20: note = chemically synthesized
  source 1..20: mol_type = other DNA
gagtccctgactgctgtctt

SEQ ID NO: 6329 - DNA, 20 bp, synthetic construct
  misc_feature 1..20: note = chemically synthesized
  source 1..20: mol_type = other DNA
tgtcttcagcaccctccact

SEQ ID NO: 6330 - DNA, 20 bp, synthetic construct
  misc_feature 1..20: note = chemically synthesized
  source 1..20: mol_type = other DNA
tcttcagcaccctccactca

SEQ ID NO: 6331 - DNA, 20 bp, synthetic construct
  misc_feature 1..20: note = chemically synthesized
  source 1..20: mol_type = other DNA
cttcagcaccctccactcag

SEQ ID NO: 6332 - DNA, 20 bp, synthetic construct
  misc_feature 1..20: note = chemically synthesized
  source 1..20: mol_type = other DNA
ttcagcaccctccactcaga

SEQ ID NO: 6333 - DNA, 20 bp, synthetic construct
  misc_feature 1..20: note = chemically synthesized
  source 1..20: mol_type = other DNA
gagggtcctgtcctgcttcc

SEQ ID NO: 6334 - DNA, 20 bp, synthetic construct
  misc_feature 1..20: note = chemically synthesized
  source 1..20: mol_type = other DNA
gacttatcaactcccaatgc

SEQ ID NO: 6335 - DNA, 20 bp, synthetic construct
  misc_feature 1..20: note = chemically synthesized
  source 1..20: mol_type = other DNA
acttatcaactcccaatgct

SEQ ID NO: 6336 - DNA, 20 bp, synthetic construct
  misc_feature 1..20: note = chemically synthesized
  source 1..20: mol_type = other DNA
atcaactcccaatgctgggt

SEQ ID NO: 6337 - DNA, 20 bp, synthetic construct
  misc_feature 1..20: note = chemically synthesized
  source 1..20: mol_type = other DNA
ctcccaatgctgggtcagcc

SEQ ID NO: 6338 - DNA, 20 bp, synthetic construct
  misc_feature 1..20: note = chemically synthesized
  source 1..20: mol_type = other DNA
ctgtatatccaccctgaaac

SEQ ID NO: 6339 - DNA, 20 bp, synthetic construct
  misc_feature 1..20: note = chemically synthesized
  source 1..20: mol_type = other DNA
ccctgaaaccagactgccca

SEQ ID NO: 6340 - DNA, 20 bp, synthetic construct
  misc_feature 1..20: note = chemically synthesized
  source 1..20: mol_type = other DNA
cctgaaaccagactgcccac

SEQ ID NO: 6341 - DNA, 20 bp, synthetic construct
  misc_feature 1..20: note = chemically synthesized
  source 1..20: mol_type = other DNA
ctgaaaccagactgcccaca

SEQ ID NO: 6342 - DNA, 20 bp, synthetic construct
  misc_feature 1..20: note = chemically synthesized
  source 1..20: mol_type = other DNA
aaaccagactgcccacaggg

SEQ ID NO: 6343 - DNA, 20 bp, synthetic construct
  misc_feature 1..20: note = chemically synthesized
  source 1..20: mol_type = other DNA
agactgcccacagggtagcc

SEQ ID NO: 6344 - DNA, 20 bp, synthetic construct
  misc_feature 1..20: note = chemically synthesized
  source 1..20: mol_type = other DNA
gggtagcccagctgtgcctc

SEQ ID NO: 6345 - DNA, 20 bp, synthetic construct
  misc_feature 1..20: note = chemically synthesized
  source 1..20: mol_type = other DNA
ggtagcccagctgtgcctcc

SEQ ID NO: 6346 - DNA, 20 bp, synthetic construct
  misc_feature 1..20: note = chemically synthesized
  source 1..20: mol_type = other DNA
agcccagctgtgcctccagg

SEQ ID NO: 6347 - DNA, 20 bp, synthetic construct
  misc_feature 1..20: note = chemically synthesized
  source 1..20: mol_type = other DNA
ctgtgcctccaggtagctct

SEQ ID NO: 6348 - DNA, 20 bp, synthetic construct
  misc_feature 1..20: note = chemically synthesized
  source 1..20: mol_type = other DNA
gtagctctgagatcatgcac

SEQ ID NO: 6349 - DNA, 20 bp, synthetic construct
  misc_feature 1..20: note = chemically synthesized
  source 1..20: mol_type = other DNA
ccattttctcgtgtgtaaaa

SEQ ID NO: 6350 - DNA, 20 bp, synthetic construct
  misc_feature 1..20: note = chemically synthesized
  source 1..20: mol_type = other DNA
attttctcgtgtgtaaaatg

SEQ ID NO: 6351 - DNA, 20 bp, synthetic construct
  misc_feature 1..20: note = chemically synthesized
  source 1..20: mol_type = other DNA
cgtgtgtaaaatggagatca

SEQ ID NO: 6352 - DNA, 20 bp, synthetic construct
  misc_feature 1..20: note = chemically synthesized
  source 1..20: mol_type = other DNA
taaaatggagatcacagtcg

SEQ ID NO: 6353 - DNA, 20 bp, synthetic construct
  misc_feature 1..20: note = chemically synthesized
  source 1..20: mol_type = other DNA
cacagtcgtagctacccgat

SEQ ID NO: 6354 - DNA, 20 bp, synthetic construct
  misc_feature 1..20: note = chemically synthesized
  source 1..20: mol_type = other DNA
agctacccgattggattgct

SEQ ID NO: 6355 - DNA, 20 bp, synthetic construct
  misc_feature 1..20: note = chemically synthesized
  source 1..20: mol_type = other DNA
gattggattgctcggataat

SEQ ID NO: 6356 - DNA, 20 bp, synthetic construct
  misc_feature 1..20: note = chemically synthesized
  source 1..20: mol_type = other DNA
gattgctcggataattagat

SEQ ID NO: 6357 - DNA, 20 bp, synthetic construct
  misc_feature 1..20: note = chemically synthesized
  source 1..20: mol_type = other DNA
aaaatatgtaatgtgcttct

SEQ ID NO: 6358 - DNA, 20 bp, synthetic construct
  misc_feature 1..20: note = chemically synthesized
  source 1..20: mol_type = other DNA
aaatatgtaatgtgcttctt

SEQ ID NO: 6359 - DNA, 20 bp, synthetic construct
  misc_feature 1..20: note = chemically synthesized
  source 1..20: mol_type = other DNA
gtaatgtgcttcttaggcaa

SEQ ID NO: 6360 - DNA, 20 bp, synthetic construct
  misc_feature 1..20: note = chemically synthesized
  source 1..20: mol_type = other DNA
aggcaaaagtttgaacataa

SEQ ID NO: 6361 - DNA, 20 bp, synthetic construct
  misc_feature 1..20: note = chemically synthesized
  source 1..20: mol_type = other DNA
aaaagtttgaacataaaaga

SEQ ID NO: 6362 - DNA, 20 bp, synthetic construct
  misc_feature 1..20: note = chemically synthesized
  source 1..20: mol_type = other DNA
aaagtttgaacataaaagac

SEQ ID NO: 6363 - DNA, 20 bp, synthetic construct
  misc_feature 1..20: note = chemically synthesized
  source 1..20: mol_type = other DNA
aagtttgaacataaaagaca

SEQ ID NO: 6364 - DNA, 20 bp, synthetic construct
  misc_feature 1..20: note = chemically synthesized
  source 1..20: mol_type = other DNA
ataaaagacagggtctgccc

SEQ ID NO: 6365 - DNA, 20 bp, synthetic construct
  misc_feature 1..20: note = chemically synthesized
  source 1..20: mol_type = other DNA
aagacagggtctgcccaaga

SEQ ID NO: 6366 - DNA, 20 bp, synthetic construct
  misc_feature 1..20: note = chemically synthesized
  source 1..20: mol_type = other DNA
agacagggtctgcccaagat

SEQ ID NO: 6367 - DNA, 20 bp, synthetic construct
  misc_feature 1..20: note = chemically synthesized
  source 1..20: mol_type = other DNA
cagggtctgcccaagatggg

SEQ ID NO: 6368 - DNA, 20 bp, synthetic construct
  misc_feature 1..20: note = chemically synthesized
  source 1..20: mol_type = other DNA
gggtctgcccaagatgggaa

SEQ ID NO: 6369 - DNA, 20 bp, synthetic construct
  misc_feature 1..20: note = chemically synthesized
  source 1..20: mol_type = other DNA
gggaagagttcttctctccc

SEQ ID NO: 6370 - DNA, 20 bp, synthetic construct
  misc_feature 1..20: note = chemically synthesized
  source 1..20: mol_type = other DNA
agaaacaatcaaaacaaaaa

SEQ ID NO: 6371 - DNA, 20 bp, synthetic construct
  misc_feature 1..20: note = chemically synthesized
  source 1..20: mol_type = other DNA
aaaacaaaaacagacaacta

SEQ ID NO: 6372 - DNA, 20 bp, synthetic construct
  misc_feature 1..20: note = chemically synthesized
  source 1..20: mol_type = other DNA
aaacagacaactatagaaca

SEQ ID NO: 6373 - DNA, 20 bp, synthetic construct
  misc_feature 1..20: note = chemically synthesized
  source 1..20: mol_type = other DNA
cagacaactatagaacatgg

SEQ ID NO: 6374 - DNA, 20 bp, synthetic construct
  misc_feature 1..20: note = chemically synthesized
  source 1..20: mol_type = other DNA
tatagaacatggcagctttc

SEQ ID NO: 6375 - DNA, 20 bp, synthetic construct
  misc_feature 1..20: note = chemically synthesized
  source 1..20: mol_type = other DNA
catggcagctttcaagactc

SEQ ID NO: 6376 - DNA, 20 bp, synthetic construct
  misc_feature 1..20: note = chemically synthesized
  source 1..20: mol_type = other DNA
gctttcaagactctggacat

SEQ ID NO: 6377 - DNA, 20 bp, synthetic construct
  misc_feature 1..20: note = chemically synthesized
  source 1..20: mol_type = other DNA
ctttcaagactctggacatc

SEQ ID NO: 6378 - DNA, 20 bp, synthetic construct
  misc_feature 1..20: note = chemically synthesized
  source 1..20: mol_type = other DNA
caagactctggacatcaggc

SEQ ID NO: 6379 - DNA, 20 bp, synthetic construct
  misc_feature 1..20: note = chemically synthesized
  source 1..20: mol_type = other DNA
aagactctggacatcaggca

SEQ ID NO: 6380 - DNA, 20 bp, synthetic construct
  misc_feature 1..20: note = chemically synthesized
  source 1..20: mol_type = other DNA
gactctggacatcaggcaag

SEQ ID NO: 6381 - DNA, 20 bp, synthetic construct
  misc_feature 1..20: note = chemically synthesized
  source 1..20: mol_type = other DNA
actctggacatcaggcaagg

SEQ ID NO: 6382 - DNA, 20 bp, synthetic construct
  misc_feature 1..20: note = chemically synthesized
  source 1..20: mol_type = other DNA
tctggacatcaggcaaggag

SEQ ID NO: 6383 - DNA, 20 bp, synthetic construct
  misc_feature 1..20: note = chemically synthesized
  source 1..20: mol_type = other DNA
acatcaggcaaggaggagta

SEQ ID NO: 6384 - DNA, 20 bp, synthetic construct
  misc_feature 1..20: note = chemically synthesized
  source 1..20: mol_type = other DNA
aaggaggagtaaagatccct

SEQ ID NO: 6385 - DNA, 20 bp, synthetic construct
  misc_feature 1..20: note = chemically synthesized
  source 1..20: mol_type = other DNA
aggaggagtaaagatccctg

SEQ ID NO: 6386 - DNA, 20 bp, synthetic construct
  misc_feature 1..20: note = chemically synthesized
  source 1..20: mol_type = other DNA
ggaggagtaaagatccctga

SEQ ID NO: 6387 - DNA, 20 bp, synthetic construct
  misc_feature 1..20: note = chemically synthesized
  source 1..20: mol_type = other DNA
agtaaagatccctgagggat

SEQ ID NO: 6388 - DNA, 20 bp, synthetic construct
  misc_feature 1..20: note = chemically synthesized
  source 1..20: mol_type = other DNA
aaagatccctgagggataag

SEQ ID NO: 6389 - DNA, 20 bp, synthetic construct
  misc_feature 1..20: note = chemically synthesized
  source 1..20: mol_type = other DNA
gagggataagaagcaaacaa

SEQ ID NO: 6390 - DNA, 20 bp, synthetic construct
  misc_feature 1..20: note = chemically synthesized
  source 1..20: mol_type = other DNA
agggataagaagcaaacaac

SEQ ID NO: 6391 - DNA, 20 bp, synthetic construct
  misc_feature 1..20: note = chemically synthesized
  source 1..20: mol_type = other DNA
caggaaccctccgatcaccc

SEQ ID NO: 6392 - DNA, 20 bp, synthetic construct
  misc_feature 1..20: note = chemically synthesized
  source 1..20: mol_type = other DNA
gatcaccccagcttactgtt

SEQ ID NO: 6393 - DNA, 20 bp, synthetic construct
  misc_feature 1..20: note = chemically synthesized
  source 1..20: mol_type = other DNA
tcaccccagcttactgtttg

SEQ ID NO: 6394 - DNA, 20 bp, synthetic construct
  misc_feature 1..20: note = chemically synthesized
  source 1..20: mol_type = other DNA
accccagcttactgtttgga

SEQ ID NO: 6395 - DNA, 20 bp, synthetic construct
  misc_feature 1..20: note = chemically synthesized
  source 1..20: mol_type = other DNA
cccagcttactgtttggaga

SEQ ID NO: 6396 - DNA, 20 bp, synthetic construct
  misc_feature 1..20: note = chemically synthesized
  source 1..20: mol_type = other DNA
tactgtttggagagagtctg

SEQ ID NO: 6397 - DNA, 20 bp, synthetic construct
  misc_feature 1..20: note = chemically synthesized
  source 1..20: mol_type = other DNA
actgtttggagagagtctgc

SEQ ID NO: 6398 - DNA, 20 bp, synthetic construct
  misc_feature 1..20: note = chemically synthesized
  source 1..20: mol_type = other DNA
tggagagagtctgcaggtta

SEQ ID NO: 6399 - DNA, 20 bp, synthetic construct
  misc_feature 1..20: note = chemically synthesized
  source 1..20: mol_type = other DNA
ggagagagtctgcaggttac

SEQ ID NO: 6400 - DNA, 20 bp, synthetic construct
  misc_feature 1..20: note = chemically synthesized
  source 1..20: mol_type = other DNA
agagtctgcaggttacaggc

SEQ ID NO: 6401 - DNA, 20 bp, synthetic construct
  misc_feature 1..20: note = chemically synthesized
  source 1..20: mol_type = other DNA
gagtctgcaggttacaggcc

SEQ ID NO: 6402 - DNA, 20 bp, synthetic construct
  misc_feature 1..20: note = chemically synthesized
  source 1..20: mol_type = other DNA
ctgcaggttacaggccagga

SEQ ID NO: 6403 - DNA, 20 bp, synthetic construct
  misc_feature 1..20: note = chemically synthesized
  source 1..20: mol_type = other DNA
tgcaggttacaggccaggaa

SEQ ID NO: 6404 - DNA, 20 bp, synthetic construct
  misc_feature 1..20: note = chemically synthesized
  source 1..20: mol_type = other DNA
gcaggttacaggccaggaaa

SEQ ID NO: 6405 - DNA, 20 bp, synthetic construct
  misc_feature 1..20: note = chemically synthesized
  source 1..20: mol_type = other DNA
ggttacaggccaggaaaggg

SEQ ID NO: 6406 - DNA, 20 bp, synthetic construct
  misc_feature 1..20: note = chemically synthesized
  source 1..20: mol_type = other DNA
caggccaggaaagggaagtc

SEQ ID NO: 6407 - DNA, 20 bp, synthetic construct
  misc_feature 1..20: note = chemically synthesized
  source 1..20: mol_type = other DNA
aggccaggaaagggaagtcc

SEQ ID NO: 6408 - DNA, 20 bp, synthetic construct
  misc_feature 1..20: note = chemically synthesized
  source 1..20: mol_type = other DNA
ccaggaaagggaagtccagg

SEQ ID NO: 6409 - DNA, 20 bp, synthetic construct
  misc_feature 1..20: note = chemically synthesized
  source 1..20: mol_type = other DNA
aggaaagggaagtccaggca

SEQ ID NO: 6410 - DNA, 20 bp, synthetic construct
  misc_feature 1..20: note = chemically synthesized
  source 1..20: mol_type = other DNA
gggaagtccaggcagagccc

SEQ ID NO: 6411 - DNA, 20 bp, synthetic construct
  misc_feature 1..20: note = chemically synthesized
  source 1..20: mol_type = other DNA
gaagtccaggcagagcccaa

SEQ ID NO: 6412 - DNA, 20 bp, synthetic construct
  misc_feature 1..20: note = chemically synthesized
  source 1..20: mol_type = other DNA
cccaagagactccccacgtt

SEQ ID NO: 6413 - DNA, 20 bp, synthetic construct
  misc_feature 1..20: note = chemically synthesized
  source 1..20: mol_type = other DNA
ccaagagactccccacgttg

SEQ ID NO: 6414 - DNA, 20 bp, synthetic construct
  misc_feature 1..20: note = chemically synthesized
  source 1..20: mol_type = other DNA
aagagactccccacgttgag

SEQ ID NO: 6415 - DNA, 20 bp, synthetic construct
  misc_feature 1..20: note = chemically synthesized
  source 1..20: mol_type = other DNA
gactccccacgttgaggaga

SEQ ID NO: 6416 - DNA, 20 bp, synthetic construct
  misc_feature 1..20: note = chemically synthesized
  source 1..20: mol_type = other DNA
ctccccacgttgaggagatg

SEQ ID NO: 6417 - DNA, 20 bp, synthetic construct
  misc_feature 1..20: note = chemically synthesized
  source 1..20: mol_type = other DNA
cacgttgaggagatggagct

SEQ ID NO: 6418 - DNA, 20 bp, synthetic construct
  misc_feature 1..20: note = chemically synthesized
  source 1..20: mol_type = other DNA
cgttgaggagatggagctga

SEQ ID NO: 6419 - DNA, 20 bp, synthetic construct
  misc_feature 1..20: note = chemically synthesized
  source 1..20: mol_type = other DNA
ggagatggagctgagagtcc

SEQ ID NO: 6420 - DNA, 20 bp, synthetic construct
  misc_feature 1..20: note = chemically synthesized
  source 1..20: mol_type = other DNA
gagatggagctgagagtccg

SEQ ID NO: 6421 - DNA, 20 bp, synthetic construct
  misc_feature 1..20: note = chemically synthesized
  source 1..20: mol_type = other DNA
gatggagctgagagtccgag

SEQ ID NO: 6422 - DNA, 20 bp, synthetic construct
  misc_feature 1..20: note = chemically synthesized
  source 1..20: mol_type = other DNA
ccgaggagaccaaaacaatt

SEQ ID NO: 6423 - DNA, 20 bp, synthetic construct
  misc_feature 1..20: note = chemically synthesized
  source 1..20: mol_type = other DNA
gaggagaccaaaacaattaa

SEQ ID NO: 6424 - DNA, 20 bp, synthetic construct
  misc_feature 1..20: note = chemically synthesized
  source 1..20: mol_type = other DNA
caaacgatcaaactgactct

SEQ ID NO: 6425 - DNA, 20 bp, synthetic construct
  misc_feature 1..20: note = chemically synthesized
  source 1..20: mol_type = other DNA
taagttgcttaactgcatcc

SEQ ID NO: 6426 - DNA, 20 bp, synthetic construct
  misc_feature 1..20: note = chemically synthesized
  source 1..20: mol_type = other DNA
agttgcttaactgcatcccg

SEQ ID NO: 6427 - DNA, 20 bp, synthetic construct
  misc_feature 1..20: note = chemically synthesized
  source 1..20: mol_type = other DNA
cttaactgcatcccggagca

SEQ ID NO: 6428 - DNA, 20 bp, synthetic construct
  misc_feature 1..20: note = chemically synthesized
  source 1..20: mol_type = other DNA
tgcatcccggagcaaagctc

SEQ ID NO: 6429 - DNA, 20 bp, synthetic construct
  misc_feature 1..20: note = chemically synthesized
  source 1..20: mol_type = other DNA
gagcaaagctcaagaacatt

SEQ ID NO: 6430 - DNA, 20 bp, synthetic construct
  misc_feature 1..20: note = chemically synthesized
  source 1..20: mol_type = other DNA
gcaaagctcaagaacattta

SEQ ID NO: 6431 - DNA, 20 bp, synthetic construct
  misc_feature 1..20: note = chemically synthesized
  source 1..20: mol_type = other DNA
caaagctcaagaacatttag

SEQ ID NO: 6432 - DNA, 20 bp, synthetic construct
  misc_feature 1..20: note = chemically synthesized
  source 1..20: mol_type = other DNA
tagaggaatacaaaaatatc

SEQ ID NO: 6433 - DNA, 20 bp, synthetic construct
  misc_feature 1..20: note = chemically synthesized
  source 1..20: mol_type = other DNA
aaaaatatccagcacccaac

SEQ ID NO: 6434 - DNA, 20 bp, synthetic construct
  misc_feature 1..20: note = chemically synthesized
  source 1..20: mol_type = other DNA
aaaatatccagcacccaaca

SEQ ID NO: 6435 - DNA, 20 bp, synthetic construct
  misc_feature 1..20: note = chemically synthesized
  source 1..20: mol_type = other DNA
aaggtgaaattgacaatgtc

SEQ ID NO: 6436 - DNA, 20 bp, synthetic construct
  misc_feature 1..20: note = chemically synthesized
  source 1..20: mol_type = other DNA
gtgaaattgacaatgtctgg

SEQ ID NO: 6437 - DNA, 20 bp, synthetic construct
  misc_feature 1..20: note = chemically synthesized
  source 1..20: mol_type = other DNA
caatgtctggcagccaatca

SEQ ID NO: 6438 - DNA, 20 bp, synthetic construct
  misc_feature 1..20: note = chemically synthesized
  source 1..20: mol_type = other DNA
ggcagccaatcaaagattac

SEQ ID NO: 6439 - DNA, 20 bp, synthetic construct
  misc_feature 1..20: note = chemically synthesized
  source 1..20: mol_type = other DNA
gcagccaatcaaagattaca

SEQ ID NO: 6440 - DNA, 20 bp, synthetic construct
  misc_feature 1..20: note = chemically synthesized
  source 1..20: mol_type = other DNA
ttacaaggcatgcaatgaaa

SEQ ID NO: 6441 - DNA, 20 bp, synthetic construct
  misc_feature 1..20: note = chemically synthesized
  source 1..20: mol_type = other DNA
tacaaggcatgcaatgaaac

SEQ ID NO: 6442 - DNA, 20 bp, synthetic construct
  misc_feature 1..20: note = chemically synthesized
  source 1..20: mol_type = other DNA
gggaaaacacaatgcataac

SEQ ID NO: 6443 - DNA, 20 bp, synthetic construct
  misc_feature 1..20: note = chemically synthesized
  source 1..20: mol_type = other DNA
ggaaaacacaatgcataacg

SEQ ID NO: 6444 - DNA, 20 bp, synthetic construct
  misc_feature 1..20: note = chemically synthesized
  source 1..20: mol_type = other DNA
aaaacacaatgcataacgag

SEQ ID NO: 6445 - DNA, 20 bp, synthetic construct
  misc_feature 1..20: note = chemically synthesized
  source 1..20: mol_type = other DNA
aaacacaatgcataacgagg

SEQ ID NO: 6446 - DNA, 20 bp, synthetic construct
  misc_feature 1..20: note = chemically synthesized
  source 1..20: mol_type = other DNA
aggaggttcataaatatcaa

SEQ ID NO: 6447 - DNA, 20 bp, synthetic construct
  misc_feature 1..20: note = chemically synthesized
  source 1..20: mol_type = other DNA
gaggttcataaatatcaaaa

SEQ ID NO: 6448 - DNA, 20 bp, synthetic construct
  misc_feature 1..20: note = chemically synthesized
  source 1..20: mol_type = other DNA
cataaatatcaaaagagatc

SEQ ID NO: 6449 - DNA, 20 bp, synthetic construct
  misc_feature 1..20: note = chemically synthesized
  source 1..20: mol_type = other DNA
aaagagatccagaactgaca

SEQ ID NO: 6450 - DNA, 20 bp, synthetic construct
  misc_feature 1..20: note = chemically synthesized
  source 1..20: mol_type = other DNA
tccagaactgacacggatgc

SEQ ID NO: 6451 - DNA, 20 bp, synthetic construct
  misc_feature 1..20: note = chemically synthesized
  source 1..20: mol_type = other DNA
actgacacggatgctagaat

SEQ ID NO: 6452 - DNA, 20 bp, synthetic construct
  misc_feature 1..20: note = chemically synthesized
  source 1..20: mol_type = other DNA
gacacggatgctagaattag

SEQ ID NO: 6453 - DNA, 20 bp, synthetic construct
  misc_feature 1..20: note = chemically synthesized
  source 1..20: mol_type = other DNA
acacggatgctagaattagc

SEQ ID NO: 6454 - DNA, 20 bp, synthetic construct
  misc_feature 1..20: note = chemically synthesized
  source 1..20: mol_type = other DNA
ggatgctagaattagcaggc

SEQ ID NO: 6455 - DNA, 20 bp, synthetic construct
  misc_feature 1..20: note = chemically synthesized
  source 1..20: mol_type = other DNA
gatgctagaattagcaggca

SEQ ID NO: 6456 - DNA, 20 bp, synthetic construct
  misc_feature 1..20: note = chemically synthesized
  source 1..20: mol_type = other DNA
ctagaattagcaggcaagga

SEQ ID NO: 6457 - DNA, 20 bp, synthetic construct
  misc_feature 1..20: note = chemically synthesized
  source 1..20: mol_type = other DNA
agcaggcaaggatggtaaaa

SEQ ID NO: 6458 - DNA, 20 bp, synthetic construct
  misc_feature 1..20: note = chemically synthesized
  source 1..20: mol_type = other DNA
ggatggtaaaacagatatta

SEQ ID NO: 6459 - DNA, 20 bp, synthetic construct
  misc_feature 1..20: note = chemically synthesized
  source 1..20: mol_type = other DNA
cccattatgttcaaaaaatt

SEQ ID NO: 6460 - DNA, 20 bp, synthetic construct
  misc_feature 1..20: note = chemically synthesized
  source 1..20: mol_type = other DNA
attatgttcaaaaaattaag

SEQ ID NO: 6461 - DNA, 20 bp, synthetic construct
  misc_feature 1..20: note = chemically synthesized
  source 1..20: mol_type = other DNA
caaaaaattaagtagaattg

SEQ ID NO: 6462 - DNA, 20 bp, synthetic construct
  misc_feature 1..20: note = chemically synthesized
  source 1..20: mol_type = other DNA
aaaaattaagtagaattgtg

SEQ ID NO: 6463 - DNA, 20 bp, synthetic construct
  misc_feature 1..20: note = chemically synthesized
  source 1..20: mol_type = other DNA
aaaattaagtagaattgtgg

SEQ ID NO: 6464 - DNA, 20 bp, synthetic construct
  misc_feature 1..20: note = chemically synthesized
  source 1..20: mol_type = other DNA
tagaattgtggaggatattt

SEQ ID NO: 6465 - DNA, 20 bp, synthetic construct
  misc_feature 1..20: note = chemically synthesized
  source 1..20: mol_type = other DNA
gaattgtggaggatatttaa

SEQ ID NO: 6466 - DNA, 20 bp, synthetic construct
  misc_feature 1..20: note = chemically synthesized
  source 1..20: mol_type = other DNA
ggaggatatttaagagtccc

SEQ ID NO: 6467 - DNA, 20 bp, synthetic construct
  misc_feature 1..20: note = chemically synthesized
  source 1..20: mol_type = other DNA
gaggatatttaagagtcccc

SEQ ID NO: 6468 - DNA, 20 bp, synthetic construct
  misc_feature 1..20: note = chemically synthesized
  source 1..20: mol_type = other DNA
agagtccccaggtgaacttc

SEQ ID NO: 6469 - DNA, 20 bp, synthetic construct
  misc_feature 1..20: note = chemically synthesized
  source 1..20: mol_type = other DNA
agtccccaggtgaacttcta

SEQ ID NO: 6470 - DNA, 20 bp, synthetic construct
  misc_feature 1..20: note = chemically synthesized
  source 1..20: mol_type = other DNA
tctgaaatgaaaaaacacac

SEQ ID NO: 6471 - DNA, 20 bp, synthetic construct
  misc_feature 1..20: note = chemically synthesized
  source 1..20: mol_type = other DNA
aaatgaaaaaacacactggc

SEQ ID NO: 6472 - DNA, 20 bp, synthetic construct
  misc_feature 1..20: note = chemically synthesized
  source 1..20: mol_type = other DNA
aatgaaaaaacacactggcc

SEQ ID NO: 6473 - DNA, 20 bp, synthetic construct
  misc_feature 1..20: note = chemically synthesized
  source 1..20: mol_type = other DNA
aacacactggccaggcgccg

SEQ ID NO: 6474 - DNA, 20 bp, synthetic construct
  misc_feature 1..20: note = chemically synthesized
  source 1..20: mol_type = other DNA
caggcgccgtggctcacgcc

SEQ ID NO: 6475 - DNA, 20 bp, synthetic construct
  misc_feature 1..20: note = chemically synthesized
  source 1..20: mol_type = other DNA
gtggctcacgcctggaatcc

SEQ ID NO: 6476 - DNA, 20 bp, synthetic construct
  misc_feature 1..20: note = chemically synthesized
  source 1..20: mol_type = other DNA
cgcctggaatcccagcactg

SEQ ID NO: 6477 - DNA, 20 bp, synthetic construct
  misc_feature 1..20: note = chemically synthesized
  source 1..20: mol_type = other DNA
gcctggaatcccagcactgt

SEQ ID NO: 6478 - DNA, 20 bp, synthetic construct
  misc_feature 1..20: note = chemically synthesized
  source 1..20: mol_type = other DNA
ctggaatcccagcactgtgg

SEQ ID NO: 6479 - DNA, 20 bp, synthetic construct
  misc_feature 1..20: note = chemically synthesized
  source 1..20: mol_type = other DNA
tggaatcccagcactgtggg

SEQ ID NO: 6480 - DNA, 20 bp, synthetic construct
  misc_feature 1..20: note = chemically synthesized
  source 1..20: mol_type = other DNA
tcccagcactgtgggaggcc

SEQ ID NO: 6481 - DNA, 20 bp, synthetic construct
  misc_feature 1..20: note = chemically synthesized
  source 1..20: mol_type = other DNA
cccagcactgtgggaggcca

SEQ ID NO: 6482 - DNA, 20 bp, synthetic construct
  misc_feature 1..20: note = chemically synthesized
  source 1..20: mol_type = other DNA
agcactgtgggaggccaagg

SEQ ID NO: 6483 - DNA, 20 bp, synthetic construct
  misc_feature 1..20: note = chemically synthesized
  source 1..20: mol_type = other DNA
gcactgtgggaggccaaggc

SEQ ID NO: 6484 - DNA, 20 bp, synthetic construct
  misc_feature 1..20: note = chemically synthesized
  source 1..20: mol_type = other DNA
ctgtgggaggccaaggcggg

SEQ ID NO: 6485 - DNA, 20 bp, synthetic construct
  misc_feature 1..20: note = chemically synthesized
  source 1..20: mol_type = other DNA
ggccaaggcgggcagatcat

SEQ ID NO: 6486 - DNA, 20 bp, synthetic construct
  misc_feature 1..20: note = chemically synthesized
  source 1..20: mol_type = other DNA
gccaaggcgggcagatcatg

SEQ ID NO: 6487 - DNA, 20 bp, synthetic construct
  misc_feature 1..20: note = chemically synthesized
  source 1..20: mol_type = other DNA
aggcgggcagatcatgaggt

SEQ ID NO: 6488 - DNA, 20 bp, synthetic construct
  misc_feature 1..20: note = chemically synthesized
  source 1..20: mol_type = other DNA
ggcgggcagatcatgaggtc

SEQ ID NO: 6489 - DNA, 20 bp, synthetic construct
  misc_feature 1..20: note = chemically synthesized
  source 1..20: mol_type = other DNA
cgggcagatcatgaggtcag

SEQ ID NO: 6490 - DNA, 20 bp, synthetic construct
  misc_feature 1..20: note = chemically synthesized
  source 1..20: mol_type = other DNA
tcaggagatcgacaccatcc

SEQ ID NO: 6491 - DNA, 20 bp, synthetic construct
  misc_feature 1..20: note = chemically synthesized
  source 1..20: mol_type = other DNA
cgacaccatcctggctaaca

SEQ ID NO: 6492 - DNA, 20 bp, synthetic construct
  misc_feature 1..20: note = chemically synthesized
  source 1..20: mol_type = other DNA
ctactaaaaatacaaaaaat

SEQ ID NO: 6493 - DNA, 20 bp, synthetic construct
  misc_feature 1..20: note = chemically synthesized
  source 1..20: mol_type = other DNA
taaaaatacaaaaaattagc

SEQ ID NO: 6494 - DNA, 20 bp, synthetic construct
  misc_feature 1..20: note = chemically synthesized
  source 1..20: mol_type = other DNA
tacaaaaaattagccagacg

SEQ ID NO: 6495 - DNA, 20 bp, synthetic construct
  misc_feature 1..20: note = chemically synthesized
  source 1..20: mol_type = other DNA
aaaaaattagccagacgtgg

SEQ ID NO: 6496 - DNA, 20 bp, synthetic construct
  misc_feature 1..20: note = chemically synthesized
  source 1..20: mol_type = other DNA
aaattagccagacgtggtgg

SEQ ID NO: 6497 - DNA, 20 bp, synthetic construct
  misc_feature 1..20: note = chemically synthesized
  source 1..20: mol_type = other DNA
aattagccagacgtggtggc

SEQ ID NO: 6498 - DNA, 20 bp, synthetic construct
  misc_feature 1..20: note = chemically synthesized
  source 1..20: mol_type = other DNA
gacgtggtggcaggcgcctg

SEQ ID NO: 6499 - DNA, 20 bp, synthetic construct
  misc_feature 1..20: note = chemically synthesized
  source 1..20: mol_type = other DNA
gtggcaggcgcctgtagtcc

SEQ ID NO: 6500 - DNA, 20 bp, synthetic construct
  misc_feature 1..20: note = chemically synthesized
  source 1..20: mol_type = other DNA
cgcctgtagtcccagctact

SEQ ID NO: 6501 - DNA, 20 bp, synthetic construct
  misc_feature 1..20: note = chemically synthesized
  source 1..20: mol_type = other DNA
gcctgtagtcccagctactc

SEQ ID NO: 6502 - DNA, 20 bp, synthetic construct
  misc_feature 1..20: note = chemically synthesized
  source 1..20: mol_type = other DNA
ctgtagtcccagctactcgg

SEQ ID NO: 6503 - DNA, 20 bp, synthetic construct
  misc_feature 1..20: note = chemically synthesized
  source 1..20: mol_type = other DNA
tgtagtcccagctactcggg

SEQ ID NO: 6504 - DNA, 20 bp, synthetic construct
  misc_feature 1..20: note = chemically synthesized
  source 1..20: mol_type = other DNA
tcccagctactcgggaggct

SEQ ID NO: 6505 - DNA, 20 bp, synthetic construct
  misc_feature 1..20: note = chemically synthesized
  source 1..20: mol_type = other DNA
cccagctactcgggaggctg

SEQ ID NO: 6506 - DNA, 20 bp, synthetic construct
  misc_feature 1..20: note = chemically synthesized
  source 1..20: mol_type = other DNA
agctactcgggaggctgagg

SEQ ID NO: 6507 - DNA, 20 bp, synthetic construct
  misc_feature 1..20: note = chemically synthesized
  source 1..20: mol_type = other DNA
gctactcgggaggctgaggc

SEQ ID NO: 6508 - DNA, 20 bp, synthetic construct
  misc_feature 1..20: note = chemically synthesized
  source 1..20: mol_type = other DNA
tactcgggaggctgaggcag

SEQ ID NO: 6509 - DNA, 20 bp, synthetic construct
  misc_feature 1..20: note = chemically synthesized
  source 1..20: mol_type = other DNA
gggaggctgaggcaggagaa

SEQ ID NO: 6510 - DNA, 20 bp, synthetic construct
  misc_feature 1..20: note = chemically synthesized
  source 1..20: mol_type = other DNA
gcaggagaatggcatgaacc

SEQ ID NO: 6511 - DNA, 20 bp, synthetic construct
  misc_feature 1..20: note = chemically synthesized
  source 1..20: mol_type = other DNA
caggagaatggcatgaaccc

SEQ ID NO: 6512 - DNA, 20 bp, synthetic construct
  misc_feature 1..20: note = chemically synthesized
  source 1..20: mol_type = other DNA
ggagaatggcatgaacccgg

SEQ ID NO: 6513 - DNA, 20 bp, synthetic construct
  misc_feature 1..20: note = chemically synthesized
  source 1..20: mol_type = other DNA
gagaatggcatgaacccggg

SEQ ID NO: 6514 - DNA, 20 bp, synthetic construct
  misc_feature 1..20: note = chemically synthesized
  source 1..20: mol_type = other DNA
aatggcatgaacccgggagg

SEQ ID NO: 6515 - DNA, 20 bp, synthetic construct
  misc_feature 1..20: note = chemically synthesized
  source 1..20: mol_type = other DNA
tggcatgaacccgggaggca

SEQ ID NO: 6516 - DNA, 20 bp, synthetic construct
  misc_feature 1..20: note = chemically synthesized
  source 1..20: mol_type = other DNA
aacccgggaggcagagcttg

SEQ ID NO: 6517 - DNA, 20 bp, synthetic construct
  misc_feature 1..20: note = chemically synthesized
  source 1..20: mol_type = other DNA
cgggaggcagagcttgcagt

SEQ ID NO: 6518 - DNA, 20 bp, synthetic construct
  misc_feature 1..20: note = chemically synthesized
  source 1..20: mol_type = other DNA
ggcagagcttgcagtgagcc

SEQ ID NO: 6519 - DNA, 20 bp, synthetic construct
  misc_feature 1..20: note = chemically synthesized
  source 1..20: mol_type = other DNA
aagatcgcgccactgcactc

SEQ ID NO: 6520 - DNA, 20 bp, synthetic construct
  misc_feature 1..20: note = chemically synthesized
  source 1..20: mol_type = other DNA
cgcgccactgcactccggcc

SEQ ID NO: 6521 - DNA, 20 bp, synthetic construct
  misc_feature 1..20: note = chemically synthesized
  source 1..20: mol_type = other DNA
gcgccactgcactccggcct

SEQ ID NO: 6522 - DNA, 20 bp, synthetic construct
  misc_feature 1..20: note = chemically synthesized
  source 1..20: mol_type = other DNA
ctgcactccggcctgggcaa

SEQ ID NO: 6523 - DNA, 20 bp, synthetic construct
  misc_feature 1..20: note = chemically synthesized
  source 1..20: mol_type = other DNA
gcactccggcctgggcaaca

SEQ ID NO: 6524 - DNA, 20 bp, synthetic construct
  misc_feature 1..20: note = chemically synthesized
  source 1..20: mol_type = other DNA
tccggcctgggcaacagagc

SEQ ID NO: 6525 - DNA, 20 bp, synthetic construct
  misc_feature 1..20: note = chemically synthesized
  source 1..20: mol_type = other DNA
ccgcctccaaaaaaaaaaaa

SEQ ID NO: 6526 - DNA, 20 bp, synthetic construct
  misc_feature 1..20: note = chemically synthesized
  source 1..20: mol_type = other DNA
tccaaaaaaaaaaaaaagaa

SEQ ID NO: 6527 - DNA, 20 bp, synthetic construct
  misc_feature 1..20: note = chemically synthesized
  source 1..20: mol_type = other DNA
aaaaaaaaaaaaagaaaaga

SEQ ID NO: 6528 - DNA, 20 bp, synthetic construct
  misc_feature 1..20: note = chemically synthesized
  source 1..20: mol_type = other DNA
aaaaaaaagaaaagaaagaa

SEQ ID NO: 6529 - DNA, 20 bp, synthetic construct
  misc_feature 1..20: note = chemically synthesized
  source 1..20: mol_type = other DNA
aaagaaaagaaaaaacacac

SEQ ID NO: 6530 - DNA, 20 bp, synthetic construct
  misc_feature 1..20: note = chemically synthesized
  source 1..20: mol_type = other DNA
aaaagaaaaaacacactgga

SEQ ID NO: 6531 - DNA, 20 bp, synthetic construct
  misc_feature 1..20: note = chemically synthesized
  source 1..20: mol_type = other DNA
aacacactggatggaaataa

SEQ ID NO: 6532 - DNA, 20 bp, synthetic construct
  misc_feature 1..20: note = chemically synthesized
  source 1..20: mol_type = other DNA
acactggatggaaataatgg

SEQ ID NO: 6533 - DNA, 20 bp, synthetic construct
  misc_feature 1..20: note = chemically synthesized
  source 1..20: mol_type = other DNA
ggatggaaataatggaagat

SEQ ID NO: 6534 - DNA, 20 bp, synthetic construct
  misc_feature 1..20: note = chemically synthesized
  source 1..20: mol_type = other DNA
atggaagatgagaaatgcgt

SEQ ID NO: 6535 - DNA, 20 bp, synthetic construct
  misc_feature 1..20: note = chemically synthesized
  source 1..20: mol_type = other DNA
agaaatgcgtaagaaaaatt

SEQ ID NO: 6536 - DNA, 20 bp, synthetic construct
  misc_feature 1..20: note = chemically synthesized
  source 1..20: mol_type = other DNA
gaaatgcgtaagaaaaattt

SEQ ID NO: 6537 - DNA, 20 bp, synthetic construct
  misc_feature 1..20: note = chemically synthesized
  source 1..20: mol_type = other DNA
aaatgcgtaagaaaaattta

SEQ ID NO: 6538 - DNA, 20 bp, synthetic construct
  misc_feature 1..20: note = chemically synthesized
  source 1..20: mol_type = other DNA
gcgtaagaaaaatttagggc

SEQ ID NO: 6539 - DNA, 20 bp, synthetic construct
  misc_feature 1..20: note = chemically synthesized
  source 1..20: mol_type = other DNA
cgtaagaaaaatttagggcc

SEQ ID NO: 6540 - DNA, 20 bp, synthetic construct
  misc_feature 1..20: note = chemically synthesized
  source 1..20: mol_type = other DNA
aaatttagggccaggcactg

SEQ ID NO: 6541 - DNA, 20 bp, synthetic construct
  misc_feature 1..20: note = chemically synthesized
  source 1..20: mol_type = other DNA
gtggatcacatctgtaatcc

SEQ ID NO: 6542 - DNA, 20 bp, synthetic construct
  misc_feature 1..20: note = chemically synthesized
  source 1..20: mol_type = other DNA
catctgtaatcccagcactt

SEQ ID NO: 6543 - DNA, 20 bp, synthetic construct
  misc_feature 1..20: note = chemically synthesized
  source 1..20: mol_type = other DNA
atctgtaatcccagcacttt

SEQ ID NO: 6544 - DNA, 20 bp, synthetic construct
  misc_feature 1..20: note = chemically synthesized
  source 1..20: mol_type = other DNA
ctgtaatcccagcactttgg

SEQ ID NO: 6545 - DNA, 20 bp, synthetic construct
  misc_feature 1..20: note = chemically synthesized
  source 1..20: mol_type = other DNA
tgtaatcccagcactttggg

SEQ ID NO: 6546 - DNA, 20 bp, synthetic construct
  misc_feature 1..20: note = chemically synthesized
  source 1..20: mol_type = other DNA
agcactttgggaggtcgaca

SEQ ID NO: 6547 - DNA, 20 bp, synthetic construct
  misc_feature 1..20: note = chemically synthesized
  source 1..20: mol_type = other DNA
gcactttgggaggtcgacac

SEQ ID NO: 6548 - DNA, 20 bp, synthetic construct
  misc_feature 1..20: note = chemically synthesized
  source 1..20: mol_type = other DNA
cactttgggaggtcgacacg

SEQ ID NO: 6549 - DNA, 20 bp, synthetic construct
  misc_feature 1..20: note = chemically synthesized
  source 1..20: mol_type = other DNA
actttgggaggtcgacacgg

SEQ ID NO: 6550 - DNA, 20 bp, synthetic construct
  misc_feature 1..20: note = chemically synthesized
  source 1..20: mol_type = other DNA
ctttgggaggtcgacacggg

SEQ ID NO: 6551 - DNA, 20 bp, synthetic construct
  misc_feature 1..20: note = chemically synthesized
  source 1..20: mol_type = other DNA
cgacacggggggaatcactt

SEQ ID NO: 6552 - DNA, 20 bp, synthetic construct
  misc_feature 1..20: note = chemically synthesized
  source 1..20: mol_type = other DNA
cggggggaatcacttgagcc

SEQ ID NO: 6553 - DNA, 20 bp, synthetic construct
  misc_feature 1..20: note = chemically synthesized
  source 1..20: mol_type = other DNA
ggggggaatcacttgagccc

SEQ ID NO: 6554 - DNA, 20 bp, synthetic construct
  misc_feature 1..20: note = chemically synthesized
  source 1..20: mol_type = other DNA
ggggaatcacttgagcccag

SEQ ID NO: 6555 - DNA, 20 bp, synthetic construct
  misc_feature 1..20: note = chemically synthesized
  source 1..20: mol_type = other DNA
tcacttgagcccaggagctc

SEQ ID NO: 6556 - DNA, 20 bp, synthetic construct
  misc_feature 1..20: note = chemically synthesized
  source 1..20: mol_type = other DNA
tgagcccaggagctcaagac

SEQ ID NO: 6557 - DNA, 20 bp, synthetic construct
  misc_feature 1..20: note = chemically synthesized
  source 1..20: mol_type = other DNA
ccaggagctcaagactagtc

SEQ ID NO: 6558 - DNA, 20 bp, synthetic construct
  misc_feature 1..20: note = chemically synthesized
  source 1..20: mol_type = other DNA
caggagctcaagactagtct

SEQ ID NO: 6559 - DNA, 20 bp, synthetic construct
  misc_feature 1..20: note = chemically synthesized
  source 1..20: mol_type = other DNA
gagctcaagactagtctggg

SEQ ID NO: 6560 - DNA, 20 bp, synthetic construct
  misc_feature 1..20: note = chemically synthesized
  source 1..20: mol_type = other DNA
caagactagtctgggcagca

SEQ ID NO: 6561 - DNA, 20 bp, synthetic construct
  misc_feature 1..20: note = chemically synthesized
  source 1..20: mol_type = other DNA
catggcaaaacccctctaca

SEQ ID NO: 6562 - DNA, 20 bp, synthetic construct
  misc_feature 1..20: note = chemically synthesized
  source 1..20: mol_type = other DNA
tacaaaaaaaaatttttaat

SEQ ID NO: 6563 - DNA, 20 bp, synthetic construct
  misc_feature 1..20: note = chemically synthesized
  source 1..20: mol_type = other DNA
aaaaaaaatttttaattagc

SEQ ID NO: 6564 - DNA, 20 bp, synthetic construct
  misc_feature 1..20: note = chemically synthesized
  source 1..20: mol_type = other DNA
aaaaaaatttttaattagcc

SEQ ID NO: 6565 - DNA, 20 bp, synthetic construct
  misc_feature 1..20: note = chemically synthesized
  source 1..20: mol_type = other DNA
aatttttaattagccaggtg

SEQ ID NO: 6566 - DNA, 20 bp, synthetic construct
  misc_feature 1..20: note = chemically synthesized
  source 1..20: mol_type = other DNA
ggtgtggtgccacatgccta

SEQ ID NO: 6567 - DNA, 20 bp, synthetic construct
  misc_feature 1..20: note = chemically synthesized
  source 1..20: mol_type = other DNA
gtgccacatgcctatagtcc

SEQ ID NO: 6568 - DNA, 20 bp, synthetic construct
  misc_feature 1..20: note = chemically synthesized
  source 1..20: mol_type = other DNA
tgcctatagtcccagctacc

SEQ ID NO: 6569 - DNA, 20 bp, synthetic construct
  misc_feature 1..20: note = chemically synthesized
  source 1..20: mol_type = other DNA
gcctatagtcccagctacct

SEQ ID NO: 6570 - DNA, 20 bp, synthetic construct
  misc_feature 1..20: note = chemically synthesized
  source 1..20: mol_type = other DNA
ctatagtcccagctacctgg

SEQ ID NO: 6571 - DNA, 20 bp, synthetic construct
  misc_feature 1..20: note = chemically synthesized
  source 1..20: mol_type = other DNA
tatagtcccagctacctggg

SEQ ID NO: 6572 - DNA, 20 bp, synthetic construct
  misc_feature 1..20: note = chemically synthesized
  source 1..20: mol_type = other DNA
cccagctacctgggaggctg

SEQ ID NO: 6573 - DNA, 20 bp, synthetic construct
  misc_feature 1..20: note = chemically synthesized
  source 1..20: mol_type = other DNA
agctacctgggaggctgaag

SEQ ID NO: 6574 - DNA, 20 bp, synthetic construct
  misc_feature 1..20: note = chemically synthesized
  source 1..20: mol_type = other DNA
tacctgggaggctgaagtgg

SEQ ID NO: 6575 - DNA, 20 bp, synthetic construct
  misc_feature 1..20: note = chemically synthesized
  source 1..20: mol_type = other DNA
acctgggaggctgaagtgga

SEQ ID NO: 6576 - DNA, 20 bp, synthetic construct
  misc_feature 1..20: note = chemically synthesized
  source 1..20: mol_type = other DNA
ctgaagtggaaggatcgcct

SEQ ID NO: 6577 - DNA, 20 bp, synthetic construct
  misc_feature 1..20: note = chemically synthesized
  source 1..20: mol_type = other DNA
gtggaaggatcgcctgagcc

SEQ ID NO: 6578 - DNA, 20 bp, synthetic construct
  misc_feature 1..20: note = chemically synthesized
  source 1..20: mol_type = other DNA
tggaaggatcgcctgagccc

SEQ ID NO: 6579 - DNA, 20 bp, synthetic construct
  misc_feature 1..20: note = chemically synthesized
  source 1..20: mol_type = other DNA
gaaggatcgcctgagcccag

SEQ ID NO: 6580 - DNA, 20 bp, synthetic construct
  misc_feature 1..20: note = chemically synthesized
  source 1..20: mol_type = other DNA
aaggatcgcctgagcccagg

SEQ ID NO: 6581 - DNA, 20 bp, synthetic construct
  misc_feature 1..20: note = chemically synthesized
  source 1..20: mol_type = other DNA
gatcgcctgagcccaggagg

SEQ ID NO: 6582 - DNA, 20 bp, synthetic construct
  misc_feature 1..20: note = chemically synthesized
  source 1..20: mol_type = other DNA
tcgcctgagcccaggaggtg

SEQ ID NO: 6583 - DNA, 20 bp, synthetic construct
  misc_feature 1..20: note = chemically synthesized
  source 1..20: mol_type = other DNA
cgcctgagcccaggaggtgg

SEQ ID NO: 6584 - DNA, 20 bp, synthetic construct
  misc_feature 1..20: note = chemically synthesized
  source 1..20: mol_type = other DNA
agcccaggaggtggaggcca

SEQ ID NO: 6585 - DNA, 20 bp, synthetic construct
  misc_feature 1..20: note = chemically synthesized
  source 1..20: mol_type = other DNA
caggaggtggaggccacagt

SEQ ID NO: 6586 - DNA, 20 bp, synthetic construct
  misc_feature 1..20: note = chemically synthesized
  source 1..20: mol_type = other DNA
aggccacagtgagttgtgac

SEQ ID NO: 6587 - DNA, 20 bp, synthetic construct
  misc_feature 1..20: note = chemically synthesized
  source 1..20: mol_type = other DNA
tgtgacaagctactgcattc

SEQ ID NO: 6588 - DNA, 20 bp, synthetic construct
  misc_feature 1..20: note = chemically synthesized
  source 1..20: mol_type = other DNA
caagctactgcattccagcc

SEQ ID NO: 6589 - DNA, 20 bp, synthetic construct
  misc_feature 1..20: note = chemically synthesized
  source 1..20: mol_type = other DNA
aagctactgcattccagcct

SEQ ID NO: 6590 - DNA, 20 bp, synthetic construct
  misc_feature 1..20: note = chemically synthesized
  source 1..20: mol_type = other DNA
ctgcattccagcctgggcaa

SEQ ID NO: 6591 - DNA, 20 bp, synthetic construct
  misc_feature 1..20: note = chemically synthesized
  source 1..20: mol_type = other DNA
gcattccagcctgggcaaca

SEQ ID NO: 6592 - DNA, 20 bp, synthetic construct
  misc_feature 1..20: note = chemically synthesized
  source 1..20: mol_type = other DNA
tccagcctgggcaacagagt

SEQ ID NO: 6593 - DNA, 20 bp, synthetic construct
  misc_feature 1..20: note = chemically synthesized
  source 1..20: mol_type = other DNA
cctgggcaacagagtgagat

SEQ ID NO: 6594 - DNA, 20 bp, synthetic construct
  misc_feature 1..20: note = chemically synthesized
  source 1..20: mol_type = other DNA
tgggcaacagagtgagatga

SEQ ID NO: 6595 - DNA, 20 bp, synthetic construct
  misc_feature 1..20: note = chemically synthesized
  source 1..20: mol_type = other DNA
ggcaacagagtgagatgaga

SEQ ID NO: 6596 - DNA, 20 bp, synthetic construct
  misc_feature 1..20: note = chemically synthesized
  source 1..20: mol_type = other DNA
caacagagtgagatgagaga

SEQ ID NO: 6597 - DNA, 20 bp, synthetic construct
  misc_feature 1..20: note = chemically synthesized
  source 1..20: mol_type = other DNA
acagagtgagatgagagaga

SEQ ID NO: 6598 - DNA, 20 bp, synthetic construct
  misc_feature 1..20: note = chemically synthesized
  source 1..20: mol_type = other DNA
agagtgagatgagagagaga

SEQ ID NO: 6599 - DNA, 20 bp, synthetic construct
  misc_feature 1..20: note = chemically synthesized
  source 1..20: mol_type = other DNA
gagtgagatgagagagagag

SEQ ID NO: 6600 - DNA, 20 bp, synthetic construct
  misc_feature 1..20: note = chemically synthesized
  source 1..20: mol_type = other DNA
agtgagatgagagagagaga

SEQ ID NO: 6601 - DNA, 20 bp, synthetic construct
  misc_feature 1..20: note = chemically synthesized
  source 1..20: mol_type = other DNA
gtgagatgagagagagagag

SEQ ID NO: 6602 - DNA, 20 bp, synthetic construct
  misc_feature 1..20: note = chemically synthesized
  source 1..20: mol_type = other DNA
gagatgagagagagagaggg

SEQ ID NO: 6603 - DNA, 20 bp, synthetic construct
  misc_feature 1..20: note = chemically synthesized
  source 1..20: mol_type = other DNA
agatgagagagagagagggg

SEQ ID NO: 6604 - DNA, 20 bp, synthetic construct
  misc_feature 1..20: note = chemically synthesized
  source 1..20: mol_type = other DNA
gatgagagagagagagggga

SEQ ID NO: 6605 - DNA, 20 bp, synthetic construct
  misc_feature 1..20: note = chemically synthesized
  source 1..20: mol_type = other DNA
atgagagagagagaggggag

SEQ ID NO: 6606 - DNA, 20 bp, synthetic construct
  misc_feature 1..20: note = chemically synthesized
  source 1..20: mol_type = other DNA
agagagagagaggggagggg

SEQ ID NO: 6607 - DNA, 20 bp, synthetic construct
  misc_feature 1..20: note = chemically synthesized
  source 1..20: mol_type = other DNA
agagagaggggaggggaagc

SEQ ID NO: 6608 - DNA, 20 bp, synthetic construct
  misc_feature 1..20: note = chemically synthesized
  source 1..20: mol_type = other DNA
gagagaggggaggggaagcg

SEQ ID NO: 6609 - DNA, 20 bp, synthetic construct
  misc_feature 1..20: note = chemically synthesized
  source 1..20: mol_type = other DNA
agagaggggaggggaagcga

SEQ ID NO: 6610 - DNA, 20 bp, synthetic construct
  misc_feature 1..20: note = chemically synthesized
  source 1..20: mol_type = other DNA
gaggggaggggaagcgaggg

SEQ ID NO: 6611 - DNA, 20 bp, synthetic construct
  misc_feature 1..20: note = chemically synthesized
  source 1..20: mol_type = other DNA
aggggaggggaagcgaggga

SEQ ID NO: 6612 - DNA, 20 bp, synthetic construct
  misc_feature 1..20: note = chemically synthesized
  source 1..20: mol_type = other DNA
gaggggaagcgagggaagga

SEQ ID NO: 6613 - DNA, 20 bp, synthetic construct
  misc_feature 1..20: note = chemically synthesized
  source 1..20: mol_type = other DNA
aggggaagcgagggaaggaa

SEQ ID NO: 6614 - DNA, 20 bp, synthetic construct
  misc_feature 1..20: note = chemically synthesized
  source 1..20: mol_type = other DNA
gggaagcgagggaaggaaag

SEQ ID NO: 6615 - DNA, 20 bp, synthetic construct
  misc_feature 1..20: note = chemically synthesized
  source 1..20: mol_type = other DNA
ggaagcgagggaaggaaagg

SEQ ID NO: 6616 - DNA, 20 bp, synthetic construct
  misc_feature 1..20: note = chemically synthesized
  source 1..20: mol_type = other DNA
gaagcgagggaaggaaagga

SEQ ID NO: 6617 - DNA, 20 bp, synthetic construct
  misc_feature 1..20: note = chemically synthesized
  source 1..20: mol_type = other DNA
aagcgagggaaggaaaggag

SEQ ID NO: 6618 - DNA, 20 bp, synthetic construct
  misc_feature 1..20: note = chemically synthesized
  source 1..20: mol_type = other DNA
gcgagggaaggaaaggaggg

SEQ ID NO: 6619 - DNA, 20 bp, synthetic construct
  misc_feature 1..20: note = chemically synthesized
  source 1..20: mol_type = other DNA
cgagggaaggaaaggagggg

SEQ ID NO: 6620 - DNA, 20 bp, synthetic construct
  misc_feature 1..20: note = chemically synthesized
  source 1..20: mol_type = other DNA
gagggaaggaaaggagggga

SEQ ID NO: 6621 - DNA, 20 bp, synthetic construct
  misc_feature 1..20: note = chemically synthesized
  source 1..20: mol_type = other DNA
agggaaggaaaggaggggag

SEQ ID NO: 6622 - DNA, 20 bp, synthetic construct
  misc_feature 1..20: note = chemically synthesized
  source 1..20: mol_type = other DNA
ggaaggaaaggaggggaggg

SEQ ID NO: 6623 - DNA, 20 bp, synthetic construct
  misc_feature 1..20: note = chemically synthesized
  source 1..20: mol_type = other DNA
gaaggaaaggaggggagggg

SEQ ID NO: 6624 - DNA, 20 bp, synthetic construct
  misc_feature 1..20: note = chemically synthesized
  source 1..20: mol_type = other DNA
aaggaaaggaggggagggga

SEQ ID NO: 6625 - DNA, 20 bp, synthetic construct
  misc_feature 1..20: note = chemically synthesized
  source 1..20: mol_type = other DNA
aggaaaggaggggaggggag

SEQ ID NO: 6626 - DNA, 20 bp, synthetic construct
  misc_feature 1..20: note = chemically synthesized
  source 1..20: mol_type = other DNA
ggaaaggaggggaggggagg

SEQ ID NO: 6627 - DNA, 20 bp, synthetic construct
  misc_feature 1..20: note = chemically synthesized
  source 1..20: mol_type = other DNA
aaaggaggggaggggagggg

SEQ ID NO: 6628 - DNA, 20 bp, synthetic construct
  misc_feature 1..20: note = chemically synthesized
  source 1..20: mol_type = other DNA
aaggaggggaggggaggggg

SEQ ID NO: 6629 - DNA, 20 bp, synthetic construct
  misc_feature 1..20: note = chemically synthesized
  source 1..20: mol_type = other DNA
aggaggggaggggaggggga

SEQ ID NO: 6630 - DNA, 20 bp, synthetic construct
  misc_feature 1..20: note = chemically synthesized
  source 1..20: mol_type = other DNA
ggaggggaggggagggggag

SEQ ID NO: 6631 - DNA, 20 bp, synthetic construct
  misc_feature 1..20: note = chemically synthesized
  source 1..20: mol_type = other DNA
ggggaggggagggggagggg

SEQ ID NO: 6632 - DNA, 20 bp, synthetic construct
  misc_feature 1..20: note = chemically synthesized
  source 1..20: mol_type = other DNA
gggaggggagggggagggga

SEQ ID NO: 6633 - DNA, 20 bp, synthetic construct
  misc_feature 1..20: note = chemically synthesized
  source 1..20: mol_type = other DNA
ggaggggagggggaggggaa

SEQ ID NO: 6634 - DNA, 20 bp, synthetic construct
  misc_feature 1..20: note = chemically synthesized
  source 1..20: mol_type = other DNA
gaggggagggggaggggaag

SEQ ID NO: 6635 - DNA, 20 bp, synthetic construct
  misc_feature 1..20: note = chemically synthesized
  source 1..20: mol_type = other DNA
ggaggggaaggggaaaattt

SEQ ID NO: 6636 - DNA, 20 bp, synthetic construct
  misc_feature 1..20: note = chemically synthesized
  source 1..20: mol_type = other DNA
attttagttaacttaatgaa

SEQ ID NO: 6637 - DNA, 20 bp, synthetic construct
  misc_feature 1..20: note = chemically synthesized
  source 1..20: mol_type = other DNA
aactctataaaatgaaacac

SEQ ID NO: 6638 - DNA, 20 bp, synthetic construct
  misc_feature 1..20: note = chemically synthesized
  source 1..20: mol_type = other DNA
actctataaaatgaaacact

SEQ ID NO: 6639 - DNA, 20 bp, synthetic construct
  misc_feature 1..20: note = chemically synthesized
  source 1..20: mol_type = other DNA
tctataaaatgaaacactgg

SEQ ID NO: 6640 - DNA, 20 bp, synthetic construct
  misc_feature 1..20: note = chemically synthesized
  source 1..20: mol_type = other DNA
aatgaaacactgggagaaaa

SEQ ID NO: 6641 - DNA, 20 bp, synthetic construct
  misc_feature 1..20: note = chemically synthesized
  source 1..20: mol_type = other DNA
gagaaaaaagaattaaaaaa

SEQ ID NO: 6642 - DNA, 20 bp, synthetic construct
  misc_feature 1..20: note = chemically synthesized
  source 1..20: mol_type = other DNA
aaaaagaattaaaaaatgga

SEQ ID NO: 6643 - DNA, 20 bp, synthetic construct
  misc_feature 1..20: note = chemically synthesized
  source 1..20: mol_type = other DNA
aaagaattaaaaaatggaaa

SEQ ID NO: 6644 - DNA, 20 bp, synthetic construct
  misc_feature 1..20: note = chemically synthesized
  source 1..20: mol_type = other DNA
ttaaaaaatggaaagagaat

SEQ ID NO: 6645 - DNA, 20 bp, synthetic construct
  misc_feature 1..20: note = chemically synthesized
  source 1..20: mol_type = other DNA
aaaatggaaagagaatgagt

SEQ ID NO: 6646 - DNA, 20 bp, synthetic construct
  misc_feature 1..20: note = chemically synthesized
  source 1..20: mol_type = other DNA
gaaagagaatgagtgagctg

SEQ ID NO: 6647 - DNA, 20 bp, synthetic construct
  misc_feature 1..20: note = chemically synthesized
  source 1..20: mol_type = other DNA
aaagagaatgagtgagctgt

SEQ ID NO: 6648 - DNA, 20 bp, synthetic construct
  misc_feature 1..20: note = chemically synthesized
  source 1..20: mol_type = other DNA
tgcataattgaaatctttaa

SEQ ID NO: 6649 - DNA, 20 bp, synthetic construct
  misc_feature 1..20: note = chemically synthesized
  source 1..20: mol_type = other DNA
attgaaatctttaaaagaaa

SEQ ID NO: 6650 - DNA, 20 bp, synthetic construct
  misc_feature 1..20: note = chemically synthesized
  source 1..20: mol_type = other DNA
ttgaaatctttaaaagaaaa

SEQ ID NO: 6651 - DNA, 20 bp, synthetic construct
  misc_feature 1..20: note = chemically synthesized
  source 1..20: mol_type = other DNA
tgaaatctttaaaagaaaaa

SEQ ID NO: 6652 - DNA, 20 bp, synthetic construct
  misc_feature 1..20: note = chemically synthesized
  source 1..20: mol_type = other DNA
gaaatctttaaaagaaaaag

SEQ ID NO: 6653 - DNA, 20 bp, synthetic construct
  misc_feature 1..20: note = chemically synthesized
  source 1..20: mol_type = other DNA
aaatctttaaaagaaaaagg

SEQ ID NO: 6654 - DNA, 20 bp, synthetic construct
  misc_feature 1..20: note = chemically synthesized
  source 1..20: mol_type = other DNA
tctttaaaagaaaaaggggg

SEQ ID NO: 6655 - DNA, 20 bp, synthetic construct
  misc_feature 1..20: note = chemically synthesized
  source 1..20: mol_type = other DNA
ttaaaagaaaaagggggtag

SEQ ID NO: 6656 - DNA, 20 bp, synthetic construct
  misc_feature 1..20: note = chemically synthesized
  source 1..20: mol_type = other DNA
gggggtagcagaaaaaaatc

SEQ ID NO: 6657 - DNA, 20 bp, synthetic construct
  misc_feature 1..20: note = chemically synthesized
  source 1..20: mol_type = other DNA
gcagaaaaaaatcaagtgct

SEQ ID NO: 6658 - DNA, 20 bp, synthetic construct
  misc_feature 1..20: note = chemically synthesized
  source 1..20: mol_type = other DNA
aaaaaatcaagtgctgagac

SEQ ID NO: 6659 - DNA, 20 bp, synthetic construct
  misc_feature 1..20: note = chemically synthesized
  source 1..20: mol_type = other DNA
aaatcaagtgctgagacaag

SEQ ID NO: 6660 - DNA, 20 bp, synthetic construct
  misc_feature 1..20: note = chemically synthesized
  source 1..20: mol_type = other DNA
tcaagtgctgagacaagtgg

SEQ ID NO: 6661 - DNA, 20 bp, synthetic construct
  misc_feature 1..20: note = chemically synthesized
  source 1..20: mol_type = other DNA
gtgctgagacaagtggaaga

SEQ ID NO: 6662 - DNA, 20 bp, synthetic construct
  misc_feature 1..20: note = chemically synthesized
  source 1..20: mol_type = other DNA
tgctgagacaagtggaagat

SEQ ID NO: 6663 - DNA, 20 bp, synthetic construct
  misc_feature 1..20: note = chemically synthesized
  source 1..20: mol_type = other DNA
gacaagtggaagatgggccc

SEQ ID NO: 6664 - DNA, 20 bp, synthetic construct
  misc_feature 1..20: note = chemically synthesized
  source 1..20: mol_type = other DNA
agtggaagatgggccccggt

SEQ ID NO: 6665 - DNA, 20 bp, synthetic construct
  misc_feature 1..20: note = chemically synthesized
  source 1..20: mol_type = other DNA
ggaagatgggccccggtgag

SEQ ID NO: 6666 - DNA, 20 bp, synthetic construct
  misc_feature 1..20: note = chemically synthesized
  source 1..20: mol_type = other DNA
ggccccggtgagcagctgat

SEQ ID NO: 6667 - DNA, 20 bp, synthetic construct
  misc_feature 1..20: note = chemically synthesized
  source 1..20: mol_type = other DNA
ggtgagcagctgatcagtgt

SEQ ID NO: 6668 - DNA, 20 bp, synthetic construct
  misc_feature 1..20: note = chemically synthesized
  source 1..20: mol_type = other DNA
ctcccatgatgacgttcccc

SEQ ID NO: 6669 - DNA, 20 bp, synthetic construct
  misc_feature 1..20: note = chemically synthesized
  source 1..20: mol_type = other DNA
ttcccccagcccccaccacc

SEQ ID NO: 6670 - DNA, 20 bp, synthetic construct
  misc_feature 1..20: note = chemically synthesized
  source 1..20: mol_type = other DNA
tcccccagcccccaccaccc

SEQ ID NO: 6671 - DNA, 20 bp, synthetic construct
  misc_feature 1..20: note = chemically synthesized
  source 1..20: mol_type = other DNA
gcccccaccacccgggctgc

SEQ ID NO: 6672 - DNA, 20 bp, synthetic construct
  misc_feature 1..20: note = chemically synthesized
  source 1..20: mol_type = other DNA
ccccaccacccgggctgctg

SEQ ID NO: 6673 - DNA, 20 bp, synthetic construct
  misc_feature 1..20: note = chemically synthesized
  source 1..20: mol_type = other DNA
cccaccacccgggctgctgg

SEQ ID NO: 6674 - DNA, 20 bp, synthetic construct
  misc_feature 1..20: note = chemically synthesized
  source 1..20: mol_type = other DNA
ccaccacccgggctgctgga

SEQ ID NO: 6675 - DNA, 20 bp, synthetic construct
  misc_feature 1..20: note = chemically synthesized
  source 1..20: mol_type = other DNA
cgggctgctggagggaaatg

SEQ ID NO: 6676 - DNA, 20 bp, synthetic construct
  misc_feature 1..20: note = chemically synthesized
  source 1..20: mol_type = other DNA
gtgactttgctacatccctt

SEQ ID NO: 6677 - DNA, 20 bp, synthetic construct
  misc_feature 1..20: note = chemically synthesized
  source 1..20: mol_type = other DNA
ctttgctacatcccttcaga

SEQ ID NO: 6678 - DNA, 20 bp, synthetic construct
  misc_feature 1..20: note = chemically synthesized
  source 1..20: mol_type = other DNA
cccttcagacggtccctcac

SEQ ID NO: 6679 - DNA, 20 bp, synthetic construct
  misc_feature 1..20: note = chemically synthesized
  source 1..20: mol_type = other DNA
ggtccctcactggtgtccct

SEQ ID NO: 6680 - DNA, 20 bp, synthetic construct
  misc_feature 1..20: note = chemically synthesized
  source 1..20: mol_type = other DNA
gtccctcagcccattcgcgt

SEQ ID NO: 6681 - DNA, 20 bp, synthetic construct
  misc_feature 1..20: note = chemically synthesized
  source 1..20: mol_type = other DNA
gctcactctcccattaattt

SEQ ID NO: 6682 - DNA, 20 bp, synthetic construct
  misc_feature 1..20: note = chemically synthesized
  source 1..20: mol_type = other DNA
cccattaatttcagaaatcc

SEQ ID NO: 6683 - DNA, 20 bp, synthetic construct
  misc_feature 1..20: note = chemically synthesized
  source 1..20: mol_type = other DNA
agaaatcctggcctctctcc

SEQ ID NO: 6684 - DNA, 20 bp, synthetic construct
  misc_feature 1..20: note = chemically synthesized
  source 1..20: mol_type = other DNA
actctaaattctgtcaccct

SEQ ID NO: 6685 - DNA, 20 bp, synthetic construct
  misc_feature 1..20: note = chemically synthesized
  source 1..20: mol_type = other DNA
ctaaattctgtcaccctcag

SEQ ID NO: 6686 - DNA, 20 bp, synthetic construct
  misc_feature 1..20: note = chemically synthesized
  source 1..20: mol_type = other DNA
tctgtcaccctcagaagatt

SEQ ID NO: 6687 - DNA, 20 bp, synthetic construct
  misc_feature 1..20: note = chemically synthesized
  source 1..20: mol_type = other DNA
gtcaccctcagaagattcag

SEQ ID NO: 6688 - DNA, 20 bp, synthetic construct
  misc_feature 1..20: note = chemically synthesized
  source 1..20: mol_type = other DNA
cagcatcccgtattctctct

SEQ ID NO: 6689 - DNA, 20 bp, synthetic construct
  misc_feature 1..20: note = chemically synthesized
  source 1..20: mol_type = other DNA
tctgagtgttcactatgtac

SEQ ID NO: 6690 - DNA, 20 bp, synthetic construct
  misc_feature 1..20: note = chemically synthesized
  source 1..20: mol_type = other DNA
ctgagtgttcactatgtacc

SEQ ID NO: 6691 - DNA, 20 bp, synthetic construct
  misc_feature 1..20: note = chemically synthesized
  source 1..20: mol_type = other DNA
actatgtaccgggtgccgtg

SEQ ID NO: 6692 - DNA, 20 bp, synthetic construct
  misc_feature 1..20: note = chemically synthesized
  source 1..20: mol_type = other DNA
ctatgtaccgggtgccgtgt

SEQ ID NO: 6693 - DNA, 20 bp, synthetic construct
  misc_feature 1..20: note = chemically synthesized
  source 1..20: mol_type = other DNA
accgggtgccgtgtgggcac

SEQ ID NO: 6694 - DNA, 20 bp, synthetic construct
  misc_feature 1..20: note = chemically synthesized
  source 1..20: mol_type = other DNA
cgggtgccgtgtgggcactg

SEQ ID NO: 6695 - DNA, 20 bp, synthetic construct
  misc_feature 1..20: note = chemically synthesized
  source 1..20: mol_type = other DNA
ccgtgtgggcactggagttg

SEQ ID NO: 6696 - DNA, 20 bp, synthetic construct
  misc_feature 1..20: note = chemically synthesized
  source 1..20: mol_type = other DNA
gtgtgggcactggagttgca

SEQ ID NO: 6697 - DNA, 20 bp, synthetic construct
  misc_feature 1..20: note = chemically synthesized
  source 1..20: mol_type = other DNA
tgtgggcactggagttgcag

SEQ ID NO: 6698 - DNA, 20 bp, synthetic construct
  misc_feature 1..20: note = chemically synthesized
  source 1..20: mol_type = other DNA
tgggcactggagttgcagag

SEQ ID NO: 6699 - DNA, 20 bp, synthetic construct
  misc_feature 1..20: note = chemically synthesized
  source 1..20: mol_type = other DNA
ggcactggagttgcagagga

SEQ ID NO: 6700 - DNA, 20 bp, synthetic construct
  misc_feature 1..20: note = chemically synthesized
  source 1..20: mol_type = other DNA
ctggagttgcagaggagagt

SEQ ID NO: 6701 - DNA, 20 bp, synthetic construct
  misc_feature 1..20: note = chemically synthesized
  source 1..20: mol_type = other DNA
tggagttgcagaggagagtg

SEQ ID NO: 6702 - DNA, 20 bp, synthetic construct
  misc_feature 1..20: note = chemically synthesized
  source 1..20: mol_type = other DNA
agttgcagaggagagtgagg

SEQ ID NO: 6703 - DNA, 20 bp, synthetic construct
  misc_feature 1..20: note = chemically synthesized
  source 1..20: mol_type = other DNA
gcagaggagagtgaggcgga

SEQ ID NO: 6704 - DNA, 20 bp, synthetic construct
  misc_feature 1..20: note = chemically synthesized
  source 1..20: mol_type = other DNA
cagaggagagtgaggcggac

SEQ ID NO: 6705 - DNA, 20 bp, synthetic construct
  misc_feature 1..20: note = chemically synthesized
  source 1..20: mol_type = other DNA
agaggagagtgaggcggaca

SEQ ID NO: 6706 - DNA, 20 bp, synthetic construct
  misc_feature 1..20: note = chemically synthesized
  source 1..20: mol_type = other DNA
gcggacagggcctctgcctg

SEQ ID NO: 6707 - DNA, 20 bp, synthetic construct
  misc_feature 1..20: note = chemically synthesized
  source 1..20: mol_type = other DNA
cggacagggcctctgcctgt

SEQ ID NO: 6708 - DNA, 20 bp, synthetic construct
  misc_feature 1..20: note = chemically synthesized
  source 1..20: mol_type = other DNA
ggacagggcctctgcctgtg

SEQ ID NO: 6709 - DNA, 20 bp, synthetic construct
  misc_feature 1..20: note = chemically synthesized
  source 1..20: mol_type = other DNA
ctgcctgtggggacaccgcc

SEQ ID NO: 6710 - DNA, 20 bp, synthetic construct
  misc_feature 1..20: note = chemically synthesized
  source 1..20: mol_type = other DNA
cctgtggggacaccgcctgg

SEQ ID NO: 6711 - DNA, 20 bp, synthetic construct
  misc_feature 1..20: note = chemically synthesized
  source 1..20: mol_type = other DNA
ctgtggggacaccgcctggt

SEQ ID NO: 6712 - DNA, 20 bp, synthetic construct
  misc_feature 1..20: note = chemically synthesized
  source 1..20: mol_type = other DNA
tggggacaccgcctggtggg

SEQ ID NO: 6713 - DNA, 20 bp, synthetic construct
  misc_feature 1..20: note = chemically synthesized
  source 1..20: mol_type = other DNA
acaccgcctggtgggaagtc

SEQ ID NO: 6714 - DNA, 20 bp, synthetic construct
  misc_feature 1..20: note = chemically synthesized
  source 1..20: mol_type = other DNA
cgcctggtgggaagtccagc

SEQ ID NO: 6715 - DNA, 20 bp, synthetic construct
  misc_feature 1..20: note = chemically synthesized
  source 1..20: mol_type = other DNA
gaagtccagccagcccccta

SEQ ID NO: 6716 - DNA, 20 bp, synthetic construct
  misc_feature 1..20: note = chemically synthesized
  source 1..20: mol_type = other DNA
agtccagccagccccctaca

SEQ ID NO: 6717 - DNA, 20 bp, synthetic construct
  misc_feature 1..20: note = chemically synthesized
  source 1..20: mol_type = other DNA
tccagccagccccctacaga

SEQ ID NO: 6718 - DNA, 20 bp, synthetic construct
  misc_feature 1..20: note = chemically synthesized
  source 1..20: mol_type = other DNA
cagccagccccctacagaga

SEQ ID NO: 6719 - DNA, 20 bp, synthetic construct
  misc_feature 1..20: note = chemically synthesized
  source 1..20: mol_type = other DNA
agccagccccctacagagag

SEQ ID NO: 6720 - DNA, 20 bp, synthetic construct
  misc_feature 1..20: note = chemically synthesized
  source 1..20: mol_type = other DNA
ccagccccctacagagagag

SEQ ID NO: 6721 - DNA, 20 bp, synthetic construct
  misc_feature 1..20: note = chemically synthesized
  source 1..20: mol_type = other DNA
acagagagaggagatgctac

SEQ ID NO: 6722 - DNA, 20 bp, synthetic construct
  misc_feature 1..20: note = chemically synthesized
  source 1..20: mol_type = other DNA
gagatgctactggtgttcct

SEQ ID NO: 6723 - DNA, 20 bp, synthetic construct
  misc_feature 1..20: note = chemically synthesized
  source 1..20: mol_type = other DNA
atgctactggtgttcctgag

SEQ ID NO: 6724 - DNA, 20 bp, synthetic construct
  misc_feature 1..20: note = chemically synthesized
  source 1..20: mol_type = other DNA
tggtgttcctgagtggtcct

SEQ ID NO: 6725 - DNA, 20 bp, synthetic construct
  misc_feature 1..20: note = chemically synthesized
  source 1..20: mol_type = other DNA
ggtgttcctgagtggtcctc

SEQ ID NO: 6726 - DNA, 20 bp, synthetic construct
  misc_feature 1..20: note = chemically synthesized
  source 1..20: mol_type = other DNA
tgttcctgagtggtcctcgg

SEQ ID NO: 6727 - DNA, 20 bp, synthetic construct
  misc_feature 1..20: note = chemically synthesized
  source 1..20: mol_type = other DNA
gttcctgagtggtcctcggg

SEQ ID NO: 6728 - DNA, 20 bp, synthetic construct
  misc_feature 1..20: note = chemically synthesized
  source 1..20: mol_type = other DNA
ttcctgagtggtcctcggga

SEQ ID NO: 6729 - DNA, 20 bp, synthetic construct
  misc_feature 1..20: note = chemically synthesized
  source 1..20: mol_type = other DNA
gtcccctgccctgccctgcc

SEQ ID NO: 6730 - DNA, 20 bp, synthetic construct
  misc_feature 1..20: note = chemically synthesized
  source 1..20: mol_type = other DNA
tgccctgccctgcccagcac

SEQ ID NO: 6731 - DNA, 20 bp, synthetic construct
  misc_feature 1..20: note = chemically synthesized
  source 1..20: mol_type = other DNA
gcccagcaccggccctccct

SEQ ID NO: 6732 - DNA, 20 bp, synthetic construct
  misc_feature 1..20: note = chemically synthesized
  source 1..20: mol_type = other DNA
agcaccggccctccctcggt

SEQ ID NO: 6733 - DNA, 20 bp, synthetic construct
  misc_feature 1..20: note = chemically synthesized
  source 1..20: mol_type = other DNA
ccggccctccctcggttggc

SEQ ID NO: 6734 - DNA, 20 bp, synthetic construct
  misc_feature 1..20: note = chemically synthesized
  source 1..20: mol_type = other DNA
ctccctcggttggccagcct

SEQ ID NO: 6735 - DNA, 20 bp, synthetic construct
  misc_feature 1..20: note = chemically synthesized
  source 1..20: mol_type = other DNA
tccctcggttggccagcctc

SEQ ID NO: 6736 - DNA, 20 bp, synthetic construct
  misc_feature 1..20: note = chemically synthesized
  source 1..20: mol_type = other DNA
ggttggccagcctcaggaat

SEQ ID NO: 6737 - DNA, 20 bp, synthetic construct
  misc_feature 1..20: note = chemically synthesized
  source 1..20: mol_type = other DNA
gttggccagcctcaggaatg

SEQ ID NO: 6738 - DNA, 20 bp, synthetic construct
  misc_feature 1..20: note = chemically synthesized
  source 1..20: mol_type = other DNA
tggccagcctcaggaatgag

SEQ ID NO: 6739 - DNA, 20 bp, synthetic construct
  misc_feature 1..20: note = chemically synthesized
  source 1..20: mol_type = other DNA
gaatgaggagtccctcattc

SEQ ID NO: 6740 - DNA, 20 bp, synthetic construct
  misc_feature 1..20: note = chemically synthesized
  source 1..20: mol_type = other DNA
aggagtccctcattccagcc

SEQ ID NO: 6741 - DNA, 20 bp, synthetic construct
  misc_feature 1..20: note = chemically synthesized
  source 1..20: mol_type = other DNA
agctaaccaatccccttcct

SEQ ID NO: 6742 - DNA, 20 bp, synthetic construct
  misc_feature 1..20: note = chemically synthesized
  source 1..20: mol_type = other DNA
caatccccttcctaagctcc

SEQ ID NO: 6743 - DNA, 20 bp, synthetic construct
  misc_feature 1..20: note = chemically synthesized
  source 1..20: mol_type = other DNA
ccctgctcctcctgcctcca

SEQ ID NO: 6744 - DNA, 20 bp, synthetic construct
  misc_feature 1..20: note = chemically synthesized
  source 1..20: mol_type = other DNA
cctcctgcctccatggaacc

SEQ ID NO: 6745 - DNA, 20 bp, synthetic construct
  misc_feature 1..20: note = chemically synthesized
  source 1..20: mol_type = other DNA
atggaacccggctccaccac

SEQ ID NO: 6746 - DNA, 20 bp, synthetic construct
  misc_feature 1..20: note = chemically synthesized
  source 1..20: mol_type = other DNA
acctgacactcctccattcc

SEQ ID NO: 6747 - DNA, 20 bp, synthetic construct
  misc_feature 1..20: note = chemically synthesized
  source 1..20: mol_type = other DNA
ctggctcttgcccttctgcc

SEQ ID NO: 6748 - DNA, 20 bp, synthetic construct
  misc_feature 1..20: note = chemically synthesized
  source 1..20: mol_type = other DNA
cccttctgcctagcactgct

SEQ ID NO: 6749 - DNA, 20 bp, synthetic construct
  misc_feature 1..20: note = chemically synthesized
  source 1..20: mol_type = other DNA
accttaaaatcttttcccac

SEQ ID NO: 6750 - DNA, 20 bp, synthetic construct
  misc_feature 1..20: note = chemically synthesized
  source 1..20: mol_type = other DNA
aaaatcttttcccaccagcc

SEQ ID NO: 6751 - DNA, 20 bp, synthetic construct
  misc_feature 1..20: note = chemically synthesized
  source 1..20: mol_type = other DNA
aaatcttttcccaccagcct

SEQ ID NO: 6752 - DNA, 20 bp, synthetic construct
  misc_feature 1..20: note = chemically synthesized
  source 1..20: mol_type = other DNA
tcccaccagcctgggcaaca

SEQ ID NO: 6753 - DNA, 20 bp, synthetic construct
  misc_feature 1..20: note = chemically synthesized
  source 1..20: mol_type = other DNA
accagcctgggcaacatagc

SEQ ID NO: 6754 - DNA, 20 bp, synthetic construct
  misc_feature 1..20: note = chemically synthesized
  source 1..20: mol_type = other DNA
aaaaattttttttaatttgc

SEQ ID NO: 6755 - DNA, 20 bp, synthetic construct
  misc_feature 1..20: note = chemically synthesized
  source 1..20: mol_type = other DNA
aaaattttttttaatttgcc

SEQ ID NO: 6756 - DNA, 20 bp, synthetic construct
  misc_feature 1..20: note = chemically synthesized
  source 1..20: mol_type = other DNA
tttttttaatttgccaggca

SEQ ID NO: 6757 - DNA, 20 bp, synthetic construct
  misc_feature 1..20: note = chemically synthesized
  source 1..20: mol_type = other DNA
ttttaatttgccaggcacag

SEQ ID NO: 6758 - DNA, 20 bp, synthetic construct
  misc_feature 1..20: note = chemically synthesized
  source 1..20: mol_type = other DNA
gcacagtggtgcacacctgt

SEQ ID NO: 6759 - DNA, 20 bp, synthetic construct
  misc_feature 1..20: note = chemically synthesized
  source 1..20: mol_type = other DNA
acctgtaagtcctaactact

SEQ ID NO: 6760 - DNA, 20 bp, synthetic construct
  misc_feature 1..20: note = chemically synthesized
  source 1..20: mol_type = other DNA
cctgtaagtcctaactactt

SEQ ID NO: 6761 - DNA, 20 bp, synthetic construct
  misc_feature 1..20: note = chemically synthesized
  source 1..20: mol_type = other DNA
tgtaagtcctaactacttgg

SEQ ID NO: 6762 - DNA, 20 bp, synthetic construct
  misc_feature 1..20: note = chemically synthesized
  source 1..20: mol_type = other DNA
gtaagtcctaactacttggg

SEQ ID NO: 6763 - DNA, 20 bp, synthetic construct
  misc_feature 1..20: note = chemically synthesized
  source 1..20: mol_type = other DNA
tcctaactacttgggaggct

SEQ ID NO: 6764 - DNA, 20 bp, synthetic construct
  misc_feature 1..20: note = chemically synthesized
  source 1..20: mol_type = other DNA
cctaactacttgggaggctg

SEQ ID NO: 6765 - DNA, 20 bp, synthetic construct
  misc_feature 1..20: note = chemically synthesized
  source 1..20: mol_type = other DNA
aactacttgggaggctgagg

SEQ ID NO: 6766 - DNA, 20 bp, synthetic construct
  misc_feature 1..20: note = chemically synthesized
  source 1..20: mol_type = other DNA
actacttgggaggctgaggt

SEQ ID NO: 6767 - DNA, 20 bp, synthetic construct
  misc_feature 1..20: note = chemically synthesized
  source 1..20: mol_type = other DNA
tacttgggaggctgaggtgg

SEQ ID NO: 6768 - DNA, 20 bp, synthetic construct
  misc_feature 1..20: note = chemically synthesized
  source 1..20: mol_type = other DNA
acttgggaggctgaggtggg

SEQ ID NO: 6769 - DNA, 20 bp, synthetic construct
  misc_feature 1..20: note = chemically synthesized
  source 1..20: mol_type = other DNA
gggaggctgaggtgggagga

SEQ ID NO: 6770 - DNA, 20 bp, synthetic construct
  misc_feature 1..20: note = chemically synthesized
  source 1..20: mol_type = other DNA
ctgaggtgggaggatggctt

SEQ ID NO: 6771 - DNA, 20 bp, synthetic construct
  misc_feature 1..20: note = chemically synthesized
  source 1..20: mol_type = other DNA
gtgggaggatggcttgagcc

SEQ ID NO: 6772 - DNA, 20 bp, synthetic construct
  misc_feature 1..20: note = chemically synthesized
  source 1..20: mol_type = other DNA
tgggaggatggcttgagccc

SEQ ID NO: 6773 - DNA, 20 bp, synthetic construct
  misc_feature 1..20: note = chemically synthesized
  source 1..20: mol_type = other DNA
ggaggatggcttgagcccag

SEQ ID NO: 6774 - DNA, 20 bp, synthetic construct
  misc_feature 1..20: note = chemically synthesized
  source 1..20: mol_type = other DNA
tggcttgagcccaggagttc

SEQ ID NO: 6775 - DNA, 20 bp, synthetic construct
  misc_feature 1..20: note = chemically synthesized
  source 1..20: mol_type = other DNA
ggcttgagcccaggagttcg

SEQ ID NO: 6776 - DNA, 20 bp, synthetic construct
  misc_feature 1..20: note = chemically synthesized
  source 1..20: mol_type = other DNA
agcccaggagttcgaggttg

SEQ ID NO: 6777 - DNA, 20 bp, synthetic construct
  misc_feature 1..20: note = chemically synthesized
  source 1..20: mol_type = other DNA
caggagttcgaggttgcagt

SEQ ID NO: 6778 - DNA, 20 bp, synthetic construct
  misc_feature 1..20: note = chemically synthesized
  source 1..20: mol_type = other DNA
tctctaaaaaaaaaatgtcc

SEQ ID NO: 6779 - DNA, 20 bp, synthetic construct
  misc_feature 1..20: note = chemically synthesized
  source 1..20: mol_type = other DNA
aaaaaaatgtccaagatact

SEQ ID NO: 6780 - DNA, 20 bp, synthetic construct
  misc_feature 1..20: note = chemically synthesized
  source 1..20: mol_type = other DNA
aaaaaatgtccaagatactt

SEQ ID NO: 6781 - DNA, 20 bp, synthetic construct
  misc_feature 1..20: note = chemically synthesized
  source 1..20: mol_type = other DNA
tccaagatacttaggtcctt

SEQ ID NO: 6782 - DNA, 20 bp, synthetic construct
  misc_feature 1..20: note = chemically synthesized
  source 1..20: mol_type = other DNA
gatacttaggtccttcagtc

SEQ ID NO: 6783 - DNA, 20 bp, synthetic construct
  misc_feature 1..20: note = chemically synthesized
  source 1..20: mol_type = other DNA
ccttcagtcaagatttatta

SEQ ID NO: 6784 - DNA, 20 bp, synthetic construct
  misc_feature 1..20: note = chemically synthesized
  source 1..20: mol_type = other DNA
tcagtcaagatttattacag

SEQ ID NO: 6785 - DNA, 20 bp, synthetic construct
  misc_feature 1..20: note = chemically synthesized
  source 1..20: mol_type = other DNA
cagtcaagatttattacaga

SEQ ID NO: 6786 - DNA, 20 bp, synthetic construct
  misc_feature 1..20: note = chemically synthesized
  source 1..20: mol_type = other DNA
agatttattacagaaggatc

SEQ ID NO: 6787 - DNA, 20 bp, synthetic construct
  misc_feature 1..20: note = chemically synthesized
  source 1..20: mol_type = other DNA
gatttattacagaaggatcc

SEQ ID NO: 6788 - DNA, 20 bp, synthetic construct
  misc_feature 1..20: note = chemically synthesized
  source 1..20: mol_type = other DNA
atttattacagaaggatcca

SEQ ID NO: 6789 - DNA, 20 bp, synthetic construct
  misc_feature 1..20: note = chemically synthesized
  source 1..20: mol_type = other DNA
tattacagaaggatccaggg

SEQ ID NO: 6790 - DNA, 20 bp, synthetic construct
  misc_feature 1..20: note = chemically synthesized
  source 1..20: mol_type = other DNA
attacagaaggatccaggga

SEQ ID NO: 6791 - DNA, 20 bp, synthetic construct
  misc_feature 1..20: note = chemically synthesized
  source 1..20: mol_type = other DNA
ttacagaaggatccagggaa

SEQ ID NO: 6792 - DNA, 20 bp, synthetic construct
  misc_feature 1..20: note = chemically synthesized
  source 1..20: mol_type = other DNA
aaggatccagggaagggtct

SEQ ID NO: 6793 - DNA, 20 bp, synthetic construct
  misc_feature 1..20: note = chemically synthesized
  source 1..20: mol_type = other DNA
aggatccagggaagggtctt

SEQ ID NO: 6794 - DNA, 20 bp, synthetic construct
  misc_feature 1..20: note = chemically synthesized
  source 1..20: mol_type = other DNA
gatccagggaagggtcttgg

SEQ ID NO: 6795 - DNA, 20 bp, synthetic construct
  misc_feature 1..20: note = chemically synthesized
  source 1..20: mol_type = other DNA
agggaagggtcttgggagat

SEQ ID NO: 6796 - DNA, 20 bp, synthetic construct
  misc_feature 1..20: note = chemically synthesized
  source 1..20: mol_type = other DNA
ggaagggtcttgggagatga

SEQ ID NO: 6797 - DNA, 20 bp, synthetic construct
  misc_feature 1..20: note = chemically synthesized
  source 1..20: mol_type = other DNA
gaagggtcttgggagatgag

SEQ ID NO: 6798 - DNA, 20 bp, synthetic construct
  misc_feature 1..20: note = chemically synthesized
  source 1..20: mol_type = other DNA
agggtcttgggagatgagag

SEQ ID NO: 6799 - DNA, 20 bp, synthetic construct
  misc_feature 1..20: note = chemically synthesized
  source 1..20: mol_type = other DNA
gtcttgggagatgagaggag

SEQ ID NO: 6800 - DNA, 20 bp, synthetic construct
  misc_feature 1..20: note = chemically synthesized
  source 1..20: mol_type = other DNA
tcttgggagatgagaggagc

SEQ ID NO: 6801 - DNA, 20 bp, synthetic construct
  misc_feature 1..20: note = chemically synthesized
  source 1..20: mol_type = other DNA
cttgggagatgagaggagca

SEQ ID NO: 6802 - DNA, 20 bp, synthetic construct
  misc_feature 1..20: note = chemically synthesized
  source 1..20: mol_type = other DNA
tgagaggagcagggatcttc

SEQ ID NO: 6803 - DNA, 20 bp, synthetic construct
  misc_feature 1..20: note = chemically synthesized
  source 1..20: mol_type = other DNA
gagaggagcagggatcttcc

SEQ ID NO: 6804 - DNA, 20 bp, synthetic construct
  misc_feature 1..20: note = chemically synthesized
  source 1..20: mol_type = other DNA
cacaacatacacacatgcac

SEQ ID NO: 6805 - DNA, 20 bp, synthetic construct
  misc_feature 1..20: note = chemically synthesized
  source 1..20: mol_type = other DNA
cacaacatacactcacacac

SEQ ID NO: 6806 - DNA, 20 bp, synthetic construct
  misc_feature 1..20: note = chemically synthesized
  source 1..20: mol_type = other DNA
cattcactcacacacacaca

SEQ ID NO: 6807 - DNA, 20 bp, synthetic construct
  misc_feature 1..20: note = chemically synthesized
  source 1..20: mol_type = other DNA
ttcactcacacacacacaca

SEQ ID NO: 6808 - DNA, 20 bp, synthetic construct
  misc_feature 1..20: note = chemically synthesized
  source 1..20: mol_type = other DNA
cacacacacacacagagtcc

SEQ ID NO: 6809 - DNA, 20 bp, synthetic construct
  misc_feature 1..20: note = chemically synthesized
  source 1..20: mol_type = other DNA
atacgtgcacacgcacatac

SEQ ID NO: 6810 - DNA, 20 bp, synthetic construct
  misc_feature 1..20: note = chemically synthesized
  source 1..20: mol_type = other DNA
tacgtgcacacgcacatacg

SEQ ID NO: 6811 - DNA, 20 bp, synthetic construct
  misc_feature 1..20: note = chemically synthesized
  source 1..20: mol_type = other DNA
atacgaggcacatgtgttct

SEQ ID NO: 6812 - DNA, 20 bp, synthetic construct
  misc_feature 1..20: note = chemically synthesized
  source 1..20: mol_type = other DNA
tacgaggcacatgtgttctt

SEQ ID NO: 6813 - DNA, 20 bp, synthetic construct
  misc_feature 1..20: note = chemically synthesized
  source 1..20: mol_type = other DNA
aggcacatgtgttcttgggt

SEQ ID NO: 6814 - DNA, 20 bp, synthetic construct
  misc_feature 1..20: note = chemically synthesized
  source 1..20: mol_type = other DNA
ggcacatgtgttcttgggtt

SEQ ID NO: 6815 - DNA, 20 bp, synthetic construct
  misc_feature 1..20: note = chemically synthesized
  source 1..20: mol_type = other DNA
cacatgtgttcttgggttgg

SEQ ID NO: 6816 - DNA, 20 bp, synthetic construct
  misc_feature 1..20: note = chemically synthesized
  source 1..20: mol_type = other DNA
acatgtgttcttgggttggg

SEQ ID NO: 6817 - DNA, 20 bp, synthetic construct
  misc_feature 1..20: note = chemically synthesized
  source 1..20: mol_type = other DNA
atgtgttcttgggttgggag

SEQ ID NO: 6818 - DNA, 20 bp, synthetic construct
  misc_feature 1..20: note = chemically synthesized
  source 1..20: mol_type = other DNA
tgttcttgggttgggaggag

SEQ ID NO: 6819 - DNA, 20 bp, synthetic construct
  misc_feature 1..20: note = chemically synthesized
  source 1..20: mol_type = other DNA
gttcttgggttgggaggaga

SEQ ID NO: 6820 - DNA, 20 bp, synthetic construct
  misc_feature 1..20: note = chemically synthesized
  source 1..20: mol_type = other DNA
ttcttgggttgggaggagaa

SEQ ID NO: 6821 - DNA, 20 bp, synthetic construct
  misc_feature 1..20: note = chemically synthesized
  source 1..20: mol_type = other DNA
ttgggttgggaggagaaggg

SEQ ID NO: 6822 - DNA, 20 bp, synthetic construct
  misc_feature 1..20: note = chemically synthesized
  source 1..20: mol_type = other DNA
tgggttgggaggagaagggc

SEQ ID NO: 6823 - DNA, 20 bp, synthetic construct
  misc_feature 1..20: note = chemically synthesized
  source 1..20: mol_type = other DNA
gttgggaggagaagggcagg

SEQ ID NO: 6824 - DNA, 20 bp, synthetic construct
  misc_feature 1..20: note = chemically synthesized
  source 1..20: mol_type = other DNA
aagggcaggcagttatcttc

SEQ ID NO: 6825 - DNA, 20 bp, synthetic construct
  misc_feature 1..20: note = chemically synthesized
  source 1..20: mol_type = other DNA
tccagatctccccacacctc

SEQ ID NO: 6826 - DNA, 20 bp, synthetic construct
  misc_feature 1..20: note = chemically synthesized
  source 1..20: mol_type = other DNA
cctctggcacatgcctttcc

SEQ ID NO: 6827 - DNA, 20 bp, synthetic construct
  misc_feature 1..20: note = chemically synthesized
  source 1..20: mol_type = other DNA
ctctggcacatgcctttcct

SEQ ID NO: 6828 - DNA, 20 bp, synthetic construct
  misc_feature 1..20: note = chemically synthesized
  source 1..20: mol_type = other DNA
tctggcacatgcctttcctg

SEQ ID NO: 6829 - DNA, 20 bp, synthetic construct
  misc_feature 1..20: note = chemically synthesized
  source 1..20: mol_type = other DNA
acatgcctttcctggggtcc

SEQ ID NO: 6830 - DNA, 20 bp, synthetic construct
  misc_feature 1..20: note = chemically synthesized
  source 1..20: mol_type = other DNA
catgcctttcctggggtcct

SEQ ID NO: 6831 - DNA, 20 bp, synthetic construct
  misc_feature 1..20: note = chemically synthesized
  source 1..20: mol_type = other DNA
atgcctttcctggggtcctg

SEQ ID NO: 6832 - DNA, 20 bp, synthetic construct
  misc_feature 1..20: note = chemically synthesized
  source 1..20: mol_type = other DNA
cctttcctggggtcctgggg

SEQ ID NO: 6833 - DNA, 20 bp, synthetic construct
  misc_feature 1..20: note = chemically synthesized
  source 1..20: mol_type = other DNA
tcctggggtcctggggtaga

SEQ ID NO: 6834 - DNA, 20 bp, synthetic construct
  misc_feature 1..20: note = chemically synthesized
  source 1..20: mol_type = other DNA
cctggggtcctggggtagac

SEQ ID NO: 6835 - DNA, 20 bp, synthetic construct
  misc_feature 1..20: note = chemically synthesized
  source 1..20: mol_type = other DNA
ggggtcctggggtagacagg

SEQ ID NO: 6836 - DNA, 20 bp, synthetic construct
  misc_feature 1..20: note = chemically synthesized
  source 1..20: mol_type = other DNA
gggtcctggggtagacagga

SEQ ID NO: 6837 - DNA, 20 bp, synthetic construct
  misc_feature 1..20: note = chemically synthesized
  source 1..20: mol_type = other DNA
cctggggtagacaggaaggt

SEQ ID NO: 6838 - DNA, 20 bp, synthetic construct
  misc_feature 1..20: note = chemically synthesized
  source 1..20: mol_type = other DNA
ctggggtagacaggaaggtg

SEQ ID NO: 6839 - DNA, 20 bp, synthetic construct
  misc_feature 1..20: note = chemically synthesized
  source 1..20: mol_type = other DNA
ggtagacaggaaggtgaggt

SEQ ID NO: 6840 - DNA, 20 bp, synthetic construct
  misc_feature 1..20: note = chemically synthesized
  source 1..20: mol_type = other DNA
gtagacaggaaggtgaggtg

SEQ ID NO: 6841 - DNA, 20 bp, synthetic construct
  misc_feature 1..20: note = chemically synthesized
  source 1..20: mol_type = other DNA
tagacaggaaggtgaggtga

SEQ ID NO: 6842 - DNA, 20 bp, synthetic construct
  misc_feature 1..20: note = chemically synthesized
  source 1..20: mol_type = other DNA
ggaaggtgaggtgagggaac

SEQ ID NO: 6843 - DNA, 20 bp, synthetic construct
  misc_feature 1..20: note = chemically synthesized
  source 1..20: mol_type = other DNA
aggtgaggtgagggaacaag

SEQ ID NO: 6844 - DNA, 20 bp, synthetic construct
  misc_feature 1..20: note = chemically synthesized
  source 1..20: mol_type = other DNA
ggtgaggtgagggaacaagc

SEQ ID NO: 6845 - DNA, 20 bp, synthetic construct
  misc_feature 1..20: note = chemically synthesized
  source 1..20: mol_type = other DNA
gtgaggtgagggaacaagcg

SEQ ID NO: 6846 - DNA, 20 bp, synthetic construct
  misc_feature 1..20: note = chemically synthesized
  source 1..20: mol_type = other DNA
tgaggtgagggaacaagcgg

SEQ ID NO: 6847 - DNA, 20 bp, synthetic construct
  misc_feature 1..20: note = chemically synthesized
  source 1..20: mol_type = other DNA
gagggaacaagcgggggtgt

SEQ ID NO: 6848 - DNA, 20 bp, synthetic construct
  misc_feature 1..20: note = chemically synthesized
  source 1..20: mol_type = other DNA
agggaacaagcgggggtgtc

SEQ ID NO: 6849 - DNA, 20 bp, synthetic construct
  misc_feature 1..20: note = chemically synthesized
  source 1..20: mol_type = other DNA
cgggggtgtcgggccctcct

SEQ ID NO: 6850 - DNA, 20 bp, synthetic construct
  misc_feature 1..20: note = chemically synthesized
  source 1..20: mol_type = other DNA
ccctcctcagtccctgttca

SEQ ID NO: 6851 - DNA, 20 bp, synthetic construct
  misc_feature 1..20: note = chemically synthesized
  source 1..20: mol_type = other DNA
ctcctcagtccctgttcaca

SEQ ID NO: 6852 - DNA, 20 bp, synthetic construct
  misc_feature 1..20: note = chemically synthesized
  source 1..20: mol_type = other DNA
ctcagtccctgttcacagag

SEQ ID NO: 6853 - DNA, 20 bp, synthetic construct
  misc_feature 1..20: note = chemically synthesized
  source 1..20: mol_type = other DNA
tcagtccctgttcacagagt

SEQ ID NO: 6854 - DNA, 20 bp, synthetic construct
  misc_feature 1..20: note = chemically synthesized
  source 1..20: mol_type = other DNA
ccctgttcacagagtgggtg

SEQ ID NO: 6855 - DNA, 20 bp, synthetic construct
  misc_feature 1..20: note = chemically synthesized
  source 1..20: mol_type = other DNA
tgttcacagagtgggtgcgg

SEQ ID NO: 6856 - DNA, 20 bp, synthetic construct
  misc_feature 1..20: note = chemically synthesized
  source 1..20: mol_type = other DNA
ttcacagagtgggtgcggca

SEQ ID NO: 6857 - DNA, 20 bp, synthetic construct
  misc_feature 1..20: note = chemically synthesized
  source 1..20: mol_type = other DNA
tgggtgcggcagagacctca

SEQ ID NO: 6858 - DNA, 20 bp, synthetic construct
  misc_feature 1..20: note = chemically synthesized
  source 1..20: mol_type = other DNA
gggtgcggcagagacctcaa

SEQ ID NO: 6859 - DNA, 20 bp, synthetic construct
  misc_feature 1..20: note = chemically synthesized
  source 1..20: mol_type = other DNA
ggtgcggcagagacctcaaa

SEQ ID NO: 6860 - DNA, 20 bp, synthetic construct
  misc_feature 1..20: note = chemically synthesized
  source 1..20: mol_type = other DNA
cggcagagacctcaaaggga

SEQ ID NO: 6861 - DNA, 20 bp, synthetic construct
  misc_feature 1..20: note = chemically synthesized
  source 1..20: mol_type = other DNA
gcagagacctcaaagggaca

SEQ ID NO: 6862 - DNA, 20 bp, synthetic construct
  misc_feature 1..20: note = chemically synthesized
  source 1..20: mol_type = other DNA
caaagggacagagcaatcat

SEQ ID NO: 6863 - DNA, 20 bp, synthetic construct
  misc_feature 1..20: note = chemically synthesized
  source 1..20: mol_type = other DNA
ggacagagcaatcatgagct

SEQ ID NO: 6864 - DNA, 20 bp, synthetic construct
  misc_feature 1..20: note = chemically synthesized
  source 1..20: mol_type = other DNA
agagcaatcatgagctgaga

SEQ ID NO: 6865 - DNA, 20 bp, synthetic construct
  misc_feature 1..20: note = chemically synthesized
  source 1..20: mol_type = other DNA
agcaatcatgagctgagaca

SEQ ID NO: 6866 - DNA, 20 bp, synthetic construct
  misc_feature 1..20: note = chemically synthesized
  source 1..20: mol_type = other DNA
gcaatcatgagctgagacag

SEQ ID NO: 6867 - DNA, 20 bp, synthetic construct
  misc_feature 1..20: note = chemically synthesized
  source 1..20: mol_type = other DNA
caatcatgagctgagacaga

SEQ ID NO: 6868 - DNA, 20 bp, synthetic construct
  misc_feature 1..20: note = chemically synthesized
  source 1..20: mol_type = other DNA
aatcatgagctgagacagag

SEQ ID NO: 6869 - DNA, 20 bp, synthetic construct
  misc_feature 1..20: note = chemically synthesized
  source 1..20: mol_type = other DNA
atcatgagctgagacagagg

SEQ ID NO: 6870 - DNA, 20 bp, synthetic construct
  misc_feature 1..20: note = chemically synthesized
  source 1..20: mol_type = other DNA
catgagctgagacagagggg

SEQ ID NO: 6871 - DNA, 20 bp, synthetic construct
  misc_feature 1..20: note = chemically synthesized
  source 1..20: mol_type = other DNA
gctgagacagagggggagca

SEQ ID NO: 6872 - DNA, 20 bp, synthetic construct
  misc_feature 1..20: note = chemically synthesized
  source 1..20: mol_type = other DNA
acagagggggagcaaagccg

SEQ ID NO: 6873 - DNA, 20 bp, synthetic construct
  misc_feature 1..20: note = chemically synthesized
  source 1..20: mol_type = other DNA
gcacacttgcctttcaaaaa

SEQ ID NO: 6874 - DNA, 20 bp, synthetic construct
  misc_feature 1..20: note = chemically synthesized
  source 1..20: mol_type = other DNA
caaaaatggatttcctctcc

SEQ ID NO: 6875 - DNA, 20 bp, synthetic construct
  misc_feature 1..20: note = chemically synthesized
  source 1..20: mol_type = other DNA
aaaaatggatttcctctcct

SEQ ID NO: 6876 - DNA, 20 bp, synthetic construct
  misc_feature 1..20: note = chemically synthesized
  source 1..20: mol_type = other DNA
ggatttcctctcctgggatt

SEQ ID NO: 6877 - DNA, 20 bp, synthetic construct
  misc_feature 1..20: note = chemically synthesized
  source 1..20: mol_type = other DNA
tctcctgggattcagcctgc

SEQ ID NO: 6878 - DNA, 20 bp, synthetic construct
  misc_feature 1..20: note = chemically synthesized
  source 1..20: mol_type = other DNA
ggattcagcctgcgagtgcc

SEQ ID NO: 6879 - DNA, 20 bp, synthetic construct
  misc_feature 1..20: note = chemically synthesized
  source 1..20: mol_type = other DNA
tgcctggcccctcaccttga

SEQ ID NO: 6880 - DNA, 20 bp, synthetic construct
  misc_feature 1..20: note = chemically synthesized
  source 1..20: mol_type = other DNA
tggcccctcaccttgatgga

SEQ ID NO: 6881 - DNA, 20 bp, synthetic construct
  misc_feature 1..20: note = chemically synthesized
  source 1..20: mol_type = other DNA
ggcccctcaccttgatggaa

SEQ ID NO: 6882 - DNA, 20 bp, synthetic construct
  misc_feature 1..20: note = chemically synthesized
  source 1..20: mol_type = other DNA
cctcaccttgatggaaagga

SEQ ID NO: 6883 - DNA, 20 bp, synthetic construct
  misc_feature 1..20: note = chemically synthesized
  source 1..20: mol_type = other DNA
aaggatggtcattttcctcc

SEQ ID NO: 6884 - DNA, 20 bp, synthetic construct
  misc_feature 1..20: note = chemically synthesized
  source 1..20: mol_type = other DNA
tggtcattttcctccgagct

SEQ ID NO: 6885 - DNA, 20 bp, synthetic construct
  misc_feature 1..20: note = chemically synthesized
  source 1..20: mol_type = other DNA
tttcctccgagctcagctgc

SEQ ID NO: 6886 - DNA, 20 bp, synthetic construct
  misc_feature 1..20: note = chemically synthesized
  source 1..20: mol_type = other DNA
tcagctgctggatatcttga

SEQ ID NO: 6887 - DNA, 20 bp, synthetic construct
  misc_feature 1..20: note = chemically synthesized
  source 1..20: mol_type = other DNA
ctggatatcttgaaagtcct

SEQ ID NO: 6888 - DNA, 20 bp, synthetic construct
  misc_feature 1..20: note = chemically synthesized
  source 1..20: mol_type = other DNA
ttgaaagtccttggccatga

SEQ ID NO: 6889 - DNA, 20 bp, synthetic construct
  misc_feature 1..20: note = chemically synthesized
  source 1..20: mol_type = other DNA
tgaaagtccttggccatgat

SEQ ID NO: 6890 - DNA, 20 bp, synthetic construct
  misc_feature 1..20: note = chemically synthesized
  source 1..20: mol_type = other DNA
gaaagtccttggccatgatg

SEQ ID NO: 6891 - DNA, 20 bp, synthetic construct
  misc_feature 1..20: note = chemically synthesized
  source 1..20: mol_type = other DNA
tccttggccatgatggggcc

SEQ ID NO: 6892 - DNA, 20 bp, synthetic construct
  misc_feature 1..20: note = chemically synthesized
  source 1..20: mol_type = other DNA
ccttggccatgatggggccc

SEQ ID NO: 6893 - DNA, 20 bp, synthetic construct
  misc_feature 1..20: note = chemically synthesized
  source 1..20: mol_type = other DNA
ggccatgatggggcccgggc

SEQ ID NO: 6894 - DNA, 20 bp, synthetic construct
  misc_feature 1..20: note = chemically synthesized
  source 1..20: mol_type = other DNA
ccatgatggggcccgggctg

SEQ ID NO: 6895 - DNA, 20 bp, synthetic construct
  misc_feature 1..20: note = chemically synthesized
  source 1..20: mol_type = other DNA
gatggggcccgggctggagc

SEQ ID NO: 6896 - DNA, 20 bp, synthetic construct
  misc_feature 1..20: note = chemically synthesized
  source 1..20: mol_type = other DNA
tggggcccgggctggagctg

SEQ ID NO: 6897 - DNA, 20 bp, synthetic construct
  misc_feature 1..20: note = chemically synthesized
  source 1..20: mol_type = other DNA
gcccgggctggagctggagc

SEQ ID NO: 6898 - DNA, 20 bp, synthetic construct
  misc_feature 1..20: note = chemically synthesized
  source 1..20: mol_type = other DNA
ccgggctggagctggagctg

SEQ ID NO: 6899 - DNA, 20 bp, synthetic construct
  misc_feature 1..20: note = chemically synthesized
  source 1..20: mol_type = other DNA
gctggagctggagctggagc

SEQ ID NO: 6900 - DNA, 20 bp, synthetic construct
  misc_feature 1..20: note = chemically synthesized
  source 1..20: mol_type = other DNA
ctggagctggagctggagct

SEQ ID NO: 6901 - DNA, 20 bp, synthetic construct
  misc_feature 1..20: note = chemically synthesized
  source 1..20: mol_type = other DNA
agctggagctggagctgggc

SEQ ID NO: 6902 - DNA, 20 bp, synthetic construct
  misc_feature 1..20: note = chemically synthesized
  source 1..20: mol_type = other DNA
gctggagctggagctgggct

SEQ ID NO: 6903 - DNA, 20 bp, synthetic construct
  misc_feature 1..20: note = chemically synthesized
  source 1..20: mol_type = other DNA
gagctggagctgggctgggc

SEQ ID NO: 6904 - DNA, 20 bp, synthetic construct
  misc_feature 1..20: note = chemically synthesized
  source 1..20: mol_type = other DNA
agctggagctgggctgggct

SEQ ID NO: 6905 - DNA, 20 bp, synthetic construct
  misc_feature 1..20: note = chemically synthesized
  source 1..20: mol_type = other DNA
gagctgggctgggctgggct

SEQ ID NO: 6906 - DNA, 20 bp, synthetic construct
  misc_feature 1..20: note = chemically synthesized
  source 1..20: mol_type = other DNA
agctgggctgggctgggctg

SEQ ID NO: 6907 - DNA, 20 bp, synthetic construct
  misc_feature 1..20: note = chemically synthesized
  source 1..20: mol_type = other DNA
ggctgggctgaggttgctct

SEQ ID NO: 6908 - DNA, 20 bp, synthetic construct
  misc_feature 1..20: note = chemically synthesized
  source 1..20: mol_type = other DNA
gctgggctgaggttgctctg

SEQ ID NO: 6909 - DNA, 20 bp, synthetic construct
  misc_feature 1..20: note = chemically synthesized
  source 1..20: mol_type = other DNA
ctgggctgaggttgctctga

SEQ ID NO: 6910 - DNA, 20 bp, synthetic construct
  misc_feature 1..20: note = chemically synthesized
  source 1..20: mol_type = other DNA
gctgaggttgctctgagggc

SEQ ID NO: 6911 - DNA, 20 bp, synthetic construct
  misc_feature 1..20: note = chemically synthesized
  source 1..20: mol_type = other DNA
ctgaggttgctctgagggct

SEQ ID NO: 6912 - DNA, 20 bp, synthetic construct
  misc_feature 1..20: note = chemically synthesized
  source 1..20: mol_type = other DNA
tgaggttgctctgagggctg

SEQ ID NO: 6913 - DNA, 20 bp, synthetic construct
  misc_feature 1..20: note = chemically synthesized
  source 1..20: mol_type = other DNA
gttgctctgagggctggggc

SEQ ID NO: 6914 - DNA, 20 bp, synthetic construct
  misc_feature 1..20: note = chemically synthesized
  source 1..20: mol_type = other DNA
ttgctctgagggctggggct

SEQ ID NO: 6915 - DNA, 20 bp, synthetic construct
  misc_feature 1..20: note = chemically synthesized
  source 1..20: mol_type = other DNA
tgctctgagggctggggctg

SEQ ID NO: 6916 - DNA, 20 bp, synthetic construct
  misc_feature 1..20: note = chemically synthesized
  source 1..20: mol_type = other DNA
tctgagggctggggctgggg

SEQ ID NO: 6917 - DNA, 20 bp, synthetic construct
  misc_feature 1..20: note = chemically synthesized
  source 1..20: mol_type = other DNA
tgagggctggggctggggca

SEQ ID NO: 6918 - DNA, 20 bp, synthetic construct
  misc_feature 1..20: note = chemically synthesized
  source 1..20: mol_type = other DNA
gagggctggggctggggcag

SEQ ID NO: 6919 - DNA, 20 bp, synthetic construct
  misc_feature 1..20: note = chemically synthesized
  source 1..20: mol_type = other DNA
ctggggctggggcagaggtg

SEQ ID NO: 6920 - DNA, 20 bp, synthetic construct
  misc_feature 1..20: note = chemically synthesized
  source 1..20: mol_type = other DNA
ggcagaggtgcagattcacg

SEQ ID NO: 6921 - DNA, 20 bp, synthetic construct
  misc_feature 1..20: note = chemically synthesized
  source 1..20: mol_type = other DNA
cagaggtgcagattcacgtg

SEQ ID NO: 6922 - DNA, 20 bp, synthetic construct
  misc_feature 1..20: note = chemically synthesized
  source 1..20: mol_type = other DNA
agaggtgcagattcacgtgg

SEQ ID NO: 6923 - DNA, 20 bp, synthetic construct
  misc_feature 1..20: note = chemically synthesized
  source 1..20: mol_type = other DNA
cagattcacgtggaggttga

SEQ ID NO: 6924 - DNA, 20 bp, synthetic construct
  misc_feature 1..20: note = chemically synthesized
  source 1..20: mol_type = other DNA
attcacgtggaggttgatgg

SEQ ID NO: 6925 - DNA, 20 bp, synthetic construct
  misc_feature 1..20: note = chemically synthesized
  source 1..20: mol_type = other DNA
ttcacgtggaggttgatggt

SEQ ID NO: 6926 - DNA, 20 bp, synthetic construct
  misc_feature 1..20: note = chemically synthesized
  source 1..20: mol_type = other DNA
cgtggaggttgatggtggga

SEQ ID NO: 6927 - DNA, 20 bp, synthetic construct
  misc_feature 1..20: note = chemically synthesized
  source 1..20: mol_type = other DNA
gttgatggtgggatggaacg

SEQ ID NO: 6928 - DNA, 20 bp, synthetic construct
  misc_feature 1..20: note = chemically synthesized
  source 1..20: mol_type = other DNA
ttgatggtgggatggaacgc

SEQ ID NO: 6929 - DNA, 20 bp, synthetic construct
  misc_feature 1..20: note = chemically synthesized
  source 1..20: mol_type = other DNA
tgatggtgggatggaacgca

SEQ ID NO: 6930 - DNA, 20 bp, synthetic construct
  misc_feature 1..20: note = chemically synthesized
  source 1..20: mol_type = other DNA
ggtgggatggaacgcagggt

SEQ ID NO: 6931 - DNA, 20 bp, synthetic construct
  misc_feature 1..20: note = chemically synthesized
  source 1..20: mol_type = other DNA
tgggatggaacgcagggtcg

SEQ ID NO: 6932 - DNA, 20 bp, synthetic construct
  misc_feature 1..20: note = chemically synthesized
  source 1..20: mol_type = other DNA
gggatggaacgcagggtcgg

SEQ ID NO: 6933 - DNA, 20 bp, synthetic construct
  misc_feature 1..20: note = chemically synthesized
  source 1..20: mol_type = other DNA
ggatggaacgcagggtcgga

SEQ ID NO: 6934 - DNA, 20 bp, synthetic construct
  misc_feature 1..20: note = chemically synthesized
  source 1..20: mol_type = other DNA
gatggaacgcagggtcggag

SEQ ID NO: 6935 - DNA, 20 bp, synthetic construct
  misc_feature 1..20: note = chemically synthesized
  source 1..20: mol_type = other DNA
aacgcagggtcggaggggtt

SEQ ID NO: 6936 - DNA, 20 bp, synthetic construct
  misc_feature 1..20: note = chemically synthesized
  source 1..20: mol_type = other DNA
acgcagggtcggaggggttc

SEQ ID NO: 6937 - DNA, 20 bp, synthetic construct
  misc_feature 1..20: note = chemically synthesized
  source 1..20: mol_type = other DNA
cgcagggtcggaggggttcg

SEQ ID NO: 6938 - DNA, 20 bp, synthetic construct
  misc_feature 1..20: note = chemically synthesized
  source 1..20: mol_type = other DNA
agggtcggaggggttcgggg

SEQ ID NO: 6939 - DNA, 20 bp, synthetic construct
  misc_feature 1..20: note = chemically synthesized
  source 1..20: mol_type = other DNA
gtcggaggggttcggggtgg

SEQ ID NO: 6940 - DNA, 20 bp, synthetic construct
  misc_feature 1..20: note = chemically synthesized
  source 1..20: mol_type = other DNA
aggggttcggggtggtggcc

SEQ ID NO: 6941 - DNA, 20 bp, synthetic construct
  misc_feature 1..20: note = chemically synthesized
  source 1..20: mol_type = other DNA
ggggttcggggtggtggcct

SEQ ID NO: 6942 - DNA, 20 bp, synthetic construct
  misc_feature 1..20: note = chemically synthesized
  source 1..20: mol_type = other DNA
gttcggggtggtggcctggg

SEQ ID NO: 6943 - DNA, 20 bp, synthetic construct
  misc_feature 1..20: note = chemically synthesized
  source 1..20: mol_type = other DNA
ttcggggtggtggcctgggt

SEQ ID NO: 6944 - DNA, 20 bp, synthetic construct
  misc_feature 1..20: note = chemically synthesized
  source 1..20: mol_type = other DNA
tggtggcctgggtaggatct

SEQ ID NO: 6945 - DNA, 20 bp, synthetic construct
  misc_feature 1..20: note = chemically synthesized
  source 1..20: mol_type = other DNA
ggtggcctgggtaggatctg

SEQ ID NO: 6946 - DNA, 20 bp, synthetic construct
  misc_feature 1..20: note = chemically synthesized
  source 1..20: mol_type = other DNA
gcctgggtaggatctgaggt

SEQ ID NO: 6947 - DNA, 20 bp, synthetic construct
  misc_feature 1..20: note = chemically synthesized
  source 1..20: mol_type = other DNA
tgccaacctcagatcctacc

SEQ ID NO: 6948 - DNA, 20 bp, synthetic construct
  misc_feature 1..20: note = chemically synthesized
  source 1..20: mol_type = other DNA
gccaacctcagatcctaccc

SEQ ID NO: 6949 - DNA, 20 bp, synthetic construct
  misc_feature 1..20: note = chemically synthesized
  source 1..20: mol_type = other DNA
gtgaatctgcacctctgccc

SEQ ID NO: 6950 - DNA, 20 bp, synthetic construct
  misc_feature 1..20: note = chemically synthesized
  source 1..20: mol_type = other DNA
ctgcacctctgccccagccc

SEQ ID NO: 6951 - DNA, 20 bp, synthetic construct
  misc_feature 1..20: note = chemically synthesized
  source 1..20: mol_type = other DNA
tctgccccagccccagccct

SEQ ID NO: 6952 - DNA, 20 bp, synthetic construct
  misc_feature 1..20: note = chemically synthesized
  source 1..20: mol_type = other DNA
tgccccagccccagccctca

SEQ ID NO: 6953 - DNA, 20 bp, synthetic construct
  misc_feature 1..20: note = chemically synthesized
  source 1..20: mol_type = other DNA
cccagccctcagagcaacct

SEQ ID NO: 6954 - DNA, 20 bp, synthetic construct
  misc_feature 1..20: note = chemically synthesized
  source 1..20: mol_type = other DNA
ccctcagagcaacctcagcc

SEQ ID NO: 6955 - DNA, 20 bp, synthetic construct
  misc_feature 1..20: note = chemically synthesized
  source 1..20: mol_type = other DNA
agagcaacctcagcccagcc

SEQ ID NO: 6956 - DNA, 20 bp, synthetic construct
  misc_feature 1..20: note = chemically synthesized
  source 1..20: mol_type = other DNA
aacctcagcccagcccagcc

SEQ ID NO: 6957 - DNA, 20 bp, synthetic construct
  misc_feature 1..20: note = chemically synthesized
  source 1..20: mol_type = other DNA
agcccagcccagcccagctc

SEQ ID NO: 6958 - DNA, 20 bp, synthetic construct
  misc_feature 1..20: note = chemically synthesized
  source 1..20: mol_type = other DNA
gcccagcccagctccagctc

SEQ ID NO: 6959 - DNA, 20 bp, synthetic construct
  misc_feature 1..20: note = chemically synthesized
  source 1..20: mol_type = other DNA
cccagctccagctccagctc

SEQ ID NO: 6960 - DNA, 20 bp, synthetic construct
  misc_feature 1..20: note = chemically synthesized
  source 1..20: mol_type = other DNA
ctccagctccagctccagcc

SEQ ID NO: 6961 - DNA, 20 bp, synthetic construct
  misc_feature 1..20: note = chemically synthesized
  source 1..20: mol_type = other DNA
tccagctccagctccagccc

SEQ ID NO: 6962 - DNA, 20 bp, synthetic construct
  misc_feature 1..20: note = chemically synthesized
  source 1..20: mol_type = other DNA
ctccagcccgggccccatca

SEQ ID NO: 6963 - DNA, 20 bp, synthetic construct
  misc_feature 1..20: note = chemically synthesized
  source 1..20: mol_type = other DNA
gcccgggccccatcatggcc

SEQ ID NO: 6964 - DNA, 20 bp, synthetic construct
  misc_feature 1..20: note = chemically synthesized
  source 1..20: mol_type = other DNA
cccgggccccatcatggcca

SEQ ID NO: 6965 - DNA, 20 bp, synthetic construct
  misc_feature 1..20: note = chemically synthesized
  source 1..20: mol_type = other DNA
catcatggccaaggactttc

SEQ ID NO: 6966 - DNA, 20 bp, synthetic construct
  misc_feature 1..20: note = chemically synthesized
  source 1..20: mol_type = other DNA
ccaaggactttcaagatatc

SEQ ID NO: 6967 - DNA, 20 bp, synthetic construct
  misc_feature 1..20: note = chemically synthesized
  source 1..20: mol_type = other DNA
aggactttcaagatatccag

SEQ ID NO: 6968 - DNA, 20 bp, synthetic construct
  misc_feature 1..20: note = chemically synthesized
  source 1..20: mol_type = other DNA
tttcaagatatccagcagct

SEQ ID NO: 6969 - DNA, 20 bp, synthetic construct
  misc_feature 1..20: note = chemically synthesized
  source 1..20: mol_type = other DNA
agatatccagcagctgagct

SEQ ID NO: 6970 - DNA, 20 bp, synthetic construct
  misc_feature 1..20: note = chemically synthesized
  source 1..20: mol_type = other DNA
atatccagcagctgagctcg

SEQ ID NO: 6971 - DNA, 20 bp, synthetic construct
  misc_feature 1..20: note = chemically synthesized
  source 1..20: mol_type = other DNA
tatccagcagctgagctcgg

SEQ ID NO: 6972 - DNA, 20 bp, synthetic construct
  misc_feature 1..20: note = chemically synthesized
  source 1..20: mol_type = other DNA
aaatgaccatcctttccatc

SEQ ID NO: 6973 - DNA, 20 bp, synthetic construct
  misc_feature 1..20: note = chemically synthesized
  source 1..20: mol_type = other DNA
aatgaccatcctttccatca

SEQ ID NO: 6974 - DNA, 20 bp, synthetic construct
  misc_feature 1..20: note = chemically synthesized
  source 1..20: mol_type = other DNA
accatcctttccatcaaggt

SEQ ID NO: 6975 - DNA, 20 bp, synthetic construct
  misc_feature 1..20: note = chemically synthesized
  source 1..20: mol_type = other DNA
ccatcctttccatcaaggtg

SEQ ID NO: 6976 - DNA, 20 bp, synthetic construct
  misc_feature 1..20: note = chemically synthesized
  source 1..20: mol_type = other DNA
catcctttccatcaaggtga

SEQ ID NO: 6977 - DNA, 20 bp, synthetic construct
  misc_feature 1..20: note = chemically synthesized
  source 1..20: mol_type = other DNA
atcctttccatcaaggtgag

SEQ ID NO: 6978 - DNA, 20 bp, synthetic construct
  misc_feature 1..20: note = chemically synthesized
  source 1..20: mol_type = other DNA
tttccatcaaggtgaggggc

SEQ ID NO: 6979 - DNA, 20 bp, synthetic construct
  misc_feature 1..20: note = chemically synthesized
  source 1..20: mol_type = other DNA
ttccatcaaggtgaggggcc

SEQ ID NO: 6980 - DNA, 20 bp, synthetic construct
  misc_feature 1..20: note = chemically synthesized
  source 1..20: mol_type = other DNA
ggtgaggggccaggcactcg

SEQ ID NO: 6981 - DNA, 20 bp, synthetic construct
  misc_feature 1..20: note = chemically synthesized
  source 1..20: mol_type = other DNA
gtgaggggccaggcactcgc

SEQ ID NO: 6982 - DNA, 20 bp, synthetic construct
  misc_feature 1..20: note = chemically synthesized
  source 1..20: mol_type = other DNA
ggcactcgcaggctgaatcc

SEQ ID NO: 6983 - DNA, 20 bp, synthetic construct
  misc_feature 1..20: note = chemically synthesized
  source 1..20: mol_type = other DNA
gcactcgcaggctgaatccc

SEQ ID NO: 6984 - DNA, 20 bp, synthetic construct
  misc_feature 1..20: note = chemically synthesized
  source 1..20: mol_type = other DNA
actcgcaggctgaatcccag

SEQ ID NO: 6985 - DNA, 20 bp, synthetic construct
  misc_feature 1..20: note = chemically synthesized
  source 1..20: mol_type = other DNA
tcgcaggctgaatcccagga

SEQ ID NO: 6986 - DNA, 20 bp, synthetic construct
  misc_feature 1..20: note = chemically synthesized
  source 1..20: mol_type = other DNA
cgcaggctgaatcccaggag

SEQ ID NO: 6987 - DNA, 20 bp, synthetic construct
  misc_feature 1..20: note = chemically synthesized
  source 1..20: mol_type = other DNA
gagaggaaatccatttttga

SEQ ID NO: 6988 - DNA, 20 bp, synthetic construct
  misc_feature 1..20: note = chemically synthesized
  source 1..20: mol_type = other DNA
agaggaaatccatttttgaa

SEQ ID NO: 6989 - DNA, 20 bp, synthetic construct
  misc_feature 1..20: note = chemically synthesized
  source 1..20: mol_type = other DNA
gaaatccatttttgaaaggc

SEQ ID NO: 6990 - DNA, 20 bp, synthetic construct
  misc_feature 1..20: note = chemically synthesized
  source 1..20: mol_type = other DNA
atttttgaaaggcaagtgtg

SEQ ID NO: 6991 - DNA, 20 bp, synthetic construct
  misc_feature 1..20: note = chemically synthesized
  source 1..20: mol_type = other DNA
aggcaagtgtgcagtttctg

SEQ ID NO: 6992 - DNA, 20 bp, synthetic construct
  misc_feature 1..20: note = chemically synthesized
  source 1..20: mol_type = other DNA
gctttgctccccctctgtct

SEQ ID NO: 6993 - DNA, 20 bp, synthetic construct
  misc_feature 1..20: note = chemically synthesized
  source 1..20: mol_type = other DNA
catgattgctctgtcccttt

SEQ ID NO: 6994 - DNA, 20 bp, synthetic construct
  misc_feature 1..20: note = chemically synthesized
  source 1..20: mol_type = other DNA
atgattgctctgtccctttg

SEQ ID NO: 6995 - DNA, 20 bp, synthetic construct
  misc_feature 1..20: note = chemically synthesized
  source 1..20: mol_type = other DNA
tgccgcacccactctgtgaa

SEQ ID NO: 6996 - DNA, 20 bp, synthetic construct
  misc_feature 1..20: note = chemically synthesized
  source 1..20: mol_type = other DNA
gccgcacccactctgtgaac

SEQ ID NO: 6997 - DNA, 20 bp, synthetic construct
  misc_feature 1..20: note = chemically synthesized
  source 1..20: mol_type = other DNA
ccgcacccactctgtgaaca

SEQ ID NO: 6998 - DNA, 20 bp, synthetic construct
  misc_feature 1..20: note = chemically synthesized
  source 1..20: mol_type = other DNA
ccactctgtgaacagggact

SEQ ID NO: 6999 - DNA, 20 bp, synthetic construct
  misc_feature 1..20: note = chemically synthesized
  source 1..20: mol_type = other DNA
cactctgtgaacagggactg

SEQ ID NO: 7000 - DNA, 20 bp, synthetic construct
  misc_feature 1..20: note = chemically synthesized
  source 1..20: mol_type = other DNA
ctctgtgaacagggactgag

SEQ ID NO: 7001 - DNA, 20 bp, synthetic construct
  misc_feature 1..20: note = chemically synthesized
  source 1..20: mol_type = other DNA
tctgtgaacagggactgagg

SEQ ID NO: 7002 - DNA, 20 bp, synthetic construct
  misc_feature 1..20: note = chemically synthesized
  source 1..20: mol_type = other DNA
ctgtgaacagggactgagga

SEQ ID NO: 7003 - DNA, 20 bp, synthetic construct
  misc_feature 1..20: note = chemically synthesized
  source 1..20: mol_type = other DNA
cctcaccttcctgtctaccc

SEQ ID NO: 7004 - DNA, 20 bp, synthetic construct
  misc_feature 1..20: note = chemically synthesized
  source 1..20: mol_type = other DNA
ctcaccttcctgtctacccc

SEQ ID NO: 7005 - DNA, 20 bp, synthetic construct
  misc_feature 1..20: note = chemically synthesized
  source 1..20: mol_type = other DNA
tcctgtctaccccaggaccc

SEQ ID NO: 7006 - DNA, 20 bp, synthetic construct
  misc_feature 1..20: note = chemically synthesized
  source 1..20: mol_type = other DNA
cctgtctaccccaggacccc

SEQ ID NO: 7007 - DNA, 20 bp, synthetic construct
  misc_feature 1..20: note = chemically synthesized
  source 1..20: mol_type = other DNA
tctaccccaggaccccagga

SEQ ID NO: 7008 - DNA, 20 bp, synthetic construct
  misc_feature 1..20: note = chemically synthesized
  source 1..20: mol_type = other DNA
ctaccccaggaccccaggaa

SEQ ID NO: 7009 - DNA, 20 bp, synthetic construct
  misc_feature 1..20: note = chemically synthesized
  source 1..20: mol_type = other DNA
accccaggaaaggcatgtgc

SEQ ID NO: 7010 - DNA, 20 bp, synthetic construct
  misc_feature 1..20: note = chemically synthesized
  source 1..20: mol_type = other DNA
cccaggaaaggcatgtgcca

SEQ ID NO: 7011 - DNA, 20 bp, synthetic construct
  misc_feature 1..20: note = chemically synthesized
  source 1..20: mol_type = other DNA
ccaggaaaggcatgtgccag

SEQ ID NO: 7012 - DNA, 20 bp, synthetic construct
  misc_feature 1..20: note = chemically synthesized
  source 1..20: mol_type = other DNA
aaaggcatgtgccagaggtg

SEQ ID NO: 7013 - DNA, 20 bp, synthetic construct
  misc_feature 1..20: note = chemically synthesized
  source 1..20: mol_type = other DNA
aaggcatgtgccagaggtgt

SEQ ID NO: 7014 - DNA, 20 bp, synthetic construct
  misc_feature 1..20: note = chemically synthesized
  source 1..20: mol_type = other DNA
aggcatgtgccagaggtgtg

SEQ ID NO: 7015 - DNA, 20 bp, synthetic construct
  misc_feature 1..20: note = chemically synthesized
  source 1..20: mol_type = other DNA
gcatgtgccagaggtgtggg

SEQ ID NO: 7016 - DNA, 20 bp, synthetic construct
  misc_feature 1..20: note = chemically synthesized
  source 1..20: mol_type = other DNA
gccagaggtgtggggagatc

SEQ ID NO: 7017 - DNA, 20 bp, synthetic construct
  misc_feature 1..20: note = chemically synthesized
  source 1..20: mol_type = other DNA
agaggtgtggggagatctgg

SEQ ID NO: 7018 - DNA, 20 bp, synthetic construct
  misc_feature 1..20: note = chemically synthesized
  source 1..20: mol_type = other DNA
tgcccttctcctcccaaccc

SEQ ID NO: 7019 - DNA, 20 bp, synthetic construct
  misc_feature 1..20: note = chemically synthesized
  source 1..20: mol_type = other DNA
gtgtgcacgtatgtgcatat

SEQ ID NO: 7020 - DNA, 20 bp, synthetic construct
  misc_feature 1..20: note = chemically synthesized
  source 1..20: mol_type = other DNA
tgtgcacgtatgtgcatatg

SEQ ID NO: 7021 - DNA, 20 bp, synthetic construct
  misc_feature 1..20: note = chemically synthesized
  source 1..20: mol_type = other DNA
gtatgtgcatatgaggaatg

SEQ ID NO: 7022 - DNA, 20 bp, synthetic construct
  misc_feature 1..20: note = chemically synthesized
  source 1..20: mol_type = other DNA
gcatatgaggaatgcagatt

SEQ ID NO: 7023 - DNA, 20 bp, synthetic construct
  misc_feature 1..20: note = chemically synthesized
  source 1..20: mol_type = other DNA
atgaggaatgcagattcagc

SEQ ID NO: 7024 - DNA, 20 bp, synthetic construct
  misc_feature 1..20: note = chemically synthesized
  source 1..20: mol_type = other DNA
tgaggaatgcagattcagct

SEQ ID NO: 7025 - DNA, 20 bp, synthetic construct
  misc_feature 1..20: note = chemically synthesized
  source 1..20: mol_type = other DNA
gggactctgtgtgtgtgtgt

SEQ ID NO: 7026 - DNA, 20 bp, synthetic construct
  misc_feature 1..20: note = chemically synthesized
  source 1..20: mol_type = other DNA
gtgtgtgtgtatatgtgcgc

SEQ ID NO: 7027 - DNA, 20 bp, synthetic construct
  misc_feature 1..20: note = chemically synthesized
  source 1..20: mol_type = other DNA
gtgtgtgtatatgtgcgcga

SEQ ID NO: 7028 - DNA, 20 bp, synthetic construct
  misc_feature 1..20: note = chemically synthesized
  source 1..20: mol_type = other DNA
tgtgtgtatgtcgtgtatgt

SEQ ID NO: 7029 - DNA, 20 bp, synthetic construct
  misc_feature 1..20: note = chemically synthesized
  source 1..20: mol_type = other DNA
tgtgtatgtcgtgtatgtga

SEQ ID NO: 7030 - DNA, 20 bp, synthetic construct
  misc_feature 1..20: note = chemically synthesized
  source 1..20: mol_type = other DNA
gtgtatgtcgtgtatgtgag

SEQ ID NO: 7031 - DNA, 20 bp, synthetic construct
  misc_feature 1..20: note = chemically synthesized
  source 1..20: mol_type = other DNA
tgtatgtcgtgtatgtgaga

SEQ ID NO: 7032 - DNA, 20 bp, synthetic construct
  misc_feature 1..20: note = chemically synthesized
  source 1..20: mol_type = other DNA
tgagagggtatgttgtgtgt

SEQ ID NO: 7033 - DNA, 20 bp, synthetic construct
  misc_feature 1..20: note = chemically synthesized
  source 1..20: mol_type = other DNA
agagggtatgttgtgtgtga

SEQ ID NO: 7034 - DNA, 20 bp, synthetic construct
  misc_feature 1..20: note = chemically synthesized
  source 1..20: mol_type = other DNA
gttgtgtgtgtatgttgtgt

SEQ ID NO: 7035 - DNA, 20 bp, synthetic construct
  misc_feature 1..20: note = chemically synthesized
  source 1..20: mol_type = other DNA
gttgtgtgtatcttgtgtgt

SEQ ID NO: 7036 - DNA, 20 bp, synthetic construct
  misc_feature 1..20: note = chemically synthesized
  source 1..20: mol_type = other DNA
tgcatgtgtgtatgttgtgc

SEQ ID NO: 7037 - DNA, 20 bp, synthetic construct
  misc_feature 1..20: note = chemically synthesized
  source 1..20: mol_type = other DNA
cgagtgtatgttgtgtatgt

SEQ ID NO: 7038 - DNA, 20 bp, synthetic construct
  misc_feature 1..20: note = chemically synthesized
  source 1..20: mol_type = other DNA
tgtgtatgtatgttgtgtat

SEQ ID NO: 7039 - DNA, 20 bp, synthetic construct
  misc_feature 1..20: note = chemically synthesized
  source 1..20: mol_type = other DNA
gttgtgtgtgtgtattgtgt

SEQ ID NO: 7040 - DNA, 20 bp, synthetic construct
  misc_feature 1..20: note = chemically synthesized
  source 1..20: mol_type = other DNA
tgtatgtttgtgtgttgtgt

SEQ ID NO: 7041 - DNA, 20 bp, synthetic construct
  misc_feature 1..20: note = chemically synthesized
  source 1..20: mol_type = other DNA
tgcgtgtgtgtatgttgtgc

SEQ ID NO: 7042 - DNA, 20 bp, synthetic construct
  misc_feature 1..20: note = chemically synthesized
  source 1..20: mol_type = other DNA
gtgttgtgtgtgtatgttgt

SEQ ID NO: 7043 - DNA, 20 bp, synthetic construct
  misc_feature 1..20: note = chemically synthesized
  source 1..20: mol_type = other DNA
gttatgtatgttgtgtgtgt

SEQ ID NO: 7044 - DNA, 20 bp, synthetic construct
  misc_feature 1..20: note = chemically synthesized
  source 1..20: mol_type = other DNA
tgtgtgtgagtgtgttgcgt

SEQ ID NO: 7045 - DNA, 20 bp, synthetic construct
  misc_feature 1..20: note = chemically synthesized
  source 1..20: mol_type = other DNA
tgttgcgtgagtgtgtgtgt

SEQ ID NO: 7046 - DNA, 20 bp, synthetic construct
  misc_feature 1..20: note = chemically synthesized
  source 1..20: mol_type = other DNA
tgtgtgtgtgtgtgtgtgtg

SEQ ID NO: 7047 - DNA, 20 bp, synthetic construct
  misc_feature 1..20: note = chemically synthesized
  source 1..20: mol_type = other DNA
tgtgtgtgtgtgtgtgtgta

SEQ ID NO: 7048 - DNA, 20 bp, synthetic construct
  misc_feature 1..20: note = chemically synthesized
  source 1..20: mol_type = other DNA
gtgtgtgtgtgtgtgtgtag

SEQ ID NO: 7049 - DNA, 20 bp, synthetic construct
  misc_feature 1..20: note = chemically synthesized
  source 1..20: mol_type = other DNA
tgtgtgtgtgtgtgtagagg

SEQ ID NO: 7050 - DNA, 20 bp, synthetic construct
  misc_feature 1..20: note = chemically synthesized
  source 1..20: mol_type = other DNA
gtgtgtgtgtgtgtagaggt

SEQ ID NO: 7051 - DNA, 20 bp, synthetic construct
  misc_feature 1..20: note = chemically synthesized
  source 1..20: mol_type = other DNA
tgtgtgtgtgtgtagaggtg

SEQ ID NO: 7052 - DNA, 20 bp, synthetic construct
  misc_feature 1..20: note = chemically synthesized
  source 1..20: mol_type = other DNA
tgtgtgtgtagaggtggggt

SEQ ID NO: 7053 - DNA, 20 bp, synthetic construct
  misc_feature 1..20: note = chemically synthesized
  source 1..20: mol_type = other DNA
tgtgtagaggtggggtgagt

SEQ ID NO: 7054 - DNA, 20 bp, synthetic construct
  misc_feature 1..20: note = chemically synthesized
  source 1..20: mol_type = other DNA
gtgtagaggtggggtgagtt

SEQ ID NO: 7055 - DNA, 20 bp, synthetic construct
  misc_feature 1..20: note = chemically synthesized
  source 1..20: mol_type = other DNA
agaggtggggtgagttggga

SEQ ID NO: 7056 - DNA, 20 bp, synthetic construct
  misc_feature 1..20: note = chemically synthesized
  source 1..20: mol_type = other DNA
gaggtggggtgagttgggat

SEQ ID NO: 7057 - DNA, 20 bp, synthetic construct
  misc_feature 1..20: note = chemically synthesized
  source 1..20: mol_type = other DNA
gtggggtgagttgggatggg

SEQ ID NO: 7058 - DNA, 20 bp, synthetic construct
  misc_feature 1..20: note = chemically synthesized
  source 1..20: mol_type = other DNA
tggggtgagttgggatgggt

SEQ ID NO: 7059 - DNA, 20 bp, synthetic construct
  misc_feature 1..20: note = chemically synthesized
  source 1..20: mol_type = other DNA
ggggtgagttgggatgggtg

SEQ ID NO: 7060 - DNA, 20 bp, synthetic construct
  misc_feature 1..20: note = chemically synthesized
  source 1..20: mol_type = other DNA
gggtgagttgggatgggtgg

SEQ ID NO: 7061 - DNA, 20 bp, synthetic construct
  misc_feature 1..20: note = chemically synthesized
  source 1..20: mol_type = other DNA
ttgggatgggtgggggacgt

SEQ ID NO: 7062 - DNA, 20 bp, synthetic construct
  misc_feature 1..20: note = chemically synthesized
  source 1..20: mol_type = other DNA
atgggtgggggacgtgagca

SEQ ID NO: 7063 - DNA, 20 bp, synthetic construct
  misc_feature 1..20: note = chemically synthesized
  source 1..20: mol_type = other DNA
gggtgggggacgtgagcaca

SEQ ID NO: 7064 - DNA, 20 bp, synthetic construct
  misc_feature 1..20: note = chemically synthesized
  source 1..20: mol_type = other DNA
gtgggggacgtgagcacaga

SEQ ID NO: 7065 - DNA, 20 bp, synthetic construct
  misc_feature 1..20: note = chemically synthesized
  source 1..20: mol_type = other DNA
acgtgagcacagagagatcc

SEQ ID NO: 7066 - DNA, 20 bp, synthetic construct
  misc_feature 1..20: note = chemically synthesized
  source 1..20: mol_type = other DNA
tgagcacagagagatcctgg

SEQ ID NO: 7067 - DNA, 20 bp, synthetic construct
  misc_feature 1..20: note = chemically synthesized
  source 1..20: mol_type = other DNA
ccctgctcctctcatctccc

SEQ ID NO: 7068 - DNA, 20 bp, synthetic construct
  misc_feature 1..20: note = chemically synthesized
  source 1..20: mol_type = other DNA
catctcccaagacccttccc

SEQ ID NO: 7069 - DNA, 20 bp, synthetic construct
  misc_feature 1..20: note = chemically synthesized
  source 1..20: mol_type = other DNA
tctgtaataaatcttgactg

SEQ ID NO: 7070 - DNA, 20 bp, synthetic construct
  misc_feature 1..20: note = chemically synthesized
  source 1..20: mol_type = other DNA
ctgtaataaatcttgactga

SEQ ID NO: 7071 - DNA, 20 bp, synthetic construct
  misc_feature 1..20: note = chemically synthesized
  source 1..20: mol_type = other DNA
aaatcttgactgaaggacct

SEQ ID NO: 7072 - DNA, 20 bp, synthetic construct
  misc_feature 1..20: note = chemically synthesized
  source 1..20: mol_type = other DNA
actgaaggacctaagtatct

SEQ ID NO: 7073 - DNA, 20 bp, synthetic construct
  misc_feature 1..20: note = chemically synthesized
  source 1..20: mol_type = other DNA
tatcttggacattttttttt

SEQ ID NO: 7074 - DNA, 20 bp, synthetic construct
  misc_feature 1..20: note = chemically synthesized
  source 1..20: mol_type = other DNA
tcttggacatttttttttta

SEQ ID NO: 7075 - DNA, 20 bp, synthetic construct
  misc_feature 1..20: note = chemically synthesized
  source 1..20: mol_type = other DNA
ggacattttttttttagaga

SEQ ID NO: 7076 - DNA, 20 bp, synthetic construct
  misc_feature 1..20: note = chemically synthesized
  source 1..20: mol_type = other DNA
gacattttttttttagagac

SEQ ID NO: 7077 - DNA, 20 bp, synthetic construct
  misc_feature 1..20: note = chemically synthesized
  source 1..20: mol_type = other DNA
cattttttttttagagacag

SEQ ID NO: 7078 - DNA, 20 bp, synthetic construct
  misc_feature 1..20: note = chemically synthesized
  source 1..20: mol_type = other DNA
tttttttagagacaggagtg

SEQ ID NO: 7079 - DNA, 20 bp, synthetic construct
  misc_feature 1..20: note = chemically synthesized
  source 1..20: mol_type = other DNA
ttttagagacaggagtgtag

SEQ ID NO: 7080 - DNA, 20 bp, synthetic construct
  misc_feature 1..20: note = chemically synthesized
  source 1..20: mol_type = other DNA
tagagacaggagtgtagtgg

SEQ ID NO: 7081 - DNA, 20 bp, synthetic construct
  misc_feature 1..20: note = chemically synthesized
  source 1..20: mol_type = other DNA
agagacaggagtgtagtggc

SEQ ID NO: 7082 - DNA, 20 bp, synthetic construct
  misc_feature 1..20: note = chemically synthesized
  source 1..20: mol_type = other DNA
ggagtgtagtggcaggatca

SEQ ID NO: 7083 - DNA, 20 bp, synthetic construct
  misc_feature 1..20: note = chemically synthesized
  source 1..20: mol_type = other DNA
tcactgcaacctcgaactcc

SEQ ID NO: 7084 - DNA, 20 bp, synthetic construct
  misc_feature 1..20: note = chemically synthesized
  source 1..20: mol_type = other DNA
cactgcaacctcgaactcct

SEQ ID NO: 7085 - DNA, 20 bp, synthetic construct
  misc_feature 1..20: note = chemically synthesized
  source 1..20: mol_type = other DNA
aacctcgaactcctgggctc

SEQ ID NO: 7086 - DNA, 20 bp, synthetic construct
  misc_feature 1..20: note = chemically synthesized
  source 1..20: mol_type = other DNA
ctcaagccatcctcccacct

SEQ ID NO: 7087 - DNA, 20 bp, synthetic construct
  misc_feature 1..20: note = chemically synthesized
  source 1..20: mol_type = other DNA
tcctcccacctcagcctccc

SEQ ID NO: 7088 - DNA, 20 bp, synthetic construct
  misc_feature 1..20: note = chemically synthesized
  source 1..20: mol_type = other DNA
tcccacctcagcctcccaag

SEQ ID NO: 7089 - DNA, 20 bp, synthetic construct
  misc_feature 1..20: note = chemically synthesized
  source 1..20: mol_type = other DNA
acctcagcctcccaagtagt

SEQ ID NO: 7090 - DNA, 20 bp, synthetic construct
  misc_feature 1..20: note = chemically synthesized
  source 1..20: mol_type = other DNA
cctcagcctcccaagtagtt

SEQ ID NO: 7091 - DNA, 20 bp, synthetic construct
  misc_feature 1..20: note = chemically synthesized
  source 1..20: mol_type = other DNA
tcccaagtagttaggactta

SEQ ID NO: 7092 - DNA, 20 bp, synthetic construct
  misc_feature 1..20: note = chemically synthesized
  source 1..20: mol_type = other DNA
cccaagtagttaggacttac

SEQ ID NO: 7093 - DNA, 20 bp, synthetic construct
  misc_feature 1..20: note = chemically synthesized
  source 1..20: mol_type = other DNA
caggtgtgcaccactgtgcc

SEQ ID NO: 7094 - DNA, 20 bp, synthetic construct
  misc_feature 1..20: note = chemically synthesized
  source 1..20: mol_type = other DNA
gcaaattaaaaaaaattttt

SEQ ID NO: 7095 - DNA, 20 bp, synthetic construct
  misc_feature 1..20: note = chemically synthesized
  source 1..20: mol_type = other DNA
aaattaaaaaaaatttttta

SEQ ID NO: 7096 - DNA, 20 bp, synthetic construct
  misc_feature 1..20: note = chemically synthesized
  source 1..20: mol_type = other DNA
aaaaaaattttttagagaaa

SEQ ID NO: 7097 - DNA, 20 bp, synthetic construct
  misc_feature 1..20: note = chemically synthesized
  source 1..20: mol_type = other DNA
aaaaaattttttagagaaat

SEQ ID NO: 7098 - DNA, 20 bp, synthetic construct
  misc_feature 1..20: note = chemically synthesized
  source 1..20: mol_type = other DNA
aaaaattttttagagaaatg

SEQ ID NO: 7099 - DNA, 20 bp, synthetic construct
  misc_feature 1..20: note = chemically synthesized
  source 1..20: mol_type = other DNA
tggggtcttgctatgttgcc

SEQ ID NO: 7100 - DNA, 20 bp, synthetic construct
  misc_feature 1..20: note = chemically synthesized
  source 1..20: mol_type = other DNA
ggggtcttgctatgttgccc

SEQ ID NO: 7101 - DNA, 20 bp, synthetic construct
  misc_feature 1..20: note = chemically synthesized
  source 1..20: mol_type = other DNA
tcttgctatgttgcccaggc

SEQ ID NO: 7102 - DNA, 20 bp, synthetic construct
  misc_feature 1..20: note = chemically synthesized
  source 1..20: mol_type = other DNA
tgctatgttgcccaggctgg

SEQ ID NO: 7103 - DNA, 20 bp, synthetic construct
  misc_feature 1..20: note = chemically synthesized
  source 1..20: mol_type = other DNA
gctatgttgcccaggctggt

SEQ ID NO: 7104 - DNA, 20 bp, synthetic construct
  misc_feature 1..20: note = chemically synthesized
  source 1..20: mol_type = other DNA
gttgcccaggctggtgggaa

SEQ ID NO: 7105 - DNA, 20 bp, synthetic construct
  misc_feature 1..20: note = chemically synthesized
  source 1..20: mol_type = other DNA
ggctggtgggaaaagatttt

SEQ ID NO: 7106 - DNA, 20 bp, synthetic construct
  misc_feature 1..20: note = chemically synthesized
  source 1..20: mol_type = other DNA
gctggtgggaaaagatttta

SEQ ID NO: 7107 - DNA, 20 bp, synthetic construct
  misc_feature 1..20: note = chemically synthesized
  source 1..20: mol_type = other DNA
gtgggaaaagattttaaggt

SEQ ID NO: 7108 - DNA, 20 bp, synthetic construct
  misc_feature 1..20: note = chemically synthesized
  source 1..20: mol_type = other DNA
gggaaaagattttaaggtga

SEQ ID NO: 7109 - DNA, 20 bp, synthetic construct
  misc_feature 1..20: note = chemically synthesized
  source 1..20: mol_type = other DNA
gaaaagattttaaggtgaga

SEQ ID NO: 7110 - DNA, 20 bp, synthetic construct
  misc_feature 1..20: note = chemically synthesized
  source 1..20: mol_type = other DNA
ttttaaggtgagagagatct

SEQ ID NO: 7111 - DNA, 20 bp, synthetic construct
  misc_feature 1..20: note = chemically synthesized
  source 1..20: mol_type = other DNA
taaggtgagagagatctgag

SEQ ID NO: 7112 - DNA, 20 bp, synthetic construct
  misc_feature 1..20: note = chemically synthesized
  source 1..20: mol_type = other DNA
gagagagatctgagcagtgc

SEQ ID NO: 7113 - DNA, 20 bp, synthetic construct
  misc_feature 1..20: note = chemically synthesized
  source 1..20: mol_type = other DNA
agagagatctgagcagtgct

SEQ ID NO: 7114 - DNA, 20 bp, synthetic construct
  misc_feature 1..20: note = chemically synthesized
  source 1..20: mol_type = other DNA
gagatctgagcagtgctagg

SEQ ID NO: 7115 - DNA, 20 bp, synthetic construct
  misc_feature 1..20: note = chemically synthesized
  source 1..20: mol_type = other DNA
atctgagcagtgctaggcag

SEQ ID NO: 7116 - DNA, 20 bp, synthetic construct
  misc_feature 1..20: note = chemically synthesized
  source 1..20: mol_type = other DNA
tctgagcagtgctaggcaga

SEQ ID NO: 7117 - DNA, 20 bp, synthetic construct
  misc_feature 1..20: note = chemically synthesized
  source 1..20: mol_type = other DNA
ctgagcagtgctaggcagaa

SEQ ID NO: 7118 - DNA, 20 bp, synthetic construct
  misc_feature 1..20: note = chemically synthesized
  source 1..20: mol_type = other DNA
gcagtgctaggcagaagggc

SEQ ID NO: 7119 - DNA, 20 bp, synthetic construct
  misc_feature 1..20: note = chemically synthesized
  source 1..20: mol_type = other DNA
agtgctaggcagaagggcaa

SEQ ID NO: 7120 - DNA, 20 bp, synthetic construct
  misc_feature 1..20: note = chemically synthesized
  source 1..20: mol_type = other DNA
ctaggcagaagggcaagagc

SEQ ID NO: 7121 - DNA, 20 bp, synthetic construct
  misc_feature 1..20: note = chemically synthesized
  source 1..20: mol_type = other DNA
taggcagaagggcaagagcc

SEQ ID NO: 7122 - DNA, 20 bp, synthetic construct
  misc_feature 1..20: note = chemically synthesized
  source 1..20: mol_type = other DNA
agaagggcaagagccaggaa

SEQ ID NO: 7123 - DNA, 20 bp, synthetic construct
  misc_feature 1..20: note = chemically synthesized
  source 1..20: mol_type = other DNA
aagggcaagagccaggaatg

SEQ ID NO: 7124 - DNA, 20 bp, synthetic construct
  misc_feature 1..20: note = chemically synthesized
  source 1..20: mol_type = other DNA
agggcaagagccaggaatgg

SEQ ID NO: 7125 - DNA, 20 bp, synthetic construct
  misc_feature 1..20: note = chemically synthesized
  source 1..20: mol_type = other DNA
ggcaagagccaggaatggag

SEQ ID NO: 7126 - DNA, 20 bp, synthetic construct
  misc_feature 1..20: note = chemically synthesized
  source 1..20: mol_type = other DNA
agccaggaatggaggagtgt

SEQ ID NO: 7127 - DNA, 20 bp, synthetic construct
  misc_feature 1..20: note = chemically synthesized
  source 1..20: mol_type = other DNA
gccaggaatggaggagtgtc

SEQ ID NO: 7128 - DNA, 20 bp, synthetic construct
  misc_feature 1..20: note = chemically synthesized
  source 1..20: mol_type = other DNA
atggaggagtgtcaggtgtg

SEQ ID NO: 7129 - DNA, 20 bp, synthetic construct
  misc_feature 1..20: note = chemically synthesized
  source 1..20: mol_type = other DNA
tggaggagtgtcaggtgtgt

SEQ ID NO: 7130 - DNA, 20 bp, synthetic construct
  misc_feature 1..20: note = chemically synthesized
  source 1..20: mol_type = other DNA
agtgtcaggtgtgtgggtgc

SEQ ID NO: 7131 - DNA, 20 bp, synthetic construct
  misc_feature 1..20: note = chemically synthesized
  source 1..20: mol_type = other DNA
gtcaggtgtgtgggtgctgg

SEQ ID NO: 7132 - DNA, 20 bp, synthetic construct
  misc_feature 1..20: note = chemically synthesized
  source 1..20: mol_type = other DNA
aggtgtgtgggtgctggtgg

SEQ ID NO: 7133 - DNA, 20 bp, synthetic construct
  misc_feature 1..20: note = chemically synthesized
  source 1..20: mol_type = other DNA
gtgtgtgggtgctggtggtg

SEQ ID NO: 7134 - DNA, 20 bp, synthetic construct
  misc_feature 1..20: note = chemically synthesized
  source 1..20: mol_type = other DNA
gtgggtgctggtggtggagc

SEQ ID NO: 7135 - DNA, 20 bp, synthetic construct
  misc_feature 1..20: note = chemically synthesized
  source 1..20: mol_type = other DNA
tgggtgctggtggtggagcc

SEQ ID NO: 7136 - DNA, 20 bp, synthetic construct
  misc_feature 1..20: note = chemically synthesized
  source 1..20: mol_type = other DNA
ggtggtggagccgggttcca

SEQ ID NO: 7137 - DNA, 20 bp, synthetic construct
  misc_feature 1..20: note = chemically synthesized
  source 1..20: mol_type = other DNA
tggtggagccgggttccatg

SEQ ID NO: 7138 - DNA, 20 bp, synthetic construct
  misc_feature 1..20: note = chemically synthesized
  source 1..20: mol_type = other DNA
ggtggagccgggttccatgg

SEQ ID NO: 7139 - DNA, 20 bp, synthetic construct
  misc_feature 1..20: note = chemically synthesized
  source 1..20: mol_type = other DNA
ggagccgggttccatggagg

SEQ ID NO: 7140 - DNA, 20 bp, synthetic construct
  misc_feature 1..20: note = chemically synthesized
  source 1..20: mol_type = other DNA
gagccgggttccatggaggc

SEQ ID NO: 7141 - DNA, 20 bp, synthetic construct
  misc_feature 1..20: note = chemically synthesized
  source 1..20: mol_type = other DNA
gccgggttccatggaggcag

SEQ ID NO: 7142 - DNA, 20 bp, synthetic construct
  misc_feature 1..20: note = chemically synthesized
  source 1..20: mol_type = other DNA
ccgggttccatggaggcagg

SEQ ID NO: 7143 - DNA, 20 bp, synthetic construct
  misc_feature 1..20: note = chemically synthesized
  source 1..20: mol_type = other DNA
gggttccatggaggcaggag

SEQ ID NO: 7144 - DNA, 20 bp, synthetic construct
  misc_feature 1..20: note = chemically synthesized
  source 1..20: mol_type = other DNA
ttccatggaggcaggaggag

SEQ ID NO: 7145 - DNA, 20 bp, synthetic construct
  misc_feature 1..20: note = chemically synthesized
  source 1..20: mol_type = other DNA
tccatggaggcaggaggagc

SEQ ID NO: 7146 - DNA, 20 bp, synthetic construct
  misc_feature 1..20: note = chemically synthesized
  source 1..20: mol_type = other DNA
ccatggaggcaggaggagca

SEQ ID NO: 7147 - DNA, 20 bp, synthetic construct
  misc_feature 1..20: note = chemically synthesized
  source 1..20: mol_type = other DNA
catggaggcaggaggagcag

SEQ ID NO: 7148 - DNA, 20 bp, synthetic construct
  misc_feature 1..20: note = chemically synthesized
  source 1..20: mol_type = other DNA
aggcaggaggagcaggggct

SEQ ID NO: 7149 - DNA, 20 bp, synthetic construct
  misc_feature 1..20: note = chemically synthesized
  source 1..20: mol_type = other DNA
gcaggaggagcaggggcttg

SEQ ID NO: 7150 - DNA, 20 bp, synthetic construct
  misc_feature 1..20: note = chemically synthesized
  source 1..20: mol_type = other DNA
aggagcaggggcttggagct

SEQ ID NO: 7151 - DNA, 20 bp, synthetic construct
  misc_feature 1..20: note = chemically synthesized
  source 1..20: mol_type = other DNA
ggagcaggggcttggagctt

SEQ ID NO: 7152 - DNA, 20 bp, synthetic construct
  misc_feature 1..20: note = chemically synthesized
  source 1..20: mol_type = other DNA
gcaggggcttggagcttagg

SEQ ID NO: 7153 - DNA, 20 bp, synthetic construct
  misc_feature 1..20: note = chemically synthesized
  source 1..20: mol_type = other DNA
caggggcttggagcttagga

SEQ ID NO: 7154 - DNA, 20 bp, synthetic construct
  misc_feature 1..20: note = chemically synthesized
  source 1..20: mol_type = other DNA
aggggcttggagcttaggaa

SEQ ID NO: 7155 - DNA, 20 bp, synthetic construct
  misc_feature 1..20: note = chemically synthesized
  source 1..20: mol_type = other DNA
ggggcttggagcttaggaag

SEQ ID NO: 7156 - DNA, 20 bp, synthetic construct
  misc_feature 1..20: note = chemically synthesized
  source 1..20: mol_type = other DNA
ttggagcttaggaaggggat

SEQ ID NO: 7157 - DNA, 20 bp, synthetic construct
  misc_feature 1..20: note = chemically synthesized
  source 1..20: mol_type = other DNA
agcttaggaaggggattggt

SEQ ID NO: 7158 - DNA, 20 bp, synthetic construct
  misc_feature 1..20: note = chemically synthesized
  source 1..20: mol_type = other DNA
taggaaggggattggttagc

SEQ ID NO: 7159 - DNA, 20 bp, synthetic construct
  misc_feature 1..20: note = chemically synthesized
  source 1..20: mol_type = other DNA
aggaaggggattggttagct

SEQ ID NO: 7160 - DNA, 20 bp, synthetic construct
  misc_feature 1..20: note = chemically synthesized
  source 1..20: mol_type = other DNA
aggggattggttagctgggc

SEQ ID NO: 7161 - DNA, 20 bp, synthetic construct
  misc_feature 1..20: note = chemically synthesized
  source 1..20: mol_type = other DNA
ttggttagctgggctggaat

SEQ ID NO: 7162 - DNA, 20 bp, synthetic construct
  misc_feature 1..20: note = chemically synthesized
  source 1..20: mol_type = other DNA
tggttagctgggctggaatg

SEQ ID NO: 7163 - DNA, 20 bp, synthetic construct
  misc_feature 1..20: note = chemically synthesized
  source 1..20: mol_type = other DNA
ggttagctgggctggaatga

SEQ ID NO: 7164 - DNA, 20 bp, synthetic construct
  misc_feature 1..20: note = chemically synthesized
  source 1..20: mol_type = other DNA
atgagggactcctcattcct

SEQ ID NO: 7165 - DNA, 20 bp, synthetic construct
  misc_feature 1..20: note = chemically synthesized
  source 1..20: mol_type = other DNA
tgagggactcctcattcctg

SEQ ID NO: 7166 - DNA, 20 bp, synthetic construct
  misc_feature 1..20: note = chemically synthesized
  source 1..20: mol_type = other DNA
ggactcctcattcctgaggc

SEQ ID NO: 7167 - DNA, 20 bp, synthetic construct
  misc_feature 1..20: note = chemically synthesized
  source 1..20: mol_type = other DNA
attcctgaggctggccaacc

SEQ ID NO: 7168 - DNA, 20 bp, synthetic construct
  misc_feature 1..20: note = chemically synthesized
  source 1..20: mol_type = other DNA
ttcctgaggctggccaaccg

SEQ ID NO: 7169 - DNA, 20 bp, synthetic construct
  misc_feature 1..20: note = chemically synthesized
  source 1..20: mol_type = other DNA
tcctgaggctggccaaccga

SEQ ID NO: 7170 - DNA, 20 bp, synthetic construct
  misc_feature 1..20: note = chemically synthesized
  source 1..20: mol_type = other DNA
ctgaggctggccaaccgagg

SEQ ID NO: 7171 - DNA, 20 bp, synthetic construct
  misc_feature 1..20: note = chemically synthesized
  source 1..20: mol_type = other DNA
tgaggctggccaaccgaggg

SEQ ID NO: 7172 - DNA, 20 bp, synthetic construct
  misc_feature 1..20: note = chemically synthesized
  source 1..20: mol_type = other DNA
gaggctggccaaccgaggga

SEQ ID NO: 7173 - DNA, 20 bp, synthetic construct
  misc_feature 1..20: note = chemically synthesized
  source 1..20: mol_type = other DNA
ctggccaaccgagggagggc

SEQ ID NO: 7174 - DNA, 20 bp, synthetic construct
  misc_feature 1..20: note = chemically synthesized
  source 1..20: mol_type = other DNA
aaccgagggagggccggtgc

SEQ ID NO: 7175 - DNA, 20 bp, synthetic construct
  misc_feature 1..20: note = chemically synthesized
  source 1..20: mol_type = other DNA
accgagggagggccggtgct

SEQ ID NO: 7176 - DNA, 20 bp, synthetic construct
  misc_feature 1..20: note = chemically synthesized
  source 1..20: mol_type = other DNA
gagggagggccggtgctggg

SEQ ID NO: 7177 - DNA, 20 bp, synthetic construct
  misc_feature 1..20: note = chemically synthesized
  source 1..20: mol_type = other DNA
agggagggccggtgctgggc

SEQ ID NO: 7178 - DNA, 20 bp, synthetic construct
  misc_feature 1..20: note = chemically synthesized
  source 1..20: mol_type = other DNA
gggagggccggtgctgggca

SEQ ID NO: 7179 - DNA, 20 bp, synthetic construct
  misc_feature 1..20: note = chemically synthesized
  source 1..20: mol_type = other DNA
agggccggtgctgggcaggg

SEQ ID NO: 7180 - DNA, 20 bp, synthetic construct
  misc_feature 1..20: note = chemically synthesized
  source 1..20: mol_type = other DNA
gggccggtgctgggcagggc

SEQ ID NO: 7181 - DNA, 20 bp, synthetic construct
  misc_feature 1..20: note = chemically synthesized
  source 1..20: mol_type = other DNA
ggccggtgctgggcagggca

SEQ ID NO: 7182 - DNA, 20 bp, synthetic construct
  misc_feature 1..20: note = chemically synthesized
  source 1..20: mol_type = other DNA
cggtgctgggcagggcaggg

SEQ ID NO: 7183 - DNA, 20 bp, synthetic construct
  misc_feature 1..20: note = chemically synthesized
  source 1..20: mol_type = other DNA
ggtgctgggcagggcagggc

SEQ ID NO: 7184 - DNA, 20 bp, synthetic construct
  misc_feature 1..20: note = chemically synthesized
  source 1..20: mol_type = other DNA
gtgctgggcagggcagggca

SEQ ID NO: 7185 - DNA, 20 bp, synthetic construct
  misc_feature 1..20: note = chemically synthesized
  source 1..20: mol_type = other DNA
tgctgggcagggcagggcag

SEQ ID NO: 7186 - DNA, 20 bp, synthetic construct
  misc_feature 1..20: note = chemically synthesized
  source 1..20: mol_type = other DNA
gggcagggcagggcagggga

SEQ ID NO: 7187 - DNA, 20 bp, synthetic construct
  misc_feature 1..20: note = chemically synthesized
  source 1..20: mol_type = other DNA
ggcagggcagggcaggggac

SEQ ID NO: 7188 - DNA, 20 bp, synthetic construct
  misc_feature 1..20: note = chemically synthesized
  source 1..20: mol_type = other DNA
cagggcagggcaggggacag

SEQ ID NO: 7189 - DNA, 20 bp, synthetic construct
  misc_feature 1..20: note = chemically synthesized
  source 1..20: mol_type = other DNA
agggcagggcaggggacagg

SEQ ID NO: 7190 - DNA, 20 bp, synthetic construct
  misc_feature 1..20: note = chemically synthesized
  source 1..20: mol_type = other DNA
gggcagggcaggggacagga

SEQ ID NO: 7191 - DNA, 20 bp, synthetic construct
  misc_feature 1..20: note = chemically synthesized
  source 1..20: mol_type = other DNA
agggcaggggacaggaggga

SEQ ID NO: 7192 - DNA, 20 bp, synthetic construct
  misc_feature 1..20: note = chemically synthesized
  source 1..20: mol_type = other DNA
gggcaggggacaggagggat

SEQ ID NO: 7193 - DNA, 20 bp, synthetic construct
  misc_feature 1..20: note = chemically synthesized
  source 1..20: mol_type = other DNA
gcaggggacaggagggatag

SEQ ID NO: 7194 - DNA, 20 bp, synthetic construct
  misc_feature 1..20: note = chemically synthesized
  source 1..20: mol_type = other DNA
caggggacaggagggatagg

SEQ ID NO: 7195 - DNA, 20 bp, synthetic construct
  misc_feature 1..20: note = chemically synthesized
  source 1..20: mol_type = other DNA
agggataggaggtccctccc

SEQ ID NO: 7196 - DNA, 20 bp, synthetic construct
  misc_feature 1..20: note = chemically synthesized
  source 1..20: mol_type = other DNA
gggataggaggtccctcccg

SEQ ID NO: 7197 - DNA, 20 bp, synthetic construct
  misc_feature 1..20: note = chemically synthesized
  source 1..20: mol_type = other DNA
ggtccctcccgaggaccact

SEQ ID NO: 7198 - DNA, 20 bp, synthetic construct
  misc_feature 1..20: note = chemically synthesized
  source 1..20: mol_type = other DNA
gtccctcccgaggaccactc

SEQ ID NO: 7199 - DNA, 20 bp, synthetic construct
  misc_feature 1..20: note = chemically synthesized
  source 1..20: mol_type = other DNA
cgaggaccactcaggaacac

SEQ ID NO: 7200 - DNA, 20 bp, synthetic construct
  misc_feature 1..20: note = chemically synthesized
  source 1..20: mol_type = other DNA
ggaccactcaggaacaccag

SEQ ID NO: 7201 - DNA, 20 bp, synthetic construct
  misc_feature 1..20: note = chemically synthesized
  source 1..20: mol_type = other DNA
agtagcatctcctctctctg

SEQ ID NO: 7202 - DNA, 20 bp, synthetic construct
  misc_feature 1..20: note = chemically synthesized
  source 1..20: mol_type = other DNA
gtagcatctcctctctctgt

SEQ ID NO: 7203 - DNA, 20 bp, synthetic construct
  misc_feature 1..20: note = chemically synthesized
  source 1..20: mol_type = other DNA
tagcatctcctctctctgta

SEQ ID NO: 7204 - DNA, 20 bp, synthetic construct
  misc_feature 1..20: note = chemically synthesized
  source 1..20: mol_type = other DNA
agcatctcctctctctgtag

SEQ ID NO: 7205 - DNA, 20 bp, synthetic construct
  misc_feature 1..20: note = chemically synthesized
  source 1..20: mol_type = other DNA
gcatctcctctctctgtagg

SEQ ID NO: 7206 - DNA, 20 bp, synthetic construct
  misc_feature 1..20: note = chemically synthesized
  source 1..20: mol_type = other DNA
ctcctctctctgtagggggc

SEQ ID NO: 7207 - DNA, 20 bp, synthetic construct
  misc_feature 1..20: note = chemically synthesized
  source 1..20: mol_type = other DNA
tctctctgtagggggctggc

SEQ ID NO: 7208 - DNA, 20 bp, synthetic construct
  misc_feature 1..20: note = chemically synthesized
  source 1..20: mol_type = other DNA
gggctggctggacttcccac

SEQ ID NO: 7209 - DNA, 20 bp, synthetic construct
  misc_feature 1..20: note = chemically synthesized
  source 1..20: mol_type = other DNA
ggctggctggacttcccacc

SEQ ID NO: 7210 - DNA, 20 bp, synthetic construct
  misc_feature 1..20: note = chemically synthesized
  source 1..20: mol_type = other DNA
tggctggacttcccaccagg

SEQ ID NO: 7211 - DNA, 20 bp, synthetic construct
  misc_feature 1..20: note = chemically synthesized
  source 1..20: mol_type = other DNA
cccaccaggcggtgtcccca

SEQ ID NO: 7212 - DNA, 20 bp, synthetic construct
  misc_feature 1..20: note = chemically synthesized
  source 1..20: mol_type = other DNA
ccaccaggcggtgtccccac

SEQ ID NO: 7213 - DNA, 20 bp, synthetic construct
  misc_feature 1..20: note = chemically synthesized
  source 1..20: mol_type = other DNA
ccaggcggtgtccccacagg

SEQ ID NO: 7214 - DNA, 20 bp, synthetic construct
  misc_feature 1..20: note = chemically synthesized
  source 1..20: mol_type = other DNA
aggcggtgtccccacaggca

SEQ ID NO: 7215 - DNA, 20 bp, synthetic construct
  misc_feature 1..20: note = chemically synthesized
  source 1..20: mol_type = other DNA
ggcggtgtccccacaggcag

SEQ ID NO: 7216 - DNA, 20 bp, synthetic construct
  misc_feature 1..20: note = chemically synthesized
  source 1..20: mol_type = other DNA
ctcactctcctctgcaactc

SEQ ID NO: 7217 - DNA, 20 bp, synthetic construct
  misc_feature 1..20: note = chemically synthesized
  source 1..20: mol_type = other DNA
ctgcaactccagtgcccaca

SEQ ID NO: 7218 - DNA, 20 bp, synthetic construct
  misc_feature 1..20: note = chemically synthesized
  source 1..20: mol_type = other DNA
tccagtgcccacacggcacc

SEQ ID NO: 7219 - DNA, 20 bp, synthetic construct
  misc_feature 1..20: note = chemically synthesized
  source 1..20: mol_type = other DNA
cccacacggcacccggtaca

SEQ ID NO: 7220 - DNA, 20 bp, synthetic construct
  misc_feature 1..20: note = chemically synthesized
  source 1..20: mol_type = other DNA
cccggtacatagtgaacact

SEQ ID NO: 7221 - DNA, 20 bp, synthetic construct
  misc_feature 1..20: note = chemically synthesized
  source 1..20: mol_type = other DNA
cggtacatagtgaacactca

SEQ ID NO: 7222 - DNA, 20 bp, synthetic construct
  misc_feature 1..20: note = chemically synthesized
  source 1..20: mol_type = other DNA
gtacatagtgaacactcaga

SEQ ID NO: 7223 - DNA, 20 bp, synthetic construct
  misc_feature 1..20: note = chemically synthesized
  source 1..20: mol_type = other DNA
gtgaacactcagagagaata

SEQ ID NO: 7224 - DNA, 20 bp, synthetic construct
  misc_feature 1..20: note = chemically synthesized
  source 1..20: mol_type = other DNA
tgaacactcagagagaatac

SEQ ID NO: 7225 - DNA, 20 bp, synthetic construct
  misc_feature 1..20: note = chemically synthesized
  source 1..20: mol_type = other DNA
gggatgctgctgaatcttct

SEQ ID NO: 7226 - DNA, 20 bp, synthetic construct
  misc_feature 1..20: note = chemically synthesized
  source 1..20: mol_type = other DNA
ggatgctgctgaatcttctg

SEQ ID NO: 7227 - DNA, 20 bp, synthetic construct
  misc_feature 1..20: note = chemically synthesized
  source 1..20: mol_type = other DNA
gatgctgctgaatcttctga

SEQ ID NO: 7228 - DNA, 20 bp, synthetic construct
  misc_feature 1..20: note = chemically synthesized
  source 1..20: mol_type = other DNA
gctgaatcttctgagggtga

SEQ ID NO: 7229 - DNA, 20 bp, synthetic construct
  misc_feature 1..20: note = chemically synthesized
  source 1..20: mol_type = other DNA
cttctgagggtgacagaatt

SEQ ID NO: 7230 - DNA, 20 bp, synthetic construct
  misc_feature 1..20: note = chemically synthesized
  source 1..20: mol_type = other DNA
tctgagggtgacagaattta

SEQ ID NO: 7231 - DNA, 20 bp, synthetic construct
  misc_feature 1..20: note = chemically synthesized
  source 1..20: mol_type = other DNA
ggtgacagaatttagagttt

SEQ ID NO: 7232 - DNA, 20 bp, synthetic construct
  misc_feature 1..20: note = chemically synthesized
  source 1..20: mol_type = other DNA
gacagaatttagagtttgag

SEQ ID NO: 7233 - DNA, 20 bp, synthetic construct
  misc_feature 1..20: note = chemically synthesized
  source 1..20: mol_type = other DNA
acagaatttagagtttgagc

SEQ ID NO: 7234 - DNA, 20 bp, synthetic construct
  misc_feature 1..20: note = chemically synthesized
  source 1..20: mol_type = other DNA
agaatttagagtttgagcag

SEQ ID NO: 7235 - DNA, 20 bp, synthetic construct
  misc_feature 1..20: note = chemically synthesized
  source 1..20: mol_type = other DNA
gaatttagagtttgagcagg

SEQ ID NO: 7236 - DNA, 20 bp, synthetic construct
  misc_feature 1..20: note = chemically synthesized
  source 1..20: mol_type = other DNA
tagagtttgagcaggaggct

SEQ ID NO: 7237 - DNA, 20 bp, synthetic construct
  misc_feature 1..20: note = chemically synthesized
  source 1..20: mol_type = other DNA
gagtttgagcaggaggcttg

SEQ ID NO: 7238 - DNA, 20 bp, synthetic construct
  misc_feature 1..20: note = chemically synthesized
  source 1..20: mol_type = other DNA
gtttgagcaggaggcttgga

SEQ ID NO: 7239 - DNA, 20 bp, synthetic construct
  misc_feature 1..20: note = chemically synthesized
  source 1..20: mol_type = other DNA
ttgagcaggaggcttggaga

SEQ ID NO: 7240 - DNA, 20 bp, synthetic construct
  misc_feature 1..20: note = chemically synthesized
  source 1..20: mol_type = other DNA
tgagcaggaggcttggagag

SEQ ID NO: 7241 - DNA, 20 bp, synthetic construct
  misc_feature 1..20: note = chemically synthesized
  source 1..20: mol_type = other DNA
caggaggcttggagagaggc

SEQ ID NO: 7242 - DNA, 20 bp, synthetic construct
  misc_feature 1..20: note = chemically synthesized
  source 1..20: mol_type = other DNA
aggaggcttggagagaggcc

SEQ ID NO: 7243 - DNA, 20 bp, synthetic construct
  misc_feature 1..20: note = chemically synthesized
  source 1..20: mol_type = other DNA
gccaggatttctgaaattaa

SEQ ID NO: 7244 - DNA, 20 bp, synthetic construct
  misc_feature 1..20: note = chemically synthesized
  source 1..20: mol_type = other DNA
ccaggatttctgaaattaat

SEQ ID NO: 7245 - DNA, 20 bp, synthetic construct
  misc_feature 1..20: note = chemically synthesized
  source 1..20: mol_type = other DNA
aggatttctgaaattaatgg

SEQ ID NO: 7246 - DNA, 20 bp, synthetic construct
  misc_feature 1..20: note = chemically synthesized
  source 1..20: mol_type = other DNA
gatttctgaaattaatggga

SEQ ID NO: 7247 - DNA, 20 bp, synthetic construct
  misc_feature 1..20: note = chemically synthesized
  source 1..20: mol_type = other DNA
tctgaaattaatgggagagt

SEQ ID NO: 7248 - DNA, 20 bp, synthetic construct
  misc_feature 1..20: note = chemically synthesized
  source 1..20: mol_type = other DNA
ggagagtgagctcacgcgaa

SEQ ID NO: 7249 - DNA, 20 bp, synthetic construct
  misc_feature 1..20: note = chemically synthesized
  source 1..20: mol_type = other DNA
gagagtgagctcacgcgaat

SEQ ID NO: 7250 - DNA, 20 bp, synthetic construct
  misc_feature 1..20: note = chemically synthesized
  source 1..20: mol_type = other DNA
tgagctcacgcgaatgggct

SEQ ID NO: 7251 - DNA, 20 bp, synthetic construct
  misc_feature 1..20: note = chemically synthesized
  source 1..20: mol_type = other DNA
gagctcacgcgaatgggctg

SEQ ID NO: 7252 - DNA, 20 bp, synthetic construct
  misc_feature 1..20: note = chemically synthesized
  source 1..20: mol_type = other DNA
agctcacgcgaatgggctga

SEQ ID NO: 7253 - DNA, 20 bp, synthetic construct
  misc_feature 1..20: note = chemically synthesized
  source 1..20: mol_type = other DNA
gcgaatgggctgagggacac

SEQ ID NO: 7254 - DNA, 20 bp, synthetic construct
  misc_feature 1..20: note = chemically synthesized
  source 1..20: mol_type = other DNA
atgggctgagggacaccagt

SEQ ID NO: 7255 - DNA, 20 bp, synthetic construct
  misc_feature 1..20: note = chemically synthesized
  source 1..20: mol_type = other DNA
tgggctgagggacaccagtg

SEQ ID NO: 7256 - DNA, 20 bp, synthetic construct
  misc_feature 1..20: note = chemically synthesized
  source 1..20: mol_type = other DNA
gggctgagggacaccagtga

SEQ ID NO: 7257 - DNA, 20 bp, synthetic construct
  misc_feature 1..20: note = chemically synthesized
  source 1..20: mol_type = other DNA
caccagtgagggaccgtctg

SEQ ID NO: 7258 - DNA, 20 bp, synthetic construct
  misc_feature 1..20: note = chemically synthesized
  source 1..20: mol_type = other DNA
accagtgagggaccgtctga

SEQ ID NO: 7259 - DNA, 20 bp, synthetic construct
  misc_feature 1..20: note = chemically synthesized
  source 1..20: mol_type = other DNA
ccagtgagggaccgtctgaa

SEQ ID NO: 7260 - DNA, 20 bp, synthetic construct
  misc_feature 1..20: note = chemically synthesized
  source 1..20: mol_type = other DNA
agggaccgtctgaagggatg

SEQ ID NO: 7261 - DNA, 20 bp, synthetic construct
  misc_feature 1..20: note = chemically synthesized
  source 1..20: mol_type = other DNA
ccgtctgaagggatgtagca

SEQ ID NO: 7262 - DNA, 20 bp, synthetic construct
  misc_feature 1..20: note = chemically synthesized
  source 1..20: mol_type = other DNA
aaagtcaccgcatttccctc

SEQ ID NO: 7263 - DNA, 20 bp, synthetic construct
  misc_feature 1..20: note = chemically synthesized
  source 1..20: mol_type = other DNA
gtcaccgcatttccctccag

SEQ ID NO: 7264 - DNA, 20 bp, synthetic construct
  misc_feature 1..20: note = chemically synthesized
  source 1..20: mol_type = other DNA
cgcatttccctccagcagcc

SEQ ID NO: 7265 - DNA, 20 bp, synthetic construct
  misc_feature 1..20: note = chemically synthesized
  source 1..20: mol_type = other DNA
gcatttccctccagcagccc

SEQ ID NO: 7266 - DNA, 20 bp, synthetic construct
  misc_feature 1..20: note = chemically synthesized
  source 1..20: mol_type = other DNA
tttccctccagcagcccggg

SEQ ID NO: 7267 - DNA, 20 bp, synthetic construct
  misc_feature 1..20: note = chemically synthesized
  source 1..20: mol_type = other DNA
ccctccagcagcccgggtgg

SEQ ID NO: 7268 - DNA, 20 bp, synthetic construct
  misc_feature 1..20: note = chemically synthesized
  source 1..20: mol_type = other DNA
cctccagcagcccgggtggt

SEQ ID NO: 7269 - DNA, 20 bp, synthetic construct
  misc_feature 1..20: note = chemically synthesized
  source 1..20: mol_type = other DNA
ctccagcagcccgggtggtg

SEQ ID NO: 7270 - DNA, 20 bp, synthetic construct
  misc_feature 1..20: note = chemically synthesized
  source 1..20: mol_type = other DNA
tccagcagcccgggtggtgg

SEQ ID NO: 7271 - DNA, 20 bp, synthetic construct
  misc_feature 1..20: note = chemically synthesized
  source 1..20: mol_type = other DNA
gcagcccgggtggtgggggc

SEQ ID NO: 7272 - DNA, 20 bp, synthetic construct
  misc_feature 1..20: note = chemically synthesized
  source 1..20: mol_type = other DNA
cagcccgggtggtgggggct

SEQ ID NO: 7273 - DNA, 20 bp, synthetic construct
  misc_feature 1..20: note = chemically synthesized
  source 1..20: mol_type = other DNA
agcccgggtggtgggggctg

SEQ ID NO: 7274 - DNA, 20 bp, synthetic construct
  misc_feature 1..20: note = chemically synthesized
  source 1..20: mol_type = other DNA
gcccgggtggtgggggctgg

SEQ ID NO: 7275 - DNA, 20 bp, synthetic construct
  misc_feature 1..20: note = chemically synthesized
  source 1..20: mol_type = other DNA
gggctgggggaacgtcatca

SEQ ID NO: 7276 - DNA, 20 bp, synthetic construct
  misc_feature 1..20: note = chemically synthesized
  source 1..20: mol_type = other DNA
ggctgggggaacgtcatcat

SEQ ID NO: 7277 - DNA, 20 bp, synthetic construct
  misc_feature 1..20: note = chemically synthesized
  source 1..20: mol_type = other DNA
ctgggggaacgtcatcatgg

SEQ ID NO: 7278 - DNA, 20 bp, synthetic construct
  misc_feature 1..20: note = chemically synthesized
  source 1..20: mol_type = other DNA
tcatgggagctgacactgat

SEQ ID NO: 7279 - DNA, 20 bp, synthetic construct
  misc_feature 1..20: note = chemically synthesized
  source 1..20: mol_type = other DNA
gacactgatcagctgctcac

SEQ ID NO: 7280 - DNA, 20 bp, synthetic construct
  misc_feature 1..20: note = chemically synthesized
  source 1..20: mol_type = other DNA
acactgatcagctgctcacc

SEQ ID NO: 7281 - DNA, 20 bp, synthetic construct
  misc_feature 1..20: note = chemically synthesized
  source 1..20: mol_type = other DNA
cactgatcagctgctcaccg

SEQ ID NO: 7282 - DNA, 20 bp, synthetic construct
  misc_feature 1..20: note = chemically synthesized
  source 1..20: mol_type = other DNA
ggcccatcttccacttgtct

SEQ ID NO: 7283 - DNA, 20 bp, synthetic construct
  misc_feature 1..20: note = chemically synthesized
  source 1..20: mol_type = other DNA
gctaccccctttttctttta

SEQ ID NO: 7284 - DNA, 20 bp, synthetic construct
  misc_feature 1..20: note = chemically synthesized
  source 1..20: mol_type = other DNA
atttcaattatgcatgtatt

SEQ ID NO: 7285 - DNA, 20 bp, synthetic construct
  misc_feature 1..20: note = chemically synthesized
  source 1..20: mol_type = other DNA
tttcaattatgcatgtatta

SEQ ID NO: 7286 - DNA, 20 bp, synthetic construct
  misc_feature 1..20: note = chemically synthesized
  source 1..20: mol_type = other DNA
ttcaattatgcatgtattaa

SEQ ID NO: 7287 - DNA, 20 bp, synthetic construct
  misc_feature 1..20: note = chemically synthesized
  source 1..20: mol_type = other DNA
tgcatgtattaagggtccca

SEQ ID NO: 7288 - DNA, 20 bp, synthetic construct
  misc_feature 1..20: note = chemically synthesized
  source 1..20: mol_type = other DNA
tttttaattcttttttctcc

SEQ ID NO: 7289 - DNA, 20 bp, synthetic construct
  misc_feature 1..20: note = chemically synthesized
  source 1..20: mol_type = other DNA
tctcccagtgtttcatttta

SEQ ID NO: 7290 - DNA, 20 bp, synthetic construct
  misc_feature 1..20: note = chemically synthesized
  source 1..20: mol_type = other DNA
tcccagtgtttcattttata

SEQ ID NO: 7291 - DNA, 20 bp, synthetic construct
  misc_feature 1..20: note = chemically synthesized
  source 1..20: mol_type = other DNA
tagagttattgctgttcatt

SEQ ID NO: 7292 - DNA, 20 bp, synthetic construct
  misc_feature 1..20: note = chemically synthesized
  source 1..20: mol_type = other DNA
tctcatctcactctgttgcc

SEQ ID NO: 7293 - DNA, 20 bp, synthetic construct
  misc_feature 1..20: note = chemically synthesized
  source 1..20: mol_type = other DNA
ctcatctcactctgttgccc

SEQ ID NO: 7294 - DNA, 20 bp, synthetic construct
  misc_feature 1..20: note = chemically synthesized
  source 1..20: mol_type = other DNA
tctcactctgttgcccaggc

SEQ ID NO: 7295 - DNA, 20 bp, synthetic construct
  misc_feature 1..20: note = chemically synthesized
  source 1..20: mol_type = other DNA
ctgttgcccaggctggaatg

SEQ ID NO: 7296 - DNA, 20 bp, synthetic construct
  misc_feature 1..20: note = chemically synthesized
  source 1..20: mol_type = other DNA
ttgcccaggctggaatgcag

SEQ ID NO: 7297 - DNA, 20 bp, synthetic construct
  misc_feature 1..20: note = chemically synthesized
  source 1..20: mol_type = other DNA
tagcttgtcacaactcactg

SEQ ID NO: 7298 - DNA, 20 bp, synthetic construct
  misc_feature 1..20: note = chemically synthesized
  source 1..20: mol_type = other DNA
tcactgtggcctccacctcc

SEQ ID NO: 7299 - DNA, 20 bp, synthetic construct
  misc_feature 1..20: note = chemically synthesized
  source 1..20: mol_type = other DNA
cactgtggcctccacctcct

SEQ ID NO: 7300 - DNA, 20 bp, synthetic construct
  misc_feature 1..20: note = chemically synthesized
  source 1..20: mol_type = other DNA
tggcctccacctcctgggct

SEQ ID NO: 7301 - DNA, 20 bp, synthetic construct
  misc_feature 1..20: note = chemically synthesized
  source 1..20: mol_type = other DNA
ggcctccacctcctgggctc

SEQ ID NO: 7302 - DNA, 20 bp, synthetic construct
  misc_feature 1..20: note = chemically synthesized
  source 1..20: mol_type = other DNA
ctcaggcgatccttccactt

SEQ ID NO: 7303 - DNA, 20 bp, synthetic construct
  misc_feature 1..20: note = chemically synthesized
  source 1..20: mol_type = other DNA
atccttccacttcagcctcc

SEQ ID NO: 7304 - DNA, 20 bp, synthetic construct
  misc_feature 1..20: note = chemically synthesized
  source 1..20: mol_type = other DNA
tccttccacttcagcctccc

SEQ ID NO: 7305 - DNA, 20 bp, synthetic construct
  misc_feature 1..20: note = chemically synthesized
  source 1..20: mol_type = other DNA
ttccacttcagcctcccagg

SEQ ID NO: 7306 - DNA, 20 bp, synthetic construct
  misc_feature 1..20: note = chemically synthesized
  source 1..20: mol_type = other DNA
acttcagcctcccaggtagc

SEQ ID NO: 7307 - DNA, 20 bp, synthetic construct
  misc_feature 1..20: note = chemically synthesized
  source 1..20: mol_type = other DNA
cttcagcctcccaggtagct

SEQ ID NO: 7308 - DNA, 20 bp, synthetic construct
  misc_feature 1..20: note = chemically synthesized
  source 1..20: mol_type = other DNA
ctcccaggtagctgggacta

SEQ ID NO: 7309 - DNA, 20 bp, synthetic construct
  misc_feature 1..20: note = chemically synthesized
  source 1..20: mol_type = other DNA
tcccaggtagctgggactat

SEQ ID NO: 7310 - DNA, 20 bp, synthetic construct
  misc_feature 1..20: note = chemically synthesized
  source 1..20: mol_type = other DNA
tagctgggactataggcatg

SEQ ID NO: 7311 - DNA, 20 bp, synthetic construct
  misc_feature 1..20: note = chemically synthesized
  source 1..20: mol_type = other DNA
taggcatgtggcaccacacc

SEQ ID NO: 7312 - DNA, 20 bp, synthetic construct
  misc_feature 1..20: note = chemically synthesized
  source 1..20: mol_type = other DNA
taattaaaaatttttttttg

SEQ ID NO: 7313 - DNA, 20 bp, synthetic construct
  misc_feature 1..20: note = chemically synthesized
  source 1..20: mol_type = other DNA
attaaaaatttttttttgta

SEQ ID NO: 7314 - DNA, 20 bp, synthetic construct
  misc_feature 1..20: note = chemically synthesized
  source 1..20: mol_type = other DNA
aaaatttttttttgtagaga

SEQ ID NO: 7315 - DNA, 20 bp, synthetic construct
  misc_feature 1..20: note = chemically synthesized
  source 1..20: mol_type = other DNA
gtagagacggttttgccatg

SEQ ID NO: 7316 - DNA, 20 bp, synthetic construct
  misc_feature 1..20: note = chemically synthesized
  source 1..20: mol_type = other DNA
agagacggttttgccatgta

SEQ ID NO: 7317 - DNA, 20 bp, synthetic construct
  misc_feature 1..20: note = chemically synthesized
  source 1..20: mol_type = other DNA
gagacggttttgccatgtag

SEQ ID NO: 7318 - DNA, 20 bp, synthetic construct
  misc_feature 1..20: note = chemically synthesized
  source 1..20: mol_type = other DNA
agacggttttgccatgtaga

SEQ ID NO: 7319 - DNA, 20 bp, synthetic construct
  misc_feature 1..20: note = chemically synthesized
  source 1..20: mol_type = other DNA
gacggttttgccatgtagag

SEQ ID NO: 7320 - DNA, 20 bp, synthetic construct
  misc_feature 1..20: note = chemically synthesized
  source 1..20: mol_type = other DNA
aggggttttgccatgctgcc

SEQ ID NO: 7321 - DNA, 20 bp, synthetic construct
  misc_feature 1..20: note = chemically synthesized
  source 1..20: mol_type = other DNA
ttttgccatgctgcccagac

SEQ ID NO: 7322 - DNA, 20 bp, synthetic construct
  misc_feature 1..20: note = chemically synthesized
  source 1..20: mol_type = other DNA
atgctgcccagactagtctt

SEQ ID NO: 7323 - DNA, 20 bp, synthetic construct
  misc_feature 1..20: note = chemically synthesized
  source 1..20: mol_type = other DNA
ccagactagtcttgagctcc

SEQ ID NO: 7324 - DNA, 20 bp, synthetic construct
  misc_feature 1..20: note = chemically synthesized
  source 1..20: mol_type = other DNA
cagactagtcttgagctcct

SEQ ID NO: 7325 - DNA, 20 bp, synthetic construct
  misc_feature 1..20: note = chemically synthesized
  source 1..20: mol_type = other DNA
agtcttgagctcctgggctc

SEQ ID NO: 7326 - DNA, 20 bp, synthetic construct
  misc_feature 1..20: note = chemically synthesized
  source 1..20: mol_type = other DNA
ccccccgtgtcgacctccca

SEQ ID NO: 7327 - DNA, 20 bp, synthetic construct
  misc_feature 1..20: note = chemically synthesized
  source 1..20: mol_type = other DNA
gtgtcgacctcccaaagtgc

SEQ ID NO: 7328 - DNA, 20 bp, synthetic construct
  misc_feature 1..20: note = chemically synthesized
  source 1..20: mol_type = other DNA
tgtcgacctcccaaagtgct

SEQ ID NO: 7329 - DNA, 20 bp, synthetic construct
  misc_feature 1..20: note = chemically synthesized
  source 1..20: mol_type = other DNA
ctcccaaagtgctgggatta

SEQ ID NO: 7330 - DNA, 20 bp, synthetic construct
  misc_feature 1..20: note = chemically synthesized
  source 1..20: mol_type = other DNA
gggattacagatgtgatcca

SEQ ID NO: 7331 - DNA, 20 bp, synthetic construct
  misc_feature 1..20: note = chemically synthesized
  source 1..20: mol_type = other DNA
cagatgtgatccacagtgcc

SEQ ID NO: 7332 - DNA, 20 bp, synthetic construct
  misc_feature 1..20: note = chemically synthesized
  source 1..20: mol_type = other DNA
catcttccattatttccatc

SEQ ID NO: 7333 - DNA, 20 bp, synthetic construct
  misc_feature 1..20: note = chemically synthesized
  source 1..20: mol_type = other DNA
tcttttcttttttttttttt

SEQ ID NO: 7334 - DNA, 20 bp, synthetic construct
  misc_feature 1..20: note = chemically synthesized
  source 1..20: mol_type = other DNA
ttttcttttttttttttttg

SEQ ID NO: 7335 - DNA, 20 bp, synthetic construct
  misc_feature 1..20: note = chemically synthesized
  source 1..20: mol_type = other DNA
tttcttttttttttttttgg

SEQ ID NO: 7336 - DNA, 20 bp, synthetic construct
  misc_feature 1..20: note = chemically synthesized
  source 1..20: mol_type = other DNA
cttttttttttttttggagg

SEQ ID NO: 7337 - DNA, 20 bp, synthetic construct
  misc_feature 1..20: note = chemically synthesized
  source 1..20: mol_type = other DNA
tttttttttttttggaggcg

SEQ ID NO: 7338 - DNA, 20 bp, synthetic construct
  misc_feature 1..20: note = chemically synthesized
  source 1..20: mol_type = other DNA
cggagtctcgctctgttgcc

SEQ ID NO: 7339 - DNA, 20 bp, synthetic construct
  misc_feature 1..20: note = chemically synthesized
  source 1..20: mol_type = other DNA
ggagtctcgctctgttgccc

SEQ ID NO: 7340 - DNA, 20 bp, synthetic construct
  misc_feature 1..20: note = chemically synthesized
  source 1..20: mol_type = other DNA
tctcgctctgttgcccaggc

SEQ ID NO: 7341 - DNA, 20 bp, synthetic construct
  misc_feature 1..20: note = chemically synthesized
  source 1..20: mol_type = other DNA
tcgctctgttgcccaggccg

SEQ ID NO: 7342 - DNA, 20 bp, synthetic construct
  misc_feature 1..20: note = chemically synthesized
  source 1..20: mol_type = other DNA
ctgttgcccaggccggagtg

SEQ ID NO: 7343 - DNA, 20 bp, synthetic construct
  misc_feature 1..20: note = chemically synthesized
  source 1..20: mol_type = other DNA
ttgcccaggccggagtgcag

SEQ ID NO: 7344 - DNA, 20 bp, synthetic construct
  misc_feature 1..20: note = chemically synthesized
  source 1..20: mol_type = other DNA
ggagtgcagtggcgcgatct

SEQ ID NO: 7345 - DNA, 20 bp, synthetic construct
  misc_feature 1..20: note = chemically synthesized
  source 1..20: mol_type = other DNA
gcgcgatcttggctcactgc

SEQ ID NO: 7346 - DNA, 20 bp, synthetic construct
  misc_feature 1..20: note = chemically synthesized
  source 1..20: mol_type = other DNA
tcactgcaagctctgcctcc

SEQ ID NO: 7347 - DNA, 20 bp, synthetic construct
  misc_feature 1..20: note = chemically synthesized
  source 1..20: mol_type = other DNA
cactgcaagctctgcctccc

SEQ ID NO: 7348 - DNA, 20 bp, synthetic construct
  misc_feature 1..20: note = chemically synthesized
  source 1..20: mol_type = other DNA
ttcatgccattctcctgcct

SEQ ID NO: 7349 - DNA, 20 bp, synthetic construct
  misc_feature 1..20: note = chemically synthesized
  source 1..20: mol_type = other DNA
ttctcctgcctcagcctccc

SEQ ID NO: 7350 - DNA, 20 bp, synthetic construct
  misc_feature 1..20: note = chemically synthesized
  source 1..20: mol_type = other DNA
tcctgcctcagcctcccgag

SEQ ID NO: 7351 - DNA, 20 bp, synthetic construct
  misc_feature 1..20: note = chemically synthesized
  source 1..20: mol_type = other DNA
gcctcagcctcccgagtagc

SEQ ID NO: 7352 - DNA, 20 bp, synthetic construct
  misc_feature 1..20: note = chemically synthesized
  source 1..20: mol_type = other DNA
cctcagcctcccgagtagct

SEQ ID NO: 7353 - DNA, 20 bp, synthetic construct
  misc_feature 1..20: note = chemically synthesized
  source 1..20: mol_type = other DNA
ctcccgagtagctgggacta

SEQ ID NO: 7354 - DNA, 20 bp, synthetic construct
  misc_feature 1..20: note = chemically synthesized
  source 1..20: mol_type = other DNA
tcccgagtagctgggactac

SEQ ID NO: 7355 - DNA, 20 bp, synthetic construct
  misc_feature 1..20: note = chemically synthesized
  source 1..20: mol_type = other DNA
caggcgcctgccaccacgtc

SEQ ID NO: 7356 - DNA, 20 bp, synthetic construct
  misc_feature 1..20: note = chemically synthesized
  source 1..20: mol_type = other DNA
tggctaattttttgtatttt

SEQ ID NO: 7357 - DNA, 20 bp, synthetic construct
  misc_feature 1..20: note = chemically synthesized
  source 1..20: mol_type = other DNA
ctaattttttgtatttttag

SEQ ID NO: 7358 - DNA, 20 bp, synthetic construct
  misc_feature 1..20: note = chemically synthesized
  source 1..20: mol_type = other DNA
aattttttgtatttttagta

SEQ ID NO: 7359 - DNA, 20 bp, synthetic construct
  misc_feature 1..20: note = chemically synthesized
  source 1..20: mol_type = other DNA
ttttgtatttttagtagaga

SEQ ID NO: 7360 - DNA, 20 bp, synthetic construct
  misc_feature 1..20: note = chemically synthesized
  source 1..20: mol_type = other DNA
tttgtatttttagtagagat

SEQ ID NO: 7361 - DNA, 20 bp, synthetic construct
  misc_feature 1..20: note = chemically synthesized
  source 1..20: mol_type = other DNA
ttgtatttttagtagagatg

SEQ ID NO: 7362 - DNA, 20 bp, synthetic construct
  misc_feature 1..20: note = chemically synthesized
  source 1..20: mol_type = other DNA
gagatggggtttcaccatgt

SEQ ID NO: 7363 - DNA, 20 bp, synthetic construct
  misc_feature 1..20: note = chemically synthesized
  source 1..20: mol_type = other DNA
tggggtttcaccatgttagc

SEQ ID NO: 7364 - DNA, 20 bp, synthetic construct
  misc_feature 1..20: note = chemically synthesized
  source 1..20: mol_type = other DNA
ggggtttcaccatgttagcc

SEQ ID NO: 7365 - DNA, 20 bp, synthetic construct
  misc_feature 1..20: note = chemically synthesized
  source 1..20: mol_type = other DNA
tttcaccatgttagccagga

SEQ ID NO: 7366 - DNA, 20 bp, synthetic construct
  misc_feature 1..20: note = chemically synthesized
  source 1..20: mol_type = other DNA
acctcatgatctgcccgcct

SEQ ID NO: 7367 - DNA, 20 bp, synthetic construct
  misc_feature 1..20: note = chemically synthesized
  source 1..20: mol_type = other DNA
ctgcccgccttggcctccca

SEQ ID NO: 7368 - DNA, 20 bp, synthetic construct
  misc_feature 1..20: note = chemically synthesized
  source 1..20: mol_type = other DNA
gccttggcctcccacagtgc

SEQ ID NO: 7369 - DNA, 20 bp, synthetic construct
  misc_feature 1..20: note = chemically synthesized
  source 1..20: mol_type = other DNA
ccttggcctcccacagtgct

SEQ ID NO: 7370 - DNA, 20 bp, synthetic construct
  misc_feature 1..20: note = chemically synthesized
  source 1..20: mol_type = other DNA
ctcccacagtgctgggattc

SEQ ID NO: 7371 - DNA, 20 bp, synthetic construct
  misc_feature 1..20: note = chemically synthesized
  source 1..20: mol_type = other DNA
tcccacagtgctgggattcc

SEQ ID NO: 7372 - DNA, 20 bp, synthetic construct
  misc_feature 1..20: note = chemically synthesized
  source 1..20: mol_type = other DNA
agtgctgggattccaggcgt

SEQ ID NO: 7373 - DNA, 20 bp, synthetic construct
  misc_feature 1..20: note = chemically synthesized
  source 1..20: mol_type = other DNA
gggattccaggcgtgagcca

SEQ ID NO: 7374 - DNA, 20 bp, synthetic construct
  misc_feature 1..20: note = chemically synthesized
  source 1..20: mol_type = other DNA
caggcgtgagccacggcgcc

SEQ ID NO: 7375 - DNA, 20 bp, synthetic construct
  misc_feature 1..20: note = chemically synthesized
  source 1..20: mol_type = other DNA
cgtgagccacggcgcctggc

SEQ ID NO: 7376 - DNA, 20 bp, synthetic construct
  misc_feature 1..20: note = chemically synthesized
  source 1..20: mol_type = other DNA
gccagtgtgttttttcattt

SEQ ID NO: 7377 - DNA, 20 bp, synthetic construct
  misc_feature 1..20: note = chemically synthesized
  source 1..20: mol_type = other DNA
ttttttcatttcagacattg

SEQ ID NO: 7378 - DNA, 20 bp, synthetic construct
  misc_feature 1..20: note = chemically synthesized
  source 1..20: mol_type = other DNA
gacattgtagtttttatctc

SEQ ID NO: 7379 - DNA, 20 bp, synthetic construct
  misc_feature 1..20: note = chemically synthesized
  source 1..20: mol_type = other DNA
attgtagtttttatctctag

SEQ ID NO: 7380 - DNA, 20 bp, synthetic construct
  misc_feature 1..20: note = chemically synthesized
  source 1..20: mol_type = other DNA
tttatctctagaagttcacc

SEQ ID NO: 7381 - DNA, 20 bp, synthetic construct
  misc_feature 1..20: note = chemically synthesized
  source 1..20: mol_type = other DNA
ttatctctagaagttcacct

SEQ ID NO: 7382 - DNA, 20 bp, synthetic construct
  misc_feature 1..20: note = chemically synthesized
  source 1..20: mol_type = other DNA
tatctctagaagttcacctg

SEQ ID NO: 7383 - DNA, 20 bp, synthetic construct
  misc_feature 1..20: note = chemically synthesized
  source 1..20: mol_type = other DNA
acttaattttttgaacataa

SEQ ID NO: 7384 - DNA, 20 bp, synthetic construct
  misc_feature 1..20: note = chemically synthesized
  source 1..20: mol_type = other DNA
cttaattttttgaacataat

SEQ ID NO: 7385 - DNA, 20 bp, synthetic construct
  misc_feature 1..20: note = chemically synthesized
  source 1..20: mol_type = other DNA
tttttgaacataatgggata

SEQ ID NO: 7386 - DNA, 20 bp, synthetic construct
  misc_feature 1..20: note = chemically synthesized
  source 1..20: mol_type = other DNA
ccatccttgcctgctaattc

SEQ ID NO: 7387 - DNA, 20 bp, synthetic construct
  misc_feature 1..20: note = chemically synthesized
  source 1..20: mol_type = other DNA
gctaattctagcatccgtgt

SEQ ID NO: 7388 - DNA, 20 bp, synthetic construct
  misc_feature 1..20: note = chemically synthesized
  source 1..20: mol_type = other DNA
tctagcatccgtgtcagttc

SEQ ID NO: 7389 - DNA, 20 bp, synthetic construct
  misc_feature 1..20: note = chemically synthesized
  source 1..20: mol_type = other DNA
catgccttgtaatctttgat

SEQ ID NO: 7390 - DNA, 20 bp, synthetic construct
  misc_feature 1..20: note = chemically synthesized
  source 1..20: mol_type = other DNA
tgtaatctttgattggctgc

SEQ ID NO: 7391 - DNA, 20 bp, synthetic construct
  misc_feature 1..20: note = chemically synthesized
  source 1..20: mol_type = other DNA
cattgtcaatttcaccttgt

SEQ ID NO: 7392 - DNA, 20 bp, synthetic construct
  misc_feature 1..20: note = chemically synthesized
  source 1..20: mol_type = other DNA
attgtcaatttcaccttgtt

SEQ ID NO: 7393 - DNA, 20 bp, synthetic construct
  misc_feature 1..20: note = chemically synthesized
  source 1..20: mol_type = other DNA
aatttcaccttgttgggtgc

SEQ ID NO: 7394 - DNA, 20 bp, synthetic construct
  misc_feature 1..20: note = chemically synthesized
  source 1..20: mol_type = other DNA
gtattcctctaaatgttctt

SEQ ID NO: 7395 - DNA, 20 bp, synthetic construct
  misc_feature 1..20: note = chemically synthesized
  source 1..20: mol_type = other DNA
aatgttcttgagctttgctc

SEQ ID NO: 7396 - DNA, 20 bp, synthetic construct
  misc_feature 1..20: note = chemically synthesized
  source 1..20: mol_type = other DNA
atgttcttgagctttgctcc

SEQ ID NO: 7397 - DNA, 20 bp, synthetic construct
  misc_feature 1..20: note = chemically synthesized
  source 1..20: mol_type = other DNA
ttgagctttgctccgggatg

SEQ ID NO: 7398 - DNA, 20 bp, synthetic construct
  misc_feature 1..20: note = chemically synthesized
  source 1..20: mol_type = other DNA
ctttgctccgggatgcagtt

SEQ ID NO: 7399 - DNA, 20 bp, synthetic construct
  misc_feature 1..20: note = chemically synthesized
  source 1..20: mol_type = other DNA
cgggatgcagttaagcaact

SEQ ID NO: 7400 - DNA, 20 bp, synthetic construct
  misc_feature 1..20: note = chemically synthesized
  source 1..20: mol_type = other DNA
ggatgcagttaagcaactta

SEQ ID NO: 7401 - DNA, 20 bp, synthetic construct
  misc_feature 1..20: note = chemically synthesized
  source 1..20: mol_type = other DNA
gcagttaagcaacttagagt

SEQ ID NO: 7402 - DNA, 20 bp, synthetic construct
  misc_feature 1..20: note = chemically synthesized
  source 1..20: mol_type = other DNA
gtttgaactcttaattgttt

SEQ ID NO: 7403 - DNA, 20 bp, synthetic construct
  misc_feature 1..20: note = chemically synthesized
  source 1..20: mol_type = other DNA
cttaattgttttggtctcct

SEQ ID NO: 7404 - DNA, 20 bp, synthetic construct
  misc_feature 1..20: note = chemically synthesized
  source 1..20: mol_type = other DNA
ttttggtctcctcggactct

SEQ ID NO: 7405 - DNA, 20 bp, synthetic construct
  misc_feature 1..20: note = chemically synthesized
  source 1..20: mol_type = other DNA
tcagctccatctcctcaacg

SEQ ID NO: 7406 - DNA, 20 bp, synthetic construct
  misc_feature 1..20: note = chemically synthesized
  source 1..20: mol_type = other DNA
cagctccatctcctcaacgt

SEQ ID NO: 7407 - DNA, 20 bp, synthetic construct
  misc_feature 1..20: note = chemically synthesized
  source 1..20: mol_type = other DNA
agctccatctcctcaacgtg

SEQ ID NO: 7408 - DNA, 20 bp, synthetic construct
  misc_feature 1..20: note = chemically synthesized
  source 1..20: mol_type = other DNA
ctccatctcctcaacgtggg

SEQ ID NO: 7409 - DNA, 20 bp, synthetic construct
  misc_feature 1..20: note = chemically synthesized
  source 1..20: mol_type = other DNA
cctcaacgtggggagtctct

SEQ ID NO: 7410 - DNA, 20 bp, synthetic construct
  misc_feature 1..20: note = chemically synthesized
  source 1..20: mol_type = other DNA
ctcaacgtggggagtctctt

SEQ ID NO: 7411 - DNA, 20 bp, synthetic construct
  misc_feature 1..20: note = chemically synthesized
  source 1..20: mol_type = other DNA
ggagtctcttgggctctgcc

SEQ ID NO: 7412 - DNA, 20 bp, synthetic construct
  misc_feature 1..20: note = chemically synthesized
  source 1..20: mol_type = other DNA
ctgcctggacttccctttcc

SEQ ID NO: 7413 - DNA, 20 bp, synthetic construct
  misc_feature 1..20: note = chemically synthesized
  source 1..20: mol_type = other DNA
ctttcctggcctgtaacctg

SEQ ID NO: 7414 - DNA, 20 bp, synthetic construct
  misc_feature 1..20: note = chemically synthesized
  source 1..20: mol_type = other DNA
acctgcagactctctccaaa

SEQ ID NO: 7415 - DNA, 20 bp, synthetic construct
  misc_feature 1..20: note = chemically synthesized
  source 1..20: mol_type = other DNA
gcagactctctccaaacagt

SEQ ID NO: 7416 - DNA, 20 bp, synthetic construct
  misc_feature 1..20: note = chemically synthesized
  source 1..20: mol_type = other DNA
actctctccaaacagtaagc

SEQ ID NO: 7417 - DNA, 20 bp, synthetic construct
  misc_feature 1..20: note = chemically synthesized
  source 1..20: mol_type = other DNA
ctctctccaaacagtaagct

SEQ ID NO: 7418 - DNA, 20 bp, synthetic construct
  misc_feature 1..20: note = chemically synthesized
  source 1..20: mol_type = other DNA
tctctccaaacagtaagctg

SEQ ID NO: 7419 - DNA, 20 bp, synthetic construct
  misc_feature 1..20: note = chemically synthesized
  source 1..20: mol_type = other DNA
aaacagtaagctggggtgat

SEQ ID NO: 7420 - DNA, 20 bp, synthetic construct
  misc_feature 1..20: note = chemically synthesized
  source 1..20: mol_type = other DNA
acagtaagctggggtgatcg

SEQ ID NO: 7421 - DNA, 20 bp, synthetic construct
  misc_feature 1..20: note = chemically synthesized
  source 1..20: mol_type = other DNA
cagtaagctggggtgatcgg

SEQ ID NO: 7422 - DNA, 20 bp, synthetic construct
  misc_feature 1..20: note = chemically synthesized
  source 1..20: mol_type = other DNA
agtaagctggggtgatcgga

SEQ ID NO: 7423 - DNA, 20 bp, synthetic construct
  misc_feature 1..20: note = chemically synthesized
  source 1..20: mol_type = other DNA
gttgtttgcttcttatccct

SEQ ID NO: 7424 - DNA, 20 bp, synthetic construct
  misc_feature 1..20: note = chemically synthesized
  source 1..20: mol_type = other DNA
ttgtttgcttcttatccctc

SEQ ID NO: 7425 - DNA, 20 bp, synthetic construct
  misc_feature 1..20: note = chemically synthesized
  source 1..20: mol_type = other DNA
tgtttgcttcttatccctca

SEQ ID NO: 7426 - DNA, 20 bp, synthetic construct
  misc_feature 1..20: note = chemically synthesized
  source 1..20: mol_type = other DNA
actcctccttgcctgatgtc

SEQ ID NO: 7427 - DNA, 20 bp, synthetic construct
  misc_feature 1..20: note = chemically synthesized
  source 1..20: mol_type = other DNA
tcctccttgcctgatgtcca

SEQ ID NO: 7428 - DNA, 20 bp, synthetic construct
  misc_feature 1..20: note = chemically synthesized
  source 1..20: mol_type = other DNA
cctgatgtccagagtcttga

SEQ ID NO: 7429 - DNA, 20 bp, synthetic construct
  misc_feature 1..20: note = chemically synthesized
  source 1..20: mol_type = other DNA
ttgaaagctgccatgttcta

SEQ ID NO: 7430 - DNA, 20 bp, synthetic construct
  misc_feature 1..20: note = chemically synthesized
  source 1..20: mol_type = other DNA
gtttttgttttgattgtttc

SEQ ID NO: 7431 - DNA, 20 bp, synthetic construct
  misc_feature 1..20: note = chemically synthesized
  source 1..20: mol_type = other DNA
tttttgttttgattgtttct

SEQ ID NO: 7432 - DNA, 20 bp, synthetic construct
  misc_feature 1..20: note = chemically synthesized
  source 1..20: mol_type = other DNA
ttttgttttgattgtttctg

SEQ ID NO: 7433 - DNA, 20 bp, synthetic construct
  misc_feature 1..20: note = chemically synthesized
  source 1..20: mol_type = other DNA
ttgttttgattgtttctggg

SEQ ID NO: 7434 - DNA, 20 bp, synthetic construct
  misc_feature 1..20: note = chemically synthesized
  source 1..20: mol_type = other DNA
gttttgattgtttctgggga

SEQ ID NO: 7435 - DNA, 20 bp, synthetic construct
  misc_feature 1..20: note = chemically synthesized
  source 1..20: mol_type = other DNA
ttgattgtttctggggagag

SEQ ID NO: 7436 - DNA, 20 bp, synthetic construct
  misc_feature 1..20: note = chemically synthesized
  source 1..20: mol_type = other DNA
gagaagaactcttcccatct

SEQ ID NO: 7437 - DNA, 20 bp, synthetic construct
  misc_feature 1..20: note = chemically synthesized
  source 1..20: mol_type = other DNA
agaagaactcttcccatctt

SEQ ID NO: 7438 - DNA, 20 bp, synthetic construct
  misc_feature 1..20: note = chemically synthesized
  source 1..20: mol_type = other DNA
agaactcttcccatcttggg

SEQ ID NO: 7439 - DNA, 20 bp, synthetic construct
  misc_feature 1..20: note = chemically synthesized
  source 1..20: mol_type = other DNA
ttatgttcaaacttttgcct

SEQ ID NO: 7440 - DNA, 20 bp, synthetic construct
  misc_feature 1..20: note = chemically synthesized
  source 1..20: mol_type = other DNA
tgttcaaacttttgcctaag

SEQ ID NO: 7441 - DNA, 20 bp, synthetic construct
  misc_feature 1..20: note = chemically synthesized
  source 1..20: mol_type = other DNA
tttaactcatctaattatcc

SEQ ID NO: 7442 - DNA, 20 bp, synthetic construct
  misc_feature 1..20: note = chemically synthesized
  source 1..20: mol_type = other DNA
aattatccgagcaatccaat

SEQ ID NO: 7443 - DNA, 20 bp, synthetic construct
  misc_feature 1..20: note = chemically synthesized
  source 1..20: mol_type = other DNA
attatccgagcaatccaatc

SEQ ID NO: 7444 - DNA, 20 bp, synthetic construct
  misc_feature 1..20: note = chemically synthesized
  source 1..20: mol_type = other DNA
atccgagcaatccaatcggg

SEQ ID NO: 7445 - DNA, 20 bp, synthetic construct
  misc_feature 1..20: note = chemically synthesized
  source 1..20: mol_type = other DNA
gtgatctccattttacacac

SEQ ID NO: 7446 - DNA, 20 bp, synthetic construct
  misc_feature 1..20: note = chemically synthesized
  source 1..20: mol_type = other DNA
ccattttacacacgagaaaa

SEQ ID NO: 7447 - DNA, 20 bp, synthetic construct
  misc_feature 1..20: note = chemically synthesized
  source 1..20: mol_type = other DNA
ttttacacacgagaaaatgg

SEQ ID NO: 7448 - DNA, 20 bp, synthetic construct
  misc_feature 1..20: note = chemically synthesized
  source 1..20: mol_type = other DNA
cacacgagaaaatggaagca

SEQ ID NO: 7449 - DNA, 20 bp, synthetic construct
  misc_feature 1..20: note = chemically synthesized
  source 1..20: mol_type = other DNA
cacgagaaaatggaagcatg

SEQ ID NO: 7450 - DNA, 20 bp, synthetic construct
  misc_feature 1..20: note = chemically synthesized
  source 1..20: mol_type = other DNA
agcatggagaaattgaatgc

SEQ ID NO: 7451 - DNA, 20 bp, synthetic construct
  misc_feature 1..20: note = chemically synthesized
  source 1..20: mol_type = other DNA
tgaatgctggtgcatgatct

SEQ ID NO: 7452 - DNA, 20 bp, synthetic construct
  misc_feature 1..20: note = chemically synthesized
  source 1..20: mol_type = other DNA
aatgctggtgcatgatctca

SEQ ID NO: 7453 - DNA, 20 bp, synthetic construct
  misc_feature 1..20: note = chemically synthesized
  source 1..20: mol_type = other DNA
tgcatgatctcagagctacc

SEQ ID NO: 7454 - DNA, 20 bp, synthetic construct
  misc_feature 1..20: note = chemically synthesized
  source 1..20: mol_type = other DNA
catgatctcagagctacctg

SEQ ID NO: 7455 - DNA, 20 bp, synthetic construct
  misc_feature 1..20: note = chemically synthesized
  source 1..20: mol_type = other DNA
atgatctcagagctacctgg

SEQ ID NO: 7456 - DNA, 20 bp, synthetic construct
  misc_feature 1..20: note = chemically synthesized
  source 1..20: mol_type = other DNA
ctcagagctacctggaggca

SEQ ID NO: 7457 - DNA, 20 bp, synthetic construct
  misc_feature 1..20: note = chemically synthesized
  source 1..20: mol_type = other DNA
gagctacctggaggcacagc

SEQ ID NO: 7458 - DNA, 20 bp, synthetic construct
  misc_feature 1..20: note = chemically synthesized
  source 1..20: mol_type = other DNA
agctacctggaggcacagct

SEQ ID NO: 7459 - DNA, 20 bp, synthetic construct
  misc_feature 1..20: note = chemically synthesized
  source 1..20: mol_type = other DNA
ggcacagctgggctaccctg

SEQ ID NO: 7460 - DNA, 20 bp, synthetic construct
  misc_feature 1..20: note = chemically synthesized
  source 1..20: mol_type = other DNA
gcacagctgggctaccctgt

SEQ ID NO: 7461 - DNA, 20 bp, synthetic construct
  misc_feature 1..20: note = chemically synthesized
  source 1..20: mol_type = other DNA
cagctgggctaccctgtggg

SEQ ID NO: 7462 - DNA, 20 bp, synthetic construct
  misc_feature 1..20: note = chemically synthesized
  source 1..20: mol_type = other DNA
gggctaccctgtgggcagtc

SEQ ID NO: 7463 - DNA, 20 bp, synthetic construct
  misc_feature 1..20: note = chemically synthesized
  source 1..20: mol_type = other DNA
ccctgtgggcagtctggttt

SEQ ID NO: 7464 - DNA, 20 bp, synthetic construct
  misc_feature 1..20: note = chemically synthesized
  source 1..20: mol_type = other DNA
cctgtgggcagtctggtttc

SEQ ID NO: 7465 - DNA, 20 bp, synthetic construct
  misc_feature 1..20: note = chemically synthesized
  source 1..20: mol_type = other DNA
ctgtgggcagtctggtttca

SEQ ID NO: 7466 - DNA, 20 bp, synthetic construct
  misc_feature 1..20: note = chemically synthesized
  source 1..20: mol_type = other DNA
tgggcagtctggtttcaggg

SEQ ID NO: 7467 - DNA, 20 bp, synthetic construct
  misc_feature 1..20: note = chemically synthesized
  source 1..20: mol_type = other DNA
ctggtttcagggtggatata

SEQ ID NO: 7468 - DNA, 20 bp, synthetic construct
  misc_feature 1..20: note = chemically synthesized
  source 1..20: mol_type = other DNA
tggatatacagacacgttgc

SEQ ID NO: 7469 - DNA, 20 bp, synthetic construct
  misc_feature 1..20: note = chemically synthesized
  source 1..20: mol_type = other DNA
ggatatacagacacgttgct

SEQ ID NO: 7470 - DNA, 20 bp, synthetic construct
  misc_feature 1..20: note = chemically synthesized
  source 1..20: mol_type = other DNA
gacacgttgctgggctgacc

SEQ ID NO: 7471 - DNA, 20 bp, synthetic construct
  misc_feature 1..20: note = chemically synthesized
  source 1..20: mol_type = other DNA
ttgctgggctgacccagcat

SEQ ID NO: 7472 - DNA, 20 bp, synthetic construct
  misc_feature 1..20: note = chemically synthesized
  source 1..20: mol_type = other DNA
tgctgggctgacccagcatt

SEQ ID NO: 7473 - DNA, 20 bp, synthetic construct
  misc_feature 1..20: note = chemically synthesized
  source 1..20: mol_type = other DNA
ctgggctgacccagcattgg

SEQ ID NO: 7474 - DNA, 20 bp, synthetic construct
  misc_feature 1..20: note = chemically synthesized
  source 1..20: mol_type = other DNA
acccagcattgggagttgat

SEQ ID NO: 7475 - DNA, 20 bp, synthetic construct
  misc_feature 1..20: note = chemically synthesized
  source 1..20: mol_type = other DNA
agcattgggagttgataagt

SEQ ID NO: 7476 - DNA, 20 bp, synthetic construct
  misc_feature 1..20: note = chemically synthesized
  source 1..20: mol_type = other DNA
tgggagttgataagtcggac

SEQ ID NO: 7477 - DNA, 20 bp, synthetic construct
  misc_feature 1..20: note = chemically synthesized
  source 1..20: mol_type = other DNA
gggagttgataagtcggact

SEQ ID NO: 7478 - DNA, 20 bp, synthetic construct
  misc_feature 1..20: note = chemically synthesized
  source 1..20: mol_type = other DNA
agttgataagtcggactggg

SEQ ID NO: 7479 - DNA, 20 bp, synthetic construct
  misc_feature 1..20: note = chemically synthesized
  source 1..20: mol_type = other DNA
tgataagtcggactgggaag

SEQ ID NO: 7480 - DNA, 20 bp, synthetic construct
  misc_feature 1..20: note = chemically synthesized
  source 1..20: mol_type = other DNA
gataagtcggactgggaagc

SEQ ID NO: 7481 - DNA, 20 bp, synthetic construct
  misc_feature 1..20: note = chemically synthesized
  source 1..20: mol_type = other DNA
agtcggactgggaagcagga

SEQ ID NO: 7482 - DNA, 20 bp, synthetic construct
  misc_feature 1..20: note = chemically synthesized
  source 1..20: mol_type = other DNA
gtcggactgggaagcaggac

SEQ ID NO: 7483 - DNA, 20 bp, synthetic construct
  misc_feature 1..20: note = chemically synthesized
  source 1..20: mol_type = other DNA
gaagcaggacaggaccctct

SEQ ID NO: 7484 - DNA, 20 bp, synthetic construct
  misc_feature 1..20: note = chemically synthesized
  source 1..20: mol_type = other DNA
gcaggacaggaccctctgag

SEQ ID NO: 7485 - DNA, 20 bp, synthetic construct
  misc_feature 1..20: note = chemically synthesized
  source 1..20: mol_type = other DNA
aggacaggaccctctgagtg

SEQ ID NO: 7486 - DNA, 20 bp, synthetic construct
  misc_feature 1..20: note = chemically synthesized
  source 1..20: mol_type = other DNA
ggacaggaccctctgagtgg

SEQ ID NO: 7487 - DNA, 20 bp, synthetic construct
  misc_feature 1..20: note = chemically synthesized
  source 1..20: mol_type = other DNA
gacaggaccctctgagtgga

SEQ ID NO: 7488 - DNA, 20 bp, synthetic construct
  misc_feature 1..20: note = chemically synthesized
  source 1..20: mol_type = other DNA
cctctgagtggagggtgctg

SEQ ID NO: 7489 - DNA, 20 bp, synthetic construct
  misc_feature 1..20: note = chemically synthesized
  source 1..20: mol_type = other DNA
tgagtggagggtgctgaaga

SEQ ID NO: 7490 - DNA, 20 bp, synthetic construct
  misc_feature 1..20: note = chemically synthesized
  source 1..20: mol_type = other DNA
gtggagggtgctgaagacag

SEQ ID NO: 7491 - DNA, 20 bp, synthetic construct
  misc_feature 1..20: note = chemically synthesized
  source 1..20: mol_type = other DNA
agggtgctgaagacagcagt

SEQ ID NO: 7492 - DNA, 20 bp, synthetic construct
  misc_feature 1..20: note = chemically synthesized
  source 1..20: mol_type = other DNA
gggtgctgaagacagcagtc

SEQ ID NO: 7493 - DNA, 20 bp, synthetic construct
  misc_feature 1..20: note = chemically synthesized
  source 1..20: mol_type = other DNA
ggtgctgaagacagcagtca

SEQ ID NO: 7494 - DNA, 20 bp, synthetic construct
  misc_feature 1..20: note = chemically synthesized
  source 1..20: mol_type = other DNA
gaagacagcagtcagggact

SEQ ID NO: 7495 - DNA, 20 bp, synthetic construct
  misc_feature 1..20: note = chemically synthesized
  source 1..20: mol_type = other DNA
agcagtcagggactcagcca

SEQ ID NO: 7496 - DNA, 20 bp, synthetic construct
  misc_feature 1..20: note = chemically synthesized
  source 1..20: mol_type = other DNA
cagtcagggactcagccatg

SEQ ID NO: 7497 - DNA, 20 bp, synthetic construct
  misc_feature 1..20: note = chemically synthesized
  source 1..20: mol_type = other DNA
agtcagggactcagccatgg

SEQ ID NO: 7498 - DNA, 20 bp, synthetic construct
  misc_feature 1..20: note = chemically synthesized
  source 1..20: mol_type = other DNA
gtcagggactcagccatgga

SEQ ID NO: 7499 - DNA, 20 bp, synthetic construct
  misc_feature 1..20: note = chemically synthesized
  source 1..20: mol_type = other DNA
gggactcagccatggagggc

SEQ ID NO: 7500 - DNA, 20 bp, synthetic construct
  misc_feature 1..20: note = chemically synthesized
  source 1..20: mol_type = other DNA
tcagccatggagggccagct

SEQ ID NO: 7501 - DNA, 20 bp, synthetic construct
  misc_feature 1..20: note = chemically synthesized
  source 1..20: mol_type = other DNA
gccatggagggccagcttgg

SEQ ID NO: 7502 - DNA, 20 bp, synthetic construct
  misc_feature 1..20: note = chemically synthesized
  source 1..20: mol_type = other DNA
ccatggagggccagcttggt

SEQ ID NO: 7503 - DNA, 20 bp, synthetic construct
  misc_feature 1..20: note = chemically synthesized
  source 1..20: mol_type = other DNA
catggagggccagcttggtg

SEQ ID NO: 7504 - DNA, 20 bp, synthetic construct
  misc_feature 1..20: note = chemically synthesized
  source 1..20: mol_type = other DNA
cagcttggtggggaacaccg

SEQ ID NO: 7505 - DNA, 20 bp, synthetic construct
  misc_feature 1..20: note = chemically synthesized
  source 1..20: mol_type = other DNA
ggtggggaacaccgtggtca

SEQ ID NO: 7506 - DNA, 20 bp, synthetic construct
  misc_feature 1..20: note = chemically synthesized
  source 1..20: mol_type = other DNA
tggggaacaccgtggtcatg

SEQ ID NO: 7507 - DNA, 20 bp, synthetic construct
  misc_feature 1..20: note = chemically synthesized
  source 1..20: mol_type = other DNA
ccgtggtcatggagcgcttc

SEQ ID NO: 7508 - DNA, 20 bp, synthetic construct
  misc_feature 1..20: note = chemically synthesized
  source 1..20: mol_type = other DNA
ggtcatggagcgcttctgga

SEQ ID NO: 7509 - DNA, 20 bp, synthetic construct
  misc_feature 1..20: note = chemically synthesized
  source 1..20: mol_type = other DNA
tcatggagcgcttctggatg

SEQ ID NO: 7510 - DNA, 20 bp, synthetic construct
  misc_feature 1..20: note = chemically synthesized
  source 1..20: mol_type = other DNA
atggagcgcttctggatgga

SEQ ID NO: 7511 - DNA, 20 bp, synthetic construct
  misc_feature 1..20: note = chemically synthesized
  source 1..20: mol_type = other DNA
tggagcgcttctggatggag

SEQ ID NO: 7512 - DNA, 20 bp, synthetic construct
  misc_feature 1..20: note = chemically synthesized
  source 1..20: mol_type = other DNA
tctggatggagaggaatgca

SEQ ID NO: 7513 - DNA, 20 bp, synthetic construct
  misc_feature 1..20: note = chemically synthesized
  source 1..20: mol_type = other DNA
ctggatggagaggaatgcaa

SEQ ID NO: 7514 - DNA, 20 bp, synthetic construct
  misc_feature 1..20: note = chemically synthesized
  source 1..20: mol_type = other DNA
ggagaggaatgcaaaggcct

SEQ ID NO: 7515 - DNA, 20 bp, synthetic construct
  misc_feature 1..20: note = chemically synthesized
  source 1..20: mol_type = other DNA
agaggaatgcaaaggccttg

SEQ ID NO: 7516 - DNA, 20 bp, synthetic construct
  misc_feature 1..20: note = chemically synthesized
  source 1..20: mol_type = other DNA
gaggaatgcaaaggccttgg

SEQ ID NO: 7517 - DNA, 20 bp, synthetic construct
  misc_feature 1..20: note = chemically synthesized
  source 1..20: mol_type = other DNA
gaatgcaaaggccttggagg

SEQ ID NO: 7518 - DNA, 20 bp, synthetic construct
  misc_feature 1..20: note = chemically synthesized
  source 1..20: mol_type = other DNA
aatgcaaaggccttggagga

SEQ ID NO: 7519 - DNA, 20 bp, synthetic construct
  misc_feature 1..20: note = chemically synthesized
  source 1..20: mol_type = other DNA
atgcaaaggccttggaggaa

SEQ ID NO: 7520 - DNA, 20 bp, synthetic construct
  misc_feature 1..20: note = chemically synthesized
  source 1..20: mol_type = other DNA
tgcaaaggccttggaggaag

SEQ ID NO: 7521 - DNA, 20 bp, synthetic construct
  misc_feature 1..20: note = chemically synthesized
  source 1..20: mol_type = other DNA
aaaggccttggaggaagggg

SEQ ID NO: 7522 - DNA, 20 bp, synthetic construct
  misc_feature 1..20: note = chemically synthesized
  source 1..20: mol_type = other DNA
aaggccttggaggaaggggt

SEQ ID NO: 7523 - DNA, 20 bp, synthetic construct
  misc_feature 1..20: note = chemically synthesized
  source 1..20: mol_type = other DNA
aggccttggaggaaggggtg

SEQ ID NO: 7524 - DNA, 20 bp, synthetic construct
  misc_feature 1..20: note = chemically synthesized
  source 1..20: mol_type = other DNA
ggccttggaggaaggggtgg

SEQ ID NO: 7525 - DNA, 20 bp, synthetic construct
  misc_feature 1..20: note = chemically synthesized
  source 1..20: mol_type = other DNA
cttggaggaaggggtggggg

SEQ ID NO: 7526 - DNA, 20 bp, synthetic construct
  misc_feature 1..20: note = chemically synthesized
  source 1..20: mol_type = other DNA
gaggaaggggtgggggcagt

SEQ ID NO: 7527 - DNA, 20 bp, synthetic construct
  misc_feature 1..20: note = chemically synthesized
  source 1..20: mol_type = other DNA
ggaaggggtgggggcagtga

SEQ ID NO: 7528 - DNA, 20 bp, synthetic construct
  misc_feature 1..20: note = chemically synthesized
  source 1..20: mol_type = other DNA
gaaggggtgggggcagtgag

SEQ ID NO: 7529 - DNA, 20 bp, synthetic construct
  misc_feature 1..20: note = chemically synthesized
  source 1..20: mol_type = other DNA
aaggggtgggggcagtgaga

SEQ ID NO: 7530 - DNA, 20 bp, synthetic construct
  misc_feature 1..20: note = chemically synthesized
  source 1..20: mol_type = other DNA
ggggtgggggcagtgagagg

SEQ ID NO: 7531 - DNA, 20 bp, synthetic construct
  misc_feature 1..20: note = chemically synthesized
  source 1..20: mol_type = other DNA
gggtgggggcagtgagaggg

SEQ ID NO: 7532 - DNA, 20 bp, synthetic construct
  misc_feature 1..20: note = chemically synthesized
  source 1..20: mol_type = other DNA
ggtgggggcagtgagaggga

SEQ ID NO: 7533 - DNA, 20 bp, synthetic construct
  misc_feature 1..20: note = chemically synthesized
  source 1..20: mol_type = other DNA
gggggcagtgagagggaggg

SEQ ID NO: 7534 - DNA, 20 bp, synthetic construct
  misc_feature 1..20: note = chemically synthesized
  source 1..20: mol_type = other DNA
ggggcagtgagagggagggt

SEQ ID NO: 7535 - DNA, 20 bp, synthetic construct
  misc_feature 1..20: note = chemically synthesized
  source 1..20: mol_type = other DNA
gggcagtgagagggagggtg

SEQ ID NO: 7536 - DNA, 20 bp, synthetic construct
  misc_feature 1..20: note = chemically synthesized
  source 1..20: mol_type = other DNA
agggagggtggggctgtgct

SEQ ID NO: 7537 - DNA, 20 bp, synthetic construct
  misc_feature 1..20: note = chemically synthesized
  source 1..20: mol_type = other DNA
ggagggtggggctgtgctca

SEQ ID NO: 7538 - DNA, 20 bp, synthetic construct
  misc_feature 1..20: note = chemically synthesized
  source 1..20: mol_type = other DNA
gggtggggctgtgctcagag

SEQ ID NO: 7539 - DNA, 20 bp, synthetic construct
  misc_feature 1..20: note = chemically synthesized
  source 1..20: mol_type = other DNA
ggtggggctgtgctcagagc

SEQ ID NO: 7540 - DNA, 20 bp, synthetic construct
  misc_feature 1..20: note = chemically synthesized
  source 1..20: mol_type = other DNA
tggggctgtgctcagagcgg

SEQ ID NO: 7541 - DNA, 20 bp, synthetic construct
  misc_feature 1..20: note = chemically synthesized
  source 1..20: mol_type = other DNA
ggctgtgctcagagcgggag

SEQ ID NO: 7542 - DNA, 20 bp, synthetic construct
  misc_feature 1..20: note = chemically synthesized
  source 1..20: mol_type = other DNA
gctgtgctcagagcgggagt

SEQ ID NO: 7543 - DNA, 20 bp, synthetic construct
  misc_feature 1..20: note = chemically synthesized
  source 1..20: mol_type = other DNA
gtgctcagagcgggagtggg

SEQ ID NO: 7544 - DNA, 20 bp, synthetic construct
  misc_feature 1..20: note = chemically synthesized
  source 1..20: mol_type = other DNA
ctcagagcgggagtgggcag

SEQ ID NO: 7545 - DNA, 20 bp, synthetic construct
  misc_feature 1..20: note = chemically synthesized
  source 1..20: mol_type = other DNA
cagagcgggagtgggcagtg

SEQ ID NO: 7546 - DNA, 20 bp, synthetic construct
  misc_feature 1..20: note = chemically synthesized
  source 1..20: mol_type = other DNA
agagcgggagtgggcagtgg

SEQ ID NO: 7547 - DNA, 20 bp, synthetic construct
  misc_feature 1..20: note = chemically synthesized
  source 1..20: mol_type = other DNA
ggagtgggcagtggaggtgt

SEQ ID NO: 7548 - DNA, 20 bp, synthetic construct
  misc_feature 1..20: note = chemically synthesized
  source 1..20: mol_type = other DNA
agtgggcagtggaggtgtca

SEQ ID NO: 7549 - DNA, 20 bp, synthetic construct
  misc_feature 1..20: note = chemically synthesized
  source 1..20: mol_type = other DNA
gtgggcagtggaggtgtcag

SEQ ID NO: 7550 - DNA, 20 bp, synthetic construct
  misc_feature 1..20: note = chemically synthesized
  source 1..20: mol_type = other DNA
ggaggtgtcagaggcctccc

SEQ ID NO: 7551 - DNA, 20 bp, synthetic construct
  misc_feature 1..20: note = chemically synthesized
  source 1..20: mol_type = other DNA
gaggtgtcagaggcctccct

SEQ ID NO: 7552 - DNA, 20 bp, synthetic construct
  misc_feature 1..20: note = chemically synthesized
  source 1..20: mol_type = other DNA
agaggcctccctgggtcaaa

SEQ ID NO: 7553 - DNA, 20 bp, synthetic construct
  misc_feature 1..20: note = chemically synthesized
  source 1..20: mol_type = other DNA
gaggcctccctgggtcaaat

SEQ ID NO: 7554 - DNA, 20 bp, synthetic construct
  misc_feature 1..20: note = chemically synthesized
  source 1..20: mol_type = other DNA
aggcctccctgggtcaaatg

SEQ ID NO: 7555 - DNA, 20 bp, synthetic construct
  misc_feature 1..20: note = chemically synthesized
  source 1..20: mol_type = other DNA
cctgggtcaaatggggtcct

SEQ ID NO: 7556 - DNA, 20 bp, synthetic construct
  misc_feature 1..20: note = chemically synthesized
  source 1..20: mol_type = other DNA
gtcaaatggggtcctgagtg

SEQ ID NO: 7557 - DNA, 20 bp, synthetic construct
  misc_feature 1..20: note = chemically synthesized
  source 1..20: mol_type = other DNA
tggggtcctgagtgtggctg

SEQ ID NO: 7558 - DNA, 20 bp, synthetic construct
  misc_feature 1..20: note = chemically synthesized
  source 1..20: mol_type = other DNA
ggtcctgagtgtggctgcag

SEQ ID NO: 7559 - DNA, 20 bp, synthetic construct
  misc_feature 1..20: note = chemically synthesized
  source 1..20: mol_type = other DNA
gtcctgagtgtggctgcagt

SEQ ID NO: 7560 - DNA, 20 bp, synthetic construct
  misc_feature 1..20: note = chemically synthesized
  source 1..20: mol_type = other DNA
tcctgagtgtggctgcagtg

SEQ ID NO: 7561 - DNA, 20 bp, synthetic construct
  misc_feature 1..20: note = chemically synthesized
  source 1..20: mol_type = other DNA
tgagtgtggctgcagtgggg

SEQ ID NO: 7562 - DNA, 20 bp, synthetic construct
  misc_feature 1..20: note = chemically synthesized
  source 1..20: mol_type = other DNA
gagtgtggctgcagtgggga

SEQ ID NO: 7563 - DNA, 20 bp, synthetic construct
  misc_feature 1..20: note = chemically synthesized
  source 1..20: mol_type = other DNA
tgtggctgcagtggggaagg

SEQ ID NO: 7564 - DNA, 20 bp, synthetic construct
  misc_feature 1..20: note = chemically synthesized
  source 1..20: mol_type = other DNA
ggctgcagtggggaaggtgg

SEQ ID NO: 7565 - DNA, 20 bp, synthetic construct
  misc_feature 1..20: note = chemically synthesized
  source 1..20: mol_type = other DNA
gtggggaaggtggaagtcac

SEQ ID NO: 7566 - DNA, 20 bp, synthetic construct
  misc_feature 1..20: note = chemically synthesized
  source 1..20: mol_type = other DNA
tggaagtcactggtgtgaaa

SEQ ID NO: 7567 - DNA, 20 bp, synthetic construct
  misc_feature 1..20: note = chemically synthesized
  source 1..20: mol_type = other DNA
tcactggtgtgaaaaagatg

SEQ ID NO: 7568 - DNA, 20 bp, synthetic construct
  misc_feature 1..20: note = chemically synthesized
  source 1..20: mol_type = other DNA
actggtgtgaaaaagatgaa

SEQ ID NO: 7569 - DNA, 20 bp, synthetic construct
  misc_feature 1..20: note = chemically synthesized
  source 1..20: mol_type = other DNA
gtgaaaaagatgaagagtta

SEQ ID NO: 7570 - DNA, 20 bp, synthetic construct
  misc_feature 1..20: note = chemically synthesized
  source 1..20: mol_type = other DNA
aaaagatgaagagttatgga

SEQ ID NO: 7571 - DNA, 20 bp, synthetic construct
  misc_feature 1..20: note = chemically synthesized
  source 1..20: mol_type = other DNA
gagttatggacagtcactta

SEQ ID NO: 7572 - DNA, 20 bp, synthetic construct
  misc_feature 1..20: note = chemically synthesized
  source 1..20: mol_type = other DNA
agttatggacagtcacttac

SEQ ID NO: 7573 - DNA, 20 bp, synthetic construct
  misc_feature 1..20: note = chemically synthesized
  source 1..20: mol_type = other DNA
gttatggacagtcacttaca

SEQ ID NO: 7574 - DNA, 20 bp, synthetic construct
  misc_feature 1..20: note = chemically synthesized
  source 1..20: mol_type = other DNA
ttatggacagtcacttacag

SEQ ID NO: 7575 - DNA, 20 bp, synthetic construct
  misc_feature 1..20: note = chemically synthesized
  source 1..20: mol_type = other DNA
tggacagtcacttacagggg

SEQ ID NO: 7576 - DNA, 20 bp, synthetic construct
  misc_feature 1..20: note = chemically synthesized
  source 1..20: mol_type = other DNA
tacaggggcagtgtctgact

SEQ ID NO: 7577 - DNA, 20 bp, synthetic construct
  misc_feature 1..20: note = chemically synthesized
  source 1..20: mol_type = other DNA
acaggggcagtgtctgactc

SEQ ID NO: 7578 - DNA, 20 bp, synthetic construct
  misc_feature 1..20: note = chemically synthesized
  source 1..20: mol_type = other DNA
gggcagtgtctgactcagga

SEQ ID NO: 7579 - DNA, 20 bp, synthetic construct
  misc_feature 1..20: note = chemically synthesized
  source 1..20: mol_type = other DNA
cagtgtctgactcaggacag

SEQ ID NO: 7580 - DNA, 20 bp, synthetic construct
  misc_feature 1..20: note = chemically synthesized
  source 1..20: mol_type = other DNA
tgtctgactcaggacagtgg

SEQ ID NO: 7581 - DNA, 20 bp, synthetic construct
  misc_feature 1..20: note = chemically synthesized
  source 1..20: mol_type = other DNA
gtctgactcaggacagtggc

SEQ ID NO: 7582 - DNA, 20 bp, synthetic construct
  misc_feature 1..20: note = chemically synthesized
  source 1..20: mol_type = other DNA
tgactcaggacagtggcagg

SEQ ID NO: 7583 - DNA, 20 bp, synthetic construct
  misc_feature 1..20: note = chemically synthesized
  source 1..20: mol_type = other DNA
gacagtggcaggaagtgacc

SEQ ID NO: 7584 - DNA, 20 bp, synthetic construct
  misc_feature 1..20: note = chemically synthesized
  source 1..20: mol_type = other DNA
acagtggcaggaagtgacct

SEQ ID NO: 7585 - DNA, 20 bp, synthetic construct
  misc_feature 1..20: note = chemically synthesized
  source 1..20: mol_type = other DNA
cagtggcaggaagtgacctg

SEQ ID NO: 7586 - DNA, 20 bp, synthetic construct
  misc_feature 1..20: note = chemically synthesized
  source 1..20: mol_type = other DNA
gtggcaggaagtgacctggg

SEQ ID NO: 7587 - DNA, 20 bp, synthetic construct
  misc_feature 1..20: note = chemically synthesized
  source 1..20: mol_type = other DNA
tggcaggaagtgacctgggg

SEQ ID NO: 7588 - DNA, 20 bp, synthetic construct
  misc_feature 1..20: note = chemically synthesized
  source 1..20: mol_type = other DNA
caggaagtgacctggggagg

SEQ ID NO: 7589 - DNA, 20 bp, synthetic construct
  misc_feature 1..20: note = chemically synthesized
  source 1..20: mol_type = other DNA
tgacctggggaggaagattc

SEQ ID NO: 7590 - DNA, 20 bp, synthetic construct
  misc_feature 1..20: note = chemically synthesized
  source 1..20: mol_type = other DNA
gacctggggaggaagattct

SEQ ID NO: 7591 - DNA, 20 bp, synthetic construct
  misc_feature 1..20: note = chemically synthesized
  source 1..20: mol_type = other DNA
aagattctgggcccctgact

SEQ ID NO: 7592 - DNA, 20 bp, synthetic construct
  misc_feature 1..20: note = chemically synthesized
  source 1..20: mol_type = other DNA
ggcccctgactgagcctccc

SEQ ID NO: 7593 - DNA, 20 bp, synthetic construct
  misc_feature 1..20: note = chemically synthesized
  source 1..20: mol_type = other DNA
gcccctgactgagcctcccc

SEQ ID NO: 7594 - DNA, 20 bp, synthetic construct
  misc_feature 1..20: note = chemically synthesized
  source 1..20: mol_type = other DNA
gactgagcctccccaggatg

SEQ ID NO: 7595 - DNA, 20 bp, synthetic construct
  misc_feature 1..20: note = chemically synthesized
  source 1..20: mol_type = other DNA
tccccaggatgtggtcctgc

SEQ ID NO: 7596 - DNA, 20 bp, synthetic construct
  misc_feature 1..20: note = chemically synthesized
  source 1..20: mol_type = other DNA
ccccaggatgtggtcctgct

SEQ ID NO: 7597 - DNA, 20 bp, synthetic construct
  misc_feature 1..20: note = chemically synthesized
  source 1..20: mol_type = other DNA
aggatgtggtcctgctgggt

SEQ ID NO: 7598 - DNA, 20 bp, synthetic construct
  misc_feature 1..20: note = chemically synthesized
  source 1..20: mol_type = other DNA
ggatgtggtcctgctgggtc

SEQ ID NO: 7599 - DNA, 20 bp, synthetic construct
  misc_feature 1..20: note = chemically synthesized
  source 1..20: mol_type = other DNA
gatgtggtcctgctgggtcg

SEQ ID NO: 7600 - DNA, 20 bp, synthetic construct
  misc_feature 1..20: note = chemically synthesized
  source 1..20: mol_type = other DNA
atgtggtcctgctgggtcgg

SEQ ID NO: 7601 - DNA, 20 bp, synthetic construct
  misc_feature 1..20: note = chemically synthesized
  source 1..20: mol_type = other DNA
tgtggtcctgctgggtcggg

SEQ ID NO: 7602 - DNA, 20 bp, synthetic construct
  misc_feature 1..20: note = chemically synthesized
  source 1..20: mol_type = other DNA
cctgctgggtcggggggtga

SEQ ID NO: 7603 - DNA, 20 bp, synthetic construct
  misc_feature 1..20: note = chemically synthesized
  source 1..20: mol_type = other DNA
ctgctgggtcggggggtgat

SEQ ID NO: 7604 - DNA, 20 bp, synthetic construct
  misc_feature 1..20: note = chemically synthesized
  source 1..20: mol_type = other DNA
ggtcggggggtgataggaat

SEQ ID NO: 7605 - DNA, 20 bp, synthetic construct
  misc_feature 1..20: note = chemically synthesized
  source 1..20: mol_type = other DNA
cggggggtgataggaatgag

SEQ ID NO: 7606 - DNA, 20 bp, synthetic construct
  misc_feature 1..20: note = chemically synthesized
  source 1..20: mol_type = other DNA
ggtgataggaatgagaagac

SEQ ID NO: 7607 - DNA, 20 bp, synthetic construct
  misc_feature 1..20: note = chemically synthesized
  source 1..20: mol_type = other DNA
gtgataggaatgagaagaca

SEQ ID NO: 7608 - DNA, 20 bp, synthetic construct
  misc_feature 1..20: note = chemically synthesized
  source 1..20: mol_type = other DNA
ataggaatgagaagacaagg

SEQ ID NO: 7609 - DNA, 20 bp, synthetic construct
  misc_feature 1..20: note = chemically synthesized
  source 1..20: mol_type = other DNA
tgagaagacaaggaagtcca

SEQ ID NO: 7610 - DNA, 20 bp, synthetic construct
  misc_feature 1..20: note = chemically synthesized
  source 1..20: mol_type = other DNA
agaagacaaggaagtccaca

SEQ ID NO: 7611 - DNA, 20 bp, synthetic construct
  misc_feature 1..20: note = chemically synthesized
  source 1..20: mol_type = other DNA
gacaaggaagtccacagagt

SEQ ID NO: 7612 - DNA, 20 bp, synthetic construct
  misc_feature 1..20: note = chemically synthesized
  source 1..20: mol_type = other DNA
acaaggaagtccacagagtc

SEQ ID NO: 7613 - DNA, 20 bp, synthetic construct
  misc_feature 1..20: note = chemically synthesized
  source 1..20: mol_type = other DNA
caaggaagtccacagagtca

SEQ ID NO: 7614 - DNA, 20 bp, synthetic construct
  misc_feature 1..20: note = chemically synthesized
  source 1..20: mol_type = other DNA
agtccacagagtcagggtcc

SEQ ID NO: 7615 - DNA, 20 bp, synthetic construct
  misc_feature 1..20: note = chemically synthesized
  source 1..20: mol_type = other DNA
gtccacagagtcagggtcca

SEQ ID NO: 7616 - DNA, 20 bp, synthetic construct
  misc_feature 1..20: note = chemically synthesized
  source 1..20: mol_type = other DNA
cagagtcagggtccaaggcc

SEQ ID NO: 7617 - DNA, 20 bp, synthetic construct
  misc_feature 1..20: note = chemically synthesized
  source 1..20: mol_type = other DNA
agtcagggtccaaggcctag

SEQ ID NO: 7618 - DNA, 20 bp, synthetic construct
  misc_feature 1..20: note = chemically synthesized
  source 1..20: mol_type = other DNA
gtcagggtccaaggcctaga

SEQ ID NO: 7619 - DNA, 20 bp, synthetic construct
  misc_feature 1..20: note = chemically synthesized
  source 1..20: mol_type = other DNA
cctagaaggtgttctgtttg

SEQ ID NO: 7620 - DNA, 20 bp, synthetic construct
  misc_feature 1..20: note = chemically synthesized
  source 1..20: mol_type = other DNA
ctagaaggtgttctgtttgc

SEQ ID NO: 7621 - DNA, 20 bp, synthetic construct
  misc_feature 1..20: note = chemically synthesized
  source 1..20: mol_type = other DNA
gaaggtgttctgtttgcagg

SEQ ID NO: 7622 - DNA, 20 bp, synthetic construct
  misc_feature 1..20: note = chemically synthesized
  source 1..20: mol_type = other DNA
gtttgcaggtggatgctgca

SEQ ID NO: 7623 - DNA, 20 bp, synthetic construct
  misc_feature 1..20: note = chemically synthesized
  source 1..20: mol_type = other DNA
ttgcaggtggatgctgcaaa

SEQ ID NO: 7624 - DNA, 20 bp, synthetic construct
  misc_feature 1..20: note = chemically synthesized
  source 1..20: mol_type = other DNA
gcaggtggatgctgcaaaga

SEQ ID NO: 7625 - DNA, 20 bp, synthetic construct
  misc_feature 1..20: note = chemically synthesized
  source 1..20: mol_type = other DNA
caggtggatgctgcaaagag

SEQ ID NO: 7626 - DNA, 20 bp, synthetic construct
  misc_feature 1..20: note = chemically synthesized
  source 1..20: mol_type = other DNA
ggtggatgctgcaaagagag

SEQ ID NO: 7627 - DNA, 20 bp, synthetic construct
  misc_feature 1..20: note = chemically synthesized
  source 1..20: mol_type = other DNA
atgctgcaaagagaggagct

SEQ ID NO: 7628 - DNA, 20 bp, synthetic construct
  misc_feature 1..20: note = chemically synthesized
  source 1..20: mol_type = other DNA
tgctgcaaagagaggagctc

SEQ ID NO: 7629 - DNA, 20 bp, synthetic construct
  misc_feature 1..20: note = chemically synthesized
  source 1..20: mol_type = other DNA
gctgcaaagagaggagctca

SEQ ID NO: 7630 - DNA, 20 bp, synthetic construct
  misc_feature 1..20: note = chemically synthesized
  source 1..20: mol_type = other DNA
caaagagaggagctcagggc

SEQ ID NO: 7631 - DNA, 20 bp, synthetic construct
  misc_feature 1..20: note = chemically synthesized
  source 1..20: mol_type = other DNA
aaagagaggagctcagggct

SEQ ID NO: 7632 - DNA, 20 bp, synthetic construct
  misc_feature 1..20: note = chemically synthesized
  source 1..20: mol_type = other DNA
gagctcagggctgggacaac

SEQ ID NO: 7633 - DNA, 20 bp, synthetic construct
  misc_feature 1..20: note = chemically synthesized
  source 1..20: mol_type = other DNA
gctcagggctgggacaactg

SEQ ID NO: 7634 - DNA, 20 bp, synthetic construct
  misc_feature 1..20: note = chemically synthesized
  source 1..20: mol_type = other DNA
tgggacaactggagctgctc

SEQ ID NO: 7635 - DNA, 20 bp, synthetic construct
  misc_feature 1..20: note = chemically synthesized
  source 1..20: mol_type = other DNA
gggacaactggagctgctct

SEQ ID NO: 7636 - DNA, 20 bp, synthetic construct
  misc_feature 1..20: note = chemically synthesized
  source 1..20: mol_type = other DNA
aactggagctgctctgggtc

SEQ ID NO: 7637 - DNA, 20 bp, synthetic construct
  misc_feature 1..20: note = chemically synthesized
  source 1..20: mol_type = other DNA
ctggagctgctctgggtctg

SEQ ID NO: 7638 - DNA, 20 bp, synthetic construct
  misc_feature 1..20: note = chemically synthesized
  source 1..20: mol_type = other DNA
tggagctgctctgggtctgg

SEQ ID NO: 7639 - DNA, 20 bp, synthetic construct
  misc_feature 1..20: note = chemically synthesized
  source 1..20: mol_type = other DNA
agctgctctgggtctggagg

SEQ ID NO: 7640 - DNA, 20 bp, synthetic construct
  misc_feature 1..20: note = chemically synthesized
  source 1..20: mol_type = other DNA
tgctctgggtctggaggcag

SEQ ID NO: 7641 - DNA, 20 bp, synthetic construct
  misc_feature 1..20: note = chemically synthesized
  source 1..20: mol_type = other DNA
ctctgggtctggaggcagca

SEQ ID NO: 7642 - DNA, 20 bp, synthetic construct
  misc_feature 1..20: note = chemically synthesized
  source 1..20: mol_type = other DNA
ctgggtctggaggcagcaga

SEQ ID NO: 7643 - DNA, 20 bp, synthetic construct
  misc_feature 1..20: note = chemically synthesized
  source 1..20: mol_type = other DNA
tgggtctggaggcagcagag

SEQ ID NO: 7644 - DNA, 20 bp, synthetic construct
  misc_feature 1..20: note = chemically synthesized
  source 1..20: mol_type = other DNA
gggtctggaggcagcagaga

SEQ ID NO: 7645 - DNA, 20 bp, synthetic construct
  misc_feature 1..20: note = chemically synthesized
  source 1..20: mol_type = other DNA
gtctggaggcagcagagagg

SEQ ID NO: 7646 - DNA, 20 bp, synthetic construct
  misc_feature 1..20: note = chemically synthesized
  source 1..20: mol_type = other DNA
gaggcagcagagagggagcc

SEQ ID NO: 7647 - DNA, 20 bp, synthetic construct
  misc_feature 1..20: note = chemically synthesized
  source 1..20: mol_type = other DNA
agggagcccagctctgtgtg

SEQ ID NO: 7648 - DNA, 20 bp, synthetic construct
  misc_feature 1..20: note = chemically synthesized
  source 1..20: mol_type = other DNA
gggagcccagctctgtgtgc

SEQ ID NO: 7649 - DNA, 20 bp, synthetic construct
  misc_feature 1..20: note = chemically synthesized
  source 1..20: mol_type = other DNA
agcccagctctgtgtgcagg

SEQ ID NO: 7650 - DNA, 20 bp, synthetic construct
  misc_feature 1..20: note = chemically synthesized
  source 1..20: mol_type = other DNA
gctctgtgtgcaggaagacg

SEQ ID NO: 7651 - DNA, 20 bp, synthetic construct
  misc_feature 1..20: note = chemically synthesized
  source 1..20: mol_type = other DNA
ctctgtgtgcaggaagacgt

SEQ ID NO: 7652 - DNA, 20 bp, synthetic construct
  misc_feature 1..20: note = chemically synthesized
  source 1..20: mol_type = other DNA
gcaggaagacgtgggtgtgt

SEQ ID NO: 7653 - DNA, 20 bp, synthetic construct
  misc_feature 1..20: note = chemically synthesized
  source 1..20: mol_type = other DNA
ggtgtgtgagtgtacgtgtg

SEQ ID NO: 7654 - DNA, 20 bp, synthetic construct
  misc_feature 1..20: note = chemically synthesized
  source 1..20: mol_type = other DNA
gtgtgtgagtgtacgtgtgt

SEQ ID NO: 7655 - DNA, 20 bp, synthetic construct
  misc_feature 1..20: note = chemically synthesized
  source 1..20: mol_type = other DNA
gtgtacgtgtgtgggtgtgt

SEQ ID NO: 7656 - DNA, 20 bp, synthetic construct
  misc_feature 1..20: note = chemically synthesized
  source 1..20: mol_type = other DNA
tgtacgtgtgtgggtgtgtc

SEQ ID NO: 7657 - DNA, 20 bp, synthetic construct
  misc_feature 1..20: note = chemically synthesized
  source 1..20: mol_type = other DNA
gtgtgtcaggtgtgtgtgtg

SEQ ID NO: 7658 - DNA, 20 bp, synthetic construct
  misc_feature 1..20: note = chemically synthesized
  source 1..20: mol_type = other DNA
tgtgtcaggtgtgtgtgtgt

SEQ ID NO: 7659 - DNA, 20 bp, synthetic construct
  misc_feature 1..20: note = chemically synthesized
  source 1..20: mol_type = other DNA
tgtcaggtgtgtgtgtgtgg

SEQ ID NO: 7660 - DNA, 20 bp, synthetic construct
  misc_feature 1..20: note = chemically synthesized
  source 1..20: mol_type = other DNA
gtcaggtgtgtgtgtgtggg

SEQ ID NO: 7661 - DNA, 20 bp, synthetic construct
  misc_feature 1..20: note = chemically synthesized
  source 1..20: mol_type = other DNA
tcaggtgtgtgtgtgtggga

SEQ ID NO: 7662 - DNA, 20 bp, synthetic construct
  misc_feature 1..20: note = chemically synthesized
  source 1..20: mol_type = other DNA
aggtgtgtgtgtgtgggagg

SEQ ID NO: 7663 - DNA, 20 bp, synthetic construct
  misc_feature 1..20: note = chemically synthesized
  source 1..20: mol_type = other DNA
gggagtatgaatgtgtgcat

SEQ ID NO: 7664 - DNA, 20 bp, synthetic construct
  misc_feature 1..20: note = chemically synthesized
  source 1..20: mol_type = other DNA
tagcatgcatatgcacatgt

SEQ ID NO: 7665 - DNA, 20 bp, synthetic construct
  misc_feature 1..20: note = chemically synthesized
  source 1..20: mol_type = other DNA
gcatgcatatgcacatgtga

SEQ ID NO: 7666 - DNA, 20 bp, synthetic construct
  misc_feature 1..20: note = chemically synthesized
  source 1..20: mol_type = other DNA
tgcatatgcacatgtgagag

SEQ ID NO: 7667 - DNA, 20 bp, synthetic construct
  misc_feature 1..20: note = chemically synthesized
  source 1..20: mol_type = other DNA
gcatatgcacatgtgagagt

SEQ ID NO: 7668 - DNA, 20 bp, synthetic construct
  misc_feature 1..20: note = chemically synthesized
  source 1..20: mol_type = other DNA
tgcacatgtgagagtgggta

SEQ ID NO: 7669 - DNA, 20 bp, synthetic construct
  misc_feature 1..20: note = chemically synthesized
  source 1..20: mol_type = other DNA
acatgtgagagtgggtacag

SEQ ID NO: 7670 - DNA, 20 bp, synthetic construct
  misc_feature 1..20: note = chemically synthesized
  source 1..20: mol_type = other DNA
atgtgagagtgggtacagca

SEQ ID NO: 7671 - DNA, 20 bp, synthetic construct
  misc_feature 1..20: note = chemically synthesized
  source 1..20: mol_type = other DNA
agagtgggtacagcagagcg

SEQ ID NO: 7672 - DNA, 20 bp, synthetic construct
  misc_feature 1..20: note = chemically synthesized
  source 1..20: mol_type = other DNA
gtacagcagagcgtggtcat

SEQ ID NO: 7673 - DNA, 20 bp, synthetic construct
  misc_feature 1..20: note = chemically synthesized
  source 1..20: mol_type = other DNA
gtgtgcaaatgtgtgttttt

SEQ ID NO: 7674 - DNA, 20 bp, synthetic construct
  misc_feature 1..20: note = chemically synthesized
  source 1..20: mol_type = other DNA
caaatgtgtgtttttgagtg

SEQ ID NO: 7675 - DNA, 20 bp, synthetic construct
  misc_feature 1..20: note = chemically synthesized
  source 1..20: mol_type = other DNA
tgtgtgtttttgagtgaagt

SEQ ID NO: 7676 - DNA, 20 bp, synthetic construct
  misc_feature 1..20: note = chemically synthesized
  source 1..20: mol_type = other DNA
gagtgaagtgagcaatgtgt

SEQ ID NO: 7677 - DNA, 20 bp, synthetic construct
  misc_feature 1..20: note = chemically synthesized
  source 1..20: mol_type = other DNA
tgagcaatgtgtgagtgtgt

SEQ ID NO: 7678 - DNA, 20 bp, synthetic construct
  misc_feature 1..20: note = chemically synthesized
  source 1..20: mol_type = other DNA
gtgagtgtgtgagtgtgtgt

SEQ ID NO: 7679 - DNA, 20 bp, synthetic construct
  misc_feature 1..20: note = chemically synthesized
  source 1..20: mol_type = other DNA
gtgagtgtgtgtgagtttgt

SEQ ID NO: 7680 - DNA, 20 bp, synthetic construct
  misc_feature 1..20: note = chemically synthesized
  source 1..20: mol_type = other DNA
tgagtgtgtgtgagtttgtg

SEQ ID NO: 7681 - DNA, 20 bp, synthetic construct
  misc_feature 1..20: note = chemically synthesized
  source 1..20: mol_type = other DNA
gagtgtgtgtgagtttgtga

SEQ ID NO: 7682 - DNA, 20 bp, synthetic construct
  misc_feature 1..20: note = chemically synthesized
  source 1..20: mol_type = other DNA
gggcatgtgaatgtgtgtgt

SEQ ID NO: 7683 - DNA, 20 bp, synthetic construct
  misc_feature 1..20: note = chemically synthesized
  source 1..20: mol_type = other DNA
aatgtgtgtgtcagtgctgt

SEQ ID NO: 7684 - DNA, 20 bp, synthetic construct
  misc_feature 1..20: note = chemically synthesized
  source 1..20: mol_type = other DNA
atgtgtgtgtcagtgctgtc

SEQ ID NO: 7685 - DNA, 20 bp, synthetic construct
  misc_feature 1..20: note = chemically synthesized
  source 1..20: mol_type = other DNA
tgtgtgtgtcagtgctgtca

SEQ ID NO: 7686 - DNA, 20 bp, synthetic construct
  misc_feature 1..20: note = chemically synthesized
  source 1..20: mol_type = other DNA
gtgtcagtgctgtcagggtg

SEQ ID NO: 7687 - DNA, 20 bp, synthetic construct
  misc_feature 1..20: note = chemically synthesized
  source 1..20: mol_type = other DNA
cagtgctgtcagggtgcaga

SEQ ID NO: 7688 - DNA, 20 bp, synthetic construct
  misc_feature 1..20: note = chemically synthesized
  source 1..20: mol_type = other DNA
tgtcagggtgcagatggatc

SEQ ID NO: 7689 - DNA, 20 bp, synthetic construct
  misc_feature 1..20: note = chemically synthesized
  source 1..20: mol_type = other DNA
gtcagggtgcagatggatca

SEQ ID NO: 7690 - DNA, 20 bp, synthetic construct
  misc_feature 1..20: note = chemically synthesized
  source 1..20: mol_type = other DNA
tcagggtgcagatggatcaa

SEQ ID NO: 7691 - DNA, 20 bp, synthetic construct
  misc_feature 1..20: note = chemically synthesized
  source 1..20: mol_type = other DNA
cagggtgcagatggatcaag

SEQ ID NO: 7692 - DNA, 20 bp, synthetic construct
  misc_feature 1..20: note = chemically synthesized
  source 1..20: mol_type = other DNA
ggtgcagatggatcaagggg

SEQ ID NO: 7693 - DNA, 20 bp, synthetic construct
  misc_feature 1..20: note = chemically synthesized
  source 1..20: mol_type = other DNA
gtgcagatggatcaaggggc

SEQ ID NO: 7694 - DNA, 20 bp, synthetic construct
  misc_feature 1..20: note = chemically synthesized
  source 1..20: mol_type = other DNA
gcagatggatcaaggggcag

SEQ ID NO: 7695 - DNA, 20 bp, synthetic construct
  misc_feature 1..20: note = chemically synthesized
  source 1..20: mol_type = other DNA
agatggatcaaggggcagga

SEQ ID NO: 7696 - DNA, 20 bp, synthetic construct
  misc_feature 1..20: note = chemically synthesized
  source 1..20: mol_type = other DNA
gatggatcaaggggcaggag

SEQ ID NO: 7697 - DNA, 20 bp, synthetic construct
  misc_feature 1..20: note = chemically synthesized
  source 1..20: mol_type = other DNA
ggggcaggagaggtacctgt

SEQ ID NO: 7698 - DNA, 20 bp, synthetic construct
  misc_feature 1..20: note = chemically synthesized
  source 1..20: mol_type = other DNA
aggtacctgtgagatgacct

SEQ ID NO: 7699 - DNA, 20 bp, synthetic construct
  misc_feature 1..20: note = chemically synthesized
  source 1..20: mol_type = other DNA
ggtacctgtgagatgacctc

SEQ ID NO: 7700 - DNA, 20 bp, synthetic construct
  misc_feature 1..20: note = chemically synthesized
  source 1..20: mol_type = other DNA
ctgtgagatgacctcgggct

SEQ ID NO: 7701 - DNA, 20 bp, synthetic construct
  misc_feature 1..20: note = chemically synthesized
  source 1..20: mol_type = other DNA
tgtgagatgacctcgggctg

SEQ ID NO: 7702 - DNA, 20 bp, synthetic construct
  misc_feature 1..20: note = chemically synthesized
  source 1..20: mol_type = other DNA
gtgagatgacctcgggctga

SEQ ID NO: 7703 - DNA, 20 bp, synthetic construct
  misc_feature 1..20: note = chemically synthesized
  source 1..20: mol_type = other DNA
tgagatgacctcgggctgag

SEQ ID NO: 7704 - DNA, 20 bp, synthetic construct
  misc_feature 1..20: note = chemically synthesized
  source 1..20: mol_type = other DNA
agatgacctcgggctgaggg

SEQ ID NO: 7705 - DNA, 20 bp, synthetic construct
  misc_feature 1..20: note = chemically synthesized
  source 1..20: mol_type = other DNA
cgggctgaggggagcaaatt

SEQ ID NO: 7706 - DNA, 20 bp, synthetic construct
  misc_feature 1..20: note = chemically synthesized
  source 1..20: mol_type = other DNA
tgaggggagcaaatttagtg

SEQ ID NO: 7707 - DNA, 20 bp, synthetic construct
  misc_feature 1..20: note = chemically synthesized
  source 1..20: mol_type = other DNA
gagcaaatttagtgtggaac

SEQ ID NO: 7708 - DNA, 20 bp, synthetic construct
  misc_feature 1..20: note = chemically synthesized
  source 1..20: mol_type = other DNA
agcaaatttagtgtggaacg

SEQ ID NO: 7709 - DNA, 20 bp, synthetic construct
  misc_feature 1..20: note = chemically synthesized
  source 1..20: mol_type = other DNA
ttagtgtggaacgaggtttc

SEQ ID NO: 7710 - DNA, 20 bp, synthetic construct
  misc_feature 1..20: note = chemically synthesized
  source 1..20: mol_type = other DNA
tagtgtggaacgaggtttct

SEQ ID NO: 7711 - DNA, 20 bp, synthetic construct
  misc_feature 1..20: note = chemically synthesized
  source 1..20: mol_type = other DNA
agtgtggaacgaggtttcta

SEQ ID NO: 7712 - DNA, 20 bp, synthetic construct
  misc_feature 1..20: note = chemically synthesized
  source 1..20: mol_type = other DNA
gtggaacgaggtttctaggg

SEQ ID NO: 7713 - DNA, 20 bp, synthetic construct
  misc_feature 1..20: note = chemically synthesized
  source 1..20: mol_type = other DNA
aacgaggtttctagggaagc

SEQ ID NO: 7714 - DNA, 20 bp, synthetic construct
  misc_feature 1..20: note = chemically synthesized
  source 1..20: mol_type = other DNA
acgaggtttctagggaagcg

SEQ ID NO: 7715 - DNA, 20 bp, synthetic construct
  misc_feature 1..20: note = chemically synthesized
  source 1..20: mol_type = other DNA
cgaggtttctagggaagcga

SEQ ID NO: 7716 - DNA, 20 bp, synthetic construct
  misc_feature 1..20: note = chemically synthesized
  source 1..20: mol_type = other DNA
tttctagggaagcgagggca

SEQ ID NO: 7717 - DNA, 20 bp, synthetic construct
  misc_feature 1..20: note = chemically synthesized
  source 1..20: mol_type = other DNA
ttctagggaagcgagggcaa

SEQ ID NO: 7718 - DNA, 20 bp, synthetic construct
  misc_feature 1..20: note = chemically synthesized
  source 1..20: mol_type = other DNA
tctagggaagcgagggcaaa

SEQ ID NO: 7719 - DNA, 20 bp, synthetic construct
  misc_feature 1..20: note = chemically synthesized
  source 1..20: mol_type = other DNA
gaagcgagggcaaagggcgc

SEQ ID NO: 7720 - DNA, 20 bp, synthetic construct
  misc_feature 1..20: note = chemically synthesized
  source 1..20: mol_type = other DNA
aagcgagggcaaagggcgct

SEQ ID NO: 7721 - DNA, 20 bp, synthetic construct
  misc_feature 1..20: note = chemically synthesized
  source 1..20: mol_type = other DNA
agcgagggcaaagggcgctg

SEQ ID NO: 7722 - DNA, 20 bp, synthetic construct
  misc_feature 1..20: note = chemically synthesized
  source 1..20: mol_type = other DNA
cgagggcaaagggcgctggg

SEQ ID NO: 7723 - DNA, 20 bp, synthetic construct
  misc_feature 1..20: note = chemically synthesized
  source 1..20: mol_type = other DNA
gagggcaaagggcgctgggg

SEQ ID NO: 7724 - DNA, 20 bp, synthetic construct
  misc_feature 1..20: note = chemically synthesized
  source 1..20: mol_type = other DNA
gggcaaagggcgctggggag

SEQ ID NO: 7725 - DNA, 20 bp, synthetic construct
  misc_feature 1..20: note = chemically synthesized
  source 1..20: mol_type = other DNA
ggcaaagggcgctggggagg

SEQ ID NO: 7726 - DNA, 20 bp, synthetic construct
  misc_feature 1..20: note = chemically synthesized
  source 1..20: mol_type = other DNA
gctggggaggaggccttgcg

SEQ ID NO: 7727 - DNA, 20 bp, synthetic construct
  misc_feature 1..20: note = chemically synthesized
  source 1..20: mol_type = other DNA
ggggaggaggccttgcgtgg

SEQ ID NO: 7728 - DNA, 20 bp, synthetic construct
  misc_feature 1..20: note = chemically synthesized
  source 1..20: mol_type = other DNA
gggaggaggccttgcgtggt

SEQ ID NO: 7729 - DNA, 20 bp, synthetic construct
  misc_feature 1..20: note = chemically synthesized
  source 1..20: mol_type = other DNA
ggaggaggccttgcgtggtg

SEQ ID NO: 7730 - DNA, 20 bp, synthetic construct
  misc_feature 1..20: note = chemically synthesized
  source 1..20: mol_type = other DNA
gaggaggccttgcgtggtgg

SEQ ID NO: 7731 - DNA, 20 bp, synthetic construct
  misc_feature 1..20: note = chemically synthesized
  source 1..20: mol_type = other DNA
ggccttgcgtggtgggggat

SEQ ID NO: 7732 - DNA, 20 bp, synthetic construct
  misc_feature 1..20: note = chemically synthesized
  source 1..20: mol_type = other DNA
gccttgcgtggtgggggatg

SEQ ID NO: 7733 - DNA, 20 bp, synthetic construct
  misc_feature 1..20: note = chemically synthesized
  source 1..20: mol_type = other DNA
gtggtgggggatgaggacaa

SEQ ID NO: 7734 - DNA, 20 bp, synthetic construct
  misc_feature 1..20: note = chemically synthesized
  source 1..20: mol_type = other DNA
tggtgggggatgaggacaac

SEQ ID NO: 7735 - DNA, 20 bp, synthetic construct
  misc_feature 1..20: note = chemically synthesized
  source 1..20: mol_type = other DNA
tgggggatgaggacaacagg

SEQ ID NO: 7736 - DNA, 20 bp, synthetic construct
  misc_feature 1..20: note = chemically synthesized
  source 1..20: mol_type = other DNA
gggggatgaggacaacaggt

SEQ ID NO: 7737 - DNA, 20 bp, synthetic construct
  misc_feature 1..20: note = chemically synthesized
  source 1..20: mol_type = other DNA
tgaggacaacaggtgggacc

SEQ ID NO: 7738 - DNA, 20 bp, synthetic construct
  misc_feature 1..20: note = chemically synthesized
  source 1..20: mol_type = other DNA
aggacaacaggtgggacctg

SEQ ID NO: 7739 - DNA, 20 bp, synthetic construct
  misc_feature 1..20: note = chemically synthesized
  source 1..20: mol_type = other DNA
ggacaacaggtgggacctgg

SEQ ID NO: 7740 - DNA, 20 bp, synthetic construct
  misc_feature 1..20: note = chemically synthesized
  source 1..20: mol_type = other DNA
gacaacaggtgggacctgga

SEQ ID NO: 7741 - DNA, 20 bp, synthetic construct
  misc_feature 1..20: note = chemically synthesized
  source 1..20: mol_type = other DNA
gggacctggagggttgtgct

SEQ ID NO: 7742 - DNA, 20 bp, synthetic construct
  misc_feature 1..20: note = chemically synthesized
  source 1..20: mol_type = other DNA
gacctggagggttgtgcttg

SEQ ID NO: 7743 - DNA, 20 bp, synthetic construct
  misc_feature 1..20: note = chemically synthesized
  source 1..20: mol_type = other DNA
cctggagggttgtgcttgga

SEQ ID NO: 7744 - DNA, 20 bp, synthetic construct
  misc_feature 1..20: note = chemically synthesized
  source 1..20: mol_type = other DNA
ggagggttgtgcttggagag

SEQ ID NO: 7745 - DNA, 20 bp, synthetic construct
  misc_feature 1..20: note = chemically synthesized
  source 1..20: mol_type = other DNA
gagggttgtgcttggagagt

SEQ ID NO: 7746 - DNA, 20 bp, synthetic construct
  misc_feature 1..20: note = chemically synthesized
  source 1..20: mol_type = other DNA
tgtgcttggagagtgggcta

SEQ ID NO: 7747 - DNA, 20 bp, synthetic construct
  misc_feature 1..20: note = chemically synthesized
  source 1..20: mol_type = other DNA
gcttggagagtgggctatgg

SEQ ID NO: 7748 - DNA, 20 bp, synthetic construct
  misc_feature 1..20: note = chemically synthesized
  source 1..20: mol_type = other DNA
tgggctatggtggaatgacc

SEQ ID NO: 7749 - DNA, 20 bp, synthetic construct
  misc_feature 1..20: note = chemically synthesized
  source 1..20: mol_type = other DNA
tggtggaatgacccagattt

SEQ ID NO: 7750 - DNA, 20 bp, synthetic construct
  misc_feature 1..20: note = chemically synthesized
  source 1..20: mol_type = other DNA
ggtggaatgacccagattta

SEQ ID NO: 7751 - DNA, 20 bp, synthetic construct
  misc_feature 1..20: note = chemically synthesized
  source 1..20: mol_type = other DNA
cccagatttaaggatctcaa

SEQ ID NO: 7752 - DNA, 20 bp, synthetic construct
  misc_feature 1..20: note = chemically synthesized
  source 1..20: mol_type = other DNA
taaggatctcaatggaattt

SEQ ID NO: 7753 - DNA, 20 bp, synthetic construct
  misc_feature 1..20: note = chemically synthesized
  source 1..20: mol_type = other DNA
ggatctcaatggaattttgg

SEQ ID NO: 7754 - DNA, 20 bp, synthetic construct
  misc_feature 1..20: note = chemically synthesized
  source 1..20: mol_type = other DNA
gatctcaatggaattttggc

SEQ ID NO: 7755 - DNA, 20 bp, synthetic construct
  misc_feature 1..20: note = chemically synthesized
  source 1..20: mol_type = other DNA
atctcaatggaattttggca

SEQ ID NO: 7756 - DNA, 20 bp, synthetic construct
  misc_feature 1..20: note = chemically synthesized
  source 1..20: mol_type = other DNA
tctcaatggaattttggcag

SEQ ID NO: 7757 - DNA, 20 bp, synthetic construct
  misc_feature 1..20: note = chemically synthesized
  source 1..20: mol_type = other DNA
tcaatggaattttggcaggg

SEQ ID NO: 7758 - DNA, 20 bp, synthetic construct
  misc_feature 1..20: note = chemically synthesized
  source 1..20: mol_type = other DNA
caatggaattttggcagggg

SEQ ID NO: 7759 - DNA, 20 bp, synthetic construct
  misc_feature 1..20: note = chemically synthesized
  source 1..20: mol_type = other DNA
aatggaattttggcagggga

SEQ ID NO: 7760 - DNA, 20 bp, synthetic construct
  misc_feature 1..20: note = chemically synthesized
  source 1..20: mol_type = other DNA
tggcaggggagggactgttc

SEQ ID NO: 7761 - DNA, 20 bp, synthetic construct
  misc_feature 1..20: note = chemically synthesized
  source 1..20: mol_type = other DNA
ggggagggactgttccagta

SEQ ID NO: 7762 - DNA, 20 bp, synthetic construct
  misc_feature 1..20: note = chemically synthesized
  source 1..20: mol_type = other DNA
gactgttccagtatggattt

SEQ ID NO: 7763 - DNA, 20 bp, synthetic construct
  misc_feature 1..20: note = chemically synthesized
  source 1..20: mol_type = other DNA
actgttccagtatggatttt

SEQ ID NO: 7764 - DNA, 20 bp, synthetic construct
  misc_feature 1..20: note = chemically synthesized
  source 1..20: mol_type = other DNA
gttccagtatggattttagg

SEQ ID NO: 7765 - DNA, 20 bp, synthetic construct
  misc_feature 1..20: note = chemically synthesized
  source 1..20: mol_type = other DNA
tatggattttaggaagaaca

SEQ ID NO: 7766 - DNA, 20 bp, synthetic construct
  misc_feature 1..20: note = chemically synthesized
  source 1..20: mol_type = other DNA
atggattttaggaagaacac

SEQ ID NO: 7767 - DNA, 20 bp, synthetic construct
  misc_feature 1..20: note = chemically synthesized
  source 1..20: mol_type = other DNA
tggattttaggaagaacaca

SEQ ID NO: 7768 - DNA, 20 bp, synthetic construct
  misc_feature 1..20: note = chemically synthesized
  source 1..20: mol_type = other DNA
tttaggaagaacacagggcc

SEQ ID NO: 7769 - DNA, 20 bp, synthetic construct
  misc_feature 1..20: note = chemically synthesized
  source 1..20: mol_type = other DNA
agaacacagggcccagcttc

SEQ ID NO: 7770 - DNA, 20 bp, synthetic construct
  misc_feature 1..20: note = chemically synthesized
  source 1..20: mol_type = other DNA
aacacagggcccagcttctg

SEQ ID NO: 7771 - DNA, 20 bp, synthetic construct
  misc_feature 1..20: note = chemically synthesized
  source 1..20: mol_type = other DNA
gcttctggagtctccaatct

SEQ ID NO: 7772 - DNA, 20 bp, synthetic construct
  misc_feature 1..20: note = chemically synthesized
  source 1..20: mol_type = other DNA
cttctggagtctccaatctg

SEQ ID NO: 7773 - DNA, 20 bp, synthetic construct
  misc_feature 1..20: note = chemically synthesized
  source 1..20: mol_type = other DNA
ttctggagtctccaatctga

SEQ ID NO: 7774 - DNA, 20 bp, synthetic construct
  misc_feature 1..20: note = chemically synthesized
  source 1..20: mol_type = other DNA
tctggagtctccaatctgag

SEQ ID NO: 7775 - DNA, 20 bp, synthetic construct
  misc_feature 1..20: note = chemically synthesized
  source 1..20: mol_type = other DNA
gagtctccaatctgagggga

SEQ ID NO: 7776 - DNA, 20 bp, synthetic construct
  misc_feature 1..20: note = chemically synthesized
  source 1..20: mol_type = other DNA
agtctccaatctgaggggac

SEQ ID NO: 7777 - DNA, 20 bp, synthetic construct
  misc_feature 1..20: note = chemically synthesized
  source 1..20: mol_type = other DNA
tctccaatctgaggggacag

SEQ ID NO: 7778 - DNA, 20 bp, synthetic construct
  misc_feature 1..20: note = chemically synthesized
  source 1..20: mol_type = other DNA
atctgaggggacaggagcct

SEQ ID NO: 7779 - DNA, 20 bp, synthetic construct
  misc_feature 1..20: note = chemically synthesized
  source 1..20: mol_type = other DNA
tgaggggacaggagccttag

SEQ ID NO: 7780 - DNA, 20 bp, synthetic construct
  misc_feature 1..20: note = chemically synthesized
  source 1..20: mol_type = other DNA
aggggacaggagccttagaa

SEQ ID NO: 7781 - DNA, 20 bp, synthetic construct
  misc_feature 1..20: note = chemically synthesized
  source 1..20: mol_type = other DNA
acaggagccttagaagagct

SEQ ID NO: 7782 - DNA, 20 bp, synthetic construct
  misc_feature 1..20: note = chemically synthesized
  source 1..20: mol_type = other DNA
gccttagaagagctgagact

SEQ ID NO: 7783 - DNA, 20 bp, synthetic construct
  misc_feature 1..20: note = chemically synthesized
  source 1..20: mol_type = other DNA
ccttagaagagctgagacta

SEQ ID NO: 7784 - DNA, 20 bp, synthetic construct
  misc_feature 1..20: note = chemically synthesized
  source 1..20: mol_type = other DNA
aagagctgagactaaggccc

SEQ ID NO: 7785 - DNA, 20 bp, synthetic construct
  misc_feature 1..20: note = chemically synthesized
  source 1..20: mol_type = other DNA
agagctgagactaaggcccg

SEQ ID NO: 7786 - DNA, 20 bp, synthetic construct
  misc_feature 1..20: note = chemically synthesized
  source 1..20: mol_type = other DNA
gactaaggcccgaggtgatc

SEQ ID NO: 7787 - DNA, 20 bp, synthetic construct
  misc_feature 1..20: note = chemically synthesized
  source 1..20: mol_type = other DNA
ctaaggcccgaggtgatctg

SEQ ID NO: 7788 - DNA, 20 bp, synthetic construct
  misc_feature 1..20: note = chemically synthesized
  source 1..20: mol_type = other DNA
taaggcccgaggtgatctgg

SEQ ID NO: 7789 - DNA, 20 bp, synthetic construct
  misc_feature 1..20: note = chemically synthesized
  source 1..20: mol_type = other DNA
gatctggaggcctctgccac

SEQ ID NO: 7790 - DNA, 20 bp, synthetic construct
  misc_feature 1..20: note = chemically synthesized
  source 1..20: mol_type = other DNA
tggaggcctctgccactggc

SEQ ID NO: 7791 - DNA, 20 bp, synthetic construct
  misc_feature 1..20: note = chemically synthesized
  source 1..20: mol_type = other DNA
ggcctctgccactggctgga

SEQ ID NO: 7792 - DNA, 20 bp, synthetic construct
  misc_feature 1..20: note = chemically synthesized
  source 1..20: mol_type = other DNA
gcctctgccactggctggat

SEQ ID NO: 7793 - DNA, 20 bp, synthetic construct
  misc_feature 1..20: note = chemically synthesized
  source 1..20: mol_type = other DNA
ctctgccactggctggatgg

SEQ ID NO: 7794 - DNA, 20 bp, synthetic construct
  misc_feature 1..20: note = chemically synthesized
  source 1..20: mol_type = other DNA
tctgccactggctggatggg

SEQ ID NO: 7795 - DNA, 20 bp, synthetic construct
  misc_feature 1..20: note = chemically synthesized
  source 1..20: mol_type = other DNA
gatgggaggaaaaccattca

SEQ ID NO: 7796 - DNA, 20 bp, synthetic construct
  misc_feature 1..20: note = chemically synthesized
  source 1..20: mol_type = other DNA
cattcacagatcccccttct

SEQ ID NO: 7797 - DNA, 20 bp, synthetic construct
  misc_feature 1..20: note = chemically synthesized
  source 1..20: mol_type = other DNA
attcacagatcccccttctc

SEQ ID NO: 7798 - DNA, 20 bp, synthetic construct
  misc_feature 1..20: note = chemically synthesized
  source 1..20: mol_type = other DNA
cccttctcaggatgtgtgcc

SEQ ID NO: 7799 - DNA, 20 bp, synthetic construct
  misc_feature 1..20: note = chemically synthesized
  source 1..20: mol_type = other DNA
ccttctcaggatgtgtgcct

SEQ ID NO: 7800 - DNA, 20 bp, synthetic construct
  misc_feature 1..20: note = chemically synthesized
  source 1..20: mol_type = other DNA
tctcaggatgtgtgcctagg

SEQ ID NO: 7801 - DNA, 20 bp, synthetic construct
  misc_feature 1..20: note = chemically synthesized
  source 1..20: mol_type = other DNA
ctcaggatgtgtgcctaggc

SEQ ID NO: 7802 - DNA, 20 bp, synthetic construct
  misc_feature 1..20: note = chemically synthesized
  source 1..20: mol_type = other DNA
tcaggatgtgtgcctaggca

SEQ ID NO: 7803 - DNA, 20 bp, synthetic construct
  misc_feature 1..20: note = chemically synthesized
  source 1..20: mol_type = other DNA
gatgtgtgcctaggcagggc

SEQ ID NO: 7804 - DNA, 20 bp, synthetic construct
  misc_feature 1..20: note = chemically synthesized
  source 1..20: mol_type = other DNA
atgtgtgcctaggcagggcc

SEQ ID NO: 7805 - DNA, 20 bp, synthetic construct
  misc_feature 1..20: note = chemically synthesized
  source 1..20: mol_type = other DNA
cccgccccctgtgcgtctcc

SEQ ID NO: 7806 - DNA, 20 bp, synthetic construct
  misc_feature 1..20: note = chemically synthesized
  source 1..20: mol_type = other DNA
ctgtgcgtctcccagtcccc

SEQ ID NO: 7807 - DNA, 20 bp, synthetic construct
  misc_feature 1..20: note = chemically synthesized
  source 1..20: mol_type = other DNA
gtctcccagtcccccagctc

SEQ ID NO: 7808 - DNA, 20 bp, synthetic construct
  misc_feature 1..20: note = chemically synthesized
  source 1..20: mol_type = other DNA
tctcccagtcccccagctcc

SEQ ID NO: 7809 - DNA, 20 bp, synthetic construct
  misc_feature 1..20: note = chemically synthesized
  source 1..20: mol_type = other DNA
agtcccccagctccaggatc

SEQ ID NO: 7810 - DNA, 20 bp, synthetic construct
  misc_feature 1..20: note = chemically synthesized
  source 1..20: mol_type = other DNA
gtcccccagctccaggatcc

SEQ ID NO: 7811 - DNA, 20 bp, synthetic construct
  misc_feature 1..20: note = chemically synthesized
  source 1..20: mol_type = other DNA
caggatccgggctttgcaca

SEQ ID NO: 7812 - DNA, 20 bp, synthetic construct
  misc_feature 1..20: note = chemically synthesized
  source 1..20: mol_type = other DNA
acagctgatgtgaatatcct

SEQ ID NO: 7813 - DNA, 20 bp, synthetic construct
  misc_feature 1..20: note = chemically synthesized
  source 1..20: mol_type = other DNA
aatatcctgagtcgtgtgca

SEQ ID NO: 7814 - DNA, 20 bp, synthetic construct
  misc_feature 1..20: note = chemically synthesized
  source 1..20: mol_type = other DNA
atatcctgagtcgtgtgcat

SEQ ID NO: 7815 - DNA, 20 bp, synthetic construct
  misc_feature 1..20: note = chemically synthesized
  source 1..20: mol_type = other DNA
gtgcatgggtgtgtgtgcac

SEQ ID NO: 7816 - DNA, 20 bp, synthetic construct
  misc_feature 1..20: note = chemically synthesized
  source 1..20: mol_type = other DNA
tgggtgtgtgtgcaccagat

SEQ ID NO: 7817 - DNA, 20 bp, synthetic construct
  misc_feature 1..20: note = chemically synthesized
  source 1..20: mol_type = other DNA
tgcgtgtgtatatttataca

SEQ ID NO: 7818 - DNA, 20 bp, synthetic construct
  misc_feature 1..20: note = chemically synthesized
  source 1..20: mol_type = other DNA
tatatttatacatggtaata

SEQ ID NO: 7819 - DNA, 20 bp, synthetic construct
  misc_feature 1..20: note = chemically synthesized
  source 1..20: mol_type = other DNA
atatttatacatggtaatat

SEQ ID NO: 7820 - DNA, 20 bp, synthetic construct
  misc_feature 1..20: note = chemically synthesized
  source 1..20: mol_type = other DNA
atacatggtaatatgggtgc

SEQ ID NO: 7821 - DNA, 20 bp, synthetic construct
  misc_feature 1..20: note = chemically synthesized
  source 1..20: mol_type = other DNA
taatatgggtgcgagtgtgt

SEQ ID NO: 7822 - DNA, 20 bp, synthetic construct
  misc_feature 1..20: note = chemically synthesized
  source 1..20: mol_type = other DNA
atatgggtgcgagtgtgtaa

SEQ ID NO: 7823 - DNA, 20 bp, synthetic construct
  misc_feature 1..20: note = chemically synthesized
  source 1..20: mol_type = other DNA
tgtgtgtaatgctcaaatgc

SEQ ID NO: 7824 - DNA, 20 bp, synthetic construct
  misc_feature 1..20: note = chemically synthesized
  source 1..20: mol_type = other DNA
gtgtgtaatgctcaaatgct

SEQ ID NO: 7825 - DNA, 20 bp, synthetic construct
  misc_feature 1..20: note = chemically synthesized
  source 1..20: mol_type = other DNA
tgtgtaatgctcaaatgctg

SEQ ID NO: 7826 - DNA, 20 bp, synthetic construct
  misc_feature 1..20: note = chemically synthesized
  source 1..20: mol_type = other DNA
atgctcaaatgctggggtca

SEQ ID NO: 7827 - DNA, 20 bp, synthetic construct
  misc_feature 1..20: note = chemically synthesized
  source 1..20: mol_type = other DNA
cctatgatgaccccccccca

SEQ ID NO: 7828 - DNA, 20 bp, synthetic construct
  misc_feature 1..20: note = chemically synthesized
  source 1..20: mol_type = other DNA
ccccaaccaatccccccgcc

SEQ ID NO: 7829 - DNA, 20 bp, synthetic construct
  misc_feature 1..20: note = chemically synthesized
  source 1..20: mol_type = other DNA
cccaaccaatccccccgccc

SEQ ID NO: 7830 - DNA, 20 bp, synthetic construct
  misc_feature 1..20: note = chemically synthesized
  source 1..20: mol_type = other DNA
ccgcccaggttatgcctcct

SEQ ID NO: 7831 - DNA, 20 bp, synthetic construct
  misc_feature 1..20: note = chemically synthesized
  source 1..20: mol_type = other DNA
cgcccaggttatgcctcctc

SEQ ID NO: 7832 - DNA, 20 bp, synthetic construct
  misc_feature 1..20: note = chemically synthesized
  source 1..20: mol_type = other DNA
ggttatgcctcctcaggctt

SEQ ID NO: 7833 - DNA, 20 bp, synthetic construct
  misc_feature 1..20: note = chemically synthesized
  source 1..20: mol_type = other DNA
ggtgccctgtctttaccctc

SEQ ID NO: 7834 - DNA, 20 bp, synthetic construct
  misc_feature 1..20: note = chemically synthesized
  source 1..20: mol_type = other DNA
accctccggctccccacacc

SEQ ID NO: 7835 - DNA, 20 bp, synthetic construct
  misc_feature 1..20: note = chemically synthesized
  source 1..20: mol_type = other DNA
ccctccggctccccacaccc

SEQ ID NO: 7836 - DNA, 20 bp, synthetic construct
  misc_feature 1..20: note = chemically synthesized
  source 1..20: mol_type = other DNA
gctccccacacccaggctgc

SEQ ID NO: 7837 - DNA, 20 bp, synthetic construct
  misc_feature 1..20: note = chemically synthesized
  source 1..20: mol_type = other DNA
ctcctgatgcccctctccca

SEQ ID NO: 7838 - DNA, 20 bp, synthetic construct
  misc_feature 1..20: note = chemically synthesized
  source 1..20: mol_type = other DNA
tcctgatgcccctctcccac

SEQ ID NO: 7839 - DNA, 20 bp, synthetic construct
  misc_feature 1..20: note = chemically synthesized
  source 1..20: mol_type = other DNA
cctgatgcccctctcccaca

SEQ ID NO: 7840 - DNA, 20 bp, synthetic construct
  misc_feature 1..20: note = chemically synthesized
  source 1..20: mol_type = other DNA
ccacagggccacctcctgcc

SEQ ID NO: 7841 - DNA, 20 bp, synthetic construct
  misc_feature 1..20: note = chemically synthesized
  source 1..20: mol_type = other DNA
gccacctcctgcccagcccc

SEQ ID NO: 7842 - DNA, 20 bp, synthetic construct
  misc_feature 1..20: note = chemically synthesized
  source 1..20: mol_type = other DNA
ctcctgcccagcccctggca

SEQ ID NO: 7843 - DNA, 20 bp, synthetic construct
  misc_feature 1..20: note = chemically synthesized
  source 1..20: mol_type = other DNA
ggcacagcgtctctgctcca

SEQ ID NO: 7844 - DNA, 20 bp, synthetic construct
  misc_feature 1..20: note = chemically synthesized
  source 1..20: mol_type = other DNA
ctctgctccatggtctgctt

SEQ ID NO: 7845 - DNA, 20 bp, synthetic construct
  misc_feature 1..20: note = chemically synthesized
  source 1..20: mol_type = other DNA
tgcttcagtctgcttgccct

SEQ ID NO: 7846 - DNA, 20 bp, synthetic construct
  misc_feature 1..20: note = chemically synthesized
  source 1..20: mol_type = other DNA
gagcttcaacatcctgctgc

SEQ ID NO: 7847 - DNA, 20 bp, synthetic construct
  misc_feature 1..20: note = chemically synthesized
  source 1..20: mol_type = other DNA
cttcaacatcctgctgctgg

SEQ ID NO: 7848 - DNA, 20 bp, synthetic construct
  misc_feature 1..20: note = chemically synthesized
  source 1..20: mol_type = other DNA
ctggtggtcatctgtgtgac

SEQ ID NO: 7849 - DNA, 20 bp, synthetic construct
  misc_feature 1..20: note = chemically synthesized
  source 1..20: mol_type = other DNA
tggtggtcatctgtgtgact

SEQ ID NO: 7850 - DNA, 20 bp, synthetic construct
  misc_feature 1..20: note = chemically synthesized
  source 1..20: mol_type = other DNA
atctgtgtgactgggtccca

SEQ ID NO: 7851 - DNA, 20 bp, synthetic construct
  misc_feature 1..20: note = chemically synthesized
  source 1..20: mol_type = other DNA
gtgtgactgggtcccaaagt

SEQ ID NO: 7852 - DNA, 20 bp, synthetic construct
  misc_feature 1..20: note = chemically synthesized
  source 1..20: mol_type = other DNA
tgtgactgggtcccaaagtg

SEQ ID NO: 7853 - DNA, 20 bp, synthetic construct
  misc_feature 1..20: note = chemically synthesized
  source 1..20: mol_type = other DNA
gtgactgggtcccaaagtga

SEQ ID NO: 7854 - DNA, 20 bp, synthetic construct
  misc_feature 1..20: note = chemically synthesized
  source 1..20: mol_type = other DNA
gggtcccaaagtgagggtca

SEQ ID NO: 7855 - DNA, 20 bp, synthetic construct
  misc_feature 1..20: note = chemically synthesized
  source 1..20: mol_type = other DNA
ggtcccaaagtgagggtcac

SEQ ID NO: 7856 - DNA, 20 bp, synthetic construct
  misc_feature 1..20: note = chemically synthesized
  source 1..20: mol_type = other DNA
gtcccaaagtgagggtcacg

SEQ ID NO: 7857 - DNA, 20 bp, synthetic construct
  misc_feature 1..20: note = chemically synthesized
  source 1..20: mol_type = other DNA
tcccaaagtgagggtcacgg

SEQ ID NO: 7858 - DNA, 20 bp, synthetic construct
  misc_feature 1..20: note = chemically synthesized
  source 1..20: mol_type = other DNA
aaagtgagggtcacgggggc

SEQ ID NO: 7859 - DNA, 20 bp, synthetic construct
  misc_feature 1..20: note = chemically synthesized
  source 1..20: mol_type = other DNA
gtgagggtcacgggggccag

SEQ ID NO: 7860 - DNA, 20 bp, synthetic construct
  misc_feature 1..20: note = chemically synthesized
  source 1..20: mol_type = other DNA
tgagggtcacgggggccagc

SEQ ID NO: 7861 - DNA, 20 bp, synthetic construct
  misc_feature 1..20: note = chemically synthesized
  source 1..20: mol_type = other DNA
gagggtcacgggggccagca

SEQ ID NO: 7862 - DNA, 20 bp, synthetic construct
  misc_feature 1..20: note = chemically synthesized
  source 1..20: mol_type = other DNA
gtcacgggggccagcaggga

SEQ ID NO: 7863 - DNA, 20 bp, synthetic construct
  misc_feature 1..20: note = chemically synthesized
  source 1..20: mol_type = other DNA
tcacgggggccagcagggat

SEQ ID NO: 7864 - DNA, 20 bp, synthetic construct
  misc_feature 1..20: note = chemically synthesized
  source 1..20: mol_type = other DNA
gggggccagcagggatgggc

SEQ ID NO: 7865 - DNA, 20 bp, synthetic construct
  misc_feature 1..20: note = chemically synthesized
  source 1..20: mol_type = other DNA
ggggccagcagggatgggca

SEQ ID NO: 7866 - DNA, 20 bp, synthetic construct
  misc_feature 1..20: note = chemically synthesized
  source 1..20: mol_type = other DNA
gggccagcagggatgggcaa

SEQ ID NO: 7867 - DNA, 20 bp, synthetic construct
  misc_feature 1..20: note = chemically synthesized
  source 1..20: mol_type = other DNA
ggccagcagggatgggcaag

SEQ ID NO: 7868 - DNA, 20 bp, synthetic construct
  misc_feature 1..20: note = chemically synthesized
  source 1..20: mol_type = other DNA
cagcagggatgggcaagggg

SEQ ID NO: 7869 - DNA, 20 bp, synthetic construct
  misc_feature 1..20: note = chemically synthesized
  source 1..20: mol_type = other DNA
agcagggatgggcaaggggt

SEQ ID NO: 7870 - DNA, 20 bp, synthetic construct
  misc_feature 1..20: note = chemically synthesized
  source 1..20: mol_type = other DNA
gcagggatgggcaaggggta

SEQ ID NO: 7871 - DNA, 20 bp, synthetic construct
  misc_feature 1..20: note = chemically synthesized
  source 1..20: mol_type = other DNA
ggatgggcaaggggtaggga

SEQ ID NO: 7872 - DNA, 20 bp, synthetic construct
  misc_feature 1..20: note = chemically synthesized
  source 1..20: mol_type = other DNA
atgggcaaggggtagggaaa

SEQ ID NO: 7873 - DNA, 20 bp, synthetic construct
  misc_feature 1..20: note = chemically synthesized
  source 1..20: mol_type = other DNA
aaggggtagggaaagagaca

SEQ ID NO: 7874 - DNA, 20 bp, synthetic construct
  misc_feature 1..20: note = chemically synthesized
  source 1..20: mol_type = other DNA
aggggtagggaaagagacat

SEQ ID NO: 7875 - DNA, 20 bp, synthetic construct
  misc_feature 1..20: note = chemically synthesized
  source 1..20: mol_type = other DNA
ggtagggaaagagacatggg

SEQ ID NO: 7876 - DNA, 20 bp, synthetic construct
  misc_feature 1..20: note = chemically synthesized
  source 1..20: mol_type = other DNA
agggaaagagacatgggcag

SEQ ID NO: 7877 - DNA, 20 bp, synthetic construct
  misc_feature 1..20: note = chemically synthesized
  source 1..20: mol_type = other DNA
acacagatgaccaccagcag

SEQ ID NO: 7878 - DNA, 20 bp, synthetic construct
  misc_feature 1..20: note = chemically synthesized
  source 1..20: mol_type = other DNA
gggcatcaggagccggcagc

SEQ ID NO: 7879 - DNA, 20 bp, synthetic construct
  misc_feature 1..20: note = chemically synthesized
  source 1..20: mol_type = other DNA
agcctgggtgtggggagccg

SEQ ID NO: 7880 - DNA, 20 bp, synthetic construct
  misc_feature 1..20: note = chemically synthesized
  source 1..20: mol_type = other DNA
aggaggcataacctgggcgg

SEQ ID NO: 7881 - DNA, 20 bp, synthetic construct
  misc_feature 1..20: note = chemically synthesized
  source 1..20: mol_type = other DNA
gattggttggggccatgggg

SEQ ID NO: 7882 - DNA, 20 bp, synthetic construct
  misc_feature 1..20: note = chemically synthesized
  source 1..20: mol_type = other DNA
acacacccatgcacacgact

SEQ ID NO: 7883 - DNA, 20 bp, synthetic construct
  misc_feature 1..20: note = chemically synthesized
  source 1..20: mol_type = other DNA
acatcagctgtgtgcaaagc

SEQ ID NO: 7884 - DNA, 20 bp, synthetic construct
  misc_feature 1..20: note = chemically synthesized
  source 1..20: mol_type = other DNA
taggcacacatcctgagaag

SEQ ID NO: 7885 - DNA, 20 bp, synthetic construct
  misc_feature 1..20: note = chemically synthesized
  source 1..20: mol_type = other DNA
catcctgagaagggggatct

SEQ ID NO: 7886 - DNA, 20 bp, synthetic construct
  misc_feature 1..20: note = chemically synthesized
  source 1..20: mol_type = other DNA
ttccattgagatccttaaat

SEQ ID NO: 7887 - DNA, 20 bp, synthetic construct
  misc_feature 1..20: note = chemically synthesized
  source 1..20: mol_type = other DNA
gggaggctcagtcaggggcc

SEQ ID NO: 7888 - DNA, 20 bp, synthetic construct
  misc_feature 1..20: note = chemically synthesized
  source 1..20: mol_type = other DNA
ggtcacttcctgccactgtc

SEQ ID NO: 7889 - DNA, 20 bp, synthetic construct
  misc_feature 1..20: note = chemically synthesized
  source 1..20: mol_type = other DNA
accaagctggccctccatgg

SEQ ID NO: 7890 - DNA, 20 bp, synthetic construct
  misc_feature 1..20: note = chemically synthesized
  source 1..20: mol_type = other DNA
tcttcagcaccctccactca

SEQ ID NO: 7891 - DNA, 20 bp, synthetic construct
  misc_feature 1..20: note = chemically synthesized
  source 1..20: mol_type = other DNA
cgacttatcaactcccaatg

SEQ ID NO: 7892 - DNA, 20 bp, synthetic construct
  misc_feature 1..20: note = chemically synthesized
  source 1..20: mol_type = other DNA
ccctgaaaccagactgccca

SEQ ID NO: 7893 - DNA, 20 bp, synthetic construct
  misc_feature 1..20: note = chemically synthesized
  source 1..20: mol_type = other DNA
tcacagtcgtagctacccga

SEQ ID NO: 7894 - DNA, 20 bp, synthetic construct
  misc_feature 1..20: note = chemically synthesized
  source 1..20: mol_type = other DNA
tagctacccgattggattgc

SEQ ID NO: 7895 - DNA, 20 bp, synthetic construct
  misc_feature 1..20: note = chemically synthesized
  source 1..20: mol_type = other DNA
tggattgctcggataattag

SEQ ID NO: 7896 - DNA, 20 bp, synthetic construct
  misc_feature 1..20: note = chemically synthesized
  source 1..20: mol_type = other DNA
aaaagtttgaacataaaaga

SEQ ID NO: 7897 - DNA, 20 bp, synthetic construct
  misc_feature 1..20: note = chemically synthesized
  source 1..20: mol_type = other DNA
cagggtctgcccaagatggg

SEQ ID NO: 7898 - DNA, 20 bp, synthetic construct
  misc_feature 1..20: note = chemically synthesized
  source 1..20: mol_type = other DNA
actctggacatcaggcaagg

SEQ ID NO: 7899 - DNA, 20 bp, synthetic construct
  misc_feature 1..20: note = chemically synthesized
  source 1..20: mol_type = other DNA
aggaggagtaaagatccctg

SEQ ID NO: 7900 - DNA, 20 bp, synthetic construct
  misc_feature 1..20: note = chemically synthesized
  source 1..20: mol_type = other DNA
accccagcttactgtttgga

SEQ ID NO: 7901 - DNA, 20 bp, synthetic construct
  misc_feature 1..20: note = chemically synthesized
  source 1..20: mol_type = other DNA
cacgttgaggagatggagct

SEQ ID NO: 7902 - DNA, 20 bp, synthetic construct
  misc_feature 1..20: note = chemically synthesized
  source 1..20: mol_type = other DNA
ccgaggagaccaaaacaatt

SEQ ID NO: 7903 - DNA, 20 bp, synthetic construct
  misc_feature 1..20: note = chemically synthesized
  source 1..20: mol_type = other DNA
caaagctcaagaacatttag

SEQ ID NO: 7904 - DNA, 20 bp, synthetic construct
  misc_feature 1..20: note = chemically synthesized
  source 1..20: mol_type = other DNA
aaaagagatccagaactgac

SEQ ID NO: 7905 - DNA, 20 bp, synthetic construct
  misc_feature 1..20: note = chemically synthesized
  source 1..20: mol_type = other DNA
tccagaactgacacggatgc

SEQ ID NO: 7906 - DNA, 20 bp, synthetic construct
  misc_feature 1..20: note = chemically synthesized
  source 1..20: mol_type = other DNA
ggatgctagaattagcaggc

SEQ ID NO: 7907 - DNA, 20 bp, synthetic construct
  misc_feature 1..20: note = chemically synthesized
  source 1..20: mol_type = other DNA
attatgttcaaaaaattaag

SEQ ID NO: 7908 - DNA, 20 bp, synthetic construct
  misc_feature 1..20: note = chemically synthesized
  source 1..20: mol_type = other DNA
aaaaattaagtagaattgtg

SEQ ID NO: 7909 - DNA, 20 bp, synthetic construct
  misc_feature 1..20: note = chemically synthesized
  source 1..20: mol_type = other DNA
tagaattgtggaggatattt

SEQ ID NO: 7910 - DNA, 20 bp, synthetic construct
  misc_feature 1..20: note = chemically synthesized
  source 1..20: mol_type = other DNA
caggcgccgtggctcacgcc

SEQ ID NO: 7911 - DNA, 20 bp, synthetic construct
  misc_feature 1..20: note = chemically synthesized
  source 1..20: mol_type = other DNA
tactcgggaggctgaggcag

SEQ ID NO: 7912 - DNA, 20 bp, synthetic construct
  misc_feature 1..20: note = chemically synthesized
  source 1..20: mol_type = other DNA
gaaagaaaagaaaaaacaca

SEQ ID NO: 7913 - DNA, 20 bp, synthetic construct
  misc_feature 1..20: note = chemically synthesized
  source 1..20: mol_type = other DNA
aaaatttagggccaggcact

SEQ ID NO: 7914 - DNA, 20 bp, synthetic construct
  misc_feature 1..20: note = chemically synthesized
  source 1..20: mol_type = other DNA
ctttgggaggtcgacacggg

SEQ ID NO: 7915 - DNA, 20 bp, synthetic construct
  misc_feature 1..20: note = chemically synthesized
  source 1..20: mol_type = other DNA
tacctgggaggctgaagtgg

SEQ ID NO: 7916 - DNA, 20 bp, synthetic construct
  misc_feature 1..20: note = chemically synthesized
  source 1..20: mol_type = other DNA
cccaggaggtggaggccaca

SEQ ID NO: 7917 - DNA, 20 bp, synthetic construct
  misc_feature 1..20: note = chemically synthesized
  source 1..20: mol_type = other DNA
ctgcattccagcctgggcaa

SEQ ID NO: 7918 - DNA, 20 bp, synthetic construct
  misc_feature 1..20: note = chemically synthesized
  source 1..20: mol_type = other DNA
aatgaaacactgggagaaaa

SEQ ID NO: 7919 - DNA, 20 bp, synthetic construct
  misc_feature 1..20: note = chemically synthesized
  source 1..20: mol_type = other DNA
aaagaattaaaaaatggaaa

SEQ ID NO: 7920 - DNA, 20 bp, synthetic construct
  misc_feature 1..20: note = chemically synthesized
  source 1..20: mol_type = other DNA
aattaaaaaatggaaagaga

SEQ ID NO: 7921 - DNA, 20 bp, synthetic construct
  misc_feature 1..20: note = chemically synthesized
  source 1..20: mol_type = other DNA
tgaaatctttaaaagaaaaa

SEQ ID NO: 7922 - DNA, 20 bp, synthetic construct
  misc_feature 1..20: note = chemically synthesized
  source 1..20: mol_type = other DNA
agcagcatcccgtattctct

SEQ ID NO: 7923 - DNA, 20 bp, synthetic construct
  misc_feature 1..20: note = chemically synthesized
  source 1..20: mol_type = other DNA
ctctgagtgttcactatgta

SEQ ID NO: 7924 - DNA, 20 bp, synthetic construct
  misc_feature 1..20: note = chemically synthesized
  source 1..20: mol_type = other DNA
accgggtgccgtgtgggcac

SEQ ID NO: 7925 - DNA, 20 bp, synthetic construct
  misc_feature 1..20: note = chemically synthesized
  source 1..20: mol_type = other DNA
tgggcactggagttgcagag

SEQ ID NO: 7926 - DNA, 20 bp, synthetic construct
  misc_feature 1..20: note = chemically synthesized
  source 1..20: mol_type = other DNA
aggagatgctactggtgttc

SEQ ID NO: 7927 - DNA, 20 bp, synthetic construct
  misc_feature 1..20: note = chemically synthesized
  source 1..20: mol_type = other DNA
tccctcggttggccagcctc

SEQ ID NO: 7928 - DNA, 20 bp, synthetic construct
  misc_feature 1..20: note = chemically synthesized
  source 1..20: mol_type = other DNA
gttggccagcctcaggaatg

SEQ ID NO: 7929 - DNA, 20 bp, synthetic construct
  misc_feature 1..20: note = chemically synthesized
  source 1..20: mol_type = other DNA
tacttgggaggctgaggtgg

SEQ ID NO: 7930 - DNA, 20 bp, synthetic construct
  misc_feature 1..20: note = chemically synthesized
  source 1..20: mol_type = other DNA
tgggaggatggcttgagccc

SEQ ID NO: 7931 - DNA, 20 bp, synthetic construct
  misc_feature 1..20: note = chemically synthesized
  source 1..20: mol_type = other DNA
tcagtcaagatttattacag

SEQ ID NO: 7932 - DNA, 20 bp, synthetic construct
  misc_feature 1..20: note = chemically synthesized
  source 1..20: mol_type = other DNA
tattacagaaggatccaggg

SEQ ID NO: 7933 - DNA, 20 bp, synthetic construct
  misc_feature 1..20: note = chemically synthesized
  source 1..20: mol_type = other DNA
tcttgggagatgagaggagc

SEQ ID NO: 7934 - DNA, 20 bp, synthetic construct
  misc_feature 1..20: note = chemically synthesized
  source 1..20: mol_type = other DNA
tgagaggagcagggatcttc

SEQ ID NO: 7935 - DNA, 20 bp, synthetic construct
  misc_feature 1..20: note = chemically synthesized
  source 1..20: mol_type = other DNA
cattcactcacacacacaca

SEQ ID NO: 7936 - DNA, 20 bp, synthetic construct
  misc_feature 1..20: note = chemically synthesized
  source 1..20: mol_type = other DNA
acacacacacagagtcccag

SEQ ID NO: 7937 - DNA, 20 bp, synthetic construct
  misc_feature 1..20: note = chemically synthesized
  source 1..20: mol_type = other DNA
catacgaggcacatgtgttc

SEQ ID NO: 7938 - DNA, 20 bp, synthetic construct
  misc_feature 1..20: note = chemically synthesized
  source 1..20: mol_type = other DNA
cctctggcacatgcctttcc

SEQ ID NO: 7939 - DNA, 20 bp, synthetic construct
  misc_feature 1..20: note = chemically synthesized
  source 1..20: mol_type = other DNA
acatgcctttcctggggtcc

SEQ ID NO: 7940 - DNA, 20 bp, synthetic construct
  misc_feature 1..20: note = chemically synthesized
  source 1..20: mol_type = other DNA
ggtgaggtgagggaacaagc

SEQ ID NO: 7941 - DNA, 20 bp, synthetic construct
  misc_feature 1..20: note = chemically synthesized
  source 1..20: mol_type = other DNA
ccctcctcagtccctgttca

SEQ ID NO: 7942 - DNA, 20 bp, synthetic construct
  misc_feature 1..20: note = chemically synthesized
  source 1..20: mol_type = other DNA
cctcagtccctgttcacaga

SEQ ID NO: 7943 - DNA, 20 bp, synthetic construct
  misc_feature 1..20: note = chemically synthesized
  source 1..20: mol_type = other DNA
tgcacacttgcctttcaaaa

SEQ ID NO: 7944 - DNA, 20 bp, synthetic construct
  misc_feature 1..20: note = chemically synthesized
  source 1..20: mol_type = other DNA
caaaaatggatttcctctcc

SEQ ID NO: 7945 - DNA, 20 bp, synthetic construct
  misc_feature 1..20: note = chemically synthesized
  source 1..20: mol_type = other DNA
cctctcctgggattcagcct

SEQ ID NO: 7946 - DNA, 20 bp, synthetic construct
  misc_feature 1..20: note = chemically synthesized
  source 1..20: mol_type = other DNA
tggcccctcaccttgatgga

SEQ ID NO: 7947 - DNA, 20 bp, synthetic construct
  misc_feature 1..20: note = chemically synthesized
  source 1..20: mol_type = other DNA
ttttcctccgagctcagctg

SEQ ID NO: 7948 - DNA, 20 bp, synthetic construct
  misc_feature 1..20: note = chemically synthesized
  source 1..20: mol_type = other DNA
attcacgtggaggttgatgg

SEQ ID NO: 7949 - DNA, 20 bp, synthetic construct
  misc_feature 1..20: note = chemically synthesized
  source 1..20: mol_type = other DNA
gttgatggtgggatggaacg

SEQ ID NO: 7950 - DNA, 20 bp, synthetic construct
  misc_feature 1..20: note = chemically synthesized
  source 1..20: mol_type = other DNA
gggatggaacgcagggtcgg

SEQ ID NO: 7951 - DNA, 20 bp, synthetic construct
  misc_feature 1..20: note = chemically synthesized
  source 1..20: mol_type = other DNA
aacgcagggtcggaggggtt

SEQ ID NO: 7952 - DNA, 20 bp, synthetic construct
  misc_feature 1..20: note = chemically synthesized
  source 1..20: mol_type = other DNA
gaggggttcggggtggtggc

SEQ ID NO: 7953 - DNA, 20 bp, synthetic construct
  misc_feature 1..20: note = chemically synthesized
  source 1..20: mol_type = other DNA
gttcggggtggtggcctggg

SEQ ID NO: 7954 - DNA, 20 bp, synthetic construct
  misc_feature 1..20: note = chemically synthesized
  source 1..20: mol_type = other DNA
atcccaccatcaacctccac

SEQ ID NO: 7955 - DNA, 20 bp, synthetic construct
  misc_feature 1..20: note = chemically synthesized
  source 1..20: mol_type = other DNA
aggggccaggcactcgcagg

SEQ ID NO: 7956 - DNA, 20 bp, synthetic construct
  misc_feature 1..20: note = chemically synthesized
  source 1..20: mol_type = other DNA
tgtgcacgtatgtgcatatg

SEQ ID NO: 7957 - DNA, 20 bp, synthetic construct
  misc_feature 1..20: note = chemically synthesized
  source 1..20: mol_type = other DNA
ctgggactctgtgtgtgtgt

SEQ ID NO: 7958 - DNA, 20 bp, synthetic construct
  misc_feature 1..20: note = chemically synthesized
  source 1..20: mol_type = other DNA
gactctgtgtgtgtgtgtga

SEQ ID NO: 7959 - DNA, 20 bp, synthetic construct
  misc_feature 1..20: note = chemically synthesized
  source 1..20: mol_type = other DNA
tgtgtatgtcgtgtatgtga

SEQ ID NO: 7960 - DNA, 20 bp, synthetic construct
  misc_feature 1..20: note = chemically synthesized
  source 1..20: mol_type = other DNA
tgagagggtatgttgtgtgt

SEQ ID NO: 7961 - DNA, 20 bp, synthetic construct
  misc_feature 1..20: note = chemically synthesized
  source 1..20: mol_type = other DNA
gtgttgtgtgtgtatgttgt

SEQ ID NO: 7962 - DNA, 20 bp, synthetic construct
  misc_feature 1..20: note = chemically synthesized
  source 1..20: mol_type = other DNA
atgttgtgtgtatcttgtgt

SEQ ID NO: 7963 - DNA, 20 bp, synthetic construct
  misc_feature 1..20: note = chemically synthesized
  source 1..20: mol_type = other DNA
tgtgcatgtgtgtatgttgt

SEQ ID NO: 7964 - DNA, 20 bp, synthetic construct
  misc_feature 1..20: note = chemically synthesized
  source 1..20: mol_type = other DNA
tgcgagtgtatgttgtgtat

SEQ ID NO: 7965 - DNA, 20 bp, synthetic construct
  misc_feature 1..20: note = chemically synthesized
  source 1..20: mol_type = other DNA
tgtgtgtatgtatgttgtgt

SEQ ID NO: 7966 - DNA, 20 bp, synthetic construct
  misc_feature 1..20: note = chemically synthesized
  source 1..20: mol_type = other DNA
gtgttgtgtgtgtgtattgt

SEQ ID NO: 7967 - DNA, 20 bp, synthetic construct
  misc_feature 1..20: note = chemically synthesized
  source 1..20: mol_type = other DNA
tatgtatgtttgtgtgttgt

SEQ ID NO: 7968 - DNA, 20 bp, synthetic construct
  misc_feature 1..20: note = chemically synthesized
  source 1..20: mol_type = other DNA
tgtgcgtgtgtgtatgttgt

SEQ ID NO: 7969 - DNA, 20 bp, synthetic construct
  misc_feature 1..20: note = chemically synthesized
  source 1..20: mol_type = other DNA
gtgtgttgtgtgtgtatgtt

SEQ ID NO: 7970 - DNA, 20 bp, synthetic construct
  misc_feature 1..20: note = chemically synthesized
  source 1..20: mol_type = other DNA
gtgttatgtatgttgtgtgt

SEQ ID NO: 7971 - DNA, 20 bp, synthetic construct
  misc_feature 1..20: note = chemically synthesized
  source 1..20: mol_type = other DNA
tgtgtgtgtgagtgtgttgc

SEQ ID NO: 7972 - DNA, 20 bp, synthetic construct
  misc_feature 1..20: note = chemically synthesized
  source 1..20: mol_type = other DNA
tgtgtgtgtgtgtgtagagg

SEQ ID NO: 7973 - DNA, 20 bp, synthetic construct
  misc_feature 1..20: note = chemically synthesized
  source 1..20: mol_type = other DNA
tgtgtgtgtgtagaggtggg

SEQ ID NO: 7974 - DNA, 20 bp, synthetic construct
  misc_feature 1..20: note = chemically synthesized
  source 1..20: mol_type = other DNA
tgtgtagaggtggggtgagt

SEQ ID NO: 7975 - DNA, 20 bp, synthetic construct
  misc_feature 1..20: note = chemically synthesized
  source 1..20: mol_type = other DNA
tagaggtggggtgagttggg

SEQ ID NO: 7976 - DNA, 20 bp, synthetic construct
  misc_feature 1..20: note = chemically synthesized
  source 1..20: mol_type = other DNA
tcatctcccaagacccttcc

SEQ ID NO: 7977 - DNA, 20 bp, synthetic construct
  misc_feature 1..20: note = chemically synthesized
  source 1..20: mol_type = other DNA
gacattttttttttagagac

SEQ ID NO: 7978 - DNA, 20 bp, synthetic construct
  misc_feature 1..20: note = chemically synthesized
  source 1..20: mol_type = other DNA
tagagacaggagtgtagtgg

SEQ ID NO: 7979 - DNA, 20 bp, synthetic construct
  misc_feature 1..20: note = chemically synthesized
  source 1..20: mol_type = other DNA
aaaaaaattttttagagaaa

SEQ ID NO: 7980 - DNA, 20 bp, synthetic construct
  misc_feature 1..20: note = chemically synthesized
  source 1..20: mol_type = other DNA
taggcagaagggcaagagcc

SEQ ID NO: 7981 - DNA, 20 bp, synthetic construct
  misc_feature 1..20: note = chemically synthesized
  source 1..20: mol_type = other DNA
agggcaagagccaggaatgg

SEQ ID NO: 7982 - DNA, 20 bp, synthetic construct
  misc_feature 1..20: note = chemically synthesized
  source 1..20: mol_type = other DNA
aatggaggagtgtcaggtgt

SEQ ID NO: 7983 - DNA, 20 bp, synthetic construct
  misc_feature 1..20: note = chemically synthesized
  source 1..20: mol_type = other DNA
tgtgggtgctggtggtggag

SEQ ID NO: 7984 - DNA, 20 bp, synthetic construct
  misc_feature 1..20: note = chemically synthesized
  source 1..20: mol_type = other DNA
aggggcttggagcttaggaa

SEQ ID NO: 7985 - DNA, 20 bp, synthetic construct
  misc_feature 1..20: note = chemically synthesized
  source 1..20: mol_type = other DNA
aggggattggttagctgggc

SEQ ID NO: 7986 - DNA, 20 bp, synthetic construct
  misc_feature 1..20: note = chemically synthesized
  source 1..20: mol_type = other DNA
agggcagggcaggggacagg

SEQ ID NO: 7987 - DNA, 20 bp, synthetic construct
  misc_feature 1..20: note = chemically synthesized
  source 1..20: mol_type = other DNA
gtacatagtgaacactcaga

SEQ ID NO: 7988 - DNA, 20 bp, synthetic construct
  misc_feature 1..20: note = chemically synthesized
  source 1..20: mol_type = other DNA
gtgaacactcagagagaata

SEQ ID NO: 7989 - DNA, 20 bp, synthetic construct
  misc_feature 1..20: note = chemically synthesized
  source 1..20: mol_type = other DNA
agagagaatacgggatgctg

SEQ ID NO: 7990 - DNA, 20 bp, synthetic construct
  misc_feature 1..20: note = chemically synthesized
  source 1..20: mol_type = other DNA
gggatgctgctgaatcttct

SEQ ID NO: 7991 - DNA, 20 bp, synthetic construct
  misc_feature 1..20: note = chemically synthesized
  source 1..20: mol_type = other DNA
gctgaatcttctgagggtga

SEQ ID NO: 7992 - DNA, 20 bp, synthetic construct
  misc_feature 1..20: note = chemically synthesized
  source 1..20: mol_type = other DNA
cttctgagggtgacagaatt

SEQ ID NO: 7993 - DNA, 20 bp, synthetic construct
  misc_feature 1..20: note = chemically synthesized
  source 1..20: mol_type = other DNA
caggaggcttggagagaggc

SEQ ID NO: 7994 - DNA, 20 bp, synthetic construct
  misc_feature 1..20: note = chemically synthesized
  source 1..20: mol_type = other DNA
aggatttctgaaattaatgg

SEQ ID NO: 7995 - DNA, 20 bp, synthetic construct
  misc_feature 1..20: note = chemically synthesized
  source 1..20: mol_type = other DNA
taatgggagagtgagctcac

SEQ ID NO: 7996 - DNA, 20 bp, synthetic construct
  misc_feature 1..20: note = chemically synthesized
  source 1..20: mol_type = other DNA
accagtgagggaccgtctga

SEQ ID NO: 7997 - DNA, 20 bp, synthetic construct
  misc_feature 1..20: note = chemically synthesized
  source 1..20: mol_type = other DNA
ccgcatttccctccagcagc

SEQ ID NO: 7998 - DNA, 20 bp, synthetic construct
  misc_feature 1..20: note = chemically synthesized
  source 1..20: mol_type = other DNA
atttcaattatgcatgtatt

SEQ ID NO: 7999 - DNA, 20 bp, synthetic construct
  misc_feature 1..20: note = chemically synthesized
  source 1..20: mol_type = other DNA
tctcccagtgtttcatttta

SEQ ID NO: 8000 - DNA, 20 bp, synthetic construct
  misc_feature 1..20: note = chemically synthesized
  source 1..20: mol_type = other DNA
tctcactctgttgcccaggc

SEQ ID NO: 8001 - DNA, 20 bp, synthetic construct
  misc_feature 1..20: note = chemically synthesized
  source 1..20: mol_type = other DNA
gagacggttttgccatgtag

SEQ ID NO: 8002 - DNA, 20 bp, synthetic construct
  misc_feature 1..20: note = chemically synthesized
  source 1..20: mol_type = other DNA
gtgtcgacctcccaaagtgc

SEQ ID NO: 8003 - DNA, 20 bp, synthetic construct
  misc_feature 1..20: note = chemically synthesized
  source 1..20: mol_type = other DNA
cttttttttttttttggagg

SEQ ID NO: 8004 - DNA, 20 bp, synthetic construct
  misc_feature 1..20: note = chemically synthesized
  source 1..20: mol_type = other DNA
tctcgctctgttgcccaggc

SEQ ID NO: 8005 - DNA, 20 bp, synthetic construct
  misc_feature 1..20: note = chemically synthesized
  source 1..20: mol_type = other DNA
ctcactgcaagctctgcctc

SEQ ID NO: 8006 - DNA, 20 bp, synthetic construct
  misc_feature 1..20: note = chemically synthesized
  source 1..20: mol_type = other DNA
cattctcctgcctcagcctc

SEQ ID NO: 8007 - DNA, 20 bp, synthetic construct
  misc_feature 1..20: note = chemically synthesized
  source 1..20: mol_type = other DNA
ttttgtatttttagtagaga

SEQ ID NO: 8008 - DNA, 20 bp, synthetic construct
  misc_feature 1..20: note = chemically synthesized
  source 1..20: mol_type = other DNA
tggggtttcaccatgttagc

SEQ ID NO: 8009 - DNA, 20 bp, synthetic construct
  misc_feature 1..20: note = chemically synthesized
  source 1..20: mol_type = other DNA
gccttggcctcccacagtgc

SEQ ID NO: 8010 - DNA, 20 bp, synthetic construct
  misc_feature 1..20: note = chemically synthesized
  source 1..20: mol_type = other DNA
acttaattttttgaacataa

SEQ ID NO: 8011 - DNA, 20 bp, synthetic construct
  misc_feature 1..20: note = chemically synthesized
  source 1..20: mol_type = other DNA
ttctagcatccgtgtcagtt

SEQ ID NO: 8012 - DNA, 20 bp, synthetic construct
  misc_feature 1..20: note = chemically synthesized
  source 1..20: mol_type = other DNA
acattgtcaatttcaccttg

SEQ ID NO: 8013 - DNA, 20 bp, synthetic construct
  misc_feature 1..20: note = chemically synthesized
  source 1..20: mol_type = other DNA
caatttcaccttgttgggtg

SEQ ID NO: 8014 - DNA, 20 bp, synthetic construct
  misc_feature 1..20: note = chemically synthesized
  source 1..20: mol_type = other DNA
aatgttcttgagctttgctc

SEQ ID NO: 8015 - DNA, 20 bp, synthetic construct
  misc_feature 1..20: note = chemically synthesized
  source 1..20: mol_type = other DNA
cgggatgcagttaagcaact

SEQ ID NO: 8016 - DNA, 20 bp, synthetic construct
  misc_feature 1..20: note = chemically synthesized
  source 1..20: mol_type = other DNA
agctccatctcctcaacgtg

SEQ ID NO: 8017 - DNA, 20 bp, synthetic construct
  misc_feature 1..20: note = chemically synthesized
  source 1..20: mol_type = other DNA
actctctccaaacagtaagc

SEQ ID NO: 8018 - DNA, 20 bp, synthetic construct
  misc_feature 1..20: note = chemically synthesized
  source 1..20: mol_type = other DNA
acagtaagctggggtgatcg

SEQ ID NO: 8019 - DNA, 20 bp, synthetic construct
  misc_feature 1..20: note = chemically synthesized
  source 1..20: mol_type = other DNA
ttgtttgcttcttatccctc

SEQ ID NO: 8020 - DNA, 20 bp, synthetic construct
  misc_feature 1..20: note = chemically synthesized
  source 1..20: mol_type = other DNA
actcctccttgcctgatgtc

SEQ ID NO: 8021 - DNA, 20 bp, synthetic construct
  misc_feature 1..20: note = chemically synthesized
  source 1..20: mol_type = other DNA
taattatccgagcaatccaa

SEQ ID NO: 8022 - DNA, 20 bp, synthetic construct
  misc_feature 1..20: note = chemically synthesized
  source 1..20: mol_type = other DNA
aaaatggaagcatggagaaa

SEQ ID NO: 8023 - DNA, 20 bp, synthetic construct
  misc_feature 1..20: note = chemically synthesized
  source 1..20: mol_type = other DNA
ccctgtgggcagtctggttt

SEQ ID NO: 8024 - DNA, 20 bp, synthetic construct
  misc_feature 1..20: note = chemically synthesized
  source 1..20: mol_type = other DNA
gtgggcagtctggtttcagg

SEQ ID NO: 8025 - DNA, 20 bp, synthetic construct
  misc_feature 1..20: note = chemically synthesized
  source 1..20: mol_type = other DNA
tgctgggctgacccagcatt

SEQ ID NO: 8026 - DNA, 20 bp, synthetic construct
  misc_feature 1..20: note = chemically synthesized
  source 1..20: mol_type = other DNA
gggaagcaggacaggaccct

SEQ ID NO: 8027 - DNA, 20 bp, synthetic construct
  misc_feature 1..20: note = chemically synthesized
  source 1..20: mol_type = other DNA
aggacaggaccctctgagtg

SEQ ID NO: 8028 - DNA, 20 bp, synthetic construct
  misc_feature 1..20: note = chemically synthesized
  source 1..20: mol_type = other DNA
accgtggtcatggagcgctt

SEQ ID NO: 8029 - DNA, 20 bp, synthetic construct
  misc_feature 1..20: note = chemically synthesized
  source 1..20: mol_type = other DNA
tggagcgcttctggatggag

SEQ ID NO: 8030 - DNA, 20 bp, synthetic construct
  misc_feature 1..20: note = chemically synthesized
  source 1..20: mol_type = other DNA
aatgcaaaggccttggagga

SEQ ID NO: 8031 - DNA, 20 bp, synthetic construct
  misc_feature 1..20: note = chemically synthesized
  source 1..20: mol_type = other DNA
ggggtgggggcagtgagagg

SEQ ID NO: 8032 - DNA, 20 bp, synthetic construct
  misc_feature 1..20: note = chemically synthesized
  source 1..20: mol_type = other DNA
ggtggggctgtgctcagagc

SEQ ID NO: 8033 - DNA, 20 bp, synthetic construct
  misc_feature 1..20: note = chemically synthesized
  source 1..20: mol_type = other DNA
tggaggtgtcagaggcctcc

SEQ ID NO: 8034 - DNA, 20 bp, synthetic construct
  misc_feature 1..20: note = chemically synthesized
  source 1..20: mol_type = other DNA
agaggcctccctgggtcaaa

SEQ ID NO: 8035 - DNA, 20 bp, synthetic construct
  misc_feature 1..20: note = chemically synthesized
  source 1..20: mol_type = other DNA
tccctgggtcaaatggggtc

SEQ ID NO: 8036 - DNA, 20 bp, synthetic construct
  misc_feature 1..20: note = chemically synthesized
  source 1..20: mol_type = other DNA
tcactggtgtgaaaaagatg

SEQ ID NO: 8037 - DNA, 20 bp, synthetic construct
  misc_feature 1..20: note = chemically synthesized
  source 1..20: mol_type = other DNA
ggcccctgactgagcctccc

SEQ ID NO: 8038 - DNA, 20 bp, synthetic construct
  misc_feature 1..20: note = chemically synthesized
  source 1..20: mol_type = other DNA
ctccccaggatgtggtcctg

SEQ ID NO: 8039 - DNA, 20 bp, synthetic construct
  misc_feature 1..20: note = chemically synthesized
  source 1..20: mol_type = other DNA
gatgtggtcctgctgggtcg

SEQ ID NO: 8040 - DNA, 20 bp, synthetic construct
  misc_feature 1..20: note = chemically synthesized
  source 1..20: mol_type = other DNA
ctgctgggtcggggggtgat

SEQ ID NO: 8041 - DNA, 20 bp, synthetic construct
  misc_feature 1..20: note = chemically synthesized
  source 1..20: mol_type = other DNA
tgagaagacaaggaagtcca

SEQ ID NO: 8042 - DNA, 20 bp, synthetic construct
  misc_feature 1..20: note = chemically synthesized
  source 1..20: mol_type = other DNA
gacaaggaagtccacagagt

SEQ ID NO: 8043 - DNA, 20 bp, synthetic construct
  misc_feature 1..20: note = chemically synthesized
  source 1..20: mol_type = other DNA
agaaggtgttctgtttgcag

SEQ ID NO: 8044 - DNA, 20 bp, synthetic construct
  misc_feature 1..20: note = chemically synthesized
  source 1..20: mol_type = other DNA
ctgggacaactggagctgct

SEQ ID NO: 8045 - DNA, 20 bp, synthetic construct
  misc_feature 1..20: note = chemically synthesized
  source 1..20: mol_type = other DNA
agctctgtgtgcaggaagac

SEQ ID NO: 8046 - DNA, 20 bp, synthetic construct
  misc_feature 1..20: note = chemically synthesized
  source 1..20: mol_type = other DNA
gtgcaggaagacgtgggtgt

SEQ ID NO: 8047 - DNA, 20 bp, synthetic construct
  misc_feature 1..20: note = chemically synthesized
  source 1..20: mol_type = other DNA
gggtgtgtgagtgtacgtgt

SEQ ID NO: 8048 - DNA, 20 bp, synthetic construct
  misc_feature 1..20: note = chemically synthesized
  source 1..20: mol_type = other DNA
tcaggtgtgtgtgtgtggga

SEQ ID NO: 8049 - DNA, 20 bp, synthetic construct
  misc_feature 1..20: note = chemically synthesized
  source 1..20: mol_type = other DNA
gtgtgtgtgtgggagggagt

SEQ ID NO: 8050 - DNA, 20 bp, synthetic construct
  misc_feature 1..20: note = chemically synthesized
  source 1..20: mol_type = other DNA
tagcatgcatatgcacatgt

SEQ ID NO: 8051 - DNA, 20 bp, synthetic construct
  misc_feature 1..20: note = chemically synthesized
  source 1..20: mol_type = other DNA
atgcatatgcacatgtgaga

SEQ ID NO: 8052 - DNA, 20 bp, synthetic construct
  misc_feature 1..20: note = chemically synthesized
  source 1..20: mol_type = other DNA
gggtacagcagagcgtggtc

SEQ ID NO: 8053 - DNA, 20 bp, synthetic construct
  misc_feature 1..20: note = chemically synthesized
  source 1..20: mol_type = other DNA
gtgtgtgcaaatgtgtgttt

SEQ ID NO: 8054 - DNA, 20 bp, synthetic construct
  misc_feature 1..20: note = chemically synthesized
  source 1..20: mol_type = other DNA
ttgagtgaagtgagcaatgt

SEQ ID NO: 8055 - DNA, 20 bp, synthetic construct
  misc_feature 1..20: note = chemically synthesized
  source 1..20: mol_type = other DNA
agtgagcaatgtgtgagtgt

SEQ ID NO: 8056 - DNA, 20 bp, synthetic construct
  misc_feature 1..20: note = chemically synthesized
  source 1..20: mol_type = other DNA
gtgtgagtgtgtgagtgtgt

SEQ ID NO: 8057 - DNA, 20 bp, synthetic construct
  misc_feature 1..20: note = chemically synthesized
  source 1..20: mol_type = other DNA
gtgtgagtttgtgagggcat

SEQ ID NO: 8058 - DNA, 20 bp, synthetic construct
  misc_feature 1..20: note = chemically synthesized
  source 1..20: mol_type = other DNA
aatgtgtgtgtcagtgctgt

SEQ ID NO: 8059 - DNA, 20 bp, synthetic construct
  misc_feature 1..20: note = chemically synthesized
  source 1..20: mol_type = other DNA
tcagtgctgtcagggtgcag

SEQ ID NO: 8060 - DNA, 20 bp, synthetic construct
  misc_feature 1..20: note = chemically synthesized
  source 1..20: mol_type = other DNA
ggaggaggccttgcgtggtg

SEQ ID NO: 8061 - DNA, 20 bp, synthetic construct
  misc_feature 1..20: note = chemically synthesized
  source 1..20: mol_type = other DNA
aggacaacaggtgggacctg

SEQ ID NO: 8062 - DNA, 20 bp, synthetic construct
  misc_feature 1..20: note = chemically synthesized
  source 1..20: mol_type = other DNA
gacctggagggttgtgcttg

SEQ ID NO: 8063 - DNA, 20 bp, synthetic construct
  misc_feature 1..20: note = chemically synthesized
  source 1..20: mol_type = other DNA
gcttggagagtgggctatgg

SEQ ID NO: 8064 - DNA, 20 bp, synthetic construct
  misc_feature 1..20: note = chemically synthesized
  source 1..20: mol_type = other DNA
tggtggaatgacccagattt

SEQ ID NO: 8065 - DNA, 20 bp, synthetic construct
  misc_feature 1..20: note = chemically synthesized
  source 1..20: mol_type = other DNA
cccagatttaaggatctcaa

SEQ ID NO: 8066 - DNA, 20 bp, synthetic construct
  misc_feature 1..20: note = chemically synthesized
  source 1..20: mol_type = other DNA
aggggagggactgttccagt

SEQ ID NO: 8067 - DNA, 20 bp, synthetic construct
  misc_feature 1..20: note = chemically synthesized
  source 1..20: mol_type = other DNA
agaacacagggcccagcttc

SEQ ID NO: 8068 - DNA, 20 bp, synthetic construct
  misc_feature 1..20: note = chemically synthesized
  source 1..20: mol_type = other DNA
ctggaggcctctgccactgg

SEQ ID NO: 8069 - DNA, 20 bp, synthetic construct
  misc_feature 1..20: note = chemically synthesized
  source 1..20: mol_type = other DNA
cattcacagatcccccttct

SEQ ID NO: 8070 - DNA, 20 bp, synthetic construct
  misc_feature 1..20: note = chemically synthesized
  source 1..20: mol_type = other DNA
ggatgtgtgcctaggcaggg

SEQ ID NO: 8071 - DNA, 20 bp, synthetic construct
  misc_feature 1..20: note = chemically synthesized
  source 1..20: mol_type = other DNA
gtctcccagtcccccagctc

SEQ ID NO: 8072 - DNA, 20 bp, synthetic construct
  misc_feature 1..20: note = chemically synthesized
  source 1..20: mol_type = other DNA
gggctttgcacacagctgat

SEQ ID NO: 8073 - DNA, 20 bp, synthetic construct
  misc_feature 1..20: note = chemically synthesized
  source 1..20: mol_type = other DNA
acacagctgatgtgaatatc

SEQ ID NO: 8074 - DNA, 20 bp, synthetic construct
  misc_feature 1..20: note = chemically synthesized
  source 1..20: mol_type = other DNA
gaatatcctgagtcgtgtgc

SEQ ID NO: 8075 - DNA, 20 bp, synthetic construct
  misc_feature 1..20: note = chemically synthesized
  source 1..20: mol_type = other DNA
gtatatttatacatggtaat

SEQ ID NO: 8076 - DNA, 20 bp, synthetic construct
  misc_feature 1..20: note = chemically synthesized
  source 1..20: mol_type = other DNA
ttatacatggtaatatgggt

SEQ ID NO: 8077 - DNA, 20 bp, synthetic construct
  misc_feature 1..20: note = chemically synthesized
  source 1..20: mol_type = other DNA
taatatgggtgcgagtgtgt

SEQ ID NO: 8078 - DNA, 20 bp, synthetic construct
  misc_feature 1..20: note = chemically synthesized
  source 1..20: mol_type = other DNA
tgtgtgtaatgctcaaatgc

SEQ ID NO: 8079 - DNA, 20 bp, synthetic construct
  misc_feature 1..20: note = chemically synthesized
  source 1..20: mol_type = other DNA
gctggtggtcatctgtgtga

SEQ ID NO: 8080 - DNA, 20 bp, synthetic construct
  misc_feature 1..20: note = chemically synthesized
  source 1..20: mol_type = other DNA
gtgtgactgggtcccaaagt

SEQ ID NO: 8081 - DNA, 20 bp, synthetic construct
  misc_feature 1..20: note = chemically synthesized
  source 1..20: mol_type = other DNA
tgagggtcacgggggccagc

SEQ ID NO: 8082 - DNA, 20 bp, synthetic construct
  misc_feature 1..20: note = chemically synthesized
  source 1..20: mol_type = other DNA
ggggccagcagggatgggca

SEQ ID NO: 8083 - DNA, 20 bp, synthetic construct
  misc_feature 1..20: note = chemically synthesized
  source 1..20: mol_type = other DNA
cgccctttgccctcgcttcc

SEQ ID NO: 8084 - DNA, 20 bp, synthetic construct
  misc_feature 1..20: note = chemically synthesized
  source 1..20: mol_type = other DNA
ggggaggctcagtcaggggc

SEQ ID NO: 8085 - DNA, 20 bp, synthetic construct
  misc_feature 1..20: note = chemically synthesized
  source 1..20: mol_type = other DNA
tgggaagagttcttctctcc

SEQ ID NO: 8086 - DNA, 20 bp, synthetic construct
  misc_feature 1..20: note = chemically synthesized
  source 1..20: mol_type = other DNA
atccagaactgacacggatg

SEQ ID NO: 8087 - DNA, 20 bp, synthetic construct
  misc_feature 1..20: note = chemically synthesized
  source 1..20: mol_type = other DNA
cattatgttcaaaaaattaa

SEQ ID NO: 8088 - DNA, 20 bp, synthetic construct
  misc_feature 1..20: note = chemically synthesized
  source 1..20: mol_type = other DNA
ctactcgggaggctgaggca

SEQ ID NO: 8089 - DNA, 20 bp, synthetic construct
  misc_feature 1..20: note = chemically synthesized
  source 1..20: mol_type = other DNA
tccgcctccaaaaaaaaaaa

SEQ ID NO: 8090 - DNA, 20 bp, synthetic construct
  misc_feature 1..20: note = chemically synthesized
  source 1..20: mol_type = other DNA
ctccaaaaaaaaaaaaaaga

SEQ ID NO: 8091 - DNA, 20 bp, synthetic construct
  misc_feature 1..20: note = chemically synthesized
  source 1..20: mol_type = other DNA
aaaaaaaaaaaaaagaaaag

SEQ ID NO: 8092 - DNA, 20 bp, synthetic construct
  misc_feature 1..20: note = chemically synthesized
  source 1..20: mol_type = other DNA
aaaaaaaaagaaaagaaaga

SEQ ID NO: 8093 - DNA, 20 bp, synthetic construct
  misc_feature 1..20: note = chemically synthesized
  source 1..20: mol_type = other DNA
tggatggaaataatggaaga

SEQ ID NO: 8094 - DNA, 20 bp, synthetic construct
  misc_feature 1..20: note = chemically synthesized
  source 1..20: mol_type = other DNA
aatggaagatgagaaatgcg

SEQ ID NO: 8095 - DNA, 20 bp, synthetic construct
  misc_feature 1..20: note = chemically synthesized
  source 1..20: mol_type = other DNA
ctctataaaatgaaacactg

SEQ ID NO: 8096 - DNA, 20 bp, synthetic construct
  misc_feature 1..20: note = chemically synthesized
  source 1..20: mol_type = other DNA
aaatgaaacactgggagaaa

SEQ ID NO: 8097 - DNA, 20 bp, synthetic construct
  misc_feature 1..20: note = chemically synthesized
  source 1..20: mol_type = other DNA
aaaagaattaaaaaatggaa

SEQ ID NO: 8098 - DNA, 20 bp, synthetic construct
  misc_feature 1..20: note = chemically synthesized
  source 1..20: mol_type = other DNA
atgcataattgaaatcttta

SEQ ID NO: 8099 - DNA, 20 bp, synthetic construct
  misc_feature 1..20: note = chemically synthesized
  source 1..20: mol_type = other DNA
tttaaaagaaaaagggggta

SEQ ID NO: 8100 - DNA, 20 bp, synthetic construct
  misc_feature 1..20: note = chemically synthesized
  source 1..20: mol_type = other DNA
agctcactctcccattaatt

SEQ ID NO: 8101 - DNA, 20 bp, synthetic construct
  misc_feature 1..20: note = chemically synthesized
  source 1..20: mol_type = other DNA
gacagagggggagcaaagcc

SEQ ID NO: 8102 - DNA, 20 bp, synthetic construct
  misc_feature 1..20: note = chemically synthesized
  source 1..20: mol_type = other DNA
caaattaaaaaaaatttttt

SEQ ID NO: 8103 - DNA, 20 bp, synthetic construct
  misc_feature 1..20: note = chemically synthesized
  source 1..20: mol_type = other DNA
ggtacatagtgaacactcag

SEQ ID NO: 8104 - DNA, 20 bp, synthetic construct
  misc_feature 1..20: note = chemically synthesized
  source 1..20: mol_type = other DNA
tgctgaatcttctgagggtg

SEQ ID NO: 8105 - DNA, 20 bp, synthetic construct
  misc_feature 1..20: note = chemically synthesized
  source 1..20: mol_type = other DNA
tgtgatctccattttacaca

SEQ ID NO: 8106 - DNA, 20 bp, synthetic construct
  misc_feature 1..20: note = chemically synthesized
  source 1..20: mol_type = other DNA
acacgagaaaatggaagcat

SEQ ID NO: 8107 - DNA, 20 bp, synthetic construct
  misc_feature 1..20: note = chemically synthesized
  source 1..20: mol_type = other DNA
acacattgctcacttcactc

SEQ ID NO: 8108 - DNA, 20 bp, synthetic construct
  misc_feature 1..20: note = chemically synthesized
  source 1..20: mol_type = other DNA
cttctctccccagaaacaat

SEQ ID NO: 8109 - DNA, 20 bp, synthetic construct
  misc_feature 1..20: note = chemically synthesized
  source 1..20: mol_type = other DNA
tccccagaaacaatcaaaac

SEQ ID NO: 8110 - DNA, 20 bp, synthetic construct
  misc_feature 1..20: note = chemically synthesized
  source 1..20: mol_type = other DNA
agctgagagtccgaggagac

SEQ ID NO: 8111 - DNA, 20 bp, synthetic construct
  misc_feature 1..20: note = chemically synthesized
  source 1..20: mol_type = other DNA
caaggcatgcaatgaaacgg

SEQ ID NO: 8112 - DNA, 20 bp, synthetic construct
  misc_feature 1..20: note = chemically synthesized
  source 1..20: mol_type = other DNA
gaattagcaggcaaggatgg

SEQ ID NO: 8113 - DNA, 20 bp, synthetic construct
  misc_feature 1..20: note = chemically synthesized
  source 1..20: mol_type = other DNA
ccaggtgaacttctagagat

SEQ ID NO: 8114 - DNA, 20 bp, synthetic construct
  misc_feature 1..20: note = chemically synthesized
  source 1..20: mol_type = other DNA
aactacaatgtctgaaatga

SEQ ID NO: 8115 - DNA, 20 bp, synthetic construct
  misc_feature 1..20: note = chemically synthesized
  source 1..20: mol_type = other DNA
aaaagaaaagaaagaaaaga

SEQ ID NO: 8116 - DNA, 20 bp, synthetic construct
  misc_feature 1..20: note = chemically synthesized
  source 1..20: mol_type = other DNA
gactagtctgggcagcatgg

SEQ ID NO: 8117 - DNA, 20 bp, synthetic construct
  misc_feature 1..20: note = chemically synthesized
  source 1..20: mol_type = other DNA
ggcaaaacccctctacatgg

SEQ ID NO: 8118 - DNA, 20 bp, synthetic construct
  misc_feature 1..20: note = chemically synthesized
  source 1..20: mol_type = other DNA
tgccactggctggatgggag

SEQ ID NO: 8119 - DNA, 20 bp, synthetic construct
  misc_feature 1..20: note = chemically synthesized
  source 1..20: mol_type = other DNA
gaggaggcataacctgggcg

SEQ ID NO: 8120 - DNA, 20 bp, synthetic construct
  misc_feature 1..20: note = chemically synthesized
  source 1..20: mol_type = other DNA
ggccatgggggggggtcatc

SEQ ID NO: 8121 - DNA, 20 bp, synthetic construct
  misc_feature 1..20: note = chemically synthesized
  source 1..20: mol_type = other DNA
cctgagaagggggatctgtg

SEQ ID NO: 8122 - DNA, 20 bp, synthetic construct
  misc_feature 1..20: note = chemically synthesized
  source 1..20: mol_type = other DNA
tcttctaaggctcctgtccc

SEQ ID NO: 8123 - DNA, 20 bp, synthetic construct
  misc_feature 1..20: note = chemically synthesized
  source 1..20: mol_type = other DNA
tcctccccagcgccctttgc

SEQ ID NO: 8124 - DNA, 20 bp, synthetic construct
  misc_feature 1..20: note = chemically synthesized
  source 1..20: mol_type = other DNA
cctccactcagagggtcctg

SEQ ID NO: 8125 - DNA, 20 bp, synthetic construct
  misc_feature 1..20: note = chemically synthesized
  source 1..20: mol_type = other DNA
tgcaccagcattcaatttct

SEQ ID NO: 8126 - DNA, 20 bp, synthetic construct
  misc_feature 1..20: note = chemically synthesized
  source 1..20: mol_type = other DNA
tggagatcacagtcgtagct

SEQ ID NO: 8127 - DNA, 20 bp, synthetic construct
  misc_feature 1..20: note = chemically synthesized
  source 1..20: mol_type = other DNA
atcacagtcgtagctacccg

SEQ ID NO: 8128 - DNA, 20 bp, synthetic construct
  misc_feature 1..20: note = chemically synthesized
  source 1..20: mol_type = other DNA
tagatgagttaaaatatgta

SEQ ID NO: 8129 - DNA, 20 bp, synthetic construct
  misc_feature 1..20: note = chemically synthesized
  source 1..20: mol_type = other DNA
atgtaatgtgcttcttaggc

SEQ ID NO: 8130 - DNA, 20 bp, synthetic construct
  misc_feature 1..20: note = chemically synthesized
  source 1..20: mol_type = other DNA
aacagacaactatagaacat

SEQ ID NO: 8131 - DNA, 20 bp, synthetic construct
  misc_feature 1..20: note = chemically synthesized
  source 1..20: mol_type = other DNA
aacaggaaccctccgatcac

SEQ ID NO: 8132 - DNA, 20 bp, synthetic construct
  misc_feature 1..20: note = chemically synthesized
  source 1..20: mol_type = other DNA
accctccgatcaccccagct

SEQ ID NO: 8133 - DNA, 20 bp, synthetic construct
  misc_feature 1..20: note = chemically synthesized
  source 1..20: mol_type = other DNA
aaacgatcaaactgactcta

SEQ ID NO: 8134 - DNA, 20 bp, synthetic construct
  misc_feature 1..20: note = chemically synthesized
  source 1..20: mol_type = other DNA
gacaatgtctggcagccaat

SEQ ID NO: 8135 - DNA, 20 bp, synthetic construct
  misc_feature 1..20: note = chemically synthesized
  source 1..20: mol_type = other DNA
aatggcatgaacccgggagg

SEQ ID NO: 8136 - DNA, 20 bp, synthetic construct
  misc_feature 1..20: note = chemically synthesized
  source 1..20: mol_type = other DNA
ctctaaattctgtcaccctc

SEQ ID NO: 8137 - DNA, 20 bp, synthetic construct
  misc_feature 1..20: note = chemically synthesized
  source 1..20: mol_type = other DNA
ttgggaggctgaggtgggag

SEQ ID NO: 8138 - DNA, 20 bp, synthetic construct
  misc_feature 1..20: note = chemically synthesized
  source 1..20: mol_type = other DNA
aagatacttaggtccttcag

SEQ ID NO: 8139 - DNA, 20 bp, synthetic construct
  misc_feature 1..20: note = chemically synthesized
  source 1..20: mol_type = other DNA
ctgcacacttgcctttcaaa

SEQ ID NO: 8140 - DNA, 20 bp, synthetic construct
  misc_feature 1..20: note = chemically synthesized
  source 1..20: mol_type = other DNA
tcaaaaatggatttcctctc

SEQ ID NO: 8141 - DNA, 20 bp, synthetic construct
  misc_feature 1..20: note = chemically synthesized
  source 1..20: mol_type = other DNA
ggctggggctggggcagagg

SEQ ID NO: 8142 - DNA, 20 bp, synthetic construct
  misc_feature 1..20: note = chemically synthesized
  source 1..20: mol_type = other DNA
ccatttttgaaaggcaagtg

SEQ ID NO: 8143 - DNA, 20 bp, synthetic construct
  misc_feature 1..20: note = chemically synthesized
  source 1..20: mol_type = other DNA
aaaggcaagtgtgcagtttc

SEQ ID NO: 8144 - DNA, 20 bp, synthetic construct
  misc_feature 1..20: note = chemically synthesized
  source 1..20: mol_type = other DNA
tgctccccctctgtctcagc

SEQ ID NO: 8145 - DNA, 20 bp, synthetic construct
  misc_feature 1..20: note = chemically synthesized
  source 1..20: mol_type = other DNA
gactgaggagggcccgacac

SEQ ID NO: 8146 - DNA, 20 bp, synthetic construct
  misc_feature 1..20: note = chemically synthesized
  source 1..20: mol_type = other DNA
acgtatgtgcatatgaggaa

SEQ ID NO: 8147 - DNA, 20 bp, synthetic construct
  misc_feature 1..20: note = chemically synthesized
  source 1..20: mol_type = other DNA
tgtgtattgtgtgagtgtat

SEQ ID NO: 8148 - DNA, 20 bp, synthetic construct
  misc_feature 1..20: note = chemically synthesized
  source 1..20: mol_type = other DNA
gtgtgtgtgttagtgtgtgt

SEQ ID NO: 8149 - DNA, 20 bp, synthetic construct
  misc_feature 1..20: note = chemically synthesized
  source 1..20: mol_type = other DNA
atgttgcccaggctggtggg

SEQ ID NO: 8150 - DNA, 20 bp, synthetic construct
  misc_feature 1..20: note = chemically synthesized
  source 1..20: mol_type = other DNA
tccatggaggcaggaggagc

SEQ ID NO: 8151 - DNA, 20 bp, synthetic construct
  misc_feature 1..20: note = chemically synthesized
  source 1..20: mol_type = other DNA
aggcaggaggagcaggggct

SEQ ID NO: 8152 - DNA, 20 bp, synthetic construct
  misc_feature 1..20: note = chemically synthesized
  source 1..20: mol_type = other DNA
caggggcttggagcttagga

SEQ ID NO: 8153 - DNA, 20 bp, synthetic construct
  misc_feature 1..20: note = chemically synthesized
  source 1..20: mol_type = other DNA
cttctgagggtgacagaatt

SEQ ID NO: 8154 - DNA, 20 bp, synthetic construct
  misc_feature 1..20: note = chemically synthesized
  source 1..20: mol_type = other DNA
cagaatttagagtttgagca

SEQ ID NO: 8155 - DNA, 20 bp, synthetic construct
  misc_feature 1..20: note = chemically synthesized
  source 1..20: mol_type = other DNA
gcaggaggcttggagagagg

SEQ ID NO: 8156 - DNA, 20 bp, synthetic construct
  misc_feature 1..20: note = chemically synthesized
  source 1..20: mol_type = other DNA
catcttccacttgtctcagc

SEQ ID NO: 8157 - DNA, 20 bp, synthetic construct
  misc_feature 1..20: note = chemically synthesized
  source 1..20: mol_type = other DNA
ctgctaccccctttttcttt

SEQ ID NO: 8158 - DNA, 20 bp, synthetic construct
  misc_feature 1..20: note = chemically synthesized
  source 1..20: mol_type = other DNA
tttttaattcttttttctcc

SEQ ID NO: 8159 - DNA, 20 bp, synthetic construct
  misc_feature 1..20: note = chemically synthesized
  source 1..20: mol_type = other DNA
cccctcccctcctttccttc

SEQ ID NO: 8160 - DNA, 20 bp, synthetic construct
  misc_feature 1..20: note = chemically synthesized
  source 1..20: mol_type = other DNA
tgttgcccaggctggaatgc

SEQ ID NO: 8161 - DNA, 20 bp, synthetic construct
  misc_feature 1..20: note = chemically synthesized
  source 1..20: mol_type = other DNA
taaaaatttttttttgtaga

SEQ ID NO: 8162 - DNA, 20 bp, synthetic construct
  misc_feature 1..20: note = chemically synthesized
  source 1..20: mol_type = other DNA
gagacggttttgccatgtag

SEQ ID NO: 8163 - DNA, 20 bp, synthetic construct
  misc_feature 1..20: note = chemically synthesized
  source 1..20: mol_type = other DNA
agtcttgagctcctgggctc

SEQ ID NO: 8164 - DNA, 20 bp, synthetic construct
  misc_feature 1..20: note = chemically synthesized
  source 1..20: mol_type = other DNA
cgtgtcgacctcccaaagtg

SEQ ID NO: 8165 - DNA, 20 bp, synthetic construct
  misc_feature 1..20: note = chemically synthesized
  source 1..20: mol_type = other DNA
tcttccattatttccatcca

SEQ ID NO: 8166 - DNA, 20 bp, synthetic construct
  misc_feature 1..20: note = chemically synthesized
  source 1..20: mol_type = other DNA
ttttgtatttttagtagaga

SEQ ID NO: 8167 - DNA, 20 bp, synthetic construct
  misc_feature 1..20: note = chemically synthesized
  source 1..20: mol_type = other DNA
cgccttggcctcccacagtg

SEQ ID NO: 8168 - DNA, 20 bp, synthetic construct
  misc_feature 1..20: note = chemically synthesized
  source 1..20: mol_type = other DNA
tgagccacggcgcctggcca

SEQ ID NO: 8169 - DNA, 20 bp, synthetic construct
  misc_feature 1..20: note = chemically synthesized
  source 1..20: mol_type = other DNA
tgttttttcatttcagacat

SEQ ID NO: 8170 - DNA, 20 bp, synthetic construct
  misc_feature 1..20: note = chemically synthesized
  source 1..20: mol_type = other DNA
taatgggatatggctataat

SEQ ID NO: 8171 - DNA, 20 bp, synthetic construct
  misc_feature 1..20: note = chemically synthesized
  source 1..20: mol_type = other DNA
atgaacctcctcgttatgca

SEQ ID NO: 8172 - DNA, 20 bp, synthetic construct
  misc_feature 1..20: note = chemically synthesized
  source 1..20: mol_type = other DNA
cctcgttatgcattgtgttt

SEQ ID NO: 8173 - DNA, 20 bp, synthetic construct
  misc_feature 1..20: note = chemically synthesized
  source 1..20: mol_type = other DNA
ttcattgcatgccttgtaat

SEQ ID NO: 8174 - DNA, 20 bp, synthetic construct
  misc_feature 1..20: note = chemically synthesized
  source 1..20: mol_type = other DNA
ttgtattcctctaaatgttc

SEQ ID NO: 8175 - DNA, 20 bp, synthetic construct
  misc_feature 1..20: note = chemically synthesized
  source 1..20: mol_type = other DNA
atgcagttaagcaacttaga

SEQ ID NO: 8176 - DNA, 20 bp, synthetic construct
  misc_feature 1..20: note = chemically synthesized
  source 1..20: mol_type = other DNA
aagcaacttagagtcagttt

SEQ ID NO: 8177 - DNA, 20 bp, synthetic construct
  misc_feature 1..20: note = chemically synthesized
  source 1..20: mol_type = other DNA
gtttgatcgtttgaactctt

SEQ ID NO: 8178 - DNA, 20 bp, synthetic construct
  misc_feature 1..20: note = chemically synthesized
  source 1..20: mol_type = other DNA
tggggtgatcggagggttcc

SEQ ID NO: 8179 - DNA, 20 bp, synthetic construct
  misc_feature 1..20: note = chemically synthesized
  source 1..20: mol_type = other DNA
gtgatcggagggttcctgtt

SEQ ID NO: 8180 - DNA, 20 bp, synthetic construct
  misc_feature 1..20: note = chemically synthesized
  source 1..20: mol_type = other DNA
agctgccatgttctatagtt

SEQ ID NO: 8181 - DNA, 20 bp, synthetic construct
  misc_feature 1..20: note = chemically synthesized
  source 1..20: mol_type = other DNA
catgttctatagttgtctgt

SEQ ID NO: 8182 - DNA, 20 bp, synthetic construct
  misc_feature 1..20: note = chemically synthesized
  source 1..20: mol_type = other DNA
tctatagttgtctgtttttg

SEQ ID NO: 8183 - DNA, 20 bp, synthetic construct
  misc_feature 1..20: note = chemically synthesized
  source 1..20: mol_type = other DNA
tagttgtctgtttttgtttt

SEQ ID NO: 8184 - DNA, 20 bp, synthetic construct
  misc_feature 1..20: note = chemically synthesized
  source 1..20: mol_type = other DNA
ctgggctaccctgtgggcag

SEQ ID NO: 8185 - DNA, 20 bp, synthetic construct
  misc_feature 1..20: note = chemically synthesized
  source 1..20: mol_type = other DNA
cagggactcagccatggagg

SEQ ID NO: 8186 - DNA, 20 bp, synthetic construct
  misc_feature 1..20: note = chemically synthesized
  source 1..20: mol_type = other DNA
tggggaacaccgtggtcatg

SEQ ID NO: 8187 - DNA, 20 bp, synthetic construct
  misc_feature 1..20: note = chemically synthesized
  source 1..20: mol_type = other DNA
ggcaggaagtgacctgggga

SEQ ID NO: 8188 - DNA, 20 bp, synthetic construct
  misc_feature 1..20: note = chemically synthesized
  source 1..20: mol_type = other DNA
ggtccaaggcctagaaggtg

SEQ ID NO: 8189 - DNA, 20 bp, synthetic construct
  misc_feature 1..20: note = chemically synthesized
  source 1..20: mol_type = other DNA
ggtcatgagtgtgtgcaaat

SEQ ID NO: 8190 - DNA, 20 bp, synthetic construct
  misc_feature 1..20: note = chemically synthesized
  source 1..20: mol_type = other DNA
gtgtgagtgtgtgagtgtgt

SEQ ID NO: 8191 - DNA, 20 bp, synthetic construct
  misc_feature 1..20: note = chemically synthesized
  source 1..20: mol_type = other DNA
ggagcaaatttagtgtggaa

SEQ ID NO: 8192 - DNA, 20 bp, synthetic construct
  misc_feature 1..20: note = chemically synthesized
  source 1..20: mol_type = other DNA
aacaggtgggacctggaggg

SEQ ID NO: 8193 - DNA, 20 bp, synthetic construct
  misc_feature 1..20: note = chemically synthesized
  source 1..20: mol_type = other DNA
agtgggctatggtggaatga

SEQ ID NO: 8194 - DNA, 20 bp, synthetic construct
  misc_feature 1..20: note = chemically synthesized
  source 1..20: mol_type = other DNA
caggggagggactgttccag

SEQ ID NO: 8195 - DNA, 20 bp, synthetic construct
  misc_feature 1..20: note = chemically synthesized
  source 1..20: mol_type = other DNA
attttaggaagaacacaggg

SEQ ID NO: 8196 - DNA, 20 bp, synthetic construct
  misc_feature 1..20: note = chemically synthesized
  source 1..20: mol_type = other DNA
cagtcccccagctccaggat

SEQ ID NO: 8197 - DNA, 20 bp, synthetic construct
  misc_feature 1..20: note = chemically synthesized
  source 1..20: mol_type = other DNA
gtgtgcatgggtgtgtgtgc

SEQ ID NO: 8198 - DNA, 20 bp, synthetic construct
  misc_feature 1..20: note = chemically synthesized
  source 1..20: mol_type = other DNA
cccgcccaggttatgcctcc

SEQ ID NO: 8199 - DNA, 20 bp, synthetic construct
  misc_feature 1..20: note = chemically synthesized
  source 1..20: mol_type = other DNA
cacagcgtctctgctccatg

SEQ ID NO: 8200 - DNA, 20 bp, synthetic construct
  misc_feature 1..20: note = chemically synthesized
  source 1..20: mol_type = other DNA
ctgctccatggtctgcttca

SEQ ID NO: 8201 - DNA, 20 bp, synthetic construct
  misc_feature 1..20: note = chemically synthesized
  source 1..20: mol_type = other DNA
tctgcttcagtctgcttgcc

SEQ ID NO: 8202 - DNA, 22 bp, synthetic construct
  misc_feature 1..22: note = chemically synthesized
  source 1..22: mol_type = other DNA
cccatgtctctttccctacccc

SEQ ID NO: 8203 - DNA, 22 bp, synthetic construct
  misc_feature 1..22: note = chemically synthesized
  source 1..22: mol_type = other DNA
tttccctaccccttgcccatcc

SEQ ID NO: 8204 - DNA, 22 bp, synthetic construct
  misc_feature 1..22: note = chemically synthesized
  source 1..22: mol_type = other DNA
tccctaccccttgcccatccct

SEQ ID NO: 8205 - DNA, 22 bp, synthetic construct
  misc_feature 1..22: note = chemically synthesized
  source 1..22: mol_type = other DNA
ccctaccccttgcccatccctg

SEQ ID NO: 8206 - DNA, 22 bp, synthetic construct
  misc_feature 1..22: note = chemically synthesized
  source 1..22: mol_type = other DNA
cctaccccttgcccatccctgc

SEQ ID NO: 8207 - DNA, 22 bp, synthetic construct
  misc_feature 1..22: note = chemically synthesized
  source 1..22: mol_type = other DNA
ccccttgcccatccctgctggc

SEQ ID NO: 8208 - DNA, 22 bp, synthetic construct
  misc_feature 1..22: note = chemically synthesized
  source 1..22: mol_type = other DNA
gcccatccctgctggcccccgt

SEQ ID NO: 8209 - DNA, 22 bp, synthetic construct
  misc_feature 1..22: note = chemically synthesized
  source 1..22: mol_type = other DNA
cccatccctgctggcccccgtg

SEQ ID NO: 8210 - DNA, 22 bp, synthetic construct
  misc_feature 1..22: note = chemically synthesized
  source 1..22: mol_type = other DNA
ctggcccccgtgaccctcactt

SEQ ID NO: 8211 - DNA, 22 bp, synthetic construct
  misc_feature 1..22: note = chemically synthesized
  source 1..22: mol_type = other DNA
gcccccgtgaccctcactttgg

SEQ ID NO: 8212 - DNA, 22 bp, synthetic construct
  misc_feature 1..22: note = chemically synthesized
  source 1..22: mol_type = other DNA
actttgggacccagtcacacag

SEQ ID NO: 8213 - DNA, 22 bp, synthetic construct
  misc_feature 1..22: note = chemically synthesized
  source 1..22: mol_type = other DNA
tgggacccagtcacacagatga

SEQ ID NO: 8214 - DNA, 22 bp, synthetic construct
  misc_feature 1..22: note = chemically synthesized
  source 1..22: mol_type = other DNA
gggacccagtcacacagatgac

SEQ ID NO: 8215 - DNA, 22 bp, synthetic construct
  misc_feature 1..22: note = chemically synthesized
  source 1..22: mol_type = other DNA
ggacccagtcacacagatgacc

SEQ ID NO: 8216 - DNA, 22 bp, synthetic construct
  misc_feature 1..22: note = chemically synthesized
  source 1..22: mol_type = other DNA
aagctcagggcaagcagactga

SEQ ID NO: 8217 - DNA, 22 bp, synthetic construct
  misc_feature 1..22: note = chemically synthesized
  source 1..22: mol_type = other DNA
agggcaagcagactgaagcaga

SEQ ID NO: 8218 - DNA, 22 bp, synthetic construct
  misc_feature 1..22: note = chemically synthesized
  source 1..22: mol_type = other DNA
aagcagaccatggagcagagac

SEQ ID NO: 8219 - DNA, 22 bp, synthetic construct
  misc_feature 1..22: note = chemically synthesized
  source 1..22: mol_type = other DNA
tgccaggggctgggcaggaggt

SEQ ID NO: 8220 - DNA, 22 bp, synthetic construct
  misc_feature 1..22: note = chemically synthesized
  source 1..22: mol_type = other DNA
ggcaggaggtggccctgtggga

SEQ ID NO: 8221 - DNA, 22 bp, synthetic construct
  misc_feature 1..22: note = chemically synthesized
  source 1..22: mol_type = other DNA
tgggagaggggcatcaggagcc

SEQ ID NO: 8222 - DNA, 22 bp, synthetic construct
  misc_feature 1..22: note = chemically synthesized
  source 1..22: mol_type = other DNA
ggtgtggggagccggagggtaa

SEQ ID NO: 8223 - DNA, 22 bp, synthetic construct
  misc_feature 1..22: note = chemically synthesized
  source 1..22: mol_type = other DNA
aggaggcataacctgggcgggg

SEQ ID NO: 8224 - DNA, 22 bp, synthetic construct
  misc_feature 1..22: note = chemically synthesized
  source 1..22: mol_type = other DNA
ggcggggggattggttggggcc

SEQ ID NO: 8225 - DNA, 22 bp, synthetic construct
  misc_feature 1..22: note = chemically synthesized
  source 1..22: mol_type = other DNA
gttggggccatgggggggggtc

SEQ ID NO: 8226 - DNA, 22 bp, synthetic construct
  misc_feature 1..22: note = chemically synthesized
  source 1..22: mol_type = other DNA
gggccatgggggggggtcatca

SEQ ID NO: 8227 - DNA, 22 bp, synthetic construct
  misc_feature 1..22: note = chemically synthesized
  source 1..22: mol_type = other DNA
tgaccccagcatttgagcatta

SEQ ID NO: 8228 - DNA, 22 bp, synthetic construct
  misc_feature 1..22: note = chemically synthesized
  source 1..22: mol_type = other DNA
gaccccagcatttgagcattac

SEQ ID NO: 8229 - DNA, 22 bp, synthetic construct
  misc_feature 1..22: note = chemically synthesized
  source 1..22: mol_type = other DNA
accccagcatttgagcattaca

SEQ ID NO: 8230 - DNA, 22 bp, synthetic construct
  misc_feature 1..22: note = chemically synthesized
  source 1..22: mol_type = other DNA
gagcattacacacacactctta

SEQ ID NO: 8231 - DNA, 22 bp, synthetic construct
  misc_feature 1..22: note = chemically synthesized
  source 1..22: mol_type = other DNA
agcattacacacacactcttac

SEQ ID NO: 8232 - DNA, 22 bp, synthetic construct
  misc_feature 1..22: note = chemically synthesized
  source 1..22: mol_type = other DNA
cacacacactcttacacactcg

SEQ ID NO: 8233 - DNA, 22 bp, synthetic construct
  misc_feature 1..22: note = chemically synthesized
  source 1..22: mol_type = other DNA
ttacacactcgcacccatatta

SEQ ID NO: 8234 - DNA, 22 bp, synthetic construct
  misc_feature 1..22: note = chemically synthesized
  source 1..22: mol_type = other DNA
acacactcgcacccatattacc

SEQ ID NO: 8235 - DNA, 22 bp, synthetic construct
  misc_feature 1..22: note = chemically synthesized
  source 1..22: mol_type = other DNA
cacactcgcacccatattacca

SEQ ID NO: 8236 - DNA, 22 bp, synthetic construct
  misc_feature 1..22: note = chemically synthesized
  source 1..22: mol_type = other DNA
gcacccatattaccatgtataa

SEQ ID NO: 8237 - DNA, 22 bp, synthetic construct
  misc_feature 1..22: note = chemically synthesized
  source 1..22: mol_type = other DNA
ccatgtataaatatacacacgc

SEQ ID NO: 8238 - DNA, 22 bp, synthetic construct
  misc_feature 1..22: note = chemically synthesized
  source 1..22: mol_type = other DNA
atctggtgcacacacacccatg

SEQ ID NO: 8239 - DNA, 22 bp, synthetic construct
  misc_feature 1..22: note = chemically synthesized
  source 1..22: mol_type = other DNA
gtgcacacacacccatgcacac

SEQ ID NO: 8240 - DNA, 22 bp, synthetic construct
  misc_feature 1..22: note = chemically synthesized
  source 1..22: mol_type = other DNA
aggatattcacatcagctgtgt

SEQ ID NO: 8241 - DNA, 22 bp, synthetic construct
  misc_feature 1..22: note = chemically synthesized
  source 1..22: mol_type = other DNA
acatcagctgtgtgcaaagccc

SEQ ID NO: 8242 - DNA, 22 bp, synthetic construct
  misc_feature 1..22: note = chemically synthesized
  source 1..22: mol_type = other DNA
tgtgcaaagcccggatcctgga

SEQ ID NO: 8243 - DNA, 22 bp, synthetic construct
  misc_feature 1..22: note = chemically synthesized
  source 1..22: mol_type = other DNA
gagctgggggactgggagacgc

SEQ ID NO: 8244 - DNA, 22 bp, synthetic construct
  misc_feature 1..22: note = chemically synthesized
  source 1..22: mol_type = other DNA
ggggactgggagacgcacaggg

SEQ ID NO: 8245 - DNA, 22 bp, synthetic construct
  misc_feature 1..22: note = chemically synthesized
  source 1..22: mol_type = other DNA
ggagacgcacagggggcggggg

SEQ ID NO: 8246 - DNA, 22 bp, synthetic construct
  misc_feature 1..22: note = chemically synthesized
  source 1..22: mol_type = other DNA
cctaggcacacatcctgagaag

SEQ ID NO: 8247 - DNA, 22 bp, synthetic construct
  misc_feature 1..22: note = chemically synthesized
  source 1..22: mol_type = other DNA
ggcacacatcctgagaaggggg

SEQ ID NO: 8248 - DNA, 22 bp, synthetic construct
  misc_feature 1..22: note = chemically synthesized
  source 1..22: mol_type = other DNA
agaagggggatctgtgaatggt

SEQ ID NO: 8249 - DNA, 22 bp, synthetic construct
  misc_feature 1..22: note = chemically synthesized
  source 1..22: mol_type = other DNA
tgaatggttttcctcccatcca

SEQ ID NO: 8250 - DNA, 22 bp, synthetic construct
  misc_feature 1..22: note = chemically synthesized
  source 1..22: mol_type = other DNA
tcctcccatccagccagtggca

SEQ ID NO: 8251 - DNA, 22 bp, synthetic construct
  misc_feature 1..22: note = chemically synthesized
  source 1..22: mol_type = other DNA
cctcccatccagccagtggcag

SEQ ID NO: 8252 - DNA, 22 bp, synthetic construct
  misc_feature 1..22: note = chemically synthesized
  source 1..22: mol_type = other DNA
ctcccatccagccagtggcaga

SEQ ID NO: 8253 - DNA, 22 bp, synthetic construct
  misc_feature 1..22: note = chemically synthesized
  source 1..22: mol_type = other DNA
ccatccagccagtggcagaggc

SEQ ID NO: 8254 - DNA, 22 bp, synthetic construct
  misc_feature 1..22: note = chemically synthesized
  source 1..22: mol_type = other DNA
cagatcacctcgggccttagtc

SEQ ID NO: 8255 - DNA, 22 bp, synthetic construct
  misc_feature 1..22: note = chemically synthesized
  source 1..22: mol_type = other DNA
gggccttagtctcagctcttct

SEQ ID NO: 8256 - DNA, 22 bp, synthetic construct
  misc_feature 1..22: note = chemically synthesized
  source 1..22: mol_type = other DNA
agtctcagctcttctaaggctc

SEQ ID NO: 8257 - DNA, 22 bp, synthetic construct
  misc_feature 1..22: note = chemically synthesized
  source 1..22: mol_type = other DNA
gtctcagctcttctaaggctcc

SEQ ID NO: 8258 - DNA, 22 bp, synthetic construct
  misc_feature 1..22: note = chemically synthesized
  source 1..22: mol_type = other DNA
agctcttctaaggctcctgtcc

SEQ ID NO: 8259 - DNA, 22 bp, synthetic construct
  misc_feature 1..22: note = chemically synthesized
  source 1..22: mol_type = other DNA
ttctaaggctcctgtcccctca

SEQ ID NO: 8260 - DNA, 22 bp, synthetic construct
  misc_feature 1..22: note = chemically synthesized
  source 1..22: mol_type = other DNA
ctaaggctcctgtcccctcaga

SEQ ID NO: 8261 - DNA, 22 bp, synthetic construct
  misc_feature 1..22: note = chemically synthesized
  source 1..22: mol_type = other DNA
taaggctcctgtcccctcagat

SEQ ID NO: 8262 - DNA, 22 bp, synthetic construct
  misc_feature 1..22: note = chemically synthesized
  source 1..22: mol_type = other DNA
aggctcctgtcccctcagattg

SEQ ID NO: 8263 - DNA, 22 bp, synthetic construct
  misc_feature 1..22: note = chemically synthesized
  source 1..22: mol_type = other DNA
ctgtcccctcagattggagact

SEQ ID NO: 8264 - DNA, 22 bp, synthetic construct
  misc_feature 1..22: note = chemically synthesized
  source 1..22: mol_type = other DNA
tcccctcagattggagactcca

SEQ ID NO: 8265 - DNA, 22 bp, synthetic construct
  misc_feature 1..22: note = chemically synthesized
  source 1..22: mol_type = other DNA
agattggagactccagaagctg

SEQ ID NO: 8266 - DNA, 22 bp, synthetic construct
  misc_feature 1..22: note = chemically synthesized
  source 1..22: mol_type = other DNA
gagactccagaagctgggccct

SEQ ID NO: 8267 - DNA, 22 bp, synthetic construct
  misc_feature 1..22: note = chemically synthesized
  source 1..22: mol_type = other DNA
cagaagctgggccctgtgttct

SEQ ID NO: 8268 - DNA, 22 bp, synthetic construct
  misc_feature 1..22: note = chemically synthesized
  source 1..22: mol_type = other DNA
ggccctgtgttcttcctaaaat

SEQ ID NO: 8269 - DNA, 22 bp, synthetic construct
  misc_feature 1..22: note = chemically synthesized
  source 1..22: mol_type = other DNA
tgttcttcctaaaatccatact

SEQ ID NO: 8270 - DNA, 22 bp, synthetic construct
  misc_feature 1..22: note = chemically synthesized
  source 1..22: mol_type = other DNA
ttcctaaaatccatactggaac

SEQ ID NO: 8271 - DNA, 22 bp, synthetic construct
  misc_feature 1..22: note = chemically synthesized
  source 1..22: mol_type = other DNA
cctaaaatccatactggaacag

SEQ ID NO: 8272 - DNA, 22 bp, synthetic construct
  misc_feature 1..22: note = chemically synthesized
  source 1..22: mol_type = other DNA
ctaaaatccatactggaacagt

SEQ ID NO: 8273 - DNA, 22 bp, synthetic construct
  misc_feature 1..22: note = chemically synthesized
  source 1..22: mol_type = other DNA
aaatccatactggaacagtccc

SEQ ID NO: 8274 - DNA, 22 bp, synthetic construct
  misc_feature 1..22: note = chemically synthesized
  source 1..22: mol_type = other DNA
gaacagtccctcccctgccaaa

SEQ ID NO: 8275 - DNA, 22 bp, synthetic construct
  misc_feature 1..22: note = chemically synthesized
  source 1..22: mol_type = other DNA
ccctgccaaaattccattgaga

SEQ ID NO: 8276 - DNA, 22 bp, synthetic construct
  misc_feature 1..22: note = chemically synthesized
  source 1..22: mol_type = other DNA
ccaaaattccattgagatcctt

SEQ ID NO: 8277 - DNA, 22 bp, synthetic construct
  misc_feature 1..22: note = chemically synthesized
  source 1..22: mol_type = other DNA
cattgagatccttaaatctggg

SEQ ID NO: 8278 - DNA, 22 bp, synthetic construct
  misc_feature 1..22: note = chemically synthesized
  source 1..22: mol_type = other DNA
agatccttaaatctgggtcatt

SEQ ID NO: 8279 - DNA, 22 bp, synthetic construct
  misc_feature 1..22: note = chemically synthesized
  source 1..22: mol_type = other DNA
aaatctgggtcattccaccata

SEQ ID NO: 8280 - DNA, 22 bp, synthetic construct
  misc_feature 1..22: note = chemically synthesized
  source 1..22: mol_type = other DNA
aatctgggtcattccaccatag

SEQ ID NO: 8281 - DNA, 22 bp, synthetic construct
  misc_feature 1..22: note = chemically synthesized
  source 1..22: mol_type = other DNA
ggtcattccaccatagcccact

SEQ ID NO: 8282 - DNA, 22 bp, synthetic construct
  misc_feature 1..22: note = chemically synthesized
  source 1..22: mol_type = other DNA
caccatagcccactctccaagc

SEQ ID NO: 8283 - DNA, 22 bp, synthetic construct
  misc_feature 1..22: note = chemically synthesized
  source 1..22: mol_type = other DNA
tccaagcacaaccctccaggtc

SEQ ID NO: 8284 - DNA, 22 bp, synthetic construct
  misc_feature 1..22: note = chemically synthesized
  source 1..22: mol_type = other DNA
caagcacaaccctccaggtccc

SEQ ID NO: 8285 - DNA, 22 bp, synthetic construct
  misc_feature 1..22: note = chemically synthesized
  source 1..22: mol_type = other DNA
caggtcccacctgttgtcctca

SEQ ID NO: 8286 - DNA, 22 bp, synthetic construct
  misc_feature 1..22: note = chemically synthesized
  source 1..22: mol_type = other DNA
ttgtcctcatcccccaccacgc

SEQ ID NO: 8287 - DNA, 22 bp, synthetic construct
  misc_feature 1..22: note = chemically synthesized
  source 1..22: mol_type = other DNA
tcctcatcccccaccacgcaag

SEQ ID NO: 8288 - DNA, 22 bp, synthetic construct
  misc_feature 1..22: note = chemically synthesized
  source 1..22: mol_type = other DNA
atcccccaccacgcaaggcctc

SEQ ID NO: 8289 - DNA, 22 bp, synthetic construct
  misc_feature 1..22: note = chemically synthesized
  source 1..22: mol_type = other DNA
ctccccagcgccctttgccctc

SEQ ID NO: 8290 - DNA, 22 bp, synthetic construct
  misc_feature 1..22: note = chemically synthesized
  source 1..22: mol_type = other DNA
cccagcgccctttgccctcgct

SEQ ID NO: 8291 - DNA, 22 bp, synthetic construct
  misc_feature 1..22: note = chemically synthesized
  source 1..22: mol_type = other DNA
tgccctcgcttccctagaaacc

SEQ ID NO: 8292 - DNA, 22 bp, synthetic construct
  misc_feature 1..22: note = chemically synthesized
  source 1..22: mol_type = other DNA
gccctcgcttccctagaaacct

SEQ ID NO: 8293 - DNA, 22 bp, synthetic construct
  misc_feature 1..22: note = chemically synthesized
  source 1..22: mol_type = other DNA
ccctcgcttccctagaaacctc

SEQ ID NO: 8294 - DNA, 22 bp, synthetic construct
  misc_feature 1..22: note = chemically synthesized
  source 1..22: mol_type = other DNA
gcttccctagaaacctcgttcc

SEQ ID NO: 8295 - DNA, 22 bp, synthetic construct
  misc_feature 1..22: note = chemically synthesized
  source 1..22: mol_type = other DNA
ccctagaaacctcgttccacac

SEQ ID NO: 8296 - DNA, 22 bp, synthetic construct
  misc_feature 1..22: note = chemically synthesized
  source 1..22: mol_type = other DNA
cctagaaacctcgttccacact

SEQ ID NO: 8297 - DNA, 22 bp, synthetic construct
  misc_feature 1..22: note = chemically synthesized
  source 1..22: mol_type = other DNA
gaaacctcgttccacactaaat

SEQ ID NO: 8298 - DNA, 22 bp, synthetic construct
  misc_feature 1..22: note = chemically synthesized
  source 1..22: mol_type = other DNA
gttccacactaaatttgctccc

SEQ ID NO: 8299 - DNA, 22 bp, synthetic construct
  misc_feature 1..22: note = chemically synthesized
  source 1..22: mol_type = other DNA
cacactaaatttgctcccctca

SEQ ID NO: 8300 - DNA, 22 bp, synthetic construct
  misc_feature 1..22: note = chemically synthesized
  source 1..22: mol_type = other DNA
aatttgctcccctcagcccgag

SEQ ID NO: 8301 - DNA, 22 bp, synthetic construct
  misc_feature 1..22: note = chemically synthesized
  source 1..22: mol_type = other DNA
gctcccctcagcccgaggtcat

SEQ ID NO: 8302 - DNA, 22 bp, synthetic construct
  misc_feature 1..22: note = chemically synthesized
  source 1..22: mol_type = other DNA
ctcccctcagcccgaggtcatc

SEQ ID NO: 8303 - DNA, 22 bp, synthetic construct
  misc_feature 1..22: note = chemically synthesized
  source 1..22: mol_type = other DNA
ccctcagcccgaggtcatctca

SEQ ID NO: 8304 - DNA, 22 bp, synthetic construct
  misc_feature 1..22: note = chemically synthesized
  source 1..22: mol_type = other DNA
agcccgaggtcatctcacaggt

SEQ ID NO: 8305 - DNA, 22 bp, synthetic construct
  misc_feature 1..22: note = chemically synthesized
  source 1..22: mol_type = other DNA
acaggtacctctcctgcccctt

SEQ ID NO: 8306 - DNA, 22 bp, synthetic construct
  misc_feature 1..22: note = chemically synthesized
  source 1..22: mol_type = other DNA
tcctgccccttgatccatctgc

SEQ ID NO: 8307 - DNA, 22 bp, synthetic construct
  misc_feature 1..22: note = chemically synthesized
  source 1..22: mol_type = other DNA
ctgccccttgatccatctgcac

SEQ ID NO: 8308 - DNA, 22 bp, synthetic construct
  misc_feature 1..22: note = chemically synthesized
  source 1..22: mol_type = other DNA
ccccttgatccatctgcaccct

SEQ ID NO: 8309 - DNA, 22 bp, synthetic construct
  misc_feature 1..22: note = chemically synthesized
  source 1..22: mol_type = other DNA
gatccatctgcaccctgacagc

SEQ ID NO: 8310 - DNA, 22 bp, synthetic construct
  misc_feature 1..22: note = chemically synthesized
  source 1..22: mol_type = other DNA
atccatctgcaccctgacagca

SEQ ID NO: 8311 - DNA, 22 bp, synthetic construct
  misc_feature 1..22: note = chemically synthesized
  source 1..22: mol_type = other DNA
caccctgacagcactgacacac

SEQ ID NO: 8312 - DNA, 22 bp, synthetic construct
  misc_feature 1..22: note = chemically synthesized
  source 1..22: mol_type = other DNA
acagcactgacacacacattca

SEQ ID NO: 8313 - DNA, 22 bp, synthetic construct
  misc_feature 1..22: note = chemically synthesized
  source 1..22: mol_type = other DNA
acacacacattcacatgccctc

SEQ ID NO: 8314 - DNA, 22 bp, synthetic construct
  misc_feature 1..22: note = chemically synthesized
  source 1..22: mol_type = other DNA
acatgccctcacaaactcacac

SEQ ID NO: 8315 - DNA, 22 bp, synthetic construct
  misc_feature 1..22: note = chemically synthesized
  source 1..22: mol_type = other DNA
acaaactcacacacactcacac

SEQ ID NO: 8316 - DNA, 22 bp, synthetic construct
  misc_feature 1..22: note = chemically synthesized
  source 1..22: mol_type = other DNA
acacacactcacacactcacac

SEQ ID NO: 8317 - DNA, 22 bp, synthetic construct
  misc_feature 1..22: note = chemically synthesized
  source 1..22: mol_type = other DNA
acacactcacacattgctcact

SEQ ID NO: 8318 - DNA, 22 bp, synthetic construct
  misc_feature 1..22: note = chemically synthesized
  source 1..22: mol_type = other DNA
acacattgctcacttcactcaa

SEQ ID NO: 8319 - DNA, 22 bp, synthetic construct
  misc_feature 1..22: note = chemically synthesized
  source 1..22: mol_type = other DNA
ctcacttcactcaaaaacacac

SEQ ID NO: 8320 - DNA, 22 bp, synthetic construct
  misc_feature 1..22: note = chemically synthesized
  source 1..22: mol_type = other DNA
acttcactcaaaaacacacatt

SEQ ID NO: 8321 - DNA, 22 bp, synthetic construct
  misc_feature 1..22: note = chemically synthesized
  source 1..22: mol_type = other DNA
cactcaaaaacacacatttgca

SEQ ID NO: 8322 - DNA, 22 bp, synthetic construct
  misc_feature 1..22: note = chemically synthesized
  source 1..22: mol_type = other DNA
actcaaaaacacacatttgcac

SEQ ID NO: 8323 - DNA, 22 bp, synthetic construct
  misc_feature 1..22: note = chemically synthesized
  source 1..22: mol_type = other DNA
aaaaacacacatttgcacacac

SEQ ID NO: 8324 - DNA, 22 bp, synthetic construct
  misc_feature 1..22: note = chemically synthesized
  source 1..22: mol_type = other DNA
gcacacactcatgaccacgctc

SEQ ID NO: 8325 - DNA, 22 bp, synthetic construct
  misc_feature 1..22: note = chemically synthesized
  source 1..22: mol_type = other DNA
cacacactcatgaccacgctct

SEQ ID NO: 8326 - DNA, 22 bp, synthetic construct
  misc_feature 1..22: note = chemically synthesized
  source 1..22: mol_type = other DNA
atgaccacgctctgctgtaccc

SEQ ID NO: 8327 - DNA, 22 bp, synthetic construct
  misc_feature 1..22: note = chemically synthesized
  source 1..22: mol_type = other DNA
tgctgtacccactctcacatgt

SEQ ID NO: 8328 - DNA, 22 bp, synthetic construct
  misc_feature 1..22: note = chemically synthesized
  source 1..22: mol_type = other DNA
ctgtacccactctcacatgtgc

SEQ ID NO: 8329 - DNA, 22 bp, synthetic construct
  misc_feature 1..22: note = chemically synthesized
  source 1..22: mol_type = other DNA
tacccactctcacatgtgcata

SEQ ID NO: 8330 - DNA, 22 bp, synthetic construct
  misc_feature 1..22: note = chemically synthesized
  source 1..22: mol_type = other DNA
tcacatgtgcatatgcatgcta

SEQ ID NO: 8331 - DNA, 22 bp, synthetic construct
  misc_feature 1..22: note = chemically synthesized
  source 1..22: mol_type = other DNA
acatgtgcatatgcatgctaat

SEQ ID NO: 8332 - DNA, 22 bp, synthetic construct
  misc_feature 1..22: note = chemically synthesized
  source 1..22: mol_type = other DNA
atgcacacattcatactccctc

SEQ ID NO: 8333 - DNA, 22 bp, synthetic construct
  misc_feature 1..22: note = chemically synthesized
  source 1..22: mol_type = other DNA
atactccctcccacacacacac

SEQ ID NO: 8334 - DNA, 22 bp, synthetic construct
  misc_feature 1..22: note = chemically synthesized
  source 1..22: mol_type = other DNA
cctcccacacacacacacctga

SEQ ID NO: 8335 - DNA, 22 bp, synthetic construct
  misc_feature 1..22: note = chemically synthesized
  source 1..22: mol_type = other DNA
ccacacacacacacctgacaca

SEQ ID NO: 8336 - DNA, 22 bp, synthetic construct
  misc_feature 1..22: note = chemically synthesized
  source 1..22: mol_type = other DNA
acacacccacacacgtacactc

SEQ ID NO: 8337 - DNA, 22 bp, synthetic construct
  misc_feature 1..22: note = chemically synthesized
  source 1..22: mol_type = other DNA
acacacccacgtcttcctgcac

SEQ ID NO: 8338 - DNA, 22 bp, synthetic construct
  misc_feature 1..22: note = chemically synthesized
  source 1..22: mol_type = other DNA
cctgcacacagagctgggctcc

SEQ ID NO: 8339 - DNA, 22 bp, synthetic construct
  misc_feature 1..22: note = chemically synthesized
  source 1..22: mol_type = other DNA
ctgcacacagagctgggctccc

SEQ ID NO: 8340 - DNA, 22 bp, synthetic construct
  misc_feature 1..22: note = chemically synthesized
  source 1..22: mol_type = other DNA
cacacagagctgggctccctct

SEQ ID NO: 8341 - DNA, 22 bp, synthetic construct
  misc_feature 1..22: note = chemically synthesized
  source 1..22: mol_type = other DNA
ggctccctctctgctgcctcca

SEQ ID NO: 8342 - DNA, 22 bp, synthetic construct
  misc_feature 1..22: note = chemically synthesized
  source 1..22: mol_type = other DNA
cctctctgctgcctccagaccc

SEQ ID NO: 8343 - DNA, 22 bp, synthetic construct
  misc_feature 1..22: note = chemically synthesized
  source 1..22: mol_type = other DNA
tctgctgcctccagacccagag

SEQ ID NO: 8344 - DNA, 22 bp, synthetic construct
  misc_feature 1..22: note = chemically synthesized
  source 1..22: mol_type = other DNA
tgctgcctccagacccagagca

SEQ ID NO: 8345 - DNA, 22 bp, synthetic construct
  misc_feature 1..22: note = chemically synthesized
  source 1..22: mol_type = other DNA
ctgcctccagacccagagcagc

SEQ ID NO: 8346 - DNA, 22 bp, synthetic construct
  misc_feature 1..22: note = chemically synthesized
  source 1..22: mol_type = other DNA
cctccagacccagagcagctcc

SEQ ID NO: 8347 - DNA, 22 bp, synthetic construct
  misc_feature 1..22: note = chemically synthesized
  source 1..22: mol_type = other DNA
cagacccagagcagctccagtt

SEQ ID NO: 8348 - DNA, 22 bp, synthetic construct
  misc_feature 1..22: note = chemically synthesized
  source 1..22: mol_type = other DNA
cagttgtcccagccctgagctc

SEQ ID NO: 8349 - DNA, 22 bp, synthetic construct
  misc_feature 1..22: note = chemically synthesized
  source 1..22: mol_type = other DNA
tcccagccctgagctcctctct

SEQ ID NO: 8350 - DNA, 22 bp, synthetic construct
  misc_feature 1..22: note = chemically synthesized
  source 1..22: mol_type = other DNA
agctcctctctttgcagcatcc

SEQ ID NO: 8351 - DNA, 22 bp, synthetic construct
  misc_feature 1..22: note = chemically synthesized
  source 1..22: mol_type = other DNA
ctctctttgcagcatccacctg

SEQ ID NO: 8352 - DNA, 22 bp, synthetic construct
  misc_feature 1..22: note = chemically synthesized
  source 1..22: mol_type = other DNA
tctttgcagcatccacctgcaa

SEQ ID NO: 8353 - DNA, 22 bp, synthetic construct
  misc_feature 1..22: note = chemically synthesized
  source 1..22: mol_type = other DNA
tttgcagcatccacctgcaaac

SEQ ID NO: 8354 - DNA, 22 bp, synthetic construct
  misc_feature 1..22: note = chemically synthesized
  source 1..22: mol_type = other DNA
tgcagcatccacctgcaaacag

SEQ ID NO: 8355 - DNA, 22 bp, synthetic construct
  misc_feature 1..22: note = chemically synthesized
  source 1..22: mol_type = other DNA
gcagcatccacctgcaaacaga

SEQ ID NO: 8356 - DNA, 22 bp, synthetic construct
  misc_feature 1..22: note = chemically synthesized
  source 1..22: mol_type = other DNA
cagcatccacctgcaaacagaa

SEQ ID NO: 8357 - DNA, 22 bp, synthetic construct
  misc_feature 1..22: note = chemically synthesized
  source 1..22: mol_type = other DNA
caaacagaacaccttctaggcc

SEQ ID NO: 8358 - DNA, 22 bp, synthetic construct
  misc_feature 1..22: note = chemically synthesized
  source 1..22: mol_type = other DNA
ctaggccttggaccctgactct

SEQ ID NO: 8359 - DNA, 22 bp, synthetic construct
  misc_feature 1..22: note = chemically synthesized
  source 1..22: mol_type = other DNA
taggccttggaccctgactctg

SEQ ID NO: 8360 - DNA, 22 bp, synthetic construct
  misc_feature 1..22: note = chemically synthesized
  source 1..22: mol_type = other DNA
ggccttggaccctgactctgtg

SEQ ID NO: 8361 - DNA, 22 bp, synthetic construct
  misc_feature 1..22: note = chemically synthesized
  source 1..22: mol_type = other DNA
ggaccctgactctgtggacttc

SEQ ID NO: 8362 - DNA, 22 bp, synthetic construct
  misc_feature 1..22: note = chemically synthesized
  source 1..22: mol_type = other DNA
gaccctgactctgtggacttcc

SEQ ID NO: 8363 - DNA, 22 bp, synthetic construct
  misc_feature 1..22: note = chemically synthesized
  source 1..22: mol_type = other DNA
actctgtggacttccttgtctt

SEQ ID NO: 8364 - DNA, 22 bp, synthetic construct
  misc_feature 1..22: note = chemically synthesized
  source 1..22: mol_type = other DNA
tgtggacttccttgtcttctca

SEQ ID NO: 8365 - DNA, 22 bp, synthetic construct
  misc_feature 1..22: note = chemically synthesized
  source 1..22: mol_type = other DNA
tggacttccttgtcttctcatt

SEQ ID NO: 8366 - DNA, 22 bp, synthetic construct
  misc_feature 1..22: note = chemically synthesized
  source 1..22: mol_type = other DNA
ccttgtcttctcattcctatca

SEQ ID NO: 8367 - DNA, 22 bp, synthetic construct
  misc_feature 1..22: note = chemically synthesized
  source 1..22: mol_type = other DNA
cttgtcttctcattcctatcac

SEQ ID NO: 8368 - DNA, 22 bp, synthetic construct
  misc_feature 1..22: note = chemically synthesized
  source 1..22: mol_type = other DNA
gtcttctcattcctatcacccc

SEQ ID NO: 8369 - DNA, 22 bp, synthetic construct
  misc_feature 1..22: note = chemically synthesized
  source 1..22: mol_type = other DNA
tcttctcattcctatcaccccc

SEQ ID NO: 8370 - DNA, 22 bp, synthetic construct
  misc_feature 1..22: note = chemically synthesized
  source 1..22: mol_type = other DNA
ctcattcctatcaccccccgac

SEQ ID NO: 8371 - DNA, 22 bp, synthetic construct
  misc_feature 1..22: note = chemically synthesized
  source 1..22: mol_type = other DNA
tcattcctatcaccccccgacc

SEQ ID NO: 8372 - DNA, 22 bp, synthetic construct
  misc_feature 1..22: note = chemically synthesized
  source 1..22: mol_type = other DNA
attcctatcaccccccgaccca

SEQ ID NO: 8373 - DNA, 22 bp, synthetic construct
  misc_feature 1..22: note = chemically synthesized
  source 1..22: mol_type = other DNA
ctatcaccccccgacccagcag

SEQ ID NO: 8374 - DNA, 22 bp, synthetic construct
  misc_feature 1..22: note = chemically synthesized
  source 1..22: mol_type = other DNA
tcaccccccgacccagcaggac

SEQ ID NO: 8375 - DNA, 22 bp, synthetic construct
  misc_feature 1..22: note = chemically synthesized
  source 1..22: mol_type = other DNA
gggaggctcagtcaggggccca

SEQ ID NO: 8376 - DNA, 22 bp, synthetic construct
  misc_feature 1..22: note = chemically synthesized
  source 1..22: mol_type = other DNA
agtcaggggcccagaatcttcc

SEQ ID NO: 8377 - DNA, 22 bp, synthetic construct
  misc_feature 1..22: note = chemically synthesized
  source 1..22: mol_type = other DNA
cctccccaggtcacttcctgcc

SEQ ID NO: 8378 - DNA, 22 bp, synthetic construct
  misc_feature 1..22: note = chemically synthesized
  source 1..22: mol_type = other DNA
ctccccaggtcacttcctgcca

SEQ ID NO: 8379 - DNA, 22 bp, synthetic construct
  misc_feature 1..22: note = chemically synthesized
  source 1..22: mol_type = other DNA
cccaggtcacttcctgccactg

SEQ ID NO: 8380 - DNA, 22 bp, synthetic construct
  misc_feature 1..22: note = chemically synthesized
  source 1..22: mol_type = other DNA
cctgccactgtcctgagtcaga

SEQ ID NO: 8381 - DNA, 22 bp, synthetic construct
  misc_feature 1..22: note = chemically synthesized
  source 1..22: mol_type = other DNA
ctgccactgtcctgagtcagac

SEQ ID NO: 8382 - DNA, 22 bp, synthetic construct
  misc_feature 1..22: note = chemically synthesized
  source 1..22: mol_type = other DNA
ccactgtcctgagtcagacact

SEQ ID NO: 8383 - DNA, 22 bp, synthetic construct
  misc_feature 1..22: note = chemically synthesized
  source 1..22: mol_type = other DNA
tcctgagtcagacactgcccct

SEQ ID NO: 8384 - DNA, 22 bp, synthetic construct
  misc_feature 1..22: note = chemically synthesized
  source 1..22: mol_type = other DNA
agtcagacactgcccctgtaag

SEQ ID NO: 8385 - DNA, 22 bp, synthetic construct
  misc_feature 1..22: note = chemically synthesized
  source 1..22: mol_type = other DNA
cccctgtaagtgactgtccata

SEQ ID NO: 8386 - DNA, 22 bp, synthetic construct
  misc_feature 1..22: note = chemically synthesized
  source 1..22: mol_type = other DNA
taagtgactgtccataactctt

SEQ ID NO: 8387 - DNA, 22 bp, synthetic construct
  misc_feature 1..22: note = chemically synthesized
  source 1..22: mol_type = other DNA
tccataactcttcatctttttc

SEQ ID NO: 8388 - DNA, 22 bp, synthetic construct
  misc_feature 1..22: note = chemically synthesized
  source 1..22: mol_type = other DNA
ttcatctttttcacaccagtga

SEQ ID NO: 8389 - DNA, 22 bp, synthetic construct
  misc_feature 1..22: note = chemically synthesized
  source 1..22: mol_type = other DNA
catctttttcacaccagtgact

SEQ ID NO: 8390 - DNA, 22 bp, synthetic construct
  misc_feature 1..22: note = chemically synthesized
  source 1..22: mol_type = other DNA
atctttttcacaccagtgactt

SEQ ID NO: 8391 - DNA, 22 bp, synthetic construct
  misc_feature 1..22: note = chemically synthesized
  source 1..22: mol_type = other DNA
tttcacaccagtgacttccacc

SEQ ID NO: 8392 - DNA, 22 bp, synthetic construct
  misc_feature 1..22: note = chemically synthesized
  source 1..22: mol_type = other DNA
ttcacaccagtgacttccacct

SEQ ID NO: 8393 - DNA, 22 bp, synthetic construct
  misc_feature 1..22: note = chemically synthesized
  source 1..22: mol_type = other DNA
tcacaccagtgacttccacctt

SEQ ID NO: 8394 - DNA, 22 bp, synthetic construct
  misc_feature 1..22: note = chemically synthesized
  source 1..22: mol_type = other DNA
cacaccagtgacttccaccttc

SEQ ID NO: 8395 - DNA, 22 bp, synthetic construct
  misc_feature 1..22: note = chemically synthesized
  source 1..22: mol_type = other DNA
acaccagtgacttccaccttcc

SEQ ID NO: 8396 - DNA, 22 bp, synthetic construct
  misc_feature 1..22: note = chemically synthesized
  source 1..22: mol_type = other DNA
ccaccttccccactgcagccac

SEQ ID NO: 8397 - DNA, 22 bp, synthetic construct
  misc_feature 1..22: note = chemically synthesized
  source 1..22: mol_type = other DNA
caccttccccactgcagccaca

SEQ ID NO: 8398 - DNA, 22 bp, synthetic construct
  misc_feature 1..22: note = chemically synthesized
  source 1..22: mol_type = other DNA
ccccactgcagccacactcagg

SEQ ID NO: 8399 - DNA, 22 bp, synthetic construct
  misc_feature 1..22: note = chemically synthesized
  source 1..22: mol_type = other DNA
cccactgcagccacactcagga

SEQ ID NO: 8400 - DNA, 22 bp, synthetic construct
  misc_feature 1..22: note = chemically synthesized
  source 1..22: mol_type = other DNA
cagccacactcaggaccccatt

SEQ ID NO: 8401 - DNA, 22 bp, synthetic construct
  misc_feature 1..22: note = chemically synthesized
  source 1..22: mol_type = other DNA
aggaccccatttgacccaggga

SEQ ID NO: 8402 - DNA, 22 bp, synthetic construct
  misc_feature 1..22: note = chemically synthesized
  source 1..22: mol_type = other DNA
gacccagggaggcctctgacac

SEQ ID NO: 8403 - DNA, 22 bp, synthetic construct
  misc_feature 1..22: note = chemically synthesized
  source 1..22: mol_type = other DNA
acccagggaggcctctgacacc

SEQ ID NO: 8404 - DNA, 22 bp, synthetic construct
  misc_feature 1..22: note = chemically synthesized
  source 1..22: mol_type = other DNA
tgacacctccactgcccactcc

SEQ ID NO: 8405 - DNA, 22 bp, synthetic construct
  misc_feature 1..22: note = chemically synthesized
  source 1..22: mol_type = other DNA
acacctccactgcccactcccg

SEQ ID NO: 8406 - DNA, 22 bp, synthetic construct
  misc_feature 1..22: note = chemically synthesized
  source 1..22: mol_type = other DNA
cactgcccactcccgctctgag

SEQ ID NO: 8407 - DNA, 22 bp, synthetic construct
  misc_feature 1..22: note = chemically synthesized
  source 1..22: mol_type = other DNA
cccactcccgctctgagcacag

SEQ ID NO: 8408 - DNA, 22 bp, synthetic construct
  misc_feature 1..22: note = chemically synthesized
  source 1..22: mol_type = other DNA
ccgctctgagcacagccccacc

SEQ ID NO: 8409 - DNA, 22 bp, synthetic construct
  misc_feature 1..22: note = chemically synthesized
  source 1..22: mol_type = other DNA
tgagcacagccccaccctccct

SEQ ID NO: 8410 - DNA, 22 bp, synthetic construct
  misc_feature 1..22: note = chemically synthesized
  source 1..22: mol_type = other DNA
agcacagccccaccctccctct

SEQ ID NO: 8411 - DNA, 22 bp, synthetic construct
  misc_feature 1..22: note = chemically synthesized
  source 1..22: mol_type = other DNA
cctctcactgcccccacccctt

SEQ ID NO: 8412 - DNA, 22 bp, synthetic construct
  misc_feature 1..22: note = chemically synthesized
  source 1..22: mol_type = other DNA
tcactgcccccaccccttcctc

SEQ ID NO: 8413 - DNA, 22 bp, synthetic construct
  misc_feature 1..22: note = chemically synthesized
  source 1..22: mol_type = other DNA
actgcccccaccccttcctcca

SEQ ID NO: 8414 - DNA, 22 bp, synthetic construct
  misc_feature 1..22: note = chemically synthesized
  source 1..22: mol_type = other DNA
cccccaccccttcctccaaggc

SEQ ID NO: 8415 - DNA, 22 bp, synthetic construct
  misc_feature 1..22: note = chemically synthesized
  source 1..22: mol_type = other DNA
cctccaaggcctttgcattcct

SEQ ID NO: 8416 - DNA, 22 bp, synthetic construct
  misc_feature 1..22: note = chemically synthesized
  source 1..22: mol_type = other DNA
ctccaaggcctttgcattcctc

SEQ ID NO: 8417 - DNA, 22 bp, synthetic construct
  misc_feature 1..22: note = chemically synthesized
  source 1..22: mol_type = other DNA
caaggcctttgcattcctctcc

SEQ ID NO: 8418 - DNA, 22 bp, synthetic construct
  misc_feature 1..22: note = chemically synthesized
  source 1..22: mol_type = other DNA
tgcattcctctccatccagaag

SEQ ID NO: 8419 - DNA, 22 bp, synthetic construct
  misc_feature 1..22: note = chemically synthesized
  source 1..22: mol_type = other DNA
gcattcctctccatccagaagc

SEQ ID NO: 8420 - DNA, 22 bp, synthetic construct
  misc_feature 1..22: note = chemically synthesized
  source 1..22: mol_type = other DNA
cattcctctccatccagaagcg

SEQ ID NO: 8421 - DNA, 22 bp, synthetic construct
  misc_feature 1..22: note = chemically synthesized
  source 1..22: mol_type = other DNA
ctctccatccagaagcgctcca

SEQ ID NO: 8422 - DNA, 22 bp, synthetic construct
  misc_feature 1..22: note = chemically synthesized
  source 1..22: mol_type = other DNA
tccatccagaagcgctccatga

SEQ ID NO: 8423 - DNA, 22 bp, synthetic construct
  misc_feature 1..22: note = chemically synthesized
  source 1..22: mol_type = other DNA
catccagaagcgctccatgacc

SEQ ID NO: 8424 - DNA, 22 bp, synthetic construct
  misc_feature 1..22: note = chemically synthesized
  source 1..22: mol_type = other DNA
catgaccacggtgttccccacc

SEQ ID NO: 8425 - DNA, 22 bp, synthetic construct
  misc_feature 1..22: note = chemically synthesized
  source 1..22: mol_type = other DNA
cccaccaagctggccctccatg

SEQ ID NO: 8426 - DNA, 22 bp, synthetic construct
  misc_feature 1..22: note = chemically synthesized
  source 1..22: mol_type = other DNA
gccctccatggctgagtccctg

SEQ ID NO: 8427 - DNA, 22 bp, synthetic construct
  misc_feature 1..22: note = chemically synthesized
  source 1..22: mol_type = other DNA
catggctgagtccctgactgct

SEQ ID NO: 8428 - DNA, 22 bp, synthetic construct
  misc_feature 1..22: note = chemically synthesized
  source 1..22: mol_type = other DNA
agtccctgactgctgtcttcag

SEQ ID NO: 8429 - DNA, 22 bp, synthetic construct
  misc_feature 1..22: note = chemically synthesized
  source 1..22: mol_type = other DNA
actgctgtcttcagcaccctcc

SEQ ID NO: 8430 - DNA, 22 bp, synthetic construct
  misc_feature 1..22: note = chemically synthesized
  source 1..22: mol_type = other DNA
ctgtcttcagcaccctccactc

SEQ ID NO: 8431 - DNA, 22 bp, synthetic construct
  misc_feature 1..22: note = chemically synthesized
  source 1..22: mol_type = other DNA
tcttcagcaccctccactcaga

SEQ ID NO: 8432 - DNA, 22 bp, synthetic construct
  misc_feature 1..22: note = chemically synthesized
  source 1..22: mol_type = other DNA
cagcaccctccactcagagggt

SEQ ID NO: 8433 - DNA, 22 bp, synthetic construct
  misc_feature 1..22: note = chemically synthesized
  source 1..22: mol_type = other DNA
agcaccctccactcagagggtc

SEQ ID NO: 8434 - DNA, 22 bp, synthetic construct
  misc_feature 1..22: note = chemically synthesized
  source 1..22: mol_type = other DNA
cactcagagggtcctgtcctgc

SEQ ID NO: 8435 - DNA, 22 bp, synthetic construct
  misc_feature 1..22: note = chemically synthesized
  source 1..22: mol_type = other DNA
agagggtcctgtcctgcttccc

SEQ ID NO: 8436 - DNA, 22 bp, synthetic construct
  misc_feature 1..22: note = chemically synthesized
  source 1..22: mol_type = other DNA
tcctgcttcccagtccgactta

SEQ ID NO: 8437 - DNA, 22 bp, synthetic construct
  misc_feature 1..22: note = chemically synthesized
  source 1..22: mol_type = other DNA
cttcccagtccgacttatcaac

SEQ ID NO: 8438 - DNA, 22 bp, synthetic construct
  misc_feature 1..22: note = chemically synthesized
  source 1..22: mol_type = other DNA
cccagtccgacttatcaactcc

SEQ ID NO: 8439 - DNA, 22 bp, synthetic construct
  misc_feature 1..22: note = chemically synthesized
  source 1..22: mol_type = other DNA
ccagtccgacttatcaactccc

SEQ ID NO: 8440 - DNA, 22 bp, synthetic construct
  misc_feature 1..22: note = chemically synthesized
  source 1..22: mol_type = other DNA
atcaactcccaatgctgggtca

SEQ ID NO: 8441 - DNA, 22 bp, synthetic construct
  misc_feature 1..22: note = chemically synthesized
  source 1..22: mol_type = other DNA
tcaactcccaatgctgggtcag

SEQ ID NO: 8442 - DNA, 22 bp, synthetic construct
  misc_feature 1..22: note = chemically synthesized
  source 1..22: mol_type = other DNA
ccaatgctgggtcagcccagca

SEQ ID NO: 8443 - DNA, 22 bp, synthetic construct
  misc_feature 1..22: note = chemically synthesized
  source 1..22: mol_type = other DNA
ggtcagcccagcaacgtgtctg

SEQ ID NO: 8444 - DNA, 22 bp, synthetic construct
  misc_feature 1..22: note = chemically synthesized
  source 1..22: mol_type = other DNA
tatatccaccctgaaaccagac

SEQ ID NO: 8445 - DNA, 22 bp, synthetic construct
  misc_feature 1..22: note = chemically synthesized
  source 1..22: mol_type = other DNA
aaaccagactgcccacagggta

SEQ ID NO: 8446 - DNA, 22 bp, synthetic construct
  misc_feature 1..22: note = chemically synthesized
  source 1..22: mol_type = other DNA
cccacagggtagcccagctgtg

SEQ ID NO: 8447 - DNA, 22 bp, synthetic construct
  misc_feature 1..22: note = chemically synthesized
  source 1..22: mol_type = other DNA
tgcctccaggtagctctgagat

SEQ ID NO: 8448 - DNA, 22 bp, synthetic construct
  misc_feature 1..22: note = chemically synthesized
  source 1..22: mol_type = other DNA
caggtagctctgagatcatgca

SEQ ID NO: 8449 - DNA, 22 bp, synthetic construct
  misc_feature 1..22: note = chemically synthesized
  source 1..22: mol_type = other DNA
tgagatcatgcaccagcattca

SEQ ID NO: 8450 - DNA, 22 bp, synthetic construct
  misc_feature 1..22: note = chemically synthesized
  source 1..22: mol_type = other DNA
agatcatgcaccagcattcaat

SEQ ID NO: 8451 - DNA, 22 bp, synthetic construct
  misc_feature 1..22: note = chemically synthesized
  source 1..22: mol_type = other DNA
aatttctccatgcttccatttt

SEQ ID NO: 8452 - DNA, 22 bp, synthetic construct
  misc_feature 1..22: note = chemically synthesized
  source 1..22: mol_type = other DNA
ctccatgcttccattttctcgt

SEQ ID NO: 8453 - DNA, 22 bp, synthetic construct
  misc_feature 1..22: note = chemically synthesized
  source 1..22: mol_type = other DNA
tccatgcttccattttctcgtg

SEQ ID NO: 8454 - DNA, 22 bp, synthetic construct
  misc_feature 1..22: note = chemically synthesized
  source 1..22: mol_type = other DNA
catgcttccattttctcgtgtg

SEQ ID NO: 8455 - DNA, 22 bp, synthetic construct
  misc_feature 1..22: note = chemically synthesized
  source 1..22: mol_type = other DNA
ccattttctcgtgtgtaaaatg

SEQ ID NO: 8456 - DNA, 22 bp, synthetic construct
  misc_feature 1..22: note = chemically synthesized
  source 1..22: mol_type = other DNA
cattttctcgtgtgtaaaatgg

SEQ ID NO: 8457 - DNA, 22 bp, synthetic construct
  misc_feature 1..22: note = chemically synthesized
  source 1..22: mol_type = other DNA
tctcgtgtgtaaaatggagatc

SEQ ID NO: 8458 - DNA, 22 bp, synthetic construct
  misc_feature 1..22: note = chemically synthesized
  source 1..22: mol_type = other DNA
ctcgtgtgtaaaatggagatca

SEQ ID NO: 8459 - DNA, 22 bp, synthetic construct
  misc_feature 1..22: note = chemically synthesized
  source 1..22: mol_type = other DNA
tcgtgtgtaaaatggagatcac

SEQ ID NO: 8460 - DNA, 22 bp, synthetic construct
  misc_feature 1..22: note = chemically synthesized
  source 1..22: mol_type = other DNA
gtgtgtaaaatggagatcacag

SEQ ID NO: 8461 - DNA, 22 bp, synthetic construct
  misc_feature 1..22: note = chemically synthesized
  source 1..22: mol_type = other DNA
cccgattggattgctcggataa

SEQ ID NO: 8462 - DNA, 22 bp, synthetic construct
  misc_feature 1..22: note = chemically synthesized
  source 1..22: mol_type = other DNA
gattgctcggataattagatga

SEQ ID NO: 8463 - DNA, 22 bp, synthetic construct
  misc_feature 1..22: note = chemically synthesized
  source 1..22: mol_type = other DNA
ctcggataattagatgagttaa

SEQ ID NO: 8464 - DNA, 22 bp, synthetic construct
  misc_feature 1..22: note = chemically synthesized
  source 1..22: mol_type = other DNA
ggataattagatgagttaaaat

SEQ ID NO: 8465 - DNA, 22 bp, synthetic construct
  misc_feature 1..22: note = chemically synthesized
  source 1..22: mol_type = other DNA
gatgagttaaaatatgtaatgt

SEQ ID NO: 8466 - DNA, 22 bp, synthetic construct
  misc_feature 1..22: note = chemically synthesized
  source 1..22: mol_type = other DNA
aaatatgtaatgtgcttcttag

SEQ ID NO: 8467 - DNA, 22 bp, synthetic construct
  misc_feature 1..22: note = chemically synthesized
  source 1..22: mol_type = other DNA
cttaggcaaaagtttgaacata

SEQ ID NO: 8468 - DNA, 22 bp, synthetic construct
  misc_feature 1..22: note = chemically synthesized
  source 1..22: mol_type = other DNA
ttaggcaaaagtttgaacataa

SEQ ID NO: 8469 - DNA, 22 bp, synthetic construct
  misc_feature 1..22: note = chemically synthesized
  source 1..22: mol_type = other DNA
aggcaaaagtttgaacataaaa

SEQ ID NO: 8470 - DNA, 22 bp, synthetic construct
  misc_feature 1..22: note = chemically synthesized
  source 1..22: mol_type = other DNA
ggcaaaagtttgaacataaaag

SEQ ID NO: 8471 - DNA, 22 bp, synthetic construct
  misc_feature 1..22: note = chemically synthesized
  source 1..22: mol_type = other DNA
gaacataaaagacagggtctgc

SEQ ID NO: 8472 - DNA, 22 bp, synthetic construct
  misc_feature 1..22: note = chemically synthesized
  source 1..22: mol_type = other DNA
aacataaaagacagggtctgcc

SEQ ID NO: 8473 - DNA, 22 bp, synthetic construct
  misc_feature 1..22: note = chemically synthesized
  source 1..22: mol_type = other DNA
cccaagatgggaagagttcttc

SEQ ID NO: 8474 - DNA, 22 bp, synthetic construct
  misc_feature 1..22: note = chemically synthesized
  source 1..22: mol_type = other DNA
ttctctccccagaaacaatcaa

SEQ ID NO: 8475 - DNA, 22 bp, synthetic construct
  misc_feature 1..22: note = chemically synthesized
  source 1..22: mol_type = other DNA
ctctccccagaaacaatcaaaa

SEQ ID NO: 8476 - DNA, 22 bp, synthetic construct
  misc_feature 1..22: note = chemically synthesized
  source 1..22: mol_type = other DNA
tctccccagaaacaatcaaaac

SEQ ID NO: 8477 - DNA, 22 bp, synthetic construct
  misc_feature 1..22: note = chemically synthesized
  source 1..22: mol_type = other DNA
tccccagaaacaatcaaaacaa

SEQ ID NO: 8478 - DNA, 22 bp, synthetic construct
  misc_feature 1..22: note = chemically synthesized
  source 1..22: mol_type = other DNA
cccagaaacaatcaaaacaaaa

SEQ ID NO: 8479 - DNA, 22 bp, synthetic construct
  misc_feature 1..22: note = chemically synthesized
  source 1..22: mol_type = other DNA
tagaacatggcagctttcaaga

SEQ ID NO: 8480 - DNA, 22 bp, synthetic construct
  misc_feature 1..22: note = chemically synthesized
  source 1..22: mol_type = other DNA
tcaagactctggacatcaggca

SEQ ID NO: 8481 - DNA, 22 bp, synthetic construct
  misc_feature 1..22: note = chemically synthesized
  source 1..22: mol_type = other DNA
caagactctggacatcaggcaa

SEQ ID NO: 8482 - DNA, 22 bp, synthetic construct
  misc_feature 1..22: note = chemically synthesized
  source 1..22: mol_type = other DNA
aagactctggacatcaggcaag

SEQ ID NO: 8483 - DNA, 22 bp, synthetic construct
  misc_feature 1..22: note = chemically synthesized
  source 1..22: mol_type = other DNA
tggacatcaggcaaggaggagt

SEQ ID NO: 8484 - DNA, 22 bp, synthetic construct
  misc_feature 1..22: note = chemically synthesized
  source 1..22: mol_type = other DNA
gacatcaggcaaggaggagtaa

SEQ ID NO: 8485 - DNA, 22 bp, synthetic construct
  misc_feature 1..22: note = chemically synthesized
  source 1..22: mol_type = other DNA
agggataagaagcaaacaacag

SEQ ID NO: 8486 - DNA, 22 bp, synthetic construct
  misc_feature 1..22: note = chemically synthesized
  source 1..22: mol_type = other DNA
cgatcaccccagcttactgttt

SEQ ID NO: 8487 - DNA, 22 bp, synthetic construct
  misc_feature 1..22: note = chemically synthesized
  source 1..22: mol_type = other DNA
actgtttggagagagtctgcag

SEQ ID NO: 8488 - DNA, 22 bp, synthetic construct
  misc_feature 1..22: note = chemically synthesized
  source 1..22: mol_type = other DNA
ctgtttggagagagtctgcagg

SEQ ID NO: 8489 - DNA, 22 bp, synthetic construct
  misc_feature 1..22: note = chemically synthesized
  source 1..22: mol_type = other DNA
tttggagagagtctgcaggtta

SEQ ID NO: 8490 - DNA, 22 bp, synthetic construct
  misc_feature 1..22: note = chemically synthesized
  source 1..22: mol_type = other DNA
ggagagagtctgcaggttacag

SEQ ID NO: 8491 - DNA, 22 bp, synthetic construct
  misc_feature 1..22: note = chemically synthesized
  source 1..22: mol_type = other DNA
gagagagtctgcaggttacagg

SEQ ID NO: 8492 - DNA, 22 bp, synthetic construct
  misc_feature 1..22: note = chemically synthesized
  source 1..22: mol_type = other DNA
caggttacaggccaggaaaggg

SEQ ID NO: 8493 - DNA, 22 bp, synthetic construct
  misc_feature 1..22: note = chemically synthesized
  source 1..22: mol_type = other DNA
caggccaggaaagggaagtcca

SEQ ID NO: 8494 - DNA, 22 bp, synthetic construct
  misc_feature 1..22: note = chemically synthesized
  source 1..22: mol_type = other DNA
cccacgttgaggagatggagct

SEQ ID NO: 8495 - DNA, 22 bp, synthetic construct
  misc_feature 1..22: note = chemically synthesized
  source 1..22: mol_type = other DNA
aggagatggagctgagagtccg

SEQ ID NO: 8496 - DNA, 22 bp, synthetic construct
  misc_feature 1..22: note = chemically synthesized
  source 1..22: mol_type = other DNA
agagtccgaggagaccaaaaca

SEQ ID NO: 8497 - DNA, 22 bp, synthetic construct
  misc_feature 1..22: note = chemically synthesized
  source 1..22: mol_type = other DNA
agagttcaaacgatcaaactga

SEQ ID NO: 8498 - DNA, 22 bp, synthetic construct
  misc_feature 1..22: note = chemically synthesized
  source 1..22: mol_type = other DNA
aaacgatcaaactgactctaag

SEQ ID NO: 8499 - DNA, 22 bp, synthetic construct
  misc_feature 1..22: note = chemically synthesized
  source 1..22: mol_type = other DNA
actctaagttgcttaactgcat

SEQ ID NO: 8500 - DNA, 22 bp, synthetic construct
  misc_feature 1..22: note = chemically synthesized
  source 1..22: mol_type = other DNA
taagttgcttaactgcatcccg

SEQ ID NO: 8501 - DNA, 22 bp, synthetic construct
  misc_feature 1..22: note = chemically synthesized
  source 1..22: mol_type = other DNA
agttgcttaactgcatcccgga

SEQ ID NO: 8502 - DNA, 22 bp, synthetic construct
  misc_feature 1..22: note = chemically synthesized
  source 1..22: mol_type = other DNA
cttaactgcatcccggagcaaa

SEQ ID NO: 8503 - DNA, 22 bp, synthetic construct
  misc_feature 1..22: note = chemically synthesized
  source 1..22: mol_type = other DNA
aactgcatcccggagcaaagct

SEQ ID NO: 8504 - DNA, 22 bp, synthetic construct
  misc_feature 1..22: note = chemically synthesized
  source 1..22: mol_type = other DNA
actgcatcccggagcaaagctc

SEQ ID NO: 8505 - DNA, 22 bp, synthetic construct
  misc_feature 1..22: note = chemically synthesized
  source 1..22: mol_type = other DNA
catcccggagcaaagctcaaga

SEQ ID NO: 8506 - DNA, 22 bp, synthetic construct
  misc_feature 1..22: note = chemically synthesized
  source 1..22: mol_type = other DNA
aagaacatttagaggaatacaa

SEQ ID NO: 8507 - DNA, 22 bp, synthetic construct
  misc_feature 1..22: note = chemically synthesized
  source 1..22: mol_type = other DNA
agaggaatacaaaaatatccag

SEQ ID NO: 8508 - DNA, 22 bp, synthetic construct
  misc_feature 1..22: note = chemically synthesized
  source 1..22: mol_type = other DNA
gaggaatacaaaaatatccagc

SEQ ID NO: 8509 - DNA, 22 bp, synthetic construct
  misc_feature 1..22: note = chemically synthesized
  source 1..22: mol_type = other DNA
acaatgtctggcagccaatcaa

SEQ ID NO: 8510 - DNA, 22 bp, synthetic construct
  misc_feature 1..22: note = chemically synthesized
  source 1..22: mol_type = other DNA
gcagccaatcaaagattacaag

SEQ ID NO: 8511 - DNA, 22 bp, synthetic construct
  misc_feature 1..22: note = chemically synthesized
  source 1..22: mol_type = other DNA
caaggcatgcaatgaaacggga

SEQ ID NO: 8512 - DNA, 22 bp, synthetic construct
  misc_feature 1..22: note = chemically synthesized
  source 1..22: mol_type = other DNA
ataaatatcaaaagagatccag

SEQ ID NO: 8513 - DNA, 22 bp, synthetic construct
  misc_feature 1..22: note = chemically synthesized
  source 1..22: mol_type = other DNA
acacggatgctagaattagcag

SEQ ID NO: 8514 - DNA, 22 bp, synthetic construct
  misc_feature 1..22: note = chemically synthesized
  source 1..22: mol_type = other DNA
gaattagcaggcaaggatggta

SEQ ID NO: 8515 - DNA, 22 bp, synthetic construct
  misc_feature 1..22: note = chemically synthesized
  source 1..22: mol_type = other DNA
gcaggcaaggatggtaaaacag

SEQ ID NO: 8516 - DNA, 22 bp, synthetic construct
  misc_feature 1..22: note = chemically synthesized
  source 1..22: mol_type = other DNA
tagccatatcccattatgttca

SEQ ID NO: 8517 - DNA, 22 bp, synthetic construct
  misc_feature 1..22: note = chemically synthesized
  source 1..22: mol_type = other DNA
tgttcaaaaaattaagtagaat

SEQ ID NO: 8518 - DNA, 22 bp, synthetic construct
  misc_feature 1..22: note = chemically synthesized
  source 1..22: mol_type = other DNA
aaaaaattaagtagaattgtgg

SEQ ID NO: 8519 - DNA, 22 bp, synthetic construct
  misc_feature 1..22: note = chemically synthesized
  source 1..22: mol_type = other DNA
agtagaattgtggaggatattt

SEQ ID NO: 8520 - DNA, 22 bp, synthetic construct
  misc_feature 1..22: note = chemically synthesized
  source 1..22: mol_type = other DNA
tggaggatatttaagagtcccc

SEQ ID NO: 8521 - DNA, 22 bp, synthetic construct
  misc_feature 1..22: note = chemically synthesized
  source 1..22: mol_type = other DNA
aagagtccccaggtgaacttct

SEQ ID NO: 8522 - DNA, 22 bp, synthetic construct
  misc_feature 1..22: note = chemically synthesized
  source 1..22: mol_type = other DNA
agagtccccaggtgaacttcta

SEQ ID NO: 8523 - DNA, 22 bp, synthetic construct
  misc_feature 1..22: note = chemically synthesized
  source 1..22: mol_type = other DNA
ctagagataaaaactacaatgt

SEQ ID NO: 8524 - DNA, 22 bp, synthetic construct
  misc_feature 1..22: note = chemically synthesized
  source 1..22: mol_type = other DNA
tagagataaaaactacaatgtc

SEQ ID NO: 8525 - DNA, 22 bp, synthetic construct
  misc_feature 1..22: note = chemically synthesized
  source 1..22: mol_type = other DNA
gagataaaaactacaatgtctg

SEQ ID NO: 8526 - DNA, 22 bp, synthetic construct
  misc_feature 1..22: note = chemically synthesized
  source 1..22: mol_type = other DNA
caatgtctgaaatgaaaaaaca

SEQ ID NO: 8527 - DNA, 22 bp, synthetic construct
  misc_feature 1..22: note = chemically synthesized
  source 1..22: mol_type = other DNA
aaatgaaaaaacacactggcca

SEQ ID NO: 8528 - DNA, 22 bp, synthetic construct
  misc_feature 1..22: note = chemically synthesized
  source 1..22: mol_type = other DNA
gccaggcgccgtggctcacgcc

SEQ ID NO: 8529 - DNA, 22 bp, synthetic construct
  misc_feature 1..22: note = chemically synthesized
  source 1..22: mol_type = other DNA
acgcctggaatcccagcactgt

SEQ ID NO: 8530 - DNA, 22 bp, synthetic construct
  misc_feature 1..22: note = chemically synthesized
  source 1..22: mol_type = other DNA
gaatcccagcactgtgggaggc

SEQ ID NO: 8531 - DNA, 22 bp, synthetic construct
  misc_feature 1..22: note = chemically synthesized
  source 1..22: mol_type = other DNA
tgggaggccaaggcgggcagat

SEQ ID NO: 8532 - DNA, 22 bp, synthetic construct
  misc_feature 1..22: note = chemically synthesized
  source 1..22: mol_type = other DNA
gctaacatggtgaaaccccatc

SEQ ID NO: 8533 - DNA, 22 bp, synthetic construct
  misc_feature 1..22: note = chemically synthesized
  source 1..22: mol_type = other DNA
acatggtgaaaccccatctcta

SEQ ID NO: 8534 - DNA, 22 bp, synthetic construct
  misc_feature 1..22: note = chemically synthesized
  source 1..22: mol_type = other DNA
tactaaaaatacaaaaaattag

SEQ ID NO: 8535 - DNA, 22 bp, synthetic construct
  misc_feature 1..22: note = chemically synthesized
  source 1..22: mol_type = other DNA
ctaaaaatacaaaaaattagcc

SEQ ID NO: 8536 - DNA, 22 bp, synthetic construct
  misc_feature 1..22: note = chemically synthesized
  source 1..22: mol_type = other DNA
aaaatacaaaaaattagccaga

SEQ ID NO: 8537 - DNA, 22 bp, synthetic construct
  misc_feature 1..22: note = chemically synthesized
  source 1..22: mol_type = other DNA
gccagacgtggtggcaggcgcc

SEQ ID NO: 8538 - DNA, 22 bp, synthetic construct
  misc_feature 1..22: note = chemically synthesized
  source 1..22: mol_type = other DNA
tagtcccagctactcgggaggc

SEQ ID NO: 8539 - DNA, 22 bp, synthetic construct
  misc_feature 1..22: note = chemically synthesized
  source 1..22: mol_type = other DNA
ctcgggaggctgaggcaggaga

SEQ ID NO: 8540 - DNA, 22 bp, synthetic construct
  misc_feature 1..22: note = chemically synthesized
  source 1..22: mol_type = other DNA
gggaggctgaggcaggagaatg

SEQ ID NO: 8541 - DNA, 22 bp, synthetic construct
  misc_feature 1..22: note = chemically synthesized
  source 1..22: mol_type = other DNA
aggcaggagaatggcatgaacc

SEQ ID NO: 8542 - DNA, 22 bp, synthetic construct
  misc_feature 1..22: note = chemically synthesized
  source 1..22: mol_type = other DNA
gcagtgagccaagatcgcgcca

SEQ ID NO: 8543 - DNA, 22 bp, synthetic construct
  misc_feature 1..22: note = chemically synthesized
  source 1..22: mol_type = other DNA
cagtgagccaagatcgcgccac

SEQ ID NO: 8544 - DNA, 22 bp, synthetic construct
  misc_feature 1..22: note = chemically synthesized
  source 1..22: mol_type = other DNA
cactccggcctgggcaacagag

SEQ ID NO: 8545 - DNA, 22 bp, synthetic construct
  misc_feature 1..22: note = chemically synthesized
  source 1..22: mol_type = other DNA
cggcctgggcaacagagcgaga

SEQ ID NO: 8546 - DNA, 22 bp, synthetic construct
  misc_feature 1..22: note = chemically synthesized
  source 1..22: mol_type = other DNA
ggcaacagagcgagactccgcc

SEQ ID NO: 8547 - DNA, 22 bp, synthetic construct
  misc_feature 1..22: note = chemically synthesized
  source 1..22: mol_type = other DNA
cgcctccaaaaaaaaaaaaaag

SEQ ID NO: 8548 - DNA, 22 bp, synthetic construct
  misc_feature 1..22: note = chemically synthesized
  source 1..22: mol_type = other DNA
caaaaaaaaaaaaaagaaaaga

SEQ ID NO: 8549 - DNA, 22 bp, synthetic construct
  misc_feature 1..22: note = chemically synthesized
  source 1..22: mol_type = other DNA
gatggaaataatggaagatgag

SEQ ID NO: 8550 - DNA, 22 bp, synthetic construct
  misc_feature 1..22: note = chemically synthesized
  source 1..22: mol_type = other DNA
agggccaggcactgtggatcac

SEQ ID NO: 8551 - DNA, 22 bp, synthetic construct
  misc_feature 1..22: note = chemically synthesized
  source 1..22: mol_type = other DNA
gggccaggcactgtggatcaca

SEQ ID NO: 8552 - DNA, 22 bp, synthetic construct
  misc_feature 1..22: note = chemically synthesized
  source 1..22: mol_type = other DNA
tggatcacatctgtaatcccag

SEQ ID NO: 8553 - DNA, 22 bp, synthetic construct
  misc_feature 1..22: note = chemically synthesized
  source 1..22: mol_type = other DNA
taatcccagcactttgggaggt

SEQ ID NO: 8554 - DNA, 22 bp, synthetic construct
  misc_feature 1..22: note = chemically synthesized
  source 1..22: mol_type = other DNA
tgggaggtcgacacggggggaa

SEQ ID NO: 8555 - DNA, 22 bp, synthetic construct
  misc_feature 1..22: note = chemically synthesized
  source 1..22: mol_type = other DNA
gggaggtcgacacggggggaat

SEQ ID NO: 8556 - DNA, 22 bp, synthetic construct
  misc_feature 1..22: note = chemically synthesized
  source 1..22: mol_type = other DNA
ggaggtcgacacggggggaatc

SEQ ID NO: 8557 - DNA, 22 bp, synthetic construct
  misc_feature 1..22: note = chemically synthesized
  source 1..22: mol_type = other DNA
gagcccaggagctcaagactag

SEQ ID NO: 8558 - DNA, 22 bp, synthetic construct
  misc_feature 1..22: note = chemically synthesized
  source 1..22: mol_type = other DNA
agcccaggagctcaagactagt

SEQ ID NO: 8559 - DNA, 22 bp, synthetic construct
  misc_feature 1..22: note = chemically synthesized
  source 1..22: mol_type = other DNA
aagactagtctgggcagcatgg

SEQ ID NO: 8560 - DNA, 22 bp, synthetic construct
  misc_feature 1..22: note = chemically synthesized
  source 1..22: mol_type = other DNA
gtctgggcagcatggcaaaacc

SEQ ID NO: 8561 - DNA, 22 bp, synthetic construct
  misc_feature 1..22: note = chemically synthesized
  source 1..22: mol_type = other DNA
ggcagcatggcaaaacccctct

SEQ ID NO: 8562 - DNA, 22 bp, synthetic construct
  misc_feature 1..22: note = chemically synthesized
  source 1..22: mol_type = other DNA
tacatggcaaaaccgtctctac

SEQ ID NO: 8563 - DNA, 22 bp, synthetic construct
  misc_feature 1..22: note = chemically synthesized
  source 1..22: mol_type = other DNA
catggcaaaaccgtctctacaa

SEQ ID NO: 8564 - DNA, 22 bp, synthetic construct
  misc_feature 1..22: note = chemically synthesized
  source 1..22: mol_type = other DNA
tacaaaaaaaaatttttaatta

SEQ ID NO: 8565 - DNA, 22 bp, synthetic construct
  misc_feature 1..22: note = chemically synthesized
  source 1..22: mol_type = other DNA
caaaaaaaaatttttaattagc

SEQ ID NO: 8566 - DNA, 22 bp, synthetic construct
  misc_feature 1..22: note = chemically synthesized
  source 1..22: mol_type = other DNA
ttaattagccaggtgtggtgcc

SEQ ID NO: 8567 - DNA, 22 bp, synthetic construct
  misc_feature 1..22: note = chemically synthesized
  source 1..22: mol_type = other DNA
taattagccaggtgtggtgcca

SEQ ID NO: 8568 - DNA, 22 bp, synthetic construct
  misc_feature 1..22: note = chemically synthesized
  source 1..22: mol_type = other DNA
aattagccaggtgtggtgccac

SEQ ID NO: 8569 - DNA, 22 bp, synthetic construct
  misc_feature 1..22: note = chemically synthesized
  source 1..22: mol_type = other DNA
attagccaggtgtggtgccaca

SEQ ID NO: 8570 - DNA, 22 bp, synthetic construct
  misc_feature 1..22: note = chemically synthesized
  source 1..22: mol_type = other DNA
gccaggtgtggtgccacatgcc

SEQ ID NO: 8571 - DNA, 22 bp, synthetic construct
  misc_feature 1..22: note = chemically synthesized
  source 1..22: mol_type = other DNA
tagtcccagctacctgggaggc

SEQ ID NO: 8572 - DNA, 22 bp, synthetic construct
  misc_feature 1..22: note = chemically synthesized
  source 1..22: mol_type = other DNA
cctgggaggctgaagtggaagg

SEQ ID NO: 8573 - DNA, 22 bp, synthetic construct
  misc_feature 1..22: note = chemically synthesized
  source 1..22: mol_type = other DNA
ggaggctgaagtggaaggatcg

SEQ ID NO: 8574 - DNA, 22 bp, synthetic construct
  misc_feature 1..22: note = chemically synthesized
  source 1..22: mol_type = other DNA
aagtggaaggatcgcctgagcc

SEQ ID NO: 8575 - DNA, 22 bp, synthetic construct
  misc_feature 1..22: note = chemically synthesized
  source 1..22: mol_type = other DNA
agcccaggaggtggaggccaca

SEQ ID NO: 8576 - DNA, 22 bp, synthetic construct
  misc_feature 1..22: note = chemically synthesized
  source 1..22: mol_type = other DNA
tgacaagctactgcattccagc

SEQ ID NO: 8577 - DNA, 22 bp, synthetic construct
  misc_feature 1..22: note = chemically synthesized
  source 1..22: mol_type = other DNA
ctgcattccagcctgggcaaca

SEQ ID NO: 8578 - DNA, 22 bp, synthetic construct
  misc_feature 1..22: note = chemically synthesized
  source 1..22: mol_type = other DNA
cattccagcctgggcaacagag

SEQ ID NO: 8579 - DNA, 22 bp, synthetic construct
  misc_feature 1..22: note = chemically synthesized
  source 1..22: mol_type = other DNA
cagcctgggcaacagagtgaga

SEQ ID NO: 8580 - DNA, 22 bp, synthetic construct
  misc_feature 1..22: note = chemically synthesized
  source 1..22: mol_type = other DNA
ggcaacagagtgagatgagaga

SEQ ID NO: 8581 - DNA, 22 bp, synthetic construct
  misc_feature 1..22: note = chemically synthesized
  source 1..22: mol_type = other DNA
tagttaacttaatgaacagcaa

SEQ ID NO: 8582 - DNA, 22 bp, synthetic construct
  misc_feature 1..22: note = chemically synthesized
  source 1..22: mol_type = other DNA
agttaacttaatgaacagcaat

SEQ ID NO: 8583 - DNA, 22 bp, synthetic construct
  misc_feature 1..22: note = chemically synthesized
  source 1..22: mol_type = other DNA
gttaacttaatgaacagcaata

SEQ ID NO: 8584 - DNA, 22 bp, synthetic construct
  misc_feature 1..22: note = chemically synthesized
  source 1..22: mol_type = other DNA
acttaatgaacagcaataactc

SEQ ID NO: 8585 - DNA, 22 bp, synthetic construct
  misc_feature 1..22: note = chemically synthesized
  source 1..22: mol_type = other DNA
aatgaacagcaataactctata

SEQ ID NO: 8586 - DNA, 22 bp, synthetic construct
  misc_feature 1..22: note = chemically synthesized
  source 1..22: mol_type = other DNA
atgaacagcaataactctataa

SEQ ID NO: 8587 - DNA, 22 bp, synthetic construct
  misc_feature 1..22: note = chemically synthesized
  source 1..22: mol_type = other DNA
tataaaatgaaacactgggaga

SEQ ID NO: 8588 - DNA, 22 bp, synthetic construct
  misc_feature 1..22: note = chemically synthesized
  source 1..22: mol_type = other DNA
taaaatgaaacactgggagaaa

SEQ ID NO: 8589 - DNA, 22 bp, synthetic construct
  misc_feature 1..22: note = chemically synthesized
  source 1..22: mol_type = other DNA
ggagaaaaaagaattaaaaaat

SEQ ID NO: 8590 - DNA, 22 bp, synthetic construct
  misc_feature 1..22: note = chemically synthesized
  source 1..22: mol_type = other DNA
aaaaatggaaagagaatgagtg

SEQ ID NO: 8591 - DNA, 22 bp, synthetic construct
  misc_feature 1..22: note = chemically synthesized
  source 1..22: mol_type = other DNA
tgggacccttaatacatgcata

SEQ ID NO: 8592 - DNA, 22 bp, synthetic construct
  misc_feature 1..22: note = chemically synthesized
  source 1..22: mol_type = other DNA
aatacatgcataattgaaatct

SEQ ID NO: 8593 - DNA, 22 bp, synthetic construct
  misc_feature 1..22: note = chemically synthesized
  source 1..22: mol_type = other DNA
atacatgcataattgaaatctt

SEQ ID NO: 8594 - DNA, 22 bp, synthetic construct
  misc_feature 1..22: note = chemically synthesized
  source 1..22: mol_type = other DNA
aaatctttaaaagaaaaagggg

SEQ ID NO: 8595 - DNA, 22 bp, synthetic construct
  misc_feature 1..22: note = chemically synthesized
  source 1..22: mol_type = other DNA
taaaagaaaaagggggtagcag

SEQ ID NO: 8596 - DNA, 22 bp, synthetic construct
  misc_feature 1..22: note = chemically synthesized
  source 1..22: mol_type = other DNA
aaaagaaaaagggggtagcaga

SEQ ID NO: 8597 - DNA, 22 bp, synthetic construct
  misc_feature 1..22: note = chemically synthesized
  source 1..22: mol_type = other DNA
aaagaaaaagggggtagcagaa

SEQ ID NO: 8598 - DNA, 22 bp, synthetic construct
  misc_feature 1..22: note = chemically synthesized
  source 1..22: mol_type = other DNA
agacaagtggaagatgggcccc

SEQ ID NO: 8599 - DNA, 22 bp, synthetic construct
  misc_feature 1..22: note = chemically synthesized
  source 1..22: mol_type = other DNA
atcagtgtcagctcccatgatg

SEQ ID NO: 8600 - DNA, 22 bp, synthetic construct
  misc_feature 1..22: note = chemically synthesized
  source 1..22: mol_type = other DNA
ccatgatgacgttcccccagcc

SEQ ID NO: 8601 - DNA, 22 bp, synthetic construct
  misc_feature 1..22: note = chemically synthesized
  source 1..22: mol_type = other DNA
ccccagcccccaccacccgggc

SEQ ID NO: 8602 - DNA, 22 bp, synthetic construct
  misc_feature 1..22: note = chemically synthesized
  source 1..22: mol_type = other DNA
ctggagggaaatgcggtgactt

SEQ ID NO: 8603 - DNA, 22 bp, synthetic construct
  misc_feature 1..22: note = chemically synthesized
  source 1..22: mol_type = other DNA
gagggaaatgcggtgactttgc

SEQ ID NO: 8604 - DNA, 22 bp, synthetic construct
  misc_feature 1..22: note = chemically synthesized
  source 1..22: mol_type = other DNA
tgctacatcccttcagacggtc

SEQ ID NO: 8605 - DNA, 22 bp, synthetic construct
  misc_feature 1..22: note = chemically synthesized
  source 1..22: mol_type = other DNA
gctacatcccttcagacggtcc

SEQ ID NO: 8606 - DNA, 22 bp, synthetic construct
  misc_feature 1..22: note = chemically synthesized
  source 1..22: mol_type = other DNA
ctacatcccttcagacggtccc

SEQ ID NO: 8607 - DNA, 22 bp, synthetic construct
  misc_feature 1..22: note = chemically synthesized
  source 1..22: mol_type = other DNA
catcccttcagacggtccctca

SEQ ID NO: 8608 - DNA, 22 bp, synthetic construct
  misc_feature 1..22: note = chemically synthesized
  source 1..22: mol_type = other DNA
cagacggtccctcactggtgtc

SEQ ID NO: 8609 - DNA, 22 bp, synthetic construct
  misc_feature 1..22: note = chemically synthesized
  source 1..22: mol_type = other DNA
agacggtccctcactggtgtcc

SEQ ID NO: 8610 - DNA, 22 bp, synthetic construct
  misc_feature 1..22: note = chemically synthesized
  source 1..22: mol_type = other DNA
actggtgtccctcagcccattc

SEQ ID NO: 8611 - DNA, 22 bp, synthetic construct
  misc_feature 1..22: note = chemically synthesized
  source 1..22: mol_type = other DNA
gtgtccctcagcccattcgcgt

SEQ ID NO: 8612 - DNA, 22 bp, synthetic construct
  misc_feature 1..22: note = chemically synthesized
  source 1..22: mol_type = other DNA
agcccattcgcgtgagctcact

SEQ ID NO: 8613 - DNA, 22 bp, synthetic construct
  misc_feature 1..22: note = chemically synthesized
  source 1..22: mol_type = other DNA
gcgtgagctcactctcccatta

SEQ ID NO: 8614 - DNA, 22 bp, synthetic construct
  misc_feature 1..22: note = chemically synthesized
  source 1..22: mol_type = other DNA
actctcccattaatttcagaaa

SEQ ID NO: 8615 - DNA, 22 bp, synthetic construct
  misc_feature 1..22: note = chemically synthesized
  source 1..22: mol_type = other DNA
tcccattaatttcagaaatcct

SEQ ID NO: 8616 - DNA, 22 bp, synthetic construct
  misc_feature 1..22: note = chemically synthesized
  source 1..22: mol_type = other DNA
ccattaatttcagaaatcctgg

SEQ ID NO: 8617 - DNA, 22 bp, synthetic construct
  misc_feature 1..22: note = chemically synthesized
  source 1..22: mol_type = other DNA
atttcagaaatcctggcctctc

SEQ ID NO: 8618 - DNA, 22 bp, synthetic construct
  misc_feature 1..22: note = chemically synthesized
  source 1..22: mol_type = other DNA
cagaaatcctggcctctctcca

SEQ ID NO: 8619 - DNA, 22 bp, synthetic construct
  misc_feature 1..22: note = chemically synthesized
  source 1..22: mol_type = other DNA
agaaatcctggcctctctccaa

SEQ ID NO: 8620 - DNA, 22 bp, synthetic construct
  misc_feature 1..22: note = chemically synthesized
  source 1..22: mol_type = other DNA
gcctctctccaagcctcctgct

SEQ ID NO: 8621 - DNA, 22 bp, synthetic construct
  misc_feature 1..22: note = chemically synthesized
  source 1..22: mol_type = other DNA
tctccaagcctcctgctcaaac

SEQ ID NO: 8622 - DNA, 22 bp, synthetic construct
  misc_feature 1..22: note = chemically synthesized
  source 1..22: mol_type = other DNA
tccaagcctcctgctcaaactc

SEQ ID NO: 8623 - DNA, 22 bp, synthetic construct
  misc_feature 1..22: note = chemically synthesized
  source 1..22: mol_type = other DNA
caagcctcctgctcaaactcta

SEQ ID NO: 8624 - DNA, 22 bp, synthetic construct
  misc_feature 1..22: note = chemically synthesized
  source 1..22: mol_type = other DNA
ctgctcaaactctaaattctgt

SEQ ID NO: 8625 - DNA, 22 bp, synthetic construct
  misc_feature 1..22: note = chemically synthesized
  source 1..22: mol_type = other DNA
ctcaaactctaaattctgtcac

SEQ ID NO: 8626 - DNA, 22 bp, synthetic construct
  misc_feature 1..22: note = chemically synthesized
  source 1..22: mol_type = other DNA
aaactctaaattctgtcaccct

SEQ ID NO: 8627 - DNA, 22 bp, synthetic construct
  misc_feature 1..22: note = chemically synthesized
  source 1..22: mol_type = other DNA
taaattctgtcaccctcagaag

SEQ ID NO: 8628 - DNA, 22 bp, synthetic construct
  misc_feature 1..22: note = chemically synthesized
  source 1..22: mol_type = other DNA
aattctgtcaccctcagaagat

SEQ ID NO: 8629 - DNA, 22 bp, synthetic construct
  misc_feature 1..22: note = chemically synthesized
  source 1..22: mol_type = other DNA
tgtcaccctcagaagattcagc

SEQ ID NO: 8630 - DNA, 22 bp, synthetic construct
  misc_feature 1..22: note = chemically synthesized
  source 1..22: mol_type = other DNA
tcaccctcagaagattcagcag

SEQ ID NO: 8631 - DNA, 22 bp, synthetic construct
  misc_feature 1..22: note = chemically synthesized
  source 1..22: mol_type = other DNA
agaagattcagcagcatcccgt

SEQ ID NO: 8632 - DNA, 22 bp, synthetic construct
  misc_feature 1..22: note = chemically synthesized
  source 1..22: mol_type = other DNA
agcagcatcccgtattctctct

SEQ ID NO: 8633 - DNA, 22 bp, synthetic construct
  misc_feature 1..22: note = chemically synthesized
  source 1..22: mol_type = other DNA
tctctgagtgttcactatgtac

SEQ ID NO: 8634 - DNA, 22 bp, synthetic construct
  misc_feature 1..22: note = chemically synthesized
  source 1..22: mol_type = other DNA
tctgagtgttcactatgtaccg

SEQ ID NO: 8635 - DNA, 22 bp, synthetic construct
  misc_feature 1..22: note = chemically synthesized
  source 1..22: mol_type = other DNA
tgagtgttcactatgtaccggg

SEQ ID NO: 8636 - DNA, 22 bp, synthetic construct
  misc_feature 1..22: note = chemically synthesized
  source 1..22: mol_type = other DNA
agtgttcactatgtaccgggtg

SEQ ID NO: 8637 - DNA, 22 bp, synthetic construct
  misc_feature 1..22: note = chemically synthesized
  source 1..22: mol_type = other DNA
actatgtaccgggtgccgtgtg

SEQ ID NO: 8638 - DNA, 22 bp, synthetic construct
  misc_feature 1..22: note = chemically synthesized
  source 1..22: mol_type = other DNA
tgtaccgggtgccgtgtgggca

SEQ ID NO: 8639 - DNA, 22 bp, synthetic construct
  misc_feature 1..22: note = chemically synthesized
  source 1..22: mol_type = other DNA
gagttgcagaggagagtgaggc

SEQ ID NO: 8640 - DNA, 22 bp, synthetic construct
  misc_feature 1..22: note = chemically synthesized
  source 1..22: mol_type = other DNA
cagaggagagtgaggcggacag

SEQ ID NO: 8641 - DNA, 22 bp, synthetic construct
  misc_feature 1..22: note = chemically synthesized
  source 1..22: mol_type = other DNA
tgcctgtggggacaccgcctgg

SEQ ID NO: 8642 - DNA, 22 bp, synthetic construct
  misc_feature 1..22: note = chemically synthesized
  source 1..22: mol_type = other DNA
cctgtggggacaccgcctggtg

SEQ ID NO: 8643 - DNA, 22 bp, synthetic construct
  misc_feature 1..22: note = chemically synthesized
  source 1..22: mol_type = other DNA
tggggacaccgcctggtgggaa

SEQ ID NO: 8644 - DNA, 22 bp, synthetic construct
  misc_feature 1..22: note = chemically synthesized
  source 1..22: mol_type = other DNA
gtgggaagtccagccagccccc

SEQ ID NO: 8645 - DNA, 22 bp, synthetic construct
  misc_feature 1..22: note = chemically synthesized
  source 1..22: mol_type = other DNA
cagagagaggagatgctactgg

SEQ ID NO: 8646 - DNA, 22 bp, synthetic construct
  misc_feature 1..22: note = chemically synthesized
  source 1..22: mol_type = other DNA
ctggtgttcctgagtggtcctc

SEQ ID NO: 8647 - DNA, 22 bp, synthetic construct
  misc_feature 1..22: note = chemically synthesized
  source 1..22: mol_type = other DNA
gtgttcctgagtggtcctcggg

SEQ ID NO: 8648 - DNA, 22 bp, synthetic construct
  misc_feature 1..22: note = chemically synthesized
  source 1..22: mol_type = other DNA
ctgagtggtcctcgggagggac

SEQ ID NO: 8649 - DNA, 22 bp, synthetic construct
  misc_feature 1..22: note = chemically synthesized
  source 1..22: mol_type = other DNA
agtggtcctcgggagggacctc

SEQ ID NO: 8650 - DNA, 22 bp, synthetic construct
  misc_feature 1..22: note = chemically synthesized
  source 1..22: mol_type = other DNA
gggagggacctcctatccctcc

SEQ ID NO: 8651 - DNA, 22 bp, synthetic construct
  misc_feature 1..22: note = chemically synthesized
  source 1..22: mol_type = other DNA
ctatccctcctgtcccctgccc

SEQ ID NO: 8652 - DNA, 22 bp, synthetic construct
  misc_feature 1..22: note = chemically synthesized
  source 1..22: mol_type = other DNA
tccctcctgtcccctgccctgc

SEQ ID NO: 8653 - DNA, 22 bp, synthetic construct
  misc_feature 1..22: note = chemically synthesized
  source 1..22: mol_type = other DNA
ctgtcccctgccctgccctgcc

SEQ ID NO: 8654 - DNA, 22 bp, synthetic construct
  misc_feature 1..22: note = chemically synthesized
  source 1..22: mol_type = other DNA
tcccctgccctgccctgcccag

SEQ ID NO: 8655 - DNA, 22 bp, synthetic construct
  misc_feature 1..22: note = chemically synthesized
  source 1..22: mol_type = other DNA
ccctgccctgcccagcaccggc

SEQ ID NO: 8656 - DNA, 22 bp, synthetic construct
  misc_feature 1..22: note = chemically synthesized
  source 1..22: mol_type = other DNA
ccctgcccagcaccggccctcc

SEQ ID NO: 8657 - DNA, 22 bp, synthetic construct
  misc_feature 1..22: note = chemically synthesized
  source 1..22: mol_type = other DNA
cccagcaccggccctccctcgg

SEQ ID NO: 8658 - DNA, 22 bp, synthetic construct
  misc_feature 1..22: note = chemically synthesized
  source 1..22: mol_type = other DNA
cctcggttggccagcctcagga

SEQ ID NO: 8659 - DNA, 22 bp, synthetic construct
  misc_feature 1..22: note = chemically synthesized
  source 1..22: mol_type = other DNA
ggttggccagcctcaggaatga

SEQ ID NO: 8660 - DNA, 22 bp, synthetic construct
  misc_feature 1..22: note = chemically synthesized
  source 1..22: mol_type = other DNA
gccagcctcaggaatgaggagt

SEQ ID NO: 8661 - DNA, 22 bp, synthetic construct
  misc_feature 1..22: note = chemically synthesized
  source 1..22: mol_type = other DNA
aggaatgaggagtccctcattc

SEQ ID NO: 8662 - DNA, 22 bp, synthetic construct
  misc_feature 1..22: note = chemically synthesized
  source 1..22: mol_type = other DNA
attccagcccagctaaccaatc

SEQ ID NO: 8663 - DNA, 22 bp, synthetic construct
  misc_feature 1..22: note = chemically synthesized
  source 1..22: mol_type = other DNA
cagcccagctaaccaatcccct

SEQ ID NO: 8664 - DNA, 22 bp, synthetic construct
  misc_feature 1..22: note = chemically synthesized
  source 1..22: mol_type = other DNA
accaatccccttcctaagctcc

SEQ ID NO: 8665 - DNA, 22 bp, synthetic construct
  misc_feature 1..22: note = chemically synthesized
  source 1..22: mol_type = other DNA
cctaagctccaagcccctgctc

SEQ ID NO: 8666 - DNA, 22 bp, synthetic construct
  misc_feature 1..22: note = chemically synthesized
  source 1..22: mol_type = other DNA
ctaagctccaagcccctgctcc

SEQ ID NO: 8667 - DNA, 22 bp, synthetic construct
  misc_feature 1..22: note = chemically synthesized
  source 1..22: mol_type = other DNA
agctccaagcccctgctcctcc

SEQ ID NO: 8668 - DNA, 22 bp, synthetic construct
  misc_feature 1..22: note = chemically synthesized
  source 1..22: mol_type = other DNA
caagcccctgctcctcctgcct

SEQ ID NO: 8669 - DNA, 22 bp, synthetic construct
  misc_feature 1..22: note = chemically synthesized
  source 1..22: mol_type = other DNA
ctcctcctgcctccatggaacc

SEQ ID NO: 8670 - DNA, 22 bp, synthetic construct
  misc_feature 1..22: note = chemically synthesized
  source 1..22: mol_type = other DNA
ctcctgcctccatggaacccgg

SEQ ID NO: 8671 - DNA, 22 bp, synthetic construct
  misc_feature 1..22: note = chemically synthesized
  source 1..22: mol_type = other DNA
ctgcctccatggaacccggctc

SEQ ID NO: 8672 - DNA, 22 bp, synthetic construct
  misc_feature 1..22: note = chemically synthesized
  source 1..22: mol_type = other DNA
cctccatggaacccggctccac

SEQ ID NO: 8673 - DNA, 22 bp, synthetic construct
  misc_feature 1..22: note = chemically synthesized
  source 1..22: mol_type = other DNA
catggaacccggctccaccacc

SEQ ID NO: 8674 - DNA, 22 bp, synthetic construct
  misc_feature 1..22: note = chemically synthesized
  source 1..22: mol_type = other DNA
caccaccagcacccacacacct

SEQ ID NO: 8675 - DNA, 22 bp, synthetic construct
  misc_feature 1..22: note = chemically synthesized
  source 1..22: mol_type = other DNA
acactcctccattcctggctct

SEQ ID NO: 8676 - DNA, 22 bp, synthetic construct
  misc_feature 1..22: note = chemically synthesized
  source 1..22: mol_type = other DNA
ctccattcctggctcttgccct

SEQ ID NO: 8677 - DNA, 22 bp, synthetic construct
  misc_feature 1..22: note = chemically synthesized
  source 1..22: mol_type = other DNA
cattcctggctcttgcccttct

SEQ ID NO: 8678 - DNA, 22 bp, synthetic construct
  misc_feature 1..22: note = chemically synthesized
  source 1..22: mol_type = other DNA
ctggctcttgcccttctgccta

SEQ ID NO: 8679 - DNA, 22 bp, synthetic construct
  misc_feature 1..22: note = chemically synthesized
  source 1..22: mol_type = other DNA
gctcttgcccttctgcctagca

SEQ ID NO: 8680 - DNA, 22 bp, synthetic construct
  misc_feature 1..22: note = chemically synthesized
  source 1..22: mol_type = other DNA
ttgcccttctgcctagcactgc

SEQ ID NO: 8681 - DNA, 22 bp, synthetic construct
  misc_feature 1..22: note = chemically synthesized
  source 1..22: mol_type = other DNA
gcccttctgcctagcactgctc

SEQ ID NO: 8682 - DNA, 22 bp, synthetic construct
  misc_feature 1..22: note = chemically synthesized
  source 1..22: mol_type = other DNA
cccttctgcctagcactgctca

SEQ ID NO: 8683 - DNA, 22 bp, synthetic construct
  misc_feature 1..22: note = chemically synthesized
  source 1..22: mol_type = other DNA
ctgcctagcactgctcagatct

SEQ ID NO: 8684 - DNA, 22 bp, synthetic construct
  misc_feature 1..22: note = chemically synthesized
  source 1..22: mol_type = other DNA
tgcctagcactgctcagatctc

SEQ ID NO: 8685 - DNA, 22 bp, synthetic construct
  misc_feature 1..22: note = chemically synthesized
  source 1..22: mol_type = other DNA
cctagcactgctcagatctctc

SEQ ID NO: 8686 - DNA, 22 bp, synthetic construct
  misc_feature 1..22: note = chemically synthesized
  source 1..22: mol_type = other DNA
gcactgctcagatctctctcac

SEQ ID NO: 8687 - DNA, 22 bp, synthetic construct
  misc_feature 1..22: note = chemically synthesized
  source 1..22: mol_type = other DNA
ctcagatctctctcaccttaaa

SEQ ID NO: 8688 - DNA, 22 bp, synthetic construct
  misc_feature 1..22: note = chemically synthesized
  source 1..22: mol_type = other DNA
agatctctctcaccttaaaatc

SEQ ID NO: 8689 - DNA, 22 bp, synthetic construct
  misc_feature 1..22: note = chemically synthesized
  source 1..22: mol_type = other DNA
tctcaccttaaaatcttttccc

SEQ ID NO: 8690 - DNA, 22 bp, synthetic construct
  misc_feature 1..22: note = chemically synthesized
  source 1..22: mol_type = other DNA
tcaccttaaaatcttttcccac

SEQ ID NO: 8691 - DNA, 22 bp, synthetic construct
  misc_feature 1..22: note = chemically synthesized
  source 1..22: mol_type = other DNA
accttaaaatcttttcccacca

SEQ ID NO: 8692 - DNA, 22 bp, synthetic construct
  misc_feature 1..22: note = chemically synthesized
  source 1..22: mol_type = other DNA
aaaatcttttcccaccagcctg

SEQ ID NO: 8693 - DNA, 22 bp, synthetic construct
  misc_feature 1..22: note = chemically synthesized
  source 1..22: mol_type = other DNA
aaatcttttcccaccagcctgg

SEQ ID NO: 8694 - DNA, 22 bp, synthetic construct
  misc_feature 1..22: note = chemically synthesized
  source 1..22: mol_type = other DNA
ttcccaccagcctgggcaacat

SEQ ID NO: 8695 - DNA, 22 bp, synthetic construct
  misc_feature 1..22: note = chemically synthesized
  source 1..22: mol_type = other DNA
tcccaccagcctgggcaacata

SEQ ID NO: 8696 - DNA, 22 bp, synthetic construct
  misc_feature 1..22: note = chemically synthesized
  source 1..22: mol_type = other DNA
cccaccagcctgggcaacatag

SEQ ID NO: 8697 - DNA, 22 bp, synthetic construct
  misc_feature 1..22: note = chemically synthesized
  source 1..22: mol_type = other DNA
ccaccagcctgggcaacatagc

SEQ ID NO: 8698 - DNA, 22 bp, synthetic construct
  misc_feature 1..22: note = chemically synthesized
  source 1..22: mol_type = other DNA
ggcaacatagcaagaccccatt

SEQ ID NO: 8699 - DNA, 22 bp, synthetic construct
  misc_feature 1..22: note = chemically synthesized
  source 1..22: mol_type = other DNA
ctctaaaaaattttttttaatt

SEQ ID NO: 8700 - DNA, 22 bp, synthetic construct
  misc_feature 1..22: note = chemically synthesized
  source 1..22: mol_type = other DNA
tctaaaaaattttttttaattt

SEQ ID NO: 8701 - DNA, 22 bp, synthetic construct
  misc_feature 1..22: note = chemically synthesized
  source 1..22: mol_type = other DNA
taaaaaattttttttaatttgc

SEQ ID NO: 8702 - DNA, 22 bp, synthetic construct
  misc_feature 1..22: note = chemically synthesized
  source 1..22: mol_type = other DNA
aaaaattttttttaatttgcca

SEQ ID NO: 8703 - DNA, 22 bp, synthetic construct
  misc_feature 1..22: note = chemically synthesized
  source 1..22: mol_type = other DNA
tttttaatttgccaggcacagt

SEQ ID NO: 8704 - DNA, 22 bp, synthetic construct
  misc_feature 1..22: note = chemically synthesized
  source 1..22: mol_type = other DNA
ttttaatttgccaggcacagtg

SEQ ID NO: 8705 - DNA, 22 bp, synthetic construct
  misc_feature 1..22: note = chemically synthesized
  source 1..22: mol_type = other DNA
tttaatttgccaggcacagtgg

SEQ ID NO: 8706 - DNA, 22 bp, synthetic construct
  misc_feature 1..22: note = chemically synthesized
  source 1..22: mol_type = other DNA
ttaatttgccaggcacagtggt

SEQ ID NO: 8707 - DNA, 22 bp, synthetic construct
  misc_feature 1..22: note = chemically synthesized
  source 1..22: mol_type = other DNA
taatttgccaggcacagtggtg

SEQ ID NO: 8708 - DNA, 22 bp, synthetic construct
  misc_feature 1..22: note = chemically synthesized
  source 1..22: mol_type = other DNA
aatttgccaggcacagtggtgc

SEQ ID NO: 8709 - DNA, 22 bp, synthetic construct
  misc_feature 1..22: note = chemically synthesized
  source 1..22: mol_type = other DNA
atttgccaggcacagtggtgca

SEQ ID NO: 8710 - DNA, 22 bp, synthetic construct
  misc_feature 1..22: note = chemically synthesized
  source 1..22: mol_type = other DNA
gccaggcacagtggtgcacacc

SEQ ID NO: 8711 - DNA, 22 bp, synthetic construct
  misc_feature 1..22: note = chemically synthesized
  source 1..22: mol_type = other DNA
ccaggcacagtggtgcacacct

SEQ ID NO: 8712 - DNA, 22 bp, synthetic construct
  misc_feature 1..22: note = chemically synthesized
  source 1..22: mol_type = other DNA
taagtcctaactacttgggagg

SEQ ID NO: 8713 - DNA, 22 bp, synthetic construct
  misc_feature 1..22: note = chemically synthesized
  source 1..22: mol_type = other DNA
actacttgggaggctgaggtgg

SEQ ID NO: 8714 - DNA, 22 bp, synthetic construct
  misc_feature 1..22: note = chemically synthesized
  source 1..22: mol_type = other DNA
cttgggaggctgaggtgggagg

SEQ ID NO: 8715 - DNA, 22 bp, synthetic construct
  misc_feature 1..22: note = chemically synthesized
  source 1..22: mol_type = other DNA
gggaggctgaggtgggaggatg

SEQ ID NO: 8716 - DNA, 22 bp, synthetic construct
  misc_feature 1..22: note = chemically synthesized
  source 1..22: mol_type = other DNA
ggaggctgaggtgggaggatgg

SEQ ID NO: 8717 - DNA, 22 bp, synthetic construct
  misc_feature 1..22: note = chemically synthesized
  source 1..22: mol_type = other DNA
aggtgggaggatggcttgagcc

SEQ ID NO: 8718 - DNA, 22 bp, synthetic construct
  misc_feature 1..22: note = chemically synthesized
  source 1..22: mol_type = other DNA
gagcccaggagttcgaggttgc

SEQ ID NO: 8719 - DNA, 22 bp, synthetic construct
  misc_feature 1..22: note = chemically synthesized
  source 1..22: mol_type = other DNA
agcccaggagttcgaggttgca

SEQ ID NO: 8720 - DNA, 22 bp, synthetic construct
  misc_feature 1..22: note = chemically synthesized
  source 1..22: mol_type = other DNA
gaggttgcagtgagctatgatc

SEQ ID NO: 8721 - DNA, 22 bp, synthetic construct
  misc_feature 1..22: note = chemically synthesized
  source 1..22: mol_type = other DNA
cagtgagctatgatcctgccac

SEQ ID NO: 8722 - DNA, 22 bp, synthetic construct
  misc_feature 1..22: note = chemically synthesized
  source 1..22: mol_type = other DNA
tgatcctgccactacactcctg

SEQ ID NO: 8723 - DNA, 22 bp, synthetic construct
  misc_feature 1..22: note = chemically synthesized
  source 1..22: mol_type = other DNA
ccactacactcctgtctctaaa

SEQ ID NO: 8724 - DNA, 22 bp, synthetic construct
  misc_feature 1..22: note = chemically synthesized
  source 1..22: mol_type = other DNA
cactcctgtctctaaaaaaaaa

SEQ ID NO: 8725 - DNA, 22 bp, synthetic construct
  misc_feature 1..22: note = chemically synthesized
  source 1..22: mol_type = other DNA
ctgtctctaaaaaaaaaatgtc

SEQ ID NO: 8726 - DNA, 22 bp, synthetic construct
  misc_feature 1..22: note = chemically synthesized
  source 1..22: mol_type = other DNA
tctctaaaaaaaaaatgtccaa

SEQ ID NO: 8727 - DNA, 22 bp, synthetic construct
  misc_feature 1..22: note = chemically synthesized
  source 1..22: mol_type = other DNA
taaaaaaaaaatgtccaagata

SEQ ID NO: 8728 - DNA, 22 bp, synthetic construct
  misc_feature 1..22: note = chemically synthesized
  source 1..22: mol_type = other DNA
aaaaaaaaatgtccaagatact

SEQ ID NO: 8729 - DNA, 22 bp, synthetic construct
  misc_feature 1..22: note = chemically synthesized
  source 1..22: mol_type = other DNA
aggtccttcagtcaagatttat

SEQ ID NO: 8730 - DNA, 22 bp, synthetic construct
  misc_feature 1..22: note = chemically synthesized
  source 1..22: mol_type = other DNA
ggtccttcagtcaagatttatt

SEQ ID NO: 8731 - DNA, 22 bp, synthetic construct
  misc_feature 1..22: note = chemically synthesized
  source 1..22: mol_type = other DNA
cagtcaagatttattacagaag

SEQ ID NO: 8732 - DNA, 22 bp, synthetic construct
  misc_feature 1..22: note = chemically synthesized
  source 1..22: mol_type = other DNA
agtcaagatttattacagaagg

SEQ ID NO: 8733 - DNA, 22 bp, synthetic construct
  misc_feature 1..22: note = chemically synthesized
  source 1..22: mol_type = other DNA
attacagaaggatccagggaag

SEQ ID NO: 8734 - DNA, 22 bp, synthetic construct
  misc_feature 1..22: note = chemically synthesized
  source 1..22: mol_type = other DNA
ttacagaaggatccagggaagg

SEQ ID NO: 8735 - DNA, 22 bp, synthetic construct
  misc_feature 1..22: note = chemically synthesized
  source 1..22: mol_type = other DNA
cagaaggatccagggaagggtc

SEQ ID NO: 8736 - DNA, 22 bp, synthetic construct
  misc_feature 1..22: note = chemically synthesized
  source 1..22: mol_type = other DNA
gggagatgagaggagcagggat

SEQ ID NO: 8737 - DNA, 22 bp, synthetic construct
  misc_feature 1..22: note = chemically synthesized
  source 1..22: mol_type = other DNA
ggagatgagaggagcagggatc

SEQ ID NO: 8738 - DNA, 22 bp, synthetic construct
  misc_feature 1..22: note = chemically synthesized
  source 1..22: mol_type = other DNA
ccaggatctctctgtgctcacg

SEQ ID NO: 8739 - DNA, 22 bp, synthetic construct
  misc_feature 1..22: note = chemically synthesized
  source 1..22: mol_type = other DNA
caggatctctctgtgctcacgt

SEQ ID NO: 8740 - DNA, 22 bp, synthetic construct
  misc_feature 1..22: note = chemically synthesized
  source 1..22: mol_type = other DNA
tctgtgctcacgtcccccaccc

SEQ ID NO: 8741 - DNA, 22 bp, synthetic construct
  misc_feature 1..22: note = chemically synthesized
  source 1..22: mol_type = other DNA
tgtgctcacgtcccccacccat

SEQ ID NO: 8742 - DNA, 22 bp, synthetic construct
  misc_feature 1..22: note = chemically synthesized
  source 1..22: mol_type = other DNA
tgctcacgtcccccacccatcc

SEQ ID NO: 8743 - DNA, 22 bp, synthetic construct
  misc_feature 1..22: note = chemically synthesized
  source 1..22: mol_type = other DNA
acgtcccccacccatcccaact

SEQ ID NO: 8744 - DNA, 22 bp, synthetic construct
  misc_feature 1..22: note = chemically synthesized
  source 1..22: mol_type = other DNA
accccacctctacacacacaca

SEQ ID NO: 8745 - DNA, 22 bp, synthetic construct
  misc_feature 1..22: note = chemically synthesized
  source 1..22: mol_type = other DNA
tacacacacacacacacacaca

SEQ ID NO: 8746 - DNA, 22 bp, synthetic construct
  misc_feature 1..22: note = chemically synthesized
  source 1..22: mol_type = other DNA
cacacacacacacacacacata

SEQ ID NO: 8747 - DNA, 22 bp, synthetic construct
  misc_feature 1..22: note = chemically synthesized
  source 1..22: mol_type = other DNA
acacacacactcacgcaacaca

SEQ ID NO: 8748 - DNA, 22 bp, synthetic construct
  misc_feature 1..22: note = chemically synthesized
  source 1..22: mol_type = other DNA
acgcaacacactcacacacaca

SEQ ID NO: 8749 - DNA, 22 bp, synthetic construct
  misc_feature 1..22: note = chemically synthesized
  source 1..22: mol_type = other DNA
acacacacaacatacataacac

SEQ ID NO: 8750 - DNA, 22 bp, synthetic construct
  misc_feature 1..22: note = chemically synthesized
  source 1..22: mol_type = other DNA
acaacatacacacacaacacac

SEQ ID NO: 8751 - DNA, 22 bp, synthetic construct
  misc_feature 1..22: note = chemically synthesized
  source 1..22: mol_type = other DNA
gcacaacatacacacacgcaca

SEQ ID NO: 8752 - DNA, 22 bp, synthetic construct
  misc_feature 1..22: note = chemically synthesized
  source 1..22: mol_type = other DNA
acacaacacacaaacatacata

SEQ ID NO: 8753 - DNA, 22 bp, synthetic construct
  misc_feature 1..22: note = chemically synthesized
  source 1..22: mol_type = other DNA
acacaatacacacacacaacac

SEQ ID NO: 8754 - DNA, 22 bp, synthetic construct
  misc_feature 1..22: note = chemically synthesized
  source 1..22: mol_type = other DNA
atacacaacatacatacacaca

SEQ ID NO: 8755 - DNA, 22 bp, synthetic construct
  misc_feature 1..22: note = chemically synthesized
  source 1..22: mol_type = other DNA
acatacacaacatacactcgca

SEQ ID NO: 8756 - DNA, 22 bp, synthetic construct
  misc_feature 1..22: note = chemically synthesized
  source 1..22: mol_type = other DNA
gcacaacatacacacatgcaca

SEQ ID NO: 8757 - DNA, 22 bp, synthetic construct
  misc_feature 1..22: note = chemically synthesized
  source 1..22: mol_type = other DNA
acacacaagatacacacaacat

SEQ ID NO: 8758 - DNA, 22 bp, synthetic construct
  misc_feature 1..22: note = chemically synthesized
  source 1..22: mol_type = other DNA
acacaacatacacacacaacac

SEQ ID NO: 8759 - DNA, 22 bp, synthetic construct
  misc_feature 1..22: note = chemically synthesized
  source 1..22: mol_type = other DNA
tcacacacaacataccctctca

SEQ ID NO: 8760 - DNA, 22 bp, synthetic construct
  misc_feature 1..22: note = chemically synthesized
  source 1..22: mol_type = other DNA
acacacaacataccctctcaca

SEQ ID NO: 8761 - DNA, 22 bp, synthetic construct
  misc_feature 1..22: note = chemically synthesized
  source 1..22: mol_type = other DNA
tcacatacacgacatacacaca

SEQ ID NO: 8762 - DNA, 22 bp, synthetic construct
  misc_feature 1..22: note = chemically synthesized
  source 1..22: mol_type = other DNA
acatacacgacatacacacaca

SEQ ID NO: 8763 - DNA, 22 bp, synthetic construct
  misc_feature 1..22: note = chemically synthesized
  source 1..22: mol_type = other DNA
tcgcgcacatatacacacacac

SEQ ID NO: 8764 - DNA, 22 bp, synthetic construct
  misc_feature 1..22: note = chemically synthesized
  source 1..22: mol_type = other DNA
gcgcacatatacacacacacaa

SEQ ID NO: 8765 - DNA, 22 bp, synthetic construct
  misc_feature 1..22: note = chemically synthesized
  source 1..22: mol_type = other DNA
actcacacacacacacagagtc

SEQ ID NO: 8766 - DNA, 22 bp, synthetic construct
  misc_feature 1..22: note = chemically synthesized
  source 1..22: mol_type = other DNA
acacacacacacagagtcccag

SEQ ID NO: 8767 - DNA, 22 bp, synthetic construct
  misc_feature 1..22: note = chemically synthesized
  source 1..22: mol_type = other DNA
aatctgcattcctcatatgcac

SEQ ID NO: 8768 - DNA, 22 bp, synthetic construct
  misc_feature 1..22: note = chemically synthesized
  source 1..22: mol_type = other DNA
cattcctcatatgcacatacgt

SEQ ID NO: 8769 - DNA, 22 bp, synthetic construct
  misc_feature 1..22: note = chemically synthesized
  source 1..22: mol_type = other DNA
ctcatatgcacatacgtgcaca

SEQ ID NO: 8770 - DNA, 22 bp, synthetic construct
  misc_feature 1..22: note = chemically synthesized
  source 1..22: mol_type = other DNA
atatgcacatacgtgcacacgc

SEQ ID NO: 8771 - DNA, 22 bp, synthetic construct
  misc_feature 1..22: note = chemically synthesized
  source 1..22: mol_type = other DNA
ttgggttgggaggagaagggca

SEQ ID NO: 8772 - DNA, 22 bp, synthetic construct
  misc_feature 1..22: note = chemically synthesized
  source 1..22: mol_type = other DNA
gggttgggaggagaagggcagg

SEQ ID NO: 8773 - DNA, 22 bp, synthetic construct
  misc_feature 1..22: note = chemically synthesized
  source 1..22: mol_type = other DNA
ggttgggaggagaagggcaggc

SEQ ID NO: 8774 - DNA, 22 bp, synthetic construct
  misc_feature 1..22: note = chemically synthesized
  source 1..22: mol_type = other DNA
ggaggagaagggcaggcagtta

SEQ ID NO: 8775 - DNA, 22 bp, synthetic construct
  misc_feature 1..22: note = chemically synthesized
  source 1..22: mol_type = other DNA
tcttccagatctccccacacct

SEQ ID NO: 8776 - DNA, 22 bp, synthetic construct
  misc_feature 1..22: note = chemically synthesized
  source 1..22: mol_type = other DNA
ccagatctccccacacctctgg

SEQ ID NO: 8777 - DNA, 22 bp, synthetic construct
  misc_feature 1..22: note = chemically synthesized
  source 1..22: mol_type = other DNA
cagatctccccacacctctggc

SEQ ID NO: 8778 - DNA, 22 bp, synthetic construct
  misc_feature 1..22: note = chemically synthesized
  source 1..22: mol_type = other DNA
cccacacctctggcacatgcct

SEQ ID NO: 8779 - DNA, 22 bp, synthetic construct
  misc_feature 1..22: note = chemically synthesized
  source 1..22: mol_type = other DNA
tggcacatgcctttcctggggt

SEQ ID NO: 8780 - DNA, 22 bp, synthetic construct
  misc_feature 1..22: note = chemically synthesized
  source 1..22: mol_type = other DNA
gcacatgcctttcctggggtcc

SEQ ID NO: 8781 - DNA, 22 bp, synthetic construct
  misc_feature 1..22: note = chemically synthesized
  source 1..22: mol_type = other DNA
tcctggggtcctggggtagaca

SEQ ID NO: 8782 - DNA, 22 bp, synthetic construct
  misc_feature 1..22: note = chemically synthesized
  source 1..22: mol_type = other DNA
cctggggtcctggggtagacag

SEQ ID NO: 8783 - DNA, 22 bp, synthetic construct
  misc_feature 1..22: note = chemically synthesized
  source 1..22: mol_type = other DNA
ctggggtcctggggtagacagg

SEQ ID NO: 8784 - DNA, 22 bp, synthetic construct
  misc_feature 1..22: note = chemically synthesized
  source 1..22: mol_type = other DNA
gggtcctggggtagacaggaag

SEQ ID NO: 8785 - DNA, 22 bp, synthetic construct
  misc_feature 1..22: note = chemically synthesized
  source 1..22: mol_type = other DNA
gggtagacaggaaggtgaggtg

SEQ ID NO: 8786 - DNA, 22 bp, synthetic construct
  misc_feature 1..22: note = chemically synthesized
  source 1..22: mol_type = other DNA
ctcagtccctgttcacagagtg

SEQ ID NO: 8787 - DNA, 22 bp, synthetic construct
  misc_feature 1..22: note = chemically synthesized
  source 1..22: mol_type = other DNA
agtccctgttcacagagtgggt

SEQ ID NO: 8788 - DNA, 22 bp, synthetic construct
  misc_feature 1..22: note = chemically synthesized
  source 1..22: mol_type = other DNA
ttcacagagtgggtgcggcaga

SEQ ID NO: 8789 - DNA, 22 bp, synthetic construct
  misc_feature 1..22: note = chemically synthesized
  source 1..22: mol_type = other DNA
acagagtgggtgcggcagagac

SEQ ID NO: 8790 - DNA, 22 bp, synthetic construct
  misc_feature 1..22: note = chemically synthesized
  source 1..22: mol_type = other DNA
aaagggacagagcaatcatgag

SEQ ID NO: 8791 - DNA, 22 bp, synthetic construct
  misc_feature 1..22: note = chemically synthesized
  source 1..22: mol_type = other DNA
agacagagggggagcaaagccg

SEQ ID NO: 8792 - DNA, 22 bp, synthetic construct
  misc_feature 1..22: note = chemically synthesized
  source 1..22: mol_type = other DNA
cacacttgcctttcaaaaatgg

SEQ ID NO: 8793 - DNA, 22 bp, synthetic construct
  misc_feature 1..22: note = chemically synthesized
  source 1..22: mol_type = other DNA
gcctttcaaaaatggatttcct

SEQ ID NO: 8794 - DNA, 22 bp, synthetic construct
  misc_feature 1..22: note = chemically synthesized
  source 1..22: mol_type = other DNA
cctttcaaaaatggatttcctc

SEQ ID NO: 8795 - DNA, 22 bp, synthetic construct
  misc_feature 1..22: note = chemically synthesized
  source 1..22: mol_type = other DNA
tcaaaaatggatttcctctcct

SEQ ID NO: 8796 - DNA, 22 bp, synthetic construct
  misc_feature 1..22: note = chemically synthesized
  source 1..22: mol_type = other DNA
caaaaatggatttcctctcctg

SEQ ID NO: 8797 - DNA, 22 bp, synthetic construct
  misc_feature 1..22: note = chemically synthesized
  source 1..22: mol_type = other DNA
aaaaatggatttcctctcctgg

SEQ ID NO: 8798 - DNA, 22 bp, synthetic construct
  misc_feature 1..22: note = chemically synthesized
  source 1..22: mol_type = other DNA
cctctcctgggattcagcctgc

SEQ ID NO: 8799 - DNA, 22 bp, synthetic construct
  misc_feature 1..22: note = chemically synthesized
  source 1..22: mol_type = other DNA
ctctcctgggattcagcctgcg

SEQ ID NO: 8800 - DNA, 22 bp, synthetic construct
  misc_feature 1..22: note = chemically synthesized
  source 1..22: mol_type = other DNA
tcctgggattcagcctgcgagt

SEQ ID NO: 8801 - DNA, 22 bp, synthetic construct
  misc_feature 1..22: note = chemically synthesized
  source 1..22: mol_type = other DNA
ctgggattcagcctgcgagtgc

SEQ ID NO: 8802 - DNA, 22 bp, synthetic construct
  misc_feature 1..22: note = chemically synthesized
  source 1..22: mol_type = other DNA
ggattcagcctgcgagtgcctg

SEQ ID NO: 8803 - DNA, 22 bp, synthetic construct
  misc_feature 1..22: note = chemically synthesized
  source 1..22: mol_type = other DNA
agcctgcgagtgcctggcccct

SEQ ID NO: 8804 - DNA, 22 bp, synthetic construct
  misc_feature 1..22: note = chemically synthesized
  source 1..22: mol_type = other DNA
cgagtgcctggcccctcacctt

SEQ ID NO: 8805 - DNA, 22 bp, synthetic construct
  misc_feature 1..22: note = chemically synthesized
  source 1..22: mol_type = other DNA
gcccctcaccttgatggaaagg

SEQ ID NO: 8806 - DNA, 22 bp, synthetic construct
  misc_feature 1..22: note = chemically synthesized
  source 1..22: mol_type = other DNA
accttgatggaaaggatggtca

SEQ ID NO: 8807 - DNA, 22 bp, synthetic construct
  misc_feature 1..22: note = chemically synthesized
  source 1..22: mol_type = other DNA
gatggaaaggatggtcattttc

SEQ ID NO: 8808 - DNA, 22 bp, synthetic construct
  misc_feature 1..22: note = chemically synthesized
  source 1..22: mol_type = other DNA
atggaaaggatggtcattttcc

SEQ ID NO: 8809 - DNA, 22 bp, synthetic construct
  misc_feature 1..22: note = chemically synthesized
  source 1..22: mol_type = other DNA
tcctccgagctcagctgctgga

SEQ ID NO: 8810 - DNA, 22 bp, synthetic construct
  misc_feature 1..22: note = chemically synthesized
  source 1..22: mol_type = other DNA
cctccgagctcagctgctggat

SEQ ID NO: 8811 - DNA, 22 bp, synthetic construct
  misc_feature 1..22: note = chemically synthesized
  source 1..22: mol_type = other DNA
ctccgagctcagctgctggata

SEQ ID NO: 8812 - DNA, 22 bp, synthetic construct
  misc_feature 1..22: note = chemically synthesized
  source 1..22: mol_type = other DNA
cgagctcagctgctggatatct

SEQ ID NO: 8813 - DNA, 22 bp, synthetic construct
  misc_feature 1..22: note = chemically synthesized
  source 1..22: mol_type = other DNA
agctgctggatatcttgaaagt

SEQ ID NO: 8814 - DNA, 22 bp, synthetic construct
  misc_feature 1..22: note = chemically synthesized
  source 1..22: mol_type = other DNA
ctggatatcttgaaagtccttg

SEQ ID NO: 8815 - DNA, 22 bp, synthetic construct
  misc_feature 1..22: note = chemically synthesized
  source 1..22: mol_type = other DNA
gatatcttgaaagtccttggcc

SEQ ID NO: 8816 - DNA, 22 bp, synthetic construct
  misc_feature 1..22: note = chemically synthesized
  source 1..22: mol_type = other DNA
gaaagtccttggccatgatggg

SEQ ID NO: 8817 - DNA, 22 bp, synthetic construct
  misc_feature 1..22: note = chemically synthesized
  source 1..22: mol_type = other DNA
aaagtccttggccatgatgggg

SEQ ID NO: 8818 - DNA, 22 bp, synthetic construct
  misc_feature 1..22: note = chemically synthesized
  source 1..22: mol_type = other DNA
ggccatgatggggcccgggctg

SEQ ID NO: 8819 - DNA, 22 bp, synthetic construct
  misc_feature 1..22: note = chemically synthesized
  source 1..22: mol_type = other DNA
gccatgatggggcccgggctgg

SEQ ID NO: 8820 - DNA, 22 bp, synthetic construct
  misc_feature 1..22: note = chemically synthesized
  source 1..22: mol_type = other DNA
gagctggagctggagctgggct

SEQ ID NO: 8821 - DNA, 22 bp, synthetic construct
  misc_feature 1..22: note = chemically synthesized
  source 1..22: mol_type = other DNA
gagctggagctgggctgggctg

SEQ ID NO: 8822 - DNA, 22 bp, synthetic construct
  misc_feature 1..22: note = chemically synthesized
  source 1..22: mol_type = other DNA
gagctgggctgggctgggctga

SEQ ID NO: 8823 - DNA, 22 bp, synthetic construct
  misc_feature 1..22: note = chemically synthesized
  source 1..22: mol_type = other DNA
ggctgggctgggctgaggttgc

SEQ ID NO: 8824 - DNA, 22 bp, synthetic construct
  misc_feature 1..22: note = chemically synthesized
  source 1..22: mol_type = other DNA
ggctgggctgaggttgctctga

SEQ ID NO: 8825 - DNA, 22 bp, synthetic construct
  misc_feature 1..22: note = chemically synthesized
  source 1..22: mol_type = other DNA
ggctgaggttgctctgagggct

SEQ ID NO: 8826 - DNA, 22 bp, synthetic construct
  misc_feature 1..22: note = chemically synthesized
  source 1..22: mol_type = other DNA
aggttgctctgagggctggggc

SEQ ID NO: 8827 - DNA, 22 bp, synthetic construct
  misc_feature 1..22: note = chemically synthesized
  source 1..22: mol_type = other DNA
ctctgagggctggggctggggc

SEQ ID NO: 8828 - DNA, 22 bp, synthetic construct
  misc_feature 1..22: note = chemically synthesized
  source 1..22: mol_type = other DNA
tgagggctggggctggggcaga

SEQ ID NO: 8829 - DNA, 22 bp, synthetic construct
  misc_feature 1..22: note = chemically synthesized
  source 1..22: mol_type = other DNA
agggctggggctggggcagagg

SEQ ID NO: 8830 - DNA, 22 bp, synthetic construct
  misc_feature 1..22: note = chemically synthesized
  source 1..22: mol_type = other DNA
gggctggggcagaggtgcagat

SEQ ID NO: 8831 - DNA, 22 bp, synthetic construct
  misc_feature 1..22: note = chemically synthesized
  source 1..22: mol_type = other DNA
gggcagaggtgcagattcacgt

SEQ ID NO: 8832 - DNA, 22 bp, synthetic construct
  misc_feature 1..22: note = chemically synthesized
  source 1..22: mol_type = other DNA
acgtggaggttgatggtgggat

SEQ ID NO: 8833 - DNA, 22 bp, synthetic construct
  misc_feature 1..22: note = chemically synthesized
  source 1..22: mol_type = other DNA
atggtgggatggaacgcagggt

SEQ ID NO: 8834 - DNA, 22 bp, synthetic construct
  misc_feature 1..22: note = chemically synthesized
  source 1..22: mol_type = other DNA
ggggtggtggcctgggtaggat

SEQ ID NO: 8835 - DNA, 22 bp, synthetic construct
  misc_feature 1..22: note = chemically synthesized
  source 1..22: mol_type = other DNA
agatcctacccaggccaccacc

SEQ ID NO: 8836 - DNA, 22 bp, synthetic construct
  misc_feature 1..22: note = chemically synthesized
  source 1..22: mol_type = other DNA
cccaggccaccaccccgaaccc

SEQ ID NO: 8837 - DNA, 22 bp, synthetic construct
  misc_feature 1..22: note = chemically synthesized
  source 1..22: mol_type = other DNA
cgaccctgcgttccatcccacc

SEQ ID NO: 8838 - DNA, 22 bp, synthetic construct
  misc_feature 1..22: note = chemically synthesized
  source 1..22: mol_type = other DNA
cgttccatcccaccatcaacct

SEQ ID NO: 8839 - DNA, 22 bp, synthetic construct
  misc_feature 1..22: note = chemically synthesized
  source 1..22: mol_type = other DNA
catcccaccatcaacctccacg

SEQ ID NO: 8840 - DNA, 22 bp, synthetic construct
  misc_feature 1..22: note = chemically synthesized
  source 1..22: mol_type = other DNA
cacgtgaatctgcacctctgcc

SEQ ID NO: 8841 - DNA, 22 bp, synthetic construct
  misc_feature 1..22: note = chemically synthesized
  source 1..22: mol_type = other DNA
cacctctgccccagccccagcc

SEQ ID NO: 8842 - DNA, 22 bp, synthetic construct
  misc_feature 1..22: note = chemically synthesized
  source 1..22: mol_type = other DNA
tgccccagccccagccctcaga

SEQ ID NO: 8843 - DNA, 22 bp, synthetic construct
  misc_feature 1..22: note = chemically synthesized
  source 1..22: mol_type = other DNA
ccccagccccagccctcagagc

SEQ ID NO: 8844 - DNA, 22 bp, synthetic construct
  misc_feature 1..22: note = chemically synthesized
  source 1..22: mol_type = other DNA
agagcaacctcagcccagccca

SEQ ID NO: 8845 - DNA, 22 bp, synthetic construct
  misc_feature 1..22: note = chemically synthesized
  source 1..22: mol_type = other DNA
agcccagcccagcccagctcca

SEQ ID NO: 8846 - DNA, 22 bp, synthetic construct
  misc_feature 1..22: note = chemically synthesized
  source 1..22: mol_type = other DNA
cagctccagctccagcccgggc

SEQ ID NO: 8847 - DNA, 22 bp, synthetic construct
  misc_feature 1..22: note = chemically synthesized
  source 1..22: mol_type = other DNA
cagctccagcccgggccccatc

SEQ ID NO: 8848 - DNA, 22 bp, synthetic construct
  misc_feature 1..22: note = chemically synthesized
  source 1..22: mol_type = other DNA
cagcccgggccccatcatggcc

SEQ ID NO: 8849 - DNA, 22 bp, synthetic construct
  misc_feature 1..22: note = chemically synthesized
  source 1..22: mol_type = other DNA
tcaagatatccagcagctgagc

SEQ ID NO: 8850 - DNA, 22 bp, synthetic construct
  misc_feature 1..22: note = chemically synthesized
  source 1..22: mol_type = other DNA
caagatatccagcagctgagct

SEQ ID NO: 8851 - DNA, 22 bp, synthetic construct
  misc_feature 1..22: note = chemically synthesized
  source 1..22: mol_type = other DNA
aagatatccagcagctgagctc

SEQ ID NO: 8852 - DNA, 22 bp, synthetic construct
  misc_feature 1..22: note = chemically synthesized
  source 1..22: mol_type = other DNA
agctcggaggaaaatgaccatc

SEQ ID NO: 8853 - DNA, 22 bp, synthetic construct
  misc_feature 1..22: note = chemically synthesized
  source 1..22: mol_type = other DNA
ggaggaaaatgaccatcctttc

SEQ ID NO: 8854 - DNA, 22 bp, synthetic construct
  misc_feature 1..22: note = chemically synthesized
  source 1..22: mol_type = other DNA
tccatcaaggtgaggggccagg

SEQ ID NO: 8855 - DNA, 22 bp, synthetic construct
  misc_feature 1..22: note = chemically synthesized
  source 1..22: mol_type = other DNA
ccatcaaggtgaggggccaggc

SEQ ID NO: 8856 - DNA, 22 bp, synthetic construct
  misc_feature 1..22: note = chemically synthesized
  source 1..22: mol_type = other DNA
catcaaggtgaggggccaggca

SEQ ID NO: 8857 - DNA, 22 bp, synthetic construct
  misc_feature 1..22: note = chemically synthesized
  source 1..22: mol_type = other DNA
gcaggctgaatcccaggagagg

SEQ ID NO: 8858 - DNA, 22 bp, synthetic construct
  misc_feature 1..22: note = chemically synthesized
  source 1..22: mol_type = other DNA
aatcccaggagaggaaatccat

SEQ ID NO: 8859 - DNA, 22 bp, synthetic construct
  misc_feature 1..22: note = chemically synthesized
  source 1..22: mol_type = other DNA
ttgaaaggcaagtgtgcagttt

SEQ ID NO: 8860 - DNA, 22 bp, synthetic construct
  misc_feature 1..22: note = chemically synthesized
  source 1..22: mol_type = other DNA
tgaaaggcaagtgtgcagtttc

SEQ ID NO: 8861 - DNA, 22 bp, synthetic construct
  misc_feature 1..22: note = chemically synthesized
  source 1..22: mol_type = other DNA
gaaaggcaagtgtgcagtttct

SEQ ID NO: 8862 - DNA, 22 bp, synthetic construct
  misc_feature 1..22: note = chemically synthesized
  source 1..22: mol_type = other DNA
aaaggcaagtgtgcagtttctg

SEQ ID NO: 8863 - DNA, 22 bp, synthetic construct
  misc_feature 1..22: note = chemically synthesized
  source 1..22: mol_type = other DNA
ctgcggctttgctccccctctg

SEQ ID NO: 8864 - DNA, 22 bp, synthetic construct
  misc_feature 1..22: note = chemically synthesized
  source 1..22: mol_type = other DNA
tgcggctttgctccccctctgt

SEQ ID NO: 8865 - DNA, 22 bp, synthetic construct
  misc_feature 1..22: note = chemically synthesized
  source 1..22: mol_type = other DNA
cggctttgctccccctctgtct

SEQ ID NO: 8866 - DNA, 22 bp, synthetic construct
  misc_feature 1..22: note = chemically synthesized
  source 1..22: mol_type = other DNA
tgctccccctctgtctcagctc

SEQ ID NO: 8867 - DNA, 22 bp, synthetic construct
  misc_feature 1..22: note = chemically synthesized
  source 1..22: mol_type = other DNA
gctccccctctgtctcagctca

SEQ ID NO: 8868 - DNA, 22 bp, synthetic construct
  misc_feature 1..22: note = chemically synthesized
  source 1..22: mol_type = other DNA
ctccccctctgtctcagctcat

SEQ ID NO: 8869 - DNA, 22 bp, synthetic construct
  misc_feature 1..22: note = chemically synthesized
  source 1..22: mol_type = other DNA
cccctctgtctcagctcatgat

SEQ ID NO: 8870 - DNA, 22 bp, synthetic construct
  misc_feature 1..22: note = chemically synthesized
  source 1..22: mol_type = other DNA
tgtctcagctcatgattgctct

SEQ ID NO: 8871 - DNA, 22 bp, synthetic construct
  misc_feature 1..22: note = chemically synthesized
  source 1..22: mol_type = other DNA
tctcagctcatgattgctctgt

SEQ ID NO: 8872 - DNA, 22 bp, synthetic construct
  misc_feature 1..22: note = chemically synthesized
  source 1..22: mol_type = other DNA
agctcatgattgctctgtccct

SEQ ID NO: 8873 - DNA, 22 bp, synthetic construct
  misc_feature 1..22: note = chemically synthesized
  source 1..22: mol_type = other DNA
atgattgctctgtccctttgag

SEQ ID NO: 8874 - DNA, 22 bp, synthetic construct
  misc_feature 1..22: note = chemically synthesized
  source 1..22: mol_type = other DNA
ctctgtccctttgaggtctctg

SEQ ID NO: 8875 - DNA, 22 bp, synthetic construct
  misc_feature 1..22: note = chemically synthesized
  source 1..22: mol_type = other DNA
tgtccctttgaggtctctgccg

SEQ ID NO: 8876 - DNA, 22 bp, synthetic construct
  misc_feature 1..22: note = chemically synthesized
  source 1..22: mol_type = other DNA
tccctttgaggtctctgccgca

SEQ ID NO: 8877 - DNA, 22 bp, synthetic construct
  misc_feature 1..22: note = chemically synthesized
  source 1..22: mol_type = other DNA
tgaggtctctgccgcacccact

SEQ ID NO: 8878 - DNA, 22 bp, synthetic construct
  misc_feature 1..22: note = chemically synthesized
  source 1..22: mol_type = other DNA
gaggtctctgccgcacccactc

SEQ ID NO: 8879 - DNA, 22 bp, synthetic construct
  misc_feature 1..22: note = chemically synthesized
  source 1..22: mol_type = other DNA
aggtctctgccgcacccactct

SEQ ID NO: 8880 - DNA, 22 bp, synthetic construct
  misc_feature 1..22: note = chemically synthesized
  source 1..22: mol_type = other DNA
tgccgcacccactctgtgaaca

SEQ ID NO: 8881 - DNA, 22 bp, synthetic construct
  misc_feature 1..22: note = chemically synthesized
  source 1..22: mol_type = other DNA
ccgcacccactctgtgaacagg

SEQ ID NO: 8882 - DNA, 22 bp, synthetic construct
  misc_feature 1..22: note = chemically synthesized
  source 1..22: mol_type = other DNA
tgtgaacagggactgaggaggg

SEQ ID NO: 8883 - DNA, 22 bp, synthetic construct
  misc_feature 1..22: note = chemically synthesized
  source 1..22: mol_type = other DNA
tgaacagggactgaggagggcc

SEQ ID NO: 8884 - DNA, 22 bp, synthetic construct
  misc_feature 1..22: note = chemically synthesized
  source 1..22: mol_type = other DNA
aggagggcccgacacccccgct

SEQ ID NO: 8885 - DNA, 22 bp, synthetic construct
  misc_feature 1..22: note = chemically synthesized
  source 1..22: mol_type = other DNA
gttccctcacctcaccttcctg

SEQ ID NO: 8886 - DNA, 22 bp, synthetic construct
  misc_feature 1..22: note = chemically synthesized
  source 1..22: mol_type = other DNA
ttccctcacctcaccttcctgt

SEQ ID NO: 8887 - DNA, 22 bp, synthetic construct
  misc_feature 1..22: note = chemically synthesized
  source 1..22: mol_type = other DNA
cctcacctcaccttcctgtcta

SEQ ID NO: 8888 - DNA, 22 bp, synthetic construct
  misc_feature 1..22: note = chemically synthesized
  source 1..22: mol_type = other DNA
acctcaccttcctgtctacccc

SEQ ID NO: 8889 - DNA, 22 bp, synthetic construct
  misc_feature 1..22: note = chemically synthesized
  source 1..22: mol_type = other DNA
accttcctgtctaccccaggac

SEQ ID NO: 8890 - DNA, 22 bp, synthetic construct
  misc_feature 1..22: note = chemically synthesized
  source 1..22: mol_type = other DNA
cctgtctaccccaggaccccag

SEQ ID NO: 8891 - DNA, 22 bp, synthetic construct
  misc_feature 1..22: note = chemically synthesized
  source 1..22: mol_type = other DNA
ctgtctaccccaggaccccagg

SEQ ID NO: 8892 - DNA, 22 bp, synthetic construct
  misc_feature 1..22: note = chemically synthesized
  source 1..22: mol_type = other DNA
tctaccccaggaccccaggaaa

SEQ ID NO: 8893 - DNA, 22 bp, synthetic construct
  misc_feature 1..22: note = chemically synthesized
  source 1..22: mol_type = other DNA
ccccaggaccccaggaaaggca

SEQ ID NO: 8894 - DNA, 22 bp, synthetic construct
  misc_feature 1..22: note = chemically synthesized
  source 1..22: mol_type = other DNA
gaagataactgcctgcccttct

SEQ ID NO: 8895 - DNA, 22 bp, synthetic construct
  misc_feature 1..22: note = chemically synthesized
  source 1..22: mol_type = other DNA
cctgcccttctcctcccaaccc

SEQ ID NO: 8896 - DNA, 22 bp, synthetic construct
  misc_feature 1..22: note = chemically synthesized
  source 1..22: mol_type = other DNA
cccttctcctcccaacccaaga

SEQ ID NO: 8897 - DNA, 22 bp, synthetic construct
  misc_feature 1..22: note = chemically synthesized
  source 1..22: mol_type = other DNA
ctcctcccaacccaagaacaca

SEQ ID NO: 8898 - DNA, 22 bp, synthetic construct
  misc_feature 1..22: note = chemically synthesized
  source 1..22: mol_type = other DNA
tcctcccaacccaagaacacat

SEQ ID NO: 8899 - DNA, 22 bp, synthetic construct
  misc_feature 1..22: note = chemically synthesized
  source 1..22: mol_type = other DNA
ctcccaacccaagaacacatgt

SEQ ID NO: 8900 - DNA, 22 bp, synthetic construct
  misc_feature 1..22: note = chemically synthesized
  source 1..22: mol_type = other DNA
ccaacccaagaacacatgtgcc

SEQ ID NO: 8901 - DNA, 22 bp, synthetic construct
  misc_feature 1..22: note = chemically synthesized
  source 1..22: mol_type = other DNA
gtatgtgcgtgtgcacgtatgt

SEQ ID NO: 8902 - DNA, 22 bp, synthetic construct
  misc_feature 1..22: note = chemically synthesized
  source 1..22: mol_type = other DNA
agctgggactctgtgtgtgtgt

SEQ ID NO: 8903 - DNA, 22 bp, synthetic construct
  misc_feature 1..22: note = chemically synthesized
  source 1..22: mol_type = other DNA
ggactctgtgtgtgtgtgtgag

SEQ ID NO: 8904 - DNA, 22 bp, synthetic construct
  misc_feature 1..22: note = chemically synthesized
  source 1..22: mol_type = other DNA
tgtgtgtgtgtgtgagtgaatg

SEQ ID NO: 8905 - DNA, 22 bp, synthetic construct
  misc_feature 1..22: note = chemically synthesized
  source 1..22: mol_type = other DNA
tgtgtgtgtgtgagtgaatgtt

SEQ ID NO: 8906 - DNA, 22 bp, synthetic construct
  misc_feature 1..22: note = chemically synthesized
  source 1..22: mol_type = other DNA
tgtgtgtgtatatgtgcgcgag

SEQ ID NO: 8907 - DNA, 22 bp, synthetic construct
  misc_feature 1..22: note = chemically synthesized
  source 1..22: mol_type = other DNA
tgtgtgtgtatgtcgtgtatgt

SEQ ID NO: 8908 - DNA, 22 bp, synthetic construct
  misc_feature 1..22: note = chemically synthesized
  source 1..22: mol_type = other DNA
tgtgtgagagtgtgttgtgtgt

SEQ ID NO: 8909 - DNA, 22 bp, synthetic construct
  misc_feature 1..22: note = chemically synthesized
  source 1..22: mol_type = other DNA
tgtgtgtatgttgtgtgagtat

SEQ ID NO: 8910 - DNA, 22 bp, synthetic construct
  misc_feature 1..22: note = chemically synthesized
  source 1..22: mol_type = other DNA
tgtgagtatatgttgtgtgtat

SEQ ID NO: 8911 - DNA, 22 bp, synthetic construct
  misc_feature 1..22: note = chemically synthesized
  source 1..22: mol_type = other DNA
tgtgtatcttgtgtgtgagtgt

SEQ ID NO: 8912 - DNA, 22 bp, synthetic construct
  misc_feature 1..22: note = chemically synthesized
  source 1..22: mol_type = other DNA
gtgtgtgagtgtatgttgtgtg

SEQ ID NO: 8913 - DNA, 22 bp, synthetic construct
  misc_feature 1..22: note = chemically synthesized
  source 1..22: mol_type = other DNA
tgtgtgagtgtatgttgtgtgt

SEQ ID NO: 8914 - DNA, 22 bp, synthetic construct
  misc_feature 1..22: note = chemically synthesized
  source 1..22: mol_type = other DNA
tgtgttgtgtgtgtatcttgtg

SEQ ID NO: 8915 - DNA, 22 bp, synthetic construct
  misc_feature 1..22: note = chemically synthesized
  source 1..22: mol_type = other DNA
tgtgtgtatcttgtgcatgtgt

SEQ ID NO: 8916 - DNA, 22 bp, synthetic construct
  misc_feature 1..22: note = chemically synthesized
  source 1..22: mol_type = other DNA
gtgcatgtgtgtatgttgtgcg

SEQ ID NO: 8917 - DNA, 22 bp, synthetic construct
  misc_feature 1..22: note = chemically synthesized
  source 1..22: mol_type = other DNA
tgcatgtgtgtatgttgtgcga

SEQ ID NO: 8918 - DNA, 22 bp, synthetic construct
  misc_feature 1..22: note = chemically synthesized
  source 1..22: mol_type = other DNA
tgcgagtgtatgttgtgtatgt

SEQ ID NO: 8919 - DNA, 22 bp, synthetic construct
  misc_feature 1..22: note = chemically synthesized
  source 1..22: mol_type = other DNA
tgtatgtgagtgtgtgtatgtt

SEQ ID NO: 8920 - DNA, 22 bp, synthetic construct
  misc_feature 1..22: note = chemically synthesized
  source 1..22: mol_type = other DNA
tgtgtatgttgtgtgtatgtat

SEQ ID NO: 8921 - DNA, 22 bp, synthetic construct
  misc_feature 1..22: note = chemically synthesized
  source 1..22: mol_type = other DNA
tgtgtatgtatgttgtgtatga

SEQ ID NO: 8922 - DNA, 22 bp, synthetic construct
  misc_feature 1..22: note = chemically synthesized
  source 1..22: mol_type = other DNA
tgtatgagtgtgtgtatgttgt

SEQ ID NO: 8923 - DNA, 22 bp, synthetic construct
  misc_feature 1..22: note = chemically synthesized
  source 1..22: mol_type = other DNA
tgtgtgtgtacgttgtgtatgt

SEQ ID NO: 8924 - DNA, 22 bp, synthetic construct
  misc_feature 1..22: note = chemically synthesized
  source 1..22: mol_type = other DNA
tgtatgttgtgtgtgtgttgtg

SEQ ID NO: 8925 - DNA, 22 bp, synthetic construct
  misc_feature 1..22: note = chemically synthesized
  source 1..22: mol_type = other DNA
tgtgtgtgttgtgtgtgtgtat

SEQ ID NO: 8926 - DNA, 22 bp, synthetic construct
  misc_feature 1..22: note = chemically synthesized
  source 1..22: mol_type = other DNA
tgtgtgtgtattgtgtgagtgt

SEQ ID NO: 8927 - DNA, 22 bp, synthetic construct
  misc_feature 1..22: note = chemically synthesized
  source 1..22: mol_type = other DNA
tgtgagtgtatgtatgtttgtg

SEQ ID NO: 8928 - DNA, 22 bp, synthetic construct
  misc_feature 1..22: note = chemically synthesized
  source 1..22: mol_type = other DNA
gtgtgttgtgtgagtgttgtgt

SEQ ID NO: 8929 - DNA, 22 bp, synthetic construct
  misc_feature 1..22: note = chemically synthesized
  source 1..22: mol_type = other DNA
tgtgttgtgtgagtgttgtgta

SEQ ID NO: 8930 - DNA, 22 bp, synthetic construct
  misc_feature 1..22: note = chemically synthesized
  source 1..22: mol_type = other DNA
tgtgagtgttgtgtatgttgtg

SEQ ID NO: 8931 - DNA, 22 bp, synthetic construct
  misc_feature 1..22: note = chemically synthesized
  source 1..22: mol_type = other DNA
tgtatgttgtgcgtgtgtgtat

SEQ ID NO: 8932 - DNA, 22 bp, synthetic construct
  misc_feature 1..22: note = chemically synthesized
  source 1..22: mol_type = other DNA
tgcgtgtgtgtatgttgtgcga

SEQ ID NO: 8933 - DNA, 22 bp, synthetic construct
  misc_feature 1..22: note = chemically synthesized
  source 1..22: mol_type = other DNA
tgcgagtgtgtgtgttgtgtgt

SEQ ID NO: 8934 - DNA, 22 bp, synthetic construct
  misc_feature 1..22: note = chemically synthesized
  source 1..22: mol_type = other DNA
tgtgtgtatgttgtgagtgtgt

SEQ ID NO: 8935 - DNA, 22 bp, synthetic construct
  misc_feature 1..22: note = chemically synthesized
  source 1..22: mol_type = other DNA
tgagtgtgttatgtatgttgtg

SEQ ID NO: 8936 - DNA, 22 bp, synthetic construct
  misc_feature 1..22: note = chemically synthesized
  source 1..22: mol_type = other DNA
tgtatgttgtgtgtgtgagtgt

SEQ ID NO: 8937 - DNA, 22 bp, synthetic construct
  misc_feature 1..22: note = chemically synthesized
  source 1..22: mol_type = other DNA
tgtgtgtgagtgtgttgcgtga

SEQ ID NO: 8938 - DNA, 22 bp, synthetic construct
  misc_feature 1..22: note = chemically synthesized
  source 1..22: mol_type = other DNA
cgtgagtgtgtgtgttagtgtg

SEQ ID NO: 8939 - DNA, 22 bp, synthetic construct
  misc_feature 1..22: note = chemically synthesized
  source 1..22: mol_type = other DNA
gtgtgtgtatgtgattgtatgt

SEQ ID NO: 8940 - DNA, 22 bp, synthetic construct
  misc_feature 1..22: note = chemically synthesized
  source 1..22: mol_type = other DNA
tatgtgtgtgtgtgtgtgtgtg

SEQ ID NO: 8941 - DNA, 22 bp, synthetic construct
  misc_feature 1..22: note = chemically synthesized
  source 1..22: mol_type = other DNA
ggatgggtgggggacgtgagca

SEQ ID NO: 8942 - DNA, 22 bp, synthetic construct
  misc_feature 1..22: note = chemically synthesized
  source 1..22: mol_type = other DNA
gaagatccctgctcctctcatc

SEQ ID NO: 8943 - DNA, 22 bp, synthetic construct
  misc_feature 1..22: note = chemically synthesized
  source 1..22: mol_type = other DNA
ctcctctcatctcccaagaccc

SEQ ID NO: 8944 - DNA, 22 bp, synthetic construct
  misc_feature 1..22: note = chemically synthesized
  source 1..22: mol_type = other DNA
ctctcatctcccaagacccttc

SEQ ID NO: 8945 - DNA, 22 bp, synthetic construct
  misc_feature 1..22: note = chemically synthesized
  source 1..22: mol_type = other DNA
tcatctcccaagacccttccct

SEQ ID NO: 8946 - DNA, 22 bp, synthetic construct
  misc_feature 1..22: note = chemically synthesized
  source 1..22: mol_type = other DNA
atctcccaagacccttccctgg

SEQ ID NO: 8947 - DNA, 22 bp, synthetic construct
  misc_feature 1..22: note = chemically synthesized
  source 1..22: mol_type = other DNA
ccaagacccttccctggatcct

SEQ ID NO: 8948 - DNA, 22 bp, synthetic construct
  misc_feature 1..22: note = chemically synthesized
  source 1..22: mol_type = other DNA
ccctggatccttctgtaataaa

SEQ ID NO: 8949 - DNA, 22 bp, synthetic construct
  misc_feature 1..22: note = chemically synthesized
  source 1..22: mol_type = other DNA
cctggatccttctgtaataaat

SEQ ID NO: 8950 - DNA, 22 bp, synthetic construct
  misc_feature 1..22: note = chemically synthesized
  source 1..22: mol_type = other DNA
gatccttctgtaataaatcttg

SEQ ID NO: 8951 - DNA, 22 bp, synthetic construct
  misc_feature 1..22: note = chemically synthesized
  source 1..22: mol_type = other DNA
ctgtaataaatcttgactgaag

SEQ ID NO: 8952 - DNA, 22 bp, synthetic construct
  misc_feature 1..22: note = chemically synthesized
  source 1..22: mol_type = other DNA
tgtaataaatcttgactgaagg

SEQ ID NO: 8953 - DNA, 22 bp, synthetic construct
  misc_feature 1..22: note = chemically synthesized
  source 1..22: mol_type = other DNA
taataaatcttgactgaaggac

SEQ ID NO: 8954 - DNA, 22 bp, synthetic construct
  misc_feature 1..22: note = chemically synthesized
  source 1..22: mol_type = other DNA
gactgaaggacctaagtatctt

SEQ ID NO: 8955 - DNA, 22 bp, synthetic construct
  misc_feature 1..22: note = chemically synthesized
  source 1..22: mol_type = other DNA
actgaaggacctaagtatcttg

SEQ ID NO: 8956 - DNA, 22 bp, synthetic construct
  misc_feature 1..22: note = chemically synthesized
  source 1..22: mol_type = other DNA
aaggacctaagtatcttggaca

SEQ ID NO: 8957 - DNA, 22 bp, synthetic construct
  misc_feature 1..22: note = chemically synthesized
  source 1..22: mol_type = other DNA
agtatcttggacattttttttt

SEQ ID NO: 8958 - DNA, 22 bp, synthetic construct
  misc_feature 1..22: note = chemically synthesized
  source 1..22: mol_type = other DNA
ggacattttttttttagagaca

SEQ ID NO: 8959 - DNA, 22 bp, synthetic construct
  misc_feature 1..22: note = chemically synthesized
  source 1..22: mol_type = other DNA
gacattttttttttagagacag

SEQ ID NO: 8960 - DNA, 22 bp, synthetic construct
  misc_feature 1..22: note = chemically synthesized
  source 1..22: mol_type = other DNA
tttttttagagacaggagtgta

SEQ ID NO: 8961 - DNA, 22 bp, synthetic construct
  misc_feature 1..22: note = chemically synthesized
  source 1..22: mol_type = other DNA
ttttttagagacaggagtgtag

SEQ ID NO: 8962 - DNA, 22 bp, synthetic construct
  misc_feature 1..22: note = chemically synthesized
  source 1..22: mol_type = other DNA
tttttagagacaggagtgtagt

SEQ ID NO: 8963 - DNA, 22 bp, synthetic construct
  misc_feature 1..22: note = chemically synthesized
  source 1..22: mol_type = other DNA
ttttagagacaggagtgtagtg

SEQ ID NO: 8964 - DNA, 22 bp, synthetic construct
  misc_feature 1..22: note = chemically synthesized
  source 1..22: mol_type = other DNA
tttagagacaggagtgtagtgg

SEQ ID NO: 8965 - DNA, 22 bp, synthetic construct
  misc_feature 1..22: note = chemically synthesized
  source 1..22: mol_type = other DNA
ttagagacaggagtgtagtggc

SEQ ID NO: 8966 - DNA, 22 bp, synthetic construct
  misc_feature 1..22: note = chemically synthesized
  source 1..22: mol_type = other DNA
tagagacaggagtgtagtggca

SEQ ID NO: 8967 - DNA, 22 bp, synthetic construct
  misc_feature 1..22: note = chemically synthesized
  source 1..22: mol_type = other DNA
agagacaggagtgtagtggcag

SEQ ID NO: 8968 - DNA, 22 bp, synthetic construct
  misc_feature 1..22: note = chemically synthesized
  source 1..22: mol_type = other DNA
gagacaggagtgtagtggcagg

SEQ ID NO: 8969 - DNA, 22 bp, synthetic construct
  misc_feature 1..22: note = chemically synthesized
  source 1..22: mol_type = other DNA
actgcaacctcgaactcctggg

SEQ ID NO: 8970 - DNA, 22 bp, synthetic construct
  misc_feature 1..22: note = chemically synthesized
  source 1..22: mol_type = other DNA
caacctcgaactcctgggctca

SEQ ID NO: 8971 - DNA, 22 bp, synthetic construct
  misc_feature 1..22: note = chemically synthesized
  source 1..22: mol_type = other DNA
gaactcctgggctcaagccatc

SEQ ID NO: 8972 - DNA, 22 bp, synthetic construct
  misc_feature 1..22: note = chemically synthesized
  source 1..22: mol_type = other DNA
ctgggctcaagccatcctccca

SEQ ID NO: 8973 - DNA, 22 bp, synthetic construct
  misc_feature 1..22: note = chemically synthesized
  source 1..22: mol_type = other DNA
ggctcaagccatcctcccacct

SEQ ID NO: 8974 - DNA, 22 bp, synthetic construct
  misc_feature 1..22: note = chemically synthesized
  source 1..22: mol_type = other DNA
aagccatcctcccacctcagcc

SEQ ID NO: 8975 - DNA, 22 bp, synthetic construct
  misc_feature 1..22: note = chemically synthesized
  source 1..22: mol_type = other DNA
ccacctcagcctcccaagtagt

SEQ ID NO: 8976 - DNA, 22 bp, synthetic construct
  misc_feature 1..22: note = chemically synthesized
  source 1..22: mol_type = other DNA
agcctcccaagtagttaggact

SEQ ID NO: 8977 - DNA, 22 bp, synthetic construct
  misc_feature 1..22: note = chemically synthesized
  source 1..22: mol_type = other DNA
ccaagtagttaggacttacagg

SEQ ID NO: 8978 - DNA, 22 bp, synthetic construct
  misc_feature 1..22: note = chemically synthesized
  source 1..22: mol_type = other DNA
ggacttacaggtgtgcaccact

SEQ ID NO: 8979 - DNA, 22 bp, synthetic construct
  misc_feature 1..22: note = chemically synthesized
  source 1..22: mol_type = other DNA
acaggtgtgcaccactgtgcct

SEQ ID NO: 8980 - DNA, 22 bp, synthetic construct
  misc_feature 1..22: note = chemically synthesized
  source 1..22: mol_type = other DNA
caggtgtgcaccactgtgcctg

SEQ ID NO: 8981 - DNA, 22 bp, synthetic construct
  misc_feature 1..22: note = chemically synthesized
  source 1..22: mol_type = other DNA
tgcctggcaaattaaaaaaaat

SEQ ID NO: 8982 - DNA, 22 bp, synthetic construct
  misc_feature 1..22: note = chemically synthesized
  source 1..22: mol_type = other DNA
gcaaattaaaaaaaatttttta

SEQ ID NO: 8983 - DNA, 22 bp, synthetic construct
  misc_feature 1..22: note = chemically synthesized
  source 1..22: mol_type = other DNA
aaaaaaattttttagagaaatg

SEQ ID NO: 8984 - DNA, 22 bp, synthetic construct
  misc_feature 1..22: note = chemically synthesized
  source 1..22: mol_type = other DNA
tttagagaaatggggtcttgct

SEQ ID NO: 8985 - DNA, 22 bp, synthetic construct
  misc_feature 1..22: note = chemically synthesized
  source 1..22: mol_type = other DNA
ttagagaaatggggtcttgcta

SEQ ID NO: 8986 - DNA, 22 bp, synthetic construct
  misc_feature 1..22: note = chemically synthesized
  source 1..22: mol_type = other DNA
tagagaaatggggtcttgctat

SEQ ID NO: 8987 - DNA, 22 bp, synthetic construct
  misc_feature 1..22: note = chemically synthesized
  source 1..22: mol_type = other DNA
agagaaatggggtcttgctatg

SEQ ID NO: 8988 - DNA, 22 bp, synthetic construct
  misc_feature 1..22: note = chemically synthesized
  source 1..22: mol_type = other DNA
gagaaatggggtcttgctatgt

SEQ ID NO: 8989 - DNA, 22 bp, synthetic construct
  misc_feature 1..22: note = chemically synthesized
  source 1..22: mol_type = other DNA
gctatgttgcccaggctggtgg

SEQ ID NO: 8990 - DNA, 22 bp, synthetic construct
  misc_feature 1..22: note = chemically synthesized
  source 1..22: mol_type = other DNA
ctatgttgcccaggctggtggg

SEQ ID NO: 8991 - DNA, 22 bp, synthetic construct
  misc_feature 1..22: note = chemically synthesized
  source 1..22: mol_type = other DNA
tgttgcccaggctggtgggaaa

SEQ ID NO: 8992 - DNA, 22 bp, synthetic construct
  misc_feature 1..22: note = chemically synthesized
  source 1..22: mol_type = other DNA
cccaggctggtgggaaaagatt

SEQ ID NO: 8993 - DNA, 22 bp, synthetic construct
  misc_feature 1..22: note = chemically synthesized
  source 1..22: mol_type = other DNA
gtgggaaaagattttaaggtga

SEQ ID NO: 8994 - DNA, 22 bp, synthetic construct
  misc_feature 1..22: note = chemically synthesized
  source 1..22: mol_type = other DNA
taaggtgagagagatctgagca

SEQ ID NO: 8995 - DNA, 22 bp, synthetic construct
  misc_feature 1..22: note = chemically synthesized
  source 1..22: mol_type = other DNA
aaggtgagagagatctgagcag

SEQ ID NO: 8996 - DNA, 22 bp, synthetic construct
  misc_feature 1..22: note = chemically synthesized
  source 1..22: mol_type = other DNA
aggtgagagagatctgagcagt

SEQ ID NO: 8997 - DNA, 22 bp, synthetic construct
  misc_feature 1..22: note = chemically synthesized
  source 1..22: mol_type = other DNA
agcagtgctaggcagaagggca

SEQ ID NO: 8998 - DNA, 22 bp, synthetic construct
  misc_feature 1..22: note = chemically synthesized
  source 1..22: mol_type = other DNA
ggcagaagggcaagagccagga

SEQ ID NO: 8999 - DNA, 22 bp, synthetic construct
  misc_feature 1..22: note = chemically synthesized
  source 1..22: mol_type = other DNA
gtggtggagccgggttccatgg

SEQ ID NO: 9000 - DNA, 22 bp, synthetic construct
  misc_feature 1..22: note = chemically synthesized
  source 1..22: mol_type = other DNA
catggaggcaggaggagcaggg

SEQ ID NO: 9001 - DNA, 22 bp, synthetic construct
  misc_feature 1..22: note = chemically synthesized
  source 1..22: mol_type = other DNA
ggagcttaggaaggggattggt

SEQ ID NO: 9002 - DNA, 22 bp, synthetic construct
  misc_feature 1..22: note = chemically synthesized
  source 1..22: mol_type = other DNA
gagcttaggaaggggattggtt

SEQ ID NO: 9003 - DNA, 22 bp, synthetic construct
  misc_feature 1..22: note = chemically synthesized
  source 1..22: mol_type = other DNA
aggaaggggattggttagctgg

SEQ ID NO: 9004 - DNA, 22 bp, synthetic construct
  misc_feature 1..22: note = chemically synthesized
  source 1..22: mol_type = other DNA
ggaaggggattggttagctggg

SEQ ID NO: 9005 - DNA, 22 bp, synthetic construct
  misc_feature 1..22: note = chemically synthesized
  source 1..22: mol_type = other DNA
gttagctgggctggaatgaggg

SEQ ID NO: 9006 - DNA, 22 bp, synthetic construct
  misc_feature 1..22: note = chemically synthesized
  source 1..22: mol_type = other DNA
gctgggctggaatgagggactc

SEQ ID NO: 9007 - DNA, 22 bp, synthetic construct
  misc_feature 1..22: note = chemically synthesized
  source 1..22: mol_type = other DNA
ggctggaatgagggactcctca

SEQ ID NO: 9008 - DNA, 22 bp, synthetic construct
  misc_feature 1..22: note = chemically synthesized
  source 1..22: mol_type = other DNA
gaatgagggactcctcattcct

SEQ ID NO: 9009 - DNA, 22 bp, synthetic construct
  misc_feature 1..22: note = chemically synthesized
  source 1..22: mol_type = other DNA
ctcattcctgaggctggccaac

SEQ ID NO: 9010 - DNA, 22 bp, synthetic construct
  misc_feature 1..22: note = chemically synthesized
  source 1..22: mol_type = other DNA
attcctgaggctggccaaccga

SEQ ID NO: 9011 - DNA, 22 bp, synthetic construct
  misc_feature 1..22: note = chemically synthesized
  source 1..22: mol_type = other DNA
ctgaggctggccaaccgaggga

SEQ ID NO: 9012 - DNA, 22 bp, synthetic construct
  misc_feature 1..22: note = chemically synthesized
  source 1..22: mol_type = other DNA
aggctggccaaccgagggaggg

SEQ ID NO: 9013 - DNA, 22 bp, synthetic construct
  misc_feature 1..22: note = chemically synthesized
  source 1..22: mol_type = other DNA
gccaaccgagggagggccggtg

SEQ ID NO: 9014 - DNA, 22 bp, synthetic construct
  misc_feature 1..22: note = chemically synthesized
  source 1..22: mol_type = other DNA
ggcagggcagggcaggggacag

SEQ ID NO: 9015 - DNA, 22 bp, synthetic construct
  misc_feature 1..22: note = chemically synthesized
  source 1..22: mol_type = other DNA
ccgaggaccactcaggaacacc

SEQ ID NO: 9016 - DNA, 22 bp, synthetic construct
  misc_feature 1..22: note = chemically synthesized
  source 1..22: mol_type = other DNA
aggaacaccagtagcatctcct

SEQ ID NO: 9017 - DNA, 22 bp, synthetic construct
  misc_feature 1..22: note = chemically synthesized
  source 1..22: mol_type = other DNA
ctctctctgtagggggctggct

SEQ ID NO: 9018 - DNA, 22 bp, synthetic construct
  misc_feature 1..22: note = chemically synthesized
  source 1..22: mol_type = other DNA
tctctgtagggggctggctgga

SEQ ID NO: 9019 - DNA, 22 bp, synthetic construct
  misc_feature 1..22: note = chemically synthesized
  source 1..22: mol_type = other DNA
tctgtagggggctggctggact

SEQ ID NO: 9020 - DNA, 22 bp, synthetic construct
  misc_feature 1..22: note = chemically synthesized
  source 1..22: mol_type = other DNA
tgtagggggctggctggacttc

SEQ ID NO: 9021 - DNA, 22 bp, synthetic construct
  misc_feature 1..22: note = chemically synthesized
  source 1..22: mol_type = other DNA
tagggggctggctggacttccc

SEQ ID NO: 9022 - DNA, 22 bp, synthetic construct
  misc_feature 1..22: note = chemically synthesized
  source 1..22: mol_type = other DNA
gctggacttcccaccaggcggt

SEQ ID NO: 9023 - DNA, 22 bp, synthetic construct
  misc_feature 1..22: note = chemically synthesized
  source 1..22: mol_type = other DNA
gacttcccaccaggcggtgtcc

SEQ ID NO: 9024 - DNA, 22 bp, synthetic construct
  misc_feature 1..22: note = chemically synthesized
  source 1..22: mol_type = other DNA
cccaccaggcggtgtccccaca

SEQ ID NO: 9025 - DNA, 22 bp, synthetic construct
  misc_feature 1..22: note = chemically synthesized
  source 1..22: mol_type = other DNA
ccaccaggcggtgtccccacag

SEQ ID NO: 9026 - DNA, 22 bp, synthetic construct
  misc_feature 1..22: note = chemically synthesized
  source 1..22: mol_type = other DNA
tccgcctcactctcctctgcaa

SEQ ID NO: 9027 - DNA, 22 bp, synthetic construct
  misc_feature 1..22: note = chemically synthesized
  source 1..22: mol_type = other DNA
actctcctctgcaactccagtg

SEQ ID NO: 9028 - DNA, 22 bp, synthetic construct
  misc_feature 1..22: note = chemically synthesized
  source 1..22: mol_type = other DNA
tcctctgcaactccagtgccca

SEQ ID NO: 9029 - DNA, 22 bp, synthetic construct
  misc_feature 1..22: note = chemically synthesized
  source 1..22: mol_type = other DNA
ctctgcaactccagtgcccaca

SEQ ID NO: 9030 - DNA, 22 bp, synthetic construct
  misc_feature 1..22: note = chemically synthesized
  source 1..22: mol_type = other DNA
tgcaactccagtgcccacacgg

SEQ ID NO: 9031 - DNA, 22 bp, synthetic construct
  misc_feature 1..22: note = chemically synthesized
  source 1..22: mol_type = other DNA
caactccagtgcccacacggca

SEQ ID NO: 9032 - DNA, 22 bp, synthetic construct
  misc_feature 1..22: note = chemically synthesized
  source 1..22: mol_type = other DNA
cagtgcccacacggcacccggt

SEQ ID NO: 9033 - DNA, 22 bp, synthetic construct
  misc_feature 1..22: note = chemically synthesized
  source 1..22: mol_type = other DNA
agagagaatacgggatgctgct

SEQ ID NO: 9034 - DNA, 22 bp, synthetic construct
  misc_feature 1..22: note = chemically synthesized
  source 1..22: mol_type = other DNA
ctgaatcttctgagggtgacag

SEQ ID NO: 9035 - DNA, 22 bp, synthetic construct
  misc_feature 1..22: note = chemically synthesized
  source 1..22: mol_type = other DNA
aatcttctgagggtgacagaat

SEQ ID NO: 9036 - DNA, 22 bp, synthetic construct
  misc_feature 1..22: note = chemically synthesized
  source 1..22: mol_type = other DNA
ctgagggtgacagaatttagag

SEQ ID NO: 9037 - DNA, 22 bp, synthetic construct
  misc_feature 1..22: note = chemically synthesized
  source 1..22: mol_type = other DNA
tgagggtgacagaatttagagt

SEQ ID NO: 9038 - DNA, 22 bp, synthetic construct
  misc_feature 1..22: note = chemically synthesized
  source 1..22: mol_type = other DNA
agggtgacagaatttagagttt

SEQ ID NO: 9039 - DNA, 22 bp, synthetic construct
  misc_feature 1..22: note = chemically synthesized
  source 1..22: mol_type = other DNA
agagtttgagcaggaggcttgg

SEQ ID NO: 9040 - DNA, 22 bp, synthetic construct
  misc_feature 1..22: note = chemically synthesized
  source 1..22: mol_type = other DNA
gagtttgagcaggaggcttgga

SEQ ID NO: 9041 - DNA, 22 bp, synthetic construct
  misc_feature 1..22: note = chemically synthesized
  source 1..22: mol_type = other DNA
gagcaggaggcttggagagagg

SEQ ID NO: 9042 - DNA, 22 bp, synthetic construct
  misc_feature 1..22: note = chemically synthesized
  source 1..22: mol_type = other DNA
agcaggaggcttggagagaggc

SEQ ID NO: 9043 - DNA, 22 bp, synthetic construct
  misc_feature 1..22: note = chemically synthesized
  source 1..22: mol_type = other DNA
ggagagaggccaggatttctga

SEQ ID NO: 9044 - DNA, 22 bp, synthetic construct
  misc_feature 1..22: note = chemically synthesized
  source 1..22: mol_type = other DNA
gagagaggccaggatttctgaa

SEQ ID NO: 9045 - DNA, 22 bp, synthetic construct
  misc_feature 1..22: note = chemically synthesized
  source 1..22: mol_type = other DNA
ctgaaattaatgggagagtgag

SEQ ID NO: 9046 - DNA, 22 bp, synthetic construct
  misc_feature 1..22: note = chemically synthesized
  source 1..22: mol_type = other DNA
tgaaattaatgggagagtgagc

SEQ ID NO: 9047 - DNA, 22 bp, synthetic construct
  misc_feature 1..22: note = chemically synthesized
  source 1..22: mol_type = other DNA
aaattaatgggagagtgagctc

SEQ ID NO: 9048 - DNA, 22 bp, synthetic construct
  misc_feature 1..22: note = chemically synthesized
  source 1..22: mol_type = other DNA
atgggagagtgagctcacgcga

SEQ ID NO: 9049 - DNA, 22 bp, synthetic construct
  misc_feature 1..22: note = chemically synthesized
  source 1..22: mol_type = other DNA
acgcgaatgggctgagggacac

SEQ ID NO: 9050 - DNA, 22 bp, synthetic construct
  misc_feature 1..22: note = chemically synthesized
  source 1..22: mol_type = other DNA
agggacaccagtgagggaccgt

SEQ ID NO: 9051 - DNA, 22 bp, synthetic construct
  misc_feature 1..22: note = chemically synthesized
  source 1..22: mol_type = other DNA
aagggatgtagcaaagtcaccg

SEQ ID NO: 9052 - DNA, 22 bp, synthetic construct
  misc_feature 1..22: note = chemically synthesized
  source 1..22: mol_type = other DNA
ccctccagcagcccgggtggtg

SEQ ID NO: 9053 - DNA, 22 bp, synthetic construct
  misc_feature 1..22: note = chemically synthesized
  source 1..22: mol_type = other DNA
cctccagcagcccgggtggtgg

SEQ ID NO: 9054 - DNA, 22 bp, synthetic construct
  misc_feature 1..22: note = chemically synthesized
  source 1..22: mol_type = other DNA
cagcagcccgggtggtgggggc

SEQ ID NO: 9055 - DNA, 22 bp, synthetic construct
  misc_feature 1..22: note = chemically synthesized
  source 1..22: mol_type = other DNA
ggggaacgtcatcatgggagct

SEQ ID NO: 9056 - DNA, 22 bp, synthetic construct
  misc_feature 1..22: note = chemically synthesized
  source 1..22: mol_type = other DNA
acactgatcagctgctcaccgg

SEQ ID NO: 9057 - DNA, 22 bp, synthetic construct
  misc_feature 1..22: note = chemically synthesized
  source 1..22: mol_type = other DNA
atcagctgctcaccggggccca

SEQ ID NO: 9058 - DNA, 22 bp, synthetic construct
  misc_feature 1..22: note = chemically synthesized
  source 1..22: mol_type = other DNA
ctcaccggggcccatcttccac

SEQ ID NO: 9059 - DNA, 22 bp, synthetic construct
  misc_feature 1..22: note = chemically synthesized
  source 1..22: mol_type = other DNA
accggggcccatcttccacttg

SEQ ID NO: 9060 - DNA, 22 bp, synthetic construct
  misc_feature 1..22: note = chemically synthesized
  source 1..22: mol_type = other DNA
ccacttgtctcagcacttgatt

SEQ ID NO: 9061 - DNA, 22 bp, synthetic construct
  misc_feature 1..22: note = chemically synthesized
  source 1..22: mol_type = other DNA
cacttgtctcagcacttgattt

SEQ ID NO: 9062 - DNA, 22 bp, synthetic construct
  misc_feature 1..22: note = chemically synthesized
  source 1..22: mol_type = other DNA
gtctcagcacttgatttttttc

SEQ ID NO: 9063 - DNA, 22 bp, synthetic construct
  misc_feature 1..22: note = chemically synthesized
  source 1..22: mol_type = other DNA
tctcagcacttgatttttttct

SEQ ID NO: 9064 - DNA, 22 bp, synthetic construct
  misc_feature 1..22: note = chemically synthesized
  source 1..22: mol_type = other DNA
agcacttgatttttttctgcta

SEQ ID NO: 9065 - DNA, 22 bp, synthetic construct
  misc_feature 1..22: note = chemically synthesized
  source 1..22: mol_type = other DNA
gatttttttctgctaccccctt

SEQ ID NO: 9066 - DNA, 22 bp, synthetic construct
  misc_feature 1..22: note = chemically synthesized
  source 1..22: mol_type = other DNA
atttttttctgctacccccttt

SEQ ID NO: 9067 - DNA, 22 bp, synthetic construct
  misc_feature 1..22: note = chemically synthesized
  source 1..22: mol_type = other DNA
ttttctgctaccccctttttct

SEQ ID NO: 9068 - DNA, 22 bp, synthetic construct
  misc_feature 1..22: note = chemically synthesized
  source 1..22: mol_type = other DNA
tttctgctaccccctttttctt

SEQ ID NO: 9069 - DNA, 22 bp, synthetic construct
  misc_feature 1..22: note = chemically synthesized
  source 1..22: mol_type = other DNA
ttctgctaccccctttttcttt

SEQ ID NO: 9070 - DNA, 22 bp, synthetic construct
  misc_feature 1..22: note = chemically synthesized
  source 1..22: mol_type = other DNA
tctgctaccccctttttctttt

SEQ ID NO: 9071 - DNA, 22 bp, synthetic construct
  misc_feature 1..22: note = chemically synthesized
  source 1..22: mol_type = other DNA
ctgctaccccctttttctttta

SEQ ID NO: 9072 - DNA, 22 bp, synthetic construct
  misc_feature 1..22: note = chemically synthesized
  source 1..22: mol_type = other DNA
tgctaccccctttttcttttaa

SEQ ID NO: 9073 - DNA, 22 bp, synthetic construct
  misc_feature 1..22: note = chemically synthesized
  source 1..22: mol_type = other DNA
ctaccccctttttcttttaaag

SEQ ID NO: 9074 - DNA, 22 bp, synthetic construct
  misc_feature 1..22: note = chemically synthesized
  source 1..22: mol_type = other DNA
ccccctttttcttttaaagatt

SEQ ID NO: 9075 - DNA, 22 bp, synthetic construct
  misc_feature 1..22: note = chemically synthesized
  source 1..22: mol_type = other DNA
tttcttttaaagatttcaatta

SEQ ID NO: 9076 - DNA, 22 bp, synthetic construct
  misc_feature 1..22: note = chemically synthesized
  source 1..22: mol_type = other DNA
ttcttttaaagatttcaattat

SEQ ID NO: 9077 - DNA, 22 bp, synthetic construct
  misc_feature 1..22: note = chemically synthesized
  source 1..22: mol_type = other DNA
tcttttaaagatttcaattatg

SEQ ID NO: 9078 - DNA, 22 bp, synthetic construct
  misc_feature 1..22: note = chemically synthesized
  source 1..22: mol_type = other DNA
cttttaaagatttcaattatgc

SEQ ID NO: 9079 - DNA, 22 bp, synthetic construct
  misc_feature 1..22: note = chemically synthesized
  source 1..22: mol_type = other DNA
ttttaaagatttcaattatgca

SEQ ID NO: 9080 - DNA, 22 bp, synthetic construct
  misc_feature 1..22: note = chemically synthesized
  source 1..22: mol_type = other DNA
ttaaagatttcaattatgcatg

SEQ ID NO: 9081 - DNA, 22 bp, synthetic construct
  misc_feature 1..22: note = chemically synthesized
  source 1..22: mol_type = other DNA
taaagatttcaattatgcatgt

SEQ ID NO: 9082 - DNA, 22 bp, synthetic construct
  misc_feature 1..22: note = chemically synthesized
  source 1..22: mol_type = other DNA
aaagatttcaattatgcatgta

SEQ ID NO: 9083 - DNA, 22 bp, synthetic construct
  misc_feature 1..22: note = chemically synthesized
  source 1..22: mol_type = other DNA
aagatttcaattatgcatgtat

SEQ ID NO: 9084 - DNA, 22 bp, synthetic construct
  misc_feature 1..22: note = chemically synthesized
  source 1..22: mol_type = other DNA
caattatgcatgtattaagggt

SEQ ID NO: 9085 - DNA, 22 bp, synthetic construct
  misc_feature 1..22: note = chemically synthesized
  source 1..22: mol_type = other DNA
aattatgcatgtattaagggtc

SEQ ID NO: 9086 - DNA, 22 bp, synthetic construct
  misc_feature 1..22: note = chemically synthesized
  source 1..22: mol_type = other DNA
tgcatgtattaagggtcccaca

SEQ ID NO: 9087 - DNA, 22 bp, synthetic construct
  misc_feature 1..22: note = chemically synthesized
  source 1..22: mol_type = other DNA
agggtcccacagctcactcatt

SEQ ID NO: 9088 - DNA, 22 bp, synthetic construct
  misc_feature 1..22: note = chemically synthesized
  source 1..22: mol_type = other DNA
actcattctctttccatttttt

SEQ ID NO: 9089 - DNA, 22 bp, synthetic construct
  misc_feature 1..22: note = chemically synthesized
  source 1..22: mol_type = other DNA
attctctttccattttttaatt

SEQ ID NO: 9090 - DNA, 22 bp, synthetic construct
  misc_feature 1..22: note = chemically synthesized
  source 1..22: mol_type = other DNA
tctttccattttttaattcttt

SEQ ID NO: 9091 - DNA, 22 bp, synthetic construct
  misc_feature 1..22: note = chemically synthesized
  source 1..22: mol_type = other DNA
tttccattttttaattcttttt

SEQ ID NO: 9092 - DNA, 22 bp, synthetic construct
  misc_feature 1..22: note = chemically synthesized
  source 1..22: mol_type = other DNA
tccattttttaattcttttttc

SEQ ID NO: 9093 - DNA, 22 bp, synthetic construct
  misc_feature 1..22: note = chemically synthesized
  source 1..22: mol_type = other DNA
ccattttttaattcttttttct

SEQ ID NO: 9094 - DNA, 22 bp, synthetic construct
  misc_feature 1..22: note = chemically synthesized
  source 1..22: mol_type = other DNA
cattttttaattcttttttctc

SEQ ID NO: 9095 - DNA, 22 bp, synthetic construct
  misc_feature 1..22: note = chemically synthesized
  source 1..22: mol_type = other DNA
tttaattcttttttctcccagt

SEQ ID NO: 9096 - DNA, 22 bp, synthetic construct
  misc_feature 1..22: note = chemically synthesized
  source 1..22: mol_type = other DNA
ttaattcttttttctcccagtg

SEQ ID NO: 9097 - DNA, 22 bp, synthetic construct
  misc_feature 1..22: note = chemically synthesized
  source 1..22: mol_type = other DNA
taattcttttttctcccagtgt

SEQ ID NO: 9098 - DNA, 22 bp, synthetic construct
  misc_feature 1..22: note = chemically synthesized
  source 1..22: mol_type = other DNA
aattcttttttctcccagtgtt

SEQ ID NO: 9099 - DNA, 22 bp, synthetic construct
  misc_feature 1..22: note = chemically synthesized
  source 1..22: mol_type = other DNA
attcttttttctcccagtgttt

SEQ ID NO: 9100 - DNA, 22 bp, synthetic construct
  misc_feature 1..22: note = chemically synthesized
  source 1..22: mol_type = other DNA
ttttttctcccagtgtttcatt

SEQ ID NO: 9101 - DNA, 22 bp, synthetic construct
  misc_feature 1..22: note = chemically synthesized
  source 1..22: mol_type = other DNA
ttttctcccagtgtttcatttt

SEQ ID NO: 9102 - DNA, 22 bp, synthetic construct
  misc_feature 1..22: note = chemically synthesized
  source 1..22: mol_type = other DNA
tttctcccagtgtttcatttta

SEQ ID NO: 9103 - DNA, 22 bp, synthetic construct
  misc_feature 1..22: note = chemically synthesized
  source 1..22: mol_type = other DNA
ttctcccagtgtttcattttat

SEQ ID NO: 9104 - DNA, 22 bp, synthetic construct
  misc_feature 1..22: note = chemically synthesized
  source 1..22: mol_type = other DNA
tctcccagtgtttcattttata

SEQ ID NO: 9105 - DNA, 22 bp, synthetic construct
  misc_feature 1..22: note = chemically synthesized
  source 1..22: mol_type = other DNA
ctcccagtgtttcattttatag

SEQ ID NO: 9106 - DNA, 22 bp, synthetic construct
  misc_feature 1..22: note = chemically synthesized
  source 1..22: mol_type = other DNA
tcccagtgtttcattttataga

SEQ ID NO: 9107 - DNA, 22 bp, synthetic construct
  misc_feature 1..22: note = chemically synthesized
  source 1..22: mol_type = other DNA
ccagtgtttcattttatagagt

SEQ ID NO: 9108 - DNA, 22 bp, synthetic construct
  misc_feature 1..22: note = chemically synthesized
  source 1..22: mol_type = other DNA
cattttatagagttattgctgt

SEQ ID NO: 9109 - DNA, 22 bp, synthetic construct
  misc_feature 1..22: note = chemically synthesized
  source 1..22: mol_type = other DNA
attttatagagttattgctgtt

SEQ ID NO: 9110 - DNA, 22 bp, synthetic construct
  misc_feature 1..22: note = chemically synthesized
  source 1..22: mol_type = other DNA
tatagagttattgctgttcatt

SEQ ID NO: 9111 - DNA, 22 bp, synthetic construct
  misc_feature 1..22: note = chemically synthesized
  source 1..22: mol_type = other DNA
atagagttattgctgttcatta

SEQ ID NO: 9112 - DNA, 22 bp, synthetic construct
  misc_feature 1..22: note = chemically synthesized
  source 1..22: mol_type = other DNA
tagagttattgctgttcattaa

SEQ ID NO: 9113 - DNA, 22 bp, synthetic construct
  misc_feature 1..22: note = chemically synthesized
  source 1..22: mol_type = other DNA
ttgctgttcattaagttaacta

SEQ ID NO: 9114 - DNA, 22 bp, synthetic construct
  misc_feature 1..22: note = chemically synthesized
  source 1..22: mol_type = other DNA
ctgttcattaagttaactaaaa

SEQ ID NO: 9115 - DNA, 22 bp, synthetic construct
  misc_feature 1..22: note = chemically synthesized
  source 1..22: mol_type = other DNA
ttcattaagttaactaaaattt

SEQ ID NO: 9116 - DNA, 22 bp, synthetic construct
  misc_feature 1..22: note = chemically synthesized
  source 1..22: mol_type = other DNA
attaagttaactaaaattttcc

SEQ ID NO: 9117 - DNA, 22 bp, synthetic construct
  misc_feature 1..22: note = chemically synthesized
  source 1..22: mol_type = other DNA
agttaactaaaattttcccctt

SEQ ID NO: 9118 - DNA, 22 bp, synthetic construct
  misc_feature 1..22: note = chemically synthesized
  source 1..22: mol_type = other DNA
actaaaattttccccttcccct

SEQ ID NO: 9119 - DNA, 22 bp, synthetic construct
  misc_feature 1..22: note = chemically synthesized
  source 1..22: mol_type = other DNA
aaattttccccttcccctcccc

SEQ ID NO: 9120 - DNA, 22 bp, synthetic construct
  misc_feature 1..22: note = chemically synthesized
  source 1..22: mol_type = other DNA
tccccttcccctccccctcccc

SEQ ID NO: 9121 - DNA, 22 bp, synthetic construct
  misc_feature 1..22: note = chemically synthesized
  source 1..22: mol_type = other DNA
ccccttcccctccccctcccct

SEQ ID NO: 9122 - DNA, 22 bp, synthetic construct
  misc_feature 1..22: note = chemically synthesized
  source 1..22: mol_type = other DNA
cccttcccctccccctcccctc

SEQ ID NO: 9123 - DNA, 22 bp, synthetic construct
  misc_feature 1..22: note = chemically synthesized
  source 1..22: mol_type = other DNA
cccctccccctcccctcccctc

SEQ ID NO: 9124 - DNA, 22 bp, synthetic construct
  misc_feature 1..22: note = chemically synthesized
  source 1..22: mol_type = other DNA
ccctccccctcccctcccctcc

SEQ ID NO: 9125 - DNA, 22 bp, synthetic construct
  misc_feature 1..22: note = chemically synthesized
  source 1..22: mol_type = other DNA
cccctcccctcccctcctttcc

SEQ ID NO: 9126 - DNA, 22 bp, synthetic construct
  misc_feature 1..22: note = chemically synthesized
  source 1..22: mol_type = other DNA
ccctcccctcctttccttccct

SEQ ID NO: 9127 - DNA, 22 bp, synthetic construct
  misc_feature 1..22: note = chemically synthesized
  source 1..22: mol_type = other DNA
ccctcctttccttccctcgctt

SEQ ID NO: 9128 - DNA, 22 bp, synthetic construct
  misc_feature 1..22: note = chemically synthesized
  source 1..22: mol_type = other DNA
ctttccttccctcgcttcccct

SEQ ID NO: 9129 - DNA, 22 bp, synthetic construct
  misc_feature 1..22: note = chemically synthesized
  source 1..22: mol_type = other DNA
tccttccctcgcttcccctccc

SEQ ID NO: 9130 - DNA, 22 bp, synthetic construct
  misc_feature 1..22: note = chemically synthesized
  source 1..22: mol_type = other DNA
ccttccctcgcttcccctcccc

SEQ ID NO: 9131 - DNA, 22 bp, synthetic construct
  misc_feature 1..22: note = chemically synthesized
  source 1..22: mol_type = other DNA
cttccctcgcttcccctcccct

SEQ ID NO: 9132 - DNA, 22 bp, synthetic construct
  misc_feature 1..22: note = chemically synthesized
  source 1..22: mol_type = other DNA
ccctcgcttcccctcccctctc

SEQ ID NO: 9133 - DNA, 22 bp, synthetic construct
  misc_feature 1..22: note = chemically synthesized
  source 1..22: mol_type = other DNA
cctcgcttcccctcccctctct

SEQ ID NO: 9134 - DNA, 22 bp, synthetic construct
  misc_feature 1..22: note = chemically synthesized
  source 1..22: mol_type = other DNA
gcttcccctcccctctctctct

SEQ ID NO: 9135 - DNA, 22 bp, synthetic construct
  misc_feature 1..22: note = chemically synthesized
  source 1..22: mol_type = other DNA
cccctcccctctctctctctca

SEQ ID NO: 9136 - DNA, 22 bp, synthetic construct
  misc_feature 1..22: note = chemically synthesized
  source 1..22: mol_type = other DNA
ccctcccctctctctctctcat

SEQ ID NO: 9137 - DNA, 22 bp, synthetic construct
  misc_feature 1..22: note = chemically synthesized
  source 1..22: mol_type = other DNA
ccctctctctctctcatctcac

SEQ ID NO: 9138 - DNA, 22 bp, synthetic construct
  misc_feature 1..22: note = chemically synthesized
  source 1..22: mol_type = other DNA
tctctctctcatctcactctgt

SEQ ID NO: 9139 - DNA, 22 bp, synthetic construct
  misc_feature 1..22: note = chemically synthesized
  source 1..22: mol_type = other DNA
tctctctcatctcactctgttg

SEQ ID NO: 9140 - DNA, 22 bp, synthetic construct
  misc_feature 1..22: note = chemically synthesized
  source 1..22: mol_type = other DNA
tctctcatctcactctgttgcc

SEQ ID NO: 9141 - DNA, 22 bp, synthetic construct
  misc_feature 1..22: note = chemically synthesized
  source 1..22: mol_type = other DNA
tctcatctcactctgttgccca

SEQ ID NO: 9142 - DNA, 22 bp, synthetic construct
  misc_feature 1..22: note = chemically synthesized
  source 1..22: mol_type = other DNA
tcatctcactctgttgcccagg

SEQ ID NO: 9143 - DNA, 22 bp, synthetic construct
  misc_feature 1..22: note = chemically synthesized
  source 1..22: mol_type = other DNA
atctcactctgttgcccaggct

SEQ ID NO: 9144 - DNA, 22 bp, synthetic construct
  misc_feature 1..22: note = chemically synthesized
  source 1..22: mol_type = other DNA
actctgttgcccaggctggaat

SEQ ID NO: 9145 - DNA, 22 bp, synthetic construct
  misc_feature 1..22: note = chemically synthesized
  source 1..22: mol_type = other DNA
tgttgcccaggctggaatgcag

SEQ ID NO: 9146 - DNA, 22 bp, synthetic construct
  misc_feature 1..22: note = chemically synthesized
  source 1..22: mol_type = other DNA
ttgcccaggctggaatgcagta

SEQ ID NO: 9147 - DNA, 22 bp, synthetic construct
  misc_feature 1..22: note = chemically synthesized
  source 1..22: mol_type = other DNA
cccaggctggaatgcagtagct

SEQ ID NO: 9148 - DNA, 22 bp, synthetic construct
  misc_feature 1..22: note = chemically synthesized
  source 1..22: mol_type = other DNA
gaatgcagtagcttgtcacaac

SEQ ID NO: 9149 - DNA, 22 bp, synthetic construct
  misc_feature 1..22: note = chemically synthesized
  source 1..22: mol_type = other DNA
gtcacaactcactgtggcctcc

SEQ ID NO: 9150 - DNA, 22 bp, synthetic construct
  misc_feature 1..22: note = chemically synthesized
  source 1..22: mol_type = other DNA
tcacaactcactgtggcctcca

SEQ ID NO: 9151 - DNA, 22 bp, synthetic construct
  misc_feature 1..22: note = chemically synthesized
  source 1..22: mol_type = other DNA
actgtggcctccacctcctggg

SEQ ID NO: 9152 - DNA, 22 bp, synthetic construct
  misc_feature 1..22: note = chemically synthesized
  source 1..22: mol_type = other DNA
tggcctccacctcctgggctca

SEQ ID NO: 9153 - DNA, 22 bp, synthetic construct
  misc_feature 1..22: note = chemically synthesized
  source 1..22: mol_type = other DNA
cacctcctgggctcaggcgatc

SEQ ID NO: 9154 - DNA, 22 bp, synthetic construct
  misc_feature 1..22: note = chemically synthesized
  source 1..22: mol_type = other DNA
ctgggctcaggcgatccttcca

SEQ ID NO: 9155 - DNA, 22 bp, synthetic construct
  misc_feature 1..22: note = chemically synthesized
  source 1..22: mol_type = other DNA
ggctcaggcgatccttccactt

SEQ ID NO: 9156 - DNA, 22 bp, synthetic construct
  misc_feature 1..22: note = chemically synthesized
  source 1..22: mol_type = other DNA
aggcgatccttccacttcagcc

SEQ ID NO: 9157 - DNA, 22 bp, synthetic construct
  misc_feature 1..22: note = chemically synthesized
  source 1..22: mol_type = other DNA
ccacttcagcctcccaggtagc

SEQ ID NO: 9158 - DNA, 22 bp, synthetic construct
  misc_feature 1..22: note = chemically synthesized
  source 1..22: mol_type = other DNA
cacttcagcctcccaggtagct

SEQ ID NO: 9159 - DNA, 22 bp, synthetic construct
  misc_feature 1..22: note = chemically synthesized
  source 1..22: mol_type = other DNA
cagcctcccaggtagctgggac

SEQ ID NO: 9160 - DNA, 22 bp, synthetic construct
  misc_feature 1..22: note = chemically synthesized
  source 1..22: mol_type = other DNA
agcctcccaggtagctgggact

SEQ ID NO: 9161 - DNA, 22 bp, synthetic construct
  misc_feature 1..22: note = chemically synthesized
  source 1..22: mol_type = other DNA
ccaggtagctgggactataggc

SEQ ID NO: 9162 - DNA, 22 bp, synthetic construct
  misc_feature 1..22: note = chemically synthesized
  source 1..22: mol_type = other DNA
ggactataggcatgtggcacca

SEQ ID NO: 9163 - DNA, 22 bp, synthetic construct
  misc_feature 1..22: note = chemically synthesized
  source 1..22: mol_type = other DNA
taggcatgtggcaccacacctg

SEQ ID NO: 9164 - DNA, 22 bp, synthetic construct
  misc_feature 1..22: note = chemically synthesized
  source 1..22: mol_type = other DNA
gctaattaaaaatttttttttg

SEQ ID NO: 9165 - DNA, 22 bp, synthetic construct
  misc_feature 1..22: note = chemically synthesized
  source 1..22: mol_type = other DNA
attaaaaatttttttttgtaga

SEQ ID NO: 9166 - DNA, 22 bp, synthetic construct
  misc_feature 1..22: note = chemically synthesized
  source 1..22: mol_type = other DNA
aaaatttttttttgtagagacg

SEQ ID NO: 9167 - DNA, 22 bp, synthetic construct
  misc_feature 1..22: note = chemically synthesized
  source 1..22: mol_type = other DNA
ttttttgtagagacggttttgc

SEQ ID NO: 9168 - DNA, 22 bp, synthetic construct
  misc_feature 1..22: note = chemically synthesized
  source 1..22: mol_type = other DNA
tttttgtagagacggttttgcc

SEQ ID NO: 9169 - DNA, 22 bp, synthetic construct
  misc_feature 1..22: note = chemically synthesized
  source 1..22: mol_type = other DNA
ttttgtagagacggttttgcca

SEQ ID NO: 9170 - DNA, 22 bp, synthetic construct
  misc_feature 1..22: note = chemically synthesized
  source 1..22: mol_type = other DNA
tttgtagagacggttttgccat

SEQ ID NO: 9171 - DNA, 22 bp, synthetic construct
  misc_feature 1..22: note = chemically synthesized
  source 1..22: mol_type = other DNA
ttgtagagacggttttgccatg

SEQ ID NO: 9172 - DNA, 22 bp, synthetic construct
  misc_feature 1..22: note = chemically synthesized
  source 1..22: mol_type = other DNA
tgtagagacggttttgccatgt

SEQ ID NO: 9173 - DNA, 22 bp, synthetic construct
  misc_feature 1..22: note = chemically synthesized
  source 1..22: mol_type = other DNA
gtagagacggttttgccatgta

SEQ ID NO: 9174 - DNA, 22 bp, synthetic construct
  misc_feature 1..22: note = chemically synthesized
  source 1..22: mol_type = other DNA
tagagacggttttgccatgtag

SEQ ID NO: 9175 - DNA, 22 bp, synthetic construct
  misc_feature 1..22: note = chemically synthesized
  source 1..22: mol_type = other DNA
tgccatgtagaggggttttgcc

SEQ ID NO: 9176 - DNA, 22 bp, synthetic construct
  misc_feature 1..22: note = chemically synthesized
  source 1..22: mol_type = other DNA
gccatgtagaggggttttgcca

SEQ ID NO: 9177 - DNA, 22 bp, synthetic construct
  misc_feature 1..22: note = chemically synthesized
  source 1..22: mol_type = other DNA
ccatgtagaggggttttgccat

SEQ ID NO: 9178 - DNA, 22 bp, synthetic construct
  misc_feature 1..22: note = chemically synthesized
  source 1..22: mol_type = other DNA
tgccatgctgcccagactagtc

SEQ ID NO: 9179 - DNA, 22 bp, synthetic construct
  misc_feature 1..22: note = chemically synthesized
  source 1..22: mol_type = other DNA
gccatgctgcccagactagtct

SEQ ID NO: 9180 - DNA, 22 bp, synthetic construct
  misc_feature 1..22: note = chemically synthesized
  source 1..22: mol_type = other DNA
ccatgctgcccagactagtctt

SEQ ID NO: 9181 - DNA, 22 bp, synthetic construct
  misc_feature 1..22: note = chemically synthesized
  source 1..22: mol_type = other DNA
cccagactagtcttgagctcct

SEQ ID NO: 9182 - DNA, 22 bp, synthetic construct
  misc_feature 1..22: note = chemically synthesized
  source 1..22: mol_type = other DNA
gtcttgagctcctgggctcaag

SEQ ID NO: 9183 - DNA, 22 bp, synthetic construct
  misc_feature 1..22: note = chemically synthesized
  source 1..22: mol_type = other DNA
gagctcctgggctcaagtgatt

SEQ ID NO: 9184 - DNA, 22 bp, synthetic construct
  misc_feature 1..22: note = chemically synthesized
  source 1..22: mol_type = other DNA
agctcctgggctcaagtgattc

SEQ ID NO: 9185 - DNA, 22 bp, synthetic construct
  misc_feature 1..22: note = chemically synthesized
  source 1..22: mol_type = other DNA
ctgggctcaagtgattcccccc

SEQ ID NO: 9186 - DNA, 22 bp, synthetic construct
  misc_feature 1..22: note = chemically synthesized
  source 1..22: mol_type = other DNA
ggctcaagtgattccccccgtg

SEQ ID NO: 9187 - DNA, 22 bp, synthetic construct
  misc_feature 1..22: note = chemically synthesized
  source 1..22: mol_type = other DNA
aagtgattccccccgtgtcgac

SEQ ID NO: 9188 - DNA, 22 bp, synthetic construct
  misc_feature 1..22: note = chemically synthesized
  source 1..22: mol_type = other DNA
cccccgtgtcgacctcccaaag

SEQ ID NO: 9189 - DNA, 22 bp, synthetic construct
  misc_feature 1..22: note = chemically synthesized
  source 1..22: mol_type = other DNA
ccaaagtgctgggattacagat

SEQ ID NO: 9190 - DNA, 22 bp, synthetic construct
  misc_feature 1..22: note = chemically synthesized
  source 1..22: mol_type = other DNA
ggattacagatgtgatccacag

SEQ ID NO: 9191 - DNA, 22 bp, synthetic construct
  misc_feature 1..22: note = chemically synthesized
  source 1..22: mol_type = other DNA
cagatgtgatccacagtgcctg

SEQ ID NO: 9192 - DNA, 22 bp, synthetic construct
  misc_feature 1..22: note = chemically synthesized
  source 1..22: mol_type = other DNA
gccctaaatttttcttacgcat

SEQ ID NO: 9193 - DNA, 22 bp, synthetic construct
  misc_feature 1..22: note = chemically synthesized
  source 1..22: mol_type = other DNA
aatttttcttacgcatttctca

SEQ ID NO: 9194 - DNA, 22 bp, synthetic construct
  misc_feature 1..22: note = chemically synthesized
  source 1..22: mol_type = other DNA
ttcttacgcatttctcatcttc

SEQ ID NO: 9195 - DNA, 22 bp, synthetic construct
  misc_feature 1..22: note = chemically synthesized
  source 1..22: mol_type = other DNA
tcttacgcatttctcatcttcc

SEQ ID NO: 9196 - DNA, 22 bp, synthetic construct
  misc_feature 1..22: note = chemically synthesized
  source 1..22: mol_type = other DNA
cttacgcatttctcatcttcca

SEQ ID NO: 9197 - DNA, 22 bp, synthetic construct
  misc_feature 1..22: note = chemically synthesized
  source 1..22: mol_type = other DNA
ttacgcatttctcatcttccat

SEQ ID NO: 9198 - DNA, 22 bp, synthetic construct
  misc_feature 1..22: note = chemically synthesized
  source 1..22: mol_type = other DNA
acgcatttctcatcttccatta

SEQ ID NO: 9199 - DNA, 22 bp, synthetic construct
  misc_feature 1..22: note = chemically synthesized
  source 1..22: mol_type = other DNA
cgcatttctcatcttccattat

SEQ ID NO: 9200 - DNA, 22 bp, synthetic construct
  misc_feature 1..22: note = chemically synthesized
  source 1..22: mol_type = other DNA
ctcatcttccattatttccatc

SEQ ID NO: 9201 - DNA, 22 bp, synthetic construct
  misc_feature 1..22: note = chemically synthesized
  source 1..22: mol_type = other DNA
tcatcttccattatttccatcc

SEQ ID NO: 9202 - DNA, 22 bp, synthetic construct
  misc_feature 1..22: note = chemically synthesized
  source 1..22: mol_type = other DNA
atcttccattatttccatccag

SEQ ID NO: 9203 - DNA, 22 bp, synthetic construct
  misc_feature 1..22: note = chemically synthesized
  source 1..22: mol_type = other DNA
ccattatttccatccagtgtgt

SEQ ID NO: 9204 - DNA, 22 bp, synthetic construct
  misc_feature 1..22: note = chemically synthesized
  source 1..22: mol_type = other DNA
cattatttccatccagtgtgtt

SEQ ID NO: 9205 - DNA, 22 bp, synthetic construct
  misc_feature 1..22: note = chemically synthesized
  source 1..22: mol_type = other DNA
tttccatccagtgtgttttttc

SEQ ID NO: 9206 - DNA, 22 bp, synthetic construct
  misc_feature 1..22: note = chemically synthesized
  source 1..22: mol_type = other DNA
ccatccagtgtgttttttcttt

SEQ ID NO: 9207 - DNA, 22 bp, synthetic construct
  misc_feature 1..22: note = chemically synthesized
  source 1..22: mol_type = other DNA
catccagtgtgttttttctttt

SEQ ID NO: 9208 - DNA, 22 bp, synthetic construct
  misc_feature 1..22: note = chemically synthesized
  source 1..22: mol_type = other DNA
tttcttttctttcttttctttt

SEQ ID NO: 9209 - DNA, 22 bp, synthetic construct
  misc_feature 1..22: note = chemically synthesized
  source 1..22: mol_type = other DNA
ttcttttctttcttttcttttt

SEQ ID NO: 9210 - DNA, 22 bp, synthetic construct
  misc_feature 1..22: note = chemically synthesized
  source 1..22: mol_type = other DNA
tcttttctttcttttctttttt

SEQ ID NO: 9211 - DNA, 22 bp, synthetic construct
  misc_feature 1..22: note = chemically synthesized
  source 1..22: mol_type = other DNA
cttttctttcttttcttttttt

SEQ ID NO: 9212 - DNA, 22 bp, synthetic construct
  misc_feature 1..22: note = chemically synthesized
  source 1..22: mol_type = other DNA
ttttctttcttttctttttttt

SEQ ID NO: 9213 - DNA, 22 bp, synthetic construct
  misc_feature 1..22: note = chemically synthesized
  source 1..22: mol_type = other DNA
ttctttcttttctttttttttt

SEQ ID NO: 9214 - DNA, 22 bp, synthetic construct
  misc_feature 1..22: note = chemically synthesized
  source 1..22: mol_type = other DNA
tctttcttttcttttttttttt

SEQ ID NO: 9215 - DNA, 22 bp, synthetic construct
  misc_feature 1..22: note = chemically synthesized
  source 1..22: mol_type = other DNA
ctttcttttctttttttttttt

SEQ ID NO: 9216 - DNA, 22 bp, synthetic construct
  misc_feature 1..22: note = chemically synthesized
  source 1..22: mol_type = other DNA
tttcttttcttttttttttttt

SEQ ID NO: 9217 - DNA, 22 bp, synthetic construct
  misc_feature 1..22: note = chemically synthesized
  source 1..22: mol_type = other DNA
tcttttcttttttttttttttg

SEQ ID NO: 9218 - DNA, 22 bp, synthetic construct
  misc_feature 1..22: note = chemically synthesized
  source 1..22: mol_type = other DNA
cttttcttttttttttttttgg

SEQ ID NO: 9219 - DNA, 22 bp, synthetic construct
  misc_feature 1..22: note = chemically synthesized
  source 1..22: mol_type = other DNA
ttttcttttttttttttttgga

SEQ ID NO: 9220 - DNA, 22 bp, synthetic construct
  misc_feature 1..22: note = chemically synthesized
  source 1..22: mol_type = other DNA
ttcttttttttttttttggagg

SEQ ID NO: 9221 - DNA, 22 bp, synthetic construct
  misc_feature 1..22: note = chemically synthesized
  source 1..22: mol_type = other DNA
tcttttttttttttttggaggc

SEQ ID NO: 9222 - DNA, 22 bp, synthetic construct
  misc_feature 1..22: note = chemically synthesized
  source 1..22: mol_type = other DNA
cttttttttttttttggaggcg

SEQ ID NO: 9223 - DNA, 22 bp, synthetic construct
  misc_feature 1..22: note = chemically synthesized
  source 1..22: mol_type = other DNA
ttttttttttttttggaggcgg

SEQ ID NO: 9224 - DNA, 22 bp, synthetic construct
  misc_feature 1..22: note = chemically synthesized
  source 1..22: mol_type = other DNA
ttttttttttttggaggcggag

SEQ ID NO: 9225 - DNA, 22 bp, synthetic construct
  misc_feature 1..22: note = chemically synthesized
  source 1..22: mol_type = other DNA
tttttttttttggaggcggagt

SEQ ID NO: 9226 - DNA, 22 bp, synthetic construct
  misc_feature 1..22: note = chemically synthesized
  source 1..22: mol_type = other DNA
ttttttttttggaggcggagtc

SEQ ID NO: 9227 - DNA, 22 bp, synthetic construct
  misc_feature 1..22: note = chemically synthesized
  source 1..22: mol_type = other DNA
tttttttttggaggcggagtct

SEQ ID NO: 9228 - DNA, 22 bp, synthetic construct
  misc_feature 1..22: note = chemically synthesized
  source 1..22: mol_type = other DNA
ttttttttggaggcggagtctc

SEQ ID NO: 9229 - DNA, 22 bp, synthetic construct
  misc_feature 1..22: note = chemically synthesized
  source 1..22: mol_type = other DNA
tttttttggaggcggagtctcg

SEQ ID NO: 9230 - DNA, 22 bp, synthetic construct
  misc_feature 1..22: note = chemically synthesized
  source 1..22: mol_type = other DNA
ttttttggaggcggagtctcgc

SEQ ID NO: 9231 - DNA, 22 bp, synthetic construct
  misc_feature 1..22: note = chemically synthesized
  source 1..22: mol_type = other DNA
tttttggaggcggagtctcgct

SEQ ID NO: 9232 - DNA, 22 bp, synthetic construct
  misc_feature 1..22: note = chemically synthesized
  source 1..22: mol_type = other DNA
ttttggaggcggagtctcgctc

SEQ ID NO: 9233 - DNA, 22 bp, synthetic construct
  misc_feature 1..22: note = chemically synthesized
  source 1..22: mol_type = other DNA
tttggaggcggagtctcgctct

SEQ ID NO: 9234 - DNA, 22 bp, synthetic construct
  misc_feature 1..22: note = chemically synthesized
  source 1..22: mol_type = other DNA
ttggaggcggagtctcgctctg

SEQ ID NO: 9235 - DNA, 22 bp, synthetic construct
  misc_feature 1..22: note = chemically synthesized
  source 1..22: mol_type = other DNA
tggaggcggagtctcgctctgt

SEQ ID NO: 9236 - DNA, 22 bp, synthetic construct
  misc_feature 1..22: note = chemically synthesized
  source 1..22: mol_type = other DNA
ggaggcggagtctcgctctgtt

SEQ ID NO: 9237 - DNA, 22 bp, synthetic construct
  misc_feature 1..22: note = chemically synthesized
  source 1..22: mol_type = other DNA
gaggcggagtctcgctctgttg

SEQ ID NO: 9238 - DNA, 22 bp, synthetic construct
  misc_feature 1..22: note = chemically synthesized
  source 1..22: mol_type = other DNA
gctctgttgcccaggccggagt

SEQ ID NO: 9239 - DNA, 22 bp, synthetic construct
  misc_feature 1..22: note = chemically synthesized
  source 1..22: mol_type = other DNA
tgttgcccaggccggagtgcag

SEQ ID NO: 9240 - DNA, 22 bp, synthetic construct
  misc_feature 1..22: note = chemically synthesized
  source 1..22: mol_type = other DNA
ttgcccaggccggagtgcagtg

SEQ ID NO: 9241 - DNA, 22 bp, synthetic construct
  misc_feature 1..22: note = chemically synthesized
  source 1..22: mol_type = other DNA
cccaggccggagtgcagtggcg

SEQ ID NO: 9242 - DNA, 22 bp, synthetic construct
  misc_feature 1..22: note = chemically synthesized
  source 1..22: mol_type = other DNA
ggctcactgcaagctctgcctc

SEQ ID NO: 9243 - DNA, 22 bp, synthetic construct
  misc_feature 1..22: note = chemically synthesized
  source 1..22: mol_type = other DNA
gctcactgcaagctctgcctcc

SEQ ID NO: 9244 - DNA, 22 bp, synthetic construct
  misc_feature 1..22: note = chemically synthesized
  source 1..22: mol_type = other DNA
actgcaagctctgcctcccggg

SEQ ID NO: 9245 - DNA, 22 bp, synthetic construct
  misc_feature 1..22: note = chemically synthesized
  source 1..22: mol_type = other DNA
caagctctgcctcccgggttca

SEQ ID NO: 9246 - DNA, 22 bp, synthetic construct
  misc_feature 1..22: note = chemically synthesized
  source 1..22: mol_type = other DNA
tgcctcccgggttcatgccatt

SEQ ID NO: 9247 - DNA, 22 bp, synthetic construct
  misc_feature 1..22: note = chemically synthesized
  source 1..22: mol_type = other DNA
cctcccgggttcatgccattct

SEQ ID NO: 9248 - DNA, 22 bp, synthetic construct
  misc_feature 1..22: note = chemically synthesized
  source 1..22: mol_type = other DNA
ccgggttcatgccattctcctg

SEQ ID NO: 9249 - DNA, 22 bp, synthetic construct
  misc_feature 1..22: note = chemically synthesized
  source 1..22: mol_type = other DNA
atgccattctcctgcctcagcc

SEQ ID NO: 9250 - DNA, 22 bp, synthetic construct
  misc_feature 1..22: note = chemically synthesized
  source 1..22: mol_type = other DNA
tcctgcctcagcctcccgagta

SEQ ID NO: 9251 - DNA, 22 bp, synthetic construct
  misc_feature 1..22: note = chemically synthesized
  source 1..22: mol_type = other DNA
ctgcctcagcctcccgagtagc

SEQ ID NO: 9252 - DNA, 22 bp, synthetic construct
  misc_feature 1..22: note = chemically synthesized
  source 1..22: mol_type = other DNA
cctcagcctcccgagtagctgg

SEQ ID NO: 9253 - DNA, 22 bp, synthetic construct
  misc_feature 1..22: note = chemically synthesized
  source 1..22: mol_type = other DNA
agcctcccgagtagctgggact

SEQ ID NO: 9254 - DNA, 22 bp, synthetic construct
  misc_feature 1..22: note = chemically synthesized
  source 1..22: mol_type = other DNA
ccgagtagctgggactacaggc

SEQ ID NO: 9255 - DNA, 22 bp, synthetic construct
  misc_feature 1..22: note = chemically synthesized
  source 1..22: mol_type = other DNA
ggactacaggcgcctgccacca

SEQ ID NO: 9256 - DNA, 22 bp, synthetic construct
  misc_feature 1..22: note = chemically synthesized
  source 1..22: mol_type = other DNA
caggcgcctgccaccacgtctg

SEQ ID NO: 9257 - DNA, 22 bp, synthetic construct
  misc_feature 1..22: note = chemically synthesized
  source 1..22: mol_type = other DNA
ccaccacgtctggctaattttt

SEQ ID NO: 9258 - DNA, 22 bp, synthetic construct
  misc_feature 1..22: note = chemically synthesized
  source 1..22: mol_type = other DNA
gctaattttttgtatttttagt

SEQ ID NO: 9259 - DNA, 22 bp, synthetic construct
  misc_feature 1..22: note = chemically synthesized
  source 1..22: mol_type = other DNA
attttttgtatttttagtagag

SEQ ID NO: 9260 - DNA, 22 bp, synthetic construct
  misc_feature 1..22: note = chemically synthesized
  source 1..22: mol_type = other DNA
tttgtatttttagtagagatgg

SEQ ID NO: 9261 - DNA, 22 bp, synthetic construct
  misc_feature 1..22: note = chemically synthesized
  source 1..22: mol_type = other DNA
ttgtatttttagtagagatggg

SEQ ID NO: 9262 - DNA, 22 bp, synthetic construct
  misc_feature 1..22: note = chemically synthesized
  source 1..22: mol_type = other DNA
tgtatttttagtagagatgggg

SEQ ID NO: 9263 - DNA, 22 bp, synthetic construct
  misc_feature 1..22: note = chemically synthesized
  source 1..22: mol_type = other DNA
gtatttttagtagagatggggt

SEQ ID NO: 9264 - DNA, 22 bp, synthetic construct
  misc_feature 1..22: note = chemically synthesized
  source 1..22: mol_type = other DNA
tatttttagtagagatggggtt

SEQ ID NO: 9265 - DNA, 22 bp, synthetic construct
  misc_feature 1..22: note = chemically synthesized
  source 1..22: mol_type = other DNA
ttagtagagatggggtttcacc

SEQ ID NO: 9266 - DNA, 22 bp, synthetic construct
  misc_feature 1..22: note = chemically synthesized
  source 1..22: mol_type = other DNA
tagtagagatggggtttcacca

SEQ ID NO: 9267 - DNA, 22 bp, synthetic construct
  misc_feature 1..22: note = chemically synthesized
  source 1..22: mol_type = other DNA
agtagagatggggtttcaccat

SEQ ID NO: 9268 - DNA, 22 bp, synthetic construct
  misc_feature 1..22: note = chemically synthesized
  source 1..22: mol_type = other DNA
gtagagatggggtttcaccatg

SEQ ID NO: 9269 - DNA, 22 bp, synthetic construct
  misc_feature 1..22: note = chemically synthesized
  source 1..22: mol_type = other DNA
caccatgttagccaggatggtg

SEQ ID NO: 9270 - DNA, 22 bp, synthetic construct
  misc_feature 1..22: note = chemically synthesized
  source 1..22: mol_type = other DNA
accatgttagccaggatggtgt

SEQ ID NO: 9271 - DNA, 22 bp, synthetic construct
  misc_feature 1..22: note = chemically synthesized
  source 1..22: mol_type = other DNA
gccaggatggtgtcgatctcct

SEQ ID NO: 9272 - DNA, 22 bp, synthetic construct
  misc_feature 1..22: note = chemically synthesized
  source 1..22: mol_type = other DNA
ctgacctcatgatctgcccgcc

SEQ ID NO: 9273 - DNA, 22 bp, synthetic construct
  misc_feature 1..22: note = chemically synthesized
  source 1..22: mol_type = other DNA
acctcatgatctgcccgccttg

SEQ ID NO: 9274 - DNA, 22 bp, synthetic construct
  misc_feature 1..22: note = chemically synthesized
  source 1..22: mol_type = other DNA
atgatctgcccgccttggcctc

SEQ ID NO: 9275 - DNA, 22 bp, synthetic construct
  misc_feature 1..22: note = chemically synthesized
  source 1..22: mol_type = other DNA
cccgccttggcctcccacagtg

SEQ ID NO: 9276 - DNA, 22 bp, synthetic construct
  misc_feature 1..22: note = chemically synthesized
  source 1..22: mol_type = other DNA
ggcctcccacagtgctgggatt

SEQ ID NO: 9277 - DNA, 22 bp, synthetic construct
  misc_feature 1..22: note = chemically synthesized
  source 1..22: mol_type = other DNA
gcctcccacagtgctgggattc

SEQ ID NO: 9278 - DNA, 22 bp, synthetic construct
  misc_feature 1..22: note = chemically synthesized
  source 1..22: mol_type = other DNA
ccacagtgctgggattccaggc

SEQ ID NO: 9279 - DNA, 22 bp, synthetic construct
  misc_feature 1..22: note = chemically synthesized
  source 1..22: mol_type = other DNA
ggattccaggcgtgagccacgg

SEQ ID NO: 9280 - DNA, 22 bp, synthetic construct
  misc_feature 1..22: note = chemically synthesized
  source 1..22: mol_type = other DNA
caggcgtgagccacggcgcctg

SEQ ID NO: 9281 - DNA, 22 bp, synthetic construct
  misc_feature 1..22: note = chemically synthesized
  source 1..22: mol_type = other DNA
gccagtgtgttttttcatttca

SEQ ID NO: 9282 - DNA, 22 bp, synthetic construct
  misc_feature 1..22: note = chemically synthesized
  source 1..22: mol_type = other DNA
tttcatttcagacattgtagtt

SEQ ID NO: 9283 - DNA, 22 bp, synthetic construct
  misc_feature 1..22: note = chemically synthesized
  source 1..22: mol_type = other DNA
ttcatttcagacattgtagttt

SEQ ID NO: 9284 - DNA, 22 bp, synthetic construct
  misc_feature 1..22: note = chemically synthesized
  source 1..22: mol_type = other DNA
tcatttcagacattgtagtttt

SEQ ID NO: 9285 - DNA, 22 bp, synthetic construct
  misc_feature 1..22: note = chemically synthesized
  source 1..22: mol_type = other DNA
catttcagacattgtagttttt

SEQ ID NO: 9286 - DNA, 22 bp, synthetic construct
  misc_feature 1..22: note = chemically synthesized
  source 1..22: mol_type = other DNA
atttcagacattgtagttttta

SEQ ID NO: 9287 - DNA, 22 bp, synthetic construct
  misc_feature 1..22: note = chemically synthesized
  source 1..22: mol_type = other DNA
cagacattgtagtttttatctc

SEQ ID NO: 9288 - DNA, 22 bp, synthetic construct
  misc_feature 1..22: note = chemically synthesized
  source 1..22: mol_type = other DNA
agacattgtagtttttatctct

SEQ ID NO: 9289 - DNA, 22 bp, synthetic construct
  misc_feature 1..22: note = chemically synthesized
  source 1..22: mol_type = other DNA
tagtttttatctctagaagttc

SEQ ID NO: 9290 - DNA, 22 bp, synthetic construct
  misc_feature 1..22: note = chemically synthesized
  source 1..22: mol_type = other DNA
ttatctctagaagttcacctgg

SEQ ID NO: 9291 - DNA, 22 bp, synthetic construct
  misc_feature 1..22: note = chemically synthesized
  source 1..22: mol_type = other DNA
tatctctagaagttcacctggg

SEQ ID NO: 9292 - DNA, 22 bp, synthetic construct
  misc_feature 1..22: note = chemically synthesized
  source 1..22: mol_type = other DNA
atctctagaagttcacctgggg

SEQ ID NO: 9293 - DNA, 22 bp, synthetic construct
  misc_feature 1..22: note = chemically synthesized
  source 1..22: mol_type = other DNA
tctctagaagttcacctgggga

SEQ ID NO: 9294 - DNA, 22 bp, synthetic construct
  misc_feature 1..22: note = chemically synthesized
  source 1..22: mol_type = other DNA
tagaagttcacctggggactct

SEQ ID NO: 9295 - DNA, 22 bp, synthetic construct
  misc_feature 1..22: note = chemically synthesized
  source 1..22: mol_type = other DNA
gaagttcacctggggactctta

SEQ ID NO: 9296 - DNA, 22 bp, synthetic construct
  misc_feature 1..22: note = chemically synthesized
  source 1..22: mol_type = other DNA
acctggggactcttaaatatcc

SEQ ID NO: 9297 - DNA, 22 bp, synthetic construct
  misc_feature 1..22: note = chemically synthesized
  source 1..22: mol_type = other DNA
gggactcttaaatatcctccac

SEQ ID NO: 9298 - DNA, 22 bp, synthetic construct
  misc_feature 1..22: note = chemically synthesized
  source 1..22: mol_type = other DNA
ttaaatatcctccacaattcta

SEQ ID NO: 9299 - DNA, 22 bp, synthetic construct
  misc_feature 1..22: note = chemically synthesized
  source 1..22: mol_type = other DNA
aaatatcctccacaattctact

SEQ ID NO: 9300 - DNA, 22 bp, synthetic construct
  misc_feature 1..22: note = chemically synthesized
  source 1..22: mol_type = other DNA
aatatcctccacaattctactt

SEQ ID NO: 9301 - DNA, 22 bp, synthetic construct
  misc_feature 1..22: note = chemically synthesized
  source 1..22: mol_type = other DNA
cacaattctacttaattttttg

SEQ ID NO: 9302 - DNA, 22 bp, synthetic construct
  misc_feature 1..22: note = chemically synthesized
  source 1..22: mol_type = other DNA
tacttaattttttgaacataat

SEQ ID NO: 9303 - DNA, 22 bp, synthetic construct
  misc_feature 1..22: note = chemically synthesized
  source 1..22: mol_type = other DNA
cttaattttttgaacataatgg

SEQ ID NO: 9304 - DNA, 22 bp, synthetic construct
  misc_feature 1..22: note = chemically synthesized
  source 1..22: mol_type = other DNA
aattttttgaacataatgggat

SEQ ID NO: 9305 - DNA, 22 bp, synthetic construct
  misc_feature 1..22: note = chemically synthesized
  source 1..22: mol_type = other DNA
attttttgaacataatgggata

SEQ ID NO: 9306 - DNA, 22 bp, synthetic construct
  misc_feature 1..22: note = chemically synthesized
  source 1..22: mol_type = other DNA
tttgaacataatgggatatggc

SEQ ID NO: 9307 - DNA, 22 bp, synthetic construct
  misc_feature 1..22: note = chemically synthesized
  source 1..22: mol_type = other DNA
ttgaacataatgggatatggct

SEQ ID NO: 9308 - DNA, 22 bp, synthetic construct
  misc_feature 1..22: note = chemically synthesized
  source 1..22: mol_type = other DNA
tgaacataatgggatatggcta

SEQ ID NO: 9309 - DNA, 22 bp, synthetic construct
  misc_feature 1..22: note = chemically synthesized
  source 1..22: mol_type = other DNA
gaacataatgggatatggctat

SEQ ID NO: 9310 - DNA, 22 bp, synthetic construct
  misc_feature 1..22: note = chemically synthesized
  source 1..22: mol_type = other DNA
aacataatgggatatggctata

SEQ ID NO: 9311 - DNA, 22 bp, synthetic construct
  misc_feature 1..22: note = chemically synthesized
  source 1..22: mol_type = other DNA
taatatctgttttaccatcctt

SEQ ID NO: 9312 - DNA, 22 bp, synthetic construct
  misc_feature 1..22: note = chemically synthesized
  source 1..22: mol_type = other DNA
ttttaccatccttgcctgctaa

SEQ ID NO: 9313 - DNA, 22 bp, synthetic construct
  misc_feature 1..22: note = chemically synthesized
  source 1..22: mol_type = other DNA
taccatccttgcctgctaattc

SEQ ID NO: 9314 - DNA, 22 bp, synthetic construct
  misc_feature 1..22: note = chemically synthesized
  source 1..22: mol_type = other DNA
accatccttgcctgctaattct

SEQ ID NO: 9315 - DNA, 22 bp, synthetic construct
  misc_feature 1..22: note = chemically synthesized
  source 1..22: mol_type = other DNA
ccatccttgcctgctaattcta

SEQ ID NO: 9316 - DNA, 22 bp, synthetic construct
  misc_feature 1..22: note = chemically synthesized
  source 1..22: mol_type = other DNA
gcctgctaattctagcatccgt

SEQ ID NO: 9317 - DNA, 22 bp, synthetic construct
  misc_feature 1..22: note = chemically synthesized
  source 1..22: mol_type = other DNA
cctgctaattctagcatccgtg

SEQ ID NO: 9318 - DNA, 22 bp, synthetic construct
  misc_feature 1..22: note = chemically synthesized
  source 1..22: mol_type = other DNA
ctaattctagcatccgtgtcag

SEQ ID NO: 9319 - DNA, 22 bp, synthetic construct
  misc_feature 1..22: note = chemically synthesized
  source 1..22: mol_type = other DNA
attctagcatccgtgtcagttc

SEQ ID NO: 9320 - DNA, 22 bp, synthetic construct
  misc_feature 1..22: note = chemically synthesized
  source 1..22: mol_type = other DNA
tagcatccgtgtcagttctgga

SEQ ID NO: 9321 - DNA, 22 bp, synthetic construct
  misc_feature 1..22: note = chemically synthesized
  source 1..22: mol_type = other DNA
gcatccgtgtcagttctggatc

SEQ ID NO: 9322 - DNA, 22 bp, synthetic construct
  misc_feature 1..22: note = chemically synthesized
  source 1..22: mol_type = other DNA
tggatctcttttgatatttatg

SEQ ID NO: 9323 - DNA, 22 bp, synthetic construct
  misc_feature 1..22: note = chemically synthesized
  source 1..22: mol_type = other DNA
gatctcttttgatatttatgaa

SEQ ID NO: 9324 - DNA, 22 bp, synthetic construct
  misc_feature 1..22: note = chemically synthesized
  source 1..22: mol_type = other DNA
ttttgatatttatgaacctcct

SEQ ID NO: 9325 - DNA, 22 bp, synthetic construct
  misc_feature 1..22: note = chemically synthesized
  source 1..22: mol_type = other DNA
ttgatatttatgaacctcctcg

SEQ ID NO: 9326 - DNA, 22 bp, synthetic construct
  misc_feature 1..22: note = chemically synthesized
  source 1..22: mol_type = other DNA
tgatatttatgaacctcctcgt

SEQ ID NO: 9327 - DNA, 22 bp, synthetic construct
  misc_feature 1..22: note = chemically synthesized
  source 1..22: mol_type = other DNA
gatatttatgaacctcctcgtt

SEQ ID NO: 9328 - DNA, 22 bp, synthetic construct
  misc_feature 1..22: note = chemically synthesized
  source 1..22: mol_type = other DNA
atatttatgaacctcctcgtta

SEQ ID NO: 9329 - DNA, 22 bp, synthetic construct
  misc_feature 1..22: note = chemically synthesized
  source 1..22: mol_type = other DNA
atgaacctcctcgttatgcatt

SEQ ID NO: 9330 - DNA, 22 bp, synthetic construct
  misc_feature 1..22: note = chemically synthesized
  source 1..22: mol_type = other DNA
tgaacctcctcgttatgcattg

SEQ ID NO: 9331 - DNA, 22 bp, synthetic construct
  misc_feature 1..22: note = chemically synthesized
  source 1..22: mol_type = other DNA
ctcgttatgcattgtgttttcc

SEQ ID NO: 9332 - DNA, 22 bp, synthetic construct
  misc_feature 1..22: note = chemically synthesized
  source 1..22: mol_type = other DNA
gttatgcattgtgttttcccgt

SEQ ID NO: 9333 - DNA, 22 bp, synthetic construct
  misc_feature 1..22: note = chemically synthesized
  source 1..22: mol_type = other DNA
tgcattgtgttttcccgtttca

SEQ ID NO: 9334 - DNA, 22 bp, synthetic construct
  misc_feature 1..22: note = chemically synthesized
  source 1..22: mol_type = other DNA
tgttttcccgtttcattgcatg

SEQ ID NO: 9335 - DNA, 22 bp, synthetic construct
  misc_feature 1..22: note = chemically synthesized
  source 1..22: mol_type = other DNA
tcccgtttcattgcatgccttg

SEQ ID NO: 9336 - DNA, 22 bp, synthetic construct
  misc_feature 1..22: note = chemically synthesized
  source 1..22: mol_type = other DNA
cccgtttcattgcatgccttgt

SEQ ID NO: 9337 - DNA, 22 bp, synthetic construct
  misc_feature 1..22: note = chemically synthesized
  source 1..22: mol_type = other DNA
ccgtttcattgcatgccttgta

SEQ ID NO: 9338 - DNA, 22 bp, synthetic construct
  misc_feature 1..22: note = chemically synthesized
  source 1..22: mol_type = other DNA
cattgcatgccttgtaatcttt

SEQ ID NO: 9339 - DNA, 22 bp, synthetic construct
  misc_feature 1..22: note = chemically synthesized
  source 1..22: mol_type = other DNA
attgcatgccttgtaatctttg

SEQ ID NO: 9340 - DNA, 22 bp, synthetic construct
  misc_feature 1..22: note = chemically synthesized
  source 1..22: mol_type = other DNA
catgccttgtaatctttgattg

SEQ ID NO: 9341 - DNA, 22 bp, synthetic construct
  misc_feature 1..22: note = chemically synthesized
  source 1..22: mol_type = other DNA
gtaatctttgattggctgccag

SEQ ID NO: 9342 - DNA, 22 bp, synthetic construct
  misc_feature 1..22: note = chemically synthesized
  source 1..22: mol_type = other DNA
taatctttgattggctgccaga

SEQ ID NO: 9343 - DNA, 22 bp, synthetic construct
  misc_feature 1..22: note = chemically synthesized
  source 1..22: mol_type = other DNA
tgattggctgccagacattgtc

SEQ ID NO: 9344 - DNA, 22 bp, synthetic construct
  misc_feature 1..22: note = chemically synthesized
  source 1..22: mol_type = other DNA
gattggctgccagacattgtca

SEQ ID NO: 9345 - DNA, 22 bp, synthetic construct
  misc_feature 1..22: note = chemically synthesized
  source 1..22: mol_type = other DNA
attggctgccagacattgtcaa

SEQ ID NO: 9346 - DNA, 22 bp, synthetic construct
  misc_feature 1..22: note = chemically synthesized
  source 1..22: mol_type = other DNA
gctgccagacattgtcaatttc

SEQ ID NO: 9347 - DNA, 22 bp, synthetic construct
  misc_feature 1..22: note = chemically synthesized
  source 1..22: mol_type = other DNA
ccagacattgtcaatttcacct

SEQ ID NO: 9348 - DNA, 22 bp, synthetic construct
  misc_feature 1..22: note = chemically synthesized
  source 1..22: mol_type = other DNA
tcaatttcaccttgttgggtgc

SEQ ID NO: 9349 - DNA, 22 bp, synthetic construct
  misc_feature 1..22: note = chemically synthesized
  source 1..22: mol_type = other DNA
caccttgttgggtgctggatat

SEQ ID NO: 9350 - DNA, 22 bp, synthetic construct
  misc_feature 1..22: note = chemically synthesized
  source 1..22: mol_type = other DNA
accttgttgggtgctggatatt

SEQ ID NO: 9351 - DNA, 22 bp, synthetic construct
  misc_feature 1..22: note = chemically synthesized
  source 1..22: mol_type = other DNA
gttgggtgctggatatttttgt

SEQ ID NO: 9352 - DNA, 22 bp, synthetic construct
  misc_feature 1..22: note = chemically synthesized
  source 1..22: mol_type = other DNA
ttgggtgctggatatttttgta

SEQ ID NO: 9353 - DNA, 22 bp, synthetic construct
  misc_feature 1..22: note = chemically synthesized
  source 1..22: mol_type = other DNA
ggtgctggatatttttgtattc

SEQ ID NO: 9354 - DNA, 22 bp, synthetic construct
  misc_feature 1..22: note = chemically synthesized
  source 1..22: mol_type = other DNA
gatatttttgtattcctctaaa

SEQ ID NO: 9355 - DNA, 22 bp, synthetic construct
  misc_feature 1..22: note = chemically synthesized
  source 1..22: mol_type = other DNA
ttgtattcctctaaatgttctt

SEQ ID NO: 9356 - DNA, 22 bp, synthetic construct
  misc_feature 1..22: note = chemically synthesized
  source 1..22: mol_type = other DNA
tgtattcctctaaatgttcttg

SEQ ID NO: 9357 - DNA, 22 bp, synthetic construct
  misc_feature 1..22: note = chemically synthesized
  source 1..22: mol_type = other DNA
gtattcctctaaatgttcttga

SEQ ID NO: 9358 - DNA, 22 bp, synthetic construct
  misc_feature 1..22: note = chemically synthesized
  source 1..22: mol_type = other DNA
tattcctctaaatgttcttgag

SEQ ID NO: 9359 - DNA, 22 bp, synthetic construct
  misc_feature 1..22: note = chemically synthesized
  source 1..22: mol_type = other DNA
ctctaaatgttcttgagctttg

SEQ ID NO: 9360 - DNA, 22 bp, synthetic construct
  misc_feature 1..22: note = chemically synthesized
  source 1..22: mol_type = other DNA
taaatgttcttgagctttgctc

SEQ ID NO: 9361 - DNA, 22 bp, synthetic construct
  misc_feature 1..22: note = chemically synthesized
  source 1..22: mol_type = other DNA
aatgttcttgagctttgctccg

SEQ ID NO: 9362 - DNA, 22 bp, synthetic construct
  misc_feature 1..22: note = chemically synthesized
  source 1..22: mol_type = other DNA
ttgagctttgctccgggatgca

SEQ ID NO: 9363 - DNA, 22 bp, synthetic construct
  misc_feature 1..22: note = chemically synthesized
  source 1..22: mol_type = other DNA
gagctttgctccgggatgcagt

SEQ ID NO: 9364 - DNA, 22 bp, synthetic construct
  misc_feature 1..22: note = chemically synthesized
  source 1..22: mol_type = other DNA
agctttgctccgggatgcagtt

SEQ ID NO: 9365 - DNA, 22 bp, synthetic construct
  misc_feature 1..22: note = chemically synthesized
  source 1..22: mol_type = other DNA
tgctccgggatgcagttaagca

SEQ ID NO: 9366 - DNA, 22 bp, synthetic construct
  misc_feature 1..22: note = chemically synthesized
  source 1..22: mol_type = other DNA
gctccgggatgcagttaagcaa

SEQ ID NO: 9367 - DNA, 22 bp, synthetic construct
  misc_feature 1..22: note = chemically synthesized
  source 1..22: mol_type = other DNA
ctccgggatgcagttaagcaac

SEQ ID NO: 9368 - DNA, 22 bp, synthetic construct
  misc_feature 1..22: note = chemically synthesized
  source 1..22: mol_type = other DNA
cgggatgcagttaagcaactta

SEQ ID NO: 9369 - DNA, 22 bp, synthetic construct
  misc_feature 1..22: note = chemically synthesized
  source 1..22: mol_type = other DNA
agcaacttagagtcagtttgat

SEQ ID NO: 9370 - DNA, 22 bp, synthetic construct
  misc_feature 1..22: note = chemically synthesized
  source 1..22: mol_type = other DNA
agagtcagtttgatcgtttgaa

SEQ ID NO: 9371 - DNA, 22 bp, synthetic construct
  misc_feature 1..22: note = chemically synthesized
  source 1..22: mol_type = other DNA
gagtcagtttgatcgtttgaac

SEQ ID NO: 9372 - DNA, 22 bp, synthetic construct
  misc_feature 1..22: note = chemically synthesized
  source 1..22: mol_type = other DNA
gatcgtttgaactcttaattgt

SEQ ID NO: 9373 - DNA, 22 bp, synthetic construct
  misc_feature 1..22: note = chemically synthesized
  source 1..22: mol_type = other DNA
atcgtttgaactcttaattgtt

SEQ ID NO: 9374 - DNA, 22 bp, synthetic construct
  misc_feature 1..22: note = chemically synthesized
  source 1..22: mol_type = other DNA
gaactcttaattgttttggtct

SEQ ID NO: 9375 - DNA, 22 bp, synthetic construct
  misc_feature 1..22: note = chemically synthesized
  source 1..22: mol_type = other DNA
aactcttaattgttttggtctc

SEQ ID NO: 9376 - DNA, 22 bp, synthetic construct
  misc_feature 1..22: note = chemically synthesized
  source 1..22: mol_type = other DNA
ttaattgttttggtctcctcgg

SEQ ID NO: 9377 - DNA, 22 bp, synthetic construct
  misc_feature 1..22: note = chemically synthesized
  source 1..22: mol_type = other DNA
aattgttttggtctcctcggac

SEQ ID NO: 9378 - DNA, 22 bp, synthetic construct
  misc_feature 1..22: note = chemically synthesized
  source 1..22: mol_type = other DNA
attgttttggtctcctcggact

SEQ ID NO: 9379 - DNA, 22 bp, synthetic construct
  misc_feature 1..22: note = chemically synthesized
  source 1..22: mol_type = other DNA
ttttggtctcctcggactctca

SEQ ID NO: 9380 - DNA, 22 bp, synthetic construct
  misc_feature 1..22: note = chemically synthesized
  source 1..22: mol_type = other DNA
tggtctcctcggactctcagct

SEQ ID NO: 9381 - DNA, 22 bp, synthetic construct
  misc_feature 1..22: note = chemically synthesized
  source 1..22: mol_type = other DNA
ggtctcctcggactctcagctc

SEQ ID NO: 9382 - DNA, 22 bp, synthetic construct
  misc_feature 1..22: note = chemically synthesized
  source 1..22: mol_type = other DNA
gtctcctcggactctcagctcc

SEQ ID NO: 9383 - DNA, 22 bp, synthetic construct
  misc_feature 1..22: note = chemically synthesized
  source 1..22: mol_type = other DNA
ctcggactctcagctccatctc

SEQ ID NO: 9384 - DNA, 22 bp, synthetic construct
  misc_feature 1..22: note = chemically synthesized
  source 1..22: mol_type = other DNA
ggactctcagctccatctcctc

SEQ ID NO: 9385 - DNA, 22 bp, synthetic construct
  misc_feature 1..22: note = chemically synthesized
  source 1..22: mol_type = other DNA
tcagctccatctcctcaacgtg

SEQ ID NO: 9386 - DNA, 22 bp, synthetic construct
  misc_feature 1..22: note = chemically synthesized
  source 1..22: mol_type = other DNA
agctccatctcctcaacgtggg

SEQ ID NO: 9387 - DNA, 22 bp, synthetic construct
  misc_feature 1..22: note = chemically synthesized
  source 1..22: mol_type = other DNA
catctcctcaacgtggggagtc

SEQ ID NO: 9388 - DNA, 22 bp, synthetic construct
  misc_feature 1..22: note = chemically synthesized
  source 1..22: mol_type = other DNA
ctcaacgtggggagtctcttgg

SEQ ID NO: 9389 - DNA, 22 bp, synthetic construct
  misc_feature 1..22: note = chemically synthesized
  source 1..22: mol_type = other DNA
aacgtggggagtctcttgggct

SEQ ID NO: 9390 - DNA, 22 bp, synthetic construct
  misc_feature 1..22: note = chemically synthesized
  source 1..22: mol_type = other DNA
ttgggctctgcctggacttccc

SEQ ID NO: 9391 - DNA, 22 bp, synthetic construct
  misc_feature 1..22: note = chemically synthesized
  source 1..22: mol_type = other DNA
gggctctgcctggacttccctt

SEQ ID NO: 9392 - DNA, 22 bp, synthetic construct
  misc_feature 1..22: note = chemically synthesized
  source 1..22: mol_type = other DNA
ggctctgcctggacttcccttt

SEQ ID NO: 9393 - DNA, 22 bp, synthetic construct
  misc_feature 1..22: note = chemically synthesized
  source 1..22: mol_type = other DNA
tgcctggacttccctttcctgg

SEQ ID NO: 9394 - DNA, 22 bp, synthetic construct
  misc_feature 1..22: note = chemically synthesized
  source 1..22: mol_type = other DNA
cctggacttccctttcctggcc

SEQ ID NO: 9395 - DNA, 22 bp, synthetic construct
  misc_feature 1..22: note = chemically synthesized
  source 1..22: mol_type = other DNA
gacttccctttcctggcctgta

SEQ ID NO: 9396 - DNA, 22 bp, synthetic construct
  misc_feature 1..22: note = chemically synthesized
  source 1..22: mol_type = other DNA
ccctttcctggcctgtaacctg

SEQ ID NO: 9397 - DNA, 22 bp, synthetic construct
  misc_feature 1..22: note = chemically synthesized
  source 1..22: mol_type = other DNA
cctttcctggcctgtaacctgc

SEQ ID NO: 9398 - DNA, 22 bp, synthetic construct
  misc_feature 1..22: note = chemically synthesized
  source 1..22: mol_type = other DNA
tcctggcctgtaacctgcagac

SEQ ID NO: 9399 - DNA, 22 bp, synthetic construct
  misc_feature 1..22: note = chemically synthesized
  source 1..22: mol_type = other DNA
cctggcctgtaacctgcagact

SEQ ID NO: 9400 - DNA, 22 bp, synthetic construct
  misc_feature 1..22: note = chemically synthesized
  source 1..22: mol_type = other DNA
ctggcctgtaacctgcagactc

SEQ ID NO: 9401 - DNA, 22 bp, synthetic construct
  misc_feature 1..22: note = chemically synthesized
  source 1..22: mol_type = other DNA
gcctgtaacctgcagactctct

SEQ ID NO: 9402 - DNA, 22 bp, synthetic construct
  misc_feature 1..22: note = chemically synthesized
  source 1..22: mol_type = other DNA
taacctgcagactctctccaaa

SEQ ID NO: 9403 - DNA, 22 bp, synthetic construct
  misc_feature 1..22: note = chemically synthesized
  source 1..22: mol_type = other DNA
cagactctctccaaacagtaag

SEQ ID NO: 9404 - DNA, 22 bp, synthetic construct
  misc_feature 1..22: note = chemically synthesized
  source 1..22: mol_type = other DNA
tctccaaacagtaagctggggt

SEQ ID NO: 9405 - DNA, 22 bp, synthetic construct
  misc_feature 1..22: note = chemically synthesized
  source 1..22: mol_type = other DNA
tccaaacagtaagctggggtga

SEQ ID NO: 9406 - DNA, 22 bp, synthetic construct
  misc_feature 1..22: note = chemically synthesized
  source 1..22: mol_type = other DNA
caaacagtaagctggggtgatc

SEQ ID NO: 9407 - DNA, 22 bp, synthetic construct
  misc_feature 1..22: note = chemically synthesized
  source 1..22: mol_type = other DNA
gggtgatcggagggttcctgtt

SEQ ID NO: 9408 - DNA, 22 bp, synthetic construct
  misc_feature 1..22: note = chemically synthesized
  source 1..22: mol_type = other DNA
ctgttgtttgcttcttatccct

SEQ ID NO: 9409 - DNA, 22 bp, synthetic construct
  misc_feature 1..22: note = chemically synthesized
  source 1..22: mol_type = other DNA
ttgtttgcttcttatccctcag

SEQ ID NO: 9410 - DNA, 22 bp, synthetic construct
  misc_feature 1..22: note = chemically synthesized
  source 1..22: mol_type = other DNA
tttgcttcttatccctcaggga

SEQ ID NO: 9411 - DNA, 22 bp, synthetic construct
  misc_feature 1..22: note = chemically synthesized
  source 1..22: mol_type = other DNA
gcttcttatccctcagggatct

SEQ ID NO: 9412 - DNA, 22 bp, synthetic construct
  misc_feature 1..22: note = chemically synthesized
  source 1..22: mol_type = other DNA
cttcttatccctcagggatctt

SEQ ID NO: 9413 - DNA, 22 bp, synthetic construct
  misc_feature 1..22: note = chemically synthesized
  source 1..22: mol_type = other DNA
cttatccctcagggatctttac

SEQ ID NO: 9414 - DNA, 22 bp, synthetic construct
  misc_feature 1..22: note = chemically synthesized
  source 1..22: mol_type = other DNA
ttatccctcagggatctttact

SEQ ID NO: 9415 - DNA, 22 bp, synthetic construct
  misc_feature 1..22: note = chemically synthesized
  source 1..22: mol_type = other DNA
atccctcagggatctttactcc

SEQ ID NO: 9416 - DNA, 22 bp, synthetic construct
  misc_feature 1..22: note = chemically synthesized
  source 1..22: mol_type = other DNA
tccctcagggatctttactcct

SEQ ID NO: 9417 - DNA, 22 bp, synthetic construct
  misc_feature 1..22: note = chemically synthesized
  source 1..22: mol_type = other DNA
agggatctttactcctccttgc

SEQ ID NO: 9418 - DNA, 22 bp, synthetic construct
  misc_feature 1..22: note = chemically synthesized
  source 1..22: mol_type = other DNA
tactcctccttgcctgatgtcc

SEQ ID NO: 9419 - DNA, 22 bp, synthetic construct
  misc_feature 1..22: note = chemically synthesized
  source 1..22: mol_type = other DNA
actcctccttgcctgatgtcca

SEQ ID NO: 9420 - DNA, 22 bp, synthetic construct
  misc_feature 1..22: note = chemically synthesized
  source 1..22: mol_type = other DNA
ctcctccttgcctgatgtccag

SEQ ID NO: 9421 - DNA, 22 bp, synthetic construct
  misc_feature 1..22: note = chemically synthesized
  source 1..22: mol_type = other DNA
ctccttgcctgatgtccagagt

SEQ ID NO: 9422 - DNA, 22 bp, synthetic construct
  misc_feature 1..22: note = chemically synthesized
  source 1..22: mol_type = other DNA
cttgcctgatgtccagagtctt

SEQ ID NO: 9423 - DNA, 22 bp, synthetic construct
  misc_feature 1..22: note = chemically synthesized
  source 1..22: mol_type = other DNA
gcctgatgtccagagtcttgaa

SEQ ID NO: 9424 - DNA, 22 bp, synthetic construct
  misc_feature 1..22: note = chemically synthesized
  source 1..22: mol_type = other DNA
cctgatgtccagagtcttgaaa

SEQ ID NO: 9425 - DNA, 22 bp, synthetic construct
  misc_feature 1..22: note = chemically synthesized
  source 1..22: mol_type = other DNA
atgtccagagtcttgaaagctg

SEQ ID NO: 9426 - DNA, 22 bp, synthetic construct
  misc_feature 1..22: note = chemically synthesized
  source 1..22: mol_type = other DNA
gaaagctgccatgttctatagt

SEQ ID NO: 9427 - DNA, 22 bp, synthetic construct
  misc_feature 1..22: note = chemically synthesized
  source 1..22: mol_type = other DNA
aaagctgccatgttctatagtt

SEQ ID NO: 9428 - DNA, 22 bp, synthetic construct
  misc_feature 1..22: note = chemically synthesized
  source 1..22: mol_type = other DNA
ccatgttctatagttgtctgtt

SEQ ID NO: 9429 - DNA, 22 bp, synthetic construct
  misc_feature 1..22: note = chemically synthesized
  source 1..22: mol_type = other DNA
tatagttgtctgtttttgtttt

SEQ ID NO: 9430 - DNA, 22 bp, synthetic construct
  misc_feature 1..22: note = chemically synthesized
  source 1..22: mol_type = other DNA
tagttgtctgtttttgttttga

SEQ ID NO: 9431 - DNA, 22 bp, synthetic construct
  misc_feature 1..22: note = chemically synthesized
  source 1..22: mol_type = other DNA
tctgtttttgttttgattgttt

SEQ ID NO: 9432 - DNA, 22 bp, synthetic construct
  misc_feature 1..22: note = chemically synthesized
  source 1..22: mol_type = other DNA
tttttgttttgattgtttctgg

SEQ ID NO: 9433 - DNA, 22 bp, synthetic construct
  misc_feature 1..22: note = chemically synthesized
  source 1..22: mol_type = other DNA
ttgttttgattgtttctgggga

SEQ ID NO: 9434 - DNA, 22 bp, synthetic construct
  misc_feature 1..22: note = chemically synthesized
  source 1..22: mol_type = other DNA
tgttttgattgtttctggggag

SEQ ID NO: 9435 - DNA, 22 bp, synthetic construct
  misc_feature 1..22: note = chemically synthesized
  source 1..22: mol_type = other DNA
gttttgattgtttctggggaga

SEQ ID NO: 9436 - DNA, 22 bp, synthetic construct
  misc_feature 1..22: note = chemically synthesized
  source 1..22: mol_type = other DNA
ttttgattgtttctggggagag

SEQ ID NO: 9437 - DNA, 22 bp, synthetic construct
  misc_feature 1..22: note = chemically synthesized
  source 1..22: mol_type = other DNA
tgattgtttctggggagagaag

SEQ ID NO: 9438 - DNA, 22 bp, synthetic construct
  misc_feature 1..22: note = chemically synthesized
  source 1..22: mol_type = other DNA
gattgtttctggggagagaaga

SEQ ID NO: 9439 - DNA, 22 bp, synthetic construct
  misc_feature 1..22: note = chemically synthesized
  source 1..22: mol_type = other DNA
attgtttctggggagagaagaa

SEQ ID NO: 9440 - DNA, 22 bp, synthetic construct
  misc_feature 1..22: note = chemically synthesized
  source 1..22: mol_type = other DNA
tttctggggagagaagaactct

SEQ ID NO: 9441 - DNA, 22 bp, synthetic construct
  misc_feature 1..22: note = chemically synthesized
  source 1..22: mol_type = other DNA
ctggggagagaagaactcttcc

SEQ ID NO: 9442 - DNA, 22 bp, synthetic construct
  misc_feature 1..22: note = chemically synthesized
  source 1..22: mol_type = other DNA
tggggagagaagaactcttccc

SEQ ID NO: 9443 - DNA, 22 bp, synthetic construct
  misc_feature 1..22: note = chemically synthesized
  source 1..22: mol_type = other DNA
gggagagaagaactcttcccat

SEQ ID NO: 9444 - DNA, 22 bp, synthetic construct
  misc_feature 1..22: note = chemically synthesized
  source 1..22: mol_type = other DNA
ttcccatcttgggcagaccctg

SEQ ID NO: 9445 - DNA, 22 bp, synthetic construct
  misc_feature 1..22: note = chemically synthesized
  source 1..22: mol_type = other DNA
cccatcttgggcagaccctgtc

SEQ ID NO: 9446 - DNA, 22 bp, synthetic construct
  misc_feature 1..22: note = chemically synthesized
  source 1..22: mol_type = other DNA
ccatcttgggcagaccctgtct

SEQ ID NO: 9447 - DNA, 22 bp, synthetic construct
  misc_feature 1..22: note = chemically synthesized
  source 1..22: mol_type = other DNA
gggcagaccctgtcttttatgt

SEQ ID NO: 9448 - DNA, 22 bp, synthetic construct
  misc_feature 1..22: note = chemically synthesized
  source 1..22: mol_type = other DNA
ggcagaccctgtcttttatgtt

SEQ ID NO: 9449 - DNA, 22 bp, synthetic construct
  misc_feature 1..22: note = chemically synthesized
  source 1..22: mol_type = other DNA
tcttttatgttcaaacttttgc

SEQ ID NO: 9450 - DNA, 22 bp, synthetic construct
  misc_feature 1..22: note = chemically synthesized
  source 1..22: mol_type = other DNA
ttatgttcaaacttttgcctaa

SEQ ID NO: 9451 - DNA, 22 bp, synthetic construct
  misc_feature 1..22: note = chemically synthesized
  source 1..22: mol_type = other DNA
tatgttcaaacttttgcctaag

SEQ ID NO: 9452 - DNA, 22 bp, synthetic construct
  misc_feature 1..22: note = chemically synthesized
  source 1..22: mol_type = other DNA
atgttcaaacttttgcctaaga

SEQ ID NO: 9453 - DNA, 22 bp, synthetic construct
  misc_feature 1..22: note = chemically synthesized
  source 1..22: mol_type = other DNA
tgttcaaacttttgcctaagaa

SEQ ID NO: 9454 - DNA, 22 bp, synthetic construct
  misc_feature 1..22: note = chemically synthesized
  source 1..22: mol_type = other DNA
aaacttttgcctaagaagcaca

SEQ ID NO: 9455 - DNA, 22 bp, synthetic construct
  misc_feature 1..22: note = chemically synthesized
  source 1..22: mol_type = other DNA
ttgcctaagaagcacattacat

SEQ ID NO: 9456 - DNA, 22 bp, synthetic construct
  misc_feature 1..22: note = chemically synthesized
  source 1..22: mol_type = other DNA
tgcctaagaagcacattacata

SEQ ID NO: 9457 - DNA, 22 bp, synthetic construct
  misc_feature 1..22: note = chemically synthesized
  source 1..22: mol_type = other DNA
gcctaagaagcacattacatat

SEQ ID NO: 9458 - DNA, 22 bp, synthetic construct
  misc_feature 1..22: note = chemically synthesized
  source 1..22: mol_type = other DNA
cctaagaagcacattacatatt

SEQ ID NO: 9459 - DNA, 22 bp, synthetic construct
  misc_feature 1..22: note = chemically synthesized
  source 1..22: mol_type = other DNA
agaagcacattacatattttaa

SEQ ID NO: 9460 - DNA, 22 bp, synthetic construct
  misc_feature 1..22: note = chemically synthesized
  source 1..22: mol_type = other DNA
catattttaactcatctaatta

SEQ ID NO: 9461 - DNA, 22 bp, synthetic construct
  misc_feature 1..22: note = chemically synthesized
  source 1..22: mol_type = other DNA
taactcatctaattatccgagc

SEQ ID NO: 9462 - DNA, 22 bp, synthetic construct
  misc_feature 1..22: note = chemically synthesized
  source 1..22: mol_type = other DNA
aactcatctaattatccgagca

SEQ ID NO: 9463 - DNA, 22 bp, synthetic construct
  misc_feature 1..22: note = chemically synthesized
  source 1..22: mol_type = other DNA
actcatctaattatccgagcaa

SEQ ID NO: 9464 - DNA, 22 bp, synthetic construct
  misc_feature 1..22: note = chemically synthesized
  source 1..22: mol_type = other DNA
atctaattatccgagcaatcca

SEQ ID NO: 9465 - DNA, 22 bp, synthetic construct
  misc_feature 1..22: note = chemically synthesized
  source 1..22: mol_type = other DNA
attatccgagcaatccaatcgg

SEQ ID NO: 9466 - DNA, 22 bp, synthetic construct
  misc_feature 1..22: note = chemically synthesized
  source 1..22: mol_type = other DNA
tccgagcaatccaatcgggtag

SEQ ID NO: 9467 - DNA, 22 bp, synthetic construct
  misc_feature 1..22: note = chemically synthesized
  source 1..22: mol_type = other DNA
cgactgtgatctccattttaca

SEQ ID NO: 9468 - DNA, 22 bp, synthetic construct
  misc_feature 1..22: note = chemically synthesized
  source 1..22: mol_type = other DNA
tgatctccattttacacacgag

SEQ ID NO: 9469 - DNA, 22 bp, synthetic construct
  misc_feature 1..22: note = chemically synthesized
  source 1..22: mol_type = other DNA
cattttacacacgagaaaatgg

SEQ ID NO: 9470 - DNA, 22 bp, synthetic construct
  misc_feature 1..22: note = chemically synthesized
  source 1..22: mol_type = other DNA
tacacacgagaaaatggaagca

SEQ ID NO: 9471 - DNA, 22 bp, synthetic construct
  misc_feature 1..22: note = chemically synthesized
  source 1..22: mol_type = other DNA
acacacgagaaaatggaagcat

SEQ ID NO: 9472 - DNA, 22 bp, synthetic construct
  misc_feature 1..22: note = chemically synthesized
  source 1..22: mol_type = other DNA
cacacgagaaaatggaagcatg

SEQ ID NO: 9473 - DNA, 22 bp, synthetic construct
  misc_feature 1..22: note = chemically synthesized
  source 1..22: mol_type = other DNA
aatgctggtgcatgatctcaga

SEQ ID NO: 9474 - DNA, 22 bp, synthetic construct
  misc_feature 1..22: note = chemically synthesized
  source 1..22: mol_type = other DNA
gtgcatgatctcagagctacct

SEQ ID NO: 9475 - DNA, 22 bp, synthetic construct
  misc_feature 1..22: note = chemically synthesized
  source 1..22: mol_type = other DNA
agagctacctggaggcacagct

SEQ ID NO: 9476 - DNA, 22 bp, synthetic construct
  misc_feature 1..22: note = chemically synthesized
  source 1..22: mol_type = other DNA
cctggaggcacagctgggctac

SEQ ID NO: 9477 - DNA, 22 bp, synthetic construct
  misc_feature 1..22: note = chemically synthesized
  source 1..22: mol_type = other DNA
gaggcacagctgggctaccctg

SEQ ID NO: 9478 - DNA, 22 bp, synthetic construct
  misc_feature 1..22: note = chemically synthesized
  source 1..22: mol_type = other DNA
ggctaccctgtgggcagtctgg

SEQ ID NO: 9479 - DNA, 22 bp, synthetic construct
  misc_feature 1..22: note = chemically synthesized
  source 1..22: mol_type = other DNA
ccctgtgggcagtctggtttca

SEQ ID NO: 9480 - DNA, 22 bp, synthetic construct
  misc_feature 1..22: note = chemically synthesized
  source 1..22: mol_type = other DNA
tgggcagtctggtttcagggtg

SEQ ID NO: 9481 - DNA, 22 bp, synthetic construct
  misc_feature 1..22: note = chemically synthesized
  source 1..22: mol_type = other DNA
gtttcagggtggatatacagac

SEQ ID NO: 9482 - DNA, 22 bp, synthetic construct
  misc_feature 1..22: note = chemically synthesized
  source 1..22: mol_type = other DNA
cagggtggatatacagacacgt

SEQ ID NO: 9483 - DNA, 22 bp, synthetic construct
  misc_feature 1..22: note = chemically synthesized
  source 1..22: mol_type = other DNA
agggtggatatacagacacgtt

SEQ ID NO: 9484 - DNA, 22 bp, synthetic construct
  misc_feature 1..22: note = chemically synthesized
  source 1..22: mol_type = other DNA
ctgggctgacccagcattggga

SEQ ID NO: 9485 - DNA, 22 bp, synthetic construct
  misc_feature 1..22: note = chemically synthesized
  source 1..22: mol_type = other DNA
ggctgacccagcattgggagtt

SEQ ID NO: 9486 - DNA, 22 bp, synthetic construct
  misc_feature 1..22: note = chemically synthesized
  source 1..22: mol_type = other DNA
acccagcattgggagttgataa

SEQ ID NO: 9487 - DNA, 22 bp, synthetic construct
  misc_feature 1..22: note = chemically synthesized
  source 1..22: mol_type = other DNA
ggagttgataagtcggactggg

SEQ ID NO: 9488 - DNA, 22 bp, synthetic construct
  misc_feature 1..22: note = chemically synthesized
  source 1..22: mol_type = other DNA
ataagtcggactgggaagcagg

SEQ ID NO: 9489 - DNA, 22 bp, synthetic construct
  misc_feature 1..22: note = chemically synthesized
  source 1..22: mol_type = other DNA
ggaagcaggacaggaccctctg

SEQ ID NO: 9490 - DNA, 22 bp, synthetic construct
  misc_feature 1..22: note = chemically synthesized
  source 1..22: mol_type = other DNA
tgagtggagggtgctgaagaca

SEQ ID NO: 9491 - DNA, 22 bp, synthetic construct
  misc_feature 1..22: note = chemically synthesized
  source 1..22: mol_type = other DNA
agtggagggtgctgaagacagc

SEQ ID NO: 9492 - DNA, 22 bp, synthetic construct
  misc_feature 1..22: note = chemically synthesized
  source 1..22: mol_type = other DNA
aagacagcagtcagggactcag

SEQ ID NO: 9493 - DNA, 22 bp, synthetic construct
  misc_feature 1..22: note = chemically synthesized
  source 1..22: mol_type = other DNA
agccatggagggccagcttggt

SEQ ID NO: 9494 - DNA, 22 bp, synthetic construct
  misc_feature 1..22: note = chemically synthesized
  source 1..22: mol_type = other DNA
ggtggggaacaccgtggtcatg

SEQ ID NO: 9495 - DNA, 22 bp, synthetic construct
  misc_feature 1..22: note = chemically synthesized
  source 1..22: mol_type = other DNA
gtggggaacaccgtggtcatgg

SEQ ID NO: 9496 - DNA, 22 bp, synthetic construct
  misc_feature 1..22: note = chemically synthesized
  source 1..22: mol_type = other DNA
ctggatggagaggaatgcaaag

SEQ ID NO: 9497 - DNA, 22 bp, synthetic construct
  misc_feature 1..22: note = chemically synthesized
  source 1..22: mol_type = other DNA
tggatggagaggaatgcaaagg

SEQ ID NO: 9498 - DNA, 22 bp, synthetic construct
  misc_feature 1..22: note = chemically synthesized
  source 1..22: mol_type = other DNA
gatggagaggaatgcaaaggcc

SEQ ID NO: 9499 - DNA, 22 bp, synthetic construct
  misc_feature 1..22: note = chemically synthesized
  source 1..22: mol_type = other DNA
ggaggaaggggtgggggcagtg

SEQ ID NO: 9500 - DNA, 22 bp, synthetic construct
  misc_feature 1..22: note = chemically synthesized
  source 1..22: mol_type = other DNA
gaggaaggggtgggggcagtga

SEQ ID NO: 9501 - DNA, 22 bp, synthetic construct
  misc_feature 1..22: note = chemically synthesized
  source 1..22: mol_type = other DNA
tgctcagagcgggagtgggcag

SEQ ID NO: 9502 - DNA, 22 bp, synthetic construct
  misc_feature 1..22: note = chemically synthesized
  source 1..22: mol_type = other DNA
agagcgggagtgggcagtggag

SEQ ID NO: 9503 - DNA, 22 bp, synthetic construct
  misc_feature 1..22: note = chemically synthesized
  source 1..22: mol_type = other DNA
cctgggtcaaatggggtcctga

SEQ ID NO: 9504 - DNA, 22 bp, synthetic construct
  misc_feature 1..22: note = chemically synthesized
  source 1..22: mol_type = other DNA
ggtcaaatggggtcctgagtgt

SEQ ID NO: 9505 - DNA, 22 bp, synthetic construct
  misc_feature 1..22: note = chemically synthesized
  source 1..22: mol_type = other DNA
agtgtggctgcagtggggaagg

SEQ ID NO: 9506 - DNA, 22 bp, synthetic construct
  misc_feature 1..22: note = chemically synthesized
  source 1..22: mol_type = other DNA
cagtggggaaggtggaagtcac

SEQ ID NO: 9507 - DNA, 22 bp, synthetic construct
  misc_feature 1..22: note = chemically synthesized
  source 1..22: mol_type = other DNA
gtgtgaaaaagatgaagagtta

SEQ ID NO: 9508 - DNA, 22 bp, synthetic construct
  misc_feature 1..22: note = chemically synthesized
  source 1..22: mol_type = other DNA
tggacagtcacttacaggggca

SEQ ID NO: 9509 - DNA, 22 bp, synthetic construct
  misc_feature 1..22: note = chemically synthesized
  source 1..22: mol_type = other DNA
acaggggcagtgtctgactcag

SEQ ID NO: 9510 - DNA, 22 bp, synthetic construct
  misc_feature 1..22: note = chemically synthesized
  source 1..22: mol_type = other DNA
caggggcagtgtctgactcagg

SEQ ID NO: 9511 - DNA, 22 bp, synthetic construct
  misc_feature 1..22: note = chemically synthesized
  source 1..22: mol_type = other DNA
actcaggacagtggcaggaagt

SEQ ID NO: 9512 - DNA, 22 bp, synthetic construct
  misc_feature 1..22: note = chemically synthesized
  source 1..22: mol_type = other DNA
aggacagtggcaggaagtgacc

SEQ ID NO: 9513 - DNA, 22 bp, synthetic construct
  misc_feature 1..22: note = chemically synthesized
  source 1..22: mol_type = other DNA
gggaggaagattctgggcccct

SEQ ID NO: 9514 - DNA, 22 bp, synthetic construct
  misc_feature 1..22: note = chemically synthesized
  source 1..22: mol_type = other DNA
tgggcccctgactgagcctccc

SEQ ID NO: 9515 - DNA, 22 bp, synthetic construct
  misc_feature 1..22: note = chemically synthesized
  source 1..22: mol_type = other DNA
ggcccctgactgagcctcccca

SEQ ID NO: 9516 - DNA, 22 bp, synthetic construct
  misc_feature 1..22: note = chemically synthesized
  source 1..22: mol_type = other DNA
actgagcctccccaggatgtgg

SEQ ID NO: 9517 - DNA, 22 bp, synthetic construct
  misc_feature 1..22: note = chemically synthesized
  source 1..22: mol_type = other DNA
agcctccccaggatgtggtcct

SEQ ID NO: 9518 - DNA, 22 bp, synthetic construct
  misc_feature 1..22: note = chemically synthesized
  source 1..22: mol_type = other DNA
cccaggatgtggtcctgctggg

SEQ ID NO: 9519 - DNA, 22 bp, synthetic construct
  misc_feature 1..22: note = chemically synthesized
  source 1..22: mol_type = other DNA
ctgggtcggggggtgataggaa

SEQ ID NO: 9520 - DNA, 22 bp, synthetic construct
  misc_feature 1..22: note = chemically synthesized
  source 1..22: mol_type = other DNA
ggtcggggggtgataggaatga

SEQ ID NO: 9521 - DNA, 22 bp, synthetic construct
  misc_feature 1..22: note = chemically synthesized
  source 1..22: mol_type = other DNA
gaaggtgttctgtttgcaggtg

SEQ ID NO: 9522 - DNA, 22 bp, synthetic construct
  misc_feature 1..22: note = chemically synthesized
  source 1..22: mol_type = other DNA
tgtttgcaggtggatgctgcaa

SEQ ID NO: 9523 - DNA, 22 bp, synthetic construct
  misc_feature 1..22: note = chemically synthesized
  source 1..22: mol_type = other DNA
tttgcaggtggatgctgcaaag

SEQ ID NO: 9524 - DNA, 22 bp, synthetic construct
  misc_feature 1..22: note = chemically synthesized
  source 1..22: mol_type = other DNA
gcaggtggatgctgcaaagaga

SEQ ID NO: 9525 - DNA, 22 bp, synthetic construct
  misc_feature 1..22: note = chemically synthesized
  source 1..22: mol_type = other DNA
caggtggatgctgcaaagagag

SEQ ID NO: 9526 - DNA, 22 bp, synthetic construct
  misc_feature 1..22: note = chemically synthesized
  source 1..22: mol_type = other DNA
caaagagaggagctcagggctg

SEQ ID NO: 9527 - DNA, 22 bp, synthetic construct
  misc_feature 1..22: note = chemically synthesized
  source 1..22: mol_type = other DNA
agggctgggacaactggagctg

SEQ ID NO: 9528 - DNA, 22 bp, synthetic construct
  misc_feature 1..22: note = chemically synthesized
  source 1..22: mol_type = other DNA
ggacaactggagctgctctggg

SEQ ID NO: 9529 - DNA, 22 bp, synthetic construct
  misc_feature 1..22: note = chemically synthesized
  source 1..22: mol_type = other DNA
gagctgctctgggtctggaggc

SEQ ID NO: 9530 - DNA, 22 bp, synthetic construct
  misc_feature 1..22: note = chemically synthesized
  source 1..22: mol_type = other DNA
ctctgggtctggaggcagcaga

SEQ ID NO: 9531 - DNA, 22 bp, synthetic construct
  misc_feature 1..22: note = chemically synthesized
  source 1..22: mol_type = other DNA
tgggtctggaggcagcagagag

SEQ ID NO: 9532 - DNA, 22 bp, synthetic construct
  misc_feature 1..22: note = chemically synthesized
  source 1..22: mol_type = other DNA
ggtctggaggcagcagagaggg

SEQ ID NO: 9533 - DNA, 22 bp, synthetic construct
  misc_feature 1..22: note = chemically synthesized
  source 1..22: mol_type = other DNA
gaggcagcagagagggagccca

SEQ ID NO: 9534 - DNA, 22 bp, synthetic construct
  misc_feature 1..22: note = chemically synthesized
  source 1..22: mol_type = other DNA
tgtgtgcaggaagacgtgggtg

SEQ ID NO: 9535 - DNA, 22 bp, synthetic construct
  misc_feature 1..22: note = chemically synthesized
  source 1..22: mol_type = other DNA
tgtgcaggaagacgtgggtgtg

SEQ ID NO: 9536 - DNA, 22 bp, synthetic construct
  misc_feature 1..22: note = chemically synthesized
  source 1..22: mol_type = other DNA
gcatgcatatgcacatgtgaga

SEQ ID NO: 9537 - DNA, 22 bp, synthetic construct
  misc_feature 1..22: note = chemically synthesized
  source 1..22: mol_type = other DNA
ttgagtgaagtgagcaatgtgt

SEQ ID NO: 9538 - DNA, 22 bp, synthetic construct
  misc_feature 1..22: note = chemically synthesized
  source 1..22: mol_type = other DNA
tgagtgaagtgagcaatgtgtg

SEQ ID NO: 9539 - DNA, 22 bp, synthetic construct
  misc_feature 1..22: note = chemically synthesized
  source 1..22: mol_type = other DNA
gagtgaagtgagcaatgtgtga

SEQ ID NO: 9540 - DNA, 22 bp, synthetic construct
  misc_feature 1..22: note = chemically synthesized
  source 1..22: mol_type = other DNA
agtgaagtgagcaatgtgtgag

SEQ ID NO: 9541 - DNA, 22 bp, synthetic construct
  misc_feature 1..22: note = chemically synthesized
  source 1..22: mol_type = other DNA
gtgagggcatgtgaatgtgtgt

SEQ ID NO: 9542 - DNA, 22 bp, synthetic construct
  misc_feature 1..22: note = chemically synthesized
  source 1..22: mol_type = other DNA
tgagggcatgtgaatgtgtgtg

SEQ ID NO: 9543 - DNA, 22 bp, synthetic construct
  misc_feature 1..22: note = chemically synthesized
  source 1..22: mol_type = other DNA
tcagggtgcagatggatcaagg

SEQ ID NO: 9544 - DNA, 22 bp, synthetic construct
  misc_feature 1..22: note = chemically synthesized
  source 1..22: mol_type = other DNA
tgagatgacctcgggctgaggg

SEQ ID NO: 9545 - DNA, 22 bp, synthetic construct
  misc_feature 1..22: note = chemically synthesized
  source 1..22: mol_type = other DNA
gggctgaggggagcaaatttag

SEQ ID NO: 9546 - DNA, 22 bp, synthetic construct
  misc_feature 1..22: note = chemically synthesized
  source 1..22: mol_type = other DNA
aggggagcaaatttagtgtgga

SEQ ID NO: 9547 - DNA, 22 bp, synthetic construct
  misc_feature 1..22: note = chemically synthesized
  source 1..22: mol_type = other DNA
agtgtggaacgaggtttctagg

SEQ ID NO: 9548 - DNA, 22 bp, synthetic construct
  misc_feature 1..22: note = chemically synthesized
  source 1..22: mol_type = other DNA
gtgtggaacgaggtttctaggg

SEQ ID NO: 9549 - DNA, 22 bp, synthetic construct
  misc_feature 1..22: note = chemically synthesized
  source 1..22: mol_type = other DNA
ctagggaagcgagggcaaaggg

SEQ ID NO: 9550 - DNA, 22 bp, synthetic construct
  misc_feature 1..22: note = chemically synthesized
  source 1..22: mol_type = other DNA
tagggaagcgagggcaaagggc

SEQ ID NO: 9551 - DNA, 22 bp, synthetic construct
  misc_feature 1..22: note = chemically synthesized
  source 1..22: mol_type = other DNA
gggaagcgagggcaaagggcgc

SEQ ID NO: 9552 - DNA, 22 bp, synthetic construct
  misc_feature 1..22: note = chemically synthesized
  source 1..22: mol_type = other DNA
gggaggaggccttgcgtggtgg

SEQ ID NO: 9553 - DNA, 22 bp, synthetic construct
  misc_feature 1..22: note = chemically synthesized
  source 1..22: mol_type = other DNA
gcgtggtgggggatgaggacaa

SEQ ID NO: 9554 - DNA, 22 bp, synthetic construct
  misc_feature 1..22: note = chemically synthesized
  source 1..22: mol_type = other DNA
cgtggtgggggatgaggacaac

SEQ ID NO: 9555 - DNA, 22 bp, synthetic construct
  misc_feature 1..22: note = chemically synthesized
  source 1..22: mol_type = other DNA
gagggttgtgcttggagagtgg

SEQ ID NO: 9556 - DNA, 22 bp, synthetic construct
  misc_feature 1..22: note = chemically synthesized
  source 1..22: mol_type = other DNA
tgcttggagagtgggctatggt

SEQ ID NO: 9557 - DNA, 22 bp, synthetic construct
  misc_feature 1..22: note = chemically synthesized
  source 1..22: mol_type = other DNA
ggagagtgggctatggtggaat

SEQ ID NO: 9558 - DNA, 22 bp, synthetic construct
  misc_feature 1..22: note = chemically synthesized
  source 1..22: mol_type = other DNA
gagagtgggctatggtggaatg

SEQ ID NO: 9559 - DNA, 22 bp, synthetic construct
  misc_feature 1..22: note = chemically synthesized
  source 1..22: mol_type = other DNA
tggtggaatgacccagatttaa

SEQ ID NO: 9560 - DNA, 22 bp, synthetic construct
  misc_feature 1..22: note = chemically synthesized
  source 1..22: mol_type = other DNA
aaggatctcaatggaattttgg

SEQ ID NO: 9561 - DNA, 22 bp, synthetic construct
  misc_feature 1..22: note = chemically synthesized
  source 1..22: mol_type = other DNA
aggatctcaatggaattttggc

SEQ ID NO: 9562 - DNA, 22 bp, synthetic construct
  misc_feature 1..22: note = chemically synthesized
  source 1..22: mol_type = other DNA
aatggaattttggcaggggagg

SEQ ID NO: 9563 - DNA, 22 bp, synthetic construct
  misc_feature 1..22: note = chemically synthesized
  source 1..22: mol_type = other DNA
tggcaggggagggactgttcca

SEQ ID NO: 9564 - DNA, 22 bp, synthetic construct
  misc_feature 1..22: note = chemically synthesized
  source 1..22: mol_type = other DNA
ggcaggggagggactgttccag

SEQ ID NO: 9565 - DNA, 22 bp, synthetic construct
  misc_feature 1..22: note = chemically synthesized
  source 1..22: mol_type = other DNA
gcaggggagggactgttccagt

SEQ ID NO: 9566 - DNA, 22 bp, synthetic construct
  misc_feature 1..22: note = chemically synthesized
  source 1..22: mol_type = other DNA
ttccagtatggattttaggaag

SEQ ID NO: 9567 - DNA, 22 bp, synthetic construct
  misc_feature 1..22: note = chemically synthesized
  source 1..22: mol_type = other DNA
cagtatggattttaggaagaac

SEQ ID NO: 9568 - DNA, 22 bp, synthetic construct
  misc_feature 1..22: note = chemically synthesized
  source 1..22: mol_type = other DNA
taggaagaacacagggcccagc

SEQ ID NO: 9569 - DNA, 22 bp, synthetic construct
  misc_feature 1..22: note = chemically synthesized
  source 1..22: mol_type = other DNA
aggaagaacacagggcccagct

SEQ ID NO: 9570 - DNA, 22 bp, synthetic construct
  misc_feature 1..22: note = chemically synthesized
  source 1..22: mol_type = other DNA
ggaagaacacagggcccagctt

SEQ ID NO: 9571 - DNA, 22 bp, synthetic construct
  misc_feature 1..22: note = chemically synthesized
  source 1..22: mol_type = other DNA
ctggagtctccaatctgagggg

SEQ ID NO: 9572 - DNA, 22 bp, synthetic construct
  misc_feature 1..22: note = chemically synthesized
  source 1..22: mol_type = other DNA
tggagtctccaatctgagggga

SEQ ID NO: 9573 - DNA, 22 bp, synthetic construct
  misc_feature 1..22: note = chemically synthesized
  source 1..22: mol_type = other DNA
gagtctccaatctgaggggaca

SEQ ID NO: 9574 - DNA, 22 bp, synthetic construct
  misc_feature 1..22: note = chemically synthesized
  source 1..22: mol_type = other DNA
caatctgaggggacaggagcct

SEQ ID NO: 9575 - DNA, 22 bp, synthetic construct
  misc_feature 1..22: note = chemically synthesized
  source 1..22: mol_type = other DNA
aggggacaggagccttagaaga

SEQ ID NO: 9576 - DNA, 22 bp, synthetic construct
  misc_feature 1..22: note = chemically synthesized
  source 1..22: mol_type = other DNA
agaagagctgagactaaggccc

SEQ ID NO: 9577 - DNA, 22 bp, synthetic construct
  misc_feature 1..22: note = chemically synthesized
  source 1..22: mol_type = other DNA
gaagagctgagactaaggcccg

SEQ ID NO: 9578 - DNA, 22 bp, synthetic construct
  misc_feature 1..22: note = chemically synthesized
  source 1..22: mol_type = other DNA
agactaaggcccgaggtgatct

SEQ ID NO: 9579 - DNA, 22 bp, synthetic construct
  misc_feature 1..22: note = chemically synthesized
  source 1..22: mol_type = other DNA
aggcccgaggtgatctggaggc

SEQ ID NO: 9580 - DNA, 22 bp, synthetic construct
  misc_feature 1..22: note = chemically synthesized
  source 1..22: mol_type = other DNA
gaggcctctgccactggctgga

SEQ ID NO: 9581 - DNA, 22 bp, synthetic construct
  misc_feature 1..22: note = chemically synthesized
  source 1..22: mol_type = other DNA
tgccactggctggatgggagga

SEQ ID NO: 9582 - DNA, 22 bp, synthetic construct
  misc_feature 1..22: note = chemically synthesized
  source 1..22: mol_type = other DNA
ccactggctggatgggaggaaa

SEQ ID NO: 9583 - DNA, 22 bp, synthetic construct
  misc_feature 1..22: note = chemically synthesized
  source 1..22: mol_type = other DNA
gctggatgggaggaaaaccatt

SEQ ID NO: 9584 - DNA, 22 bp, synthetic construct
  misc_feature 1..22: note = chemically synthesized
  source 1..22: mol_type = other DNA
gatgggaggaaaaccattcaca

SEQ ID NO: 9585 - DNA, 22 bp, synthetic construct
  misc_feature 1..22: note = chemically synthesized
  source 1..22: mol_type = other DNA
acagatcccccttctcaggatg

SEQ ID NO: 9586 - DNA, 22 bp, synthetic construct
  misc_feature 1..22: note = chemically synthesized
  source 1..22: mol_type = other DNA
ctcaggatgtgtgcctaggcag

SEQ ID NO: 9587 - DNA, 22 bp, synthetic construct
  misc_feature 1..22: note = chemically synthesized
  source 1..22: mol_type = other DNA
tcaggatgtgtgcctaggcagg

SEQ ID NO: 9588 - DNA, 22 bp, synthetic construct
  misc_feature 1..22: note = chemically synthesized
  source 1..22: mol_type = other DNA
aggatgtgtgcctaggcagggc

SEQ ID NO: 9589 - DNA, 22 bp, synthetic construct
  misc_feature 1..22: note = chemically synthesized
  source 1..22: mol_type = other DNA
ggcagggccgggtctgcccccc

SEQ ID NO: 9590 - DNA, 22 bp, synthetic construct
  misc_feature 1..22: note = chemically synthesized
  source 1..22: mol_type = other DNA
cccccccgccccctgtgcgtct

SEQ ID NO: 9591 - DNA, 22 bp, synthetic construct
  misc_feature 1..22: note = chemically synthesized
  source 1..22: mol_type = other DNA
tgcgtctcccagtcccccagct

SEQ ID NO: 9592 - DNA, 22 bp, synthetic construct
  misc_feature 1..22: note = chemically synthesized
  source 1..22: mol_type = other DNA
ccagtcccccagctccaggatc

SEQ ID NO: 9593 - DNA, 22 bp, synthetic construct
  misc_feature 1..22: note = chemically synthesized
  source 1..22: mol_type = other DNA
caggatccgggctttgcacaca

SEQ ID NO: 9594 - DNA, 22 bp, synthetic construct
  misc_feature 1..22: note = chemically synthesized
  source 1..22: mol_type = other DNA
tgcacacagctgatgtgaatat

SEQ ID NO: 9595 - DNA, 22 bp, synthetic construct
  misc_feature 1..22: note = chemically synthesized
  source 1..22: mol_type = other DNA
gcacacagctgatgtgaatatc

SEQ ID NO: 9596 - DNA, 22 bp, synthetic construct
  misc_feature 1..22: note = chemically synthesized
  source 1..22: mol_type = other DNA
cacacagctgatgtgaatatcc

SEQ ID NO: 9597 - DNA, 22 bp, synthetic construct
  misc_feature 1..22: note = chemically synthesized
  source 1..22: mol_type = other DNA
atgtgaatatcctgagtcgtgt

SEQ ID NO: 9598 - DNA, 22 bp, synthetic construct
  misc_feature 1..22: note = chemically synthesized
  source 1..22: mol_type = other DNA
agtcgtgtgcatgggtgtgtgt

SEQ ID NO: 9599 - DNA, 22 bp, synthetic construct
  misc_feature 1..22: note = chemically synthesized
  source 1..22: mol_type = other DNA
gctgcgtgtgtatatttataca

SEQ ID NO: 9600 - DNA, 22 bp, synthetic construct
  misc_feature 1..22: note = chemically synthesized
  source 1..22: mol_type = other DNA
cgtgtgtatatttatacatggt

SEQ ID NO: 9601 - DNA, 22 bp, synthetic construct
  misc_feature 1..22: note = chemically synthesized
  source 1..22: mol_type = other DNA
atacatggtaatatgggtgcga

SEQ ID NO: 9602 - DNA, 22 bp, synthetic construct
  misc_feature 1..22: note = chemically synthesized
  source 1..22: mol_type = other DNA
tacatggtaatatgggtgcgag

SEQ ID NO: 9603 - DNA, 22 bp, synthetic construct
  misc_feature 1..22: note = chemically synthesized
  source 1..22: mol_type = other DNA
aaatgctggggtcaaagcctat

SEQ ID NO: 9604 - DNA, 22 bp, synthetic construct
  misc_feature 1..22: note = chemically synthesized
  source 1..22: mol_type = other DNA
gggtcaaagcctatgatgaccc

SEQ ID NO: 9605 - DNA, 22 bp, synthetic construct
  misc_feature 1..22: note = chemically synthesized
  source 1..22: mol_type = other DNA
tgatgacccccccccatggccc

SEQ ID NO: 9606 - DNA, 22 bp, synthetic construct
  misc_feature 1..22: note = chemically synthesized
  source 1..22: mol_type = other DNA
tgcctcctcaggcttcggtgcc

SEQ ID NO: 9607 - DNA, 22 bp, synthetic construct
  misc_feature 1..22: note = chemically synthesized
  source 1..22: mol_type = other DNA
ctcaggcttcggtgccctgtct

SEQ ID NO: 9608 - DNA, 22 bp, synthetic construct
  misc_feature 1..22: note = chemically synthesized
  source 1..22: mol_type = other DNA
aggcttcggtgccctgtcttta

SEQ ID NO: 9609 - DNA, 22 bp, synthetic construct
  misc_feature 1..22: note = chemically synthesized
  source 1..22: mol_type = other DNA
cggtgccctgtctttaccctcc

SEQ ID NO: 9610 - DNA, 22 bp, synthetic construct
  misc_feature 1..22: note = chemically synthesized
  source 1..22: mol_type = other DNA
ggtgccctgtctttaccctccg

SEQ ID NO: 9611 - DNA, 22 bp, synthetic construct
  misc_feature 1..22: note = chemically synthesized
  source 1..22: mol_type = other DNA
tctttaccctccggctccccac

SEQ ID NO: 9612 - DNA, 22 bp, synthetic construct
  misc_feature 1..22: note = chemically synthesized
  source 1..22: mol_type = other DNA
taccctccggctccccacaccc

SEQ ID NO: 9613 - DNA, 22 bp, synthetic construct
  misc_feature 1..22: note = chemically synthesized
  source 1..22: mol_type = other DNA
accctccggctccccacaccca

SEQ ID NO: 9614 - DNA, 22 bp, synthetic construct
  misc_feature 1..22: note = chemically synthesized
  source 1..22: mol_type = other DNA
ccctccggctccccacacccag

SEQ ID NO: 9615 - DNA, 22 bp, synthetic construct
  misc_feature 1..22: note = chemically synthesized
  source 1..22: mol_type = other DNA
cggctccccacacccaggctgc

SEQ ID NO: 9616 - DNA, 22 bp, synthetic construct
  misc_feature 1..22: note = chemically synthesized
  source 1..22: mol_type = other DNA
cccacacccaggctgccggctc

SEQ ID NO: 9617 - DNA, 22 bp, synthetic construct
  misc_feature 1..22: note = chemically synthesized
  source 1..22: mol_type = other DNA
ccggctcctgatgcccctctcc

SEQ ID NO: 9618 - DNA, 22 bp, synthetic construct
  misc_feature 1..22: note = chemically synthesized
  source 1..22: mol_type = other DNA
ctgatgcccctctcccacaggg

SEQ ID NO: 9619 - DNA, 22 bp, synthetic construct
  misc_feature 1..22: note = chemically synthesized
  source 1..22: mol_type = other DNA
atgcccctctcccacagggcca

SEQ ID NO: 9620 - DNA, 22 bp, synthetic construct
  misc_feature 1..22: note = chemically synthesized
  source 1..22: mol_type = other DNA
tcccacagggccacctcctgcc

SEQ ID NO: 9621 - DNA, 22 bp, synthetic construct
  misc_feature 1..22: note = chemically synthesized
  source 1..22: mol_type = other DNA
ccacagggccacctcctgccca

SEQ ID NO: 9622 - DNA, 22 bp, synthetic construct
  misc_feature 1..22: note = chemically synthesized
  source 1..22: mol_type = other DNA
ctgcccagcccctggcacagcg

SEQ ID NO: 9623 - DNA, 22 bp, synthetic construct
  misc_feature 1..22: note = chemically synthesized
  source 1..22: mol_type = other DNA
cccagcccctggcacagcgtct

SEQ ID NO: 9624 - DNA, 22 bp, synthetic construct
  misc_feature 1..22: note = chemically synthesized
  source 1..22: mol_type = other DNA
gcacagcgtctctgctccatgg

SEQ ID NO: 9625 - DNA, 22 bp, synthetic construct
  misc_feature 1..22: note = chemically synthesized
  source 1..22: mol_type = other DNA
tgctccatggtctgcttcagtc

SEQ ID NO: 9626 - DNA, 22 bp, synthetic construct
  misc_feature 1..22: note = chemically synthesized
  source 1..22: mol_type = other DNA
ctccatggtctgcttcagtctg

SEQ ID NO: 9627 - DNA, 22 bp, synthetic construct
  misc_feature 1..22: note = chemically synthesized
  source 1..22: mol_type = other DNA
catggtctgcttcagtctgctt

SEQ ID NO: 9628 - DNA, 22 bp, synthetic construct
  misc_feature 1..22: note = chemically synthesized
  source 1..22: mol_type = other DNA
cttcagtctgcttgccctgagc

SEQ ID NO: 9629 - DNA, 22 bp, synthetic construct
  misc_feature 1..22: note = chemically synthesized
  source 1..22: mol_type = other DNA
cagtctgcttgccctgagcttc

SEQ ID NO: 9630 - DNA, 22 bp, synthetic construct
  misc_feature 1..22: note = chemically synthesized
  source 1..22: mol_type = other DNA
agtctgcttgccctgagcttca

SEQ ID NO: 9631 - DNA, 22 bp, synthetic construct
  misc_feature 1..22: note = chemically synthesized
  source 1..22: mol_type = other DNA
cttgccctgagcttcaacatcc

SEQ ID NO: 9632 - DNA, 22 bp, synthetic construct
  misc_feature 1..22: note = chemically synthesized
  source 1..22: mol_type = other DNA
gccctgagcttcaacatcctgc

SEQ ID NO: 9633 - DNA, 22 bp, synthetic construct
  misc_feature 1..22: note = chemically synthesized
  source 1..22: mol_type = other DNA
ccctgagcttcaacatcctgct

SEQ ID NO: 9634 - DNA, 22 bp, synthetic construct
  misc_feature 1..22: note = chemically synthesized
  source 1..22: mol_type = other DNA
agcttcaacatcctgctgctgg

SEQ ID NO: 9635 - DNA, 22 bp, synthetic construct
  misc_feature 1..22: note = chemically synthesized
  source 1..22: mol_type = other DNA
caacatcctgctgctggtggtc

SEQ ID NO: 9636 - DNA, 22 bp, synthetic construct
  misc_feature 1..22: note = chemically synthesized
  source 1..22: mol_type = other DNA
aacatcctgctgctggtggtca

SEQ ID NO: 9637 - DNA, 22 bp, synthetic construct
  misc_feature 1..22: note = chemically synthesized
  source 1..22: mol_type = other DNA
ctgctggtggtcatctgtgtga

SEQ ID NO: 9638 - DNA, 22 bp, synthetic construct
  misc_feature 1..22: note = chemically synthesized
  source 1..22: mol_type = other DNA
ctggtggtcatctgtgtgactg

SEQ ID NO: 9639 - DNA, 22 bp, synthetic construct
  misc_feature 1..22: note = chemically synthesized
  source 1..22: mol_type = other DNA
gtggtcatctgtgtgactgggt

SEQ ID NO: 9640 - DNA, 22 bp, synthetic construct
  misc_feature 1..22: note = chemically synthesized
  source 1..22: mol_type = other DNA
tgtgactgggtcccaaagtgag

SEQ ID NO: 9641 - DNA, 22 bp, synthetic construct
  misc_feature 1..22: note = chemically synthesized
  source 1..22: mol_type = other DNA
ggtcccaaagtgagggtcacgg

SEQ ID NO: 9642 - DNA, 20 bp, synthetic construct
  misc_feature 1..20: note = chemically synthesized
  source 1..20: mol_type = other DNA
cttcagatagattatatctg

SEQ ID NO: 9643 - DNA, 20 bp, synthetic construct
  misc_feature 1..20: note = chemically synthesized
  source 1..20: mol_type = other DNA
gatagattatatctggagtg

SEQ ID NO: 9644 - DNA, 20 bp, synthetic construct
  misc_feature 1..20: note = chemically synthesized
  source 1..20: mol_type = other DNA
aatcctgccacctatgtatc

SEQ ID NO: 9645 - DNA, 20 bp, synthetic construct
  misc_feature 1..20: note = chemically synthesized
  source 1..20: mol_type = other DNA
tgccacctatgtatctggca

SEQ ID NO: 9646 - DNA, 20 bp, synthetic construct
  misc_feature 1..20: note = chemically synthesized
  source 1..20: mol_type = other DNA
ctatgtatctggcatagtgt

SEQ ID NO: 9647 - DNA, 20 bp, synthetic construct
  misc_feature 1..20: note = chemically synthesized
  source 1..20: mol_type = other DNA
gagtcctcataaatgcttac

SEQ ID NO: 9648 - DNA, 20 bp, synthetic construct
  misc_feature 1..20: note = chemically synthesized
  source 1..20: mol_type = other DNA
cataaatgcttactggtttg

SEQ ID NO: 9649 - DNA, 20 bp, synthetic construct
  misc_feature 1..20: note = chemically synthesized
  source 1..20: mol_type = other DNA
ataaatgcttactggtttga

SEQ ID NO: 9650 - DNA, 20 bp, synthetic construct
  misc_feature 1..20: note = chemically synthesized
  source 1..20: mol_type = other DNA
taaatgcttactggtttgaa

SEQ ID NO: 9651 - DNA, 20 bp, synthetic construct
  misc_feature 1..20: note = chemically synthesized
  source 1..20: mol_type = other DNA
tggtttgaagggcaacaaaa

SEQ ID NO: 9652 - DNA, 20 bp, synthetic construct
  misc_feature 1..20: note = chemically synthesized
  source 1..20: mol_type = other DNA
aagggcaacaaaatagtgaa

SEQ ID NO: 9653 - DNA, 20 bp, synthetic construct
  misc_feature 1..20: note = chemically synthesized
  source 1..20: mol_type = other DNA
gggcaacaaaatagtgaaca

SEQ ID NO: 9654 - DNA, 20 bp, synthetic construct
  misc_feature 1..20: note = chemically synthesized
  source 1..20: mol_type = other DNA
acagagtgaaaatccccact

SEQ ID NO: 9655 - DNA, 20 bp, synthetic construct
  misc_feature 1..20: note = chemically synthesized
  source 1..20: mol_type = other DNA
gaaaatccccactaagatcc

SEQ ID NO: 9656 - DNA, 20 bp, synthetic construct
  misc_feature 1..20: note = chemically synthesized
  source 1..20: mol_type = other DNA
aaaatccccactaagatcct

SEQ ID NO: 9657 - DNA, 20 bp, synthetic construct
  misc_feature 1..20: note = chemically synthesized
  source 1..20: mol_type = other DNA
ccccactaagatcctgggtc

SEQ ID NO: 9658 - DNA, 20 bp, synthetic construct
  misc_feature 1..20: note = chemically synthesized
  source 1..20: mol_type = other DNA
taagatcctgggtccagaaa

SEQ ID NO: 9659 - DNA, 20 bp, synthetic construct
  misc_feature 1..20: note = chemically synthesized
  source 1..20: mol_type = other DNA
atcctgggtccagaaaaaga

SEQ ID NO: 9660 - DNA, 20 bp, synthetic construct
  misc_feature 1..20: note = chemically synthesized
  source 1..20: mol_type = other DNA
tcctgggtccagaaaaagat

SEQ ID NO: 9661 - DNA, 20 bp, synthetic construct
  misc_feature 1..20: note = chemically synthesized
  source 1..20: mol_type = other DNA
aaaaagatgggaaacctgtt

SEQ ID NO: 9662 - DNA, 20 bp, synthetic construct
  misc_feature 1..20: note = chemically synthesized
  source 1..20: mol_type = other DNA
aacctgtttagctcacccgt

SEQ ID NO: 9663 - DNA, 20 bp, synthetic construct
  misc_feature 1..20: note = chemically synthesized
  source 1..20: mol_type = other DNA
ttagctcacccgtgagccca

SEQ ID NO: 9664 - DNA, 20 bp, synthetic construct
  misc_feature 1..20: note = chemically synthesized
  source 1..20: mol_type = other DNA
agcccatagttaaaactctt

SEQ ID NO: 9665 - DNA, 20 bp, synthetic construct
  misc_feature 1..20: note = chemically synthesized
  source 1..20: mol_type = other DNA
agttaaaactctttagacaa

SEQ ID NO: 9666 - DNA, 20 bp, synthetic construct
  misc_feature 1..20: note = chemically synthesized
  source 1..20: mol_type = other DNA
gttaaaactctttagacaac

SEQ ID NO: 9667 - DNA, 20 bp, synthetic construct
  misc_feature 1..20: note = chemically synthesized
  source 1..20: mol_type = other DNA
caacaggttgtttccgttta

SEQ ID NO: 9668 - DNA, 20 bp, synthetic construct
  misc_feature 1..20: note = chemically synthesized
  source 1..20: mol_type = other DNA
acaggttgtttccgtttaca

SEQ ID NO: 9669 - DNA, 20 bp, synthetic construct
  misc_feature 1..20: note = chemically synthesized
  source 1..20: mol_type = other DNA
tttacagagaacaataatat

SEQ ID NO: 9670 - DNA, 20 bp, synthetic construct
  misc_feature 1..20: note = chemically synthesized
  source 1..20: mol_type = other DNA
ttacagagaacaataatatt

SEQ ID NO: 9671 - DNA, 20 bp, synthetic construct
  misc_feature 1..20: note = chemically synthesized
  source 1..20: mol_type = other DNA
cagagaacaataatattggg

SEQ ID NO: 9672 - DNA, 20 bp, synthetic construct
  misc_feature 1..20: note = chemically synthesized
  source 1..20: mol_type = other DNA
gaacaataatattgggtggt

SEQ ID NO: 9673 - DNA, 20 bp, synthetic construct
  misc_feature 1..20: note = chemically synthesized
  source 1..20: mol_type = other DNA
ttgggtggtgagcatctgtg

SEQ ID NO: 9674 - DNA, 20 bp, synthetic construct
  misc_feature 1..20: note = chemically synthesized
  source 1..20: mol_type = other DNA
tgggtggtgagcatctgtgt

SEQ ID NO: 9675 - DNA, 20 bp, synthetic construct
  misc_feature 1..20: note = chemically synthesized
  source 1..20: mol_type = other DNA
gggtggtgagcatctgtgtg

SEQ ID NO: 9676 - DNA, 20 bp, synthetic construct
  misc_feature 1..20: note = chemically synthesized
  source 1..20: mol_type = other DNA
ggtggtgagcatctgtgtgg

SEQ ID NO: 9677 - DNA, 20 bp, synthetic construct
  misc_feature 1..20: note = chemically synthesized
  source 1..20: mol_type = other DNA
gtgagcatctgtgtgggggt

SEQ ID NO: 9678 - DNA, 20 bp, synthetic construct
  misc_feature 1..20: note = chemically synthesized
  source 1..20: mol_type = other DNA
tgagcatctgtgtgggggtt

SEQ ID NO: 9679 - DNA, 20 bp, synthetic construct
  misc_feature 1..20: note = chemically synthesized
  source 1..20: mol_type = other DNA
gagcatctgtgtgggggttg

SEQ ID NO: 9680 - DNA, 20 bp, synthetic construct
  misc_feature 1..20: note = chemically synthesized
  source 1..20: mol_type = other DNA
catctgtgtgggggttgggg

SEQ ID NO: 9681 - DNA, 20 bp, synthetic construct
  misc_feature 1..20: note = chemically synthesized
  source 1..20: mol_type = other DNA
atctgtgtgggggttggggt

SEQ ID NO: 9682 - DNA, 20 bp, synthetic construct
  misc_feature 1..20: note = chemically synthesized
  source 1..20: mol_type = other DNA
gtgtgggggttggggtggga

SEQ ID NO: 9683 - DNA, 20 bp, synthetic construct
  misc_feature 1..20: note = chemically synthesized
  source 1..20: mol_type = other DNA
tgtgggggttggggtgggat

SEQ ID NO: 9684 - DNA, 20 bp, synthetic construct
  misc_feature 1..20: note = chemically synthesized
  source 1..20: mol_type = other DNA
gtgggggttggggtgggata

SEQ ID NO: 9685 - DNA, 20 bp, synthetic construct
  misc_feature 1..20: note = chemically synthesized
  source 1..20: mol_type = other DNA
tgggggttggggtgggatag

SEQ ID NO: 9686 - DNA, 20 bp, synthetic construct
  misc_feature 1..20: note = chemically synthesized
  source 1..20: mol_type = other DNA
ttggggtgggataggggata

SEQ ID NO: 9687 - DNA, 20 bp, synthetic construct
  misc_feature 1..20: note = chemically synthesized
  source 1..20: mol_type = other DNA
tggggtgggataggggatac

SEQ ID NO: 9688 - DNA, 20 bp, synthetic construct
  misc_feature 1..20: note = chemically synthesized
  source 1..20: mol_type = other DNA
ggggtgggataggggatacg

SEQ ID NO: 9689 - DNA, 20 bp, synthetic construct
  misc_feature 1..20: note = chemically synthesized
  source 1..20: mol_type = other DNA
ggtgggataggggatacggg

SEQ ID NO: 9690 - DNA, 20 bp, synthetic construct
  misc_feature 1..20: note = chemically synthesized
  source 1..20: mol_type = other DNA
tgggataggggatacgggga

SEQ ID NO: 9691 - DNA, 20 bp, synthetic construct
  misc_feature 1..20: note = chemically synthesized
  source 1..20: mol_type = other DNA
gataggggatacggggagag

SEQ ID NO: 9692 - DNA, 20 bp, synthetic construct
  misc_feature 1..20: note = chemically synthesized
  source 1..20: mol_type = other DNA
taggggatacggggagagtg

SEQ ID NO: 9693 - DNA, 20 bp, synthetic construct
  misc_feature 1..20: note = chemically synthesized
  source 1..20: mol_type = other DNA
atacggggagagtggagaaa

SEQ ID NO: 9694 - DNA, 20 bp, synthetic construct
  misc_feature 1..20: note = chemically synthesized
  source 1..20: mol_type = other DNA
tacggggagagtggagaaaa

SEQ ID NO: 9695 - DNA, 20 bp, synthetic construct
  misc_feature 1..20: note = chemically synthesized
  source 1..20: mol_type = other DNA
acggggagagtggagaaaaa

SEQ ID NO: 9696 - DNA, 20 bp, synthetic construct
  misc_feature 1..20: note = chemically synthesized
  source 1..20: mol_type = other DNA
cggggagagtggagaaaaag

SEQ ID NO: 9697 - DNA, 20 bp, synthetic construct
  misc_feature 1..20: note = chemically synthesized
  source 1..20: mol_type = other DNA
gagtggagaaaaaggggaca

SEQ ID NO: 9698 - DNA, 20 bp, synthetic construct
  misc_feature 1..20: note = chemically synthesized
  source 1..20: mol_type = other DNA
agtggagaaaaaggggacac

SEQ ID NO: 9699 - DNA, 20 bp, synthetic construct
  misc_feature 1..20: note = chemically synthesized
  source 1..20: mol_type = other DNA
gtggagaaaaaggggacaca

SEQ ID NO: 9700 - DNA, 20 bp, synthetic construct
  misc_feature 1..20: note = chemically synthesized
  source 1..20: mol_type = other DNA
ggggacacagggttaatgtg

SEQ ID NO: 9701 - DNA, 20 bp, synthetic construct
  misc_feature 1..20: note = chemically synthesized
  source 1..20: mol_type = other DNA
cacagggttaatgtgaagtc

SEQ ID NO: 9702 - DNA, 20 bp, synthetic construct
  misc_feature 1..20: note = chemically synthesized
  source 1..20: mol_type = other DNA
acagggttaatgtgaagtcc

SEQ ID NO: 9703 - DNA, 20 bp, synthetic construct
  misc_feature 1..20: note = chemically synthesized
  source 1..20: mol_type = other DNA
aggatccccctctacattta

SEQ ID NO: 9704 - DNA, 20 bp, synthetic construct
  misc_feature 1..20: note = chemically synthesized
  source 1..20: mol_type = other DNA
tccccctctacatttaaagt

SEQ ID NO: 9705 - DNA, 20 bp, synthetic construct
  misc_feature 1..20: note = chemically synthesized
  source 1..20: mol_type = other DNA
tctacatttaaagttggttt

SEQ ID NO: 9706 - DNA, 20 bp, synthetic construct
  misc_feature 1..20: note = chemically synthesized
  source 1..20: mol_type = other DNA
catttaaagttggtttaagt

SEQ ID NO: 9707 - DNA, 20 bp, synthetic construct
  misc_feature 1..20: note = chemically synthesized
  source 1..20: mol_type = other DNA
tttaagttggctttaattaa

SEQ ID NO: 9708 - DNA, 20 bp, synthetic construct
  misc_feature 1..20: note = chemically synthesized
  source 1..20: mol_type = other DNA
tttaattaatagcaactctt

SEQ ID NO: 9709 - DNA, 20 bp, synthetic construct
  misc_feature 1..20: note = chemically synthesized
  source 1..20: mol_type = other DNA
atagcaactcttaagataat

SEQ ID NO: 9710 - DNA, 20 bp, synthetic construct
  misc_feature 1..20: note = chemically synthesized
  source 1..20: mol_type = other DNA
tcagaattttcttaaccttt

SEQ ID NO: 9711 - DNA, 20 bp, synthetic construct
  misc_feature 1..20: note = chemically synthesized
  source 1..20: mol_type = other DNA
cttttagccttactgttgaa

SEQ ID NO: 9712 - DNA, 20 bp, synthetic construct
  misc_feature 1..20: note = chemically synthesized
  source 1..20: mol_type = other DNA
tgtacaaatcatttgcttct

SEQ ID NO: 9713 - DNA, 20 bp, synthetic construct
  misc_feature 1..20: note = chemically synthesized
  source 1..20: mol_type = other DNA
caaatcatttgcttcttgga

SEQ ID NO: 9714 - DNA, 20 bp, synthetic construct
  misc_feature 1..20: note = chemically synthesized
  source 1..20: mol_type = other DNA
taatttcttttactaaaatg

SEQ ID NO: 9715 - DNA, 20 bp, synthetic construct
  misc_feature 1..20: note = chemically synthesized
  source 1..20: mol_type = other DNA
aatttcttttactaaaatgt

SEQ ID NO: 9716 - DNA, 20 bp, synthetic construct
  misc_feature 1..20: note = chemically synthesized
  source 1..20: mol_type = other DNA
ctaaaatgtgggcttttgac

SEQ ID NO: 9717 - DNA, 20 bp, synthetic construct
  misc_feature 1..20: note = chemically synthesized
  source 1..20: mol_type = other DNA
gatgaatgtaaatgttcttc

SEQ ID NO: 9718 - DNA, 20 bp, synthetic construct
  misc_feature 1..20: note = chemically synthesized
  source 1..20: mol_type = other DNA
ttattctttatattttctaa

SEQ ID NO: 9719 - DNA, 20 bp, synthetic construct
  misc_feature 1..20: note = chemically synthesized
  source 1..20: mol_type = other DNA
attttctaacagattctgtg

SEQ ID NO: 9720 - DNA, 20 bp, synthetic construct
  misc_feature 1..20: note = chemically synthesized
  source 1..20: mol_type = other DNA
ttctaacagattctgtgtag

SEQ ID NO: 9721 - DNA, 20 bp, synthetic construct
  misc_feature 1..20: note = chemically synthesized
  source 1..20: mol_type = other DNA
tctaacagattctgtgtagt

SEQ ID NO: 9722 - DNA, 20 bp, synthetic construct
  misc_feature 1..20: note = chemically synthesized
  source 1..20: mol_type = other DNA
cagattctgtgtagtgggat

SEQ ID NO: 9723 - DNA, 20 bp, synthetic construct
  misc_feature 1..20: note = chemically synthesized
  source 1..20: mol_type = other DNA
attctgtgtagtgggatgag

SEQ ID NO: 9724 - DNA, 20 bp, synthetic construct
  misc_feature 1..20: note = chemically synthesized
  source 1..20: mol_type = other DNA
tctgtgtagtgggatgagca

SEQ ID NO: 9725 - DNA, 20 bp, synthetic construct
  misc_feature 1..20: note = chemically synthesized
  source 1..20: mol_type = other DNA
agaacaaaaacaaaataatc

SEQ ID NO: 9726 - DNA, 20 bp, synthetic construct
  misc_feature 1..20: note = chemically synthesized
  source 1..20: mol_type = other DNA
caaaaacaaaataatccagt

SEQ ID NO: 9727 - DNA, 20 bp, synthetic construct
  misc_feature 1..20: note = chemically synthesized
  source 1..20: mol_type = other DNA
acaaaataatccagtgagaa

SEQ ID NO: 9728 - DNA, 20 bp, synthetic construct
  misc_feature 1..20: note = chemically synthesized
  source 1..20: mol_type = other DNA
aaagcccgtaaataaacctt

SEQ ID NO: 9729 - DNA, 20 bp, synthetic construct
  misc_feature 1..20: note = chemically synthesized
  source 1..20: mol_type = other DNA
ccgtaaataaaccttcagac

SEQ ID NO: 9730 - DNA, 20 bp, synthetic construct
  misc_feature 1..20: note = chemically synthesized
  source 1..20: mol_type = other DNA
gtaaataaaccttcagacca

SEQ ID NO: 9731 - DNA, 20 bp, synthetic construct
  misc_feature 1..20: note = chemically synthesized
  source 1..20: mol_type = other DNA
cagaccagagatctattctc

SEQ ID NO: 9732 - DNA, 20 bp, synthetic construct
  misc_feature 1..20: note = chemically synthesized
  source 1..20: mol_type = other DNA
tctattctctagcttatttt

SEQ ID NO: 9733 - DNA, 20 bp, synthetic construct
  misc_feature 1..20: note = chemically synthesized
  source 1..20: mol_type = other DNA
tattttaagctcaacttaaa

SEQ ID NO: 9734 - DNA, 20 bp, synthetic construct
  misc_feature 1..20: note = chemically synthesized
  source 1..20: mol_type = other DNA
tttaagctcaacttaaaaag

SEQ ID NO: 9735 - DNA, 20 bp, synthetic construct
  misc_feature 1..20: note = chemically synthesized
  source 1..20: mol_type = other DNA
ttaactccaccctccttcaa

SEQ ID NO: 9736 - DNA, 20 bp, synthetic construct
  misc_feature 1..20: note = chemically synthesized
  source 1..20: mol_type = other DNA
ccaccctccttcaaaagaaa

SEQ ID NO: 9737 - DNA, 20 bp, synthetic construct
  misc_feature 1..20: note = chemically synthesized
  source 1..20: mol_type = other DNA
gtctatatgattgatttgca

SEQ ID NO: 9738 - DNA, 20 bp, synthetic construct
  misc_feature 1..20: note = chemically synthesized
  source 1..20: mol_type = other DNA
attgatttgcacagctcatc

SEQ ID NO: 9739 - DNA, 20 bp, synthetic construct
  misc_feature 1..20: note = chemically synthesized
  source 1..20: mol_type = other DNA
atttgcacagctcatctggc

SEQ ID NO: 9740 - DNA, 20 bp, synthetic construct
  misc_feature 1..20: note = chemically synthesized
  source 1..20: mol_type = other DNA
tgcacagctcatctggccag

SEQ ID NO: 9741 - DNA, 20 bp, synthetic construct
  misc_feature 1..20: note = chemically synthesized
  source 1..20: mol_type = other DNA
cacagctcatctggccagaa

SEQ ID NO: 9742 - DNA, 20 bp, synthetic construct
  misc_feature 1..20: note = chemically synthesized
  source 1..20: mol_type = other DNA
ctcatctggccagaagagct

SEQ ID NO: 9743 - DNA, 20 bp, synthetic construct
  misc_feature 1..20: note = chemically synthesized
  source 1..20: mol_type = other DNA
tgagacatccgttcccctac

SEQ ID NO: 9744 - DNA, 20 bp, synthetic construct
  misc_feature 1..20: note = chemically synthesized
  source 1..20: mol_type = other DNA
gagagtttcttgtaggggaa

SEQ ID NO: 9745 - DNA, 20 bp, synthetic construct
  misc_feature 1..20: note = chemically synthesized
  source 1..20: mol_type = other DNA
ttgtaggggaacggatgtct

SEQ ID NO: 9746 - DNA, 20 bp, synthetic construct
  misc_feature 1..20: note = chemically synthesized
  source 1..20: mol_type = other DNA
aacggatgtctcagctcttc

SEQ ID NO: 9747 - DNA, 20 bp, synthetic construct
  misc_feature 1..20: note = chemically synthesized
  source 1..20: mol_type = other DNA
gatgtctcagctcttctggc

SEQ ID NO: 9748 - DNA, 20 bp, synthetic construct
  misc_feature 1..20: note = chemically synthesized
  source 1..20: mol_type = other DNA
ctcagctcttctggccagat

SEQ ID NO: 9749 - DNA, 20 bp, synthetic construct
  misc_feature 1..20: note = chemically synthesized
  source 1..20: mol_type = other DNA
agctgtgcaaatcaatcata

SEQ ID NO: 9750 - DNA, 20 bp, synthetic construct
  misc_feature 1..20: note = chemically synthesized
  source 1..20: mol_type = other DNA
gtgcaaatcaatcatataga

SEQ ID NO: 9751 - DNA, 20 bp, synthetic construct
  misc_feature 1..20: note = chemically synthesized
  source 1..20: mol_type = other DNA
caatcatatagacagtataa

SEQ ID NO: 9752 - DNA, 20 bp, synthetic construct
  misc_feature 1..20: note = chemically synthesized
  source 1..20: mol_type = other DNA
tcatatagacagtataaaag

SEQ ID NO: 9753 - DNA, 20 bp, synthetic construct
  misc_feature 1..20: note = chemically synthesized
  source 1..20: mol_type = other DNA
catatagacagtataaaagt

SEQ ID NO: 9754 - DNA, 20 bp, synthetic construct
  misc_feature 1..20: note = chemically synthesized
  source 1..20: mol_type = other DNA
aggaaatgctgtttcttttg

SEQ ID NO: 9755 - DNA, 20 bp, synthetic construct
  misc_feature 1..20: note = chemically synthesized
  source 1..20: mol_type = other DNA
ggaaatgctgtttcttttga

SEQ ID NO: 9756 - DNA, 20 bp, synthetic construct
  misc_feature 1..20: note = chemically synthesized
  source 1..20: mol_type = other DNA
aaatgctgtttcttttgaag

SEQ ID NO: 9757 - DNA, 20 bp, synthetic construct
  misc_feature 1..20: note = chemically synthesized
  source 1..20: mol_type = other DNA
aatgctgtttcttttgaagg

SEQ ID NO: 9758 - DNA, 20 bp, synthetic construct
  misc_feature 1..20: note = chemically synthesized
  source 1..20: mol_type = other DNA
atgctgtttcttttgaagga

SEQ ID NO: 9759 - DNA, 20 bp, synthetic construct
  misc_feature 1..20: note = chemically synthesized
  source 1..20: mol_type = other DNA
ctgtttcttttgaaggaggg

SEQ ID NO: 9760 - DNA, 20 bp, synthetic construct
  misc_feature 1..20: note = chemically synthesized
  source 1..20: mol_type = other DNA
gtttcttttgaaggagggtg

SEQ ID NO: 9761 - DNA, 20 bp, synthetic construct
  misc_feature 1..20: note = chemically synthesized
  source 1..20: mol_type = other DNA
gagggtggagttaaatcatt

SEQ ID NO: 9762 - DNA, 20 bp, synthetic construct
  misc_feature 1..20: note = chemically synthesized
  source 1..20: mol_type = other DNA
ttaaatcattaagtgtattg

SEQ ID NO: 9763 - DNA, 20 bp, synthetic construct
  misc_feature 1..20: note = chemically synthesized
  source 1..20: mol_type = other DNA
taaatcattaagtgtattga

SEQ ID NO: 9764 - DNA, 20 bp, synthetic construct
  misc_feature 1..20: note = chemically synthesized
  source 1..20: mol_type = other DNA
ttaagtgtattgaaggcgaa

SEQ ID NO: 9765 - DNA, 20 bp, synthetic construct
  misc_feature 1..20: note = chemically synthesized
  source 1..20: mol_type = other DNA
gtattgaaggcgaaaagaat

SEQ ID NO: 9766 - DNA, 20 bp, synthetic construct
  misc_feature 1..20: note = chemically synthesized
  source 1..20: mol_type = other DNA
attgaaggcgaaaagaatca

SEQ ID NO: 9767 - DNA, 20 bp, synthetic construct
  misc_feature 1..20: note = chemically synthesized
  source 1..20: mol_type = other DNA
aggcgaaaagaatcagagaa

SEQ ID NO: 9768 - DNA, 20 bp, synthetic construct
  misc_feature 1..20: note = chemically synthesized
  source 1..20: mol_type = other DNA
agagaacagttcttcttttt

SEQ ID NO: 9769 - DNA, 20 bp, synthetic construct
  misc_feature 1..20: note = chemically synthesized
  source 1..20: mol_type = other DNA
acagttcttctttttaagtt

SEQ ID NO: 9770 - DNA, 20 bp, synthetic construct
  misc_feature 1..20: note = chemically synthesized
  source 1..20: mol_type = other DNA
ttttaagttgagcttaaaat

SEQ ID NO: 9771 - DNA, 20 bp, synthetic construct
  misc_feature 1..20: note = chemically synthesized
  source 1..20: mol_type = other DNA
aagttgagcttaaaataagc

SEQ ID NO: 9772 - DNA, 20 bp, synthetic construct
  misc_feature 1..20: note = chemically synthesized
  source 1..20: mol_type = other DNA
gttgagcttaaaataagcta

SEQ ID NO: 9773 - DNA, 20 bp, synthetic construct
  misc_feature 1..20: note = chemically synthesized
  source 1..20: mol_type = other DNA
gcttaaaataagctagagaa

SEQ ID NO: 9774 - DNA, 20 bp, synthetic construct
  misc_feature 1..20: note = chemically synthesized
  source 1..20: mol_type = other DNA
taagctagagaatagatctc

SEQ ID NO: 9775 - DNA, 20 bp, synthetic construct
  misc_feature 1..20: note = chemically synthesized
  source 1..20: mol_type = other DNA
gagaatagatctctggtctg

SEQ ID NO: 9776 - DNA, 20 bp, synthetic construct
  misc_feature 1..20: note = chemically synthesized
  source 1..20: mol_type = other DNA
agaatagatctctggtctga

SEQ ID NO: 9777 - DNA, 20 bp, synthetic construct
  misc_feature 1..20: note = chemically synthesized
  source 1..20: mol_type = other DNA
ctggtctgaaggtttattta

SEQ ID NO: 9778 - DNA, 20 bp, synthetic construct
  misc_feature 1..20: note = chemically synthesized
  source 1..20: mol_type = other DNA
tggtctgaaggtttatttac

SEQ ID NO: 9779 - DNA, 20 bp, synthetic construct
  misc_feature 1..20: note = chemically synthesized
  source 1..20: mol_type = other DNA
tatttacgggcttttctcac

SEQ ID NO: 9780 - DNA, 20 bp, synthetic construct
  misc_feature 1..20: note = chemically synthesized
  source 1..20: mol_type = other DNA
tctctgctcatcccactaca

SEQ ID NO: 9781 - DNA, 20 bp, synthetic construct
  misc_feature 1..20: note = chemically synthesized
  source 1..20: mol_type = other DNA
tcccactacacagaatctgt

SEQ ID NO: 9782 - DNA, 20 bp, synthetic construct
  misc_feature 1..20: note = chemically synthesized
  source 1..20: mol_type = other DNA
agaatctgttagaaaatata

SEQ ID NO: 9783 - DNA, 20 bp, synthetic construct
  misc_feature 1..20: note = chemically synthesized
  source 1..20: mol_type = other DNA
gttagaaaatataaagaata

SEQ ID NO: 9784 - DNA, 20 bp, synthetic construct
  misc_feature 1..20: note = chemically synthesized
  source 1..20: mol_type = other DNA
ttagaaaatataaagaataa

SEQ ID NO: 9785 - DNA, 20 bp, synthetic construct
  misc_feature 1..20: note = chemically synthesized
  source 1..20: mol_type = other DNA
atataaagaataaaggatat

SEQ ID NO: 9786 - DNA, 20 bp, synthetic construct
  misc_feature 1..20: note = chemically synthesized
  source 1..20: mol_type = other DNA
ataaagaataaaggatatca

SEQ ID NO: 9787 - DNA, 20 bp, synthetic construct
  misc_feature 1..20: note = chemically synthesized
  source 1..20: mol_type = other DNA
agaataaaggatatcagagc

SEQ ID NO: 9788 - DNA, 20 bp, synthetic construct
  misc_feature 1..20: note = chemically synthesized
  source 1..20: mol_type = other DNA
ataaaggatatcagagctag

SEQ ID NO: 9789 - DNA, 20 bp, synthetic construct
  misc_feature 1..20: note = chemically synthesized
  source 1..20: mol_type = other DNA
gaagaacatttacattcatc

SEQ ID NO: 9790 - DNA, 20 bp, synthetic construct
  misc_feature 1..20: note = chemically synthesized
  source 1..20: mol_type = other DNA
atttacattcatctagtcaa

SEQ ID NO: 9791 - DNA, 20 bp, synthetic construct
  misc_feature 1..20: note = chemically synthesized
  source 1..20: mol_type = other DNA
ctagtcaaaagcccacattt

SEQ ID NO: 9792 - DNA, 20 bp, synthetic construct
  misc_feature 1..20: note = chemically synthesized
  source 1..20: mol_type = other DNA
aaaagcccacattttagtaa

SEQ ID NO: 9793 - DNA, 20 bp, synthetic construct
  misc_feature 1..20: note = chemically synthesized
  source 1..20: mol_type = other DNA
agtaaaagaaattactatcc

SEQ ID NO: 9794 - DNA, 20 bp, synthetic construct
  misc_feature 1..20: note = chemically synthesized
  source 1..20: mol_type = other DNA
aaaagaaattactatccaag

SEQ ID NO: 9795 - DNA, 20 bp, synthetic construct
  misc_feature 1..20: note = chemically synthesized
  source 1..20: mol_type = other DNA
aagaagcaaatgatttgtac

SEQ ID NO: 9796 - DNA, 20 bp, synthetic construct
  misc_feature 1..20: note = chemically synthesized
  source 1..20: mol_type = other DNA
aaatgatttgtacaagatca

SEQ ID NO: 9797 - DNA, 20 bp, synthetic construct
  misc_feature 1..20: note = chemically synthesized
  source 1..20: mol_type = other DNA
aatgatttgtacaagatcac

SEQ ID NO: 9798 - DNA, 20 bp, synthetic construct
  misc_feature 1..20: note = chemically synthesized
  source 1..20: mol_type = other DNA
atgatttgtacaagatcaca

SEQ ID NO: 9799 - DNA, 20 bp, synthetic construct
  misc_feature 1..20: note = chemically synthesized
  source 1..20: mol_type = other DNA
aagatcacagggcttttcaa

SEQ ID NO: 9800 - DNA, 20 bp, synthetic construct
  misc_feature 1..20: note = chemically synthesized
  source 1..20: mol_type = other DNA
tcacagggcttttcaacagt

SEQ ID NO: 9801 - DNA, 20 bp, synthetic construct
  misc_feature 1..20: note = chemically synthesized
  source 1..20: mol_type = other DNA
cacagggcttttcaacagta

SEQ ID NO: 9802 - DNA, 20 bp, synthetic construct
  misc_feature 1..20: note = chemically synthesized
  source 1..20: mol_type = other DNA
cttttcaacagtaaggctaa

SEQ ID NO: 9803 - DNA, 20 bp, synthetic construct
  misc_feature 1..20: note = chemically synthesized
  source 1..20: mol_type = other DNA
ttttcaacagtaaggctaaa

SEQ ID NO: 9804 - DNA, 20 bp, synthetic construct
  misc_feature 1..20: note = chemically synthesized
  source 1..20: mol_type = other DNA
aacagtaaggctaaaaggtt

SEQ ID NO: 9805 - DNA, 20 bp, synthetic construct
  misc_feature 1..20: note = chemically synthesized
  source 1..20: mol_type = other DNA
aagaaaattctgattatctt

SEQ ID NO: 9806 - DNA, 20 bp, synthetic construct
  misc_feature 1..20: note = chemically synthesized
  source 1..20: mol_type = other DNA
gaaaattctgattatcttaa

SEQ ID NO: 9807 - DNA, 20 bp, synthetic construct
  misc_feature 1..20: note = chemically synthesized
  source 1..20: mol_type = other DNA
ttaagagttgctattaatta

SEQ ID NO: 9808 - DNA, 20 bp, synthetic construct
  misc_feature 1..20: note = chemically synthesized
  source 1..20: mol_type = other DNA
acttaaaccaactttaaatg

SEQ ID NO: 9809 - DNA, 20 bp, synthetic construct
  misc_feature 1..20: note = chemically synthesized
  source 1..20: mol_type = other DNA
ttaaaccaactttaaatgta

SEQ ID NO: 9810 - DNA, 20 bp, synthetic construct
  misc_feature 1..20: note = chemically synthesized
  source 1..20: mol_type = other DNA
taaaccaactttaaatgtag

SEQ ID NO: 9811 - DNA, 20 bp, synthetic construct
  misc_feature 1..20: note = chemically synthesized
  source 1..20: mol_type = other DNA
aaaccaactttaaatgtaga

SEQ ID NO: 9812 - DNA, 20 bp, synthetic construct
  misc_feature 1..20: note = chemically synthesized
  source 1..20: mol_type = other DNA
aaccaactttaaatgtagag

SEQ ID NO: 9813 - DNA, 20 bp, synthetic construct
  misc_feature 1..20: note = chemically synthesized
  source 1..20: mol_type = other DNA
accaactttaaatgtagagg

SEQ ID NO: 9814 - DNA, 20 bp, synthetic construct
  misc_feature 1..20: note = chemically synthesized
  source 1..20: mol_type = other DNA
ttaaatgtagagggggatcc

SEQ ID NO: 9815 - DNA, 20 bp, synthetic construct
  misc_feature 1..20: note = chemically synthesized
  source 1..20: mol_type = other DNA
atcccaccccaacccccaca

SEQ ID NO: 9816 - DNA, 20 bp, synthetic construct
  misc_feature 1..20: note = chemically synthesized
  source 1..20: mol_type = other DNA
atattattgttctctgtaaa

SEQ ID NO: 9817 - DNA, 20 bp, synthetic construct
  misc_feature 1..20: note = chemically synthesized
  source 1..20: mol_type = other DNA
cggaaacaacctgttgtcta

SEQ ID NO: 9818 - DNA, 20 bp, synthetic construct
  misc_feature 1..20: note = chemically synthesized
  source 1..20: mol_type = other DNA
gaaacaacctgttgtctaaa

SEQ ID NO: 9819 - DNA, 20 bp, synthetic construct
  misc_feature 1..20: note = chemically synthesized
  source 1..20: mol_type = other DNA
tgtctaaagagttttaacta

SEQ ID NO: 9820 - DNA, 20 bp, synthetic construct
  misc_feature 1..20: note = chemically synthesized
  source 1..20: mol_type = other DNA
gtctaaagagttttaactat

SEQ ID NO: 9821 - DNA, 20 bp, synthetic construct
  misc_feature 1..20: note = chemically synthesized
  source 1..20: mol_type = other DNA
gagttttaactatgggctca

SEQ ID NO: 9822 - DNA, 20 bp, synthetic construct
  misc_feature 1..20: note = chemically synthesized
  source 1..20: mol_type = other DNA
agttttaactatgggctcac

SEQ ID NO: 9823 - DNA, 20 bp, synthetic construct
  misc_feature 1..20: note = chemically synthesized
  source 1..20: mol_type = other DNA
ttaactatgggctcacgggt

SEQ ID NO: 9824 - DNA, 20 bp, synthetic construct
  misc_feature 1..20: note = chemically synthesized
  source 1..20: mol_type = other DNA
gggctcacgggtgagctaaa

SEQ ID NO: 9825 - DNA, 20 bp, synthetic construct
  misc_feature 1..20: note = chemically synthesized
  source 1..20: mol_type = other DNA
ggctcacgggtgagctaaac

SEQ ID NO: 9826 - DNA, 20 bp, synthetic construct
  misc_feature 1..20: note = chemically synthesized
  source 1..20: mol_type = other DNA
acaggtttcccatctttttc

SEQ ID NO: 9827 - DNA, 20 bp, synthetic construct
  misc_feature 1..20: note = chemically synthesized
  source 1..20: mol_type = other DNA
ttcccatctttttctggacc

SEQ ID NO: 9828 - DNA, 20 bp, synthetic construct
  misc_feature 1..20: note = chemically synthesized
  source 1..20: mol_type = other DNA
tcccatctttttctggaccc

SEQ ID NO: 9829 - DNA, 20 bp, synthetic construct
  misc_feature 1..20: note = chemically synthesized
  source 1..20: mol_type = other DNA
tttttctggacccaggatct

SEQ ID NO: 9830 - DNA, 20 bp, synthetic construct
  misc_feature 1..20: note = chemically synthesized
  source 1..20: mol_type = other DNA
ttctggacccaggatcttag

SEQ ID NO: 9831 - DNA, 20 bp, synthetic construct
  misc_feature 1..20: note = chemically synthesized
  source 1..20: mol_type = other DNA
tctggacccaggatcttagt

SEQ ID NO: 9832 - DNA, 20 bp, synthetic construct
  misc_feature 1..20: note = chemically synthesized
  source 1..20: mol_type = other DNA
ctggacccaggatcttagtg

SEQ ID NO: 9833 - DNA, 20 bp, synthetic construct
  misc_feature 1..20: note = chemically synthesized
  source 1..20: mol_type = other DNA
tattttgttgcccttcaaac

SEQ ID NO: 9834 - DNA, 20 bp, synthetic construct
  misc_feature 1..20: note = chemically synthesized
  source 1..20: mol_type = other DNA
ttgttgcccttcaaaccagt

SEQ ID NO: 9835 - DNA, 20 bp, synthetic construct
  misc_feature 1..20: note = chemically synthesized
  source 1..20: mol_type = other DNA
tcaaaccagtaagcatttat

SEQ ID NO: 9836 - DNA, 20 bp, synthetic construct
  misc_feature 1..20: note = chemically synthesized
  source 1..20: mol_type = other DNA
caaaccagtaagcatttatg

SEQ ID NO: 9837 - DNA, 20 bp, synthetic construct
  misc_feature 1..20: note = chemically synthesized
  source 1..20: mol_type = other DNA
tatgaggactcacactatgc

SEQ ID NO: 9838 - DNA, 20 bp, synthetic construct
  misc_feature 1..20: note = chemically synthesized
  source 1..20: mol_type = other DNA
ctcacactatgccagataca

SEQ ID NO: 9839 - DNA, 20 bp, synthetic construct
  misc_feature 1..20: note = chemically synthesized
  source 1..20: mol_type = other DNA
tcacactatgccagatacat

SEQ ID NO: 9840 - DNA, 20 bp, synthetic construct
  misc_feature 1..20: note = chemically synthesized
  source 1..20: mol_type = other DNA
cactatgccagatacatagg

SEQ ID NO: 9841 - DNA, 20 bp, synthetic construct
  misc_feature 1..20: note = chemically synthesized
  source 1..20: mol_type = other DNA
tatgccagatacataggtgg

SEQ ID NO: 9842 - DNA, 20 bp, synthetic construct
  misc_feature 1..20: note = chemically synthesized
  source 1..20: mol_type = other DNA
atgccagatacataggtggc

SEQ ID NO: 9843 - DNA, 20 bp, synthetic construct
  misc_feature 1..20: note = chemically synthesized
  source 1..20: mol_type = other DNA
ggtggcaggattcttcactc

SEQ ID NO: 9844 - DNA, 20 bp, synthetic construct
  misc_feature 1..20: note = chemically synthesized
  source 1..20: mol_type = other DNA
ctccagatataatctatctg

SEQ ID NO: 9845 - DNA, 20 bp, synthetic construct
  misc_feature 1..20: note = chemically synthesized
  source 1..20: mol_type = other DNA
gatagattatatctggagtg

SEQ ID NO: 9846 - DNA, 20 bp, synthetic construct
  misc_feature 1..20: note = chemically synthesized
  source 1..20: mol_type = other DNA
acctatgtatctggcatagt

SEQ ID NO: 9847 - DNA, 20 bp, synthetic construct
  misc_feature 1..20: note = chemically synthesized
  source 1..20: mol_type = other DNA
aagggcaacaaaatagtgaa

SEQ ID NO: 9848 - DNA, 20 bp, synthetic construct
  misc_feature 1..20: note = chemically synthesized
  source 1..20: mol_type = other DNA
tgaaaatccccactaagatc

SEQ ID NO: 9849 - DNA, 20 bp, synthetic construct
  misc_feature 1..20: note = chemically synthesized
  source 1..20: mol_type = other DNA
gtttacagagaacaataata

SEQ ID NO: 9850 - DNA, 20 bp, synthetic construct
  misc_feature 1..20: note = chemically synthesized
  source 1..20: mol_type = other DNA
tgggtggtgagcatctgtgt

SEQ ID NO: 9851 - DNA, 20 bp, synthetic construct
  misc_feature 1..20: note = chemically synthesized
  source 1..20: mol_type = other DNA
gtgagcatctgtgtgggggt

SEQ ID NO: 9852 - DNA, 20 bp, synthetic construct
  misc_feature 1..20: note = chemically synthesized
  source 1..20: mol_type = other DNA
catctgtgtgggggttgggg

SEQ ID NO: 9853 - DNA, 20 bp, synthetic construct
  misc_feature 1..20: note = chemically synthesized
  source 1..20: mol_type = other DNA
gtgggggttggggtgggata

SEQ ID NO: 9854 - DNA, 20 bp, synthetic construct
  misc_feature 1..20: note = chemically synthesized
  source 1..20: mol_type = other DNA
ggtgggataggggatacggg

SEQ ID NO: 9855 - DNA, 20 bp, synthetic construct
  misc_feature 1..20: note = chemically synthesized
  source 1..20: mol_type = other DNA
gagtggagaaaaaggggaca

SEQ ID NO: 9856 - DNA, 20 bp, synthetic construct
  misc_feature 1..20: note = chemically synthesized
  source 1..20: mol_type = other DNA
cacagggttaatgtgaagtc

SEQ ID NO: 9857 - DNA, 20 bp, synthetic construct
  misc_feature 1..20: note = chemically synthesized
  source 1..20: mol_type = other DNA
atagcaactcttaagataat

SEQ ID NO: 9858 - DNA, 20 bp, synthetic construct
  misc_feature 1..20: note = chemically synthesized
  source 1..20: mol_type = other DNA
ttgtacaaatcatttgcttc

SEQ ID NO: 9859 - DNA, 20 bp, synthetic construct
  misc_feature 1..20: note = chemically synthesized
  source 1..20: mol_type = other DNA
aaatgtgggcttttgactag

SEQ ID NO: 9860 - DNA, 20 bp, synthetic construct
  misc_feature 1..20: note = chemically synthesized
  source 1..20: mol_type = other DNA
ttctaacagattctgtgtag

SEQ ID NO: 9861 - DNA, 20 bp, synthetic construct
  misc_feature 1..20: note = chemically synthesized
  source 1..20: mol_type = other DNA
ggagagtttcttgtagggga

SEQ ID NO: 9862 - DNA, 20 bp, synthetic construct
  misc_feature 1..20: note = chemically synthesized
  source 1..20: mol_type = other DNA
aaatgctgtttcttttgaag

SEQ ID NO: 9863 - DNA, 20 bp, synthetic construct
  misc_feature 1..20: note = chemically synthesized
  source 1..20: mol_type = other DNA
ctgtttcttttgaaggaggg

SEQ ID NO: 9864 - DNA, 20 bp, synthetic construct
  misc_feature 1..20: note = chemically synthesized
  source 1..20: mol_type = other DNA
ttaagtgtattgaaggcgaa

SEQ ID NO: 9865 - DNA, 20 bp, synthetic construct
  misc_feature 1..20: note = chemically synthesized
  source 1..20: mol_type = other DNA
gttgagcttaaaataagcta

SEQ ID NO: 9866 - DNA, 20 bp, synthetic construct
  misc_feature 1..20: note = chemically synthesized
  source 1..20: mol_type = other DNA
ttatttacgggcttttctca

SEQ ID NO: 9867 - DNA, 20 bp, synthetic construct
  misc_feature 1..20: note = chemically synthesized
  source 1..20: mol_type = other DNA
tctctgctcatcccactaca

SEQ ID NO: 9868 - DNA, 20 bp, synthetic construct
  misc_feature 1..20: note = chemically synthesized
  source 1..20: mol_type = other DNA
agaatctgttagaaaatata

SEQ ID NO: 9869 - DNA, 20 bp, synthetic construct
  misc_feature 1..20: note = chemically synthesized
  source 1..20: mol_type = other DNA
gttagaaaatataaagaata

SEQ ID NO: 9870 - DNA, 20 bp, synthetic construct
  misc_feature 1..20: note = chemically synthesized
  source 1..20: mol_type = other DNA
aagaaaattctgattatctt

SEQ ID NO: 9871 - DNA, 20 bp, synthetic construct
  misc_feature 1..20: note = chemically synthesized
  source 1..20: mol_type = other DNA
aaccaactttaaatgtagag

SEQ ID NO: 9872 - DNA, 20 bp, synthetic construct
  misc_feature 1..20: note = chemically synthesized
  source 1..20: mol_type = other DNA
cggaaacaacctgttgtcta

SEQ ID NO: 9873 - DNA, 20 bp, synthetic construct
  misc_feature 1..20: note = chemically synthesized
  source 1..20: mol_type = other DNA
agagttttaactatgggctc

SEQ ID NO: 9874 - DNA, 20 bp, synthetic construct
  misc_feature 1..20: note = chemically synthesized
  source 1..20: mol_type = other DNA
ttcccatctttttctggacc

SEQ ID NO: 9875 - DNA, 20 bp, synthetic construct
  misc_feature 1..20: note = chemically synthesized
  source 1..20: mol_type = other DNA
tctggacccaggatcttagt

SEQ ID NO: 9876 - DNA, 20 bp, synthetic construct
  misc_feature 1..20: note = chemically synthesized
  source 1..20: mol_type = other DNA
tatgccagatacataggtgg

SEQ ID NO: 9877 - DNA, 20 bp, synthetic construct
  misc_feature 1..20: note = chemically synthesized
  source 1..20: mol_type = other DNA
agatagattatatctggagt

SEQ ID NO: 9878 - DNA, 20 bp, synthetic construct
  misc_feature 1..20: note = chemically synthesized
  source 1..20: mol_type = other DNA
tccccactaagatcctgggt

SEQ ID NO: 9879 - DNA, 20 bp, synthetic construct
  misc_feature 1..20: note = chemically synthesized
  source 1..20: mol_type = other DNA
ataggggatacggggagagt

SEQ ID NO: 9880 - DNA, 20 bp, synthetic construct
  misc_feature 1..20: note = chemically synthesized
  source 1..20: mol_type = other DNA
aatagcaactcttaagataa

SEQ ID NO: 9881 - DNA, 20 bp, synthetic construct
  misc_feature 1..20: note = chemically synthesized
  source 1..20: mol_type = other DNA
acaaaaacaaaataatccag

SEQ ID NO: 9882 - DNA, 20 bp, synthetic construct
  misc_feature 1..20: note = chemically synthesized
  source 1..20: mol_type = other DNA
tttaactccaccctccttca

SEQ ID NO: 9883 - DNA, 20 bp, synthetic construct
  misc_feature 1..20: note = chemically synthesized
  source 1..20: mol_type = other DNA
ctgagacatccgttccccta

SEQ ID NO: 9884 - DNA, 20 bp, synthetic construct
  misc_feature 1..20: note = chemically synthesized
  source 1..20: mol_type = other DNA
attaagtgtattgaaggcga

SEQ ID NO: 9885 - DNA, 20 bp, synthetic construct
  misc_feature 1..20: note = chemically synthesized
  source 1..20: mol_type = other DNA
agttgagcttaaaataagct

SEQ ID NO: 9886 - DNA, 20 bp, synthetic construct
  misc_feature 1..20: note = chemically synthesized
  source 1..20: mol_type = other DNA
ttctctgctcatcccactac

SEQ ID NO: 9887 - DNA, 20 bp, synthetic construct
  misc_feature 1..20: note = chemically synthesized
  source 1..20: mol_type = other DNA
atcccactacacagaatctg

SEQ ID NO: 9888 - DNA, 20 bp, synthetic construct
  misc_feature 1..20: note = chemically synthesized
  source 1..20: mol_type = other DNA
cagaatctgttagaaaatat

SEQ ID NO: 9889 - DNA, 20 bp, synthetic construct
  misc_feature 1..20: note = chemically synthesized
  source 1..20: mol_type = other DNA
caaaagcccacattttagta

SEQ ID NO: 9890 - DNA, 20 bp, synthetic construct
  misc_feature 1..20: note = chemically synthesized
  source 1..20: mol_type = other DNA
caacagtaaggctaaaaggt

SEQ ID NO: 9891 - DNA, 20 bp, synthetic construct
  misc_feature 1..20: note = chemically synthesized
  source 1..20: mol_type = other DNA
ctcacccgtgagcccatagt

SEQ ID NO: 9892 - DNA, 20 bp, synthetic construct
  misc_feature 1..20: note = chemically synthesized
  source 1..20: mol_type = other DNA
tagtgggatgagcagagaac

SEQ ID NO: 9893 - DNA, 20 bp, synthetic construct
  misc_feature 1..20: note = chemically synthesized
  source 1..20: mol_type = other DNA
ggcatagtgtgagtcctcat

SEQ ID NO: 9894 - DNA, 20 bp, synthetic construct
  misc_feature 1..20: note = chemically synthesized
  source 1..20: mol_type = other DNA
gtgagtcctcataaatgctt

SEQ ID NO: 9895 - DNA, 20 bp, synthetic construct
  misc_feature 1..20: note = chemically synthesized
  source 1..20: mol_type = other DNA
ggtccagaaaaagatgggaa

SEQ ID NO: 9896 - DNA, 20 bp, synthetic construct
  misc_feature 1..20: note = chemically synthesized
  source 1..20: mol_type = other DNA
ttaaaactctttagacaaca

SEQ ID NO: 9897 - DNA, 20 bp, synthetic construct
  misc_feature 1..20: note = chemically synthesized
  source 1..20: mol_type = other DNA
ctctttagacaacaggttgt

SEQ ID NO: 9898 - DNA, 20 bp, synthetic construct
  misc_feature 1..20: note = chemically synthesized
  source 1..20: mol_type = other DNA
gatccccctctacatttaaa

SEQ ID NO: 9899 - DNA, 20 bp, synthetic construct
  misc_feature 1..20: note = chemically synthesized
  source 1..20: mol_type = other DNA
tacatttaaagttggtttaa

SEQ ID NO: 9900 - DNA, 20 bp, synthetic construct
  misc_feature 1..20: note = chemically synthesized
  source 1..20: mol_type = other DNA
cctgtgatcttgtacaaatc

SEQ ID NO: 9901 - DNA, 20 bp, synthetic construct
  misc_feature 1..20: note = chemically synthesized
  source 1..20: mol_type = other DNA
gtaatttcttttactaaaat

SEQ ID NO: 9902 - DNA, 20 bp, synthetic construct
  misc_feature 1..20: note = chemically synthesized
  source 1..20: mol_type = other DNA
ctttattctttatattttct

SEQ ID NO: 9903 - DNA, 20 bp, synthetic construct
  misc_feature 1..20: note = chemically synthesized
  source 1..20: mol_type = other DNA
ttcagaccagagatctattc

SEQ ID NO: 9904 - DNA, 20 bp, synthetic construct
  misc_feature 1..20: note = chemically synthesized
  source 1..20: mol_type = other DNA
acttaaaaagaagaactgtt

SEQ ID NO: 9905 - DNA, 20 bp, synthetic construct
  misc_feature 1..20: note = chemically synthesized
  source 1..20: mol_type = other DNA
cttttcgccttcaatacact

SEQ ID NO: 9906 - DNA, 20 bp, synthetic construct
  misc_feature 1..20: note = chemically synthesized
  source 1..20: mol_type = other DNA
ttcctacttttatactgtct

SEQ ID NO: 9907 - DNA, 20 bp, synthetic construct
  misc_feature 1..20: note = chemically synthesized
  source 1..20: mol_type = other DNA
tacttttatactgtctatat

SEQ ID NO: 9908 - DNA, 20 bp, synthetic construct
  misc_feature 1..20: note = chemically synthesized
  source 1..20: mol_type = other DNA
gacagtataaaagtaggaaa

SEQ ID NO: 9909 - DNA, 20 bp, synthetic construct
  misc_feature 1..20: note = chemically synthesized
  source 1..20: mol_type = other DNA
gaacagttcttctttttaag

SEQ ID NO: 9910 - DNA, 20 bp, synthetic construct
  misc_feature 1..20: note = chemically synthesized
  source 1..20: mol_type = other DNA
agagaatagatctctggtct

SEQ ID NO: 9911 - DNA, 20 bp, synthetic construct
  misc_feature 1..20: note = chemically synthesized
  source 1..20: mol_type = other DNA
tctggtctgaaggtttattt

SEQ ID NO: 9912 - DNA, 20 bp, synthetic construct
  misc_feature 1..20: note = chemically synthesized
  source 1..20: mol_type = other DNA
tttatttacgggcttttctc

SEQ ID NO: 9913 - DNA, 20 bp, synthetic construct
  misc_feature 1..20: note = chemically synthesized
  source 1..20: mol_type = other DNA
gggcttttctcactggatta

SEQ ID NO: 9914 - DNA, 20 bp, synthetic construct
  misc_feature 1..20: note = chemically synthesized
  source 1..20: mol_type = other DNA
gaaattactatccaagaagc

SEQ ID NO: 9915 - DNA, 20 bp, synthetic construct
  misc_feature 1..20: note = chemically synthesized
  source 1..20: mol_type = other DNA
aaatgatttgtacaagatca

SEQ ID NO: 9916 - DNA, 20 bp, synthetic construct
  misc_feature 1..20: note = chemically synthesized
  source 1..20: mol_type = other DNA
aggctaaaaggttaagaaaa

SEQ ID NO: 9917 - DNA, 20 bp, synthetic construct
  misc_feature 1..20: note = chemically synthesized
  source 1..20: mol_type = other DNA
cggaaacaacctgttgtcta

SEQ ID NO: 9918 - DNA, 20 bp, synthetic construct
  misc_feature 1..20: note = chemically synthesized
  source 1..20: mol_type = other DNA
tgggctcacgggtgagctaa

SEQ ID NO: 9919 - DNA, 20 bp, synthetic construct
  misc_feature 1..20: note = chemically synthesized
  source 1..20: mol_type = other DNA
ttctggacccaggatcttag

SEQ ID NO: 9920 - DNA, 20 bp, synthetic construct
  misc_feature 1..20: note = chemically synthesized
  source 1..20: mol_type = other DNA
ctatgccagatacataggtg

SEQ ID NO: 9921 - DNA, 22 bp, synthetic construct
  misc_feature 1..22: note = chemically synthesized
  source 1..22: mol_type = other DNA
cagatagattatatctggagtg

SEQ ID NO: 9922 - DNA, 22 bp, synthetic construct
  misc_feature 1..22: note = chemically synthesized
  source 1..22: mol_type = other DNA
agatagattatatctggagtga

SEQ ID NO: 9923 - DNA, 22 bp, synthetic construct
  misc_feature 1..22: note = chemically synthesized
  source 1..22: mol_type = other DNA
tatctggagtgaagaatcctgc

SEQ ID NO: 9924 - DNA, 22 bp, synthetic construct
  misc_feature 1..22: note = chemically synthesized
  source 1..22: mol_type = other DNA
gagtgaagaatcctgccaccta

SEQ ID NO: 9925 - DNA, 22 bp, synthetic construct
  misc_feature 1..22: note = chemically synthesized
  source 1..22: mol_type = other DNA
ccacctatgtatctggcatagt

SEQ ID NO: 9926 - DNA, 22 bp, synthetic construct
  misc_feature 1..22: note = chemically synthesized
  source 1..22: mol_type = other DNA
tgtatctggcatagtgtgagtc

SEQ ID NO: 9927 - DNA, 22 bp, synthetic construct
  misc_feature 1..22: note = chemically synthesized
  source 1..22: mol_type = other DNA
gcatagtgtgagtcctcataaa

SEQ ID NO: 9928 - DNA, 22 bp, synthetic construct
  misc_feature 1..22: note = chemically synthesized
  source 1..22: mol_type = other DNA
ataaatgcttactggtttgaag

SEQ ID NO: 9929 - DNA, 22 bp, synthetic construct
  misc_feature 1..22: note = chemically synthesized
  source 1..22: mol_type = other DNA
actggtttgaagggcaacaaaa

SEQ ID NO: 9930 - DNA, 22 bp, synthetic construct
  misc_feature 1..22: note = chemically synthesized
  source 1..22: mol_type = other DNA
ctggtttgaagggcaacaaaat

SEQ ID NO: 9931 - DNA, 22 bp, synthetic construct
  misc_feature 1..22: note = chemically synthesized
  source 1..22: mol_type = other DNA
gtttgaagggcaacaaaatagt

SEQ ID NO: 9932 - DNA, 22 bp, synthetic construct
  misc_feature 1..22: note = chemically synthesized
  source 1..22: mol_type = other DNA
gaagggcaacaaaatagtgaac

SEQ ID NO: 9933 - DNA, 22 bp, synthetic construct
  misc_feature 1..22: note = chemically synthesized
  source 1..22: mol_type = other DNA
aagggcaacaaaatagtgaaca

SEQ ID NO: 9934 - DNA, 22 bp, synthetic construct
  misc_feature 1..22: note = chemically synthesized
  source 1..22: mol_type = other DNA
agatcctgggtccagaaaaaga

SEQ ID NO: 9935 - DNA, 22 bp, synthetic construct
  misc_feature 1..22: note = chemically synthesized
  source 1..22: mol_type = other DNA
ggtccagaaaaagatgggaaac

SEQ ID NO: 9936 - DNA, 22 bp, synthetic construct
  misc_feature 1..22: note = chemically synthesized
  source 1..22: mol_type = other DNA
tttagctcacccgtgagcccat

SEQ ID NO: 9937 - DNA, 22 bp, synthetic construct
  misc_feature 1..22: note = chemically synthesized
  source 1..22: mol_type = other DNA
agctcacccgtgagcccatagt

SEQ ID NO: 9938 - DNA, 22 bp, synthetic construct
  misc_feature 1..22: note = chemically synthesized
  source 1..22: mol_type = other DNA
gctcacccgtgagcccatagtt

SEQ ID NO: 9939 - DNA, 22 bp, synthetic construct
  misc_feature 1..22: note = chemically synthesized
  source 1..22: mol_type = other DNA
acccgtgagcccatagttaaaa

SEQ ID NO: 9940 - DNA, 22 bp, synthetic construct
  misc_feature 1..22: note = chemically synthesized
  source 1..22: mol_type = other DNA
aaactctttagacaacaggttg

SEQ ID NO: 9941 - DNA, 22 bp, synthetic construct
  misc_feature 1..22: note = chemically synthesized
  source 1..22: mol_type = other DNA
tttagacaacaggttgtttccg

SEQ ID NO: 9942 - DNA, 22 bp, synthetic construct
  misc_feature 1..22: note = chemically synthesized
  source 1..22: mol_type = other DNA
tagacaacaggttgtttccgtt

SEQ ID NO: 9943 - DNA, 22 bp, synthetic construct
  misc_feature 1..22: note = chemically synthesized
  source 1..22: mol_type = other DNA
agacaacaggttgtttccgttt

SEQ ID NO: 9944 - DNA, 22 bp, synthetic construct
  misc_feature 1..22: note = chemically synthesized
  source 1..22: mol_type = other DNA
gacaacaggttgtttccgttta

SEQ ID NO: 9945 - DNA, 22 bp, synthetic construct
  misc_feature 1..22: note = chemically synthesized
  source 1..22: mol_type = other DNA
tttccgtttacagagaacaata

SEQ ID NO: 9946 - DNA, 22 bp, synthetic construct
  misc_feature 1..22: note = chemically synthesized
  source 1..22: mol_type = other DNA
ccgtttacagagaacaataata

SEQ ID NO: 9947 - DNA, 22 bp, synthetic construct
  misc_feature 1..22: note = chemically synthesized
  source 1..22: mol_type = other DNA
cgtttacagagaacaataatat

SEQ ID NO: 9948 - DNA, 22 bp, synthetic construct
  misc_feature 1..22: note = chemically synthesized
  source 1..22: mol_type = other DNA
acagagaacaataatattgggt

SEQ ID NO: 9949 - DNA, 22 bp, synthetic construct
  misc_feature 1..22: note = chemically synthesized
  source 1..22: mol_type = other DNA
cagagaacaataatattgggtg

SEQ ID NO: 9950 - DNA, 22 bp, synthetic construct
  misc_feature 1..22: note = chemically synthesized
  source 1..22: mol_type = other DNA
ggtggtgagcatctgtgtgggg

SEQ ID NO: 9951 - DNA, 22 bp, synthetic construct
  misc_feature 1..22: note = chemically synthesized
  source 1..22: mol_type = other DNA
tgtgggggttggggtgggatag

SEQ ID NO: 9952 - DNA, 22 bp, synthetic construct
  misc_feature 1..22: note = chemically synthesized
  source 1..22: mol_type = other DNA
gggtgggataggggatacgggg

SEQ ID NO: 9953 - DNA, 22 bp, synthetic construct
  misc_feature 1..22: note = chemically synthesized
  source 1..22: mol_type = other DNA
atgtgaagtccaggatccccct

SEQ ID NO: 9954 - DNA, 22 bp, synthetic construct
  misc_feature 1..22: note = chemically synthesized
  source 1..22: mol_type = other DNA
tacatttaaagttggtttaagt

SEQ ID NO: 9955 - DNA, 22 bp, synthetic construct
  misc_feature 1..22: note = chemically synthesized
  source 1..22: mol_type = other DNA
catttaaagttggtttaagttg

SEQ ID NO: 9956 - DNA, 22 bp, synthetic construct
  misc_feature 1..22: note = chemically synthesized
  source 1..22: mol_type = other DNA
aaagttggtttaagttggcttt

SEQ ID NO: 9957 - DNA, 22 bp, synthetic construct
  misc_feature 1..22: note = chemically synthesized
  source 1..22: mol_type = other DNA
aagttggtttaagttggcttta

SEQ ID NO: 9958 - DNA, 22 bp, synthetic construct
  misc_feature 1..22: note = chemically synthesized
  source 1..22: mol_type = other DNA
gtttaagttggctttaattaat

SEQ ID NO: 9959 - DNA, 22 bp, synthetic construct
  misc_feature 1..22: note = chemically synthesized
  source 1..22: mol_type = other DNA
aagttggctttaattaatagca

SEQ ID NO: 9960 - DNA, 22 bp, synthetic construct
  misc_feature 1..22: note = chemically synthesized
  source 1..22: mol_type = other DNA
agttggctttaattaatagcaa

SEQ ID NO: 9961 - DNA, 22 bp, synthetic construct
  misc_feature 1..22: note = chemically synthesized
  source 1..22: mol_type = other DNA
gctttaattaatagcaactctt

SEQ ID NO: 9962 - DNA, 22 bp, synthetic construct
  misc_feature 1..22: note = chemically synthesized
  source 1..22: mol_type = other DNA
taattaatagcaactcttaaga

SEQ ID NO: 9963 - DNA, 22 bp, synthetic construct
  misc_feature 1..22: note = chemically synthesized
  source 1..22: mol_type = other DNA
aattaatagcaactcttaagat

SEQ ID NO: 9964 - DNA, 22 bp, synthetic construct
  misc_feature 1..22: note = chemically synthesized
  source 1..22: mol_type = other DNA
attaatagcaactcttaagata

SEQ ID NO: 9965 - DNA, 22 bp, synthetic construct
  misc_feature 1..22: note = chemically synthesized
  source 1..22: mol_type = other DNA
atagcaactcttaagataatca

SEQ ID NO: 9966 - DNA, 22 bp, synthetic construct
  misc_feature 1..22: note = chemically synthesized
  source 1..22: mol_type = other DNA
ttaagataatcagaattttctt

SEQ ID NO: 9967 - DNA, 22 bp, synthetic construct
  misc_feature 1..22: note = chemically synthesized
  source 1..22: mol_type = other DNA
aagataatcagaattttcttaa

SEQ ID NO: 9968 - DNA, 22 bp, synthetic construct
  misc_feature 1..22: note = chemically synthesized
  source 1..22: mol_type = other DNA
agataatcagaattttcttaac

SEQ ID NO: 9969 - DNA, 22 bp, synthetic construct
  misc_feature 1..22: note = chemically synthesized
  source 1..22: mol_type = other DNA
tcttaaccttttagccttactg

SEQ ID NO: 9970 - DNA, 22 bp, synthetic construct
  misc_feature 1..22: note = chemically synthesized
  source 1..22: mol_type = other DNA
cttaaccttttagccttactgt

SEQ ID NO: 9971 - DNA, 22 bp, synthetic construct
  misc_feature 1..22: note = chemically synthesized
  source 1..22: mol_type = other DNA
ttaaccttttagccttactgtt

SEQ ID NO: 9972 - DNA, 22 bp, synthetic construct
  misc_feature 1..22: note = chemically synthesized
  source 1..22: mol_type = other DNA
aaccttttagccttactgttga

SEQ ID NO: 9973 - DNA, 22 bp, synthetic construct
  misc_feature 1..22: note = chemically synthesized
  source 1..22: mol_type = other DNA
accttttagccttactgttgaa

SEQ ID NO: 9974 - DNA, 22 bp, synthetic construct
  misc_feature 1..22: note = chemically synthesized
  source 1..22: mol_type = other DNA
ttagccttactgttgaaaagcc

SEQ ID NO: 9975 - DNA, 22 bp, synthetic construct
  misc_feature 1..22: note = chemically synthesized
  source 1..22: mol_type = other DNA
tagccttactgttgaaaagccc

SEQ ID NO: 9976 - DNA, 22 bp, synthetic construct
  misc_feature 1..22: note = chemically synthesized
  source 1..22: mol_type = other DNA
agccttactgttgaaaagccct

SEQ ID NO: 9977 - DNA, 22 bp, synthetic construct
  misc_feature 1..22: note = chemically synthesized
  source 1..22: mol_type = other DNA
gccttactgttgaaaagccctg

SEQ ID NO: 9978 - DNA, 22 bp, synthetic construct
  misc_feature 1..22: note = chemically synthesized
  source 1..22: mol_type = other DNA
actgttgaaaagccctgtgatc

SEQ ID NO: 9979 - DNA, 22 bp, synthetic construct
  misc_feature 1..22: note = chemically synthesized
  source 1..22: mol_type = other DNA
ctgttgaaaagccctgtgatct

SEQ ID NO: 9980 - DNA, 22 bp, synthetic construct
  misc_feature 1..22: note = chemically synthesized
  source 1..22: mol_type = other DNA
ttgaaaagccctgtgatcttgt

SEQ ID NO: 9981 - DNA, 22 bp, synthetic construct
  misc_feature 1..22: note = chemically synthesized
  source 1..22: mol_type = other DNA
aaaagccctgtgatcttgtaca

SEQ ID NO: 9982 - DNA, 22 bp, synthetic construct
  misc_feature 1..22: note = chemically synthesized
  source 1..22: mol_type = other DNA
tgatcttgtacaaatcatttgc

SEQ ID NO: 9983 - DNA, 22 bp, synthetic construct
  misc_feature 1..22: note = chemically synthesized
  source 1..22: mol_type = other DNA
gtacaaatcatttgcttcttgg

SEQ ID NO: 9984 - DNA, 22 bp, synthetic construct
  misc_feature 1..22: note = chemically synthesized
  source 1..22: mol_type = other DNA
tacaaatcatttgcttcttgga

SEQ ID NO: 9985 - DNA, 22 bp, synthetic construct
  misc_feature 1..22: note = chemically synthesized
  source 1..22: mol_type = other DNA
gcttcttggatagtaatttctt

SEQ ID NO: 9986 - DNA, 22 bp, synthetic construct
  misc_feature 1..22: note = chemically synthesized
  source 1..22: mol_type = other DNA
cttcttggatagtaatttcttt

SEQ ID NO: 9987 - DNA, 22 bp, synthetic construct
  misc_feature 1..22: note = chemically synthesized
  source 1..22: mol_type = other DNA
cttggatagtaatttcttttac

SEQ ID NO: 9988 - DNA, 22 bp, synthetic construct
  misc_feature 1..22: note = chemically synthesized
  source 1..22: mol_type = other DNA
ttggatagtaatttcttttact

SEQ ID NO: 9989 - DNA, 22 bp, synthetic construct
  misc_feature 1..22: note = chemically synthesized
  source 1..22: mol_type = other DNA
ggatagtaatttcttttactaa

SEQ ID NO: 9990 - DNA, 22 bp, synthetic construct
  misc_feature 1..22: note = chemically synthesized
  source 1..22: mol_type = other DNA
gatagtaatttcttttactaaa

SEQ ID NO: 9991 - DNA, 22 bp, synthetic construct
  misc_feature 1..22: note = chemically synthesized
  source 1..22: mol_type = other DNA
cttttactaaaatgtgggcttt

SEQ ID NO: 9992 - DNA, 22 bp, synthetic construct
  misc_feature 1..22: note = chemically synthesized
  source 1..22: mol_type = other DNA
ttttactaaaatgtgggctttt

SEQ ID NO: 9993 - DNA, 22 bp, synthetic construct
  misc_feature 1..22: note = chemically synthesized
  source 1..22: mol_type = other DNA
ttactaaaatgtgggcttttga

SEQ ID NO: 9994 - DNA, 22 bp, synthetic construct
  misc_feature 1..22: note = chemically synthesized
  source 1..22: mol_type = other DNA
tactaaaatgtgggcttttgac

SEQ ID NO: 9995 - DNA, 22 bp, synthetic construct
  misc_feature 1..22: note = chemically synthesized
  source 1..22: mol_type = other DNA
actaaaatgtgggcttttgact

SEQ ID NO: 9996 - DNA, 22 bp, synthetic construct
  misc_feature 1..22: note = chemically synthesized
  source 1..22: mol_type = other DNA
ctaaaatgtgggcttttgacta

SEQ ID NO: 9997 - DNA, 22 bp, synthetic construct
  misc_feature 1..22: note = chemically synthesized
  source 1..22: mol_type = other DNA
aaatgtgggcttttgactagat

SEQ ID NO: 9998 - DNA, 22 bp, synthetic construct
  misc_feature 1..22: note = chemically synthesized
  source 1..22: mol_type = other DNA
ttgactagatgaatgtaaatgt

SEQ ID NO: 9999 - DNA, 22 bp, synthetic construct
  misc_feature 1..22: note = chemically synthesized
  source 1..22: mol_type = other DNA
tgactagatgaatgtaaatgtt

SEQ ID NO: 10000 - DNA, 22 bp, synthetic construct
  misc_feature 1..22: note = chemically synthesized
  source 1..22: mol_type = other DNA
gactagatgaatgtaaatgttc

SEQ ID NO: 10001 - DNA, 22 bp, synthetic construct
  misc_feature 1..22: note = chemically synthesized
  source 1..22: mol_type = other DNA
actagatgaatgtaaatgttct

SEQ ID NO: 10002 - DNA, 22 bp, synthetic construct
  misc_feature 1..22: note = chemically synthesized
  source 1..22: mol_type = other DNA
gatgaatgtaaatgttcttcta

SEQ ID NO: 10003 - DNA, 22 bp, synthetic construct
  misc_feature 1..22: note = chemically synthesized
  source 1..22: mol_type = other DNA
ttctagctctgatatcctttat

SEQ ID NO: 10004 - DNA, 22 bp, synthetic construct
  misc_feature 1..22: note = chemically synthesized
  source 1..22: mol_type = other DNA
ctagctctgatatcctttattc

SEQ ID NO: 10005 - DNA, 22 bp, synthetic construct
  misc_feature 1..22: note = chemically synthesized
  source 1..22: mol_type = other DNA
tagctctgatatcctttattct

SEQ ID NO: 10006 - DNA, 22 bp, synthetic construct
  misc_feature 1..22: note = chemically synthesized
  source 1..22: mol_type = other DNA
gctctgatatcctttattcttt

SEQ ID NO: 10007 - DNA, 22 bp, synthetic construct
  misc_feature 1..22: note = chemically synthesized
  source 1..22: mol_type = other DNA
tgatatcctttattctttatat

SEQ ID NO: 10008 - DNA, 22 bp, synthetic construct
  misc_feature 1..22: note = chemically synthesized
  source 1..22: mol_type = other DNA
atatcctttattctttatattt

SEQ ID NO: 10009 - DNA, 22 bp, synthetic construct
  misc_feature 1..22: note = chemically synthesized
  source 1..22: mol_type = other DNA
tattctttatattttctaacag

SEQ ID NO: 10010 - DNA, 22 bp, synthetic construct
  misc_feature 1..22: note = chemically synthesized
  source 1..22: mol_type = other DNA
attctttatattttctaacaga

SEQ ID NO: 10011 - DNA, 22 bp, synthetic construct
  misc_feature 1..22: note = chemically synthesized
  source 1..22: mol_type = other DNA
ttctttatattttctaacagat

SEQ ID NO: 10012 - DNA, 22 bp, synthetic construct
  misc_feature 1..22: note = chemically synthesized
  source 1..22: mol_type = other DNA
tttatattttctaacagattct

SEQ ID NO: 10013 - DNA, 22 bp, synthetic construct
  misc_feature 1..22: note = chemically synthesized
  source 1..22: mol_type = other DNA
tatattttctaacagattctgt

SEQ ID NO: 10014 - DNA, 22 bp, synthetic construct
  misc_feature 1..22: note = chemically synthesized
  source 1..22: mol_type = other DNA
atattttctaacagattctgtg

SEQ ID NO: 10015 - DNA, 22 bp, synthetic construct
  misc_feature 1..22: note = chemically synthesized
  source 1..22: mol_type = other DNA
tattttctaacagattctgtgt

SEQ ID NO: 10016 - DNA, 22 bp, synthetic construct
  misc_feature 1..22: note = chemically synthesized
  source 1..22: mol_type = other DNA
tctaacagattctgtgtagtgg

SEQ ID NO: 10017 - DNA, 22 bp, synthetic construct
  misc_feature 1..22: note = chemically synthesized
  source 1..22: mol_type = other DNA
ctaacagattctgtgtagtggg

SEQ ID NO: 10018 - DNA, 22 bp, synthetic construct
  misc_feature 1..22: note = chemically synthesized
  source 1..22: mol_type = other DNA
taacagattctgtgtagtggga

SEQ ID NO: 10019 - DNA, 22 bp, synthetic construct
  misc_feature 1..22: note = chemically synthesized
  source 1..22: mol_type = other DNA
acagattctgtgtagtgggatg

SEQ ID NO: 10020 - DNA, 22 bp, synthetic construct
  misc_feature 1..22: note = chemically synthesized
  source 1..22: mol_type = other DNA
tgtgtagtgggatgagcagaga

SEQ ID NO: 10021 - DNA, 22 bp, synthetic construct
  misc_feature 1..22: note = chemically synthesized
  source 1..22: mol_type = other DNA
tgtagtgggatgagcagagaac

SEQ ID NO: 10022 - DNA, 22 bp, synthetic construct
  misc_feature 1..22: note = chemically synthesized
  source 1..22: mol_type = other DNA
cagaccagagatctattctcta

SEQ ID NO: 10023 - DNA, 22 bp, synthetic construct
  misc_feature 1..22: note = chemically synthesized
  source 1..22: mol_type = other DNA
agaccagagatctattctctag

SEQ ID NO: 10024 - DNA, 22 bp, synthetic construct
  misc_feature 1..22: note = chemically synthesized
  source 1..22: mol_type = other DNA
ttctctagcttattttaagctc

SEQ ID NO: 10025 - DNA, 22 bp, synthetic construct
  misc_feature 1..22: note = chemically synthesized
  source 1..22: mol_type = other DNA
tctagcttattttaagctcaac

SEQ ID NO: 10026 - DNA, 22 bp, synthetic construct
  misc_feature 1..22: note = chemically synthesized
  source 1..22: mol_type = other DNA
tagcttattttaagctcaactt

SEQ ID NO: 10027 - DNA, 22 bp, synthetic construct
  misc_feature 1..22: note = chemically synthesized
  source 1..22: mol_type = other DNA
gcttattttaagctcaacttaa

SEQ ID NO: 10028 - DNA, 22 bp, synthetic construct
  misc_feature 1..22: note = chemically synthesized
  source 1..22: mol_type = other DNA
attttaagctcaacttaaaaag

SEQ ID NO: 10029 - DNA, 22 bp, synthetic construct
  misc_feature 1..22: note = chemically synthesized
  source 1..22: mol_type = other DNA
ttttaagctcaacttaaaaaga

SEQ ID NO: 10030 - DNA, 22 bp, synthetic construct
  misc_feature 1..22: note = chemically synthesized
  source 1..22: mol_type = other DNA
taagctcaacttaaaaagaaga

SEQ ID NO: 10031 - DNA, 22 bp, synthetic construct
  misc_feature 1..22: note = chemically synthesized
  source 1..22: mol_type = other DNA
aagctcaacttaaaaagaagaa

SEQ ID NO: 10032 - DNA, 22 bp, synthetic construct
  misc_feature 1..22: note = chemically synthesized
  source 1..22: mol_type = other DNA
agctcaacttaaaaagaagaac

SEQ ID NO: 10033 - DNA, 22 bp, synthetic construct
  misc_feature 1..22: note = chemically synthesized
  source 1..22: mol_type = other DNA
aacttaaaaagaagaactgttc

SEQ ID NO: 10034 - DNA, 22 bp, synthetic construct
  misc_feature 1..22: note = chemically synthesized
  source 1..22: mol_type = other DNA
aaaaagaagaactgttctctga

SEQ ID NO: 10035 - DNA, 22 bp, synthetic construct
  misc_feature 1..22: note = chemically synthesized
  source 1..22: mol_type = other DNA
aaaagaagaactgttctctgat

SEQ ID NO: 10036 - DNA, 22 bp, synthetic construct
  misc_feature 1..22: note = chemically synthesized
  source 1..22: mol_type = other DNA
ttctctgattcttttcgccttc

SEQ ID NO: 10037 - DNA, 22 bp, synthetic construct
  misc_feature 1..22: note = chemically synthesized
  source 1..22: mol_type = other DNA
tctgattcttttcgccttcaat

SEQ ID NO: 10038 - DNA, 22 bp, synthetic construct
  misc_feature 1..22: note = chemically synthesized
  source 1..22: mol_type = other DNA
tgattcttttcgccttcaatac

SEQ ID NO: 10039 - DNA, 22 bp, synthetic construct
  misc_feature 1..22: note = chemically synthesized
  source 1..22: mol_type = other DNA
attcttttcgccttcaatacac

SEQ ID NO: 10040 - DNA, 22 bp, synthetic construct
  misc_feature 1..22: note = chemically synthesized
  source 1..22: mol_type = other DNA
ttttcgccttcaatacacttaa

SEQ ID NO: 10041 - DNA, 22 bp, synthetic construct
  misc_feature 1..22: note = chemically synthesized
  source 1..22: mol_type = other DNA
ttcgccttcaatacacttaatg

SEQ ID NO: 10042 - DNA, 22 bp, synthetic construct
  misc_feature 1..22: note = chemically synthesized
  source 1..22: mol_type = other DNA
tcgccttcaatacacttaatga

SEQ ID NO: 10043 - DNA, 22 bp, synthetic construct
  misc_feature 1..22: note = chemically synthesized
  source 1..22: mol_type = other DNA
cgccttcaatacacttaatgat

SEQ ID NO: 10044 - DNA, 22 bp, synthetic construct
  misc_feature 1..22: note = chemically synthesized
  source 1..22: mol_type = other DNA
gccttcaatacacttaatgatt

SEQ ID NO: 10045 - DNA, 22 bp, synthetic construct
  misc_feature 1..22: note = chemically synthesized
  source 1..22: mol_type = other DNA
caatacacttaatgatttaact

SEQ ID NO: 10046 - DNA, 22 bp, synthetic construct
  misc_feature 1..22: note = chemically synthesized
  source 1..22: mol_type = other DNA
aatacacttaatgatttaactc

SEQ ID NO: 10047 - DNA, 22 bp, synthetic construct
  misc_feature 1..22: note = chemically synthesized
  source 1..22: mol_type = other DNA
aatgatttaactccaccctcct

SEQ ID NO: 10048 - DNA, 22 bp, synthetic construct
  misc_feature 1..22: note = chemically synthesized
  source 1..22: mol_type = other DNA
atgatttaactccaccctcctt

SEQ ID NO: 10049 - DNA, 22 bp, synthetic construct
  misc_feature 1..22: note = chemically synthesized
  source 1..22: mol_type = other DNA
aactccaccctccttcaaaaga

SEQ ID NO: 10050 - DNA, 22 bp, synthetic construct
  misc_feature 1..22: note = chemically synthesized
  source 1..22: mol_type = other DNA
actccaccctccttcaaaagaa

SEQ ID NO: 10051 - DNA, 22 bp, synthetic construct
  misc_feature 1..22: note = chemically synthesized
  source 1..22: mol_type = other DNA
caccctccttcaaaagaaacag

SEQ ID NO: 10052 - DNA, 22 bp, synthetic construct
  misc_feature 1..22: note = chemically synthesized
  source 1..22: mol_type = other DNA
cttcaaaagaaacagcatttcc

SEQ ID NO: 10053 - DNA, 22 bp, synthetic construct
  misc_feature 1..22: note = chemically synthesized
  source 1..22: mol_type = other DNA
caaaagaaacagcatttcctac

SEQ ID NO: 10054 - DNA, 22 bp, synthetic construct
  misc_feature 1..22: note = chemically synthesized
  source 1..22: mol_type = other DNA
aaaagaaacagcatttcctact

SEQ ID NO: 10055 - DNA, 22 bp, synthetic construct
  misc_feature 1..22: note = chemically synthesized
  source 1..22: mol_type = other DNA
cctacttttatactgtctatat

SEQ ID NO: 10056 - DNA, 22 bp, synthetic construct
  misc_feature 1..22: note = chemically synthesized
  source 1..22: mol_type = other DNA
ctacttttatactgtctatatg

SEQ ID NO: 10057 - DNA, 22 bp, synthetic construct
  misc_feature 1..22: note = chemically synthesized
  source 1..22: mol_type = other DNA
cttttatactgtctatatgatt

SEQ ID NO: 10058 - DNA, 22 bp, synthetic construct
  misc_feature 1..22: note = chemically synthesized
  source 1..22: mol_type = other DNA
ttatactgtctatatgattgat

SEQ ID NO: 10059 - DNA, 22 bp, synthetic construct
  misc_feature 1..22: note = chemically synthesized
  source 1..22: mol_type = other DNA
tatactgtctatatgattgatt

SEQ ID NO: 10060 - DNA, 22 bp, synthetic construct
  misc_feature 1..22: note = chemically synthesized
  source 1..22: mol_type = other DNA
atactgtctatatgattgattt

SEQ ID NO: 10061 - DNA, 22 bp, synthetic construct
  misc_feature 1..22: note = chemically synthesized
  source 1..22: mol_type = other DNA
tactgtctatatgattgatttg

SEQ ID NO: 10062 - DNA, 22 bp, synthetic construct
  misc_feature 1..22: note = chemically synthesized
  source 1..22: mol_type = other DNA
tctatatgattgatttgcacag

SEQ ID NO: 10063 - DNA, 22 bp, synthetic construct
  misc_feature 1..22: note = chemically synthesized
  source 1..22: mol_type = other DNA
tatgattgatttgcacagctca

SEQ ID NO: 10064 - DNA, 22 bp, synthetic construct
  misc_feature 1..22: note = chemically synthesized
  source 1..22: mol_type = other DNA
atttgcacagctcatctggcca

SEQ ID NO: 10065 - DNA, 22 bp, synthetic construct
  misc_feature 1..22: note = chemically synthesized
  source 1..22: mol_type = other DNA
gcacagctcatctggccagaag

SEQ ID NO: 10066 - DNA, 22 bp, synthetic construct
  misc_feature 1..22: note = chemically synthesized
  source 1..22: mol_type = other DNA
cacagctcatctggccagaaga

SEQ ID NO: 10067 - DNA, 22 bp, synthetic construct
  misc_feature 1..22: note = chemically synthesized
  source 1..22: mol_type = other DNA
atctggccagaagagctgagac

SEQ ID NO: 10068 - DNA, 22 bp, synthetic construct
  misc_feature 1..22: note = chemically synthesized
  source 1..22: mol_type = other DNA
gccagaagagctgagacatccg

SEQ ID NO: 10069 - DNA, 22 bp, synthetic construct
  misc_feature 1..22: note = chemically synthesized
  source 1..22: mol_type = other DNA
agacatccgttcccctacaaga

SEQ ID NO: 10070 - DNA, 22 bp, synthetic construct
  misc_feature 1..22: note = chemically synthesized
  source 1..22: mol_type = other DNA
cttgtaggggaacggatgtctc

SEQ ID NO: 10071 - DNA, 22 bp, synthetic construct
  misc_feature 1..22: note = chemically synthesized
  source 1..22: mol_type = other DNA
ttgtaggggaacggatgtctca

SEQ ID NO: 10072 - DNA, 22 bp, synthetic construct
  misc_feature 1..22: note = chemically synthesized
  source 1..22: mol_type = other DNA
gtaggggaacggatgtctcagc

SEQ ID NO: 10073 - DNA, 22 bp, synthetic construct
  misc_feature 1..22: note = chemically synthesized
  source 1..22: mol_type = other DNA
taggggaacggatgtctcagct

SEQ ID NO: 10074 - DNA, 22 bp, synthetic construct
  misc_feature 1..22: note = chemically synthesized
  source 1..22: mol_type = other DNA
agctcttctggccagatgagct

SEQ ID NO: 10075 - DNA, 22 bp, synthetic construct
  misc_feature 1..22: note = chemically synthesized
  source 1..22: mol_type = other DNA
ttctggccagatgagctgtgca

SEQ ID NO: 10076 - DNA, 22 bp, synthetic construct
  misc_feature 1..22: note = chemically synthesized
  source 1..22: mol_type = other DNA
ctggccagatgagctgtgcaaa

SEQ ID NO: 10077 - DNA, 22 bp, synthetic construct
  misc_feature 1..22: note = chemically synthesized
  source 1..22: mol_type = other DNA
tggccagatgagctgtgcaaat

SEQ ID NO: 10078 - DNA, 22 bp, synthetic construct
  misc_feature 1..22: note = chemically synthesized
  source 1..22: mol_type = other DNA
gccagatgagctgtgcaaatca

SEQ ID NO: 10079 - DNA, 22 bp, synthetic construct
  misc_feature 1..22: note = chemically synthesized
  source 1..22: mol_type = other DNA
tgcaaatcaatcatatagacag

SEQ ID NO: 10080 - DNA, 22 bp, synthetic construct
  misc_feature 1..22: note = chemically synthesized
  source 1..22: mol_type = other DNA
tttcttttgaaggagggtggag

SEQ ID NO: 10081 - DNA, 22 bp, synthetic construct
  misc_feature 1..22: note = chemically synthesized
  source 1..22: mol_type = other DNA
cttttgaaggagggtggagtta

SEQ ID NO: 10082 - DNA, 22 bp, synthetic construct
  misc_feature 1..22: note = chemically synthesized
  source 1..22: mol_type = other DNA
ttttgaaggagggtggagttaa

SEQ ID NO: 10083 - DNA, 22 bp, synthetic construct
  misc_feature 1..22: note = chemically synthesized
  source 1..22: mol_type = other DNA
ttgaaggagggtggagttaaat

SEQ ID NO: 10084 - DNA, 22 bp, synthetic construct
  misc_feature 1..22: note = chemically synthesized
  source 1..22: mol_type = other DNA
tgaaggagggtggagttaaatc

SEQ ID NO: 10085 - DNA, 22 bp, synthetic construct
  misc_feature 1..22: note = chemically synthesized
  source 1..22: mol_type = other DNA
gaaggagggtggagttaaatca

SEQ ID NO: 10086 - DNA, 22 bp, synthetic construct
  misc_feature 1..22: note = chemically synthesized
  source 1..22: mol_type = other DNA
aaggagggtggagttaaatcat

SEQ ID NO: 10087 - DNA, 22 bp, synthetic construct
  misc_feature 1..22: note = chemically synthesized
  source 1..22: mol_type = other DNA
aatcattaagtgtattgaaggc

SEQ ID NO: 10088 - DNA, 22 bp, synthetic construct
  misc_feature 1..22: note = chemically synthesized
  source 1..22: mol_type = other DNA
agtgtattgaaggcgaaaagaa

SEQ ID NO: 10089 - DNA, 22 bp, synthetic construct
  misc_feature 1..22: note = chemically synthesized
  source 1..22: mol_type = other DNA
aaggcgaaaagaatcagagaac

SEQ ID NO: 10090 - DNA, 22 bp, synthetic construct
  misc_feature 1..22: note = chemically synthesized
  source 1..22: mol_type = other DNA
ttctttttaagttgagcttaaa

SEQ ID NO: 10091 - DNA, 22 bp, synthetic construct
  misc_feature 1..22: note = chemically synthesized
  source 1..22: mol_type = other DNA
ctttttaagttgagcttaaaat

SEQ ID NO: 10092 - DNA, 22 bp, synthetic construct
  misc_feature 1..22: note = chemically synthesized
  source 1..22: mol_type = other DNA
tttttaagttgagcttaaaata

SEQ ID NO: 10093 - DNA, 22 bp, synthetic construct
  misc_feature 1..22: note = chemically synthesized
  source 1..22: mol_type = other DNA
tttaagttgagcttaaaataag

SEQ ID NO: 10094 - DNA, 22 bp, synthetic construct
  misc_feature 1..22: note = chemically synthesized
  source 1..22: mol_type = other DNA
ttaagttgagcttaaaataagc

SEQ ID NO: 10095 - DNA, 22 bp, synthetic construct
  misc_feature 1..22: note = chemically synthesized
  source 1..22: mol_type = other DNA
taagttgagcttaaaataagct

SEQ ID NO: 10096 - DNA, 22 bp, synthetic construct
  misc_feature 1..22: note = chemically synthesized
  source 1..22: mol_type = other DNA
aagttgagcttaaaataagcta

SEQ ID NO: 10097 - DNA, 22 bp, synthetic construct
  misc_feature 1..22: note = chemically synthesized
  source 1..22: mol_type = other DNA
agttgagcttaaaataagctag

SEQ ID NO: 10098 - DNA, 22 bp, synthetic construct
  misc_feature 1..22: note = chemically synthesized
  source 1..22: mol_type = other DNA
agcttaaaataagctagagaat

SEQ ID NO: 10099 - DNA, 22 bp, synthetic construct
  misc_feature 1..22: note = chemically synthesized
  source 1..22: mol_type = other DNA
aaaataagctagagaatagatc

SEQ ID NO: 10100 - DNA, 22 bp, synthetic construct
  misc_feature 1..22: note = chemically synthesized
  source 1..22: mol_type = other DNA
aaataagctagagaatagatct

SEQ ID NO: 10101 - DNA, 22 bp, synthetic construct
  misc_feature 1..22: note = chemically synthesized
  source 1..22: mol_type = other DNA
gagaatagatctctggtctgaa

SEQ ID NO: 10102 - DNA, 22 bp, synthetic construct
  misc_feature 1..22: note = chemically synthesized
  source 1..22: mol_type = other DNA
tggtctgaaggtttatttacgg

SEQ ID NO: 10103 - DNA, 22 bp, synthetic construct
  misc_feature 1..22: note = chemically synthesized
  source 1..22: mol_type = other DNA
gtctgaaggtttatttacgggc

SEQ ID NO: 10104 - DNA, 22 bp, synthetic construct
  misc_feature 1..22: note = chemically synthesized
  source 1..22: mol_type = other DNA
aaggtttatttacgggcttttc

SEQ ID NO: 10105 - DNA, 22 bp, synthetic construct
  misc_feature 1..22: note = chemically synthesized
  source 1..22: mol_type = other DNA
atttacgggcttttctcactgg

SEQ ID NO: 10106 - DNA, 22 bp, synthetic construct
  misc_feature 1..22: note = chemically synthesized
  source 1..22: mol_type = other DNA
tttacgggcttttctcactgga

SEQ ID NO: 10107 - DNA, 22 bp, synthetic construct
  misc_feature 1..22: note = chemically synthesized
  source 1..22: mol_type = other DNA
acgggcttttctcactggatta

SEQ ID NO: 10108 - DNA, 22 bp, synthetic construct
  misc_feature 1..22: note = chemically synthesized
  source 1..22: mol_type = other DNA
cgggcttttctcactggattat

SEQ ID NO: 10109 - DNA, 22 bp, synthetic construct
  misc_feature 1..22: note = chemically synthesized
  source 1..22: mol_type = other DNA
ttctcactggattattttgttt

SEQ ID NO: 10110 - DNA, 22 bp, synthetic construct
  misc_feature 1..22: note = chemically synthesized
  source 1..22: mol_type = other DNA
tctcactggattattttgtttt

SEQ ID NO: 10111 - DNA, 22 bp, synthetic construct
  misc_feature 1..22: note = chemically synthesized
  source 1..22: mol_type = other DNA
ctcactggattattttgttttt

SEQ ID NO: 10112 - DNA, 22 bp, synthetic construct
  misc_feature 1..22: note = chemically synthesized
  source 1..22: mol_type = other DNA
tcactggattattttgtttttg

SEQ ID NO: 10113 - DNA, 22 bp, synthetic construct
  misc_feature 1..22: note = chemically synthesized
  source 1..22: mol_type = other DNA
actggattattttgtttttgtt

SEQ ID NO: 10114 - DNA, 22 bp, synthetic construct
  misc_feature 1..22: note = chemically synthesized
  source 1..22: mol_type = other DNA
gattattttgtttttgttctct

SEQ ID NO: 10115 - DNA, 22 bp, synthetic construct
  misc_feature 1..22: note = chemically synthesized
  source 1..22: mol_type = other DNA
ttttgtttttgttctctgctca

SEQ ID NO: 10116 - DNA, 22 bp, synthetic construct
  misc_feature 1..22: note = chemically synthesized
  source 1..22: mol_type = other DNA
tgtttttgttctctgctcatcc

SEQ ID NO: 10117 - DNA, 22 bp, synthetic construct
  misc_feature 1..22: note = chemically synthesized
  source 1..22: mol_type = other DNA
gtttttgttctctgctcatccc

SEQ ID NO: 10118 - DNA, 22 bp, synthetic construct
  misc_feature 1..22: note = chemically synthesized
  source 1..22: mol_type = other DNA
tttttgttctctgctcatccca

SEQ ID NO: 10119 - DNA, 22 bp, synthetic construct
  misc_feature 1..22: note = chemically synthesized
  source 1..22: mol_type = other DNA
ttgttctctgctcatcccacta

SEQ ID NO: 10120 - DNA, 22 bp, synthetic construct
  misc_feature 1..22: note = chemically synthesized
  source 1..22: mol_type = other DNA
tgttctctgctcatcccactac

SEQ ID NO: 10121 - DNA, 22 bp, synthetic construct
  misc_feature 1..22: note = chemically synthesized
  source 1..22: mol_type = other DNA
gttctctgctcatcccactaca

SEQ ID NO: 10122 - DNA, 22 bp, synthetic construct
  misc_feature 1..22: note = chemically synthesized
  source 1..22: mol_type = other DNA
ttctctgctcatcccactacac

SEQ ID NO: 10123 - DNA, 22 bp, synthetic construct
  misc_feature 1..22: note = chemically synthesized
  source 1..22: mol_type = other DNA
tctgctcatcccactacacaga

SEQ ID NO: 10124 - DNA, 22 bp, synthetic construct
  misc_feature 1..22: note = chemically synthesized
  source 1..22: mol_type = other DNA
tgctcatcccactacacagaat

SEQ ID NO: 10125 - DNA, 22 bp, synthetic construct
  misc_feature 1..22: note = chemically synthesized
  source 1..22: mol_type = other DNA
ctcatcccactacacagaatct

SEQ ID NO: 10126 - DNA, 22 bp, synthetic construct
  misc_feature 1..22: note = chemically synthesized
  source 1..22: mol_type = other DNA
atcccactacacagaatctgtt

SEQ ID NO: 10127 - DNA, 22 bp, synthetic construct
  misc_feature 1..22: note = chemically synthesized
  source 1..22: mol_type = other DNA
cacagaatctgttagaaaatat

SEQ ID NO: 10128 - DNA, 22 bp, synthetic construct
  misc_feature 1..22: note = chemically synthesized
  source 1..22: mol_type = other DNA
ttagaaaatataaagaataaag

SEQ ID NO: 10129 - DNA, 22 bp, synthetic construct
  misc_feature 1..22: note = chemically synthesized
  source 1..22: mol_type = other DNA
gaaaatataaagaataaaggat

SEQ ID NO: 10130 - DNA, 22 bp, synthetic construct
  misc_feature 1..22: note = chemically synthesized
  source 1..22: mol_type = other DNA
gaagaacatttacattcatcta

SEQ ID NO: 10131 - DNA, 22 bp, synthetic construct
  misc_feature 1..22: note = chemically synthesized
  source 1..22: mol_type = other DNA
acattcatctagtcaaaagccc

SEQ ID NO: 10132 - DNA, 22 bp, synthetic construct
  misc_feature 1..22: note = chemically synthesized
  source 1..22: mol_type = other DNA
cattcatctagtcaaaagccca

SEQ ID NO: 10133 - DNA, 22 bp, synthetic construct
  misc_feature 1..22: note = chemically synthesized
  source 1..22: mol_type = other DNA
atctagtcaaaagcccacattt

SEQ ID NO: 10134 - DNA, 22 bp, synthetic construct
  misc_feature 1..22: note = chemically synthesized
  source 1..22: mol_type = other DNA
gtcaaaagcccacattttagta

SEQ ID NO: 10135 - DNA, 22 bp, synthetic construct
  misc_feature 1..22: note = chemically synthesized
  source 1..22: mol_type = other DNA
tagtaaaagaaattactatcca

SEQ ID NO: 10136 - DNA, 22 bp, synthetic construct
  misc_feature 1..22: note = chemically synthesized
  source 1..22: mol_type = other DNA
agtaaaagaaattactatccaa

SEQ ID NO: 10137 - DNA, 22 bp, synthetic construct
  misc_feature 1..22: note = chemically synthesized
  source 1..22: mol_type = other DNA
gtaaaagaaattactatccaag

SEQ ID NO: 10138 - DNA, 22 bp, synthetic construct
  misc_feature 1..22: note = chemically synthesized
  source 1..22: mol_type = other DNA
ctatccaagaagcaaatgattt

SEQ ID NO: 10139 - DNA, 22 bp, synthetic construct
  misc_feature 1..22: note = chemically synthesized
  source 1..22: mol_type = other DNA
tccaagaagcaaatgatttgta

SEQ ID NO: 10140 - DNA, 22 bp, synthetic construct
  misc_feature 1..22: note = chemically synthesized
  source 1..22: mol_type = other DNA
gtacaagatcacagggcttttc

SEQ ID NO: 10141 - DNA, 22 bp, synthetic construct
  misc_feature 1..22: note = chemically synthesized
  source 1..22: mol_type = other DNA
tacaagatcacagggcttttca

SEQ ID NO: 10142 - DNA, 22 bp, synthetic construct
  misc_feature 1..22: note = chemically synthesized
  source 1..22: mol_type = other DNA
ttcaacagtaaggctaaaaggt

SEQ ID NO: 10143 - DNA, 22 bp, synthetic construct
  misc_feature 1..22: note = chemically synthesized
  source 1..22: mol_type = other DNA
tcaacagtaaggctaaaaggtt

SEQ ID NO: 10144 - DNA, 22 bp, synthetic construct
  misc_feature 1..22: note = chemically synthesized
  source 1..22: mol_type = other DNA
caacagtaaggctaaaaggtta

SEQ ID NO: 10145 - DNA, 22 bp, synthetic construct
  misc_feature 1..22: note = chemically synthesized
  source 1..22: mol_type = other DNA
aacagtaaggctaaaaggttaa

SEQ ID NO: 10146 - DNA, 22 bp, synthetic construct
  misc_feature 1..22: note = chemically synthesized
  source 1..22: mol_type = other DNA
aaaggttaagaaaattctgatt

SEQ ID NO: 10147 - DNA, 22 bp, synthetic construct
  misc_feature 1..22: note = chemically synthesized
  source 1..22: mol_type = other DNA
agaaaattctgattatcttaag

SEQ ID NO: 10148 - DNA, 22 bp, synthetic construct
  misc_feature 1..22: note = chemically synthesized
  source 1..22: mol_type = other DNA
tgattatcttaagagttgctat

SEQ ID NO: 10149 - DNA, 22 bp, synthetic construct
  misc_feature 1..22: note = chemically synthesized
  source 1..22: mol_type = other DNA
attatcttaagagttgctatta

SEQ ID NO: 10150 - DNA, 22 bp, synthetic construct
  misc_feature 1..22: note = chemically synthesized
  source 1..22: mol_type = other DNA
tcttaagagttgctattaatta

SEQ ID NO: 10151 - DNA, 22 bp, synthetic construct
  misc_feature 1..22: note = chemically synthesized
  source 1..22: mol_type = other DNA
aagagttgctattaattaaagc

SEQ ID NO: 10152 - DNA, 22 bp, synthetic construct
  misc_feature 1..22: note = chemically synthesized
  source 1..22: mol_type = other DNA
agagttgctattaattaaagcc

SEQ ID NO: 10153 - DNA, 22 bp, synthetic construct
  misc_feature 1..22: note = chemically synthesized
  source 1..22: mol_type = other DNA
ctattaattaaagccaacttaa

SEQ ID NO: 10154 - DNA, 22 bp, synthetic construct
  misc_feature 1..22: note = chemically synthesized
  source 1..22: mol_type = other DNA
ttaattaaagccaacttaaacc

SEQ ID NO: 10155 - DNA, 22 bp, synthetic construct
  misc_feature 1..22: note = chemically synthesized
  source 1..22: mol_type = other DNA
attaaagccaacttaaaccaac

SEQ ID NO: 10156 - DNA, 22 bp, synthetic construct
  misc_feature 1..22: note = chemically synthesized
  source 1..22: mol_type = other DNA
aagccaacttaaaccaacttta

SEQ ID NO: 10157 - DNA, 22 bp, synthetic construct
  misc_feature 1..22: note = chemically synthesized
  source 1..22: mol_type = other DNA
aaaccaactttaaatgtagagg

SEQ ID NO: 10158 - DNA, 22 bp, synthetic construct
  misc_feature 1..22: note = chemically synthesized
  source 1..22: mol_type = other DNA
aaccaactttaaatgtagaggg

SEQ ID NO: 10159 - DNA, 22 bp, synthetic construct
  misc_feature 1..22: note = chemically synthesized
  source 1..22: mol_type = other DNA
taaatgtagagggggatcctgg

SEQ ID NO: 10160 - DNA, 22 bp, synthetic construct
  misc_feature 1..22: note = chemically synthesized
  source 1..22: mol_type = other DNA
aaatgtagagggggatcctgga

SEQ ID NO: 10161 - DNA, 22 bp, synthetic construct
  misc_feature 1..22: note = chemically synthesized
  source 1..22: mol_type = other DNA
aatgtagagggggatcctggac

SEQ ID NO: 10162 - DNA, 22 bp, synthetic construct
  misc_feature 1..22: note = chemically synthesized
  source 1..22: mol_type = other DNA
gacttcacattaaccctgtgtc

SEQ ID NO: 10163 - DNA, 22 bp, synthetic construct
  misc_feature 1..22: note = chemically synthesized
  source 1..22: mol_type = other DNA
cacattaaccctgtgtcccctt

SEQ ID NO: 10164 - DNA, 22 bp, synthetic construct
  misc_feature 1..22: note = chemically synthesized
  source 1..22: mol_type = other DNA
acattaaccctgtgtccccttt

SEQ ID NO: 10165 - DNA, 22 bp, synthetic construct
  misc_feature 1..22: note = chemically synthesized
  source 1..22: mol_type = other DNA
accctgtgtcccctttttctcc

SEQ ID NO: 10166 - DNA, 22 bp, synthetic construct
  misc_feature 1..22: note = chemically synthesized
  source 1..22: mol_type = other DNA
tgtcccctttttctccactctc

SEQ ID NO: 10167 - DNA, 22 bp, synthetic construct
  misc_feature 1..22: note = chemically synthesized
  source 1..22: mol_type = other DNA
tttctccactctccccgtatcc

SEQ ID NO: 10168 - DNA, 22 bp, synthetic construct
  misc_feature 1..22: note = chemically synthesized
  source 1..22: mol_type = other DNA
ttctccactctccccgtatccc

SEQ ID NO: 10169 - DNA, 22 bp, synthetic construct
  misc_feature 1..22: note = chemically synthesized
  source 1..22: mol_type = other DNA
tctccactctccccgtatcccc

SEQ ID NO: 10170 - DNA, 22 bp, synthetic construct
  misc_feature 1..22: note = chemically synthesized
  source 1..22: mol_type = other DNA
ctccactctccccgtatcccct

SEQ ID NO: 10171 - DNA, 22 bp, synthetic construct
  misc_feature 1..22: note = chemically synthesized
  source 1..22: mol_type = other DNA
tccactctccccgtatccccta

SEQ ID NO: 10172 - DNA, 22 bp, synthetic construct
  misc_feature 1..22: note = chemically synthesized
  source 1..22: mol_type = other DNA
cactctccccgtatcccctatc

SEQ ID NO: 10173 - DNA, 22 bp, synthetic construct
  misc_feature 1..22: note = chemically synthesized
  source 1..22: mol_type = other DNA
tccccgtatcccctatcccacc

SEQ ID NO: 10174 - DNA, 22 bp, synthetic construct
  misc_feature 1..22: note = chemically synthesized
  source 1..22: mol_type = other DNA
cccgtatcccctatcccacccc

SEQ ID NO: 10175 - DNA, 22 bp, synthetic construct
  misc_feature 1..22: note = chemically synthesized
  source 1..22: mol_type = other DNA
tcccaccccaacccccacacag

SEQ ID NO: 10176 - DNA, 22 bp, synthetic construct
  misc_feature 1..22: note = chemically synthesized
  source 1..22: mol_type = other DNA
accacccaatattattgttctc

SEQ ID NO: 10177 - DNA, 22 bp, synthetic construct
  misc_feature 1..22: note = chemically synthesized
  source 1..22: mol_type = other DNA
ttgttctctgtaaacggaaaca

SEQ ID NO: 10178 - DNA, 22 bp, synthetic construct
  misc_feature 1..22: note = chemically synthesized
  source 1..22: mol_type = other DNA
ttctctgtaaacggaaacaacc

SEQ ID NO: 10179 - DNA, 22 bp, synthetic construct
  misc_feature 1..22: note = chemically synthesized
  source 1..22: mol_type = other DNA
tctgtaaacggaaacaacctgt

SEQ ID NO: 10180 - DNA, 22 bp, synthetic construct
  misc_feature 1..22: note = chemically synthesized
  source 1..22: mol_type = other DNA
tgtaaacggaaacaacctgttg

SEQ ID NO: 10181 - DNA, 22 bp, synthetic construct
  misc_feature 1..22: note = chemically synthesized
  source 1..22: mol_type = other DNA
taaacggaaacaacctgttgtc

SEQ ID NO: 10182 - DNA, 22 bp, synthetic construct
  misc_feature 1..22: note = chemically synthesized
  source 1..22: mol_type = other DNA
ttgtctaaagagttttaactat

SEQ ID NO: 10183 - DNA, 22 bp, synthetic construct
  misc_feature 1..22: note = chemically synthesized
  source 1..22: mol_type = other DNA
tctaaagagttttaactatggg

SEQ ID NO: 10184 - DNA, 22 bp, synthetic construct
  misc_feature 1..22: note = chemically synthesized
  source 1..22: mol_type = other DNA
aagagttttaactatgggctca

SEQ ID NO: 10185 - DNA, 22 bp, synthetic construct
  misc_feature 1..22: note = chemically synthesized
  source 1..22: mol_type = other DNA
taactatgggctcacgggtgag

SEQ ID NO: 10186 - DNA, 22 bp, synthetic construct
  misc_feature 1..22: note = chemically synthesized
  source 1..22: mol_type = other DNA
aactatgggctcacgggtgagc

SEQ ID NO: 10187 - DNA, 22 bp, synthetic construct
  misc_feature 1..22: note = chemically synthesized
  source 1..22: mol_type = other DNA
actatgggctcacgggtgagct

SEQ ID NO: 10188 - DNA, 22 bp, synthetic construct
  misc_feature 1..22: note = chemically synthesized
  source 1..22: mol_type = other DNA
tgggctcacgggtgagctaaac

SEQ ID NO: 10189 - DNA, 22 bp, synthetic construct
  misc_feature 1..22: note = chemically synthesized
  source 1..22: mol_type = other DNA
acgggtgagctaaacaggtttc

SEQ ID NO: 10190 - DNA, 22 bp, synthetic construct
  misc_feature 1..22: note = chemically synthesized
  source 1..22: mol_type = other DNA
aacaggtttcccatctttttct

SEQ ID NO: 10191 - DNA, 22 bp, synthetic construct
  misc_feature 1..22: note = chemically synthesized
  source 1..22: mol_type = other DNA
cccatctttttctggacccagg

SEQ ID NO: 10192 - DNA, 22 bp, synthetic construct
  misc_feature 1..22: note = chemically synthesized
  source 1..22: mol_type = other DNA
ccatctttttctggacccagga

SEQ ID NO: 10193 - DNA, 22 bp, synthetic construct
  misc_feature 1..22: note = chemically synthesized
  source 1..22: mol_type = other DNA
tttctggacccaggatcttagt

SEQ ID NO: 10194 - DNA, 22 bp, synthetic construct
  misc_feature 1..22: note = chemically synthesized
  source 1..22: mol_type = other DNA
ttctggacccaggatcttagtg

SEQ ID NO: 10195 - DNA, 22 bp, synthetic construct
  misc_feature 1..22: note = chemically synthesized
  source 1..22: mol_type = other DNA
tctggacccaggatcttagtgg

SEQ ID NO: 10196 - DNA, 22 bp, synthetic construct
  misc_feature 1..22: note = chemically synthesized
  source 1..22: mol_type = other DNA
ctggacccaggatcttagtggg

SEQ ID NO: 10197 - DNA, 22 bp, synthetic construct
  misc_feature 1..22: note = chemically synthesized
  source 1..22: mol_type = other DNA
tggacccaggatcttagtgggg

SEQ ID NO: 10198 - DNA, 22 bp, synthetic construct
  misc_feature 1..22: note = chemically synthesized
  source 1..22: mol_type = other DNA
gacccaggatcttagtggggat

SEQ ID NO: 10199 - DNA, 22 bp, synthetic construct
  misc_feature 1..22: note = chemically synthesized
  source 1..22: mol_type = other DNA
agtggggattttcactctgttc

SEQ ID NO: 10200 - DNA, 22 bp, synthetic construct
  misc_feature 1..22: note = chemically synthesized
  source 1..22: mol_type = other DNA
gtggggattttcactctgttca

SEQ ID NO: 10201 - DNA, 22 bp, synthetic construct
  misc_feature 1..22: note = chemically synthesized
  source 1..22: mol_type = other DNA
tcactctgttcactattttgtt

SEQ ID NO: 10202 - DNA, 22 bp, synthetic construct
  misc_feature 1..22: note = chemically synthesized
  source 1..22: mol_type = other DNA
cactctgttcactattttgttg

SEQ ID NO: 10203 - DNA, 22 bp, synthetic construct
  misc_feature 1..22: note = chemically synthesized
  source 1..22: mol_type = other DNA
actctgttcactattttgttgc

SEQ ID NO: 10204 - DNA, 22 bp, synthetic construct
  misc_feature 1..22: note = chemically synthesized
  source 1..22: mol_type = other DNA
tgttcactattttgttgccctt

SEQ ID NO: 10205 - DNA, 22 bp, synthetic construct
  misc_feature 1..22: note = chemically synthesized
  source 1..22: mol_type = other DNA
ttcactattttgttgcccttca

SEQ ID NO: 10206 - DNA, 22 bp, synthetic construct
  misc_feature 1..22: note = chemically synthesized
  source 1..22: mol_type = other DNA
actattttgttgcccttcaaac

SEQ ID NO: 10207 - DNA, 22 bp, synthetic construct
  misc_feature 1..22: note = chemically synthesized
  source 1..22: mol_type = other DNA
ttttgttgcccttcaaaccagt

SEQ ID NO: 10208 - DNA, 22 bp, synthetic construct
  misc_feature 1..22: note = chemically synthesized
  source 1..22: mol_type = other DNA
tgttgcccttcaaaccagtaag

SEQ ID NO: 10209 - DNA, 22 bp, synthetic construct
  misc_feature 1..22: note = chemically synthesized
  source 1..22: mol_type = other DNA
gttgcccttcaaaccagtaagc

SEQ ID NO: 10210 - DNA, 22 bp, synthetic construct
  misc_feature 1..22: note = chemically synthesized
  source 1..22: mol_type = other DNA
ttgcccttcaaaccagtaagca

SEQ ID NO: 10211 - DNA, 22 bp, synthetic construct
  misc_feature 1..22: note = chemically synthesized
  source 1..22: mol_type = other DNA
cccttcaaaccagtaagcattt

SEQ ID NO: 10212 - DNA, 22 bp, synthetic construct
  misc_feature 1..22: note = chemically synthesized
  source 1..22: mol_type = other DNA
caaaccagtaagcatttatgag

SEQ ID NO: 10213 - DNA, 22 bp, synthetic construct
  misc_feature 1..22: note = chemically synthesized
  source 1..22: mol_type = other DNA
aaaccagtaagcatttatgagg

SEQ ID NO: 10214 - DNA, 22 bp, synthetic construct
  misc_feature 1..22: note = chemically synthesized
  source 1..22: mol_type = other DNA
atgaggactcacactatgccag

SEQ ID NO: 10215 - DNA, 22 bp, synthetic construct
  misc_feature 1..22: note = chemically synthesized
  source 1..22: mol_type = other DNA
tgaggactcacactatgccaga

SEQ ID NO: 10216 - DNA, 22 bp, synthetic construct
  misc_feature 1..22: note = chemically synthesized
  source 1..22: mol_type = other DNA
acactatgccagatacataggt

SEQ ID NO: 10217 - DNA, 22 bp, synthetic construct
  misc_feature 1..22: note = chemically synthesized
  source 1..22: mol_type = other DNA
tgccagatacataggtggcagg

SEQ ID NO: 10218 - DNA, 22 bp, synthetic construct
  misc_feature 1..22: note = chemically synthesized
  source 1..22: mol_type = other DNA
ttcactccagatataatctatc

SEQ ID NO: 10219 - DNA, 22 bp, synthetic construct
  misc_feature 1..22: note = chemically synthesized
  source 1..22: mol_type = other DNA
cactccagatataatctatctg

SEQ ID NO: 10220 - DNA, 22 bp, synthetic construct
  misc_feature 1..22: note = chemically synthesized
  source 1..22: mol_type = other DNA
actccagatataatctatctga

SEQ ID NO: 10221 - DNA, 20 bp, synthetic construct
  misc_feature 1..20: note = chemically synthesized
  source 1..20: mol_type = other DNA
actttcacaatctgctagca

SEQ ID NO: 10222 - DNA, 20 bp, synthetic construct
  misc_feature 1..20: note = chemically synthesized
  source 1..20: mol_type = other DNA
ctttcacaatctgctagcaa

SEQ ID NO: 10223 - DNA, 20 bp, synthetic construct
  misc_feature 1..20: note = chemically synthesized
  source 1..20: mol_type = other DNA
atctgctagcaaaggttatg

SEQ ID NO: 10224 - DNA, 20 bp, synthetic construct
  misc_feature 1..20: note = chemically synthesized
  source 1..20: mol_type = other DNA
gcagcgcgtgaacatgatca

SEQ ID NO: 10225 - DNA, 20 bp, synthetic construct
  misc_feature 1..20: note = chemically synthesized
  source 1..20: mol_type = other DNA
gcgcgtgaacatgatcatgg

SEQ ID NO: 10226 - DNA, 20 bp, synthetic construct
  misc_feature 1..20: note = chemically synthesized
  source 1..20: mol_type = other DNA
catgatcatggcagaatcac

SEQ ID NO: 10227 - DNA, 20 bp, synthetic construct
  misc_feature 1..20: note = chemically synthesized
  source 1..20: mol_type = other DNA
atgatcatggcagaatcacc

SEQ ID NO: 10228 - DNA, 20 bp, synthetic construct
  misc_feature 1..20: note = chemically synthesized
  source 1..20: mol_type = other DNA
cctcatcaccatctgccttt

SEQ ID NO: 10229 - DNA, 20 bp, synthetic construct
  misc_feature 1..20: note = chemically synthesized
  source 1..20: mol_type = other DNA
ctcatcaccatctgcctttt

SEQ ID NO: 10230 - DNA, 20 bp, synthetic construct
  misc_feature 1..20: note = chemically synthesized
  source 1..20: mol_type = other DNA
tgccttttaggatatctact

SEQ ID NO: 10231 - DNA, 20 bp, synthetic construct
  misc_feature 1..20: note = chemically synthesized
  source 1..20: mol_type = other DNA
tctactcagtgctgaatgta

SEQ ID NO: 10232 - DNA, 20 bp, synthetic construct
  misc_feature 1..20: note = chemically synthesized
  source 1..20: mol_type = other DNA
ctactcagtgctgaatgtac

SEQ ID NO: 10233 - DNA, 20 bp, synthetic construct
  misc_feature 1..20: note = chemically synthesized
  source 1..20: mol_type = other DNA
ttccttttttaaaatacatt

SEQ ID NO: 10234 - DNA, 20 bp, synthetic construct
  misc_feature 1..20: note = chemically synthesized
  source 1..20: mol_type = other DNA
cattgagtatgcttgccttt

SEQ ID NO: 10235 - DNA, 20 bp, synthetic construct
  misc_feature 1..20: note = chemically synthesized
  source 1..20: mol_type = other DNA
gtatgcttgccttttagata

SEQ ID NO: 10236 - DNA, 20 bp, synthetic construct
  misc_feature 1..20: note = chemically synthesized
  source 1..20: mol_type = other DNA
attttgattacatgatttga

SEQ ID NO: 10237 - DNA, 20 bp, synthetic construct
  misc_feature 1..20: note = chemically synthesized
  source 1..20: mol_type = other DNA
atgatttgacagcaatattg

SEQ ID NO: 10238 - DNA, 20 bp, synthetic construct
  misc_feature 1..20: note = chemically synthesized
  source 1..20: mol_type = other DNA
gatttgacagcaatattgaa

SEQ ID NO: 10239 - DNA, 20 bp, synthetic construct
  misc_feature 1..20: note = chemically synthesized
  source 1..20: mol_type = other DNA
agcaatattgaagagtctaa

SEQ ID NO: 10240 - DNA, 20 bp, synthetic construct
  misc_feature 1..20: note = chemically synthesized
  source 1..20: mol_type = other DNA
atattgaagagtctaacagc

SEQ ID NO: 10241 - DNA, 20 bp, synthetic construct
  misc_feature 1..20: note = chemically synthesized
  source 1..20: mol_type = other DNA
agagtctaacagccagcacg

SEQ ID NO: 10242 - DNA, 20 bp, synthetic construct
  misc_feature 1..20: note = chemically synthesized
  source 1..20: mol_type = other DNA
gagtctaacagccagcacgc

SEQ ID NO: 10243 - DNA, 20 bp, synthetic construct
  misc_feature 1..20: note = chemically synthesized
  source 1..20: mol_type = other DNA
ctaacagccagcacgcaggt

SEQ ID NO: 10244 - DNA, 20 bp, synthetic construct
  misc_feature 1..20: note = chemically synthesized
  source 1..20: mol_type = other DNA
cagccagcacgcaggttggt

SEQ ID NO: 10245 - DNA, 20 bp, synthetic construct
  misc_feature 1..20: note = chemically synthesized
  source 1..20: mol_type = other DNA
gcacgcaggttggtaagtac

SEQ ID NO: 10246 - DNA, 20 bp, synthetic construct
  misc_feature 1..20: note = chemically synthesized
  source 1..20: mol_type = other DNA
ggtaagtactggttctttgt

SEQ ID NO: 10247 - DNA, 20 bp, synthetic construct
  misc_feature 1..20: note = chemically synthesized
  source 1..20: mol_type = other DNA
agtactggttctttgttagc

SEQ ID NO: 10248 - DNA, 20 bp, synthetic construct
  misc_feature 1..20: note = chemically synthesized
  source 1..20: mol_type = other DNA
gtactggttctttgttagct

SEQ ID NO: 10249 - DNA, 20 bp, synthetic construct
  misc_feature 1..20: note = chemically synthesized
  source 1..20: mol_type = other DNA
tcttcatttttaaaactaaa

SEQ ID NO: 10250 - DNA, 20 bp, synthetic construct
  misc_feature 1..20: note = chemically synthesized
  source 1..20: mol_type = other DNA
tatgtttaataaacactgtt

SEQ ID NO: 10251 - DNA, 20 bp, synthetic construct
  misc_feature 1..20: note = chemically synthesized
  source 1..20: mol_type = other DNA
acactgttcagttcatgatt

SEQ ID NO: 10252 - DNA, 20 bp, synthetic construct
  misc_feature 1..20: note = chemically synthesized
  source 1..20: mol_type = other DNA
tttggtcatgtaattcctgt

SEQ ID NO: 10253 - DNA, 20 bp, synthetic construct
  misc_feature 1..20: note = chemically synthesized
  source 1..20: mol_type = other DNA
ttagaaaacattcatctcct

SEQ ID NO: 10254 - DNA, 20 bp, synthetic construct
  misc_feature 1..20: note = chemically synthesized
  source 1..20: mol_type = other DNA
ccttggtttaaaaaaattaa

SEQ ID NO: 10255 - DNA, 20 bp, synthetic construct
  misc_feature 1..20: note = chemically synthesized
  source 1..20: mol_type = other DNA
tggtttaaaaaaattaaaag

SEQ ID NO: 10256 - DNA, 20 bp, synthetic construct
  misc_feature 1..20: note = chemically synthesized
  source 1..20: mol_type = other DNA
ggtttaaaaaaattaaaagt

SEQ ID NO: 10257 - DNA, 20 bp, synthetic construct
  misc_feature 1..20: note = chemically synthesized
  source 1..20: mol_type = other DNA
aaattaaaagtgggaaaaca

SEQ ID NO: 10258 - DNA, 20 bp, synthetic construct
  misc_feature 1..20: note = chemically synthesized
  source 1..20: mol_type = other DNA
aaagtgggaaaacaaagaaa

SEQ ID NO: 10259 - DNA, 20 bp, synthetic construct
  misc_feature 1..20: note = chemically synthesized
  source 1..20: mol_type = other DNA
gtgggaaaacaaagaaatag

SEQ ID NO: 10260 - DNA, 20 bp, synthetic construct
  misc_feature 1..20: note = chemically synthesized
  source 1..20: mol_type = other DNA
aacaaagaaatagcagaata

SEQ ID NO: 10261 - DNA, 20 bp, synthetic construct
  misc_feature 1..20: note = chemically synthesized
  source 1..20: mol_type = other DNA
ataaccacattatttttgtt

SEQ ID NO: 10262 - DNA, 20 bp, synthetic construct
  misc_feature 1..20: note = chemically synthesized
  source 1..20: mol_type = other DNA
ttaccactttgaaatcaaaa

SEQ ID NO: 10263 - DNA, 20 bp, synthetic construct
  misc_feature 1..20: note = chemically synthesized
  source 1..20: mol_type = other DNA
taccactttgaaatcaaaat

SEQ ID NO: 10264 - DNA, 20 bp, synthetic construct
  misc_feature 1..20: note = chemically synthesized
  source 1..20: mol_type = other DNA
gaaatcaaaatgggaaacaa

SEQ ID NO: 10265 - DNA, 20 bp, synthetic construct
  misc_feature 1..20: note = chemically synthesized
  source 1..20: mol_type = other DNA
ggaaacaaaagcacaaacaa

SEQ ID NO: 10266 - DNA, 20 bp, synthetic construct
  misc_feature 1..20: note = chemically synthesized
  source 1..20: mol_type = other DNA
aatggccttatttacacaaa

SEQ ID NO: 10267 - DNA, 20 bp, synthetic construct
  misc_feature 1..20: note = chemically synthesized
  source 1..20: mol_type = other DNA
tacacaaaaagtctgatttt

SEQ ID NO: 10268 - DNA, 20 bp, synthetic construct
  misc_feature 1..20: note = chemically synthesized
  source 1..20: mol_type = other DNA
tttaagatatatgacatttc

SEQ ID NO: 10269 - DNA, 20 bp, synthetic construct
  misc_feature 1..20: note = chemically synthesized
  source 1..20: mol_type = other DNA
ttaagatatatgacatttca

SEQ ID NO: 10270 - DNA, 20 bp, synthetic construct
  misc_feature 1..20: note = chemically synthesized
  source 1..20: mol_type = other DNA
tatatgacatttcaaggttt

SEQ ID NO: 10271 - DNA, 20 bp, synthetic construct
  misc_feature 1..20: note = chemically synthesized
  source 1..20: mol_type = other DNA
atgacatttcaaggtttcag

SEQ ID NO: 10272 - DNA, 20 bp, synthetic construct
  misc_feature 1..20: note = chemically synthesized
  source 1..20: mol_type = other DNA
aggtttcagaagtatgtaat

SEQ ID NO: 10273 - DNA, 20 bp, synthetic construct
  misc_feature 1..20: note = chemically synthesized
  source 1..20: mol_type = other DNA
ggtttcagaagtatgtaatg

SEQ ID NO: 10274 - DNA, 20 bp, synthetic construct
  misc_feature 1..20: note = chemically synthesized
  source 1..20: mol_type = other DNA
aattatatatcttcaattta

SEQ ID NO: 10275 - DNA, 20 bp, synthetic construct
  misc_feature 1..20: note = chemically synthesized
  source 1..20: mol_type = other DNA
atatcttcaatttaaagttt

SEQ ID NO: 10276 - DNA, 20 bp, synthetic construct
  misc_feature 1..20: note = chemically synthesized
  source 1..20: mol_type = other DNA
aaagttttagttaaaacata

SEQ ID NO: 10277 - DNA, 20 bp, synthetic construct
  misc_feature 1..20: note = chemically synthesized
  source 1..20: mol_type = other DNA
cataaagattaacctttcat

SEQ ID NO: 10278 - DNA, 20 bp, synthetic construct
  misc_feature 1..20: note = chemically synthesized
  source 1..20: mol_type = other DNA
aagattaacctttcattagc

SEQ ID NO: 10279 - DNA, 20 bp, synthetic construct
  misc_feature 1..20: note = chemically synthesized
  source 1..20: mol_type = other DNA
acctttcattagcaagctgt

SEQ ID NO: 10280 - DNA, 20 bp, synthetic construct
  misc_feature 1..20: note = chemically synthesized
  source 1..20: mol_type = other DNA
caagctgttagttatcacca

SEQ ID NO: 10281 - DNA, 20 bp, synthetic construct
  misc_feature 1..20: note = chemically synthesized
  source 1..20: mol_type = other DNA
gttatcaccaaagcttttca

SEQ ID NO: 10282 - DNA, 20 bp, synthetic construct
  misc_feature 1..20: note = chemically synthesized
  source 1..20: mol_type = other DNA
caccaaagcttttcatggat

SEQ ID NO: 10283 - DNA, 20 bp, synthetic construct
  misc_feature 1..20: note = chemically synthesized
  source 1..20: mol_type = other DNA
accaaagcttttcatggatt

SEQ ID NO: 10284 - DNA, 20 bp, synthetic construct
  misc_feature 1..20: note = chemically synthesized
  source 1..20: mol_type = other DNA
tgtctctatgtcaaacatct

SEQ ID NO: 10285 - DNA, 20 bp, synthetic construct
  misc_feature 1..20: note = chemically synthesized
  source 1..20: mol_type = other DNA
tctctatgtcaaacatcttg

SEQ ID NO: 10286 - DNA, 20 bp, synthetic construct
  misc_feature 1..20: note = chemically synthesized
  source 1..20: mol_type = other DNA
aacatcttggagttgatatt

SEQ ID NO: 10287 - DNA, 20 bp, synthetic construct
  misc_feature 1..20: note = chemically synthesized
  source 1..20: mol_type = other DNA
acatcttggagttgatattt

SEQ ID NO: 10288 - DNA, 20 bp, synthetic construct
  misc_feature 1..20: note = chemically synthesized
  source 1..20: mol_type = other DNA
catcttggagttgatatttg

SEQ ID NO: 10289 - DNA, 20 bp, synthetic construct
  misc_feature 1..20: note = chemically synthesized
  source 1..20: mol_type = other DNA
atttggggaaacacaatact

SEQ ID NO: 10290 - DNA, 20 bp, synthetic construct
  misc_feature 1..20: note = chemically synthesized
  source 1..20: mol_type = other DNA
gggaaacacaatactcagtt

SEQ ID NO: 10291 - DNA, 20 bp, synthetic construct
  misc_feature 1..20: note = chemically synthesized
  source 1..20: mol_type = other DNA
caatactcagttgagttccc

SEQ ID NO: 10292 - DNA, 20 bp, synthetic construct
  misc_feature 1..20: note = chemically synthesized
  source 1..20: mol_type = other DNA
aatactcagttgagttccct

SEQ ID NO: 10293 - DNA, 20 bp, synthetic construct
  misc_feature 1..20: note = chemically synthesized
  source 1..20: mol_type = other DNA
atactcagttgagttcccta

SEQ ID NO: 10294 - DNA, 20 bp, synthetic construct
  misc_feature 1..20: note = chemically synthesized
  source 1..20: mol_type = other DNA
tactcagttgagttccctag

SEQ ID NO: 10295 - DNA, 20 bp, synthetic construct
  misc_feature 1..20: note = chemically synthesized
  source 1..20: mol_type = other DNA
ctcagttgagttccctaggg

SEQ ID NO: 10296 - DNA, 20 bp, synthetic construct
  misc_feature 1..20: note = chemically synthesized
  source 1..20: mol_type = other DNA
ttgagttccctaggggagaa

SEQ ID NO: 10297 - DNA, 20 bp, synthetic construct
  misc_feature 1..20: note = chemically synthesized
  source 1..20: mol_type = other DNA
gttccctaggggagaaaagc

SEQ ID NO: 10298 - DNA, 20 bp, synthetic construct
  misc_feature 1..20: note = chemically synthesized
  source 1..20: mol_type = other DNA
taggggagaaaagcaagctt

SEQ ID NO: 10299 - DNA, 20 bp, synthetic construct
  misc_feature 1..20: note = chemically synthesized
  source 1..20: mol_type = other DNA
caagcttaagaattgacata

SEQ ID NO: 10300 - DNA, 20 bp, synthetic construct
  misc_feature 1..20: note = chemically synthesized
  source 1..20: mol_type = other DNA
agcttaagaattgacataaa

SEQ ID NO: 10301 - DNA, 20 bp, synthetic construct
  misc_feature 1..20: note = chemically synthesized
  source 1..20: mol_type = other DNA
ttaagaattgacataaagag

SEQ ID NO: 10302 - DNA, 20 bp, synthetic construct
  misc_feature 1..20: note = chemically synthesized
  source 1..20: mol_type = other DNA
taagaattgacataaagagt

SEQ ID NO: 10303 - DNA, 20 bp, synthetic construct
  misc_feature 1..20: note = chemically synthesized
  source 1..20: mol_type = other DNA
gaattgacataaagagtagg

SEQ ID NO: 10304 - DNA, 20 bp, synthetic construct
  misc_feature 1..20: note = chemically synthesized
  source 1..20: mol_type = other DNA
tgacataaagagtaggaagt

SEQ ID NO: 10305 - DNA, 20 bp, synthetic construct
  misc_feature 1..20: note = chemically synthesized
  source 1..20: mol_type = other DNA
actttgttttttcacaacta

SEQ ID NO: 10306 - DNA, 20 bp, synthetic construct
  misc_feature 1..20: note = chemically synthesized
  source 1..20: mol_type = other DNA
cagtgactttatgtatttcc

SEQ ID NO: 10307 - DNA, 20 bp, synthetic construct
  misc_feature 1..20: note = chemically synthesized
  source 1..20: mol_type = other DNA
gtgactttatgtatttccca

SEQ ID NO: 10308 - DNA, 20 bp, synthetic construct
  misc_feature 1..20: note = chemically synthesized
  source 1..20: mol_type = other DNA
tgactttatgtatttcccag

SEQ ID NO: 10309 - DNA, 20 bp, synthetic construct
  misc_feature 1..20: note = chemically synthesized
  source 1..20: mol_type = other DNA
ctttatgtatttcccagagg

SEQ ID NO: 10310 - DNA, 20 bp, synthetic construct
  misc_feature 1..20: note = chemically synthesized
  source 1..20: mol_type = other DNA
tttatgtatttcccagagga

SEQ ID NO: 10311 - DNA, 20 bp, synthetic construct
  misc_feature 1..20: note = chemically synthesized
  source 1..20: mol_type = other DNA
atttcccagaggaaggcata

SEQ ID NO: 10312 - DNA, 20 bp, synthetic construct
  misc_feature 1..20: note = chemically synthesized
  source 1..20: mol_type = other DNA
tttcccagaggaaggcatac

SEQ ID NO: 10313 - DNA, 20 bp, synthetic construct
  misc_feature 1..20: note = chemically synthesized
  source 1..20: mol_type = other DNA
ttcccagaggaaggcataca

SEQ ID NO: 10314 - DNA, 20 bp, synthetic construct
  misc_feature 1..20: note = chemically synthesized
  source 1..20: mol_type = other DNA
ccagaggaaggcatacaggg

SEQ ID NO: 10315 - DNA, 20 bp, synthetic construct
  misc_feature 1..20: note = chemically synthesized
  source 1..20: mol_type = other DNA
agggaagaaattatcccatt

SEQ ID NO: 10316 - DNA, 20 bp, synthetic construct
  misc_feature 1..20: note = chemically synthesized
  source 1..20: mol_type = other DNA
aattatcccatttggacaaa

SEQ ID NO: 10317 - DNA, 20 bp, synthetic construct
  misc_feature 1..20: note = chemically synthesized
  source 1..20: mol_type = other DNA
ggacaaacagcatgttctca

SEQ ID NO: 10318 - DNA, 20 bp, synthetic construct
  misc_feature 1..20: note = chemically synthesized
  source 1..20: mol_type = other DNA
gacaaacagcatgttctcac

SEQ ID NO: 10319 - DNA, 20 bp, synthetic construct
  misc_feature 1..20: note = chemically synthesized
  source 1..20: mol_type = other DNA
aaacagcatgttctcacagg

SEQ ID NO: 10320 - DNA, 20 bp, synthetic construct
  misc_feature 1..20: note = chemically synthesized
  source 1..20: mol_type = other DNA
acacttacttgtcaactttc

SEQ ID NO: 10321 - DNA, 20 bp, synthetic construct
  misc_feature 1..20: note = chemically synthesized
  source 1..20: mol_type = other DNA
caactttctagaatcaaatc

SEQ ID NO: 10322 - DNA, 20 bp, synthetic construct
  misc_feature 1..20: note = chemically synthesized
  source 1..20: mol_type = other DNA
ctttctagaatcaaatctag

SEQ ID NO: 10323 - DNA, 20 bp, synthetic construct
  misc_feature 1..20: note = chemically synthesized
  source 1..20: mol_type = other DNA
gaatcaaatctagtagctga

SEQ ID NO: 10324 - DNA, 20 bp, synthetic construct
  misc_feature 1..20: note = chemically synthesized
  source 1..20: mol_type = other DNA
aatctagtagctgacagtac

SEQ ID NO: 10325 - DNA, 20 bp, synthetic construct
  misc_feature 1..20: note = chemically synthesized
  source 1..20: mol_type = other DNA
atctagtagctgacagtacc

SEQ ID NO: 10326 - DNA, 20 bp, synthetic construct
  misc_feature 1..20: note = chemically synthesized
  source 1..20: mol_type = other DNA
gtagctgacagtaccaggat

SEQ ID NO: 10327 - DNA, 20 bp, synthetic construct
  misc_feature 1..20: note = chemically synthesized
  source 1..20: mol_type = other DNA
tagctgacagtaccaggatc

SEQ ID NO: 10328 - DNA, 20 bp, synthetic construct
  misc_feature 1..20: note = chemically synthesized
  source 1..20: mol_type = other DNA
agctgacagtaccaggatca

SEQ ID NO: 10329 - DNA, 20 bp, synthetic construct
  misc_feature 1..20: note = chemically synthesized
  source 1..20: mol_type = other DNA
gctgacagtaccaggatcag

SEQ ID NO: 10330 - DNA, 20 bp, synthetic construct
  misc_feature 1..20: note = chemically synthesized
  source 1..20: mol_type = other DNA
ggatcaggggtgccaaccct

SEQ ID NO: 10331 - DNA, 20 bp, synthetic construct
  misc_feature 1..20: note = chemically synthesized
  source 1..20: mol_type = other DNA
gtgccaaccctaagcacccc

SEQ ID NO: 10332 - DNA, 20 bp, synthetic construct
  misc_feature 1..20: note = chemically synthesized
  source 1..20: mol_type = other DNA
caaccctaagcacccccaga

SEQ ID NO: 10333 - DNA, 20 bp, synthetic construct
  misc_feature 1..20: note = chemically synthesized
  source 1..20: mol_type = other DNA
agcacccccagaaagctgac

SEQ ID NO: 10334 - DNA, 20 bp, synthetic construct
  misc_feature 1..20: note = chemically synthesized
  source 1..20: mol_type = other DNA
cagaaagctgactggccctg

SEQ ID NO: 10335 - DNA, 20 bp, synthetic construct
  misc_feature 1..20: note = chemically synthesized
  source 1..20: mol_type = other DNA
tggccctgtggttcccactc

SEQ ID NO: 10336 - DNA, 20 bp, synthetic construct
  misc_feature 1..20: note = chemically synthesized
  source 1..20: mol_type = other DNA
tcccactccagacatgatgt

SEQ ID NO: 10337 - DNA, 20 bp, synthetic construct
  misc_feature 1..20: note = chemically synthesized
  source 1..20: mol_type = other DNA
catgatgtcagctgtgaaat

SEQ ID NO: 10338 - DNA, 20 bp, synthetic construct
  misc_feature 1..20: note = chemically synthesized
  source 1..20: mol_type = other DNA
aataacgataaaaaaaaata

SEQ ID NO: 10339 - DNA, 20 bp, synthetic construct
  misc_feature 1..20: note = chemically synthesized
  source 1..20: mol_type = other DNA
taacgataaaaaaaaataca

SEQ ID NO: 10340 - DNA, 20 bp, synthetic construct
  misc_feature 1..20: note = chemically synthesized
  source 1..20: mol_type = other DNA
aacgataaaaaaaaatacag

SEQ ID NO: 10341 - DNA, 20 bp, synthetic construct
  misc_feature 1..20: note = chemically synthesized
  source 1..20: mol_type = other DNA
aaaaaatacagaggttaaac

SEQ ID NO: 10342 - DNA, 20 bp, synthetic construct
  misc_feature 1..20: note = chemically synthesized
  source 1..20: mol_type = other DNA
atacagaggttaaactagca

SEQ ID NO: 10343 - DNA, 20 bp, synthetic construct
  misc_feature 1..20: note = chemically synthesized
  source 1..20: mol_type = other DNA
agaggttaaactagcaaagt

SEQ ID NO: 10344 - DNA, 20 bp, synthetic construct
  misc_feature 1..20: note = chemically synthesized
  source 1..20: mol_type = other DNA
ttaaactagcaaagtgagta

SEQ ID NO: 10345 - DNA, 20 bp, synthetic construct
  misc_feature 1..20: note = chemically synthesized
  source 1..20: mol_type = other DNA
ctagcaaagtgagtaaagtc

SEQ ID NO: 10346 - DNA, 20 bp, synthetic construct
  misc_feature 1..20: note = chemically synthesized
  source 1..20: mol_type = other DNA
tagcaaagtgagtaaagtca

SEQ ID NO: 10347 - DNA, 20 bp, synthetic construct
  misc_feature 1..20: note = chemically synthesized
  source 1..20: mol_type = other DNA
agcaaagtgagtaaagtcaa

SEQ ID NO: 10348 - DNA, 20 bp, synthetic construct
  misc_feature 1..20: note = chemically synthesized
  source 1..20: mol_type = other DNA
gtgagtaaagtcaagggata

SEQ ID NO: 10349 - DNA, 20 bp, synthetic construct
  misc_feature 1..20: note = chemically synthesized
  source 1..20: mol_type = other DNA
aagggataaagaaaatttgt

SEQ ID NO: 10350 - DNA, 20 bp, synthetic construct
  misc_feature 1..20: note = chemically synthesized
  source 1..20: mol_type = other DNA
aatttgttggaaaactcaca

SEQ ID NO: 10351 - DNA, 20 bp, synthetic construct
  misc_feature 1..20: note = chemically synthesized
  source 1..20: mol_type = other DNA
ttgttggaaaactcacaaag

SEQ ID NO: 10352 - DNA, 20 bp, synthetic construct
  misc_feature 1..20: note = chemically synthesized
  source 1..20: mol_type = other DNA
tgttggaaaactcacaaagc

SEQ ID NO: 10353 - DNA, 20 bp, synthetic construct
  misc_feature 1..20: note = chemically synthesized
  source 1..20: mol_type = other DNA
aactcacaaagcaggacata

SEQ ID NO: 10354 - DNA, 20 bp, synthetic construct
  misc_feature 1..20: note = chemically synthesized
  source 1..20: mol_type = other DNA
cacaaagcaggacataaagc

SEQ ID NO: 10355 - DNA, 20 bp, synthetic construct
  misc_feature 1..20: note = chemically synthesized
  source 1..20: mol_type = other DNA
acaaagcaggacataaagca

SEQ ID NO: 10356 - DNA, 20 bp, synthetic construct
  misc_feature 1..20: note = chemically synthesized
  source 1..20: mol_type = other DNA
aggacataaagcaaggccat

SEQ ID NO: 10357 - DNA, 20 bp, synthetic construct
  misc_feature 1..20: note = chemically synthesized
  source 1..20: mol_type = other DNA
ggccattagatatatctcat

SEQ ID NO: 10358 - DNA, 20 bp, synthetic construct
  misc_feature 1..20: note = chemically synthesized
  source 1..20: mol_type = other DNA
tatctcattagtgtgacatc

SEQ ID NO: 10359 - DNA, 20 bp, synthetic construct
  misc_feature 1..20: note = chemically synthesized
  source 1..20: mol_type = other DNA
atctcattagtgtgacatct

SEQ ID NO: 10360 - DNA, 20 bp, synthetic construct
  misc_feature 1..20: note = chemically synthesized
  source 1..20: mol_type = other DNA
ctcattagtgtgacatctgg

SEQ ID NO: 10361 - DNA, 20 bp, synthetic construct
  misc_feature 1..20: note = chemically synthesized
  source 1..20: mol_type = other DNA
tcattagtgtgacatctggg

SEQ ID NO: 10362 - DNA, 20 bp, synthetic construct
  misc_feature 1..20: note = chemically synthesized
  source 1..20: mol_type = other DNA
gtgtgacatctgggaggaca

SEQ ID NO: 10363 - DNA, 20 bp, synthetic construct
  misc_feature 1..20: note = chemically synthesized
  source 1..20: mol_type = other DNA
ccaaaccctttcttctatat

SEQ ID NO: 10364 - DNA, 20 bp, synthetic construct
  misc_feature 1..20: note = chemically synthesized
  source 1..20: mol_type = other DNA
aaccctttcttctatataag

SEQ ID NO: 10365 - DNA, 20 bp, synthetic construct
  misc_feature 1..20: note = chemically synthesized
  source 1..20: mol_type = other DNA
ctttcttctatataagtggt

SEQ ID NO: 10366 - DNA, 20 bp, synthetic construct
  misc_feature 1..20: note = chemically synthesized
  source 1..20: mol_type = other DNA
atataagtggtgagatgatg

SEQ ID NO: 10367 - DNA, 20 bp, synthetic construct
  misc_feature 1..20: note = chemically synthesized
  source 1..20: mol_type = other DNA
tataagtggtgagatgatga

SEQ ID NO: 10368 - DNA, 20 bp, synthetic construct
  misc_feature 1..20: note = chemically synthesized
  source 1..20: mol_type = other DNA
ggtgagatgatgaaggttgt

SEQ ID NO: 10369 - DNA, 20 bp, synthetic construct
  misc_feature 1..20: note = chemically synthesized
  source 1..20: mol_type = other DNA
tgagatgatgaaggttgtaa

SEQ ID NO: 10370 - DNA, 20 bp, synthetic construct
  misc_feature 1..20: note = chemically synthesized
  source 1..20: mol_type = other DNA
gagatgatgaaggttgtaag

SEQ ID NO: 10371 - DNA, 20 bp, synthetic construct
  misc_feature 1..20: note = chemically synthesized
  source 1..20: mol_type = other DNA
agatgatgaaggttgtaaga

SEQ ID NO: 10372 - DNA, 20 bp, synthetic construct
  misc_feature 1..20: note = chemically synthesized
  source 1..20: mol_type = other DNA
agagggcttctgcccccttg

SEQ ID NO: 10373 - DNA, 20 bp, synthetic construct
  misc_feature 1..20: note = chemically synthesized
  source 1..20: mol_type = other DNA
ttctgcccccttgaagactt

SEQ ID NO: 10374 - DNA, 20 bp, synthetic construct
  misc_feature 1..20: note = chemically synthesized
  source 1..20: mol_type = other DNA
cccttgaagacttcagatgc

SEQ ID NO: 10375 - DNA, 20 bp, synthetic construct
  misc_feature 1..20: note = chemically synthesized
  source 1..20: mol_type = other DNA
ccttgaagacttcagatgct

SEQ ID NO: 10376 - DNA, 20 bp, synthetic construct
  misc_feature 1..20: note = chemically synthesized
  source 1..20: mol_type = other DNA
cttgaagacttcagatgctg

SEQ ID NO: 10377 - DNA, 20 bp, synthetic construct
  misc_feature 1..20: note = chemically synthesized
  source 1..20: mol_type = other DNA
aagacttcagatgctgggga

SEQ ID NO: 10378 - DNA, 20 bp, synthetic construct
  misc_feature 1..20: note = chemically synthesized
  source 1..20: mol_type = other DNA
agacttcagatgctggggaa

SEQ ID NO: 10379 - DNA, 20 bp, synthetic construct
  misc_feature 1..20: note = chemically synthesized
  source 1..20: mol_type = other DNA
ttcagatgctggggaaagga

SEQ ID NO: 10380 - DNA, 20 bp, synthetic construct
  misc_feature 1..20: note = chemically synthesized
  source 1..20: mol_type = other DNA
atgctggggaaaggatagat

SEQ ID NO: 10381 - DNA, 20 bp, synthetic construct
  misc_feature 1..20: note = chemically synthesized
  source 1..20: mol_type = other DNA
gggaaaggatagataagaat

SEQ ID NO: 10382 - DNA, 20 bp, synthetic construct
  misc_feature 1..20: note = chemically synthesized
  source 1..20: mol_type = other DNA
ggaaaggatagataagaata

SEQ ID NO: 10383 - DNA, 20 bp, synthetic construct
  misc_feature 1..20: note = chemically synthesized
  source 1..20: mol_type = other DNA
agataagaataaggatgaac

SEQ ID NO: 10384 - DNA, 20 bp, synthetic construct
  misc_feature 1..20: note = chemically synthesized
  source 1..20: mol_type = other DNA
gataagaataaggatgaacc

SEQ ID NO: 10385 - DNA, 20 bp, synthetic construct
  misc_feature 1..20: note = chemically synthesized
  source 1..20: mol_type = other DNA
ataaggatgaaccaggcttt

SEQ ID NO: 10386 - DNA, 20 bp, synthetic construct
  misc_feature 1..20: note = chemically synthesized
  source 1..20: mol_type = other DNA
aaggatgaaccaggcttttg

SEQ ID NO: 10387 - DNA, 20 bp, synthetic construct
  misc_feature 1..20: note = chemically synthesized
  source 1..20: mol_type = other DNA
tgaaccaggcttttggagcc

SEQ ID NO: 10388 - DNA, 20 bp, synthetic construct
  misc_feature 1..20: note = chemically synthesized
  source 1..20: mol_type = other DNA
gaaccaggcttttggagcct

SEQ ID NO: 10389 - DNA, 20 bp, synthetic construct
  misc_feature 1..20: note = chemically synthesized
  source 1..20: mol_type = other DNA
ggagcctgggaaataatgac

SEQ ID NO: 10390 - DNA, 20 bp, synthetic construct
  misc_feature 1..20: note = chemically synthesized
  source 1..20: mol_type = other DNA
aatgactagcgataaacctg

SEQ ID NO: 10391 - DNA, 20 bp, synthetic construct
  misc_feature 1..20: note = chemically synthesized
  source 1..20: mol_type = other DNA
atgactagcgataaacctga

SEQ ID NO: 10392 - DNA, 20 bp, synthetic construct
  misc_feature 1..20: note = chemically synthesized
  source 1..20: mol_type = other DNA
tgactagcgataaacctgaa

SEQ ID NO: 10393 - DNA, 20 bp, synthetic construct
  misc_feature 1..20: note = chemically synthesized
  source 1..20: mol_type = other DNA
ctagcgataaacctgaaggg

SEQ ID NO: 10394 - DNA, 20 bp, synthetic construct
  misc_feature 1..20: note = chemically synthesized
  source 1..20: mol_type = other DNA
gataaacctgaagggaagtt

SEQ ID NO: 10395 - DNA, 20 bp, synthetic construct
  misc_feature 1..20: note = chemically synthesized
  source 1..20: mol_type = other DNA
gaagttaagtatacgatccc

SEQ ID NO: 10396 - DNA, 20 bp, synthetic construct
  misc_feature 1..20: note = chemically synthesized
  source 1..20: mol_type = other DNA
tacgatccccagataatact

SEQ ID NO: 10397 - DNA, 20 bp, synthetic construct
  misc_feature 1..20: note = chemically synthesized
  source 1..20: mol_type = other DNA
acgatccccagataatacta

SEQ ID NO: 10398 - DNA, 20 bp, synthetic construct
  misc_feature 1..20: note = chemically synthesized
  source 1..20: mol_type = other DNA
gatccccagataatactaag

SEQ ID NO: 10399 - DNA, 20 bp, synthetic construct
  misc_feature 1..20: note = chemically synthesized
  source 1..20: mol_type = other DNA
cccagataatactaaggaga

SEQ ID NO: 10400 - DNA, 20 bp, synthetic construct
  misc_feature 1..20: note = chemically synthesized
  source 1..20: mol_type = other DNA
ccagataatactaaggagaa

SEQ ID NO: 10401 - DNA, 20 bp, synthetic construct
  misc_feature 1..20: note = chemically synthesized
  source 1..20: mol_type = other DNA
agaaaggcaatgtgattctg

SEQ ID NO: 10402 - DNA, 20 bp, synthetic construct
  misc_feature 1..20: note = chemically synthesized
  source 1..20: mol_type = other DNA
atgtgattctgcagccattg

SEQ ID NO: 10403 - DNA, 20 bp, synthetic construct
  misc_feature 1..20: note = chemically synthesized
  source 1..20: mol_type = other DNA
gattctgcagccattgtagc

SEQ ID NO: 10404 - DNA, 20 bp, synthetic construct
  misc_feature 1..20: note = chemically synthesized
  source 1..20: mol_type = other DNA
ttctgcagccattgtagcca

SEQ ID NO: 10405 - DNA, 20 bp, synthetic construct
  misc_feature 1..20: note = chemically synthesized
  source 1..20: mol_type = other DNA
ccattgtagccagagataat

SEQ ID NO: 10406 - DNA, 20 bp, synthetic construct
  misc_feature 1..20: note = chemically synthesized
  source 1..20: mol_type = other DNA
gccagagataataagccctt

SEQ ID NO: 10407 - DNA, 20 bp, synthetic construct
  misc_feature 1..20: note = chemically synthesized
  source 1..20: mol_type = other DNA
ccagagataataagcccttg

SEQ ID NO: 10408 - DNA, 20 bp, synthetic construct
  misc_feature 1..20: note = chemically synthesized
  source 1..20: mol_type = other DNA
gagataataagcccttgagg

SEQ ID NO: 10409 - DNA, 20 bp, synthetic construct
  misc_feature 1..20: note = chemically synthesized
  source 1..20: mol_type = other DNA
agataataagcccttgagga

SEQ ID NO: 10410 - DNA, 20 bp, synthetic construct
  misc_feature 1..20: note = chemically synthesized
  source 1..20: mol_type = other DNA
gataataagcccttgaggaa

SEQ ID NO: 10411 - DNA, 20 bp, synthetic construct
  misc_feature 1..20: note = chemically synthesized
  source 1..20: mol_type = other DNA
ataataagcccttgaggaag

SEQ ID NO: 10412 - DNA, 20 bp, synthetic construct
  misc_feature 1..20: note = chemically synthesized
  source 1..20: mol_type = other DNA
taagcccttgaggaaggggc

SEQ ID NO: 10413 - DNA, 20 bp, synthetic construct
  misc_feature 1..20: note = chemically synthesized
  source 1..20: mol_type = other DNA
aagcccttgaggaaggggcc

SEQ ID NO: 10414 - DNA, 20 bp, synthetic construct
  misc_feature 1..20: note = chemically synthesized
  source 1..20: mol_type = other DNA
agcccttgaggaaggggcca

SEQ ID NO: 10415 - DNA, 20 bp, synthetic construct
  misc_feature 1..20: note = chemically synthesized
  source 1..20: mol_type = other DNA
gcccttgaggaaggggccag

SEQ ID NO: 10416 - DNA, 20 bp, synthetic construct
  misc_feature 1..20: note = chemically synthesized
  source 1..20: mol_type = other DNA
ggggccaggggaatttttct

SEQ ID NO: 10417 - DNA, 20 bp, synthetic construct
  misc_feature 1..20: note = chemically synthesized
  source 1..20: mol_type = other DNA
gggccaggggaatttttcta

SEQ ID NO: 10418 - DNA, 20 bp, synthetic construct
  misc_feature 1..20: note = chemically synthesized
  source 1..20: mol_type = other DNA
caggggaatttttctaagga

SEQ ID NO: 10419 - DNA, 20 bp, synthetic construct
  misc_feature 1..20: note = chemically synthesized
  source 1..20: mol_type = other DNA
ggaatttttctaaggataga

SEQ ID NO: 10420 - DNA, 20 bp, synthetic construct
  misc_feature 1..20: note = chemically synthesized
  source 1..20: mol_type = other DNA
aaggatagacagtattaatg

SEQ ID NO: 10421 - DNA, 20 bp, synthetic construct
  misc_feature 1..20: note = chemically synthesized
  source 1..20: mol_type = other DNA
ttctgctattaaactctcat

SEQ ID NO: 10422 - DNA, 20 bp, synthetic construct
  misc_feature 1..20: note = chemically synthesized
  source 1..20: mol_type = other DNA
aaactctcattggcttctaa

SEQ ID NO: 10423 - DNA, 20 bp, synthetic construct
  misc_feature 1..20: note = chemically synthesized
  source 1..20: mol_type = other DNA
aactctcattggcttctaaa

SEQ ID NO: 10424 - DNA, 20 bp, synthetic construct
  misc_feature 1..20: note = chemically synthesized
  source 1..20: mol_type = other DNA
ctctcattggcttctaaaag

SEQ ID NO: 10425 - DNA, 20 bp, synthetic construct
  misc_feature 1..20: note = chemically synthesized
  source 1..20: mol_type = other DNA
ttggcttctaaaaggagttt

SEQ ID NO: 10426 - DNA, 20 bp, synthetic construct
  misc_feature 1..20: note = chemically synthesized
  source 1..20: mol_type = other DNA
cttctaaaaggagtttcggt

SEQ ID NO: 10427 - DNA, 20 bp, synthetic construct
  misc_feature 1..20: note = chemically synthesized
  source 1..20: mol_type = other DNA
gtttcggtgagtgatttgct

SEQ ID NO: 10428 - DNA, 20 bp, synthetic construct
  misc_feature 1..20: note = chemically synthesized
  source 1..20: mol_type = other DNA
gctgagatgttgcattttca

SEQ ID NO: 10429 - DNA, 20 bp, synthetic construct
  misc_feature 1..20: note = chemically synthesized
  source 1..20: mol_type = other DNA
attttcatggctgctgcctt

SEQ ID NO: 10430 - DNA, 20 bp, synthetic construct
  misc_feature 1..20: note = chemically synthesized
  source 1..20: mol_type = other DNA
ttttcatggctgctgccttt

SEQ ID NO: 10431 - DNA, 20 bp, synthetic construct
  misc_feature 1..20: note = chemically synthesized
  source 1..20: mol_type = other DNA
gcctttaggtattattgcaa

SEQ ID NO: 10432 - DNA, 20 bp, synthetic construct
  misc_feature 1..20: note = chemically synthesized
  source 1..20: mol_type = other DNA
taggtattattgcaacagtt

SEQ ID NO: 10433 - DNA, 20 bp, synthetic construct
  misc_feature 1..20: note = chemically synthesized
  source 1..20: mol_type = other DNA
ttggaattttgaaattaaaa

SEQ ID NO: 10434 - DNA, 20 bp, synthetic construct
  misc_feature 1..20: note = chemically synthesized
  source 1..20: mol_type = other DNA
ttaaaacagttctgtaaaac

SEQ ID NO: 10435 - DNA, 20 bp, synthetic construct
  misc_feature 1..20: note = chemically synthesized
  source 1..20: mol_type = other DNA
acagttctgtaaaaccagtt

SEQ ID NO: 10436 - DNA, 20 bp, synthetic construct
  misc_feature 1..20: note = chemically synthesized
  source 1..20: mol_type = other DNA
aaaaccagtttagttttgta

SEQ ID NO: 10437 - DNA, 20 bp, synthetic construct
  misc_feature 1..20: note = chemically synthesized
  source 1..20: mol_type = other DNA
tttgtaaagtgtatgcatca

SEQ ID NO: 10438 - DNA, 20 bp, synthetic construct
  misc_feature 1..20: note = chemically synthesized
  source 1..20: mol_type = other DNA
catcaaagatgtccttcatt

SEQ ID NO: 10439 - DNA, 20 bp, synthetic construct
  misc_feature 1..20: note = chemically synthesized
  source 1..20: mol_type = other DNA
tccttcattcagacattact

SEQ ID NO: 10440 - DNA, 20 bp, synthetic construct
  misc_feature 1..20: note = chemically synthesized
  source 1..20: mol_type = other DNA
acattactgagttacaacta

SEQ ID NO: 10441 - DNA, 20 bp, synthetic construct
  misc_feature 1..20: note = chemically synthesized
  source 1..20: mol_type = other DNA
ctgagttacaactatggtgc

SEQ ID NO: 10442 - DNA, 20 bp, synthetic construct
  misc_feature 1..20: note = chemically synthesized
  source 1..20: mol_type = other DNA
tgagttacaactatggtgcc

SEQ ID NO: 10443 - DNA, 20 bp, synthetic construct
  misc_feature 1..20: note = chemically synthesized
  source 1..20: mol_type = other DNA
tatggtgccaggtactgtgt

SEQ ID NO: 10444 - DNA, 20 bp, synthetic construct
  misc_feature 1..20: note = chemically synthesized
  source 1..20: mol_type = other DNA
atggtgccaggtactgtgtc

SEQ ID NO: 10445 - DNA, 20 bp, synthetic construct
  misc_feature 1..20: note = chemically synthesized
  source 1..20: mol_type = other DNA
tggtgccaggtactgtgtca

SEQ ID NO: 10446 - DNA, 20 bp, synthetic construct
  misc_feature 1..20: note = chemically synthesized
  source 1..20: mol_type = other DNA
caggtactgtgtcagggtac

SEQ ID NO: 10447 - DNA, 20 bp, synthetic construct
  misc_feature 1..20: note = chemically synthesized
  source 1..20: mol_type = other DNA
aggtactgtgtcagggtact

SEQ ID NO: 10448 - DNA, 20 bp, synthetic construct
  misc_feature 1..20: note = chemically synthesized
  source 1..20: mol_type = other DNA
ggtactgtgtcagggtacta

SEQ ID NO: 10449 - DNA, 20 bp, synthetic construct
  misc_feature 1..20: note = chemically synthesized
  source 1..20: mol_type = other DNA
gtactgtgtcagggtactag

SEQ ID NO: 10450 - DNA, 20 bp, synthetic construct
  misc_feature 1..20: note = chemically synthesized
  source 1..20: mol_type = other DNA
gtgtcagggtactaggggta

SEQ ID NO: 10451 - DNA, 20 bp, synthetic construct
  misc_feature 1..20: note = chemically synthesized
  source 1..20: mol_type = other DNA
tgtcagggtactaggggtat

SEQ ID NO: 10452 - DNA, 20 bp, synthetic construct
  misc_feature 1..20: note = chemically synthesized
  source 1..20: mol_type = other DNA
gtcagggtactaggggtatg

SEQ ID NO: 10453 - DNA, 20 bp, synthetic construct
  misc_feature 1..20: note = chemically synthesized
  source 1..20: mol_type = other DNA
ctaggggtatggggataaac

SEQ ID NO: 10454 - DNA, 20 bp, synthetic construct
  misc_feature 1..20: note = chemically synthesized
  source 1..20: mol_type = other DNA
cagactccctctttgatcta

SEQ ID NO: 10455 - DNA, 20 bp, synthetic construct
  misc_feature 1..20: note = chemically synthesized
  source 1..20: mol_type = other DNA
actccctctttgatctaaag

SEQ ID NO: 10456 - DNA, 20 bp, synthetic construct
  misc_feature 1..20: note = chemically synthesized
  source 1..20: mol_type = other DNA
tctttgatctaaagcagcat

SEQ ID NO: 10457 - DNA, 20 bp, synthetic construct
  misc_feature 1..20: note = chemically synthesized
  source 1..20: mol_type = other DNA
ctttgatctaaagcagcatg

SEQ ID NO: 10458 - DNA, 20 bp, synthetic construct
  misc_feature 1..20: note = chemically synthesized
  source 1..20: mol_type = other DNA
gatctaaagcagcatgaggc

SEQ ID NO: 10459 - DNA, 20 bp, synthetic construct
  misc_feature 1..20: note = chemically synthesized
  source 1..20: mol_type = other DNA
atctaaagcagcatgaggcc

SEQ ID NO: 10460 - DNA, 20 bp, synthetic construct
  misc_feature 1..20: note = chemically synthesized
  source 1..20: mol_type = other DNA
aaagcagcatgaggccaggt

SEQ ID NO: 10461 - DNA, 20 bp, synthetic construct
  misc_feature 1..20: note = chemically synthesized
  source 1..20: mol_type = other DNA
agcagcatgaggccaggtga

SEQ ID NO: 10462 - DNA, 20 bp, synthetic construct
  misc_feature 1..20: note = chemically synthesized
  source 1..20: mol_type = other DNA
gcagcatgaggccaggtgag

SEQ ID NO: 10463 - DNA, 20 bp, synthetic construct
  misc_feature 1..20: note = chemically synthesized
  source 1..20: mol_type = other DNA
taatgtgataaaatgtgcac

SEQ ID NO: 10464 - DNA, 20 bp, synthetic construct
  misc_feature 1..20: note = chemically synthesized
  source 1..20: mol_type = other DNA
aatgtgataaaatgtgcact

SEQ ID NO: 10465 - DNA, 20 bp, synthetic construct
  misc_feature 1..20: note = chemically synthesized
  source 1..20: mol_type = other DNA
taaaatgtgcactaggtact

SEQ ID NO: 10466 - DNA, 20 bp, synthetic construct
  misc_feature 1..20: note = chemically synthesized
  source 1..20: mol_type = other DNA
aaaatgtgcactaggtacta

SEQ ID NO: 10467 - DNA, 20 bp, synthetic construct
  misc_feature 1..20: note = chemically synthesized
  source 1..20: mol_type = other DNA
aaatgtgcactaggtactaa

SEQ ID NO: 10468 - DNA, 20 bp, synthetic construct
  misc_feature 1..20: note = chemically synthesized
  source 1..20: mol_type = other DNA
cactaggtactaagggatca

SEQ ID NO: 10469 - DNA, 20 bp, synthetic construct
  misc_feature 1..20: note = chemically synthesized
  source 1..20: mol_type = other DNA
ctaggtactaagggatcata

SEQ ID NO: 10470 - DNA, 20 bp, synthetic construct
  misc_feature 1..20: note = chemically synthesized
  source 1..20: mol_type = other DNA
gtactaagggatcatagaga

SEQ ID NO: 10471 - DNA, 20 bp, synthetic construct
  misc_feature 1..20: note = chemically synthesized
  source 1..20: mol_type = other DNA
tactaagggatcatagagaa

SEQ ID NO: 10472 - DNA, 20 bp, synthetic construct
  misc_feature 1..20: note = chemically synthesized
  source 1..20: mol_type = other DNA
agagaaaggaacacattaaa

SEQ ID NO: 10473 - DNA, 20 bp, synthetic construct
  misc_feature 1..20: note = chemically synthesized
  source 1..20: mol_type = other DNA
gagaaaggaacacattaaat

SEQ ID NO: 10474 - DNA, 20 bp, synthetic construct
  misc_feature 1..20: note = chemically synthesized
  source 1..20: mol_type = other DNA
agaaaggaacacattaaatg

SEQ ID NO: 10475 - DNA, 20 bp, synthetic construct
  misc_feature 1..20: note = chemically synthesized
  source 1..20: mol_type = other DNA
ttaaatggggaaacaattga

SEQ ID NO: 10476 - DNA, 20 bp, synthetic construct
  misc_feature 1..20: note = chemically synthesized
  source 1..20: mol_type = other DNA
aaatggggaaacaattgata

SEQ ID NO: 10477 - DNA, 20 bp, synthetic construct
  misc_feature 1..20: note = chemically synthesized
  source 1..20: mol_type = other DNA
atggggaaacaattgataga

SEQ ID NO: 10478 - DNA, 20 bp, synthetic construct
  misc_feature 1..20: note = chemically synthesized
  source 1..20: mol_type = other DNA
ggggaaacaattgatagaga

SEQ ID NO: 10479 - DNA, 20 bp, synthetic construct
  misc_feature 1..20: note = chemically synthesized
  source 1..20: mol_type = other DNA
agagagagaatattttcatc

SEQ ID NO: 10480 - DNA, 20 bp, synthetic construct
  misc_feature 1..20: note = chemically synthesized
  source 1..20: mol_type = other DNA
gagagagaatattttcatct

SEQ ID NO: 10481 - DNA, 20 bp, synthetic construct
  misc_feature 1..20: note = chemically synthesized
  source 1..20: mol_type = other DNA
tattttcatctgggtcttaa

SEQ ID NO: 10482 - DNA, 20 bp, synthetic construct
  misc_feature 1..20: note = chemically synthesized
  source 1..20: mol_type = other DNA
tcatctgggtcttaaaagat

SEQ ID NO: 10483 - DNA, 20 bp, synthetic construct
  misc_feature 1..20: note = chemically synthesized
  source 1..20: mol_type = other DNA
tctgggtcttaaaagatgag

SEQ ID NO: 10484 - DNA, 20 bp, synthetic construct
  misc_feature 1..20: note = chemically synthesized
  source 1..20: mol_type = other DNA
ctgggtcttaaaagatgagt

SEQ ID NO: 10485 - DNA, 20 bp, synthetic construct
  misc_feature 1..20: note = chemically synthesized
  source 1..20: mol_type = other DNA
tctctttaaatgtctgatat

SEQ ID NO: 10486 - DNA, 20 bp, synthetic construct
  misc_feature 1..20: note = chemically synthesized
  source 1..20: mol_type = other DNA
ctctttaaatgtctgatata

SEQ ID NO: 10487 - DNA, 20 bp, synthetic construct
  misc_feature 1..20: note = chemically synthesized
  source 1..20: mol_type = other DNA
tctttaaatgtctgatataa

SEQ ID NO: 10488 - DNA, 20 bp, synthetic construct
  misc_feature 1..20: note = chemically synthesized
  source 1..20: mol_type = other DNA
atataagggcattttatgca

SEQ ID NO: 10489 - DNA, 20 bp, synthetic construct
  misc_feature 1..20: note = chemically synthesized
  source 1..20: mol_type = other DNA
ataagggcattttatgcaaa

SEQ ID NO: 10490 - DNA, 20 bp, synthetic construct
  misc_feature 1..20: note = chemically synthesized
  source 1..20: mol_type = other DNA
taagggcattttatgcaaag

SEQ ID NO: 10491 - DNA, 20 bp, synthetic construct
  misc_feature 1..20: note = chemically synthesized
  source 1..20: mol_type = other DNA
caaagaggatcactcgtgca

SEQ ID NO: 10492 - DNA, 20 bp, synthetic construct
  misc_feature 1..20: note = chemically synthesized
  source 1..20: mol_type = other DNA
ggatcactcgtgcaaagact

SEQ ID NO: 10493 - DNA, 20 bp, synthetic construct
  misc_feature 1..20: note = chemically synthesized
  source 1..20: mol_type = other DNA
gtgcaaagactcagatttgc

SEQ ID NO: 10494 - DNA, 20 bp, synthetic construct
  misc_feature 1..20: note = chemically synthesized
  source 1..20: mol_type = other DNA
actcagatttgcaagaacgt

SEQ ID NO: 10495 - DNA, 20 bp, synthetic construct
  misc_feature 1..20: note = chemically synthesized
  source 1..20: mol_type = other DNA
ctcagatttgcaagaacgtg

SEQ ID NO: 10496 - DNA, 20 bp, synthetic construct
  misc_feature 1..20: note = chemically synthesized
  source 1..20: mol_type = other DNA
tgcaagaacgtgaggtattt

SEQ ID NO: 10497 - DNA, 20 bp, synthetic construct
  misc_feature 1..20: note = chemically synthesized
  source 1..20: mol_type = other DNA
gcaagaacgtgaggtatttc

SEQ ID NO: 10498 - DNA, 20 bp, synthetic construct
  misc_feature 1..20: note = chemically synthesized
  source 1..20: mol_type = other DNA
aagaacgtgaggtatttcag

SEQ ID NO: 10499 - DNA, 20 bp, synthetic construct
  misc_feature 1..20: note = chemically synthesized
  source 1..20: mol_type = other DNA
ggtatttcaggagttttgta

SEQ ID NO: 10500 - DNA, 20 bp, synthetic construct
  misc_feature 1..20: note = chemically synthesized
  source 1..20: mol_type = other DNA
gagttttgtatggttccata

SEQ ID NO: 10501 - DNA, 20 bp, synthetic construct
  misc_feature 1..20: note = chemically synthesized
  source 1..20: mol_type = other DNA
ggttccatatggactatgac

SEQ ID NO: 10502 - DNA, 20 bp, synthetic construct
  misc_feature 1..20: note = chemically synthesized
  source 1..20: mol_type = other DNA
ccatatggactatgacaagt

SEQ ID NO: 10503 - DNA, 20 bp, synthetic construct
  misc_feature 1..20: note = chemically synthesized
  source 1..20: mol_type = other DNA
atggactatgacaagtgaga

SEQ ID NO: 10504 - DNA, 20 bp, synthetic construct
  misc_feature 1..20: note = chemically synthesized
  source 1..20: mol_type = other DNA
tggactatgacaagtgagac

SEQ ID NO: 10505 - DNA, 20 bp, synthetic construct
  misc_feature 1..20: note = chemically synthesized
  source 1..20: mol_type = other DNA
gacaagtgagacaggtaaac

SEQ ID NO: 10506 - DNA, 20 bp, synthetic construct
  misc_feature 1..20: note = chemically synthesized
  source 1..20: mol_type = other DNA
acaagtgagacaggtaaact

SEQ ID NO: 10507 - DNA, 20 bp, synthetic construct
  misc_feature 1..20: note = chemically synthesized
  source 1..20: mol_type = other DNA
agtgagacaggtaaactagg

SEQ ID NO: 10508 - DNA, 20 bp, synthetic construct
  misc_feature 1..20: note = chemically synthesized
  source 1..20: mol_type = other DNA
tgagacaggtaaactaggca

SEQ ID NO: 10509 - DNA, 20 bp, synthetic construct
  misc_feature 1..20: note = chemically synthesized
  source 1..20: mol_type = other DNA
acaggtaaactaggcagagc

SEQ ID NO: 10510 - DNA, 20 bp, synthetic construct
  misc_feature 1..20: note = chemically synthesized
  source 1..20: mol_type = other DNA
aactaggcagagctggtcat

SEQ ID NO: 10511 - DNA, 20 bp, synthetic construct
  misc_feature 1..20: note = chemically synthesized
  source 1..20: mol_type = other DNA
gagctggtcatcagataatg

SEQ ID NO: 10512 - DNA, 20 bp, synthetic construct
  misc_feature 1..20: note = chemically synthesized
  source 1..20: mol_type = other DNA
gataatgaagtcattaacct

SEQ ID NO: 10513 - DNA, 20 bp, synthetic construct
  misc_feature 1..20: note = chemically synthesized
  source 1..20: mol_type = other DNA
ataatgaagtcattaaccta

SEQ ID NO: 10514 - DNA, 20 bp, synthetic construct
  misc_feature 1..20: note = chemically synthesized
  source 1..20: mol_type = other DNA
aatgaagtcattaacctaag

SEQ ID NO: 10515 - DNA, 20 bp, synthetic construct
  misc_feature 1..20: note = chemically synthesized
  source 1..20: mol_type = other DNA
agtcattaacctaaggagat

SEQ ID NO: 10516 - DNA, 20 bp, synthetic construct
  misc_feature 1..20: note = chemically synthesized
  source 1..20: mol_type = other DNA
ttggacaataaaatgcaata

SEQ ID NO: 10517 - DNA, 20 bp, synthetic construct
  misc_feature 1..20: note = chemically synthesized
  source 1..20: mol_type = other DNA
ggacaataaaatgcaatatg

SEQ ID NO: 10518 - DNA, 20 bp, synthetic construct
  misc_feature 1..20: note = chemically synthesized
  source 1..20: mol_type = other DNA
gacaataaaatgcaatatgg

SEQ ID NO: 10519 - DNA, 20 bp, synthetic construct
  misc_feature 1..20: note = chemically synthesized
  source 1..20: mol_type = other DNA
aatgcaatatggaggtatcg

SEQ ID NO: 10520 - DNA, 20 bp, synthetic construct
  misc_feature 1..20: note = chemically synthesized
  source 1..20: mol_type = other DNA
aggtatcgaagtataaacat

SEQ ID NO: 10521 - DNA, 20 bp, synthetic construct
  misc_feature 1..20: note = chemically synthesized
  source 1..20: mol_type = other DNA
ggtatcgaagtataaacata

SEQ ID NO: 10522 - DNA, 20 bp, synthetic construct
  misc_feature 1..20: note = chemically synthesized
  source 1..20: mol_type = other DNA
tatcgaagtataaacataag

SEQ ID NO: 10523 - DNA, 20 bp, synthetic construct
  misc_feature 1..20: note = chemically synthesized
  source 1..20: mol_type = other DNA
aacataaggagtaccactga

SEQ ID NO: 10524 - DNA, 20 bp, synthetic construct
  misc_feature 1..20: note = chemically synthesized
  source 1..20: mol_type = other DNA
agtaccactgatggctgatt

SEQ ID NO: 10525 - DNA, 20 bp, synthetic construct
  misc_feature 1..20: note = chemically synthesized
  source 1..20: mol_type = other DNA
gtaccactgatggctgattt

SEQ ID NO: 10526 - DNA, 20 bp, synthetic construct
  misc_feature 1..20: note = chemically synthesized
  source 1..20: mol_type = other DNA
gatggctgatttaggatgcc

SEQ ID NO: 10527 - DNA, 20 bp, synthetic construct
  misc_feature 1..20: note = chemically synthesized
  source 1..20: mol_type = other DNA
ctgatttaggatgcccagtc

SEQ ID NO: 10528 - DNA, 20 bp, synthetic construct
  misc_feature 1..20: note = chemically synthesized
  source 1..20: mol_type = other DNA
gcaacacgctaatgaaatga

SEQ ID NO: 10529 - DNA, 20 bp, synthetic construct
  misc_feature 1..20: note = chemically synthesized
  source 1..20: mol_type = other DNA
acacgctaatgaaatgatag

SEQ ID NO: 10530 - DNA, 20 bp, synthetic construct
  misc_feature 1..20: note = chemically synthesized
  source 1..20: mol_type = other DNA
cacgctaatgaaatgatagt

SEQ ID NO: 10531 - DNA, 20 bp, synthetic construct
  misc_feature 1..20: note = chemically synthesized
  source 1..20: mol_type = other DNA
acgctaatgaaatgatagtg

SEQ ID NO: 10532 - DNA, 20 bp, synthetic construct
  misc_feature 1..20: note = chemically synthesized
  source 1..20: mol_type = other DNA
cgctaatgaaatgatagtgg

SEQ ID NO: 10533 - DNA, 20 bp, synthetic construct
  misc_feature 1..20: note = chemically synthesized
  source 1..20: mol_type = other DNA
ctaatgaaatgatagtgggg

SEQ ID NO: 10534 - DNA, 20 bp, synthetic construct
  misc_feature 1..20: note = chemically synthesized
  source 1..20: mol_type = other DNA
taatgaaatgatagtggggg

SEQ ID NO: 10535 - DNA, 20 bp, synthetic construct
  misc_feature 1..20: note = chemically synthesized
  source 1..20: mol_type = other DNA
aatgaaatgatagtggggga

SEQ ID NO: 10536 - DNA, 20 bp, synthetic construct
  misc_feature 1..20: note = chemically synthesized
  source 1..20: mol_type = other DNA
atgaaatgatagtgggggag

SEQ ID NO: 10537 - DNA, 20 bp, synthetic construct
  misc_feature 1..20: note = chemically synthesized
  source 1..20: mol_type = other DNA
tgaaatgatagtgggggagg

SEQ ID NO: 10538 - DNA, 20 bp, synthetic construct
  misc_feature 1..20: note = chemically synthesized
  source 1..20: mol_type = other DNA
gtgggggagggggccgtacc

SEQ ID NO: 10539 - DNA, 20 bp, synthetic construct
  misc_feature 1..20: note = chemically synthesized
  source 1..20: mol_type = other DNA
ggagggggccgtaccaagac

SEQ ID NO: 10540 - DNA, 20 bp, synthetic construct
  misc_feature 1..20: note = chemically synthesized
  source 1..20: mol_type = other DNA
gagggggccgtaccaagact

SEQ ID NO: 10541 - DNA, 20 bp, synthetic construct
  misc_feature 1..20: note = chemically synthesized
  source 1..20: mol_type = other DNA
gggggccgtaccaagactag

SEQ ID NO: 10542 - DNA, 20 bp, synthetic construct
  misc_feature 1..20: note = chemically synthesized
  source 1..20: mol_type = other DNA
gggccgtaccaagactagga

SEQ ID NO: 10543 - DNA, 20 bp, synthetic construct
  misc_feature 1..20: note = chemically synthesized
  source 1..20: mol_type = other DNA
gccgtaccaagactaggaga

SEQ ID NO: 10544 - DNA, 20 bp, synthetic construct
  misc_feature 1..20: note = chemically synthesized
  source 1..20: mol_type = other DNA
gtaccaagactaggagagag

SEQ ID NO: 10545 - DNA, 20 bp, synthetic construct
  misc_feature 1..20: note = chemically synthesized
  source 1..20: mol_type = other DNA
gactaggagagagcagtcct

SEQ ID NO: 10546 - DNA, 20 bp, synthetic construct
  misc_feature 1..20: note = chemically synthesized
  source 1..20: mol_type = other DNA
gagactattgcaattatctg

SEQ ID NO: 10547 - DNA, 20 bp, synthetic construct
  misc_feature 1..20: note = chemically synthesized
  source 1..20: mol_type = other DNA
agactattgcaattatctgc

SEQ ID NO: 10548 - DNA, 20 bp, synthetic construct
  misc_feature 1..20: note = chemically synthesized
  source 1..20: mol_type = other DNA
actattgcaattatctgcgg

SEQ ID NO: 10549 - DNA, 20 bp, synthetic construct
  misc_feature 1..20: note = chemically synthesized
  source 1..20: mol_type = other DNA
aattatctgcgggagacata

SEQ ID NO: 10550 - DNA, 20 bp, synthetic construct
  misc_feature 1..20: note = chemically synthesized
  source 1..20: mol_type = other DNA
attatctgcgggagacataa

SEQ ID NO: 10551 - DNA, 20 bp, synthetic construct
  misc_feature 1..20: note = chemically synthesized
  source 1..20: mol_type = other DNA
tctgcgggagacataaaggc

SEQ ID NO: 10552 - DNA, 20 bp, synthetic construct
  misc_feature 1..20: note = chemically synthesized
  source 1..20: mol_type = other DNA
cataaaggctagaacctgaa

SEQ ID NO: 10553 - DNA, 20 bp, synthetic construct
  misc_feature 1..20: note = chemically synthesized
  source 1..20: mol_type = other DNA
aaaggctagaacctgaacag

SEQ ID NO: 10554 - DNA, 20 bp, synthetic construct
  misc_feature 1..20: note = chemically synthesized
  source 1..20: mol_type = other DNA
ggctagaacctgaacagtag

SEQ ID NO: 10555 - DNA, 20 bp, synthetic construct
  misc_feature 1..20: note = chemically synthesized
  source 1..20: mol_type = other DNA
gaacagtagcagtacaaaaa

SEQ ID NO: 10556 - DNA, 20 bp, synthetic construct
  misc_feature 1..20: note = chemically synthesized
  source 1..20: mol_type = other DNA
acagtagcagtacaaaaaaa

SEQ ID NO: 10557 - DNA, 20 bp, synthetic construct
  misc_feature 1..20: note = chemically synthesized
  source 1..20: mol_type = other DNA
cagtagcagtacaaaaaaag

SEQ ID NO: 10558 - DNA, 20 bp, synthetic construct
  misc_feature 1..20: note = chemically synthesized
  source 1..20: mol_type = other DNA
agtagcagtacaaaaaaaga

SEQ ID NO: 10559 - DNA, 20 bp, synthetic construct
  misc_feature 1..20: note = chemically synthesized
  source 1..20: mol_type = other DNA
gtagcagtacaaaaaaagag

SEQ ID NO: 10560 - DNA, 20 bp, synthetic construct
  misc_feature 1..20: note = chemically synthesized
  source 1..20: mol_type = other DNA
agcagtacaaaaaaagaggg

SEQ ID NO: 10561 - DNA, 20 bp, synthetic construct
  misc_feature 1..20: note = chemically synthesized
  source 1..20: mol_type = other DNA
aggggagttcaaatgatatt

SEQ ID NO: 10562 - DNA, 20 bp, synthetic construct
  misc_feature 1..20: note = chemically synthesized
  source 1..20: mol_type = other DNA
ggggagttcaaatgatatta

SEQ ID NO: 10563 - DNA, 20 bp, synthetic construct
  misc_feature 1..20: note = chemically synthesized
  source 1..20: mol_type = other DNA
gagttcaaatgatattaagg

SEQ ID NO: 10564 - DNA, 20 bp, synthetic construct
  misc_feature 1..20: note = chemically synthesized
  source 1..20: mol_type = other DNA
ttcaaatgatattaaggaag

SEQ ID NO: 10565 - DNA, 20 bp, synthetic construct
  misc_feature 1..20: note = chemically synthesized
  source 1..20: mol_type = other DNA
aaatgatattaaggaagtag

SEQ ID NO: 10566 - DNA, 20 bp, synthetic construct
  misc_feature 1..20: note = chemically synthesized
  source 1..20: mol_type = other DNA
tgatattaaggaagtagaag

SEQ ID NO: 10567 - DNA, 20 bp, synthetic construct
  misc_feature 1..20: note = chemically synthesized
  source 1..20: mol_type = other DNA
agtggtatgacttaaccatc

SEQ ID NO: 10568 - DNA, 20 bp, synthetic construct
  misc_feature 1..20: note = chemically synthesized
  source 1..20: mol_type = other DNA
gtggtatgacttaaccatct

SEQ ID NO: 10569 - DNA, 20 bp, synthetic construct
  misc_feature 1..20: note = chemically synthesized
  source 1..20: mol_type = other DNA
atgacttaaccatctgggta

SEQ ID NO: 10570 - DNA, 20 bp, synthetic construct
  misc_feature 1..20: note = chemically synthesized
  source 1..20: mol_type = other DNA
acttaaccatctgggtatgg

SEQ ID NO: 10571 - DNA, 20 bp, synthetic construct
  misc_feature 1..20: note = chemically synthesized
  source 1..20: mol_type = other DNA
cttaaccatctgggtatgga

SEQ ID NO: 10572 - DNA, 20 bp, synthetic construct
  misc_feature 1..20: note = chemically synthesized
  source 1..20: mol_type = other DNA
ttaaccatctgggtatggaa

SEQ ID NO: 10573 - DNA, 20 bp, synthetic construct
  misc_feature 1..20: note = chemically synthesized
  source 1..20: mol_type = other DNA
taaccatctgggtatggaag

SEQ ID NO: 10574 - DNA, 20 bp, synthetic construct
  misc_feature 1..20: note = chemically synthesized
  source 1..20: mol_type = other DNA
tctgggtatggaaggggaaa

SEQ ID NO: 10575 - DNA, 20 bp, synthetic construct
  misc_feature 1..20: note = chemically synthesized
  source 1..20: mol_type = other DNA
ggtatggaaggggaaatggc

SEQ ID NO: 10576 - DNA, 20 bp, synthetic construct
  misc_feature 1..20: note = chemically synthesized
  source 1..20: mol_type = other DNA
tatggaaggggaaatggcta

SEQ ID NO: 10577 - DNA, 20 bp, synthetic construct
  misc_feature 1..20: note = chemically synthesized
  source 1..20: mol_type = other DNA
aggggaaatggctagagtct

SEQ ID NO: 10578 - DNA, 20 bp, synthetic construct
  misc_feature 1..20: note = chemically synthesized
  source 1..20: mol_type = other DNA
ggggaaatggctagagtctt

SEQ ID NO: 10579 - DNA, 20 bp, synthetic construct
  misc_feature 1..20: note = chemically synthesized
  source 1..20: mol_type = other DNA
gggaaatggctagagtcttg

SEQ ID NO: 10580 - DNA, 20 bp, synthetic construct
  misc_feature 1..20: note = chemically synthesized
  source 1..20: mol_type = other DNA
ctttgtgtttgatgtgatta

SEQ ID NO: 10581 - DNA, 20 bp, synthetic construct
  misc_feature 1..20: note = chemically synthesized
  source 1..20: mol_type = other DNA
tttgatgtgattatggacca

SEQ ID NO: 10582 - DNA, 20 bp, synthetic construct
  misc_feature 1..20: note = chemically synthesized
  source 1..20: mol_type = other DNA
tggaccacagaataatgtct

SEQ ID NO: 10583 - DNA, 20 bp, synthetic construct
  misc_feature 1..20: note = chemically synthesized
  source 1..20: mol_type = other DNA
gaccacagaataatgtctaa

SEQ ID NO: 10584 - DNA, 20 bp, synthetic construct
  misc_feature 1..20: note = chemically synthesized
  source 1..20: mol_type = other DNA
agaataatgtctaagagaac

SEQ ID NO: 10585 - DNA, 20 bp, synthetic construct
  misc_feature 1..20: note = chemically synthesized
  source 1..20: mol_type = other DNA
gtctaagagaactggctctt

SEQ ID NO: 10586 - DNA, 20 bp, synthetic construct
  misc_feature 1..20: note = chemically synthesized
  source 1..20: mol_type = other DNA
tggctctttagtctgactgc

SEQ ID NO: 10587 - DNA, 20 bp, synthetic construct
  misc_feature 1..20: note = chemically synthesized
  source 1..20: mol_type = other DNA
gctctttagtctgactgcca

SEQ ID NO: 10588 - DNA, 20 bp, synthetic construct
  misc_feature 1..20: note = chemically synthesized
  source 1..20: mol_type = other DNA
agtctgaatcctgaatgttt

SEQ ID NO: 10589 - DNA, 20 bp, synthetic construct
  misc_feature 1..20: note = chemically synthesized
  source 1..20: mol_type = other DNA
aatgttttagtatgttacct

SEQ ID NO: 10590 - DNA, 20 bp, synthetic construct
  misc_feature 1..20: note = chemically synthesized
  source 1..20: mol_type = other DNA
atgttttagtatgttacctt

SEQ ID NO: 10591 - DNA, 20 bp, synthetic construct
  misc_feature 1..20: note = chemically synthesized
  source 1..20: mol_type = other DNA
ttagtatgttaccttgggca

SEQ ID NO: 10592 - DNA, 20 bp, synthetic construct
  misc_feature 1..20: note = chemically synthesized
  source 1..20: mol_type = other DNA
gttaccttgggcaaagccct

SEQ ID NO: 10593 - DNA, 20 bp, synthetic construct
  misc_feature 1..20: note = chemically synthesized
  source 1..20: mol_type = other DNA
tcttcctcattcataaaaat

SEQ ID NO: 10594 - DNA, 20 bp, synthetic construct
  misc_feature 1..20: note = chemically synthesized
  source 1..20: mol_type = other DNA
cattcataaaaataagatga

SEQ ID NO: 10595 - DNA, 20 bp, synthetic construct
  misc_feature 1..20: note = chemically synthesized
  source 1..20: mol_type = other DNA
agatgacagtgcctatctcg

SEQ ID NO: 10596 - DNA, 20 bp, synthetic construct
  misc_feature 1..20: note = chemically synthesized
  source 1..20: mol_type = other DNA
gatgacagtgcctatctcgt

SEQ ID NO: 10597 - DNA, 20 bp, synthetic construct
  misc_feature 1..20: note = chemically synthesized
  source 1..20: mol_type = other DNA
ctatctcgtgggacttttgt

SEQ ID NO: 10598 - DNA, 20 bp, synthetic construct
  misc_feature 1..20: note = chemically synthesized
  source 1..20: mol_type = other DNA
tatctcgtgggacttttgtg

SEQ ID NO: 10599 - DNA, 20 bp, synthetic construct
  misc_feature 1..20: note = chemically synthesized
  source 1..20: mol_type = other DNA
gtgggacttttgtgaggatg

SEQ ID NO: 10600 - DNA, 20 bp, synthetic construct
  misc_feature 1..20: note = chemically synthesized
  source 1..20: mol_type = other DNA
gacttttgtgaggatgaagt

SEQ ID NO: 10601 - DNA, 20 bp, synthetic construct
  misc_feature 1..20: note = chemically synthesized
  source 1..20: mol_type = other DNA
gtgaggatgaagtgagataa

SEQ ID NO: 10602 - DNA, 20 bp, synthetic construct
  misc_feature 1..20: note = chemically synthesized
  source 1..20: mol_type = other DNA
gaagtgagataatggatgca

SEQ ID NO: 10603 - DNA, 20 bp, synthetic construct
  misc_feature 1..20: note = chemically synthesized
  source 1..20: mol_type = other DNA
ataatggatgcaaagttact

SEQ ID NO: 10604 - DNA, 20 bp, synthetic construct
  misc_feature 1..20: note = chemically synthesized
  source 1..20: mol_type = other DNA
ggatgcaaagttactgagca

SEQ ID NO: 10605 - DNA, 20 bp, synthetic construct
  misc_feature 1..20: note = chemically synthesized
  source 1..20: mol_type = other DNA
actgagcacagtgtccaaca

SEQ ID NO: 10606 - DNA, 20 bp, synthetic construct
  misc_feature 1..20: note = chemically synthesized
  source 1..20: mol_type = other DNA
gagcacagtgtccaacacag

SEQ ID NO: 10607 - DNA, 20 bp, synthetic construct
  misc_feature 1..20: note = chemically synthesized
  source 1..20: mol_type = other DNA
cacagtgtccaacacagcag

SEQ ID NO: 10608 - DNA, 20 bp, synthetic construct
  misc_feature 1..20: note = chemically synthesized
  source 1..20: mol_type = other DNA
cagaagcattacatatacat

SEQ ID NO: 10609 - DNA, 20 bp, synthetic construct
  misc_feature 1..20: note = chemically synthesized
  source 1..20: mol_type = other DNA
acatatacattagctattac

SEQ ID NO: 10610 - DNA, 20 bp, synthetic construct
  misc_feature 1..20: note = chemically synthesized
  source 1..20: mol_type = other DNA
actggctacattatgatata

SEQ ID NO: 10611 - DNA, 20 bp, synthetic construct
  misc_feature 1..20: note = chemically synthesized
  source 1..20: mol_type = other DNA
gctacattatgatatacagt

SEQ ID NO: 10612 - DNA, 20 bp, synthetic construct
  misc_feature 1..20: note = chemically synthesized
  source 1..20: mol_type = other DNA
ctacattatgatatacagtt

SEQ ID NO: 10613 - DNA, 20 bp, synthetic construct
  misc_feature 1..20: note = chemically synthesized
  source 1..20: mol_type = other DNA
tacattatgatatacagtta

SEQ ID NO: 10614 - DNA, 20 bp, synthetic construct
  misc_feature 1..20: note = chemically synthesized
  source 1..20: mol_type = other DNA
cattatgatatacagttagg

SEQ ID NO: 10615 - DNA, 20 bp, synthetic construct
  misc_feature 1..20: note = chemically synthesized
  source 1..20: mol_type = other DNA
atgatatacagttagggagt

SEQ ID NO: 10616 - DNA, 20 bp, synthetic construct
  misc_feature 1..20: note = chemically synthesized
  source 1..20: mol_type = other DNA
tatacagttagggagttgga

SEQ ID NO: 10617 - DNA, 20 bp, synthetic construct
  misc_feature 1..20: note = chemically synthesized
  source 1..20: mol_type = other DNA
tggaaagataatctgaaatt

SEQ ID NO: 10618 - DNA, 20 bp, synthetic construct
  misc_feature 1..20: note = chemically synthesized
  source 1..20: mol_type = other DNA
ggaaagataatctgaaattc

SEQ ID NO: 10619 - DNA, 20 bp, synthetic construct
  misc_feature 1..20: note = chemically synthesized
  source 1..20: mol_type = other DNA
aaagataatctgaaattcag

SEQ ID NO: 10620 - DNA, 20 bp, synthetic construct
  misc_feature 1..20: note = chemically synthesized
  source 1..20: mol_type = other DNA
tcaggagacgtatctgacta

SEQ ID NO: 10621 - DNA, 20 bp, synthetic construct
  misc_feature 1..20: note = chemically synthesized
  source 1..20: mol_type = other DNA
caggagacgtatctgactat

SEQ ID NO: 10622 - DNA, 20 bp, synthetic construct
  misc_feature 1..20: note = chemically synthesized
  source 1..20: mol_type = other DNA
agacgtatctgactataggt

SEQ ID NO: 10623 - DNA, 20 bp, synthetic construct
  misc_feature 1..20: note = chemically synthesized
  source 1..20: mol_type = other DNA
tctgactataggtgagtatt

SEQ ID NO: 10624 - DNA, 20 bp, synthetic construct
  misc_feature 1..20: note = chemically synthesized
  source 1..20: mol_type = other DNA
ggaactcattgttctgtaaa

SEQ ID NO: 10625 - DNA, 20 bp, synthetic construct
  misc_feature 1..20: note = chemically synthesized
  source 1..20: mol_type = other DNA
actcattgttctgtaaacag

SEQ ID NO: 10626 - DNA, 20 bp, synthetic construct
  misc_feature 1..20: note = chemically synthesized
  source 1..20: mol_type = other DNA
tgttctgtaaacagtagtta

SEQ ID NO: 10627 - DNA, 20 bp, synthetic construct
  misc_feature 1..20: note = chemically synthesized
  source 1..20: mol_type = other DNA
agtagttacagccacgtgtg

SEQ ID NO: 10628 - DNA, 20 bp, synthetic construct
  misc_feature 1..20: note = chemically synthesized
  source 1..20: mol_type = other DNA
gtagttacagccacgtgtgt

SEQ ID NO: 10629 - DNA, 20 bp, synthetic construct
  misc_feature 1..20: note = chemically synthesized
  source 1..20: mol_type = other DNA
cagccacgtgtgtgggcatc

SEQ ID NO: 10630 - DNA, 20 bp, synthetic construct
  misc_feature 1..20: note = chemically synthesized
  source 1..20: mol_type = other DNA
gccacgtgtgtgggcatctg

SEQ ID NO: 10631 - DNA, 20 bp, synthetic construct
  misc_feature 1..20: note = chemically synthesized
  source 1..20: mol_type = other DNA
cacgtgtgtgggcatctgga

SEQ ID NO: 10632 - DNA, 20 bp, synthetic construct
  misc_feature 1..20: note = chemically synthesized
  source 1..20: mol_type = other DNA
tgtgtgggcatctggagagt

SEQ ID NO: 10633 - DNA, 20 bp, synthetic construct
  misc_feature 1..20: note = chemically synthesized
  source 1..20: mol_type = other DNA
gggcatctggagagtgagca

SEQ ID NO: 10634 - DNA, 20 bp, synthetic construct
  misc_feature 1..20: note = chemically synthesized
  source 1..20: mol_type = other DNA
agcatggatattgtgatacc

SEQ ID NO: 10635 - DNA, 20 bp, synthetic construct
  misc_feature 1..20: note = chemically synthesized
  source 1..20: mol_type = other DNA
ggatattgtgatacctagta

SEQ ID NO: 10636 - DNA, 20 bp, synthetic construct
  misc_feature 1..20: note = chemically synthesized
  source 1..20: mol_type = other DNA
gtgatacctagtacagtgcc

SEQ ID NO: 10637 - DNA, 20 bp, synthetic construct
  misc_feature 1..20: note = chemically synthesized
  source 1..20: mol_type = other DNA
atacctagtacagtgcctgg

SEQ ID NO: 10638 - DNA, 20 bp, synthetic construct
  misc_feature 1..20: note = chemically synthesized
  source 1..20: mol_type = other DNA
cctagtacagtgcctggcag

SEQ ID NO: 10639 - DNA, 20 bp, synthetic construct
  misc_feature 1..20: note = chemically synthesized
  source 1..20: mol_type = other DNA
agtacagtgcctggcagtag

SEQ ID NO: 10640 - DNA, 20 bp, synthetic construct
  misc_feature 1..20: note = chemically synthesized
  source 1..20: mol_type = other DNA
ggcagtagtggttgtatgct

SEQ ID NO: 10641 - DNA, 20 bp, synthetic construct
  misc_feature 1..20: note = chemically synthesized
  source 1..20: mol_type = other DNA
tgctcagtaaattttgttga

SEQ ID NO: 10642 - DNA, 20 bp, synthetic construct
  misc_feature 1..20: note = chemically synthesized
  source 1..20: mol_type = other DNA
gctcagtaaattttgttgac

SEQ ID NO: 10643 - DNA, 20 bp, synthetic construct
  misc_feature 1..20: note = chemically synthesized
  source 1..20: mol_type = other DNA
ctcagtaaattttgttgaca

SEQ ID NO: 10644 - DNA, 20 bp, synthetic construct
  misc_feature 1..20: note = chemically synthesized
  source 1..20: mol_type = other DNA
gtaaattttgttgacagggt

SEQ ID NO: 10645 - DNA, 20 bp, synthetic construct
  misc_feature 1..20: note = chemically synthesized
  source 1..20: mol_type = other DNA
taaattttgttgacagggtc

SEQ ID NO: 10646 - DNA, 20 bp, synthetic construct
  misc_feature 1..20: note = chemically synthesized
  source 1..20: mol_type = other DNA
aaattttgttgacagggtca

SEQ ID NO: 10647 - DNA, 20 bp, synthetic construct
  misc_feature 1..20: note = chemically synthesized
  source 1..20: mol_type = other DNA
tttgttgacagggtcagggc

SEQ ID NO: 10648 - DNA, 20 bp, synthetic construct
  misc_feature 1..20: note = chemically synthesized
  source 1..20: mol_type = other DNA
tgacagggtcagggccggac

SEQ ID NO: 10649 - DNA, 20 bp, synthetic construct
  misc_feature 1..20: note = chemically synthesized
  source 1..20: mol_type = other DNA
gtcagggccggactagactg

SEQ ID NO: 10650 - DNA, 20 bp, synthetic construct
  misc_feature 1..20: note = chemically synthesized
  source 1..20: mol_type = other DNA
gggccggactagactgtggt

SEQ ID NO: 10651 - DNA, 20 bp, synthetic construct
  misc_feature 1..20: note = chemically synthesized
  source 1..20: mol_type = other DNA
cggactagactgtggtaagc

SEQ ID NO: 10652 - DNA, 20 bp, synthetic construct
  misc_feature 1..20: note = chemically synthesized
  source 1..20: mol_type = other DNA
ggactagactgtggtaagca

SEQ ID NO: 10653 - DNA, 20 bp, synthetic construct
  misc_feature 1..20: note = chemically synthesized
  source 1..20: mol_type = other DNA
actgtggtaagcaaggcctg

SEQ ID NO: 10654 - DNA, 20 bp, synthetic construct
  misc_feature 1..20: note = chemically synthesized
  source 1..20: mol_type = other DNA
ctgtggtaagcaaggcctgt

SEQ ID NO: 10655 - DNA, 20 bp, synthetic construct
  misc_feature 1..20: note = chemically synthesized
  source 1..20: mol_type = other DNA
tgtggtaagcaaggcctgta

SEQ ID NO: 10656 - DNA, 20 bp, synthetic construct
  misc_feature 1..20: note = chemically synthesized
  source 1..20: mol_type = other DNA
taaatatacttgtatgcccc

SEQ ID NO: 10657 - DNA, 20 bp, synthetic construct
  misc_feature 1..20: note = chemically synthesized
  source 1..20: mol_type = other DNA
atatacttgtatgccccgag

SEQ ID NO: 10658 - DNA, 20 bp, synthetic construct
  misc_feature 1..20: note = chemically synthesized
  source 1..20: mol_type = other DNA
acttgtatgccccgagaagt

SEQ ID NO: 10659 - DNA, 20 bp, synthetic construct
  misc_feature 1..20: note = chemically synthesized
  source 1..20: mol_type = other DNA
cttgtatgccccgagaagtg

SEQ ID NO: 10660 - DNA, 20 bp, synthetic construct
  misc_feature 1..20: note = chemically synthesized
  source 1..20: mol_type = other DNA
tgtgccctacatgccttgtt

SEQ ID NO: 10661 - DNA, 20 bp, synthetic construct
  misc_feature 1..20: note = chemically synthesized
  source 1..20: mol_type = other DNA
tgtttggttcactcttgtcc

SEQ ID NO: 10662 - DNA, 20 bp, synthetic construct
  misc_feature 1..20: note = chemically synthesized
  source 1..20: mol_type = other DNA
gttcactcttgtcccagccc

SEQ ID NO: 10663 - DNA, 20 bp, synthetic construct
  misc_feature 1..20: note = chemically synthesized
  source 1..20: mol_type = other DNA
actcttgtcccagccctagc

SEQ ID NO: 10664 - DNA, 20 bp, synthetic construct
  misc_feature 1..20: note = chemically synthesized
  source 1..20: mol_type = other DNA
cagccctagcaagtatatat

SEQ ID NO: 10665 - DNA, 20 bp, synthetic construct
  misc_feature 1..20: note = chemically synthesized
  source 1..20: mol_type = other DNA
agccctagcaagtatatata

SEQ ID NO: 10666 - DNA, 20 bp, synthetic construct
  misc_feature 1..20: note = chemically synthesized
  source 1..20: mol_type = other DNA
caagtatatataaggtgaaa

SEQ ID NO: 10667 - DNA, 20 bp, synthetic construct
  misc_feature 1..20: note = chemically synthesized
  source 1..20: mol_type = other DNA
aagtatatataaggtgaaaa

SEQ ID NO: 10668 - DNA, 20 bp, synthetic construct
  misc_feature 1..20: note = chemically synthesized
  source 1..20: mol_type = other DNA
atataaggtgaaaaaggaaa

SEQ ID NO: 10669 - DNA, 20 bp, synthetic construct
  misc_feature 1..20: note = chemically synthesized
  source 1..20: mol_type = other DNA
aggtgaaaaaggaaaaagct

SEQ ID NO: 10670 - DNA, 20 bp, synthetic construct
  misc_feature 1..20: note = chemically synthesized
  source 1..20: mol_type = other DNA
ggtgaaaaaggaaaaagctg

SEQ ID NO: 10671 - DNA, 20 bp, synthetic construct
  misc_feature 1..20: note = chemically synthesized
  source 1..20: mol_type = other DNA
aaaaaggaaaaagctgaggc

SEQ ID NO: 10672 - DNA, 20 bp, synthetic construct
  misc_feature 1..20: note = chemically synthesized
  source 1..20: mol_type = other DNA
aaaggaaaaagctgaggctg

SEQ ID NO: 10673 - DNA, 20 bp, synthetic construct
  misc_feature 1..20: note = chemically synthesized
  source 1..20: mol_type = other DNA
aaaaagctgaggctggagcc

SEQ ID NO: 10674 - DNA, 20 bp, synthetic construct
  misc_feature 1..20: note = chemically synthesized
  source 1..20: mol_type = other DNA
aaaagctgaggctggagcct

SEQ ID NO: 10675 - DNA, 20 bp, synthetic construct
  misc_feature 1..20: note = chemically synthesized
  source 1..20: mol_type = other DNA
aagctgaggctggagcctgg

SEQ ID NO: 10676 - DNA, 20 bp, synthetic construct
  misc_feature 1..20: note = chemically synthesized
  source 1..20: mol_type = other DNA
gctggagcctgggagaaccc

SEQ ID NO: 10677 - DNA, 20 bp, synthetic construct
  misc_feature 1..20: note = chemically synthesized
  source 1..20: mol_type = other DNA
tgggagaaccctggacattt

SEQ ID NO: 10678 - DNA, 20 bp, synthetic construct
  misc_feature 1..20: note = chemically synthesized
  source 1..20: mol_type = other DNA
gggagaaccctggacattta

SEQ ID NO: 10679 - DNA, 20 bp, synthetic construct
  misc_feature 1..20: note = chemically synthesized
  source 1..20: mol_type = other DNA
ggagaaccctggacatttaa

SEQ ID NO: 10680 - DNA, 20 bp, synthetic construct
  misc_feature 1..20: note = chemically synthesized
  source 1..20: mol_type = other DNA
ccctggacatttaagggcca

SEQ ID NO: 10681 - DNA, 20 bp, synthetic construct
  misc_feature 1..20: note = chemically synthesized
  source 1..20: mol_type = other DNA
ctggacatttaagggccatg

SEQ ID NO: 10682 - DNA, 20 bp, synthetic construct
  misc_feature 1..20: note = chemically synthesized
  source 1..20: mol_type = other DNA
ggacatttaagggccatgga

SEQ ID NO: 10683 - DNA, 20 bp, synthetic construct
  misc_feature 1..20: note = chemically synthesized
  source 1..20: mol_type = other DNA
gacatttaagggccatggag

SEQ ID NO: 10684 - DNA, 20 bp, synthetic construct
  misc_feature 1..20: note = chemically synthesized
  source 1..20: mol_type = other DNA
ttaagggccatggagaggaa

SEQ ID NO: 10685 - DNA, 20 bp, synthetic construct
  misc_feature 1..20: note = chemically synthesized
  source 1..20: mol_type = other DNA
taagggccatggagaggaac

SEQ ID NO: 10686 - DNA, 20 bp, synthetic construct
  misc_feature 1..20: note = chemically synthesized
  source 1..20: mol_type = other DNA
agggccatggagaggaacag

SEQ ID NO: 10687 - DNA, 20 bp, synthetic construct
  misc_feature 1..20: note = chemically synthesized
  source 1..20: mol_type = other DNA
gaacaggagttaatcaattc

SEQ ID NO: 10688 - DNA, 20 bp, synthetic construct
  misc_feature 1..20: note = chemically synthesized
  source 1..20: mol_type = other DNA
gagttaatcaattcaagtgc

SEQ ID NO: 10689 - DNA, 20 bp, synthetic construct
  misc_feature 1..20: note = chemically synthesized
  source 1..20: mol_type = other DNA
taatcaattcaagtgctgga

SEQ ID NO: 10690 - DNA, 20 bp, synthetic construct
  misc_feature 1..20: note = chemically synthesized
  source 1..20: mol_type = other DNA
ttcaagtgctggatggataa

SEQ ID NO: 10691 - DNA, 20 bp, synthetic construct
  misc_feature 1..20: note = chemically synthesized
  source 1..20: mol_type = other DNA
tcaagtgctggatggataac

SEQ ID NO: 10692 - DNA, 20 bp, synthetic construct
  misc_feature 1..20: note = chemically synthesized
  source 1..20: mol_type = other DNA
aagtgctggatggataacag

SEQ ID NO: 10693 - DNA, 20 bp, synthetic construct
  misc_feature 1..20: note = chemically synthesized
  source 1..20: mol_type = other DNA
gctggatggataacaggagt

SEQ ID NO: 10694 - DNA, 20 bp, synthetic construct
  misc_feature 1..20: note = chemically synthesized
  source 1..20: mol_type = other DNA
tggatggataacaggagtta

SEQ ID NO: 10695 - DNA, 20 bp, synthetic construct
  misc_feature 1..20: note = chemically synthesized
  source 1..20: mol_type = other DNA
ggataacaggagttagagca

SEQ ID NO: 10696 - DNA, 20 bp, synthetic construct
  misc_feature 1..20: note = chemically synthesized
  source 1..20: mol_type = other DNA
taacaggagttagagcaaag

SEQ ID NO: 10697 - DNA, 20 bp, synthetic construct
  misc_feature 1..20: note = chemically synthesized
  source 1..20: mol_type = other DNA
aacaggagttagagcaaagc

SEQ ID NO: 10698 - DNA, 20 bp, synthetic construct
  misc_feature 1..20: note = chemically synthesized
  source 1..20: mol_type = other DNA
acaggagttagagcaaagcg

SEQ ID NO: 10699 - DNA, 20 bp, synthetic construct
  misc_feature 1..20: note = chemically synthesized
  source 1..20: mol_type = other DNA
gttagagcaaagcggggaac

SEQ ID NO: 10700 - DNA, 20 bp, synthetic construct
  misc_feature 1..20: note = chemically synthesized
  source 1..20: mol_type = other DNA
agcaaagcggggaaccagaa

SEQ ID NO: 10701 - DNA, 20 bp, synthetic construct
  misc_feature 1..20: note = chemically synthesized
  source 1..20: mol_type = other DNA
caaagcggggaaccagaata

SEQ ID NO: 10702 - DNA, 20 bp, synthetic construct
  misc_feature 1..20: note = chemically synthesized
  source 1..20: mol_type = other DNA
aatagagtgattattataaa

SEQ ID NO: 10703 - DNA, 20 bp, synthetic construct
  misc_feature 1..20: note = chemically synthesized
  source 1..20: mol_type = other DNA
tagagtgattattataaaaa

SEQ ID NO: 10704 - DNA, 20 bp, synthetic construct
  misc_feature 1..20: note = chemically synthesized
  source 1..20: mol_type = other DNA
tataaaaagagtttcctaaa

SEQ ID NO: 10705 - DNA, 20 bp, synthetic construct
  misc_feature 1..20: note = chemically synthesized
  source 1..20: mol_type = other DNA
ataaaaagagtttcctaaaa

SEQ ID NO: 10706 - DNA, 20 bp, synthetic construct
  misc_feature 1..20: note = chemically synthesized
  source 1..20: mol_type = other DNA
taaaaagagtttcctaaaaa

SEQ ID NO: 10707 - DNA, 20 bp, synthetic construct
  misc_feature 1..20: note = chemically synthesized
  source 1..20: mol_type = other DNA
aaaagagtttcctaaaaagg

SEQ ID NO: 10708 - DNA, 20 bp, synthetic construct
  misc_feature 1..20: note = chemically synthesized
  source 1..20: mol_type = other DNA
aagagtttcctaaaaaggga

SEQ ID NO: 10709 - DNA, 20 bp, synthetic construct
  misc_feature 1..20: note = chemically synthesized
  source 1..20: mol_type = other DNA
aaaagggagagatcaacaat

SEQ ID NO: 10710 - DNA, 20 bp, synthetic construct
  misc_feature 1..20: note = chemically synthesized
  source 1..20: mol_type = other DNA
atcaacaattagaaattatt

SEQ ID NO: 10711 - DNA, 20 bp, synthetic construct
  misc_feature 1..20: note = chemically synthesized
  source 1..20: mol_type = other DNA
caacaattagaaattattta

SEQ ID NO: 10712 - DNA, 20 bp, synthetic construct
  misc_feature 1..20: note = chemically synthesized
  source 1..20: mol_type = other DNA
caattagaaattatttagag

SEQ ID NO: 10713 - DNA, 20 bp, synthetic construct
  misc_feature 1..20: note = chemically synthesized
  source 1..20: mol_type = other DNA
tagaaattatttagagcagc

SEQ ID NO: 10714 - DNA, 20 bp, synthetic construct
  misc_feature 1..20: note = chemically synthesized
  source 1..20: mol_type = other DNA
ataaactcaaaattattctt

SEQ ID NO: 10715 - DNA, 20 bp, synthetic construct
  misc_feature 1..20: note = chemically synthesized
  source 1..20: mol_type = other DNA
taaactcaaaattattcttt

SEQ ID NO: 10716 - DNA, 20 bp, synthetic construct
  misc_feature 1..20: note = chemically synthesized
  source 1..20: mol_type = other DNA
gtcattcctgattgtgacaa

SEQ ID NO: 10717 - DNA, 20 bp, synthetic construct
  misc_feature 1..20: note = chemically synthesized
  source 1..20: mol_type = other DNA
ttcattatataaatgtgatt

SEQ ID NO: 10718 - DNA, 20 bp, synthetic construct
  misc_feature 1..20: note = chemically synthesized
  source 1..20: mol_type = other DNA
tcattatataaatgtgatta

SEQ ID NO: 10719 - DNA, 20 bp, synthetic construct
  misc_feature 1..20: note = chemically synthesized
  source 1..20: mol_type = other DNA
ttatataaatgtgattaagg

SEQ ID NO: 10720 - DNA, 20 bp, synthetic construct
  misc_feature 1..20: note = chemically synthesized
  source 1..20: mol_type = other DNA
tatataaatgtgattaagga

SEQ ID NO: 10721 - DNA, 20 bp, synthetic construct
  misc_feature 1..20: note = chemically synthesized
  source 1..20: mol_type = other DNA
aaatgtgattaaggaaggaa

SEQ ID NO: 10722 - DNA, 20 bp, synthetic construct
  misc_feature 1..20: note = chemically synthesized
  source 1..20: mol_type = other DNA
atgtgattaaggaaggaaaa

SEQ ID NO: 10723 - DNA, 20 bp, synthetic construct
  misc_feature 1..20: note = chemically synthesized
  source 1..20: mol_type = other DNA
aaggaaggaaaagagctaca

SEQ ID NO: 10724 - DNA, 20 bp, synthetic construct
  misc_feature 1..20: note = chemically synthesized
  source 1..20: mol_type = other DNA
gaaggaaaagagctacacag

SEQ ID NO: 10725 - DNA, 20 bp, synthetic construct
  misc_feature 1..20: note = chemically synthesized
  source 1..20: mol_type = other DNA
gagctacacagaagttatta

SEQ ID NO: 10726 - DNA, 20 bp, synthetic construct
  misc_feature 1..20: note = chemically synthesized
  source 1..20: mol_type = other DNA
gctacacagaagttattaaa

SEQ ID NO: 10727 - DNA, 20 bp, synthetic construct
  misc_feature 1..20: note = chemically synthesized
  source 1..20: mol_type = other DNA
cagaagttattaaagagcta

SEQ ID NO: 10728 - DNA, 20 bp, synthetic construct
  misc_feature 1..20: note = chemically synthesized
  source 1..20: mol_type = other DNA
gaagttattaaagagctaaa

SEQ ID NO: 10729 - DNA, 20 bp, synthetic construct
  misc_feature 1..20: note = chemically synthesized
  source 1..20: mol_type = other DNA
ttaaagagctaaagagaatt

SEQ ID NO: 10730 - DNA, 20 bp, synthetic construct
  misc_feature 1..20: note = chemically synthesized
  source 1..20: mol_type = other DNA
gagaattgagaaatttaaaa

SEQ ID NO: 10731 - DNA, 20 bp, synthetic construct
  misc_feature 1..20: note = chemically synthesized
  source 1..20: mol_type = other DNA
aattgagaaatttaaaacag

SEQ ID NO: 10732 - DNA, 20 bp, synthetic construct
  misc_feature 1..20: note = chemically synthesized
  source 1..20: mol_type = other DNA
gagaaatttaaaacagaaga

SEQ ID NO: 10733 - DNA, 20 bp, synthetic construct
  misc_feature 1..20: note = chemically synthesized
  source 1..20: mol_type = other DNA
aaatttaaaacagaagaaag

SEQ ID NO: 10734 - DNA, 20 bp, synthetic construct
  misc_feature 1..20: note = chemically synthesized
  source 1..20: mol_type = other DNA
aatttaaaacagaagaaagt

SEQ ID NO: 10735 - DNA, 20 bp, synthetic construct
  misc_feature 1..20: note = chemically synthesized
  source 1..20: mol_type = other DNA
atttaaaacagaagaaagta

SEQ ID NO: 10736 - DNA, 20 bp, synthetic construct
  misc_feature 1..20: note = chemically synthesized
  source 1..20: mol_type = other DNA
agaaagtagggccaacatga

SEQ ID NO: 10737 - DNA, 20 bp, synthetic construct
  misc_feature 1..20: note = chemically synthesized
  source 1..20: mol_type = other DNA
gaaagtagggccaacatgaa

SEQ ID NO: 10738 - DNA, 20 bp, synthetic construct
  misc_feature 1..20: note = chemically synthesized
  source 1..20: mol_type = other DNA
aagtagggccaacatgaaag

SEQ ID NO: 10739 - DNA, 20 bp, synthetic construct
  misc_feature 1..20: note = chemically synthesized
  source 1..20: mol_type = other DNA
tagggccaacatgaaaggag

SEQ ID NO: 10740 - DNA, 20 bp, synthetic construct
  misc_feature 1..20: note = chemically synthesized
  source 1..20: mol_type = other DNA
agggccaacatgaaaggagt

SEQ ID NO: 10741 - DNA, 20 bp, synthetic construct
  misc_feature 1..20: note = chemically synthesized
  source 1..20: mol_type = other DNA
gggccaacatgaaaggagta

SEQ ID NO: 10742 - DNA, 20 bp, synthetic construct
  misc_feature 1..20: note = chemically synthesized
  source 1..20: mol_type = other DNA
gccaacatgaaaggagtagg

SEQ ID NO: 10743 - DNA, 20 bp, synthetic construct
  misc_feature 1..20: note = chemically synthesized
  source 1..20: mol_type = other DNA
atgaaaggagtagggagaaa

SEQ ID NO: 10744 - DNA, 20 bp, synthetic construct
  misc_feature 1..20: note = chemically synthesized
  source 1..20: mol_type = other DNA
gaaaggagtagggagaaaaa

SEQ ID NO: 10745 - DNA, 20 bp, synthetic construct
  misc_feature 1..20: note = chemically synthesized
  source 1..20: mol_type = other DNA
tagggagaaaaagagataac

SEQ ID NO: 10746 - DNA, 20 bp, synthetic construct
  misc_feature 1..20: note = chemically synthesized
  source 1..20: mol_type = other DNA
ctgatcctgccaacacctgt

SEQ ID NO: 10747 - DNA, 20 bp, synthetic construct
  misc_feature 1..20: note = chemically synthesized
  source 1..20: mol_type = other DNA
tcctgccaacacctgtgaga

SEQ ID NO: 10748 - DNA, 20 bp, synthetic construct
  misc_feature 1..20: note = chemically synthesized
  source 1..20: mol_type = other DNA
aacctaatttacatttgaca

SEQ ID NO: 10749 - DNA, 20 bp, synthetic construct
  misc_feature 1..20: note = chemically synthesized
  source 1..20: mol_type = other DNA
aatttacatttgacaaagtt

SEQ ID NO: 10750 - DNA, 20 bp, synthetic construct
  misc_feature 1..20: note = chemically synthesized
  source 1..20: mol_type = other DNA
atttacatttgacaaagtta

SEQ ID NO: 10751 - DNA, 20 bp, synthetic construct
  misc_feature 1..20: note = chemically synthesized
  source 1..20: mol_type = other DNA
catttgacaaagttaaggtt

SEQ ID NO: 10752 - DNA, 20 bp, synthetic construct
  misc_feature 1..20: note = chemically synthesized
  source 1..20: mol_type = other DNA
tttgacaaagttaaggttca

SEQ ID NO: 10753 - DNA, 20 bp, synthetic construct
  misc_feature 1..20: note = chemically synthesized
  source 1..20: mol_type = other DNA
agagcttgtgtgacttgtcc

SEQ ID NO: 10754 - DNA, 20 bp, synthetic construct
  misc_feature 1..20: note = chemically synthesized
  source 1..20: mol_type = other DNA
gagcttgtgtgacttgtcca

SEQ ID NO: 10755 - DNA, 20 bp, synthetic construct
  misc_feature 1..20: note = chemically synthesized
  source 1..20: mol_type = other DNA
gtgtgacttgtccaaggtca

SEQ ID NO: 10756 - DNA, 20 bp, synthetic construct
  misc_feature 1..20: note = chemically synthesized
  source 1..20: mol_type = other DNA
tgtgacttgtccaaggtcac

SEQ ID NO: 10757 - DNA, 20 bp, synthetic construct
  misc_feature 1..20: note = chemically synthesized
  source 1..20: mol_type = other DNA
cttgtccaaggtcacaggtc

SEQ ID NO: 10758 - DNA, 20 bp, synthetic construct
  misc_feature 1..20: note = chemically synthesized
  source 1..20: mol_type = other DNA
tgtccaaggtcacaggtcta

SEQ ID NO: 10759 - DNA, 20 bp, synthetic construct
  misc_feature 1..20: note = chemically synthesized
  source 1..20: mol_type = other DNA
gtccaaggtcacaggtctag

SEQ ID NO: 10760 - DNA, 20 bp, synthetic construct
  misc_feature 1..20: note = chemically synthesized
  source 1..20: mol_type = other DNA
ccaaggtcacaggtctagag

SEQ ID NO: 10761 - DNA, 20 bp, synthetic construct
  misc_feature 1..20: note = chemically synthesized
  source 1..20: mol_type = other DNA
caaggtcacaggtctagagg

SEQ ID NO: 10762 - DNA, 20 bp, synthetic construct
  misc_feature 1..20: note = chemically synthesized
  source 1..20: mol_type = other DNA
ggtcacaggtctagaggagg

SEQ ID NO: 10763 - DNA, 20 bp, synthetic construct
  misc_feature 1..20: note = chemically synthesized
  source 1..20: mol_type = other DNA
ttctgtctgatctgattcta

SEQ ID NO: 10764 - DNA, 20 bp, synthetic construct
  misc_feature 1..20: note = chemically synthesized
  source 1..20: mol_type = other DNA
tttcactcaaccacactgta

SEQ ID NO: 10765 - DNA, 20 bp, synthetic construct
  misc_feature 1..20: note = chemically synthesized
  source 1..20: mol_type = other DNA
actcaaccacactgtacagt

SEQ ID NO: 10766 - DNA, 20 bp, synthetic construct
  misc_feature 1..20: note = chemically synthesized
  source 1..20: mol_type = other DNA
gtacagtcagctctccttgt

SEQ ID NO: 10767 - DNA, 20 bp, synthetic construct
  misc_feature 1..20: note = chemically synthesized
  source 1..20: mol_type = other DNA
agctctccttgtgagttcca

SEQ ID NO: 10768 - DNA, 20 bp, synthetic construct
  misc_feature 1..20: note = chemically synthesized
  source 1..20: mol_type = other DNA
ccttgtgagttccacagcca

SEQ ID NO: 10769 - DNA, 20 bp, synthetic construct
  misc_feature 1..20: note = chemically synthesized
  source 1..20: mol_type = other DNA
gccacagattcaattaactg

SEQ ID NO: 10770 - DNA, 20 bp, synthetic construct
  misc_feature 1..20: note = chemically synthesized
  source 1..20: mol_type = other DNA
actgcagatcaaaaatattc

SEQ ID NO: 10771 - DNA, 20 bp, synthetic construct
  misc_feature 1..20: note = chemically synthesized
  source 1..20: mol_type = other DNA
aaaaatattcaagaaaaaaa

SEQ ID NO: 10772 - DNA, 20 bp, synthetic construct
  misc_feature 1..20: note = chemically synthesized
  source 1..20: mol_type = other DNA
atattcaagaaaaaaatgga

SEQ ID NO: 10773 - DNA, 20 bp, synthetic construct
  misc_feature 1..20: note = chemically synthesized
  source 1..20: mol_type = other DNA
gcatctctactgaacatgta

SEQ ID NO: 10774 - DNA, 20 bp, synthetic construct
  misc_feature 1..20: note = chemically synthesized
  source 1..20: mol_type = other DNA
tcattattccctaaacaata

SEQ ID NO: 10775 - DNA, 20 bp, synthetic construct
  misc_feature 1..20: note = chemically synthesized
  source 1..20: mol_type = other DNA
cagcataacaactatttaca

SEQ ID NO: 10776 - DNA, 20 bp, synthetic construct
  misc_feature 1..20: note = chemically synthesized
  source 1..20: mol_type = other DNA
acatagcatttacattgtat

SEQ ID NO: 10777 - DNA, 20 bp, synthetic construct
  misc_feature 1..20: note = chemically synthesized
  source 1..20: mol_type = other DNA
tttacattgtattagctatt

SEQ ID NO: 10778 - DNA, 20 bp, synthetic construct
  misc_feature 1..20: note = chemically synthesized
  source 1..20: mol_type = other DNA
tacattgtattagctattaa

SEQ ID NO: 10779 - DNA, 20 bp, synthetic construct
  misc_feature 1..20: note = chemically synthesized
  source 1..20: mol_type = other DNA
attagctattaagagaaacc

SEQ ID NO: 10780 - DNA, 20 bp, synthetic construct
  misc_feature 1..20: note = chemically synthesized
  source 1..20: mol_type = other DNA
tagctattaagagaaaccta

SEQ ID NO: 10781 - DNA, 20 bp, synthetic construct
  misc_feature 1..20: note = chemically synthesized
  source 1..20: mol_type = other DNA
agaaacctagagatgattta

SEQ ID NO: 10782 - DNA, 20 bp, synthetic construct
  misc_feature 1..20: note = chemically synthesized
  source 1..20: mol_type = other DNA
tagagatgatttaaagtaca

SEQ ID NO: 10783 - DNA, 20 bp, synthetic construct
  misc_feature 1..20: note = chemically synthesized
  source 1..20: mol_type = other DNA
agagatgatttaaagtacaa

SEQ ID NO: 10784 - DNA, 20 bp, synthetic construct
  misc_feature 1..20: note = chemically synthesized
  source 1..20: mol_type = other DNA
agatgatttaaagtacaaag

SEQ ID NO: 10785 - DNA, 20 bp, synthetic construct
  misc_feature 1..20: note = chemically synthesized
  source 1..20: mol_type = other DNA
gatgatttaaagtacaaagg

SEQ ID NO: 10786 - DNA, 20 bp, synthetic construct
  misc_feature 1..20: note = chemically synthesized
  source 1..20: mol_type = other DNA
agtacaaaggaggatgtgtt

SEQ ID NO: 10787 - DNA, 20 bp, synthetic construct
  misc_feature 1..20: note = chemically synthesized
  source 1..20: mol_type = other DNA
gtacaaaggaggatgtgttt

SEQ ID NO: 10788 - DNA, 20 bp, synthetic construct
  misc_feature 1..20: note = chemically synthesized
  source 1..20: mol_type = other DNA
gtgtttaggttatatgcaaa

SEQ ID NO: 10789 - DNA, 20 bp, synthetic construct
  misc_feature 1..20: note = chemically synthesized
  source 1..20: mol_type = other DNA
ttaggttatatgcaaatagt

SEQ ID NO: 10790 - DNA, 20 bp, synthetic construct
  misc_feature 1..20: note = chemically synthesized
  source 1..20: mol_type = other DNA
atagtaagccatttttatat

SEQ ID NO: 10791 - DNA, 20 bp, synthetic construct
  misc_feature 1..20: note = chemically synthesized
  source 1..20: mol_type = other DNA
agtaagccatttttatatcg

SEQ ID NO: 10792 - DNA, 20 bp, synthetic construct
  misc_feature 1..20: note = chemically synthesized
  source 1..20: mol_type = other DNA
catttttatatcggagactt

SEQ ID NO: 10793 - DNA, 20 bp, synthetic construct
  misc_feature 1..20: note = chemically synthesized
  source 1..20: mol_type = other DNA
atcggagacttgagcatcca

SEQ ID NO: 10794 - DNA, 20 bp, synthetic construct
  misc_feature 1..20: note = chemically synthesized
  source 1..20: mol_type = other DNA
tccacagatcttgatatttg

SEQ ID NO: 10795 - DNA, 20 bp, synthetic construct
  misc_feature 1..20: note = chemically synthesized
  source 1..20: mol_type = other DNA
ccacagatcttgatatttgc

SEQ ID NO: 10796 - DNA, 20 bp, synthetic construct
  misc_feature 1..20: note = chemically synthesized
  source 1..20: mol_type = other DNA
cacagatcttgatatttgca

SEQ ID NO: 10797 - DNA, 20 bp, synthetic construct
  misc_feature 1..20: note = chemically synthesized
  source 1..20: mol_type = other DNA
acagatcttgatatttgcag

SEQ ID NO: 10798 - DNA, 20 bp, synthetic construct
  misc_feature 1..20: note = chemically synthesized
  source 1..20: mol_type = other DNA
cagatcttgatatttgcagg

SEQ ID NO: 10799 - DNA, 20 bp, synthetic construct
  misc_feature 1..20: note = chemically synthesized
  source 1..20: mol_type = other DNA
gtcttgccaccaattttcca

SEQ ID NO: 10800 - DNA, 20 bp, synthetic construct
  misc_feature 1..20: note = chemically synthesized
  source 1..20: mol_type = other DNA
accaattttccatggatact

SEQ ID NO: 10801 - DNA, 20 bp, synthetic construct
  misc_feature 1..20: note = chemically synthesized
  source 1..20: mol_type = other DNA
ccaattttccatggatactg

SEQ ID NO: 10802 - DNA, 20 bp, synthetic construct
  misc_feature 1..20: note = chemically synthesized
  source 1..20: mol_type = other DNA
tactgaggaacgactgtaaa

SEQ ID NO: 10803 - DNA, 20 bp, synthetic construct
  misc_feature 1..20: note = chemically synthesized
  source 1..20: mol_type = other DNA
ggaacgactgtaaatggatg

SEQ ID NO: 10804 - DNA, 20 bp, synthetic construct
  misc_feature 1..20: note = chemically synthesized
  source 1..20: mol_type = other DNA
gaacgactgtaaatggatgc

SEQ ID NO: 10805 - DNA, 20 bp, synthetic construct
  misc_feature 1..20: note = chemically synthesized
  source 1..20: mol_type = other DNA
actgtaaatggatgcaggca

SEQ ID NO: 10806 - DNA, 20 bp, synthetic construct
  misc_feature 1..20: note = chemically synthesized
  source 1..20: mol_type = other DNA
atgcaggcatggatgctatt

SEQ ID NO: 10807 - DNA, 20 bp, synthetic construct
  misc_feature 1..20: note = chemically synthesized
  source 1..20: mol_type = other DNA
tgcaggcatggatgctattt

SEQ ID NO: 10808 - DNA, 20 bp, synthetic construct
  misc_feature 1..20: note = chemically synthesized
  source 1..20: mol_type = other DNA
caggcatggatgctatttag

SEQ ID NO: 10809 - DNA, 20 bp, synthetic construct
  misc_feature 1..20: note = chemically synthesized
  source 1..20: mol_type = other DNA
ggatgctatttaggagtgtc

SEQ ID NO: 10810 - DNA, 20 bp, synthetic construct
  misc_feature 1..20: note = chemically synthesized
  source 1..20: mol_type = other DNA
gatgctatttaggagtgtcc

SEQ ID NO: 10811 - DNA, 20 bp, synthetic construct
  misc_feature 1..20: note = chemically synthesized
  source 1..20: mol_type = other DNA
atgctatttaggagtgtcca

SEQ ID NO: 10812 - DNA, 20 bp, synthetic construct
  misc_feature 1..20: note = chemically synthesized
  source 1..20: mol_type = other DNA
atttaggagtgtccagggcc

SEQ ID NO: 10813 - DNA, 20 bp, synthetic construct
  misc_feature 1..20: note = chemically synthesized
  source 1..20: mol_type = other DNA
gtgtccagggccaagtaaat

SEQ ID NO: 10814 - DNA, 20 bp, synthetic construct
  misc_feature 1..20: note = chemically synthesized
  source 1..20: mol_type = other DNA
ggccaagtaaatgagttgct

SEQ ID NO: 10815 - DNA, 20 bp, synthetic construct
  misc_feature 1..20: note = chemically synthesized
  source 1..20: mol_type = other DNA
caagtaaatgagttgctgag

SEQ ID NO: 10816 - DNA, 20 bp, synthetic construct
  misc_feature 1..20: note = chemically synthesized
  source 1..20: mol_type = other DNA
agtaaatgagttgctgagca

SEQ ID NO: 10817 - DNA, 20 bp, synthetic construct
  misc_feature 1..20: note = chemically synthesized
  source 1..20: mol_type = other DNA
taaatgagttgctgagcaga

SEQ ID NO: 10818 - DNA, 20 bp, synthetic construct
  misc_feature 1..20: note = chemically synthesized
  source 1..20: mol_type = other DNA
aaatgagttgctgagcagag

SEQ ID NO: 10819 - DNA, 20 bp, synthetic construct
  misc_feature 1..20: note = chemically synthesized
  source 1..20: mol_type = other DNA
tgagttgctgagcagagagg

SEQ ID NO: 10820 - DNA, 20 bp, synthetic construct
  misc_feature 1..20: note = chemically synthesized
  source 1..20: mol_type = other DNA
gagttgctgagcagagaggt

SEQ ID NO: 10821 - DNA, 20 bp, synthetic construct
  misc_feature 1..20: note = chemically synthesized
  source 1..20: mol_type = other DNA
ttgctgagcagagaggtggg

SEQ ID NO: 10822 - DNA, 20 bp, synthetic construct
  misc_feature 1..20: note = chemically synthesized
  source 1..20: mol_type = other DNA
gctgagcagagaggtgggtg

SEQ ID NO: 10823 - DNA, 20 bp, synthetic construct
  misc_feature 1..20: note = chemically synthesized
  source 1..20: mol_type = other DNA
ctgagcagagaggtgggtgg

SEQ ID NO: 10824 - DNA, 20 bp, synthetic construct
  misc_feature 1..20: note = chemically synthesized
  source 1..20: mol_type = other DNA
gagaggtgggtggaggctgt

SEQ ID NO: 10825 - DNA, 20 bp, synthetic construct
  misc_feature 1..20: note = chemically synthesized
  source 1..20: mol_type = other DNA
agaggtgggtggaggctgtg

SEQ ID NO: 10826 - DNA, 20 bp, synthetic construct
  misc_feature 1..20: note = chemically synthesized
  source 1..20: mol_type = other DNA
ggctgtgaggcatcaatatg

SEQ ID NO: 10827 - DNA, 20 bp, synthetic construct
  misc_feature 1..20: note = chemically synthesized
  source 1..20: mol_type = other DNA
tgtgaggcatcaatatgtgg

SEQ ID NO: 10828 - DNA, 20 bp, synthetic construct
  misc_feature 1..20: note = chemically synthesized
  source 1..20: mol_type = other DNA
ggtggcatccatctgcattt

SEQ ID NO: 10829 - DNA, 20 bp, synthetic construct
  misc_feature 1..20: note = chemically synthesized
  source 1..20: mol_type = other DNA
ttggtgatttttttccttca

SEQ ID NO: 10830 - DNA, 20 bp, synthetic construct
  misc_feature 1..20: note = chemically synthesized
  source 1..20: mol_type = other DNA
tttttttccttcacagtcct

SEQ ID NO: 10831 - DNA, 20 bp, synthetic construct
  misc_feature 1..20: note = chemically synthesized
  source 1..20: mol_type = other DNA
cttcacagtcctcggctgtc

SEQ ID NO: 10832 - DNA, 20 bp, synthetic construct
  misc_feature 1..20: note = chemically synthesized
  source 1..20: mol_type = other DNA
ttcacagtcctcggctgtct

SEQ ID NO: 10833 - DNA, 20 bp, synthetic construct
  misc_feature 1..20: note = chemically synthesized
  source 1..20: mol_type = other DNA
acagtcctcggctgtctggg

SEQ ID NO: 10834 - DNA, 20 bp, synthetic construct
  misc_feature 1..20: note = chemically synthesized
  source 1..20: mol_type = other DNA
agtcctcggctgtctgggaa

SEQ ID NO: 10835 - DNA, 20 bp, synthetic construct
  misc_feature 1..20: note = chemically synthesized
  source 1..20: mol_type = other DNA
cctcggctgtctgggaagag

SEQ ID NO: 10836 - DNA, 20 bp, synthetic construct
  misc_feature 1..20: note = chemically synthesized
  source 1..20: mol_type = other DNA
ctcggctgtctgggaagaga

SEQ ID NO: 10837 - DNA, 20 bp, synthetic construct
  misc_feature 1..20: note = chemically synthesized
  source 1..20: mol_type = other DNA
tgtctgggaagagaaggatg

SEQ ID NO: 10838 - DNA, 20 bp, synthetic construct
  misc_feature 1..20: note = chemically synthesized
  source 1..20: mol_type = other DNA
gtctgggaagagaaggatga

SEQ ID NO: 10839 - DNA, 20 bp, synthetic construct
  misc_feature 1..20: note = chemically synthesized
  source 1..20: mol_type = other DNA
tgggaagagaaggatgaagg

SEQ ID NO: 10840 - DNA, 20 bp, synthetic construct
  misc_feature 1..20: note = chemically synthesized
  source 1..20: mol_type = other DNA
aagagaaggatgaaggcaga

SEQ ID NO: 10841 - DNA, 20 bp, synthetic construct
  misc_feature 1..20: note = chemically synthesized
  source 1..20: mol_type = other DNA
ggcagatggctgctccaatt

SEQ ID NO: 10842 - DNA, 20 bp, synthetic construct
  misc_feature 1..20: note = chemically synthesized
  source 1..20: mol_type = other DNA
gcagatggctgctccaattt

SEQ ID NO: 10843 - DNA, 20 bp, synthetic construct
  misc_feature 1..20: note = chemically synthesized
  source 1..20: mol_type = other DNA
cagatggctgctccaattta

SEQ ID NO: 10844 - DNA, 20 bp, synthetic construct
  misc_feature 1..20: note = chemically synthesized
  source 1..20: mol_type = other DNA
agatggctgctccaatttag

SEQ ID NO: 10845 - DNA, 20 bp, synthetic construct
  misc_feature 1..20: note = chemically synthesized
  source 1..20: mol_type = other DNA
ggctgctccaatttaggggc

SEQ ID NO: 10846 - DNA, 20 bp, synthetic construct
  misc_feature 1..20: note = chemically synthesized
  source 1..20: mol_type = other DNA
gctgctccaatttaggggct

SEQ ID NO: 10847 - DNA, 20 bp, synthetic construct
  misc_feature 1..20: note = chemically synthesized
  source 1..20: mol_type = other DNA
caatttaggggctaggattg

SEQ ID NO: 10848 - DNA, 20 bp, synthetic construct
  misc_feature 1..20: note = chemically synthesized
  source 1..20: mol_type = other DNA
aatttaggggctaggattgc

SEQ ID NO: 10849 - DNA, 20 bp, synthetic construct
  misc_feature 1..20: note = chemically synthesized
  source 1..20: mol_type = other DNA
atttaggggctaggattgca

SEQ ID NO: 10850 - DNA, 20 bp, synthetic construct
  misc_feature 1..20: note = chemically synthesized
  source 1..20: mol_type = other DNA
taggggctaggattgcaggg

SEQ ID NO: 10851 - DNA, 20 bp, synthetic construct
  misc_feature 1..20: note = chemically synthesized
  source 1..20: mol_type = other DNA
aggggctaggattgcagggt

SEQ ID NO: 10852 - DNA, 20 bp, synthetic construct
  misc_feature 1..20: note = chemically synthesized
  source 1..20: mol_type = other DNA
ctaggattgcagggtgggca

SEQ ID NO: 10853 - DNA, 20 bp, synthetic construct
  misc_feature 1..20: note = chemically synthesized
  source 1..20: mol_type = other DNA
gtgggcacagcattgcaaac

SEQ ID NO: 10854 - DNA, 20 bp, synthetic construct
  misc_feature 1..20: note = chemically synthesized
  source 1..20: mol_type = other DNA
cacagcattgcaaacgagtg

SEQ ID NO: 10855 - DNA, 20 bp, synthetic construct
  misc_feature 1..20: note = chemically synthesized
  source 1..20: mol_type = other DNA
acagcattgcaaacgagtga

SEQ ID NO: 10856 - DNA, 20 bp, synthetic construct
  misc_feature 1..20: note = chemically synthesized
  source 1..20: mol_type = other DNA
gcaaacgagtgaaggaaatt

SEQ ID NO: 10857 - DNA, 20 bp, synthetic construct
  misc_feature 1..20: note = chemically synthesized
  source 1..20: mol_type = other DNA
gtgaaggaaattgagaaata

SEQ ID NO: 10858 - DNA, 20 bp, synthetic construct
  misc_feature 1..20: note = chemically synthesized
  source 1..20: mol_type = other DNA
attgagaaatatggccaatg

SEQ ID NO: 10859 - DNA, 20 bp, synthetic construct
  misc_feature 1..20: note = chemically synthesized
  source 1..20: mol_type = other DNA
tgagaaatatggccaatgaa

SEQ ID NO: 10860 - DNA, 20 bp, synthetic construct
  misc_feature 1..20: note = chemically synthesized
  source 1..20: mol_type = other DNA
atatggccaatgaagagttg

SEQ ID NO: 10861 - DNA, 20 bp, synthetic construct
  misc_feature 1..20: note = chemically synthesized
  source 1..20: mol_type = other DNA
atggccaatgaagagttgaa

SEQ ID NO: 10862 - DNA, 20 bp, synthetic construct
  misc_feature 1..20: note = chemically synthesized
  source 1..20: mol_type = other DNA
ggccaatgaagagttgaaga

SEQ ID NO: 10863 - DNA, 20 bp, synthetic construct
  misc_feature 1..20: note = chemically synthesized
  source 1..20: mol_type = other DNA
gccaatgaagagttgaagag

SEQ ID NO: 10864 - DNA, 20 bp, synthetic construct
  misc_feature 1..20: note = chemically synthesized
  source 1..20: mol_type = other DNA
tgaagagttgaagagaggcc

SEQ ID NO: 10865 - DNA, 20 bp, synthetic construct
  misc_feature 1..20: note = chemically synthesized
  source 1..20: mol_type = other DNA
agttgaagagaggcctggca

SEQ ID NO: 10866 - DNA, 20 bp, synthetic construct
  misc_feature 1..20: note = chemically synthesized
  source 1..20: mol_type = other DNA
tgaagagaggcctggcatgg

SEQ ID NO: 10867 - DNA, 20 bp, synthetic construct
  misc_feature 1..20: note = chemically synthesized
  source 1..20: mol_type = other DNA
gtggctcacacctataatcc

SEQ ID NO: 10868 - DNA, 20 bp, synthetic construct
  misc_feature 1..20: note = chemically synthesized
  source 1..20: mol_type = other DNA
acctataatcccagcacttt

SEQ ID NO: 10869 - DNA, 20 bp, synthetic construct
  misc_feature 1..20: note = chemically synthesized
  source 1..20: mol_type = other DNA
ctataatcccagcactttca

SEQ ID NO: 10870 - DNA, 20 bp, synthetic construct
  misc_feature 1..20: note = chemically synthesized
  source 1..20: mol_type = other DNA
tataatcccagcactttcag

SEQ ID NO: 10871 - DNA, 20 bp, synthetic construct
  misc_feature 1..20: note = chemically synthesized
  source 1..20: mol_type = other DNA
tcccagcactttcagaggcc

SEQ ID NO: 10872 - DNA, 20 bp, synthetic construct
  misc_feature 1..20: note = chemically synthesized
  source 1..20: mol_type = other DNA
cccagcactttcagaggccc

SEQ ID NO: 10873 - DNA, 20 bp, synthetic construct
  misc_feature 1..20: note = chemically synthesized
  source 1..20: mol_type = other DNA
agcactttcagaggcccagg

SEQ ID NO: 10874 - DNA, 20 bp, synthetic construct
  misc_feature 1..20: note = chemically synthesized
  source 1..20: mol_type = other DNA
gcactttcagaggcccaggc

SEQ ID NO: 10875 - DNA, 20 bp, synthetic construct
  misc_feature 1..20: note = chemically synthesized
  source 1..20: mol_type = other DNA
ctttcagaggcccaggcagg

SEQ ID NO: 10876 - DNA, 20 bp, synthetic construct
  misc_feature 1..20: note = chemically synthesized
  source 1..20: mol_type = other DNA
cccaggcaggcagatcactt

SEQ ID NO: 10877 - DNA, 20 bp, synthetic construct
  misc_feature 1..20: note = chemically synthesized
  source 1..20: mol_type = other DNA
ccaggcaggcagatcacttg

SEQ ID NO: 10878 - DNA, 20 bp, synthetic construct
  misc_feature 1..20: note = chemically synthesized
  source 1..20: mol_type = other DNA
gcaggcagatcacttgaggt

SEQ ID NO: 10879 - DNA, 20 bp, synthetic construct
  misc_feature 1..20: note = chemically synthesized
  source 1..20: mol_type = other DNA
caggcagatcacttgaggtc

SEQ ID NO: 10880 - DNA, 20 bp, synthetic construct
  misc_feature 1..20: note = chemically synthesized
  source 1..20: mol_type = other DNA
ggcagatcacttgaggtcag

SEQ ID NO: 10881 - DNA, 20 bp, synthetic construct
  misc_feature 1..20: note = chemically synthesized
  source 1..20: mol_type = other DNA
tgaggtcaggagttcgacac

SEQ ID NO: 10882 - DNA, 20 bp, synthetic construct
  misc_feature 1..20: note = chemically synthesized
  source 1..20: mol_type = other DNA
tcaggagttcgacaccagcc

SEQ ID NO: 10883 - DNA, 20 bp, synthetic construct
  misc_feature 1..20: note = chemically synthesized
  source 1..20: mol_type = other DNA
tcgacaccagcctggccaac

SEQ ID NO: 10884 - DNA, 20 bp, synthetic construct
  misc_feature 1..20: note = chemically synthesized
  source 1..20: mol_type = other DNA
cgacaccagcctggccaaca

SEQ ID NO: 10885 - DNA, 20 bp, synthetic construct
  misc_feature 1..20: note = chemically synthesized
  source 1..20: mol_type = other DNA
gcctggccaacaaggtgaaa

SEQ ID NO: 10886 - DNA, 20 bp, synthetic construct
  misc_feature 1..20: note = chemically synthesized
  source 1..20: mol_type = other DNA
aaggtgaaatggtgaaaccc

SEQ ID NO: 10887 - DNA, 20 bp, synthetic construct
  misc_feature 1..20: note = chemically synthesized
  source 1..20: mol_type = other DNA
tttactaaaaatacaaaaat

SEQ ID NO: 10888 - DNA, 20 bp, synthetic construct
  misc_feature 1..20: note = chemically synthesized
  source 1..20: mol_type = other DNA
ctaaaaatacaaaaattagc

SEQ ID NO: 10889 - DNA, 20 bp, synthetic construct
  misc_feature 1..20: note = chemically synthesized
  source 1..20: mol_type = other DNA
taaaaatacaaaaattagct

SEQ ID NO: 10890 - DNA, 20 bp, synthetic construct
  misc_feature 1..20: note = chemically synthesized
  source 1..20: mol_type = other DNA
atacaaaaattagctgggca

SEQ ID NO: 10891 - DNA, 20 bp, synthetic construct
  misc_feature 1..20: note = chemically synthesized
  source 1..20: mol_type = other DNA
caaaaattagctgggcatgg

SEQ ID NO: 10892 - DNA, 20 bp, synthetic construct
  misc_feature 1..20: note = chemically synthesized
  source 1..20: mol_type = other DNA
aaattagctgggcatggtgg

SEQ ID NO: 10893 - DNA, 20 bp, synthetic construct
  misc_feature 1..20: note = chemically synthesized
  source 1..20: mol_type = other DNA
aattagctgggcatggtggc

SEQ ID NO: 10894 - DNA, 20 bp, synthetic construct
  misc_feature 1..20: note = chemically synthesized
  source 1..20: mol_type = other DNA
gtggcgggtgcctgtaatcc

SEQ ID NO: 10895 - DNA, 20 bp, synthetic construct
  misc_feature 1..20: note = chemically synthesized
  source 1..20: mol_type = other DNA
tgcctgtaatcccagctact

SEQ ID NO: 10896 - DNA, 20 bp, synthetic construct
  misc_feature 1..20: note = chemically synthesized
  source 1..20: mol_type = other DNA
gcctgtaatcccagctactt

SEQ ID NO: 10897 - DNA, 20 bp, synthetic construct
  misc_feature 1..20: note = chemically synthesized
  source 1..20: mol_type = other DNA
ctgtaatcccagctacttgg

SEQ ID NO: 10898 - DNA, 20 bp, synthetic construct
  misc_feature 1..20: note = chemically synthesized
  source 1..20: mol_type = other DNA
tgtaatcccagctacttggg

SEQ ID NO: 10899 - DNA, 20 bp, synthetic construct
  misc_feature 1..20: note = chemically synthesized
  source 1..20: mol_type = other DNA
tcccagctacttgggaggct

SEQ ID NO: 10900 - DNA, 20 bp, synthetic construct
  misc_feature 1..20: note = chemically synthesized
  source 1..20: mol_type = other DNA
cccagctacttgggaggctg

SEQ ID NO: 10901 - DNA, 20 bp, synthetic construct
  misc_feature 1..20: note = chemically synthesized
  source 1..20: mol_type = other DNA
agctacttgggaggctgagg

SEQ ID NO: 10902 - DNA, 20 bp, synthetic construct
  misc_feature 1..20: note = chemically synthesized
  source 1..20: mol_type = other DNA
gctacttgggaggctgaggc

SEQ ID NO: 10903 - DNA, 20 bp, synthetic construct
  misc_feature 1..20: note = chemically synthesized
  source 1..20: mol_type = other DNA
tacttgggaggctgaggcag

SEQ ID NO: 10904 - DNA, 20 bp, synthetic construct
  misc_feature 1..20: note = chemically synthesized
  source 1..20: mol_type = other DNA
gggaggctgaggcaggagaa

SEQ ID NO: 10905 - DNA, 20 bp, synthetic construct
  misc_feature 1..20: note = chemically synthesized
  source 1..20: mol_type = other DNA
gcaggagaatagcttgaacc

SEQ ID NO: 10906 - DNA, 20 bp, synthetic construct
  misc_feature 1..20: note = chemically synthesized
  source 1..20: mol_type = other DNA
caggagaatagcttgaacct

SEQ ID NO: 10907 - DNA, 20 bp, synthetic construct
  misc_feature 1..20: note = chemically synthesized
  source 1..20: mol_type = other DNA
ggagaatagcttgaacctgg

SEQ ID NO: 10908 - DNA, 20 bp, synthetic construct
  misc_feature 1..20: note = chemically synthesized
  source 1..20: mol_type = other DNA
aatagcttgaacctgggaga

SEQ ID NO: 10909 - DNA, 20 bp, synthetic construct
  misc_feature 1..20: note = chemically synthesized
  source 1..20: mol_type = other DNA
tagcttgaacctgggagatg

SEQ ID NO: 10910 - DNA, 20 bp, synthetic construct
  misc_feature 1..20: note = chemically synthesized
  source 1..20: mol_type = other DNA
agcttgaacctgggagatgg

SEQ ID NO: 10911 - DNA, 20 bp, synthetic construct
  misc_feature 1..20: note = chemically synthesized
  source 1..20: mol_type = other DNA
aacctgggagatggaggttg

SEQ ID NO: 10912 - DNA, 20 bp, synthetic construct
  misc_feature 1..20: note = chemically synthesized
  source 1..20: mol_type = other DNA
tgggagatggaggttgcagt

SEQ ID NO: 10913 - DNA, 20 bp, synthetic construct
  misc_feature 1..20: note = chemically synthesized
  source 1..20: mol_type = other DNA
gatggaggttgcagtgagct

SEQ ID NO: 10914 - DNA, 20 bp, synthetic construct
  misc_feature 1..20: note = chemically synthesized
  source 1..20: mol_type = other DNA
gagatcgcaccactgcactc

SEQ ID NO: 10915 - DNA, 20 bp, synthetic construct
  misc_feature 1..20: note = chemically synthesized
  source 1..20: mol_type = other DNA
cgcaccactgcactccagcc

SEQ ID NO: 10916 - DNA, 20 bp, synthetic construct
  misc_feature 1..20: note = chemically synthesized
  source 1..20: mol_type = other DNA
gcaccactgcactccagcct

SEQ ID NO: 10917 - DNA, 20 bp, synthetic construct
  misc_feature 1..20: note = chemically synthesized
  source 1..20: mol_type = other DNA
ctgcactccagcctgggcga

SEQ ID NO: 10918 - DNA, 20 bp, synthetic construct
  misc_feature 1..20: note = chemically synthesized
  source 1..20: mol_type = other DNA
gcactccagcctgggcgaca

SEQ ID NO: 10919 - DNA, 20 bp, synthetic construct
  misc_feature 1..20: note = chemically synthesized
  source 1..20: mol_type = other DNA
tccagcctgggcgacagagc

SEQ ID NO: 10920 - DNA, 20 bp, synthetic construct
  misc_feature 1..20: note = chemically synthesized
  source 1..20: mol_type = other DNA
caagactctgtcaaaaaaaa

SEQ ID NO: 10921 - DNA, 20 bp, synthetic construct
  misc_feature 1..20: note = chemically synthesized
  source 1..20: mol_type = other DNA
agactctgtcaaaaaaaaaa

SEQ ID NO: 10922 - DNA, 20 bp, synthetic construct
  misc_feature 1..20: note = chemically synthesized
  source 1..20: mol_type = other DNA
tgtcaaaaaaaaaagagttg

SEQ ID NO: 10923 - DNA, 20 bp, synthetic construct
  misc_feature 1..20: note = chemically synthesized
  source 1..20: mol_type = other DNA
tcaaaaaaaaaagagttgaa

SEQ ID NO: 10924 - DNA, 20 bp, synthetic construct
  misc_feature 1..20: note = chemically synthesized
  source 1..20: mol_type = other DNA
aaaaaagagttgaagagaaa

SEQ ID NO: 10925 - DNA, 20 bp, synthetic construct
  misc_feature 1..20: note = chemically synthesized
  source 1..20: mol_type = other DNA
agagttgaagagaaaaagtc

SEQ ID NO: 10926 - DNA, 20 bp, synthetic construct
  misc_feature 1..20: note = chemically synthesized
  source 1..20: mol_type = other DNA
gagttgaagagaaaaagtct

SEQ ID NO: 10927 - DNA, 20 bp, synthetic construct
  misc_feature 1..20: note = chemically synthesized
  source 1..20: mol_type = other DNA
aaaagtctaggctaaattca

SEQ ID NO: 10928 - DNA, 20 bp, synthetic construct
  misc_feature 1..20: note = chemically synthesized
  source 1..20: mol_type = other DNA
aggctaaattcaaagaaaaa

SEQ ID NO: 10929 - DNA, 20 bp, synthetic construct
  misc_feature 1..20: note = chemically synthesized
  source 1..20: mol_type = other DNA
taaattcaaagaaaaaaagt

SEQ ID NO: 10930 - DNA, 20 bp, synthetic construct
  misc_feature 1..20: note = chemically synthesized
  source 1..20: mol_type = other DNA
aagaaaaaaagtgagcccaa

SEQ ID NO: 10931 - DNA, 20 bp, synthetic construct
  misc_feature 1..20: note = chemically synthesized
  source 1..20: mol_type = other DNA
agaaaaaaagtgagcccaaa

SEQ ID NO: 10932 - DNA, 20 bp, synthetic construct
  misc_feature 1..20: note = chemically synthesized
  source 1..20: mol_type = other DNA
gtgagcccaaaaggaacttg

SEQ ID NO: 10933 - DNA, 20 bp, synthetic construct
  misc_feature 1..20: note = chemically synthesized
  source 1..20: mol_type = other DNA
gagcccaaaaggaacttgca

SEQ ID NO: 10934 - DNA, 20 bp, synthetic construct
  misc_feature 1..20: note = chemically synthesized
  source 1..20: mol_type = other DNA
ccaaaaggaacttgcagagc

SEQ ID NO: 10935 - DNA, 20 bp, synthetic construct
  misc_feature 1..20: note = chemically synthesized
  source 1..20: mol_type = other DNA
caaaaggaacttgcagagca

SEQ ID NO: 10936 - DNA, 20 bp, synthetic construct
  misc_feature 1..20: note = chemically synthesized
  source 1..20: mol_type = other DNA
aaaaggaacttgcagagcaa

SEQ ID NO: 10937 - DNA, 20 bp, synthetic construct
  misc_feature 1..20: note = chemically synthesized
  source 1..20: mol_type = other DNA
gaacttgcagagcaagggaa

SEQ ID NO: 10938 - DNA, 20 bp, synthetic construct
  misc_feature 1..20: note = chemically synthesized
  source 1..20: mol_type = other DNA
cttgcagagcaagggaaaag

SEQ ID NO: 10939 - DNA, 20 bp, synthetic construct
  misc_feature 1..20: note = chemically synthesized
  source 1..20: mol_type = other DNA
ttgcagagcaagggaaaagc

SEQ ID NO: 10940 - DNA, 20 bp, synthetic construct
  misc_feature 1..20: note = chemically synthesized
  source 1..20: mol_type = other DNA
tgcagagcaagggaaaagca

SEQ ID NO: 10941 - DNA, 20 bp, synthetic construct
  misc_feature 1..20: note = chemically synthesized
  source 1..20: mol_type = other DNA
aagggaaaagcagggatgtc

SEQ ID NO: 10942 - DNA, 20 bp, synthetic construct
  misc_feature 1..20: note = chemically synthesized
  source 1..20: mol_type = other DNA
agggaaaagcagggatgtca

SEQ ID NO: 10943 - DNA, 20 bp, synthetic construct
  misc_feature 1..20: note = chemically synthesized
  source 1..20: mol_type = other DNA
gggaaaagcagggatgtcaa

SEQ ID NO: 10944 - DNA, 20 bp, synthetic construct
  misc_feature 1..20: note = chemically synthesized
  source 1..20: mol_type = other DNA
aagcagggatgtcaagggac

SEQ ID NO: 10945 - DNA, 20 bp, synthetic construct
  misc_feature 1..20: note = chemically synthesized
  source 1..20: mol_type = other DNA
agggactagaacactccata

SEQ ID NO: 10946 - DNA, 20 bp, synthetic construct
  misc_feature 1..20: note = chemically synthesized
  source 1..20: mol_type = other DNA
agaacactccataaagtgaa

SEQ ID NO: 10947 - DNA, 20 bp, synthetic construct
  misc_feature 1..20: note = chemically synthesized
  source 1..20: mol_type = other DNA
tgaacagctgcaatgaaaat

SEQ ID NO: 10948 - DNA, 20 bp, synthetic construct
  misc_feature 1..20: note = chemically synthesized
  source 1..20: mol_type = other DNA
gaacagctgcaatgaaaata

SEQ ID NO: 10949 - DNA, 20 bp, synthetic construct
  misc_feature 1..20: note = chemically synthesized
  source 1..20: mol_type = other DNA
aacagctgcaatgaaaataa

SEQ ID NO: 10950 - DNA, 20 bp, synthetic construct
  misc_feature 1..20: note = chemically synthesized
  source 1..20: mol_type = other DNA
agctgcaatgaaaataaggg

SEQ ID NO: 10951 - DNA, 20 bp, synthetic construct
  misc_feature 1..20: note = chemically synthesized
  source 1..20: mol_type = other DNA
gcaatgaaaataagggaaga

SEQ ID NO: 10952 - DNA, 20 bp, synthetic construct
  misc_feature 1..20: note = chemically synthesized
  source 1..20: mol_type = other DNA
gaaaataagggaagaaagtt

SEQ ID NO: 10953 - DNA, 20 bp, synthetic construct
  misc_feature 1..20: note = chemically synthesized
  source 1..20: mol_type = other DNA
ctttcctttctcttcctttt

SEQ ID NO: 10954 - DNA, 20 bp, synthetic construct
  misc_feature 1..20: note = chemically synthesized
  source 1..20: mol_type = other DNA
ttcctttctcttcctttttg

SEQ ID NO: 10955 - DNA, 20 bp, synthetic construct
  misc_feature 1..20: note = chemically synthesized
  source 1..20: mol_type = other DNA
tcttcctttttggagttaat

SEQ ID NO: 10956 - DNA, 20 bp, synthetic construct
  misc_feature 1..20: note = chemically synthesized
  source 1..20: mol_type = other DNA
cttcctttttggagttaatc

SEQ ID NO: 10957 - DNA, 20 bp, synthetic construct
  misc_feature 1..20: note = chemically synthesized
  source 1..20: mol_type = other DNA
cctttttggagttaatcagg

SEQ ID NO: 10958 - DNA, 20 bp, synthetic construct
  misc_feature 1..20: note = chemically synthesized
  source 1..20: mol_type = other DNA
ttttggagttaatcaggaag

SEQ ID NO: 10959 - DNA, 20 bp, synthetic construct
  misc_feature 1..20: note = chemically synthesized
  source 1..20: mol_type = other DNA
ggaagtagtcccaaataccc

SEQ ID NO: 10960 - DNA, 20 bp, synthetic construct
  misc_feature 1..20: note = chemically synthesized
  source 1..20: mol_type = other DNA
gtagtcccaaataccccaga

SEQ ID NO: 10961 - DNA, 20 bp, synthetic construct
  misc_feature 1..20: note = chemically synthesized
  source 1..20: mol_type = other DNA
ccccagaaagttcatcttat

SEQ ID NO: 10962 - DNA, 20 bp, synthetic construct
  misc_feature 1..20: note = chemically synthesized
  source 1..20: mol_type = other DNA
aagttcatcttataagccct

SEQ ID NO: 10963 - DNA, 20 bp, synthetic construct
  misc_feature 1..20: note = chemically synthesized
  source 1..20: mol_type = other DNA
tataagcccttggtcctctt

SEQ ID NO: 10964 - DNA, 20 bp, synthetic construct
  misc_feature 1..20: note = chemically synthesized
  source 1..20: mol_type = other DNA
agcccttggtcctcttgaga

SEQ ID NO: 10965 - DNA, 20 bp, synthetic construct
  misc_feature 1..20: note = chemically synthesized
  source 1..20: mol_type = other DNA
tggtcctcttgagatggtat

SEQ ID NO: 10966 - DNA, 20 bp, synthetic construct
  misc_feature 1..20: note = chemically synthesized
  source 1..20: mol_type = other DNA
gatggtatcagatatattgc

SEQ ID NO: 10967 - DNA, 20 bp, synthetic construct
  misc_feature 1..20: note = chemically synthesized
  source 1..20: mol_type = other DNA
gatatattgctagacccttg

SEQ ID NO: 10968 - DNA, 20 bp, synthetic construct
  misc_feature 1..20: note = chemically synthesized
  source 1..20: mol_type = other DNA
tattgctagacccttgaaga

SEQ ID NO: 10969 - DNA, 20 bp, synthetic construct
  misc_feature 1..20: note = chemically synthesized
  source 1..20: mol_type = other DNA
attgctagacccttgaagaa

SEQ ID NO: 10970 - DNA, 20 bp, synthetic construct
  misc_feature 1..20: note = chemically synthesized
  source 1..20: mol_type = other DNA
cttgaagaaaggaacaactc

SEQ ID NO: 10971 - DNA, 20 bp, synthetic construct
  misc_feature 1..20: note = chemically synthesized
  source 1..20: mol_type = other DNA
ttgaagaaaggaacaactcc

SEQ ID NO: 10972 - DNA, 20 bp, synthetic construct
  misc_feature 1..20: note = chemically synthesized
  source 1..20: mol_type = other DNA
acaactccaggcaacttctt

SEQ ID NO: 10973 - DNA, 20 bp, synthetic construct
  misc_feature 1..20: note = chemically synthesized
  source 1..20: mol_type = other DNA
caaacacatgtgtgtgtata

SEQ ID NO: 10974 - DNA, 20 bp, synthetic construct
  misc_feature 1..20: note = chemically synthesized
  source 1..20: mol_type = other DNA
agccatgcattccttaacaa

SEQ ID NO: 10975 - DNA, 20 bp, synthetic construct
  misc_feature 1..20: note = chemically synthesized
  source 1..20: mol_type = other DNA
gccatgcattccttaacaat

SEQ ID NO: 10976 - DNA, 20 bp, synthetic construct
  misc_feature 1..20: note = chemically synthesized
  source 1..20: mol_type = other DNA
ccatgcattccttaacaatg

SEQ ID NO: 10977 - DNA, 20 bp, synthetic construct
  misc_feature 1..20: note = chemically synthesized
  source 1..20: mol_type = other DNA
taacaatggggatatattct

SEQ ID NO: 10978 - DNA, 20 bp, synthetic construct
  misc_feature 1..20: note = chemically synthesized
  source 1..20: mol_type = other DNA
attctgagaaatgtgtcatt

SEQ ID NO: 10979 - DNA, 20 bp, synthetic construct
  misc_feature 1..20: note = chemically synthesized
  source 1..20: mol_type = other DNA
tcatcattgtgcgaacataa

SEQ ID NO: 10980 - DNA, 20 bp, synthetic construct
  misc_feature 1..20: note = chemically synthesized
  source 1..20: mol_type = other DNA
atcattgtgcgaacataata

SEQ ID NO: 10981 - DNA, 20 bp, synthetic construct
  misc_feature 1..20: note = chemically synthesized
  source 1..20: mol_type = other DNA
tgtacttacctaaacctaaa

SEQ ID NO: 10982 - DNA, 20 bp, synthetic construct
  misc_feature 1..20: note = chemically synthesized
  source 1..20: mol_type = other DNA
ttacctaaacctaaatggta

SEQ ID NO: 10983 - DNA, 20 bp, synthetic construct
  misc_feature 1..20: note = chemically synthesized
  source 1..20: mol_type = other DNA
ggtatagcttactacatacc

SEQ ID NO: 10984 - DNA, 20 bp, synthetic construct
  misc_feature 1..20: note = chemically synthesized
  source 1..20: mol_type = other DNA
gtatagcttactacatacct

SEQ ID NO: 10985 - DNA, 20 bp, synthetic construct
  misc_feature 1..20: note = chemically synthesized
  source 1..20: mol_type = other DNA
atacctaggttgtattgatg

SEQ ID NO: 10986 - DNA, 20 bp, synthetic construct
  misc_feature 1..20: note = chemically synthesized
  source 1..20: mol_type = other DNA
ttgatgtggcctattgctcc

SEQ ID NO: 10987 - DNA, 20 bp, synthetic construct
  misc_feature 1..20: note = chemically synthesized
  source 1..20: mol_type = other DNA
tgatgtggcctattgctcct

SEQ ID NO: 10988 - DNA, 20 bp, synthetic construct
  misc_feature 1..20: note = chemically synthesized
  source 1..20: mol_type = other DNA
gcctattgctcctaggctcc

SEQ ID NO: 10989 - DNA, 20 bp, synthetic construct
  misc_feature 1..20: note = chemically synthesized
  source 1..20: mol_type = other DNA
cctattgctcctaggctcct

SEQ ID NO: 10990 - DNA, 20 bp, synthetic construct
  misc_feature 1..20: note = chemically synthesized
  source 1..20: mol_type = other DNA
tcctgggctgcaaacctgta

SEQ ID NO: 10991 - DNA, 20 bp, synthetic construct
  misc_feature 1..20: note = chemically synthesized
  source 1..20: mol_type = other DNA
tgtgactgtactgaacactg

SEQ ID NO: 10992 - DNA, 20 bp, synthetic construct
  misc_feature 1..20: note = chemically synthesized
  source 1..20: mol_type = other DNA
gtgactgtactgaacactgt

SEQ ID NO: 10993 - DNA, 20 bp, synthetic construct
  misc_feature 1..20: note = chemically synthesized
  source 1..20: mol_type = other DNA
gtactgaacactgtaggcaa

SEQ ID NO: 10994 - DNA, 20 bp, synthetic construct
  misc_feature 1..20: note = chemically synthesized
  source 1..20: mol_type = other DNA
aacactgtaggcaatggtaa

SEQ ID NO: 10995 - DNA, 20 bp, synthetic construct
  misc_feature 1..20: note = chemically synthesized
  source 1..20: mol_type = other DNA
actgtaggcaatggtaacag

SEQ ID NO: 10996 - DNA, 20 bp, synthetic construct
  misc_feature 1..20: note = chemically synthesized
  source 1..20: mol_type = other DNA
ggtatttgtgtatctaaaca

SEQ ID NO: 10997 - DNA, 20 bp, synthetic construct
  misc_feature 1..20: note = chemically synthesized
  source 1..20: mol_type = other DNA
ttgtgtatctaaacatagaa

SEQ ID NO: 10998 - DNA, 20 bp, synthetic construct
  misc_feature 1..20: note = chemically synthesized
  source 1..20: mol_type = other DNA
tgtgtatctaaacatagaaa

SEQ ID NO: 10999 - DNA, 20 bp, synthetic construct
  misc_feature 1..20: note = chemically synthesized
  source 1..20: mol_type = other DNA
atctaaacatagaaaaggta

SEQ ID NO: 11000 - DNA, 20 bp, synthetic construct
  misc_feature 1..20: note = chemically synthesized
  source 1..20: mol_type = other DNA
gaaaaggtacagtgaaaata

SEQ ID NO: 11001 - DNA, 20 bp, synthetic construct
  misc_feature 1..20: note = chemically synthesized
  source 1..20: mol_type = other DNA
aatacagtattataacctta

SEQ ID NO: 11002 - DNA, 20 bp, synthetic construct
  misc_feature 1..20: note = chemically synthesized
  source 1..20: mol_type = other DNA
atacagtattataaccttat

SEQ ID NO: 11003 - DNA, 20 bp, synthetic construct
  misc_feature 1..20: note = chemically synthesized
  source 1..20: mol_type = other DNA
gggaccactgtcgtataatg

SEQ ID NO: 11004 - DNA, 20 bp, synthetic construct
  misc_feature 1..20: note = chemically synthesized
  source 1..20: mol_type = other DNA
ttgaccaaaatgtcattgtg

SEQ ID NO: 11005 - DNA, 20 bp, synthetic construct
  misc_feature 1..20: note = chemically synthesized
  source 1..20: mol_type = other DNA
tatatgtacacacacacaca

SEQ ID NO: 11006 - DNA, 20 bp, synthetic construct
  misc_feature 1..20: note = chemically synthesized
  source 1..20: mol_type = other DNA
tatgtacacacacacacata

SEQ ID NO: 11007 - DNA, 20 bp, synthetic construct
  misc_feature 1..20: note = chemically synthesized
  source 1..20: mol_type = other DNA
tgtacacacacacacataga

SEQ ID NO: 11008 - DNA, 20 bp, synthetic construct
  misc_feature 1..20: note = chemically synthesized
  source 1..20: mol_type = other DNA
tacacacacacacatagaga

SEQ ID NO: 11009 - DNA, 20 bp, synthetic construct
  misc_feature 1..20: note = chemically synthesized
  source 1..20: mol_type = other DNA
cacacacacacatagagaga

SEQ ID NO: 11010 - DNA, 20 bp, synthetic construct
  misc_feature 1..20: note = chemically synthesized
  source 1..20: mol_type = other DNA
cacacacacatagagagaga

SEQ ID NO: 11011 - DNA, 20 bp, synthetic construct
  misc_feature 1..20: note = chemically synthesized
  source 1..20: mol_type = other DNA
cacacacatagagagagaga

SEQ ID NO: 11012 - DNA, 20 bp, synthetic construct
  misc_feature 1..20: note = chemically synthesized
  source 1..20: mol_type = other DNA
cacacatagagagagagaga

SEQ ID NO: 11013 - DNA, 20 bp, synthetic construct
  misc_feature 1..20: note = chemically synthesized
  source 1..20: mol_type = other DNA
acacatagagagagagagag

SEQ ID NO: 11014 - DNA, 20 bp, synthetic construct
  misc_feature 1..20: note = chemically synthesized
  source 1..20: mol_type = other DNA
acatagagagagagagagag

SEQ ID NO: 11015 - DNA, 20 bp, synthetic construct
  misc_feature 1..20: note = chemically synthesized
  source 1..20: mol_type = other DNA
atagagagagagagagagga

SEQ ID NO: 11016 - DNA, 20 bp, synthetic construct
  misc_feature 1..20: note = chemically synthesized
  source 1..20: mol_type = other DNA
tagagagagagagagaggag

SEQ ID NO: 11017 - DNA, 20 bp, synthetic construct
  misc_feature 1..20: note = chemically synthesized
  source 1..20: mol_type = other DNA
gagagagagagagaggagag

SEQ ID NO: 11018 - DNA, 20 bp, synthetic construct
  misc_feature 1..20: note = chemically synthesized
  source 1..20: mol_type = other DNA
gagagagagagaggagagga

SEQ ID NO: 11019 - DNA, 20 bp, synthetic construct
  misc_feature 1..20: note = chemically synthesized
  source 1..20: mol_type = other DNA
agagagagagaggagaggag

SEQ ID NO: 11020 - DNA, 20 bp, synthetic construct
  misc_feature 1..20: note = chemically synthesized
  source 1..20: mol_type = other DNA
gagagagaggagaggagagg

SEQ ID NO: 11021 - DNA, 20 bp, synthetic construct
  misc_feature 1..20: note = chemically synthesized
  source 1..20: mol_type = other DNA
agagagaggagaggagagga

SEQ ID NO: 11022 - DNA, 20 bp, synthetic construct
  misc_feature 1..20: note = chemically synthesized
  source 1..20: mol_type = other DNA
agagaggagaggagaggaag

SEQ ID NO: 11023 - DNA, 20 bp, synthetic construct
  misc_feature 1..20: note = chemically synthesized
  source 1..20: mol_type = other DNA
gagaggagaggagaggaagg

SEQ ID NO: 11024 - DNA, 20 bp, synthetic construct
  misc_feature 1..20: note = chemically synthesized
  source 1..20: mol_type = other DNA
agaggagaggagaggaagga

SEQ ID NO: 11025 - DNA, 20 bp, synthetic construct
  misc_feature 1..20: note = chemically synthesized
  source 1..20: mol_type = other DNA
aggagaggagaggaaggagg

SEQ ID NO: 11026 - DNA, 20 bp, synthetic construct
  misc_feature 1..20: note = chemically synthesized
  source 1..20: mol_type = other DNA
ggagaggagaggaaggaggg

SEQ ID NO: 11027 - DNA, 20 bp, synthetic construct
  misc_feature 1..20: note = chemically synthesized
  source 1..20: mol_type = other DNA
gagaggagaggaaggaggga

SEQ ID NO: 11028 - DNA, 20 bp, synthetic construct
  misc_feature 1..20: note = chemically synthesized
  source 1..20: mol_type = other DNA
aggagaggaaggagggaggg

SEQ ID NO: 11029 - DNA, 20 bp, synthetic construct
  misc_feature 1..20: note = chemically synthesized
  source 1..20: mol_type = other DNA
ggagaggaaggagggaggga

SEQ ID NO: 11030 - DNA, 20 bp, synthetic construct
  misc_feature 1..20: note = chemically synthesized
  source 1..20: mol_type = other DNA
agaggaaggagggagggaag

SEQ ID NO: 11031 - DNA, 20 bp, synthetic construct
  misc_feature 1..20: note = chemically synthesized
  source 1..20: mol_type = other DNA
agggaaggagaaatatgatt

SEQ ID NO: 11032 - DNA, 20 bp, synthetic construct
  misc_feature 1..20: note = chemically synthesized
  source 1..20: mol_type = other DNA
aaggagaaatatgattcaga

SEQ ID NO: 11033 - DNA, 20 bp, synthetic construct
  misc_feature 1..20: note = chemically synthesized
  source 1..20: mol_type = other DNA
ggagaaatatgattcagata

SEQ ID NO: 11034 - DNA, 20 bp, synthetic construct
  misc_feature 1..20: note = chemically synthesized
  source 1..20: mol_type = other DNA
agatagagacatctatcctc

SEQ ID NO: 11035 - DNA, 20 bp, synthetic construct
  misc_feature 1..20: note = chemically synthesized
  source 1..20: mol_type = other DNA
atagagacatctatcctcca

SEQ ID NO: 11036 - DNA, 20 bp, synthetic construct
  misc_feature 1..20: note = chemically synthesized
  source 1..20: mol_type = other DNA
gacatctatcctccagagtt

SEQ ID NO: 11037 - DNA, 20 bp, synthetic construct
  misc_feature 1..20: note = chemically synthesized
  source 1..20: mol_type = other DNA
acatctatcctccagagttc

SEQ ID NO: 11038 - DNA, 20 bp, synthetic construct
  misc_feature 1..20: note = chemically synthesized
  source 1..20: mol_type = other DNA
atctatcctccagagttcag

SEQ ID NO: 11039 - DNA, 20 bp, synthetic construct
  misc_feature 1..20: note = chemically synthesized
  source 1..20: mol_type = other DNA
agagttcaggagtgtctctt

SEQ ID NO: 11040 - DNA, 20 bp, synthetic construct
  misc_feature 1..20: note = chemically synthesized
  source 1..20: mol_type = other DNA
tcaggagtgtctcttcagac

SEQ ID NO: 11041 - DNA, 20 bp, synthetic construct
  misc_feature 1..20: note = chemically synthesized
  source 1..20: mol_type = other DNA
caggagtgtctcttcagact

SEQ ID NO: 11042 - DNA, 20 bp, synthetic construct
  misc_feature 1..20: note = chemically synthesized
  source 1..20: mol_type = other DNA
gagtgtctcttcagactagg

SEQ ID NO: 11043 - DNA, 20 bp, synthetic construct
  misc_feature 1..20: note = chemically synthesized
  source 1..20: mol_type = other DNA
ctcttcagactaggtagatg

SEQ ID NO: 11044 - DNA, 20 bp, synthetic construct
  misc_feature 1..20: note = chemically synthesized
  source 1..20: mol_type = other DNA
aaaaaacatatcctgaattc

SEQ ID NO: 11045 - DNA, 20 bp, synthetic construct
  misc_feature 1..20: note = chemically synthesized
  source 1..20: mol_type = other DNA
aaaacatatcctgaattcta

SEQ ID NO: 11046 - DNA, 20 bp, synthetic construct
  misc_feature 1..20: note = chemically synthesized
  source 1..20: mol_type = other DNA
aacatatcctgaattctaga

SEQ ID NO: 11047 - DNA, 20 bp, synthetic construct
  misc_feature 1..20: note = chemically synthesized
  source 1..20: mol_type = other DNA
cctataacacttgccaacca

SEQ ID NO: 11048 - DNA, 20 bp, synthetic construct
  misc_feature 1..20: note = chemically synthesized
  source 1..20: mol_type = other DNA
ctataacacttgccaaccaa

SEQ ID NO: 11049 - DNA, 20 bp, synthetic construct
  misc_feature 1..20: note = chemically synthesized
  source 1..20: mol_type = other DNA
attgcttttttaaattaatg

SEQ ID NO: 11050 - DNA, 20 bp, synthetic construct
  misc_feature 1..20: note = chemically synthesized
  source 1..20: mol_type = other DNA
agtgatttttctttaacatc

SEQ ID NO: 11051 - DNA, 20 bp, synthetic construct
  misc_feature 1..20: note = chemically synthesized
  source 1..20: mol_type = other DNA
ttttctttaacatctagtga

SEQ ID NO: 11052 - DNA, 20 bp, synthetic construct
  misc_feature 1..20: note = chemically synthesized
  source 1..20: mol_type = other DNA
taacatctagtgacagacac

SEQ ID NO: 11053 - DNA, 20 bp, synthetic construct
  misc_feature 1..20: note = chemically synthesized
  source 1..20: mol_type = other DNA
aacatctagtgacagacact

SEQ ID NO: 11054 - DNA, 20 bp, synthetic construct
  misc_feature 1..20: note = chemically synthesized
  source 1..20: mol_type = other DNA
acatctagtgacagacactg

SEQ ID NO: 11055 - DNA, 20 bp, synthetic construct
  misc_feature 1..20: note = chemically synthesized
  source 1..20: mol_type = other DNA
agacactggggtcacatttg

SEQ ID NO: 11056 - DNA, 20 bp, synthetic construct
  misc_feature 1..20: note = chemically synthesized
  source 1..20: mol_type = other DNA
actggggtcacatttgcagc

SEQ ID NO: 11057 - DNA, 20 bp, synthetic construct
  misc_feature 1..20: note = chemically synthesized
  source 1..20: mol_type = other DNA
atttgcagctggaccataat

SEQ ID NO: 11058 - DNA, 20 bp, synthetic construct
  misc_feature 1..20: note = chemically synthesized
  source 1..20: mol_type = other DNA
tttgcagctggaccataatt

SEQ ID NO: 11059 - DNA, 20 bp, synthetic construct
  misc_feature 1..20: note = chemically synthesized
  source 1..20: mol_type = other DNA
ataattaggcttctgttctt

SEQ ID NO: 11060 - DNA, 20 bp, synthetic construct
  misc_feature 1..20: note = chemically synthesized
  source 1..20: mol_type = other DNA
taattaggcttctgttcttc

SEQ ID NO: 11061 - DNA, 20 bp, synthetic construct
  misc_feature 1..20: note = chemically synthesized
  source 1..20: mol_type = other DNA
attaggcttctgttcttcag

SEQ ID NO: 11062 - DNA, 20 bp, synthetic construct
  misc_feature 1..20: note = chemically synthesized
  source 1..20: mol_type = other DNA
cttcaggagacatttgttca

SEQ ID NO: 11063 - DNA, 20 bp, synthetic construct
  misc_feature 1..20: note = chemically synthesized
  source 1..20: mol_type = other DNA
gacatttgttcaaagtcatt

SEQ ID NO: 11064 - DNA, 20 bp, synthetic construct
  misc_feature 1..20: note = chemically synthesized
  source 1..20: mol_type = other DNA
acatttgttcaaagtcattt

SEQ ID NO: 11065 - DNA, 20 bp, synthetic construct
  misc_feature 1..20: note = chemically synthesized
  source 1..20: mol_type = other DNA
gggcaaccatattctgaaaa

SEQ ID NO: 11066 - DNA, 20 bp, synthetic construct
  misc_feature 1..20: note = chemically synthesized
  source 1..20: mol_type = other DNA
accatattctgaaaacagcc

SEQ ID NO: 11067 - DNA, 20 bp, synthetic construct
  misc_feature 1..20: note = chemically synthesized
  source 1..20: mol_type = other DNA
tattctgaaaacagcccagc

SEQ ID NO: 11068 - DNA, 20 bp, synthetic construct
  misc_feature 1..20: note = chemically synthesized
  source 1..20: mol_type = other DNA
attctgaaaacagcccagcc

SEQ ID NO: 11069 - DNA, 20 bp, synthetic construct
  misc_feature 1..20: note = chemically synthesized
  source 1..20: mol_type = other DNA
ttctgaaaacagcccagcca

SEQ ID NO: 11070 - DNA, 20 bp, synthetic construct
  misc_feature 1..20: note = chemically synthesized
  source 1..20: mol_type = other DNA
aaacagcccagccagggtga

SEQ ID NO: 11071 - DNA, 20 bp, synthetic construct
  misc_feature 1..20: note = chemically synthesized
  source 1..20: mol_type = other DNA
gggtgatggatcactttgca

SEQ ID NO: 11072 - DNA, 20 bp, synthetic construct
  misc_feature 1..20: note = chemically synthesized
  source 1..20: mol_type = other DNA
actttgcaaagatcctcaat

SEQ ID NO: 11073 - DNA, 20 bp, synthetic construct
  misc_feature 1..20: note = chemically synthesized
  source 1..20: mol_type = other DNA
atcctcaatgagctattttc

SEQ ID NO: 11074 - DNA, 20 bp, synthetic construct
  misc_feature 1..20: note = chemically synthesized
  source 1..20: mol_type = other DNA
gctattttcaagtgatgaca

SEQ ID NO: 11075 - DNA, 20 bp, synthetic construct
  misc_feature 1..20: note = chemically synthesized
  source 1..20: mol_type = other DNA
tcaagtgatgacaaagtgtg

SEQ ID NO: 11076 - DNA, 20 bp, synthetic construct
  misc_feature 1..20: note = chemically synthesized
  source 1..20: mol_type = other DNA
gtgaagttaaccgctcattt

SEQ ID NO: 11077 - DNA, 20 bp, synthetic construct
  misc_feature 1..20: note = chemically synthesized
  source 1..20: mol_type = other DNA
agaactttctttttcatcca

SEQ ID NO: 11078 - DNA, 20 bp, synthetic construct
  misc_feature 1..20: note = chemically synthesized
  source 1..20: mol_type = other DNA
aaagtaaattcaaatatgat

SEQ ID NO: 11079 - DNA, 20 bp, synthetic construct
  misc_feature 1..20: note = chemically synthesized
  source 1..20: mol_type = other DNA
gaaatctgaccttttattac

SEQ ID NO: 11080 - DNA, 20 bp, synthetic construct
  misc_feature 1..20: note = chemically synthesized
  source 1..20: mol_type = other DNA
actggaattctcttgactaa

SEQ ID NO: 11081 - DNA, 20 bp, synthetic construct
  misc_feature 1..20: note = chemically synthesized
  source 1..20: mol_type = other DNA
cctaaatctccatgtgtata

SEQ ID NO: 11082 - DNA, 20 bp, synthetic construct
  misc_feature 1..20: note = chemically synthesized
  source 1..20: mol_type = other DNA
tccatgtgtatacagtactg

SEQ ID NO: 11083 - DNA, 20 bp, synthetic construct
  misc_feature 1..20: note = chemically synthesized
  source 1..20: mol_type = other DNA
ccatgtgtatacagtactgt

SEQ ID NO: 11084 - DNA, 20 bp, synthetic construct
  misc_feature 1..20: note = chemically synthesized
  source 1..20: mol_type = other DNA
acagtactgtgggaacatca

SEQ ID NO: 11085 - DNA, 20 bp, synthetic construct
  misc_feature 1..20: note = chemically synthesized
  source 1..20: mol_type = other DNA
tgtgggaacatcacagattt

SEQ ID NO: 11086 - DNA, 20 bp, synthetic construct
  misc_feature 1..20: note = chemically synthesized
  source 1..20: mol_type = other DNA
gattttggctccatgcccta

SEQ ID NO: 11087 - DNA, 20 bp, synthetic construct
  misc_feature 1..20: note = chemically synthesized
  source 1..20: mol_type = other DNA
ttttggctccatgccctaaa

SEQ ID NO: 11088 - DNA, 20 bp, synthetic construct
  misc_feature 1..20: note = chemically synthesized
  source 1..20: mol_type = other DNA
tccatgccctaaagagaaat

SEQ ID NO: 11089 - DNA, 20 bp, synthetic construct
  misc_feature 1..20: note = chemically synthesized
  source 1..20: mol_type = other DNA
cctaaagagaaattggcttt

SEQ ID NO: 11090 - DNA, 20 bp, synthetic construct
  misc_feature 1..20: note = chemically synthesized
  source 1..20: mol_type = other DNA
aaattggctttcagattatt

SEQ ID NO: 11091 - DNA, 20 bp, synthetic construct
  misc_feature 1..20: note = chemically synthesized
  source 1..20: mol_type = other DNA
gattatttggattaaaaaca

SEQ ID NO: 11092 - DNA, 20 bp, synthetic construct
  misc_feature 1..20: note = chemically synthesized
  source 1..20: mol_type = other DNA
ttaaaaacaaagactttctt

SEQ ID NO: 11093 - DNA, 20 bp, synthetic construct
  misc_feature 1..20: note = chemically synthesized
  source 1..20: mol_type = other DNA
aaaaacaaagactttcttaa

SEQ ID NO: 11094 - DNA, 20 bp, synthetic construct
  misc_feature 1..20: note = chemically synthesized
  source 1..20: mol_type = other DNA
tttcttttttgctaaaacta

SEQ ID NO: 11095 - DNA, 20 bp, synthetic construct
  misc_feature 1..20: note = chemically synthesized
  source 1..20: mol_type = other DNA
agaattattcttttacattt

SEQ ID NO: 11096 - DNA, 20 bp, synthetic construct
  misc_feature 1..20: note = chemically synthesized
  source 1..20: mol_type = other DNA
acgccaacaaaattctgaat

SEQ ID NO: 11097 - DNA, 20 bp, synthetic construct
  misc_feature 1..20: note = chemically synthesized
  source 1..20: mol_type = other DNA
acaaaattctgaatcggcca

SEQ ID NO: 11098 - DNA, 20 bp, synthetic construct
  misc_feature 1..20: note = chemically synthesized
  source 1..20: mol_type = other DNA
aaaattctgaatcggccaaa

SEQ ID NO: 11099 - DNA, 20 bp, synthetic construct
  misc_feature 1..20: note = chemically synthesized
  source 1..20: mol_type = other DNA
aaattctgaatcggccaaag

SEQ ID NO: 11100 - DNA, 20 bp, synthetic construct
  misc_feature 1..20: note = chemically synthesized
  source 1..20: mol_type = other DNA
tcggccaaagaggtataatt

SEQ ID NO: 11101 - DNA, 20 bp, synthetic construct
  misc_feature 1..20: note = chemically synthesized
  source 1..20: mol_type = other DNA
cggccaaagaggtataattc

SEQ ID NO: 11102 - DNA, 20 bp, synthetic construct
  misc_feature 1..20: note = chemically synthesized
  source 1..20: mol_type = other DNA
gaggtataattcaggtaaat

SEQ ID NO: 11103 - DNA, 20 bp, synthetic construct
  misc_feature 1..20: note = chemically synthesized
  source 1..20: mol_type = other DNA
gtataattcaggtaaattgg

SEQ ID NO: 11104 - DNA, 20 bp, synthetic construct
  misc_feature 1..20: note = chemically synthesized
  source 1..20: mol_type = other DNA
ataattcaggtaaattggaa

SEQ ID NO: 11105 - DNA, 20 bp, synthetic construct
  misc_feature 1..20: note = chemically synthesized
  source 1..20: mol_type = other DNA
taaattggaagagtttgttc

SEQ ID NO: 11106 - DNA, 20 bp, synthetic construct
  misc_feature 1..20: note = chemically synthesized
  source 1..20: mol_type = other DNA
aaattggaagagtttgttca

SEQ ID NO: 11107 - DNA, 20 bp, synthetic construct
  misc_feature 1..20: note = chemically synthesized
  source 1..20: mol_type = other DNA
aattggaagagtttgttcaa

SEQ ID NO: 11108 - DNA, 20 bp, synthetic construct
  misc_feature 1..20: note = chemically synthesized
  source 1..20: mol_type = other DNA
agtttgttcaagggaacctt

SEQ ID NO: 11109 - DNA, 20 bp, synthetic construct
  misc_feature 1..20: note = chemically synthesized
  source 1..20: mol_type = other DNA
tttgttcaagggaaccttga

SEQ ID NO: 11110 - DNA, 20 bp, synthetic construct
  misc_feature 1..20: note = chemically synthesized
  source 1..20: mol_type = other DNA
tgttcaagggaaccttgaga

SEQ ID NO: 11111 - DNA, 20 bp, synthetic construct
  misc_feature 1..20: note = chemically synthesized
  source 1..20: mol_type = other DNA
gaaccttgagagagaatgta

SEQ ID NO: 11112 - DNA, 20 bp, synthetic construct
  misc_feature 1..20: note = chemically synthesized
  source 1..20: mol_type = other DNA
ccttgagagagaatgtatgg

SEQ ID NO: 11113 - DNA, 20 bp, synthetic construct
  misc_feature 1..20: note = chemically synthesized
  source 1..20: mol_type = other DNA
agagagaatgtatggaagaa

SEQ ID NO: 11114 - DNA, 20 bp, synthetic construct
  misc_feature 1..20: note = chemically synthesized
  source 1..20: mol_type = other DNA
gaatgtatggaagaaaagtg

SEQ ID NO: 11115 - DNA, 20 bp, synthetic construct
  misc_feature 1..20: note = chemically synthesized
  source 1..20: mol_type = other DNA
ggaagaaaagtgtagttttg

SEQ ID NO: 11116 - DNA, 20 bp, synthetic construct
  misc_feature 1..20: note = chemically synthesized
  source 1..20: mol_type = other DNA
agaaaagtgtagttttgaag

SEQ ID NO: 11117 - DNA, 20 bp, synthetic construct
  misc_feature 1..20: note = chemically synthesized
  source 1..20: mol_type = other DNA
gtgtagttttgaagaagcac

SEQ ID NO: 11118 - DNA, 20 bp, synthetic construct
  misc_feature 1..20: note = chemically synthesized
  source 1..20: mol_type = other DNA
tagttttgaagaagcacgag

SEQ ID NO: 11119 - DNA, 20 bp, synthetic construct
  misc_feature 1..20: note = chemically synthesized
  source 1..20: mol_type = other DNA
gaagtttttgaaaacactga

SEQ ID NO: 11120 - DNA, 20 bp, synthetic construct
  misc_feature 1..20: note = chemically synthesized
  source 1..20: mol_type = other DNA
tcttccatacattctctctc

SEQ ID NO: 11121 - DNA, 20 bp, synthetic construct
  misc_feature 1..20: note = chemically synthesized
  source 1..20: mol_type = other DNA
cttccatacattctctctca

SEQ ID NO: 11122 - DNA, 20 bp, synthetic construct
  misc_feature 1..20: note = chemically synthesized
  source 1..20: mol_type = other DNA
ttacctgaattatacctctt

SEQ ID NO: 11123 - DNA, 20 bp, synthetic construct
  misc_feature 1..20: note = chemically synthesized
  source 1..20: mol_type = other DNA
ttatacctctttggccgatt

SEQ ID NO: 11124 - DNA, 20 bp, synthetic construct
  misc_feature 1..20: note = chemically synthesized
  source 1..20: mol_type = other DNA
tggccgattcagaattttgt

SEQ ID NO: 11125 - DNA, 20 bp, synthetic construct
  misc_feature 1..20: note = chemically synthesized
  source 1..20: mol_type = other DNA
ttgttggcgttttcatgatc

SEQ ID NO: 11126 - DNA, 20 bp, synthetic construct
  misc_feature 1..20: note = chemically synthesized
  source 1..20: mol_type = other DNA
caagaaaaactgaaatgtaa

SEQ ID NO: 11127 - DNA, 20 bp, synthetic construct
  misc_feature 1..20: note = chemically synthesized
  source 1..20: mol_type = other DNA
aatgtaaaagaataattctt

SEQ ID NO: 11128 - DNA, 20 bp, synthetic construct
  misc_feature 1..20: note = chemically synthesized
  source 1..20: mol_type = other DNA
aaagaataattctttagttt

SEQ ID NO: 11129 - DNA, 20 bp, synthetic construct
  misc_feature 1..20: note = chemically synthesized
  source 1..20: mol_type = other DNA
attctttagttttagcaaaa

SEQ ID NO: 11130 - DNA, 20 bp, synthetic construct
  misc_feature 1..20: note = chemically synthesized
  source 1..20: mol_type = other DNA
atgaaaattttacatctctt

SEQ ID NO: 11131 - DNA, 20 bp, synthetic construct
  misc_feature 1..20: note = chemically synthesized
  source 1..20: mol_type = other DNA
aaattttacatctcttaaga

SEQ ID NO: 11132 - DNA, 20 bp, synthetic construct
  misc_feature 1..20: note = chemically synthesized
  source 1..20: mol_type = other DNA
ttttaatccaaataatctga

SEQ ID NO: 11133 - DNA, 20 bp, synthetic construct
  misc_feature 1..20: note = chemically synthesized
  source 1..20: mol_type = other DNA
tctgaaagccaatttctctt

SEQ ID NO: 11134 - DNA, 20 bp, synthetic construct
  misc_feature 1..20: note = chemically synthesized
  source 1..20: mol_type = other DNA
ctgaaagccaatttctcttt

SEQ ID NO: 11135 - DNA, 20 bp, synthetic construct
  misc_feature 1..20: note = chemically synthesized
  source 1..20: mol_type = other DNA
tgaaagccaatttctcttta

SEQ ID NO: 11136 - DNA, 20 bp, synthetic construct
  misc_feature 1..20: note = chemically synthesized
  source 1..20: mol_type = other DNA
gccaatttctctttagggca

SEQ ID NO: 11137 - DNA, 20 bp, synthetic construct
  misc_feature 1..20: note = chemically synthesized
  source 1..20: mol_type = other DNA
caatttctctttagggcatg

SEQ ID NO: 11138 - DNA, 20 bp, synthetic construct
  misc_feature 1..20: note = chemically synthesized
  source 1..20: mol_type = other DNA
caaaatctgtgatgttccca

SEQ ID NO: 11139 - DNA, 20 bp, synthetic construct
  misc_feature 1..20: note = chemically synthesized
  source 1..20: mol_type = other DNA
cccacagtactgtatacaca

SEQ ID NO: 11140 - DNA, 20 bp, synthetic construct
  misc_feature 1..20: note = chemically synthesized
  source 1..20: mol_type = other DNA
cacagtactgtatacacatg

SEQ ID NO: 11141 - DNA, 20 bp, synthetic construct
  misc_feature 1..20: note = chemically synthesized
  source 1..20: mol_type = other DNA
actgtatacacatggagatt

SEQ ID NO: 11142 - DNA, 20 bp, synthetic construct
  misc_feature 1..20: note = chemically synthesized
  source 1..20: mol_type = other DNA
ctgtatacacatggagattt

SEQ ID NO: 11143 - DNA, 20 bp, synthetic construct
  misc_feature 1..20: note = chemically synthesized
  source 1..20: mol_type = other DNA
ttaaaattcaattttacttt

SEQ ID NO: 11144 - DNA, 20 bp, synthetic construct
  misc_feature 1..20: note = chemically synthesized
  source 1..20: mol_type = other DNA
attcaattttacttttagtc

SEQ ID NO: 11145 - DNA, 20 bp, synthetic construct
  misc_feature 1..20: note = chemically synthesized
  source 1..20: mol_type = other DNA
tcaattttacttttagtcaa

SEQ ID NO: 11146 - DNA, 20 bp, synthetic construct
  misc_feature 1..20: note = chemically synthesized
  source 1..20: mol_type = other DNA
acttttagtcaagagaattc

SEQ ID NO: 11147 - DNA, 20 bp, synthetic construct
  misc_feature 1..20: note = chemically synthesized
  source 1..20: mol_type = other DNA
caagagaattccagtaataa

SEQ ID NO: 11148 - DNA, 20 bp, synthetic construct
  misc_feature 1..20: note = chemically synthesized
  source 1..20: mol_type = other DNA
aagagaattccagtaataaa

SEQ ID NO: 11149 - DNA, 20 bp, synthetic construct
  misc_feature 1..20: note = chemically synthesized
  source 1..20: mol_type = other DNA
gaattccagtaataaaaggt

SEQ ID NO: 11150 - DNA, 20 bp, synthetic construct
  misc_feature 1..20: note = chemically synthesized
  source 1..20: mol_type = other DNA
aatcatatttgaatttactt

SEQ ID NO: 11151 - DNA, 20 bp, synthetic construct
  misc_feature 1..20: note = chemically synthesized
  source 1..20: mol_type = other DNA
tgaatttactttggatgaaa

SEQ ID NO: 11152 - DNA, 20 bp, synthetic construct
  misc_feature 1..20: note = chemically synthesized
  source 1..20: mol_type = other DNA
tttactttggatgaaaaaga

SEQ ID NO: 11153 - DNA, 20 bp, synthetic construct
  misc_feature 1..20: note = chemically synthesized
  source 1..20: mol_type = other DNA
gaaaaagaaagttctcaaat

SEQ ID NO: 11154 - DNA, 20 bp, synthetic construct
  misc_feature 1..20: note = chemically synthesized
  source 1..20: mol_type = other DNA
aaagaaagttctcaaatgag

SEQ ID NO: 11155 - DNA, 20 bp, synthetic construct
  misc_feature 1..20: note = chemically synthesized
  source 1..20: mol_type = other DNA
actttgtcatcacttgaaaa

SEQ ID NO: 11156 - DNA, 20 bp, synthetic construct
  misc_feature 1..20: note = chemically synthesized
  source 1..20: mol_type = other DNA
tcacttgaaaatagctcatt

SEQ ID NO: 11157 - DNA, 20 bp, synthetic construct
  misc_feature 1..20: note = chemically synthesized
  source 1..20: mol_type = other DNA
cacttgaaaatagctcattg

SEQ ID NO: 11158 - DNA, 20 bp, synthetic construct
  misc_feature 1..20: note = chemically synthesized
  source 1..20: mol_type = other DNA
gctcattgaggatctttgca

SEQ ID NO: 11159 - DNA, 20 bp, synthetic construct
  misc_feature 1..20: note = chemically synthesized
  source 1..20: mol_type = other DNA
tgcaaagtgatccatcaccc

SEQ ID NO: 11160 - DNA, 20 bp, synthetic construct
  misc_feature 1..20: note = chemically synthesized
  source 1..20: mol_type = other DNA
aagtgatccatcaccctggc

SEQ ID NO: 11161 - DNA, 20 bp, synthetic construct
  misc_feature 1..20: note = chemically synthesized
  source 1..20: mol_type = other DNA
agtgatccatcaccctggct

SEQ ID NO: 11162 - DNA, 20 bp, synthetic construct
  misc_feature 1..20: note = chemically synthesized
  source 1..20: mol_type = other DNA
caccctggctgggctgtttt

SEQ ID NO: 11163 - DNA, 20 bp, synthetic construct
  misc_feature 1..20: note = chemically synthesized
  source 1..20: mol_type = other DNA
gctgggctgttttcagaata

SEQ ID NO: 11164 - DNA, 20 bp, synthetic construct
  misc_feature 1..20: note = chemically synthesized
  source 1..20: mol_type = other DNA
ctttgaacaaatgtctcctg

SEQ ID NO: 11165 - DNA, 20 bp, synthetic construct
  misc_feature 1..20: note = chemically synthesized
  source 1..20: mol_type = other DNA
aacaaatgtctcctgaagaa

SEQ ID NO: 11166 - DNA, 20 bp, synthetic construct
  misc_feature 1..20: note = chemically synthesized
  source 1..20: mol_type = other DNA
aaatgtctcctgaagaacag

SEQ ID NO: 11167 - DNA, 20 bp, synthetic construct
  misc_feature 1..20: note = chemically synthesized
  source 1..20: mol_type = other DNA
gaagaacagaagcctaatta

SEQ ID NO: 11168 - DNA, 20 bp, synthetic construct
  misc_feature 1..20: note = chemically synthesized
  source 1..20: mol_type = other DNA
acagaagcctaattatggtc

SEQ ID NO: 11169 - DNA, 20 bp, synthetic construct
  misc_feature 1..20: note = chemically synthesized
  source 1..20: mol_type = other DNA
tccagctgcaaatgtgaccc

SEQ ID NO: 11170 - DNA, 20 bp, synthetic construct
  misc_feature 1..20: note = chemically synthesized
  source 1..20: mol_type = other DNA
gtgaccccagtgtctgtcac

SEQ ID NO: 11171 - DNA, 20 bp, synthetic construct
  misc_feature 1..20: note = chemically synthesized
  source 1..20: mol_type = other DNA
gtgtctgtcactagatgtta

SEQ ID NO: 11172 - DNA, 20 bp, synthetic construct
  misc_feature 1..20: note = chemically synthesized
  source 1..20: mol_type = other DNA
atcactgcattaatttaaaa

SEQ ID NO: 11173 - DNA, 20 bp, synthetic construct
  misc_feature 1..20: note = chemically synthesized
  source 1..20: mol_type = other DNA
ttaatttaaaaaagcaattt

SEQ ID NO: 11174 - DNA, 20 bp, synthetic construct
  misc_feature 1..20: note = chemically synthesized
  source 1..20: mol_type = other DNA
aaaaagcaatttcagatcaa

SEQ ID NO: 11175 - DNA, 20 bp, synthetic construct
  misc_feature 1..20: note = chemically synthesized
  source 1..20: mol_type = other DNA
tttcagatcaacagcacctt

SEQ ID NO: 11176 - DNA, 20 bp, synthetic construct
  misc_feature 1..20: note = chemically synthesized
  source 1..20: mol_type = other DNA
agatcaacagcacctttggt

SEQ ID NO: 11177 - DNA, 20 bp, synthetic construct
  misc_feature 1..20: note = chemically synthesized
  source 1..20: mol_type = other DNA
caacagcacctttggttggc

SEQ ID NO: 11178 - DNA, 20 bp, synthetic construct
  misc_feature 1..20: note = chemically synthesized
  source 1..20: mol_type = other DNA
cctttggttggcaagtgtta

SEQ ID NO: 11179 - DNA, 20 bp, synthetic construct
  misc_feature 1..20: note = chemically synthesized
  source 1..20: mol_type = other DNA
ctttggttggcaagtgttat

SEQ ID NO: 11180 - DNA, 20 bp, synthetic construct
  misc_feature 1..20: note = chemically synthesized
  source 1..20: mol_type = other DNA
ggcaagtgttataggaattg

SEQ ID NO: 11181 - DNA, 20 bp, synthetic construct
  misc_feature 1..20: note = chemically synthesized
  source 1..20: mol_type = other DNA
tataggaattgcagtgattt

SEQ ID NO: 11182 - DNA, 20 bp, synthetic construct
  misc_feature 1..20: note = chemically synthesized
  source 1..20: mol_type = other DNA
cagtgatttaagcatctctc

SEQ ID NO: 11183 - DNA, 20 bp, synthetic construct
  misc_feature 1..20: note = chemically synthesized
  source 1..20: mol_type = other DNA
ttaagcatctctctagaatt

SEQ ID NO: 11184 - DNA, 20 bp, synthetic construct
  misc_feature 1..20: note = chemically synthesized
  source 1..20: mol_type = other DNA
taagcatctctctagaattc

SEQ ID NO: 11185 - DNA, 20 bp, synthetic construct
  misc_feature 1..20: note = chemically synthesized
  source 1..20: mol_type = other DNA
attcaggatatgtttttttt

SEQ ID NO: 11186 - DNA, 20 bp, synthetic construct
  misc_feature 1..20: note = chemically synthesized
  source 1..20: mol_type = other DNA
ttttttaagctacatctacc

SEQ ID NO: 11187 - DNA, 20 bp, synthetic construct
  misc_feature 1..20: note = chemically synthesized
  source 1..20: mol_type = other DNA
agctacatctacctagtctg

SEQ ID NO: 11188 - DNA, 20 bp, synthetic construct
  misc_feature 1..20: note = chemically synthesized
  source 1..20: mol_type = other DNA
ctacatctacctagtctgaa

SEQ ID NO: 11189 - DNA, 20 bp, synthetic construct
  misc_feature 1..20: note = chemically synthesized
  source 1..20: mol_type = other DNA
gaagagacactcctgaactc

SEQ ID NO: 11190 - DNA, 20 bp, synthetic construct
  misc_feature 1..20: note = chemically synthesized
  source 1..20: mol_type = other DNA
agagacactcctgaactctg

SEQ ID NO: 11191 - DNA, 20 bp, synthetic construct
  misc_feature 1..20: note = chemically synthesized
  source 1..20: mol_type = other DNA
gagacactcctgaactctgg

SEQ ID NO: 11192 - DNA, 20 bp, synthetic construct
  misc_feature 1..20: note = chemically synthesized
  source 1..20: mol_type = other DNA
cactcctgaactctggagga

SEQ ID NO: 11193 - DNA, 20 bp, synthetic construct
  misc_feature 1..20: note = chemically synthesized
  source 1..20: mol_type = other DNA
tatcatatatatatatatat

SEQ ID NO: 11194 - DNA, 20 bp, synthetic construct
  misc_feature 1..20: note = chemically synthesized
  source 1..20: mol_type = other DNA
tttgctgcacaatgacattt

SEQ ID NO: 11195 - DNA, 20 bp, synthetic construct
  misc_feature 1..20: note = chemically synthesized
  source 1..20: mol_type = other DNA
aatgacattttggtcaatga

SEQ ID NO: 11196 - DNA, 20 bp, synthetic construct
  misc_feature 1..20: note = chemically synthesized
  source 1..20: mol_type = other DNA
tgatggaccacattatacga

SEQ ID NO: 11197 - DNA, 20 bp, synthetic construct
  misc_feature 1..20: note = chemically synthesized
  source 1..20: mol_type = other DNA
tggaccacattatacgacag

SEQ ID NO: 11198 - DNA, 20 bp, synthetic construct
  misc_feature 1..20: note = chemically synthesized
  source 1..20: mol_type = other DNA
ttatacgacagtggtcccat

SEQ ID NO: 11199 - DNA, 20 bp, synthetic construct
  misc_feature 1..20: note = chemically synthesized
  source 1..20: mol_type = other DNA
tatacgacagtggtcccata

SEQ ID NO: 11200 - DNA, 20 bp, synthetic construct
  misc_feature 1..20: note = chemically synthesized
  source 1..20: mol_type = other DNA
cactgtaccttttctatgtt

SEQ ID NO: 11201 - DNA, 20 bp, synthetic construct
  misc_feature 1..20: note = chemically synthesized
  source 1..20: mol_type = other DNA
accactgttaccattgccta

SEQ ID NO: 11202 - DNA, 20 bp, synthetic construct
  misc_feature 1..20: note = chemically synthesized
  source 1..20: mol_type = other DNA
ttaccattgcctacagtgtt

SEQ ID NO: 11203 - DNA, 20 bp, synthetic construct
  misc_feature 1..20: note = chemically synthesized
  source 1..20: mol_type = other DNA
attgcctacagtgttcagta

SEQ ID NO: 11204 - DNA, 20 bp, synthetic construct
  misc_feature 1..20: note = chemically synthesized
  source 1..20: mol_type = other DNA
cagtacagtcacatgctgta

SEQ ID NO: 11205 - DNA, 20 bp, synthetic construct
  misc_feature 1..20: note = chemically synthesized
  source 1..20: mol_type = other DNA
agtacagtcacatgctgtac

SEQ ID NO: 11206 - DNA, 20 bp, synthetic construct
  misc_feature 1..20: note = chemically synthesized
  source 1..20: mol_type = other DNA
tcacatgctgtacaggtttg

SEQ ID NO: 11207 - DNA, 20 bp, synthetic construct
  misc_feature 1..20: note = chemically synthesized
  source 1..20: mol_type = other DNA
tgctgtacaggtttgcagcc

SEQ ID NO: 11208 - DNA, 20 bp, synthetic construct
  misc_feature 1..20: note = chemically synthesized
  source 1..20: mol_type = other DNA
gctgtacaggtttgcagccc

SEQ ID NO: 11209 - DNA, 20 bp, synthetic construct
  misc_feature 1..20: note = chemically synthesized
  source 1..20: mol_type = other DNA
tgtacaggtttgcagcccag

SEQ ID NO: 11210 - DNA, 20 bp, synthetic construct
  misc_feature 1..20: note = chemically synthesized
  source 1..20: mol_type = other DNA
aggtttgcagcccaggagcc

SEQ ID NO: 11211 - DNA, 20 bp, synthetic construct
  misc_feature 1..20: note = chemically synthesized
  source 1..20: mol_type = other DNA
ggtttgcagcccaggagcct

SEQ ID NO: 11212 - DNA, 20 bp, synthetic construct
  misc_feature 1..20: note = chemically synthesized
  source 1..20: mol_type = other DNA
tttgcagcccaggagcctag

SEQ ID NO: 11213 - DNA, 20 bp, synthetic construct
  misc_feature 1..20: note = chemically synthesized
  source 1..20: mol_type = other DNA
gcccaggagcctaggagcaa

SEQ ID NO: 11214 - DNA, 20 bp, synthetic construct
  misc_feature 1..20: note = chemically synthesized
  source 1..20: mol_type = other DNA
cccaggagcctaggagcaat

SEQ ID NO: 11215 - DNA, 20 bp, synthetic construct
  misc_feature 1..20: note = chemically synthesized
  source 1..20: mol_type = other DNA
taggccacatcaatacaacc

SEQ ID NO: 11216 - DNA, 20 bp, synthetic construct
  misc_feature 1..20: note = chemically synthesized
  source 1..20: mol_type = other DNA
aggccacatcaatacaacct

SEQ ID NO: 11217 - DNA, 20 bp, synthetic construct
  misc_feature 1..20: note = chemically synthesized
  source 1..20: mol_type = other DNA
atcaatacaacctaggtatg

SEQ ID NO: 11218 - DNA, 20 bp, synthetic construct
  misc_feature 1..20: note = chemically synthesized
  source 1..20: mol_type = other DNA
atacaacctaggtatgtagt

SEQ ID NO: 11219 - DNA, 20 bp, synthetic construct
  misc_feature 1..20: note = chemically synthesized
  source 1..20: mol_type = other DNA
atgtagtaagctataccatt

SEQ ID NO: 11220 - DNA, 20 bp, synthetic construct
  misc_feature 1..20: note = chemically synthesized
  source 1..20: mol_type = other DNA
tgtagtaagctataccattt

SEQ ID NO: 11221 - DNA, 20 bp, synthetic construct
  misc_feature 1..20: note = chemically synthesized
  source 1..20: mol_type = other DNA
taagctataccatttaggtt

SEQ ID NO: 11222 - DNA, 20 bp, synthetic construct
  misc_feature 1..20: note = chemically synthesized
  source 1..20: mol_type = other DNA
aagctataccatttaggttt

SEQ ID NO: 11223 - DNA, 20 bp, synthetic construct
  misc_feature 1..20: note = chemically synthesized
  source 1..20: mol_type = other DNA
tataccatttaggtttaggt

SEQ ID NO: 11224 - DNA, 20 bp, synthetic construct
  misc_feature 1..20: note = chemically synthesized
  source 1..20: mol_type = other DNA
ttgcttaatgacacatttct

SEQ ID NO: 11225 - DNA, 20 bp, synthetic construct
  misc_feature 1..20: note = chemically synthesized
  source 1..20: mol_type = other DNA
cagaatatatccccattgtt

SEQ ID NO: 11226 - DNA, 20 bp, synthetic construct
  misc_feature 1..20: note = chemically synthesized
  source 1..20: mol_type = other DNA
agaatatatccccattgtta

SEQ ID NO: 11227 - DNA, 20 bp, synthetic construct
  misc_feature 1..20: note = chemically synthesized
  source 1..20: mol_type = other DNA
ccccattgttaaggaatgca

SEQ ID NO: 11228 - DNA, 20 bp, synthetic construct
  misc_feature 1..20: note = chemically synthesized
  source 1..20: mol_type = other DNA
tgtatgtataaaattaataa

SEQ ID NO: 11229 - DNA, 20 bp, synthetic construct
  misc_feature 1..20: note = chemically synthesized
  source 1..20: mol_type = other DNA
gtatgtataaaattaataac

SEQ ID NO: 11230 - DNA, 20 bp, synthetic construct
  misc_feature 1..20: note = chemically synthesized
  source 1..20: mol_type = other DNA
tatgtataaaattaataaca

SEQ ID NO: 11231 - DNA, 20 bp, synthetic construct
  misc_feature 1..20: note = chemically synthesized
  source 1..20: mol_type = other DNA
aaaattaataacagggactc

SEQ ID NO: 11232 - DNA, 20 bp, synthetic construct
  misc_feature 1..20: note = chemically synthesized
  source 1..20: mol_type = other DNA
attaataacagggactcaag

SEQ ID NO: 11233 - DNA, 20 bp, synthetic construct
  misc_feature 1..20: note = chemically synthesized
  source 1..20: mol_type = other DNA
cagggactcaagaagttgcc

SEQ ID NO: 11234 - DNA, 20 bp, synthetic construct
  misc_feature 1..20: note = chemically synthesized
  source 1..20: mol_type = other DNA
gggactcaagaagttgcctg

SEQ ID NO: 11235 - DNA, 20 bp, synthetic construct
  misc_feature 1..20: note = chemically synthesized
  source 1..20: mol_type = other DNA
ctggagttgttcctttcttc

SEQ ID NO: 11236 - DNA, 20 bp, synthetic construct
  misc_feature 1..20: note = chemically synthesized
  source 1..20: mol_type = other DNA
tggagttgttcctttcttca

SEQ ID NO: 11237 - DNA, 20 bp, synthetic construct
  misc_feature 1..20: note = chemically synthesized
  source 1..20: mol_type = other DNA
ggagttgttcctttcttcaa

SEQ ID NO: 11238 - DNA, 20 bp, synthetic construct
  misc_feature 1..20: note = chemically synthesized
  source 1..20: mol_type = other DNA
tgttcctttcttcaagggtc

SEQ ID NO: 11239 - DNA, 20 bp, synthetic construct
  misc_feature 1..20: note = chemically synthesized
  source 1..20: mol_type = other DNA
aatatatctgataccatctc

SEQ ID NO: 11240 - DNA, 20 bp, synthetic construct
  misc_feature 1..20: note = chemically synthesized
  source 1..20: mol_type = other DNA
tatatctgataccatctcaa

SEQ ID NO: 11241 - DNA, 20 bp, synthetic construct
  misc_feature 1..20: note = chemically synthesized
  source 1..20: mol_type = other DNA
atatctgataccatctcaag

SEQ ID NO: 11242 - DNA, 20 bp, synthetic construct
  misc_feature 1..20: note = chemically synthesized
  source 1..20: mol_type = other DNA
gataccatctcaagaggacc

SEQ ID NO: 11243 - DNA, 20 bp, synthetic construct
  misc_feature 1..20: note = chemically synthesized
  source 1..20: mol_type = other DNA
ataccatctcaagaggacca

SEQ ID NO: 11244 - DNA, 20 bp, synthetic construct
  misc_feature 1..20: note = chemically synthesized
  source 1..20: mol_type = other DNA
taccatctcaagaggaccaa

SEQ ID NO: 11245 - DNA, 20 bp, synthetic construct
  misc_feature 1..20: note = chemically synthesized
  source 1..20: mol_type = other DNA
caagaggaccaagggcttat

SEQ ID NO: 11246 - DNA, 20 bp, synthetic construct
  misc_feature 1..20: note = chemically synthesized
  source 1..20: mol_type = other DNA
ggcttataagatgaactttc

SEQ ID NO: 11247 - DNA, 20 bp, synthetic construct
  misc_feature 1..20: note = chemically synthesized
  source 1..20: mol_type = other DNA
gcttataagatgaactttct

SEQ ID NO: 11248 - DNA, 20 bp, synthetic construct
  misc_feature 1..20: note = chemically synthesized
  source 1..20: mol_type = other DNA
cttataagatgaactttctg

SEQ ID NO: 11249 - DNA, 20 bp, synthetic construct
  misc_feature 1..20: note = chemically synthesized
  source 1..20: mol_type = other DNA
gatgaactttctggggtatt

SEQ ID NO: 11250 - DNA, 20 bp, synthetic construct
  misc_feature 1..20: note = chemically synthesized
  source 1..20: mol_type = other DNA
atgaactttctggggtattt

SEQ ID NO: 11251 - DNA, 20 bp, synthetic construct
  misc_feature 1..20: note = chemically synthesized
  source 1..20: mol_type = other DNA
acttcctgattaactccaaa

SEQ ID NO: 11252 - DNA, 20 bp, synthetic construct
  misc_feature 1..20: note = chemically synthesized
  source 1..20: mol_type = other DNA
cttcctgattaactccaaaa

SEQ ID NO: 11253 - DNA, 20 bp, synthetic construct
  misc_feature 1..20: note = chemically synthesized
  source 1..20: mol_type = other DNA
cctgattaactccaaaaagg

SEQ ID NO: 11254 - DNA, 20 bp, synthetic construct
  misc_feature 1..20: note = chemically synthesized
  source 1..20: mol_type = other DNA
tgattaactccaaaaaggaa

SEQ ID NO: 11255 - DNA, 20 bp, synthetic construct
  misc_feature 1..20: note = chemically synthesized
  source 1..20: mol_type = other DNA
taactccaaaaaggaagaga

SEQ ID NO: 11256 - DNA, 20 bp, synthetic construct
  misc_feature 1..20: note = chemically synthesized
  source 1..20: mol_type = other DNA
aactccaaaaaggaagagaa

SEQ ID NO: 11257 - DNA, 20 bp, synthetic construct
  misc_feature 1..20: note = chemically synthesized
  source 1..20: mol_type = other DNA
ccaaaaaggaagagaaagga

SEQ ID NO: 11258 - DNA, 20 bp, synthetic construct
  misc_feature 1..20: note = chemically synthesized
  source 1..20: mol_type = other DNA
ggaagagaaaggaaagtaaa

SEQ ID NO: 11259 - DNA, 20 bp, synthetic construct
  misc_feature 1..20: note = chemically synthesized
  source 1..20: mol_type = other DNA
gaagagaaaggaaagtaaaa

SEQ ID NO: 11260 - DNA, 20 bp, synthetic construct
  misc_feature 1..20: note = chemically synthesized
  source 1..20: mol_type = other DNA
agaaaggaaagtaaaaagga

SEQ ID NO: 11261 - DNA, 20 bp, synthetic construct
  misc_feature 1..20: note = chemically synthesized
  source 1..20: mol_type = other DNA
gaaaggaaagtaaaaaggaa

SEQ ID NO: 11262 - DNA, 20 bp, synthetic construct
  misc_feature 1..20: note = chemically synthesized
  source 1..20: mol_type = other DNA
ggaaagtaaaaaggaaagga

SEQ ID NO: 11263 - DNA, 20 bp, synthetic construct
  misc_feature 1..20: note = chemically synthesized
  source 1..20: mol_type = other DNA
taaaaaggaaaggaaagaaa

SEQ ID NO: 11264 - DNA, 20 bp, synthetic construct
  misc_feature 1..20: note = chemically synthesized
  source 1..20: mol_type = other DNA
aaaaggaaaggaaagaaacg

SEQ ID NO: 11265 - DNA, 20 bp, synthetic construct
  misc_feature 1..20: note = chemically synthesized
  source 1..20: mol_type = other DNA
ttcttcccttattttcattg

SEQ ID NO: 11266 - DNA, 20 bp, synthetic construct
  misc_feature 1..20: note = chemically synthesized
  source 1..20: mol_type = other DNA
cattgcagctgttcacttta

SEQ ID NO: 11267 - DNA, 20 bp, synthetic construct
  misc_feature 1..20: note = chemically synthesized
  source 1..20: mol_type = other DNA
ttgcagctgttcactttatg

SEQ ID NO: 11268 - DNA, 20 bp, synthetic construct
  misc_feature 1..20: note = chemically synthesized
  source 1..20: mol_type = other DNA
gttcactttatggagtgttc

SEQ ID NO: 11269 - DNA, 20 bp, synthetic construct
  misc_feature 1..20: note = chemically synthesized
  source 1..20: mol_type = other DNA
ctgcttttcccttgctctgc

SEQ ID NO: 11270 - DNA, 20 bp, synthetic construct
  misc_feature 1..20: note = chemically synthesized
  source 1..20: mol_type = other DNA
cttgctctgcaagttccttt

SEQ ID NO: 11271 - DNA, 20 bp, synthetic construct
  misc_feature 1..20: note = chemically synthesized
  source 1..20: mol_type = other DNA
ttgctctgcaagttcctttt

SEQ ID NO: 11272 - DNA, 20 bp, synthetic construct
  misc_feature 1..20: note = chemically synthesized
  source 1..20: mol_type = other DNA
tcactttttttctttgaatt

SEQ ID NO: 11273 - DNA, 20 bp, synthetic construct
  misc_feature 1..20: note = chemically synthesized
  source 1..20: mol_type = other DNA
ttttttctttgaatttagcc

SEQ ID NO: 11274 - DNA, 20 bp, synthetic construct
  misc_feature 1..20: note = chemically synthesized
  source 1..20: mol_type = other DNA
ttcaactcttttttttttga

SEQ ID NO: 11275 - DNA, 20 bp, synthetic construct
  misc_feature 1..20: note = chemically synthesized
  source 1..20: mol_type = other DNA
caactcttttttttttgaca

SEQ ID NO: 11276 - DNA, 20 bp, synthetic construct
  misc_feature 1..20: note = chemically synthesized
  source 1..20: mol_type = other DNA
cagagtcttgctctgtcgcc

SEQ ID NO: 11277 - DNA, 20 bp, synthetic construct
  misc_feature 1..20: note = chemically synthesized
  source 1..20: mol_type = other DNA
agagtcttgctctgtcgccc

SEQ ID NO: 11278 - DNA, 20 bp, synthetic construct
  misc_feature 1..20: note = chemically synthesized
  source 1..20: mol_type = other DNA
tcttgctctgtcgcccaggc

SEQ ID NO: 11279 - DNA, 20 bp, synthetic construct
  misc_feature 1..20: note = chemically synthesized
  source 1..20: mol_type = other DNA
ttgctctgtcgcccaggctg

SEQ ID NO: 11280 - DNA, 20 bp, synthetic construct
  misc_feature 1..20: note = chemically synthesized
  source 1..20: mol_type = other DNA
ctgtcgcccaggctggagtg

SEQ ID NO: 11281 - DNA, 20 bp, synthetic construct
  misc_feature 1..20: note = chemically synthesized
  source 1..20: mol_type = other DNA
tcgcccaggctggagtgcag

SEQ ID NO: 11282 - DNA, 20 bp, synthetic construct
  misc_feature 1..20: note = chemically synthesized
  source 1..20: mol_type = other DNA
ggagtgcagtggtgcgatct

SEQ ID NO: 11283 - DNA, 20 bp, synthetic construct
  misc_feature 1..20: note = chemically synthesized
  source 1..20: mol_type = other DNA
tcactgcaacctccatctcc

SEQ ID NO: 11284 - DNA, 20 bp, synthetic construct
  misc_feature 1..20: note = chemically synthesized
  source 1..20: mol_type = other DNA
cactgcaacctccatctccc

SEQ ID NO: 11285 - DNA, 20 bp, synthetic construct
  misc_feature 1..20: note = chemically synthesized
  source 1..20: mol_type = other DNA
aacctccatctcccaggttc

SEQ ID NO: 11286 - DNA, 20 bp, synthetic construct
  misc_feature 1..20: note = chemically synthesized
  source 1..20: mol_type = other DNA
ttcaagctattctcctgcct

SEQ ID NO: 11287 - DNA, 20 bp, synthetic construct
  misc_feature 1..20: note = chemically synthesized
  source 1..20: mol_type = other DNA
ttctcctgcctcagcctccc

SEQ ID NO: 11288 - DNA, 20 bp, synthetic construct
  misc_feature 1..20: note = chemically synthesized
  source 1..20: mol_type = other DNA
tcctgcctcagcctcccaag

SEQ ID NO: 11289 - DNA, 20 bp, synthetic construct
  misc_feature 1..20: note = chemically synthesized
  source 1..20: mol_type = other DNA
gcctcagcctcccaagtagc

SEQ ID NO: 11290 - DNA, 20 bp, synthetic construct
  misc_feature 1..20: note = chemically synthesized
  source 1..20: mol_type = other DNA
cctcagcctcccaagtagct

SEQ ID NO: 11291 - DNA, 20 bp, synthetic construct
  misc_feature 1..20: note = chemically synthesized
  source 1..20: mol_type = other DNA
ctcccaagtagctgggatta

SEQ ID NO: 11292 - DNA, 20 bp, synthetic construct
  misc_feature 1..20: note = chemically synthesized
  source 1..20: mol_type = other DNA
tcccaagtagctgggattac

SEQ ID NO: 11293 - DNA, 20 bp, synthetic construct
  misc_feature 1..20: note = chemically synthesized
  source 1..20: mol_type = other DNA
caggcacccgccaccatgcc

SEQ ID NO: 11294 - DNA, 20 bp, synthetic construct
  misc_feature 1..20: note = chemically synthesized
  source 1..20: mol_type = other DNA
ccagctaatttttgtatttt

SEQ ID NO: 11295 - DNA, 20 bp, synthetic construct
  misc_feature 1..20: note = chemically synthesized
  source 1..20: mol_type = other DNA
taatttttgtatttttagta

SEQ ID NO: 11296 - DNA, 20 bp, synthetic construct
  misc_feature 1..20: note = chemically synthesized
  source 1..20: mol_type = other DNA
ttttgtatttttagtaaagc

SEQ ID NO: 11297 - DNA, 20 bp, synthetic construct
  misc_feature 1..20: note = chemically synthesized
  source 1..20: mol_type = other DNA
tttgtatttttagtaaagcc

SEQ ID NO: 11298 - DNA, 20 bp, synthetic construct
  misc_feature 1..20: note = chemically synthesized
  source 1..20: mol_type = other DNA
ttgtatttttagtaaagccg

SEQ ID NO: 11299 - DNA, 20 bp, synthetic construct
  misc_feature 1..20: note = chemically synthesized
  source 1..20: mol_type = other DNA
gtttcaccatttcaccttgt

SEQ ID NO: 11300 - DNA, 20 bp, synthetic construct
  misc_feature 1..20: note = chemically synthesized
  source 1..20: mol_type = other DNA
caccatttcaccttgttggc

SEQ ID NO: 11301 - DNA, 20 bp, synthetic construct
  misc_feature 1..20: note = chemically synthesized
  source 1..20: mol_type = other DNA
accatttcaccttgttggcc

SEQ ID NO: 11302 - DNA, 20 bp, synthetic construct
  misc_feature 1..20: note = chemically synthesized
  source 1..20: mol_type = other DNA
tttcaccttgttggccaggc

SEQ ID NO: 11303 - DNA, 20 bp, synthetic construct
  misc_feature 1..20: note = chemically synthesized
  source 1..20: mol_type = other DNA
ggtgtcgaactcctgacctc

SEQ ID NO: 11304 - DNA, 20 bp, synthetic construct
  misc_feature 1..20: note = chemically synthesized
  source 1..20: mol_type = other DNA
cctcaagtgatctgcctgcc

SEQ ID NO: 11305 - DNA, 20 bp, synthetic construct
  misc_feature 1..20: note = chemically synthesized
  source 1..20: mol_type = other DNA
ctcaagtgatctgcctgcct

SEQ ID NO: 11306 - DNA, 20 bp, synthetic construct
  misc_feature 1..20: note = chemically synthesized
  source 1..20: mol_type = other DNA
ctgcctgcctgggcctctga

SEQ ID NO: 11307 - DNA, 20 bp, synthetic construct
  misc_feature 1..20: note = chemically synthesized
  source 1..20: mol_type = other DNA
gcctgggcctctgaaagtgc

SEQ ID NO: 11308 - DNA, 20 bp, synthetic construct
  misc_feature 1..20: note = chemically synthesized
  source 1..20: mol_type = other DNA
cctgggcctctgaaagtgct

SEQ ID NO: 11309 - DNA, 20 bp, synthetic construct
  misc_feature 1..20: note = chemically synthesized
  source 1..20: mol_type = other DNA
ctctgaaagtgctgggatta

SEQ ID NO: 11310 - DNA, 20 bp, synthetic construct
  misc_feature 1..20: note = chemically synthesized
  source 1..20: mol_type = other DNA
tctgaaagtgctgggattat

SEQ ID NO: 11311 - DNA, 20 bp, synthetic construct
  misc_feature 1..20: note = chemically synthesized
  source 1..20: mol_type = other DNA
agtgctgggattataggtgt

SEQ ID NO: 11312 - DNA, 20 bp, synthetic construct
  misc_feature 1..20: note = chemically synthesized
  source 1..20: mol_type = other DNA
ataggtgtgagccaccatgc

SEQ ID NO: 11313 - DNA, 20 bp, synthetic construct
  misc_feature 1..20: note = chemically synthesized
  source 1..20: mol_type = other DNA
taggtgtgagccaccatgcc

SEQ ID NO: 11314 - DNA, 20 bp, synthetic construct
  misc_feature 1..20: note = chemically synthesized
  source 1..20: mol_type = other DNA
gcctctcttcaactcttcat

SEQ ID NO: 11315 - DNA, 20 bp, synthetic construct
  misc_feature 1..20: note = chemically synthesized
  source 1..20: mol_type = other DNA
ctgtgcccaccctgcaatcc

SEQ ID NO: 11316 - DNA, 20 bp, synthetic construct
  misc_feature 1..20: note = chemically synthesized
  source 1..20: mol_type = other DNA
tgcaatcctagcccctaaat

SEQ ID NO: 11317 - DNA, 20 bp, synthetic construct
  misc_feature 1..20: note = chemically synthesized
  source 1..20: mol_type = other DNA
caatcctagcccctaaattg

SEQ ID NO: 11318 - DNA, 20 bp, synthetic construct
  misc_feature 1..20: note = chemically synthesized
  source 1..20: mol_type = other DNA
tcctagcccctaaattggag

SEQ ID NO: 11319 - DNA, 20 bp, synthetic construct
  misc_feature 1..20: note = chemically synthesized
  source 1..20: mol_type = other DNA
tgccttcatccttctcttcc

SEQ ID NO: 11320 - DNA, 20 bp, synthetic construct
  misc_feature 1..20: note = chemically synthesized
  source 1..20: mol_type = other DNA
ttcatccttctcttcccaga

SEQ ID NO: 11321 - DNA, 20 bp, synthetic construct
  misc_feature 1..20: note = chemically synthesized
  source 1..20: mol_type = other DNA
ccttctcttcccagacagcc

SEQ ID NO: 11322 - DNA, 20 bp, synthetic construct
  misc_feature 1..20: note = chemically synthesized
  source 1..20: mol_type = other DNA
cttctcttcccagacagccg

SEQ ID NO: 11323 - DNA, 20 bp, synthetic construct
  misc_feature 1..20: note = chemically synthesized
  source 1..20: mol_type = other DNA
ccagacagccgaggactgtg

SEQ ID NO: 11324 - DNA, 20 bp, synthetic construct
  misc_feature 1..20: note = chemically synthesized
  source 1..20: mol_type = other DNA
cagacagccgaggactgtga

SEQ ID NO: 11325 - DNA, 20 bp, synthetic construct
  misc_feature 1..20: note = chemically synthesized
  source 1..20: mol_type = other DNA
ggaaaaaaatcaccaaaatg

SEQ ID NO: 11326 - DNA, 20 bp, synthetic construct
  misc_feature 1..20: note = chemically synthesized
  source 1..20: mol_type = other DNA
aaaaatcaccaaaatgcaga

SEQ ID NO: 11327 - DNA, 20 bp, synthetic construct
  misc_feature 1..20: note = chemically synthesized
  source 1..20: mol_type = other DNA
caccacatattgatgcctca

SEQ ID NO: 11328 - DNA, 20 bp, synthetic construct
  misc_feature 1..20: note = chemically synthesized
  source 1..20: mol_type = other DNA
cctccacccacctctctgct

SEQ ID NO: 11329 - DNA, 20 bp, synthetic construct
  misc_feature 1..20: note = chemically synthesized
  source 1..20: mol_type = other DNA
tgctcagcaactcatttact

SEQ ID NO: 11330 - DNA, 20 bp, synthetic construct
  misc_feature 1..20: note = chemically synthesized
  source 1..20: mol_type = other DNA
gcaactcatttacttggccc

SEQ ID NO: 11331 - DNA, 20 bp, synthetic construct
  misc_feature 1..20: note = chemically synthesized
  source 1..20: mol_type = other DNA
tggccctggacactcctaaa

SEQ ID NO: 11332 - DNA, 20 bp, synthetic construct
  misc_feature 1..20: note = chemically synthesized
  source 1..20: mol_type = other DNA
tccatgcctgcatccattta

SEQ ID NO: 11333 - DNA, 20 bp, synthetic construct
  misc_feature 1..20: note = chemically synthesized
  source 1..20: mol_type = other DNA
atccatttacagtcgttcct

SEQ ID NO: 11334 - DNA, 20 bp, synthetic construct
  misc_feature 1..20: note = chemically synthesized
  source 1..20: mol_type = other DNA
cagtcgttcctcagtatcca

SEQ ID NO: 11335 - DNA, 20 bp, synthetic construct
  misc_feature 1..20: note = chemically synthesized
  source 1..20: mol_type = other DNA
cctcagtatccatggaaaat

SEQ ID NO: 11336 - DNA, 20 bp, synthetic construct
  misc_feature 1..20: note = chemically synthesized
  source 1..20: mol_type = other DNA
cagtatccatggaaaattgg

SEQ ID NO: 11337 - DNA, 20 bp, synthetic construct
  misc_feature 1..20: note = chemically synthesized
  source 1..20: mol_type = other DNA
atccatggaaaattggtggc

SEQ ID NO: 11338 - DNA, 20 bp, synthetic construct
  misc_feature 1..20: note = chemically synthesized
  source 1..20: mol_type = other DNA
caagaccccctgcaaatatc

SEQ ID NO: 11339 - DNA, 20 bp, synthetic construct
  misc_feature 1..20: note = chemically synthesized
  source 1..20: mol_type = other DNA
cctgcaaatatcaagatctg

SEQ ID NO: 11340 - DNA, 20 bp, synthetic construct
  misc_feature 1..20: note = chemically synthesized
  source 1..20: mol_type = other DNA
atcaagatctgtggatgctc

SEQ ID NO: 11341 - DNA, 20 bp, synthetic construct
  misc_feature 1..20: note = chemically synthesized
  source 1..20: mol_type = other DNA
tcaagtctccgatataaaaa

SEQ ID NO: 11342 - DNA, 20 bp, synthetic construct
  misc_feature 1..20: note = chemically synthesized
  source 1..20: mol_type = other DNA
tttgtactttaaatcatctc

SEQ ID NO: 11343 - DNA, 20 bp, synthetic construct
  misc_feature 1..20: note = chemically synthesized
  source 1..20: mol_type = other DNA
ttgtactttaaatcatctct

SEQ ID NO: 11344 - DNA, 20 bp, synthetic construct
  misc_feature 1..20: note = chemically synthesized
  source 1..20: mol_type = other DNA
catctctaggtttctcttaa

SEQ ID NO: 11345 - DNA, 20 bp, synthetic construct
  misc_feature 1..20: note = chemically synthesized
  source 1..20: mol_type = other DNA
caatgtaaatgctatgtaaa

SEQ ID NO: 11346 - DNA, 20 bp, synthetic construct
  misc_feature 1..20: note = chemically synthesized
  source 1..20: mol_type = other DNA
agttgttatgctgtattgtt

SEQ ID NO: 11347 - DNA, 20 bp, synthetic construct
  misc_feature 1..20: note = chemically synthesized
  source 1..20: mol_type = other DNA
gttgttatgctgtattgttt

SEQ ID NO: 11348 - DNA, 20 bp, synthetic construct
  misc_feature 1..20: note = chemically synthesized
  source 1..20: mol_type = other DNA
ttgttatgctgtattgttta

SEQ ID NO: 11349 - DNA, 20 bp, synthetic construct
  misc_feature 1..20: note = chemically synthesized
  source 1..20: mol_type = other DNA
tattgtttagggaataatga

SEQ ID NO: 11350 - DNA, 20 bp, synthetic construct
  misc_feature 1..20: note = chemically synthesized
  source 1..20: mol_type = other DNA
tagggaataatgaaagataa

SEQ ID NO: 11351 - DNA, 20 bp, synthetic construct
  misc_feature 1..20: note = chemically synthesized
  source 1..20: mol_type = other DNA
gggaataatgaaagataaaa

SEQ ID NO: 11352 - DNA, 20 bp, synthetic construct
  misc_feature 1..20: note = chemically synthesized
  source 1..20: mol_type = other DNA
taaaagagtctgtacatgtt

SEQ ID NO: 11353 - DNA, 20 bp, synthetic construct
  misc_feature 1..20: note = chemically synthesized
  source 1..20: mol_type = other DNA
aagagtctgtacatgttcag

SEQ ID NO: 11354 - DNA, 20 bp, synthetic construct
  misc_feature 1..20: note = chemically synthesized
  source 1..20: mol_type = other DNA
gagtctgtacatgttcagta

SEQ ID NO: 11355 - DNA, 20 bp, synthetic construct
  misc_feature 1..20: note = chemically synthesized
  source 1..20: mol_type = other DNA
tcttgaatatttttgatctg

SEQ ID NO: 11356 - DNA, 20 bp, synthetic construct
  misc_feature 1..20: note = chemically synthesized
  source 1..20: mol_type = other DNA
tctgcagttaattgaatctg

SEQ ID NO: 11357 - DNA, 20 bp, synthetic construct
  misc_feature 1..20: note = chemically synthesized
  source 1..20: mol_type = other DNA
gttaattgaatctgtggctg

SEQ ID NO: 11358 - DNA, 20 bp, synthetic construct
  misc_feature 1..20: note = chemically synthesized
  source 1..20: mol_type = other DNA
tctgtggctgtggaactcac

SEQ ID NO: 11359 - DNA, 20 bp, synthetic construct
  misc_feature 1..20: note = chemically synthesized
  source 1..20: mol_type = other DNA
ctgtggctgtggaactcaca

SEQ ID NO: 11360 - DNA, 20 bp, synthetic construct
  misc_feature 1..20: note = chemically synthesized
  source 1..20: mol_type = other DNA
gtggctgtggaactcacaag

SEQ ID NO: 11361 - DNA, 20 bp, synthetic construct
  misc_feature 1..20: note = chemically synthesized
  source 1..20: mol_type = other DNA
ggctgtggaactcacaagga

SEQ ID NO: 11362 - DNA, 20 bp, synthetic construct
  misc_feature 1..20: note = chemically synthesized
  source 1..20: mol_type = other DNA
cacaaggagagctgactgta

SEQ ID NO: 11363 - DNA, 20 bp, synthetic construct
  misc_feature 1..20: note = chemically synthesized
  source 1..20: mol_type = other DNA
ggagagctgactgtacagtg

SEQ ID NO: 11364 - DNA, 20 bp, synthetic construct
  misc_feature 1..20: note = chemically synthesized
  source 1..20: mol_type = other DNA
gctgactgtacagtgtggtt

SEQ ID NO: 11365 - DNA, 20 bp, synthetic construct
  misc_feature 1..20: note = chemically synthesized
  source 1..20: mol_type = other DNA
agtgtggttgagtgaaaaaa

SEQ ID NO: 11366 - DNA, 20 bp, synthetic construct
  misc_feature 1..20: note = chemically synthesized
  source 1..20: mol_type = other DNA
ttgagtgaaaaaacagactt

SEQ ID NO: 11367 - DNA, 20 bp, synthetic construct
  misc_feature 1..20: note = chemically synthesized
  source 1..20: mol_type = other DNA
gaaaaaacagactttagaat

SEQ ID NO: 11368 - DNA, 20 bp, synthetic construct
  misc_feature 1..20: note = chemically synthesized
  source 1..20: mol_type = other DNA
aacagactttagaatcagat

SEQ ID NO: 11369 - DNA, 20 bp, synthetic construct
  misc_feature 1..20: note = chemically synthesized
  source 1..20: mol_type = other DNA
gactttagaatcagatcaga

SEQ ID NO: 11370 - DNA, 20 bp, synthetic construct
  misc_feature 1..20: note = chemically synthesized
  source 1..20: mol_type = other DNA
agaatcagatcagacagaaa

SEQ ID NO: 11371 - DNA, 20 bp, synthetic construct
  misc_feature 1..20: note = chemically synthesized
  source 1..20: mol_type = other DNA
gaatcagatcagacagaaat

SEQ ID NO: 11372 - DNA, 20 bp, synthetic construct
  misc_feature 1..20: note = chemically synthesized
  source 1..20: mol_type = other DNA
gacagaaataggtttgaatc

SEQ ID NO: 11373 - DNA, 20 bp, synthetic construct
  misc_feature 1..20: note = chemically synthesized
  source 1..20: mol_type = other DNA
aatcaagtatctgcctcctc

SEQ ID NO: 11374 - DNA, 20 bp, synthetic construct
  misc_feature 1..20: note = chemically synthesized
  source 1..20: mol_type = other DNA
ctcctctagacctgtgacct

SEQ ID NO: 11375 - DNA, 20 bp, synthetic construct
  misc_feature 1..20: note = chemically synthesized
  source 1..20: mol_type = other DNA
ctagacctgtgaccttggac

SEQ ID NO: 11376 - DNA, 20 bp, synthetic construct
  misc_feature 1..20: note = chemically synthesized
  source 1..20: mol_type = other DNA
tgaccttggacaagtcacac

SEQ ID NO: 11377 - DNA, 20 bp, synthetic construct
  misc_feature 1..20: note = chemically synthesized
  source 1..20: mol_type = other DNA
taactttgtcaaatgtaaat

SEQ ID NO: 11378 - DNA, 20 bp, synthetic construct
  misc_feature 1..20: note = chemically synthesized
  source 1..20: mol_type = other DNA
aactttgtcaaatgtaaatt

SEQ ID NO: 11379 - DNA, 20 bp, synthetic construct
  misc_feature 1..20: note = chemically synthesized
  source 1..20: mol_type = other DNA
caaatgtaaattaggtttaa

SEQ ID NO: 11380 - DNA, 20 bp, synthetic construct
  misc_feature 1..20: note = chemically synthesized
  source 1..20: mol_type = other DNA
atgtaaattaggtttaacag

SEQ ID NO: 11381 - DNA, 20 bp, synthetic construct
  misc_feature 1..20: note = chemically synthesized
  source 1..20: mol_type = other DNA
aggtttaacagtagtataat

SEQ ID NO: 11382 - DNA, 20 bp, synthetic construct
  misc_feature 1..20: note = chemically synthesized
  source 1..20: mol_type = other DNA
taataagaatatctatctca

SEQ ID NO: 11383 - DNA, 20 bp, synthetic construct
  misc_feature 1..20: note = chemically synthesized
  source 1..20: mol_type = other DNA
aataagaatatctatctcac

SEQ ID NO: 11384 - DNA, 20 bp, synthetic construct
  misc_feature 1..20: note = chemically synthesized
  source 1..20: mol_type = other DNA
aatatctatctcacaggtgt

SEQ ID NO: 11385 - DNA, 20 bp, synthetic construct
  misc_feature 1..20: note = chemically synthesized
  source 1..20: mol_type = other DNA
atctatctcacaggtgttgg

SEQ ID NO: 11386 - DNA, 20 bp, synthetic construct
  misc_feature 1..20: note = chemically synthesized
  source 1..20: mol_type = other DNA
tctatctcacaggtgttggc

SEQ ID NO: 11387 - DNA, 20 bp, synthetic construct
  misc_feature 1..20: note = chemically synthesized
  source 1..20: mol_type = other DNA
ctcacaggtgttggcaggat

SEQ ID NO: 11388 - DNA, 20 bp, synthetic construct
  misc_feature 1..20: note = chemically synthesized
  source 1..20: mol_type = other DNA
caggtgttggcaggatcagt

SEQ ID NO: 11389 - DNA, 20 bp, synthetic construct
  misc_feature 1..20: note = chemically synthesized
  source 1..20: mol_type = other DNA
ggatcagtgagacaatatgc

SEQ ID NO: 11390 - DNA, 20 bp, synthetic construct
  misc_feature 1..20: note = chemically synthesized
  source 1..20: mol_type = other DNA
tctccctactcctttcatgt

SEQ ID NO: 11391 - DNA, 20 bp, synthetic construct
  misc_feature 1..20: note = chemically synthesized
  source 1..20: mol_type = other DNA
ttaaatttctcaattctctt

SEQ ID NO: 11392 - DNA, 20 bp, synthetic construct
  misc_feature 1..20: note = chemically synthesized
  source 1..20: mol_type = other DNA
gctctttaataacttctgtg

SEQ ID NO: 11393 - DNA, 20 bp, synthetic construct
  misc_feature 1..20: note = chemically synthesized
  source 1..20: mol_type = other DNA
gaaatgactattgtcacaat

SEQ ID NO: 11394 - DNA, 20 bp, synthetic construct
  misc_feature 1..20: note = chemically synthesized
  source 1..20: mol_type = other DNA
aaatgactattgtcacaatc

SEQ ID NO: 11395 - DNA, 20 bp, synthetic construct
  misc_feature 1..20: note = chemically synthesized
  source 1..20: mol_type = other DNA
tcacaatcaggaatgaccta

SEQ ID NO: 11396 - DNA, 20 bp, synthetic construct
  misc_feature 1..20: note = chemically synthesized
  source 1..20: mol_type = other DNA
atgacctaaagaataatttt

SEQ ID NO: 11397 - DNA, 20 bp, synthetic construct
  misc_feature 1..20: note = chemically synthesized
  source 1..20: mol_type = other DNA
ttttgagtttatgtatttac

SEQ ID NO: 11398 - DNA, 20 bp, synthetic construct
  misc_feature 1..20: note = chemically synthesized
  source 1..20: mol_type = other DNA
attgttgatctctccctttt

SEQ ID NO: 11399 - DNA, 20 bp, synthetic construct
  misc_feature 1..20: note = chemically synthesized
  source 1..20: mol_type = other DNA
ttgttgatctctcccttttt

SEQ ID NO: 11400 - DNA, 20 bp, synthetic construct
  misc_feature 1..20: note = chemically synthesized
  source 1..20: mol_type = other DNA
ttataataatcactctattc

SEQ ID NO: 11401 - DNA, 20 bp, synthetic construct
  misc_feature 1..20: note = chemically synthesized
  source 1..20: mol_type = other DNA
tctaactcctgttatccatc

SEQ ID NO: 11402 - DNA, 20 bp, synthetic construct
  misc_feature 1..20: note = chemically synthesized
  source 1..20: mol_type = other DNA
ttaactcctgttcctctcca

SEQ ID NO: 11403 - DNA, 20 bp, synthetic construct
  misc_feature 1..20: note = chemically synthesized
  source 1..20: mol_type = other DNA
ctccatggcccttaaatgtc

SEQ ID NO: 11404 - DNA, 20 bp, synthetic construct
  misc_feature 1..20: note = chemically synthesized
  source 1..20: mol_type = other DNA
tccatggcccttaaatgtcc

SEQ ID NO: 11405 - DNA, 20 bp, synthetic construct
  misc_feature 1..20: note = chemically synthesized
  source 1..20: mol_type = other DNA
ccatggcccttaaatgtcca

SEQ ID NO: 11406 - DNA, 20 bp, synthetic construct
  misc_feature 1..20: note = chemically synthesized
  source 1..20: mol_type = other DNA
ttaaatgtccagggttctcc

SEQ ID NO: 11407 - DNA, 20 bp, synthetic construct
  misc_feature 1..20: note = chemically synthesized
  source 1..20: mol_type = other DNA
taaatgtccagggttctccc

SEQ ID NO: 11408 - DNA, 20 bp, synthetic construct
  misc_feature 1..20: note = chemically synthesized
  source 1..20: mol_type = other DNA
tccagggttctcccaggctc

SEQ ID NO: 11409 - DNA, 20 bp, synthetic construct
  misc_feature 1..20: note = chemically synthesized
  source 1..20: mol_type = other DNA
gttctcccaggctccagcct

SEQ ID NO: 11410 - DNA, 20 bp, synthetic construct
  misc_feature 1..20: note = chemically synthesized
  source 1..20: mol_type = other DNA
ttcaccttatatatacttgc

SEQ ID NO: 11411 - DNA, 20 bp, synthetic construct
  misc_feature 1..20: note = chemically synthesized
  source 1..20: mol_type = other DNA
tcaccttatatatacttgct

SEQ ID NO: 11412 - DNA, 20 bp, synthetic construct
  misc_feature 1..20: note = chemically synthesized
  source 1..20: mol_type = other DNA
caccttatatatacttgcta

SEQ ID NO: 11413 - DNA, 20 bp, synthetic construct
  misc_feature 1..20: note = chemically synthesized
  source 1..20: mol_type = other DNA
ttatatatacttgctagggc

SEQ ID NO: 11414 - DNA, 20 bp, synthetic construct
  misc_feature 1..20: note = chemically synthesized
  source 1..20: mol_type = other DNA
tatatatacttgctagggct

SEQ ID NO: 11415 - DNA, 20 bp, synthetic construct
  misc_feature 1..20: note = chemically synthesized
  source 1..20: mol_type = other DNA
atacttgctagggctgggac

SEQ ID NO: 11416 - DNA, 20 bp, synthetic construct
  misc_feature 1..20: note = chemically synthesized
  source 1..20: mol_type = other DNA
acttgctagggctgggacaa

SEQ ID NO: 11417 - DNA, 20 bp, synthetic construct
  misc_feature 1..20: note = chemically synthesized
  source 1..20: mol_type = other DNA
gggacaagagtgaaccaaac

SEQ ID NO: 11418 - DNA, 20 bp, synthetic construct
  misc_feature 1..20: note = chemically synthesized
  source 1..20: mol_type = other DNA
ggacaagagtgaaccaaaca

SEQ ID NO: 11419 - DNA, 20 bp, synthetic construct
  misc_feature 1..20: note = chemically synthesized
  source 1..20: mol_type = other DNA
agtgaaccaaacaaggcatg

SEQ ID NO: 11420 - DNA, 20 bp, synthetic construct
  misc_feature 1..20: note = chemically synthesized
  source 1..20: mol_type = other DNA
gtgaaccaaacaaggcatgt

SEQ ID NO: 11421 - DNA, 20 bp, synthetic construct
  misc_feature 1..20: note = chemically synthesized
  source 1..20: mol_type = other DNA
tgaaccaaacaaggcatgta

SEQ ID NO: 11422 - DNA, 20 bp, synthetic construct
  misc_feature 1..20: note = chemically synthesized
  source 1..20: mol_type = other DNA
gcatgtagggcacaatattt

SEQ ID NO: 11423 - DNA, 20 bp, synthetic construct
  misc_feature 1..20: note = chemically synthesized
  source 1..20: mol_type = other DNA
atgtagggcacaatatttaa

SEQ ID NO: 11424 - DNA, 20 bp, synthetic construct
  misc_feature 1..20: note = chemically synthesized
  source 1..20: mol_type = other DNA
tgtagggcacaatatttaag

SEQ ID NO: 11425 - DNA, 20 bp, synthetic construct
  misc_feature 1..20: note = chemically synthesized
  source 1..20: mol_type = other DNA
tttaagaggtcctcacttct

SEQ ID NO: 11426 - DNA, 20 bp, synthetic construct
  misc_feature 1..20: note = chemically synthesized
  source 1..20: mol_type = other DNA
ttaagaggtcctcacttctc

SEQ ID NO: 11427 - DNA, 20 bp, synthetic construct
  misc_feature 1..20: note = chemically synthesized
  source 1..20: mol_type = other DNA
taagaggtcctcacttctcg

SEQ ID NO: 11428 - DNA, 20 bp, synthetic construct
  misc_feature 1..20: note = chemically synthesized
  source 1..20: mol_type = other DNA
cctcacttctcggggcatac

SEQ ID NO: 11429 - DNA, 20 bp, synthetic construct
  misc_feature 1..20: note = chemically synthesized
  source 1..20: mol_type = other DNA
acaagtatatttatgcccta

SEQ ID NO: 11430 - DNA, 20 bp, synthetic construct
  misc_feature 1..20: note = chemically synthesized
  source 1..20: mol_type = other DNA
caagtatatttatgccctac

SEQ ID NO: 11431 - DNA, 20 bp, synthetic construct
  misc_feature 1..20: note = chemically synthesized
  source 1..20: mol_type = other DNA
cctacaggccttgcttacca

SEQ ID NO: 11432 - DNA, 20 bp, synthetic construct
  misc_feature 1..20: note = chemically synthesized
  source 1..20: mol_type = other DNA
aggccttgcttaccacagtc

SEQ ID NO: 11433 - DNA, 20 bp, synthetic construct
  misc_feature 1..20: note = chemically synthesized
  source 1..20: mol_type = other DNA
ttgcttaccacagtctagtc

SEQ ID NO: 11434 - DNA, 20 bp, synthetic construct
  misc_feature 1..20: note = chemically synthesized
  source 1..20: mol_type = other DNA
ccctgtcaacaaaatttact

SEQ ID NO: 11435 - DNA, 20 bp, synthetic construct
  misc_feature 1..20: note = chemically synthesized
  source 1..20: mol_type = other DNA
gagcatacaaccactactgc

SEQ ID NO: 11436 - DNA, 20 bp, synthetic construct
  misc_feature 1..20: note = chemically synthesized
  source 1..20: mol_type = other DNA
agcatacaaccactactgcc

SEQ ID NO: 11437 - DNA, 20 bp, synthetic construct
  misc_feature 1..20: note = chemically synthesized
  source 1..20: mol_type = other DNA
actactgccaggcactgtac

SEQ ID NO: 11438 - DNA, 20 bp, synthetic construct
  misc_feature 1..20: note = chemically synthesized
  source 1..20: mol_type = other DNA
ctactgccaggcactgtact

SEQ ID NO: 11439 - DNA, 20 bp, synthetic construct
  misc_feature 1..20: note = chemically synthesized
  source 1..20: mol_type = other DNA
caatatccatgctcactctc

SEQ ID NO: 11440 - DNA, 20 bp, synthetic construct
  misc_feature 1..20: note = chemically synthesized
  source 1..20: mol_type = other DNA
tctccagatgcccacacacg

SEQ ID NO: 11441 - DNA, 20 bp, synthetic construct
  misc_feature 1..20: note = chemically synthesized
  source 1..20: mol_type = other DNA
gtggctgtaactactgttta

SEQ ID NO: 11442 - DNA, 20 bp, synthetic construct
  misc_feature 1..20: note = chemically synthesized
  source 1..20: mol_type = other DNA
actactgtttacagaacaat

SEQ ID NO: 11443 - DNA, 20 bp, synthetic construct
  misc_feature 1..20: note = chemically synthesized
  source 1..20: mol_type = other DNA
gagttccaaatactcaccta

SEQ ID NO: 11444 - DNA, 20 bp, synthetic construct
  misc_feature 1..20: note = chemically synthesized
  source 1..20: mol_type = other DNA
tccaaatactcacctatagt

SEQ ID NO: 11445 - DNA, 20 bp, synthetic construct
  misc_feature 1..20: note = chemically synthesized
  source 1..20: mol_type = other DNA
cagatacgtctcctgaattt

SEQ ID NO: 11446 - DNA, 20 bp, synthetic construct
  misc_feature 1..20: note = chemically synthesized
  source 1..20: mol_type = other DNA
cctaactgtatatcataatg

SEQ ID NO: 11447 - DNA, 20 bp, synthetic construct
  misc_feature 1..20: note = chemically synthesized
  source 1..20: mol_type = other DNA
actgtatatcataatgtagc

SEQ ID NO: 11448 - DNA, 20 bp, synthetic construct
  misc_feature 1..20: note = chemically synthesized
  source 1..20: mol_type = other DNA
tatcataatgtagccagtaa

SEQ ID NO: 11449 - DNA, 20 bp, synthetic construct
  misc_feature 1..20: note = chemically synthesized
  source 1..20: mol_type = other DNA
atgtaatgcttctgctgtgt

SEQ ID NO: 11450 - DNA, 20 bp, synthetic construct
  misc_feature 1..20: note = chemically synthesized
  source 1..20: mol_type = other DNA
gctgtgttggacactgtgct

SEQ ID NO: 11451 - DNA, 20 bp, synthetic construct
  misc_feature 1..20: note = chemically synthesized
  source 1..20: mol_type = other DNA
atctcacttcatcctcacaa

SEQ ID NO: 11452 - DNA, 20 bp, synthetic construct
  misc_feature 1..20: note = chemically synthesized
  source 1..20: mol_type = other DNA
catcctcacaaaagtcccac

SEQ ID NO: 11453 - DNA, 20 bp, synthetic construct
  misc_feature 1..20: note = chemically synthesized
  source 1..20: mol_type = other DNA
ctcacaaaagtcccacgaga

SEQ ID NO: 11454 - DNA, 20 bp, synthetic construct
  misc_feature 1..20: note = chemically synthesized
  source 1..20: mol_type = other DNA
tcacaaaagtcccacgagat

SEQ ID NO: 11455 - DNA, 20 bp, synthetic construct
  misc_feature 1..20: note = chemically synthesized
  source 1..20: mol_type = other DNA
gtcatcttatttttatgaat

SEQ ID NO: 11456 - DNA, 20 bp, synthetic construct
  misc_feature 1..20: note = chemically synthesized
  source 1..20: mol_type = other DNA
tcatcttatttttatgaatg

SEQ ID NO: 11457 - DNA, 20 bp, synthetic construct
  misc_feature 1..20: note = chemically synthesized
  source 1..20: mol_type = other DNA
tcttatttttatgaatgagg

SEQ ID NO: 11458 - DNA, 20 bp, synthetic construct
  misc_feature 1..20: note = chemically synthesized
  source 1..20: mol_type = other DNA
atttttatgaatgaggaaga

SEQ ID NO: 11459 - DNA, 20 bp, synthetic construct
  misc_feature 1..20: note = chemically synthesized
  source 1..20: mol_type = other DNA
gaatgaggaagatagattca

SEQ ID NO: 11460 - DNA, 20 bp, synthetic construct
  misc_feature 1..20: note = chemically synthesized
  source 1..20: mol_type = other DNA
atgaggaagatagattcata

SEQ ID NO: 11461 - DNA, 20 bp, synthetic construct
  misc_feature 1..20: note = chemically synthesized
  source 1..20: mol_type = other DNA
tgaggaagatagattcatag

SEQ ID NO: 11462 - DNA, 20 bp, synthetic construct
  misc_feature 1..20: note = chemically synthesized
  source 1..20: mol_type = other DNA
aagatagattcatagaggct

SEQ ID NO: 11463 - DNA, 20 bp, synthetic construct
  misc_feature 1..20: note = chemically synthesized
  source 1..20: mol_type = other DNA
agatagattcatagaggcta

SEQ ID NO: 11464 - DNA, 20 bp, synthetic construct
  misc_feature 1..20: note = chemically synthesized
  source 1..20: mol_type = other DNA
gatagattcatagaggctaa

SEQ ID NO: 11465 - DNA, 20 bp, synthetic construct
  misc_feature 1..20: note = chemically synthesized
  source 1..20: mol_type = other DNA
agaggctaagggctttgccc

SEQ ID NO: 11466 - DNA, 20 bp, synthetic construct
  misc_feature 1..20: note = chemically synthesized
  source 1..20: mol_type = other DNA
gaggctaagggctttgccca

SEQ ID NO: 11467 - DNA, 20 bp, synthetic construct
  misc_feature 1..20: note = chemically synthesized
  source 1..20: mol_type = other DNA
aggtaacatactaaaacatt

SEQ ID NO: 11468 - DNA, 20 bp, synthetic construct
  misc_feature 1..20: note = chemically synthesized
  source 1..20: mol_type = other DNA
ggtaacatactaaaacattc

SEQ ID NO: 11469 - DNA, 20 bp, synthetic construct
  misc_feature 1..20: note = chemically synthesized
  source 1..20: mol_type = other DNA
atactaaaacattcaggatt

SEQ ID NO: 11470 - DNA, 20 bp, synthetic construct
  misc_feature 1..20: note = chemically synthesized
  source 1..20: mol_type = other DNA
aacattcaggattcagactc

SEQ ID NO: 11471 - DNA, 20 bp, synthetic construct
  misc_feature 1..20: note = chemically synthesized
  source 1..20: mol_type = other DNA
attcaggattcagactctgg

SEQ ID NO: 11472 - DNA, 20 bp, synthetic construct
  misc_feature 1..20: note = chemically synthesized
  source 1..20: mol_type = other DNA
aggattcagactctggcagt

SEQ ID NO: 11473 - DNA, 20 bp, synthetic construct
  misc_feature 1..20: note = chemically synthesized
  source 1..20: mol_type = other DNA
agactctggcagtcagacta

SEQ ID NO: 11474 - DNA, 20 bp, synthetic construct
  misc_feature 1..20: note = chemically synthesized
  source 1..20: mol_type = other DNA
actctggcagtcagactaaa

SEQ ID NO: 11475 - DNA, 20 bp, synthetic construct
  misc_feature 1..20: note = chemically synthesized
  source 1..20: mol_type = other DNA
tggcagtcagactaaagagc

SEQ ID NO: 11476 - DNA, 20 bp, synthetic construct
  misc_feature 1..20: note = chemically synthesized
  source 1..20: mol_type = other DNA
gactaaagagccagttctct

SEQ ID NO: 11477 - DNA, 20 bp, synthetic construct
  misc_feature 1..20: note = chemically synthesized
  source 1..20: mol_type = other DNA
ttctcttagacattattctg

SEQ ID NO: 11478 - DNA, 20 bp, synthetic construct
  misc_feature 1..20: note = chemically synthesized
  source 1..20: mol_type = other DNA
ccataatcacatcaaacaca

SEQ ID NO: 11479 - DNA, 20 bp, synthetic construct
  misc_feature 1..20: note = chemically synthesized
  source 1..20: mol_type = other DNA
acatcaaacacaaagtcccc

SEQ ID NO: 11480 - DNA, 20 bp, synthetic construct
  misc_feature 1..20: note = chemically synthesized
  source 1..20: mol_type = other DNA
acacaaagtccccaagactc

SEQ ID NO: 11481 - DNA, 20 bp, synthetic construct
  misc_feature 1..20: note = chemically synthesized
  source 1..20: mol_type = other DNA
gccatttccccttccatacc

SEQ ID NO: 11482 - DNA, 20 bp, synthetic construct
  misc_feature 1..20: note = chemically synthesized
  source 1..20: mol_type = other DNA
tttccccttccatacccaga

SEQ ID NO: 11483 - DNA, 20 bp, synthetic construct
  misc_feature 1..20: note = chemically synthesized
  source 1..20: mol_type = other DNA
ccttccatacccagatggtt

SEQ ID NO: 11484 - DNA, 20 bp, synthetic construct
  misc_feature 1..20: note = chemically synthesized
  source 1..20: mol_type = other DNA
ttttttgtactgctactgtt

SEQ ID NO: 11485 - DNA, 20 bp, synthetic construct
  misc_feature 1..20: note = chemically synthesized
  source 1..20: mol_type = other DNA
tttttgtactgctactgttc

SEQ ID NO: 11486 - DNA, 20 bp, synthetic construct
  misc_feature 1..20: note = chemically synthesized
  source 1..20: mol_type = other DNA
tactgctactgttcaggttc

SEQ ID NO: 11487 - DNA, 20 bp, synthetic construct
  misc_feature 1..20: note = chemically synthesized
  source 1..20: mol_type = other DNA
tctagcctttatgtctcccg

SEQ ID NO: 11488 - DNA, 20 bp, synthetic construct
  misc_feature 1..20: note = chemically synthesized
  source 1..20: mol_type = other DNA
tctcccgcagataattgcaa

SEQ ID NO: 11489 - DNA, 20 bp, synthetic construct
  misc_feature 1..20: note = chemically synthesized
  source 1..20: mol_type = other DNA
gcagataattgcaatagtct

SEQ ID NO: 11490 - DNA, 20 bp, synthetic construct
  misc_feature 1..20: note = chemically synthesized
  source 1..20: mol_type = other DNA
cagataattgcaatagtctc

SEQ ID NO: 11491 - DNA, 20 bp, synthetic construct
  misc_feature 1..20: note = chemically synthesized
  source 1..20: mol_type = other DNA
gtctcaggactgctctctcc

SEQ ID NO: 11492 - DNA, 20 bp, synthetic construct
  misc_feature 1..20: note = chemically synthesized
  source 1..20: mol_type = other DNA
ggactgctctctcctagtct

SEQ ID NO: 11493 - DNA, 20 bp, synthetic construct
  misc_feature 1..20: note = chemically synthesized
  source 1..20: mol_type = other DNA
gctctctcctagtcttggta

SEQ ID NO: 11494 - DNA, 20 bp, synthetic construct
  misc_feature 1..20: note = chemically synthesized
  source 1..20: mol_type = other DNA
ctcccccactatcatttcat

SEQ ID NO: 11495 - DNA, 20 bp, synthetic construct
  misc_feature 1..20: note = chemically synthesized
  source 1..20: mol_type = other DNA
tcatttcattagcgtgttgc

SEQ ID NO: 11496 - DNA, 20 bp, synthetic construct
  misc_feature 1..20: note = chemically synthesized
  source 1..20: mol_type = other DNA
tcattagcgtgttgccagac

SEQ ID NO: 11497 - DNA, 20 bp, synthetic construct
  misc_feature 1..20: note = chemically synthesized
  source 1..20: mol_type = other DNA
cattagcgtgttgccagact

SEQ ID NO: 11498 - DNA, 20 bp, synthetic construct
  misc_feature 1..20: note = chemically synthesized
  source 1..20: mol_type = other DNA
ccagactgggcatcctaaat

SEQ ID NO: 11499 - DNA, 20 bp, synthetic construct
  misc_feature 1..20: note = chemically synthesized
  source 1..20: mol_type = other DNA
gggcatcctaaatcagccat

SEQ ID NO: 11500 - DNA, 20 bp, synthetic construct
  misc_feature 1..20: note = chemically synthesized
  source 1..20: mol_type = other DNA
catcctaaatcagccatcag

SEQ ID NO: 11501 - DNA, 20 bp, synthetic construct
  misc_feature 1..20: note = chemically synthesized
  source 1..20: mol_type = other DNA
attttattgtccaatctcct

SEQ ID NO: 11502 - DNA, 20 bp, synthetic construct
  misc_feature 1..20: note = chemically synthesized
  source 1..20: mol_type = other DNA
ttttattgtccaatctcctt

SEQ ID NO: 11503 - DNA, 20 bp, synthetic construct
  misc_feature 1..20: note = chemically synthesized
  source 1..20: mol_type = other DNA
tgacttcattatctgatgac

SEQ ID NO: 11504 - DNA, 20 bp, synthetic construct
  misc_feature 1..20: note = chemically synthesized
  source 1..20: mol_type = other DNA
atctgatgaccagctctgcc

SEQ ID NO: 11505 - DNA, 20 bp, synthetic construct
  misc_feature 1..20: note = chemically synthesized
  source 1..20: mol_type = other DNA
tttacctgtctcacttgtca

SEQ ID NO: 11506 - DNA, 20 bp, synthetic construct
  misc_feature 1..20: note = chemically synthesized
  source 1..20: mol_type = other DNA
ctcacttgtcatagtccata

SEQ ID NO: 11507 - DNA, 20 bp, synthetic construct
  misc_feature 1..20: note = chemically synthesized
  source 1..20: mol_type = other DNA
cctcacgttcttgcaaatct

SEQ ID NO: 11508 - DNA, 20 bp, synthetic construct
  misc_feature 1..20: note = chemically synthesized
  source 1..20: mol_type = other DNA
gcaaatctgagtctttgcac

SEQ ID NO: 11509 - DNA, 20 bp, synthetic construct
  misc_feature 1..20: note = chemically synthesized
  source 1..20: mol_type = other DNA
tgcataaaatgcccttatat

SEQ ID NO: 11510 - DNA, 20 bp, synthetic construct
  misc_feature 1..20: note = chemically synthesized
  source 1..20: mol_type = other DNA
gcccttatatcagacattta

SEQ ID NO: 11511 - DNA, 20 bp, synthetic construct
  misc_feature 1..20: note = chemically synthesized
  source 1..20: mol_type = other DNA
ccttatatcagacatttaaa

SEQ ID NO: 11512 - DNA, 20 bp, synthetic construct
  misc_feature 1..20: note = chemically synthesized
  source 1..20: mol_type = other DNA
ttatatcagacatttaaaga

SEQ ID NO: 11513 - DNA, 20 bp, synthetic construct
  misc_feature 1..20: note = chemically synthesized
  source 1..20: mol_type = other DNA
atatcagacatttaaagaga

SEQ ID NO: 11514 - DNA, 20 bp, synthetic construct
  misc_feature 1..20: note = chemically synthesized
  source 1..20: mol_type = other DNA
agaacgcctactcatctttt

SEQ ID NO: 11515 - DNA, 20 bp, synthetic construct
  misc_feature 1..20: note = chemically synthesized
  source 1..20: mol_type = other DNA
cctactcatcttttaagacc

SEQ ID NO: 11516 - DNA, 20 bp, synthetic construct
  misc_feature 1..20: note = chemically synthesized
  source 1..20: mol_type = other DNA
ttcctttctctatgatccct

SEQ ID NO: 11517 - DNA, 20 bp, synthetic construct
  misc_feature 1..20: note = chemically synthesized
  source 1..20: mol_type = other DNA
ctctatgatcccttagtacc

SEQ ID NO: 11518 - DNA, 20 bp, synthetic construct
  misc_feature 1..20: note = chemically synthesized
  source 1..20: mol_type = other DNA
ttatattgaaacctctcacc

SEQ ID NO: 11519 - DNA, 20 bp, synthetic construct
  misc_feature 1..20: note = chemically synthesized
  source 1..20: mol_type = other DNA
cacctggcctcatgctgctt

SEQ ID NO: 11520 - DNA, 20 bp, synthetic construct
  misc_feature 1..20: note = chemically synthesized
  source 1..20: mol_type = other DNA
cctcatgctgctttagatca

SEQ ID NO: 11521 - DNA, 20 bp, synthetic construct
  misc_feature 1..20: note = chemically synthesized
  source 1..20: mol_type = other DNA
tcatgctgctttagatcaaa

SEQ ID NO: 11522 - DNA, 20 bp, synthetic construct
  misc_feature 1..20: note = chemically synthesized
  source 1..20: mol_type = other DNA
catgctgctttagatcaaag

SEQ ID NO: 11523 - DNA, 20 bp, synthetic construct
  misc_feature 1..20: note = chemically synthesized
  source 1..20: mol_type = other DNA
atgctgctttagatcaaaga

SEQ ID NO: 11524 - DNA, 20 bp, synthetic construct
  misc_feature 1..20: note = chemically synthesized
  source 1..20: mol_type = other DNA
gctgctttagatcaaagagg

SEQ ID NO: 11525 - DNA, 20 bp, synthetic construct
  misc_feature 1..20: note = chemically synthesized
  source 1..20: mol_type = other DNA
tttagatcaaagagggagtc

SEQ ID NO: 11526 - DNA, 20 bp, synthetic construct
  misc_feature 1..20: note = chemically synthesized
  source 1..20: mol_type = other DNA
ctggtttatccccatacccc

SEQ ID NO: 11527 - DNA, 20 bp, synthetic construct
  misc_feature 1..20: note = chemically synthesized
  source 1..20: mol_type = other DNA
atacccctagtaccctgaca

SEQ ID NO: 11528 - DNA, 20 bp, synthetic construct
  misc_feature 1..20: note = chemically synthesized
  source 1..20: mol_type = other DNA
tagtaccctgacacagtacc

SEQ ID NO: 11529 - DNA, 20 bp, synthetic construct
  misc_feature 1..20: note = chemically synthesized
  source 1..20: mol_type = other DNA
tgacacagtacctggcacca

SEQ ID NO: 11530 - DNA, 20 bp, synthetic construct
  misc_feature 1..20: note = chemically synthesized
  source 1..20: mol_type = other DNA
ctggcaccatagttgtaact

SEQ ID NO: 11531 - DNA, 20 bp, synthetic construct
  misc_feature 1..20: note = chemically synthesized
  source 1..20: mol_type = other DNA
aactcagtaatgtctgaatg

SEQ ID NO: 11532 - DNA, 20 bp, synthetic construct
  misc_feature 1..20: note = chemically synthesized
  source 1..20: mol_type = other DNA
actcagtaatgtctgaatga

SEQ ID NO: 11533 - DNA, 20 bp, synthetic construct
  misc_feature 1..20: note = chemically synthesized
  source 1..20: mol_type = other DNA
tacactttacaaaactaaac

SEQ ID NO: 11534 - DNA, 20 bp, synthetic construct
  misc_feature 1..20: note = chemically synthesized
  source 1..20: mol_type = other DNA
acaaaactaaactggtttta

SEQ ID NO: 11535 - DNA, 20 bp, synthetic construct
  misc_feature 1..20: note = chemically synthesized
  source 1..20: mol_type = other DNA
aactgttgcaataataccta

SEQ ID NO: 11536 - DNA, 20 bp, synthetic construct
  misc_feature 1..20: note = chemically synthesized
  source 1..20: mol_type = other DNA
actgttgcaataatacctaa

SEQ ID NO: 11537 - DNA, 20 bp, synthetic construct
  misc_feature 1..20: note = chemically synthesized
  source 1..20: mol_type = other DNA
gttgcaataatacctaaagg

SEQ ID NO: 11538 - DNA, 20 bp, synthetic construct
  misc_feature 1..20: note = chemically synthesized
  source 1..20: mol_type = other DNA
gcaataatacctaaaggcag

SEQ ID NO: 11539 - DNA, 20 bp, synthetic construct
  misc_feature 1..20: note = chemically synthesized
  source 1..20: mol_type = other DNA
gccatgaaaatgcaacatct

SEQ ID NO: 11540 - DNA, 20 bp, synthetic construct
  misc_feature 1..20: note = chemically synthesized
  source 1..20: mol_type = other DNA
tcactcaccgaaactccttt

SEQ ID NO: 11541 - DNA, 20 bp, synthetic construct
  misc_feature 1..20: note = chemically synthesized
  source 1..20: mol_type = other DNA
ctcaccgaaactccttttag

SEQ ID NO: 11542 - DNA, 20 bp, synthetic construct
  misc_feature 1..20: note = chemically synthesized
  source 1..20: mol_type = other DNA
aactccttttagaagccaat

SEQ ID NO: 11543 - DNA, 20 bp, synthetic construct
  misc_feature 1..20: note = chemically synthesized
  source 1..20: mol_type = other DNA
ctccttttagaagccaatga

SEQ ID NO: 11544 - DNA, 20 bp, synthetic construct
  misc_feature 1..20: note = chemically synthesized
  source 1..20: mol_type = other DNA
agaagccaatgagagtttaa

SEQ ID NO: 11545 - DNA, 20 bp, synthetic construct
  misc_feature 1..20: note = chemically synthesized
  source 1..20: mol_type = other DNA
agccaatgagagtttaatag

SEQ ID NO: 11546 - DNA, 20 bp, synthetic construct
  misc_feature 1..20: note = chemically synthesized
  source 1..20: mol_type = other DNA
caatgagagtttaatagcag

SEQ ID NO: 11547 - DNA, 20 bp, synthetic construct
  misc_feature 1..20: note = chemically synthesized
  source 1..20: mol_type = other DNA
atgagagtttaatagcagaa

SEQ ID NO: 11548 - DNA, 20 bp, synthetic construct
  misc_feature 1..20: note = chemically synthesized
  source 1..20: mol_type = other DNA
gagagtttaatagcagaaga

SEQ ID NO: 11549 - DNA, 20 bp, synthetic construct
  misc_feature 1..20: note = chemically synthesized
  source 1..20: mol_type = other DNA
gcattaatactgtctatcct

SEQ ID NO: 11550 - DNA, 20 bp, synthetic construct
  misc_feature 1..20: note = chemically synthesized
  source 1..20: mol_type = other DNA
tatccttagaaaaattcccc

SEQ ID NO: 11551 - DNA, 20 bp, synthetic construct
  misc_feature 1..20: note = chemically synthesized
  source 1..20: mol_type = other DNA
attcccctggccccttcctc

SEQ ID NO: 11552 - DNA, 20 bp, synthetic construct
  misc_feature 1..20: note = chemically synthesized
  source 1..20: mol_type = other DNA
ttcccctggccccttcctca

SEQ ID NO: 11553 - DNA, 20 bp, synthetic construct
  misc_feature 1..20: note = chemically synthesized
  source 1..20: mol_type = other DNA
tcccctggccccttcctcaa

SEQ ID NO: 11554 - DNA, 20 bp, synthetic construct
  misc_feature 1..20: note = chemically synthesized
  source 1..20: mol_type = other DNA
cctcaagggcttattatctc

SEQ ID NO: 11555 - DNA, 20 bp, synthetic construct
  misc_feature 1..20: note = chemically synthesized
  source 1..20: mol_type = other DNA
cttattatctctggctacaa

SEQ ID NO: 11556 - DNA, 20 bp, synthetic construct
  misc_feature 1..20: note = chemically synthesized
  source 1..20: mol_type = other DNA
atctctggctacaatggctg

SEQ ID NO: 11557 - DNA, 20 bp, synthetic construct
  misc_feature 1..20: note = chemically synthesized
  source 1..20: mol_type = other DNA
aatcacattgcctttctcct

SEQ ID NO: 11558 - DNA, 20 bp, synthetic construct
  misc_feature 1..20: note = chemically synthesized
  source 1..20: mol_type = other DNA
cctttctccttagtattatc

SEQ ID NO: 11559 - DNA, 20 bp, synthetic construct
  misc_feature 1..20: note = chemically synthesized
  source 1..20: mol_type = other DNA
ctttctccttagtattatct

SEQ ID NO: 11560 - DNA, 20 bp, synthetic construct
  misc_feature 1..20: note = chemically synthesized
  source 1..20: mol_type = other DNA
tttctccttagtattatctg

SEQ ID NO: 11561 - DNA, 20 bp, synthetic construct
  misc_feature 1..20: note = chemically synthesized
  source 1..20: mol_type = other DNA
tcgtatacttaacttccctt

SEQ ID NO: 11562 - DNA, 20 bp, synthetic construct
  misc_feature 1..20: note = chemically synthesized
  source 1..20: mol_type = other DNA
cgtatacttaacttcccttc

SEQ ID NO: 11563 - DNA, 20 bp, synthetic construct
  misc_feature 1..20: note = chemically synthesized
  source 1..20: mol_type = other DNA
cttcccttcaggtttatcgc

SEQ ID NO: 11564 - DNA, 20 bp, synthetic construct
  misc_feature 1..20: note = chemically synthesized
  source 1..20: mol_type = other DNA
tatcgctagtcattatttcc

SEQ ID NO: 11565 - DNA, 20 bp, synthetic construct
  misc_feature 1..20: note = chemically synthesized
  source 1..20: mol_type = other DNA
atcgctagtcattatttccc

SEQ ID NO: 11566 - DNA, 20 bp, synthetic construct
  misc_feature 1..20: note = chemically synthesized
  source 1..20: mol_type = other DNA
cattatttcccaggctccaa

SEQ ID NO: 11567 - DNA, 20 bp, synthetic construct
  misc_feature 1..20: note = chemically synthesized
  source 1..20: mol_type = other DNA
tttcccaggctccaaaagcc

SEQ ID NO: 11568 - DNA, 20 bp, synthetic construct
  misc_feature 1..20: note = chemically synthesized
  source 1..20: mol_type = other DNA
attcttatctatcctttccc

SEQ ID NO: 11569 - DNA, 20 bp, synthetic construct
  misc_feature 1..20: note = chemically synthesized
  source 1..20: mol_type = other DNA
tatcctttccccagcatctg

SEQ ID NO: 11570 - DNA, 20 bp, synthetic construct
  misc_feature 1..20: note = chemically synthesized
  source 1..20: mol_type = other DNA
ccccagcatctgaagtcttc

SEQ ID NO: 11571 - DNA, 20 bp, synthetic construct
  misc_feature 1..20: note = chemically synthesized
  source 1..20: mol_type = other DNA
cccagcatctgaagtcttca

SEQ ID NO: 11572 - DNA, 20 bp, synthetic construct
  misc_feature 1..20: note = chemically synthesized
  source 1..20: mol_type = other DNA
ccagcatctgaagtcttcaa

SEQ ID NO: 11573 - DNA, 20 bp, synthetic construct
  misc_feature 1..20: note = chemically synthesized
  source 1..20: mol_type = other DNA
cagcatctgaagtcttcaag

SEQ ID NO: 11574 - DNA, 20 bp, synthetic construct
  misc_feature 1..20: note = chemically synthesized
  source 1..20: mol_type = other DNA
agcatctgaagtcttcaagg

SEQ ID NO: 11575 - DNA, 20 bp, synthetic construct
  misc_feature 1..20: note = chemically synthesized
  source 1..20: mol_type = other DNA
atctgaagtcttcaaggggg

SEQ ID NO: 11576 - DNA, 20 bp, synthetic construct
  misc_feature 1..20: note = chemically synthesized
  source 1..20: mol_type = other DNA
tgaagtcttcaagggggcag

SEQ ID NO: 11577 - DNA, 20 bp, synthetic construct
  misc_feature 1..20: note = chemically synthesized
  source 1..20: mol_type = other DNA
tcatcatctcaccacttata

SEQ ID NO: 11578 - DNA, 20 bp, synthetic construct
  misc_feature 1..20: note = chemically synthesized
  source 1..20: mol_type = other DNA
tcatctcaccacttatatag

SEQ ID NO: 11579 - DNA, 20 bp, synthetic construct
  misc_feature 1..20: note = chemically synthesized
  source 1..20: mol_type = other DNA
ctcaccacttatatagaaga

SEQ ID NO: 11580 - DNA, 20 bp, synthetic construct
  misc_feature 1..20: note = chemically synthesized
  source 1..20: mol_type = other DNA
tcaccacttatatagaagaa

SEQ ID NO: 11581 - DNA, 20 bp, synthetic construct
  misc_feature 1..20: note = chemically synthesized
  source 1..20: mol_type = other DNA
caccacttatatagaagaaa

SEQ ID NO: 11582 - DNA, 20 bp, synthetic construct
  misc_feature 1..20: note = chemically synthesized
  source 1..20: mol_type = other DNA
cttatatagaagaaagggtt

SEQ ID NO: 11583 - DNA, 20 bp, synthetic construct
  misc_feature 1..20: note = chemically synthesized
  source 1..20: mol_type = other DNA
gtttggatgctttgtcctcc

SEQ ID NO: 11584 - DNA, 20 bp, synthetic construct
  misc_feature 1..20: note = chemically synthesized
  source 1..20: mol_type = other DNA
ctcccagatgtcacactaat

SEQ ID NO: 11585 - DNA, 20 bp, synthetic construct
  misc_feature 1..20: note = chemically synthesized
  source 1..20: mol_type = other DNA
cactaatgagatatatctaa

SEQ ID NO: 11586 - DNA, 20 bp, synthetic construct
  misc_feature 1..20: note = chemically synthesized
  source 1..20: mol_type = other DNA
tgctttatgtcctgctttgt

SEQ ID NO: 11587 - DNA, 20 bp, synthetic construct
  misc_feature 1..20: note = chemically synthesized
  source 1..20: mol_type = other DNA
cttgactttactcactttgc

SEQ ID NO: 11588 - DNA, 20 bp, synthetic construct
  misc_feature 1..20: note = chemically synthesized
  source 1..20: mol_type = other DNA
atttttttttatcgttattt

SEQ ID NO: 11589 - DNA, 20 bp, synthetic construct
  misc_feature 1..20: note = chemically synthesized
  source 1..20: mol_type = other DNA
ttatcgttatttcagcattt

SEQ ID NO: 11590 - DNA, 20 bp, synthetic construct
  misc_feature 1..20: note = chemically synthesized
  source 1..20: mol_type = other DNA
agcatttcagtctgatttca

SEQ ID NO: 11591 - DNA, 20 bp, synthetic construct
  misc_feature 1..20: note = chemically synthesized
  source 1..20: mol_type = other DNA
ttcacagctgacatcatgtc

SEQ ID NO: 11592 - DNA, 20 bp, synthetic construct
  misc_feature 1..20: note = chemically synthesized
  source 1..20: mol_type = other DNA
cacagctgacatcatgtctg

SEQ ID NO: 11593 - DNA, 20 bp, synthetic construct
  misc_feature 1..20: note = chemically synthesized
  source 1..20: mol_type = other DNA
agctgacatcatgtctggag

SEQ ID NO: 11594 - DNA, 20 bp, synthetic construct
  misc_feature 1..20: note = chemically synthesized
  source 1..20: mol_type = other DNA
gctgacatcatgtctggagt

SEQ ID NO: 11595 - DNA, 20 bp, synthetic construct
  misc_feature 1..20: note = chemically synthesized
  source 1..20: mol_type = other DNA
catgtctggagtgggaacca

SEQ ID NO: 11596 - DNA, 20 bp, synthetic construct
  misc_feature 1..20: note = chemically synthesized
  source 1..20: mol_type = other DNA
atgtctggagtgggaaccac

SEQ ID NO: 11597 - DNA, 20 bp, synthetic construct
  misc_feature 1..20: note = chemically synthesized
  source 1..20: mol_type = other DNA
tgtctggagtgggaaccaca

SEQ ID NO: 11598 - DNA, 20 bp, synthetic construct
  misc_feature 1..20: note = chemically synthesized
  source 1..20: mol_type = other DNA
tggagtgggaaccacagggc

SEQ ID NO: 11599 - DNA, 20 bp, synthetic construct
  misc_feature 1..20: note = chemically synthesized
  source 1..20: mol_type = other DNA
gtgggaaccacagggccagt

SEQ ID NO: 11600 - DNA, 20 bp, synthetic construct
  misc_feature 1..20: note = chemically synthesized
  source 1..20: mol_type = other DNA
cacagggccagtcagctttc

SEQ ID NO: 11601 - DNA, 20 bp, synthetic construct
  misc_feature 1..20: note = chemically synthesized
  source 1..20: mol_type = other DNA
acagggccagtcagctttct

SEQ ID NO: 11602 - DNA, 20 bp, synthetic construct
  misc_feature 1..20: note = chemically synthesized
  source 1..20: mol_type = other DNA
cagggccagtcagctttctg

SEQ ID NO: 11603 - DNA, 20 bp, synthetic construct
  misc_feature 1..20: note = chemically synthesized
  source 1..20: mol_type = other DNA
agggccagtcagctttctgg

SEQ ID NO: 11604 - DNA, 20 bp, synthetic construct
  misc_feature 1..20: note = chemically synthesized
  source 1..20: mol_type = other DNA
gtcagctttctgggggtgct

SEQ ID NO: 11605 - DNA, 20 bp, synthetic construct
  misc_feature 1..20: note = chemically synthesized
  source 1..20: mol_type = other DNA
tcagctttctgggggtgctt

SEQ ID NO: 11606 - DNA, 20 bp, synthetic construct
  misc_feature 1..20: note = chemically synthesized
  source 1..20: mol_type = other DNA
cagctttctgggggtgctta

SEQ ID NO: 11607 - DNA, 20 bp, synthetic construct
  misc_feature 1..20: note = chemically synthesized
  source 1..20: mol_type = other DNA
tttctgggggtgcttagggt

SEQ ID NO: 11608 - DNA, 20 bp, synthetic construct
  misc_feature 1..20: note = chemically synthesized
  source 1..20: mol_type = other DNA
agggttggcacccctgatcc

SEQ ID NO: 11609 - DNA, 20 bp, synthetic construct
  misc_feature 1..20: note = chemically synthesized
  source 1..20: mol_type = other DNA
acccctgatcctggtactgt

SEQ ID NO: 11610 - DNA, 20 bp, synthetic construct
  misc_feature 1..20: note = chemically synthesized
  source 1..20: mol_type = other DNA
atcctggtactgtcagctac

SEQ ID NO: 11611 - DNA, 20 bp, synthetic construct
  misc_feature 1..20: note = chemically synthesized
  source 1..20: mol_type = other DNA
tcagctactagatttgattc

SEQ ID NO: 11612 - DNA, 20 bp, synthetic construct
  misc_feature 1..20: note = chemically synthesized
  source 1..20: mol_type = other DNA
ctactagatttgattctaga

SEQ ID NO: 11613 - DNA, 20 bp, synthetic construct
  misc_feature 1..20: note = chemically synthesized
  source 1..20: mol_type = other DNA
tttgattctagaaagttgac

SEQ ID NO: 11614 - DNA, 20 bp, synthetic construct
  misc_feature 1..20: note = chemically synthesized
  source 1..20: mol_type = other DNA
attctagaaagttgacaagt

SEQ ID NO: 11615 - DNA, 20 bp, synthetic construct
  misc_feature 1..20: note = chemically synthesized
  source 1..20: mol_type = other DNA
gtgtgataaatgcttcctgt

SEQ ID NO: 11616 - DNA, 20 bp, synthetic construct
  misc_feature 1..20: note = chemically synthesized
  source 1..20: mol_type = other DNA
gaacatgctgtttgtccaaa

SEQ ID NO: 11617 - DNA, 20 bp, synthetic construct
  misc_feature 1..20: note = chemically synthesized
  source 1..20: mol_type = other DNA
aacatgctgtttgtccaaat

SEQ ID NO: 11618 - DNA, 20 bp, synthetic construct
  misc_feature 1..20: note = chemically synthesized
  source 1..20: mol_type = other DNA
cttccctgtatgccttcctc

SEQ ID NO: 11619 - DNA, 20 bp, synthetic construct
  misc_feature 1..20: note = chemically synthesized
  source 1..20: mol_type = other DNA
ttccctgtatgccttcctct

SEQ ID NO: 11620 - DNA, 20 bp, synthetic construct
  misc_feature 1..20: note = chemically synthesized
  source 1..20: mol_type = other DNA
cttcctctgggaaatacata

SEQ ID NO: 11621 - DNA, 20 bp, synthetic construct
  misc_feature 1..20: note = chemically synthesized
  source 1..20: mol_type = other DNA
ggaaatacataaagtcactg

SEQ ID NO: 11622 - DNA, 20 bp, synthetic construct
  misc_feature 1..20: note = chemically synthesized
  source 1..20: mol_type = other DNA
actgtagttgtgaaaaaaca

SEQ ID NO: 11623 - DNA, 20 bp, synthetic construct
  misc_feature 1..20: note = chemically synthesized
  source 1..20: mol_type = other DNA
caaagtgatatatgttgcat

SEQ ID NO: 11624 - DNA, 20 bp, synthetic construct
  misc_feature 1..20: note = chemically synthesized
  source 1..20: mol_type = other DNA
tactctttatgtcaattctt

SEQ ID NO: 11625 - DNA, 20 bp, synthetic construct
  misc_feature 1..20: note = chemically synthesized
  source 1..20: mol_type = other DNA
ttaagcttgcttttctcccc

SEQ ID NO: 11626 - DNA, 20 bp, synthetic construct
  misc_feature 1..20: note = chemically synthesized
  source 1..20: mol_type = other DNA
taagcttgcttttctcccct

SEQ ID NO: 11627 - DNA, 20 bp, synthetic construct
  misc_feature 1..20: note = chemically synthesized
  source 1..20: mol_type = other DNA
aagcttgcttttctccccta

SEQ ID NO: 11628 - DNA, 20 bp, synthetic construct
  misc_feature 1..20: note = chemically synthesized
  source 1..20: mol_type = other DNA
ctcccctagggaactcaact

SEQ ID NO: 11629 - DNA, 20 bp, synthetic construct
  misc_feature 1..20: note = chemically synthesized
  source 1..20: mol_type = other DNA
tttccccaaatatcaactcc

SEQ ID NO: 11630 - DNA, 20 bp, synthetic construct
  misc_feature 1..20: note = chemically synthesized
  source 1..20: mol_type = other DNA
caactccaagatgtttgaca

SEQ ID NO: 11631 - DNA, 20 bp, synthetic construct
  misc_feature 1..20: note = chemically synthesized
  source 1..20: mol_type = other DNA
actccaagatgtttgacata

SEQ ID NO: 11632 - DNA, 20 bp, synthetic construct
  misc_feature 1..20: note = chemically synthesized
  source 1..20: mol_type = other DNA
attttttcctaatccatgaa

SEQ ID NO: 11633 - DNA, 20 bp, synthetic construct
  misc_feature 1..20: note = chemically synthesized
  source 1..20: mol_type = other DNA
tcctaatccatgaaaagctt

SEQ ID NO: 11634 - DNA, 20 bp, synthetic construct
  misc_feature 1..20: note = chemically synthesized
  source 1..20: mol_type = other DNA
aaagctttggtgataactaa

SEQ ID NO: 11635 - DNA, 20 bp, synthetic construct
  misc_feature 1..20: note = chemically synthesized
  source 1..20: mol_type = other DNA
aactaacagcttgctaatga

SEQ ID NO: 11636 - DNA, 20 bp, synthetic construct
  misc_feature 1..20: note = chemically synthesized
  source 1..20: mol_type = other DNA
actaacagcttgctaatgaa

SEQ ID NO: 11637 - DNA, 20 bp, synthetic construct
  misc_feature 1..20: note = chemically synthesized
  source 1..20: mol_type = other DNA
ttaactaaaactttaaattg

SEQ ID NO: 11638 - DNA, 20 bp, synthetic construct
  misc_feature 1..20: note = chemically synthesized
  source 1..20: mol_type = other DNA
agatatataatttaaaaaat

SEQ ID NO: 11639 - DNA, 20 bp, synthetic construct
  misc_feature 1..20: note = chemically synthesized
  source 1..20: mol_type = other DNA
atatataatttaaaaaatta

SEQ ID NO: 11640 - DNA, 20 bp, synthetic construct
  misc_feature 1..20: note = chemically synthesized
  source 1..20: mol_type = other DNA
aatgtcatatatcttaaaat

SEQ ID NO: 11641 - DNA, 20 bp, synthetic construct
  misc_feature 1..20: note = chemically synthesized
  source 1..20: mol_type = other DNA
atcagactttttgtgtaaat

SEQ ID NO: 11642 - DNA, 20 bp, synthetic construct
  misc_feature 1..20: note = chemically synthesized
  source 1..20: mol_type = other DNA
tcagactttttgtgtaaata

SEQ ID NO: 11643 - DNA, 20 bp, synthetic construct
  misc_feature 1..20: note = chemically synthesized
  source 1..20: mol_type = other DNA
tgtttcccattttgatttca

SEQ ID NO: 11644 - DNA, 20 bp, synthetic construct
  misc_feature 1..20: note = chemically synthesized
  source 1..20: mol_type = other DNA
ttcccattttgatttcaaag

SEQ ID NO: 11645 - DNA, 20 bp, synthetic construct
  misc_feature 1..20: note = chemically synthesized
  source 1..20: mol_type = other DNA
cattttgatttcaaagtggt

SEQ ID NO: 11646 - DNA, 20 bp, synthetic construct
  misc_feature 1..20: note = chemically synthesized
  source 1..20: mol_type = other DNA
aagtccaaacaaaaataatg

SEQ ID NO: 11647 - DNA, 20 bp, synthetic construct
  misc_feature 1..20: note = chemically synthesized
  source 1..20: mol_type = other DNA
acttttaatttttttaaacc

SEQ ID NO: 11648 - DNA, 20 bp, synthetic construct
  misc_feature 1..20: note = chemically synthesized
  source 1..20: mol_type = other DNA
cttttaatttttttaaacca

SEQ ID NO: 11649 - DNA, 20 bp, synthetic construct
  misc_feature 1..20: note = chemically synthesized
  source 1..20: mol_type = other DNA
tttaatttttttaaaccaag

SEQ ID NO: 11650 - DNA, 20 bp, synthetic construct
  misc_feature 1..20: note = chemically synthesized
  source 1..20: mol_type = other DNA
aggagatgaatgttttctaa

SEQ ID NO: 11651 - DNA, 20 bp, synthetic construct
  misc_feature 1..20: note = chemically synthesized
  source 1..20: mol_type = other DNA
ggagatgaatgttttctaac

SEQ ID NO: 11652 - DNA, 20 bp, synthetic construct
  misc_feature 1..20: note = chemically synthesized
  source 1..20: mol_type = other DNA
tgaccaaatcatgaactgaa

SEQ ID NO: 11653 - DNA, 20 bp, synthetic construct
  misc_feature 1..20: note = chemically synthesized
  source 1..20: mol_type = other DNA
attaaacataaatgcatcat

SEQ ID NO: 11654 - DNA, 20 bp, synthetic construct
  misc_feature 1..20: note = chemically synthesized
  source 1..20: mol_type = other DNA
ataagcattgtcgatctatt

SEQ ID NO: 11655 - DNA, 20 bp, synthetic construct
  misc_feature 1..20: note = chemically synthesized
  source 1..20: mol_type = other DNA
tctatttagttttaaaaatg

SEQ ID NO: 11656 - DNA, 20 bp, synthetic construct
  misc_feature 1..20: note = chemically synthesized
  source 1..20: mol_type = other DNA
atttagttttaaaaatgaag

SEQ ID NO: 11657 - DNA, 20 bp, synthetic construct
  misc_feature 1..20: note = chemically synthesized
  source 1..20: mol_type = other DNA
tagttttaaaaatgaagaag

SEQ ID NO: 11658 - DNA, 20 bp, synthetic construct
  misc_feature 1..20: note = chemically synthesized
  source 1..20: mol_type = other DNA
aaatgaagaagaagaaaacc

SEQ ID NO: 11659 - DNA, 20 bp, synthetic construct
  misc_feature 1..20: note = chemically synthesized
  source 1..20: mol_type = other DNA
agaagaaaacctagctaaca

SEQ ID NO: 11660 - DNA, 20 bp, synthetic construct
  misc_feature 1..20: note = chemically synthesized
  source 1..20: mol_type = other DNA
aaacctagctaacaaagaac

SEQ ID NO: 11661 - DNA, 20 bp, synthetic construct
  misc_feature 1..20: note = chemically synthesized
  source 1..20: mol_type = other DNA
gtacttaccaacctgcgtgc

SEQ ID NO: 11662 - DNA, 20 bp, synthetic construct
  misc_feature 1..20: note = chemically synthesized
  source 1..20: mol_type = other DNA
ccaacctgcgtgctggctgt

SEQ ID NO: 11663 - DNA, 20 bp, synthetic construct
  misc_feature 1..20: note = chemically synthesized
  source 1..20: mol_type = other DNA
caaatcatgtaatcaaaatt

SEQ ID NO: 11664 - DNA, 20 bp, synthetic construct
  misc_feature 1..20: note = chemically synthesized
  source 1..20: mol_type = other DNA
catgtaatcaaaatttagtg

SEQ ID NO: 11665 - DNA, 20 bp, synthetic construct
  misc_feature 1..20: note = chemically synthesized
  source 1..20: mol_type = other DNA
gtaatcaaaatttagtgaag

SEQ ID NO: 11666 - DNA, 20 bp, synthetic construct
  misc_feature 1..20: note = chemically synthesized
  source 1..20: mol_type = other DNA
tcaaaatttagtgaagaaga

SEQ ID NO: 11667 - DNA, 20 bp, synthetic construct
  misc_feature 1..20: note = chemically synthesized
  source 1..20: mol_type = other DNA
tttagtgaagaagacagcat

SEQ ID NO: 11668 - DNA, 20 bp, synthetic construct
  misc_feature 1..20: note = chemically synthesized
  source 1..20: mol_type = other DNA
tcagatatttctatatctaa

SEQ ID NO: 11669 - DNA, 20 bp, synthetic construct
  misc_feature 1..20: note = chemically synthesized
  source 1..20: mol_type = other DNA
cagatatttctatatctaaa

SEQ ID NO: 11670 - DNA, 20 bp, synthetic construct
  misc_feature 1..20: note = chemically synthesized
  source 1..20: mol_type = other DNA
tatttctatatctaaaaggc

SEQ ID NO: 11671 - DNA, 20 bp, synthetic construct
  misc_feature 1..20: note = chemically synthesized
  source 1..20: mol_type = other DNA
atactcaatgtattttaaaa

SEQ ID NO: 11672 - DNA, 20 bp, synthetic construct
  misc_feature 1..20: note = chemically synthesized
  source 1..20: mol_type = other DNA
tactcaatgtattttaaaaa

SEQ ID NO: 11673 - DNA, 20 bp, synthetic construct
  misc_feature 1..20: note = chemically synthesized
  source 1..20: mol_type = other DNA
aggaaacaaacctgtacatt

SEQ ID NO: 11674 - DNA, 20 bp, synthetic construct
  misc_feature 1..20: note = chemically synthesized
  source 1..20: mol_type = other DNA
aaacctgtacattcagcact

SEQ ID NO: 11675 - DNA, 20 bp, synthetic construct
  misc_feature 1..20: note = chemically synthesized
  source 1..20: mol_type = other DNA
cctgtacattcagcactgag

SEQ ID NO: 11676 - DNA, 20 bp, synthetic construct
  misc_feature 1..20: note = chemically synthesized
  source 1..20: mol_type = other DNA
gcactgagtagatatcctaa

SEQ ID NO: 11677 - DNA, 20 bp, synthetic construct
  misc_feature 1..20: note = chemically synthesized
  source 1..20: mol_type = other DNA
cactgagtagatatcctaaa

SEQ ID NO: 11678 - DNA, 20 bp, synthetic construct
  misc_feature 1..20: note = chemically synthesized
  source 1..20: mol_type = other DNA
tgagtagatatcctaaaagg

SEQ ID NO: 11679 - DNA, 20 bp, synthetic construct
  misc_feature 1..20: note = chemically synthesized
  source 1..20: mol_type = other DNA
tagatatcctaaaaggcaga

SEQ ID NO: 11680 - DNA, 20 bp, synthetic construct
  misc_feature 1..20: note = chemically synthesized
  source 1..20: mol_type = other DNA
cctaaaaggcagatggtgat

SEQ ID NO: 11681 - DNA, 20 bp, synthetic construct
  misc_feature 1..20: note = chemically synthesized
  source 1..20: mol_type = other DNA
ctaaaaggcagatggtgatg

SEQ ID NO: 11682 - DNA, 20 bp, synthetic construct
  misc_feature 1..20: note = chemically synthesized
  source 1..20: mol_type = other DNA
aggcagatggtgatgaggcc

SEQ ID NO: 11683 - DNA, 20 bp, synthetic construct
  misc_feature 1..20: note = chemically synthesized
  source 1..20: mol_type = other DNA
acgcgctgcataacctttgc

SEQ ID NO: 11684 - DNA, 20 bp, synthetic construct
  misc_feature 1..20: note = chemically synthesized
  source 1..20: mol_type = other DNA
cgctgcataacctttgctag

SEQ ID NO: 11685 - DNA, 20 bp, synthetic construct
  misc_feature 1..20: note = chemically synthesized
  source 1..20: mol_type = other DNA
cctttgctagcagattgtga

SEQ ID NO: 11686 - DNA, 20 bp, synthetic construct
  misc_feature 1..20: note = chemically synthesized
  source 1..20: mol_type = other DNA
ttgctagcagattgtgaaag

SEQ ID NO: 11687 - DNA, 20 bp, synthetic construct
  misc_feature 1..20: note = chemically synthesized
  source 1..20: mol_type = other DNA
gcgcgtgaacatgatcatgg

SEQ ID NO: 11688 - DNA, 20 bp, synthetic construct
  misc_feature 1..20: note = chemically synthesized
  source 1..20: mol_type = other DNA
cctcatcaccatctgccttt

SEQ ID NO: 11689 - DNA, 20 bp, synthetic construct
  misc_feature 1..20: note = chemically synthesized
  source 1..20: mol_type = other DNA
tttaggatatctactcagtg

SEQ ID NO: 11690 - DNA, 20 bp, synthetic construct
  misc_feature 1..20: note = chemically synthesized
  source 1..20: mol_type = other DNA
gtttccttttttaaaataca

SEQ ID NO: 11691 - DNA, 20 bp, synthetic construct
  misc_feature 1..20: note = chemically synthesized
  source 1..20: mol_type = other DNA
atgatttgacagcaatattg

SEQ ID NO: 11692 - DNA, 20 bp, synthetic construct
  misc_feature 1..20: note = chemically synthesized
  source 1..20: mol_type = other DNA
gtgggaaaacaaagaaatag

SEQ ID NO: 11693 - DNA, 20 bp, synthetic construct
  misc_feature 1..20: note = chemically synthesized
  source 1..20: mol_type = other DNA
agttatcaccaaagcttttc

SEQ ID NO: 11694 - DNA, 20 bp, synthetic construct
  misc_feature 1..20: note = chemically synthesized
  source 1..20: mol_type = other DNA
tgtctctatgtcaaacatct

SEQ ID NO: 11695 - DNA, 20 bp, synthetic construct
  misc_feature 1..20: note = chemically synthesized
  source 1..20: mol_type = other DNA
tggggaaacacaatactcag

SEQ ID NO: 11696 - DNA, 20 bp, synthetic construct
  misc_feature 1..20: note = chemically synthesized
  source 1..20: mol_type = other DNA
taggggagaaaagcaagctt

SEQ ID NO: 11697 - DNA, 20 bp, synthetic construct
  misc_feature 1..20: note = chemically synthesized
  source 1..20: mol_type = other DNA
caagcttaagaattgacata

SEQ ID NO: 11698 - DNA, 20 bp, synthetic construct
  misc_feature 1..20: note = chemically synthesized
  source 1..20: mol_type = other DNA
acacttacttgtcaactttc

SEQ ID NO: 11699 - DNA, 20 bp, synthetic construct
  misc_feature 1..20: note = chemically synthesized
  source 1..20: mol_type = other DNA
aatctagtagctgacagtac

SEQ ID NO: 11700 - DNA, 20 bp, synthetic construct
  misc_feature 1..20: note = chemically synthesized
  source 1..20: mol_type = other DNA
tagctgacagtaccaggatc

SEQ ID NO: 11701 - DNA, 20 bp, synthetic construct
  misc_feature 1..20: note = chemically synthesized
  source 1..20: mol_type = other DNA
acagaggttaaactagcaaa

SEQ ID NO: 11702 - DNA, 20 bp, synthetic construct
  misc_feature 1..20: note = chemically synthesized
  source 1..20: mol_type = other DNA
tagcaaagtgagtaaagtca

SEQ ID NO: 11703 - DNA, 20 bp, synthetic construct
  misc_feature 1..20: note = chemically synthesized
  source 1..20: mol_type = other DNA
aagacttcagatgctgggga

SEQ ID NO: 11704 - DNA, 20 bp, synthetic construct
  misc_feature 1..20: note = chemically synthesized
  source 1..20: mol_type = other DNA
atgctggggaaaggatagat

SEQ ID NO: 11705 - DNA, 20 bp, synthetic construct
  misc_feature 1..20: note = chemically synthesized
  source 1..20: mol_type = other DNA
gggaaaggatagataagaat

SEQ ID NO: 11706 - DNA, 20 bp, synthetic construct
  misc_feature 1..20: note = chemically synthesized
  source 1..20: mol_type = other DNA
gcccttgaggaaggggccag

SEQ ID NO: 11707 - DNA, 20 bp, synthetic construct
  misc_feature 1..20: note = chemically synthesized
  source 1..20: mol_type = other DNA
ggggccaggggaatttttct

SEQ ID NO: 11708 - DNA, 20 bp, synthetic construct
  misc_feature 1..20: note = chemically synthesized
  source 1..20: mol_type = other DNA
aactctcattggcttctaaa

SEQ ID NO: 11709 - DNA, 20 bp, synthetic construct
  misc_feature 1..20: note = chemically synthesized
  source 1..20: mol_type = other DNA
ggcttctaaaaggagtttcg

SEQ ID NO: 11710 - DNA, 20 bp, synthetic construct
  misc_feature 1..20: note = chemically synthesized
  source 1..20: mol_type = other DNA
taggtattattgcaacagtt

SEQ ID NO: 11711 - DNA, 20 bp, synthetic construct
  misc_feature 1..20: note = chemically synthesized
  source 1..20: mol_type = other DNA
tgtccttcattcagacatta

SEQ ID NO: 11712 - DNA, 20 bp, synthetic construct
  misc_feature 1..20: note = chemically synthesized
  source 1..20: mol_type = other DNA
tatggtgccaggtactgtgt

SEQ ID NO: 11713 - DNA, 20 bp, synthetic construct
  misc_feature 1..20: note = chemically synthesized
  source 1..20: mol_type = other DNA
aggtactgtgtcagggtact

SEQ ID NO: 11714 - DNA, 20 bp, synthetic construct
  misc_feature 1..20: note = chemically synthesized
  source 1..20: mol_type = other DNA
tgtcagggtactaggggtat

SEQ ID NO: 11715 - DNA, 20 bp, synthetic construct
  misc_feature 1..20: note = chemically synthesized
  source 1..20: mol_type = other DNA
aaaatgtgcactaggtacta

SEQ ID NO: 11716 - DNA, 20 bp, synthetic construct
  misc_feature 1..20: note = chemically synthesized
  source 1..20: mol_type = other DNA
ggggaaacaattgatagaga

SEQ ID NO: 11717 - DNA, 20 bp, synthetic construct
  misc_feature 1..20: note = chemically synthesized
  source 1..20: mol_type = other DNA
tagagagagaatattttcat

SEQ ID NO: 11718 - DNA, 20 bp, synthetic construct
  misc_feature 1..20: note = chemically synthesized
  source 1..20: mol_type = other DNA
tttcatctgggtcttaaaag

SEQ ID NO: 11719 - DNA, 20 bp, synthetic construct
  misc_feature 1..20: note = chemically synthesized
  source 1..20: mol_type = other DNA
ataagggcattttatgcaaa

SEQ ID NO: 11720 - DNA, 20 bp, synthetic construct
  misc_feature 1..20: note = chemically synthesized
  source 1..20: mol_type = other DNA
gcaagaacgtgaggtatttc

SEQ ID NO: 11721 - DNA, 20 bp, synthetic construct
  misc_feature 1..20: note = chemically synthesized
  source 1..20: mol_type = other DNA
ggtatcgaagtataaacata

SEQ ID NO: 11722 - DNA, 20 bp, synthetic construct
  misc_feature 1..20: note = chemically synthesized
  source 1..20: mol_type = other DNA
agtaccactgatggctgatt

SEQ ID NO: 11723 - DNA, 20 bp, synthetic construct
  misc_feature 1..20: note = chemically synthesized
  source 1..20: mol_type = other DNA
gtagcagtacaaaaaaagag

SEQ ID NO: 11724 - DNA, 20 bp, synthetic construct
  misc_feature 1..20: note = chemically synthesized
  source 1..20: mol_type = other DNA
aagtggtatgacttaaccat

SEQ ID NO: 11725 - DNA, 20 bp, synthetic construct
  misc_feature 1..20: note = chemically synthesized
  source 1..20: mol_type = other DNA
ggtatggaaggggaaatggc

SEQ ID NO: 11726 - DNA, 20 bp, synthetic construct
  misc_feature 1..20: note = chemically synthesized
  source 1..20: mol_type = other DNA
tttgatgtgattatggacca

SEQ ID NO: 11727 - DNA, 20 bp, synthetic construct
  misc_feature 1..20: note = chemically synthesized
  source 1..20: mol_type = other DNA
tggctctttagtctgactgc

SEQ ID NO: 11728 - DNA, 20 bp, synthetic construct
  misc_feature 1..20: note = chemically synthesized
  source 1..20: mol_type = other DNA
tttagtctgactgccagagt

SEQ ID NO: 11729 - DNA, 20 bp, synthetic construct
  misc_feature 1..20: note = chemically synthesized
  source 1..20: mol_type = other DNA
tgactgccagagtctgaatc

SEQ ID NO: 11730 - DNA, 20 bp, synthetic construct
  misc_feature 1..20: note = chemically synthesized
  source 1..20: mol_type = other DNA
gggcaaagcccttagcctct

SEQ ID NO: 11731 - DNA, 20 bp, synthetic construct
  misc_feature 1..20: note = chemically synthesized
  source 1..20: mol_type = other DNA
ctatctcgtgggacttttgt

SEQ ID NO: 11732 - DNA, 20 bp, synthetic construct
  misc_feature 1..20: note = chemically synthesized
  source 1..20: mol_type = other DNA
tgtgaggatgaagtgagata

SEQ ID NO: 11733 - DNA, 20 bp, synthetic construct
  misc_feature 1..20: note = chemically synthesized
  source 1..20: mol_type = other DNA
tacattatgatatacagtta

SEQ ID NO: 11734 - DNA, 20 bp, synthetic construct
  misc_feature 1..20: note = chemically synthesized
  source 1..20: mol_type = other DNA
ggagacgtatctgactatag

SEQ ID NO: 11735 - DNA, 20 bp, synthetic construct
  misc_feature 1..20: note = chemically synthesized
  source 1..20: mol_type = other DNA
gccacgtgtgtgggcatctg

SEQ ID NO: 11736 - DNA, 20 bp, synthetic construct
  misc_feature 1..20: note = chemically synthesized
  source 1..20: mol_type = other DNA
tgggcatctggagagtgagc

SEQ ID NO: 11737 - DNA, 20 bp, synthetic construct
  misc_feature 1..20: note = chemically synthesized
  source 1..20: mol_type = other DNA
tgctcagtaaattttgttga

SEQ ID NO: 11738 - DNA, 20 bp, synthetic construct
  misc_feature 1..20: note = chemically synthesized
  source 1..20: mol_type = other DNA
taagggccatggagaggaac

SEQ ID NO: 11739 - DNA, 20 bp, synthetic construct
  misc_feature 1..20: note = chemically synthesized
  source 1..20: mol_type = other DNA
ggagttaatcaattcaagtg

SEQ ID NO: 11740 - DNA, 20 bp, synthetic construct
  misc_feature 1..20: note = chemically synthesized
  source 1..20: mol_type = other DNA
ttaatcaattcaagtgctgg

SEQ ID NO: 11741 - DNA, 20 bp, synthetic construct
  misc_feature 1..20: note = chemically synthesized
  source 1..20: mol_type = other DNA
tcaagtgctggatggataac

SEQ ID NO: 11742 - DNA, 20 bp, synthetic construct
  misc_feature 1..20: note = chemically synthesized
  source 1..20: mol_type = other DNA
gttagagcaaagcggggaac

SEQ ID NO: 11743 - DNA, 20 bp, synthetic construct
  misc_feature 1..20: note = chemically synthesized
  source 1..20: mol_type = other DNA
agcaaagcggggaaccagaa

SEQ ID NO: 11744 - DNA, 20 bp, synthetic construct
  misc_feature 1..20: note = chemically synthesized
  source 1..20: mol_type = other DNA
aatagagtgattattataaa

SEQ ID NO: 11745 - DNA, 20 bp, synthetic construct
  misc_feature 1..20: note = chemically synthesized
  source 1..20: mol_type = other DNA
gaagttattaaagagctaaa

SEQ ID NO: 11746 - DNA, 20 bp, synthetic construct
  misc_feature 1..20: note = chemically synthesized
  source 1..20: mol_type = other DNA
gaaagtagggccaacatgaa

SEQ ID NO: 11747 - DNA, 20 bp, synthetic construct
  misc_feature 1..20: note = chemically synthesized
  source 1..20: mol_type = other DNA
ctgtacagtcagctctcctt

SEQ ID NO: 11748 - DNA, 20 bp, synthetic construct
  misc_feature 1..20: note = chemically synthesized
  source 1..20: mol_type = other DNA
caaaaatattcaagaaaaaa

SEQ ID NO: 11749 - DNA, 20 bp, synthetic construct
  misc_feature 1..20: note = chemically synthesized
  source 1..20: mol_type = other DNA
agatgatttaaagtacaaag

SEQ ID NO: 11750 - DNA, 20 bp, synthetic construct
  misc_feature 1..20: note = chemically synthesized
  source 1..20: mol_type = other DNA
cacagatcttgatatttgca

SEQ ID NO: 11751 - DNA, 20 bp, synthetic construct
  misc_feature 1..20: note = chemically synthesized
  source 1..20: mol_type = other DNA
ggtcttgccaccaattttcc

SEQ ID NO: 11752 - DNA, 20 bp, synthetic construct
  misc_feature 1..20: note = chemically synthesized
  source 1..20: mol_type = other DNA
atactgaggaacgactgtaa

SEQ ID NO: 11753 - DNA, 20 bp, synthetic construct
  misc_feature 1..20: note = chemically synthesized
  source 1..20: mol_type = other DNA
gactgtaaatggatgcaggc

SEQ ID NO: 11754 - DNA, 20 bp, synthetic construct
  misc_feature 1..20: note = chemically synthesized
  source 1..20: mol_type = other DNA
tgcaggcatggatgctattt

SEQ ID NO: 11755 - DNA, 20 bp, synthetic construct
  misc_feature 1..20: note = chemically synthesized
  source 1..20: mol_type = other DNA
gagtgtccagggccaagtaa

SEQ ID NO: 11756 - DNA, 20 bp, synthetic construct
  misc_feature 1..20: note = chemically synthesized
  source 1..20: mol_type = other DNA
atgagttgctgagcagagag

SEQ ID NO: 11757 - DNA, 20 bp, synthetic construct
  misc_feature 1..20: note = chemically synthesized
  source 1..20: mol_type = other DNA
cctcggctgtctgggaagag

SEQ ID NO: 11758 - DNA, 20 bp, synthetic construct
  misc_feature 1..20: note = chemically synthesized
  source 1..20: mol_type = other DNA
ggctgctccaatttaggggc

SEQ ID NO: 11759 - DNA, 20 bp, synthetic construct
  misc_feature 1..20: note = chemically synthesized
  source 1..20: mol_type = other DNA
caatttaggggctaggattg

SEQ ID NO: 11760 - DNA, 20 bp, synthetic construct
  misc_feature 1..20: note = chemically synthesized
  source 1..20: mol_type = other DNA
gggtgggcacagcattgcaa

SEQ ID NO: 11761 - DNA, 20 bp, synthetic construct
  misc_feature 1..20: note = chemically synthesized
  source 1..20: mol_type = other DNA
attgagaaatatggccaatg

SEQ ID NO: 11762 - DNA, 20 bp, synthetic construct
  misc_feature 1..20: note = chemically synthesized
  source 1..20: mol_type = other DNA
caggcagatcacttgaggtc

SEQ ID NO: 11763 - DNA, 20 bp, synthetic construct
  misc_feature 1..20: note = chemically synthesized
  source 1..20: mol_type = other DNA
aaaattagctgggcatggtg

SEQ ID NO: 11764 - DNA, 20 bp, synthetic construct
  misc_feature 1..20: note = chemically synthesized
  source 1..20: mol_type = other DNA
tacttgggaggctgaggcag

SEQ ID NO: 11765 - DNA, 20 bp, synthetic construct
  misc_feature 1..20: note = chemically synthesized
  source 1..20: mol_type = other DNA
caagactctgtcaaaaaaaa

SEQ ID NO: 11766 - DNA, 20 bp, synthetic construct
  misc_feature 1..20: note = chemically synthesized
  source 1..20: mol_type = other DNA
ttgcagagcaagggaaaagc

SEQ ID NO: 11767 - DNA, 20 bp, synthetic construct
  misc_feature 1..20: note = chemically synthesized
  source 1..20: mol_type = other DNA
ctttcctttctcttcctttt

SEQ ID NO: 11768 - DNA, 20 bp, synthetic construct
  misc_feature 1..20: note = chemically synthesized
  source 1..20: mol_type = other DNA
gaacaactccaggcaacttc

SEQ ID NO: 11769 - DNA, 20 bp, synthetic construct
  misc_feature 1..20: note = chemically synthesized
  source 1..20: mol_type = other DNA
gccatgcattccttaacaat

SEQ ID NO: 11770 - DNA, 20 bp, synthetic construct
  misc_feature 1..20: note = chemically synthesized
  source 1..20: mol_type = other DNA
tcatcattgtgcgaacataa

SEQ ID NO: 11771 - DNA, 20 bp, synthetic construct
  misc_feature 1..20: note = chemically synthesized
  source 1..20: mol_type = other DNA
agatagagacatctatcctc

SEQ ID NO: 11772 - DNA, 20 bp, synthetic construct
  misc_feature 1..20: note = chemically synthesized
  source 1..20: mol_type = other DNA
acatctatcctccagagttc

SEQ ID NO: 11773 - DNA, 20 bp, synthetic construct
  misc_feature 1..20: note = chemically synthesized
  source 1..20: mol_type = other DNA
tagcttaaaaaaaacatatc

SEQ ID NO: 11774 - DNA, 20 bp, synthetic construct
  misc_feature 1..20: note = chemically synthesized
  source 1..20: mol_type = other DNA
taacatctagtgacagacac

SEQ ID NO: 11775 - DNA, 20 bp, synthetic construct
  misc_feature 1..20: note = chemically synthesized
  source 1..20: mol_type = other DNA
tattctgaaaacagcccagc

SEQ ID NO: 11776 - DNA, 20 bp, synthetic construct
  misc_feature 1..20: note = chemically synthesized
  source 1..20: mol_type = other DNA
aaaacagcccagccagggtg

SEQ ID NO: 11777 - DNA, 20 bp, synthetic construct
  misc_feature 1..20: note = chemically synthesized
  source 1..20: mol_type = other DNA
gaaatctgaccttttattac

SEQ ID NO: 11778 - DNA, 20 bp, synthetic construct
  misc_feature 1..20: note = chemically synthesized
  source 1..20: mol_type = other DNA
tctcttgactaaaagtaaaa

SEQ ID NO: 11779 - DNA, 20 bp, synthetic construct
  misc_feature 1..20: note = chemically synthesized
  source 1..20: mol_type = other DNA
gaaattggctttcagattat

SEQ ID NO: 11780 - DNA, 20 bp, synthetic construct
  misc_feature 1..20: note = chemically synthesized
  source 1..20: mol_type = other DNA
tttcttttttgctaaaacta

SEQ ID NO: 11781 - DNA, 20 bp, synthetic construct
  misc_feature 1..20: note = chemically synthesized
  source 1..20: mol_type = other DNA
atgaaaacgccaacaaaatt

SEQ ID NO: 11782 - DNA, 20 bp, synthetic construct
  misc_feature 1..20: note = chemically synthesized
  source 1..20: mol_type = other DNA
gtataattcaggtaaattgg

SEQ ID NO: 11783 - DNA, 20 bp, synthetic construct
  misc_feature 1..20: note = chemically synthesized
  source 1..20: mol_type = other DNA
tgttcaagggaaccttgaga

SEQ ID NO: 11784 - DNA, 20 bp, synthetic construct
  misc_feature 1..20: note = chemically synthesized
  source 1..20: mol_type = other DNA
aacaaactcttccaatttac

SEQ ID NO: 11785 - DNA, 20 bp, synthetic construct
  misc_feature 1..20: note = chemically synthesized
  source 1..20: mol_type = other DNA
ttatacctctttggccgatt

SEQ ID NO: 11786 - DNA, 20 bp, synthetic construct
  misc_feature 1..20: note = chemically synthesized
  source 1..20: mol_type = other DNA
caagaaaaactgaaatgtaa

SEQ ID NO: 11787 - DNA, 20 bp, synthetic construct
  misc_feature 1..20: note = chemically synthesized
  source 1..20: mol_type = other DNA
ctgtatacacatggagattt

SEQ ID NO: 11788 - DNA, 20 bp, synthetic construct
  misc_feature 1..20: note = chemically synthesized
  source 1..20: mol_type = other DNA
tcaattttacttttagtcaa

SEQ ID NO: 11789 - DNA, 20 bp, synthetic construct
  misc_feature 1..20: note = chemically synthesized
  source 1..20: mol_type = other DNA
ggtcagatttctaatcatat

SEQ ID NO: 11790 - DNA, 20 bp, synthetic construct
  misc_feature 1..20: note = chemically synthesized
  source 1..20: mol_type = other DNA
taatcatatttgaatttact

SEQ ID NO: 11791 - DNA, 20 bp, synthetic construct
  misc_feature 1..20: note = chemically synthesized
  source 1..20: mol_type = other DNA
tcacttgaaaatagctcatt

SEQ ID NO: 11792 - DNA, 20 bp, synthetic construct
  misc_feature 1..20: note = chemically synthesized
  source 1..20: mol_type = other DNA
caccctggctgggctgtttt

SEQ ID NO: 11793 - DNA, 20 bp, synthetic construct
  misc_feature 1..20: note = chemically synthesized
  source 1..20: mol_type = other DNA
ctttggttggcaagtgttat

SEQ ID NO: 11794 - DNA, 20 bp, synthetic construct
  misc_feature 1..20: note = chemically synthesized
  source 1..20: mol_type = other DNA
cagtgatttaagcatctctc

SEQ ID NO: 11795 - DNA, 20 bp, synthetic construct
  misc_feature 1..20: note = chemically synthesized
  source 1..20: mol_type = other DNA
ttaagcatctctctagaatt

SEQ ID NO: 11796 - DNA, 20 bp, synthetic construct
  misc_feature 1..20: note = chemically synthesized
  source 1..20: mol_type = other DNA
agagacactcctgaactctg

SEQ ID NO: 11797 - DNA, 20 bp, synthetic construct
  misc_feature 1..20: note = chemically synthesized
  source 1..20: mol_type = other DNA
tggaggatagatgtctctat

SEQ ID NO: 11798 - DNA, 20 bp, synthetic construct
  misc_feature 1..20: note = chemically synthesized
  source 1..20: mol_type = other DNA
ttgcttaatgacacatttct

SEQ ID NO: 11799 - DNA, 20 bp, synthetic construct
  misc_feature 1..20: note = chemically synthesized
  source 1..20: mol_type = other DNA
agaatatatccccattgtta

SEQ ID NO: 11800 - DNA, 20 bp, synthetic construct
  misc_feature 1..20: note = chemically synthesized
  source 1..20: mol_type = other DNA
cagggactcaagaagttgcc

SEQ ID NO: 11801 - DNA, 20 bp, synthetic construct
  misc_feature 1..20: note = chemically synthesized
  source 1..20: mol_type = other DNA
ctggagttgttcctttcttc

SEQ ID NO: 11802 - DNA, 20 bp, synthetic construct
  misc_feature 1..20: note = chemically synthesized
  source 1..20: mol_type = other DNA
ggcttataagatgaactttc

SEQ ID NO: 11803 - DNA, 20 bp, synthetic construct
  misc_feature 1..20: note = chemically synthesized
  source 1..20: mol_type = other DNA
cattgcagctgttcacttta

SEQ ID NO: 11804 - DNA, 20 bp, synthetic construct
  misc_feature 1..20: note = chemically synthesized
  source 1..20: mol_type = other DNA
tttgggctcactttttttct

SEQ ID NO: 11805 - DNA, 20 bp, synthetic construct
  misc_feature 1..20: note = chemically synthesized
  source 1..20: mol_type = other DNA
ttcaactcttttttttttga

SEQ ID NO: 11806 - DNA, 20 bp, synthetic construct
  misc_feature 1..20: note = chemically synthesized
  source 1..20: mol_type = other DNA
tcttgctctgtcgcccaggc

SEQ ID NO: 11807 - DNA, 20 bp, synthetic construct
  misc_feature 1..20: note = chemically synthesized
  source 1..20: mol_type = other DNA
gcctcagcctcccaagtagc

SEQ ID NO: 11808 - DNA, 20 bp, synthetic construct
  misc_feature 1..20: note = chemically synthesized
  source 1..20: mol_type = other DNA
ttttgtatttttagtaaagc

SEQ ID NO: 11809 - DNA, 20 bp, synthetic construct
  misc_feature 1..20: note = chemically synthesized
  source 1..20: mol_type = other DNA
gcctgggcctctgaaagtgc

SEQ ID NO: 11810 - DNA, 20 bp, synthetic construct
  misc_feature 1..20: note = chemically synthesized
  source 1..20: mol_type = other DNA
aaaaaatcaccaaaatgcag

SEQ ID NO: 11811 - DNA, 20 bp, synthetic construct
  misc_feature 1..20: note = chemically synthesized
  source 1..20: mol_type = other DNA
ccctgcaaatatcaagatct

SEQ ID NO: 11812 - DNA, 20 bp, synthetic construct
  misc_feature 1..20: note = chemically synthesized
  source 1..20: mol_type = other DNA
ttgttatgctgtattgttta

SEQ ID NO: 11813 - DNA, 20 bp, synthetic construct
  misc_feature 1..20: note = chemically synthesized
  source 1..20: mol_type = other DNA
tagggaataatgaaagataa

SEQ ID NO: 11814 - DNA, 20 bp, synthetic construct
  misc_feature 1..20: note = chemically synthesized
  source 1..20: mol_type = other DNA
tgcaaccatccatttttttc

SEQ ID NO: 11815 - DNA, 20 bp, synthetic construct
  misc_feature 1..20: note = chemically synthesized
  source 1..20: mol_type = other DNA
tatttttgatctgcagttaa

SEQ ID NO: 11816 - DNA, 20 bp, synthetic construct
  misc_feature 1..20: note = chemically synthesized
  source 1..20: mol_type = other DNA
gagctgactgtacagtgtgg

SEQ ID NO: 11817 - DNA, 20 bp, synthetic construct
  misc_feature 1..20: note = chemically synthesized
  source 1..20: mol_type = other DNA
ttgagtgaaaaaacagactt

SEQ ID NO: 11818 - DNA, 20 bp, synthetic construct
  misc_feature 1..20: note = chemically synthesized
  source 1..20: mol_type = other DNA
cagatcagacagaaataggt

SEQ ID NO: 11819 - DNA, 20 bp, synthetic construct
  misc_feature 1..20: note = chemically synthesized
  source 1..20: mol_type = other DNA
aggtttaacagtagtataat

SEQ ID NO: 11820 - DNA, 20 bp, synthetic construct
  misc_feature 1..20: note = chemically synthesized
  source 1..20: mol_type = other DNA
atctatctcacaggtgttgg

SEQ ID NO: 11821 - DNA, 20 bp, synthetic construct
  misc_feature 1..20: note = chemically synthesized
  source 1..20: mol_type = other DNA
aaatgactattgtcacaatc

SEQ ID NO: 11822 - DNA, 20 bp, synthetic construct
  misc_feature 1..20: note = chemically synthesized
  source 1..20: mol_type = other DNA
tcacaatcaggaatgaccta

SEQ ID NO: 11823 - DNA, 20 bp, synthetic construct
  misc_feature 1..20: note = chemically synthesized
  source 1..20: mol_type = other DNA
gaatgacctaaagaataatt

SEQ ID NO: 11824 - DNA, 20 bp, synthetic construct
  misc_feature 1..20: note = chemically synthesized
  source 1..20: mol_type = other DNA
tcctgttatccatccagcac

SEQ ID NO: 11825 - DNA, 20 bp, synthetic construct
  misc_feature 1..20: note = chemically synthesized
  source 1..20: mol_type = other DNA
ctccatggcccttaaatgtc

SEQ ID NO: 11826 - DNA, 20 bp, synthetic construct
  misc_feature 1..20: note = chemically synthesized
  source 1..20: mol_type = other DNA
atacttgctagggctgggac

SEQ ID NO: 11827 - DNA, 20 bp, synthetic construct
  misc_feature 1..20: note = chemically synthesized
  source 1..20: mol_type = other DNA
taactactgtttacagaaca

SEQ ID NO: 11828 - DNA, 20 bp, synthetic construct
  misc_feature 1..20: note = chemically synthesized
  source 1..20: mol_type = other DNA
cctatagtcagatacgtctc

SEQ ID NO: 11829 - DNA, 20 bp, synthetic construct
  misc_feature 1..20: note = chemically synthesized
  source 1..20: mol_type = other DNA
ggcactgtcatcttattttt

SEQ ID NO: 11830 - DNA, 20 bp, synthetic construct
  misc_feature 1..20: note = chemically synthesized
  source 1..20: mol_type = other DNA
aggtaacatactaaaacatt

SEQ ID NO: 11831 - DNA, 20 bp, synthetic construct
  misc_feature 1..20: note = chemically synthesized
  source 1..20: mol_type = other DNA
tacctcacgttcttgcaaat

SEQ ID NO: 11832 - DNA, 20 bp, synthetic construct
  misc_feature 1..20: note = chemically synthesized
  source 1..20: mol_type = other DNA
ttgcaaatctgagtctttgc

SEQ ID NO: 11833 - DNA, 20 bp, synthetic construct
  misc_feature 1..20: note = chemically synthesized
  source 1..20: mol_type = other DNA
atgctgctttagatcaaaga

SEQ ID NO: 11834 - DNA, 20 bp, synthetic construct
  misc_feature 1..20: note = chemically synthesized
  source 1..20: mol_type = other DNA
tagttgtaactcagtaatgt

SEQ ID NO: 11835 - DNA, 20 bp, synthetic construct
  misc_feature 1..20: note = chemically synthesized
  source 1..20: mol_type = other DNA
aactccttttagaagccaat

SEQ ID NO: 11836 - DNA, 20 bp, synthetic construct
  misc_feature 1..20: note = chemically synthesized
  source 1..20: mol_type = other DNA
atgagagtttaatagcagaa

SEQ ID NO: 11837 - DNA, 20 bp, synthetic construct
  misc_feature 1..20: note = chemically synthesized
  source 1..20: mol_type = other DNA
atctctggctacaatggctg

SEQ ID NO: 11838 - DNA, 20 bp, synthetic construct
  misc_feature 1..20: note = chemically synthesized
  source 1..20: mol_type = other DNA
ctttctccttagtattatct

SEQ ID NO: 11839 - DNA, 20 bp, synthetic construct
  misc_feature 1..20: note = chemically synthesized
  source 1..20: mol_type = other DNA
ctcaccacttatatagaaga

SEQ ID NO: 11840 - DNA, 20 bp, synthetic construct
  misc_feature 1..20: note = chemically synthesized
  source 1..20: mol_type = other DNA
acttatatagaagaaagggt

SEQ ID NO: 11841 - DNA, 20 bp, synthetic construct
  misc_feature 1..20: note = chemically synthesized
  source 1..20: mol_type = other DNA
cttgctttatgtcctgcttt

SEQ ID NO: 11842 - DNA, 20 bp, synthetic construct
  misc_feature 1..20: note = chemically synthesized
  source 1..20: mol_type = other DNA
ttcacagctgacatcatgtc

SEQ ID NO: 11843 - DNA, 20 bp, synthetic construct
  misc_feature 1..20: note = chemically synthesized
  source 1..20: mol_type = other DNA
acagggccagtcagctttct

SEQ ID NO: 11844 - DNA, 20 bp, synthetic construct
  misc_feature 1..20: note = chemically synthesized
  source 1..20: mol_type = other DNA
gtcagctttctgggggtgct

SEQ ID NO: 11845 - DNA, 20 bp, synthetic construct
  misc_feature 1..20: note = chemically synthesized
  source 1..20: mol_type = other DNA
gaacatgctgtttgtccaaa

SEQ ID NO: 11846 - DNA, 20 bp, synthetic construct
  misc_feature 1..20: note = chemically synthesized
  source 1..20: mol_type = other DNA
ttctcccctagggaactcaa

SEQ ID NO: 11847 - DNA, 20 bp, synthetic construct
  misc_feature 1..20: note = chemically synthesized
  source 1..20: mol_type = other DNA
aatttttttaaaccaaggag

SEQ ID NO: 11848 - DNA, 20 bp, synthetic construct
  misc_feature 1..20: note = chemically synthesized
  source 1..20: mol_type = other DNA
ggagatgaatgttttctaac

SEQ ID NO: 11849 - DNA, 20 bp, synthetic construct
  misc_feature 1..20: note = chemically synthesized
  source 1..20: mol_type = other DNA
acaaacctgtacattcagca

SEQ ID NO: 11850 - DNA, 20 bp, synthetic construct
  misc_feature 1..20: note = chemically synthesized
  source 1..20: mol_type = other DNA
agcgcgtgaacatgatcatg

SEQ ID NO: 11851 - DNA, 20 bp, synthetic construct
  misc_feature 1..20: note = chemically synthesized
  source 1..20: mol_type = other DNA
agtatgcttgccttttagat

SEQ ID NO: 11852 - DNA, 20 bp, synthetic construct
  misc_feature 1..20: note = chemically synthesized
  source 1..20: mol_type = other DNA
atttggtcatgtaattcctg

SEQ ID NO: 11853 - DNA, 20 bp, synthetic construct
  misc_feature 1..20: note = chemically synthesized
  source 1..20: mol_type = other DNA
aaaattaaaagtgggaaaac

SEQ ID NO: 11854 - DNA, 20 bp, synthetic construct
  misc_feature 1..20: note = chemically synthesized
  source 1..20: mol_type = other DNA
agtgggaaaacaaagaaata

SEQ ID NO: 11855 - DNA, 20 bp, synthetic construct
  misc_feature 1..20: note = chemically synthesized
  source 1..20: mol_type = other DNA
actcagttgagttccctagg

SEQ ID NO: 11856 - DNA, 20 bp, synthetic construct
  misc_feature 1..20: note = chemically synthesized
  source 1..20: mol_type = other DNA
ctaggggagaaaagcaagct

SEQ ID NO: 11857 - DNA, 20 bp, synthetic construct
  misc_feature 1..20: note = chemically synthesized
  source 1..20: mol_type = other DNA
cccagaggaaggcatacagg

SEQ ID NO: 11858 - DNA, 20 bp, synthetic construct
  misc_feature 1..20: note = chemically synthesized
  source 1..20: mol_type = other DNA
cacacttacttgtcaacttt

SEQ ID NO: 11859 - DNA, 20 bp, synthetic construct
  misc_feature 1..20: note = chemically synthesized
  source 1..20: mol_type = other DNA
ggtgccaaccctaagcaccc

SEQ ID NO: 11860 - DNA, 20 bp, synthetic construct
  misc_feature 1..20: note = chemically synthesized
  source 1..20: mol_type = other DNA
agtgagtaaagtcaagggat

SEQ ID NO: 11861 - DNA, 20 bp, synthetic construct
  misc_feature 1..20: note = chemically synthesized
  source 1..20: mol_type = other DNA
gatgctggggaaaggataga

SEQ ID NO: 11862 - DNA, 20 bp, synthetic construct
  misc_feature 1..20: note = chemically synthesized
  source 1..20: mol_type = other DNA
cgatccccagataatactaa

SEQ ID NO: 11863 - DNA, 20 bp, synthetic construct
  misc_feature 1..20: note = chemically synthesized
  source 1..20: mol_type = other DNA
actaggtactaagggatcat

SEQ ID NO: 11864 - DNA, 20 bp, synthetic construct
  misc_feature 1..20: note = chemically synthesized
  source 1..20: mol_type = other DNA
tggggaaacaattgatagag

SEQ ID NO: 11865 - DNA, 20 bp, synthetic construct
  misc_feature 1..20: note = chemically synthesized
  source 1..20: mol_type = other DNA
gtttgatgtgattatggacc

SEQ ID NO: 11866 - DNA, 20 bp, synthetic construct
  misc_feature 1..20: note = chemically synthesized
  source 1..20: mol_type = other DNA
agttagagcaaagcggggaa

SEQ ID NO: 11867 - DNA, 20 bp, synthetic construct
  misc_feature 1..20: note = chemically synthesized
  source 1..20: mol_type = other DNA
aaaaagggagagatcaacaa

SEQ ID NO: 11868 - DNA, 20 bp, synthetic construct
  misc_feature 1..20: note = chemically synthesized
  source 1..20: mol_type = other DNA
agaagttattaaagagctaa

SEQ ID NO: 11869 - DNA, 20 bp, synthetic construct
  misc_feature 1..20: note = chemically synthesized
  source 1..20: mol_type = other DNA
attaaagagctaaagagaat

SEQ ID NO: 11870 - DNA, 20 bp, synthetic construct
  misc_feature 1..20: note = chemically synthesized
  source 1..20: mol_type = other DNA
gaattgagaaatttaaaaca

SEQ ID NO: 11871 - DNA, 20 bp, synthetic construct
  misc_feature 1..20: note = chemically synthesized
  source 1..20: mol_type = other DNA
ggccaacatgaaaggagtag

SEQ ID NO: 11872 - DNA, 20 bp, synthetic construct
  misc_feature 1..20: note = chemically synthesized
  source 1..20: mol_type = other DNA
aactgcagatcaaaaatatt

SEQ ID NO: 11873 - DNA, 20 bp, synthetic construct
  misc_feature 1..20: note = chemically synthesized
  source 1..20: mol_type = other DNA
ttacattgtattagctatta

SEQ ID NO: 11874 - DNA, 20 bp, synthetic construct
  misc_feature 1..20: note = chemically synthesized
  source 1..20: mol_type = other DNA
tgcaaacgagtgaaggaaat

SEQ ID NO: 11875 - DNA, 20 bp, synthetic construct
  misc_feature 1..20: note = chemically synthesized
  source 1..20: mol_type = other DNA
ctacttgggaggctgaggca

SEQ ID NO: 11876 - DNA, 20 bp, synthetic construct
  misc_feature 1..20: note = chemically synthesized
  source 1..20: mol_type = other DNA
gtcaaaaaaaaaagagttga

SEQ ID NO: 11877 - DNA, 20 bp, synthetic construct
  misc_feature 1..20: note = chemically synthesized
  source 1..20: mol_type = other DNA
aaaaagtctaggctaaattc

SEQ ID NO: 11878 - DNA, 20 bp, synthetic construct
  misc_feature 1..20: note = chemically synthesized
  source 1..20: mol_type = other DNA
cagctgcaatgaaaataagg

SEQ ID NO: 11879 - DNA, 20 bp, synthetic construct
  misc_feature 1..20: note = chemically synthesized
  source 1..20: mol_type = other DNA
aggaagtagtcccaaatacc

SEQ ID NO: 11880 - DNA, 20 bp, synthetic construct
  misc_feature 1..20: note = chemically synthesized
  source 1..20: mol_type = other DNA
agatatattgctagaccctt

SEQ ID NO: 11881 - DNA, 20 bp, synthetic construct
  misc_feature 1..20: note = chemically synthesized
  source 1..20: mol_type = other DNA
ttaacaatggggatatattc

SEQ ID NO: 11882 - DNA, 20 bp, synthetic construct
  misc_feature 1..20: note = chemically synthesized
  source 1..20: mol_type = other DNA
tggtatttgtgtatctaaac

SEQ ID NO: 11883 - DNA, 20 bp, synthetic construct
  misc_feature 1..20: note = chemically synthesized
  source 1..20: mol_type = other DNA
gagaggaaggagggagggaa

SEQ ID NO: 11884 - DNA, 20 bp, synthetic construct
  misc_feature 1..20: note = chemically synthesized
  source 1..20: mol_type = other DNA
caaagtaaattcaaatatga

SEQ ID NO: 11885 - DNA, 20 bp, synthetic construct
  misc_feature 1..20: note = chemically synthesized
  source 1..20: mol_type = other DNA
attttggctccatgccctaa

SEQ ID NO: 11886 - DNA, 20 bp, synthetic construct
  misc_feature 1..20: note = chemically synthesized
  source 1..20: mol_type = other DNA
ttttcttttttgctaaaact

SEQ ID NO: 11887 - DNA, 20 bp, synthetic construct
  misc_feature 1..20: note = chemically synthesized
  source 1..20: mol_type = other DNA
ttgttcaagggaaccttgag

SEQ ID NO: 11888 - DNA, 20 bp, synthetic construct
  misc_feature 1..20: note = chemically synthesized
  source 1..20: mol_type = other DNA
accttgagagagaatgtatg

SEQ ID NO: 11889 - DNA, 20 bp, synthetic construct
  misc_feature 1..20: note = chemically synthesized
  source 1..20: mol_type = other DNA
attatacctctttggccgat

SEQ ID NO: 11890 - DNA, 20 bp, synthetic construct
  misc_feature 1..20: note = chemically synthesized
  source 1..20: mol_type = other DNA
tttgttggcgttttcatgat

SEQ ID NO: 11891 - DNA, 20 bp, synthetic construct
  misc_feature 1..20: note = chemically synthesized
  source 1..20: mol_type = other DNA
tcaagaaaaactgaaatgta

SEQ ID NO: 11892 - DNA, 20 bp, synthetic construct
  misc_feature 1..20: note = chemically synthesized
  source 1..20: mol_type = other DNA
aattctttagttttagcaaa

SEQ ID NO: 11893 - DNA, 20 bp, synthetic construct
  misc_feature 1..20: note = chemically synthesized
  source 1..20: mol_type = other DNA
catgaaaattttacatctct

SEQ ID NO: 11894 - DNA, 20 bp, synthetic construct
  misc_feature 1..20: note = chemically synthesized
  source 1..20: mol_type = other DNA
ttcaattttacttttagtca

SEQ ID NO: 11895 - DNA, 20 bp, synthetic construct
  misc_feature 1..20: note = chemically synthesized
  source 1..20: mol_type = other DNA
ttgaatttactttggatgaa

SEQ ID NO: 11896 - DNA, 20 bp, synthetic construct
  misc_feature 1..20: note = chemically synthesized
  source 1..20: mol_type = other DNA
tcaccctggctgggctgttt

SEQ ID NO: 11897 - DNA, 20 bp, synthetic construct
  misc_feature 1..20: note = chemically synthesized
  source 1..20: mol_type = other DNA
agtgtctgtcactagatgtt

SEQ ID NO: 11898 - DNA, 20 bp, synthetic construct
  misc_feature 1..20: note = chemically synthesized
  source 1..20: mol_type = other DNA
gcagtgatttaagcatctct

SEQ ID NO: 11899 - DNA, 20 bp, synthetic construct
  misc_feature 1..20: note = chemically synthesized
  source 1..20: mol_type = other DNA
attgcttaatgacacatttc

SEQ ID NO: 11900 - DNA, 20 bp, synthetic construct
  misc_feature 1..20: note = chemically synthesized
  source 1..20: mol_type = other DNA
ctgattaactccaaaaagga

SEQ ID NO: 11901 - DNA, 20 bp, synthetic construct
  misc_feature 1..20: note = chemically synthesized
  source 1..20: mol_type = other DNA
aggaaagtaaaaaggaaagg

SEQ ID NO: 11902 - DNA, 20 bp, synthetic construct
  misc_feature 1..20: note = chemically synthesized
  source 1..20: mol_type = other DNA
gttgagtgaaaaaacagact

SEQ ID NO: 11903 - DNA, 20 bp, synthetic construct
  misc_feature 1..20: note = chemically synthesized
  source 1..20: mol_type = other DNA
agactttagaatcagatcag

SEQ ID NO: 11904 - DNA, 20 bp, synthetic construct
  misc_feature 1..20: note = chemically synthesized
  source 1..20: mol_type = other DNA
taggtttaacagtagtataa

SEQ ID NO: 11905 - DNA, 20 bp, synthetic construct
  misc_feature 1..20: note = chemically synthesized
  source 1..20: mol_type = other DNA
gtcacaatcaggaatgacct

SEQ ID NO: 11906 - DNA, 20 bp, synthetic construct
  misc_feature 1..20: note = chemically synthesized
  source 1..20: mol_type = other DNA
tgcattaatactgtctatcc

SEQ ID NO: 11907 - DNA, 20 bp, synthetic construct
  misc_feature 1..20: note = chemically synthesized
  source 1..20: mol_type = other DNA
tatctctggctacaatggct

SEQ ID NO: 11908 - DNA, 20 bp, synthetic construct
  misc_feature 1..20: note = chemically synthesized
  source 1..20: mol_type = other DNA
atcatctcaccacttatata

SEQ ID NO: 11909 - DNA, 20 bp, synthetic construct
  misc_feature 1..20: note = chemically synthesized
  source 1..20: mol_type = other DNA
gtcagctactagatttgatt

SEQ ID NO: 11910 - DNA, 20 bp, synthetic construct
  misc_feature 1..20: note = chemically synthesized
  source 1..20: mol_type = other DNA
ttagttttaaaaatgaagaa

SEQ ID NO: 11911 - DNA, 20 bp, synthetic construct
  misc_feature 1..20: note = chemically synthesized
  source 1..20: mol_type = other DNA
gttttcttcttcttcatttt

SEQ ID NO: 11912 - DNA, 20 bp, synthetic construct
  misc_feature 1..20: note = chemically synthesized
  source 1..20: mol_type = other DNA
tggtcatgtaattcctgtta

SEQ ID NO: 11913 - DNA, 20 bp, synthetic construct
  misc_feature 1..20: note = chemically synthesized
  source 1..20: mol_type = other DNA
tttaaaaaaattaaaagtgg

SEQ ID NO: 11914 - DNA, 20 bp, synthetic construct
  misc_feature 1..20: note = chemically synthesized
  source 1..20: mol_type = other DNA
cttcaatttaaagttttagt

SEQ ID NO: 11915 - DNA, 20 bp, synthetic construct
  misc_feature 1..20: note = chemically synthesized
  source 1..20: mol_type = other DNA
gggataaagaaaatttgttg

SEQ ID NO: 11916 - DNA, 20 bp, synthetic construct
  misc_feature 1..20: note = chemically synthesized
  source 1..20: mol_type = other DNA
acagtttggaattttgaaat

SEQ ID NO: 11917 - DNA, 20 bp, synthetic construct
  misc_feature 1..20: note = chemically synthesized
  source 1..20: mol_type = other DNA
ttgaaattaaaacagttctg

SEQ ID NO: 11918 - DNA, 20 bp, synthetic construct
  misc_feature 1..20: note = chemically synthesized
  source 1..20: mol_type = other DNA
ctaaagagaattgagaaatt

SEQ ID NO: 11919 - DNA, 20 bp, synthetic construct
  misc_feature 1..20: note = chemically synthesized
  source 1..20: mol_type = other DNA
acacatatatgtatatacat

SEQ ID NO: 11920 - DNA, 20 bp, synthetic construct
  misc_feature 1..20: note = chemically synthesized
  source 1..20: mol_type = other DNA
ctaggtagatgtagcttaaa

SEQ ID NO: 11921 - DNA, 20 bp, synthetic construct
  misc_feature 1..20: note = chemically synthesized
  source 1..20: mol_type = other DNA
catttgggcaaccatattct

SEQ ID NO: 11922 - DNA, 20 bp, synthetic construct
  misc_feature 1..20: note = chemically synthesized
  source 1..20: mol_type = other DNA
gctttcagattatttggatt

SEQ ID NO: 11923 - DNA, 20 bp, synthetic construct
  misc_feature 1..20: note = chemically synthesized
  source 1..20: mol_type = other DNA
catgatgttttcttttttgc

SEQ ID NO: 11924 - DNA, 20 bp, synthetic construct
  misc_feature 1..20: note = chemically synthesized
  source 1..20: mol_type = other DNA
tttcagtttttcttgatcat

SEQ ID NO: 11925 - DNA, 20 bp, synthetic construct
  misc_feature 1..20: note = chemically synthesized
  source 1..20: mol_type = other DNA
aagaagcacgagaagttttt

SEQ ID NO: 11926 - DNA, 20 bp, synthetic construct
  misc_feature 1..20: note = chemically synthesized
  source 1..20: mol_type = other DNA
aaaaacttctcgtgcttctt

SEQ ID NO: 11927 - DNA, 20 bp, synthetic construct
  misc_feature 1..20: note = chemically synthesized
  source 1..20: mol_type = other DNA
ttggcgttttcatgatcaag

SEQ ID NO: 11928 - DNA, 20 bp, synthetic construct
  misc_feature 1..20: note = chemically synthesized
  source 1..20: mol_type = other DNA
tctttagttttagcaaaaaa

SEQ ID NO: 11929 - DNA, 20 bp, synthetic construct
  misc_feature 1..20: note = chemically synthesized
  source 1..20: mol_type = other DNA
tgtacagtgtggttgagtga

SEQ ID NO: 11930 - DNA, 20 bp, synthetic construct
  misc_feature 1..20: note = chemically synthesized
  source 1..20: mol_type = other DNA
ctttgcccaaggtaacatac

SEQ ID NO: 11931 - DNA, 20 bp, synthetic construct
  misc_feature 1..20: note = chemically synthesized
  source 1..20: mol_type = other DNA
atagtccatatggaaccata

SEQ ID NO: 11932 - DNA, 20 bp, synthetic construct
  misc_feature 1..20: note = chemically synthesized
  source 1..20: mol_type = other DNA
tctttgatgcatacacttta

SEQ ID NO: 11933 - DNA, 20 bp, synthetic construct
  misc_feature 1..20: note = chemically synthesized
  source 1..20: mol_type = other DNA
taaagtcactgtagttgtga

SEQ ID NO: 11934 - DNA, 20 bp, synthetic construct
  misc_feature 1..20: note = chemically synthesized
  source 1..20: mol_type = other DNA
gttaatctttatgttttaac

SEQ ID NO: 11935 - DNA, 20 bp, synthetic construct
  misc_feature 1..20: note = chemically synthesized
  source 1..20: mol_type = other DNA
gttttaaaaatgaagaagaa

SEQ ID NO: 11936 - DNA, 20 bp, synthetic construct
  misc_feature 1..20: note = chemically synthesized
  source 1..20: mol_type = other DNA
atctactcagtgctgaatgt

SEQ ID NO: 11937 - DNA, 20 bp, synthetic construct
  misc_feature 1..20: note = chemically synthesized
  source 1..20: mol_type = other DNA
actcagtgctgaatgtacag

SEQ ID NO: 11938 - DNA, 20 bp, synthetic construct
  misc_feature 1..20: note = chemically synthesized
  source 1..20: mol_type = other DNA
ccttttttaaaatacattga

SEQ ID NO: 11939 - DNA, 20 bp, synthetic construct
  misc_feature 1..20: note = chemically synthesized
  source 1..20: mol_type = other DNA
atgctgtcttcttcactaaa

SEQ ID NO: 11940 - DNA, 20 bp, synthetic construct
  misc_feature 1..20: note = chemically synthesized
  source 1..20: mol_type = other DNA
ttcttcactaaattttgatt

SEQ ID NO: 11941 - DNA, 20 bp, synthetic construct
  misc_feature 1..20: note = chemically synthesized
  source 1..20: mol_type = other DNA
aagtactggttctttgttag

SEQ ID NO: 11942 - DNA, 20 bp, synthetic construct
  misc_feature 1..20: note = chemically synthesized
  source 1..20: mol_type = other DNA
tttaaaactaaatagatcga

SEQ ID NO: 11943 - DNA, 20 bp, synthetic construct
  misc_feature 1..20: note = chemically synthesized
  source 1..20: mol_type = other DNA
cgacaatgcttatgatgcat

SEQ ID NO: 11944 - DNA, 20 bp, synthetic construct
  misc_feature 1..20: note = chemically synthesized
  source 1..20: mol_type = other DNA
tttaataaacactgttcagt

SEQ ID NO: 11945 - DNA, 20 bp, synthetic construct
  misc_feature 1..20: note = chemically synthesized
  source 1..20: mol_type = other DNA
tgttagaaaacattcatctc

SEQ ID NO: 11946 - DNA, 20 bp, synthetic construct
  misc_feature 1..20: note = chemically synthesized
  source 1..20: mol_type = other DNA
aaaaaaaataaccacattat

SEQ ID NO: 11947 - DNA, 20 bp, synthetic construct
  misc_feature 1..20: note = chemically synthesized
  source 1..20: mol_type = other DNA
tggccttatttacacaaaaa

SEQ ID NO: 11948 - DNA, 20 bp, synthetic construct
  misc_feature 1..20: note = chemically synthesized
  source 1..20: mol_type = other DNA
ttttaagatatatgacattt

SEQ ID NO: 11949 - DNA, 20 bp, synthetic construct
  misc_feature 1..20: note = chemically synthesized
  source 1..20: mol_type = other DNA
taaattatatatcttcaatt

SEQ ID NO: 11950 - DNA, 20 bp, synthetic construct
  misc_feature 1..20: note = chemically synthesized
  source 1..20: mol_type = other DNA
ttaaagttttagttaaaaca

SEQ ID NO: 11951 - DNA, 20 bp, synthetic construct
  misc_feature 1..20: note = chemically synthesized
  source 1..20: mol_type = other DNA
agcaagctgttagttatcac

SEQ ID NO: 11952 - DNA, 20 bp, synthetic construct
  misc_feature 1..20: note = chemically synthesized
  source 1..20: mol_type = other DNA
tagttatcaccaaagctttt

SEQ ID NO: 11953 - DNA, 20 bp, synthetic construct
  misc_feature 1..20: note = chemically synthesized
  source 1..20: mol_type = other DNA
gagttccctaggggagaaaa

SEQ ID NO: 11954 - DNA, 20 bp, synthetic construct
  misc_feature 1..20: note = chemically synthesized
  source 1..20: mol_type = other DNA
agctaatgcaacatatatca

SEQ ID NO: 11955 - DNA, 20 bp, synthetic construct
  misc_feature 1..20: note = chemically synthesized
  source 1..20: mol_type = other DNA
tgagatgatgaaggttgtaa

SEQ ID NO: 11956 - DNA, 20 bp, synthetic construct
  misc_feature 1..20: note = chemically synthesized
  source 1..20: mol_type = other DNA
tagataagaataaggatgaa

SEQ ID NO: 11957 - DNA, 20 bp, synthetic construct
  misc_feature 1..20: note = chemically synthesized
  source 1..20: mol_type = other DNA
taatactaaggagaaaggca

SEQ ID NO: 11958 - DNA, 20 bp, synthetic construct
  misc_feature 1..20: note = chemically synthesized
  source 1..20: mol_type = other DNA
tcttctgctattaaactctc

SEQ ID NO: 11959 - DNA, 20 bp, synthetic construct
  misc_feature 1..20: note = chemically synthesized
  source 1..20: mol_type = other DNA
aactctcattggcttctaaa

SEQ ID NO: 11960 - DNA, 20 bp, synthetic construct
  misc_feature 1..20: note = chemically synthesized
  source 1..20: mol_type = other DNA
cttctaaaaggagtttcggt

SEQ ID NO: 11961 - DNA, 20 bp, synthetic construct
  misc_feature 1..20: note = chemically synthesized
  source 1..20: mol_type = other DNA
ctgcctttaggtattattgc

SEQ ID NO: 11962 - DNA, 20 bp, synthetic construct
  misc_feature 1..20: note = chemically synthesized
  source 1..20: mol_type = other DNA
aattaaaacagttctgtaaa

SEQ ID NO: 11963 - DNA, 20 bp, synthetic construct
  misc_feature 1..20: note = chemically synthesized
  source 1..20: mol_type = other DNA
aaacagttctgtaaaaccag

SEQ ID NO: 11964 - DNA, 20 bp, synthetic construct
  misc_feature 1..20: note = chemically synthesized
  source 1..20: mol_type = other DNA
aagcagcatgaggccaggtg

SEQ ID NO: 11965 - DNA, 20 bp, synthetic construct
  misc_feature 1..20: note = chemically synthesized
  source 1..20: mol_type = other DNA
gaggatcactcgtgcaaaga

SEQ ID NO: 11966 - DNA, 20 bp, synthetic construct
  misc_feature 1..20: note = chemically synthesized
  source 1..20: mol_type = other DNA
gcaagaacgtgaggtatttc

SEQ ID NO: 11967 - DNA, 20 bp, synthetic construct
  misc_feature 1..20: note = chemically synthesized
  source 1..20: mol_type = other DNA
ataatgaagtcattaaccta

SEQ ID NO: 11968 - DNA, 20 bp, synthetic construct
  misc_feature 1..20: note = chemically synthesized
  source 1..20: mol_type = other DNA
acataaggagtaccactgat

SEQ ID NO: 11969 - DNA, 20 bp, synthetic construct
  misc_feature 1..20: note = chemically synthesized
  source 1..20: mol_type = other DNA
tggctagagtcttggggact

SEQ ID NO: 11970 - DNA, 20 bp, synthetic construct
  misc_feature 1..20: note = chemically synthesized
  source 1..20: mol_type = other DNA
tcttggggactttgtgtttg

SEQ ID NO: 11971 - DNA, 20 bp, synthetic construct
  misc_feature 1..20: note = chemically synthesized
  source 1..20: mol_type = other DNA
actgccagagtctgaatcct

SEQ ID NO: 11972 - DNA, 20 bp, synthetic construct
  misc_feature 1..20: note = chemically synthesized
  source 1..20: mol_type = other DNA
taaatattgtgccctacatg

SEQ ID NO: 11973 - DNA, 20 bp, synthetic construct
  misc_feature 1..20: note = chemically synthesized
  source 1..20: mol_type = other DNA
caaagcggggaaccagaata

SEQ ID NO: 11974 - DNA, 20 bp, synthetic construct
  misc_feature 1..20: note = chemically synthesized
  source 1..20: mol_type = other DNA
aatagagtgattattataaa

SEQ ID NO: 11975 - DNA, 20 bp, synthetic construct
  misc_feature 1..20: note = chemically synthesized
  source 1..20: mol_type = other DNA
aaaattattctttaggtcat

SEQ ID NO: 11976 - DNA, 20 bp, synthetic construct
  misc_feature 1..20: note = chemically synthesized
  source 1..20: mol_type = other DNA
atagtcatttcattatataa

SEQ ID NO: 11977 - DNA, 20 bp, synthetic construct
  misc_feature 1..20: note = chemically synthesized
  source 1..20: mol_type = other DNA
catttgacaaagttaaggtt

SEQ ID NO: 11978 - DNA, 20 bp, synthetic construct
  misc_feature 1..20: note = chemically synthesized
  source 1..20: mol_type = other DNA
caggtctagaggaggcagat

SEQ ID NO: 11979 - DNA, 20 bp, synthetic construct
  misc_feature 1..20: note = chemically synthesized
  source 1..20: mol_type = other DNA
ttcaaacctatttctgtctg

SEQ ID NO: 11980 - DNA, 20 bp, synthetic construct
  misc_feature 1..20: note = chemically synthesized
  source 1..20: mol_type = other DNA
ctgtctgatctgattctaaa

SEQ ID NO: 11981 - DNA, 20 bp, synthetic construct
  misc_feature 1..20: note = chemically synthesized
  source 1..20: mol_type = other DNA
ctccttgtgagttccacagc

SEQ ID NO: 11982 - DNA, 20 bp, synthetic construct
  misc_feature 1..20: note = chemically synthesized
  source 1..20: mol_type = other DNA
agctattaagagaaacctag

SEQ ID NO: 11983 - DNA, 20 bp, synthetic construct
  misc_feature 1..20: note = chemically synthesized
  source 1..20: mol_type = other DNA
gatttaaagtacaaaggagg

SEQ ID NO: 11984 - DNA, 20 bp, synthetic construct
  misc_feature 1..20: note = chemically synthesized
  source 1..20: mol_type = other DNA
ggtggcatccatctgcattt

SEQ ID NO: 11985 - DNA, 20 bp, synthetic construct
  misc_feature 1..20: note = chemically synthesized
  source 1..20: mol_type = other DNA
tggctgctccaatttagggg

SEQ ID NO: 11986 - DNA, 20 bp, synthetic construct
  misc_feature 1..20: note = chemically synthesized
  source 1..20: mol_type = other DNA
acaaggtgaaatggtgaaac

SEQ ID NO: 11987 - DNA, 20 bp, synthetic construct
  misc_feature 1..20: note = chemically synthesized
  source 1..20: mol_type = other DNA
ttgggaggctgaggcaggag

SEQ ID NO: 11988 - DNA, 20 bp, synthetic construct
  misc_feature 1..20: note = chemically synthesized
  source 1..20: mol_type = other DNA
ctgcaatgaaaataagggaa

SEQ ID NO: 11989 - DNA, 20 bp, synthetic construct
  misc_feature 1..20: note = chemically synthesized
  source 1..20: mol_type = other DNA
gggaagaaagtttagttcat

SEQ ID NO: 11990 - DNA, 20 bp, synthetic construct
  misc_feature 1..20: note = chemically synthesized
  source 1..20: mol_type = other DNA
acttacctaaacctaaatgg

SEQ ID NO: 11991 - DNA, 20 bp, synthetic construct
  misc_feature 1..20: note = chemically synthesized
  source 1..20: mol_type = other DNA
ccaaaatgtcattgtgcagc

SEQ ID NO: 11992 - DNA, 20 bp, synthetic construct
  misc_feature 1..20: note = chemically synthesized
  source 1..20: mol_type = other DNA
aaggagggagggaaggagaa

SEQ ID NO: 11993 - DNA, 20 bp, synthetic construct
  misc_feature 1..20: note = chemically synthesized
  source 1..20: mol_type = other DNA
gtctcttcagactaggtaga

SEQ ID NO: 11994 - DNA, 20 bp, synthetic construct
  misc_feature 1..20: note = chemically synthesized
  source 1..20: mol_type = other DNA
acatatcctgaattctagag

SEQ ID NO: 11995 - DNA, 20 bp, synthetic construct
  misc_feature 1..20: note = chemically synthesized
  source 1..20: mol_type = other DNA
caaaggtgctgttgatctga

SEQ ID NO: 11996 - DNA, 20 bp, synthetic construct
  misc_feature 1..20: note = chemically synthesized
  source 1..20: mol_type = other DNA
attgcttttttaaattaatg

SEQ ID NO: 11997 - DNA, 20 bp, synthetic construct
  misc_feature 1..20: note = chemically synthesized
  source 1..20: mol_type = other DNA
catttgcagctggaccataa

SEQ ID NO: 11998 - DNA, 20 bp, synthetic construct
  misc_feature 1..20: note = chemically synthesized
  source 1..20: mol_type = other DNA
ttcatccaaagtaaattcaa

SEQ ID NO: 11999 - DNA, 20 bp, synthetic construct
  misc_feature 1..20: note = chemically synthesized
  source 1..20: mol_type = other DNA
atacagtactgtgggaacat

SEQ ID NO: 12000 - DNA, 20 bp, synthetic construct
  misc_feature 1..20: note = chemically synthesized
  source 1..20: mol_type = other DNA
gctccatgccctaaagagaa

SEQ ID NO: 12001 - DNA, 20 bp, synthetic construct
  misc_feature 1..20: note = chemically synthesized
  source 1..20: mol_type = other DNA
gccctaaagagaaattggct

SEQ ID NO: 12002 - DNA, 20 bp, synthetic construct
  misc_feature 1..20: note = chemically synthesized
  source 1..20: mol_type = other DNA
agaaattggctttcagatta

SEQ ID NO: 12003 - DNA, 20 bp, synthetic construct
  misc_feature 1..20: note = chemically synthesized
  source 1..20: mol_type = other DNA
taagagatgtaaaattttca

SEQ ID NO: 12004 - DNA, 20 bp, synthetic construct
  misc_feature 1..20: note = chemically synthesized
  source 1..20: mol_type = other DNA
aaagaattattcttttacat

SEQ ID NO: 12005 - DNA, 20 bp, synthetic construct
  misc_feature 1..20: note = chemically synthesized
  source 1..20: mol_type = other DNA
gtataattcaggtaaattgg

SEQ ID NO: 12006 - DNA, 20 bp, synthetic construct
  misc_feature 1..20: note = chemically synthesized
  source 1..20: mol_type = other DNA
gagaatgtatggaagaaaag

SEQ ID NO: 12007 - DNA, 20 bp, synthetic construct
  misc_feature 1..20: note = chemically synthesized
  source 1..20: mol_type = other DNA
tgtagttttgaagaagcacg

SEQ ID NO: 12008 - DNA, 20 bp, synthetic construct
  misc_feature 1..20: note = chemically synthesized
  source 1..20: mol_type = other DNA
tcagtgttttcaaaaacttc

SEQ ID NO: 12009 - DNA, 20 bp, synthetic construct
  misc_feature 1..20: note = chemically synthesized
  source 1..20: mol_type = other DNA
tacctgaattatacctcttt

SEQ ID NO: 12010 - DNA, 20 bp, synthetic construct
  misc_feature 1..20: note = chemically synthesized
  source 1..20: mol_type = other DNA
tggccgattcagaattttgt

SEQ ID NO: 12011 - DNA, 20 bp, synthetic construct
  misc_feature 1..20: note = chemically synthesized
  source 1..20: mol_type = other DNA
gaaatgtaaaagaataattc

SEQ ID NO: 12012 - DNA, 20 bp, synthetic construct
  misc_feature 1..20: note = chemically synthesized
  source 1..20: mol_type = other DNA
tttacatctcttaagaaagt

SEQ ID NO: 12013 - DNA, 20 bp, synthetic construct
  misc_feature 1..20: note = chemically synthesized
  source 1..20: mol_type = other DNA
cccacagtactgtatacaca

SEQ ID NO: 12014 - DNA, 20 bp, synthetic construct
  misc_feature 1..20: note = chemically synthesized
  source 1..20: mol_type = other DNA
gagaattccagtaataaaag

SEQ ID NO: 12015 - DNA, 20 bp, synthetic construct
  misc_feature 1..20: note = chemically synthesized
  source 1..20: mol_type = other DNA
gtgatccatcaccctggctg

SEQ ID NO: 12016 - DNA, 20 bp, synthetic construct
  misc_feature 1..20: note = chemically synthesized
  source 1..20: mol_type = other DNA
ggcaagtgttataggaattg

SEQ ID NO: 12017 - DNA, 20 bp, synthetic construct
  misc_feature 1..20: note = chemically synthesized
  source 1..20: mol_type = other DNA
gcatctctctagaattcagg

SEQ ID NO: 12018 - DNA, 20 bp, synthetic construct
  misc_feature 1..20: note = chemically synthesized
  source 1..20: mol_type = other DNA
gtattttcactgtacctttt

SEQ ID NO: 12019 - DNA, 20 bp, synthetic construct
  misc_feature 1..20: note = chemically synthesized
  source 1..20: mol_type = other DNA
tcagtacagtcacatgctgt

SEQ ID NO: 12020 - DNA, 20 bp, synthetic construct
  misc_feature 1..20: note = chemically synthesized
  source 1..20: mol_type = other DNA
tatgtagtaagctataccat

SEQ ID NO: 12021 - DNA, 20 bp, synthetic construct
  misc_feature 1..20: note = chemically synthesized
  source 1..20: mol_type = other DNA
ttatgttcgcacaatgatga

SEQ ID NO: 12022 - DNA, 20 bp, synthetic construct
  misc_feature 1..20: note = chemically synthesized
  source 1..20: mol_type = other DNA
gcatggctgtatacacacac

SEQ ID NO: 12023 - DNA, 20 bp, synthetic construct
  misc_feature 1..20: note = chemically synthesized
  source 1..20: mol_type = other DNA
gtatacacacacatgtgttt

SEQ ID NO: 12024 - DNA, 20 bp, synthetic construct
  misc_feature 1..20: note = chemically synthesized
  source 1..20: mol_type = other DNA
gataccatctcaagaggacc

SEQ ID NO: 12025 - DNA, 20 bp, synthetic construct
  misc_feature 1..20: note = chemically synthesized
  source 1..20: mol_type = other DNA
ctggggtatttgggactact

SEQ ID NO: 12026 - DNA, 20 bp, synthetic construct
  misc_feature 1..20: note = chemically synthesized
  source 1..20: mol_type = other DNA
gtgttctagtcccttgacat

SEQ ID NO: 12027 - DNA, 20 bp, synthetic construct
  misc_feature 1..20: note = chemically synthesized
  source 1..20: mol_type = other DNA
tgcctcagcctcccaagtag

SEQ ID NO: 12028 - DNA, 20 bp, synthetic construct
  misc_feature 1..20: note = chemically synthesized
  source 1..20: mol_type = other DNA
ttttgtatttttagtaaagc

SEQ ID NO: 12029 - DNA, 20 bp, synthetic construct
  misc_feature 1..20: note = chemically synthesized
  source 1..20: mol_type = other DNA
tgcctgggcctctgaaagtg

SEQ ID NO: 12030 - DNA, 20 bp, synthetic construct
  misc_feature 1..20: note = chemically synthesized
  source 1..20: mol_type = other DNA
catatttctcaatttccttc

SEQ ID NO: 12031 - DNA, 20 bp, synthetic construct
  misc_feature 1..20: note = chemically synthesized
  source 1..20: mol_type = other DNA
gctcaagtctccgatataaa

SEQ ID NO: 12032 - DNA, 20 bp, synthetic construct
  misc_feature 1..20: note = chemically synthesized
  source 1..20: mol_type = other DNA
ctttgtactttaaatcatct

SEQ ID NO: 12033 - DNA, 20 bp, synthetic construct
  misc_feature 1..20: note = chemically synthesized
  source 1..20: mol_type = other DNA
tgtaaatagttgttatgctg

SEQ ID NO: 12034 - DNA, 20 bp, synthetic construct
  misc_feature 1..20: note = chemically synthesized
  source 1..20: mol_type = other DNA
tagaatcagatcagacagaa

SEQ ID NO: 12035 - DNA, 20 bp, synthetic construct
  misc_feature 1..20: note = chemically synthesized
  source 1..20: mol_type = other DNA
ttaactttgtcaaatgtaaa

SEQ ID NO: 12036 - DNA, 20 bp, synthetic construct
  misc_feature 1..20: note = chemically synthesized
  source 1..20: mol_type = other DNA
ttcatgttggccctactttc

SEQ ID NO: 12037 - DNA, 20 bp, synthetic construct
  misc_feature 1..20: note = chemically synthesized
  source 1..20: mol_type = other DNA
gaatgacctaaagaataatt

SEQ ID NO: 12038 - DNA, 20 bp, synthetic construct
  misc_feature 1..20: note = chemically synthesized
  source 1..20: mol_type = other DNA
ataatcactctattctggtt

SEQ ID NO: 12039 - DNA, 20 bp, synthetic construct
  misc_feature 1..20: note = chemically synthesized
  source 1..20: mol_type = other DNA
tgttatccatccagcacttg

SEQ ID NO: 12040 - DNA, 20 bp, synthetic construct
  misc_feature 1..20: note = chemically synthesized
  source 1..20: mol_type = other DNA
gggttctcccaggctccagc

SEQ ID NO: 12041 - DNA, 20 bp, synthetic construct
  misc_feature 1..20: note = chemically synthesized
  source 1..20: mol_type = other DNA
gtatatttatgccctacagg

SEQ ID NO: 12042 - DNA, 20 bp, synthetic construct
  misc_feature 1..20: note = chemically synthesized
  source 1..20: mol_type = other DNA
cccacacacgtggctgtaac

SEQ ID NO: 12043 - DNA, 20 bp, synthetic construct
  misc_feature 1..20: note = chemically synthesized
  source 1..20: mol_type = other DNA
gtcagatacgtctcctgaat

SEQ ID NO: 12044 - DNA, 20 bp, synthetic construct
  misc_feature 1..20: note = chemically synthesized
  source 1..20: mol_type = other DNA
agtaatagctaatgtatatg

SEQ ID NO: 12045 - DNA, 20 bp, synthetic construct
  misc_feature 1..20: note = chemically synthesized
  source 1..20: mol_type = other DNA
ttatttttatgaatgaggaa

SEQ ID NO: 12046 - DNA, 20 bp, synthetic construct
  misc_feature 1..20: note = chemically synthesized
  source 1..20: mol_type = other DNA
aagatagattcatagaggct

SEQ ID NO: 12047 - DNA, 20 bp, synthetic construct
  misc_feature 1..20: note = chemically synthesized
  source 1..20: mol_type = other DNA
aaggtaacatactaaaacat

SEQ ID NO: 12048 - DNA, 20 bp, synthetic construct
  misc_feature 1..20: note = chemically synthesized
  source 1..20: mol_type = other DNA
tcagccatcagtggtactcc

SEQ ID NO: 12049 - DNA, 20 bp, synthetic construct
  misc_feature 1..20: note = chemically synthesized
  source 1..20: mol_type = other DNA
ttatctgatgaccagctctg

SEQ ID NO: 12050 - DNA, 20 bp, synthetic construct
  misc_feature 1..20: note = chemically synthesized
  source 1..20: mol_type = other DNA
gaaaatattctctctctatc

SEQ ID NO: 12051 - DNA, 20 bp, synthetic construct
  misc_feature 1..20: note = chemically synthesized
  source 1..20: mol_type = other DNA
aaacctctcacctggcctca

SEQ ID NO: 12052 - DNA, 20 bp, synthetic construct
  misc_feature 1..20: note = chemically synthesized
  source 1..20: mol_type = other DNA
gctttagatcaaagagggag

SEQ ID NO: 12053 - DNA, 20 bp, synthetic construct
  misc_feature 1..20: note = chemically synthesized
  source 1..20: mol_type = other DNA
catacactttacaaaactaa

SEQ ID NO: 12054 - DNA, 20 bp, synthetic construct
  misc_feature 1..20: note = chemically synthesized
  source 1..20: mol_type = other DNA
aaactaaactggttttacag

SEQ ID NO: 12055 - DNA, 20 bp, synthetic construct
  misc_feature 1..20: note = chemically synthesized
  source 1..20: mol_type = other DNA
aactccttttagaagccaat

SEQ ID NO: 12056 - DNA, 20 bp, synthetic construct
  misc_feature 1..20: note = chemically synthesized
  source 1..20: mol_type = other DNA
attcccctggccccttcctc

SEQ ID NO: 12057 - DNA, 20 bp, synthetic construct
  misc_feature 1..20: note = chemically synthesized
  source 1..20: mol_type = other DNA
atcgtatacttaacttccct

SEQ ID NO: 12058 - DNA, 20 bp, synthetic construct
  misc_feature 1..20: note = chemically synthesized
  source 1..20: mol_type = other DNA
ctcaccacttatatagaaga

SEQ ID NO: 12059 - DNA, 20 bp, synthetic construct
  misc_feature 1..20: note = chemically synthesized
  source 1..20: mol_type = other DNA
ttatatagaagaaagggttt

SEQ ID NO: 12060 - DNA, 20 bp, synthetic construct
  misc_feature 1..20: note = chemically synthesized
  source 1..20: mol_type = other DNA
taatgagatatatctaatgg

SEQ ID NO: 12061 - DNA, 20 bp, synthetic construct
  misc_feature 1..20: note = chemically synthesized
  source 1..20: mol_type = other DNA
tctaatggccttgctttatg

SEQ ID NO: 12062 - DNA, 20 bp, synthetic construct
  misc_feature 1..20: note = chemically synthesized
  source 1..20: mol_type = other DNA
cttgctttatgtcctgcttt

SEQ ID NO: 12063 - DNA, 20 bp, synthetic construct
  misc_feature 1..20: note = chemically synthesized
  source 1..20: mol_type = other DNA
cccttgactttactcacttt

SEQ ID NO: 12064 - DNA, 20 bp, synthetic construct
  misc_feature 1..20: note = chemically synthesized
  source 1..20: mol_type = other DNA
atcgttatttcagcatttca

SEQ ID NO: 12065 - DNA, 20 bp, synthetic construct
  misc_feature 1..20: note = chemically synthesized
  source 1..20: mol_type = other DNA
gagtgggaaccacagggcca

SEQ ID NO: 12066 - DNA, 20 bp, synthetic construct
  misc_feature 1..20: note = chemically synthesized
  source 1..20: mol_type = other DNA
agggccagtcagctttctgg

SEQ ID NO: 12067 - DNA, 20 bp, synthetic construct
  misc_feature 1..20: note = chemically synthesized
  source 1..20: mol_type = other DNA
tgatcctggtactgtcagct

SEQ ID NO: 12068 - DNA, 20 bp, synthetic construct
  misc_feature 1..20: note = chemically synthesized
  source 1..20: mol_type = other DNA
ctggtactgtcagctactag

SEQ ID NO: 12069 - DNA, 20 bp, synthetic construct
  misc_feature 1..20: note = chemically synthesized
  source 1..20: mol_type = other DNA
agttgacaagtaagtgtgat

SEQ ID NO: 12070 - DNA, 20 bp, synthetic construct
  misc_feature 1..20: note = chemically synthesized
  source 1..20: mol_type = other DNA
aaatgcttcctgtgagaaca

SEQ ID NO: 12071 - DNA, 20 bp, synthetic construct
  misc_feature 1..20: note = chemically synthesized
  source 1..20: mol_type = other DNA
cctactctttatgtcaattc

SEQ ID NO: 12072 - DNA, 20 bp, synthetic construct
  misc_feature 1..20: note = chemically synthesized
  source 1..20: mol_type = other DNA
ctctttatgtcaattcttaa

SEQ ID NO: 12073 - DNA, 20 bp, synthetic construct
  misc_feature 1..20: note = chemically synthesized
  source 1..20: mol_type = other DNA
ctagggaactcaactgagta

SEQ ID NO: 12074 - DNA, 20 bp, synthetic construct
  misc_feature 1..20: note = chemically synthesized
  source 1..20: mol_type = other DNA
ttccccaaatatcaactcca

SEQ ID NO: 12075 - DNA, 20 bp, synthetic construct
  misc_feature 1..20: note = chemically synthesized
  source 1..20: mol_type = other DNA
agatgtttgacatagagaca

SEQ ID NO: 12076 - DNA, 20 bp, synthetic construct
  misc_feature 1..20: note = chemically synthesized
  source 1..20: mol_type = other DNA
tgattttttcctaatccatg

SEQ ID NO: 12077 - DNA, 20 bp, synthetic construct
  misc_feature 1..20: note = chemically synthesized
  source 1..20: mol_type = other DNA
gaaaagctttggtgataact

SEQ ID NO: 12078 - DNA, 20 bp, synthetic construct
  misc_feature 1..20: note = chemically synthesized
  source 1..20: mol_type = other DNA
tgctaatgaaaggttaatct

SEQ ID NO: 12079 - DNA, 20 bp, synthetic construct
  misc_feature 1..20: note = chemically synthesized
  source 1..20: mol_type = other DNA
actttttgtgtaaataaggc

SEQ ID NO: 12080 - DNA, 20 bp, synthetic construct
  misc_feature 1..20: note = chemically synthesized
  source 1..20: mol_type = other DNA
tgtgtaaataaggccattgt

SEQ ID NO: 12081 - DNA, 20 bp, synthetic construct
  misc_feature 1..20: note = chemically synthesized
  source 1..20: mol_type = other DNA
aataaggccattgtttgtgc

SEQ ID NO: 12082 - DNA, 20 bp, synthetic construct
  misc_feature 1..20: note = chemically synthesized
  source 1..20: mol_type = other DNA
gtttgtgcttttgtttccca

SEQ ID NO: 12083 - DNA, 20 bp, synthetic construct
  misc_feature 1..20: note = chemically synthesized
  source 1..20: mol_type = other DNA
ttcactatattctgctattt

SEQ ID NO: 12084 - DNA, 20 bp, synthetic construct
  misc_feature 1..20: note = chemically synthesized
  source 1..20: mol_type = other DNA
tttttttaaaccaaggagat

SEQ ID NO: 12085 - DNA, 20 bp, synthetic construct
  misc_feature 1..20: note = chemically synthesized
  source 1..20: mol_type = other DNA
tgaccaaatcatgaactgaa

SEQ ID NO: 12086 - DNA, 20 bp, synthetic construct
  misc_feature 1..20: note = chemically synthesized
  source 1..20: mol_type = other DNA
tcataagcattgtcgatcta

SEQ ID NO: 12087 - DNA, 20 bp, synthetic construct
  misc_feature 1..20: note = chemically synthesized
  source 1..20: mol_type = other DNA
aggcagatggtgatgaggcc

SEQ ID NO: 12088 - DNA, 20 bp, synthetic construct
  misc_feature 1..20: note = chemically synthesized
  source 1..20: mol_type = other DNA
cgcgctgcataacctttgct

SEQ ID NO: 12089 - DNA, 22 bp, synthetic construct
  misc_feature 1..22: note = chemically synthesized
  source 1..22: mol_type = other DNA
tcacaatctgctagcaaaggtt

SEQ ID NO: 12090 - DNA, 22 bp, synthetic construct
  misc_feature 1..22: note = chemically synthesized
  source 1..22: mol_type = other DNA
cacaatctgctagcaaaggtta

SEQ ID NO: 12091 - DNA, 22 bp, synthetic construct
  misc_feature 1..22: note = chemically synthesized
  source 1..22: mol_type = other DNA
acaatctgctagcaaaggttat

SEQ ID NO: 12092 - DNA, 22 bp, synthetic construct
  misc_feature 1..22: note = chemically synthesized
  source 1..22: mol_type = other DNA
ctagcaaaggttatgcagcgcg

SEQ ID NO: 12093 - DNA, 22 bp, synthetic construct
  misc_feature 1..22: note = chemically synthesized
  source 1..22: mol_type = other DNA
gcaaaggttatgcagcgcgtga

SEQ ID NO: 12094 - DNA, 22 bp, synthetic construct
  misc_feature 1..22: note = chemically synthesized
  source 1..22: mol_type = other DNA
tgcagcgcgtgaacatgatcat

SEQ ID NO: 12095 - DNA, 22 bp, synthetic construct
  misc_feature 1..22: note = chemically synthesized
  source 1..22: mol_type = other DNA
atcaccatctgccttttaggat

SEQ ID NO: 12096 - DNA, 22 bp, synthetic construct
  misc_feature 1..22: note = chemically synthesized
  source 1..22: mol_type = other DNA
ccttttaggatatctactcagt

SEQ ID NO: 12097 - DNA, 22 bp, synthetic construct
  misc_feature 1..22: note = chemically synthesized
  source 1..22: mol_type = other DNA
ttaggatatctactcagtgctg

SEQ ID NO: 12098 - DNA, 22 bp, synthetic construct
  misc_feature 1..22: note = chemically synthesized
  source 1..22: mol_type = other DNA
taggatatctactcagtgctga

SEQ ID NO: 12099 - DNA, 22 bp, synthetic construct
  misc_feature 1..22: note = chemically synthesized
  source 1..22: mol_type = other DNA
aggatatctactcagtgctgaa

SEQ ID NO: 12100 - DNA, 22 bp, synthetic construct
  misc_feature 1..22: note = chemically synthesized
  source 1..22: mol_type = other DNA
ggatatctactcagtgctgaat

SEQ ID NO: 12101 - DNA, 22 bp, synthetic construct
  misc_feature 1..22: note = chemically synthesized
  source 1..22: mol_type = other DNA
ctcagtgctgaatgtacaggtt

SEQ ID NO: 12102 - DNA, 22 bp, synthetic construct
  misc_feature 1..22: note = chemically synthesized
  source 1..22: mol_type = other DNA
agtgctgaatgtacaggtttgt

SEQ ID NO: 12103 - DNA, 22 bp, synthetic construct
  misc_feature 1..22: note = chemically synthesized
  source 1..22: mol_type = other DNA
aatgtacaggtttgtttccttt

SEQ ID NO: 12104 - DNA, 22 bp, synthetic construct
  misc_feature 1..22: note = chemically synthesized
  source 1..22: mol_type = other DNA
gtttccttttttaaaatacatt

SEQ ID NO: 12105 - DNA, 22 bp, synthetic construct
  misc_feature 1..22: note = chemically synthesized
  source 1..22: mol_type = other DNA
tttccttttttaaaatacattg

SEQ ID NO: 12106 - DNA, 22 bp, synthetic construct
  misc_feature 1..22: note = chemically synthesized
  source 1..22: mol_type = other DNA
ccttttttaaaatacattgagt

SEQ ID NO: 12107 - DNA, 22 bp, synthetic construct
  misc_feature 1..22: note = chemically synthesized
  source 1..22: mol_type = other DNA
cttttttaaaatacattgagta

SEQ ID NO: 12108 - DNA, 22 bp, synthetic construct
  misc_feature 1..22: note = chemically synthesized
  source 1..22: mol_type = other DNA
ttttaaaatacattgagtatgc

SEQ ID NO: 12109 - DNA, 22 bp, synthetic construct
  misc_feature 1..22: note = chemically synthesized
  source 1..22: mol_type = other DNA
tttaaaatacattgagtatgct

SEQ ID NO: 12110 - DNA, 22 bp, synthetic construct
  misc_feature 1..22: note = chemically synthesized
  source 1..22: mol_type = other DNA
ttaaaatacattgagtatgctt

SEQ ID NO: 12111 - DNA, 22 bp, synthetic construct
  misc_feature 1..22: note = chemically synthesized
  source 1..22: mol_type = other DNA
taaaatacattgagtatgcttg

SEQ ID NO: 12112 - DNA, 22 bp, synthetic construct
  misc_feature 1..22: note = chemically synthesized
  source 1..22: mol_type = other DNA
aaaatacattgagtatgcttgc

SEQ ID NO: 12113 - DNA, 22 bp, synthetic construct
  misc_feature 1..22: note = chemically synthesized
  source 1..22: mol_type = other DNA
aaatacattgagtatgcttgcc

SEQ ID NO: 12114 - DNA, 22 bp, synthetic construct
  misc_feature 1..22: note = chemically synthesized
  source 1..22: mol_type = other DNA
agtatgcttgccttttagatat

SEQ ID NO: 12115 - DNA, 22 bp, synthetic construct
  misc_feature 1..22: note = chemically synthesized
  source 1..22: mol_type = other DNA
gccttttagatatagaaatatc

SEQ ID NO: 12116 - DNA, 22 bp, synthetic construct
  misc_feature 1..22: note = chemically synthesized
  source 1..22: mol_type = other DNA
ccttttagatatagaaatatct

SEQ ID NO: 12117 - DNA, 22 bp, synthetic construct
  misc_feature 1..22: note = chemically synthesized
  source 1..22: mol_type = other DNA
ttagatatagaaatatctgatg

SEQ ID NO: 12118 - DNA, 22 bp, synthetic construct
  misc_feature 1..22: note = chemically synthesized
  source 1..22: mol_type = other DNA
tagatatagaaatatctgatgc

SEQ ID NO: 12119 - DNA, 22 bp, synthetic construct
  misc_feature 1..22: note = chemically synthesized
  source 1..22: mol_type = other DNA
agatatagaaatatctgatgct

SEQ ID NO: 12120 - DNA, 22 bp, synthetic construct
  misc_feature 1..22: note = chemically synthesized
  source 1..22: mol_type = other DNA
gatatagaaatatctgatgctg

SEQ ID NO: 12121 - DNA, 22 bp, synthetic construct
  misc_feature 1..22: note = chemically synthesized
  source 1..22: mol_type = other DNA
atgctgtcttcttcactaaatt

SEQ ID NO: 12122 - DNA, 22 bp, synthetic construct
  misc_feature 1..22: note = chemically synthesized
  source 1..22: mol_type = other DNA
tcttcttcactaaattttgatt

SEQ ID NO: 12123 - DNA, 22 bp, synthetic construct
  misc_feature 1..22: note = chemically synthesized
  source 1..22: mol_type = other DNA
cttcactaaattttgattacat

SEQ ID NO: 12124 - DNA, 22 bp, synthetic construct
  misc_feature 1..22: note = chemically synthesized
  source 1..22: mol_type = other DNA
ttcactaaattttgattacatg

SEQ ID NO: 12125 - DNA, 22 bp, synthetic construct
  misc_feature 1..22: note = chemically synthesized
  source 1..22: mol_type = other DNA
cactaaattttgattacatgat

SEQ ID NO: 12126 - DNA, 22 bp, synthetic construct
  misc_feature 1..22: note = chemically synthesized
  source 1..22: mol_type = other DNA
actaaattttgattacatgatt

SEQ ID NO: 12127 - DNA, 22 bp, synthetic construct
  misc_feature 1..22: note = chemically synthesized
  source 1..22: mol_type = other DNA
aattttgattacatgatttgac

SEQ ID NO: 12128 - DNA, 22 bp, synthetic construct
  misc_feature 1..22: note = chemically synthesized
  source 1..22: mol_type = other DNA
tgattacatgatttgacagcaa

SEQ ID NO: 12129 - DNA, 22 bp, synthetic construct
  misc_feature 1..22: note = chemically synthesized
  source 1..22: mol_type = other DNA
gattacatgatttgacagcaat

SEQ ID NO: 12130 - DNA, 22 bp, synthetic construct
  misc_feature 1..22: note = chemically synthesized
  source 1..22: mol_type = other DNA
attacatgatttgacagcaata

SEQ ID NO: 12131 - DNA, 22 bp, synthetic construct
  misc_feature 1..22: note = chemically synthesized
  source 1..22: mol_type = other DNA
catgatttgacagcaatattga

SEQ ID NO: 12132 - DNA, 22 bp, synthetic construct
  misc_feature 1..22: note = chemically synthesized
  source 1..22: mol_type = other DNA
gacagcaatattgaagagtcta

SEQ ID NO: 12133 - DNA, 22 bp, synthetic construct
  misc_feature 1..22: note = chemically synthesized
  source 1..22: mol_type = other DNA
acagcaatattgaagagtctaa

SEQ ID NO: 12134 - DNA, 22 bp, synthetic construct
  misc_feature 1..22: note = chemically synthesized
  source 1..22: mol_type = other DNA
aagagtctaacagccagcacgc

SEQ ID NO: 12135 - DNA, 22 bp, synthetic construct
  misc_feature 1..22: note = chemically synthesized
  source 1..22: mol_type = other DNA
acagccagcacgcaggttggta

SEQ ID NO: 12136 - DNA, 22 bp, synthetic construct
  misc_feature 1..22: note = chemically synthesized
  source 1..22: mol_type = other DNA
gtaagtactggttctttgttag

SEQ ID NO: 12137 - DNA, 22 bp, synthetic construct
  misc_feature 1..22: note = chemically synthesized
  source 1..22: mol_type = other DNA
gttctttgttagctaggttttc

SEQ ID NO: 12138 - DNA, 22 bp, synthetic construct
  misc_feature 1..22: note = chemically synthesized
  source 1..22: mol_type = other DNA
tttgttagctaggttttcttct

SEQ ID NO: 12139 - DNA, 22 bp, synthetic construct
  misc_feature 1..22: note = chemically synthesized
  source 1..22: mol_type = other DNA
tgttagctaggttttcttcttc

SEQ ID NO: 12140 - DNA, 22 bp, synthetic construct
  misc_feature 1..22: note = chemically synthesized
  source 1..22: mol_type = other DNA
gttagctaggttttcttcttct

SEQ ID NO: 12141 - DNA, 22 bp, synthetic construct
  misc_feature 1..22: note = chemically synthesized
  source 1..22: mol_type = other DNA
ttagctaggttttcttcttctt

SEQ ID NO: 12142 - DNA, 22 bp, synthetic construct
  misc_feature 1..22: note = chemically synthesized
  source 1..22: mol_type = other DNA
gctaggttttcttcttcttcat

SEQ ID NO: 12143 - DNA, 22 bp, synthetic construct
  misc_feature 1..22: note = chemically synthesized
  source 1..22: mol_type = other DNA
ggttttcttcttcttcattttt

SEQ ID NO: 12144 - DNA, 22 bp, synthetic construct
  misc_feature 1..22: note = chemically synthesized
  source 1..22: mol_type = other DNA
tcttcttcttcatttttaaaac

SEQ ID NO: 12145 - DNA, 22 bp, synthetic construct
  misc_feature 1..22: note = chemically synthesized
  source 1..22: mol_type = other DNA
cttcttcttcatttttaaaact

SEQ ID NO: 12146 - DNA, 22 bp, synthetic construct
  misc_feature 1..22: note = chemically synthesized
  source 1..22: mol_type = other DNA
ttcttcttcatttttaaaacta

SEQ ID NO: 12147 - DNA, 22 bp, synthetic construct
  misc_feature 1..22: note = chemically synthesized
  source 1..22: mol_type = other DNA
cttcttcatttttaaaactaaa

SEQ ID NO: 12148 - DNA, 22 bp, synthetic construct
  misc_feature 1..22: note = chemically synthesized
  source 1..22: mol_type = other DNA
ttcttcatttttaaaactaaat

SEQ ID NO: 12149 - DNA, 22 bp, synthetic construct
  misc_feature 1..22: note = chemically synthesized
  source 1..22: mol_type = other DNA
cttcatttttaaaactaaatag

SEQ ID NO: 12150 - DNA, 22 bp, synthetic construct
  misc_feature 1..22: note = chemically synthesized
  source 1..22: mol_type = other DNA
ttcatttttaaaactaaataga

SEQ ID NO: 12151 - DNA, 22 bp, synthetic construct
  misc_feature 1..22: note = chemically synthesized
  source 1..22: mol_type = other DNA
catttttaaaactaaatagatc

SEQ ID NO: 12152 - DNA, 22 bp, synthetic construct
  misc_feature 1..22: note = chemically synthesized
  source 1..22: mol_type = other DNA
atttttaaaactaaatagatcg

SEQ ID NO: 12153 - DNA, 22 bp, synthetic construct
  misc_feature 1..22: note = chemically synthesized
  source 1..22: mol_type = other DNA
ttaaaactaaatagatcgacaa

SEQ ID NO: 12154 - DNA, 22 bp, synthetic construct
  misc_feature 1..22: note = chemically synthesized
  source 1..22: mol_type = other DNA
taaaactaaatagatcgacaat

SEQ ID NO: 12155 - DNA, 22 bp, synthetic construct
  misc_feature 1..22: note = chemically synthesized
  source 1..22: mol_type = other DNA
aaaactaaatagatcgacaatg

SEQ ID NO: 12156 - DNA, 22 bp, synthetic construct
  misc_feature 1..22: note = chemically synthesized
  source 1..22: mol_type = other DNA
aaactaaatagatcgacaatgc

SEQ ID NO: 12157 - DNA, 22 bp, synthetic construct
  misc_feature 1..22: note = chemically synthesized
  source 1..22: mol_type = other DNA
aatagatcgacaatgcttatga

SEQ ID NO: 12158 - DNA, 22 bp, synthetic construct
  misc_feature 1..22: note = chemically synthesized
  source 1..22: mol_type = other DNA
atgatgcatttatgtttaataa

SEQ ID NO: 12159 - DNA, 22 bp, synthetic construct
  misc_feature 1..22: note = chemically synthesized
  source 1..22: mol_type = other DNA
tgatgcatttatgtttaataaa

SEQ ID NO: 12160 - DNA, 22 bp, synthetic construct
  misc_feature 1..22: note = chemically synthesized
  source 1..22: mol_type = other DNA
atgtttaataaacactgttcag

SEQ ID NO: 12161 - DNA, 22 bp, synthetic construct
  misc_feature 1..22: note = chemically synthesized
  source 1..22: mol_type = other DNA
tgtttaataaacactgttcagt

SEQ ID NO: 12162 - DNA, 22 bp, synthetic construct
  misc_feature 1..22: note = chemically synthesized
  source 1..22: mol_type = other DNA
aataaacactgttcagttcatg

SEQ ID NO: 12163 - DNA, 22 bp, synthetic construct
  misc_feature 1..22: note = chemically synthesized
  source 1..22: mol_type = other DNA
ataaacactgttcagttcatga

SEQ ID NO: 12164 - DNA, 22 bp, synthetic construct
  misc_feature 1..22: note = chemically synthesized
  source 1..22: mol_type = other DNA
ttcagttcatgatttggtcatg

SEQ ID NO: 12165 - DNA, 22 bp, synthetic construct
  misc_feature 1..22: note = chemically synthesized
  source 1..22: mol_type = other DNA
agttcatgatttggtcatgtaa

SEQ ID NO: 12166 - DNA, 22 bp, synthetic construct
  misc_feature 1..22: note = chemically synthesized
  source 1..22: mol_type = other DNA
atgatttggtcatgtaattcct

SEQ ID NO: 12167 - DNA, 22 bp, synthetic construct
  misc_feature 1..22: note = chemically synthesized
  source 1..22: mol_type = other DNA
ggtcatgtaattcctgttagaa

SEQ ID NO: 12168 - DNA, 22 bp, synthetic construct
  misc_feature 1..22: note = chemically synthesized
  source 1..22: mol_type = other DNA
gtcatgtaattcctgttagaaa

SEQ ID NO: 12169 - DNA, 22 bp, synthetic construct
  misc_feature 1..22: note = chemically synthesized
  source 1..22: mol_type = other DNA
ctgttagaaaacattcatctcc

SEQ ID NO: 12170 - DNA, 22 bp, synthetic construct
  misc_feature 1..22: note = chemically synthesized
  source 1..22: mol_type = other DNA
ttagaaaacattcatctccttg

SEQ ID NO: 12171 - DNA, 22 bp, synthetic construct
  misc_feature 1..22: note = chemically synthesized
  source 1..22: mol_type = other DNA
gaaaacattcatctccttggtt

SEQ ID NO: 12172 - DNA, 22 bp, synthetic construct
  misc_feature 1..22: note = chemically synthesized
  source 1..22: mol_type = other DNA
atctccttggtttaaaaaaatt

SEQ ID NO: 12173 - DNA, 22 bp, synthetic construct
  misc_feature 1..22: note = chemically synthesized
  source 1..22: mol_type = other DNA
cttggtttaaaaaaattaaaag

SEQ ID NO: 12174 - DNA, 22 bp, synthetic construct
  misc_feature 1..22: note = chemically synthesized
  source 1..22: mol_type = other DNA
ggtttaaaaaaattaaaagtgg

SEQ ID NO: 12175 - DNA, 22 bp, synthetic construct
  misc_feature 1..22: note = chemically synthesized
  source 1..22: mol_type = other DNA
gtttaaaaaaattaaaagtggg

SEQ ID NO: 12176 - DNA, 22 bp, synthetic construct
  misc_feature 1..22: note = chemically synthesized
  source 1..22: mol_type = other DNA
aaaaaaattaaaagtgggaaaa

SEQ ID NO: 12177 - DNA, 22 bp, synthetic construct
  misc_feature 1..22: note = chemically synthesized
  source 1..22: mol_type = other DNA
aaaaaattaaaagtgggaaaac

SEQ ID NO: 12178 - DNA, 22 bp, synthetic construct
  misc_feature 1..22: note = chemically synthesized
  source 1..22: mol_type = other DNA
aaagtgggaaaacaaagaaata

SEQ ID NO: 12179 - DNA, 22 bp, synthetic construct
  misc_feature 1..22: note = chemically synthesized
  source 1..22: mol_type = other DNA
tttttgtttggacttaccactt

SEQ ID NO: 12180 - DNA, 22 bp, synthetic construct
  misc_feature 1..22: note = chemically synthesized
  source 1..22: mol_type = other DNA
ttgtttggacttaccactttga

SEQ ID NO: 12181 - DNA, 22 bp, synthetic construct
  misc_feature 1..22: note = chemically synthesized
  source 1..22: mol_type = other DNA
tgtttggacttaccactttgaa

SEQ ID NO: 12182 - DNA, 22 bp, synthetic construct
  misc_feature 1..22: note = chemically synthesized
  source 1..22: mol_type = other DNA
gtttggacttaccactttgaaa

SEQ ID NO: 12183 - DNA, 22 bp, synthetic construct
  misc_feature 1..22: note = chemically synthesized
  source 1..22: mol_type = other DNA
tttggacttaccactttgaaat

SEQ ID NO: 12184 - DNA, 22 bp, synthetic construct
  misc_feature 1..22: note = chemically synthesized
  source 1..22: mol_type = other DNA
ggacttaccactttgaaatcaa

SEQ ID NO: 12185 - DNA, 22 bp, synthetic construct
  misc_feature 1..22: note = chemically synthesized
  source 1..22: mol_type = other DNA
gacttaccactttgaaatcaaa

SEQ ID NO: 12186 - DNA, 22 bp, synthetic construct
  misc_feature 1..22: note = chemically synthesized
  source 1..22: mol_type = other DNA
accactttgaaatcaaaatggg

SEQ ID NO: 12187 - DNA, 22 bp, synthetic construct
  misc_feature 1..22: note = chemically synthesized
  source 1..22: mol_type = other DNA
ccactttgaaatcaaaatggga

SEQ ID NO: 12188 - DNA, 22 bp, synthetic construct
  misc_feature 1..22: note = chemically synthesized
  source 1..22: mol_type = other DNA
tgaaatcaaaatgggaaacaaa

SEQ ID NO: 12189 - DNA, 22 bp, synthetic construct
  misc_feature 1..22: note = chemically synthesized
  source 1..22: mol_type = other DNA
gaaatcaaaatgggaaacaaaa

SEQ ID NO: 12190 - DNA, 22 bp, synthetic construct
  misc_feature 1..22: note = chemically synthesized
  source 1..22: mol_type = other DNA
aaatcaaaatgggaaacaaaag

SEQ ID NO: 12191 - DNA, 22 bp, synthetic construct
  misc_feature 1..22: note = chemically synthesized
  source 1..22: mol_type = other DNA
atttacacaaaaagtctgattt

SEQ ID NO: 12192 - DNA, 22 bp, synthetic construct
  misc_feature 1..22: note = chemically synthesized
  source 1..22: mol_type = other DNA
tttacacaaaaagtctgatttt

SEQ ID NO: 12193 - DNA, 22 bp, synthetic construct
  misc_feature 1..22: note = chemically synthesized
  source 1..22: mol_type = other DNA
acacaaaaagtctgattttaag

SEQ ID NO: 12194 - DNA, 22 bp, synthetic construct
  misc_feature 1..22: note = chemically synthesized
  source 1..22: mol_type = other DNA
cacaaaaagtctgattttaaga

SEQ ID NO: 12195 - DNA, 22 bp, synthetic construct
  misc_feature 1..22: note = chemically synthesized
  source 1..22: mol_type = other DNA
attttaagatatatgacatttc

SEQ ID NO: 12196 - DNA, 22 bp, synthetic construct
  misc_feature 1..22: note = chemically synthesized
  source 1..22: mol_type = other DNA
taagatatatgacatttcaagg

SEQ ID NO: 12197 - DNA, 22 bp, synthetic construct
  misc_feature 1..22: note = chemically synthesized
  source 1..22: mol_type = other DNA
aagatatatgacatttcaaggt

SEQ ID NO: 12198 - DNA, 22 bp, synthetic construct
  misc_feature 1..22: note = chemically synthesized
  source 1..22: mol_type = other DNA
agatatatgacatttcaaggtt

SEQ ID NO: 12199 - DNA, 22 bp, synthetic construct
  misc_feature 1..22: note = chemically synthesized
  source 1..22: mol_type = other DNA
caaggtttcagaagtatgtaat

SEQ ID NO: 12200 - DNA, 22 bp, synthetic construct
  misc_feature 1..22: note = chemically synthesized
  source 1..22: mol_type = other DNA
aaggtttcagaagtatgtaatg

SEQ ID NO: 12201 - DNA, 22 bp, synthetic construct
  misc_feature 1..22: note = chemically synthesized
  source 1..22: mol_type = other DNA
cagaagtatgtaatgaggtgtg

SEQ ID NO: 12202 - DNA, 22 bp, synthetic construct
  misc_feature 1..22: note = chemically synthesized
  source 1..22: mol_type = other DNA
agaagtatgtaatgaggtgtgt

SEQ ID NO: 12203 - DNA, 22 bp, synthetic construct
  misc_feature 1..22: note = chemically synthesized
  source 1..22: mol_type = other DNA
taattttttaaattatatatct

SEQ ID NO: 12204 - DNA, 22 bp, synthetic construct
  misc_feature 1..22: note = chemically synthesized
  source 1..22: mol_type = other DNA
attttttaaattatatatcttc

SEQ ID NO: 12205 - DNA, 22 bp, synthetic construct
  misc_feature 1..22: note = chemically synthesized
  source 1..22: mol_type = other DNA
tttaaattatatatcttcaatt

SEQ ID NO: 12206 - DNA, 22 bp, synthetic construct
  misc_feature 1..22: note = chemically synthesized
  source 1..22: mol_type = other DNA
ttaaattatatatcttcaattt

SEQ ID NO: 12207 - DNA, 22 bp, synthetic construct
  misc_feature 1..22: note = chemically synthesized
  source 1..22: mol_type = other DNA
taaattatatatcttcaattta

SEQ ID NO: 12208 - DNA, 22 bp, synthetic construct
  misc_feature 1..22: note = chemically synthesized
  source 1..22: mol_type = other DNA
aaattatatatcttcaatttaa

SEQ ID NO: 12209 - DNA, 22 bp, synthetic construct
  misc_feature 1..22: note = chemically synthesized
  source 1..22: mol_type = other DNA
aattatatatcttcaatttaaa

SEQ ID NO: 12210 - DNA, 22 bp, synthetic construct
  misc_feature 1..22: note = chemically synthesized
  source 1..22: mol_type = other DNA
tatatcttcaatttaaagtttt

SEQ ID NO: 12211 - DNA, 22 bp, synthetic construct
  misc_feature 1..22: note = chemically synthesized
  source 1..22: mol_type = other DNA
caatttaaagttttagttaaaa

SEQ ID NO: 12212 - DNA, 22 bp, synthetic construct
  misc_feature 1..22: note = chemically synthesized
  source 1..22: mol_type = other DNA
aatttaaagttttagttaaaac

SEQ ID NO: 12213 - DNA, 22 bp, synthetic construct
  misc_feature 1..22: note = chemically synthesized
  source 1..22: mol_type = other DNA
aaagttttagttaaaacataaa

SEQ ID NO: 12214 - DNA, 22 bp, synthetic construct
  misc_feature 1..22: note = chemically synthesized
  source 1..22: mol_type = other DNA
aagttttagttaaaacataaag

SEQ ID NO: 12215 - DNA, 22 bp, synthetic construct
  misc_feature 1..22: note = chemically synthesized
  source 1..22: mol_type = other DNA
tagttaaaacataaagattaac

SEQ ID NO: 12216 - DNA, 22 bp, synthetic construct
  misc_feature 1..22: note = chemically synthesized
  source 1..22: mol_type = other DNA
agttaaaacataaagattaacc

SEQ ID NO: 12217 - DNA, 22 bp, synthetic construct
  misc_feature 1..22: note = chemically synthesized
  source 1..22: mol_type = other DNA
gttaaaacataaagattaacct

SEQ ID NO: 12218 - DNA, 22 bp, synthetic construct
  misc_feature 1..22: note = chemically synthesized
  source 1..22: mol_type = other DNA
aaacataaagattaacctttca

SEQ ID NO: 12219 - DNA, 22 bp, synthetic construct
  misc_feature 1..22: note = chemically synthesized
  source 1..22: mol_type = other DNA
acctttcattagcaagctgtta

SEQ ID NO: 12220 - DNA, 22 bp, synthetic construct
  misc_feature 1..22: note = chemically synthesized
  source 1..22: mol_type = other DNA
tcattagcaagctgttagttat

SEQ ID NO: 12221 - DNA, 22 bp, synthetic construct
  misc_feature 1..22: note = chemically synthesized
  source 1..22: mol_type = other DNA
cattagcaagctgttagttatc

SEQ ID NO: 12222 - DNA, 22 bp, synthetic construct
  misc_feature 1..22: note = chemically synthesized
  source 1..22: mol_type = other DNA
attagcaagctgttagttatca

SEQ ID NO: 12223 - DNA, 22 bp, synthetic construct
  misc_feature 1..22: note = chemically synthesized
  source 1..22: mol_type = other DNA
gcaagctgttagttatcaccaa

SEQ ID NO: 12224 - DNA, 22 bp, synthetic construct
  misc_feature 1..22: note = chemically synthesized
  source 1..22: mol_type = other DNA
ttagttatcaccaaagcttttc

SEQ ID NO: 12225 - DNA, 22 bp, synthetic construct
  misc_feature 1..22: note = chemically synthesized
  source 1..22: mol_type = other DNA
gttatcaccaaagcttttcatg

SEQ ID NO: 12226 - DNA, 22 bp, synthetic construct
  misc_feature 1..22: note = chemically synthesized
  source 1..22: mol_type = other DNA
tcaccaaagcttttcatggatt

SEQ ID NO: 12227 - DNA, 22 bp, synthetic construct
  misc_feature 1..22: note = chemically synthesized
  source 1..22: mol_type = other DNA
ttcatggattaggaaaaaatca

SEQ ID NO: 12228 - DNA, 22 bp, synthetic construct
  misc_feature 1..22: note = chemically synthesized
  source 1..22: mol_type = other DNA
tcatggattaggaaaaaatcat

SEQ ID NO: 12229 - DNA, 22 bp, synthetic construct
  misc_feature 1..22: note = chemically synthesized
  source 1..22: mol_type = other DNA
catggattaggaaaaaatcatt

SEQ ID NO: 12230 - DNA, 22 bp, synthetic construct
  misc_feature 1..22: note = chemically synthesized
  source 1..22: mol_type = other DNA
atggattaggaaaaaatcattt

SEQ ID NO: 12231 - DNA, 22 bp, synthetic construct
  misc_feature 1..22: note = chemically synthesized
  source 1..22: mol_type = other DNA
ggaaaaaatcattttgtctcta

SEQ ID NO: 12232 - DNA, 22 bp, synthetic construct
  misc_feature 1..22: note = chemically synthesized
  source 1..22: mol_type = other DNA
tgtctctatgtcaaacatcttg

SEQ ID NO: 12233 - DNA, 22 bp, synthetic construct
  misc_feature 1..22: note = chemically synthesized
  source 1..22: mol_type = other DNA
gtctctatgtcaaacatcttgg

SEQ ID NO: 12234 - DNA, 22 bp, synthetic construct
  misc_feature 1..22: note = chemically synthesized
  source 1..22: mol_type = other DNA
tctctatgtcaaacatcttgga

SEQ ID NO: 12235 - DNA, 22 bp, synthetic construct
  misc_feature 1..22: note = chemically synthesized
  source 1..22: mol_type = other DNA
tatgtcaaacatcttggagttg

SEQ ID NO: 12236 - DNA, 22 bp, synthetic construct
  misc_feature 1..22: note = chemically synthesized
  source 1..22: mol_type = other DNA
tgtcaaacatcttggagttgat

SEQ ID NO: 12237 - DNA, 22 bp, synthetic construct
  misc_feature 1..22: note = chemically synthesized
  source 1..22: mol_type = other DNA
ggagttgatatttggggaaaca

SEQ ID NO: 12238 - DNA, 22 bp, synthetic construct
  misc_feature 1..22: note = chemically synthesized
  source 1..22: mol_type = other DNA
gagttgatatttggggaaacac

SEQ ID NO: 12239 - DNA, 22 bp, synthetic construct
  misc_feature 1..22: note = chemically synthesized
  source 1..22: mol_type = other DNA
atatttggggaaacacaatact

SEQ ID NO: 12240 - DNA, 22 bp, synthetic construct
  misc_feature 1..22: note = chemically synthesized
  source 1..22: mol_type = other DNA
ggggaaacacaatactcagttg

SEQ ID NO: 12241 - DNA, 22 bp, synthetic construct
  misc_feature 1..22: note = chemically synthesized
  source 1..22: mol_type = other DNA
gggaaacacaatactcagttga

SEQ ID NO: 12242 - DNA, 22 bp, synthetic construct
  misc_feature 1..22: note = chemically synthesized
  source 1..22: mol_type = other DNA
agttgagttccctaggggagaa

SEQ ID NO: 12243 - DNA, 22 bp, synthetic construct
  misc_feature 1..22: note = chemically synthesized
  source 1..22: mol_type = other DNA
agttccctaggggagaaaagca

SEQ ID NO: 12244 - DNA, 22 bp, synthetic construct
  misc_feature 1..22: note = chemically synthesized
  source 1..22: mol_type = other DNA
cctaggggagaaaagcaagctt

SEQ ID NO: 12245 - DNA, 22 bp, synthetic construct
  misc_feature 1..22: note = chemically synthesized
  source 1..22: mol_type = other DNA
ggggagaaaagcaagcttaaga

SEQ ID NO: 12246 - DNA, 22 bp, synthetic construct
  misc_feature 1..22: note = chemically synthesized
  source 1..22: mol_type = other DNA
aagaattgacataaagagtagg

SEQ ID NO: 12247 - DNA, 22 bp, synthetic construct
  misc_feature 1..22: note = chemically synthesized
  source 1..22: mol_type = other DNA
agaattgacataaagagtagga

SEQ ID NO: 12248 - DNA, 22 bp, synthetic construct
  misc_feature 1..22: note = chemically synthesized
  source 1..22: mol_type = other DNA
acataaagagtaggaagttagc

SEQ ID NO: 12249 - DNA, 22 bp, synthetic construct
  misc_feature 1..22: note = chemically synthesized
  source 1..22: mol_type = other DNA
gctaatgcaacatatatcactt

SEQ ID NO: 12250 - DNA, 22 bp, synthetic construct
  misc_feature 1..22: note = chemically synthesized
  source 1..22: mol_type = other DNA
atgcaacatatatcactttgtt

SEQ ID NO: 12251 - DNA, 22 bp, synthetic construct
  misc_feature 1..22: note = chemically synthesized
  source 1..22: mol_type = other DNA
tgttttttcacaactacagtga

SEQ ID NO: 12252 - DNA, 22 bp, synthetic construct
  misc_feature 1..22: note = chemically synthesized
  source 1..22: mol_type = other DNA
gttttttcacaactacagtgac

SEQ ID NO: 12253 - DNA, 22 bp, synthetic construct
  misc_feature 1..22: note = chemically synthesized
  source 1..22: mol_type = other DNA
ttttttcacaactacagtgact

SEQ ID NO: 12254 - DNA, 22 bp, synthetic construct
  misc_feature 1..22: note = chemically synthesized
  source 1..22: mol_type = other DNA
tttcacaactacagtgacttta

SEQ ID NO: 12255 - DNA, 22 bp, synthetic construct
  misc_feature 1..22: note = chemically synthesized
  source 1..22: mol_type = other DNA
ttcacaactacagtgactttat

SEQ ID NO: 12256 - DNA, 22 bp, synthetic construct
  misc_feature 1..22: note = chemically synthesized
  source 1..22: mol_type = other DNA
tcacaactacagtgactttatg

SEQ ID NO: 12257 - DNA, 22 bp, synthetic construct
  misc_feature 1..22: note = chemically synthesized
  source 1..22: mol_type = other DNA
cacaactacagtgactttatgt

SEQ ID NO: 12258 - DNA, 22 bp, synthetic construct
  misc_feature 1..22: note = chemically synthesized
  source 1..22: mol_type = other DNA
acaactacagtgactttatgta

SEQ ID NO: 12259 - DNA, 22 bp, synthetic construct
  misc_feature 1..22: note = chemically synthesized
  source 1..22: mol_type = other DNA
cagtgactttatgtatttccca

SEQ ID NO: 12260 - DNA, 22 bp, synthetic construct
  misc_feature 1..22: note = chemically synthesized
  source 1..22: mol_type = other DNA
tatgtatttcccagaggaaggc

SEQ ID NO: 12261 - DNA, 22 bp, synthetic construct
  misc_feature 1..22: note = chemically synthesized
  source 1..22: mol_type = other DNA
atgtatttcccagaggaaggca

SEQ ID NO: 12262 - DNA, 22 bp, synthetic construct
  misc_feature 1..22: note = chemically synthesized
  source 1..22: mol_type = other DNA
tgtatttcccagaggaaggcat

SEQ ID NO: 12263 - DNA, 22 bp, synthetic construct
  misc_feature 1..22: note = chemically synthesized
  source 1..22: mol_type = other DNA
cccagaggaaggcatacaggga

SEQ ID NO: 12264 - DNA, 22 bp, synthetic construct
  misc_feature 1..22: note = chemically synthesized
  source 1..22: mol_type = other DNA
ccagaggaaggcatacagggaa

SEQ ID NO: 12265 - DNA, 22 bp, synthetic construct
  misc_feature 1..22: note = chemically synthesized
  source 1..22: mol_type = other DNA
tcccatttggacaaacagcatg

SEQ ID NO: 12266 - DNA, 22 bp, synthetic construct
  misc_feature 1..22: note = chemically synthesized
  source 1..22: mol_type = other DNA
ggacaaacagcatgttctcaca

SEQ ID NO: 12267 - DNA, 22 bp, synthetic construct
  misc_feature 1..22: note = chemically synthesized
  source 1..22: mol_type = other DNA
gacaaacagcatgttctcacag

SEQ ID NO: 12268 - DNA, 22 bp, synthetic construct
  misc_feature 1..22: note = chemically synthesized
  source 1..22: mol_type = other DNA
tcacaggaagcatttatcacac

SEQ ID NO: 12269 - DNA, 22 bp, synthetic construct
  misc_feature 1..22: note = chemically synthesized
  source 1..22: mol_type = other DNA
acaggaagcatttatcacactt

SEQ ID NO: 12270 - DNA, 22 bp, synthetic construct
  misc_feature 1..22: note = chemically synthesized
  source 1..22: mol_type = other DNA
atcacacttacttgtcaacttt

SEQ ID NO: 12271 - DNA, 22 bp, synthetic construct
  misc_feature 1..22: note = chemically synthesized
  source 1..22: mol_type = other DNA
tcacacttacttgtcaactttc

SEQ ID NO: 12272 - DNA, 22 bp, synthetic construct
  misc_feature 1..22: note = chemically synthesized
  source 1..22: mol_type = other DNA
acttgtcaactttctagaatca

SEQ ID NO: 12273 - DNA, 22 bp, synthetic construct
  misc_feature 1..22: note = chemically synthesized
  source 1..22: mol_type = other DNA
cttgtcaactttctagaatcaa

SEQ ID NO: 12274 - DNA, 22 bp, synthetic construct
  misc_feature 1..22: note = chemically synthesized
  source 1..22: mol_type = other DNA
gtcaactttctagaatcaaatc

SEQ ID NO: 12275 - DNA, 22 bp, synthetic construct
  misc_feature 1..22: note = chemically synthesized
  source 1..22: mol_type = other DNA
tcaactttctagaatcaaatct

SEQ ID NO: 12276 - DNA, 22 bp, synthetic construct
  misc_feature 1..22: note = chemically synthesized
  source 1..22: mol_type = other DNA
tctagaatcaaatctagtagct

SEQ ID NO: 12277 - DNA, 22 bp, synthetic construct
  misc_feature 1..22: note = chemically synthesized
  source 1..22: mol_type = other DNA
ctagaatcaaatctagtagctg

SEQ ID NO: 12278 - DNA, 22 bp, synthetic construct
  misc_feature 1..22: note = chemically synthesized
  source 1..22: mol_type = other DNA
tagaatcaaatctagtagctga

SEQ ID NO: 12279 - DNA, 22 bp, synthetic construct
  misc_feature 1..22: note = chemically synthesized
  source 1..22: mol_type = other DNA
gaatcaaatctagtagctgaca

SEQ ID NO: 12280 - DNA, 22 bp, synthetic construct
  misc_feature 1..22: note = chemically synthesized
  source 1..22: mol_type = other DNA
gtagctgacagtaccaggatca

SEQ ID NO: 12281 - DNA, 22 bp, synthetic construct
  misc_feature 1..22: note = chemically synthesized
  source 1..22: mol_type = other DNA
acagtaccaggatcaggggtgc

SEQ ID NO: 12282 - DNA, 22 bp, synthetic construct
  misc_feature 1..22: note = chemically synthesized
  source 1..22: mol_type = other DNA
agcacccccagaaagctgactg

SEQ ID NO: 12283 - DNA, 22 bp, synthetic construct
  misc_feature 1..22: note = chemically synthesized
  source 1..22: mol_type = other DNA
actggccctgtggttcccactc

SEQ ID NO: 12284 - DNA, 22 bp, synthetic construct
  misc_feature 1..22: note = chemically synthesized
  source 1..22: mol_type = other DNA
gccctgtggttcccactccaga

SEQ ID NO: 12285 - DNA, 22 bp, synthetic construct
  misc_feature 1..22: note = chemically synthesized
  source 1..22: mol_type = other DNA
tggttcccactccagacatgat

SEQ ID NO: 12286 - DNA, 22 bp, synthetic construct
  misc_feature 1..22: note = chemically synthesized
  source 1..22: mol_type = other DNA
ccactccagacatgatgtcagc

SEQ ID NO: 12287 - DNA, 22 bp, synthetic construct
  misc_feature 1..22: note = chemically synthesized
  source 1..22: mol_type = other DNA
cagacatgatgtcagctgtgaa

SEQ ID NO: 12288 - DNA, 22 bp, synthetic construct
  misc_feature 1..22: note = chemically synthesized
  source 1..22: mol_type = other DNA
tgaaatcagactgaaatgctga

SEQ ID NO: 12289 - DNA, 22 bp, synthetic construct
  misc_feature 1..22: note = chemically synthesized
  source 1..22: mol_type = other DNA
aaatgctgaaataacgataaaa

SEQ ID NO: 12290 - DNA, 22 bp, synthetic construct
  misc_feature 1..22: note = chemically synthesized
  source 1..22: mol_type = other DNA
aaataacgataaaaaaaaatac

SEQ ID NO: 12291 - DNA, 22 bp, synthetic construct
  misc_feature 1..22: note = chemically synthesized
  source 1..22: mol_type = other DNA
aactagcaaagtgagtaaagtc

SEQ ID NO: 12292 - DNA, 22 bp, synthetic construct
  misc_feature 1..22: note = chemically synthesized
  source 1..22: mol_type = other DNA
gcaaagtgagtaaagtcaaggg

SEQ ID NO: 12293 - DNA, 22 bp, synthetic construct
  misc_feature 1..22: note = chemically synthesized
  source 1..22: mol_type = other DNA
gttggaaaactcacaaagcagg

SEQ ID NO: 12294 - DNA, 22 bp, synthetic construct
  misc_feature 1..22: note = chemically synthesized
  source 1..22: mol_type = other DNA
ttggaaaactcacaaagcagga

SEQ ID NO: 12295 - DNA, 22 bp, synthetic construct
  misc_feature 1..22: note = chemically synthesized
  source 1..22: mol_type = other DNA
gaaaactcacaaagcaggacat

SEQ ID NO: 12296 - DNA, 22 bp, synthetic construct
  misc_feature 1..22: note = chemically synthesized
  source 1..22: mol_type = other DNA
acaaagcaggacataaagcaag

SEQ ID NO: 12297 - DNA, 22 bp, synthetic construct
  misc_feature 1..22: note = chemically synthesized
  source 1..22: mol_type = other DNA
gatatatctcattagtgtgaca

SEQ ID NO: 12298 - DNA, 22 bp, synthetic construct
  misc_feature 1..22: note = chemically synthesized
  source 1..22: mol_type = other DNA
attagtgtgacatctgggagga

SEQ ID NO: 12299 - DNA, 22 bp, synthetic construct
  misc_feature 1..22: note = chemically synthesized
  source 1..22: mol_type = other DNA
gtgtgacatctgggaggacaaa

SEQ ID NO: 12300 - DNA, 22 bp, synthetic construct
  misc_feature 1..22: note = chemically synthesized
  source 1..22: mol_type = other DNA
ggaggacaaagcatccaaaccc

SEQ ID NO: 12301 - DNA, 22 bp, synthetic construct
  misc_feature 1..22: note = chemically synthesized
  source 1..22: mol_type = other DNA
tcttctatataagtggtgagat

SEQ ID NO: 12302 - DNA, 22 bp, synthetic construct
  misc_feature 1..22: note = chemically synthesized
  source 1..22: mol_type = other DNA
cttctatataagtggtgagatg

SEQ ID NO: 12303 - DNA, 22 bp, synthetic construct
  misc_feature 1..22: note = chemically synthesized
  source 1..22: mol_type = other DNA
ttctatataagtggtgagatga

SEQ ID NO: 12304 - DNA, 22 bp, synthetic construct
  misc_feature 1..22: note = chemically synthesized
  source 1..22: mol_type = other DNA
ctatataagtggtgagatgatg

SEQ ID NO: 12305 - DNA, 22 bp, synthetic construct
  misc_feature 1..22: note = chemically synthesized
  source 1..22: mol_type = other DNA
tatataagtggtgagatgatga

SEQ ID NO: 12306 - DNA, 22 bp, synthetic construct
  misc_feature 1..22: note = chemically synthesized
  source 1..22: mol_type = other DNA
tataagtggtgagatgatgaag

SEQ ID NO: 12307 - DNA, 22 bp, synthetic construct
  misc_feature 1..22: note = chemically synthesized
  source 1..22: mol_type = other DNA
taagagggcttctgcccccttg

SEQ ID NO: 12308 - DNA, 22 bp, synthetic construct
  misc_feature 1..22: note = chemically synthesized
  source 1..22: mol_type = other DNA
ctgcccccttgaagacttcaga

SEQ ID NO: 12309 - DNA, 22 bp, synthetic construct
  misc_feature 1..22: note = chemically synthesized
  source 1..22: mol_type = other DNA
tgcccccttgaagacttcagat

SEQ ID NO: 12310 - DNA, 22 bp, synthetic construct
  misc_feature 1..22: note = chemically synthesized
  source 1..22: mol_type = other DNA
cccccttgaagacttcagatgc

SEQ ID NO: 12311 - DNA, 22 bp, synthetic construct
  misc_feature 1..22: note = chemically synthesized
  source 1..22: mol_type = other DNA
gaagacttcagatgctggggaa

SEQ ID NO: 12312 - DNA, 22 bp, synthetic construct
  misc_feature 1..22: note = chemically synthesized
  source 1..22: mol_type = other DNA
aagacttcagatgctggggaaa

SEQ ID NO: 12313 - DNA, 22 bp, synthetic construct
  misc_feature 1..22: note = chemically synthesized
  source 1..22: mol_type = other DNA
cagatgctggggaaaggataga

SEQ ID NO: 12314 - DNA, 22 bp, synthetic construct
  misc_feature 1..22: note = chemically synthesized
  source 1..22: mol_type = other DNA
agatgctggggaaaggatagat

SEQ ID NO: 12315 - DNA, 22 bp, synthetic construct
  misc_feature 1..22: note = chemically synthesized
  source 1..22: mol_type = other DNA
gggaaaggatagataagaataa

SEQ ID NO: 12316 - DNA, 22 bp, synthetic construct
  misc_feature 1..22: note = chemically synthesized
  source 1..22: mol_type = other DNA
ttggagcctgggaaataatgac

SEQ ID NO: 12317 - DNA, 22 bp, synthetic construct
  misc_feature 1..22: note = chemically synthesized
  source 1..22: mol_type = other DNA
tggagcctgggaaataatgact

SEQ ID NO: 12318 - DNA, 22 bp, synthetic construct
  misc_feature 1..22: note = chemically synthesized
  source 1..22: mol_type = other DNA
ggagcctgggaaataatgacta

SEQ ID NO: 12319 - DNA, 22 bp, synthetic construct
  misc_feature 1..22: note = chemically synthesized
  source 1..22: mol_type = other DNA
gagcctgggaaataatgactag

SEQ ID NO: 12320 - DNA, 22 bp, synthetic construct
  misc_feature 1..22: note = chemically synthesized
  source 1..22: mol_type = other DNA
ggaaataatgactagcgataaa

SEQ ID NO: 12321 - DNA, 22 bp, synthetic construct
  misc_feature 1..22: note = chemically synthesized
  source 1..22: mol_type = other DNA
gcgataaacctgaagggaagtt

SEQ ID NO: 12322 - DNA, 22 bp, synthetic construct
  misc_feature 1..22: note = chemically synthesized
  source 1..22: mol_type = other DNA
aagggaagttaagtatacgatc

SEQ ID NO: 12323 - DNA, 22 bp, synthetic construct
  misc_feature 1..22: note = chemically synthesized
  source 1..22: mol_type = other DNA
agtatacgatccccagataata

SEQ ID NO: 12324 - DNA, 22 bp, synthetic construct
  misc_feature 1..22: note = chemically synthesized
  source 1..22: mol_type = other DNA
aggagaaaggcaatgtgattct

SEQ ID NO: 12325 - DNA, 22 bp, synthetic construct
  misc_feature 1..22: note = chemically synthesized
  source 1..22: mol_type = other DNA
tgcagccattgtagccagagat

SEQ ID NO: 12326 - DNA, 22 bp, synthetic construct
  misc_feature 1..22: note = chemically synthesized
  source 1..22: mol_type = other DNA
cagccattgtagccagagataa

SEQ ID NO: 12327 - DNA, 22 bp, synthetic construct
  misc_feature 1..22: note = chemically synthesized
  source 1..22: mol_type = other DNA
tagccagagataataagccctt

SEQ ID NO: 12328 - DNA, 22 bp, synthetic construct
  misc_feature 1..22: note = chemically synthesized
  source 1..22: mol_type = other DNA
gaggaaggggccaggggaattt

SEQ ID NO: 12329 - DNA, 22 bp, synthetic construct
  misc_feature 1..22: note = chemically synthesized
  source 1..22: mol_type = other DNA
aggaaggggccaggggaatttt

SEQ ID NO: 12330 - DNA, 22 bp, synthetic construct
  misc_feature 1..22: note = chemically synthesized
  source 1..22: mol_type = other DNA
ttctaaggatagacagtattaa

SEQ ID NO: 12331 - DNA, 22 bp, synthetic construct
  misc_feature 1..22: note = chemically synthesized
  source 1..22: mol_type = other DNA
tctaaggatagacagtattaat

SEQ ID NO: 12332 - DNA, 22 bp, synthetic construct
  misc_feature 1..22: note = chemically synthesized
  source 1..22: mol_type = other DNA
ctaaggatagacagtattaatg

SEQ ID NO: 12333 - DNA, 22 bp, synthetic construct
  misc_feature 1..22: note = chemically synthesized
  source 1..22: mol_type = other DNA
taaggatagacagtattaatgc

SEQ ID NO: 12334 - DNA, 22 bp, synthetic construct
  misc_feature 1..22: note = chemically synthesized
  source 1..22: mol_type = other DNA
aggatagacagtattaatgcag

SEQ ID NO: 12335 - DNA, 22 bp, synthetic construct
  misc_feature 1..22: note = chemically synthesized
  source 1..22: mol_type = other DNA
atgcagcactctcttctgctat

SEQ ID NO: 12336 - DNA, 22 bp, synthetic construct
  misc_feature 1..22: note = chemically synthesized
  source 1..22: mol_type = other DNA
tcttctgctattaaactctcat

SEQ ID NO: 12337 - DNA, 22 bp, synthetic construct
  misc_feature 1..22: note = chemically synthesized
  source 1..22: mol_type = other DNA
ttctgctattaaactctcattg

SEQ ID NO: 12338 - DNA, 22 bp, synthetic construct
  misc_feature 1..22: note = chemically synthesized
  source 1..22: mol_type = other DNA
ctgctattaaactctcattggc

SEQ ID NO: 12339 - DNA, 22 bp, synthetic construct
  misc_feature 1..22: note = chemically synthesized
  source 1..22: mol_type = other DNA
tgctattaaactctcattggct

SEQ ID NO: 12340 - DNA, 22 bp, synthetic construct
  misc_feature 1..22: note = chemically synthesized
  source 1..22: mol_type = other DNA
ctattaaactctcattggcttc

SEQ ID NO: 12341 - DNA, 22 bp, synthetic construct
  misc_feature 1..22: note = chemically synthesized
  source 1..22: mol_type = other DNA
ttaaactctcattggcttctaa

SEQ ID NO: 12342 - DNA, 22 bp, synthetic construct
  misc_feature 1..22: note = chemically synthesized
  source 1..22: mol_type = other DNA
aactctcattggcttctaaaag

SEQ ID NO: 12343 - DNA, 22 bp, synthetic construct
  misc_feature 1..22: note = chemically synthesized
  source 1..22: mol_type = other DNA
tcattggcttctaaaaggagtt

SEQ ID NO: 12344 - DNA, 22 bp, synthetic construct
  misc_feature 1..22: note = chemically synthesized
  source 1..22: mol_type = other DNA
attggcttctaaaaggagtttc

SEQ ID NO: 12345 - DNA, 22 bp, synthetic construct
  misc_feature 1..22: note = chemically synthesized
  source 1..22: mol_type = other DNA
gcttctaaaaggagtttcggtg

SEQ ID NO: 12346 - DNA, 22 bp, synthetic construct
  misc_feature 1..22: note = chemically synthesized
  source 1..22: mol_type = other DNA
ctaaaaggagtttcggtgagtg

SEQ ID NO: 12347 - DNA, 22 bp, synthetic construct
  misc_feature 1..22: note = chemically synthesized
  source 1..22: mol_type = other DNA
taaaaggagtttcggtgagtga

SEQ ID NO: 12348 - DNA, 22 bp, synthetic construct
  misc_feature 1..22: note = chemically synthesized
  source 1..22: mol_type = other DNA
aaaggagtttcggtgagtgatt

SEQ ID NO: 12349 - DNA, 22 bp, synthetic construct
  misc_feature 1..22: note = chemically synthesized
  source 1..22: mol_type = other DNA
cggtgagtgatttgctgagatg

SEQ ID NO: 12350 - DNA, 22 bp, synthetic construct
  misc_feature 1..22: note = chemically synthesized
  source 1..22: mol_type = other DNA
ggtgagtgatttgctgagatgt

SEQ ID NO: 12351 - DNA, 22 bp, synthetic construct
  misc_feature 1..22: note = chemically synthesized
  source 1..22: mol_type = other DNA
gctgagatgttgcattttcatg

SEQ ID NO: 12352 - DNA, 22 bp, synthetic construct
  misc_feature 1..22: note = chemically synthesized
  source 1..22: mol_type = other DNA
ctgagatgttgcattttcatgg

SEQ ID NO: 12353 - DNA, 22 bp, synthetic construct
  misc_feature 1..22: note = chemically synthesized
  source 1..22: mol_type = other DNA
agatgttgcattttcatggctg

SEQ ID NO: 12354 - DNA, 22 bp, synthetic construct
  misc_feature 1..22: note = chemically synthesized
  source 1..22: mol_type = other DNA
cattttcatggctgctgccttt

SEQ ID NO: 12355 - DNA, 22 bp, synthetic construct
  misc_feature 1..22: note = chemically synthesized
  source 1..22: mol_type = other DNA
tcatggctgctgcctttaggta

SEQ ID NO: 12356 - DNA, 22 bp, synthetic construct
  misc_feature 1..22: note = chemically synthesized
  source 1..22: mol_type = other DNA
catggctgctgcctttaggtat

SEQ ID NO: 12357 - DNA, 22 bp, synthetic construct
  misc_feature 1..22: note = chemically synthesized
  source 1..22: mol_type = other DNA
atggctgctgcctttaggtatt

SEQ ID NO: 12358 - DNA, 22 bp, synthetic construct
  misc_feature 1..22: note = chemically synthesized
  source 1..22: mol_type = other DNA
ctgcctttaggtattattgcaa

SEQ ID NO: 12359 - DNA, 22 bp, synthetic construct
  misc_feature 1..22: note = chemically synthesized
  source 1..22: mol_type = other DNA
cctttaggtattattgcaacag

SEQ ID NO: 12360 - DNA, 22 bp, synthetic construct
  misc_feature 1..22: note = chemically synthesized
  source 1..22: mol_type = other DNA
taggtattattgcaacagtttg

SEQ ID NO: 12361 - DNA, 22 bp, synthetic construct
  misc_feature 1..22: note = chemically synthesized
  source 1..22: mol_type = other DNA
aggtattattgcaacagtttgg

SEQ ID NO: 12362 - DNA, 22 bp, synthetic construct
  misc_feature 1..22: note = chemically synthesized
  source 1..22: mol_type = other DNA
ggtattattgcaacagtttgga

SEQ ID NO: 12363 - DNA, 22 bp, synthetic construct
  misc_feature 1..22: note = chemically synthesized
  source 1..22: mol_type = other DNA
ttgcaacagtttggaattttga

SEQ ID NO: 12364 - DNA, 22 bp, synthetic construct
  misc_feature 1..22: note = chemically synthesized
  source 1..22: mol_type = other DNA
caacagtttggaattttgaaat

SEQ ID NO: 12365 - DNA, 22 bp, synthetic construct
  misc_feature 1..22: note = chemically synthesized
  source 1..22: mol_type = other DNA
ggaattttgaaattaaaacagt

SEQ ID NO: 12366 - DNA, 22 bp, synthetic construct
  misc_feature 1..22: note = chemically synthesized
  source 1..22: mol_type = other DNA
gaattttgaaattaaaacagtt

SEQ ID NO: 12367 - DNA, 22 bp, synthetic construct
  misc_feature 1..22: note = chemically synthesized
  source 1..22: mol_type = other DNA
tgaaattaaaacagttctgtaa

SEQ ID NO: 12368 - DNA, 22 bp, synthetic construct
  misc_feature 1..22: note = chemically synthesized
  source 1..22: mol_type = other DNA
gaaattaaaacagttctgtaaa

SEQ ID NO: 12369 - DNA, 22 bp, synthetic construct
  misc_feature 1..22: note = chemically synthesized
  source 1..22: mol_type = other DNA
aaattaaaacagttctgtaaaa

SEQ ID NO: 12370 - DNA, 22 bp, synthetic construct
  misc_feature 1..22: note = chemically synthesized
  source 1..22: mol_type = other DNA
aaacagttctgtaaaaccagtt

SEQ ID NO: 12371 - DNA, 22 bp, synthetic construct
  misc_feature 1..22: note = chemically synthesized
  source 1..22: mol_type = other DNA
tgtaaaaccagtttagttttgt

SEQ ID NO: 12372 - DNA, 22 bp, synthetic construct
  misc_feature 1..22: note = chemically synthesized
  source 1..22: mol_type = other DNA
taaaaccagtttagttttgtaa

SEQ ID NO: 12373 - DNA, 22 bp, synthetic construct
  misc_feature 1..22: note = chemically synthesized
  source 1..22: mol_type = other DNA
agttttgtaaagtgtatgcatc

SEQ ID NO: 12374 - DNA, 22 bp, synthetic construct
  misc_feature 1..22: note = chemically synthesized
  source 1..22: mol_type = other DNA
gttttgtaaagtgtatgcatca

SEQ ID NO: 12375 - DNA, 22 bp, synthetic construct
  misc_feature 1..22: note = chemically synthesized
  source 1..22: mol_type = other DNA
tgtaaagtgtatgcatcaaaga

SEQ ID NO: 12376 - DNA, 22 bp, synthetic construct
  misc_feature 1..22: note = chemically synthesized
  source 1..22: mol_type = other DNA
gtaaagtgtatgcatcaaagat

SEQ ID NO: 12377 - DNA, 22 bp, synthetic construct
  misc_feature 1..22: note = chemically synthesized
  source 1..22: mol_type = other DNA
taaagtgtatgcatcaaagatg

SEQ ID NO: 12378 - DNA, 22 bp, synthetic construct
  misc_feature 1..22: note = chemically synthesized
  source 1..22: mol_type = other DNA
cattcagacattactgagttac

SEQ ID NO: 12379 - DNA, 22 bp, synthetic construct
  misc_feature 1..22: note = chemically synthesized
  source 1..22: mol_type = other DNA
attcagacattactgagttaca

SEQ ID NO: 12380 - DNA, 22 bp, synthetic construct
  misc_feature 1..22: note = chemically synthesized
  source 1..22: mol_type = other DNA
agacattactgagttacaacta

SEQ ID NO: 12381 - DNA, 22 bp, synthetic construct
  misc_feature 1..22: note = chemically synthesized
  source 1..22: mol_type = other DNA
ctgagttacaactatggtgcca

SEQ ID NO: 12382 - DNA, 22 bp, synthetic construct
  misc_feature 1..22: note = chemically synthesized
  source 1..22: mol_type = other DNA
agttacaactatggtgccaggt

SEQ ID NO: 12383 - DNA, 22 bp, synthetic construct
  misc_feature 1..22: note = chemically synthesized
  source 1..22: mol_type = other DNA
caactatggtgccaggtactgt

SEQ ID NO: 12384 - DNA, 22 bp, synthetic construct
  misc_feature 1..22: note = chemically synthesized
  source 1..22: mol_type = other DNA
tggtgccaggtactgtgtcagg

SEQ ID NO: 12385 - DNA, 22 bp, synthetic construct
  misc_feature 1..22: note = chemically synthesized
  source 1..22: mol_type = other DNA
tgtcagggtactaggggtatgg

SEQ ID NO: 12386 - DNA, 22 bp, synthetic construct
  misc_feature 1..22: note = chemically synthesized
  source 1..22: mol_type = other DNA
ggggtatggggataaaccagac

SEQ ID NO: 12387 - DNA, 22 bp, synthetic construct
  misc_feature 1..22: note = chemically synthesized
  source 1..22: mol_type = other DNA
cctctttgatctaaagcagcat

SEQ ID NO: 12388 - DNA, 22 bp, synthetic construct
  misc_feature 1..22: note = chemically synthesized
  source 1..22: mol_type = other DNA
tttgatctaaagcagcatgagg

SEQ ID NO: 12389 - DNA, 22 bp, synthetic construct
  misc_feature 1..22: note = chemically synthesized
  source 1..22: mol_type = other DNA
tgatctaaagcagcatgaggcc

SEQ ID NO: 12390 - DNA, 22 bp, synthetic construct
  misc_feature 1..22: note = chemically synthesized
  source 1..22: mol_type = other DNA
gatctaaagcagcatgaggcca

SEQ ID NO: 12391 - DNA, 22 bp, synthetic construct
  misc_feature 1..22: note = chemically synthesized
  source 1..22: mol_type = other DNA
atctaaagcagcatgaggccag

SEQ ID NO: 12392 - DNA, 22 bp, synthetic construct
  misc_feature 1..22: note = chemically synthesized
  source 1..22: mol_type = other DNA
aagcagcatgaggccaggtgag

SEQ ID NO: 12393 - DNA, 22 bp, synthetic construct
  misc_feature 1..22: note = chemically synthesized
  source 1..22: mol_type = other DNA
caatataatgtgataaaatgtg

SEQ ID NO: 12394 - DNA, 22 bp, synthetic construct
  misc_feature 1..22: note = chemically synthesized
  source 1..22: mol_type = other DNA
aatataatgtgataaaatgtgc

SEQ ID NO: 12395 - DNA, 22 bp, synthetic construct
  misc_feature 1..22: note = chemically synthesized
  source 1..22: mol_type = other DNA
ggtactaagggatcatagagaa

SEQ ID NO: 12396 - DNA, 22 bp, synthetic construct
  misc_feature 1..22: note = chemically synthesized
  source 1..22: mol_type = other DNA
agggatcatagagaaaggaaca

SEQ ID NO: 12397 - DNA, 22 bp, synthetic construct
  misc_feature 1..22: note = chemically synthesized
  source 1..22: mol_type = other DNA
aatggggaaacaattgatagag

SEQ ID NO: 12398 - DNA, 22 bp, synthetic construct
  misc_feature 1..22: note = chemically synthesized
  source 1..22: mol_type = other DNA
atagagagagaatattttcatc

SEQ ID NO: 12399 - DNA, 22 bp, synthetic construct
  misc_feature 1..22: note = chemically synthesized
  source 1..22: mol_type = other DNA
tcatctgggtcttaaaagatga

SEQ ID NO: 12400 - DNA, 22 bp, synthetic construct
  misc_feature 1..22: note = chemically synthesized
  source 1..22: mol_type = other DNA
catctgggtcttaaaagatgag

SEQ ID NO: 12401 - DNA, 22 bp, synthetic construct
  misc_feature 1..22: note = chemically synthesized
  source 1..22: mol_type = other DNA
atctgggtcttaaaagatgagt

SEQ ID NO: 12402 - DNA, 22 bp, synthetic construct
  misc_feature 1..22: note = chemically synthesized
  source 1..22: mol_type = other DNA
ggtcttaaaagatgagtaggcg

SEQ ID NO: 12403 - DNA, 22 bp, synthetic construct
  misc_feature 1..22: note = chemically synthesized
  source 1..22: mol_type = other DNA
aaaagatgagtaggcgttctct

SEQ ID NO: 12404 - DNA, 22 bp, synthetic construct
  misc_feature 1..22: note = chemically synthesized
  source 1..22: mol_type = other DNA
aaagatgagtaggcgttctctc

SEQ ID NO: 12405 - DNA, 22 bp, synthetic construct
  misc_feature 1..22: note = chemically synthesized
  source 1..22: mol_type = other DNA
tctctctttaaatgtctgatat

SEQ ID NO: 12406 - DNA, 22 bp, synthetic construct
  misc_feature 1..22: note = chemically synthesized
  source 1..22: mol_type = other DNA
tctctttaaatgtctgatataa

SEQ ID NO: 12407 - DNA, 22 bp, synthetic construct
  misc_feature 1..22: note = chemically synthesized
  source 1..22: mol_type = other DNA
tctttaaatgtctgatataagg

SEQ ID NO: 12408 - DNA, 22 bp, synthetic construct
  misc_feature 1..22: note = chemically synthesized
  source 1..22: mol_type = other DNA
tttaaatgtctgatataagggc

SEQ ID NO: 12409 - DNA, 22 bp, synthetic construct
  misc_feature 1..22: note = chemically synthesized
  source 1..22: mol_type = other DNA
taaatgtctgatataagggcat

SEQ ID NO: 12410 - DNA, 22 bp, synthetic construct
  misc_feature 1..22: note = chemically synthesized
  source 1..22: mol_type = other DNA
aaatgtctgatataagggcatt

SEQ ID NO: 12411 - DNA, 22 bp, synthetic construct
  misc_feature 1..22: note = chemically synthesized
  source 1..22: mol_type = other DNA
aatgtctgatataagggcattt

SEQ ID NO: 12412 - DNA, 22 bp, synthetic construct
  misc_feature 1..22: note = chemically synthesized
  source 1..22: mol_type = other DNA
atataagggcattttatgcaaa

SEQ ID NO: 12413 - DNA, 22 bp, synthetic construct
  misc_feature 1..22: note = chemically synthesized
  source 1..22: mol_type = other DNA
tatgcaaagaggatcactcgtg

SEQ ID NO: 12414 - DNA, 22 bp, synthetic construct
  misc_feature 1..22: note = chemically synthesized
  source 1..22: mol_type = other DNA
atgcaaagaggatcactcgtgc

SEQ ID NO: 12415 - DNA, 22 bp, synthetic construct
  misc_feature 1..22: note = chemically synthesized
  source 1..22: mol_type = other DNA
tgcaaagaggatcactcgtgca

SEQ ID NO: 12416 - DNA, 22 bp, synthetic construct
  misc_feature 1..22: note = chemically synthesized
  source 1..22: mol_type = other DNA
gtgcaaagactcagatttgcaa

SEQ ID NO: 12417 - DNA, 22 bp, synthetic construct
  misc_feature 1..22: note = chemically synthesized
  source 1..22: mol_type = other DNA
agatttgcaagaacgtgaggta

SEQ ID NO: 12418 - DNA, 22 bp, synthetic construct
  misc_feature 1..22: note = chemically synthesized
  source 1..22: mol_type = other DNA
gcaagaacgtgaggtatttcag

SEQ ID NO: 12419 - DNA, 22 bp, synthetic construct
  misc_feature 1..22: note = chemically synthesized
  source 1..22: mol_type = other DNA
caagaacgtgaggtatttcagg

SEQ ID NO: 12420 - DNA, 22 bp, synthetic construct
  misc_feature 1..22: note = chemically synthesized
  source 1..22: mol_type = other DNA
caggagttttgtatggttccat

SEQ ID NO: 12421 - DNA, 22 bp, synthetic construct
  misc_feature 1..22: note = chemically synthesized
  source 1..22: mol_type = other DNA
aggagttttgtatggttccata

SEQ ID NO: 12422 - DNA, 22 bp, synthetic construct
  misc_feature 1..22: note = chemically synthesized
  source 1..22: mol_type = other DNA
tgtatggttccatatggactat

SEQ ID NO: 12423 - DNA, 22 bp, synthetic construct
  misc_feature 1..22: note = chemically synthesized
  source 1..22: mol_type = other DNA
gtatggttccatatggactatg

SEQ ID NO: 12424 - DNA, 22 bp, synthetic construct
  misc_feature 1..22: note = chemically synthesized
  source 1..22: mol_type = other DNA
tatggttccatatggactatga

SEQ ID NO: 12425 - DNA, 22 bp, synthetic construct
  misc_feature 1..22: note = chemically synthesized
  source 1..22: mol_type = other DNA
catatggactatgacaagtgag

SEQ ID NO: 12426 - DNA, 22 bp, synthetic construct
  misc_feature 1..22: note = chemically synthesized
  source 1..22: mol_type = other DNA
tgacaagtgagacaggtaaact

SEQ ID NO: 12427 - DNA, 22 bp, synthetic construct
  misc_feature 1..22: note = chemically synthesized
  source 1..22: mol_type = other DNA
ggcagagctggtcatcagataa

SEQ ID NO: 12428 - DNA, 22 bp, synthetic construct
  misc_feature 1..22: note = chemically synthesized
  source 1..22: mol_type = other DNA
gtcatcagataatgaagtcatt

SEQ ID NO: 12429 - DNA, 22 bp, synthetic construct
  misc_feature 1..22: note = chemically synthesized
  source 1..22: mol_type = other DNA
acctaaggagattggacaataa

SEQ ID NO: 12430 - DNA, 22 bp, synthetic construct
  misc_feature 1..22: note = chemically synthesized
  source 1..22: mol_type = other DNA
aggagattggacaataaaatgc

SEQ ID NO: 12431 - DNA, 22 bp, synthetic construct
  misc_feature 1..22: note = chemically synthesized
  source 1..22: mol_type = other DNA
gacaataaaatgcaatatggag

SEQ ID NO: 12432 - DNA, 22 bp, synthetic construct
  misc_feature 1..22: note = chemically synthesized
  source 1..22: mol_type = other DNA
atggctgatttaggatgcccag

SEQ ID NO: 12433 - DNA, 22 bp, synthetic construct
  misc_feature 1..22: note = chemically synthesized
  source 1..22: mol_type = other DNA
atttaggatgcccagtctggca

SEQ ID NO: 12434 - DNA, 22 bp, synthetic construct
  misc_feature 1..22: note = chemically synthesized
  source 1..22: mol_type = other DNA
aggatgcccagtctggcaacac

SEQ ID NO: 12435 - DNA, 22 bp, synthetic construct
  misc_feature 1..22: note = chemically synthesized
  source 1..22: mol_type = other DNA
ggatgcccagtctggcaacacg

SEQ ID NO: 12436 - DNA, 22 bp, synthetic construct
  misc_feature 1..22: note = chemically synthesized
  source 1..22: mol_type = other DNA
gcaacacgctaatgaaatgata

SEQ ID NO: 12437 - DNA, 22 bp, synthetic construct
  misc_feature 1..22: note = chemically synthesized
  source 1..22: mol_type = other DNA
atgaaatgatagtgggggaggg

SEQ ID NO: 12438 - DNA, 22 bp, synthetic construct
  misc_feature 1..22: note = chemically synthesized
  source 1..22: mol_type = other DNA
ggagagagcagtcctgagacta

SEQ ID NO: 12439 - DNA, 22 bp, synthetic construct
  misc_feature 1..22: note = chemically synthesized
  source 1..22: mol_type = other DNA
agactattgcaattatctgcgg

SEQ ID NO: 12440 - DNA, 22 bp, synthetic construct
  misc_feature 1..22: note = chemically synthesized
  source 1..22: mol_type = other DNA
ttgcaattatctgcgggagaca

SEQ ID NO: 12441 - DNA, 22 bp, synthetic construct
  misc_feature 1..22: note = chemically synthesized
  source 1..22: mol_type = other DNA
caattatctgcgggagacataa

SEQ ID NO: 12442 - DNA, 22 bp, synthetic construct
  misc_feature 1..22: note = chemically synthesized
  source 1..22: mol_type = other DNA
tctgcgggagacataaaggcta

SEQ ID NO: 12443 - DNA, 22 bp, synthetic construct
  misc_feature 1..22: note = chemically synthesized
  source 1..22: mol_type = other DNA
cgggagacataaaggctagaac

SEQ ID NO: 12444 - DNA, 22 bp, synthetic construct
  misc_feature 1..22: note = chemically synthesized
  source 1..22: mol_type = other DNA
gaacctgaacagtagcagtaca

SEQ ID NO: 12445 - DNA, 22 bp, synthetic construct
  misc_feature 1..22: note = chemically synthesized
  source 1..22: mol_type = other DNA
aacagtagcagtacaaaaaaag

SEQ ID NO: 12446 - DNA, 22 bp, synthetic construct
  misc_feature 1..22: note = chemically synthesized
  source 1..22: mol_type = other DNA
aaatgatattaaggaagtagaa

SEQ ID NO: 12447 - DNA, 22 bp, synthetic construct
  misc_feature 1..22: note = chemically synthesized
  source 1..22: mol_type = other DNA
aggaagtagaagtggtatgact

SEQ ID NO: 12448 - DNA, 22 bp, synthetic construct
  misc_feature 1..22: note = chemically synthesized
  source 1..22: mol_type = other DNA
aaccatctgggtatggaagggg

SEQ ID NO: 12449 - DNA, 22 bp, synthetic construct
  misc_feature 1..22: note = chemically synthesized
  source 1..22: mol_type = other DNA
accatctgggtatggaagggga

SEQ ID NO: 12450 - DNA, 22 bp, synthetic construct
  misc_feature 1..22: note = chemically synthesized
  source 1..22: mol_type = other DNA
ggtatggaaggggaaatggcta

SEQ ID NO: 12451 - DNA, 22 bp, synthetic construct
  misc_feature 1..22: note = chemically synthesized
  source 1..22: mol_type = other DNA
gagtcttggggactttgtgttt

SEQ ID NO: 12452 - DNA, 22 bp, synthetic construct
  misc_feature 1..22: note = chemically synthesized
  source 1..22: mol_type = other DNA
ggggactttgtgtttgatgtga

SEQ ID NO: 12453 - DNA, 22 bp, synthetic construct
  misc_feature 1..22: note = chemically synthesized
  source 1..22: mol_type = other DNA
gggactttgtgtttgatgtgat

SEQ ID NO: 12454 - DNA, 22 bp, synthetic construct
  misc_feature 1..22: note = chemically synthesized
  source 1..22: mol_type = other DNA
tgtgtttgatgtgattatggac

SEQ ID NO: 12455 - DNA, 22 bp, synthetic construct
  misc_feature 1..22: note = chemically synthesized
  source 1..22: mol_type = other DNA
gtgtttgatgtgattatggacc

SEQ ID NO: 12456 - DNA, 22 bp, synthetic construct
  misc_feature 1..22: note = chemically synthesized
  source 1..22: mol_type = other DNA
tgtttgatgtgattatggacca

SEQ ID NO: 12457 - DNA, 22 bp, synthetic construct
  misc_feature 1..22: note = chemically synthesized
  source 1..22: mol_type = other DNA
gatgtgattatggaccacagaa

SEQ ID NO: 12458 - DNA, 22 bp, synthetic construct
  misc_feature 1..22: note = chemically synthesized
  source 1..22: mol_type = other DNA
atgtgattatggaccacagaat

SEQ ID NO: 12459 - DNA, 22 bp, synthetic construct
  misc_feature 1..22: note = chemically synthesized
  source 1..22: mol_type = other DNA
tggaccacagaataatgtctaa

SEQ ID NO: 12460 - DNA, 22 bp, synthetic construct
  misc_feature 1..22: note = chemically synthesized
  source 1..22: mol_type = other DNA
agagaactggctctttagtctg

SEQ ID NO: 12461 - DNA, 22 bp, synthetic construct
  misc_feature 1..22: note = chemically synthesized
  source 1..22: mol_type = other DNA
gctctttagtctgactgccaga

SEQ ID NO: 12462 - DNA, 22 bp, synthetic construct
  misc_feature 1..22: note = chemically synthesized
  source 1..22: mol_type = other DNA
tttagtctgactgccagagtct

SEQ ID NO: 12463 - DNA, 22 bp, synthetic construct
  misc_feature 1..22: note = chemically synthesized
  source 1..22: mol_type = other DNA
tagtctgactgccagagtctga

SEQ ID NO: 12464 - DNA, 22 bp, synthetic construct
  misc_feature 1..22: note = chemically synthesized
  source 1..22: mol_type = other DNA
agtctgactgccagagtctgaa

SEQ ID NO: 12465 - DNA, 22 bp, synthetic construct
  misc_feature 1..22: note = chemically synthesized
  source 1..22: mol_type = other DNA
gtctgactgccagagtctgaat

SEQ ID NO: 12466 - DNA, 22 bp, synthetic construct
  misc_feature 1..22: note = chemically synthesized
  source 1..22: mol_type = other DNA
actgccagagtctgaatcctga

SEQ ID NO: 12467 - DNA, 22 bp, synthetic construct
  misc_feature 1..22: note = chemically synthesized
  source 1..22: mol_type = other DNA
ccagagtctgaatcctgaatgt

SEQ ID NO: 12468 - DNA, 22 bp, synthetic construct
  misc_feature 1..22: note = chemically synthesized
  source 1..22: mol_type = other DNA
aatcctgaatgttttagtatgt

SEQ ID NO: 12469 - DNA, 22 bp, synthetic construct
  misc_feature 1..22: note = chemically synthesized
  source 1..22: mol_type = other DNA
aatgttttagtatgttaccttg

SEQ ID NO: 12470 - DNA, 22 bp, synthetic construct
  misc_feature 1..22: note = chemically synthesized
  source 1..22: mol_type = other DNA
tagtatgttaccttgggcaaag

SEQ ID NO: 12471 - DNA, 22 bp, synthetic construct
  misc_feature 1..22: note = chemically synthesized
  source 1..22: mol_type = other DNA
agtatgttaccttgggcaaagc

SEQ ID NO: 12472 - DNA, 22 bp, synthetic construct
  misc_feature 1..22: note = chemically synthesized
  source 1..22: mol_type = other DNA
gtatgttaccttgggcaaagcc

SEQ ID NO: 12473 - DNA, 22 bp, synthetic construct
  misc_feature 1..22: note = chemically synthesized
  source 1..22: mol_type = other DNA
ccttgggcaaagcccttagcct

SEQ ID NO: 12474 - DNA, 22 bp, synthetic construct
  misc_feature 1..22: note = chemically synthesized
  source 1..22: mol_type = other DNA
gggcaaagcccttagcctctat

SEQ ID NO: 12475 - DNA, 22 bp, synthetic construct
  misc_feature 1..22: note = chemically synthesized
  source 1..22: mol_type = other DNA
ggcaaagcccttagcctctatg

SEQ ID NO: 12476 - DNA, 22 bp, synthetic construct
  misc_feature 1..22: note = chemically synthesized
  source 1..22: mol_type = other DNA
agcctctatgaatctatcttcc

SEQ ID NO: 12477 - DNA, 22 bp, synthetic construct
  misc_feature 1..22: note = chemically synthesized
  source 1..22: mol_type = other DNA
gcctctatgaatctatcttcct

SEQ ID NO: 12478 - DNA, 22 bp, synthetic construct
  misc_feature 1..22: note = chemically synthesized
  source 1..22: mol_type = other DNA
tatgaatctatcttcctcattc

SEQ ID NO: 12479 - DNA, 22 bp, synthetic construct
  misc_feature 1..22: note = chemically synthesized
  source 1..22: mol_type = other DNA
tgaatctatcttcctcattcat

SEQ ID NO: 12480 - DNA, 22 bp, synthetic construct
  misc_feature 1..22: note = chemically synthesized
  source 1..22: mol_type = other DNA
tcttcctcattcataaaaataa

SEQ ID NO: 12481 - DNA, 22 bp, synthetic construct
  misc_feature 1..22: note = chemically synthesized
  source 1..22: mol_type = other DNA
cctcattcataaaaataagatg

SEQ ID NO: 12482 - DNA, 22 bp, synthetic construct
  misc_feature 1..22: note = chemically synthesized
  source 1..22: mol_type = other DNA
ctcattcataaaaataagatga

SEQ ID NO: 12483 - DNA, 22 bp, synthetic construct
  misc_feature 1..22: note = chemically synthesized
  source 1..22: mol_type = other DNA
attcataaaaataagatgacag

SEQ ID NO: 12484 - DNA, 22 bp, synthetic construct
  misc_feature 1..22: note = chemically synthesized
  source 1..22: mol_type = other DNA
ataaaaataagatgacagtgcc

SEQ ID NO: 12485 - DNA, 22 bp, synthetic construct
  misc_feature 1..22: note = chemically synthesized
  source 1..22: mol_type = other DNA
tctcgtgggacttttgtgagga

SEQ ID NO: 12486 - DNA, 22 bp, synthetic construct
  misc_feature 1..22: note = chemically synthesized
  source 1..22: mol_type = other DNA
gtgggacttttgtgaggatgaa

SEQ ID NO: 12487 - DNA, 22 bp, synthetic construct
  misc_feature 1..22: note = chemically synthesized
  source 1..22: mol_type = other DNA
ttgtgaggatgaagtgagataa

SEQ ID NO: 12488 - DNA, 22 bp, synthetic construct
  misc_feature 1..22: note = chemically synthesized
  source 1..22: mol_type = other DNA
tgtgaggatgaagtgagataat

SEQ ID NO: 12489 - DNA, 22 bp, synthetic construct
  misc_feature 1..22: note = chemically synthesized
  source 1..22: mol_type = other DNA
gtgaggatgaagtgagataatg

SEQ ID NO: 12490 - DNA, 22 bp, synthetic construct
  misc_feature 1..22: note = chemically synthesized
  source 1..22: mol_type = other DNA
tgaggatgaagtgagataatgg

SEQ ID NO: 12491 - DNA, 22 bp, synthetic construct
  misc_feature 1..22: note = chemically synthesized
  source 1..22: mol_type = other DNA
ctgagcacagtgtccaacacag

SEQ ID NO: 12492 - DNA, 22 bp, synthetic construct
  misc_feature 1..22: note = chemically synthesized
  source 1..22: mol_type = other DNA
agcacagtgtccaacacagcag

SEQ ID NO: 12493 - DNA, 22 bp, synthetic construct
  misc_feature 1..22: note = chemically synthesized
  source 1..22: mol_type = other DNA
catatacattagctattactgg

SEQ ID NO: 12494 - DNA, 22 bp, synthetic construct
  misc_feature 1..22: note = chemically synthesized
  source 1..22: mol_type = other DNA
gctattactggctacattatga

SEQ ID NO: 12495 - DNA, 22 bp, synthetic construct
  misc_feature 1..22: note = chemically synthesized
  source 1..22: mol_type = other DNA
ttactggctacattatgatata

SEQ ID NO: 12496 - DNA, 22 bp, synthetic construct
  misc_feature 1..22: note = chemically synthesized
  source 1..22: mol_type = other DNA
ctggctacattatgatatacag

SEQ ID NO: 12497 - DNA, 22 bp, synthetic construct
  misc_feature 1..22: note = chemically synthesized
  source 1..22: mol_type = other DNA
gctacattatgatatacagtta

SEQ ID NO: 12498 - DNA, 22 bp, synthetic construct
  misc_feature 1..22: note = chemically synthesized
  source 1..22: mol_type = other DNA
cattatgatatacagttaggga

SEQ ID NO: 12499 - DNA, 22 bp, synthetic construct
  misc_feature 1..22: note = chemically synthesized
  source 1..22: mol_type = other DNA
tgatatacagttagggagttgg

SEQ ID NO: 12500 - DNA, 22 bp, synthetic construct
  misc_feature 1..22: note = chemically synthesized
  source 1..22: mol_type = other DNA
gggagttggaaagataatctga

SEQ ID NO: 12501 - DNA, 22 bp, synthetic construct
  misc_feature 1..22: note = chemically synthesized
  source 1..22: mol_type = other DNA
gaaagataatctgaaattcagg

SEQ ID NO: 12502 - DNA, 22 bp, synthetic construct
  misc_feature 1..22: note = chemically synthesized
  source 1..22: mol_type = other DNA
aaattcaggagacgtatctgac

SEQ ID NO: 12503 - DNA, 22 bp, synthetic construct
  misc_feature 1..22: note = chemically synthesized
  source 1..22: mol_type = other DNA
aggagacgtatctgactatagg

SEQ ID NO: 12504 - DNA, 22 bp, synthetic construct
  misc_feature 1..22: note = chemically synthesized
  source 1..22: mol_type = other DNA
actataggtgagtatttggaac

SEQ ID NO: 12505 - DNA, 22 bp, synthetic construct
  misc_feature 1..22: note = chemically synthesized
  source 1..22: mol_type = other DNA
taggtgagtatttggaactcat

SEQ ID NO: 12506 - DNA, 22 bp, synthetic construct
  misc_feature 1..22: note = chemically synthesized
  source 1..22: mol_type = other DNA
ggaactcattgttctgtaaaca

SEQ ID NO: 12507 - DNA, 22 bp, synthetic construct
  misc_feature 1..22: note = chemically synthesized
  source 1..22: mol_type = other DNA
gaactcattgttctgtaaacag

SEQ ID NO: 12508 - DNA, 22 bp, synthetic construct
  misc_feature 1..22: note = chemically synthesized
  source 1..22: mol_type = other DNA
attgttctgtaaacagtagtta

SEQ ID NO: 12509 - DNA, 22 bp, synthetic construct
  misc_feature 1..22: note = chemically synthesized
  source 1..22: mol_type = other DNA
ttctgtaaacagtagttacagc

SEQ ID NO: 12510 - DNA, 22 bp, synthetic construct
  misc_feature 1..22: note = chemically synthesized
  source 1..22: mol_type = other DNA
tgtaaacagtagttacagccac

SEQ ID NO: 12511 - DNA, 22 bp, synthetic construct
  misc_feature 1..22: note = chemically synthesized
  source 1..22: mol_type = other DNA
taaacagtagttacagccacgt

SEQ ID NO: 12512 - DNA, 22 bp, synthetic construct
  misc_feature 1..22: note = chemically synthesized
  source 1..22: mol_type = other DNA
cagccacgtgtgtgggcatctg

SEQ ID NO: 12513 - DNA, 22 bp, synthetic construct
  misc_feature 1..22: note = chemically synthesized
  source 1..22: mol_type = other DNA
gagagtgagcatggatattgtg

SEQ ID NO: 12514 - DNA, 22 bp, synthetic construct
  misc_feature 1..22: note = chemically synthesized
  source 1..22: mol_type = other DNA
tgatacctagtacagtgcctgg

SEQ ID NO: 12515 - DNA, 22 bp, synthetic construct
  misc_feature 1..22: note = chemically synthesized
  source 1..22: mol_type = other DNA
gtacagtgcctggcagtagtgg

SEQ ID NO: 12516 - DNA, 22 bp, synthetic construct
  misc_feature 1..22: note = chemically synthesized
  source 1..22: mol_type = other DNA
gcagtagtggttgtatgctcag

SEQ ID NO: 12517 - DNA, 22 bp, synthetic construct
  misc_feature 1..22: note = chemically synthesized
  source 1..22: mol_type = other DNA
tatgctcagtaaattttgttga

SEQ ID NO: 12518 - DNA, 22 bp, synthetic construct
  misc_feature 1..22: note = chemically synthesized
  source 1..22: mol_type = other DNA
agtaaattttgttgacagggtc

SEQ ID NO: 12519 - DNA, 22 bp, synthetic construct
  misc_feature 1..22: note = chemically synthesized
  source 1..22: mol_type = other DNA
tgttgacagggtcagggccgga

SEQ ID NO: 12520 - DNA, 22 bp, synthetic construct
  misc_feature 1..22: note = chemically synthesized
  source 1..22: mol_type = other DNA
gttgacagggtcagggccggac

SEQ ID NO: 12521 - DNA, 22 bp, synthetic construct
  misc_feature 1..22: note = chemically synthesized
  source 1..22: mol_type = other DNA
ttgacagggtcagggccggact

SEQ ID NO: 12522 - DNA, 22 bp, synthetic construct
  misc_feature 1..22: note = chemically synthesized
  source 1..22: mol_type = other DNA
acagggtcagggccggactaga

SEQ ID NO: 12523 - DNA, 22 bp, synthetic construct
  misc_feature 1..22: note = chemically synthesized
  source 1..22: mol_type = other DNA
gactgtggtaagcaaggcctgt

SEQ ID NO: 12524 - DNA, 22 bp, synthetic construct
  misc_feature 1..22: note = chemically synthesized
  source 1..22: mol_type = other DNA
tggtaagcaaggcctgtagggc

SEQ ID NO: 12525 - DNA, 22 bp, synthetic construct
  misc_feature 1..22: note = chemically synthesized
  source 1..22: mol_type = other DNA
tagggcataaatatacttgtat

SEQ ID NO: 12526 - DNA, 22 bp, synthetic construct
  misc_feature 1..22: note = chemically synthesized
  source 1..22: mol_type = other DNA
gtatgccccgagaagtgaggac

SEQ ID NO: 12527 - DNA, 22 bp, synthetic construct
  misc_feature 1..22: note = chemically synthesized
  source 1..22: mol_type = other DNA
tatgccccgagaagtgaggacc

SEQ ID NO: 12528 - DNA, 22 bp, synthetic construct
  misc_feature 1..22: note = chemically synthesized
  source 1..22: mol_type = other DNA
ttaaatattgtgccctacatgc

SEQ ID NO: 12529 - DNA, 22 bp, synthetic construct
  misc_feature 1..22: note = chemically synthesized
  source 1..22: mol_type = other DNA
aaatattgtgccctacatgcct

SEQ ID NO: 12530 - DNA, 22 bp, synthetic construct
  misc_feature 1..22: note = chemically synthesized
  source 1..22: mol_type = other DNA
aatattgtgccctacatgcctt

SEQ ID NO: 12531 - DNA, 22 bp, synthetic construct
  misc_feature 1..22: note = chemically synthesized
  source 1..22: mol_type = other DNA
tgccctacatgccttgtttggt

SEQ ID NO: 12532 - DNA, 22 bp, synthetic construct
  misc_feature 1..22: note = chemically synthesized
  source 1..22: mol_type = other DNA
catgccttgtttggttcactct

SEQ ID NO: 12533 - DNA, 22 bp, synthetic construct
  misc_feature 1..22: note = chemically synthesized
  source 1..22: mol_type = other DNA
gtttggttcactcttgtcccag

SEQ ID NO: 12534 - DNA, 22 bp, synthetic construct
  misc_feature 1..22: note = chemically synthesized
  source 1..22: mol_type = other DNA
tttggttcactcttgtcccagc

SEQ ID NO: 12535 - DNA, 22 bp, synthetic construct
  misc_feature 1..22: note = chemically synthesized
  source 1..22: mol_type = other DNA
ggttcactcttgtcccagccct

SEQ ID NO: 12536 - DNA, 22 bp, synthetic construct
  misc_feature 1..22: note = chemically synthesized
  source 1..22: mol_type = other DNA
gttcactcttgtcccagcccta

SEQ ID NO: 12537 - DNA, 22 bp, synthetic construct
  misc_feature 1..22: note = chemically synthesized
  source 1..22: mol_type = other DNA
actcttgtcccagccctagcaa

SEQ ID NO: 12538 - DNA, 22 bp, synthetic construct
  misc_feature 1..22: note = chemically synthesized
  source 1..22: mol_type = other DNA
ttgtcccagccctagcaagtat

SEQ ID NO: 12539 - DNA, 22 bp, synthetic construct
  misc_feature 1..22: note = chemically synthesized
  source 1..22: mol_type = other DNA
gtcccagccctagcaagtatat

SEQ ID NO: 12540 - DNA, 22 bp, synthetic construct
  misc_feature 1..22: note = chemically synthesized
  source 1..22: mol_type = other DNA
tcccagccctagcaagtatata

SEQ ID NO: 12541 - DNA, 22 bp, synthetic construct
  misc_feature 1..22: note = chemically synthesized
  source 1..22: mol_type = other DNA
gcaagtatatataaggtgaaaa

SEQ ID NO: 12542 - DNA, 22 bp, synthetic construct
  misc_feature 1..22: note = chemically synthesized
  source 1..22: mol_type = other DNA
aggctggagcctgggagaaccc

SEQ ID NO: 12543 - DNA, 22 bp, synthetic construct
  misc_feature 1..22: note = chemically synthesized
  source 1..22: mol_type = other DNA
gagcctgggagaaccctggaca

SEQ ID NO: 12544 - DNA, 22 bp, synthetic construct
  misc_feature 1..22: note = chemically synthesized
  source 1..22: mol_type = other DNA
ggagaaccctggacatttaagg

SEQ ID NO: 12545 - DNA, 22 bp, synthetic construct
  misc_feature 1..22: note = chemically synthesized
  source 1..22: mol_type = other DNA
gacatttaagggccatggagag

SEQ ID NO: 12546 - DNA, 22 bp, synthetic construct
  misc_feature 1..22: note = chemically synthesized
  source 1..22: mol_type = other DNA
aagggccatggagaggaacagg

SEQ ID NO: 12547 - DNA, 22 bp, synthetic construct
  misc_feature 1..22: note = chemically synthesized
  source 1..22: mol_type = other DNA
agggccatggagaggaacagga

SEQ ID NO: 12548 - DNA, 22 bp, synthetic construct
  misc_feature 1..22: note = chemically synthesized
  source 1..22: mol_type = other DNA
atcaattcaagtgctggatgga

SEQ ID NO: 12549 - DNA, 22 bp, synthetic construct
  misc_feature 1..22: note = chemically synthesized
  source 1..22: mol_type = other DNA
aagtgctggatggataacagga

SEQ ID NO: 12550 - DNA, 22 bp, synthetic construct
  misc_feature 1..22: note = chemically synthesized
  source 1..22: mol_type = other DNA
gatggataacaggagttagagc

SEQ ID NO: 12551 - DNA, 22 bp, synthetic construct
  misc_feature 1..22: note = chemically synthesized
  source 1..22: mol_type = other DNA
gagcaaagcggggaaccagaat

SEQ ID NO: 12552 - DNA, 22 bp, synthetic construct
  misc_feature 1..22: note = chemically synthesized
  source 1..22: mol_type = other DNA
ttataaaaagagtttcctaaaa

SEQ ID NO: 12553 - DNA, 22 bp, synthetic construct
  misc_feature 1..22: note = chemically synthesized
  source 1..22: mol_type = other DNA
taaaaagagtttcctaaaaagg

SEQ ID NO: 12554 - DNA, 22 bp, synthetic construct
  misc_feature 1..22: note = chemically synthesized
  source 1..22: mol_type = other DNA
cctaaaaagggagagatcaaca

SEQ ID NO: 12555 - DNA, 22 bp, synthetic construct
  misc_feature 1..22: note = chemically synthesized
  source 1..22: mol_type = other DNA
ctaaaaagggagagatcaacaa

SEQ ID NO: 12556 - DNA, 22 bp, synthetic construct
  misc_feature 1..22: note = chemically synthesized
  source 1..22: mol_type = other DNA
aaaagggagagatcaacaatta

SEQ ID NO: 12557 - DNA, 22 bp, synthetic construct
  misc_feature 1..22: note = chemically synthesized
  source 1..22: mol_type = other DNA
gaaattatttagagcagccagt

SEQ ID NO: 12558 - DNA, 22 bp, synthetic construct
  misc_feature 1..22: note = chemically synthesized
  source 1..22: mol_type = other DNA
tttagagcagccagtaaataca

SEQ ID NO: 12559 - DNA, 22 bp, synthetic construct
  misc_feature 1..22: note = chemically synthesized
  source 1..22: mol_type = other DNA
agagcagccagtaaatacataa

SEQ ID NO: 12560 - DNA, 22 bp, synthetic construct
  misc_feature 1..22: note = chemically synthesized
  source 1..22: mol_type = other DNA
gagcagccagtaaatacataaa

SEQ ID NO: 12561 - DNA, 22 bp, synthetic construct
  misc_feature 1..22: note = chemically synthesized
  source 1..22: mol_type = other DNA
aaaattattctttaggtcattc

SEQ ID NO: 12562 - DNA, 22 bp, synthetic construct
  misc_feature 1..22: note = chemically synthesized
  source 1..22: mol_type = other DNA
ttctttaggtcattcctgattg

SEQ ID NO: 12563 - DNA, 22 bp, synthetic construct
  misc_feature 1..22: note = chemically synthesized
  source 1..22: mol_type = other DNA
tttaggtcattcctgattgtga

SEQ ID NO: 12564 - DNA, 22 bp, synthetic construct
  misc_feature 1..22: note = chemically synthesized
  source 1..22: mol_type = other DNA
taggtcattcctgattgtgaca

SEQ ID NO: 12565 - DNA, 22 bp, synthetic construct
  misc_feature 1..22: note = chemically synthesized
  source 1..22: mol_type = other DNA
aggtcattcctgattgtgacaa

SEQ ID NO: 12566 - DNA, 22 bp, synthetic construct
  misc_feature 1..22: note = chemically synthesized
  source 1..22: mol_type = other DNA
ggtcattcctgattgtgacaat

SEQ ID NO: 12567 - DNA, 22 bp, synthetic construct
  misc_feature 1..22: note = chemically synthesized
  source 1..22: mol_type = other DNA
ctgattgtgacaatagtcattt

SEQ ID NO: 12568 - DNA, 22 bp, synthetic construct
  misc_feature 1..22: note = chemically synthesized
  source 1..22: mol_type = other DNA
attgtgacaatagtcatttcat

SEQ ID NO: 12569 - DNA, 22 bp, synthetic construct
  misc_feature 1..22: note = chemically synthesized
  source 1..22: mol_type = other DNA
tgacaatagtcatttcattata

SEQ ID NO: 12570 - DNA, 22 bp, synthetic construct
  misc_feature 1..22: note = chemically synthesized
  source 1..22: mol_type = other DNA
cattatataaatgtgattaagg

SEQ ID NO: 12571 - DNA, 22 bp, synthetic construct
  misc_feature 1..22: note = chemically synthesized
  source 1..22: mol_type = other DNA
attatataaatgtgattaagga

SEQ ID NO: 12572 - DNA, 22 bp, synthetic construct
  misc_feature 1..22: note = chemically synthesized
  source 1..22: mol_type = other DNA
tataaatgtgattaaggaagga

SEQ ID NO: 12573 - DNA, 22 bp, synthetic construct
  misc_feature 1..22: note = chemically synthesized
  source 1..22: mol_type = other DNA
aggaaggaaaagagctacacag

SEQ ID NO: 12574 - DNA, 22 bp, synthetic construct
  misc_feature 1..22: note = chemically synthesized
  source 1..22: mol_type = other DNA
cacagaagttattaaagagcta

SEQ ID NO: 12575 - DNA, 22 bp, synthetic construct
  misc_feature 1..22: note = chemically synthesized
  source 1..22: mol_type = other DNA
ttaaagagctaaagagaattga

SEQ ID NO: 12576 - DNA, 22 bp, synthetic construct
  misc_feature 1..22: note = chemically synthesized
  source 1..22: mol_type = other DNA
aagagctaaagagaattgagaa

SEQ ID NO: 12577 - DNA, 22 bp, synthetic construct
  misc_feature 1..22: note = chemically synthesized
  source 1..22: mol_type = other DNA
aagagaattgagaaatttaaaa

SEQ ID NO: 12578 - DNA, 22 bp, synthetic construct
  misc_feature 1..22: note = chemically synthesized
  source 1..22: mol_type = other DNA
agaaatttaaaacagaagaaag

SEQ ID NO: 12579 - DNA, 22 bp, synthetic construct
  misc_feature 1..22: note = chemically synthesized
  source 1..22: mol_type = other DNA
aaaacagaagaaagtagggcca

SEQ ID NO: 12580 - DNA, 22 bp, synthetic construct
  misc_feature 1..22: note = chemically synthesized
  source 1..22: mol_type = other DNA
aaacagaagaaagtagggccaa

SEQ ID NO: 12581 - DNA, 22 bp, synthetic construct
  misc_feature 1..22: note = chemically synthesized
  source 1..22: mol_type = other DNA
tctcactgatcctgccaacacc

SEQ ID NO: 12582 - DNA, 22 bp, synthetic construct
  misc_feature 1..22: note = chemically synthesized
  source 1..22: mol_type = other DNA
actgatcctgccaacacctgtg

SEQ ID NO: 12583 - DNA, 22 bp, synthetic construct
  misc_feature 1..22: note = chemically synthesized
  source 1..22: mol_type = other DNA
atcctgccaacacctgtgagat

SEQ ID NO: 12584 - DNA, 22 bp, synthetic construct
  misc_feature 1..22: note = chemically synthesized
  source 1..22: mol_type = other DNA
ccaacacctgtgagatagatat

SEQ ID NO: 12585 - DNA, 22 bp, synthetic construct
  misc_feature 1..22: note = chemically synthesized
  source 1..22: mol_type = other DNA
tgagatagatattcttattata

SEQ ID NO: 12586 - DNA, 22 bp, synthetic construct
  misc_feature 1..22: note = chemically synthesized
  source 1..22: mol_type = other DNA
ttattatactactgttaaacct

SEQ ID NO: 12587 - DNA, 22 bp, synthetic construct
  misc_feature 1..22: note = chemically synthesized
  source 1..22: mol_type = other DNA
attatactactgttaaacctaa

SEQ ID NO: 12588 - DNA, 22 bp, synthetic construct
  misc_feature 1..22: note = chemically synthesized
  source 1..22: mol_type = other DNA
ttatactactgttaaacctaat

SEQ ID NO: 12589 - DNA, 22 bp, synthetic construct
  misc_feature 1..22: note = chemically synthesized
  source 1..22: mol_type = other DNA
tactactgttaaacctaattta

SEQ ID NO: 12590 - DNA, 22 bp, synthetic construct
  misc_feature 1..22: note = chemically synthesized
  source 1..22: mol_type = other DNA
ctgttaaacctaatttacattt

SEQ ID NO: 12591 - DNA, 22 bp, synthetic construct
  misc_feature 1..22: note = chemically synthesized
  source 1..22: mol_type = other DNA
ttaaacctaatttacatttgac

SEQ ID NO: 12592 - DNA, 22 bp, synthetic construct
  misc_feature 1..22: note = chemically synthesized
  source 1..22: mol_type = other DNA
aacctaatttacatttgacaaa

SEQ ID NO: 12593 - DNA, 22 bp, synthetic construct
  misc_feature 1..22: note = chemically synthesized
  source 1..22: mol_type = other DNA
atttacatttgacaaagttaag

SEQ ID NO: 12594 - DNA, 22 bp, synthetic construct
  misc_feature 1..22: note = chemically synthesized
  source 1..22: mol_type = other DNA
acatttgacaaagttaaggttc

SEQ ID NO: 12595 - DNA, 22 bp, synthetic construct
  misc_feature 1..22: note = chemically synthesized
  source 1..22: mol_type = other DNA
catttgacaaagttaaggttca

SEQ ID NO: 12596 - DNA, 22 bp, synthetic construct
  misc_feature 1..22: note = chemically synthesized
  source 1..22: mol_type = other DNA
gacaaagttaaggttcagagct

SEQ ID NO: 12597 - DNA, 22 bp, synthetic construct
  misc_feature 1..22: note = chemically synthesized
  source 1..22: mol_type = other DNA
acaaagttaaggttcagagctt

SEQ ID NO: 12598 - DNA, 22 bp, synthetic construct
  misc_feature 1..22: note = chemically synthesized
  source 1..22: mol_type = other DNA
aggttcagagcttgtgtgactt

SEQ ID NO: 12599 - DNA, 22 bp, synthetic construct
  misc_feature 1..22: note = chemically synthesized
  source 1..22: mol_type = other DNA
agagcttgtgtgacttgtccaa

SEQ ID NO: 12600 - DNA, 22 bp, synthetic construct
  misc_feature 1..22: note = chemically synthesized
  source 1..22: mol_type = other DNA
gtgtgacttgtccaaggtcaca

SEQ ID NO: 12601 - DNA, 22 bp, synthetic construct
  misc_feature 1..22: note = chemically synthesized
  source 1..22: mol_type = other DNA
tgtgacttgtccaaggtcacag

SEQ ID NO: 12602 - DNA, 22 bp, synthetic construct
  misc_feature 1..22: note = chemically synthesized
  source 1..22: mol_type = other DNA
gtccaaggtcacaggtctagag

SEQ ID NO: 12603 - DNA, 22 bp, synthetic construct
  misc_feature 1..22: note = chemically synthesized
  source 1..22: mol_type = other DNA
tccaaggtcacaggtctagagg

SEQ ID NO: 12604 - DNA, 22 bp, synthetic construct
  misc_feature 1..22: note = chemically synthesized
  source 1..22: mol_type = other DNA
gaggaggcagatacttgattca

SEQ ID NO: 12605 - DNA, 22 bp, synthetic construct
  misc_feature 1..22: note = chemically synthesized
  source 1..22: mol_type = other DNA
gattcaaacctatttctgtctg

SEQ ID NO: 12606 - DNA, 22 bp, synthetic construct
  misc_feature 1..22: note = chemically synthesized
  source 1..22: mol_type = other DNA
attcaaacctatttctgtctga

SEQ ID NO: 12607 - DNA, 22 bp, synthetic construct
  misc_feature 1..22: note = chemically synthesized
  source 1..22: mol_type = other DNA
aaacctatttctgtctgatctg

SEQ ID NO: 12608 - DNA, 22 bp, synthetic construct
  misc_feature 1..22: note = chemically synthesized
  source 1..22: mol_type = other DNA
tttctgtctgatctgattctaa

SEQ ID NO: 12609 - DNA, 22 bp, synthetic construct
  misc_feature 1..22: note = chemically synthesized
  source 1..22: mol_type = other DNA
ctgtctgatctgattctaaagt

SEQ ID NO: 12610 - DNA, 22 bp, synthetic construct
  misc_feature 1..22: note = chemically synthesized
  source 1..22: mol_type = other DNA
tgtctgatctgattctaaagtc

SEQ ID NO: 12611 - DNA, 22 bp, synthetic construct
  misc_feature 1..22: note = chemically synthesized
  source 1..22: mol_type = other DNA
tctgatctgattctaaagtctg

SEQ ID NO: 12612 - DNA, 22 bp, synthetic construct
  misc_feature 1..22: note = chemically synthesized
  source 1..22: mol_type = other DNA
atctgattctaaagtctgtttt

SEQ ID NO: 12613 - DNA, 22 bp, synthetic construct
  misc_feature 1..22: note = chemically synthesized
  source 1..22: mol_type = other DNA
attctaaagtctgttttttcac

SEQ ID NO: 12614 - DNA, 22 bp, synthetic construct
  misc_feature 1..22: note = chemically synthesized
  source 1..22: mol_type = other DNA
taaagtctgttttttcactcaa

SEQ ID NO: 12615 - DNA, 22 bp, synthetic construct
  misc_feature 1..22: note = chemically synthesized
  source 1..22: mol_type = other DNA
aagtctgttttttcactcaacc

SEQ ID NO: 12616 - DNA, 22 bp, synthetic construct
  misc_feature 1..22: note = chemically synthesized
  source 1..22: mol_type = other DNA
ttttttcactcaaccacactgt

SEQ ID NO: 12617 - DNA, 22 bp, synthetic construct
  misc_feature 1..22: note = chemically synthesized
  source 1..22: mol_type = other DNA
tttcactcaaccacactgtaca

SEQ ID NO: 12618 - DNA, 22 bp, synthetic construct
  misc_feature 1..22: note = chemically synthesized
  source 1..22: mol_type = other DNA
ttcactcaaccacactgtacag

SEQ ID NO: 12619 - DNA, 22 bp, synthetic construct
  misc_feature 1..22: note = chemically synthesized
  source 1..22: mol_type = other DNA
tcactcaaccacactgtacagt

SEQ ID NO: 12620 - DNA, 22 bp, synthetic construct
  misc_feature 1..22: note = chemically synthesized
  source 1..22: mol_type = other DNA
cactcaaccacactgtacagtc

SEQ ID NO: 12621 - DNA, 22 bp, synthetic construct
  misc_feature 1..22: note = chemically synthesized
  source 1..22: mol_type = other DNA
actcaaccacactgtacagtca

SEQ ID NO: 12622 - DNA, 22 bp, synthetic construct
  misc_feature 1..22: note = chemically synthesized
  source 1..22: mol_type = other DNA
aaccacactgtacagtcagctc

SEQ ID NO: 12623 - DNA, 22 bp, synthetic construct
  misc_feature 1..22: note = chemically synthesized
  source 1..22: mol_type = other DNA
tacagtcagctctccttgtgag

SEQ ID NO: 12624 - DNA, 22 bp, synthetic construct
  misc_feature 1..22: note = chemically synthesized
  source 1..22: mol_type = other DNA
tccttgtgagttccacagccac

SEQ ID NO: 12625 - DNA, 22 bp, synthetic construct
  misc_feature 1..22: note = chemically synthesized
  source 1..22: mol_type = other DNA
cttgtgagttccacagccacag

SEQ ID NO: 12626 - DNA, 22 bp, synthetic construct
  misc_feature 1..22: note = chemically synthesized
  source 1..22: mol_type = other DNA
gtgagttccacagccacagatt

SEQ ID NO: 12627 - DNA, 22 bp, synthetic construct
  misc_feature 1..22: note = chemically synthesized
  source 1..22: mol_type = other DNA
tgagttccacagccacagattc

SEQ ID NO: 12628 - DNA, 22 bp, synthetic construct
  misc_feature 1..22: note = chemically synthesized
  source 1..22: mol_type = other DNA
cacagccacagattcaattaac

SEQ ID NO: 12629 - DNA, 22 bp, synthetic construct
  misc_feature 1..22: note = chemically synthesized
  source 1..22: mol_type = other DNA
aattaactgcagatcaaaaata

SEQ ID NO: 12630 - DNA, 22 bp, synthetic construct
  misc_feature 1..22: note = chemically synthesized
  source 1..22: mol_type = other DNA
actgcagatcaaaaatattcaa

SEQ ID NO: 12631 - DNA, 22 bp, synthetic construct
  misc_feature 1..22: note = chemically synthesized
  source 1..22: mol_type = other DNA
cagatcaaaaatattcaagaaa

SEQ ID NO: 12632 - DNA, 22 bp, synthetic construct
  misc_feature 1..22: note = chemically synthesized
  source 1..22: mol_type = other DNA
aagaaaaaaatggatggttgca

SEQ ID NO: 12633 - DNA, 22 bp, synthetic construct
  misc_feature 1..22: note = chemically synthesized
  source 1..22: mol_type = other DNA
catctctactgaacatgtacag

SEQ ID NO: 12634 - DNA, 22 bp, synthetic construct
  misc_feature 1..22: note = chemically synthesized
  source 1..22: mol_type = other DNA
tactgaacatgtacagactctt

SEQ ID NO: 12635 - DNA, 22 bp, synthetic construct
  misc_feature 1..22: note = chemically synthesized
  source 1..22: mol_type = other DNA
ctgaacatgtacagactctttt

SEQ ID NO: 12636 - DNA, 22 bp, synthetic construct
  misc_feature 1..22: note = chemically synthesized
  source 1..22: mol_type = other DNA
aacatgtacagactcttttatc

SEQ ID NO: 12637 - DNA, 22 bp, synthetic construct
  misc_feature 1..22: note = chemically synthesized
  source 1..22: mol_type = other DNA
ttttatctttcattattcccta

SEQ ID NO: 12638 - DNA, 22 bp, synthetic construct
  misc_feature 1..22: note = chemically synthesized
  source 1..22: mol_type = other DNA
ttatctttcattattccctaaa

SEQ ID NO: 12639 - DNA, 22 bp, synthetic construct
  misc_feature 1..22: note = chemically synthesized
  source 1..22: mol_type = other DNA
tatctttcattattccctaaac

SEQ ID NO: 12640 - DNA, 22 bp, synthetic construct
  misc_feature 1..22: note = chemically synthesized
  source 1..22: mol_type = other DNA
atctttcattattccctaaaca

SEQ ID NO: 12641 - DNA, 22 bp, synthetic construct
  misc_feature 1..22: note = chemically synthesized
  source 1..22: mol_type = other DNA
tctttcattattccctaaacaa

SEQ ID NO: 12642 - DNA, 22 bp, synthetic construct
  misc_feature 1..22: note = chemically synthesized
  source 1..22: mol_type = other DNA
tcattattccctaaacaataca

SEQ ID NO: 12643 - DNA, 22 bp, synthetic construct
  misc_feature 1..22: note = chemically synthesized
  source 1..22: mol_type = other DNA
cattattccctaaacaatacag

SEQ ID NO: 12644 - DNA, 22 bp, synthetic construct
  misc_feature 1..22: note = chemically synthesized
  source 1..22: mol_type = other DNA
attattccctaaacaatacagc

SEQ ID NO: 12645 - DNA, 22 bp, synthetic construct
  misc_feature 1..22: note = chemically synthesized
  source 1..22: mol_type = other DNA
ttccctaaacaatacagcataa

SEQ ID NO: 12646 - DNA, 22 bp, synthetic construct
  misc_feature 1..22: note = chemically synthesized
  source 1..22: mol_type = other DNA
cctaaacaatacagcataacaa

SEQ ID NO: 12647 - DNA, 22 bp, synthetic construct
  misc_feature 1..22: note = chemically synthesized
  source 1..22: mol_type = other DNA
aacaatacagcataacaactat

SEQ ID NO: 12648 - DNA, 22 bp, synthetic construct
  misc_feature 1..22: note = chemically synthesized
  source 1..22: mol_type = other DNA
tttacatagcatttacattgta

SEQ ID NO: 12649 - DNA, 22 bp, synthetic construct
  misc_feature 1..22: note = chemically synthesized
  source 1..22: mol_type = other DNA
acatagcatttacattgtatta

SEQ ID NO: 12650 - DNA, 22 bp, synthetic construct
  misc_feature 1..22: note = chemically synthesized
  source 1..22: mol_type = other DNA
catagcatttacattgtattag

SEQ ID NO: 12651 - DNA, 22 bp, synthetic construct
  misc_feature 1..22: note = chemically synthesized
  source 1..22: mol_type = other DNA
acattgtattagctattaagag

SEQ ID NO: 12652 - DNA, 22 bp, synthetic construct
  misc_feature 1..22: note = chemically synthesized
  source 1..22: mol_type = other DNA
cattgtattagctattaagaga

SEQ ID NO: 12653 - DNA, 22 bp, synthetic construct
  misc_feature 1..22: note = chemically synthesized
  source 1..22: mol_type = other DNA
tattagctattaagagaaacct

SEQ ID NO: 12654 - DNA, 22 bp, synthetic construct
  misc_feature 1..22: note = chemically synthesized
  source 1..22: mol_type = other DNA
gctattaagagaaacctagaga

SEQ ID NO: 12655 - DNA, 22 bp, synthetic construct
  misc_feature 1..22: note = chemically synthesized
  source 1..22: mol_type = other DNA
ttaagagaaacctagagatgat

SEQ ID NO: 12656 - DNA, 22 bp, synthetic construct
  misc_feature 1..22: note = chemically synthesized
  source 1..22: mol_type = other DNA
agagaaacctagagatgattta

SEQ ID NO: 12657 - DNA, 22 bp, synthetic construct
  misc_feature 1..22: note = chemically synthesized
  source 1..22: mol_type = other DNA
gagatgatttaaagtacaaagg

SEQ ID NO: 12658 - DNA, 22 bp, synthetic construct
  misc_feature 1..22: note = chemically synthesized
  source 1..22: mol_type = other DNA
aaagtacaaaggaggatgtgtt

SEQ ID NO: 12659 - DNA, 22 bp, synthetic construct
  misc_feature 1..22: note = chemically synthesized
  source 1..22: mol_type = other DNA
aagtacaaaggaggatgtgttt

SEQ ID NO: 12660 - DNA, 22 bp, synthetic construct
  misc_feature 1..22: note = chemically synthesized
  source 1..22: mol_type = other DNA
aggttatatgcaaatagtaagc

SEQ ID NO: 12661 - DNA, 22 bp, synthetic construct
  misc_feature 1..22: note = chemically synthesized
  source 1..22: mol_type = other DNA
ggttatatgcaaatagtaagcc

SEQ ID NO: 12662 - DNA, 22 bp, synthetic construct
  misc_feature 1..22: note = chemically synthesized
  source 1..22: mol_type = other DNA
tatgcaaatagtaagccatttt

SEQ ID NO: 12663 - DNA, 22 bp, synthetic construct
  misc_feature 1..22: note = chemically synthesized
  source 1..22: mol_type = other DNA
ttatatcggagacttgagcatc

SEQ ID NO: 12664 - DNA, 22 bp, synthetic construct
  misc_feature 1..22: note = chemically synthesized
  source 1..22: mol_type = other DNA
tatatcggagacttgagcatcc

SEQ ID NO: 12665 - DNA, 22 bp, synthetic construct
  misc_feature 1..22: note = chemically synthesized
  source 1..22: mol_type = other DNA
atatcggagacttgagcatcca

SEQ ID NO: 12666 - DNA, 22 bp, synthetic construct
  misc_feature 1..22: note = chemically synthesized
  source 1..22: mol_type = other DNA
tatcggagacttgagcatccac

SEQ ID NO: 12667 - DNA, 22 bp, synthetic construct
  misc_feature 1..22: note = chemically synthesized
  source 1..22: mol_type = other DNA
gagcatccacagatcttgatat

SEQ ID NO: 12668 - DNA, 22 bp, synthetic construct
  misc_feature 1..22: note = chemically synthesized
  source 1..22: mol_type = other DNA
agcatccacagatcttgatatt

SEQ ID NO: 12669 - DNA, 22 bp, synthetic construct
  misc_feature 1..22: note = chemically synthesized
  source 1..22: mol_type = other DNA
gatatttgcagggggtcttgcc

SEQ ID NO: 12670 - DNA, 22 bp, synthetic construct
  misc_feature 1..22: note = chemically synthesized
  source 1..22: mol_type = other DNA
atatttgcagggggtcttgcca

SEQ ID NO: 12671 - DNA, 22 bp, synthetic construct
  misc_feature 1..22: note = chemically synthesized
  source 1..22: mol_type = other DNA
gcagggggtcttgccaccaatt

SEQ ID NO: 12672 - DNA, 22 bp, synthetic construct
  misc_feature 1..22: note = chemically synthesized
  source 1..22: mol_type = other DNA
cagggggtcttgccaccaattt

SEQ ID NO: 12673 - DNA, 22 bp, synthetic construct
  misc_feature 1..22: note = chemically synthesized
  source 1..22: mol_type = other DNA
gccaccaattttccatggatac

SEQ ID NO: 12674 - DNA, 22 bp, synthetic construct
  misc_feature 1..22: note = chemically synthesized
  source 1..22: mol_type = other DNA
ccaccaattttccatggatact

SEQ ID NO: 12675 - DNA, 22 bp, synthetic construct
  misc_feature 1..22: note = chemically synthesized
  source 1..22: mol_type = other DNA
tccatggatactgaggaacgac

SEQ ID NO: 12676 - DNA, 22 bp, synthetic construct
  misc_feature 1..22: note = chemically synthesized
  source 1..22: mol_type = other DNA
ccatggatactgaggaacgact

SEQ ID NO: 12677 - DNA, 22 bp, synthetic construct
  misc_feature 1..22: note = chemically synthesized
  source 1..22: mol_type = other DNA
catggatactgaggaacgactg

SEQ ID NO: 12678 - DNA, 22 bp, synthetic construct
  misc_feature 1..22: note = chemically synthesized
  source 1..22: mol_type = other DNA
aggaacgactgtaaatggatgc

SEQ ID NO: 12679 - DNA, 22 bp, synthetic construct
  misc_feature 1..22: note = chemically synthesized
  source 1..22: mol_type = other DNA
taaatggatgcaggcatggatg

SEQ ID NO: 12680 - DNA, 22 bp, synthetic construct
  misc_feature 1..22: note = chemically synthesized
  source 1..22: mol_type = other DNA
tttaggagtgtccagggccaag

SEQ ID NO: 12681 - DNA, 22 bp, synthetic construct
  misc_feature 1..22: note = chemically synthesized
  source 1..22: mol_type = other DNA
aggagtgtccagggccaagtaa

SEQ ID NO: 12682 - DNA, 22 bp, synthetic construct
  misc_feature 1..22: note = chemically synthesized
  source 1..22: mol_type = other DNA
ggagtgtccagggccaagtaaa

SEQ ID NO: 12683 - DNA, 22 bp, synthetic construct
  misc_feature 1..22: note = chemically synthesized
  source 1..22: mol_type = other DNA
ctgagcagagaggtgggtggag

SEQ ID NO: 12684 - DNA, 22 bp, synthetic construct
  misc_feature 1..22: note = chemically synthesized
  source 1..22: mol_type = other DNA
agcagagaggtgggtggaggct

SEQ ID NO: 12685 - DNA, 22 bp, synthetic construct
  misc_feature 1..22: note = chemically synthesized
  source 1..22: mol_type = other DNA
tgaggcatcaatatgtggtggc

SEQ ID NO: 12686 - DNA, 22 bp, synthetic construct
  misc_feature 1..22: note = chemically synthesized
  source 1..22: mol_type = other DNA
cattttggtgatttttttcctt

SEQ ID NO: 12687 - DNA, 22 bp, synthetic construct
  misc_feature 1..22: note = chemically synthesized
  source 1..22: mol_type = other DNA
tggtgatttttttccttcacag

SEQ ID NO: 12688 - DNA, 22 bp, synthetic construct
  misc_feature 1..22: note = chemically synthesized
  source 1..22: mol_type = other DNA
ggtgatttttttccttcacagt

SEQ ID NO: 12689 - DNA, 22 bp, synthetic construct
  misc_feature 1..22: note = chemically synthesized
  source 1..22: mol_type = other DNA
gtgatttttttccttcacagtc

SEQ ID NO: 12690 - DNA, 22 bp, synthetic construct
  misc_feature 1..22: note = chemically synthesized
  source 1..22: mol_type = other DNA
ttttccttcacagtcctcggct

SEQ ID NO: 12691 - DNA, 22 bp, synthetic construct
  misc_feature 1..22: note = chemically synthesized
  source 1..22: mol_type = other DNA
tttccttcacagtcctcggctg

SEQ ID NO: 12692 - DNA, 22 bp, synthetic construct
  misc_feature 1..22: note = chemically synthesized
  source 1..22: mol_type = other DNA
ttccttcacagtcctcggctgt

SEQ ID NO: 12693 - DNA, 22 bp, synthetic construct
  misc_feature 1..22: note = chemically synthesized
  source 1..22: mol_type = other DNA
tccttcacagtcctcggctgtc

SEQ ID NO: 12694 - DNA, 22 bp, synthetic construct
  misc_feature 1..22: note = chemically synthesized
  source 1..22: mol_type = other DNA
ccttcacagtcctcggctgtct

SEQ ID NO: 12695 - DNA, 22 bp, synthetic construct
  misc_feature 1..22: note = chemically synthesized
  source 1..22: mol_type = other DNA
cttcacagtcctcggctgtctg

SEQ ID NO: 12696 - DNA, 22 bp, synthetic construct
  misc_feature 1..22: note = chemically synthesized
  source 1..22: mol_type = other DNA
cacagtcctcggctgtctggga

SEQ ID NO: 12697 - DNA, 22 bp, synthetic construct
  misc_feature 1..22: note = chemically synthesized
  source 1..22: mol_type = other DNA
acagtcctcggctgtctgggaa

SEQ ID NO: 12698 - DNA, 22 bp, synthetic construct
  misc_feature 1..22: note = chemically synthesized
  source 1..22: mol_type = other DNA
ggctgtctgggaagagaaggat

SEQ ID NO: 12699 - DNA, 22 bp, synthetic construct
  misc_feature 1..22: note = chemically synthesized
  source 1..22: mol_type = other DNA
tctgggaagagaaggatgaagg

SEQ ID NO: 12700 - DNA, 22 bp, synthetic construct
  misc_feature 1..22: note = chemically synthesized
  source 1..22: mol_type = other DNA
ggaagagaaggatgaaggcaga

SEQ ID NO: 12701 - DNA, 22 bp, synthetic construct
  misc_feature 1..22: note = chemically synthesized
  source 1..22: mol_type = other DNA
ctccaatttaggggctaggatt

SEQ ID NO: 12702 - DNA, 22 bp, synthetic construct
  misc_feature 1..22: note = chemically synthesized
  source 1..22: mol_type = other DNA
caatttaggggctaggattgca

SEQ ID NO: 12703 - DNA, 22 bp, synthetic construct
  misc_feature 1..22: note = chemically synthesized
  source 1..22: mol_type = other DNA
aggggctaggattgcagggtgg

SEQ ID NO: 12704 - DNA, 22 bp, synthetic construct
  misc_feature 1..22: note = chemically synthesized
  source 1..22: mol_type = other DNA
ggggctaggattgcagggtggg

SEQ ID NO: 12705 - DNA, 22 bp, synthetic construct
  misc_feature 1..22: note = chemically synthesized
  source 1..22: mol_type = other DNA
ggattgcagggtgggcacagca

SEQ ID NO: 12706 - DNA, 22 bp, synthetic construct
  misc_feature 1..22: note = chemically synthesized
  source 1..22: mol_type = other DNA
cagggtgggcacagcattgcaa

SEQ ID NO: 12707 - DNA, 22 bp, synthetic construct
  misc_feature 1..22: note = chemically synthesized
  source 1..22: mol_type = other DNA
caaacgagtgaaggaaattgag

SEQ ID NO: 12708 - DNA, 22 bp, synthetic construct
  misc_feature 1..22: note = chemically synthesized
  source 1..22: mol_type = other DNA
agaaatatggccaatgaagagt

SEQ ID NO: 12709 - DNA, 22 bp, synthetic construct
  misc_feature 1..22: note = chemically synthesized
  source 1..22: mol_type = other DNA
aagagaggcctggcatggtggc

SEQ ID NO: 12710 - DNA, 22 bp, synthetic construct
  misc_feature 1..22: note = chemically synthesized
  source 1..22: mol_type = other DNA
gcatggtggctcacacctataa

SEQ ID NO: 12711 - DNA, 22 bp, synthetic construct
  misc_feature 1..22: note = chemically synthesized
  source 1..22: mol_type = other DNA
acacctataatcccagcacttt

SEQ ID NO: 12712 - DNA, 22 bp, synthetic construct
  misc_feature 1..22: note = chemically synthesized
  source 1..22: mol_type = other DNA
taatcccagcactttcagaggc

SEQ ID NO: 12713 - DNA, 22 bp, synthetic construct
  misc_feature 1..22: note = chemically synthesized
  source 1..22: mol_type = other DNA
tcagaggcccaggcaggcagat

SEQ ID NO: 12714 - DNA, 22 bp, synthetic construct
  misc_feature 1..22: note = chemically synthesized
  source 1..22: mol_type = other DNA
cagaggcccaggcaggcagatc

SEQ ID NO: 12715 - DNA, 22 bp, synthetic construct
  misc_feature 1..22: note = chemically synthesized
  source 1..22: mol_type = other DNA
agaggcccaggcaggcagatca

SEQ ID NO: 12716 - DNA, 22 bp, synthetic construct
  misc_feature 1..22: note = chemically synthesized
  source 1..22: mol_type = other DNA
gaggtcaggagttcgacaccag

SEQ ID NO: 12717 - DNA, 22 bp, synthetic construct
  misc_feature 1..22: note = chemically synthesized
  source 1..22: mol_type = other DNA
aggtcaggagttcgacaccagc

SEQ ID NO: 12718 - DNA, 22 bp, synthetic construct
  misc_feature 1..22: note = chemically synthesized
  source 1..22: mol_type = other DNA
gacaccagcctggccaacaagg

SEQ ID NO: 12719 - DNA, 22 bp, synthetic construct
  misc_feature 1..22: note = chemically synthesized
  source 1..22: mol_type = other DNA
gccaacaaggtgaaatggtgaa

SEQ ID NO: 12720 - DNA, 22 bp, synthetic construct
  misc_feature 1..22: note = chemically synthesized
  source 1..22: mol_type = other DNA
tactaaaaatacaaaaattagc

SEQ ID NO: 12721 - DNA, 22 bp, synthetic construct
  misc_feature 1..22: note = chemically synthesized
  source 1..22: mol_type = other DNA
actaaaaatacaaaaattagct

SEQ ID NO: 12722 - DNA, 22 bp, synthetic construct
  misc_feature 1..22: note = chemically synthesized
  source 1..22: mol_type = other DNA
ctaaaaatacaaaaattagctg

SEQ ID NO: 12723 - DNA, 22 bp, synthetic construct
  misc_feature 1..22: note = chemically synthesized
  source 1..22: mol_type = other DNA
aaaatacaaaaattagctgggc

SEQ ID NO: 12724 - DNA, 22 bp, synthetic construct
  misc_feature 1..22: note = chemically synthesized
  source 1..22: mol_type = other DNA
gctgggcatggtggcgggtgcc

SEQ ID NO: 12725 - DNA, 22 bp, synthetic construct
  misc_feature 1..22: note = chemically synthesized
  source 1..22: mol_type = other DNA
ggcatggtggcgggtgcctgta

SEQ ID NO: 12726 - DNA, 22 bp, synthetic construct
  misc_feature 1..22: note = chemically synthesized
  source 1..22: mol_type = other DNA
taatcccagctacttgggaggc

SEQ ID NO: 12727 - DNA, 22 bp, synthetic construct
  misc_feature 1..22: note = chemically synthesized
  source 1..22: mol_type = other DNA
cttgggaggctgaggcaggaga

SEQ ID NO: 12728 - DNA, 22 bp, synthetic construct
  misc_feature 1..22: note = chemically synthesized
  source 1..22: mol_type = other DNA
gggaggctgaggcaggagaata

SEQ ID NO: 12729 - DNA, 22 bp, synthetic construct
  misc_feature 1..22: note = chemically synthesized
  source 1..22: mol_type = other DNA
ggaggctgaggcaggagaatag

SEQ ID NO: 12730 - DNA, 22 bp, synthetic construct
  misc_feature 1..22: note = chemically synthesized
  source 1..22: mol_type = other DNA
aggcaggagaatagcttgaacc

SEQ ID NO: 12731 - DNA, 22 bp, synthetic construct
  misc_feature 1..22: note = chemically synthesized
  source 1..22: mol_type = other DNA
gaacctgggagatggaggttgc

SEQ ID NO: 12732 - DNA, 22 bp, synthetic construct
  misc_feature 1..22: note = chemically synthesized
  source 1..22: mol_type = other DNA
aacctgggagatggaggttgca

SEQ ID NO: 12733 - DNA, 22 bp, synthetic construct
  misc_feature 1..22: note = chemically synthesized
  source 1..22: mol_type = other DNA
ggagatggaggttgcagtgagc

SEQ ID NO: 12734 - DNA, 22 bp, synthetic construct
  misc_feature 1..22: note = chemically synthesized
  source 1..22: mol_type = other DNA
cagtgagctgagatcgcaccac

SEQ ID NO: 12735 - DNA, 22 bp, synthetic construct
  misc_feature 1..22: note = chemically synthesized
  source 1..22: mol_type = other DNA
agatcgcaccactgcactccag

SEQ ID NO: 12736 - DNA, 22 bp, synthetic construct
  misc_feature 1..22: note = chemically synthesized
  source 1..22: mol_type = other DNA
cactccagcctgggcgacagag

SEQ ID NO: 12737 - DNA, 22 bp, synthetic construct
  misc_feature 1..22: note = chemically synthesized
  source 1..22: mol_type = other DNA
cagcctgggcgacagagcaaga

SEQ ID NO: 12738 - DNA, 22 bp, synthetic construct
  misc_feature 1..22: note = chemically synthesized
  source 1..22: mol_type = other DNA
ggcgacagagcaagactctgtc

SEQ ID NO: 12739 - DNA, 22 bp, synthetic construct
  misc_feature 1..22: note = chemically synthesized
  source 1..22: mol_type = other DNA
tgtcaaaaaaaaaagagttgaa

SEQ ID NO: 12740 - DNA, 22 bp, synthetic construct
  misc_feature 1..22: note = chemically synthesized
  source 1..22: mol_type = other DNA
tcaaaaaaaaaagagttgaaga

SEQ ID NO: 12741 - DNA, 22 bp, synthetic construct
  misc_feature 1..22: note = chemically synthesized
  source 1..22: mol_type = other DNA
aagagaaaaagtctaggctaaa

SEQ ID NO: 12742 - DNA, 22 bp, synthetic construct
  misc_feature 1..22: note = chemically synthesized
  source 1..22: mol_type = other DNA
ggctaaattcaaagaaaaaaag

SEQ ID NO: 12743 - DNA, 22 bp, synthetic construct
  misc_feature 1..22: note = chemically synthesized
  source 1..22: mol_type = other DNA
aattcaaagaaaaaaagtgagc

SEQ ID NO: 12744 - DNA, 22 bp, synthetic construct
  misc_feature 1..22: note = chemically synthesized
  source 1..22: mol_type = other DNA
aaagaaaaaaagtgagcccaaa

SEQ ID NO: 12745 - DNA, 22 bp, synthetic construct
  misc_feature 1..22: note = chemically synthesized
  source 1..22: mol_type = other DNA
gcagagcaagggaaaagcaggg

SEQ ID NO: 12746 - DNA, 22 bp, synthetic construct
  misc_feature 1..22: note = chemically synthesized
  source 1..22: mol_type = other DNA
cagagcaagggaaaagcaggga

SEQ ID NO: 12747 - DNA, 22 bp, synthetic construct
  misc_feature 1..22: note = chemically synthesized
  source 1..22: mol_type = other DNA
gaacactccataaagtgaacag

SEQ ID NO: 12748 - DNA, 22 bp, synthetic construct
  misc_feature 1..22: note = chemically synthesized
  source 1..22: mol_type = other DNA
cataaagtgaacagctgcaatg

SEQ ID NO: 12749 - DNA, 22 bp, synthetic construct
  misc_feature 1..22: note = chemically synthesized
  source 1..22: mol_type = other DNA
caatgaaaataagggaagaaag

SEQ ID NO: 12750 - DNA, 22 bp, synthetic construct
  misc_feature 1..22: note = chemically synthesized
  source 1..22: mol_type = other DNA
agttcatctccgtttctttcct

SEQ ID NO: 12751 - DNA, 22 bp, synthetic construct
  misc_feature 1..22: note = chemically synthesized
  source 1..22: mol_type = other DNA
gttcatctccgtttctttcctt

SEQ ID NO: 12752 - DNA, 22 bp, synthetic construct
  misc_feature 1..22: note = chemically synthesized
  source 1..22: mol_type = other DNA
atctccgtttctttcctttcct

SEQ ID NO: 12753 - DNA, 22 bp, synthetic construct
  misc_feature 1..22: note = chemically synthesized
  source 1..22: mol_type = other DNA
cgtttctttcctttccttttta

SEQ ID NO: 12754 - DNA, 22 bp, synthetic construct
  misc_feature 1..22: note = chemically synthesized
  source 1..22: mol_type = other DNA
ctttcctttcctttttactttc

SEQ ID NO: 12755 - DNA, 22 bp, synthetic construct
  misc_feature 1..22: note = chemically synthesized
  source 1..22: mol_type = other DNA
tttcctttcctttttactttcc

SEQ ID NO: 12756 - DNA, 22 bp, synthetic construct
  misc_feature 1..22: note = chemically synthesized
  source 1..22: mol_type = other DNA
tcctttcctttttactttcctt

SEQ ID NO: 12757 - DNA, 22 bp, synthetic construct
  misc_feature 1..22: note = chemically synthesized
  source 1..22: mol_type = other DNA
cctttcctttttactttccttt

SEQ ID NO: 12758 - DNA, 22 bp, synthetic construct
  misc_feature 1..22: note = chemically synthesized
  source 1..22: mol_type = other DNA
ctttcctttttactttcctttc

SEQ ID NO: 12759 - DNA, 22 bp, synthetic construct
  misc_feature 1..22: note = chemically synthesized
  source 1..22: mol_type = other DNA
tcctttttactttcctttctct

SEQ ID NO: 12760 - DNA, 22 bp, synthetic construct
  misc_feature 1..22: note = chemically synthesized
  source 1..22: mol_type = other DNA
cctttttactttcctttctctt

SEQ ID NO: 12761 - DNA, 22 bp, synthetic construct
  misc_feature 1..22: note = chemically synthesized
  source 1..22: mol_type = other DNA
ctttttactttcctttctcttc

SEQ ID NO: 12762 - DNA, 22 bp, synthetic construct
  misc_feature 1..22: note = chemically synthesized
  source 1..22: mol_type = other DNA
tttactttcctttctcttcctt

SEQ ID NO: 12763 - DNA, 22 bp, synthetic construct
  misc_feature 1..22: note = chemically synthesized
  source 1..22: mol_type = other DNA
ttactttcctttctcttccttt

SEQ ID NO: 12764 - DNA, 22 bp, synthetic construct
  misc_feature 1..22: note = chemically synthesized
  source 1..22: mol_type = other DNA
tactttcctttctcttcctttt

SEQ ID NO: 12765 - DNA, 22 bp, synthetic construct
  misc_feature 1..22: note = chemically synthesized
  source 1..22: mol_type = other DNA
actttcctttctcttccttttt

SEQ ID NO: 12766 - DNA, 22 bp, synthetic construct
  misc_feature 1..22: note = chemically synthesized
  source 1..22: mol_type = other DNA
ctttcctttctcttcctttttg

SEQ ID NO: 12767 - DNA, 22 bp, synthetic construct
  misc_feature 1..22: note = chemically synthesized
  source 1..22: mol_type = other DNA
tcctttctcttcctttttggag

SEQ ID NO: 12768 - DNA, 22 bp, synthetic construct
  misc_feature 1..22: note = chemically synthesized
  source 1..22: mol_type = other DNA
cctttctcttcctttttggagt

SEQ ID NO: 12769 - DNA, 22 bp, synthetic construct
  misc_feature 1..22: note = chemically synthesized
  source 1..22: mol_type = other DNA
ctttctcttcctttttggagtt

SEQ ID NO: 12770 - DNA, 22 bp, synthetic construct
  misc_feature 1..22: note = chemically synthesized
  source 1..22: mol_type = other DNA
tctcttcctttttggagttaat

SEQ ID NO: 12771 - DNA, 22 bp, synthetic construct
  misc_feature 1..22: note = chemically synthesized
  source 1..22: mol_type = other DNA
ctcttcctttttggagttaatc

SEQ ID NO: 12772 - DNA, 22 bp, synthetic construct
  misc_feature 1..22: note = chemically synthesized
  source 1..22: mol_type = other DNA
tcttcctttttggagttaatca

SEQ ID NO: 12773 - DNA, 22 bp, synthetic construct
  misc_feature 1..22: note = chemically synthesized
  source 1..22: mol_type = other DNA
ttcctttttggagttaatcagg

SEQ ID NO: 12774 - DNA, 22 bp, synthetic construct
  misc_feature 1..22: note = chemically synthesized
  source 1..22: mol_type = other DNA
cctttttggagttaatcaggaa

SEQ ID NO: 12775 - DNA, 22 bp, synthetic construct
  misc_feature 1..22: note = chemically synthesized
  source 1..22: mol_type = other DNA
ctttttggagttaatcaggaag

SEQ ID NO: 12776 - DNA, 22 bp, synthetic construct
  misc_feature 1..22: note = chemically synthesized
  source 1..22: mol_type = other DNA
tttggagttaatcaggaagtag

SEQ ID NO: 12777 - DNA, 22 bp, synthetic construct
  misc_feature 1..22: note = chemically synthesized
  source 1..22: mol_type = other DNA
ttggagttaatcaggaagtagt

SEQ ID NO: 12778 - DNA, 22 bp, synthetic construct
  misc_feature 1..22: note = chemically synthesized
  source 1..22: mol_type = other DNA
tggagttaatcaggaagtagtc

SEQ ID NO: 12779 - DNA, 22 bp, synthetic construct
  misc_feature 1..22: note = chemically synthesized
  source 1..22: mol_type = other DNA
ggagttaatcaggaagtagtcc

SEQ ID NO: 12780 - DNA, 22 bp, synthetic construct
  misc_feature 1..22: note = chemically synthesized
  source 1..22: mol_type = other DNA
gagttaatcaggaagtagtccc

SEQ ID NO: 12781 - DNA, 22 bp, synthetic construct
  misc_feature 1..22: note = chemically synthesized
  source 1..22: mol_type = other DNA
atcaggaagtagtcccaaatac

SEQ ID NO: 12782 - DNA, 22 bp, synthetic construct
  misc_feature 1..22: note = chemically synthesized
  source 1..22: mol_type = other DNA
atcttataagcccttggtcctc

SEQ ID NO: 12783 - DNA, 22 bp, synthetic construct
  misc_feature 1..22: note = chemically synthesized
  source 1..22: mol_type = other DNA
ataagcccttggtcctcttgag

SEQ ID NO: 12784 - DNA, 22 bp, synthetic construct
  misc_feature 1..22: note = chemically synthesized
  source 1..22: mol_type = other DNA
taagcccttggtcctcttgaga

SEQ ID NO: 12785 - DNA, 22 bp, synthetic construct
  misc_feature 1..22: note = chemically synthesized
  source 1..22: mol_type = other DNA
ggtcctcttgagatggtatcag

SEQ ID NO: 12786 - DNA, 22 bp, synthetic construct
  misc_feature 1..22: note = chemically synthesized
  source 1..22: mol_type = other DNA
gtcctcttgagatggtatcaga

SEQ ID NO: 12787 - DNA, 22 bp, synthetic construct
  misc_feature 1..22: note = chemically synthesized
  source 1..22: mol_type = other DNA
ttgagatggtatcagatatatt

SEQ ID NO: 12788 - DNA, 22 bp, synthetic construct
  misc_feature 1..22: note = chemically synthesized
  source 1..22: mol_type = other DNA
gagatggtatcagatatattgc

SEQ ID NO: 12789 - DNA, 22 bp, synthetic construct
  misc_feature 1..22: note = chemically synthesized
  source 1..22: mol_type = other DNA
agatggtatcagatatattgct

SEQ ID NO: 12790 - DNA, 22 bp, synthetic construct
  misc_feature 1..22: note = chemically synthesized
  source 1..22: mol_type = other DNA
ctagacccttgaagaaaggaac

SEQ ID NO: 12791 - DNA, 22 bp, synthetic construct
  misc_feature 1..22: note = chemically synthesized
  source 1..22: mol_type = other DNA
gacccttgaagaaaggaacaac

SEQ ID NO: 12792 - DNA, 22 bp, synthetic construct
  misc_feature 1..22: note = chemically synthesized
  source 1..22: mol_type = other DNA
gaagaaaggaacaactccaggc

SEQ ID NO: 12793 - DNA, 22 bp, synthetic construct
  misc_feature 1..22: note = chemically synthesized
  source 1..22: mol_type = other DNA
aagaaaggaacaactccaggca

SEQ ID NO: 12794 - DNA, 22 bp, synthetic construct
  misc_feature 1..22: note = chemically synthesized
  source 1..22: mol_type = other DNA
caggcaacttcttgagtccctg

SEQ ID NO: 12795 - DNA, 22 bp, synthetic construct
  misc_feature 1..22: note = chemically synthesized
  source 1..22: mol_type = other DNA
cttgagtccctgttattaattt

SEQ ID NO: 12796 - DNA, 22 bp, synthetic construct
  misc_feature 1..22: note = chemically synthesized
  source 1..22: mol_type = other DNA
ttgagtccctgttattaatttt

SEQ ID NO: 12797 - DNA, 22 bp, synthetic construct
  misc_feature 1..22: note = chemically synthesized
  source 1..22: mol_type = other DNA
gagtccctgttattaattttat

SEQ ID NO: 12798 - DNA, 22 bp, synthetic construct
  misc_feature 1..22: note = chemically synthesized
  source 1..22: mol_type = other DNA
agtccctgttattaattttata

SEQ ID NO: 12799 - DNA, 22 bp, synthetic construct
  misc_feature 1..22: note = chemically synthesized
  source 1..22: mol_type = other DNA
ttattaattttatacatacaca

SEQ ID NO: 12800 - DNA, 22 bp, synthetic construct
  misc_feature 1..22: note = chemically synthesized
  source 1..22: mol_type = other DNA
ttaattttatacatacacacac

SEQ ID NO: 12801 - DNA, 22 bp, synthetic construct
  misc_feature 1..22: note = chemically synthesized
  source 1..22: mol_type = other DNA
attttatacatacacacacata

SEQ ID NO: 12802 - DNA, 22 bp, synthetic construct
  misc_feature 1..22: note = chemically synthesized
  source 1..22: mol_type = other DNA
tatacatacacacacatatatg

SEQ ID NO: 12803 - DNA, 22 bp, synthetic construct
  misc_feature 1..22: note = chemically synthesized
  source 1..22: mol_type = other DNA
atacatacacacacatatatgt

SEQ ID NO: 12804 - DNA, 22 bp, synthetic construct
  misc_feature 1..22: note = chemically synthesized
  source 1..22: mol_type = other DNA
tacatacacacacatatatgta

SEQ ID NO: 12805 - DNA, 22 bp, synthetic construct
  misc_feature 1..22: note = chemically synthesized
  source 1..22: mol_type = other DNA
cttaacaatggggatatattct

SEQ ID NO: 12806 - DNA, 22 bp, synthetic construct
  misc_feature 1..22: note = chemically synthesized
  source 1..22: mol_type = other DNA
aacaatggggatatattctgag

SEQ ID NO: 12807 - DNA, 22 bp, synthetic construct
  misc_feature 1..22: note = chemically synthesized
  source 1..22: mol_type = other DNA
acaatggggatatattctgaga

SEQ ID NO: 12808 - DNA, 22 bp, synthetic construct
  misc_feature 1..22: note = chemically synthesized
  source 1..22: mol_type = other DNA
tgagaaatgtgtcattaagcaa

SEQ ID NO: 12809 - DNA, 22 bp, synthetic construct
  misc_feature 1..22: note = chemically synthesized
  source 1..22: mol_type = other DNA
agaaatgtgtcattaagcaatt

SEQ ID NO: 12810 - DNA, 22 bp, synthetic construct
  misc_feature 1..22: note = chemically synthesized
  source 1..22: mol_type = other DNA
agcaatttcatcattgtgcgaa

SEQ ID NO: 12811 - DNA, 22 bp, synthetic construct
  misc_feature 1..22: note = chemically synthesized
  source 1..22: mol_type = other DNA
catcattgtgcgaacataatag

SEQ ID NO: 12812 - DNA, 22 bp, synthetic construct
  misc_feature 1..22: note = chemically synthesized
  source 1..22: mol_type = other DNA
atcattgtgcgaacataataga

SEQ ID NO: 12813 - DNA, 22 bp, synthetic construct
  misc_feature 1..22: note = chemically synthesized
  source 1..22: mol_type = other DNA
tgcgaacataatagagtgtact

SEQ ID NO: 12814 - DNA, 22 bp, synthetic construct
  misc_feature 1..22: note = chemically synthesized
  source 1..22: mol_type = other DNA
acctaaacctaaatggtatagc

SEQ ID NO: 12815 - DNA, 22 bp, synthetic construct
  misc_feature 1..22: note = chemically synthesized
  source 1..22: mol_type = other DNA
cctaaacctaaatggtatagct

SEQ ID NO: 12816 - DNA, 22 bp, synthetic construct
  misc_feature 1..22: note = chemically synthesized
  source 1..22: mol_type = other DNA
aacctaaatggtatagcttact

SEQ ID NO: 12817 - DNA, 22 bp, synthetic construct
  misc_feature 1..22: note = chemically synthesized
  source 1..22: mol_type = other DNA
aatggtatagcttactacatac

SEQ ID NO: 12818 - DNA, 22 bp, synthetic construct
  misc_feature 1..22: note = chemically synthesized
  source 1..22: mol_type = other DNA
actacatacctaggttgtattg

SEQ ID NO: 12819 - DNA, 22 bp, synthetic construct
  misc_feature 1..22: note = chemically synthesized
  source 1..22: mol_type = other DNA
ctacatacctaggttgtattga

SEQ ID NO: 12820 - DNA, 22 bp, synthetic construct
  misc_feature 1..22: note = chemically synthesized
  source 1..22: mol_type = other DNA
catacctaggttgtattgatgt

SEQ ID NO: 12821 - DNA, 22 bp, synthetic construct
  misc_feature 1..22: note = chemically synthesized
  source 1..22: mol_type = other DNA
ggttgtattgatgtggcctatt

SEQ ID NO: 12822 - DNA, 22 bp, synthetic construct
  misc_feature 1..22: note = chemically synthesized
  source 1..22: mol_type = other DNA
tattgatgtggcctattgctcc

SEQ ID NO: 12823 - DNA, 22 bp, synthetic construct
  misc_feature 1..22: note = chemically synthesized
  source 1..22: mol_type = other DNA
atgtggcctattgctcctaggc

SEQ ID NO: 12824 - DNA, 22 bp, synthetic construct
  misc_feature 1..22: note = chemically synthesized
  source 1..22: mol_type = other DNA
ttgctcctaggctcctgggctg

SEQ ID NO: 12825 - DNA, 22 bp, synthetic construct
  misc_feature 1..22: note = chemically synthesized
  source 1..22: mol_type = other DNA
ctcctaggctcctgggctgcaa

SEQ ID NO: 12826 - DNA, 22 bp, synthetic construct
  misc_feature 1..22: note = chemically synthesized
  source 1..22: mol_type = other DNA
ctaggctcctgggctgcaaacc

SEQ ID NO: 12827 - DNA, 22 bp, synthetic construct
  misc_feature 1..22: note = chemically synthesized
  source 1..22: mol_type = other DNA
ggctcctgggctgcaaacctgt

SEQ ID NO: 12828 - DNA, 22 bp, synthetic construct
  misc_feature 1..22: note = chemically synthesized
  source 1..22: mol_type = other DNA
ctgggctgcaaacctgtacagc

SEQ ID NO: 12829 - DNA, 22 bp, synthetic construct
  misc_feature 1..22: note = chemically synthesized
  source 1..22: mol_type = other DNA
ggctgcaaacctgtacagcatg

SEQ ID NO: 12830 - DNA, 22 bp, synthetic construct
  misc_feature 1..22: note = chemically synthesized
  source 1..22: mol_type = other DNA
caaacctgtacagcatgtgact

SEQ ID NO: 12831 - DNA, 22 bp, synthetic construct
  misc_feature 1..22: note = chemically synthesized
  source 1..22: mol_type = other DNA
tacagcatgtgactgtactgaa

SEQ ID NO: 12832 - DNA, 22 bp, synthetic construct
  misc_feature 1..22: note = chemically synthesized
  source 1..22: mol_type = other DNA
tactgaacactgtaggcaatgg

SEQ ID NO: 12833 - DNA, 22 bp, synthetic construct
  misc_feature 1..22: note = chemically synthesized
  source 1..22: mol_type = other DNA
aacactgtaggcaatggtaaca

SEQ ID NO: 12834 - DNA, 22 bp, synthetic construct
  misc_feature 1..22: note = chemically synthesized
  source 1..22: mol_type = other DNA
taggcaatggtaacagtggtat

SEQ ID NO: 12835 - DNA, 22 bp, synthetic construct
  misc_feature 1..22: note = chemically synthesized
  source 1..22: mol_type = other DNA
gtgtatctaaacatagaaaagg

SEQ ID NO: 12836 - DNA, 22 bp, synthetic construct
  misc_feature 1..22: note = chemically synthesized
  source 1..22: mol_type = other DNA
tgtatctaaacatagaaaaggt

SEQ ID NO: 12837 - DNA, 22 bp, synthetic construct
  misc_feature 1..22: note = chemically synthesized
  source 1..22: mol_type = other DNA
aacatagaaaaggtacagtgaa

SEQ ID NO: 12838 - DNA, 22 bp, synthetic construct
  misc_feature 1..22: note = chemically synthesized
  source 1..22: mol_type = other DNA
taaccttatgggaccactgtcg

SEQ ID NO: 12839 - DNA, 22 bp, synthetic construct
  misc_feature 1..22: note = chemically synthesized
  source 1..22: mol_type = other DNA
atgggaccactgtcgtataatg

SEQ ID NO: 12840 - DNA, 22 bp, synthetic construct
  misc_feature 1..22: note = chemically synthesized
  source 1..22: mol_type = other DNA
tgggaccactgtcgtataatgt

SEQ ID NO: 12841 - DNA, 22 bp, synthetic construct
  misc_feature 1..22: note = chemically synthesized
  source 1..22: mol_type = other DNA
tcgtataatgtggtccatcatt

SEQ ID NO: 12842 - DNA, 22 bp, synthetic construct
  misc_feature 1..22: note = chemically synthesized
  source 1..22: mol_type = other DNA
accaaaatgtcattgtgcagca

SEQ ID NO: 12843 - DNA, 22 bp, synthetic construct
  misc_feature 1..22: note = chemically synthesized
  source 1..22: mol_type = other DNA
tgcagcaaatgattatctcata

SEQ ID NO: 12844 - DNA, 22 bp, synthetic construct
  misc_feature 1..22: note = chemically synthesized
  source 1..22: mol_type = other DNA
tctcatatatatatatatatga

SEQ ID NO: 12845 - DNA, 22 bp, synthetic construct
  misc_feature 1..22: note = chemically synthesized
  source 1..22: mol_type = other DNA
atatatatatatatatgatatg

SEQ ID NO: 12846 - DNA, 22 bp, synthetic construct
  misc_feature 1..22: note = chemically synthesized
  source 1..22: mol_type = other DNA
agatagagacatctatcctcca

SEQ ID NO: 12847 - DNA, 22 bp, synthetic construct
  misc_feature 1..22: note = chemically synthesized
  source 1..22: mol_type = other DNA
tcctccagagttcaggagtgtc

SEQ ID NO: 12848 - DNA, 22 bp, synthetic construct
  misc_feature 1..22: note = chemically synthesized
  source 1..22: mol_type = other DNA
cagagttcaggagtgtctcttc

SEQ ID NO: 12849 - DNA, 22 bp, synthetic construct
  misc_feature 1..22: note = chemically synthesized
  source 1..22: mol_type = other DNA
aggagtgtctcttcagactagg

SEQ ID NO: 12850 - DNA, 22 bp, synthetic construct
  misc_feature 1..22: note = chemically synthesized
  source 1..22: mol_type = other DNA
ttcagactaggtagatgtagct

SEQ ID NO: 12851 - DNA, 22 bp, synthetic construct
  misc_feature 1..22: note = chemically synthesized
  source 1..22: mol_type = other DNA
cagactaggtagatgtagctta

SEQ ID NO: 12852 - DNA, 22 bp, synthetic construct
  misc_feature 1..22: note = chemically synthesized
  source 1..22: mol_type = other DNA
agactaggtagatgtagcttaa

SEQ ID NO: 12853 - DNA, 22 bp, synthetic construct
  misc_feature 1..22: note = chemically synthesized
  source 1..22: mol_type = other DNA
ggtagatgtagcttaaaaaaaa

SEQ ID NO: 12854 - DNA, 22 bp, synthetic construct
  misc_feature 1..22: note = chemically synthesized
  source 1..22: mol_type = other DNA
aaaaaaaacatatcctgaattc

SEQ ID NO: 12855 - DNA, 22 bp, synthetic construct
  misc_feature 1..22: note = chemically synthesized
  source 1..22: mol_type = other DNA
aaaaaaacatatcctgaattct

SEQ ID NO: 12856 - DNA, 22 bp, synthetic construct
  misc_feature 1..22: note = chemically synthesized
  source 1..22: mol_type = other DNA
aattctagagagatgcttaaat

SEQ ID NO: 12857 - DNA, 22 bp, synthetic construct
  misc_feature 1..22: note = chemically synthesized
  source 1..22: mol_type = other DNA
tagagagatgcttaaatcactg

SEQ ID NO: 12858 - DNA, 22 bp, synthetic construct
  misc_feature 1..22: note = chemically synthesized
  source 1..22: mol_type = other DNA
gagagatgcttaaatcactgca

SEQ ID NO: 12859 - DNA, 22 bp, synthetic construct
  misc_feature 1..22: note = chemically synthesized
  source 1..22: mol_type = other DNA
aaatcactgcaattcctataac

SEQ ID NO: 12860 - DNA, 22 bp, synthetic construct
  misc_feature 1..22: note = chemically synthesized
  source 1..22: mol_type = other DNA
aatcactgcaattcctataaca

SEQ ID NO: 12861 - DNA, 22 bp, synthetic construct
  misc_feature 1..22: note = chemically synthesized
  source 1..22: mol_type = other DNA
caattcctataacacttgccaa

SEQ ID NO: 12862 - DNA, 22 bp, synthetic construct
  misc_feature 1..22: note = chemically synthesized
  source 1..22: mol_type = other DNA
ctataacacttgccaaccaaag

SEQ ID NO: 12863 - DNA, 22 bp, synthetic construct
  misc_feature 1..22: note = chemically synthesized
  source 1..22: mol_type = other DNA
taacacttgccaaccaaaggtg

SEQ ID NO: 12864 - DNA, 22 bp, synthetic construct
  misc_feature 1..22: note = chemically synthesized
  source 1..22: mol_type = other DNA
gccaaccaaaggtgctgttgat

SEQ ID NO: 12865 - DNA, 22 bp, synthetic construct
  misc_feature 1..22: note = chemically synthesized
  source 1..22: mol_type = other DNA
ccaaccaaaggtgctgttgatc

SEQ ID NO: 12866 - DNA, 22 bp, synthetic construct
  misc_feature 1..22: note = chemically synthesized
  source 1..22: mol_type = other DNA
ttgatctgaaattgctttttta

SEQ ID NO: 12867 - DNA, 22 bp, synthetic construct
  misc_feature 1..22: note = chemically synthesized
  source 1..22: mol_type = other DNA
atctgaaattgcttttttaaat

SEQ ID NO: 12868 - DNA, 22 bp, synthetic construct
  misc_feature 1..22: note = chemically synthesized
  source 1..22: mol_type = other DNA
aaattgcttttttaaattaatg

SEQ ID NO: 12869 - DNA, 22 bp, synthetic construct
  misc_feature 1..22: note = chemically synthesized
  source 1..22: mol_type = other DNA
cttttttaaattaatgcagtga

SEQ ID NO: 12870 - DNA, 22 bp, synthetic construct
  misc_feature 1..22: note = chemically synthesized
  source 1..22: mol_type = other DNA
ttttaaattaatgcagtgattt

SEQ ID NO: 12871 - DNA, 22 bp, synthetic construct
  misc_feature 1..22: note = chemically synthesized
  source 1..22: mol_type = other DNA
tttaaattaatgcagtgatttt

SEQ ID NO: 12872 - DNA, 22 bp, synthetic construct
  misc_feature 1..22: note = chemically synthesized
  source 1..22: mol_type = other DNA
ttaaattaatgcagtgattttt

SEQ ID NO: 12873 - DNA, 22 bp, synthetic construct
  misc_feature 1..22: note = chemically synthesized
  source 1..22: mol_type = other DNA
taaattaatgcagtgatttttc

SEQ ID NO: 12874 - DNA, 22 bp, synthetic construct
  misc_feature 1..22: note = chemically synthesized
  source 1..22: mol_type = other DNA
aaattaatgcagtgatttttct

SEQ ID NO: 12875 - DNA, 22 bp, synthetic construct
  misc_feature 1..22: note = chemically synthesized
  source 1..22: mol_type = other DNA
aattaatgcagtgatttttctt

SEQ ID NO: 12876 - DNA, 22 bp, synthetic construct
  misc_feature 1..22: note = chemically synthesized
  source 1..22: mol_type = other DNA
atgcagtgatttttctttaaca

SEQ ID NO: 12877 - DNA, 22 bp, synthetic construct
  misc_feature 1..22: note = chemically synthesized
  source 1..22: mol_type = other DNA
ttctttaacatctagtgacaga

SEQ ID NO: 12878 - DNA, 22 bp, synthetic construct
  misc_feature 1..22: note = chemically synthesized
  source 1..22: mol_type = other DNA
tctttaacatctagtgacagac

SEQ ID NO: 12879 - DNA, 22 bp, synthetic construct
  misc_feature 1..22: note = chemically synthesized
  source 1..22: mol_type = other DNA
ctttaacatctagtgacagaca

SEQ ID NO: 12880 - DNA, 22 bp, synthetic construct
  misc_feature 1..22: note = chemically synthesized
  source 1..22: mol_type = other DNA
tttaacatctagtgacagacac

SEQ ID NO: 12881 - DNA, 22 bp, synthetic construct
  misc_feature 1..22: note = chemically synthesized
  source 1..22: mol_type = other DNA
taacatctagtgacagacactg

SEQ ID NO: 12882 - DNA, 22 bp, synthetic construct
  misc_feature 1..22: note = chemically synthesized
  source 1..22: mol_type = other DNA
aacatctagtgacagacactgg

SEQ ID NO: 12883 - DNA, 22 bp, synthetic construct
  misc_feature 1..22: note = chemically synthesized
  source 1..22: mol_type = other DNA
acatctagtgacagacactggg

SEQ ID NO: 12884 - DNA, 22 bp, synthetic construct
  misc_feature 1..22: note = chemically synthesized
  source 1..22: mol_type = other DNA
gtgacagacactggggtcacat

SEQ ID NO: 12885 - DNA, 22 bp, synthetic construct
  misc_feature 1..22: note = chemically synthesized
  source 1..22: mol_type = other DNA
gggtcacatttgcagctggacc

SEQ ID NO: 12886 - DNA, 22 bp, synthetic construct
  misc_feature 1..22: note = chemically synthesized
  source 1..22: mol_type = other DNA
gcagctggaccataattaggct

SEQ ID NO: 12887 - DNA, 22 bp, synthetic construct
  misc_feature 1..22: note = chemically synthesized
  source 1..22: mol_type = other DNA
cagctggaccataattaggctt

SEQ ID NO: 12888 - DNA, 22 bp, synthetic construct
  misc_feature 1..22: note = chemically synthesized
  source 1..22: mol_type = other DNA
gaccataattaggcttctgttc

SEQ ID NO: 12889 - DNA, 22 bp, synthetic construct
  misc_feature 1..22: note = chemically synthesized
  source 1..22: mol_type = other DNA
ggcttctgttcttcaggagaca

SEQ ID NO: 12890 - DNA, 22 bp, synthetic construct
  misc_feature 1..22: note = chemically synthesized
  source 1..22: mol_type = other DNA
ctgttcttcaggagacatttgt

SEQ ID NO: 12891 - DNA, 22 bp, synthetic construct
  misc_feature 1..22: note = chemically synthesized
  source 1..22: mol_type = other DNA
tgttcttcaggagacatttgtt

SEQ ID NO: 12892 - DNA, 22 bp, synthetic construct
  misc_feature 1..22: note = chemically synthesized
  source 1..22: mol_type = other DNA
ttcttcaggagacatttgttca

SEQ ID NO: 12893 - DNA, 22 bp, synthetic construct
  misc_feature 1..22: note = chemically synthesized
  source 1..22: mol_type = other DNA
ttcaggagacatttgttcaaag

SEQ ID NO: 12894 - DNA, 22 bp, synthetic construct
  misc_feature 1..22: note = chemically synthesized
  source 1..22: mol_type = other DNA
caggagacatttgttcaaagtc

SEQ ID NO: 12895 - DNA, 22 bp, synthetic construct
  misc_feature 1..22: note = chemically synthesized
  source 1..22: mol_type = other DNA
aggagacatttgttcaaagtca

SEQ ID NO: 12896 - DNA, 22 bp, synthetic construct
  misc_feature 1..22: note = chemically synthesized
  source 1..22: mol_type = other DNA
gttcaaagtcatttgggcaacc

SEQ ID NO: 12897 - DNA, 22 bp, synthetic construct
  misc_feature 1..22: note = chemically synthesized
  source 1..22: mol_type = other DNA
ttcaaagtcatttgggcaacca

SEQ ID NO: 12898 - DNA, 22 bp, synthetic construct
  misc_feature 1..22: note = chemically synthesized
  source 1..22: mol_type = other DNA
aaagtcatttgggcaaccatat

SEQ ID NO: 12899 - DNA, 22 bp, synthetic construct
  misc_feature 1..22: note = chemically synthesized
  source 1..22: mol_type = other DNA
gggcaaccatattctgaaaaca

SEQ ID NO: 12900 - DNA, 22 bp, synthetic construct
  misc_feature 1..22: note = chemically synthesized
  source 1..22: mol_type = other DNA
ggcaaccatattctgaaaacag

SEQ ID NO: 12901 - DNA, 22 bp, synthetic construct
  misc_feature 1..22: note = chemically synthesized
  source 1..22: mol_type = other DNA
tgaaaacagcccagccagggtg

SEQ ID NO: 12902 - DNA, 22 bp, synthetic construct
  misc_feature 1..22: note = chemically synthesized
  source 1..22: mol_type = other DNA
aaaacagcccagccagggtgat

SEQ ID NO: 12903 - DNA, 22 bp, synthetic construct
  misc_feature 1..22: note = chemically synthesized
  source 1..22: mol_type = other DNA
tgcaaagatcctcaatgagcta

SEQ ID NO: 12904 - DNA, 22 bp, synthetic construct
  misc_feature 1..22: note = chemically synthesized
  source 1..22: mol_type = other DNA
gcaaagatcctcaatgagctat

SEQ ID NO: 12905 - DNA, 22 bp, synthetic construct
  misc_feature 1..22: note = chemically synthesized
  source 1..22: mol_type = other DNA
caaagatcctcaatgagctatt

SEQ ID NO: 12906 - DNA, 22 bp, synthetic construct
  misc_feature 1..22: note = chemically synthesized
  source 1..22: mol_type = other DNA
aatgagctattttcaagtgatg

SEQ ID NO: 12907 - DNA, 22 bp, synthetic construct
  misc_feature 1..22: note = chemically synthesized
  source 1..22: mol_type = other DNA
ttttcaagtgatgacaaagtgt

SEQ ID NO: 12908 - DNA, 22 bp, synthetic construct
  misc_feature 1..22: note = chemically synthesized
  source 1..22: mol_type = other DNA
tcaagtgatgacaaagtgtgaa

SEQ ID NO: 12909 - DNA, 22 bp, synthetic construct
  misc_feature 1..22: note = chemically synthesized
  source 1..22: mol_type = other DNA
caagtgatgacaaagtgtgaag

SEQ ID NO: 12910 - DNA, 22 bp, synthetic construct
  misc_feature 1..22: note = chemically synthesized
  source 1..22: mol_type = other DNA
aagtgatgacaaagtgtgaagt

SEQ ID NO: 12911 - DNA, 22 bp, synthetic construct
  misc_feature 1..22: note = chemically synthesized
  source 1..22: mol_type = other DNA
accgctcatttgagaactttct

SEQ ID NO: 12912 - DNA, 22 bp, synthetic construct
  misc_feature 1..22: note = chemically synthesized
  source 1..22: mol_type = other DNA
atttgagaactttctttttcat

SEQ ID NO: 12913 - DNA, 22 bp, synthetic construct
  misc_feature 1..22: note = chemically synthesized
  source 1..22: mol_type = other DNA
gagaactttctttttcatccaa

SEQ ID NO: 12914 - DNA, 22 bp, synthetic construct
  misc_feature 1..22: note = chemically synthesized
  source 1..22: mol_type = other DNA
agaactttctttttcatccaaa

SEQ ID NO: 12915 - DNA, 22 bp, synthetic construct
  misc_feature 1..22: note = chemically synthesized
  source 1..22: mol_type = other DNA
tctttttcatccaaagtaaatt

SEQ ID NO: 12916 - DNA, 22 bp, synthetic construct
  misc_feature 1..22: note = chemically synthesized
  source 1..22: mol_type = other DNA
ctttttcatccaaagtaaattc

SEQ ID NO: 12917 - DNA, 22 bp, synthetic construct
  misc_feature 1..22: note = chemically synthesized
  source 1..22: mol_type = other DNA
tttttcatccaaagtaaattca

SEQ ID NO: 12918 - DNA, 22 bp, synthetic construct
  misc_feature 1..22: note = chemically synthesized
  source 1..22: mol_type = other DNA
tttcatccaaagtaaattcaaa

SEQ ID NO: 12919 - DNA, 22 bp, synthetic construct
  misc_feature 1..22: note = chemically synthesized
  source 1..22: mol_type = other DNA
ttcatccaaagtaaattcaaat

SEQ ID NO: 12920 - DNA, 22 bp, synthetic construct
  misc_feature 1..22: note = chemically synthesized
  source 1..22: mol_type = other DNA
tcatccaaagtaaattcaaata

SEQ ID NO: 12921 - DNA, 22 bp, synthetic construct
  misc_feature 1..22: note = chemically synthesized
  source 1..22: mol_type = other DNA
catccaaagtaaattcaaatat

SEQ ID NO: 12922 - DNA, 22 bp, synthetic construct
  misc_feature 1..22: note = chemically synthesized
  source 1..22: mol_type = other DNA
atccaaagtaaattcaaatatg

SEQ ID NO: 12923 - DNA, 22 bp, synthetic construct
  misc_feature 1..22: note = chemically synthesized
  source 1..22: mol_type = other DNA
aaatatgattagaaatctgacc

SEQ ID NO: 12924 - DNA, 22 bp, synthetic construct
  misc_feature 1..22: note = chemically synthesized
  source 1..22: mol_type = other DNA
gaaatctgaccttttattactg

SEQ ID NO: 12925 - DNA, 22 bp, synthetic construct
  misc_feature 1..22: note = chemically synthesized
  source 1..22: mol_type = other DNA
accttttattactggaattctc

SEQ ID NO: 12926 - DNA, 22 bp, synthetic construct
  misc_feature 1..22: note = chemically synthesized
  source 1..22: mol_type = other DNA
ttattactggaattctcttgac

SEQ ID NO: 12927 - DNA, 22 bp, synthetic construct
  misc_feature 1..22: note = chemically synthesized
  source 1..22: mol_type = other DNA
tattactggaattctcttgact

SEQ ID NO: 12928 - DNA, 22 bp, synthetic construct
  misc_feature 1..22: note = chemically synthesized
  source 1..22: mol_type = other DNA
attactggaattctcttgacta

SEQ ID NO: 12929 - DNA, 22 bp, synthetic construct
  misc_feature 1..22: note = chemically synthesized
  source 1..22: mol_type = other DNA
ttactggaattctcttgactaa

SEQ ID NO: 12930 - DNA, 22 bp, synthetic construct
  misc_feature 1..22: note = chemically synthesized
  source 1..22: mol_type = other DNA
ctggaattctcttgactaaaag

SEQ ID NO: 12931 - DNA, 22 bp, synthetic construct
  misc_feature 1..22: note = chemically synthesized
  source 1..22: mol_type = other DNA
gaattctcttgactaaaagtaa

SEQ ID NO: 12932 - DNA, 22 bp, synthetic construct
  misc_feature 1..22: note = chemically synthesized
  source 1..22: mol_type = other DNA
tcttgactaaaagtaaaattga

SEQ ID NO: 12933 - DNA, 22 bp, synthetic construct
  misc_feature 1..22: note = chemically synthesized
  source 1..22: mol_type = other DNA
ttgactaaaagtaaaattgaat

SEQ ID NO: 12934 - DNA, 22 bp, synthetic construct
  misc_feature 1..22: note = chemically synthesized
  source 1..22: mol_type = other DNA
gactaaaagtaaaattgaattt

SEQ ID NO: 12935 - DNA, 22 bp, synthetic construct
  misc_feature 1..22: note = chemically synthesized
  source 1..22: mol_type = other DNA
actaaaagtaaaattgaatttt

SEQ ID NO: 12936 - DNA, 22 bp, synthetic construct
  misc_feature 1..22: note = chemically synthesized
  source 1..22: mol_type = other DNA
aaagtaaaattgaattttaatt

SEQ ID NO: 12937 - DNA, 22 bp, synthetic construct
  misc_feature 1..22: note = chemically synthesized
  source 1..22: mol_type = other DNA
aattttaattcctaaatctcca

SEQ ID NO: 12938 - DNA, 22 bp, synthetic construct
  misc_feature 1..22: note = chemically synthesized
  source 1..22: mol_type = other DNA
taattcctaaatctccatgtgt

SEQ ID NO: 12939 - DNA, 22 bp, synthetic construct
  misc_feature 1..22: note = chemically synthesized
  source 1..22: mol_type = other DNA
aattcctaaatctccatgtgta

SEQ ID NO: 12940 - DNA, 22 bp, synthetic construct
  misc_feature 1..22: note = chemically synthesized
  source 1..22: mol_type = other DNA
attcctaaatctccatgtgtat

SEQ ID NO: 12941 - DNA, 22 bp, synthetic construct
  misc_feature 1..22: note = chemically synthesized
  source 1..22: mol_type = other DNA
ctaaatctccatgtgtatacag

SEQ ID NO: 12942 - DNA, 22 bp, synthetic construct
  misc_feature 1..22: note = chemically synthesized
  source 1..22: mol_type = other DNA
aatctccatgtgtatacagtac

SEQ ID NO: 12943 - DNA, 22 bp, synthetic construct
  misc_feature 1..22: note = chemically synthesized
  source 1..22: mol_type = other DNA
catgtgtatacagtactgtggg

SEQ ID NO: 12944 - DNA, 22 bp, synthetic construct
  misc_feature 1..22: note = chemically synthesized
  source 1..22: mol_type = other DNA
tgggaacatcacagattttggc

SEQ ID NO: 12945 - DNA, 22 bp, synthetic construct
  misc_feature 1..22: note = chemically synthesized
  source 1..22: mol_type = other DNA
tggctccatgccctaaagagaa

SEQ ID NO: 12946 - DNA, 22 bp, synthetic construct
  misc_feature 1..22: note = chemically synthesized
  source 1..22: mol_type = other DNA
ggctccatgccctaaagagaaa

SEQ ID NO: 12947 - DNA, 22 bp, synthetic construct
  misc_feature 1..22: note = chemically synthesized
  source 1..22: mol_type = other DNA
gctccatgccctaaagagaaat

SEQ ID NO: 12948 - DNA, 22 bp, synthetic construct
  misc_feature 1..22: note = chemically synthesized
  source 1..22: mol_type = other DNA
catgccctaaagagaaattggc

SEQ ID NO: 12949 - DNA, 22 bp, synthetic construct
  misc_feature 1..22: note = chemically synthesized
  source 1..22: mol_type = other DNA
aagagaaattggctttcagatt

SEQ ID NO: 12950 - DNA, 22 bp, synthetic construct
  misc_feature 1..22: note = chemically synthesized
  source 1..22: mol_type = other DNA
gctttcagattatttggattaa

SEQ ID NO: 12951 - DNA, 22 bp, synthetic construct
  misc_feature 1..22: note = chemically synthesized
  source 1..22: mol_type = other DNA
tcagattatttggattaaaaac

SEQ ID NO: 12952 - DNA, 22 bp, synthetic construct
  misc_feature 1..22: note = chemically synthesized
  source 1..22: mol_type = other DNA
cagattatttggattaaaaaca

SEQ ID NO: 12953 - DNA, 22 bp, synthetic construct
  misc_feature 1..22: note = chemically synthesized
  source 1..22: mol_type = other DNA
agattatttggattaaaaacaa

SEQ ID NO: 12954 - DNA, 22 bp, synthetic construct
  misc_feature 1..22: note = chemically synthesized
  source 1..22: mol_type = other DNA
tttggattaaaaacaaagactt

SEQ ID NO: 12955 - DNA, 22 bp, synthetic construct
  misc_feature 1..22: note = chemically synthesized
  source 1..22: mol_type = other DNA
ggattaaaaacaaagactttct

SEQ ID NO: 12956 - DNA, 22 bp, synthetic construct
  misc_feature 1..22: note = chemically synthesized
  source 1..22: mol_type = other DNA
gattaaaaacaaagactttctt

SEQ ID NO: 12957 - DNA, 22 bp, synthetic construct
  misc_feature 1..22: note = chemically synthesized
  source 1..22: mol_type = other DNA
aaaacaaagactttcttaagag

SEQ ID NO: 12958 - DNA, 22 bp, synthetic construct
  misc_feature 1..22: note = chemically synthesized
  source 1..22: mol_type = other DNA
tcttaagagatgtaaaattttc

SEQ ID NO: 12959 - DNA, 22 bp, synthetic construct
  misc_feature 1..22: note = chemically synthesized
  source 1..22: mol_type = other DNA
cttaagagatgtaaaattttca

SEQ ID NO: 12960 - DNA, 22 bp, synthetic construct
  misc_feature 1..22: note = chemically synthesized
  source 1..22: mol_type = other DNA
ttaagagatgtaaaattttcat

SEQ ID NO: 12961 - DNA, 22 bp, synthetic construct
  misc_feature 1..22: note = chemically synthesized
  source 1..22: mol_type = other DNA
aagagatgtaaaattttcatga

SEQ ID NO: 12962 - DNA, 22 bp, synthetic construct
  misc_feature 1..22: note = chemically synthesized
  source 1..22: mol_type = other DNA
agagatgtaaaattttcatgat

SEQ ID NO: 12963 - DNA, 22 bp, synthetic construct
  misc_feature 1..22: note = chemically synthesized
  source 1..22: mol_type = other DNA
tcatgatgttttcttttttgct

SEQ ID NO: 12964 - DNA, 22 bp, synthetic construct
  misc_feature 1..22: note = chemically synthesized
  source 1..22: mol_type = other DNA
catgatgttttcttttttgcta

SEQ ID NO: 12965 - DNA, 22 bp, synthetic construct
  misc_feature 1..22: note = chemically synthesized
  source 1..22: mol_type = other DNA
atgatgttttcttttttgctaa

SEQ ID NO: 12966 - DNA, 22 bp, synthetic construct
  misc_feature 1..22: note = chemically synthesized
  source 1..22: mol_type = other DNA
tcttttttgctaaaactaaaga

SEQ ID NO: 12967 - DNA, 22 bp, synthetic construct
  misc_feature 1..22: note = chemically synthesized
  source 1..22: mol_type = other DNA
cttttttgctaaaactaaagaa

SEQ ID NO: 12968 - DNA, 22 bp, synthetic construct
  misc_feature 1..22: note = chemically synthesized
  source 1..22: mol_type = other DNA
ttttttgctaaaactaaagaat

SEQ ID NO: 12969 - DNA, 22 bp, synthetic construct
  misc_feature 1..22: note = chemically synthesized
  source 1..22: mol_type = other DNA
ttttgctaaaactaaagaatta

SEQ ID NO: 12970 - DNA, 22 bp, synthetic construct
  misc_feature 1..22: note = chemically synthesized
  source 1..22: mol_type = other DNA
tttgctaaaactaaagaattat

SEQ ID NO: 12971 - DNA, 22 bp, synthetic construct
  misc_feature 1..22: note = chemically synthesized
  source 1..22: mol_type = other DNA
ttgctaaaactaaagaattatt

SEQ ID NO: 12972 - DNA, 22 bp, synthetic construct
  misc_feature 1..22: note = chemically synthesized
  source 1..22: mol_type = other DNA
tgctaaaactaaagaattattc

SEQ ID NO: 12973 - DNA, 22 bp, synthetic construct
  misc_feature 1..22: note = chemically synthesized
  source 1..22: mol_type = other DNA
gctaaaactaaagaattattct

SEQ ID NO: 12974 - DNA, 22 bp, synthetic construct
  misc_feature 1..22: note = chemically synthesized
  source 1..22: mol_type = other DNA
ctaaaactaaagaattattctt

SEQ ID NO: 12975 - DNA, 22 bp, synthetic construct
  misc_feature 1..22: note = chemically synthesized
  source 1..22: mol_type = other DNA
aaactaaagaattattctttta

SEQ ID NO: 12976 - DNA, 22 bp, synthetic construct
  misc_feature 1..22: note = chemically synthesized
  source 1..22: mol_type = other DNA
aagaattattcttttacatttc

SEQ ID NO: 12977 - DNA, 22 bp, synthetic construct
  misc_feature 1..22: note = chemically synthesized
  source 1..22: mol_type = other DNA
ttcttttacatttcagtttttc

SEQ ID NO: 12978 - DNA, 22 bp, synthetic construct
  misc_feature 1..22: note = chemically synthesized
  source 1..22: mol_type = other DNA
ttttacatttcagtttttcttg

SEQ ID NO: 12979 - DNA, 22 bp, synthetic construct
  misc_feature 1..22: note = chemically synthesized
  source 1..22: mol_type = other DNA
ttacatttcagtttttcttgat

SEQ ID NO: 12980 - DNA, 22 bp, synthetic construct
  misc_feature 1..22: note = chemically synthesized
  source 1..22: mol_type = other DNA
tacatttcagtttttcttgatc

SEQ ID NO: 12981 - DNA, 22 bp, synthetic construct
  misc_feature 1..22: note = chemically synthesized
  source 1..22: mol_type = other DNA
acatttcagtttttcttgatca

SEQ ID NO: 12982 - DNA, 22 bp, synthetic construct
  misc_feature 1..22: note = chemically synthesized
  source 1..22: mol_type = other DNA
catttcagtttttcttgatcat

SEQ ID NO: 12983 - DNA, 22 bp, synthetic construct
  misc_feature 1..22: note = chemically synthesized
  source 1..22: mol_type = other DNA
cagtttttcttgatcatgaaaa

SEQ ID NO: 12984 - DNA, 22 bp, synthetic construct
  misc_feature 1..22: note = chemically synthesized
  source 1..22: mol_type = other DNA
agtttttcttgatcatgaaaac

SEQ ID NO: 12985 - DNA, 22 bp, synthetic construct
  misc_feature 1..22: note = chemically synthesized
  source 1..22: mol_type = other DNA
ttcttgatcatgaaaacgccaa

SEQ ID NO: 12986 - DNA, 22 bp, synthetic construct
  misc_feature 1..22: note = chemically synthesized
  source 1..22: mol_type = other DNA
tcttgatcatgaaaacgccaac

SEQ ID NO: 12987 - DNA, 22 bp, synthetic construct
  misc_feature 1..22: note = chemically synthesized
  source 1..22: mol_type = other DNA
cttgatcatgaaaacgccaaca

SEQ ID NO: 12988 - DNA, 22 bp, synthetic construct
  misc_feature 1..22: note = chemically synthesized
  source 1..22: mol_type = other DNA
ttgatcatgaaaacgccaacaa

SEQ ID NO: 12989 - DNA, 22 bp, synthetic construct
  misc_feature 1..22: note = chemically synthesized
  source 1..22: mol_type = other DNA
gatcatgaaaacgccaacaaaa

SEQ ID NO: 12990 - DNA, 22 bp, synthetic construct
  misc_feature 1..22: note = chemically synthesized
  source 1..22: mol_type = other DNA
atcatgaaaacgccaacaaaat

SEQ ID NO: 12991 - DNA, 22 bp, synthetic construct
  misc_feature 1..22: note = chemically synthesized
  source 1..22: mol_type = other DNA
tgaatcggccaaagaggtataa

SEQ ID NO: 12992 - DNA, 22 bp, synthetic construct
  misc_feature 1..22: note = chemically synthesized
  source 1..22: mol_type = other DNA
aatcggccaaagaggtataatt

SEQ ID NO: 12993 - DNA, 22 bp, synthetic construct
  misc_feature 1..22: note = chemically synthesized
  source 1..22: mol_type = other DNA
aggtaaattggaagagtttgtt

SEQ ID NO: 12994 - DNA, 22 bp, synthetic construct
  misc_feature 1..22: note = chemically synthesized
  source 1..22: mol_type = other DNA
gaagagtttgttcaagggaacc

SEQ ID NO: 12995 - DNA, 22 bp, synthetic construct
  misc_feature 1..22: note = chemically synthesized
  source 1..22: mol_type = other DNA
gttcaagggaaccttgagagag

SEQ ID NO: 12996 - DNA, 22 bp, synthetic construct
  misc_feature 1..22: note = chemically synthesized
  source 1..22: mol_type = other DNA
ttcaagggaaccttgagagaga

SEQ ID NO: 12997 - DNA, 22 bp, synthetic construct
  misc_feature 1..22: note = chemically synthesized
  source 1..22: mol_type = other DNA
aagggaaccttgagagagaatg

SEQ ID NO: 12998 - DNA, 22 bp, synthetic construct
  misc_feature 1..22: note = chemically synthesized
  source 1..22: mol_type = other DNA
gagagagaatgtatggaagaaa

SEQ ID NO: 12999 - DNA, 22 bp, synthetic construct
  misc_feature 1..22: note = chemically synthesized
  source 1..22: mol_type = other DNA
agagagaatgtatggaagaaaa

SEQ ID NO: 13000 - DNA, 22 bp, synthetic construct
  misc_feature 1..22: note = chemically synthesized
  source 1..22: mol_type = other DNA
tgaagaagcacgagaagttttt

SEQ ID NO: 13001 - DNA, 22 bp, synthetic construct
  misc_feature 1..22: note = chemically synthesized
  source 1..22: mol_type = other DNA
gaagaagcacgagaagtttttg

SEQ ID NO: 13002 - DNA, 22 bp, synthetic construct
  misc_feature 1..22: note = chemically synthesized
  source 1..22: mol_type = other DNA
aagaagcacgagaagtttttga

SEQ ID NO: 13003 - DNA, 22 bp, synthetic construct
  misc_feature 1..22: note = chemically synthesized
  source 1..22: mol_type = other DNA
tttcagtgttttcaaaaacttc

SEQ ID NO: 13004 - DNA, 22 bp, synthetic construct
  misc_feature 1..22: note = chemically synthesized
  source 1..22: mol_type = other DNA
tcagtgttttcaaaaacttctc

SEQ ID NO: 13005 - DNA, 22 bp, synthetic construct
  misc_feature 1..22: note = chemically synthesized
  source 1..22: mol_type = other DNA
cagtgttttcaaaaacttctcg

SEQ ID NO: 13006 - DNA, 22 bp, synthetic construct
  misc_feature 1..22: note = chemically synthesized
  source 1..22: mol_type = other DNA
agtgttttcaaaaacttctcgt

SEQ ID NO: 13007 - DNA, 22 bp, synthetic construct
  misc_feature 1..22: note = chemically synthesized
  source 1..22: mol_type = other DNA
tcaaaaacttctcgtgcttctt

SEQ ID NO: 13008 - DNA, 22 bp, synthetic construct
  misc_feature 1..22: note = chemically synthesized
  source 1..22: mol_type = other DNA
caaaaacttctcgtgcttcttc

SEQ ID NO: 13009 - DNA, 22 bp, synthetic construct
  misc_feature 1..22: note = chemically synthesized
  source 1..22: mol_type = other DNA
aaaaacttctcgtgcttcttca

SEQ ID NO: 13010 - DNA, 22 bp, synthetic construct
  misc_feature 1..22: note = chemically synthesized
  source 1..22: mol_type = other DNA
ctcgtgcttcttcaaaactaca

SEQ ID NO: 13011 - DNA, 22 bp, synthetic construct
  misc_feature 1..22: note = chemically synthesized
  source 1..22: mol_type = other DNA
tcgtgcttcttcaaaactacac

SEQ ID NO: 13012 - DNA, 22 bp, synthetic construct
  misc_feature 1..22: note = chemically synthesized
  source 1..22: mol_type = other DNA
gtgcttcttcaaaactacactt

SEQ ID NO: 13013 - DNA, 22 bp, synthetic construct
  misc_feature 1..22: note = chemically synthesized
  source 1..22: mol_type = other DNA
cttcaaaactacacttttcttc

SEQ ID NO: 13014 - DNA, 22 bp, synthetic construct
  misc_feature 1..22: note = chemically synthesized
  source 1..22: mol_type = other DNA
ttcaaaactacacttttcttcc

SEQ ID NO: 13015 - DNA, 22 bp, synthetic construct
  misc_feature 1..22: note = chemically synthesized
  source 1..22: mol_type = other DNA
caaaactacacttttcttccat

SEQ ID NO: 13016 - DNA, 22 bp, synthetic construct
  misc_feature 1..22: note = chemically synthesized
  source 1..22: mol_type = other DNA
aaaactacacttttcttccata

SEQ ID NO: 13017 - DNA, 22 bp, synthetic construct
  misc_feature 1..22: note = chemically synthesized
  source 1..22: mol_type = other DNA
cacttttcttccatacattctc

SEQ ID NO: 13018 - DNA, 22 bp, synthetic construct
  misc_feature 1..22: note = chemically synthesized
  source 1..22: mol_type = other DNA
ttcttccatacattctctctca

SEQ ID NO: 13019 - DNA, 22 bp, synthetic construct
  misc_feature 1..22: note = chemically synthesized
  source 1..22: mol_type = other DNA
tcttccatacattctctctcaa

SEQ ID NO: 13020 - DNA, 22 bp, synthetic construct
  misc_feature 1..22: note = chemically synthesized
  source 1..22: mol_type = other DNA
cttccatacattctctctcaag

SEQ ID NO: 13021 - DNA, 22 bp, synthetic construct
  misc_feature 1..22: note = chemically synthesized
  source 1..22: mol_type = other DNA
ttccatacattctctctcaagg

SEQ ID NO: 13022 - DNA, 22 bp, synthetic construct
  misc_feature 1..22: note = chemically synthesized
  source 1..22: mol_type = other DNA
ccatacattctctctcaaggtt

SEQ ID NO: 13023 - DNA, 22 bp, synthetic construct
  misc_feature 1..22: note = chemically synthesized
  source 1..22: mol_type = other DNA
catacattctctctcaaggttc

SEQ ID NO: 13024 - DNA, 22 bp, synthetic construct
  misc_feature 1..22: note = chemically synthesized
  source 1..22: mol_type = other DNA
tctctcaaggttcccttgaaca

SEQ ID NO: 13025 - DNA, 22 bp, synthetic construct
  misc_feature 1..22: note = chemically synthesized
  source 1..22: mol_type = other DNA
tctcaaggttcccttgaacaaa

SEQ ID NO: 13026 - DNA, 22 bp, synthetic construct
  misc_feature 1..22: note = chemically synthesized
  source 1..22: mol_type = other DNA
tcaaggttcccttgaacaaact

SEQ ID NO: 13027 - DNA, 22 bp, synthetic construct
  misc_feature 1..22: note = chemically synthesized
  source 1..22: mol_type = other DNA
aaggttcccttgaacaaactct

SEQ ID NO: 13028 - DNA, 22 bp, synthetic construct
  misc_feature 1..22: note = chemically synthesized
  source 1..22: mol_type = other DNA
ccttgaacaaactcttccaatt

SEQ ID NO: 13029 - DNA, 22 bp, synthetic construct
  misc_feature 1..22: note = chemically synthesized
  source 1..22: mol_type = other DNA
gaacaaactcttccaatttacc

SEQ ID NO: 13030 - DNA, 22 bp, synthetic construct
  misc_feature 1..22: note = chemically synthesized
  source 1..22: mol_type = other DNA
aacaaactcttccaatttacct

SEQ ID NO: 13031 - DNA, 22 bp, synthetic construct
  misc_feature 1..22: note = chemically synthesized
  source 1..22: mol_type = other DNA
ttccaatttacctgaattatac

SEQ ID NO: 13032 - DNA, 22 bp, synthetic construct
  misc_feature 1..22: note = chemically synthesized
  source 1..22: mol_type = other DNA
ccaatttacctgaattatacct

SEQ ID NO: 13033 - DNA, 22 bp, synthetic construct
  misc_feature 1..22: note = chemically synthesized
  source 1..22: mol_type = other DNA
caatttacctgaattatacctc

SEQ ID NO: 13034 - DNA, 22 bp, synthetic construct
  misc_feature 1..22: note = chemically synthesized
  source 1..22: mol_type = other DNA
acctgaattatacctctttggc

SEQ ID NO: 13035 - DNA, 22 bp, synthetic construct
  misc_feature 1..22: note = chemically synthesized
  source 1..22: mol_type = other DNA
cctgaattatacctctttggcc

SEQ ID NO: 13036 - DNA, 22 bp, synthetic construct
  misc_feature 1..22: note = chemically synthesized
  source 1..22: mol_type = other DNA
aattatacctctttggccgatt

SEQ ID NO: 13037 - DNA, 22 bp, synthetic construct
  misc_feature 1..22: note = chemically synthesized
  source 1..22: mol_type = other DNA
tacctctttggccgattcagaa

SEQ ID NO: 13038 - DNA, 22 bp, synthetic construct
  misc_feature 1..22: note = chemically synthesized
  source 1..22: mol_type = other DNA
tttggccgattcagaattttgt

SEQ ID NO: 13039 - DNA, 22 bp, synthetic construct
  misc_feature 1..22: note = chemically synthesized
  source 1..22: mol_type = other DNA
tggccgattcagaattttgttg

SEQ ID NO: 13040 - DNA, 22 bp, synthetic construct
  misc_feature 1..22: note = chemically synthesized
  source 1..22: mol_type = other DNA
ggccgattcagaattttgttgg

SEQ ID NO: 13041 - DNA, 22 bp, synthetic construct
  misc_feature 1..22: note = chemically synthesized
  source 1..22: mol_type = other DNA
gccgattcagaattttgttggc

SEQ ID NO: 13042 - DNA, 22 bp, synthetic construct
  misc_feature 1..22: note = chemically synthesized
  source 1..22: mol_type = other DNA
agaattttgttggcgttttcat

SEQ ID NO: 13043 - DNA, 22 bp, synthetic construct
  misc_feature 1..22: note = chemically synthesized
  source 1..22: mol_type = other DNA
tgttggcgttttcatgatcaag

SEQ ID NO: 13044 - DNA, 22 bp, synthetic construct
  misc_feature 1..22: note = chemically synthesized
  source 1..22: mol_type = other DNA
gttggcgttttcatgatcaaga

SEQ ID NO: 13045 - DNA, 22 bp, synthetic construct
  misc_feature 1..22: note = chemically synthesized
  source 1..22: mol_type = other DNA
ttggcgttttcatgatcaagaa

SEQ ID NO: 13046 - DNA, 22 bp, synthetic construct
  misc_feature 1..22: note = chemically synthesized
  source 1..22: mol_type = other DNA
gcgttttcatgatcaagaaaaa

SEQ ID NO: 13047 - DNA, 22 bp, synthetic construct
  misc_feature 1..22: note = chemically synthesized
  source 1..22: mol_type = other DNA
tcatgatcaagaaaaactgaaa

SEQ ID NO: 13048 - DNA, 22 bp, synthetic construct
  misc_feature 1..22: note = chemically synthesized
  source 1..22: mol_type = other DNA
catgatcaagaaaaactgaaat

SEQ ID NO: 13049 - DNA, 22 bp, synthetic construct
  misc_feature 1..22: note = chemically synthesized
  source 1..22: mol_type = other DNA
atgatcaagaaaaactgaaatg

SEQ ID NO: 13050 - DNA, 22 bp, synthetic construct
  misc_feature 1..22: note = chemically synthesized
  source 1..22: mol_type = other DNA
aaatgtaaaagaataattcttt

SEQ ID NO: 13051 - DNA, 22 bp, synthetic construct
  misc_feature 1..22: note = chemically synthesized
  source 1..22: mol_type = other DNA
tttagttttagcaaaaaagaaa

SEQ ID NO: 13052 - DNA, 22 bp, synthetic construct
  misc_feature 1..22: note = chemically synthesized
  source 1..22: mol_type = other DNA
tagttttagcaaaaaagaaaac

SEQ ID NO: 13053 - DNA, 22 bp, synthetic construct
  misc_feature 1..22: note = chemically synthesized
  source 1..22: mol_type = other DNA
agttttagcaaaaaagaaaaca

SEQ ID NO: 13054 - DNA, 22 bp, synthetic construct
  misc_feature 1..22: note = chemically synthesized
  source 1..22: mol_type = other DNA
gttttagcaaaaaagaaaacat

SEQ ID NO: 13055 - DNA, 22 bp, synthetic construct
  misc_feature 1..22: note = chemically synthesized
  source 1..22: mol_type = other DNA
tagcaaaaaagaaaacatcatg

SEQ ID NO: 13056 - DNA, 22 bp, synthetic construct
  misc_feature 1..22: note = chemically synthesized
  source 1..22: mol_type = other DNA
agcaaaaaagaaaacatcatga

SEQ ID NO: 13057 - DNA, 22 bp, synthetic construct
  misc_feature 1..22: note = chemically synthesized
  source 1..22: mol_type = other DNA
gcaaaaaagaaaacatcatgaa

SEQ ID NO: 13058 - DNA, 22 bp, synthetic construct
  misc_feature 1..22: note = chemically synthesized
  source 1..22: mol_type = other DNA
tacatctcttaagaaagtcttt

SEQ ID NO: 13059 - DNA, 22 bp, synthetic construct
  misc_feature 1..22: note = chemically synthesized
  source 1..22: mol_type = other DNA
acatctcttaagaaagtctttg

SEQ ID NO: 13060 - DNA, 22 bp, synthetic construct
  misc_feature 1..22: note = chemically synthesized
  source 1..22: mol_type = other DNA
catctcttaagaaagtctttgt

SEQ ID NO: 13061 - DNA, 22 bp, synthetic construct
  misc_feature 1..22: note = chemically synthesized
  source 1..22: mol_type = other DNA
ttaagaaagtctttgtttttaa

SEQ ID NO: 13062 - DNA, 22 bp, synthetic construct
  misc_feature 1..22: note = chemically synthesized
  source 1..22: mol_type = other DNA
aagaaagtctttgtttttaatc

SEQ ID NO: 13063 - DNA, 22 bp, synthetic construct
  misc_feature 1..22: note = chemically synthesized
  source 1..22: mol_type = other DNA
agaaagtctttgtttttaatcc

SEQ ID NO: 13064 - DNA, 22 bp, synthetic construct
  misc_feature 1..22: note = chemically synthesized
  source 1..22: mol_type = other DNA
tgtttttaatccaaataatctg

SEQ ID NO: 13065 - DNA, 22 bp, synthetic construct
  misc_feature 1..22: note = chemically synthesized
  source 1..22: mol_type = other DNA
gtttttaatccaaataatctga

SEQ ID NO: 13066 - DNA, 22 bp, synthetic construct
  misc_feature 1..22: note = chemically synthesized
  source 1..22: mol_type = other DNA
tttttaatccaaataatctgaa

SEQ ID NO: 13067 - DNA, 22 bp, synthetic construct
  misc_feature 1..22: note = chemically synthesized
  source 1..22: mol_type = other DNA
ttaatccaaataatctgaaagc

SEQ ID NO: 13068 - DNA, 22 bp, synthetic construct
  misc_feature 1..22: note = chemically synthesized
  source 1..22: mol_type = other DNA
taatccaaataatctgaaagcc

SEQ ID NO: 13069 - DNA, 22 bp, synthetic construct
  misc_feature 1..22: note = chemically synthesized
  source 1..22: mol_type = other DNA
aatccaaataatctgaaagcca

SEQ ID NO: 13070 - DNA, 22 bp, synthetic construct
  misc_feature 1..22: note = chemically synthesized
  source 1..22: mol_type = other DNA
atccaaataatctgaaagccaa

SEQ ID NO: 13071 - DNA, 22 bp, synthetic construct
  misc_feature 1..22: note = chemically synthesized
  source 1..22: mol_type = other DNA
aaagccaatttctctttagggc

SEQ ID NO: 13072 - DNA, 22 bp, synthetic construct
  misc_feature 1..22: note = chemically synthesized
  source 1..22: mol_type = other DNA
ctctttagggcatggagccaaa

SEQ ID NO: 13073 - DNA, 22 bp, synthetic construct
  misc_feature 1..22: note = chemically synthesized
  source 1..22: mol_type = other DNA
tctttagggcatggagccaaaa

SEQ ID NO: 13074 - DNA, 22 bp, synthetic construct
  misc_feature 1..22: note = chemically synthesized
  source 1..22: mol_type = other DNA
tttagggcatggagccaaaatc

SEQ ID NO: 13075 - DNA, 22 bp, synthetic construct
  misc_feature 1..22: note = chemically synthesized
  source 1..22: mol_type = other DNA
tagggcatggagccaaaatctg

SEQ ID NO: 13076 - DNA, 22 bp, synthetic construct
  misc_feature 1..22: note = chemically synthesized
  source 1..22: mol_type = other DNA
agggcatggagccaaaatctgt

SEQ ID NO: 13077 - DNA, 22 bp, synthetic construct
  misc_feature 1..22: note = chemically synthesized
  source 1..22: mol_type = other DNA
gggcatggagccaaaatctgtg

SEQ ID NO: 13078 - DNA, 22 bp, synthetic construct
  misc_feature 1..22: note = chemically synthesized
  source 1..22: mol_type = other DNA
tgatgttcccacagtactgtat

SEQ ID NO: 13079 - DNA, 22 bp, synthetic construct
  misc_feature 1..22: note = chemically synthesized
  source 1..22: mol_type = other DNA
ccacagtactgtatacacatgg

SEQ ID NO: 13080 - DNA, 22 bp, synthetic construct
  misc_feature 1..22: note = chemically synthesized
  source 1..22: mol_type = other DNA
tatacacatggagatttaggaa

SEQ ID NO: 13081 - DNA, 22 bp, synthetic construct
  misc_feature 1..22: note = chemically synthesized
  source 1..22: mol_type = other DNA
aggaattaaaattcaattttac

SEQ ID NO: 13082 - DNA, 22 bp, synthetic construct
  misc_feature 1..22: note = chemically synthesized
  source 1..22: mol_type = other DNA
ggaattaaaattcaattttact

SEQ ID NO: 13083 - DNA, 22 bp, synthetic construct
  misc_feature 1..22: note = chemically synthesized
  source 1..22: mol_type = other DNA
aaattcaattttacttttagtc

SEQ ID NO: 13084 - DNA, 22 bp, synthetic construct
  misc_feature 1..22: note = chemically synthesized
  source 1..22: mol_type = other DNA
aattttacttttagtcaagaga

SEQ ID NO: 13085 - DNA, 22 bp, synthetic construct
  misc_feature 1..22: note = chemically synthesized
  source 1..22: mol_type = other DNA
tacttttagtcaagagaattcc

SEQ ID NO: 13086 - DNA, 22 bp, synthetic construct
  misc_feature 1..22: note = chemically synthesized
  source 1..22: mol_type = other DNA
acttttagtcaagagaattcca

SEQ ID NO: 13087 - DNA, 22 bp, synthetic construct
  misc_feature 1..22: note = chemically synthesized
  source 1..22: mol_type = other DNA
cttttagtcaagagaattccag

SEQ ID NO: 13088 - DNA, 22 bp, synthetic construct
  misc_feature 1..22: note = chemically synthesized
  source 1..22: mol_type = other DNA
ttagtcaagagaattccagtaa

SEQ ID NO: 13089 - DNA, 22 bp, synthetic construct
  misc_feature 1..22: note = chemically synthesized
  source 1..22: mol_type = other DNA
tagtcaagagaattccagtaat

SEQ ID NO: 13090 - DNA, 22 bp, synthetic construct
  misc_feature 1..22: note = chemically synthesized
  source 1..22: mol_type = other DNA
agtcaagagaattccagtaata

SEQ ID NO: 13091 - DNA, 22 bp, synthetic construct
  misc_feature 1..22: note = chemically synthesized
  source 1..22: mol_type = other DNA
gtcaagagaattccagtaataa

SEQ ID NO: 13092 - DNA, 22 bp, synthetic construct
  misc_feature 1..22: note = chemically synthesized
  source 1..22: mol_type = other DNA
cagtaataaaaggtcagatttc

SEQ ID NO: 13093 - DNA, 22 bp, synthetic construct
  misc_feature 1..22: note = chemically synthesized
  source 1..22: mol_type = other DNA
ctaatcatatttgaatttactt

SEQ ID NO: 13094 - DNA, 22 bp, synthetic construct
  misc_feature 1..22: note = chemically synthesized
  source 1..22: mol_type = other DNA
taatcatatttgaatttacttt

SEQ ID NO: 13095 - DNA, 22 bp, synthetic construct
  misc_feature 1..22: note = chemically synthesized
  source 1..22: mol_type = other DNA
atcatatttgaatttactttgg

SEQ ID NO: 13096 - DNA, 22 bp, synthetic construct
  misc_feature 1..22: note = chemically synthesized
  source 1..22: mol_type = other DNA
gaatttactttggatgaaaaag

SEQ ID NO: 13097 - DNA, 22 bp, synthetic construct
  misc_feature 1..22: note = chemically synthesized
  source 1..22: mol_type = other DNA
aatttactttggatgaaaaaga

SEQ ID NO: 13098 - DNA, 22 bp, synthetic construct
  misc_feature 1..22: note = chemically synthesized
  source 1..22: mol_type = other DNA
actttggatgaaaaagaaagtt

SEQ ID NO: 13099 - DNA, 22 bp, synthetic construct
  misc_feature 1..22: note = chemically synthesized
  source 1..22: mol_type = other DNA
ctttggatgaaaaagaaagttc

SEQ ID NO: 13100 - DNA, 22 bp, synthetic construct
  misc_feature 1..22: note = chemically synthesized
  source 1..22: mol_type = other DNA
tggatgaaaaagaaagttctca

SEQ ID NO: 13101 - DNA, 22 bp, synthetic construct
  misc_feature 1..22: note = chemically synthesized
  source 1..22: mol_type = other DNA
ggatgaaaaagaaagttctcaa

SEQ ID NO: 13102 - DNA, 22 bp, synthetic construct
  misc_feature 1..22: note = chemically synthesized
  source 1..22: mol_type = other DNA
gatgaaaaagaaagttctcaaa

SEQ ID NO: 13103 - DNA, 22 bp, synthetic construct
  misc_feature 1..22: note = chemically synthesized
  source 1..22: mol_type = other DNA
tcaaatgagcggttaacttcac

SEQ ID NO: 13104 - DNA, 22 bp, synthetic construct
  misc_feature 1..22: note = chemically synthesized
  source 1..22: mol_type = other DNA
aaatgagcggttaacttcacac

SEQ ID NO: 13105 - DNA, 22 bp, synthetic construct
  misc_feature 1..22: note = chemically synthesized
  source 1..22: mol_type = other DNA
acttcacactttgtcatcactt

SEQ ID NO: 13106 - DNA, 22 bp, synthetic construct
  misc_feature 1..22: note = chemically synthesized
  source 1..22: mol_type = other DNA
cacactttgtcatcacttgaaa

SEQ ID NO: 13107 - DNA, 22 bp, synthetic construct
  misc_feature 1..22: note = chemically synthesized
  source 1..22: mol_type = other DNA
acactttgtcatcacttgaaaa

SEQ ID NO: 13108 - DNA, 22 bp, synthetic construct
  misc_feature 1..22: note = chemically synthesized
  source 1..22: mol_type = other DNA
tgtcatcacttgaaaatagctc

SEQ ID NO: 13109 - DNA, 22 bp, synthetic construct
  misc_feature 1..22: note = chemically synthesized
  source 1..22: mol_type = other DNA
gtcatcacttgaaaatagctca

SEQ ID NO: 13110 - DNA, 22 bp, synthetic construct
  misc_feature 1..22: note = chemically synthesized
  source 1..22: mol_type = other DNA
tcatcacttgaaaatagctcat

SEQ ID NO: 13111 - DNA, 22 bp, synthetic construct
  misc_feature 1..22: note = chemically synthesized
  source 1..22: mol_type = other DNA
gaaaatagctcattgaggatct

SEQ ID NO: 13112 - DNA, 22 bp, synthetic construct
  misc_feature 1..22: note = chemically synthesized
  source 1..22: mol_type = other DNA
aaaatagctcattgaggatctt

SEQ ID NO: 13113 - DNA, 22 bp, synthetic construct
  misc_feature 1..22: note = chemically synthesized
  source 1..22: mol_type = other DNA
attgaggatctttgcaaagtga

SEQ ID NO: 13114 - DNA, 22 bp, synthetic construct
  misc_feature 1..22: note = chemically synthesized
  source 1..22: mol_type = other DNA
aggatctttgcaaagtgatcca

SEQ ID NO: 13115 - DNA, 22 bp, synthetic construct
  misc_feature 1..22: note = chemically synthesized
  source 1..22: mol_type = other DNA
tgcaaagtgatccatcaccctg

SEQ ID NO: 13116 - DNA, 22 bp, synthetic construct
  misc_feature 1..22: note = chemically synthesized
  source 1..22: mol_type = other DNA
gcaaagtgatccatcaccctgg

SEQ ID NO: 13117 - DNA, 22 bp, synthetic construct
  misc_feature 1..22: note = chemically synthesized
  source 1..22: mol_type = other DNA
caaagtgatccatcaccctggc

SEQ ID NO: 13118 - DNA, 22 bp, synthetic construct
  misc_feature 1..22: note = chemically synthesized
  source 1..22: mol_type = other DNA
gctgggctgttttcagaatatg

SEQ ID NO: 13119 - DNA, 22 bp, synthetic construct
  misc_feature 1..22: note = chemically synthesized
  source 1..22: mol_type = other DNA
ggctgttttcagaatatggttg

SEQ ID NO: 13120 - DNA, 22 bp, synthetic construct
  misc_feature 1..22: note = chemically synthesized
  source 1..22: mol_type = other DNA
ttttcagaatatggttgcccaa

SEQ ID NO: 13121 - DNA, 22 bp, synthetic construct
  misc_feature 1..22: note = chemically synthesized
  source 1..22: mol_type = other DNA
tcagaatatggttgcccaaatg

SEQ ID NO: 13122 - DNA, 22 bp, synthetic construct
  misc_feature 1..22: note = chemically synthesized
  source 1..22: mol_type = other DNA
cagaatatggttgcccaaatga

SEQ ID NO: 13123 - DNA, 22 bp, synthetic construct
  misc_feature 1..22: note = chemically synthesized
  source 1..22: mol_type = other DNA
agaatatggttgcccaaatgac

SEQ ID NO: 13124 - DNA, 22 bp, synthetic construct
  misc_feature 1..22: note = chemically synthesized
  source 1..22: mol_type = other DNA
cccaaatgactttgaacaaatg

SEQ ID NO: 13125 - DNA, 22 bp, synthetic construct
  misc_feature 1..22: note = chemically synthesized
  source 1..22: mol_type = other DNA
tgaacaaatgtctcctgaagaa

SEQ ID NO: 13126 - DNA, 22 bp, synthetic construct
  misc_feature 1..22: note = chemically synthesized
  source 1..22: mol_type = other DNA
gaacaaatgtctcctgaagaac

SEQ ID NO: 13127 - DNA, 22 bp, synthetic construct
  misc_feature 1..22: note = chemically synthesized
  source 1..22: mol_type = other DNA
aacaaatgtctcctgaagaaca

SEQ ID NO: 13128 - DNA, 22 bp, synthetic construct
  misc_feature 1..22: note = chemically synthesized
  source 1..22: mol_type = other DNA
ctgaagaacagaagcctaatta

SEQ ID NO: 13129 - DNA, 22 bp, synthetic construct
  misc_feature 1..22: note = chemically synthesized
  source 1..22: mol_type = other DNA
aagaacagaagcctaattatgg

SEQ ID NO: 13130 - DNA, 22 bp, synthetic construct
  misc_feature 1..22: note = chemically synthesized
  source 1..22: mol_type = other DNA
attatggtccagctgcaaatgt

SEQ ID NO: 13131 - DNA, 22 bp, synthetic construct
  misc_feature 1..22: note = chemically synthesized
  source 1..22: mol_type = other DNA
tggtccagctgcaaatgtgacc

SEQ ID NO: 13132 - DNA, 22 bp, synthetic construct
  misc_feature 1..22: note = chemically synthesized
  source 1..22: mol_type = other DNA
caaatgtgaccccagtgtctgt

SEQ ID NO: 13133 - DNA, 22 bp, synthetic construct
  misc_feature 1..22: note = chemically synthesized
  source 1..22: mol_type = other DNA
tcactagatgttaaagaaaaat

SEQ ID NO: 13134 - DNA, 22 bp, synthetic construct
  misc_feature 1..22: note = chemically synthesized
  source 1..22: mol_type = other DNA
gatgttaaagaaaaatcactgc

SEQ ID NO: 13135 - DNA, 22 bp, synthetic construct
  misc_feature 1..22: note = chemically synthesized
  source 1..22: mol_type = other DNA
aagaaaaatcactgcattaatt

SEQ ID NO: 13136 - DNA, 22 bp, synthetic construct
  misc_feature 1..22: note = chemically synthesized
  source 1..22: mol_type = other DNA
cattaatttaaaaaagcaattt

SEQ ID NO: 13137 - DNA, 22 bp, synthetic construct
  misc_feature 1..22: note = chemically synthesized
  source 1..22: mol_type = other DNA
atttaaaaaagcaatttcagat

SEQ ID NO: 13138 - DNA, 22 bp, synthetic construct
  misc_feature 1..22: note = chemically synthesized
  source 1..22: mol_type = other DNA
aaaaaagcaatttcagatcaac

SEQ ID NO: 13139 - DNA, 22 bp, synthetic construct
  misc_feature 1..22: note = chemically synthesized
  source 1..22: mol_type = other DNA
aaaaagcaatttcagatcaaca

SEQ ID NO: 13140 - DNA, 22 bp, synthetic construct
  misc_feature 1..22: note = chemically synthesized
  source 1..22: mol_type = other DNA
cagatcaacagcacctttggtt

SEQ ID NO: 13141 - DNA, 22 bp, synthetic construct
  misc_feature 1..22: note = chemically synthesized
  source 1..22: mol_type = other DNA
agatcaacagcacctttggttg

SEQ ID NO: 13142 - DNA, 22 bp, synthetic construct
  misc_feature 1..22: note = chemically synthesized
  source 1..22: mol_type = other DNA
tggttggcaagtgttataggaa

SEQ ID NO: 13143 - DNA, 22 bp, synthetic construct
  misc_feature 1..22: note = chemically synthesized
  source 1..22: mol_type = other DNA
ggttggcaagtgttataggaat

SEQ ID NO: 13144 - DNA, 22 bp, synthetic construct
  misc_feature 1..22: note = chemically synthesized
  source 1..22: mol_type = other DNA
gttggcaagtgttataggaatt

SEQ ID NO: 13145 - DNA, 22 bp, synthetic construct
  misc_feature 1..22: note = chemically synthesized
  source 1..22: mol_type = other DNA
gcaagtgttataggaattgcag

SEQ ID NO: 13146 - DNA, 22 bp, synthetic construct
  misc_feature 1..22: note = chemically synthesized
  source 1..22: mol_type = other DNA
taggaattgcagtgatttaagc

SEQ ID NO: 13147 - DNA, 22 bp, synthetic construct
  misc_feature 1..22: note = chemically synthesized
  source 1..22: mol_type = other DNA
cagtgatttaagcatctctcta

SEQ ID NO: 13148 - DNA, 22 bp, synthetic construct
  misc_feature 1..22: note = chemically synthesized
  source 1..22: mol_type = other DNA
aagcatctctctagaattcagg

SEQ ID NO: 13149 - DNA, 22 bp, synthetic construct
  misc_feature 1..22: note = chemically synthesized
  source 1..22: mol_type = other DNA
agcatctctctagaattcagga

SEQ ID NO: 13150 - DNA, 22 bp, synthetic construct
  misc_feature 1..22: note = chemically synthesized
  source 1..22: mol_type = other DNA
tctagaattcaggatatgtttt

SEQ ID NO: 13151 - DNA, 22 bp, synthetic construct
  misc_feature 1..22: note = chemically synthesized
  source 1..22: mol_type = other DNA
tagaattcaggatatgtttttt

SEQ ID NO: 13152 - DNA, 22 bp, synthetic construct
  misc_feature 1..22: note = chemically synthesized
  source 1..22: mol_type = other DNA
gaattcaggatatgtttttttt

SEQ ID NO: 13153 - DNA, 22 bp, synthetic construct
  misc_feature 1..22: note = chemically synthesized
  source 1..22: mol_type = other DNA
aggatatgttttttttaagcta

SEQ ID NO: 13154 - DNA, 22 bp, synthetic construct
  misc_feature 1..22: note = chemically synthesized
  source 1..22: mol_type = other DNA
tttttaagctacatctacctag

SEQ ID NO: 13155 - DNA, 22 bp, synthetic construct
  misc_feature 1..22: note = chemically synthesized
  source 1..22: mol_type = other DNA
ttttaagctacatctacctagt

SEQ ID NO: 13156 - DNA, 22 bp, synthetic construct
  misc_feature 1..22: note = chemically synthesized
  source 1..22: mol_type = other DNA
tttaagctacatctacctagtc

SEQ ID NO: 13157 - DNA, 22 bp, synthetic construct
  misc_feature 1..22: note = chemically synthesized
  source 1..22: mol_type = other DNA
ttaagctacatctacctagtct

SEQ ID NO: 13158 - DNA, 22 bp, synthetic construct
  misc_feature 1..22: note = chemically synthesized
  source 1..22: mol_type = other DNA
taagctacatctacctagtctg

SEQ ID NO: 13159 - DNA, 22 bp, synthetic construct
  misc_feature 1..22: note = chemically synthesized
  source 1..22: mol_type = other DNA
aagctacatctacctagtctga

SEQ ID NO: 13160 - DNA, 22 bp, synthetic construct
  misc_feature 1..22: note = chemically synthesized
  source 1..22: mol_type = other DNA
agctacatctacctagtctgaa

SEQ ID NO: 13161 - DNA, 22 bp, synthetic construct
  misc_feature 1..22: note = chemically synthesized
  source 1..22: mol_type = other DNA
catctacctagtctgaagagac

SEQ ID NO: 13162 - DNA, 22 bp, synthetic construct
  misc_feature 1..22: note = chemically synthesized
  source 1..22: mol_type = other DNA
cctagtctgaagagacactcct

SEQ ID NO: 13163 - DNA, 22 bp, synthetic construct
  misc_feature 1..22: note = chemically synthesized
  source 1..22: mol_type = other DNA
gtctgaagagacactcctgaac

SEQ ID NO: 13164 - DNA, 22 bp, synthetic construct
  misc_feature 1..22: note = chemically synthesized
  source 1..22: mol_type = other DNA
aagagacactcctgaactctgg

SEQ ID NO: 13165 - DNA, 22 bp, synthetic construct
  misc_feature 1..22: note = chemically synthesized
  source 1..22: mol_type = other DNA
ctgaactctggaggatagatgt

SEQ ID NO: 13166 - DNA, 22 bp, synthetic construct
  misc_feature 1..22: note = chemically synthesized
  source 1..22: mol_type = other DNA
aactctggaggatagatgtctc

SEQ ID NO: 13167 - DNA, 22 bp, synthetic construct
  misc_feature 1..22: note = chemically synthesized
  source 1..22: mol_type = other DNA
tggaggatagatgtctctatct

SEQ ID NO: 13168 - DNA, 22 bp, synthetic construct
  misc_feature 1..22: note = chemically synthesized
  source 1..22: mol_type = other DNA
gaggatagatgtctctatctga

SEQ ID NO: 13169 - DNA, 22 bp, synthetic construct
  misc_feature 1..22: note = chemically synthesized
  source 1..22: mol_type = other DNA
tatctgaatcatatttctcctt

SEQ ID NO: 13170 - DNA, 22 bp, synthetic construct
  misc_feature 1..22: note = chemically synthesized
  source 1..22: mol_type = other DNA
tctgaatcatatttctccttcc

SEQ ID NO: 13171 - DNA, 22 bp, synthetic construct
  misc_feature 1..22: note = chemically synthesized
  source 1..22: mol_type = other DNA
aatcatatttctccttccctcc

SEQ ID NO: 13172 - DNA, 22 bp, synthetic construct
  misc_feature 1..22: note = chemically synthesized
  source 1..22: mol_type = other DNA
ctccttccctccctccttcctc

SEQ ID NO: 13173 - DNA, 22 bp, synthetic construct
  misc_feature 1..22: note = chemically synthesized
  source 1..22: mol_type = other DNA
tccttccctccctccttcctct

SEQ ID NO: 13174 - DNA, 22 bp, synthetic construct
  misc_feature 1..22: note = chemically synthesized
  source 1..22: mol_type = other DNA
cttccctccctccttcctctcc

SEQ ID NO: 13175 - DNA, 22 bp, synthetic construct
  misc_feature 1..22: note = chemically synthesized
  source 1..22: mol_type = other DNA
ccctccctccttcctctcctct

SEQ ID NO: 13176 - DNA, 22 bp, synthetic construct
  misc_feature 1..22: note = chemically synthesized
  source 1..22: mol_type = other DNA
cctccctccttcctctcctctc

SEQ ID NO: 13177 - DNA, 22 bp, synthetic construct
  misc_feature 1..22: note = chemically synthesized
  source 1..22: mol_type = other DNA
cctccttcctctcctctcctct

SEQ ID NO: 13178 - DNA, 22 bp, synthetic construct
  misc_feature 1..22: note = chemically synthesized
  source 1..22: mol_type = other DNA
cttcctctcctctcctctctct

SEQ ID NO: 13179 - DNA, 22 bp, synthetic construct
  misc_feature 1..22: note = chemically synthesized
  source 1..22: mol_type = other DNA
cctctcctctcctctctctctc

SEQ ID NO: 13180 - DNA, 22 bp, synthetic construct
  misc_feature 1..22: note = chemically synthesized
  source 1..22: mol_type = other DNA
ctctcctctcctctctctctct

SEQ ID NO: 13181 - DNA, 22 bp, synthetic construct
  misc_feature 1..22: note = chemically synthesized
  source 1..22: mol_type = other DNA
tcctctcctctctctctctctc

SEQ ID NO: 13182 - DNA, 22 bp, synthetic construct
  misc_feature 1..22: note = chemically synthesized
  source 1..22: mol_type = other DNA
ctctcctctctctctctctcta

SEQ ID NO: 13183 - DNA, 22 bp, synthetic construct
  misc_feature 1..22: note = chemically synthesized
  source 1..22: mol_type = other DNA
tcctctctctctctctctatgt

SEQ ID NO: 13184 - DNA, 22 bp, synthetic construct
  misc_feature 1..22: note = chemically synthesized
  source 1..22: mol_type = other DNA
ctctctctctctctctatgtgt

SEQ ID NO: 13185 - DNA, 22 bp, synthetic construct
  misc_feature 1..22: note = chemically synthesized
  source 1..22: mol_type = other DNA
tctctctctctctatgtgtgtg

SEQ ID NO: 13186 - DNA, 22 bp, synthetic construct
  misc_feature 1..22: note = chemically synthesized
  source 1..22: mol_type = other DNA
tctctctctctatgtgtgtgtg

SEQ ID NO: 13187 - DNA, 22 bp, synthetic construct
  misc_feature 1..22: note = chemically synthesized
  source 1..22: mol_type = other DNA
tctctctctatgtgtgtgtgtg

SEQ ID NO: 13188 - DNA, 22 bp, synthetic construct
  misc_feature 1..22: note = chemically synthesized
  source 1..22: mol_type = other DNA
tctctctatgtgtgtgtgtgta

SEQ ID NO: 13189 - DNA, 22 bp, synthetic construct
  misc_feature 1..22: note = chemically synthesized
  source 1..22: mol_type = other DNA
tctctatgtgtgtgtgtgtaca

SEQ ID NO: 13190 - DNA, 22 bp, synthetic construct
  misc_feature 1..22: note = chemically synthesized
  source 1..22: mol_type = other DNA
tctatgtgtgtgtgtgtacata

SEQ ID NO: 13191 - DNA, 22 bp, synthetic construct
  misc_feature 1..22: note = chemically synthesized
  source 1..22: mol_type = other DNA
tatgtgtgtgtgtgtacatata

SEQ ID NO: 13192 - DNA, 22 bp, synthetic construct
  misc_feature 1..22: note = chemically synthesized
  source 1..22: mol_type = other DNA
tgtgtgtgtgtgtacatatata

SEQ ID NO: 13193 - DNA, 22 bp, synthetic construct
  misc_feature 1..22: note = chemically synthesized
  source 1..22: mol_type = other DNA
gctgcacaatgacattttggtc

SEQ ID NO: 13194 - DNA, 22 bp, synthetic construct
  misc_feature 1..22: note = chemically synthesized
  source 1..22: mol_type = other DNA
ctgcacaatgacattttggtca

SEQ ID NO: 13195 - DNA, 22 bp, synthetic construct
  misc_feature 1..22: note = chemically synthesized
  source 1..22: mol_type = other DNA
cacaatgacattttggtcaatg

SEQ ID NO: 13196 - DNA, 22 bp, synthetic construct
  misc_feature 1..22: note = chemically synthesized
  source 1..22: mol_type = other DNA
tggtcaatgatggaccacatta

SEQ ID NO: 13197 - DNA, 22 bp, synthetic construct
  misc_feature 1..22: note = chemically synthesized
  source 1..22: mol_type = other DNA
ggtcaatgatggaccacattat

SEQ ID NO: 13198 - DNA, 22 bp, synthetic construct
  misc_feature 1..22: note = chemically synthesized
  source 1..22: mol_type = other DNA
gtcaatgatggaccacattata

SEQ ID NO: 13199 - DNA, 22 bp, synthetic construct
  misc_feature 1..22: note = chemically synthesized
  source 1..22: mol_type = other DNA
tacgacagtggtcccataaggt

SEQ ID NO: 13200 - DNA, 22 bp, synthetic construct
  misc_feature 1..22: note = chemically synthesized
  source 1..22: mol_type = other DNA
taatactgtattttcactgtac

SEQ ID NO: 13201 - DNA, 22 bp, synthetic construct
  misc_feature 1..22: note = chemically synthesized
  source 1..22: mol_type = other DNA
tattttcactgtaccttttcta

SEQ ID NO: 13202 - DNA, 22 bp, synthetic construct
  misc_feature 1..22: note = chemically synthesized
  source 1..22: mol_type = other DNA
tcactgtaccttttctatgttt

SEQ ID NO: 13203 - DNA, 22 bp, synthetic construct
  misc_feature 1..22: note = chemically synthesized
  source 1..22: mol_type = other DNA
cactgtaccttttctatgttta

SEQ ID NO: 13204 - DNA, 22 bp, synthetic construct
  misc_feature 1..22: note = chemically synthesized
  source 1..22: mol_type = other DNA
actgtaccttttctatgtttag

SEQ ID NO: 13205 - DNA, 22 bp, synthetic construct
  misc_feature 1..22: note = chemically synthesized
  source 1..22: mol_type = other DNA
taccttttctatgtttagatac

SEQ ID NO: 13206 - DNA, 22 bp, synthetic construct
  misc_feature 1..22: note = chemically synthesized
  source 1..22: mol_type = other DNA
ttctatgtttagatacacaaat

SEQ ID NO: 13207 - DNA, 22 bp, synthetic construct
  misc_feature 1..22: note = chemically synthesized
  source 1..22: mol_type = other DNA
tctatgtttagatacacaaata

SEQ ID NO: 13208 - DNA, 22 bp, synthetic construct
  misc_feature 1..22: note = chemically synthesized
  source 1..22: mol_type = other DNA
ctatgtttagatacacaaatac

SEQ ID NO: 13209 - DNA, 22 bp, synthetic construct
  misc_feature 1..22: note = chemically synthesized
  source 1..22: mol_type = other DNA
tatgtttagatacacaaatacc

SEQ ID NO: 13210 - DNA, 22 bp, synthetic construct
  misc_feature 1..22: note = chemically synthesized
  source 1..22: mol_type = other DNA
tgtttagatacacaaataccac

SEQ ID NO: 13211 - DNA, 22 bp, synthetic construct
  misc_feature 1..22: note = chemically synthesized
  source 1..22: mol_type = other DNA
agatacacaaataccactgtta

SEQ ID NO: 13212 - DNA, 22 bp, synthetic construct
  misc_feature 1..22: note = chemically synthesized
  source 1..22: mol_type = other DNA
gatacacaaataccactgttac

SEQ ID NO: 13213 - DNA, 22 bp, synthetic construct
  misc_feature 1..22: note = chemically synthesized
  source 1..22: mol_type = other DNA
ttaccattgcctacagtgttca

SEQ ID NO: 13214 - DNA, 22 bp, synthetic construct
  misc_feature 1..22: note = chemically synthesized
  source 1..22: mol_type = other DNA
ccattgcctacagtgttcagta

SEQ ID NO: 13215 - DNA, 22 bp, synthetic construct
  misc_feature 1..22: note = chemically synthesized
  source 1..22: mol_type = other DNA
cctacagtgttcagtacagtca

SEQ ID NO: 13216 - DNA, 22 bp, synthetic construct
  misc_feature 1..22: note = chemically synthesized
  source 1..22: mol_type = other DNA
cagtgttcagtacagtcacatg

SEQ ID NO: 13217 - DNA, 22 bp, synthetic construct
  misc_feature 1..22: note = chemically synthesized
  source 1..22: mol_type = other DNA
agtacagtcacatgctgtacag

SEQ ID NO: 13218 - DNA, 22 bp, synthetic construct
  misc_feature 1..22: note = chemically synthesized
  source 1..22: mol_type = other DNA
tacaggtttgcagcccaggagc

SEQ ID NO: 13219 - DNA, 22 bp, synthetic construct
  misc_feature 1..22: note = chemically synthesized
  source 1..22: mol_type = other DNA
gcagcccaggagcctaggagca

SEQ ID NO: 13220 - DNA, 22 bp, synthetic construct
  misc_feature 1..22: note = chemically synthesized
  source 1..22: mol_type = other DNA
cagcccaggagcctaggagcaa

SEQ ID NO: 13221 - DNA, 22 bp, synthetic construct
  misc_feature 1..22: note = chemically synthesized
  source 1..22: mol_type = other DNA
ggagcaataggccacatcaata

SEQ ID NO: 13222 - DNA, 22 bp, synthetic construct
  misc_feature 1..22: note = chemically synthesized
  source 1..22: mol_type = other DNA
ggtatgtagtaagctataccat

SEQ ID NO: 13223 - DNA, 22 bp, synthetic construct
  misc_feature 1..22: note = chemically synthesized
  source 1..22: mol_type = other DNA
taccatttaggtttaggtaagt

SEQ ID NO: 13224 - DNA, 22 bp, synthetic construct
  misc_feature 1..22: note = chemically synthesized
  source 1..22: mol_type = other DNA
aggtttaggtaagtacactcta

SEQ ID NO: 13225 - DNA, 22 bp, synthetic construct
  misc_feature 1..22: note = chemically synthesized
  source 1..22: mol_type = other DNA
ggtttaggtaagtacactctat

SEQ ID NO: 13226 - DNA, 22 bp, synthetic construct
  misc_feature 1..22: note = chemically synthesized
  source 1..22: mol_type = other DNA
aggtaagtacactctattatgt

SEQ ID NO: 13227 - DNA, 22 bp, synthetic construct
  misc_feature 1..22: note = chemically synthesized
  source 1..22: mol_type = other DNA
ggtaagtacactctattatgtt

SEQ ID NO: 13228 - DNA, 22 bp, synthetic construct
  misc_feature 1..22: note = chemically synthesized
  source 1..22: mol_type = other DNA
tattatgttcgcacaatgatga

SEQ ID NO: 13229 - DNA, 22 bp, synthetic construct
  misc_feature 1..22: note = chemically synthesized
  source 1..22: mol_type = other DNA
ttatgttcgcacaatgatgaaa

SEQ ID NO: 13230 - DNA, 22 bp, synthetic construct
  misc_feature 1..22: note = chemically synthesized
  source 1..22: mol_type = other DNA
tgttcgcacaatgatgaaattg

SEQ ID NO: 13231 - DNA, 22 bp, synthetic construct
  misc_feature 1..22: note = chemically synthesized
  source 1..22: mol_type = other DNA
gcacaatgatgaaattgcttaa

SEQ ID NO: 13232 - DNA, 22 bp, synthetic construct
  misc_feature 1..22: note = chemically synthesized
  source 1..22: mol_type = other DNA
cttaatgacacatttctcagaa

SEQ ID NO: 13233 - DNA, 22 bp, synthetic construct
  misc_feature 1..22: note = chemically synthesized
  source 1..22: mol_type = other DNA
aatgacacatttctcagaatat

SEQ ID NO: 13234 - DNA, 22 bp, synthetic construct
  misc_feature 1..22: note = chemically synthesized
  source 1..22: mol_type = other DNA
atgacacatttctcagaatata

SEQ ID NO: 13235 - DNA, 22 bp, synthetic construct
  misc_feature 1..22: note = chemically synthesized
  source 1..22: mol_type = other DNA
ctcagaatatatccccattgtt

SEQ ID NO: 13236 - DNA, 22 bp, synthetic construct
  misc_feature 1..22: note = chemically synthesized
  source 1..22: mol_type = other DNA
tcagaatatatccccattgtta

SEQ ID NO: 13237 - DNA, 22 bp, synthetic construct
  misc_feature 1..22: note = chemically synthesized
  source 1..22: mol_type = other DNA
agaatatatccccattgttaag

SEQ ID NO: 13238 - DNA, 22 bp, synthetic construct
  misc_feature 1..22: note = chemically synthesized
  source 1..22: mol_type = other DNA
ttaaggaatgcatggctgtata

SEQ ID NO: 13239 - DNA, 22 bp, synthetic construct
  misc_feature 1..22: note = chemically synthesized
  source 1..22: mol_type = other DNA
aggaatgcatggctgtatacac

SEQ ID NO: 13240 - DNA, 22 bp, synthetic construct
  misc_feature 1..22: note = chemically synthesized
  source 1..22: mol_type = other DNA
tatacacacacatgtgtttgtg

SEQ ID NO: 13241 - DNA, 22 bp, synthetic construct
  misc_feature 1..22: note = chemically synthesized
  source 1..22: mol_type = other DNA
gtgtgttttcatgtatatacat

SEQ ID NO: 13242 - DNA, 22 bp, synthetic construct
  misc_feature 1..22: note = chemically synthesized
  source 1..22: mol_type = other DNA
tgtgttttcatgtatatacata

SEQ ID NO: 13243 - DNA, 22 bp, synthetic construct
  misc_feature 1..22: note = chemically synthesized
  source 1..22: mol_type = other DNA
tcatgtatatacatatatgtgt

SEQ ID NO: 13244 - DNA, 22 bp, synthetic construct
  misc_feature 1..22: note = chemically synthesized
  source 1..22: mol_type = other DNA
catgtatatacatatatgtgtg

SEQ ID NO: 13245 - DNA, 22 bp, synthetic construct
  misc_feature 1..22: note = chemically synthesized
  source 1..22: mol_type = other DNA
atgtatatacatatatgtgtgt

SEQ ID NO: 13246 - DNA, 22 bp, synthetic construct
  misc_feature 1..22: note = chemically synthesized
  source 1..22: mol_type = other DNA
ataacagggactcaagaagttg

SEQ ID NO: 13247 - DNA, 22 bp, synthetic construct
  misc_feature 1..22: note = chemically synthesized
  source 1..22: mol_type = other DNA
aagaagttgcctggagttgttc

SEQ ID NO: 13248 - DNA, 22 bp, synthetic construct
  misc_feature 1..22: note = chemically synthesized
  source 1..22: mol_type = other DNA
cctggagttgttcctttcttca

SEQ ID NO: 13249 - DNA, 22 bp, synthetic construct
  misc_feature 1..22: note = chemically synthesized
  source 1..22: mol_type = other DNA
gagttgttcctttcttcaaggg

SEQ ID NO: 13250 - DNA, 22 bp, synthetic construct
  misc_feature 1..22: note = chemically synthesized
  source 1..22: mol_type = other DNA
ttcctttcttcaagggtctagc

SEQ ID NO: 13251 - DNA, 22 bp, synthetic construct
  misc_feature 1..22: note = chemically synthesized
  source 1..22: mol_type = other DNA
ctttcttcaagggtctagcaat

SEQ ID NO: 13252 - DNA, 22 bp, synthetic construct
  misc_feature 1..22: note = chemically synthesized
  source 1..22: mol_type = other DNA
tcttcaagggtctagcaatata

SEQ ID NO: 13253 - DNA, 22 bp, synthetic construct
  misc_feature 1..22: note = chemically synthesized
  source 1..22: mol_type = other DNA
cttcaagggtctagcaatatat

SEQ ID NO: 13254 - DNA, 22 bp, synthetic construct
  misc_feature 1..22: note = chemically synthesized
  source 1..22: mol_type = other DNA
ttcaagggtctagcaatatatc

SEQ ID NO: 13255 - DNA, 22 bp, synthetic construct
  misc_feature 1..22: note = chemically synthesized
  source 1..22: mol_type = other DNA
caagggtctagcaatatatctg

SEQ ID NO: 13256 - DNA, 22 bp, synthetic construct
  misc_feature 1..22: note = chemically synthesized
  source 1..22: mol_type = other DNA
aagggtctagcaatatatctga

SEQ ID NO: 13257 - DNA, 22 bp, synthetic construct
  misc_feature 1..22: note = chemically synthesized
  source 1..22: mol_type = other DNA
gcaatatatctgataccatctc

SEQ ID NO: 13258 - DNA, 22 bp, synthetic construct
  misc_feature 1..22: note = chemically synthesized
  source 1..22: mol_type = other DNA
ataccatctcaagaggaccaag

SEQ ID NO: 13259 - DNA, 22 bp, synthetic construct
  misc_feature 1..22: note = chemically synthesized
  source 1..22: mol_type = other DNA
aagaggaccaagggcttataag

SEQ ID NO: 13260 - DNA, 22 bp, synthetic construct
  misc_feature 1..22: note = chemically synthesized
  source 1..22: mol_type = other DNA
ataagatgaactttctggggta

SEQ ID NO: 13261 - DNA, 22 bp, synthetic construct
  misc_feature 1..22: note = chemically synthesized
  source 1..22: mol_type = other DNA
taagatgaactttctggggtat

SEQ ID NO: 13262 - DNA, 22 bp, synthetic construct
  misc_feature 1..22: note = chemically synthesized
  source 1..22: mol_type = other DNA
tctggggtatttgggactactt

SEQ ID NO: 13263 - DNA, 22 bp, synthetic construct
  misc_feature 1..22: note = chemically synthesized
  source 1..22: mol_type = other DNA
ctggggtatttgggactacttc

SEQ ID NO: 13264 - DNA, 22 bp, synthetic construct
  misc_feature 1..22: note = chemically synthesized
  source 1..22: mol_type = other DNA
tggggtatttgggactacttcc

SEQ ID NO: 13265 - DNA, 22 bp, synthetic construct
  misc_feature 1..22: note = chemically synthesized
  source 1..22: mol_type = other DNA
gggtatttgggactacttcctg

SEQ ID NO: 13266 - DNA, 22 bp, synthetic construct
  misc_feature 1..22: note = chemically synthesized
  source 1..22: mol_type = other DNA
gggactacttcctgattaactc

SEQ ID NO: 13267 - DNA, 22 bp, synthetic construct
  misc_feature 1..22: note = chemically synthesized
  source 1..22: mol_type = other DNA
ggactacttcctgattaactcc

SEQ ID NO: 13268 - DNA, 22 bp, synthetic construct
  misc_feature 1..22: note = chemically synthesized
  source 1..22: mol_type = other DNA
cttcctgattaactccaaaaag

SEQ ID NO: 13269 - DNA, 22 bp, synthetic construct
  misc_feature 1..22: note = chemically synthesized
  source 1..22: mol_type = other DNA
cctgattaactccaaaaaggaa

SEQ ID NO: 13270 - DNA, 22 bp, synthetic construct
  misc_feature 1..22: note = chemically synthesized
  source 1..22: mol_type = other DNA
ctgattaactccaaaaaggaag

SEQ ID NO: 13271 - DNA, 22 bp, synthetic construct
  misc_feature 1..22: note = chemically synthesized
  source 1..22: mol_type = other DNA
attaactccaaaaaggaagaga

SEQ ID NO: 13272 - DNA, 22 bp, synthetic construct
  misc_feature 1..22: note = chemically synthesized
  source 1..22: mol_type = other DNA
actccaaaaaggaagagaaagg

SEQ ID NO: 13273 - DNA, 22 bp, synthetic construct
  misc_feature 1..22: note = chemically synthesized
  source 1..22: mol_type = other DNA
caaaaaggaagagaaaggaaag

SEQ ID NO: 13274 - DNA, 22 bp, synthetic construct
  misc_feature 1..22: note = chemically synthesized
  source 1..22: mol_type = other DNA
aactttcttcccttattttcat

SEQ ID NO: 13275 - DNA, 22 bp, synthetic construct
  misc_feature 1..22: note = chemically synthesized
  source 1..22: mol_type = other DNA
tcttcccttattttcattgcag

SEQ ID NO: 13276 - DNA, 22 bp, synthetic construct
  misc_feature 1..22: note = chemically synthesized
  source 1..22: mol_type = other DNA
cttcccttattttcattgcagc

SEQ ID NO: 13277 - DNA, 22 bp, synthetic construct
  misc_feature 1..22: note = chemically synthesized
  source 1..22: mol_type = other DNA
ttcccttattttcattgcagct

SEQ ID NO: 13278 - DNA, 22 bp, synthetic construct
  misc_feature 1..22: note = chemically synthesized
  source 1..22: mol_type = other DNA
cccttattttcattgcagctgt

SEQ ID NO: 13279 - DNA, 22 bp, synthetic construct
  misc_feature 1..22: note = chemically synthesized
  source 1..22: mol_type = other DNA
ccttattttcattgcagctgtt

SEQ ID NO: 13280 - DNA, 22 bp, synthetic construct
  misc_feature 1..22: note = chemically synthesized
  source 1..22: mol_type = other DNA
attttcattgcagctgttcact

SEQ ID NO: 13281 - DNA, 22 bp, synthetic construct
  misc_feature 1..22: note = chemically synthesized
  source 1..22: mol_type = other DNA
ttttcattgcagctgttcactt

SEQ ID NO: 13282 - DNA, 22 bp, synthetic construct
  misc_feature 1..22: note = chemically synthesized
  source 1..22: mol_type = other DNA
tcattgcagctgttcactttat

SEQ ID NO: 13283 - DNA, 22 bp, synthetic construct
  misc_feature 1..22: note = chemically synthesized
  source 1..22: mol_type = other DNA
cattgcagctgttcactttatg

SEQ ID NO: 13284 - DNA, 22 bp, synthetic construct
  misc_feature 1..22: note = chemically synthesized
  source 1..22: mol_type = other DNA
attgcagctgttcactttatgg

SEQ ID NO: 13285 - DNA, 22 bp, synthetic construct
  misc_feature 1..22: note = chemically synthesized
  source 1..22: mol_type = other DNA
cagctgttcactttatggagtg

SEQ ID NO: 13286 - DNA, 22 bp, synthetic construct
  misc_feature 1..22: note = chemically synthesized
  source 1..22: mol_type = other DNA
ttcactttatggagtgttctag

SEQ ID NO: 13287 - DNA, 22 bp, synthetic construct
  misc_feature 1..22: note = chemically synthesized
  source 1..22: mol_type = other DNA
actttatggagtgttctagtcc

SEQ ID NO: 13288 - DNA, 22 bp, synthetic construct
  misc_feature 1..22: note = chemically synthesized
  source 1..22: mol_type = other DNA
tatggagtgttctagtcccttg

SEQ ID NO: 13289 - DNA, 22 bp, synthetic construct
  misc_feature 1..22: note = chemically synthesized
  source 1..22: mol_type = other DNA
atggagtgttctagtcccttga

SEQ ID NO: 13290 - DNA, 22 bp, synthetic construct
  misc_feature 1..22: note = chemically synthesized
  source 1..22: mol_type = other DNA
tggagtgttctagtcccttgac

SEQ ID NO: 13291 - DNA, 22 bp, synthetic construct
  misc_feature 1..22: note = chemically synthesized
  source 1..22: mol_type = other DNA
tagtcccttgacatccctgctt

SEQ ID NO: 13292 - DNA, 22 bp, synthetic construct
  misc_feature 1..22: note = chemically synthesized
  source 1..22: mol_type = other DNA
gtcccttgacatccctgctttt

SEQ ID NO: 13293 - DNA, 22 bp, synthetic construct
  misc_feature 1..22: note = chemically synthesized
  source 1..22: mol_type = other DNA
gacatccctgcttttcccttgc

SEQ ID NO: 13294 - DNA, 22 bp, synthetic construct
  misc_feature 1..22: note = chemically synthesized
  source 1..22: mol_type = other DNA
acatccctgcttttcccttgct

SEQ ID NO: 13295 - DNA, 22 bp, synthetic construct
  misc_feature 1..22: note = chemically synthesized
  source 1..22: mol_type = other DNA
cttttcccttgctctgcaagtt

SEQ ID NO: 13296 - DNA, 22 bp, synthetic construct
  misc_feature 1..22: note = chemically synthesized
  source 1..22: mol_type = other DNA
ttcccttgctctgcaagttcct

SEQ ID NO: 13297 - DNA, 22 bp, synthetic construct
  misc_feature 1..22: note = chemically synthesized
  source 1..22: mol_type = other DNA
tcccttgctctgcaagttcctt

SEQ ID NO: 13298 - DNA, 22 bp, synthetic construct
  misc_feature 1..22: note = chemically synthesized
  source 1..22: mol_type = other DNA
cccttgctctgcaagttccttt

SEQ ID NO: 13299 - DNA, 22 bp, synthetic construct
  misc_feature 1..22: note = chemically synthesized
  source 1..22: mol_type = other DNA
ccttgctctgcaagttcctttt

SEQ ID NO: 13300 - DNA, 22 bp, synthetic construct
  misc_feature 1..22: note = chemically synthesized
  source 1..22: mol_type = other DNA
gctctgcaagttccttttgggc

SEQ ID NO: 13301 - DNA, 22 bp, synthetic construct
  misc_feature 1..22: note = chemically synthesized
  source 1..22: mol_type = other DNA
ctctgcaagttccttttgggct

SEQ ID NO: 13302 - DNA, 22 bp, synthetic construct
  misc_feature 1..22: note = chemically synthesized
  source 1..22: mol_type = other DNA
tgcaagttccttttgggctcac

SEQ ID NO: 13303 - DNA, 22 bp, synthetic construct
  misc_feature 1..22: note = chemically synthesized
  source 1..22: mol_type = other DNA
caagttccttttgggctcactt

SEQ ID NO: 13304 - DNA, 22 bp, synthetic construct
  misc_feature 1..22: note = chemically synthesized
  source 1..22: mol_type = other DNA
cttttgggctcactttttttct

SEQ ID NO: 13305 - DNA, 22 bp, synthetic construct
  misc_feature 1..22: note = chemically synthesized
  source 1..22: mol_type = other DNA
ttgggctcactttttttctttg

SEQ ID NO: 13306 - DNA, 22 bp, synthetic construct
  misc_feature 1..22: note = chemically synthesized
  source 1..22: mol_type = other DNA
tgggctcactttttttctttga

SEQ ID NO: 13307 - DNA, 22 bp, synthetic construct
  misc_feature 1..22: note = chemically synthesized
  source 1..22: mol_type = other DNA
gggctcactttttttctttgaa

SEQ ID NO: 13308 - DNA, 22 bp, synthetic construct
  misc_feature 1..22: note = chemically synthesized
  source 1..22: mol_type = other DNA
ggctcactttttttctttgaat

SEQ ID NO: 13309 - DNA, 22 bp, synthetic construct
  misc_feature 1..22: note = chemically synthesized
  source 1..22: mol_type = other DNA
actttttttctttgaatttagc

SEQ ID NO: 13310 - DNA, 22 bp, synthetic construct
  misc_feature 1..22: note = chemically synthesized
  source 1..22: mol_type = other DNA
tttttctttgaatttagcctag

SEQ ID NO: 13311 - DNA, 22 bp, synthetic construct
  misc_feature 1..22: note = chemically synthesized
  source 1..22: mol_type = other DNA
ttttctttgaatttagcctaga

SEQ ID NO: 13312 - DNA, 22 bp, synthetic construct
  misc_feature 1..22: note = chemically synthesized
  source 1..22: mol_type = other DNA
tttctttgaatttagcctagac

SEQ ID NO: 13313 - DNA, 22 bp, synthetic construct
  misc_feature 1..22: note = chemically synthesized
  source 1..22: mol_type = other DNA
ttctttgaatttagcctagact

SEQ ID NO: 13314 - DNA, 22 bp, synthetic construct
  misc_feature 1..22: note = chemically synthesized
  source 1..22: mol_type = other DNA
tctttgaatttagcctagactt

SEQ ID NO: 13315 - DNA, 22 bp, synthetic construct
  misc_feature 1..22: note = chemically synthesized
  source 1..22: mol_type = other DNA
ctttgaatttagcctagacttt

SEQ ID NO: 13316 - DNA, 22 bp, synthetic construct
  misc_feature 1..22: note = chemically synthesized
  source 1..22: mol_type = other DNA
tttgaatttagcctagactttt

SEQ ID NO: 13317 - DNA, 22 bp, synthetic construct
  misc_feature 1..22: note = chemically synthesized
  source 1..22: mol_type = other DNA
tgaatttagcctagactttttc

SEQ ID NO: 13318 - DNA, 22 bp, synthetic construct
  misc_feature 1..22: note = chemically synthesized
  source 1..22: mol_type = other DNA
gaatttagcctagactttttct

SEQ ID NO: 13319 - DNA, 22 bp, synthetic construct
  misc_feature 1..22: note = chemically synthesized
  source 1..22: mol_type = other DNA
aatttagcctagactttttctc

SEQ ID NO: 13320 - DNA, 22 bp, synthetic construct
  misc_feature 1..22: note = chemically synthesized
  source 1..22: mol_type = other DNA
agcctagactttttctcttcaa

SEQ ID NO: 13321 - DNA, 22 bp, synthetic construct
  misc_feature 1..22: note = chemically synthesized
  source 1..22: mol_type = other DNA
gcctagactttttctcttcaac

SEQ ID NO: 13322 - DNA, 22 bp, synthetic construct
  misc_feature 1..22: note = chemically synthesized
  source 1..22: mol_type = other DNA
gactttttctcttcaactcttt

SEQ ID NO: 13323 - DNA, 22 bp, synthetic construct
  misc_feature 1..22: note = chemically synthesized
  source 1..22: mol_type = other DNA
tttctcttcaactctttttttt

SEQ ID NO: 13324 - DNA, 22 bp, synthetic construct
  misc_feature 1..22: note = chemically synthesized
  source 1..22: mol_type = other DNA
ttctcttcaactcttttttttt

SEQ ID NO: 13325 - DNA, 22 bp, synthetic construct
  misc_feature 1..22: note = chemically synthesized
  source 1..22: mol_type = other DNA
tctcttcaactctttttttttt

SEQ ID NO: 13326 - DNA, 22 bp, synthetic construct
  misc_feature 1..22: note = chemically synthesized
  source 1..22: mol_type = other DNA
ctcttcaactcttttttttttg

SEQ ID NO: 13327 - DNA, 22 bp, synthetic construct
  misc_feature 1..22: note = chemically synthesized
  source 1..22: mol_type = other DNA
tcttcaactcttttttttttga

SEQ ID NO: 13328 - DNA, 22 bp, synthetic construct
  misc_feature 1..22: note = chemically synthesized
  source 1..22: mol_type = other DNA
ttcaactcttttttttttgaca

SEQ ID NO: 13329 - DNA, 22 bp, synthetic construct
  misc_feature 1..22: note = chemically synthesized
  source 1..22: mol_type = other DNA
caactcttttttttttgacaga

SEQ ID NO: 13330 - DNA, 22 bp, synthetic construct
  misc_feature 1..22: note = chemically synthesized
  source 1..22: mol_type = other DNA
aactcttttttttttgacagag

SEQ ID NO: 13331 - DNA, 22 bp, synthetic construct
  misc_feature 1..22: note = chemically synthesized
  source 1..22: mol_type = other DNA
ttttttttttgacagagtcttg

SEQ ID NO: 13332 - DNA, 22 bp, synthetic construct
  misc_feature 1..22: note = chemically synthesized
  source 1..22: mol_type = other DNA
ttttttttgacagagtcttgct

SEQ ID NO: 13333 - DNA, 22 bp, synthetic construct
  misc_feature 1..22: note = chemically synthesized
  source 1..22: mol_type = other DNA
tttttttgacagagtcttgctc

SEQ ID NO: 13334 - DNA, 22 bp, synthetic construct
  misc_feature 1..22: note = chemically synthesized
  source 1..22: mol_type = other DNA
ttttttgacagagtcttgctct

SEQ ID NO: 13335 - DNA, 22 bp, synthetic construct
  misc_feature 1..22: note = chemically synthesized
  source 1..22: mol_type = other DNA
tttttgacagagtcttgctctg

SEQ ID NO: 13336 - DNA, 22 bp, synthetic construct
  misc_feature 1..22: note = chemically synthesized
  source 1..22: mol_type = other DNA
ttttgacagagtcttgctctgt

SEQ ID NO: 13337 - DNA, 22 bp, synthetic construct
  misc_feature 1..22: note = chemically synthesized
  source 1..22: mol_type = other DNA
tttgacagagtcttgctctgtc

SEQ ID NO: 13338 - DNA, 22 bp, synthetic construct
  misc_feature 1..22: note = chemically synthesized
  source 1..22: mol_type = other DNA
ttgacagagtcttgctctgtcg

SEQ ID NO: 13339 - DNA, 22 bp, synthetic construct
  misc_feature 1..22: note = chemically synthesized
  source 1..22: mol_type = other DNA
tgacagagtcttgctctgtcgc

SEQ ID NO: 13340 - DNA, 22 bp, synthetic construct
  misc_feature 1..22: note = chemically synthesized
  source 1..22: mol_type = other DNA
gacagagtcttgctctgtcgcc

SEQ ID NO: 13341 - DNA, 22 bp, synthetic construct
  misc_feature 1..22: note = chemically synthesized
  source 1..22: mol_type = other DNA
acagagtcttgctctgtcgccc

SEQ ID NO: 13342 - DNA, 22 bp, synthetic construct
  misc_feature 1..22: note = chemically synthesized
  source 1..22: mol_type = other DNA
gctctgtcgcccaggctggagt

SEQ ID NO: 13343 - DNA, 22 bp, synthetic construct
  misc_feature 1..22: note = chemically synthesized
  source 1..22: mol_type = other DNA
ctctgtcgcccaggctggagtg

SEQ ID NO: 13344 - DNA, 22 bp, synthetic construct
  misc_feature 1..22: note = chemically synthesized
  source 1..22: mol_type = other DNA
tgtcgcccaggctggagtgcag

SEQ ID NO: 13345 - DNA, 22 bp, synthetic construct
  misc_feature 1..22: note = chemically synthesized
  source 1..22: mol_type = other DNA
tcgcccaggctggagtgcagtg

SEQ ID NO: 13346 - DNA, 22 bp, synthetic construct
  misc_feature 1..22: note = chemically synthesized
  source 1..22: mol_type = other DNA
gagtgcagtggtgcgatctcag

SEQ ID NO: 13347 - DNA, 22 bp, synthetic construct
  misc_feature 1..22: note = chemically synthesized
  source 1..22: mol_type = other DNA
agctcactgcaacctccatctc

SEQ ID NO: 13348 - DNA, 22 bp, synthetic construct
  misc_feature 1..22: note = chemically synthesized
  source 1..22: mol_type = other DNA
actgcaacctccatctcccagg

SEQ ID NO: 13349 - DNA, 22 bp, synthetic construct
  misc_feature 1..22: note = chemically synthesized
  source 1..22: mol_type = other DNA
caacctccatctcccaggttca

SEQ ID NO: 13350 - DNA, 22 bp, synthetic construct
  misc_feature 1..22: note = chemically synthesized
  source 1..22: mol_type = other DNA
catctcccaggttcaagctatt

SEQ ID NO: 13351 - DNA, 22 bp, synthetic construct
  misc_feature 1..22: note = chemically synthesized
  source 1..22: mol_type = other DNA
ccaggttcaagctattctcctg

SEQ ID NO: 13352 - DNA, 22 bp, synthetic construct
  misc_feature 1..22: note = chemically synthesized
  source 1..22: mol_type = other DNA
aagctattctcctgcctcagcc

SEQ ID NO: 13353 - DNA, 22 bp, synthetic construct
  misc_feature 1..22: note = chemically synthesized
  source 1..22: mol_type = other DNA
ttctcctgcctcagcctcccaa

SEQ ID NO: 13354 - DNA, 22 bp, synthetic construct
  misc_feature 1..22: note = chemically synthesized
  source 1..22: mol_type = other DNA
tcctgcctcagcctcccaagta

SEQ ID NO: 13355 - DNA, 22 bp, synthetic construct
  misc_feature 1..22: note = chemically synthesized
  source 1..22: mol_type = other DNA
ctgcctcagcctcccaagtagc

SEQ ID NO: 13356 - DNA, 22 bp, synthetic construct
  misc_feature 1..22: note = chemically synthesized
  source 1..22: mol_type = other DNA
cctcagcctcccaagtagctgg

SEQ ID NO: 13357 - DNA, 22 bp, synthetic construct
  misc_feature 1..22: note = chemically synthesized
  source 1..22: mol_type = other DNA
agcctcccaagtagctgggatt

SEQ ID NO: 13358 - DNA, 22 bp, synthetic construct
  misc_feature 1..22: note = chemically synthesized
  source 1..22: mol_type = other DNA
ccaagtagctgggattacaggc

SEQ ID NO: 13359 - DNA, 22 bp, synthetic construct
  misc_feature 1..22: note = chemically synthesized
  source 1..22: mol_type = other DNA
ggattacaggcacccgccacca

SEQ ID NO: 13360 - DNA, 22 bp, synthetic construct
  misc_feature 1..22: note = chemically synthesized
  source 1..22: mol_type = other DNA
caggcacccgccaccatgccca

SEQ ID NO: 13361 - DNA, 22 bp, synthetic construct
  misc_feature 1..22: note = chemically synthesized
  source 1..22: mol_type = other DNA
atttttgtatttttagtaaagc

SEQ ID NO: 13362 - DNA, 22 bp, synthetic construct
  misc_feature 1..22: note = chemically synthesized
  source 1..22: mol_type = other DNA
ttgtatttttagtaaagccggg

SEQ ID NO: 13363 - DNA, 22 bp, synthetic construct
  misc_feature 1..22: note = chemically synthesized
  source 1..22: mol_type = other DNA
tgtatttttagtaaagccgggg

SEQ ID NO: 13364 - DNA, 22 bp, synthetic construct
  misc_feature 1..22: note = chemically synthesized
  source 1..22: mol_type = other DNA
gtatttttagtaaagccggggt

SEQ ID NO: 13365 - DNA, 22 bp, synthetic construct
  misc_feature 1..22: note = chemically synthesized
  source 1..22: mol_type = other DNA
tatttttagtaaagccggggtt

SEQ ID NO: 13366 - DNA, 22 bp, synthetic construct
  misc_feature 1..22: note = chemically synthesized
  source 1..22: mol_type = other DNA
ttagtaaagccggggtttcacc

SEQ ID NO: 13367 - DNA, 22 bp, synthetic construct
  misc_feature 1..22: note = chemically synthesized
  source 1..22: mol_type = other DNA
tagtaaagccggggtttcacca

SEQ ID NO: 13368 - DNA, 22 bp, synthetic construct
  misc_feature 1..22: note = chemically synthesized
  source 1..22: mol_type = other DNA
agtaaagccggggtttcaccat

SEQ ID NO: 13369 - DNA, 22 bp, synthetic construct
  misc_feature 1..22: note = chemically synthesized
  source 1..22: mol_type = other DNA
gtaaagccggggtttcaccatt

SEQ ID NO: 13370 - DNA, 22 bp, synthetic construct
  misc_feature 1..22: note = chemically synthesized
  source 1..22: mol_type = other DNA
caccatttcaccttgttggcca

SEQ ID NO: 13371 - DNA, 22 bp, synthetic construct
  misc_feature 1..22: note = chemically synthesized
  source 1..22: mol_type = other DNA
accatttcaccttgttggccag

SEQ ID NO: 13372 - DNA, 22 bp, synthetic construct
  misc_feature 1..22: note = chemically synthesized
  source 1..22: mol_type = other DNA
caccttgttggccaggctggtg

SEQ ID NO: 13373 - DNA, 22 bp, synthetic construct
  misc_feature 1..22: note = chemically synthesized
  source 1..22: mol_type = other DNA
accttgttggccaggctggtgt

SEQ ID NO: 13374 - DNA, 22 bp, synthetic construct
  misc_feature 1..22: note = chemically synthesized
  source 1..22: mol_type = other DNA
gttggccaggctggtgtcgaac

SEQ ID NO: 13375 - DNA, 22 bp, synthetic construct
  misc_feature 1..22: note = chemically synthesized
  source 1..22: mol_type = other DNA
ttggccaggctggtgtcgaact

SEQ ID NO: 13376 - DNA, 22 bp, synthetic construct
  misc_feature 1..22: note = chemically synthesized
  source 1..22: mol_type = other DNA
gccaggctggtgtcgaactcct

SEQ ID NO: 13377 - DNA, 22 bp, synthetic construct
  misc_feature 1..22: note = chemically synthesized
  source 1..22: mol_type = other DNA
gtgtcgaactcctgacctcaag

SEQ ID NO: 13378 - DNA, 22 bp, synthetic construct
  misc_feature 1..22: note = chemically synthesized
  source 1..22: mol_type = other DNA
ctgacctcaagtgatctgcctg

SEQ ID NO: 13379 - DNA, 22 bp, synthetic construct
  misc_feature 1..22: note = chemically synthesized
  source 1..22: mol_type = other DNA
acctcaagtgatctgcctgcct

SEQ ID NO: 13380 - DNA, 22 bp, synthetic construct
  misc_feature 1..22: note = chemically synthesized
  source 1..22: mol_type = other DNA
aagtgatctgcctgcctgggcc

SEQ ID NO: 13381 - DNA, 22 bp, synthetic construct
  misc_feature 1..22: note = chemically synthesized
  source 1..22: mol_type = other DNA
cctgcctgggcctctgaaagtg

SEQ ID NO: 13382 - DNA, 22 bp, synthetic construct
  misc_feature 1..22: note = chemically synthesized
  source 1..22: mol_type = other DNA
cctgggcctctgaaagtgctgg

SEQ ID NO: 13383 - DNA, 22 bp, synthetic construct
  misc_feature 1..22: note = chemically synthesized
  source 1..22: mol_type = other DNA
ggcctctgaaagtgctgggatt

SEQ ID NO: 13384 - DNA, 22 bp, synthetic construct
  misc_feature 1..22: note = chemically synthesized
  source 1..22: mol_type = other DNA
tgaaagtgctgggattataggt

SEQ ID NO: 13385 - DNA, 22 bp, synthetic construct
  misc_feature 1..22: note = chemically synthesized
  source 1..22: mol_type = other DNA
aaagtgctgggattataggtgt

SEQ ID NO: 13386 - DNA, 22 bp, synthetic construct
  misc_feature 1..22: note = chemically synthesized
  source 1..22: mol_type = other DNA
ggattataggtgtgagccacca

SEQ ID NO: 13387 - DNA, 22 bp, synthetic construct
  misc_feature 1..22: note = chemically synthesized
  source 1..22: mol_type = other DNA
taggtgtgagccaccatgccag

SEQ ID NO: 13388 - DNA, 22 bp, synthetic construct
  misc_feature 1..22: note = chemically synthesized
  source 1..22: mol_type = other DNA
tcttcaactcttcattggccat

SEQ ID NO: 13389 - DNA, 22 bp, synthetic construct
  misc_feature 1..22: note = chemically synthesized
  source 1..22: mol_type = other DNA
ttcaactcttcattggccatat

SEQ ID NO: 13390 - DNA, 22 bp, synthetic construct
  misc_feature 1..22: note = chemically synthesized
  source 1..22: mol_type = other DNA
caactcttcattggccatattt

SEQ ID NO: 13391 - DNA, 22 bp, synthetic construct
  misc_feature 1..22: note = chemically synthesized
  source 1..22: mol_type = other DNA
aactcttcattggccatatttc

SEQ ID NO: 13392 - DNA, 22 bp, synthetic construct
  misc_feature 1..22: note = chemically synthesized
  source 1..22: mol_type = other DNA
ttcattggccatatttctcaat

SEQ ID NO: 13393 - DNA, 22 bp, synthetic construct
  misc_feature 1..22: note = chemically synthesized
  source 1..22: mol_type = other DNA
cattggccatatttctcaattt

SEQ ID NO: 13394 - DNA, 22 bp, synthetic construct
  misc_feature 1..22: note = chemically synthesized
  source 1..22: mol_type = other DNA
attggccatatttctcaatttc

SEQ ID NO: 13395 - DNA, 22 bp, synthetic construct
  misc_feature 1..22: note = chemically synthesized
  source 1..22: mol_type = other DNA
gccatatttctcaatttccttc

SEQ ID NO: 13396 - DNA, 22 bp, synthetic construct
  misc_feature 1..22: note = chemically synthesized
  source 1..22: mol_type = other DNA
ctcaatttccttcactcgtttg

SEQ ID NO: 13397 - DNA, 22 bp, synthetic construct
  misc_feature 1..22: note = chemically synthesized
  source 1..22: mol_type = other DNA
tcaatttccttcactcgtttgc

SEQ ID NO: 13398 - DNA, 22 bp, synthetic construct
  misc_feature 1..22: note = chemically synthesized
  source 1..22: mol_type = other DNA
aatttccttcactcgtttgcaa

SEQ ID NO: 13399 - DNA, 22 bp, synthetic construct
  misc_feature 1..22: note = chemically synthesized
  source 1..22: mol_type = other DNA
ccttcactcgtttgcaatgctg

SEQ ID NO: 13400 - DNA, 22 bp, synthetic construct
  misc_feature 1..22: note = chemically synthesized
  source 1..22: mol_type = other DNA
cttcactcgtttgcaatgctgt

SEQ ID NO: 13401 - DNA, 22 bp, synthetic construct
  misc_feature 1..22: note = chemically synthesized
  source 1..22: mol_type = other DNA
cactcgtttgcaatgctgtgcc

SEQ ID NO: 13402 - DNA, 22 bp, synthetic construct
  misc_feature 1..22: note = chemically synthesized
  source 1..22: mol_type = other DNA
actcgtttgcaatgctgtgccc

SEQ ID NO: 13403 - DNA, 22 bp, synthetic construct
  misc_feature 1..22: note = chemically synthesized
  source 1..22: mol_type = other DNA
gtttgcaatgctgtgcccaccc

SEQ ID NO: 13404 - DNA, 22 bp, synthetic construct
  misc_feature 1..22: note = chemically synthesized
  source 1..22: mol_type = other DNA
gcaatgctgtgcccaccctgca

SEQ ID NO: 13405 - DNA, 22 bp, synthetic construct
  misc_feature 1..22: note = chemically synthesized
  source 1..22: mol_type = other DNA
caatgctgtgcccaccctgcaa

SEQ ID NO: 13406 - DNA, 22 bp, synthetic construct
  misc_feature 1..22: note = chemically synthesized
  source 1..22: mol_type = other DNA
tgcccaccctgcaatcctagcc

SEQ ID NO: 13407 - DNA, 22 bp, synthetic construct
  misc_feature 1..22: note = chemically synthesized
  source 1..22: mol_type = other DNA
caatcctagcccctaaattgga

SEQ ID NO: 13408 - DNA, 22 bp, synthetic construct
  misc_feature 1..22: note = chemically synthesized
  source 1..22: mol_type = other DNA
gcccctaaattggagcagccat

SEQ ID NO: 13409 - DNA, 22 bp, synthetic construct
  misc_feature 1..22: note = chemically synthesized
  source 1..22: mol_type = other DNA
aattggagcagccatctgcctt

SEQ ID NO: 13410 - DNA, 22 bp, synthetic construct
  misc_feature 1..22: note = chemically synthesized
  source 1..22: mol_type = other DNA
gagcagccatctgccttcatcc

SEQ ID NO: 13411 - DNA, 22 bp, synthetic construct
  misc_feature 1..22: note = chemically synthesized
  source 1..22: mol_type = other DNA
ccttcatccttctcttcccaga

SEQ ID NO: 13412 - DNA, 22 bp, synthetic construct
  misc_feature 1..22: note = chemically synthesized
  source 1..22: mol_type = other DNA
catccttctcttcccagacagc

SEQ ID NO: 13413 - DNA, 22 bp, synthetic construct
  misc_feature 1..22: note = chemically synthesized
  source 1..22: mol_type = other DNA
atccttctcttcccagacagcc

SEQ ID NO: 13414 - DNA, 22 bp, synthetic construct
  misc_feature 1..22: note = chemically synthesized
  source 1..22: mol_type = other DNA
ctcttcccagacagccgaggac

SEQ ID NO: 13415 - DNA, 22 bp, synthetic construct
  misc_feature 1..22: note = chemically synthesized
  source 1..22: mol_type = other DNA
tcttcccagacagccgaggact

SEQ ID NO: 13416 - DNA, 22 bp, synthetic construct
  misc_feature 1..22: note = chemically synthesized
  source 1..22: mol_type = other DNA
ttcccagacagccgaggactgt

SEQ ID NO: 13417 - DNA, 22 bp, synthetic construct
  misc_feature 1..22: note = chemically synthesized
  source 1..22: mol_type = other DNA
cccagacagccgaggactgtga

SEQ ID NO: 13418 - DNA, 22 bp, synthetic construct
  misc_feature 1..22: note = chemically synthesized
  source 1..22: mol_type = other DNA
ccagacagccgaggactgtgaa

SEQ ID NO: 13419 - DNA, 22 bp, synthetic construct
  misc_feature 1..22: note = chemically synthesized
  source 1..22: mol_type = other DNA
tgaaggaaaaaaatcaccaaaa

SEQ ID NO: 13420 - DNA, 22 bp, synthetic construct
  misc_feature 1..22: note = chemically synthesized
  source 1..22: mol_type = other DNA
atgcctcacagcctccacccac

SEQ ID NO: 13421 - DNA, 22 bp, synthetic construct
  misc_feature 1..22: note = chemically synthesized
  source 1..22: mol_type = other DNA
acagcctccacccacctctctg

SEQ ID NO: 13422 - DNA, 22 bp, synthetic construct
  misc_feature 1..22: note = chemically synthesized
  source 1..22: mol_type = other DNA
cacccacctctctgctcagcaa

SEQ ID NO: 13423 - DNA, 22 bp, synthetic construct
  misc_feature 1..22: note = chemically synthesized
  source 1..22: mol_type = other DNA
tctgctcagcaactcatttact

SEQ ID NO: 13424 - DNA, 22 bp, synthetic construct
  misc_feature 1..22: note = chemically synthesized
  source 1..22: mol_type = other DNA
tgctcagcaactcatttacttg

SEQ ID NO: 13425 - DNA, 22 bp, synthetic construct
  misc_feature 1..22: note = chemically synthesized
  source 1..22: mol_type = other DNA
ctcagcaactcatttacttggc

SEQ ID NO: 13426 - DNA, 22 bp, synthetic construct
  misc_feature 1..22: note = chemically synthesized
  source 1..22: mol_type = other DNA
agcaactcatttacttggccct

SEQ ID NO: 13427 - DNA, 22 bp, synthetic construct
  misc_feature 1..22: note = chemically synthesized
  source 1..22: mol_type = other DNA
atttacttggccctggacactc

SEQ ID NO: 13428 - DNA, 22 bp, synthetic construct
  misc_feature 1..22: note = chemically synthesized
  source 1..22: mol_type = other DNA
acttggccctggacactcctaa

SEQ ID NO: 13429 - DNA, 22 bp, synthetic construct
  misc_feature 1..22: note = chemically synthesized
  source 1..22: mol_type = other DNA
cttggccctggacactcctaaa

SEQ ID NO: 13430 - DNA, 22 bp, synthetic construct
  misc_feature 1..22: note = chemically synthesized
  source 1..22: mol_type = other DNA
ggccctggacactcctaaatag

SEQ ID NO: 13431 - DNA, 22 bp, synthetic construct
  misc_feature 1..22: note = chemically synthesized
  source 1..22: mol_type = other DNA
gccctggacactcctaaatagc

SEQ ID NO: 13432 - DNA, 22 bp, synthetic construct
  misc_feature 1..22: note = chemically synthesized
  source 1..22: mol_type = other DNA
gacactcctaaatagcatccat

SEQ ID NO: 13433 - DNA, 22 bp, synthetic construct
  misc_feature 1..22: note = chemically synthesized
  source 1..22: mol_type = other DNA
ctaaatagcatccatgcctgca

SEQ ID NO: 13434 - DNA, 22 bp, synthetic construct
  misc_feature 1..22: note = chemically synthesized
  source 1..22: mol_type = other DNA
aatagcatccatgcctgcatcc

SEQ ID NO: 13435 - DNA, 22 bp, synthetic construct
  misc_feature 1..22: note = chemically synthesized
  source 1..22: mol_type = other DNA
catccatttacagtcgttcctc

SEQ ID NO: 13436 - DNA, 22 bp, synthetic construct
  misc_feature 1..22: note = chemically synthesized
  source 1..22: mol_type = other DNA
acagtcgttcctcagtatccat

SEQ ID NO: 13437 - DNA, 22 bp, synthetic construct
  misc_feature 1..22: note = chemically synthesized
  source 1..22: mol_type = other DNA
cagtcgttcctcagtatccatg

SEQ ID NO: 13438 - DNA, 22 bp, synthetic construct
  misc_feature 1..22: note = chemically synthesized
  source 1..22: mol_type = other DNA
ctcagtatccatggaaaattgg

SEQ ID NO: 13439 - DNA, 22 bp, synthetic construct
  misc_feature 1..22: note = chemically synthesized
  source 1..22: mol_type = other DNA
agtatccatggaaaattggtgg

SEQ ID NO: 13440 - DNA, 22 bp, synthetic construct
  misc_feature 1..22: note = chemically synthesized
  source 1..22: mol_type = other DNA
gtggcaagaccccctgcaaata

SEQ ID NO: 13441 - DNA, 22 bp, synthetic construct
  misc_feature 1..22: note = chemically synthesized
  source 1..22: mol_type = other DNA
caaatatcaagatctgtggatg

SEQ ID NO: 13442 - DNA, 22 bp, synthetic construct
  misc_feature 1..22: note = chemically synthesized
  source 1..22: mol_type = other DNA
tggatgctcaagtctccgatat

SEQ ID NO: 13443 - DNA, 22 bp, synthetic construct
  misc_feature 1..22: note = chemically synthesized
  source 1..22: mol_type = other DNA
aagtctccgatataaaaatggc

SEQ ID NO: 13444 - DNA, 22 bp, synthetic construct
  misc_feature 1..22: note = chemically synthesized
  source 1..22: mol_type = other DNA
cgatataaaaatggcttactat

SEQ ID NO: 13445 - DNA, 22 bp, synthetic construct
  misc_feature 1..22: note = chemically synthesized
  source 1..22: mol_type = other DNA
actatttgcatataacctaaac

SEQ ID NO: 13446 - DNA, 22 bp, synthetic construct
  misc_feature 1..22: note = chemically synthesized
  source 1..22: mol_type = other DNA
ctatttgcatataacctaaaca

SEQ ID NO: 13447 - DNA, 22 bp, synthetic construct
  misc_feature 1..22: note = chemically synthesized
  source 1..22: mol_type = other DNA
tttgcatataacctaaacacat

SEQ ID NO: 13448 - DNA, 22 bp, synthetic construct
  misc_feature 1..22: note = chemically synthesized
  source 1..22: mol_type = other DNA
gcatataacctaaacacatcct

SEQ ID NO: 13449 - DNA, 22 bp, synthetic construct
  misc_feature 1..22: note = chemically synthesized
  source 1..22: mol_type = other DNA
catataacctaaacacatcctc

SEQ ID NO: 13450 - DNA, 22 bp, synthetic construct
  misc_feature 1..22: note = chemically synthesized
  source 1..22: mol_type = other DNA
aacacatcctcctttgtacttt

SEQ ID NO: 13451 - DNA, 22 bp, synthetic construct
  misc_feature 1..22: note = chemically synthesized
  source 1..22: mol_type = other DNA
ctttgtactttaaatcatctct

SEQ ID NO: 13452 - DNA, 22 bp, synthetic construct
  misc_feature 1..22: note = chemically synthesized
  source 1..22: mol_type = other DNA
tgtactttaaatcatctctagg

SEQ ID NO: 13453 - DNA, 22 bp, synthetic construct
  misc_feature 1..22: note = chemically synthesized
  source 1..22: mol_type = other DNA
gtactttaaatcatctctaggt

SEQ ID NO: 13454 - DNA, 22 bp, synthetic construct
  misc_feature 1..22: note = chemically synthesized
  source 1..22: mol_type = other DNA
tactttaaatcatctctaggtt

SEQ ID NO: 13455 - DNA, 22 bp, synthetic construct
  misc_feature 1..22: note = chemically synthesized
  source 1..22: mol_type = other DNA
taaatcatctctaggtttctct

SEQ ID NO: 13456 - DNA, 22 bp, synthetic construct
  misc_feature 1..22: note = chemically synthesized
  source 1..22: mol_type = other DNA
aaatcatctctaggtttctctt

SEQ ID NO: 13457 - DNA, 22 bp, synthetic construct
  misc_feature 1..22: note = chemically synthesized
  source 1..22: mol_type = other DNA
aatcatctctaggtttctctta

SEQ ID NO: 13458 - DNA, 22 bp, synthetic construct
  misc_feature 1..22: note = chemically synthesized
  source 1..22: mol_type = other DNA
taggtttctcttaatagctaat

SEQ ID NO: 13459 - DNA, 22 bp, synthetic construct
  misc_feature 1..22: note = chemically synthesized
  source 1..22: mol_type = other DNA
ggtttctcttaatagctaatac

SEQ ID NO: 13460 - DNA, 22 bp, synthetic construct
  misc_feature 1..22: note = chemically synthesized
  source 1..22: mol_type = other DNA
ctcttaatagctaatacaatgt

SEQ ID NO: 13461 - DNA, 22 bp, synthetic construct
  misc_feature 1..22: note = chemically synthesized
  source 1..22: mol_type = other DNA
tcttaatagctaatacaatgta

SEQ ID NO: 13462 - DNA, 22 bp, synthetic construct
  misc_feature 1..22: note = chemically synthesized
  source 1..22: mol_type = other DNA
ttaatagctaatacaatgtaaa

SEQ ID NO: 13463 - DNA, 22 bp, synthetic construct
  misc_feature 1..22: note = chemically synthesized
  source 1..22: mol_type = other DNA
aatagctaatacaatgtaaatg

SEQ ID NO: 13464 - DNA, 22 bp, synthetic construct
  misc_feature 1..22: note = chemically synthesized
  source 1..22: mol_type = other DNA
atagctaatacaatgtaaatgc

SEQ ID NO: 13465 - DNA, 22 bp, synthetic construct
  misc_feature 1..22: note = chemically synthesized
  source 1..22: mol_type = other DNA
atacaatgtaaatgctatgtaa

SEQ ID NO: 13466 - DNA, 22 bp, synthetic construct
  misc_feature 1..22: note = chemically synthesized
  source 1..22: mol_type = other DNA
tgtaaatagttgttatgctgta

SEQ ID NO: 13467 - DNA, 22 bp, synthetic construct
  misc_feature 1..22: note = chemically synthesized
  source 1..22: mol_type = other DNA
ttatgctgtattgtttagggaa

SEQ ID NO: 13468 - DNA, 22 bp, synthetic construct
  misc_feature 1..22: note = chemically synthesized
  source 1..22: mol_type = other DNA
tgctgtattgtttagggaataa

SEQ ID NO: 13469 - DNA, 22 bp, synthetic construct
  misc_feature 1..22: note = chemically synthesized
  source 1..22: mol_type = other DNA
tattgtttagggaataatgaaa

SEQ ID NO: 13470 - DNA, 22 bp, synthetic construct
  misc_feature 1..22: note = chemically synthesized
  source 1..22: mol_type = other DNA
tttagggaataatgaaagataa

SEQ ID NO: 13471 - DNA, 22 bp, synthetic construct
  misc_feature 1..22: note = chemically synthesized
  source 1..22: mol_type = other DNA
agggaataatgaaagataaaag

SEQ ID NO: 13472 - DNA, 22 bp, synthetic construct
  misc_feature 1..22: note = chemically synthesized
  source 1..22: mol_type = other DNA
gggaataatgaaagataaaaga

SEQ ID NO: 13473 - DNA, 22 bp, synthetic construct
  misc_feature 1..22: note = chemically synthesized
  source 1..22: mol_type = other DNA
tacatgttcagtagagatgcaa

SEQ ID NO: 13474 - DNA, 22 bp, synthetic construct
  misc_feature 1..22: note = chemically synthesized
  source 1..22: mol_type = other DNA
agtagagatgcaaccatccatt

SEQ ID NO: 13475 - DNA, 22 bp, synthetic construct
  misc_feature 1..22: note = chemically synthesized
  source 1..22: mol_type = other DNA
ttttcttgaatatttttgatct

SEQ ID NO: 13476 - DNA, 22 bp, synthetic construct
  misc_feature 1..22: note = chemically synthesized
  source 1..22: mol_type = other DNA
tttcttgaatatttttgatctg

SEQ ID NO: 13477 - DNA, 22 bp, synthetic construct
  misc_feature 1..22: note = chemically synthesized
  source 1..22: mol_type = other DNA
ttcttgaatatttttgatctgc

SEQ ID NO: 13478 - DNA, 22 bp, synthetic construct
  misc_feature 1..22: note = chemically synthesized
  source 1..22: mol_type = other DNA
tcttgaatatttttgatctgca

SEQ ID NO: 13479 - DNA, 22 bp, synthetic construct
  misc_feature 1..22: note = chemically synthesized
  source 1..22: mol_type = other DNA
cttgaatatttttgatctgcag

SEQ ID NO: 13480 - DNA, 22 bp, synthetic construct
  misc_feature 1..22: note = chemically synthesized
  source 1..22: mol_type = other DNA
ttgaatatttttgatctgcagt

SEQ ID NO: 13481 - DNA, 22 bp, synthetic construct
  misc_feature 1..22: note = chemically synthesized
  source 1..22: mol_type = other DNA
gaatatttttgatctgcagtta

SEQ ID NO: 13482 - DNA, 22 bp, synthetic construct
  misc_feature 1..22: note = chemically synthesized
  source 1..22: mol_type = other DNA
aatatttttgatctgcagttaa

SEQ ID NO: 13483 - DNA, 22 bp, synthetic construct
  misc_feature 1..22: note = chemically synthesized
  source 1..22: mol_type = other DNA
ttgatctgcagttaattgaatc

SEQ ID NO: 13484 - DNA, 22 bp, synthetic construct
  misc_feature 1..22: note = chemically synthesized
  source 1..22: mol_type = other DNA
tgatctgcagttaattgaatct

SEQ ID NO: 13485 - DNA, 22 bp, synthetic construct
  misc_feature 1..22: note = chemically synthesized
  source 1..22: mol_type = other DNA
gatctgcagttaattgaatctg

SEQ ID NO: 13486 - DNA, 22 bp, synthetic construct
  misc_feature 1..22: note = chemically synthesized
  source 1..22: mol_type = other DNA
atctgcagttaattgaatctgt

SEQ ID NO: 13487 - DNA, 22 bp, synthetic construct
  misc_feature 1..22: note = chemically synthesized
  source 1..22: mol_type = other DNA
cagttaattgaatctgtggctg

SEQ ID NO: 13488 - DNA, 22 bp, synthetic construct
  misc_feature 1..22: note = chemically synthesized
  source 1..22: mol_type = other DNA
attgaatctgtggctgtggaac

SEQ ID NO: 13489 - DNA, 22 bp, synthetic construct
  misc_feature 1..22: note = chemically synthesized
  source 1..22: mol_type = other DNA
aatctgtggctgtggaactcac

SEQ ID NO: 13490 - DNA, 22 bp, synthetic construct
  misc_feature 1..22: note = chemically synthesized
  source 1..22: mol_type = other DNA
tggctgtggaactcacaaggag

SEQ ID NO: 13491 - DNA, 22 bp, synthetic construct
  misc_feature 1..22: note = chemically synthesized
  source 1..22: mol_type = other DNA
tggaactcacaaggagagctga

SEQ ID NO: 13492 - DNA, 22 bp, synthetic construct
  misc_feature 1..22: note = chemically synthesized
  source 1..22: mol_type = other DNA
acaaggagagctgactgtacag

SEQ ID NO: 13493 - DNA, 22 bp, synthetic construct
  misc_feature 1..22: note = chemically synthesized
  source 1..22: mol_type = other DNA
actgtacagtgtggttgagtga

SEQ ID NO: 13494 - DNA, 22 bp, synthetic construct
  misc_feature 1..22: note = chemically synthesized
  source 1..22: mol_type = other DNA
tacagtgtggttgagtgaaaaa

SEQ ID NO: 13495 - DNA, 22 bp, synthetic construct
  misc_feature 1..22: note = chemically synthesized
  source 1..22: mol_type = other DNA
agtgaaaaaacagactttagaa

SEQ ID NO: 13496 - DNA, 22 bp, synthetic construct
  misc_feature 1..22: note = chemically synthesized
  source 1..22: mol_type = other DNA
tagaatcagatcagacagaaat

SEQ ID NO: 13497 - DNA, 22 bp, synthetic construct
  misc_feature 1..22: note = chemically synthesized
  source 1..22: mol_type = other DNA
agaatcagatcagacagaaata

SEQ ID NO: 13498 - DNA, 22 bp, synthetic construct
  misc_feature 1..22: note = chemically synthesized
  source 1..22: mol_type = other DNA
gaatcagatcagacagaaatag

SEQ ID NO: 13499 - DNA, 22 bp, synthetic construct
  misc_feature 1..22: note = chemically synthesized
  source 1..22: mol_type = other DNA
gaatcaagtatctgcctcctct

SEQ ID NO: 13500 - DNA, 22 bp, synthetic construct
  misc_feature 1..22: note = chemically synthesized
  source 1..22: mol_type = other DNA
aatcaagtatctgcctcctcta

SEQ ID NO: 13501 - DNA, 22 bp, synthetic construct
  misc_feature 1..22: note = chemically synthesized
  source 1..22: mol_type = other DNA
cctcctctagacctgtgacctt

SEQ ID NO: 13502 - DNA, 22 bp, synthetic construct
  misc_feature 1..22: note = chemically synthesized
  source 1..22: mol_type = other DNA
ctctagacctgtgaccttggac

SEQ ID NO: 13503 - DNA, 22 bp, synthetic construct
  misc_feature 1..22: note = chemically synthesized
  source 1..22: mol_type = other DNA
tagacctgtgaccttggacaag

SEQ ID NO: 13504 - DNA, 22 bp, synthetic construct
  misc_feature 1..22: note = chemically synthesized
  source 1..22: mol_type = other DNA
gacctgtgaccttggacaagtc

SEQ ID NO: 13505 - DNA, 22 bp, synthetic construct
  misc_feature 1..22: note = chemically synthesized
  source 1..22: mol_type = other DNA
tgaccttggacaagtcacacaa

SEQ ID NO: 13506 - DNA, 22 bp, synthetic construct
  misc_feature 1..22: note = chemically synthesized
  source 1..22: mol_type = other DNA
ggacaagtcacacaagctctga

SEQ ID NO: 13507 - DNA, 22 bp, synthetic construct
  misc_feature 1..22: note = chemically synthesized
  source 1..22: mol_type = other DNA
gacaagtcacacaagctctgaa

SEQ ID NO: 13508 - DNA, 22 bp, synthetic construct
  misc_feature 1..22: note = chemically synthesized
  source 1..22: mol_type = other DNA
tgaaccttaactttgtcaaatg

SEQ ID NO: 13509 - DNA, 22 bp, synthetic construct
  misc_feature 1..22: note = chemically synthesized
  source 1..22: mol_type = other DNA
aaccttaactttgtcaaatgta

SEQ ID NO: 13510 - DNA, 22 bp, synthetic construct
  misc_feature 1..22: note = chemically synthesized
  source 1..22: mol_type = other DNA
aactttgtcaaatgtaaattag

SEQ ID NO: 13511 - DNA, 22 bp, synthetic construct
  misc_feature 1..22: note = chemically synthesized
  source 1..22: mol_type = other DNA
actttgtcaaatgtaaattagg

SEQ ID NO: 13512 - DNA, 22 bp, synthetic construct
  misc_feature 1..22: note = chemically synthesized
  source 1..22: mol_type = other DNA
tgtcaaatgtaaattaggttta

SEQ ID NO: 13513 - DNA, 22 bp, synthetic construct
  misc_feature 1..22: note = chemically synthesized
  source 1..22: mol_type = other DNA
gtcaaatgtaaattaggtttaa

SEQ ID NO: 13514 - DNA, 22 bp, synthetic construct
  misc_feature 1..22: note = chemically synthesized
  source 1..22: mol_type = other DNA
tcaaatgtaaattaggtttaac

SEQ ID NO: 13515 - DNA, 22 bp, synthetic construct
  misc_feature 1..22: note = chemically synthesized
  source 1..22: mol_type = other DNA
ggtttaacagtagtataataag

SEQ ID NO: 13516 - DNA, 22 bp, synthetic construct
  misc_feature 1..22: note = chemically synthesized
  source 1..22: mol_type = other DNA
aacagtagtataataagaatat

SEQ ID NO: 13517 - DNA, 22 bp, synthetic construct
  misc_feature 1..22: note = chemically synthesized
  source 1..22: mol_type = other DNA
acagtagtataataagaatatc

SEQ ID NO: 13518 - DNA, 22 bp, synthetic construct
  misc_feature 1..22: note = chemically synthesized
  source 1..22: mol_type = other DNA
tctcacaggtgttggcaggatc

SEQ ID NO: 13519 - DNA, 22 bp, synthetic construct
  misc_feature 1..22: note = chemically synthesized
  source 1..22: mol_type = other DNA
acaggtgttggcaggatcagtg

SEQ ID NO: 13520 - DNA, 22 bp, synthetic construct
  misc_feature 1..22: note = chemically synthesized
  source 1..22: mol_type = other DNA
gcaggatcagtgagacaatatg

SEQ ID NO: 13521 - DNA, 22 bp, synthetic construct
  misc_feature 1..22: note = chemically synthesized
  source 1..22: mol_type = other DNA
gttatctctttttctccctact

SEQ ID NO: 13522 - DNA, 22 bp, synthetic construct
  misc_feature 1..22: note = chemically synthesized
  source 1..22: mol_type = other DNA
tctctttttctccctactcctt

SEQ ID NO: 13523 - DNA, 22 bp, synthetic construct
  misc_feature 1..22: note = chemically synthesized
  source 1..22: mol_type = other DNA
tttttctccctactcctttcat

SEQ ID NO: 13524 - DNA, 22 bp, synthetic construct
  misc_feature 1..22: note = chemically synthesized
  source 1..22: mol_type = other DNA
tttctccctactcctttcatgt

SEQ ID NO: 13525 - DNA, 22 bp, synthetic construct
  misc_feature 1..22: note = chemically synthesized
  source 1..22: mol_type = other DNA
ttctccctactcctttcatgtt

SEQ ID NO: 13526 - DNA, 22 bp, synthetic construct
  misc_feature 1..22: note = chemically synthesized
  source 1..22: mol_type = other DNA
tctccctactcctttcatgttg

SEQ ID NO: 13527 - DNA, 22 bp, synthetic construct
  misc_feature 1..22: note = chemically synthesized
  source 1..22: mol_type = other DNA
ctccctactcctttcatgttgg

SEQ ID NO: 13528 - DNA, 22 bp, synthetic construct
  misc_feature 1..22: note = chemically synthesized
  source 1..22: mol_type = other DNA
tccctactcctttcatgttggc

SEQ ID NO: 13529 - DNA, 22 bp, synthetic construct
  misc_feature 1..22: note = chemically synthesized
  source 1..22: mol_type = other DNA
cctactcctttcatgttggccc

SEQ ID NO: 13530 - DNA, 22 bp, synthetic construct
  misc_feature 1..22: note = chemically synthesized
  source 1..22: mol_type = other DNA
ctcctttcatgttggccctact

SEQ ID NO: 13531 - DNA, 22 bp, synthetic construct
  misc_feature 1..22: note = chemically synthesized
  source 1..22: mol_type = other DNA
ctttcatgttggccctactttc

SEQ ID NO: 13532 - DNA, 22 bp, synthetic construct
  misc_feature 1..22: note = chemically synthesized
  source 1..22: mol_type = other DNA
tcatgttggccctactttcttc

SEQ ID NO: 13533 - DNA, 22 bp, synthetic construct
  misc_feature 1..22: note = chemically synthesized
  source 1..22: mol_type = other DNA
catgttggccctactttcttct

SEQ ID NO: 13534 - DNA, 22 bp, synthetic construct
  misc_feature 1..22: note = chemically synthesized
  source 1..22: mol_type = other DNA
atgttggccctactttcttctg

SEQ ID NO: 13535 - DNA, 22 bp, synthetic construct
  misc_feature 1..22: note = chemically synthesized
  source 1..22: mol_type = other DNA
gccctactttcttctgttttaa

SEQ ID NO: 13536 - DNA, 22 bp, synthetic construct
  misc_feature 1..22: note = chemically synthesized
  source 1..22: mol_type = other DNA
ctttcttctgttttaaatttct

SEQ ID NO: 13537 - DNA, 22 bp, synthetic construct
  misc_feature 1..22: note = chemically synthesized
  source 1..22: mol_type = other DNA
tcttctgttttaaatttctcaa

SEQ ID NO: 13538 - DNA, 22 bp, synthetic construct
  misc_feature 1..22: note = chemically synthesized
  source 1..22: mol_type = other DNA
cttctgttttaaatttctcaat

SEQ ID NO: 13539 - DNA, 22 bp, synthetic construct
  misc_feature 1..22: note = chemically synthesized
  source 1..22: mol_type = other DNA
ttctgttttaaatttctcaatt

SEQ ID NO: 13540 - DNA, 22 bp, synthetic construct
  misc_feature 1..22: note = chemically synthesized
  source 1..22: mol_type = other DNA
ctgttttaaatttctcaattct

SEQ ID NO: 13541 - DNA, 22 bp, synthetic construct
  misc_feature 1..22: note = chemically synthesized
  source 1..22: mol_type = other DNA
tgttttaaatttctcaattctc

SEQ ID NO: 13542 - DNA, 22 bp, synthetic construct
  misc_feature 1..22: note = chemically synthesized
  source 1..22: mol_type = other DNA
ttttaaatttctcaattctctt

SEQ ID NO: 13543 - DNA, 22 bp, synthetic construct
  misc_feature 1..22: note = chemically synthesized
  source 1..22: mol_type = other DNA
taaatttctcaattctctttag

SEQ ID NO: 13544 - DNA, 22 bp, synthetic construct
  misc_feature 1..22: note = chemically synthesized
  source 1..22: mol_type = other DNA
aaatttctcaattctctttagc

SEQ ID NO: 13545 - DNA, 22 bp, synthetic construct
  misc_feature 1..22: note = chemically synthesized
  source 1..22: mol_type = other DNA
aatttctcaattctctttagct

SEQ ID NO: 13546 - DNA, 22 bp, synthetic construct
  misc_feature 1..22: note = chemically synthesized
  source 1..22: mol_type = other DNA
ctcaattctctttagctcttta

SEQ ID NO: 13547 - DNA, 22 bp, synthetic construct
  misc_feature 1..22: note = chemically synthesized
  source 1..22: mol_type = other DNA
tcaattctctttagctctttaa

SEQ ID NO: 13548 - DNA, 22 bp, synthetic construct
  misc_feature 1..22: note = chemically synthesized
  source 1..22: mol_type = other DNA
aattctctttagctctttaata

SEQ ID NO: 13549 - DNA, 22 bp, synthetic construct
  misc_feature 1..22: note = chemically synthesized
  source 1..22: mol_type = other DNA
tctttagctctttaataacttc

SEQ ID NO: 13550 - DNA, 22 bp, synthetic construct
  misc_feature 1..22: note = chemically synthesized
  source 1..22: mol_type = other DNA
tttagctctttaataacttctg

SEQ ID NO: 13551 - DNA, 22 bp, synthetic construct
  misc_feature 1..22: note = chemically synthesized
  source 1..22: mol_type = other DNA
tagctctttaataacttctgtg

SEQ ID NO: 13552 - DNA, 22 bp, synthetic construct
  misc_feature 1..22: note = chemically synthesized
  source 1..22: mol_type = other DNA
agctctttaataacttctgtgt

SEQ ID NO: 13553 - DNA, 22 bp, synthetic construct
  misc_feature 1..22: note = chemically synthesized
  source 1..22: mol_type = other DNA
gctctttaataacttctgtgta

SEQ ID NO: 13554 - DNA, 22 bp, synthetic construct
  misc_feature 1..22: note = chemically synthesized
  source 1..22: mol_type = other DNA
tttaataacttctgtgtagctc

SEQ ID NO: 13555 - DNA, 22 bp, synthetic construct
  misc_feature 1..22: note = chemically synthesized
  source 1..22: mol_type = other DNA
taataacttctgtgtagctctt

SEQ ID NO: 13556 - DNA, 22 bp, synthetic construct
  misc_feature 1..22: note = chemically synthesized
  source 1..22: mol_type = other DNA
aataacttctgtgtagctcttt

SEQ ID NO: 13557 - DNA, 22 bp, synthetic construct
  misc_feature 1..22: note = chemically synthesized
  source 1..22: mol_type = other DNA
ataacttctgtgtagctctttt

SEQ ID NO: 13558 - DNA, 22 bp, synthetic construct
  misc_feature 1..22: note = chemically synthesized
  source 1..22: mol_type = other DNA
ctgtgtagctcttttccttcct

SEQ ID NO: 13559 - DNA, 22 bp, synthetic construct
  misc_feature 1..22: note = chemically synthesized
  source 1..22: mol_type = other DNA
tgtgtagctcttttccttcctt

SEQ ID NO: 13560 - DNA, 22 bp, synthetic construct
  misc_feature 1..22: note = chemically synthesized
  source 1..22: mol_type = other DNA
tgtagctcttttccttccttaa

SEQ ID NO: 13561 - DNA, 22 bp, synthetic construct
  misc_feature 1..22: note = chemically synthesized
  source 1..22: mol_type = other DNA
ttttccttccttaatcacattt

SEQ ID NO: 13562 - DNA, 22 bp, synthetic construct
  misc_feature 1..22: note = chemically synthesized
  source 1..22: mol_type = other DNA
ttccttccttaatcacatttat

SEQ ID NO: 13563 - DNA, 22 bp, synthetic construct
  misc_feature 1..22: note = chemically synthesized
  source 1..22: mol_type = other DNA
tccttccttaatcacatttata

SEQ ID NO: 13564 - DNA, 22 bp, synthetic construct
  misc_feature 1..22: note = chemically synthesized
  source 1..22: mol_type = other DNA
ccttccttaatcacatttatat

SEQ ID NO: 13565 - DNA, 22 bp, synthetic construct
  misc_feature 1..22: note = chemically synthesized
  source 1..22: mol_type = other DNA
cttccttaatcacatttatata

SEQ ID NO: 13566 - DNA, 22 bp, synthetic construct
  misc_feature 1..22: note = chemically synthesized
  source 1..22: mol_type = other DNA
ccttaatcacatttatataatg

SEQ ID NO: 13567 - DNA, 22 bp, synthetic construct
  misc_feature 1..22: note = chemically synthesized
  source 1..22: mol_type = other DNA
cttaatcacatttatataatga

SEQ ID NO: 13568 - DNA, 22 bp, synthetic construct
  misc_feature 1..22: note = chemically synthesized
  source 1..22: mol_type = other DNA
aatcacatttatataatgaaat

SEQ ID NO: 13569 - DNA, 22 bp, synthetic construct
  misc_feature 1..22: note = chemically synthesized
  source 1..22: mol_type = other DNA
atcacatttatataatgaaatg

SEQ ID NO: 13570 - DNA, 22 bp, synthetic construct
  misc_feature 1..22: note = chemically synthesized
  source 1..22: mol_type = other DNA
atataatgaaatgactattgtc

SEQ ID NO: 13571 - DNA, 22 bp, synthetic construct
  misc_feature 1..22: note = chemically synthesized
  source 1..22: mol_type = other DNA
tataatgaaatgactattgtca

SEQ ID NO: 13572 - DNA, 22 bp, synthetic construct
  misc_feature 1..22: note = chemically synthesized
  source 1..22: mol_type = other DNA
ttgtcacaatcaggaatgacct

SEQ ID NO: 13573 - DNA, 22 bp, synthetic construct
  misc_feature 1..22: note = chemically synthesized
  source 1..22: mol_type = other DNA
tcacaatcaggaatgacctaaa

SEQ ID NO: 13574 - DNA, 22 bp, synthetic construct
  misc_feature 1..22: note = chemically synthesized
  source 1..22: mol_type = other DNA
aagaataattttgagtttatgt

SEQ ID NO: 13575 - DNA, 22 bp, synthetic construct
  misc_feature 1..22: note = chemically synthesized
  source 1..22: mol_type = other DNA
tgagtttatgtatttactggct

SEQ ID NO: 13576 - DNA, 22 bp, synthetic construct
  misc_feature 1..22: note = chemically synthesized
  source 1..22: mol_type = other DNA
gagtttatgtatttactggctg

SEQ ID NO: 13577 - DNA, 22 bp, synthetic construct
  misc_feature 1..22: note = chemically synthesized
  source 1..22: mol_type = other DNA
agtttatgtatttactggctgc

SEQ ID NO: 13578 - DNA, 22 bp, synthetic construct
  misc_feature 1..22: note = chemically synthesized
  source 1..22: mol_type = other DNA
atgtatttactggctgctctaa

SEQ ID NO: 13579 - DNA, 22 bp, synthetic construct
  misc_feature 1..22: note = chemically synthesized
  source 1..22: mol_type = other DNA
tgtatttactggctgctctaaa

SEQ ID NO: 13580 - DNA, 22 bp, synthetic construct
  misc_feature 1..22: note = chemically synthesized
  source 1..22: mol_type = other DNA
actggctgctctaaataatttc

SEQ ID NO: 13581 - DNA, 22 bp, synthetic construct
  misc_feature 1..22: note = chemically synthesized
  source 1..22: mol_type = other DNA
ctggctgctctaaataatttct

SEQ ID NO: 13582 - DNA, 22 bp, synthetic construct
  misc_feature 1..22: note = chemically synthesized
  source 1..22: mol_type = other DNA
gctgctctaaataatttctaat

SEQ ID NO: 13583 - DNA, 22 bp, synthetic construct
  misc_feature 1..22: note = chemically synthesized
  source 1..22: mol_type = other DNA
ctctaaataatttctaattgtt

SEQ ID NO: 13584 - DNA, 22 bp, synthetic construct
  misc_feature 1..22: note = chemically synthesized
  source 1..22: mol_type = other DNA
taaataatttctaattgttgat

SEQ ID NO: 13585 - DNA, 22 bp, synthetic construct
  misc_feature 1..22: note = chemically synthesized
  source 1..22: mol_type = other DNA
aataatttctaattgttgatct

SEQ ID NO: 13586 - DNA, 22 bp, synthetic construct
  misc_feature 1..22: note = chemically synthesized
  source 1..22: mol_type = other DNA
ctaattgttgatctctcccttt

SEQ ID NO: 13587 - DNA, 22 bp, synthetic construct
  misc_feature 1..22: note = chemically synthesized
  source 1..22: mol_type = other DNA
taattgttgatctctccctttt

SEQ ID NO: 13588 - DNA, 22 bp, synthetic construct
  misc_feature 1..22: note = chemically synthesized
  source 1..22: mol_type = other DNA
attgttgatctctcccttttta

SEQ ID NO: 13589 - DNA, 22 bp, synthetic construct
  misc_feature 1..22: note = chemically synthesized
  source 1..22: mol_type = other DNA
ttgatctctccctttttaggaa

SEQ ID NO: 13590 - DNA, 22 bp, synthetic construct
  misc_feature 1..22: note = chemically synthesized
  source 1..22: mol_type = other DNA
atctctccctttttaggaaact

SEQ ID NO: 13591 - DNA, 22 bp, synthetic construct
  misc_feature 1..22: note = chemically synthesized
  source 1..22: mol_type = other DNA
tccctttttaggaaactctttt

SEQ ID NO: 13592 - DNA, 22 bp, synthetic construct
  misc_feature 1..22: note = chemically synthesized
  source 1..22: mol_type = other DNA
cctttttaggaaactcttttta

SEQ ID NO: 13593 - DNA, 22 bp, synthetic construct
  misc_feature 1..22: note = chemically synthesized
  source 1..22: mol_type = other DNA
tttaggaaactctttttataat

SEQ ID NO: 13594 - DNA, 22 bp, synthetic construct
  misc_feature 1..22: note = chemically synthesized
  source 1..22: mol_type = other DNA
ttaggaaactctttttataata

SEQ ID NO: 13595 - DNA, 22 bp, synthetic construct
  misc_feature 1..22: note = chemically synthesized
  source 1..22: mol_type = other DNA
taggaaactctttttataataa

SEQ ID NO: 13596 - DNA, 22 bp, synthetic construct
  misc_feature 1..22: note = chemically synthesized
  source 1..22: mol_type = other DNA
aggaaactctttttataataat

SEQ ID NO: 13597 - DNA, 22 bp, synthetic construct
  misc_feature 1..22: note = chemically synthesized
  source 1..22: mol_type = other DNA
ggaaactctttttataataatc

SEQ ID NO: 13598 - DNA, 22 bp, synthetic construct
  misc_feature 1..22: note = chemically synthesized
  source 1..22: mol_type = other DNA
tttttataataatcactctatt

SEQ ID NO: 13599 - DNA, 22 bp, synthetic construct
  misc_feature 1..22: note = chemically synthesized
  source 1..22: mol_type = other DNA
tttataataatcactctattct

SEQ ID NO: 13600 - DNA, 22 bp, synthetic construct
  misc_feature 1..22: note = chemically synthesized
  source 1..22: mol_type = other DNA
ttataataatcactctattctg

SEQ ID NO: 13601 - DNA, 22 bp, synthetic construct
  misc_feature 1..22: note = chemically synthesized
  source 1..22: mol_type = other DNA
tataataatcactctattctgg

SEQ ID NO: 13602 - DNA, 22 bp, synthetic construct
  misc_feature 1..22: note = chemically synthesized
  source 1..22: mol_type = other DNA
ataataatcactctattctggt

SEQ ID NO: 13603 - DNA, 22 bp, synthetic construct
  misc_feature 1..22: note = chemically synthesized
  source 1..22: mol_type = other DNA
taataatcactctattctggtt

SEQ ID NO: 13604 - DNA, 22 bp, synthetic construct
  misc_feature 1..22: note = chemically synthesized
  source 1..22: mol_type = other DNA
tattctggttccccgctttgct

SEQ ID NO: 13605 - DNA, 22 bp, synthetic construct
  misc_feature 1..22: note = chemically synthesized
  source 1..22: mol_type = other DNA
ttctggttccccgctttgctct

SEQ ID NO: 13606 - DNA, 22 bp, synthetic construct
  misc_feature 1..22: note = chemically synthesized
  source 1..22: mol_type = other DNA
tggttccccgctttgctctaac

SEQ ID NO: 13607 - DNA, 22 bp, synthetic construct
  misc_feature 1..22: note = chemically synthesized
  source 1..22: mol_type = other DNA
gttccccgctttgctctaactc

SEQ ID NO: 13608 - DNA, 22 bp, synthetic construct
  misc_feature 1..22: note = chemically synthesized
  source 1..22: mol_type = other DNA
cccgctttgctctaactcctgt

SEQ ID NO: 13609 - DNA, 22 bp, synthetic construct
  misc_feature 1..22: note = chemically synthesized
  source 1..22: mol_type = other DNA
tgctctaactcctgttatccat

SEQ ID NO: 13610 - DNA, 22 bp, synthetic construct
  misc_feature 1..22: note = chemically synthesized
  source 1..22: mol_type = other DNA
gctctaactcctgttatccatc

SEQ ID NO: 13611 - DNA, 22 bp, synthetic construct
  misc_feature 1..22: note = chemically synthesized
  source 1..22: mol_type = other DNA
ctctaactcctgttatccatcc

SEQ ID NO: 13612 - DNA, 22 bp, synthetic construct
  misc_feature 1..22: note = chemically synthesized
  source 1..22: mol_type = other DNA
taactcctgttatccatccagc

SEQ ID NO: 13613 - DNA, 22 bp, synthetic construct
  misc_feature 1..22: note = chemically synthesized
  source 1..22: mol_type = other DNA
actcctgttatccatccagcac

SEQ ID NO: 13614 - DNA, 22 bp, synthetic construct
  misc_feature 1..22: note = chemically synthesized
  source 1..22: mol_type = other DNA
ctgttatccatccagcacttga

SEQ ID NO: 13615 - DNA, 22 bp, synthetic construct
  misc_feature 1..22: note = chemically synthesized
  source 1..22: mol_type = other DNA
ttatccatccagcacttgaatt

SEQ ID NO: 13616 - DNA, 22 bp, synthetic construct
  misc_feature 1..22: note = chemically synthesized
  source 1..22: mol_type = other DNA
tccatccagcacttgaattgat

SEQ ID NO: 13617 - DNA, 22 bp, synthetic construct
  misc_feature 1..22: note = chemically synthesized
  source 1..22: mol_type = other DNA
gaattgattaactcctgttcct

SEQ ID NO: 13618 - DNA, 22 bp, synthetic construct
  misc_feature 1..22: note = chemically synthesized
  source 1..22: mol_type = other DNA
aattgattaactcctgttcctc

SEQ ID NO: 13619 - DNA, 22 bp, synthetic construct
  misc_feature 1..22: note = chemically synthesized
  source 1..22: mol_type = other DNA
attaactcctgttcctctccat

SEQ ID NO: 13620 - DNA, 22 bp, synthetic construct
  misc_feature 1..22: note = chemically synthesized
  source 1..22: mol_type = other DNA
actcctgttcctctccatggcc

SEQ ID NO: 13621 - DNA, 22 bp, synthetic construct
  misc_feature 1..22: note = chemically synthesized
  source 1..22: mol_type = other DNA
ctgttcctctccatggccctta

SEQ ID NO: 13622 - DNA, 22 bp, synthetic construct
  misc_feature 1..22: note = chemically synthesized
  source 1..22: mol_type = other DNA
ttcctctccatggcccttaaat

SEQ ID NO: 13623 - DNA, 22 bp, synthetic construct
  misc_feature 1..22: note = chemically synthesized
  source 1..22: mol_type = other DNA
ctctccatggcccttaaatgtc

SEQ ID NO: 13624 - DNA, 22 bp, synthetic construct
  misc_feature 1..22: note = chemically synthesized
  source 1..22: mol_type = other DNA
tccatggcccttaaatgtccag

SEQ ID NO: 13625 - DNA, 22 bp, synthetic construct
  misc_feature 1..22: note = chemically synthesized
  source 1..22: mol_type = other DNA
catggcccttaaatgtccaggg

SEQ ID NO: 13626 - DNA, 22 bp, synthetic construct
  misc_feature 1..22: note = chemically synthesized
  source 1..22: mol_type = other DNA
aaatgtccagggttctcccagg

SEQ ID NO: 13627 - DNA, 22 bp, synthetic construct
  misc_feature 1..22: note = chemically synthesized
  source 1..22: mol_type = other DNA
aatgtccagggttctcccaggc

SEQ ID NO: 13628 - DNA, 22 bp, synthetic construct
  misc_feature 1..22: note = chemically synthesized
  source 1..22: mol_type = other DNA
tcccaggctccagcctcagctt

SEQ ID NO: 13629 - DNA, 22 bp, synthetic construct
  misc_feature 1..22: note = chemically synthesized
  source 1..22: mol_type = other DNA
ccaggctccagcctcagctttt

SEQ ID NO: 13630 - DNA, 22 bp, synthetic construct
  misc_feature 1..22: note = chemically synthesized
  source 1..22: mol_type = other DNA
cagcctcagctttttccttttt

SEQ ID NO: 13631 - DNA, 22 bp, synthetic construct
  misc_feature 1..22: note = chemically synthesized
  source 1..22: mol_type = other DNA
agctttttcctttttcacctta

SEQ ID NO: 13632 - DNA, 22 bp, synthetic construct
  misc_feature 1..22: note = chemically synthesized
  source 1..22: mol_type = other DNA
tttcctttttcaccttatatat

SEQ ID NO: 13633 - DNA, 22 bp, synthetic construct
  misc_feature 1..22: note = chemically synthesized
  source 1..22: mol_type = other DNA
ttcctttttcaccttatatata

SEQ ID NO: 13634 - DNA, 22 bp, synthetic construct
  misc_feature 1..22: note = chemically synthesized
  source 1..22: mol_type = other DNA
tcctttttcaccttatatatac

SEQ ID NO: 13635 - DNA, 22 bp, synthetic construct
  misc_feature 1..22: note = chemically synthesized
  source 1..22: mol_type = other DNA
cctttttcaccttatatatact

SEQ ID NO: 13636 - DNA, 22 bp, synthetic construct
  misc_feature 1..22: note = chemically synthesized
  source 1..22: mol_type = other DNA
ctttttcaccttatatatactt

SEQ ID NO: 13637 - DNA, 22 bp, synthetic construct
  misc_feature 1..22: note = chemically synthesized
  source 1..22: mol_type = other DNA
tttcaccttatatatacttgct

SEQ ID NO: 13638 - DNA, 22 bp, synthetic construct
  misc_feature 1..22: note = chemically synthesized
  source 1..22: mol_type = other DNA
ttcaccttatatatacttgcta

SEQ ID NO: 13639 - DNA, 22 bp, synthetic construct
  misc_feature 1..22: note = chemically synthesized
  source 1..22: mol_type = other DNA
tcaccttatatatacttgctag

SEQ ID NO: 13640 - DNA, 22 bp, synthetic construct
  misc_feature 1..22: note = chemically synthesized
  source 1..22: mol_type = other DNA
caccttatatatacttgctagg

SEQ ID NO: 13641 - DNA, 22 bp, synthetic construct
  misc_feature 1..22: note = chemically synthesized
  source 1..22: mol_type = other DNA
accttatatatacttgctaggg

SEQ ID NO: 13642 - DNA, 22 bp, synthetic construct
  misc_feature 1..22: note = chemically synthesized
  source 1..22: mol_type = other DNA
atatatacttgctagggctggg

SEQ ID NO: 13643 - DNA, 22 bp, synthetic construct
  misc_feature 1..22: note = chemically synthesized
  source 1..22: mol_type = other DNA
tatatacttgctagggctggga

SEQ ID NO: 13644 - DNA, 22 bp, synthetic construct
  misc_feature 1..22: note = chemically synthesized
  source 1..22: mol_type = other DNA
gctagggctgggacaagagtga

SEQ ID NO: 13645 - DNA, 22 bp, synthetic construct
  misc_feature 1..22: note = chemically synthesized
  source 1..22: mol_type = other DNA
ctagggctgggacaagagtgaa

SEQ ID NO: 13646 - DNA, 22 bp, synthetic construct
  misc_feature 1..22: note = chemically synthesized
  source 1..22: mol_type = other DNA
gggctgggacaagagtgaacca

SEQ ID NO: 13647 - DNA, 22 bp, synthetic construct
  misc_feature 1..22: note = chemically synthesized
  source 1..22: mol_type = other DNA
ggacaagagtgaaccaaacaag

SEQ ID NO: 13648 - DNA, 22 bp, synthetic construct
  misc_feature 1..22: note = chemically synthesized
  source 1..22: mol_type = other DNA
aagaggtcctcacttctcgggg

SEQ ID NO: 13649 - DNA, 22 bp, synthetic construct
  misc_feature 1..22: note = chemically synthesized
  source 1..22: mol_type = other DNA
agaggtcctcacttctcggggc

SEQ ID NO: 13650 - DNA, 22 bp, synthetic construct
  misc_feature 1..22: note = chemically synthesized
  source 1..22: mol_type = other DNA
acttctcggggcatacaagtat

SEQ ID NO: 13651 - DNA, 22 bp, synthetic construct
  misc_feature 1..22: note = chemically synthesized
  source 1..22: mol_type = other DNA
ctcggggcatacaagtatattt

SEQ ID NO: 13652 - DNA, 22 bp, synthetic construct
  misc_feature 1..22: note = chemically synthesized
  source 1..22: mol_type = other DNA
tcggggcatacaagtatattta

SEQ ID NO: 13653 - DNA, 22 bp, synthetic construct
  misc_feature 1..22: note = chemically synthesized
  source 1..22: mol_type = other DNA
ggggcatacaagtatatttatg

SEQ ID NO: 13654 - DNA, 22 bp, synthetic construct
  misc_feature 1..22: note = chemically synthesized
  source 1..22: mol_type = other DNA
atgccctacaggccttgcttac

SEQ ID NO: 13655 - DNA, 22 bp, synthetic construct
  misc_feature 1..22: note = chemically synthesized
  source 1..22: mol_type = other DNA
tgccctacaggccttgcttacc

SEQ ID NO: 13656 - DNA, 22 bp, synthetic construct
  misc_feature 1..22: note = chemically synthesized
  source 1..22: mol_type = other DNA
caggccttgcttaccacagtct

SEQ ID NO: 13657 - DNA, 22 bp, synthetic construct
  misc_feature 1..22: note = chemically synthesized
  source 1..22: mol_type = other DNA
gcttaccacagtctagtccggc

SEQ ID NO: 13658 - DNA, 22 bp, synthetic construct
  misc_feature 1..22: note = chemically synthesized
  source 1..22: mol_type = other DNA
cttaccacagtctagtccggcc

SEQ ID NO: 13659 - DNA, 22 bp, synthetic construct
  misc_feature 1..22: note = chemically synthesized
  source 1..22: mol_type = other DNA
accacagtctagtccggccctg

SEQ ID NO: 13660 - DNA, 22 bp, synthetic construct
  misc_feature 1..22: note = chemically synthesized
  source 1..22: mol_type = other DNA
ccacagtctagtccggccctga

SEQ ID NO: 13661 - DNA, 22 bp, synthetic construct
  misc_feature 1..22: note = chemically synthesized
  source 1..22: mol_type = other DNA
gtccggccctgaccctgtcaac

SEQ ID NO: 13662 - DNA, 22 bp, synthetic construct
  misc_feature 1..22: note = chemically synthesized
  source 1..22: mol_type = other DNA
accctgtcaacaaaatttactg

SEQ ID NO: 13663 - DNA, 22 bp, synthetic construct
  misc_feature 1..22: note = chemically synthesized
  source 1..22: mol_type = other DNA
tcaacaaaatttactgagcata

SEQ ID NO: 13664 - DNA, 22 bp, synthetic construct
  misc_feature 1..22: note = chemically synthesized
  source 1..22: mol_type = other DNA
actgagcatacaaccactactg

SEQ ID NO: 13665 - DNA, 22 bp, synthetic construct
  misc_feature 1..22: note = chemically synthesized
  source 1..22: mol_type = other DNA
ctgagcatacaaccactactgc

SEQ ID NO: 13666 - DNA, 22 bp, synthetic construct
  misc_feature 1..22: note = chemically synthesized
  source 1..22: mol_type = other DNA
agcatacaaccactactgccag

SEQ ID NO: 13667 - DNA, 22 bp, synthetic construct
  misc_feature 1..22: note = chemically synthesized
  source 1..22: mol_type = other DNA
ctgccaggcactgtactaggta

SEQ ID NO: 13668 - DNA, 22 bp, synthetic construct
  misc_feature 1..22: note = chemically synthesized
  source 1..22: mol_type = other DNA
ccaggcactgtactaggtatca

SEQ ID NO: 13669 - DNA, 22 bp, synthetic construct
  misc_feature 1..22: note = chemically synthesized
  source 1..22: mol_type = other DNA
tactaggtatcacaatatccat

SEQ ID NO: 13670 - DNA, 22 bp, synthetic construct
  misc_feature 1..22: note = chemically synthesized
  source 1..22: mol_type = other DNA
ggtatcacaatatccatgctca

SEQ ID NO: 13671 - DNA, 22 bp, synthetic construct
  misc_feature 1..22: note = chemically synthesized
  source 1..22: mol_type = other DNA
actctccagatgcccacacacg

SEQ ID NO: 13672 - DNA, 22 bp, synthetic construct
  misc_feature 1..22: note = chemically synthesized
  source 1..22: mol_type = other DNA
tccagatgcccacacacgtggc

SEQ ID NO: 13673 - DNA, 22 bp, synthetic construct
  misc_feature 1..22: note = chemically synthesized
  source 1..22: mol_type = other DNA
cagatgcccacacacgtggctg

SEQ ID NO: 13674 - DNA, 22 bp, synthetic construct
  misc_feature 1..22: note = chemically synthesized
  source 1..22: mol_type = other DNA
taactactgtttacagaacaat

SEQ ID NO: 13675 - DNA, 22 bp, synthetic construct
  misc_feature 1..22: note = chemically synthesized
  source 1..22: mol_type = other DNA
ctgtttacagaacaatgagttc

SEQ ID NO: 13676 - DNA, 22 bp, synthetic construct
  misc_feature 1..22: note = chemically synthesized
  source 1..22: mol_type = other DNA
tttacagaacaatgagttccaa

SEQ ID NO: 13677 - DNA, 22 bp, synthetic construct
  misc_feature 1..22: note = chemically synthesized
  source 1..22: mol_type = other DNA
acagaacaatgagttccaaata

SEQ ID NO: 13678 - DNA, 22 bp, synthetic construct
  misc_feature 1..22: note = chemically synthesized
  source 1..22: mol_type = other DNA
cagaacaatgagttccaaatac

SEQ ID NO: 13679 - DNA, 22 bp, synthetic construct
  misc_feature 1..22: note = chemically synthesized
  source 1..22: mol_type = other DNA
caaatactcacctatagtcaga

SEQ ID NO: 13680 - DNA, 22 bp, synthetic construct
  misc_feature 1..22: note = chemically synthesized
  source 1..22: mol_type = other DNA
acctatagtcagatacgtctcc

SEQ ID NO: 13681 - DNA, 22 bp, synthetic construct
  misc_feature 1..22: note = chemically synthesized
  source 1..22: mol_type = other DNA
tagtcagatacgtctcctgaat

SEQ ID NO: 13682 - DNA, 22 bp, synthetic construct
  misc_feature 1..22: note = chemically synthesized
  source 1..22: mol_type = other DNA
ctgaatttcagattatctttcc

SEQ ID NO: 13683 - DNA, 22 bp, synthetic construct
  misc_feature 1..22: note = chemically synthesized
  source 1..22: mol_type = other DNA
aatttcagattatctttccaac

SEQ ID NO: 13684 - DNA, 22 bp, synthetic construct
  misc_feature 1..22: note = chemically synthesized
  source 1..22: mol_type = other DNA
cagattatctttccaactccct

SEQ ID NO: 13685 - DNA, 22 bp, synthetic construct
  misc_feature 1..22: note = chemically synthesized
  source 1..22: mol_type = other DNA
agattatctttccaactcccta

SEQ ID NO: 13686 - DNA, 22 bp, synthetic construct
  misc_feature 1..22: note = chemically synthesized
  source 1..22: mol_type = other DNA
tctttccaactccctaactgta

SEQ ID NO: 13687 - DNA, 22 bp, synthetic construct
  misc_feature 1..22: note = chemically synthesized
  source 1..22: mol_type = other DNA
tccaactccctaactgtatatc

SEQ ID NO: 13688 - DNA, 22 bp, synthetic construct
  misc_feature 1..22: note = chemically synthesized
  source 1..22: mol_type = other DNA
ccaactccctaactgtatatca

SEQ ID NO: 13689 - DNA, 22 bp, synthetic construct
  misc_feature 1..22: note = chemically synthesized
  source 1..22: mol_type = other DNA
caactccctaactgtatatcat

SEQ ID NO: 13690 - DNA, 22 bp, synthetic construct
  misc_feature 1..22: note = chemically synthesized
  source 1..22: mol_type = other DNA
cctaactgtatatcataatgta

SEQ ID NO: 13691 - DNA, 22 bp, synthetic construct
  misc_feature 1..22: note = chemically synthesized
  source 1..22: mol_type = other DNA
actgtatatcataatgtagcca

SEQ ID NO: 13692 - DNA, 22 bp, synthetic construct
  misc_feature 1..22: note = chemically synthesized
  source 1..22: mol_type = other DNA
tatatcataatgtagccagtaa

SEQ ID NO: 13693 - DNA, 22 bp, synthetic construct
  misc_feature 1..22: note = chemically synthesized
  source 1..22: mol_type = other DNA
atgtatatgtaatgcttctgct

SEQ ID NO: 13694 - DNA, 22 bp, synthetic construct
  misc_feature 1..22: note = chemically synthesized
  source 1..22: mol_type = other DNA
ctgctgtgttggacactgtgct

SEQ ID NO: 13695 - DNA, 22 bp, synthetic construct
  misc_feature 1..22: note = chemically synthesized
  source 1..22: mol_type = other DNA
tgctgtgttggacactgtgctc

SEQ ID NO: 13696 - DNA, 22 bp, synthetic construct
  misc_feature 1..22: note = chemically synthesized
  source 1..22: mol_type = other DNA
ctgtgttggacactgtgctcag

SEQ ID NO: 13697 - DNA, 22 bp, synthetic construct
  misc_feature 1..22: note = chemically synthesized
  source 1..22: mol_type = other DNA
tgttggacactgtgctcagtaa

SEQ ID NO: 13698 - DNA, 22 bp, synthetic construct
  misc_feature 1..22: note = chemically synthesized
  source 1..22: mol_type = other DNA
gacactgtgctcagtaactttg

SEQ ID NO: 13699 - DNA, 22 bp, synthetic construct
  misc_feature 1..22: note = chemically synthesized
  source 1..22: mol_type = other DNA
tgctcagtaactttgcatccat

SEQ ID NO: 13700 - DNA, 22 bp, synthetic construct
  misc_feature 1..22: note = chemically synthesized
  source 1..22: mol_type = other DNA
agtaactttgcatccattatct

SEQ ID NO: 13701 - DNA, 22 bp, synthetic construct
  misc_feature 1..22: note = chemically synthesized
  source 1..22: mol_type = other DNA
tgcatccattatctcacttcat

SEQ ID NO: 13702 - DNA, 22 bp, synthetic construct
  misc_feature 1..22: note = chemically synthesized
  source 1..22: mol_type = other DNA
gcatccattatctcacttcatc

SEQ ID NO: 13703 - DNA, 22 bp, synthetic construct
  misc_feature 1..22: note = chemically synthesized
  source 1..22: mol_type = other DNA
catccattatctcacttcatcc

SEQ ID NO: 13704 - DNA, 22 bp, synthetic construct
  misc_feature 1..22: note = chemically synthesized
  source 1..22: mol_type = other DNA
tctcacttcatcctcacaaaag

SEQ ID NO: 13705 - DNA, 22 bp, synthetic construct
  misc_feature 1..22: note = chemically synthesized
  source 1..22: mol_type = other DNA
acttcatcctcacaaaagtccc

SEQ ID NO: 13706 - DNA, 22 bp, synthetic construct
  misc_feature 1..22: note = chemically synthesized
  source 1..22: mol_type = other DNA
catcctcacaaaagtcccacga

SEQ ID NO: 13707 - DNA, 22 bp, synthetic construct
  misc_feature 1..22: note = chemically synthesized
  source 1..22: mol_type = other DNA
atcctcacaaaagtcccacgag

SEQ ID NO: 13708 - DNA, 22 bp, synthetic construct
  misc_feature 1..22: note = chemically synthesized
  source 1..22: mol_type = other DNA
acaaaagtcccacgagataggc

SEQ ID NO: 13709 - DNA, 22 bp, synthetic construct
  misc_feature 1..22: note = chemically synthesized
  source 1..22: mol_type = other DNA
tcatcttatttttatgaatgag

SEQ ID NO: 13710 - DNA, 22 bp, synthetic construct
  misc_feature 1..22: note = chemically synthesized
  source 1..22: mol_type = other DNA
atttttatgaatgaggaagata

SEQ ID NO: 13711 - DNA, 22 bp, synthetic construct
  misc_feature 1..22: note = chemically synthesized
  source 1..22: mol_type = other DNA
tttttatgaatgaggaagatag

SEQ ID NO: 13712 - DNA, 22 bp, synthetic construct
  misc_feature 1..22: note = chemically synthesized
  source 1..22: mol_type = other DNA
ttatgaatgaggaagatagatt

SEQ ID NO: 13713 - DNA, 22 bp, synthetic construct
  misc_feature 1..22: note = chemically synthesized
  source 1..22: mol_type = other DNA
tatgaatgaggaagatagattc

SEQ ID NO: 13714 - DNA, 22 bp, synthetic construct
  misc_feature 1..22: note = chemically synthesized
  source 1..22: mol_type = other DNA
atgaatgaggaagatagattca

SEQ ID NO: 13715 - DNA, 22 bp, synthetic construct
  misc_feature 1..22: note = chemically synthesized
  source 1..22: mol_type = other DNA
tgaatgaggaagatagattcat

SEQ ID NO: 13716 - DNA, 22 bp, synthetic construct
  misc_feature 1..22: note = chemically synthesized
  source 1..22: mol_type = other DNA
atagaggctaagggctttgccc

SEQ ID NO: 13717 - DNA, 22 bp, synthetic construct
  misc_feature 1..22: note = chemically synthesized
  source 1..22: mol_type = other DNA
agggctttgcccaaggtaacat

SEQ ID NO: 13718 - DNA, 22 bp, synthetic construct
  misc_feature 1..22: note = chemically synthesized
  source 1..22: mol_type = other DNA
tgcccaaggtaacatactaaaa

SEQ ID NO: 13719 - DNA, 22 bp, synthetic construct
  misc_feature 1..22: note = chemically synthesized
  source 1..22: mol_type = other DNA
gcccaaggtaacatactaaaac

SEQ ID NO: 13720 - DNA, 22 bp, synthetic construct
  misc_feature 1..22: note = chemically synthesized
  source 1..22: mol_type = other DNA
cccaaggtaacatactaaaaca

SEQ ID NO: 13721 - DNA, 22 bp, synthetic construct
  misc_feature 1..22: note = chemically synthesized
  source 1..22: mol_type = other DNA
aaacattcaggattcagactct

SEQ ID NO: 13722 - DNA, 22 bp, synthetic construct
  misc_feature 1..22: note = chemically synthesized
  source 1..22: mol_type = other DNA
aggattcagactctggcagtca

SEQ ID NO: 13723 - DNA, 22 bp, synthetic construct
  misc_feature 1..22: note = chemically synthesized
  source 1..22: mol_type = other DNA
agactctggcagtcagactaaa

SEQ ID NO: 13724 - DNA, 22 bp, synthetic construct
  misc_feature 1..22: note = chemically synthesized
  source 1..22: mol_type = other DNA
tggcagtcagactaaagagcca

SEQ ID NO: 13725 - DNA, 22 bp, synthetic construct
  misc_feature 1..22: note = chemically synthesized
  source 1..22: mol_type = other DNA
gcagtcagactaaagagccagt

SEQ ID NO: 13726 - DNA, 22 bp, synthetic construct
  misc_feature 1..22: note = chemically synthesized
  source 1..22: mol_type = other DNA
aagagccagttctcttagacat

SEQ ID NO: 13727 - DNA, 22 bp, synthetic construct
  misc_feature 1..22: note = chemically synthesized
  source 1..22: mol_type = other DNA
tcttagacattattctgtggtc

SEQ ID NO: 13728 - DNA, 22 bp, synthetic construct
  misc_feature 1..22: note = chemically synthesized
  source 1..22: mol_type = other DNA
ttagacattattctgtggtcca

SEQ ID NO: 13729 - DNA, 22 bp, synthetic construct
  misc_feature 1..22: note = chemically synthesized
  source 1..22: mol_type = other DNA
agacattattctgtggtccata

SEQ ID NO: 13730 - DNA, 22 bp, synthetic construct
  misc_feature 1..22: note = chemically synthesized
  source 1..22: mol_type = other DNA
gacattattctgtggtccataa

SEQ ID NO: 13731 - DNA, 22 bp, synthetic construct
  misc_feature 1..22: note = chemically synthesized
  source 1..22: mol_type = other DNA
ttctgtggtccataatcacatc

SEQ ID NO: 13732 - DNA, 22 bp, synthetic construct
  misc_feature 1..22: note = chemically synthesized
  source 1..22: mol_type = other DNA
tgtggtccataatcacatcaaa

SEQ ID NO: 13733 - DNA, 22 bp, synthetic construct
  misc_feature 1..22: note = chemically synthesized
  source 1..22: mol_type = other DNA
tggtccataatcacatcaaaca

SEQ ID NO: 13734 - DNA, 22 bp, synthetic construct
  misc_feature 1..22: note = chemically synthesized
  source 1..22: mol_type = other DNA
tagccatttccccttccatacc

SEQ ID NO: 13735 - DNA, 22 bp, synthetic construct
  misc_feature 1..22: note = chemically synthesized
  source 1..22: mol_type = other DNA
gccatttccccttccataccca

SEQ ID NO: 13736 - DNA, 22 bp, synthetic construct
  misc_feature 1..22: note = chemically synthesized
  source 1..22: mol_type = other DNA
ccccttccatacccagatggtt

SEQ ID NO: 13737 - DNA, 22 bp, synthetic construct
  misc_feature 1..22: note = chemically synthesized
  source 1..22: mol_type = other DNA
cccttccatacccagatggtta

SEQ ID NO: 13738 - DNA, 22 bp, synthetic construct
  misc_feature 1..22: note = chemically synthesized
  source 1..22: mol_type = other DNA
ccatacccagatggttaagtca

SEQ ID NO: 13739 - DNA, 22 bp, synthetic construct
  misc_feature 1..22: note = chemically synthesized
  source 1..22: mol_type = other DNA
catacccagatggttaagtcat

SEQ ID NO: 13740 - DNA, 22 bp, synthetic construct
  misc_feature 1..22: note = chemically synthesized
  source 1..22: mol_type = other DNA
agtcataccacttctacttcct

SEQ ID NO: 13741 - DNA, 22 bp, synthetic construct
  misc_feature 1..22: note = chemically synthesized
  source 1..22: mol_type = other DNA
ctacttccttaatatcatttga

SEQ ID NO: 13742 - DNA, 22 bp, synthetic construct
  misc_feature 1..22: note = chemically synthesized
  source 1..22: mol_type = other DNA
tacttccttaatatcatttgaa

SEQ ID NO: 13743 - DNA, 22 bp, synthetic construct
  misc_feature 1..22: note = chemically synthesized
  source 1..22: mol_type = other DNA
cttccttaatatcatttgaact

SEQ ID NO: 13744 - DNA, 22 bp, synthetic construct
  misc_feature 1..22: note = chemically synthesized
  source 1..22: mol_type = other DNA
ccttaatatcatttgaactccc

SEQ ID NO: 13745 - DNA, 22 bp, synthetic construct
  misc_feature 1..22: note = chemically synthesized
  source 1..22: mol_type = other DNA
cttaatatcatttgaactcccc

SEQ ID NO: 13746 - DNA, 22 bp, synthetic construct
  misc_feature 1..22: note = chemically synthesized
  source 1..22: mol_type = other DNA
aatatcatttgaactcccctct

SEQ ID NO: 13747 - DNA, 22 bp, synthetic construct
  misc_feature 1..22: note = chemically synthesized
  source 1..22: mol_type = other DNA
atatcatttgaactcccctctt

SEQ ID NO: 13748 - DNA, 22 bp, synthetic construct
  misc_feature 1..22: note = chemically synthesized
  source 1..22: mol_type = other DNA
gaactcccctctttttttgtac

SEQ ID NO: 13749 - DNA, 22 bp, synthetic construct
  misc_feature 1..22: note = chemically synthesized
  source 1..22: mol_type = other DNA
aactcccctctttttttgtact

SEQ ID NO: 13750 - DNA, 22 bp, synthetic construct
  misc_feature 1..22: note = chemically synthesized
  source 1..22: mol_type = other DNA
ccctctttttttgtactgctac

SEQ ID NO: 13751 - DNA, 22 bp, synthetic construct
  misc_feature 1..22: note = chemically synthesized
  source 1..22: mol_type = other DNA
tttttttgtactgctactgttc

SEQ ID NO: 13752 - DNA, 22 bp, synthetic construct
  misc_feature 1..22: note = chemically synthesized
  source 1..22: mol_type = other DNA
tttttgtactgctactgttcag

SEQ ID NO: 13753 - DNA, 22 bp, synthetic construct
  misc_feature 1..22: note = chemically synthesized
  source 1..22: mol_type = other DNA
ttttgtactgctactgttcagg

SEQ ID NO: 13754 - DNA, 22 bp, synthetic construct
  misc_feature 1..22: note = chemically synthesized
  source 1..22: mol_type = other DNA
tttgtactgctactgttcaggt

SEQ ID NO: 13755 - DNA, 22 bp, synthetic construct
  misc_feature 1..22: note = chemically synthesized
  source 1..22: mol_type = other DNA
ttgtactgctactgttcaggtt

SEQ ID NO: 13756 - DNA, 22 bp, synthetic construct
  misc_feature 1..22: note = chemically synthesized
  source 1..22: mol_type = other DNA
tgtactgctactgttcaggttc

SEQ ID NO: 13757 - DNA, 22 bp, synthetic construct
  misc_feature 1..22: note = chemically synthesized
  source 1..22: mol_type = other DNA
gtactgctactgttcaggttct

SEQ ID NO: 13758 - DNA, 22 bp, synthetic construct
  misc_feature 1..22: note = chemically synthesized
  source 1..22: mol_type = other DNA
tactgctactgttcaggttcta

SEQ ID NO: 13759 - DNA, 22 bp, synthetic construct
  misc_feature 1..22: note = chemically synthesized
  source 1..22: mol_type = other DNA
ctactgttcaggttctagcctt

SEQ ID NO: 13760 - DNA, 22 bp, synthetic construct
  misc_feature 1..22: note = chemically synthesized
  source 1..22: mol_type = other DNA
ctgttcaggttctagcctttat

SEQ ID NO: 13761 - DNA, 22 bp, synthetic construct
  misc_feature 1..22: note = chemically synthesized
  source 1..22: mol_type = other DNA
ttcaggttctagcctttatgtc

SEQ ID NO: 13762 - DNA, 22 bp, synthetic construct
  misc_feature 1..22: note = chemically synthesized
  source 1..22: mol_type = other DNA
aggttctagcctttatgtctcc

SEQ ID NO: 13763 - DNA, 22 bp, synthetic construct
  misc_feature 1..22: note = chemically synthesized
  source 1..22: mol_type = other DNA
tagcctttatgtctcccgcaga

SEQ ID NO: 13764 - DNA, 22 bp, synthetic construct
  misc_feature 1..22: note = chemically synthesized
  source 1..22: mol_type = other DNA
gcctttatgtctcccgcagata

SEQ ID NO: 13765 - DNA, 22 bp, synthetic construct
  misc_feature 1..22: note = chemically synthesized
  source 1..22: mol_type = other DNA
tatgtctcccgcagataattgc

SEQ ID NO: 13766 - DNA, 22 bp, synthetic construct
  misc_feature 1..22: note = chemically synthesized
  source 1..22: mol_type = other DNA
atgtctcccgcagataattgca

SEQ ID NO: 13767 - DNA, 22 bp, synthetic construct
  misc_feature 1..22: note = chemically synthesized
  source 1..22: mol_type = other DNA
tgtctcccgcagataattgcaa

SEQ ID NO: 13768 - DNA, 22 bp, synthetic construct
  misc_feature 1..22: note = chemically synthesized
  source 1..22: mol_type = other DNA
ccgcagataattgcaatagtct

SEQ ID NO: 13769 - DNA, 22 bp, synthetic construct
  misc_feature 1..22: note = chemically synthesized
  source 1..22: mol_type = other DNA
caatagtctcaggactgctctc

SEQ ID NO: 13770 - DNA, 22 bp, synthetic construct
  misc_feature 1..22: note = chemically synthesized
  source 1..22: mol_type = other DNA
aggactgctctctcctagtctt

SEQ ID NO: 13771 - DNA, 22 bp, synthetic construct
  misc_feature 1..22: note = chemically synthesized
  source 1..22: mol_type = other DNA
ctctctcctagtcttggtacgg

SEQ ID NO: 13772 - DNA, 22 bp, synthetic construct
  misc_feature 1..22: note = chemically synthesized
  source 1..22: mol_type = other DNA
tctcctagtcttggtacggccc

SEQ ID NO: 13773 - DNA, 22 bp, synthetic construct
  misc_feature 1..22: note = chemically synthesized
  source 1..22: mol_type = other DNA
tcctagtcttggtacggccccc

SEQ ID NO: 13774 - DNA, 22 bp, synthetic construct
  misc_feature 1..22: note = chemically synthesized
  source 1..22: mol_type = other DNA
ctagtcttggtacggccccctc

SEQ ID NO: 13775 - DNA, 22 bp, synthetic construct
  misc_feature 1..22: note = chemically synthesized
  source 1..22: mol_type = other DNA
gtcttggtacggccccctcccc

SEQ ID NO: 13776 - DNA, 22 bp, synthetic construct
  misc_feature 1..22: note = chemically synthesized
  source 1..22: mol_type = other DNA
ggtacggccccctcccccacta

SEQ ID NO: 13777 - DNA, 22 bp, synthetic construct
  misc_feature 1..22: note = chemically synthesized
  source 1..22: mol_type = other DNA
gtacggccccctcccccactat

SEQ ID NO: 13778 - DNA, 22 bp, synthetic construct
  misc_feature 1..22: note = chemically synthesized
  source 1..22: mol_type = other DNA
ccccactatcatttcattagcg

SEQ ID NO: 13779 - DNA, 22 bp, synthetic construct
  misc_feature 1..22: note = chemically synthesized
  source 1..22: mol_type = other DNA
tcatttcattagcgtgttgcca

SEQ ID NO: 13780 - DNA, 22 bp, synthetic construct
  misc_feature 1..22: note = chemically synthesized
  source 1..22: mol_type = other DNA
cattagcgtgttgccagactgg

SEQ ID NO: 13781 - DNA, 22 bp, synthetic construct
  misc_feature 1..22: note = chemically synthesized
  source 1..22: mol_type = other DNA
attagcgtgttgccagactggg

SEQ ID NO: 13782 - DNA, 22 bp, synthetic construct
  misc_feature 1..22: note = chemically synthesized
  source 1..22: mol_type = other DNA
gcgtgttgccagactgggcatc

SEQ ID NO: 13783 - DNA, 22 bp, synthetic construct
  misc_feature 1..22: note = chemically synthesized
  source 1..22: mol_type = other DNA
ccagactgggcatcctaaatca

SEQ ID NO: 13784 - DNA, 22 bp, synthetic construct
  misc_feature 1..22: note = chemically synthesized
  source 1..22: mol_type = other DNA
ggcatcctaaatcagccatcag

SEQ ID NO: 13785 - DNA, 22 bp, synthetic construct
  misc_feature 1..22: note = chemically synthesized
  source 1..22: mol_type = other DNA
aatcagccatcagtggtactcc

SEQ ID NO: 13786 - DNA, 22 bp, synthetic construct
  misc_feature 1..22: note = chemically synthesized
  source 1..22: mol_type = other DNA
cttatgtttatacttcgatacc

SEQ ID NO: 13787 - DNA, 22 bp, synthetic construct
  misc_feature 1..22: note = chemically synthesized
  source 1..22: mol_type = other DNA
atgtttatacttcgatacctcc

SEQ ID NO: 13788 - DNA, 22 bp, synthetic construct
  misc_feature 1..22: note = chemically synthesized
  source 1..22: mol_type = other DNA
tgtttatacttcgatacctcca

SEQ ID NO: 13789 - DNA, 22 bp, synthetic construct
  misc_feature 1..22: note = chemically synthesized
  source 1..22: mol_type = other DNA
atacttcgatacctccatattg

SEQ ID NO: 13790 - DNA, 22 bp, synthetic construct
  misc_feature 1..22: note = chemically synthesized
  source 1..22: mol_type = other DNA
tacttcgatacctccatattgc

SEQ ID NO: 13791 - DNA, 22 bp, synthetic construct
  misc_feature 1..22: note = chemically synthesized
  source 1..22: mol_type = other DNA
cgatacctccatattgcatttt

SEQ ID NO: 13792 - DNA, 22 bp, synthetic construct
  misc_feature 1..22: note = chemically synthesized
  source 1..22: mol_type = other DNA
gatacctccatattgcatttta

SEQ ID NO: 13793 - DNA, 22 bp, synthetic construct
  misc_feature 1..22: note = chemically synthesized
  source 1..22: mol_type = other DNA
catattgcattttattgtccaa

SEQ ID NO: 13794 - DNA, 22 bp, synthetic construct
  misc_feature 1..22: note = chemically synthesized
  source 1..22: mol_type = other DNA
cattttattgtccaatctcctt

SEQ ID NO: 13795 - DNA, 22 bp, synthetic construct
  misc_feature 1..22: note = chemically synthesized
  source 1..22: mol_type = other DNA
tattgtccaatctccttaggtt

SEQ ID NO: 13796 - DNA, 22 bp, synthetic construct
  misc_feature 1..22: note = chemically synthesized
  source 1..22: mol_type = other DNA
attgtccaatctccttaggtta

SEQ ID NO: 13797 - DNA, 22 bp, synthetic construct
  misc_feature 1..22: note = chemically synthesized
  source 1..22: mol_type = other DNA
ttgtccaatctccttaggttaa

SEQ ID NO: 13798 - DNA, 22 bp, synthetic construct
  misc_feature 1..22: note = chemically synthesized
  source 1..22: mol_type = other DNA
tccaatctccttaggttaatga

SEQ ID NO: 13799 - DNA, 22 bp, synthetic construct
  misc_feature 1..22: note = chemically synthesized
  source 1..22: mol_type = other DNA
cttaggttaatgacttcattat

SEQ ID NO: 13800 - DNA, 22 bp, synthetic construct
  misc_feature 1..22: note = chemically synthesized
  source 1..22: mol_type = other DNA
aggttaatgacttcattatctg

SEQ ID NO: 13801 - DNA, 22 bp, synthetic construct
  misc_feature 1..22: note = chemically synthesized
  source 1..22: mol_type = other DNA
ggttaatgacttcattatctga

SEQ ID NO: 13802 - DNA, 22 bp, synthetic construct
  misc_feature 1..22: note = chemically synthesized
  source 1..22: mol_type = other DNA
atgacttcattatctgatgacc

SEQ ID NO: 13803 - DNA, 22 bp, synthetic construct
  misc_feature 1..22: note = chemically synthesized
  source 1..22: mol_type = other DNA
cattatctgatgaccagctctg

SEQ ID NO: 13804 - DNA, 22 bp, synthetic construct
  misc_feature 1..22: note = chemically synthesized
  source 1..22: mol_type = other DNA
attatctgatgaccagctctgc

SEQ ID NO: 13805 - DNA, 22 bp, synthetic construct
  misc_feature 1..22: note = chemically synthesized
  source 1..22: mol_type = other DNA
tctgatgaccagctctgcctag

SEQ ID NO: 13806 - DNA, 22 bp, synthetic construct
  misc_feature 1..22: note = chemically synthesized
  source 1..22: mol_type = other DNA
atgaccagctctgcctagttta

SEQ ID NO: 13807 - DNA, 22 bp, synthetic construct
  misc_feature 1..22: note = chemically synthesized
  source 1..22: mol_type = other DNA
tgcctagtttacctgtctcact

SEQ ID NO: 13808 - DNA, 22 bp, synthetic construct
  misc_feature 1..22: note = chemically synthesized
  source 1..22: mol_type = other DNA
cctagtttacctgtctcacttg

SEQ ID NO: 13809 - DNA, 22 bp, synthetic construct
  misc_feature 1..22: note = chemically synthesized
  source 1..22: mol_type = other DNA
gtttacctgtctcacttgtcat

SEQ ID NO: 13810 - DNA, 22 bp, synthetic construct
  misc_feature 1..22: note = chemically synthesized
  source 1..22: mol_type = other DNA
acctgtctcacttgtcatagtc

SEQ ID NO: 13811 - DNA, 22 bp, synthetic construct
  misc_feature 1..22: note = chemically synthesized
  source 1..22: mol_type = other DNA
cctgtctcacttgtcatagtcc

SEQ ID NO: 13812 - DNA, 22 bp, synthetic construct
  misc_feature 1..22: note = chemically synthesized
  source 1..22: mol_type = other DNA
tctcacttgtcatagtccatat

SEQ ID NO: 13813 - DNA, 22 bp, synthetic construct
  misc_feature 1..22: note = chemically synthesized
  source 1..22: mol_type = other DNA
acttgtcatagtccatatggaa

SEQ ID NO: 13814 - DNA, 22 bp, synthetic construct
  misc_feature 1..22: note = chemically synthesized
  source 1..22: mol_type = other DNA
gtcatagtccatatggaaccat

SEQ ID NO: 13815 - DNA, 22 bp, synthetic construct
  misc_feature 1..22: note = chemically synthesized
  source 1..22: mol_type = other DNA
tcatagtccatatggaaccata

SEQ ID NO: 13816 - DNA, 22 bp, synthetic construct
  misc_feature 1..22: note = chemically synthesized
  source 1..22: mol_type = other DNA
ctgaaatacctcacgttcttgc

SEQ ID NO: 13817 - DNA, 22 bp, synthetic construct
  misc_feature 1..22: note = chemically synthesized
  source 1..22: mol_type = other DNA
aaatacctcacgttcttgcaaa

SEQ ID NO: 13818 - DNA, 22 bp, synthetic construct
  misc_feature 1..22: note = chemically synthesized
  source 1..22: mol_type = other DNA
acgttcttgcaaatctgagtct

SEQ ID NO: 13819 - DNA, 22 bp, synthetic construct
  misc_feature 1..22: note = chemically synthesized
  source 1..22: mol_type = other DNA
ttgcaaatctgagtctttgcac

SEQ ID NO: 13820 - DNA, 22 bp, synthetic construct
  misc_feature 1..22: note = chemically synthesized
  source 1..22: mol_type = other DNA
gcaaatctgagtctttgcacga

SEQ ID NO: 13821 - DNA, 22 bp, synthetic construct
  misc_feature 1..22: note = chemically synthesized
  source 1..22: mol_type = other DNA
caaatctgagtctttgcacgag

SEQ ID NO: 13822 - DNA, 22 bp, synthetic construct
  misc_feature 1..22: note = chemically synthesized
  source 1..22: mol_type = other DNA
agtctttgcacgagtgatcctc

SEQ ID NO: 13823 - DNA, 22 bp, synthetic construct
  misc_feature 1..22: note = chemically synthesized
  source 1..22: mol_type = other DNA
tgcacgagtgatcctctttgca

SEQ ID NO: 13824 - DNA, 22 bp, synthetic construct
  misc_feature 1..22: note = chemically synthesized
  source 1..22: mol_type = other DNA
gcacgagtgatcctctttgcat

SEQ ID NO: 13825 - DNA, 22 bp, synthetic construct
  misc_feature 1..22: note = chemically synthesized
  source 1..22: mol_type = other DNA
cacgagtgatcctctttgcata

SEQ ID NO: 13826 - DNA, 22 bp, synthetic construct
  misc_feature 1..22: note = chemically synthesized
  source 1..22: mol_type = other DNA
tttgcataaaatgcccttatat

SEQ ID NO: 13827 - DNA, 22 bp, synthetic construct
  misc_feature 1..22: note = chemically synthesized
  source 1..22: mol_type = other DNA
tgcataaaatgcccttatatca

SEQ ID NO: 13828 - DNA, 22 bp, synthetic construct
  misc_feature 1..22: note = chemically synthesized
  source 1..22: mol_type = other DNA
gcataaaatgcccttatatcag

SEQ ID NO: 13829 - DNA, 22 bp, synthetic construct
  misc_feature 1..22: note = chemically synthesized
  source 1..22: mol_type = other DNA
cataaaatgcccttatatcaga

SEQ ID NO: 13830 - DNA, 22 bp, synthetic construct
  misc_feature 1..22: note = chemically synthesized
  source 1..22: mol_type = other DNA
atatcagacatttaaagagaga

SEQ ID NO: 13831 - DNA, 22 bp, synthetic construct
  misc_feature 1..22: note = chemically synthesized
  source 1..22: mol_type = other DNA
tatcagacatttaaagagagag

SEQ ID NO: 13832 - DNA, 22 bp, synthetic construct
  misc_feature 1..22: note = chemically synthesized
  source 1..22: mol_type = other DNA
aaagagagagaacgcctactca

SEQ ID NO: 13833 - DNA, 22 bp, synthetic construct
  misc_feature 1..22: note = chemically synthesized
  source 1..22: mol_type = other DNA
aagagagagaacgcctactcat

SEQ ID NO: 13834 - DNA, 22 bp, synthetic construct
  misc_feature 1..22: note = chemically synthesized
  source 1..22: mol_type = other DNA
ctcatcttttaagacccagatg

SEQ ID NO: 13835 - DNA, 22 bp, synthetic construct
  misc_feature 1..22: note = chemically synthesized
  source 1..22: mol_type = other DNA
atcttttaagacccagatgaaa

SEQ ID NO: 13836 - DNA, 22 bp, synthetic construct
  misc_feature 1..22: note = chemically synthesized
  source 1..22: mol_type = other DNA
ttaagacccagatgaaaatatt

SEQ ID NO: 13837 - DNA, 22 bp, synthetic construct
  misc_feature 1..22: note = chemically synthesized
  source 1..22: mol_type = other DNA
taagacccagatgaaaatattc

SEQ ID NO: 13838 - DNA, 22 bp, synthetic construct
  misc_feature 1..22: note = chemically synthesized
  source 1..22: mol_type = other DNA
aagacccagatgaaaatattct

SEQ ID NO: 13839 - DNA, 22 bp, synthetic construct
  misc_feature 1..22: note = chemically synthesized
  source 1..22: mol_type = other DNA
agacccagatgaaaatattctc

SEQ ID NO: 13840 - DNA, 22 bp, synthetic construct
  misc_feature 1..22: note = chemically synthesized
  source 1..22: mol_type = other DNA
tctctctatcaattgtttcccc

SEQ ID NO: 13841 - DNA, 22 bp, synthetic construct
  misc_feature 1..22: note = chemically synthesized
  source 1..22: mol_type = other DNA
tctctatcaattgtttccccat

SEQ ID NO: 13842 - DNA, 22 bp, synthetic construct
  misc_feature 1..22: note = chemically synthesized
  source 1..22: mol_type = other DNA
tctatcaattgtttccccattt

SEQ ID NO: 13843 - DNA, 22 bp, synthetic construct
  misc_feature 1..22: note = chemically synthesized
  source 1..22: mol_type = other DNA
tatcaattgtttccccatttaa

SEQ ID NO: 13844 - DNA, 22 bp, synthetic construct
  misc_feature 1..22: note = chemically synthesized
  source 1..22: mol_type = other DNA
tcaattgtttccccatttaatg

SEQ ID NO: 13845 - DNA, 22 bp, synthetic construct
  misc_feature 1..22: note = chemically synthesized
  source 1..22: mol_type = other DNA
tttccccatttaatgtgttcct

SEQ ID NO: 13846 - DNA, 22 bp, synthetic construct
  misc_feature 1..22: note = chemically synthesized
  source 1..22: mol_type = other DNA
ccccatttaatgtgttcctttc

SEQ ID NO: 13847 - DNA, 22 bp, synthetic construct
  misc_feature 1..22: note = chemically synthesized
  source 1..22: mol_type = other DNA
cccatttaatgtgttcctttct

SEQ ID NO: 13848 - DNA, 22 bp, synthetic construct
  misc_feature 1..22: note = chemically synthesized
  source 1..22: mol_type = other DNA
aatgtgttcctttctctatgat

SEQ ID NO: 13849 - DNA, 22 bp, synthetic construct
  misc_feature 1..22: note = chemically synthesized
  source 1..22: mol_type = other DNA
atgtgttcctttctctatgatc

SEQ ID NO: 13850 - DNA, 22 bp, synthetic construct
  misc_feature 1..22: note = chemically synthesized
  source 1..22: mol_type = other DNA
ctttctctatgatcccttagta

SEQ ID NO: 13851 - DNA, 22 bp, synthetic construct
  misc_feature 1..22: note = chemically synthesized
  source 1..22: mol_type = other DNA
tctctatgatcccttagtacct

SEQ ID NO: 13852 - DNA, 22 bp, synthetic construct
  misc_feature 1..22: note = chemically synthesized
  source 1..22: mol_type = other DNA
ctctatgatcccttagtaccta

SEQ ID NO: 13853 - DNA, 22 bp, synthetic construct
  misc_feature 1..22: note = chemically synthesized
  source 1..22: mol_type = other DNA
tctatgatcccttagtacctag

SEQ ID NO: 13854 - DNA, 22 bp, synthetic construct
  misc_feature 1..22: note = chemically synthesized
  source 1..22: mol_type = other DNA
tatgatcccttagtacctagtg

SEQ ID NO: 13855 - DNA, 22 bp, synthetic construct
  misc_feature 1..22: note = chemically synthesized
  source 1..22: mol_type = other DNA
tgatcccttagtacctagtgca

SEQ ID NO: 13856 - DNA, 22 bp, synthetic construct
  misc_feature 1..22: note = chemically synthesized
  source 1..22: mol_type = other DNA
agtacctagtgcacattttatc

SEQ ID NO: 13857 - DNA, 22 bp, synthetic construct
  misc_feature 1..22: note = chemically synthesized
  source 1..22: mol_type = other DNA
gtacctagtgcacattttatca

SEQ ID NO: 13858 - DNA, 22 bp, synthetic construct
  misc_feature 1..22: note = chemically synthesized
  source 1..22: mol_type = other DNA
gtgcacattttatcacattata

SEQ ID NO: 13859 - DNA, 22 bp, synthetic construct
  misc_feature 1..22: note = chemically synthesized
  source 1..22: mol_type = other DNA
tatcacattatattgaaacctc

SEQ ID NO: 13860 - DNA, 22 bp, synthetic construct
  misc_feature 1..22: note = chemically synthesized
  source 1..22: mol_type = other DNA
atcacattatattgaaacctct

SEQ ID NO: 13861 - DNA, 22 bp, synthetic construct
  misc_feature 1..22: note = chemically synthesized
  source 1..22: mol_type = other DNA
tcacattatattgaaacctctc

SEQ ID NO: 13862 - DNA, 22 bp, synthetic construct
  misc_feature 1..22: note = chemically synthesized
  source 1..22: mol_type = other DNA
tattgaaacctctcacctggcc

SEQ ID NO: 13863 - DNA, 22 bp, synthetic construct
  misc_feature 1..22: note = chemically synthesized
  source 1..22: mol_type = other DNA
aaacctctcacctggcctcatg

SEQ ID NO: 13864 - DNA, 22 bp, synthetic construct
  misc_feature 1..22: note = chemically synthesized
  source 1..22: mol_type = other DNA
tcacctggcctcatgctgcttt

SEQ ID NO: 13865 - DNA, 22 bp, synthetic construct
  misc_feature 1..22: note = chemically synthesized
  source 1..22: mol_type = other DNA
acctggcctcatgctgctttag

SEQ ID NO: 13866 - DNA, 22 bp, synthetic construct
  misc_feature 1..22: note = chemically synthesized
  source 1..22: mol_type = other DNA
gcctcatgctgctttagatcaa

SEQ ID NO: 13867 - DNA, 22 bp, synthetic construct
  misc_feature 1..22: note = chemically synthesized
  source 1..22: mol_type = other DNA
atgctgctttagatcaaagagg

SEQ ID NO: 13868 - DNA, 22 bp, synthetic construct
  misc_feature 1..22: note = chemically synthesized
  source 1..22: mol_type = other DNA
ctttagatcaaagagggagtct

SEQ ID NO: 13869 - DNA, 22 bp, synthetic construct
  misc_feature 1..22: note = chemically synthesized
  source 1..22: mol_type = other DNA
tagatcaaagagggagtctggt

SEQ ID NO: 13870 - DNA, 22 bp, synthetic construct
  misc_feature 1..22: note = chemically synthesized
  source 1..22: mol_type = other DNA
agatcaaagagggagtctggtt

SEQ ID NO: 13871 - DNA, 22 bp, synthetic construct
  misc_feature 1..22: note = chemically synthesized
  source 1..22: mol_type = other DNA
gatcaaagagggagtctggttt

SEQ ID NO: 13872 - DNA, 22 bp, synthetic construct
  misc_feature 1..22: note = chemically synthesized
  source 1..22: mol_type = other DNA
gtttatccccatacccctagta

SEQ ID NO: 13873 - DNA, 22 bp, synthetic construct
  misc_feature 1..22: note = chemically synthesized
  source 1..22: mol_type = other DNA
atccccatacccctagtaccct

SEQ ID NO: 13874 - DNA, 22 bp, synthetic construct
  misc_feature 1..22: note = chemically synthesized
  source 1..22: mol_type = other DNA
tccccatacccctagtaccctg

SEQ ID NO: 13875 - DNA, 22 bp, synthetic construct
  misc_feature 1..22: note = chemically synthesized
  source 1..22: mol_type = other DNA
gtaccctgacacagtacctggc

SEQ ID NO: 13876 - DNA, 22 bp, synthetic construct
  misc_feature 1..22: note = chemically synthesized
  source 1..22: mol_type = other DNA
acacagtacctggcaccatagt

SEQ ID NO: 13877 - DNA, 22 bp, synthetic construct
  misc_feature 1..22: note = chemically synthesized
  source 1..22: mol_type = other DNA
gcaccatagttgtaactcagta

SEQ ID NO: 13878 - DNA, 22 bp, synthetic construct
  misc_feature 1..22: note = chemically synthesized
  source 1..22: mol_type = other DNA
taactcagtaatgtctgaatga

SEQ ID NO: 13879 - DNA, 22 bp, synthetic construct
  misc_feature 1..22: note = chemically synthesized
  source 1..22: mol_type = other DNA
agtaatgtctgaatgaaggaca

SEQ ID NO: 13880 - DNA, 22 bp, synthetic construct
  misc_feature 1..22: note = chemically synthesized
  source 1..22: mol_type = other DNA
aatgaaggacatctttgatgca

SEQ ID NO: 13881 - DNA, 22 bp, synthetic construct
  misc_feature 1..22: note = chemically synthesized
  source 1..22: mol_type = other DNA
tgatgcatacactttacaaaac

SEQ ID NO: 13882 - DNA, 22 bp, synthetic construct
  misc_feature 1..22: note = chemically synthesized
  source 1..22: mol_type = other DNA
gatgcatacactttacaaaact

SEQ ID NO: 13883 - DNA, 22 bp, synthetic construct
  misc_feature 1..22: note = chemically synthesized
  source 1..22: mol_type = other DNA
atgcatacactttacaaaacta

SEQ ID NO: 13884 - DNA, 22 bp, synthetic construct
  misc_feature 1..22: note = chemically synthesized
  source 1..22: mol_type = other DNA
tacaaaactaaactggttttac

SEQ ID NO: 13885 - DNA, 22 bp, synthetic construct
  misc_feature 1..22: note = chemically synthesized
  source 1..22: mol_type = other DNA
acaaaactaaactggttttaca

SEQ ID NO: 13886 - DNA, 22 bp, synthetic construct
  misc_feature 1..22: note = chemically synthesized
  source 1..22: mol_type = other DNA
caaaactaaactggttttacag

SEQ ID NO: 13887 - DNA, 22 bp, synthetic construct
  misc_feature 1..22: note = chemically synthesized
  source 1..22: mol_type = other DNA
aactggttttacagaactgttt

SEQ ID NO: 13888 - DNA, 22 bp, synthetic construct
  misc_feature 1..22: note = chemically synthesized
  source 1..22: mol_type = other DNA
gttttacagaactgttttaatt

SEQ ID NO: 13889 - DNA, 22 bp, synthetic construct
  misc_feature 1..22: note = chemically synthesized
  source 1..22: mol_type = other DNA
tacagaactgttttaatttcaa

SEQ ID NO: 13890 - DNA, 22 bp, synthetic construct
  misc_feature 1..22: note = chemically synthesized
  source 1..22: mol_type = other DNA
acagaactgttttaatttcaaa

SEQ ID NO: 13891 - DNA, 22 bp, synthetic construct
  misc_feature 1..22: note = chemically synthesized
  source 1..22: mol_type = other DNA
cagaactgttttaatttcaaaa

SEQ ID NO: 13892 - DNA, 22 bp, synthetic construct
  misc_feature 1..22: note = chemically synthesized
  source 1..22: mol_type = other DNA
ttttaatttcaaaattccaaac

SEQ ID NO: 13893 - DNA, 22 bp, synthetic construct
  misc_feature 1..22: note = chemically synthesized
  source 1..22: mol_type = other DNA
taatttcaaaattccaaactgt

SEQ ID NO: 13894 - DNA, 22 bp, synthetic construct
  misc_feature 1..22: note = chemically synthesized
  source 1..22: mol_type = other DNA
aatttcaaaattccaaactgtt

SEQ ID NO: 13895 - DNA, 22 bp, synthetic construct
  misc_feature 1..22: note = chemically synthesized
  source 1..22: mol_type = other DNA
atttcaaaattccaaactgttg

SEQ ID NO: 13896 - DNA, 22 bp, synthetic construct
  misc_feature 1..22: note = chemically synthesized
  source 1..22: mol_type = other DNA
caaaattccaaactgttgcaat

SEQ ID NO: 13897 - DNA, 22 bp, synthetic construct
  misc_feature 1..22: note = chemically synthesized
  source 1..22: mol_type = other DNA
aaaattccaaactgttgcaata

SEQ ID NO: 13898 - DNA, 22 bp, synthetic construct
  misc_feature 1..22: note = chemically synthesized
  source 1..22: mol_type = other DNA
caaactgttgcaataataccta

SEQ ID NO: 13899 - DNA, 22 bp, synthetic construct
  misc_feature 1..22: note = chemically synthesized
  source 1..22: mol_type = other DNA
ttgcaataatacctaaaggcag

SEQ ID NO: 13900 - DNA, 22 bp, synthetic construct
  misc_feature 1..22: note = chemically synthesized
  source 1..22: mol_type = other DNA
caataatacctaaaggcagcag

SEQ ID NO: 13901 - DNA, 22 bp, synthetic construct
  misc_feature 1..22: note = chemically synthesized
  source 1..22: mol_type = other DNA
aaggcagcagccatgaaaatgc

SEQ ID NO: 13902 - DNA, 22 bp, synthetic construct
  misc_feature 1..22: note = chemically synthesized
  source 1..22: mol_type = other DNA
agcaaatcactcaccgaaactc

SEQ ID NO: 13903 - DNA, 22 bp, synthetic construct
  misc_feature 1..22: note = chemically synthesized
  source 1..22: mol_type = other DNA
accgaaactccttttagaagcc

SEQ ID NO: 13904 - DNA, 22 bp, synthetic construct
  misc_feature 1..22: note = chemically synthesized
  source 1..22: mol_type = other DNA
cttttagaagccaatgagagtt

SEQ ID NO: 13905 - DNA, 22 bp, synthetic construct
  misc_feature 1..22: note = chemically synthesized
  source 1..22: mol_type = other DNA
ttagaagccaatgagagtttaa

SEQ ID NO: 13906 - DNA, 22 bp, synthetic construct
  misc_feature 1..22: note = chemically synthesized
  source 1..22: mol_type = other DNA
tagaagccaatgagagtttaat

SEQ ID NO: 13907 - DNA, 22 bp, synthetic construct
  misc_feature 1..22: note = chemically synthesized
  source 1..22: mol_type = other DNA
agaagccaatgagagtttaata

SEQ ID NO: 13908 - DNA, 22 bp, synthetic construct
  misc_feature 1..22: note = chemically synthesized
  source 1..22: mol_type = other DNA
gaagccaatgagagtttaatag

SEQ ID NO: 13909 - DNA, 22 bp, synthetic construct
  misc_feature 1..22: note = chemically synthesized
  source 1..22: mol_type = other DNA
aatagcagaagagagtgctgca

SEQ ID NO: 13910 - DNA, 22 bp, synthetic construct
  misc_feature 1..22: note = chemically synthesized
  source 1..22: mol_type = other DNA
atagcagaagagagtgctgcat

SEQ ID NO: 13911 - DNA, 22 bp, synthetic construct
  misc_feature 1..22: note = chemically synthesized
  source 1..22: mol_type = other DNA
cattaatactgtctatccttag

SEQ ID NO: 13912 - DNA, 22 bp, synthetic construct
  misc_feature 1..22: note = chemically synthesized
  source 1..22: mol_type = other DNA
atactgtctatccttagaaaaa

SEQ ID NO: 13913 - DNA, 22 bp, synthetic construct
  misc_feature 1..22: note = chemically synthesized
  source 1..22: mol_type = other DNA
tctatccttagaaaaattcccc

SEQ ID NO: 13914 - DNA, 22 bp, synthetic construct
  misc_feature 1..22: note = chemically synthesized
  source 1..22: mol_type = other DNA
tccttagaaaaattcccctggc

SEQ ID NO: 13915 - DNA, 22 bp, synthetic construct
  misc_feature 1..22: note = chemically synthesized
  source 1..22: mol_type = other DNA
agaaaaattcccctggcccctt

SEQ ID NO: 13916 - DNA, 22 bp, synthetic construct
  misc_feature 1..22: note = chemically synthesized
  source 1..22: mol_type = other DNA
gaaaaattcccctggccccttc

SEQ ID NO: 13917 - DNA, 22 bp, synthetic construct
  misc_feature 1..22: note = chemically synthesized
  source 1..22: mol_type = other DNA
ccctggccccttcctcaagggc

SEQ ID NO: 13918 - DNA, 22 bp, synthetic construct
  misc_feature 1..22: note = chemically synthesized
  source 1..22: mol_type = other DNA
gccccttcctcaagggcttatt

SEQ ID NO: 13919 - DNA, 22 bp, synthetic construct
  misc_feature 1..22: note = chemically synthesized
  source 1..22: mol_type = other DNA
cctcaagggcttattatctctg

SEQ ID NO: 13920 - DNA, 22 bp, synthetic construct
  misc_feature 1..22: note = chemically synthesized
  source 1..22: mol_type = other DNA
ctcaagggcttattatctctgg

SEQ ID NO: 13921 - DNA, 22 bp, synthetic construct
  misc_feature 1..22: note = chemically synthesized
  source 1..22: mol_type = other DNA
aagggcttattatctctggcta

SEQ ID NO: 13922 - DNA, 22 bp, synthetic construct
  misc_feature 1..22: note = chemically synthesized
  source 1..22: mol_type = other DNA
attatctctggctacaatggct

SEQ ID NO: 13923 - DNA, 22 bp, synthetic construct
  misc_feature 1..22: note = chemically synthesized
  source 1..22: mol_type = other DNA
ttatctctggctacaatggctg

SEQ ID NO: 13924 - DNA, 22 bp, synthetic construct
  misc_feature 1..22: note = chemically synthesized
  source 1..22: mol_type = other DNA
tctctggctacaatggctgcag

SEQ ID NO: 13925 - DNA, 22 bp, synthetic construct
  misc_feature 1..22: note = chemically synthesized
  source 1..22: mol_type = other DNA
tggctacaatggctgcagaatc

SEQ ID NO: 13926 - DNA, 22 bp, synthetic construct
  misc_feature 1..22: note = chemically synthesized
  source 1..22: mol_type = other DNA
gctacaatggctgcagaatcac

SEQ ID NO: 13927 - DNA, 22 bp, synthetic construct
  misc_feature 1..22: note = chemically synthesized
  source 1..22: mol_type = other DNA
caatggctgcagaatcacattg

SEQ ID NO: 13928 - DNA, 22 bp, synthetic construct
  misc_feature 1..22: note = chemically synthesized
  source 1..22: mol_type = other DNA
cagaatcacattgcctttctcc

SEQ ID NO: 13929 - DNA, 22 bp, synthetic construct
  misc_feature 1..22: note = chemically synthesized
  source 1..22: mol_type = other DNA
cctttctccttagtattatctg

SEQ ID NO: 13930 - DNA, 22 bp, synthetic construct
  misc_feature 1..22: note = chemically synthesized
  source 1..22: mol_type = other DNA
tctccttagtattatctgggga

SEQ ID NO: 13931 - DNA, 22 bp, synthetic construct
  misc_feature 1..22: note = chemically synthesized
  source 1..22: mol_type = other DNA
ctccttagtattatctggggat

SEQ ID NO: 13932 - DNA, 22 bp, synthetic construct
  misc_feature 1..22: note = chemically synthesized
  source 1..22: mol_type = other DNA
tccttagtattatctggggatc

SEQ ID NO: 13933 - DNA, 22 bp, synthetic construct
  misc_feature 1..22: note = chemically synthesized
  source 1..22: mol_type = other DNA
cttagtattatctggggatcgt

SEQ ID NO: 13934 - DNA, 22 bp, synthetic construct
  misc_feature 1..22: note = chemically synthesized
  source 1..22: mol_type = other DNA
agtattatctggggatcgtata

SEQ ID NO: 13935 - DNA, 22 bp, synthetic construct
  misc_feature 1..22: note = chemically synthesized
  source 1..22: mol_type = other DNA
gtattatctggggatcgtatac

SEQ ID NO: 13936 - DNA, 22 bp, synthetic construct
  misc_feature 1..22: note = chemically synthesized
  source 1..22: mol_type = other DNA
tctggggatcgtatacttaact

SEQ ID NO: 13937 - DNA, 22 bp, synthetic construct
  misc_feature 1..22: note = chemically synthesized
  source 1..22: mol_type = other DNA
gggatcgtatacttaacttccc

SEQ ID NO: 13938 - DNA, 22 bp, synthetic construct
  misc_feature 1..22: note = chemically synthesized
  source 1..22: mol_type = other DNA
aacttcccttcaggtttatcgc

SEQ ID NO: 13939 - DNA, 22 bp, synthetic construct
  misc_feature 1..22: note = chemically synthesized
  source 1..22: mol_type = other DNA
acttcccttcaggtttatcgct

SEQ ID NO: 13940 - DNA, 22 bp, synthetic construct
  misc_feature 1..22: note = chemically synthesized
  source 1..22: mol_type = other DNA
cccttcaggtttatcgctagtc

SEQ ID NO: 13941 - DNA, 22 bp, synthetic construct
  misc_feature 1..22: note = chemically synthesized
  source 1..22: mol_type = other DNA
ccttcaggtttatcgctagtca

SEQ ID NO: 13942 - DNA, 22 bp, synthetic construct
  misc_feature 1..22: note = chemically synthesized
  source 1..22: mol_type = other DNA
caggtttatcgctagtcattat

SEQ ID NO: 13943 - DNA, 22 bp, synthetic construct
  misc_feature 1..22: note = chemically synthesized
  source 1..22: mol_type = other DNA
aggtttatcgctagtcattatt

SEQ ID NO: 13944 - DNA, 22 bp, synthetic construct
  misc_feature 1..22: note = chemically synthesized
  source 1..22: mol_type = other DNA
atcgctagtcattatttcccag

SEQ ID NO: 13945 - DNA, 22 bp, synthetic construct
  misc_feature 1..22: note = chemically synthesized
  source 1..22: mol_type = other DNA
tcgctagtcattatttcccagg

SEQ ID NO: 13946 - DNA, 22 bp, synthetic construct
  misc_feature 1..22: note = chemically synthesized
  source 1..22: mol_type = other DNA
gtcattatttcccaggctccaa

SEQ ID NO: 13947 - DNA, 22 bp, synthetic construct
  misc_feature 1..22: note = chemically synthesized
  source 1..22: mol_type = other DNA
tttcccaggctccaaaagcctg

SEQ ID NO: 13948 - DNA, 22 bp, synthetic construct
  misc_feature 1..22: note = chemically synthesized
  source 1..22: mol_type = other DNA
cccaggctccaaaagcctggtt

SEQ ID NO: 13949 - DNA, 22 bp, synthetic construct
  misc_feature 1..22: note = chemically synthesized
  source 1..22: mol_type = other DNA
ccaggctccaaaagcctggttc

SEQ ID NO: 13950 - DNA, 22 bp, synthetic construct
  misc_feature 1..22: note = chemically synthesized
  source 1..22: mol_type = other DNA
caaaagcctggttcatccttat

SEQ ID NO: 13951 - DNA, 22 bp, synthetic construct
  misc_feature 1..22: note = chemically synthesized
  source 1..22: mol_type = other DNA
gttcatccttattcttatctat

SEQ ID NO: 13952 - DNA, 22 bp, synthetic construct
  misc_feature 1..22: note = chemically synthesized
  source 1..22: mol_type = other DNA
atccttattcttatctatcctt

SEQ ID NO: 13953 - DNA, 22 bp, synthetic construct
  misc_feature 1..22: note = chemically synthesized
  source 1..22: mol_type = other DNA
attcttatctatcctttcccca

SEQ ID NO: 13954 - DNA, 22 bp, synthetic construct
  misc_feature 1..22: note = chemically synthesized
  source 1..22: mol_type = other DNA
ttcttatctatcctttccccag

SEQ ID NO: 13955 - DNA, 22 bp, synthetic construct
  misc_feature 1..22: note = chemically synthesized
  source 1..22: mol_type = other DNA
ttatctatcctttccccagcat

SEQ ID NO: 13956 - DNA, 22 bp, synthetic construct
  misc_feature 1..22: note = chemically synthesized
  source 1..22: mol_type = other DNA
atctatcctttccccagcatct

SEQ ID NO: 13957 - DNA, 22 bp, synthetic construct
  misc_feature 1..22: note = chemically synthesized
  source 1..22: mol_type = other DNA
tctatcctttccccagcatctg

SEQ ID NO: 13958 - DNA, 22 bp, synthetic construct
  misc_feature 1..22: note = chemically synthesized
  source 1..22: mol_type = other DNA
tcctttccccagcatctgaagt

SEQ ID NO: 13959 - DNA, 22 bp, synthetic construct
  misc_feature 1..22: note = chemically synthesized
  source 1..22: mol_type = other DNA
tccccagcatctgaagtcttca

SEQ ID NO: 13960 - DNA, 22 bp, synthetic construct
  misc_feature 1..22: note = chemically synthesized
  source 1..22: mol_type = other DNA
ccccagcatctgaagtcttcaa

SEQ ID NO: 13961 - DNA, 22 bp, synthetic construct
  misc_feature 1..22: note = chemically synthesized
  source 1..22: mol_type = other DNA
cccagcatctgaagtcttcaag

SEQ ID NO: 13962 - DNA, 22 bp, synthetic construct
  misc_feature 1..22: note = chemically synthesized
  source 1..22: mol_type = other DNA
aagtcttcaagggggcagaagc

SEQ ID NO: 13963 - DNA, 22 bp, synthetic construct
  misc_feature 1..22: note = chemically synthesized
  source 1..22: mol_type = other DNA
caagggggcagaagccctctta

SEQ ID NO: 13964 - DNA, 22 bp, synthetic construct
  misc_feature 1..22: note = chemically synthesized
  source 1..22: mol_type = other DNA
aagggggcagaagccctcttac

SEQ ID NO: 13965 - DNA, 22 bp, synthetic construct
  misc_feature 1..22: note = chemically synthesized
  source 1..22: mol_type = other DNA
ttacaaccttcatcatctcacc

SEQ ID NO: 13966 - DNA, 22 bp, synthetic construct
  misc_feature 1..22: note = chemically synthesized
  source 1..22: mol_type = other DNA
acaaccttcatcatctcaccac

SEQ ID NO: 13967 - DNA, 22 bp, synthetic construct
  misc_feature 1..22: note = chemically synthesized
  source 1..22: mol_type = other DNA
caaccttcatcatctcaccact

SEQ ID NO: 13968 - DNA, 22 bp, synthetic construct
  misc_feature 1..22: note = chemically synthesized
  source 1..22: mol_type = other DNA
catcatctcaccacttatatag

SEQ ID NO: 13969 - DNA, 22 bp, synthetic construct
  misc_feature 1..22: note = chemically synthesized
  source 1..22: mol_type = other DNA
atcatctcaccacttatataga

SEQ ID NO: 13970 - DNA, 22 bp, synthetic construct
  misc_feature 1..22: note = chemically synthesized
  source 1..22: mol_type = other DNA
accacttatatagaagaaaggg

SEQ ID NO: 13971 - DNA, 22 bp, synthetic construct
  misc_feature 1..22: note = chemically synthesized
  source 1..22: mol_type = other DNA
atatagaagaaagggtttggat

SEQ ID NO: 13972 - DNA, 22 bp, synthetic construct
  misc_feature 1..22: note = chemically synthesized
  source 1..22: mol_type = other DNA
tatagaagaaagggtttggatg

SEQ ID NO: 13973 - DNA, 22 bp, synthetic construct
  misc_feature 1..22: note = chemically synthesized
  source 1..22: mol_type = other DNA
ggatgctttgtcctcccagatg

SEQ ID NO: 13974 - DNA, 22 bp, synthetic construct
  misc_feature 1..22: note = chemically synthesized
  source 1..22: mol_type = other DNA
gatgctttgtcctcccagatgt

SEQ ID NO: 13975 - DNA, 22 bp, synthetic construct
  misc_feature 1..22: note = chemically synthesized
  source 1..22: mol_type = other DNA
tgtcctcccagatgtcacacta

SEQ ID NO: 13976 - DNA, 22 bp, synthetic construct
  misc_feature 1..22: note = chemically synthesized
  source 1..22: mol_type = other DNA
gtcctcccagatgtcacactaa

SEQ ID NO: 13977 - DNA, 22 bp, synthetic construct
  misc_feature 1..22: note = chemically synthesized
  source 1..22: mol_type = other DNA
tcctcccagatgtcacactaat

SEQ ID NO: 13978 - DNA, 22 bp, synthetic construct
  misc_feature 1..22: note = chemically synthesized
  source 1..22: mol_type = other DNA
ccagatgtcacactaatgagat

SEQ ID NO: 13979 - DNA, 22 bp, synthetic construct
  misc_feature 1..22: note = chemically synthesized
  source 1..22: mol_type = other DNA
atgagatatatctaatggcctt

SEQ ID NO: 13980 - DNA, 22 bp, synthetic construct
  misc_feature 1..22: note = chemically synthesized
  source 1..22: mol_type = other DNA
atggccttgctttatgtcctgc

SEQ ID NO: 13981 - DNA, 22 bp, synthetic construct
  misc_feature 1..22: note = chemically synthesized
  source 1..22: mol_type = other DNA
gctttatgtcctgctttgtgag

SEQ ID NO: 13982 - DNA, 22 bp, synthetic construct
  misc_feature 1..22: note = chemically synthesized
  source 1..22: mol_type = other DNA
ctttatgtcctgctttgtgagt

SEQ ID NO: 13983 - DNA, 22 bp, synthetic construct
  misc_feature 1..22: note = chemically synthesized
  source 1..22: mol_type = other DNA
tatgtcctgctttgtgagtttt

SEQ ID NO: 13984 - DNA, 22 bp, synthetic construct
  misc_feature 1..22: note = chemically synthesized
  source 1..22: mol_type = other DNA
atgtcctgctttgtgagttttc

SEQ ID NO: 13985 - DNA, 22 bp, synthetic construct
  misc_feature 1..22: note = chemically synthesized
  source 1..22: mol_type = other DNA
tgtcctgctttgtgagttttcc

SEQ ID NO: 13986 - DNA, 22 bp, synthetic construct
  misc_feature 1..22: note = chemically synthesized
  source 1..22: mol_type = other DNA
ctttgtgagttttccaacaaat

SEQ ID NO: 13987 - DNA, 22 bp, synthetic construct
  misc_feature 1..22: note = chemically synthesized
  source 1..22: mol_type = other DNA
tgtgagttttccaacaaatttt

SEQ ID NO: 13988 - DNA, 22 bp, synthetic construct
  misc_feature 1..22: note = chemically synthesized
  source 1..22: mol_type = other DNA
gtgagttttccaacaaattttc

SEQ ID NO: 13989 - DNA, 22 bp, synthetic construct
  misc_feature 1..22: note = chemically synthesized
  source 1..22: mol_type = other DNA
tgagttttccaacaaattttct

SEQ ID NO: 13990 - DNA, 22 bp, synthetic construct
  misc_feature 1..22: note = chemically synthesized
  source 1..22: mol_type = other DNA
tccaacaaattttctttatccc

SEQ ID NO: 13991 - DNA, 22 bp, synthetic construct
  misc_feature 1..22: note = chemically synthesized
  source 1..22: mol_type = other DNA
ccaacaaattttctttatccct

SEQ ID NO: 13992 - DNA, 22 bp, synthetic construct
  misc_feature 1..22: note = chemically synthesized
  source 1..22: mol_type = other DNA
caacaaattttctttatccctt

SEQ ID NO: 13993 - DNA, 22 bp, synthetic construct
  misc_feature 1..22: note = chemically synthesized
  source 1..22: mol_type = other DNA
tctttatcccttgactttactc

SEQ ID NO: 13994 - DNA, 22 bp, synthetic construct
  misc_feature 1..22: note = chemically synthesized
  source 1..22: mol_type = other DNA
ctttatcccttgactttactca

SEQ ID NO: 13995 - DNA, 22 bp, synthetic construct
  misc_feature 1..22: note = chemically synthesized
  source 1..22: mol_type = other DNA
tttatcccttgactttactcac

SEQ ID NO: 13996 - DNA, 22 bp, synthetic construct
  misc_feature 1..22: note = chemically synthesized
  source 1..22: mol_type = other DNA
tatcccttgactttactcactt

SEQ ID NO: 13997 - DNA, 22 bp, synthetic construct
  misc_feature 1..22: note = chemically synthesized
  source 1..22: mol_type = other DNA
atcccttgactttactcacttt

SEQ ID NO: 13998 - DNA, 22 bp, synthetic construct
  misc_feature 1..22: note = chemically synthesized
  source 1..22: mol_type = other DNA
tcccttgactttactcactttg

SEQ ID NO: 13999 - DNA, 22 bp, synthetic construct
  misc_feature 1..22: note = chemically synthesized
  source 1..22: mol_type = other DNA
gactttactcactttgctagtt

SEQ ID NO: 14000 - DNA, 22 bp, synthetic construct
  misc_feature 1..22: note = chemically synthesized
  source 1..22: mol_type = other DNA
actttactcactttgctagttt

SEQ ID NO: 14001 - DNA, 22 bp, synthetic construct
  misc_feature 1..22: note = chemically synthesized
  source 1..22: mol_type = other DNA
tactcactttgctagtttaacc

SEQ ID NO: 14002 - DNA, 22 bp, synthetic construct
  misc_feature 1..22: note = chemically synthesized
  source 1..22: mol_type = other DNA
actcactttgctagtttaacct

SEQ ID NO: 14003 - DNA, 22 bp, synthetic construct
  misc_feature 1..22: note = chemically synthesized
  source 1..22: mol_type = other DNA
ctcactttgctagtttaacctc

SEQ ID NO: 14004 - DNA, 22 bp, synthetic construct
  misc_feature 1..22: note = chemically synthesized
  source 1..22: mol_type = other DNA
actttgctagtttaacctctgt

SEQ ID NO: 14005 - DNA, 22 bp, synthetic construct
  misc_feature 1..22: note = chemically synthesized
  source 1..22: mol_type = other DNA
tgctagtttaacctctgtattt

SEQ ID NO: 14006 - DNA, 22 bp, synthetic construct
  misc_feature 1..22: note = chemically synthesized
  source 1..22: mol_type = other DNA
gctagtttaacctctgtatttt

SEQ ID NO: 14007 - DNA, 22 bp, synthetic construct
  misc_feature 1..22: note = chemically synthesized
  source 1..22: mol_type = other DNA
ctagtttaacctctgtattttt

SEQ ID NO: 14008 - DNA, 22 bp, synthetic construct
  misc_feature 1..22: note = chemically synthesized
  source 1..22: mol_type = other DNA
gtttaacctctgtatttttttt

SEQ ID NO: 14009 - DNA, 22 bp, synthetic construct
  misc_feature 1..22: note = chemically synthesized
  source 1..22: mol_type = other DNA
aacctctgtatttttttttatc

SEQ ID NO: 14010 - DNA, 22 bp, synthetic construct
  misc_feature 1..22: note = chemically synthesized
  source 1..22: mol_type = other DNA
acctctgtatttttttttatcg

SEQ ID NO: 14011 - DNA, 22 bp, synthetic construct
  misc_feature 1..22: note = chemically synthesized
  source 1..22: mol_type = other DNA
tgtatttttttttatcgttatt

SEQ ID NO: 14012 - DNA, 22 bp, synthetic construct
  misc_feature 1..22: note = chemically synthesized
  source 1..22: mol_type = other DNA
tatttttttttatcgttatttc

SEQ ID NO: 14013 - DNA, 22 bp, synthetic construct
  misc_feature 1..22: note = chemically synthesized
  source 1..22: mol_type = other DNA
ttttttatcgttatttcagcat

SEQ ID NO: 14014 - DNA, 22 bp, synthetic construct
  misc_feature 1..22: note = chemically synthesized
  source 1..22: mol_type = other DNA
tttttatcgttatttcagcatt

SEQ ID NO: 14015 - DNA, 22 bp, synthetic construct
  misc_feature 1..22: note = chemically synthesized
  source 1..22: mol_type = other DNA
ttttatcgttatttcagcattt

SEQ ID NO: 14016 - DNA, 22 bp, synthetic construct
  misc_feature 1..22: note = chemically synthesized
  source 1..22: mol_type = other DNA
tttatcgttatttcagcatttc

SEQ ID NO: 14017 - DNA, 22 bp, synthetic construct
  misc_feature 1..22: note = chemically synthesized
  source 1..22: mol_type = other DNA
ttatcgttatttcagcatttca

SEQ ID NO: 14018 - DNA, 22 bp, synthetic construct
  misc_feature 1..22: note = chemically synthesized
  source 1..22: mol_type = other DNA
tatcgttatttcagcatttcag

SEQ ID NO: 14019 - DNA, 22 bp, synthetic construct
  misc_feature 1..22: note = chemically synthesized
  source 1..22: mol_type = other DNA
atcgttatttcagcatttcagt

SEQ ID NO: 14020 - DNA, 22 bp, synthetic construct
  misc_feature 1..22: note = chemically synthesized
  source 1..22: mol_type = other DNA
tcgttatttcagcatttcagtc

SEQ ID NO: 14021 - DNA, 22 bp, synthetic construct
  misc_feature 1..22: note = chemically synthesized
  source 1..22: mol_type = other DNA
tttcagcatttcagtctgattt

SEQ ID NO: 14022 - DNA, 22 bp, synthetic construct
  misc_feature 1..22: note = chemically synthesized
  source 1..22: mol_type = other DNA
cagcatttcagtctgatttcac

SEQ ID NO: 14023 - DNA, 22 bp, synthetic construct
  misc_feature 1..22: note = chemically synthesized
  source 1..22: mol_type = other DNA
agcatttcagtctgatttcaca

SEQ ID NO: 14024 - DNA, 22 bp, synthetic construct
  misc_feature 1..22: note = chemically synthesized
  source 1..22: mol_type = other DNA
cagtctgatttcacagctgaca

SEQ ID NO: 14025 - DNA, 22 bp, synthetic construct
  misc_feature 1..22: note = chemically synthesized
  source 1..22: mol_type = other DNA
agtctgatttcacagctgacat

SEQ ID NO: 14026 - DNA, 22 bp, synthetic construct
  misc_feature 1..22: note = chemically synthesized
  source 1..22: mol_type = other DNA
atttcacagctgacatcatgtc

SEQ ID NO: 14027 - DNA, 22 bp, synthetic construct
  misc_feature 1..22: note = chemically synthesized
  source 1..22: mol_type = other DNA
cacagctgacatcatgtctgga

SEQ ID NO: 14028 - DNA, 22 bp, synthetic construct
  misc_feature 1..22: note = chemically synthesized
  source 1..22: mol_type = other DNA
acagctgacatcatgtctggag

SEQ ID NO: 14029 - DNA, 22 bp, synthetic construct
  misc_feature 1..22: note = chemically synthesized
  source 1..22: mol_type = other DNA
acatcatgtctggagtgggaac

SEQ ID NO: 14030 - DNA, 22 bp, synthetic construct
  misc_feature 1..22: note = chemically synthesized
  source 1..22: mol_type = other DNA
gagtgggaaccacagggccagt

SEQ ID NO: 14031 - DNA, 22 bp, synthetic construct
  misc_feature 1..22: note = chemically synthesized
  source 1..22: mol_type = other DNA
tctgggggtgcttagggttggc

SEQ ID NO: 14032 - DNA, 22 bp, synthetic construct
  misc_feature 1..22: note = chemically synthesized
  source 1..22: mol_type = other DNA
ctgggggtgcttagggttggca

SEQ ID NO: 14033 - DNA, 22 bp, synthetic construct
  misc_feature 1..22: note = chemically synthesized
  source 1..22: mol_type = other DNA
tgggggtgcttagggttggcac

SEQ ID NO: 14034 - DNA, 22 bp, synthetic construct
  misc_feature 1..22: note = chemically synthesized
  source 1..22: mol_type = other DNA
ggggtgcttagggttggcaccc

SEQ ID NO: 14035 - DNA, 22 bp, synthetic construct
  misc_feature 1..22: note = chemically synthesized
  source 1..22: mol_type = other DNA
agggttggcacccctgatcctg

SEQ ID NO: 14036 - DNA, 22 bp, synthetic construct
  misc_feature 1..22: note = chemically synthesized
  source 1..22: mol_type = other DNA
gggttggcacccctgatcctgg

SEQ ID NO: 14037 - DNA, 22 bp, synthetic construct
  misc_feature 1..22: note = chemically synthesized
  source 1..22: mol_type = other DNA
gcacccctgatcctggtactgt

SEQ ID NO: 14038 - DNA, 22 bp, synthetic construct
  misc_feature 1..22: note = chemically synthesized
  source 1..22: mol_type = other DNA
atcctggtactgtcagctacta

SEQ ID NO: 14039 - DNA, 22 bp, synthetic construct
  misc_feature 1..22: note = chemically synthesized
  source 1..22: mol_type = other DNA
gtactgtcagctactagatttg

SEQ ID NO: 14040 - DNA, 22 bp, synthetic construct
  misc_feature 1..22: note = chemically synthesized
  source 1..22: mol_type = other DNA
tcagctactagatttgattcta

SEQ ID NO: 14041 - DNA, 22 bp, synthetic construct
  misc_feature 1..22: note = chemically synthesized
  source 1..22: mol_type = other DNA
ctagatttgattctagaaagtt

SEQ ID NO: 14042 - DNA, 22 bp, synthetic construct
  misc_feature 1..22: note = chemically synthesized
  source 1..22: mol_type = other DNA
gatttgattctagaaagttgac

SEQ ID NO: 14043 - DNA, 22 bp, synthetic construct
  misc_feature 1..22: note = chemically synthesized
  source 1..22: mol_type = other DNA
gattctagaaagttgacaagta

SEQ ID NO: 14044 - DNA, 22 bp, synthetic construct
  misc_feature 1..22: note = chemically synthesized
  source 1..22: mol_type = other DNA
attctagaaagttgacaagtaa

SEQ ID NO: 14045 - DNA, 22 bp, synthetic construct
  misc_feature 1..22: note = chemically synthesized
  source 1..22: mol_type = other DNA
tagaaagttgacaagtaagtgt

SEQ ID NO: 14046 - DNA, 22 bp, synthetic construct
  misc_feature 1..22: note = chemically synthesized
  source 1..22: mol_type = other DNA
gaaagttgacaagtaagtgtga

SEQ ID NO: 14047 - DNA, 22 bp, synthetic construct
  misc_feature 1..22: note = chemically synthesized
  source 1..22: mol_type = other DNA
acaagtaagtgtgataaatgct

SEQ ID NO: 14048 - DNA, 22 bp, synthetic construct
  misc_feature 1..22: note = chemically synthesized
  source 1..22: mol_type = other DNA
cctgtgagaacatgctgtttgt

SEQ ID NO: 14049 - DNA, 22 bp, synthetic construct
  misc_feature 1..22: note = chemically synthesized
  source 1..22: mol_type = other DNA
ctgtgagaacatgctgtttgtc

SEQ ID NO: 14050 - DNA, 22 bp, synthetic construct
  misc_feature 1..22: note = chemically synthesized
  source 1..22: mol_type = other DNA
tgagaacatgctgtttgtccaa

SEQ ID NO: 14051 - DNA, 22 bp, synthetic construct
  misc_feature 1..22: note = chemically synthesized
  source 1..22: mol_type = other DNA
tttgtccaaatgggataatttc

SEQ ID NO: 14052 - DNA, 22 bp, synthetic construct
  misc_feature 1..22: note = chemically synthesized
  source 1..22: mol_type = other DNA
gtccaaatgggataatttcttc

SEQ ID NO: 14053 - DNA, 22 bp, synthetic construct
  misc_feature 1..22: note = chemically synthesized
  source 1..22: mol_type = other DNA
tccaaatgggataatttcttcc

SEQ ID NO: 14054 - DNA, 22 bp, synthetic construct
  misc_feature 1..22: note = chemically synthesized
  source 1..22: mol_type = other DNA
cttccctgtatgccttcctctg

SEQ ID NO: 14055 - DNA, 22 bp, synthetic construct
  misc_feature 1..22: note = chemically synthesized
  source 1..22: mol_type = other DNA
ttccctgtatgccttcctctgg

SEQ ID NO: 14056 - DNA, 22 bp, synthetic construct
  misc_feature 1..22: note = chemically synthesized
  source 1..22: mol_type = other DNA
ccctgtatgccttcctctggga

SEQ ID NO: 14057 - DNA, 22 bp, synthetic construct
  misc_feature 1..22: note = chemically synthesized
  source 1..22: mol_type = other DNA
cctgtatgccttcctctgggaa

SEQ ID NO: 14058 - DNA, 22 bp, synthetic construct
  misc_feature 1..22: note = chemically synthesized
  source 1..22: mol_type = other DNA
tatgccttcctctgggaaatac

SEQ ID NO: 14059 - DNA, 22 bp, synthetic construct
  misc_feature 1..22: note = chemically synthesized
  source 1..22: mol_type = other DNA
cctctgggaaatacataaagtc

SEQ ID NO: 14060 - DNA, 22 bp, synthetic construct
  misc_feature 1..22: note = chemically synthesized
  source 1..22: mol_type = other DNA
ctctgggaaatacataaagtca

SEQ ID NO: 14061 - DNA, 22 bp, synthetic construct
  misc_feature 1..22: note = chemically synthesized
  source 1..22: mol_type = other DNA
tgggaaatacataaagtcactg

SEQ ID NO: 14062 - DNA, 22 bp, synthetic construct
  misc_feature 1..22: note = chemically synthesized
  source 1..22: mol_type = other DNA
ggaaatacataaagtcactgta

SEQ ID NO: 14063 - DNA, 22 bp, synthetic construct
  misc_feature 1..22: note = chemically synthesized
  source 1..22: mol_type = other DNA
tagttgtgaaaaaacaaagtga

SEQ ID NO: 14064 - DNA, 22 bp, synthetic construct
  misc_feature 1..22: note = chemically synthesized
  source 1..22: mol_type = other DNA
tgaaaaaacaaagtgatatatg

SEQ ID NO: 14065 - DNA, 22 bp, synthetic construct
  misc_feature 1..22: note = chemically synthesized
  source 1..22: mol_type = other DNA
cattagctaacttcctactctt

SEQ ID NO: 14066 - DNA, 22 bp, synthetic construct
  misc_feature 1..22: note = chemically synthesized
  source 1..22: mol_type = other DNA
gctaacttcctactctttatgt

SEQ ID NO: 14067 - DNA, 22 bp, synthetic construct
  misc_feature 1..22: note = chemically synthesized
  source 1..22: mol_type = other DNA
acttcctactctttatgtcaat

SEQ ID NO: 14068 - DNA, 22 bp, synthetic construct
  misc_feature 1..22: note = chemically synthesized
  source 1..22: mol_type = other DNA
cctactctttatgtcaattctt

SEQ ID NO: 14069 - DNA, 22 bp, synthetic construct
  misc_feature 1..22: note = chemically synthesized
  source 1..22: mol_type = other DNA
ctactctttatgtcaattctta

SEQ ID NO: 14070 - DNA, 22 bp, synthetic construct
  misc_feature 1..22: note = chemically synthesized
  source 1..22: mol_type = other DNA
ctctttatgtcaattcttaagc

SEQ ID NO: 14071 - DNA, 22 bp, synthetic construct
  misc_feature 1..22: note = chemically synthesized
  source 1..22: mol_type = other DNA
tttatgtcaattcttaagcttg

SEQ ID NO: 14072 - DNA, 22 bp, synthetic construct
  misc_feature 1..22: note = chemically synthesized
  source 1..22: mol_type = other DNA
tatgtcaattcttaagcttgct

SEQ ID NO: 14073 - DNA, 22 bp, synthetic construct
  misc_feature 1..22: note = chemically synthesized
  source 1..22: mol_type = other DNA
atgtcaattcttaagcttgctt

SEQ ID NO: 14074 - DNA, 22 bp, synthetic construct
  misc_feature 1..22: note = chemically synthesized
  source 1..22: mol_type = other DNA
tgtcaattcttaagcttgcttt

SEQ ID NO: 14075 - DNA, 22 bp, synthetic construct
  misc_feature 1..22: note = chemically synthesized
  source 1..22: mol_type = other DNA
ttaagcttgcttttctccccta

SEQ ID NO: 14076 - DNA, 22 bp, synthetic construct
  misc_feature 1..22: note = chemically synthesized
  source 1..22: mol_type = other DNA
aagcttgcttttctcccctagg

SEQ ID NO: 14077 - DNA, 22 bp, synthetic construct
  misc_feature 1..22: note = chemically synthesized
  source 1..22: mol_type = other DNA
agcttgcttttctcccctaggg

SEQ ID NO: 14078 - DNA, 22 bp, synthetic construct
  misc_feature 1..22: note = chemically synthesized
  source 1..22: mol_type = other DNA
gcttttctcccctagggaactc

SEQ ID NO: 14079 - DNA, 22 bp, synthetic construct
  misc_feature 1..22: note = chemically synthesized
  source 1..22: mol_type = other DNA
cttttctcccctagggaactca

SEQ ID NO: 14080 - DNA, 22 bp, synthetic construct
  misc_feature 1..22: note = chemically synthesized
  source 1..22: mol_type = other DNA
ttctcccctagggaactcaact

SEQ ID NO: 14081 - DNA, 22 bp, synthetic construct
  misc_feature 1..22: note = chemically synthesized
  source 1..22: mol_type = other DNA
tctcccctagggaactcaactg

SEQ ID NO: 14082 - DNA, 22 bp, synthetic construct
  misc_feature 1..22: note = chemically synthesized
  source 1..22: mol_type = other DNA
ctcccctagggaactcaactga

SEQ ID NO: 14083 - DNA, 22 bp, synthetic construct
  misc_feature 1..22: note = chemically synthesized
  source 1..22: mol_type = other DNA
tcccctagggaactcaactgag

SEQ ID NO: 14084 - DNA, 22 bp, synthetic construct
  misc_feature 1..22: note = chemically synthesized
  source 1..22: mol_type = other DNA
ccctagggaactcaactgagta

SEQ ID NO: 14085 - DNA, 22 bp, synthetic construct
  misc_feature 1..22: note = chemically synthesized
  source 1..22: mol_type = other DNA
gggaactcaactgagtattgtg

SEQ ID NO: 14086 - DNA, 22 bp, synthetic construct
  misc_feature 1..22: note = chemically synthesized
  source 1..22: mol_type = other DNA
aactgagtattgtgtttcccca

SEQ ID NO: 14087 - DNA, 22 bp, synthetic construct
  misc_feature 1..22: note = chemically synthesized
  source 1..22: mol_type = other DNA
agtattgtgtttccccaaatat

SEQ ID NO: 14088 - DNA, 22 bp, synthetic construct
  misc_feature 1..22: note = chemically synthesized
  source 1..22: mol_type = other DNA
tgtttccccaaatatcaactcc

SEQ ID NO: 14089 - DNA, 22 bp, synthetic construct
  misc_feature 1..22: note = chemically synthesized
  source 1..22: mol_type = other DNA
ccccaaatatcaactccaagat

SEQ ID NO: 14090 - DNA, 22 bp, synthetic construct
  misc_feature 1..22: note = chemically synthesized
  source 1..22: mol_type = other DNA
cccaaatatcaactccaagatg

SEQ ID NO: 14091 - DNA, 22 bp, synthetic construct
  misc_feature 1..22: note = chemically synthesized
  source 1..22: mol_type = other DNA
caagatgtttgacatagagaca

SEQ ID NO: 14092 - DNA, 22 bp, synthetic construct
  misc_feature 1..22: note = chemically synthesized
  source 1..22: mol_type = other DNA
gacatagagacaaaatgatttt

SEQ ID NO: 14093 - DNA, 22 bp, synthetic construct
  misc_feature 1..22: note = chemically synthesized
  source 1..22: mol_type = other DNA
acatagagacaaaatgattttt

SEQ ID NO: 14094 - DNA, 22 bp, synthetic construct
  misc_feature 1..22: note = chemically synthesized
  source 1..22: mol_type = other DNA
tttcctaatccatgaaaagctt

SEQ ID NO: 14095 - DNA, 22 bp, synthetic construct
  misc_feature 1..22: note = chemically synthesized
  source 1..22: mol_type = other DNA
ttcctaatccatgaaaagcttt

SEQ ID NO: 14096 - DNA, 22 bp, synthetic construct
  misc_feature 1..22: note = chemically synthesized
  source 1..22: mol_type = other DNA
tcctaatccatgaaaagctttg

SEQ ID NO: 14097 - DNA, 22 bp, synthetic construct
  misc_feature 1..22: note = chemically synthesized
  source 1..22: mol_type = other DNA
cctaatccatgaaaagctttgg

SEQ ID NO: 14098 - DNA, 22 bp, synthetic construct
  misc_feature 1..22: note = chemically synthesized
  source 1..22: mol_type = other DNA
ctaatccatgaaaagctttggt

SEQ ID NO: 14099 - DNA, 22 bp, synthetic construct
  misc_feature 1..22: note = chemically synthesized
  source 1..22: mol_type = other DNA
atccatgaaaagctttggtgat

SEQ ID NO: 14100 - DNA, 22 bp, synthetic construct
  misc_feature 1..22: note = chemically synthesized
  source 1..22: mol_type = other DNA
tggtgataactaacagcttgct

SEQ ID NO: 14101 - DNA, 22 bp, synthetic construct
  misc_feature 1..22: note = chemically synthesized
  source 1..22: mol_type = other DNA
ggtgataactaacagcttgcta

SEQ ID NO: 14102 - DNA, 22 bp, synthetic construct
  misc_feature 1..22: note = chemically synthesized
  source 1..22: mol_type = other DNA
gtgataactaacagcttgctaa

SEQ ID NO: 14103 - DNA, 22 bp, synthetic construct
  misc_feature 1..22: note = chemically synthesized
  source 1..22: mol_type = other DNA
acagcttgctaatgaaaggtta

SEQ ID NO: 14104 - DNA, 22 bp, synthetic construct
  misc_feature 1..22: note = chemically synthesized
  source 1..22: mol_type = other DNA
gctaatgaaaggttaatcttta

SEQ ID NO: 14105 - DNA, 22 bp, synthetic construct
  misc_feature 1..22: note = chemically synthesized
  source 1..22: mol_type = other DNA
ctaatgaaaggttaatctttat

SEQ ID NO: 14106 - DNA, 22 bp, synthetic construct
  misc_feature 1..22: note = chemically synthesized
  source 1..22: mol_type = other DNA
atgaaaggttaatctttatgtt

SEQ ID NO: 14107 - DNA, 22 bp, synthetic construct
  misc_feature 1..22: note = chemically synthesized
  source 1..22: mol_type = other DNA
atctttatgttttaactaaaac

SEQ ID NO: 14108 - DNA, 22 bp, synthetic construct
  misc_feature 1..22: note = chemically synthesized
  source 1..22: mol_type = other DNA
tatgttttaactaaaactttaa

SEQ ID NO: 14109 - DNA, 22 bp, synthetic construct
  misc_feature 1..22: note = chemically synthesized
  source 1..22: mol_type = other DNA
atgttttaactaaaactttaaa

SEQ ID NO: 14110 - DNA, 22 bp, synthetic construct
  misc_feature 1..22: note = chemically synthesized
  source 1..22: mol_type = other DNA
tgttttaactaaaactttaaat

SEQ ID NO: 14111 - DNA, 22 bp, synthetic construct
  misc_feature 1..22: note = chemically synthesized
  source 1..22: mol_type = other DNA
taactaaaactttaaattgaag

SEQ ID NO: 14112 - DNA, 22 bp, synthetic construct
  misc_feature 1..22: note = chemically synthesized
  source 1..22: mol_type = other DNA
aactaaaactttaaattgaaga

SEQ ID NO: 14113 - DNA, 22 bp, synthetic construct
  misc_feature 1..22: note = chemically synthesized
  source 1..22: mol_type = other DNA
actaaaactttaaattgaagat

SEQ ID NO: 14114 - DNA, 22 bp, synthetic construct
  misc_feature 1..22: note = chemically synthesized
  source 1..22: mol_type = other DNA
aaactttaaattgaagatatat

SEQ ID NO: 14115 - DNA, 22 bp, synthetic construct
  misc_feature 1..22: note = chemically synthesized
  source 1..22: mol_type = other DNA
taaattgaagatatataattta

SEQ ID NO: 14116 - DNA, 22 bp, synthetic construct
  misc_feature 1..22: note = chemically synthesized
  source 1..22: mol_type = other DNA
aaattgaagatatataatttaa

SEQ ID NO: 14117 - DNA, 22 bp, synthetic construct
  misc_feature 1..22: note = chemically synthesized
  source 1..22: mol_type = other DNA
aattgaagatatataatttaaa

SEQ ID NO: 14118 - DNA, 22 bp, synthetic construct
  misc_feature 1..22: note = chemically synthesized
  source 1..22: mol_type = other DNA
aagatatataatttaaaaaatt

SEQ ID NO: 14119 - DNA, 22 bp, synthetic construct
  misc_feature 1..22: note = chemically synthesized
  source 1..22: mol_type = other DNA
aaaaaattagagacacacctca

SEQ ID NO: 14120 - DNA, 22 bp, synthetic construct
  misc_feature 1..22: note = chemically synthesized
  source 1..22: mol_type = other DNA
aaaaattagagacacacctcat

SEQ ID NO: 14121 - DNA, 22 bp, synthetic construct
  misc_feature 1..22: note = chemically synthesized
  source 1..22: mol_type = other DNA
gagacacacctcattacatact

SEQ ID NO: 14122 - DNA, 22 bp, synthetic construct
  misc_feature 1..22: note = chemically synthesized
  source 1..22: mol_type = other DNA
attacatacttctgaaaccttg

SEQ ID NO: 14123 - DNA, 22 bp, synthetic construct
  misc_feature 1..22: note = chemically synthesized
  source 1..22: mol_type = other DNA
catacttctgaaaccttgaaat

SEQ ID NO: 14124 - DNA, 22 bp, synthetic construct
  misc_feature 1..22: note = chemically synthesized
  source 1..22: mol_type = other DNA
ctgaaaccttgaaatgtcatat

SEQ ID NO: 14125 - DNA, 22 bp, synthetic construct
  misc_feature 1..22: note = chemically synthesized
  source 1..22: mol_type = other DNA
tgaaaccttgaaatgtcatata

SEQ ID NO: 14126 - DNA, 22 bp, synthetic construct
  misc_feature 1..22: note = chemically synthesized
  source 1..22: mol_type = other DNA
aaaccttgaaatgtcatatatc

SEQ ID NO: 14127 - DNA, 22 bp, synthetic construct
  misc_feature 1..22: note = chemically synthesized
  source 1..22: mol_type = other DNA
gaaatgtcatatatcttaaaat

SEQ ID NO: 14128 - DNA, 22 bp, synthetic construct
  misc_feature 1..22: note = chemically synthesized
  source 1..22: mol_type = other DNA
aaatgtcatatatcttaaaatc

SEQ ID NO: 14129 - DNA, 22 bp, synthetic construct
  misc_feature 1..22: note = chemically synthesized
  source 1..22: mol_type = other DNA
aaaatcagactttttgtgtaaa

SEQ ID NO: 14130 - DNA, 22 bp, synthetic construct
  misc_feature 1..22: note = chemically synthesized
  source 1..22: mol_type = other DNA
aaatcagactttttgtgtaaat

SEQ ID NO: 14131 - DNA, 22 bp, synthetic construct
  misc_feature 1..22: note = chemically synthesized
  source 1..22: mol_type = other DNA
tttgtgtaaataaggccattgt

SEQ ID NO: 14132 - DNA, 22 bp, synthetic construct
  misc_feature 1..22: note = chemically synthesized
  source 1..22: mol_type = other DNA
ttgtgtaaataaggccattgtt

SEQ ID NO: 14133 - DNA, 22 bp, synthetic construct
  misc_feature 1..22: note = chemically synthesized
  source 1..22: mol_type = other DNA
tgtgtaaataaggccattgttt

SEQ ID NO: 14134 - DNA, 22 bp, synthetic construct
  misc_feature 1..22: note = chemically synthesized
  source 1..22: mol_type = other DNA
gtgtaaataaggccattgtttg

SEQ ID NO: 14135 - DNA, 22 bp, synthetic construct
  misc_feature 1..22: note = chemically synthesized
  source 1..22: mol_type = other DNA
tgtaaataaggccattgtttgt

SEQ ID NO: 14136 - DNA, 22 bp, synthetic construct
  misc_feature 1..22: note = chemically synthesized
  source 1..22: mol_type = other DNA
tttgtgcttttgtttcccattt

SEQ ID NO: 14137 - DNA, 22 bp, synthetic construct
  misc_feature 1..22: note = chemically synthesized
  source 1..22: mol_type = other DNA
gtgcttttgtttcccattttga

SEQ ID NO: 14138 - DNA, 22 bp, synthetic construct
  misc_feature 1..22: note = chemically synthesized
  source 1..22: mol_type = other DNA
tgcttttgtttcccattttgat

SEQ ID NO: 14139 - DNA, 22 bp, synthetic construct
  misc_feature 1..22: note = chemically synthesized
  source 1..22: mol_type = other DNA
ttgtttcccattttgatttcaa

SEQ ID NO: 14140 - DNA, 22 bp, synthetic construct
  misc_feature 1..22: note = chemically synthesized
  source 1..22: mol_type = other DNA
tgtttcccattttgatttcaaa

SEQ ID NO: 14141 - DNA, 22 bp, synthetic construct
  misc_feature 1..22: note = chemically synthesized
  source 1..22: mol_type = other DNA
gtttcccattttgatttcaaag

SEQ ID NO: 14142 - DNA, 22 bp, synthetic construct
  misc_feature 1..22: note = chemically synthesized
  source 1..22: mol_type = other DNA
tttcccattttgatttcaaagt

SEQ ID NO: 14143 - DNA, 22 bp, synthetic construct
  misc_feature 1..22: note = chemically synthesized
  source 1..22: mol_type = other DNA
cccattttgatttcaaagtggt

SEQ ID NO: 14144 - DNA, 22 bp, synthetic construct
  misc_feature 1..22: note = chemically synthesized
  source 1..22: mol_type = other DNA
ccattttgatttcaaagtggta

SEQ ID NO: 14145 - DNA, 22 bp, synthetic construct
  misc_feature 1..22: note = chemically synthesized
  source 1..22: mol_type = other DNA
tgatttcaaagtggtaagtcca

SEQ ID NO: 14146 - DNA, 22 bp, synthetic construct
  misc_feature 1..22: note = chemically synthesized
  source 1..22: mol_type = other DNA
gatttcaaagtggtaagtccaa

SEQ ID NO: 14147 - DNA, 22 bp, synthetic construct
  misc_feature 1..22: note = chemically synthesized
  source 1..22: mol_type = other DNA
atttcaaagtggtaagtccaaa

SEQ ID NO: 14148 - DNA, 22 bp, synthetic construct
  misc_feature 1..22: note = chemically synthesized
  source 1..22: mol_type = other DNA
caaagtggtaagtccaaacaaa

SEQ ID NO: 14149 - DNA, 22 bp, synthetic construct
  misc_feature 1..22: note = chemically synthesized
  source 1..22: mol_type = other DNA
aaagtggtaagtccaaacaaaa

SEQ ID NO: 14150 - DNA, 22 bp, synthetic construct
  misc_feature 1..22: note = chemically synthesized
  source 1..22: mol_type = other DNA
ttttttttcactatattctgct

SEQ ID NO: 14151 - DNA, 22 bp, synthetic construct
  misc_feature 1..22: note = chemically synthesized
  source 1..22: mol_type = other DNA
tttttcactatattctgctatt

SEQ ID NO: 14152 - DNA, 22 bp, synthetic construct
  misc_feature 1..22: note = chemically synthesized
  source 1..22: mol_type = other DNA
ttttcactatattctgctattt

SEQ ID NO: 14153 - DNA, 22 bp, synthetic construct
  misc_feature 1..22: note = chemically synthesized
  source 1..22: mol_type = other DNA
tttcactatattctgctatttc

SEQ ID NO: 14154 - DNA, 22 bp, synthetic construct
  misc_feature 1..22: note = chemically synthesized
  source 1..22: mol_type = other DNA
ttcactatattctgctatttct

SEQ ID NO: 14155 - DNA, 22 bp, synthetic construct
  misc_feature 1..22: note = chemically synthesized
  source 1..22: mol_type = other DNA
tcactatattctgctatttctt

SEQ ID NO: 14156 - DNA, 22 bp, synthetic construct
  misc_feature 1..22: note = chemically synthesized
  source 1..22: mol_type = other DNA
cactatattctgctatttcttt

SEQ ID NO: 14157 - DNA, 22 bp, synthetic construct
  misc_feature 1..22: note = chemically synthesized
  source 1..22: mol_type = other DNA
actatattctgctatttctttg

SEQ ID NO: 14158 - DNA, 22 bp, synthetic construct
  misc_feature 1..22: note = chemically synthesized
  source 1..22: mol_type = other DNA
tattctgctatttctttgtttt

SEQ ID NO: 14159 - DNA, 22 bp, synthetic construct
  misc_feature 1..22: note = chemically synthesized
  source 1..22: mol_type = other DNA
tgctatttctttgttttcccac

SEQ ID NO: 14160 - DNA, 22 bp, synthetic construct
  misc_feature 1..22: note = chemically synthesized
  source 1..22: mol_type = other DNA
ctatttctttgttttcccactt

SEQ ID NO: 14161 - DNA, 22 bp, synthetic construct
  misc_feature 1..22: note = chemically synthesized
  source 1..22: mol_type = other DNA
tttctttgttttcccactttta

SEQ ID NO: 14162 - DNA, 22 bp, synthetic construct
  misc_feature 1..22: note = chemically synthesized
  source 1..22: mol_type = other DNA
ctttgttttcccacttttaatt

SEQ ID NO: 14163 - DNA, 22 bp, synthetic construct
  misc_feature 1..22: note = chemically synthesized
  source 1..22: mol_type = other DNA
tttgttttcccacttttaattt

SEQ ID NO: 14164 - DNA, 22 bp, synthetic construct
  misc_feature 1..22: note = chemically synthesized
  source 1..22: mol_type = other DNA
tgttttcccacttttaattttt

SEQ ID NO: 14165 - DNA, 22 bp, synthetic construct
  misc_feature 1..22: note = chemically synthesized
  source 1..22: mol_type = other DNA
gttttcccacttttaatttttt

SEQ ID NO: 14166 - DNA, 22 bp, synthetic construct
  misc_feature 1..22: note = chemically synthesized
  source 1..22: mol_type = other DNA
ttttcccacttttaattttttt

SEQ ID NO: 14167 - DNA, 22 bp, synthetic construct
  misc_feature 1..22: note = chemically synthesized
  source 1..22: mol_type = other DNA
tcccacttttaatttttttaaa

SEQ ID NO: 14168 - DNA, 22 bp, synthetic construct
  misc_feature 1..22: note = chemically synthesized
  source 1..22: mol_type = other DNA
cccacttttaatttttttaaac

SEQ ID NO: 14169 - DNA, 22 bp, synthetic construct
  misc_feature 1..22: note = chemically synthesized
  source 1..22: mol_type = other DNA
ccacttttaatttttttaaacc

SEQ ID NO: 14170 - DNA, 22 bp, synthetic construct
  misc_feature 1..22: note = chemically synthesized
  source 1..22: mol_type = other DNA
ttaatttttttaaaccaaggag

SEQ ID NO: 14171 - DNA, 22 bp, synthetic construct
  misc_feature 1..22: note = chemically synthesized
  source 1..22: mol_type = other DNA
taatttttttaaaccaaggaga

SEQ ID NO: 14172 - DNA, 22 bp, synthetic construct
  misc_feature 1..22: note = chemically synthesized
  source 1..22: mol_type = other DNA
aatttttttaaaccaaggagat

SEQ ID NO: 14173 - DNA, 22 bp, synthetic construct
  misc_feature 1..22: note = chemically synthesized
  source 1..22: mol_type = other DNA
atttttttaaaccaaggagatg

SEQ ID NO: 14174 - DNA, 22 bp, synthetic construct
  misc_feature 1..22: note = chemically synthesized
  source 1..22: mol_type = other DNA
ttttaaaccaaggagatgaatg

SEQ ID NO: 14175 - DNA, 22 bp, synthetic construct
  misc_feature 1..22: note = chemically synthesized
  source 1..22: mol_type = other DNA
tttaaaccaaggagatgaatgt

SEQ ID NO: 14176 - DNA, 22 bp, synthetic construct
  misc_feature 1..22: note = chemically synthesized
  source 1..22: mol_type = other DNA
ttaaaccaaggagatgaatgtt

SEQ ID NO: 14177 - DNA, 22 bp, synthetic construct
  misc_feature 1..22: note = chemically synthesized
  source 1..22: mol_type = other DNA
taaaccaaggagatgaatgttt

SEQ ID NO: 14178 - DNA, 22 bp, synthetic construct
  misc_feature 1..22: note = chemically synthesized
  source 1..22: mol_type = other DNA
aaaccaaggagatgaatgtttt

SEQ ID NO: 14179 - DNA, 22 bp, synthetic construct
  misc_feature 1..22: note = chemically synthesized
  source 1..22: mol_type = other DNA
aaccaaggagatgaatgttttc

SEQ ID NO: 14180 - DNA, 22 bp, synthetic construct
  misc_feature 1..22: note = chemically synthesized
  source 1..22: mol_type = other DNA
tctaacaggaattacatgacca

SEQ ID NO: 14181 - DNA, 22 bp, synthetic construct
  misc_feature 1..22: note = chemically synthesized
  source 1..22: mol_type = other DNA
ctaacaggaattacatgaccaa

SEQ ID NO: 14182 - DNA, 22 bp, synthetic construct
  misc_feature 1..22: note = chemically synthesized
  source 1..22: mol_type = other DNA
taacaggaattacatgaccaaa

SEQ ID NO: 14183 - DNA, 22 bp, synthetic construct
  misc_feature 1..22: note = chemically synthesized
  source 1..22: mol_type = other DNA
acaggaattacatgaccaaatc

SEQ ID NO: 14184 - DNA, 22 bp, synthetic construct
  misc_feature 1..22: note = chemically synthesized
  source 1..22: mol_type = other DNA
catgaccaaatcatgaactgaa

SEQ ID NO: 14185 - DNA, 22 bp, synthetic construct
  misc_feature 1..22: note = chemically synthesized
  source 1..22: mol_type = other DNA
aacagtgtttattaaacataaa

SEQ ID NO: 14186 - DNA, 22 bp, synthetic construct
  misc_feature 1..22: note = chemically synthesized
  source 1..22: mol_type = other DNA
attaaacataaatgcatcataa

SEQ ID NO: 14187 - DNA, 22 bp, synthetic construct
  misc_feature 1..22: note = chemically synthesized
  source 1..22: mol_type = other DNA
ttaaacataaatgcatcataag

SEQ ID NO: 14188 - DNA, 22 bp, synthetic construct
  misc_feature 1..22: note = chemically synthesized
  source 1..22: mol_type = other DNA
aacataaatgcatcataagcat

SEQ ID NO: 14189 - DNA, 22 bp, synthetic construct
  misc_feature 1..22: note = chemically synthesized
  source 1..22: mol_type = other DNA
tcgatctatttagttttaaaaa

SEQ ID NO: 14190 - DNA, 22 bp, synthetic construct
  misc_feature 1..22: note = chemically synthesized
  source 1..22: mol_type = other DNA
tttagttttaaaaatgaagaag

SEQ ID NO: 14191 - DNA, 22 bp, synthetic construct
  misc_feature 1..22: note = chemically synthesized
  source 1..22: mol_type = other DNA
agttttaaaaatgaagaagaag

SEQ ID NO: 14192 - DNA, 22 bp, synthetic construct
  misc_feature 1..22: note = chemically synthesized
  source 1..22: mol_type = other DNA
gttttaaaaatgaagaagaaga

SEQ ID NO: 14193 - DNA, 22 bp, synthetic construct
  misc_feature 1..22: note = chemically synthesized
  source 1..22: mol_type = other DNA
taaaaatgaagaagaagaaaac

SEQ ID NO: 14194 - DNA, 22 bp, synthetic construct
  misc_feature 1..22: note = chemically synthesized
  source 1..22: mol_type = other DNA
aaaaatgaagaagaagaaaacc

SEQ ID NO: 14195 - DNA, 22 bp, synthetic construct
  misc_feature 1..22: note = chemically synthesized
  source 1..22: mol_type = other DNA
aaaatgaagaagaagaaaacct

SEQ ID NO: 14196 - DNA, 22 bp, synthetic construct
  misc_feature 1..22: note = chemically synthesized
  source 1..22: mol_type = other DNA
gctaacaaagaaccagtactta

SEQ ID NO: 14197 - DNA, 22 bp, synthetic construct
  misc_feature 1..22: note = chemically synthesized
  source 1..22: mol_type = other DNA
acaaagaaccagtacttaccaa

SEQ ID NO: 14198 - DNA, 22 bp, synthetic construct
  misc_feature 1..22: note = chemically synthesized
  source 1..22: mol_type = other DNA
accaacctgcgtgctggctgtt

SEQ ID NO: 14199 - DNA, 22 bp, synthetic construct
  misc_feature 1..22: note = chemically synthesized
  source 1..22: mol_type = other DNA
ccaacctgcgtgctggctgtta

SEQ ID NO: 14200 - DNA, 22 bp, synthetic construct
  misc_feature 1..22: note = chemically synthesized
  source 1..22: mol_type = other DNA
cgtgctggctgttagactcttc

SEQ ID NO: 14201 - DNA, 22 bp, synthetic construct
  misc_feature 1..22: note = chemically synthesized
  source 1..22: mol_type = other DNA
gctgttagactcttcaatattg

SEQ ID NO: 14202 - DNA, 22 bp, synthetic construct
  misc_feature 1..22: note = chemically synthesized
  source 1..22: mol_type = other DNA
ttagactcttcaatattgctgt

SEQ ID NO: 14203 - DNA, 22 bp, synthetic construct
  misc_feature 1..22: note = chemically synthesized
  source 1..22: mol_type = other DNA
gactcttcaatattgctgtcaa

SEQ ID NO: 14204 - DNA, 22 bp, synthetic construct
  misc_feature 1..22: note = chemically synthesized
  source 1..22: mol_type = other DNA
ttcaatattgctgtcaaatcat

SEQ ID NO: 14205 - DNA, 22 bp, synthetic construct
  misc_feature 1..22: note = chemically synthesized
  source 1..22: mol_type = other DNA
caatattgctgtcaaatcatgt

SEQ ID NO: 14206 - DNA, 22 bp, synthetic construct
  misc_feature 1..22: note = chemically synthesized
  source 1..22: mol_type = other DNA
aatattgctgtcaaatcatgta

SEQ ID NO: 14207 - DNA, 22 bp, synthetic construct
  misc_feature 1..22: note = chemically synthesized
  source 1..22: mol_type = other DNA
ctgtcaaatcatgtaatcaaaa

SEQ ID NO: 14208 - DNA, 22 bp, synthetic construct
  misc_feature 1..22: note = chemically synthesized
  source 1..22: mol_type = other DNA
tcaaatcatgtaatcaaaattt

SEQ ID NO: 14209 - DNA, 22 bp, synthetic construct
  misc_feature 1..22: note = chemically synthesized
  source 1..22: mol_type = other DNA
agtgaagaagacagcatcagat

SEQ ID NO: 14210 - DNA, 22 bp, synthetic construct
  misc_feature 1..22: note = chemically synthesized
  source 1..22: mol_type = other DNA
gtgaagaagacagcatcagata

SEQ ID NO: 14211 - DNA, 22 bp, synthetic construct
  misc_feature 1..22: note = chemically synthesized
  source 1..22: mol_type = other DNA
ctatatctaaaaggcaagcata

SEQ ID NO: 14212 - DNA, 22 bp, synthetic construct
  misc_feature 1..22: note = chemically synthesized
  source 1..22: mol_type = other DNA
tatatctaaaaggcaagcatac

SEQ ID NO: 14213 - DNA, 22 bp, synthetic construct
  misc_feature 1..22: note = chemically synthesized
  source 1..22: mol_type = other DNA
tatctaaaaggcaagcatactc

SEQ ID NO: 14214 - DNA, 22 bp, synthetic construct
  misc_feature 1..22: note = chemically synthesized
  source 1..22: mol_type = other DNA
aaaggcaagcatactcaatgta

SEQ ID NO: 14215 - DNA, 22 bp, synthetic construct
  misc_feature 1..22: note = chemically synthesized
  source 1..22: mol_type = other DNA
aatgtattttaaaaaaggaaac

SEQ ID NO: 14216 - DNA, 22 bp, synthetic construct
  misc_feature 1..22: note = chemically synthesized
  source 1..22: mol_type = other DNA
taaaaaaggaaacaaacctgta

SEQ ID NO: 14217 - DNA, 22 bp, synthetic construct
  misc_feature 1..22: note = chemically synthesized
  source 1..22: mol_type = other DNA
aaaaaaggaaacaaacctgtac

SEQ ID NO: 14218 - DNA, 22 bp, synthetic construct
  misc_feature 1..22: note = chemically synthesized
  source 1..22: mol_type = other DNA
aaaaaggaaacaaacctgtaca

SEQ ID NO: 14219 - DNA, 22 bp, synthetic construct
  misc_feature 1..22: note = chemically synthesized
  source 1..22: mol_type = other DNA
tacattcagcactgagtagata

SEQ ID NO: 14220 - DNA, 22 bp, synthetic construct
  misc_feature 1..22: note = chemically synthesized
  source 1..22: mol_type = other DNA
agcactgagtagatatcctaaa

SEQ ID NO: 14221 - DNA, 22 bp, synthetic construct
  misc_feature 1..22: note = chemically synthesized
  source 1..22: mol_type = other DNA
agtagatatcctaaaaggcaga

SEQ ID NO: 14222 - DNA, 22 bp, synthetic construct
  misc_feature 1..22: note = chemically synthesized
  source 1..22: mol_type = other DNA
aaaggcagatggtgatgaggcc

SEQ ID NO: 14223 - DNA, 22 bp, synthetic construct
  misc_feature 1..22: note = chemically synthesized
  source 1..22: mol_type = other DNA
gtgattctgccatgatcatgtt

SEQ ID NO: 14224 - DNA, 22 bp, synthetic construct
  misc_feature 1..22: note = chemically synthesized
  source 1..22: mol_type = other DNA
tgccatgatcatgttcacgcgc

SEQ ID NO: 14225 - DNA, 22 bp, synthetic construct
  misc_feature 1..22: note = chemically synthesized
  source 1..22: mol_type = other DNA
ccatgatcatgttcacgcgctg

SEQ ID NO: 14226 - DNA, 22 bp, synthetic construct
  misc_feature 1..22: note = chemically synthesized
  source 1..22: mol_type = other DNA
acgcgctgcataacctttgcta

SEQ ID NO: 14227 - DNA, 22 bp, synthetic construct
  misc_feature 1..22: note = chemically synthesized
  source 1..22: mol_type = other DNA
cataacctttgctagcagattg

SEQ ID NO: 14228 - DNA, 22 bp, synthetic construct
  misc_feature 1..22: note = chemically synthesized
  source 1..22: mol_type = other DNA
tgctagcagattgtgaaagtgg

SEQ ID NO: 14229 - DNA, 22 bp, synthetic construct
  misc_feature 1..22: note = chemically synthesized
  source 1..22: mol_type = other DNA
gctagcagattgtgaaagtggt

SEQ ID NO: 14230 - DNA, 20 bp, synthetic construct
  misc_feature 1..20: note = chemically synthesized
  source 1..20: mol_type = other DNA
tgcgtccactgctcttctga

SEQ ID NO: 14231 - DNA, 20 bp, synthetic construct
  misc_feature 1..20: note = chemically synthesized
  source 1..20: mol_type = other DNA
tcttctgacagcatcattta

SEQ ID NO: 14232 - DNA, 20 bp, synthetic construct
  misc_feature 1..20: note = chemically synthesized
  source 1..20: mol_type = other DNA
cttctgacagcatcatttac

SEQ ID NO: 14233 - DNA, 20 bp, synthetic construct
  misc_feature 1..20: note = chemically synthesized
  source 1..20: mol_type = other DNA
aggttcacactgttccacct

SEQ ID NO: 14234 - DNA, 20 bp, synthetic construct
  misc_feature 1..20: note = chemically synthesized
  source 1..20: mol_type = other DNA
ttcatattatgctcaaaata

SEQ ID NO: 14235 - DNA, 20 bp, synthetic construct
  misc_feature 1..20: note = chemically synthesized
  source 1..20: mol_type = other DNA
tgctcaaaatatggacctat

SEQ ID NO: 14236 - DNA, 20 bp, synthetic construct
  misc_feature 1..20: note = chemically synthesized
  source 1..20: mol_type = other DNA
aatatggacctatcagaaaa

SEQ ID NO: 14237 - DNA, 20 bp, synthetic construct
  misc_feature 1..20: note = chemically synthesized
  source 1..20: mol_type = other DNA
ccattcatctgctgttgttt

SEQ ID NO: 14238 - DNA, 20 bp, synthetic construct
  misc_feature 1..20: note = chemically synthesized
  source 1..20: mol_type = other DNA
tttggcctttgtctgaatca

SEQ ID NO: 14239 - DNA, 20 bp, synthetic construct
  misc_feature 1..20: note = chemically synthesized
  source 1..20: mol_type = other DNA
cctttgtctgaatcacagta

SEQ ID NO: 14240 - DNA, 20 bp, synthetic construct
  misc_feature 1..20: note = chemically synthesized
  source 1..20: mol_type = other DNA
tagatgcctccaactgttaa

SEQ ID NO: 14241 - DNA, 20 bp, synthetic construct
  misc_feature 1..20: note = chemically synthesized
  source 1..20: mol_type = other DNA
agatgcctccaactgttaaa

SEQ ID NO: 14242 - DNA, 20 bp, synthetic construct
  misc_feature 1..20: note = chemically synthesized
  source 1..20: mol_type = other DNA
tccaactgttaaaaggaaaa

SEQ ID NO: 14243 - DNA, 20 bp, synthetic construct
  misc_feature 1..20: note = chemically synthesized
  source 1..20: mol_type = other DNA
aaaaagtttctattatcatt

SEQ ID NO: 14244 - DNA, 20 bp, synthetic construct
  misc_feature 1..20: note = chemically synthesized
  source 1..20: mol_type = other DNA
aaaagtttctattatcattc

SEQ ID NO: 14245 - DNA, 20 bp, synthetic construct
  misc_feature 1..20: note = chemically synthesized
  source 1..20: mol_type = other DNA
gtttctattatcattcaggt

SEQ ID NO: 14246 - DNA, 20 bp, synthetic construct
  misc_feature 1..20: note = chemically synthesized
  source 1..20: mol_type = other DNA
tcaggttagcaatttgttta

SEQ ID NO: 14247 - DNA, 20 bp, synthetic construct
  misc_feature 1..20: note = chemically synthesized
  source 1..20: mol_type = other DNA
agcaatttgtttaaagtaat

SEQ ID NO: 14248 - DNA, 20 bp, synthetic construct
  misc_feature 1..20: note = chemically synthesized
  source 1..20: mol_type = other DNA
gcaatttgtttaaagtaata

SEQ ID NO: 14249 - DNA, 20 bp, synthetic construct
  misc_feature 1..20: note = chemically synthesized
  source 1..20: mol_type = other DNA
caatttgtttaaagtaataa

SEQ ID NO: 14250 - DNA, 20 bp, synthetic construct
  misc_feature 1..20: note = chemically synthesized
  source 1..20: mol_type = other DNA
ttgtttaaagtaataaggga

SEQ ID NO: 14251 - DNA, 20 bp, synthetic construct
  misc_feature 1..20: note = chemically synthesized
  source 1..20: mol_type = other DNA
aagtaataagggatggaaat

SEQ ID NO: 14252 - DNA, 20 bp, synthetic construct
  misc_feature 1..20: note = chemically synthesized
  source 1..20: mol_type = other DNA
ataagggatggaaatgagtt

SEQ ID NO: 14253 - DNA, 20 bp, synthetic construct
  misc_feature 1..20: note = chemically synthesized
  source 1..20: mol_type = other DNA
atgagttcagatttttaaat

SEQ ID NO: 14254 - DNA, 20 bp, synthetic construct
  misc_feature 1..20: note = chemically synthesized
  source 1..20: mol_type = other DNA
cagatttttaaattagcatt

SEQ ID NO: 14255 - DNA, 20 bp, synthetic construct
  misc_feature 1..20: note = chemically synthesized
  source 1..20: mol_type = other DNA
agatttttaaattagcattt

SEQ ID NO: 14256 - DNA, 20 bp, synthetic construct
  misc_feature 1..20: note = chemically synthesized
  source 1..20: mol_type = other DNA
attagcatttaggatccact

SEQ ID NO: 14257 - DNA, 20 bp, synthetic construct
  misc_feature 1..20: note = chemically synthesized
  source 1..20: mol_type = other DNA
atttaggatccactaagccc

SEQ ID NO: 14258 - DNA, 20 bp, synthetic construct
  misc_feature 1..20: note = chemically synthesized
  source 1..20: mol_type = other DNA
tttaggatccactaagccca

SEQ ID NO: 14259 - DNA, 20 bp, synthetic construct
  misc_feature 1..20: note = chemically synthesized
  source 1..20: mol_type = other DNA
tatttacctttcaaaaataa

SEQ ID NO: 14260 - DNA, 20 bp, synthetic construct
  misc_feature 1..20: note = chemically synthesized
  source 1..20: mol_type = other DNA
atagtatttgacatattgtt

SEQ ID NO: 14261 - DNA, 20 bp, synthetic construct
  misc_feature 1..20: note = chemically synthesized
  source 1..20: mol_type = other DNA
tagtatttgacatattgtta

SEQ ID NO: 14262 - DNA, 20 bp, synthetic construct
  misc_feature 1..20: note = chemically synthesized
  source 1..20: mol_type = other DNA
agtatttgacatattgttaa

SEQ ID NO: 14263 - DNA, 20 bp, synthetic construct
  misc_feature 1..20: note = chemically synthesized
  source 1..20: mol_type = other DNA
tgttaagggacaccaacgaa

SEQ ID NO: 14264 - DNA, 20 bp, synthetic construct
  misc_feature 1..20: note = chemically synthesized
  source 1..20: mol_type = other DNA
tcaattctgtgcatgtttta

SEQ ID NO: 14265 - DNA, 20 bp, synthetic construct
  misc_feature 1..20: note = chemically synthesized
  source 1..20: mol_type = other DNA
gcatgttttaaagtcccttc

SEQ ID NO: 14266 - DNA, 20 bp, synthetic construct
  misc_feature 1..20: note = chemically synthesized
  source 1..20: mol_type = other DNA
catgttttaaagtcccttct

SEQ ID NO: 14267 - DNA, 20 bp, synthetic construct
  misc_feature 1..20: note = chemically synthesized
  source 1..20: mol_type = other DNA
ccttctaggtgcatgtgaaa

SEQ ID NO: 14268 - DNA, 20 bp, synthetic construct
  misc_feature 1..20: note = chemically synthesized
  source 1..20: mol_type = other DNA
tctaggtgcatgtgaaatag

SEQ ID NO: 14269 - DNA, 20 bp, synthetic construct
  misc_feature 1..20: note = chemically synthesized
  source 1..20: mol_type = other DNA
aggtgcatgtgaaatagcag

SEQ ID NO: 14270 - DNA, 20 bp, synthetic construct
  misc_feature 1..20: note = chemically synthesized
  source 1..20: mol_type = other DNA
ggtgcatgtgaaatagcagc

SEQ ID NO: 14271 - DNA, 20 bp, synthetic construct
  misc_feature 1..20: note = chemically synthesized
  source 1..20: mol_type = other DNA
agcagcaggctgatgccgca

SEQ ID NO: 14272 - DNA, 20 bp, synthetic construct
  misc_feature 1..20: note = chemically synthesized
  source 1..20: mol_type = other DNA
cagcaggctgatgccgcaaa

SEQ ID NO: 14273 - DNA, 20 bp, synthetic construct
  misc_feature 1..20: note = chemically synthesized
  source 1..20: mol_type = other DNA
agcaggctgatgccgcaaag

SEQ ID NO: 14274 - DNA, 20 bp, synthetic construct
  misc_feature 1..20: note = chemically synthesized
  source 1..20: mol_type = other DNA
aagaggtcaaatacctcaaa

SEQ ID NO: 14275 - DNA, 20 bp, synthetic construct
  misc_feature 1..20: note = chemically synthesized
  source 1..20: mol_type = other DNA
ggtcaaatacctcaaaaaga

SEQ ID NO: 14276 - DNA, 20 bp, synthetic construct
  misc_feature 1..20: note = chemically synthesized
  source 1..20: mol_type = other DNA
tcaaatacctcaaaaagaaa

SEQ ID NO: 14277 - DNA, 20 bp, synthetic construct
  misc_feature 1..20: note = chemically synthesized
  source 1..20: mol_type = other DNA
tcaaaaagaaagagtctgaa

SEQ ID NO: 14278 - DNA, 20 bp, synthetic construct
  misc_feature 1..20: note = chemically synthesized
  source 1..20: mol_type = other DNA
aaagagtctgaaaagacaat

SEQ ID NO: 14279 - DNA, 20 bp, synthetic construct
  misc_feature 1..20: note = chemically synthesized
  source 1..20: mol_type = other DNA
agagtctgaaaagacaattg

SEQ ID NO: 14280 - DNA, 20 bp, synthetic construct
  misc_feature 1..20: note = chemically synthesized
  source 1..20: mol_type = other DNA
ttggagtaactacttgccta

SEQ ID NO: 14281 - DNA, 20 bp, synthetic construct
  misc_feature 1..20: note = chemically synthesized
  source 1..20: mol_type = other DNA
taactacttgcctaaagctc

SEQ ID NO: 14282 - DNA, 20 bp, synthetic construct
  misc_feature 1..20: note = chemically synthesized
  source 1..20: mol_type = other DNA
ctaaagctccagtcactttg

SEQ ID NO: 14283 - DNA, 20 bp, synthetic construct
  misc_feature 1..20: note = chemically synthesized
  source 1..20: mol_type = other DNA
ccagtcactttgtagtgtca

SEQ ID NO: 14284 - DNA, 20 bp, synthetic construct
  misc_feature 1..20: note = chemically synthesized
  source 1..20: mol_type = other DNA
tcactttgtagtgtcaaagt

SEQ ID NO: 14285 - DNA, 20 bp, synthetic construct
  misc_feature 1..20: note = chemically synthesized
  source 1..20: mol_type = other DNA
cactttgtagtgtcaaagtt

SEQ ID NO: 14286 - DNA, 20 bp, synthetic construct
  misc_feature 1..20: note = chemically synthesized
  source 1..20: mol_type = other DNA
attgtcatcatacatgccct

SEQ ID NO: 14287 - DNA, 20 bp, synthetic construct
  misc_feature 1..20: note = chemically synthesized
  source 1..20: mol_type = other DNA
gtcatcatacatgccctcag

SEQ ID NO: 14288 - DNA, 20 bp, synthetic construct
  misc_feature 1..20: note = chemically synthesized
  source 1..20: mol_type = other DNA
atcatacatgccctcagcag

SEQ ID NO: 14289 - DNA, 20 bp, synthetic construct
  misc_feature 1..20: note = chemically synthesized
  source 1..20: mol_type = other DNA
ctctcttcctccttctccta

SEQ ID NO: 14290 - DNA, 20 bp, synthetic construct
  misc_feature 1..20: note = chemically synthesized
  source 1..20: mol_type = other DNA
tcttcctccttctcctacag

SEQ ID NO: 14291 - DNA, 20 bp, synthetic construct
  misc_feature 1..20: note = chemically synthesized
  source 1..20: mol_type = other DNA
ctccttctcctacagtggtc

SEQ ID NO: 14292 - DNA, 20 bp, synthetic construct
  misc_feature 1..20: note = chemically synthesized
  source 1..20: mol_type = other DNA
cttctcctacagtggtccag

SEQ ID NO: 14293 - DNA, 20 bp, synthetic construct
  misc_feature 1..20: note = chemically synthesized
  source 1..20: mol_type = other DNA
ttctcctacagtggtccaga

SEQ ID NO: 14294 - DNA, 20 bp, synthetic construct
  misc_feature 1..20: note = chemically synthesized
  source 1..20: mol_type = other DNA
tctcctacagtggtccagaa

SEQ ID NO: 14295 - DNA, 20 bp, synthetic construct
  misc_feature 1..20: note = chemically synthesized
  source 1..20: mol_type = other DNA
ctcctacagtggtccagaag

SEQ ID NO: 14296 - DNA, 20 bp, synthetic construct
  misc_feature 1..20: note = chemically synthesized
  source 1..20: mol_type = other DNA
acagtggtccagaaggggct

SEQ ID NO: 14297 - DNA, 20 bp, synthetic construct
  misc_feature 1..20: note = chemically synthesized
  source 1..20: mol_type = other DNA
cagtggtccagaaggggctc

SEQ ID NO: 14298 - DNA, 20 bp, synthetic construct
  misc_feature 1..20: note = chemically synthesized
  source 1..20: mol_type = other DNA
gctcaggtatgttcaaataa

SEQ ID NO: 14299 - DNA, 20 bp, synthetic construct
  misc_feature 1..20: note = chemically synthesized
  source 1..20: mol_type = other DNA
tgttcaaataacagctgctg

SEQ ID NO: 14300 - DNA, 20 bp, synthetic construct
  misc_feature 1..20: note = chemically synthesized
  source 1..20: mol_type = other DNA
tgctgtggttttcaattatg

SEQ ID NO: 14301 - DNA, 20 bp, synthetic construct
  misc_feature 1..20: note = chemically synthesized
  source 1..20: mol_type = other DNA
caattatgaagaaatctcct

SEQ ID NO: 14302 - DNA, 20 bp, synthetic construct
  misc_feature 1..20: note = chemically synthesized
  source 1..20: mol_type = other DNA
aagaaatctcctaagctaca

SEQ ID NO: 14303 - DNA, 20 bp, synthetic construct
  misc_feature 1..20: note = chemically synthesized
  source 1..20: mol_type = other DNA
acatagtcatttatctttta

SEQ ID NO: 14304 - DNA, 20 bp, synthetic construct
  misc_feature 1..20: note = chemically synthesized
  source 1..20: mol_type = other DNA
catttatcttttaaagcacc

SEQ ID NO: 14305 - DNA, 20 bp, synthetic construct
  misc_feature 1..20: note = chemically synthesized
  source 1..20: mol_type = other DNA
atcttttaaagcaccaagca

SEQ ID NO: 14306 - DNA, 20 bp, synthetic construct
  misc_feature 1..20: note = chemically synthesized
  source 1..20: mol_type = other DNA
caagcaaagtaccttttgat

SEQ ID NO: 14307 - DNA, 20 bp, synthetic construct
  misc_feature 1..20: note = chemically synthesized
  source 1..20: mol_type = other DNA
aagcaaagtaccttttgata

SEQ ID NO: 14308 - DNA, 20 bp, synthetic construct
  misc_feature 1..20: note = chemically synthesized
  source 1..20: mol_type = other DNA
gcaaagtaccttttgataag

SEQ ID NO: 14309 - DNA, 20 bp, synthetic construct
  misc_feature 1..20: note = chemically synthesized
  source 1..20: mol_type = other DNA
tgataaggagaacgtgctta

SEQ ID NO: 14310 - DNA, 20 bp, synthetic construct
  misc_feature 1..20: note = chemically synthesized
  source 1..20: mol_type = other DNA
aacgtgcttatagatgttca

SEQ ID NO: 14311 - DNA, 20 bp, synthetic construct
  misc_feature 1..20: note = chemically synthesized
  source 1..20: mol_type = other DNA
gtgcttatagatgttcatag

SEQ ID NO: 14312 - DNA, 20 bp, synthetic construct
  misc_feature 1..20: note = chemically synthesized
  source 1..20: mol_type = other DNA
agatgttcatagaagatgct

SEQ ID NO: 14313 - DNA, 20 bp, synthetic construct
  misc_feature 1..20: note = chemically synthesized
  source 1..20: mol_type = other DNA
atacgtatttcattctcaca

SEQ ID NO: 14314 - DNA, 20 bp, synthetic construct
  misc_feature 1..20: note = chemically synthesized
  source 1..20: mol_type = other DNA
acatggtatttctctcttcc

SEQ ID NO: 14315 - DNA, 20 bp, synthetic construct
  misc_feature 1..20: note = chemically synthesized
  source 1..20: mol_type = other DNA
ggtatttctctcttcctagt

SEQ ID NO: 14316 - DNA, 20 bp, synthetic construct
  misc_feature 1..20: note = chemically synthesized
  source 1..20: mol_type = other DNA
gtatttctctcttcctagta

SEQ ID NO: 14317 - DNA, 20 bp, synthetic construct
  misc_feature 1..20: note = chemically synthesized
  source 1..20: mol_type = other DNA
tatttctctcttcctagtaa

SEQ ID NO: 14318 - DNA, 20 bp, synthetic construct
  misc_feature 1..20: note = chemically synthesized
  source 1..20: mol_type = other DNA
tttctctcttcctagtaagg

SEQ ID NO: 14319 - DNA, 20 bp, synthetic construct
  misc_feature 1..20: note = chemically synthesized
  source 1..20: mol_type = other DNA
ttctctcttcctagtaaggg

SEQ ID NO: 14320 - DNA, 20 bp, synthetic construct
  misc_feature 1..20: note = chemically synthesized
  source 1..20: mol_type = other DNA
ctctcttcctagtaagggag

SEQ ID NO: 14321 - DNA, 20 bp, synthetic construct
  misc_feature 1..20: note = chemically synthesized
  source 1..20: mol_type = other DNA
atgcccaatttctgcctcca

SEQ ID NO: 14322 - DNA, 20 bp, synthetic construct
  misc_feature 1..20: note = chemically synthesized
  source 1..20: mol_type = other DNA
ccaatttctgcctccaaaga

SEQ ID NO: 14323 - DNA, 20 bp, synthetic construct
  misc_feature 1..20: note = chemically synthesized
  source 1..20: mol_type = other DNA
atttctgcctccaaagaaag

SEQ ID NO: 14324 - DNA, 20 bp, synthetic construct
  misc_feature 1..20: note = chemically synthesized
  source 1..20: mol_type = other DNA
tctgcctccaaagaaagaag

SEQ ID NO: 14325 - DNA, 20 bp, synthetic construct
  misc_feature 1..20: note = chemically synthesized
  source 1..20: mol_type = other DNA
aaagaagaagtaaaaactaa

SEQ ID NO: 14326 - DNA, 20 bp, synthetic construct
  misc_feature 1..20: note = chemically synthesized
  source 1..20: mol_type = other DNA
aagaagaagtaaaaactaaa

SEQ ID NO: 14327 - DNA, 20 bp, synthetic construct
  misc_feature 1..20: note = chemically synthesized
  source 1..20: mol_type = other DNA
aagaagtaaaaactaaaagg

SEQ ID NO: 14328 - DNA, 20 bp, synthetic construct
  misc_feature 1..20: note = chemically synthesized
  source 1..20: mol_type = other DNA
aaaggcagaaatgaaatcca

SEQ ID NO: 14329 - DNA, 20 bp, synthetic construct
  misc_feature 1..20: note = chemically synthesized
  source 1..20: mol_type = other DNA
aaggcagaaatgaaatccac

SEQ ID NO: 14330 - DNA, 20 bp, synthetic construct
  misc_feature 1..20: note = chemically synthesized
  source 1..20: mol_type = other DNA
aaatgaaatccacaggcaaa

SEQ ID NO: 14331 - DNA, 20 bp, synthetic construct
  misc_feature 1..20: note = chemically synthesized
  source 1..20: mol_type = other DNA
aatccacaggcaaacagcct

SEQ ID NO: 14332 - DNA, 20 bp, synthetic construct
  misc_feature 1..20: note = chemically synthesized
  source 1..20: mol_type = other DNA
aacagcctgagaccacatcc

SEQ ID NO: 14333 - DNA, 20 bp, synthetic construct
  misc_feature 1..20: note = chemically synthesized
  source 1..20: mol_type = other DNA
acagcctgagaccacatcct

SEQ ID NO: 14334 - DNA, 20 bp, synthetic construct
  misc_feature 1..20: note = chemically synthesized
  source 1..20: mol_type = other DNA
ctgagaccacatcctgggcc

SEQ ID NO: 14335 - DNA, 20 bp, synthetic construct
  misc_feature 1..20: note = chemically synthesized
  source 1..20: mol_type = other DNA
ccacatcctgggcctggtta

SEQ ID NO: 14336 - DNA, 20 bp, synthetic construct
  misc_feature 1..20: note = chemically synthesized
  source 1..20: mol_type = other DNA
atcctgggcctggttaaaga

SEQ ID NO: 14337 - DNA, 20 bp, synthetic construct
  misc_feature 1..20: note = chemically synthesized
  source 1..20: mol_type = other DNA
ttaaagatagacccctgacc

SEQ ID NO: 14338 - DNA, 20 bp, synthetic construct
  misc_feature 1..20: note = chemically synthesized
  source 1..20: mol_type = other DNA
agatagacccctgacctggc

SEQ ID NO: 14339 - DNA, 20 bp, synthetic construct
  misc_feature 1..20: note = chemically synthesized
  source 1..20: mol_type = other DNA
ctggccagttatgttatcta

SEQ ID NO: 14340 - DNA, 20 bp, synthetic construct
  misc_feature 1..20: note = chemically synthesized
  source 1..20: mol_type = other DNA
gttatgttatctatagattc

SEQ ID NO: 14341 - DNA, 20 bp, synthetic construct
  misc_feature 1..20: note = chemically synthesized
  source 1..20: mol_type = other DNA
tatagattccagacactgta

SEQ ID NO: 14342 - DNA, 20 bp, synthetic construct
  misc_feature 1..20: note = chemically synthesized
  source 1..20: mol_type = other DNA
attccagacactgtatggaa

SEQ ID NO: 14343 - DNA, 20 bp, synthetic construct
  misc_feature 1..20: note = chemically synthesized
  source 1..20: mol_type = other DNA
ccagacactgtatggaaaag

SEQ ID NO: 14344 - DNA, 20 bp, synthetic construct
  misc_feature 1..20: note = chemically synthesized
  source 1..20: mol_type = other DNA
ttctgttccattctgatgac

SEQ ID NO: 14345 - DNA, 20 bp, synthetic construct
  misc_feature 1..20: note = chemically synthesized
  source 1..20: mol_type = other DNA
attctgatgaccagtgcatg

SEQ ID NO: 14346 - DNA, 20 bp, synthetic construct
  misc_feature 1..20: note = chemically synthesized
  source 1..20: mol_type = other DNA
tgaccagtgcatgcagcccc

SEQ ID NO: 14347 - DNA, 20 bp, synthetic construct
  misc_feature 1..20: note = chemically synthesized
  source 1..20: mol_type = other DNA
cccccagtcatgtaccccct

SEQ ID NO: 14348 - DNA, 20 bp, synthetic construct
  misc_feature 1..20: note = chemically synthesized
  source 1..20: mol_type = other DNA
cccagtcatgtaccccctta

SEQ ID NO: 14349 - DNA, 20 bp, synthetic construct
  misc_feature 1..20: note = chemically synthesized
  source 1..20: mol_type = other DNA
atgtacccccttagagttgt

SEQ ID NO: 14350 - DNA, 20 bp, synthetic construct
  misc_feature 1..20: note = chemically synthesized
  source 1..20: mol_type = other DNA
ttagagttgtaagcccttaa

SEQ ID NO: 14351 - DNA, 20 bp, synthetic construct
  misc_feature 1..20: note = chemically synthesized
  source 1..20: mol_type = other DNA
tagagttgtaagcccttaaa

SEQ ID NO: 14352 - DNA, 20 bp, synthetic construct
  misc_feature 1..20: note = chemically synthesized
  source 1..20: mol_type = other DNA
agagttgtaagcccttaaaa

SEQ ID NO: 14353 - DNA, 20 bp, synthetic construct
  misc_feature 1..20: note = chemically synthesized
  source 1..20: mol_type = other DNA
ttgtaagcccttaaaaggga

SEQ ID NO: 14354 - DNA, 20 bp, synthetic construct
  misc_feature 1..20: note = chemically synthesized
  source 1..20: mol_type = other DNA
tgtaagcccttaaaagggac

SEQ ID NO: 14355 - DNA, 20 bp, synthetic construct
  misc_feature 1..20: note = chemically synthesized
  source 1..20: mol_type = other DNA
ggacaggaattgctcactct

SEQ ID NO: 14356 - DNA, 20 bp, synthetic construct
  misc_feature 1..20: note = chemically synthesized
  source 1..20: mol_type = other DNA
acaggaattgctcactctga

SEQ ID NO: 14357 - DNA, 20 bp, synthetic construct
  misc_feature 1..20: note = chemically synthesized
  source 1..20: mol_type = other DNA
aattgctcactctgagagct

SEQ ID NO: 14358 - DNA, 20 bp, synthetic construct
  misc_feature 1..20: note = chemically synthesized
  source 1..20: mol_type = other DNA
cactctgagagcttggttgt

SEQ ID NO: 14359 - DNA, 20 bp, synthetic construct
  misc_feature 1..20: note = chemically synthesized
  source 1..20: mol_type = other DNA
ctctgagagcttggttgttg

SEQ ID NO: 14360 - DNA, 20 bp, synthetic construct
  misc_feature 1..20: note = chemically synthesized
  source 1..20: mol_type = other DNA
agcttggttgttggagatgt

SEQ ID NO: 14361 - DNA, 20 bp, synthetic construct
  misc_feature 1..20: note = chemically synthesized
  source 1..20: mol_type = other DNA
tggagatgtgagtcttgccc

SEQ ID NO: 14362 - DNA, 20 bp, synthetic construct
  misc_feature 1..20: note = chemically synthesized
  source 1..20: mol_type = other DNA
gtgagtcttgcccaagctcc

SEQ ID NO: 14363 - DNA, 20 bp, synthetic construct
  misc_feature 1..20: note = chemically synthesized
  source 1..20: mol_type = other DNA
cccaagctcccagccgaata

SEQ ID NO: 14364 - DNA, 20 bp, synthetic construct
  misc_feature 1..20: note = chemically synthesized
  source 1..20: mol_type = other DNA
aagcccttccttctttaact

SEQ ID NO: 14365 - DNA, 20 bp, synthetic construct
  misc_feature 1..20: note = chemically synthesized
  source 1..20: mol_type = other DNA
ccttctttaactcggtgtct

SEQ ID NO: 14366 - DNA, 20 bp, synthetic construct
  misc_feature 1..20: note = chemically synthesized
  source 1..20: mol_type = other DNA
cttctttaactcggtgtctg

SEQ ID NO: 14367 - DNA, 20 bp, synthetic construct
  misc_feature 1..20: note = chemically synthesized
  source 1..20: mol_type = other DNA
ttctttaactcggtgtctga

SEQ ID NO: 14368 - DNA, 20 bp, synthetic construct
  misc_feature 1..20: note = chemically synthesized
  source 1..20: mol_type = other DNA
tctttaactcggtgtctgag

SEQ ID NO: 14369 - DNA, 20 bp, synthetic construct
  misc_feature 1..20: note = chemically synthesized
  source 1..20: mol_type = other DNA
tgtctgaggggttttgtatg

SEQ ID NO: 14370 - DNA, 20 bp, synthetic construct
  misc_feature 1..20: note = chemically synthesized
  source 1..20: mol_type = other DNA
tgcagcttgtcctgctacac

SEQ ID NO: 14371 - DNA, 20 bp, synthetic construct
  misc_feature 1..20: note = chemically synthesized
  source 1..20: mol_type = other DNA
gctacctctattaaaacaca

SEQ ID NO: 14372 - DNA, 20 bp, synthetic construct
  misc_feature 1..20: note = chemically synthesized
  source 1..20: mol_type = other DNA
aaacacaaagccacaatata

SEQ ID NO: 14373 - DNA, 20 bp, synthetic construct
  misc_feature 1..20: note = chemically synthesized
  source 1..20: mol_type = other DNA
ccacaatatatggatacatt

SEQ ID NO: 14374 - DNA, 20 bp, synthetic construct
  misc_feature 1..20: note = chemically synthesized
  source 1..20: mol_type = other DNA
tttggaaaatatgcacactt

SEQ ID NO: 14375 - DNA, 20 bp, synthetic construct
  misc_feature 1..20: note = chemically synthesized
  source 1..20: mol_type = other DNA
aaatatgcacactttggatc

SEQ ID NO: 14376 - DNA, 20 bp, synthetic construct
  misc_feature 1..20: note = chemically synthesized
  source 1..20: mol_type = other DNA
atgcacactttggatccagc

SEQ ID NO: 14377 - DNA, 20 bp, synthetic construct
  misc_feature 1..20: note = chemically synthesized
  source 1..20: mol_type = other DNA
ggatccagcaagtccacatc

SEQ ID NO: 14378 - DNA, 20 bp, synthetic construct
  misc_feature 1..20: note = chemically synthesized
  source 1..20: mol_type = other DNA
ccacatctagaaaaccatcc

SEQ ID NO: 14379 - DNA, 20 bp, synthetic construct
  misc_feature 1..20: note = chemically synthesized
  source 1..20: mol_type = other DNA
cacatctagaaaaccatcct

SEQ ID NO: 14380 - DNA, 20 bp, synthetic construct
  misc_feature 1..20: note = chemically synthesized
  source 1..20: mol_type = other DNA
acatctagaaaaccatcctg

SEQ ID NO: 14381 - DNA, 20 bp, synthetic construct
  misc_feature 1..20: note = chemically synthesized
  source 1..20: mol_type = other DNA
catctagaaaaccatcctgg

SEQ ID NO: 14382 - DNA, 20 bp, synthetic construct
  misc_feature 1..20: note = chemically synthesized
  source 1..20: mol_type = other DNA
aaccatcctgggggaaaatt

SEQ ID NO: 14383 - DNA, 20 bp, synthetic construct
  misc_feature 1..20: note = chemically synthesized
  source 1..20: mol_type = other DNA
accatcctgggggaaaatta

SEQ ID NO: 14384 - DNA, 20 bp, synthetic construct
  misc_feature 1..20: note = chemically synthesized
  source 1..20: mol_type = other DNA
catcctgggggaaaattaag

SEQ ID NO: 14385 - DNA, 20 bp, synthetic construct
  misc_feature 1..20: note = chemically synthesized
  source 1..20: mol_type = other DNA
tcctgggggaaaattaagga

SEQ ID NO: 14386 - DNA, 20 bp, synthetic construct
  misc_feature 1..20: note = chemically synthesized
  source 1..20: mol_type = other DNA
aaaattaaggagagtatgaa

SEQ ID NO: 14387 - DNA, 20 bp, synthetic construct
  misc_feature 1..20: note = chemically synthesized
  source 1..20: mol_type = other DNA
aaattaaggagagtatgaaa

SEQ ID NO: 14388 - DNA, 20 bp, synthetic construct
  misc_feature 1..20: note = chemically synthesized
  source 1..20: mol_type = other DNA
tatgaaaaggatgtttacta

SEQ ID NO: 14389 - DNA, 20 bp, synthetic construct
  misc_feature 1..20: note = chemically synthesized
  source 1..20: mol_type = other DNA
tgtttactaaagcattatga

SEQ ID NO: 14390 - DNA, 20 bp, synthetic construct
  misc_feature 1..20: note = chemically synthesized
  source 1..20: mol_type = other DNA
gcattatgatggcaaaaaat

SEQ ID NO: 14391 - DNA, 20 bp, synthetic construct
  misc_feature 1..20: note = chemically synthesized
  source 1..20: mol_type = other DNA
agaaacaacttacactgaac

SEQ ID NO: 14392 - DNA, 20 bp, synthetic construct
  misc_feature 1..20: note = chemically synthesized
  source 1..20: mol_type = other DNA
gaactagtcaacttacttaa

SEQ ID NO: 14393 - DNA, 20 bp, synthetic construct
  misc_feature 1..20: note = chemically synthesized
  source 1..20: mol_type = other DNA
tagtcaacttacttaacaga

SEQ ID NO: 14394 - DNA, 20 bp, synthetic construct
  misc_feature 1..20: note = chemically synthesized
  source 1..20: mol_type = other DNA
tcaacttacttaacagacag

SEQ ID NO: 14395 - DNA, 20 bp, synthetic construct
  misc_feature 1..20: note = chemically synthesized
  source 1..20: mol_type = other DNA
caacttacttaacagacaga

SEQ ID NO: 14396 - DNA, 20 bp, synthetic construct
  misc_feature 1..20: note = chemically synthesized
  source 1..20: mol_type = other DNA
taacagacagaaggctcaat

SEQ ID NO: 14397 - DNA, 20 bp, synthetic construct
  misc_feature 1..20: note = chemically synthesized
  source 1..20: mol_type = other DNA
caattagctcatgtgtcaaa

SEQ ID NO: 14398 - DNA, 20 bp, synthetic construct
  misc_feature 1..20: note = chemically synthesized
  source 1..20: mol_type = other DNA
aattagctcatgtgtcaaat

SEQ ID NO: 14399 - DNA, 20 bp, synthetic construct
  misc_feature 1..20: note = chemically synthesized
  source 1..20: mol_type = other DNA
attagctcatgtgtcaaatg

SEQ ID NO: 14400 - DNA, 20 bp, synthetic construct
  misc_feature 1..20: note = chemically synthesized
  source 1..20: mol_type = other DNA
ttagctcatgtgtcaaatgg

SEQ ID NO: 14401 - DNA, 20 bp, synthetic construct
  misc_feature 1..20: note = chemically synthesized
  source 1..20: mol_type = other DNA
aatgggggtaaaataatatt

SEQ ID NO: 14402 - DNA, 20 bp, synthetic construct
  misc_feature 1..20: note = chemically synthesized
  source 1..20: mol_type = other DNA
gggtaaaataatatttagtt

SEQ ID NO: 14403 - DNA, 20 bp, synthetic construct
  misc_feature 1..20: note = chemically synthesized
  source 1..20: mol_type = other DNA
gtaaaataatatttagtttg

SEQ ID NO: 14404 - DNA, 20 bp, synthetic construct
  misc_feature 1..20: note = chemically synthesized
  source 1..20: mol_type = other DNA
taaaataatatttagtttgg

SEQ ID NO: 14405 - DNA, 20 bp, synthetic construct
  misc_feature 1..20: note = chemically synthesized
  source 1..20: mol_type = other DNA
aaaataatatttagtttgga

SEQ ID NO: 14406 - DNA, 20 bp, synthetic construct
  misc_feature 1..20: note = chemically synthesized
  source 1..20: mol_type = other DNA
taatatttagtttggaggga

SEQ ID NO: 14407 - DNA, 20 bp, synthetic construct
  misc_feature 1..20: note = chemically synthesized
  source 1..20: mol_type = other DNA
atttagtttggagggaaaga

SEQ ID NO: 14408 - DNA, 20 bp, synthetic construct
  misc_feature 1..20: note = chemically synthesized
  source 1..20: mol_type = other DNA
tttagtttggagggaaagac

SEQ ID NO: 14409 - DNA, 20 bp, synthetic construct
  misc_feature 1..20: note = chemically synthesized
  source 1..20: mol_type = other DNA
gagggaaagacaggctctaa

SEQ ID NO: 14410 - DNA, 20 bp, synthetic construct
  misc_feature 1..20: note = chemically synthesized
  source 1..20: mol_type = other DNA
gggaaagacaggctctaaaa

SEQ ID NO: 14411 - DNA, 20 bp, synthetic construct
  misc_feature 1..20: note = chemically synthesized
  source 1..20: mol_type = other DNA
ggaaagacaggctctaaaag

SEQ ID NO: 14412 - DNA, 20 bp, synthetic construct
  misc_feature 1..20: note = chemically synthesized
  source 1..20: mol_type = other DNA
tctaaaagaggattaaaaat

SEQ ID NO: 14413 - DNA, 20 bp, synthetic construct
  misc_feature 1..20: note = chemically synthesized
  source 1..20: mol_type = other DNA
agaggattaaaaattagatg

SEQ ID NO: 14414 - DNA, 20 bp, synthetic construct
  misc_feature 1..20: note = chemically synthesized
  source 1..20: mol_type = other DNA
attaaaaattagatgtggcc

SEQ ID NO: 14415 - DNA, 20 bp, synthetic construct
  misc_feature 1..20: note = chemically synthesized
  source 1..20: mol_type = other DNA
ttaaaaattagatgtggcct

SEQ ID NO: 14416 - DNA, 20 bp, synthetic construct
  misc_feature 1..20: note = chemically synthesized
  source 1..20: mol_type = other DNA
aattagatgtggcctaggca

SEQ ID NO: 14417 - DNA, 20 bp, synthetic construct
  misc_feature 1..20: note = chemically synthesized
  source 1..20: mol_type = other DNA
taggcaaagaatttatgacc

SEQ ID NO: 14418 - DNA, 20 bp, synthetic construct
  misc_feature 1..20: note = chemically synthesized
  source 1..20: mol_type = other DNA
aaacacaacaaaaacaaaaa

SEQ ID NO: 14419 - DNA, 20 bp, synthetic construct
  misc_feature 1..20: note = chemically synthesized
  source 1..20: mol_type = other DNA
caaaaacaaaaacagacaaa

SEQ ID NO: 14420 - DNA, 20 bp, synthetic construct
  misc_feature 1..20: note = chemically synthesized
  source 1..20: mol_type = other DNA
aaaaacaaaaacagacaaat

SEQ ID NO: 14421 - DNA, 20 bp, synthetic construct
  misc_feature 1..20: note = chemically synthesized
  source 1..20: mol_type = other DNA
aaaatgcttctgcaccgcaa

SEQ ID NO: 14422 - DNA, 20 bp, synthetic construct
  misc_feature 1..20: note = chemically synthesized
  source 1..20: mol_type = other DNA
accgcaaaagaccgaatcaa

SEQ ID NO: 14423 - DNA, 20 bp, synthetic construct
  misc_feature 1..20: note = chemically synthesized
  source 1..20: mol_type = other DNA
cgcaaaagaccgaatcaaca

SEQ ID NO: 14424 - DNA, 20 bp, synthetic construct
  misc_feature 1..20: note = chemically synthesized
  source 1..20: mol_type = other DNA
gaccgaatcaacagagtaaa

SEQ ID NO: 14425 - DNA, 20 bp, synthetic construct
  misc_feature 1..20: note = chemically synthesized
  source 1..20: mol_type = other DNA
cagagtaaacggataaccta

SEQ ID NO: 14426 - DNA, 20 bp, synthetic construct
  misc_feature 1..20: note = chemically synthesized
  source 1..20: mol_type = other DNA
aaacggataacctacagaat

SEQ ID NO: 14427 - DNA, 20 bp, synthetic construct
  misc_feature 1..20: note = chemically synthesized
  source 1..20: mol_type = other DNA
gcaaactatgaatgcaacaa

SEQ ID NO: 14428 - DNA, 20 bp, synthetic construct
  misc_feature 1..20: note = chemically synthesized
  source 1..20: mol_type = other DNA
caaactatgaatgcaacaaa

SEQ ID NO: 14429 - DNA, 20 bp, synthetic construct
  misc_feature 1..20: note = chemically synthesized
  source 1..20: mol_type = other DNA
tgcaacaaaaggctaatata

SEQ ID NO: 14430 - DNA, 20 bp, synthetic construct
  misc_feature 1..20: note = chemically synthesized
  source 1..20: mol_type = other DNA
ggctaatatacagaatctac

SEQ ID NO: 14431 - DNA, 20 bp, synthetic construct
  misc_feature 1..20: note = chemically synthesized
  source 1..20: mol_type = other DNA
gctaatatacagaatctaca

SEQ ID NO: 14432 - DNA, 20 bp, synthetic construct
  misc_feature 1..20: note = chemically synthesized
  source 1..20: mol_type = other DNA
aacaaaaaaaccaacctcat

SEQ ID NO: 14433 - DNA, 20 bp, synthetic construct
  misc_feature 1..20: note = chemically synthesized
  source 1..20: mol_type = other DNA
aaaaaaccaacctcattaga

SEQ ID NO: 14434 - DNA, 20 bp, synthetic construct
  misc_feature 1..20: note = chemically synthesized
  source 1..20: mol_type = other DNA
tcattagaaagtgactgtga

SEQ ID NO: 14435 - DNA, 20 bp, synthetic construct
  misc_feature 1..20: note = chemically synthesized
  source 1..20: mol_type = other DNA
tgactgtgatggttaatact

SEQ ID NO: 14436 - DNA, 20 bp, synthetic construct
  misc_feature 1..20: note = chemically synthesized
  source 1..20: mol_type = other DNA
atactgagtgtcaacttgat

SEQ ID NO: 14437 - DNA, 20 bp, synthetic construct
  misc_feature 1..20: note = chemically synthesized
  source 1..20: mol_type = other DNA
gtgtcaacttgattggactg

SEQ ID NO: 14438 - DNA, 20 bp, synthetic construct
  misc_feature 1..20: note = chemically synthesized
  source 1..20: mol_type = other DNA
tgtcaacttgattggactga

SEQ ID NO: 14439 - DNA, 20 bp, synthetic construct
  misc_feature 1..20: note = chemically synthesized
  source 1..20: mol_type = other DNA
tgattggactgaaggatgca

SEQ ID NO: 14440 - DNA, 20 bp, synthetic construct
  misc_feature 1..20: note = chemically synthesized
  source 1..20: mol_type = other DNA
aggatgcaaagtaatgatct

SEQ ID NO: 14441 - DNA, 20 bp, synthetic construct
  misc_feature 1..20: note = chemically synthesized
  source 1..20: mol_type = other DNA
ggatgcaaagtaatgatctt

SEQ ID NO: 14442 - DNA, 20 bp, synthetic construct
  misc_feature 1..20: note = chemically synthesized
  source 1..20: mol_type = other DNA
atgatcttgggtgtgtctgt

SEQ ID NO: 14443 - DNA, 20 bp, synthetic construct
  misc_feature 1..20: note = chemically synthesized
  source 1..20: mol_type = other DNA
tgatcttgggtgtgtctgtg

SEQ ID NO: 14444 - DNA, 20 bp, synthetic construct
  misc_feature 1..20: note = chemically synthesized
  source 1..20: mol_type = other DNA
gatcttgggtgtgtctgtga

SEQ ID NO: 14445 - DNA, 20 bp, synthetic construct
  misc_feature 1..20: note = chemically synthesized
  source 1..20: mol_type = other DNA
tgtctgtgagggtgttacca

SEQ ID NO: 14446 - DNA, 20 bp, synthetic construct
  misc_feature 1..20: note = chemically synthesized
  source 1..20: mol_type = other DNA
gtctgtgagggtgttaccaa

SEQ ID NO: 14447 - DNA, 20 bp, synthetic construct
  misc_feature 1..20: note = chemically synthesized
  source 1..20: mol_type = other DNA
ctgtgagggtgttaccaaag

SEQ ID NO: 14448 - DNA, 20 bp, synthetic construct
  misc_feature 1..20: note = chemically synthesized
  source 1..20: mol_type = other DNA
accaaaggagattaatattt

SEQ ID NO: 14449 - DNA, 20 bp, synthetic construct
  misc_feature 1..20: note = chemically synthesized
  source 1..20: mol_type = other DNA
aaggagattaatatttcagt

SEQ ID NO: 14450 - DNA, 20 bp, synthetic construct
  misc_feature 1..20: note = chemically synthesized
  source 1..20: mol_type = other DNA
gagattaatatttcagtcag

SEQ ID NO: 14451 - DNA, 20 bp, synthetic construct
  misc_feature 1..20: note = chemically synthesized
  source 1..20: mol_type = other DNA
agattaatatttcagtcagt

SEQ ID NO: 14452 - DNA, 20 bp, synthetic construct
  misc_feature 1..20: note = chemically synthesized
  source 1..20: mol_type = other DNA
taatatttcagtcagtgggc

SEQ ID NO: 14453 - DNA, 20 bp, synthetic construct
  misc_feature 1..20: note = chemically synthesized
  source 1..20: mol_type = other DNA
aatatttcagtcagtgggct

SEQ ID NO: 14454 - DNA, 20 bp, synthetic construct
  misc_feature 1..20: note = chemically synthesized
  source 1..20: mol_type = other DNA
atatttcagtcagtgggctg

SEQ ID NO: 14455 - DNA, 20 bp, synthetic construct
  misc_feature 1..20: note = chemically synthesized
  source 1..20: mol_type = other DNA
tttcagtcagtgggctgggg

SEQ ID NO: 14456 - DNA, 20 bp, synthetic construct
  misc_feature 1..20: note = chemically synthesized
  source 1..20: mol_type = other DNA
ttcagtcagtgggctgggga

SEQ ID NO: 14457 - DNA, 20 bp, synthetic construct
  misc_feature 1..20: note = chemically synthesized
  source 1..20: mol_type = other DNA
agtcagtgggctggggaagg

SEQ ID NO: 14458 - DNA, 20 bp, synthetic construct
  misc_feature 1..20: note = chemically synthesized
  source 1..20: mol_type = other DNA
aggcagacccacccttaatc

SEQ ID NO: 14459 - DNA, 20 bp, synthetic construct
  misc_feature 1..20: note = chemically synthesized
  source 1..20: mol_type = other DNA
ggcagacccacccttaatct

SEQ ID NO: 14460 - DNA, 20 bp, synthetic construct
  misc_feature 1..20: note = chemically synthesized
  source 1..20: mol_type = other DNA
agacccacccttaatctggg

SEQ ID NO: 14461 - DNA, 20 bp, synthetic construct
  misc_feature 1..20: note = chemically synthesized
  source 1..20: mol_type = other DNA
gacccacccttaatctgggt

SEQ ID NO: 14462 - DNA, 20 bp, synthetic construct
  misc_feature 1..20: note = chemically synthesized
  source 1..20: mol_type = other DNA
ctgggtgggcaccatctaat

SEQ ID NO: 14463 - DNA, 20 bp, synthetic construct
  misc_feature 1..20: note = chemically synthesized
  source 1..20: mol_type = other DNA
ggcaccatctaatcagttgc

SEQ ID NO: 14464 - DNA, 20 bp, synthetic construct
  misc_feature 1..20: note = chemically synthesized
  source 1..20: mol_type = other DNA
catctaatcagttgccagca

SEQ ID NO: 14465 - DNA, 20 bp, synthetic construct
  misc_feature 1..20: note = chemically synthesized
  source 1..20: mol_type = other DNA
taatcagttgccagcacagc

SEQ ID NO: 14466 - DNA, 20 bp, synthetic construct
  misc_feature 1..20: note = chemically synthesized
  source 1..20: mol_type = other DNA
aatcagttgccagcacagcc

SEQ ID NO: 14467 - DNA, 20 bp, synthetic construct
  misc_feature 1..20: note = chemically synthesized
  source 1..20: mol_type = other DNA
gccagcacagccaggatata

SEQ ID NO: 14468 - DNA, 20 bp, synthetic construct
  misc_feature 1..20: note = chemically synthesized
  source 1..20: mol_type = other DNA
agcacagccaggatataaag

SEQ ID NO: 14469 - DNA, 20 bp, synthetic construct
  misc_feature 1..20: note = chemically synthesized
  source 1..20: mol_type = other DNA
gcacagccaggatataaagc

SEQ ID NO: 14470 - DNA, 20 bp, synthetic construct
  misc_feature 1..20: note = chemically synthesized
  source 1..20: mol_type = other DNA
cagccaggatataaagcagg

SEQ ID NO: 14471 - DNA, 20 bp, synthetic construct
  misc_feature 1..20: note = chemically synthesized
  source 1..20: mol_type = other DNA
agcaggcagaaaaatgtgaa

SEQ ID NO: 14472 - DNA, 20 bp, synthetic construct
  misc_feature 1..20: note = chemically synthesized
  source 1..20: mol_type = other DNA
gcaggcagaaaaatgtgaaa

SEQ ID NO: 14473 - DNA, 20 bp, synthetic construct
  misc_feature 1..20: note = chemically synthesized
  source 1..20: mol_type = other DNA
gcagaaaaatgtgaaaaggc

SEQ ID NO: 14474 - DNA, 20 bp, synthetic construct
  misc_feature 1..20: note = chemically synthesized
  source 1..20: mol_type = other DNA
aaaatgtgaaaaggctagat

SEQ ID NO: 14475 - DNA, 20 bp, synthetic construct
  misc_feature 1..20: note = chemically synthesized
  source 1..20: mol_type = other DNA
gtgaaaaggctagattggct

SEQ ID NO: 14476 - DNA, 20 bp, synthetic construct
  misc_feature 1..20: note = chemically synthesized
  source 1..20: mol_type = other DNA
gctagattggcttggcatcc

SEQ ID NO: 14477 - DNA, 20 bp, synthetic construct
  misc_feature 1..20: note = chemically synthesized
  source 1..20: mol_type = other DNA
cctacatttttctcccatgc

SEQ ID NO: 14478 - DNA, 20 bp, synthetic construct
  misc_feature 1..20: note = chemically synthesized
  source 1..20: mol_type = other DNA
atgctggattcttcctgccc

SEQ ID NO: 14479 - DNA, 20 bp, synthetic construct
  misc_feature 1..20: note = chemically synthesized
  source 1..20: mol_type = other DNA
tgccctggaacattgaactc

SEQ ID NO: 14480 - DNA, 20 bp, synthetic construct
  misc_feature 1..20: note = chemically synthesized
  source 1..20: mol_type = other DNA
gccctggaacattgaactcc

SEQ ID NO: 14481 - DNA, 20 bp, synthetic construct
  misc_feature 1..20: note = chemically synthesized
  source 1..20: mol_type = other DNA
acattgaactccaggttctt

SEQ ID NO: 14482 - DNA, 20 bp, synthetic construct
  misc_feature 1..20: note = chemically synthesized
  source 1..20: mol_type = other DNA
aactccaggttcttcagctt

SEQ ID NO: 14483 - DNA, 20 bp, synthetic construct
  misc_feature 1..20: note = chemically synthesized
  source 1..20: mol_type = other DNA
actccaggttcttcagcttt

SEQ ID NO: 14484 - DNA, 20 bp, synthetic construct
  misc_feature 1..20: note = chemically synthesized
  source 1..20: mol_type = other DNA
ttcagctttgggactccgac

SEQ ID NO: 14485 - DNA, 20 bp, synthetic construct
  misc_feature 1..20: note = chemically synthesized
  source 1..20: mol_type = other DNA
cgactagcttccttgttcct

SEQ ID NO: 14486 - DNA, 20 bp, synthetic construct
  misc_feature 1..20: note = chemically synthesized
  source 1..20: mol_type = other DNA
tagcttccttgttcctcagc

SEQ ID NO: 14487 - DNA, 20 bp, synthetic construct
  misc_feature 1..20: note = chemically synthesized
  source 1..20: mol_type = other DNA
cttccttgttcctcagctgg

SEQ ID NO: 14488 - DNA, 20 bp, synthetic construct
  misc_feature 1..20: note = chemically synthesized
  source 1..20: mol_type = other DNA
cttgttcctcagctggcaga

SEQ ID NO: 14489 - DNA, 20 bp, synthetic construct
  misc_feature 1..20: note = chemically synthesized
  source 1..20: mol_type = other DNA
agctggcagatggcctgttt

SEQ ID NO: 14490 - DNA, 20 bp, synthetic construct
  misc_feature 1..20: note = chemically synthesized
  source 1..20: mol_type = other DNA
gctggcagatggcctgtttt

SEQ ID NO: 14491 - DNA, 20 bp, synthetic construct
  misc_feature 1..20: note = chemically synthesized
  source 1..20: mol_type = other DNA
ttgggaccttgtgaacatgt

SEQ ID NO: 14492 - DNA, 20 bp, synthetic construct
  misc_feature 1..20: note = chemically synthesized
  source 1..20: mol_type = other DNA
ctacataataaactctcata

SEQ ID NO: 14493 - DNA, 20 bp, synthetic construct
  misc_feature 1..20: note = chemically synthesized
  source 1..20: mol_type = other DNA
aataaactctcatatagata

SEQ ID NO: 14494 - DNA, 20 bp, synthetic construct
  misc_feature 1..20: note = chemically synthesized
  source 1..20: mol_type = other DNA
ctctcatatagatatagata

SEQ ID NO: 14495 - DNA, 20 bp, synthetic construct
  misc_feature 1..20: note = chemically synthesized
  source 1..20: mol_type = other DNA
ctcatatagatatagatata

SEQ ID NO: 14496 - DNA, 20 bp, synthetic construct
  misc_feature 1..20: note = chemically synthesized
  source 1..20: mol_type = other DNA
tatagatatagatatagaga

SEQ ID NO: 14497 - DNA, 20 bp, synthetic construct
  misc_feature 1..20: note = chemically synthesized
  source 1..20: mol_type = other DNA
tatagatatagagatagata

SEQ ID NO: 14498 - DNA, 20 bp, synthetic construct
  misc_feature 1..20: note = chemically synthesized
  source 1..20: mol_type = other DNA
tagatatagagatagatata

SEQ ID NO: 14499 - DNA, 20 bp, synthetic construct
  misc_feature 1..20: note = chemically synthesized
  source 1..20: mol_type = other DNA
tatagagatagatatagaga

SEQ ID NO: 14500 - DNA, 20 bp, synthetic construct
  misc_feature 1..20: note = chemically synthesized
  source 1..20: mol_type = other DNA
gatagatatagagatagata

SEQ ID NO: 14501 - DNA, 20 bp, synthetic construct
  misc_feature 1..20: note = chemically synthesized
  source 1..20: mol_type = other DNA
tatagagatagatatagata

SEQ ID NO: 14502 - DNA, 20 bp, synthetic construct
  misc_feature 1..20: note = chemically synthesized
  source 1..20: mol_type = other DNA
gatagatatagatatagata

SEQ ID NO: 14503 - DNA, 20 bp, synthetic construct
  misc_feature 1..20: note = chemically synthesized
  source 1..20: mol_type = other DNA
tatagatatagatatagata

SEQ ID NO: 14504 - DNA, 20 bp, synthetic construct
  misc_feature 1..20: note = chemically synthesized
  source 1..20: mol_type = other DNA
tatagatatagatatagata

SEQ ID NO: 14505 - DNA, 20 bp, synthetic construct
  misc_feature 1..20: note = chemically synthesized
  source 1..20: mol_type = other DNA
tatagatatagatatagata

SEQ ID NO: 14506 - DNA, 20 bp, synthetic construct
  misc_feature 1..20: note = chemically synthesized
  source 1..20: mol_type = other DNA
ctattaattctgtttctctg

SEQ ID NO: 14507 - DNA, 20 bp, synthetic construct
  misc_feature 1..20: note = chemically synthesized
  source 1..20: mol_type = other DNA
ttctctgtagaaccctaata

SEQ ID NO: 14508 - DNA, 20 bp, synthetic construct
  misc_feature 1..20: note = chemically synthesized
  source 1..20: mol_type = other DNA
tagaaccctaatacagattt

SEQ ID NO: 14509 - DNA, 20 bp, synthetic construct
  misc_feature 1..20: note = chemically synthesized
  source 1..20: mol_type = other DNA
cctaatacagattttggtac

SEQ ID NO: 14510 - DNA, 20 bp, synthetic construct
  misc_feature 1..20: note = chemically synthesized
  source 1..20: mol_type = other DNA
ctaatacagattttggtacc

SEQ ID NO: 14511 - DNA, 20 bp, synthetic construct
  misc_feature 1..20: note = chemically synthesized
  source 1..20: mol_type = other DNA
aatacagattttggtaccag

SEQ ID NO: 14512 - DNA, 20 bp, synthetic construct
  misc_feature 1..20: note = chemically synthesized
  source 1..20: mol_type = other DNA
acagattttggtaccaggag

SEQ ID NO: 14513 - DNA, 20 bp, synthetic construct
  misc_feature 1..20: note = chemically synthesized
  source 1..20: mol_type = other DNA
tttggtaccaggagtggttc

SEQ ID NO: 14514 - DNA, 20 bp, synthetic construct
  misc_feature 1..20: note = chemically synthesized
  source 1..20: mol_type = other DNA
tggtaccaggagtggttcta

SEQ ID NO: 14515 - DNA, 20 bp, synthetic construct
  misc_feature 1..20: note = chemically synthesized
  source 1..20: mol_type = other DNA
ggtaccaggagtggttctag

SEQ ID NO: 14516 - DNA, 20 bp, synthetic construct
  misc_feature 1..20: note = chemically synthesized
  source 1..20: mol_type = other DNA
caggagtggttctagaggaa

SEQ ID NO: 14517 - DNA, 20 bp, synthetic construct
  misc_feature 1..20: note = chemically synthesized
  source 1..20: mol_type = other DNA
ttctagaggaacagaatatt

SEQ ID NO: 14518 - DNA, 20 bp, synthetic construct
  misc_feature 1..20: note = chemically synthesized
  source 1..20: mol_type = other DNA
tctagaggaacagaatatta

SEQ ID NO: 14519 - DNA, 20 bp, synthetic construct
  misc_feature 1..20: note = chemically synthesized
  source 1..20: mol_type = other DNA
gaggaacagaatattaagga

SEQ ID NO: 14520 - DNA, 20 bp, synthetic construct
  misc_feature 1..20: note = chemically synthesized
  source 1..20: mol_type = other DNA
ggaacagaatattaaggatg

SEQ ID NO: 14521 - DNA, 20 bp, synthetic construct
  misc_feature 1..20: note = chemically synthesized
  source 1..20: mol_type = other DNA
taaggatggagttctttcat

SEQ ID NO: 14522 - DNA, 20 bp, synthetic construct
  misc_feature 1..20: note = chemically synthesized
  source 1..20: mol_type = other DNA
tggagttctttcattggttt

SEQ ID NO: 14523 - DNA, 20 bp, synthetic construct
  misc_feature 1..20: note = chemically synthesized
  source 1..20: mol_type = other DNA
ggagttctttcattggtttt

SEQ ID NO: 14524 - DNA, 20 bp, synthetic construct
  misc_feature 1..20: note = chemically synthesized
  source 1..20: mol_type = other DNA
gagttctttcattggttttg

SEQ ID NO: 14525 - DNA, 20 bp, synthetic construct
  misc_feature 1..20: note = chemically synthesized
  source 1..20: mol_type = other DNA
ttcattggttttggggtttc

SEQ ID NO: 14526 - DNA, 20 bp, synthetic construct
  misc_feature 1..20: note = chemically synthesized
  source 1..20: mol_type = other DNA
cattggttttggggtttctg

SEQ ID NO: 14527 - DNA, 20 bp, synthetic construct
  misc_feature 1..20: note = chemically synthesized
  source 1..20: mol_type = other DNA
ggttttggggtttctggagt

SEQ ID NO: 14528 - DNA, 20 bp, synthetic construct
  misc_feature 1..20: note = chemically synthesized
  source 1..20: mol_type = other DNA
agttggctgcttaatatgat

SEQ ID NO: 14529 - DNA, 20 bp, synthetic construct
  misc_feature 1..20: note = chemically synthesized
  source 1..20: mol_type = other DNA
tgattagacccaaatatgct

SEQ ID NO: 14530 - DNA, 20 bp, synthetic construct
  misc_feature 1..20: note = chemically synthesized
  source 1..20: mol_type = other DNA
gattagacccaaatatgcta

SEQ ID NO: 14531 - DNA, 20 bp, synthetic construct
  misc_feature 1..20: note = chemically synthesized
  source 1..20: mol_type = other DNA
gctaaggactcttcttctaa

SEQ ID NO: 14532 - DNA, 20 bp, synthetic construct
  misc_feature 1..20: note = chemically synthesized
  source 1..20: mol_type = other DNA
ggactcttcttctaatggta

SEQ ID NO: 14533 - DNA, 20 bp, synthetic construct
  misc_feature 1..20: note = chemically synthesized
  source 1..20: mol_type = other DNA
actcttcttctaatggtatg

SEQ ID NO: 14534 - DNA, 20 bp, synthetic construct
  misc_feature 1..20: note = chemically synthesized
  source 1..20: mol_type = other DNA
tggagaacactgataatcct

SEQ ID NO: 14535 - DNA, 20 bp, synthetic construct
  misc_feature 1..20: note = chemically synthesized
  source 1..20: mol_type = other DNA
aatccttggcatcaattgtt

SEQ ID NO: 14536 - DNA, 20 bp, synthetic construct
  misc_feature 1..20: note = chemically synthesized
  source 1..20: mol_type = other DNA
tccttggcatcaattgttta

SEQ ID NO: 14537 - DNA, 20 bp, synthetic construct
  misc_feature 1..20: note = chemically synthesized
  source 1..20: mol_type = other DNA
cttggcatcaattgtttaga

SEQ ID NO: 14538 - DNA, 20 bp, synthetic construct
  misc_feature 1..20: note = chemically synthesized
  source 1..20: mol_type = other DNA
actcttgattcaacgcttgt

SEQ ID NO: 14539 - DNA, 20 bp, synthetic construct
  misc_feature 1..20: note = chemically synthesized
  source 1..20: mol_type = other DNA
tcttgattcaacgcttgtga

SEQ ID NO: 14540 - DNA, 20 bp, synthetic construct
  misc_feature 1..20: note = chemically synthesized
  source 1..20: mol_type = other DNA
cttgattcaacgcttgtgag

SEQ ID NO: 14541 - DNA, 20 bp, synthetic construct
  misc_feature 1..20: note = chemically synthesized
  source 1..20: mol_type = other DNA
attcaacgcttgtgagaggc

SEQ ID NO: 14542 - DNA, 20 bp, synthetic construct
  misc_feature 1..20: note = chemically synthesized
  source 1..20: mol_type = other DNA
ttcaacgcttgtgagaggca

SEQ ID NO: 14543 - DNA, 20 bp, synthetic construct
  misc_feature 1..20: note = chemically synthesized
  source 1..20: mol_type = other DNA
cttgtgagaggcaaggaatt

SEQ ID NO: 14544 - DNA, 20 bp, synthetic construct
  misc_feature 1..20: note = chemically synthesized
  source 1..20: mol_type = other DNA
ataatacttttgactatatg

SEQ ID NO: 14545 - DNA, 20 bp, synthetic construct
  misc_feature 1..20: note = chemically synthesized
  source 1..20: mol_type = other DNA
aatacttttgactatatgtg

SEQ ID NO: 14546 - DNA, 20 bp, synthetic construct
  misc_feature 1..20: note = chemically synthesized
  source 1..20: mol_type = other DNA
ttgactatatgtggagaatc

SEQ ID NO: 14547 - DNA, 20 bp, synthetic construct
  misc_feature 1..20: note = chemically synthesized
  source 1..20: mol_type = other DNA
tgactatatgtggagaatca

SEQ ID NO: 14548 - DNA, 20 bp, synthetic construct
  misc_feature 1..20: note = chemically synthesized
  source 1..20: mol_type = other DNA
atgtggagaatcaaggaaca

SEQ ID NO: 14549 - DNA, 20 bp, synthetic construct
  misc_feature 1..20: note = chemically synthesized
  source 1..20: mol_type = other DNA
gagaatcaaggaacatagtg

SEQ ID NO: 14550 - DNA, 20 bp, synthetic construct
  misc_feature 1..20: note = chemically synthesized
  source 1..20: mol_type = other DNA
atcaaggaacatagtgaagt

SEQ ID NO: 14551 - DNA, 20 bp, synthetic construct
  misc_feature 1..20: note = chemically synthesized
  source 1..20: mol_type = other DNA
aggaacatagtgaagttggt

SEQ ID NO: 14552 - DNA, 20 bp, synthetic construct
  misc_feature 1..20: note = chemically synthesized
  source 1..20: mol_type = other DNA
gaagttggttggttgcttgt

SEQ ID NO: 14553 - DNA, 20 bp, synthetic construct
  misc_feature 1..20: note = chemically synthesized
  source 1..20: mol_type = other DNA
ttggttgcttgtaagttcgc

SEQ ID NO: 14554 - DNA, 20 bp, synthetic construct
  misc_feature 1..20: note = chemically synthesized
  source 1..20: mol_type = other DNA
gcttgtaagttcgctggaca

SEQ ID NO: 14555 - DNA, 20 bp, synthetic construct
  misc_feature 1..20: note = chemically synthesized
  source 1..20: mol_type = other DNA
ttcgctggacaaagtgatga

SEQ ID NO: 14556 - DNA, 20 bp, synthetic construct
  misc_feature 1..20: note = chemically synthesized
  source 1..20: mol_type = other DNA
atgaaagaaaatgatgaact

SEQ ID NO: 14557 - DNA, 20 bp, synthetic construct
  misc_feature 1..20: note = chemically synthesized
  source 1..20: mol_type = other DNA
tgaaagaaaatgatgaactc

SEQ ID NO: 14558 - DNA, 20 bp, synthetic construct
  misc_feature 1..20: note = chemically synthesized
  source 1..20: mol_type = other DNA
aaagaaaatgatgaactcag

SEQ ID NO: 14559 - DNA, 20 bp, synthetic construct
  misc_feature 1..20: note = chemically synthesized
  source 1..20: mol_type = other DNA
tcaggagtatatcaactctc

SEQ ID NO: 14560 - DNA, 20 bp, synthetic construct
  misc_feature 1..20: note = chemically synthesized
  source 1..20: mol_type = other DNA
ctttgtgccataatcttatt

SEQ ID NO: 14561 - DNA, 20 bp, synthetic construct
  misc_feature 1..20: note = chemically synthesized
  source 1..20: mol_type = other DNA
ttgtgccataatcttatttg

SEQ ID NO: 14562 - DNA, 20 bp, synthetic construct
  misc_feature 1..20: note = chemically synthesized
  source 1..20: mol_type = other DNA
gtgccataatcttatttgga

SEQ ID NO: 14563 - DNA, 20 bp, synthetic construct
  misc_feature 1..20: note = chemically synthesized
  source 1..20: mol_type = other DNA
tgctcacctttcacttccac

SEQ ID NO: 14564 - DNA, 20 bp, synthetic construct
  misc_feature 1..20: note = chemically synthesized
  source 1..20: mol_type = other DNA
ttcacttccacaagatatca

SEQ ID NO: 14565 - DNA, 20 bp, synthetic construct
  misc_feature 1..20: note = chemically synthesized
  source 1..20: mol_type = other DNA
acttccacaagatatcacag

SEQ ID NO: 14566 - DNA, 20 bp, synthetic construct
  misc_feature 1..20: note = chemically synthesized
  source 1..20: mol_type = other DNA
tacattgatgacatgctgac

SEQ ID NO: 14567 - DNA, 20 bp, synthetic construct
  misc_feature 1..20: note = chemically synthesized
  source 1..20: mol_type = other DNA
gatgacatgctgactggaac

SEQ ID NO: 14568 - DNA, 20 bp, synthetic construct
  misc_feature 1..20: note = chemically synthesized
  source 1..20: mol_type = other DNA
acatgctgactggaactagt

SEQ ID NO: 14569 - DNA, 20 bp, synthetic construct
  misc_feature 1..20: note = chemically synthesized
  source 1..20: mol_type = other DNA
gctgactggaactagtgagc

SEQ ID NO: 14570 - DNA, 20 bp, synthetic construct
  misc_feature 1..20: note = chemically synthesized
  source 1..20: mol_type = other DNA
gactggaactagtgagcaag

SEQ ID NO: 14571 - DNA, 20 bp, synthetic construct
  misc_feature 1..20: note = chemically synthesized
  source 1..20: mol_type = other DNA
tggaactagtgagcaagaag

SEQ ID NO: 14572 - DNA, 20 bp, synthetic construct
  misc_feature 1..20: note = chemically synthesized
  source 1..20: mol_type = other DNA
gcaagaagtagcaaacacac

SEQ ID NO: 14573 - DNA, 20 bp, synthetic construct
  misc_feature 1..20: note = chemically synthesized
  source 1..20: mol_type = other DNA
aacacactggatttattgat

SEQ ID NO: 14574 - DNA, 20 bp, synthetic construct
  misc_feature 1..20: note = chemically synthesized
  source 1..20: mol_type = other DNA
atttattgatgagacatttg

SEQ ID NO: 14575 - DNA, 20 bp, synthetic construct
  misc_feature 1..20: note = chemically synthesized
  source 1..20: mol_type = other DNA
tttattgatgagacatttgt

SEQ ID NO: 14576 - DNA, 20 bp, synthetic construct
  misc_feature 1..20: note = chemically synthesized
  source 1..20: mol_type = other DNA
ttgatgagacatttgtggga

SEQ ID NO: 14577 - DNA, 20 bp, synthetic construct
  misc_feature 1..20: note = chemically synthesized
  source 1..20: mol_type = other DNA
gatgagacatttgtgggaca

SEQ ID NO: 14578 - DNA, 20 bp, synthetic construct
  misc_feature 1..20: note = chemically synthesized
  source 1..20: mol_type = other DNA
atgagacatttgtgggacag

SEQ ID NO: 14579 - DNA, 20 bp, synthetic construct
  misc_feature 1..20: note = chemically synthesized
  source 1..20: mol_type = other DNA
gacatttgtgggacagagga

SEQ ID NO: 14580 - DNA, 20 bp, synthetic construct
  misc_feature 1..20: note = chemically synthesized
  source 1..20: mol_type = other DNA
acatttgtgggacagaggat

SEQ ID NO: 14581 - DNA, 20 bp, synthetic construct
  misc_feature 1..20: note = chemically synthesized
  source 1..20: mol_type = other DNA
gaaataaatctgattaaatt

SEQ ID NO: 14582 - DNA, 20 bp, synthetic construct
  misc_feature 1..20: note = chemically synthesized
  source 1..20: mol_type = other DNA
aaataaatctgattaaattc

SEQ ID NO: 14583 - DNA, 20 bp, synthetic construct
  misc_feature 1..20: note = chemically synthesized
  source 1..20: mol_type = other DNA
aataaatctgattaaattca

SEQ ID NO: 14584 - DNA, 20 bp, synthetic construct
  misc_feature 1..20: note = chemically synthesized
  source 1..20: mol_type = other DNA
aattcagggaccttctacct

SEQ ID NO: 14585 - DNA, 20 bp, synthetic construct
  misc_feature 1..20: note = chemically synthesized
  source 1..20: mol_type = other DNA
ttctacctcagtaaaattta

SEQ ID NO: 14586 - DNA, 20 bp, synthetic construct
  misc_feature 1..20: note = chemically synthesized
  source 1..20: mol_type = other DNA
tctacctcagtaaaatttat

SEQ ID NO: 14587 - DNA, 20 bp, synthetic construct
  misc_feature 1..20: note = chemically synthesized
  source 1..20: mol_type = other DNA
ctacctcagtaaaatttata

SEQ ID NO: 14588 - DNA, 20 bp, synthetic construct
  misc_feature 1..20: note = chemically synthesized
  source 1..20: mol_type = other DNA
tacctcagtaaaatttatag

SEQ ID NO: 14589 - DNA, 20 bp, synthetic construct
  misc_feature 1..20: note = chemically synthesized
  source 1..20: mol_type = other DNA
taaaatttataggggtccaa

SEQ ID NO: 14590 - DNA, 20 bp, synthetic construct
  misc_feature 1..20: note = chemically synthesized
  source 1..20: mol_type = other DNA
tttataggggtccaatggtt

SEQ ID NO: 14591 - DNA, 20 bp, synthetic construct
  misc_feature 1..20: note = chemically synthesized
  source 1..20: mol_type = other DNA
ttataggggtccaatggttt

SEQ ID NO: 14592 - DNA, 20 bp, synthetic construct
  misc_feature 1..20: note = chemically synthesized
  source 1..20: mol_type = other DNA
tataggggtccaatggtttg

SEQ ID NO: 14593 - DNA, 20 bp, synthetic construct
  misc_feature 1..20: note = chemically synthesized
  source 1..20: mol_type = other DNA
ccaatggtttggggctcttt

SEQ ID NO: 14594 - DNA, 20 bp, synthetic construct
  misc_feature 1..20: note = chemically synthesized
  source 1..20: mol_type = other DNA
tctttgagatattccttcta

SEQ ID NO: 14595 - DNA, 20 bp, synthetic construct
  misc_feature 1..20: note = chemically synthesized
  source 1..20: mol_type = other DNA
gagatattccttctaaagtg

SEQ ID NO: 14596 - DNA, 20 bp, synthetic construct
  misc_feature 1..20: note = chemically synthesized
  source 1..20: mol_type = other DNA
agatattccttctaaagtga

SEQ ID NO: 14597 - DNA, 20 bp, synthetic construct
  misc_feature 1..20: note = chemically synthesized
  source 1..20: mol_type = other DNA
gaaggataatttgctgcatt

SEQ ID NO: 14598 - DNA, 20 bp, synthetic construct
  misc_feature 1..20: note = chemically synthesized
  source 1..20: mol_type = other DNA
atttggccactcttacaacc

SEQ ID NO: 14599 - DNA, 20 bp, synthetic construct
  misc_feature 1..20: note = chemically synthesized
  source 1..20: mol_type = other DNA
ccactcttacaaccaagaaa

SEQ ID NO: 14600 - DNA, 20 bp, synthetic construct
  misc_feature 1..20: note = chemically synthesized
  source 1..20: mol_type = other DNA
cactcttacaaccaagaaat

SEQ ID NO: 14601 - DNA, 20 bp, synthetic construct
  misc_feature 1..20: note = chemically synthesized
  source 1..20: mol_type = other DNA
caagaaataggcacaacgcc

SEQ ID NO: 14602 - DNA, 20 bp, synthetic construct
  misc_feature 1..20: note = chemically synthesized
  source 1..20: mol_type = other DNA
gaaataggcacaacgcctag

SEQ ID NO: 14603 - DNA, 20 bp, synthetic construct
  misc_feature 1..20: note = chemically synthesized
  source 1..20: mol_type = other DNA
aaataggcacaacgcctagt

SEQ ID NO: 14604 - DNA, 20 bp, synthetic construct
  misc_feature 1..20: note = chemically synthesized
  source 1..20: mol_type = other DNA
caacgcctagtgggcctatt

SEQ ID NO: 14605 - DNA, 20 bp, synthetic construct
  misc_feature 1..20: note = chemically synthesized
  source 1..20: mol_type = other DNA
tagtgggcctatttggattt

SEQ ID NO: 14606 - DNA, 20 bp, synthetic construct
  misc_feature 1..20: note = chemically synthesized
  source 1..20: mol_type = other DNA
gtgggcctatttggattttg

SEQ ID NO: 14607 - DNA, 20 bp, synthetic construct
  misc_feature 1..20: note = chemically synthesized
  source 1..20: mol_type = other DNA
tgggcctatttggattttgg

SEQ ID NO: 14608 - DNA, 20 bp, synthetic construct
  misc_feature 1..20: note = chemically synthesized
  source 1..20: mol_type = other DNA
gaggcaacatattcctgatt

SEQ ID NO: 14609 - DNA, 20 bp, synthetic construct
  misc_feature 1..20: note = chemically synthesized
  source 1..20: mol_type = other DNA
aggcaacatattcctgattt

SEQ ID NO: 14610 - DNA, 20 bp, synthetic construct
  misc_feature 1..20: note = chemically synthesized
  source 1..20: mol_type = other DNA
ctgatttgggtgtgttactc

SEQ ID NO: 14611 - DNA, 20 bp, synthetic construct
  misc_feature 1..20: note = chemically synthesized
  source 1..20: mol_type = other DNA
gttactctggcccatttatc

SEQ ID NO: 14612 - DNA, 20 bp, synthetic construct
  misc_feature 1..20: note = chemically synthesized
  source 1..20: mol_type = other DNA
ccatttatcgagtgatccaa

SEQ ID NO: 14613 - DNA, 20 bp, synthetic construct
  misc_feature 1..20: note = chemically synthesized
  source 1..20: mol_type = other DNA
catttatcgagtgatccaaa

SEQ ID NO: 14614 - DNA, 20 bp, synthetic construct
  misc_feature 1..20: note = chemically synthesized
  source 1..20: mol_type = other DNA
cgagtgatccaaaaggctgc

SEQ ID NO: 14615 - DNA, 20 bp, synthetic construct
  misc_feature 1..20: note = chemically synthesized
  source 1..20: mol_type = other DNA
tccaaaaggctgccagtttt

SEQ ID NO: 14616 - DNA, 20 bp, synthetic construct
  misc_feature 1..20: note = chemically synthesized
  source 1..20: mol_type = other DNA
aaaaggctgccagttttgag

SEQ ID NO: 14617 - DNA, 20 bp, synthetic construct
  misc_feature 1..20: note = chemically synthesized
  source 1..20: mol_type = other DNA
aaggctgccagttttgagtg

SEQ ID NO: 14618 - DNA, 20 bp, synthetic construct
  misc_feature 1..20: note = chemically synthesized
  source 1..20: mol_type = other DNA
tgccagttttgagtggagtc

SEQ ID NO: 14619 - DNA, 20 bp, synthetic construct
  misc_feature 1..20: note = chemically synthesized
  source 1..20: mol_type = other DNA
gttttgagtggagtccagaa

SEQ ID NO: 14620 - DNA, 20 bp, synthetic construct
  misc_feature 1..20: note = chemically synthesized
  source 1..20: mol_type = other DNA
ttgagtggagtccagaacag

SEQ ID NO: 14621 - DNA, 20 bp, synthetic construct
  misc_feature 1..20: note = chemically synthesized
  source 1..20: mol_type = other DNA
tgagtggagtccagaacaga

SEQ ID NO: 14622 - DNA, 20 bp, synthetic construct
  misc_feature 1..20: note = chemically synthesized
  source 1..20: mol_type = other DNA
cagaacagaaggctctgcca

SEQ ID NO: 14623 - DNA, 20 bp, synthetic construct
  misc_feature 1..20: note = chemically synthesized
  source 1..20: mol_type = other DNA
agaacagaaggctctgccac

SEQ ID NO: 14624 - DNA, 20 bp, synthetic construct
  misc_feature 1..20: note = chemically synthesized
  source 1..20: mol_type = other DNA
agaaggctctgccacaggtc

SEQ ID NO: 14625 - DNA, 20 bp, synthetic construct
  misc_feature 1..20: note = chemically synthesized
  source 1..20: mol_type = other DNA
gaaggctctgccacaggtcc

SEQ ID NO: 14626 - DNA, 20 bp, synthetic construct
  misc_feature 1..20: note = chemically synthesized
  source 1..20: mol_type = other DNA
acaggtccaggctgctgtgc

SEQ ID NO: 14627 - DNA, 20 bp, synthetic construct
  misc_feature 1..20: note = chemically synthesized
  source 1..20: mol_type = other DNA
gtgcaagctgctatgccact

SEQ ID NO: 14628 - DNA, 20 bp, synthetic construct
  misc_feature 1..20: note = chemically synthesized
  source 1..20: mol_type = other DNA
tgcaagctgctatgccactt

SEQ ID NO: 14629 - DNA, 20 bp, synthetic construct
  misc_feature 1..20: note = chemically synthesized
  source 1..20: mol_type = other DNA
gccacttgggccatatgacc

SEQ ID NO: 14630 - DNA, 20 bp, synthetic construct
  misc_feature 1..20: note = chemically synthesized
  source 1..20: mol_type = other DNA
acttgggccatatgacctag

SEQ ID NO: 14631 - DNA, 20 bp, synthetic construct
  misc_feature 1..20: note = chemically synthesized
  source 1..20: mol_type = other DNA
tagcagatccaatgatgctt

SEQ ID NO: 14632 - DNA, 20 bp, synthetic construct
  misc_feature 1..20: note = chemically synthesized
  source 1..20: mol_type = other DNA
agcagatccaatgatgcttg

SEQ ID NO: 14633 - DNA, 20 bp, synthetic construct
  misc_feature 1..20: note = chemically synthesized
  source 1..20: mol_type = other DNA
tccaatgatgcttgaggtgt

SEQ ID NO: 14634 - DNA, 20 bp, synthetic construct
  misc_feature 1..20: note = chemically synthesized
  source 1..20: mol_type = other DNA
gatgcttgaggtgtcagtgc

SEQ ID NO: 14635 - DNA, 20 bp, synthetic construct
  misc_feature 1..20: note = chemically synthesized
  source 1..20: mol_type = other DNA
cttgaggtgtcagtgccaga

SEQ ID NO: 14636 - DNA, 20 bp, synthetic construct
  misc_feature 1..20: note = chemically synthesized
  source 1..20: mol_type = other DNA
ttgaggtgtcagtgccagat

SEQ ID NO: 14637 - DNA, 20 bp, synthetic construct
  misc_feature 1..20: note = chemically synthesized
  source 1..20: mol_type = other DNA
tgaggtgtcagtgccagata

SEQ ID NO: 14638 - DNA, 20 bp, synthetic construct
  misc_feature 1..20: note = chemically synthesized
  source 1..20: mol_type = other DNA
tgccagatagggatgctgtt

SEQ ID NO: 14639 - DNA, 20 bp, synthetic construct
  misc_feature 1..20: note = chemically synthesized
  source 1..20: mol_type = other DNA
ccagatagggatgctgtttg

SEQ ID NO: 14640 - DNA, 20 bp, synthetic construct
  misc_feature 1..20: note = chemically synthesized
  source 1..20: mol_type = other DNA
gggatgctgtttggagcatt

SEQ ID NO: 14641 - DNA, 20 bp, synthetic construct
  misc_feature 1..20: note = chemically synthesized
  source 1..20: mol_type = other DNA
atgctgtttggagcatttgg

SEQ ID NO: 14642 - DNA, 20 bp, synthetic construct
  misc_feature 1..20: note = chemically synthesized
  source 1..20: mol_type = other DNA
tgctgtttggagcatttggc

SEQ ID NO: 14643 - DNA, 20 bp, synthetic construct
  misc_feature 1..20: note = chemically synthesized
  source 1..20: mol_type = other DNA
gcatttggcaggctgaatca

SEQ ID NO: 14644 - DNA, 20 bp, synthetic construct
  misc_feature 1..20: note = chemically synthesized
  source 1..20: mol_type = other DNA
tttggcaggctgaatcacag

SEQ ID NO: 14645 - DNA, 20 bp, synthetic construct
  misc_feature 1..20: note = chemically synthesized
  source 1..20: mol_type = other DNA
tggcaggctgaatcacagcg

SEQ ID NO: 14646 - DNA, 20 bp, synthetic construct
  misc_feature 1..20: note = chemically synthesized
  source 1..20: mol_type = other DNA
ggcaggctgaatcacagcgg

SEQ ID NO: 14647 - DNA, 20 bp, synthetic construct
  misc_feature 1..20: note = chemically synthesized
  source 1..20: mol_type = other DNA
tgaatcacagcggaggcctc

SEQ ID NO: 14648 - DNA, 20 bp, synthetic construct
  misc_feature 1..20: note = chemically synthesized
  source 1..20: mol_type = other DNA
gaatcacagcggaggcctct

SEQ ID NO: 14649 - DNA, 20 bp, synthetic construct
  misc_feature 1..20: note = chemically synthesized
  source 1..20: mol_type = other DNA
agcggaggcctctaggattt

SEQ ID NO: 14650 - DNA, 20 bp, synthetic construct
  misc_feature 1..20: note = chemically synthesized
  source 1..20: mol_type = other DNA
cggaggcctctaggattttg

SEQ ID NO: 14651 - DNA, 20 bp, synthetic construct
  misc_feature 1..20: note = chemically synthesized
  source 1..20: mol_type = other DNA
ggcctctaggattttggagc

SEQ ID NO: 14652 - DNA, 20 bp, synthetic construct
  misc_feature 1..20: note = chemically synthesized
  source 1..20: mol_type = other DNA
gcctctaggattttggagca

SEQ ID NO: 14653 - DNA, 20 bp, synthetic construct
  misc_feature 1..20: note = chemically synthesized
  source 1..20: mol_type = other DNA
caaggccctgccatcttctg

SEQ ID NO: 14654 - DNA, 20 bp, synthetic construct
  misc_feature 1..20: note = chemically synthesized
  source 1..20: mol_type = other DNA
tgcagataactactctcttt

SEQ ID NO: 14655 - DNA, 20 bp, synthetic construct
  misc_feature 1..20: note = chemically synthesized
  source 1..20: mol_type = other DNA
gcagataactactctctttt

SEQ ID NO: 14656 - DNA, 20 bp, synthetic construct
  misc_feature 1..20: note = chemically synthesized
  source 1..20: mol_type = other DNA
cagataactactctctttta

SEQ ID NO: 14657 - DNA, 20 bp, synthetic construct
  misc_feature 1..20: note = chemically synthesized
  source 1..20: mol_type = other DNA
gataactactctcttttagg

SEQ ID NO: 14658 - DNA, 20 bp, synthetic construct
  misc_feature 1..20: note = chemically synthesized
  source 1..20: mol_type = other DNA
actactctcttttagggaga

SEQ ID NO: 14659 - DNA, 20 bp, synthetic construct
  misc_feature 1..20: note = chemically synthesized
  source 1..20: mol_type = other DNA
tcttttagggagaaagctct

SEQ ID NO: 14660 - DNA, 20 bp, synthetic construct
  misc_feature 1..20: note = chemically synthesized
  source 1..20: mol_type = other DNA
gaaagctcttggcctgttac

SEQ ID NO: 14661 - DNA, 20 bp, synthetic construct
  misc_feature 1..20: note = chemically synthesized
  source 1..20: mol_type = other DNA
aaagctcttggcctgttact

SEQ ID NO: 14662 - DNA, 20 bp, synthetic construct
  misc_feature 1..20: note = chemically synthesized
  source 1..20: mol_type = other DNA
cttggcctgttactgggctt

SEQ ID NO: 14663 - DNA, 20 bp, synthetic construct
  misc_feature 1..20: note = chemically synthesized
  source 1..20: mol_type = other DNA
ggcctgttactgggctttgg

SEQ ID NO: 14664 - DNA, 20 bp, synthetic construct
  misc_feature 1..20: note = chemically synthesized
  source 1..20: mol_type = other DNA
gaaacgaaatatttgactat

SEQ ID NO: 14665 - DNA, 20 bp, synthetic construct
  misc_feature 1..20: note = chemically synthesized
  source 1..20: mol_type = other DNA
atatttgactatgagtcatc

SEQ ID NO: 14666 - DNA, 20 bp, synthetic construct
  misc_feature 1..20: note = chemically synthesized
  source 1..20: mol_type = other DNA
ctgaactgcctatcatgaac

SEQ ID NO: 14667 - DNA, 20 bp, synthetic construct
  misc_feature 1..20: note = chemically synthesized
  source 1..20: mol_type = other DNA
tgaactgcctatcatgaact

SEQ ID NO: 14668 - DNA, 20 bp, synthetic construct
  misc_feature 1..20: note = chemically synthesized
  source 1..20: mol_type = other DNA
tgggtgctttctgatccatc

SEQ ID NO: 14669 - DNA, 20 bp, synthetic construct
  misc_feature 1..20: note = chemically synthesized
  source 1..20: mol_type = other DNA
ttctgatccatctagccata

SEQ ID NO: 14670 - DNA, 20 bp, synthetic construct
  misc_feature 1..20: note = chemically synthesized
  source 1..20: mol_type = other DNA
tgatccatctagccataaag

SEQ ID NO: 14671 - DNA, 20 bp, synthetic construct
  misc_feature 1..20: note = chemically synthesized
  source 1..20: mol_type = other DNA
gatccatctagccataaagt

SEQ ID NO: 14672 - DNA, 20 bp, synthetic construct
  misc_feature 1..20: note = chemically synthesized
  source 1..20: mol_type = other DNA
gccataaagtgggctgtgca

SEQ ID NO: 14673 - DNA, 20 bp, synthetic construct
  misc_feature 1..20: note = chemically synthesized
  source 1..20: mol_type = other DNA
ataaagtgggctgtgcacag

SEQ ID NO: 14674 - DNA, 20 bp, synthetic construct
  misc_feature 1..20: note = chemically synthesized
  source 1..20: mol_type = other DNA
tgtgcacagcagcattgcat

SEQ ID NO: 14675 - DNA, 20 bp, synthetic construct
  misc_feature 1..20: note = chemically synthesized
  source 1..20: mol_type = other DNA
agcagcattgcatcagcaaa

SEQ ID NO: 14676 - DNA, 20 bp, synthetic construct
  misc_feature 1..20: note = chemically synthesized
  source 1..20: mol_type = other DNA
agcattgcatcagcaaatgg

SEQ ID NO: 14677 - DNA, 20 bp, synthetic construct
  misc_feature 1..20: note = chemically synthesized
  source 1..20: mol_type = other DNA
attgcatcagcaaatggaag

SEQ ID NO: 14678 - DNA, 20 bp, synthetic construct
  misc_feature 1..20: note = chemically synthesized
  source 1..20: mol_type = other DNA
ggaagtggtatatatgcgat

SEQ ID NO: 14679 - DNA, 20 bp, synthetic construct
  misc_feature 1..20: note = chemically synthesized
  source 1..20: mol_type = other DNA
gaagtggtatatatgcgatt

SEQ ID NO: 14680 - DNA, 20 bp, synthetic construct
  misc_feature 1..20: note = chemically synthesized
  source 1..20: mol_type = other DNA
gtatatatgcgattgggctt

SEQ ID NO: 14681 - DNA, 20 bp, synthetic construct
  misc_feature 1..20: note = chemically synthesized
  source 1..20: mol_type = other DNA
tatatgcgattgggcttgag

SEQ ID NO: 14682 - DNA, 20 bp, synthetic construct
  misc_feature 1..20: note = chemically synthesized
  source 1..20: mol_type = other DNA
ttgggcttgagcagatcctg

SEQ ID NO: 14683 - DNA, 20 bp, synthetic construct
  misc_feature 1..20: note = chemically synthesized
  source 1..20: mol_type = other DNA
tgggcttgagcagatcctga

SEQ ID NO: 14684 - DNA, 20 bp, synthetic construct
  misc_feature 1..20: note = chemically synthesized
  source 1..20: mol_type = other DNA
tgagcagatcctgaaggcac

SEQ ID NO: 14685 - DNA, 20 bp, synthetic construct
  misc_feature 1..20: note = chemically synthesized
  source 1..20: mol_type = other DNA
cagatcctgaaggcactagt

SEQ ID NO: 14686 - DNA, 20 bp, synthetic construct
  misc_feature 1..20: note = chemically synthesized
  source 1..20: mol_type = other DNA
aaggcactagtaagttacat

SEQ ID NO: 14687 - DNA, 20 bp, synthetic construct
  misc_feature 1..20: note = chemically synthesized
  source 1..20: mol_type = other DNA
cactagtaagttacatgaga

SEQ ID NO: 14688 - DNA, 20 bp, synthetic construct
  misc_feature 1..20: note = chemically synthesized
  source 1..20: mol_type = other DNA
actagtaagttacatgagaa

SEQ ID NO: 14689 - DNA, 20 bp, synthetic construct
  misc_feature 1..20: note = chemically synthesized
  source 1..20: mol_type = other DNA
ctagtaagttacatgagaaa

SEQ ID NO: 14690 - DNA, 20 bp, synthetic construct
  misc_feature 1..20: note = chemically synthesized
  source 1..20: mol_type = other DNA
tagtaagttacatgagaaag

SEQ ID NO: 14691 - DNA, 20 bp, synthetic construct
  misc_feature 1..20: note = chemically synthesized
  source 1..20: mol_type = other DNA
gaaaggggctcaaatgccca

SEQ ID NO: 14692 - DNA, 20 bp, synthetic construct
  misc_feature 1..20: note = chemically synthesized
  source 1..20: mol_type = other DNA
acacactgctttctctccct

SEQ ID NO: 14693 - DNA, 20 bp, synthetic construct
  misc_feature 1..20: note = chemically synthesized
  source 1..20: mol_type = other DNA
tctccctgagactgcaccga

SEQ ID NO: 14694 - DNA, 20 bp, synthetic construct
  misc_feature 1..20: note = chemically synthesized
  source 1..20: mol_type = other DNA
agactgcaccgatggtctca

SEQ ID NO: 14695 - DNA, 20 bp, synthetic construct
  misc_feature 1..20: note = chemically synthesized
  source 1..20: mol_type = other DNA
gactgcaccgatggtctcat

SEQ ID NO: 14696 - DNA, 20 bp, synthetic construct
  misc_feature 1..20: note = chemically synthesized
  source 1..20: mol_type = other DNA
actgcaccgatggtctcatg

SEQ ID NO: 14697 - DNA, 20 bp, synthetic construct
  misc_feature 1..20: note = chemically synthesized
  source 1..20: mol_type = other DNA
tgcaccgatggtctcatggg

SEQ ID NO: 14698 - DNA, 20 bp, synthetic construct
  misc_feature 1..20: note = chemically synthesized
  source 1..20: mol_type = other DNA
catggggagttccctatgat

SEQ ID NO: 14699 - DNA, 20 bp, synthetic construct
  misc_feature 1..20: note = chemically synthesized
  source 1..20: mol_type = other DNA
agttccctatgatcagctga

SEQ ID NO: 14700 - DNA, 20 bp, synthetic construct
  misc_feature 1..20: note = chemically synthesized
  source 1..20: mol_type = other DNA
ttccctatgatcagctgaca

SEQ ID NO: 14701 - DNA, 20 bp, synthetic construct
  misc_feature 1..20: note = chemically synthesized
  source 1..20: mol_type = other DNA
tccctatgatcagctgacag

SEQ ID NO: 14702 - DNA, 20 bp, synthetic construct
  misc_feature 1..20: note = chemically synthesized
  source 1..20: mol_type = other DNA
ctatgatcagctgacagagg

SEQ ID NO: 14703 - DNA, 20 bp, synthetic construct
  misc_feature 1..20: note = chemically synthesized
  source 1..20: mol_type = other DNA
atgatcagctgacagaggaa

SEQ ID NO: 14704 - DNA, 20 bp, synthetic construct
  misc_feature 1..20: note = chemically synthesized
  source 1..20: mol_type = other DNA
atcagctgacagaggaagag

SEQ ID NO: 14705 - DNA, 20 bp, synthetic construct
  misc_feature 1..20: note = chemically synthesized
  source 1..20: mol_type = other DNA
ctgacagaggaagagaagac

SEQ ID NO: 14706 - DNA, 20 bp, synthetic construct
  misc_feature 1..20: note = chemically synthesized
  source 1..20: mol_type = other DNA
tgacagaggaagagaagact

SEQ ID NO: 14707 - DNA, 20 bp, synthetic construct
  misc_feature 1..20: note = chemically synthesized
  source 1..20: mol_type = other DNA
aggaagagaagactaggtcc

SEQ ID NO: 14708 - DNA, 20 bp, synthetic construct
  misc_feature 1..20: note = chemically synthesized
  source 1..20: mol_type = other DNA
gaagactaggtcctggttca

SEQ ID NO: 14709 - DNA, 20 bp, synthetic construct
  misc_feature 1..20: note = chemically synthesized
  source 1..20: mol_type = other DNA
actaggtcctggttcacaga

SEQ ID NO: 14710 - DNA, 20 bp, synthetic construct
  misc_feature 1..20: note = chemically synthesized
  source 1..20: mol_type = other DNA
agatagttctgcacgatatg

SEQ ID NO: 14711 - DNA, 20 bp, synthetic construct
  misc_feature 1..20: note = chemically synthesized
  source 1..20: mol_type = other DNA
gatagttctgcacgatatgc

SEQ ID NO: 14712 - DNA, 20 bp, synthetic construct
  misc_feature 1..20: note = chemically synthesized
  source 1..20: mol_type = other DNA
gatatgcaggcaccacccaa

SEQ ID NO: 14713 - DNA, 20 bp, synthetic construct
  misc_feature 1..20: note = chemically synthesized
  source 1..20: mol_type = other DNA
atgcaggcaccacccaaaag

SEQ ID NO: 14714 - DNA, 20 bp, synthetic construct
  misc_feature 1..20: note = chemically synthesized
  source 1..20: mol_type = other DNA
aggcaccacccaaaagtgga

SEQ ID NO: 14715 - DNA, 20 bp, synthetic construct
  misc_feature 1..20: note = chemically synthesized
  source 1..20: mol_type = other DNA
cacccaaaagtggacagccg

SEQ ID NO: 14716 - DNA, 20 bp, synthetic construct
  misc_feature 1..20: note = chemically synthesized
  source 1..20: mol_type = other DNA
agtggacagccgcagcacta

SEQ ID NO: 14717 - DNA, 20 bp, synthetic construct
  misc_feature 1..20: note = chemically synthesized
  source 1..20: mol_type = other DNA
gcagcactacagcccctttc

SEQ ID NO: 14718 - DNA, 20 bp, synthetic construct
  misc_feature 1..20: note = chemically synthesized
  source 1..20: mol_type = other DNA
cagcactacagcccctttct

SEQ ID NO: 14719 - DNA, 20 bp, synthetic construct
  misc_feature 1..20: note = chemically synthesized
  source 1..20: mol_type = other DNA
ccctttctaggacatccctg

SEQ ID NO: 14720 - DNA, 20 bp, synthetic construct
  misc_feature 1..20: note = chemically synthesized
  source 1..20: mol_type = other DNA
cctttctaggacatccctga

SEQ ID NO: 14721 - DNA, 20 bp, synthetic construct
  misc_feature 1..20: note = chemically synthesized
  source 1..20: mol_type = other DNA
aggacatccctgaaggacaa

SEQ ID NO: 14722 - DNA, 20 bp, synthetic construct
  misc_feature 1..20: note = chemically synthesized
  source 1..20: mol_type = other DNA
atccctgaaggacaacggtg

SEQ ID NO: 14723 - DNA, 20 bp, synthetic construct
  misc_feature 1..20: note = chemically synthesized
  source 1..20: mol_type = other DNA
tccctgaaggacaacggtga

SEQ ID NO: 14724 - DNA, 20 bp, synthetic construct
  misc_feature 1..20: note = chemically synthesized
  source 1..20: mol_type = other DNA
ccctgaaggacaacggtgaa

SEQ ID NO: 14725 - DNA, 20 bp, synthetic construct
  misc_feature 1..20: note = chemically synthesized
  source 1..20: mol_type = other DNA
acggtgaagggaaatcttcc

SEQ ID NO: 14726 - DNA, 20 bp, synthetic construct
  misc_feature 1..20: note = chemically synthesized
  source 1..20: mol_type = other DNA
tgaagggaaatcttcctagt

SEQ ID NO: 14727 - DNA, 20 bp, synthetic construct
  misc_feature 1..20: note = chemically synthesized
  source 1..20: mol_type = other DNA
agggaaatcttcctagttgg

SEQ ID NO: 14728 - DNA, 20 bp, synthetic construct
  misc_feature 1..20: note = chemically synthesized
  source 1..20: mol_type = other DNA
ttcctagttggcagaacttt

SEQ ID NO: 14729 - DNA, 20 bp, synthetic construct
  misc_feature 1..20: note = chemically synthesized
  source 1..20: mol_type = other DNA
ctagttggcagaactttgag

SEQ ID NO: 14730 - DNA, 20 bp, synthetic construct
  misc_feature 1..20: note = chemically synthesized
  source 1..20: mol_type = other DNA
agaactttgagcagtgtgcc

SEQ ID NO: 14731 - DNA, 20 bp, synthetic construct
  misc_feature 1..20: note = chemically synthesized
  source 1..20: mol_type = other DNA
gcctggttgtgcactttgca

SEQ ID NO: 14732 - DNA, 20 bp, synthetic construct
  misc_feature 1..20: note = chemically synthesized
  source 1..20: mol_type = other DNA
tggttgtgcactttgcacag

SEQ ID NO: 14733 - DNA, 20 bp, synthetic construct
  misc_feature 1..20: note = chemically synthesized
  source 1..20: mol_type = other DNA
ggttgtgcactttgcacaga

SEQ ID NO: 14734 - DNA, 20 bp, synthetic construct
  misc_feature 1..20: note = chemically synthesized
  source 1..20: mol_type = other DNA
ttgtgcactttgcacagaag

SEQ ID NO: 14735 - DNA, 20 bp, synthetic construct
  misc_feature 1..20: note = chemically synthesized
  source 1..20: mol_type = other DNA
actttgcacagaaggagaaa

SEQ ID NO: 14736 - DNA, 20 bp, synthetic construct
  misc_feature 1..20: note = chemically synthesized
  source 1..20: mol_type = other DNA
tgcacagaaggagaaatggc

SEQ ID NO: 14737 - DNA, 20 bp, synthetic construct
  misc_feature 1..20: note = chemically synthesized
  source 1..20: mol_type = other DNA
tgcgattatatacttattca

SEQ ID NO: 14738 - DNA, 20 bp, synthetic construct
  misc_feature 1..20: note = chemically synthesized
  source 1..20: mol_type = other DNA
gcgattatatacttattcat

SEQ ID NO: 14739 - DNA, 20 bp, synthetic construct
  misc_feature 1..20: note = chemically synthesized
  source 1..20: mol_type = other DNA
atatacttattcatgggctg

SEQ ID NO: 14740 - DNA, 20 bp, synthetic construct
  misc_feature 1..20: note = chemically synthesized
  source 1..20: mol_type = other DNA
ttattcatgggctgtagcca

SEQ ID NO: 14741 - DNA, 20 bp, synthetic construct
  misc_feature 1..20: note = chemically synthesized
  source 1..20: mol_type = other DNA
tattcatgggctgtagccaa

SEQ ID NO: 14742 - DNA, 20 bp, synthetic construct
  misc_feature 1..20: note = chemically synthesized
  source 1..20: mol_type = other DNA
atgggctgtagccaaaggtt

SEQ ID NO: 14743 - DNA, 20 bp, synthetic construct
  misc_feature 1..20: note = chemically synthesized
  source 1..20: mol_type = other DNA
gctgtagccaaaggtttggc

SEQ ID NO: 14744 - DNA, 20 bp, synthetic construct
  misc_feature 1..20: note = chemically synthesized
  source 1..20: mol_type = other DNA
tagccaaaggtttggctaga

SEQ ID NO: 14745 - DNA, 20 bp, synthetic construct
  misc_feature 1..20: note = chemically synthesized
  source 1..20: mol_type = other DNA
caaaggtttggctagatggt

SEQ ID NO: 14746 - DNA, 20 bp, synthetic construct
  misc_feature 1..20: note = chemically synthesized
  source 1..20: mol_type = other DNA
aaaggtttggctagatggtc

SEQ ID NO: 14747 - DNA, 20 bp, synthetic construct
  misc_feature 1..20: note = chemically synthesized
  source 1..20: mol_type = other DNA
aaggtttggctagatggtca

SEQ ID NO: 14748 - DNA, 20 bp, synthetic construct
  misc_feature 1..20: note = chemically synthesized
  source 1..20: mol_type = other DNA
tggctagatggtcagggact

SEQ ID NO: 14749 - DNA, 20 bp, synthetic construct
  misc_feature 1..20: note = chemically synthesized
  source 1..20: mol_type = other DNA
gatggtcagggacttggaaa

SEQ ID NO: 14750 - DNA, 20 bp, synthetic construct
  misc_feature 1..20: note = chemically synthesized
  source 1..20: mol_type = other DNA
ggacttggaaaaagcatgac

SEQ ID NO: 14751 - DNA, 20 bp, synthetic construct
  misc_feature 1..20: note = chemically synthesized
  source 1..20: mol_type = other DNA
tgactggaaaattgatgaca

SEQ ID NO: 14752 - DNA, 20 bp, synthetic construct
  misc_feature 1..20: note = chemically synthesized
  source 1..20: mol_type = other DNA
aaattgatgacaaagaaatt

SEQ ID NO: 14753 - DNA, 20 bp, synthetic construct
  misc_feature 1..20: note = chemically synthesized
  source 1..20: mol_type = other DNA
aattgatgacaaagaaattt

SEQ ID NO: 14754 - DNA, 20 bp, synthetic construct
  misc_feature 1..20: note = chemically synthesized
  source 1..20: mol_type = other DNA
attgatgacaaagaaatttg

SEQ ID NO: 14755 - DNA, 20 bp, synthetic construct
  misc_feature 1..20: note = chemically synthesized
  source 1..20: mol_type = other DNA
gatgacaaagaaatttgggg

SEQ ID NO: 14756 - DNA, 20 bp, synthetic construct
  misc_feature 1..20: note = chemically synthesized
  source 1..20: mol_type = other DNA
tgacaaagaaatttggggaa

SEQ ID NO: 14757 - DNA, 20 bp, synthetic construct
  misc_feature 1..20: note = chemically synthesized
  source 1..20: mol_type = other DNA
gacaaagaaatttggggaag

SEQ ID NO: 14758 - DNA, 20 bp, synthetic construct
  misc_feature 1..20: note = chemically synthesized
  source 1..20: mol_type = other DNA
aaatttggggaagaggtatg

SEQ ID NO: 14759 - DNA, 20 bp, synthetic construct
  misc_feature 1..20: note = chemically synthesized
  source 1..20: mol_type = other DNA
ttggggaagaggtatgtgga

SEQ ID NO: 14760 - DNA, 20 bp, synthetic construct
  misc_feature 1..20: note = chemically synthesized
  source 1..20: mol_type = other DNA
tgtggatggacctctatgat

SEQ ID NO: 14761 - DNA, 20 bp, synthetic construct
  misc_feature 1..20: note = chemically synthesized
  source 1..20: mol_type = other DNA
atgattagtcaaaaactaca

SEQ ID NO: 14762 - DNA, 20 bp, synthetic construct
  misc_feature 1..20: note = chemically synthesized
  source 1..20: mol_type = other DNA
aagatattttcatcccatgt

SEQ ID NO: 14763 - DNA, 20 bp, synthetic construct
  misc_feature 1..20: note = chemically synthesized
  source 1..20: mol_type = other DNA
cccatgtgagtgctcaccaa

SEQ ID NO: 14764 - DNA, 20 bp, synthetic construct
  misc_feature 1..20: note = chemically synthesized
  source 1..20: mol_type = other DNA
ccatgtgagtgctcaccaat

SEQ ID NO: 14765 - DNA, 20 bp, synthetic construct
  misc_feature 1..20: note = chemically synthesized
  source 1..20: mol_type = other DNA
tgctcaccaatgggtgacct

SEQ ID NO: 14766 - DNA, 20 bp, synthetic construct
  misc_feature 1..20: note = chemically synthesized
  source 1..20: mol_type = other DNA
tcaccaatgggtgacctcag

SEQ ID NO: 14767 - DNA, 20 bp, synthetic construct
  misc_feature 1..20: note = chemically synthesized
  source 1..20: mol_type = other DNA
ccaatgggtgacctcagcag

SEQ ID NO: 14768 - DNA, 20 bp, synthetic construct
  misc_feature 1..20: note = chemically synthesized
  source 1..20: mol_type = other DNA
aatgggtgacctcagcagaa

SEQ ID NO: 14769 - DNA, 20 bp, synthetic construct
  misc_feature 1..20: note = chemically synthesized
  source 1..20: mol_type = other DNA
atgggtgacctcagcagaag

SEQ ID NO: 14770 - DNA, 20 bp, synthetic construct
  misc_feature 1..20: note = chemically synthesized
  source 1..20: mol_type = other DNA
agaagaggattttaataatc

SEQ ID NO: 14771 - DNA, 20 bp, synthetic construct
  misc_feature 1..20: note = chemically synthesized
  source 1..20: mol_type = other DNA
agaggattttaataatcaag

SEQ ID NO: 14772 - DNA, 20 bp, synthetic construct
  misc_feature 1..20: note = chemically synthesized
  source 1..20: mol_type = other DNA
gattttaataatcaagtgga

SEQ ID NO: 14773 - DNA, 20 bp, synthetic construct
  misc_feature 1..20: note = chemically synthesized
  source 1..20: mol_type = other DNA
attttaataatcaagtggat

SEQ ID NO: 14774 - DNA, 20 bp, synthetic construct
  misc_feature 1..20: note = chemically synthesized
  source 1..20: mol_type = other DNA
ggataggatgatcaattctg

SEQ ID NO: 14775 - DNA, 20 bp, synthetic construct
  misc_feature 1..20: note = chemically synthesized
  source 1..20: mol_type = other DNA
tcaattctgtggacaccact

SEQ ID NO: 14776 - DNA, 20 bp, synthetic construct
  misc_feature 1..20: note = chemically synthesized
  source 1..20: mol_type = other DNA
gacaccactcagccttttcc

SEQ ID NO: 14777 - DNA, 20 bp, synthetic construct
  misc_feature 1..20: note = chemically synthesized
  source 1..20: mol_type = other DNA
acaccactcagccttttccc

SEQ ID NO: 14778 - DNA, 20 bp, synthetic construct
  misc_feature 1..20: note = chemically synthesized
  source 1..20: mol_type = other DNA
ccactcatgtcatcgtccaa

SEQ ID NO: 14779 - DNA, 20 bp, synthetic construct
  misc_feature 1..20: note = chemically synthesized
  source 1..20: mol_type = other DNA
gtccaatggacccatgaaca

SEQ ID NO: 14780 - DNA, 20 bp, synthetic construct
  misc_feature 1..20: note = chemically synthesized
  source 1..20: mol_type = other DNA
caatggacccatgaacaaag

SEQ ID NO: 14781 - DNA, 20 bp, synthetic construct
  misc_feature 1..20: note = chemically synthesized
  source 1..20: mol_type = other DNA
acccatgaacaaagtggcca

SEQ ID NO: 14782 - DNA, 20 bp, synthetic construct
  misc_feature 1..20: note = chemically synthesized
  source 1..20: mol_type = other DNA
gaacaaagtggccacagttg

SEQ ID NO: 14783 - DNA, 20 bp, synthetic construct
  misc_feature 1..20: note = chemically synthesized
  source 1..20: mol_type = other DNA
aacaaagtggccacagttgc

SEQ ID NO: 14784 - DNA, 20 bp, synthetic construct
  misc_feature 1..20: note = chemically synthesized
  source 1..20: mol_type = other DNA
acaaagtggccacagttgca

SEQ ID NO: 14785 - DNA, 20 bp, synthetic construct
  misc_feature 1..20: note = chemically synthesized
  source 1..20: mol_type = other DNA
agtggccacagttgcaggga

SEQ ID NO: 14786 - DNA, 20 bp, synthetic construct
  misc_feature 1..20: note = chemically synthesized
  source 1..20: mol_type = other DNA
ggccacagttgcagggatgg

SEQ ID NO: 14787 - DNA, 20 bp, synthetic construct
  misc_feature 1..20: note = chemically synthesized
  source 1..20: mol_type = other DNA
gcagggatggaagttatgct

SEQ ID NO: 14788 - DNA, 20 bp, synthetic construct
  misc_feature 1..20: note = chemically synthesized
  source 1..20: mol_type = other DNA
cagggatggaagttatgctt

SEQ ID NO: 14789 - DNA, 20 bp, synthetic construct
  misc_feature 1..20: note = chemically synthesized
  source 1..20: mol_type = other DNA
atggaagttatgcttgggct

SEQ ID NO: 14790 - DNA, 20 bp, synthetic construct
  misc_feature 1..20: note = chemically synthesized
  source 1..20: mol_type = other DNA
tatgcttgggctcagcaaca

SEQ ID NO: 14791 - DNA, 20 bp, synthetic construct
  misc_feature 1..20: note = chemically synthesized
  source 1..20: mol_type = other DNA
acatggacttccactcacca

SEQ ID NO: 14792 - DNA, 20 bp, synthetic construct
  misc_feature 1..20: note = chemically synthesized
  source 1..20: mol_type = other DNA
tccactcaccaaagctgacc

SEQ ID NO: 14793 - DNA, 20 bp, synthetic construct
  misc_feature 1..20: note = chemically synthesized
  source 1..20: mol_type = other DNA
caccaaagctgacctggcca

SEQ ID NO: 14794 - DNA, 20 bp, synthetic construct
  misc_feature 1..20: note = chemically synthesized
  source 1..20: mol_type = other DNA
tggccacagccactgcttgc

SEQ ID NO: 14795 - DNA, 20 bp, synthetic construct
  misc_feature 1..20: note = chemically synthesized
  source 1..20: mol_type = other DNA
cagccactgcttgccagcat

SEQ ID NO: 14796 - DNA, 20 bp, synthetic construct
  misc_feature 1..20: note = chemically synthesized
  source 1..20: mol_type = other DNA
gccactgcttgccagcatca

SEQ ID NO: 14797 - DNA, 20 bp, synthetic construct
  misc_feature 1..20: note = chemically synthesized
  source 1..20: mol_type = other DNA
cagcatcagagaccaacact

SEQ ID NO: 14798 - DNA, 20 bp, synthetic construct
  misc_feature 1..20: note = chemically synthesized
  source 1..20: mol_type = other DNA
ccaacactaagcccttgata

SEQ ID NO: 14799 - DNA, 20 bp, synthetic construct
  misc_feature 1..20: note = chemically synthesized
  source 1..20: mol_type = other DNA
cttgatatggcaccattcct

SEQ ID NO: 14800 - DNA, 20 bp, synthetic construct
  misc_feature 1..20: note = chemically synthesized
  source 1..20: mol_type = other DNA
ttgatatggcaccattcctc

SEQ ID NO: 14801 - DNA, 20 bp, synthetic construct
  misc_feature 1..20: note = chemically synthesized
  source 1..20: mol_type = other DNA
tgatatggcaccattcctcg

SEQ ID NO: 14802 - DNA, 20 bp, synthetic construct
  misc_feature 1..20: note = chemically synthesized
  source 1..20: mol_type = other DNA
gcaccattcctcggggtgat

SEQ ID NO: 14803 - DNA, 20 bp, synthetic construct
  misc_feature 1..20: note = chemically synthesized
  source 1..20: mol_type = other DNA
cattcctcggggtgatcagc

SEQ ID NO: 14804 - DNA, 20 bp, synthetic construct
  misc_feature 1..20: note = chemically synthesized
  source 1..20: mol_type = other DNA
ggggtgatcagccagctacc

SEQ ID NO: 14805 - DNA, 20 bp, synthetic construct
  misc_feature 1..20: note = chemically synthesized
  source 1..20: mol_type = other DNA
gtgatcagccagctacctgg

SEQ ID NO: 14806 - DNA, 20 bp, synthetic construct
  misc_feature 1..20: note = chemically synthesized
  source 1..20: mol_type = other DNA
atcagccagctacctggtgg

SEQ ID NO: 14807 - DNA, 20 bp, synthetic construct
  misc_feature 1..20: note = chemically synthesized
  source 1..20: mol_type = other DNA
tcagccagctacctggtggc

SEQ ID NO: 14808 - DNA, 20 bp, synthetic construct
  misc_feature 1..20: note = chemically synthesized
  source 1..20: mol_type = other DNA
tggtggcaggttgattatat

SEQ ID NO: 14809 - DNA, 20 bp, synthetic construct
  misc_feature 1..20: note = chemically synthesized
  source 1..20: mol_type = other DNA
atattggacctcttccatca

SEQ ID NO: 14810 - DNA, 20 bp, synthetic construct
  misc_feature 1..20: note = chemically synthesized
  source 1..20: mol_type = other DNA
tggacctcttccatcatgga

SEQ ID NO: 14811 - DNA, 20 bp, synthetic construct
  misc_feature 1..20: note = chemically synthesized
  source 1..20: mol_type = other DNA
ggacctcttccatcatggaa

SEQ ID NO: 14812 - DNA, 20 bp, synthetic construct
  misc_feature 1..20: note = chemically synthesized
  source 1..20: mol_type = other DNA
gacctcttccatcatggaaa

SEQ ID NO: 14813 - DNA, 20 bp, synthetic construct
  misc_feature 1..20: note = chemically synthesized
  source 1..20: mol_type = other DNA
ctcttccatcatggaaaggg

SEQ ID NO: 14814 - DNA, 20 bp, synthetic construct
  misc_feature 1..20: note = chemically synthesized
  source 1..20: mol_type = other DNA
cttccatcatggaaagggca

SEQ ID NO: 14815 - DNA, 20 bp, synthetic construct
  misc_feature 1..20: note = chemically synthesized
  source 1..20: mol_type = other DNA
ttccatcatggaaagggcag

SEQ ID NO: 14816 - DNA, 20 bp, synthetic construct
  misc_feature 1..20: note = chemically synthesized
  source 1..20: mol_type = other DNA
gggcagaggcttgtcctcac

SEQ ID NO: 14817 - DNA, 20 bp, synthetic construct
  misc_feature 1..20: note = chemically synthesized
  source 1..20: mol_type = other DNA
gaggcttgtcctcactggaa

SEQ ID NO: 14818 - DNA, 20 bp, synthetic construct
  misc_feature 1..20: note = chemically synthesized
  source 1..20: mol_type = other DNA
actggaatagacacttactc

SEQ ID NO: 14819 - DNA, 20 bp, synthetic construct
  misc_feature 1..20: note = chemically synthesized
  source 1..20: mol_type = other DNA
atagacacttactctggata

SEQ ID NO: 14820 - DNA, 20 bp, synthetic construct
  misc_feature 1..20: note = chemically synthesized
  source 1..20: mol_type = other DNA
tagacacttactctggatat

SEQ ID NO: 14821 - DNA, 20 bp, synthetic construct
  misc_feature 1..20: note = chemically synthesized
  source 1..20: mol_type = other DNA
ctgaactcaatgcttatgcc

SEQ ID NO: 14822 - DNA, 20 bp, synthetic construct
  misc_feature 1..20: note = chemically synthesized
  source 1..20: mol_type = other DNA
tatgccaagactaccatcca

SEQ ID NO: 14823 - DNA, 20 bp, synthetic construct
  misc_feature 1..20: note = chemically synthesized
  source 1..20: mol_type = other DNA
gactaccatccatggaatca

SEQ ID NO: 14824 - DNA, 20 bp, synthetic construct
  misc_feature 1..20: note = chemically synthesized
  source 1..20: mol_type = other DNA
gaatgccgtatccactgtca

SEQ ID NO: 14825 - DNA, 20 bp, synthetic construct
  misc_feature 1..20: note = chemically synthesized
  source 1..20: mol_type = other DNA
cactgtcatggtattccaca

SEQ ID NO: 14826 - DNA, 20 bp, synthetic construct
  misc_feature 1..20: note = chemically synthesized
  source 1..20: mol_type = other DNA
acacagcattgcttctgacc

SEQ ID NO: 14827 - DNA, 20 bp, synthetic construct
  misc_feature 1..20: note = chemically synthesized
  source 1..20: mol_type = other DNA
tgaccaagccactcacttta

SEQ ID NO: 14828 - DNA, 20 bp, synthetic construct
  misc_feature 1..20: note = chemically synthesized
  source 1..20: mol_type = other DNA
agccactcactttatggcta

SEQ ID NO: 14829 - DNA, 20 bp, synthetic construct
  misc_feature 1..20: note = chemically synthesized
  source 1..20: mol_type = other DNA
cactcactttatggctaaag

SEQ ID NO: 14830 - DNA, 20 bp, synthetic construct
  misc_feature 1..20: note = chemically synthesized
  source 1..20: mol_type = other DNA
ttatggctaaagaagtgtga

SEQ ID NO: 14831 - DNA, 20 bp, synthetic construct
  misc_feature 1..20: note = chemically synthesized
  source 1..20: mol_type = other DNA
tggctaaagaagtgtgacag

SEQ ID NO: 14832 - DNA, 20 bp, synthetic construct
  misc_feature 1..20: note = chemically synthesized
  source 1..20: mol_type = other DNA
ggctaaagaagtgtgacagt

SEQ ID NO: 14833 - DNA, 20 bp, synthetic construct
  misc_feature 1..20: note = chemically synthesized
  source 1..20: mol_type = other DNA
tgacagtgggctcatgctca

SEQ ID NO: 14834 - DNA, 20 bp, synthetic construct
  misc_feature 1..20: note = chemically synthesized
  source 1..20: mol_type = other DNA
ctcatgctcatggaatttac

SEQ ID NO: 14835 - DNA, 20 bp, synthetic construct
  misc_feature 1..20: note = chemically synthesized
  source 1..20: mol_type = other DNA
ccatgatccctatcatcctg

SEQ ID NO: 14836 - DNA, 20 bp, synthetic construct
  misc_feature 1..20: note = chemically synthesized
  source 1..20: mol_type = other DNA
tgatccctatcatcctgaag

SEQ ID NO: 14837 - DNA, 20 bp, synthetic construct
  misc_feature 1..20: note = chemically synthesized
  source 1..20: mol_type = other DNA
atcctgaagcagcttttgaa

SEQ ID NO: 14838 - DNA, 20 bp, synthetic construct
  misc_feature 1..20: note = chemically synthesized
  source 1..20: mol_type = other DNA
agcttttgaatggccttttg

SEQ ID NO: 14839 - DNA, 20 bp, synthetic construct
  misc_feature 1..20: note = chemically synthesized
  source 1..20: mol_type = other DNA
gtcacgattacaatgccaac

SEQ ID NO: 14840 - DNA, 20 bp, synthetic construct
  misc_feature 1..20: note = chemically synthesized
  source 1..20: mol_type = other DNA
tcacgattacaatgccaact

SEQ ID NO: 14841 - DNA, 20 bp, synthetic construct
  misc_feature 1..20: note = chemically synthesized
  source 1..20: mol_type = other DNA
aactaggtgacaatactttg

SEQ ID NO: 14842 - DNA, 20 bp, synthetic construct
  misc_feature 1..20: note = chemically synthesized
  source 1..20: mol_type = other DNA
actaggtgacaatactttgc

SEQ ID NO: 14843 - DNA, 20 bp, synthetic construct
  misc_feature 1..20: note = chemically synthesized
  source 1..20: mol_type = other DNA
gtgacaatactttgcaggcc

SEQ ID NO: 14844 - DNA, 20 bp, synthetic construct
  misc_feature 1..20: note = chemically synthesized
  source 1..20: mol_type = other DNA
tgacaatactttgcaggcct

SEQ ID NO: 14845 - DNA, 20 bp, synthetic construct
  misc_feature 1..20: note = chemically synthesized
  source 1..20: mol_type = other DNA
gacaatactttgcaggcctg

SEQ ID NO: 14846 - DNA, 20 bp, synthetic construct
  misc_feature 1..20: note = chemically synthesized
  source 1..20: mol_type = other DNA
tactttgcaggcctggggca

SEQ ID NO: 14847 - DNA, 20 bp, synthetic construct
  misc_feature 1..20: note = chemically synthesized
  source 1..20: mol_type = other DNA
aggcctggggcaaagttctc

SEQ ID NO: 14848 - DNA, 20 bp, synthetic construct
  misc_feature 1..20: note = chemically synthesized
  source 1..20: mol_type = other DNA
cctggggcaaagttctccag

SEQ ID NO: 14849 - DNA, 20 bp, synthetic construct
  misc_feature 1..20: note = chemically synthesized
  source 1..20: mol_type = other DNA
ctggggcaaagttctccaga

SEQ ID NO: 14850 - DNA, 20 bp, synthetic construct
  misc_feature 1..20: note = chemically synthesized
  source 1..20: mol_type = other DNA
aggctgtgtatgctctgaat

SEQ ID NO: 14851 - DNA, 20 bp, synthetic construct
  misc_feature 1..20: note = chemically synthesized
  source 1..20: mol_type = other DNA
ctgaatcagtgtccaatata

SEQ ID NO: 14852 - DNA, 20 bp, synthetic construct
  misc_feature 1..20: note = chemically synthesized
  source 1..20: mol_type = other DNA
atatggtactgtttctccca

SEQ ID NO: 14853 - DNA, 20 bp, synthetic construct
  misc_feature 1..20: note = chemically synthesized
  source 1..20: mol_type = other DNA
ggtactgtttctcccataga

SEQ ID NO: 14854 - DNA, 20 bp, synthetic construct
  misc_feature 1..20: note = chemically synthesized
  source 1..20: mol_type = other DNA
gtactgtttctcccatagac

SEQ ID NO: 14855 - DNA, 20 bp, synthetic construct
  misc_feature 1..20: note = chemically synthesized
  source 1..20: mol_type = other DNA
tctcccatagacaggattca

SEQ ID NO: 14856 - DNA, 20 bp, synthetic construct
  misc_feature 1..20: note = chemically synthesized
  source 1..20: mol_type = other DNA
ctcccatagacaggattcac

SEQ ID NO: 14857 - DNA, 20 bp, synthetic construct
  misc_feature 1..20: note = chemically synthesized
  source 1..20: mol_type = other DNA
atagacaggattcacgggtc

SEQ ID NO: 14858 - DNA, 20 bp, synthetic construct
  misc_feature 1..20: note = chemically synthesized
  source 1..20: mol_type = other DNA
tagacaggattcacgggtcc

SEQ ID NO: 14859 - DNA, 20 bp, synthetic construct
  misc_feature 1..20: note = chemically synthesized
  source 1..20: mol_type = other DNA
attcacgggtccaggaatca

SEQ ID NO: 14860 - DNA, 20 bp, synthetic construct
  misc_feature 1..20: note = chemically synthesized
  source 1..20: mol_type = other DNA
ttcacgggtccaggaatcaa

SEQ ID NO: 14861 - DNA, 20 bp, synthetic construct
  misc_feature 1..20: note = chemically synthesized
  source 1..20: mol_type = other DNA
tcacgggtccaggaatcaaa

SEQ ID NO: 14862 - DNA, 20 bp, synthetic construct
  misc_feature 1..20: note = chemically synthesized
  source 1..20: mol_type = other DNA
cgggtccaggaatcaaaggg

SEQ ID NO: 14863 - DNA, 20 bp, synthetic construct
  misc_feature 1..20: note = chemically synthesized
  source 1..20: mol_type = other DNA
gtccaggaatcaaagggtgg

SEQ ID NO: 14864 - DNA, 20 bp, synthetic construct
  misc_feature 1..20: note = chemically synthesized
  source 1..20: mol_type = other DNA
caggaatcaaagggtggaag

SEQ ID NO: 14865 - DNA, 20 bp, synthetic construct
  misc_feature 1..20: note = chemically synthesized
  source 1..20: mol_type = other DNA
gaatcaaagggtggaagtgg

SEQ ID NO: 14866 - DNA, 20 bp, synthetic construct
  misc_feature 1..20: note = chemically synthesized
  source 1..20: mol_type = other DNA
tcaaagggtggaagtggaag

SEQ ID NO: 14867 - DNA, 20 bp, synthetic construct
  misc_feature 1..20: note = chemically synthesized
  source 1..20: mol_type = other DNA
aagggtggaagtggaagtgg

SEQ ID NO: 14868 - DNA, 20 bp, synthetic construct
  misc_feature 1..20: note = chemically synthesized
  source 1..20: mol_type = other DNA
ggtggaagtggaagtggaag

SEQ ID NO: 14869 - DNA, 20 bp, synthetic construct
  misc_feature 1..20: note = chemically synthesized
  source 1..20: mol_type = other DNA
gcaccactcaccatcacccc

SEQ ID NO: 14870 - DNA, 20 bp, synthetic construct
  misc_feature 1..20: note = chemically synthesized
  source 1..20: mol_type = other DNA
catcacccctagtgttccac

SEQ ID NO: 14871 - DNA, 20 bp, synthetic construct
  misc_feature 1..20: note = chemically synthesized
  source 1..20: mol_type = other DNA
atttttgcttcctgttccca

SEQ ID NO: 14872 - DNA, 20 bp, synthetic construct
  misc_feature 1..20: note = chemically synthesized
  source 1..20: mol_type = other DNA
cccatggcattatgttctgc

SEQ ID NO: 14873 - DNA, 20 bp, synthetic construct
  misc_feature 1..20: note = chemically synthesized
  source 1..20: mol_type = other DNA
ggcattatgttctgctggct

SEQ ID NO: 14874 - DNA, 20 bp, synthetic construct
  misc_feature 1..20: note = chemically synthesized
  source 1..20: mol_type = other DNA
cattatgttctgctggctta

SEQ ID NO: 14875 - DNA, 20 bp, synthetic construct
  misc_feature 1..20: note = chemically synthesized
  source 1..20: mol_type = other DNA
attatgttctgctggcttag

SEQ ID NO: 14876 - DNA, 20 bp, synthetic construct
  misc_feature 1..20: note = chemically synthesized
  source 1..20: mol_type = other DNA
ttctgctggcttagaggtct

SEQ ID NO: 14877 - DNA, 20 bp, synthetic construct
  misc_feature 1..20: note = chemically synthesized
  source 1..20: mol_type = other DNA
tggcttagaggtcttagttc

SEQ ID NO: 14878 - DNA, 20 bp, synthetic construct
  misc_feature 1..20: note = chemically synthesized
  source 1..20: mol_type = other DNA
gcttagaggtcttagttcca

SEQ ID NO: 14879 - DNA, 20 bp, synthetic construct
  misc_feature 1..20: note = chemically synthesized
  source 1..20: mol_type = other DNA
cttagaggtcttagttccag

SEQ ID NO: 14880 - DNA, 20 bp, synthetic construct
  misc_feature 1..20: note = chemically synthesized
  source 1..20: mol_type = other DNA
ttagaggtcttagttccaga

SEQ ID NO: 14881 - DNA, 20 bp, synthetic construct
  misc_feature 1..20: note = chemically synthesized
  source 1..20: mol_type = other DNA
agaggtcttagttccagagg

SEQ ID NO: 14882 - DNA, 20 bp, synthetic construct
  misc_feature 1..20: note = chemically synthesized
  source 1..20: mol_type = other DNA
gaggtcttagttccagaggg

SEQ ID NO: 14883 - DNA, 20 bp, synthetic construct
  misc_feature 1..20: note = chemically synthesized
  source 1..20: mol_type = other DNA
agagggaggaacactgccgc

SEQ ID NO: 14884 - DNA, 20 bp, synthetic construct
  misc_feature 1..20: note = chemically synthesized
  source 1..20: mol_type = other DNA
gagggaggaacactgccgcc

SEQ ID NO: 14885 - DNA, 20 bp, synthetic construct
  misc_feature 1..20: note = chemically synthesized
  source 1..20: mol_type = other DNA
attccattaaactgcaaatt

SEQ ID NO: 14886 - DNA, 20 bp, synthetic construct
  misc_feature 1..20: note = chemically synthesized
  source 1..20: mol_type = other DNA
tgcaaattaagattgccacc

SEQ ID NO: 14887 - DNA, 20 bp, synthetic construct
  misc_feature 1..20: note = chemically synthesized
  source 1..20: mol_type = other DNA
agattgccacctggacactt

SEQ ID NO: 14888 - DNA, 20 bp, synthetic construct
  misc_feature 1..20: note = chemically synthesized
  source 1..20: mol_type = other DNA
gattgccacctggacacttt

SEQ ID NO: 14889 - DNA, 20 bp, synthetic construct
  misc_feature 1..20: note = chemically synthesized
  source 1..20: mol_type = other DNA
tttgggctcctcccaccttt

SEQ ID NO: 14890 - DNA, 20 bp, synthetic construct
  misc_feature 1..20: note = chemically synthesized
  source 1..20: mol_type = other DNA
tcctcccacctttaagtcaa

SEQ ID NO: 14891 - DNA, 20 bp, synthetic construct
  misc_feature 1..20: note = chemically synthesized
  source 1..20: mol_type = other DNA
cctcccacctttaagtcaac

SEQ ID NO: 14892 - DNA, 20 bp, synthetic construct
  misc_feature 1..20: note = chemically synthesized
  source 1..20: mol_type = other DNA
cacctttaagtcaacaggct

SEQ ID NO: 14893 - DNA, 20 bp, synthetic construct
  misc_feature 1..20: note = chemically synthesized
  source 1..20: mol_type = other DNA
ctttaagtcaacaggctaag

SEQ ID NO: 14894 - DNA, 20 bp, synthetic construct
  misc_feature 1..20: note = chemically synthesized
  source 1..20: mol_type = other DNA
ttaagtcaacaggctaagaa

SEQ ID NO: 14895 - DNA, 20 bp, synthetic construct
  misc_feature 1..20: note = chemically synthesized
  source 1..20: mol_type = other DNA
aagtcaacaggctaagaaga

SEQ ID NO: 14896 - DNA, 20 bp, synthetic construct
  misc_feature 1..20: note = chemically synthesized
  source 1..20: mol_type = other DNA
acaggctaagaagagagtta

SEQ ID NO: 14897 - DNA, 20 bp, synthetic construct
  misc_feature 1..20: note = chemically synthesized
  source 1..20: mol_type = other DNA
taagaagagagttacagtgt

SEQ ID NO: 14898 - DNA, 20 bp, synthetic construct
  misc_feature 1..20: note = chemically synthesized
  source 1..20: mol_type = other DNA
gagagttacagtgttggctg

SEQ ID NO: 14899 - DNA, 20 bp, synthetic construct
  misc_feature 1..20: note = chemically synthesized
  source 1..20: mol_type = other DNA
gttggctgcggtgattaacc

SEQ ID NO: 14900 - DNA, 20 bp, synthetic construct
  misc_feature 1..20: note = chemically synthesized
  source 1..20: mol_type = other DNA
ggtgattaacccagactatc

SEQ ID NO: 14901 - DNA, 20 bp, synthetic construct
  misc_feature 1..20: note = chemically synthesized
  source 1..20: mol_type = other DNA
ccagactatcaagatgaaat

SEQ ID NO: 14902 - DNA, 20 bp, synthetic construct
  misc_feature 1..20: note = chemically synthesized
  source 1..20: mol_type = other DNA
atcagtctacaactccacaa

SEQ ID NO: 14903 - DNA, 20 bp, synthetic construct
  misc_feature 1..20: note = chemically synthesized
  source 1..20: mol_type = other DNA
cagtctacaactccacaatg

SEQ ID NO: 14904 - DNA, 20 bp, synthetic construct
  misc_feature 1..20: note = chemically synthesized
  source 1..20: mol_type = other DNA
agtctacaactccacaatgg

SEQ ID NO: 14905 - DNA, 20 bp, synthetic construct
  misc_feature 1..20: note = chemically synthesized
  source 1..20: mol_type = other DNA
tacaactccacaatggaggt

SEQ ID NO: 14906 - DNA, 20 bp, synthetic construct
  misc_feature 1..20: note = chemically synthesized
  source 1..20: mol_type = other DNA
acaactccacaatggaggta

SEQ ID NO: 14907 - DNA, 20 bp, synthetic construct
  misc_feature 1..20: note = chemically synthesized
  source 1..20: mol_type = other DNA
actccacaatggaggtaagg

SEQ ID NO: 14908 - DNA, 20 bp, synthetic construct
  misc_feature 1..20: note = chemically synthesized
  source 1..20: mol_type = other DNA
gaggtaaggaagcgtatgca

SEQ ID NO: 14909 - DNA, 20 bp, synthetic construct
  misc_feature 1..20: note = chemically synthesized
  source 1..20: mol_type = other DNA
ggaagcgtatgcatggaata

SEQ ID NO: 14910 - DNA, 20 bp, synthetic construct
  misc_feature 1..20: note = chemically synthesized
  source 1..20: mol_type = other DNA
gaagcgtatgcatggaatat

SEQ ID NO: 14911 - DNA, 20 bp, synthetic construct
  misc_feature 1..20: note = chemically synthesized
  source 1..20: mol_type = other DNA
agcgtatgcatggaatatag

SEQ ID NO: 14912 - DNA, 20 bp, synthetic construct
  misc_feature 1..20: note = chemically synthesized
  source 1..20: mol_type = other DNA
atggaatataggagatccat

SEQ ID NO: 14913 - DNA, 20 bp, synthetic construct
  misc_feature 1..20: note = chemically synthesized
  source 1..20: mol_type = other DNA
tggaatataggagatccatt

SEQ ID NO: 14914 - DNA, 20 bp, synthetic construct
  misc_feature 1..20: note = chemically synthesized
  source 1..20: mol_type = other DNA
ggaatataggagatccatta

SEQ ID NO: 14915 - DNA, 20 bp, synthetic construct
  misc_feature 1..20: note = chemically synthesized
  source 1..20: mol_type = other DNA
agatccattagggtgtctct

SEQ ID NO: 14916 - DNA, 20 bp, synthetic construct
  misc_feature 1..20: note = chemically synthesized
  source 1..20: mol_type = other DNA
ctcttagttttaccatgtcc

SEQ ID NO: 14917 - DNA, 20 bp, synthetic construct
  misc_feature 1..20: note = chemically synthesized
  source 1..20: mol_type = other DNA
ttttaccatgtcctggaatt

SEQ ID NO: 14918 - DNA, 20 bp, synthetic construct
  misc_feature 1..20: note = chemically synthesized
  source 1..20: mol_type = other DNA
tttaccatgtcctggaatta

SEQ ID NO: 14919 - DNA, 20 bp, synthetic construct
  misc_feature 1..20: note = chemically synthesized
  source 1..20: mol_type = other DNA
ccatgtcctggaattaaggt

SEQ ID NO: 14920 - DNA, 20 bp, synthetic construct
  misc_feature 1..20: note = chemically synthesized
  source 1..20: mol_type = other DNA
tgtcctggaattaaggtcag

SEQ ID NO: 14921 - DNA, 20 bp, synthetic construct
  misc_feature 1..20: note = chemically synthesized
  source 1..20: mol_type = other DNA
gtcctggaattaaggtcagt

SEQ ID NO: 14922 - DNA, 20 bp, synthetic construct
  misc_feature 1..20: note = chemically synthesized
  source 1..20: mol_type = other DNA
aggtcagtgggaaactacta

SEQ ID NO: 14923 - DNA, 20 bp, synthetic construct
  misc_feature 1..20: note = chemically synthesized
  source 1..20: mol_type = other DNA
ggtcagtgggaaactactac

SEQ ID NO: 14924 - DNA, 20 bp, synthetic construct
  misc_feature 1..20: note = chemically synthesized
  source 1..20: mol_type = other DNA
gaaactactacaggccattc

SEQ ID NO: 14925 - DNA, 20 bp, synthetic construct
  misc_feature 1..20: note = chemically synthesized
  source 1..20: mol_type = other DNA
aaactactacaggccattcc

SEQ ID NO: 14926 - DNA, 20 bp, synthetic construct
  misc_feature 1..20: note = chemically synthesized
  source 1..20: mol_type = other DNA
ctactacaggccattccagg

SEQ ID NO: 14927 - DNA, 20 bp, synthetic construct
  misc_feature 1..20: note = chemically synthesized
  source 1..20: mol_type = other DNA
tactacaggccattccaggc

SEQ ID NO: 14928 - DNA, 20 bp, synthetic construct
  misc_feature 1..20: note = chemically synthesized
  source 1..20: mol_type = other DNA
tccaggcaggactacaaata

SEQ ID NO: 14929 - DNA, 20 bp, synthetic construct
  misc_feature 1..20: note = chemically synthesized
  source 1..20: mol_type = other DNA
ccaggcaggactacaaataa

SEQ ID NO: 14930 - DNA, 20 bp, synthetic construct
  misc_feature 1..20: note = chemically synthesized
  source 1..20: mol_type = other DNA
caggactacaaataaaggtt

SEQ ID NO: 14931 - DNA, 20 bp, synthetic construct
  misc_feature 1..20: note = chemically synthesized
  source 1..20: mol_type = other DNA
aggactacaaataaaggttt

SEQ ID NO: 14932 - DNA, 20 bp, synthetic construct
  misc_feature 1..20: note = chemically synthesized
  source 1..20: mol_type = other DNA
aaaggtttgggtcactccac

SEQ ID NO: 14933 - DNA, 20 bp, synthetic construct
  misc_feature 1..20: note = chemically synthesized
  source 1..20: mol_type = other DNA
aaggtttgggtcactccacc

SEQ ID NO: 14934 - DNA, 20 bp, synthetic construct
  misc_feature 1..20: note = chemically synthesized
  source 1..20: mol_type = other DNA
caggaaaaaaaaaaaaaaaa

SEQ ID NO: 14935 - DNA, 20 bp, synthetic construct
  misc_feature 1..20: note = chemically synthesized
  source 1..20: mol_type = other DNA
aaaaaaaaaaaaaaaaagac

SEQ ID NO: 14936 - DNA, 20 bp, synthetic construct
  misc_feature 1..20: note = chemically synthesized
  source 1..20: mol_type = other DNA
aaaaaaagacaagacctgct

SEQ ID NO: 14937 - DNA, 20 bp, synthetic construct
  misc_feature 1..20: note = chemically synthesized
  source 1..20: mol_type = other DNA
aaaaaagacaagacctgctg

SEQ ID NO: 14938 - DNA, 20 bp, synthetic construct
  misc_feature 1..20: note = chemically synthesized
  source 1..20: mol_type = other DNA
gacctgctgaggtgcttgct

SEQ ID NO: 14939 - DNA, 20 bp, synthetic construct
  misc_feature 1..20: note = chemically synthesized
  source 1..20: mol_type = other DNA
acctgctgaggtgcttgctg

SEQ ID NO: 14940 - DNA, 20 bp, synthetic construct
  misc_feature 1..20: note = chemically synthesized
  source 1..20: mol_type = other DNA
cctgctgaggtgcttgctga

SEQ ID NO: 14941 - DNA, 20 bp, synthetic construct
  misc_feature 1..20: note = chemically synthesized
  source 1..20: mol_type = other DNA
tgaggtgcttgctgagggca

SEQ ID NO: 14942 - DNA, 20 bp, synthetic construct
  misc_feature 1..20: note = chemically synthesized
  source 1..20: mol_type = other DNA
gaggtgcttgctgagggcaa

SEQ ID NO: 14943 - DNA, 20 bp, synthetic construct
  misc_feature 1..20: note = chemically synthesized
  source 1..20: mol_type = other DNA
aggtgcttgctgagggcaaa

SEQ ID NO: 14944 - DNA, 20 bp, synthetic construct
  misc_feature 1..20: note = chemically synthesized
  source 1..20: mol_type = other DNA
tgctgagggcaaagggaata

SEQ ID NO: 14945 - DNA, 20 bp, synthetic construct
  misc_feature 1..20: note = chemically synthesized
  source 1..20: mol_type = other DNA
caaagggaatacagaatatg

SEQ ID NO: 14946 - DNA, 20 bp, synthetic construct
  misc_feature 1..20: note = chemically synthesized
  source 1..20: mol_type = other DNA
agggaatacagaatatgtag

SEQ ID NO: 14947 - DNA, 20 bp, synthetic construct
  misc_feature 1..20: note = chemically synthesized
  source 1..20: mol_type = other DNA
gaatacagaatatgtagcag

SEQ ID NO: 14948 - DNA, 20 bp, synthetic construct
  misc_feature 1..20: note = chemically synthesized
  source 1..20: mol_type = other DNA
tacagaatatgtagcagaag

SEQ ID NO: 14949 - DNA, 20 bp, synthetic construct
  misc_feature 1..20: note = chemically synthesized
  source 1..20: mol_type = other DNA
acagaatatgtagcagaaga

SEQ ID NO: 14950 - DNA, 20 bp, synthetic construct
  misc_feature 1..20: note = chemically synthesized
  source 1..20: mol_type = other DNA
gaatatgtagcagaagaagg

SEQ ID NO: 14951 - DNA, 20 bp, synthetic construct
  misc_feature 1..20: note = chemically synthesized
  source 1..20: mol_type = other DNA
aagaaggtagtcatcaatac

SEQ ID NO: 14952 - DNA, 20 bp, synthetic construct
  misc_feature 1..20: note = chemically synthesized
  source 1..20: mol_type = other DNA
tacgatcacgtgaccaattg

SEQ ID NO: 14953 - DNA, 20 bp, synthetic construct
  misc_feature 1..20: note = chemically synthesized
  source 1..20: mol_type = other DNA
acgtgaccaattgcagatac

SEQ ID NO: 14954 - DNA, 20 bp, synthetic construct
  misc_feature 1..20: note = chemically synthesized
  source 1..20: mol_type = other DNA
cgtgaccaattgcagataca

SEQ ID NO: 14955 - DNA, 20 bp, synthetic construct
  misc_feature 1..20: note = chemically synthesized
  source 1..20: mol_type = other DNA
acaaggactgtaattgtcat

SEQ ID NO: 14956 - DNA, 20 bp, synthetic construct
  misc_feature 1..20: note = chemically synthesized
  source 1..20: mol_type = other DNA
tgtctgtatacacttgtact

SEQ ID NO: 14957 - DNA, 20 bp, synthetic construct
  misc_feature 1..20: note = chemically synthesized
  source 1..20: mol_type = other DNA
tttcctttatcatgtgacat

SEQ ID NO: 14958 - DNA, 20 bp, synthetic construct
  misc_feature 1..20: note = chemically synthesized
  source 1..20: mol_type = other DNA
aagatttattgacttcatat

SEQ ID NO: 14959 - DNA, 20 bp, synthetic construct
  misc_feature 1..20: note = chemically synthesized
  source 1..20: mol_type = other DNA
ttgacttcatatcagcattt

SEQ ID NO: 14960 - DNA, 20 bp, synthetic construct
  misc_feature 1..20: note = chemically synthesized
  source 1..20: mol_type = other DNA
atcagcatttaagtattgtt

SEQ ID NO: 14961 - DNA, 20 bp, synthetic construct
  misc_feature 1..20: note = chemically synthesized
  source 1..20: mol_type = other DNA
gtattgttaagtttatgtaa

SEQ ID NO: 14962 - DNA, 20 bp, synthetic construct
  misc_feature 1..20: note = chemically synthesized
  source 1..20: mol_type = other DNA
ttatgtaatagcatttgcaa

SEQ ID NO: 14963 - DNA, 20 bp, synthetic construct
  misc_feature 1..20: note = chemically synthesized
  source 1..20: mol_type = other DNA
tatgtaatagcatttgcaat

SEQ ID NO: 14964 - DNA, 20 bp, synthetic construct
  misc_feature 1..20: note = chemically synthesized
  source 1..20: mol_type = other DNA
atgtaatagcatttgcaatg

SEQ ID NO: 14965 - DNA, 20 bp, synthetic construct
  misc_feature 1..20: note = chemically synthesized
  source 1..20: mol_type = other DNA
atagcatttgcaatggggat

SEQ ID NO: 14966 - DNA, 20 bp, synthetic construct
  misc_feature 1..20: note = chemically synthesized
  source 1..20: mol_type = other DNA
ggtgcattttcaattgcacg

SEQ ID NO: 14967 - DNA, 20 bp, synthetic construct
  misc_feature 1..20: note = chemically synthesized
  source 1..20: mol_type = other DNA
gtgcattttcaattgcacga

SEQ ID NO: 14968 - DNA, 20 bp, synthetic construct
  misc_feature 1..20: note = chemically synthesized
  source 1..20: mol_type = other DNA
attttcaattgcacgaagga

SEQ ID NO: 14969 - DNA, 20 bp, synthetic construct
  misc_feature 1..20: note = chemically synthesized
  source 1..20: mol_type = other DNA
aattgcacgaaggatagttt

SEQ ID NO: 14970 - DNA, 20 bp, synthetic construct
  misc_feature 1..20: note = chemically synthesized
  source 1..20: mol_type = other DNA
gaaggatagttttagtatgt

SEQ ID NO: 14971 - DNA, 20 bp, synthetic construct
  misc_feature 1..20: note = chemically synthesized
  source 1..20: mol_type = other DNA
aaggatagttttagtatgtt

SEQ ID NO: 14972 - DNA, 20 bp, synthetic construct
  misc_feature 1..20: note = chemically synthesized
  source 1..20: mol_type = other DNA
cttattgttgtctttatttg

SEQ ID NO: 14973 - DNA, 20 bp, synthetic construct
  misc_feature 1..20: note = chemically synthesized
  source 1..20: mol_type = other DNA
ttgaagataatgtatgacct

SEQ ID NO: 14974 - DNA, 20 bp, synthetic construct
  misc_feature 1..20: note = chemically synthesized
  source 1..20: mol_type = other DNA
tgaagataatgtatgacctc

SEQ ID NO: 14975 - DNA, 20 bp, synthetic construct
  misc_feature 1..20: note = chemically synthesized
  source 1..20: mol_type = other DNA
gaagataatgtatgacctca

SEQ ID NO: 14976 - DNA, 20 bp, synthetic construct
  misc_feature 1..20: note = chemically synthesized
  source 1..20: mol_type = other DNA
aagataatgtatgacctcag

SEQ ID NO: 14977 - DNA, 20 bp, synthetic construct
  misc_feature 1..20: note = chemically synthesized
  source 1..20: mol_type = other DNA
atgacctcaggggatgtgta

SEQ ID NO: 14978 - DNA, 20 bp, synthetic construct
  misc_feature 1..20: note = chemically synthesized
  source 1..20: mol_type = other DNA
tgacctcaggggatgtgtat

SEQ ID NO: 14979 - DNA, 20 bp, synthetic construct
  misc_feature 1..20: note = chemically synthesized
  source 1..20: mol_type = other DNA
caggggatgtgtataggctc

SEQ ID NO: 14980 - DNA, 20 bp, synthetic construct
  misc_feature 1..20: note = chemically synthesized
  source 1..20: mol_type = other DNA
gtgtataggctcaagttgac

SEQ ID NO: 14981 - DNA, 20 bp, synthetic construct
  misc_feature 1..20: note = chemically synthesized
  source 1..20: mol_type = other DNA
aggctcaagttgacaagcga

SEQ ID NO: 14982 - DNA, 20 bp, synthetic construct
  misc_feature 1..20: note = chemically synthesized
  source 1..20: mol_type = other DNA
gacaagcgatggacttgtga

SEQ ID NO: 14983 - DNA, 20 bp, synthetic construct
  misc_feature 1..20: note = chemically synthesized
  source 1..20: mol_type = other DNA
gacttgtgatggttaatact

SEQ ID NO: 14984 - DNA, 20 bp, synthetic construct
  misc_feature 1..20: note = chemically synthesized
  source 1..20: mol_type = other DNA
atactgagtgtcaacttgat

SEQ ID NO: 14985 - DNA, 20 bp, synthetic construct
  misc_feature 1..20: note = chemically synthesized
  source 1..20: mol_type = other DNA
gtgtcaacttgattggattg

SEQ ID NO: 14986 - DNA, 20 bp, synthetic construct
  misc_feature 1..20: note = chemically synthesized
  source 1..20: mol_type = other DNA
tgattggattgaagtgtgca

SEQ ID NO: 14987 - DNA, 20 bp, synthetic construct
  misc_feature 1..20: note = chemically synthesized
  source 1..20: mol_type = other DNA
gtgtgcaaagtattgatcct

SEQ ID NO: 14988 - DNA, 20 bp, synthetic construct
  misc_feature 1..20: note = chemically synthesized
  source 1..20: mol_type = other DNA
ttgatcctgagtgtgtctgt

SEQ ID NO: 14989 - DNA, 20 bp, synthetic construct
  misc_feature 1..20: note = chemically synthesized
  source 1..20: mol_type = other DNA
tgatcctgagtgtgtctgtg

SEQ ID NO: 14990 - DNA, 20 bp, synthetic construct
  misc_feature 1..20: note = chemically synthesized
  source 1..20: mol_type = other DNA
gatcctgagtgtgtctgtga

SEQ ID NO: 14991 - DNA, 20 bp, synthetic construct
  misc_feature 1..20: note = chemically synthesized
  source 1..20: mol_type = other DNA
tgtctgtgagggtattgcca

SEQ ID NO: 14992 - DNA, 20 bp, synthetic construct
  misc_feature 1..20: note = chemically synthesized
  source 1..20: mol_type = other DNA
gtctgtgagggtattgccaa

SEQ ID NO: 14993 - DNA, 20 bp, synthetic construct
  misc_feature 1..20: note = chemically synthesized
  source 1..20: mol_type = other DNA
ctgtgagggtattgccaaag

SEQ ID NO: 14994 - DNA, 20 bp, synthetic construct
  misc_feature 1..20: note = chemically synthesized
  source 1..20: mol_type = other DNA
gccaaaggagattaacattt

SEQ ID NO: 14995 - DNA, 20 bp, synthetic construct
  misc_feature 1..20: note = chemically synthesized
  source 1..20: mol_type = other DNA
aaggagattaacattttagt

SEQ ID NO: 14996 - DNA, 20 bp, synthetic construct
  misc_feature 1..20: note = chemically synthesized
  source 1..20: mol_type = other DNA
gagattaacattttagtcag

SEQ ID NO: 14997 - DNA, 20 bp, synthetic construct
  misc_feature 1..20: note = chemically synthesized
  source 1..20: mol_type = other DNA
agattaacattttagtcagt

SEQ ID NO: 14998 - DNA, 20 bp, synthetic construct
  misc_feature 1..20: note = chemically synthesized
  source 1..20: mol_type = other DNA
taacattttagtcagtgggc

SEQ ID NO: 14999 - DNA, 20 bp, synthetic construct
  misc_feature 1..20: note = chemically synthesized
  source 1..20: mol_type = other DNA
aacattttagtcagtgggct

SEQ ID NO: 15000 - DNA, 20 bp, synthetic construct
  misc_feature 1..20: note = chemically synthesized
  source 1..20: mol_type = other DNA
ttttagtcagtgggctggga

SEQ ID NO: 15001 - DNA, 20 bp, synthetic construct
  misc_feature 1..20: note = chemically synthesized
  source 1..20: mol_type = other DNA
tttagtcagtgggctgggaa

SEQ ID NO: 15002 - DNA, 20 bp, synthetic construct
  misc_feature 1..20: note = chemically synthesized
  source 1..20: mol_type = other DNA
agtcagtgggctgggaaagg

SEQ ID NO: 15003 - DNA, 20 bp, synthetic construct
  misc_feature 1..20: note = chemically synthesized
  source 1..20: mol_type = other DNA
aggcagacccacccttaatc

SEQ ID NO: 15004 - DNA, 20 bp, synthetic construct
  misc_feature 1..20: note = chemically synthesized
  source 1..20: mol_type = other DNA
ggcagacccacccttaatct

SEQ ID NO: 15005 - DNA, 20 bp, synthetic construct
  misc_feature 1..20: note = chemically synthesized
  source 1..20: mol_type = other DNA
agacccacccttaatctggg

SEQ ID NO: 15006 - DNA, 20 bp, synthetic construct
  misc_feature 1..20: note = chemically synthesized
  source 1..20: mol_type = other DNA
gacccacccttaatctgggt

SEQ ID NO: 15007 - DNA, 20 bp, synthetic construct
  misc_feature 1..20: note = chemically synthesized
  source 1..20: mol_type = other DNA
ctgggtgggcaccatctaat

SEQ ID NO: 15008 - DNA, 20 bp, synthetic construct
  misc_feature 1..20: note = chemically synthesized
  source 1..20: mol_type = other DNA
ggcaccatctaatcagttgc

SEQ ID NO: 15009 - DNA, 20 bp, synthetic construct
  misc_feature 1..20: note = chemically synthesized
  source 1..20: mol_type = other DNA
catctaatcagttgccagtg

SEQ ID NO: 15010 - DNA, 20 bp, synthetic construct
  misc_feature 1..20: note = chemically synthesized
  source 1..20: mol_type = other DNA
taatcagttgccagtgtggc

SEQ ID NO: 15011 - DNA, 20 bp, synthetic construct
  misc_feature 1..20: note = chemically synthesized
  source 1..20: mol_type = other DNA
aatcagttgccagtgtggcc

SEQ ID NO: 15012 - DNA, 20 bp, synthetic construct
  misc_feature 1..20: note = chemically synthesized
  source 1..20: mol_type = other DNA
gccagtgtggccaggatata

SEQ ID NO: 15013 - DNA, 20 bp, synthetic construct
  misc_feature 1..20: note = chemically synthesized
  source 1..20: mol_type = other DNA
agtgtggccaggatataaag

SEQ ID NO: 15014 - DNA, 20 bp, synthetic construct
  misc_feature 1..20: note = chemically synthesized
  source 1..20: mol_type = other DNA
gtgtggccaggatataaagc

SEQ ID NO: 15015 - DNA, 20 bp, synthetic construct
  misc_feature 1..20: note = chemically synthesized
  source 1..20: mol_type = other DNA
tggccaggatataaagcagg

SEQ ID NO: 15016 - DNA, 20 bp, synthetic construct
  misc_feature 1..20: note = chemically synthesized
  source 1..20: mol_type = other DNA
aaaaaaacatgtgaaaatcc

SEQ ID NO: 15017 - DNA, 20 bp, synthetic construct
  misc_feature 1..20: note = chemically synthesized
  source 1..20: mol_type = other DNA
aacatgtgaaaatcctggac

SEQ ID NO: 15018 - DNA, 20 bp, synthetic construct
  misc_feature 1..20: note = chemically synthesized
  source 1..20: mol_type = other DNA
gtgaaaatcctggactggct

SEQ ID NO: 15019 - DNA, 20 bp, synthetic construct
  misc_feature 1..20: note = chemically synthesized
  source 1..20: mol_type = other DNA
cctggactggcttagcctcc

SEQ ID NO: 15020 - DNA, 20 bp, synthetic construct
  misc_feature 1..20: note = chemically synthesized
  source 1..20: mol_type = other DNA
cctacatctttctcccatgc

SEQ ID NO: 15021 - DNA, 20 bp, synthetic construct
  misc_feature 1..20: note = chemically synthesized
  source 1..20: mol_type = other DNA
tgcttcctgccctcaaacat

SEQ ID NO: 15022 - DNA, 20 bp, synthetic construct
  misc_feature 1..20: note = chemically synthesized
  source 1..20: mol_type = other DNA
gccctcaaacattggactcc

SEQ ID NO: 15023 - DNA, 20 bp, synthetic construct
  misc_feature 1..20: note = chemically synthesized
  source 1..20: mol_type = other DNA
acattggactccaagtcctt

SEQ ID NO: 15024 - DNA, 20 bp, synthetic construct
  misc_feature 1..20: note = chemically synthesized
  source 1..20: mol_type = other DNA
gactccaagtccttcagctt

SEQ ID NO: 15025 - DNA, 20 bp, synthetic construct
  misc_feature 1..20: note = chemically synthesized
  source 1..20: mol_type = other DNA
actccaagtccttcagcttt

SEQ ID NO: 15026 - DNA, 20 bp, synthetic construct
  misc_feature 1..20: note = chemically synthesized
  source 1..20: mol_type = other DNA
agtccttcagctttgggact

SEQ ID NO: 15027 - DNA, 20 bp, synthetic construct
  misc_feature 1..20: note = chemically synthesized
  source 1..20: mol_type = other DNA
ttcagctttgggacttggac

SEQ ID NO: 15028 - DNA, 20 bp, synthetic construct
  misc_feature 1..20: note = chemically synthesized
  source 1..20: mol_type = other DNA
cttccttgctcctctgcttg

SEQ ID NO: 15029 - DNA, 20 bp, synthetic construct
  misc_feature 1..20: note = chemically synthesized
  source 1..20: mol_type = other DNA
cttgctcctctgcttgcaga

SEQ ID NO: 15030 - DNA, 20 bp, synthetic construct
  misc_feature 1..20: note = chemically synthesized
  source 1..20: mol_type = other DNA
tgcttgcagatggcctattg

SEQ ID NO: 15031 - DNA, 20 bp, synthetic construct
  misc_feature 1..20: note = chemically synthesized
  source 1..20: mol_type = other DNA
gcttgcagatggcctattgt

SEQ ID NO: 15032 - DNA, 20 bp, synthetic construct
  misc_feature 1..20: note = chemically synthesized
  source 1..20: mol_type = other DNA
gtgggaccttgtgattgtgt

SEQ ID NO: 15033 - DNA, 20 bp, synthetic construct
  misc_feature 1..20: note = chemically synthesized
  source 1..20: mol_type = other DNA
tctatctatctatctcctat

SEQ ID NO: 15034 - DNA, 20 bp, synthetic construct
  misc_feature 1..20: note = chemically synthesized
  source 1..20: mol_type = other DNA
tcctattagttctgtctctc

SEQ ID NO: 15035 - DNA, 20 bp, synthetic construct
  misc_feature 1..20: note = chemically synthesized
  source 1..20: mol_type = other DNA
cctattagttctgtctctct

SEQ ID NO: 15036 - DNA, 20 bp, synthetic construct
  misc_feature 1..20: note = chemically synthesized
  source 1..20: mol_type = other DNA
ctattagttctgtctctcta

SEQ ID NO: 15037 - DNA, 20 bp, synthetic construct
  misc_feature 1..20: note = chemically synthesized
  source 1..20: mol_type = other DNA
ctagggaaccctgacaaata

SEQ ID NO: 15038 - DNA, 20 bp, synthetic construct
  misc_feature 1..20: note = chemically synthesized
  source 1..20: mol_type = other DNA
ggaaccctgacaaatacagt

SEQ ID NO: 15039 - DNA, 20 bp, synthetic construct
  misc_feature 1..20: note = chemically synthesized
  source 1..20: mol_type = other DNA
cctgacaaatacagtgagct

SEQ ID NO: 15040 - DNA, 20 bp, synthetic construct
  misc_feature 1..20: note = chemically synthesized
  source 1..20: mol_type = other DNA
ctgacaaatacagtgagctc

SEQ ID NO: 15041 - DNA, 20 bp, synthetic construct
  misc_feature 1..20: note = chemically synthesized
  source 1..20: mol_type = other DNA
atacagtgagctcaggtcct

SEQ ID NO: 15042 - DNA, 20 bp, synthetic construct
  misc_feature 1..20: note = chemically synthesized
  source 1..20: mol_type = other DNA
cagtgagctcaggtcctgag

SEQ ID NO: 15043 - DNA, 20 bp, synthetic construct
  misc_feature 1..20: note = chemically synthesized
  source 1..20: mol_type = other DNA
cctgagcagacattttccaa

SEQ ID NO: 15044 - DNA, 20 bp, synthetic construct
  misc_feature 1..20: note = chemically synthesized
  source 1..20: mol_type = other DNA
gagcagacattttccaaaag

SEQ ID NO: 15045 - DNA, 20 bp, synthetic construct
  misc_feature 1..20: note = chemically synthesized
  source 1..20: mol_type = other DNA
ttttccaaaagaagacatac

SEQ ID NO: 15046 - DNA, 20 bp, synthetic construct
  misc_feature 1..20: note = chemically synthesized
  source 1..20: mol_type = other DNA
tccaaaagaagacatacaag

SEQ ID NO: 15047 - DNA, 20 bp, synthetic construct
  misc_feature 1..20: note = chemically synthesized
  source 1..20: mol_type = other DNA
ggccaataaacgtcaaaaaa

SEQ ID NO: 15048 - DNA, 20 bp, synthetic construct
  misc_feature 1..20: note = chemically synthesized
  source 1..20: mol_type = other DNA
agttcaacatcactaataat

SEQ ID NO: 15049 - DNA, 20 bp, synthetic construct
  misc_feature 1..20: note = chemically synthesized
  source 1..20: mol_type = other DNA
ttcaacatcactaataatca

SEQ ID NO: 15050 - DNA, 20 bp, synthetic construct
  misc_feature 1..20: note = chemically synthesized
  source 1..20: mol_type = other DNA
catatgatacctccttatgc

SEQ ID NO: 15051 - DNA, 20 bp, synthetic construct
  misc_feature 1..20: note = chemically synthesized
  source 1..20: mol_type = other DNA
tgatacctccttatgccagt

SEQ ID NO: 15052 - DNA, 20 bp, synthetic construct
  misc_feature 1..20: note = chemically synthesized
  source 1..20: mol_type = other DNA
cctccttatgccagtcagaa

SEQ ID NO: 15053 - DNA, 20 bp, synthetic construct
  misc_feature 1..20: note = chemically synthesized
  source 1..20: mol_type = other DNA
tcagaatggctatcattata

SEQ ID NO: 15054 - DNA, 20 bp, synthetic construct
  misc_feature 1..20: note = chemically synthesized
  source 1..20: mol_type = other DNA
atcattataaagttcaaaaa

SEQ ID NO: 15055 - DNA, 20 bp, synthetic construct
  misc_feature 1..20: note = chemically synthesized
  source 1..20: mol_type = other DNA
attataaagttcaaaaacag

SEQ ID NO: 15056 - DNA, 20 bp, synthetic construct
  misc_feature 1..20: note = chemically synthesized
  source 1..20: mol_type = other DNA
agttcaaaaacagcagatgt

SEQ ID NO: 15057 - DNA, 20 bp, synthetic construct
  misc_feature 1..20: note = chemically synthesized
  source 1..20: mol_type = other DNA
caaaaacagcagatgttggt

SEQ ID NO: 15058 - DNA, 20 bp, synthetic construct
  misc_feature 1..20: note = chemically synthesized
  source 1..20: mol_type = other DNA
aaaaacagcagatgttggtg

SEQ ID NO: 15059 - DNA, 20 bp, synthetic construct
  misc_feature 1..20: note = chemically synthesized
  source 1..20: mol_type = other DNA
agcagatgttggtgaggatg

SEQ ID NO: 15060 - DNA, 20 bp, synthetic construct
  misc_feature 1..20: note = chemically synthesized
  source 1..20: mol_type = other DNA
cagatgttggtgaggatgtg

SEQ ID NO: 15061 - DNA, 20 bp, synthetic construct
  misc_feature 1..20: note = chemically synthesized
  source 1..20: mol_type = other DNA
gttggtgaggatgtggagac

SEQ ID NO: 15062 - DNA, 20 bp, synthetic construct
  misc_feature 1..20: note = chemically synthesized
  source 1..20: mol_type = other DNA
agaaaatgcttatacactgt

SEQ ID NO: 15063 - DNA, 20 bp, synthetic construct
  misc_feature 1..20: note = chemically synthesized
  source 1..20: mol_type = other DNA
aatgcttatacactgttggt

SEQ ID NO: 15064 - DNA, 20 bp, synthetic construct
  misc_feature 1..20: note = chemically synthesized
  source 1..20: mol_type = other DNA
ctgttggtaagaatgtaaat

SEQ ID NO: 15065 - DNA, 20 bp, synthetic construct
  misc_feature 1..20: note = chemically synthesized
  source 1..20: mol_type = other DNA
gtaaattagtacaaacttta

SEQ ID NO: 15066 - DNA, 20 bp, synthetic construct
  misc_feature 1..20: note = chemically synthesized
  source 1..20: mol_type = other DNA
aattagtacaaactttatgg

SEQ ID NO: 15067 - DNA, 20 bp, synthetic construct
  misc_feature 1..20: note = chemically synthesized
  source 1..20: mol_type = other DNA
agtacaaactttatggaaga

SEQ ID NO: 15068 - DNA, 20 bp, synthetic construct
  misc_feature 1..20: note = chemically synthesized
  source 1..20: mol_type = other DNA
actttatggaagacagcatg

SEQ ID NO: 15069 - DNA, 20 bp, synthetic construct
  misc_feature 1..20: note = chemically synthesized
  source 1..20: mol_type = other DNA
gacagcatgaagatttctta

SEQ ID NO: 15070 - DNA, 20 bp, synthetic construct
  misc_feature 1..20: note = chemically synthesized
  source 1..20: mol_type = other DNA
atgaagatttcttaaagaac

SEQ ID NO: 15071 - DNA, 20 bp, synthetic construct
  misc_feature 1..20: note = chemically synthesized
  source 1..20: mol_type = other DNA
atttcttaaagaactagaaa

SEQ ID NO: 15072 - DNA, 20 bp, synthetic construct
  misc_feature 1..20: note = chemically synthesized
  source 1..20: mol_type = other DNA
caatcctgcaatcccactac

SEQ ID NO: 15073 - DNA, 20 bp, synthetic construct
  misc_feature 1..20: note = chemically synthesized
  source 1..20: mol_type = other DNA
aatcctgcaatcccactact

SEQ ID NO: 15074 - DNA, 20 bp, synthetic construct
  misc_feature 1..20: note = chemically synthesized
  source 1..20: mol_type = other DNA
tgcaatcccactactgggta

SEQ ID NO: 15075 - DNA, 20 bp, synthetic construct
  misc_feature 1..20: note = chemically synthesized
  source 1..20: mol_type = other DNA
cactactgggtatggaccca

SEQ ID NO: 15076 - DNA, 20 bp, synthetic construct
  misc_feature 1..20: note = chemically synthesized
  source 1..20: mol_type = other DNA
tgggtatggacccaaagtga

SEQ ID NO: 15077 - DNA, 20 bp, synthetic construct
  misc_feature 1..20: note = chemically synthesized
  source 1..20: mol_type = other DNA
ggtatggacccaaagtgaaa

SEQ ID NO: 15078 - DNA, 20 bp, synthetic construct
  misc_feature 1..20: note = chemically synthesized
  source 1..20: mol_type = other DNA
tgaaagagatcatattaaaa

SEQ ID NO: 15079 - DNA, 20 bp, synthetic construct
  misc_feature 1..20: note = chemically synthesized
  source 1..20: mol_type = other DNA
attaaaaaagatatctgcat

SEQ ID NO: 15080 - DNA, 20 bp, synthetic construct
  misc_feature 1..20: note = chemically synthesized
  source 1..20: mol_type = other DNA
tatctgcattagtatgttca

SEQ ID NO: 15081 - DNA, 20 bp, synthetic construct
  misc_feature 1..20: note = chemically synthesized
  source 1..20: mol_type = other DNA
ctgcattagtatgttcaaag

SEQ ID NO: 15082 - DNA, 20 bp, synthetic construct
  misc_feature 1..20: note = chemically synthesized
  source 1..20: mol_type = other DNA
caaagtagcactgttcccaa

SEQ ID NO: 15083 - DNA, 20 bp, synthetic construct
  misc_feature 1..20: note = chemically synthesized
  source 1..20: mol_type = other DNA
tagcactgttcccaatagca

SEQ ID NO: 15084 - DNA, 20 bp, synthetic construct
  misc_feature 1..20: note = chemically synthesized
  source 1..20: mol_type = other DNA
tgttcccaatagcaaagata

SEQ ID NO: 15085 - DNA, 20 bp, synthetic construct
  misc_feature 1..20: note = chemically synthesized
  source 1..20: mol_type = other DNA
tcaacctaaatgtctaccaa

SEQ ID NO: 15086 - DNA, 20 bp, synthetic construct
  misc_feature 1..20: note = chemically synthesized
  source 1..20: mol_type = other DNA
aatgtctaccaatggacgat

SEQ ID NO: 15087 - DNA, 20 bp, synthetic construct
  misc_feature 1..20: note = chemically synthesized
  source 1..20: mol_type = other DNA
taccaatggacgattggata

SEQ ID NO: 15088 - DNA, 20 bp, synthetic construct
  misc_feature 1..20: note = chemically synthesized
  source 1..20: mol_type = other DNA
acgattggataaagaaaatg

SEQ ID NO: 15089 - DNA, 20 bp, synthetic construct
  misc_feature 1..20: note = chemically synthesized
  source 1..20: mol_type = other DNA
ttatatacatatatattact

SEQ ID NO: 15090 - DNA, 20 bp, synthetic construct
  misc_feature 1..20: note = chemically synthesized
  source 1..20: mol_type = other DNA
tatattactcagccataaaa

SEQ ID NO: 15091 - DNA, 20 bp, synthetic construct
  misc_feature 1..20: note = chemically synthesized
  source 1..20: mol_type = other DNA
gaatgaaatcatgtcttctc

SEQ ID NO: 15092 - DNA, 20 bp, synthetic construct
  misc_feature 1..20: note = chemically synthesized
  source 1..20: mol_type = other DNA
tcatgtcttctctagaaaca

SEQ ID NO: 15093 - DNA, 20 bp, synthetic construct
  misc_feature 1..20: note = chemically synthesized
  source 1..20: mol_type = other DNA
gtcttctctagaaacatggt

SEQ ID NO: 15094 - DNA, 20 bp, synthetic construct
  misc_feature 1..20: note = chemically synthesized
  source 1..20: mol_type = other DNA
tctagaaacatggttagaac

SEQ ID NO: 15095 - DNA, 20 bp, synthetic construct
  misc_feature 1..20: note = chemically synthesized
  source 1..20: mol_type = other DNA
tagaaacatggttagaactg

SEQ ID NO: 15096 - DNA, 20 bp, synthetic construct
  misc_feature 1..20: note = chemically synthesized
  source 1..20: mol_type = other DNA
agaaacatggttagaactgg

SEQ ID NO: 15097 - DNA, 20 bp, synthetic construct
  misc_feature 1..20: note = chemically synthesized
  source 1..20: mol_type = other DNA
gaactggaggacattatcct

SEQ ID NO: 15098 - DNA, 20 bp, synthetic construct
  misc_feature 1..20: note = chemically synthesized
  source 1..20: mol_type = other DNA
ttatcctcagtgaaataact

SEQ ID NO: 15099 - DNA, 20 bp, synthetic construct
  misc_feature 1..20: note = chemically synthesized
  source 1..20: mol_type = other DNA
tcagtgaaataactcagaaa

SEQ ID NO: 15100 - DNA, 20 bp, synthetic construct
  misc_feature 1..20: note = chemically synthesized
  source 1..20: mol_type = other DNA
tgaaataactcagaaacaga

SEQ ID NO: 15101 - DNA, 20 bp, synthetic construct
  misc_feature 1..20: note = chemically synthesized
  source 1..20: mol_type = other DNA
cagaaacagaaagtcaaaca

SEQ ID NO: 15102 - DNA, 20 bp, synthetic construct
  misc_feature 1..20: note = chemically synthesized
  source 1..20: mol_type = other DNA
aaacacagtatgttctcatt

SEQ ID NO: 15103 - DNA, 20 bp, synthetic construct
  misc_feature 1..20: note = chemically synthesized
  source 1..20: mol_type = other DNA
acagtatgttctcatttagt

SEQ ID NO: 15104 - DNA, 20 bp, synthetic construct
  misc_feature 1..20: note = chemically synthesized
  source 1..20: mol_type = other DNA
agtatgttctcatttagtga

SEQ ID NO: 15105 - DNA, 20 bp, synthetic construct
  misc_feature 1..20: note = chemically synthesized
  source 1..20: mol_type = other DNA
gttctcatttagtgagagcc

SEQ ID NO: 15106 - DNA, 20 bp, synthetic construct
  misc_feature 1..20: note = chemically synthesized
  source 1..20: mol_type = other DNA
ctcatttagtgagagccaag

SEQ ID NO: 15107 - DNA, 20 bp, synthetic construct
  misc_feature 1..20: note = chemically synthesized
  source 1..20: mol_type = other DNA
tcatttagtgagagccaagt

SEQ ID NO: 15108 - DNA, 20 bp, synthetic construct
  misc_feature 1..20: note = chemically synthesized
  source 1..20: mol_type = other DNA
atttagtgagagccaagtgg

SEQ ID NO: 15109 - DNA, 20 bp, synthetic construct
  misc_feature 1..20: note = chemically synthesized
  source 1..20: mol_type = other DNA
ccaagtgggagctaaacgat

SEQ ID NO: 15110 - DNA, 20 bp, synthetic construct
  misc_feature 1..20: note = chemically synthesized
  source 1..20: mol_type = other DNA
gtgggagctaaacgatgagt

SEQ ID NO: 15111 - DNA, 20 bp, synthetic construct
  misc_feature 1..20: note = chemically synthesized
  source 1..20: mol_type = other DNA
agctaaacgatgagtaagca

SEQ ID NO: 15112 - DNA, 20 bp, synthetic construct
  misc_feature 1..20: note = chemically synthesized
  source 1..20: mol_type = other DNA
gatgagtaagcatagacata

SEQ ID NO: 15113 - DNA, 20 bp, synthetic construct
  misc_feature 1..20: note = chemically synthesized
  source 1..20: mol_type = other DNA
agacatatagaatgaaataa

SEQ ID NO: 15114 - DNA, 20 bp, synthetic construct
  misc_feature 1..20: note = chemically synthesized
  source 1..20: mol_type = other DNA
gaatgaaataatagacactt

SEQ ID NO: 15115 - DNA, 20 bp, synthetic construct
  misc_feature 1..20: note = chemically synthesized
  source 1..20: mol_type = other DNA
aaataatagacacttgagac

SEQ ID NO: 15116 - DNA, 20 bp, synthetic construct
  misc_feature 1..20: note = chemically synthesized
  source 1..20: mol_type = other DNA
ataatagacacttgagacta

SEQ ID NO: 15117 - DNA, 20 bp, synthetic construct
  misc_feature 1..20: note = chemically synthesized
  source 1..20: mol_type = other DNA
tagacacttgagactagaga

SEQ ID NO: 15118 - DNA, 20 bp, synthetic construct
  misc_feature 1..20: note = chemically synthesized
  source 1..20: mol_type = other DNA
agacacttgagactagagaa

SEQ ID NO: 15119 - DNA, 20 bp, synthetic construct
  misc_feature 1..20: note = chemically synthesized
  source 1..20: mol_type = other DNA
cacttgagactagagaaagg

SEQ ID NO: 15120 - DNA, 20 bp, synthetic construct
  misc_feature 1..20: note = chemically synthesized
  source 1..20: mol_type = other DNA
acttgagactagagaaaggt

SEQ ID NO: 15121 - DNA, 20 bp, synthetic construct
  misc_feature 1..20: note = chemically synthesized
  source 1..20: mol_type = other DNA
ttgagactagagaaaggtgg

SEQ ID NO: 15122 - DNA, 20 bp, synthetic construct
  misc_feature 1..20: note = chemically synthesized
  source 1..20: mol_type = other DNA
tgagactagagaaaggtggg

SEQ ID NO: 15123 - DNA, 20 bp, synthetic construct
  misc_feature 1..20: note = chemically synthesized
  source 1..20: mol_type = other DNA
actagagaaaggtgggagga

SEQ ID NO: 15124 - DNA, 20 bp, synthetic construct
  misc_feature 1..20: note = chemically synthesized
  source 1..20: mol_type = other DNA
ctagagaaaggtgggaggat

SEQ ID NO: 15125 - DNA, 20 bp, synthetic construct
  misc_feature 1..20: note = chemically synthesized
  source 1..20: mol_type = other DNA
agagaaaggtgggaggatag

SEQ ID NO: 15126 - DNA, 20 bp, synthetic construct
  misc_feature 1..20: note = chemically synthesized
  source 1..20: mol_type = other DNA
aaggtgggaggataggagta

SEQ ID NO: 15127 - DNA, 20 bp, synthetic construct
  misc_feature 1..20: note = chemically synthesized
  source 1..20: mol_type = other DNA
tgggaggataggagtatggt

SEQ ID NO: 15128 - DNA, 20 bp, synthetic construct
  misc_feature 1..20: note = chemically synthesized
  source 1..20: mol_type = other DNA
gggaggataggagtatggtg

SEQ ID NO: 15129 - DNA, 20 bp, synthetic construct
  misc_feature 1..20: note = chemically synthesized
  source 1..20: mol_type = other DNA
tggtgaggactgaaaaacta

SEQ ID NO: 15130 - DNA, 20 bp, synthetic construct
  misc_feature 1..20: note = chemically synthesized
  source 1..20: mol_type = other DNA
aggactgaaaaactacggat

SEQ ID NO: 15131 - DNA, 20 bp, synthetic construct
  misc_feature 1..20: note = chemically synthesized
  source 1..20: mol_type = other DNA
tggatacaacattcactttt

SEQ ID NO: 15132 - DNA, 20 bp, synthetic construct
  misc_feature 1..20: note = chemically synthesized
  source 1..20: mol_type = other DNA
ggatacaacattcacttttc

SEQ ID NO: 15133 - DNA, 20 bp, synthetic construct
  misc_feature 1..20: note = chemically synthesized
  source 1..20: mol_type = other DNA
aacattcacttttcaggtga

SEQ ID NO: 15134 - DNA, 20 bp, synthetic construct
  misc_feature 1..20: note = chemically synthesized
  source 1..20: mol_type = other DNA
ttcaggtgatggtccactaa

SEQ ID NO: 15135 - DNA, 20 bp, synthetic construct
  misc_feature 1..20: note = chemically synthesized
  source 1..20: mol_type = other DNA
gtgatggtccactaaaagct

SEQ ID NO: 15136 - DNA, 20 bp, synthetic construct
  misc_feature 1..20: note = chemically synthesized
  source 1..20: mol_type = other DNA
actatgcaacatacatatgt

SEQ ID NO: 15137 - DNA, 20 bp, synthetic construct
  misc_feature 1..20: note = chemically synthesized
  source 1..20: mol_type = other DNA
ctatgcaacatacatatgta

SEQ ID NO: 15138 - DNA, 20 bp, synthetic construct
  misc_feature 1..20: note = chemically synthesized
  source 1..20: mol_type = other DNA
catacatatgtaaggaaccc

SEQ ID NO: 15139 - DNA, 20 bp, synthetic construct
  misc_feature 1..20: note = chemically synthesized
  source 1..20: mol_type = other DNA
cccgagcttgtaccctgata

SEQ ID NO: 15140 - DNA, 20 bp, synthetic construct
  misc_feature 1..20: note = chemically synthesized
  source 1..20: mol_type = other DNA
ccaaatctcatcttgaattg

SEQ ID NO: 15141 - DNA, 20 bp, synthetic construct
  misc_feature 1..20: note = chemically synthesized
  source 1..20: mol_type = other DNA
cccataatcctcacgtgttg

SEQ ID NO: 15142 - DNA, 20 bp, synthetic construct
  misc_feature 1..20: note = chemically synthesized
  source 1..20: mol_type = other DNA
ccataatcctcacgtgttgt

SEQ ID NO: 15143 - DNA, 20 bp, synthetic construct
  misc_feature 1..20: note = chemically synthesized
  source 1..20: mol_type = other DNA
ataatcctcacgtgttgtgg

SEQ ID NO: 15144 - DNA, 20 bp, synthetic construct
  misc_feature 1..20: note = chemically synthesized
  source 1..20: mol_type = other DNA
taatcctcacgtgttgtggg

SEQ ID NO: 15145 - DNA, 20 bp, synthetic construct
  misc_feature 1..20: note = chemically synthesized
  source 1..20: mol_type = other DNA
aatcctcacgtgttgtggga

SEQ ID NO: 15146 - DNA, 20 bp, synthetic construct
  misc_feature 1..20: note = chemically synthesized
  source 1..20: mol_type = other DNA
cacgtgttgtgggagggatt

SEQ ID NO: 15147 - DNA, 20 bp, synthetic construct
  misc_feature 1..20: note = chemically synthesized
  source 1..20: mol_type = other DNA
cgtgttgtgggagggatttg

SEQ ID NO: 15148 - DNA, 20 bp, synthetic construct
  misc_feature 1..20: note = chemically synthesized
  source 1..20: mol_type = other DNA
gtgttgtgggagggatttgg

SEQ ID NO: 15149 - DNA, 20 bp, synthetic construct
  misc_feature 1..20: note = chemically synthesized
  source 1..20: mol_type = other DNA
tgttgtgggagggatttgga

SEQ ID NO: 15150 - DNA, 20 bp, synthetic construct
  misc_feature 1..20: note = chemically synthesized
  source 1..20: mol_type = other DNA
ttgtgggagggatttggagg

SEQ ID NO: 15151 - DNA, 20 bp, synthetic construct
  misc_feature 1..20: note = chemically synthesized
  source 1..20: mol_type = other DNA
tgtgggagggatttggaggg

SEQ ID NO: 15152 - DNA, 20 bp, synthetic construct
  misc_feature 1..20: note = chemically synthesized
  source 1..20: mol_type = other DNA
ggagggaggtaattgaatca

SEQ ID NO: 15153 - DNA, 20 bp, synthetic construct
  misc_feature 1..20: note = chemically synthesized
  source 1..20: mol_type = other DNA
agggaggtaattgaatcata

SEQ ID NO: 15154 - DNA, 20 bp, synthetic construct
  misc_feature 1..20: note = chemically synthesized
  source 1..20: mol_type = other DNA
gggaggtaattgaatcatag

SEQ ID NO: 15155 - DNA, 20 bp, synthetic construct
  misc_feature 1..20: note = chemically synthesized
  source 1..20: mol_type = other DNA
gaggtaattgaatcatagag

SEQ ID NO: 15156 - DNA, 20 bp, synthetic construct
  misc_feature 1..20: note = chemically synthesized
  source 1..20: mol_type = other DNA
aggtaattgaatcatagagg

SEQ ID NO: 15157 - DNA, 20 bp, synthetic construct
  misc_feature 1..20: note = chemically synthesized
  source 1..20: mol_type = other DNA
ctctcatgctcttctcgtga

SEQ ID NO: 15158 - DNA, 20 bp, synthetic construct
  misc_feature 1..20: note = chemically synthesized
  source 1..20: mol_type = other DNA
catgctcttctcgtgatagt

SEQ ID NO: 15159 - DNA, 20 bp, synthetic construct
  misc_feature 1..20: note = chemically synthesized
  source 1..20: mol_type = other DNA
tcgtgatagtgagttcttac

SEQ ID NO: 15160 - DNA, 20 bp, synthetic construct
  misc_feature 1..20: note = chemically synthesized
  source 1..20: mol_type = other DNA
tgagttcttacaagatctga

SEQ ID NO: 15161 - DNA, 20 bp, synthetic construct
  misc_feature 1..20: note = chemically synthesized
  source 1..20: mol_type = other DNA
acaagatctgatggttttat

SEQ ID NO: 15162 - DNA, 20 bp, synthetic construct
  misc_feature 1..20: note = chemically synthesized
  source 1..20: mol_type = other DNA
agatctgatggttttataag

SEQ ID NO: 15163 - DNA, 20 bp, synthetic construct
  misc_feature 1..20: note = chemically synthesized
  source 1..20: mol_type = other DNA
cggcttttcccccttttgct

SEQ ID NO: 15164 - DNA, 20 bp, synthetic construct
  misc_feature 1..20: note = chemically synthesized
  source 1..20: mol_type = other DNA
ctacttgctgctgccatgtg

SEQ ID NO: 15165 - DNA, 20 bp, synthetic construct
  misc_feature 1..20: note = chemically synthesized
  source 1..20: mol_type = other DNA
cttgctgctgccatgtgaag

SEQ ID NO: 15166 - DNA, 20 bp, synthetic construct
  misc_feature 1..20: note = chemically synthesized
  source 1..20: mol_type = other DNA
ttgctgctgccatgtgaaga

SEQ ID NO: 15167 - DNA, 20 bp, synthetic construct
  misc_feature 1..20: note = chemically synthesized
  source 1..20: mol_type = other DNA
tcttcttctgccatgattgt

SEQ ID NO: 15168 - DNA, 20 bp, synthetic construct
  misc_feature 1..20: note = chemically synthesized
  source 1..20: mol_type = other DNA
gccatgattgtaagtttccc

SEQ ID NO: 15169 - DNA, 20 bp, synthetic construct
  misc_feature 1..20: note = chemically synthesized
  source 1..20: mol_type = other DNA
ccatgattgtaagtttcccg

SEQ ID NO: 15170 - DNA, 20 bp, synthetic construct
  misc_feature 1..20: note = chemically synthesized
  source 1..20: mol_type = other DNA
taagtttcccgaggcctccc

SEQ ID NO: 15171 - DNA, 20 bp, synthetic construct
  misc_feature 1..20: note = chemically synthesized
  source 1..20: mol_type = other DNA
ccgaggcctccccagccctg

SEQ ID NO: 15172 - DNA, 20 bp, synthetic construct
  misc_feature 1..20: note = chemically synthesized
  source 1..20: mol_type = other DNA
ccccagccctgtggaactgt

SEQ ID NO: 15173 - DNA, 20 bp, synthetic construct
  misc_feature 1..20: note = chemically synthesized
  source 1..20: mol_type = other DNA
ttttttccttataaattacc

SEQ ID NO: 15174 - DNA, 20 bp, synthetic construct
  misc_feature 1..20: note = chemically synthesized
  source 1..20: mol_type = other DNA
ccttataaattacccagtct

SEQ ID NO: 15175 - DNA, 20 bp, synthetic construct
  misc_feature 1..20: note = chemically synthesized
  source 1..20: mol_type = other DNA
cttataaattacccagtctc

SEQ ID NO: 15176 - DNA, 20 bp, synthetic construct
  misc_feature 1..20: note = chemically synthesized
  source 1..20: mol_type = other DNA
agtctcaggtatgtctttat

SEQ ID NO: 15177 - DNA, 20 bp, synthetic construct
  misc_feature 1..20: note = chemically synthesized
  source 1..20: mol_type = other DNA
ctcaggtatgtctttataag

SEQ ID NO: 15178 - DNA, 20 bp, synthetic construct
  misc_feature 1..20: note = chemically synthesized
  source 1..20: mol_type = other DNA
taagcagcatgataacgaac

SEQ ID NO: 15179 - DNA, 20 bp, synthetic construct
  misc_feature 1..20: note = chemically synthesized
  source 1..20: mol_type = other DNA
tttaaaaatataaaataaat

SEQ ID NO: 15180 - DNA, 20 bp, synthetic construct
  misc_feature 1..20: note = chemically synthesized
  source 1..20: mol_type = other DNA
ataaattagatctgattgaa

SEQ ID NO: 15181 - DNA, 20 bp, synthetic construct
  misc_feature 1..20: note = chemically synthesized
  source 1..20: mol_type = other DNA
taaattagatctgattgaaa

SEQ ID NO: 15182 - DNA, 20 bp, synthetic construct
  misc_feature 1..20: note = chemically synthesized
  source 1..20: mol_type = other DNA
tgattgaaaaggcaaaaatt

SEQ ID NO: 15183 - DNA, 20 bp, synthetic construct
  misc_feature 1..20: note = chemically synthesized
  source 1..20: mol_type = other DNA
tgaaaaggcaaaaattgagc

SEQ ID NO: 15184 - DNA, 20 bp, synthetic construct
  misc_feature 1..20: note = chemically synthesized
  source 1..20: mol_type = other DNA
gcaagcaaaatatcacttaa

SEQ ID NO: 15185 - DNA, 20 bp, synthetic construct
  misc_feature 1..20: note = chemically synthesized
  source 1..20: mol_type = other DNA
caagcaaaatatcacttaat

SEQ ID NO: 15186 - DNA, 20 bp, synthetic construct
  misc_feature 1..20: note = chemically synthesized
  source 1..20: mol_type = other DNA
aagcaaaatatcacttaatg

SEQ ID NO: 15187 - DNA, 20 bp, synthetic construct
  misc_feature 1..20: note = chemically synthesized
  source 1..20: mol_type = other DNA
tcacttaatggggtaattaa

SEQ ID NO: 15188 - DNA, 20 bp, synthetic construct
  misc_feature 1..20: note = chemically synthesized
  source 1..20: mol_type = other DNA
cacttaatggggtaattaaa

SEQ ID NO: 15189 - DNA, 20 bp, synthetic construct
  misc_feature 1..20: note = chemically synthesized
  source 1..20: mol_type = other DNA
acttaatggggtaattaaaa

SEQ ID NO: 15190 - DNA, 20 bp, synthetic construct
  misc_feature 1..20: note = chemically synthesized
  source 1..20: mol_type = other DNA
atggggtaattaaaagggtg

SEQ ID NO: 15191 - DNA, 20 bp, synthetic construct
  misc_feature 1..20: note = chemically synthesized
  source 1..20: mol_type = other DNA
aattaaaagggtgaagaaat

SEQ ID NO: 15192 - DNA, 20 bp, synthetic construct
  misc_feature 1..20: note = chemically synthesized
  source 1..20: mol_type = other DNA
attaaaagggtgaagaaatt

SEQ ID NO: 15193 - DNA, 20 bp, synthetic construct
  misc_feature 1..20: note = chemically synthesized
  source 1..20: mol_type = other DNA
gggtgaagaaattgggcaaa

SEQ ID NO: 15194 - DNA, 20 bp, synthetic construct
  misc_feature 1..20: note = chemically synthesized
  source 1..20: mol_type = other DNA
attgggcaaatggatgtcat

SEQ ID NO: 15195 - DNA, 20 bp, synthetic construct
  misc_feature 1..20: note = chemically synthesized
  source 1..20: mol_type = other DNA
ttgggcaaatggatgtcatg

SEQ ID NO: 15196 - DNA, 20 bp, synthetic construct
  misc_feature 1..20: note = chemically synthesized
  source 1..20: mol_type = other DNA
gggcaaatggatgtcatgag

SEQ ID NO: 15197 - DNA, 20 bp, synthetic construct
  misc_feature 1..20: note = chemically synthesized
  source 1..20: mol_type = other DNA
ggcaaatggatgtcatgagg

SEQ ID NO: 15198 - DNA, 20 bp, synthetic construct
  misc_feature 1..20: note = chemically synthesized
  source 1..20: mol_type = other DNA
atgtcatgaggaggaatttt

SEQ ID NO: 15199 - DNA, 20 bp, synthetic construct
  misc_feature 1..20: note = chemically synthesized
  source 1..20: mol_type = other DNA
tgtcatgaggaggaattttt

SEQ ID NO: 15200 - DNA, 20 bp, synthetic construct
  misc_feature 1..20: note = chemically synthesized
  source 1..20: mol_type = other DNA
catgaggaggaatttttagg

SEQ ID NO: 15201 - DNA, 20 bp, synthetic construct
  misc_feature 1..20: note = chemically synthesized
  source 1..20: mol_type = other DNA
tgaggaggaatttttaggca

SEQ ID NO: 15202 - DNA, 20 bp, synthetic construct
  misc_feature 1..20: note = chemically synthesized
  source 1..20: mol_type = other DNA
gaggaggaatttttaggcag

SEQ ID NO: 15203 - DNA, 20 bp, synthetic construct
  misc_feature 1..20: note = chemically synthesized
  source 1..20: mol_type = other DNA
gaatttttaggcagaggtaa

SEQ ID NO: 15204 - DNA, 20 bp, synthetic construct
  misc_feature 1..20: note = chemically synthesized
  source 1..20: mol_type = other DNA
ttttaggcagaggtaatggt

SEQ ID NO: 15205 - DNA, 20 bp, synthetic construct
  misc_feature 1..20: note = chemically synthesized
  source 1..20: mol_type = other DNA
ttaggcagaggtaatggtca

SEQ ID NO: 15206 - DNA, 20 bp, synthetic construct
  misc_feature 1..20: note = chemically synthesized
  source 1..20: mol_type = other DNA
cagaggtaatggtcagagcc

SEQ ID NO: 15207 - DNA, 20 bp, synthetic construct
  misc_feature 1..20: note = chemically synthesized
  source 1..20: mol_type = other DNA
agaggtaatggtcagagccc

SEQ ID NO: 15208 - DNA, 20 bp, synthetic construct
  misc_feature 1..20: note = chemically synthesized
  source 1..20: mol_type = other DNA
atggtcagagcccaggccct

SEQ ID NO: 15209 - DNA, 20 bp, synthetic construct
  misc_feature 1..20: note = chemically synthesized
  source 1..20: mol_type = other DNA
tcagagcccaggccctaagc

SEQ ID NO: 15210 - DNA, 20 bp, synthetic construct
  misc_feature 1..20: note = chemically synthesized
  source 1..20: mol_type = other DNA
agagcccaggccctaagctg

SEQ ID NO: 15211 - DNA, 20 bp, synthetic construct
  misc_feature 1..20: note = chemically synthesized
  source 1..20: mol_type = other DNA
gcccaggccctaagctggag

SEQ ID NO: 15212 - DNA, 20 bp, synthetic construct
  misc_feature 1..20: note = chemically synthesized
  source 1..20: mol_type = other DNA
ccaggccctaagctggagta

SEQ ID NO: 15213 - DNA, 20 bp, synthetic construct
  misc_feature 1..20: note = chemically synthesized
  source 1..20: mol_type = other DNA
taagctggagtagagtgtgc

SEQ ID NO: 15214 - DNA, 20 bp, synthetic construct
  misc_feature 1..20: note = chemically synthesized
  source 1..20: mol_type = other DNA
aagctggagtagagtgtgca

SEQ ID NO: 15215 - DNA, 20 bp, synthetic construct
  misc_feature 1..20: note = chemically synthesized
  source 1..20: mol_type = other DNA
tggagtagagtgtgcaagga

SEQ ID NO: 15216 - DNA, 20 bp, synthetic construct
  misc_feature 1..20: note = chemically synthesized
  source 1..20: mol_type = other DNA
gagtagagtgtgcaaggaaa

SEQ ID NO: 15217 - DNA, 20 bp, synthetic construct
  misc_feature 1..20: note = chemically synthesized
  source 1..20: mol_type = other DNA
agtgtgcaaggaaagagtaa

SEQ ID NO: 15218 - DNA, 20 bp, synthetic construct
  misc_feature 1..20: note = chemically synthesized
  source 1..20: mol_type = other DNA
gtgtgcaaggaaagagtaat

SEQ ID NO: 15219 - DNA, 20 bp, synthetic construct
  misc_feature 1..20: note = chemically synthesized
  source 1..20: mol_type = other DNA
gaaagagtaataggattgaa

SEQ ID NO: 15220 - DNA, 20 bp, synthetic construct
  misc_feature 1..20: note = chemically synthesized
  source 1..20: mol_type = other DNA
aaagagtaataggattgaaa

SEQ ID NO: 15221 - DNA, 20 bp, synthetic construct
  misc_feature 1..20: note = chemically synthesized
  source 1..20: mol_type = other DNA
ataggattgaaaaggataac

SEQ ID NO: 15222 - DNA, 20 bp, synthetic construct
  misc_feature 1..20: note = chemically synthesized
  source 1..20: mol_type = other DNA
taggattgaaaaggataacc

SEQ ID NO: 15223 - DNA, 20 bp, synthetic construct
  misc_feature 1..20: note = chemically synthesized
  source 1..20: mol_type = other DNA
gattgaaaaggataaccagg

SEQ ID NO: 15224 - DNA, 20 bp, synthetic construct
  misc_feature 1..20: note = chemically synthesized
  source 1..20: mol_type = other DNA
attgaaaaggataaccaggt

SEQ ID NO: 15225 - DNA, 20 bp, synthetic construct
  misc_feature 1..20: note = chemically synthesized
  source 1..20: mol_type = other DNA
tgaaaaggataaccaggtag

SEQ ID NO: 15226 - DNA, 20 bp, synthetic construct
  misc_feature 1..20: note = chemically synthesized
  source 1..20: mol_type = other DNA
gaaaaggataaccaggtagg

SEQ ID NO: 15227 - DNA, 20 bp, synthetic construct
  misc_feature 1..20: note = chemically synthesized
  source 1..20: mol_type = other DNA
gataaccaggtaggaggaca

SEQ ID NO: 15228 - DNA, 20 bp, synthetic construct
  misc_feature 1..20: note = chemically synthesized
  source 1..20: mol_type = other DNA
ataaccaggtaggaggacat

SEQ ID NO: 15229 - DNA, 20 bp, synthetic construct
  misc_feature 1..20: note = chemically synthesized
  source 1..20: mol_type = other DNA
taaccaggtaggaggacata

SEQ ID NO: 15230 - DNA, 20 bp, synthetic construct
  misc_feature 1..20: note = chemically synthesized
  source 1..20: mol_type = other DNA
accaggtaggaggacatagg

SEQ ID NO: 15231 - DNA, 20 bp, synthetic construct
  misc_feature 1..20: note = chemically synthesized
  source 1..20: mol_type = other DNA
ccaggtaggaggacataggg

SEQ ID NO: 15232 - DNA, 20 bp, synthetic construct
  misc_feature 1..20: note = chemically synthesized
  source 1..20: mol_type = other DNA
caggtaggaggacataggga

SEQ ID NO: 15233 - DNA, 20 bp, synthetic construct
  misc_feature 1..20: note = chemically synthesized
  source 1..20: mol_type = other DNA
aggtaggaggacatagggag

SEQ ID NO: 15234 - DNA, 20 bp, synthetic construct
  misc_feature 1..20: note = chemically synthesized
  source 1..20: mol_type = other DNA
aggaggacatagggaggggt

SEQ ID NO: 15235 - DNA, 20 bp, synthetic construct
  misc_feature 1..20: note = chemically synthesized
  source 1..20: mol_type = other DNA
ggaggacatagggaggggta

SEQ ID NO: 15236 - DNA, 20 bp, synthetic construct
  misc_feature 1..20: note = chemically synthesized
  source 1..20: mol_type = other DNA
gaggacatagggaggggtaa

SEQ ID NO: 15237 - DNA, 20 bp, synthetic construct
  misc_feature 1..20: note = chemically synthesized
  source 1..20: mol_type = other DNA
aggacatagggaggggtaag

SEQ ID NO: 15238 - DNA, 20 bp, synthetic construct
  misc_feature 1..20: note = chemically synthesized
  source 1..20: mol_type = other DNA
gacatagggaggggtaaggg

SEQ ID NO: 15239 - DNA, 20 bp, synthetic construct
  misc_feature 1..20: note = chemically synthesized
  source 1..20: mol_type = other DNA
acatagggaggggtaagggg

SEQ ID NO: 15240 - DNA, 20 bp, synthetic construct
  misc_feature 1..20: note = chemically synthesized
  source 1..20: mol_type = other DNA
tagggaggggtaaggggagg

SEQ ID NO: 15241 - DNA, 20 bp, synthetic construct
  misc_feature 1..20: note = chemically synthesized
  source 1..20: mol_type = other DNA
ggtaaggggaggaagacctc

SEQ ID NO: 15242 - DNA, 20 bp, synthetic construct
  misc_feature 1..20: note = chemically synthesized
  source 1..20: mol_type = other DNA
aggaagacctccagtaaact

SEQ ID NO: 15243 - DNA, 20 bp, synthetic construct
  misc_feature 1..20: note = chemically synthesized
  source 1..20: mol_type = other DNA
ggaagacctccagtaaactt

SEQ ID NO: 15244 - DNA, 20 bp, synthetic construct
  misc_feature 1..20: note = chemically synthesized
  source 1..20: mol_type = other DNA
agacctccagtaaacttagg

SEQ ID NO: 15245 - DNA, 20 bp, synthetic construct
  misc_feature 1..20: note = chemically synthesized
  source 1..20: mol_type = other DNA
gacctccagtaaacttaggc

SEQ ID NO: 15246 - DNA, 20 bp, synthetic construct
  misc_feature 1..20: note = chemically synthesized
  source 1..20: mol_type = other DNA
aggcaggatatttcccgtga

SEQ ID NO: 15247 - DNA, 20 bp, synthetic construct
  misc_feature 1..20: note = chemically synthesized
  source 1..20: mol_type = other DNA
actaaataataatcacatgt

SEQ ID NO: 15248 - DNA, 20 bp, synthetic construct
  misc_feature 1..20: note = chemically synthesized
  source 1..20: mol_type = other DNA
aaataatctgtcgattactt

SEQ ID NO: 15249 - DNA, 20 bp, synthetic construct
  misc_feature 1..20: note = chemically synthesized
  source 1..20: mol_type = other DNA
ttgagcaatactttgttcat

SEQ ID NO: 15250 - DNA, 20 bp, synthetic construct
  misc_feature 1..20: note = chemically synthesized
  source 1..20: mol_type = other DNA
gcaatactttgttcatgagc

SEQ ID NO: 15251 - DNA, 20 bp, synthetic construct
  misc_feature 1..20: note = chemically synthesized
  source 1..20: mol_type = other DNA
aatactttgttcatgagcta

SEQ ID NO: 15252 - DNA, 20 bp, synthetic construct
  misc_feature 1..20: note = chemically synthesized
  source 1..20: mol_type = other DNA
ctttgttcatgagctagagc

SEQ ID NO: 15253 - DNA, 20 bp, synthetic construct
  misc_feature 1..20: note = chemically synthesized
  source 1..20: mol_type = other DNA
tttgttcatgagctagagca

SEQ ID NO: 15254 - DNA, 20 bp, synthetic construct
  misc_feature 1..20: note = chemically synthesized
  source 1..20: mol_type = other DNA
ttgttcatgagctagagcaa

SEQ ID NO: 15255 - DNA, 20 bp, synthetic construct
  misc_feature 1..20: note = chemically synthesized
  source 1..20: mol_type = other DNA
tgttcatgagctagagcaag

SEQ ID NO: 15256 - DNA, 20 bp, synthetic construct
  misc_feature 1..20: note = chemically synthesized
  source 1..20: mol_type = other DNA
ctagagcaaggggatgactc

SEQ ID NO: 15257 - DNA, 20 bp, synthetic construct
  misc_feature 1..20: note = chemically synthesized
  source 1..20: mol_type = other DNA
agaaatcctttgtgaaatcc

SEQ ID NO: 15258 - DNA, 20 bp, synthetic construct
  misc_feature 1..20: note = chemically synthesized
  source 1..20: mol_type = other DNA
aaatcctttgtgaaatcctg

SEQ ID NO: 15259 - DNA, 20 bp, synthetic construct
  misc_feature 1..20: note = chemically synthesized
  source 1..20: mol_type = other DNA
aatcctttgtgaaatcctgg

SEQ ID NO: 15260 - DNA, 20 bp, synthetic construct
  misc_feature 1..20: note = chemically synthesized
  source 1..20: mol_type = other DNA
tgtgaaatcctggaggtaat

SEQ ID NO: 15261 - DNA, 20 bp, synthetic construct
  misc_feature 1..20: note = chemically synthesized
  source 1..20: mol_type = other DNA
tcctggaggtaataagatcc

SEQ ID NO: 15262 - DNA, 20 bp, synthetic construct
  misc_feature 1..20: note = chemically synthesized
  source 1..20: mol_type = other DNA
atcttcaactcaattgcaaa

SEQ ID NO: 15263 - DNA, 20 bp, synthetic construct
  misc_feature 1..20: note = chemically synthesized
  source 1..20: mol_type = other DNA
caaaacatattccatttcat

SEQ ID NO: 15264 - DNA, 20 bp, synthetic construct
  misc_feature 1..20: note = chemically synthesized
  source 1..20: mol_type = other DNA
tattccatttcatcagacta

SEQ ID NO: 15265 - DNA, 20 bp, synthetic construct
  misc_feature 1..20: note = chemically synthesized
  source 1..20: mol_type = other DNA
attccatttcatcagactac

SEQ ID NO: 15266 - DNA, 20 bp, synthetic construct
  misc_feature 1..20: note = chemically synthesized
  source 1..20: mol_type = other DNA
catcagactacaggttttaa

SEQ ID NO: 15267 - DNA, 20 bp, synthetic construct
  misc_feature 1..20: note = chemically synthesized
  source 1..20: mol_type = other DNA
atttcttaaatgtattattc

SEQ ID NO: 15268 - DNA, 20 bp, synthetic construct
  misc_feature 1..20: note = chemically synthesized
  source 1..20: mol_type = other DNA
ccagtaacttatactttaca

SEQ ID NO: 15269 - DNA, 20 bp, synthetic construct
  misc_feature 1..20: note = chemically synthesized
  source 1..20: mol_type = other DNA
tacatagtaaatcttatcaa

SEQ ID NO: 15270 - DNA, 20 bp, synthetic construct
  misc_feature 1..20: note = chemically synthesized
  source 1..20: mol_type = other DNA
ttatcaatagtcacaatcaa

SEQ ID NO: 15271 - DNA, 20 bp, synthetic construct
  misc_feature 1..20: note = chemically synthesized
  source 1..20: mol_type = other DNA
agtcacaatcaatggtcaca

SEQ ID NO: 15272 - DNA, 20 bp, synthetic construct
  misc_feature 1..20: note = chemically synthesized
  source 1..20: mol_type = other DNA
cacaatcaatggtcacaaag

SEQ ID NO: 15273 - DNA, 20 bp, synthetic construct
  misc_feature 1..20: note = chemically synthesized
  source 1..20: mol_type = other DNA
tcacaaagtagaacttcatc

SEQ ID NO: 15274 - DNA, 20 bp, synthetic construct
  misc_feature 1..20: note = chemically synthesized
  source 1..20: mol_type = other DNA
acaaagtagaacttcatctg

SEQ ID NO: 15275 - DNA, 20 bp, synthetic construct
  misc_feature 1..20: note = chemically synthesized
  source 1..20: mol_type = other DNA
tcatctggagacattacttt

SEQ ID NO: 15276 - DNA, 20 bp, synthetic construct
  misc_feature 1..20: note = chemically synthesized
  source 1..20: mol_type = other DNA
ggagacattacttttagcct

SEQ ID NO: 15277 - DNA, 20 bp, synthetic construct
  misc_feature 1..20: note = chemically synthesized
  source 1..20: mol_type = other DNA
gccatgcaaaatatactttt

SEQ ID NO: 15278 - DNA, 20 bp, synthetic construct
  misc_feature 1..20: note = chemically synthesized
  source 1..20: mol_type = other DNA
tttggaaaattgccctttga

SEQ ID NO: 15279 - DNA, 20 bp, synthetic construct
  misc_feature 1..20: note = chemically synthesized
  source 1..20: mol_type = other DNA
ttggaaaattgccctttgaa

SEQ ID NO: 15280 - DNA, 20 bp, synthetic construct
  misc_feature 1..20: note = chemically synthesized
  source 1..20: mol_type = other DNA
aaaattgccctttgaaaggc

SEQ ID NO: 15281 - DNA, 20 bp, synthetic construct
  misc_feature 1..20: note = chemically synthesized
  source 1..20: mol_type = other DNA
ctttgaaaggcgagacacaa

SEQ ID NO: 15282 - DNA, 20 bp, synthetic construct
  misc_feature 1..20: note = chemically synthesized
  source 1..20: mol_type = other DNA
tttgaaaggcgagacacaaa

SEQ ID NO: 15283 - DNA, 20 bp, synthetic construct
  misc_feature 1..20: note = chemically synthesized
  source 1..20: mol_type = other DNA
caaatgttgatgctattata

SEQ ID NO: 15284 - DNA, 20 bp, synthetic construct
  misc_feature 1..20: note = chemically synthesized
  source 1..20: mol_type = other DNA
atgctattatatggtaccaa

SEQ ID NO: 15285 - DNA, 20 bp, synthetic construct
  misc_feature 1..20: note = chemically synthesized
  source 1..20: mol_type = other DNA
tgctattatatggtaccaat

SEQ ID NO: 15286 - DNA, 20 bp, synthetic construct
  misc_feature 1..20: note = chemically synthesized
  source 1..20: mol_type = other DNA
ataggattcattaatttata

SEQ ID NO: 15287 - DNA, 20 bp, synthetic construct
  misc_feature 1..20: note = chemically synthesized
  source 1..20: mol_type = other DNA
taggattcattaatttataa

SEQ ID NO: 15288 - DNA, 20 bp, synthetic construct
  misc_feature 1..20: note = chemically synthesized
  source 1..20: mol_type = other DNA
ggattcattaatttataaag

SEQ ID NO: 15289 - DNA, 20 bp, synthetic construct
  misc_feature 1..20: note = chemically synthesized
  source 1..20: mol_type = other DNA
ttcattaatttataaaggag

SEQ ID NO: 15290 - DNA, 20 bp, synthetic construct
  misc_feature 1..20: note = chemically synthesized
  source 1..20: mol_type = other DNA
cattaatttataaaggagaa

SEQ ID NO: 15291 - DNA, 20 bp, synthetic construct
  misc_feature 1..20: note = chemically synthesized
  source 1..20: mol_type = other DNA
ctaatgtaactccaaaatgc

SEQ ID NO: 15292 - DNA, 20 bp, synthetic construct
  misc_feature 1..20: note = chemically synthesized
  source 1..20: mol_type = other DNA
aatgcaagcaattttcatat

SEQ ID NO: 15293 - DNA, 20 bp, synthetic construct
  misc_feature 1..20: note = chemically synthesized
  source 1..20: mol_type = other DNA
attttcatatgagtctacac

SEQ ID NO: 15294 - DNA, 20 bp, synthetic construct
  misc_feature 1..20: note = chemically synthesized
  source 1..20: mol_type = other DNA
tacacaagctaattgtcctt

SEQ ID NO: 15295 - DNA, 20 bp, synthetic construct
  misc_feature 1..20: note = chemically synthesized
  source 1..20: mol_type = other DNA
tccttaagaatttcatcttt

SEQ ID NO: 15296 - DNA, 20 bp, synthetic construct
  misc_feature 1..20: note = chemically synthesized
  source 1..20: mol_type = other DNA
ccttaagaatttcatcttta

SEQ ID NO: 15297 - DNA, 20 bp, synthetic construct
  misc_feature 1..20: note = chemically synthesized
  source 1..20: mol_type = other DNA
agaatttcatctttaaggaa

SEQ ID NO: 15298 - DNA, 20 bp, synthetic construct
  misc_feature 1..20: note = chemically synthesized
  source 1..20: mol_type = other DNA
aagttttttactgtatcaaa

SEQ ID NO: 15299 - DNA, 20 bp, synthetic construct
  misc_feature 1..20: note = chemically synthesized
  source 1..20: mol_type = other DNA
ttttttactgtatcaaaaag

SEQ ID NO: 15300 - DNA, 20 bp, synthetic construct
  misc_feature 1..20: note = chemically synthesized
  source 1..20: mol_type = other DNA
aagaagtttaaactgtcatt

SEQ ID NO: 15301 - DNA, 20 bp, synthetic construct
  misc_feature 1..20: note = chemically synthesized
  source 1..20: mol_type = other DNA
aagtttaaactgtcattgag

SEQ ID NO: 15302 - DNA, 20 bp, synthetic construct
  misc_feature 1..20: note = chemically synthesized
  source 1..20: mol_type = other DNA
gtttaaactgtcattgagca

SEQ ID NO: 15303 - DNA, 20 bp, synthetic construct
  misc_feature 1..20: note = chemically synthesized
  source 1..20: mol_type = other DNA
attgagcagagtctgataat

SEQ ID NO: 15304 - DNA, 20 bp, synthetic construct
  misc_feature 1..20: note = chemically synthesized
  source 1..20: mol_type = other DNA
ttgagcagagtctgataata

SEQ ID NO: 15305 - DNA, 20 bp, synthetic construct
  misc_feature 1..20: note = chemically synthesized
  source 1..20: mol_type = other DNA
ataaggacactgtcaaatca

SEQ ID NO: 15306 - DNA, 20 bp, synthetic construct
  misc_feature 1..20: note = chemically synthesized
  source 1..20: mol_type = other DNA
gacactgtcaaatcacagtt

SEQ ID NO: 15307 - DNA, 20 bp, synthetic construct
  misc_feature 1..20: note = chemically synthesized
  source 1..20: mol_type = other DNA
cagttcagatgttatgtgat

SEQ ID NO: 15308 - DNA, 20 bp, synthetic construct
  misc_feature 1..20: note = chemically synthesized
  source 1..20: mol_type = other DNA
agttcagatgttatgtgatg

SEQ ID NO: 15309 - DNA, 20 bp, synthetic construct
  misc_feature 1..20: note = chemically synthesized
  source 1..20: mol_type = other DNA
cagatgttatgtgatgagga

SEQ ID NO: 15310 - DNA, 20 bp, synthetic construct
  misc_feature 1..20: note = chemically synthesized
  source 1..20: mol_type = other DNA
gttatgtgatgaggacagaa

SEQ ID NO: 15311 - DNA, 20 bp, synthetic construct
  misc_feature 1..20: note = chemically synthesized
  source 1..20: mol_type = other DNA
gaggacagaatagaacacat

SEQ ID NO: 15312 - DNA, 20 bp, synthetic construct
  misc_feature 1..20: note = chemically synthesized
  source 1..20: mol_type = other DNA
aggacagaatagaacacatg

SEQ ID NO: 15313 - DNA, 20 bp, synthetic construct
  misc_feature 1..20: note = chemically synthesized
  source 1..20: mol_type = other DNA
gacagaatagaacacatgag

SEQ ID NO: 15314 - DNA, 20 bp, synthetic construct
  misc_feature 1..20: note = chemically synthesized
  source 1..20: mol_type = other DNA
acagaatagaacacatgagg

SEQ ID NO: 15315 - DNA, 20 bp, synthetic construct
  misc_feature 1..20: note = chemically synthesized
  source 1..20: mol_type = other DNA
gaatagaacacatgaggagg

SEQ ID NO: 15316 - DNA, 20 bp, synthetic construct
  misc_feature 1..20: note = chemically synthesized
  source 1..20: mol_type = other DNA
tagaacacatgaggaggaag

SEQ ID NO: 15317 - DNA, 20 bp, synthetic construct
  misc_feature 1..20: note = chemically synthesized
  source 1..20: mol_type = other DNA
gaggaggaagcagaaacttc

SEQ ID NO: 15318 - DNA, 20 bp, synthetic construct
  misc_feature 1..20: note = chemically synthesized
  source 1..20: mol_type = other DNA
ggaagcagaaacttctagac

SEQ ID NO: 15319 - DNA, 20 bp, synthetic construct
  misc_feature 1..20: note = chemically synthesized
  source 1..20: mol_type = other DNA
cagaaacttctagactggac

SEQ ID NO: 15320 - DNA, 20 bp, synthetic construct
  misc_feature 1..20: note = chemically synthesized
  source 1..20: mol_type = other DNA
acttctagactggacaagaa

SEQ ID NO: 15321 - DNA, 20 bp, synthetic construct
  misc_feature 1..20: note = chemically synthesized
  source 1..20: mol_type = other DNA
aaccatccaacaataaatct

SEQ ID NO: 15322 - DNA, 20 bp, synthetic construct
  misc_feature 1..20: note = chemically synthesized
  source 1..20: mol_type = other DNA
tgatgtcatctactacatct

SEQ ID NO: 15323 - DNA, 20 bp, synthetic construct
  misc_feature 1..20: note = chemically synthesized
  source 1..20: mol_type = other DNA
ctaagtatttcctcaaattc

SEQ ID NO: 15324 - DNA, 20 bp, synthetic construct
  misc_feature 1..20: note = chemically synthesized
  source 1..20: mol_type = other DNA
cctcaaattctggacaattt

SEQ ID NO: 15325 - DNA, 20 bp, synthetic construct
  misc_feature 1..20: note = chemically synthesized
  source 1..20: mol_type = other DNA
aaccatcaaaattatttgtt

SEQ ID NO: 15326 - DNA, 20 bp, synthetic construct
  misc_feature 1..20: note = chemically synthesized
  source 1..20: mol_type = other DNA
accatcaaaattatttgttg

SEQ ID NO: 15327 - DNA, 20 bp, synthetic construct
  misc_feature 1..20: note = chemically synthesized
  source 1..20: mol_type = other DNA
ttgttgaggaaaaataaact

SEQ ID NO: 15328 - DNA, 20 bp, synthetic construct
  misc_feature 1..20: note = chemically synthesized
  source 1..20: mol_type = other DNA
aataaacttagccaatttgc

SEQ ID NO: 15329 - DNA, 20 bp, synthetic construct
  misc_feature 1..20: note = chemically synthesized
  source 1..20: mol_type = other DNA
ataaacttagccaatttgca

SEQ ID NO: 15330 - DNA, 20 bp, synthetic construct
  misc_feature 1..20: note = chemically synthesized
  source 1..20: mol_type = other DNA
taaacttagccaatttgcaa

SEQ ID NO: 15331 - DNA, 20 bp, synthetic construct
  misc_feature 1..20: note = chemically synthesized
  source 1..20: mol_type = other DNA
ttgcaagggcaactaaaatg

SEQ ID NO: 15332 - DNA, 20 bp, synthetic construct
  misc_feature 1..20: note = chemically synthesized
  source 1..20: mol_type = other DNA
aaatgaagaacttttcttta

SEQ ID NO: 15333 - DNA, 20 bp, synthetic construct
  misc_feature 1..20: note = chemically synthesized
  source 1..20: mol_type = other DNA
aagaacttttctttaaagtg

SEQ ID NO: 15334 - DNA, 20 bp, synthetic construct
  misc_feature 1..20: note = chemically synthesized
  source 1..20: mol_type = other DNA
agaacttttctttaaagtgt

SEQ ID NO: 15335 - DNA, 20 bp, synthetic construct
  misc_feature 1..20: note = chemically synthesized
  source 1..20: mol_type = other DNA
aacttttctttaaagtgtgg

SEQ ID NO: 15336 - DNA, 20 bp, synthetic construct
  misc_feature 1..20: note = chemically synthesized
  source 1..20: mol_type = other DNA
aaagtgtgggagtcacatct

SEQ ID NO: 15337 - DNA, 20 bp, synthetic construct
  misc_feature 1..20: note = chemically synthesized
  source 1..20: mol_type = other DNA
caacatatttaaatatatct

SEQ ID NO: 15338 - DNA, 20 bp, synthetic construct
  misc_feature 1..20: note = chemically synthesized
  source 1..20: mol_type = other DNA
acaaaaatgcaaaatttcca

SEQ ID NO: 15339 - DNA, 20 bp, synthetic construct
  misc_feature 1..20: note = chemically synthesized
  source 1..20: mol_type = other DNA
aaagaatttctcctcttctg

SEQ ID NO: 15340 - DNA, 20 bp, synthetic construct
  misc_feature 1..20: note = chemically synthesized
  source 1..20: mol_type = other DNA
ttcttcatcttcatcttttc

SEQ ID NO: 15341 - DNA, 20 bp, synthetic construct
  misc_feature 1..20: note = chemically synthesized
  source 1..20: mol_type = other DNA
tcttcatcttcatcttttcc

SEQ ID NO: 15342 - DNA, 20 bp, synthetic construct
  misc_feature 1..20: note = chemically synthesized
  source 1..20: mol_type = other DNA
ttcatcttcatcttttccag

SEQ ID NO: 15343 - DNA, 20 bp, synthetic construct
  misc_feature 1..20: note = chemically synthesized
  source 1..20: mol_type = other DNA
tttccaggagaatataccat

SEQ ID NO: 15344 - DNA, 20 bp, synthetic construct
  misc_feature 1..20: note = chemically synthesized
  source 1..20: mol_type = other DNA
aatataccataagtttctga

SEQ ID NO: 15345 - DNA, 20 bp, synthetic construct
  misc_feature 1..20: note = chemically synthesized
  source 1..20: mol_type = other DNA
ttctgatggtacacatttat

SEQ ID NO: 15346 - DNA, 20 bp, synthetic construct
  misc_feature 1..20: note = chemically synthesized
  source 1..20: mol_type = other DNA
ttgcaactatgcatcttact

SEQ ID NO: 15347 - DNA, 20 bp, synthetic construct
  misc_feature 1..20: note = chemically synthesized
  source 1..20: mol_type = other DNA
gcaactatgcatcttactca

SEQ ID NO: 15348 - DNA, 20 bp, synthetic construct
  misc_feature 1..20: note = chemically synthesized
  source 1..20: mol_type = other DNA
cttaaaacatccttgtttgt

SEQ ID NO: 15349 - DNA, 20 bp, synthetic construct
  misc_feature 1..20: note = chemically synthesized
  source 1..20: mol_type = other DNA
tttcaaattcatatacactt

SEQ ID NO: 15350 - DNA, 20 bp, synthetic construct
  misc_feature 1..20: note = chemically synthesized
  source 1..20: mol_type = other DNA
caaattcatatacactttgg

SEQ ID NO: 15351 - DNA, 20 bp, synthetic construct
  misc_feature 1..20: note = chemically synthesized
  source 1..20: mol_type = other DNA
gcaaacatttttatttgctg

SEQ ID NO: 15352 - DNA, 20 bp, synthetic construct
  misc_feature 1..20: note = chemically synthesized
  source 1..20: mol_type = other DNA
ttttatttgctgaagaacat

SEQ ID NO: 15353 - DNA, 20 bp, synthetic construct
  misc_feature 1..20: note = chemically synthesized
  source 1..20: mol_type = other DNA
tttatttgctgaagaacata

SEQ ID NO: 15354 - DNA, 20 bp, synthetic construct
  misc_feature 1..20: note = chemically synthesized
  source 1..20: mol_type = other DNA
ttatttgctgaagaacataa

SEQ ID NO: 15355 - DNA, 20 bp, synthetic construct
  misc_feature 1..20: note = chemically synthesized
  source 1..20: mol_type = other DNA
tatttgctgaagaacataag

SEQ ID NO: 15356 - DNA, 20 bp, synthetic construct
  misc_feature 1..20: note = chemically synthesized
  source 1..20: mol_type = other DNA
atttgctgaagaacataagg

SEQ ID NO: 15357 - DNA, 20 bp, synthetic construct
  misc_feature 1..20: note = chemically synthesized
  source 1..20: mol_type = other DNA
tgaagaacataagggggaaa

SEQ ID NO: 15358 - DNA, 20 bp, synthetic construct
  misc_feature 1..20: note = chemically synthesized
  source 1..20: mol_type = other DNA
aagaacataagggggaaata

SEQ ID NO: 15359 - DNA, 20 bp, synthetic construct
  misc_feature 1..20: note = chemically synthesized
  source 1..20: mol_type = other DNA
aaatagagattctttatttg

SEQ ID NO: 15360 - DNA, 20 bp, synthetic construct
  misc_feature 1..20: note = chemically synthesized
  source 1..20: mol_type = other DNA
aagaaacaaatgatttgatt

SEQ ID NO: 15361 - DNA, 20 bp, synthetic construct
  misc_feature 1..20: note = chemically synthesized
  source 1..20: mol_type = other DNA
agaaacaaatgatttgattt

SEQ ID NO: 15362 - DNA, 20 bp, synthetic construct
  misc_feature 1..20: note = chemically synthesized
  source 1..20: mol_type = other DNA
gatttgggaaatgaaatgaa

SEQ ID NO: 15363 - DNA, 20 bp, synthetic construct
  misc_feature 1..20: note = chemically synthesized
  source 1..20: mol_type = other DNA
atgaaatgaaaagaaaaaca

SEQ ID NO: 15364 - DNA, 20 bp, synthetic construct
  misc_feature 1..20: note = chemically synthesized
  source 1..20: mol_type = other DNA
gctacttcttttactcatct

SEQ ID NO: 15365 - DNA, 20 bp, synthetic construct
  misc_feature 1..20: note = chemically synthesized
  source 1..20: mol_type = other DNA
ctacttcttttactcatctg

SEQ ID NO: 15366 - DNA, 20 bp, synthetic construct
  misc_feature 1..20: note = chemically synthesized
  source 1..20: mol_type = other DNA
ttttactcatctgaggcctt

SEQ ID NO: 15367 - DNA, 20 bp, synthetic construct
  misc_feature 1..20: note = chemically synthesized
  source 1..20: mol_type = other DNA
actcatctgaggccttcaga

SEQ ID NO: 15368 - DNA, 20 bp, synthetic construct
  misc_feature 1..20: note = chemically synthesized
  source 1..20: mol_type = other DNA
ccttcagatagtcccccata

SEQ ID NO: 15369 - DNA, 20 bp, synthetic construct
  misc_feature 1..20: note = chemically synthesized
  source 1..20: mol_type = other DNA
gatagtcccccatatagcct

SEQ ID NO: 15370 - DNA, 20 bp, synthetic construct
  misc_feature 1..20: note = chemically synthesized
  source 1..20: mol_type = other DNA
tagtcccccatatagcctta

SEQ ID NO: 15371 - DNA, 20 bp, synthetic construct
  misc_feature 1..20: note = chemically synthesized
  source 1..20: mol_type = other DNA
aaaatatgattatgctcttt

SEQ ID NO: 15372 - DNA, 20 bp, synthetic construct
  misc_feature 1..20: note = chemically synthesized
  source 1..20: mol_type = other DNA
attatgctctttcagtctat

SEQ ID NO: 15373 - DNA, 20 bp, synthetic construct
  misc_feature 1..20: note = chemically synthesized
  source 1..20: mol_type = other DNA
ctattagaaataaaaacata

SEQ ID NO: 15374 - DNA, 20 bp, synthetic construct
  misc_feature 1..20: note = chemically synthesized
  source 1..20: mol_type = other DNA
cataaagcttaaaaaatttc

SEQ ID NO: 15375 - DNA, 20 bp, synthetic construct
  misc_feature 1..20: note = chemically synthesized
  source 1..20: mol_type = other DNA
ataaagcttaaaaaatttca

SEQ ID NO: 15376 - DNA, 20 bp, synthetic construct
  misc_feature 1..20: note = chemically synthesized
  source 1..20: mol_type = other DNA
taaagcttaaaaaatttcaa

SEQ ID NO: 15377 - DNA, 20 bp, synthetic construct
  misc_feature 1..20: note = chemically synthesized
  source 1..20: mol_type = other DNA
agcttaaaaaatttcaaggg

SEQ ID NO: 15378 - DNA, 20 bp, synthetic construct
  misc_feature 1..20: note = chemically synthesized
  source 1..20: mol_type = other DNA
gcttaaaaaatttcaaggga

SEQ ID NO: 15379 - DNA, 20 bp, synthetic construct
  misc_feature 1..20: note = chemically synthesized
  source 1..20: mol_type = other DNA
cttaaaaaatttcaagggaa

SEQ ID NO: 15380 - DNA, 20 bp, synthetic construct
  misc_feature 1..20: note = chemically synthesized
  source 1..20: mol_type = other DNA
ttaaaaaatttcaagggaag

SEQ ID NO: 15381 - DNA, 20 bp, synthetic construct
  misc_feature 1..20: note = chemically synthesized
  source 1..20: mol_type = other DNA
atttcaagggaaggggcttg

SEQ ID NO: 15382 - DNA, 20 bp, synthetic construct
  misc_feature 1..20: note = chemically synthesized
  source 1..20: mol_type = other DNA
gggcttgaagattactgact

SEQ ID NO: 15383 - DNA, 20 bp, synthetic construct
  misc_feature 1..20: note = chemically synthesized
  source 1..20: mol_type = other DNA
ggcttgaagattactgacta

SEQ ID NO: 15384 - DNA, 20 bp, synthetic construct
  misc_feature 1..20: note = chemically synthesized
  source 1..20: mol_type = other DNA
gcttgaagattactgactaa

SEQ ID NO: 15385 - DNA, 20 bp, synthetic construct
  misc_feature 1..20: note = chemically synthesized
  source 1..20: mol_type = other DNA
tgaagattactgactaaggg

SEQ ID NO: 15386 - DNA, 20 bp, synthetic construct
  misc_feature 1..20: note = chemically synthesized
  source 1..20: mol_type = other DNA
tgacactcacctcctccaca

SEQ ID NO: 15387 - DNA, 20 bp, synthetic construct
  misc_feature 1..20: note = chemically synthesized
  source 1..20: mol_type = other DNA
tcctccacaaagaaccaaaa

SEQ ID NO: 15388 - DNA, 20 bp, synthetic construct
  misc_feature 1..20: note = chemically synthesized
  source 1..20: mol_type = other DNA
ccacaaagaaccaaaatagt

SEQ ID NO: 15389 - DNA, 20 bp, synthetic construct
  misc_feature 1..20: note = chemically synthesized
  source 1..20: mol_type = other DNA
caaagaaccaaaatagtaag

SEQ ID NO: 15390 - DNA, 20 bp, synthetic construct
  misc_feature 1..20: note = chemically synthesized
  source 1..20: mol_type = other DNA
gtaagtagaaaatcccacat

SEQ ID NO: 15391 - DNA, 20 bp, synthetic construct
  misc_feature 1..20: note = chemically synthesized
  source 1..20: mol_type = other DNA
aagtagaaaatcccacataa

SEQ ID NO: 15392 - DNA, 20 bp, synthetic construct
  misc_feature 1..20: note = chemically synthesized
  source 1..20: mol_type = other DNA
gtagaaaatcccacataaga

SEQ ID NO: 15393 - DNA, 20 bp, synthetic construct
  misc_feature 1..20: note = chemically synthesized
  source 1..20: mol_type = other DNA
tcccacataagagagaattc

SEQ ID NO: 15394 - DNA, 20 bp, synthetic construct
  misc_feature 1..20: note = chemically synthesized
  source 1..20: mol_type = other DNA
gagagaattctggaattcaa

SEQ ID NO: 15395 - DNA, 20 bp, synthetic construct
  misc_feature 1..20: note = chemically synthesized
  source 1..20: mol_type = other DNA
gagaattctggaattcaaca

SEQ ID NO: 15396 - DNA, 20 bp, synthetic construct
  misc_feature 1..20: note = chemically synthesized
  source 1..20: mol_type = other DNA
aattctggaattcaacagag

SEQ ID NO: 15397 - DNA, 20 bp, synthetic construct
  misc_feature 1..20: note = chemically synthesized
  source 1..20: mol_type = other DNA
ggaattcaacagagaagtga

SEQ ID NO: 15398 - DNA, 20 bp, synthetic construct
  misc_feature 1..20: note = chemically synthesized
  source 1..20: mol_type = other DNA
gaattcaacagagaagtgac

SEQ ID NO: 15399 - DNA, 20 bp, synthetic construct
  misc_feature 1..20: note = chemically synthesized
  source 1..20: mol_type = other DNA
ttcaacagagaagtgacagg

SEQ ID NO: 15400 - DNA, 20 bp, synthetic construct
  misc_feature 1..20: note = chemically synthesized
  source 1..20: mol_type = other DNA
agaagtgacaggaagcatct

SEQ ID NO: 15401 - DNA, 20 bp, synthetic construct
  misc_feature 1..20: note = chemically synthesized
  source 1..20: mol_type = other DNA
gaagtgacaggaagcatcta

SEQ ID NO: 15402 - DNA, 20 bp, synthetic construct
  misc_feature 1..20: note = chemically synthesized
  source 1..20: mol_type = other DNA
aggaagcatctaaggcaatg

SEQ ID NO: 15403 - DNA, 20 bp, synthetic construct
  misc_feature 1..20: note = chemically synthesized
  source 1..20: mol_type = other DNA
ggaagcatctaaggcaatga

SEQ ID NO: 15404 - DNA, 20 bp, synthetic construct
  misc_feature 1..20: note = chemically synthesized
  source 1..20: mol_type = other DNA
gaagcatctaaggcaatgaa

SEQ ID NO: 15405 - DNA, 20 bp, synthetic construct
  misc_feature 1..20: note = chemically synthesized
  source 1..20: mol_type = other DNA
aagcatctaaggcaatgaag

SEQ ID NO: 15406 - DNA, 20 bp, synthetic construct
  misc_feature 1..20: note = chemically synthesized
  source 1..20: mol_type = other DNA
gcatctaaggcaatgaaggg

SEQ ID NO: 15407 - DNA, 20 bp, synthetic construct
  misc_feature 1..20: note = chemically synthesized
  source 1..20: mol_type = other DNA
catctaaggcaatgaagggg

SEQ ID NO: 15408 - DNA, 20 bp, synthetic construct
  misc_feature 1..20: note = chemically synthesized
  source 1..20: mol_type = other DNA
atctaaggcaatgaagggga

SEQ ID NO: 15409 - DNA, 20 bp, synthetic construct
  misc_feature 1..20: note = chemically synthesized
  source 1..20: mol_type = other DNA
taaggcaatgaaggggaggg

SEQ ID NO: 15410 - DNA, 20 bp, synthetic construct
  misc_feature 1..20: note = chemically synthesized
  source 1..20: mol_type = other DNA
gcaatgaaggggagggaagc

SEQ ID NO: 15411 - DNA, 20 bp, synthetic construct
  misc_feature 1..20: note = chemically synthesized
  source 1..20: mol_type = other DNA
caatgaaggggagggaagca

SEQ ID NO: 15412 - DNA, 20 bp, synthetic construct
  misc_feature 1..20: note = chemically synthesized
  source 1..20: mol_type = other DNA
tgaaggggagggaagcaagg

SEQ ID NO: 15413 - DNA, 20 bp, synthetic construct
  misc_feature 1..20: note = chemically synthesized
  source 1..20: mol_type = other DNA
gggaagcaaggaagcctacc

SEQ ID NO: 15414 - DNA, 20 bp, synthetic construct
  misc_feature 1..20: note = chemically synthesized
  source 1..20: mol_type = other DNA
aagcaaggaagcctacccag

SEQ ID NO: 15415 - DNA, 20 bp, synthetic construct
  misc_feature 1..20: note = chemically synthesized
  source 1..20: mol_type = other DNA
agcaaggaagcctacccagt

SEQ ID NO: 15416 - DNA, 20 bp, synthetic construct
  misc_feature 1..20: note = chemically synthesized
  source 1..20: mol_type = other DNA
gcaaggaagcctacccagta

SEQ ID NO: 15417 - DNA, 20 bp, synthetic construct
  misc_feature 1..20: note = chemically synthesized
  source 1..20: mol_type = other DNA
acccagtagggatcctctgt

SEQ ID NO: 15418 - DNA, 20 bp, synthetic construct
  misc_feature 1..20: note = chemically synthesized
  source 1..20: mol_type = other DNA
cccagtagggatcctctgtg

SEQ ID NO: 15419 - DNA, 20 bp, synthetic construct
  misc_feature 1..20: note = chemically synthesized
  source 1..20: mol_type = other DNA
gtagggatcctctgtgaggc

SEQ ID NO: 15420 - DNA, 20 bp, synthetic construct
  misc_feature 1..20: note = chemically synthesized
  source 1..20: mol_type = other DNA
agggatcctctgtgaggcca

SEQ ID NO: 15421 - DNA, 20 bp, synthetic construct
  misc_feature 1..20: note = chemically synthesized
  source 1..20: mol_type = other DNA
ggatcctctgtgaggccaga

SEQ ID NO: 15422 - DNA, 20 bp, synthetic construct
  misc_feature 1..20: note = chemically synthesized
  source 1..20: mol_type = other DNA
gatcctctgtgaggccagag

SEQ ID NO: 15423 - DNA, 20 bp, synthetic construct
  misc_feature 1..20: note = chemically synthesized
  source 1..20: mol_type = other DNA
gtgaggccagagaggctccc

SEQ ID NO: 15424 - DNA, 20 bp, synthetic construct
  misc_feature 1..20: note = chemically synthesized
  source 1..20: mol_type = other DNA
gaggctccccagtgcatcga

SEQ ID NO: 15425 - DNA, 20 bp, synthetic construct
  misc_feature 1..20: note = chemically synthesized
  source 1..20: mol_type = other DNA
tccccagtgcatcgaaagtt

SEQ ID NO: 15426 - DNA, 20 bp, synthetic construct
  misc_feature 1..20: note = chemically synthesized
  source 1..20: mol_type = other DNA
aaagttaagtgactgactcc

SEQ ID NO: 15427 - DNA, 20 bp, synthetic construct
  misc_feature 1..20: note = chemically synthesized
  source 1..20: mol_type = other DNA
gttaagtgactgactcccag

SEQ ID NO: 15428 - DNA, 20 bp, synthetic construct
  misc_feature 1..20: note = chemically synthesized
  source 1..20: mol_type = other DNA
agtggtccacatctgcatta

SEQ ID NO: 15429 - DNA, 20 bp, synthetic construct
  misc_feature 1..20: note = chemically synthesized
  source 1..20: mol_type = other DNA
cacatctgcattatggactc

SEQ ID NO: 15430 - DNA, 20 bp, synthetic construct
  misc_feature 1..20: note = chemically synthesized
  source 1..20: mol_type = other DNA
acatctgcattatggactcc

SEQ ID NO: 15431 - DNA, 20 bp, synthetic construct
  misc_feature 1..20: note = chemically synthesized
  source 1..20: mol_type = other DNA
attatggactccaggaatcc

SEQ ID NO: 15432 - DNA, 20 bp, synthetic construct
  misc_feature 1..20: note = chemically synthesized
  source 1..20: mol_type = other DNA
gactccaggaatcctagcca

SEQ ID NO: 15433 - DNA, 20 bp, synthetic construct
  misc_feature 1..20: note = chemically synthesized
  source 1..20: mol_type = other DNA
actccaggaatcctagccac

SEQ ID NO: 15434 - DNA, 20 bp, synthetic construct
  misc_feature 1..20: note = chemically synthesized
  source 1..20: mol_type = other DNA
tccaggaatcctagccacag

SEQ ID NO: 15435 - DNA, 20 bp, synthetic construct
  misc_feature 1..20: note = chemically synthesized
  source 1..20: mol_type = other DNA
caggaatcctagccacagga

SEQ ID NO: 15436 - DNA, 20 bp, synthetic construct
  misc_feature 1..20: note = chemically synthesized
  source 1..20: mol_type = other DNA
aggagagtcccttgaccatg

SEQ ID NO: 15437 - DNA, 20 bp, synthetic construct
  misc_feature 1..20: note = chemically synthesized
  source 1..20: mol_type = other DNA
ggagagtcccttgaccatgc

SEQ ID NO: 15438 - DNA, 20 bp, synthetic construct
  misc_feature 1..20: note = chemically synthesized
  source 1..20: mol_type = other DNA
cccttgaccatgcaggcctt

SEQ ID NO: 15439 - DNA, 20 bp, synthetic construct
  misc_feature 1..20: note = chemically synthesized
  source 1..20: mol_type = other DNA
gcaggccttgagactatcat

SEQ ID NO: 15440 - DNA, 20 bp, synthetic construct
  misc_feature 1..20: note = chemically synthesized
  source 1..20: mol_type = other DNA
caggccttgagactatcata

SEQ ID NO: 15441 - DNA, 20 bp, synthetic construct
  misc_feature 1..20: note = chemically synthesized
  source 1..20: mol_type = other DNA
gactatcataaggaactgcc

SEQ ID NO: 15442 - DNA, 20 bp, synthetic construct
  misc_feature 1..20: note = chemically synthesized
  source 1..20: mol_type = other DNA
aactgcccagcaatcgcaca

SEQ ID NO: 15443 - DNA, 20 bp, synthetic construct
  misc_feature 1..20: note = chemically synthesized
  source 1..20: mol_type = other DNA
actgcccagcaatcgcacaa

SEQ ID NO: 15444 - DNA, 20 bp, synthetic construct
  misc_feature 1..20: note = chemically synthesized
  source 1..20: mol_type = other DNA
atcgcacaaaggcattgctc

SEQ ID NO: 15445 - DNA, 20 bp, synthetic construct
  misc_feature 1..20: note = chemically synthesized
  source 1..20: mol_type = other DNA
cgcacaaaggcattgctcca

SEQ ID NO: 15446 - DNA, 20 bp, synthetic construct
  misc_feature 1..20: note = chemically synthesized
  source 1..20: mol_type = other DNA
acaaaggcattgctccagag

SEQ ID NO: 15447 - DNA, 20 bp, synthetic construct
  misc_feature 1..20: note = chemically synthesized
  source 1..20: mol_type = other DNA
caaaggcattgctccagaga

SEQ ID NO: 15448 - DNA, 20 bp, synthetic construct
  misc_feature 1..20: note = chemically synthesized
  source 1..20: mol_type = other DNA
aaggcattgctccagagaag

SEQ ID NO: 15449 - DNA, 20 bp, synthetic construct
  misc_feature 1..20: note = chemically synthesized
  source 1..20: mol_type = other DNA
tccagagaaggagctctcac

SEQ ID NO: 15450 - DNA, 20 bp, synthetic construct
  misc_feature 1..20: note = chemically synthesized
  source 1..20: mol_type = other DNA
ccagagaaggagctctcact

SEQ ID NO: 15451 - DNA, 20 bp, synthetic construct
  misc_feature 1..20: note = chemically synthesized
  source 1..20: mol_type = other DNA
cccctgccatccccattact

SEQ ID NO: 15452 - DNA, 20 bp, synthetic construct
  misc_feature 1..20: note = chemically synthesized
  source 1..20: mol_type = other DNA
ctgccatccccattactgag

SEQ ID NO: 15453 - DNA, 20 bp, synthetic construct
  misc_feature 1..20: note = chemically synthesized
  source 1..20: mol_type = other DNA
catccccattactgagcagc

SEQ ID NO: 15454 - DNA, 20 bp, synthetic construct
  misc_feature 1..20: note = chemically synthesized
  source 1..20: mol_type = other DNA
atccccattactgagcagca

SEQ ID NO: 15455 - DNA, 20 bp, synthetic construct
  misc_feature 1..20: note = chemically synthesized
  source 1..20: mol_type = other DNA
gagcagcaaggtgccatttt

SEQ ID NO: 15456 - DNA, 20 bp, synthetic construct
  misc_feature 1..20: note = chemically synthesized
  source 1..20: mol_type = other DNA
gcagcaaggtgccattttga

SEQ ID NO: 15457 - DNA, 20 bp, synthetic construct
  misc_feature 1..20: note = chemically synthesized
  source 1..20: mol_type = other DNA
tttgagagcccaacacccac

SEQ ID NO: 15458 - DNA, 20 bp, synthetic construct
  misc_feature 1..20: note = chemically synthesized
  source 1..20: mol_type = other DNA
caccagatgacatcgttcct

SEQ ID NO: 15459 - DNA, 20 bp, synthetic construct
  misc_feature 1..20: note = chemically synthesized
  source 1..20: mol_type = other DNA
tctgcatctctacatccctg

SEQ ID NO: 15460 - DNA, 20 bp, synthetic construct
  misc_feature 1..20: note = chemically synthesized
  source 1..20: mol_type = other DNA
ctgctgacatcccccaccca

SEQ ID NO: 15461 - DNA, 20 bp, synthetic construct
  misc_feature 1..20: note = chemically synthesized
  source 1..20: mol_type = other DNA
gacatcccccacccacagct

SEQ ID NO: 15462 - DNA, 20 bp, synthetic construct
  misc_feature 1..20: note = chemically synthesized
  source 1..20: mol_type = other DNA
ccacagctgagtgctactgc

SEQ ID NO: 15463 - DNA, 20 bp, synthetic construct
  misc_feature 1..20: note = chemically synthesized
  source 1..20: mol_type = other DNA
ctactgctggctgctgtcac

SEQ ID NO: 15464 - DNA, 20 bp, synthetic construct
  misc_feature 1..20: note = chemically synthesized
  source 1..20: mol_type = other DNA
tactgctggctgctgtcacc

SEQ ID NO: 15465 - DNA, 20 bp, synthetic construct
  misc_feature 1..20: note = chemically synthesized
  source 1..20: mol_type = other DNA
actgctggctgctgtcacca

SEQ ID NO: 15466 - DNA, 20 bp, synthetic construct
  misc_feature 1..20: note = chemically synthesized
  source 1..20: mol_type = other DNA
ggctgctgtcaccagggata

SEQ ID NO: 15467 - DNA, 20 bp, synthetic construct
  misc_feature 1..20: note = chemically synthesized
  source 1..20: mol_type = other DNA
ccagggataaagtgtgtcat

SEQ ID NO: 15468 - DNA, 20 bp, synthetic construct
  misc_feature 1..20: note = chemically synthesized
  source 1..20: mol_type = other DNA
gggataaagtgtgtcattag

SEQ ID NO: 15469 - DNA, 20 bp, synthetic construct
  misc_feature 1..20: note = chemically synthesized
  source 1..20: mol_type = other DNA
ataaagtgtgtcattagaag

SEQ ID NO: 15470 - DNA, 20 bp, synthetic construct
  misc_feature 1..20: note = chemically synthesized
  source 1..20: mol_type = other DNA
gaagtggactcccccacccc

SEQ ID NO: 15471 - DNA, 20 bp, synthetic construct
  misc_feature 1..20: note = chemically synthesized
  source 1..20: mol_type = other DNA
gtggactcccccacccccag

SEQ ID NO: 15472 - DNA, 20 bp, synthetic construct
  misc_feature 1..20: note = chemically synthesized
  source 1..20: mol_type = other DNA
gactcccccacccccagtag

SEQ ID NO: 15473 - DNA, 20 bp, synthetic construct
  misc_feature 1..20: note = chemically synthesized
  source 1..20: mol_type = other DNA
actcccccacccccagtagc

SEQ ID NO: 15474 - DNA, 20 bp, synthetic construct
  misc_feature 1..20: note = chemically synthesized
  source 1..20: mol_type = other DNA
ctcccccacccccagtagca

SEQ ID NO: 15475 - DNA, 20 bp, synthetic construct
  misc_feature 1..20: note = chemically synthesized
  source 1..20: mol_type = other DNA
cagggctgctacacatttat

SEQ ID NO: 15476 - DNA, 20 bp, synthetic construct
  misc_feature 1..20: note = chemically synthesized
  source 1..20: mol_type = other DNA
tacacatttataagctccct

SEQ ID NO: 15477 - DNA, 20 bp, synthetic construct
  misc_feature 1..20: note = chemically synthesized
  source 1..20: mol_type = other DNA
agaaaatgctaccccacttg

SEQ ID NO: 15478 - DNA, 20 bp, synthetic construct
  misc_feature 1..20: note = chemically synthesized
  source 1..20: mol_type = other DNA
ccccacttgcagccaccatc

SEQ ID NO: 15479 - DNA, 20 bp, synthetic construct
  misc_feature 1..20: note = chemically synthesized
  source 1..20: mol_type = other DNA
cccacttgcagccaccatct

SEQ ID NO: 15480 - DNA, 20 bp, synthetic construct
  misc_feature 1..20: note = chemically synthesized
  source 1..20: mol_type = other DNA
ccacttgcagccaccatctg

SEQ ID NO: 15481 - DNA, 20 bp, synthetic construct
  misc_feature 1..20: note = chemically synthesized
  source 1..20: mol_type = other DNA
gggctgaaacacatgcccac

SEQ ID NO: 15482 - DNA, 20 bp, synthetic construct
  misc_feature 1..20: note = chemically synthesized
  source 1..20: mol_type = other DNA
gcccaccagcaacccattta

SEQ ID NO: 15483 - DNA, 20 bp, synthetic construct
  misc_feature 1..20: note = chemically synthesized
  source 1..20: mol_type = other DNA
tttatagctgctgccactga

SEQ ID NO: 15484 - DNA, 20 bp, synthetic construct
  misc_feature 1..20: note = chemically synthesized
  source 1..20: mol_type = other DNA
aacacaccccgcaccccttc

SEQ ID NO: 15485 - DNA, 20 bp, synthetic construct
  misc_feature 1..20: note = chemically synthesized
  source 1..20: mol_type = other DNA
cacaccccgcaccccttcaa

SEQ ID NO: 15486 - DNA, 20 bp, synthetic construct
  misc_feature 1..20: note = chemically synthesized
  source 1..20: mol_type = other DNA
accccgcaccccttcaagag

SEQ ID NO: 15487 - DNA, 20 bp, synthetic construct
  misc_feature 1..20: note = chemically synthesized
  source 1..20: mol_type = other DNA
ccccgcaccccttcaagagc

SEQ ID NO: 15488 - DNA, 20 bp, synthetic construct
  misc_feature 1..20: note = chemically synthesized
  source 1..20: mol_type = other DNA
cccgcaccccttcaagagca

SEQ ID NO: 15489 - DNA, 20 bp, synthetic construct
  misc_feature 1..20: note = chemically synthesized
  source 1..20: mol_type = other DNA
tcaagagcagggcaacaatg

SEQ ID NO: 15490 - DNA, 20 bp, synthetic construct
  misc_feature 1..20: note = chemically synthesized
  source 1..20: mol_type = other DNA
agagcagggcaacaatgcag

SEQ ID NO: 15491 - DNA, 20 bp, synthetic construct
  misc_feature 1..20: note = chemically synthesized
  source 1..20: mol_type = other DNA
gcagtagctgctaattcact

SEQ ID NO: 15492 - DNA, 20 bp, synthetic construct
  misc_feature 1..20: note = chemically synthesized
  source 1..20: mol_type = other DNA
cagtagctgctaattcactc

SEQ ID NO: 15493 - DNA, 20 bp, synthetic construct
  misc_feature 1..20: note = chemically synthesized
  source 1..20: mol_type = other DNA
aattcactcaggcattctgc

SEQ ID NO: 15494 - DNA, 20 bp, synthetic construct
  misc_feature 1..20: note = chemically synthesized
  source 1..20: mol_type = other DNA
attcactcaggcattctgct

SEQ ID NO: 15495 - DNA, 20 bp, synthetic construct
  misc_feature 1..20: note = chemically synthesized
  source 1..20: mol_type = other DNA
ttcactcaggcattctgctg

SEQ ID NO: 15496 - DNA, 20 bp, synthetic construct
  misc_feature 1..20: note = chemically synthesized
  source 1..20: mol_type = other DNA
tcactcaggcattctgctgg

SEQ ID NO: 15497 - DNA, 20 bp, synthetic construct
  misc_feature 1..20: note = chemically synthesized
  source 1..20: mol_type = other DNA
aggcattctgctgggggcct

SEQ ID NO: 15498 - DNA, 20 bp, synthetic construct
  misc_feature 1..20: note = chemically synthesized
  source 1..20: mol_type = other DNA
ggcattctgctgggggcctg

SEQ ID NO: 15499 - DNA, 20 bp, synthetic construct
  misc_feature 1..20: note = chemically synthesized
  source 1..20: mol_type = other DNA
gcctgaggatcactccactc

SEQ ID NO: 15500 - DNA, 20 bp, synthetic construct
  misc_feature 1..20: note = chemically synthesized
  source 1..20: mol_type = other DNA
cactccactccagcctatga

SEQ ID NO: 15501 - DNA, 20 bp, synthetic construct
  misc_feature 1..20: note = chemically synthesized
  source 1..20: mol_type = other DNA
ccactccagcctatgatagc

SEQ ID NO: 15502 - DNA, 20 bp, synthetic construct
  misc_feature 1..20: note = chemically synthesized
  source 1..20: mol_type = other DNA
cggtgtccacacacaccact

SEQ ID NO: 15503 - DNA, 20 bp, synthetic construct
  misc_feature 1..20: note = chemically synthesized
  source 1..20: mol_type = other DNA
tgtccacacacaccactgag

SEQ ID NO: 15504 - DNA, 20 bp, synthetic construct
  misc_feature 1..20: note = chemically synthesized
  source 1..20: mol_type = other DNA
cacacaccactgagtggcct

SEQ ID NO: 15505 - DNA, 20 bp, synthetic construct
  misc_feature 1..20: note = chemically synthesized
  source 1..20: mol_type = other DNA
acacaccactgagtggcctg

SEQ ID NO: 15506 - DNA, 20 bp, synthetic construct
  misc_feature 1..20: note = chemically synthesized
  source 1..20: mol_type = other DNA
accactgagtggcctgaggt

SEQ ID NO: 15507 - DNA, 20 bp, synthetic construct
  misc_feature 1..20: note = chemically synthesized
  source 1..20: mol_type = other DNA
ccactgagtggcctgaggtc

SEQ ID NO: 15508 - DNA, 20 bp, synthetic construct
  misc_feature 1..20: note = chemically synthesized
  source 1..20: mol_type = other DNA
ggcctgaggtcaggaacacc

SEQ ID NO: 15509 - DNA, 20 bp, synthetic construct
  misc_feature 1..20: note = chemically synthesized
  source 1..20: mol_type = other DNA
gaggtcaggaacacccagcc

SEQ ID NO: 15510 - DNA, 20 bp, synthetic construct
  misc_feature 1..20: note = chemically synthesized
  source 1..20: mol_type = other DNA
ctttgccttcctcaatgcct

SEQ ID NO: 15511 - DNA, 20 bp, synthetic construct
  misc_feature 1..20: note = chemically synthesized
  source 1..20: mol_type = other DNA
gccttcctcaatgcctaagc

SEQ ID NO: 15512 - DNA, 20 bp, synthetic construct
  misc_feature 1..20: note = chemically synthesized
  source 1..20: mol_type = other DNA
caatgcctaagcaagttgtc

SEQ ID NO: 15513 - DNA, 20 bp, synthetic construct
  misc_feature 1..20: note = chemically synthesized
  source 1..20: mol_type = other DNA
aatgcctaagcaagttgtct

SEQ ID NO: 15514 - DNA, 20 bp, synthetic construct
  misc_feature 1..20: note = chemically synthesized
  source 1..20: mol_type = other DNA
aagcaagttgtctgggaacc

SEQ ID NO: 15515 - DNA, 20 bp, synthetic construct
  misc_feature 1..20: note = chemically synthesized
  source 1..20: mol_type = other DNA
gcaagttgtctgggaaccca

SEQ ID NO: 15516 - DNA, 20 bp, synthetic construct
  misc_feature 1..20: note = chemically synthesized
  source 1..20: mol_type = other DNA
gttgtctgggaacccagaga

SEQ ID NO: 15517 - DNA, 20 bp, synthetic construct
  misc_feature 1..20: note = chemically synthesized
  source 1..20: mol_type = other DNA
cttgtgccatccaccatgac

SEQ ID NO: 15518 - DNA, 20 bp, synthetic construct
  misc_feature 1..20: note = chemically synthesized
  source 1..20: mol_type = other DNA
atccaccatgactggtacct

SEQ ID NO: 15519 - DNA, 20 bp, synthetic construct
  misc_feature 1..20: note = chemically synthesized
  source 1..20: mol_type = other DNA
tggtacctaagcaaccctcc

SEQ ID NO: 15520 - DNA, 20 bp, synthetic construct
  misc_feature 1..20: note = chemically synthesized
  source 1..20: mol_type = other DNA
tacctaagcaaccctcccag

SEQ ID NO: 15521 - DNA, 20 bp, synthetic construct
  misc_feature 1..20: note = chemically synthesized
  source 1..20: mol_type = other DNA
ccctcccagaagcctgatga

SEQ ID NO: 15522 - DNA, 20 bp, synthetic construct
  misc_feature 1..20: note = chemically synthesized
  source 1..20: mol_type = other DNA
cctcccagaagcctgatgat

SEQ ID NO: 15523 - DNA, 20 bp, synthetic construct
  misc_feature 1..20: note = chemically synthesized
  source 1..20: mol_type = other DNA
tctgccactgccatcacaac

SEQ ID NO: 15524 - DNA, 20 bp, synthetic construct
  misc_feature 1..20: note = chemically synthesized
  source 1..20: mol_type = other DNA
cctcctgcatgtgccacctg

SEQ ID NO: 15525 - DNA, 20 bp, synthetic construct
  misc_feature 1..20: note = chemically synthesized
  source 1..20: mol_type = other DNA
ctcctgcatgtgccacctgt

SEQ ID NO: 15526 - DNA, 20 bp, synthetic construct
  misc_feature 1..20: note = chemically synthesized
  source 1..20: mol_type = other DNA
atgtgccacctgtgggtctg

SEQ ID NO: 15527 - DNA, 20 bp, synthetic construct
  misc_feature 1..20: note = chemically synthesized
  source 1..20: mol_type = other DNA
ccacctgtgggtctgaagac

SEQ ID NO: 15528 - DNA, 20 bp, synthetic construct
  misc_feature 1..20: note = chemically synthesized
  source 1..20: mol_type = other DNA
ggtctgaagactggctcatt

SEQ ID NO: 15529 - DNA, 20 bp, synthetic construct
  misc_feature 1..20: note = chemically synthesized
  source 1..20: mol_type = other DNA
actggctcattcagcccttg

SEQ ID NO: 15530 - DNA, 20 bp, synthetic construct
  misc_feature 1..20: note = chemically synthesized
  source 1..20: mol_type = other DNA
cttgcagccaccaccaacac

SEQ ID NO: 15531 - DNA, 20 bp, synthetic construct
  misc_feature 1..20: note = chemically synthesized
  source 1..20: mol_type = other DNA
agccaccaccaacaccagtg

SEQ ID NO: 15532 - DNA, 20 bp, synthetic construct
  misc_feature 1..20: note = chemically synthesized
  source 1..20: mol_type = other DNA
caacaccagtgcagactgct

SEQ ID NO: 15533 - DNA, 20 bp, synthetic construct
  misc_feature 1..20: note = chemically synthesized
  source 1..20: mol_type = other DNA
aacaccagtgcagactgctt

SEQ ID NO: 15534 - DNA, 20 bp, synthetic construct
  misc_feature 1..20: note = chemically synthesized
  source 1..20: mol_type = other DNA
caccagtgcagactgcttgg

SEQ ID NO: 15535 - DNA, 20 bp, synthetic construct
  misc_feature 1..20: note = chemically synthesized
  source 1..20: mol_type = other DNA
agtgcagactgcttgggagc

SEQ ID NO: 15536 - DNA, 20 bp, synthetic construct
  misc_feature 1..20: note = chemically synthesized
  source 1..20: mol_type = other DNA
tgcagactgcttgggagcca

SEQ ID NO: 15537 - DNA, 20 bp, synthetic construct
  misc_feature 1..20: note = chemically synthesized
  source 1..20: mol_type = other DNA
gcagactgcttgggagccag

SEQ ID NO: 15538 - DNA, 20 bp, synthetic construct
  misc_feature 1..20: note = chemically synthesized
  source 1..20: mol_type = other DNA
cagactgcttgggagccaga

SEQ ID NO: 15539 - DNA, 20 bp, synthetic construct
  misc_feature 1..20: note = chemically synthesized
  source 1..20: mol_type = other DNA
ggagccagagggttgtcctg

SEQ ID NO: 15540 - DNA, 20 bp, synthetic construct
  misc_feature 1..20: note = chemically synthesized
  source 1..20: mol_type = other DNA
gggttgtcctgcagttgcta

SEQ ID NO: 15541 - DNA, 20 bp, synthetic construct
  misc_feature 1..20: note = chemically synthesized
  source 1..20: mol_type = other DNA
cccacaccacacccactgtc

SEQ ID NO: 15542 - DNA, 20 bp, synthetic construct
  misc_feature 1..20: note = chemically synthesized
  source 1..20: mol_type = other DNA
acaccacacccactgtccag

SEQ ID NO: 15543 - DNA, 20 bp, synthetic construct
  misc_feature 1..20: note = chemically synthesized
  source 1..20: mol_type = other DNA
cacccactgtccagaagcct

SEQ ID NO: 15544 - DNA, 20 bp, synthetic construct
  misc_feature 1..20: note = chemically synthesized
  source 1..20: mol_type = other DNA
acccactgtccagaagcctg

SEQ ID NO: 15545 - DNA, 20 bp, synthetic construct
  misc_feature 1..20: note = chemically synthesized
  source 1..20: mol_type = other DNA
aagcctgaggacccacacac

SEQ ID NO: 15546 - DNA, 20 bp, synthetic construct
  misc_feature 1..20: note = chemically synthesized
  source 1..20: mol_type = other DNA
tgaggacccacacaccagcc

SEQ ID NO: 15547 - DNA, 20 bp, synthetic construct
  misc_feature 1..20: note = chemically synthesized
  source 1..20: mol_type = other DNA
cacaccagcccagtctacta

SEQ ID NO: 15548 - DNA, 20 bp, synthetic construct
  misc_feature 1..20: note = chemically synthesized
  source 1..20: mol_type = other DNA
tatggccactactgacaccc

SEQ ID NO: 15549 - DNA, 20 bp, synthetic construct
  misc_feature 1..20: note = chemically synthesized
  source 1..20: mol_type = other DNA
acacccaagcaaactgcctg

SEQ ID NO: 15550 - DNA, 20 bp, synthetic construct
  misc_feature 1..20: note = chemically synthesized
  source 1..20: mol_type = other DNA
cacccaagcaaactgcctga

SEQ ID NO: 15551 - DNA, 20 bp, synthetic construct
  misc_feature 1..20: note = chemically synthesized
  source 1..20: mol_type = other DNA
agcaaactgcctgaaggcca

SEQ ID NO: 15552 - DNA, 20 bp, synthetic construct
  misc_feature 1..20: note = chemically synthesized
  source 1..20: mol_type = other DNA
ggccaaagaatcaacccaac

SEQ ID NO: 15553 - DNA, 20 bp, synthetic construct
  misc_feature 1..20: note = chemically synthesized
  source 1..20: mol_type = other DNA
ccaactagactcattaccat

SEQ ID NO: 15554 - DNA, 20 bp, synthetic construct
  misc_feature 1..20: note = chemically synthesized
  source 1..20: mol_type = other DNA
accatcagtgccaatgtaca

SEQ ID NO: 15555 - DNA, 20 bp, synthetic construct
  misc_feature 1..20: note = chemically synthesized
  source 1..20: mol_type = other DNA
agtgccaatgtacacagcca

SEQ ID NO: 15556 - DNA, 20 bp, synthetic construct
  misc_feature 1..20: note = chemically synthesized
  source 1..20: mol_type = other DNA
gtgccaatgtacacagccat

SEQ ID NO: 15557 - DNA, 20 bp, synthetic construct
  misc_feature 1..20: note = chemically synthesized
  source 1..20: mol_type = other DNA
tgccaatgtacacagccatg

SEQ ID NO: 15558 - DNA, 20 bp, synthetic construct
  misc_feature 1..20: note = chemically synthesized
  source 1..20: mol_type = other DNA
tgtacacagccatggggccc

SEQ ID NO: 15559 - DNA, 20 bp, synthetic construct
  misc_feature 1..20: note = chemically synthesized
  source 1..20: mol_type = other DNA
gtacacagccatggggccca

SEQ ID NO: 15560 - DNA, 20 bp, synthetic construct
  misc_feature 1..20: note = chemically synthesized
  source 1..20: mol_type = other DNA
acagccatggggcccaagga

SEQ ID NO: 15561 - DNA, 20 bp, synthetic construct
  misc_feature 1..20: note = chemically synthesized
  source 1..20: mol_type = other DNA
cagccatggggcccaaggac

SEQ ID NO: 15562 - DNA, 20 bp, synthetic construct
  misc_feature 1..20: note = chemically synthesized
  source 1..20: mol_type = other DNA
gggcccaaggacaggaatgc

SEQ ID NO: 15563 - DNA, 20 bp, synthetic construct
  misc_feature 1..20: note = chemically synthesized
  source 1..20: mol_type = other DNA
ggcccaaggacaggaatgct

SEQ ID NO: 15564 - DNA, 20 bp, synthetic construct
  misc_feature 1..20: note = chemically synthesized
  source 1..20: mol_type = other DNA
gctaggcccaccaccaccac

SEQ ID NO: 15565 - DNA, 20 bp, synthetic construct
  misc_feature 1..20: note = chemically synthesized
  source 1..20: mol_type = other DNA
ctaggcccaccaccaccact

SEQ ID NO: 15566 - DNA, 20 bp, synthetic construct
  misc_feature 1..20: note = chemically synthesized
  source 1..20: mol_type = other DNA
taggcccaccaccaccactg

SEQ ID NO: 15567 - DNA, 20 bp, synthetic construct
  misc_feature 1..20: note = chemically synthesized
  source 1..20: mol_type = other DNA
ccaccaccaccactggggcc

SEQ ID NO: 15568 - DNA, 20 bp, synthetic construct
  misc_feature 1..20: note = chemically synthesized
  source 1..20: mol_type = other DNA
caccaccaccactggggcca

SEQ ID NO: 15569 - DNA, 20 bp, synthetic construct
  misc_feature 1..20: note = chemically synthesized
  source 1..20: mol_type = other DNA
ccaccactggggccaaggac

SEQ ID NO: 15570 - DNA, 20 bp, synthetic construct
  misc_feature 1..20: note = chemically synthesized
  source 1..20: mol_type = other DNA
ccacttgatattcttgtctc

SEQ ID NO: 15571 - DNA, 20 bp, synthetic construct
  misc_feature 1..20: note = chemically synthesized
  source 1..20: mol_type = other DNA
ttcactaacaaatgcaccct

SEQ ID NO: 15572 - DNA, 20 bp, synthetic construct
  misc_feature 1..20: note = chemically synthesized
  source 1..20: mol_type = other DNA
ctaagccactgaaaaaatca

SEQ ID NO: 15573 - DNA, 20 bp, synthetic construct
  misc_feature 1..20: note = chemically synthesized
  source 1..20: mol_type = other DNA
acagacactgatgatactgt

SEQ ID NO: 15574 - DNA, 20 bp, synthetic construct
  misc_feature 1..20: note = chemically synthesized
  source 1..20: mol_type = other DNA
gacactgatgatactgttgg

SEQ ID NO: 15575 - DNA, 20 bp, synthetic construct
  misc_feature 1..20: note = chemically synthesized
  source 1..20: mol_type = other DNA
agctgaaaaaaaataatatg

SEQ ID NO: 15576 - DNA, 20 bp, synthetic construct
  misc_feature 1..20: note = chemically synthesized
  source 1..20: mol_type = other DNA
actatgctgctgtatgcacc

SEQ ID NO: 15577 - DNA, 20 bp, synthetic construct
  misc_feature 1..20: note = chemically synthesized
  source 1..20: mol_type = other DNA
gcacctagaaatcaaaatca

SEQ ID NO: 15578 - DNA, 20 bp, synthetic construct
  misc_feature 1..20: note = chemically synthesized
  source 1..20: mol_type = other DNA
tgccctactcaatcaacacc

SEQ ID NO: 15579 - DNA, 20 bp, synthetic construct
  misc_feature 1..20: note = chemically synthesized
  source 1..20: mol_type = other DNA
tcaacaccaagatacatctt

SEQ ID NO: 15580 - DNA, 20 bp, synthetic construct
  misc_feature 1..20: note = chemically synthesized
  source 1..20: mol_type = other DNA
caagatacatcttcagaaaa

SEQ ID NO: 15581 - DNA, 20 bp, synthetic construct
  misc_feature 1..20: note = chemically synthesized
  source 1..20: mol_type = other DNA
caaaaacaaatttacaaaac

SEQ ID NO: 15582 - DNA, 20 bp, synthetic construct
  misc_feature 1..20: note = chemically synthesized
  source 1..20: mol_type = other DNA
aaacaaatttacaaaactgg

SEQ ID NO: 15583 - DNA, 20 bp, synthetic construct
  misc_feature 1..20: note = chemically synthesized
  source 1..20: mol_type = other DNA
caaatttacaaaactggaag

SEQ ID NO: 15584 - DNA, 20 bp, synthetic construct
  misc_feature 1..20: note = chemically synthesized
  source 1..20: mol_type = other DNA
ggaagcagcaatcattacac

SEQ ID NO: 15585 - DNA, 20 bp, synthetic construct
  misc_feature 1..20: note = chemically synthesized
  source 1..20: mol_type = other DNA
agcaatcattacaccagatg

SEQ ID NO: 15586 - DNA, 20 bp, synthetic construct
  misc_feature 1..20: note = chemically synthesized
  source 1..20: mol_type = other DNA
caatcattacaccagatgca

SEQ ID NO: 15587 - DNA, 20 bp, synthetic construct
  misc_feature 1..20: note = chemically synthesized
  source 1..20: mol_type = other DNA
agatgcagagatatcaatgc

SEQ ID NO: 15588 - DNA, 20 bp, synthetic construct
  misc_feature 1..20: note = chemically synthesized
  source 1..20: mol_type = other DNA
aagaacaaaataaacataaa

SEQ ID NO: 15589 - DNA, 20 bp, synthetic construct
  misc_feature 1..20: note = chemically synthesized
  source 1..20: mol_type = other DNA
agaacaaaataaacataaaa

SEQ ID NO: 15590 - DNA, 20 bp, synthetic construct
  misc_feature 1..20: note = chemically synthesized
  source 1..20: mol_type = other DNA
aaaataaacataaaaaggtg

SEQ ID NO: 15591 - DNA, 20 bp, synthetic construct
  misc_feature 1..20: note = chemically synthesized
  source 1..20: mol_type = other DNA
gaagaaatatgacacttcca

SEQ ID NO: 15592 - DNA, 20 bp, synthetic construct
  misc_feature 1..20: note = chemically synthesized
  source 1..20: mol_type = other DNA
aagaaatatgacacttccaa

SEQ ID NO: 15593 - DNA, 20 bp, synthetic construct
  misc_feature 1..20: note = chemically synthesized
  source 1..20: mol_type = other DNA
aaaggaatttaataattctt

SEQ ID NO: 15594 - DNA, 20 bp, synthetic construct
  misc_feature 1..20: note = chemically synthesized
  source 1..20: mol_type = other DNA
taataattcttcagcaacat

SEQ ID NO: 15595 - DNA, 20 bp, synthetic construct
  misc_feature 1..20: note = chemically synthesized
  source 1..20: mol_type = other DNA
aattcttcagcaacataagc

SEQ ID NO: 15596 - DNA, 20 bp, synthetic construct
  misc_feature 1..20: note = chemically synthesized
  source 1..20: mol_type = other DNA
tcttcagcaacataagccag

SEQ ID NO: 15597 - DNA, 20 bp, synthetic construct
  misc_feature 1..20: note = chemically synthesized
  source 1..20: mol_type = other DNA
acataagccagtggaaaaaa

SEQ ID NO: 15598 - DNA, 20 bp, synthetic construct
  misc_feature 1..20: note = chemically synthesized
  source 1..20: mol_type = other DNA
aaaagacatttataaaattc

SEQ ID NO: 15599 - DNA, 20 bp, synthetic construct
  misc_feature 1..20: note = chemically synthesized
  source 1..20: mol_type = other DNA
atttataaaattctggaaaa

SEQ ID NO: 15600 - DNA, 20 bp, synthetic construct
  misc_feature 1..20: note = chemically synthesized
  source 1..20: mol_type = other DNA
gaatccaaaatgttgatatt

SEQ ID NO: 15601 - DNA, 20 bp, synthetic construct
  misc_feature 1..20: note = chemically synthesized
  source 1..20: mol_type = other DNA
aatccaaaatgttgatatta

SEQ ID NO: 15602 - DNA, 20 bp, synthetic construct
  misc_feature 1..20: note = chemically synthesized
  source 1..20: mol_type = other DNA
ccaaaatgttgatattaagg

SEQ ID NO: 15603 - DNA, 20 bp, synthetic construct
  misc_feature 1..20: note = chemically synthesized
  source 1..20: mol_type = other DNA
atgttgatattaaggaagct

SEQ ID NO: 15604 - DNA, 20 bp, synthetic construct
  misc_feature 1..20: note = chemically synthesized
  source 1..20: mol_type = other DNA
tgatattaaggaagctcagt

SEQ ID NO: 15605 - DNA, 20 bp, synthetic construct
  misc_feature 1..20: note = chemically synthesized
  source 1..20: mol_type = other DNA
aaggaagctcagtgagacac

SEQ ID NO: 15606 - DNA, 20 bp, synthetic construct
  misc_feature 1..20: note = chemically synthesized
  source 1..20: mol_type = other DNA
ggaagctcagtgagacacaa

SEQ ID NO: 15607 - DNA, 20 bp, synthetic construct
  misc_feature 1..20: note = chemically synthesized
  source 1..20: mol_type = other DNA
cagtgagacacaagagaact

SEQ ID NO: 15608 - DNA, 20 bp, synthetic construct
  misc_feature 1..20: note = chemically synthesized
  source 1..20: mol_type = other DNA
gaactcagataaacaataaa

SEQ ID NO: 15609 - DNA, 20 bp, synthetic construct
  misc_feature 1..20: note = chemically synthesized
  source 1..20: mol_type = other DNA
gataaacaataaaaagaaat

SEQ ID NO: 15610 - DNA, 20 bp, synthetic construct
  misc_feature 1..20: note = chemically synthesized
  source 1..20: mol_type = other DNA
aagaaatcagaaaaacaatt

SEQ ID NO: 15611 - DNA, 20 bp, synthetic construct
  misc_feature 1..20: note = chemically synthesized
  source 1..20: mol_type = other DNA
agaaatcagaaaaacaattc

SEQ ID NO: 15612 - DNA, 20 bp, synthetic construct
  misc_feature 1..20: note = chemically synthesized
  source 1..20: mol_type = other DNA
aaacaattcaggatatgaat

SEQ ID NO: 15613 - DNA, 20 bp, synthetic construct
  misc_feature 1..20: note = chemically synthesized
  source 1..20: mol_type = other DNA
tatgaatgagaaatttaccc

SEQ ID NO: 15614 - DNA, 20 bp, synthetic construct
  misc_feature 1..20: note = chemically synthesized
  source 1..20: mol_type = other DNA
tgaatgagaaatttacccaa

SEQ ID NO: 15615 - DNA, 20 bp, synthetic construct
  misc_feature 1..20: note = chemically synthesized
  source 1..20: mol_type = other DNA
tgagaaatttacccaagaga

SEQ ID NO: 15616 - DNA, 20 bp, synthetic construct
  misc_feature 1..20: note = chemically synthesized
  source 1..20: mol_type = other DNA
acccaagagatagatacaac

SEQ ID NO: 15617 - DNA, 20 bp, synthetic construct
  misc_feature 1..20: note = chemically synthesized
  source 1..20: mol_type = other DNA
tacaacaagaatgaaccaaa

SEQ ID NO: 15618 - DNA, 20 bp, synthetic construct
  misc_feature 1..20: note = chemically synthesized
  source 1..20: mol_type = other DNA
aaacagaaattctgtaactg

SEQ ID NO: 15619 - DNA, 20 bp, synthetic construct
  misc_feature 1..20: note = chemically synthesized
  source 1..20: mol_type = other DNA
acagaaattctgtaactgaa

SEQ ID NO: 15620 - DNA, 20 bp, synthetic construct
  misc_feature 1..20: note = chemically synthesized
  source 1..20: mol_type = other DNA
gtaactgaagagtttattga

SEQ ID NO: 15621 - DNA, 20 bp, synthetic construct
  misc_feature 1..20: note = chemically synthesized
  source 1..20: mol_type = other DNA
acattcaaaaacttcaacaa

SEQ ID NO: 15622 - DNA, 20 bp, synthetic construct
  misc_feature 1..20: note = chemically synthesized
  source 1..20: mol_type = other DNA
caaaaacttcaacaatagat

SEQ ID NO: 15623 - DNA, 20 bp, synthetic construct
  misc_feature 1..20: note = chemically synthesized
  source 1..20: mol_type = other DNA
cttcaacaatagatcagatc

SEQ ID NO: 15624 - DNA, 20 bp, synthetic construct
  misc_feature 1..20: note = chemically synthesized
  source 1..20: mol_type = other DNA
caacaatagatcagatcaag

SEQ ID NO: 15625 - DNA, 20 bp, synthetic construct
  misc_feature 1..20: note = chemically synthesized
  source 1..20: mol_type = other DNA
caatagatcagatcaagcag

SEQ ID NO: 15626 - DNA, 20 bp, synthetic construct
  misc_feature 1..20: note = chemically synthesized
  source 1..20: mol_type = other DNA
atcaagcagaagaaaaattt

SEQ ID NO: 15627 - DNA, 20 bp, synthetic construct
  misc_feature 1..20: note = chemically synthesized
  source 1..20: mol_type = other DNA
aagaaaaatttcagaacttg

SEQ ID NO: 15628 - DNA, 20 bp, synthetic construct
  misc_feature 1..20: note = chemically synthesized
  source 1..20: mol_type = other DNA
aaaatttcagaacttgaaga

SEQ ID NO: 15629 - DNA, 20 bp, synthetic construct
  misc_feature 1..20: note = chemically synthesized
  source 1..20: mol_type = other DNA
aaatttcagaacttgaagac

SEQ ID NO: 15630 - DNA, 20 bp, synthetic construct
  misc_feature 1..20: note = chemically synthesized
  source 1..20: mol_type = other DNA
gaagacaggtcttttaaaat

SEQ ID NO: 15631 - DNA, 20 bp, synthetic construct
  misc_feature 1..20: note = chemically synthesized
  source 1..20: mol_type = other DNA
acaggtcttttaaaattagc

SEQ ID NO: 15632 - DNA, 20 bp, synthetic construct
  misc_feature 1..20: note = chemically synthesized
  source 1..20: mol_type = other DNA
aaaattagctggtcaaatga

SEQ ID NO: 15633 - DNA, 20 bp, synthetic construct
  misc_feature 1..20: note = chemically synthesized
  source 1..20: mol_type = other DNA
ttagctggtcaaatgataga

SEQ ID NO: 15634 - DNA, 20 bp, synthetic construct
  misc_feature 1..20: note = chemically synthesized
  source 1..20: mol_type = other DNA
tagctggtcaaatgatagaa

SEQ ID NO: 15635 - DNA, 20 bp, synthetic construct
  misc_feature 1..20: note = chemically synthesized
  source 1..20: mol_type = other DNA
aatgatagaaaggaaaaaaa

SEQ ID NO: 15636 - DNA, 20 bp, synthetic construct
  misc_feature 1..20: note = chemically synthesized
  source 1..20: mol_type = other DNA
ggaaaaaaaaagaatgaaca

SEQ ID NO: 15637 - DNA, 20 bp, synthetic construct
  misc_feature 1..20: note = chemically synthesized
  source 1..20: mol_type = other DNA
acaaagtgtatgtgacatat

SEQ ID NO: 15638 - DNA, 20 bp, synthetic construct
  misc_feature 1..20: note = chemically synthesized
  source 1..20: mol_type = other DNA
caaagtgtatgtgacatatg

SEQ ID NO: 15639 - DNA, 20 bp, synthetic construct
  misc_feature 1..20: note = chemically synthesized
  source 1..20: mol_type = other DNA
gtgacatatgaggcactata

SEQ ID NO: 15640 - DNA, 20 bp, synthetic construct
  misc_feature 1..20: note = chemically synthesized
  source 1..20: mol_type = other DNA
tgaacaaatattcaaatttg

SEQ ID NO: 15641 - DNA, 20 bp, synthetic construct
  misc_feature 1..20: note = chemically synthesized
  source 1..20: mol_type = other DNA
tattcaaatttgcagtttcc

SEQ ID NO: 15642 - DNA, 20 bp, synthetic construct
  misc_feature 1..20: note = chemically synthesized
  source 1..20: mol_type = other DNA
tcaaatttgcagtttcccag

SEQ ID NO: 15643 - DNA, 20 bp, synthetic construct
  misc_feature 1..20: note = chemically synthesized
  source 1..20: mol_type = other DNA
caaatttgcagtttcccaga

SEQ ID NO: 15644 - DNA, 20 bp, synthetic construct
  misc_feature 1..20: note = chemically synthesized
  source 1..20: mol_type = other DNA
ttgcagtttcccagaaggta

SEQ ID NO: 15645 - DNA, 20 bp, synthetic construct
  misc_feature 1..20: note = chemically synthesized
  source 1..20: mol_type = other DNA
gcagtttcccagaaggtaaa

SEQ ID NO: 15646 - DNA, 20 bp, synthetic construct
  misc_feature 1..20: note = chemically synthesized
  source 1..20: mol_type = other DNA
agaaggtaaagagaacatga

SEQ ID NO: 15647 - DNA, 20 bp, synthetic construct
  misc_feature 1..20: note = chemically synthesized
  source 1..20: mol_type = other DNA
gaaggtaaagagaacatgaa

SEQ ID NO: 15648 - DNA, 20 bp, synthetic construct
  misc_feature 1..20: note = chemically synthesized
  source 1..20: mol_type = other DNA
taaagagaacatgaaaggtg

SEQ ID NO: 15649 - DNA, 20 bp, synthetic construct
  misc_feature 1..20: note = chemically synthesized
  source 1..20: mol_type = other DNA
aaagagaacatgaaaggtgt

SEQ ID NO: 15650 - DNA, 20 bp, synthetic construct
  misc_feature 1..20: note = chemically synthesized
  source 1..20: mol_type = other DNA
aaacctacgtaacaacacaa

SEQ ID NO: 15651 - DNA, 20 bp, synthetic construct
  misc_feature 1..20: note = chemically synthesized
  source 1..20: mol_type = other DNA
acaatagctgaaaacttgtc

SEQ ID NO: 15652 - DNA, 20 bp, synthetic construct
  misc_feature 1..20: note = chemically synthesized
  source 1..20: mol_type = other DNA
agctgaaaacttgtcaagtc

SEQ ID NO: 15653 - DNA, 20 bp, synthetic construct
  misc_feature 1..20: note = chemically synthesized
  source 1..20: mol_type = other DNA
gaaaacttgtcaagtctagc

SEQ ID NO: 15654 - DNA, 20 bp, synthetic construct
  misc_feature 1..20: note = chemically synthesized
  source 1..20: mol_type = other DNA
gtcaagtctagcaagaaatg

SEQ ID NO: 15655 - DNA, 20 bp, synthetic construct
  misc_feature 1..20: note = chemically synthesized
  source 1..20: mol_type = other DNA
tagcaagaaatgtagacatc

SEQ ID NO: 15656 - DNA, 20 bp, synthetic construct
  misc_feature 1..20: note = chemically synthesized
  source 1..20: mol_type = other DNA
acatccagacaaatgaaaat

SEQ ID NO: 15657 - DNA, 20 bp, synthetic construct
  misc_feature 1..20: note = chemically synthesized
  source 1..20: mol_type = other DNA
cccaaataatataatgcaaa

SEQ ID NO: 15658 - DNA, 20 bp, synthetic construct
  misc_feature 1..20: note = chemically synthesized
  source 1..20: mol_type = other DNA
atgcaaaaagctcttctcca

SEQ ID NO: 15659 - DNA, 20 bp, synthetic construct
  misc_feature 1..20: note = chemically synthesized
  source 1..20: mol_type = other DNA
ctcttctccacagcacatta

SEQ ID NO: 15660 - DNA, 20 bp, synthetic construct
  misc_feature 1..20: note = chemically synthesized
  source 1..20: mol_type = other DNA
cattatagtcaaactgtcaa

SEQ ID NO: 15661 - DNA, 20 bp, synthetic construct
  misc_feature 1..20: note = chemically synthesized
  source 1..20: mol_type = other DNA
agtcaaactgtcaaaagcca

SEQ ID NO: 15662 - DNA, 20 bp, synthetic construct
  misc_feature 1..20: note = chemically synthesized
  source 1..20: mol_type = other DNA
tcaaactgtcaaaagccaaa

SEQ ID NO: 15663 - DNA, 20 bp, synthetic construct
  misc_feature 1..20: note = chemically synthesized
  source 1..20: mol_type = other DNA
actgtcaaaagccaaagagt

SEQ ID NO: 15664 - DNA, 20 bp, synthetic construct
  misc_feature 1..20: note = chemically synthesized
  source 1..20: mol_type = other DNA
aaagagtaagaactctaaaa

SEQ ID NO: 15665 - DNA, 20 bp, synthetic construct
  misc_feature 1..20: note = chemically synthesized
  source 1..20: mol_type = other DNA
agtaagaactctaaaacagc

SEQ ID NO: 15666 - DNA, 20 bp, synthetic construct
  misc_feature 1..20: note = chemically synthesized
  source 1..20: mol_type = other DNA
aaaacagcaagcaaaatgtc

SEQ ID NO: 15667 - DNA, 20 bp, synthetic construct
  misc_feature 1..20: note = chemically synthesized
  source 1..20: mol_type = other DNA
caaaatgtctagtcacttat

SEQ ID NO: 15668 - DNA, 20 bp, synthetic construct
  misc_feature 1..20: note = chemically synthesized
  source 1..20: mol_type = other DNA
aaaatgtctagtcacttata

SEQ ID NO: 15669 - DNA, 20 bp, synthetic construct
  misc_feature 1..20: note = chemically synthesized
  source 1..20: mol_type = other DNA
aaatgtctagtcacttataa

SEQ ID NO: 15670 - DNA, 20 bp, synthetic construct
  misc_feature 1..20: note = chemically synthesized
  source 1..20: mol_type = other DNA
acttataagggaacttccac

SEQ ID NO: 15671 - DNA, 20 bp, synthetic construct
  misc_feature 1..20: note = chemically synthesized
  source 1..20: mol_type = other DNA
gggaacttccacaagattaa

SEQ ID NO: 15672 - DNA, 20 bp, synthetic construct
  misc_feature 1..20: note = chemically synthesized
  source 1..20: mol_type = other DNA
ccacaagattaacagattaa

SEQ ID NO: 15673 - DNA, 20 bp, synthetic construct
  misc_feature 1..20: note = chemically synthesized
  source 1..20: mol_type = other DNA
caagattaacagattaacag

SEQ ID NO: 15674 - DNA, 20 bp, synthetic construct
  misc_feature 1..20: note = chemically synthesized
  source 1..20: mol_type = other DNA
cagattaacagcagatttct

SEQ ID NO: 15675 - DNA, 20 bp, synthetic construct
  misc_feature 1..20: note = chemically synthesized
  source 1..20: mol_type = other DNA
attaacagcagatttctcag

SEQ ID NO: 15676 - DNA, 20 bp, synthetic construct
  misc_feature 1..20: note = chemically synthesized
  source 1..20: mol_type = other DNA
atttctcagcagaaacctca

SEQ ID NO: 15677 - DNA, 20 bp, synthetic construct
  misc_feature 1..20: note = chemically synthesized
  source 1..20: mol_type = other DNA
tttctcagcagaaacctcac

SEQ ID NO: 15678 - DNA, 20 bp, synthetic construct
  misc_feature 1..20: note = chemically synthesized
  source 1..20: mol_type = other DNA
tcagcagaaacctcacaggc

SEQ ID NO: 15679 - DNA, 20 bp, synthetic construct
  misc_feature 1..20: note = chemically synthesized
  source 1..20: mol_type = other DNA
cagcagaaacctcacaggcc

SEQ ID NO: 15680 - DNA, 20 bp, synthetic construct
  misc_feature 1..20: note = chemically synthesized
  source 1..20: mol_type = other DNA
gcagaaacctcacaggccag

SEQ ID NO: 15681 - DNA, 20 bp, synthetic construct
  misc_feature 1..20: note = chemically synthesized
  source 1..20: mol_type = other DNA
gaaacctcacaggccaggag

SEQ ID NO: 15682 - DNA, 20 bp, synthetic construct
  misc_feature 1..20: note = chemically synthesized
  source 1..20: mol_type = other DNA
cctcacaggccaggagaaga

SEQ ID NO: 15683 - DNA, 20 bp, synthetic construct
  misc_feature 1..20: note = chemically synthesized
  source 1..20: mol_type = other DNA
ctcacaggccaggagaagat

SEQ ID NO: 15684 - DNA, 20 bp, synthetic construct
  misc_feature 1..20: note = chemically synthesized
  source 1..20: mol_type = other DNA
atgggatgatatattcaaaa

SEQ ID NO: 15685 - DNA, 20 bp, synthetic construct
  misc_feature 1..20: note = chemically synthesized
  source 1..20: mol_type = other DNA
tgatatattcaaaatagtga

SEQ ID NO: 15686 - DNA, 20 bp, synthetic construct
  misc_feature 1..20: note = chemically synthesized
  source 1..20: mol_type = other DNA
tgaaagaaaaaaatgacacc

SEQ ID NO: 15687 - DNA, 20 bp, synthetic construct
  misc_feature 1..20: note = chemically synthesized
  source 1..20: mol_type = other DNA
gaaagaaaaaaatgacacca

SEQ ID NO: 15688 - DNA, 20 bp, synthetic construct
  misc_feature 1..20: note = chemically synthesized
  source 1..20: mol_type = other DNA
gacaccaaggatgttatacc

SEQ ID NO: 15689 - DNA, 20 bp, synthetic construct
  misc_feature 1..20: note = chemically synthesized
  source 1..20: mol_type = other DNA
aacattgttcttcaaaaatg

SEQ ID NO: 15690 - DNA, 20 bp, synthetic construct
  misc_feature 1..20: note = chemically synthesized
  source 1..20: mol_type = other DNA
acattgttcttcaaaaatga

SEQ ID NO: 15691 - DNA, 20 bp, synthetic construct
  misc_feature 1..20: note = chemically synthesized
  source 1..20: mol_type = other DNA
aggataaataaaatcttttc

SEQ ID NO: 15692 - DNA, 20 bp, synthetic construct
  misc_feature 1..20: note = chemically synthesized
  source 1..20: mol_type = other DNA
ggataaataaaatcttttct

SEQ ID NO: 15693 - DNA, 20 bp, synthetic construct
  misc_feature 1..20: note = chemically synthesized
  source 1..20: mol_type = other DNA
aaataaaatcttttctgggc

SEQ ID NO: 15694 - DNA, 20 bp, synthetic construct
  misc_feature 1..20: note = chemically synthesized
  source 1..20: mol_type = other DNA
ttctgggcaagaaaaatttg

SEQ ID NO: 15695 - DNA, 20 bp, synthetic construct
  misc_feature 1..20: note = chemically synthesized
  source 1..20: mol_type = other DNA
tctgggcaagaaaaatttga

SEQ ID NO: 15696 - DNA, 20 bp, synthetic construct
  misc_feature 1..20: note = chemically synthesized
  source 1..20: mol_type = other DNA
ttgaaggaattcactatcac

SEQ ID NO: 15697 - DNA, 20 bp, synthetic construct
  misc_feature 1..20: note = chemically synthesized
  source 1..20: mol_type = other DNA
ggaattcactatcactagac

SEQ ID NO: 15698 - DNA, 20 bp, synthetic construct
  misc_feature 1..20: note = chemically synthesized
  source 1..20: mol_type = other DNA
tatcactagactggctttac

SEQ ID NO: 15699 - DNA, 20 bp, synthetic construct
  misc_feature 1..20: note = chemically synthesized
  source 1..20: mol_type = other DNA
tggctttacaagaaatattt

SEQ ID NO: 15700 - DNA, 20 bp, synthetic construct
  misc_feature 1..20: note = chemically synthesized
  source 1..20: mol_type = other DNA
ggctttacaagaaatattta

SEQ ID NO: 15701 - DNA, 20 bp, synthetic construct
  misc_feature 1..20: note = chemically synthesized
  source 1..20: mol_type = other DNA
gctttacaagaaatatttaa

SEQ ID NO: 15702 - DNA, 20 bp, synthetic construct
  misc_feature 1..20: note = chemically synthesized
  source 1..20: mol_type = other DNA
tttacaagaaatatttaagg

SEQ ID NO: 15703 - DNA, 20 bp, synthetic construct
  misc_feature 1..20: note = chemically synthesized
  source 1..20: mol_type = other DNA
taagggagtcctacacatga

SEQ ID NO: 15704 - DNA, 20 bp, synthetic construct
  misc_feature 1..20: note = chemically synthesized
  source 1..20: mol_type = other DNA
agtcctacacatgaaagtga

SEQ ID NO: 15705 - DNA, 20 bp, synthetic construct
  misc_feature 1..20: note = chemically synthesized
  source 1..20: mol_type = other DNA
gtcctacacatgaaagtgac

SEQ ID NO: 15706 - DNA, 20 bp, synthetic construct
  misc_feature 1..20: note = chemically synthesized
  source 1..20: mol_type = other DNA
gacaggacactgccattatg

SEQ ID NO: 15707 - DNA, 20 bp, synthetic construct
  misc_feature 1..20: note = chemically synthesized
  source 1..20: mol_type = other DNA
tgccattatgaagacacaca

SEQ ID NO: 15708 - DNA, 20 bp, synthetic construct
  misc_feature 1..20: note = chemically synthesized
  source 1..20: mol_type = other DNA
gccattatgaagacacacaa

SEQ ID NO: 15709 - DNA, 20 bp, synthetic construct
  misc_feature 1..20: note = chemically synthesized
  source 1..20: mol_type = other DNA
cacaaaggtatacaactaac

SEQ ID NO: 15710 - DNA, 20 bp, synthetic construct
  misc_feature 1..20: note = chemically synthesized
  source 1..20: mol_type = other DNA
aaaggtatacaactaactgg

SEQ ID NO: 15711 - DNA, 20 bp, synthetic construct
  misc_feature 1..20: note = chemically synthesized
  source 1..20: mol_type = other DNA
aggtatacaactaactggta

SEQ ID NO: 15712 - DNA, 20 bp, synthetic construct
  misc_feature 1..20: note = chemically synthesized
  source 1..20: mol_type = other DNA
ggtagagcaaaacacaaata

SEQ ID NO: 15713 - DNA, 20 bp, synthetic construct
  misc_feature 1..20: note = chemically synthesized
  source 1..20: mol_type = other DNA
agagcaaaacacaaataaag

SEQ ID NO: 15714 - DNA, 20 bp, synthetic construct
  misc_feature 1..20: note = chemically synthesized
  source 1..20: mol_type = other DNA
agcaaaacacaaataaagaa

SEQ ID NO: 15715 - DNA, 20 bp, synthetic construct
  misc_feature 1..20: note = chemically synthesized
  source 1..20: mol_type = other DNA
aaacacaaataaagaagaga

SEQ ID NO: 15716 - DNA, 20 bp, synthetic construct
  misc_feature 1..20: note = chemically synthesized
  source 1..20: mol_type = other DNA
gaactcaaacgttaccacta

SEQ ID NO: 15717 - DNA, 20 bp, synthetic construct
  misc_feature 1..20: note = chemically synthesized
  source 1..20: mol_type = other DNA
aaaccacaatcataaataat

SEQ ID NO: 15718 - DNA, 20 bp, synthetic construct
  misc_feature 1..20: note = chemically synthesized
  source 1..20: mol_type = other DNA
cacaatcataaataataaga

SEQ ID NO: 15719 - DNA, 20 bp, synthetic construct
  misc_feature 1..20: note = chemically synthesized
  source 1..20: mol_type = other DNA
atcataaataataagaaaga

SEQ ID NO: 15720 - DNA, 20 bp, synthetic construct
  misc_feature 1..20: note = chemically synthesized
  source 1..20: mol_type = other DNA
taaataataagaaagaaaga

SEQ ID NO: 15721 - DNA, 20 bp, synthetic construct
  misc_feature 1..20: note = chemically synthesized
  source 1..20: mol_type = other DNA
taataagaaagaaagaaaga

SEQ ID NO: 15722 - DNA, 20 bp, synthetic construct
  misc_feature 1..20: note = chemically synthesized
  source 1..20: mol_type = other DNA
aagaaagaaagaaagaaaga

SEQ ID NO: 15723 - DNA, 20 bp, synthetic construct
  misc_feature 1..20: note = chemically synthesized
  source 1..20: mol_type = other DNA
gaaagaaagaaagaaagaaa

SEQ ID NO: 15724 - DNA, 20 bp, synthetic construct
  misc_feature 1..20: note = chemically synthesized
  source 1..20: mol_type = other DNA
aagaaagaaagaaagaaaga

SEQ ID NO: 15725 - DNA, 20 bp, synthetic construct
  misc_feature 1..20: note = chemically synthesized
  source 1..20: mol_type = other DNA
gaaagaaagaaagaaagaga

SEQ ID NO: 15726 - DNA, 20 bp, synthetic construct
  misc_feature 1..20: note = chemically synthesized
  source 1..20: mol_type = other DNA
aagaaagaaagaaagagaga

SEQ ID NO: 15727 - DNA, 20 bp, synthetic construct
  misc_feature 1..20: note = chemically synthesized
  source 1..20: mol_type = other DNA
gaaagaaagaaagagagaga

SEQ ID NO: 15728 - DNA, 20 bp, synthetic construct
  misc_feature 1..20: note = chemically synthesized
  source 1..20: mol_type = other DNA
aagaaagaaagagagagaga

SEQ ID NO: 15729 - DNA, 20 bp, synthetic construct
  misc_feature 1..20: note = chemically synthesized
  source 1..20: mol_type = other DNA
gaaagaaagagagagagaga

SEQ ID NO: 15730 - DNA, 20 bp, synthetic construct
  misc_feature 1..20: note = chemically synthesized
  source 1..20: mol_type = other DNA
gagagagagagagagaatga

SEQ ID NO: 15731 - DNA, 20 bp, synthetic construct
  misc_feature 1..20: note = chemically synthesized
  source 1..20: mol_type = other DNA
gagagagagagaatgaaaga

SEQ ID NO: 15732 - DNA, 20 bp, synthetic construct
  misc_feature 1..20: note = chemically synthesized
  source 1..20: mol_type = other DNA
agagagaatgaaagaaagaa

SEQ ID NO: 15733 - DNA, 20 bp, synthetic construct
  misc_feature 1..20: note = chemically synthesized
  source 1..20: mol_type = other DNA
gagagaatgaaagaaagaaa

SEQ ID NO: 15734 - DNA, 20 bp, synthetic construct
  misc_feature 1..20: note = chemically synthesized
  source 1..20: mol_type = other DNA
agaatgaaagaaagaaaagg

SEQ ID NO: 15735 - DNA, 20 bp, synthetic construct
  misc_feature 1..20: note = chemically synthesized
  source 1..20: mol_type = other DNA
gaatgaaagaaagaaaagga

SEQ ID NO: 15736 - DNA, 20 bp, synthetic construct
  misc_feature 1..20: note = chemically synthesized
  source 1..20: mol_type = other DNA
tgaaagaaagaaaaggaagg

SEQ ID NO: 15737 - DNA, 20 bp, synthetic construct
  misc_feature 1..20: note = chemically synthesized
  source 1..20: mol_type = other DNA
gaaagaaagaaaaggaagga

SEQ ID NO: 15738 - DNA, 20 bp, synthetic construct
  misc_feature 1..20: note = chemically synthesized
  source 1..20: mol_type = other DNA
agaaagaaaaggaaggaagg

SEQ ID NO: 15739 - DNA, 20 bp, synthetic construct
  misc_feature 1..20: note = chemically synthesized
  source 1..20: mol_type = other DNA
taaaaaaaaaacaaaacaac

SEQ ID NO: 15740 - DNA, 20 bp, synthetic construct
  misc_feature 1..20: note = chemically synthesized
  source 1..20: mol_type = other DNA
aaaaaaaaaacaaaacaacc

SEQ ID NO: 15741 - DNA, 20 bp, synthetic construct
  misc_feature 1..20: note = chemically synthesized
  source 1..20: mol_type = other DNA
ccaggaatcaattaacaaaa

SEQ ID NO: 15742 - DNA, 20 bp, synthetic construct
  misc_feature 1..20: note = chemically synthesized
  source 1..20: mol_type = other DNA
ggaatcaattaacaaaatgg

SEQ ID NO: 15743 - DNA, 20 bp, synthetic construct
  misc_feature 1..20: note = chemically synthesized
  source 1..20: mol_type = other DNA
gaatcaattaacaaaatggc

SEQ ID NO: 15744 - DNA, 20 bp, synthetic construct
  misc_feature 1..20: note = chemically synthesized
  source 1..20: mol_type = other DNA
attaacaaaatggcaggaat

SEQ ID NO: 15745 - DNA, 20 bp, synthetic construct
  misc_feature 1..20: note = chemically synthesized
  source 1..20: mol_type = other DNA
aagctctcacatgtcaataa

SEQ ID NO: 15746 - DNA, 20 bp, synthetic construct
  misc_feature 1..20: note = chemically synthesized
  source 1..20: mol_type = other DNA
ataatagccttgcatgtaaa

SEQ ID NO: 15747 - DNA, 20 bp, synthetic construct
  misc_feature 1..20: note = chemically synthesized
  source 1..20: mol_type = other DNA
tggattaaattgttacttga

SEQ ID NO: 15748 - DNA, 20 bp, synthetic construct
  misc_feature 1..20: note = chemically synthesized
  source 1..20: mol_type = other DNA
aaattgttacttgaaagata

SEQ ID NO: 15749 - DNA, 20 bp, synthetic construct
  misc_feature 1..20: note = chemically synthesized
  source 1..20: mol_type = other DNA
gttacttgaaagatatagac

SEQ ID NO: 15750 - DNA, 20 bp, synthetic construct
  misc_feature 1..20: note = chemically synthesized
  source 1..20: mol_type = other DNA
aaagatatagactggctaaa

SEQ ID NO: 15751 - DNA, 20 bp, synthetic construct
  misc_feature 1..20: note = chemically synthesized
  source 1..20: mol_type = other DNA
tttaaaacaaaaatatgacc

SEQ ID NO: 15752 - DNA, 20 bp, synthetic construct
  misc_feature 1..20: note = chemically synthesized
  source 1..20: mol_type = other DNA
caaaaatatgacccagttgt

SEQ ID NO: 15753 - DNA, 20 bp, synthetic construct
  misc_feature 1..20: note = chemically synthesized
  source 1..20: mol_type = other DNA
cccagttgtaagctgcctat

SEQ ID NO: 15754 - DNA, 20 bp, synthetic construct
  misc_feature 1..20: note = chemically synthesized
  source 1..20: mol_type = other DNA
agaaacttatctcacttgta

SEQ ID NO: 15755 - DNA, 20 bp, synthetic construct
  misc_feature 1..20: note = chemically synthesized
  source 1..20: mol_type = other DNA
ctcacttgtaaagataaata

SEQ ID NO: 15756 - DNA, 20 bp, synthetic construct
  misc_feature 1..20: note = chemically synthesized
  source 1..20: mol_type = other DNA
taaagataaatatagactga

SEQ ID NO: 15757 - DNA, 20 bp, synthetic construct
  misc_feature 1..20: note = chemically synthesized
  source 1..20: mol_type = other DNA
aaatatagactgaaagtaaa

SEQ ID NO: 15758 - DNA, 20 bp, synthetic construct
  misc_feature 1..20: note = chemically synthesized
  source 1..20: mol_type = other DNA
gactgaaagtaaaaagatga

SEQ ID NO: 15759 - DNA, 20 bp, synthetic construct
  misc_feature 1..20: note = chemically synthesized
  source 1..20: mol_type = other DNA
gatgaaagatcttccataca

SEQ ID NO: 15760 - DNA, 20 bp, synthetic construct
  misc_feature 1..20: note = chemically synthesized
  source 1..20: mol_type = other DNA
tgaaagatcttccatacaaa

SEQ ID NO: 15761 - DNA, 20 bp, synthetic construct
  misc_feature 1..20: note = chemically synthesized
  source 1..20: mol_type = other DNA
tacaaagagaaaccaaaaat

SEQ ID NO: 15762 - DNA, 20 bp, synthetic construct
  misc_feature 1..20: note = chemically synthesized
  source 1..20: mol_type = other DNA
gagaaaccaaaaatgagcaa

SEQ ID NO: 15763 - DNA, 20 bp, synthetic construct
  misc_feature 1..20: note = chemically synthesized
  source 1..20: mol_type = other DNA
aaaccaaaaatgagcaaaag

SEQ ID NO: 15764 - DNA, 20 bp, synthetic construct
  misc_feature 1..20: note = chemically synthesized
  source 1..20: mol_type = other DNA
aaaagtagttatacctataa

SEQ ID NO: 15765 - DNA, 20 bp, synthetic construct
  misc_feature 1..20: note = chemically synthesized
  source 1..20: mol_type = other DNA
gactttaaataaaaaacact

SEQ ID NO: 15766 - DNA, 20 bp, synthetic construct
  misc_feature 1..20: note = chemically synthesized
  source 1..20: mol_type = other DNA
ctttaaataaaaaacactaa

SEQ ID NO: 15767 - DNA, 20 bp, synthetic construct
  misc_feature 1..20: note = chemically synthesized
  source 1..20: mol_type = other DNA
taaaaaacactaagagacaa

SEQ ID NO: 15768 - DNA, 20 bp, synthetic construct
  misc_feature 1..20: note = chemically synthesized
  source 1..20: mol_type = other DNA
aagtcattacataatgataa

SEQ ID NO: 15769 - DNA, 20 bp, synthetic construct
  misc_feature 1..20: note = chemically synthesized
  source 1..20: mol_type = other DNA
agtcattacataatgataaa

SEQ ID NO: 15770 - DNA, 20 bp, synthetic construct
  misc_feature 1..20: note = chemically synthesized
  source 1..20: mol_type = other DNA
taatgataaaaggaacaatt

SEQ ID NO: 15771 - DNA, 20 bp, synthetic construct
  misc_feature 1..20: note = chemically synthesized
  source 1..20: mol_type = other DNA
gataaaaggaacaattcagc

SEQ ID NO: 15772 - DNA, 20 bp, synthetic construct
  misc_feature 1..20: note = chemically synthesized
  source 1..20: mol_type = other DNA
taaaaggaacaattcagcaa

SEQ ID NO: 15773 - DNA, 20 bp, synthetic construct
  misc_feature 1..20: note = chemically synthesized
  source 1..20: mol_type = other DNA
taaacattcacactcaacac

SEQ ID NO: 15774 - DNA, 20 bp, synthetic construct
  misc_feature 1..20: note = chemically synthesized
  source 1..20: mol_type = other DNA
aacattcacactcaacacca

SEQ ID NO: 15775 - DNA, 20 bp, synthetic construct
  misc_feature 1..20: note = chemically synthesized
  source 1..20: mol_type = other DNA
acactcaacaccagagcatc

SEQ ID NO: 15776 - DNA, 20 bp, synthetic construct
  misc_feature 1..20: note = chemically synthesized
  source 1..20: mol_type = other DNA
ccagagcatccagatatgta

SEQ ID NO: 15777 - DNA, 20 bp, synthetic construct
  misc_feature 1..20: note = chemically synthesized
  source 1..20: mol_type = other DNA
atatgtaaagcaaatgttat

SEQ ID NO: 15778 - DNA, 20 bp, synthetic construct
  misc_feature 1..20: note = chemically synthesized
  source 1..20: mol_type = other DNA
agcaaatgttattagatata

SEQ ID NO: 15779 - DNA, 20 bp, synthetic construct
  misc_feature 1..20: note = chemically synthesized
  source 1..20: mol_type = other DNA
gcaaatgttattagatataa

SEQ ID NO: 15780 - DNA, 20 bp, synthetic construct
  misc_feature 1..20: note = chemically synthesized
  source 1..20: mol_type = other DNA
caaatgttattagatataaa

SEQ ID NO: 15781 - DNA, 20 bp, synthetic construct
  misc_feature 1..20: note = chemically synthesized
  source 1..20: mol_type = other DNA
attagatataaagggtgaaa

SEQ ID NO: 15782 - DNA, 20 bp, synthetic construct
  misc_feature 1..20: note = chemically synthesized
  source 1..20: mol_type = other DNA
aatagaatccaatacaataa

SEQ ID NO: 15783 - DNA, 20 bp, synthetic construct
  misc_feature 1..20: note = chemically synthesized
  source 1..20: mol_type = other DNA
gaatccaatacaataatagt

SEQ ID NO: 15784 - DNA, 20 bp, synthetic construct
  misc_feature 1..20: note = chemically synthesized
  source 1..20: mol_type = other DNA
aatccaatacaataatagtt

SEQ ID NO: 15785 - DNA, 20 bp, synthetic construct
  misc_feature 1..20: note = chemically synthesized
  source 1..20: mol_type = other DNA
atccaatacaataatagttg

SEQ ID NO: 15786 - DNA, 20 bp, synthetic construct
  misc_feature 1..20: note = chemically synthesized
  source 1..20: mol_type = other DNA
ggatttcaacattctaatct

SEQ ID NO: 15787 - DNA, 20 bp, synthetic construct
  misc_feature 1..20: note = chemically synthesized
  source 1..20: mol_type = other DNA
caacattctaatctcagcat

SEQ ID NO: 15788 - DNA, 20 bp, synthetic construct
  misc_feature 1..20: note = chemically synthesized
  source 1..20: mol_type = other DNA
attctaatctcagcatcaga

SEQ ID NO: 15789 - DNA, 20 bp, synthetic construct
  misc_feature 1..20: note = chemically synthesized
  source 1..20: mol_type = other DNA
tcagcatcagatagatcatc

SEQ ID NO: 15790 - DNA, 20 bp, synthetic construct
  misc_feature 1..20: note = chemically synthesized
  source 1..20: mol_type = other DNA
catcagatagatcatctaga

SEQ ID NO: 15791 - DNA, 20 bp, synthetic construct
  misc_feature 1..20: note = chemically synthesized
  source 1..20: mol_type = other DNA
atctagacagaaaattaaca

SEQ ID NO: 15792 - DNA, 20 bp, synthetic construct
  misc_feature 1..20: note = chemically synthesized
  source 1..20: mol_type = other DNA
gaaaattaacaaagaaacat

SEQ ID NO: 15793 - DNA, 20 bp, synthetic construct
  misc_feature 1..20: note = chemically synthesized
  source 1..20: mol_type = other DNA
attggatttaaacttgactt

SEQ ID NO: 15794 - DNA, 20 bp, synthetic construct
  misc_feature 1..20: note = chemically synthesized
  source 1..20: mol_type = other DNA
aaacttgactttagaccaaa

SEQ ID NO: 15795 - DNA, 20 bp, synthetic construct
  misc_feature 1..20: note = chemically synthesized
  source 1..20: mol_type = other DNA
ttacacaatatttcatccaa

SEQ ID NO: 15796 - DNA, 20 bp, synthetic construct
  misc_feature 1..20: note = chemically synthesized
  source 1..20: mol_type = other DNA
aatatttcatccaacagcta

SEQ ID NO: 15797 - DNA, 20 bp, synthetic construct
  misc_feature 1..20: note = chemically synthesized
  source 1..20: mol_type = other DNA
acagaatatatttatctcat

SEQ ID NO: 15798 - DNA, 20 bp, synthetic construct
  misc_feature 1..20: note = chemically synthesized
  source 1..20: mol_type = other DNA
tcagcacatgacgcattccc

SEQ ID NO: 15799 - DNA, 20 bp, synthetic construct
  misc_feature 1..20: note = chemically synthesized
  source 1..20: mol_type = other DNA
cagcacatgacgcattcccc

SEQ ID NO: 15800 - DNA, 20 bp, synthetic construct
  misc_feature 1..20: note = chemically synthesized
  source 1..20: mol_type = other DNA
ccccaggatacaccatatgt

SEQ ID NO: 15801 - DNA, 20 bp, synthetic construct
  misc_feature 1..20: note = chemically synthesized
  source 1..20: mol_type = other DNA
caccatatgttagaacacaa

SEQ ID NO: 15802 - DNA, 20 bp, synthetic construct
  misc_feature 1..20: note = chemically synthesized
  source 1..20: mol_type = other DNA
catatgttagaacacaaaag

SEQ ID NO: 15803 - DNA, 20 bp, synthetic construct
  misc_feature 1..20: note = chemically synthesized
  source 1..20: mol_type = other DNA
gaaatatttgaaatcatatt

SEQ ID NO: 15804 - DNA, 20 bp, synthetic construct
  misc_feature 1..20: note = chemically synthesized
  source 1..20: mol_type = other DNA
aatcatattaagcatcttct

SEQ ID NO: 15805 - DNA, 20 bp, synthetic construct
  misc_feature 1..20: note = chemically synthesized
  source 1..20: mol_type = other DNA
agcatcttctcagaccacaa

SEQ ID NO: 15806 - DNA, 20 bp, synthetic construct
  misc_feature 1..20: note = chemically synthesized
  source 1..20: mol_type = other DNA
agaccacaatggaataaaac

SEQ ID NO: 15807 - DNA, 20 bp, synthetic construct
  misc_feature 1..20: note = chemically synthesized
  source 1..20: mol_type = other DNA
taaaactagaaatcaataac

SEQ ID NO: 15808 - DNA, 20 bp, synthetic construct
  misc_feature 1..20: note = chemically synthesized
  source 1..20: mol_type = other DNA
ttaaaacctatacaaataca

SEQ ID NO: 15809 - DNA, 20 bp, synthetic construct
  misc_feature 1..20: note = chemically synthesized
  source 1..20: mol_type = other DNA
tcctgaatgaacgttatgtc

SEQ ID NO: 15810 - DNA, 20 bp, synthetic construct
  misc_feature 1..20: note = chemically synthesized
  source 1..20: mol_type = other DNA
tgaatgaacgttatgtcaag

SEQ ID NO: 15811 - DNA, 20 bp, synthetic construct
  misc_feature 1..20: note = chemically synthesized
  source 1..20: mol_type = other DNA
gttatgtcaagaagaaaatt

SEQ ID NO: 15812 - DNA, 20 bp, synthetic construct
  misc_feature 1..20: note = chemically synthesized
  source 1..20: mol_type = other DNA
atgtcaagaagaaaattaag

SEQ ID NO: 15813 - DNA, 20 bp, synthetic construct
  misc_feature 1..20: note = chemically synthesized
  source 1..20: mol_type = other DNA
tgtcaagaagaaaattaaga

SEQ ID NO: 15814 - DNA, 20 bp, synthetic construct
  misc_feature 1..20: note = chemically synthesized
  source 1..20: mol_type = other DNA
atgaaaattgaaatacaaca

SEQ ID NO: 15815 - DNA, 20 bp, synthetic construct
  misc_feature 1..20: note = chemically synthesized
  source 1..20: mol_type = other DNA
tgaaaattgaaatacaacat

SEQ ID NO: 15816 - DNA, 20 bp, synthetic construct
  misc_feature 1..20: note = chemically synthesized
  source 1..20: mol_type = other DNA
attgaaatacaacataggaa

SEQ ID NO: 15817 - DNA, 20 bp, synthetic construct
  misc_feature 1..20: note = chemically synthesized
  source 1..20: mol_type = other DNA
atacaacataggaaaagcca

SEQ ID NO: 15818 - DNA, 20 bp, synthetic construct
  misc_feature 1..20: note = chemically synthesized
  source 1..20: mol_type = other DNA
tacaacataggaaaagccat

SEQ ID NO: 15819 - DNA, 20 bp, synthetic construct
  misc_feature 1..20: note = chemically synthesized
  source 1..20: mol_type = other DNA
ataggaaaagccatgggata

SEQ ID NO: 15820 - DNA, 20 bp, synthetic construct
  misc_feature 1..20: note = chemically synthesized
  source 1..20: mol_type = other DNA
aaagccatgggatacagcaa

SEQ ID NO: 15821 - DNA, 20 bp, synthetic construct
  misc_feature 1..20: note = chemically synthesized
  source 1..20: mol_type = other DNA
gccatgggatacagcaaaag

SEQ ID NO: 15822 - DNA, 20 bp, synthetic construct
  misc_feature 1..20: note = chemically synthesized
  source 1..20: mol_type = other DNA
gatacagcaaaagcagtgct

SEQ ID NO: 15823 - DNA, 20 bp, synthetic construct
  misc_feature 1..20: note = chemically synthesized
  source 1..20: mol_type = other DNA
tacagcaaaagcagtgctaa

SEQ ID NO: 15824 - DNA, 20 bp, synthetic construct
  misc_feature 1..20: note = chemically synthesized
  source 1..20: mol_type = other DNA
cagcaaaagcagtgctaaga

SEQ ID NO: 15825 - DNA, 20 bp, synthetic construct
  misc_feature 1..20: note = chemically synthesized
  source 1..20: mol_type = other DNA
caaaagcagtgctaagagag

SEQ ID NO: 15826 - DNA, 20 bp, synthetic construct
  misc_feature 1..20: note = chemically synthesized
  source 1..20: mol_type = other DNA
aaacacttaaattaaaaaca

SEQ ID NO: 15827 - DNA, 20 bp, synthetic construct
  misc_feature 1..20: note = chemically synthesized
  source 1..20: mol_type = other DNA
acttaaattaaaaacataga

SEQ ID NO: 15828 - DNA, 20 bp, synthetic construct
  misc_feature 1..20: note = chemically synthesized
  source 1..20: mol_type = other DNA
atctaatcatgtacctcaac

SEQ ID NO: 15829 - DNA, 20 bp, synthetic construct
  misc_feature 1..20: note = chemically synthesized
  source 1..20: mol_type = other DNA
aatcatgtacctcaacaagc

SEQ ID NO: 15830 - DNA, 20 bp, synthetic construct
  misc_feature 1..20: note = chemically synthesized
  source 1..20: mol_type = other DNA
tgtacctcaacaagctagaa

SEQ ID NO: 15831 - DNA, 20 bp, synthetic construct
  misc_feature 1..20: note = chemically synthesized
  source 1..20: mol_type = other DNA
cctcaacaagctagaaaagc

SEQ ID NO: 15832 - DNA, 20 bp, synthetic construct
  misc_feature 1..20: note = chemically synthesized
  source 1..20: mol_type = other DNA
gcaagaacaaaacccaaaac

SEQ ID NO: 15833 - DNA, 20 bp, synthetic construct
  misc_feature 1..20: note = chemically synthesized
  source 1..20: mol_type = other DNA
agaacaaaacccaaaactag

SEQ ID NO: 15834 - DNA, 20 bp, synthetic construct
  misc_feature 1..20: note = chemically synthesized
  source 1..20: mol_type = other DNA
acaaaacccaaaactagcag

SEQ ID NO: 15835 - DNA, 20 bp, synthetic construct
  misc_feature 1..20: note = chemically synthesized
  source 1..20: mol_type = other DNA
caaaacccaaaactagcaga

SEQ ID NO: 15836 - DNA, 20 bp, synthetic construct
  misc_feature 1..20: note = chemically synthesized
  source 1..20: mol_type = other DNA
acccaaaactagcagaagga

SEQ ID NO: 15837 - DNA, 20 bp, synthetic construct
  misc_feature 1..20: note = chemically synthesized
  source 1..20: mol_type = other DNA
gcagaaggaaagaaaaaatg

SEQ ID NO: 15838 - DNA, 20 bp, synthetic construct
  misc_feature 1..20: note = chemically synthesized
  source 1..20: mol_type = other DNA
aggaaagaaaaaatgaagaa

SEQ ID NO: 15839 - DNA, 20 bp, synthetic construct
  misc_feature 1..20: note = chemically synthesized
  source 1..20: mol_type = other DNA
aaagaaaaaatgaagaacag

SEQ ID NO: 15840 - DNA, 20 bp, synthetic construct
  misc_feature 1..20: note = chemically synthesized
  source 1..20: mol_type = other DNA
aacagaagaacttaatgaaa

SEQ ID NO: 15841 - DNA, 20 bp, synthetic construct
  misc_feature 1..20: note = chemically synthesized
  source 1..20: mol_type = other DNA
cagaagaacttaatgaaata

SEQ ID NO: 15842 - DNA, 20 bp, synthetic construct
  misc_feature 1..20: note = chemically synthesized
  source 1..20: mol_type = other DNA
aaatagagaaaaacaacaac

SEQ ID NO: 15843 - DNA, 20 bp, synthetic construct
  misc_feature 1..20: note = chemically synthesized
  source 1..20: mol_type = other DNA
aatagagaaaaacaacaaca

SEQ ID NO: 15844 - DNA, 20 bp, synthetic construct
  misc_feature 1..20: note = chemically synthesized
  source 1..20: mol_type = other DNA
atagagaaaaacaacaacaa

SEQ ID NO: 15845 - DNA, 20 bp, synthetic construct
  misc_feature 1..20: note = chemically synthesized
  source 1..20: mol_type = other DNA
gaaaaacaacaacaagggat

SEQ ID NO: 15846 - DNA, 20 bp, synthetic construct
  misc_feature 1..20: note = chemically synthesized
  source 1..20: mol_type = other DNA
caagggattagcaaaatgaa

SEQ ID NO: 15847 - DNA, 20 bp, synthetic construct
  misc_feature 1..20: note = chemically synthesized
  source 1..20: mol_type = other DNA
tgaaaagttgttatttaaaa

SEQ ID NO: 15848 - DNA, 20 bp, synthetic construct
  misc_feature 1..20: note = chemically synthesized
  source 1..20: mol_type = other DNA
gttatttaaaaaagataaaa

SEQ ID NO: 15849 - DNA, 20 bp, synthetic construct
  misc_feature 1..20: note = chemically synthesized
  source 1..20: mol_type = other DNA
taaaaaagataaaatggata

SEQ ID NO: 15850 - DNA, 20 bp, synthetic construct
  misc_feature 1..20: note = chemically synthesized
  source 1..20: mol_type = other DNA
agataaaatggatatagctc

SEQ ID NO: 15851 - DNA, 20 bp, synthetic construct
  misc_feature 1..20: note = chemically synthesized
  source 1..20: mol_type = other DNA
aaaatggatatagctctagc

SEQ ID NO: 15852 - DNA, 20 bp, synthetic construct
  misc_feature 1..20: note = chemically synthesized
  source 1..20: mol_type = other DNA
tagctctagctagactaacc

SEQ ID NO: 15853 - DNA, 20 bp, synthetic construct
  misc_feature 1..20: note = chemically synthesized
  source 1..20: mol_type = other DNA
tagctagactaaccaagaaa

SEQ ID NO: 15854 - DNA, 20 bp, synthetic construct
  misc_feature 1..20: note = chemically synthesized
  source 1..20: mol_type = other DNA
gctagactaaccaagaaaaa

SEQ ID NO: 15855 - DNA, 20 bp, synthetic construct
  misc_feature 1..20: note = chemically synthesized
  source 1..20: mol_type = other DNA
agactaaccaagaaaaagag

SEQ ID NO: 15856 - DNA, 20 bp, synthetic construct
  misc_feature 1..20: note = chemically synthesized
  source 1..20: mol_type = other DNA
actaaccaagaaaaagagaa

SEQ ID NO: 15857 - DNA, 20 bp, synthetic construct
  misc_feature 1..20: note = chemically synthesized
  source 1..20: mol_type = other DNA
aaagagaagagactgaaata

SEQ ID NO: 15858 - DNA, 20 bp, synthetic construct
  misc_feature 1..20: note = chemically synthesized
  source 1..20: mol_type = other DNA
gagactgaaataaagaaaat

SEQ ID NO: 15859 - DNA, 20 bp, synthetic construct
  misc_feature 1..20: note = chemically synthesized
  source 1..20: mol_type = other DNA
aaagaaaatcagaaataaaa

SEQ ID NO: 15860 - DNA, 20 bp, synthetic construct
  misc_feature 1..20: note = chemically synthesized
  source 1..20: mol_type = other DNA
atatattacaaccgatacca

SEQ ID NO: 15861 - DNA, 20 bp, synthetic construct
  misc_feature 1..20: note = chemically synthesized
  source 1..20: mol_type = other DNA
tacaaccgataccacagaaa

SEQ ID NO: 15862 - DNA, 20 bp, synthetic construct
  misc_feature 1..20: note = chemically synthesized
  source 1..20: mol_type = other DNA
ccgataccacagaaatagaa

SEQ ID NO: 15863 - DNA, 20 bp, synthetic construct
  misc_feature 1..20: note = chemically synthesized
  source 1..20: mol_type = other DNA
acagaaatagaaaagattat

SEQ ID NO: 15864 - DNA, 20 bp, synthetic construct
  misc_feature 1..20: note = chemically synthesized
  source 1..20: mol_type = other DNA
agaaatagaaaagattatca

SEQ ID NO: 15865 - DNA, 20 bp, synthetic construct
  misc_feature 1..20: note = chemically synthesized
  source 1..20: mol_type = other DNA
cactaaaaaactgaaaaatc

SEQ ID NO: 15866 - DNA, 20 bp, synthetic construct
  misc_feature 1..20: note = chemically synthesized
  source 1..20: mol_type = other DNA
ctaaaaaactgaaaaatcta

SEQ ID NO: 15867 - DNA, 20 bp, synthetic construct
  misc_feature 1..20: note = chemically synthesized
  source 1..20: mol_type = other DNA
taaaaaactgaaaaatctag

SEQ ID NO: 15868 - DNA, 20 bp, synthetic construct
  misc_feature 1..20: note = chemically synthesized
  source 1..20: mol_type = other DNA
agaggaaattaataaatttc

SEQ ID NO: 15869 - DNA, 20 bp, synthetic construct
  misc_feature 1..20: note = chemically synthesized
  source 1..20: mol_type = other DNA
ctggacacataccacctacc

SEQ ID NO: 15870 - DNA, 20 bp, synthetic construct
  misc_feature 1..20: note = chemically synthesized
  source 1..20: mol_type = other DNA
ccacctaccaagattgaatt

SEQ ID NO: 15871 - DNA, 20 bp, synthetic construct
  misc_feature 1..20: note = chemically synthesized
  source 1..20: mol_type = other DNA
ctaccaagattgaattaaga

SEQ ID NO: 15872 - DNA, 20 bp, synthetic construct
  misc_feature 1..20: note = chemically synthesized
  source 1..20: mol_type = other DNA
aagattgaattaagaaagaa

SEQ ID NO: 15873 - DNA, 20 bp, synthetic construct
  misc_feature 1..20: note = chemically synthesized
  source 1..20: mol_type = other DNA
gaaagaatagaaaacctgaa

SEQ ID NO: 15874 - DNA, 20 bp, synthetic construct
  misc_feature 1..20: note = chemically synthesized
  source 1..20: mol_type = other DNA
aatagaaaacctgaacagac

SEQ ID NO: 15875 - DNA, 20 bp, synthetic construct
  misc_feature 1..20: note = chemically synthesized
  source 1..20: mol_type = other DNA
aatgaataatgaaattgaat

SEQ ID NO: 15876 - DNA, 20 bp, synthetic construct
  misc_feature 1..20: note = chemically synthesized
  source 1..20: mol_type = other DNA
gaataatgaaattgaatcag

SEQ ID NO: 15877 - DNA, 20 bp, synthetic construct
  misc_feature 1..20: note = chemically synthesized
  source 1..20: mol_type = other DNA
gaaattgaatcagtagtaaa

SEQ ID NO: 15878 - DNA, 20 bp, synthetic construct
  misc_feature 1..20: note = chemically synthesized
  source 1..20: mol_type = other DNA
tagtaaaaagtctcccaaaa

SEQ ID NO: 15879 - DNA, 20 bp, synthetic construct
  misc_feature 1..20: note = chemically synthesized
  source 1..20: mol_type = other DNA
ctcccaaaaaagaaaatttc

SEQ ID NO: 15880 - DNA, 20 bp, synthetic construct
  misc_feature 1..20: note = chemically synthesized
  source 1..20: mol_type = other DNA
aaaaaagaaaatttcaagac

SEQ ID NO: 15881 - DNA, 20 bp, synthetic construct
  misc_feature 1..20: note = chemically synthesized
  source 1..20: mol_type = other DNA
aagaaaatttcaagaccaga

SEQ ID NO: 15882 - DNA, 20 bp, synthetic construct
  misc_feature 1..20: note = chemically synthesized
  source 1..20: mol_type = other DNA
caaattttaccaaactttca

SEQ ID NO: 15883 - DNA, 20 bp, synthetic construct
  misc_feature 1..20: note = chemically synthesized
  source 1..20: mol_type = other DNA
aactttcaaagaaaactaac

SEQ ID NO: 15884 - DNA, 20 bp, synthetic construct
  misc_feature 1..20: note = chemically synthesized
  source 1..20: mol_type = other DNA
aaattcttttaaaaattaaa

SEQ ID NO: 15885 - DNA, 20 bp, synthetic construct
  misc_feature 1..20: note = chemically synthesized
  source 1..20: mol_type = other DNA
aattcttttaaaaattaaac

SEQ ID NO: 15886 - DNA, 20 bp, synthetic construct
  misc_feature 1..20: note = chemically synthesized
  source 1..20: mol_type = other DNA
tcttttaaaaattaaacagg

SEQ ID NO: 15887 - DNA, 20 bp, synthetic construct
  misc_feature 1..20: note = chemically synthesized
  source 1..20: mol_type = other DNA
cttttaaaaattaaacagga

SEQ ID NO: 15888 - DNA, 20 bp, synthetic construct
  misc_feature 1..20: note = chemically synthesized
  source 1..20: mol_type = other DNA
ttctccctaactcattctct

SEQ ID NO: 15889 - DNA, 20 bp, synthetic construct
  misc_feature 1..20: note = chemically synthesized
  source 1..20: mol_type = other DNA
tctccctaactcattctctg

SEQ ID NO: 15890 - DNA, 20 bp, synthetic construct
  misc_feature 1..20: note = chemically synthesized
  source 1..20: mol_type = other DNA
cctaactcattctctgaggc

SEQ ID NO: 15891 - DNA, 20 bp, synthetic construct
  misc_feature 1..20: note = chemically synthesized
  source 1..20: mol_type = other DNA
tattatcctgattccataac

SEQ ID NO: 15892 - DNA, 20 bp, synthetic construct
  misc_feature 1..20: note = chemically synthesized
  source 1..20: mol_type = other DNA
tcctgattccataaccagac

SEQ ID NO: 15893 - DNA, 20 bp, synthetic construct
  misc_feature 1..20: note = chemically synthesized
  source 1..20: mol_type = other DNA
cctgattccataaccagaca

SEQ ID NO: 15894 - DNA, 20 bp, synthetic construct
  misc_feature 1..20: note = chemically synthesized
  source 1..20: mol_type = other DNA
ccataaccagacaaggatgc

SEQ ID NO: 15895 - DNA, 20 bp, synthetic construct
  misc_feature 1..20: note = chemically synthesized
  source 1..20: mol_type = other DNA
tgcaagtaaaaataaaactg

SEQ ID NO: 15896 - DNA, 20 bp, synthetic construct
  misc_feature 1..20: note = chemically synthesized
  source 1..20: mol_type = other DNA
gcaagtaaaaataaaactgc

SEQ ID NO: 15897 - DNA, 20 bp, synthetic construct
  misc_feature 1..20: note = chemically synthesized
  source 1..20: mol_type = other DNA
ctgcaggtcaatatccctga

SEQ ID NO: 15898 - DNA, 20 bp, synthetic construct
  misc_feature 1..20: note = chemically synthesized
  source 1..20: mol_type = other DNA
tcaatatccctgatggaaca

SEQ ID NO: 15899 - DNA, 20 bp, synthetic construct
  misc_feature 1..20: note = chemically synthesized
  source 1..20: mol_type = other DNA
caatatccctgatggaacat

SEQ ID NO: 15900 - DNA, 20 bp, synthetic construct
  misc_feature 1..20: note = chemically synthesized
  source 1..20: mol_type = other DNA
gaaaatcctcaacaaaatac

SEQ ID NO: 15901 - DNA, 20 bp, synthetic construct
  misc_feature 1..20: note = chemically synthesized
  source 1..20: mol_type = other DNA
tactagcaaactgaatccaa

SEQ ID NO: 15902 - DNA, 20 bp, synthetic construct
  misc_feature 1..20: note = chemically synthesized
  source 1..20: mol_type = other DNA
gaatccaacagtacatccaa

SEQ ID NO: 15903 - DNA, 20 bp, synthetic construct
  misc_feature 1..20: note = chemically synthesized
  source 1..20: mol_type = other DNA
aaagataatacaccatgatc

SEQ ID NO: 15904 - DNA, 20 bp, synthetic construct
  misc_feature 1..20: note = chemically synthesized
  source 1..20: mol_type = other DNA
gataatacaccatgatcaag

SEQ ID NO: 15905 - DNA, 20 bp, synthetic construct
  misc_feature 1..20: note = chemically synthesized
  source 1..20: mol_type = other DNA
ataatacaccatgatcaagt

SEQ ID NO: 15906 - DNA, 20 bp, synthetic construct
  misc_feature 1..20: note = chemically synthesized
  source 1..20: mol_type = other DNA
tgatcaagtgggatttatac

SEQ ID NO: 15907 - DNA, 20 bp, synthetic construct
  misc_feature 1..20: note = chemically synthesized
  source 1..20: mol_type = other DNA
gatcaagtgggatttatact

SEQ ID NO: 15908 - DNA, 20 bp, synthetic construct
  misc_feature 1..20: note = chemically synthesized
  source 1..20: mol_type = other DNA
atcaagtgggatttatacta

SEQ ID NO: 15909 - DNA, 20 bp, synthetic construct
  misc_feature 1..20: note = chemically synthesized
  source 1..20: mol_type = other DNA
gggatttatactagggttgc

SEQ ID NO: 15910 - DNA, 20 bp, synthetic construct
  misc_feature 1..20: note = chemically synthesized
  source 1..20: mol_type = other DNA
ttatactagggttgcaagaa

SEQ ID NO: 15911 - DNA, 20 bp, synthetic construct
  misc_feature 1..20: note = chemically synthesized
  source 1..20: mol_type = other DNA
tgatacatcacatcaacaaa

SEQ ID NO: 15912 - DNA, 20 bp, synthetic construct
  misc_feature 1..20: note = chemically synthesized
  source 1..20: mol_type = other DNA
aaaccatatgatcatctcaa

SEQ ID NO: 15913 - DNA, 20 bp, synthetic construct
  misc_feature 1..20: note = chemically synthesized
  source 1..20: mol_type = other DNA
tatgatcatctcaatagata

SEQ ID NO: 15914 - DNA, 20 bp, synthetic construct
  misc_feature 1..20: note = chemically synthesized
  source 1..20: mol_type = other DNA
catctcaatagatacagaaa

SEQ ID NO: 15915 - DNA, 20 bp, synthetic construct
  misc_feature 1..20: note = chemically synthesized
  source 1..20: mol_type = other DNA
ttcatgataaaaactatctg

SEQ ID NO: 15916 - DNA, 20 bp, synthetic construct
  misc_feature 1..20: note = chemically synthesized
  source 1..20: mol_type = other DNA
aaactatctgcagccaatca

SEQ ID NO: 15917 - DNA, 20 bp, synthetic construct
  misc_feature 1..20: note = chemically synthesized
  source 1..20: mol_type = other DNA
ctatctgcagccaatcatag

SEQ ID NO: 15918 - DNA, 20 bp, synthetic construct
  misc_feature 1..20: note = chemically synthesized
  source 1..20: mol_type = other DNA
tatctgcagccaatcataga

SEQ ID NO: 15919 - DNA, 20 bp, synthetic construct
  misc_feature 1..20: note = chemically synthesized
  source 1..20: mol_type = other DNA
aacatatctcaatataataa

SEQ ID NO: 15920 - DNA, 20 bp, synthetic construct
  misc_feature 1..20: note = chemically synthesized
  source 1..20: mol_type = other DNA
agtcatatatgacaaaccca

SEQ ID NO: 15921 - DNA, 20 bp, synthetic construct
  misc_feature 1..20: note = chemically synthesized
  source 1..20: mol_type = other DNA
cagctaacatcatactgaat

SEQ ID NO: 15922 - DNA, 20 bp, synthetic construct
  misc_feature 1..20: note = chemically synthesized
  source 1..20: mol_type = other DNA
agctaacatcatactgaatt

SEQ ID NO: 15923 - DNA, 20 bp, synthetic construct
  misc_feature 1..20: note = chemically synthesized
  source 1..20: mol_type = other DNA
acatcatactgaattgggaa

SEQ ID NO: 15924 - DNA, 20 bp, synthetic construct
  misc_feature 1..20: note = chemically synthesized
  source 1..20: mol_type = other DNA
catactgaattgggaaaagc

SEQ ID NO: 15925 - DNA, 20 bp, synthetic construct
  misc_feature 1..20: note = chemically synthesized
  source 1..20: mol_type = other DNA
actgaattgggaaaagctgg

SEQ ID NO: 15926 - DNA, 20 bp, synthetic construct
  misc_feature 1..20: note = chemically synthesized
  source 1..20: mol_type = other DNA
aagctggaagcctttcctct

SEQ ID NO: 15927 - DNA, 20 bp, synthetic construct
  misc_feature 1..20: note = chemically synthesized
  source 1..20: mol_type = other DNA
tctaagaactgaaacaaaat

SEQ ID NO: 15928 - DNA, 20 bp, synthetic construct
  misc_feature 1..20: note = chemically synthesized
  source 1..20: mol_type = other DNA
ctaagaactgaaacaaaata

SEQ ID NO: 15929 - DNA, 20 bp, synthetic construct
  misc_feature 1..20: note = chemically synthesized
  source 1..20: mol_type = other DNA
actcctattcaatataatac

SEQ ID NO: 15930 - DNA, 20 bp, synthetic construct
  misc_feature 1..20: note = chemically synthesized
  source 1..20: mol_type = other DNA
cctattcaatataatactgg

SEQ ID NO: 15931 - DNA, 20 bp, synthetic construct
  misc_feature 1..20: note = chemically synthesized
  source 1..20: mol_type = other DNA
caatataatactggaagtcc

SEQ ID NO: 15932 - DNA, 20 bp, synthetic construct
  misc_feature 1..20: note = chemically synthesized
  source 1..20: mol_type = other DNA
aatactggaagtcctagcca

SEQ ID NO: 15933 - DNA, 20 bp, synthetic construct
  misc_feature 1..20: note = chemically synthesized
  source 1..20: mol_type = other DNA
gaagtcctagccacagcttt

SEQ ID NO: 15934 - DNA, 20 bp, synthetic construct
  misc_feature 1..20: note = chemically synthesized
  source 1..20: mol_type = other DNA
aagtcctagccacagctttc

SEQ ID NO: 15935 - DNA, 20 bp, synthetic construct
  misc_feature 1..20: note = chemically synthesized
  source 1..20: mol_type = other DNA
cctagccacagctttcaggt

SEQ ID NO: 15936 - DNA, 20 bp, synthetic construct
  misc_feature 1..20: note = chemically synthesized
  source 1..20: mol_type = other DNA
tagccacagctttcaggtca

SEQ ID NO: 15937 - DNA, 20 bp, synthetic construct
  misc_feature 1..20: note = chemically synthesized
  source 1..20: mol_type = other DNA
cacagctttcaggtcagaga

SEQ ID NO: 15938 - DNA, 20 bp, synthetic construct
  misc_feature 1..20: note = chemically synthesized
  source 1..20: mol_type = other DNA
gctttcaggtcagagaaaga

SEQ ID NO: 15939 - DNA, 20 bp, synthetic construct
  misc_feature 1..20: note = chemically synthesized
  source 1..20: mol_type = other DNA
tcaggtcagagaaagaaaga

SEQ ID NO: 15940 - DNA, 20 bp, synthetic construct
  misc_feature 1..20: note = chemically synthesized
  source 1..20: mol_type = other DNA
tcagagaaagaaagaaagaa

SEQ ID NO: 15941 - DNA, 20 bp, synthetic construct
  misc_feature 1..20: note = chemically synthesized
  source 1..20: mol_type = other DNA
cagagaaagaaagaaagaaa

SEQ ID NO: 15942 - DNA, 20 bp, synthetic construct
  misc_feature 1..20: note = chemically synthesized
  source 1..20: mol_type = other DNA
agaaagaaaaggcatgcaaa

SEQ ID NO: 15943 - DNA, 20 bp, synthetic construct
  misc_feature 1..20: note = chemically synthesized
  source 1..20: mol_type = other DNA
gaaagaaaaggcatgcaaat

SEQ ID NO: 15944 - DNA, 20 bp, synthetic construct
  misc_feature 1..20: note = chemically synthesized
  source 1..20: mol_type = other DNA
aaaaggcatgcaaataggaa

SEQ ID NO: 15945 - DNA, 20 bp, synthetic construct
  misc_feature 1..20: note = chemically synthesized
  source 1..20: mol_type = other DNA
catgcaaataggaaaagatg

SEQ ID NO: 15946 - DNA, 20 bp, synthetic construct
  misc_feature 1..20: note = chemically synthesized
  source 1..20: mol_type = other DNA
agtcaaactgtccatctttc

SEQ ID NO: 15947 - DNA, 20 bp, synthetic construct
  misc_feature 1..20: note = chemically synthesized
  source 1..20: mol_type = other DNA
agatgacatgattttatacc

SEQ ID NO: 15948 - DNA, 20 bp, synthetic construct
  misc_feature 1..20: note = chemically synthesized
  source 1..20: mol_type = other DNA
attttatacctagaaaaacc

SEQ ID NO: 15949 - DNA, 20 bp, synthetic construct
  misc_feature 1..20: note = chemically synthesized
  source 1..20: mol_type = other DNA
gaaaaaccaagactccacca

SEQ ID NO: 15950 - DNA, 20 bp, synthetic construct
  misc_feature 1..20: note = chemically synthesized
  source 1..20: mol_type = other DNA
agactccaccaaagcactct

SEQ ID NO: 15951 - DNA, 20 bp, synthetic construct
  misc_feature 1..20: note = chemically synthesized
  source 1..20: mol_type = other DNA
ttagcgctgaaaaataaatt

SEQ ID NO: 15952 - DNA, 20 bp, synthetic construct
  misc_feature 1..20: note = chemically synthesized
  source 1..20: mol_type = other DNA
gctgaaaaataaattcagta

SEQ ID NO: 15953 - DNA, 20 bp, synthetic construct
  misc_feature 1..20: note = chemically synthesized
  source 1..20: mol_type = other DNA
aaataaattcagtaaagtta

SEQ ID NO: 15954 - DNA, 20 bp, synthetic construct
  misc_feature 1..20: note = chemically synthesized
  source 1..20: mol_type = other DNA
aataaattcagtaaagttac

SEQ ID NO: 15955 - DNA, 20 bp, synthetic construct
  misc_feature 1..20: note = chemically synthesized
  source 1..20: mol_type = other DNA
taaattcagtaaagttacag

SEQ ID NO: 15956 - DNA, 20 bp, synthetic construct
  misc_feature 1..20: note = chemically synthesized
  source 1..20: mol_type = other DNA
aaagttacaggagacaaaat

SEQ ID NO: 15957 - DNA, 20 bp, synthetic construct
  misc_feature 1..20: note = chemically synthesized
  source 1..20: mol_type = other DNA
acaaaatcagcatatgaaac

SEQ ID NO: 15958 - DNA, 20 bp, synthetic construct
  misc_feature 1..20: note = chemically synthesized
  source 1..20: mol_type = other DNA
tctacacaccaataataaac

SEQ ID NO: 15959 - DNA, 20 bp, synthetic construct
  misc_feature 1..20: note = chemically synthesized
  source 1..20: mol_type = other DNA
acaccaataataaactagct

SEQ ID NO: 15960 - DNA, 20 bp, synthetic construct
  misc_feature 1..20: note = chemically synthesized
  source 1..20: mol_type = other DNA
ccaataataaactagctgag

SEQ ID NO: 15961 - DNA, 20 bp, synthetic construct
  misc_feature 1..20: note = chemically synthesized
  source 1..20: mol_type = other DNA
caataataaactagctgaga

SEQ ID NO: 15962 - DNA, 20 bp, synthetic construct
  misc_feature 1..20: note = chemically synthesized
  source 1..20: mol_type = other DNA
aactagctgagaaggaaatt

SEQ ID NO: 15963 - DNA, 20 bp, synthetic construct
  misc_feature 1..20: note = chemically synthesized
  source 1..20: mol_type = other DNA
tagctgagaaggaaattaag

SEQ ID NO: 15964 - DNA, 20 bp, synthetic construct
  misc_feature 1..20: note = chemically synthesized
  source 1..20: mol_type = other DNA
agctgagaaggaaattaaga

SEQ ID NO: 15965 - DNA, 20 bp, synthetic construct
  misc_feature 1..20: note = chemically synthesized
  source 1..20: mol_type = other DNA
gaaggcaatcccatttacaa

SEQ ID NO: 15966 - DNA, 20 bp, synthetic construct
  misc_feature 1..20: note = chemically synthesized
  source 1..20: mol_type = other DNA
tagctaaaaaataaaatatt

SEQ ID NO: 15967 - DNA, 20 bp, synthetic construct
  misc_feature 1..20: note = chemically synthesized
  source 1..20: mol_type = other DNA
agctaaaaaataaaatattt

SEQ ID NO: 15968 - DNA, 20 bp, synthetic construct
  misc_feature 1..20: note = chemically synthesized
  source 1..20: mol_type = other DNA
gctaaaaaataaaatattta

SEQ ID NO: 15969 - DNA, 20 bp, synthetic construct
  misc_feature 1..20: note = chemically synthesized
  source 1..20: mol_type = other DNA
atttagggataaatttaacc

SEQ ID NO: 15970 - DNA, 20 bp, synthetic construct
  misc_feature 1..20: note = chemically synthesized
  source 1..20: mol_type = other DNA
tttagggataaatttaacca

SEQ ID NO: 15971 - DNA, 20 bp, synthetic construct
  misc_feature 1..20: note = chemically synthesized
  source 1..20: mol_type = other DNA
ggaaccgaaaaacctctatt

SEQ ID NO: 15972 - DNA, 20 bp, synthetic construct
  misc_feature 1..20: note = chemically synthesized
  source 1..20: mol_type = other DNA
aaactacaaaacactgataa

SEQ ID NO: 15973 - DNA, 20 bp, synthetic construct
  misc_feature 1..20: note = chemically synthesized
  source 1..20: mol_type = other DNA
acactgataaaagaattgaa

SEQ ID NO: 15974 - DNA, 20 bp, synthetic construct
  misc_feature 1..20: note = chemically synthesized
  source 1..20: mol_type = other DNA
cactgataaaagaattgaaa

SEQ ID NO: 15975 - DNA, 20 bp, synthetic construct
  misc_feature 1..20: note = chemically synthesized
  source 1..20: mol_type = other DNA
gataaaagaattgaaaagga

SEQ ID NO: 15976 - DNA, 20 bp, synthetic construct
  misc_feature 1..20: note = chemically synthesized
  source 1..20: mol_type = other DNA
ttgaaaaggacagaaacaaa

SEQ ID NO: 15977 - DNA, 20 bp, synthetic construct
  misc_feature 1..20: note = chemically synthesized
  source 1..20: mol_type = other DNA
gaaaaggacagaaacaaatg

SEQ ID NO: 15978 - DNA, 20 bp, synthetic construct
  misc_feature 1..20: note = chemically synthesized
  source 1..20: mol_type = other DNA
aaaggacagaaacaaatgga

SEQ ID NO: 15979 - DNA, 20 bp, synthetic construct
  misc_feature 1..20: note = chemically synthesized
  source 1..20: mol_type = other DNA
ggagagatatcctatgttca

SEQ ID NO: 15980 - DNA, 20 bp, synthetic construct
  misc_feature 1..20: note = chemically synthesized
  source 1..20: mol_type = other DNA
gatatcctatgttcatggat

SEQ ID NO: 15981 - DNA, 20 bp, synthetic construct
  misc_feature 1..20: note = chemically synthesized
  source 1..20: mol_type = other DNA
aaaaattaatattgttaaaa

SEQ ID NO: 15982 - DNA, 20 bp, synthetic construct
  misc_feature 1..20: note = chemically synthesized
  source 1..20: mol_type = other DNA
taaaatggccatactaccca

SEQ ID NO: 15983 - DNA, 20 bp, synthetic construct
  misc_feature 1..20: note = chemically synthesized
  source 1..20: mol_type = other DNA
atactacccaaagcaatcta

SEQ ID NO: 15984 - DNA, 20 bp, synthetic construct
  misc_feature 1..20: note = chemically synthesized
  source 1..20: mol_type = other DNA
ctatatgaccgctatcaaaa

SEQ ID NO: 15985 - DNA, 20 bp, synthetic construct
  misc_feature 1..20: note = chemically synthesized
  source 1..20: mol_type = other DNA
aatagcaatgtcatttttca

SEQ ID NO: 15986 - DNA, 20 bp, synthetic construct
  misc_feature 1..20: note = chemically synthesized
  source 1..20: mol_type = other DNA
aatgtcatttttcacagaaa

SEQ ID NO: 15987 - DNA, 20 bp, synthetic construct
  misc_feature 1..20: note = chemically synthesized
  source 1..20: mol_type = other DNA
atttgtatgaaattaaaaaa

SEQ ID NO: 15988 - DNA, 20 bp, synthetic construct
  misc_feature 1..20: note = chemically synthesized
  source 1..20: mol_type = other DNA
atgaaattaaaaaatagctc

SEQ ID NO: 15989 - DNA, 20 bp, synthetic construct
  misc_feature 1..20: note = chemically synthesized
  source 1..20: mol_type = other DNA
aaattaaaaaatagctccag

SEQ ID NO: 15990 - DNA, 20 bp, synthetic construct
  misc_feature 1..20: note = chemically synthesized
  source 1..20: mol_type = other DNA
aaaaatagctccagtagcca

SEQ ID NO: 15991 - DNA, 20 bp, synthetic construct
  misc_feature 1..20: note = chemically synthesized
  source 1..20: mol_type = other DNA
ccaaagtcatcctgtgaaaa

SEQ ID NO: 15992 - DNA, 20 bp, synthetic construct
  misc_feature 1..20: note = chemically synthesized
  source 1..20: mol_type = other DNA
ctgtgaaaaaagaacaatgc

SEQ ID NO: 15993 - DNA, 20 bp, synthetic construct
  misc_feature 1..20: note = chemically synthesized
  source 1..20: mol_type = other DNA
gtgaaaaaagaacaatgcta

SEQ ID NO: 15994 - DNA, 20 bp, synthetic construct
  misc_feature 1..20: note = chemically synthesized
  source 1..20: mol_type = other DNA
tgaaaaaagaacaatgctag

SEQ ID NO: 15995 - DNA, 20 bp, synthetic construct
  misc_feature 1..20: note = chemically synthesized
  source 1..20: mol_type = other DNA
tatcatactacctgatttca

SEQ ID NO: 15996 - DNA, 20 bp, synthetic construct
  misc_feature 1..20: note = chemically synthesized
  source 1..20: mol_type = other DNA
gatttcaaagtatattacaa

SEQ ID NO: 15997 - DNA, 20 bp, synthetic construct
  misc_feature 1..20: note = chemically synthesized
  source 1..20: mol_type = other DNA
caaagtatattacaaaagta

SEQ ID NO: 15998 - DNA, 20 bp, synthetic construct
  misc_feature 1..20: note = chemically synthesized
  source 1..20: mol_type = other DNA
aaagtatattacaaaagtat

SEQ ID NO: 15999 - DNA, 20 bp, synthetic construct
  misc_feature 1..20: note = chemically synthesized
  source 1..20: mol_type = other DNA
caaaagtataggaacctaaa

SEQ ID NO: 16000 - DNA, 20 bp, synthetic construct
  misc_feature 1..20: note = chemically synthesized
  source 1..20: mol_type = other DNA
aaacagcatgatactgacat

SEQ ID NO: 16001 - DNA, 20 bp, synthetic construct
  misc_feature 1..20: note = chemically synthesized
  source 1..20: mol_type = other DNA
gcatgatactgacattagaa

SEQ ID NO: 16002 - DNA, 20 bp, synthetic construct
  misc_feature 1..20: note = chemically synthesized
  source 1..20: mol_type = other DNA
ctgacattagaacagacact

SEQ ID NO: 16003 - DNA, 20 bp, synthetic construct
  misc_feature 1..20: note = chemically synthesized
  source 1..20: mol_type = other DNA
agaacagacacttagaccaa

SEQ ID NO: 16004 - DNA, 20 bp, synthetic construct
  misc_feature 1..20: note = chemically synthesized
  source 1..20: mol_type = other DNA
acagacacttagaccaatgg

SEQ ID NO: 16005 - DNA, 20 bp, synthetic construct
  misc_feature 1..20: note = chemically synthesized
  source 1..20: mol_type = other DNA
agacacttagaccaatggaa

SEQ ID NO: 16006 - DNA, 20 bp, synthetic construct
  misc_feature 1..20: note = chemically synthesized
  source 1..20: mol_type = other DNA
cttagaccaatggaagagaa

SEQ ID NO: 16007 - DNA, 20 bp, synthetic construct
  misc_feature 1..20: note = chemically synthesized
  source 1..20: mol_type = other DNA
tagaccaatggaagagaata

SEQ ID NO: 16008 - DNA, 20 bp, synthetic construct
  misc_feature 1..20: note = chemically synthesized
  source 1..20: mol_type = other DNA
atggaagagaatagagaacc

SEQ ID NO: 16009 - DNA, 20 bp, synthetic construct
  misc_feature 1..20: note = chemically synthesized
  source 1..20: mol_type = other DNA
gaaatgcatccacatattta

SEQ ID NO: 16010 - DNA, 20 bp, synthetic construct
  misc_feature 1..20: note = chemically synthesized
  source 1..20: mol_type = other DNA
atccacatatttatagccaa

SEQ ID NO: 16011 - DNA, 20 bp, synthetic construct
  misc_feature 1..20: note = chemically synthesized
  source 1..20: mol_type = other DNA
tagccaacagattttcaaca

SEQ ID NO: 16012 - DNA, 20 bp, synthetic construct
  misc_feature 1..20: note = chemically synthesized
  source 1..20: mol_type = other DNA
agccaacagattttcaacaa

SEQ ID NO: 16013 - DNA, 20 bp, synthetic construct
  misc_feature 1..20: note = chemically synthesized
  source 1..20: mol_type = other DNA
agattttcaacaaaggtgac

SEQ ID NO: 16014 - DNA, 20 bp, synthetic construct
  misc_feature 1..20: note = chemically synthesized
  source 1..20: mol_type = other DNA
aggtgacaagaatatacatt

SEQ ID NO: 16015 - DNA, 20 bp, synthetic construct
  misc_feature 1..20: note = chemically synthesized
  source 1..20: mol_type = other DNA
ggtgacaagaatatacattg

SEQ ID NO: 16016 - DNA, 20 bp, synthetic construct
  misc_feature 1..20: note = chemically synthesized
  source 1..20: mol_type = other DNA
acaagaatatacattgagga

SEQ ID NO: 16017 - DNA, 20 bp, synthetic construct
  misc_feature 1..20: note = chemically synthesized
  source 1..20: mol_type = other DNA
caagaatatacattgaggaa

SEQ ID NO: 16018 - DNA, 20 bp, synthetic construct
  misc_feature 1..20: note = chemically synthesized
  source 1..20: mol_type = other DNA
tatacattgaggaaaggaca

SEQ ID NO: 16019 - DNA, 20 bp, synthetic construct
  misc_feature 1..20: note = chemically synthesized
  source 1..20: mol_type = other DNA
gaggaaaggacacagtgttc

SEQ ID NO: 16020 - DNA, 20 bp, synthetic construct
  misc_feature 1..20: note = chemically synthesized
  source 1..20: mol_type = other DNA
aggacacagtgttcaagaaa

SEQ ID NO: 16021 - DNA, 20 bp, synthetic construct
  misc_feature 1..20: note = chemically synthesized
  source 1..20: mol_type = other DNA
agaaatggtgctgaaaaaat

SEQ ID NO: 16022 - DNA, 20 bp, synthetic construct
  misc_feature 1..20: note = chemically synthesized
  source 1..20: mol_type = other DNA
tgaaaaaattggatatccat

SEQ ID NO: 16023 - DNA, 20 bp, synthetic construct
  misc_feature 1..20: note = chemically synthesized
  source 1..20: mol_type = other DNA
cattggatatccatgtgcaa

SEQ ID NO: 16024 - DNA, 20 bp, synthetic construct
  misc_feature 1..20: note = chemically synthesized
  source 1..20: mol_type = other DNA
catgtgcaaaagaataaaac

SEQ ID NO: 16025 - DNA, 20 bp, synthetic construct
  misc_feature 1..20: note = chemically synthesized
  source 1..20: mol_type = other DNA
ataaaactggactgctgata

SEQ ID NO: 16026 - DNA, 20 bp, synthetic construct
  misc_feature 1..20: note = chemically synthesized
  source 1..20: mol_type = other DNA
actggactgctgatatggtt

SEQ ID NO: 16027 - DNA, 20 bp, synthetic construct
  misc_feature 1..20: note = chemically synthesized
  source 1..20: mol_type = other DNA
aaatataatccccaacttct

SEQ ID NO: 16028 - DNA, 20 bp, synthetic construct
  misc_feature 1..20: note = chemically synthesized
  source 1..20: mol_type = other DNA
aatataatccccaacttctc

SEQ ID NO: 16029 - DNA, 20 bp, synthetic construct
  misc_feature 1..20: note = chemically synthesized
  source 1..20: mol_type = other DNA
tccccaacttctcaggatct

SEQ ID NO: 16030 - DNA, 20 bp, synthetic construct
  misc_feature 1..20: note = chemically synthesized
  source 1..20: mol_type = other DNA
ccaacttctcaggatcttgg

SEQ ID NO: 16031 - DNA, 20 bp, synthetic construct
  misc_feature 1..20: note = chemically synthesized
  source 1..20: mol_type = other DNA
cttctcaggatcttggcgga

SEQ ID NO: 16032 - DNA, 20 bp, synthetic construct
  misc_feature 1..20: note = chemically synthesized
  source 1..20: mol_type = other DNA
ttctcaggatcttggcggat

SEQ ID NO: 16033 - DNA, 20 bp, synthetic construct
  misc_feature 1..20: note = chemically synthesized
  source 1..20: mol_type = other DNA
ctcaggatcttggcggatgg

SEQ ID NO: 16034 - DNA, 20 bp, synthetic construct
  misc_feature 1..20: note = chemically synthesized
  source 1..20: mol_type = other DNA
tcaggatcttggcggatggg

SEQ ID NO: 16035 - DNA, 20 bp, synthetic construct
  misc_feature 1..20: note = chemically synthesized
  source 1..20: mol_type = other DNA
ggatcttggcggatgggagg

SEQ ID NO: 16036 - DNA, 20 bp, synthetic construct
  misc_feature 1..20: note = chemically synthesized
  source 1..20: mol_type = other DNA
gatcttggcggatgggaggt

SEQ ID NO: 16037 - DNA, 20 bp, synthetic construct
  misc_feature 1..20: note = chemically synthesized
  source 1..20: mol_type = other DNA
tggcggatgggaggtaggcc

SEQ ID NO: 16038 - DNA, 20 bp, synthetic construct
  misc_feature 1..20: note = chemically synthesized
  source 1..20: mol_type = other DNA
tgggaggtaggcctagattg

SEQ ID NO: 16039 - DNA, 20 bp, synthetic construct
  misc_feature 1..20: note = chemically synthesized
  source 1..20: mol_type = other DNA
cctagattgcagctccaact

SEQ ID NO: 16040 - DNA, 20 bp, synthetic construct
  misc_feature 1..20: note = chemically synthesized
  source 1..20: mol_type = other DNA
gattgcagctccaactcaga

SEQ ID NO: 16041 - DNA, 20 bp, synthetic construct
  misc_feature 1..20: note = chemically synthesized
  source 1..20: mol_type = other DNA
gcagctccaactcagatgga

SEQ ID NO: 16042 - DNA, 20 bp, synthetic construct
  misc_feature 1..20: note = chemically synthesized
  source 1..20: mol_type = other DNA
agctccaactcagatggaca

SEQ ID NO: 16043 - DNA, 20 bp, synthetic construct
  misc_feature 1..20: note = chemically synthesized
  source 1..20: mol_type = other DNA
tccaactcagatggacagag

SEQ ID NO: 16044 - DNA, 20 bp, synthetic construct
  misc_feature 1..20: note = chemically synthesized
  source 1..20: mol_type = other DNA
cagatggacagagcagcatg

SEQ ID NO: 16045 - DNA, 20 bp, synthetic construct
  misc_feature 1..20: note = chemically synthesized
  source 1..20: mol_type = other DNA
gatggacagagcagcatgtg

SEQ ID NO: 16046 - DNA, 20 bp, synthetic construct
  misc_feature 1..20: note = chemically synthesized
  source 1..20: mol_type = other DNA
atggacagagcagcatgtgg

SEQ ID NO: 16047 - DNA, 20 bp, synthetic construct
  misc_feature 1..20: note = chemically synthesized
  source 1..20: mol_type = other DNA
gaggctcgcattgtgaattt

SEQ ID NO: 16048 - DNA, 20 bp, synthetic construct
  misc_feature 1..20: note = chemically synthesized
  source 1..20: mol_type = other DNA
cgcattgtgaattttagctg

SEQ ID NO: 16049 - DNA, 20 bp, synthetic construct
  misc_feature 1..20: note = chemically synthesized
  source 1..20: mol_type = other DNA
ttgtgaattttagctgcaga

SEQ ID NO: 16050 - DNA, 20 bp, synthetic construct
  misc_feature 1..20: note = chemically synthesized
  source 1..20: mol_type = other DNA
tttagctgcagatagactgc

SEQ ID NO: 16051 - DNA, 20 bp, synthetic construct
  misc_feature 1..20: note = chemically synthesized
  source 1..20: mol_type = other DNA
gatagactgcaagaacaaac

SEQ ID NO: 16052 - DNA, 20 bp, synthetic construct
  misc_feature 1..20: note = chemically synthesized
  source 1..20: mol_type = other DNA
aagaacaaaccagcaatcct

SEQ ID NO: 16053 - DNA, 20 bp, synthetic construct
  misc_feature 1..20: note = chemically synthesized
  source 1..20: mol_type = other DNA
gaacaaaccagcaatcctga

SEQ ID NO: 16054 - DNA, 20 bp, synthetic construct
  misc_feature 1..20: note = chemically synthesized
  source 1..20: mol_type = other DNA
aacaaaccagcaatcctgag

SEQ ID NO: 16055 - DNA, 20 bp, synthetic construct
  misc_feature 1..20: note = chemically synthesized
  source 1..20: mol_type = other DNA
agcaatcctgagaggaccca

SEQ ID NO: 16056 - DNA, 20 bp, synthetic construct
  misc_feature 1..20: note = chemically synthesized
  source 1..20: mol_type = other DNA
gaggacccacagaccctctg

SEQ ID NO: 16057 - DNA, 20 bp, synthetic construct
  misc_feature 1..20: note = chemically synthesized
  source 1..20: mol_type = other DNA
aggacccacagaccctctga

SEQ ID NO: 16058 - DNA, 20 bp, synthetic construct
  misc_feature 1..20: note = chemically synthesized
  source 1..20: mol_type = other DNA
acccacagaccctctgaagg

SEQ ID NO: 16059 - DNA, 20 bp, synthetic construct
  misc_feature 1..20: note = chemically synthesized
  source 1..20: mol_type = other DNA
cacagaccctctgaaggaag

SEQ ID NO: 16060 - DNA, 20 bp, synthetic construct
  misc_feature 1..20: note = chemically synthesized
  source 1..20: mol_type = other DNA
aaggaagtagattgctcctg

SEQ ID NO: 16061 - DNA, 20 bp, synthetic construct
  misc_feature 1..20: note = chemically synthesized
  source 1..20: mol_type = other DNA
aggaagtagattgctcctgc

SEQ ID NO: 16062 - DNA, 20 bp, synthetic construct
  misc_feature 1..20: note = chemically synthesized
  source 1..20: mol_type = other DNA
tagattgctcctgcaggacc

SEQ ID NO: 16063 - DNA, 20 bp, synthetic construct
  misc_feature 1..20: note = chemically synthesized
  source 1..20: mol_type = other DNA
agattgctcctgcaggaccc

SEQ ID NO: 16064 - DNA, 20 bp, synthetic construct
  misc_feature 1..20: note = chemically synthesized
  source 1..20: mol_type = other DNA
attgctcctgcaggacccag

SEQ ID NO: 16065 - DNA, 20 bp, synthetic construct
  misc_feature 1..20: note = chemically synthesized
  source 1..20: mol_type = other DNA
ggagacaccccaaatactgt

SEQ ID NO: 16066 - DNA, 20 bp, synthetic construct
  misc_feature 1..20: note = chemically synthesized
  source 1..20: mol_type = other DNA
tactgtgagtgccccaactg

SEQ ID NO: 16067 - DNA, 20 bp, synthetic construct
  misc_feature 1..20: note = chemically synthesized
  source 1..20: mol_type = other DNA
tgtgagtgccccaactgcgg

SEQ ID NO: 16068 - DNA, 20 bp, synthetic construct
  misc_feature 1..20: note = chemically synthesized
  source 1..20: mol_type = other DNA
gagtgccccaactgcggaag

SEQ ID NO: 16069 - DNA, 20 bp, synthetic construct
  misc_feature 1..20: note = chemically synthesized
  source 1..20: mol_type = other DNA
agtgccccaactgcggaagt

SEQ ID NO: 16070 - DNA, 20 bp, synthetic construct
  misc_feature 1..20: note = chemically synthesized
  source 1..20: mol_type = other DNA
ccccaactgcggaagtggga

SEQ ID NO: 16071 - DNA, 20 bp, synthetic construct
  misc_feature 1..20: note = chemically synthesized
  source 1..20: mol_type = other DNA
cccaactgcggaagtgggaa

SEQ ID NO: 16072 - DNA, 20 bp, synthetic construct
  misc_feature 1..20: note = chemically synthesized
  source 1..20: mol_type = other DNA
ccaactgcggaagtgggaaa

SEQ ID NO: 16073 - DNA, 20 bp, synthetic construct
  misc_feature 1..20: note = chemically synthesized
  source 1..20: mol_type = other DNA
aactgcggaagtgggaaagg

SEQ ID NO: 16074 - DNA, 20 bp, synthetic construct
  misc_feature 1..20: note = chemically synthesized
  source 1..20: mol_type = other DNA
tcctaaacacacactcccac

SEQ ID NO: 16075 - DNA, 20 bp, synthetic construct
  misc_feature 1..20: note = chemically synthesized
  source 1..20: mol_type = other DNA
ctaaacacacactcccactg

SEQ ID NO: 16076 - DNA, 20 bp, synthetic construct
  misc_feature 1..20: note = chemically synthesized
  source 1..20: mol_type = other DNA
cactcccactggagaaactg

SEQ ID NO: 16077 - DNA, 20 bp, synthetic construct
  misc_feature 1..20: note = chemically synthesized
  source 1..20: mol_type = other DNA
actcccactggagaaactga

SEQ ID NO: 16078 - DNA, 20 bp, synthetic construct
  misc_feature 1..20: note = chemically synthesized
  source 1..20: mol_type = other DNA
agaaactgaaggtctgtttg

SEQ ID NO: 16079 - DNA, 20 bp, synthetic construct
  misc_feature 1..20: note = chemically synthesized
  source 1..20: mol_type = other DNA
gaaactgaaggtctgtttgt

SEQ ID NO: 16080 - DNA, 20 bp, synthetic construct
  misc_feature 1..20: note = chemically synthesized
  source 1..20: mol_type = other DNA
aactgaaggtctgtttgtgg

SEQ ID NO: 16081 - DNA, 20 bp, synthetic construct
  misc_feature 1..20: note = chemically synthesized
  source 1..20: mol_type = other DNA
tgaaggtctgtttgtgggag

SEQ ID NO: 16082 - DNA, 20 bp, synthetic construct
  misc_feature 1..20: note = chemically synthesized
  source 1..20: mol_type = other DNA
gagaagtttctgaccttacc

SEQ ID NO: 16083 - DNA, 20 bp, synthetic construct
  misc_feature 1..20: note = chemically synthesized
  source 1..20: mol_type = other DNA
gaagtttctgaccttacctg

SEQ ID NO: 16084 - DNA, 20 bp, synthetic construct
  misc_feature 1..20: note = chemically synthesized
  source 1..20: mol_type = other DNA
ttctgaccttacctggagtt

SEQ ID NO: 16085 - DNA, 20 bp, synthetic construct
  misc_feature 1..20: note = chemically synthesized
  source 1..20: mol_type = other DNA
tacctggagttgagttaact

SEQ ID NO: 16086 - DNA, 20 bp, synthetic construct
  misc_feature 1..20: note = chemically synthesized
  source 1..20: mol_type = other DNA
cctggagttgagttaactta

SEQ ID NO: 16087 - DNA, 20 bp, synthetic construct
  misc_feature 1..20: note = chemically synthesized
  source 1..20: mol_type = other DNA
tggagttgagttaacttaga

SEQ ID NO: 16088 - DNA, 20 bp, synthetic construct
  misc_feature 1..20: note = chemically synthesized
  source 1..20: mol_type = other DNA
ttgagttaacttagagagct

SEQ ID NO: 16089 - DNA, 20 bp, synthetic construct
  misc_feature 1..20: note = chemically synthesized
  source 1..20: mol_type = other DNA
ttagagagctgagcaaaata

SEQ ID NO: 16090 - DNA, 20 bp, synthetic construct
  misc_feature 1..20: note = chemically synthesized
  source 1..20: mol_type = other DNA
tagagagctgagcaaaatac

SEQ ID NO: 16091 - DNA, 20 bp, synthetic construct
  misc_feature 1..20: note = chemically synthesized
  source 1..20: mol_type = other DNA
agctgagcaaaatacaggtg

SEQ ID NO: 16092 - DNA, 20 bp, synthetic construct
  misc_feature 1..20: note = chemically synthesized
  source 1..20: mol_type = other DNA
ctgagcaaaatacaggtgta

SEQ ID NO: 16093 - DNA, 20 bp, synthetic construct
  misc_feature 1..20: note = chemically synthesized
  source 1..20: mol_type = other DNA
tgagcaaaatacaggtgtag

SEQ ID NO: 16094 - DNA, 20 bp, synthetic construct
  misc_feature 1..20: note = chemically synthesized
  source 1..20: mol_type = other DNA
gcaaaatacaggtgtagagg

SEQ ID NO: 16095 - DNA, 20 bp, synthetic construct
  misc_feature 1..20: note = chemically synthesized
  source 1..20: mol_type = other DNA
aaatacaggtgtagaggaag

SEQ ID NO: 16096 - DNA, 20 bp, synthetic construct
  misc_feature 1..20: note = chemically synthesized
  source 1..20: mol_type = other DNA
acaggtgtagaggaagcagt

SEQ ID NO: 16097 - DNA, 20 bp, synthetic construct
  misc_feature 1..20: note = chemically synthesized
  source 1..20: mol_type = other DNA
gtgtagaggaagcagtgaga

SEQ ID NO: 16098 - DNA, 20 bp, synthetic construct
  misc_feature 1..20: note = chemically synthesized
  source 1..20: mol_type = other DNA
tgtagaggaagcagtgagaa

SEQ ID NO: 16099 - DNA, 20 bp, synthetic construct
  misc_feature 1..20: note = chemically synthesized
  source 1..20: mol_type = other DNA
ggaagcagtgagaaaggccc

SEQ ID NO: 16100 - DNA, 20 bp, synthetic construct
  misc_feature 1..20: note = chemically synthesized
  source 1..20: mol_type = other DNA
gaagcagtgagaaaggccct

SEQ ID NO: 16101 - DNA, 20 bp, synthetic construct
  misc_feature 1..20: note = chemically synthesized
  source 1..20: mol_type = other DNA
agcagtgagaaaggccctgg

SEQ ID NO: 16102 - DNA, 20 bp, synthetic construct
  misc_feature 1..20: note = chemically synthesized
  source 1..20: mol_type = other DNA
gaaaggccctgggagctcac

SEQ ID NO: 16103 - DNA, 20 bp, synthetic construct
  misc_feature 1..20: note = chemically synthesized
  source 1..20: mol_type = other DNA
aaaggccctgggagctcact

SEQ ID NO: 16104 - DNA, 20 bp, synthetic construct
  misc_feature 1..20: note = chemically synthesized
  source 1..20: mol_type = other DNA
tgggagctcactgggtccct

SEQ ID NO: 16105 - DNA, 20 bp, synthetic construct
  misc_feature 1..20: note = chemically synthesized
  source 1..20: mol_type = other DNA
gagctcactgggtccctgag

SEQ ID NO: 16106 - DNA, 20 bp, synthetic construct
  misc_feature 1..20: note = chemically synthesized
  source 1..20: mol_type = other DNA
agctcactgggtccctgagc

SEQ ID NO: 16107 - DNA, 20 bp, synthetic construct
  misc_feature 1..20: note = chemically synthesized
  source 1..20: mol_type = other DNA
ctgagcaggccattcctgcc

SEQ ID NO: 16108 - DNA, 20 bp, synthetic construct
  misc_feature 1..20: note = chemically synthesized
  source 1..20: mol_type = other DNA
caggccattcctgcctggca

SEQ ID NO: 16109 - DNA, 20 bp, synthetic construct
  misc_feature 1..20: note = chemically synthesized
  source 1..20: mol_type = other DNA
ccattcctgcctggcatagc

SEQ ID NO: 16110 - DNA, 20 bp, synthetic construct
  misc_feature 1..20: note = chemically synthesized
  source 1..20: mol_type = other DNA
cattcctgcctggcatagcc

SEQ ID NO: 16111 - DNA, 20 bp, synthetic construct
  misc_feature 1..20: note = chemically synthesized
  source 1..20: mol_type = other DNA
ttactaacattgaatgtaaa

SEQ ID NO: 16112 - DNA, 20 bp, synthetic construct
  misc_feature 1..20: note = chemically synthesized
  source 1..20: mol_type = other DNA
ggcctaaatgctccacttaa

SEQ ID NO: 16113 - DNA, 20 bp, synthetic construct
  misc_feature 1..20: note = chemically synthesized
  source 1..20: mol_type = other DNA
gcctaaatgctccacttaaa

SEQ ID NO: 16114 - DNA, 20 bp, synthetic construct
  misc_feature 1..20: note = chemically synthesized
  source 1..20: mol_type = other DNA
cctaaatgctccacttaaaa

SEQ ID NO: 16115 - DNA, 20 bp, synthetic construct
  misc_feature 1..20: note = chemically synthesized
  source 1..20: mol_type = other DNA
ctccacttaaaagggtgaaa

SEQ ID NO: 16116 - DNA, 20 bp, synthetic construct
  misc_feature 1..20: note = chemically synthesized
  source 1..20: mol_type = other DNA
tccacttaaaagggtgaaaa

SEQ ID NO: 16117 - DNA, 20 bp, synthetic construct
  misc_feature 1..20: note = chemically synthesized
  source 1..20: mol_type = other DNA
aaaaaggtatttcatgcaaa

SEQ ID NO: 16118 - DNA, 20 bp, synthetic construct
  misc_feature 1..20: note = chemically synthesized
  source 1..20: mol_type = other DNA
ttcatgcaaatggccaccaa

SEQ ID NO: 16119 - DNA, 20 bp, synthetic construct
  misc_feature 1..20: note = chemically synthesized
  source 1..20: mol_type = other DNA
tgcaaatggccaccaaaagt

SEQ ID NO: 16120 - DNA, 20 bp, synthetic construct
  misc_feature 1..20: note = chemically synthesized
  source 1..20: mol_type = other DNA
aaatggccaccaaaagtgag

SEQ ID NO: 16121 - DNA, 20 bp, synthetic construct
  misc_feature 1..20: note = chemically synthesized
  source 1..20: mol_type = other DNA
aatggccaccaaaagtgagt

SEQ ID NO: 16122 - DNA, 20 bp, synthetic construct
  misc_feature 1..20: note = chemically synthesized
  source 1..20: mol_type = other DNA
agtaggcaaaacaaacttta

SEQ ID NO: 16123 - DNA, 20 bp, synthetic construct
  misc_feature 1..20: note = chemically synthesized
  source 1..20: mol_type = other DNA
caaaacaaactttaaagcaa

SEQ ID NO: 16124 - DNA, 20 bp, synthetic construct
  misc_feature 1..20: note = chemically synthesized
  source 1..20: mol_type = other DNA
aacaaactttaaagcaacag

SEQ ID NO: 16125 - DNA, 20 bp, synthetic construct
  misc_feature 1..20: note = chemically synthesized
  source 1..20: mol_type = other DNA
tttaaagcaacagcagttaa

SEQ ID NO: 16126 - DNA, 20 bp, synthetic construct
  misc_feature 1..20: note = chemically synthesized
  source 1..20: mol_type = other DNA
taaagcaacagcagttaaaa

SEQ ID NO: 16127 - DNA, 20 bp, synthetic construct
  misc_feature 1..20: note = chemically synthesized
  source 1..20: mol_type = other DNA
aacagcagttaaaagagaca

SEQ ID NO: 16128 - DNA, 20 bp, synthetic construct
  misc_feature 1..20: note = chemically synthesized
  source 1..20: mol_type = other DNA
cagcagttaaaagagacaaa

SEQ ID NO: 16129 - DNA, 20 bp, synthetic construct
  misc_feature 1..20: note = chemically synthesized
  source 1..20: mol_type = other DNA
agcagttaaaagagacaaag

SEQ ID NO: 16130 - DNA, 20 bp, synthetic construct
  misc_feature 1..20: note = chemically synthesized
  source 1..20: mol_type = other DNA
gcagttaaaagagacaaaga

SEQ ID NO: 16131 - DNA, 20 bp, synthetic construct
  misc_feature 1..20: note = chemically synthesized
  source 1..20: mol_type = other DNA
caaagagggacattatataa

SEQ ID NO: 16132 - DNA, 20 bp, synthetic construct
  misc_feature 1..20: note = chemically synthesized
  source 1..20: mol_type = other DNA
gggacattatataatggtaa

SEQ ID NO: 16133 - DNA, 20 bp, synthetic construct
  misc_feature 1..20: note = chemically synthesized
  source 1..20: mol_type = other DNA
ggacattatataatggtaaa

SEQ ID NO: 16134 - DNA, 20 bp, synthetic construct
  misc_feature 1..20: note = chemically synthesized
  source 1..20: mol_type = other DNA
tggtaaaaggccttgtccaa

SEQ ID NO: 16135 - DNA, 20 bp, synthetic construct
  misc_feature 1..20: note = chemically synthesized
  source 1..20: mol_type = other DNA
ggtaaaaggccttgtccaac

SEQ ID NO: 16136 - DNA, 20 bp, synthetic construct
  misc_feature 1..20: note = chemically synthesized
  source 1..20: mol_type = other DNA
aacatatatgcacctaacac

SEQ ID NO: 16137 - DNA, 20 bp, synthetic construct
  misc_feature 1..20: note = chemically synthesized
  source 1..20: mol_type = other DNA
catatatgcacctaacactg

SEQ ID NO: 16138 - DNA, 20 bp, synthetic construct
  misc_feature 1..20: note = chemically synthesized
  source 1..20: mol_type = other DNA
cactggagctcccaaattta

SEQ ID NO: 16139 - DNA, 20 bp, synthetic construct
  misc_feature 1..20: note = chemically synthesized
  source 1..20: mol_type = other DNA
atttatagaacaattactaa

SEQ ID NO: 16140 - DNA, 20 bp, synthetic construct
  misc_feature 1..20: note = chemically synthesized
  source 1..20: mol_type = other DNA
gaacaattactaatagacct

SEQ ID NO: 16141 - DNA, 20 bp, synthetic construct
  misc_feature 1..20: note = chemically synthesized
  source 1..20: mol_type = other DNA
tactaatagacctaagaaat

SEQ ID NO: 16142 - DNA, 20 bp, synthetic construct
  misc_feature 1..20: note = chemically synthesized
  source 1..20: mol_type = other DNA
aatagacctaagaaatgaga

SEQ ID NO: 16143 - DNA, 20 bp, synthetic construct
  misc_feature 1..20: note = chemically synthesized
  source 1..20: mol_type = other DNA
gacctaagaaatgagataga

SEQ ID NO: 16144 - DNA, 20 bp, synthetic construct
  misc_feature 1..20: note = chemically synthesized
  source 1..20: mol_type = other DNA
gatagacagcaacacaataa

SEQ ID NO: 16145 - DNA, 20 bp, synthetic construct
  misc_feature 1..20: note = chemically synthesized
  source 1..20: mol_type = other DNA
agacagcaacacaataatag

SEQ ID NO: 16146 - DNA, 20 bp, synthetic construct
  misc_feature 1..20: note = chemically synthesized
  source 1..20: mol_type = other DNA
gacagcaacacaataatagt

SEQ ID NO: 16147 - DNA, 20 bp, synthetic construct
  misc_feature 1..20: note = chemically synthesized
  source 1..20: mol_type = other DNA
acagcaacacaataatagtg

SEQ ID NO: 16148 - DNA, 20 bp, synthetic construct
  misc_feature 1..20: note = chemically synthesized
  source 1..20: mol_type = other DNA
cagcaacacaataatagtgg

SEQ ID NO: 16149 - DNA, 20 bp, synthetic construct
  misc_feature 1..20: note = chemically synthesized
  source 1..20: mol_type = other DNA
ggacttcaatacttcattga

SEQ ID NO: 16150 - DNA, 20 bp, synthetic construct
  misc_feature 1..20: note = chemically synthesized
  source 1..20: mol_type = other DNA
caatacttcattgacagcac

SEQ ID NO: 16151 - DNA, 20 bp, synthetic construct
  misc_feature 1..20: note = chemically synthesized
  source 1..20: mol_type = other DNA
acttcattgacagcactaga

SEQ ID NO: 16152 - DNA, 20 bp, synthetic construct
  misc_feature 1..20: note = chemically synthesized
  source 1..20: mol_type = other DNA
acagcactagacagttcatc

SEQ ID NO: 16153 - DNA, 20 bp, synthetic construct
  misc_feature 1..20: note = chemically synthesized
  source 1..20: mol_type = other DNA
cactagacagttcatcaaga

SEQ ID NO: 16154 - DNA, 20 bp, synthetic construct
  misc_feature 1..20: note = chemically synthesized
  source 1..20: mol_type = other DNA
agacagttcatcaagacaga

SEQ ID NO: 16155 - DNA, 20 bp, synthetic construct
  misc_feature 1..20: note = chemically synthesized
  source 1..20: mol_type = other DNA
gaaagtcaacaaaaaaataa

SEQ ID NO: 16156 - DNA, 20 bp, synthetic construct
  misc_feature 1..20: note = chemically synthesized
  source 1..20: mol_type = other DNA
aatggatttaaattatacct

SEQ ID NO: 16157 - DNA, 20 bp, synthetic construct
  misc_feature 1..20: note = chemically synthesized
  source 1..20: mol_type = other DNA
aaattataccttagaacaaa

SEQ ID NO: 16158 - DNA, 20 bp, synthetic construct
  misc_feature 1..20: note = chemically synthesized
  source 1..20: mol_type = other DNA
cttagaacaaatggacttaa

SEQ ID NO: 16159 - DNA, 20 bp, synthetic construct
  misc_feature 1..20: note = chemically synthesized
  source 1..20: mol_type = other DNA
atggacttaacagttatata

SEQ ID NO: 16160 - DNA, 20 bp, synthetic construct
  misc_feature 1..20: note = chemically synthesized
  source 1..20: mol_type = other DNA
aacatttcatccaataacca

SEQ ID NO: 16161 - DNA, 20 bp, synthetic construct
  misc_feature 1..20: note = chemically synthesized
  source 1..20: mol_type = other DNA
agaacacacattctattcaa

SEQ ID NO: 16162 - DNA, 20 bp, synthetic construct
  misc_feature 1..20: note = chemically synthesized
  source 1..20: mol_type = other DNA
acattctattcaacagcgcg

SEQ ID NO: 16163 - DNA, 20 bp, synthetic construct
  misc_feature 1..20: note = chemically synthesized
  source 1..20: mol_type = other DNA
cagcgcgtggaaatttctcc

SEQ ID NO: 16164 - DNA, 20 bp, synthetic construct
  misc_feature 1..20: note = chemically synthesized
  source 1..20: mol_type = other DNA
agcgcgtggaaatttctcca

SEQ ID NO: 16165 - DNA, 20 bp, synthetic construct
  misc_feature 1..20: note = chemically synthesized
  source 1..20: mol_type = other DNA
gcgtggaaatttctccaagg

SEQ ID NO: 16166 - DNA, 20 bp, synthetic construct
  misc_feature 1..20: note = chemically synthesized
  source 1..20: mol_type = other DNA
ctccaaggtagaccatatga

SEQ ID NO: 16167 - DNA, 20 bp, synthetic construct
  misc_feature 1..20: note = chemically synthesized
  source 1..20: mol_type = other DNA
tccaaggtagaccatatgat

SEQ ID NO: 16168 - DNA, 20 bp, synthetic construct
  misc_feature 1..20: note = chemically synthesized
  source 1..20: mol_type = other DNA
catatgataggccatgaaat

SEQ ID NO: 16169 - DNA, 20 bp, synthetic construct
  misc_feature 1..20: note = chemically synthesized
  source 1..20: mol_type = other DNA
agcctcaataaatttactaa

SEQ ID NO: 16170 - DNA, 20 bp, synthetic construct
  misc_feature 1..20: note = chemically synthesized
  source 1..20: mol_type = other DNA
tttactaacagaccaataac

SEQ ID NO: 16171 - DNA, 20 bp, synthetic construct
  misc_feature 1..20: note = chemically synthesized
  source 1..20: mol_type = other DNA
actaacagaccaataacaag

SEQ ID NO: 16172 - DNA, 20 bp, synthetic construct
  misc_feature 1..20: note = chemically synthesized
  source 1..20: mol_type = other DNA
acagaccaataacaagcagt

SEQ ID NO: 16173 - DNA, 20 bp, synthetic construct
  misc_feature 1..20: note = chemically synthesized
  source 1..20: mol_type = other DNA
aacaagcagtgagatttaat

SEQ ID NO: 16174 - DNA, 20 bp, synthetic construct
  misc_feature 1..20: note = chemically synthesized
  source 1..20: mol_type = other DNA
aaaaattaccaaccaaaaaa

SEQ ID NO: 16175 - DNA, 20 bp, synthetic construct
  misc_feature 1..20: note = chemically synthesized
  source 1..20: mol_type = other DNA
ttaccaaccaaaaaaaagtt

SEQ ID NO: 16176 - DNA, 20 bp, synthetic construct
  misc_feature 1..20: note = chemically synthesized
  source 1..20: mol_type = other DNA
taccaaccaaaaaaaagttc

SEQ ID NO: 16177 - DNA, 20 bp, synthetic construct
  misc_feature 1..20: note = chemically synthesized
  source 1..20: mol_type = other DNA
accaaaaaaaagttcaggac

SEQ ID NO: 16178 - DNA, 20 bp, synthetic construct
  misc_feature 1..20: note = chemically synthesized
  source 1..20: mol_type = other DNA
aaaaaaagttcaggaccaga

SEQ ID NO: 16179 - DNA, 20 bp, synthetic construct
  misc_feature 1..20: note = chemically synthesized
  source 1..20: mol_type = other DNA
aggaccagatggattcacaa

SEQ ID NO: 16180 - DNA, 20 bp, synthetic construct
  misc_feature 1..20: note = chemically synthesized
  source 1..20: mol_type = other DNA
gattcacaacagaattctac

SEQ ID NO: 16181 - DNA, 20 bp, synthetic construct
  misc_feature 1..20: note = chemically synthesized
  source 1..20: mol_type = other DNA
agaattctactagacattca

SEQ ID NO: 16182 - DNA, 20 bp, synthetic construct
  misc_feature 1..20: note = chemically synthesized
  source 1..20: mol_type = other DNA
aattctactagacattcaaa

SEQ ID NO: 16183 - DNA, 20 bp, synthetic construct
  misc_feature 1..20: note = chemically synthesized
  source 1..20: mol_type = other DNA
attctactagacattcaaag

SEQ ID NO: 16184 - DNA, 20 bp, synthetic construct
  misc_feature 1..20: note = chemically synthesized
  source 1..20: mol_type = other DNA
ctagacattcaaagaggaat

SEQ ID NO: 16185 - DNA, 20 bp, synthetic construct
  misc_feature 1..20: note = chemically synthesized
  source 1..20: mol_type = other DNA
tctttttgacactattctac

SEQ ID NO: 16186 - DNA, 20 bp, synthetic construct
  misc_feature 1..20: note = chemically synthesized
  source 1..20: mol_type = other DNA
tttgacactattctacaaga

SEQ ID NO: 16187 - DNA, 20 bp, synthetic construct
  misc_feature 1..20: note = chemically synthesized
  source 1..20: mol_type = other DNA
actattctacaagacagata

SEQ ID NO: 16188 - DNA, 20 bp, synthetic construct
  misc_feature 1..20: note = chemically synthesized
  source 1..20: mol_type = other DNA
attctacaagacagataaag

SEQ ID NO: 16189 - DNA, 20 bp, synthetic construct
  misc_feature 1..20: note = chemically synthesized
  source 1..20: mol_type = other DNA
ttctacaagacagataaaga

SEQ ID NO: 16190 - DNA, 20 bp, synthetic construct
  misc_feature 1..20: note = chemically synthesized
  source 1..20: mol_type = other DNA
ctgccctaattcattctatg

SEQ ID NO: 16191 - DNA, 20 bp, synthetic construct
  misc_feature 1..20: note = chemically synthesized
  source 1..20: mol_type = other DNA
cctaattcattctatgaagc

SEQ ID NO: 16192 - DNA, 20 bp, synthetic construct
  misc_feature 1..20: note = chemically synthesized
  source 1..20: mol_type = other DNA
agccagcatcacaccaaaac

SEQ ID NO: 16193 - DNA, 20 bp, synthetic construct
  misc_feature 1..20: note = chemically synthesized
  source 1..20: mol_type = other DNA
gccagcatcacaccaaaacc

SEQ ID NO: 16194 - DNA, 20 bp, synthetic construct
  misc_feature 1..20: note = chemically synthesized
  source 1..20: mol_type = other DNA
ccagcatcacaccaaaacca

SEQ ID NO: 16195 - DNA, 20 bp, synthetic construct
  misc_feature 1..20: note = chemically synthesized
  source 1..20: mol_type = other DNA
gcatcacaccaaaaccaggg

SEQ ID NO: 16196 - DNA, 20 bp, synthetic construct
  misc_feature 1..20: note = chemically synthesized
  source 1..20: mol_type = other DNA
catcacaccaaaaccaggga

SEQ ID NO: 16197 - DNA, 20 bp, synthetic construct
  misc_feature 1..20: note = chemically synthesized
  source 1..20: mol_type = other DNA
agggaaggacataaccaaaa

SEQ ID NO: 16198 - DNA, 20 bp, synthetic construct
  misc_feature 1..20: note = chemically synthesized
  source 1..20: mol_type = other DNA
ataaccaaaaaagaaaacta

SEQ ID NO: 16199 - DNA, 20 bp, synthetic construct
  misc_feature 1..20: note = chemically synthesized
  source 1..20: mol_type = other DNA
aaaagaaaactacagactga

SEQ ID NO: 16200 - DNA, 20 bp, synthetic construct
  misc_feature 1..20: note = chemically synthesized
  source 1..20: mol_type = other DNA
actgatagccttgatgaaca

SEQ ID NO: 16201 - DNA, 20 bp, synthetic construct
  misc_feature 1..20: note = chemically synthesized
  source 1..20: mol_type = other DNA
taaaatccttaacaaaatac

SEQ ID NO: 16202 - DNA, 20 bp, synthetic construct
  misc_feature 1..20: note = chemically synthesized
  source 1..20: mol_type = other DNA
aaattcaacaacataacaaa

SEQ ID NO: 16203 - DNA, 20 bp, synthetic construct
  misc_feature 1..20: note = chemically synthesized
  source 1..20: mol_type = other DNA
aaagataatccaccatgatc

SEQ ID NO: 16204 - DNA, 20 bp, synthetic construct
  misc_feature 1..20: note = chemically synthesized
  source 1..20: mol_type = other DNA
gataatccaccatgatcaag

SEQ ID NO: 16205 - DNA, 20 bp, synthetic construct
  misc_feature 1..20: note = chemically synthesized
  source 1..20: mol_type = other DNA
ataatccaccatgatcaagc

SEQ ID NO: 16206 - DNA, 20 bp, synthetic construct
  misc_feature 1..20: note = chemically synthesized
  source 1..20: mol_type = other DNA
tgatcaagcaggttccatgc

SEQ ID NO: 16207 - DNA, 20 bp, synthetic construct
  misc_feature 1..20: note = chemically synthesized
  source 1..20: mol_type = other DNA
gatcaagcaggttccatgcc

SEQ ID NO: 16208 - DNA, 20 bp, synthetic construct
  misc_feature 1..20: note = chemically synthesized
  source 1..20: mol_type = other DNA
atcaagcaggttccatgcca

SEQ ID NO: 16209 - DNA, 20 bp, synthetic construct
  misc_feature 1..20: note = chemically synthesized
  source 1..20: mol_type = other DNA
caggttccatgccagggatg

SEQ ID NO: 16210 - DNA, 20 bp, synthetic construct
  misc_feature 1..20: note = chemically synthesized
  source 1..20: mol_type = other DNA
aggttccatgccagggatgc

SEQ ID NO: 16211 - DNA, 20 bp, synthetic construct
  misc_feature 1..20: note = chemically synthesized
  source 1..20: mol_type = other DNA
ggttccatgccagggatgca

SEQ ID NO: 16212 - DNA, 20 bp, synthetic construct
  misc_feature 1..20: note = chemically synthesized
  source 1..20: mol_type = other DNA
ccatgccagggatgcagggt

SEQ ID NO: 16213 - DNA, 20 bp, synthetic construct
  misc_feature 1..20: note = chemically synthesized
  source 1..20: mol_type = other DNA
agggttggtttgacatctgc

SEQ ID NO: 16214 - DNA, 20 bp, synthetic construct
  misc_feature 1..20: note = chemically synthesized
  source 1..20: mol_type = other DNA
tttgacatctgcaagtcaat

SEQ ID NO: 16215 - DNA, 20 bp, synthetic construct
  misc_feature 1..20: note = chemically synthesized
  source 1..20: mol_type = other DNA
agtgtgatacaccacataaa

SEQ ID NO: 16216 - DNA, 20 bp, synthetic construct
  misc_feature 1..20: note = chemically synthesized
  source 1..20: mol_type = other DNA
aaattacatgatcatctcaa

SEQ ID NO: 16217 - DNA, 20 bp, synthetic construct
  misc_feature 1..20: note = chemically synthesized
  source 1..20: mol_type = other DNA
catgatcatctcaatagatg

SEQ ID NO: 16218 - DNA, 20 bp, synthetic construct
  misc_feature 1..20: note = chemically synthesized
  source 1..20: mol_type = other DNA
catctcaatagatgcagaaa

SEQ ID NO: 16219 - DNA, 20 bp, synthetic construct
  misc_feature 1..20: note = chemically synthesized
  source 1..20: mol_type = other DNA
aaaaagcattcaacaaaatc

SEQ ID NO: 16220 - DNA, 20 bp, synthetic construct
  misc_feature 1..20: note = chemically synthesized
  source 1..20: mol_type = other DNA
acatttatgattaaaatgct

SEQ ID NO: 16221 - DNA, 20 bp, synthetic construct
  misc_feature 1..20: note = chemically synthesized
  source 1..20: mol_type = other DNA
attaaaatgctcagcaaaat

SEQ ID NO: 16222 - DNA, 20 bp, synthetic construct
  misc_feature 1..20: note = chemically synthesized
  source 1..20: mol_type = other DNA
gctcagcaaaatcagcatac

SEQ ID NO: 16223 - DNA, 20 bp, synthetic construct
  misc_feature 1..20: note = chemically synthesized
  source 1..20: mol_type = other DNA
tcagcaaaatcagcatacaa

SEQ ID NO: 16224 - DNA, 20 bp, synthetic construct
  misc_feature 1..20: note = chemically synthesized
  source 1..20: mol_type = other DNA
agcatacaagagacatacct

SEQ ID NO: 16225 - DNA, 20 bp, synthetic construct
  misc_feature 1..20: note = chemically synthesized
  source 1..20: mol_type = other DNA
gacatacctcagtgtaataa

SEQ ID NO: 16226 - DNA, 20 bp, synthetic construct
  misc_feature 1..20: note = chemically synthesized
  source 1..20: mol_type = other DNA
agccatctgtgacaaaccca

SEQ ID NO: 16227 - DNA, 20 bp, synthetic construct
  misc_feature 1..20: note = chemically synthesized
  source 1..20: mol_type = other DNA
acagccaacataatattgaa

SEQ ID NO: 16228 - DNA, 20 bp, synthetic construct
  misc_feature 1..20: note = chemically synthesized
  source 1..20: mol_type = other DNA
cagccaacataatattgaat

SEQ ID NO: 16229 - DNA, 20 bp, synthetic construct
  misc_feature 1..20: note = chemically synthesized
  source 1..20: mol_type = other DNA
agccaacataatattgaatg

SEQ ID NO: 16230 - DNA, 20 bp, synthetic construct
  misc_feature 1..20: note = chemically synthesized
  source 1..20: mol_type = other DNA
acataatattgaatggggaa

SEQ ID NO: 16231 - DNA, 20 bp, synthetic construct
  misc_feature 1..20: note = chemically synthesized
  source 1..20: mol_type = other DNA
attgaatggggaaaagttga

SEQ ID NO: 16232 - DNA, 20 bp, synthetic construct
  misc_feature 1..20: note = chemically synthesized
  source 1..20: mol_type = other DNA
aagttgaaagcattccctct

SEQ ID NO: 16233 - DNA, 20 bp, synthetic construct
  misc_feature 1..20: note = chemically synthesized
  source 1..20: mol_type = other DNA
aaagcattccctctgagaac

SEQ ID NO: 16234 - DNA, 20 bp, synthetic construct
  misc_feature 1..20: note = chemically synthesized
  source 1..20: mol_type = other DNA
ttccctctgagaactggaac

SEQ ID NO: 16235 - DNA, 20 bp, synthetic construct
  misc_feature 1..20: note = chemically synthesized
  source 1..20: mol_type = other DNA
tctgagaactggaacaagac

SEQ ID NO: 16236 - DNA, 20 bp, synthetic construct
  misc_feature 1..20: note = chemically synthesized
  source 1..20: mol_type = other DNA
ctgagaactggaacaagaca

SEQ ID NO: 16237 - DNA, 20 bp, synthetic construct
  misc_feature 1..20: note = chemically synthesized
  source 1..20: mol_type = other DNA
ctcaccactcctcttcaaca

SEQ ID NO: 16238 - DNA, 20 bp, synthetic construct
  misc_feature 1..20: note = chemically synthesized
  source 1..20: mol_type = other DNA
actcctcttcaacatagtac

SEQ ID NO: 16239 - DNA, 20 bp, synthetic construct
  misc_feature 1..20: note = chemically synthesized
  source 1..20: mol_type = other DNA
cctcttcaacatagtactgg

SEQ ID NO: 16240 - DNA, 20 bp, synthetic construct
  misc_feature 1..20: note = chemically synthesized
  source 1..20: mol_type = other DNA
caacatagtactggaagtcc

SEQ ID NO: 16241 - DNA, 20 bp, synthetic construct
  misc_feature 1..20: note = chemically synthesized
  source 1..20: mol_type = other DNA
atagtactggaagtcctagc

SEQ ID NO: 16242 - DNA, 20 bp, synthetic construct
  misc_feature 1..20: note = chemically synthesized
  source 1..20: mol_type = other DNA
tagtactggaagtcctagcc

SEQ ID NO: 16243 - DNA, 20 bp, synthetic construct
  misc_feature 1..20: note = chemically synthesized
  source 1..20: mol_type = other DNA
agtactggaagtcctagcca

SEQ ID NO: 16244 - DNA, 20 bp, synthetic construct
  misc_feature 1..20: note = chemically synthesized
  source 1..20: mol_type = other DNA
gaagtcctagccagggcaat

SEQ ID NO: 16245 - DNA, 20 bp, synthetic construct
  misc_feature 1..20: note = chemically synthesized
  source 1..20: mol_type = other DNA
cagggcaatcagacaaaaca

SEQ ID NO: 16246 - DNA, 20 bp, synthetic construct
  misc_feature 1..20: note = chemically synthesized
  source 1..20: mol_type = other DNA
tcagacaaaacaaagaaata

SEQ ID NO: 16247 - DNA, 20 bp, synthetic construct
  misc_feature 1..20: note = chemically synthesized
  source 1..20: mol_type = other DNA
cagacaaaacaaagaaataa

SEQ ID NO: 16248 - DNA, 20 bp, synthetic construct
  misc_feature 1..20: note = chemically synthesized
  source 1..20: mol_type = other DNA
agacaaaacaaagaaataaa

SEQ ID NO: 16249 - DNA, 20 bp, synthetic construct
  misc_feature 1..20: note = chemically synthesized
  source 1..20: mol_type = other DNA
gaaataaagggcattcaaat

SEQ ID NO: 16250 - DNA, 20 bp, synthetic construct
  misc_feature 1..20: note = chemically synthesized
  source 1..20: mol_type = other DNA
aaagggcattcaaatcagta

SEQ ID NO: 16251 - DNA, 20 bp, synthetic construct
  misc_feature 1..20: note = chemically synthesized
  source 1..20: mol_type = other DNA
agggcattcaaatcagtaaa

SEQ ID NO: 16252 - DNA, 20 bp, synthetic construct
  misc_feature 1..20: note = chemically synthesized
  source 1..20: mol_type = other DNA
gggcattcaaatcagtaaag

SEQ ID NO: 16253 - DNA, 20 bp, synthetic construct
  misc_feature 1..20: note = chemically synthesized
  source 1..20: mol_type = other DNA
cattcaaatcagtaaagagg

SEQ ID NO: 16254 - DNA, 20 bp, synthetic construct
  misc_feature 1..20: note = chemically synthesized
  source 1..20: mol_type = other DNA
catttacctttaaaacccta

SEQ ID NO: 16255 - DNA, 20 bp, synthetic construct
  misc_feature 1..20: note = chemically synthesized
  source 1..20: mol_type = other DNA
taaaaccctaaagactcctc

SEQ ID NO: 16256 - DNA, 20 bp, synthetic construct
  misc_feature 1..20: note = chemically synthesized
  source 1..20: mol_type = other DNA
accctaaagactcctccaga

SEQ ID NO: 16257 - DNA, 20 bp, synthetic construct
  misc_feature 1..20: note = chemically synthesized
  source 1..20: mol_type = other DNA
agactcctccagaaagctcc

SEQ ID NO: 16258 - DNA, 20 bp, synthetic construct
  misc_feature 1..20: note = chemically synthesized
  source 1..20: mol_type = other DNA
ctagaactgataaaataatt

SEQ ID NO: 16259 - DNA, 20 bp, synthetic construct
  misc_feature 1..20: note = chemically synthesized
  source 1..20: mol_type = other DNA
actgataaaataattcagca

SEQ ID NO: 16260 - DNA, 20 bp, synthetic construct
  misc_feature 1..20: note = chemically synthesized
  source 1..20: mol_type = other DNA
aaataattcagcaaagtttc

SEQ ID NO: 16261 - DNA, 20 bp, synthetic construct
  misc_feature 1..20: note = chemically synthesized
  source 1..20: mol_type = other DNA
tcagcaaagtttccagatac

SEQ ID NO: 16262 - DNA, 20 bp, synthetic construct
  misc_feature 1..20: note = chemically synthesized
  source 1..20: mol_type = other DNA
caagatgaatgcacacaaat

SEQ ID NO: 16263 - DNA, 20 bp, synthetic construct
  misc_feature 1..20: note = chemically synthesized
  source 1..20: mol_type = other DNA
gtaactcttctatacaccaa

SEQ ID NO: 16264 - DNA, 20 bp, synthetic construct
  misc_feature 1..20: note = chemically synthesized
  source 1..20: mol_type = other DNA
atacaccaacagcaaccaaa

SEQ ID NO: 16265 - DNA, 20 bp, synthetic construct
  misc_feature 1..20: note = chemically synthesized
  source 1..20: mol_type = other DNA
acaccaacagcaaccaaatg

SEQ ID NO: 16266 - DNA, 20 bp, synthetic construct
  misc_feature 1..20: note = chemically synthesized
  source 1..20: mol_type = other DNA
accaaatggagaatcaaatc

SEQ ID NO: 16267 - DNA, 20 bp, synthetic construct
  misc_feature 1..20: note = chemically synthesized
  source 1..20: mol_type = other DNA
gaactcaaccccttgtacaa

SEQ ID NO: 16268 - DNA, 20 bp, synthetic construct
  misc_feature 1..20: note = chemically synthesized
  source 1..20: mol_type = other DNA
ttgtacaatagatgcaaaaa

SEQ ID NO: 16269 - DNA, 20 bp, synthetic construct
  misc_feature 1..20: note = chemically synthesized
  source 1..20: mol_type = other DNA
gccatataaaacgtactctc

SEQ ID NO: 16270 - DNA, 20 bp, synthetic construct
  misc_feature 1..20: note = chemically synthesized
  source 1..20: mol_type = other DNA
tataaaacgtactctcaaga

SEQ ID NO: 16271 - DNA, 20 bp, synthetic construct
  misc_feature 1..20: note = chemically synthesized
  source 1..20: mol_type = other DNA
cgtactctcaagatggatta

SEQ ID NO: 16272 - DNA, 20 bp, synthetic construct
  misc_feature 1..20: note = chemically synthesized
  source 1..20: mol_type = other DNA
taaaactataaaactactaa

SEQ ID NO: 16273 - DNA, 20 bp, synthetic construct
  misc_feature 1..20: note = chemically synthesized
  source 1..20: mol_type = other DNA
aaactactaaaagaaaacat

SEQ ID NO: 16274 - DNA, 20 bp, synthetic construct
  misc_feature 1..20: note = chemically synthesized
  source 1..20: mol_type = other DNA
aactactaaaagaaaacata

SEQ ID NO: 16275 - DNA, 20 bp, synthetic construct
  misc_feature 1..20: note = chemically synthesized
  source 1..20: mol_type = other DNA
actactaaaagaaaacataa

SEQ ID NO: 16276 - DNA, 20 bp, synthetic construct
  misc_feature 1..20: note = chemically synthesized
  source 1..20: mol_type = other DNA
tactaaaagaaaacataagg

SEQ ID NO: 16277 - DNA, 20 bp, synthetic construct
  misc_feature 1..20: note = chemically synthesized
  source 1..20: mol_type = other DNA
aaacataagggagacacttc

SEQ ID NO: 16278 - DNA, 20 bp, synthetic construct
  misc_feature 1..20: note = chemically synthesized
  source 1..20: mol_type = other DNA
aagggagacacttcaagaca

SEQ ID NO: 16279 - DNA, 20 bp, synthetic construct
  misc_feature 1..20: note = chemically synthesized
  source 1..20: mol_type = other DNA
gacacttcaagacatggctt

SEQ ID NO: 16280 - DNA, 20 bp, synthetic construct
  misc_feature 1..20: note = chemically synthesized
  source 1..20: mol_type = other DNA
acacttcaagacatggcttt

SEQ ID NO: 16281 - DNA, 20 bp, synthetic construct
  misc_feature 1..20: note = chemically synthesized
  source 1..20: mol_type = other DNA
tcaagacatggctttgggca

SEQ ID NO: 16282 - DNA, 20 bp, synthetic construct
  misc_feature 1..20: note = chemically synthesized
  source 1..20: mol_type = other DNA
ggctttgggcaaagatttta

SEQ ID NO: 16283 - DNA, 20 bp, synthetic construct
  misc_feature 1..20: note = chemically synthesized
  source 1..20: mol_type = other DNA
tgggcaaagattttatggcc

SEQ ID NO: 16284 - DNA, 20 bp, synthetic construct
  misc_feature 1..20: note = chemically synthesized
  source 1..20: mol_type = other DNA
ttttatggccaagacctcaa

SEQ ID NO: 16285 - DNA, 20 bp, synthetic construct
  misc_feature 1..20: note = chemically synthesized
  source 1..20: mol_type = other DNA
tggccaagacctcaaaagca

SEQ ID NO: 16286 - DNA, 20 bp, synthetic construct
  misc_feature 1..20: note = chemically synthesized
  source 1..20: mol_type = other DNA
ggccaagacctcaaaagcac

SEQ ID NO: 16287 - DNA, 20 bp, synthetic construct
  misc_feature 1..20: note = chemically synthesized
  source 1..20: mol_type = other DNA
ctcaaaagcacaggcaacaa

SEQ ID NO: 16288 - DNA, 20 bp, synthetic construct
  misc_feature 1..20: note = chemically synthesized
  source 1..20: mol_type = other DNA
acaggcaacaaaagcaaaaa

SEQ ID NO: 16289 - DNA, 20 bp, synthetic construct
  misc_feature 1..20: note = chemically synthesized
  source 1..20: mol_type = other DNA
caaaagcaaaaatagacaaa

SEQ ID NO: 16290 - DNA, 20 bp, synthetic construct
  misc_feature 1..20: note = chemically synthesized
  source 1..20: mol_type = other DNA
aaaagcaaaaatagacaaat

SEQ ID NO: 16291 - DNA, 20 bp, synthetic construct
  misc_feature 1..20: note = chemically synthesized
  source 1..20: mol_type = other DNA
tagacaaatgggactatatt

SEQ ID NO: 16292 - DNA, 20 bp, synthetic construct
  misc_feature 1..20: note = chemically synthesized
  source 1..20: mol_type = other DNA
taagctaaaatacatctgca

SEQ ID NO: 16293 - DNA, 20 bp, synthetic construct
  misc_feature 1..20: note = chemically synthesized
  source 1..20: mol_type = other DNA
taaaatacatctgcacagta

SEQ ID NO: 16294 - DNA, 20 bp, synthetic construct
  misc_feature 1..20: note = chemically synthesized
  source 1..20: mol_type = other DNA
aaaatacatctgcacagtaa

SEQ ID NO: 16295 - DNA, 20 bp, synthetic construct
  misc_feature 1..20: note = chemically synthesized
  source 1..20: mol_type = other DNA
agtaaaggaaacaatcaaca

SEQ ID NO: 16296 - DNA, 20 bp, synthetic construct
  misc_feature 1..20: note = chemically synthesized
  source 1..20: mol_type = other DNA
aggaaacaatcaacacagtg

SEQ ID NO: 16297 - DNA, 20 bp, synthetic construct
  misc_feature 1..20: note = chemically synthesized
  source 1..20: mol_type = other DNA
gaaacaatcaacacagtgaa

SEQ ID NO: 16298 - DNA, 20 bp, synthetic construct
  misc_feature 1..20: note = chemically synthesized
  source 1..20: mol_type = other DNA
aatcaacacagtgaagagac

SEQ ID NO: 16299 - DNA, 20 bp, synthetic construct
  misc_feature 1..20: note = chemically synthesized
  source 1..20: mol_type = other DNA
agagacaagctgttgaatgc

SEQ ID NO: 16300 - DNA, 20 bp, synthetic construct
  misc_feature 1..20: note = chemically synthesized
  source 1..20: mol_type = other DNA
aatatttgcatacatttgac

SEQ ID NO: 16301 - DNA, 20 bp, synthetic construct
  misc_feature 1..20: note = chemically synthesized
  source 1..20: mol_type = other DNA
atatttgcatacatttgaca

SEQ ID NO: 16302 - DNA, 20 bp, synthetic construct
  misc_feature 1..20: note = chemically synthesized
  source 1..20: mol_type = other DNA
tttgacaaggaattaatctc

SEQ ID NO: 16303 - DNA, 20 bp, synthetic construct
  misc_feature 1..20: note = chemically synthesized
  source 1..20: mol_type = other DNA
aattaatctccagaatatat

SEQ ID NO: 16304 - DNA, 20 bp, synthetic construct
  misc_feature 1..20: note = chemically synthesized
  source 1..20: mol_type = other DNA
aagaaactcaaacaactcaa

SEQ ID NO: 16305 - DNA, 20 bp, synthetic construct
  misc_feature 1..20: note = chemically synthesized
  source 1..20: mol_type = other DNA
aaactcaaacaactcaacag

SEQ ID NO: 16306 - DNA, 20 bp, synthetic construct
  misc_feature 1..20: note = chemically synthesized
  source 1..20: mol_type = other DNA
aaataatctcattaaaaaat

SEQ ID NO: 16307 - DNA, 20 bp, synthetic construct
  misc_feature 1..20: note = chemically synthesized
  source 1..20: mol_type = other DNA
atctcattaaaaaattggca

SEQ ID NO: 16308 - DNA, 20 bp, synthetic construct
  misc_feature 1..20: note = chemically synthesized
  source 1..20: mol_type = other DNA
tctcattaaaaaattggcaa

SEQ ID NO: 16309 - DNA, 20 bp, synthetic construct
  misc_feature 1..20: note = chemically synthesized
  source 1..20: mol_type = other DNA
tggcaaaggatatttttcaa

SEQ ID NO: 16310 - DNA, 20 bp, synthetic construct
  misc_feature 1..20: note = chemically synthesized
  source 1..20: mol_type = other DNA
caaaggatatttttcaaaag

SEQ ID NO: 16311 - DNA, 20 bp, synthetic construct
  misc_feature 1..20: note = chemically synthesized
  source 1..20: mol_type = other DNA
gaagacatacaaatgcacaa

SEQ ID NO: 16312 - DNA, 20 bp, synthetic construct
  misc_feature 1..20: note = chemically synthesized
  source 1..20: mol_type = other DNA
aagacatacaaatgcacaat

SEQ ID NO: 16313 - DNA, 20 bp, synthetic construct
  misc_feature 1..20: note = chemically synthesized
  source 1..20: mol_type = other DNA
atacaaatgcacaatgggta

SEQ ID NO: 16314 - DNA, 20 bp, synthetic construct
  misc_feature 1..20: note = chemically synthesized
  source 1..20: mol_type = other DNA
tacaaatgcacaatgggtat

SEQ ID NO: 16315 - DNA, 20 bp, synthetic construct
  misc_feature 1..20: note = chemically synthesized
  source 1..20: mol_type = other DNA
acaaatgcacaatgggtatg

SEQ ID NO: 16316 - DNA, 20 bp, synthetic construct
  misc_feature 1..20: note = chemically synthesized
  source 1..20: mol_type = other DNA
tgctcaacattactaatcat

SEQ ID NO: 16317 - DNA, 20 bp, synthetic construct
  misc_feature 1..20: note = chemically synthesized
  source 1..20: mol_type = other DNA
ctcaacattactaatcatca

SEQ ID NO: 16318 - DNA, 20 bp, synthetic construct
  misc_feature 1..20: note = chemically synthesized
  source 1..20: mol_type = other DNA
atgcaaatcaaaaccacaat

SEQ ID NO: 16319 - DNA, 20 bp, synthetic construct
  misc_feature 1..20: note = chemically synthesized
  source 1..20: mol_type = other DNA
aatgagatatcatcttatgc

SEQ ID NO: 16320 - DNA, 20 bp, synthetic construct
  misc_feature 1..20: note = chemically synthesized
  source 1..20: mol_type = other DNA
agatatcatcttatgccagt

SEQ ID NO: 16321 - DNA, 20 bp, synthetic construct
  misc_feature 1..20: note = chemically synthesized
  source 1..20: mol_type = other DNA
aataaataaataacacatgc

SEQ ID NO: 16322 - DNA, 20 bp, synthetic construct
  misc_feature 1..20: note = chemically synthesized
  source 1..20: mol_type = other DNA
aataaataacacatgctggc

SEQ ID NO: 16323 - DNA, 20 bp, synthetic construct
  misc_feature 1..20: note = chemically synthesized
  source 1..20: mol_type = other DNA
ataaataacacatgctggca

SEQ ID NO: 16324 - DNA, 20 bp, synthetic construct
  misc_feature 1..20: note = chemically synthesized
  source 1..20: mol_type = other DNA
cacatgctggcaaggatgtg

SEQ ID NO: 16325 - DNA, 20 bp, synthetic construct
  misc_feature 1..20: note = chemically synthesized
  source 1..20: mol_type = other DNA
acatgctggcaaggatgtga

SEQ ID NO: 16326 - DNA, 20 bp, synthetic construct
  misc_feature 1..20: note = chemically synthesized
  source 1..20: mol_type = other DNA
ctggcaaggatgtgaaggaa

SEQ ID NO: 16327 - DNA, 20 bp, synthetic construct
  misc_feature 1..20: note = chemically synthesized
  source 1..20: mol_type = other DNA
tggcaaggatgtgaaggaaa

SEQ ID NO: 16328 - DNA, 20 bp, synthetic construct
  misc_feature 1..20: note = chemically synthesized
  source 1..20: mol_type = other DNA
tgtgaaggaaaaggcactcg

SEQ ID NO: 16329 - DNA, 20 bp, synthetic construct
  misc_feature 1..20: note = chemically synthesized
  source 1..20: mol_type = other DNA
gtgaaggaaaaggcactcgt

SEQ ID NO: 16330 - DNA, 20 bp, synthetic construct
  misc_feature 1..20: note = chemically synthesized
  source 1..20: mol_type = other DNA
aaggcactcgtaggcactat

SEQ ID NO: 16331 - DNA, 20 bp, synthetic construct
  misc_feature 1..20: note = chemically synthesized
  source 1..20: mol_type = other DNA
cactcgtaggcactattggt

SEQ ID NO: 16332 - DNA, 20 bp, synthetic construct
  misc_feature 1..20: note = chemically synthesized
  source 1..20: mol_type = other DNA
ctattggtaagcatgcaaat

SEQ ID NO: 16333 - DNA, 20 bp, synthetic construct
  misc_feature 1..20: note = chemically synthesized
  source 1..20: mol_type = other DNA
ggtaagcatgcaaattagta

SEQ ID NO: 16334 - DNA, 20 bp, synthetic construct
  misc_feature 1..20: note = chemically synthesized
  source 1..20: mol_type = other DNA
gcaaattagtatagccacta

SEQ ID NO: 16335 - DNA, 20 bp, synthetic construct
  misc_feature 1..20: note = chemically synthesized
  source 1..20: mol_type = other DNA
ccactatggaaaacaatatg

SEQ ID NO: 16336 - DNA, 20 bp, synthetic construct
  misc_feature 1..20: note = chemically synthesized
  source 1..20: mol_type = other DNA
caatatgtagatttaccaaa

SEQ ID NO: 16337 - DNA, 20 bp, synthetic construct
  misc_feature 1..20: note = chemically synthesized
  source 1..20: mol_type = other DNA
gctaaaaattgaactatcat

SEQ ID NO: 16338 - DNA, 20 bp, synthetic construct
  misc_feature 1..20: note = chemically synthesized
  source 1..20: mol_type = other DNA
aattgaactatcataagatc

SEQ ID NO: 16339 - DNA, 20 bp, synthetic construct
  misc_feature 1..20: note = chemically synthesized
  source 1..20: mol_type = other DNA
agatccagcaatcttattac

SEQ ID NO: 16340 - DNA, 20 bp, synthetic construct
  misc_feature 1..20: note = chemically synthesized
  source 1..20: mol_type = other DNA
gatccagcaatcttattact

SEQ ID NO: 16341 - DNA, 20 bp, synthetic construct
  misc_feature 1..20: note = chemically synthesized
  source 1..20: mol_type = other DNA
tattactgggtatttatcca

SEQ ID NO: 16342 - DNA, 20 bp, synthetic construct
  misc_feature 1..20: note = chemically synthesized
  source 1..20: mol_type = other DNA
attactgggtatttatccaa

SEQ ID NO: 16343 - DNA, 20 bp, synthetic construct
  misc_feature 1..20: note = chemically synthesized
  source 1..20: mol_type = other DNA
tgggtatttatccaaaggaa

SEQ ID NO: 16344 - DNA, 20 bp, synthetic construct
  misc_feature 1..20: note = chemically synthesized
  source 1..20: mol_type = other DNA
ttatccaaaggaaaagaatt

SEQ ID NO: 16345 - DNA, 20 bp, synthetic construct
  misc_feature 1..20: note = chemically synthesized
  source 1..20: mol_type = other DNA
aaagaattcagaataataaa

SEQ ID NO: 16346 - DNA, 20 bp, synthetic construct
  misc_feature 1..20: note = chemically synthesized
  source 1..20: mol_type = other DNA
tcagaataataaacagatac

SEQ ID NO: 16347 - DNA, 20 bp, synthetic construct
  misc_feature 1..20: note = chemically synthesized
  source 1..20: mol_type = other DNA
tggtaccacactgtttattg

SEQ ID NO: 16348 - DNA, 20 bp, synthetic construct
  misc_feature 1..20: note = chemically synthesized
  source 1..20: mol_type = other DNA
tattgcagcacgattcacat

SEQ ID NO: 16349 - DNA, 20 bp, synthetic construct
  misc_feature 1..20: note = chemically synthesized
  source 1..20: mol_type = other DNA
cagcacgattcacattagca

SEQ ID NO: 16350 - DNA, 20 bp, synthetic construct
  misc_feature 1..20: note = chemically synthesized
  source 1..20: mol_type = other DNA
gattcacattagcaaagata

SEQ ID NO: 16351 - DNA, 20 bp, synthetic construct
  misc_feature 1..20: note = chemically synthesized
  source 1..20: mol_type = other DNA
caaagatatggaatcaacct

SEQ ID NO: 16352 - DNA, 20 bp, synthetic construct
  misc_feature 1..20: note = chemically synthesized
  source 1..20: mol_type = other DNA
tcaacctaagtgtccatcaa

SEQ ID NO: 16353 - DNA, 20 bp, synthetic construct
  misc_feature 1..20: note = chemically synthesized
  source 1..20: mol_type = other DNA
tgtccatcaatggatgaatg

SEQ ID NO: 16354 - DNA, 20 bp, synthetic construct
  misc_feature 1..20: note = chemically synthesized
  source 1..20: mol_type = other DNA
atggatgaatgaagaaaatg

SEQ ID NO: 16355 - DNA, 20 bp, synthetic construct
  misc_feature 1..20: note = chemically synthesized
  source 1..20: mol_type = other DNA
atataaaatcatttcatttg

SEQ ID NO: 16356 - DNA, 20 bp, synthetic construct
  misc_feature 1..20: note = chemically synthesized
  source 1..20: mol_type = other DNA
tcatttcatttgcagcaaca

SEQ ID NO: 16357 - DNA, 20 bp, synthetic construct
  misc_feature 1..20: note = chemically synthesized
  source 1..20: mol_type = other DNA
tgcagcaacatggatgaaac

SEQ ID NO: 16358 - DNA, 20 bp, synthetic construct
  misc_feature 1..20: note = chemically synthesized
  source 1..20: mol_type = other DNA
agcaacatggatgaaactgg

SEQ ID NO: 16359 - DNA, 20 bp, synthetic construct
  misc_feature 1..20: note = chemically synthesized
  source 1..20: mol_type = other DNA
gtcattatgttaaacgaaat

SEQ ID NO: 16360 - DNA, 20 bp, synthetic construct
  misc_feature 1..20: note = chemically synthesized
  source 1..20: mol_type = other DNA
ttatgttaaacgaaataagc

SEQ ID NO: 16361 - DNA, 20 bp, synthetic construct
  misc_feature 1..20: note = chemically synthesized
  source 1..20: mol_type = other DNA
tatgttaaacgaaataagcc

SEQ ID NO: 16362 - DNA, 20 bp, synthetic construct
  misc_feature 1..20: note = chemically synthesized
  source 1..20: mol_type = other DNA
taaacgaaataagccaggca

SEQ ID NO: 16363 - DNA, 20 bp, synthetic construct
  misc_feature 1..20: note = chemically synthesized
  source 1..20: mol_type = other DNA
cgaaataagccaggcataga

SEQ ID NO: 16364 - DNA, 20 bp, synthetic construct
  misc_feature 1..20: note = chemically synthesized
  source 1..20: mol_type = other DNA
tgcatgttctcactgatatg

SEQ ID NO: 16365 - DNA, 20 bp, synthetic construct
  misc_feature 1..20: note = chemically synthesized
  source 1..20: mol_type = other DNA
gcatgttctcactgatatgt

SEQ ID NO: 16366 - DNA, 20 bp, synthetic construct
  misc_feature 1..20: note = chemically synthesized
  source 1..20: mol_type = other DNA
atgttctcactgatatgtgg

SEQ ID NO: 16367 - DNA, 20 bp, synthetic construct
  misc_feature 1..20: note = chemically synthesized
  source 1..20: mol_type = other DNA
ctgatatgtgggagctaaaa

SEQ ID NO: 16368 - DNA, 20 bp, synthetic construct
  misc_feature 1..20: note = chemically synthesized
  source 1..20: mol_type = other DNA
ctaaaaaagttaatatcatg

SEQ ID NO: 16369 - DNA, 20 bp, synthetic construct
  misc_feature 1..20: note = chemically synthesized
  source 1..20: mol_type = other DNA
taaaaaagttaatatcatgt

SEQ ID NO: 16370 - DNA, 20 bp, synthetic construct
  misc_feature 1..20: note = chemically synthesized
  source 1..20: mol_type = other DNA
aaaagttaatatcatgtagg

SEQ ID NO: 16371 - DNA, 20 bp, synthetic construct
  misc_feature 1..20: note = chemically synthesized
  source 1..20: mol_type = other DNA
aagttaatatcatgtaggta

SEQ ID NO: 16372 - DNA, 20 bp, synthetic construct
  misc_feature 1..20: note = chemically synthesized
  source 1..20: mol_type = other DNA
gttaatatcatgtaggtaga

SEQ ID NO: 16373 - DNA, 20 bp, synthetic construct
  misc_feature 1..20: note = chemically synthesized
  source 1..20: mol_type = other DNA
aatatcatgtaggtagagag

SEQ ID NO: 16374 - DNA, 20 bp, synthetic construct
  misc_feature 1..20: note = chemically synthesized
  source 1..20: mol_type = other DNA
gtaggtagagagtagaatga

SEQ ID NO: 16375 - DNA, 20 bp, synthetic construct
  misc_feature 1..20: note = chemically synthesized
  source 1..20: mol_type = other DNA
gagagtagaatgacagaaac

SEQ ID NO: 16376 - DNA, 20 bp, synthetic construct
  misc_feature 1..20: note = chemically synthesized
  source 1..20: mol_type = other DNA
gagtagaatgacagaaacca

SEQ ID NO: 16377 - DNA, 20 bp, synthetic construct
  misc_feature 1..20: note = chemically synthesized
  source 1..20: mol_type = other DNA
agtagaatgacagaaaccag

SEQ ID NO: 16378 - DNA, 20 bp, synthetic construct
  misc_feature 1..20: note = chemically synthesized
  source 1..20: mol_type = other DNA
agaatgacagaaaccagagg

SEQ ID NO: 16379 - DNA, 20 bp, synthetic construct
  misc_feature 1..20: note = chemically synthesized
  source 1..20: mol_type = other DNA
aatgacagaaaccagaggta

SEQ ID NO: 16380 - DNA, 20 bp, synthetic construct
  misc_feature 1..20: note = chemically synthesized
  source 1..20: mol_type = other DNA
acagaaaccagaggtagaga

SEQ ID NO: 16381 - DNA, 20 bp, synthetic construct
  misc_feature 1..20: note = chemically synthesized
  source 1..20: mol_type = other DNA
cagaaaccagaggtagagaa

SEQ ID NO: 16382 - DNA, 20 bp, synthetic construct
  misc_feature 1..20: note = chemically synthesized
  source 1..20: mol_type = other DNA
agagaaaggtgtgtacgtta

SEQ ID NO: 16383 - DNA, 20 bp, synthetic construct
  misc_feature 1..20: note = chemically synthesized
  source 1..20: mol_type = other DNA
gagaaaggtgtgtacgttat

SEQ ID NO: 16384 - DNA, 20 bp, synthetic construct
  misc_feature 1..20: note = chemically synthesized
  source 1..20: mol_type = other DNA
gaaaggtgtgtacgttatgg

SEQ ID NO: 16385 - DNA, 20 bp, synthetic construct
  misc_feature 1..20: note = chemically synthesized
  source 1..20: mol_type = other DNA
aaaggtgtgtacgttatggg

SEQ ID NO: 16386 - DNA, 20 bp, synthetic construct
  misc_feature 1..20: note = chemically synthesized
  source 1..20: mol_type = other DNA
ggtgtgtacgttatgggagg

SEQ ID NO: 16387 - DNA, 20 bp, synthetic construct
  misc_feature 1..20: note = chemically synthesized
  source 1..20: mol_type = other DNA
gtgtgtacgttatgggagga

SEQ ID NO: 16388 - DNA, 20 bp, synthetic construct
  misc_feature 1..20: note = chemically synthesized
  source 1..20: mol_type = other DNA
tgtgtacgttatgggaggaa

SEQ ID NO: 16389 - DNA, 20 bp, synthetic construct
  misc_feature 1..20: note = chemically synthesized
  source 1..20: mol_type = other DNA
tgtacgttatgggaggaagg

SEQ ID NO: 16390 - DNA, 20 bp, synthetic construct
  misc_feature 1..20: note = chemically synthesized
  source 1..20: mol_type = other DNA
ttatgggaggaagggagacg

SEQ ID NO: 16391 - DNA, 20 bp, synthetic construct
  misc_feature 1..20: note = chemically synthesized
  source 1..20: mol_type = other DNA
atgggaggaagggagacgaa

SEQ ID NO: 16392 - DNA, 20 bp, synthetic construct
  misc_feature 1..20: note = chemically synthesized
  source 1..20: mol_type = other DNA
ggaggaagggagacgaagag

SEQ ID NO: 16393 - DNA, 20 bp, synthetic construct
  misc_feature 1..20: note = chemically synthesized
  source 1..20: mol_type = other DNA
gaagggagacgaagagaagt

SEQ ID NO: 16394 - DNA, 20 bp, synthetic construct
  misc_feature 1..20: note = chemically synthesized
  source 1..20: mol_type = other DNA
gacgaagagaagttggttaa

SEQ ID NO: 16395 - DNA, 20 bp, synthetic construct
  misc_feature 1..20: note = chemically synthesized
  source 1..20: mol_type = other DNA
gagaagttggttaatggaaa

SEQ ID NO: 16396 - DNA, 20 bp, synthetic construct
  misc_feature 1..20: note = chemically synthesized
  source 1..20: mol_type = other DNA
agaagttggttaatggaaac

SEQ ID NO: 16397 - DNA, 20 bp, synthetic construct
  misc_feature 1..20: note = chemically synthesized
  source 1..20: mol_type = other DNA
agttggttaatggaaacagg

SEQ ID NO: 16398 - DNA, 20 bp, synthetic construct
  misc_feature 1..20: note = chemically synthesized
  source 1..20: mol_type = other DNA
ggttaatggaaacaggcagt

SEQ ID NO: 16399 - DNA, 20 bp, synthetic construct
  misc_feature 1..20: note = chemically synthesized
  source 1..20: mol_type = other DNA
aatggaaacaggcagttaga

SEQ ID NO: 16400 - DNA, 20 bp, synthetic construct
  misc_feature 1..20: note = chemically synthesized
  source 1..20: mol_type = other DNA
ggaaacaggcagttagatag

SEQ ID NO: 16401 - DNA, 20 bp, synthetic construct
  misc_feature 1..20: note = chemically synthesized
  source 1..20: mol_type = other DNA
gaaacaggcagttagataga

SEQ ID NO: 16402 - DNA, 20 bp, synthetic construct
  misc_feature 1..20: note = chemically synthesized
  source 1..20: mol_type = other DNA
gaatatgttctgatgttcaa

SEQ ID NO: 16403 - DNA, 20 bp, synthetic construct
  misc_feature 1..20: note = chemically synthesized
  source 1..20: mol_type = other DNA
tgttctgatgttcaatagca

SEQ ID NO: 16404 - DNA, 20 bp, synthetic construct
  misc_feature 1..20: note = chemically synthesized
  source 1..20: mol_type = other DNA
tctgatgttcaatagcaaag

SEQ ID NO: 16405 - DNA, 20 bp, synthetic construct
  misc_feature 1..20: note = chemically synthesized
  source 1..20: mol_type = other DNA
ctgatgttcaatagcaaagt

SEQ ID NO: 16406 - DNA, 20 bp, synthetic construct
  misc_feature 1..20: note = chemically synthesized
  source 1..20: mol_type = other DNA
tgatgttcaatagcaaagta

SEQ ID NO: 16407 - DNA, 20 bp, synthetic construct
  misc_feature 1..20: note = chemically synthesized
  source 1..20: mol_type = other DNA
atagcaaagtagggtgatta

SEQ ID NO: 16408 - DNA, 20 bp, synthetic construct
  misc_feature 1..20: note = chemically synthesized
  source 1..20: mol_type = other DNA
atatattgtatatttcaaaa

SEQ ID NO: 16409 - DNA, 20 bp, synthetic construct
  misc_feature 1..20: note = chemically synthesized
  source 1..20: mol_type = other DNA
tattgtatatttcaaaatag

SEQ ID NO: 16410 - DNA, 20 bp, synthetic construct
  misc_feature 1..20: note = chemically synthesized
  source 1..20: mol_type = other DNA
tgtatatttcaaaatagtag

SEQ ID NO: 16411 - DNA, 20 bp, synthetic construct
  misc_feature 1..20: note = chemically synthesized
  source 1..20: mol_type = other DNA
tatttcaaaatagtagaaga

SEQ ID NO: 16412 - DNA, 20 bp, synthetic construct
  misc_feature 1..20: note = chemically synthesized
  source 1..20: mol_type = other DNA
atttcaaaatagtagaagaa

SEQ ID NO: 16413 - DNA, 20 bp, synthetic construct
  misc_feature 1..20: note = chemically synthesized
  source 1..20: mol_type = other DNA
cttgaaatgttcctaacaca

SEQ ID NO: 16414 - DNA, 20 bp, synthetic construct
  misc_feature 1..20: note = chemically synthesized
  source 1..20: mol_type = other DNA
catagaaacgataaatactt

SEQ ID NO: 16415 - DNA, 20 bp, synthetic construct
  misc_feature 1..20: note = chemically synthesized
  source 1..20: mol_type = other DNA
atagaaacgataaatacttg

SEQ ID NO: 16416 - DNA, 20 bp, synthetic construct
  misc_feature 1..20: note = chemically synthesized
  source 1..20: mol_type = other DNA
aacacgtcatatatcaataa

SEQ ID NO: 16417 - DNA, 20 bp, synthetic construct
  misc_feature 1..20: note = chemically synthesized
  source 1..20: mol_type = other DNA
cgtcatatatcaataaaaga

SEQ ID NO: 16418 - DNA, 20 bp, synthetic construct
  misc_feature 1..20: note = chemically synthesized
  source 1..20: mol_type = other DNA
aaagaaagtcgatctcatat

SEQ ID NO: 16419 - DNA, 20 bp, synthetic construct
  misc_feature 1..20: note = chemically synthesized
  source 1..20: mol_type = other DNA
aagtcgatctcatattggtt

SEQ ID NO: 16420 - DNA, 20 bp, synthetic construct
  misc_feature 1..20: note = chemically synthesized
  source 1..20: mol_type = other DNA
agtcgatctcatattggttg

SEQ ID NO: 16421 - DNA, 20 bp, synthetic construct
  misc_feature 1..20: note = chemically synthesized
  source 1..20: mol_type = other DNA
attggttgaggcctgattgt

SEQ ID NO: 16422 - DNA, 20 bp, synthetic construct
  misc_feature 1..20: note = chemically synthesized
  source 1..20: mol_type = other DNA
taagtaaatctttgtccctc

SEQ ID NO: 16423 - DNA, 20 bp, synthetic construct
  misc_feature 1..20: note = chemically synthesized
  source 1..20: mol_type = other DNA
tccctgtactgtcttgctgt

SEQ ID NO: 16424 - DNA, 20 bp, synthetic construct
  misc_feature 1..20: note = chemically synthesized
  source 1..20: mol_type = other DNA
ccctgtactgtcttgctgtg

SEQ ID NO: 16425 - DNA, 20 bp, synthetic construct
  misc_feature 1..20: note = chemically synthesized
  source 1..20: mol_type = other DNA
ctgtactgtcttgctgtgag

SEQ ID NO: 16426 - DNA, 20 bp, synthetic construct
  misc_feature 1..20: note = chemically synthesized
  source 1..20: mol_type = other DNA
cttatattccaacaccattt

SEQ ID NO: 16427 - DNA, 20 bp, synthetic construct
  misc_feature 1..20: note = chemically synthesized
  source 1..20: mol_type = other DNA
tcctccccatatttttacct

SEQ ID NO: 16428 - DNA, 20 bp, synthetic construct
  misc_feature 1..20: note = chemically synthesized
  source 1..20: mol_type = other DNA
ctcggtttttactgtttata

SEQ ID NO: 16429 - DNA, 20 bp, synthetic construct
  misc_feature 1..20: note = chemically synthesized
  source 1..20: mol_type = other DNA
atatagcacactttgtgcta

SEQ ID NO: 16430 - DNA, 20 bp, synthetic construct
  misc_feature 1..20: note = chemically synthesized
  source 1..20: mol_type = other DNA
ctttgtgctatagtttacct

SEQ ID NO: 16431 - DNA, 20 bp, synthetic construct
  misc_feature 1..20: note = chemically synthesized
  source 1..20: mol_type = other DNA
ctcagtttttactatttata

SEQ ID NO: 16432 - DNA, 20 bp, synthetic construct
  misc_feature 1..20: note = chemically synthesized
  source 1..20: mol_type = other DNA
ccccaaacttctctcttaac

SEQ ID NO: 16433 - DNA, 20 bp, synthetic construct
  misc_feature 1..20: note = chemically synthesized
  source 1..20: mol_type = other DNA
aaacttctctcttaacaagc

SEQ ID NO: 16434 - DNA, 20 bp, synthetic construct
  misc_feature 1..20: note = chemically synthesized
  source 1..20: mol_type = other DNA
ctcttaacaagctagaatat

SEQ ID NO: 16435 - DNA, 20 bp, synthetic construct
  misc_feature 1..20: note = chemically synthesized
  source 1..20: mol_type = other DNA
gctagaatataagtgaatgc

SEQ ID NO: 16436 - DNA, 20 bp, synthetic construct
  misc_feature 1..20: note = chemically synthesized
  source 1..20: mol_type = other DNA
tagaatataagtgaatgcaa

SEQ ID NO: 16437 - DNA, 20 bp, synthetic construct
  misc_feature 1..20: note = chemically synthesized
  source 1..20: mol_type = other DNA
tataagtgaatgcaagagca

SEQ ID NO: 16438 - DNA, 20 bp, synthetic construct
  misc_feature 1..20: note = chemically synthesized
  source 1..20: mol_type = other DNA
taagtgaatgcaagagcata

SEQ ID NO: 16439 - DNA, 20 bp, synthetic construct
  misc_feature 1..20: note = chemically synthesized
  source 1..20: mol_type = other DNA
tgaatgcaagagcatagaga

SEQ ID NO: 16440 - DNA, 20 bp, synthetic construct
  misc_feature 1..20: note = chemically synthesized
  source 1..20: mol_type = other DNA
gaatgcaagagcatagagac

SEQ ID NO: 16441 - DNA, 20 bp, synthetic construct
  misc_feature 1..20: note = chemically synthesized
  source 1..20: mol_type = other DNA
aatgcaagagcatagagaca

SEQ ID NO: 16442 - DNA, 20 bp, synthetic construct
  misc_feature 1..20: note = chemically synthesized
  source 1..20: mol_type = other DNA
tcattcctattttcatattt

SEQ ID NO: 16443 - DNA, 20 bp, synthetic construct
  misc_feature 1..20: note = chemically synthesized
  source 1..20: mol_type = other DNA
cattcctattttcatatttg

SEQ ID NO: 16444 - DNA, 20 bp, synthetic construct
  misc_feature 1..20: note = chemically synthesized
  source 1..20: mol_type = other DNA
tcatatttgaggtataaacc

SEQ ID NO: 16445 - DNA, 20 bp, synthetic construct
  misc_feature 1..20: note = chemically synthesized
  source 1..20: mol_type = other DNA
catatttgaggtataaacca

SEQ ID NO: 16446 - DNA, 20 bp, synthetic construct
  misc_feature 1..20: note = chemically synthesized
  source 1..20: mol_type = other DNA
tatttgaggtataaaccaag

SEQ ID NO: 16447 - DNA, 20 bp, synthetic construct
  misc_feature 1..20: note = chemically synthesized
  source 1..20: mol_type = other DNA
tttttaaatctgcaaataaa

SEQ ID NO: 16448 - DNA, 20 bp, synthetic construct
  misc_feature 1..20: note = chemically synthesized
  source 1..20: mol_type = other DNA
gttttattctgacattaaaa

SEQ ID NO: 16449 - DNA, 20 bp, synthetic construct
  misc_feature 1..20: note = chemically synthesized
  source 1..20: mol_type = other DNA
aatgaatgatcgttttacca

SEQ ID NO: 16450 - DNA, 20 bp, synthetic construct
  misc_feature 1..20: note = chemically synthesized
  source 1..20: mol_type = other DNA
atgatcgttttaccacagcg

SEQ ID NO: 16451 - DNA, 20 bp, synthetic construct
  misc_feature 1..20: note = chemically synthesized
  source 1..20: mol_type = other DNA
tgatcgttttaccacagcgt

SEQ ID NO: 16452 - DNA, 20 bp, synthetic construct
  misc_feature 1..20: note = chemically synthesized
  source 1..20: mol_type = other DNA
cttaaccttcactttcaaac

SEQ ID NO: 16453 - DNA, 20 bp, synthetic construct
  misc_feature 1..20: note = chemically synthesized
  source 1..20: mol_type = other DNA
tttattgatctctattttcc

SEQ ID NO: 16454 - DNA, 20 bp, synthetic construct
  misc_feature 1..20: note = chemically synthesized
  source 1..20: mol_type = other DNA
tctattttcctggaacaaca

SEQ ID NO: 16455 - DNA, 20 bp, synthetic construct
  misc_feature 1..20: note = chemically synthesized
  source 1..20: mol_type = other DNA
ctattttcctggaacaacat

SEQ ID NO: 16456 - DNA, 20 bp, synthetic construct
  misc_feature 1..20: note = chemically synthesized
  source 1..20: mol_type = other DNA
tattttcctggaacaacatg

SEQ ID NO: 16457 - DNA, 20 bp, synthetic construct
  misc_feature 1..20: note = chemically synthesized
  source 1..20: mol_type = other DNA
attttcctggaacaacatgg

SEQ ID NO: 16458 - DNA, 20 bp, synthetic construct
  misc_feature 1..20: note = chemically synthesized
  source 1..20: mol_type = other DNA
aacaacatgggggctatgtt

SEQ ID NO: 16459 - DNA, 20 bp, synthetic construct
  misc_feature 1..20: note = chemically synthesized
  source 1..20: mol_type = other DNA
atgggggctatgtttagcgt

SEQ ID NO: 16460 - DNA, 20 bp, synthetic construct
  misc_feature 1..20: note = chemically synthesized
  source 1..20: mol_type = other DNA
tgggggctatgtttagcgtg

SEQ ID NO: 16461 - DNA, 20 bp, synthetic construct
  misc_feature 1..20: note = chemically synthesized
  source 1..20: mol_type = other DNA
ctatgtttagcgtgaggaca

SEQ ID NO: 16462 - DNA, 20 bp, synthetic construct
  misc_feature 1..20: note = chemically synthesized
  source 1..20: mol_type = other DNA
gtatcacaactttcacctga

SEQ ID NO: 16463 - DNA, 20 bp, synthetic construct
  misc_feature 1..20: note = chemically synthesized
  source 1..20: mol_type = other DNA
acaactttcacctgaaagaa

SEQ ID NO: 16464 - DNA, 20 bp, synthetic construct
  misc_feature 1..20: note = chemically synthesized
  source 1..20: mol_type = other DNA
tttcacctgaaagaaaagat

SEQ ID NO: 16465 - DNA, 20 bp, synthetic construct
  misc_feature 1..20: note = chemically synthesized
  source 1..20: mol_type = other DNA
aaagaaaagatgagctacca

SEQ ID NO: 16466 - DNA, 20 bp, synthetic construct
  misc_feature 1..20: note = chemically synthesized
  source 1..20: mol_type = other DNA
accatggtacatataacaat

SEQ ID NO: 16467 - DNA, 20 bp, synthetic construct
  misc_feature 1..20: note = chemically synthesized
  source 1..20: mol_type = other DNA
ccatggtacatataacaatg

SEQ ID NO: 16468 - DNA, 20 bp, synthetic construct
  misc_feature 1..20: note = chemically synthesized
  source 1..20: mol_type = other DNA
tggtacatataacaatgagg

SEQ ID NO: 16469 - DNA, 20 bp, synthetic construct
  misc_feature 1..20: note = chemically synthesized
  source 1..20: mol_type = other DNA
aatgaggtggttaaaactct

SEQ ID NO: 16470 - DNA, 20 bp, synthetic construct
  misc_feature 1..20: note = chemically synthesized
  source 1..20: mol_type = other DNA
taaaactctaagtcgtcatc

SEQ ID NO: 16471 - DNA, 20 bp, synthetic construct
  misc_feature 1..20: note = chemically synthesized
  source 1..20: mol_type = other DNA
tactaaaaatcactatttca

SEQ ID NO: 16472 - DNA, 20 bp, synthetic construct
  misc_feature 1..20: note = chemically synthesized
  source 1..20: mol_type = other DNA
taaaaatcactatttcaaag

SEQ ID NO: 16473 - DNA, 20 bp, synthetic construct
  misc_feature 1..20: note = chemically synthesized
  source 1..20: mol_type = other DNA
atcactatttcaaagaagta

SEQ ID NO: 16474 - DNA, 20 bp, synthetic construct
  misc_feature 1..20: note = chemically synthesized
  source 1..20: mol_type = other DNA
tatttcaaagaagtatagaa

SEQ ID NO: 16475 - DNA, 20 bp, synthetic construct
  misc_feature 1..20: note = chemically synthesized
  source 1..20: mol_type = other DNA
aagaagtatagaatagatat

SEQ ID NO: 16476 - DNA, 20 bp, synthetic construct
  misc_feature 1..20: note = chemically synthesized
  source 1..20: mol_type = other DNA
gaatagatatcagccaaaat

SEQ ID NO: 16477 - DNA, 20 bp, synthetic construct
  misc_feature 1..20: note = chemically synthesized
  source 1..20: mol_type = other DNA
aatagatatcagccaaaata

SEQ ID NO: 16478 - DNA, 20 bp, synthetic construct
  misc_feature 1..20: note = chemically synthesized
  source 1..20: mol_type = other DNA
atatacatattatacacata

SEQ ID NO: 16479 - DNA, 20 bp, synthetic construct
  misc_feature 1..20: note = chemically synthesized
  source 1..20: mol_type = other DNA
atacatattatacacatatg

SEQ ID NO: 16480 - DNA, 20 bp, synthetic construct
  misc_feature 1..20: note = chemically synthesized
  source 1..20: mol_type = other DNA
ttgtatatgcttaaaaatta

SEQ ID NO: 16481 - DNA, 20 bp, synthetic construct
  misc_feature 1..20: note = chemically synthesized
  source 1..20: mol_type = other DNA
tgcttaaaaattacagactt

SEQ ID NO: 16482 - DNA, 20 bp, synthetic construct
  misc_feature 1..20: note = chemically synthesized
  source 1..20: mol_type = other DNA
ttaaaaattacagactttgg

SEQ ID NO: 16483 - DNA, 20 bp, synthetic construct
  misc_feature 1..20: note = chemically synthesized
  source 1..20: mol_type = other DNA
tggaagtcatatgactattt

SEQ ID NO: 16484 - DNA, 20 bp, synthetic construct
  misc_feature 1..20: note = chemically synthesized
  source 1..20: mol_type = other DNA
tatgactatttcagtgtgtg

SEQ ID NO: 16485 - DNA, 20 bp, synthetic construct
  misc_feature 1..20: note = chemically synthesized
  source 1..20: mol_type = other DNA
caccctcctgttccaaaaca

SEQ ID NO: 16486 - DNA, 20 bp, synthetic construct
  misc_feature 1..20: note = chemically synthesized
  source 1..20: mol_type = other DNA
cctgttccaaaacacagttg

SEQ ID NO: 16487 - DNA, 20 bp, synthetic construct
  misc_feature 1..20: note = chemically synthesized
  source 1..20: mol_type = other DNA
gttccaaaacacagttgcag

SEQ ID NO: 16488 - DNA, 20 bp, synthetic construct
  misc_feature 1..20: note = chemically synthesized
  source 1..20: mol_type = other DNA
ccaaaacacagttgcagaag

SEQ ID NO: 16489 - DNA, 20 bp, synthetic construct
  misc_feature 1..20: note = chemically synthesized
  source 1..20: mol_type = other DNA
aaaacacagttgcagaagca

SEQ ID NO: 16490 - DNA, 20 bp, synthetic construct
  misc_feature 1..20: note = chemically synthesized
  source 1..20: mol_type = other DNA
aaacacagttgcagaagcag

SEQ ID NO: 16491 - DNA, 20 bp, synthetic construct
  misc_feature 1..20: note = chemically synthesized
  source 1..20: mol_type = other DNA
cacagttgcagaagcagagg

SEQ ID NO: 16492 - DNA, 20 bp, synthetic construct
  misc_feature 1..20: note = chemically synthesized
  source 1..20: mol_type = other DNA
agaggaagtcattatacact

SEQ ID NO: 16493 - DNA, 20 bp, synthetic construct
  misc_feature 1..20: note = chemically synthesized
  source 1..20: mol_type = other DNA
cacttagaacatcattttat

SEQ ID NO: 16494 - DNA, 20 bp, synthetic construct
  misc_feature 1..20: note = chemically synthesized
  source 1..20: mol_type = other DNA
acttagaacatcattttata

SEQ ID NO: 16495 - DNA, 20 bp, synthetic construct
  misc_feature 1..20: note = chemically synthesized
  source 1..20: mol_type = other DNA
tagaacatcattttataagg

SEQ ID NO: 16496 - DNA, 20 bp, synthetic construct
  misc_feature 1..20: note = chemically synthesized
  source 1..20: mol_type = other DNA
aacatcattttataaggcag

SEQ ID NO: 16497 - DNA, 20 bp, synthetic construct
  misc_feature 1..20: note = chemically synthesized
  source 1..20: mol_type = other DNA
acatcattttataaggcagc

SEQ ID NO: 16498 - DNA, 20 bp, synthetic construct
  misc_feature 1..20: note = chemically synthesized
  source 1..20: mol_type = other DNA
attttataaggcagcaggtc

SEQ ID NO: 16499 - DNA, 20 bp, synthetic construct
  misc_feature 1..20: note = chemically synthesized
  source 1..20: mol_type = other DNA
ttataaggcagcaggtctgg

SEQ ID NO: 16500 - DNA, 20 bp, synthetic construct
  misc_feature 1..20: note = chemically synthesized
  source 1..20: mol_type = other DNA
tataaggcagcaggtctggt

SEQ ID NO: 16501 - DNA, 20 bp, synthetic construct
  misc_feature 1..20: note = chemically synthesized
  source 1..20: mol_type = other DNA
aaggcagcaggtctggtagg

SEQ ID NO: 16502 - DNA, 20 bp, synthetic construct
  misc_feature 1..20: note = chemically synthesized
  source 1..20: mol_type = other DNA
aggcagcaggtctggtagga

SEQ ID NO: 16503 - DNA, 20 bp, synthetic construct
  misc_feature 1..20: note = chemically synthesized
  source 1..20: mol_type = other DNA
gcagcaggtctggtaggaag

SEQ ID NO: 16504 - DNA, 20 bp, synthetic construct
  misc_feature 1..20: note = chemically synthesized
  source 1..20: mol_type = other DNA
aggtctggtaggaaggagat

SEQ ID NO: 16505 - DNA, 20 bp, synthetic construct
  misc_feature 1..20: note = chemically synthesized
  source 1..20: mol_type = other DNA
ggtctggtaggaaggagatt

SEQ ID NO: 16506 - DNA, 20 bp, synthetic construct
  misc_feature 1..20: note = chemically synthesized
  source 1..20: mol_type = other DNA
attaggtgctacttgtgaca

SEQ ID NO: 16507 - DNA, 20 bp, synthetic construct
  misc_feature 1..20: note = chemically synthesized
  source 1..20: mol_type = other DNA
ttaggtgctacttgtgacaa

SEQ ID NO: 16508 - DNA, 20 bp, synthetic construct
  misc_feature 1..20: note = chemically synthesized
  source 1..20: mol_type = other DNA
gtgctacttgtgacaaaggt

SEQ ID NO: 16509 - DNA, 20 bp, synthetic construct
  misc_feature 1..20: note = chemically synthesized
  source 1..20: mol_type = other DNA
tcagcaaatatttgtgttcc

SEQ ID NO: 16510 - DNA, 20 bp, synthetic construct
  misc_feature 1..20: note = chemically synthesized
  source 1..20: mol_type = other DNA
ttgtgttcccagcacttttc

SEQ ID NO: 16511 - DNA, 20 bp, synthetic construct
  misc_feature 1..20: note = chemically synthesized
  source 1..20: mol_type = other DNA
ccagcacttttctagatcct

SEQ ID NO: 16512 - DNA, 20 bp, synthetic construct
  misc_feature 1..20: note = chemically synthesized
  source 1..20: mol_type = other DNA
tagatcctcagttaaaatca

SEQ ID NO: 16513 - DNA, 20 bp, synthetic construct
  misc_feature 1..20: note = chemically synthesized
  source 1..20: mol_type = other DNA
atcctcagttaaaatcaaag

SEQ ID NO: 16514 - DNA, 20 bp, synthetic construct
  misc_feature 1..20: note = chemically synthesized
  source 1..20: mol_type = other DNA
agttaaaatcaaagcagctg

SEQ ID NO: 16515 - DNA, 20 bp, synthetic construct
  misc_feature 1..20: note = chemically synthesized
  source 1..20: mol_type = other DNA
aatcaaagcagctgcagtct

SEQ ID NO: 16516 - DNA, 20 bp, synthetic construct
  misc_feature 1..20: note = chemically synthesized
  source 1..20: mol_type = other DNA
caaagcagctgcagtcttgg

SEQ ID NO: 16517 - DNA, 20 bp, synthetic construct
  misc_feature 1..20: note = chemically synthesized
  source 1..20: mol_type = other DNA
agcagctgcagtcttggcag

SEQ ID NO: 16518 - DNA, 20 bp, synthetic construct
  misc_feature 1..20: note = chemically synthesized
  source 1..20: mol_type = other DNA
gcagctgcagtcttggcagt

SEQ ID NO: 16519 - DNA, 20 bp, synthetic construct
  misc_feature 1..20: note = chemically synthesized
  source 1..20: mol_type = other DNA
agctgcagtcttggcagtgg

SEQ ID NO: 16520 - DNA, 20 bp, synthetic construct
  misc_feature 1..20: note = chemically synthesized
  source 1..20: mol_type = other DNA
gctgcagtcttggcagtggg

SEQ ID NO: 16521 - DNA, 20 bp, synthetic construct
  misc_feature 1..20: note = chemically synthesized
  source 1..20: mol_type = other DNA
gtgatactcacactttgaac

SEQ ID NO: 16522 - DNA, 20 bp, synthetic construct
  misc_feature 1..20: note = chemically synthesized
  source 1..20: mol_type = other DNA
accacctgcactacctacaa

SEQ ID NO: 16523 - DNA, 20 bp, synthetic construct
  misc_feature 1..20: note = chemically synthesized
  source 1..20: mol_type = other DNA
acctgcactacctacaatgg

SEQ ID NO: 16524 - DNA, 20 bp, synthetic construct
  misc_feature 1..20: note = chemically synthesized
  source 1..20: mol_type = other DNA
gctccaaatattttatatga

SEQ ID NO: 16525 - DNA, 20 bp, synthetic construct
  misc_feature 1..20: note = chemically synthesized
  source 1..20: mol_type = other DNA
ctccaaatattttatatgaa

SEQ ID NO: 16526 - DNA, 20 bp, synthetic construct
  misc_feature 1..20: note = chemically synthesized
  source 1..20: mol_type = other DNA
tccaaatattttatatgaaa

SEQ ID NO: 16527 - DNA, 20 bp, synthetic construct
  misc_feature 1..20: note = chemically synthesized
  source 1..20: mol_type = other DNA
ccaaatattttatatgaaag

SEQ ID NO: 16528 - DNA, 20 bp, synthetic construct
  misc_feature 1..20: note = chemically synthesized
  source 1..20: mol_type = other DNA
tattttatatgaaaggggcc

SEQ ID NO: 16529 - DNA, 20 bp, synthetic construct
  misc_feature 1..20: note = chemically synthesized
  source 1..20: mol_type = other DNA
atatgaaaggggcctagaca

SEQ ID NO: 16530 - DNA, 20 bp, synthetic construct
  misc_feature 1..20: note = chemically synthesized
  source 1..20: mol_type = other DNA
gacatagcatgctgaatgaa

SEQ ID NO: 16531 - DNA, 20 bp, synthetic construct
  misc_feature 1..20: note = chemically synthesized
  source 1..20: mol_type = other DNA
acatagcatgctgaatgaaa

SEQ ID NO: 16532 - DNA, 20 bp, synthetic construct
  misc_feature 1..20: note = chemically synthesized
  source 1..20: mol_type = other DNA
tagcatgctgaatgaaaagg

SEQ ID NO: 16533 - DNA, 20 bp, synthetic construct
  misc_feature 1..20: note = chemically synthesized
  source 1..20: mol_type = other DNA
atgctgaatgaaaaggaagt

SEQ ID NO: 16534 - DNA, 20 bp, synthetic construct
  misc_feature 1..20: note = chemically synthesized
  source 1..20: mol_type = other DNA
ctgaatgaaaaggaagtgag

SEQ ID NO: 16535 - DNA, 20 bp, synthetic construct
  misc_feature 1..20: note = chemically synthesized
  source 1..20: mol_type = other DNA
tgaaaaggaagtgagtagac

SEQ ID NO: 16536 - DNA, 20 bp, synthetic construct
  misc_feature 1..20: note = chemically synthesized
  source 1..20: mol_type = other DNA
gtagactagtgctttccttg

SEQ ID NO: 16537 - DNA, 20 bp, synthetic construct
  misc_feature 1..20: note = chemically synthesized
  source 1..20: mol_type = other DNA
ttccttgaagctgtgcaacc

SEQ ID NO: 16538 - DNA, 20 bp, synthetic construct
  misc_feature 1..20: note = chemically synthesized
  source 1..20: mol_type = other DNA
tgaagctgtgcaaccaagca

SEQ ID NO: 16539 - DNA, 20 bp, synthetic construct
  misc_feature 1..20: note = chemically synthesized
  source 1..20: mol_type = other DNA
aaccaagcatagtttttaca

SEQ ID NO: 16540 - DNA, 20 bp, synthetic construct
  misc_feature 1..20: note = chemically synthesized
  source 1..20: mol_type = other DNA
catagatcgtgtgtttcaca

SEQ ID NO: 16541 - DNA, 20 bp, synthetic construct
  misc_feature 1..20: note = chemically synthesized
  source 1..20: mol_type = other DNA
tgtttcacatggtgtgataa

SEQ ID NO: 16542 - DNA, 20 bp, synthetic construct
  misc_feature 1..20: note = chemically synthesized
  source 1..20: mol_type = other DNA
acatggtgtgataacagctt

SEQ ID NO: 16543 - DNA, 20 bp, synthetic construct
  misc_feature 1..20: note = chemically synthesized
  source 1..20: mol_type = other DNA
agcttgagatgccattgaca

SEQ ID NO: 16544 - DNA, 20 bp, synthetic construct
  misc_feature 1..20: note = chemically synthesized
  source 1..20: mol_type = other DNA
atgccattgacatggcccac

SEQ ID NO: 16545 - DNA, 20 bp, synthetic construct
  misc_feature 1..20: note = chemically synthesized
  source 1..20: mol_type = other DNA
gcccaccggcttatccacat

SEQ ID NO: 16546 - DNA, 20 bp, synthetic construct
  misc_feature 1..20: note = chemically synthesized
  source 1..20: mol_type = other DNA
ggcttatccacatcagtaat

SEQ ID NO: 16547 - DNA, 20 bp, synthetic construct
  misc_feature 1..20: note = chemically synthesized
  source 1..20: mol_type = other DNA
gcttatccacatcagtaatt

SEQ ID NO: 16548 - DNA, 20 bp, synthetic construct
  misc_feature 1..20: note = chemically synthesized
  source 1..20: mol_type = other DNA
cttatccacatcagtaatta

SEQ ID NO: 16549 - DNA, 20 bp, synthetic construct
  misc_feature 1..20: note = chemically synthesized
  source 1..20: mol_type = other DNA
ccacatcagtaattagggca

SEQ ID NO: 16550 - DNA, 20 bp, synthetic construct
  misc_feature 1..20: note = chemically synthesized
  source 1..20: mol_type = other DNA
tactatgcatcccgtgattg

SEQ ID NO: 16551 - DNA, 20 bp, synthetic construct
  misc_feature 1..20: note = chemically synthesized
  source 1..20: mol_type = other DNA
tgtgtttaaaaatgcaatta

SEQ ID NO: 16552 - DNA, 20 bp, synthetic construct
  misc_feature 1..20: note = chemically synthesized
  source 1..20: mol_type = other DNA
tgcaattatggactcattca

SEQ ID NO: 16553 - DNA, 20 bp, synthetic construct
  misc_feature 1..20: note = chemically synthesized
  source 1..20: mol_type = other DNA
tatggactcattcaaagtga

SEQ ID NO: 16554 - DNA, 20 bp, synthetic construct
  misc_feature 1..20: note = chemically synthesized
  source 1..20: mol_type = other DNA
gactcattcaaagtgaaagc

SEQ ID NO: 16555 - DNA, 20 bp, synthetic construct
  misc_feature 1..20: note = chemically synthesized
  source 1..20: mol_type = other DNA
aagctggtatgacaatacat

SEQ ID NO: 16556 - DNA, 20 bp, synthetic construct
  misc_feature 1..20: note = chemically synthesized
  source 1..20: mol_type = other DNA
ttttatgaataaattttata

SEQ ID NO: 16557 - DNA, 20 bp, synthetic construct
  misc_feature 1..20: note = chemically synthesized
  source 1..20: mol_type = other DNA
aataaattttataaagaaat

SEQ ID NO: 16558 - DNA, 20 bp, synthetic construct
  misc_feature 1..20: note = chemically synthesized
  source 1..20: mol_type = other DNA
aagaaataagctaataccta

SEQ ID NO: 16559 - DNA, 20 bp, synthetic construct
  misc_feature 1..20: note = chemically synthesized
  source 1..20: mol_type = other DNA
gaaataagctaatacctaca

SEQ ID NO: 16560 - DNA, 20 bp, synthetic construct
  misc_feature 1..20: note = chemically synthesized
  source 1..20: mol_type = other DNA
acagagtgtttattaaatgc

SEQ ID NO: 16561 - DNA, 20 bp, synthetic construct
  misc_feature 1..20: note = chemically synthesized
  source 1..20: mol_type = other DNA
cagagtgtttattaaatgct

SEQ ID NO: 16562 - DNA, 20 bp, synthetic construct
  misc_feature 1..20: note = chemically synthesized
  source 1..20: mol_type = other DNA
tgtttattaaatgctaggca

SEQ ID NO: 16563 - DNA, 20 bp, synthetic construct
  misc_feature 1..20: note = chemically synthesized
  source 1..20: mol_type = other DNA
taaatgctaggcacagttct

SEQ ID NO: 16564 - DNA, 20 bp, synthetic construct
  misc_feature 1..20: note = chemically synthesized
  source 1..20: mol_type = other DNA
agttctgagtgatttacaac

SEQ ID NO: 16565 - DNA, 20 bp, synthetic construct
  misc_feature 1..20: note = chemically synthesized
  source 1..20: mol_type = other DNA
taattttcacaacattatta

SEQ ID NO: 16566 - DNA, 20 bp, synthetic construct
  misc_feature 1..20: note = chemically synthesized
  source 1..20: mol_type = other DNA
aattttcacaacattattac

SEQ ID NO: 16567 - DNA, 20 bp, synthetic construct
  misc_feature 1..20: note = chemically synthesized
  source 1..20: mol_type = other DNA
tttcacaacattattacagg

SEQ ID NO: 16568 - DNA, 20 bp, synthetic construct
  misc_feature 1..20: note = chemically synthesized
  source 1..20: mol_type = other DNA
ttacaggtagattttatata

SEQ ID NO: 16569 - DNA, 20 bp, synthetic construct
  misc_feature 1..20: note = chemically synthesized
  source 1..20: mol_type = other DNA
acaggtagattttatatatg

SEQ ID NO: 16570 - DNA, 20 bp, synthetic construct
  misc_feature 1..20: note = chemically synthesized
  source 1..20: mol_type = other DNA
attttatatatggagaaact

SEQ ID NO: 16571 - DNA, 20 bp, synthetic construct
  misc_feature 1..20: note = chemically synthesized
  source 1..20: mol_type = other DNA
ttttatatatggagaaactg

SEQ ID NO: 16572 - DNA, 20 bp, synthetic construct
  misc_feature 1..20: note = chemically synthesized
  source 1..20: mol_type = other DNA
tatatggagaaactgaggca

SEQ ID NO: 16573 - DNA, 20 bp, synthetic construct
  misc_feature 1..20: note = chemically synthesized
  source 1..20: mol_type = other DNA
tatggagaaactgaggcaca

SEQ ID NO: 16574 - DNA, 20 bp, synthetic construct
  misc_feature 1..20: note = chemically synthesized
  source 1..20: mol_type = other DNA
taataaatctcaacattacc

SEQ ID NO: 16575 - DNA, 20 bp, synthetic construct
  misc_feature 1..20: note = chemically synthesized
  source 1..20: mol_type = other DNA
aataaatctcaacattaccc

SEQ ID NO: 16576 - DNA, 20 bp, synthetic construct
  misc_feature 1..20: note = chemically synthesized
  source 1..20: mol_type = other DNA
tctcaacattacccaggtga

SEQ ID NO: 16577 - DNA, 20 bp, synthetic construct
  misc_feature 1..20: note = chemically synthesized
  source 1..20: mol_type = other DNA
caacattacccaggtgatgg

SEQ ID NO: 16578 - DNA, 20 bp, synthetic construct
  misc_feature 1..20: note = chemically synthesized
  source 1..20: mol_type = other DNA
acattacccaggtgatggtg

SEQ ID NO: 16579 - DNA, 20 bp, synthetic construct
  misc_feature 1..20: note = chemically synthesized
  source 1..20: mol_type = other DNA
tacccaggtgatggtggagt

SEQ ID NO: 16580 - DNA, 20 bp, synthetic construct
  misc_feature 1..20: note = chemically synthesized
  source 1..20: mol_type = other DNA
agttggaattccaaatcatg

SEQ ID NO: 16581 - DNA, 20 bp, synthetic construct
  misc_feature 1..20: note = chemically synthesized
  source 1..20: mol_type = other DNA
caaatcatgcagtctgactt

SEQ ID NO: 16582 - DNA, 20 bp, synthetic construct
  misc_feature 1..20: note = chemically synthesized
  source 1..20: mol_type = other DNA
atgcagtctgactttagctg

SEQ ID NO: 16583 - DNA, 20 bp, synthetic construct
  misc_feature 1..20: note = chemically synthesized
  source 1..20: mol_type = other DNA
agtctgactttagctgtaga

SEQ ID NO: 16584 - DNA, 20 bp, synthetic construct
  misc_feature 1..20: note = chemically synthesized
  source 1..20: mol_type = other DNA
tgactttagctgtagacagc

SEQ ID NO: 16585 - DNA, 20 bp, synthetic construct
  misc_feature 1..20: note = chemically synthesized
  source 1..20: mol_type = other DNA
tttagctgtagacagcaaga

SEQ ID NO: 16586 - DNA, 20 bp, synthetic construct
  misc_feature 1..20: note = chemically synthesized
  source 1..20: mol_type = other DNA
gctgtagacagcaagatagt

SEQ ID NO: 16587 - DNA, 20 bp, synthetic construct
  misc_feature 1..20: note = chemically synthesized
  source 1..20: mol_type = other DNA
agacagcaagatagtaagta

SEQ ID NO: 16588 - DNA, 20 bp, synthetic construct
  misc_feature 1..20: note = chemically synthesized
  source 1..20: mol_type = other DNA
gacagcaagatagtaagtaa

SEQ ID NO: 16589 - DNA, 20 bp, synthetic construct
  misc_feature 1..20: note = chemically synthesized
  source 1..20: mol_type = other DNA
caagatagtaagtaaaggaa

SEQ ID NO: 16590 - DNA, 20 bp, synthetic construct
  misc_feature 1..20: note = chemically synthesized
  source 1..20: mol_type = other DNA
agatagtaagtaaaggaatg

SEQ ID NO: 16591 - DNA, 20 bp, synthetic construct
  misc_feature 1..20: note = chemically synthesized
  source 1..20: mol_type = other DNA
ggaatggagcaacaaattga

SEQ ID NO: 16592 - DNA, 20 bp, synthetic construct
  misc_feature 1..20: note = chemically synthesized
  source 1..20: mol_type = other DNA
ttttgcttgtttgtttgaaa

SEQ ID NO: 16593 - DNA, 20 bp, synthetic construct
  misc_feature 1..20: note = chemically synthesized
  source 1..20: mol_type = other DNA
tttgcttgtttgtttgaaac

SEQ ID NO: 16594 - DNA, 20 bp, synthetic construct
  misc_feature 1..20: note = chemically synthesized
  source 1..20: mol_type = other DNA
ttgcttgtttgtttgaaaca

SEQ ID NO: 16595 - DNA, 20 bp, synthetic construct
  misc_feature 1..20: note = chemically synthesized
  source 1..20: mol_type = other DNA
agggtctcactctgtcaccc

SEQ ID NO: 16596 - DNA, 20 bp, synthetic construct
  misc_feature 1..20: note = chemically synthesized
  source 1..20: mol_type = other DNA
tctcactctgtcaccccggc

SEQ ID NO: 16597 - DNA, 20 bp, synthetic construct
  misc_feature 1..20: note = chemically synthesized
  source 1..20: mol_type = other DNA
tcactctgtcaccccggctg

SEQ ID NO: 16598 - DNA, 20 bp, synthetic construct
  misc_feature 1..20: note = chemically synthesized
  source 1..20: mol_type = other DNA
tcaccccggctggagtgcaa

SEQ ID NO: 16599 - DNA, 20 bp, synthetic construct
  misc_feature 1..20: note = chemically synthesized
  source 1..20: mol_type = other DNA
tggtgcaatcttgctcactg

SEQ ID NO: 16600 - DNA, 20 bp, synthetic construct
  misc_feature 1..20: note = chemically synthesized
  source 1..20: mol_type = other DNA
cttgctcactgaagcctcac

SEQ ID NO: 16601 - DNA, 20 bp, synthetic construct
  misc_feature 1..20: note = chemically synthesized
  source 1..20: mol_type = other DNA
tgaagcctcactagaacgcc

SEQ ID NO: 16602 - DNA, 20 bp, synthetic construct
  misc_feature 1..20: note = chemically synthesized
  source 1..20: mol_type = other DNA
ttcaattgatcctcctgctt

SEQ ID NO: 16603 - DNA, 20 bp, synthetic construct
  misc_feature 1..20: note = chemically synthesized
  source 1..20: mol_type = other DNA
atcctcctgctttagcctct

SEQ ID NO: 16604 - DNA, 20 bp, synthetic construct
  misc_feature 1..20: note = chemically synthesized
  source 1..20: mol_type = other DNA
tcctcctgctttagcctctc

SEQ ID NO: 16605 - DNA, 20 bp, synthetic construct
  misc_feature 1..20: note = chemically synthesized
  source 1..20: mol_type = other DNA
tcctgctttagcctctcagg

SEQ ID NO: 16606 - DNA, 20 bp, synthetic construct
  misc_feature 1..20: note = chemically synthesized
  source 1..20: mol_type = other DNA
gctttagcctctcaggtagc

SEQ ID NO: 16607 - DNA, 20 bp, synthetic construct
  misc_feature 1..20: note = chemically synthesized
  source 1..20: mol_type = other DNA
ctttagcctctcaggtagct

SEQ ID NO: 16608 - DNA, 20 bp, synthetic construct
  misc_feature 1..20: note = chemically synthesized
  source 1..20: mol_type = other DNA
ctctcaggtagctaggacta

SEQ ID NO: 16609 - DNA, 20 bp, synthetic construct
  misc_feature 1..20: note = chemically synthesized
  source 1..20: mol_type = other DNA
tctcaggtagctaggactac

SEQ ID NO: 16610 - DNA, 20 bp, synthetic construct
  misc_feature 1..20: note = chemically synthesized
  source 1..20: mol_type = other DNA
gtagctaggactacaggtgt

SEQ ID NO: 16611 - DNA, 20 bp, synthetic construct
  misc_feature 1..20: note = chemically synthesized
  source 1..20: mol_type = other DNA
actacaggtgtgagcctcca

SEQ ID NO: 16612 - DNA, 20 bp, synthetic construct
  misc_feature 1..20: note = chemically synthesized
  source 1..20: mol_type = other DNA
caggtgtgagcctccatggc

SEQ ID NO: 16613 - DNA, 20 bp, synthetic construct
  misc_feature 1..20: note = chemically synthesized
  source 1..20: mol_type = other DNA
tgtgagcctccatggccagc

SEQ ID NO: 16614 - DNA, 20 bp, synthetic construct
  misc_feature 1..20: note = chemically synthesized
  source 1..20: mol_type = other DNA
tgagcctccatggccagcta

SEQ ID NO: 16615 - DNA, 20 bp, synthetic construct
  misc_feature 1..20: note = chemically synthesized
  source 1..20: mol_type = other DNA
agaaattttttaaatttctg

SEQ ID NO: 16616 - DNA, 20 bp, synthetic construct
  misc_feature 1..20: note = chemically synthesized
  source 1..20: mol_type = other DNA
tttttaaatttctgtagaaa

SEQ ID NO: 16617 - DNA, 20 bp, synthetic construct
  misc_feature 1..20: note = chemically synthesized
  source 1..20: mol_type = other DNA
ttttaaatttctgtagaaac

SEQ ID NO: 16618 - DNA, 20 bp, synthetic construct
  misc_feature 1..20: note = chemically synthesized
  source 1..20: mol_type = other DNA
tttaaatttctgtagaaaca

SEQ ID NO: 16619 - DNA, 20 bp, synthetic construct
  misc_feature 1..20: note = chemically synthesized
  source 1..20: mol_type = other DNA
cagggtctccctatgttccc

SEQ ID NO: 16620 - DNA, 20 bp, synthetic construct
  misc_feature 1..20: note = chemically synthesized
  source 1..20: mol_type = other DNA
agggtctccctatgttcccc

SEQ ID NO: 16621 - DNA, 20 bp, synthetic construct
  misc_feature 1..20: note = chemically synthesized
  source 1..20: mol_type = other DNA
tctccctatgttccccaggc

SEQ ID NO: 16622 - DNA, 20 bp, synthetic construct
  misc_feature 1..20: note = chemically synthesized
  source 1..20: mol_type = other DNA
ccaggctggtatccaactct

SEQ ID NO: 16623 - DNA, 20 bp, synthetic construct
  misc_feature 1..20: note = chemically synthesized
  source 1..20: mol_type = other DNA
ctcaaacaattctcccacct

SEQ ID NO: 16624 - DNA, 20 bp, synthetic construct
  misc_feature 1..20: note = chemically synthesized
  source 1..20: mol_type = other DNA
tctcccacctcagccttgaa

SEQ ID NO: 16625 - DNA, 20 bp, synthetic construct
  misc_feature 1..20: note = chemically synthesized
  source 1..20: mol_type = other DNA
cctcagccttgaaaagtgtt

SEQ ID NO: 16626 - DNA, 20 bp, synthetic construct
  misc_feature 1..20: note = chemically synthesized
  source 1..20: mol_type = other DNA
cttgaaaagtgttgagatta

SEQ ID NO: 16627 - DNA, 20 bp, synthetic construct
  misc_feature 1..20: note = chemically synthesized
  source 1..20: mol_type = other DNA
ttgaaaagtgttgagattac

SEQ ID NO: 16628 - DNA, 20 bp, synthetic construct
  misc_feature 1..20: note = chemically synthesized
  source 1..20: mol_type = other DNA
acaggtgtgaatcaccatgc

SEQ ID NO: 16629 - DNA, 20 bp, synthetic construct
  misc_feature 1..20: note = chemically synthesized
  source 1..20: mol_type = other DNA
caggtgtgaatcaccatgct

SEQ ID NO: 16630 - DNA, 20 bp, synthetic construct
  misc_feature 1..20: note = chemically synthesized
  source 1..20: mol_type = other DNA
atcaccatgctgggccttga

SEQ ID NO: 16631 - DNA, 20 bp, synthetic construct
  misc_feature 1..20: note = chemically synthesized
  source 1..20: mol_type = other DNA
gggccttgatggatctttaa

SEQ ID NO: 16632 - DNA, 20 bp, synthetic construct
  misc_feature 1..20: note = chemically synthesized
  source 1..20: mol_type = other DNA
ccttgatggatctttaaaag

SEQ ID NO: 16633 - DNA, 20 bp, synthetic construct
  misc_feature 1..20: note = chemically synthesized
  source 1..20: mol_type = other DNA
tgatggatctttaaaagtgg

SEQ ID NO: 16634 - DNA, 20 bp, synthetic construct
  misc_feature 1..20: note = chemically synthesized
  source 1..20: mol_type = other DNA
gatggatctttaaaagtggt

SEQ ID NO: 16635 - DNA, 20 bp, synthetic construct
  misc_feature 1..20: note = chemically synthesized
  source 1..20: mol_type = other DNA
atggatctttaaaagtggtg

SEQ ID NO: 16636 - DNA, 20 bp, synthetic construct
  misc_feature 1..20: note = chemically synthesized
  source 1..20: mol_type = other DNA
tggatctttaaaagtggtgg

SEQ ID NO: 16637 - DNA, 20 bp, synthetic construct
  misc_feature 1..20: note = chemically synthesized
  source 1..20: mol_type = other DNA
ggatctttaaaagtggtggg

SEQ ID NO: 16638 - DNA, 20 bp, synthetic construct
  misc_feature 1..20: note = chemically synthesized
  source 1..20: mol_type = other DNA
tctttaaaagtggtgggggg

SEQ ID NO: 16639 - DNA, 20 bp, synthetic construct
  misc_feature 1..20: note = chemically synthesized
  source 1..20: mol_type = other DNA
ctttaaaagtggtggggggt

SEQ ID NO: 16640 - DNA, 20 bp, synthetic construct
  misc_feature 1..20: note = chemically synthesized
  source 1..20: mol_type = other DNA
ttaaaagtggtggggggtag

SEQ ID NO: 16641 - DNA, 20 bp, synthetic construct
  misc_feature 1..20: note = chemically synthesized
  source 1..20: mol_type = other DNA
gtggtggggggtaggagaaa

SEQ ID NO: 16642 - DNA, 20 bp, synthetic construct
  misc_feature 1..20: note = chemically synthesized
  source 1..20: mol_type = other DNA
ggtggggggtaggagaaaaa

SEQ ID NO: 16643 - DNA, 20 bp, synthetic construct
  misc_feature 1..20: note = chemically synthesized
  source 1..20: mol_type = other DNA
gtggggggtaggagaaaaag

SEQ ID NO: 16644 - DNA, 20 bp, synthetic construct
  misc_feature 1..20: note = chemically synthesized
  source 1..20: mol_type = other DNA
gggggtaggagaaaaagagg

SEQ ID NO: 16645 - DNA, 20 bp, synthetic construct
  misc_feature 1..20: note = chemically synthesized
  source 1..20: mol_type = other DNA
aaaaagaggaagaacaaaaa

SEQ ID NO: 16646 - DNA, 20 bp, synthetic construct
  misc_feature 1..20: note = chemically synthesized
  source 1..20: mol_type = other DNA
gaacaaaaacagtatcacga

SEQ ID NO: 16647 - DNA, 20 bp, synthetic construct
  misc_feature 1..20: note = chemically synthesized
  source 1..20: mol_type = other DNA
tcacgaaagataaacatcgt

SEQ ID NO: 16648 - DNA, 20 bp, synthetic construct
  misc_feature 1..20: note = chemically synthesized
  source 1..20: mol_type = other DNA
cacgaaagataaacatcgtt

SEQ ID NO: 16649 - DNA, 20 bp, synthetic construct
  misc_feature 1..20: note = chemically synthesized
  source 1..20: mol_type = other DNA
agataaacatcgttaggtct

SEQ ID NO: 16650 - DNA, 20 bp, synthetic construct
  misc_feature 1..20: note = chemically synthesized
  source 1..20: mol_type = other DNA
gataaacatcgttaggtctc

SEQ ID NO: 16651 - DNA, 20 bp, synthetic construct
  misc_feature 1..20: note = chemically synthesized
  source 1..20: mol_type = other DNA
aaacatcgttaggtctcggg

SEQ ID NO: 16652 - DNA, 20 bp, synthetic construct
  misc_feature 1..20: note = chemically synthesized
  source 1..20: mol_type = other DNA
aacatcgttaggtctcggga

SEQ ID NO: 16653 - DNA, 20 bp, synthetic construct
  misc_feature 1..20: note = chemically synthesized
  source 1..20: mol_type = other DNA
tcgttaggtctcgggaagga

SEQ ID NO: 16654 - DNA, 20 bp, synthetic construct
  misc_feature 1..20: note = chemically synthesized
  source 1..20: mol_type = other DNA
cgttaggtctcgggaaggat

SEQ ID NO: 16655 - DNA, 20 bp, synthetic construct
  misc_feature 1..20: note = chemically synthesized
  source 1..20: mol_type = other DNA
ggatccttttcattttgctc

SEQ ID NO: 16656 - DNA, 20 bp, synthetic construct
  misc_feature 1..20: note = chemically synthesized
  source 1..20: mol_type = other DNA
atccttttcattttgctcta

SEQ ID NO: 16657 - DNA, 20 bp, synthetic construct
  misc_feature 1..20: note = chemically synthesized
  source 1..20: mol_type = other DNA
tttcattttgctctagagaa

SEQ ID NO: 16658 - DNA, 20 bp, synthetic construct
  misc_feature 1..20: note = chemically synthesized
  source 1..20: mol_type = other DNA
tgctctagagaaaagccatt

SEQ ID NO: 16659 - DNA, 20 bp, synthetic construct
  misc_feature 1..20: note = chemically synthesized
  source 1..20: mol_type = other DNA
acttctgtgttaacaaaaaa

SEQ ID NO: 16660 - DNA, 20 bp, synthetic construct
  misc_feature 1..20: note = chemically synthesized
  source 1..20: mol_type = other DNA
tgtgttaacaaaaaacagcc

SEQ ID NO: 16661 - DNA, 20 bp, synthetic construct
  misc_feature 1..20: note = chemically synthesized
  source 1..20: mol_type = other DNA
gttaacaaaaaacagccgag

SEQ ID NO: 16662 - DNA, 20 bp, synthetic construct
  misc_feature 1..20: note = chemically synthesized
  source 1..20: mol_type = other DNA
caaaaaacagccgagtagcc

SEQ ID NO: 16663 - DNA, 20 bp, synthetic construct
  misc_feature 1..20: note = chemically synthesized
  source 1..20: mol_type = other DNA
agtagcctagtattaaactt

SEQ ID NO: 16664 - DNA, 20 bp, synthetic construct
  misc_feature 1..20: note = chemically synthesized
  source 1..20: mol_type = other DNA
tagcctagtattaaacttta

SEQ ID NO: 16665 - DNA, 20 bp, synthetic construct
  misc_feature 1..20: note = chemically synthesized
  source 1..20: mol_type = other DNA
cctagtattaaactttagag

SEQ ID NO: 16666 - DNA, 20 bp, synthetic construct
  misc_feature 1..20: note = chemically synthesized
  source 1..20: mol_type = other DNA
tttagagcagttgttcttta

SEQ ID NO: 16667 - DNA, 20 bp, synthetic construct
  misc_feature 1..20: note = chemically synthesized
  source 1..20: mol_type = other DNA
gttgttctttacggcaatta

SEQ ID NO: 16668 - DNA, 20 bp, synthetic construct
  misc_feature 1..20: note = chemically synthesized
  source 1..20: mol_type = other DNA
ttgttctttacggcaattac

SEQ ID NO: 16669 - DNA, 20 bp, synthetic construct
  misc_feature 1..20: note = chemically synthesized
  source 1..20: mol_type = other DNA
tgttctttacggcaattaca

SEQ ID NO: 16670 - DNA, 20 bp, synthetic construct
  misc_feature 1..20: note = chemically synthesized
  source 1..20: mol_type = other DNA
gttctttacggcaattacag

SEQ ID NO: 16671 - DNA, 20 bp, synthetic construct
  misc_feature 1..20: note = chemically synthesized
  source 1..20: mol_type = other DNA
acggcaattacaggggcctt

SEQ ID NO: 16672 - DNA, 20 bp, synthetic construct
  misc_feature 1..20: note = chemically synthesized
  source 1..20: mol_type = other DNA
cggcaattacaggggccttc

SEQ ID NO: 16673 - DNA, 20 bp, synthetic construct
  misc_feature 1..20: note = chemically synthesized
  source 1..20: mol_type = other DNA
caattacaggggccttcagg

SEQ ID NO: 16674 - DNA, 20 bp, synthetic construct
  misc_feature 1..20: note = chemically synthesized
  source 1..20: mol_type = other DNA
aggggccttcaggaagctga

SEQ ID NO: 16675 - DNA, 20 bp, synthetic construct
  misc_feature 1..20: note = chemically synthesized
  source 1..20: mol_type = other DNA
ggccttcaggaagctgatgg

SEQ ID NO: 16676 - DNA, 20 bp, synthetic construct
  misc_feature 1..20: note = chemically synthesized
  source 1..20: mol_type = other DNA
aggaagctgatggaagtgtg

SEQ ID NO: 16677 - DNA, 20 bp, synthetic construct
  misc_feature 1..20: note = chemically synthesized
  source 1..20: mol_type = other DNA
gaagtgtgaagtcctcttct

SEQ ID NO: 16678 - DNA, 20 bp, synthetic construct
  misc_feature 1..20: note = chemically synthesized
  source 1..20: mol_type = other DNA
agtgtgaagtcctcttctca

SEQ ID NO: 16679 - DNA, 20 bp, synthetic construct
  misc_feature 1..20: note = chemically synthesized
  source 1..20: mol_type = other DNA
gaagtcctcttctcagagaa

SEQ ID NO: 16680 - DNA, 20 bp, synthetic construct
  misc_feature 1..20: note = chemically synthesized
  source 1..20: mol_type = other DNA
atatacgtgcacctaatttt

SEQ ID NO: 16681 - DNA, 20 bp, synthetic construct
  misc_feature 1..20: note = chemically synthesized
  source 1..20: mol_type = other DNA
atttttagatataatttctg

SEQ ID NO: 16682 - DNA, 20 bp, synthetic construct
  misc_feature 1..20: note = chemically synthesized
  source 1..20: mol_type = other DNA
tttttagatataatttctga

SEQ ID NO: 16683 - DNA, 20 bp, synthetic construct
  misc_feature 1..20: note = chemically synthesized
  source 1..20: mol_type = other DNA
agatataatttctgaaggtt

SEQ ID NO: 16684 - DNA, 20 bp, synthetic construct
  misc_feature 1..20: note = chemically synthesized
  source 1..20: mol_type = other DNA
tgaaggtttagaaactcctt

SEQ ID NO: 16685 - DNA, 20 bp, synthetic construct
  misc_feature 1..20: note = chemically synthesized
  source 1..20: mol_type = other DNA
ccttgagttcacttatatca

SEQ ID NO: 16686 - DNA, 20 bp, synthetic construct
  misc_feature 1..20: note = chemically synthesized
  source 1..20: mol_type = other DNA
tatatcaaagtcctcacctt

SEQ ID NO: 16687 - DNA, 20 bp, synthetic construct
  misc_feature 1..20: note = chemically synthesized
  source 1..20: mol_type = other DNA
cacctttagaactcctgtcc

SEQ ID NO: 16688 - DNA, 20 bp, synthetic construct
  misc_feature 1..20: note = chemically synthesized
  source 1..20: mol_type = other DNA
ctttagaactcctgtcctag

SEQ ID NO: 16689 - DNA, 20 bp, synthetic construct
  misc_feature 1..20: note = chemically synthesized
  source 1..20: mol_type = other DNA
ttagaactcctgtcctagaa

SEQ ID NO: 16690 - DNA, 20 bp, synthetic construct
  misc_feature 1..20: note = chemically synthesized
  source 1..20: mol_type = other DNA
gaactcctgtcctagaagag

SEQ ID NO: 16691 - DNA, 20 bp, synthetic construct
  misc_feature 1..20: note = chemically synthesized
  source 1..20: mol_type = other DNA
ttccataaccactttgactc

SEQ ID NO: 16692 - DNA, 20 bp, synthetic construct
  misc_feature 1..20: note = chemically synthesized
  source 1..20: mol_type = other DNA
gccacttgtaccatgtaatt

SEQ ID NO: 16693 - DNA, 20 bp, synthetic construct
  misc_feature 1..20: note = chemically synthesized
  source 1..20: mol_type = other DNA
cacttgtaccatgtaattca

SEQ ID NO: 16694 - DNA, 20 bp, synthetic construct
  misc_feature 1..20: note = chemically synthesized
  source 1..20: mol_type = other DNA
acttgtaccatgtaattcag

SEQ ID NO: 16695 - DNA, 20 bp, synthetic construct
  misc_feature 1..20: note = chemically synthesized
  source 1..20: mol_type = other DNA
taccatgtaattcagaggtg

SEQ ID NO: 16696 - DNA, 20 bp, synthetic construct
  misc_feature 1..20: note = chemically synthesized
  source 1..20: mol_type = other DNA
taattcagaggtgtagtgtc

SEQ ID NO: 16697 - DNA, 20 bp, synthetic construct
  misc_feature 1..20: note = chemically synthesized
  source 1..20: mol_type = other DNA
agaggtgtagtgtcaagact

SEQ ID NO: 16698 - DNA, 20 bp, synthetic construct
  misc_feature 1..20: note = chemically synthesized
  source 1..20: mol_type = other DNA
gaggtgtagtgtcaagactg

SEQ ID NO: 16699 - DNA, 20 bp, synthetic construct
  misc_feature 1..20: note = chemically synthesized
  source 1..20: mol_type = other DNA
ggtgtagtgtcaagactgag

SEQ ID NO: 16700 - DNA, 20 bp, synthetic construct
  misc_feature 1..20: note = chemically synthesized
  source 1..20: mol_type = other DNA
gtgtagtgtcaagactgagg

SEQ ID NO: 16701 - DNA, 20 bp, synthetic construct
  misc_feature 1..20: note = chemically synthesized
  source 1..20: mol_type = other DNA
tagtgtcaagactgaggagg

SEQ ID NO: 16702 - DNA, 20 bp, synthetic construct
  misc_feature 1..20: note = chemically synthesized
  source 1..20: mol_type = other DNA
tgtcaagactgaggaggaag

SEQ ID NO: 16703 - DNA, 20 bp, synthetic construct
  misc_feature 1..20: note = chemically synthesized
  source 1..20: mol_type = other DNA
gtcaagactgaggaggaagc

SEQ ID NO: 16704 - DNA, 20 bp, synthetic construct
  misc_feature 1..20: note = chemically synthesized
  source 1..20: mol_type = other DNA
ggaagcaggtaaattatgtc

SEQ ID NO: 16705 - DNA, 20 bp, synthetic construct
  misc_feature 1..20: note = chemically synthesized
  source 1..20: mol_type = other DNA
aattatgtccagcaatacgt

SEQ ID NO: 16706 - DNA, 20 bp, synthetic construct
  misc_feature 1..20: note = chemically synthesized
  source 1..20: mol_type = other DNA
tgtccagcaatacgttggct

SEQ ID NO: 16707 - DNA, 20 bp, synthetic construct
  misc_feature 1..20: note = chemically synthesized
  source 1..20: mol_type = other DNA
gtccagcaatacgttggctt

SEQ ID NO: 16708 - DNA, 20 bp, synthetic construct
  misc_feature 1..20: note = chemically synthesized
  source 1..20: mol_type = other DNA
aggcaaaaacaaattgtttc

SEQ ID NO: 16709 - DNA, 20 bp, synthetic construct
  misc_feature 1..20: note = chemically synthesized
  source 1..20: mol_type = other DNA
aattgtttctagtccatttt

SEQ ID NO: 16710 - DNA, 20 bp, synthetic construct
  misc_feature 1..20: note = chemically synthesized
  source 1..20: mol_type = other DNA
ttgtttctagtccattttaa

SEQ ID NO: 16711 - DNA, 20 bp, synthetic construct
  misc_feature 1..20: note = chemically synthesized
  source 1..20: mol_type = other DNA
tgtttctagtccattttaag

SEQ ID NO: 16712 - DNA, 20 bp, synthetic construct
  misc_feature 1..20: note = chemically synthesized
  source 1..20: mol_type = other DNA
gtttctagtccattttaaga

SEQ ID NO: 16713 - DNA, 20 bp, synthetic construct
  misc_feature 1..20: note = chemically synthesized
  source 1..20: mol_type = other DNA
tctagtccattttaagaggg

SEQ ID NO: 16714 - DNA, 20 bp, synthetic construct
  misc_feature 1..20: note = chemically synthesized
  source 1..20: mol_type = other DNA
ttaagagggaagcatttatt

SEQ ID NO: 16715 - DNA, 20 bp, synthetic construct
  misc_feature 1..20: note = chemically synthesized
  source 1..20: mol_type = other DNA
taagagggaagcatttattt

SEQ ID NO: 16716 - DNA, 20 bp, synthetic construct
  misc_feature 1..20: note = chemically synthesized
  source 1..20: mol_type = other DNA
aagagggaagcatttattta

SEQ ID NO: 16717 - DNA, 20 bp, synthetic construct
  misc_feature 1..20: note = chemically synthesized
  source 1..20: mol_type = other DNA
atttagggactacatcgctc

SEQ ID NO: 16718 - DNA, 20 bp, synthetic construct
  misc_feature 1..20: note = chemically synthesized
  source 1..20: mol_type = other DNA
ccttaacatgttaatttctc

SEQ ID NO: 16719 - DNA, 20 bp, synthetic construct
  misc_feature 1..20: note = chemically synthesized
  source 1..20: mol_type = other DNA
ttaacatgttaatttctcca

SEQ ID NO: 16720 - DNA, 20 bp, synthetic construct
  misc_feature 1..20: note = chemically synthesized
  source 1..20: mol_type = other DNA
tccagagtttgtaatgttct

SEQ ID NO: 16721 - DNA, 20 bp, synthetic construct
  misc_feature 1..20: note = chemically synthesized
  source 1..20: mol_type = other DNA
gagtttgtaatgttctgagc

SEQ ID NO: 16722 - DNA, 20 bp, synthetic construct
  misc_feature 1..20: note = chemically synthesized
  source 1..20: mol_type = other DNA
atgttctgagcaagtgtgtg

SEQ ID NO: 16723 - DNA, 20 bp, synthetic construct
  misc_feature 1..20: note = chemically synthesized
  source 1..20: mol_type = other DNA
ttctgagcaagtgtgtgcag

SEQ ID NO: 16724 - DNA, 20 bp, synthetic construct
  misc_feature 1..20: note = chemically synthesized
  source 1..20: mol_type = other DNA
gtgtgcagaagaaatgattg

SEQ ID NO: 16725 - DNA, 20 bp, synthetic construct
  misc_feature 1..20: note = chemically synthesized
  source 1..20: mol_type = other DNA
gcagaagaaatgattgtagt

SEQ ID NO: 16726 - DNA, 20 bp, synthetic construct
  misc_feature 1..20: note = chemically synthesized
  source 1..20: mol_type = other DNA
gaaatgattgtagtaagacc

SEQ ID NO: 16727 - DNA, 20 bp, synthetic construct
  misc_feature 1..20: note = chemically synthesized
  source 1..20: mol_type = other DNA
aaatgattgtagtaagacct

SEQ ID NO: 16728 - DNA, 20 bp, synthetic construct
  misc_feature 1..20: note = chemically synthesized
  source 1..20: mol_type = other DNA
attgtagtaagacctgggca

SEQ ID NO: 16729 - DNA, 20 bp, synthetic construct
  misc_feature 1..20: note = chemically synthesized
  source 1..20: mol_type = other DNA
ttgtagtaagacctgggcaa

SEQ ID NO: 16730 - DNA, 20 bp, synthetic construct
  misc_feature 1..20: note = chemically synthesized
  source 1..20: mol_type = other DNA
gtagtaagacctgggcaaag

SEQ ID NO: 16731 - DNA, 20 bp, synthetic construct
  misc_feature 1..20: note = chemically synthesized
  source 1..20: mol_type = other DNA
agtaagacctgggcaaagga

SEQ ID NO: 16732 - DNA, 20 bp, synthetic construct
  misc_feature 1..20: note = chemically synthesized
  source 1..20: mol_type = other DNA
taagacctgggcaaaggaga

SEQ ID NO: 16733 - DNA, 20 bp, synthetic construct
  misc_feature 1..20: note = chemically synthesized
  source 1..20: mol_type = other DNA
aaacatttttcccccacatt

SEQ ID NO: 16734 - DNA, 20 bp, synthetic construct
  misc_feature 1..20: note = chemically synthesized
  source 1..20: mol_type = other DNA
aacatttttcccccacattt

SEQ ID NO: 16735 - DNA, 20 bp, synthetic construct
  misc_feature 1..20: note = chemically synthesized
  source 1..20: mol_type = other DNA
ttgggcaaaactttccatcc

SEQ ID NO: 16736 - DNA, 20 bp, synthetic construct
  misc_feature 1..20: note = chemically synthesized
  source 1..20: mol_type = other DNA
tgggcaaaactttccatcct

SEQ ID NO: 16737 - DNA, 20 bp, synthetic construct
  misc_feature 1..20: note = chemically synthesized
  source 1..20: mol_type = other DNA
ttccatcctgggtcacacca

SEQ ID NO: 16738 - DNA, 20 bp, synthetic construct
  misc_feature 1..20: note = chemically synthesized
  source 1..20: mol_type = other DNA
ctcctctcctctccctcaac

SEQ ID NO: 16739 - DNA, 20 bp, synthetic construct
  misc_feature 1..20: note = chemically synthesized
  source 1..20: mol_type = other DNA
tcctctccctcaactggtaa

SEQ ID NO: 16740 - DNA, 20 bp, synthetic construct
  misc_feature 1..20: note = chemically synthesized
  source 1..20: mol_type = other DNA
ccaaaacatacctgactact

SEQ ID NO: 16741 - DNA, 20 bp, synthetic construct
  misc_feature 1..20: note = chemically synthesized
  source 1..20: mol_type = other DNA
cttagtacttcccactactg

SEQ ID NO: 16742 - DNA, 20 bp, synthetic construct
  misc_feature 1..20: note = chemically synthesized
  source 1..20: mol_type = other DNA
gtacttcccactactgtgga

SEQ ID NO: 16743 - DNA, 20 bp, synthetic construct
  misc_feature 1..20: note = chemically synthesized
  source 1..20: mol_type = other DNA
cactactgtggatagaattt

SEQ ID NO: 16744 - DNA, 20 bp, synthetic construct
  misc_feature 1..20: note = chemically synthesized
  source 1..20: mol_type = other DNA
ctcattcattgttcataccc

SEQ ID NO: 16745 - DNA, 20 bp, synthetic construct
  misc_feature 1..20: note = chemically synthesized
  source 1..20: mol_type = other DNA
cattcattgttcataccctg

SEQ ID NO: 16746 - DNA, 20 bp, synthetic construct
  misc_feature 1..20: note = chemically synthesized
  source 1..20: mol_type = other DNA
ccctggagacaaaactcctt

SEQ ID NO: 16747 - DNA, 20 bp, synthetic construct
  misc_feature 1..20: note = chemically synthesized
  source 1..20: mol_type = other DNA
cctggagacaaaactcctta

SEQ ID NO: 16748 - DNA, 20 bp, synthetic construct
  misc_feature 1..20: note = chemically synthesized
  source 1..20: mol_type = other DNA
taaggctattaactccccct

SEQ ID NO: 16749 - DNA, 20 bp, synthetic construct
  misc_feature 1..20: note = chemically synthesized
  source 1..20: mol_type = other DNA
tccccctgagcttcacaatc

SEQ ID NO: 16750 - DNA, 20 bp, synthetic construct
  misc_feature 1..20: note = chemically synthesized
  source 1..20: mol_type = other DNA
gcttcacaatctagtccctg

SEQ ID NO: 16751 - DNA, 20 bp, synthetic construct
  misc_feature 1..20: note = chemically synthesized
  source 1..20: mol_type = other DNA
cttcacaatctagtccctgc

SEQ ID NO: 16752 - DNA, 20 bp, synthetic construct
  misc_feature 1..20: note = chemically synthesized
  source 1..20: mol_type = other DNA
tcctctccttttccctctct

SEQ ID NO: 16753 - DNA, 20 bp, synthetic construct
  misc_feature 1..20: note = chemically synthesized
  source 1..20: mol_type = other DNA
ttccctctctgagccccgct

SEQ ID NO: 16754 - DNA, 20 bp, synthetic construct
  misc_feature 1..20: note = chemically synthesized
  source 1..20: mol_type = other DNA
gccccgctcagatcttcgaa

SEQ ID NO: 16755 - DNA, 20 bp, synthetic construct
  misc_feature 1..20: note = chemically synthesized
  source 1..20: mol_type = other DNA
cccgctcagatcttcgaaca

SEQ ID NO: 16756 - DNA, 20 bp, synthetic construct
  misc_feature 1..20: note = chemically synthesized
  source 1..20: mol_type = other DNA
cagagaacacttctgcatct

SEQ ID NO: 16757 - DNA, 20 bp, synthetic construct
  misc_feature 1..20: note = chemically synthesized
  source 1..20: mol_type = other DNA
cttctgcatcttggcatata

SEQ ID NO: 16758 - DNA, 20 bp, synthetic construct
  misc_feature 1..20: note = chemically synthesized
  source 1..20: mol_type = other DNA
gcatatatagttctctcaca

SEQ ID NO: 16759 - DNA, 20 bp, synthetic construct
  misc_feature 1..20: note = chemically synthesized
  source 1..20: mol_type = other DNA
atagaacgctttctcccctt

SEQ ID NO: 16760 - DNA, 20 bp, synthetic construct
  misc_feature 1..20: note = chemically synthesized
  source 1..20: mol_type = other DNA
cctttagctatttatccttc

SEQ ID NO: 16761 - DNA, 20 bp, synthetic construct
  misc_feature 1..20: note = chemically synthesized
  source 1..20: mol_type = other DNA
gctatttatccttcaagtgt

SEQ ID NO: 16762 - DNA, 20 bp, synthetic construct
  misc_feature 1..20: note = chemically synthesized
  source 1..20: mol_type = other DNA
cagctcaaacatctcatcat

SEQ ID NO: 16763 - DNA, 20 bp, synthetic construct
  misc_feature 1..20: note = chemically synthesized
  source 1..20: mol_type = other DNA
gctcaaacatctcatcatta

SEQ ID NO: 16764 - DNA, 20 bp, synthetic construct
  misc_feature 1..20: note = chemically synthesized
  source 1..20: mol_type = other DNA
tcaaacatctcatcattaga

SEQ ID NO: 16765 - DNA, 20 bp, synthetic construct
  misc_feature 1..20: note = chemically synthesized
  source 1..20: mol_type = other DNA
caaacatctcatcattagag

SEQ ID NO: 16766 - DNA, 20 bp, synthetic construct
  misc_feature 1..20: note = chemically synthesized
  source 1..20: mol_type = other DNA
agaggtttttcccaaacctc

SEQ ID NO: 16767 - DNA, 20 bp, synthetic construct
  misc_feature 1..20: note = chemically synthesized
  source 1..20: mol_type = other DNA
gaggtttttcccaaacctct

SEQ ID NO: 16768 - DNA, 20 bp, synthetic construct
  misc_feature 1..20: note = chemically synthesized
  source 1..20: mol_type = other DNA
ttcccaaacctctaggtaac

SEQ ID NO: 16769 - DNA, 20 bp, synthetic construct
  misc_feature 1..20: note = chemically synthesized
  source 1..20: mol_type = other DNA
tcccaaacctctaggtaact

SEQ ID NO: 16770 - DNA, 20 bp, synthetic construct
  misc_feature 1..20: note = chemically synthesized
  source 1..20: mol_type = other DNA
aaacctctaggtaactaggt

SEQ ID NO: 16771 - DNA, 20 bp, synthetic construct
  misc_feature 1..20: note = chemically synthesized
  source 1..20: mol_type = other DNA
agaaaccactccccattcca

SEQ ID NO: 16772 - DNA, 20 bp, synthetic construct
  misc_feature 1..20: note = chemically synthesized
  source 1..20: mol_type = other DNA
ccattccacggtacactgta

SEQ ID NO: 16773 - DNA, 20 bp, synthetic construct
  misc_feature 1..20: note = chemically synthesized
  source 1..20: mol_type = other DNA
cacggtacactgtatagtct

SEQ ID NO: 16774 - DNA, 20 bp, synthetic construct
  misc_feature 1..20: note = chemically synthesized
  source 1..20: mol_type = other DNA
acggtacactgtatagtctt

SEQ ID NO: 16775 - DNA, 20 bp, synthetic construct
  misc_feature 1..20: note = chemically synthesized
  source 1..20: mol_type = other DNA
ctgtatagtcttaggacacc

SEQ ID NO: 16776 - DNA, 20 bp, synthetic construct
  misc_feature 1..20: note = chemically synthesized
  source 1..20: mol_type = other DNA
cttaggacacctggttccct

SEQ ID NO: 16777 - DNA, 20 bp, synthetic construct
  misc_feature 1..20: note = chemically synthesized
  source 1..20: mol_type = other DNA
tacaaatttgtcaattcttg

SEQ ID NO: 16778 - DNA, 20 bp, synthetic construct
  misc_feature 1..20: note = chemically synthesized
  source 1..20: mol_type = other DNA
tttgtcaattcttgaagatt

SEQ ID NO: 16779 - DNA, 20 bp, synthetic construct
  misc_feature 1..20: note = chemically synthesized
  source 1..20: mol_type = other DNA
aattcttgaagattaagaat

SEQ ID NO: 16780 - DNA, 20 bp, synthetic construct
  misc_feature 1..20: note = chemically synthesized
  source 1..20: mol_type = other DNA
actctatctccctcgcctct

SEQ ID NO: 16781 - DNA, 20 bp, synthetic construct
  misc_feature 1..20: note = chemically synthesized
  source 1..20: mol_type = other DNA
tctcagtgcctgatacctaa

SEQ ID NO: 16782 - DNA, 20 bp, synthetic construct
  misc_feature 1..20: note = chemically synthesized
  source 1..20: mol_type = other DNA
atccttactgaataataaaa

SEQ ID NO: 16783 - DNA, 20 bp, synthetic construct
  misc_feature 1..20: note = chemically synthesized
  source 1..20: mol_type = other DNA
taaaatggattaatgaataa

SEQ ID NO: 16784 - DNA, 20 bp, synthetic construct
  misc_feature 1..20: note = chemically synthesized
  source 1..20: mol_type = other DNA
gaataaaagcaataaatttc

SEQ ID NO: 16785 - DNA, 20 bp, synthetic construct
  misc_feature 1..20: note = chemically synthesized
  source 1..20: mol_type = other DNA
aataaaagcaataaatttca

SEQ ID NO: 16786 - DNA, 20 bp, synthetic construct
  misc_feature 1..20: note = chemically synthesized
  source 1..20: mol_type = other DNA
gttaatattaataaattaaa

SEQ ID NO: 16787 - DNA, 20 bp, synthetic construct
  misc_feature 1..20: note = chemically synthesized
  source 1..20: mol_type = other DNA
ttaatattaataaattaaaa

SEQ ID NO: 16788 - DNA, 20 bp, synthetic construct
  misc_feature 1..20: note = chemically synthesized
  source 1..20: mol_type = other DNA
aaattaaaaaggttattttg

SEQ ID NO: 16789 - DNA, 20 bp, synthetic construct
  misc_feature 1..20: note = chemically synthesized
  source 1..20: mol_type = other DNA
aaaaggttattttgaagtct

SEQ ID NO: 16790 - DNA, 20 bp, synthetic construct
  misc_feature 1..20: note = chemically synthesized
  source 1..20: mol_type = other DNA
ttattttgaagtctgagaat

SEQ ID NO: 16791 - DNA, 20 bp, synthetic construct
  misc_feature 1..20: note = chemically synthesized
  source 1..20: mol_type = other DNA
tttcacgtttccattgttca

SEQ ID NO: 16792 - DNA, 20 bp, synthetic construct
  misc_feature 1..20: note = chemically synthesized
  source 1..20: mol_type = other DNA
ttcacgtttccattgttcat

SEQ ID NO: 16793 - DNA, 20 bp, synthetic construct
  misc_feature 1..20: note = chemically synthesized
  source 1..20: mol_type = other DNA
attgttcatgggcaaaattc

SEQ ID NO: 16794 - DNA, 20 bp, synthetic construct
  misc_feature 1..20: note = chemically synthesized
  source 1..20: mol_type = other DNA
gttcatgggcaaaattctgg

SEQ ID NO: 16795 - DNA, 20 bp, synthetic construct
  misc_feature 1..20: note = chemically synthesized
  source 1..20: mol_type = other DNA
atgggcaaaattctggcagc

SEQ ID NO: 16796 - DNA, 20 bp, synthetic construct
  misc_feature 1..20: note = chemically synthesized
  source 1..20: mol_type = other DNA
tgggcaaaattctggcagca

SEQ ID NO: 16797 - DNA, 20 bp, synthetic construct
  misc_feature 1..20: note = chemically synthesized
  source 1..20: mol_type = other DNA
gggcaaaattctggcagcaa

SEQ ID NO: 16798 - DNA, 20 bp, synthetic construct
  misc_feature 1..20: note = chemically synthesized
  source 1..20: mol_type = other DNA
cagcaagggattcttctcct

SEQ ID NO: 16799 - DNA, 20 bp, synthetic construct
  misc_feature 1..20: note = chemically synthesized
  source 1..20: mol_type = other DNA
taagaaaccttttgttttct

SEQ ID NO: 16800 - DNA, 20 bp, synthetic construct
  misc_feature 1..20: note = chemically synthesized
  source 1..20: mol_type = other DNA
gaatacatttccttgtttgc

SEQ ID NO: 16801 - DNA, 20 bp, synthetic construct
  misc_feature 1..20: note = chemically synthesized
  source 1..20: mol_type = other DNA
tccttgtttgccagaaaaca

SEQ ID NO: 16802 - DNA, 20 bp, synthetic construct
  misc_feature 1..20: note = chemically synthesized
  source 1..20: mol_type = other DNA
tgtttgccagaaaacatggt

SEQ ID NO: 16803 - DNA, 20 bp, synthetic construct
  misc_feature 1..20: note = chemically synthesized
  source 1..20: mol_type = other DNA
agaaaacatggtaagataac

SEQ ID NO: 16804 - DNA, 20 bp, synthetic construct
  misc_feature 1..20: note = chemically synthesized
  source 1..20: mol_type = other DNA
aaaacatggtaagataactg

SEQ ID NO: 16805 - DNA, 20 bp, synthetic construct
  misc_feature 1..20: note = chemically synthesized
  source 1..20: mol_type = other DNA
aacatggtaagataactgga

SEQ ID NO: 16806 - DNA, 20 bp, synthetic construct
  misc_feature 1..20: note = chemically synthesized
  source 1..20: mol_type = other DNA
taacattcattttattcatg

SEQ ID NO: 16807 - DNA, 20 bp, synthetic construct
  misc_feature 1..20: note = chemically synthesized
  source 1..20: mol_type = other DNA
ttcatgaagaaactgttatt

SEQ ID NO: 16808 - DNA, 20 bp, synthetic construct
  misc_feature 1..20: note = chemically synthesized
  source 1..20: mol_type = other DNA
aagaaactgttattcagttt

SEQ ID NO: 16809 - DNA, 20 bp, synthetic construct
  misc_feature 1..20: note = chemically synthesized
  source 1..20: mol_type = other DNA
agaaactgttattcagttta

SEQ ID NO: 16810 - DNA, 20 bp, synthetic construct
  misc_feature 1..20: note = chemically synthesized
  source 1..20: mol_type = other DNA
gaaactgttattcagtttaa

SEQ ID NO: 16811 - DNA, 20 bp, synthetic construct
  misc_feature 1..20: note = chemically synthesized
  source 1..20: mol_type = other DNA
aaactgttattcagtttaag

SEQ ID NO: 16812 - DNA, 20 bp, synthetic construct
  misc_feature 1..20: note = chemically synthesized
  source 1..20: mol_type = other DNA
cagtttaaggggttcttttt

SEQ ID NO: 16813 - DNA, 20 bp, synthetic construct
  misc_feature 1..20: note = chemically synthesized
  source 1..20: mol_type = other DNA
ttaaggggttctttttcaga

SEQ ID NO: 16814 - DNA, 20 bp, synthetic construct
  misc_feature 1..20: note = chemically synthesized
  source 1..20: mol_type = other DNA
ggttctttttcagaaagttt

SEQ ID NO: 16815 - DNA, 20 bp, synthetic construct
  misc_feature 1..20: note = chemically synthesized
  source 1..20: mol_type = other DNA
tcagaaagtttcagaaatcc

SEQ ID NO: 16816 - DNA, 20 bp, synthetic construct
  misc_feature 1..20: note = chemically synthesized
  source 1..20: mol_type = other DNA
aatccaagacctttgactgc

SEQ ID NO: 16817 - DNA, 20 bp, synthetic construct
  misc_feature 1..20: note = chemically synthesized
  source 1..20: mol_type = other DNA
gtactgtgttctttcatcta

SEQ ID NO: 16818 - DNA, 20 bp, synthetic construct
  misc_feature 1..20: note = chemically synthesized
  source 1..20: mol_type = other DNA
tactgtgttctttcatctat

SEQ ID NO: 16819 - DNA, 20 bp, synthetic construct
  misc_feature 1..20: note = chemically synthesized
  source 1..20: mol_type = other DNA
ggacatttcctttgaaaact

SEQ ID NO: 16820 - DNA, 20 bp, synthetic construct
  misc_feature 1..20: note = chemically synthesized
  source 1..20: mol_type = other DNA
gacatttcctttgaaaactg

SEQ ID NO: 16821 - DNA, 20 bp, synthetic construct
  misc_feature 1..20: note = chemically synthesized
  source 1..20: mol_type = other DNA
aatatttaattcttacataa

SEQ ID NO: 16822 - DNA, 20 bp, synthetic construct
  misc_feature 1..20: note = chemically synthesized
  source 1..20: mol_type = other DNA
attcttacataatagtaaaa

SEQ ID NO: 16823 - DNA, 20 bp, synthetic construct
  misc_feature 1..20: note = chemically synthesized
  source 1..20: mol_type = other DNA
ataatagtaaaaaagtgaat

SEQ ID NO: 16824 - DNA, 20 bp, synthetic construct
  misc_feature 1..20: note = chemically synthesized
  source 1..20: mol_type = other DNA
gtaaaaaagtgaattggcct

SEQ ID NO: 16825 - DNA, 20 bp, synthetic construct
  misc_feature 1..20: note = chemically synthesized
  source 1..20: mol_type = other DNA
aaagtgaattggccttggaa

SEQ ID NO: 16826 - DNA, 20 bp, synthetic construct
  misc_feature 1..20: note = chemically synthesized
  source 1..20: mol_type = other DNA
cttggaaaagacctaaatcc

SEQ ID NO: 16827 - DNA, 20 bp, synthetic construct
  misc_feature 1..20: note = chemically synthesized
  source 1..20: mol_type = other DNA
aatcaatttgctctatgaac

SEQ ID NO: 16828 - DNA, 20 bp, synthetic construct
  misc_feature 1..20: note = chemically synthesized
  source 1..20: mol_type = other DNA
tcaatttgctctatgaactg

SEQ ID NO: 16829 - DNA, 20 bp, synthetic construct
  misc_feature 1..20: note = chemically synthesized
  source 1..20: mol_type = other DNA
caatttgctctatgaactgg

SEQ ID NO: 16830 - DNA, 20 bp, synthetic construct
  misc_feature 1..20: note = chemically synthesized
  source 1..20: mol_type = other DNA
atttgctctatgaactggag

SEQ ID NO: 16831 - DNA, 20 bp, synthetic construct
  misc_feature 1..20: note = chemically synthesized
  source 1..20: mol_type = other DNA
tgctctatgaactggaggag

SEQ ID NO: 16832 - DNA, 20 bp, synthetic construct
  misc_feature 1..20: note = chemically synthesized
  source 1..20: mol_type = other DNA
gctctatgaactggaggagt

SEQ ID NO: 16833 - DNA, 20 bp, synthetic construct
  misc_feature 1..20: note = chemically synthesized
  source 1..20: mol_type = other DNA
gagtgggattcatgatctct

SEQ ID NO: 16834 - DNA, 20 bp, synthetic construct
  misc_feature 1..20: note = chemically synthesized
  source 1..20: mol_type = other DNA
catatcactactatgaaatg

SEQ ID NO: 16835 - DNA, 20 bp, synthetic construct
  misc_feature 1..20: note = chemically synthesized
  source 1..20: mol_type = other DNA
atatcactactatgaaatgc

SEQ ID NO: 16836 - DNA, 20 bp, synthetic construct
  misc_feature 1..20: note = chemically synthesized
  source 1..20: mol_type = other DNA
tatcactactatgaaatgca

SEQ ID NO: 16837 - DNA, 20 bp, synthetic construct
  misc_feature 1..20: note = chemically synthesized
  source 1..20: mol_type = other DNA
cactactatgaaatgcaggg

SEQ ID NO: 16838 - DNA, 20 bp, synthetic construct
  misc_feature 1..20: note = chemically synthesized
  source 1..20: mol_type = other DNA
aattcaaatcattaaattta

SEQ ID NO: 16839 - DNA, 20 bp, synthetic construct
  misc_feature 1..20: note = chemically synthesized
  source 1..20: mol_type = other DNA
cattaaatttaaagaaacta

SEQ ID NO: 16840 - DNA, 20 bp, synthetic construct
  misc_feature 1..20: note = chemically synthesized
  source 1..20: mol_type = other DNA
taaatttaaagaaactatag

SEQ ID NO: 16841 - DNA, 20 bp, synthetic construct
  misc_feature 1..20: note = chemically synthesized
  source 1..20: mol_type = other DNA
ctatagtggcaatgtattat

SEQ ID NO: 16842 - DNA, 20 bp, synthetic construct
  misc_feature 1..20: note = chemically synthesized
  source 1..20: mol_type = other DNA
tatagtggcaatgtattatt

SEQ ID NO: 16843 - DNA, 20 bp, synthetic construct
  misc_feature 1..20: note = chemically synthesized
  source 1..20: mol_type = other DNA
atgaaaatctcaaaccatac

SEQ ID NO: 16844 - DNA, 20 bp, synthetic construct
  misc_feature 1..20: note = chemically synthesized
  source 1..20: mol_type = other DNA
tgaaaatctcaaaccatacc

SEQ ID NO: 16845 - DNA, 20 bp, synthetic construct
  misc_feature 1..20: note = chemically synthesized
  source 1..20: mol_type = other DNA
gctatgataatattaaaata

SEQ ID NO: 16846 - DNA, 20 bp, synthetic construct
  misc_feature 1..20: note = chemically synthesized
  source 1..20: mol_type = other DNA
attaaaataaagatacattg

SEQ ID NO: 16847 - DNA, 20 bp, synthetic construct
  misc_feature 1..20: note = chemically synthesized
  source 1..20: mol_type = other DNA
aacttgtgtaaatcacattg

SEQ ID NO: 16848 - DNA, 20 bp, synthetic construct
  misc_feature 1..20: note = chemically synthesized
  source 1..20: mol_type = other DNA
acttgtgtaaatcacattgt

SEQ ID NO: 16849 - DNA, 20 bp, synthetic construct
  misc_feature 1..20: note = chemically synthesized
  source 1..20: mol_type = other DNA
cttgtgtaaatcacattgtg

SEQ ID NO: 16850 - DNA, 20 bp, synthetic construct
  misc_feature 1..20: note = chemically synthesized
  source 1..20: mol_type = other DNA
aacacttcccttccccttga

SEQ ID NO: 16851 - DNA, 20 bp, synthetic construct
  misc_feature 1..20: note = chemically synthesized
  source 1..20: mol_type = other DNA
acacttcccttccccttgaa

SEQ ID NO: 16852 - DNA, 20 bp, synthetic construct
  misc_feature 1..20: note = chemically synthesized
  source 1..20: mol_type = other DNA
cacttcccttccccttgaaa

SEQ ID NO: 16853 - DNA, 20 bp, synthetic construct
  misc_feature 1..20: note = chemically synthesized
  source 1..20: mol_type = other DNA
tccccttgaaagggaaatga

SEQ ID NO: 16854 - DNA, 20 bp, synthetic construct
  misc_feature 1..20: note = chemically synthesized
  source 1..20: mol_type = other DNA
aaagggaaatgatagaaaat

SEQ ID NO: 16855 - DNA, 20 bp, synthetic construct
  misc_feature 1..20: note = chemically synthesized
  source 1..20: mol_type = other DNA
atgatagaaaataagtatta

SEQ ID NO: 16856 - DNA, 20 bp, synthetic construct
  misc_feature 1..20: note = chemically synthesized
  source 1..20: mol_type = other DNA
tgatagaaaataagtattaa

SEQ ID NO: 16857 - DNA, 20 bp, synthetic construct
  misc_feature 1..20: note = chemically synthesized
  source 1..20: mol_type = other DNA
tagaaaataagtattaaagg

SEQ ID NO: 16858 - DNA, 20 bp, synthetic construct
  misc_feature 1..20: note = chemically synthesized
  source 1..20: mol_type = other DNA
aataagtattaaaggcagct

SEQ ID NO: 16859 - DNA, 20 bp, synthetic construct
  misc_feature 1..20: note = chemically synthesized
  source 1..20: mol_type = other DNA
ataagtattaaaggcagctt

SEQ ID NO: 16860 - DNA, 20 bp, synthetic construct
  misc_feature 1..20: note = chemically synthesized
  source 1..20: mol_type = other DNA
taagtattaaaggcagctta

SEQ ID NO: 16861 - DNA, 20 bp, synthetic construct
  misc_feature 1..20: note = chemically synthesized
  source 1..20: mol_type = other DNA
aagtattaaaggcagcttag

SEQ ID NO: 16862 - DNA, 20 bp, synthetic construct
  misc_feature 1..20: note = chemically synthesized
  source 1..20: mol_type = other DNA
ttttcaaaaaaaaatccatt

SEQ ID NO: 16863 - DNA, 20 bp, synthetic construct
  misc_feature 1..20: note = chemically synthesized
  source 1..20: mol_type = other DNA
attgagcattttctatgtac

SEQ ID NO: 16864 - DNA, 20 bp, synthetic construct
  misc_feature 1..20: note = chemically synthesized
  source 1..20: mol_type = other DNA
ttgagcattttctatgtacc

SEQ ID NO: 16865 - DNA, 20 bp, synthetic construct
  misc_feature 1..20: note = chemically synthesized
  source 1..20: mol_type = other DNA
ctatgtaccaggcactgttc

SEQ ID NO: 16866 - DNA, 20 bp, synthetic construct
  misc_feature 1..20: note = chemically synthesized
  source 1..20: mol_type = other DNA
caggcactgttctagaccct

SEQ ID NO: 16867 - DNA, 20 bp, synthetic construct
  misc_feature 1..20: note = chemically synthesized
  source 1..20: mol_type = other DNA
acacacatgctactgattat

SEQ ID NO: 16868 - DNA, 20 bp, synthetic construct
  misc_feature 1..20: note = chemically synthesized
  source 1..20: mol_type = other DNA
ataagatccataaaataact

SEQ ID NO: 16869 - DNA, 20 bp, synthetic construct
  misc_feature 1..20: note = chemically synthesized
  source 1..20: mol_type = other DNA
ataaaataacttagtttcac

SEQ ID NO: 16870 - DNA, 20 bp, synthetic construct
  misc_feature 1..20: note = chemically synthesized
  source 1..20: mol_type = other DNA
tagtttcactggcgtgttcc

SEQ ID NO: 16871 - DNA, 20 bp, synthetic construct
  misc_feature 1..20: note = chemically synthesized
  source 1..20: mol_type = other DNA
actggcgtgttcccagtgcc

SEQ ID NO: 16872 - DNA, 20 bp, synthetic construct
  misc_feature 1..20: note = chemically synthesized
  source 1..20: mol_type = other DNA
ctggcgtgttcccagtgccc

SEQ ID NO: 16873 - DNA, 20 bp, synthetic construct
  misc_feature 1..20: note = chemically synthesized
  source 1..20: mol_type = other DNA
tgttcccagtgcccaggtaa

SEQ ID NO: 16874 - DNA, 20 bp, synthetic construct
  misc_feature 1..20: note = chemically synthesized
  source 1..20: mol_type = other DNA
attaatgtttgttaaatgat

SEQ ID NO: 16875 - DNA, 20 bp, synthetic construct
  misc_feature 1..20: note = chemically synthesized
  source 1..20: mol_type = other DNA
tgtttgttaaatgatgagaa

SEQ ID NO: 16876 - DNA, 20 bp, synthetic construct
  misc_feature 1..20: note = chemically synthesized
  source 1..20: mol_type = other DNA
tttgttaaatgatgagaaaa

SEQ ID NO: 16877 - DNA, 20 bp, synthetic construct
  misc_feature 1..20: note = chemically synthesized
  source 1..20: mol_type = other DNA
ttgttaaatgatgagaaaag

SEQ ID NO: 16878 - DNA, 20 bp, synthetic construct
  misc_feature 1..20: note = chemically synthesized
  source 1..20: mol_type = other DNA
taaatgatgagaaaagagga

SEQ ID NO: 16879 - DNA, 20 bp, synthetic construct
  misc_feature 1..20: note = chemically synthesized
  source 1..20: mol_type = other DNA
atgatgagaaaagaggaaag

SEQ ID NO: 16880 - DNA, 20 bp, synthetic construct
  misc_feature 1..20: note = chemically synthesized
  source 1..20: mol_type = other DNA
atgagaaaagaggaaagcag

SEQ ID NO: 16881 - DNA, 20 bp, synthetic construct
  misc_feature 1..20: note = chemically synthesized
  source 1..20: mol_type = other DNA
tgagaaaagaggaaagcaga

SEQ ID NO: 16882 - DNA, 20 bp, synthetic construct
  misc_feature 1..20: note = chemically synthesized
  source 1..20: mol_type = other DNA
gagaaaagaggaaagcagaa

SEQ ID NO: 16883 - DNA, 20 bp, synthetic construct
  misc_feature 1..20: note = chemically synthesized
  source 1..20: mol_type = other DNA
agaaaagaggaaagcagaag

SEQ ID NO: 16884 - DNA, 20 bp, synthetic construct
  misc_feature 1..20: note = chemically synthesized
  source 1..20: mol_type = other DNA
aaagcagaaggggctctgct

SEQ ID NO: 16885 - DNA, 20 bp, synthetic construct
  misc_feature 1..20: note = chemically synthesized
  source 1..20: mol_type = other DNA
aagcagaaggggctctgctc

SEQ ID NO: 16886 - DNA, 20 bp, synthetic construct
  misc_feature 1..20: note = chemically synthesized
  source 1..20: mol_type = other DNA
gaaggggctctgctcaggtg

SEQ ID NO: 16887 - DNA, 20 bp, synthetic construct
  misc_feature 1..20: note = chemically synthesized
  source 1..20: mol_type = other DNA
aaggggctctgctcaggtgc

SEQ ID NO: 16888 - DNA, 20 bp, synthetic construct
  misc_feature 1..20: note = chemically synthesized
  source 1..20: mol_type = other DNA
ctcaggtgcaggaacttgtg

SEQ ID NO: 16889 - DNA, 20 bp, synthetic construct
  misc_feature 1..20: note = chemically synthesized
  source 1..20: mol_type = other DNA
caggtgcaggaacttgtgca

SEQ ID NO: 16890 - DNA, 20 bp, synthetic construct
  misc_feature 1..20: note = chemically synthesized
  source 1..20: mol_type = other DNA
gaacttgtgcagagatcttc

SEQ ID NO: 16891 - DNA, 20 bp, synthetic construct
  misc_feature 1..20: note = chemically synthesized
  source 1..20: mol_type = other DNA
agatcttctggactgattcc

SEQ ID NO: 16892 - DNA, 20 bp, synthetic construct
  misc_feature 1..20: note = chemically synthesized
  source 1..20: mol_type = other DNA
gactgattcccagtgctaac

SEQ ID NO: 16893 - DNA, 20 bp, synthetic construct
  misc_feature 1..20: note = chemically synthesized
  source 1..20: mol_type = other DNA
cagtgctaacaagtcccttc

SEQ ID NO: 16894 - DNA, 20 bp, synthetic construct
  misc_feature 1..20: note = chemically synthesized
  source 1..20: mol_type = other DNA
ttccagttttatccaccaat

SEQ ID NO: 16895 - DNA, 20 bp, synthetic construct
  misc_feature 1..20: note = chemically synthesized
  source 1..20: mol_type = other DNA
caccaataagctatgtcctt

SEQ ID NO: 16896 - DNA, 20 bp, synthetic construct
  misc_feature 1..20: note = chemically synthesized
  source 1..20: mol_type = other DNA
ttgagctcctgcccactctc

SEQ ID NO: 16897 - DNA, 20 bp, synthetic construct
  misc_feature 1..20: note = chemically synthesized
  source 1..20: mol_type = other DNA
gagctcctgcccactctcta

SEQ ID NO: 16898 - DNA, 20 bp, synthetic construct
  misc_feature 1..20: note = chemically synthesized
  source 1..20: mol_type = other DNA
ctagagaaaacttttatttc

SEQ ID NO: 16899 - DNA, 20 bp, synthetic construct
  misc_feature 1..20: note = chemically synthesized
  source 1..20: mol_type = other DNA
tagagaaaacttttatttca

SEQ ID NO: 16900 - DNA, 20 bp, synthetic construct
  misc_feature 1..20: note = chemically synthesized
  source 1..20: mol_type = other DNA
ttttatttcaaggcatactc

SEQ ID NO: 16901 - DNA, 20 bp, synthetic construct
  misc_feature 1..20: note = chemically synthesized
  source 1..20: mol_type = other DNA
tttatttcaaggcatactcc

SEQ ID NO: 16902 - DNA, 20 bp, synthetic construct
  misc_feature 1..20: note = chemically synthesized
  source 1..20: mol_type = other DNA
actccgggattcacatgtga

SEQ ID NO: 16903 - DNA, 20 bp, synthetic construct
  misc_feature 1..20: note = chemically synthesized
  source 1..20: mol_type = other DNA
tccgggattcacatgtgata

SEQ ID NO: 16904 - DNA, 20 bp, synthetic construct
  misc_feature 1..20: note = chemically synthesized
  source 1..20: mol_type = other DNA
ggattcacatgtgatagaga

SEQ ID NO: 16905 - DNA, 20 bp, synthetic construct
  misc_feature 1..20: note = chemically synthesized
  source 1..20: mol_type = other DNA
gatagagatggttctgttcc

SEQ ID NO: 16906 - DNA, 20 bp, synthetic construct
  misc_feature 1..20: note = chemically synthesized
  source 1..20: mol_type = other DNA
atagagatggttctgttccc

SEQ ID NO: 16907 - DNA, 20 bp, synthetic construct
  misc_feature 1..20: note = chemically synthesized
  source 1..20: mol_type = other DNA
ggttctgttcccaggaactt

SEQ ID NO: 16908 - DNA, 20 bp, synthetic construct
  misc_feature 1..20: note = chemically synthesized
  source 1..20: mol_type = other DNA
gttctgttcccaggaacttt

SEQ ID NO: 16909 - DNA, 20 bp, synthetic construct
  misc_feature 1..20: note = chemically synthesized
  source 1..20: mol_type = other DNA
ctttgggcatatttaaaaac

SEQ ID NO: 16910 - DNA, 20 bp, synthetic construct
  misc_feature 1..20: note = chemically synthesized
  source 1..20: mol_type = other DNA
ggcatatttaaaaactggac

SEQ ID NO: 16911 - DNA, 20 bp, synthetic construct
  misc_feature 1..20: note = chemically synthesized
  source 1..20: mol_type = other DNA
ggactggaaaaatttgtgac

SEQ ID NO: 16912 - DNA, 20 bp, synthetic construct
  misc_feature 1..20: note = chemically synthesized
  source 1..20: mol_type = other DNA
gaaaaatttgtgactagaaa

SEQ ID NO: 16913 - DNA, 20 bp, synthetic construct
  misc_feature 1..20: note = chemically synthesized
  source 1..20: mol_type = other DNA
aaaaatttgtgactagaaaa

SEQ ID NO: 16914 - DNA, 20 bp, synthetic construct
  misc_feature 1..20: note = chemically synthesized
  source 1..20: mol_type = other DNA
ttaaaaacacatgctcattt

SEQ ID NO: 16915 - DNA, 20 bp, synthetic construct
  misc_feature 1..20: note = chemically synthesized
  source 1..20: mol_type = other DNA
taaaaacacatgctcatttc

SEQ ID NO: 16916 - DNA, 20 bp, synthetic construct
  misc_feature 1..20: note = chemically synthesized
  source 1..20: mol_type = other DNA
cacatgctcatttcaggata

SEQ ID NO: 16917 - DNA, 20 bp, synthetic construct
  misc_feature 1..20: note = chemically synthesized
  source 1..20: mol_type = other DNA
atttcaggataaagatctct

SEQ ID NO: 16918 - DNA, 20 bp, synthetic construct
  misc_feature 1..20: note = chemically synthesized
  source 1..20: mol_type = other DNA
tttcaggataaagatctctg

SEQ ID NO: 16919 - DNA, 20 bp, synthetic construct
  misc_feature 1..20: note = chemically synthesized
  source 1..20: mol_type = other DNA
ggataaagatctctgaggaa

SEQ ID NO: 16920 - DNA, 20 bp, synthetic construct
  misc_feature 1..20: note = chemically synthesized
  source 1..20: mol_type = other DNA
agaatacaaaataatttaaa

SEQ ID NO: 16921 - DNA, 20 bp, synthetic construct
  misc_feature 1..20: note = chemically synthesized
  source 1..20: mol_type = other DNA
aataatttaaaaagaaacaa

SEQ ID NO: 16922 - DNA, 20 bp, synthetic construct
  misc_feature 1..20: note = chemically synthesized
  source 1..20: mol_type = other DNA
ttaaaaagaaacaacagaaa

SEQ ID NO: 16923 - DNA, 20 bp, synthetic construct
  misc_feature 1..20: note = chemically synthesized
  source 1..20: mol_type = other DNA
taaaaagaaacaacagaaac

SEQ ID NO: 16924 - DNA, 20 bp, synthetic construct
  misc_feature 1..20: note = chemically synthesized
  source 1..20: mol_type = other DNA
atacttcacttctctgtaat

SEQ ID NO: 16925 - DNA, 20 bp, synthetic construct
  misc_feature 1..20: note = chemically synthesized
  source 1..20: mol_type = other DNA
tacttcacttctctgtaata

SEQ ID NO: 16926 - DNA, 20 bp, synthetic construct
  misc_feature 1..20: note = chemically synthesized
  source 1..20: mol_type = other DNA
taataaggtttctgtcctcc

SEQ ID NO: 16927 - DNA, 20 bp, synthetic construct
  misc_feature 1..20: note = chemically synthesized
  source 1..20: mol_type = other DNA
gattctttctcactaaacta

SEQ ID NO: 16928 - DNA, 20 bp, synthetic construct
  misc_feature 1..20: note = chemically synthesized
  source 1..20: mol_type = other DNA
ttctttctcactaaactaca

SEQ ID NO: 16929 - DNA, 20 bp, synthetic construct
  misc_feature 1..20: note = chemically synthesized
  source 1..20: mol_type = other DNA
ctcactaaactacagagaat

SEQ ID NO: 16930 - DNA, 20 bp, synthetic construct
  misc_feature 1..20: note = chemically synthesized
  source 1..20: mol_type = other DNA
gcattctgtccacttctaca

SEQ ID NO: 16931 - DNA, 20 bp, synthetic construct
  misc_feature 1..20: note = chemically synthesized
  source 1..20: mol_type = other DNA
cattctgtccacttctacat

SEQ ID NO: 16932 - DNA, 20 bp, synthetic construct
  misc_feature 1..20: note = chemically synthesized
  source 1..20: mol_type = other DNA
ttttatgaatgcatacacac

SEQ ID NO: 16933 - DNA, 20 bp, synthetic construct
  misc_feature 1..20: note = chemically synthesized
  source 1..20: mol_type = other DNA
atacacacgagaactttgaa

SEQ ID NO: 16934 - DNA, 20 bp, synthetic construct
  misc_feature 1..20: note = chemically synthesized
  source 1..20: mol_type = other DNA
acacgagaactttgaacagt

SEQ ID NO: 16935 - DNA, 20 bp, synthetic construct
  misc_feature 1..20: note = chemically synthesized
  source 1..20: mol_type = other DNA
gaactttgaacagttagtat

SEQ ID NO: 16936 - DNA, 20 bp, synthetic construct
  misc_feature 1..20: note = chemically synthesized
  source 1..20: mol_type = other DNA
aactttgaacagttagtata

SEQ ID NO: 16937 - DNA, 20 bp, synthetic construct
  misc_feature 1..20: note = chemically synthesized
  source 1..20: mol_type = other DNA
taaggtgaattctgattttt

SEQ ID NO: 16938 - DNA, 20 bp, synthetic construct
  misc_feature 1..20: note = chemically synthesized
  source 1..20: mol_type = other DNA
tatataatgcatttaatttt

SEQ ID NO: 16939 - DNA, 20 bp, synthetic construct
  misc_feature 1..20: note = chemically synthesized
  source 1..20: mol_type = other DNA
atttaattttgagattatgc

SEQ ID NO: 16940 - DNA, 20 bp, synthetic construct
  misc_feature 1..20: note = chemically synthesized
  source 1..20: mol_type = other DNA
gagattatgctggctctgat

SEQ ID NO: 16941 - DNA, 20 bp, synthetic construct
  misc_feature 1..20: note = chemically synthesized
  source 1..20: mol_type = other DNA
tgctggctctgattagccaa

SEQ ID NO: 16942 - DNA, 20 bp, synthetic construct
  misc_feature 1..20: note = chemically synthesized
  source 1..20: mol_type = other DNA
tggctctgattagccaaaag

SEQ ID NO: 16943 - DNA, 20 bp, synthetic construct
  misc_feature 1..20: note = chemically synthesized
  source 1..20: mol_type = other DNA
ggctctgattagccaaaaga

SEQ ID NO: 16944 - DNA, 20 bp, synthetic construct
  misc_feature 1..20: note = chemically synthesized
  source 1..20: mol_type = other DNA
tctgattagccaaaagaagg

SEQ ID NO: 16945 - DNA, 20 bp, synthetic construct
  misc_feature 1..20: note = chemically synthesized
  source 1..20: mol_type = other DNA
ggaagtaatatatcacattc

SEQ ID NO: 16946 - DNA, 20 bp, synthetic construct
  misc_feature 1..20: note = chemically synthesized
  source 1..20: mol_type = other DNA
tcacattctggttattattt

SEQ ID NO: 16947 - DNA, 20 bp, synthetic construct
  misc_feature 1..20: note = chemically synthesized
  source 1..20: mol_type = other DNA
ggttattatttcagatcctt

SEQ ID NO: 16948 - DNA, 20 bp, synthetic construct
  misc_feature 1..20: note = chemically synthesized
  source 1..20: mol_type = other DNA
gatcctttagattactgtaa

SEQ ID NO: 16949 - DNA, 20 bp, synthetic construct
  misc_feature 1..20: note = chemically synthesized
  source 1..20: mol_type = other DNA
ttactgtaatagacatgaaa

SEQ ID NO: 16950 - DNA, 20 bp, synthetic construct
  misc_feature 1..20: note = chemically synthesized
  source 1..20: mol_type = other DNA
cacaacacatgacataattt

SEQ ID NO: 16951 - DNA, 20 bp, synthetic construct
  misc_feature 1..20: note = chemically synthesized
  source 1..20: mol_type = other DNA
tcagatcgtttaaatcacac

SEQ ID NO: 16952 - DNA, 20 bp, synthetic construct
  misc_feature 1..20: note = chemically synthesized
  source 1..20: mol_type = other DNA
agtcatcactgccatttacc

SEQ ID NO: 16953 - DNA, 20 bp, synthetic construct
  misc_feature 1..20: note = chemically synthesized
  source 1..20: mol_type = other DNA
actgccatttacccagcaat

SEQ ID NO: 16954 - DNA, 20 bp, synthetic construct
  misc_feature 1..20: note = chemically synthesized
  source 1..20: mol_type = other DNA
ccatttacccagcaatcagt

SEQ ID NO: 16955 - DNA, 20 bp, synthetic construct
  misc_feature 1..20: note = chemically synthesized
  source 1..20: mol_type = other DNA
atcagttggcttgattcttc

SEQ ID NO: 16956 - DNA, 20 bp, synthetic construct
  misc_feature 1..20: note = chemically synthesized
  source 1..20: mol_type = other DNA
gcttgattcttcaagatctt

SEQ ID NO: 16957 - DNA, 20 bp, synthetic construct
  misc_feature 1..20: note = chemically synthesized
  source 1..20: mol_type = other DNA
cttgattcttcaagatcttg

SEQ ID NO: 16958 - DNA, 20 bp, synthetic construct
  misc_feature 1..20: note = chemically synthesized
  source 1..20: mol_type = other DNA
cttcaagatcttgaggaact

SEQ ID NO: 16959 - DNA, 20 bp, synthetic construct
  misc_feature 1..20: note = chemically synthesized
  source 1..20: mol_type = other DNA
ctttgctaatgttccttcaa

SEQ ID NO: 16960 - DNA, 20 bp, synthetic construct
  misc_feature 1..20: note = chemically synthesized
  source 1..20: mol_type = other DNA
tagtcttgacacttttaaac

SEQ ID NO: 16961 - DNA, 20 bp, synthetic construct
  misc_feature 1..20: note = chemically synthesized
  source 1..20: mol_type = other DNA
gtcttgacacttttaaacta

SEQ ID NO: 16962 - DNA, 20 bp, synthetic construct
  misc_feature 1..20: note = chemically synthesized
  source 1..20: mol_type = other DNA
cttgacacttttaaactaga

SEQ ID NO: 16963 - DNA, 20 bp, synthetic construct
  misc_feature 1..20: note = chemically synthesized
  source 1..20: mol_type = other DNA
actagagagtataaacccac

SEQ ID NO: 16964 - DNA, 20 bp, synthetic construct
  misc_feature 1..20: note = chemically synthesized
  source 1..20: mol_type = other DNA
ctagagagtataaacccaca

SEQ ID NO: 16965 - DNA, 20 bp, synthetic construct
  misc_feature 1..20: note = chemically synthesized
  source 1..20: mol_type = other DNA
ggaattgttttataatttta

SEQ ID NO: 16966 - DNA, 20 bp, synthetic construct
  misc_feature 1..20: note = chemically synthesized
  source 1..20: mol_type = other DNA
tttcaaaatcatttacattg

SEQ ID NO: 16967 - DNA, 20 bp, synthetic construct
  misc_feature 1..20: note = chemically synthesized
  source 1..20: mol_type = other DNA
ctaccttgccttctcttacc

SEQ ID NO: 16968 - DNA, 20 bp, synthetic construct
  misc_feature 1..20: note = chemically synthesized
  source 1..20: mol_type = other DNA
ttgccttctcttacccagca

SEQ ID NO: 16969 - DNA, 20 bp, synthetic construct
  misc_feature 1..20: note = chemically synthesized
  source 1..20: mol_type = other DNA
ttctcttacccagcacagat

SEQ ID NO: 16970 - DNA, 20 bp, synthetic construct
  misc_feature 1..20: note = chemically synthesized
  source 1..20: mol_type = other DNA
tctcttacccagcacagatg

SEQ ID NO: 16971 - DNA, 20 bp, synthetic construct
  misc_feature 1..20: note = chemically synthesized
  source 1..20: mol_type = other DNA
ttattttataattcctacat

SEQ ID NO: 16972 - DNA, 20 bp, synthetic construct
  misc_feature 1..20: note = chemically synthesized
  source 1..20: mol_type = other DNA
ttataattcctacataagca

SEQ ID NO: 16973 - DNA, 20 bp, synthetic construct
  misc_feature 1..20: note = chemically synthesized
  source 1..20: mol_type = other DNA
cctacataagcatagcattg

SEQ ID NO: 16974 - DNA, 20 bp, synthetic construct
  misc_feature 1..20: note = chemically synthesized
  source 1..20: mol_type = other DNA
aaaaattactttcattctga

SEQ ID NO: 16975 - DNA, 20 bp, synthetic construct
  misc_feature 1..20: note = chemically synthesized
  source 1..20: mol_type = other DNA
aaaattactttcattctgaa

SEQ ID NO: 16976 - DNA, 20 bp, synthetic construct
  misc_feature 1..20: note = chemically synthesized
  source 1..20: mol_type = other DNA
aattactttcattctgaaag

SEQ ID NO: 16977 - DNA, 20 bp, synthetic construct
  misc_feature 1..20: note = chemically synthesized
  source 1..20: mol_type = other DNA
ctttcattctgaaaggagca

SEQ ID NO: 16978 - DNA, 20 bp, synthetic construct
  misc_feature 1..20: note = chemically synthesized
  source 1..20: mol_type = other DNA
agcacagtattttgcctttt

SEQ ID NO: 16979 - DNA, 20 bp, synthetic construct
  misc_feature 1..20: note = chemically synthesized
  source 1..20: mol_type = other DNA
acagtattttgccttttgag

SEQ ID NO: 16980 - DNA, 20 bp, synthetic construct
  misc_feature 1..20: note = chemically synthesized
  source 1..20: mol_type = other DNA
tgaattaaaacattaattcc

SEQ ID NO: 16981 - DNA, 20 bp, synthetic construct
  misc_feature 1..20: note = chemically synthesized
  source 1..20: mol_type = other DNA
tgtgaatatgaaacattctt

SEQ ID NO: 16982 - DNA, 20 bp, synthetic construct
  misc_feature 1..20: note = chemically synthesized
  source 1..20: mol_type = other DNA
gcatttcatataattactaa

SEQ ID NO: 16983 - DNA, 20 bp, synthetic construct
  misc_feature 1..20: note = chemically synthesized
  source 1..20: mol_type = other DNA
atataattactaacagaatg

SEQ ID NO: 16984 - DNA, 20 bp, synthetic construct
  misc_feature 1..20: note = chemically synthesized
  source 1..20: mol_type = other DNA
ataattactaacagaatgta

SEQ ID NO: 16985 - DNA, 20 bp, synthetic construct
  misc_feature 1..20: note = chemically synthesized
  source 1..20: mol_type = other DNA
tactaacagaatgtagagtt

SEQ ID NO: 16986 - DNA, 20 bp, synthetic construct
  misc_feature 1..20: note = chemically synthesized
  source 1..20: mol_type = other DNA
actaacagaatgtagagttg

SEQ ID NO: 16987 - DNA, 20 bp, synthetic construct
  misc_feature 1..20: note = chemically synthesized
  source 1..20: mol_type = other DNA
gtagagttgaggtttccaac

SEQ ID NO: 16988 - DNA, 20 bp, synthetic construct
  misc_feature 1..20: note = chemically synthesized
  source 1..20: mol_type = other DNA
tttaattatactattttgct

SEQ ID NO: 16989 - DNA, 20 bp, synthetic construct
  misc_feature 1..20: note = chemically synthesized
  source 1..20: mol_type = other DNA
atttctatgttgtcataata

SEQ ID NO: 16990 - DNA, 20 bp, synthetic construct
  misc_feature 1..20: note = chemically synthesized
  source 1..20: mol_type = other DNA
taatttaaatgcacattcca

SEQ ID NO: 16991 - DNA, 20 bp, synthetic construct
  misc_feature 1..20: note = chemically synthesized
  source 1..20: mol_type = other DNA
aaatgcacattccatggcaa

SEQ ID NO: 16992 - DNA, 20 bp, synthetic construct
  misc_feature 1..20: note = chemically synthesized
  source 1..20: mol_type = other DNA
tccctcttcaacacatacac

SEQ ID NO: 16993 - DNA, 20 bp, synthetic construct
  misc_feature 1..20: note = chemically synthesized
  source 1..20: mol_type = other DNA
catacacaagtctgtattca

SEQ ID NO: 16994 - DNA, 20 bp, synthetic construct
  misc_feature 1..20: note = chemically synthesized
  source 1..20: mol_type = other DNA
gtattcatagcctgttgtaa

SEQ ID NO: 16995 - DNA, 20 bp, synthetic construct
  misc_feature 1..20: note = chemically synthesized
  source 1..20: mol_type = other DNA
catagcctgttgtaatagac

SEQ ID NO: 16996 - DNA, 20 bp, synthetic construct
  misc_feature 1..20: note = chemically synthesized
  source 1..20: mol_type = other DNA
atagcctgttgtaatagaca

SEQ ID NO: 16997 - DNA, 20 bp, synthetic construct
  misc_feature 1..20: note = chemically synthesized
  source 1..20: mol_type = other DNA
gtaatagacaaggttaaatg

SEQ ID NO: 16998 - DNA, 20 bp, synthetic construct
  misc_feature 1..20: note = chemically synthesized
  source 1..20: mol_type = other DNA
taaatgctttcctcactcac

SEQ ID NO: 16999 - DNA, 20 bp, synthetic construct
  misc_feature 1..20: note = chemically synthesized
  source 1..20: mol_type = other DNA
tttcctcactcactagcaat

SEQ ID NO: 17000 - DNA, 20 bp, synthetic construct
  misc_feature 1..20: note = chemically synthesized
  source 1..20: mol_type = other DNA
cactagcaattggttatcac

SEQ ID NO: 17001 - DNA, 20 bp, synthetic construct
  misc_feature 1..20: note = chemically synthesized
  source 1..20: mol_type = other DNA
ctagcaattggttatcacta

SEQ ID NO: 17002 - DNA, 20 bp, synthetic construct
  misc_feature 1..20: note = chemically synthesized
  source 1..20: mol_type = other DNA
agcaattggttatcactaga

SEQ ID NO: 17003 - DNA, 20 bp, synthetic construct
  misc_feature 1..20: note = chemically synthesized
  source 1..20: mol_type = other DNA
aaatcttactctacattcct

SEQ ID NO: 17004 - DNA, 20 bp, synthetic construct
  misc_feature 1..20: note = chemically synthesized
  source 1..20: mol_type = other DNA
ctctacattcctcagtcacc

SEQ ID NO: 17005 - DNA, 20 bp, synthetic construct
  misc_feature 1..20: note = chemically synthesized
  source 1..20: mol_type = other DNA
cattcctcagtcacctagtg

SEQ ID NO: 17006 - DNA, 20 bp, synthetic construct
  misc_feature 1..20: note = chemically synthesized
  source 1..20: mol_type = other DNA
attcctcagtcacctagtga

SEQ ID NO: 17007 - DNA, 20 bp, synthetic construct
  misc_feature 1..20: note = chemically synthesized
  source 1..20: mol_type = other DNA
aaggtgtactgatccacctt

SEQ ID NO: 17008 - DNA, 20 bp, synthetic construct
  misc_feature 1..20: note = chemically synthesized
  source 1..20: mol_type = other DNA
aggtgtactgatccaccttc

SEQ ID NO: 17009 - DNA, 20 bp, synthetic construct
  misc_feature 1..20: note = chemically synthesized
  source 1..20: mol_type = other DNA
gtgtactgatccaccttcag

SEQ ID NO: 17010 - DNA, 20 bp, synthetic construct
  misc_feature 1..20: note = chemically synthesized
  source 1..20: mol_type = other DNA
tactgatccaccttcaggag

SEQ ID NO: 17011 - DNA, 20 bp, synthetic construct
  misc_feature 1..20: note = chemically synthesized
  source 1..20: mol_type = other DNA
ggagcagtacaaacctttat

SEQ ID NO: 17012 - DNA, 20 bp, synthetic construct
  misc_feature 1..20: note = chemically synthesized
  source 1..20: mol_type = other DNA
acctttattggtcacttccc

SEQ ID NO: 17013 - DNA, 20 bp, synthetic construct
  misc_feature 1..20: note = chemically synthesized
  source 1..20: mol_type = other DNA
tcacttcccaagcaacttca

SEQ ID NO: 17014 - DNA, 20 bp, synthetic construct
  misc_feature 1..20: note = chemically synthesized
  source 1..20: mol_type = other DNA
acttcccaagcaacttcaaa

SEQ ID NO: 17015 - DNA, 20 bp, synthetic construct
  misc_feature 1..20: note = chemically synthesized
  source 1..20: mol_type = other DNA
tcccaagcaacttcaaagag

SEQ ID NO: 17016 - DNA, 20 bp, synthetic construct
  misc_feature 1..20: note = chemically synthesized
  source 1..20: mol_type = other DNA
aaagagcagtaactcctcca

SEQ ID NO: 17017 - DNA, 20 bp, synthetic construct
  misc_feature 1..20: note = chemically synthesized
  source 1..20: mol_type = other DNA
aagagcagtaactcctccac

SEQ ID NO: 17018 - DNA, 20 bp, synthetic construct
  misc_feature 1..20: note = chemically synthesized
  source 1..20: mol_type = other DNA
agcagtaactcctccacagg

SEQ ID NO: 17019 - DNA, 20 bp, synthetic construct
  misc_feature 1..20: note = chemically synthesized
  source 1..20: mol_type = other DNA
gaagttcttcgacttcccac

SEQ ID NO: 17020 - DNA, 20 bp, synthetic construct
  misc_feature 1..20: note = chemically synthesized
  source 1..20: mol_type = other DNA
aagttcttcgacttcccact

SEQ ID NO: 17021 - DNA, 20 bp, synthetic construct
  misc_feature 1..20: note = chemically synthesized
  source 1..20: mol_type = other DNA
agttcttcgacttcccactg

SEQ ID NO: 17022 - DNA, 20 bp, synthetic construct
  misc_feature 1..20: note = chemically synthesized
  source 1..20: mol_type = other DNA
tcttcgacttcccactgggg

SEQ ID NO: 17023 - DNA, 20 bp, synthetic construct
  misc_feature 1..20: note = chemically synthesized
  source 1..20: mol_type = other DNA
tcccactggggaagcccacc

SEQ ID NO: 17024 - DNA, 20 bp, synthetic construct
  misc_feature 1..20: note = chemically synthesized
  source 1..20: mol_type = other DNA
cccactggggaagcccaccc

SEQ ID NO: 17025 - DNA, 20 bp, synthetic construct
  misc_feature 1..20: note = chemically synthesized
  source 1..20: mol_type = other DNA
ccactggggaagcccaccca

SEQ ID NO: 17026 - DNA, 20 bp, synthetic construct
  misc_feature 1..20: note = chemically synthesized
  source 1..20: mol_type = other DNA
aagcccacccagggatgtta

SEQ ID NO: 17027 - DNA, 20 bp, synthetic construct
  misc_feature 1..20: note = chemically synthesized
  source 1..20: mol_type = other DNA
gcccacccagggatgttaca

SEQ ID NO: 17028 - DNA, 20 bp, synthetic construct
  misc_feature 1..20: note = chemically synthesized
  source 1..20: mol_type = other DNA
ccacccagggatgttacaga

SEQ ID NO: 17029 - DNA, 20 bp, synthetic construct
  misc_feature 1..20: note = chemically synthesized
  source 1..20: mol_type = other DNA
cacccagggatgttacagag

SEQ ID NO: 17030 - DNA, 20 bp, synthetic construct
  misc_feature 1..20: note = chemically synthesized
  source 1..20: mol_type = other DNA
acccagggatgttacagaga

SEQ ID NO: 17031 - DNA, 20 bp, synthetic construct
  misc_feature 1..20: note = chemically synthesized
  source 1..20: mol_type = other DNA
gggatgttacagagagggat

SEQ ID NO: 17032 - DNA, 20 bp, synthetic construct
  misc_feature 1..20: note = chemically synthesized
  source 1..20: mol_type = other DNA
acagagagggatcggcctcg

SEQ ID NO: 17033 - DNA, 20 bp, synthetic construct
  misc_feature 1..20: note = chemically synthesized
  source 1..20: mol_type = other DNA
gcctcgaagcattcttctta

SEQ ID NO: 17034 - DNA, 20 bp, synthetic construct
  misc_feature 1..20: note = chemically synthesized
  source 1..20: mol_type = other DNA
cattcttcttacagtcctcc

SEQ ID NO: 17035 - DNA, 20 bp, synthetic construct
  misc_feature 1..20: note = chemically synthesized
  source 1..20: mol_type = other DNA
ctttgaattcctgtttcaat

SEQ ID NO: 17036 - DNA, 20 bp, synthetic construct
  misc_feature 1..20: note = chemically synthesized
  source 1..20: mol_type = other DNA
gtttcaattagttgtaatcc

SEQ ID NO: 17037 - DNA, 20 bp, synthetic construct
  misc_feature 1..20: note = chemically synthesized
  source 1..20: mol_type = other DNA
tttcaattagttgtaatccc

SEQ ID NO: 17038 - DNA, 20 bp, synthetic construct
  misc_feature 1..20: note = chemically synthesized
  source 1..20: mol_type = other DNA
tcaattagttgtaatcccag

SEQ ID NO: 17039 - DNA, 20 bp, synthetic construct
  misc_feature 1..20: note = chemically synthesized
  source 1..20: mol_type = other DNA
attagttgtaatcccaggag

SEQ ID NO: 17040 - DNA, 20 bp, synthetic construct
  misc_feature 1..20: note = chemically synthesized
  source 1..20: mol_type = other DNA
tagttgtaatcccaggagaa

SEQ ID NO: 17041 - DNA, 20 bp, synthetic construct
  misc_feature 1..20: note = chemically synthesized
  source 1..20: mol_type = other DNA
tcccaggagaagagaactta

SEQ ID NO: 17042 - DNA, 20 bp, synthetic construct
  misc_feature 1..20: note = chemically synthesized
  source 1..20: mol_type = other DNA
cccaggagaagagaacttac

SEQ ID NO: 17043 - DNA, 20 bp, synthetic construct
  misc_feature 1..20: note = chemically synthesized
  source 1..20: mol_type = other DNA
aagagaacttacaggcacaa

SEQ ID NO: 17044 - DNA, 20 bp, synthetic construct
  misc_feature 1..20: note = chemically synthesized
  source 1..20: mol_type = other DNA
gaacttacaggcacaaaagt

SEQ ID NO: 17045 - DNA, 20 bp, synthetic construct
  misc_feature 1..20: note = chemically synthesized
  source 1..20: mol_type = other DNA
acttacaggcacaaaagtta

SEQ ID NO: 17046 - DNA, 20 bp, synthetic construct
  misc_feature 1..20: note = chemically synthesized
  source 1..20: mol_type = other DNA
acaggcacaaaagttagagt

SEQ ID NO: 17047 - DNA, 20 bp, synthetic construct
  misc_feature 1..20: note = chemically synthesized
  source 1..20: mol_type = other DNA
ggcacaaaagttagagttgg

SEQ ID NO: 17048 - DNA, 20 bp, synthetic construct
  misc_feature 1..20: note = chemically synthesized
  source 1..20: mol_type = other DNA
cacaaaagttagagttggta

SEQ ID NO: 17049 - DNA, 20 bp, synthetic construct
  misc_feature 1..20: note = chemically synthesized
  source 1..20: mol_type = other DNA
gttagagttggtagagttac

SEQ ID NO: 17050 - DNA, 20 bp, synthetic construct
  misc_feature 1..20: note = chemically synthesized
  source 1..20: mol_type = other DNA
ttagagttggtagagttacc

SEQ ID NO: 17051 - DNA, 20 bp, synthetic construct
  misc_feature 1..20: note = chemically synthesized
  source 1..20: mol_type = other DNA
ttggtagagttaccaggctt

SEQ ID NO: 17052 - DNA, 20 bp, synthetic construct
  misc_feature 1..20: note = chemically synthesized
  source 1..20: mol_type = other DNA
gtagagttaccaggctttgg

SEQ ID NO: 17053 - DNA, 20 bp, synthetic construct
  misc_feature 1..20: note = chemically synthesized
  source 1..20: mol_type = other DNA
caggctttggtagcttctct

SEQ ID NO: 17054 - DNA, 20 bp, synthetic construct
  misc_feature 1..20: note = chemically synthesized
  source 1..20: mol_type = other DNA
aggctttggtagcttctctt

SEQ ID NO: 17055 - DNA, 20 bp, synthetic construct
  misc_feature 1..20: note = chemically synthesized
  source 1..20: mol_type = other DNA
agcttctcttgggaataaac

SEQ ID NO: 17056 - DNA, 20 bp, synthetic construct
  misc_feature 1..20: note = chemically synthesized
  source 1..20: mol_type = other DNA
ttctcttgggaataaactag

SEQ ID NO: 17057 - DNA, 20 bp, synthetic construct
  misc_feature 1..20: note = chemically synthesized
  source 1..20: mol_type = other DNA
gaaatcttatgtgcttccca

SEQ ID NO: 17058 - DNA, 20 bp, synthetic construct
  misc_feature 1..20: note = chemically synthesized
  source 1..20: mol_type = other DNA
tgtgcttcccacagaattcc

SEQ ID NO: 17059 - DNA, 20 bp, synthetic construct
  misc_feature 1..20: note = chemically synthesized
  source 1..20: mol_type = other DNA
gcttcccacagaattcctgg

SEQ ID NO: 17060 - DNA, 20 bp, synthetic construct
  misc_feature 1..20: note = chemically synthesized
  source 1..20: mol_type = other DNA
tcccacagaattcctggtgg

SEQ ID NO: 17061 - DNA, 20 bp, synthetic construct
  misc_feature 1..20: note = chemically synthesized
  source 1..20: mol_type = other DNA
cccacagaattcctggtgga

SEQ ID NO: 17062 - DNA, 20 bp, synthetic construct
  misc_feature 1..20: note = chemically synthesized
  source 1..20: mol_type = other DNA
cacagaattcctggtggaag

SEQ ID NO: 17063 - DNA, 20 bp, synthetic construct
  misc_feature 1..20: note = chemically synthesized
  source 1..20: mol_type = other DNA
acagaattcctggtggaagg

SEQ ID NO: 17064 - DNA, 20 bp, synthetic construct
  misc_feature 1..20: note = chemically synthesized
  source 1..20: mol_type = other DNA
cctcctctttctcgtctttc

SEQ ID NO: 17065 - DNA, 20 bp, synthetic construct
  misc_feature 1..20: note = chemically synthesized
  source 1..20: mol_type = other DNA
ctcctctttctcgtctttct

SEQ ID NO: 17066 - DNA, 20 bp, synthetic construct
  misc_feature 1..20: note = chemically synthesized
  source 1..20: mol_type = other DNA
ctctttctcgtctttctggg

SEQ ID NO: 17067 - DNA, 20 bp, synthetic construct
  misc_feature 1..20: note = chemically synthesized
  source 1..20: mol_type = other DNA
tctttctcgtctttctgggc

SEQ ID NO: 17068 - DNA, 20 bp, synthetic construct
  misc_feature 1..20: note = chemically synthesized
  source 1..20: mol_type = other DNA
tctttctgggcaggtattgt

SEQ ID NO: 17069 - DNA, 20 bp, synthetic construct
  misc_feature 1..20: note = chemically synthesized
  source 1..20: mol_type = other DNA
ctttctgggcaggtattgtg

SEQ ID NO: 17070 - DNA, 20 bp, synthetic construct
  misc_feature 1..20: note = chemically synthesized
  source 1..20: mol_type = other DNA
ctgggcaggtattgtgagga

SEQ ID NO: 17071 - DNA, 20 bp, synthetic construct
  misc_feature 1..20: note = chemically synthesized
  source 1..20: mol_type = other DNA
gaggacggtatctgccctgt

SEQ ID NO: 17072 - DNA, 20 bp, synthetic construct
  misc_feature 1..20: note = chemically synthesized
  source 1..20: mol_type = other DNA
ccgtcctcacaatacctgcc

SEQ ID NO: 17073 - DNA, 20 bp, synthetic construct
  misc_feature 1..20: note = chemically synthesized
  source 1..20: mol_type = other DNA
cctcacaatacctgcccaga

SEQ ID NO: 17074 - DNA, 20 bp, synthetic construct
  misc_feature 1..20: note = chemically synthesized
  source 1..20: mol_type = other DNA
caatacctgcccagaaagac

SEQ ID NO: 17075 - DNA, 20 bp, synthetic construct
  misc_feature 1..20: note = chemically synthesized
  source 1..20: mol_type = other DNA
acctgcccagaaagacgaga

SEQ ID NO: 17076 - DNA, 20 bp, synthetic construct
  misc_feature 1..20: note = chemically synthesized
  source 1..20: mol_type = other DNA
ctgcccagaaagacgagaaa

SEQ ID NO: 17077 - DNA, 20 bp, synthetic construct
  misc_feature 1..20: note = chemically synthesized
  source 1..20: mol_type = other DNA
tgcccagaaagacgagaaag

SEQ ID NO: 17078 - DNA, 20 bp, synthetic construct
  misc_feature 1..20: note = chemically synthesized
  source 1..20: mol_type = other DNA
cccagaaagacgagaaagag

SEQ ID NO: 17079 - DNA, 20 bp, synthetic construct
  misc_feature 1..20: note = chemically synthesized
  source 1..20: mol_type = other DNA
ccagaaagacgagaaagagg

SEQ ID NO: 17080 - DNA, 20 bp, synthetic construct
  misc_feature 1..20: note = chemically synthesized
  source 1..20: mol_type = other DNA
gaaagacgagaaagaggagg

SEQ ID NO: 17081 - DNA, 20 bp, synthetic construct
  misc_feature 1..20: note = chemically synthesized
  source 1..20: mol_type = other DNA
ggaagaattcctccttccac

SEQ ID NO: 17082 - DNA, 20 bp, synthetic construct
  misc_feature 1..20: note = chemically synthesized
  source 1..20: mol_type = other DNA
gaagaattcctccttccacc

SEQ ID NO: 17083 - DNA, 20 bp, synthetic construct
  misc_feature 1..20: note = chemically synthesized
  source 1..20: mol_type = other DNA
tccttccaccaggaattctg

SEQ ID NO: 17084 - DNA, 20 bp, synthetic construct
  misc_feature 1..20: note = chemically synthesized
  source 1..20: mol_type = other DNA
ccttccaccaggaattctgt

SEQ ID NO: 17085 - DNA, 20 bp, synthetic construct
  misc_feature 1..20: note = chemically synthesized
  source 1..20: mol_type = other DNA
tccaccaggaattctgtggg

SEQ ID NO: 17086 - DNA, 20 bp, synthetic construct
  misc_feature 1..20: note = chemically synthesized
  source 1..20: mol_type = other DNA
gaattctgtgggaagcacat

SEQ ID NO: 17087 - DNA, 20 bp, synthetic construct
  misc_feature 1..20: note = chemically synthesized
  source 1..20: mol_type = other DNA
cacataagatttcatgctac

SEQ ID NO: 17088 - DNA, 20 bp, synthetic construct
  misc_feature 1..20: note = chemically synthesized
  source 1..20: mol_type = other DNA
catgctactagtttattccc

SEQ ID NO: 17089 - DNA, 20 bp, synthetic construct
  misc_feature 1..20: note = chemically synthesized
  source 1..20: mol_type = other DNA
tgctactagtttattcccaa

SEQ ID NO: 17090 - DNA, 20 bp, synthetic construct
  misc_feature 1..20: note = chemically synthesized
  source 1..20: mol_type = other DNA
tactagtttattcccaagag

SEQ ID NO: 17091 - DNA, 20 bp, synthetic construct
  misc_feature 1..20: note = chemically synthesized
  source 1..20: mol_type = other DNA
attcccaagagaagctacca

SEQ ID NO: 17092 - DNA, 20 bp, synthetic construct
  misc_feature 1..20: note = chemically synthesized
  source 1..20: mol_type = other DNA
caagagaagctaccaaagcc

SEQ ID NO: 17093 - DNA, 20 bp, synthetic construct
  misc_feature 1..20: note = chemically synthesized
  source 1..20: mol_type = other DNA
actctaacttttgtgcctgt

SEQ ID NO: 17094 - DNA, 20 bp, synthetic construct
  misc_feature 1..20: note = chemically synthesized
  source 1..20: mol_type = other DNA
gcctgtaagttctcttctcc

SEQ ID NO: 17095 - DNA, 20 bp, synthetic construct
  misc_feature 1..20: note = chemically synthesized
  source 1..20: mol_type = other DNA
cctgtaagttctcttctcct

SEQ ID NO: 17096 - DNA, 20 bp, synthetic construct
  misc_feature 1..20: note = chemically synthesized
  source 1..20: mol_type = other DNA
gggattacaactaattgaaa

SEQ ID NO: 17097 - DNA, 20 bp, synthetic construct
  misc_feature 1..20: note = chemically synthesized
  source 1..20: mol_type = other DNA
ggattacaactaattgaaac

SEQ ID NO: 17098 - DNA, 20 bp, synthetic construct
  misc_feature 1..20: note = chemically synthesized
  source 1..20: mol_type = other DNA
ctaattgaaacaggaattca

SEQ ID NO: 17099 - DNA, 20 bp, synthetic construct
  misc_feature 1..20: note = chemically synthesized
  source 1..20: mol_type = other DNA
taattgaaacaggaattcaa

SEQ ID NO: 17100 - DNA, 20 bp, synthetic construct
  misc_feature 1..20: note = chemically synthesized
  source 1..20: mol_type = other DNA
attgaaacaggaattcaaag

SEQ ID NO: 17101 - DNA, 20 bp, synthetic construct
  misc_feature 1..20: note = chemically synthesized
  source 1..20: mol_type = other DNA
acaggaattcaaaggagtct

SEQ ID NO: 17102 - DNA, 20 bp, synthetic construct
  misc_feature 1..20: note = chemically synthesized
  source 1..20: mol_type = other DNA
aggaattcaaaggagtctcg

SEQ ID NO: 17103 - DNA, 20 bp, synthetic construct
  misc_feature 1..20: note = chemically synthesized
  source 1..20: mol_type = other DNA
ggaattcaaaggagtctcgg

SEQ ID NO: 17104 - DNA, 20 bp, synthetic construct
  misc_feature 1..20: note = chemically synthesized
  source 1..20: mol_type = other DNA
aaggagtctcggaggactgt

SEQ ID NO: 17105 - DNA, 20 bp, synthetic construct
  misc_feature 1..20: note = chemically synthesized
  source 1..20: mol_type = other DNA
gagtctcggaggactgtaag

SEQ ID NO: 17106 - DNA, 20 bp, synthetic construct
  misc_feature 1..20: note = chemically synthesized
  source 1..20: mol_type = other DNA
gactgtaagaagaatgcttc

SEQ ID NO: 17107 - DNA, 20 bp, synthetic construct
  misc_feature 1..20: note = chemically synthesized
  source 1..20: mol_type = other DNA
actgtaagaagaatgcttcg

SEQ ID NO: 17108 - DNA, 20 bp, synthetic construct
  misc_feature 1..20: note = chemically synthesized
  source 1..20: mol_type = other DNA
atccctctctgtaacatccc

SEQ ID NO: 17109 - DNA, 20 bp, synthetic construct
  misc_feature 1..20: note = chemically synthesized
  source 1..20: mol_type = other DNA
tccctctctgtaacatccct

SEQ ID NO: 17110 - DNA, 20 bp, synthetic construct
  misc_feature 1..20: note = chemically synthesized
  source 1..20: mol_type = other DNA
ctctctgtaacatccctggg

SEQ ID NO: 17111 - DNA, 20 bp, synthetic construct
  misc_feature 1..20: note = chemically synthesized
  source 1..20: mol_type = other DNA
tctctgtaacatccctgggt

SEQ ID NO: 17112 - DNA, 20 bp, synthetic construct
  misc_feature 1..20: note = chemically synthesized
  source 1..20: mol_type = other DNA
catccctgggtgggcttccc

SEQ ID NO: 17113 - DNA, 20 bp, synthetic construct
  misc_feature 1..20: note = chemically synthesized
  source 1..20: mol_type = other DNA
ccctgggtgggcttccccag

SEQ ID NO: 17114 - DNA, 20 bp, synthetic construct
  misc_feature 1..20: note = chemically synthesized
  source 1..20: mol_type = other DNA
cctgggtgggcttccccagt

SEQ ID NO: 17115 - DNA, 20 bp, synthetic construct
  misc_feature 1..20: note = chemically synthesized
  source 1..20: mol_type = other DNA
gggtgggcttccccagtggg

SEQ ID NO: 17116 - DNA, 20 bp, synthetic construct
  misc_feature 1..20: note = chemically synthesized
  source 1..20: mol_type = other DNA
gcttccccagtgggaagtcg

SEQ ID NO: 17117 - DNA, 20 bp, synthetic construct
  misc_feature 1..20: note = chemically synthesized
  source 1..20: mol_type = other DNA
ggaagtcgaagaacttcctg

SEQ ID NO: 17118 - DNA, 20 bp, synthetic construct
  misc_feature 1..20: note = chemically synthesized
  source 1..20: mol_type = other DNA
aagtcgaagaacttcctgtg

SEQ ID NO: 17119 - DNA, 20 bp, synthetic construct
  misc_feature 1..20: note = chemically synthesized
  source 1..20: mol_type = other DNA
agtcgaagaacttcctgtgg

SEQ ID NO: 17120 - DNA, 20 bp, synthetic construct
  misc_feature 1..20: note = chemically synthesized
  source 1..20: mol_type = other DNA
tcgaagaacttcctgtggag

SEQ ID NO: 17121 - DNA, 20 bp, synthetic construct
  misc_feature 1..20: note = chemically synthesized
  source 1..20: mol_type = other DNA
ggaggagttactgctctttg

SEQ ID NO: 17122 - DNA, 20 bp, synthetic construct
  misc_feature 1..20: note = chemically synthesized
  source 1..20: mol_type = other DNA
tactgctctttgaagttgct

SEQ ID NO: 17123 - DNA, 20 bp, synthetic construct
  misc_feature 1..20: note = chemically synthesized
  source 1..20: mol_type = other DNA
actgctctttgaagttgctt

SEQ ID NO: 17124 - DNA, 20 bp, synthetic construct
  misc_feature 1..20: note = chemically synthesized
  source 1..20: mol_type = other DNA
gctctttgaagttgcttggg

SEQ ID NO: 17125 - DNA, 20 bp, synthetic construct
  misc_feature 1..20: note = chemically synthesized
  source 1..20: mol_type = other DNA
tgcttgggaagtgaccaata

SEQ ID NO: 17126 - DNA, 20 bp, synthetic construct
  misc_feature 1..20: note = chemically synthesized
  source 1..20: mol_type = other DNA
gcttgggaagtgaccaataa

SEQ ID NO: 17127 - DNA, 20 bp, synthetic construct
  misc_feature 1..20: note = chemically synthesized
  source 1..20: mol_type = other DNA
aaaggtttgtactgctcctg

SEQ ID NO: 17128 - DNA, 20 bp, synthetic construct
  misc_feature 1..20: note = chemically synthesized
  source 1..20: mol_type = other DNA
aaggtttgtactgctcctga

SEQ ID NO: 17129 - DNA, 20 bp, synthetic construct
  misc_feature 1..20: note = chemically synthesized
  source 1..20: mol_type = other DNA
gtttgtactgctcctgaagg

SEQ ID NO: 17130 - DNA, 20 bp, synthetic construct
  misc_feature 1..20: note = chemically synthesized
  source 1..20: mol_type = other DNA
tactgctcctgaaggtggat

SEQ ID NO: 17131 - DNA, 20 bp, synthetic construct
  misc_feature 1..20: note = chemically synthesized
  source 1..20: mol_type = other DNA
gtggatcagtacaccttcac

SEQ ID NO: 17132 - DNA, 20 bp, synthetic construct
  misc_feature 1..20: note = chemically synthesized
  source 1..20: mol_type = other DNA
tggatcagtacaccttcact

SEQ ID NO: 17133 - DNA, 20 bp, synthetic construct
  misc_feature 1..20: note = chemically synthesized
  source 1..20: mol_type = other DNA
tacaccttcactaggtgact

SEQ ID NO: 17134 - DNA, 20 bp, synthetic construct
  misc_feature 1..20: note = chemically synthesized
  source 1..20: mol_type = other DNA
acaccttcactaggtgactg

SEQ ID NO: 17135 - DNA, 20 bp, synthetic construct
  misc_feature 1..20: note = chemically synthesized
  source 1..20: mol_type = other DNA
cactaggtgactgaggaatg

SEQ ID NO: 17136 - DNA, 20 bp, synthetic construct
  misc_feature 1..20: note = chemically synthesized
  source 1..20: mol_type = other DNA
ctaggtgactgaggaatgta

SEQ ID NO: 17137 - DNA, 20 bp, synthetic construct
  misc_feature 1..20: note = chemically synthesized
  source 1..20: mol_type = other DNA
gtgactgaggaatgtagagt

SEQ ID NO: 17138 - DNA, 20 bp, synthetic construct
  misc_feature 1..20: note = chemically synthesized
  source 1..20: mol_type = other DNA
gaatgtagagtaagatttca

SEQ ID NO: 17139 - DNA, 20 bp, synthetic construct
  misc_feature 1..20: note = chemically synthesized
  source 1..20: mol_type = other DNA
agatttcacagataactctc

SEQ ID NO: 17140 - DNA, 20 bp, synthetic construct
  misc_feature 1..20: note = chemically synthesized
  source 1..20: mol_type = other DNA
ctctagtgataaccaattgc

SEQ ID NO: 17141 - DNA, 20 bp, synthetic construct
  misc_feature 1..20: note = chemically synthesized
  source 1..20: mol_type = other DNA
agtgataaccaattgctagt

SEQ ID NO: 17142 - DNA, 20 bp, synthetic construct
  misc_feature 1..20: note = chemically synthesized
  source 1..20: mol_type = other DNA
ataaccaattgctagtgagt

SEQ ID NO: 17143 - DNA, 20 bp, synthetic construct
  misc_feature 1..20: note = chemically synthesized
  source 1..20: mol_type = other DNA
taaccaattgctagtgagtg

SEQ ID NO: 17144 - DNA, 20 bp, synthetic construct
  misc_feature 1..20: note = chemically synthesized
  source 1..20: mol_type = other DNA
caattgctagtgagtgagga

SEQ ID NO: 17145 - DNA, 20 bp, synthetic construct
  misc_feature 1..20: note = chemically synthesized
  source 1..20: mol_type = other DNA
gagtgaggaaagcatttaaa

SEQ ID NO: 17146 - DNA, 20 bp, synthetic construct
  misc_feature 1..20: note = chemically synthesized
  source 1..20: mol_type = other DNA
atttaaacggaatatatatt

SEQ ID NO: 17147 - DNA, 20 bp, synthetic construct
  misc_feature 1..20: note = chemically synthesized
  source 1..20: mol_type = other DNA
tttaaacggaatatatattt

SEQ ID NO: 17148 - DNA, 20 bp, synthetic construct
  misc_feature 1..20: note = chemically synthesized
  source 1..20: mol_type = other DNA
tttaaccttgtctattacaa

SEQ ID NO: 17149 - DNA, 20 bp, synthetic construct
  misc_feature 1..20: note = chemically synthesized
  source 1..20: mol_type = other DNA
ttaaccttgtctattacaac

SEQ ID NO: 17150 - DNA, 20 bp, synthetic construct
  misc_feature 1..20: note = chemically synthesized
  source 1..20: mol_type = other DNA
attacaacaggctatgaata

SEQ ID NO: 17151 - DNA, 20 bp, synthetic construct
  misc_feature 1..20: note = chemically synthesized
  source 1..20: mol_type = other DNA
acagacttgtgtatgtgttg

SEQ ID NO: 17152 - DNA, 20 bp, synthetic construct
  misc_feature 1..20: note = chemically synthesized
  source 1..20: mol_type = other DNA
agacttgtgtatgtgttgaa

SEQ ID NO: 17153 - DNA, 20 bp, synthetic construct
  misc_feature 1..20: note = chemically synthesized
  source 1..20: mol_type = other DNA
gacttgtgtatgtgttgaag

SEQ ID NO: 17154 - DNA, 20 bp, synthetic construct
  misc_feature 1..20: note = chemically synthesized
  source 1..20: mol_type = other DNA
acttgtgtatgtgttgaaga

SEQ ID NO: 17155 - DNA, 20 bp, synthetic construct
  misc_feature 1..20: note = chemically synthesized
  source 1..20: mol_type = other DNA
ttgtgtatgtgttgaagagg

SEQ ID NO: 17156 - DNA, 20 bp, synthetic construct
  misc_feature 1..20: note = chemically synthesized
  source 1..20: mol_type = other DNA
gtatgtgttgaagagggaga

SEQ ID NO: 17157 - DNA, 20 bp, synthetic construct
  misc_feature 1..20: note = chemically synthesized
  source 1..20: mol_type = other DNA
agggagaaagttgaaaatat

SEQ ID NO: 17158 - DNA, 20 bp, synthetic construct
  misc_feature 1..20: note = chemically synthesized
  source 1..20: mol_type = other DNA
gaaaatattagccattgcca

SEQ ID NO: 17159 - DNA, 20 bp, synthetic construct
  misc_feature 1..20: note = chemically synthesized
  source 1..20: mol_type = other DNA
aaatccatattatgacaaca

SEQ ID NO: 17160 - DNA, 20 bp, synthetic construct
  misc_feature 1..20: note = chemically synthesized
  source 1..20: mol_type = other DNA
tatgacaacatagaaataaa

SEQ ID NO: 17161 - DNA, 20 bp, synthetic construct
  misc_feature 1..20: note = chemically synthesized
  source 1..20: mol_type = other DNA
ttttgttttaaaatttttct

SEQ ID NO: 17162 - DNA, 20 bp, synthetic construct
  misc_feature 1..20: note = chemically synthesized
  source 1..20: mol_type = other DNA
taaaatttttctcagcaaaa

SEQ ID NO: 17163 - DNA, 20 bp, synthetic construct
  misc_feature 1..20: note = chemically synthesized
  source 1..20: mol_type = other DNA
tataattaaacattttattt

SEQ ID NO: 17164 - DNA, 20 bp, synthetic construct
  misc_feature 1..20: note = chemically synthesized
  source 1..20: mol_type = other DNA
ataattaaacattttatttt

SEQ ID NO: 17165 - DNA, 20 bp, synthetic construct
  misc_feature 1..20: note = chemically synthesized
  source 1..20: mol_type = other DNA
attaaacattttattttagg

SEQ ID NO: 17166 - DNA, 20 bp, synthetic construct
  misc_feature 1..20: note = chemically synthesized
  source 1..20: mol_type = other DNA
taggaagatgtatatgtgat

SEQ ID NO: 17167 - DNA, 20 bp, synthetic construct
  misc_feature 1..20: note = chemically synthesized
  source 1..20: mol_type = other DNA
gatgtatatgtgattagaac

SEQ ID NO: 17168 - DNA, 20 bp, synthetic construct
  misc_feature 1..20: note = chemically synthesized
  source 1..20: mol_type = other DNA
tatatgtgattagaaccagt

SEQ ID NO: 17169 - DNA, 20 bp, synthetic construct
  misc_feature 1..20: note = chemically synthesized
  source 1..20: mol_type = other DNA
acctcaactctacattctgt

SEQ ID NO: 17170 - DNA, 20 bp, synthetic construct
  misc_feature 1..20: note = chemically synthesized
  source 1..20: mol_type = other DNA
agtaattatatgaaatgctt

SEQ ID NO: 17171 - DNA, 20 bp, synthetic construct
  misc_feature 1..20: note = chemically synthesized
  source 1..20: mol_type = other DNA
gaatgtttcatattcacaat

SEQ ID NO: 17172 - DNA, 20 bp, synthetic construct
  misc_feature 1..20: note = chemically synthesized
  source 1..20: mol_type = other DNA
tttcatattcacaattagct

SEQ ID NO: 17173 - DNA, 20 bp, synthetic construct
  misc_feature 1..20: note = chemically synthesized
  source 1..20: mol_type = other DNA
ttggaattaatgttttaatt

SEQ ID NO: 17174 - DNA, 20 bp, synthetic construct
  misc_feature 1..20: note = chemically synthesized
  source 1..20: mol_type = other DNA
tggaattaatgttttaattc

SEQ ID NO: 17175 - DNA, 20 bp, synthetic construct
  misc_feature 1..20: note = chemically synthesized
  source 1..20: mol_type = other DNA
gaattaatgttttaattcag

SEQ ID NO: 17176 - DNA, 20 bp, synthetic construct
  misc_feature 1..20: note = chemically synthesized
  source 1..20: mol_type = other DNA
ttaattcaggagcttctcaa

SEQ ID NO: 17177 - DNA, 20 bp, synthetic construct
  misc_feature 1..20: note = chemically synthesized
  source 1..20: mol_type = other DNA
taattcaggagcttctcaaa

SEQ ID NO: 17178 - DNA, 20 bp, synthetic construct
  misc_feature 1..20: note = chemically synthesized
  source 1..20: mol_type = other DNA
gcaaaatactgtgctccttt

SEQ ID NO: 17179 - DNA, 20 bp, synthetic construct
  misc_feature 1..20: note = chemically synthesized
  source 1..20: mol_type = other DNA
ctgtgctcctttcagaatga

SEQ ID NO: 17180 - DNA, 20 bp, synthetic construct
  misc_feature 1..20: note = chemically synthesized
  source 1..20: mol_type = other DNA
tcttcaatgctatgcttatg

SEQ ID NO: 17181 - DNA, 20 bp, synthetic construct
  misc_feature 1..20: note = chemically synthesized
  source 1..20: mol_type = other DNA
cttcaatgctatgcttatgt

SEQ ID NO: 17182 - DNA, 20 bp, synthetic construct
  misc_feature 1..20: note = chemically synthesized
  source 1..20: mol_type = other DNA
tatgtaggaattataaaata

SEQ ID NO: 17183 - DNA, 20 bp, synthetic construct
  misc_feature 1..20: note = chemically synthesized
  source 1..20: mol_type = other DNA
aaattgataaaacaatttgc

SEQ ID NO: 17184 - DNA, 20 bp, synthetic construct
  misc_feature 1..20: note = chemically synthesized
  source 1..20: mol_type = other DNA
tgataaaacaatttgcgagt

SEQ ID NO: 17185 - DNA, 20 bp, synthetic construct
  misc_feature 1..20: note = chemically synthesized
  source 1..20: mol_type = other DNA
gataaaacaatttgcgagtg

SEQ ID NO: 17186 - DNA, 20 bp, synthetic construct
  misc_feature 1..20: note = chemically synthesized
  source 1..20: mol_type = other DNA
aggtataacctcatctgtgc

SEQ ID NO: 17187 - DNA, 20 bp, synthetic construct
  misc_feature 1..20: note = chemically synthesized
  source 1..20: mol_type = other DNA
ggtataacctcatctgtgct

SEQ ID NO: 17188 - DNA, 20 bp, synthetic construct
  misc_feature 1..20: note = chemically synthesized
  source 1..20: mol_type = other DNA
taacctcatctgtgctgggt

SEQ ID NO: 17189 - DNA, 20 bp, synthetic construct
  misc_feature 1..20: note = chemically synthesized
  source 1..20: mol_type = other DNA
acctcatctgtgctgggtaa

SEQ ID NO: 17190 - DNA, 20 bp, synthetic construct
  misc_feature 1..20: note = chemically synthesized
  source 1..20: mol_type = other DNA
tcatctgtgctgggtaagag

SEQ ID NO: 17191 - DNA, 20 bp, synthetic construct
  misc_feature 1..20: note = chemically synthesized
  source 1..20: mol_type = other DNA
catctgtgctgggtaagaga

SEQ ID NO: 17192 - DNA, 20 bp, synthetic construct
  misc_feature 1..20: note = chemically synthesized
  source 1..20: mol_type = other DNA
tgtgctgggtaagagaaggc

SEQ ID NO: 17193 - DNA, 20 bp, synthetic construct
  misc_feature 1..20: note = chemically synthesized
  source 1..20: mol_type = other DNA
gtgctgggtaagagaaggca

SEQ ID NO: 17194 - DNA, 20 bp, synthetic construct
  misc_feature 1..20: note = chemically synthesized
  source 1..20: mol_type = other DNA
ctgggtaagagaaggcaagg

SEQ ID NO: 17195 - DNA, 20 bp, synthetic construct
  misc_feature 1..20: note = chemically synthesized
  source 1..20: mol_type = other DNA
gggtaagagaaggcaaggta

SEQ ID NO: 17196 - DNA, 20 bp, synthetic construct
  misc_feature 1..20: note = chemically synthesized
  source 1..20: mol_type = other DNA
tgtaaatgattttgaaaata

SEQ ID NO: 17197 - DNA, 20 bp, synthetic construct
  misc_feature 1..20: note = chemically synthesized
  source 1..20: mol_type = other DNA
aattataaaacaattccttg

SEQ ID NO: 17198 - DNA, 20 bp, synthetic construct
  misc_feature 1..20: note = chemically synthesized
  source 1..20: mol_type = other DNA
attataaaacaattccttgt

SEQ ID NO: 17199 - DNA, 20 bp, synthetic construct
  misc_feature 1..20: note = chemically synthesized
  source 1..20: mol_type = other DNA
ccttgtgggtttatactctc

SEQ ID NO: 17200 - DNA, 20 bp, synthetic construct
  misc_feature 1..20: note = chemically synthesized
  source 1..20: mol_type = other DNA
gtttatactctctagtttaa

SEQ ID NO: 17201 - DNA, 20 bp, synthetic construct
  misc_feature 1..20: note = chemically synthesized
  source 1..20: mol_type = other DNA
ctctctagtttaaaagtgtc

SEQ ID NO: 17202 - DNA, 20 bp, synthetic construct
  misc_feature 1..20: note = chemically synthesized
  source 1..20: mol_type = other DNA
taaaagtgtcaagactattg

SEQ ID NO: 17203 - DNA, 20 bp, synthetic construct
  misc_feature 1..20: note = chemically synthesized
  source 1..20: mol_type = other DNA
aaaagtgtcaagactattga

SEQ ID NO: 17204 - DNA, 20 bp, synthetic construct
  misc_feature 1..20: note = chemically synthesized
  source 1..20: mol_type = other DNA
caagactattgaaggaacat

SEQ ID NO: 17205 - DNA, 20 bp, synthetic construct
  misc_feature 1..20: note = chemically synthesized
  source 1..20: mol_type = other DNA
ctattgaaggaacattagca

SEQ ID NO: 17206 - DNA, 20 bp, synthetic construct
  misc_feature 1..20: note = chemically synthesized
  source 1..20: mol_type = other DNA
aaggaacattagcaaagaaa

SEQ ID NO: 17207 - DNA, 20 bp, synthetic construct
  misc_feature 1..20: note = chemically synthesized
  source 1..20: mol_type = other DNA
cattagcaaagaaaaagtca

SEQ ID NO: 17208 - DNA, 20 bp, synthetic construct
  misc_feature 1..20: note = chemically synthesized
  source 1..20: mol_type = other DNA
aagaaaaagtcatggttttg

SEQ ID NO: 17209 - DNA, 20 bp, synthetic construct
  misc_feature 1..20: note = chemically synthesized
  source 1..20: mol_type = other DNA
agaaaaagtcatggttttga

SEQ ID NO: 17210 - DNA, 20 bp, synthetic construct
  misc_feature 1..20: note = chemically synthesized
  source 1..20: mol_type = other DNA
aagtcatggttttgaaggct

SEQ ID NO: 17211 - DNA, 20 bp, synthetic construct
  misc_feature 1..20: note = chemically synthesized
  source 1..20: mol_type = other DNA
ttttgaaggctgagttcctc

SEQ ID NO: 17212 - DNA, 20 bp, synthetic construct
  misc_feature 1..20: note = chemically synthesized
  source 1..20: mol_type = other DNA
ctgagttcctcaagatcttg

SEQ ID NO: 17213 - DNA, 20 bp, synthetic construct
  misc_feature 1..20: note = chemically synthesized
  source 1..20: mol_type = other DNA
cctcaagatcttgaagaatc

SEQ ID NO: 17214 - DNA, 20 bp, synthetic construct
  misc_feature 1..20: note = chemically synthesized
  source 1..20: mol_type = other DNA
gaatcaagccaactgattgc

SEQ ID NO: 17215 - DNA, 20 bp, synthetic construct
  misc_feature 1..20: note = chemically synthesized
  source 1..20: mol_type = other DNA
aatcaagccaactgattgct

SEQ ID NO: 17216 - DNA, 20 bp, synthetic construct
  misc_feature 1..20: note = chemically synthesized
  source 1..20: mol_type = other DNA
ccaactgattgctgggtaaa

SEQ ID NO: 17217 - DNA, 20 bp, synthetic construct
  misc_feature 1..20: note = chemically synthesized
  source 1..20: mol_type = other DNA
actgattgctgggtaaatgg

SEQ ID NO: 17218 - DNA, 20 bp, synthetic construct
  misc_feature 1..20: note = chemically synthesized
  source 1..20: mol_type = other DNA
ttactatttcatgtctatta

SEQ ID NO: 17219 - DNA, 20 bp, synthetic construct
  misc_feature 1..20: note = chemically synthesized
  source 1..20: mol_type = other DNA
atgtctattacagtaatcta

SEQ ID NO: 17220 - DNA, 20 bp, synthetic construct
  misc_feature 1..20: note = chemically synthesized
  source 1..20: mol_type = other DNA
tgtctattacagtaatctaa

SEQ ID NO: 17221 - DNA, 20 bp, synthetic construct
  misc_feature 1..20: note = chemically synthesized
  source 1..20: mol_type = other DNA
aaaggatctgaaataataac

SEQ ID NO: 17222 - DNA, 20 bp, synthetic construct
  misc_feature 1..20: note = chemically synthesized
  source 1..20: mol_type = other DNA
gatatattacttccttcttt

SEQ ID NO: 17223 - DNA, 20 bp, synthetic construct
  misc_feature 1..20: note = chemically synthesized
  source 1..20: mol_type = other DNA
acttccttcttttggctaat

SEQ ID NO: 17224 - DNA, 20 bp, synthetic construct
  misc_feature 1..20: note = chemically synthesized
  source 1..20: mol_type = other DNA
ttccttcttttggctaatca

SEQ ID NO: 17225 - DNA, 20 bp, synthetic construct
  misc_feature 1..20: note = chemically synthesized
  source 1..20: mol_type = other DNA
ttcttttggctaatcagagc

SEQ ID NO: 17226 - DNA, 20 bp, synthetic construct
  misc_feature 1..20: note = chemically synthesized
  source 1..20: mol_type = other DNA
aaaattaaatgcattatata

SEQ ID NO: 17227 - DNA, 20 bp, synthetic construct
  misc_feature 1..20: note = chemically synthesized
  source 1..20: mol_type = other DNA
tggcatgcattctgaaaaat

SEQ ID NO: 17228 - DNA, 20 bp, synthetic construct
  misc_feature 1..20: note = chemically synthesized
  source 1..20: mol_type = other DNA
caccttatactaactgttca

SEQ ID NO: 17229 - DNA, 20 bp, synthetic construct
  misc_feature 1..20: note = chemically synthesized
  source 1..20: mol_type = other DNA
attcataaaatcaaaattaa

SEQ ID NO: 17230 - DNA, 20 bp, synthetic construct
  misc_feature 1..20: note = chemically synthesized
  source 1..20: mol_type = other DNA
aaaagtcaattttgcctatg

SEQ ID NO: 17231 - DNA, 20 bp, synthetic construct
  misc_feature 1..20: note = chemically synthesized
  source 1..20: mol_type = other DNA
agtcaattttgcctatgtag

SEQ ID NO: 17232 - DNA, 20 bp, synthetic construct
  misc_feature 1..20: note = chemically synthesized
  source 1..20: mol_type = other DNA
caattttgcctatgtagaag

SEQ ID NO: 17233 - DNA, 20 bp, synthetic construct
  misc_feature 1..20: note = chemically synthesized
  source 1..20: mol_type = other DNA
tttgcctatgtagaagtgga

SEQ ID NO: 17234 - DNA, 20 bp, synthetic construct
  misc_feature 1..20: note = chemically synthesized
  source 1..20: mol_type = other DNA
gaagtggacagaatgcatat

SEQ ID NO: 17235 - DNA, 20 bp, synthetic construct
  misc_feature 1..20: note = chemically synthesized
  source 1..20: mol_type = other DNA
agtggacagaatgcatataa

SEQ ID NO: 17236 - DNA, 20 bp, synthetic construct
  misc_feature 1..20: note = chemically synthesized
  source 1..20: mol_type = other DNA
agaatgcatataagagaaca

SEQ ID NO: 17237 - DNA, 20 bp, synthetic construct
  misc_feature 1..20: note = chemically synthesized
  source 1..20: mol_type = other DNA
gcatataagagaacaaagca

SEQ ID NO: 17238 - DNA, 20 bp, synthetic construct
  misc_feature 1..20: note = chemically synthesized
  source 1..20: mol_type = other DNA
aagcacggtcttattctctg

SEQ ID NO: 17239 - DNA, 20 bp, synthetic construct
  misc_feature 1..20: note = chemically synthesized
  source 1..20: mol_type = other DNA
cggtcttattctctgtagtt

SEQ ID NO: 17240 - DNA, 20 bp, synthetic construct
  misc_feature 1..20: note = chemically synthesized
  source 1..20: mol_type = other DNA
cttattctctgtagtttagt

SEQ ID NO: 17241 - DNA, 20 bp, synthetic construct
  misc_feature 1..20: note = chemically synthesized
  source 1..20: mol_type = other DNA
ttctctgtagtttagtgaga

SEQ ID NO: 17242 - DNA, 20 bp, synthetic construct
  misc_feature 1..20: note = chemically synthesized
  source 1..20: mol_type = other DNA
tagtttagtgagaaagaatc

SEQ ID NO: 17243 - DNA, 20 bp, synthetic construct
  misc_feature 1..20: note = chemically synthesized
  source 1..20: mol_type = other DNA
agtttagtgagaaagaatct

SEQ ID NO: 17244 - DNA, 20 bp, synthetic construct
  misc_feature 1..20: note = chemically synthesized
  source 1..20: mol_type = other DNA
tttagtgagaaagaatctag

SEQ ID NO: 17245 - DNA, 20 bp, synthetic construct
  misc_feature 1..20: note = chemically synthesized
  source 1..20: mol_type = other DNA
ttagtgagaaagaatctagg

SEQ ID NO: 17246 - DNA, 20 bp, synthetic construct
  misc_feature 1..20: note = chemically synthesized
  source 1..20: mol_type = other DNA
tgagaaagaatctaggagga

SEQ ID NO: 17247 - DNA, 20 bp, synthetic construct
  misc_feature 1..20: note = chemically synthesized
  source 1..20: mol_type = other DNA
ggaggacagaaaccttatta

SEQ ID NO: 17248 - DNA, 20 bp, synthetic construct
  misc_feature 1..20: note = chemically synthesized
  source 1..20: mol_type = other DNA
aggacagaaaccttattaca

SEQ ID NO: 17249 - DNA, 20 bp, synthetic construct
  misc_feature 1..20: note = chemically synthesized
  source 1..20: mol_type = other DNA
acagaaaccttattacagag

SEQ ID NO: 17250 - DNA, 20 bp, synthetic construct
  misc_feature 1..20: note = chemically synthesized
  source 1..20: mol_type = other DNA
aaccttattacagagaagtg

SEQ ID NO: 17251 - DNA, 20 bp, synthetic construct
  misc_feature 1..20: note = chemically synthesized
  source 1..20: mol_type = other DNA
ttattttgtattcttttcct

SEQ ID NO: 17252 - DNA, 20 bp, synthetic construct
  misc_feature 1..20: note = chemically synthesized
  source 1..20: mol_type = other DNA
attttgtattcttttcctca

SEQ ID NO: 17253 - DNA, 20 bp, synthetic construct
  misc_feature 1..20: note = chemically synthesized
  source 1..20: mol_type = other DNA
agagatctttatcctgaaat

SEQ ID NO: 17254 - DNA, 20 bp, synthetic construct
  misc_feature 1..20: note = chemically synthesized
  source 1..20: mol_type = other DNA
tgtttttaatgtcctttttc

SEQ ID NO: 17255 - DNA, 20 bp, synthetic construct
  misc_feature 1..20: note = chemically synthesized
  source 1..20: mol_type = other DNA
tttctagtcacaaatttttc

SEQ ID NO: 17256 - DNA, 20 bp, synthetic construct
  misc_feature 1..20: note = chemically synthesized
  source 1..20: mol_type = other DNA
agtcacaaatttttccagtc

SEQ ID NO: 17257 - DNA, 20 bp, synthetic construct
  misc_feature 1..20: note = chemically synthesized
  source 1..20: mol_type = other DNA
ccagtttttaaatatgccca

SEQ ID NO: 17258 - DNA, 20 bp, synthetic construct
  misc_feature 1..20: note = chemically synthesized
  source 1..20: mol_type = other DNA
ttaaatatgcccaaagttcc

SEQ ID NO: 17259 - DNA, 20 bp, synthetic construct
  misc_feature 1..20: note = chemically synthesized
  source 1..20: mol_type = other DNA
taaatatgcccaaagttcct

SEQ ID NO: 17260 - DNA, 20 bp, synthetic construct
  misc_feature 1..20: note = chemically synthesized
  source 1..20: mol_type = other DNA
atgcccaaagttcctgggaa

SEQ ID NO: 17261 - DNA, 20 bp, synthetic construct
  misc_feature 1..20: note = chemically synthesized
  source 1..20: mol_type = other DNA
tctctatcacatgtgaatcc

SEQ ID NO: 17262 - DNA, 20 bp, synthetic construct
  misc_feature 1..20: note = chemically synthesized
  source 1..20: mol_type = other DNA
tctatcacatgtgaatcccg

SEQ ID NO: 17263 - DNA, 20 bp, synthetic construct
  misc_feature 1..20: note = chemically synthesized
  source 1..20: mol_type = other DNA
cggagtatgccttgaaataa

SEQ ID NO: 17264 - DNA, 20 bp, synthetic construct
  misc_feature 1..20: note = chemically synthesized
  source 1..20: mol_type = other DNA
cttgaaataaaagttttctc

SEQ ID NO: 17265 - DNA, 20 bp, synthetic construct
  misc_feature 1..20: note = chemically synthesized
  source 1..20: mol_type = other DNA
tgaaataaaagttttctcta

SEQ ID NO: 17266 - DNA, 20 bp, synthetic construct
  misc_feature 1..20: note = chemically synthesized
  source 1..20: mol_type = other DNA
aaataaaagttttctctaga

SEQ ID NO: 17267 - DNA, 20 bp, synthetic construct
  misc_feature 1..20: note = chemically synthesized
  source 1..20: mol_type = other DNA
taaaagttttctctagagag

SEQ ID NO: 17268 - DNA, 20 bp, synthetic construct
  misc_feature 1..20: note = chemically synthesized
  source 1..20: mol_type = other DNA
aaaagttttctctagagagt

SEQ ID NO: 17269 - DNA, 20 bp, synthetic construct
  misc_feature 1..20: note = chemically synthesized
  source 1..20: mol_type = other DNA
agttttctctagagagtggg

SEQ ID NO: 17270 - DNA, 20 bp, synthetic construct
  misc_feature 1..20: note = chemically synthesized
  source 1..20: mol_type = other DNA
gttttctctagagagtgggc

SEQ ID NO: 17271 - DNA, 20 bp, synthetic construct
  misc_feature 1..20: note = chemically synthesized
  source 1..20: mol_type = other DNA
tttctctagagagtgggcag

SEQ ID NO: 17272 - DNA, 20 bp, synthetic construct
  misc_feature 1..20: note = chemically synthesized
  source 1..20: mol_type = other DNA
tagagagtgggcaggagctc

SEQ ID NO: 17273 - DNA, 20 bp, synthetic construct
  misc_feature 1..20: note = chemically synthesized
  source 1..20: mol_type = other DNA
agagagtgggcaggagctca

SEQ ID NO: 17274 - DNA, 20 bp, synthetic construct
  misc_feature 1..20: note = chemically synthesized
  source 1..20: mol_type = other DNA
tgggcaggagctcaaggaca

SEQ ID NO: 17275 - DNA, 20 bp, synthetic construct
  misc_feature 1..20: note = chemically synthesized
  source 1..20: mol_type = other DNA
agctcaaggacatagcttat

SEQ ID NO: 17276 - DNA, 20 bp, synthetic construct
  misc_feature 1..20: note = chemically synthesized
  source 1..20: mol_type = other DNA
tcaaggacatagcttattgg

SEQ ID NO: 17277 - DNA, 20 bp, synthetic construct
  misc_feature 1..20: note = chemically synthesized
  source 1..20: mol_type = other DNA
agcttattggtggataaaac

SEQ ID NO: 17278 - DNA, 20 bp, synthetic construct
  misc_feature 1..20: note = chemically synthesized
  source 1..20: mol_type = other DNA
ttattggtggataaaactgg

SEQ ID NO: 17279 - DNA, 20 bp, synthetic construct
  misc_feature 1..20: note = chemically synthesized
  source 1..20: mol_type = other DNA
tattggtggataaaactgga

SEQ ID NO: 17280 - DNA, 20 bp, synthetic construct
  misc_feature 1..20: note = chemically synthesized
  source 1..20: mol_type = other DNA
attggtggataaaactggaa

SEQ ID NO: 17281 - DNA, 20 bp, synthetic construct
  misc_feature 1..20: note = chemically synthesized
  source 1..20: mol_type = other DNA
taaaactggaagggacttgt

SEQ ID NO: 17282 - DNA, 20 bp, synthetic construct
  misc_feature 1..20: note = chemically synthesized
  source 1..20: mol_type = other DNA
tggaagggacttgttagcac

SEQ ID NO: 17283 - DNA, 20 bp, synthetic construct
  misc_feature 1..20: note = chemically synthesized
  source 1..20: mol_type = other DNA
ggaagggacttgttagcact

SEQ ID NO: 17284 - DNA, 20 bp, synthetic construct
  misc_feature 1..20: note = chemically synthesized
  source 1..20: mol_type = other DNA
gacttgttagcactgggaat

SEQ ID NO: 17285 - DNA, 20 bp, synthetic construct
  misc_feature 1..20: note = chemically synthesized
  source 1..20: mol_type = other DNA
gttagcactgggaatcagtc

SEQ ID NO: 17286 - DNA, 20 bp, synthetic construct
  misc_feature 1..20: note = chemically synthesized
  source 1..20: mol_type = other DNA
agcactgggaatcagtccag

SEQ ID NO: 17287 - DNA, 20 bp, synthetic construct
  misc_feature 1..20: note = chemically synthesized
  source 1..20: mol_type = other DNA
agtccagaagatctctgcac

SEQ ID NO: 17288 - DNA, 20 bp, synthetic construct
  misc_feature 1..20: note = chemically synthesized
  source 1..20: mol_type = other DNA
ctgcacaagttcctgcacct

SEQ ID NO: 17289 - DNA, 20 bp, synthetic construct
  misc_feature 1..20: note = chemically synthesized
  source 1..20: mol_type = other DNA
cacaagttcctgcacctgag

SEQ ID NO: 17290 - DNA, 20 bp, synthetic construct
  misc_feature 1..20: note = chemically synthesized
  source 1..20: mol_type = other DNA
caagttcctgcacctgagca

SEQ ID NO: 17291 - DNA, 20 bp, synthetic construct
  misc_feature 1..20: note = chemically synthesized
  source 1..20: mol_type = other DNA
catcatttaacaaacattaa

SEQ ID NO: 17292 - DNA, 20 bp, synthetic construct
  misc_feature 1..20: note = chemically synthesized
  source 1..20: mol_type = other DNA
tcatttaacaaacattaatg

SEQ ID NO: 17293 - DNA, 20 bp, synthetic construct
  misc_feature 1..20: note = chemically synthesized
  source 1..20: mol_type = other DNA
attaatggagcactgttacc

SEQ ID NO: 17294 - DNA, 20 bp, synthetic construct
  misc_feature 1..20: note = chemically synthesized
  source 1..20: mol_type = other DNA
ttaatggagcactgttacct

SEQ ID NO: 17295 - DNA, 20 bp, synthetic construct
  misc_feature 1..20: note = chemically synthesized
  source 1..20: mol_type = other DNA
gagcactgttacctgggcac

SEQ ID NO: 17296 - DNA, 20 bp, synthetic construct
  misc_feature 1..20: note = chemically synthesized
  source 1..20: mol_type = other DNA
agcactgttacctgggcact

SEQ ID NO: 17297 - DNA, 20 bp, synthetic construct
  misc_feature 1..20: note = chemically synthesized
  source 1..20: mol_type = other DNA
cctgggcactgggaacacgc

SEQ ID NO: 17298 - DNA, 20 bp, synthetic construct
  misc_feature 1..20: note = chemically synthesized
  source 1..20: mol_type = other DNA
gggaacacgccagtgaaact

SEQ ID NO: 17299 - DNA, 20 bp, synthetic construct
  misc_feature 1..20: note = chemically synthesized
  source 1..20: mol_type = other DNA
agtgaaactaagttatttta

SEQ ID NO: 17300 - DNA, 20 bp, synthetic construct
  misc_feature 1..20: note = chemically synthesized
  source 1..20: mol_type = other DNA
tattttatggatcttataat

SEQ ID NO: 17301 - DNA, 20 bp, synthetic construct
  misc_feature 1..20: note = chemically synthesized
  source 1..20: mol_type = other DNA
tttatggatcttataatcag

SEQ ID NO: 17302 - DNA, 20 bp, synthetic construct
  misc_feature 1..20: note = chemically synthesized
  source 1..20: mol_type = other DNA
agtagcatgtgtgttgatct

SEQ ID NO: 17303 - DNA, 20 bp, synthetic construct
  misc_feature 1..20: note = chemically synthesized
  source 1..20: mol_type = other DNA
gtagcatgtgtgttgatctc

SEQ ID NO: 17304 - DNA, 20 bp, synthetic construct
  misc_feature 1..20: note = chemically synthesized
  source 1..20: mol_type = other DNA
tagcatgtgtgttgatctca

SEQ ID NO: 17305 - DNA, 20 bp, synthetic construct
  misc_feature 1..20: note = chemically synthesized
  source 1..20: mol_type = other DNA
tgtgtgttgatctcagggtc

SEQ ID NO: 17306 - DNA, 20 bp, synthetic construct
  misc_feature 1..20: note = chemically synthesized
  source 1..20: mol_type = other DNA
gttgatctcagggtctagaa

SEQ ID NO: 17307 - DNA, 20 bp, synthetic construct
  misc_feature 1..20: note = chemically synthesized
  source 1..20: mol_type = other DNA
tcagggtctagaacagtgcc

SEQ ID NO: 17308 - DNA, 20 bp, synthetic construct
  misc_feature 1..20: note = chemically synthesized
  source 1..20: mol_type = other DNA
ctagaacagtgcctggtaca

SEQ ID NO: 17309 - DNA, 20 bp, synthetic construct
  misc_feature 1..20: note = chemically synthesized
  source 1..20: mol_type = other DNA
ggtacatagaaaatgctcaa

SEQ ID NO: 17310 - DNA, 20 bp, synthetic construct
  misc_feature 1..20: note = chemically synthesized
  source 1..20: mol_type = other DNA
aaatttgtttttcaacccct

SEQ ID NO: 17311 - DNA, 20 bp, synthetic construct
  misc_feature 1..20: note = chemically synthesized
  source 1..20: mol_type = other DNA
ttttctatcatttccctttc

SEQ ID NO: 17312 - DNA, 20 bp, synthetic construct
  misc_feature 1..20: note = chemically synthesized
  source 1..20: mol_type = other DNA
tttctatcatttccctttca

SEQ ID NO: 17313 - DNA, 20 bp, synthetic construct
  misc_feature 1..20: note = chemically synthesized
  source 1..20: mol_type = other DNA
ttctatcatttccctttcaa

SEQ ID NO: 17314 - DNA, 20 bp, synthetic construct
  misc_feature 1..20: note = chemically synthesized
  source 1..20: mol_type = other DNA
tctatcatttccctttcaag

SEQ ID NO: 17315 - DNA, 20 bp, synthetic construct
  misc_feature 1..20: note = chemically synthesized
  source 1..20: mol_type = other DNA
atcatttccctttcaagggg

SEQ ID NO: 17316 - DNA, 20 bp, synthetic construct
  misc_feature 1..20: note = chemically synthesized
  source 1..20: mol_type = other DNA
tcatttccctttcaagggga

SEQ ID NO: 17317 - DNA, 20 bp, synthetic construct
  misc_feature 1..20: note = chemically synthesized
  source 1..20: mol_type = other DNA
catttccctttcaaggggaa

SEQ ID NO: 17318 - DNA, 20 bp, synthetic construct
  misc_feature 1..20: note = chemically synthesized
  source 1..20: mol_type = other DNA
ttccctttcaaggggaaggg

SEQ ID NO: 17319 - DNA, 20 bp, synthetic construct
  misc_feature 1..20: note = chemically synthesized
  source 1..20: mol_type = other DNA
ggggaagggaagtgtttttg

SEQ ID NO: 17320 - DNA, 20 bp, synthetic construct
  misc_feature 1..20: note = chemically synthesized
  source 1..20: mol_type = other DNA
ggaagggaagtgtttttgtg

SEQ ID NO: 17321 - DNA, 20 bp, synthetic construct
  misc_feature 1..20: note = chemically synthesized
  source 1..20: mol_type = other DNA
aagggaagtgtttttgtgga

SEQ ID NO: 17322 - DNA, 20 bp, synthetic construct
  misc_feature 1..20: note = chemically synthesized
  source 1..20: mol_type = other DNA
agggaagtgtttttgtggag

SEQ ID NO: 17323 - DNA, 20 bp, synthetic construct
  misc_feature 1..20: note = chemically synthesized
  source 1..20: mol_type = other DNA
ccccacaatgtgatttacac

SEQ ID NO: 17324 - DNA, 20 bp, synthetic construct
  misc_feature 1..20: note = chemically synthesized
  source 1..20: mol_type = other DNA
tctttattttaatattatca

SEQ ID NO: 17325 - DNA, 20 bp, synthetic construct
  misc_feature 1..20: note = chemically synthesized
  source 1..20: mol_type = other DNA
attttaatattatcatagcc

SEQ ID NO: 17326 - DNA, 20 bp, synthetic construct
  misc_feature 1..20: note = chemically synthesized
  source 1..20: mol_type = other DNA
aatattatcatagcctggta

SEQ ID NO: 17327 - DNA, 20 bp, synthetic construct
  misc_feature 1..20: note = chemically synthesized
  source 1..20: mol_type = other DNA
atcatagcctggtatggttt

SEQ ID NO: 17328 - DNA, 20 bp, synthetic construct
  misc_feature 1..20: note = chemically synthesized
  source 1..20: mol_type = other DNA
tatggtttgagattttcata

SEQ ID NO: 17329 - DNA, 20 bp, synthetic construct
  misc_feature 1..20: note = chemically synthesized
  source 1..20: mol_type = other DNA
gtttgagattttcatataga

SEQ ID NO: 17330 - DNA, 20 bp, synthetic construct
  misc_feature 1..20: note = chemically synthesized
  source 1..20: mol_type = other DNA
ctaataatacattgccacta

SEQ ID NO: 17331 - DNA, 20 bp, synthetic construct
  misc_feature 1..20: note = chemically synthesized
  source 1..20: mol_type = other DNA
ttttacttccctgcatttca

SEQ ID NO: 17332 - DNA, 20 bp, synthetic construct
  misc_feature 1..20: note = chemically synthesized
  source 1..20: mol_type = other DNA
tacttccctgcatttcatag

SEQ ID NO: 17333 - DNA, 20 bp, synthetic construct
  misc_feature 1..20: note = chemically synthesized
  source 1..20: mol_type = other DNA
gcatttcatagtagtgatat

SEQ ID NO: 17334 - DNA, 20 bp, synthetic construct
  misc_feature 1..20: note = chemically synthesized
  source 1..20: mol_type = other DNA
catttcatagtagtgatatg

SEQ ID NO: 17335 - DNA, 20 bp, synthetic construct
  misc_feature 1..20: note = chemically synthesized
  source 1..20: mol_type = other DNA
agtagtgatatgaggtatct

SEQ ID NO: 17336 - DNA, 20 bp, synthetic construct
  misc_feature 1..20: note = chemically synthesized
  source 1..20: mol_type = other DNA
tagtgatatgaggtatctta

SEQ ID NO: 17337 - DNA, 20 bp, synthetic construct
  misc_feature 1..20: note = chemically synthesized
  source 1..20: mol_type = other DNA
gatcatgaatcccactcctc

SEQ ID NO: 17338 - DNA, 20 bp, synthetic construct
  misc_feature 1..20: note = chemically synthesized
  source 1..20: mol_type = other DNA
aatcccactcctccagttca

SEQ ID NO: 17339 - DNA, 20 bp, synthetic construct
  misc_feature 1..20: note = chemically synthesized
  source 1..20: mol_type = other DNA
tcccactcctccagttcata

SEQ ID NO: 17340 - DNA, 20 bp, synthetic construct
  misc_feature 1..20: note = chemically synthesized
  source 1..20: mol_type = other DNA
tcatagagcaaattgattcg

SEQ ID NO: 17341 - DNA, 20 bp, synthetic construct
  misc_feature 1..20: note = chemically synthesized
  source 1..20: mol_type = other DNA
atagagcaaattgattcgta

SEQ ID NO: 17342 - DNA, 20 bp, synthetic construct
  misc_feature 1..20: note = chemically synthesized
  source 1..20: mol_type = other DNA
tagagcaaattgattcgtag

SEQ ID NO: 17343 - DNA, 20 bp, synthetic construct
  misc_feature 1..20: note = chemically synthesized
  source 1..20: mol_type = other DNA
cgtagaggtatttaatgatc

SEQ ID NO: 17344 - DNA, 20 bp, synthetic construct
  misc_feature 1..20: note = chemically synthesized
  source 1..20: mol_type = other DNA
gtatttaatgatcaagcaaa

SEQ ID NO: 17345 - DNA, 20 bp, synthetic construct
  misc_feature 1..20: note = chemically synthesized
  source 1..20: mol_type = other DNA
tttaatgatcaagcaaatgg

SEQ ID NO: 17346 - DNA, 20 bp, synthetic construct
  misc_feature 1..20: note = chemically synthesized
  source 1..20: mol_type = other DNA
taatgatcaagcaaatggca

SEQ ID NO: 17347 - DNA, 20 bp, synthetic construct
  misc_feature 1..20: note = chemically synthesized
  source 1..20: mol_type = other DNA
gatcaagcaaatggcagagt

SEQ ID NO: 17348 - DNA, 20 bp, synthetic construct
  misc_feature 1..20: note = chemically synthesized
  source 1..20: mol_type = other DNA
atcaagcaaatggcagagtt

SEQ ID NO: 17349 - DNA, 20 bp, synthetic construct
  misc_feature 1..20: note = chemically synthesized
  source 1..20: mol_type = other DNA
gcaaatggcagagttaggac

SEQ ID NO: 17350 - DNA, 20 bp, synthetic construct
  misc_feature 1..20: note = chemically synthesized
  source 1..20: mol_type = other DNA
caaatggcagagttaggacc

SEQ ID NO: 17351 - DNA, 20 bp, synthetic construct
  misc_feature 1..20: note = chemically synthesized
  source 1..20: mol_type = other DNA
gcagagttaggaccaggatt

SEQ ID NO: 17352 - DNA, 20 bp, synthetic construct
  misc_feature 1..20: note = chemically synthesized
  source 1..20: mol_type = other DNA
cagagttaggaccaggattt

SEQ ID NO: 17353 - DNA, 20 bp, synthetic construct
  misc_feature 1..20: note = chemically synthesized
  source 1..20: mol_type = other DNA
ccaggatttaggtcttttcc

SEQ ID NO: 17354 - DNA, 20 bp, synthetic construct
  misc_feature 1..20: note = chemically synthesized
  source 1..20: mol_type = other DNA
caggatttaggtcttttcca

SEQ ID NO: 17355 - DNA, 20 bp, synthetic construct
  misc_feature 1..20: note = chemically synthesized
  source 1..20: mol_type = other DNA
tcacttttttactattatgt

SEQ ID NO: 17356 - DNA, 20 bp, synthetic construct
  misc_feature 1..20: note = chemically synthesized
  source 1..20: mol_type = other DNA
agaattaaatattaaaacct

SEQ ID NO: 17357 - DNA, 20 bp, synthetic construct
  misc_feature 1..20: note = chemically synthesized
  source 1..20: mol_type = other DNA
tattaaaacctcagttttca

SEQ ID NO: 17358 - DNA, 20 bp, synthetic construct
  misc_feature 1..20: note = chemically synthesized
  source 1..20: mol_type = other DNA
attaaaacctcagttttcaa

SEQ ID NO: 17359 - DNA, 20 bp, synthetic construct
  misc_feature 1..20: note = chemically synthesized
  source 1..20: mol_type = other DNA
ttttcaaaggaaatgtccta

SEQ ID NO: 17360 - DNA, 20 bp, synthetic construct
  misc_feature 1..20: note = chemically synthesized
  source 1..20: mol_type = other DNA
aggaaatgtcctatagatga

SEQ ID NO: 17361 - DNA, 20 bp, synthetic construct
  misc_feature 1..20: note = chemically synthesized
  source 1..20: mol_type = other DNA
gtcctatagatgaaagaaca

SEQ ID NO: 17362 - DNA, 20 bp, synthetic construct
  misc_feature 1..20: note = chemically synthesized
  source 1..20: mol_type = other DNA
atgaaagaacacagtacttg

SEQ ID NO: 17363 - DNA, 20 bp, synthetic construct
  misc_feature 1..20: note = chemically synthesized
  source 1..20: mol_type = other DNA
gaacacagtacttgcagtca

SEQ ID NO: 17364 - DNA, 20 bp, synthetic construct
  misc_feature 1..20: note = chemically synthesized
  source 1..20: mol_type = other DNA
aacacagtacttgcagtcaa

SEQ ID NO: 17365 - DNA, 20 bp, synthetic construct
  misc_feature 1..20: note = chemically synthesized
  source 1..20: mol_type = other DNA
gtacttgcagtcaaaggtct

SEQ ID NO: 17366 - DNA, 20 bp, synthetic construct
  misc_feature 1..20: note = chemically synthesized
  source 1..20: mol_type = other DNA
atttctgaaactttctgaaa

SEQ ID NO: 17367 - DNA, 20 bp, synthetic construct
  misc_feature 1..20: note = chemically synthesized
  source 1..20: mol_type = other DNA
gaaccccttaaactgaataa

SEQ ID NO: 17368 - DNA, 20 bp, synthetic construct
  misc_feature 1..20: note = chemically synthesized
  source 1..20: mol_type = other DNA
aaaatgaatgttatactctc

SEQ ID NO: 17369 - DNA, 20 bp, synthetic construct
  misc_feature 1..20: note = chemically synthesized
  source 1..20: mol_type = other DNA
agttatcttaccatgttttc

SEQ ID NO: 17370 - DNA, 20 bp, synthetic construct
  misc_feature 1..20: note = chemically synthesized
  source 1..20: mol_type = other DNA
taccatgttttctggcaaac

SEQ ID NO: 17371 - DNA, 20 bp, synthetic construct
  misc_feature 1..20: note = chemically synthesized
  source 1..20: mol_type = other DNA
accatgttttctggcaaaca

SEQ ID NO: 17372 - DNA, 20 bp, synthetic construct
  misc_feature 1..20: note = chemically synthesized
  source 1..20: mol_type = other DNA
aaggaaatgtattcacatcc

SEQ ID NO: 17373 - DNA, 20 bp, synthetic construct
  misc_feature 1..20: note = chemically synthesized
  source 1..20: mol_type = other DNA
attcacatccaagaaaacaa

SEQ ID NO: 17374 - DNA, 20 bp, synthetic construct
  misc_feature 1..20: note = chemically synthesized
  source 1..20: mol_type = other DNA
ttcacatccaagaaaacaaa

SEQ ID NO: 17375 - DNA, 20 bp, synthetic construct
  misc_feature 1..20: note = chemically synthesized
  source 1..20: mol_type = other DNA
caagaaaacaaaaggtttct

SEQ ID NO: 17376 - DNA, 20 bp, synthetic construct
  misc_feature 1..20: note = chemically synthesized
  source 1..20: mol_type = other DNA
aagaaaacaaaaggtttctt

SEQ ID NO: 17377 - DNA, 20 bp, synthetic construct
  misc_feature 1..20: note = chemically synthesized
  source 1..20: mol_type = other DNA
gaaaacaaaaggtttcttag

SEQ ID NO: 17378 - DNA, 20 bp, synthetic construct
  misc_feature 1..20: note = chemically synthesized
  source 1..20: mol_type = other DNA
aacaaaaggtttcttaggag

SEQ ID NO: 17379 - DNA, 20 bp, synthetic construct
  misc_feature 1..20: note = chemically synthesized
  source 1..20: mol_type = other DNA
ggagaagaatcccttgctgc

SEQ ID NO: 17380 - DNA, 20 bp, synthetic construct
  misc_feature 1..20: note = chemically synthesized
  source 1..20: mol_type = other DNA
agaattttgcccatgaacaa

SEQ ID NO: 17381 - DNA, 20 bp, synthetic construct
  misc_feature 1..20: note = chemically synthesized
  source 1..20: mol_type = other DNA
tggaaacgtgaaaaacataa

SEQ ID NO: 17382 - DNA, 20 bp, synthetic construct
  misc_feature 1..20: note = chemically synthesized
  source 1..20: mol_type = other DNA
acgtgaaaaacataacagat

SEQ ID NO: 17383 - DNA, 20 bp, synthetic construct
  misc_feature 1..20: note = chemically synthesized
  source 1..20: mol_type = other DNA
gtgaaaaacataacagatga

SEQ ID NO: 17384 - DNA, 20 bp, synthetic construct
  misc_feature 1..20: note = chemically synthesized
  source 1..20: mol_type = other DNA
gaaaaacataacagatgaga

SEQ ID NO: 17385 - DNA, 20 bp, synthetic construct
  misc_feature 1..20: note = chemically synthesized
  source 1..20: mol_type = other DNA
cataacagatgagagagtca

SEQ ID NO: 17386 - DNA, 20 bp, synthetic construct
  misc_feature 1..20: note = chemically synthesized
  source 1..20: mol_type = other DNA
acagatgagagagtcacagt

SEQ ID NO: 17387 - DNA, 20 bp, synthetic construct
  misc_feature 1..20: note = chemically synthesized
  source 1..20: mol_type = other DNA
gagagagtcacagttagttt

SEQ ID NO: 17388 - DNA, 20 bp, synthetic construct
  misc_feature 1..20: note = chemically synthesized
  source 1..20: mol_type = other DNA
agagagtcacagttagtttt

SEQ ID NO: 17389 - DNA, 20 bp, synthetic construct
  misc_feature 1..20: note = chemically synthesized
  source 1..20: mol_type = other DNA
tagttttgggtactaattct

SEQ ID NO: 17390 - DNA, 20 bp, synthetic construct
  misc_feature 1..20: note = chemically synthesized
  source 1..20: mol_type = other DNA
cattaatccattttattatt

SEQ ID NO: 17391 - DNA, 20 bp, synthetic construct
  misc_feature 1..20: note = chemically synthesized
  source 1..20: mol_type = other DNA
aatccattttattattcagt

SEQ ID NO: 17392 - DNA, 20 bp, synthetic construct
  misc_feature 1..20: note = chemically synthesized
  source 1..20: mol_type = other DNA
atccattttattattcagta

SEQ ID NO: 17393 - DNA, 20 bp, synthetic construct
  misc_feature 1..20: note = chemically synthesized
  source 1..20: mol_type = other DNA
ttattcagtaaggattcatc

SEQ ID NO: 17394 - DNA, 20 bp, synthetic construct
  misc_feature 1..20: note = chemically synthesized
  source 1..20: mol_type = other DNA
aggattcatcaagtgtctat

SEQ ID NO: 17395 - DNA, 20 bp, synthetic construct
  misc_feature 1..20: note = chemically synthesized
  source 1..20: mol_type = other DNA
ggattcatcaagtgtctatt

SEQ ID NO: 17396 - DNA, 20 bp, synthetic construct
  misc_feature 1..20: note = chemically synthesized
  source 1..20: mol_type = other DNA
atcaagtgtctattaggtat

SEQ ID NO: 17397 - DNA, 20 bp, synthetic construct
  misc_feature 1..20: note = chemically synthesized
  source 1..20: mol_type = other DNA
tcaagtgtctattaggtatc

SEQ ID NO: 17398 - DNA, 20 bp, synthetic construct
  misc_feature 1..20: note = chemically synthesized
  source 1..20: mol_type = other DNA
tctattaggtatcaggcact

SEQ ID NO: 17399 - DNA, 20 bp, synthetic construct
  misc_feature 1..20: note = chemically synthesized
  source 1..20: mol_type = other DNA
tattaggtatcaggcactga

SEQ ID NO: 17400 - DNA, 20 bp, synthetic construct
  misc_feature 1..20: note = chemically synthesized
  source 1..20: mol_type = other DNA
attaggtatcaggcactgag

SEQ ID NO: 17401 - DNA, 20 bp, synthetic construct
  misc_feature 1..20: note = chemically synthesized
  source 1..20: mol_type = other DNA
ggtatcaggcactgagaggc

SEQ ID NO: 17402 - DNA, 20 bp, synthetic construct
  misc_feature 1..20: note = chemically synthesized
  source 1..20: mol_type = other DNA
gtatcaggcactgagaggcg

SEQ ID NO: 17403 - DNA, 20 bp, synthetic construct
  misc_feature 1..20: note = chemically synthesized
  source 1..20: mol_type = other DNA
tatcaggcactgagaggcga

SEQ ID NO: 17404 - DNA, 20 bp, synthetic construct
  misc_feature 1..20: note = chemically synthesized
  source 1..20: mol_type = other DNA
tcaggcactgagaggcgagg

SEQ ID NO: 17405 - DNA, 20 bp, synthetic construct
  misc_feature 1..20: note = chemically synthesized
  source 1..20: mol_type = other DNA
gcactgagaggcgagggaga

SEQ ID NO: 17406 - DNA, 20 bp, synthetic construct
  misc_feature 1..20: note = chemically synthesized
  source 1..20: mol_type = other DNA
actgagaggcgagggagata

SEQ ID NO: 17407 - DNA, 20 bp, synthetic construct
  misc_feature 1..20: note = chemically synthesized
  source 1..20: mol_type = other DNA
gaggcgagggagatagagtt

SEQ ID NO: 17408 - DNA, 20 bp, synthetic construct
  misc_feature 1..20: note = chemically synthesized
  source 1..20: mol_type = other DNA
gggagatagagttaagaata

SEQ ID NO: 17409 - DNA, 20 bp, synthetic construct
  misc_feature 1..20: note = chemically synthesized
  source 1..20: mol_type = other DNA
agaactgattcttaatcttc

SEQ ID NO: 17410 - DNA, 20 bp, synthetic construct
  misc_feature 1..20: note = chemically synthesized
  source 1..20: mol_type = other DNA
ttcaagaattgacaaatttg

SEQ ID NO: 17411 - DNA, 20 bp, synthetic construct
  misc_feature 1..20: note = chemically synthesized
  source 1..20: mol_type = other DNA
aagaattgacaaatttgtag

SEQ ID NO: 17412 - DNA, 20 bp, synthetic construct
  misc_feature 1..20: note = chemically synthesized
  source 1..20: mol_type = other DNA
agaattgacaaatttgtaga

SEQ ID NO: 17413 - DNA, 20 bp, synthetic construct
  misc_feature 1..20: note = chemically synthesized
  source 1..20: mol_type = other DNA
attgacaaatttgtagaagg

SEQ ID NO: 17414 - DNA, 20 bp, synthetic construct
  misc_feature 1..20: note = chemically synthesized
  source 1..20: mol_type = other DNA
tagacattgaacatacaata

SEQ ID NO: 17415 - DNA, 20 bp, synthetic construct
  misc_feature 1..20: note = chemically synthesized
  source 1..20: mol_type = other DNA
acaatacagtcaaatgtgat

SEQ ID NO: 17416 - DNA, 20 bp, synthetic construct
  misc_feature 1..20: note = chemically synthesized
  source 1..20: mol_type = other DNA
cagtcaaatgtgatgagtgt

SEQ ID NO: 17417 - DNA, 20 bp, synthetic construct
  misc_feature 1..20: note = chemically synthesized
  source 1..20: mol_type = other DNA
aatgtgatgagtgtgagact

SEQ ID NO: 17418 - DNA, 20 bp, synthetic construct
  misc_feature 1..20: note = chemically synthesized
  source 1..20: mol_type = other DNA
atgtgatgagtgtgagacta

SEQ ID NO: 17419 - DNA, 20 bp, synthetic construct
  misc_feature 1..20: note = chemically synthesized
  source 1..20: mol_type = other DNA
tgtgatgagtgtgagactaa

SEQ ID NO: 17420 - DNA, 20 bp, synthetic construct
  misc_feature 1..20: note = chemically synthesized
  source 1..20: mol_type = other DNA
gagtgtgagactaagggaac

SEQ ID NO: 17421 - DNA, 20 bp, synthetic construct
  misc_feature 1..20: note = chemically synthesized
  source 1..20: mol_type = other DNA
agtgtgagactaagggaacc

SEQ ID NO: 17422 - DNA, 20 bp, synthetic construct
  misc_feature 1..20: note = chemically synthesized
  source 1..20: mol_type = other DNA
ctaagggaaccaggtgtcct

SEQ ID NO: 17423 - DNA, 20 bp, synthetic construct
  misc_feature 1..20: note = chemically synthesized
  source 1..20: mol_type = other DNA
ccaggtgtcctaagactata

SEQ ID NO: 17424 - DNA, 20 bp, synthetic construct
  misc_feature 1..20: note = chemically synthesized
  source 1..20: mol_type = other DNA
taagactatacagtgtaccg

SEQ ID NO: 17425 - DNA, 20 bp, synthetic construct
  misc_feature 1..20: note = chemically synthesized
  source 1..20: mol_type = other DNA
ctatacagtgtaccgtggaa

SEQ ID NO: 17426 - DNA, 20 bp, synthetic construct
  misc_feature 1..20: note = chemically synthesized
  source 1..20: mol_type = other DNA
tatacagtgtaccgtggaat

SEQ ID NO: 17427 - DNA, 20 bp, synthetic construct
  misc_feature 1..20: note = chemically synthesized
  source 1..20: mol_type = other DNA
atacagtgtaccgtggaatg

SEQ ID NO: 17428 - DNA, 20 bp, synthetic construct
  misc_feature 1..20: note = chemically synthesized
  source 1..20: mol_type = other DNA
acagtgtaccgtggaatggg

SEQ ID NO: 17429 - DNA, 20 bp, synthetic construct
  misc_feature 1..20: note = chemically synthesized
  source 1..20: mol_type = other DNA
gtgtaccgtggaatggggag

SEQ ID NO: 17430 - DNA, 20 bp, synthetic construct
  misc_feature 1..20: note = chemically synthesized
  source 1..20: mol_type = other DNA
atggggagtggtttctaacc

SEQ ID NO: 17431 - DNA, 20 bp, synthetic construct
  misc_feature 1..20: note = chemically synthesized
  source 1..20: mol_type = other DNA
tggtttctaacctagttacc

SEQ ID NO: 17432 - DNA, 20 bp, synthetic construct
  misc_feature 1..20: note = chemically synthesized
  source 1..20: mol_type = other DNA
gtttctaacctagttaccta

SEQ ID NO: 17433 - DNA, 20 bp, synthetic construct
  misc_feature 1..20: note = chemically synthesized
  source 1..20: mol_type = other DNA
tttctaacctagttacctag

SEQ ID NO: 17434 - DNA, 20 bp, synthetic construct
  misc_feature 1..20: note = chemically synthesized
  source 1..20: mol_type = other DNA
aacctagttacctagaggtt

SEQ ID NO: 17435 - DNA, 20 bp, synthetic construct
  misc_feature 1..20: note = chemically synthesized
  source 1..20: mol_type = other DNA
acctagttacctagaggttt

SEQ ID NO: 17436 - DNA, 20 bp, synthetic construct
  misc_feature 1..20: note = chemically synthesized
  source 1..20: mol_type = other DNA
ggaaaaacctctctaatgat

SEQ ID NO: 17437 - DNA, 20 bp, synthetic construct
  misc_feature 1..20: note = chemically synthesized
  source 1..20: mol_type = other DNA
tctctaatgatgagatgttt

SEQ ID NO: 17438 - DNA, 20 bp, synthetic construct
  misc_feature 1..20: note = chemically synthesized
  source 1..20: mol_type = other DNA
gatgtttgagctgacacttg

SEQ ID NO: 17439 - DNA, 20 bp, synthetic construct
  misc_feature 1..20: note = chemically synthesized
  source 1..20: mol_type = other DNA
atgtttgagctgacacttga

SEQ ID NO: 17440 - DNA, 20 bp, synthetic construct
  misc_feature 1..20: note = chemically synthesized
  source 1..20: mol_type = other DNA
gctgacacttgaaggataaa

SEQ ID NO: 17441 - DNA, 20 bp, synthetic construct
  misc_feature 1..20: note = chemically synthesized
  source 1..20: mol_type = other DNA
acttgaaggataaatagcta

SEQ ID NO: 17442 - DNA, 20 bp, synthetic construct
  misc_feature 1..20: note = chemically synthesized
  source 1..20: mol_type = other DNA
cttgaaggataaatagctaa

SEQ ID NO: 17443 - DNA, 20 bp, synthetic construct
  misc_feature 1..20: note = chemically synthesized
  source 1..20: mol_type = other DNA
ttgaaggataaatagctaaa

SEQ ID NO: 17444 - DNA, 20 bp, synthetic construct
  misc_feature 1..20: note = chemically synthesized
  source 1..20: mol_type = other DNA
tgaaggataaatagctaaag

SEQ ID NO: 17445 - DNA, 20 bp, synthetic construct
  misc_feature 1..20: note = chemically synthesized
  source 1..20: mol_type = other DNA
aaggataaatagctaaaggg

SEQ ID NO: 17446 - DNA, 20 bp, synthetic construct
  misc_feature 1..20: note = chemically synthesized
  source 1..20: mol_type = other DNA
ataaatagctaaaggggaga

SEQ ID NO: 17447 - DNA, 20 bp, synthetic construct
  misc_feature 1..20: note = chemically synthesized
  source 1..20: mol_type = other DNA
ggggagaaagcgttctatgt

SEQ ID NO: 17448 - DNA, 20 bp, synthetic construct
  misc_feature 1..20: note = chemically synthesized
  source 1..20: mol_type = other DNA
ggagaaagcgttctatgtga

SEQ ID NO: 17449 - DNA, 20 bp, synthetic construct
  misc_feature 1..20: note = chemically synthesized
  source 1..20: mol_type = other DNA
gtgagagaactatatatgcc

SEQ ID NO: 17450 - DNA, 20 bp, synthetic construct
  misc_feature 1..20: note = chemically synthesized
  source 1..20: mol_type = other DNA
gaactatatatgccaagatg

SEQ ID NO: 17451 - DNA, 20 bp, synthetic construct
  misc_feature 1..20: note = chemically synthesized
  source 1..20: mol_type = other DNA
ctatatatgccaagatgcag

SEQ ID NO: 17452 - DNA, 20 bp, synthetic construct
  misc_feature 1..20: note = chemically synthesized
  source 1..20: mol_type = other DNA
gcagaagtgttctctgttcg

SEQ ID NO: 17453 - DNA, 20 bp, synthetic construct
  misc_feature 1..20: note = chemically synthesized
  source 1..20: mol_type = other DNA
tgttctctgttcgaagatct

SEQ ID NO: 17454 - DNA, 20 bp, synthetic construct
  misc_feature 1..20: note = chemically synthesized
  source 1..20: mol_type = other DNA
tctctgttcgaagatctgag

SEQ ID NO: 17455 - DNA, 20 bp, synthetic construct
  misc_feature 1..20: note = chemically synthesized
  source 1..20: mol_type = other DNA
ctctgttcgaagatctgagc

SEQ ID NO: 17456 - DNA, 20 bp, synthetic construct
  misc_feature 1..20: note = chemically synthesized
  source 1..20: mol_type = other DNA
tctgttcgaagatctgagcg

SEQ ID NO: 17457 - DNA, 20 bp, synthetic construct
  misc_feature 1..20: note = chemically synthesized
  source 1..20: mol_type = other DNA
tcgaagatctgagcggggct

SEQ ID NO: 17458 - DNA, 20 bp, synthetic construct
  misc_feature 1..20: note = chemically synthesized
  source 1..20: mol_type = other DNA
gaagatctgagcggggctca

SEQ ID NO: 17459 - DNA, 20 bp, synthetic construct
  misc_feature 1..20: note = chemically synthesized
  source 1..20: mol_type = other DNA
agatctgagcggggctcaga

SEQ ID NO: 17460 - DNA, 20 bp, synthetic construct
  misc_feature 1..20: note = chemically synthesized
  source 1..20: mol_type = other DNA
gatctgagcggggctcagag

SEQ ID NO: 17461 - DNA, 20 bp, synthetic construct
  misc_feature 1..20: note = chemically synthesized
  source 1..20: mol_type = other DNA
atctgagcggggctcagaga

SEQ ID NO: 17462 - DNA, 20 bp, synthetic construct
  misc_feature 1..20: note = chemically synthesized
  source 1..20: mol_type = other DNA
agcggggctcagagagggaa

SEQ ID NO: 17463 - DNA, 20 bp, synthetic construct
  misc_feature 1..20: note = chemically synthesized
  source 1..20: mol_type = other DNA
gcggggctcagagagggaaa

SEQ ID NO: 17464 - DNA, 20 bp, synthetic construct
  misc_feature 1..20: note = chemically synthesized
  source 1..20: mol_type = other DNA
ggggctcagagagggaaaag

SEQ ID NO: 17465 - DNA, 20 bp, synthetic construct
  misc_feature 1..20: note = chemically synthesized
  source 1..20: mol_type = other DNA
ggctcagagagggaaaagga

SEQ ID NO: 17466 - DNA, 20 bp, synthetic construct
  misc_feature 1..20: note = chemically synthesized
  source 1..20: mol_type = other DNA
gctcagagagggaaaaggag

SEQ ID NO: 17467 - DNA, 20 bp, synthetic construct
  misc_feature 1..20: note = chemically synthesized
  source 1..20: mol_type = other DNA
tcagagagggaaaaggagag

SEQ ID NO: 17468 - DNA, 20 bp, synthetic construct
  misc_feature 1..20: note = chemically synthesized
  source 1..20: mol_type = other DNA
agggaaaaggagaggagtat

SEQ ID NO: 17469 - DNA, 20 bp, synthetic construct
  misc_feature 1..20: note = chemically synthesized
  source 1..20: mol_type = other DNA
ggaaaaggagaggagtatga

SEQ ID NO: 17470 - DNA, 20 bp, synthetic construct
  misc_feature 1..20: note = chemically synthesized
  source 1..20: mol_type = other DNA
aaaggagaggagtatgagag

SEQ ID NO: 17471 - DNA, 20 bp, synthetic construct
  misc_feature 1..20: note = chemically synthesized
  source 1..20: mol_type = other DNA
gagaggagtatgagagaaga

SEQ ID NO: 17472 - DNA, 20 bp, synthetic construct
  misc_feature 1..20: note = chemically synthesized
  source 1..20: mol_type = other DNA
agaggagtatgagagaagat

SEQ ID NO: 17473 - DNA, 20 bp, synthetic construct
  misc_feature 1..20: note = chemically synthesized
  source 1..20: mol_type = other DNA
aggagtatgagagaagatgg

SEQ ID NO: 17474 - DNA, 20 bp, synthetic construct
  misc_feature 1..20: note = chemically synthesized
  source 1..20: mol_type = other DNA
gagtatgagagaagatggga

SEQ ID NO: 17475 - DNA, 20 bp, synthetic construct
  misc_feature 1..20: note = chemically synthesized
  source 1..20: mol_type = other DNA
gagaagatgggagagacctg

SEQ ID NO: 17476 - DNA, 20 bp, synthetic construct
  misc_feature 1..20: note = chemically synthesized
  source 1..20: mol_type = other DNA
agaagatgggagagacctgc

SEQ ID NO: 17477 - DNA, 20 bp, synthetic construct
  misc_feature 1..20: note = chemically synthesized
  source 1..20: mol_type = other DNA
gaagatgggagagacctgca

SEQ ID NO: 17478 - DNA, 20 bp, synthetic construct
  misc_feature 1..20: note = chemically synthesized
  source 1..20: mol_type = other DNA
tgggagagacctgcagggac

SEQ ID NO: 17479 - DNA, 20 bp, synthetic construct
  misc_feature 1..20: note = chemically synthesized
  source 1..20: mol_type = other DNA
cctgcagggactagattgtg

SEQ ID NO: 17480 - DNA, 20 bp, synthetic construct
  misc_feature 1..20: note = chemically synthesized
  source 1..20: mol_type = other DNA
agggactagattgtgaagct

SEQ ID NO: 17481 - DNA, 20 bp, synthetic construct
  misc_feature 1..20: note = chemically synthesized
  source 1..20: mol_type = other DNA
gggactagattgtgaagctc

SEQ ID NO: 17482 - DNA, 20 bp, synthetic construct
  misc_feature 1..20: note = chemically synthesized
  source 1..20: mol_type = other DNA
ggactagattgtgaagctca

SEQ ID NO: 17483 - DNA, 20 bp, synthetic construct
  misc_feature 1..20: note = chemically synthesized
  source 1..20: mol_type = other DNA
gactagattgtgaagctcag

SEQ ID NO: 17484 - DNA, 20 bp, synthetic construct
  misc_feature 1..20: note = chemically synthesized
  source 1..20: mol_type = other DNA
actagattgtgaagctcagg

SEQ ID NO: 17485 - DNA, 20 bp, synthetic construct
  misc_feature 1..20: note = chemically synthesized
  source 1..20: mol_type = other DNA
tagattgtgaagctcagggg

SEQ ID NO: 17486 - DNA, 20 bp, synthetic construct
  misc_feature 1..20: note = chemically synthesized
  source 1..20: mol_type = other DNA
tgaagctcagggggagttaa

SEQ ID NO: 17487 - DNA, 20 bp, synthetic construct
  misc_feature 1..20: note = chemically synthesized
  source 1..20: mol_type = other DNA
cagggggagttaatagcctt

SEQ ID NO: 17488 - DNA, 20 bp, synthetic construct
  misc_feature 1..20: note = chemically synthesized
  source 1..20: mol_type = other DNA
agggggagttaatagcctta

SEQ ID NO: 17489 - DNA, 20 bp, synthetic construct
  misc_feature 1..20: note = chemically synthesized
  source 1..20: mol_type = other DNA
ggggagttaatagccttaag

SEQ ID NO: 17490 - DNA, 20 bp, synthetic construct
  misc_feature 1..20: note = chemically synthesized
  source 1..20: mol_type = other DNA
gccttaaggagttttgtctc

SEQ ID NO: 17491 - DNA, 20 bp, synthetic construct
  misc_feature 1..20: note = chemically synthesized
  source 1..20: mol_type = other DNA
ccttaaggagttttgtctcc

SEQ ID NO: 17492 - DNA, 20 bp, synthetic construct
  misc_feature 1..20: note = chemically synthesized
  source 1..20: mol_type = other DNA
cttaaggagttttgtctcca

SEQ ID NO: 17493 - DNA, 20 bp, synthetic construct
  misc_feature 1..20: note = chemically synthesized
  source 1..20: mol_type = other DNA
ccagggtatgaacaatgaat

SEQ ID NO: 17494 - DNA, 20 bp, synthetic construct
  misc_feature 1..20: note = chemically synthesized
  source 1..20: mol_type = other DNA
cagggtatgaacaatgaatg

SEQ ID NO: 17495 - DNA, 20 bp, synthetic construct
  misc_feature 1..20: note = chemically synthesized
  source 1..20: mol_type = other DNA
gggtatgaacaatgaatgag

SEQ ID NO: 17496 - DNA, 20 bp, synthetic construct
  misc_feature 1..20: note = chemically synthesized
  source 1..20: mol_type = other DNA
agtcactgaaattctatcca

SEQ ID NO: 17497 - DNA, 20 bp, synthetic construct
  misc_feature 1..20: note = chemically synthesized
  source 1..20: mol_type = other DNA
cactgaaattctatccacag

SEQ ID NO: 17498 - DNA, 20 bp, synthetic construct
  misc_feature 1..20: note = chemically synthesized
  source 1..20: mol_type = other DNA
tgaaattctatccacagtag

SEQ ID NO: 17499 - DNA, 20 bp, synthetic construct
  misc_feature 1..20: note = chemically synthesized
  source 1..20: mol_type = other DNA
gaaattctatccacagtagt

SEQ ID NO: 17500 - DNA, 20 bp, synthetic construct
  misc_feature 1..20: note = chemically synthesized
  source 1..20: mol_type = other DNA
attctatccacagtagtggg

SEQ ID NO: 17501 - DNA, 20 bp, synthetic construct
  misc_feature 1..20: note = chemically synthesized
  source 1..20: mol_type = other DNA
ccacagtagtgggaagtact

SEQ ID NO: 17502 - DNA, 20 bp, synthetic construct
  misc_feature 1..20: note = chemically synthesized
  source 1..20: mol_type = other DNA
cagtagtgggaagtactaag

SEQ ID NO: 17503 - DNA, 20 bp, synthetic construct
  misc_feature 1..20: note = chemically synthesized
  source 1..20: mol_type = other DNA
agtgggaagtactaagtagt

SEQ ID NO: 17504 - DNA, 20 bp, synthetic construct
  misc_feature 1..20: note = chemically synthesized
  source 1..20: mol_type = other DNA
gtgggaagtactaagtagtc

SEQ ID NO: 17505 - DNA, 20 bp, synthetic construct
  misc_feature 1..20: note = chemically synthesized
  source 1..20: mol_type = other DNA
ctaagtagtcaggtatgttt

SEQ ID NO: 17506 - DNA, 20 bp, synthetic construct
  misc_feature 1..20: note = chemically synthesized
  source 1..20: mol_type = other DNA
agtagtcaggtatgttttgg

SEQ ID NO: 17507 - DNA, 20 bp, synthetic construct
  misc_feature 1..20: note = chemically synthesized
  source 1..20: mol_type = other DNA
agtcaggtatgttttggaag

SEQ ID NO: 17508 - DNA, 20 bp, synthetic construct
  misc_feature 1..20: note = chemically synthesized
  source 1..20: mol_type = other DNA
tttggaagaagcactgttac

SEQ ID NO: 17509 - DNA, 20 bp, synthetic construct
  misc_feature 1..20: note = chemically synthesized
  source 1..20: mol_type = other DNA
aagaagcactgttaccagtt

SEQ ID NO: 17510 - DNA, 20 bp, synthetic construct
  misc_feature 1..20: note = chemically synthesized
  source 1..20: mol_type = other DNA
agaagcactgttaccagttg

SEQ ID NO: 17511 - DNA, 20 bp, synthetic construct
  misc_feature 1..20: note = chemically synthesized
  source 1..20: mol_type = other DNA
gaagcactgttaccagttga

SEQ ID NO: 17512 - DNA, 20 bp, synthetic construct
  misc_feature 1..20: note = chemically synthesized
  source 1..20: mol_type = other DNA
agcactgttaccagttgagg

SEQ ID NO: 17513 - DNA, 20 bp, synthetic construct
  misc_feature 1..20: note = chemically synthesized
  source 1..20: mol_type = other DNA
cactgttaccagttgaggga

SEQ ID NO: 17514 - DNA, 20 bp, synthetic construct
  misc_feature 1..20: note = chemically synthesized
  source 1..20: mol_type = other DNA
actgttaccagttgagggag

SEQ ID NO: 17515 - DNA, 20 bp, synthetic construct
  misc_feature 1..20: note = chemically synthesized
  source 1..20: mol_type = other DNA
tgttaccagttgagggagag

SEQ ID NO: 17516 - DNA, 20 bp, synthetic construct
  misc_feature 1..20: note = chemically synthesized
  source 1..20: mol_type = other DNA
ttaccagttgagggagagga

SEQ ID NO: 17517 - DNA, 20 bp, synthetic construct
  misc_feature 1..20: note = chemically synthesized
  source 1..20: mol_type = other DNA
taccagttgagggagaggag

SEQ ID NO: 17518 - DNA, 20 bp, synthetic construct
  misc_feature 1..20: note = chemically synthesized
  source 1..20: mol_type = other DNA
ccagttgagggagaggagag

SEQ ID NO: 17519 - DNA, 20 bp, synthetic construct
  misc_feature 1..20: note = chemically synthesized
  source 1..20: mol_type = other DNA
cagttgagggagaggagagg

SEQ ID NO: 17520 - DNA, 20 bp, synthetic construct
  misc_feature 1..20: note = chemically synthesized
  source 1..20: mol_type = other DNA
agttgagggagaggagagga

SEQ ID NO: 17521 - DNA, 20 bp, synthetic construct
  misc_feature 1..20: note = chemically synthesized
  source 1..20: mol_type = other DNA
ggagaggagaggagggaaat

SEQ ID NO: 17522 - DNA, 20 bp, synthetic construct
  misc_feature 1..20: note = chemically synthesized
  source 1..20: mol_type = other DNA
agaggagggaaattagactg

SEQ ID NO: 17523 - DNA, 20 bp, synthetic construct
  misc_feature 1..20: note = chemically synthesized
  source 1..20: mol_type = other DNA
aattagactgtggtgtgacc

SEQ ID NO: 17524 - DNA, 20 bp, synthetic construct
  misc_feature 1..20: note = chemically synthesized
  source 1..20: mol_type = other DNA
attagactgtggtgtgaccc

SEQ ID NO: 17525 - DNA, 20 bp, synthetic construct
  misc_feature 1..20: note = chemically synthesized
  source 1..20: mol_type = other DNA
gactgtggtgtgacccagga

SEQ ID NO: 17526 - DNA, 20 bp, synthetic construct
  misc_feature 1..20: note = chemically synthesized
  source 1..20: mol_type = other DNA
gtggtgtgacccaggatgga

SEQ ID NO: 17527 - DNA, 20 bp, synthetic construct
  misc_feature 1..20: note = chemically synthesized
  source 1..20: mol_type = other DNA
tggaaagttttgcccaaatg

SEQ ID NO: 17528 - DNA, 20 bp, synthetic construct
  misc_feature 1..20: note = chemically synthesized
  source 1..20: mol_type = other DNA
ggaaagttttgcccaaatgt

SEQ ID NO: 17529 - DNA, 20 bp, synthetic construct
  misc_feature 1..20: note = chemically synthesized
  source 1..20: mol_type = other DNA
gaaagttttgcccaaatgtg

SEQ ID NO: 17530 - DNA, 20 bp, synthetic construct
  misc_feature 1..20: note = chemically synthesized
  source 1..20: mol_type = other DNA
aaagttttgcccaaatgtgg

SEQ ID NO: 17531 - DNA, 20 bp, synthetic construct
  misc_feature 1..20: note = chemically synthesized
  source 1..20: mol_type = other DNA
tgtttactctctcctttgcc

SEQ ID NO: 17532 - DNA, 20 bp, synthetic construct
  misc_feature 1..20: note = chemically synthesized
  source 1..20: mol_type = other DNA
gtttactctctcctttgccc

SEQ ID NO: 17533 - DNA, 20 bp, synthetic construct
  misc_feature 1..20: note = chemically synthesized
  source 1..20: mol_type = other DNA
ttcttctgcacacacttgct

SEQ ID NO: 17534 - DNA, 20 bp, synthetic construct
  misc_feature 1..20: note = chemically synthesized
  source 1..20: mol_type = other DNA
gctcagaacattacaaactc

SEQ ID NO: 17535 - DNA, 20 bp, synthetic construct
  misc_feature 1..20: note = chemically synthesized
  source 1..20: mol_type = other DNA
tcagaacattacaaactctg

SEQ ID NO: 17536 - DNA, 20 bp, synthetic construct
  misc_feature 1..20: note = chemically synthesized
  source 1..20: mol_type = other DNA
tctggagaaattaacatgtt

SEQ ID NO: 17537 - DNA, 20 bp, synthetic construct
  misc_feature 1..20: note = chemically synthesized
  source 1..20: mol_type = other DNA
ctggagaaattaacatgtta

SEQ ID NO: 17538 - DNA, 20 bp, synthetic construct
  misc_feature 1..20: note = chemically synthesized
  source 1..20: mol_type = other DNA
attaacatgttaaggatatt

SEQ ID NO: 17539 - DNA, 20 bp, synthetic construct
  misc_feature 1..20: note = chemically synthesized
  source 1..20: mol_type = other DNA
ttaacatgttaaggatattt

SEQ ID NO: 17540 - DNA, 20 bp, synthetic construct
  misc_feature 1..20: note = chemically synthesized
  source 1..20: mol_type = other DNA
gatatttaggatcattaaaa

SEQ ID NO: 17541 - DNA, 20 bp, synthetic construct
  misc_feature 1..20: note = chemically synthesized
  source 1..20: mol_type = other DNA
aatgttgtcacacataatga

SEQ ID NO: 17542 - DNA, 20 bp, synthetic construct
  misc_feature 1..20: note = chemically synthesized
  source 1..20: mol_type = other DNA
cacataatgaaagttaattt

SEQ ID NO: 17543 - DNA, 20 bp, synthetic construct
  misc_feature 1..20: note = chemically synthesized
  source 1..20: mol_type = other DNA
aagttaatttaagaattgta

SEQ ID NO: 17544 - DNA, 20 bp, synthetic construct
  misc_feature 1..20: note = chemically synthesized
  source 1..20: mol_type = other DNA
tttaagaattgtaaagactt

SEQ ID NO: 17545 - DNA, 20 bp, synthetic construct
  misc_feature 1..20: note = chemically synthesized
  source 1..20: mol_type = other DNA
ttgtaaagacttgagcgatg

SEQ ID NO: 17546 - DNA, 20 bp, synthetic construct
  misc_feature 1..20: note = chemically synthesized
  source 1..20: mol_type = other DNA
taaatgcttccctcttaaaa

SEQ ID NO: 17547 - DNA, 20 bp, synthetic construct
  misc_feature 1..20: note = chemically synthesized
  source 1..20: mol_type = other DNA
gcttccctcttaaaatggac

SEQ ID NO: 17548 - DNA, 20 bp, synthetic construct
  misc_feature 1..20: note = chemically synthesized
  source 1..20: mol_type = other DNA
gaaacaatttgtttttgcct

SEQ ID NO: 17549 - DNA, 20 bp, synthetic construct
  misc_feature 1..20: note = chemically synthesized
  source 1..20: mol_type = other DNA
tgcctaagccaacgtattgc

SEQ ID NO: 17550 - DNA, 20 bp, synthetic construct
  misc_feature 1..20: note = chemically synthesized
  source 1..20: mol_type = other DNA
taatttacctgcttcctcct

SEQ ID NO: 17551 - DNA, 20 bp, synthetic construct
  misc_feature 1..20: note = chemically synthesized
  source 1..20: mol_type = other DNA
cactacacctctgaattaca

SEQ ID NO: 17552 - DNA, 20 bp, synthetic construct
  misc_feature 1..20: note = chemically synthesized
  source 1..20: mol_type = other DNA
acctctgaattacatggtac

SEQ ID NO: 17553 - DNA, 20 bp, synthetic construct
  misc_feature 1..20: note = chemically synthesized
  source 1..20: mol_type = other DNA
tctgaattacatggtacaag

SEQ ID NO: 17554 - DNA, 20 bp, synthetic construct
  misc_feature 1..20: note = chemically synthesized
  source 1..20: mol_type = other DNA
attacatggtacaagtggca

SEQ ID NO: 17555 - DNA, 20 bp, synthetic construct
  misc_feature 1..20: note = chemically synthesized
  source 1..20: mol_type = other DNA
ttacatggtacaagtggcac

SEQ ID NO: 17556 - DNA, 20 bp, synthetic construct
  misc_feature 1..20: note = chemically synthesized
  source 1..20: mol_type = other DNA
tacatggtacaagtggcaca

SEQ ID NO: 17557 - DNA, 20 bp, synthetic construct
  misc_feature 1..20: note = chemically synthesized
  source 1..20: mol_type = other DNA
atggtacaagtggcacaggg

SEQ ID NO: 17558 - DNA, 20 bp, synthetic construct
  misc_feature 1..20: note = chemically synthesized
  source 1..20: mol_type = other DNA
aagtggcacagggaagaatt

SEQ ID NO: 17559 - DNA, 20 bp, synthetic construct
  misc_feature 1..20: note = chemically synthesized
  source 1..20: mol_type = other DNA
cagggaagaattcagaaaac

SEQ ID NO: 17560 - DNA, 20 bp, synthetic construct
  misc_feature 1..20: note = chemically synthesized
  source 1..20: mol_type = other DNA
gggaagaattcagaaaacta

SEQ ID NO: 17561 - DNA, 20 bp, synthetic construct
  misc_feature 1..20: note = chemically synthesized
  source 1..20: mol_type = other DNA
aattcagaaaactagagtca

SEQ ID NO: 17562 - DNA, 20 bp, synthetic construct
  misc_feature 1..20: note = chemically synthesized
  source 1..20: mol_type = other DNA
tcagaaaactagagtcaaag

SEQ ID NO: 17563 - DNA, 20 bp, synthetic construct
  misc_feature 1..20: note = chemically synthesized
  source 1..20: mol_type = other DNA
aactagagtcaaagtggtta

SEQ ID NO: 17564 - DNA, 20 bp, synthetic construct
  misc_feature 1..20: note = chemically synthesized
  source 1..20: mol_type = other DNA
tagagtcaaagtggttatgg

SEQ ID NO: 17565 - DNA, 20 bp, synthetic construct
  misc_feature 1..20: note = chemically synthesized
  source 1..20: mol_type = other DNA
atggaagaaattataataat

SEQ ID NO: 17566 - DNA, 20 bp, synthetic construct
  misc_feature 1..20: note = chemically synthesized
  source 1..20: mol_type = other DNA
taataatgagtccactcttc

SEQ ID NO: 17567 - DNA, 20 bp, synthetic construct
  misc_feature 1..20: note = chemically synthesized
  source 1..20: mol_type = other DNA
aataatgagtccactcttct

SEQ ID NO: 17568 - DNA, 20 bp, synthetic construct
  misc_feature 1..20: note = chemically synthesized
  source 1..20: mol_type = other DNA
atgagtccactcttctagga

SEQ ID NO: 17569 - DNA, 20 bp, synthetic construct
  misc_feature 1..20: note = chemically synthesized
  source 1..20: mol_type = other DNA
tgagtccactcttctaggac

SEQ ID NO: 17570 - DNA, 20 bp, synthetic construct
  misc_feature 1..20: note = chemically synthesized
  source 1..20: mol_type = other DNA
agtccactcttctaggacag

SEQ ID NO: 17571 - DNA, 20 bp, synthetic construct
  misc_feature 1..20: note = chemically synthesized
  source 1..20: mol_type = other DNA
cttctaggacaggagttcta

SEQ ID NO: 17572 - DNA, 20 bp, synthetic construct
  misc_feature 1..20: note = chemically synthesized
  source 1..20: mol_type = other DNA
ttctaggacaggagttctaa

SEQ ID NO: 17573 - DNA, 20 bp, synthetic construct
  misc_feature 1..20: note = chemically synthesized
  source 1..20: mol_type = other DNA
aggacaggagttctaaaggt

SEQ ID NO: 17574 - DNA, 20 bp, synthetic construct
  misc_feature 1..20: note = chemically synthesized
  source 1..20: mol_type = other DNA
ggacaggagttctaaaggtg

SEQ ID NO: 17575 - DNA, 20 bp, synthetic construct
  misc_feature 1..20: note = chemically synthesized
  source 1..20: mol_type = other DNA
aaaggtgaggactttgatat

SEQ ID NO: 17576 - DNA, 20 bp, synthetic construct
  misc_feature 1..20: note = chemically synthesized
  source 1..20: mol_type = other DNA
actttgatataagtgaactc

SEQ ID NO: 17577 - DNA, 20 bp, synthetic construct
  misc_feature 1..20: note = chemically synthesized
  source 1..20: mol_type = other DNA
ctttgatataagtgaactca

SEQ ID NO: 17578 - DNA, 20 bp, synthetic construct
  misc_feature 1..20: note = chemically synthesized
  source 1..20: mol_type = other DNA
ttgatataagtgaactcaag

SEQ ID NO: 17579 - DNA, 20 bp, synthetic construct
  misc_feature 1..20: note = chemically synthesized
  source 1..20: mol_type = other DNA
tcaaggagtttctaaacctt

SEQ ID NO: 17580 - DNA, 20 bp, synthetic construct
  misc_feature 1..20: note = chemically synthesized
  source 1..20: mol_type = other DNA
cagaaattatatctaaaaat

SEQ ID NO: 17581 - DNA, 20 bp, synthetic construct
  misc_feature 1..20: note = chemically synthesized
  source 1..20: mol_type = other DNA
agaaattatatctaaaaatt

SEQ ID NO: 17582 - DNA, 20 bp, synthetic construct
  misc_feature 1..20: note = chemically synthesized
  source 1..20: mol_type = other DNA
aaaaattaggtgcacgtata

SEQ ID NO: 17583 - DNA, 20 bp, synthetic construct
  misc_feature 1..20: note = chemically synthesized
  source 1..20: mol_type = other DNA
aattaggtgcacgtatatag

SEQ ID NO: 17584 - DNA, 20 bp, synthetic construct
  misc_feature 1..20: note = chemically synthesized
  source 1..20: mol_type = other DNA
atatagaagtacttttctct

SEQ ID NO: 17585 - DNA, 20 bp, synthetic construct
  misc_feature 1..20: note = chemically synthesized
  source 1..20: mol_type = other DNA
tagaagtacttttctctgag

SEQ ID NO: 17586 - DNA, 20 bp, synthetic construct
  misc_feature 1..20: note = chemically synthesized
  source 1..20: mol_type = other DNA
gaagtacttttctctgagaa

SEQ ID NO: 17587 - DNA, 20 bp, synthetic construct
  misc_feature 1..20: note = chemically synthesized
  source 1..20: mol_type = other DNA
aagtacttttctctgagaag

SEQ ID NO: 17588 - DNA, 20 bp, synthetic construct
  misc_feature 1..20: note = chemically synthesized
  source 1..20: mol_type = other DNA
agaggacttcacacttccat

SEQ ID NO: 17589 - DNA, 20 bp, synthetic construct
  misc_feature 1..20: note = chemically synthesized
  source 1..20: mol_type = other DNA
acacttccatcagcttcctg

SEQ ID NO: 17590 - DNA, 20 bp, synthetic construct
  misc_feature 1..20: note = chemically synthesized
  source 1..20: mol_type = other DNA
cacttccatcagcttcctga

SEQ ID NO: 17591 - DNA, 20 bp, synthetic construct
  misc_feature 1..20: note = chemically synthesized
  source 1..20: mol_type = other DNA
aggcccctgtaattgccgta

SEQ ID NO: 17592 - DNA, 20 bp, synthetic construct
  misc_feature 1..20: note = chemically synthesized
  source 1..20: mol_type = other DNA
cgtaaagaacaactgctcta

SEQ ID NO: 17593 - DNA, 20 bp, synthetic construct
  misc_feature 1..20: note = chemically synthesized
  source 1..20: mol_type = other DNA
actgctctaaagtttaatac

SEQ ID NO: 17594 - DNA, 20 bp, synthetic construct
  misc_feature 1..20: note = chemically synthesized
  source 1..20: mol_type = other DNA
ctgctctaaagtttaatact

SEQ ID NO: 17595 - DNA, 20 bp, synthetic construct
  misc_feature 1..20: note = chemically synthesized
  source 1..20: mol_type = other DNA
aagtttaatactaggctact

SEQ ID NO: 17596 - DNA, 20 bp, synthetic construct
  misc_feature 1..20: note = chemically synthesized
  source 1..20: mol_type = other DNA
tcggctgttttttgttaaca

SEQ ID NO: 17597 - DNA, 20 bp, synthetic construct
  misc_feature 1..20: note = chemically synthesized
  source 1..20: mol_type = other DNA
gctgttttttgttaacacag

SEQ ID NO: 17598 - DNA, 20 bp, synthetic construct
  misc_feature 1..20: note = chemically synthesized
  source 1..20: mol_type = other DNA
taacacagaagttttccaaa

SEQ ID NO: 17599 - DNA, 20 bp, synthetic construct
  misc_feature 1..20: note = chemically synthesized
  source 1..20: mol_type = other DNA
ttttccaaatggcttttctc

SEQ ID NO: 17600 - DNA, 20 bp, synthetic construct
  misc_feature 1..20: note = chemically synthesized
  source 1..20: mol_type = other DNA
ttccaaatggcttttctcta

SEQ ID NO: 17601 - DNA, 20 bp, synthetic construct
  misc_feature 1..20: note = chemically synthesized
  source 1..20: mol_type = other DNA
tttctctagagcaaaatgaa

SEQ ID NO: 17602 - DNA, 20 bp, synthetic construct
  misc_feature 1..20: note = chemically synthesized
  source 1..20: mol_type = other DNA
ttctctagagcaaaatgaaa

SEQ ID NO: 17603 - DNA, 20 bp, synthetic construct
  misc_feature 1..20: note = chemically synthesized
  source 1..20: mol_type = other DNA
aaaaggatcccatccttccc

SEQ ID NO: 17604 - DNA, 20 bp, synthetic construct
  misc_feature 1..20: note = chemically synthesized
  source 1..20: mol_type = other DNA
cctaccccccaccactttta

SEQ ID NO: 17605 - DNA, 20 bp, synthetic construct
  misc_feature 1..20: note = chemically synthesized
  source 1..20: mol_type = other DNA
accacttttaaagatccatc

SEQ ID NO: 17606 - DNA, 20 bp, synthetic construct
  misc_feature 1..20: note = chemically synthesized
  source 1..20: mol_type = other DNA
ccacttttaaagatccatca

SEQ ID NO: 17607 - DNA, 20 bp, synthetic construct
  misc_feature 1..20: note = chemically synthesized
  source 1..20: mol_type = other DNA
tttaaagatccatcaaggcc

SEQ ID NO: 17608 - DNA, 20 bp, synthetic construct
  misc_feature 1..20: note = chemically synthesized
  source 1..20: mol_type = other DNA
agatccatcaaggcccagca

SEQ ID NO: 17609 - DNA, 20 bp, synthetic construct
  misc_feature 1..20: note = chemically synthesized
  source 1..20: mol_type = other DNA
ctgtaatctcaacacttttc

SEQ ID NO: 17610 - DNA, 20 bp, synthetic construct
  misc_feature 1..20: note = chemically synthesized
  source 1..20: mol_type = other DNA
tgtaatctcaacacttttca

SEQ ID NO: 17611 - DNA, 20 bp, synthetic construct
  misc_feature 1..20: note = chemically synthesized
  source 1..20: mol_type = other DNA
tctcaacacttttcaaggct

SEQ ID NO: 17612 - DNA, 20 bp, synthetic construct
  misc_feature 1..20: note = chemically synthesized
  source 1..20: mol_type = other DNA
ctcaacacttttcaaggctg

SEQ ID NO: 17613 - DNA, 20 bp, synthetic construct
  misc_feature 1..20: note = chemically synthesized
  source 1..20: mol_type = other DNA
aacacttttcaaggctgagg

SEQ ID NO: 17614 - DNA, 20 bp, synthetic construct
  misc_feature 1..20: note = chemically synthesized
  source 1..20: mol_type = other DNA
acacttttcaaggctgaggt

SEQ ID NO: 17615 - DNA, 20 bp, synthetic construct
  misc_feature 1..20: note = chemically synthesized
  source 1..20: mol_type = other DNA
acttttcaaggctgaggtgg

SEQ ID NO: 17616 - DNA, 20 bp, synthetic construct
  misc_feature 1..20: note = chemically synthesized
  source 1..20: mol_type = other DNA
ctgaggtgggagaattgttt

SEQ ID NO: 17617 - DNA, 20 bp, synthetic construct
  misc_feature 1..20: note = chemically synthesized
  source 1..20: mol_type = other DNA
tgggagaattgtttgagacc

SEQ ID NO: 17618 - DNA, 20 bp, synthetic construct
  misc_feature 1..20: note = chemically synthesized
  source 1..20: mol_type = other DNA
ggagaattgtttgagaccaa

SEQ ID NO: 17619 - DNA, 20 bp, synthetic construct
  misc_feature 1..20: note = chemically synthesized
  source 1..20: mol_type = other DNA
aattgtttgagaccaagagt

SEQ ID NO: 17620 - DNA, 20 bp, synthetic construct
  misc_feature 1..20: note = chemically synthesized
  source 1..20: mol_type = other DNA
tgagaccaagagttggatac

SEQ ID NO: 17621 - DNA, 20 bp, synthetic construct
  misc_feature 1..20: note = chemically synthesized
  source 1..20: mol_type = other DNA
ccaagagttggataccagcc

SEQ ID NO: 17622 - DNA, 20 bp, synthetic construct
  misc_feature 1..20: note = chemically synthesized
  source 1..20: mol_type = other DNA
caagagttggataccagcct

SEQ ID NO: 17623 - DNA, 20 bp, synthetic construct
  misc_feature 1..20: note = chemically synthesized
  source 1..20: mol_type = other DNA
aagagttggataccagcctg

SEQ ID NO: 17624 - DNA, 20 bp, synthetic construct
  misc_feature 1..20: note = chemically synthesized
  source 1..20: mol_type = other DNA
ggataccagcctggggaaca

SEQ ID NO: 17625 - DNA, 20 bp, synthetic construct
  misc_feature 1..20: note = chemically synthesized
  source 1..20: mol_type = other DNA
gataccagcctggggaacat

SEQ ID NO: 17626 - DNA, 20 bp, synthetic construct
  misc_feature 1..20: note = chemically synthesized
  source 1..20: mol_type = other DNA
ataccagcctggggaacata

SEQ ID NO: 17627 - DNA, 20 bp, synthetic construct
  misc_feature 1..20: note = chemically synthesized
  source 1..20: mol_type = other DNA
accagcctggggaacatagg

SEQ ID NO: 17628 - DNA, 20 bp, synthetic construct
  misc_feature 1..20: note = chemically synthesized
  source 1..20: mol_type = other DNA
atagggagaccctgtttcta

SEQ ID NO: 17629 - DNA, 20 bp, synthetic construct
  misc_feature 1..20: note = chemically synthesized
  source 1..20: mol_type = other DNA
agaaatttaaaaaatttctc

SEQ ID NO: 17630 - DNA, 20 bp, synthetic construct
  misc_feature 1..20: note = chemically synthesized
  source 1..20: mol_type = other DNA
atttaaaaaatttctctagc

SEQ ID NO: 17631 - DNA, 20 bp, synthetic construct
  misc_feature 1..20: note = chemically synthesized
  source 1..20: mol_type = other DNA
aaaatttctctagctggcca

SEQ ID NO: 17632 - DNA, 20 bp, synthetic construct
  misc_feature 1..20: note = chemically synthesized
  source 1..20: mol_type = other DNA
aatttctctagctggccatg

SEQ ID NO: 17633 - DNA, 20 bp, synthetic construct
  misc_feature 1..20: note = chemically synthesized
  source 1..20: mol_type = other DNA
atttctctagctggccatgg

SEQ ID NO: 17634 - DNA, 20 bp, synthetic construct
  misc_feature 1..20: note = chemically synthesized
  source 1..20: mol_type = other DNA
gccatggaggctcacacctg

SEQ ID NO: 17635 - DNA, 20 bp, synthetic construct
  misc_feature 1..20: note = chemically synthesized
  source 1..20: mol_type = other DNA
gaggctcacacctgtagtcc

SEQ ID NO: 17636 - DNA, 20 bp, synthetic construct
  misc_feature 1..20: note = chemically synthesized
  source 1..20: mol_type = other DNA
acctgtagtcctagctacct

SEQ ID NO: 17637 - DNA, 20 bp, synthetic construct
  misc_feature 1..20: note = chemically synthesized
  source 1..20: mol_type = other DNA
ctgtagtcctagctacctga

SEQ ID NO: 17638 - DNA, 20 bp, synthetic construct
  misc_feature 1..20: note = chemically synthesized
  source 1..20: mol_type = other DNA
tgtagtcctagctacctgag

SEQ ID NO: 17639 - DNA, 20 bp, synthetic construct
  misc_feature 1..20: note = chemically synthesized
  source 1..20: mol_type = other DNA
cctagctacctgagaggcta

SEQ ID NO: 17640 - DNA, 20 bp, synthetic construct
  misc_feature 1..20: note = chemically synthesized
  source 1..20: mol_type = other DNA
agctacctgagaggctaaag

SEQ ID NO: 17641 - DNA, 20 bp, synthetic construct
  misc_feature 1..20: note = chemically synthesized
  source 1..20: mol_type = other DNA
gctacctgagaggctaaagc

SEQ ID NO: 17642 - DNA, 20 bp, synthetic construct
  misc_feature 1..20: note = chemically synthesized
  source 1..20: mol_type = other DNA
tacctgagaggctaaagcag

SEQ ID NO: 17643 - DNA, 20 bp, synthetic construct
  misc_feature 1..20: note = chemically synthesized
  source 1..20: mol_type = other DNA
acctgagaggctaaagcagg

SEQ ID NO: 17644 - DNA, 20 bp, synthetic construct
  misc_feature 1..20: note = chemically synthesized
  source 1..20: mol_type = other DNA
gcaggaggatcaattgaatc

SEQ ID NO: 17645 - DNA, 20 bp, synthetic construct
  misc_feature 1..20: note = chemically synthesized
  source 1..20: mol_type = other DNA
caggaggatcaattgaatcc

SEQ ID NO: 17646 - DNA, 20 bp, synthetic construct
  misc_feature 1..20: note = chemically synthesized
  source 1..20: mol_type = other DNA
tcaattgaatccaggcgttc

SEQ ID NO: 17647 - DNA, 20 bp, synthetic construct
  misc_feature 1..20: note = chemically synthesized
  source 1..20: mol_type = other DNA
ttgaatccaggcgttctagt

SEQ ID NO: 17648 - DNA, 20 bp, synthetic construct
  misc_feature 1..20: note = chemically synthesized
  source 1..20: mol_type = other DNA
tgaatccaggcgttctagtg

SEQ ID NO: 17649 - DNA, 20 bp, synthetic construct
  misc_feature 1..20: note = chemically synthesized
  source 1..20: mol_type = other DNA
caggcgttctagtgaggctt

SEQ ID NO: 17650 - DNA, 20 bp, synthetic construct
  misc_feature 1..20: note = chemically synthesized
  source 1..20: mol_type = other DNA
cgttctagtgaggcttcagt

SEQ ID NO: 17651 - DNA, 20 bp, synthetic construct
  misc_feature 1..20: note = chemically synthesized
  source 1..20: mol_type = other DNA
ctagtgaggcttcagtgagc

SEQ ID NO: 17652 - DNA, 20 bp, synthetic construct
  misc_feature 1..20: note = chemically synthesized
  source 1..20: mol_type = other DNA
aagattgcaccattgcactc

SEQ ID NO: 17653 - DNA, 20 bp, synthetic construct
  misc_feature 1..20: note = chemically synthesized
  source 1..20: mol_type = other DNA
ttgcaccattgcactccagc

SEQ ID NO: 17654 - DNA, 20 bp, synthetic construct
  misc_feature 1..20: note = chemically synthesized
  source 1..20: mol_type = other DNA
tgcaccattgcactccagcc

SEQ ID NO: 17655 - DNA, 20 bp, synthetic construct
  misc_feature 1..20: note = chemically synthesized
  source 1..20: mol_type = other DNA
gcaccattgcactccagccg

SEQ ID NO: 17656 - DNA, 20 bp, synthetic construct
  misc_feature 1..20: note = chemically synthesized
  source 1..20: mol_type = other DNA
ttgcactccagccggggtga

SEQ ID NO: 17657 - DNA, 20 bp, synthetic construct
  misc_feature 1..20: note = chemically synthesized
  source 1..20: mol_type = other DNA
gcactccagccggggtgaca

SEQ ID NO: 17658 - DNA, 20 bp, synthetic construct
  misc_feature 1..20: note = chemically synthesized
  source 1..20: mol_type = other DNA
tccagccggggtgacagagt

SEQ ID NO: 17659 - DNA, 20 bp, synthetic construct
  misc_feature 1..20: note = chemically synthesized
  source 1..20: mol_type = other DNA
agaccctgtttcaaacaaac

SEQ ID NO: 17660 - DNA, 20 bp, synthetic construct
  misc_feature 1..20: note = chemically synthesized
  source 1..20: mol_type = other DNA
tgtttcaaacaaacaagcaa

SEQ ID NO: 17661 - DNA, 20 bp, synthetic construct
  misc_feature 1..20: note = chemically synthesized
  source 1..20: mol_type = other DNA
aacaaacaagcaaaagcaaa

SEQ ID NO: 17662 - DNA, 20 bp, synthetic construct
  misc_feature 1..20: note = chemically synthesized
  source 1..20: mol_type = other DNA
acttactatcttgctgtcta

SEQ ID NO: 17663 - DNA, 20 bp, synthetic construct
  misc_feature 1..20: note = chemically synthesized
  source 1..20: mol_type = other DNA
tatcttgctgtctacagcta

SEQ ID NO: 17664 - DNA, 20 bp, synthetic construct
  misc_feature 1..20: note = chemically synthesized
  source 1..20: mol_type = other DNA
ttgctgtctacagctaaagt

SEQ ID NO: 17665 - DNA, 20 bp, synthetic construct
  misc_feature 1..20: note = chemically synthesized
  source 1..20: mol_type = other DNA
taaagtcagactgcatgatt

SEQ ID NO: 17666 - DNA, 20 bp, synthetic construct
  misc_feature 1..20: note = chemically synthesized
  source 1..20: mol_type = other DNA
attccaactccaccatcacc

SEQ ID NO: 17667 - DNA, 20 bp, synthetic construct
  misc_feature 1..20: note = chemically synthesized
  source 1..20: mol_type = other DNA
ttccaactccaccatcacct

SEQ ID NO: 17668 - DNA, 20 bp, synthetic construct
  misc_feature 1..20: note = chemically synthesized
  source 1..20: mol_type = other DNA
accatcacctgggtaatgtt

SEQ ID NO: 17669 - DNA, 20 bp, synthetic construct
  misc_feature 1..20: note = chemically synthesized
  source 1..20: mol_type = other DNA
taatgttgagatttattaca

SEQ ID NO: 17670 - DNA, 20 bp, synthetic construct
  misc_feature 1..20: note = chemically synthesized
  source 1..20: mol_type = other DNA
tacatagcatctctgtgcct

SEQ ID NO: 17671 - DNA, 20 bp, synthetic construct
  misc_feature 1..20: note = chemically synthesized
  source 1..20: mol_type = other DNA
aataatgttgtgaaaattaa

SEQ ID NO: 17672 - DNA, 20 bp, synthetic construct
  misc_feature 1..20: note = chemically synthesized
  source 1..20: mol_type = other DNA
gtgaaaattaaaagaaatac

SEQ ID NO: 17673 - DNA, 20 bp, synthetic construct
  misc_feature 1..20: note = chemically synthesized
  source 1..20: mol_type = other DNA
aataccagttgtaaatcact

SEQ ID NO: 17674 - DNA, 20 bp, synthetic construct
  misc_feature 1..20: note = chemically synthesized
  source 1..20: mol_type = other DNA
aaatcactcagaactgtgcc

SEQ ID NO: 17675 - DNA, 20 bp, synthetic construct
  misc_feature 1..20: note = chemically synthesized
  source 1..20: mol_type = other DNA
agcatttaataaacactctg

SEQ ID NO: 17676 - DNA, 20 bp, synthetic construct
  misc_feature 1..20: note = chemically synthesized
  source 1..20: mol_type = other DNA
gcatttaataaacactctgt

SEQ ID NO: 17677 - DNA, 20 bp, synthetic construct
  misc_feature 1..20: note = chemically synthesized
  source 1..20: mol_type = other DNA
aataaacactctgtaggtat

SEQ ID NO: 17678 - DNA, 20 bp, synthetic construct
  misc_feature 1..20: note = chemically synthesized
  source 1..20: mol_type = other DNA
ataaaatttattcataaaat

SEQ ID NO: 17679 - DNA, 20 bp, synthetic construct
  misc_feature 1..20: note = chemically synthesized
  source 1..20: mol_type = other DNA
taaaatttattcataaaatg

SEQ ID NO: 17680 - DNA, 20 bp, synthetic construct
  misc_feature 1..20: note = chemically synthesized
  source 1..20: mol_type = other DNA
aatttattcataaaatgagg

SEQ ID NO: 17681 - DNA, 20 bp, synthetic construct
  misc_feature 1..20: note = chemically synthesized
  source 1..20: mol_type = other DNA
tattcataaaatgaggaagt

SEQ ID NO: 17682 - DNA, 20 bp, synthetic construct
  misc_feature 1..20: note = chemically synthesized
  source 1..20: mol_type = other DNA
tagctcatgtattgtcatac

SEQ ID NO: 17683 - DNA, 20 bp, synthetic construct
  misc_feature 1..20: note = chemically synthesized
  source 1..20: mol_type = other DNA
taccagctttcactttgaat

SEQ ID NO: 17684 - DNA, 20 bp, synthetic construct
  misc_feature 1..20: note = chemically synthesized
  source 1..20: mol_type = other DNA
attgcatttttaaacacaaa

SEQ ID NO: 17685 - DNA, 20 bp, synthetic construct
  misc_feature 1..20: note = chemically synthesized
  source 1..20: mol_type = other DNA
tgcatttttaaacacaaaaa

SEQ ID NO: 17686 - DNA, 20 bp, synthetic construct
  misc_feature 1..20: note = chemically synthesized
  source 1..20: mol_type = other DNA
aaacacaaaaagagaaataa

SEQ ID NO: 17687 - DNA, 20 bp, synthetic construct
  misc_feature 1..20: note = chemically synthesized
  source 1..20: mol_type = other DNA
aacacaaaaagagaaataat

SEQ ID NO: 17688 - DNA, 20 bp, synthetic construct
  misc_feature 1..20: note = chemically synthesized
  source 1..20: mol_type = other DNA
catcaatgttacttcaatca

SEQ ID NO: 17689 - DNA, 20 bp, synthetic construct
  misc_feature 1..20: note = chemically synthesized
  source 1..20: mol_type = other DNA
atcaatgttacttcaatcac

SEQ ID NO: 17690 - DNA, 20 bp, synthetic construct
  misc_feature 1..20: note = chemically synthesized
  source 1..20: mol_type = other DNA
tacttcaatcacgggatgca

SEQ ID NO: 17691 - DNA, 20 bp, synthetic construct
  misc_feature 1..20: note = chemically synthesized
  source 1..20: mol_type = other DNA
atcacgggatgcatagtaat

SEQ ID NO: 17692 - DNA, 20 bp, synthetic construct
  misc_feature 1..20: note = chemically synthesized
  source 1..20: mol_type = other DNA
tcacgggatgcatagtaatt

SEQ ID NO: 17693 - DNA, 20 bp, synthetic construct
  misc_feature 1..20: note = chemically synthesized
  source 1..20: mol_type = other DNA
ctttgccctaattactgatg

SEQ ID NO: 17694 - DNA, 20 bp, synthetic construct
  misc_feature 1..20: note = chemically synthesized
  source 1..20: mol_type = other DNA
ccctaattactgatgtggat

SEQ ID NO: 17695 - DNA, 20 bp, synthetic construct
  misc_feature 1..20: note = chemically synthesized
  source 1..20: mol_type = other DNA
aattactgatgtggataagc

SEQ ID NO: 17696 - DNA, 20 bp, synthetic construct
  misc_feature 1..20: note = chemically synthesized
  source 1..20: mol_type = other DNA
tactgatgtggataagccgg

SEQ ID NO: 17697 - DNA, 20 bp, synthetic construct
  misc_feature 1..20: note = chemically synthesized
  source 1..20: mol_type = other DNA
actgatgtggataagccggt

SEQ ID NO: 17698 - DNA, 20 bp, synthetic construct
  misc_feature 1..20: note = chemically synthesized
  source 1..20: mol_type = other DNA
aagccggtgggccatgtcaa

SEQ ID NO: 17699 - DNA, 20 bp, synthetic construct
  misc_feature 1..20: note = chemically synthesized
  source 1..20: mol_type = other DNA
ggccatgtcaatggcatctc

SEQ ID NO: 17700 - DNA, 20 bp, synthetic construct
  misc_feature 1..20: note = chemically synthesized
  source 1..20: mol_type = other DNA
atctatgtaaaaactatgct

SEQ ID NO: 17701 - DNA, 20 bp, synthetic construct
  misc_feature 1..20: note = chemically synthesized
  source 1..20: mol_type = other DNA
aaaaactatgcttggttgca

SEQ ID NO: 17702 - DNA, 20 bp, synthetic construct
  misc_feature 1..20: note = chemically synthesized
  source 1..20: mol_type = other DNA
atgcttggttgcacagcttc

SEQ ID NO: 17703 - DNA, 20 bp, synthetic construct
  misc_feature 1..20: note = chemically synthesized
  source 1..20: mol_type = other DNA
tgcttggttgcacagcttca

SEQ ID NO: 17704 - DNA, 20 bp, synthetic construct
  misc_feature 1..20: note = chemically synthesized
  source 1..20: mol_type = other DNA
tggttgcacagcttcaagga

SEQ ID NO: 17705 - DNA, 20 bp, synthetic construct
  misc_feature 1..20: note = chemically synthesized
  source 1..20: mol_type = other DNA
cacagcttcaaggaaagcac

SEQ ID NO: 17706 - DNA, 20 bp, synthetic construct
  misc_feature 1..20: note = chemically synthesized
  source 1..20: mol_type = other DNA
ctactcacttccttttcatt

SEQ ID NO: 17707 - DNA, 20 bp, synthetic construct
  misc_feature 1..20: note = chemically synthesized
  source 1..20: mol_type = other DNA
ttcattcagcatgctatgtc

SEQ ID NO: 17708 - DNA, 20 bp, synthetic construct
  misc_feature 1..20: note = chemically synthesized
  source 1..20: mol_type = other DNA
tcattcagcatgctatgtct

SEQ ID NO: 17709 - DNA, 20 bp, synthetic construct
  misc_feature 1..20: note = chemically synthesized
  source 1..20: mol_type = other DNA
cccctttcatataaaatatt

SEQ ID NO: 17710 - DNA, 20 bp, synthetic construct
  misc_feature 1..20: note = chemically synthesized
  source 1..20: mol_type = other DNA
cctttcatataaaatatttg

SEQ ID NO: 17711 - DNA, 20 bp, synthetic construct
  misc_feature 1..20: note = chemically synthesized
  source 1..20: mol_type = other DNA
aatatttggagctgccattg

SEQ ID NO: 17712 - DNA, 20 bp, synthetic construct
  misc_feature 1..20: note = chemically synthesized
  source 1..20: mol_type = other DNA
atatttggagctgccattgt

SEQ ID NO: 17713 - DNA, 20 bp, synthetic construct
  misc_feature 1..20: note = chemically synthesized
  source 1..20: mol_type = other DNA
tttggagctgccattgtagg

SEQ ID NO: 17714 - DNA, 20 bp, synthetic construct
  misc_feature 1..20: note = chemically synthesized
  source 1..20: mol_type = other DNA
agctgccattgtaggtagtg

SEQ ID NO: 17715 - DNA, 20 bp, synthetic construct
  misc_feature 1..20: note = chemically synthesized
  source 1..20: mol_type = other DNA
gctgccattgtaggtagtgc

SEQ ID NO: 17716 - DNA, 20 bp, synthetic construct
  misc_feature 1..20: note = chemically synthesized
  source 1..20: mol_type = other DNA
gccattgtaggtagtgcagg

SEQ ID NO: 17717 - DNA, 20 bp, synthetic construct
  misc_feature 1..20: note = chemically synthesized
  source 1..20: mol_type = other DNA
agtgcaggtggtcttgttca

SEQ ID NO: 17718 - DNA, 20 bp, synthetic construct
  misc_feature 1..20: note = chemically synthesized
  source 1..20: mol_type = other DNA
ggtggtcttgttcaaagtgt

SEQ ID NO: 17719 - DNA, 20 bp, synthetic construct
  misc_feature 1..20: note = chemically synthesized
  source 1..20: mol_type = other DNA
gagtatcacctcccactgcc

SEQ ID NO: 17720 - DNA, 20 bp, synthetic construct
  misc_feature 1..20: note = chemically synthesized
  source 1..20: mol_type = other DNA
acctcccactgccaagactg

SEQ ID NO: 17721 - DNA, 20 bp, synthetic construct
  misc_feature 1..20: note = chemically synthesized
  source 1..20: mol_type = other DNA
cagctgctttgattttaact

SEQ ID NO: 17722 - DNA, 20 bp, synthetic construct
  misc_feature 1..20: note = chemically synthesized
  source 1..20: mol_type = other DNA
agctgctttgattttaactg

SEQ ID NO: 17723 - DNA, 20 bp, synthetic construct
  misc_feature 1..20: note = chemically synthesized
  source 1..20: mol_type = other DNA
tttgattttaactgaggatc

SEQ ID NO: 17724 - DNA, 20 bp, synthetic construct
  misc_feature 1..20: note = chemically synthesized
  source 1..20: mol_type = other DNA
ttttaactgaggatctagaa

SEQ ID NO: 17725 - DNA, 20 bp, synthetic construct
  misc_feature 1..20: note = chemically synthesized
  source 1..20: mol_type = other DNA
ctgaggatctagaaaagtgc

SEQ ID NO: 17726 - DNA, 20 bp, synthetic construct
  misc_feature 1..20: note = chemically synthesized
  source 1..20: mol_type = other DNA
tgaggatctagaaaagtgct

SEQ ID NO: 17727 - DNA, 20 bp, synthetic construct
  misc_feature 1..20: note = chemically synthesized
  source 1..20: mol_type = other DNA
tatttgctgacctttgtcac

SEQ ID NO: 17728 - DNA, 20 bp, synthetic construct
  misc_feature 1..20: note = chemically synthesized
  source 1..20: mol_type = other DNA
ttgctgacctttgtcacaag

SEQ ID NO: 17729 - DNA, 20 bp, synthetic construct
  misc_feature 1..20: note = chemically synthesized
  source 1..20: mol_type = other DNA
gcacctaatctccttcctac

SEQ ID NO: 17730 - DNA, 20 bp, synthetic construct
  misc_feature 1..20: note = chemically synthesized
  source 1..20: mol_type = other DNA
gccttataaaatgatgttct

SEQ ID NO: 17731 - DNA, 20 bp, synthetic construct
  misc_feature 1..20: note = chemically synthesized
  source 1..20: mol_type = other DNA
ctgcttctgcaactgtgttt

SEQ ID NO: 17732 - DNA, 20 bp, synthetic construct
  misc_feature 1..20: note = chemically synthesized
  source 1..20: mol_type = other DNA
tctgcaactgtgttttggaa

SEQ ID NO: 17733 - DNA, 20 bp, synthetic construct
  misc_feature 1..20: note = chemically synthesized
  source 1..20: mol_type = other DNA
ctgcaactgtgttttggaac

SEQ ID NO: 17734 - DNA, 20 bp, synthetic construct
  misc_feature 1..20: note = chemically synthesized
  source 1..20: mol_type = other DNA
gcaactgtgttttggaacag

SEQ ID NO: 17735 - DNA, 20 bp, synthetic construct
  misc_feature 1..20: note = chemically synthesized
  source 1..20: mol_type = other DNA
caactgtgttttggaacagg

SEQ ID NO: 17736 - DNA, 20 bp, synthetic construct
  misc_feature 1..20: note = chemically synthesized
  source 1..20: mol_type = other DNA
aactgtgttttggaacagga

SEQ ID NO: 17737 - DNA, 20 bp, synthetic construct
  misc_feature 1..20: note = chemically synthesized
  source 1..20: mol_type = other DNA
gtgttttggaacaggagggt

SEQ ID NO: 17738 - DNA, 20 bp, synthetic construct
  misc_feature 1..20: note = chemically synthesized
  source 1..20: mol_type = other DNA
ttggaacaggagggtgagat

SEQ ID NO: 17739 - DNA, 20 bp, synthetic construct
  misc_feature 1..20: note = chemically synthesized
  source 1..20: mol_type = other DNA
gaacaggagggtgagattag

SEQ ID NO: 17740 - DNA, 20 bp, synthetic construct
  misc_feature 1..20: note = chemically synthesized
  source 1..20: mol_type = other DNA
agtagccacacacactgaaa

SEQ ID NO: 17741 - DNA, 20 bp, synthetic construct
  misc_feature 1..20: note = chemically synthesized
  source 1..20: mol_type = other DNA
aaatagtcatatgacttcca

SEQ ID NO: 17742 - DNA, 20 bp, synthetic construct
  misc_feature 1..20: note = chemically synthesized
  source 1..20: mol_type = other DNA
ttccaaagtctgtaattttt

SEQ ID NO: 17743 - DNA, 20 bp, synthetic construct
  misc_feature 1..20: note = chemically synthesized
  source 1..20: mol_type = other DNA
atttttaagcatatacaaaa

SEQ ID NO: 17744 - DNA, 20 bp, synthetic construct
  misc_feature 1..20: note = chemically synthesized
  source 1..20: mol_type = other DNA
tatgtgtgtatacatatata

SEQ ID NO: 17745 - DNA, 20 bp, synthetic construct
  misc_feature 1..20: note = chemically synthesized
  source 1..20: mol_type = other DNA
tgtgtgtatacatatatata

SEQ ID NO: 17746 - DNA, 20 bp, synthetic construct
  misc_feature 1..20: note = chemically synthesized
  source 1..20: mol_type = other DNA
tgtgtatacatatatataga

SEQ ID NO: 17747 - DNA, 20 bp, synthetic construct
  misc_feature 1..20: note = chemically synthesized
  source 1..20: mol_type = other DNA
tgtatacatatatatagaga

SEQ ID NO: 17748 - DNA, 20 bp, synthetic construct
  misc_feature 1..20: note = chemically synthesized
  source 1..20: mol_type = other DNA
tatacatatatatagagaga

SEQ ID NO: 17749 - DNA, 20 bp, synthetic construct
  misc_feature 1..20: note = chemically synthesized
  source 1..20: mol_type = other DNA
catatatatagagagagaga

SEQ ID NO: 17750 - DNA, 20 bp, synthetic construct
  misc_feature 1..20: note = chemically synthesized
  source 1..20: mol_type = other DNA
tatatatagagagagagaca

SEQ ID NO: 17751 - DNA, 20 bp, synthetic construct
  misc_feature 1..20: note = chemically synthesized
  source 1..20: mol_type = other DNA
tatatagagagagagacaga

SEQ ID NO: 17752 - DNA, 20 bp, synthetic construct
  misc_feature 1..20: note = chemically synthesized
  source 1..20: mol_type = other DNA
tatagagagagagacagaga

SEQ ID NO: 17753 - DNA, 20 bp, synthetic construct
  misc_feature 1..20: note = chemically synthesized
  source 1..20: mol_type = other DNA
gagagagagacagagagaga

SEQ ID NO: 17754 - DNA, 20 bp, synthetic construct
  misc_feature 1..20: note = chemically synthesized
  source 1..20: mol_type = other DNA
agagagagacagagagagat

SEQ ID NO: 17755 - DNA, 20 bp, synthetic construct
  misc_feature 1..20: note = chemically synthesized
  source 1..20: mol_type = other DNA
gagagagacagagagagatg

SEQ ID NO: 17756 - DNA, 20 bp, synthetic construct
  misc_feature 1..20: note = chemically synthesized
  source 1..20: mol_type = other DNA
agagagacagagagagatgg

SEQ ID NO: 17757 - DNA, 20 bp, synthetic construct
  misc_feature 1..20: note = chemically synthesized
  source 1..20: mol_type = other DNA
agagacagagagagatgggg

SEQ ID NO: 17758 - DNA, 20 bp, synthetic construct
  misc_feature 1..20: note = chemically synthesized
  source 1..20: mol_type = other DNA
agacagagagagatggggga

SEQ ID NO: 17759 - DNA, 20 bp, synthetic construct
  misc_feature 1..20: note = chemically synthesized
  source 1..20: mol_type = other DNA
acagagagagatgggggaga

SEQ ID NO: 17760 - DNA, 20 bp, synthetic construct
  misc_feature 1..20: note = chemically synthesized
  source 1..20: mol_type = other DNA
agagagagatgggggagaga

SEQ ID NO: 17761 - DNA, 20 bp, synthetic construct
  misc_feature 1..20: note = chemically synthesized
  source 1..20: mol_type = other DNA
agagagatgggggagagaga

SEQ ID NO: 17762 - DNA, 20 bp, synthetic construct
  misc_feature 1..20: note = chemically synthesized
  source 1..20: mol_type = other DNA
agagatgggggagagagaga

SEQ ID NO: 17763 - DNA, 20 bp, synthetic construct
  misc_feature 1..20: note = chemically synthesized
  source 1..20: mol_type = other DNA
agatgggggagagagagaga

SEQ ID NO: 17764 - DNA, 20 bp, synthetic construct
  misc_feature 1..20: note = chemically synthesized
  source 1..20: mol_type = other DNA
atgggggagagagagagaga

SEQ ID NO: 17765 - DNA, 20 bp, synthetic construct
  misc_feature 1..20: note = chemically synthesized
  source 1..20: mol_type = other DNA
gggagagagagagagagagc

SEQ ID NO: 17766 - DNA, 20 bp, synthetic construct
  misc_feature 1..20: note = chemically synthesized
  source 1..20: mol_type = other DNA
gagagagagagagagagcga

SEQ ID NO: 17767 - DNA, 20 bp, synthetic construct
  misc_feature 1..20: note = chemically synthesized
  source 1..20: mol_type = other DNA
gagagagagagagagcgaga

SEQ ID NO: 17768 - DNA, 20 bp, synthetic construct
  misc_feature 1..20: note = chemically synthesized
  source 1..20: mol_type = other DNA
gagagagagagagcgagaga

SEQ ID NO: 17769 - DNA, 20 bp, synthetic construct
  misc_feature 1..20: note = chemically synthesized
  source 1..20: mol_type = other DNA
agagagagagagcgagagag

SEQ ID NO: 17770 - DNA, 20 bp, synthetic construct
  misc_feature 1..20: note = chemically synthesized
  source 1..20: mol_type = other DNA
gagagagagcgagagagagg

SEQ ID NO: 17771 - DNA, 20 bp, synthetic construct
  misc_feature 1..20: note = chemically synthesized
  source 1..20: mol_type = other DNA
gagagagcgagagagaggca

SEQ ID NO: 17772 - DNA, 20 bp, synthetic construct
  misc_feature 1..20: note = chemically synthesized
  source 1..20: mol_type = other DNA
gagcgagagagaggcagaga

SEQ ID NO: 17773 - DNA, 20 bp, synthetic construct
  misc_feature 1..20: note = chemically synthesized
  source 1..20: mol_type = other DNA
gcgagagagaggcagagaaa

SEQ ID NO: 17774 - DNA, 20 bp, synthetic construct
  misc_feature 1..20: note = chemically synthesized
  source 1..20: mol_type = other DNA
agagaaagagatccttattt

SEQ ID NO: 17775 - DNA, 20 bp, synthetic construct
  misc_feature 1..20: note = chemically synthesized
  source 1..20: mol_type = other DNA
tattctatacttctttgaaa

SEQ ID NO: 17776 - DNA, 20 bp, synthetic construct
  misc_feature 1..20: note = chemically synthesized
  source 1..20: mol_type = other DNA
ttctttgaaatagtgatttt

SEQ ID NO: 17777 - DNA, 20 bp, synthetic construct
  misc_feature 1..20: note = chemically synthesized
  source 1..20: mol_type = other DNA
aatagtgatttttagtaaat

SEQ ID NO: 17778 - DNA, 20 bp, synthetic construct
  misc_feature 1..20: note = chemically synthesized
  source 1..20: mol_type = other DNA
agtgatttttagtaaattgg

SEQ ID NO: 17779 - DNA, 20 bp, synthetic construct
  misc_feature 1..20: note = chemically synthesized
  source 1..20: mol_type = other DNA
tagtaaattggcagtgttgc

SEQ ID NO: 17780 - DNA, 20 bp, synthetic construct
  misc_feature 1..20: note = chemically synthesized
  source 1..20: mol_type = other DNA
agtgttgccagatgacgact

SEQ ID NO: 17781 - DNA, 20 bp, synthetic construct
  misc_feature 1..20: note = chemically synthesized
  source 1..20: mol_type = other DNA
tgttgccagatgacgactta

SEQ ID NO: 17782 - DNA, 20 bp, synthetic construct
  misc_feature 1..20: note = chemically synthesized
  source 1..20: mol_type = other DNA
cctcattgttatatgtacca

SEQ ID NO: 17783 - DNA, 20 bp, synthetic construct
  misc_feature 1..20: note = chemically synthesized
  source 1..20: mol_type = other DNA
cattgttatatgtaccatgg

SEQ ID NO: 17784 - DNA, 20 bp, synthetic construct
  misc_feature 1..20: note = chemically synthesized
  source 1..20: mol_type = other DNA
tggtagctcatcttttcttt

SEQ ID NO: 17785 - DNA, 20 bp, synthetic construct
  misc_feature 1..20: note = chemically synthesized
  source 1..20: mol_type = other DNA
ggtagctcatcttttctttc

SEQ ID NO: 17786 - DNA, 20 bp, synthetic construct
  misc_feature 1..20: note = chemically synthesized
  source 1..20: mol_type = other DNA
tcatcttttctttcaggtga

SEQ ID NO: 17787 - DNA, 20 bp, synthetic construct
  misc_feature 1..20: note = chemically synthesized
  source 1..20: mol_type = other DNA
ctttgtcctcacgctaaaca

SEQ ID NO: 17788 - DNA, 20 bp, synthetic construct
  misc_feature 1..20: note = chemically synthesized
  source 1..20: mol_type = other DNA
acatagcccccatgttgttc

SEQ ID NO: 17789 - DNA, 20 bp, synthetic construct
  misc_feature 1..20: note = chemically synthesized
  source 1..20: mol_type = other DNA
catagcccccatgttgttcc

SEQ ID NO: 17790 - DNA, 20 bp, synthetic construct
  misc_feature 1..20: note = chemically synthesized
  source 1..20: mol_type = other DNA
cccatgttgttccaggaaaa

SEQ ID NO: 17791 - DNA, 20 bp, synthetic construct
  misc_feature 1..20: note = chemically synthesized
  source 1..20: mol_type = other DNA
catgttgttccaggaaaata

SEQ ID NO: 17792 - DNA, 20 bp, synthetic construct
  misc_feature 1..20: note = chemically synthesized
  source 1..20: mol_type = other DNA
atagagatcaataaaataca

SEQ ID NO: 17793 - DNA, 20 bp, synthetic construct
  misc_feature 1..20: note = chemically synthesized
  source 1..20: mol_type = other DNA
aatacaaagtacttgtttga

SEQ ID NO: 17794 - DNA, 20 bp, synthetic construct
  misc_feature 1..20: note = chemically synthesized
  source 1..20: mol_type = other DNA
aaagtacttgtttgaaagtg

SEQ ID NO: 17795 - DNA, 20 bp, synthetic construct
  misc_feature 1..20: note = chemically synthesized
  source 1..20: mol_type = other DNA
aagtacttgtttgaaagtga

SEQ ID NO: 17796 - DNA, 20 bp, synthetic construct
  misc_feature 1..20: note = chemically synthesized
  source 1..20: mol_type = other DNA
cttgtttgaaagtgaaggtt

SEQ ID NO: 17797 - DNA, 20 bp, synthetic construct
  misc_feature 1..20: note = chemically synthesized
  source 1..20: mol_type = other DNA
aaattcaatgacctacgctg

SEQ ID NO: 17798 - DNA, 20 bp, synthetic construct
  misc_feature 1..20: note = chemically synthesized
  source 1..20: mol_type = other DNA
gatcattcattaatgatatt

SEQ ID NO: 17799 - DNA, 20 bp, synthetic construct
  misc_feature 1..20: note = chemically synthesized
  source 1..20: mol_type = other DNA
agtattttcttttttaatgt

SEQ ID NO: 17800 - DNA, 20 bp, synthetic construct
  misc_feature 1..20: note = chemically synthesized
  source 1..20: mol_type = other DNA
agaataaaaccatttatttg

SEQ ID NO: 17801 - DNA, 20 bp, synthetic construct
  misc_feature 1..20: note = chemically synthesized
  source 1..20: mol_type = other DNA
tatgtgtatgtaaatctcct

SEQ ID NO: 17802 - DNA, 20 bp, synthetic construct
  misc_feature 1..20: note = chemically synthesized
  source 1..20: mol_type = other DNA
ttatacctcaaatatgaaaa

SEQ ID NO: 17803 - DNA, 20 bp, synthetic construct
  misc_feature 1..20: note = chemically synthesized
  source 1..20: mol_type = other DNA
tatacctcaaatatgaaaat

SEQ ID NO: 17804 - DNA, 20 bp, synthetic construct
  misc_feature 1..20: note = chemically synthesized
  source 1..20: mol_type = other DNA
tcttgcattcacttatattc

SEQ ID NO: 17805 - DNA, 20 bp, synthetic construct
  misc_feature 1..20: note = chemically synthesized
  source 1..20: mol_type = other DNA
cacttatattctagcttgtt

SEQ ID NO: 17806 - DNA, 20 bp, synthetic construct
  misc_feature 1..20: note = chemically synthesized
  source 1..20: mol_type = other DNA
cttatattctagcttgttaa

SEQ ID NO: 17807 - DNA, 20 bp, synthetic construct
  misc_feature 1..20: note = chemically synthesized
  source 1..20: mol_type = other DNA
tatattctagcttgttaaga

SEQ ID NO: 17808 - DNA, 20 bp, synthetic construct
  misc_feature 1..20: note = chemically synthesized
  source 1..20: mol_type = other DNA
attctagcttgttaagagag

SEQ ID NO: 17809 - DNA, 20 bp, synthetic construct
  misc_feature 1..20: note = chemically synthesized
  source 1..20: mol_type = other DNA
agcttgttaagagagaagtt

SEQ ID NO: 17810 - DNA, 20 bp, synthetic construct
  misc_feature 1..20: note = chemically synthesized
  source 1..20: mol_type = other DNA
gcttgttaagagagaagttt

SEQ ID NO: 17811 - DNA, 20 bp, synthetic construct
  misc_feature 1..20: note = chemically synthesized
  source 1..20: mol_type = other DNA
cttgttaagagagaagtttg

SEQ ID NO: 17812 - DNA, 20 bp, synthetic construct
  misc_feature 1..20: note = chemically synthesized
  source 1..20: mol_type = other DNA
ggcaaaatgtgctttataaa

SEQ ID NO: 17813 - DNA, 20 bp, synthetic construct
  misc_feature 1..20: note = chemically synthesized
  source 1..20: mol_type = other DNA
ctttataaatagtaaaaact

SEQ ID NO: 17814 - DNA, 20 bp, synthetic construct
  misc_feature 1..20: note = chemically synthesized
  source 1..20: mol_type = other DNA
tttataaatagtaaaaactg

SEQ ID NO: 17815 - DNA, 20 bp, synthetic construct
  misc_feature 1..20: note = chemically synthesized
  source 1..20: mol_type = other DNA
gtaaaaactgaggtaaacta

SEQ ID NO: 17816 - DNA, 20 bp, synthetic construct
  misc_feature 1..20: note = chemically synthesized
  source 1..20: mol_type = other DNA
ctgaggtaaactatagcaca

SEQ ID NO: 17817 - DNA, 20 bp, synthetic construct
  misc_feature 1..20: note = chemically synthesized
  source 1..20: mol_type = other DNA
cacaaagtgtgctatataaa

SEQ ID NO: 17818 - DNA, 20 bp, synthetic construct
  misc_feature 1..20: note = chemically synthesized
  source 1..20: mol_type = other DNA
ctatataaacagtaaaaacc

SEQ ID NO: 17819 - DNA, 20 bp, synthetic construct
  misc_feature 1..20: note = chemically synthesized
  source 1..20: mol_type = other DNA
tatataaacagtaaaaaccg

SEQ ID NO: 17820 - DNA, 20 bp, synthetic construct
  misc_feature 1..20: note = chemically synthesized
  source 1..20: mol_type = other DNA
taaaaaccgaggtaaaaata

SEQ ID NO: 17821 - DNA, 20 bp, synthetic construct
  misc_feature 1..20: note = chemically synthesized
  source 1..20: mol_type = other DNA
aaaaaccgaggtaaaaatat

SEQ ID NO: 17822 - DNA, 20 bp, synthetic construct
  misc_feature 1..20: note = chemically synthesized
  source 1..20: mol_type = other DNA
aaaaccgaggtaaaaatatg

SEQ ID NO: 17823 - DNA, 20 bp, synthetic construct
  misc_feature 1..20: note = chemically synthesized
  source 1..20: mol_type = other DNA
aaccgaggtaaaaatatggg

SEQ ID NO: 17824 - DNA, 20 bp, synthetic construct
  misc_feature 1..20: note = chemically synthesized
  source 1..20: mol_type = other DNA
accgaggtaaaaatatgggg

SEQ ID NO: 17825 - DNA, 20 bp, synthetic construct
  misc_feature 1..20: note = chemically synthesized
  source 1..20: mol_type = other DNA
aaaatatggggaggacaaaa

SEQ ID NO: 17826 - DNA, 20 bp, synthetic construct
  misc_feature 1..20: note = chemically synthesized
  source 1..20: mol_type = other DNA
aaatatggggaggacaaaaa

SEQ ID NO: 17827 - DNA, 20 bp, synthetic construct
  misc_feature 1..20: note = chemically synthesized
  source 1..20: mol_type = other DNA
aatatggggaggacaaaaaa

SEQ ID NO: 17828 - DNA, 20 bp, synthetic construct
  misc_feature 1..20: note = chemically synthesized
  source 1..20: mol_type = other DNA
aggacaaaaaagggctaaaa

SEQ ID NO: 17829 - DNA, 20 bp, synthetic construct
  misc_feature 1..20: note = chemically synthesized
  source 1..20: mol_type = other DNA
aaaaagggctaaaatggtgt

SEQ ID NO: 17830 - DNA, 20 bp, synthetic construct
  misc_feature 1..20: note = chemically synthesized
  source 1..20: mol_type = other DNA
ctaaaatggtgttggaatat

SEQ ID NO: 17831 - DNA, 20 bp, synthetic construct
  misc_feature 1..20: note = chemically synthesized
  source 1..20: mol_type = other DNA
tggtgttggaatataagaaa

SEQ ID NO: 17832 - DNA, 20 bp, synthetic construct
  misc_feature 1..20: note = chemically synthesized
  source 1..20: mol_type = other DNA
tgttggaatataagaaatag

SEQ ID NO: 17833 - DNA, 20 bp, synthetic construct
  misc_feature 1..20: note = chemically synthesized
  source 1..20: mol_type = other DNA
aatataagaaatagcagtaa

SEQ ID NO: 17834 - DNA, 20 bp, synthetic construct
  misc_feature 1..20: note = chemically synthesized
  source 1..20: mol_type = other DNA
ataagaaatagcagtaaaag

SEQ ID NO: 17835 - DNA, 20 bp, synthetic construct
  misc_feature 1..20: note = chemically synthesized
  source 1..20: mol_type = other DNA
gcagtaaaagaagctcctca

SEQ ID NO: 17836 - DNA, 20 bp, synthetic construct
  misc_feature 1..20: note = chemically synthesized
  source 1..20: mol_type = other DNA
taaaagaagctcctcacagc

SEQ ID NO: 17837 - DNA, 20 bp, synthetic construct
  misc_feature 1..20: note = chemically synthesized
  source 1..20: mol_type = other DNA
agaagctcctcacagcaaga

SEQ ID NO: 17838 - DNA, 20 bp, synthetic construct
  misc_feature 1..20: note = chemically synthesized
  source 1..20: mol_type = other DNA
ctcctcacagcaagacagta

SEQ ID NO: 17839 - DNA, 20 bp, synthetic construct
  misc_feature 1..20: note = chemically synthesized
  source 1..20: mol_type = other DNA
tcctcacagcaagacagtac

SEQ ID NO: 17840 - DNA, 20 bp, synthetic construct
  misc_feature 1..20: note = chemically synthesized
  source 1..20: mol_type = other DNA
cctcacagcaagacagtaca

SEQ ID NO: 17841 - DNA, 20 bp, synthetic construct
  misc_feature 1..20: note = chemically synthesized
  source 1..20: mol_type = other DNA
agacagtacagggaaatgtc

SEQ ID NO: 17842 - DNA, 20 bp, synthetic construct
  misc_feature 1..20: note = chemically synthesized
  source 1..20: mol_type = other DNA
acagtacagggaaatgtctg

SEQ ID NO: 17843 - DNA, 20 bp, synthetic construct
  misc_feature 1..20: note = chemically synthesized
  source 1..20: mol_type = other DNA
cagtacagggaaatgtctgg

SEQ ID NO: 17844 - DNA, 20 bp, synthetic construct
  misc_feature 1..20: note = chemically synthesized
  source 1..20: mol_type = other DNA
agtacagggaaatgtctgga

SEQ ID NO: 17845 - DNA, 20 bp, synthetic construct
  misc_feature 1..20: note = chemically synthesized
  source 1..20: mol_type = other DNA
gggaaatgtctggagggaca

SEQ ID NO: 17846 - DNA, 20 bp, synthetic construct
  misc_feature 1..20: note = chemically synthesized
  source 1..20: mol_type = other DNA
gacaaagatttacttacaat

SEQ ID NO: 17847 - DNA, 20 bp, synthetic construct
  misc_feature 1..20: note = chemically synthesized
  source 1..20: mol_type = other DNA
acaaagatttacttacaatc

SEQ ID NO: 17848 - DNA, 20 bp, synthetic construct
  misc_feature 1..20: note = chemically synthesized
  source 1..20: mol_type = other DNA
aatcaggcctcaaccaatat

SEQ ID NO: 17849 - DNA, 20 bp, synthetic construct
  misc_feature 1..20: note = chemically synthesized
  source 1..20: mol_type = other DNA
tatgacgtgtttatatgtat

SEQ ID NO: 17850 - DNA, 20 bp, synthetic construct
  misc_feature 1..20: note = chemically synthesized
  source 1..20: mol_type = other DNA
atgacgtgtttatatgtatc

SEQ ID NO: 17851 - DNA, 20 bp, synthetic construct
  misc_feature 1..20: note = chemically synthesized
  source 1..20: mol_type = other DNA
gcatataatgtataatgatc

SEQ ID NO: 17852 - DNA, 20 bp, synthetic construct
  misc_feature 1..20: note = chemically synthesized
  source 1..20: mol_type = other DNA
ataatgtataatgatcaagt

SEQ ID NO: 17853 - DNA, 20 bp, synthetic construct
  misc_feature 1..20: note = chemically synthesized
  source 1..20: mol_type = other DNA
taatgtataatgatcaagtc

SEQ ID NO: 17854 - DNA, 20 bp, synthetic construct
  misc_feature 1..20: note = chemically synthesized
  source 1..20: mol_type = other DNA
taatgatcaagtcaggtatt

SEQ ID NO: 17855 - DNA, 20 bp, synthetic construct
  misc_feature 1..20: note = chemically synthesized
  source 1..20: mol_type = other DNA
aatgatcaagtcaggtattt

SEQ ID NO: 17856 - DNA, 20 bp, synthetic construct
  misc_feature 1..20: note = chemically synthesized
  source 1..20: mol_type = other DNA
atgatcaagtcaggtatttg

SEQ ID NO: 17857 - DNA, 20 bp, synthetic construct
  misc_feature 1..20: note = chemically synthesized
  source 1..20: mol_type = other DNA
tttggggtattcatcacctc

SEQ ID NO: 17858 - DNA, 20 bp, synthetic construct
  misc_feature 1..20: note = chemically synthesized
  source 1..20: mol_type = other DNA
tatttatcgtttctatgtgt

SEQ ID NO: 17859 - DNA, 20 bp, synthetic construct
  misc_feature 1..20: note = chemically synthesized
  source 1..20: mol_type = other DNA
atttatcgtttctatgtgtt

SEQ ID NO: 17860 - DNA, 20 bp, synthetic construct
  misc_feature 1..20: note = chemically synthesized
  source 1..20: mol_type = other DNA
ctatgtgttaggaacatttc

SEQ ID NO: 17861 - DNA, 20 bp, synthetic construct
  misc_feature 1..20: note = chemically synthesized
  source 1..20: mol_type = other DNA
cctactttgctattgaacat

SEQ ID NO: 17862 - DNA, 20 bp, synthetic construct
  misc_feature 1..20: note = chemically synthesized
  source 1..20: mol_type = other DNA
tacacacctttctctacctc

SEQ ID NO: 17863 - DNA, 20 bp, synthetic construct
  misc_feature 1..20: note = chemically synthesized
  source 1..20: mol_type = other DNA
ctacatgatattaacttttt

SEQ ID NO: 17864 - DNA, 20 bp, synthetic construct
  misc_feature 1..20: note = chemically synthesized
  source 1..20: mol_type = other DNA
cttttttagctcccacatat

SEQ ID NO: 17865 - DNA, 20 bp, synthetic construct
  misc_feature 1..20: note = chemically synthesized
  source 1..20: mol_type = other DNA
tttagctcccacatatcagt

SEQ ID NO: 17866 - DNA, 20 bp, synthetic construct
  misc_feature 1..20: note = chemically synthesized
  source 1..20: mol_type = other DNA
aaaatttgtctttctatgcc

SEQ ID NO: 17867 - DNA, 20 bp, synthetic construct
  misc_feature 1..20: note = chemically synthesized
  source 1..20: mol_type = other DNA
tcgtttaacataatgacttc

SEQ ID NO: 17868 - DNA, 20 bp, synthetic construct
  misc_feature 1..20: note = chemically synthesized
  source 1..20: mol_type = other DNA
gaaatgattttatatttgta

SEQ ID NO: 17869 - DNA, 20 bp, synthetic construct
  misc_feature 1..20: note = chemically synthesized
  source 1..20: mol_type = other DNA
tttcttcattcatccattga

SEQ ID NO: 17870 - DNA, 20 bp, synthetic construct
  misc_feature 1..20: note = chemically synthesized
  source 1..20: mol_type = other DNA
ttcatccattgatggacact

SEQ ID NO: 17871 - DNA, 20 bp, synthetic construct
  misc_feature 1..20: note = chemically synthesized
  source 1..20: mol_type = other DNA
tcatccattgatggacactt

SEQ ID NO: 17872 - DNA, 20 bp, synthetic construct
  misc_feature 1..20: note = chemically synthesized
  source 1..20: mol_type = other DNA
gtgaatcgtgctgcaataaa

SEQ ID NO: 17873 - DNA, 20 bp, synthetic construct
  misc_feature 1..20: note = chemically synthesized
  source 1..20: mol_type = other DNA
tcgtgctgcaataaacagtg

SEQ ID NO: 17874 - DNA, 20 bp, synthetic construct
  misc_feature 1..20: note = chemically synthesized
  source 1..20: mol_type = other DNA
tgcaataaacagtgtggtac

SEQ ID NO: 17875 - DNA, 20 bp, synthetic construct
  misc_feature 1..20: note = chemically synthesized
  source 1..20: mol_type = other DNA
tattctgaattcttttcctt

SEQ ID NO: 17876 - DNA, 20 bp, synthetic construct
  misc_feature 1..20: note = chemically synthesized
  source 1..20: mol_type = other DNA
ttttcctttggataaatacc

SEQ ID NO: 17877 - DNA, 20 bp, synthetic construct
  misc_feature 1..20: note = chemically synthesized
  source 1..20: mol_type = other DNA
ttggataaatacccagtaat

SEQ ID NO: 17878 - DNA, 20 bp, synthetic construct
  misc_feature 1..20: note = chemically synthesized
  source 1..20: mol_type = other DNA
atacccagtaataagattgc

SEQ ID NO: 17879 - DNA, 20 bp, synthetic construct
  misc_feature 1..20: note = chemically synthesized
  source 1..20: mol_type = other DNA
aagattgctggatcttatga

SEQ ID NO: 17880 - DNA, 20 bp, synthetic construct
  misc_feature 1..20: note = chemically synthesized
  source 1..20: mol_type = other DNA
tcttatgatagttcaatttt

SEQ ID NO: 17881 - DNA, 20 bp, synthetic construct
  misc_feature 1..20: note = chemically synthesized
  source 1..20: mol_type = other DNA
tagttcaatttttagctttt

SEQ ID NO: 17882 - DNA, 20 bp, synthetic construct
  misc_feature 1..20: note = chemically synthesized
  source 1..20: mol_type = other DNA
aatctacatattgttttcca

SEQ ID NO: 17883 - DNA, 20 bp, synthetic construct
  misc_feature 1..20: note = chemically synthesized
  source 1..20: mol_type = other DNA
ctacatattgttttccatag

SEQ ID NO: 17884 - DNA, 20 bp, synthetic construct
  misc_feature 1..20: note = chemically synthesized
  source 1..20: mol_type = other DNA
ctaatttgcatgcttaccaa

SEQ ID NO: 17885 - DNA, 20 bp, synthetic construct
  misc_feature 1..20: note = chemically synthesized
  source 1..20: mol_type = other DNA
tgcttaccaatagtgcctac

SEQ ID NO: 17886 - DNA, 20 bp, synthetic construct
  misc_feature 1..20: note = chemically synthesized
  source 1..20: mol_type = other DNA
cttttccttcacatccttgc

SEQ ID NO: 17887 - DNA, 20 bp, synthetic construct
  misc_feature 1..20: note = chemically synthesized
  source 1..20: mol_type = other DNA
taaatcatgatgattctaac

SEQ ID NO: 17888 - DNA, 20 bp, synthetic construct
  misc_feature 1..20: note = chemically synthesized
  source 1..20: mol_type = other DNA
atgatgattctaactggcat

SEQ ID NO: 17889 - DNA, 20 bp, synthetic construct
  misc_feature 1..20: note = chemically synthesized
  source 1..20: mol_type = other DNA
cataagatgatatctcattg

SEQ ID NO: 17890 - DNA, 20 bp, synthetic construct
  misc_feature 1..20: note = chemically synthesized
  source 1..20: mol_type = other DNA
atttgcatttctctgatgat

SEQ ID NO: 17891 - DNA, 20 bp, synthetic construct
  misc_feature 1..20: note = chemically synthesized
  source 1..20: mol_type = other DNA
ctctgatgattagtaatgtt

SEQ ID NO: 17892 - DNA, 20 bp, synthetic construct
  misc_feature 1..20: note = chemically synthesized
  source 1..20: mol_type = other DNA
tcctttgccaattttttaat

SEQ ID NO: 17893 - DNA, 20 bp, synthetic construct
  misc_feature 1..20: note = chemically synthesized
  source 1..20: mol_type = other DNA
ttatttgtttttccactgtt

SEQ ID NO: 17894 - DNA, 20 bp, synthetic construct
  misc_feature 1..20: note = chemically synthesized
  source 1..20: mol_type = other DNA
tttccactgttgagttgttt

SEQ ID NO: 17895 - DNA, 20 bp, synthetic construct
  misc_feature 1..20: note = chemically synthesized
  source 1..20: mol_type = other DNA
tttgagtttcttatatattc

SEQ ID NO: 17896 - DNA, 20 bp, synthetic construct
  misc_feature 1..20: note = chemically synthesized
  source 1..20: mol_type = other DNA
tgagtttcttatatattctg

SEQ ID NO: 17897 - DNA, 20 bp, synthetic construct
  misc_feature 1..20: note = chemically synthesized
  source 1..20: mol_type = other DNA
aaatattttctcgcattcaa

SEQ ID NO: 17898 - DNA, 20 bp, synthetic construct
  misc_feature 1..20: note = chemically synthesized
  source 1..20: mol_type = other DNA
tgattgtttcctttactgtg

SEQ ID NO: 17899 - DNA, 20 bp, synthetic construct
  misc_feature 1..20: note = chemically synthesized
  source 1..20: mol_type = other DNA
tttactgtgcagatgtattt

SEQ ID NO: 17900 - DNA, 20 bp, synthetic construct
  misc_feature 1..20: note = chemically synthesized
  source 1..20: mol_type = other DNA
agatgtattttagcttaata

SEQ ID NO: 17901 - DNA, 20 bp, synthetic construct
  misc_feature 1..20: note = chemically synthesized
  source 1..20: mol_type = other DNA
cttttgttgcctgtgctttt

SEQ ID NO: 17902 - DNA, 20 bp, synthetic construct
  misc_feature 1..20: note = chemically synthesized
  source 1..20: mol_type = other DNA
ttttgttgcctgtgcttttg

SEQ ID NO: 17903 - DNA, 20 bp, synthetic construct
  misc_feature 1..20: note = chemically synthesized
  source 1..20: mol_type = other DNA
tgcctgtgcttttgaggtct

SEQ ID NO: 17904 - DNA, 20 bp, synthetic construct
  misc_feature 1..20: note = chemically synthesized
  source 1..20: mol_type = other DNA
ggccataaaatctttgccca

SEQ ID NO: 17905 - DNA, 20 bp, synthetic construct
  misc_feature 1..20: note = chemically synthesized
  source 1..20: mol_type = other DNA
ttgcccaaagccatgtcttg

SEQ ID NO: 17906 - DNA, 20 bp, synthetic construct
  misc_feature 1..20: note = chemically synthesized
  source 1..20: mol_type = other DNA
gtctcccttatgttttcttt

SEQ ID NO: 17907 - DNA, 20 bp, synthetic construct
  misc_feature 1..20: note = chemically synthesized
  source 1..20: mol_type = other DNA
tcccttatgttttcttttag

SEQ ID NO: 17908 - DNA, 20 bp, synthetic construct
  misc_feature 1..20: note = chemically synthesized
  source 1..20: mol_type = other DNA
gttttcttttagtagtttta

SEQ ID NO: 17909 - DNA, 20 bp, synthetic construct
  misc_feature 1..20: note = chemically synthesized
  source 1..20: mol_type = other DNA
tttagtagttttatagtttt

SEQ ID NO: 17910 - DNA, 20 bp, synthetic construct
  misc_feature 1..20: note = chemically synthesized
  source 1..20: mol_type = other DNA
tagttttaagttttatattt

SEQ ID NO: 17911 - DNA, 20 bp, synthetic construct
  misc_feature 1..20: note = chemically synthesized
  source 1..20: mol_type = other DNA
ttaagtctttaatccatctt

SEQ ID NO: 17912 - DNA, 20 bp, synthetic construct
  misc_feature 1..20: note = chemically synthesized
  source 1..20: mol_type = other DNA
aagtctttaatccatcttga

SEQ ID NO: 17913 - DNA, 20 bp, synthetic construct
  misc_feature 1..20: note = chemically synthesized
  source 1..20: mol_type = other DNA
tcttgagagtacgttttata

SEQ ID NO: 17914 - DNA, 20 bp, synthetic construct
  misc_feature 1..20: note = chemically synthesized
  source 1..20: mol_type = other DNA
acgttttatatggcaataaa

SEQ ID NO: 17915 - DNA, 20 bp, synthetic construct
  misc_feature 1..20: note = chemically synthesized
  source 1..20: mol_type = other DNA
cgttttatatggcaataaat

SEQ ID NO: 17916 - DNA, 20 bp, synthetic construct
  misc_feature 1..20: note = chemically synthesized
  source 1..20: mol_type = other DNA
gttttatatggcaataaata

SEQ ID NO: 17917 - DNA, 20 bp, synthetic construct
  misc_feature 1..20: note = chemically synthesized
  source 1..20: mol_type = other DNA
ttttatatggcaataaatag

SEQ ID NO: 17918 - DNA, 20 bp, synthetic construct
  misc_feature 1..20: note = chemically synthesized
  source 1..20: mol_type = other DNA
gcaataaataggggttgtat

SEQ ID NO: 17919 - DNA, 20 bp, synthetic construct
  misc_feature 1..20: note = chemically synthesized
  source 1..20: mol_type = other DNA
caataaataggggttgtatt

SEQ ID NO: 17920 - DNA, 20 bp, synthetic construct
  misc_feature 1..20: note = chemically synthesized
  source 1..20: mol_type = other DNA
catttttgcatctattgtac

SEQ ID NO: 17921 - DNA, 20 bp, synthetic construct
  misc_feature 1..20: note = chemically synthesized
  source 1..20: mol_type = other DNA
atttttgcatctattgtaca

SEQ ID NO: 17922 - DNA, 20 bp, synthetic construct
  misc_feature 1..20: note = chemically synthesized
  source 1..20: mol_type = other DNA
tttttgcatctattgtacaa

SEQ ID NO: 17923 - DNA, 20 bp, synthetic construct
  misc_feature 1..20: note = chemically synthesized
  source 1..20: mol_type = other DNA
ttttgcatctattgtacaag

SEQ ID NO: 17924 - DNA, 20 bp, synthetic construct
  misc_feature 1..20: note = chemically synthesized
  source 1..20: mol_type = other DNA
catctattgtacaaggggtt

SEQ ID NO: 17925 - DNA, 20 bp, synthetic construct
  misc_feature 1..20: note = chemically synthesized
  source 1..20: mol_type = other DNA
tcttgatttgattctccatt

SEQ ID NO: 17926 - DNA, 20 bp, synthetic construct
  misc_feature 1..20: note = chemically synthesized
  source 1..20: mol_type = other DNA
attctccatttggttgctgt

SEQ ID NO: 17927 - DNA, 20 bp, synthetic construct
  misc_feature 1..20: note = chemically synthesized
  source 1..20: mol_type = other DNA
atttggttgctgttggtgta

SEQ ID NO: 17928 - DNA, 20 bp, synthetic construct
  misc_feature 1..20: note = chemically synthesized
  source 1..20: mol_type = other DNA
tggttgctgttggtgtatag

SEQ ID NO: 17929 - DNA, 20 bp, synthetic construct
  misc_feature 1..20: note = chemically synthesized
  source 1..20: mol_type = other DNA
gttgctgttggtgtatagaa

SEQ ID NO: 17930 - DNA, 20 bp, synthetic construct
  misc_feature 1..20: note = chemically synthesized
  source 1..20: mol_type = other DNA
gtgtgcattcatcttgtatc

SEQ ID NO: 17931 - DNA, 20 bp, synthetic construct
  misc_feature 1..20: note = chemically synthesized
  source 1..20: mol_type = other DNA
actttgctgaattattttat

SEQ ID NO: 17932 - DNA, 20 bp, synthetic construct
  misc_feature 1..20: note = chemically synthesized
  source 1..20: mol_type = other DNA
ctgaattattttatcagttc

SEQ ID NO: 17933 - DNA, 20 bp, synthetic construct
  misc_feature 1..20: note = chemically synthesized
  source 1..20: mol_type = other DNA
tgaattattttatcagttct

SEQ ID NO: 17934 - DNA, 20 bp, synthetic construct
  misc_feature 1..20: note = chemically synthesized
  source 1..20: mol_type = other DNA
aattattttatcagttctag

SEQ ID NO: 17935 - DNA, 20 bp, synthetic construct
  misc_feature 1..20: note = chemically synthesized
  source 1..20: mol_type = other DNA
tatcagttctaggagctttc

SEQ ID NO: 17936 - DNA, 20 bp, synthetic construct
  misc_feature 1..20: note = chemically synthesized
  source 1..20: mol_type = other DNA
tcagttctaggagctttctg

SEQ ID NO: 17937 - DNA, 20 bp, synthetic construct
  misc_feature 1..20: note = chemically synthesized
  source 1..20: mol_type = other DNA
cagttctaggagctttctgg

SEQ ID NO: 17938 - DNA, 20 bp, synthetic construct
  misc_feature 1..20: note = chemically synthesized
  source 1..20: mol_type = other DNA
gttctaggagctttctggag

SEQ ID NO: 17939 - DNA, 20 bp, synthetic construct
  misc_feature 1..20: note = chemically synthesized
  source 1..20: mol_type = other DNA
gagctttctggaggagtctt

SEQ ID NO: 17940 - DNA, 20 bp, synthetic construct
  misc_feature 1..20: note = chemically synthesized
  source 1..20: mol_type = other DNA
agctttctggaggagtcttt

SEQ ID NO: 17941 - DNA, 20 bp, synthetic construct
  misc_feature 1..20: note = chemically synthesized
  source 1..20: mol_type = other DNA
gctttctggaggagtcttta

SEQ ID NO: 17942 - DNA, 20 bp, synthetic construct
  misc_feature 1..20: note = chemically synthesized
  source 1..20: mol_type = other DNA
gaggagtctttagggtttta

SEQ ID NO: 17943 - DNA, 20 bp, synthetic construct
  misc_feature 1..20: note = chemically synthesized
  source 1..20: mol_type = other DNA
aggagtctttagggttttaa

SEQ ID NO: 17944 - DNA, 20 bp, synthetic construct
  misc_feature 1..20: note = chemically synthesized
  source 1..20: mol_type = other DNA
aaggtaaatgatcatatcat

SEQ ID NO: 17945 - DNA, 20 bp, synthetic construct
  misc_feature 1..20: note = chemically synthesized
  source 1..20: mol_type = other DNA
atgatcatatcatcagcaaa

SEQ ID NO: 17946 - DNA, 20 bp, synthetic construct
  misc_feature 1..20: note = chemically synthesized
  source 1..20: mol_type = other DNA
atatcatcagcaaacagtga

SEQ ID NO: 17947 - DNA, 20 bp, synthetic construct
  misc_feature 1..20: note = chemically synthesized
  source 1..20: mol_type = other DNA
tttgttttgtctgattgccc

SEQ ID NO: 17948 - DNA, 20 bp, synthetic construct
  misc_feature 1..20: note = chemically synthesized
  source 1..20: mol_type = other DNA
ttttgtctgattgccctggc

SEQ ID NO: 17949 - DNA, 20 bp, synthetic construct
  misc_feature 1..20: note = chemically synthesized
  source 1..20: mol_type = other DNA
tttgtctgattgccctggct

SEQ ID NO: 17950 - DNA, 20 bp, synthetic construct
  misc_feature 1..20: note = chemically synthesized
  source 1..20: mol_type = other DNA
attgccctggctaggacttc

SEQ ID NO: 17951 - DNA, 20 bp, synthetic construct
  misc_feature 1..20: note = chemically synthesized
  source 1..20: mol_type = other DNA
ggacttccagtactatgttg

SEQ ID NO: 17952 - DNA, 20 bp, synthetic construct
  misc_feature 1..20: note = chemically synthesized
  source 1..20: mol_type = other DNA
acttccagtactatgttgaa

SEQ ID NO: 17953 - DNA, 20 bp, synthetic construct
  misc_feature 1..20: note = chemically synthesized
  source 1..20: mol_type = other DNA
cttccagtactatgttgaag

SEQ ID NO: 17954 - DNA, 20 bp, synthetic construct
  misc_feature 1..20: note = chemically synthesized
  source 1..20: mol_type = other DNA
tccagtactatgttgaagag

SEQ ID NO: 17955 - DNA, 20 bp, synthetic construct
  misc_feature 1..20: note = chemically synthesized
  source 1..20: mol_type = other DNA
agtactatgttgaagaggag

SEQ ID NO: 17956 - DNA, 20 bp, synthetic construct
  misc_feature 1..20: note = chemically synthesized
  source 1..20: mol_type = other DNA
ctatgttgaagaggagtggt

SEQ ID NO: 17957 - DNA, 20 bp, synthetic construct
  misc_feature 1..20: note = chemically synthesized
  source 1..20: mol_type = other DNA
atgttgaagaggagtggtga

SEQ ID NO: 17958 - DNA, 20 bp, synthetic construct
  misc_feature 1..20: note = chemically synthesized
  source 1..20: mol_type = other DNA
ttgaagaggagtggtgagag

SEQ ID NO: 17959 - DNA, 20 bp, synthetic construct
  misc_feature 1..20: note = chemically synthesized
  source 1..20: mol_type = other DNA
tgaagaggagtggtgagagt

SEQ ID NO: 17960 - DNA, 20 bp, synthetic construct
  misc_feature 1..20: note = chemically synthesized
  source 1..20: mol_type = other DNA
tgggcatccttgtcttgttc

SEQ ID NO: 17961 - DNA, 20 bp, synthetic construct
  misc_feature 1..20: note = chemically synthesized
  source 1..20: mol_type = other DNA
ccttgtcttgttccagttct

SEQ ID NO: 17962 - DNA, 20 bp, synthetic construct
  misc_feature 1..20: note = chemically synthesized
  source 1..20: mol_type = other DNA
ttgtcttgttccagttctca

SEQ ID NO: 17963 - DNA, 20 bp, synthetic construct
  misc_feature 1..20: note = chemically synthesized
  source 1..20: mol_type = other DNA
tgtcttgttccagttctcag

SEQ ID NO: 17964 - DNA, 20 bp, synthetic construct
  misc_feature 1..20: note = chemically synthesized
  source 1..20: mol_type = other DNA
gtcttgttccagttctcaga

SEQ ID NO: 17965 - DNA, 20 bp, synthetic construct
  misc_feature 1..20: note = chemically synthesized
  source 1..20: mol_type = other DNA
ttccccattcaatattatgt

SEQ ID NO: 17966 - DNA, 20 bp, synthetic construct
  misc_feature 1..20: note = chemically synthesized
  source 1..20: mol_type = other DNA
attcaatattatgttggctg

SEQ ID NO: 17967 - DNA, 20 bp, synthetic construct
  misc_feature 1..20: note = chemically synthesized
  source 1..20: mol_type = other DNA
ttcaatattatgttggctgt

SEQ ID NO: 17968 - DNA, 20 bp, synthetic construct
  misc_feature 1..20: note = chemically synthesized
  source 1..20: mol_type = other DNA
tgttggctgtgggtttgtca

SEQ ID NO: 17969 - DNA, 20 bp, synthetic construct
  misc_feature 1..20: note = chemically synthesized
  source 1..20: mol_type = other DNA
ggctgtgggtttgtcacaga

SEQ ID NO: 17970 - DNA, 20 bp, synthetic construct
  misc_feature 1..20: note = chemically synthesized
  source 1..20: mol_type = other DNA
cagatggcttttattacact

SEQ ID NO: 17971 - DNA, 20 bp, synthetic construct
  misc_feature 1..20: note = chemically synthesized
  source 1..20: mol_type = other DNA
agatggcttttattacactg

SEQ ID NO: 17972 - DNA, 20 bp, synthetic construct
  misc_feature 1..20: note = chemically synthesized
  source 1..20: mol_type = other DNA
tcttgtatgctgattttgct

SEQ ID NO: 17973 - DNA, 20 bp, synthetic construct
  misc_feature 1..20: note = chemically synthesized
  source 1..20: mol_type = other DNA
ttttaatcataaatgtatgc

SEQ ID NO: 17974 - DNA, 20 bp, synthetic construct
  misc_feature 1..20: note = chemically synthesized
  source 1..20: mol_type = other DNA
atgctttttctgcatctatt

SEQ ID NO: 17975 - DNA, 20 bp, synthetic construct
  misc_feature 1..20: note = chemically synthesized
  source 1..20: mol_type = other DNA
tgtttttaaatctgtttatg

SEQ ID NO: 17976 - DNA, 20 bp, synthetic construct
  misc_feature 1..20: note = chemically synthesized
  source 1..20: mol_type = other DNA
gtatcacacttattgacttg

SEQ ID NO: 17977 - DNA, 20 bp, synthetic construct
  misc_feature 1..20: note = chemically synthesized
  source 1..20: mol_type = other DNA
tcaaaccaaccctgcatccc

SEQ ID NO: 17978 - DNA, 20 bp, synthetic construct
  misc_feature 1..20: note = chemically synthesized
  source 1..20: mol_type = other DNA
ccaaccctgcatccctggca

SEQ ID NO: 17979 - DNA, 20 bp, synthetic construct
  misc_feature 1..20: note = chemically synthesized
  source 1..20: mol_type = other DNA
gcatggaacctgcttgatca

SEQ ID NO: 17980 - DNA, 20 bp, synthetic construct
  misc_feature 1..20: note = chemically synthesized
  source 1..20: mol_type = other DNA
tggaacctgcttgatcatgg

SEQ ID NO: 17981 - DNA, 20 bp, synthetic construct
  misc_feature 1..20: note = chemically synthesized
  source 1..20: mol_type = other DNA
ttttgttatgttgttgaatt

SEQ ID NO: 17982 - DNA, 20 bp, synthetic construct
  misc_feature 1..20: note = chemically synthesized
  source 1..20: mol_type = other DNA
tgttgttgaatttggttatc

SEQ ID NO: 17983 - DNA, 20 bp, synthetic construct
  misc_feature 1..20: note = chemically synthesized
  source 1..20: mol_type = other DNA
tggttatctagtattttgtt

SEQ ID NO: 17984 - DNA, 20 bp, synthetic construct
  misc_feature 1..20: note = chemically synthesized
  source 1..20: mol_type = other DNA
ggttatctagtattttgtta

SEQ ID NO: 17985 - DNA, 20 bp, synthetic construct
  misc_feature 1..20: note = chemically synthesized
  source 1..20: mol_type = other DNA
tagtattttgttaaggattt

SEQ ID NO: 17986 - DNA, 20 bp, synthetic construct
  misc_feature 1..20: note = chemically synthesized
  source 1..20: mol_type = other DNA
ttttagcatctatgttcatc

SEQ ID NO: 17987 - DNA, 20 bp, synthetic construct
  misc_feature 1..20: note = chemically synthesized
  source 1..20: mol_type = other DNA
tttagcatctatgttcatca

SEQ ID NO: 17988 - DNA, 20 bp, synthetic construct
  misc_feature 1..20: note = chemically synthesized
  source 1..20: mol_type = other DNA
tctatgttcatcaaggctat

SEQ ID NO: 17989 - DNA, 20 bp, synthetic construct
  misc_feature 1..20: note = chemically synthesized
  source 1..20: mol_type = other DNA
tcatcaaggctatcagtctg

SEQ ID NO: 17990 - DNA, 20 bp, synthetic construct
  misc_feature 1..20: note = chemically synthesized
  source 1..20: mol_type = other DNA
cagtctgtagttttcttttt

SEQ ID NO: 17991 - DNA, 20 bp, synthetic construct
  misc_feature 1..20: note = chemically synthesized
  source 1..20: mol_type = other DNA
tttttggttatgtccttccc

SEQ ID NO: 17992 - DNA, 20 bp, synthetic construct
  misc_feature 1..20: note = chemically synthesized
  source 1..20: mol_type = other DNA
gttatgtccttccctggttt

SEQ ID NO: 17993 - DNA, 20 bp, synthetic construct
  misc_feature 1..20: note = chemically synthesized
  source 1..20: mol_type = other DNA
ccctggttttggtgtgatgc

SEQ ID NO: 17994 - DNA, 20 bp, synthetic construct
  misc_feature 1..20: note = chemically synthesized
  source 1..20: mol_type = other DNA
ttggtgtgatgctggcttca

SEQ ID NO: 17995 - DNA, 20 bp, synthetic construct
  misc_feature 1..20: note = chemically synthesized
  source 1..20: mol_type = other DNA
gctggcttcatagaatgaat

SEQ ID NO: 17996 - DNA, 20 bp, synthetic construct
  misc_feature 1..20: note = chemically synthesized
  source 1..20: mol_type = other DNA
ctggcttcatagaatgaatt

SEQ ID NO: 17997 - DNA, 20 bp, synthetic construct
  misc_feature 1..20: note = chemically synthesized
  source 1..20: mol_type = other DNA
tggcttcatagaatgaatta

SEQ ID NO: 17998 - DNA, 20 bp, synthetic construct
  misc_feature 1..20: note = chemically synthesized
  source 1..20: mol_type = other DNA
cttcatagaatgaattaggg

SEQ ID NO: 17999 - DNA, 20 bp, synthetic construct
  misc_feature 1..20: note = chemically synthesized
  source 1..20: mol_type = other DNA
ttcatagaatgaattagggc

SEQ ID NO: 18000 - DNA, 20 bp, synthetic construct
  misc_feature 1..20: note = chemically synthesized
  source 1..20: mol_type = other DNA
ttccttctttatctgtcttg

SEQ ID NO: 18001 - DNA, 20 bp, synthetic construct
  misc_feature 1..20: note = chemically synthesized
  source 1..20: mol_type = other DNA
tctttatctgtcttgtagaa

SEQ ID NO: 18002 - DNA, 20 bp, synthetic construct
  misc_feature 1..20: note = chemically synthesized
  source 1..20: mol_type = other DNA
tcttgtagaatagtgtcaaa

SEQ ID NO: 18003 - DNA, 20 bp, synthetic construct
  misc_feature 1..20: note = chemically synthesized
  source 1..20: mol_type = other DNA
gtagaatagtgtcaaaaaga

SEQ ID NO: 18004 - DNA, 20 bp, synthetic construct
  misc_feature 1..20: note = chemically synthesized
  source 1..20: mol_type = other DNA
tagaatagtgtcaaaaagat

SEQ ID NO: 18005 - DNA, 20 bp, synthetic construct
  misc_feature 1..20: note = chemically synthesized
  source 1..20: mol_type = other DNA
agaatagtgtcaaaaagatg

SEQ ID NO: 18006 - DNA, 20 bp, synthetic construct
  misc_feature 1..20: note = chemically synthesized
  source 1..20: mol_type = other DNA
ccaattcctctttgaatgtc

SEQ ID NO: 18007 - DNA, 20 bp, synthetic construct
  misc_feature 1..20: note = chemically synthesized
  source 1..20: mol_type = other DNA
attcctctttgaatgtctag

SEQ ID NO: 18008 - DNA, 20 bp, synthetic construct
  misc_feature 1..20: note = chemically synthesized
  source 1..20: mol_type = other DNA
aattctgttgtgaatccatc

SEQ ID NO: 18009 - DNA, 20 bp, synthetic construct
  misc_feature 1..20: note = chemically synthesized
  source 1..20: mol_type = other DNA
tctggtcctgaacttttttt

SEQ ID NO: 18010 - DNA, 20 bp, synthetic construct
  misc_feature 1..20: note = chemically synthesized
  source 1..20: mol_type = other DNA
gtcctgaacttttttttggt

SEQ ID NO: 18011 - DNA, 20 bp, synthetic construct
  misc_feature 1..20: note = chemically synthesized
  source 1..20: mol_type = other DNA
taaatctcactgcttgttat

SEQ ID NO: 18012 - DNA, 20 bp, synthetic construct
  misc_feature 1..20: note = chemically synthesized
  source 1..20: mol_type = other DNA
actgcttgttattggtctgt

SEQ ID NO: 18013 - DNA, 20 bp, synthetic construct
  misc_feature 1..20: note = chemically synthesized
  source 1..20: mol_type = other DNA
ggtctgttagtaaatttatt

SEQ ID NO: 18014 - DNA, 20 bp, synthetic construct
  misc_feature 1..20: note = chemically synthesized
  source 1..20: mol_type = other DNA
gtctgttagtaaatttattg

SEQ ID NO: 18015 - DNA, 20 bp, synthetic construct
  misc_feature 1..20: note = chemically synthesized
  source 1..20: mol_type = other DNA
atttattgaggctcatttca

SEQ ID NO: 18016 - DNA, 20 bp, synthetic construct
  misc_feature 1..20: note = chemically synthesized
  source 1..20: mol_type = other DNA
tcatttcatggcctatcata

SEQ ID NO: 18017 - DNA, 20 bp, synthetic construct
  misc_feature 1..20: note = chemically synthesized
  source 1..20: mol_type = other DNA
gcctatcatatggtctacct

SEQ ID NO: 18018 - DNA, 20 bp, synthetic construct
  misc_feature 1..20: note = chemically synthesized
  source 1..20: mol_type = other DNA
ctatcatatggtctaccttg

SEQ ID NO: 18019 - DNA, 20 bp, synthetic construct
  misc_feature 1..20: note = chemically synthesized
  source 1..20: mol_type = other DNA
aatttccacgcgctgttgaa

SEQ ID NO: 18020 - DNA, 20 bp, synthetic construct
  misc_feature 1..20: note = chemically synthesized
  source 1..20: mol_type = other DNA
tgaatagaatgtgtgttctg

SEQ ID NO: 18021 - DNA, 20 bp, synthetic construct
  misc_feature 1..20: note = chemically synthesized
  source 1..20: mol_type = other DNA
aatgtgtgttctgtggttat

SEQ ID NO: 18022 - DNA, 20 bp, synthetic construct
  misc_feature 1..20: note = chemically synthesized
  source 1..20: mol_type = other DNA
atgttctgtatataactgtt

SEQ ID NO: 18023 - DNA, 20 bp, synthetic construct
  misc_feature 1..20: note = chemically synthesized
  source 1..20: mol_type = other DNA
ctgttaagtccatttgttct

SEQ ID NO: 18024 - DNA, 20 bp, synthetic construct
  misc_feature 1..20: note = chemically synthesized
  source 1..20: mol_type = other DNA
tgttaagtccatttgttcta

SEQ ID NO: 18025 - DNA, 20 bp, synthetic construct
  misc_feature 1..20: note = chemically synthesized
  source 1..20: mol_type = other DNA
ttctgtcttgatgaactgtc

SEQ ID NO: 18026 - DNA, 20 bp, synthetic construct
  misc_feature 1..20: note = chemically synthesized
  source 1..20: mol_type = other DNA
actgtctagtgctgtcaatg

SEQ ID NO: 18027 - DNA, 20 bp, synthetic construct
  misc_feature 1..20: note = chemically synthesized
  source 1..20: mol_type = other DNA
gtgctgtcaatgaagtattg

SEQ ID NO: 18028 - DNA, 20 bp, synthetic construct
  misc_feature 1..20: note = chemically synthesized
  source 1..20: mol_type = other DNA
ttgctgtctatctcatttct

SEQ ID NO: 18029 - DNA, 20 bp, synthetic construct
  misc_feature 1..20: note = chemically synthesized
  source 1..20: mol_type = other DNA
tgctgtctatctcatttctt

SEQ ID NO: 18030 - DNA, 20 bp, synthetic construct
  misc_feature 1..20: note = chemically synthesized
  source 1..20: mol_type = other DNA
atctcatttcttaggtctat

SEQ ID NO: 18031 - DNA, 20 bp, synthetic construct
  misc_feature 1..20: note = chemically synthesized
  source 1..20: mol_type = other DNA
tagtaattgttctataaatt

SEQ ID NO: 18032 - DNA, 20 bp, synthetic construct
  misc_feature 1..20: note = chemically synthesized
  source 1..20: mol_type = other DNA
agtaattgttctataaattt

SEQ ID NO: 18033 - DNA, 20 bp, synthetic construct
  misc_feature 1..20: note = chemically synthesized
  source 1..20: mol_type = other DNA
taattgttctataaatttgg

SEQ ID NO: 18034 - DNA, 20 bp, synthetic construct
  misc_feature 1..20: note = chemically synthesized
  source 1..20: mol_type = other DNA
ttctataaatttgggagctc

SEQ ID NO: 18035 - DNA, 20 bp, synthetic construct
  misc_feature 1..20: note = chemically synthesized
  source 1..20: mol_type = other DNA
aaatttgggagctccagtgt

SEQ ID NO: 18036 - DNA, 20 bp, synthetic construct
  misc_feature 1..20: note = chemically synthesized
  source 1..20: mol_type = other DNA
aatttgggagctccagtgtt

SEQ ID NO: 18037 - DNA, 20 bp, synthetic construct
  misc_feature 1..20: note = chemically synthesized
  source 1..20: mol_type = other DNA
tgttaggtgcatatatgttt

SEQ ID NO: 18038 - DNA, 20 bp, synthetic construct
  misc_feature 1..20: note = chemically synthesized
  source 1..20: mol_type = other DNA
agattgtgatattttcctgt

SEQ ID NO: 18039 - DNA, 20 bp, synthetic construct
  misc_feature 1..20: note = chemically synthesized
  source 1..20: mol_type = other DNA
gtgatattttcctgttggac

SEQ ID NO: 18040 - DNA, 20 bp, synthetic construct
  misc_feature 1..20: note = chemically synthesized
  source 1..20: mol_type = other DNA
tgatattttcctgttggaca

SEQ ID NO: 18041 - DNA, 20 bp, synthetic construct
  misc_feature 1..20: note = chemically synthesized
  source 1..20: mol_type = other DNA
ttttaactgctgttgcttta

SEQ ID NO: 18042 - DNA, 20 bp, synthetic construct
  misc_feature 1..20: note = chemically synthesized
  source 1..20: mol_type = other DNA
ttgttttgcctactcacttt

SEQ ID NO: 18043 - DNA, 20 bp, synthetic construct
  misc_feature 1..20: note = chemically synthesized
  source 1..20: mol_type = other DNA
ttttgcctactcacttttgg

SEQ ID NO: 18044 - DNA, 20 bp, synthetic construct
  misc_feature 1..20: note = chemically synthesized
  source 1..20: mol_type = other DNA
aatacctttttcaccctttt

SEQ ID NO: 18045 - DNA, 20 bp, synthetic construct
  misc_feature 1..20: note = chemically synthesized
  source 1..20: mol_type = other DNA
acctttttcacccttttaag

SEQ ID NO: 18046 - DNA, 20 bp, synthetic construct
  misc_feature 1..20: note = chemically synthesized
  source 1..20: mol_type = other DNA
ctttttcacccttttaagtg

SEQ ID NO: 18047 - DNA, 20 bp, synthetic construct
  misc_feature 1..20: note = chemically synthesized
  source 1..20: mol_type = other DNA
acccttttaagtggagcatt

SEQ ID NO: 18048 - DNA, 20 bp, synthetic construct
  misc_feature 1..20: note = chemically synthesized
  source 1..20: mol_type = other DNA
cccttttaagtggagcattt

SEQ ID NO: 18049 - DNA, 20 bp, synthetic construct
  misc_feature 1..20: note = chemically synthesized
  source 1..20: mol_type = other DNA
aggccatttacattcaatgt

SEQ ID NO: 18050 - DNA, 20 bp, synthetic construct
  misc_feature 1..20: note = chemically synthesized
  source 1..20: mol_type = other DNA
atgttagtaatgtaaatgcc

SEQ ID NO: 18051 - DNA, 20 bp, synthetic construct
  misc_feature 1..20: note = chemically synthesized
  source 1..20: mol_type = other DNA
atgtaaatgcctggctatgc

SEQ ID NO: 18052 - DNA, 20 bp, synthetic construct
  misc_feature 1..20: note = chemically synthesized
  source 1..20: mol_type = other DNA
tgtaaatgcctggctatgcc

SEQ ID NO: 18053 - DNA, 20 bp, synthetic construct
  misc_feature 1..20: note = chemically synthesized
  source 1..20: mol_type = other DNA
aaatgcctggctatgccagg

SEQ ID NO: 18054 - DNA, 20 bp, synthetic construct
  misc_feature 1..20: note = chemically synthesized
  source 1..20: mol_type = other DNA
aatgcctggctatgccaggc

SEQ ID NO: 18055 - DNA, 20 bp, synthetic construct
  misc_feature 1..20: note = chemically synthesized
  source 1..20: mol_type = other DNA
ctggctatgccaggcaggaa

SEQ ID NO: 18056 - DNA, 20 bp, synthetic construct
  misc_feature 1..20: note = chemically synthesized
  source 1..20: mol_type = other DNA
ccaggcaggaatggcctgct

SEQ ID NO: 18057 - DNA, 20 bp, synthetic construct
  misc_feature 1..20: note = chemically synthesized
  source 1..20: mol_type = other DNA
caggcaggaatggcctgctc

SEQ ID NO: 18058 - DNA, 20 bp, synthetic construct
  misc_feature 1..20: note = chemically synthesized
  source 1..20: mol_type = other DNA
aggcaggaatggcctgctca

SEQ ID NO: 18059 - DNA, 20 bp, synthetic construct
  misc_feature 1..20: note = chemically synthesized
  source 1..20: mol_type = other DNA
gaatggcctgctcagggacc

SEQ ID NO: 18060 - DNA, 20 bp, synthetic construct
  misc_feature 1..20: note = chemically synthesized
  source 1..20: mol_type = other DNA
ggcctgctcagggacccagt

SEQ ID NO: 18061 - DNA, 20 bp, synthetic construct
  misc_feature 1..20: note = chemically synthesized
  source 1..20: mol_type = other DNA
tcagggacccagtgagctcc

SEQ ID NO: 18062 - DNA, 20 bp, synthetic construct
  misc_feature 1..20: note = chemically synthesized
  source 1..20: mol_type = other DNA
cagggacccagtgagctccc

SEQ ID NO: 18063 - DNA, 20 bp, synthetic construct
  misc_feature 1..20: note = chemically synthesized
  source 1..20: mol_type = other DNA
agggacccagtgagctccca

SEQ ID NO: 18064 - DNA, 20 bp, synthetic construct
  misc_feature 1..20: note = chemically synthesized
  source 1..20: mol_type = other DNA
ctctacacctgtattttgct

SEQ ID NO: 18065 - DNA, 20 bp, synthetic construct
  misc_feature 1..20: note = chemically synthesized
  source 1..20: mol_type = other DNA
tgtattttgctcagctctct

SEQ ID NO: 18066 - DNA, 20 bp, synthetic construct
  misc_feature 1..20: note = chemically synthesized
  source 1..20: mol_type = other DNA
tctctaagttaactcaactc

SEQ ID NO: 18067 - DNA, 20 bp, synthetic construct
  misc_feature 1..20: note = chemically synthesized
  source 1..20: mol_type = other DNA
ctctaagttaactcaactcc

SEQ ID NO: 18068 - DNA, 20 bp, synthetic construct
  misc_feature 1..20: note = chemically synthesized
  source 1..20: mol_type = other DNA
aagttaactcaactccaggt

SEQ ID NO: 18069 - DNA, 20 bp, synthetic construct
  misc_feature 1..20: note = chemically synthesized
  source 1..20: mol_type = other DNA
agttaactcaactccaggta

SEQ ID NO: 18070 - DNA, 20 bp, synthetic construct
  misc_feature 1..20: note = chemically synthesized
  source 1..20: mol_type = other DNA
aactcaactccaggtaaggt

SEQ ID NO: 18071 - DNA, 20 bp, synthetic construct
  misc_feature 1..20: note = chemically synthesized
  source 1..20: mol_type = other DNA
tcagaaacttctcccacaaa

SEQ ID NO: 18072 - DNA, 20 bp, synthetic construct
  misc_feature 1..20: note = chemically synthesized
  source 1..20: mol_type = other DNA
ttctcccacaaacagacctt

SEQ ID NO: 18073 - DNA, 20 bp, synthetic construct
  misc_feature 1..20: note = chemically synthesized
  source 1..20: mol_type = other DNA
aaacagaccttcagtttctc

SEQ ID NO: 18074 - DNA, 20 bp, synthetic construct
  misc_feature 1..20: note = chemically synthesized
  source 1..20: mol_type = other DNA
cagaccttcagtttctccag

SEQ ID NO: 18075 - DNA, 20 bp, synthetic construct
  misc_feature 1..20: note = chemically synthesized
  source 1..20: mol_type = other DNA
agaccttcagtttctccagt

SEQ ID NO: 18076 - DNA, 20 bp, synthetic construct
  misc_feature 1..20: note = chemically synthesized
  source 1..20: mol_type = other DNA
accttcagtttctccagtgg

SEQ ID NO: 18077 - DNA, 20 bp, synthetic construct
  misc_feature 1..20: note = chemically synthesized
  source 1..20: mol_type = other DNA
ctccagtgggagtgtgtgtt

SEQ ID NO: 18078 - DNA, 20 bp, synthetic construct
  misc_feature 1..20: note = chemically synthesized
  source 1..20: mol_type = other DNA
tccagtgggagtgtgtgttt

SEQ ID NO: 18079 - DNA, 20 bp, synthetic construct
  misc_feature 1..20: note = chemically synthesized
  source 1..20: mol_type = other DNA
cagtgggagtgtgtgtttag

SEQ ID NO: 18080 - DNA, 20 bp, synthetic construct
  misc_feature 1..20: note = chemically synthesized
  source 1..20: mol_type = other DNA
gtgggagtgtgtgtttagga

SEQ ID NO: 18081 - DNA, 20 bp, synthetic construct
  misc_feature 1..20: note = chemically synthesized
  source 1..20: mol_type = other DNA
tgggagtgtgtgtttaggag

SEQ ID NO: 18082 - DNA, 20 bp, synthetic construct
  misc_feature 1..20: note = chemically synthesized
  source 1..20: mol_type = other DNA
ggagtgtgtgtttaggagag

SEQ ID NO: 18083 - DNA, 20 bp, synthetic construct
  misc_feature 1..20: note = chemically synthesized
  source 1..20: mol_type = other DNA
gagtgtgtgtttaggagagg

SEQ ID NO: 18084 - DNA, 20 bp, synthetic construct
  misc_feature 1..20: note = chemically synthesized
  source 1..20: mol_type = other DNA
atctccctttcccacttccg

SEQ ID NO: 18085 - DNA, 20 bp, synthetic construct
  misc_feature 1..20: note = chemically synthesized
  source 1..20: mol_type = other DNA
ccctttcccacttccgcagt

SEQ ID NO: 18086 - DNA, 20 bp, synthetic construct
  misc_feature 1..20: note = chemically synthesized
  source 1..20: mol_type = other DNA
cctttcccacttccgcagtt

SEQ ID NO: 18087 - DNA, 20 bp, synthetic construct
  misc_feature 1..20: note = chemically synthesized
  source 1..20: mol_type = other DNA
ctttcccacttccgcagttg

SEQ ID NO: 18088 - DNA, 20 bp, synthetic construct
  misc_feature 1..20: note = chemically synthesized
  source 1..20: mol_type = other DNA
ttccgcagttggggcactca

SEQ ID NO: 18089 - DNA, 20 bp, synthetic construct
  misc_feature 1..20: note = chemically synthesized
  source 1..20: mol_type = other DNA
gttggggcactcacagtatt

SEQ ID NO: 18090 - DNA, 20 bp, synthetic construct
  misc_feature 1..20: note = chemically synthesized
  source 1..20: mol_type = other DNA
ttggggcactcacagtattt

SEQ ID NO: 18091 - DNA, 20 bp, synthetic construct
  misc_feature 1..20: note = chemically synthesized
  source 1..20: mol_type = other DNA
tggggcactcacagtatttg

SEQ ID NO: 18092 - DNA, 20 bp, synthetic construct
  misc_feature 1..20: note = chemically synthesized
  source 1..20: mol_type = other DNA
acagtatttggggtgtctcc

SEQ ID NO: 18093 - DNA, 20 bp, synthetic construct
  misc_feature 1..20: note = chemically synthesized
  source 1..20: mol_type = other DNA
cagtatttggggtgtctcct

SEQ ID NO: 18094 - DNA, 20 bp, synthetic construct
  misc_feature 1..20: note = chemically synthesized
  source 1..20: mol_type = other DNA
ggggtgtctcctgggtcctg

SEQ ID NO: 18095 - DNA, 20 bp, synthetic construct
  misc_feature 1..20: note = chemically synthesized
  source 1..20: mol_type = other DNA
gggtgtctcctgggtcctgc

SEQ ID NO: 18096 - DNA, 20 bp, synthetic construct
  misc_feature 1..20: note = chemically synthesized
  source 1..20: mol_type = other DNA
gtgtctcctgggtcctgcag

SEQ ID NO: 18097 - DNA, 20 bp, synthetic construct
  misc_feature 1..20: note = chemically synthesized
  source 1..20: mol_type = other DNA
caggagcaatctacttcctt

SEQ ID NO: 18098 - DNA, 20 bp, synthetic construct
  misc_feature 1..20: note = chemically synthesized
  source 1..20: mol_type = other DNA
ggagcaatctacttccttca

SEQ ID NO: 18099 - DNA, 20 bp, synthetic construct
  misc_feature 1..20: note = chemically synthesized
  source 1..20: mol_type = other DNA
gagcaatctacttccttcag

SEQ ID NO: 18100 - DNA, 20 bp, synthetic construct
  misc_feature 1..20: note = chemically synthesized
  source 1..20: mol_type = other DNA
agcaatctacttccttcaga

SEQ ID NO: 18101 - DNA, 20 bp, synthetic construct
  misc_feature 1..20: note = chemically synthesized
  source 1..20: mol_type = other DNA
tacttccttcagagggtctg

SEQ ID NO: 18102 - DNA, 20 bp, synthetic construct
  misc_feature 1..20: note = chemically synthesized
  source 1..20: mol_type = other DNA
acttccttcagagggtctgt

SEQ ID NO: 18103 - DNA, 20 bp, synthetic construct
  misc_feature 1..20: note = chemically synthesized
  source 1..20: mol_type = other DNA
agagggtctgtgggtcctct

SEQ ID NO: 18104 - DNA, 20 bp, synthetic construct
  misc_feature 1..20: note = chemically synthesized
  source 1..20: mol_type = other DNA
gagggtctgtgggtcctctc

SEQ ID NO: 18105 - DNA, 20 bp, synthetic construct
  misc_feature 1..20: note = chemically synthesized
  source 1..20: mol_type = other DNA
gtgggtcctctcaggattgc

SEQ ID NO: 18106 - DNA, 20 bp, synthetic construct
  misc_feature 1..20: note = chemically synthesized
  source 1..20: mol_type = other DNA
ggattgctggtttgttcttg

SEQ ID NO: 18107 - DNA, 20 bp, synthetic construct
  misc_feature 1..20: note = chemically synthesized
  source 1..20: mol_type = other DNA
ttgttcttgcagtctatctg

SEQ ID NO: 18108 - DNA, 20 bp, synthetic construct
  misc_feature 1..20: note = chemically synthesized
  source 1..20: mol_type = other DNA
gcagctaaaattcacaatgc

SEQ ID NO: 18109 - DNA, 20 bp, synthetic construct
  misc_feature 1..20: note = chemically synthesized
  source 1..20: mol_type = other DNA
acatgctgctctgtccatct

SEQ ID NO: 18110 - DNA, 20 bp, synthetic construct
  misc_feature 1..20: note = chemically synthesized
  source 1..20: mol_type = other DNA
gctgctctgtccatctgagt

SEQ ID NO: 18111 - DNA, 20 bp, synthetic construct
  misc_feature 1..20: note = chemically synthesized
  source 1..20: mol_type = other DNA
tgctctgtccatctgagttg

SEQ ID NO: 18112 - DNA, 20 bp, synthetic construct
  misc_feature 1..20: note = chemically synthesized
  source 1..20: mol_type = other DNA
tctgagttggagctgcaatc

SEQ ID NO: 18113 - DNA, 20 bp, synthetic construct
  misc_feature 1..20: note = chemically synthesized
  source 1..20: mol_type = other DNA
ctgagttggagctgcaatct

SEQ ID NO: 18114 - DNA, 20 bp, synthetic construct
  misc_feature 1..20: note = chemically synthesized
  source 1..20: mol_type = other DNA
aggcctacctcccatccgcc

SEQ ID NO: 18115 - DNA, 20 bp, synthetic construct
  misc_feature 1..20: note = chemically synthesized
  source 1..20: mol_type = other DNA
ctcccatccgccaagatcct

SEQ ID NO: 18116 - DNA, 20 bp, synthetic construct
  misc_feature 1..20: note = chemically synthesized
  source 1..20: mol_type = other DNA
ccatccgccaagatcctgag

SEQ ID NO: 18117 - DNA, 20 bp, synthetic construct
  misc_feature 1..20: note = chemically synthesized
  source 1..20: mol_type = other DNA
ccgccaagatcctgagaagt

SEQ ID NO: 18118 - DNA, 20 bp, synthetic construct
  misc_feature 1..20: note = chemically synthesized
  source 1..20: mol_type = other DNA
cgccaagatcctgagaagtt

SEQ ID NO: 18119 - DNA, 20 bp, synthetic construct
  misc_feature 1..20: note = chemically synthesized
  source 1..20: mol_type = other DNA
gccaagatcctgagaagttg

SEQ ID NO: 18120 - DNA, 20 bp, synthetic construct
  misc_feature 1..20: note = chemically synthesized
  source 1..20: mol_type = other DNA
tggggattatatttcaacat

SEQ ID NO: 18121 - DNA, 20 bp, synthetic construct
  misc_feature 1..20: note = chemically synthesized
  source 1..20: mol_type = other DNA
ttatatttcaacatgagatt

SEQ ID NO: 18122 - DNA, 20 bp, synthetic construct
  misc_feature 1..20: note = chemically synthesized
  source 1..20: mol_type = other DNA
atatttcaacatgagatttg

SEQ ID NO: 18123 - DNA, 20 bp, synthetic construct
  misc_feature 1..20: note = chemically synthesized
  source 1..20: mol_type = other DNA
tatttcaacatgagatttgg

SEQ ID NO: 18124 - DNA, 20 bp, synthetic construct
  misc_feature 1..20: note = chemically synthesized
  source 1..20: mol_type = other DNA
atttcaacatgagatttgga

SEQ ID NO: 18125 - DNA, 20 bp, synthetic construct
  misc_feature 1..20: note = chemically synthesized
  source 1..20: mol_type = other DNA
aacaaacatccaaaccatat

SEQ ID NO: 18126 - DNA, 20 bp, synthetic construct
  misc_feature 1..20: note = chemically synthesized
  source 1..20: mol_type = other DNA
aaacatccaaaccatatcag

SEQ ID NO: 18127 - DNA, 20 bp, synthetic construct
  misc_feature 1..20: note = chemically synthesized
  source 1..20: mol_type = other DNA
tccaaaccatatcagcagtc

SEQ ID NO: 18128 - DNA, 20 bp, synthetic construct
  misc_feature 1..20: note = chemically synthesized
  source 1..20: mol_type = other DNA
cagttttattcttttgcaca

SEQ ID NO: 18129 - DNA, 20 bp, synthetic construct
  misc_feature 1..20: note = chemically synthesized
  source 1..20: mol_type = other DNA
ttttgcacatggatatccaa

SEQ ID NO: 18130 - DNA, 20 bp, synthetic construct
  misc_feature 1..20: note = chemically synthesized
  source 1..20: mol_type = other DNA
caatggatatccaatttttt

SEQ ID NO: 18131 - DNA, 20 bp, synthetic construct
  misc_feature 1..20: note = chemically synthesized
  source 1..20: mol_type = other DNA
cacctttgttgaaaatctgt

SEQ ID NO: 18132 - DNA, 20 bp, synthetic construct
  misc_feature 1..20: note = chemically synthesized
  source 1..20: mol_type = other DNA
atctgttggctataaatatg

SEQ ID NO: 18133 - DNA, 20 bp, synthetic construct
  misc_feature 1..20: note = chemically synthesized
  source 1..20: mol_type = other DNA
taaatatgtggatgcatttc

SEQ ID NO: 18134 - DNA, 20 bp, synthetic construct
  misc_feature 1..20: note = chemically synthesized
  source 1..20: mol_type = other DNA
aaatatgtggatgcatttct

SEQ ID NO: 18135 - DNA, 20 bp, synthetic construct
  misc_feature 1..20: note = chemically synthesized
  source 1..20: mol_type = other DNA
ggttctctattctcttccat

SEQ ID NO: 18136 - DNA, 20 bp, synthetic construct
  misc_feature 1..20: note = chemically synthesized
  source 1..20: mol_type = other DNA
ctattctcttccattggtct

SEQ ID NO: 18137 - DNA, 20 bp, synthetic construct
  misc_feature 1..20: note = chemically synthesized
  source 1..20: mol_type = other DNA
ctaagtgtctgttctaatgt

SEQ ID NO: 18138 - DNA, 20 bp, synthetic construct
  misc_feature 1..20: note = chemically synthesized
  source 1..20: mol_type = other DNA
aatgtcagtatcatgctgtt

SEQ ID NO: 18139 - DNA, 20 bp, synthetic construct
  misc_feature 1..20: note = chemically synthesized
  source 1..20: mol_type = other DNA
atgtcagtatcatgctgttt

SEQ ID NO: 18140 - DNA, 20 bp, synthetic construct
  misc_feature 1..20: note = chemically synthesized
  source 1..20: mol_type = other DNA
tttgtaatatactttgaaat

SEQ ID NO: 18141 - DNA, 20 bp, synthetic construct
  misc_feature 1..20: note = chemically synthesized
  source 1..20: mol_type = other DNA
ttgtaatatactttgaaatc

SEQ ID NO: 18142 - DNA, 20 bp, synthetic construct
  misc_feature 1..20: note = chemically synthesized
  source 1..20: mol_type = other DNA
taatatactttgaaatcagg

SEQ ID NO: 18143 - DNA, 20 bp, synthetic construct
  misc_feature 1..20: note = chemically synthesized
  source 1..20: mol_type = other DNA
atcaggtagtatgatacctc

SEQ ID NO: 18144 - DNA, 20 bp, synthetic construct
  misc_feature 1..20: note = chemically synthesized
  source 1..20: mol_type = other DNA
ctagcattgttcttttttca

SEQ ID NO: 18145 - DNA, 20 bp, synthetic construct
  misc_feature 1..20: note = chemically synthesized
  source 1..20: mol_type = other DNA
tagcattgttcttttttcac

SEQ ID NO: 18146 - DNA, 20 bp, synthetic construct
  misc_feature 1..20: note = chemically synthesized
  source 1..20: mol_type = other DNA
cttttttcacaggatgactt

SEQ ID NO: 18147 - DNA, 20 bp, synthetic construct
  misc_feature 1..20: note = chemically synthesized
  source 1..20: mol_type = other DNA
cacaggatgactttggctac

SEQ ID NO: 18148 - DNA, 20 bp, synthetic construct
  misc_feature 1..20: note = chemically synthesized
  source 1..20: mol_type = other DNA
caggatgactttggctactg

SEQ ID NO: 18149 - DNA, 20 bp, synthetic construct
  misc_feature 1..20: note = chemically synthesized
  source 1..20: mol_type = other DNA
ttttaatttcatacaaattt

SEQ ID NO: 18150 - DNA, 20 bp, synthetic construct
  misc_feature 1..20: note = chemically synthesized
  source 1..20: mol_type = other DNA
atttcatacaaattttagat

SEQ ID NO: 18151 - DNA, 20 bp, synthetic construct
  misc_feature 1..20: note = chemically synthesized
  source 1..20: mol_type = other DNA
aaatgacattgctattttga

SEQ ID NO: 18152 - DNA, 20 bp, synthetic construct
  misc_feature 1..20: note = chemically synthesized
  source 1..20: mol_type = other DNA
tgacattgctattttgatag

SEQ ID NO: 18153 - DNA, 20 bp, synthetic construct
  misc_feature 1..20: note = chemically synthesized
  source 1..20: mol_type = other DNA
ctattttgatagcggtcata

SEQ ID NO: 18154 - DNA, 20 bp, synthetic construct
  misc_feature 1..20: note = chemically synthesized
  source 1..20: mol_type = other DNA
tagcggtcatatagaatctg

SEQ ID NO: 18155 - DNA, 20 bp, synthetic construct
  misc_feature 1..20: note = chemically synthesized
  source 1..20: mol_type = other DNA
atagaatctgtagattgctt

SEQ ID NO: 18156 - DNA, 20 bp, synthetic construct
  misc_feature 1..20: note = chemically synthesized
  source 1..20: mol_type = other DNA
tagaatctgtagattgcttt

SEQ ID NO: 18157 - DNA, 20 bp, synthetic construct
  misc_feature 1..20: note = chemically synthesized
  source 1..20: mol_type = other DNA
aatctgtagattgctttggg

SEQ ID NO: 18158 - DNA, 20 bp, synthetic construct
  misc_feature 1..20: note = chemically synthesized
  source 1..20: mol_type = other DNA
gtagattgctttgggtagta

SEQ ID NO: 18159 - DNA, 20 bp, synthetic construct
  misc_feature 1..20: note = chemically synthesized
  source 1..20: mol_type = other DNA
atttttctgatccatgaaca

SEQ ID NO: 18160 - DNA, 20 bp, synthetic construct
  misc_feature 1..20: note = chemically synthesized
  source 1..20: mol_type = other DNA
tttttctgatccatgaacat

SEQ ID NO: 18161 - DNA, 20 bp, synthetic construct
  misc_feature 1..20: note = chemically synthesized
  source 1..20: mol_type = other DNA
gtccttttcaattcttttat

SEQ ID NO: 18162 - DNA, 20 bp, synthetic construct
  misc_feature 1..20: note = chemically synthesized
  source 1..20: mol_type = other DNA
attcttttatcagtgttttg

SEQ ID NO: 18163 - DNA, 20 bp, synthetic construct
  misc_feature 1..20: note = chemically synthesized
  source 1..20: mol_type = other DNA
gtgttttgtagttttccgaa

SEQ ID NO: 18164 - DNA, 20 bp, synthetic construct
  misc_feature 1..20: note = chemically synthesized
  source 1..20: mol_type = other DNA
gttttgtagttttccgaata

SEQ ID NO: 18165 - DNA, 20 bp, synthetic construct
  misc_feature 1..20: note = chemically synthesized
  source 1..20: mol_type = other DNA
ttttgtagttttccgaatag

SEQ ID NO: 18166 - DNA, 20 bp, synthetic construct
  misc_feature 1..20: note = chemically synthesized
  source 1..20: mol_type = other DNA
ttttccgaatagaggttttt

SEQ ID NO: 18167 - DNA, 20 bp, synthetic construct
  misc_feature 1..20: note = chemically synthesized
  source 1..20: mol_type = other DNA
atagaggtttttcggttcct

SEQ ID NO: 18168 - DNA, 20 bp, synthetic construct
  misc_feature 1..20: note = chemically synthesized
  source 1..20: mol_type = other DNA
tccctaaatattttattttt

SEQ ID NO: 18169 - DNA, 20 bp, synthetic construct
  misc_feature 1..20: note = chemically synthesized
  source 1..20: mol_type = other DNA
tattttttagctattgtaaa

SEQ ID NO: 18170 - DNA, 20 bp, synthetic construct
  misc_feature 1..20: note = chemically synthesized
  source 1..20: mol_type = other DNA
attttttagctattgtaaat

SEQ ID NO: 18171 - DNA, 20 bp, synthetic construct
  misc_feature 1..20: note = chemically synthesized
  source 1..20: mol_type = other DNA
tgccttcttaatttccttct

SEQ ID NO: 18172 - DNA, 20 bp, synthetic construct
  misc_feature 1..20: note = chemically synthesized
  source 1..20: mol_type = other DNA
ttcttaatttccttctcagc

SEQ ID NO: 18173 - DNA, 20 bp, synthetic construct
  misc_feature 1..20: note = chemically synthesized
  source 1..20: mol_type = other DNA
cttctcagctagtttattat

SEQ ID NO: 18174 - DNA, 20 bp, synthetic construct
  misc_feature 1..20: note = chemically synthesized
  source 1..20: mol_type = other DNA
gctagtttattattggtgtg

SEQ ID NO: 18175 - DNA, 20 bp, synthetic construct
  misc_feature 1..20: note = chemically synthesized
  source 1..20: mol_type = other DNA
actttactgaatttattttt

SEQ ID NO: 18176 - DNA, 20 bp, synthetic construct
  misc_feature 1..20: note = chemically synthesized
  source 1..20: mol_type = other DNA
tgaatttatttttcagcgct

SEQ ID NO: 18177 - DNA, 20 bp, synthetic construct
  misc_feature 1..20: note = chemically synthesized
  source 1..20: mol_type = other DNA
aatttatttttcagcgctaa

SEQ ID NO: 18178 - DNA, 20 bp, synthetic construct
  misc_feature 1..20: note = chemically synthesized
  source 1..20: mol_type = other DNA
tttcagcgctaagagtgctt

SEQ ID NO: 18179 - DNA, 20 bp, synthetic construct
  misc_feature 1..20: note = chemically synthesized
  source 1..20: mol_type = other DNA
cagcgctaagagtgctttgg

SEQ ID NO: 18180 - DNA, 20 bp, synthetic construct
  misc_feature 1..20: note = chemically synthesized
  source 1..20: mol_type = other DNA
gcgctaagagtgctttggtg

SEQ ID NO: 18181 - DNA, 20 bp, synthetic construct
  misc_feature 1..20: note = chemically synthesized
  source 1..20: mol_type = other DNA
agagtgctttggtggagtct

SEQ ID NO: 18182 - DNA, 20 bp, synthetic construct
  misc_feature 1..20: note = chemically synthesized
  source 1..20: mol_type = other DNA
tggtggagtcttggtttttc

SEQ ID NO: 18183 - DNA, 20 bp, synthetic construct
  misc_feature 1..20: note = chemically synthesized
  source 1..20: mol_type = other DNA
ggtggagtcttggtttttct

SEQ ID NO: 18184 - DNA, 20 bp, synthetic construct
  misc_feature 1..20: note = chemically synthesized
  source 1..20: mol_type = other DNA
aggtataaaatcatgtcatc

SEQ ID NO: 18185 - DNA, 20 bp, synthetic construct
  misc_feature 1..20: note = chemically synthesized
  source 1..20: mol_type = other DNA
ataaaatcatgtcatctgga

SEQ ID NO: 18186 - DNA, 20 bp, synthetic construct
  misc_feature 1..20: note = chemically synthesized
  source 1..20: mol_type = other DNA
aatcatgtcatctggaaaga

SEQ ID NO: 18187 - DNA, 20 bp, synthetic construct
  misc_feature 1..20: note = chemically synthesized
  source 1..20: mol_type = other DNA
atgtcatctggaaagatgga

SEQ ID NO: 18188 - DNA, 20 bp, synthetic construct
  misc_feature 1..20: note = chemically synthesized
  source 1..20: mol_type = other DNA
tctttctttctctgacctga

SEQ ID NO: 18189 - DNA, 20 bp, synthetic construct
  misc_feature 1..20: note = chemically synthesized
  source 1..20: mol_type = other DNA
tttctctgacctgaaagctg

SEQ ID NO: 18190 - DNA, 20 bp, synthetic construct
  misc_feature 1..20: note = chemically synthesized
  source 1..20: mol_type = other DNA
tctgacctgaaagctgtggc

SEQ ID NO: 18191 - DNA, 20 bp, synthetic construct
  misc_feature 1..20: note = chemically synthesized
  source 1..20: mol_type = other DNA
ctgacctgaaagctgtggct

SEQ ID NO: 18192 - DNA, 20 bp, synthetic construct
  misc_feature 1..20: note = chemically synthesized
  source 1..20: mol_type = other DNA
aaagctgtggctaggacttc

SEQ ID NO: 18193 - DNA, 20 bp, synthetic construct
  misc_feature 1..20: note = chemically synthesized
  source 1..20: mol_type = other DNA
acttccagtattatattgaa

SEQ ID NO: 18194 - DNA, 20 bp, synthetic construct
  misc_feature 1..20: note = chemically synthesized
  source 1..20: mol_type = other DNA
cttccagtattatattgaat

SEQ ID NO: 18195 - DNA, 20 bp, synthetic construct
  misc_feature 1..20: note = chemically synthesized
  source 1..20: mol_type = other DNA
tccagtattatattgaatag

SEQ ID NO: 18196 - DNA, 20 bp, synthetic construct
  misc_feature 1..20: note = chemically synthesized
  source 1..20: mol_type = other DNA
attatattgaataggagtga

SEQ ID NO: 18197 - DNA, 20 bp, synthetic construct
  misc_feature 1..20: note = chemically synthesized
  source 1..20: mol_type = other DNA
atattgaataggagtgatgg

SEQ ID NO: 18198 - DNA, 20 bp, synthetic construct
  misc_feature 1..20: note = chemically synthesized
  source 1..20: mol_type = other DNA
ttgaataggagtgatggaag

SEQ ID NO: 18199 - DNA, 20 bp, synthetic construct
  misc_feature 1..20: note = chemically synthesized
  source 1..20: mol_type = other DNA
tgaataggagtgatggaagt

SEQ ID NO: 18200 - DNA, 20 bp, synthetic construct
  misc_feature 1..20: note = chemically synthesized
  source 1..20: mol_type = other DNA
tgggcatccttattttgttt

SEQ ID NO: 18201 - DNA, 20 bp, synthetic construct
  misc_feature 1..20: note = chemically synthesized
  source 1..20: mol_type = other DNA
ccttattttgtttcagttct

SEQ ID NO: 18202 - DNA, 20 bp, synthetic construct
  misc_feature 1..20: note = chemically synthesized
  source 1..20: mol_type = other DNA
ttattttgtttcagttctta

SEQ ID NO: 18203 - DNA, 20 bp, synthetic construct
  misc_feature 1..20: note = chemically synthesized
  source 1..20: mol_type = other DNA
tattttgtttcagttcttag

SEQ ID NO: 18204 - DNA, 20 bp, synthetic construct
  misc_feature 1..20: note = chemically synthesized
  source 1..20: mol_type = other DNA
ttgtttcagttcttagagga

SEQ ID NO: 18205 - DNA, 20 bp, synthetic construct
  misc_feature 1..20: note = chemically synthesized
  source 1..20: mol_type = other DNA
tgtttcagttcttagaggaa

SEQ ID NO: 18206 - DNA, 20 bp, synthetic construct
  misc_feature 1..20: note = chemically synthesized
  source 1..20: mol_type = other DNA
gttcttagaggaaaggcttc

SEQ ID NO: 18207 - DNA, 20 bp, synthetic construct
  misc_feature 1..20: note = chemically synthesized
  source 1..20: mol_type = other DNA
gcttccagcttttcccaatt

SEQ ID NO: 18208 - DNA, 20 bp, synthetic construct
  misc_feature 1..20: note = chemically synthesized
  source 1..20: mol_type = other DNA
ttcccaattcagtatgatgt

SEQ ID NO: 18209 - DNA, 20 bp, synthetic construct
  misc_feature 1..20: note = chemically synthesized
  source 1..20: mol_type = other DNA
attcagtatgatgttagctg

SEQ ID NO: 18210 - DNA, 20 bp, synthetic construct
  misc_feature 1..20: note = chemically synthesized
  source 1..20: mol_type = other DNA
ttcagtatgatgttagctgt

SEQ ID NO: 18211 - DNA, 20 bp, synthetic construct
  misc_feature 1..20: note = chemically synthesized
  source 1..20: mol_type = other DNA
tatatgacttttattatatt

SEQ ID NO: 18212 - DNA, 20 bp, synthetic construct
  misc_feature 1..20: note = chemically synthesized
  source 1..20: mol_type = other DNA
agatatgttccttctatgat

SEQ ID NO: 18213 - DNA, 20 bp, synthetic construct
  misc_feature 1..20: note = chemically synthesized
  source 1..20: mol_type = other DNA
gttccttctatgattggctg

SEQ ID NO: 18214 - DNA, 20 bp, synthetic construct
  misc_feature 1..20: note = chemically synthesized
  source 1..20: mol_type = other DNA
cttctatgattggctgcaga

SEQ ID NO: 18215 - DNA, 20 bp, synthetic construct
  misc_feature 1..20: note = chemically synthesized
  source 1..20: mol_type = other DNA
tgcagatagtttttatcatg

SEQ ID NO: 18216 - DNA, 20 bp, synthetic construct
  misc_feature 1..20: note = chemically synthesized
  source 1..20: mol_type = other DNA
gcagatagtttttatcatga

SEQ ID NO: 18217 - DNA, 20 bp, synthetic construct
  misc_feature 1..20: note = chemically synthesized
  source 1..20: mol_type = other DNA
atactttttctgtatctatt

SEQ ID NO: 18218 - DNA, 20 bp, synthetic construct
  misc_feature 1..20: note = chemically synthesized
  source 1..20: mol_type = other DNA
tatctattgagatgatcata

SEQ ID NO: 18219 - DNA, 20 bp, synthetic construct
  misc_feature 1..20: note = chemically synthesized
  source 1..20: mol_type = other DNA
ttgaactgttcttgcaaccc

SEQ ID NO: 18220 - DNA, 20 bp, synthetic construct
  misc_feature 1..20: note = chemically synthesized
  source 1..20: mol_type = other DNA
gtataaatcccacttgatca

SEQ ID NO: 18221 - DNA, 20 bp, synthetic construct
  misc_feature 1..20: note = chemically synthesized
  source 1..20: mol_type = other DNA
gatcatggtgtattatcttt

SEQ ID NO: 18222 - DNA, 20 bp, synthetic construct
  misc_feature 1..20: note = chemically synthesized
  source 1..20: mol_type = other DNA
ttatcttttggatgtactgt

SEQ ID NO: 18223 - DNA, 20 bp, synthetic construct
  misc_feature 1..20: note = chemically synthesized
  source 1..20: mol_type = other DNA
tttggatgtactgttggatt

SEQ ID NO: 18224 - DNA, 20 bp, synthetic construct
  misc_feature 1..20: note = chemically synthesized
  source 1..20: mol_type = other DNA
tactgttggattcagtttgc

SEQ ID NO: 18225 - DNA, 20 bp, synthetic construct
  misc_feature 1..20: note = chemically synthesized
  source 1..20: mol_type = other DNA
cagtttgctagtattttgtt

SEQ ID NO: 18226 - DNA, 20 bp, synthetic construct
  misc_feature 1..20: note = chemically synthesized
  source 1..20: mol_type = other DNA
agtttgctagtattttgttg

SEQ ID NO: 18227 - DNA, 20 bp, synthetic construct
  misc_feature 1..20: note = chemically synthesized
  source 1..20: mol_type = other DNA
ttttcacacctatgttccat

SEQ ID NO: 18228 - DNA, 20 bp, synthetic construct
  misc_feature 1..20: note = chemically synthesized
  source 1..20: mol_type = other DNA
tttcacacctatgttccatc

SEQ ID NO: 18229 - DNA, 20 bp, synthetic construct
  misc_feature 1..20: note = chemically synthesized
  source 1..20: mol_type = other DNA
ttcacacctatgttccatca

SEQ ID NO: 18230 - DNA, 20 bp, synthetic construct
  misc_feature 1..20: note = chemically synthesized
  source 1..20: mol_type = other DNA
ccatcagggatattgacctg

SEQ ID NO: 18231 - DNA, 20 bp, synthetic construct
  misc_feature 1..20: note = chemically synthesized
  source 1..20: mol_type = other DNA
tttttacttgcatccttgtc

SEQ ID NO: 18232 - DNA, 20 bp, synthetic construct
  misc_feature 1..20: note = chemically synthesized
  source 1..20: mol_type = other DNA
cttgcatccttgtctggtta

SEQ ID NO: 18233 - DNA, 20 bp, synthetic construct
  misc_feature 1..20: note = chemically synthesized
  source 1..20: mol_type = other DNA
tccttgtctggttatggaat

SEQ ID NO: 18234 - DNA, 20 bp, synthetic construct
  misc_feature 1..20: note = chemically synthesized
  source 1..20: mol_type = other DNA
ccttgtctggttatggaatc

SEQ ID NO: 18235 - DNA, 20 bp, synthetic construct
  misc_feature 1..20: note = chemically synthesized
  source 1..20: mol_type = other DNA
ttatggaatcaggataatac

SEQ ID NO: 18236 - DNA, 20 bp, synthetic construct
  misc_feature 1..20: note = chemically synthesized
  source 1..20: mol_type = other DNA
aatcaggataatactggcct

SEQ ID NO: 18237 - DNA, 20 bp, synthetic construct
  misc_feature 1..20: note = chemically synthesized
  source 1..20: mol_type = other DNA
tcaggataatactggcctca

SEQ ID NO: 18238 - DNA, 20 bp, synthetic construct
  misc_feature 1..20: note = chemically synthesized
  source 1..20: mol_type = other DNA
taatactggcctcagagaat

SEQ ID NO: 18239 - DNA, 20 bp, synthetic construct
  misc_feature 1..20: note = chemically synthesized
  source 1..20: mol_type = other DNA
actggcctcagagaatgagt

SEQ ID NO: 18240 - DNA, 20 bp, synthetic construct
  misc_feature 1..20: note = chemically synthesized
  source 1..20: mol_type = other DNA
ctggcctcagagaatgagtt

SEQ ID NO: 18241 - DNA, 20 bp, synthetic construct
  misc_feature 1..20: note = chemically synthesized
  source 1..20: mol_type = other DNA
tggcctcagagaatgagtta

SEQ ID NO: 18242 - DNA, 20 bp, synthetic construct
  misc_feature 1..20: note = chemically synthesized
  source 1..20: mol_type = other DNA
gcctcagagaatgagttagg

SEQ ID NO: 18243 - DNA, 20 bp, synthetic construct
  misc_feature 1..20: note = chemically synthesized
  source 1..20: mol_type = other DNA
ccttcctgtttaatttttaa

SEQ ID NO: 18244 - DNA, 20 bp, synthetic construct
  misc_feature 1..20: note = chemically synthesized
  source 1..20: mol_type = other DNA
tttaatttttaaaagaattt

SEQ ID NO: 18245 - DNA, 20 bp, synthetic construct
  misc_feature 1..20: note = chemically synthesized
  source 1..20: mol_type = other DNA
ttaatttttaaaagaattta

SEQ ID NO: 18246 - DNA, 20 bp, synthetic construct
  misc_feature 1..20: note = chemically synthesized
  source 1..20: mol_type = other DNA
aatttttaaaagaatttaag

SEQ ID NO: 18247 - DNA, 20 bp, synthetic construct
  misc_feature 1..20: note = chemically synthesized
  source 1..20: mol_type = other DNA
aagaatttaaggagacttgt

SEQ ID NO: 18248 - DNA, 20 bp, synthetic construct
  misc_feature 1..20: note = chemically synthesized
  source 1..20: mol_type = other DNA
gacttgttagttttctttga

SEQ ID NO: 18249 - DNA, 20 bp, synthetic construct
  misc_feature 1..20: note = chemically synthesized
  source 1..20: mol_type = other DNA
gttagttttctttgaaagtt

SEQ ID NO: 18250 - DNA, 20 bp, synthetic construct
  misc_feature 1..20: note = chemically synthesized
  source 1..20: mol_type = other DNA
gaaagtttggtaaaatttga

SEQ ID NO: 18251 - DNA, 20 bp, synthetic construct
  misc_feature 1..20: note = chemically synthesized
  source 1..20: mol_type = other DNA
tttggtaaaatttgacagta

SEQ ID NO: 18252 - DNA, 20 bp, synthetic construct
  misc_feature 1..20: note = chemically synthesized
  source 1..20: mol_type = other DNA
aatttgacagtaaagccatc

SEQ ID NO: 18253 - DNA, 20 bp, synthetic construct
  misc_feature 1..20: note = chemically synthesized
  source 1..20: mol_type = other DNA
ggtcttgaaattttcttttt

SEQ ID NO: 18254 - DNA, 20 bp, synthetic construct
  misc_feature 1..20: note = chemically synthesized
  source 1..20: mol_type = other DNA
gtcttgaaattttctttttt

SEQ ID NO: 18255 - DNA, 20 bp, synthetic construct
  misc_feature 1..20: note = chemically synthesized
  source 1..20: mol_type = other DNA
cttgaaattttcttttttgg

SEQ ID NO: 18256 - DNA, 20 bp, synthetic construct
  misc_feature 1..20: note = chemically synthesized
  source 1..20: mol_type = other DNA
tcaatttcattattcattac

SEQ ID NO: 18257 - DNA, 20 bp, synthetic construct
  misc_feature 1..20: note = chemically synthesized
  source 1..20: mol_type = other DNA
ttattcattactggtctgtt

SEQ ID NO: 18258 - DNA, 20 bp, synthetic construct
  misc_feature 1..20: note = chemically synthesized
  source 1..20: mol_type = other DNA
tattcattactggtctgttc

SEQ ID NO: 18259 - DNA, 20 bp, synthetic construct
  misc_feature 1..20: note = chemically synthesized
  source 1..20: mol_type = other DNA
attctttcttaattcaatct

SEQ ID NO: 18260 - DNA, 20 bp, synthetic construct
  misc_feature 1..20: note = chemically synthesized
  source 1..20: mol_type = other DNA
ctttcttaattcaatcttgg

SEQ ID NO: 18261 - DNA, 20 bp, synthetic construct
  misc_feature 1..20: note = chemically synthesized
  source 1..20: mol_type = other DNA
tttcttaattcaatcttggt

SEQ ID NO: 18262 - DNA, 20 bp, synthetic construct
  misc_feature 1..20: note = chemically synthesized
  source 1..20: mol_type = other DNA
cttaattcaatcttggtagg

SEQ ID NO: 18263 - DNA, 20 bp, synthetic construct
  misc_feature 1..20: note = chemically synthesized
  source 1..20: mol_type = other DNA
cttggtaggtggtatgtgtc

SEQ ID NO: 18264 - DNA, 20 bp, synthetic construct
  misc_feature 1..20: note = chemically synthesized
  source 1..20: mol_type = other DNA
agaaatttattaatttcctc

SEQ ID NO: 18265 - DNA, 20 bp, synthetic construct
  misc_feature 1..20: note = chemically synthesized
  source 1..20: mol_type = other DNA
ttaatttcctctagattttt

SEQ ID NO: 18266 - DNA, 20 bp, synthetic construct
  misc_feature 1..20: note = chemically synthesized
  source 1..20: mol_type = other DNA
ctctagatttttcagttttt

SEQ ID NO: 18267 - DNA, 20 bp, synthetic construct
  misc_feature 1..20: note = chemically synthesized
  source 1..20: mol_type = other DNA
tttttcagttttttagtgta

SEQ ID NO: 18268 - DNA, 20 bp, synthetic construct
  misc_feature 1..20: note = chemically synthesized
  source 1..20: mol_type = other DNA
tagtgtatggttgttcataa

SEQ ID NO: 18269 - DNA, 20 bp, synthetic construct
  misc_feature 1..20: note = chemically synthesized
  source 1..20: mol_type = other DNA
gataatcttttctatttctg

SEQ ID NO: 18270 - DNA, 20 bp, synthetic construct
  misc_feature 1..20: note = chemically synthesized
  source 1..20: mol_type = other DNA
cttttctatttctgtggtat

SEQ ID NO: 18271 - DNA, 20 bp, synthetic construct
  misc_feature 1..20: note = chemically synthesized
  source 1..20: mol_type = other DNA
atttctgattttctttattt

SEQ ID NO: 18272 - DNA, 20 bp, synthetic construct
  misc_feature 1..20: note = chemically synthesized
  source 1..20: mol_type = other DNA
tcagtctcttctctttttct

SEQ ID NO: 18273 - DNA, 20 bp, synthetic construct
  misc_feature 1..20: note = chemically synthesized
  source 1..20: mol_type = other DNA
tctcttctctttttcttggt

SEQ ID NO: 18274 - DNA, 20 bp, synthetic construct
  misc_feature 1..20: note = chemically synthesized
  source 1..20: mol_type = other DNA
tctctttttcttggttagtc

SEQ ID NO: 18275 - DNA, 20 bp, synthetic construct
  misc_feature 1..20: note = chemically synthesized
  source 1..20: mol_type = other DNA
tttttcttggttagtctagc

SEQ ID NO: 18276 - DNA, 20 bp, synthetic construct
  misc_feature 1..20: note = chemically synthesized
  source 1..20: mol_type = other DNA
tttcttggttagtctagcta

SEQ ID NO: 18277 - DNA, 20 bp, synthetic construct
  misc_feature 1..20: note = chemically synthesized
  source 1..20: mol_type = other DNA
ttgtttttctctatttcatt

SEQ ID NO: 18278 - DNA, 20 bp, synthetic construct
  misc_feature 1..20: note = chemically synthesized
  source 1..20: mol_type = other DNA
cattttttctttccttctgc

SEQ ID NO: 18279 - DNA, 20 bp, synthetic construct
  misc_feature 1..20: note = chemically synthesized
  source 1..20: mol_type = other DNA
ttctttccttctgctagttt

SEQ ID NO: 18280 - DNA, 20 bp, synthetic construct
  misc_feature 1..20: note = chemically synthesized
  source 1..20: mol_type = other DNA
tctttccttctgctagtttt

SEQ ID NO: 18281 - DNA, 20 bp, synthetic construct
  misc_feature 1..20: note = chemically synthesized
  source 1..20: mol_type = other DNA
gggttttgttcttgcttttc

SEQ ID NO: 18282 - DNA, 20 bp, synthetic construct
  misc_feature 1..20: note = chemically synthesized
  source 1..20: mol_type = other DNA
tcttgcttttctagcttgtt

SEQ ID NO: 18283 - DNA, 20 bp, synthetic construct
  misc_feature 1..20: note = chemically synthesized
  source 1..20: mol_type = other DNA
cttgcttttctagcttgttg

SEQ ID NO: 18284 - DNA, 20 bp, synthetic construct
  misc_feature 1..20: note = chemically synthesized
  source 1..20: mol_type = other DNA
agcttgttgaggtacatgat

SEQ ID NO: 18285 - DNA, 20 bp, synthetic construct
  misc_feature 1..20: note = chemically synthesized
  source 1..20: mol_type = other DNA
tctttctatgtttttaattt

SEQ ID NO: 18286 - DNA, 20 bp, synthetic construct
  misc_feature 1..20: note = chemically synthesized
  source 1..20: mol_type = other DNA
taatttaagtgtttattgat

SEQ ID NO: 18287 - DNA, 20 bp, synthetic construct
  misc_feature 1..20: note = chemically synthesized
  source 1..20: mol_type = other DNA
ttattgataagcttctctct

SEQ ID NO: 18288 - DNA, 20 bp, synthetic construct
  misc_feature 1..20: note = chemically synthesized
  source 1..20: mol_type = other DNA
actgcttttgctgtatccca

SEQ ID NO: 18289 - DNA, 20 bp, synthetic construct
  misc_feature 1..20: note = chemically synthesized
  source 1..20: mol_type = other DNA
ttcttgacataacgttcatt

SEQ ID NO: 18290 - DNA, 20 bp, synthetic construct
  misc_feature 1..20: note = chemically synthesized
  source 1..20: mol_type = other DNA
tcttgacataacgttcattc

SEQ ID NO: 18291 - DNA, 20 bp, synthetic construct
  misc_feature 1..20: note = chemically synthesized
  source 1..20: mol_type = other DNA
ttgacataacgttcattcag

SEQ ID NO: 18292 - DNA, 20 bp, synthetic construct
  misc_feature 1..20: note = chemically synthesized
  source 1..20: mol_type = other DNA
ttaatttccatgtatttgta

SEQ ID NO: 18293 - DNA, 20 bp, synthetic construct
  misc_feature 1..20: note = chemically synthesized
  source 1..20: mol_type = other DNA
taatttccatgtatttgtat

SEQ ID NO: 18294 - DNA, 20 bp, synthetic construct
  misc_feature 1..20: note = chemically synthesized
  source 1..20: mol_type = other DNA
atgtatttgtataggtttta

SEQ ID NO: 18295 - DNA, 20 bp, synthetic construct
  misc_feature 1..20: note = chemically synthesized
  source 1..20: mol_type = other DNA
tttttcttgttattgatttc

SEQ ID NO: 18296 - DNA, 20 bp, synthetic construct
  misc_feature 1..20: note = chemically synthesized
  source 1..20: mol_type = other DNA
tttctagttttattccattg

SEQ ID NO: 18297 - DNA, 20 bp, synthetic construct
  misc_feature 1..20: note = chemically synthesized
  source 1..20: mol_type = other DNA
gttttattccattgtggtct

SEQ ID NO: 18298 - DNA, 20 bp, synthetic construct
  misc_feature 1..20: note = chemically synthesized
  source 1..20: mol_type = other DNA
ttattccattgtggtctgag

SEQ ID NO: 18299 - DNA, 20 bp, synthetic construct
  misc_feature 1..20: note = chemically synthesized
  source 1..20: mol_type = other DNA
tgatttcaaatatttcaaat

SEQ ID NO: 18300 - DNA, 20 bp, synthetic construct
  misc_feature 1..20: note = chemically synthesized
  source 1..20: mol_type = other DNA
tcaaatatttcaaattagtt

SEQ ID NO: 18301 - DNA, 20 bp, synthetic construct
  misc_feature 1..20: note = chemically synthesized
  source 1..20: mol_type = other DNA
ttcttttgtgttctaacata

SEQ ID NO: 18302 - DNA, 20 bp, synthetic construct
  misc_feature 1..20: note = chemically synthesized
  source 1..20: mol_type = other DNA
ttctaacatatggtgtatcc

SEQ ID NO: 18303 - DNA, 20 bp, synthetic construct
  misc_feature 1..20: note = chemically synthesized
  source 1..20: mol_type = other DNA
tctaacatatggtgtatcct

SEQ ID NO: 18304 - DNA, 20 bp, synthetic construct
  misc_feature 1..20: note = chemically synthesized
  source 1..20: mol_type = other DNA
ctaacatatggtgtatcctg

SEQ ID NO: 18305 - DNA, 20 bp, synthetic construct
  misc_feature 1..20: note = chemically synthesized
  source 1..20: mol_type = other DNA
ggaatgcgtcatgtgctgat

SEQ ID NO: 18306 - DNA, 20 bp, synthetic construct
  misc_feature 1..20: note = chemically synthesized
  source 1..20: mol_type = other DNA
gatgagataaatatattctg

SEQ ID NO: 18307 - DNA, 20 bp, synthetic construct
  misc_feature 1..20: note = chemically synthesized
  source 1..20: mol_type = other DNA
taaatatattctgtagctgt

SEQ ID NO: 18308 - DNA, 20 bp, synthetic construct
  misc_feature 1..20: note = chemically synthesized
  source 1..20: mol_type = other DNA
atgaaatattgtgtaaatgt

SEQ ID NO: 18309 - DNA, 20 bp, synthetic construct
  misc_feature 1..20: note = chemically synthesized
  source 1..20: mol_type = other DNA
gtgtaaatgttagatccatt

SEQ ID NO: 18310 - DNA, 20 bp, synthetic construct
  misc_feature 1..20: note = chemically synthesized
  source 1..20: mol_type = other DNA
tgttagatccatttggtcta

SEQ ID NO: 18311 - DNA, 20 bp, synthetic construct
  misc_feature 1..20: note = chemically synthesized
  source 1..20: mol_type = other DNA
gatccatttggtctaaagtc

SEQ ID NO: 18312 - DNA, 20 bp, synthetic construct
  misc_feature 1..20: note = chemically synthesized
  source 1..20: mol_type = other DNA
ttctttgttaattttctgtc

SEQ ID NO: 18313 - DNA, 20 bp, synthetic construct
  misc_feature 1..20: note = chemically synthesized
  source 1..20: mol_type = other DNA
tagatgatctatctgatgct

SEQ ID NO: 18314 - DNA, 20 bp, synthetic construct
  misc_feature 1..20: note = chemically synthesized
  source 1..20: mol_type = other DNA
gatctatctgatgctgagat

SEQ ID NO: 18315 - DNA, 20 bp, synthetic construct
  misc_feature 1..20: note = chemically synthesized
  source 1..20: mol_type = other DNA
atccccaactattattgtat

SEQ ID NO: 18316 - DNA, 20 bp, synthetic construct
  misc_feature 1..20: note = chemically synthesized
  source 1..20: mol_type = other DNA
taacatttgctttacatatc

SEQ ID NO: 18317 - DNA, 20 bp, synthetic construct
  misc_feature 1..20: note = chemically synthesized
  source 1..20: mol_type = other DNA
ctttacatatctggatgctc

SEQ ID NO: 18318 - DNA, 20 bp, synthetic construct
  misc_feature 1..20: note = chemically synthesized
  source 1..20: mol_type = other DNA
tatctggatgctctggtgtt

SEQ ID NO: 18319 - DNA, 20 bp, synthetic construct
  misc_feature 1..20: note = chemically synthesized
  source 1..20: mol_type = other DNA
tggtgttgagtgtgaatgtt

SEQ ID NO: 18320 - DNA, 20 bp, synthetic construct
  misc_feature 1..20: note = chemically synthesized
  source 1..20: mol_type = other DNA
atgtaatgacttttgtctct

SEQ ID NO: 18321 - DNA, 20 bp, synthetic construct
  misc_feature 1..20: note = chemically synthesized
  source 1..20: mol_type = other DNA
ctcttagtgttttttattta

SEQ ID NO: 18322 - DNA, 20 bp, synthetic construct
  misc_feature 1..20: note = chemically synthesized
  source 1..20: mol_type = other DNA
aaagtcaattttatctgtta

SEQ ID NO: 18323 - DNA, 20 bp, synthetic construct
  misc_feature 1..20: note = chemically synthesized
  source 1..20: mol_type = other DNA
aagtcaattttatctgttat

SEQ ID NO: 18324 - DNA, 20 bp, synthetic construct
  misc_feature 1..20: note = chemically synthesized
  source 1..20: mol_type = other DNA
taactacttttgctcatttt

SEQ ID NO: 18325 - DNA, 20 bp, synthetic construct
  misc_feature 1..20: note = chemically synthesized
  source 1..20: mol_type = other DNA
atttttggtttctctttgta

SEQ ID NO: 18326 - DNA, 20 bp, synthetic construct
  misc_feature 1..20: note = chemically synthesized
  source 1..20: mol_type = other DNA
tttggtttctctttgtatgg

SEQ ID NO: 18327 - DNA, 20 bp, synthetic construct
  misc_feature 1..20: note = chemically synthesized
  source 1..20: mol_type = other DNA
atctttcatctttttacttt

SEQ ID NO: 18328 - DNA, 20 bp, synthetic construct
  misc_feature 1..20: note = chemically synthesized
  source 1..20: mol_type = other DNA
cagtctatatttatctttac

SEQ ID NO: 18329 - DNA, 20 bp, synthetic construct
  misc_feature 1..20: note = chemically synthesized
  source 1..20: mol_type = other DNA
ctatatttatctttacaagt

SEQ ID NO: 18330 - DNA, 20 bp, synthetic construct
  misc_feature 1..20: note = chemically synthesized
  source 1..20: mol_type = other DNA
tttatctttacaagtgagat

SEQ ID NO: 18331 - DNA, 20 bp, synthetic construct
  misc_feature 1..20: note = chemically synthesized
  source 1..20: mol_type = other DNA
caagtgagataagtttctta

SEQ ID NO: 18332 - DNA, 20 bp, synthetic construct
  misc_feature 1..20: note = chemically synthesized
  source 1..20: mol_type = other DNA
aagtgagataagtttcttat

SEQ ID NO: 18333 - DNA, 20 bp, synthetic construct
  misc_feature 1..20: note = chemically synthesized
  source 1..20: mol_type = other DNA
tgagataagtttcttatagg

SEQ ID NO: 18334 - DNA, 20 bp, synthetic construct
  misc_feature 1..20: note = chemically synthesized
  source 1..20: mol_type = other DNA
tcttataggcagcttacaac

SEQ ID NO: 18335 - DNA, 20 bp, synthetic construct
  misc_feature 1..20: note = chemically synthesized
  source 1..20: mol_type = other DNA
cttataggcagcttacaact

SEQ ID NO: 18336 - DNA, 20 bp, synthetic construct
  misc_feature 1..20: note = chemically synthesized
  source 1..20: mol_type = other DNA
atttttgttttaaatctatt

SEQ ID NO: 18337 - DNA, 20 bp, synthetic construct
  misc_feature 1..20: note = chemically synthesized
  source 1..20: mol_type = other DNA
ttgttttaaatctatttagc

SEQ ID NO: 18338 - DNA, 20 bp, synthetic construct
  misc_feature 1..20: note = chemically synthesized
  source 1..20: mol_type = other DNA
ttagccagtctatatctttc

SEQ ID NO: 18339 - DNA, 20 bp, synthetic construct
  misc_feature 1..20: note = chemically synthesized
  source 1..20: mol_type = other DNA
aatttaatccatttacatgc

SEQ ID NO: 18340 - DNA, 20 bp, synthetic construct
  misc_feature 1..20: note = chemically synthesized
  source 1..20: mol_type = other DNA
atttaatccatttacatgca

SEQ ID NO: 18341 - DNA, 20 bp, synthetic construct
  misc_feature 1..20: note = chemically synthesized
  source 1..20: mol_type = other DNA
caaggctattattgacatgt

SEQ ID NO: 18342 - DNA, 20 bp, synthetic construct
  misc_feature 1..20: note = chemically synthesized
  source 1..20: mol_type = other DNA
aggctattattgacatgtga

SEQ ID NO: 18343 - DNA, 20 bp, synthetic construct
  misc_feature 1..20: note = chemically synthesized
  source 1..20: mol_type = other DNA
ccattttgttaattgattcc

SEQ ID NO: 18344 - DNA, 20 bp, synthetic construct
  misc_feature 1..20: note = chemically synthesized
  source 1..20: mol_type = other DNA
tggttgttttgttttttttt

SEQ ID NO: 18345 - DNA, 20 bp, synthetic construct
  misc_feature 1..20: note = chemically synthesized
  source 1..20: mol_type = other DNA
tttcttattatttatgattg

SEQ ID NO: 18346 - DNA, 20 bp, synthetic construct
  misc_feature 1..20: note = chemically synthesized
  source 1..20: mol_type = other DNA
tattatttatgattgtggtt

SEQ ID NO: 18347 - DNA, 20 bp, synthetic construct
  misc_feature 1..20: note = chemically synthesized
  source 1..20: mol_type = other DNA
tgtggtttggtgattttctg

SEQ ID NO: 18348 - DNA, 20 bp, synthetic construct
  misc_feature 1..20: note = chemically synthesized
  source 1..20: mol_type = other DNA
ggtttggtgattttctgtag

SEQ ID NO: 18349 - DNA, 20 bp, synthetic construct
  misc_feature 1..20: note = chemically synthesized
  source 1..20: mol_type = other DNA
tttctgtagtggtaacgttt

SEQ ID NO: 18350 - DNA, 20 bp, synthetic construct
  misc_feature 1..20: note = chemically synthesized
  source 1..20: mol_type = other DNA
ttatttgtgttttgctctac

SEQ ID NO: 18351 - DNA, 20 bp, synthetic construct
  misc_feature 1..20: note = chemically synthesized
  source 1..20: mol_type = other DNA
ttgtgttttgctctaccagt

SEQ ID NO: 18352 - DNA, 20 bp, synthetic construct
  misc_feature 1..20: note = chemically synthesized
  source 1..20: mol_type = other DNA
acctttgtgtgtcttcataa

SEQ ID NO: 18353 - DNA, 20 bp, synthetic construct
  misc_feature 1..20: note = chemically synthesized
  source 1..20: mol_type = other DNA
tttgtgtgtcttcataatgg

SEQ ID NO: 18354 - DNA, 20 bp, synthetic construct
  misc_feature 1..20: note = chemically synthesized
  source 1..20: mol_type = other DNA
tgtcctgtcactttcatgtg

SEQ ID NO: 18355 - DNA, 20 bp, synthetic construct
  misc_feature 1..20: note = chemically synthesized
  source 1..20: mol_type = other DNA
gtcctgtcactttcatgtgt

SEQ ID NO: 18356 - DNA, 20 bp, synthetic construct
  misc_feature 1..20: note = chemically synthesized
  source 1..20: mol_type = other DNA
tcccttaaatatttcttgta

SEQ ID NO: 18357 - DNA, 20 bp, synthetic construct
  misc_feature 1..20: note = chemically synthesized
  source 1..20: mol_type = other DNA
ttaaatatttcttgtaaagc

SEQ ID NO: 18358 - DNA, 20 bp, synthetic construct
  misc_feature 1..20: note = chemically synthesized
  source 1..20: mol_type = other DNA
tatttcttgtaaagccagtc

SEQ ID NO: 18359 - DNA, 20 bp, synthetic construct
  misc_feature 1..20: note = chemically synthesized
  source 1..20: mol_type = other DNA
ttgtaaagccagtctagtga

SEQ ID NO: 18360 - DNA, 20 bp, synthetic construct
  misc_feature 1..20: note = chemically synthesized
  source 1..20: mol_type = other DNA
tccttcaaatttttcttgcc

SEQ ID NO: 18361 - DNA, 20 bp, synthetic construct
  misc_feature 1..20: note = chemically synthesized
  source 1..20: mol_type = other DNA
caaatttttcttgcccagaa

SEQ ID NO: 18362 - DNA, 20 bp, synthetic construct
  misc_feature 1..20: note = chemically synthesized
  source 1..20: mol_type = other DNA
ttatttatccttcatttttg

SEQ ID NO: 18363 - DNA, 20 bp, synthetic construct
  misc_feature 1..20: note = chemically synthesized
  source 1..20: mol_type = other DNA
tttttgaagaacaatgttgc

SEQ ID NO: 18364 - DNA, 20 bp, synthetic construct
  misc_feature 1..20: note = chemically synthesized
  source 1..20: mol_type = other DNA
ttttgaagaacaatgttgct

SEQ ID NO: 18365 - DNA, 20 bp, synthetic construct
  misc_feature 1..20: note = chemically synthesized
  source 1..20: mol_type = other DNA
gttgctgggtataacatcct

SEQ ID NO: 18366 - DNA, 20 bp, synthetic construct
  misc_feature 1..20: note = chemically synthesized
  source 1..20: mol_type = other DNA
tatatcatcccatcttctcc

SEQ ID NO: 18367 - DNA, 20 bp, synthetic construct
  misc_feature 1..20: note = chemically synthesized
  source 1..20: mol_type = other DNA
cccatcttctcctggcctgt

SEQ ID NO: 18368 - DNA, 20 bp, synthetic construct
  misc_feature 1..20: note = chemically synthesized
  source 1..20: mol_type = other DNA
ccatcttctcctggcctgtg

SEQ ID NO: 18369 - DNA, 20 bp, synthetic construct
  misc_feature 1..20: note = chemically synthesized
  source 1..20: mol_type = other DNA
tggcctgtgaggtttctgct

SEQ ID NO: 18370 - DNA, 20 bp, synthetic construct
  misc_feature 1..20: note = chemically synthesized
  source 1..20: mol_type = other DNA
ctgttaatctgttaatcttg

SEQ ID NO: 18371 - DNA, 20 bp, synthetic construct
  misc_feature 1..20: note = chemically synthesized
  source 1..20: mol_type = other DNA
ttaatctgttaatcttgtgg

SEQ ID NO: 18372 - DNA, 20 bp, synthetic construct
  misc_feature 1..20: note = chemically synthesized
  source 1..20: mol_type = other DNA
tcttgtggaagttcccttat

SEQ ID NO: 18373 - DNA, 20 bp, synthetic construct
  misc_feature 1..20: note = chemically synthesized
  source 1..20: mol_type = other DNA
gaagttcccttataagtgac

SEQ ID NO: 18374 - DNA, 20 bp, synthetic construct
  misc_feature 1..20: note = chemically synthesized
  source 1..20: mol_type = other DNA
agacattttgcttgctgttt

SEQ ID NO: 18375 - DNA, 20 bp, synthetic construct
  misc_feature 1..20: note = chemically synthesized
  source 1..20: mol_type = other DNA
acattttgcttgctgtttta

SEQ ID NO: 18376 - DNA, 20 bp, synthetic construct
  misc_feature 1..20: note = chemically synthesized
  source 1..20: mol_type = other DNA
gttttagagttcttactctt

SEQ ID NO: 18377 - DNA, 20 bp, synthetic construct
  misc_feature 1..20: note = chemically synthesized
  source 1..20: mol_type = other DNA
tcttactctttggcttttga

SEQ ID NO: 18378 - DNA, 20 bp, synthetic construct
  misc_feature 1..20: note = chemically synthesized
  source 1..20: mol_type = other DNA
agtttgactataatgtgctg

SEQ ID NO: 18379 - DNA, 20 bp, synthetic construct
  misc_feature 1..20: note = chemically synthesized
  source 1..20: mol_type = other DNA
tttgactataatgtgctgtg

SEQ ID NO: 18380 - DNA, 20 bp, synthetic construct
  misc_feature 1..20: note = chemically synthesized
  source 1..20: mol_type = other DNA
gactataatgtgctgtggag

SEQ ID NO: 18381 - DNA, 20 bp, synthetic construct
  misc_feature 1..20: note = chemically synthesized
  source 1..20: mol_type = other DNA
ctataatgtgctgtggagaa

SEQ ID NO: 18382 - DNA, 20 bp, synthetic construct
  misc_feature 1..20: note = chemically synthesized
  source 1..20: mol_type = other DNA
gctttttgcattatattatt

SEQ ID NO: 18383 - DNA, 20 bp, synthetic construct
  misc_feature 1..20: note = chemically synthesized
  source 1..20: mol_type = other DNA
ctttttgcattatattattt

SEQ ID NO: 18384 - DNA, 20 bp, synthetic construct
  misc_feature 1..20: note = chemically synthesized
  source 1..20: mol_type = other DNA
atttctgattttcatttgtc

SEQ ID NO: 18385 - DNA, 20 bp, synthetic construct
  misc_feature 1..20: note = chemically synthesized
  source 1..20: mol_type = other DNA
tggatgtctacatttcttgc

SEQ ID NO: 18386 - DNA, 20 bp, synthetic construct
  misc_feature 1..20: note = chemically synthesized
  source 1..20: mol_type = other DNA
catttcttgctagacttgac

SEQ ID NO: 18387 - DNA, 20 bp, synthetic construct
  misc_feature 1..20: note = chemically synthesized
  source 1..20: mol_type = other DNA
tgctagacttgacaagtttt

SEQ ID NO: 18388 - DNA, 20 bp, synthetic construct
  misc_feature 1..20: note = chemically synthesized
  source 1..20: mol_type = other DNA
tcagctattgtgttgttacg

SEQ ID NO: 18389 - DNA, 20 bp, synthetic construct
  misc_feature 1..20: note = chemically synthesized
  source 1..20: mol_type = other DNA
cagctattgtgttgttacgt

SEQ ID NO: 18390 - DNA, 20 bp, synthetic construct
  misc_feature 1..20: note = chemically synthesized
  source 1..20: mol_type = other DNA
ttcatgttctctttaccttc

SEQ ID NO: 18391 - DNA, 20 bp, synthetic construct
  misc_feature 1..20: note = chemically synthesized
  source 1..20: mol_type = other DNA
tcatgttctctttaccttct

SEQ ID NO: 18392 - DNA, 20 bp, synthetic construct
  misc_feature 1..20: note = chemically synthesized
  source 1..20: mol_type = other DNA
ttgaatatttgttcacttta

SEQ ID NO: 18393 - DNA, 20 bp, synthetic construct
  misc_feature 1..20: note = chemically synthesized
  source 1..20: mol_type = other DNA
tttcctttctatcatttgac

SEQ ID NO: 18394 - DNA, 20 bp, synthetic construct
  misc_feature 1..20: note = chemically synthesized
  source 1..20: mol_type = other DNA
atttgaccagctaattttaa

SEQ ID NO: 18395 - DNA, 20 bp, synthetic construct
  misc_feature 1..20: note = chemically synthesized
  source 1..20: mol_type = other DNA
attttaaaagacctgtcttc

SEQ ID NO: 18396 - DNA, 20 bp, synthetic construct
  misc_feature 1..20: note = chemically synthesized
  source 1..20: mol_type = other DNA
cttgatctgatctattgttg

SEQ ID NO: 18397 - DNA, 20 bp, synthetic construct
  misc_feature 1..20: note = chemically synthesized
  source 1..20: mol_type = other DNA
atttctttcaataaactctt

SEQ ID NO: 18398 - DNA, 20 bp, synthetic construct
  misc_feature 1..20: note = chemically synthesized
  source 1..20: mol_type = other DNA
ttcaataaactcttcagtta

SEQ ID NO: 18399 - DNA, 20 bp, synthetic construct
  misc_feature 1..20: note = chemically synthesized
  source 1..20: mol_type = other DNA
tcagttacagaatttctgtt

SEQ ID NO: 18400 - DNA, 20 bp, synthetic construct
  misc_feature 1..20: note = chemically synthesized
  source 1..20: mol_type = other DNA
ttcttgttgtatctatctct

SEQ ID NO: 18401 - DNA, 20 bp, synthetic construct
  misc_feature 1..20: note = chemically synthesized
  source 1..20: mol_type = other DNA
tcttgttgtatctatctctt

SEQ ID NO: 18402 - DNA, 20 bp, synthetic construct
  misc_feature 1..20: note = chemically synthesized
  source 1..20: mol_type = other DNA
tttctttttattgtttatct

SEQ ID NO: 18403 - DNA, 20 bp, synthetic construct
  misc_feature 1..20: note = chemically synthesized
  source 1..20: mol_type = other DNA
gagttctcttgtgtctcact

SEQ ID NO: 18404 - DNA, 20 bp, synthetic construct
  misc_feature 1..20: note = chemically synthesized
  source 1..20: mol_type = other DNA
cttccttaatatcaacattt

SEQ ID NO: 18405 - DNA, 20 bp, synthetic construct
  misc_feature 1..20: note = chemically synthesized
  source 1..20: mol_type = other DNA
acattttggattcttttttc

SEQ ID NO: 18406 - DNA, 20 bp, synthetic construct
  misc_feature 1..20: note = chemically synthesized
  source 1..20: mol_type = other DNA
taaatgtcttttttttccac

SEQ ID NO: 18407 - DNA, 20 bp, synthetic construct
  misc_feature 1..20: note = chemically synthesized
  source 1..20: mol_type = other DNA
tccactggcttatgttgctg

SEQ ID NO: 18408 - DNA, 20 bp, synthetic construct
  misc_feature 1..20: note = chemically synthesized
  source 1..20: mol_type = other DNA
gaagaattattaaattcctt

SEQ ID NO: 18409 - DNA, 20 bp, synthetic construct
  misc_feature 1..20: note = chemically synthesized
  source 1..20: mol_type = other DNA
gaattattaaattcctttgg

SEQ ID NO: 18410 - DNA, 20 bp, synthetic construct
  misc_feature 1..20: note = chemically synthesized
  source 1..20: mol_type = other DNA
tgcattgatatctctgcatc

SEQ ID NO: 18411 - DNA, 20 bp, synthetic construct
  misc_feature 1..20: note = chemically synthesized
  source 1..20: mol_type = other DNA
ggtgtaatgattgctgcttc

SEQ ID NO: 18412 - DNA, 20 bp, synthetic construct
  misc_feature 1..20: note = chemically synthesized
  source 1..20: mol_type = other DNA
gttttgtaaatttgtttttg

SEQ ID NO: 18413 - DNA, 20 bp, synthetic construct
  misc_feature 1..20: note = chemically synthesized
  source 1..20: mol_type = other DNA
ttttgtaaatttgtttttgt

SEQ ID NO: 18414 - DNA, 20 bp, synthetic construct
  misc_feature 1..20: note = chemically synthesized
  source 1..20: mol_type = other DNA
tttgtaaatttgtttttgta

SEQ ID NO: 18415 - DNA, 20 bp, synthetic construct
  misc_feature 1..20: note = chemically synthesized
  source 1..20: mol_type = other DNA
ttgtaaatttgtttttgtag

SEQ ID NO: 18416 - DNA, 20 bp, synthetic construct
  misc_feature 1..20: note = chemically synthesized
  source 1..20: mol_type = other DNA
taaatttgtttttgtagggg

SEQ ID NO: 18417 - DNA, 20 bp, synthetic construct
  misc_feature 1..20: note = chemically synthesized
  source 1..20: mol_type = other DNA
taggggaagacttttttctg

SEQ ID NO: 18418 - DNA, 20 bp, synthetic construct
  misc_feature 1..20: note = chemically synthesized
  source 1..20: mol_type = other DNA
ttttttctgaagatgtatct

SEQ ID NO: 18419 - DNA, 20 bp, synthetic construct
  misc_feature 1..20: note = chemically synthesized
  source 1..20: mol_type = other DNA
gatgtatcttggtgttgatt

SEQ ID NO: 18420 - DNA, 20 bp, synthetic construct
  misc_feature 1..20: note = chemically synthesized
  source 1..20: mol_type = other DNA
gtatcttggtgttgattgag

SEQ ID NO: 18421 - DNA, 20 bp, synthetic construct
  misc_feature 1..20: note = chemically synthesized
  source 1..20: mol_type = other DNA
tatcttggtgttgattgagt

SEQ ID NO: 18422 - DNA, 20 bp, synthetic construct
  misc_feature 1..20: note = chemically synthesized
  source 1..20: mol_type = other DNA
atcttggtgttgattgagta

SEQ ID NO: 18423 - DNA, 20 bp, synthetic construct
  misc_feature 1..20: note = chemically synthesized
  source 1..20: mol_type = other DNA
ggcactttgattttgatttc

SEQ ID NO: 18424 - DNA, 20 bp, synthetic construct
  misc_feature 1..20: note = chemically synthesized
  source 1..20: mol_type = other DNA
gcactttgattttgatttct

SEQ ID NO: 18425 - DNA, 20 bp, synthetic construct
  misc_feature 1..20: note = chemically synthesized
  source 1..20: mol_type = other DNA
ttttgatttctaggtgcata

SEQ ID NO: 18426 - DNA, 20 bp, synthetic construct
  misc_feature 1..20: note = chemically synthesized
  source 1..20: mol_type = other DNA
tgatttctaggtgcatacag

SEQ ID NO: 18427 - DNA, 20 bp, synthetic construct
  misc_feature 1..20: note = chemically synthesized
  source 1..20: mol_type = other DNA
tctaggtgcatacagcagca

SEQ ID NO: 18428 - DNA, 20 bp, synthetic construct
  misc_feature 1..20: note = chemically synthesized
  source 1..20: mol_type = other DNA
gtcttcatattatttttttt

SEQ ID NO: 18429 - DNA, 20 bp, synthetic construct
  misc_feature 1..20: note = chemically synthesized
  source 1..20: mol_type = other DNA
tattttttttcagctgccaa

SEQ ID NO: 18430 - DNA, 20 bp, synthetic construct
  misc_feature 1..20: note = chemically synthesized
  source 1..20: mol_type = other DNA
tcagctgccaacagtatcat

SEQ ID NO: 18431 - DNA, 20 bp, synthetic construct
  misc_feature 1..20: note = chemically synthesized
  source 1..20: mol_type = other DNA
atcagtgtctgtgatttttt

SEQ ID NO: 18432 - DNA, 20 bp, synthetic construct
  misc_feature 1..20: note = chemically synthesized
  source 1..20: mol_type = other DNA
agtgtctgtgattttttcag

SEQ ID NO: 18433 - DNA, 20 bp, synthetic construct
  misc_feature 1..20: note = chemically synthesized
  source 1..20: mol_type = other DNA
ctgtgattttttcagtggct

SEQ ID NO: 18434 - DNA, 20 bp, synthetic construct
  misc_feature 1..20: note = chemically synthesized
  source 1..20: mol_type = other DNA
tgtgattttttcagtggctt

SEQ ID NO: 18435 - DNA, 20 bp, synthetic construct
  misc_feature 1..20: note = chemically synthesized
  source 1..20: mol_type = other DNA
gtgattttttcagtggctta

SEQ ID NO: 18436 - DNA, 20 bp, synthetic construct
  misc_feature 1..20: note = chemically synthesized
  source 1..20: mol_type = other DNA
gtggcttagggtgcatttgt

SEQ ID NO: 18437 - DNA, 20 bp, synthetic construct
  misc_feature 1..20: note = chemically synthesized
  source 1..20: mol_type = other DNA
ttagggtgcatttgttagtg

SEQ ID NO: 18438 - DNA, 20 bp, synthetic construct
  misc_feature 1..20: note = chemically synthesized
  source 1..20: mol_type = other DNA
tagggtgcatttgttagtga

SEQ ID NO: 18439 - DNA, 20 bp, synthetic construct
  misc_feature 1..20: note = chemically synthesized
  source 1..20: mol_type = other DNA
ggtgcatttgttagtgaagg

SEQ ID NO: 18440 - DNA, 20 bp, synthetic construct
  misc_feature 1..20: note = chemically synthesized
  source 1..20: mol_type = other DNA
ttgttagtgaaggtggtgat

SEQ ID NO: 18441 - DNA, 20 bp, synthetic construct
  misc_feature 1..20: note = chemically synthesized
  source 1..20: mol_type = other DNA
tgttagtgaaggtggtgatg

SEQ ID NO: 18442 - DNA, 20 bp, synthetic construct
  misc_feature 1..20: note = chemically synthesized
  source 1..20: mol_type = other DNA
aggtggtgatgaggttgtgc

SEQ ID NO: 18443 - DNA, 20 bp, synthetic construct
  misc_feature 1..20: note = chemically synthesized
  source 1..20: mol_type = other DNA
gtggtgatgaggttgtgctg

SEQ ID NO: 18444 - DNA, 20 bp, synthetic construct
  misc_feature 1..20: note = chemically synthesized
  source 1..20: mol_type = other DNA
gatgaggttgtgctggagac

SEQ ID NO: 18445 - DNA, 20 bp, synthetic construct
  misc_feature 1..20: note = chemically synthesized
  source 1..20: mol_type = other DNA
gtgctggagacaagaatatc

SEQ ID NO: 18446 - DNA, 20 bp, synthetic construct
  misc_feature 1..20: note = chemically synthesized
  source 1..20: mol_type = other DNA
ctggagacaagaatatcaag

SEQ ID NO: 18447 - DNA, 20 bp, synthetic construct
  misc_feature 1..20: note = chemically synthesized
  source 1..20: mol_type = other DNA
tggagacaagaatatcaagt

SEQ ID NO: 18448 - DNA, 20 bp, synthetic construct
  misc_feature 1..20: note = chemically synthesized
  source 1..20: mol_type = other DNA
gacaagaatatcaagtgggc

SEQ ID NO: 18449 - DNA, 20 bp, synthetic construct
  misc_feature 1..20: note = chemically synthesized
  source 1..20: mol_type = other DNA
atatcaagtgggccagtcct

SEQ ID NO: 18450 - DNA, 20 bp, synthetic construct
  misc_feature 1..20: note = chemically synthesized
  source 1..20: mol_type = other DNA
agtgggccagtccttggccc

SEQ ID NO: 18451 - DNA, 20 bp, synthetic construct
  misc_feature 1..20: note = chemically synthesized
  source 1..20: mol_type = other DNA
gggccagtccttggccccag

SEQ ID NO: 18452 - DNA, 20 bp, synthetic construct
  misc_feature 1..20: note = chemically synthesized
  source 1..20: mol_type = other DNA
ccagtccttggccccagtgg

SEQ ID NO: 18453 - DNA, 20 bp, synthetic construct
  misc_feature 1..20: note = chemically synthesized
  source 1..20: mol_type = other DNA
gtccttggccccagtggtgg

SEQ ID NO: 18454 - DNA, 20 bp, synthetic construct
  misc_feature 1..20: note = chemically synthesized
  source 1..20: mol_type = other DNA
cttggccccagtggtggtgg

SEQ ID NO: 18455 - DNA, 20 bp, synthetic construct
  misc_feature 1..20: note = chemically synthesized
  source 1..20: mol_type = other DNA
ttggccccagtggtggtggt

SEQ ID NO: 18456 - DNA, 20 bp, synthetic construct
  misc_feature 1..20: note = chemically synthesized
  source 1..20: mol_type = other DNA
cccagtggtggtggtgggcc

SEQ ID NO: 18457 - DNA, 20 bp, synthetic construct
  misc_feature 1..20: note = chemically synthesized
  source 1..20: mol_type = other DNA
gggcctagcattcctgtcct

SEQ ID NO: 18458 - DNA, 20 bp, synthetic construct
  misc_feature 1..20: note = chemically synthesized
  source 1..20: mol_type = other DNA
ggcctagcattcctgtcctt

SEQ ID NO: 18459 - DNA, 20 bp, synthetic construct
  misc_feature 1..20: note = chemically synthesized
  source 1..20: mol_type = other DNA
attcctgtccttgggcccca

SEQ ID NO: 18460 - DNA, 20 bp, synthetic construct
  misc_feature 1..20: note = chemically synthesized
  source 1..20: mol_type = other DNA
ggccccatggctgtgtacat

SEQ ID NO: 18461 - DNA, 20 bp, synthetic construct
  misc_feature 1..20: note = chemically synthesized
  source 1..20: mol_type = other DNA
gctgtgtacattggcactga

SEQ ID NO: 18462 - DNA, 20 bp, synthetic construct
  misc_feature 1..20: note = chemically synthesized
  source 1..20: mol_type = other DNA
acattggcactgatggtaat

SEQ ID NO: 18463 - DNA, 20 bp, synthetic construct
  misc_feature 1..20: note = chemically synthesized
  source 1..20: mol_type = other DNA
ggcactgatggtaatgagtc

SEQ ID NO: 18464 - DNA, 20 bp, synthetic construct
  misc_feature 1..20: note = chemically synthesized
  source 1..20: mol_type = other DNA
ctgatggtaatgagtctagt

SEQ ID NO: 18465 - DNA, 20 bp, synthetic construct
  misc_feature 1..20: note = chemically synthesized
  source 1..20: mol_type = other DNA
tgatggtaatgagtctagtt

SEQ ID NO: 18466 - DNA, 20 bp, synthetic construct
  misc_feature 1..20: note = chemically synthesized
  source 1..20: mol_type = other DNA
gtctagttgggttgattctt

SEQ ID NO: 18467 - DNA, 20 bp, synthetic construct
  misc_feature 1..20: note = chemically synthesized
  source 1..20: mol_type = other DNA
tgggttgattctttggcctt

SEQ ID NO: 18468 - DNA, 20 bp, synthetic construct
  misc_feature 1..20: note = chemically synthesized
  source 1..20: mol_type = other DNA
gggttgattctttggccttc

SEQ ID NO: 18469 - DNA, 20 bp, synthetic construct
  misc_feature 1..20: note = chemically synthesized
  source 1..20: mol_type = other DNA
ttgattctttggccttcagg

SEQ ID NO: 18470 - DNA, 20 bp, synthetic construct
  misc_feature 1..20: note = chemically synthesized
  source 1..20: mol_type = other DNA
tggccttcaggcagtttgct

SEQ ID NO: 18471 - DNA, 20 bp, synthetic construct
  misc_feature 1..20: note = chemically synthesized
  source 1..20: mol_type = other DNA
ggccttcaggcagtttgctt

SEQ ID NO: 18472 - DNA, 20 bp, synthetic construct
  misc_feature 1..20: note = chemically synthesized
  source 1..20: mol_type = other DNA
caggcagtttgcttgggtgt

SEQ ID NO: 18473 - DNA, 20 bp, synthetic construct
  misc_feature 1..20: note = chemically synthesized
  source 1..20: mol_type = other DNA
gcagtttgcttgggtgtcag

SEQ ID NO: 18474 - DNA, 20 bp, synthetic construct
  misc_feature 1..20: note = chemically synthesized
  source 1..20: mol_type = other DNA
gtttgcttgggtgtcagtag

SEQ ID NO: 18475 - DNA, 20 bp, synthetic construct
  misc_feature 1..20: note = chemically synthesized
  source 1..20: mol_type = other DNA
ttgggtgtcagtagtggcca

SEQ ID NO: 18476 - DNA, 20 bp, synthetic construct
  misc_feature 1..20: note = chemically synthesized
  source 1..20: mol_type = other DNA
ggtgtcagtagtggccatag

SEQ ID NO: 18477 - DNA, 20 bp, synthetic construct
  misc_feature 1..20: note = chemically synthesized
  source 1..20: mol_type = other DNA
cagtagtggccatagtagac

SEQ ID NO: 18478 - DNA, 20 bp, synthetic construct
  misc_feature 1..20: note = chemically synthesized
  source 1..20: mol_type = other DNA
agtagtggccatagtagact

SEQ ID NO: 18479 - DNA, 20 bp, synthetic construct
  misc_feature 1..20: note = chemically synthesized
  source 1..20: mol_type = other DNA
gtggccatagtagactgggc

SEQ ID NO: 18480 - DNA, 20 bp, synthetic construct
  misc_feature 1..20: note = chemically synthesized
  source 1..20: mol_type = other DNA
tagtagactgggctggtgtg

SEQ ID NO: 18481 - DNA, 20 bp, synthetic construct
  misc_feature 1..20: note = chemically synthesized
  source 1..20: mol_type = other DNA
agtagactgggctggtgtgt

SEQ ID NO: 18482 - DNA, 20 bp, synthetic construct
  misc_feature 1..20: note = chemically synthesized
  source 1..20: mol_type = other DNA
tgggctggtgtgtgggtcct

SEQ ID NO: 18483 - DNA, 20 bp, synthetic construct
  misc_feature 1..20: note = chemically synthesized
  source 1..20: mol_type = other DNA
gggctggtgtgtgggtcctc

SEQ ID NO: 18484 - DNA, 20 bp, synthetic construct
  misc_feature 1..20: note = chemically synthesized
  source 1..20: mol_type = other DNA
tgtgtgggtcctcaggcttc

SEQ ID NO: 18485 - DNA, 20 bp, synthetic construct
  misc_feature 1..20: note = chemically synthesized
  source 1..20: mol_type = other DNA
tgggtcctcaggcttctgga

SEQ ID NO: 18486 - DNA, 20 bp, synthetic construct
  misc_feature 1..20: note = chemically synthesized
  source 1..20: mol_type = other DNA
gtcctcaggcttctggacag

SEQ ID NO: 18487 - DNA, 20 bp, synthetic construct
  misc_feature 1..20: note = chemically synthesized
  source 1..20: mol_type = other DNA
tcctcaggcttctggacagt

SEQ ID NO: 18488 - DNA, 20 bp, synthetic construct
  misc_feature 1..20: note = chemically synthesized
  source 1..20: mol_type = other DNA
aggcttctggacagtgggtg

SEQ ID NO: 18489 - DNA, 20 bp, synthetic construct
  misc_feature 1..20: note = chemically synthesized
  source 1..20: mol_type = other DNA
tctggacagtgggtgtggtg

SEQ ID NO: 18490 - DNA, 20 bp, synthetic construct
  misc_feature 1..20: note = chemically synthesized
  source 1..20: mol_type = other DNA
ctggacagtgggtgtggtgt

SEQ ID NO: 18491 - DNA, 20 bp, synthetic construct
  misc_feature 1..20: note = chemically synthesized
  source 1..20: mol_type = other DNA
agtgggtgtggtgtgggtga

SEQ ID NO: 18492 - DNA, 20 bp, synthetic construct
  misc_feature 1..20: note = chemically synthesized
  source 1..20: mol_type = other DNA
tgtggtgtgggtgatggctg

SEQ ID NO: 18493 - DNA, 20 bp, synthetic construct
  misc_feature 1..20: note = chemically synthesized
  source 1..20: mol_type = other DNA
ggtgatggctgtagcaactg

SEQ ID NO: 18494 - DNA, 20 bp, synthetic construct
  misc_feature 1..20: note = chemically synthesized
  source 1..20: mol_type = other DNA
gtgatggctgtagcaactgc

SEQ ID NO: 18495 - DNA, 20 bp, synthetic construct
  misc_feature 1..20: note = chemically synthesized
  source 1..20: mol_type = other DNA
gcaactgcaggacaaccctc

SEQ ID NO: 18496 - DNA, 20 bp, synthetic construct
  misc_feature 1..20: note = chemically synthesized
  source 1..20: mol_type = other DNA
aggacaaccctctggctccc

SEQ ID NO: 18497 - DNA, 20 bp, synthetic construct
  misc_feature 1..20: note = chemically synthesized
  source 1..20: mol_type = other DNA
acaaccctctggctcccaag

SEQ ID NO: 18498 - DNA, 20 bp, synthetic construct
  misc_feature 1..20: note = chemically synthesized
  source 1..20: mol_type = other DNA
ggctcccaagcagtctgcac

SEQ ID NO: 18499 - DNA, 20 bp, synthetic construct
  misc_feature 1..20: note = chemically synthesized
  source 1..20: mol_type = other DNA
caagcagtctgcactggtgt

SEQ ID NO: 18500 - DNA, 20 bp, synthetic construct
  misc_feature 1..20: note = chemically synthesized
  source 1..20: mol_type = other DNA
gcagtctgcactggtgttgg

SEQ ID NO: 18501 - DNA, 20 bp, synthetic construct
  misc_feature 1..20: note = chemically synthesized
  source 1..20: mol_type = other DNA
gtctgcactggtgttggtgg

SEQ ID NO: 18502 - DNA, 20 bp, synthetic construct
  misc_feature 1..20: note = chemically synthesized
  source 1..20: mol_type = other DNA
ctggtgttggtggtggctgc

SEQ ID NO: 18503 - DNA, 20 bp, synthetic construct
  misc_feature 1..20: note = chemically synthesized
  source 1..20: mol_type = other DNA
tggtgttggtggtggctgca

SEQ ID NO: 18504 - DNA, 20 bp, synthetic construct
  misc_feature 1..20: note = chemically synthesized
  source 1..20: mol_type = other DNA
ggtgttggtggtggctgcaa

SEQ ID NO: 18505 - DNA, 20 bp, synthetic construct
  misc_feature 1..20: note = chemically synthesized
  source 1..20: mol_type = other DNA
ggtggctgcaagggctgaat

SEQ ID NO: 18506 - DNA, 20 bp, synthetic construct
  misc_feature 1..20: note = chemically synthesized
  source 1..20: mol_type = other DNA
gctgcaagggctgaatgagc

SEQ ID NO: 18507 - DNA, 20 bp, synthetic construct
  misc_feature 1..20: note = chemically synthesized
  source 1..20: mol_type = other DNA
gggctgaatgagccagtctt

SEQ ID NO: 18508 - DNA, 20 bp, synthetic construct
  misc_feature 1..20: note = chemically synthesized
  source 1..20: mol_type = other DNA
tgagccagtcttcagaccca

SEQ ID NO: 18509 - DNA, 20 bp, synthetic construct
  misc_feature 1..20: note = chemically synthesized
  source 1..20: mol_type = other DNA
gagccagtcttcagacccac

SEQ ID NO: 18510 - DNA, 20 bp, synthetic construct
  misc_feature 1..20: note = chemically synthesized
  source 1..20: mol_type = other DNA
ccagtcttcagacccacagg

SEQ ID NO: 18511 - DNA, 20 bp, synthetic construct
  misc_feature 1..20: note = chemically synthesized
  source 1..20: mol_type = other DNA
agacccacaggtggcacatg

SEQ ID NO: 18512 - DNA, 20 bp, synthetic construct
  misc_feature 1..20: note = chemically synthesized
  source 1..20: mol_type = other DNA
gacccacaggtggcacatgc

SEQ ID NO: 18513 - DNA, 20 bp, synthetic construct
  misc_feature 1..20: note = chemically synthesized
  source 1..20: mol_type = other DNA
cccacaggtggcacatgcag

SEQ ID NO: 18514 - DNA, 20 bp, synthetic construct
  misc_feature 1..20: note = chemically synthesized
  source 1..20: mol_type = other DNA
ccacaggtggcacatgcagg

SEQ ID NO: 18515 - DNA, 20 bp, synthetic construct
  misc_feature 1..20: note = chemically synthesized
  source 1..20: mol_type = other DNA
gtggcacatgcaggaggtgc

SEQ ID NO: 18516 - DNA, 20 bp, synthetic construct
  misc_feature 1..20: note = chemically synthesized
  source 1..20: mol_type = other DNA
gcaggaggtgccagttgtga

SEQ ID NO: 18517 - DNA, 20 bp, synthetic construct
  misc_feature 1..20: note = chemically synthesized
  source 1..20: mol_type = other DNA
ggaggtgccagttgtgatgg

SEQ ID NO: 18518 - DNA, 20 bp, synthetic construct
  misc_feature 1..20: note = chemically synthesized
  source 1..20: mol_type = other DNA
ggtgccagttgtgatggcag

SEQ ID NO: 18519 - DNA, 20 bp, synthetic construct
  misc_feature 1..20: note = chemically synthesized
  source 1..20: mol_type = other DNA
gccagttgtgatggcagtgg

SEQ ID NO: 18520 - DNA, 20 bp, synthetic construct
  misc_feature 1..20: note = chemically synthesized
  source 1..20: mol_type = other DNA
ttgtgatggcagtggcagat

SEQ ID NO: 18521 - DNA, 20 bp, synthetic construct
  misc_feature 1..20: note = chemically synthesized
  source 1..20: mol_type = other DNA
tgtgatggcagtggcagatt

SEQ ID NO: 18522 - DNA, 20 bp, synthetic construct
  misc_feature 1..20: note = chemically synthesized
  source 1..20: mol_type = other DNA
gatggcagtggcagattggg

SEQ ID NO: 18523 - DNA, 20 bp, synthetic construct
  misc_feature 1..20: note = chemically synthesized
  source 1..20: mol_type = other DNA
atggcagtggcagattgggt

SEQ ID NO: 18524 - DNA, 20 bp, synthetic construct
  misc_feature 1..20: note = chemically synthesized
  source 1..20: mol_type = other DNA
agattgggtaggcccatcat

SEQ ID NO: 18525 - DNA, 20 bp, synthetic construct
  misc_feature 1..20: note = chemically synthesized
  source 1..20: mol_type = other DNA
gattgggtaggcccatcatc

SEQ ID NO: 18526 - DNA, 20 bp, synthetic construct
  misc_feature 1..20: note = chemically synthesized
  source 1..20: mol_type = other DNA
taggcccatcatcaggcttc

SEQ ID NO: 18527 - DNA, 20 bp, synthetic construct
  misc_feature 1..20: note = chemically synthesized
  source 1..20: mol_type = other DNA
aggcccatcatcaggcttct

SEQ ID NO: 18528 - DNA, 20 bp, synthetic construct
  misc_feature 1..20: note = chemically synthesized
  source 1..20: mol_type = other DNA
gcccatcatcaggcttctgg

SEQ ID NO: 18529 - DNA, 20 bp, synthetic construct
  misc_feature 1..20: note = chemically synthesized
  source 1..20: mol_type = other DNA
cccatcatcaggcttctggg

SEQ ID NO: 18530 - DNA, 20 bp, synthetic construct
  misc_feature 1..20: note = chemically synthesized
  source 1..20: mol_type = other DNA
ccatcatcaggcttctggga

SEQ ID NO: 18531 - DNA, 20 bp, synthetic construct
  misc_feature 1..20: note = chemically synthesized
  source 1..20: mol_type = other DNA
aggcttctgggagggttgct

SEQ ID NO: 18532 - DNA, 20 bp, synthetic construct
  misc_feature 1..20: note = chemically synthesized
  source 1..20: mol_type = other DNA
ggcttctgggagggttgctt

SEQ ID NO: 18533 - DNA, 20 bp, synthetic construct
  misc_feature 1..20: note = chemically synthesized
  source 1..20: mol_type = other DNA
tgggagggttgcttaggtac

SEQ ID NO: 18534 - DNA, 20 bp, synthetic construct
  misc_feature 1..20: note = chemically synthesized
  source 1..20: mol_type = other DNA
ggttgcttaggtaccagtca

SEQ ID NO: 18535 - DNA, 20 bp, synthetic construct
  misc_feature 1..20: note = chemically synthesized
  source 1..20: mol_type = other DNA
tgcttaggtaccagtcatgg

SEQ ID NO: 18536 - DNA, 20 bp, synthetic construct
  misc_feature 1..20: note = chemically synthesized
  source 1..20: mol_type = other DNA
taggtaccagtcatggtgga

SEQ ID NO: 18537 - DNA, 20 bp, synthetic construct
  misc_feature 1..20: note = chemically synthesized
  source 1..20: mol_type = other DNA
ccagtcatggtggatggcac

SEQ ID NO: 18538 - DNA, 20 bp, synthetic construct
  misc_feature 1..20: note = chemically synthesized
  source 1..20: mol_type = other DNA
cagtcatggtggatggcaca

SEQ ID NO: 18539 - DNA, 20 bp, synthetic construct
  misc_feature 1..20: note = chemically synthesized
  source 1..20: mol_type = other DNA
ggatggcacaaggctgtctc

SEQ ID NO: 18540 - DNA, 20 bp, synthetic construct
  misc_feature 1..20: note = chemically synthesized
  source 1..20: mol_type = other DNA
gatggcacaaggctgtctct

SEQ ID NO: 18541 - DNA, 20 bp, synthetic construct
  misc_feature 1..20: note = chemically synthesized
  source 1..20: mol_type = other DNA
caaggctgtctctgggttcc

SEQ ID NO: 18542 - DNA, 20 bp, synthetic construct
  misc_feature 1..20: note = chemically synthesized
  source 1..20: mol_type = other DNA
gggttcccagacaacttgct

SEQ ID NO: 18543 - DNA, 20 bp, synthetic construct
  misc_feature 1..20: note = chemically synthesized
  source 1..20: mol_type = other DNA
ggttcccagacaacttgctt

SEQ ID NO: 18544 - DNA, 20 bp, synthetic construct
  misc_feature 1..20: note = chemically synthesized
  source 1..20: mol_type = other DNA
agacaacttgcttaggcatt

SEQ ID NO: 18545 - DNA, 20 bp, synthetic construct
  misc_feature 1..20: note = chemically synthesized
  source 1..20: mol_type = other DNA
gacaacttgcttaggcattg

SEQ ID NO: 18546 - DNA, 20 bp, synthetic construct
  misc_feature 1..20: note = chemically synthesized
  source 1..20: mol_type = other DNA
aacttgcttaggcattgagg

SEQ ID NO: 18547 - DNA, 20 bp, synthetic construct
  misc_feature 1..20: note = chemically synthesized
  source 1..20: mol_type = other DNA
acttgcttaggcattgagga

SEQ ID NO: 18548 - DNA, 20 bp, synthetic construct
  misc_feature 1..20: note = chemically synthesized
  source 1..20: mol_type = other DNA
cttaggcattgaggaaggca

SEQ ID NO: 18549 - DNA, 20 bp, synthetic construct
  misc_feature 1..20: note = chemically synthesized
  source 1..20: mol_type = other DNA
ggcattgaggaaggcaaagc

SEQ ID NO: 18550 - DNA, 20 bp, synthetic construct
  misc_feature 1..20: note = chemically synthesized
  source 1..20: mol_type = other DNA
gcattgaggaaggcaaagcc

SEQ ID NO: 18551 - DNA, 20 bp, synthetic construct
  misc_feature 1..20: note = chemically synthesized
  source 1..20: mol_type = other DNA
tgaggaaggcaaagccaggc

SEQ ID NO: 18552 - DNA, 20 bp, synthetic construct
  misc_feature 1..20: note = chemically synthesized
  source 1..20: mol_type = other DNA
gaggaaggcaaagccaggct

SEQ ID NO: 18553 - DNA, 20 bp, synthetic construct
  misc_feature 1..20: note = chemically synthesized
  source 1..20: mol_type = other DNA
aggctgggtgttcctgacct

SEQ ID NO: 18554 - DNA, 20 bp, synthetic construct
  misc_feature 1..20: note = chemically synthesized
  source 1..20: mol_type = other DNA
ggctgggtgttcctgacctc

SEQ ID NO: 18555 - DNA, 20 bp, synthetic construct
  misc_feature 1..20: note = chemically synthesized
  source 1..20: mol_type = other DNA
gttcctgacctcaggccact

SEQ ID NO: 18556 - DNA, 20 bp, synthetic construct
  misc_feature 1..20: note = chemically synthesized
  source 1..20: mol_type = other DNA
cctgacctcaggccactcag

SEQ ID NO: 18557 - DNA, 20 bp, synthetic construct
  misc_feature 1..20: note = chemically synthesized
  source 1..20: mol_type = other DNA
aggccactcagtggtgtgtg

SEQ ID NO: 18558 - DNA, 20 bp, synthetic construct
  misc_feature 1..20: note = chemically synthesized
  source 1..20: mol_type = other DNA
tcagtggtgtgtgtggacac

SEQ ID NO: 18559 - DNA, 20 bp, synthetic construct
  misc_feature 1..20: note = chemically synthesized
  source 1..20: mol_type = other DNA
tgtgtggacaccggctatca

SEQ ID NO: 18560 - DNA, 20 bp, synthetic construct
  misc_feature 1..20: note = chemically synthesized
  source 1..20: mol_type = other DNA
gtgtggacaccggctatcat

SEQ ID NO: 18561 - DNA, 20 bp, synthetic construct
  misc_feature 1..20: note = chemically synthesized
  source 1..20: mol_type = other DNA
ggacaccggctatcataggc

SEQ ID NO: 18562 - DNA, 20 bp, synthetic construct
  misc_feature 1..20: note = chemically synthesized
  source 1..20: mol_type = other DNA
acaccggctatcataggctg

SEQ ID NO: 18563 - DNA, 20 bp, synthetic construct
  misc_feature 1..20: note = chemically synthesized
  source 1..20: mol_type = other DNA
ccggctatcataggctggag

SEQ ID NO: 18564 - DNA, 20 bp, synthetic construct
  misc_feature 1..20: note = chemically synthesized
  source 1..20: mol_type = other DNA
ggctatcataggctggagtg

SEQ ID NO: 18565 - DNA, 20 bp, synthetic construct
  misc_feature 1..20: note = chemically synthesized
  source 1..20: mol_type = other DNA
ggctggagtggagtgatcct

SEQ ID NO: 18566 - DNA, 20 bp, synthetic construct
  misc_feature 1..20: note = chemically synthesized
  source 1..20: mol_type = other DNA
gctggagtggagtgatcctc

SEQ ID NO: 18567 - DNA, 20 bp, synthetic construct
  misc_feature 1..20: note = chemically synthesized
  source 1..20: mol_type = other DNA
tggagtgatcctcaggcccc

SEQ ID NO: 18568 - DNA, 20 bp, synthetic construct
  misc_feature 1..20: note = chemically synthesized
  source 1..20: mol_type = other DNA
agtgatcctcaggcccccag

SEQ ID NO: 18569 - DNA, 20 bp, synthetic construct
  misc_feature 1..20: note = chemically synthesized
  source 1..20: mol_type = other DNA
aggcccccagcagaatgcct

SEQ ID NO: 18570 - DNA, 20 bp, synthetic construct
  misc_feature 1..20: note = chemically synthesized
  source 1..20: mol_type = other DNA
agcagaatgcctgagtgaat

SEQ ID NO: 18571 - DNA, 20 bp, synthetic construct
  misc_feature 1..20: note = chemically synthesized
  source 1..20: mol_type = other DNA
agaatgcctgagtgaattag

SEQ ID NO: 18572 - DNA, 20 bp, synthetic construct
  misc_feature 1..20: note = chemically synthesized
  source 1..20: mol_type = other DNA
gcattgttgccctgctcttg

SEQ ID NO: 18573 - DNA, 20 bp, synthetic construct
  misc_feature 1..20: note = chemically synthesized
  source 1..20: mol_type = other DNA
cattgttgccctgctcttga

SEQ ID NO: 18574 - DNA, 20 bp, synthetic construct
  misc_feature 1..20: note = chemically synthesized
  source 1..20: mol_type = other DNA
attgttgccctgctcttgaa

SEQ ID NO: 18575 - DNA, 20 bp, synthetic construct
  misc_feature 1..20: note = chemically synthesized
  source 1..20: mol_type = other DNA
ttgttgccctgctcttgaag

SEQ ID NO: 18576 - DNA, 20 bp, synthetic construct
  misc_feature 1..20: note = chemically synthesized
  source 1..20: mol_type = other DNA
gccctgctcttgaaggggtg

SEQ ID NO: 18577 - DNA, 20 bp, synthetic construct
  misc_feature 1..20: note = chemically synthesized
  source 1..20: mol_type = other DNA
ccctgctcttgaaggggtgc

SEQ ID NO: 18578 - DNA, 20 bp, synthetic construct
  misc_feature 1..20: note = chemically synthesized
  source 1..20: mol_type = other DNA
cctgctcttgaaggggtgcg

SEQ ID NO: 18579 - DNA, 20 bp, synthetic construct
  misc_feature 1..20: note = chemically synthesized
  source 1..20: mol_type = other DNA
ggtgcggggtgtgttgcttt

SEQ ID NO: 18580 - DNA, 20 bp, synthetic construct
  misc_feature 1..20: note = chemically synthesized
  source 1..20: mol_type = other DNA
gcggggtgtgttgctttcag

SEQ ID NO: 18581 - DNA, 20 bp, synthetic construct
  misc_feature 1..20: note = chemically synthesized
  source 1..20: mol_type = other DNA
gggtgtgttgctttcagtgg

SEQ ID NO: 18582 - DNA, 20 bp, synthetic construct
  misc_feature 1..20: note = chemically synthesized
  source 1..20: mol_type = other DNA
tgtgttgctttcagtggcag

SEQ ID NO: 18583 - DNA, 20 bp, synthetic construct
  misc_feature 1..20: note = chemically synthesized
  source 1..20: mol_type = other DNA
tcagtggcagcagctataaa

SEQ ID NO: 18584 - DNA, 20 bp, synthetic construct
  misc_feature 1..20: note = chemically synthesized
  source 1..20: mol_type = other DNA
cagtggcagcagctataaat

SEQ ID NO: 18585 - DNA, 20 bp, synthetic construct
  misc_feature 1..20: note = chemically synthesized
  source 1..20: mol_type = other DNA
agcagctataaatgggttgc

SEQ ID NO: 18586 - DNA, 20 bp, synthetic construct
  misc_feature 1..20: note = chemically synthesized
  source 1..20: mol_type = other DNA
agctataaatgggttgctgg

SEQ ID NO: 18587 - DNA, 20 bp, synthetic construct
  misc_feature 1..20: note = chemically synthesized
  source 1..20: mol_type = other DNA
gctataaatgggttgctggt

SEQ ID NO: 18588 - DNA, 20 bp, synthetic construct
  misc_feature 1..20: note = chemically synthesized
  source 1..20: mol_type = other DNA
ttgctggtgggcatgtgttt

SEQ ID NO: 18589 - DNA, 20 bp, synthetic construct
  misc_feature 1..20: note = chemically synthesized
  source 1..20: mol_type = other DNA
gtgggcatgtgtttcagccc

SEQ ID NO: 18590 - DNA, 20 bp, synthetic construct
  misc_feature 1..20: note = chemically synthesized
  source 1..20: mol_type = other DNA
gcatgtgtttcagccccaga

SEQ ID NO: 18591 - DNA, 20 bp, synthetic construct
  misc_feature 1..20: note = chemically synthesized
  source 1..20: mol_type = other DNA
tgtgtttcagccccagatgg

SEQ ID NO: 18592 - DNA, 20 bp, synthetic construct
  misc_feature 1..20: note = chemically synthesized
  source 1..20: mol_type = other DNA
cagccccagatggtggctgc

SEQ ID NO: 18593 - DNA, 20 bp, synthetic construct
  misc_feature 1..20: note = chemically synthesized
  source 1..20: mol_type = other DNA
ccccagatggtggctgcaag

SEQ ID NO: 18594 - DNA, 20 bp, synthetic construct
  misc_feature 1..20: note = chemically synthesized
  source 1..20: mol_type = other DNA
cccagatggtggctgcaagt

SEQ ID NO: 18595 - DNA, 20 bp, synthetic construct
  misc_feature 1..20: note = chemically synthesized
  source 1..20: mol_type = other DNA
ccagatggtggctgcaagtg

SEQ ID NO: 18596 - DNA, 20 bp, synthetic construct
  misc_feature 1..20: note = chemically synthesized
  source 1..20: mol_type = other DNA
gatggtggctgcaagtgggg

SEQ ID NO: 18597 - DNA, 20 bp, synthetic construct
  misc_feature 1..20: note = chemically synthesized
  source 1..20: mol_type = other DNA
caagtggggtagcattttct

SEQ ID NO: 18598 - DNA, 20 bp, synthetic construct
  misc_feature 1..20: note = chemically synthesized
  source 1..20: mol_type = other DNA
aagtggggtagcattttctt

SEQ ID NO: 18599 - DNA, 20 bp, synthetic construct
  misc_feature 1..20: note = chemically synthesized
  source 1..20: mol_type = other DNA
agtggggtagcattttctta

SEQ ID NO: 18600 - DNA, 20 bp, synthetic construct
  misc_feature 1..20: note = chemically synthesized
  source 1..20: mol_type = other DNA
tggggtagcattttcttagg

SEQ ID NO: 18601 - DNA, 20 bp, synthetic construct
  misc_feature 1..20: note = chemically synthesized
  source 1..20: mol_type = other DNA
ttagggagcttataaatgtg

SEQ ID NO: 18602 - DNA, 20 bp, synthetic construct
  misc_feature 1..20: note = chemically synthesized
  source 1..20: mol_type = other DNA
gggagcttataaatgtgtag

SEQ ID NO: 18603 - DNA, 20 bp, synthetic construct
  misc_feature 1..20: note = chemically synthesized
  source 1..20: mol_type = other DNA
atgtgtagcagccctgctac

SEQ ID NO: 18604 - DNA, 20 bp, synthetic construct
  misc_feature 1..20: note = chemically synthesized
  source 1..20: mol_type = other DNA
tgtgtagcagccctgctact

SEQ ID NO: 18605 - DNA, 20 bp, synthetic construct
  misc_feature 1..20: note = chemically synthesized
  source 1..20: mol_type = other DNA
gtgtagcagccctgctactg

SEQ ID NO: 18606 - DNA, 20 bp, synthetic construct
  misc_feature 1..20: note = chemically synthesized
  source 1..20: mol_type = other DNA
tgtagcagccctgctactgg

SEQ ID NO: 18607 - DNA, 20 bp, synthetic construct
  misc_feature 1..20: note = chemically synthesized
  source 1..20: mol_type = other DNA
agcagccctgctactggggg

SEQ ID NO: 18608 - DNA, 20 bp, synthetic construct
  misc_feature 1..20: note = chemically synthesized
  source 1..20: mol_type = other DNA
gcagccctgctactgggggt

SEQ ID NO: 18609 - DNA, 20 bp, synthetic construct
  misc_feature 1..20: note = chemically synthesized
  source 1..20: mol_type = other DNA
cagccctgctactgggggtg

SEQ ID NO: 18610 - DNA, 20 bp, synthetic construct
  misc_feature 1..20: note = chemically synthesized
  source 1..20: mol_type = other DNA
agccctgctactgggggtgg

SEQ ID NO: 18611 - DNA, 20 bp, synthetic construct
  misc_feature 1..20: note = chemically synthesized
  source 1..20: mol_type = other DNA
ccctgctactgggggtgggg

SEQ ID NO: 18612 - DNA, 20 bp, synthetic construct
  misc_feature 1..20: note = chemically synthesized
  source 1..20: mol_type = other DNA
ctaatgacacactttatccc

SEQ ID NO: 18613 - DNA, 20 bp, synthetic construct
  misc_feature 1..20: note = chemically synthesized
  source 1..20: mol_type = other DNA
acacactttatccctggtga

SEQ ID NO: 18614 - DNA, 20 bp, synthetic construct
  misc_feature 1..20: note = chemically synthesized
  source 1..20: mol_type = other DNA
cactttatccctggtgacag

SEQ ID NO: 18615 - DNA, 20 bp, synthetic construct
  misc_feature 1..20: note = chemically synthesized
  source 1..20: mol_type = other DNA
ttatccctggtgacagcagc

SEQ ID NO: 18616 - DNA, 20 bp, synthetic construct
  misc_feature 1..20: note = chemically synthesized
  source 1..20: mol_type = other DNA
tccctggtgacagcagccag

SEQ ID NO: 18617 - DNA, 20 bp, synthetic construct
  misc_feature 1..20: note = chemically synthesized
  source 1..20: mol_type = other DNA
ctggtgacagcagccagcag

SEQ ID NO: 18618 - DNA, 20 bp, synthetic construct
  misc_feature 1..20: note = chemically synthesized
  source 1..20: mol_type = other DNA
cagcagccagcagtagcact

SEQ ID NO: 18619 - DNA, 20 bp, synthetic construct
  misc_feature 1..20: note = chemically synthesized
  source 1..20: mol_type = other DNA
ccagcagtagcactcagctg

SEQ ID NO: 18620 - DNA, 20 bp, synthetic construct
  misc_feature 1..20: note = chemically synthesized
  source 1..20: mol_type = other DNA
cagcagtagcactcagctgt

SEQ ID NO: 18621 - DNA, 20 bp, synthetic construct
  misc_feature 1..20: note = chemically synthesized
  source 1..20: mol_type = other DNA
cagtagcactcagctgtggg

SEQ ID NO: 18622 - DNA, 20 bp, synthetic construct
  misc_feature 1..20: note = chemically synthesized
  source 1..20: mol_type = other DNA
agtagcactcagctgtgggt

SEQ ID NO: 18623 - DNA, 20 bp, synthetic construct
  misc_feature 1..20: note = chemically synthesized
  source 1..20: mol_type = other DNA
gtagcactcagctgtgggtg

SEQ ID NO: 18624 - DNA, 20 bp, synthetic construct
  misc_feature 1..20: note = chemically synthesized
  source 1..20: mol_type = other DNA
tagcactcagctgtgggtgg

SEQ ID NO: 18625 - DNA, 20 bp, synthetic construct
  misc_feature 1..20: note = chemically synthesized
  source 1..20: mol_type = other DNA
cagctgtgggtgggggatgt

SEQ ID NO: 18626 - DNA, 20 bp, synthetic construct
  misc_feature 1..20: note = chemically synthesized
  source 1..20: mol_type = other DNA
ctgtgggtgggggatgtcag

SEQ ID NO: 18627 - DNA, 20 bp, synthetic construct
  misc_feature 1..20: note = chemically synthesized
  source 1..20: mol_type = other DNA
gtgggtgggggatgtcagca

SEQ ID NO: 18628 - DNA, 20 bp, synthetic construct
  misc_feature 1..20: note = chemically synthesized
  source 1..20: mol_type = other DNA
gggggatgtcagcagagctt

SEQ ID NO: 18629 - DNA, 20 bp, synthetic construct
  misc_feature 1..20: note = chemically synthesized
  source 1..20: mol_type = other DNA
ggggatgtcagcagagcttc

SEQ ID NO: 18630 - DNA, 20 bp, synthetic construct
  misc_feature 1..20: note = chemically synthesized
  source 1..20: mol_type = other DNA
gggatgtcagcagagcttca

SEQ ID NO: 18631 - DNA, 20 bp, synthetic construct
  misc_feature 1..20: note = chemically synthesized
  source 1..20: mol_type = other DNA
tcagcagagcttcagggatg

SEQ ID NO: 18632 - DNA, 20 bp, synthetic construct
  misc_feature 1..20: note = chemically synthesized
  source 1..20: mol_type = other DNA
agcagagcttcagggatgta

SEQ ID NO: 18633 - DNA, 20 bp, synthetic construct
  misc_feature 1..20: note = chemically synthesized
  source 1..20: mol_type = other DNA
gcttcagggatgtagagatg

SEQ ID NO: 18634 - DNA, 20 bp, synthetic construct
  misc_feature 1..20: note = chemically synthesized
  source 1..20: mol_type = other DNA
tgtagagatgcagatgatgt

SEQ ID NO: 18635 - DNA, 20 bp, synthetic construct
  misc_feature 1..20: note = chemically synthesized
  source 1..20: mol_type = other DNA
gtagagatgcagatgatgtt

SEQ ID NO: 18636 - DNA, 20 bp, synthetic construct
  misc_feature 1..20: note = chemically synthesized
  source 1..20: mol_type = other DNA
tagagatgcagatgatgttg

SEQ ID NO: 18637 - DNA, 20 bp, synthetic construct
  misc_feature 1..20: note = chemically synthesized
  source 1..20: mol_type = other DNA
tgcagatgatgttggggtct

SEQ ID NO: 18638 - DNA, 20 bp, synthetic construct
  misc_feature 1..20: note = chemically synthesized
  source 1..20: mol_type = other DNA
gcagatgatgttggggtctg

SEQ ID NO: 18639 - DNA, 20 bp, synthetic construct
  misc_feature 1..20: note = chemically synthesized
  source 1..20: mol_type = other DNA
gtctgaggaacgatgtcatc

SEQ ID NO: 18640 - DNA, 20 bp, synthetic construct
  misc_feature 1..20: note = chemically synthesized
  source 1..20: mol_type = other DNA
tgaggaacgatgtcatctgg

SEQ ID NO: 18641 - DNA, 20 bp, synthetic construct
  misc_feature 1..20: note = chemically synthesized
  source 1..20: mol_type = other DNA
gaggaacgatgtcatctggt

SEQ ID NO: 18642 - DNA, 20 bp, synthetic construct
  misc_feature 1..20: note = chemically synthesized
  source 1..20: mol_type = other DNA
cgatgtcatctggtgggtgt

SEQ ID NO: 18643 - DNA, 20 bp, synthetic construct
  misc_feature 1..20: note = chemically synthesized
  source 1..20: mol_type = other DNA
gatgtcatctggtgggtgtt

SEQ ID NO: 18644 - DNA, 20 bp, synthetic construct
  misc_feature 1..20: note = chemically synthesized
  source 1..20: mol_type = other DNA
tgggtgttgggctctcaaaa

SEQ ID NO: 18645 - DNA, 20 bp, synthetic construct
  misc_feature 1..20: note = chemically synthesized
  source 1..20: mol_type = other DNA
caaaatggcaccttgctgct

SEQ ID NO: 18646 - DNA, 20 bp, synthetic construct
  misc_feature 1..20: note = chemically synthesized
  source 1..20: mol_type = other DNA
ggcaccttgctgctcagtaa

SEQ ID NO: 18647 - DNA, 20 bp, synthetic construct
  misc_feature 1..20: note = chemically synthesized
  source 1..20: mol_type = other DNA
gcaccttgctgctcagtaat

SEQ ID NO: 18648 - DNA, 20 bp, synthetic construct
  misc_feature 1..20: note = chemically synthesized
  source 1..20: mol_type = other DNA
caccttgctgctcagtaatg

SEQ ID NO: 18649 - DNA, 20 bp, synthetic construct
  misc_feature 1..20: note = chemically synthesized
  source 1..20: mol_type = other DNA
ttgctgctcagtaatgggga

SEQ ID NO: 18650 - DNA, 20 bp, synthetic construct
  misc_feature 1..20: note = chemically synthesized
  source 1..20: mol_type = other DNA
ctgctcagtaatggggatgg

SEQ ID NO: 18651 - DNA, 20 bp, synthetic construct
  misc_feature 1..20: note = chemically synthesized
  source 1..20: mol_type = other DNA
tgctcagtaatggggatggc

SEQ ID NO: 18652 - DNA, 20 bp, synthetic construct
  misc_feature 1..20: note = chemically synthesized
  source 1..20: mol_type = other DNA
gctcagtaatggggatggca

SEQ ID NO: 18653 - DNA, 20 bp, synthetic construct
  misc_feature 1..20: note = chemically synthesized
  source 1..20: mol_type = other DNA
ctcagtaatggggatggcag

SEQ ID NO: 18654 - DNA, 20 bp, synthetic construct
  misc_feature 1..20: note = chemically synthesized
  source 1..20: mol_type = other DNA
agtaatggggatggcagggg

SEQ ID NO: 18655 - DNA, 20 bp, synthetic construct
  misc_feature 1..20: note = chemically synthesized
  source 1..20: mol_type = other DNA
gtaatggggatggcaggggt

SEQ ID NO: 18656 - DNA, 20 bp, synthetic construct
  misc_feature 1..20: note = chemically synthesized
  source 1..20: mol_type = other DNA
gggatggcaggggtgggacc

SEQ ID NO: 18657 - DNA, 20 bp, synthetic construct
  misc_feature 1..20: note = chemically synthesized
  source 1..20: mol_type = other DNA
tggcaggggtgggacccagt

SEQ ID NO: 18658 - DNA, 20 bp, synthetic construct
  misc_feature 1..20: note = chemically synthesized
  source 1..20: mol_type = other DNA
gcaggggtgggacccagtga

SEQ ID NO: 18659 - DNA, 20 bp, synthetic construct
  misc_feature 1..20: note = chemically synthesized
  source 1..20: mol_type = other DNA
cccagtgagagctccttctc

SEQ ID NO: 18660 - DNA, 20 bp, synthetic construct
  misc_feature 1..20: note = chemically synthesized
  source 1..20: mol_type = other DNA
cagtgagagctccttctctg

SEQ ID NO: 18661 - DNA, 20 bp, synthetic construct
  misc_feature 1..20: note = chemically synthesized
  source 1..20: mol_type = other DNA
caatgcctttgtgcgattgc

SEQ ID NO: 18662 - DNA, 20 bp, synthetic construct
  misc_feature 1..20: note = chemically synthesized
  source 1..20: mol_type = other DNA
aatgcctttgtgcgattgct

SEQ ID NO: 18663 - DNA, 20 bp, synthetic construct
  misc_feature 1..20: note = chemically synthesized
  source 1..20: mol_type = other DNA
gcctttgtgcgattgctggg

SEQ ID NO: 18664 - DNA, 20 bp, synthetic construct
  misc_feature 1..20: note = chemically synthesized
  source 1..20: mol_type = other DNA
tgctgggcagttccttatga

SEQ ID NO: 18665 - DNA, 20 bp, synthetic construct
  misc_feature 1..20: note = chemically synthesized
  source 1..20: mol_type = other DNA
cagttccttatgatagtctc

SEQ ID NO: 18666 - DNA, 20 bp, synthetic construct
  misc_feature 1..20: note = chemically synthesized
  source 1..20: mol_type = other DNA
agttccttatgatagtctca

SEQ ID NO: 18667 - DNA, 20 bp, synthetic construct
  misc_feature 1..20: note = chemically synthesized
  source 1..20: mol_type = other DNA
tgatagtctcaaggcctgca

SEQ ID NO: 18668 - DNA, 20 bp, synthetic construct
  misc_feature 1..20: note = chemically synthesized
  source 1..20: mol_type = other DNA
gtctcaaggcctgcatggtc

SEQ ID NO: 18669 - DNA, 20 bp, synthetic construct
  misc_feature 1..20: note = chemically synthesized
  source 1..20: mol_type = other DNA
tctcaaggcctgcatggtca

SEQ ID NO: 18670 - DNA, 20 bp, synthetic construct
  misc_feature 1..20: note = chemically synthesized
  source 1..20: mol_type = other DNA
ctcaaggcctgcatggtcaa

SEQ ID NO: 18671 - DNA, 20 bp, synthetic construct
  misc_feature 1..20: note = chemically synthesized
  source 1..20: mol_type = other DNA
atggtcaagggactctcctg

SEQ ID NO: 18672 - DNA, 20 bp, synthetic construct
  misc_feature 1..20: note = chemically synthesized
  source 1..20: mol_type = other DNA
tcaagggactctcctgtggc

SEQ ID NO: 18673 - DNA, 20 bp, synthetic construct
  misc_feature 1..20: note = chemically synthesized
  source 1..20: mol_type = other DNA
caagggactctcctgtggct

SEQ ID NO: 18674 - DNA, 20 bp, synthetic construct
  misc_feature 1..20: note = chemically synthesized
  source 1..20: mol_type = other DNA
tctcctgtggctaggattcc

SEQ ID NO: 18675 - DNA, 20 bp, synthetic construct
  misc_feature 1..20: note = chemically synthesized
  source 1..20: mol_type = other DNA
tcctgtggctaggattcctg

SEQ ID NO: 18676 - DNA, 20 bp, synthetic construct
  misc_feature 1..20: note = chemically synthesized
  source 1..20: mol_type = other DNA
gattcctggagtccataatg

SEQ ID NO: 18677 - DNA, 20 bp, synthetic construct
  misc_feature 1..20: note = chemically synthesized
  source 1..20: mol_type = other DNA
tggagtccataatgcagatg

SEQ ID NO: 18678 - DNA, 20 bp, synthetic construct
  misc_feature 1..20: note = chemically synthesized
  source 1..20: mol_type = other DNA
ataatgcagatgtggaccac

SEQ ID NO: 18679 - DNA, 20 bp, synthetic construct
  misc_feature 1..20: note = chemically synthesized
  source 1..20: mol_type = other DNA
taatgcagatgtggaccact

SEQ ID NO: 18680 - DNA, 20 bp, synthetic construct
  misc_feature 1..20: note = chemically synthesized
  source 1..20: mol_type = other DNA
atgcagatgtggaccactgg

SEQ ID NO: 18681 - DNA, 20 bp, synthetic construct
  misc_feature 1..20: note = chemically synthesized
  source 1..20: mol_type = other DNA
agatgtggaccactgggagt

SEQ ID NO: 18682 - DNA, 20 bp, synthetic construct
  misc_feature 1..20: note = chemically synthesized
  source 1..20: mol_type = other DNA
tcacttaactttcgatgcac

SEQ ID NO: 18683 - DNA, 20 bp, synthetic construct
  misc_feature 1..20: note = chemically synthesized
  source 1..20: mol_type = other DNA
cacttaactttcgatgcact

SEQ ID NO: 18684 - DNA, 20 bp, synthetic construct
  misc_feature 1..20: note = chemically synthesized
  source 1..20: mol_type = other DNA
acttaactttcgatgcactg

SEQ ID NO: 18685 - DNA, 20 bp, synthetic construct
  misc_feature 1..20: note = chemically synthesized
  source 1..20: mol_type = other DNA
ttaactttcgatgcactggg

SEQ ID NO: 18686 - DNA, 20 bp, synthetic construct
  misc_feature 1..20: note = chemically synthesized
  source 1..20: mol_type = other DNA
gatgcactggggagcctctc

SEQ ID NO: 18687 - DNA, 20 bp, synthetic construct
  misc_feature 1..20: note = chemically synthesized
  source 1..20: mol_type = other DNA
ggggagcctctctggcctca

SEQ ID NO: 18688 - DNA, 20 bp, synthetic construct
  misc_feature 1..20: note = chemically synthesized
  source 1..20: mol_type = other DNA
ggagcctctctggcctcaca

SEQ ID NO: 18689 - DNA, 20 bp, synthetic construct
  misc_feature 1..20: note = chemically synthesized
  source 1..20: mol_type = other DNA
gagcctctctggcctcacag

SEQ ID NO: 18690 - DNA, 20 bp, synthetic construct
  misc_feature 1..20: note = chemically synthesized
  source 1..20: mol_type = other DNA
gcctcacagaggatccctac

SEQ ID NO: 18691 - DNA, 20 bp, synthetic construct
  misc_feature 1..20: note = chemically synthesized
  source 1..20: mol_type = other DNA
cctcacagaggatccctact

SEQ ID NO: 18692 - DNA, 20 bp, synthetic construct
  misc_feature 1..20: note = chemically synthesized
  source 1..20: mol_type = other DNA
cacagaggatccctactggg

SEQ ID NO: 18693 - DNA, 20 bp, synthetic construct
  misc_feature 1..20: note = chemically synthesized
  source 1..20: mol_type = other DNA
acagaggatccctactgggt

SEQ ID NO: 18694 - DNA, 20 bp, synthetic construct
  misc_feature 1..20: note = chemically synthesized
  source 1..20: mol_type = other DNA
ttccctccccttcattgcct

SEQ ID NO: 18695 - DNA, 20 bp, synthetic construct
  misc_feature 1..20: note = chemically synthesized
  source 1..20: mol_type = other DNA
gtcacttctctgttgaattc

SEQ ID NO: 18696 - DNA, 20 bp, synthetic construct
  misc_feature 1..20: note = chemically synthesized
  source 1..20: mol_type = other DNA
ttccagaattctctcttatg

SEQ ID NO: 18697 - DNA, 20 bp, synthetic construct
  misc_feature 1..20: note = chemically synthesized
  source 1..20: mol_type = other DNA
tccagaattctctcttatgt

SEQ ID NO: 18698 - DNA, 20 bp, synthetic construct
  misc_feature 1..20: note = chemically synthesized
  source 1..20: mol_type = other DNA
ggattttctacttactattt

SEQ ID NO: 18699 - DNA, 20 bp, synthetic construct
  misc_feature 1..20: note = chemically synthesized
  source 1..20: mol_type = other DNA
cttactattttggttctttg

SEQ ID NO: 18700 - DNA, 20 bp, synthetic construct
  misc_feature 1..20: note = chemically synthesized
  source 1..20: mol_type = other DNA
tactattttggttctttgtg

SEQ ID NO: 18701 - DNA, 20 bp, synthetic construct
  misc_feature 1..20: note = chemically synthesized
  source 1..20: mol_type = other DNA
actattttggttctttgtgg

SEQ ID NO: 18702 - DNA, 20 bp, synthetic construct
  misc_feature 1..20: note = chemically synthesized
  source 1..20: mol_type = other DNA
tattttggttctttgtggag

SEQ ID NO: 18703 - DNA, 20 bp, synthetic construct
  misc_feature 1..20: note = chemically synthesized
  source 1..20: mol_type = other DNA
attttggttctttgtggagg

SEQ ID NO: 18704 - DNA, 20 bp, synthetic construct
  misc_feature 1..20: note = chemically synthesized
  source 1..20: mol_type = other DNA
tggttctttgtggaggaggt

SEQ ID NO: 18705 - DNA, 20 bp, synthetic construct
  misc_feature 1..20: note = chemically synthesized
  source 1..20: mol_type = other DNA
tttgtggaggaggtgagtgt

SEQ ID NO: 18706 - DNA, 20 bp, synthetic construct
  misc_feature 1..20: note = chemically synthesized
  source 1..20: mol_type = other DNA
aggtgagtgtcagctgccct

SEQ ID NO: 18707 - DNA, 20 bp, synthetic construct
  misc_feature 1..20: note = chemically synthesized
  source 1..20: mol_type = other DNA
gagtgtcagctgcccttagt

SEQ ID NO: 18708 - DNA, 20 bp, synthetic construct
  misc_feature 1..20: note = chemically synthesized
  source 1..20: mol_type = other DNA
gcccttagtcagtaatcttc

SEQ ID NO: 18709 - DNA, 20 bp, synthetic construct
  misc_feature 1..20: note = chemically synthesized
  source 1..20: mol_type = other DNA
cccttcccttgaaatttttt

SEQ ID NO: 18710 - DNA, 20 bp, synthetic construct
  misc_feature 1..20: note = chemically synthesized
  source 1..20: mol_type = other DNA
ctttatgtttttatttctaa

SEQ ID NO: 18711 - DNA, 20 bp, synthetic construct
  misc_feature 1..20: note = chemically synthesized
  source 1..20: mol_type = other DNA
ttttatttctaatagactga

SEQ ID NO: 18712 - DNA, 20 bp, synthetic construct
  misc_feature 1..20: note = chemically synthesized
  source 1..20: mol_type = other DNA
ttatttctaatagactgaaa

SEQ ID NO: 18713 - DNA, 20 bp, synthetic construct
  misc_feature 1..20: note = chemically synthesized
  source 1..20: mol_type = other DNA
aatcatattttaaacactct

SEQ ID NO: 18714 - DNA, 20 bp, synthetic construct
  misc_feature 1..20: note = chemically synthesized
  source 1..20: mol_type = other DNA
atcatattttaaacactcta

SEQ ID NO: 18715 - DNA, 20 bp, synthetic construct
  misc_feature 1..20: note = chemically synthesized
  source 1..20: mol_type = other DNA
ttaaacactctaaggctata

SEQ ID NO: 18716 - DNA, 20 bp, synthetic construct
  misc_feature 1..20: note = chemically synthesized
  source 1..20: mol_type = other DNA
taaacactctaaggctatat

SEQ ID NO: 18717 - DNA, 20 bp, synthetic construct
  misc_feature 1..20: note = chemically synthesized
  source 1..20: mol_type = other DNA
aaacactctaaggctatatg

SEQ ID NO: 18718 - DNA, 20 bp, synthetic construct
  misc_feature 1..20: note = chemically synthesized
  source 1..20: mol_type = other DNA
aacactctaaggctatatgg

SEQ ID NO: 18719 - DNA, 20 bp, synthetic construct
  misc_feature 1..20: note = chemically synthesized
  source 1..20: mol_type = other DNA
gctatatgggggactatctg

SEQ ID NO: 18720 - DNA, 20 bp, synthetic construct
  misc_feature 1..20: note = chemically synthesized
  source 1..20: mol_type = other DNA
ctatatgggggactatctga

SEQ ID NO: 18721 - DNA, 20 bp, synthetic construct
  misc_feature 1..20: note = chemically synthesized
  source 1..20: mol_type = other DNA
gggggactatctgaaggcct

SEQ ID NO: 18722 - DNA, 20 bp, synthetic construct
  misc_feature 1..20: note = chemically synthesized
  source 1..20: mol_type = other DNA
actatctgaaggcctcagat

SEQ ID NO: 18723 - DNA, 20 bp, synthetic construct
  misc_feature 1..20: note = chemically synthesized
  source 1..20: mol_type = other DNA
tgaaggcctcagatgagtaa

SEQ ID NO: 18724 - DNA, 20 bp, synthetic construct
  misc_feature 1..20: note = chemically synthesized
  source 1..20: mol_type = other DNA
aggcctcagatgagtaaaag

SEQ ID NO: 18725 - DNA, 20 bp, synthetic construct
  misc_feature 1..20: note = chemically synthesized
  source 1..20: mol_type = other DNA
cctcagatgagtaaaagaag

SEQ ID NO: 18726 - DNA, 20 bp, synthetic construct
  misc_feature 1..20: note = chemically synthesized
  source 1..20: mol_type = other DNA
gagtaaaagaagtagcgaat

SEQ ID NO: 18727 - DNA, 20 bp, synthetic construct
  misc_feature 1..20: note = chemically synthesized
  source 1..20: mol_type = other DNA
atcatttgtttcttcaaata

SEQ ID NO: 18728 - DNA, 20 bp, synthetic construct
  misc_feature 1..20: note = chemically synthesized
  source 1..20: mol_type = other DNA
tatttcccccttatgttctt

SEQ ID NO: 18729 - DNA, 20 bp, synthetic construct
  misc_feature 1..20: note = chemically synthesized
  source 1..20: mol_type = other DNA
aaaaatgtttgcatctacca

SEQ ID NO: 18730 - DNA, 20 bp, synthetic construct
  misc_feature 1..20: note = chemically synthesized
  source 1..20: mol_type = other DNA
aaatacgtaatctaacaaac

SEQ ID NO: 18731 - DNA, 20 bp, synthetic construct
  misc_feature 1..20: note = chemically synthesized
  source 1..20: mol_type = other DNA
aatacgtaatctaacaaaca

SEQ ID NO: 18732 - DNA, 20 bp, synthetic construct
  misc_feature 1..20: note = chemically synthesized
  source 1..20: mol_type = other DNA
ctaacaaacaaggatgtttt

SEQ ID NO: 18733 - DNA, 20 bp, synthetic construct
  misc_feature 1..20: note = chemically synthesized
  source 1..20: mol_type = other DNA
aaggatgttttaagatctct

SEQ ID NO: 18734 - DNA, 20 bp, synthetic construct
  misc_feature 1..20: note = chemically synthesized
  source 1..20: mol_type = other DNA
atgttttaagatctctgagt

SEQ ID NO: 18735 - DNA, 20 bp, synthetic construct
  misc_feature 1..20: note = chemically synthesized
  source 1..20: mol_type = other DNA
agatctctgagtaagatgca

SEQ ID NO: 18736 - DNA, 20 bp, synthetic construct
  misc_feature 1..20: note = chemically synthesized
  source 1..20: mol_type = other DNA
agatgcatagttgcaaataa

SEQ ID NO: 18737 - DNA, 20 bp, synthetic construct
  misc_feature 1..20: note = chemically synthesized
  source 1..20: mol_type = other DNA
gatgcatagttgcaaataaa

SEQ ID NO: 18738 - DNA, 20 bp, synthetic construct
  misc_feature 1..20: note = chemically synthesized
  source 1..20: mol_type = other DNA
tgcatagttgcaaataaaag

SEQ ID NO: 18739 - DNA, 20 bp, synthetic construct
  misc_feature 1..20: note = chemically synthesized
  source 1..20: mol_type = other DNA
tgcaaataaaaggagttttc

SEQ ID NO: 18740 - DNA, 20 bp, synthetic construct
  misc_feature 1..20: note = chemically synthesized
  source 1..20: mol_type = other DNA
gcaaataaaaggagttttca

SEQ ID NO: 18741 - DNA, 20 bp, synthetic construct
  misc_feature 1..20: note = chemically synthesized
  source 1..20: mol_type = other DNA
atctaataaatgtgtaccat

SEQ ID NO: 18742 - DNA, 20 bp, synthetic construct
  misc_feature 1..20: note = chemically synthesized
  source 1..20: mol_type = other DNA
tgtgtaccatcagaaactta

SEQ ID NO: 18743 - DNA, 20 bp, synthetic construct
  misc_feature 1..20: note = chemically synthesized
  source 1..20: mol_type = other DNA
aaacttatggtatattctcc

SEQ ID NO: 18744 - DNA, 20 bp, synthetic construct
  misc_feature 1..20: note = chemically synthesized
  source 1..20: mol_type = other DNA
tatggtatattctcctggaa

SEQ ID NO: 18745 - DNA, 20 bp, synthetic construct
  misc_feature 1..20: note = chemically synthesized
  source 1..20: mol_type = other DNA
atattctcctggaaaagatg

SEQ ID NO: 18746 - DNA, 20 bp, synthetic construct
  misc_feature 1..20: note = chemically synthesized
  source 1..20: mol_type = other DNA
tcctggaaaagatgaagatg

SEQ ID NO: 18747 - DNA, 20 bp, synthetic construct
  misc_feature 1..20: note = chemically synthesized
  source 1..20: mol_type = other DNA
aagatgaagatgaagaaaat

SEQ ID NO: 18748 - DNA, 20 bp, synthetic construct
  misc_feature 1..20: note = chemically synthesized
  source 1..20: mol_type = other DNA
agatgaagaaaataagtcta

SEQ ID NO: 18749 - DNA, 20 bp, synthetic construct
  misc_feature 1..20: note = chemically synthesized
  source 1..20: mol_type = other DNA
tgaagaaaataagtctacag

SEQ ID NO: 18750 - DNA, 20 bp, synthetic construct
  misc_feature 1..20: note = chemically synthesized
  source 1..20: mol_type = other DNA
aagaaaataagtctacagaa

SEQ ID NO: 18751 - DNA, 20 bp, synthetic construct
  misc_feature 1..20: note = chemically synthesized
  source 1..20: mol_type = other DNA
agaaaataagtctacagaag

SEQ ID NO: 18752 - DNA, 20 bp, synthetic construct
  misc_feature 1..20: note = chemically synthesized
  source 1..20: mol_type = other DNA
aaaataagtctacagaagag

SEQ ID NO: 18753 - DNA, 20 bp, synthetic construct
  misc_feature 1..20: note = chemically synthesized
  source 1..20: mol_type = other DNA
acagaagaggagaaattctt

SEQ ID NO: 18754 - DNA, 20 bp, synthetic construct
  misc_feature 1..20: note = chemically synthesized
  source 1..20: mol_type = other DNA
ttggaaattttgcatttttg

SEQ ID NO: 18755 - DNA, 20 bp, synthetic construct
  misc_feature 1..20: note = chemically synthesized
  source 1..20: mol_type = other DNA
aaattttgcatttttgtgga

SEQ ID NO: 18756 - DNA, 20 bp, synthetic construct
  misc_feature 1..20: note = chemically synthesized
  source 1..20: mol_type = other DNA
ttttgcatttttgtggatag

SEQ ID NO: 18757 - DNA, 20 bp, synthetic construct
  misc_feature 1..20: note = chemically synthesized
  source 1..20: mol_type = other DNA
ttttgtggatagtggttttg

SEQ ID NO: 18758 - DNA, 20 bp, synthetic construct
  misc_feature 1..20: note = chemically synthesized
  source 1..20: mol_type = other DNA
gtggatagtggttttgaaga

SEQ ID NO: 18759 - DNA, 20 bp, synthetic construct
  misc_feature 1..20: note = chemically synthesized
  source 1..20: mol_type = other DNA
tagtggttttgaagaaagct

SEQ ID NO: 18760 - DNA, 20 bp, synthetic construct
  misc_feature 1..20: note = chemically synthesized
  source 1..20: mol_type = other DNA
atatatttaaatatgttgct

SEQ ID NO: 18761 - DNA, 20 bp, synthetic construct
  misc_feature 1..20: note = chemically synthesized
  source 1..20: mol_type = other DNA
gatgtgactcccacacttta

SEQ ID NO: 18762 - DNA, 20 bp, synthetic construct
  misc_feature 1..20: note = chemically synthesized
  source 1..20: mol_type = other DNA
gactcccacactttaaagaa

SEQ ID NO: 18763 - DNA, 20 bp, synthetic construct
  misc_feature 1..20: note = chemically synthesized
  source 1..20: mol_type = other DNA
taaagaaaagttcttcattt

SEQ ID NO: 18764 - DNA, 20 bp, synthetic construct
  misc_feature 1..20: note = chemically synthesized
  source 1..20: mol_type = other DNA
ttttagttgcccttgcaaat

SEQ ID NO: 18765 - DNA, 20 bp, synthetic construct
  misc_feature 1..20: note = chemically synthesized
  source 1..20: mol_type = other DNA
gttgcccttgcaaattggct

SEQ ID NO: 18766 - DNA, 20 bp, synthetic construct
  misc_feature 1..20: note = chemically synthesized
  source 1..20: mol_type = other DNA
tcctcaacaaataattttga

SEQ ID NO: 18767 - DNA, 20 bp, synthetic construct
  misc_feature 1..20: note = chemically synthesized
  source 1..20: mol_type = other DNA
tgatggtttctaaaattgtc

SEQ ID NO: 18768 - DNA, 20 bp, synthetic construct
  misc_feature 1..20: note = chemically synthesized
  source 1..20: mol_type = other DNA
tctaaaattgtccagaattt

SEQ ID NO: 18769 - DNA, 20 bp, synthetic construct
  misc_feature 1..20: note = chemically synthesized
  source 1..20: mol_type = other DNA
ctaaaattgtccagaatttg

SEQ ID NO: 18770 - DNA, 20 bp, synthetic construct
  misc_feature 1..20: note = chemically synthesized
  source 1..20: mol_type = other DNA
ccagaatttgaggaaatact

SEQ ID NO: 18771 - DNA, 20 bp, synthetic construct
  misc_feature 1..20: note = chemically synthesized
  source 1..20: mol_type = other DNA
tttgaggaaatacttagatg

SEQ ID NO: 18772 - DNA, 20 bp, synthetic construct
  misc_feature 1..20: note = chemically synthesized
  source 1..20: mol_type = other DNA
gaggaaatacttagatgtag

SEQ ID NO: 18773 - DNA, 20 bp, synthetic construct
  misc_feature 1..20: note = chemically synthesized
  source 1..20: mol_type = other DNA
gacatcaatttatgttaact

SEQ ID NO: 18774 - DNA, 20 bp, synthetic construct
  misc_feature 1..20: note = chemically synthesized
  source 1..20: mol_type = other DNA
tgttaacttagatttattgt

SEQ ID NO: 18775 - DNA, 20 bp, synthetic construct
  misc_feature 1..20: note = chemically synthesized
  source 1..20: mol_type = other DNA
aacttagatttattgttgga

SEQ ID NO: 18776 - DNA, 20 bp, synthetic construct
  misc_feature 1..20: note = chemically synthesized
  source 1..20: mol_type = other DNA
agatttattgttggatggtt

SEQ ID NO: 18777 - DNA, 20 bp, synthetic construct
  misc_feature 1..20: note = chemically synthesized
  source 1..20: mol_type = other DNA
taatcatgtctgttcttgtc

SEQ ID NO: 18778 - DNA, 20 bp, synthetic construct
  misc_feature 1..20: note = chemically synthesized
  source 1..20: mol_type = other DNA
atgtctgttcttgtccagtc

SEQ ID NO: 18779 - DNA, 20 bp, synthetic construct
  misc_feature 1..20: note = chemically synthesized
  source 1..20: mol_type = other DNA
tctgttcttgtccagtctag

SEQ ID NO: 18780 - DNA, 20 bp, synthetic construct
  misc_feature 1..20: note = chemically synthesized
  source 1..20: mol_type = other DNA
acatctgaactgtgatttga

SEQ ID NO: 18781 - DNA, 20 bp, synthetic construct
  misc_feature 1..20: note = chemically synthesized
  source 1..20: mol_type = other DNA
tttgacagtgtccttattat

SEQ ID NO: 18782 - DNA, 20 bp, synthetic construct
  misc_feature 1..20: note = chemically synthesized
  source 1..20: mol_type = other DNA
tatcagactctgctcaatga

SEQ ID NO: 18783 - DNA, 20 bp, synthetic construct
  misc_feature 1..20: note = chemically synthesized
  source 1..20: mol_type = other DNA
gtttaaacttctttttgata

SEQ ID NO: 18784 - DNA, 20 bp, synthetic construct
  misc_feature 1..20: note = chemically synthesized
  source 1..20: mol_type = other DNA
cagtaaaaaacttttcctta

SEQ ID NO: 18785 - DNA, 20 bp, synthetic construct
  misc_feature 1..20: note = chemically synthesized
  source 1..20: mol_type = other DNA
tccttaaagatgaaattctt

SEQ ID NO: 18786 - DNA, 20 bp, synthetic construct
  misc_feature 1..20: note = chemically synthesized
  source 1..20: mol_type = other DNA
ccttaaagatgaaattctta

SEQ ID NO: 18787 - DNA, 20 bp, synthetic construct
  misc_feature 1..20: note = chemically synthesized
  source 1..20: mol_type = other DNA
atgaaattcttaaggacaat

SEQ ID NO: 18788 - DNA, 20 bp, synthetic construct
  misc_feature 1..20: note = chemically synthesized
  source 1..20: mol_type = other DNA
ttaaggacaattagcttgtg

SEQ ID NO: 18789 - DNA, 20 bp, synthetic construct
  misc_feature 1..20: note = chemically synthesized
  source 1..20: mol_type = other DNA
tatgaaaattgcttgcattt

SEQ ID NO: 18790 - DNA, 20 bp, synthetic construct
  misc_feature 1..20: note = chemically synthesized
  source 1..20: mol_type = other DNA
tgaaaattgcttgcattttg

SEQ ID NO: 18791 - DNA, 20 bp, synthetic construct
  misc_feature 1..20: note = chemically synthesized
  source 1..20: mol_type = other DNA
cttgcattttggagttacat

SEQ ID NO: 18792 - DNA, 20 bp, synthetic construct
  misc_feature 1..20: note = chemically synthesized
  source 1..20: mol_type = other DNA
tataaattaatgaatcctat

SEQ ID NO: 18793 - DNA, 20 bp, synthetic construct
  misc_feature 1..20: note = chemically synthesized
  source 1..20: mol_type = other DNA
atcctattggtaccatataa

SEQ ID NO: 18794 - DNA, 20 bp, synthetic construct
  misc_feature 1..20: note = chemically synthesized
  source 1..20: mol_type = other DNA
cttttgtgtctcgcctttca

SEQ ID NO: 18795 - DNA, 20 bp, synthetic construct
  misc_feature 1..20: note = chemically synthesized
  source 1..20: mol_type = other DNA
ttttgtgtctcgcctttcaa

SEQ ID NO: 18796 - DNA, 20 bp, synthetic construct
  misc_feature 1..20: note = chemically synthesized
  source 1..20: mol_type = other DNA
tttgtgtctcgcctttcaaa

SEQ ID NO: 18797 - DNA, 20 bp, synthetic construct
  misc_feature 1..20: note = chemically synthesized
  source 1..20: mol_type = other DNA
tcaaagggcaattttccaaa

SEQ ID NO: 18798 - DNA, 20 bp, synthetic construct
  misc_feature 1..20: note = chemically synthesized
  source 1..20: mol_type = other DNA
tccaaaaagtatattttgca

SEQ ID NO: 18799 - DNA, 20 bp, synthetic construct
  misc_feature 1..20: note = chemically synthesized
  source 1..20: mol_type = other DNA
aaagtatattttgcatggct

SEQ ID NO: 18800 - DNA, 20 bp, synthetic construct
  misc_feature 1..20: note = chemically synthesized
  source 1..20: mol_type = other DNA
aagtatattttgcatggctc

SEQ ID NO: 18801 - DNA, 20 bp, synthetic construct
  misc_feature 1..20: note = chemically synthesized
  source 1..20: mol_type = other DNA
ttttgcatggctcaggctaa

SEQ ID NO: 18802 - DNA, 20 bp, synthetic construct
  misc_feature 1..20: note = chemically synthesized
  source 1..20: mol_type = other DNA
caggctaaaagtaatgtctc

SEQ ID NO: 18803 - DNA, 20 bp, synthetic construct
  misc_feature 1..20: note = chemically synthesized
  source 1..20: mol_type = other DNA
aaaagtaatgtctccagatg

SEQ ID NO: 18804 - DNA, 20 bp, synthetic construct
  misc_feature 1..20: note = chemically synthesized
  source 1..20: mol_type = other DNA
cattgattgtgactattgat

SEQ ID NO: 18805 - DNA, 20 bp, synthetic construct
  misc_feature 1..20: note = chemically synthesized
  source 1..20: mol_type = other DNA
ttgataagatttactatgta

SEQ ID NO: 18806 - DNA, 20 bp, synthetic construct
  misc_feature 1..20: note = chemically synthesized
  source 1..20: mol_type = other DNA
agatttactatgtaaagtat

SEQ ID NO: 18807 - DNA, 20 bp, synthetic construct
  misc_feature 1..20: note = chemically synthesized
  source 1..20: mol_type = other DNA
ctatgtaaagtataagttac

SEQ ID NO: 18808 - DNA, 20 bp, synthetic construct
  misc_feature 1..20: note = chemically synthesized
  source 1..20: mol_type = other DNA
gttactggaataatacattt

SEQ ID NO: 18809 - DNA, 20 bp, synthetic construct
  misc_feature 1..20: note = chemically synthesized
  source 1..20: mol_type = other DNA
aataatacatttaagaaata

SEQ ID NO: 18810 - DNA, 20 bp, synthetic construct
  misc_feature 1..20: note = chemically synthesized
  source 1..20: mol_type = other DNA
aatacatttaagaaatatag

SEQ ID NO: 18811 - DNA, 20 bp, synthetic construct
  misc_feature 1..20: note = chemically synthesized
  source 1..20: mol_type = other DNA
atagtagctattaaaacctg

SEQ ID NO: 18812 - DNA, 20 bp, synthetic construct
  misc_feature 1..20: note = chemically synthesized
  source 1..20: mol_type = other DNA
aaacctgtagtctgatgaaa

SEQ ID NO: 18813 - DNA, 20 bp, synthetic construct
  misc_feature 1..20: note = chemically synthesized
  source 1..20: mol_type = other DNA
tgaaatggaatatgttttga

SEQ ID NO: 18814 - DNA, 20 bp, synthetic construct
  misc_feature 1..20: note = chemically synthesized
  source 1..20: mol_type = other DNA
atggaatatgttttgaaaga

SEQ ID NO: 18815 - DNA, 20 bp, synthetic construct
  misc_feature 1..20: note = chemically synthesized
  source 1..20: mol_type = other DNA
gaatatgttttgaaagacag

SEQ ID NO: 18816 - DNA, 20 bp, synthetic construct
  misc_feature 1..20: note = chemically synthesized
  source 1..20: mol_type = other DNA
gaaagacagcagtgaaaaat

SEQ ID NO: 18817 - DNA, 20 bp, synthetic construct
  misc_feature 1..20: note = chemically synthesized
  source 1..20: mol_type = other DNA
agacagcagtgaaaaatgag

SEQ ID NO: 18818 - DNA, 20 bp, synthetic construct
  misc_feature 1..20: note = chemically synthesized
  source 1..20: mol_type = other DNA
aaaaatgagaagtaatatat

SEQ ID NO: 18819 - DNA, 20 bp, synthetic construct
  misc_feature 1..20: note = chemically synthesized
  source 1..20: mol_type = other DNA
taaaattgctttttgcaatt

SEQ ID NO: 18820 - DNA, 20 bp, synthetic construct
  misc_feature 1..20: note = chemically synthesized
  source 1..20: mol_type = other DNA
tgctttttgcaattgagttg

SEQ ID NO: 18821 - DNA, 20 bp, synthetic construct
  misc_feature 1..20: note = chemically synthesized
  source 1..20: mol_type = other DNA
attgagttgaagattgatgc

SEQ ID NO: 18822 - DNA, 20 bp, synthetic construct
  misc_feature 1..20: note = chemically synthesized
  source 1..20: mol_type = other DNA
ttgagttgaagattgatgcc

SEQ ID NO: 18823 - DNA, 20 bp, synthetic construct
  misc_feature 1..20: note = chemically synthesized
  source 1..20: mol_type = other DNA
tgccaggatcttattacctc

SEQ ID NO: 18824 - DNA, 20 bp, synthetic construct
  misc_feature 1..20: note = chemically synthesized
  source 1..20: mol_type = other DNA
gccaggatcttattacctcc

SEQ ID NO: 18825 - DNA, 20 bp, synthetic construct
  misc_feature 1..20: note = chemically synthesized
  source 1..20: mol_type = other DNA
attacctccaggatttcaca

SEQ ID NO: 18826 - DNA, 20 bp, synthetic construct
  misc_feature 1..20: note = chemically synthesized
  source 1..20: mol_type = other DNA
ttacctccaggatttcacaa

SEQ ID NO: 18827 - DNA, 20 bp, synthetic construct
  misc_feature 1..20: note = chemically synthesized
  source 1..20: mol_type = other DNA
gatttcacaaaggatttctt

SEQ ID NO: 18828 - DNA, 20 bp, synthetic construct
  misc_feature 1..20: note = chemically synthesized
  source 1..20: mol_type = other DNA
cttgagtcatccccttgctc

SEQ ID NO: 18829 - DNA, 20 bp, synthetic construct
  misc_feature 1..20: note = chemically synthesized
  source 1..20: mol_type = other DNA
cttgctctagctcatgaaca

SEQ ID NO: 18830 - DNA, 20 bp, synthetic construct
  misc_feature 1..20: note = chemically synthesized
  source 1..20: mol_type = other DNA
tcatgaacaaagtattgctc

SEQ ID NO: 18831 - DNA, 20 bp, synthetic construct
  misc_feature 1..20: note = chemically synthesized
  source 1..20: mol_type = other DNA
agtattgctcaagtaatcga

SEQ ID NO: 18832 - DNA, 20 bp, synthetic construct
  misc_feature 1..20: note = chemically synthesized
  source 1..20: mol_type = other DNA
tctcacatgtgattattatt

SEQ ID NO: 18833 - DNA, 20 bp, synthetic construct
  misc_feature 1..20: note = chemically synthesized
  source 1..20: mol_type = other DNA
attattatttagtgctgtca

SEQ ID NO: 18834 - DNA, 20 bp, synthetic construct
  misc_feature 1..20: note = chemically synthesized
  source 1..20: mol_type = other DNA
ttattatttagtgctgtcac

SEQ ID NO: 18835 - DNA, 20 bp, synthetic construct
  misc_feature 1..20: note = chemically synthesized
  source 1..20: mol_type = other DNA
tcacgggaaatatcctgcct

SEQ ID NO: 18836 - DNA, 20 bp, synthetic construct
  misc_feature 1..20: note = chemically synthesized
  source 1..20: mol_type = other DNA
aatatcctgcctaagtttac

SEQ ID NO: 18837 - DNA, 20 bp, synthetic construct
  misc_feature 1..20: note = chemically synthesized
  source 1..20: mol_type = other DNA
tatcctgcctaagtttactg

SEQ ID NO: 18838 - DNA, 20 bp, synthetic construct
  misc_feature 1..20: note = chemically synthesized
  source 1..20: mol_type = other DNA
atcctgcctaagtttactgg

SEQ ID NO: 18839 - DNA, 20 bp, synthetic construct
  misc_feature 1..20: note = chemically synthesized
  source 1..20: mol_type = other DNA
cctccctatgtcctcctacc

SEQ ID NO: 18840 - DNA, 20 bp, synthetic construct
  misc_feature 1..20: note = chemically synthesized
  source 1..20: mol_type = other DNA
tttccttgcacactctactc

SEQ ID NO: 18841 - DNA, 20 bp, synthetic construct
  misc_feature 1..20: note = chemically synthesized
  source 1..20: mol_type = other DNA
ttgcacactctactccagct

SEQ ID NO: 18842 - DNA, 20 bp, synthetic construct
  misc_feature 1..20: note = chemically synthesized
  source 1..20: mol_type = other DNA
tgcacactctactccagctt

SEQ ID NO: 18843 - DNA, 20 bp, synthetic construct
  misc_feature 1..20: note = chemically synthesized
  source 1..20: mol_type = other DNA
gcacactctactccagctta

SEQ ID NO: 18844 - DNA, 20 bp, synthetic construct
  misc_feature 1..20: note = chemically synthesized
  source 1..20: mol_type = other DNA
ctctactccagcttagggcc

SEQ ID NO: 18845 - DNA, 20 bp, synthetic construct
  misc_feature 1..20: note = chemically synthesized
  source 1..20: mol_type = other DNA
tctactccagcttagggcct

SEQ ID NO: 18846 - DNA, 20 bp, synthetic construct
  misc_feature 1..20: note = chemically synthesized
  source 1..20: mol_type = other DNA
acccttttaattaccccatt

SEQ ID NO: 18847 - DNA, 20 bp, synthetic construct
  misc_feature 1..20: note = chemically synthesized
  source 1..20: mol_type = other DNA
tcaatttttgccttttcaat

SEQ ID NO: 18848 - DNA, 20 bp, synthetic construct
  misc_feature 1..20: note = chemically synthesized
  source 1..20: mol_type = other DNA
aaaatttatttatatatatt

SEQ ID NO: 18849 - DNA, 20 bp, synthetic construct
  misc_feature 1..20: note = chemically synthesized
  source 1..20: mol_type = other DNA
atttatttatatatatttag

SEQ ID NO: 18850 - DNA, 20 bp, synthetic construct
  misc_feature 1..20: note = chemically synthesized
  source 1..20: mol_type = other DNA
tttatttatatatatttaga

SEQ ID NO: 18851 - DNA, 20 bp, synthetic construct
  misc_feature 1..20: note = chemically synthesized
  source 1..20: mol_type = other DNA
tatatttagaaggtatgtac

SEQ ID NO: 18852 - DNA, 20 bp, synthetic construct
  misc_feature 1..20: note = chemically synthesized
  source 1..20: mol_type = other DNA
tcgttatcatgctgcttata

SEQ ID NO: 18853 - DNA, 20 bp, synthetic construct
  misc_feature 1..20: note = chemically synthesized
  source 1..20: mol_type = other DNA
ctgcttataaagacatacct

SEQ ID NO: 18854 - DNA, 20 bp, synthetic construct
  misc_feature 1..20: note = chemically synthesized
  source 1..20: mol_type = other DNA
tataaagacatacctgagac

SEQ ID NO: 18855 - DNA, 20 bp, synthetic construct
  misc_feature 1..20: note = chemically synthesized
  source 1..20: mol_type = other DNA
ataaagacatacctgagact

SEQ ID NO: 18856 - DNA, 20 bp, synthetic construct
  misc_feature 1..20: note = chemically synthesized
  source 1..20: mol_type = other DNA
cctgagactgggtaatttat

SEQ ID NO: 18857 - DNA, 20 bp, synthetic construct
  misc_feature 1..20: note = chemically synthesized
  source 1..20: mol_type = other DNA
ctgagactgggtaatttata

SEQ ID NO: 18858 - DNA, 20 bp, synthetic construct
  misc_feature 1..20: note = chemically synthesized
  source 1..20: mol_type = other DNA
aaaaacgtttaattgtctca

SEQ ID NO: 18859 - DNA, 20 bp, synthetic construct
  misc_feature 1..20: note = chemically synthesized
  source 1..20: mol_type = other DNA
ttaattgtctcacagttcca

SEQ ID NO: 18860 - DNA, 20 bp, synthetic construct
  misc_feature 1..20: note = chemically synthesized
  source 1..20: mol_type = other DNA
taattgtctcacagttccac

SEQ ID NO: 18861 - DNA, 20 bp, synthetic construct
  misc_feature 1..20: note = chemically synthesized
  source 1..20: mol_type = other DNA
aattgtctcacagttccaca

SEQ ID NO: 18862 - DNA, 20 bp, synthetic construct
  misc_feature 1..20: note = chemically synthesized
  source 1..20: mol_type = other DNA
gtctcacagttccacagggc

SEQ ID NO: 18863 - DNA, 20 bp, synthetic construct
  misc_feature 1..20: note = chemically synthesized
  source 1..20: mol_type = other DNA
tctcacagttccacagggct

SEQ ID NO: 18864 - DNA, 20 bp, synthetic construct
  misc_feature 1..20: note = chemically synthesized
  source 1..20: mol_type = other DNA
ctcacagttccacagggctg

SEQ ID NO: 18865 - DNA, 20 bp, synthetic construct
  misc_feature 1..20: note = chemically synthesized
  source 1..20: mol_type = other DNA
cacagttccacagggctggg

SEQ ID NO: 18866 - DNA, 20 bp, synthetic construct
  misc_feature 1..20: note = chemically synthesized
  source 1..20: mol_type = other DNA
acagttccacagggctgggg

SEQ ID NO: 18867 - DNA, 20 bp, synthetic construct
  misc_feature 1..20: note = chemically synthesized
  source 1..20: mol_type = other DNA
ccacagggctggggaggcct

SEQ ID NO: 18868 - DNA, 20 bp, synthetic construct
  misc_feature 1..20: note = chemically synthesized
  source 1..20: mol_type = other DNA
cacagggctggggaggcctc

SEQ ID NO: 18869 - DNA, 20 bp, synthetic construct
  misc_feature 1..20: note = chemically synthesized
  source 1..20: mol_type = other DNA
cctcgggaaacttacaatca

SEQ ID NO: 18870 - DNA, 20 bp, synthetic construct
  misc_feature 1..20: note = chemically synthesized
  source 1..20: mol_type = other DNA
cgggaaacttacaatcatgg

SEQ ID NO: 18871 - DNA, 20 bp, synthetic construct
  misc_feature 1..20: note = chemically synthesized
  source 1..20: mol_type = other DNA
gaaacttacaatcatggcag

SEQ ID NO: 18872 - DNA, 20 bp, synthetic construct
  misc_feature 1..20: note = chemically synthesized
  source 1..20: mol_type = other DNA
acttacaatcatggcagaag

SEQ ID NO: 18873 - DNA, 20 bp, synthetic construct
  misc_feature 1..20: note = chemically synthesized
  source 1..20: mol_type = other DNA
caaacatgtccttcttcaca

SEQ ID NO: 18874 - DNA, 20 bp, synthetic construct
  misc_feature 1..20: note = chemically synthesized
  source 1..20: mol_type = other DNA
acatgtccttcttcacatgg

SEQ ID NO: 18875 - DNA, 20 bp, synthetic construct
  misc_feature 1..20: note = chemically synthesized
  source 1..20: mol_type = other DNA
tgtccttcttcacatggcag

SEQ ID NO: 18876 - DNA, 20 bp, synthetic construct
  misc_feature 1..20: note = chemically synthesized
  source 1..20: mol_type = other DNA
cttcttcacatggcagcagc

SEQ ID NO: 18877 - DNA, 20 bp, synthetic construct
  misc_feature 1..20: note = chemically synthesized
  source 1..20: mol_type = other DNA
cttcacatggcagcagcaag

SEQ ID NO: 18878 - DNA, 20 bp, synthetic construct
  misc_feature 1..20: note = chemically synthesized
  source 1..20: mol_type = other DNA
cacatggcagcagcaagtag

SEQ ID NO: 18879 - DNA, 20 bp, synthetic construct
  misc_feature 1..20: note = chemically synthesized
  source 1..20: mol_type = other DNA
cagcagcaagtagaagtgcc

SEQ ID NO: 18880 - DNA, 20 bp, synthetic construct
  misc_feature 1..20: note = chemically synthesized
  source 1..20: mol_type = other DNA
caagtagaagtgccaagcaa

SEQ ID NO: 18881 - DNA, 20 bp, synthetic construct
  misc_feature 1..20: note = chemically synthesized
  source 1..20: mol_type = other DNA
aagtagaagtgccaagcaaa

SEQ ID NO: 18882 - DNA, 20 bp, synthetic construct
  misc_feature 1..20: note = chemically synthesized
  source 1..20: mol_type = other DNA
agtagaagtgccaagcaaaa

SEQ ID NO: 18883 - DNA, 20 bp, synthetic construct
  misc_feature 1..20: note = chemically synthesized
  source 1..20: mol_type = other DNA
gtagaagtgccaagcaaaag

SEQ ID NO: 18884 - DNA, 20 bp, synthetic construct
  misc_feature 1..20: note = chemically synthesized
  source 1..20: mol_type = other DNA
tagaagtgccaagcaaaagg

SEQ ID NO: 18885 - DNA, 20 bp, synthetic construct
  misc_feature 1..20: note = chemically synthesized
  source 1..20: mol_type = other DNA
gtgccaagcaaaagggggaa

SEQ ID NO: 18886 - DNA, 20 bp, synthetic construct
  misc_feature 1..20: note = chemically synthesized
  source 1..20: mol_type = other DNA
aaagccgcttataaaaccat

SEQ ID NO: 18887 - DNA, 20 bp, synthetic construct
  misc_feature 1..20: note = chemically synthesized
  source 1..20: mol_type = other DNA
ataaaaccatcagatcttgt

SEQ ID NO: 18888 - DNA, 20 bp, synthetic construct
  misc_feature 1..20: note = chemically synthesized
  source 1..20: mol_type = other DNA
ttgtaagaactcactatcac

SEQ ID NO: 18889 - DNA, 20 bp, synthetic construct
  misc_feature 1..20: note = chemically synthesized
  source 1..20: mol_type = other DNA
taagaactcactatcacgag

SEQ ID NO: 18890 - DNA, 20 bp, synthetic construct
  misc_feature 1..20: note = chemically synthesized
  source 1..20: mol_type = other DNA
agaactcactatcacgagaa

SEQ ID NO: 18891 - DNA, 20 bp, synthetic construct
  misc_feature 1..20: note = chemically synthesized
  source 1..20: mol_type = other DNA
cactatcacgagaagagcat

SEQ ID NO: 18892 - DNA, 20 bp, synthetic construct
  misc_feature 1..20: note = chemically synthesized
  source 1..20: mol_type = other DNA
ctatcacgagaagagcatga

SEQ ID NO: 18893 - DNA, 20 bp, synthetic construct
  misc_feature 1..20: note = chemically synthesized
  source 1..20: mol_type = other DNA
aaatccctcccacaacacgt

SEQ ID NO: 18894 - DNA, 20 bp, synthetic construct
  misc_feature 1..20: note = chemically synthesized
  source 1..20: mol_type = other DNA
aatccctcccacaacacgtg

SEQ ID NO: 18895 - DNA, 20 bp, synthetic construct
  misc_feature 1..20: note = chemically synthesized
  source 1..20: mol_type = other DNA
cccacaacacgtgaggatta

SEQ ID NO: 18896 - DNA, 20 bp, synthetic construct
  misc_feature 1..20: note = chemically synthesized
  source 1..20: mol_type = other DNA
ccacaacacgtgaggattat

SEQ ID NO: 18897 - DNA, 20 bp, synthetic construct
  misc_feature 1..20: note = chemically synthesized
  source 1..20: mol_type = other DNA
gattatgggaactacaattc

SEQ ID NO: 18898 - DNA, 20 bp, synthetic construct
  misc_feature 1..20: note = chemically synthesized
  source 1..20: mol_type = other DNA
tgggaactacaattcaagat

SEQ ID NO: 18899 - DNA, 20 bp, synthetic construct
  misc_feature 1..20: note = chemically synthesized
  source 1..20: mol_type = other DNA
ctacaattcaagatgagatt

SEQ ID NO: 18900 - DNA, 20 bp, synthetic construct
  misc_feature 1..20: note = chemically synthesized
  source 1..20: mol_type = other DNA
tacaattcaagatgagattt

SEQ ID NO: 18901 - DNA, 20 bp, synthetic construct
  misc_feature 1..20: note = chemically synthesized
  source 1..20: mol_type = other DNA
aattcaagatgagatttggg

SEQ ID NO: 18902 - DNA, 20 bp, synthetic construct
  misc_feature 1..20: note = chemically synthesized
  source 1..20: mol_type = other DNA
attcaagatgagatttgggt

SEQ ID NO: 18903 - DNA, 20 bp, synthetic construct
  misc_feature 1..20: note = chemically synthesized
  source 1..20: mol_type = other DNA
ttcaagatgagatttgggtg

SEQ ID NO: 18904 - DNA, 20 bp, synthetic construct
  misc_feature 1..20: note = chemically synthesized
  source 1..20: mol_type = other DNA
atgagatttgggtggggaca

SEQ ID NO: 18905 - DNA, 20 bp, synthetic construct
  misc_feature 1..20: note = chemically synthesized
  source 1..20: mol_type = other DNA
atttgggtggggacacagtc

SEQ ID NO: 18906 - DNA, 20 bp, synthetic construct
  misc_feature 1..20: note = chemically synthesized
  source 1..20: mol_type = other DNA
gggacacagtcaagctgtat

SEQ ID NO: 18907 - DNA, 20 bp, synthetic construct
  misc_feature 1..20: note = chemically synthesized
  source 1..20: mol_type = other DNA
ggacacagtcaagctgtatc

SEQ ID NO: 18908 - DNA, 20 bp, synthetic construct
  misc_feature 1..20: note = chemically synthesized
  source 1..20: mol_type = other DNA
gacacagtcaagctgtatca

SEQ ID NO: 18909 - DNA, 20 bp, synthetic construct
  misc_feature 1..20: note = chemically synthesized
  source 1..20: mol_type = other DNA
gtcaagctgtatcagggtac

SEQ ID NO: 18910 - DNA, 20 bp, synthetic construct
  misc_feature 1..20: note = chemically synthesized
  source 1..20: mol_type = other DNA
gctgtatcagggtacaagct

SEQ ID NO: 18911 - DNA, 20 bp, synthetic construct
  misc_feature 1..20: note = chemically synthesized
  source 1..20: mol_type = other DNA
ctgtatcagggtacaagctc

SEQ ID NO: 18912 - DNA, 20 bp, synthetic construct
  misc_feature 1..20: note = chemically synthesized
  source 1..20: mol_type = other DNA
ccttacatatgtatgttgca

SEQ ID NO: 18913 - DNA, 20 bp, synthetic construct
  misc_feature 1..20: note = chemically synthesized
  source 1..20: mol_type = other DNA
tacatatgtatgttgcatag

SEQ ID NO: 18914 - DNA, 20 bp, synthetic construct
  misc_feature 1..20: note = chemically synthesized
  source 1..20: mol_type = other DNA
atgtatgttgcatagtggtg

SEQ ID NO: 18915 - DNA, 20 bp, synthetic construct
  misc_feature 1..20: note = chemically synthesized
  source 1..20: mol_type = other DNA
gttgcatagtggtgaagtct

SEQ ID NO: 18916 - DNA, 20 bp, synthetic construct
  misc_feature 1..20: note = chemically synthesized
  source 1..20: mol_type = other DNA
agtggtgaagtctgagcttt

SEQ ID NO: 18917 - DNA, 20 bp, synthetic construct
  misc_feature 1..20: note = chemically synthesized
  source 1..20: mol_type = other DNA
ggtgaagtctgagcttttag

SEQ ID NO: 18918 - DNA, 20 bp, synthetic construct
  misc_feature 1..20: note = chemically synthesized
  source 1..20: mol_type = other DNA
ttagtggaccatcacctgaa

SEQ ID NO: 18919 - DNA, 20 bp, synthetic construct
  misc_feature 1..20: note = chemically synthesized
  source 1..20: mol_type = other DNA
tgaatgttgtatccaatccg

SEQ ID NO: 18920 - DNA, 20 bp, synthetic construct
  misc_feature 1..20: note = chemically synthesized
  source 1..20: mol_type = other DNA
gtatccaatccgtagttttt

SEQ ID NO: 18921 - DNA, 20 bp, synthetic construct
  misc_feature 1..20: note = chemically synthesized
  source 1..20: mol_type = other DNA
cctatcctcccacctttctc

SEQ ID NO: 18922 - DNA, 20 bp, synthetic construct
  misc_feature 1..20: note = chemically synthesized
  source 1..20: mol_type = other DNA
tcccacctttctctagtctc

SEQ ID NO: 18923 - DNA, 20 bp, synthetic construct
  misc_feature 1..20: note = chemically synthesized
  source 1..20: mol_type = other DNA
gtctatgcttactcatcgtt

SEQ ID NO: 18924 - DNA, 20 bp, synthetic construct
  misc_feature 1..20: note = chemically synthesized
  source 1..20: mol_type = other DNA
ctcatcgtttagctcccact

SEQ ID NO: 18925 - DNA, 20 bp, synthetic construct
  misc_feature 1..20: note = chemically synthesized
  source 1..20: mol_type = other DNA
ccacttggctctcactaaat

SEQ ID NO: 18926 - DNA, 20 bp, synthetic construct
  misc_feature 1..20: note = chemically synthesized
  source 1..20: mol_type = other DNA
gtgtttgactttctgtttct

SEQ ID NO: 18927 - DNA, 20 bp, synthetic construct
  misc_feature 1..20: note = chemically synthesized
  source 1..20: mol_type = other DNA
tgtttctgagttatttcact

SEQ ID NO: 18928 - DNA, 20 bp, synthetic construct
  misc_feature 1..20: note = chemically synthesized
  source 1..20: mol_type = other DNA
gtttctgagttatttcactg

SEQ ID NO: 18929 - DNA, 20 bp, synthetic construct
  misc_feature 1..20: note = chemically synthesized
  source 1..20: mol_type = other DNA
tcactgaggataatgtcctc

SEQ ID NO: 18930 - DNA, 20 bp, synthetic construct
  misc_feature 1..20: note = chemically synthesized
  source 1..20: mol_type = other DNA
tccagttctaaccatgtttc

SEQ ID NO: 18931 - DNA, 20 bp, synthetic construct
  misc_feature 1..20: note = chemically synthesized
  source 1..20: mol_type = other DNA
cagttctaaccatgtttcta

SEQ ID NO: 18932 - DNA, 20 bp, synthetic construct
  misc_feature 1..20: note = chemically synthesized
  source 1..20: mol_type = other DNA
ttctaaccatgtttctagag

SEQ ID NO: 18933 - DNA, 20 bp, synthetic construct
  misc_feature 1..20: note = chemically synthesized
  source 1..20: mol_type = other DNA
catgatttcattctttttta

SEQ ID NO: 18934 - DNA, 20 bp, synthetic construct
  misc_feature 1..20: note = chemically synthesized
  source 1..20: mol_type = other DNA
tttcattcttttttatggct

SEQ ID NO: 18935 - DNA, 20 bp, synthetic construct
  misc_feature 1..20: note = chemically synthesized
  source 1..20: mol_type = other DNA
ttctttatccaatcgtccat

SEQ ID NO: 18936 - DNA, 20 bp, synthetic construct
  misc_feature 1..20: note = chemically synthesized
  source 1..20: mol_type = other DNA
tttatccaatcgtccattgg

SEQ ID NO: 18937 - DNA, 20 bp, synthetic construct
  misc_feature 1..20: note = chemically synthesized
  source 1..20: mol_type = other DNA
atcgtccattggtagacatt

SEQ ID NO: 18938 - DNA, 20 bp, synthetic construct
  misc_feature 1..20: note = chemically synthesized
  source 1..20: mol_type = other DNA
tcgtccattggtagacattt

SEQ ID NO: 18939 - DNA, 20 bp, synthetic construct
  misc_feature 1..20: note = chemically synthesized
  source 1..20: mol_type = other DNA
tgattccatatctttgctat

SEQ ID NO: 18940 - DNA, 20 bp, synthetic construct
  misc_feature 1..20: note = chemically synthesized
  source 1..20: mol_type = other DNA
gattccatatctttgctatt

SEQ ID NO: 18941 - DNA, 20 bp, synthetic construct
  misc_feature 1..20: note = chemically synthesized
  source 1..20: mol_type = other DNA
catatctttgctattgggaa

SEQ ID NO: 18942 - DNA, 20 bp, synthetic construct
  misc_feature 1..20: note = chemically synthesized
  source 1..20: mol_type = other DNA
ctactttgaacatactaatg

SEQ ID NO: 18943 - DNA, 20 bp, synthetic construct
  misc_feature 1..20: note = chemically synthesized
  source 1..20: mol_type = other DNA
taatatgatctctttcactt

SEQ ID NO: 18944 - DNA, 20 bp, synthetic construct
  misc_feature 1..20: note = chemically synthesized
  source 1..20: mol_type = other DNA
aatatgatctctttcacttt

SEQ ID NO: 18945 - DNA, 20 bp, synthetic construct
  misc_feature 1..20: note = chemically synthesized
  source 1..20: mol_type = other DNA
tttcactttgggtccatacc

SEQ ID NO: 18946 - DNA, 20 bp, synthetic construct
  misc_feature 1..20: note = chemically synthesized
  source 1..20: mol_type = other DNA
cactttgggtccatacccag

SEQ ID NO: 18947 - DNA, 20 bp, synthetic construct
  misc_feature 1..20: note = chemically synthesized
  source 1..20: mol_type = other DNA
tttgggtccatacccagtag

SEQ ID NO: 18948 - DNA, 20 bp, synthetic construct
  misc_feature 1..20: note = chemically synthesized
  source 1..20: mol_type = other DNA
ttgggtccatacccagtagt

SEQ ID NO: 18949 - DNA, 20 bp, synthetic construct
  misc_feature 1..20: note = chemically synthesized
  source 1..20: mol_type = other DNA
catacccagtagtgggattg

SEQ ID NO: 18950 - DNA, 20 bp, synthetic construct
  misc_feature 1..20: note = chemically synthesized
  source 1..20: mol_type = other DNA
atacccagtagtgggattgc

SEQ ID NO: 18951 - DNA, 20 bp, synthetic construct
  misc_feature 1..20: note = chemically synthesized
  source 1..20: mol_type = other DNA
agtgggattgcaggattgaa

SEQ ID NO: 18952 - DNA, 20 bp, synthetic construct
  misc_feature 1..20: note = chemically synthesized
  source 1..20: mol_type = other DNA
gggattgcaggattgaatgg

SEQ ID NO: 18953 - DNA, 20 bp, synthetic construct
  misc_feature 1..20: note = chemically synthesized
  source 1..20: mol_type = other DNA
ttgaatggtagttctgtttc

SEQ ID NO: 18954 - DNA, 20 bp, synthetic construct
  misc_feature 1..20: note = chemically synthesized
  source 1..20: mol_type = other DNA
agttctgtttctagttcttt

SEQ ID NO: 18955 - DNA, 20 bp, synthetic construct
  misc_feature 1..20: note = chemically synthesized
  source 1..20: mol_type = other DNA
tcttcatgctgtcttccata

SEQ ID NO: 18956 - DNA, 20 bp, synthetic construct
  misc_feature 1..20: note = chemically synthesized
  source 1..20: mol_type = other DNA
ctaatttacattcttaccaa

SEQ ID NO: 18957 - DNA, 20 bp, synthetic construct
  misc_feature 1..20: note = chemically synthesized
  source 1..20: mol_type = other DNA
cattcttaccaacagtgtat

SEQ ID NO: 18958 - DNA, 20 bp, synthetic construct
  misc_feature 1..20: note = chemically synthesized
  source 1..20: mol_type = other DNA
gtttttgaactttataatga

SEQ ID NO: 18959 - DNA, 20 bp, synthetic construct
  misc_feature 1..20: note = chemically synthesized
  source 1..20: mol_type = other DNA
ataatgatagccattctgac

SEQ ID NO: 18960 - DNA, 20 bp, synthetic construct
  misc_feature 1..20: note = chemically synthesized
  source 1..20: mol_type = other DNA
atagccattctgactggcat

SEQ ID NO: 18961 - DNA, 20 bp, synthetic construct
  misc_feature 1..20: note = chemically synthesized
  source 1..20: mol_type = other DNA
tagccattctgactggcata

SEQ ID NO: 18962 - DNA, 20 bp, synthetic construct
  misc_feature 1..20: note = chemically synthesized
  source 1..20: mol_type = other DNA
gccattctgactggcataag

SEQ ID NO: 18963 - DNA, 20 bp, synthetic construct
  misc_feature 1..20: note = chemically synthesized
  source 1..20: mol_type = other DNA
ccattctgactggcataagg

SEQ ID NO: 18964 - DNA, 20 bp, synthetic construct
  misc_feature 1..20: note = chemically synthesized
  source 1..20: mol_type = other DNA
tggcataaggaggtatcata

SEQ ID NO: 18965 - DNA, 20 bp, synthetic construct
  misc_feature 1..20: note = chemically synthesized
  source 1..20: mol_type = other DNA
cataaggaggtatcatatgg

SEQ ID NO: 18966 - DNA, 20 bp, synthetic construct
  misc_feature 1..20: note = chemically synthesized
  source 1..20: mol_type = other DNA
aatttgcattctctgattat

SEQ ID NO: 18967 - DNA, 20 bp, synthetic construct
  misc_feature 1..20: note = chemically synthesized
  source 1..20: mol_type = other DNA
aacttttttttgacgtttat

SEQ ID NO: 18968 - DNA, 20 bp, synthetic construct
  misc_feature 1..20: note = chemically synthesized
  source 1..20: mol_type = other DNA
gccacttgtatgtcttcttt

SEQ ID NO: 18969 - DNA, 20 bp, synthetic construct
  misc_feature 1..20: note = chemically synthesized
  source 1..20: mol_type = other DNA
tcttttggaaaatgtctgct

SEQ ID NO: 18970 - DNA, 20 bp, synthetic construct
  misc_feature 1..20: note = chemically synthesized
  source 1..20: mol_type = other DNA
cttttggaaaatgtctgctc

SEQ ID NO: 18971 - DNA, 20 bp, synthetic construct
  misc_feature 1..20: note = chemically synthesized
  source 1..20: mol_type = other DNA
aaaatgtctgctcaggacct

SEQ ID NO: 18972 - DNA, 20 bp, synthetic construct
  misc_feature 1..20: note = chemically synthesized
  source 1..20: mol_type = other DNA
cctgagctcactgtatttgt

SEQ ID NO: 18973 - DNA, 20 bp, synthetic construct
  misc_feature 1..20: note = chemically synthesized
  source 1..20: mol_type = other DNA
ctgagctcactgtatttgtc

SEQ ID NO: 18974 - DNA, 20 bp, synthetic construct
  misc_feature 1..20: note = chemically synthesized
  source 1..20: mol_type = other DNA
tgagctcactgtatttgtca

SEQ ID NO: 18975 - DNA, 20 bp, synthetic construct
  misc_feature 1..20: note = chemically synthesized
  source 1..20: mol_type = other DNA
ctgtatttgtcagggttccc

SEQ ID NO: 18976 - DNA, 20 bp, synthetic construct
  misc_feature 1..20: note = chemically synthesized
  source 1..20: mol_type = other DNA
gtatttgtcagggttcccta

SEQ ID NO: 18977 - DNA, 20 bp, synthetic construct
  misc_feature 1..20: note = chemically synthesized
  source 1..20: mol_type = other DNA
atttgtcagggttccctaga

SEQ ID NO: 18978 - DNA, 20 bp, synthetic construct
  misc_feature 1..20: note = chemically synthesized
  source 1..20: mol_type = other DNA
gtcagggttccctagagaga

SEQ ID NO: 18979 - DNA, 20 bp, synthetic construct
  misc_feature 1..20: note = chemically synthesized
  source 1..20: mol_type = other DNA
ccctagagagacagaactaa

SEQ ID NO: 18980 - DNA, 20 bp, synthetic construct
  misc_feature 1..20: note = chemically synthesized
  source 1..20: mol_type = other DNA
cctagagagacagaactaat

SEQ ID NO: 18981 - DNA, 20 bp, synthetic construct
  misc_feature 1..20: note = chemically synthesized
  source 1..20: mol_type = other DNA
tagagagacagaactaatag

SEQ ID NO: 18982 - DNA, 20 bp, synthetic construct
  misc_feature 1..20: note = chemically synthesized
  source 1..20: mol_type = other DNA
gagacagaactaataggaga

SEQ ID NO: 18983 - DNA, 20 bp, synthetic construct
  misc_feature 1..20: note = chemically synthesized
  source 1..20: mol_type = other DNA
cagaactaataggagataga

SEQ ID NO: 18984 - DNA, 20 bp, synthetic construct
  misc_feature 1..20: note = chemically synthesized
  source 1..20: mol_type = other DNA
actaataggagatagataga

SEQ ID NO: 18985 - DNA, 20 bp, synthetic construct
  misc_feature 1..20: note = chemically synthesized
  source 1..20: mol_type = other DNA
ataggagatagatagataga

SEQ ID NO: 18986 - DNA, 20 bp, synthetic construct
  misc_feature 1..20: note = chemically synthesized
  source 1..20: mol_type = other DNA
gagatagatagatagataga

SEQ ID NO: 18987 - DNA, 20 bp, synthetic construct
  misc_feature 1..20: note = chemically synthesized
  source 1..20: mol_type = other DNA
tagatagatagatagataga

SEQ ID NO: 18988 - DNA, 20 bp, synthetic construct
  misc_feature 1..20: note = chemically synthesized
  source 1..20: mol_type = other DNA
tagatagatagatagataga

SEQ ID NO: 18989 - DNA, 20 bp, synthetic construct
  misc_feature 1..20: note = chemically synthesized
  source 1..20: mol_type = other DNA
tagatagatagatagataga

SEQ ID NO: 18990 - DNA, 20 bp, synthetic construct
  misc_feature 1..20: note = chemically synthesized
  source 1..20: mol_type = other DNA
tagatagatagatagataga

SEQ ID NO: 18991 - DNA, 20 bp, synthetic construct
  misc_feature 1..20: note = chemically synthesized
  source 1..20: mol_type = other DNA
tagatagatagatagataga

SEQ ID NO: 18992 - DNA, 20 bp, synthetic construct
  misc_feature 1..20: note = chemically synthesized
  source 1..20: mol_type = other DNA
gatagatagatagatagata

SEQ ID NO: 18993 - DNA, 20 bp, synthetic construct
  misc_feature 1..20: note = chemically synthesized
  source 1..20: mol_type = other DNA
tagatagatagatatagatt

SEQ ID NO: 18994 - DNA, 20 bp, synthetic construct
  misc_feature 1..20: note = chemically synthesized
  source 1..20: mol_type = other DNA
agatatagatttagatataa

SEQ ID NO: 18995 - DNA, 20 bp, synthetic construct
  misc_feature 1..20: note = chemically synthesized
  source 1..20: mol_type = other DNA
gatatagatttagatataaa

SEQ ID NO: 18996 - DNA, 20 bp, synthetic construct
  misc_feature 1..20: note = chemically synthesized
  source 1..20: mol_type = other DNA
atatagatttagatataaaa

SEQ ID NO: 18997 - DNA, 20 bp, synthetic construct
  misc_feature 1..20: note = chemically synthesized
  source 1..20: mol_type = other DNA
atagatttagatataaaagg

SEQ ID NO: 18998 - DNA, 20 bp, synthetic construct
  misc_feature 1..20: note = chemically synthesized
  source 1..20: mol_type = other DNA
gatataaaagggagtttatt

SEQ ID NO: 18999 - DNA, 20 bp, synthetic construct
  misc_feature 1..20: note = chemically synthesized
  source 1..20: mol_type = other DNA
ataaaagggagtttattaag

SEQ ID NO: 19000 - DNA, 20 bp, synthetic construct
  misc_feature 1..20: note = chemically synthesized
  source 1..20: mol_type = other DNA
gtgttaacttacacaatcac

SEQ ID NO: 19001 - DNA, 20 bp, synthetic construct
  misc_feature 1..20: note = chemically synthesized
  source 1..20: mol_type = other DNA
tgttaacttacacaatcaca

SEQ ID NO: 19002 - DNA, 20 bp, synthetic construct
  misc_feature 1..20: note = chemically synthesized
  source 1..20: mol_type = other DNA
acaatcacaaggtcccacaa

SEQ ID NO: 19003 - DNA, 20 bp, synthetic construct
  misc_feature 1..20: note = chemically synthesized
  source 1..20: mol_type = other DNA
caatcacaaggtcccacaat

SEQ ID NO: 19004 - DNA, 20 bp, synthetic construct
  misc_feature 1..20: note = chemically synthesized
  source 1..20: mol_type = other DNA
tcccacaataggccatctgc

SEQ ID NO: 19005 - DNA, 20 bp, synthetic construct
  misc_feature 1..20: note = chemically synthesized
  source 1..20: mol_type = other DNA
cacaataggccatctgcaag

SEQ ID NO: 19006 - DNA, 20 bp, synthetic construct
  misc_feature 1..20: note = chemically synthesized
  source 1..20: mol_type = other DNA
caataggccatctgcaagca

SEQ ID NO: 19007 - DNA, 20 bp, synthetic construct
  misc_feature 1..20: note = chemically synthesized
  source 1..20: mol_type = other DNA
aataggccatctgcaagcag

SEQ ID NO: 19008 - DNA, 20 bp, synthetic construct
  misc_feature 1..20: note = chemically synthesized
  source 1..20: mol_type = other DNA
taggccatctgcaagcagag

SEQ ID NO: 19009 - DNA, 20 bp, synthetic construct
  misc_feature 1..20: note = chemically synthesized
  source 1..20: mol_type = other DNA
ccatctgcaagcagaggagc

SEQ ID NO: 19010 - DNA, 20 bp, synthetic construct
  misc_feature 1..20: note = chemically synthesized
  source 1..20: mol_type = other DNA
catctgcaagcagaggagca

SEQ ID NO: 19011 - DNA, 20 bp, synthetic construct
  misc_feature 1..20: note = chemically synthesized
  source 1..20: mol_type = other DNA
ctgcaagcagaggagcaagg

SEQ ID NO: 19012 - DNA, 20 bp, synthetic construct
  misc_feature 1..20: note = chemically synthesized
  source 1..20: mol_type = other DNA
aagcagaggagcaaggaagc

SEQ ID NO: 19013 - DNA, 20 bp, synthetic construct
  misc_feature 1..20: note = chemically synthesized
  source 1..20: mol_type = other DNA
aggagcaaggaagccagtcc

SEQ ID NO: 19014 - DNA, 20 bp, synthetic construct
  misc_feature 1..20: note = chemically synthesized
  source 1..20: mol_type = other DNA
ggaagccagtccaagtccca

SEQ ID NO: 19015 - DNA, 20 bp, synthetic construct
  misc_feature 1..20: note = chemically synthesized
  source 1..20: mol_type = other DNA
cagtccaagtcccaaagctg

SEQ ID NO: 19016 - DNA, 20 bp, synthetic construct
  misc_feature 1..20: note = chemically synthesized
  source 1..20: mol_type = other DNA
agtccaagtcccaaagctga

SEQ ID NO: 19017 - DNA, 20 bp, synthetic construct
  misc_feature 1..20: note = chemically synthesized
  source 1..20: mol_type = other DNA
agtcccaaagctgaaggact

SEQ ID NO: 19018 - DNA, 20 bp, synthetic construct
  misc_feature 1..20: note = chemically synthesized
  source 1..20: mol_type = other DNA
tcccaaagctgaaggacttg

SEQ ID NO: 19019 - DNA, 20 bp, synthetic construct
  misc_feature 1..20: note = chemically synthesized
  source 1..20: mol_type = other DNA
ggacttggagtccaatgttt

SEQ ID NO: 19020 - DNA, 20 bp, synthetic construct
  misc_feature 1..20: note = chemically synthesized
  source 1..20: mol_type = other DNA
gacttggagtccaatgtttg

SEQ ID NO: 19021 - DNA, 20 bp, synthetic construct
  misc_feature 1..20: note = chemically synthesized
  source 1..20: mol_type = other DNA
acttggagtccaatgtttga

SEQ ID NO: 19022 - DNA, 20 bp, synthetic construct
  misc_feature 1..20: note = chemically synthesized
  source 1..20: mol_type = other DNA
tggagtccaatgtttgaggg

SEQ ID NO: 19023 - DNA, 20 bp, synthetic construct
  misc_feature 1..20: note = chemically synthesized
  source 1..20: mol_type = other DNA
ggagtccaatgtttgagggc

SEQ ID NO: 19024 - DNA, 20 bp, synthetic construct
  misc_feature 1..20: note = chemically synthesized
  source 1..20: mol_type = other DNA
gtccaatgtttgagggcagg

SEQ ID NO: 19025 - DNA, 20 bp, synthetic construct
  misc_feature 1..20: note = chemically synthesized
  source 1..20: mol_type = other DNA
gtttgagggcaggaagcatc

SEQ ID NO: 19026 - DNA, 20 bp, synthetic construct
  misc_feature 1..20: note = chemically synthesized
  source 1..20: mol_type = other DNA
agggcaggaagcatccagca

SEQ ID NO: 19027 - DNA, 20 bp, synthetic construct
  misc_feature 1..20: note = chemically synthesized
  source 1..20: mol_type = other DNA
gggcaggaagcatccagcat

SEQ ID NO: 19028 - DNA, 20 bp, synthetic construct
  misc_feature 1..20: note = chemically synthesized
  source 1..20: mol_type = other DNA
gcaggaagcatccagcatgg

SEQ ID NO: 19029 - DNA, 20 bp, synthetic construct
  misc_feature 1..20: note = chemically synthesized
  source 1..20: mol_type = other DNA
gaagcatccagcatgggaga

SEQ ID NO: 19030 - DNA, 20 bp, synthetic construct
  misc_feature 1..20: note = chemically synthesized
  source 1..20: mol_type = other DNA
tccagcatgggagaaagatg

SEQ ID NO: 19031 - DNA, 20 bp, synthetic construct
  misc_feature 1..20: note = chemically synthesized
  source 1..20: mol_type = other DNA
ccagcatgggagaaagatgt

SEQ ID NO: 19032 - DNA, 20 bp, synthetic construct
  misc_feature 1..20: note = chemically synthesized
  source 1..20: mol_type = other DNA
atgggagaaagatgtaggct

SEQ ID NO: 19033 - DNA, 20 bp, synthetic construct
  misc_feature 1..20: note = chemically synthesized
  source 1..20: mol_type = other DNA
gggagaaagatgtaggcttg

SEQ ID NO: 19034 - DNA, 20 bp, synthetic construct
  misc_feature 1..20: note = chemically synthesized
  source 1..20: mol_type = other DNA
ggagaaagatgtaggcttgg

SEQ ID NO: 19035 - DNA, 20 bp, synthetic construct
  misc_feature 1..20: note = chemically synthesized
  source 1..20: mol_type = other DNA
aagatgtaggcttggaggct

SEQ ID NO: 19036 - DNA, 20 bp, synthetic construct
  misc_feature 1..20: note = chemically synthesized
  source 1..20: mol_type = other DNA
tgtaggcttggaggctaagc

SEQ ID NO: 19037 - DNA, 20 bp, synthetic construct
  misc_feature 1..20: note = chemically synthesized
  source 1..20: mol_type = other DNA
gcttggaggctaagccagtc

SEQ ID NO: 19038 - DNA, 20 bp, synthetic construct
  misc_feature 1..20: note = chemically synthesized
  source 1..20: mol_type = other DNA
cttggaggctaagccagtcc

SEQ ID NO: 19039 - DNA, 20 bp, synthetic construct
  misc_feature 1..20: note = chemically synthesized
  source 1..20: mol_type = other DNA
tttctgcctgctttatatcc

SEQ ID NO: 19040 - DNA, 20 bp, synthetic construct
  misc_feature 1..20: note = chemically synthesized
  source 1..20: mol_type = other DNA
gctttatatcctggccacac

SEQ ID NO: 19041 - DNA, 20 bp, synthetic construct
  misc_feature 1..20: note = chemically synthesized
  source 1..20: mol_type = other DNA
tggccacactggcaactgat

SEQ ID NO: 19042 - DNA, 20 bp, synthetic construct
  misc_feature 1..20: note = chemically synthesized
  source 1..20: mol_type = other DNA
cacactggcaactgattaga

SEQ ID NO: 19043 - DNA, 20 bp, synthetic construct
  misc_feature 1..20: note = chemically synthesized
  source 1..20: mol_type = other DNA
ctgattagatggtgcccacc

SEQ ID NO: 19044 - DNA, 20 bp, synthetic construct
  misc_feature 1..20: note = chemically synthesized
  source 1..20: mol_type = other DNA
agatggtgcccacccagatt

SEQ ID NO: 19045 - DNA, 20 bp, synthetic construct
  misc_feature 1..20: note = chemically synthesized
  source 1..20: mol_type = other DNA
gatggtgcccacccagatta

SEQ ID NO: 19046 - DNA, 20 bp, synthetic construct
  misc_feature 1..20: note = chemically synthesized
  source 1..20: mol_type = other DNA
atggtgcccacccagattaa

SEQ ID NO: 19047 - DNA, 20 bp, synthetic construct
  misc_feature 1..20: note = chemically synthesized
  source 1..20: mol_type = other DNA
gtgcccacccagattaaggg

SEQ ID NO: 19048 - DNA, 20 bp, synthetic construct
  misc_feature 1..20: note = chemically synthesized
  source 1..20: mol_type = other DNA
tgcccacccagattaagggt

SEQ ID NO: 19049 - DNA, 20 bp, synthetic construct
  misc_feature 1..20: note = chemically synthesized
  source 1..20: mol_type = other DNA
aagggtgggtctgcctttcc

SEQ ID NO: 19050 - DNA, 20 bp, synthetic construct
  misc_feature 1..20: note = chemically synthesized
  source 1..20: mol_type = other DNA
actaaaatgttaatctcctt

SEQ ID NO: 19051 - DNA, 20 bp, synthetic construct
  misc_feature 1..20: note = chemically synthesized
  source 1..20: mol_type = other DNA
ctcctttggcaataccctca

SEQ ID NO: 19052 - DNA, 20 bp, synthetic construct
  misc_feature 1..20: note = chemically synthesized
  source 1..20: mol_type = other DNA
aataccctcacagacacact

SEQ ID NO: 19053 - DNA, 20 bp, synthetic construct
  misc_feature 1..20: note = chemically synthesized
  source 1..20: mol_type = other DNA
ataccctcacagacacactc

SEQ ID NO: 19054 - DNA, 20 bp, synthetic construct
  misc_feature 1..20: note = chemically synthesized
  source 1..20: mol_type = other DNA
ttgcacacttcaatccaatc

SEQ ID NO: 19055 - DNA, 20 bp, synthetic construct
  misc_feature 1..20: note = chemically synthesized
  source 1..20: mol_type = other DNA
aatccaatcaagttgacact

SEQ ID NO: 19056 - DNA, 20 bp, synthetic construct
  misc_feature 1..20: note = chemically synthesized
  source 1..20: mol_type = other DNA
cactcagtattaaccatcac

SEQ ID NO: 19057 - DNA, 20 bp, synthetic construct
  misc_feature 1..20: note = chemically synthesized
  source 1..20: mol_type = other DNA
agtccatcgcttgtcaactt

SEQ ID NO: 19058 - DNA, 20 bp, synthetic construct
  misc_feature 1..20: note = chemically synthesized
  source 1..20: mol_type = other DNA
tgagcctatacacatcccct

SEQ ID NO: 19059 - DNA, 20 bp, synthetic construct
  misc_feature 1..20: note = chemically synthesized
  source 1..20: mol_type = other DNA
gagcctatacacatcccctg

SEQ ID NO: 19060 - DNA, 20 bp, synthetic construct
  misc_feature 1..20: note = chemically synthesized
  source 1..20: mol_type = other DNA
tcatacattatcttcaaata

SEQ ID NO: 19061 - DNA, 20 bp, synthetic construct
  misc_feature 1..20: note = chemically synthesized
  source 1..20: mol_type = other DNA
cttcaaataaagacaacaat

SEQ ID NO: 19062 - DNA, 20 bp, synthetic construct
  misc_feature 1..20: note = chemically synthesized
  source 1..20: mol_type = other DNA
aatacttaaatgctgatatg

SEQ ID NO: 19063 - DNA, 20 bp, synthetic construct
  misc_feature 1..20: note = chemically synthesized
  source 1..20: mol_type = other DNA
aaatcttatgtcacatgata

SEQ ID NO: 19064 - DNA, 20 bp, synthetic construct
  misc_feature 1..20: note = chemically synthesized
  source 1..20: mol_type = other DNA
aatcttatgtcacatgataa

SEQ ID NO: 19065 - DNA, 20 bp, synthetic construct
  misc_feature 1..20: note = chemically synthesized
  source 1..20: mol_type = other DNA
atgtcacatgataaaggaaa

SEQ ID NO: 19066 - DNA, 20 bp, synthetic construct
  misc_feature 1..20: note = chemically synthesized
  source 1..20: mol_type = other DNA
tgtcacatgataaaggaaaa

SEQ ID NO: 19067 - DNA, 20 bp, synthetic construct
  misc_feature 1..20: note = chemically synthesized
  source 1..20: mol_type = other DNA
cacatgataaaggaaaaagg

SEQ ID NO: 19068 - DNA, 20 bp, synthetic construct
  misc_feature 1..20: note = chemically synthesized
  source 1..20: mol_type = other DNA
gtaaaatgtatatattttct

SEQ ID NO: 19069 - DNA, 20 bp, synthetic construct
  misc_feature 1..20: note = chemically synthesized
  source 1..20: mol_type = other DNA
tgtatatattttcttagtac

SEQ ID NO: 19070 - DNA, 20 bp, synthetic construct
  misc_feature 1..20: note = chemically synthesized
  source 1..20: mol_type = other DNA
tttcttagtacaagtgtata

SEQ ID NO: 19071 - DNA, 20 bp, synthetic construct
  misc_feature 1..20: note = chemically synthesized
  source 1..20: mol_type = other DNA
tacaagtgtatacagacacg

SEQ ID NO: 19072 - DNA, 20 bp, synthetic construct
  misc_feature 1..20: note = chemically synthesized
  source 1..20: mol_type = other DNA
acaagtgtatacagacacga

SEQ ID NO: 19073 - DNA, 20 bp, synthetic construct
  misc_feature 1..20: note = chemically synthesized
  source 1..20: mol_type = other DNA
cacgaaggtgtttttaacaa

SEQ ID NO: 19074 - DNA, 20 bp, synthetic construct
  misc_feature 1..20: note = chemically synthesized
  source 1..20: mol_type = other DNA
gaaggtgtttttaacaaaag

SEQ ID NO: 19075 - DNA, 20 bp, synthetic construct
  misc_feature 1..20: note = chemically synthesized
  source 1..20: mol_type = other DNA
aaggtgtttttaacaaaaga

SEQ ID NO: 19076 - DNA, 20 bp, synthetic construct
  misc_feature 1..20: note = chemically synthesized
  source 1..20: mol_type = other DNA
ggtgtttttaacaaaagaag

SEQ ID NO: 19077 - DNA, 20 bp, synthetic construct
  misc_feature 1..20: note = chemically synthesized
  source 1..20: mol_type = other DNA
gtgtttttaacaaaagaagg

SEQ ID NO: 19078 - DNA, 20 bp, synthetic construct
  misc_feature 1..20: note = chemically synthesized
  source 1..20: mol_type = other DNA
ggaaatactcatgacaatta

SEQ ID NO: 19079 - DNA, 20 bp, synthetic construct
  misc_feature 1..20: note = chemically synthesized
  source 1..20: mol_type = other DNA
acagtccttgtatctgcaat

SEQ ID NO: 19080 - DNA, 20 bp, synthetic construct
  misc_feature 1..20: note = chemically synthesized
  source 1..20: mol_type = other DNA
tgcaattggtcacgtgatcg

SEQ ID NO: 19081 - DNA, 20 bp, synthetic construct
  misc_feature 1..20: note = chemically synthesized
  source 1..20: mol_type = other DNA
attggtcacgtgatcgtagc

SEQ ID NO: 19082 - DNA, 20 bp, synthetic construct
  misc_feature 1..20: note = chemically synthesized
  source 1..20: mol_type = other DNA
ttctgtattccctttgccct

SEQ ID NO: 19083 - DNA, 20 bp, synthetic construct
  misc_feature 1..20: note = chemically synthesized
  source 1..20: mol_type = other DNA
gtattccctttgccctcagc

SEQ ID NO: 19084 - DNA, 20 bp, synthetic construct
  misc_feature 1..20: note = chemically synthesized
  source 1..20: mol_type = other DNA
tttgccctcagcaagcacct

SEQ ID NO: 19085 - DNA, 20 bp, synthetic construct
  misc_feature 1..20: note = chemically synthesized
  source 1..20: mol_type = other DNA
gccctcagcaagcacctcag

SEQ ID NO: 19086 - DNA, 20 bp, synthetic construct
  misc_feature 1..20: note = chemically synthesized
  source 1..20: mol_type = other DNA
ccctcagcaagcacctcagc

SEQ ID NO: 19087 - DNA, 20 bp, synthetic construct
  misc_feature 1..20: note = chemically synthesized
  source 1..20: mol_type = other DNA
ttttttttttttttttttcc

SEQ ID NO: 19088 - DNA, 20 bp, synthetic construct
  misc_feature 1..20: note = chemically synthesized
  source 1..20: mol_type = other DNA
tttttttttttttttcctgg

SEQ ID NO: 19089 - DNA, 20 bp, synthetic construct
  misc_feature 1..20: note = chemically synthesized
  source 1..20: mol_type = other DNA
tttttttttttttcctggtg

SEQ ID NO: 19090 - DNA, 20 bp, synthetic construct
  misc_feature 1..20: note = chemically synthesized
  source 1..20: mol_type = other DNA
gtgacccaaacctttatttg

SEQ ID NO: 19091 - DNA, 20 bp, synthetic construct
  misc_feature 1..20: note = chemically synthesized
  source 1..20: mol_type = other DNA
cctttatttgtagtcctgcc

SEQ ID NO: 19092 - DNA, 20 bp, synthetic construct
  misc_feature 1..20: note = chemically synthesized
  source 1..20: mol_type = other DNA
atttgtagtcctgcctggaa

SEQ ID NO: 19093 - DNA, 20 bp, synthetic construct
  misc_feature 1..20: note = chemically synthesized
  source 1..20: mol_type = other DNA
gtcctgcctggaatggcctg

SEQ ID NO: 19094 - DNA, 20 bp, synthetic construct
  misc_feature 1..20: note = chemically synthesized
  source 1..20: mol_type = other DNA
ctgcctggaatggcctgtag

SEQ ID NO: 19095 - DNA, 20 bp, synthetic construct
  misc_feature 1..20: note = chemically synthesized
  source 1..20: mol_type = other DNA
tttcccactgaccttaattc

SEQ ID NO: 19096 - DNA, 20 bp, synthetic construct
  misc_feature 1..20: note = chemically synthesized
  source 1..20: mol_type = other DNA
ttcccactgaccttaattcc

SEQ ID NO: 19097 - DNA, 20 bp, synthetic construct
  misc_feature 1..20: note = chemically synthesized
  source 1..20: mol_type = other DNA
ctgaccttaattccaggaca

SEQ ID NO: 19098 - DNA, 20 bp, synthetic construct
  misc_feature 1..20: note = chemically synthesized
  source 1..20: mol_type = other DNA
ttccaggacatggtaaaact

SEQ ID NO: 19099 - DNA, 20 bp, synthetic construct
  misc_feature 1..20: note = chemically synthesized
  source 1..20: mol_type = other DNA
ccaggacatggtaaaactaa

SEQ ID NO: 19100 - DNA, 20 bp, synthetic construct
  misc_feature 1..20: note = chemically synthesized
  source 1..20: mol_type = other DNA
aaaactaagagacaccctaa

SEQ ID NO: 19101 - DNA, 20 bp, synthetic construct
  misc_feature 1..20: note = chemically synthesized
  source 1..20: mol_type = other DNA
acgcttccttacctccattg

SEQ ID NO: 19102 - DNA, 20 bp, synthetic construct
  misc_feature 1..20: note = chemically synthesized
  source 1..20: mol_type = other DNA
gcttccttacctccattgtg

SEQ ID NO: 19103 - DNA, 20 bp, synthetic construct
  misc_feature 1..20: note = chemically synthesized
  source 1..20: mol_type = other DNA
ttacctccattgtggagttg

SEQ ID NO: 19104 - DNA, 20 bp, synthetic construct
  misc_feature 1..20: note = chemically synthesized
  source 1..20: mol_type = other DNA
gtagactgatttcatcttga

SEQ ID NO: 19105 - DNA, 20 bp, synthetic construct
  misc_feature 1..20: note = chemically synthesized
  source 1..20: mol_type = other DNA
ctgatttcatcttgatagtc

SEQ ID NO: 19106 - DNA, 20 bp, synthetic construct
  misc_feature 1..20: note = chemically synthesized
  source 1..20: mol_type = other DNA
tgatttcatcttgatagtct

SEQ ID NO: 19107 - DNA, 20 bp, synthetic construct
  misc_feature 1..20: note = chemically synthesized
  source 1..20: mol_type = other DNA
atagtctgggttaatcaccg

SEQ ID NO: 19108 - DNA, 20 bp, synthetic construct
  misc_feature 1..20: note = chemically synthesized
  source 1..20: mol_type = other DNA
caacactgtaactctcttct

SEQ ID NO: 19109 - DNA, 20 bp, synthetic construct
  misc_feature 1..20: note = chemically synthesized
  source 1..20: mol_type = other DNA
cttcttagcctgttgactta

SEQ ID NO: 19110 - DNA, 20 bp, synthetic construct
  misc_feature 1..20: note = chemically synthesized
  source 1..20: mol_type = other DNA
ttcttagcctgttgacttaa

SEQ ID NO: 19111 - DNA, 20 bp, synthetic construct
  misc_feature 1..20: note = chemically synthesized
  source 1..20: mol_type = other DNA
ttagcctgttgacttaaagg

SEQ ID NO: 19112 - DNA, 20 bp, synthetic construct
  misc_feature 1..20: note = chemically synthesized
  source 1..20: mol_type = other DNA
tagcctgttgacttaaaggt

SEQ ID NO: 19113 - DNA, 20 bp, synthetic construct
  misc_feature 1..20: note = chemically synthesized
  source 1..20: mol_type = other DNA
gcctgttgacttaaaggtgg

SEQ ID NO: 19114 - DNA, 20 bp, synthetic construct
  misc_feature 1..20: note = chemically synthesized
  source 1..20: mol_type = other DNA
cctgttgacttaaaggtggg

SEQ ID NO: 19115 - DNA, 20 bp, synthetic construct
  misc_feature 1..20: note = chemically synthesized
  source 1..20: mol_type = other DNA
tgttgacttaaaggtgggag

SEQ ID NO: 19116 - DNA, 20 bp, synthetic construct
  misc_feature 1..20: note = chemically synthesized
  source 1..20: mol_type = other DNA
ttaaaggtgggaggagccca

SEQ ID NO: 19117 - DNA, 20 bp, synthetic construct
  misc_feature 1..20: note = chemically synthesized
  source 1..20: mol_type = other DNA
tgggaggagcccaaagtgtc

SEQ ID NO: 19118 - DNA, 20 bp, synthetic construct
  misc_feature 1..20: note = chemically synthesized
  source 1..20: mol_type = other DNA
gggaggagcccaaagtgtcc

SEQ ID NO: 19119 - DNA, 20 bp, synthetic construct
  misc_feature 1..20: note = chemically synthesized
  source 1..20: mol_type = other DNA
aggagcccaaagtgtccagg

SEQ ID NO: 19120 - DNA, 20 bp, synthetic construct
  misc_feature 1..20: note = chemically synthesized
  source 1..20: mol_type = other DNA
caggtggcaatcttaatttg

SEQ ID NO: 19121 - DNA, 20 bp, synthetic construct
  misc_feature 1..20: note = chemically synthesized
  source 1..20: mol_type = other DNA
aatcttaatttgcagtttaa

SEQ ID NO: 19122 - DNA, 20 bp, synthetic construct
  misc_feature 1..20: note = chemically synthesized
  source 1..20: mol_type = other DNA
ggaatcattattgtgtcacc

SEQ ID NO: 19123 - DNA, 20 bp, synthetic construct
  misc_feature 1..20: note = chemically synthesized
  source 1..20: mol_type = other DNA
atcattattgtgtcacctgg

SEQ ID NO: 19124 - DNA, 20 bp, synthetic construct
  misc_feature 1..20: note = chemically synthesized
  source 1..20: mol_type = other DNA
attattgtgtcacctggcgg

SEQ ID NO: 19125 - DNA, 20 bp, synthetic construct
  misc_feature 1..20: note = chemically synthesized
  source 1..20: mol_type = other DNA
ggcggcagtgttcctccctc

SEQ ID NO: 19126 - DNA, 20 bp, synthetic construct
  misc_feature 1..20: note = chemically synthesized
  source 1..20: mol_type = other DNA
gtgttcctccctctggaact

SEQ ID NO: 19127 - DNA, 20 bp, synthetic construct
  misc_feature 1..20: note = chemically synthesized
  source 1..20: mol_type = other DNA
cctctggaactaagacctct

SEQ ID NO: 19128 - DNA, 20 bp, synthetic construct
  misc_feature 1..20: note = chemically synthesized
  source 1..20: mol_type = other DNA
tggaactaagacctctaagc

SEQ ID NO: 19129 - DNA, 20 bp, synthetic construct
  misc_feature 1..20: note = chemically synthesized
  source 1..20: mol_type = other DNA
aactaagacctctaagccag

SEQ ID NO: 19130 - DNA, 20 bp, synthetic construct
  misc_feature 1..20: note = chemically synthesized
  source 1..20: mol_type = other DNA
gccagcagaacataatgcca

SEQ ID NO: 19131 - DNA, 20 bp, synthetic construct
  misc_feature 1..20: note = chemically synthesized
  source 1..20: mol_type = other DNA
ccagcagaacataatgccat

SEQ ID NO: 19132 - DNA, 20 bp, synthetic construct
  misc_feature 1..20: note = chemically synthesized
  source 1..20: mol_type = other DNA
agaacataatgccatgggaa

SEQ ID NO: 19133 - DNA, 20 bp, synthetic construct
  misc_feature 1..20: note = chemically synthesized
  source 1..20: mol_type = other DNA
gaacataatgccatgggaac

SEQ ID NO: 19134 - DNA, 20 bp, synthetic construct
  misc_feature 1..20: note = chemically synthesized
  source 1..20: mol_type = other DNA
cataatgccatgggaacagg

SEQ ID NO: 19135 - DNA, 20 bp, synthetic construct
  misc_feature 1..20: note = chemically synthesized
  source 1..20: mol_type = other DNA
acaggaagcaaaaattttgc

SEQ ID NO: 19136 - DNA, 20 bp, synthetic construct
  misc_feature 1..20: note = chemically synthesized
  source 1..20: mol_type = other DNA
ggaagcaaaaattttgctag

SEQ ID NO: 19137 - DNA, 20 bp, synthetic construct
  misc_feature 1..20: note = chemically synthesized
  source 1..20: mol_type = other DNA
aaattttgctagtggaacac

SEQ ID NO: 19138 - DNA, 20 bp, synthetic construct
  misc_feature 1..20: note = chemically synthesized
  source 1..20: mol_type = other DNA
aattttgctagtggaacact

SEQ ID NO: 19139 - DNA, 20 bp, synthetic construct
  misc_feature 1..20: note = chemically synthesized
  source 1..20: mol_type = other DNA
attttgctagtggaacacta

SEQ ID NO: 19140 - DNA, 20 bp, synthetic construct
  misc_feature 1..20: note = chemically synthesized
  source 1..20: mol_type = other DNA
ttttgctagtggaacactag

SEQ ID NO: 19141 - DNA, 20 bp, synthetic construct
  misc_feature 1..20: note = chemically synthesized
  source 1..20: mol_type = other DNA
tagtggaacactaggggtga

SEQ ID NO: 19142 - DNA, 20 bp, synthetic construct
  misc_feature 1..20: note = chemically synthesized
  source 1..20: mol_type = other DNA
ggaacactaggggtgatggt

SEQ ID NO: 19143 - DNA, 20 bp, synthetic construct
  misc_feature 1..20: note = chemically synthesized
  source 1..20: mol_type = other DNA
acactaggggtgatggtgag

SEQ ID NO: 19144 - DNA, 20 bp, synthetic construct
  misc_feature 1..20: note = chemically synthesized
  source 1..20: mol_type = other DNA
cacttccaccctttgattcc

SEQ ID NO: 19145 - DNA, 20 bp, synthetic construct
  misc_feature 1..20: note = chemically synthesized
  source 1..20: mol_type = other DNA
ggacccgtgaatcctgtcta

SEQ ID NO: 19146 - DNA, 20 bp, synthetic construct
  misc_feature 1..20: note = chemically synthesized
  source 1..20: mol_type = other DNA
gacccgtgaatcctgtctat

SEQ ID NO: 19147 - DNA, 20 bp, synthetic construct
  misc_feature 1..20: note = chemically synthesized
  source 1..20: mol_type = other DNA
cccgtgaatcctgtctatgg

SEQ ID NO: 19148 - DNA, 20 bp, synthetic construct
  misc_feature 1..20: note = chemically synthesized
  source 1..20: mol_type = other DNA
aatcctgtctatgggagaaa

SEQ ID NO: 19149 - DNA, 20 bp, synthetic construct
  misc_feature 1..20: note = chemically synthesized
  source 1..20: mol_type = other DNA
ggagaaacagtaccatatat

SEQ ID NO: 19150 - DNA, 20 bp, synthetic construct
  misc_feature 1..20: note = chemically synthesized
  source 1..20: mol_type = other DNA
ccatatattggacactgatt

SEQ ID NO: 19151 - DNA, 20 bp, synthetic construct
  misc_feature 1..20: note = chemically synthesized
  source 1..20: mol_type = other DNA
atatattggacactgattca

SEQ ID NO: 19152 - DNA, 20 bp, synthetic construct
  misc_feature 1..20: note = chemically synthesized
  source 1..20: mol_type = other DNA
acactgattcagagcataca

SEQ ID NO: 19153 - DNA, 20 bp, synthetic construct
  misc_feature 1..20: note = chemically synthesized
  source 1..20: mol_type = other DNA
tcagagcatacacagccttc

SEQ ID NO: 19154 - DNA, 20 bp, synthetic construct
  misc_feature 1..20: note = chemically synthesized
  source 1..20: mol_type = other DNA
agagcatacacagccttctg

SEQ ID NO: 19155 - DNA, 20 bp, synthetic construct
  misc_feature 1..20: note = chemically synthesized
  source 1..20: mol_type = other DNA
ccttctggagaactttgccc

SEQ ID NO: 19156 - DNA, 20 bp, synthetic construct
  misc_feature 1..20: note = chemically synthesized
  source 1..20: mol_type = other DNA
cttctggagaactttgcccc

SEQ ID NO: 19157 - DNA, 20 bp, synthetic construct
  misc_feature 1..20: note = chemically synthesized
  source 1..20: mol_type = other DNA
aactttgccccaggcctgca

SEQ ID NO: 19158 - DNA, 20 bp, synthetic construct
  misc_feature 1..20: note = chemically synthesized
  source 1..20: mol_type = other DNA
gcctgcaaagtattgtcacc

SEQ ID NO: 19159 - DNA, 20 bp, synthetic construct
  misc_feature 1..20: note = chemically synthesized
  source 1..20: mol_type = other DNA
gcaaagtattgtcacctagt

SEQ ID NO: 19160 - DNA, 20 bp, synthetic construct
  misc_feature 1..20: note = chemically synthesized
  source 1..20: mol_type = other DNA
cattgtaatcgtgacttcaa

SEQ ID NO: 19161 - DNA, 20 bp, synthetic construct
  misc_feature 1..20: note = chemically synthesized
  source 1..20: mol_type = other DNA
attgtaatcgtgacttcaaa

SEQ ID NO: 19162 - DNA, 20 bp, synthetic construct
  misc_feature 1..20: note = chemically synthesized
  source 1..20: mol_type = other DNA
gacttcaaaaggccattcaa

SEQ ID NO: 19163 - DNA, 20 bp, synthetic construct
  misc_feature 1..20: note = chemically synthesized
  source 1..20: mol_type = other DNA
aggccattcaaaagctgctt

SEQ ID NO: 19164 - DNA, 20 bp, synthetic construct
  misc_feature 1..20: note = chemically synthesized
  source 1..20: mol_type = other DNA
ggccattcaaaagctgcttc

SEQ ID NO: 19165 - DNA, 20 bp, synthetic construct
  misc_feature 1..20: note = chemically synthesized
  source 1..20: mol_type = other DNA
caaaagctgcttcaggatga

SEQ ID NO: 19166 - DNA, 20 bp, synthetic construct
  misc_feature 1..20: note = chemically synthesized
  source 1..20: mol_type = other DNA
aaaagctgcttcaggatgat

SEQ ID NO: 19167 - DNA, 20 bp, synthetic construct
  misc_feature 1..20: note = chemically synthesized
  source 1..20: mol_type = other DNA
aaagctgcttcaggatgata

SEQ ID NO: 19168 - DNA, 20 bp, synthetic construct
  misc_feature 1..20: note = chemically synthesized
  source 1..20: mol_type = other DNA
cttcaggatgatagggatca

SEQ ID NO: 19169 - DNA, 20 bp, synthetic construct
  misc_feature 1..20: note = chemically synthesized
  source 1..20: mol_type = other DNA
aggatgatagggatcatggt

SEQ ID NO: 19170 - DNA, 20 bp, synthetic construct
  misc_feature 1..20: note = chemically synthesized
  source 1..20: mol_type = other DNA
gatagggatcatggtaagac

SEQ ID NO: 19171 - DNA, 20 bp, synthetic construct
  misc_feature 1..20: note = chemically synthesized
  source 1..20: mol_type = other DNA
gtaagaccagtaaattccat

SEQ ID NO: 19172 - DNA, 20 bp, synthetic construct
  misc_feature 1..20: note = chemically synthesized
  source 1..20: mol_type = other DNA
ccagtaaattccatgagcat

SEQ ID NO: 19173 - DNA, 20 bp, synthetic construct
  misc_feature 1..20: note = chemically synthesized
  source 1..20: mol_type = other DNA
agcccactgtcacacttctt

SEQ ID NO: 19174 - DNA, 20 bp, synthetic construct
  misc_feature 1..20: note = chemically synthesized
  source 1..20: mol_type = other DNA
gtcacacttctttagccata

SEQ ID NO: 19175 - DNA, 20 bp, synthetic construct
  misc_feature 1..20: note = chemically synthesized
  source 1..20: mol_type = other DNA
cacttctttagccataaagt

SEQ ID NO: 19176 - DNA, 20 bp, synthetic construct
  misc_feature 1..20: note = chemically synthesized
  source 1..20: mol_type = other DNA
ttctttagccataaagtgag

SEQ ID NO: 19177 - DNA, 20 bp, synthetic construct
  misc_feature 1..20: note = chemically synthesized
  source 1..20: mol_type = other DNA
tagccataaagtgagtggct

SEQ ID NO: 19178 - DNA, 20 bp, synthetic construct
  misc_feature 1..20: note = chemically synthesized
  source 1..20: mol_type = other DNA
cataaagtgagtggcttggt

SEQ ID NO: 19179 - DNA, 20 bp, synthetic construct
  misc_feature 1..20: note = chemically synthesized
  source 1..20: mol_type = other DNA
aaagtgagtggcttggtcag

SEQ ID NO: 19180 - DNA, 20 bp, synthetic construct
  misc_feature 1..20: note = chemically synthesized
  source 1..20: mol_type = other DNA
tggtcagaagcaatgctgtg

SEQ ID NO: 19181 - DNA, 20 bp, synthetic construct
  misc_feature 1..20: note = chemically synthesized
  source 1..20: mol_type = other DNA
tgctgtgtggaataccatga

SEQ ID NO: 19182 - DNA, 20 bp, synthetic construct
  misc_feature 1..20: note = chemically synthesized
  source 1..20: mol_type = other DNA
tgtgtggaataccatgacag

SEQ ID NO: 19183 - DNA, 20 bp, synthetic construct
  misc_feature 1..20: note = chemically synthesized
  source 1..20: mol_type = other DNA
gaataccatgacagtggata

SEQ ID NO: 19184 - DNA, 20 bp, synthetic construct
  misc_feature 1..20: note = chemically synthesized
  source 1..20: mol_type = other DNA
tacggcattctgtgattcca

SEQ ID NO: 19185 - DNA, 20 bp, synthetic construct
  misc_feature 1..20: note = chemically synthesized
  source 1..20: mol_type = other DNA
gcattctgtgattccatgga

SEQ ID NO: 19186 - DNA, 20 bp, synthetic construct
  misc_feature 1..20: note = chemically synthesized
  source 1..20: mol_type = other DNA
ttctgtgattccatggatgg

SEQ ID NO: 19187 - DNA, 20 bp, synthetic construct
  misc_feature 1..20: note = chemically synthesized
  source 1..20: mol_type = other DNA
gattccatggatggtagtct

SEQ ID NO: 19188 - DNA, 20 bp, synthetic construct
  misc_feature 1..20: note = chemically synthesized
  source 1..20: mol_type = other DNA
atggatggtagtcttggcat

SEQ ID NO: 19189 - DNA, 20 bp, synthetic construct
  misc_feature 1..20: note = chemically synthesized
  source 1..20: mol_type = other DNA
gtagtcttggcataagcatt

SEQ ID NO: 19190 - DNA, 20 bp, synthetic construct
  misc_feature 1..20: note = chemically synthesized
  source 1..20: mol_type = other DNA
cttggcataagcattgagtt

SEQ ID NO: 19191 - DNA, 20 bp, synthetic construct
  misc_feature 1..20: note = chemically synthesized
  source 1..20: mol_type = other DNA
ttggcataagcattgagttc

SEQ ID NO: 19192 - DNA, 20 bp, synthetic construct
  misc_feature 1..20: note = chemically synthesized
  source 1..20: mol_type = other DNA
ataagcattgagttcaggat

SEQ ID NO: 19193 - DNA, 20 bp, synthetic construct
  misc_feature 1..20: note = chemically synthesized
  source 1..20: mol_type = other DNA
taagcattgagttcaggatt

SEQ ID NO: 19194 - DNA, 20 bp, synthetic construct
  misc_feature 1..20: note = chemically synthesized
  source 1..20: mol_type = other DNA
aggattgggaaacccatatc

SEQ ID NO: 19195 - DNA, 20 bp, synthetic construct
  misc_feature 1..20: note = chemically synthesized
  source 1..20: mol_type = other DNA
gattgggaaacccatatcca

SEQ ID NO: 19196 - DNA, 20 bp, synthetic construct
  misc_feature 1..20: note = chemically synthesized
  source 1..20: mol_type = other DNA
gggaaacccatatccagagt

SEQ ID NO: 19197 - DNA, 20 bp, synthetic construct
  misc_feature 1..20: note = chemically synthesized
  source 1..20: mol_type = other DNA
tccagagtaagtgtctattc

SEQ ID NO: 19198 - DNA, 20 bp, synthetic construct
  misc_feature 1..20: note = chemically synthesized
  source 1..20: mol_type = other DNA
gagtaagtgtctattccagt

SEQ ID NO: 19199 - DNA, 20 bp, synthetic construct
  misc_feature 1..20: note = chemically synthesized
  source 1..20: mol_type = other DNA
agtaagtgtctattccagtg

SEQ ID NO: 19200 - DNA, 20 bp, synthetic construct
  misc_feature 1..20: note = chemically synthesized
  source 1..20: mol_type = other DNA
gtgtctattccagtgaggac

SEQ ID NO: 19201 - DNA, 20 bp, synthetic construct
  misc_feature 1..20: note = chemically synthesized
  source 1..20: mol_type = other DNA
agcctctgccctttccatga

SEQ ID NO: 19202 - DNA, 20 bp, synthetic construct
  misc_feature 1..20: note = chemically synthesized
  source 1..20: mol_type = other DNA
ctctgccctttccatgatgg

SEQ ID NO: 19203 - DNA, 20 bp, synthetic construct
  misc_feature 1..20: note = chemically synthesized
  source 1..20: mol_type = other DNA
ctgccctttccatgatggaa

SEQ ID NO: 19204 - DNA, 20 bp, synthetic construct
  misc_feature 1..20: note = chemically synthesized
  source 1..20: mol_type = other DNA
tgccctttccatgatggaag

SEQ ID NO: 19205 - DNA, 20 bp, synthetic construct
  misc_feature 1..20: note = chemically synthesized
  source 1..20: mol_type = other DNA
caatataatcaacctgccac

SEQ ID NO: 19206 - DNA, 20 bp, synthetic construct
  misc_feature 1..20: note = chemically synthesized
  source 1..20: mol_type = other DNA
aatataatcaacctgccacc

SEQ ID NO: 19207 - DNA, 20 bp, synthetic construct
  misc_feature 1..20: note = chemically synthesized
  source 1..20: mol_type = other DNA
ataatcaacctgccaccagg

SEQ ID NO: 19208 - DNA, 20 bp, synthetic construct
  misc_feature 1..20: note = chemically synthesized
  source 1..20: mol_type = other DNA
tcaacctgccaccaggtagc

SEQ ID NO: 19209 - DNA, 20 bp, synthetic construct
  misc_feature 1..20: note = chemically synthesized
  source 1..20: mol_type = other DNA
ggtagctggctgatcacccc

SEQ ID NO: 19210 - DNA, 20 bp, synthetic construct
  misc_feature 1..20: note = chemically synthesized
  source 1..20: mol_type = other DNA
gtagctggctgatcaccccg

SEQ ID NO: 19211 - DNA, 20 bp, synthetic construct
  misc_feature 1..20: note = chemically synthesized
  source 1..20: mol_type = other DNA
tggctgatcaccccgaggaa

SEQ ID NO: 19212 - DNA, 20 bp, synthetic construct
  misc_feature 1..20: note = chemically synthesized
  source 1..20: mol_type = other DNA
ccgaggaatggtgccatatc

SEQ ID NO: 19213 - DNA, 20 bp, synthetic construct
  misc_feature 1..20: note = chemically synthesized
  source 1..20: mol_type = other DNA
cgaggaatggtgccatatca

SEQ ID NO: 19214 - DNA, 20 bp, synthetic construct
  misc_feature 1..20: note = chemically synthesized
  source 1..20: mol_type = other DNA
gaggaatggtgccatatcaa

SEQ ID NO: 19215 - DNA, 20 bp, synthetic construct
  misc_feature 1..20: note = chemically synthesized
  source 1..20: mol_type = other DNA
atggtgccatatcaagggct

SEQ ID NO: 19216 - DNA, 20 bp, synthetic construct
  misc_feature 1..20: note = chemically synthesized
  source 1..20: mol_type = other DNA
ccatatcaagggcttagtgt

SEQ ID NO: 19217 - DNA, 20 bp, synthetic construct
  misc_feature 1..20: note = chemically synthesized
  source 1..20: mol_type = other DNA
ttagtgttggtctctgatgc

SEQ ID NO: 19218 - DNA, 20 bp, synthetic construct
  misc_feature 1..20: note = chemically synthesized
  source 1..20: mol_type = other DNA
tgttggtctctgatgctggc

SEQ ID NO: 19219 - DNA, 20 bp, synthetic construct
  misc_feature 1..20: note = chemically synthesized
  source 1..20: mol_type = other DNA
tggtctctgatgctggcaag

SEQ ID NO: 19220 - DNA, 20 bp, synthetic construct
  misc_feature 1..20: note = chemically synthesized
  source 1..20: mol_type = other DNA
tctctgatgctggcaagcag

SEQ ID NO: 19221 - DNA, 20 bp, synthetic construct
  misc_feature 1..20: note = chemically synthesized
  source 1..20: mol_type = other DNA
atgctggcaagcagtggctg

SEQ ID NO: 19222 - DNA, 20 bp, synthetic construct
  misc_feature 1..20: note = chemically synthesized
  source 1..20: mol_type = other DNA
tggcaagcagtggctgtggc

SEQ ID NO: 19223 - DNA, 20 bp, synthetic construct
  misc_feature 1..20: note = chemically synthesized
  source 1..20: mol_type = other DNA
ggcaagcagtggctgtggcc

SEQ ID NO: 19224 - DNA, 20 bp, synthetic construct
  misc_feature 1..20: note = chemically synthesized
  source 1..20: mol_type = other DNA
agcagtggctgtggccaggt

SEQ ID NO: 19225 - DNA, 20 bp, synthetic construct
  misc_feature 1..20: note = chemically synthesized
  source 1..20: mol_type = other DNA
ggctgtggccaggtcagctt

SEQ ID NO: 19226 - DNA, 20 bp, synthetic construct
  misc_feature 1..20: note = chemically synthesized
  source 1..20: mol_type = other DNA
gtggccaggtcagctttggt

SEQ ID NO: 19227 - DNA, 20 bp, synthetic construct
  misc_feature 1..20: note = chemically synthesized
  source 1..20: mol_type = other DNA
gccaggtcagctttggtgag

SEQ ID NO: 19228 - DNA, 20 bp, synthetic construct
  misc_feature 1..20: note = chemically synthesized
  source 1..20: mol_type = other DNA
aggtcagctttggtgagtgg

SEQ ID NO: 19229 - DNA, 20 bp, synthetic construct
  misc_feature 1..20: note = chemically synthesized
  source 1..20: mol_type = other DNA
gagtggaagtccatgttgct

SEQ ID NO: 19230 - DNA, 20 bp, synthetic construct
  misc_feature 1..20: note = chemically synthesized
  source 1..20: mol_type = other DNA
aagtccatgttgctgagccc

SEQ ID NO: 19231 - DNA, 20 bp, synthetic construct
  misc_feature 1..20: note = chemically synthesized
  source 1..20: mol_type = other DNA
aacttccatccctgcaactg

SEQ ID NO: 19232 - DNA, 20 bp, synthetic construct
  misc_feature 1..20: note = chemically synthesized
  source 1..20: mol_type = other DNA
aactgtggccactttgttca

SEQ ID NO: 19233 - DNA, 20 bp, synthetic construct
  misc_feature 1..20: note = chemically synthesized
  source 1..20: mol_type = other DNA
actgtggccactttgttcat

SEQ ID NO: 19234 - DNA, 20 bp, synthetic construct
  misc_feature 1..20: note = chemically synthesized
  source 1..20: mol_type = other DNA
cactttgttcatgggtccat

SEQ ID NO: 19235 - DNA, 20 bp, synthetic construct
  misc_feature 1..20: note = chemically synthesized
  source 1..20: mol_type = other DNA
ggtccattggacgatgacat

SEQ ID NO: 19236 - DNA, 20 bp, synthetic construct
  misc_feature 1..20: note = chemically synthesized
  source 1..20: mol_type = other DNA
ccattggacgatgacatgag

SEQ ID NO: 19237 - DNA, 20 bp, synthetic construct
  misc_feature 1..20: note = chemically synthesized
  source 1..20: mol_type = other DNA
ggacgatgacatgagtggcc

SEQ ID NO: 19238 - DNA, 20 bp, synthetic construct
  misc_feature 1..20: note = chemically synthesized
  source 1..20: mol_type = other DNA
gacgatgacatgagtggcct

SEQ ID NO: 19239 - DNA, 20 bp, synthetic construct
  misc_feature 1..20: note = chemically synthesized
  source 1..20: mol_type = other DNA
tgacatgagtggcctgggaa

SEQ ID NO: 19240 - DNA, 20 bp, synthetic construct
  misc_feature 1..20: note = chemically synthesized
  source 1..20: mol_type = other DNA
gacatgagtggcctgggaaa

SEQ ID NO: 19241 - DNA, 20 bp, synthetic construct
  misc_feature 1..20: note = chemically synthesized
  source 1..20: mol_type = other DNA
gagtggcctgggaaaaggct

SEQ ID NO: 19242 - DNA, 20 bp, synthetic construct
  misc_feature 1..20: note = chemically synthesized
  source 1..20: mol_type = other DNA
tggcctgggaaaaggctgag

SEQ ID NO: 19243 - DNA, 20 bp, synthetic construct
  misc_feature 1..20: note = chemically synthesized
  source 1..20: mol_type = other DNA
aaaaggctgagtggtgtcca

SEQ ID NO: 19244 - DNA, 20 bp, synthetic construct
  misc_feature 1..20: note = chemically synthesized
  source 1..20: mol_type = other DNA
tattaaaatcctcttctgct

SEQ ID NO: 19245 - DNA, 20 bp, synthetic construct
  misc_feature 1..20: note = chemically synthesized
  source 1..20: mol_type = other DNA
attaaaatcctcttctgctg

SEQ ID NO: 19246 - DNA, 20 bp, synthetic construct
  misc_feature 1..20: note = chemically synthesized
  source 1..20: mol_type = other DNA
cttctgctgaggtcacccat

SEQ ID NO: 19247 - DNA, 20 bp, synthetic construct
  misc_feature 1..20: note = chemically synthesized
  source 1..20: mol_type = other DNA
tgctgaggtcacccattggt

SEQ ID NO: 19248 - DNA, 20 bp, synthetic construct
  misc_feature 1..20: note = chemically synthesized
  source 1..20: mol_type = other DNA
cccattggtgagcactcaca

SEQ ID NO: 19249 - DNA, 20 bp, synthetic construct
  misc_feature 1..20: note = chemically synthesized
  source 1..20: mol_type = other DNA
ccattggtgagcactcacat

SEQ ID NO: 19250 - DNA, 20 bp, synthetic construct
  misc_feature 1..20: note = chemically synthesized
  source 1..20: mol_type = other DNA
atgggatgaaaatatctttg

SEQ ID NO: 19251 - DNA, 20 bp, synthetic construct
  misc_feature 1..20: note = chemically synthesized
  source 1..20: mol_type = other DNA
ttgtagtttttgactaatca

SEQ ID NO: 19252 - DNA, 20 bp, synthetic construct
  misc_feature 1..20: note = chemically synthesized
  source 1..20: mol_type = other DNA
gtagtttttgactaatcata

SEQ ID NO: 19253 - DNA, 20 bp, synthetic construct
  misc_feature 1..20: note = chemically synthesized
  source 1..20: mol_type = other DNA
tagtttttgactaatcatag

SEQ ID NO: 19254 - DNA, 20 bp, synthetic construct
  misc_feature 1..20: note = chemically synthesized
  source 1..20: mol_type = other DNA
tttctttgtcatcaattttc

SEQ ID NO: 19255 - DNA, 20 bp, synthetic construct
  misc_feature 1..20: note = chemically synthesized
  source 1..20: mol_type = other DNA
tttccagtcatgctttttcc

SEQ ID NO: 19256 - DNA, 20 bp, synthetic construct
  misc_feature 1..20: note = chemically synthesized
  source 1..20: mol_type = other DNA
tttccaagtccctgaccatc

SEQ ID NO: 19257 - DNA, 20 bp, synthetic construct
  misc_feature 1..20: note = chemically synthesized
  source 1..20: mol_type = other DNA
tgaccatctagccaaacctt

SEQ ID NO: 19258 - DNA, 20 bp, synthetic construct
  misc_feature 1..20: note = chemically synthesized
  source 1..20: mol_type = other DNA
tctagccaaacctttggcta

SEQ ID NO: 19259 - DNA, 20 bp, synthetic construct
  misc_feature 1..20: note = chemically synthesized
  source 1..20: mol_type = other DNA
tttggctacagcccatgaat

SEQ ID NO: 19260 - DNA, 20 bp, synthetic construct
  misc_feature 1..20: note = chemically synthesized
  source 1..20: mol_type = other DNA
taagtatataatcgcaaatc

SEQ ID NO: 19261 - DNA, 20 bp, synthetic construct
  misc_feature 1..20: note = chemically synthesized
  source 1..20: mol_type = other DNA
gccatttctccttctgtgca

SEQ ID NO: 19262 - DNA, 20 bp, synthetic construct
  misc_feature 1..20: note = chemically synthesized
  source 1..20: mol_type = other DNA
ttctgtgcaaagtgcacaac

SEQ ID NO: 19263 - DNA, 20 bp, synthetic construct
  misc_feature 1..20: note = chemically synthesized
  source 1..20: mol_type = other DNA
tctgtgcaaagtgcacaacc

SEQ ID NO: 19264 - DNA, 20 bp, synthetic construct
  misc_feature 1..20: note = chemically synthesized
  source 1..20: mol_type = other DNA
acaaccaggcacactgctca

SEQ ID NO: 19265 - DNA, 20 bp, synthetic construct
  misc_feature 1..20: note = chemically synthesized
  source 1..20: mol_type = other DNA
ctgctcaaagttctgccaac

SEQ ID NO: 19266 - DNA, 20 bp, synthetic construct
  misc_feature 1..20: note = chemically synthesized
  source 1..20: mol_type = other DNA
tgctcaaagttctgccaact

SEQ ID NO: 19267 - DNA, 20 bp, synthetic construct
  misc_feature 1..20: note = chemically synthesized
  source 1..20: mol_type = other DNA
tcaaagttctgccaactagg

SEQ ID NO: 19268 - DNA, 20 bp, synthetic construct
  misc_feature 1..20: note = chemically synthesized
  source 1..20: mol_type = other DNA
ttcccttcaccgttgtcctt

SEQ ID NO: 19269 - DNA, 20 bp, synthetic construct
  misc_feature 1..20: note = chemically synthesized
  source 1..20: mol_type = other DNA
tcccttcaccgttgtccttc

SEQ ID NO: 19270 - DNA, 20 bp, synthetic construct
  misc_feature 1..20: note = chemically synthesized
  source 1..20: mol_type = other DNA
cccttcaccgttgtccttca

SEQ ID NO: 19271 - DNA, 20 bp, synthetic construct
  misc_feature 1..20: note = chemically synthesized
  source 1..20: mol_type = other DNA
gttgtccttcagggatgtcc

SEQ ID NO: 19272 - DNA, 20 bp, synthetic construct
  misc_feature 1..20: note = chemically synthesized
  source 1..20: mol_type = other DNA
tccttcagggatgtcctaga

SEQ ID NO: 19273 - DNA, 20 bp, synthetic construct
  misc_feature 1..20: note = chemically synthesized
  source 1..20: mol_type = other DNA
ccttcagggatgtcctagaa

SEQ ID NO: 19274 - DNA, 20 bp, synthetic construct
  misc_feature 1..20: note = chemically synthesized
  source 1..20: mol_type = other DNA
cttcagggatgtcctagaaa

SEQ ID NO: 19275 - DNA, 20 bp, synthetic construct
  misc_feature 1..20: note = chemically synthesized
  source 1..20: mol_type = other DNA
ttcagggatgtcctagaaag

SEQ ID NO: 19276 - DNA, 20 bp, synthetic construct
  misc_feature 1..20: note = chemically synthesized
  source 1..20: mol_type = other DNA
gatgtcctagaaaggggctg

SEQ ID NO: 19277 - DNA, 20 bp, synthetic construct
  misc_feature 1..20: note = chemically synthesized
  source 1..20: mol_type = other DNA
agaaaggggctgtagtgctg

SEQ ID NO: 19278 - DNA, 20 bp, synthetic construct
  misc_feature 1..20: note = chemically synthesized
  source 1..20: mol_type = other DNA
gtgctgcggctgtccacttt

SEQ ID NO: 19279 - DNA, 20 bp, synthetic construct
  misc_feature 1..20: note = chemically synthesized
  source 1..20: mol_type = other DNA
tgctgcggctgtccactttt

SEQ ID NO: 19280 - DNA, 20 bp, synthetic construct
  misc_feature 1..20: note = chemically synthesized
  source 1..20: mol_type = other DNA
tgcggctgtccacttttggg

SEQ ID NO: 19281 - DNA, 20 bp, synthetic construct
  misc_feature 1..20: note = chemically synthesized
  source 1..20: mol_type = other DNA
ggtggtgcctgcatatcgtg

SEQ ID NO: 19282 - DNA, 20 bp, synthetic construct
  misc_feature 1..20: note = chemically synthesized
  source 1..20: mol_type = other DNA
gtgcagaactatctgtgaac

SEQ ID NO: 19283 - DNA, 20 bp, synthetic construct
  misc_feature 1..20: note = chemically synthesized
  source 1..20: mol_type = other DNA
tgcagaactatctgtgaacc

SEQ ID NO: 19284 - DNA, 20 bp, synthetic construct
  misc_feature 1..20: note = chemically synthesized
  source 1..20: mol_type = other DNA
actatctgtgaaccaggacc

SEQ ID NO: 19285 - DNA, 20 bp, synthetic construct
  misc_feature 1..20: note = chemically synthesized
  source 1..20: mol_type = other DNA
ctagtcttctcttcctctgt

SEQ ID NO: 19286 - DNA, 20 bp, synthetic construct
  misc_feature 1..20: note = chemically synthesized
  source 1..20: mol_type = other DNA
cttcctctgtcagctgatca

SEQ ID NO: 19287 - DNA, 20 bp, synthetic construct
  misc_feature 1..20: note = chemically synthesized
  source 1..20: mol_type = other DNA
ttcctctgtcagctgatcat

SEQ ID NO: 19288 - DNA, 20 bp, synthetic construct
  misc_feature 1..20: note = chemically synthesized
  source 1..20: mol_type = other DNA
tcctctgtcagctgatcata

SEQ ID NO: 19289 - DNA, 20 bp, synthetic construct
  misc_feature 1..20: note = chemically synthesized
  source 1..20: mol_type = other DNA
gatcatagggaactccccat

SEQ ID NO: 19290 - DNA, 20 bp, synthetic construct
  misc_feature 1..20: note = chemically synthesized
  source 1..20: mol_type = other DNA
ggaactccccatgagaccat

SEQ ID NO: 19291 - DNA, 20 bp, synthetic construct
  misc_feature 1..20: note = chemically synthesized
  source 1..20: mol_type = other DNA
tccccatgagaccatcggtg

SEQ ID NO: 19292 - DNA, 20 bp, synthetic construct
  misc_feature 1..20: note = chemically synthesized
  source 1..20: mol_type = other DNA
tgagaccatcggtgcagtct

SEQ ID NO: 19293 - DNA, 20 bp, synthetic construct
  misc_feature 1..20: note = chemically synthesized
  source 1..20: mol_type = other DNA
gagaccatcggtgcagtctc

SEQ ID NO: 19294 - DNA, 20 bp, synthetic construct
  misc_feature 1..20: note = chemically synthesized
  source 1..20: mol_type = other DNA
agaccatcggtgcagtctca

SEQ ID NO: 19295 - DNA, 20 bp, synthetic construct
  misc_feature 1..20: note = chemically synthesized
  source 1..20: mol_type = other DNA
accatcggtgcagtctcagg

SEQ ID NO: 19296 - DNA, 20 bp, synthetic construct
  misc_feature 1..20: note = chemically synthesized
  source 1..20: mol_type = other DNA
catcggtgcagtctcaggga

SEQ ID NO: 19297 - DNA, 20 bp, synthetic construct
  misc_feature 1..20: note = chemically synthesized
  source 1..20: mol_type = other DNA
ggtgcagtctcagggagaga

SEQ ID NO: 19298 - DNA, 20 bp, synthetic construct
  misc_feature 1..20: note = chemically synthesized
  source 1..20: mol_type = other DNA
gcagtctcagggagagaaag

SEQ ID NO: 19299 - DNA, 20 bp, synthetic construct
  misc_feature 1..20: note = chemically synthesized
  source 1..20: mol_type = other DNA
agggagagaaagcagtgtgt

SEQ ID NO: 19300 - DNA, 20 bp, synthetic construct
  misc_feature 1..20: note = chemically synthesized
  source 1..20: mol_type = other DNA
gggagagaaagcagtgtgtc

SEQ ID NO: 19301 - DNA, 20 bp, synthetic construct
  misc_feature 1..20: note = chemically synthesized
  source 1..20: mol_type = other DNA
gagagaaagcagtgtgtcag

SEQ ID NO: 19302 - DNA, 20 bp, synthetic construct
  misc_feature 1..20: note = chemically synthesized
  source 1..20: mol_type = other DNA
agaaagcagtgtgtcaggag

SEQ ID NO: 19303 - DNA, 20 bp, synthetic construct
  misc_feature 1..20: note = chemically synthesized
  source 1..20: mol_type = other DNA
aaagcagtgtgtcaggagtg

SEQ ID NO: 19304 - DNA, 20 bp, synthetic construct
  misc_feature 1..20: note = chemically synthesized
  source 1..20: mol_type = other DNA
tgtgtcaggagtggagacca

SEQ ID NO: 19305 - DNA, 20 bp, synthetic construct
  misc_feature 1..20: note = chemically synthesized
  source 1..20: mol_type = other DNA
gtgtcaggagtggagaccat

SEQ ID NO: 19306 - DNA, 20 bp, synthetic construct
  misc_feature 1..20: note = chemically synthesized
  source 1..20: mol_type = other DNA
agtggagaccatgggcattt

SEQ ID NO: 19307 - DNA, 20 bp, synthetic construct
  misc_feature 1..20: note = chemically synthesized
  source 1..20: mol_type = other DNA
ccctttctcatgtaacttac

SEQ ID NO: 19308 - DNA, 20 bp, synthetic construct
  misc_feature 1..20: note = chemically synthesized
  source 1..20: mol_type = other DNA
atgtaacttactagtgcctt

SEQ ID NO: 19309 - DNA, 20 bp, synthetic construct
  misc_feature 1..20: note = chemically synthesized
  source 1..20: mol_type = other DNA
tgtaacttactagtgccttc

SEQ ID NO: 19310 - DNA, 20 bp, synthetic construct
  misc_feature 1..20: note = chemically synthesized
  source 1..20: mol_type = other DNA
agtgccttcaggatctgctc

SEQ ID NO: 19311 - DNA, 20 bp, synthetic construct
  misc_feature 1..20: note = chemically synthesized
  source 1..20: mol_type = other DNA
tgatgcaatgctgctgtgca

SEQ ID NO: 19312 - DNA, 20 bp, synthetic construct
  misc_feature 1..20: note = chemically synthesized
  source 1..20: mol_type = other DNA
gctgtgcacagcccacttta

SEQ ID NO: 19313 - DNA, 20 bp, synthetic construct
  misc_feature 1..20: note = chemically synthesized
  source 1..20: mol_type = other DNA
tgcacagcccactttatggc

SEQ ID NO: 19314 - DNA, 20 bp, synthetic construct
  misc_feature 1..20: note = chemically synthesized
  source 1..20: mol_type = other DNA
cagcccactttatggctaga

SEQ ID NO: 19315 - DNA, 20 bp, synthetic construct
  misc_feature 1..20: note = chemically synthesized
  source 1..20: mol_type = other DNA
cactttatggctagatggat

SEQ ID NO: 19316 - DNA, 20 bp, synthetic construct
  misc_feature 1..20: note = chemically synthesized
  source 1..20: mol_type = other DNA
ttatggctagatggatcaga

SEQ ID NO: 19317 - DNA, 20 bp, synthetic construct
  misc_feature 1..20: note = chemically synthesized
  source 1..20: mol_type = other DNA
tagatggatcagaaagcacc

SEQ ID NO: 19318 - DNA, 20 bp, synthetic construct
  misc_feature 1..20: note = chemically synthesized
  source 1..20: mol_type = other DNA
agaaagcacccagttcatga

SEQ ID NO: 19319 - DNA, 20 bp, synthetic construct
  misc_feature 1..20: note = chemically synthesized
  source 1..20: mol_type = other DNA
gaaagcacccagttcatgat

SEQ ID NO: 19320 - DNA, 20 bp, synthetic construct
  misc_feature 1..20: note = chemically synthesized
  source 1..20: mol_type = other DNA
agcacccagttcatgatagg

SEQ ID NO: 19321 - DNA, 20 bp, synthetic construct
  misc_feature 1..20: note = chemically synthesized
  source 1..20: mol_type = other DNA
ccagttcatgataggcagtt

SEQ ID NO: 19322 - DNA, 20 bp, synthetic construct
  misc_feature 1..20: note = chemically synthesized
  source 1..20: mol_type = other DNA
cagttcatgataggcagttc

SEQ ID NO: 19323 - DNA, 20 bp, synthetic construct
  misc_feature 1..20: note = chemically synthesized
  source 1..20: mol_type = other DNA
gataggcagttcaggtcaca

SEQ ID NO: 19324 - DNA, 20 bp, synthetic construct
  misc_feature 1..20: note = chemically synthesized
  source 1..20: mol_type = other DNA
catggtgacttgatgactca

SEQ ID NO: 19325 - DNA, 20 bp, synthetic construct
  misc_feature 1..20: note = chemically synthesized
  source 1..20: mol_type = other DNA
caaatatttcgtttccacca

SEQ ID NO: 19326 - DNA, 20 bp, synthetic construct
  misc_feature 1..20: note = chemically synthesized
  source 1..20: mol_type = other DNA
atttcgtttccaccaaagcc

SEQ ID NO: 19327 - DNA, 20 bp, synthetic construct
  misc_feature 1..20: note = chemically synthesized
  source 1..20: mol_type = other DNA
tttccaccaaagcccagtaa

SEQ ID NO: 19328 - DNA, 20 bp, synthetic construct
  misc_feature 1..20: note = chemically synthesized
  source 1..20: mol_type = other DNA
ttccaccaaagcccagtaac

SEQ ID NO: 19329 - DNA, 20 bp, synthetic construct
  misc_feature 1..20: note = chemically synthesized
  source 1..20: mol_type = other DNA
ccaaagcccagtaacaggcc

SEQ ID NO: 19330 - DNA, 20 bp, synthetic construct
  misc_feature 1..20: note = chemically synthesized
  source 1..20: mol_type = other DNA
aaagcccagtaacaggccaa

SEQ ID NO: 19331 - DNA, 20 bp, synthetic construct
  misc_feature 1..20: note = chemically synthesized
  source 1..20: mol_type = other DNA
gccaagagctttctccctaa

SEQ ID NO: 19332 - DNA, 20 bp, synthetic construct
  misc_feature 1..20: note = chemically synthesized
  source 1..20: mol_type = other DNA
caagagctttctccctaaaa

SEQ ID NO: 19333 - DNA, 20 bp, synthetic construct
  misc_feature 1..20: note = chemically synthesized
  source 1..20: mol_type = other DNA
agagctttctccctaaaaga

SEQ ID NO: 19334 - DNA, 20 bp, synthetic construct
  misc_feature 1..20: note = chemically synthesized
  source 1..20: mol_type = other DNA
gctttctccctaaaagagag

SEQ ID NO: 19335 - DNA, 20 bp, synthetic construct
  misc_feature 1..20: note = chemically synthesized
  source 1..20: mol_type = other DNA
taaaagagagtagttatctg

SEQ ID NO: 19336 - DNA, 20 bp, synthetic construct
  misc_feature 1..20: note = chemically synthesized
  source 1..20: mol_type = other DNA
aagagagtagttatctgcag

SEQ ID NO: 19337 - DNA, 20 bp, synthetic construct
  misc_feature 1..20: note = chemically synthesized
  source 1..20: mol_type = other DNA
gagtagttatctgcagaaga

SEQ ID NO: 19338 - DNA, 20 bp, synthetic construct
  misc_feature 1..20: note = chemically synthesized
  source 1..20: mol_type = other DNA
tagttatctgcagaagatgg

SEQ ID NO: 19339 - DNA, 20 bp, synthetic construct
  misc_feature 1..20: note = chemically synthesized
  source 1..20: mol_type = other DNA
agttatctgcagaagatggc

SEQ ID NO: 19340 - DNA, 20 bp, synthetic construct
  misc_feature 1..20: note = chemically synthesized
  source 1..20: mol_type = other DNA
gttatctgcagaagatggca

SEQ ID NO: 19341 - DNA, 20 bp, synthetic construct
  misc_feature 1..20: note = chemically synthesized
  source 1..20: mol_type = other DNA
agggccttgctccaaaatcc

SEQ ID NO: 19342 - DNA, 20 bp, synthetic construct
  misc_feature 1..20: note = chemically synthesized
  source 1..20: mol_type = other DNA
ggccttgctccaaaatccta

SEQ ID NO: 19343 - DNA, 20 bp, synthetic construct
  misc_feature 1..20: note = chemically synthesized
  source 1..20: mol_type = other DNA
gccttgctccaaaatcctag

SEQ ID NO: 19344 - DNA, 20 bp, synthetic construct
  misc_feature 1..20: note = chemically synthesized
  source 1..20: mol_type = other DNA
tagaggcctccgctgtgatt

SEQ ID NO: 19345 - DNA, 20 bp, synthetic construct
  misc_feature 1..20: note = chemically synthesized
  source 1..20: mol_type = other DNA
agcctgccaaatgctccaaa

SEQ ID NO: 19346 - DNA, 20 bp, synthetic construct
  misc_feature 1..20: note = chemically synthesized
  source 1..20: mol_type = other DNA
ctccaaacagcatccctatc

SEQ ID NO: 19347 - DNA, 20 bp, synthetic construct
  misc_feature 1..20: note = chemically synthesized
  source 1..20: mol_type = other DNA
ctatctggcactgacacctc

SEQ ID NO: 19348 - DNA, 20 bp, synthetic construct
  misc_feature 1..20: note = chemically synthesized
  source 1..20: mol_type = other DNA
actgacacctcaagcatcat

SEQ ID NO: 19349 - DNA, 20 bp, synthetic construct
  misc_feature 1..20: note = chemically synthesized
  source 1..20: mol_type = other DNA
tcaagcatcattggatctgc

SEQ ID NO: 19350 - DNA, 20 bp, synthetic construct
  misc_feature 1..20: note = chemically synthesized
  source 1..20: mol_type = other DNA
caagcatcattggatctgct

SEQ ID NO: 19351 - DNA, 20 bp, synthetic construct
  misc_feature 1..20: note = chemically synthesized
  source 1..20: mol_type = other DNA
attggatctgctaggtcata

SEQ ID NO: 19352 - DNA, 20 bp, synthetic construct
  misc_feature 1..20: note = chemically synthesized
  source 1..20: mol_type = other DNA
tctgctaggtcatatggccc

SEQ ID NO: 19353 - DNA, 20 bp, synthetic construct
  misc_feature 1..20: note = chemically synthesized
  source 1..20: mol_type = other DNA
gctaggtcatatggcccaag

SEQ ID NO: 19354 - DNA, 20 bp, synthetic construct
  misc_feature 1..20: note = chemically synthesized
  source 1..20: mol_type = other DNA
gtcatatggcccaagtggca

SEQ ID NO: 19355 - DNA, 20 bp, synthetic construct
  misc_feature 1..20: note = chemically synthesized
  source 1..20: mol_type = other DNA
atatggcccaagtggcatag

SEQ ID NO: 19356 - DNA, 20 bp, synthetic construct
  misc_feature 1..20: note = chemically synthesized
  source 1..20: mol_type = other DNA
aagtggcatagcagcttgca

SEQ ID NO: 19357 - DNA, 20 bp, synthetic construct
  misc_feature 1..20: note = chemically synthesized
  source 1..20: mol_type = other DNA
tggcatagcagcttgcacag

SEQ ID NO: 19358 - DNA, 20 bp, synthetic construct
  misc_feature 1..20: note = chemically synthesized
  source 1..20: mol_type = other DNA
tagcagcttgcacagcagcc

SEQ ID NO: 19359 - DNA, 20 bp, synthetic construct
  misc_feature 1..20: note = chemically synthesized
  source 1..20: mol_type = other DNA
tgcacagcagcctggacctg

SEQ ID NO: 19360 - DNA, 20 bp, synthetic construct
  misc_feature 1..20: note = chemically synthesized
  source 1..20: mol_type = other DNA
acagcagcctggacctgtgg

SEQ ID NO: 19361 - DNA, 20 bp, synthetic construct
  misc_feature 1..20: note = chemically synthesized
  source 1..20: mol_type = other DNA
agcagcctggacctgtggca

SEQ ID NO: 19362 - DNA, 20 bp, synthetic construct
  misc_feature 1..20: note = chemically synthesized
  source 1..20: mol_type = other DNA
tgtggcagagccttctgttc

SEQ ID NO: 19363 - DNA, 20 bp, synthetic construct
  misc_feature 1..20: note = chemically synthesized
  source 1..20: mol_type = other DNA
ttctggactccactcaaaac

SEQ ID NO: 19364 - DNA, 20 bp, synthetic construct
  misc_feature 1..20: note = chemically synthesized
  source 1..20: mol_type = other DNA
tggactccactcaaaactgg

SEQ ID NO: 19365 - DNA, 20 bp, synthetic construct
  misc_feature 1..20: note = chemically synthesized
  source 1..20: mol_type = other DNA
actcaaaactggcagccttt

SEQ ID NO: 19366 - DNA, 20 bp, synthetic construct
  misc_feature 1..20: note = chemically synthesized
  source 1..20: mol_type = other DNA
cttttggatcactcgataaa

SEQ ID NO: 19367 - DNA, 20 bp, synthetic construct
  misc_feature 1..20: note = chemically synthesized
  source 1..20: mol_type = other DNA
ttttggatcactcgataaat

SEQ ID NO: 19368 - DNA, 20 bp, synthetic construct
  misc_feature 1..20: note = chemically synthesized
  source 1..20: mol_type = other DNA
ggatcactcgataaatgggc

SEQ ID NO: 19369 - DNA, 20 bp, synthetic construct
  misc_feature 1..20: note = chemically synthesized
  source 1..20: mol_type = other DNA
atcactcgataaatgggcca

SEQ ID NO: 19370 - DNA, 20 bp, synthetic construct
  misc_feature 1..20: note = chemically synthesized
  source 1..20: mol_type = other DNA
ccagagtaacacacccaaat

SEQ ID NO: 19371 - DNA, 20 bp, synthetic construct
  misc_feature 1..20: note = chemically synthesized
  source 1..20: mol_type = other DNA
cagagtaacacacccaaatc

SEQ ID NO: 19372 - DNA, 20 bp, synthetic construct
  misc_feature 1..20: note = chemically synthesized
  source 1..20: mol_type = other DNA
tgttgcctccaaaatccaaa

SEQ ID NO: 19373 - DNA, 20 bp, synthetic construct
  misc_feature 1..20: note = chemically synthesized
  source 1..20: mol_type = other DNA
gttgcctccaaaatccaaat

SEQ ID NO: 19374 - DNA, 20 bp, synthetic construct
  misc_feature 1..20: note = chemically synthesized
  source 1..20: mol_type = other DNA
caaaatccaaataggcccac

SEQ ID NO: 19375 - DNA, 20 bp, synthetic construct
  misc_feature 1..20: note = chemically synthesized
  source 1..20: mol_type = other DNA
aaaatccaaataggcccact

SEQ ID NO: 19376 - DNA, 20 bp, synthetic construct
  misc_feature 1..20: note = chemically synthesized
  source 1..20: mol_type = other DNA
taggcgttgtgcctatttct

SEQ ID NO: 19377 - DNA, 20 bp, synthetic construct
  misc_feature 1..20: note = chemically synthesized
  source 1..20: mol_type = other DNA
tgtgcctatttcttggttgt

SEQ ID NO: 19378 - DNA, 20 bp, synthetic construct
  misc_feature 1..20: note = chemically synthesized
  source 1..20: mol_type = other DNA
tgcctatttcttggttgtaa

SEQ ID NO: 19379 - DNA, 20 bp, synthetic construct
  misc_feature 1..20: note = chemically synthesized
  source 1..20: mol_type = other DNA
ctatttcttggttgtaagag

SEQ ID NO: 19380 - DNA, 20 bp, synthetic construct
  misc_feature 1..20: note = chemically synthesized
  source 1..20: mol_type = other DNA
gttgtaagagtggccaaatg

SEQ ID NO: 19381 - DNA, 20 bp, synthetic construct
  misc_feature 1..20: note = chemically synthesized
  source 1..20: mol_type = other DNA
cagcaaattatccttcactt

SEQ ID NO: 19382 - DNA, 20 bp, synthetic construct
  misc_feature 1..20: note = chemically synthesized
  source 1..20: mol_type = other DNA
caaattatccttcactttag

SEQ ID NO: 19383 - DNA, 20 bp, synthetic construct
  misc_feature 1..20: note = chemically synthesized
  source 1..20: mol_type = other DNA
aaattatccttcactttaga

SEQ ID NO: 19384 - DNA, 20 bp, synthetic construct
  misc_feature 1..20: note = chemically synthesized
  source 1..20: mol_type = other DNA
actttagaaggaatatctca

SEQ ID NO: 19385 - DNA, 20 bp, synthetic construct
  misc_feature 1..20: note = chemically synthesized
  source 1..20: mol_type = other DNA
tttagaaggaatatctcaaa

SEQ ID NO: 19386 - DNA, 20 bp, synthetic construct
  misc_feature 1..20: note = chemically synthesized
  source 1..20: mol_type = other DNA
ctcaaagagccccaaaccat

SEQ ID NO: 19387 - DNA, 20 bp, synthetic construct
  misc_feature 1..20: note = chemically synthesized
  source 1..20: mol_type = other DNA
ggacccctataaattttact

SEQ ID NO: 19388 - DNA, 20 bp, synthetic construct
  misc_feature 1..20: note = chemically synthesized
  source 1..20: mol_type = other DNA
gacccctataaattttactg

SEQ ID NO: 19389 - DNA, 20 bp, synthetic construct
  misc_feature 1..20: note = chemically synthesized
  source 1..20: mol_type = other DNA
ccctataaattttactgagg

SEQ ID NO: 19390 - DNA, 20 bp, synthetic construct
  misc_feature 1..20: note = chemically synthesized
  source 1..20: mol_type = other DNA
tataaattttactgaggtag

SEQ ID NO: 19391 - DNA, 20 bp, synthetic construct
  misc_feature 1..20: note = chemically synthesized
  source 1..20: mol_type = other DNA
ataaattttactgaggtaga

SEQ ID NO: 19392 - DNA, 20 bp, synthetic construct
  misc_feature 1..20: note = chemically synthesized
  source 1..20: mol_type = other DNA
agaaggtccctgaatttaat

SEQ ID NO: 19393 - DNA, 20 bp, synthetic construct
  misc_feature 1..20: note = chemically synthesized
  source 1..20: mol_type = other DNA
aaatgtctcatcaataaatc

SEQ ID NO: 19394 - DNA, 20 bp, synthetic construct
  misc_feature 1..20: note = chemically synthesized
  source 1..20: mol_type = other DNA
gtttgctacttcttgctcac

SEQ ID NO: 19395 - DNA, 20 bp, synthetic construct
  misc_feature 1..20: note = chemically synthesized
  source 1..20: mol_type = other DNA
tacttcttgctcactagttc

SEQ ID NO: 19396 - DNA, 20 bp, synthetic construct
  misc_feature 1..20: note = chemically synthesized
  source 1..20: mol_type = other DNA
tcttgctcactagttccagt

SEQ ID NO: 19397 - DNA, 20 bp, synthetic construct
  misc_feature 1..20: note = chemically synthesized
  source 1..20: mol_type = other DNA
tcagcatgtcatcaatgtaa

SEQ ID NO: 19398 - DNA, 20 bp, synthetic construct
  misc_feature 1..20: note = chemically synthesized
  source 1..20: mol_type = other DNA
tggaccactgtgatatcttg

SEQ ID NO: 19399 - DNA, 20 bp, synthetic construct
  misc_feature 1..20: note = chemically synthesized
  source 1..20: mol_type = other DNA
accactgtgatatcttgtgg

SEQ ID NO: 19400 - DNA, 20 bp, synthetic construct
  misc_feature 1..20: note = chemically synthesized
  source 1..20: mol_type = other DNA
gtgatatcttgtggaagtga

SEQ ID NO: 19401 - DNA, 20 bp, synthetic construct
  misc_feature 1..20: note = chemically synthesized
  source 1..20: mol_type = other DNA
tgatatcttgtggaagtgaa

SEQ ID NO: 19402 - DNA, 20 bp, synthetic construct
  misc_feature 1..20: note = chemically synthesized
  source 1..20: mol_type = other DNA
atcttgtggaagtgaaaggt

SEQ ID NO: 19403 - DNA, 20 bp, synthetic construct
  misc_feature 1..20: note = chemically synthesized
  source 1..20: mol_type = other DNA
tgtggaagtgaaaggtgagc

SEQ ID NO: 19404 - DNA, 20 bp, synthetic construct
  misc_feature 1..20: note = chemically synthesized
  source 1..20: mol_type = other DNA
tgagcaagttctctccaaat

SEQ ID NO: 19405 - DNA, 20 bp, synthetic construct
  misc_feature 1..20: note = chemically synthesized
  source 1..20: mol_type = other DNA
gttctctccaaataagatta

SEQ ID NO: 19406 - DNA, 20 bp, synthetic construct
  misc_feature 1..20: note = chemically synthesized
  source 1..20: mol_type = other DNA
ccaaataagattatggcaca

SEQ ID NO: 19407 - DNA, 20 bp, synthetic construct
  misc_feature 1..20: note = chemically synthesized
  source 1..20: mol_type = other DNA
ataagattatggcacaaagc

SEQ ID NO: 19408 - DNA, 20 bp, synthetic construct
  misc_feature 1..20: note = chemically synthesized
  source 1..20: mol_type = other DNA
aagattatggcacaaagctg

SEQ ID NO: 19409 - DNA, 20 bp, synthetic construct
  misc_feature 1..20: note = chemically synthesized
  source 1..20: mol_type = other DNA
gattatggcacaaagctgga

SEQ ID NO: 19410 - DNA, 20 bp, synthetic construct
  misc_feature 1..20: note = chemically synthesized
  source 1..20: mol_type = other DNA
tggagagttgatatactcct

SEQ ID NO: 19411 - DNA, 20 bp, synthetic construct
  misc_feature 1..20: note = chemically synthesized
  source 1..20: mol_type = other DNA
ttttctttcatcactttgtc

SEQ ID NO: 19412 - DNA, 20 bp, synthetic construct
  misc_feature 1..20: note = chemically synthesized
  source 1..20: mol_type = other DNA
actttgtccagcgaacttac

SEQ ID NO: 19413 - DNA, 20 bp, synthetic construct
  misc_feature 1..20: note = chemically synthesized
  source 1..20: mol_type = other DNA
gttccttgattctccacata

SEQ ID NO: 19414 - DNA, 20 bp, synthetic construct
  misc_feature 1..20: note = chemically synthesized
  source 1..20: mol_type = other DNA
gattctccacatatagtcaa

SEQ ID NO: 19415 - DNA, 20 bp, synthetic construct
  misc_feature 1..20: note = chemically synthesized
  source 1..20: mol_type = other DNA
agtcaaaagtattatgtata

SEQ ID NO: 19416 - DNA, 20 bp, synthetic construct
  misc_feature 1..20: note = chemically synthesized
  source 1..20: mol_type = other DNA
caaaagtattatgtatacag

SEQ ID NO: 19417 - DNA, 20 bp, synthetic construct
  misc_feature 1..20: note = chemically synthesized
  source 1..20: mol_type = other DNA
ctaaattccttgcctctcac

SEQ ID NO: 19418 - DNA, 20 bp, synthetic construct
  misc_feature 1..20: note = chemically synthesized
  source 1..20: mol_type = other DNA
cctctcacaagcgttgaatc

SEQ ID NO: 19419 - DNA, 20 bp, synthetic construct
  misc_feature 1..20: note = chemically synthesized
  source 1..20: mol_type = other DNA
tctcacaagcgttgaatcaa

SEQ ID NO: 19420 - DNA, 20 bp, synthetic construct
  misc_feature 1..20: note = chemically synthesized
  source 1..20: mol_type = other DNA
ctctctaaacaattgatgcc

SEQ ID NO: 19421 - DNA, 20 bp, synthetic construct
  misc_feature 1..20: note = chemically synthesized
  source 1..20: mol_type = other DNA
tctctaaacaattgatgcca

SEQ ID NO: 19422 - DNA, 20 bp, synthetic construct
  misc_feature 1..20: note = chemically synthesized
  source 1..20: mol_type = other DNA
caattgatgccaaggattat

SEQ ID NO: 19423 - DNA, 20 bp, synthetic construct
  misc_feature 1..20: note = chemically synthesized
  source 1..20: mol_type = other DNA
atcagtgttctccataccat

SEQ ID NO: 19424 - DNA, 20 bp, synthetic construct
  misc_feature 1..20: note = chemically synthesized
  source 1..20: mol_type = other DNA
agtgttctccataccattag

SEQ ID NO: 19425 - DNA, 20 bp, synthetic construct
  misc_feature 1..20: note = chemically synthesized
  source 1..20: mol_type = other DNA
gttctccataccattagaag

SEQ ID NO: 19426 - DNA, 20 bp, synthetic construct
  misc_feature 1..20: note = chemically synthesized
  source 1..20: mol_type = other DNA
tctccataccattagaagaa

SEQ ID NO: 19427 - DNA, 20 bp, synthetic construct
  misc_feature 1..20: note = chemically synthesized
  source 1..20: mol_type = other DNA
accattagaagaagagtcct

SEQ ID NO: 19428 - DNA, 20 bp, synthetic construct
  misc_feature 1..20: note = chemically synthesized
  source 1..20: mol_type = other DNA
agaagagtccttagcatatt

SEQ ID NO: 19429 - DNA, 20 bp, synthetic construct
  misc_feature 1..20: note = chemically synthesized
  source 1..20: mol_type = other DNA
gaagagtccttagcatattt

SEQ ID NO: 19430 - DNA, 20 bp, synthetic construct
  misc_feature 1..20: note = chemically synthesized
  source 1..20: mol_type = other DNA
tatttgggtctaatcatatt

SEQ ID NO: 19431 - DNA, 20 bp, synthetic construct
  misc_feature 1..20: note = chemically synthesized
  source 1..20: mol_type = other DNA
ttgggtctaatcatattaag

SEQ ID NO: 19432 - DNA, 20 bp, synthetic construct
  misc_feature 1..20: note = chemically synthesized
  source 1..20: mol_type = other DNA
tcatattaagcagccaactc

SEQ ID NO: 19433 - DNA, 20 bp, synthetic construct
  misc_feature 1..20: note = chemically synthesized
  source 1..20: mol_type = other DNA
agaaaccccaaaaccaatga

SEQ ID NO: 19434 - DNA, 20 bp, synthetic construct
  misc_feature 1..20: note = chemically synthesized
  source 1..20: mol_type = other DNA
tccttaatattctgttcctc

SEQ ID NO: 19435 - DNA, 20 bp, synthetic construct
  misc_feature 1..20: note = chemically synthesized
  source 1..20: mol_type = other DNA
tgttcctctagaaccactcc

SEQ ID NO: 19436 - DNA, 20 bp, synthetic construct
  misc_feature 1..20: note = chemically synthesized
  source 1..20: mol_type = other DNA
cctggtaccaaaatctgtat

SEQ ID NO: 19437 - DNA, 20 bp, synthetic construct
  misc_feature 1..20: note = chemically synthesized
  source 1..20: mol_type = other DNA
ctggtaccaaaatctgtatt

SEQ ID NO: 19438 - DNA, 20 bp, synthetic construct
  misc_feature 1..20: note = chemically synthesized
  source 1..20: mol_type = other DNA
tggtaccaaaatctgtatta

SEQ ID NO: 19439 - DNA, 20 bp, synthetic construct
  misc_feature 1..20: note = chemically synthesized
  source 1..20: mol_type = other DNA
aaatctgtattagggttcta

SEQ ID NO: 19440 - DNA, 20 bp, synthetic construct
  misc_feature 1..20: note = chemically synthesized
  source 1..20: mol_type = other DNA
atctgtattagggttctaca

SEQ ID NO: 19441 - DNA, 20 bp, synthetic construct
  misc_feature 1..20: note = chemically synthesized
  source 1..20: mol_type = other DNA
attagggttctacagagaaa

SEQ ID NO: 19442 - DNA, 20 bp, synthetic construct
  misc_feature 1..20: note = chemically synthesized
  source 1..20: mol_type = other DNA
ctacagagaaacagaattaa

SEQ ID NO: 19443 - DNA, 20 bp, synthetic construct
  misc_feature 1..20: note = chemically synthesized
  source 1..20: mol_type = other DNA
tacagagaaacagaattaat

SEQ ID NO: 19444 - DNA, 20 bp, synthetic construct
  misc_feature 1..20: note = chemically synthesized
  source 1..20: mol_type = other DNA
cagagaaacagaattaatag

SEQ ID NO: 19445 - DNA, 20 bp, synthetic construct
  misc_feature 1..20: note = chemically synthesized
  source 1..20: mol_type = other DNA
ctctatatctatatctatat

SEQ ID NO: 19446 - DNA, 20 bp, synthetic construct
  misc_feature 1..20: note = chemically synthesized
  source 1..20: mol_type = other DNA
ctatatctatatctatatga

SEQ ID NO: 19447 - DNA, 20 bp, synthetic construct
  misc_feature 1..20: note = chemically synthesized
  source 1..20: mol_type = other DNA
ctatatgagagtttattatg

SEQ ID NO: 19448 - DNA, 20 bp, synthetic construct
  misc_feature 1..20: note = chemically synthesized
  source 1..20: mol_type = other DNA
gtattgactcacatgttcac

SEQ ID NO: 19449 - DNA, 20 bp, synthetic construct
  misc_feature 1..20: note = chemically synthesized
  source 1..20: mol_type = other DNA
tattgactcacatgttcaca

SEQ ID NO: 19450 - DNA, 20 bp, synthetic construct
  misc_feature 1..20: note = chemically synthesized
  source 1..20: mol_type = other DNA
atgttcacaaggtcccaaaa

SEQ ID NO: 19451 - DNA, 20 bp, synthetic construct
  misc_feature 1..20: note = chemically synthesized
  source 1..20: mol_type = other DNA
tgttcacaaggtcccaaaac

SEQ ID NO: 19452 - DNA, 20 bp, synthetic construct
  misc_feature 1..20: note = chemically synthesized
  source 1..20: mol_type = other DNA
tcccaaaacaggccatctgc

SEQ ID NO: 19453 - DNA, 20 bp, synthetic construct
  misc_feature 1..20: note = chemically synthesized
  source 1..20: mol_type = other DNA
aaacaggccatctgccagct

SEQ ID NO: 19454 - DNA, 20 bp, synthetic construct
  misc_feature 1..20: note = chemically synthesized
  source 1..20: mol_type = other DNA
aacaggccatctgccagctg

SEQ ID NO: 19455 - DNA, 20 bp, synthetic construct
  misc_feature 1..20: note = chemically synthesized
  source 1..20: mol_type = other DNA
ccatctgccagctgaggaac

SEQ ID NO: 19456 - DNA, 20 bp, synthetic construct
  misc_feature 1..20: note = chemically synthesized
  source 1..20: mol_type = other DNA
catctgccagctgaggaaca

SEQ ID NO: 19457 - DNA, 20 bp, synthetic construct
  misc_feature 1..20: note = chemically synthesized
  source 1..20: mol_type = other DNA
ctgccagctgaggaacaagg

SEQ ID NO: 19458 - DNA, 20 bp, synthetic construct
  misc_feature 1..20: note = chemically synthesized
  source 1..20: mol_type = other DNA
cagctgaggaacaaggaagc

SEQ ID NO: 19459 - DNA, 20 bp, synthetic construct
  misc_feature 1..20: note = chemically synthesized
  source 1..20: mol_type = other DNA
tgaggaacaaggaagctagt

SEQ ID NO: 19460 - DNA, 20 bp, synthetic construct
  misc_feature 1..20: note = chemically synthesized
  source 1..20: mol_type = other DNA
aggaacaaggaagctagtcg

SEQ ID NO: 19461 - DNA, 20 bp, synthetic construct
  misc_feature 1..20: note = chemically synthesized
  source 1..20: mol_type = other DNA
ggaagctagtcggagtccca

SEQ ID NO: 19462 - DNA, 20 bp, synthetic construct
  misc_feature 1..20: note = chemically synthesized
  source 1..20: mol_type = other DNA
tagtcggagtcccaaagctg

SEQ ID NO: 19463 - DNA, 20 bp, synthetic construct
  misc_feature 1..20: note = chemically synthesized
  source 1..20: mol_type = other DNA
agtcccaaagctgaagaacc

SEQ ID NO: 19464 - DNA, 20 bp, synthetic construct
  misc_feature 1..20: note = chemically synthesized
  source 1..20: mol_type = other DNA
tcccaaagctgaagaacctg

SEQ ID NO: 19465 - DNA, 20 bp, synthetic construct
  misc_feature 1..20: note = chemically synthesized
  source 1..20: mol_type = other DNA
gaacctggagttcaatgttc

SEQ ID NO: 19466 - DNA, 20 bp, synthetic construct
  misc_feature 1..20: note = chemically synthesized
  source 1..20: mol_type = other DNA
aacctggagttcaatgttcc

SEQ ID NO: 19467 - DNA, 20 bp, synthetic construct
  misc_feature 1..20: note = chemically synthesized
  source 1..20: mol_type = other DNA
acctggagttcaatgttcca

SEQ ID NO: 19468 - DNA, 20 bp, synthetic construct
  misc_feature 1..20: note = chemically synthesized
  source 1..20: mol_type = other DNA
tggagttcaatgttccaggg

SEQ ID NO: 19469 - DNA, 20 bp, synthetic construct
  misc_feature 1..20: note = chemically synthesized
  source 1..20: mol_type = other DNA
ggagttcaatgttccagggc

SEQ ID NO: 19470 - DNA, 20 bp, synthetic construct
  misc_feature 1..20: note = chemically synthesized
  source 1..20: mol_type = other DNA
gttcaatgttccagggcagg

SEQ ID NO: 19471 - DNA, 20 bp, synthetic construct
  misc_feature 1..20: note = chemically synthesized
  source 1..20: mol_type = other DNA
gttccagggcaggaagaatc

SEQ ID NO: 19472 - DNA, 20 bp, synthetic construct
  misc_feature 1..20: note = chemically synthesized
  source 1..20: mol_type = other DNA
agggcaggaagaatccagca

SEQ ID NO: 19473 - DNA, 20 bp, synthetic construct
  misc_feature 1..20: note = chemically synthesized
  source 1..20: mol_type = other DNA
gggcaggaagaatccagcat

SEQ ID NO: 19474 - DNA, 20 bp, synthetic construct
  misc_feature 1..20: note = chemically synthesized
  source 1..20: mol_type = other DNA
gcaggaagaatccagcatgg

SEQ ID NO: 19475 - DNA, 20 bp, synthetic construct
  misc_feature 1..20: note = chemically synthesized
  source 1..20: mol_type = other DNA
tccagcatgggagaaaaatg

SEQ ID NO: 19476 - DNA, 20 bp, synthetic construct
  misc_feature 1..20: note = chemically synthesized
  source 1..20: mol_type = other DNA
ccagcatgggagaaaaatgt

SEQ ID NO: 19477 - DNA, 20 bp, synthetic construct
  misc_feature 1..20: note = chemically synthesized
  source 1..20: mol_type = other DNA
catgggagaaaaatgtaggc

SEQ ID NO: 19478 - DNA, 20 bp, synthetic construct
  misc_feature 1..20: note = chemically synthesized
  source 1..20: mol_type = other DNA
atgggagaaaaatgtaggct

SEQ ID NO: 19479 - DNA, 20 bp, synthetic construct
  misc_feature 1..20: note = chemically synthesized
  source 1..20: mol_type = other DNA
aaaatgtaggctgggatgcc

SEQ ID NO: 19480 - DNA, 20 bp, synthetic construct
  misc_feature 1..20: note = chemically synthesized
  source 1..20: mol_type = other DNA
gctgggatgccaagccaatc

SEQ ID NO: 19481 - DNA, 20 bp, synthetic construct
  misc_feature 1..20: note = chemically synthesized
  source 1..20: mol_type = other DNA
tttctgcctgctttatatcc

SEQ ID NO: 19482 - DNA, 20 bp, synthetic construct
  misc_feature 1..20: note = chemically synthesized
  source 1..20: mol_type = other DNA
gctttatatcctggctgtgc

SEQ ID NO: 19483 - DNA, 20 bp, synthetic construct
  misc_feature 1..20: note = chemically synthesized
  source 1..20: mol_type = other DNA
tggctgtgctggcaactgat

SEQ ID NO: 19484 - DNA, 20 bp, synthetic construct
  misc_feature 1..20: note = chemically synthesized
  source 1..20: mol_type = other DNA
tgtgctggcaactgattaga

SEQ ID NO: 19485 - DNA, 20 bp, synthetic construct
  misc_feature 1..20: note = chemically synthesized
  source 1..20: mol_type = other DNA
ctgattagatggtgcccacc

SEQ ID NO: 19486 - DNA, 20 bp, synthetic construct
  misc_feature 1..20: note = chemically synthesized
  source 1..20: mol_type = other DNA
agatggtgcccacccagatt

SEQ ID NO: 19487 - DNA, 20 bp, synthetic construct
  misc_feature 1..20: note = chemically synthesized
  source 1..20: mol_type = other DNA
gatggtgcccacccagatta

SEQ ID NO: 19488 - DNA, 20 bp, synthetic construct
  misc_feature 1..20: note = chemically synthesized
  source 1..20: mol_type = other DNA
atggtgcccacccagattaa

SEQ ID NO: 19489 - DNA, 20 bp, synthetic construct
  misc_feature 1..20: note = chemically synthesized
  source 1..20: mol_type = other DNA
gtgcccacccagattaaggg

SEQ ID NO: 19490 - DNA, 20 bp, synthetic construct
  misc_feature 1..20: note = chemically synthesized
  source 1..20: mol_type = other DNA
tgcccacccagattaagggt

SEQ ID NO: 19491 - DNA, 20 bp, synthetic construct
  misc_feature 1..20: note = chemically synthesized
  source 1..20: mol_type = other DNA
aagggtgggtctgccttccc

SEQ ID NO: 19492 - DNA, 20 bp, synthetic construct
  misc_feature 1..20: note = chemically synthesized
  source 1..20: mol_type = other DNA
actgaaatattaatctcctt

SEQ ID NO: 19493 - DNA, 20 bp, synthetic construct
  misc_feature 1..20: note = chemically synthesized
  source 1..20: mol_type = other DNA
ctcctttggtaacaccctca

SEQ ID NO: 19494 - DNA, 20 bp, synthetic construct
  misc_feature 1..20: note = chemically synthesized
  source 1..20: mol_type = other DNA
acaccctcacagacacaccc

SEQ ID NO: 19495 - DNA, 20 bp, synthetic construct
  misc_feature 1..20: note = chemically synthesized
  source 1..20: mol_type = other DNA
gatcattactttgcatcctt

SEQ ID NO: 19496 - DNA, 20 bp, synthetic construct
  misc_feature 1..20: note = chemically synthesized
  source 1..20: mol_type = other DNA
ttgcatccttcagtccaatc

SEQ ID NO: 19497 - DNA, 20 bp, synthetic construct
  misc_feature 1..20: note = chemically synthesized
  source 1..20: mol_type = other DNA
agtccaatcaagttgacact

SEQ ID NO: 19498 - DNA, 20 bp, synthetic construct
  misc_feature 1..20: note = chemically synthesized
  source 1..20: mol_type = other DNA
acactcagtattaaccatca

SEQ ID NO: 19499 - DNA, 20 bp, synthetic construct
  misc_feature 1..20: note = chemically synthesized
  source 1..20: mol_type = other DNA
catcacagtcactttctaat

SEQ ID NO: 19500 - DNA, 20 bp, synthetic construct
  misc_feature 1..20: note = chemically synthesized
  source 1..20: mol_type = other DNA
atcacagtcactttctaatg

SEQ ID NO: 19501 - DNA, 20 bp, synthetic construct
  misc_feature 1..20: note = chemically synthesized
  source 1..20: mol_type = other DNA
cagtcactttctaatgaggt

SEQ ID NO: 19502 - DNA, 20 bp, synthetic construct
  misc_feature 1..20: note = chemically synthesized
  source 1..20: mol_type = other DNA
aggttggtttttttgttgtt

SEQ ID NO: 19503 - DNA, 20 bp, synthetic construct
  misc_feature 1..20: note = chemically synthesized
  source 1..20: mol_type = other DNA
ttttgttgttgagttccttg

SEQ ID NO: 19504 - DNA, 20 bp, synthetic construct
  misc_feature 1..20: note = chemically synthesized
  source 1..20: mol_type = other DNA
tccttgtagattctgtatat

SEQ ID NO: 19505 - DNA, 20 bp, synthetic construct
  misc_feature 1..20: note = chemically synthesized
  source 1..20: mol_type = other DNA
ttagccttttgttgcattca

SEQ ID NO: 19506 - DNA, 20 bp, synthetic construct
  misc_feature 1..20: note = chemically synthesized
  source 1..20: mol_type = other DNA
aatttttttttctcattctg

SEQ ID NO: 19507 - DNA, 20 bp, synthetic construct
  misc_feature 1..20: note = chemically synthesized
  source 1..20: mol_type = other DNA
atttttttttctcattctgt

SEQ ID NO: 19508 - DNA, 20 bp, synthetic construct
  misc_feature 1..20: note = chemically synthesized
  source 1..20: mol_type = other DNA
atccgtttactctgttgatt

SEQ ID NO: 19509 - DNA, 20 bp, synthetic construct
  misc_feature 1..20: note = chemically synthesized
  source 1..20: mol_type = other DNA
tctgttgattcggtcttttg

SEQ ID NO: 19510 - DNA, 20 bp, synthetic construct
  misc_feature 1..20: note = chemically synthesized
  source 1..20: mol_type = other DNA
tgattcggtcttttgcggtg

SEQ ID NO: 19511 - DNA, 20 bp, synthetic construct
  misc_feature 1..20: note = chemically synthesized
  source 1..20: mol_type = other DNA
ttcggtcttttgcggtgcag

SEQ ID NO: 19512 - DNA, 20 bp, synthetic construct
  misc_feature 1..20: note = chemically synthesized
  source 1..20: mol_type = other DNA
tttgcggtgcagaagcattt

SEQ ID NO: 19513 - DNA, 20 bp, synthetic construct
  misc_feature 1..20: note = chemically synthesized
  source 1..20: mol_type = other DNA
agaagcattttagtttaatt

SEQ ID NO: 19514 - DNA, 20 bp, synthetic construct
  misc_feature 1..20: note = chemically synthesized
  source 1..20: mol_type = other DNA
gtttttgtttttgttgtgtt

SEQ ID NO: 19515 - DNA, 20 bp, synthetic construct
  misc_feature 1..20: note = chemically synthesized
  source 1..20: mol_type = other DNA
tttttgttgtgtttagtttt

SEQ ID NO: 19516 - DNA, 20 bp, synthetic construct
  misc_feature 1..20: note = chemically synthesized
  source 1..20: mol_type = other DNA
ttttgttgtgtttagttttg

SEQ ID NO: 19517 - DNA, 20 bp, synthetic construct
  misc_feature 1..20: note = chemically synthesized
  source 1..20: mol_type = other DNA
tgtgtttagttttgaggact

SEQ ID NO: 19518 - DNA, 20 bp, synthetic construct
  misc_feature 1..20: note = chemically synthesized
  source 1..20: mol_type = other DNA
ttggtcataaattctttgcc

SEQ ID NO: 19519 - DNA, 20 bp, synthetic construct
  misc_feature 1..20: note = chemically synthesized
  source 1..20: mol_type = other DNA
tggtcataaattctttgcct

SEQ ID NO: 19520 - DNA, 20 bp, synthetic construct
  misc_feature 1..20: note = chemically synthesized
  source 1..20: mol_type = other DNA
tctaatttttaatcctcttt

SEQ ID NO: 19521 - DNA, 20 bp, synthetic construct
  misc_feature 1..20: note = chemically synthesized
  source 1..20: mol_type = other DNA
taatttttaatcctctttta

SEQ ID NO: 19522 - DNA, 20 bp, synthetic construct
  misc_feature 1..20: note = chemically synthesized
  source 1..20: mol_type = other DNA
tttacccccatttgacacat

SEQ ID NO: 19523 - DNA, 20 bp, synthetic construct
  misc_feature 1..20: note = chemically synthesized
  source 1..20: mol_type = other DNA
atttgacacatgagctaatt

SEQ ID NO: 19524 - DNA, 20 bp, synthetic construct
  misc_feature 1..20: note = chemically synthesized
  source 1..20: mol_type = other DNA
aattgagccttctgtctgtt

SEQ ID NO: 19525 - DNA, 20 bp, synthetic construct
  misc_feature 1..20: note = chemically synthesized
  source 1..20: mol_type = other DNA
gagccttctgtctgttaagt

SEQ ID NO: 19526 - DNA, 20 bp, synthetic construct
  misc_feature 1..20: note = chemically synthesized
  source 1..20: mol_type = other DNA
tgtctgttaagtaagttgac

SEQ ID NO: 19527 - DNA, 20 bp, synthetic construct
  misc_feature 1..20: note = chemically synthesized
  source 1..20: mol_type = other DNA
gttaagtaagttgactagtt

SEQ ID NO: 19528 - DNA, 20 bp, synthetic construct
  misc_feature 1..20: note = chemically synthesized
  source 1..20: mol_type = other DNA
taagttgactagttcagtgt

SEQ ID NO: 19529 - DNA, 20 bp, synthetic construct
  misc_feature 1..20: note = chemically synthesized
  source 1..20: mol_type = other DNA
tttttgccatcataatgctt

SEQ ID NO: 19530 - DNA, 20 bp, synthetic construct
  misc_feature 1..20: note = chemically synthesized
  source 1..20: mol_type = other DNA
tactctccttaattttcccc

SEQ ID NO: 19531 - DNA, 20 bp, synthetic construct
  misc_feature 1..20: note = chemically synthesized
  source 1..20: mol_type = other DNA
actctccttaattttccccc

SEQ ID NO: 19532 - DNA, 20 bp, synthetic construct
  misc_feature 1..20: note = chemically synthesized
  source 1..20: mol_type = other DNA
tccttaattttcccccagga

SEQ ID NO: 19533 - DNA, 20 bp, synthetic construct
  misc_feature 1..20: note = chemically synthesized
  source 1..20: mol_type = other DNA
tttcccccaggatggttttc

SEQ ID NO: 19534 - DNA, 20 bp, synthetic construct
  misc_feature 1..20: note = chemically synthesized
  source 1..20: mol_type = other DNA
ccaggatggttttctagatg

SEQ ID NO: 19535 - DNA, 20 bp, synthetic construct
  misc_feature 1..20: note = chemically synthesized
  source 1..20: mol_type = other DNA
ttttctagatgtggacttgc

SEQ ID NO: 19536 - DNA, 20 bp, synthetic construct
  misc_feature 1..20: note = chemically synthesized
  source 1..20: mol_type = other DNA
atgtggacttgctggatcca

SEQ ID NO: 19537 - DNA, 20 bp, synthetic construct
  misc_feature 1..20: note = chemically synthesized
  source 1..20: mol_type = other DNA
ccaaatgtatccatatattg

SEQ ID NO: 19538 - DNA, 20 bp, synthetic construct
  misc_feature 1..20: note = chemically synthesized
  source 1..20: mol_type = other DNA
attgtggctttgtgttttaa

SEQ ID NO: 19539 - DNA, 20 bp, synthetic construct
  misc_feature 1..20: note = chemically synthesized
  source 1..20: mol_type = other DNA
tgtggctttgtgttttaata

SEQ ID NO: 19540 - DNA, 20 bp, synthetic construct
  misc_feature 1..20: note = chemically synthesized
  source 1..20: mol_type = other DNA
gtggctttgtgttttaatag

SEQ ID NO: 19541 - DNA, 20 bp, synthetic construct
  misc_feature 1..20: note = chemically synthesized
  source 1..20: mol_type = other DNA
gctttgtgttttaatagagg

SEQ ID NO: 19542 - DNA, 20 bp, synthetic construct
  misc_feature 1..20: note = chemically synthesized
  source 1..20: mol_type = other DNA
ttgtgttttaatagaggtag

SEQ ID NO: 19543 - DNA, 20 bp, synthetic construct
  misc_feature 1..20: note = chemically synthesized
  source 1..20: mol_type = other DNA
aatagaggtagcagcaatat

SEQ ID NO: 19544 - DNA, 20 bp, synthetic construct
  misc_feature 1..20: note = chemically synthesized
  source 1..20: mol_type = other DNA
tagaggtagcagcaatatta

SEQ ID NO: 19545 - DNA, 20 bp, synthetic construct
  misc_feature 1..20: note = chemically synthesized
  source 1..20: mol_type = other DNA
agaggtagcagcaatattag

SEQ ID NO: 19546 - DNA, 20 bp, synthetic construct
  misc_feature 1..20: note = chemically synthesized
  source 1..20: mol_type = other DNA
aggtagcagcaatattagag

SEQ ID NO: 19547 - DNA, 20 bp, synthetic construct
  misc_feature 1..20: note = chemically synthesized
  source 1..20: mol_type = other DNA
gtagcagcaatattagagga

SEQ ID NO: 19548 - DNA, 20 bp, synthetic construct
  misc_feature 1..20: note = chemically synthesized
  source 1..20: mol_type = other DNA
caatattagaggagagaatt

SEQ ID NO: 19549 - DNA, 20 bp, synthetic construct
  misc_feature 1..20: note = chemically synthesized
  source 1..20: mol_type = other DNA
aatattagaggagagaatta

SEQ ID NO: 19550 - DNA, 20 bp, synthetic construct
  misc_feature 1..20: note = chemically synthesized
  source 1..20: mol_type = other DNA
agagaattaaggaacgattc

SEQ ID NO: 19551 - DNA, 20 bp, synthetic construct
  misc_feature 1..20: note = chemically synthesized
  source 1..20: mol_type = other DNA
attaaggaacgattctagtg

SEQ ID NO: 19552 - DNA, 20 bp, synthetic construct
  misc_feature 1..20: note = chemically synthesized
  source 1..20: mol_type = other DNA
aaggaacgattctagtgtag

SEQ ID NO: 19553 - DNA, 20 bp, synthetic construct
  misc_feature 1..20: note = chemically synthesized
  source 1..20: mol_type = other DNA
aggaacgattctagtgtagc

SEQ ID NO: 19554 - DNA, 20 bp, synthetic construct
  misc_feature 1..20: note = chemically synthesized
  source 1..20: mol_type = other DNA
cgattctagtgtagcaggac

SEQ ID NO: 19555 - DNA, 20 bp, synthetic construct
  misc_feature 1..20: note = chemically synthesized
  source 1..20: mol_type = other DNA
aagctgcatacaaaacccct

SEQ ID NO: 19556 - DNA, 20 bp, synthetic construct
  misc_feature 1..20: note = chemically synthesized
  source 1..20: mol_type = other DNA
tacaaaacccctcagacacc

SEQ ID NO: 19557 - DNA, 20 bp, synthetic construct
  misc_feature 1..20: note = chemically synthesized
  source 1..20: mol_type = other DNA
acccctcagacaccgagtta

SEQ ID NO: 19558 - DNA, 20 bp, synthetic construct
  misc_feature 1..20: note = chemically synthesized
  source 1..20: mol_type = other DNA
cctcagacaccgagttaaag

SEQ ID NO: 19559 - DNA, 20 bp, synthetic construct
  misc_feature 1..20: note = chemically synthesized
  source 1..20: mol_type = other DNA
ctcagacaccgagttaaaga

SEQ ID NO: 19560 - DNA, 20 bp, synthetic construct
  misc_feature 1..20: note = chemically synthesized
  source 1..20: mol_type = other DNA
agacaccgagttaaagaagg

SEQ ID NO: 19561 - DNA, 20 bp, synthetic construct
  misc_feature 1..20: note = chemically synthesized
  source 1..20: mol_type = other DNA
gacaccgagttaaagaagga

SEQ ID NO: 19562 - DNA, 20 bp, synthetic construct
  misc_feature 1..20: note = chemically synthesized
  source 1..20: mol_type = other DNA
acaccgagttaaagaaggaa

SEQ ID NO: 19563 - DNA, 20 bp, synthetic construct
  misc_feature 1..20: note = chemically synthesized
  source 1..20: mol_type = other DNA
aaagaaggaagggctttatt

SEQ ID NO: 19564 - DNA, 20 bp, synthetic construct
  misc_feature 1..20: note = chemically synthesized
  source 1..20: mol_type = other DNA
aaggaagggctttattcggc

SEQ ID NO: 19565 - DNA, 20 bp, synthetic construct
  misc_feature 1..20: note = chemically synthesized
  source 1..20: mol_type = other DNA
aggaagggctttattcggct

SEQ ID NO: 19566 - DNA, 20 bp, synthetic construct
  misc_feature 1..20: note = chemically synthesized
  source 1..20: mol_type = other DNA
gaagggctttattcggctgg

SEQ ID NO: 19567 - DNA, 20 bp, synthetic construct
  misc_feature 1..20: note = chemically synthesized
  source 1..20: mol_type = other DNA
gctttattcggctgggagct

SEQ ID NO: 19568 - DNA, 20 bp, synthetic construct
  misc_feature 1..20: note = chemically synthesized
  source 1..20: mol_type = other DNA
ctttattcggctgggagctt

SEQ ID NO: 19569 - DNA, 20 bp, synthetic construct
  misc_feature 1..20: note = chemically synthesized
  source 1..20: mol_type = other DNA
attcggctgggagcttgggc

SEQ ID NO: 19570 - DNA, 20 bp, synthetic construct
  misc_feature 1..20: note = chemically synthesized
  source 1..20: mol_type = other DNA
gactcacatctccaacaacc

SEQ ID NO: 19571 - DNA, 20 bp, synthetic construct
  misc_feature 1..20: note = chemically synthesized
  source 1..20: mol_type = other DNA
atctccaacaaccaagctct

SEQ ID NO: 19572 - DNA, 20 bp, synthetic construct
  misc_feature 1..20: note = chemically synthesized
  source 1..20: mol_type = other DNA
ctccaacaaccaagctctca

SEQ ID NO: 19573 - DNA, 20 bp, synthetic construct
  misc_feature 1..20: note = chemically synthesized
  source 1..20: mol_type = other DNA
aacaaccaagctctcagagt

SEQ ID NO: 19574 - DNA, 20 bp, synthetic construct
  misc_feature 1..20: note = chemically synthesized
  source 1..20: mol_type = other DNA
gagcaattcctgtccctttt

SEQ ID NO: 19575 - DNA, 20 bp, synthetic construct
  misc_feature 1..20: note = chemically synthesized
  source 1..20: mol_type = other DNA
agcaattcctgtccctttta

SEQ ID NO: 19576 - DNA, 20 bp, synthetic construct
  misc_feature 1..20: note = chemically synthesized
  source 1..20: mol_type = other DNA
gcaattcctgtcccttttaa

SEQ ID NO: 19577 - DNA, 20 bp, synthetic construct
  misc_feature 1..20: note = chemically synthesized
  source 1..20: mol_type = other DNA
ttttaagggcttacaactct

SEQ ID NO: 19578 - DNA, 20 bp, synthetic construct
  misc_feature 1..20: note = chemically synthesized
  source 1..20: mol_type = other DNA
tttaagggcttacaactcta

SEQ ID NO: 19579 - DNA, 20 bp, synthetic construct
  misc_feature 1..20: note = chemically synthesized
  source 1..20: mol_type = other DNA
ttaagggcttacaactctaa

SEQ ID NO: 19580 - DNA, 20 bp, synthetic construct
  misc_feature 1..20: note = chemically synthesized
  source 1..20: mol_type = other DNA
taagggcttacaactctaag

SEQ ID NO: 19581 - DNA, 20 bp, synthetic construct
  misc_feature 1..20: note = chemically synthesized
  source 1..20: mol_type = other DNA
aagggcttacaactctaagg

SEQ ID NO: 19582 - DNA, 20 bp, synthetic construct
  misc_feature 1..20: note = chemically synthesized
  source 1..20: mol_type = other DNA
actctaagggggtacatgac

SEQ ID NO: 19583 - DNA, 20 bp, synthetic construct
  misc_feature 1..20: note = chemically synthesized
  source 1..20: mol_type = other DNA
ctctaagggggtacatgact

SEQ ID NO: 19584 - DNA, 20 bp, synthetic construct
  misc_feature 1..20: note = chemically synthesized
  source 1..20: mol_type = other DNA
tctaagggggtacatgactg

SEQ ID NO: 19585 - DNA, 20 bp, synthetic construct
  misc_feature 1..20: note = chemically synthesized
  source 1..20: mol_type = other DNA
ctaagggggtacatgactgg

SEQ ID NO: 19586 - DNA, 20 bp, synthetic construct
  misc_feature 1..20: note = chemically synthesized
  source 1..20: mol_type = other DNA
tgactgggggctgcatgcac

SEQ ID NO: 19587 - DNA, 20 bp, synthetic construct
  misc_feature 1..20: note = chemically synthesized
  source 1..20: mol_type = other DNA
gggctgcatgcactggtcat

SEQ ID NO: 19588 - DNA, 20 bp, synthetic construct
  misc_feature 1..20: note = chemically synthesized
  source 1..20: mol_type = other DNA
gcatgcactggtcatcagaa

SEQ ID NO: 19589 - DNA, 20 bp, synthetic construct
  misc_feature 1..20: note = chemically synthesized
  source 1..20: mol_type = other DNA
cactggtcatcagaatggaa

SEQ ID NO: 19590 - DNA, 20 bp, synthetic construct
  misc_feature 1..20: note = chemically synthesized
  source 1..20: mol_type = other DNA
gtcatcagaatggaacagaa

SEQ ID NO: 19591 - DNA, 20 bp, synthetic construct
  misc_feature 1..20: note = chemically synthesized
  source 1..20: mol_type = other DNA
tcatcagaatggaacagaac

SEQ ID NO: 19592 - DNA, 20 bp, synthetic construct
  misc_feature 1..20: note = chemically synthesized
  source 1..20: mol_type = other DNA
cagaatggaacagaacagga

SEQ ID NO: 19593 - DNA, 20 bp, synthetic construct
  misc_feature 1..20: note = chemically synthesized
  source 1..20: mol_type = other DNA
agaatggaacagaacaggac

SEQ ID NO: 19594 - DNA, 20 bp, synthetic construct
  misc_feature 1..20: note = chemically synthesized
  source 1..20: mol_type = other DNA
gaatggaacagaacaggaca

SEQ ID NO: 19595 - DNA, 20 bp, synthetic construct
  misc_feature 1..20: note = chemically synthesized
  source 1..20: mol_type = other DNA
tttcacactgcttttccata

SEQ ID NO: 19596 - DNA, 20 bp, synthetic construct
  misc_feature 1..20: note = chemically synthesized
  source 1..20: mol_type = other DNA
ctgcttttccatacagtgtc

SEQ ID NO: 19597 - DNA, 20 bp, synthetic construct
  misc_feature 1..20: note = chemically synthesized
  source 1..20: mol_type = other DNA
catacagtgtctggaatcta

SEQ ID NO: 19598 - DNA, 20 bp, synthetic construct
  misc_feature 1..20: note = chemically synthesized
  source 1..20: mol_type = other DNA
gaatctatagataacataac

SEQ ID NO: 19599 - DNA, 20 bp, synthetic construct
  misc_feature 1..20: note = chemically synthesized
  source 1..20: mol_type = other DNA
ctatagataacataactggc

SEQ ID NO: 19600 - DNA, 20 bp, synthetic construct
  misc_feature 1..20: note = chemically synthesized
  source 1..20: mol_type = other DNA
tatagataacataactggcc

SEQ ID NO: 19601 - DNA, 20 bp, synthetic construct
  misc_feature 1..20: note = chemically synthesized
  source 1..20: mol_type = other DNA
gataacataactggccaggt

SEQ ID NO: 19602 - DNA, 20 bp, synthetic construct
  misc_feature 1..20: note = chemically synthesized
  source 1..20: mol_type = other DNA
ataacataactggccaggtc

SEQ ID NO: 19603 - DNA, 20 bp, synthetic construct
  misc_feature 1..20: note = chemically synthesized
  source 1..20: mol_type = other DNA
taacataactggccaggtca

SEQ ID NO: 19604 - DNA, 20 bp, synthetic construct
  misc_feature 1..20: note = chemically synthesized
  source 1..20: mol_type = other DNA
aacataactggccaggtcag

SEQ ID NO: 19605 - DNA, 20 bp, synthetic construct
  misc_feature 1..20: note = chemically synthesized
  source 1..20: mol_type = other DNA
gtcaggggtctatctttaac

SEQ ID NO: 19606 - DNA, 20 bp, synthetic construct
  misc_feature 1..20: note = chemically synthesized
  source 1..20: mol_type = other DNA
tcaggggtctatctttaacc

SEQ ID NO: 19607 - DNA, 20 bp, synthetic construct
  misc_feature 1..20: note = chemically synthesized
  source 1..20: mol_type = other DNA
ggtctatctttaaccaggcc

SEQ ID NO: 19608 - DNA, 20 bp, synthetic construct
  misc_feature 1..20: note = chemically synthesized
  source 1..20: mol_type = other DNA
gtctatctttaaccaggccc

SEQ ID NO: 19609 - DNA, 20 bp, synthetic construct
  misc_feature 1..20: note = chemically synthesized
  source 1..20: mol_type = other DNA
ctttaaccaggcccaggatg

SEQ ID NO: 19610 - DNA, 20 bp, synthetic construct
  misc_feature 1..20: note = chemically synthesized
  source 1..20: mol_type = other DNA
ccaggcccaggatgtggtct

SEQ ID NO: 19611 - DNA, 20 bp, synthetic construct
  misc_feature 1..20: note = chemically synthesized
  source 1..20: mol_type = other DNA
caggcccaggatgtggtctc

SEQ ID NO: 19612 - DNA, 20 bp, synthetic construct
  misc_feature 1..20: note = chemically synthesized
  source 1..20: mol_type = other DNA
ggtctcaggctgtttgcctg

SEQ ID NO: 19613 - DNA, 20 bp, synthetic construct
  misc_feature 1..20: note = chemically synthesized
  source 1..20: mol_type = other DNA
tggatttcatttctgccttt

SEQ ID NO: 19614 - DNA, 20 bp, synthetic construct
  misc_feature 1..20: note = chemically synthesized
  source 1..20: mol_type = other DNA
gtttttacttcttctttctt

SEQ ID NO: 19615 - DNA, 20 bp, synthetic construct
  misc_feature 1..20: note = chemically synthesized
  source 1..20: mol_type = other DNA
ttttacttcttctttctttg

SEQ ID NO: 19616 - DNA, 20 bp, synthetic construct
  misc_feature 1..20: note = chemically synthesized
  source 1..20: mol_type = other DNA
tttacttcttctttctttgg

SEQ ID NO: 19617 - DNA, 20 bp, synthetic construct
  misc_feature 1..20: note = chemically synthesized
  source 1..20: mol_type = other DNA
acttcttctttctttggagg

SEQ ID NO: 19618 - DNA, 20 bp, synthetic construct
  misc_feature 1..20: note = chemically synthesized
  source 1..20: mol_type = other DNA
ctttctttggaggcagaaat

SEQ ID NO: 19619 - DNA, 20 bp, synthetic construct
  misc_feature 1..20: note = chemically synthesized
  source 1..20: mol_type = other DNA
tttctttggaggcagaaatt

SEQ ID NO: 19620 - DNA, 20 bp, synthetic construct
  misc_feature 1..20: note = chemically synthesized
  source 1..20: mol_type = other DNA
attgggcataaaacaatatg

SEQ ID NO: 19621 - DNA, 20 bp, synthetic construct
  misc_feature 1..20: note = chemically synthesized
  source 1..20: mol_type = other DNA
ttgggcataaaacaatatga

SEQ ID NO: 19622 - DNA, 20 bp, synthetic construct
  misc_feature 1..20: note = chemically synthesized
  source 1..20: mol_type = other DNA
tgggcataaaacaatatgaa

SEQ ID NO: 19623 - DNA, 20 bp, synthetic construct
  misc_feature 1..20: note = chemically synthesized
  source 1..20: mol_type = other DNA
gcataaaacaatatgaaggg

SEQ ID NO: 19624 - DNA, 20 bp, synthetic construct
  misc_feature 1..20: note = chemically synthesized
  source 1..20: mol_type = other DNA
agggtggtctcctcccttac

SEQ ID NO: 19625 - DNA, 20 bp, synthetic construct
  misc_feature 1..20: note = chemically synthesized
  source 1..20: mol_type = other DNA
gggtggtctcctcccttact

SEQ ID NO: 19626 - DNA, 20 bp, synthetic construct
  misc_feature 1..20: note = chemically synthesized
  source 1..20: mol_type = other DNA
tggtctcctcccttactagg

SEQ ID NO: 19627 - DNA, 20 bp, synthetic construct
  misc_feature 1..20: note = chemically synthesized
  source 1..20: mol_type = other DNA
gtctcctcccttactaggaa

SEQ ID NO: 19628 - DNA, 20 bp, synthetic construct
  misc_feature 1..20: note = chemically synthesized
  source 1..20: mol_type = other DNA
ctcctcccttactaggaaga

SEQ ID NO: 19629 - DNA, 20 bp, synthetic construct
  misc_feature 1..20: note = chemically synthesized
  source 1..20: mol_type = other DNA
ggaagagagaaataccatgt

SEQ ID NO: 19630 - DNA, 20 bp, synthetic construct
  misc_feature 1..20: note = chemically synthesized
  source 1..20: mol_type = other DNA
gaaatacgtatttgtgttat

SEQ ID NO: 19631 - DNA, 20 bp, synthetic construct
  misc_feature 1..20: note = chemically synthesized
  source 1..20: mol_type = other DNA
tgtgttattggatttgacat

SEQ ID NO: 19632 - DNA, 20 bp, synthetic construct
  misc_feature 1..20: note = chemically synthesized
  source 1..20: mol_type = other DNA
gtgttattggatttgacatc

SEQ ID NO: 19633 - DNA, 20 bp, synthetic construct
  misc_feature 1..20: note = chemically synthesized
  source 1..20: mol_type = other DNA
tgttattggatttgacatcg

SEQ ID NO: 19634 - DNA, 20 bp, synthetic construct
  misc_feature 1..20: note = chemically synthesized
  source 1..20: mol_type = other DNA
attggatttgacatcggggt

SEQ ID NO: 19635 - DNA, 20 bp, synthetic construct
  misc_feature 1..20: note = chemically synthesized
  source 1..20: mol_type = other DNA
tttgacatcggggttggacc

SEQ ID NO: 19636 - DNA, 20 bp, synthetic construct
  misc_feature 1..20: note = chemically synthesized
  source 1..20: mol_type = other DNA
catcttctatgaacatctat

SEQ ID NO: 19637 - DNA, 20 bp, synthetic construct
  misc_feature 1..20: note = chemically synthesized
  source 1..20: mol_type = other DNA
aagcacgttctccttatcaa

SEQ ID NO: 19638 - DNA, 20 bp, synthetic construct
  misc_feature 1..20: note = chemically synthesized
  source 1..20: mol_type = other DNA
agcacgttctccttatcaaa

SEQ ID NO: 19639 - DNA, 20 bp, synthetic construct
  misc_feature 1..20: note = chemically synthesized
  source 1..20: mol_type = other DNA
ttatcaaaaggtactttgct

SEQ ID NO: 19640 - DNA, 20 bp, synthetic construct
  misc_feature 1..20: note = chemically synthesized
  source 1..20: mol_type = other DNA
tactttgcttggtgctttaa

SEQ ID NO: 19641 - DNA, 20 bp, synthetic construct
  misc_feature 1..20: note = chemically synthesized
  source 1..20: mol_type = other DNA
ttaaaagataaatgactatg

SEQ ID NO: 19642 - DNA, 20 bp, synthetic construct
  misc_feature 1..20: note = chemically synthesized
  source 1..20: mol_type = other DNA
agataaatgactatgtagct

SEQ ID NO: 19643 - DNA, 20 bp, synthetic construct
  misc_feature 1..20: note = chemically synthesized
  source 1..20: mol_type = other DNA
gataaatgactatgtagctt

SEQ ID NO: 19644 - DNA, 20 bp, synthetic construct
  misc_feature 1..20: note = chemically synthesized
  source 1..20: mol_type = other DNA
taaatgactatgtagcttag

SEQ ID NO: 19645 - DNA, 20 bp, synthetic construct
  misc_feature 1..20: note = chemically synthesized
  source 1..20: mol_type = other DNA
ttcttcataattgaaaacca

SEQ ID NO: 19646 - DNA, 20 bp, synthetic construct
  misc_feature 1..20: note = chemically synthesized
  source 1..20: mol_type = other DNA
ttcataattgaaaaccacag

SEQ ID NO: 19647 - DNA, 20 bp, synthetic construct
  misc_feature 1..20: note = chemically synthesized
  source 1..20: mol_type = other DNA
gctgttatttgaacatacct

SEQ ID NO: 19648 - DNA, 20 bp, synthetic construct
  misc_feature 1..20: note = chemically synthesized
  source 1..20: mol_type = other DNA
gaacatacctgagccccttc

SEQ ID NO: 19649 - DNA, 20 bp, synthetic construct
  misc_feature 1..20: note = chemically synthesized
  source 1..20: mol_type = other DNA
gagccccttctggaccactg

SEQ ID NO: 19650 - DNA, 20 bp, synthetic construct
  misc_feature 1..20: note = chemically synthesized
  source 1..20: mol_type = other DNA
agccccttctggaccactgt

SEQ ID NO: 19651 - DNA, 20 bp, synthetic construct
  misc_feature 1..20: note = chemically synthesized
  source 1..20: mol_type = other DNA
ccccttctggaccactgtag

SEQ ID NO: 19652 - DNA, 20 bp, synthetic construct
  misc_feature 1..20: note = chemically synthesized
  source 1..20: mol_type = other DNA
cttctggaccactgtaggag

SEQ ID NO: 19653 - DNA, 20 bp, synthetic construct
  misc_feature 1..20: note = chemically synthesized
  source 1..20: mol_type = other DNA
ttctggaccactgtaggaga

SEQ ID NO: 19654 - DNA, 20 bp, synthetic construct
  misc_feature 1..20: note = chemically synthesized
  source 1..20: mol_type = other DNA
ctggaccactgtaggagaag

SEQ ID NO: 19655 - DNA, 20 bp, synthetic construct
  misc_feature 1..20: note = chemically synthesized
  source 1..20: mol_type = other DNA
tggaccactgtaggagaagg

SEQ ID NO: 19656 - DNA, 20 bp, synthetic construct
  misc_feature 1..20: note = chemically synthesized
  source 1..20: mol_type = other DNA
accactgtaggagaaggagg

SEQ ID NO: 19657 - DNA, 20 bp, synthetic construct
  misc_feature 1..20: note = chemically synthesized
  source 1..20: mol_type = other DNA
cactgtaggagaaggaggaa

SEQ ID NO: 19658 - DNA, 20 bp, synthetic construct
  misc_feature 1..20: note = chemically synthesized
  source 1..20: mol_type = other DNA
ctgtaggagaaggaggaaga

SEQ ID NO: 19659 - DNA, 20 bp, synthetic construct
  misc_feature 1..20: note = chemically synthesized
  source 1..20: mol_type = other DNA
tgtaggagaaggaggaagag

SEQ ID NO: 19660 - DNA, 20 bp, synthetic construct
  misc_feature 1..20: note = chemically synthesized
  source 1..20: mol_type = other DNA
agaaggaggaagagaggtga

SEQ ID NO: 19661 - DNA, 20 bp, synthetic construct
  misc_feature 1..20: note = chemically synthesized
  source 1..20: mol_type = other DNA
tgaaagtgatttctgctgct

SEQ ID NO: 19662 - DNA, 20 bp, synthetic construct
  misc_feature 1..20: note = chemically synthesized
  source 1..20: mol_type = other DNA
gaaagtgatttctgctgctg

SEQ ID NO: 19663 - DNA, 20 bp, synthetic construct
  misc_feature 1..20: note = chemically synthesized
  source 1..20: mol_type = other DNA
aaagtgatttctgctgctga

SEQ ID NO: 19664 - DNA, 20 bp, synthetic construct
  misc_feature 1..20: note = chemically synthesized
  source 1..20: mol_type = other DNA
gagggcatgtatgatgacaa

SEQ ID NO: 19665 - DNA, 20 bp, synthetic construct
  misc_feature 1..20: note = chemically synthesized
  source 1..20: mol_type = other DNA
agggcatgtatgatgacaat

SEQ ID NO: 19666 - DNA, 20 bp, synthetic construct
  misc_feature 1..20: note = chemically synthesized
  source 1..20: mol_type = other DNA
gtcctaactttgacactaca

SEQ ID NO: 19667 - DNA, 20 bp, synthetic construct
  misc_feature 1..20: note = chemically synthesized
  source 1..20: mol_type = other DNA
ctttgacactacaaagtgac

SEQ ID NO: 19668 - DNA, 20 bp, synthetic construct
  misc_feature 1..20: note = chemically synthesized
  source 1..20: mol_type = other DNA
ttgacactacaaagtgactg

SEQ ID NO: 19669 - DNA, 20 bp, synthetic construct
  misc_feature 1..20: note = chemically synthesized
  source 1..20: mol_type = other DNA
ctacaaagtgactggagctt

SEQ ID NO: 19670 - DNA, 20 bp, synthetic construct
  misc_feature 1..20: note = chemically synthesized
  source 1..20: mol_type = other DNA
tacaaagtgactggagcttt

SEQ ID NO: 19671 - DNA, 20 bp, synthetic construct
  misc_feature 1..20: note = chemically synthesized
  source 1..20: mol_type = other DNA
aagtgactggagctttaggc

SEQ ID NO: 19672 - DNA, 20 bp, synthetic construct
  misc_feature 1..20: note = chemically synthesized
  source 1..20: mol_type = other DNA
tgactggagctttaggcaag

SEQ ID NO: 19673 - DNA, 20 bp, synthetic construct
  misc_feature 1..20: note = chemically synthesized
  source 1..20: mol_type = other DNA
agttactccaattgtctttt

SEQ ID NO: 19674 - DNA, 20 bp, synthetic construct
  misc_feature 1..20: note = chemically synthesized
  source 1..20: mol_type = other DNA
ttttcagactctttcttttt

SEQ ID NO: 19675 - DNA, 20 bp, synthetic construct
  misc_feature 1..20: note = chemically synthesized
  source 1..20: mol_type = other DNA
tttcagactctttctttttg

SEQ ID NO: 19676 - DNA, 20 bp, synthetic construct
  misc_feature 1..20: note = chemically synthesized
  source 1..20: mol_type = other DNA
tgaggtatttgacctctttg

SEQ ID NO: 19677 - DNA, 20 bp, synthetic construct
  misc_feature 1..20: note = chemically synthesized
  source 1..20: mol_type = other DNA
atttgacctctttgcggcat

SEQ ID NO: 19678 - DNA, 20 bp, synthetic construct
  misc_feature 1..20: note = chemically synthesized
  source 1..20: mol_type = other DNA
gctgctatttcacatgcacc

SEQ ID NO: 19679 - DNA, 20 bp, synthetic construct
  misc_feature 1..20: note = chemically synthesized
  source 1..20: mol_type = other DNA
gctatttcacatgcacctag

SEQ ID NO: 19680 - DNA, 20 bp, synthetic construct
  misc_feature 1..20: note = chemically synthesized
  source 1..20: mol_type = other DNA
ctatttcacatgcacctaga

SEQ ID NO: 19681 - DNA, 20 bp, synthetic construct
  misc_feature 1..20: note = chemically synthesized
  source 1..20: mol_type = other DNA
tatttcacatgcacctagaa

SEQ ID NO: 19682 - DNA, 20 bp, synthetic construct
  misc_feature 1..20: note = chemically synthesized
  source 1..20: mol_type = other DNA
aagggactttaaaacatgca

SEQ ID NO: 19683 - DNA, 20 bp, synthetic construct
  misc_feature 1..20: note = chemically synthesized
  source 1..20: mol_type = other DNA
aacatgcacagaattgaaca

SEQ ID NO: 19684 - DNA, 20 bp, synthetic construct
  misc_feature 1..20: note = chemically synthesized
  source 1..20: mol_type = other DNA
atgcacagaattgaacaaag

SEQ ID NO: 19685 - DNA, 20 bp, synthetic construct
  misc_feature 1..20: note = chemically synthesized
  source 1..20: mol_type = other DNA
acaaagcagtaaccattcgt

SEQ ID NO: 19686 - DNA, 20 bp, synthetic construct
  misc_feature 1..20: note = chemically synthesized
  source 1..20: mol_type = other DNA
tcaaatactattatttttga

SEQ ID NO: 19687 - DNA, 20 bp, synthetic construct
  misc_feature 1..20: note = chemically synthesized
  source 1..20: mol_type = other DNA
caaatactattatttttgaa

SEQ ID NO: 19688 - DNA, 20 bp, synthetic construct
  misc_feature 1..20: note = chemically synthesized
  source 1..20: mol_type = other DNA
ttgaaaggtaaataaatcct

SEQ ID NO: 19689 - DNA, 20 bp, synthetic construct
  misc_feature 1..20: note = chemically synthesized
  source 1..20: mol_type = other DNA
tgaaaggtaaataaatcctt

SEQ ID NO: 19690 - DNA, 20 bp, synthetic construct
  misc_feature 1..20: note = chemically synthesized
  source 1..20: mol_type = other DNA
ggtaaataaatccttgggct

SEQ ID NO: 19691 - DNA, 20 bp, synthetic construct
  misc_feature 1..20: note = chemically synthesized
  source 1..20: mol_type = other DNA
aaataaatccttgggcttag

SEQ ID NO: 19692 - DNA, 20 bp, synthetic construct
  misc_feature 1..20: note = chemically synthesized
  source 1..20: mol_type = other DNA
attgctaacctgaatgataa

SEQ ID NO: 19693 - DNA, 20 bp, synthetic construct
  misc_feature 1..20: note = chemically synthesized
  source 1..20: mol_type = other DNA
agaaacttttttccttttaa

SEQ ID NO: 19694 - DNA, 20 bp, synthetic construct
  misc_feature 1..20: note = chemically synthesized
  source 1..20: mol_type = other DNA
acttttttccttttaacagt

SEQ ID NO: 19695 - DNA, 20 bp, synthetic construct
  misc_feature 1..20: note = chemically synthesized
  source 1..20: mol_type = other DNA
ttttttccttttaacagttg

SEQ ID NO: 19696 - DNA, 20 bp, synthetic construct
  misc_feature 1..20: note = chemically synthesized
  source 1..20: mol_type = other DNA
tttttccttttaacagttgg

SEQ ID NO: 19697 - DNA, 20 bp, synthetic construct
  misc_feature 1..20: note = chemically synthesized
  source 1..20: mol_type = other DNA
gaggcatctatactgtgatt

SEQ ID NO: 19698 - DNA, 20 bp, synthetic construct
  misc_feature 1..20: note = chemically synthesized
  source 1..20: mol_type = other DNA
tctatactgtgattcagaca

SEQ ID NO: 19699 - DNA, 20 bp, synthetic construct
  misc_feature 1..20: note = chemically synthesized
  source 1..20: mol_type = other DNA
ctatactgtgattcagacaa

SEQ ID NO: 19700 - DNA, 20 bp, synthetic construct
  misc_feature 1..20: note = chemically synthesized
  source 1..20: mol_type = other DNA
tcagacaaaggccaaaacaa

SEQ ID NO: 19701 - DNA, 20 bp, synthetic construct
  misc_feature 1..20: note = chemically synthesized
  source 1..20: mol_type = other DNA
gacaaaggccaaaacaacag

SEQ ID NO: 19702 - DNA, 20 bp, synthetic construct
  misc_feature 1..20: note = chemically synthesized
  source 1..20: mol_type = other DNA
ccaaaacaacagcagatgaa

SEQ ID NO: 19703 - DNA, 20 bp, synthetic construct
  misc_feature 1..20: note = chemically synthesized
  source 1..20: mol_type = other DNA
caaaacaacagcagatgaat

SEQ ID NO: 19704 - DNA, 20 bp, synthetic construct
  misc_feature 1..20: note = chemically synthesized
  source 1..20: mol_type = other DNA
aaaacaacagcagatgaatg

SEQ ID NO: 19705 - DNA, 20 bp, synthetic construct
  misc_feature 1..20: note = chemically synthesized
  source 1..20: mol_type = other DNA
aacaacagcagatgaatggg

SEQ ID NO: 19706 - DNA, 20 bp, synthetic construct
  misc_feature 1..20: note = chemically synthesized
  source 1..20: mol_type = other DNA
caacagcagatgaatgggga

SEQ ID NO: 19707 - DNA, 20 bp, synthetic construct
  misc_feature 1..20: note = chemically synthesized
  source 1..20: mol_type = other DNA
gggagagaactattttctga

SEQ ID NO: 19708 - DNA, 20 bp, synthetic construct
  misc_feature 1..20: note = chemically synthesized
  source 1..20: mol_type = other DNA
ggagagaactattttctgat

SEQ ID NO: 19709 - DNA, 20 bp, synthetic construct
  misc_feature 1..20: note = chemically synthesized
  source 1..20: mol_type = other DNA
ttctgataggtccatatttt

SEQ ID NO: 19710 - DNA, 20 bp, synthetic construct
  misc_feature 1..20: note = chemically synthesized
  source 1..20: mol_type = other DNA
catattttgagcataatatg

SEQ ID NO: 19711 - DNA, 20 bp, synthetic construct
  misc_feature 1..20: note = chemically synthesized
  source 1..20: mol_type = other DNA
ttgagcataatatgaagact

SEQ ID NO: 19712 - DNA, 20 bp, synthetic construct
  misc_feature 1..20: note = chemically synthesized
  source 1..20: mol_type = other DNA
tgagcataatatgaagactc

SEQ ID NO: 19713 - DNA, 20 bp, synthetic construct
  misc_feature 1..20: note = chemically synthesized
  source 1..20: mol_type = other DNA
gcataatatgaagactcagg

SEQ ID NO: 19714 - DNA, 20 bp, synthetic construct
  misc_feature 1..20: note = chemically synthesized
  source 1..20: mol_type = other DNA
atatgaagactcaggtggaa

SEQ ID NO: 19715 - DNA, 20 bp, synthetic construct
  misc_feature 1..20: note = chemically synthesized
  source 1..20: mol_type = other DNA
gaacctgtaaatgatgctgt

SEQ ID NO: 19716 - DNA, 20 bp, synthetic construct
  misc_feature 1..20: note = chemically synthesized
  source 1..20: mol_type = other DNA
cctgtaaatgatgctgtcag

SEQ ID NO: 19717 - DNA, 20 bp, synthetic construct
  misc_feature 1..20: note = chemically synthesized
  source 1..20: mol_type = other DNA
tgtaaatgatgctgtcagaa

SEQ ID NO: 19718 - DNA, 20 bp, synthetic construct
  misc_feature 1..20: note = chemically synthesized
  source 1..20: mol_type = other DNA
aaatgatgctgtcagaagag

SEQ ID NO: 19719 - DNA, 20 bp, synthetic construct
  misc_feature 1..20: note = chemically synthesized
  source 1..20: mol_type = other DNA
tgatgctgtcagaagagcag

SEQ ID NO: 19720 - DNA, 20 bp, synthetic construct
  misc_feature 1..20: note = chemically synthesized
  source 1..20: mol_type = other DNA
gagcagtggacgcaatgaat

SEQ ID NO: 19721 - DNA, 20 bp, synthetic construct
  misc_feature 1..20: note = chemically synthesized
  source 1..20: mol_type = other DNA
gtggacgcaatgaataagca

SEQ ID NO: 19722 - DNA, 20 bp, synthetic construct
  misc_feature 1..20: note = chemically synthesized
  source 1..20: mol_type = other DNA
caatgaataagcatggctgc

SEQ ID NO: 19723 - DNA, 20 bp, synthetic construct
  misc_feature 1..20: note = chemically synthesized
  source 1..20: mol_type = other DNA
acaggttcacactgttccac

SEQ ID NO: 19724 - DNA, 20 bp, synthetic construct
  misc_feature 1..20: note = chemically synthesized
  source 1..20: mol_type = other DNA
gctgttgttttggcctttgt

SEQ ID NO: 19725 - DNA, 20 bp, synthetic construct
  misc_feature 1..20: note = chemically synthesized
  source 1..20: mol_type = other DNA
gcaatttgtttaaagtaata

SEQ ID NO: 19726 - DNA, 20 bp, synthetic construct
  misc_feature 1..20: note = chemically synthesized
  source 1..20: mol_type = other DNA
taaagtaataagggatggaa

SEQ ID NO: 19727 - DNA, 20 bp, synthetic construct
  misc_feature 1..20: note = chemically synthesized
  source 1..20: mol_type = other DNA
cagatttttaaattagcatt

SEQ ID NO: 19728 - DNA, 20 bp, synthetic construct
  misc_feature 1..20: note = chemically synthesized
  source 1..20: mol_type = other DNA
atttaggatccactaagccc

SEQ ID NO: 19729 - DNA, 20 bp, synthetic construct
  misc_feature 1..20: note = chemically synthesized
  source 1..20: mol_type = other DNA
catattgttaagggacacca

SEQ ID NO: 19730 - DNA, 20 bp, synthetic construct
  misc_feature 1..20: note = chemically synthesized
  source 1..20: mol_type = other DNA
ggtcaaatacctcaaaaaga

SEQ ID NO: 19731 - DNA, 20 bp, synthetic construct
  misc_feature 1..20: note = chemically synthesized
  source 1..20: mol_type = other DNA
aaagagtctgaaaagacaat

SEQ ID NO: 19732 - DNA, 20 bp, synthetic construct
  misc_feature 1..20: note = chemically synthesized
  source 1..20: mol_type = other DNA
cccccagtcatgtaccccct

SEQ ID NO: 19733 - DNA, 20 bp, synthetic construct
  misc_feature 1..20: note = chemically synthesized
  source 1..20: mol_type = other DNA
tgtaagcccttaaaagggac

SEQ ID NO: 19734 - DNA, 20 bp, synthetic construct
  misc_feature 1..20: note = chemically synthesized
  source 1..20: mol_type = other DNA
agagcttggttgttggagat

SEQ ID NO: 19735 - DNA, 20 bp, synthetic construct
  misc_feature 1..20: note = chemically synthesized
  source 1..20: mol_type = other DNA
agtcttgcccaagctcccag

SEQ ID NO: 19736 - DNA, 20 bp, synthetic construct
  misc_feature 1..20: note = chemically synthesized
  source 1..20: mol_type = other DNA
cttctttaactcggtgtctg

SEQ ID NO: 19737 - DNA, 20 bp, synthetic construct
  misc_feature 1..20: note = chemically synthesized
  source 1..20: mol_type = other DNA
tgcagcttgtcctgctacac

SEQ ID NO: 19738 - DNA, 20 bp, synthetic construct
  misc_feature 1..20: note = chemically synthesized
  source 1..20: mol_type = other DNA
aaaacacaaagccacaatat

SEQ ID NO: 19739 - DNA, 20 bp, synthetic construct
  misc_feature 1..20: note = chemically synthesized
  source 1..20: mol_type = other DNA
atttggaaaatatgcacact

SEQ ID NO: 19740 - DNA, 20 bp, synthetic construct
  misc_feature 1..20: note = chemically synthesized
  source 1..20: mol_type = other DNA
catcctgggggaaaattaag

SEQ ID NO: 19741 - DNA, 20 bp, synthetic construct
  misc_feature 1..20: note = chemically synthesized
  source 1..20: mol_type = other DNA
aaaattaaggagagtatgaa

SEQ ID NO: 19742 - DNA, 20 bp, synthetic construct
  misc_feature 1..20: note = chemically synthesized
  source 1..20: mol_type = other DNA
aattagctcatgtgtcaaat

SEQ ID NO: 19743 - DNA, 20 bp, synthetic construct
  misc_feature 1..20: note = chemically synthesized
  source 1..20: mol_type = other DNA
gggaaagacaggctctaaaa

SEQ ID NO: 19744 - DNA, 20 bp, synthetic construct
  misc_feature 1..20: note = chemically synthesized
  source 1..20: mol_type = other DNA
aattagatgtggcctaggca

SEQ ID NO: 19745 - DNA, 20 bp, synthetic construct
  misc_feature 1..20: note = chemically synthesized
  source 1..20: mol_type = other DNA
tgcttctgcaccgcaaaaga

SEQ ID NO: 19746 - DNA, 20 bp, synthetic construct
  misc_feature 1..20: note = chemically synthesized
  source 1..20: mol_type = other DNA
accgcaaaagaccgaatcaa

SEQ ID NO: 19747 - DNA, 20 bp, synthetic construct
  misc_feature 1..20: note = chemically synthesized
  source 1..20: mol_type = other DNA
agaccgaatcaacagagtaa

SEQ ID NO: 19748 - DNA, 20 bp, synthetic construct
  misc_feature 1..20: note = chemically synthesized
  source 1..20: mol_type = other DNA
cagagtaaacggataaccta

SEQ ID NO: 19749 - DNA, 20 bp, synthetic construct
  misc_feature 1..20: note = chemically synthesized
  source 1..20: mol_type = other DNA
agaaaaaaaaattgcaaact

SEQ ID NO: 19750 - DNA, 20 bp, synthetic construct
  misc_feature 1..20: note = chemically synthesized
  source 1..20: mol_type = other DNA
tgcaacaaaaggctaatata

SEQ ID NO: 19751 - DNA, 20 bp, synthetic construct
  misc_feature 1..20: note = chemically synthesized
  source 1..20: mol_type = other DNA
agtgactgtgatggttaata

SEQ ID NO: 19752 - DNA, 20 bp, synthetic construct
  misc_feature 1..20: note = chemically synthesized
  source 1..20: mol_type = other DNA
gtgtcaacttgattggactg

SEQ ID NO: 19753 - DNA, 20 bp, synthetic construct
  misc_feature 1..20: note = chemically synthesized
  source 1..20: mol_type = other DNA
aaggatgcaaagtaatgatc

SEQ ID NO: 19754 - DNA, 20 bp, synthetic construct
  misc_feature 1..20: note = chemically synthesized
  source 1..20: mol_type = other DNA
atgatcttgggtgtgtctgt

SEQ ID NO: 19755 - DNA, 20 bp, synthetic construct
  misc_feature 1..20: note = chemically synthesized
  source 1..20: mol_type = other DNA
aaggcagacccacccttaat

SEQ ID NO: 19756 - DNA, 20 bp, synthetic construct
  misc_feature 1..20: note = chemically synthesized
  source 1..20: mol_type = other DNA
taatcagttgccagcacagc

SEQ ID NO: 19757 - DNA, 20 bp, synthetic construct
  misc_feature 1..20: note = chemically synthesized
  source 1..20: mol_type = other DNA
gcctacatttttctcccatg

SEQ ID NO: 19758 - DNA, 20 bp, synthetic construct
  misc_feature 1..20: note = chemically synthesized
  source 1..20: mol_type = other DNA
ttttgggaccttgtgaacat

SEQ ID NO: 19759 - DNA, 20 bp, synthetic construct
  misc_feature 1..20: note = chemically synthesized
  source 1..20: mol_type = other DNA
ctaatacagattttggtacc

SEQ ID NO: 19760 - DNA, 20 bp, synthetic construct
  misc_feature 1..20: note = chemically synthesized
  source 1..20: mol_type = other DNA
caggagtggttctagaggaa

SEQ ID NO: 19761 - DNA, 20 bp, synthetic construct
  misc_feature 1..20: note = chemically synthesized
  source 1..20: mol_type = other DNA
ttctagaggaacagaatatt

SEQ ID NO: 19762 - DNA, 20 bp, synthetic construct
  misc_feature 1..20: note = chemically synthesized
  source 1..20: mol_type = other DNA
gaggaacagaatattaagga

SEQ ID NO: 19763 - DNA, 20 bp, synthetic construct
  misc_feature 1..20: note = chemically synthesized
  source 1..20: mol_type = other DNA
tggagttctttcattggttt

SEQ ID NO: 19764 - DNA, 20 bp, synthetic construct
  misc_feature 1..20: note = chemically synthesized
  source 1..20: mol_type = other DNA
ttcattggttttggggtttc

SEQ ID NO: 19765 - DNA, 20 bp, synthetic construct
  misc_feature 1..20: note = chemically synthesized
  source 1..20: mol_type = other DNA
tccttggcatcaattgttta

SEQ ID NO: 19766 - DNA, 20 bp, synthetic construct
  misc_feature 1..20: note = chemically synthesized
  source 1..20: mol_type = other DNA
ttcaacgcttgtgagaggca

SEQ ID NO: 19767 - DNA, 20 bp, synthetic construct
  misc_feature 1..20: note = chemically synthesized
  source 1..20: mol_type = other DNA
aatacttttgactatatgtg

SEQ ID NO: 19768 - DNA, 20 bp, synthetic construct
  misc_feature 1..20: note = chemically synthesized
  source 1..20: mol_type = other DNA
tgaaagaaaatgatgaactc

SEQ ID NO: 19769 - DNA, 20 bp, synthetic construct
  misc_feature 1..20: note = chemically synthesized
  source 1..20: mol_type = other DNA
agcaagaagtagcaaacaca

SEQ ID NO: 19770 - DNA, 20 bp, synthetic construct
  misc_feature 1..20: note = chemically synthesized
  source 1..20: mol_type = other DNA
gatgagacatttgtgggaca

SEQ ID NO: 19771 - DNA, 20 bp, synthetic construct
  misc_feature 1..20: note = chemically synthesized
  source 1..20: mol_type = other DNA
tctacctcagtaaaatttat

SEQ ID NO: 19772 - DNA, 20 bp, synthetic construct
  misc_feature 1..20: note = chemically synthesized
  source 1..20: mol_type = other DNA
gagatattccttctaaagtg

SEQ ID NO: 19773 - DNA, 20 bp, synthetic construct
  misc_feature 1..20: note = chemically synthesized
  source 1..20: mol_type = other DNA
acaacgcctagtgggcctat

SEQ ID NO: 19774 - DNA, 20 bp, synthetic construct
  misc_feature 1..20: note = chemically synthesized
  source 1..20: mol_type = other DNA
ggaggcaacatattcctgat

SEQ ID NO: 19775 - DNA, 20 bp, synthetic construct
  misc_feature 1..20: note = chemically synthesized
  source 1..20: mol_type = other DNA
gtgttactctggcccattta

SEQ ID NO: 19776 - DNA, 20 bp, synthetic construct
  misc_feature 1..20: note = chemically synthesized
  source 1..20: mol_type = other DNA
gatccaaaaggctgccagtt

SEQ ID NO: 19777 - DNA, 20 bp, synthetic construct
  misc_feature 1..20: note = chemically synthesized
  source 1..20: mol_type = other DNA
aaaaggctgccagttttgag

SEQ ID NO: 19778 - DNA, 20 bp, synthetic construct
  misc_feature 1..20: note = chemically synthesized
  source 1..20: mol_type = other DNA
ttgaggtgtcagtgccagat

SEQ ID NO: 19779 - DNA, 20 bp, synthetic construct
  misc_feature 1..20: note = chemically synthesized
  source 1..20: mol_type = other DNA
tgtttggagcatttggcagg

SEQ ID NO: 19780 - DNA, 20 bp, synthetic construct
  misc_feature 1..20: note = chemically synthesized
  source 1..20: mol_type = other DNA
tgaatcacagcggaggcctc

SEQ ID NO: 19781 - DNA, 20 bp, synthetic construct
  misc_feature 1..20: note = chemically synthesized
  source 1..20: mol_type = other DNA
tggaaacgaaatatttgact

SEQ ID NO: 19782 - DNA, 20 bp, synthetic construct
  misc_feature 1..20: note = chemically synthesized
  source 1..20: mol_type = other DNA
cctgaactgcctatcatgaa

SEQ ID NO: 19783 - DNA, 20 bp, synthetic construct
  misc_feature 1..20: note = chemically synthesized
  source 1..20: mol_type = other DNA
actgcaccgatggtctcatg

SEQ ID NO: 19784 - DNA, 20 bp, synthetic construct
  misc_feature 1..20: note = chemically synthesized
  source 1..20: mol_type = other DNA
gaaatttggggaagaggtat

SEQ ID NO: 19785 - DNA, 20 bp, synthetic construct
  misc_feature 1..20: note = chemically synthesized
  source 1..20: mol_type = other DNA
caaagatattttcatcccat

SEQ ID NO: 19786 - DNA, 20 bp, synthetic construct
  misc_feature 1..20: note = chemically synthesized
  source 1..20: mol_type = other DNA
tcccatgtgagtgctcacca

SEQ ID NO: 19787 - DNA, 20 bp, synthetic construct
  misc_feature 1..20: note = chemically synthesized
  source 1..20: mol_type = other DNA
aatgggtgacctcagcagaa

SEQ ID NO: 19788 - DNA, 20 bp, synthetic construct
  misc_feature 1..20: note = chemically synthesized
  source 1..20: mol_type = other DNA
aagaggattttaataatcaa

SEQ ID NO: 19789 - DNA, 20 bp, synthetic construct
  misc_feature 1..20: note = chemically synthesized
  source 1..20: mol_type = other DNA
gattttaataatcaagtgga

SEQ ID NO: 19790 - DNA, 20 bp, synthetic construct
  misc_feature 1..20: note = chemically synthesized
  source 1..20: mol_type = other DNA
aacaaagtggccacagttgc

SEQ ID NO: 19791 - DNA, 20 bp, synthetic construct
  misc_feature 1..20: note = chemically synthesized
  source 1..20: mol_type = other DNA
cttgatatggcaccattcct

SEQ ID NO: 19792 - DNA, 20 bp, synthetic construct
  misc_feature 1..20: note = chemically synthesized
  source 1..20: mol_type = other DNA
gggcagaggcttgtcctcac

SEQ ID NO: 19793 - DNA, 20 bp, synthetic construct
  misc_feature 1..20: note = chemically synthesized
  source 1..20: mol_type = other DNA
cactggaatagacacttact

SEQ ID NO: 19794 - DNA, 20 bp, synthetic construct
  misc_feature 1..20: note = chemically synthesized
  source 1..20: mol_type = other DNA
aatagacacttactctggat

SEQ ID NO: 19795 - DNA, 20 bp, synthetic construct
  misc_feature 1..20: note = chemically synthesized
  source 1..20: mol_type = other DNA
tatgccaagactaccatcca

SEQ ID NO: 19796 - DNA, 20 bp, synthetic construct
  misc_feature 1..20: note = chemically synthesized
  source 1..20: mol_type = other DNA
gactaccatccatggaatca

SEQ ID NO: 19797 - DNA, 20 bp, synthetic construct
  misc_feature 1..20: note = chemically synthesized
  source 1..20: mol_type = other DNA
tgacagtgggctcatgctca

SEQ ID NO: 19798 - DNA, 20 bp, synthetic construct
  misc_feature 1..20: note = chemically synthesized
  source 1..20: mol_type = other DNA
ctatcatcctgaagcagctt

SEQ ID NO: 19799 - DNA, 20 bp, synthetic construct
  misc_feature 1..20: note = chemically synthesized
  source 1..20: mol_type = other DNA
tccagaaggctgtgtatgct

SEQ ID NO: 19800 - DNA, 20 bp, synthetic construct
  misc_feature 1..20: note = chemically synthesized
  source 1..20: mol_type = other DNA
ggtactgtttctcccataga

SEQ ID NO: 19801 - DNA, 20 bp, synthetic construct
  misc_feature 1..20: note = chemically synthesized
  source 1..20: mol_type = other DNA
ttctcccatagacaggattc

SEQ ID NO: 19802 - DNA, 20 bp, synthetic construct
  misc_feature 1..20: note = chemically synthesized
  source 1..20: mol_type = other DNA
tagacaggattcacgggtcc

SEQ ID NO: 19803 - DNA, 20 bp, synthetic construct
  misc_feature 1..20: note = chemically synthesized
  source 1..20: mol_type = other DNA
attcacgggtccaggaatca

SEQ ID NO: 19804 - DNA, 20 bp, synthetic construct
  misc_feature 1..20: note = chemically synthesized
  source 1..20: mol_type = other DNA
ttaagtcaacaggctaagaa

SEQ ID NO: 19805 - DNA, 20 bp, synthetic construct
  misc_feature 1..20: note = chemically synthesized
  source 1..20: mol_type = other DNA
gaggtaaggaagcgtatgca

SEQ ID NO: 19806 - DNA, 20 bp, synthetic construct
  misc_feature 1..20: note = chemically synthesized
  source 1..20: mol_type = other DNA
atggaatataggagatccat

SEQ ID NO: 19807 - DNA, 20 bp, synthetic construct
  misc_feature 1..20: note = chemically synthesized
  source 1..20: mol_type = other DNA
ctcttagttttaccatgtcc

SEQ ID NO: 19808 - DNA, 20 bp, synthetic construct
  misc_feature 1..20: note = chemically synthesized
  source 1..20: mol_type = other DNA
gcaggactacaaataaaggt

SEQ ID NO: 19809 - DNA, 20 bp, synthetic construct
  misc_feature 1..20: note = chemically synthesized
  source 1..20: mol_type = other DNA
aggtgcttgctgagggcaaa

SEQ ID NO: 19810 - DNA, 20 bp, synthetic construct
  misc_feature 1..20: note = chemically synthesized
  source 1..20: mol_type = other DNA
tgctgagggcaaagggaata

SEQ ID NO: 19811 - DNA, 20 bp, synthetic construct
  misc_feature 1..20: note = chemically synthesized
  source 1..20: mol_type = other DNA
atacaaggactgtaattgtc

SEQ ID NO: 19812 - DNA, 20 bp, synthetic construct
  misc_feature 1..20: note = chemically synthesized
  source 1..20: mol_type = other DNA
tatgtaatagcatttgcaat

SEQ ID NO: 19813 - DNA, 20 bp, synthetic construct
  misc_feature 1..20: note = chemically synthesized
  source 1..20: mol_type = other DNA
ggtgcattttcaattgcacg

SEQ ID NO: 19814 - DNA, 20 bp, synthetic construct
  misc_feature 1..20: note = chemically synthesized
  source 1..20: mol_type = other DNA
gaagataatgtatgacctca

SEQ ID NO: 19815 - DNA, 20 bp, synthetic construct
  misc_feature 1..20: note = chemically synthesized
  source 1..20: mol_type = other DNA
tggacttgtgatggttaata

SEQ ID NO: 19816 - DNA, 20 bp, synthetic construct
  misc_feature 1..20: note = chemically synthesized
  source 1..20: mol_type = other DNA
aatactgagtgtcaacttga

SEQ ID NO: 19817 - DNA, 20 bp, synthetic construct
  misc_feature 1..20: note = chemically synthesized
  source 1..20: mol_type = other DNA
aagtgtgcaaagtattgatc

SEQ ID NO: 19818 - DNA, 20 bp, synthetic construct
  misc_feature 1..20: note = chemically synthesized
  source 1..20: mol_type = other DNA
ttgatcctgagtgtgtctgt

SEQ ID NO: 19819 - DNA, 20 bp, synthetic construct
  misc_feature 1..20: note = chemically synthesized
  source 1..20: mol_type = other DNA
aaggcagacccacccttaat

SEQ ID NO: 19820 - DNA, 20 bp, synthetic construct
  misc_feature 1..20: note = chemically synthesized
  source 1..20: mol_type = other DNA
taatcagttgccagtgtggc

SEQ ID NO: 19821 - DNA, 20 bp, synthetic construct
  misc_feature 1..20: note = chemically synthesized
  source 1..20: mol_type = other DNA
gcctacatctttctcccatg

SEQ ID NO: 19822 - DNA, 20 bp, synthetic construct
  misc_feature 1..20: note = chemically synthesized
  source 1..20: mol_type = other DNA
ttcaacatcactaataatca

SEQ ID NO: 19823 - DNA, 20 bp, synthetic construct
  misc_feature 1..20: note = chemically synthesized
  source 1..20: mol_type = other DNA
tgatacctccttatgccagt

SEQ ID NO: 19824 - DNA, 20 bp, synthetic construct
  misc_feature 1..20: note = chemically synthesized
  source 1..20: mol_type = other DNA
caaaaacagcagatgttggt

SEQ ID NO: 19825 - DNA, 20 bp, synthetic construct
  misc_feature 1..20: note = chemically synthesized
  source 1..20: mol_type = other DNA
aatgcttatacactgttggt

SEQ ID NO: 19826 - DNA, 20 bp, synthetic construct
  misc_feature 1..20: note = chemically synthesized
  source 1..20: mol_type = other DNA
tcaatcctgcaatcccacta

SEQ ID NO: 19827 - DNA, 20 bp, synthetic construct
  misc_feature 1..20: note = chemically synthesized
  source 1..20: mol_type = other DNA
tgttcccaatagcaaagata

SEQ ID NO: 19828 - DNA, 20 bp, synthetic construct
  misc_feature 1..20: note = chemically synthesized
  source 1..20: mol_type = other DNA
aaatgtctaccaatggacga

SEQ ID NO: 19829 - DNA, 20 bp, synthetic construct
  misc_feature 1..20: note = chemically synthesized
  source 1..20: mol_type = other DNA
tatattactcagccataaaa

SEQ ID NO: 19830 - DNA, 20 bp, synthetic construct
  misc_feature 1..20: note = chemically synthesized
  source 1..20: mol_type = other DNA
agccaagtgggagctaaacg

SEQ ID NO: 19831 - DNA, 20 bp, synthetic construct
  misc_feature 1..20: note = chemically synthesized
  source 1..20: mol_type = other DNA
gatgagtaagcatagacata

SEQ ID NO: 19832 - DNA, 20 bp, synthetic construct
  misc_feature 1..20: note = chemically synthesized
  source 1..20: mol_type = other DNA
ttgagactagagaaaggtgg

SEQ ID NO: 19833 - DNA, 20 bp, synthetic construct
  misc_feature 1..20: note = chemically synthesized
  source 1..20: mol_type = other DNA
ctagagaaaggtgggaggat

SEQ ID NO: 19834 - DNA, 20 bp, synthetic construct
  misc_feature 1..20: note = chemically synthesized
  source 1..20: mol_type = other DNA
atggtgaggactgaaaaact

SEQ ID NO: 19835 - DNA, 20 bp, synthetic construct
  misc_feature 1..20: note = chemically synthesized
  source 1..20: mol_type = other DNA
gaggactgaaaaactacgga

SEQ ID NO: 19836 - DNA, 20 bp, synthetic construct
  misc_feature 1..20: note = chemically synthesized
  source 1..20: mol_type = other DNA
gtccccacccaaatctcatc

SEQ ID NO: 19837 - DNA, 20 bp, synthetic construct
  misc_feature 1..20: note = chemically synthesized
  source 1..20: mol_type = other DNA
taatcctcacgtgttgtggg

SEQ ID NO: 19838 - DNA, 20 bp, synthetic construct
  misc_feature 1..20: note = chemically synthesized
  source 1..20: mol_type = other DNA
agggatttggagggaggtaa

SEQ ID NO: 19839 - DNA, 20 bp, synthetic construct
  misc_feature 1..20: note = chemically synthesized
  source 1..20: mol_type = other DNA
ctcatgctcttctcgtgata

SEQ ID NO: 19840 - DNA, 20 bp, synthetic construct
  misc_feature 1..20: note = chemically synthesized
  source 1..20: mol_type = other DNA
gcaagcaaaatatcacttaa

SEQ ID NO: 19841 - DNA, 20 bp, synthetic construct
  misc_feature 1..20: note = chemically synthesized
  source 1..20: mol_type = other DNA
tcacttaatggggtaattaa

SEQ ID NO: 19842 - DNA, 20 bp, synthetic construct
  misc_feature 1..20: note = chemically synthesized
  source 1..20: mol_type = other DNA
agggtgaagaaattgggcaa

SEQ ID NO: 19843 - DNA, 20 bp, synthetic construct
  misc_feature 1..20: note = chemically synthesized
  source 1..20: mol_type = other DNA
ggcaaatggatgtcatgagg

SEQ ID NO: 19844 - DNA, 20 bp, synthetic construct
  misc_feature 1..20: note = chemically synthesized
  source 1..20: mol_type = other DNA
tcagagcccaggccctaagc

SEQ ID NO: 19845 - DNA, 20 bp, synthetic construct
  misc_feature 1..20: note = chemically synthesized
  source 1..20: mol_type = other DNA
gcccaggccctaagctggag

SEQ ID NO: 19846 - DNA, 20 bp, synthetic construct
  misc_feature 1..20: note = chemically synthesized
  source 1..20: mol_type = other DNA
tggagtagagtgtgcaagga

SEQ ID NO: 19847 - DNA, 20 bp, synthetic construct
  misc_feature 1..20: note = chemically synthesized
  source 1..20: mol_type = other DNA
agtgtgcaaggaaagagtaa

SEQ ID NO: 19848 - DNA, 20 bp, synthetic construct
  misc_feature 1..20: note = chemically synthesized
  source 1..20: mol_type = other DNA
gaaagagtaataggattgaa

SEQ ID NO: 19849 - DNA, 20 bp, synthetic construct
  misc_feature 1..20: note = chemically synthesized
  source 1..20: mol_type = other DNA
ccaggtaggaggacataggg

SEQ ID NO: 19850 - DNA, 20 bp, synthetic construct
  misc_feature 1..20: note = chemically synthesized
  source 1..20: mol_type = other DNA
agacctccagtaaacttagg

SEQ ID NO: 19851 - DNA, 20 bp, synthetic construct
  misc_feature 1..20: note = chemically synthesized
  source 1..20: mol_type = other DNA
actaaataataatcacatgt

SEQ ID NO: 19852 - DNA, 20 bp, synthetic construct
  misc_feature 1..20: note = chemically synthesized
  source 1..20: mol_type = other DNA
ttgttcatgagctagagcaa

SEQ ID NO: 19853 - DNA, 20 bp, synthetic construct
  misc_feature 1..20: note = chemically synthesized
  source 1..20: mol_type = other DNA
atgctattatatggtaccaa

SEQ ID NO: 19854 - DNA, 20 bp, synthetic construct
  misc_feature 1..20: note = chemically synthesized
  source 1..20: mol_type = other DNA
aaaatgcaagcaattttcat

SEQ ID NO: 19855 - DNA, 20 bp, synthetic construct
  misc_feature 1..20: note = chemically synthesized
  source 1..20: mol_type = other DNA
tacacaagctaattgtcctt

SEQ ID NO: 19856 - DNA, 20 bp, synthetic construct
  misc_feature 1..20: note = chemically synthesized
  source 1..20: mol_type = other DNA
aagtttaaactgtcattgag

SEQ ID NO: 19857 - DNA, 20 bp, synthetic construct
  misc_feature 1..20: note = chemically synthesized
  source 1..20: mol_type = other DNA
cagatgttatgtgatgagga

SEQ ID NO: 19858 - DNA, 20 bp, synthetic construct
  misc_feature 1..20: note = chemically synthesized
  source 1..20: mol_type = other DNA
agaacttttctttaaagtgt

SEQ ID NO: 19859 - DNA, 20 bp, synthetic construct
  misc_feature 1..20: note = chemically synthesized
  source 1..20: mol_type = other DNA
acaaaaatgcaaaatttcca

SEQ ID NO: 19860 - DNA, 20 bp, synthetic construct
  misc_feature 1..20: note = chemically synthesized
  source 1..20: mol_type = other DNA
ttcatcttcatcttttccag

SEQ ID NO: 19861 - DNA, 20 bp, synthetic construct
  misc_feature 1..20: note = chemically synthesized
  source 1..20: mol_type = other DNA
gatagtcccccatatagcct

SEQ ID NO: 19862 - DNA, 20 bp, synthetic construct
  misc_feature 1..20: note = chemically synthesized
  source 1..20: mol_type = other DNA
gtagaaaatcccacataaga

SEQ ID NO: 19863 - DNA, 20 bp, synthetic construct
  misc_feature 1..20: note = chemically synthesized
  source 1..20: mol_type = other DNA
tcccacataagagagaattc

SEQ ID NO: 19864 - DNA, 20 bp, synthetic construct
  misc_feature 1..20: note = chemically synthesized
  source 1..20: mol_type = other DNA
agcaaggaagcctacccagt

SEQ ID NO: 19865 - DNA, 20 bp, synthetic construct
  misc_feature 1..20: note = chemically synthesized
  source 1..20: mol_type = other DNA
acatctgcattatggactcc

SEQ ID NO: 19866 - DNA, 20 bp, synthetic construct
  misc_feature 1..20: note = chemically synthesized
  source 1..20: mol_type = other DNA
tccaggaatcctagccacag

SEQ ID NO: 19867 - DNA, 20 bp, synthetic construct
  misc_feature 1..20: note = chemically synthesized
  source 1..20: mol_type = other DNA
ctccagagaaggagctctca

SEQ ID NO: 19868 - DNA, 20 bp, synthetic construct
  misc_feature 1..20: note = chemically synthesized
  source 1..20: mol_type = other DNA
ctgacatcccccacccacag

SEQ ID NO: 19869 - DNA, 20 bp, synthetic construct
  misc_feature 1..20: note = chemically synthesized
  source 1..20: mol_type = other DNA
tactgctggctgctgtcacc

SEQ ID NO: 19870 - DNA, 20 bp, synthetic construct
  misc_feature 1..20: note = chemically synthesized
  source 1..20: mol_type = other DNA
aggcattctgctgggggcct

SEQ ID NO: 19871 - DNA, 20 bp, synthetic construct
  misc_feature 1..20: note = chemically synthesized
  source 1..20: mol_type = other DNA
gccggtgtccacacacacca

SEQ ID NO: 19872 - DNA, 20 bp, synthetic construct
  misc_feature 1..20: note = chemically synthesized
  source 1..20: mol_type = other DNA
acctcctgcatgtgccacct

SEQ ID NO: 19873 - DNA, 20 bp, synthetic construct
  misc_feature 1..20: note = chemically synthesized
  source 1..20: mol_type = other DNA
tgcagactgcttgggagcca

SEQ ID NO: 19874 - DNA, 20 bp, synthetic construct
  misc_feature 1..20: note = chemically synthesized
  source 1..20: mol_type = other DNA
agcaaactgcctgaaggcca

SEQ ID NO: 19875 - DNA, 20 bp, synthetic construct
  misc_feature 1..20: note = chemically synthesized
  source 1..20: mol_type = other DNA
cagccatggggcccaaggac

SEQ ID NO: 19876 - DNA, 20 bp, synthetic construct
  misc_feature 1..20: note = chemically synthesized
  source 1..20: mol_type = other DNA
aagaaatatgacacttccaa

SEQ ID NO: 19877 - DNA, 20 bp, synthetic construct
  misc_feature 1..20: note = chemically synthesized
  source 1..20: mol_type = other DNA
atttataaaattctggaaaa

SEQ ID NO: 19878 - DNA, 20 bp, synthetic construct
  misc_feature 1..20: note = chemically synthesized
  source 1..20: mol_type = other DNA
aagaaatcagaaaaacaatt

SEQ ID NO: 19879 - DNA, 20 bp, synthetic construct
  misc_feature 1..20: note = chemically synthesized
  source 1..20: mol_type = other DNA
tcagaaaaacaattcaggat

SEQ ID NO: 19880 - DNA, 20 bp, synthetic construct
  misc_feature 1..20: note = chemically synthesized
  source 1..20: mol_type = other DNA
acccaagagatagatacaac

SEQ ID NO: 19881 - DNA, 20 bp, synthetic construct
  misc_feature 1..20: note = chemically synthesized
  source 1..20: mol_type = other DNA
aaacagaaattctgtaactg

SEQ ID NO: 19882 - DNA, 20 bp, synthetic construct
  misc_feature 1..20: note = chemically synthesized
  source 1..20: mol_type = other DNA
aatgatagaaaggaaaaaaa

SEQ ID NO: 19883 - DNA, 20 bp, synthetic construct
  misc_feature 1..20: note = chemically synthesized
  source 1..20: mol_type = other DNA
agtcaaactgtcaaaagcca

SEQ ID NO: 19884 - DNA, 20 bp, synthetic construct
  misc_feature 1..20: note = chemically synthesized
  source 1..20: mol_type = other DNA
cctcacaggccaggagaaga

SEQ ID NO: 19885 - DNA, 20 bp, synthetic construct
  misc_feature 1..20: note = chemically synthesized
  source 1..20: mol_type = other DNA
tgaaagaaaaaaatgacacc

SEQ ID NO: 19886 - DNA, 20 bp, synthetic construct
  misc_feature 1..20: note = chemically synthesized
  source 1..20: mol_type = other DNA
aacattgttcttcaaaaatg

SEQ ID NO: 19887 - DNA, 20 bp, synthetic construct
  misc_feature 1..20: note = chemically synthesized
  source 1..20: mol_type = other DNA
tctgggcaagaaaaatttga

SEQ ID NO: 19888 - DNA, 20 bp, synthetic construct
  misc_feature 1..20: note = chemically synthesized
  source 1..20: mol_type = other DNA
gctttacaagaaatatttaa

SEQ ID NO: 19889 - DNA, 20 bp, synthetic construct
  misc_feature 1..20: note = chemically synthesized
  source 1..20: mol_type = other DNA
gaaagaaagagagagagaga

SEQ ID NO: 19890 - DNA, 20 bp, synthetic construct
  misc_feature 1..20: note = chemically synthesized
  source 1..20: mol_type = other DNA
aaaaaaaaaacaaaacaacc

SEQ ID NO: 19891 - DNA, 20 bp, synthetic construct
  misc_feature 1..20: note = chemically synthesized
  source 1..20: mol_type = other DNA
gaatcaattaacaaaatggc

SEQ ID NO: 19892 - DNA, 20 bp, synthetic construct
  misc_feature 1..20: note = chemically synthesized
  source 1..20: mol_type = other DNA
aataatagccttgcatgtaa

SEQ ID NO: 19893 - DNA, 20 bp, synthetic construct
  misc_feature 1..20: note = chemically synthesized
  source 1..20: mol_type = other DNA
gataaaaggaacaattcagc

SEQ ID NO: 19894 - DNA, 20 bp, synthetic construct
  misc_feature 1..20: note = chemically synthesized
  source 1..20: mol_type = other DNA
agcaaatgttattagatata

SEQ ID NO: 19895 - DNA, 20 bp, synthetic construct
  misc_feature 1..20: note = chemically synthesized
  source 1..20: mol_type = other DNA
attagatataaagggtgaaa

SEQ ID NO: 19896 - DNA, 20 bp, synthetic construct
  misc_feature 1..20: note = chemically synthesized
  source 1..20: mol_type = other DNA
aatccaatacaataatagtt

SEQ ID NO: 19897 - DNA, 20 bp, synthetic construct
  misc_feature 1..20: note = chemically synthesized
  source 1..20: mol_type = other DNA
agaaaattaacaaagaaaca

SEQ ID NO: 19898 - DNA, 20 bp, synthetic construct
  misc_feature 1..20: note = chemically synthesized
  source 1..20: mol_type = other DNA
taaacttgactttagaccaa

SEQ ID NO: 19899 - DNA, 20 bp, synthetic construct
  misc_feature 1..20: note = chemically synthesized
  source 1..20: mol_type = other DNA
aatatttcatccaacagcta

SEQ ID NO: 19900 - DNA, 20 bp, synthetic construct
  misc_feature 1..20: note = chemically synthesized
  source 1..20: mol_type = other DNA
tcagcacatgacgcattccc

SEQ ID NO: 19901 - DNA, 20 bp, synthetic construct
  misc_feature 1..20: note = chemically synthesized
  source 1..20: mol_type = other DNA
agcatcttctcagaccacaa

SEQ ID NO: 19902 - DNA, 20 bp, synthetic construct
  misc_feature 1..20: note = chemically synthesized
  source 1..20: mol_type = other DNA
ggaaattaaacaacatgctc

SEQ ID NO: 19903 - DNA, 20 bp, synthetic construct
  misc_feature 1..20: note = chemically synthesized
  source 1..20: mol_type = other DNA
atacaacataggaaaagcca

SEQ ID NO: 19904 - DNA, 20 bp, synthetic construct
  misc_feature 1..20: note = chemically synthesized
  source 1..20: mol_type = other DNA
aatagagaaaaacaacaaca

SEQ ID NO: 19905 - DNA, 20 bp, synthetic construct
  misc_feature 1..20: note = chemically synthesized
  source 1..20: mol_type = other DNA
tgttatttaaaaaagataaa

SEQ ID NO: 19906 - DNA, 20 bp, synthetic construct
  misc_feature 1..20: note = chemically synthesized
  source 1..20: mol_type = other DNA
acacataccacctaccaaga

SEQ ID NO: 19907 - DNA, 20 bp, synthetic construct
  misc_feature 1..20: note = chemically synthesized
  source 1..20: mol_type = other DNA
ctaccaagattgaattaaga

SEQ ID NO: 19908 - DNA, 20 bp, synthetic construct
  misc_feature 1..20: note = chemically synthesized
  source 1..20: mol_type = other DNA
aaaacctgaacagaccagta

SEQ ID NO: 19909 - DNA, 20 bp, synthetic construct
  misc_feature 1..20: note = chemically synthesized
  source 1..20: mol_type = other DNA
accagtaatgaataatgaaa

SEQ ID NO: 19910 - DNA, 20 bp, synthetic construct
  misc_feature 1..20: note = chemically synthesized
  source 1..20: mol_type = other DNA
cttttaaaaattaaacagga

SEQ ID NO: 19911 - DNA, 20 bp, synthetic construct
  misc_feature 1..20: note = chemically synthesized
  source 1..20: mol_type = other DNA
tcctgattccataaccagac

SEQ ID NO: 19912 - DNA, 20 bp, synthetic construct
  misc_feature 1..20: note = chemically synthesized
  source 1..20: mol_type = other DNA
ctcaacaaaatactagcaaa

SEQ ID NO: 19913 - DNA, 20 bp, synthetic construct
  misc_feature 1..20: note = chemically synthesized
  source 1..20: mol_type = other DNA
gataatacaccatgatcaag

SEQ ID NO: 19914 - DNA, 20 bp, synthetic construct
  misc_feature 1..20: note = chemically synthesized
  source 1..20: mol_type = other DNA
tgatcaagtgggatttatac

SEQ ID NO: 19915 - DNA, 20 bp, synthetic construct
  misc_feature 1..20: note = chemically synthesized
  source 1..20: mol_type = other DNA
aacccacagctaacatcata

SEQ ID NO: 19916 - DNA, 20 bp, synthetic construct
  misc_feature 1..20: note = chemically synthesized
  source 1..20: mol_type = other DNA
tctaagaactgaaacaaaat

SEQ ID NO: 19917 - DNA, 20 bp, synthetic construct
  misc_feature 1..20: note = chemically synthesized
  source 1..20: mol_type = other DNA
agctaaaaaataaaatattt

SEQ ID NO: 19918 - DNA, 20 bp, synthetic construct
  misc_feature 1..20: note = chemically synthesized
  source 1..20: mol_type = other DNA
aaactacaaaacactgataa

SEQ ID NO: 19919 - DNA, 20 bp, synthetic construct
  misc_feature 1..20: note = chemically synthesized
  source 1..20: mol_type = other DNA
tggagagatatcctatgttc

SEQ ID NO: 19920 - DNA, 20 bp, synthetic construct
  misc_feature 1..20: note = chemically synthesized
  source 1..20: mol_type = other DNA
agacacttagaccaatggaa

SEQ ID NO: 19921 - DNA, 20 bp, synthetic construct
  misc_feature 1..20: note = chemically synthesized
  source 1..20: mol_type = other DNA
agattttcaacaaaggtgac

SEQ ID NO: 19922 - DNA, 20 bp, synthetic construct
  misc_feature 1..20: note = chemically synthesized
  source 1..20: mol_type = other DNA
aagaaatggtgctgaaaaaa

SEQ ID NO: 19923 - DNA, 20 bp, synthetic construct
  misc_feature 1..20: note = chemically synthesized
  source 1..20: mol_type = other DNA
ctgaaaaaattggatatcca

SEQ ID NO: 19924 - DNA, 20 bp, synthetic construct
  misc_feature 1..20: note = chemically synthesized
  source 1..20: mol_type = other DNA
cattggatatccatgtgcaa

SEQ ID NO: 19925 - DNA, 20 bp, synthetic construct
  misc_feature 1..20: note = chemically synthesized
  source 1..20: mol_type = other DNA
aactggactgctgatatggt

SEQ ID NO: 19926 - DNA, 20 bp, synthetic construct
  misc_feature 1..20: note = chemically synthesized
  source 1..20: mol_type = other DNA
aaatataatccccaacttct

SEQ ID NO: 19927 - DNA, 20 bp, synthetic construct
  misc_feature 1..20: note = chemically synthesized
  source 1..20: mol_type = other DNA
cccaacttctcaggatcttg

SEQ ID NO: 19928 - DNA, 20 bp, synthetic construct
  misc_feature 1..20: note = chemically synthesized
  source 1..20: mol_type = other DNA
agcatgtggaggctcgcatt

SEQ ID NO: 19929 - DNA, 20 bp, synthetic construct
  misc_feature 1..20: note = chemically synthesized
  source 1..20: mol_type = other DNA
caggagacaccccaaatact

SEQ ID NO: 19930 - DNA, 20 bp, synthetic construct
  misc_feature 1..20: note = chemically synthesized
  source 1..20: mol_type = other DNA
gagaagtttctgaccttacc

SEQ ID NO: 19931 - DNA, 20 bp, synthetic construct
  misc_feature 1..20: note = chemically synthesized
  source 1..20: mol_type = other DNA
gtttctgaccttacctggag

SEQ ID NO: 19932 - DNA, 20 bp, synthetic construct
  misc_feature 1..20: note = chemically synthesized
  source 1..20: mol_type = other DNA
agaaaggccctgggagctca

SEQ ID NO: 19933 - DNA, 20 bp, synthetic construct
  misc_feature 1..20: note = chemically synthesized
  source 1..20: mol_type = other DNA
aggcatttacattactaaca

SEQ ID NO: 19934 - DNA, 20 bp, synthetic construct
  misc_feature 1..20: note = chemically synthesized
  source 1..20: mol_type = other DNA
ggcctaaatgctccacttaa

SEQ ID NO: 19935 - DNA, 20 bp, synthetic construct
  misc_feature 1..20: note = chemically synthesized
  source 1..20: mol_type = other DNA
catgcaaatggccaccaaaa

SEQ ID NO: 19936 - DNA, 20 bp, synthetic construct
  misc_feature 1..20: note = chemically synthesized
  source 1..20: mol_type = other DNA
agaaagtcaacaaaaaaata

SEQ ID NO: 19937 - DNA, 20 bp, synthetic construct
  misc_feature 1..20: note = chemically synthesized
  source 1..20: mol_type = other DNA
aaaaaaaagttcaggaccag

SEQ ID NO: 19938 - DNA, 20 bp, synthetic construct
  misc_feature 1..20: note = chemically synthesized
  source 1..20: mol_type = other DNA
aggaccagatggattcacaa

SEQ ID NO: 19939 - DNA, 20 bp, synthetic construct
  misc_feature 1..20: note = chemically synthesized
  source 1..20: mol_type = other DNA
attctactagacattcaaag

SEQ ID NO: 19940 - DNA, 20 bp, synthetic construct
  misc_feature 1..20: note = chemically synthesized
  source 1..20: mol_type = other DNA
gatcaagcaggttccatgcc

SEQ ID NO: 19941 - DNA, 20 bp, synthetic construct
  misc_feature 1..20: note = chemically synthesized
  source 1..20: mol_type = other DNA
caggttccatgccagggatg

SEQ ID NO: 19942 - DNA, 20 bp, synthetic construct
  misc_feature 1..20: note = chemically synthesized
  source 1..20: mol_type = other DNA
aacccacagccaacataata

SEQ ID NO: 19943 - DNA, 20 bp, synthetic construct
  misc_feature 1..20: note = chemically synthesized
  source 1..20: mol_type = other DNA
tctgagaactggaacaagac

SEQ ID NO: 19944 - DNA, 20 bp, synthetic construct
  misc_feature 1..20: note = chemically synthesized
  source 1..20: mol_type = other DNA
gcaaagtttccagatacaag

SEQ ID NO: 19945 - DNA, 20 bp, synthetic construct
  misc_feature 1..20: note = chemically synthesized
  source 1..20: mol_type = other DNA
acaccaacagcaaccaaatg

SEQ ID NO: 19946 - DNA, 20 bp, synthetic construct
  misc_feature 1..20: note = chemically synthesized
  source 1..20: mol_type = other DNA
atataaaacgtactctcaag

SEQ ID NO: 19947 - DNA, 20 bp, synthetic construct
  misc_feature 1..20: note = chemically synthesized
  source 1..20: mol_type = other DNA
cacagtgaagagacaagctg

SEQ ID NO: 19948 - DNA, 20 bp, synthetic construct
  misc_feature 1..20: note = chemically synthesized
  source 1..20: mol_type = other DNA
atatttgcatacatttgaca

SEQ ID NO: 19949 - DNA, 20 bp, synthetic construct
  misc_feature 1..20: note = chemically synthesized
  source 1..20: mol_type = other DNA
tttgacaaggaattaatctc

SEQ ID NO: 19950 - DNA, 20 bp, synthetic construct
  misc_feature 1..20: note = chemically synthesized
  source 1..20: mol_type = other DNA
atctcattaaaaaattggca

SEQ ID NO: 19951 - DNA, 20 bp, synthetic construct
  misc_feature 1..20: note = chemically synthesized
  source 1..20: mol_type = other DNA
agaagacatacaaatgcaca

SEQ ID NO: 19952 - DNA, 20 bp, synthetic construct
  misc_feature 1..20: note = chemically synthesized
  source 1..20: mol_type = other DNA
agatatcatcttatgccagt

SEQ ID NO: 19953 - DNA, 20 bp, synthetic construct
  misc_feature 1..20: note = chemically synthesized
  source 1..20: mol_type = other DNA
aataaataacacatgctggc

SEQ ID NO: 19954 - DNA, 20 bp, synthetic construct
  misc_feature 1..20: note = chemically synthesized
  source 1..20: mol_type = other DNA
aagatccagcaatcttatta

SEQ ID NO: 19955 - DNA, 20 bp, synthetic construct
  misc_feature 1..20: note = chemically synthesized
  source 1..20: mol_type = other DNA
tgggtatttatccaaaggaa

SEQ ID NO: 19956 - DNA, 20 bp, synthetic construct
  misc_feature 1..20: note = chemically synthesized
  source 1..20: mol_type = other DNA
ttatccaaaggaaaagaatt

SEQ ID NO: 19957 - DNA, 20 bp, synthetic construct
  misc_feature 1..20: note = chemically synthesized
  source 1..20: mol_type = other DNA
gattcacattagcaaagata

SEQ ID NO: 19958 - DNA, 20 bp, synthetic construct
  misc_feature 1..20: note = chemically synthesized
  source 1..20: mol_type = other DNA
atcaacctaagtgtccatca

SEQ ID NO: 19959 - DNA, 20 bp, synthetic construct
  misc_feature 1..20: note = chemically synthesized
  source 1..20: mol_type = other DNA
acctaagtgtccatcaatgg

SEQ ID NO: 19960 - DNA, 20 bp, synthetic construct
  misc_feature 1..20: note = chemically synthesized
  source 1..20: mol_type = other DNA
aatgtggtgtatacacacaa

SEQ ID NO: 19961 - DNA, 20 bp, synthetic construct
  misc_feature 1..20: note = chemically synthesized
  source 1..20: mol_type = other DNA
atcatttcatttgcagcaac

SEQ ID NO: 19962 - DNA, 20 bp, synthetic construct
  misc_feature 1..20: note = chemically synthesized
  source 1..20: mol_type = other DNA
aagttaatatcatgtaggta

SEQ ID NO: 19963 - DNA, 20 bp, synthetic construct
  misc_feature 1..20: note = chemically synthesized
  source 1..20: mol_type = other DNA
aatatcatgtaggtagagag

SEQ ID NO: 19964 - DNA, 20 bp, synthetic construct
  misc_feature 1..20: note = chemically synthesized
  source 1..20: mol_type = other DNA
gaaacaggcagttagataga

SEQ ID NO: 19965 - DNA, 20 bp, synthetic construct
  misc_feature 1..20: note = chemically synthesized
  source 1..20: mol_type = other DNA
tctgatgttcaatagcaaag

SEQ ID NO: 19966 - DNA, 20 bp, synthetic construct
  misc_feature 1..20: note = chemically synthesized
  source 1..20: mol_type = other DNA
aacgataaatacttgaggtg

SEQ ID NO: 19967 - DNA, 20 bp, synthetic construct
  misc_feature 1..20: note = chemically synthesized
  source 1..20: mol_type = other DNA
aaacttctctcttaacaagc

SEQ ID NO: 19968 - DNA, 20 bp, synthetic construct
  misc_feature 1..20: note = chemically synthesized
  source 1..20: mol_type = other DNA
cttaacaagctagaatataa

SEQ ID NO: 19969 - DNA, 20 bp, synthetic construct
  misc_feature 1..20: note = chemically synthesized
  source 1..20: mol_type = other DNA
tgaatgcaagagcatagaga

SEQ ID NO: 19970 - DNA, 20 bp, synthetic construct
  misc_feature 1..20: note = chemically synthesized
  source 1..20: mol_type = other DNA
gaaaatacttaatatcatta

SEQ ID NO: 19971 - DNA, 20 bp, synthetic construct
  misc_feature 1..20: note = chemically synthesized
  source 1..20: mol_type = other DNA
ttttaccacagcgtaggtca

SEQ ID NO: 19972 - DNA, 20 bp, synthetic construct
  misc_feature 1..20: note = chemically synthesized
  source 1..20: mol_type = other DNA
atcactatttcaaagaagta

SEQ ID NO: 19973 - DNA, 20 bp, synthetic construct
  misc_feature 1..20: note = chemically synthesized
  source 1..20: mol_type = other DNA
gaatagatatcagccaaaat

SEQ ID NO: 19974 - DNA, 20 bp, synthetic construct
  misc_feature 1..20: note = chemically synthesized
  source 1..20: mol_type = other DNA
aggggcctagacatagcatg

SEQ ID NO: 19975 - DNA, 20 bp, synthetic construct
  misc_feature 1..20: note = chemically synthesized
  source 1..20: mol_type = other DNA
gcatgctgaatgaaaaggaa

SEQ ID NO: 19976 - DNA, 20 bp, synthetic construct
  misc_feature 1..20: note = chemically synthesized
  source 1..20: mol_type = other DNA
tgagctaacttcctcatttt

SEQ ID NO: 19977 - DNA, 20 bp, synthetic construct
  misc_feature 1..20: note = chemically synthesized
  source 1..20: mol_type = other DNA
aagaaataagctaataccta

SEQ ID NO: 19978 - DNA, 20 bp, synthetic construct
  misc_feature 1..20: note = chemically synthesized
  source 1..20: mol_type = other DNA
attaaatgctaggcacagtt

SEQ ID NO: 19979 - DNA, 20 bp, synthetic construct
  misc_feature 1..20: note = chemically synthesized
  source 1..20: mol_type = other DNA
caacattacccaggtgatgg

SEQ ID NO: 19980 - DNA, 20 bp, synthetic construct
  misc_feature 1..20: note = chemically synthesized
  source 1..20: mol_type = other DNA
tacccaggtgatggtggagt

SEQ ID NO: 19981 - DNA, 20 bp, synthetic construct
  misc_feature 1..20: note = chemically synthesized
  source 1..20: mol_type = other DNA
gacagcaagatagtaagtaa

SEQ ID NO: 19982 - DNA, 20 bp, synthetic construct
  misc_feature 1..20: note = chemically synthesized
  source 1..20: mol_type = other DNA
aggaatggagcaacaaattg

SEQ ID NO: 19983 - DNA, 20 bp, synthetic construct
  misc_feature 1..20: note = chemically synthesized
  source 1..20: mol_type = other DNA
ttttgcttgtttgtttgaaa

SEQ ID NO: 19984 - DNA, 20 bp, synthetic construct
  misc_feature 1..20: note = chemically synthesized
  source 1..20: mol_type = other DNA
tctcactctgtcaccccggc

SEQ ID NO: 19985 - DNA, 20 bp, synthetic construct
  misc_feature 1..20: note = chemically synthesized
  source 1..20: mol_type = other DNA
ctgaagcctcactagaacgc

SEQ ID NO: 19986 - DNA, 20 bp, synthetic construct
  misc_feature 1..20: note = chemically synthesized
  source 1..20: mol_type = other DNA
tttttaaatttctgtagaaa

SEQ ID NO: 19987 - DNA, 20 bp, synthetic construct
  misc_feature 1..20: note = chemically synthesized
  source 1..20: mol_type = other DNA
aaagtgttgagattacaggt

SEQ ID NO: 19988 - DNA, 20 bp, synthetic construct
  misc_feature 1..20: note = chemically synthesized
  source 1..20: mol_type = other DNA
aatcaccatgctgggccttg

SEQ ID NO: 19989 - DNA, 20 bp, synthetic construct
  misc_feature 1..20: note = chemically synthesized
  source 1..20: mol_type = other DNA
atggatctttaaaagtggtg

SEQ ID NO: 19990 - DNA, 20 bp, synthetic construct
  misc_feature 1..20: note = chemically synthesized
  source 1..20: mol_type = other DNA
aaacatcgttaggtctcggg

SEQ ID NO: 19991 - DNA, 20 bp, synthetic construct
  misc_feature 1..20: note = chemically synthesized
  source 1..20: mol_type = other DNA
tcgttaggtctcgggaagga

SEQ ID NO: 19992 - DNA, 20 bp, synthetic construct
  misc_feature 1..20: note = chemically synthesized
  source 1..20: mol_type = other DNA
tctgtgttaacaaaaaacag

SEQ ID NO: 19993 - DNA, 20 bp, synthetic construct
  misc_feature 1..20: note = chemically synthesized
  source 1..20: mol_type = other DNA
tctgaaggtttagaaactcc

SEQ ID NO: 19994 - DNA, 20 bp, synthetic construct
  misc_feature 1..20: note = chemically synthesized
  source 1..20: mol_type = other DNA
ctttagaactcctgtcctag

SEQ ID NO: 19995 - DNA, 20 bp, synthetic construct
  misc_feature 1..20: note = chemically synthesized
  source 1..20: mol_type = other DNA
accactttgactctagtttt

SEQ ID NO: 19996 - DNA, 20 bp, synthetic construct
  misc_feature 1..20: note = chemically synthesized
  source 1..20: mol_type = other DNA
ccttaacatgttaatttctc

SEQ ID NO: 19997 - DNA, 20 bp, synthetic construct
  misc_feature 1..20: note = chemically synthesized
  source 1..20: mol_type = other DNA
agtaagacctgggcaaagga

SEQ ID NO: 19998 - DNA, 20 bp, synthetic construct
  misc_feature 1..20: note = chemically synthesized
  source 1..20: mol_type = other DNA
tttgggcaaaactttccatc

SEQ ID NO: 19999 - DNA, 20 bp, synthetic construct
  misc_feature 1..20: note = chemically synthesized
  source 1..20: mol_type = other DNA
acttagtacttcccactact

SEQ ID NO: 20000 - DNA, 20 bp, synthetic construct
  misc_feature 1..20: note = chemically synthesized
  source 1..20: mol_type = other DNA
gtacttcccactactgtgga

SEQ ID NO: 20001 - DNA, 20 bp, synthetic construct
  misc_feature 1..20: note = chemically synthesized
  source 1..20: mol_type = other DNA
tttgtcaattcttgaagatt

SEQ ID NO: 20002 - DNA, 20 bp, synthetic construct
  misc_feature 1..20: note = chemically synthesized
  source 1..20: mol_type = other DNA
tgatacctaatagacacttg

SEQ ID NO: 20003 - DNA, 20 bp, synthetic construct
  misc_feature 1..20: note = chemically synthesized
  source 1..20: mol_type = other DNA
agacacttgatgaatcctta

SEQ ID NO: 20004 - DNA, 20 bp, synthetic construct
  misc_feature 1..20: note = chemically synthesized
  source 1..20: mol_type = other DNA
aatccttactgaataataaa

SEQ ID NO: 20005 - DNA, 20 bp, synthetic construct
  misc_feature 1..20: note = chemically synthesized
  source 1..20: mol_type = other DNA
ctgaataataaaatggatta

SEQ ID NO: 20006 - DNA, 20 bp, synthetic construct
  misc_feature 1..20: note = chemically synthesized
  source 1..20: mol_type = other DNA
aaaaggttattttgaagtct

SEQ ID NO: 20007 - DNA, 20 bp, synthetic construct
  misc_feature 1..20: note = chemically synthesized
  source 1..20: mol_type = other DNA
tgggcaaaattctggcagca

SEQ ID NO: 20008 - DNA, 20 bp, synthetic construct
  misc_feature 1..20: note = chemically synthesized
  source 1..20: mol_type = other DNA
ctaagaaaccttttgttttc

SEQ ID NO: 20009 - DNA, 20 bp, synthetic construct
  misc_feature 1..20: note = chemically synthesized
  source 1..20: mol_type = other DNA
aaccttttgttttcttggat

SEQ ID NO: 20010 - DNA, 20 bp, synthetic construct
  misc_feature 1..20: note = chemically synthesized
  source 1..20: mol_type = other DNA
aaaacatggtaagataactg

SEQ ID NO: 20011 - DNA, 20 bp, synthetic construct
  misc_feature 1..20: note = chemically synthesized
  source 1..20: mol_type = other DNA
agaaactgttattcagttta

SEQ ID NO: 20012 - DNA, 20 bp, synthetic construct
  misc_feature 1..20: note = chemically synthesized
  source 1..20: mol_type = other DNA
tcttacataatagtaaaaaa

SEQ ID NO: 20013 - DNA, 20 bp, synthetic construct
  misc_feature 1..20: note = chemically synthesized
  source 1..20: mol_type = other DNA
cttgatcattaaatacctct

SEQ ID NO: 20014 - DNA, 20 bp, synthetic construct
  misc_feature 1..20: note = chemically synthesized
  source 1..20: mol_type = other DNA
caatttgctctatgaactgg

SEQ ID NO: 20015 - DNA, 20 bp, synthetic construct
  misc_feature 1..20: note = chemically synthesized
  source 1..20: mol_type = other DNA
tgctctatgaactggaggag

SEQ ID NO: 20016 - DNA, 20 bp, synthetic construct
  misc_feature 1..20: note = chemically synthesized
  source 1..20: mol_type = other DNA
tatagtggcaatgtattatt

SEQ ID NO: 20017 - DNA, 20 bp, synthetic construct
  misc_feature 1..20: note = chemically synthesized
  source 1..20: mol_type = other DNA
ataagtattaaaggcagctt

SEQ ID NO: 20018 - DNA, 20 bp, synthetic construct
  misc_feature 1..20: note = chemically synthesized
  source 1..20: mol_type = other DNA
ttttatttcaaggcatactc

SEQ ID NO: 20019 - DNA, 20 bp, synthetic construct
  misc_feature 1..20: note = chemically synthesized
  source 1..20: mol_type = other DNA
ttaaaaacacatgctcattt

SEQ ID NO: 20020 - DNA, 20 bp, synthetic construct
  misc_feature 1..20: note = chemically synthesized
  source 1..20: mol_type = other DNA
ggataaagatctctgaggaa

SEQ ID NO: 20021 - DNA, 20 bp, synthetic construct
  misc_feature 1..20: note = chemically synthesized
  source 1..20: mol_type = other DNA
ttctttctcactaaactaca

SEQ ID NO: 20022 - DNA, 20 bp, synthetic construct
  misc_feature 1..20: note = chemically synthesized
  source 1..20: mol_type = other DNA
tgacttttaattttgatttt

SEQ ID NO: 20023 - DNA, 20 bp, synthetic construct
  misc_feature 1..20: note = chemically synthesized
  source 1..20: mol_type = other DNA
ctttgaacagttagtataag

SEQ ID NO: 20024 - DNA, 20 bp, synthetic construct
  misc_feature 1..20: note = chemically synthesized
  source 1..20: mol_type = other DNA
taaggtgaattctgattttt

SEQ ID NO: 20025 - DNA, 20 bp, synthetic construct
  misc_feature 1..20: note = chemically synthesized
  source 1..20: mol_type = other DNA
gtcttgacacttttaaacta

SEQ ID NO: 20026 - DNA, 20 bp, synthetic construct
  misc_feature 1..20: note = chemically synthesized
  source 1..20: mol_type = other DNA
ctagagagtataaacccaca

SEQ ID NO: 20027 - DNA, 20 bp, synthetic construct
  misc_feature 1..20: note = chemically synthesized
  source 1..20: mol_type = other DNA
ttttgccttttgagaagctc

SEQ ID NO: 20028 - DNA, 20 bp, synthetic construct
  misc_feature 1..20: note = chemically synthesized
  source 1..20: mol_type = other DNA
acattaattccaagctaatt

SEQ ID NO: 20029 - DNA, 20 bp, synthetic construct
  misc_feature 1..20: note = chemically synthesized
  source 1..20: mol_type = other DNA
gcatttcatataattactaa

SEQ ID NO: 20030 - DNA, 20 bp, synthetic construct
  misc_feature 1..20: note = chemically synthesized
  source 1..20: mol_type = other DNA
atataattactaacagaatg

SEQ ID NO: 20031 - DNA, 20 bp, synthetic construct
  misc_feature 1..20: note = chemically synthesized
  source 1..20: mol_type = other DNA
tatttctatgttgtcataat

SEQ ID NO: 20032 - DNA, 20 bp, synthetic construct
  misc_feature 1..20: note = chemically synthesized
  source 1..20: mol_type = other DNA
ctagcaattggttatcacta

SEQ ID NO: 20033 - DNA, 20 bp, synthetic construct
  misc_feature 1..20: note = chemically synthesized
  source 1..20: mol_type = other DNA
cccactggggaagcccaccc

SEQ ID NO: 20034 - DNA, 20 bp, synthetic construct
  misc_feature 1..20: note = chemically synthesized
  source 1..20: mol_type = other DNA
cacccagggatgttacagag

SEQ ID NO: 20035 - DNA, 20 bp, synthetic construct
  misc_feature 1..20: note = chemically synthesized
  source 1..20: mol_type = other DNA
tacagtcctccgagactcct

SEQ ID NO: 20036 - DNA, 20 bp, synthetic construct
  misc_feature 1..20: note = chemically synthesized
  source 1..20: mol_type = other DNA
gaacttacaggcacaaaagt

SEQ ID NO: 20037 - DNA, 20 bp, synthetic construct
  misc_feature 1..20: note = chemically synthesized
  source 1..20: mol_type = other DNA
ggcacaaaagttagagttgg

SEQ ID NO: 20038 - DNA, 20 bp, synthetic construct
  misc_feature 1..20: note = chemically synthesized
  source 1..20: mol_type = other DNA
aggctttggtagcttctctt

SEQ ID NO: 20039 - DNA, 20 bp, synthetic construct
  misc_feature 1..20: note = chemically synthesized
  source 1..20: mol_type = other DNA
gaaatcttatgtgcttccca

SEQ ID NO: 20040 - DNA, 20 bp, synthetic construct
  misc_feature 1..20: note = chemically synthesized
  source 1..20: mol_type = other DNA
acagaattcctggtggaagg

SEQ ID NO: 20041 - DNA, 20 bp, synthetic construct
  misc_feature 1..20: note = chemically synthesized
  source 1..20: mol_type = other DNA
gaaagacgagaaagaggagg

SEQ ID NO: 20042 - DNA, 20 bp, synthetic construct
  misc_feature 1..20: note = chemically synthesized
  source 1..20: mol_type = other DNA
gaagaattcctccttccacc

SEQ ID NO: 20043 - DNA, 20 bp, synthetic construct
  misc_feature 1..20: note = chemically synthesized
  source 1..20: mol_type = other DNA
gcctgtaagttctcttctcc

SEQ ID NO: 20044 - DNA, 20 bp, synthetic construct
  misc_feature 1..20: note = chemically synthesized
  source 1..20: mol_type = other DNA
ggattacaactaattgaaac

SEQ ID NO: 20045 - DNA, 20 bp, synthetic construct
  misc_feature 1..20: note = chemically synthesized
  source 1..20: mol_type = other DNA
taattgaaacaggaattcaa

SEQ ID NO: 20046 - DNA, 20 bp, synthetic construct
  misc_feature 1..20: note = chemically synthesized
  source 1..20: mol_type = other DNA
gagtctcggaggactgtaag

SEQ ID NO: 20047 - DNA, 20 bp, synthetic construct
  misc_feature 1..20: note = chemically synthesized
  source 1..20: mol_type = other DNA
gatccctctctgtaacatcc

SEQ ID NO: 20048 - DNA, 20 bp, synthetic construct
  misc_feature 1..20: note = chemically synthesized
  source 1..20: mol_type = other DNA
agtcgaagaacttcctgtgg

SEQ ID NO: 20049 - DNA, 20 bp, synthetic construct
  misc_feature 1..20: note = chemically synthesized
  source 1..20: mol_type = other DNA
ggtttgtactgctcctgaag

SEQ ID NO: 20050 - DNA, 20 bp, synthetic construct
  misc_feature 1..20: note = chemically synthesized
  source 1..20: mol_type = other DNA
acaccttcactaggtgactg

SEQ ID NO: 20051 - DNA, 20 bp, synthetic construct
  misc_feature 1..20: note = chemically synthesized
  source 1..20: mol_type = other DNA
cactaggtgactgaggaatg

SEQ ID NO: 20052 - DNA, 20 bp, synthetic construct
  misc_feature 1..20: note = chemically synthesized
  source 1..20: mol_type = other DNA
ctagtgataaccaattgcta

SEQ ID NO: 20053 - DNA, 20 bp, synthetic construct
  misc_feature 1..20: note = chemically synthesized
  source 1..20: mol_type = other DNA
gagtgaggaaagcatttaaa

SEQ ID NO: 20054 - DNA, 20 bp, synthetic construct
  misc_feature 1..20: note = chemically synthesized
  source 1..20: mol_type = other DNA
cttgtctattacaacaggct

SEQ ID NO: 20055 - DNA, 20 bp, synthetic construct
  misc_feature 1..20: note = chemically synthesized
  source 1..20: mol_type = other DNA
gaaaatattagccattgcca

SEQ ID NO: 20056 - DNA, 20 bp, synthetic construct
  misc_feature 1..20: note = chemically synthesized
  source 1..20: mol_type = other DNA
agtaattatatgaaatgctt

SEQ ID NO: 20057 - DNA, 20 bp, synthetic construct
  misc_feature 1..20: note = chemically synthesized
  source 1..20: mol_type = other DNA
tttcatattcacaattagct

SEQ ID NO: 20058 - DNA, 20 bp, synthetic construct
  misc_feature 1..20: note = chemically synthesized
  source 1..20: mol_type = other DNA
gcaaaatactgtgctccttt

SEQ ID NO: 20059 - DNA, 20 bp, synthetic construct
  misc_feature 1..20: note = chemically synthesized
  source 1..20: mol_type = other DNA
cttcaatgctatgcttatgt

SEQ ID NO: 20060 - DNA, 20 bp, synthetic construct
  misc_feature 1..20: note = chemically synthesized
  source 1..20: mol_type = other DNA
tcaaattgataaaacaattt

SEQ ID NO: 20061 - DNA, 20 bp, synthetic construct
  misc_feature 1..20: note = chemically synthesized
  source 1..20: mol_type = other DNA
gaggtataacctcatctgtg

SEQ ID NO: 20062 - DNA, 20 bp, synthetic construct
  misc_feature 1..20: note = chemically synthesized
  source 1..20: mol_type = other DNA
aaattataaaacaattcctt

SEQ ID NO: 20063 - DNA, 20 bp, synthetic construct
  misc_feature 1..20: note = chemically synthesized
  source 1..20: mol_type = other DNA
aaaagtcatggttttgaagg

SEQ ID NO: 20064 - DNA, 20 bp, synthetic construct
  misc_feature 1..20: note = chemically synthesized
  source 1..20: mol_type = other DNA
ctgagttcctcaagatcttg

SEQ ID NO: 20065 - DNA, 20 bp, synthetic construct
  misc_feature 1..20: note = chemically synthesized
  source 1..20: mol_type = other DNA
agaatcaagccaactgattg

SEQ ID NO: 20066 - DNA, 20 bp, synthetic construct
  misc_feature 1..20: note = chemically synthesized
  source 1..20: mol_type = other DNA
atgtctattacagtaatcta

SEQ ID NO: 20067 - DNA, 20 bp, synthetic construct
  misc_feature 1..20: note = chemically synthesized
  source 1..20: mol_type = other DNA
aaaggatctgaaataataac

SEQ ID NO: 20068 - DNA, 20 bp, synthetic construct
  misc_feature 1..20: note = chemically synthesized
  source 1..20: mol_type = other DNA
tggcatgcattctgaaaaat

SEQ ID NO: 20069 - DNA, 20 bp, synthetic construct
  misc_feature 1..20: note = chemically synthesized
  source 1..20: mol_type = other DNA
tttgcctatgtagaagtgga

SEQ ID NO: 20070 - DNA, 20 bp, synthetic construct
  misc_feature 1..20: note = chemically synthesized
  source 1..20: mol_type = other DNA
ttctctgtagtttagtgaga

SEQ ID NO: 20071 - DNA, 20 bp, synthetic construct
  misc_feature 1..20: note = chemically synthesized
  source 1..20: mol_type = other DNA
cagaaccatctctatcacat

SEQ ID NO: 20072 - DNA, 20 bp, synthetic construct
  misc_feature 1..20: note = chemically synthesized
  source 1..20: mol_type = other DNA
tctctatcacatgtgaatcc

SEQ ID NO: 20073 - DNA, 20 bp, synthetic construct
  misc_feature 1..20: note = chemically synthesized
  source 1..20: mol_type = other DNA
tgaaataaaagttttctcta

SEQ ID NO: 20074 - DNA, 20 bp, synthetic construct
  misc_feature 1..20: note = chemically synthesized
  source 1..20: mol_type = other DNA
ctcaaggacatagcttattg

SEQ ID NO: 20075 - DNA, 20 bp, synthetic construct
  misc_feature 1..20: note = chemically synthesized
  source 1..20: mol_type = other DNA
ggaagggacttgttagcact

SEQ ID NO: 20076 - DNA, 20 bp, synthetic construct
  misc_feature 1..20: note = chemically synthesized
  source 1..20: mol_type = other DNA
cagtgaaactaagttatttt

SEQ ID NO: 20077 - DNA, 20 bp, synthetic construct
  misc_feature 1..20: note = chemically synthesized
  source 1..20: mol_type = other DNA
agtagcatgtgtgttgatct

SEQ ID NO: 20078 - DNA, 20 bp, synthetic construct
  misc_feature 1..20: note = chemically synthesized
  source 1..20: mol_type = other DNA
tggtacatagaaaatgctca

SEQ ID NO: 20079 - DNA, 20 bp, synthetic construct
  misc_feature 1..20: note = chemically synthesized
  source 1..20: mol_type = other DNA
ggtttgagattttcatatag

SEQ ID NO: 20080 - DNA, 20 bp, synthetic construct
  misc_feature 1..20: note = chemically synthesized
  source 1..20: mol_type = other DNA
gtttctttaaatttaatgat

SEQ ID NO: 20081 - DNA, 20 bp, synthetic construct
  misc_feature 1..20: note = chemically synthesized
  source 1..20: mol_type = other DNA
tatgaggtatcttagagatc

SEQ ID NO: 20082 - DNA, 20 bp, synthetic construct
  misc_feature 1..20: note = chemically synthesized
  source 1..20: mol_type = other DNA
tttaatgatcaagcaaatgg

SEQ ID NO: 20083 - DNA, 20 bp, synthetic construct
  misc_feature 1..20: note = chemically synthesized
  source 1..20: mol_type = other DNA
gcaaatggcagagttaggac

SEQ ID NO: 20084 - DNA, 20 bp, synthetic construct
  misc_feature 1..20: note = chemically synthesized
  source 1..20: mol_type = other DNA
tcacttttttactattatgt

SEQ ID NO: 20085 - DNA, 20 bp, synthetic construct
  misc_feature 1..20: note = chemically synthesized
  source 1..20: mol_type = other DNA
agtacttgcagtcaaaggtc

SEQ ID NO: 20086 - DNA, 20 bp, synthetic construct
  misc_feature 1..20: note = chemically synthesized
  source 1..20: mol_type = other DNA
ctgaaaaagaaccccttaaa

SEQ ID NO: 20087 - DNA, 20 bp, synthetic construct
  misc_feature 1..20: note = chemically synthesized
  source 1..20: mol_type = other DNA
aactgaataacagtttcttc

SEQ ID NO: 20088 - DNA, 20 bp, synthetic construct
  misc_feature 1..20: note = chemically synthesized
  source 1..20: mol_type = other DNA
acagtttcttcatgaataaa

SEQ ID NO: 20089 - DNA, 20 bp, synthetic construct
  misc_feature 1..20: note = chemically synthesized
  source 1..20: mol_type = other DNA
aacaaaaggtttcttaggag

SEQ ID NO: 20090 - DNA, 20 bp, synthetic construct
  misc_feature 1..20: note = chemically synthesized
  source 1..20: mol_type = other DNA
ggagaagaatcccttgctgc

SEQ ID NO: 20091 - DNA, 20 bp, synthetic construct
  misc_feature 1..20: note = chemically synthesized
  source 1..20: mol_type = other DNA
gtgaaaaacataacagatga

SEQ ID NO: 20092 - DNA, 20 bp, synthetic construct
  misc_feature 1..20: note = chemically synthesized
  source 1..20: mol_type = other DNA
tgagagagtcacagttagtt

SEQ ID NO: 20093 - DNA, 20 bp, synthetic construct
  misc_feature 1..20: note = chemically synthesized
  source 1..20: mol_type = other DNA
aatccattttattattcagt

SEQ ID NO: 20094 - DNA, 20 bp, synthetic construct
  misc_feature 1..20: note = chemically synthesized
  source 1..20: mol_type = other DNA
gcactgagaggcgagggaga

SEQ ID NO: 20095 - DNA, 20 bp, synthetic construct
  misc_feature 1..20: note = chemically synthesized
  source 1..20: mol_type = other DNA
gaggcgagggagatagagtt

SEQ ID NO: 20096 - DNA, 20 bp, synthetic construct
  misc_feature 1..20: note = chemically synthesized
  source 1..20: mol_type = other DNA
agaactgattcttaatcttc

SEQ ID NO: 20097 - DNA, 20 bp, synthetic construct
  misc_feature 1..20: note = chemically synthesized
  source 1..20: mol_type = other DNA
atacaatacagtcaaatgtg

SEQ ID NO: 20098 - DNA, 20 bp, synthetic construct
  misc_feature 1..20: note = chemically synthesized
  source 1..20: mol_type = other DNA
taagactatacagtgtaccg

SEQ ID NO: 20099 - DNA, 20 bp, synthetic construct
  misc_feature 1..20: note = chemically synthesized
  source 1..20: mol_type = other DNA
atacagtgtaccgtggaatg

SEQ ID NO: 20100 - DNA, 20 bp, synthetic construct
  misc_feature 1..20: note = chemically synthesized
  source 1..20: mol_type = other DNA
gatgtttgagctgacacttg

SEQ ID NO: 20101 - DNA, 20 bp, synthetic construct
  misc_feature 1..20: note = chemically synthesized
  source 1..20: mol_type = other DNA
gctcagagagggaaaaggag

SEQ ID NO: 20102 - DNA, 20 bp, synthetic construct
  misc_feature 1..20: note = chemically synthesized
  source 1..20: mol_type = other DNA
actagattgtgaagctcagg

SEQ ID NO: 20103 - DNA, 20 bp, synthetic construct
  misc_feature 1..20: note = chemically synthesized
  source 1..20: mol_type = other DNA
agggggagttaatagcctta

SEQ ID NO: 20104 - DNA, 20 bp, synthetic construct
  misc_feature 1..20: note = chemically synthesized
  source 1..20: mol_type = other DNA
gccttaaggagttttgtctc

SEQ ID NO: 20105 - DNA, 20 bp, synthetic construct
  misc_feature 1..20: note = chemically synthesized
  source 1..20: mol_type = other DNA
ttgtctccagggtatgaaca

SEQ ID NO: 20106 - DNA, 20 bp, synthetic construct
  misc_feature 1..20: note = chemically synthesized
  source 1..20: mol_type = other DNA
cagggtatgaacaatgaatg

SEQ ID NO: 20107 - DNA, 20 bp, synthetic construct
  misc_feature 1..20: note = chemically synthesized
  source 1..20: mol_type = other DNA
aattagactgtggtgtgacc

SEQ ID NO: 20108 - DNA, 20 bp, synthetic construct
  misc_feature 1..20: note = chemically synthesized
  source 1..20: mol_type = other DNA
tctggagaaattaacatgtt

SEQ ID NO: 20109 - DNA, 20 bp, synthetic construct
  misc_feature 1..20: note = chemically synthesized
  source 1..20: mol_type = other DNA
attaacatgttaaggatatt

SEQ ID NO: 20110 - DNA, 20 bp, synthetic construct
  misc_feature 1..20: note = chemically synthesized
  source 1..20: mol_type = other DNA
cacataatgaaagttaattt

SEQ ID NO: 20111 - DNA, 20 bp, synthetic construct
  misc_feature 1..20: note = chemically synthesized
  source 1..20: mol_type = other DNA
tcagtcttgacactacacct

SEQ ID NO: 20112 - DNA, 20 bp, synthetic construct
  misc_feature 1..20: note = chemically synthesized
  source 1..20: mol_type = other DNA
atggtacaagtggcacaggg

SEQ ID NO: 20113 - DNA, 20 bp, synthetic construct
  misc_feature 1..20: note = chemically synthesized
  source 1..20: mol_type = other DNA
cagggaagaattcagaaaac

SEQ ID NO: 20114 - DNA, 20 bp, synthetic construct
  misc_feature 1..20: note = chemically synthesized
  source 1..20: mol_type = other DNA
ttatggaagaaattataata

SEQ ID NO: 20115 - DNA, 20 bp, synthetic construct
  misc_feature 1..20: note = chemically synthesized
  source 1..20: mol_type = other DNA
tgagtccactcttctaggac

SEQ ID NO: 20116 - DNA, 20 bp, synthetic construct
  misc_feature 1..20: note = chemically synthesized
  source 1..20: mol_type = other DNA
ctttgatataagtgaactca

SEQ ID NO: 20117 - DNA, 20 bp, synthetic construct
  misc_feature 1..20: note = chemically synthesized
  source 1..20: mol_type = other DNA
tttctctagagcaaaatgaa

SEQ ID NO: 20118 - DNA, 20 bp, synthetic construct
  misc_feature 1..20: note = chemically synthesized
  source 1..20: mol_type = other DNA
acttttcaaggctgaggtgg

SEQ ID NO: 20119 - DNA, 20 bp, synthetic construct
  misc_feature 1..20: note = chemically synthesized
  source 1..20: mol_type = other DNA
tgggagaattgtttgagacc

SEQ ID NO: 20120 - DNA, 20 bp, synthetic construct
  misc_feature 1..20: note = chemically synthesized
  source 1..20: mol_type = other DNA
gaattgtttgagaccaagag

SEQ ID NO: 20121 - DNA, 20 bp, synthetic construct
  misc_feature 1..20: note = chemically synthesized
  source 1..20: mol_type = other DNA
tacctgagaggctaaagcag

SEQ ID NO: 20122 - DNA, 20 bp, synthetic construct
  misc_feature 1..20: note = chemically synthesized
  source 1..20: mol_type = other DNA
ggctaaagcaggaggatcaa

SEQ ID NO: 20123 - DNA, 20 bp, synthetic construct
  misc_feature 1..20: note = chemically synthesized
  source 1..20: mol_type = other DNA
ttgcaccattgcactccagc

SEQ ID NO: 20124 - DNA, 20 bp, synthetic construct
  misc_feature 1..20: note = chemically synthesized
  source 1..20: mol_type = other DNA
ttgcactccagccggggtga

SEQ ID NO: 20125 - DNA, 20 bp, synthetic construct
  misc_feature 1..20: note = chemically synthesized
  source 1..20: mol_type = other DNA
taaagtcagactgcatgatt

SEQ ID NO: 20126 - DNA, 20 bp, synthetic construct
  misc_feature 1..20: note = chemically synthesized
  source 1..20: mol_type = other DNA
aattccaactccaccatcac

SEQ ID NO: 20127 - DNA, 20 bp, synthetic construct
  misc_feature 1..20: note = chemically synthesized
  source 1..20: mol_type = other DNA
ttgtcataccagctttcact

SEQ ID NO: 20128 - DNA, 20 bp, synthetic construct
  misc_feature 1..20: note = chemically synthesized
  source 1..20: mol_type = other DNA
cataccagctttcactttga

SEQ ID NO: 20129 - DNA, 20 bp, synthetic construct
  misc_feature 1..20: note = chemically synthesized
  source 1..20: mol_type = other DNA
catcaatgttacttcaatca

SEQ ID NO: 20130 - DNA, 20 bp, synthetic construct
  misc_feature 1..20: note = chemically synthesized
  source 1..20: mol_type = other DNA
atcacgggatgcatagtaat

SEQ ID NO: 20131 - DNA, 20 bp, synthetic construct
  misc_feature 1..20: note = chemically synthesized
  source 1..20: mol_type = other DNA
tctttgccctaattactgat

SEQ ID NO: 20132 - DNA, 20 bp, synthetic construct
  misc_feature 1..20: note = chemically synthesized
  source 1..20: mol_type = other DNA
caggtggtcttgttcaaagt

SEQ ID NO: 20133 - DNA, 20 bp, synthetic construct
  misc_feature 1..20: note = chemically synthesized
  source 1..20: mol_type = other DNA
cagctgctttgattttaact

SEQ ID NO: 20134 - DNA, 20 bp, synthetic construct
  misc_feature 1..20: note = chemically synthesized
  source 1..20: mol_type = other DNA
gcaactgtgttttggaacag

SEQ ID NO: 20135 - DNA, 20 bp, synthetic construct
  misc_feature 1..20: note = chemically synthesized
  source 1..20: mol_type = other DNA
agtgttgccagatgacgact

SEQ ID NO: 20136 - DNA, 20 bp, synthetic construct
  misc_feature 1..20: note = chemically synthesized
  source 1..20: mol_type = other DNA
agtattttcttttttaatgt

SEQ ID NO: 20137 - DNA, 20 bp, synthetic construct
  misc_feature 1..20: note = chemically synthesized
  source 1..20: mol_type = other DNA
tatacctcaaatatgaaaat

SEQ ID NO: 20138 - DNA, 20 bp, synthetic construct
  misc_feature 1..20: note = chemically synthesized
  source 1..20: mol_type = other DNA
aaaaagggctaaaatggtgt

SEQ ID NO: 20139 - DNA, 20 bp, synthetic construct
  misc_feature 1..20: note = chemically synthesized
  source 1..20: mol_type = other DNA
taatgatcaagtcaggtatt

SEQ ID NO: 20140 - DNA, 20 bp, synthetic construct
  misc_feature 1..20: note = chemically synthesized
  source 1..20: mol_type = other DNA
atgattttatatttgtatgg

SEQ ID NO: 20141 - DNA, 20 bp, synthetic construct
  misc_feature 1..20: note = chemically synthesized
  source 1..20: mol_type = other DNA
gattccatatctttgctaat

SEQ ID NO: 20142 - DNA, 20 bp, synthetic construct
  misc_feature 1..20: note = chemically synthesized
  source 1..20: mol_type = other DNA
accagtatctgtttattatt

SEQ ID NO: 20143 - DNA, 20 bp, synthetic construct
  misc_feature 1..20: note = chemically synthesized
  source 1..20: mol_type = other DNA
ttattctgaattcttttcct

SEQ ID NO: 20144 - DNA, 20 bp, synthetic construct
  misc_feature 1..20: note = chemically synthesized
  source 1..20: mol_type = other DNA
aatacccagtaataagattg

SEQ ID NO: 20145 - DNA, 20 bp, synthetic construct
  misc_feature 1..20: note = chemically synthesized
  source 1..20: mol_type = other DNA
catgcttaccaatagtgcct

SEQ ID NO: 20146 - DNA, 20 bp, synthetic construct
  misc_feature 1..20: note = chemically synthesized
  source 1..20: mol_type = other DNA
gattatttgtttttccactg

SEQ ID NO: 20147 - DNA, 20 bp, synthetic construct
  misc_feature 1..20: note = chemically synthesized
  source 1..20: mol_type = other DNA
tttttccactgttgagttgt

SEQ ID NO: 20148 - DNA, 20 bp, synthetic construct
  misc_feature 1..20: note = chemically synthesized
  source 1..20: mol_type = other DNA
ttaagtctttaatccatctt

SEQ ID NO: 20149 - DNA, 20 bp, synthetic construct
  misc_feature 1..20: note = chemically synthesized
  source 1..20: mol_type = other DNA
cgttttatatggcaataaat

SEQ ID NO: 20150 - DNA, 20 bp, synthetic construct
  misc_feature 1..20: note = chemically synthesized
  source 1..20: mol_type = other DNA
atttttgcatctattgtaca

SEQ ID NO: 20151 - DNA, 20 bp, synthetic construct
  misc_feature 1..20: note = chemically synthesized
  source 1..20: mol_type = other DNA
tgcatctattgtacaagggg

SEQ ID NO: 20152 - DNA, 20 bp, synthetic construct
  misc_feature 1..20: note = chemically synthesized
  source 1..20: mol_type = other DNA
tggttgctgttggtgtatag

SEQ ID NO: 20153 - DNA, 20 bp, synthetic construct
  misc_feature 1..20: note = chemically synthesized
  source 1..20: mol_type = other DNA
tcttgtatctggaaactttg

SEQ ID NO: 20154 - DNA, 20 bp, synthetic construct
  misc_feature 1..20: note = chemically synthesized
  source 1..20: mol_type = other DNA
cagttctaggagctttctgg

SEQ ID NO: 20155 - DNA, 20 bp, synthetic construct
  misc_feature 1..20: note = chemically synthesized
  source 1..20: mol_type = other DNA
gagctttctggaggagtctt

SEQ ID NO: 20156 - DNA, 20 bp, synthetic construct
  misc_feature 1..20: note = chemically synthesized
  source 1..20: mol_type = other DNA
ttgacttcctctttactgat

SEQ ID NO: 20157 - DNA, 20 bp, synthetic construct
  misc_feature 1..20: note = chemically synthesized
  source 1..20: mol_type = other DNA
cttccagtactatgttgaag

SEQ ID NO: 20158 - DNA, 20 bp, synthetic construct
  misc_feature 1..20: note = chemically synthesized
  source 1..20: mol_type = other DNA
ctatgttgaagaggagtggt

SEQ ID NO: 20159 - DNA, 20 bp, synthetic construct
  misc_feature 1..20: note = chemically synthesized
  source 1..20: mol_type = other DNA
gtcttgttccagttctcaga

SEQ ID NO: 20160 - DNA, 20 bp, synthetic construct
  misc_feature 1..20: note = chemically synthesized
  source 1..20: mol_type = other DNA
cattcaatattatgttggct

SEQ ID NO: 20161 - DNA, 20 bp, synthetic construct
  misc_feature 1..20: note = chemically synthesized
  source 1..20: mol_type = other DNA
attttaatcataaatgtatg

SEQ ID NO: 20162 - DNA, 20 bp, synthetic construct
  misc_feature 1..20: note = chemically synthesized
  source 1..20: mol_type = other DNA
taaatgtatgctggattttg

SEQ ID NO: 20163 - DNA, 20 bp, synthetic construct
  misc_feature 1..20: note = chemically synthesized
  source 1..20: mol_type = other DNA
atggaacctgcttgatcatg

SEQ ID NO: 20164 - DNA, 20 bp, synthetic construct
  misc_feature 1..20: note = chemically synthesized
  source 1..20: mol_type = other DNA
attatctttttgttatgttg

SEQ ID NO: 20165 - DNA, 20 bp, synthetic construct
  misc_feature 1..20: note = chemically synthesized
  source 1..20: mol_type = other DNA
tggttatctagtattttgtt

SEQ ID NO: 20166 - DNA, 20 bp, synthetic construct
  misc_feature 1..20: note = chemically synthesized
  source 1..20: mol_type = other DNA
ttggtgtgatgctggcttca

SEQ ID NO: 20167 - DNA, 20 bp, synthetic construct
  misc_feature 1..20: note = chemically synthesized
  source 1..20: mol_type = other DNA
tgtgatgctggcttcataga

SEQ ID NO: 20168 - DNA, 20 bp, synthetic construct
  misc_feature 1..20: note = chemically synthesized
  source 1..20: mol_type = other DNA
ttccttctttatctgtcttg

SEQ ID NO: 20169 - DNA, 20 bp, synthetic construct
  misc_feature 1..20: note = chemically synthesized
  source 1..20: mol_type = other DNA
agatggggaccaattcctct

SEQ ID NO: 20170 - DNA, 20 bp, synthetic construct
  misc_feature 1..20: note = chemically synthesized
  source 1..20: mol_type = other DNA
attcctctttgaatgtctag

SEQ ID NO: 20171 - DNA, 20 bp, synthetic construct
  misc_feature 1..20: note = chemically synthesized
  source 1..20: mol_type = other DNA
atgtctagtagaattctgtt

SEQ ID NO: 20172 - DNA, 20 bp, synthetic construct
  misc_feature 1..20: note = chemically synthesized
  source 1..20: mol_type = other DNA
ggagaaatttccacgcgctg

SEQ ID NO: 20173 - DNA, 20 bp, synthetic construct
  misc_feature 1..20: note = chemically synthesized
  source 1..20: mol_type = other DNA
aatttccacgcgctgttgaa

SEQ ID NO: 20174 - DNA, 20 bp, synthetic construct
  misc_feature 1..20: note = chemically synthesized
  source 1..20: mol_type = other DNA
gaatgtgtgttctgtggtta

SEQ ID NO: 20175 - DNA, 20 bp, synthetic construct
  misc_feature 1..20: note = chemically synthesized
  source 1..20: mol_type = other DNA
aatgcctggctatgccaggc

SEQ ID NO: 20176 - DNA, 20 bp, synthetic construct
  misc_feature 1..20: note = chemically synthesized
  source 1..20: mol_type = other DNA
agaccttcagtttctccagt

SEQ ID NO: 20177 - DNA, 20 bp, synthetic construct
  misc_feature 1..20: note = chemically synthesized
  source 1..20: mol_type = other DNA
ggagtgtgtgtttaggagag

SEQ ID NO: 20178 - DNA, 20 bp, synthetic construct
  misc_feature 1..20: note = chemically synthesized
  source 1..20: mol_type = other DNA
gttggggcactcacagtatt

SEQ ID NO: 20179 - DNA, 20 bp, synthetic construct
  misc_feature 1..20: note = chemically synthesized
  source 1..20: mol_type = other DNA
cacagtatttggggtgtctc

SEQ ID NO: 20180 - DNA, 20 bp, synthetic construct
  misc_feature 1..20: note = chemically synthesized
  source 1..20: mol_type = other DNA
ggagcaatctacttccttca

SEQ ID NO: 20181 - DNA, 20 bp, synthetic construct
  misc_feature 1..20: note = chemically synthesized
  source 1..20: mol_type = other DNA
ctacttccttcagagggtct

SEQ ID NO: 20182 - DNA, 20 bp, synthetic construct
  misc_feature 1..20: note = chemically synthesized
  source 1..20: mol_type = other DNA
agagggtctgtgggtcctct

SEQ ID NO: 20183 - DNA, 20 bp, synthetic construct
  misc_feature 1..20: note = chemically synthesized
  source 1..20: mol_type = other DNA
ccacatgctgctctgtccat

SEQ ID NO: 20184 - DNA, 20 bp, synthetic construct
  misc_feature 1..20: note = chemically synthesized
  source 1..20: mol_type = other DNA
cgccaagatcctgagaagtt

SEQ ID NO: 20185 - DNA, 20 bp, synthetic construct
  misc_feature 1..20: note = chemically synthesized
  source 1..20: mol_type = other DNA
ccagttttattcttttgcac

SEQ ID NO: 20186 - DNA, 20 bp, synthetic construct
  misc_feature 1..20: note = chemically synthesized
  source 1..20: mol_type = other DNA
cttttgcacatggatatcca

SEQ ID NO: 20187 - DNA, 20 bp, synthetic construct
  misc_feature 1..20: note = chemically synthesized
  source 1..20: mol_type = other DNA
aatctgttggctataaatat

SEQ ID NO: 20188 - DNA, 20 bp, synthetic construct
  misc_feature 1..20: note = chemically synthesized
  source 1..20: mol_type = other DNA
ctagcattgttcttttttca

SEQ ID NO: 20189 - DNA, 20 bp, synthetic construct
  misc_feature 1..20: note = chemically synthesized
  source 1..20: mol_type = other DNA
ctattttgatagcggtcata

SEQ ID NO: 20190 - DNA, 20 bp, synthetic construct
  misc_feature 1..20: note = chemically synthesized
  source 1..20: mol_type = other DNA
tatagaatctgtagattgct

SEQ ID NO: 20191 - DNA, 20 bp, synthetic construct
  misc_feature 1..20: note = chemically synthesized
  source 1..20: mol_type = other DNA
atttttctgatccatgaaca

SEQ ID NO: 20192 - DNA, 20 bp, synthetic construct
  misc_feature 1..20: note = chemically synthesized
  source 1..20: mol_type = other DNA
tatcagtgttttgtagtttt

SEQ ID NO: 20193 - DNA, 20 bp, synthetic construct
  misc_feature 1..20: note = chemically synthesized
  source 1..20: mol_type = other DNA
tattttttagctattgtaaa

SEQ ID NO: 20194 - DNA, 20 bp, synthetic construct
  misc_feature 1..20: note = chemically synthesized
  source 1..20: mol_type = other DNA
ttttgtctcctgtaacttta

SEQ ID NO: 20195 - DNA, 20 bp, synthetic construct
  misc_feature 1..20: note = chemically synthesized
  source 1..20: mol_type = other DNA
tgaatttatttttcagcgct

SEQ ID NO: 20196 - DNA, 20 bp, synthetic construct
  misc_feature 1..20: note = chemically synthesized
  source 1..20: mol_type = other DNA
cagcgctaagagtgctttgg

SEQ ID NO: 20197 - DNA, 20 bp, synthetic construct
  misc_feature 1..20: note = chemically synthesized
  source 1..20: mol_type = other DNA
ctaggacttccagtattata

SEQ ID NO: 20198 - DNA, 20 bp, synthetic construct
  misc_feature 1..20: note = chemically synthesized
  source 1..20: mol_type = other DNA
cttccagtattatattgaat

SEQ ID NO: 20199 - DNA, 20 bp, synthetic construct
  misc_feature 1..20: note = chemically synthesized
  source 1..20: mol_type = other DNA
aattcagtatgatgttagct

SEQ ID NO: 20200 - DNA, 20 bp, synthetic construct
  misc_feature 1..20: note = chemically synthesized
  source 1..20: mol_type = other DNA
gcagatagtttttatcatga

SEQ ID NO: 20201 - DNA, 20 bp, synthetic construct
  misc_feature 1..20: note = chemically synthesized
  source 1..20: mol_type = other DNA
tgatcatggtgtattatctt

SEQ ID NO: 20202 - DNA, 20 bp, synthetic construct
  misc_feature 1..20: note = chemically synthesized
  source 1..20: mol_type = other DNA
attatcttttggatgtactg

SEQ ID NO: 20203 - DNA, 20 bp, synthetic construct
  misc_feature 1..20: note = chemically synthesized
  source 1..20: mol_type = other DNA
cagtttgctagtattttgtt

SEQ ID NO: 20204 - DNA, 20 bp, synthetic construct
  misc_feature 1..20: note = chemically synthesized
  source 1..20: mol_type = other DNA
tttcacacctatgttccatc

SEQ ID NO: 20205 - DNA, 20 bp, synthetic construct
  misc_feature 1..20: note = chemically synthesized
  source 1..20: mol_type = other DNA
cttgcatccttgtctggtta

SEQ ID NO: 20206 - DNA, 20 bp, synthetic construct
  misc_feature 1..20: note = chemically synthesized
  source 1..20: mol_type = other DNA
tccttgtctggttatggaat

SEQ ID NO: 20207 - DNA, 20 bp, synthetic construct
  misc_feature 1..20: note = chemically synthesized
  source 1..20: mol_type = other DNA
tcaggataatactggcctca

SEQ ID NO: 20208 - DNA, 20 bp, synthetic construct
  misc_feature 1..20: note = chemically synthesized
  source 1..20: mol_type = other DNA
gataatactggcctcagaga

SEQ ID NO: 20209 - DNA, 20 bp, synthetic construct
  misc_feature 1..20: note = chemically synthesized
  source 1..20: mol_type = other DNA
gcctcagagaatgagttagg

SEQ ID NO: 20210 - DNA, 20 bp, synthetic construct
  misc_feature 1..20: note = chemically synthesized
  source 1..20: mol_type = other DNA
ccttcctgtttaatttttaa

SEQ ID NO: 20211 - DNA, 20 bp, synthetic construct
  misc_feature 1..20: note = chemically synthesized
  source 1..20: mol_type = other DNA
tttctttccttctgctagtt

SEQ ID NO: 20212 - DNA, 20 bp, synthetic construct
  misc_feature 1..20: note = chemically synthesized
  source 1..20: mol_type = other DNA
ctaacatatggtgtatcctg

SEQ ID NO: 20213 - DNA, 20 bp, synthetic construct
  misc_feature 1..20: note = chemically synthesized
  source 1..20: mol_type = other DNA
ataaatatattctgtagctg

SEQ ID NO: 20214 - DNA, 20 bp, synthetic construct
  misc_feature 1..20: note = chemically synthesized
  source 1..20: mol_type = other DNA
gatctatctgatgctgagat

SEQ ID NO: 20215 - DNA, 20 bp, synthetic construct
  misc_feature 1..20: note = chemically synthesized
  source 1..20: mol_type = other DNA
aatccccaactattattgta

SEQ ID NO: 20216 - DNA, 20 bp, synthetic construct
  misc_feature 1..20: note = chemically synthesized
  source 1..20: mol_type = other DNA
ataacatttgctttacatat

SEQ ID NO: 20217 - DNA, 20 bp, synthetic construct
  misc_feature 1..20: note = chemically synthesized
  source 1..20: mol_type = other DNA
catatctggatgctctggtg

SEQ ID NO: 20218 - DNA, 20 bp, synthetic construct
  misc_feature 1..20: note = chemically synthesized
  source 1..20: mol_type = other DNA
tggatgctctggtgttgagt

SEQ ID NO: 20219 - DNA, 20 bp, synthetic construct
  misc_feature 1..20: note = chemically synthesized
  source 1..20: mol_type = other DNA
tggtgttgagtgtgaatgtt

SEQ ID NO: 20220 - DNA, 20 bp, synthetic construct
  misc_feature 1..20: note = chemically synthesized
  source 1..20: mol_type = other DNA
agaattgttatatactcttg

SEQ ID NO: 20221 - DNA, 20 bp, synthetic construct
  misc_feature 1..20: note = chemically synthesized
  source 1..20: mol_type = other DNA
ttcttataggcagcttacaa

SEQ ID NO: 20222 - DNA, 20 bp, synthetic construct
  misc_feature 1..20: note = chemically synthesized
  source 1..20: mol_type = other DNA
attttctgtagtggtaacgt

SEQ ID NO: 20223 - DNA, 20 bp, synthetic construct
  misc_feature 1..20: note = chemically synthesized
  source 1..20: mol_type = other DNA
gtaaagccagtctagtgata

SEQ ID NO: 20224 - DNA, 20 bp, synthetic construct
  misc_feature 1..20: note = chemically synthesized
  source 1..20: mol_type = other DNA
atttttgaagaacaatgttg

SEQ ID NO: 20225 - DNA, 20 bp, synthetic construct
  misc_feature 1..20: note = chemically synthesized
  source 1..20: mol_type = other DNA
catttttttctttcactatt

SEQ ID NO: 20226 - DNA, 20 bp, synthetic construct
  misc_feature 1..20: note = chemically synthesized
  source 1..20: mol_type = other DNA
agacattttgcttgctgttt

SEQ ID NO: 20227 - DNA, 20 bp, synthetic construct
  misc_feature 1..20: note = chemically synthesized
  source 1..20: mol_type = other DNA
ctttttgcattatattattt

SEQ ID NO: 20228 - DNA, 20 bp, synthetic construct
  misc_feature 1..20: note = chemically synthesized
  source 1..20: mol_type = other DNA
aatttctgattttcatttgt

SEQ ID NO: 20229 - DNA, 20 bp, synthetic construct
  misc_feature 1..20: note = chemically synthesized
  source 1..20: mol_type = other DNA
ccttctgggaaactgcaaat

SEQ ID NO: 20230 - DNA, 20 bp, synthetic construct
  misc_feature 1..20: note = chemically synthesized
  source 1..20: mol_type = other DNA
ctgatctattgttgaagttt

SEQ ID NO: 20231 - DNA, 20 bp, synthetic construct
  misc_feature 1..20: note = chemically synthesized
  source 1..20: mol_type = other DNA
ttcaataaactcttcagtta

SEQ ID NO: 20232 - DNA, 20 bp, synthetic construct
  misc_feature 1..20: note = chemically synthesized
  source 1..20: mol_type = other DNA
attcttgttgtatctatctc

SEQ ID NO: 20233 - DNA, 20 bp, synthetic construct
  misc_feature 1..20: note = chemically synthesized
  source 1..20: mol_type = other DNA
gtaaatttctcattcatatc

SEQ ID NO: 20234 - DNA, 20 bp, synthetic construct
  misc_feature 1..20: note = chemically synthesized
  source 1..20: mol_type = other DNA
gatttctttttattgtttat

SEQ ID NO: 20235 - DNA, 20 bp, synthetic construct
  misc_feature 1..20: note = chemically synthesized
  source 1..20: mol_type = other DNA
gcttccttaatatcaacatt

SEQ ID NO: 20236 - DNA, 20 bp, synthetic construct
  misc_feature 1..20: note = chemically synthesized
  source 1..20: mol_type = other DNA
acattttggattcttttttc

SEQ ID NO: 20237 - DNA, 20 bp, synthetic construct
  misc_feature 1..20: note = chemically synthesized
  source 1..20: mol_type = other DNA
tccactggcttatgttgctg

SEQ ID NO: 20238 - DNA, 20 bp, synthetic construct
  misc_feature 1..20: note = chemically synthesized
  source 1..20: mol_type = other DNA
aagatgtatcttggtgttga

SEQ ID NO: 20239 - DNA, 20 bp, synthetic construct
  misc_feature 1..20: note = chemically synthesized
  source 1..20: mol_type = other DNA
ctgtgattttttcagtggct

SEQ ID NO: 20240 - DNA, 20 bp, synthetic construct
  misc_feature 1..20: note = chemically synthesized
  source 1..20: mol_type = other DNA
gatgaggttgtgctggagac

SEQ ID NO: 20241 - DNA, 20 bp, synthetic construct
  misc_feature 1..20: note = chemically synthesized
  source 1..20: mol_type = other DNA
gtacattggcactgatggta

SEQ ID NO: 20242 - DNA, 20 bp, synthetic construct
  misc_feature 1..20: note = chemically synthesized
  source 1..20: mol_type = other DNA
actgatggtaatgagtctag

SEQ ID NO: 20243 - DNA, 20 bp, synthetic construct
  misc_feature 1..20: note = chemically synthesized
  source 1..20: mol_type = other DNA
ttggccttcaggcagtttgc

SEQ ID NO: 20244 - DNA, 20 bp, synthetic construct
  misc_feature 1..20: note = chemically synthesized
  source 1..20: mol_type = other DNA
atagtagactgggctggtgt

SEQ ID NO: 20245 - DNA, 20 bp, synthetic construct
  misc_feature 1..20: note = chemically synthesized
  source 1..20: mol_type = other DNA
ggtcctcaggcttctggaca

SEQ ID NO: 20246 - DNA, 20 bp, synthetic construct
  misc_feature 1..20: note = chemically synthesized
  source 1..20: mol_type = other DNA
ttctggacagtgggtgtggt

SEQ ID NO: 20247 - DNA, 20 bp, synthetic construct
  misc_feature 1..20: note = chemically synthesized
  source 1..20: mol_type = other DNA
gttggtggtggctgcaaggg

SEQ ID NO: 20248 - DNA, 20 bp, synthetic construct
  misc_feature 1..20: note = chemically synthesized
  source 1..20: mol_type = other DNA
gttgtgatggcagtggcaga

SEQ ID NO: 20249 - DNA, 20 bp, synthetic construct
  misc_feature 1..20: note = chemically synthesized
  source 1..20: mol_type = other DNA
gcccatcatcaggcttctgg

SEQ ID NO: 20250 - DNA, 20 bp, synthetic construct
  misc_feature 1..20: note = chemically synthesized
  source 1..20: mol_type = other DNA
ttgcttaggtaccagtcatg

SEQ ID NO: 20251 - DNA, 20 bp, synthetic construct
  misc_feature 1..20: note = chemically synthesized
  source 1..20: mol_type = other DNA
tggatggcacaaggctgtct

SEQ ID NO: 20252 - DNA, 20 bp, synthetic construct
  misc_feature 1..20: note = chemically synthesized
  source 1..20: mol_type = other DNA
ttgaggaaggcaaagccagg

SEQ ID NO: 20253 - DNA, 20 bp, synthetic construct
  misc_feature 1..20: note = chemically synthesized
  source 1..20: mol_type = other DNA
ggacaccggctatcataggc

SEQ ID NO: 20254 - DNA, 20 bp, synthetic construct
  misc_feature 1..20: note = chemically synthesized
  source 1..20: mol_type = other DNA
ccggctatcataggctggag

SEQ ID NO: 20255 - DNA, 20 bp, synthetic construct
  misc_feature 1..20: note = chemically synthesized
  source 1..20: mol_type = other DNA
agtgatcctcaggcccccag

SEQ ID NO: 20256 - DNA, 20 bp, synthetic construct
  misc_feature 1..20: note = chemically synthesized
  source 1..20: mol_type = other DNA
tcaggcccccagcagaatgc

SEQ ID NO: 20257 - DNA, 20 bp, synthetic construct
  misc_feature 1..20: note = chemically synthesized
  source 1..20: mol_type = other DNA
gcccccagcagaatgcctga

SEQ ID NO: 20258 - DNA, 20 bp, synthetic construct
  misc_feature 1..20: note = chemically synthesized
  source 1..20: mol_type = other DNA
cattgttgccctgctcttga

SEQ ID NO: 20259 - DNA, 20 bp, synthetic construct
  misc_feature 1..20: note = chemically synthesized
  source 1..20: mol_type = other DNA
gccctgctcttgaaggggtg

SEQ ID NO: 20260 - DNA, 20 bp, synthetic construct
  misc_feature 1..20: note = chemically synthesized
  source 1..20: mol_type = other DNA
ttcagtggcagcagctataa

SEQ ID NO: 20261 - DNA, 20 bp, synthetic construct
  misc_feature 1..20: note = chemically synthesized
  source 1..20: mol_type = other DNA
ccccagatggtggctgcaag

SEQ ID NO: 20262 - DNA, 20 bp, synthetic construct
  misc_feature 1..20: note = chemically synthesized
  source 1..20: mol_type = other DNA
tgtgtagcagccctgctact

SEQ ID NO: 20263 - DNA, 20 bp, synthetic construct
  misc_feature 1..20: note = chemically synthesized
  source 1..20: mol_type = other DNA
agccctgctactgggggtgg

SEQ ID NO: 20264 - DNA, 20 bp, synthetic construct
  misc_feature 1..20: note = chemically synthesized
  source 1..20: mol_type = other DNA
gccagcagtagcactcagct

SEQ ID NO: 20265 - DNA, 20 bp, synthetic construct
  misc_feature 1..20: note = chemically synthesized
  source 1..20: mol_type = other DNA
gtagcactcagctgtgggtg

SEQ ID NO: 20266 - DNA, 20 bp, synthetic construct
  misc_feature 1..20: note = chemically synthesized
  source 1..20: mol_type = other DNA
ggggatgtcagcagagcttc

SEQ ID NO: 20267 - DNA, 20 bp, synthetic construct
  misc_feature 1..20: note = chemically synthesized
  source 1..20: mol_type = other DNA
tgtagagatgcagatgatgt

SEQ ID NO: 20268 - DNA, 20 bp, synthetic construct
  misc_feature 1..20: note = chemically synthesized
  source 1..20: mol_type = other DNA
ctgaggaacgatgtcatctg

SEQ ID NO: 20269 - DNA, 20 bp, synthetic construct
  misc_feature 1..20: note = chemically synthesized
  source 1..20: mol_type = other DNA
gcaccttgctgctcagtaat

SEQ ID NO: 20270 - DNA, 20 bp, synthetic construct
  misc_feature 1..20: note = chemically synthesized
  source 1..20: mol_type = other DNA
tgctcagtaatggggatggc

SEQ ID NO: 20271 - DNA, 20 bp, synthetic construct
  misc_feature 1..20: note = chemically synthesized
  source 1..20: mol_type = other DNA
tcaagggactctcctgtggc

SEQ ID NO: 20272 - DNA, 20 bp, synthetic construct
  misc_feature 1..20: note = chemically synthesized
  source 1..20: mol_type = other DNA
tctcctgtggctaggattcc

SEQ ID NO: 20273 - DNA, 20 bp, synthetic construct
  misc_feature 1..20: note = chemically synthesized
  source 1..20: mol_type = other DNA
taatgcagatgtggaccact

SEQ ID NO: 20274 - DNA, 20 bp, synthetic construct
  misc_feature 1..20: note = chemically synthesized
  source 1..20: mol_type = other DNA
ggagcctctctggcctcaca

SEQ ID NO: 20275 - DNA, 20 bp, synthetic construct
  misc_feature 1..20: note = chemically synthesized
  source 1..20: mol_type = other DNA
ggcctcacagaggatcccta

SEQ ID NO: 20276 - DNA, 20 bp, synthetic construct
  misc_feature 1..20: note = chemically synthesized
  source 1..20: mol_type = other DNA
tgcttcctgtcacttctctg

SEQ ID NO: 20277 - DNA, 20 bp, synthetic construct
  misc_feature 1..20: note = chemically synthesized
  source 1..20: mol_type = other DNA
gtcacttctctgttgaattc

SEQ ID NO: 20278 - DNA, 20 bp, synthetic construct
  misc_feature 1..20: note = chemically synthesized
  source 1..20: mol_type = other DNA
ttccagaattctctcttatg

SEQ ID NO: 20279 - DNA, 20 bp, synthetic construct
  misc_feature 1..20: note = chemically synthesized
  source 1..20: mol_type = other DNA
tttggttctttgtggaggag

SEQ ID NO: 20280 - DNA, 20 bp, synthetic construct
  misc_feature 1..20: note = chemically synthesized
  source 1..20: mol_type = other DNA
ggactatctgaaggcctcag

SEQ ID NO: 20281 - DNA, 20 bp, synthetic construct
  misc_feature 1..20: note = chemically synthesized
  source 1..20: mol_type = other DNA
tcagatgagtaaaagaagta

SEQ ID NO: 20282 - DNA, 20 bp, synthetic construct
  misc_feature 1..20: note = chemically synthesized
  source 1..20: mol_type = other DNA
atcatttgtttcttcaaata

SEQ ID NO: 20283 - DNA, 20 bp, synthetic construct
  misc_feature 1..20: note = chemically synthesized
  source 1..20: mol_type = other DNA
ttgcatctaccaaagtgtat

SEQ ID NO: 20284 - DNA, 20 bp, synthetic construct
  misc_feature 1..20: note = chemically synthesized
  source 1..20: mol_type = other DNA
aaatacgtaatctaacaaac

SEQ ID NO: 20285 - DNA, 20 bp, synthetic construct
  misc_feature 1..20: note = chemically synthesized
  source 1..20: mol_type = other DNA
acaaggatgttttaagatct

SEQ ID NO: 20286 - DNA, 20 bp, synthetic construct
  misc_feature 1..20: note = chemically synthesized
  source 1..20: mol_type = other DNA
gatgcatagttgcaaataaa

SEQ ID NO: 20287 - DNA, 20 bp, synthetic construct
  misc_feature 1..20: note = chemically synthesized
  source 1..20: mol_type = other DNA
tgcaaataaaaggagttttc

SEQ ID NO: 20288 - DNA, 20 bp, synthetic construct
  misc_feature 1..20: note = chemically synthesized
  source 1..20: mol_type = other DNA
tttggaaattttgcattttt

SEQ ID NO: 20289 - DNA, 20 bp, synthetic construct
  misc_feature 1..20: note = chemically synthesized
  source 1..20: mol_type = other DNA
tgatggtttctaaaattgtc

SEQ ID NO: 20290 - DNA, 20 bp, synthetic construct
  misc_feature 1..20: note = chemically synthesized
  source 1..20: mol_type = other DNA
atgttaacttagatttattg

SEQ ID NO: 20291 - DNA, 20 bp, synthetic construct
  misc_feature 1..20: note = chemically synthesized
  source 1..20: mol_type = other DNA
tatgaaaattgcttgcattt

SEQ ID NO: 20292 - DNA, 20 bp, synthetic construct
  misc_feature 1..20: note = chemically synthesized
  source 1..20: mol_type = other DNA
ctcttctcctttataaatta

SEQ ID NO: 20293 - DNA, 20 bp, synthetic construct
  misc_feature 1..20: note = chemically synthesized
  source 1..20: mol_type = other DNA
ctatgtaaagtataagttac

SEQ ID NO: 20294 - DNA, 20 bp, synthetic construct
  misc_feature 1..20: note = chemically synthesized
  source 1..20: mol_type = other DNA
aaacctgtagtctgatgaaa

SEQ ID NO: 20295 - DNA, 20 bp, synthetic construct
  misc_feature 1..20: note = chemically synthesized
  source 1..20: mol_type = other DNA
aataaaattgctttttgcaa

SEQ ID NO: 20296 - DNA, 20 bp, synthetic construct
  misc_feature 1..20: note = chemically synthesized
  source 1..20: mol_type = other DNA
attgagttgaagattgatgc

SEQ ID NO: 20297 - DNA, 20 bp, synthetic construct
  misc_feature 1..20: note = chemically synthesized
  source 1..20: mol_type = other DNA
tgccaggatcttattacctc

SEQ ID NO: 20298 - DNA, 20 bp, synthetic construct
  misc_feature 1..20: note = chemically synthesized
  source 1..20: mol_type = other DNA
attacctccaggatttcaca

SEQ ID NO: 20299 - DNA, 20 bp, synthetic construct
  misc_feature 1..20: note = chemically synthesized
  source 1..20: mol_type = other DNA
aggatttcacaaaggatttc

SEQ ID NO: 20300 - DNA, 20 bp, synthetic construct
  misc_feature 1..20: note = chemically synthesized
  source 1..20: mol_type = other DNA
ttataaagacatacctgaga

SEQ ID NO: 20301 - DNA, 20 bp, synthetic construct
  misc_feature 1..20: note = chemically synthesized
  source 1..20: mol_type = other DNA
cactatcacgagaagagcat

SEQ ID NO: 20302 - DNA, 20 bp, synthetic construct
  misc_feature 1..20: note = chemically synthesized
  source 1..20: mol_type = other DNA
aaatccctcccacaacacgt

SEQ ID NO: 20303 - DNA, 20 bp, synthetic construct
  misc_feature 1..20: note = chemically synthesized
  source 1..20: mol_type = other DNA
actacaattcaagatgagat

SEQ ID NO: 20304 - DNA, 20 bp, synthetic construct
  misc_feature 1..20: note = chemically synthesized
  source 1..20: mol_type = other DNA
gggacacagtcaagctgtat

SEQ ID NO: 20305 - DNA, 20 bp, synthetic construct
  misc_feature 1..20: note = chemically synthesized
  source 1..20: mol_type = other DNA
agctgtatcagggtacaagc

SEQ ID NO: 20306 - DNA, 20 bp, synthetic construct
  misc_feature 1..20: note = chemically synthesized
  source 1..20: mol_type = other DNA
agtggaccatcacctgaaaa

SEQ ID NO: 20307 - DNA, 20 bp, synthetic construct
  misc_feature 1..20: note = chemically synthesized
  source 1..20: mol_type = other DNA
ctgtgtttgactttctgttt

SEQ ID NO: 20308 - DNA, 20 bp, synthetic construct
  misc_feature 1..20: note = chemically synthesized
  source 1..20: mol_type = other DNA
tgtttctgagttatttcact

SEQ ID NO: 20309 - DNA, 20 bp, synthetic construct
  misc_feature 1..20: note = chemically synthesized
  source 1..20: mol_type = other DNA
gatttcattcttttttatgg

SEQ ID NO: 20310 - DNA, 20 bp, synthetic construct
  misc_feature 1..20: note = chemically synthesized
  source 1..20: mol_type = other DNA
ttaatatgatctctttcact

SEQ ID NO: 20311 - DNA, 20 bp, synthetic construct
  misc_feature 1..20: note = chemically synthesized
  source 1..20: mol_type = other DNA
tttgggtccatacccagtag

SEQ ID NO: 20312 - DNA, 20 bp, synthetic construct
  misc_feature 1..20: note = chemically synthesized
  source 1..20: mol_type = other DNA
catacccagtagtgggattg

SEQ ID NO: 20313 - DNA, 20 bp, synthetic construct
  misc_feature 1..20: note = chemically synthesized
  source 1..20: mol_type = other DNA
ccagtagtgggattgcagga

SEQ ID NO: 20314 - DNA, 20 bp, synthetic construct
  misc_feature 1..20: note = chemically synthesized
  source 1..20: mol_type = other DNA
cctgagctcactgtatttgt

SEQ ID NO: 20315 - DNA, 20 bp, synthetic construct
  misc_feature 1..20: note = chemically synthesized
  source 1..20: mol_type = other DNA
atatagatttagatataaaa

SEQ ID NO: 20316 - DNA, 20 bp, synthetic construct
  misc_feature 1..20: note = chemically synthesized
  source 1..20: mol_type = other DNA
agtcccaaagctgaaggact

SEQ ID NO: 20317 - DNA, 20 bp, synthetic construct
  misc_feature 1..20: note = chemically synthesized
  source 1..20: mol_type = other DNA
gcttggaggctaagccagtc

SEQ ID NO: 20318 - DNA, 20 bp, synthetic construct
  misc_feature 1..20: note = chemically synthesized
  source 1..20: mol_type = other DNA
agatggtgcccacccagatt

SEQ ID NO: 20319 - DNA, 20 bp, synthetic construct
  misc_feature 1..20: note = chemically synthesized
  source 1..20: mol_type = other DNA
ggtgcccacccagattaagg

SEQ ID NO: 20320 - DNA, 20 bp, synthetic construct
  misc_feature 1..20: note = chemically synthesized
  source 1..20: mol_type = other DNA
aataccctcacagacacact

SEQ ID NO: 20321 - DNA, 20 bp, synthetic construct
  misc_feature 1..20: note = chemically synthesized
  source 1..20: mol_type = other DNA
tttttttttttttttcctgg

SEQ ID NO: 20322 - DNA, 20 bp, synthetic construct
  misc_feature 1..20: note = chemically synthesized
  source 1..20: mol_type = other DNA
cctttatttgtagtcctgcc

SEQ ID NO: 20323 - DNA, 20 bp, synthetic construct
  misc_feature 1..20: note = chemically synthesized
  source 1..20: mol_type = other DNA
taaaactaagagacacccta

SEQ ID NO: 20324 - DNA, 20 bp, synthetic construct
  misc_feature 1..20: note = chemically synthesized
  source 1..20: mol_type = other DNA
acgcttccttacctccattg

SEQ ID NO: 20325 - DNA, 20 bp, synthetic construct
  misc_feature 1..20: note = chemically synthesized
  source 1..20: mol_type = other DNA
actgatttcatcttgatagt

SEQ ID NO: 20326 - DNA, 20 bp, synthetic construct
  misc_feature 1..20: note = chemically synthesized
  source 1..20: mol_type = other DNA
aatcttaatttgcagtttaa

SEQ ID NO: 20327 - DNA, 20 bp, synthetic construct
  misc_feature 1..20: note = chemically synthesized
  source 1..20: mol_type = other DNA
aattttgctagtggaacact

SEQ ID NO: 20328 - DNA, 20 bp, synthetic construct
  misc_feature 1..20: note = chemically synthesized
  source 1..20: mol_type = other DNA
gtggaacactaggggtgatg

SEQ ID NO: 20329 - DNA, 20 bp, synthetic construct
  misc_feature 1..20: note = chemically synthesized
  source 1..20: mol_type = other DNA
accctttgattcctggaccc

SEQ ID NO: 20330 - DNA, 20 bp, synthetic construct
  misc_feature 1..20: note = chemically synthesized
  source 1..20: mol_type = other DNA
aggccattcaaaagctgctt

SEQ ID NO: 20331 - DNA, 20 bp, synthetic construct
  misc_feature 1..20: note = chemically synthesized
  source 1..20: mol_type = other DNA
aaaagctgcttcaggatgat

SEQ ID NO: 20332 - DNA, 20 bp, synthetic construct
  misc_feature 1..20: note = chemically synthesized
  source 1..20: mol_type = other DNA
cacacttctttagccataaa

SEQ ID NO: 20333 - DNA, 20 bp, synthetic construct
  misc_feature 1..20: note = chemically synthesized
  source 1..20: mol_type = other DNA
tggtcagaagcaatgctgtg

SEQ ID NO: 20334 - DNA, 20 bp, synthetic construct
  misc_feature 1..20: note = chemically synthesized
  source 1..20: mol_type = other DNA
ctgtgtggaataccatgaca

SEQ ID NO: 20335 - DNA, 20 bp, synthetic construct
  misc_feature 1..20: note = chemically synthesized
  source 1..20: mol_type = other DNA
atacggcattctgtgattcc

SEQ ID NO: 20336 - DNA, 20 bp, synthetic construct
  misc_feature 1..20: note = chemically synthesized
  source 1..20: mol_type = other DNA
tggtagtcttggcataagca

SEQ ID NO: 20337 - DNA, 20 bp, synthetic construct
  misc_feature 1..20: note = chemically synthesized
  source 1..20: mol_type = other DNA
cttggcataagcattgagtt

SEQ ID NO: 20338 - DNA, 20 bp, synthetic construct
  misc_feature 1..20: note = chemically synthesized
  source 1..20: mol_type = other DNA
aggattgggaaacccatatc

SEQ ID NO: 20339 - DNA, 20 bp, synthetic construct
  misc_feature 1..20: note = chemically synthesized
  source 1..20: mol_type = other DNA
gtagctggctgatcaccccg

SEQ ID NO: 20340 - DNA, 20 bp, synthetic construct
  misc_feature 1..20: note = chemically synthesized
  source 1..20: mol_type = other DNA
ctgtggccaggtcagctttg

SEQ ID NO: 20341 - DNA, 20 bp, synthetic construct
  misc_feature 1..20: note = chemically synthesized
  source 1..20: mol_type = other DNA
caactgtggccactttgttc

SEQ ID NO: 20342 - DNA, 20 bp, synthetic construct
  misc_feature 1..20: note = chemically synthesized
  source 1..20: mol_type = other DNA
tgggtccattggacgatgac

SEQ ID NO: 20343 - DNA, 20 bp, synthetic construct
  misc_feature 1..20: note = chemically synthesized
  source 1..20: mol_type = other DNA
atgagtggcctgggaaaagg

SEQ ID NO: 20344 - DNA, 20 bp, synthetic construct
  misc_feature 1..20: note = chemically synthesized
  source 1..20: mol_type = other DNA
aaaaggctgagtggtgtcca

SEQ ID NO: 20345 - DNA, 20 bp, synthetic construct
  misc_feature 1..20: note = chemically synthesized
  source 1..20: mol_type = other DNA
cccattggtgagcactcaca

SEQ ID NO: 20346 - DNA, 20 bp, synthetic construct
  misc_feature 1..20: note = chemically synthesized
  source 1..20: mol_type = other DNA
caaacctttggctacagccc

SEQ ID NO: 20347 - DNA, 20 bp, synthetic construct
  misc_feature 1..20: note = chemically synthesized
  source 1..20: mol_type = other DNA
tcccttcaccgttgtccttc

SEQ ID NO: 20348 - DNA, 20 bp, synthetic construct
  misc_feature 1..20: note = chemically synthesized
  source 1..20: mol_type = other DNA
agtgctgcggctgtccactt

SEQ ID NO: 20349 - DNA, 20 bp, synthetic construct
  misc_feature 1..20: note = chemically synthesized
  source 1..20: mol_type = other DNA
gggagagaaagcagtgtgtc

SEQ ID NO: 20350 - DNA, 20 bp, synthetic construct
  misc_feature 1..20: note = chemically synthesized
  source 1..20: mol_type = other DNA
atgtaacttactagtgcctt

SEQ ID NO: 20351 - DNA, 20 bp, synthetic construct
  misc_feature 1..20: note = chemically synthesized
  source 1..20: mol_type = other DNA
acagcccactttatggctag

SEQ ID NO: 20352 - DNA, 20 bp, synthetic construct
  misc_feature 1..20: note = chemically synthesized
  source 1..20: mol_type = other DNA
caagagctttctccctaaaa

SEQ ID NO: 20353 - DNA, 20 bp, synthetic construct
  misc_feature 1..20: note = chemically synthesized
  source 1..20: mol_type = other DNA
cactgacacctcaagcatca

SEQ ID NO: 20354 - DNA, 20 bp, synthetic construct
  misc_feature 1..20: note = chemically synthesized
  source 1..20: mol_type = other DNA
cactcaaaactggcagcctt

SEQ ID NO: 20355 - DNA, 20 bp, synthetic construct
  misc_feature 1..20: note = chemically synthesized
  source 1..20: mol_type = other DNA
ggatcactcgataaatgggc

SEQ ID NO: 20356 - DNA, 20 bp, synthetic construct
  misc_feature 1..20: note = chemically synthesized
  source 1..20: mol_type = other DNA
cagagtaacacacccaaatc

SEQ ID NO: 20357 - DNA, 20 bp, synthetic construct
  misc_feature 1..20: note = chemically synthesized
  source 1..20: mol_type = other DNA
tgtgcctatttcttggttgt

SEQ ID NO: 20358 - DNA, 20 bp, synthetic construct
  misc_feature 1..20: note = chemically synthesized
  source 1..20: mol_type = other DNA
aaattatccttcactttaga

SEQ ID NO: 20359 - DNA, 20 bp, synthetic construct
  misc_feature 1..20: note = chemically synthesized
  source 1..20: mol_type = other DNA
tttactgaggtagaaggtcc

SEQ ID NO: 20360 - DNA, 20 bp, synthetic construct
  misc_feature 1..20: note = chemically synthesized
  source 1..20: mol_type = other DNA
aagattatggcacaaagctg

SEQ ID NO: 20361 - DNA, 20 bp, synthetic construct
  misc_feature 1..20: note = chemically synthesized
  source 1..20: mol_type = other DNA
gctggagagttgatatactc

SEQ ID NO: 20362 - DNA, 20 bp, synthetic construct
  misc_feature 1..20: note = chemically synthesized
  source 1..20: mol_type = other DNA
ttccttgcctctcacaagcg

SEQ ID NO: 20363 - DNA, 20 bp, synthetic construct
  misc_feature 1..20: note = chemically synthesized
  source 1..20: mol_type = other DNA
cctctcacaagcgttgaatc

SEQ ID NO: 20364 - DNA, 20 bp, synthetic construct
  misc_feature 1..20: note = chemically synthesized
  source 1..20: mol_type = other DNA
ctctctaaacaattgatgcc

SEQ ID NO: 20365 - DNA, 20 bp, synthetic construct
  misc_feature 1..20: note = chemically synthesized
  source 1..20: mol_type = other DNA
gttctccataccattagaag

SEQ ID NO: 20366 - DNA, 20 bp, synthetic construct
  misc_feature 1..20: note = chemically synthesized
  source 1..20: mol_type = other DNA
aagaagagtccttagcatat

SEQ ID NO: 20367 - DNA, 20 bp, synthetic construct
  misc_feature 1..20: note = chemically synthesized
  source 1..20: mol_type = other DNA
cctggtaccaaaatctgtat

SEQ ID NO: 20368 - DNA, 20 bp, synthetic construct
  misc_feature 1..20: note = chemically synthesized
  source 1..20: mol_type = other DNA
attagggttctacagagaaa

SEQ ID NO: 20369 - DNA, 20 bp, synthetic construct
  misc_feature 1..20: note = chemically synthesized
  source 1..20: mol_type = other DNA
ctctatatctatatctatat

SEQ ID NO: 20370 - DNA, 20 bp, synthetic construct
  misc_feature 1..20: note = chemically synthesized
  source 1..20: mol_type = other DNA
tgaggaacaaggaagctagt

SEQ ID NO: 20371 - DNA, 20 bp, synthetic construct
  misc_feature 1..20: note = chemically synthesized
  source 1..20: mol_type = other DNA
agtcccaaagctgaagaacc

SEQ ID NO: 20372 - DNA, 20 bp, synthetic construct
  misc_feature 1..20: note = chemically synthesized
  source 1..20: mol_type = other DNA
gttcaatgttccagggcagg

SEQ ID NO: 20373 - DNA, 20 bp, synthetic construct
  misc_feature 1..20: note = chemically synthesized
  source 1..20: mol_type = other DNA
catgggagaaaaatgtaggc

SEQ ID NO: 20374 - DNA, 20 bp, synthetic construct
  misc_feature 1..20: note = chemically synthesized
  source 1..20: mol_type = other DNA
agatggtgcccacccagatt

SEQ ID NO: 20375 - DNA, 20 bp, synthetic construct
  misc_feature 1..20: note = chemically synthesized
  source 1..20: mol_type = other DNA
ggtgcccacccagattaagg

SEQ ID NO: 20376 - DNA, 20 bp, synthetic construct
  misc_feature 1..20: note = chemically synthesized
  source 1..20: mol_type = other DNA
tgaggttggtttttttgttg

SEQ ID NO: 20377 - DNA, 20 bp, synthetic construct
  misc_feature 1..20: note = chemically synthesized
  source 1..20: mol_type = other DNA
tactctccttaattttcccc

SEQ ID NO: 20378 - DNA, 20 bp, synthetic construct
  misc_feature 1..20: note = chemically synthesized
  source 1..20: mol_type = other DNA
gttttctagatgtggacttg

SEQ ID NO: 20379 - DNA, 20 bp, synthetic construct
  misc_feature 1..20: note = chemically synthesized
  source 1..20: mol_type = other DNA
gtagcagcaatattagagga

SEQ ID NO: 20380 - DNA, 20 bp, synthetic construct
  misc_feature 1..20: note = chemically synthesized
  source 1..20: mol_type = other DNA
catacaaaacccctcagaca

SEQ ID NO: 20381 - DNA, 20 bp, synthetic construct
  misc_feature 1..20: note = chemically synthesized
  source 1..20: mol_type = other DNA
atctccaacaaccaagctct

SEQ ID NO: 20382 - DNA, 20 bp, synthetic construct
  misc_feature 1..20: note = chemically synthesized
  source 1..20: mol_type = other DNA
ttaagggcttacaactctaa

SEQ ID NO: 20383 - DNA, 20 bp, synthetic construct
  misc_feature 1..20: note = chemically synthesized
  source 1..20: mol_type = other DNA
gggctgcatgcactggtcat

SEQ ID NO: 20384 - DNA, 20 bp, synthetic construct
  misc_feature 1..20: note = chemically synthesized
  source 1..20: mol_type = other DNA
agaatggaacagaacaggac

SEQ ID NO: 20385 - DNA, 20 bp, synthetic construct
  misc_feature 1..20: note = chemically synthesized
  source 1..20: mol_type = other DNA
ctgcttttccatacagtgtc

SEQ ID NO: 20386 - DNA, 20 bp, synthetic construct
  misc_feature 1..20: note = chemically synthesized
  source 1..20: mol_type = other DNA
ataacataactggccaggtc

SEQ ID NO: 20387 - DNA, 20 bp, synthetic construct
  misc_feature 1..20: note = chemically synthesized
  source 1..20: mol_type = other DNA
ggtctatctttaaccaggcc

SEQ ID NO: 20388 - DNA, 20 bp, synthetic construct
  misc_feature 1..20: note = chemically synthesized
  source 1..20: mol_type = other DNA
tggtctcaggctgtttgcct

SEQ ID NO: 20389 - DNA, 20 bp, synthetic construct
  misc_feature 1..20: note = chemically synthesized
  source 1..20: mol_type = other DNA
attgggcataaaacaatatg

SEQ ID NO: 20390 - DNA, 20 bp, synthetic construct
  misc_feature 1..20: note = chemically synthesized
  source 1..20: mol_type = other DNA
ggaagagagaaataccatgt

SEQ ID NO: 20391 - DNA, 20 bp, synthetic construct
  misc_feature 1..20: note = chemically synthesized
  source 1..20: mol_type = other DNA
tgaaatacgtatttgtgtta

SEQ ID NO: 20392 - DNA, 20 bp, synthetic construct
  misc_feature 1..20: note = chemically synthesized
  source 1..20: mol_type = other DNA
tgtgttattggatttgacat

SEQ ID NO: 20393 - DNA, 20 bp, synthetic construct
  misc_feature 1..20: note = chemically synthesized
  source 1..20: mol_type = other DNA
tgagggcatgtatgatgaca

SEQ ID NO: 20394 - DNA, 20 bp, synthetic construct
  misc_feature 1..20: note = chemically synthesized
  source 1..20: mol_type = other DNA
aagggactttaaaacatgca

SEQ ID NO: 20395 - DNA, 20 bp, synthetic construct
  misc_feature 1..20: note = chemically synthesized
  source 1..20: mol_type = other DNA
taaataaatccttgggctta

SEQ ID NO: 20396 - DNA, 20 bp, synthetic construct
  misc_feature 1..20: note = chemically synthesized
  source 1..20: mol_type = other DNA
actttaaacaaattgctaac

SEQ ID NO: 20397 - DNA, 20 bp, synthetic construct
  misc_feature 1..20: note = chemically synthesized
  source 1..20: mol_type = other DNA
aaaggccaaaacaacagcag

SEQ ID NO: 20398 - DNA, 20 bp, synthetic construct
  misc_feature 1..20: note = chemically synthesized
  source 1..20: mol_type = other DNA
tcagaagagcagtggacgca

SEQ ID NO: 20399 - DNA, 20 bp, synthetic construct
  misc_feature 1..20: note = chemically synthesized
  source 1..20: mol_type = other DNA
atgctcaaaatatggaccta

SEQ ID NO: 20400 - DNA, 20 bp, synthetic construct
  misc_feature 1..20: note = chemically synthesized
  source 1..20: mol_type = other DNA
aaagaggtcaaatacctcaa

SEQ ID NO: 20401 - DNA, 20 bp, synthetic construct
  misc_feature 1..20: note = chemically synthesized
  source 1..20: mol_type = other DNA
catcatacatgccctcagca

SEQ ID NO: 20402 - DNA, 20 bp, synthetic construct
  misc_feature 1..20: note = chemically synthesized
  source 1..20: mol_type = other DNA
ctgctgtggttttcaattat

SEQ ID NO: 20403 - DNA, 20 bp, synthetic construct
  misc_feature 1..20: note = chemically synthesized
  source 1..20: mol_type = other DNA
tatgcccaatttctgcctcc

SEQ ID NO: 20404 - DNA, 20 bp, synthetic construct
  misc_feature 1..20: note = chemically synthesized
  source 1..20: mol_type = other DNA
gaagaagtaaaaactaaaag

SEQ ID NO: 20405 - DNA, 20 bp, synthetic construct
  misc_feature 1..20: note = chemically synthesized
  source 1..20: mol_type = other DNA
atgcagcttgtcctgctaca

SEQ ID NO: 20406 - DNA, 20 bp, synthetic construct
  misc_feature 1..20: note = chemically synthesized
  source 1..20: mol_type = other DNA
tggatccagcaagtccacat

SEQ ID NO: 20407 - DNA, 20 bp, synthetic construct
  misc_feature 1..20: note = chemically synthesized
  source 1..20: mol_type = other DNA
agcattatgatggcaaaaaa

SEQ ID NO: 20408 - DNA, 20 bp, synthetic construct
  misc_feature 1..20: note = chemically synthesized
  source 1..20: mol_type = other DNA
aaattagatgtggcctaggc

SEQ ID NO: 20409 - DNA, 20 bp, synthetic construct
  misc_feature 1..20: note = chemically synthesized
  source 1..20: mol_type = other DNA
acagagtaaacggataacct

SEQ ID NO: 20410 - DNA, 20 bp, synthetic construct
  misc_feature 1..20: note = chemically synthesized
  source 1..20: mol_type = other DNA
taaacggataacctacagaa

SEQ ID NO: 20411 - DNA, 20 bp, synthetic construct
  misc_feature 1..20: note = chemically synthesized
  source 1..20: mol_type = other DNA
atgcaacaaaaggctaatat

SEQ ID NO: 20412 - DNA, 20 bp, synthetic construct
  misc_feature 1..20: note = chemically synthesized
  source 1..20: mol_type = other DNA
caacaaaaaaaccaacctca

SEQ ID NO: 20413 - DNA, 20 bp, synthetic construct
  misc_feature 1..20: note = chemically synthesized
  source 1..20: mol_type = other DNA
acagccaggatataaagcag

SEQ ID NO: 20414 - DNA, 20 bp, synthetic construct
  misc_feature 1..20: note = chemically synthesized
  source 1..20: mol_type = other DNA
ccaggagtggttctagagga

SEQ ID NO: 20415 - DNA, 20 bp, synthetic construct
  misc_feature 1..20: note = chemically synthesized
  source 1..20: mol_type = other DNA
taatacttttgactatatgt

SEQ ID NO: 20416 - DNA, 20 bp, synthetic construct
  misc_feature 1..20: note = chemically synthesized
  source 1..20: mol_type = other DNA
gttcgctggacaaagtgatg

SEQ ID NO: 20417 - DNA, 20 bp, synthetic construct
  misc_feature 1..20: note = chemically synthesized
  source 1..20: mol_type = other DNA
catttggccactcttacaac

SEQ ID NO: 20418 - DNA, 20 bp, synthetic construct
  misc_feature 1..20: note = chemically synthesized
  source 1..20: mol_type = other DNA
agataactactctcttttag

SEQ ID NO: 20419 - DNA, 20 bp, synthetic construct
  misc_feature 1..20: note = chemically synthesized
  source 1..20: mol_type = other DNA
gaaggcactagtaagttaca

SEQ ID NO: 20420 - DNA, 20 bp, synthetic construct
  misc_feature 1..20: note = chemically synthesized
  source 1..20: mol_type = other DNA
gttgtgcactttgcacagaa

SEQ ID NO: 20421 - DNA, 20 bp, synthetic construct
  misc_feature 1..20: note = chemically synthesized
  source 1..20: mol_type = other DNA
atgactggaaaattgatgac

SEQ ID NO: 20422 - DNA, 20 bp, synthetic construct
  misc_feature 1..20: note = chemically synthesized
  source 1..20: mol_type = other DNA
agactaccatccatggaatc

SEQ ID NO: 20423 - DNA, 20 bp, synthetic construct
  misc_feature 1..20: note = chemically synthesized
  source 1..20: mol_type = other DNA
ttgctgagggcaaagggaat

SEQ ID NO: 20424 - DNA, 20 bp, synthetic construct
  misc_feature 1..20: note = chemically synthesized
  source 1..20: mol_type = other DNA
gtgtctgtatacacttgtac

SEQ ID NO: 20425 - DNA, 20 bp, synthetic construct
  misc_feature 1..20: note = chemically synthesized
  source 1..20: mol_type = other DNA
gtggccaggatataaagcag

SEQ ID NO: 20426 - DNA, 20 bp, synthetic construct
  misc_feature 1..20: note = chemically synthesized
  source 1..20: mol_type = other DNA
gttcaacatcactaataatc

SEQ ID NO: 20427 - DNA, 20 bp, synthetic construct
  misc_feature 1..20: note = chemically synthesized
  source 1..20: mol_type = other DNA
atgatacctccttatgccag

SEQ ID NO: 20428 - DNA, 20 bp, synthetic construct
  misc_feature 1..20: note = chemically synthesized
  source 1..20: mol_type = other DNA
tgttggtgaggatgtggaga

SEQ ID NO: 20429 - DNA, 20 bp, synthetic construct
  misc_feature 1..20: note = chemically synthesized
  source 1..20: mol_type = other DNA
aaatgcttatacactgttgg

SEQ ID NO: 20430 - DNA, 20 bp, synthetic construct
  misc_feature 1..20: note = chemically synthesized
  source 1..20: mol_type = other DNA
catgaagatttcttaaagaa

SEQ ID NO: 20431 - DNA, 20 bp, synthetic construct
  misc_feature 1..20: note = chemically synthesized
  source 1..20: mol_type = other DNA
ctaccaatggacgattggat

SEQ ID NO: 20432 - DNA, 20 bp, synthetic construct
  misc_feature 1..20: note = chemically synthesized
  source 1..20: mol_type = other DNA
atatattactcagccataaa

SEQ ID NO: 20433 - DNA, 20 bp, synthetic construct
  misc_feature 1..20: note = chemically synthesized
  source 1..20: mol_type = other DNA
agaatgaaatcatgtcttct

SEQ ID NO: 20434 - DNA, 20 bp, synthetic construct
  misc_feature 1..20: note = chemically synthesized
  source 1..20: mol_type = other DNA
attatcctcagtgaaataac

SEQ ID NO: 20435 - DNA, 20 bp, synthetic construct
  misc_feature 1..20: note = chemically synthesized
  source 1..20: mol_type = other DNA
ctcagtgaaataactcagaa

SEQ ID NO: 20436 - DNA, 20 bp, synthetic construct
  misc_feature 1..20: note = chemically synthesized
  source 1..20: mol_type = other DNA
cgatgagtaagcatagacat

SEQ ID NO: 20437 - DNA, 20 bp, synthetic construct
  misc_feature 1..20: note = chemically synthesized
  source 1..20: mol_type = other DNA
aataatagacacttgagact

SEQ ID NO: 20438 - DNA, 20 bp, synthetic construct
  misc_feature 1..20: note = chemically synthesized
  source 1..20: mol_type = other DNA
aatggggtaattaaaagggt

SEQ ID NO: 20439 - DNA, 20 bp, synthetic construct
  misc_feature 1..20: note = chemically synthesized
  source 1..20: mol_type = other DNA
cactaaataataatcacatg

SEQ ID NO: 20440 - DNA, 20 bp, synthetic construct
  misc_feature 1..20: note = chemically synthesized
  source 1..20: mol_type = other DNA
gctagagcaaggggatgact

SEQ ID NO: 20441 - DNA, 20 bp, synthetic construct
  misc_feature 1..20: note = chemically synthesized
  source 1..20: mol_type = other DNA
ctacacaagctaattgtcct

SEQ ID NO: 20442 - DNA, 20 bp, synthetic construct
  misc_feature 1..20: note = chemically synthesized
  source 1..20: mol_type = other DNA
tcagatgttatgtgatgagg

SEQ ID NO: 20443 - DNA, 20 bp, synthetic construct
  misc_feature 1..20: note = chemically synthesized
  source 1..20: mol_type = other DNA
atagaacacatgaggaggaa

SEQ ID NO: 20444 - DNA, 20 bp, synthetic construct
  misc_feature 1..20: note = chemically synthesized
  source 1..20: mol_type = other DNA
tcctcaaattctggacaatt

SEQ ID NO: 20445 - DNA, 20 bp, synthetic construct
  misc_feature 1..20: note = chemically synthesized
  source 1..20: mol_type = other DNA
cacaaaaatgcaaaatttcc

SEQ ID NO: 20446 - DNA, 20 bp, synthetic construct
  misc_feature 1..20: note = chemically synthesized
  source 1..20: mol_type = other DNA
cttcatcttcatcttttcca

SEQ ID NO: 20447 - DNA, 20 bp, synthetic construct
  misc_feature 1..20: note = chemically synthesized
  source 1..20: mol_type = other DNA
gaaatagagattctttattt

SEQ ID NO: 20448 - DNA, 20 bp, synthetic construct
  misc_feature 1..20: note = chemically synthesized
  source 1..20: mol_type = other DNA
tgatttgggaaatgaaatga

SEQ ID NO: 20449 - DNA, 20 bp, synthetic construct
  misc_feature 1..20: note = chemically synthesized
  source 1..20: mol_type = other DNA
gattatgctctttcagtcta

SEQ ID NO: 20450 - DNA, 20 bp, synthetic construct
  misc_feature 1..20: note = chemically synthesized
  source 1..20: mol_type = other DNA
acaaagaaccaaaatagtaa

SEQ ID NO: 20451 - DNA, 20 bp, synthetic construct
  misc_feature 1..20: note = chemically synthesized
  source 1..20: mol_type = other DNA
agtagaaaatcccacataag

SEQ ID NO: 20452 - DNA, 20 bp, synthetic construct
  misc_feature 1..20: note = chemically synthesized
  source 1..20: mol_type = other DNA
ctacacatttataagctccc

SEQ ID NO: 20453 - DNA, 20 bp, synthetic construct
  misc_feature 1..20: note = chemically synthesized
  source 1..20: mol_type = other DNA
aagcaaactgcctgaaggcc

SEQ ID NO: 20454 - DNA, 20 bp, synthetic construct
  misc_feature 1..20: note = chemically synthesized
  source 1..20: mol_type = other DNA
gactatgctgctgtatgcac

SEQ ID NO: 20455 - DNA, 20 bp, synthetic construct
  misc_feature 1..20: note = chemically synthesized
  source 1..20: mol_type = other DNA
atcaacaccaagatacatct

SEQ ID NO: 20456 - DNA, 20 bp, synthetic construct
  misc_feature 1..20: note = chemically synthesized
  source 1..20: mol_type = other DNA
caaaataaacataaaaaggt

SEQ ID NO: 20457 - DNA, 20 bp, synthetic construct
  misc_feature 1..20: note = chemically synthesized
  source 1..20: mol_type = other DNA
catttataaaattctggaaa

SEQ ID NO: 20458 - DNA, 20 bp, synthetic construct
  misc_feature 1..20: note = chemically synthesized
  source 1..20: mol_type = other DNA
agaactcagataaacaataa

SEQ ID NO: 20459 - DNA, 20 bp, synthetic construct
  misc_feature 1..20: note = chemically synthesized
  source 1..20: mol_type = other DNA
agataaacaataaaaagaaa

SEQ ID NO: 20460 - DNA, 20 bp, synthetic construct
  misc_feature 1..20: note = chemically synthesized
  source 1..20: mol_type = other DNA
aaaacaattcaggatatgaa

SEQ ID NO: 20461 - DNA, 20 bp, synthetic construct
  misc_feature 1..20: note = chemically synthesized
  source 1..20: mol_type = other DNA
tacccaagagatagatacaa

SEQ ID NO: 20462 - DNA, 20 bp, synthetic construct
  misc_feature 1..20: note = chemically synthesized
  source 1..20: mol_type = other DNA
atacaacaagaatgaaccaa

SEQ ID NO: 20463 - DNA, 20 bp, synthetic construct
  misc_feature 1..20: note = chemically synthesized
  source 1..20: mol_type = other DNA
tgtaactgaagagtttattg

SEQ ID NO: 20464 - DNA, 20 bp, synthetic construct
  misc_feature 1..20: note = chemically synthesized
  source 1..20: mol_type = other DNA
acaatagatcagatcaagca

SEQ ID NO: 20465 - DNA, 20 bp, synthetic construct
  misc_feature 1..20: note = chemically synthesized
  source 1..20: mol_type = other DNA
taaaattagctggtcaaatg

SEQ ID NO: 20466 - DNA, 20 bp, synthetic construct
  misc_feature 1..20: note = chemically synthesized
  source 1..20: mol_type = other DNA
aaatgatagaaaggaaaaaa

SEQ ID NO: 20467 - DNA, 20 bp, synthetic construct
  misc_feature 1..20: note = chemically synthesized
  source 1..20: mol_type = other DNA
tgaaaacttgtcaagtctag

SEQ ID NO: 20468 - DNA, 20 bp, synthetic construct
  misc_feature 1..20: note = chemically synthesized
  source 1..20: mol_type = other DNA
gacatccagacaaatgaaaa

SEQ ID NO: 20469 - DNA, 20 bp, synthetic construct
  misc_feature 1..20: note = chemically synthesized
  source 1..20: mol_type = other DNA
gattaacagcagatttctca

SEQ ID NO: 20470 - DNA, 20 bp, synthetic construct
  misc_feature 1..20: note = chemically synthesized
  source 1..20: mol_type = other DNA
atgatatattcaaaatagtg

SEQ ID NO: 20471 - DNA, 20 bp, synthetic construct
  misc_feature 1..20: note = chemically synthesized
  source 1..20: mol_type = other DNA
taaataaaatcttttctggg

SEQ ID NO: 20472 - DNA, 20 bp, synthetic construct
  misc_feature 1..20: note = chemically synthesized
  source 1..20: mol_type = other DNA
ctatcactagactggcttta

SEQ ID NO: 20473 - DNA, 20 bp, synthetic construct
  misc_feature 1..20: note = chemically synthesized
  source 1..20: mol_type = other DNA
gagcaaaacacaaataaaga

SEQ ID NO: 20474 - DNA, 20 bp, synthetic construct
  misc_feature 1..20: note = chemically synthesized
  source 1..20: mol_type = other DNA
agaactcaaacgttaccact

SEQ ID NO: 20475 - DNA, 20 bp, synthetic construct
  misc_feature 1..20: note = chemically synthesized
  source 1..20: mol_type = other DNA
caaaccacaatcataaataa

SEQ ID NO: 20476 - DNA, 20 bp, synthetic construct
  misc_feature 1..20: note = chemically synthesized
  source 1..20: mol_type = other DNA
ccacaatcataaataataag

SEQ ID NO: 20477 - DNA, 20 bp, synthetic construct
  misc_feature 1..20: note = chemically synthesized
  source 1..20: mol_type = other DNA
aatcataaataataagaaag

SEQ ID NO: 20478 - DNA, 20 bp, synthetic construct
  misc_feature 1..20: note = chemically synthesized
  source 1..20: mol_type = other DNA
ataaataataagaaagaaag

SEQ ID NO: 20479 - DNA, 20 bp, synthetic construct
  misc_feature 1..20: note = chemically synthesized
  source 1..20: mol_type = other DNA
ataataagaaagaaagaaag

SEQ ID NO: 20480 - DNA, 20 bp, synthetic construct
  misc_feature 1..20: note = chemically synthesized
  source 1..20: mol_type = other DNA
agaaagaaagagagagagag

SEQ ID NO: 20481 - DNA, 20 bp, synthetic construct
  misc_feature 1..20: note = chemically synthesized
  source 1..20: mol_type = other DNA
agagagagagagagagaatg

SEQ ID NO: 20482 - DNA, 20 bp, synthetic construct
  misc_feature 1..20: note = chemically synthesized
  source 1..20: mol_type = other DNA
agagagagagagaatgaaag

SEQ ID NO: 20483 - DNA, 20 bp, synthetic construct
  misc_feature 1..20: note = chemically synthesized
  source 1..20: mol_type = other DNA
aagaaagaaaaggaaggaag

SEQ ID NO: 20484 - DNA, 20 bp, synthetic construct
  misc_feature 1..20: note = chemically synthesized
  source 1..20: mol_type = other DNA
acccagttgtaagctgccta

SEQ ID NO: 20485 - DNA, 20 bp, synthetic construct
  misc_feature 1..20: note = chemically synthesized
  source 1..20: mol_type = other DNA
atgaaagatcttccatacaa

SEQ ID NO: 20486 - DNA, 20 bp, synthetic construct
  misc_feature 1..20: note = chemically synthesized
  source 1..20: mol_type = other DNA
tattagatataaagggtgaa

SEQ ID NO: 20487 - DNA, 20 bp, synthetic construct
  misc_feature 1..20: note = chemically synthesized
  source 1..20: mol_type = other DNA
gcatcagatagatcatctag

SEQ ID NO: 20488 - DNA, 20 bp, synthetic construct
  misc_feature 1..20: note = chemically synthesized
  source 1..20: mol_type = other DNA
catctagacagaaaattaac

SEQ ID NO: 20489 - DNA, 20 bp, synthetic construct
  misc_feature 1..20: note = chemically synthesized
  source 1..20: mol_type = other DNA
caatatttcatccaacagct

SEQ ID NO: 20490 - DNA, 20 bp, synthetic construct
  misc_feature 1..20: note = chemically synthesized
  source 1..20: mol_type = other DNA
cagaccacaatggaataaaa

SEQ ID NO: 20491 - DNA, 20 bp, synthetic construct
  misc_feature 1..20: note = chemically synthesized
  source 1..20: mol_type = other DNA
ataaaactagaaatcaataa

SEQ ID NO: 20492 - DNA, 20 bp, synthetic construct
  misc_feature 1..20: note = chemically synthesized
  source 1..20: mol_type = other DNA
ctgaatgaacgttatgtcaa

SEQ ID NO: 20493 - DNA, 20 bp, synthetic construct
  misc_feature 1..20: note = chemically synthesized
  source 1..20: mol_type = other DNA
taaacacttaaattaaaaac

SEQ ID NO: 20494 - DNA, 20 bp, synthetic construct
  misc_feature 1..20: note = chemically synthesized
  source 1..20: mol_type = other DNA
taatcatgtacctcaacaag

SEQ ID NO: 20495 - DNA, 20 bp, synthetic construct
  misc_feature 1..20: note = chemically synthesized
  source 1..20: mol_type = other DNA
aacccaaaactagcagaagg

SEQ ID NO: 20496 - DNA, 20 bp, synthetic construct
  misc_feature 1..20: note = chemically synthesized
  source 1..20: mol_type = other DNA
acagaagaacttaatgaaat

SEQ ID NO: 20497 - DNA, 20 bp, synthetic construct
  misc_feature 1..20: note = chemically synthesized
  source 1..20: mol_type = other DNA
atagctctagctagactaac

SEQ ID NO: 20498 - DNA, 20 bp, synthetic construct
  misc_feature 1..20: note = chemically synthesized
  source 1..20: mol_type = other DNA
aaaagagaagagactgaaat

SEQ ID NO: 20499 - DNA, 20 bp, synthetic construct
  misc_feature 1..20: note = chemically synthesized
  source 1..20: mol_type = other DNA
agagactgaaataaagaaaa

SEQ ID NO: 20500 - DNA, 20 bp, synthetic construct
  misc_feature 1..20: note = chemically synthesized
  source 1..20: mol_type = other DNA
taaagaaaatcagaaataaa

SEQ ID NO: 20501 - DNA, 20 bp, synthetic construct
  misc_feature 1..20: note = chemically synthesized
  source 1..20: mol_type = other DNA
aatatattacaaccgatacc

SEQ ID NO: 20502 - DNA, 20 bp, synthetic construct
  misc_feature 1..20: note = chemically synthesized
  source 1..20: mol_type = other DNA
ttacaaccgataccacagaa

SEQ ID NO: 20503 - DNA, 20 bp, synthetic construct
  misc_feature 1..20: note = chemically synthesized
  source 1..20: mol_type = other DNA
accacctaccaagattgaat

SEQ ID NO: 20504 - DNA, 20 bp, synthetic construct
  misc_feature 1..20: note = chemically synthesized
  source 1..20: mol_type = other DNA
cctaccaagattgaattaag

SEQ ID NO: 20505 - DNA, 20 bp, synthetic construct
  misc_feature 1..20: note = chemically synthesized
  source 1..20: mol_type = other DNA
caagattgaattaagaaaga

SEQ ID NO: 20506 - DNA, 20 bp, synthetic construct
  misc_feature 1..20: note = chemically synthesized
  source 1..20: mol_type = other DNA
gtagtaaaaagtctcccaaa

SEQ ID NO: 20507 - DNA, 20 bp, synthetic construct
  misc_feature 1..20: note = chemically synthesized
  source 1..20: mol_type = other DNA
tcaaattttaccaaactttc

SEQ ID NO: 20508 - DNA, 20 bp, synthetic construct
  misc_feature 1..20: note = chemically synthesized
  source 1..20: mol_type = other DNA
atatgatcatctcaatagat

SEQ ID NO: 20509 - DNA, 20 bp, synthetic construct
  misc_feature 1..20: note = chemically synthesized
  source 1..20: mol_type = other DNA
ctagccacagctttcaggtc

SEQ ID NO: 20510 - DNA, 20 bp, synthetic construct
  misc_feature 1..20: note = chemically synthesized
  source 1..20: mol_type = other DNA
ccacagctttcaggtcagag

SEQ ID NO: 20511 - DNA, 20 bp, synthetic construct
  misc_feature 1..20: note = chemically synthesized
  source 1..20: mol_type = other DNA
agctttcaggtcagagaaag

SEQ ID NO: 20512 - DNA, 20 bp, synthetic construct
  misc_feature 1..20: note = chemically synthesized
  source 1..20: mol_type = other DNA
ttcaggtcagagaaagaaag

SEQ ID NO: 20513 - DNA, 20 bp, synthetic construct
  misc_feature 1..20: note = chemically synthesized
  source 1..20: mol_type = other DNA
cagatgacatgattttatac

SEQ ID NO: 20514 - DNA, 20 bp, synthetic construct
  misc_feature 1..20: note = chemically synthesized
  source 1..20: mol_type = other DNA
aaaactacaaaacactgata

SEQ ID NO: 20515 - DNA, 20 bp, synthetic construct
  misc_feature 1..20: note = chemically synthesized
  source 1..20: mol_type = other DNA
tgataaaagaattgaaaagg

SEQ ID NO: 20516 - DNA, 20 bp, synthetic construct
  misc_feature 1..20: note = chemically synthesized
  source 1..20: mol_type = other DNA
agatatcctatgttcatgga

SEQ ID NO: 20517 - DNA, 20 bp, synthetic construct
  misc_feature 1..20: note = chemically synthesized
  source 1..20: mol_type = other DNA
aaatagcaatgtcatttttc

SEQ ID NO: 20518 - DNA, 20 bp, synthetic construct
  misc_feature 1..20: note = chemically synthesized
  source 1..20: mol_type = other DNA
cagacacttagaccaatgga

SEQ ID NO: 20519 - DNA, 20 bp, synthetic construct
  misc_feature 1..20: note = chemically synthesized
  source 1..20: mol_type = other DNA
aatggaagagaatagagaac

SEQ ID NO: 20520 - DNA, 20 bp, synthetic construct
  misc_feature 1..20: note = chemically synthesized
  source 1..20: mol_type = other DNA
cagattttcaacaaaggtga

SEQ ID NO: 20521 - DNA, 20 bp, synthetic construct
  misc_feature 1..20: note = chemically synthesized
  source 1..20: mol_type = other DNA
tgaggaaaggacacagtgtt

SEQ ID NO: 20522 - DNA, 20 bp, synthetic construct
  misc_feature 1..20: note = chemically synthesized
  source 1..20: mol_type = other DNA
ccattggatatccatgtgca

SEQ ID NO: 20523 - DNA, 20 bp, synthetic construct
  misc_feature 1..20: note = chemically synthesized
  source 1..20: mol_type = other DNA
cctaaacacacactcccact

SEQ ID NO: 20524 - DNA, 20 bp, synthetic construct
  misc_feature 1..20: note = chemically synthesized
  source 1..20: mol_type = other DNA
tacaggtgtagaggaagcag

SEQ ID NO: 20525 - DNA, 20 bp, synthetic construct
  misc_feature 1..20: note = chemically synthesized
  source 1..20: mol_type = other DNA
agaacaattactaatagacc

SEQ ID NO: 20526 - DNA, 20 bp, synthetic construct
  misc_feature 1..20: note = chemically synthesized
  source 1..20: mol_type = other DNA
gcactagacagttcatcaag

SEQ ID NO: 20527 - DNA, 20 bp, synthetic construct
  misc_feature 1..20: note = chemically synthesized
  source 1..20: mol_type = other DNA
caggaccagatggattcaca

SEQ ID NO: 20528 - DNA, 20 bp, synthetic construct
  misc_feature 1..20: note = chemically synthesized
  source 1..20: mol_type = other DNA
cagggaaggacataaccaaa

SEQ ID NO: 20529 - DNA, 20 bp, synthetic construct
  misc_feature 1..20: note = chemically synthesized
  source 1..20: mol_type = other DNA
acatgatcatctcaatagat

SEQ ID NO: 20530 - DNA, 20 bp, synthetic construct
  misc_feature 1..20: note = chemically synthesized
  source 1..20: mol_type = other DNA
ccagggcaatcagacaaaac

SEQ ID NO: 20531 - DNA, 20 bp, synthetic construct
  misc_feature 1..20: note = chemically synthesized
  source 1..20: mol_type = other DNA
ttaaaaccctaaagactcct

SEQ ID NO: 20532 - DNA, 20 bp, synthetic construct
  misc_feature 1..20: note = chemically synthesized
  source 1..20: mol_type = other DNA
tacaccaacagcaaccaaat

SEQ ID NO: 20533 - DNA, 20 bp, synthetic construct
  misc_feature 1..20: note = chemically synthesized
  source 1..20: mol_type = other DNA
ttaaaactataaaactacta

SEQ ID NO: 20534 - DNA, 20 bp, synthetic construct
  misc_feature 1..20: note = chemically synthesized
  source 1..20: mol_type = other DNA
aagagacaagctgttgaatg

SEQ ID NO: 20535 - DNA, 20 bp, synthetic construct
  misc_feature 1..20: note = chemically synthesized
  source 1..20: mol_type = other DNA
atttgacaaggaattaatct

SEQ ID NO: 20536 - DNA, 20 bp, synthetic construct
  misc_feature 1..20: note = chemically synthesized
  source 1..20: mol_type = other DNA
gaattaatctccagaatata

SEQ ID NO: 20537 - DNA, 20 bp, synthetic construct
  misc_feature 1..20: note = chemically synthesized
  source 1..20: mol_type = other DNA
gctcaacattactaatcatc

SEQ ID NO: 20538 - DNA, 20 bp, synthetic construct
  misc_feature 1..20: note = chemically synthesized
  source 1..20: mol_type = other DNA
gagatatcatcttatgccag

SEQ ID NO: 20539 - DNA, 20 bp, synthetic construct
  misc_feature 1..20: note = chemically synthesized
  source 1..20: mol_type = other DNA
ctgggtatttatccaaagga

SEQ ID NO: 20540 - DNA, 20 bp, synthetic construct
  misc_feature 1..20: note = chemically synthesized
  source 1..20: mol_type = other DNA
tttatccaaaggaaaagaat

SEQ ID NO: 20541 - DNA, 20 bp, synthetic construct
  misc_feature 1..20: note = chemically synthesized
  source 1..20: mol_type = other DNA
gtgtccatcaatggatgaat

SEQ ID NO: 20542 - DNA, 20 bp, synthetic construct
  misc_feature 1..20: note = chemically synthesized
  source 1..20: mol_type = other DNA
ttaaacgaaataagccaggc

SEQ ID NO: 20543 - DNA, 20 bp, synthetic construct
  misc_feature 1..20: note = chemically synthesized
  source 1..20: mol_type = other DNA
taatatcatgtaggtagaga

SEQ ID NO: 20544 - DNA, 20 bp, synthetic construct
  misc_feature 1..20: note = chemically synthesized
  source 1..20: mol_type = other DNA
tgtaggtagagagtagaatg

SEQ ID NO: 20545 - DNA, 20 bp, synthetic construct
  misc_feature 1..20: note = chemically synthesized
  source 1..20: mol_type = other DNA
gaatgacagaaaccagaggt

SEQ ID NO: 20546 - DNA, 20 bp, synthetic construct
  misc_feature 1..20: note = chemically synthesized
  source 1..20: mol_type = other DNA
ttgtatatttcaaaatagta

SEQ ID NO: 20547 - DNA, 20 bp, synthetic construct
  misc_feature 1..20: note = chemically synthesized
  source 1..20: mol_type = other DNA
tcttgaaatgttcctaacac

SEQ ID NO: 20548 - DNA, 20 bp, synthetic construct
  misc_feature 1..20: note = chemically synthesized
  source 1..20: mol_type = other DNA
aaacacgtcatatatcaata

SEQ ID NO: 20549 - DNA, 20 bp, synthetic construct
  misc_feature 1..20: note = chemically synthesized
  source 1..20: mol_type = other DNA
caaacttctctcttaacaag

SEQ ID NO: 20550 - DNA, 20 bp, synthetic construct
  misc_feature 1..20: note = chemically synthesized
  source 1..20: mol_type = other DNA
ggttttattctgacattaaa

SEQ ID NO: 20551 - DNA, 20 bp, synthetic construct
  misc_feature 1..20: note = chemically synthesized
  source 1..20: mol_type = other DNA
agtatcacaactttcacctg

SEQ ID NO: 20552 - DNA, 20 bp, synthetic construct
  misc_feature 1..20: note = chemically synthesized
  source 1..20: mol_type = other DNA
aatcactatttcaaagaagt

SEQ ID NO: 20553 - DNA, 20 bp, synthetic construct
  misc_feature 1..20: note = chemically synthesized
  source 1..20: mol_type = other DNA
tatacatattatacacatat

SEQ ID NO: 20554 - DNA, 20 bp, synthetic construct
  misc_feature 1..20: note = chemically synthesized
  source 1..20: mol_type = other DNA
tccacatcagtaattagggc

SEQ ID NO: 20555 - DNA, 20 bp, synthetic construct
  misc_feature 1..20: note = chemically synthesized
  source 1..20: mol_type = other DNA
attttatgaataaattttat

SEQ ID NO: 20556 - DNA, 20 bp, synthetic construct
  misc_feature 1..20: note = chemically synthesized
  source 1..20: mol_type = other DNA
tacaggtagattttatatat

SEQ ID NO: 20557 - DNA, 20 bp, synthetic construct
  misc_feature 1..20: note = chemically synthesized
  source 1..20: mol_type = other DNA
gtgagcctccatggccagct

SEQ ID NO: 20558 - DNA, 20 bp, synthetic construct
  misc_feature 1..20: note = chemically synthesized
  source 1..20: mol_type = other DNA
gagaaattttttaaatttct

SEQ ID NO: 20559 - DNA, 20 bp, synthetic construct
  misc_feature 1..20: note = chemically synthesized
  source 1..20: mol_type = other DNA
tttaaaagtggtggggggta

SEQ ID NO: 20560 - DNA, 20 bp, synthetic construct
  misc_feature 1..20: note = chemically synthesized
  source 1..20: mol_type = other DNA
gatccttttcattttgctct

SEQ ID NO: 20561 - DNA, 20 bp, synthetic construct
  misc_feature 1..20: note = chemically synthesized
  source 1..20: mol_type = other DNA
aagtgtgaagtcctcttctc

SEQ ID NO: 20562 - DNA, 20 bp, synthetic construct
  misc_feature 1..20: note = chemically synthesized
  source 1..20: mol_type = other DNA
tagatataatttctgaaggt

SEQ ID NO: 20563 - DNA, 20 bp, synthetic construct
  misc_feature 1..20: note = chemically synthesized
  source 1..20: mol_type = other DNA
gttctgagcaagtgtgtgca

SEQ ID NO: 20564 - DNA, 20 bp, synthetic construct
  misc_feature 1..20: note = chemically synthesized
  source 1..20: mol_type = other DNA
agtacttcccactactgtgg

SEQ ID NO: 20565 - DNA, 20 bp, synthetic construct
  misc_feature 1..20: note = chemically synthesized
  source 1..20: mol_type = other DNA
caaacctctaggtaactagg

SEQ ID NO: 20566 - DNA, 20 bp, synthetic construct
  misc_feature 1..20: note = chemically synthesized
  source 1..20: mol_type = other DNA
atttgtcaattcttgaagat

SEQ ID NO: 20567 - DNA, 20 bp, synthetic construct
  misc_feature 1..20: note = chemically synthesized
  source 1..20: mol_type = other DNA
aaaaaggttattttgaagtc

SEQ ID NO: 20568 - DNA, 20 bp, synthetic construct
  misc_feature 1..20: note = chemically synthesized
  source 1..20: mol_type = other DNA
gcagcaagggattcttctcc

SEQ ID NO: 20569 - DNA, 20 bp, synthetic construct
  misc_feature 1..20: note = chemically synthesized
  source 1..20: mol_type = other DNA
tgaatacatttccttgtttg

SEQ ID NO: 20570 - DNA, 20 bp, synthetic construct
  misc_feature 1..20: note = chemically synthesized
  source 1..20: mol_type = other DNA
ataacattcattttattcat

SEQ ID NO: 20571 - DNA, 20 bp, synthetic construct
  misc_feature 1..20: note = chemically synthesized
  source 1..20: mol_type = other DNA
tcagtttaaggggttctttt

SEQ ID NO: 20572 - DNA, 20 bp, synthetic construct
  misc_feature 1..20: note = chemically synthesized
  source 1..20: mol_type = other DNA
gggttctttttcagaaagtt

SEQ ID NO: 20573 - DNA, 20 bp, synthetic construct
  misc_feature 1..20: note = chemically synthesized
  source 1..20: mol_type = other DNA
aaattcaaatcattaaattt

SEQ ID NO: 20574 - DNA, 20 bp, synthetic construct
  misc_feature 1..20: note = chemically synthesized
  source 1..20: mol_type = other DNA
ttccccttgaaagggaaatg

SEQ ID NO: 20575 - DNA, 20 bp, synthetic construct
  misc_feature 1..20: note = chemically synthesized
  source 1..20: mol_type = other DNA
cattaatgtttgttaaatga

SEQ ID NO: 20576 - DNA, 20 bp, synthetic construct
  misc_feature 1..20: note = chemically synthesized
  source 1..20: mol_type = other DNA
tgagctcctgcccactctct

SEQ ID NO: 20577 - DNA, 20 bp, synthetic construct
  misc_feature 1..20: note = chemically synthesized
  source 1..20: mol_type = other DNA
tggactggaaaaatttgtga

SEQ ID NO: 20578 - DNA, 20 bp, synthetic construct
  misc_feature 1..20: note = chemically synthesized
  source 1..20: mol_type = other DNA
aggataaagatctctgagga

SEQ ID NO: 20579 - DNA, 20 bp, synthetic construct
  misc_feature 1..20: note = chemically synthesized
  source 1..20: mol_type = other DNA
aagaatacaaaataatttaa

SEQ ID NO: 20580 - DNA, 20 bp, synthetic construct
  misc_feature 1..20: note = chemically synthesized
  source 1..20: mol_type = other DNA
aaataatttaaaaagaaaca

SEQ ID NO: 20581 - DNA, 20 bp, synthetic construct
  misc_feature 1..20: note = chemically synthesized
  source 1..20: mol_type = other DNA
attctttctcactaaactac

SEQ ID NO: 20582 - DNA, 20 bp, synthetic construct
  misc_feature 1..20: note = chemically synthesized
  source 1..20: mol_type = other DNA
ataaggtgaattctgatttt

SEQ ID NO: 20583 - DNA, 20 bp, synthetic construct
  misc_feature 1..20: note = chemically synthesized
  source 1..20: mol_type = other DNA
tcctacataagcatagcatt

SEQ ID NO: 20584 - DNA, 20 bp, synthetic construct
  misc_feature 1..20: note = chemically synthesized
  source 1..20: mol_type = other DNA
agcatttcatataattacta

SEQ ID NO: 20585 - DNA, 20 bp, synthetic construct
  misc_feature 1..20: note = chemically synthesized
  source 1..20: mol_type = other DNA
gtttaattatactattttgc

SEQ ID NO: 20586 - DNA, 20 bp, synthetic construct
  misc_feature 1..20: note = chemically synthesized
  source 1..20: mol_type = other DNA
tgaaatcttatgtgcttccc

SEQ ID NO: 20587 - DNA, 20 bp, synthetic construct
  misc_feature 1..20: note = chemically synthesized
  source 1..20: mol_type = other DNA
accgtcctcacaatacctgc

SEQ ID NO: 20588 - DNA, 20 bp, synthetic construct
  misc_feature 1..20: note = chemically synthesized
  source 1..20: mol_type = other DNA
acaatacctgcccagaaaga

SEQ ID NO: 20589 - DNA, 20 bp, synthetic construct
  misc_feature 1..20: note = chemically synthesized
  source 1..20: mol_type = other DNA
agaaagacgagaaagaggag

SEQ ID NO: 20590 - DNA, 20 bp, synthetic construct
  misc_feature 1..20: note = chemically synthesized
  source 1..20: mol_type = other DNA
ggagtctcggaggactgtaa

SEQ ID NO: 20591 - DNA, 20 bp, synthetic construct
  misc_feature 1..20: note = chemically synthesized
  source 1..20: mol_type = other DNA
cttgtgtatgtgttgaagag

SEQ ID NO: 20592 - DNA, 20 bp, synthetic construct
  misc_feature 1..20: note = chemically synthesized
  source 1..20: mol_type = other DNA
aaaatccatattatgacaac

SEQ ID NO: 20593 - DNA, 20 bp, synthetic construct
  misc_feature 1..20: note = chemically synthesized
  source 1..20: mol_type = other DNA
tagtaattatatgaaatgct

SEQ ID NO: 20594 - DNA, 20 bp, synthetic construct
  misc_feature 1..20: note = chemically synthesized
  source 1..20: mol_type = other DNA
ggcaaaatactgtgctcctt

SEQ ID NO: 20595 - DNA, 20 bp, synthetic construct
  misc_feature 1..20: note = chemically synthesized
  source 1..20: mol_type = other DNA
ttatgtaggaattataaaat

SEQ ID NO: 20596 - DNA, 20 bp, synthetic construct
  misc_feature 1..20: note = chemically synthesized
  source 1..20: mol_type = other DNA
actattgaaggaacattagc

SEQ ID NO: 20597 - DNA, 20 bp, synthetic construct
  misc_feature 1..20: note = chemically synthesized
  source 1..20: mol_type = other DNA
gctgagttcctcaagatctt

SEQ ID NO: 20598 - DNA, 20 bp, synthetic construct
  misc_feature 1..20: note = chemically synthesized
  source 1..20: mol_type = other DNA
taaaggatctgaaataataa

SEQ ID NO: 20599 - DNA, 20 bp, synthetic construct
  misc_feature 1..20: note = chemically synthesized
  source 1..20: mol_type = other DNA
atggcatgcattctgaaaaa

SEQ ID NO: 20600 - DNA, 20 bp, synthetic construct
  misc_feature 1..20: note = chemically synthesized
  source 1..20: mol_type = other DNA
ttttgcctatgtagaagtgg

SEQ ID NO: 20601 - DNA, 20 bp, synthetic construct
  misc_feature 1..20: note = chemically synthesized
  source 1..20: mol_type = other DNA
tcttattctctgtagtttag

SEQ ID NO: 20602 - DNA, 20 bp, synthetic construct
  misc_feature 1..20: note = chemically synthesized
  source 1..20: mol_type = other DNA
attctctgtagtttagtgag

SEQ ID NO: 20603 - DNA, 20 bp, synthetic construct
  misc_feature 1..20: note = chemically synthesized
  source 1..20: mol_type = other DNA
gtgagaaagaatctaggagg

SEQ ID NO: 20604 - DNA, 20 bp, synthetic construct
  misc_feature 1..20: note = chemically synthesized
  source 1..20: mol_type = other DNA
tctagaacagtgcctggtac

SEQ ID NO: 20605 - DNA, 20 bp, synthetic construct
  misc_feature 1..20: note = chemically synthesized
  source 1..20: mol_type = other DNA
ttcacttttttactattatg

SEQ ID NO: 20606 - DNA, 20 bp, synthetic construct
  misc_feature 1..20: note = chemically synthesized
  source 1..20: mol_type = other DNA
caaggaaatgtattcacatc

SEQ ID NO: 20607 - DNA, 20 bp, synthetic construct
  misc_feature 1..20: note = chemically synthesized
  source 1..20: mol_type = other DNA
aaacaaaaggtttcttagga

SEQ ID NO: 20608 - DNA, 20 bp, synthetic construct
  misc_feature 1..20: note = chemically synthesized
  source 1..20: mol_type = other DNA
aggagaagaatcccttgctg

SEQ ID NO: 20609 - DNA, 20 bp, synthetic construct
  misc_feature 1..20: note = chemically synthesized
  source 1..20: mol_type = other DNA
agaggcgagggagatagagt

SEQ ID NO: 20610 - DNA, 20 bp, synthetic construct
  misc_feature 1..20: note = chemically synthesized
  source 1..20: mol_type = other DNA
cagaactgattcttaatctt

SEQ ID NO: 20611 - DNA, 20 bp, synthetic construct
  misc_feature 1..20: note = chemically synthesized
  source 1..20: mol_type = other DNA
gaaggataaatagctaaagg

SEQ ID NO: 20612 - DNA, 20 bp, synthetic construct
  misc_feature 1..20: note = chemically synthesized
  source 1..20: mol_type = other DNA
ctcagaacattacaaactct

SEQ ID NO: 20613 - DNA, 20 bp, synthetic construct
  misc_feature 1..20: note = chemically synthesized
  source 1..20: mol_type = other DNA
acacataatgaaagttaatt

SEQ ID NO: 20614 - DNA, 20 bp, synthetic construct
  misc_feature 1..20: note = chemically synthesized
  source 1..20: mol_type = other DNA
tgcttccctcttaaaatgga

SEQ ID NO: 20615 - DNA, 20 bp, synthetic construct
  misc_feature 1..20: note = chemically synthesized
  source 1..20: mol_type = other DNA
catggtacaagtggcacagg

SEQ ID NO: 20616 - DNA, 20 bp, synthetic construct
  misc_feature 1..20: note = chemically synthesized
  source 1..20: mol_type = other DNA
caagtggcacagggaagaat

SEQ ID NO: 20617 - DNA, 20 bp, synthetic construct
  misc_feature 1..20: note = chemically synthesized
  source 1..20: mol_type = other DNA
ctagagtcaaagtggttatg

SEQ ID NO: 20618 - DNA, 20 bp, synthetic construct
  misc_feature 1..20: note = chemically synthesized
  source 1..20: mol_type = other DNA
ctcaaggagtttctaaacct

SEQ ID NO: 20619 - DNA, 20 bp, synthetic construct
  misc_feature 1..20: note = chemically synthesized
  source 1..20: mol_type = other DNA
cacttttcaaggctgaggtg

SEQ ID NO: 20620 - DNA, 20 bp, synthetic construct
  misc_feature 1..20: note = chemically synthesized
  source 1..20: mol_type = other DNA
catagggagaccctgtttct

SEQ ID NO: 20621 - DNA, 20 bp, synthetic construct
  misc_feature 1..20: note = chemically synthesized
  source 1..20: mol_type = other DNA
taataatgttgtgaaaatta

SEQ ID NO: 20622 - DNA, 20 bp, synthetic construct
  misc_feature 1..20: note = chemically synthesized
  source 1..20: mol_type = other DNA
ttgcatttttaaacacaaaa

SEQ ID NO: 20623 - DNA, 20 bp, synthetic construct
  misc_feature 1..20: note = chemically synthesized
  source 1..20: mol_type = other DNA
ctttgattttaactgaggat

SEQ ID NO: 20624 - DNA, 20 bp, synthetic construct
  misc_feature 1..20: note = chemically synthesized
  source 1..20: mol_type = other DNA
agagagagcgagagagaggc

SEQ ID NO: 20625 - DNA, 20 bp, synthetic construct
  misc_feature 1..20: note = chemically synthesized
  source 1..20: mol_type = other DNA
aagtattttcttttttaatg

SEQ ID NO: 20626 - DNA, 20 bp, synthetic construct
  misc_feature 1..20: note = chemically synthesized
  source 1..20: mol_type = other DNA
gctaaaatggtgttggaata

SEQ ID NO: 20627 - DNA, 20 bp, synthetic construct
  misc_feature 1..20: note = chemically synthesized
  source 1..20: mol_type = other DNA
tttggtgtgatgctggcttc

SEQ ID NO: 20628 - DNA, 20 bp, synthetic construct
  misc_feature 1..20: note = chemically synthesized
  source 1..20: mol_type = other DNA
gttccttctttatctgtctt

SEQ ID NO: 20629 - DNA, 20 bp, synthetic construct
  misc_feature 1..20: note = chemically synthesized
  source 1..20: mol_type = other DNA
aattcctctttgaatgtcta

SEQ ID NO: 20630 - DNA, 20 bp, synthetic construct
  misc_feature 1..20: note = chemically synthesized
  source 1..20: mol_type = other DNA
cctatcatatggtctacctt

SEQ ID NO: 20631 - DNA, 20 bp, synthetic construct
  misc_feature 1..20: note = chemically synthesized
  source 1..20: mol_type = other DNA
aaatttccacgcgctgttga

SEQ ID NO: 20632 - DNA, 20 bp, synthetic construct
  misc_feature 1..20: note = chemically synthesized
  source 1..20: mol_type = other DNA
taactcaactccaggtaagg

SEQ ID NO: 20633 - DNA, 20 bp, synthetic construct
  misc_feature 1..20: note = chemically synthesized
  source 1..20: mol_type = other DNA
gctattttgatagcggtcat

SEQ ID NO: 20634 - DNA, 20 bp, synthetic construct
  misc_feature 1..20: note = chemically synthesized
  source 1..20: mol_type = other DNA
agctagtttattattggtgt

SEQ ID NO: 20635 - DNA, 20 bp, synthetic construct
  misc_feature 1..20: note = chemically synthesized
  source 1..20: mol_type = other DNA
atcaggataatactggcctc

SEQ ID NO: 20636 - DNA, 20 bp, synthetic construct
  misc_feature 1..20: note = chemically synthesized
  source 1..20: mol_type = other DNA
ggcctcagagaatgagttag

SEQ ID NO: 20637 - DNA, 20 bp, synthetic construct
  misc_feature 1..20: note = chemically synthesized
  source 1..20: mol_type = other DNA
tccttcctgtttaattttta

SEQ ID NO: 20638 - DNA, 20 bp, synthetic construct
  misc_feature 1..20: note = chemically synthesized
  source 1..20: mol_type = other DNA
tcttggtaggtggtatgtgt

SEQ ID NO: 20639 - DNA, 20 bp, synthetic construct
  misc_feature 1..20: note = chemically synthesized
  source 1..20: mol_type = other DNA
tgatctatctgatgctgaga

SEQ ID NO: 20640 - DNA, 20 bp, synthetic construct
  misc_feature 1..20: note = chemically synthesized
  source 1..20: mol_type = other DNA
ctggtgttgagtgtgaatgt

SEQ ID NO: 20641 - DNA, 20 bp, synthetic construct
  misc_feature 1..20: note = chemically synthesized
  source 1..20: mol_type = other DNA
ttccttcaaatttttcttgc

SEQ ID NO: 20642 - DNA, 20 bp, synthetic construct
  misc_feature 1..20: note = chemically synthesized
  source 1..20: mol_type = other DNA
ctggcctgtgaggtttctgc

SEQ ID NO: 20643 - DNA, 20 bp, synthetic construct
  misc_feature 1..20: note = chemically synthesized
  source 1..20: mol_type = other DNA
tttcaataaactcttcagtt

SEQ ID NO: 20644 - DNA, 20 bp, synthetic construct
  misc_feature 1..20: note = chemically synthesized
  source 1..20: mol_type = other DNA
aacattttggattctttttt

SEQ ID NO: 20645 - DNA, 20 bp, synthetic construct
  misc_feature 1..20: note = chemically synthesized
  source 1..20: mol_type = other DNA
ttccactggcttatgttgct

SEQ ID NO: 20646 - DNA, 20 bp, synthetic construct
  misc_feature 1..20: note = chemically synthesized
  source 1..20: mol_type = other DNA
tgatgaggttgtgctggaga

SEQ ID NO: 20647 - DNA, 20 bp, synthetic construct
  misc_feature 1..20: note = chemically synthesized
  source 1..20: mol_type = other DNA
gagtgatcctcaggccccca

SEQ ID NO: 20648 - DNA, 20 bp, synthetic construct
  misc_feature 1..20: note = chemically synthesized
  source 1..20: mol_type = other DNA
tgtcacttctctgttgaatt

SEQ ID NO: 20649 - DNA, 20 bp, synthetic construct
  misc_feature 1..20: note = chemically synthesized
  source 1..20: mol_type = other DNA
aatcatttgtttcttcaaat

SEQ ID NO: 20650 - DNA, 20 bp, synthetic construct
  misc_feature 1..20: note = chemically synthesized
  source 1..20: mol_type = other DNA
catctaataaatgtgtacca

SEQ ID NO: 20651 - DNA, 20 bp, synthetic construct
  misc_feature 1..20: note = chemically synthesized
  source 1..20: mol_type = other DNA
ctcctggaaaagatgaagat

SEQ ID NO: 20652 - DNA, 20 bp, synthetic construct
  misc_feature 1..20: note = chemically synthesized
  source 1..20: mol_type = other DNA
gaaaataagtctacagaaga

SEQ ID NO: 20653 - DNA, 20 bp, synthetic construct
  misc_feature 1..20: note = chemically synthesized
  source 1..20: mol_type = other DNA
tttttgtggatagtggtttt

SEQ ID NO: 20654 - DNA, 20 bp, synthetic construct
  misc_feature 1..20: note = chemically synthesized
  source 1..20: mol_type = other DNA
agatgtgactcccacacttt

SEQ ID NO: 20655 - DNA, 20 bp, synthetic construct
  misc_feature 1..20: note = chemically synthesized
  source 1..20: mol_type = other DNA
ttgatggtttctaaaattgt

SEQ ID NO: 20656 - DNA, 20 bp, synthetic construct
  misc_feature 1..20: note = chemically synthesized
  source 1..20: mol_type = other DNA
agttactggaataatacatt

SEQ ID NO: 20657 - DNA, 20 bp, synthetic construct
  misc_feature 1..20: note = chemically synthesized
  source 1..20: mol_type = other DNA
aacttacaatcatggcagaa

SEQ ID NO: 20658 - DNA, 20 bp, synthetic construct
  misc_feature 1..20: note = chemically synthesized
  source 1..20: mol_type = other DNA
tagttctgtttctagttctt

SEQ ID NO: 20659 - DNA, 20 bp, synthetic construct
  misc_feature 1..20: note = chemically synthesized
  source 1..20: mol_type = other DNA
ggcaggaagcatccagcatg

SEQ ID NO: 20660 - DNA, 20 bp, synthetic construct
  misc_feature 1..20: note = chemically synthesized
  source 1..20: mol_type = other DNA
acccgtgaatcctgtctatg

SEQ ID NO: 20661 - DNA, 20 bp, synthetic construct
  misc_feature 1..20: note = chemically synthesized
  source 1..20: mol_type = other DNA
gaaaaggctgagtggtgtcc

SEQ ID NO: 20662 - DNA, 20 bp, synthetic construct
  misc_feature 1..20: note = chemically synthesized
  source 1..20: mol_type = other DNA
cgttgtccttcagggatgtc

SEQ ID NO: 20663 - DNA, 20 bp, synthetic construct
  misc_feature 1..20: note = chemically synthesized
  source 1..20: mol_type = other DNA
ccatcggtgcagtctcaggg

SEQ ID NO: 20664 - DNA, 20 bp, synthetic construct
  misc_feature 1..20: note = chemically synthesized
  source 1..20: mol_type = other DNA
ccactttatggctagatgga

SEQ ID NO: 20665 - DNA, 20 bp, synthetic construct
  misc_feature 1..20: note = chemically synthesized
  source 1..20: mol_type = other DNA
atcatattaagcagccaact

SEQ ID NO: 20666 - DNA, 20 bp, synthetic construct
  misc_feature 1..20: note = chemically synthesized
  source 1..20: mol_type = other DNA
aatctgtattagggttctac

SEQ ID NO: 20667 - DNA, 20 bp, synthetic construct
  misc_feature 1..20: note = chemically synthesized
  source 1..20: mol_type = other DNA
tattagggttctacagagaa

SEQ ID NO: 20668 - DNA, 20 bp, synthetic construct
  misc_feature 1..20: note = chemically synthesized
  source 1..20: mol_type = other DNA
agttcaatgttccagggcag

SEQ ID NO: 20669 - DNA, 20 bp, synthetic construct
  misc_feature 1..20: note = chemically synthesized
  source 1..20: mol_type = other DNA
ggcaggaagaatccagcatg

SEQ ID NO: 20670 - DNA, 20 bp, synthetic construct
  misc_feature 1..20: note = chemically synthesized
  source 1..20: mol_type = other DNA
ggtagcagcaatattagagg

SEQ ID NO: 20671 - DNA, 20 bp, synthetic construct
  misc_feature 1..20: note = chemically synthesized
  source 1..20: mol_type = other DNA
ggggctgcatgcactggtca

SEQ ID NO: 20672 - DNA, 20 bp, synthetic construct
  misc_feature 1..20: note = chemically synthesized
  source 1..20: mol_type = other DNA
tacttcttctttctttggag

SEQ ID NO: 20673 - DNA, 20 bp, synthetic construct
  misc_feature 1..20: note = chemically synthesized
  source 1..20: mol_type = other DNA
tctcctcccttactaggaag

SEQ ID NO: 20674 - DNA, 20 bp, synthetic construct
  misc_feature 1..20: note = chemically synthesized
  source 1..20: mol_type = other DNA
aggaagagagaaataccatg

SEQ ID NO: 20675 - DNA, 20 bp, synthetic construct
  misc_feature 1..20: note = chemically synthesized
  source 1..20: mol_type = other DNA
gaagggactttaaaacatgc

SEQ ID NO: 20676 - DNA, 20 bp, synthetic construct
  misc_feature 1..20: note = chemically synthesized
  source 1..20: mol_type = other DNA
aattgctaacctgaatgata

SEQ ID NO: 20677 - DNA, 20 bp, synthetic construct
  misc_feature 1..20: note = chemically synthesized
  source 1..20: mol_type = other DNA
cctccaaagaaagaagaagt

SEQ ID NO: 20678 - DNA, 20 bp, synthetic construct
  misc_feature 1..20: note = chemically synthesized
  source 1..20: mol_type = other DNA
aatattgctgctacctctat

SEQ ID NO: 20679 - DNA, 20 bp, synthetic construct
  misc_feature 1..20: note = chemically synthesized
  source 1..20: mol_type = other DNA
atccagcaagtccacatcta

SEQ ID NO: 20680 - DNA, 20 bp, synthetic construct
  misc_feature 1..20: note = chemically synthesized
  source 1..20: mol_type = other DNA
agaatttatgaccaagtcct

SEQ ID NO: 20681 - DNA, 20 bp, synthetic construct
  misc_feature 1..20: note = chemically synthesized
  source 1..20: mol_type = other DNA
tcctcaaaactaaacacaac

SEQ ID NO: 20682 - DNA, 20 bp, synthetic construct
  misc_feature 1..20: note = chemically synthesized
  source 1..20: mol_type = other DNA
aaactaaacacaacaaaaac

SEQ ID NO: 20683 - DNA, 20 bp, synthetic construct
  misc_feature 1..20: note = chemically synthesized
  source 1..20: mol_type = other DNA
tacaaggaactcaacaacaa

SEQ ID NO: 20684 - DNA, 20 bp, synthetic construct
  misc_feature 1..20: note = chemically synthesized
  source 1..20: mol_type = other DNA
atggacctctatgattagtc

SEQ ID NO: 20685 - DNA, 20 bp, synthetic construct
  misc_feature 1..20: note = chemically synthesized
  source 1..20: mol_type = other DNA
tatttcctccttcttttgtt

SEQ ID NO: 20686 - DNA, 20 bp, synthetic construct
  misc_feature 1..20: note = chemically synthesized
  source 1..20: mol_type = other DNA
ggatataaagcaggcagaaa

SEQ ID NO: 20687 - DNA, 20 bp, synthetic construct
  misc_feature 1..20: note = chemically synthesized
  source 1..20: mol_type = other DNA
aataatcagagaatgcaaat

SEQ ID NO: 20688 - DNA, 20 bp, synthetic construct
  misc_feature 1..20: note = chemically synthesized
  source 1..20: mol_type = other DNA
tggctatcattataaagttc

SEQ ID NO: 20689 - DNA, 20 bp, synthetic construct
  misc_feature 1..20: note = chemically synthesized
  source 1..20: mol_type = other DNA
taggagtatggtgaggactg

SEQ ID NO: 20690 - DNA, 20 bp, synthetic construct
  misc_feature 1..20: note = chemically synthesized
  source 1..20: mol_type = other DNA
catttttcactgctgtcttt

SEQ ID NO: 20691 - DNA, 20 bp, synthetic construct
  misc_feature 1..20: note = chemically synthesized
  source 1..20: mol_type = other DNA
aaatatatctaagctttctt

SEQ ID NO: 20692 - DNA, 20 bp, synthetic construct
  misc_feature 1..20: note = chemically synthesized
  source 1..20: mol_type = other DNA
tatttacattttttatcctt

SEQ ID NO: 20693 - DNA, 20 bp, synthetic construct
  misc_feature 1..20: note = chemically synthesized
  source 1..20: mol_type = other DNA
tgcatcttactcagagatct

SEQ ID NO: 20694 - DNA, 20 bp, synthetic construct
  misc_feature 1..20: note = chemically synthesized
  source 1..20: mol_type = other DNA
ttgggaaatgaaatgaaaag

SEQ ID NO: 20695 - DNA, 20 bp, synthetic construct
  misc_feature 1..20: note = chemically synthesized
  source 1..20: mol_type = other DNA
tctttcagtctattagaaat

SEQ ID NO: 20696 - DNA, 20 bp, synthetic construct
  misc_feature 1..20: note = chemically synthesized
  source 1..20: mol_type = other DNA
agaaaaaagtcttcccctac

SEQ ID NO: 20697 - DNA, 20 bp, synthetic construct
  misc_feature 1..20: note = chemically synthesized
  source 1..20: mol_type = other DNA
cccctacaaaaacaaattta

SEQ ID NO: 20698 - DNA, 20 bp, synthetic construct
  misc_feature 1..20: note = chemically synthesized
  source 1..20: mol_type = other DNA
aaacaataaaaagaaatcag

SEQ ID NO: 20699 - DNA, 20 bp, synthetic construct
  misc_feature 1..20: note = chemically synthesized
  source 1..20: mol_type = other DNA
aagaaatacaaaatacattc

SEQ ID NO: 20700 - DNA, 20 bp, synthetic construct
  misc_feature 1..20: note = chemically synthesized
  source 1..20: mol_type = other DNA
tacgtaacaacacaatagct

SEQ ID NO: 20701 - DNA, 20 bp, synthetic construct
  misc_feature 1..20: note = chemically synthesized
  source 1..20: mol_type = other DNA
aagccaaagagtaagaactc

SEQ ID NO: 20702 - DNA, 20 bp, synthetic construct
  misc_feature 1..20: note = chemically synthesized
  source 1..20: mol_type = other DNA
tatacaactaactggtagag

SEQ ID NO: 20703 - DNA, 20 bp, synthetic construct
  misc_feature 1..20: note = chemically synthesized
  source 1..20: mol_type = other DNA
gaaaaggaaggaaggaagaa

SEQ ID NO: 20704 - DNA, 20 bp, synthetic construct
  misc_feature 1..20: note = chemically synthesized
  source 1..20: mol_type = other DNA
aaggaaggaagaaaaaaaca

SEQ ID NO: 20705 - DNA, 20 bp, synthetic construct
  misc_feature 1..20: note = chemically synthesized
  source 1..20: mol_type = other DNA
caaaacaaacaaactaaaaa

SEQ ID NO: 20706 - DNA, 20 bp, synthetic construct
  misc_feature 1..20: note = chemically synthesized
  source 1..20: mol_type = other DNA
caaacaaactaaaaaaaaaa

SEQ ID NO: 20707 - DNA, 20 bp, synthetic construct
  misc_feature 1..20: note = chemically synthesized
  source 1..20: mol_type = other DNA
atagactggctaaatagatt

SEQ ID NO: 20708 - DNA, 20 bp, synthetic construct
  misc_feature 1..20: note = chemically synthesized
  source 1..20: mol_type = other DNA
gataaaattgactttaaata

SEQ ID NO: 20709 - DNA, 20 bp, synthetic construct
  misc_feature 1..20: note = chemically synthesized
  source 1..20: mol_type = other DNA
cttctcagaccacaatggaa

SEQ ID NO: 20710 - DNA, 20 bp, synthetic construct
  misc_feature 1..20: note = chemically synthesized
  source 1..20: mol_type = other DNA
aactagaaatcaataacaag

SEQ ID NO: 20711 - DNA, 20 bp, synthetic construct
  misc_feature 1..20: note = chemically synthesized
  source 1..20: mol_type = other DNA
atcaataacaagaaaaactt

SEQ ID NO: 20712 - DNA, 20 bp, synthetic construct
  misc_feature 1..20: note = chemically synthesized
  source 1..20: mol_type = other DNA
tatcaataaacacttaaatt

SEQ ID NO: 20713 - DNA, 20 bp, synthetic construct
  misc_feature 1..20: note = chemically synthesized
  source 1..20: mol_type = other DNA
acaagctagaaaagcaagaa

SEQ ID NO: 20714 - DNA, 20 bp, synthetic construct
  misc_feature 1..20: note = chemically synthesized
  source 1..20: mol_type = other DNA
agaaaagcaagaacaaaacc

SEQ ID NO: 20715 - DNA, 20 bp, synthetic construct
  misc_feature 1..20: note = chemically synthesized
  source 1..20: mol_type = other DNA
aagaacttaatgaaatagag

SEQ ID NO: 20716 - DNA, 20 bp, synthetic construct
  misc_feature 1..20: note = chemically synthesized
  source 1..20: mol_type = other DNA
ttatgaacaaccatacacta

SEQ ID NO: 20717 - DNA, 20 bp, synthetic construct
  misc_feature 1..20: note = chemically synthesized
  source 1..20: mol_type = other DNA
gattgaattaagaaagaata

SEQ ID NO: 20718 - DNA, 20 bp, synthetic construct
  misc_feature 1..20: note = chemically synthesized
  source 1..20: mol_type = other DNA
aattttaccaaactttcaaa

SEQ ID NO: 20719 - DNA, 20 bp, synthetic construct
  misc_feature 1..20: note = chemically synthesized
  source 1..20: mol_type = other DNA
gacaaggatgcaagtaaaaa

SEQ ID NO: 20720 - DNA, 20 bp, synthetic construct
  misc_feature 1..20: note = chemically synthesized
  source 1..20: mol_type = other DNA
atcacatcaacaaaaagaac

SEQ ID NO: 20721 - DNA, 20 bp, synthetic construct
  misc_feature 1..20: note = chemically synthesized
  source 1..20: mol_type = other DNA
atttaacattccttcatgat

SEQ ID NO: 20722 - DNA, 20 bp, synthetic construct
  misc_feature 1..20: note = chemically synthesized
  source 1..20: mol_type = other DNA
tgacatgattttatacctag

SEQ ID NO: 20723 - DNA, 20 bp, synthetic construct
  misc_feature 1..20: note = chemically synthesized
  source 1..20: mol_type = other DNA
taaatttaaccaaggaaccg

SEQ ID NO: 20724 - DNA, 20 bp, synthetic construct
  misc_feature 1..20: note = chemically synthesized
  source 1..20: mol_type = other DNA
aaccgaaaaacctctattcg

SEQ ID NO: 20725 - DNA, 20 bp, synthetic construct
  misc_feature 1..20: note = chemically synthesized
  source 1..20: mol_type = other DNA
aacctctattcggaaaacta

SEQ ID NO: 20726 - DNA, 20 bp, synthetic construct
  misc_feature 1..20: note = chemically synthesized
  source 1..20: mol_type = other DNA
gtcatttttcacagaaatgg

SEQ ID NO: 20727 - DNA, 20 bp, synthetic construct
  misc_feature 1..20: note = chemically synthesized
  source 1..20: mol_type = other DNA
gatatccatgtgcaaaagaa

SEQ ID NO: 20728 - DNA, 20 bp, synthetic construct
  misc_feature 1..20: note = chemically synthesized
  source 1..20: mol_type = other DNA
ggccaccaaaagtgagtagg

SEQ ID NO: 20729 - DNA, 20 bp, synthetic construct
  misc_feature 1..20: note = chemically synthesized
  source 1..20: mol_type = other DNA
ctatgaagccagcatcacac

SEQ ID NO: 20730 - DNA, 20 bp, synthetic construct
  misc_feature 1..20: note = chemically synthesized
  source 1..20: mol_type = other DNA
ggaaggacataaccaaaaaa

SEQ ID NO: 20731 - DNA, 20 bp, synthetic construct
  misc_feature 1..20: note = chemically synthesized
  source 1..20: mol_type = other DNA
tacaccacataaacagattt

SEQ ID NO: 20732 - DNA, 20 bp, synthetic construct
  misc_feature 1..20: note = chemically synthesized
  source 1..20: mol_type = other DNA
tcctagccagggcaatcaga

SEQ ID NO: 20733 - DNA, 20 bp, synthetic construct
  misc_feature 1..20: note = chemically synthesized
  source 1..20: mol_type = other DNA
atgatatgatcatttacctt

SEQ ID NO: 20734 - DNA, 20 bp, synthetic construct
  misc_feature 1..20: note = chemically synthesized
  source 1..20: mol_type = other DNA
aacccctatttattgccata

SEQ ID NO: 20735 - DNA, 20 bp, synthetic construct
  misc_feature 1..20: note = chemically synthesized
  source 1..20: mol_type = other DNA
atggattaaagacttaaata

SEQ ID NO: 20736 - DNA, 20 bp, synthetic construct
  misc_feature 1..20: note = chemically synthesized
  source 1..20: mol_type = other DNA
aaagacttaaatataaaact

SEQ ID NO: 20737 - DNA, 20 bp, synthetic construct
  misc_feature 1..20: note = chemically synthesized
  source 1..20: mol_type = other DNA
aaatataaaacttaaaacta

SEQ ID NO: 20738 - DNA, 20 bp, synthetic construct
  misc_feature 1..20: note = chemically synthesized
  source 1..20: mol_type = other DNA
aaactataaaactactaaaa

SEQ ID NO: 20739 - DNA, 20 bp, synthetic construct
  misc_feature 1..20: note = chemically synthesized
  source 1..20: mol_type = other DNA
ctcaaacaactcaacagtgg

SEQ ID NO: 20740 - DNA, 20 bp, synthetic construct
  misc_feature 1..20: note = chemically synthesized
  source 1..20: mol_type = other DNA
atcatcagagaaatgcaaat

SEQ ID NO: 20741 - DNA, 20 bp, synthetic construct
  misc_feature 1..20: note = chemically synthesized
  source 1..20: mol_type = other DNA
aaattagtatagccactatg

SEQ ID NO: 20742 - DNA, 20 bp, synthetic construct
  misc_feature 1..20: note = chemically synthesized
  source 1..20: mol_type = other DNA
aaagtagggtgattatagtt

SEQ ID NO: 20743 - DNA, 20 bp, synthetic construct
  misc_feature 1..20: note = chemically synthesized
  source 1..20: mol_type = other DNA
acatataacaatgaggtggt

SEQ ID NO: 20744 - DNA, 20 bp, synthetic construct
  misc_feature 1..20: note = chemically synthesized
  source 1..20: mol_type = other DNA
ctaatctcaccctcctgttc

SEQ ID NO: 20745 - DNA, 20 bp, synthetic construct
  misc_feature 1..20: note = chemically synthesized
  source 1..20: mol_type = other DNA
aggagaaaaagaggaagaac

SEQ ID NO: 20746 - DNA, 20 bp, synthetic construct
  misc_feature 1..20: note = chemically synthesized
  source 1..20: mol_type = other DNA
ctctagagaaaagccatttg

SEQ ID NO: 20747 - DNA, 20 bp, synthetic construct
  misc_feature 1..20: note = chemically synthesized
  source 1..20: mol_type = other DNA
ggaaaacttctgtgttaaca

SEQ ID NO: 20748 - DNA, 20 bp, synthetic construct
  misc_feature 1..20: note = chemically synthesized
  source 1..20: mol_type = other DNA
agcaatacgttggcttaggc

SEQ ID NO: 20749 - DNA, 20 bp, synthetic construct
  misc_feature 1..20: note = chemically synthesized
  source 1..20: mol_type = other DNA
atttttcccccacatttggg

SEQ ID NO: 20750 - DNA, 20 bp, synthetic construct
  misc_feature 1..20: note = chemically synthesized
  source 1..20: mol_type = other DNA
actggtaacagtgcttcttc

SEQ ID NO: 20751 - DNA, 20 bp, synthetic construct
  misc_feature 1..20: note = chemically synthesized
  source 1..20: mol_type = other DNA
cattgttcataccctggaga

SEQ ID NO: 20752 - DNA, 20 bp, synthetic construct
  misc_feature 1..20: note = chemically synthesized
  source 1..20: mol_type = other DNA
gaagtctgagaattagtacc

SEQ ID NO: 20753 - DNA, 20 bp, synthetic construct
  misc_feature 1..20: note = chemically synthesized
  source 1..20: mol_type = other DNA
atacatttccttgtttgcca

SEQ ID NO: 20754 - DNA, 20 bp, synthetic construct
  misc_feature 1..20: note = chemically synthesized
  source 1..20: mol_type = other DNA
atctataggacatttccttt

SEQ ID NO: 20755 - DNA, 20 bp, synthetic construct
  misc_feature 1..20: note = chemically synthesized
  source 1..20: mol_type = other DNA
cattgtggggacctctccac

SEQ ID NO: 20756 - DNA, 20 bp, synthetic construct
  misc_feature 1..20: note = chemically synthesized
  source 1..20: mol_type = other DNA
taaaggcagcttaggggttg

SEQ ID NO: 20757 - DNA, 20 bp, synthetic construct
  misc_feature 1..20: note = chemically synthesized
  source 1..20: mol_type = other DNA
gctcctgcccactctctaga

SEQ ID NO: 20758 - DNA, 20 bp, synthetic construct
  misc_feature 1..20: note = chemically synthesized
  source 1..20: mol_type = other DNA
caggaactttgggcatattt

SEQ ID NO: 20759 - DNA, 20 bp, synthetic construct
  misc_feature 1..20: note = chemically synthesized
  source 1..20: mol_type = other DNA
gtgactagaaaaaggacatt

SEQ ID NO: 20760 - DNA, 20 bp, synthetic construct
  misc_feature 1..20: note = chemically synthesized
  source 1..20: mol_type = other DNA
atcttgaggaactcagcctt

SEQ ID NO: 20761 - DNA, 20 bp, synthetic construct
  misc_feature 1..20: note = chemically synthesized
  source 1..20: mol_type = other DNA
cttttgagaagctcctgaat

SEQ ID NO: 20762 - DNA, 20 bp, synthetic construct
  misc_feature 1..20: note = chemically synthesized
  source 1..20: mol_type = other DNA
tattttgctgagaaaaattt

SEQ ID NO: 20763 - DNA, 20 bp, synthetic construct
  misc_feature 1..20: note = chemically synthesized
  source 1..20: mol_type = other DNA
aataaagaaaatcaaattga

SEQ ID NO: 20764 - DNA, 20 bp, synthetic construct
  misc_feature 1..20: note = chemically synthesized
  source 1..20: mol_type = other DNA
taaagacatctgtaaaatta

SEQ ID NO: 20765 - DNA, 20 bp, synthetic construct
  misc_feature 1..20: note = chemically synthesized
  source 1..20: mol_type = other DNA
ggacatagcttattggtgga

SEQ ID NO: 20766 - DNA, 20 bp, synthetic construct
  misc_feature 1..20: note = chemically synthesized
  source 1..20: mol_type = other DNA
attatgtaagaattaaatat

SEQ ID NO: 20767 - DNA, 20 bp, synthetic construct
  misc_feature 1..20: note = chemically synthesized
  source 1..20: mol_type = other DNA
ggaaatgtattcacatccaa

SEQ ID NO: 20768 - DNA, 20 bp, synthetic construct
  misc_feature 1..20: note = chemically synthesized
  source 1..20: mol_type = other DNA
ccatgaacaatggaaacgtg

SEQ ID NO: 20769 - DNA, 20 bp, synthetic construct
  misc_feature 1..20: note = chemically synthesized
  source 1..20: mol_type = other DNA
tagttacctagaggtttggg

SEQ ID NO: 20770 - DNA, 20 bp, synthetic construct
  misc_feature 1..20: note = chemically synthesized
  source 1..20: mol_type = other DNA
gtggcacagggaagaattca

SEQ ID NO: 20771 - DNA, 20 bp, synthetic construct
  misc_feature 1..20: note = chemically synthesized
  source 1..20: mol_type = other DNA
gtgaaacacacgatctatgt

SEQ ID NO: 20772 - DNA, 20 bp, synthetic construct
  misc_feature 1..20: note = chemically synthesized
  source 1..20: mol_type = other DNA
ttcaatgacctacgctgtgg

SEQ ID NO: 20773 - DNA, 20 bp, synthetic construct
  misc_feature 1..20: note = chemically synthesized
  source 1..20: mol_type = other DNA
tttcttttttaatgtcagaa

SEQ ID NO: 20774 - DNA, 20 bp, synthetic construct
  misc_feature 1..20: note = chemically synthesized
  source 1..20: mol_type = other DNA
aaatgtgctttataaatagt

SEQ ID NO: 20775 - DNA, 20 bp, synthetic construct
  misc_feature 1..20: note = chemically synthesized
  source 1..20: mol_type = other DNA
aagtgtgctatataaacagt

SEQ ID NO: 20776 - DNA, 20 bp, synthetic construct
  misc_feature 1..20: note = chemically synthesized
  source 1..20: mol_type = other DNA
tcaaggataaaaaatgtaaa

SEQ ID NO: 20777 - DNA, 20 bp, synthetic construct
  misc_feature 1..20: note = chemically synthesized
  source 1..20: mol_type = other DNA
aacttctttttgatacagta

SEQ ID NO: 20778 - DNA, 20 bp, synthetic construct
  misc_feature 1..20: note = chemically synthesized
  source 1..20: mol_type = other DNA
ttaagaaatatagtagctat

SEQ ID NO: 20779 - DNA, 20 bp, synthetic construct
  misc_feature 1..20: note = chemically synthesized
  source 1..20: mol_type = other DNA
gactgggtaatttataagga

SEQ ID NO: 20780 - DNA, 20 bp, synthetic construct
  misc_feature 1..20: note = chemically synthesized
  source 1..20: mol_type = other DNA
aaagggggaaaagccgctta

SEQ ID NO: 20781 - DNA, 20 bp, synthetic construct
  misc_feature 1..20: note = chemically synthesized
  source 1..20: mol_type = other DNA
cataattatgcctaacatac

SEQ ID NO: 20782 - DNA, 20 bp, synthetic construct
  misc_feature 1..20: note = chemically synthesized
  source 1..20: mol_type = other DNA
accttaattccaggacatgg

SEQ ID NO: 20783 - DNA, 20 bp, synthetic construct
  misc_feature 1..20: note = chemically synthesized
  source 1..20: mol_type = other DNA
cttctgttctggactccact

SEQ ID NO: 20784 - DNA, 20 bp, synthetic construct
  misc_feature 1..20: note = chemically synthesized
  source 1..20: mol_type = other DNA
gcagccaactccagaaaccc

SEQ ID NO: 20785 - DNA, 20 bp, synthetic construct
  misc_feature 1..20: note = chemically synthesized
  source 1..20: mol_type = other DNA
ctcacatgttcacaaggtcc

SEQ ID NO: 20786 - DNA, 20 bp, synthetic construct
  misc_feature 1..20: note = chemically synthesized
  source 1..20: mol_type = other DNA
gtagcaggacaagctgcata

SEQ ID NO: 20787 - DNA, 20 bp, synthetic construct
  misc_feature 1..20: note = chemically synthesized
  source 1..20: mol_type = other DNA
ttggaggcagaaattgggca

SEQ ID NO: 20788 - DNA, 20 bp, synthetic construct
  misc_feature 1..20: note = chemically synthesized
  source 1..20: mol_type = other DNA
taggagatttcttcataatt

SEQ ID NO: 20789 - DNA, 20 bp, synthetic construct
  misc_feature 1..20: note = chemically synthesized
  source 1..20: mol_type = other DNA
catgcacctagaagggactt

SEQ ID NO: 20790 - DNA, 20 bp, synthetic construct
  misc_feature 1..20: note = chemically synthesized
  source 1..20: mol_type = other DNA
actgtgattcagacaaaggc

SEQ ID NO: 20791 - DNA, 20 bp, synthetic construct
  misc_feature 1..20: note = chemically synthesized
  source 1..20: mol_type = other DNA
ttctctccccattcatctgc

SEQ ID NO: 20792 - DNA, 20 bp, synthetic construct
  misc_feature 1..20: note = chemically synthesized
  source 1..20: mol_type = other DNA
cctccaactgttaaaaggaa

SEQ ID NO: 20793 - DNA, 20 bp, synthetic construct
  misc_feature 1..20: note = chemically synthesized
  source 1..20: mol_type = other DNA
tattatcattcaggttagca

SEQ ID NO: 20794 - DNA, 20 bp, synthetic construct
  misc_feature 1..20: note = chemically synthesized
  source 1..20: mol_type = other DNA
taataagggatggaaatgag

SEQ ID NO: 20795 - DNA, 20 bp, synthetic construct
  misc_feature 1..20: note = chemically synthesized
  source 1..20: mol_type = other DNA
catttaggatccactaagcc

SEQ ID NO: 20796 - DNA, 20 bp, synthetic construct
  misc_feature 1..20: note = chemically synthesized
  source 1..20: mol_type = other DNA
aagggacaccaacgaatggt

SEQ ID NO: 20797 - DNA, 20 bp, synthetic construct
  misc_feature 1..20: note = chemically synthesized
  source 1..20: mol_type = other DNA
actgctttgttcaattctgt

SEQ ID NO: 20798 - DNA, 20 bp, synthetic construct
  misc_feature 1..20: note = chemically synthesized
  source 1..20: mol_type = other DNA
tatgttcaaataacagctgc

SEQ ID NO: 20799 - DNA, 20 bp, synthetic construct
  misc_feature 1..20: note = chemically synthesized
  source 1..20: mol_type = other DNA
agtaccttttgataaggaga

SEQ ID NO: 20800 - DNA, 20 bp, synthetic construct
  misc_feature 1..20: note = chemically synthesized
  source 1..20: mol_type = other DNA
tgcttatagatgttcataga

SEQ ID NO: 20801 - DNA, 20 bp, synthetic construct
  misc_feature 1..20: note = chemically synthesized
  source 1..20: mol_type = other DNA
agggaggagaccacccttca

SEQ ID NO: 20802 - DNA, 20 bp, synthetic construct
  misc_feature 1..20: note = chemically synthesized
  source 1..20: mol_type = other DNA
acctggccagttatgttatc

SEQ ID NO: 20803 - DNA, 20 bp, synthetic construct
  misc_feature 1..20: note = chemically synthesized
  source 1..20: mol_type = other DNA
ggacaggaattgctcactct

SEQ ID NO: 20804 - DNA, 20 bp, synthetic construct
  misc_feature 1..20: note = chemically synthesized
  source 1..20: mol_type = other DNA
cttctttaactcggtgtctg

SEQ ID NO: 20805 - DNA, 20 bp, synthetic construct
  misc_feature 1..20: note = chemically synthesized
  source 1..20: mol_type = other DNA
ggtgtctgaggggttttgta

SEQ ID NO: 20806 - DNA, 20 bp, synthetic construct
  misc_feature 1..20: note = chemically synthesized
  source 1..20: mol_type = other DNA
aattaaggagagtatgaaaa

SEQ ID NO: 20807 - DNA, 20 bp, synthetic construct
  misc_feature 1..20: note = chemically synthesized
  source 1..20: mol_type = other DNA
caaatgggggtaaaataata

SEQ ID NO: 20808 - DNA, 20 bp, synthetic construct
  misc_feature 1..20: note = chemically synthesized
  source 1..20: mol_type = other DNA
agggaaagacaggctctaaa

SEQ ID NO: 20809 - DNA, 20 bp, synthetic construct
  misc_feature 1..20: note = chemically synthesized
  source 1..20: mol_type = other DNA
aatgggacttaattaaacta

SEQ ID NO: 20810 - DNA, 20 bp, synthetic construct
  misc_feature 1..20: note = chemically synthesized
  source 1..20: mol_type = other DNA
atggttaatactgagtgtca

SEQ ID NO: 20811 - DNA, 20 bp, synthetic construct
  misc_feature 1..20: note = chemically synthesized
  source 1..20: mol_type = other DNA
gtctgtgagggtgttaccaa

SEQ ID NO: 20812 - DNA, 20 bp, synthetic construct
  misc_feature 1..20: note = chemically synthesized
  source 1..20: mol_type = other DNA
aggcagaaaaatgtgaaaag

SEQ ID NO: 20813 - DNA, 20 bp, synthetic construct
  misc_feature 1..20: note = chemically synthesized
  source 1..20: mol_type = other DNA
gaaaaatgtgaaaaggctag

SEQ ID NO: 20814 - DNA, 20 bp, synthetic construct
  misc_feature 1..20: note = chemically synthesized
  source 1..20: mol_type = other DNA
agcctacatttttctcccat

SEQ ID NO: 20815 - DNA, 20 bp, synthetic construct
  misc_feature 1..20: note = chemically synthesized
  source 1..20: mol_type = other DNA
gaacattgaactccaggttc

SEQ ID NO: 20816 - DNA, 20 bp, synthetic construct
  misc_feature 1..20: note = chemically synthesized
  source 1..20: mol_type = other DNA
tcttcagctttgggactccg

SEQ ID NO: 20817 - DNA, 20 bp, synthetic construct
  misc_feature 1..20: note = chemically synthesized
  source 1..20: mol_type = other DNA
tgttcctcagctggcagatg

SEQ ID NO: 20818 - DNA, 20 bp, synthetic construct
  misc_feature 1..20: note = chemically synthesized
  source 1..20: mol_type = other DNA
agatatatatctcctattaa

SEQ ID NO: 20819 - DNA, 20 bp, synthetic construct
  misc_feature 1..20: note = chemically synthesized
  source 1..20: mol_type = other DNA
gtttctctgtagaaccctaa

SEQ ID NO: 20820 - DNA, 20 bp, synthetic construct
  misc_feature 1..20: note = chemically synthesized
  source 1..20: mol_type = other DNA
attaaggatggagttctttc

SEQ ID NO: 20821 - DNA, 20 bp, synthetic construct
  misc_feature 1..20: note = chemically synthesized
  source 1..20: mol_type = other DNA
tggagttctttcattggttt

SEQ ID NO: 20822 - DNA, 20 bp, synthetic construct
  misc_feature 1..20: note = chemically synthesized
  source 1..20: mol_type = other DNA
gttttggggtttctggagtt

SEQ ID NO: 20823 - DNA, 20 bp, synthetic construct
  misc_feature 1..20: note = chemically synthesized
  source 1..20: mol_type = other DNA
tttctggagttggctgctta

SEQ ID NO: 20824 - DNA, 20 bp, synthetic construct
  misc_feature 1..20: note = chemically synthesized
  source 1..20: mol_type = other DNA
cactgataatccttggcatc

SEQ ID NO: 20825 - DNA, 20 bp, synthetic construct
  misc_feature 1..20: note = chemically synthesized
  source 1..20: mol_type = other DNA
aaaataaatgcatttgacac

SEQ ID NO: 20826 - DNA, 20 bp, synthetic construct
  misc_feature 1..20: note = chemically synthesized
  source 1..20: mol_type = other DNA
tgcatttgacactcttgatt

SEQ ID NO: 20827 - DNA, 20 bp, synthetic construct
  misc_feature 1..20: note = chemically synthesized
  source 1..20: mol_type = other DNA
ggaacatagtgaagttggtt

SEQ ID NO: 20828 - DNA, 20 bp, synthetic construct
  misc_feature 1..20: note = chemically synthesized
  source 1..20: mol_type = other DNA
actcaggagtatatcaactc

SEQ ID NO: 20829 - DNA, 20 bp, synthetic construct
  misc_feature 1..20: note = chemically synthesized
  source 1..20: mol_type = other DNA
gagcaagaagtagcaaacac

SEQ ID NO: 20830 - DNA, 20 bp, synthetic construct
  misc_feature 1..20: note = chemically synthesized
  source 1..20: mol_type = other DNA
ggacagaggatgggaaataa

SEQ ID NO: 20831 - DNA, 20 bp, synthetic construct
  misc_feature 1..20: note = chemically synthesized
  source 1..20: mol_type = other DNA
agtaaaatttataggggtcc

SEQ ID NO: 20832 - DNA, 20 bp, synthetic construct
  misc_feature 1..20: note = chemically synthesized
  source 1..20: mol_type = other DNA
cacaacgcctagtgggccta

SEQ ID NO: 20833 - DNA, 20 bp, synthetic construct
  misc_feature 1..20: note = chemically synthesized
  source 1..20: mol_type = other DNA
ggattttggaggcaacatat

SEQ ID NO: 20834 - DNA, 20 bp, synthetic construct
  misc_feature 1..20: note = chemically synthesized
  source 1..20: mol_type = other DNA
atcgagtgatccaaaaggct

SEQ ID NO: 20835 - DNA, 20 bp, synthetic construct
  misc_feature 1..20: note = chemically synthesized
  source 1..20: mol_type = other DNA
atatgacctagcagatccaa

SEQ ID NO: 20836 - DNA, 20 bp, synthetic construct
  misc_feature 1..20: note = chemically synthesized
  source 1..20: mol_type = other DNA
gtgtcagtgccagataggga

SEQ ID NO: 20837 - DNA, 20 bp, synthetic construct
  misc_feature 1..20: note = chemically synthesized
  source 1..20: mol_type = other DNA
ctgaatcacagcggaggcct

SEQ ID NO: 20838 - DNA, 20 bp, synthetic construct
  misc_feature 1..20: note = chemically synthesized
  source 1..20: mol_type = other DNA
agaaagctcttggcctgtta

SEQ ID NO: 20839 - DNA, 20 bp, synthetic construct
  misc_feature 1..20: note = chemically synthesized
  source 1..20: mol_type = other DNA
tgaactgcctatcatgaact

SEQ ID NO: 20840 - DNA, 20 bp, synthetic construct
  misc_feature 1..20: note = chemically synthesized
  source 1..20: mol_type = other DNA
agcaaatggaagtggtatat

SEQ ID NO: 20841 - DNA, 20 bp, synthetic construct
  misc_feature 1..20: note = chemically synthesized
  source 1..20: mol_type = other DNA
tggaagtggtatatatgcga

SEQ ID NO: 20842 - DNA, 20 bp, synthetic construct
  misc_feature 1..20: note = chemically synthesized
  source 1..20: mol_type = other DNA
catggtctccactcctgaca

SEQ ID NO: 20843 - DNA, 20 bp, synthetic construct
  misc_feature 1..20: note = chemically synthesized
  source 1..20: mol_type = other DNA
tttgcacagaaggagaaatg

SEQ ID NO: 20844 - DNA, 20 bp, synthetic construct
  misc_feature 1..20: note = chemically synthesized
  source 1..20: mol_type = other DNA
agaaggagaaatggccagat

SEQ ID NO: 20845 - DNA, 20 bp, synthetic construct
  misc_feature 1..20: note = chemically synthesized
  source 1..20: mol_type = other DNA
cttattcatgggctgtagcc

SEQ ID NO: 20846 - DNA, 20 bp, synthetic construct
  misc_feature 1..20: note = chemically synthesized
  source 1..20: mol_type = other DNA
agaggtatgtggatggacct

SEQ ID NO: 20847 - DNA, 20 bp, synthetic construct
  misc_feature 1..20: note = chemically synthesized
  source 1..20: mol_type = other DNA
caatgggtgacctcagcaga

SEQ ID NO: 20848 - DNA, 20 bp, synthetic construct
  misc_feature 1..20: note = chemically synthesized
  source 1..20: mol_type = other DNA
cacagttgcagggatggaag

SEQ ID NO: 20849 - DNA, 20 bp, synthetic construct
  misc_feature 1..20: note = chemically synthesized
  source 1..20: mol_type = other DNA
aaagctgacctggccacagc

SEQ ID NO: 20850 - DNA, 20 bp, synthetic construct
  misc_feature 1..20: note = chemically synthesized
  source 1..20: mol_type = other DNA
cagccagctacctggtggca

SEQ ID NO: 20851 - DNA, 20 bp, synthetic construct
  misc_feature 1..20: note = chemically synthesized
  source 1..20: mol_type = other DNA
tcttccatcatggaaagggc

SEQ ID NO: 20852 - DNA, 20 bp, synthetic construct
  misc_feature 1..20: note = chemically synthesized
  source 1..20: mol_type = other DNA
aatagacacttactctggat

SEQ ID NO: 20853 - DNA, 20 bp, synthetic construct
  misc_feature 1..20: note = chemically synthesized
  source 1..20: mol_type = other DNA
gggtttcccaatcctgaact

SEQ ID NO: 20854 - DNA, 20 bp, synthetic construct
  misc_feature 1..20: note = chemically synthesized
  source 1..20: mol_type = other DNA
tgtcatggtattccacacag

SEQ ID NO: 20855 - DNA, 20 bp, synthetic construct
  misc_feature 1..20: note = chemically synthesized
  source 1..20: mol_type = other DNA
catgatccctatcatcctga

SEQ ID NO: 20856 - DNA, 20 bp, synthetic construct
  misc_feature 1..20: note = chemically synthesized
  source 1..20: mol_type = other DNA
ttttgaatggccttttgaag

SEQ ID NO: 20857 - DNA, 20 bp, synthetic construct
  misc_feature 1..20: note = chemically synthesized
  source 1..20: mol_type = other DNA
aatcagtgtccaatatatgg

SEQ ID NO: 20858 - DNA, 20 bp, synthetic construct
  misc_feature 1..20: note = chemically synthesized
  source 1..20: mol_type = other DNA
tggtactgtttctcccatag

SEQ ID NO: 20859 - DNA, 20 bp, synthetic construct
  misc_feature 1..20: note = chemically synthesized
  source 1..20: mol_type = other DNA
tagtgttccactagcaaaat

SEQ ID NO: 20860 - DNA, 20 bp, synthetic construct
  misc_feature 1..20: note = chemically synthesized
  source 1..20: mol_type = other DNA
ttcccatggcattatgttct

SEQ ID NO: 20861 - DNA, 20 bp, synthetic construct
  misc_feature 1..20: note = chemically synthesized
  source 1..20: mol_type = other DNA
actgccgccaggtgacacaa

SEQ ID NO: 20862 - DNA, 20 bp, synthetic construct
  misc_feature 1..20: note = chemically synthesized
  source 1..20: mol_type = other DNA
tgattccattaaactgcaaa

SEQ ID NO: 20863 - DNA, 20 bp, synthetic construct
  misc_feature 1..20: note = chemically synthesized
  source 1..20: mol_type = other DNA
gagagttacagtgttggctg

SEQ ID NO: 20864 - DNA, 20 bp, synthetic construct
  misc_feature 1..20: note = chemically synthesized
  source 1..20: mol_type = other DNA
ggagatccattagggtgtct

SEQ ID NO: 20865 - DNA, 20 bp, synthetic construct
  misc_feature 1..20: note = chemically synthesized
  source 1..20: mol_type = other DNA
ttccaggcaggactacaaat

SEQ ID NO: 20866 - DNA, 20 bp, synthetic construct
  misc_feature 1..20: note = chemically synthesized
  source 1..20: mol_type = other DNA
aaaaaagacaagacctgctg

SEQ ID NO: 20867 - DNA, 20 bp, synthetic construct
  misc_feature 1..20: note = chemically synthesized
  source 1..20: mol_type = other DNA
tttttcctttatcatgtgac

SEQ ID NO: 20868 - DNA, 20 bp, synthetic construct
  misc_feature 1..20: note = chemically synthesized
  source 1..20: mol_type = other DNA
atatcagcatttaagtattg

SEQ ID NO: 20869 - DNA, 20 bp, synthetic construct
  misc_feature 1..20: note = chemically synthesized
  source 1..20: mol_type = other DNA
ttatgtaatagcatttgcaa

SEQ ID NO: 20870 - DNA, 20 bp, synthetic construct
  misc_feature 1..20: note = chemically synthesized
  source 1..20: mol_type = other DNA
gcattttcaattgcacgaag

SEQ ID NO: 20871 - DNA, 20 bp, synthetic construct
  misc_feature 1..20: note = chemically synthesized
  source 1..20: mol_type = other DNA
atggttaatactgagtgtca

SEQ ID NO: 20872 - DNA, 20 bp, synthetic construct
  misc_feature 1..20: note = chemically synthesized
  source 1..20: mol_type = other DNA
taatactgagtgtcaacttg

SEQ ID NO: 20873 - DNA, 20 bp, synthetic construct
  misc_feature 1..20: note = chemically synthesized
  source 1..20: mol_type = other DNA
gtctgtgagggtattgccaa

SEQ ID NO: 20874 - DNA, 20 bp, synthetic construct
  misc_feature 1..20: note = chemically synthesized
  source 1..20: mol_type = other DNA
aaaacatgtgaaaatcctgg

SEQ ID NO: 20875 - DNA, 20 bp, synthetic construct
  misc_feature 1..20: note = chemically synthesized
  source 1..20: mol_type = other DNA
ctacatctttctcccatgct

SEQ ID NO: 20876 - DNA, 20 bp, synthetic construct
  misc_feature 1..20: note = chemically synthesized
  source 1..20: mol_type = other DNA
aaacattggactccaagtcc

SEQ ID NO: 20877 - DNA, 20 bp, synthetic construct
  misc_feature 1..20: note = chemically synthesized
  source 1..20: mol_type = other DNA
ccttcagctttgggacttgg

SEQ ID NO: 20878 - DNA, 20 bp, synthetic construct
  misc_feature 1..20: note = chemically synthesized
  source 1..20: mol_type = other DNA
ttggactggcttccttgctc

SEQ ID NO: 20879 - DNA, 20 bp, synthetic construct
  misc_feature 1..20: note = chemically synthesized
  source 1..20: mol_type = other DNA
agatggcctattgtgggacc

SEQ ID NO: 20880 - DNA, 20 bp, synthetic construct
  misc_feature 1..20: note = chemically synthesized
  source 1..20: mol_type = other DNA
gtgaggatgtggagacaaga

SEQ ID NO: 20881 - DNA, 20 bp, synthetic construct
  misc_feature 1..20: note = chemically synthesized
  source 1..20: mol_type = other DNA
aaactttatggaagacagca

SEQ ID NO: 20882 - DNA, 20 bp, synthetic construct
  misc_feature 1..20: note = chemically synthesized
  source 1..20: mol_type = other DNA
caacctaaatgtctaccaat

SEQ ID NO: 20883 - DNA, 20 bp, synthetic construct
  misc_feature 1..20: note = chemically synthesized
  source 1..20: mol_type = other DNA
tatggtgaggactgaaaaac

SEQ ID NO: 20884 - DNA, 20 bp, synthetic construct
  misc_feature 1..20: note = chemically synthesized
  source 1..20: mol_type = other DNA
aacatacatatgtaaggaac

SEQ ID NO: 20885 - DNA, 20 bp, synthetic construct
  misc_feature 1..20: note = chemically synthesized
  source 1..20: mol_type = other DNA
aacccgagcttgtaccctga

SEQ ID NO: 20886 - DNA, 20 bp, synthetic construct
  misc_feature 1..20: note = chemically synthesized
  source 1..20: mol_type = other DNA
ataatcctcacgtgttgtgg

SEQ ID NO: 20887 - DNA, 20 bp, synthetic construct
  misc_feature 1..20: note = chemically synthesized
  source 1..20: mol_type = other DNA
agtgagttcttacaagatct

SEQ ID NO: 20888 - DNA, 20 bp, synthetic construct
  misc_feature 1..20: note = chemically synthesized
  source 1..20: mol_type = other DNA
caagatctgatggttttata

SEQ ID NO: 20889 - DNA, 20 bp, synthetic construct
  misc_feature 1..20: note = chemically synthesized
  source 1..20: mol_type = other DNA
ttataagcggcttttccccc

SEQ ID NO: 20890 - DNA, 20 bp, synthetic construct
  misc_feature 1..20: note = chemically synthesized
  source 1..20: mol_type = other DNA
ctgctgccatgtgaagaagg

SEQ ID NO: 20891 - DNA, 20 bp, synthetic construct
  misc_feature 1..20: note = chemically synthesized
  source 1..20: mol_type = other DNA
tgccatgtgaagaaggacat

SEQ ID NO: 20892 - DNA, 20 bp, synthetic construct
  misc_feature 1..20: note = chemically synthesized
  source 1..20: mol_type = other DNA
catgtttgtttcttcttctg

SEQ ID NO: 20893 - DNA, 20 bp, synthetic construct
  misc_feature 1..20: note = chemically synthesized
  source 1..20: mol_type = other DNA
tttcttcttctgccatgatt

SEQ ID NO: 20894 - DNA, 20 bp, synthetic construct
  misc_feature 1..20: note = chemically synthesized
  source 1..20: mol_type = other DNA
tgtggaactgtgagacaatt

SEQ ID NO: 20895 - DNA, 20 bp, synthetic construct
  misc_feature 1..20: note = chemically synthesized
  source 1..20: mol_type = other DNA
aaaaatataaaataaattag

SEQ ID NO: 20896 - DNA, 20 bp, synthetic construct
  misc_feature 1..20: note = chemically synthesized
  source 1..20: mol_type = other DNA
gagtgtgcaaggaaagagta

SEQ ID NO: 20897 - DNA, 20 bp, synthetic construct
  misc_feature 1..20: note = chemically synthesized
  source 1..20: mol_type = other DNA
gtgagaatacacaaataatc

SEQ ID NO: 20898 - DNA, 20 bp, synthetic construct
  misc_feature 1..20: note = chemically synthesized
  source 1..20: mol_type = other DNA
atattccatttcatcagact

SEQ ID NO: 20899 - DNA, 20 bp, synthetic construct
  misc_feature 1..20: note = chemically synthesized
  source 1..20: mol_type = other DNA
gatgctattatatggtacca

SEQ ID NO: 20900 - DNA, 20 bp, synthetic construct
  misc_feature 1..20: note = chemically synthesized
  source 1..20: mol_type = other DNA
taagaatttcatctttaagg

SEQ ID NO: 20901 - DNA, 20 bp, synthetic construct
  misc_feature 1..20: note = chemically synthesized
  source 1..20: mol_type = other DNA
agttttttactgtatcaaaa

SEQ ID NO: 20902 - DNA, 20 bp, synthetic construct
  misc_feature 1..20: note = chemically synthesized
  source 1..20: mol_type = other DNA
tctagactggacaagaacag

SEQ ID NO: 20903 - DNA, 20 bp, synthetic construct
  misc_feature 1..20: note = chemically synthesized
  source 1..20: mol_type = other DNA
agcaacatatttaaatatat

SEQ ID NO: 20904 - DNA, 20 bp, synthetic construct
  misc_feature 1..20: note = chemically synthesized
  source 1..20: mol_type = other DNA
cttttccaggagaatatacc

SEQ ID NO: 20905 - DNA, 20 bp, synthetic construct
  misc_feature 1..20: note = chemically synthesized
  source 1..20: mol_type = other DNA
tctgatggtacacatttatt

SEQ ID NO: 20906 - DNA, 20 bp, synthetic construct
  misc_feature 1..20: note = chemically synthesized
  source 1..20: mol_type = other DNA
actcagagatcttaaaacat

SEQ ID NO: 20907 - DNA, 20 bp, synthetic construct
  misc_feature 1..20: note = chemically synthesized
  source 1..20: mol_type = other DNA
atcttaaaacatccttgttt

SEQ ID NO: 20908 - DNA, 20 bp, synthetic construct
  misc_feature 1..20: note = chemically synthesized
  source 1..20: mol_type = other DNA
tgaagaacataagggggaaa

SEQ ID NO: 20909 - DNA, 20 bp, synthetic construct
  misc_feature 1..20: note = chemically synthesized
  source 1..20: mol_type = other DNA
gattctttatttgaagaaac

SEQ ID NO: 20910 - DNA, 20 bp, synthetic construct
  misc_feature 1..20: note = chemically synthesized
  source 1..20: mol_type = other DNA
tttatttgaagaaacaaatg

SEQ ID NO: 20911 - DNA, 20 bp, synthetic construct
  misc_feature 1..20: note = chemically synthesized
  source 1..20: mol_type = other DNA
tagtcccccatatagcctta

SEQ ID NO: 20912 - DNA, 20 bp, synthetic construct
  misc_feature 1..20: note = chemically synthesized
  source 1..20: mol_type = other DNA
atagccttagagtgtttaaa

SEQ ID NO: 20913 - DNA, 20 bp, synthetic construct
  misc_feature 1..20: note = chemically synthesized
  source 1..20: mol_type = other DNA
gtctattagaaataaaaaca

SEQ ID NO: 20914 - DNA, 20 bp, synthetic construct
  misc_feature 1..20: note = chemically synthesized
  source 1..20: mol_type = other DNA
gcttaaaaaatttcaaggga

SEQ ID NO: 20915 - DNA, 20 bp, synthetic construct
  misc_feature 1..20: note = chemically synthesized
  source 1..20: mol_type = other DNA
aaatttcaagggaaggggct

SEQ ID NO: 20916 - DNA, 20 bp, synthetic construct
  misc_feature 1..20: note = chemically synthesized
  source 1..20: mol_type = other DNA
ctgaggtcaggaacacccag

SEQ ID NO: 20917 - DNA, 20 bp, synthetic construct
  misc_feature 1..20: note = chemically synthesized
  source 1..20: mol_type = other DNA
ccaccaccaacaccagtgca

SEQ ID NO: 20918 - DNA, 20 bp, synthetic construct
  misc_feature 1..20: note = chemically synthesized
  source 1..20: mol_type = other DNA
aaacagaaattctgtaactg

SEQ ID NO: 20919 - DNA, 20 bp, synthetic construct
  misc_feature 1..20: note = chemically synthesized
  source 1..20: mol_type = other DNA
agtgaacaaatattcaaatt

SEQ ID NO: 20920 - DNA, 20 bp, synthetic construct
  misc_feature 1..20: note = chemically synthesized
  source 1..20: mol_type = other DNA
tcacttataagggaacttcc

SEQ ID NO: 20921 - DNA, 20 bp, synthetic construct
  misc_feature 1..20: note = chemically synthesized
  source 1..20: mol_type = other DNA
aagggaacttccacaagatt

SEQ ID NO: 20922 - DNA, 20 bp, synthetic construct
  misc_feature 1..20: note = chemically synthesized
  source 1..20: mol_type = other DNA
cacaagattaacagattaac

SEQ ID NO: 20923 - DNA, 20 bp, synthetic construct
  misc_feature 1..20: note = chemically synthesized
  source 1..20: mol_type = other DNA
aaggaattcactatcactag

SEQ ID NO: 20924 - DNA, 20 bp, synthetic construct
  misc_feature 1..20: note = chemically synthesized
  source 1..20: mol_type = other DNA
caataatagccttgcatgta

SEQ ID NO: 20925 - DNA, 20 bp, synthetic construct
  misc_feature 1..20: note = chemically synthesized
  source 1..20: mol_type = other DNA
tgaaagatatagactggcta

SEQ ID NO: 20926 - DNA, 20 bp, synthetic construct
  misc_feature 1..20: note = chemically synthesized
  source 1..20: mol_type = other DNA
gaatccaatacaataatagt

SEQ ID NO: 20927 - DNA, 20 bp, synthetic construct
  misc_feature 1..20: note = chemically synthesized
  source 1..20: mol_type = other DNA
cagaaaattaacaaagaaac

SEQ ID NO: 20928 - DNA, 20 bp, synthetic construct
  misc_feature 1..20: note = chemically synthesized
  source 1..20: mol_type = other DNA
agcaaaagcagtgctaagag

SEQ ID NO: 20929 - DNA, 20 bp, synthetic construct
  misc_feature 1..20: note = chemically synthesized
  source 1..20: mol_type = other DNA
acacttaaattaaaaacata

SEQ ID NO: 20930 - DNA, 20 bp, synthetic construct
  misc_feature 1..20: note = chemically synthesized
  source 1..20: mol_type = other DNA
aaatagagaaaaacaacaac

SEQ ID NO: 20931 - DNA, 20 bp, synthetic construct
  misc_feature 1..20: note = chemically synthesized
  source 1..20: mol_type = other DNA
aaccgataccacagaaatag

SEQ ID NO: 20932 - DNA, 20 bp, synthetic construct
  misc_feature 1..20: note = chemically synthesized
  source 1..20: mol_type = other DNA
ttctggacacataccaccta

SEQ ID NO: 20933 - DNA, 20 bp, synthetic construct
  misc_feature 1..20: note = chemically synthesized
  source 1..20: mol_type = other DNA
aaaagaaaatttcaagacca

SEQ ID NO: 20934 - DNA, 20 bp, synthetic construct
  misc_feature 1..20: note = chemically synthesized
  source 1..20: mol_type = other DNA
attctctgaggccagtatta

SEQ ID NO: 20935 - DNA, 20 bp, synthetic construct
  misc_feature 1..20: note = chemically synthesized
  source 1..20: mol_type = other DNA
agataatacaccatgatcaa

SEQ ID NO: 20936 - DNA, 20 bp, synthetic construct
  misc_feature 1..20: note = chemically synthesized
  source 1..20: mol_type = other DNA
ataatactggaagtcctagc

SEQ ID NO: 20937 - DNA, 20 bp, synthetic construct
  misc_feature 1..20: note = chemically synthesized
  source 1..20: mol_type = other DNA
actgtccatctttccagatg

SEQ ID NO: 20938 - DNA, 20 bp, synthetic construct
  misc_feature 1..20: note = chemically synthesized
  source 1..20: mol_type = other DNA
aaatcagcatatgaaacaag

SEQ ID NO: 20939 - DNA, 20 bp, synthetic construct
  misc_feature 1..20: note = chemically synthesized
  source 1..20: mol_type = other DNA
ccatactacccaaagcaatc

SEQ ID NO: 20940 - DNA, 20 bp, synthetic construct
  misc_feature 1..20: note = chemically synthesized
  source 1..20: mol_type = other DNA
aatgctagaggtatcatact

SEQ ID NO: 20941 - DNA, 20 bp, synthetic construct
  misc_feature 1..20: note = chemically synthesized
  source 1..20: mol_type = other DNA
gcatccacatatttatagcc

SEQ ID NO: 20942 - DNA, 20 bp, synthetic construct
  misc_feature 1..20: note = chemically synthesized
  source 1..20: mol_type = other DNA
gaataaaactggactgctga

SEQ ID NO: 20943 - DNA, 20 bp, synthetic construct
  misc_feature 1..20: note = chemically synthesized
  source 1..20: mol_type = other DNA
ctggactgctgatatggttt

SEQ ID NO: 20944 - DNA, 20 bp, synthetic construct
  misc_feature 1..20: note = chemically synthesized
  source 1..20: mol_type = other DNA
cttggcggatgggaggtagg

SEQ ID NO: 20945 - DNA, 20 bp, synthetic construct
  misc_feature 1..20: note = chemically synthesized
  source 1..20: mol_type = other DNA
cccacagaccctctgaagga

SEQ ID NO: 20946 - DNA, 20 bp, synthetic construct
  misc_feature 1..20: note = chemically synthesized
  source 1..20: mol_type = other DNA
tcccactggagaaactgaag

SEQ ID NO: 20947 - DNA, 20 bp, synthetic construct
  misc_feature 1..20: note = chemically synthesized
  source 1..20: mol_type = other DNA
actgaaggtctgtttgtggg

SEQ ID NO: 20948 - DNA, 20 bp, synthetic construct
  misc_feature 1..20: note = chemically synthesized
  source 1..20: mol_type = other DNA
cagaaagtcaacaaaaaaat

SEQ ID NO: 20949 - DNA, 20 bp, synthetic construct
  misc_feature 1..20: note = chemically synthesized
  source 1..20: mol_type = other DNA
taacagaccaataacaagca

SEQ ID NO: 20950 - DNA, 20 bp, synthetic construct
  misc_feature 1..20: note = chemically synthesized
  source 1..20: mol_type = other DNA
caaaaaaaagttcaggacca

SEQ ID NO: 20951 - DNA, 20 bp, synthetic construct
  misc_feature 1..20: note = chemically synthesized
  source 1..20: mol_type = other DNA
ttccatgccagggatgcagg

SEQ ID NO: 20952 - DNA, 20 bp, synthetic construct
  misc_feature 1..20: note = chemically synthesized
  source 1..20: mol_type = other DNA
taagtgtgatacaccacata

SEQ ID NO: 20953 - DNA, 20 bp, synthetic construct
  misc_feature 1..20: note = chemically synthesized
  source 1..20: mol_type = other DNA
caacaaaatccagcatacat

SEQ ID NO: 20954 - DNA, 20 bp, synthetic construct
  misc_feature 1..20: note = chemically synthesized
  source 1..20: mol_type = other DNA
taaagaggaagtcaaactgt

SEQ ID NO: 20955 - DNA, 20 bp, synthetic construct
  misc_feature 1..20: note = chemically synthesized
  source 1..20: mol_type = other DNA
gaactgataaaataattcag

SEQ ID NO: 20956 - DNA, 20 bp, synthetic construct
  misc_feature 1..20: note = chemically synthesized
  source 1..20: mol_type = other DNA
catataaaacgtactctcaa

SEQ ID NO: 20957 - DNA, 20 bp, synthetic construct
  misc_feature 1..20: note = chemically synthesized
  source 1..20: mol_type = other DNA
ataagggagacacttcaaga

SEQ ID NO: 20958 - DNA, 20 bp, synthetic construct
  misc_feature 1..20: note = chemically synthesized
  source 1..20: mol_type = other DNA
cttcaagacatggctttggg

SEQ ID NO: 20959 - DNA, 20 bp, synthetic construct
  misc_feature 1..20: note = chemically synthesized
  source 1..20: mol_type = other DNA
tcttatgccagttagaatca

SEQ ID NO: 20960 - DNA, 20 bp, synthetic construct
  misc_feature 1..20: note = chemically synthesized
  source 1..20: mol_type = other DNA
agccactatggaaaacaata

SEQ ID NO: 20961 - DNA, 20 bp, synthetic construct
  misc_feature 1..20: note = chemically synthesized
  source 1..20: mol_type = other DNA
ataaacagatactggtacca

SEQ ID NO: 20962 - DNA, 20 bp, synthetic construct
  misc_feature 1..20: note = chemically synthesized
  source 1..20: mol_type = other DNA
gtaccacactgtttattgca

SEQ ID NO: 20963 - DNA, 20 bp, synthetic construct
  misc_feature 1..20: note = chemically synthesized
  source 1..20: mol_type = other DNA
tgatgttcaatagcaaagta

SEQ ID NO: 20964 - DNA, 20 bp, synthetic construct
  misc_feature 1..20: note = chemically synthesized
  source 1..20: mol_type = other DNA
tcgatctcatattggttgag

SEQ ID NO: 20965 - DNA, 20 bp, synthetic construct
  misc_feature 1..20: note = chemically synthesized
  source 1..20: mol_type = other DNA
ccctgtactgtcttgctgtg

SEQ ID NO: 20966 - DNA, 20 bp, synthetic construct
  misc_feature 1..20: note = chemically synthesized
  source 1..20: mol_type = other DNA
tgtcctccccatatttttac

SEQ ID NO: 20967 - DNA, 20 bp, synthetic construct
  misc_feature 1..20: note = chemically synthesized
  source 1..20: mol_type = other DNA
catatttttacctcggtttt

SEQ ID NO: 20968 - DNA, 20 bp, synthetic construct
  misc_feature 1..20: note = chemically synthesized
  source 1..20: mol_type = other DNA
ttatatagcacactttgtgc

SEQ ID NO: 20969 - DNA, 20 bp, synthetic construct
  misc_feature 1..20: note = chemically synthesized
  source 1..20: mol_type = other DNA
cactttgtgctatagtttac

SEQ ID NO: 20970 - DNA, 20 bp, synthetic construct
  misc_feature 1..20: note = chemically synthesized
  source 1..20: mol_type = other DNA
catatttgaggtataaacca

SEQ ID NO: 20971 - DNA, 20 bp, synthetic construct
  misc_feature 1..20: note = chemically synthesized
  source 1..20: mol_type = other DNA
tatttttaaatctgcaaata

SEQ ID NO: 20972 - DNA, 20 bp, synthetic construct
  misc_feature 1..20: note = chemically synthesized
  source 1..20: mol_type = other DNA
acttaatatcattaatgaat

SEQ ID NO: 20973 - DNA, 20 bp, synthetic construct
  misc_feature 1..20: note = chemically synthesized
  source 1..20: mol_type = other DNA
ttcctggaacaacatggggg

SEQ ID NO: 20974 - DNA, 20 bp, synthetic construct
  misc_feature 1..20: note = chemically synthesized
  source 1..20: mol_type = other DNA
gagaaatttcactattttgt

SEQ ID NO: 20975 - DNA, 20 bp, synthetic construct
  misc_feature 1..20: note = chemically synthesized
  source 1..20: mol_type = other DNA
aggcagcaggtctggtagga

SEQ ID NO: 20976 - DNA, 20 bp, synthetic construct
  misc_feature 1..20: note = chemically synthesized
  source 1..20: mol_type = other DNA
tgaaaaggaagtgagtagac

SEQ ID NO: 20977 - DNA, 20 bp, synthetic construct
  misc_feature 1..20: note = chemically synthesized
  source 1..20: mol_type = other DNA
cttgaagctgtgcaaccaag

SEQ ID NO: 20978 - DNA, 20 bp, synthetic construct
  misc_feature 1..20: note = chemically synthesized
  source 1..20: mol_type = other DNA
gcatagtttttacatagatc

SEQ ID NO: 20979 - DNA, 20 bp, synthetic construct
  misc_feature 1..20: note = chemically synthesized
  source 1..20: mol_type = other DNA
tgtgtttcacatggtgtgat

SEQ ID NO: 20980 - DNA, 20 bp, synthetic construct
  misc_feature 1..20: note = chemically synthesized
  source 1..20: mol_type = other DNA
agatgccattgacatggccc

SEQ ID NO: 20981 - DNA, 20 bp, synthetic construct
  misc_feature 1..20: note = chemically synthesized
  source 1..20: mol_type = other DNA
aatcctaattactatgcatc

SEQ ID NO: 20982 - DNA, 20 bp, synthetic construct
  misc_feature 1..20: note = chemically synthesized
  source 1..20: mol_type = other DNA
ttttcctattatttctcttt

SEQ ID NO: 20983 - DNA, 20 bp, synthetic construct
  misc_feature 1..20: note = chemically synthesized
  source 1..20: mol_type = other DNA
gaaataagctaatacctaca

SEQ ID NO: 20984 - DNA, 20 bp, synthetic construct
  misc_feature 1..20: note = chemically synthesized
  source 1..20: mol_type = other DNA
taaatgctaggcacagttct

SEQ ID NO: 20985 - DNA, 20 bp, synthetic construct
  misc_feature 1..20: note = chemically synthesized
  source 1..20: mol_type = other DNA
attttcacaacattattaca

SEQ ID NO: 20986 - DNA, 20 bp, synthetic construct
  misc_feature 1..20: note = chemically synthesized
  source 1..20: mol_type = other DNA
agcaacaaattgatggatct

SEQ ID NO: 20987 - DNA, 20 bp, synthetic construct
  misc_feature 1..20: note = chemically synthesized
  source 1..20: mol_type = other DNA
aaattgatggatctttttgc

SEQ ID NO: 20988 - DNA, 20 bp, synthetic construct
  misc_feature 1..20: note = chemically synthesized
  source 1..20: mol_type = other DNA
tgatggatctttttgctttt

SEQ ID NO: 20989 - DNA, 20 bp, synthetic construct
  misc_feature 1..20: note = chemically synthesized
  source 1..20: mol_type = other DNA
ggatctttttgcttttgctt

SEQ ID NO: 20990 - DNA, 20 bp, synthetic construct
  misc_feature 1..20: note = chemically synthesized
  source 1..20: mol_type = other DNA
actgaagcctcactagaacg

SEQ ID NO: 20991 - DNA, 20 bp, synthetic construct
  misc_feature 1..20: note = chemically synthesized
  source 1..20: mol_type = other DNA
cgcctggattcaattgatcc

SEQ ID NO: 20992 - DNA, 20 bp, synthetic construct
  misc_feature 1..20: note = chemically synthesized
  source 1..20: mol_type = other DNA
cacctcagccttgaaaagtg

SEQ ID NO: 20993 - DNA, 20 bp, synthetic construct
  misc_feature 1..20: note = chemically synthesized
  source 1..20: mol_type = other DNA
aatttttagatataatttct

SEQ ID NO: 20994 - DNA, 20 bp, synthetic construct
  misc_feature 1..20: note = chemically synthesized
  source 1..20: mol_type = other DNA
tcttccataaccactttgac

SEQ ID NO: 20995 - DNA, 20 bp, synthetic construct
  misc_feature 1..20: note = chemically synthesized
  source 1..20: mol_type = other DNA
taaattatgtccagcaatac

SEQ ID NO: 20996 - DNA, 20 bp, synthetic construct
  misc_feature 1..20: note = chemically synthesized
  source 1..20: mol_type = other DNA
cgttggcttaggcaaaaaca

SEQ ID NO: 20997 - DNA, 20 bp, synthetic construct
  misc_feature 1..20: note = chemically synthesized
  source 1..20: mol_type = other DNA
ccttaacatgttaatttctc

SEQ ID NO: 20998 - DNA, 20 bp, synthetic construct
  misc_feature 1..20: note = chemically synthesized
  source 1..20: mol_type = other DNA
tgagcaagtgtgtgcagaag

SEQ ID NO: 20999 - DNA, 20 bp, synthetic construct
  misc_feature 1..20: note = chemically synthesized
  source 1..20: mol_type = other DNA
tcctctccctcaactggtaa

SEQ ID NO: 21000 - DNA, 20 bp, synthetic construct
  misc_feature 1..20: note = chemically synthesized
  source 1..20: mol_type = other DNA
cttaaggctattaactcccc

SEQ ID NO: 21001 - DNA, 20 bp, synthetic construct
  misc_feature 1..20: note = chemically synthesized
  source 1..20: mol_type = other DNA
atatatagttctctcacata

SEQ ID NO: 21002 - DNA, 20 bp, synthetic construct
  misc_feature 1..20: note = chemically synthesized
  source 1..20: mol_type = other DNA
ctcaaacatctcatcattag

SEQ ID NO: 21003 - DNA, 20 bp, synthetic construct
  misc_feature 1..20: note = chemically synthesized
  source 1..20: mol_type = other DNA
tctacaaatttgtcaattct

SEQ ID NO: 21004 - DNA, 20 bp, synthetic construct
  misc_feature 1..20: note = chemically synthesized
  source 1..20: mol_type = other DNA
gaatccttactgaataataa

SEQ ID NO: 21005 - DNA, 20 bp, synthetic construct
  misc_feature 1..20: note = chemically synthesized
  source 1..20: mol_type = other DNA
aactgtgactctctcatctg

SEQ ID NO: 21006 - DNA, 20 bp, synthetic construct
  misc_feature 1..20: note = chemically synthesized
  source 1..20: mol_type = other DNA
tctctcatctgttatgtttt

SEQ ID NO: 21007 - DNA, 20 bp, synthetic construct
  misc_feature 1..20: note = chemically synthesized
  source 1..20: mol_type = other DNA
atgggcaaaattctggcagc

SEQ ID NO: 21008 - DNA, 20 bp, synthetic construct
  misc_feature 1..20: note = chemically synthesized
  source 1..20: mol_type = other DNA
gattcttctcctaagaaacc

SEQ ID NO: 21009 - DNA, 20 bp, synthetic construct
  misc_feature 1..20: note = chemically synthesized
  source 1..20: mol_type = other DNA
tcttggatgtgaatacattt

SEQ ID NO: 21010 - DNA, 20 bp, synthetic construct
  misc_feature 1..20: note = chemically synthesized
  source 1..20: mol_type = other DNA
tattcatgaagaaactgtta

SEQ ID NO: 21011 - DNA, 20 bp, synthetic construct
  misc_feature 1..20: note = chemically synthesized
  source 1..20: mol_type = other DNA
gtttaaggggttctttttca

SEQ ID NO: 21012 - DNA, 20 bp, synthetic construct
  misc_feature 1..20: note = chemically synthesized
  source 1..20: mol_type = other DNA
aggacatttcctttgaaaac

SEQ ID NO: 21013 - DNA, 20 bp, synthetic construct
  misc_feature 1..20: note = chemically synthesized
  source 1..20: mol_type = other DNA
atcctggtcctaactctgcc

SEQ ID NO: 21014 - DNA, 20 bp, synthetic construct
  misc_feature 1..20: note = chemically synthesized
  source 1..20: mol_type = other DNA
ttgctctatgaactggagga

SEQ ID NO: 21015 - DNA, 20 bp, synthetic construct
  misc_feature 1..20: note = chemically synthesized
  source 1..20: mol_type = other DNA
gatagaaaataagtattaaa

SEQ ID NO: 21016 - DNA, 20 bp, synthetic construct
  misc_feature 1..20: note = chemically synthesized
  source 1..20: mol_type = other DNA
cctgagatcaacacacatgc

SEQ ID NO: 21017 - DNA, 20 bp, synthetic construct
  misc_feature 1..20: note = chemically synthesized
  source 1..20: mol_type = other DNA
ttataagatccataaaataa

SEQ ID NO: 21018 - DNA, 20 bp, synthetic construct
  misc_feature 1..20: note = chemically synthesized
  source 1..20: mol_type = other DNA
cccaggtaacagtgctccat

SEQ ID NO: 21019 - DNA, 20 bp, synthetic construct
  misc_feature 1..20: note = chemically synthesized
  source 1..20: mol_type = other DNA
acttgtgcagagatcttctg

SEQ ID NO: 21020 - DNA, 20 bp, synthetic construct
  misc_feature 1..20: note = chemically synthesized
  source 1..20: mol_type = other DNA
cccagtgctaacaagtccct

SEQ ID NO: 21021 - DNA, 20 bp, synthetic construct
  misc_feature 1..20: note = chemically synthesized
  source 1..20: mol_type = other DNA
cttttatttcaaggcatact

SEQ ID NO: 21022 - DNA, 20 bp, synthetic construct
  misc_feature 1..20: note = chemically synthesized
  source 1..20: mol_type = other DNA
aatacttcacttctctgtaa

SEQ ID NO: 21023 - DNA, 20 bp, synthetic construct
  misc_feature 1..20: note = chemically synthesized
  source 1..20: mol_type = other DNA
tgtaataaggtttctgtcct

SEQ ID NO: 21024 - DNA, 20 bp, synthetic construct
  misc_feature 1..20: note = chemically synthesized
  source 1..20: mol_type = other DNA
ctaaactacagagaataaga

SEQ ID NO: 21025 - DNA, 20 bp, synthetic construct
  misc_feature 1..20: note = chemically synthesized
  source 1..20: mol_type = other DNA
taggcaaaattgacttttaa

SEQ ID NO: 21026 - DNA, 20 bp, synthetic construct
  misc_feature 1..20: note = chemically synthesized
  source 1..20: mol_type = other DNA
aacagttagtataaggtgaa

SEQ ID NO: 21027 - DNA, 20 bp, synthetic construct
  misc_feature 1..20: note = chemically synthesized
  source 1..20: mol_type = other DNA
catatataatgcatttaatt

SEQ ID NO: 21028 - DNA, 20 bp, synthetic construct
  misc_feature 1..20: note = chemically synthesized
  source 1..20: mol_type = other DNA
taattttgagattatgctgg

SEQ ID NO: 21029 - DNA, 20 bp, synthetic construct
  misc_feature 1..20: note = chemically synthesized
  source 1..20: mol_type = other DNA
ctggttattatttcagatcc

SEQ ID NO: 21030 - DNA, 20 bp, synthetic construct
  misc_feature 1..20: note = chemically synthesized
  source 1..20: mol_type = other DNA
caacacatgacataatttca

SEQ ID NO: 21031 - DNA, 20 bp, synthetic construct
  misc_feature 1..20: note = chemically synthesized
  source 1..20: mol_type = other DNA
tgccatttacccagcaatca

SEQ ID NO: 21032 - DNA, 20 bp, synthetic construct
  misc_feature 1..20: note = chemically synthesized
  source 1..20: mol_type = other DNA
atttacccagcaatcagttg

SEQ ID NO: 21033 - DNA, 20 bp, synthetic construct
  misc_feature 1..20: note = chemically synthesized
  source 1..20: mol_type = other DNA
gagagtataaacccacaagg

SEQ ID NO: 21034 - DNA, 20 bp, synthetic construct
  misc_feature 1..20: note = chemically synthesized
  source 1..20: mol_type = other DNA
gaggttatacctcactcgca

SEQ ID NO: 21035 - DNA, 20 bp, synthetic construct
  misc_feature 1..20: note = chemically synthesized
  source 1..20: mol_type = other DNA
actcgcaaattgttttatca

SEQ ID NO: 21036 - DNA, 20 bp, synthetic construct
  misc_feature 1..20: note = chemically synthesized
  source 1..20: mol_type = other DNA
ttactaacagaatgtagagt

SEQ ID NO: 21037 - DNA, 20 bp, synthetic construct
  misc_feature 1..20: note = chemically synthesized
  source 1..20: mol_type = other DNA
atatacatcttcctaaaata

SEQ ID NO: 21038 - DNA, 20 bp, synthetic construct
  misc_feature 1..20: note = chemically synthesized
  source 1..20: mol_type = other DNA
ttatttctatgttgtcataa

SEQ ID NO: 21039 - DNA, 20 bp, synthetic construct
  misc_feature 1..20: note = chemically synthesized
  source 1..20: mol_type = other DNA
aaatgtagcctaaatatata

SEQ ID NO: 21040 - DNA, 20 bp, synthetic construct
  misc_feature 1..20: note = chemically synthesized
  source 1..20: mol_type = other DNA
cctaaatatatattccgttt

SEQ ID NO: 21041 - DNA, 20 bp, synthetic construct
  misc_feature 1..20: note = chemically synthesized
  source 1..20: mol_type = other DNA
cctccgagactcctttgaat

SEQ ID NO: 21042 - DNA, 20 bp, synthetic construct
  misc_feature 1..20: note = chemically synthesized
  source 1..20: mol_type = other DNA
agttagagttggtagagtta

SEQ ID NO: 21043 - DNA, 20 bp, synthetic construct
  misc_feature 1..20: note = chemically synthesized
  source 1..20: mol_type = other DNA
tggtagagttaccaggcttt

SEQ ID NO: 21044 - DNA, 20 bp, synthetic construct
  misc_feature 1..20: note = chemically synthesized
  source 1..20: mol_type = other DNA
aactagtagcatgaaatctt

SEQ ID NO: 21045 - DNA, 20 bp, synthetic construct
  misc_feature 1..20: note = chemically synthesized
  source 1..20: mol_type = other DNA
aggaattctgtgggaagcac

SEQ ID NO: 21046 - DNA, 20 bp, synthetic construct
  misc_feature 1..20: note = chemically synthesized
  source 1..20: mol_type = other DNA
agcacataagatttcatgct

SEQ ID NO: 21047 - DNA, 20 bp, synthetic construct
  misc_feature 1..20: note = chemically synthesized
  source 1..20: mol_type = other DNA
tgcctgtaagttctcttctc

SEQ ID NO: 21048 - DNA, 20 bp, synthetic construct
  misc_feature 1..20: note = chemically synthesized
  source 1..20: mol_type = other DNA
gtctcggaggactgtaagaa

SEQ ID NO: 21049 - DNA, 20 bp, synthetic construct
  misc_feature 1..20: note = chemically synthesized
  source 1..20: mol_type = other DNA
cctctctgtaacatccctgg

SEQ ID NO: 21050 - DNA, 20 bp, synthetic construct
  misc_feature 1..20: note = chemically synthesized
  source 1..20: mol_type = other DNA
gaggagttactgctctttga

SEQ ID NO: 21051 - DNA, 20 bp, synthetic construct
  misc_feature 1..20: note = chemically synthesized
  source 1..20: mol_type = other DNA
ttgcttgggaagtgaccaat

SEQ ID NO: 21052 - DNA, 20 bp, synthetic construct
  misc_feature 1..20: note = chemically synthesized
  source 1..20: mol_type = other DNA
aggtgactgaggaatgtaga

SEQ ID NO: 21053 - DNA, 20 bp, synthetic construct
  misc_feature 1..20: note = chemically synthesized
  source 1..20: mol_type = other DNA
aaaaagttaatatttacatt

SEQ ID NO: 21054 - DNA, 20 bp, synthetic construct
  misc_feature 1..20: note = chemically synthesized
  source 1..20: mol_type = other DNA
tttattttaggaagatgtat

SEQ ID NO: 21055 - DNA, 20 bp, synthetic construct
  misc_feature 1..20: note = chemically synthesized
  source 1..20: mol_type = other DNA
attctgttagtaattatatg

SEQ ID NO: 21056 - DNA, 20 bp, synthetic construct
  misc_feature 1..20: note = chemically synthesized
  source 1..20: mol_type = other DNA
taattatatgaaatgcttaa

SEQ ID NO: 21057 - DNA, 20 bp, synthetic construct
  misc_feature 1..20: note = chemically synthesized
  source 1..20: mol_type = other DNA
aagaatgtttcatattcaca

SEQ ID NO: 21058 - DNA, 20 bp, synthetic construct
  misc_feature 1..20: note = chemically synthesized
  source 1..20: mol_type = other DNA
attcacaattagcttggaat

SEQ ID NO: 21059 - DNA, 20 bp, synthetic construct
  misc_feature 1..20: note = chemically synthesized
  source 1..20: mol_type = other DNA
tggaattaatgttttaattc

SEQ ID NO: 21060 - DNA, 20 bp, synthetic construct
  misc_feature 1..20: note = chemically synthesized
  source 1..20: mol_type = other DNA
agtaatttttttcttcaatg

SEQ ID NO: 21061 - DNA, 20 bp, synthetic construct
  misc_feature 1..20: note = chemically synthesized
  source 1..20: mol_type = other DNA
aaggtagagaaccacaatgt

SEQ ID NO: 21062 - DNA, 20 bp, synthetic construct
  misc_feature 1..20: note = chemically synthesized
  source 1..20: mol_type = other DNA
aaattataaaacaattcctt

SEQ ID NO: 21063 - DNA, 20 bp, synthetic construct
  misc_feature 1..20: note = chemically synthesized
  source 1..20: mol_type = other DNA
ttccttgtgggtttatactc

SEQ ID NO: 21064 - DNA, 20 bp, synthetic construct
  misc_feature 1..20: note = chemically synthesized
  source 1..20: mol_type = other DNA
aacattagcaaagaaaaagt

SEQ ID NO: 21065 - DNA, 20 bp, synthetic construct
  misc_feature 1..20: note = chemically synthesized
  source 1..20: mol_type = other DNA
agatcttgaagaatcaagcc

SEQ ID NO: 21066 - DNA, 20 bp, synthetic construct
  misc_feature 1..20: note = chemically synthesized
  source 1..20: mol_type = other DNA
gtaaatggcagtgatgactt

SEQ ID NO: 21067 - DNA, 20 bp, synthetic construct
  misc_feature 1..20: note = chemically synthesized
  source 1..20: mol_type = other DNA
taacacatttatttttcatt

SEQ ID NO: 21068 - DNA, 20 bp, synthetic construct
  misc_feature 1..20: note = chemically synthesized
  source 1..20: mol_type = other DNA
caaagcacggtcttattctc

SEQ ID NO: 21069 - DNA, 20 bp, synthetic construct
  misc_feature 1..20: note = chemically synthesized
  source 1..20: mol_type = other DNA
aagtgaagtattttatgtgt

SEQ ID NO: 21070 - DNA, 20 bp, synthetic construct
  misc_feature 1..20: note = chemically synthesized
  source 1..20: mol_type = other DNA
attttatgtgtacctgtttc

SEQ ID NO: 21071 - DNA, 20 bp, synthetic construct
  misc_feature 1..20: note = chemically synthesized
  source 1..20: mol_type = other DNA
atctttatcctgaaatgagc

SEQ ID NO: 21072 - DNA, 20 bp, synthetic construct
  misc_feature 1..20: note = chemically synthesized
  source 1..20: mol_type = other DNA
ctagtcacaaatttttccag

SEQ ID NO: 21073 - DNA, 20 bp, synthetic construct
  misc_feature 1..20: note = chemically synthesized
  source 1..20: mol_type = other DNA
cccggagtatgccttgaaat

SEQ ID NO: 21074 - DNA, 20 bp, synthetic construct
  misc_feature 1..20: note = chemically synthesized
  source 1..20: mol_type = other DNA
agtgggcaggagctcaagga

SEQ ID NO: 21075 - DNA, 20 bp, synthetic construct
  misc_feature 1..20: note = chemically synthesized
  source 1..20: mol_type = other DNA
ctgcacctgagcagagcccc

SEQ ID NO: 21076 - DNA, 20 bp, synthetic construct
  misc_feature 1..20: note = chemically synthesized
  source 1..20: mol_type = other DNA
ctggtacatagaaaatgctc

SEQ ID NO: 21077 - DNA, 20 bp, synthetic construct
  misc_feature 1..20: note = chemically synthesized
  source 1..20: mol_type = other DNA
atggatttttttttgaaaaa

SEQ ID NO: 21078 - DNA, 20 bp, synthetic construct
  misc_feature 1..20: note = chemically synthesized
  source 1..20: mol_type = other DNA
ttccctttcaaggggaaggg

SEQ ID NO: 21079 - DNA, 20 bp, synthetic construct
  misc_feature 1..20: note = chemically synthesized
  source 1..20: mol_type = other DNA
tttgtggagaggtccccaca

SEQ ID NO: 21080 - DNA, 20 bp, synthetic construct
  misc_feature 1..20: note = chemically synthesized
  source 1..20: mol_type = other DNA
ttaatattatcatagcctgg

SEQ ID NO: 21081 - DNA, 20 bp, synthetic construct
  misc_feature 1..20: note = chemically synthesized
  source 1..20: mol_type = other DNA
ttatcatagcctggtatggt

SEQ ID NO: 21082 - DNA, 20 bp, synthetic construct
  misc_feature 1..20: note = chemically synthesized
  source 1..20: mol_type = other DNA
ttcatatagatggataatta

SEQ ID NO: 21083 - DNA, 20 bp, synthetic construct
  misc_feature 1..20: note = chemically synthesized
  source 1..20: mol_type = other DNA
tcctaataatacattgccac

SEQ ID NO: 21084 - DNA, 20 bp, synthetic construct
  misc_feature 1..20: note = chemically synthesized
  source 1..20: mol_type = other DNA
cactatagtttctttaaatt

SEQ ID NO: 21085 - DNA, 20 bp, synthetic construct
  misc_feature 1..20: note = chemically synthesized
  source 1..20: mol_type = other DNA
ctcctccagttcatagagca

SEQ ID NO: 21086 - DNA, 20 bp, synthetic construct
  misc_feature 1..20: note = chemically synthesized
  source 1..20: mol_type = other DNA
agcaaatggcagagttagga

SEQ ID NO: 21087 - DNA, 20 bp, synthetic construct
  misc_feature 1..20: note = chemically synthesized
  source 1..20: mol_type = other DNA
taagaattaaatattaaaac

SEQ ID NO: 21088 - DNA, 20 bp, synthetic construct
  misc_feature 1..20: note = chemically synthesized
  source 1..20: mol_type = other DNA
cagtacttgcagtcaaaggt

SEQ ID NO: 21089 - DNA, 20 bp, synthetic construct
  misc_feature 1..20: note = chemically synthesized
  source 1..20: mol_type = other DNA
aagaaccccttaaactgaat

SEQ ID NO: 21090 - DNA, 20 bp, synthetic construct
  misc_feature 1..20: note = chemically synthesized
  source 1..20: mol_type = other DNA
tatactctccagttatctta

SEQ ID NO: 21091 - DNA, 20 bp, synthetic construct
  misc_feature 1..20: note = chemically synthesized
  source 1..20: mol_type = other DNA
tattcacatccaagaaaaca

SEQ ID NO: 21092 - DNA, 20 bp, synthetic construct
  misc_feature 1..20: note = chemically synthesized
  source 1..20: mol_type = other DNA
taacagatgagagagtcaca

SEQ ID NO: 21093 - DNA, 20 bp, synthetic construct
  misc_feature 1..20: note = chemically synthesized
  source 1..20: mol_type = other DNA
ttaatattaaccttgaaatt

SEQ ID NO: 21094 - DNA, 20 bp, synthetic construct
  misc_feature 1..20: note = chemically synthesized
  source 1..20: mol_type = other DNA
taatccattttattattcag

SEQ ID NO: 21095 - DNA, 20 bp, synthetic construct
  misc_feature 1..20: note = chemically synthesized
  source 1..20: mol_type = other DNA
agatagagttaagaatacag

SEQ ID NO: 21096 - DNA, 20 bp, synthetic construct
  misc_feature 1..20: note = chemically synthesized
  source 1..20: mol_type = other DNA
cagtgtaccgtggaatgggg

SEQ ID NO: 21097 - DNA, 20 bp, synthetic construct
  misc_feature 1..20: note = chemically synthesized
  source 1..20: mol_type = other DNA
ggtttctaacctagttacct

SEQ ID NO: 21098 - DNA, 20 bp, synthetic construct
  misc_feature 1..20: note = chemically synthesized
  source 1..20: mol_type = other DNA
gaaaaacctctctaatgatg

SEQ ID NO: 21099 - DNA, 20 bp, synthetic construct
  misc_feature 1..20: note = chemically synthesized
  source 1..20: mol_type = other DNA
gatgggagagacctgcaggg

SEQ ID NO: 21100 - DNA, 20 bp, synthetic construct
  misc_feature 1..20: note = chemically synthesized
  source 1..20: mol_type = other DNA
agggggagttaatagcctta

SEQ ID NO: 21101 - DNA, 20 bp, synthetic construct
  misc_feature 1..20: note = chemically synthesized
  source 1..20: mol_type = other DNA
gggaagtactaagtagtcag

SEQ ID NO: 21102 - DNA, 20 bp, synthetic construct
  misc_feature 1..20: note = chemically synthesized
  source 1..20: mol_type = other DNA
ctgtggtgtgacccaggatg

SEQ ID NO: 21103 - DNA, 20 bp, synthetic construct
  misc_feature 1..20: note = chemically synthesized
  source 1..20: mol_type = other DNA
tttgcccaaatgtgggggaa

SEQ ID NO: 21104 - DNA, 20 bp, synthetic construct
  misc_feature 1..20: note = chemically synthesized
  source 1..20: mol_type = other DNA
aggatatttaggatcattaa

SEQ ID NO: 21105 - DNA, 20 bp, synthetic construct
  misc_feature 1..20: note = chemically synthesized
  source 1..20: mol_type = other DNA
gagcgatgtagtccctaaat

SEQ ID NO: 21106 - DNA, 20 bp, synthetic construct
  misc_feature 1..20: note = chemically synthesized
  source 1..20: mol_type = other DNA
cttaaaatggactagaaaca

SEQ ID NO: 21107 - DNA, 20 bp, synthetic construct
  misc_feature 1..20: note = chemically synthesized
  source 1..20: mol_type = other DNA
cgtattgctggacataattt

SEQ ID NO: 21108 - DNA, 20 bp, synthetic construct
  misc_feature 1..20: note = chemically synthesized
  source 1..20: mol_type = other DNA
ctttgatataagtgaactca

SEQ ID NO: 21109 - DNA, 20 bp, synthetic construct
  misc_feature 1..20: note = chemically synthesized
  source 1..20: mol_type = other DNA
gaagaggacttcacacttcc

SEQ ID NO: 21110 - DNA, 20 bp, synthetic construct
  misc_feature 1..20: note = chemically synthesized
  source 1..20: mol_type = other DNA
gccgtaaagaacaactgctc

SEQ ID NO: 21111 - DNA, 20 bp, synthetic construct
  misc_feature 1..20: note = chemically synthesized
  source 1..20: mol_type = other DNA
agtttaatactaggctactc

SEQ ID NO: 21112 - DNA, 20 bp, synthetic construct
  misc_feature 1..20: note = chemically synthesized
  source 1..20: mol_type = other DNA
cggctgttttttgttaacac

SEQ ID NO: 21113 - DNA, 20 bp, synthetic construct
  misc_feature 1..20: note = chemically synthesized
  source 1..20: mol_type = other DNA
gttaacacagaagttttcca

SEQ ID NO: 21114 - DNA, 20 bp, synthetic construct
  misc_feature 1..20: note = chemically synthesized
  source 1..20: mol_type = other DNA
ccatccttcccgagacctaa

SEQ ID NO: 21115 - DNA, 20 bp, synthetic construct
  misc_feature 1..20: note = chemically synthesized
  source 1..20: mol_type = other DNA
acgatgtttatctttcgtga

SEQ ID NO: 21116 - DNA, 20 bp, synthetic construct
  misc_feature 1..20: note = chemically synthesized
  source 1..20: mol_type = other DNA
agatccatcaaggcccagca

SEQ ID NO: 21117 - DNA, 20 bp, synthetic construct
  misc_feature 1..20: note = chemically synthesized
  source 1..20: mol_type = other DNA
tttcaaggctgaggtgggag

SEQ ID NO: 21118 - DNA, 20 bp, synthetic construct
  misc_feature 1..20: note = chemically synthesized
  source 1..20: mol_type = other DNA
gcctggggaacatagggaga

SEQ ID NO: 21119 - DNA, 20 bp, synthetic construct
  misc_feature 1..20: note = chemically synthesized
  source 1..20: mol_type = other DNA
attgaatccaggcgttctag

SEQ ID NO: 21120 - DNA, 20 bp, synthetic construct
  misc_feature 1..20: note = chemically synthesized
  source 1..20: mol_type = other DNA
ttctagtgaggcttcagtga

SEQ ID NO: 21121 - DNA, 20 bp, synthetic construct
  misc_feature 1..20: note = chemically synthesized
  source 1..20: mol_type = other DNA
gccggggtgacagagtgaga

SEQ ID NO: 21122 - DNA, 20 bp, synthetic construct
  misc_feature 1..20: note = chemically synthesized
  source 1..20: mol_type = other DNA
tctacagctaaagtcagact

SEQ ID NO: 21123 - DNA, 20 bp, synthetic construct
  misc_feature 1..20: note = chemically synthesized
  source 1..20: mol_type = other DNA
ccaccatcacctgggtaatg

SEQ ID NO: 21124 - DNA, 20 bp, synthetic construct
  misc_feature 1..20: note = chemically synthesized
  source 1..20: mol_type = other DNA
attacatagcatctctgtgc

SEQ ID NO: 21125 - DNA, 20 bp, synthetic construct
  misc_feature 1..20: note = chemically synthesized
  source 1..20: mol_type = other DNA
ttaataaacactctgtaggt

SEQ ID NO: 21126 - DNA, 20 bp, synthetic construct
  misc_feature 1..20: note = chemically synthesized
  source 1..20: mol_type = other DNA
gttagctcatgtattgtcat

SEQ ID NO: 21127 - DNA, 20 bp, synthetic construct
  misc_feature 1..20: note = chemically synthesized
  source 1..20: mol_type = other DNA
aatcacgggatgcatagtaa

SEQ ID NO: 21128 - DNA, 20 bp, synthetic construct
  misc_feature 1..20: note = chemically synthesized
  source 1..20: mol_type = other DNA
acacacgatctatgtaaaaa

SEQ ID NO: 21129 - DNA, 20 bp, synthetic construct
  misc_feature 1..20: note = chemically synthesized
  source 1..20: mol_type = other DNA
gtaaaaactatgcttggttg

SEQ ID NO: 21130 - DNA, 20 bp, synthetic construct
  misc_feature 1..20: note = chemically synthesized
  source 1..20: mol_type = other DNA
cctcccactgccaagactgc

SEQ ID NO: 21131 - DNA, 20 bp, synthetic construct
  misc_feature 1..20: note = chemically synthesized
  source 1..20: mol_type = other DNA
cactgccaagactgcagctg

SEQ ID NO: 21132 - DNA, 20 bp, synthetic construct
  misc_feature 1..20: note = chemically synthesized
  source 1..20: mol_type = other DNA
tctaagtgtataatgacttc

SEQ ID NO: 21133 - DNA, 20 bp, synthetic construct
  misc_feature 1..20: note = chemically synthesized
  source 1..20: mol_type = other DNA
gacttcctctgcttctgcaa

SEQ ID NO: 21134 - DNA, 20 bp, synthetic construct
  misc_feature 1..20: note = chemically synthesized
  source 1..20: mol_type = other DNA
ctgtgttttggaacaggagg

SEQ ID NO: 21135 - DNA, 20 bp, synthetic construct
  misc_feature 1..20: note = chemically synthesized
  source 1..20: mol_type = other DNA
tattctatacttctttgaaa

SEQ ID NO: 21136 - DNA, 20 bp, synthetic construct
  misc_feature 1..20: note = chemically synthesized
  source 1..20: mol_type = other DNA
agtgttgccagatgacgact

SEQ ID NO: 21137 - DNA, 20 bp, synthetic construct
  misc_feature 1..20: note = chemically synthesized
  source 1..20: mol_type = other DNA
agatcaataaaatacaaagt

SEQ ID NO: 21138 - DNA, 20 bp, synthetic construct
  misc_feature 1..20: note = chemically synthesized
  source 1..20: mol_type = other DNA
tcagaataaaaccatttatt

SEQ ID NO: 21139 - DNA, 20 bp, synthetic construct
  misc_feature 1..20: note = chemically synthesized
  source 1..20: mol_type = other DNA
tatatgtgtatgtaaatctc

SEQ ID NO: 21140 - DNA, 20 bp, synthetic construct
  misc_feature 1..20: note = chemically synthesized
  source 1..20: mol_type = other DNA
gctcttgcattcacttatat

SEQ ID NO: 21141 - DNA, 20 bp, synthetic construct
  misc_feature 1..20: note = chemically synthesized
  source 1..20: mol_type = other DNA
atattctagcttgttaagag

SEQ ID NO: 21142 - DNA, 20 bp, synthetic construct
  misc_feature 1..20: note = chemically synthesized
  source 1..20: mol_type = other DNA
agagagaagtttggggcaaa

SEQ ID NO: 21143 - DNA, 20 bp, synthetic construct
  misc_feature 1..20: note = chemically synthesized
  source 1..20: mol_type = other DNA
cagggaaatgtctggaggga

SEQ ID NO: 21144 - DNA, 20 bp, synthetic construct
  misc_feature 1..20: note = chemically synthesized
  source 1..20: mol_type = other DNA
ctttcttttattgatatatg

SEQ ID NO: 21145 - DNA, 20 bp, synthetic construct
  misc_feature 1..20: note = chemically synthesized
  source 1..20: mol_type = other DNA
tattcatcacctcaagtatt

SEQ ID NO: 21146 - DNA, 20 bp, synthetic construct
  misc_feature 1..20: note = chemically synthesized
  source 1..20: mol_type = other DNA
ctattttgaaatatacaata

SEQ ID NO: 21147 - DNA, 20 bp, synthetic construct
  misc_feature 1..20: note = chemically synthesized
  source 1..20: mol_type = other DNA
catattccttctatctaact

SEQ ID NO: 21148 - DNA, 20 bp, synthetic construct
  misc_feature 1..20: note = chemically synthesized
  source 1..20: mol_type = other DNA
cgtacacacctttctctacc

SEQ ID NO: 21149 - DNA, 20 bp, synthetic construct
  misc_feature 1..20: note = chemically synthesized
  source 1..20: mol_type = other DNA
gcaaaatttgtctttctatg

SEQ ID NO: 21150 - DNA, 20 bp, synthetic construct
  misc_feature 1..20: note = chemically synthesized
  source 1..20: mol_type = other DNA
gtctttctatgcctggctta

SEQ ID NO: 21151 - DNA, 20 bp, synthetic construct
  misc_feature 1..20: note = chemically synthesized
  source 1..20: mol_type = other DNA
tttcgtttaacataatgact

SEQ ID NO: 21152 - DNA, 20 bp, synthetic construct
  misc_feature 1..20: note = chemically synthesized
  source 1..20: mol_type = other DNA
catccatgttgctgcaaatg

SEQ ID NO: 21153 - DNA, 20 bp, synthetic construct
  misc_feature 1..20: note = chemically synthesized
  source 1..20: mol_type = other DNA
catccattgatggacactta

SEQ ID NO: 21154 - DNA, 20 bp, synthetic construct
  misc_feature 1..20: note = chemically synthesized
  source 1..20: mol_type = other DNA
ataaacagtgtggtaccagt

SEQ ID NO: 21155 - DNA, 20 bp, synthetic construct
  misc_feature 1..20: note = chemically synthesized
  source 1..20: mol_type = other DNA
ctttggataaatacccagta

SEQ ID NO: 21156 - DNA, 20 bp, synthetic construct
  misc_feature 1..20: note = chemically synthesized
  source 1..20: mol_type = other DNA
gatcttatgatagttcaatt

SEQ ID NO: 21157 - DNA, 20 bp, synthetic construct
  misc_feature 1..20: note = chemically synthesized
  source 1..20: mol_type = other DNA
agctttttggtaaatctaca

SEQ ID NO: 21158 - DNA, 20 bp, synthetic construct
  misc_feature 1..20: note = chemically synthesized
  source 1..20: mol_type = other DNA
catagtggctatactaattt

SEQ ID NO: 21159 - DNA, 20 bp, synthetic construct
  misc_feature 1..20: note = chemically synthesized
  source 1..20: mol_type = other DNA
ttattaatttatttaaatca

SEQ ID NO: 21160 - DNA, 20 bp, synthetic construct
  misc_feature 1..20: note = chemically synthesized
  source 1..20: mol_type = other DNA
ggcataagatgatatctcat

SEQ ID NO: 21161 - DNA, 20 bp, synthetic construct
  misc_feature 1..20: note = chemically synthesized
  source 1..20: mol_type = other DNA
aagatgatatctcattgtgg

SEQ ID NO: 21162 - DNA, 20 bp, synthetic construct
  misc_feature 1..20: note = chemically synthesized
  source 1..20: mol_type = other DNA
ggttttgatttgcatttctc

SEQ ID NO: 21163 - DNA, 20 bp, synthetic construct
  misc_feature 1..20: note = chemically synthesized
  source 1..20: mol_type = other DNA
tatcctttgccaatttttta

SEQ ID NO: 21164 - DNA, 20 bp, synthetic construct
  misc_feature 1..20: note = chemically synthesized
  source 1..20: mol_type = other DNA
gccaattttttaatgagatt

SEQ ID NO: 21165 - DNA, 20 bp, synthetic construct
  misc_feature 1..20: note = chemically synthesized
  source 1..20: mol_type = other DNA
tatttgtttttccactgttg

SEQ ID NO: 21166 - DNA, 20 bp, synthetic construct
  misc_feature 1..20: note = chemically synthesized
  source 1..20: mol_type = other DNA
tttttccactgttgagttgt

SEQ ID NO: 21167 - DNA, 20 bp, synthetic construct
  misc_feature 1..20: note = chemically synthesized
  source 1..20: mol_type = other DNA
tttgagtttcttatatattc

SEQ ID NO: 21168 - DNA, 20 bp, synthetic construct
  misc_feature 1..20: note = chemically synthesized
  source 1..20: mol_type = other DNA
gcaaatattttctcgcattc

SEQ ID NO: 21169 - DNA, 20 bp, synthetic construct
  misc_feature 1..20: note = chemically synthesized
  source 1..20: mol_type = other DNA
aacagcttgtctcttcactg

SEQ ID NO: 21170 - DNA, 20 bp, synthetic construct
  misc_feature 1..20: note = chemically synthesized
  source 1..20: mol_type = other DNA
gcttgtctcttcactgtgtt

SEQ ID NO: 21171 - DNA, 20 bp, synthetic construct
  misc_feature 1..20: note = chemically synthesized
  source 1..20: mol_type = other DNA
cctttactgtgcagatgtat

SEQ ID NO: 21172 - DNA, 20 bp, synthetic construct
  misc_feature 1..20: note = chemically synthesized
  source 1..20: mol_type = other DNA
atatagtcccatttgtctat

SEQ ID NO: 21173 - DNA, 20 bp, synthetic construct
  misc_feature 1..20: note = chemically synthesized
  source 1..20: mol_type = other DNA
tctatttttgcttttgttgc

SEQ ID NO: 21174 - DNA, 20 bp, synthetic construct
  misc_feature 1..20: note = chemically synthesized
  source 1..20: mol_type = other DNA
catgtcttgaagtgtctccc

SEQ ID NO: 21175 - DNA, 20 bp, synthetic construct
  misc_feature 1..20: note = chemically synthesized
  source 1..20: mol_type = other DNA
tctcccttatgttttctttt

SEQ ID NO: 21176 - DNA, 20 bp, synthetic construct
  misc_feature 1..20: note = chemically synthesized
  source 1..20: mol_type = other DNA
atgttttcttttagtagttt

SEQ ID NO: 21177 - DNA, 20 bp, synthetic construct
  misc_feature 1..20: note = chemically synthesized
  source 1..20: mol_type = other DNA
cttttagtagttttatagtt

SEQ ID NO: 21178 - DNA, 20 bp, synthetic construct
  misc_feature 1..20: note = chemically synthesized
  source 1..20: mol_type = other DNA
gtctttaatccatcttgaga

SEQ ID NO: 21179 - DNA, 20 bp, synthetic construct
  misc_feature 1..20: note = chemically synthesized
  source 1..20: mol_type = other DNA
tattgtacaaggggttgagt

SEQ ID NO: 21180 - DNA, 20 bp, synthetic construct
  misc_feature 1..20: note = chemically synthesized
  source 1..20: mol_type = other DNA
tacaaggggttgagttcttg

SEQ ID NO: 21181 - DNA, 20 bp, synthetic construct
  misc_feature 1..20: note = chemically synthesized
  source 1..20: mol_type = other DNA
ctgttggtgtatagaagagt

SEQ ID NO: 21182 - DNA, 20 bp, synthetic construct
  misc_feature 1..20: note = chemically synthesized
  source 1..20: mol_type = other DNA
tgaattattttatcagttct

SEQ ID NO: 21183 - DNA, 20 bp, synthetic construct
  misc_feature 1..20: note = chemically synthesized
  source 1..20: mol_type = other DNA
gagctttctggaggagtctt

SEQ ID NO: 21184 - DNA, 20 bp, synthetic construct
  misc_feature 1..20: note = chemically synthesized
  source 1..20: mol_type = other DNA
tcatatcatcagcaaacagt

SEQ ID NO: 21185 - DNA, 20 bp, synthetic construct
  misc_feature 1..20: note = chemically synthesized
  source 1..20: mol_type = other DNA
tgacagtttgacttcctctt

SEQ ID NO: 21186 - DNA, 20 bp, synthetic construct
  misc_feature 1..20: note = chemically synthesized
  source 1..20: mol_type = other DNA
gatttgaatgccctttattt

SEQ ID NO: 21187 - DNA, 20 bp, synthetic construct
  misc_feature 1..20: note = chemically synthesized
  source 1..20: mol_type = other DNA
gccctttatttctttgtttt

SEQ ID NO: 21188 - DNA, 20 bp, synthetic construct
  misc_feature 1..20: note = chemically synthesized
  source 1..20: mol_type = other DNA
cttgttccagttctcagagg

SEQ ID NO: 21189 - DNA, 20 bp, synthetic construct
  misc_feature 1..20: note = chemically synthesized
  source 1..20: mol_type = other DNA
cattcaatattatgttggct

SEQ ID NO: 21190 - DNA, 20 bp, synthetic construct
  misc_feature 1..20: note = chemically synthesized
  source 1..20: mol_type = other DNA
ttggctgtgggtttgtcaca

SEQ ID NO: 21191 - DNA, 20 bp, synthetic construct
  misc_feature 1..20: note = chemically synthesized
  source 1..20: mol_type = other DNA
actgaggtatgtctcttgta

SEQ ID NO: 21192 - DNA, 20 bp, synthetic construct
  misc_feature 1..20: note = chemically synthesized
  source 1..20: mol_type = other DNA
cattttaatcataaatgtat

SEQ ID NO: 21193 - DNA, 20 bp, synthetic construct
  misc_feature 1..20: note = chemically synthesized
  source 1..20: mol_type = other DNA
aatgtatgctggattttgtt

SEQ ID NO: 21194 - DNA, 20 bp, synthetic construct
  misc_feature 1..20: note = chemically synthesized
  source 1..20: mol_type = other DNA
tattgagatgatcatgtaat

SEQ ID NO: 21195 - DNA, 20 bp, synthetic construct
  misc_feature 1..20: note = chemically synthesized
  source 1..20: mol_type = other DNA
catgtaatttttgtttttaa

SEQ ID NO: 21196 - DNA, 20 bp, synthetic construct
  misc_feature 1..20: note = chemically synthesized
  source 1..20: mol_type = other DNA
ccctgcatccctggcatgga

SEQ ID NO: 21197 - DNA, 20 bp, synthetic construct
  misc_feature 1..20: note = chemically synthesized
  source 1..20: mol_type = other DNA
catggaacctgcttgatcat

SEQ ID NO: 21198 - DNA, 20 bp, synthetic construct
  misc_feature 1..20: note = chemically synthesized
  source 1..20: mol_type = other DNA
ttggttatctagtattttgt

SEQ ID NO: 21199 - DNA, 20 bp, synthetic construct
  misc_feature 1..20: note = chemically synthesized
  source 1..20: mol_type = other DNA
gttcatcaaggctatcagtc

SEQ ID NO: 21200 - DNA, 20 bp, synthetic construct
  misc_feature 1..20: note = chemically synthesized
  source 1..20: mol_type = other DNA
cttttttggttatgtccttc

SEQ ID NO: 21201 - DNA, 20 bp, synthetic construct
  misc_feature 1..20: note = chemically synthesized
  source 1..20: mol_type = other DNA
ttccctggttttggtgtgat

SEQ ID NO: 21202 - DNA, 20 bp, synthetic construct
  misc_feature 1..20: note = chemically synthesized
  source 1..20: mol_type = other DNA
tttaattaccaattaaatct

SEQ ID NO: 21203 - DNA, 20 bp, synthetic construct
  misc_feature 1..20: note = chemically synthesized
  source 1..20: mol_type = other DNA
agctccagtgttaggtgcat

SEQ ID NO: 21204 - DNA, 20 bp, synthetic construct
  misc_feature 1..20: note = chemically synthesized
  source 1..20: mol_type = other DNA
agtgttaggtgcatatatgt

SEQ ID NO: 21205 - DNA, 20 bp, synthetic construct
  misc_feature 1..20: note = chemically synthesized
  source 1..20: mol_type = other DNA
tctttgtctcttttaactgc

SEQ ID NO: 21206 - DNA, 20 bp, synthetic construct
  misc_feature 1..20: note = chemically synthesized
  source 1..20: mol_type = other DNA
tcttttaactgctgttgctt

(The sequence listing continues in the following parts.)

1. A method for editing the glucose-6-phosphatase, catalytic (G6PC) gene in a human cell by genome editing, the method comprising the step of: introducing into the human cell one or more deoxyribonucleic acid (DNA) endonucleases and one or more guide ribonucleic acids (gRNAs) comprising a spacer sequence comprising an RNA sequence corresponding to a sequence selected from the group consisting of SEQ ID NOs: 57,319, 57,306, 52,935, 57,305, 52,938, 52,940, 57,296, 52,951, 52,918, 57,320, 52,919, 52,923, 57,308, 57,295, 56,893, 53,372, 53,374, 56,890, 56,883, 56,881, 53,380, 56,879, 56,878, 53,382, 56,876, 56,865, 56,863, 56,909, 56,898, 53,370, 56,860, 55,845, 55,842, 54,541, 55,820, 54,560, 53,360, 53,362, 59,984, 53,358, 55,838, 52,962, 53,369, 57,300, 52,910, 57,321, 57,312, 52,939, 57,299, 52,944, 52,957, 57,274, 53,364, 53,373, 53,375, 56,882, 56,873, 53,392, 53,403, 53,363, 54,506, 55,875, 55,874, 55,873, 55,872, 54,511, 55,861, 55,837, 54,542, 54,544, 54,558, 64,798, 64,799, 64,801, 56,893, 64,808, 64,809, 64,810, 64,811, 64,812, 64,813, 53,372, and 64,816;
thereby to effect one or more single-strand breaks (SSBs) or double-strand breaks (DSBs) within or near the G6PC gene or other DNA sequences that encode regulatory elements of the G6PC gene.

2.-24. (canceled)

25. The method of claim 1, wherein the one or more DNA endonucleases is a Cas1, Cas1B, Cas2, Cas3, Cas4, Cas5, Cas6, Cas7, Cas8, Cas9 (also known as Csn1 and Csx12), Cas100, Csy1, Csy2, Csy3, Cse1, Cse2, Csc1, Csc2, Csa5, Csn2, Csm2, Csm3, Csm4, Csm5, Csm6, Cmr1, Cmr3, Cmr4, Cmr5, Cmr6, Csb1, Csb2, Csb3, Csx17, Csx14, Csx10, Csx16, CsaX, Csx3, Csx1, Csx15, Csf1, Csf2, Csf3, Csf4, or Cpf1 endonuclease; or a homolog thereof, recombination of the naturally occurring molecule, codon-optimized, or modified version thereof, and combinations thereof.

26. The method of claim 25, wherein the method comprises introducing into the cell one or more polynucleotides encoding the one or more DNA endonucleases.

27. The method of claim 25, wherein the method comprises introducing into the cell one or more ribonucleic acids (RNAs) encoding the one or more DNA endonucleases.

28. The method of claim 27, wherein the one or more RNAs is one or more modified RNAs.

29. (canceled)

30. (canceled)

31. The method of claim 1, wherein the one or more gRNAs are single-molecule guide RNA (sgRNAs).

32. The method of claim 31, wherein the one or more gRNAs or the one or more sgRNAs is one or more modified gRNAs or one or more modified sgRNAs.

33. The method of claim 31, wherein the one or more DNA endonucleases is pre-complexed with the one or more gRNAs or the one or more sgRNAs.

34. The method of claim 1, wherein the method further comprises introducing into the cell a polynucleotide donor template comprising at least a portion of the wild-type G6PC gene or cDNA.

35. The method of claim 34, wherein the at least a portion of the wild-type G6PC gene or cDNA is one or more of:
(i) exon 1, exon 2, exon 3, exon 4, exon 5, intronic regions, fragments or combinations thereof,
(ii) the entire G6PC gene, and
(iii) DNA sequences that encode wild-type regulatory elements of the G6PC gene, or CDNA.

36. (canceled)

37. The method of claim 34, wherein the donor template has homologous arms to the 17q21 region of the human genome.

38.-47. (canceled)

48. The method of claim 1, wherein the one or more gRNAs are directed to one or more of the following pathological variants: rs80356479, rs80356486, rs606231368, rs80356488, rs587776757, rs104894565, rs104894566, rs1801175, rs1801176, rs104894567, rs104894571, rs80356482, rs80356483, rs104894563, rs367727229, rs387906505, rs104894568, rs104894569, rs80356487, rs764920787, rs80356485, rs780226142, and rs80356484.

49. The method of claim 34, wherein the at least a portion the wild-type G6PC gene or cDNA is inserted into the G6PC gene locus by homology directed repair (HDR), thereby restoring glucose-6-phosphatase protein activity.

50. The method of claim 26, wherein the one or more polynucleotides encoding the one or more DNA endonucleases and the one or more gRNAs are either each formulated into separate lipid nanoparticles or exosomes or all co-formulated into a lipid nanoparticle or an exosome.

51.-59. (canceled)

60. The method of claim 1, wherein the human cell is a liver cell.

61. (canceled)

62. The method of claim 34, wherein the at least a portion of the wild-type G6PC gene or cDNA is operably linked to an exogenous promoter that drives expression of the G6PC gene.

63. The method of claim 1, wherein the one or more SSBs or DSBs occurs at a location immediately 3′ to an endogenous promoter locus.

64.-67. (canceled)

68. The method of claim 1, comprising introducing into the human cell a polynucleotide donor template comprising a nucleic acid sequence comprising at least a portion of the wild-type G6PC gene.

69. The method of claim 68, wherein the polynucleotide donor template comprises one or more of:
(a) at least a fragment of an exon of the G6PC gene;
(b) at least a fragment of an intron of the G6PC gene;
(c) at least a fragment of a regulatory element of the G6PC gene;
(d) the complete CDS of the G6PC gene; and
(e) at least 40 nucleotides of the first exon of the G6PC gene, the complete CDS of the G6PC gene and the 3′UTR of the G6PC gene.
